United States Patent Application Publication US 2026/0226133 A1 - sequence listing, part 11

SEQ ID NO: 20819 - protein, 940 aa, synthetic construct
MALPVTALLLPLALLLHAARPELQSVLTQPPSASGTPGQRVTISCSGSSSNIGSNYVNWYQQLPGTAPKLLIYGDYQRPSGVPDRFSGSKSGTSASLAISGLRSEDEADYYCATRDDSLSGSVVFGTGTKLTVLGLEGKPIPNPLLGLDSTGSGEDLKNVFPPEVAVFEPSEAEISHTQKATLVCLATGFYPDHVELSWWVNGKEVHSGVSTDPQPLKEQPALNDSRYCLSSRLRVSATFWQNPRNHFRCQVQFYGLSENDEWTQDRAKPVTQIVSAEAWGRADCGSQSFGLLDPKLCYLLDGILFIYGVILTALFLKRGRKKLLYIFKQPFMRPVQTTQEEDGCSCRFPEEEEGGCELRVKFSRSADAPAYQQGQNQLYNELNLGRREEYDVLDKRRGRDPEMGGKPQRRKNPQEGLYNELQKDKMAEAYSEIGMKGERRRGKGHDGLYQGLSTATKDTYDALHMQALPPRRAKRSGSGATNFSLLKQAGDVEENPGPTSMDWIWRILFLVGAATGAHSFEEVQLVQSGAEVKKPGESLKISCKGSGYGFTSYWIGWVRQMPGKGLEWMGIIHPDDSDTKYSPSFQGQVTISADKSISTAYLQWSSLKASDTAMYYCASSYLRGLWGGYFDFWGQGTLVTVSSTREQKLISEEDLGSGIQNPDPAVYQLRDSKSSDKSVCLFTDFDSQTNVSQSKDSDVYITDKTVLDMRSMDFKSNSAVAWSNKSDFACANAFNNSIIPEDTFFPSPESSCGTQSFGLLDPKLCYLLDGILFIYGVILTALFLKRGRKKLLYIFKQPFMRPVQTTQEEDGCSCRFPEEEEGGCELRVKFSRSADAPAYQQGQNQLYNELNLGRREEYDVLDKRRGRDPEMGGKPQRRKNPQEGLYNELQKDKMAEAYSEIGMKGERRRGKGHDGLYQGLSTATKDTYDALHMQALPPR

SEQ ID NO: 20820 - protein, 830 aa, synthetic construct
MALPVTALLLPLALLLHAARPELQSVLTQPPSASGTPGQRVTISCSGSSSNIGSNYVNWYQQLPGTAPKLLIYGDYQRPSGVPDRFSGSKSGTSASLAISGLRSEDEADYYCATRDDSLSGSVVFGTGTKLTVLGLEQSFGLLDPKLCYLLDGILFIYGVILTALFLRVKFSRSADAPAYQQGQNQLYNELNLGRREEYDVLDKRRGRDPEMGGKPQRRKNPQEGLYNELQKDKMAEAYSEIGMKGERRRGKGHDGLYQGLSTATKDTYDALHMQALPPRRAKRSGSGATNFSLLKQAGDVEENPGPTSMDWIWRILFLVGAATGAHSFEEVQLVQSGAEVKKPGESLKISCKGSGYGFTSYWIGWVRQMPGKGLEWMGIIHPDDSDTKYSPSFQGQVTISADKSISTAYLQWSSLKASDTAMYYCASSYLRGLWGGYFDFWGQGTLVTVSSTRQSFGLLDPKLCYLLDGILFIYGVILTALFLRVKFSRSADAPAYQQGQNQLYNELNLGRREEYDVLDKRRGRDPEMGGKPQRRKNPQEGLYNELQKDKMAEAYSEIGMKGERRRGKGHDGLYQGLSTATKDTYDALHMQALPPRRAKRSGSGVKQTLNFDLLKLAGDVESNPGPSRGHMTEYKPTVRLATRDDVPRAVRTLAAAFADYPATRHTVDPDRHIERVTELQELFLTRVGLDIGKVWVADDGAAVAVWTTPESVEAGAVFAEIGPRMAELSGSRLAAQQQMEGLLAPHRPKEPAWFLATVGVSPDHQGKGLGSAVVLPGVEAAERAGVPAFLETSAPRNLPFYERLGFTVTADVEVPEGPRTWCMTRKPGA

SEQ ID NO: 20821 - protein, 655 aa, synthetic construct
MALPVTALLLPLALLLHAARPELQSVLTQPPSASGTPGQRVTISCSGSSSNIGSNYVNWYQQLPGTAPKLLIYGDYQRPSGVPDRFSGSKSGTSASLAISGLRSEDEADYYCATRDDSLSGSVVFGTGTKLTVLGLEGQPKANPTVTLFPPSSEELQANKATLVCLISDFYPGAVTVAWKADGSPVKAGVETTKPSKQSNNKYAASSYLSLTPEQWKSHRSYSCQVTHEGSTVEKTVAPTECSPIKTDVITMDPKDNCSKDANDTLLLQLTNTSAYYMYLLLLLKSVVYFAIITCCLLRRTAFCCNGEKSRAKRSGSGATNFSLLKQAGDVEENPGPTSMDWIWRILFLVGAATGAHSFEEVQLVQSGAEVKKPGESLKISCKGSGYGFTSYWIGWVRQMPGKGLEWMGIIHPDDSDTKYSPSFQGQVTISADKSISTAYLQWSSLKASDTAMYYCASSYLRGLWGGYFDFWGQGTLVTVSSTRASTKGPSVFPLAPSSKSTSGGTAALGCLVKDYFPEPVTVSWNSGALTSGVHTFPAVLQSSGLYSLSSVVTVPSSSLGTQTYICNVNHKPSNTKVDKRVEPKSCEVKTDSTDHVKPKETENTKQPSKSCHKPKAIVHTEKVNMMSLTVLGLRMLFAKTVAVNFLLTAKLFFL

SEQ ID NO: 20822 - protein, 633 aa, synthetic construct
MALPVTALLLPLALLLHAARPELQSVLTQPPSASGTPGQRVTISCSGSSSNIGSNYVNWYQQLPGTAPKLLIYGDYQRPSGVPDRFSGSKSGTSASLAISGLRSEDEADYYCATRDDSLSGSVVFGTGTKLTVLGLEGQPKANPTVTLFPPSSEELQANKATLVCLISDFYPGAVTVAWKADGSPVKAGVETTKPSKQSNNKYAASSYLSLTPEQWKSHRSYSCQVTHEGSTVEKTVAPTECSGRADCGITSASYHQGVLSATILYEILLGKATLYAVLVSALVLMAMVKRKDSRGRAKRSGSGATNFSLLKQAGDVEENPGPTSMDWIWRILFLVGAATGAHSFEEVQLVQSGAEVKKPGESLKISCKGSGYGFTSYWIGWVRQMPGKGLEWMGIIHPDDSDTKYSPSFQGQVTISADKSISTAYLQWSSLKASDTAMYYCASSYLRGLWGGYFDFWGQGTLVTVSSTRASTKGPSVFPLAPSSKSTSGGTAALGCLVKDYFPEPVTVSWNSGALTSGVHTFPAVLQSSGLYSLSSVVTVPSSSLGTQTYICNVNHKPSNTKVDKRVEPKSCIPEDTFFPSSDVPCDVKLVEKSFETDTNLNFQNLSVIGFRILLLKVAGFNLLMTLRLWSS

SEQ ID NO: 20823 - protein, 633 aa, synthetic construct
MALPVTALLLPLALLLHAARPELQSVLTQPPSASGTPGQRVTISCSGSSSNIGSNYVNWYQQLPGTAPKLLIYGDYQRPSGVPDRFSGSKSGTSASLAISGLRSEDEADYYCATRDDSLSGSVVFGTGTKLTVLGLEGQPKANPTVTLFPPSSEELQANKATLVCLISDFYPGAVTVAWKADGSPVKAGVETTKPSKQSNNKYAASSYLSLTPEQWKSHRSYSCQVTHEGSTVEKTVAPTECSGRADCGFTSESYQQGVLSATILYEILLGKATLYAVLVSALVLMAMVKRKDSRGRAKRSGSGATNFSLLKQAGDVEENPGPTSMDWIWRILFLVGAATGAHSFEEVQLVQSGAEVKKPGESLKISCKGSGYGFTSYWIGWVRQMPGKGLEWMGIIHPDDSDTKYSPSFQGQVTISADKSISTAYLQWSSLKASDTAMYYCASSYLRGLWGGYFDFWGQGTLVTVSSTRASTKGPSVFPLAPSSKSTSGGTAALGCLVKDYFPEPVTVSWNSGALTSGVHTFPAVLQSSGLYSLSSVVTVPSSSLGTQTYICNVNHKPSNTKVDKRVEPKSCIPEDTFFPSPESSCDVKLVEKSFETDTNLNFQNLSVIGFRILLLKVAGFNLLMTLRLWSS

SEQ ID NO: 20824 - protein, 459 aa, synthetic construct
MALPVTALLLPLALLLHAARPELQSVLTQPPSASGTPGQRVTISCSGSSSNIGSNYVNWYQQLPGTAPKLLIYGDYQRPSGVPDRFSGSKSGTSASLAISGLRSEDEADYYCATRDDSLSGSVVFGTGTKLTVLGGGGGSGGGGSGGGGSEVQLVQSGAEVKKPGESLKISCKGSGYGFTSYWIGWVRQMPGKGLEWMGIIHPDDSDTKYSPSFQGQVTISADKSISTAYLQWSSLKASDTAMYYCASSYLRGLWGGYFDFWGQGTLVTVSSTRDGNEEMGGITQTPYKVSISGTTVILTCPQYPGSEILWQHNDKNIGGDEDDKNIGSDEDHLSLKEFSELEQSGYYVCYPRGSKPEDANFYLYLRARVCENCMEMDVMSVATIVIVDICITGGLLLLVYYWSKNRKAKAKPVTRGAGAGGRQRGQNKERPPPVPNPDYEPIRKGQRDLYSGLNQRRI

SEQ ID NO: 20825 - protein, 424 aa, synthetic construct
MALPVTALLLPLALLLHAARPELQSVLTQPPSASGTPGQRVTISCSGSSSNIGSNYVNWYQQLPGTAPKLLIYGDYQRPSGVPDRFSGSKSGTSASLAISGLRSEDEADYYCATRDDSLSGSVVFGTGTKLTVLGGGGGSGGGGSGGGGSEVQLVQSGAEVKKPGESLKISCKGSGYGFTSYWIGWVRQMPGKGLEWMGIIHPDDSDTKYSPSFQGQVTISADKSISTAYLQWSSLKASDTAMYYCASSYLRGLWGGYFDFWGQGTLVTVSSTRFKIPIEELEDRVFVNCNTSITWVEGTVGTLLSDITRLDLGKRILDPRGIYRCNGTDIYKDKESTVQVHYRMCQSCVELDPATVAGIIVTDVIATLLLALGVFCFAGHETGRLSGAADTQALLRNDQVYQPLRDRDDAQYSHLGGNWARNK

SEQ ID NO: 20826 - protein, 434 aa, synthetic construct
MALPVTALLLPLALLLHAARPELQSVLTQPPSASGTPGQRVTISCSGSSSNIGSNYVNWYQQLPGTAPKLLIYGDYQRPSGVPDRFSGSKSGTSASLAISGLRSEDEADYYCATRDDSLSGSVVFGTGTKLTVLGGGGGSGGGGSGGGGSEVQLVQSGAEVKKPGESLKISCKGSGYGFTSYWIGWVRQMPGKGLEWMGIIHPDDSDTKYSPSFQGQVTISADKSISTAYLQWSSLKASDTAMYYCASSYLRGLWGGYFDFWGQGTLVTVSSTRQSIKGNHLVKVYDYQEDGSVLLTCDAEAKNITWFKDGKMIGFLTEDKKKWNLGSNAKDPRGMYQCKGSQNKSKPLQVYYRMCQNCIELNAATISGFLFAEIVSIFVLAVGVYFIAGQDGVRQSRASDKQTLLPNDQLYQPLKDREDDQYSHLQGNQLRRN

SEQ ID NO: 20827 - protein, 417 aa, synthetic construct
MALPVTALLLPLALLLHAARPELQSVLTQPPSASGTPGQRVTISCSGSSSNIGSNYVNWYQQLPGTAPKLLIYGDYQRPSGVPDRFSGSKSGTSASLAISGLRSEDEADYYCATRDDSLSGSVVFGTGTKLTVLGGGGGSGGGGSGGGGSEVQLVQSGAEVKKPGESLKISCKGSGYGFTSYWIGWVRQMPGKGLEWMGIIHPDDSDTKYSPSFQGQVTISADKSISTAYLQWSSLKASDTAMYYCASSYLRGLWGGYFDFWGQGTLVTVSSTRQSFGLLDPKLCYLLDGILFIYGVILTALFLRVKFSRSADAPAYQQGQNQLYNELNLGRREEYDVLDKRRGRDPEMGGKPQRRKNPQEGLYNELQKDKMAEAYSEIGMKGERRRGKGHDGLYQGLSTATKDTYDALHMQALPPR

SEQ ID NO: 20828 - protein, 459 aa, synthetic construct
MALPVTALLLPLALLLHAARPEVQLVQSGAEVKKPGESLKISCKGSGYGFTSYWIGWVRQMPGKGLEWMGIIHPDDSDTKYSPSFQGQVTISADKSISTAYLQWSSLKASDTAMYYCASSYLRGLWGGYFDFWGQGTLVTVSSGGGGSGGGGSGGGGSELQSVLTQPPSASGTPGQRVTISCSGSSSNIGSNYVNWYQQLPGTAPKLLIYGDYQRPSGVPDRFSGSKSGTSASLAISGLRSEDEADYYCATRDDSLSGSVVFGTGTKLTVLGTRDGNEEMGGITQTPYKVSISGTTVILTCPQYPGSEILWQHNDKNIGGDEDDKNIGSDEDHLSLKEFSELEQSGYYVCYPRGSKPEDANFYLYLRARVCENCMEMDVMSVATIVIVDICITGGLLLLVYYWSKNRKAKAKPVTRGAGAGGRQRGQNKERPPPVPNPDYEPIRKGQRDLYSGLNQRRI

SEQ ID NO: 20829 - protein, 424 aa, synthetic construct
MALPVTALLLPLALLLHAARPEVQLVQSGAEVKKPGESLKISCKGSGYGFTSYWIGWVRQMPGKGLEWMGIIHPDDSDTKYSPSFQGQVTISADKSISTAYLQWSSLKASDTAMYYCASSYLRGLWGGYFDFWGQGTLVTVSSGGGGSGGGGSGGGGSELQSVLTQPPSASGTPGQRVTISCSGSSSNIGSNYVNWYQQLPGTAPKLLIYGDYQRPSGVPDRFSGSKSGTSASLAISGLRSEDEADYYCATRDDSLSGSVVFGTGTKLTVLGTRFKIPIEELEDRVFVNCNTSITWVEGTVGTLLSDITRLDLGKRILDPRGIYRCNGTDIYKDKESTVQVHYRMCQSCVELDPATVAGIIVTDVIATLLLALGVFCFAGHETGRLSGAADTQALLRNDQVYQPLRDRDDAQYSHLGGNWARNK

SEQ ID NO: 20830 - protein, 434 aa, synthetic construct
MALPVTALLLPLALLLHAARPEVQLVQSGAEVKKPGESLKISCKGSGYGFTSYWIGWVRQMPGKGLEWMGIIHPDDSDTKYSPSFQGQVTISADKSISTAYLQWSSLKASDTAMYYCASSYLRGLWGGYFDFWGQGTLVTVSSGGGGSGGGGSGGGGSELQSVLTQPPSASGTPGQRVTISCSGSSSNIGSNYVNWYQQLPGTAPKLLIYGDYQRPSGVPDRFSGSKSGTSASLAISGLRSEDEADYYCATRDDSLSGSVVFGTGTKLTVLGTRQSIKGNHLVKVYDYQEDGSVLLTCDAEAKNITWFKDGKMIGFLTEDKKKWNLGSNAKDPRGMYQCKGSQNKSKPLQVYYRMCQNCIELNAATISGFLFAEIVSIFVLAVGVYFIAGQDGVRQSRASDKQTLLPNDQLYQPLKDREDDQYSHLQGNQLRRN

SEQ ID NO: 20831 - protein, 417 aa, synthetic construct
MALPVTALLLPLALLLHAARPEVQLVQSGAEVKKPGESLKISCKGSGYGFTSYWIGWVRQMPGKGLEWMGIIHPDDSDTKYSPSFQGQVTISADKSISTAYLQWSSLKASDTAMYYCASSYLRGLWGGYFDFWGQGTLVTVSSGGGGSGGGGSGGGGSELQSVLTQPPSASGTPGQRVTISCSGSSSNIGSNYVNWYQQLPGTAPKLLIYGDYQRPSGVPDRFSGSKSGTSASLAISGLRSEDEADYYCATRDDSLSGSVVFGTGTKLTVLGTRQSFGLLDPKLCYLLDGILFIYGVILTALFLRVKFSRSADAPAYQQGQNQLYNELNLGRREEYDVLDKRRGRDPEMGGKPQRRKNPQEGLYNELQKDKMAEAYSEIGMKGERRRGKGHDGLYQGLSTATKDTYDALHMQALPPR

SEQ ID NO: 20832 - protein, 512 aa, synthetic construct
MALPVTALLLPLALLLHAARPELQSVLTQPPSASGTPGQRVTISCSGSSSNIGSNYVNWYQQLPGTAPKLLIYGDYQRPSGVPDRFSGSKSGTSASLAISGLRSEDEADYYCATRDDSLSGSVVFGTGTKLTVLGGGGGSGGGGSGGGGSEVQLVQSGAEVKKPGESLKISCKGSGYGFTSYWIGWVRQMPGKGLEWMGIIHPDDSDTKYSPSFQGQVTISADKSISTAYLQWSSLKASDTAMYYCASSYLRGLWGGYFDFWGQGTLVTVSSTRGMRTEDLPKAVVFLEPQWYRVLEKDSVTLKCQGAYSPEDNSTQWFHNESLISSQASSYFIDAATVDDSGEYRCQTNLSTLSDPVQLEVHIGWLLLQAPRWVFKEEDPIHLRCHSWKNTALHKVTYLQNGKGRKYFHHNSDFYIPKATLKDSGSYFCRGLVGSKNVSSETVNITITQGLAVPTISSFFPPGYQVSFCLVMVLLFAVDTGLYFSVKTNIRSSTRDWKDHKFKWRKDPQDK

SEQ ID NO: 20833 - protein, 794 aa, synthetic construct
MALPVTALLLPLALLLHAARPELQSVLTQPPSASGTPGQRVTISCSGSSSNIGSNYVNWYQQLPGTAPKLLIYGDYQRPSGVPDRFSGSKSGTSASLAISGLRSEDEADYYCATRDDSLSGSVVFGTGTKLTVLGGGGGSGGGGSGGGGSEVQLVQSGAEVKKPGESLKISCKGSGYGFTSYWIGWVRQMPGKGLEWMGIIHPDDSDTKYSPSFQGQVTISADKSISTAYLQWSSLKASDTAMYYCASSYLRGLWGGYFDFWGQGTLVTVSSTRGGSGQQQTLPKPFIWAEPHFMVPKEKQVTICCQGNYGAVEYQLHFEGSLFAVDRPKPPERINKVQFYIPDMNSRMAGQYSCIYRVGELWSEPSNLLDLVVTEMYDTPTLSVHPGPEVISGEKVTFYCRLDTATSMFLLLKEGRSSHVQRGYGKVQAEFPLGPVTTAHRGTYRCFGSYNNHAWSFPSEPVKLLVTGDIENTSLAPEDPTFPADTWGTYLLTTETGLQKDHALWDHTAQNLLRMGLAFLVLVALVWFLVEDWLSRKRTRERASRASTWEGRRRLNTQTLRAKRSGSGVKQTLNFDLLKLAGDVESNPGPSRGHMTEYKPTVRLATRDDVPRAVRTLAAAFADYPATRHTVDPDRHIERVTELQELFLTRVGLDIGKVWVADDGAAVAVWTTPESVEAGAVFAEIGPRMAELSGSRLAAQQQMEGLLAPHRPKEPAWFLATVGVSPDHQGKGLGSAVVLPGVEAAERAGVPAFLETSAPRNLPFYERLGFTVTADVEVPEGPRTWCMTRKPGA

SEQ ID NO: 20834 - protein, 627 aa, synthetic construct
MALPVTALLLPLALLLHAARPELQSVLTQPPSASGTPGQRVTISCSGSSSNIGSNYVNWYQQLPGTAPKLLIYGDYQRPSGVPDRFSGSKSGTSASLAISGLRSEDEADYYCATRDDSLSGSVVFGTGTKLTVLGGGGGSGGGGSGGGGSEVQLVQSGAEVKKPGESLKISCKGSGYGFTSYWIGWVRQMPGKGLEWMGIIHPDDSDTKYSPSFQGQVTISADKSISTAYLQWSSLKASDTAMYYCASSYLRGLWGGYFDFWGQGTLVTVSSTRKIEVMYPPPYLDNEKSNGTIIHVKGARGDIENTSLAPEDPTFPADTWGTYLLTTETGLQKDHALWDHTAQNLLRMGLAFLVLVALVWFLVEDWLSRKRTRERASRASTWEGRRRLNTQTLRAKRSGSGVKQTLNFDLLKLAGDVESNPGPSRGHMTEYKPTVRLATRDDVPRAVRTLAAAFADYPATRHTVDPDRHIERVTELQELFLTRVGLDIGKVWVADDGAAVAVWTTPESVEAGAVFAEIGPRMAELSGSRLAAQQQMEGLLAPHRPKEPAWFLATVGVSPDHQGKGLGSAVVLPGVEAAERAGVPAFLETSAPRNLPFYERLGFTVTADVEVPEGPRTWCMTRKPGA

SEQ ID NO: 20835 - protein, 714 aa, synthetic construct
MALPVTALLLPLALLLHAARPELQSVLTQPPSASGTPGQRVTISCSGSSSNIGSNYVNWYQQLPGTAPKLLIYGDYQRPSGVPDRFSGSKSGTSASLAISGLRSEDEADYYCATRDDSLSGSVVFGTGTKLTVLGGGGGSGGGGSGGGGSEVQLVQSGAEVKKPGESLKISCKGSGYGFTSYWIGWVRQMPGKGLEWMGIIHPDDSDTKYSPSFQGQVTISADKSISTAYLQWSSLKASDTAMYYCASSYLRGLWGGYFDFWGQGTLVTVSSTRLWVSQPPEIRTLEGSSAFLPCSFNASQGRLAIGSVTWFRDEVVPGKEVRNGTPEFRGRLAPLASSRFLHDHQAELHIRDVRGHDASIYVCRVEVLGLGVGTGNGTRLVVEKEHPQLGAGTVLLLRAGFYAVSFLSVAVGSTVYYQGKCLTWKGPRRQLPAVVPAPLPPPCGSSAHLLPPVPGGRAKRSGSGVKQTLNFDLLKLAGDVESNPGPSRMYRMQLLSCIALSLALVTNSAPTSSSTKKTQLQLEHLLLDLQMILNGINNYKNPKLTEMLTAKFYMPKKATELKHLQCLEEELKPLEEVLNLAQSKNFHLRPRDLISNINVIVLELKGSETTFMCEYADETATIVEFLNRWITFCQSIISTLTKIEVMYPPPYLDNEKSNGTIIHVKGKHLCPSPLFPGPSKPFWVLVVVGGVLACYSLLVTVAFIIFWVRSKRS

SEQ ID NO: 20836 - protein, 690 aa, synthetic construct
MALPVTALLLPLALLLHAARPELQSVLTQPPSASGTPGQRVTISCSGSSSNIGSNYVNWYQQLPGTAPKLLIYGDYQRPSGVPDRFSGSKSGTSASLAISGLRSEDEADYYCATRDDSLSGSVVFGTGTKLTVLGGGGGSGGGGSGGGGSEVQLVQSGAEVKKPGESLKISCKGSGYGFTSYWIGWVRQMPGKGLEWMGIIHPDDSDTKYSPSFQGQVTISADKSISTAYLQWSSLKASDTAMYYCASSYLRGLWGGYFDFWGQGTLVTVSSTRLWVSQPPEIRTLEGSSAFLPCSFNASQGRLAIGSVTWFRDEVVPGKEVRNGTPEFRGRLAPLASSRFLHDHQAELHIRDVRGHDASIYVCRVEVLGLGVGTGNGTRLVVEKEHPQLGAGTVLLLRAGFYAVSFLSVAVGSTVYYQGKCLTWKGPRRQLPAVVPAPLPPPCGSSAHLLPPVPGGRAKRSGSGVKQTLNFDLLKLAGDVESNPGPSRGHMTEYKPTVRLATRDDVPRAVRTLAAAFADYPATRHTVDPDRHIERVTELQELFLTRVGLDIGKVWVADDGAAVAVWTTPESVEAGAVFAEIGPRMAELSGSRLAAQQQMEGLLAPHRPKEPAWFLATVGVSPDHQGKGLGSAVVLPGVEAAERAGVPAFLETSAPRNLPFYERLGFTVTADVEVPEGPRTWCMTRKPGA

SEQ ID NO: 20837 - protein, 366 aa, synthetic construct
MALPVTALLLPLALLLHAARPELQSVLTQPPSASGTPGQRVTISCSGSSSNIGSNYVNWYQQLPGTAPKLLIYGDYQRPSGVPDRFSGSKSGTSASLAISGLRSEDEADYYCATRDDSLSGSVVFGTGTKLTVLGGGGGSGGGGSGGGGSEVQLVQSGAEVKKPGESLKISCKGSGYGFTSYWIGWVRQMPGKGLEWMGIIHPDDSDTKYSPSFQGQVTISADKSISTAYLQWSSLKASDTAMYYCASSYLRGLWGGYFDFWGQGTLVTVSSTRKIEVMYPPPYLDNEKSNGTIIHVKGARITQGLAVSTISSFFPPGYQVSFCLVMVLLFAVDTGLYFSVKTNIRSSTRDWKDHKFKWRKDPQDK

SEQ ID NO: 20838 - protein, 366 aa, synthetic construct
MALPVTALLLPLALLLHAARPELQSVLTQPPSASGTPGQRVTISCSGSSSNIGSNYVNWYQQLPGTAPKLLIYGDYQRPSGVPDRFSGSKSGTSASLAISGLRSEDEADYYCATRDDSLSGSVVFGTGTKLTVLGGGGGSGGGGSGGGGSEVQLVQSGAEVKKPGESLKISCKGSGYGFTSYWIGWVRQMPGKGLEWMGIIHPDDSDTKYSPSFQGQVTISADKSISTAYLQWSSLKASDTAMYYCASSYLRGLWGGYFDFWGQGTLVTVSSTRKIEVMYPPPYLDNEKSNGTIIHVKGARITQGLAVPTISSFFPPGYQVSFCLVMVLLFAVDTGLYFSVKTNIRSSTRDWKDHKFKWRKDPQDK

SEQ ID NO: 20839 - protein, 345 aa, synthetic construct
MALPVTALLLPLALLLHAARPELQSVLTQPPSASGTPGQRVTISCSGSSSNIGSNYVNWYQQLPGTAPKLLIYGDYQRPSGVPDRFSGSKSGTSASLAISGLRSEDEADYYCATRDDSLSGSVVFGTGTKLTVLGGGGGSGGGGSGGGGSEVQLVQSGAEVKKPGESLKISCKGSGYGFTSYWIGWVRQMPGKGLEWMGIIHPDDSDTKYSPSFQGQVTISADKSISTAYLQWSSLKASDTAMYYCASSYLRGLWGGYFDFWGQGTLVTVSSTRKIEVMYPPPYLDNEKSNGTIIHVKGARITQGLAVSTISSFSPPGYQVSFCLVMVLLFAVDTGLYFSVKTNI

SEQ ID NO: 20840 - protein, 376 aa, synthetic construct
MALPVTALLLPLALLLHAARPELQSVLTQPPSASGTPGQRVTISCSGSSSNIGSNYVNWYQQLPGTAPKLLIYGDYQRPSGVPDRFSGSKSGTSASLAISGLRSEDEADYYCATRDDSLSGSVVFGTGTKLTVLGGGGGSGGGGSGGGGSEVQLVQSGAEVKKPGESLKISCKGSGYGFTSYWIGWVRQMPGKGLEWMGIIHPDDSDTKYSPSFQGQVTISADKSISTAYLQWSSLKASDTAMYYCASSYLRGLWGGYFDFWGQGTLVTVSSTRKIEVMYPPPYLDNEKSNGTIIHVKGARVEKEHPQLGAGTVLLLRAGFYAVSFLSVAVGSTVYYQGKCLTWKGPRRQLPAVVPAPLPPPCGSSAHLLPPVPGG

SEQ ID NO: 20841 - protein, 457 aa, synthetic construct
MALPVTALLLPLALLLHAARPELQSVLTQPPSASGTPGQRVTISCSGSSSNIGSNYVNWYQQLPGTAPKLLIYGDYQRPSGVPDRFSGSKSGTSASLAISGLRSEDEADYYCATRDDSLSGSVVFGTGTKLTVLGGGGGSGGGGSGGGGSEVQLVQSGAEVKKPGESLKISCKGSGYGFTSYWIGWVRQMPGKGLEWMGIIHPDDSDTKYSPSFQGQVTISADKSISTAYLQWSSLKASDTAMYYCASSYLRGLWGGYFDFWGQGTLVTVSSTRKIEVMYPPPYLDNEKSNGTIIHVKGARKSVRFYLVVSPASASTQTSWTPRDLVSSQTQTQSCVPPTAGARQAPESPSTIPVPSQPQNSTLRPGPAAPIALVPVFCGLLVAKSLVLSALLVWWGDIWWKTMMELRSLDTQKATCHLQQVTDLPWTSVSSPVEREILYHTVARTKISDDDDEHTL

SEQ ID NO: 20842 - protein, 394 aa, synthetic construct
MALPVTALLLPLALLLHAARPELQSVLTQPPSASGTPGQRVTISCSGSSSNIGSNYVNWYQQLPGTAPKLLIYGDYQRPSGVPDRFSGSKSGTSASLAISGLRSEDEADYYCATRDDSLSGSVVFGTGTKLTVLGGGGGSGGGGSGGGGSEVQLVQSGAEVKKPGESLKISCKGSGYGFTSYWIGWVRQMPGKGLEWMGIIHPDDSDTKYSPSFQGQVTISADKSISTAYLQWSSLKASDTAMYYCASSYLRGLWGGYFDFWGQGTLVTVSSTRKIEVMYPPPYLDNEKSNGTIIHVKGARGDIENTSLAPEDPTFPADTWGTYLLTTETGLQKDHALWDHTAQNLLRMGLAFLVLVALVWFLVEDWLSRKRTRERASRASTWEGRRRLNTQTL

SEQ ID NO: 20843 - protein, 990 aa, synthetic construct
MALPVTALLLPLALLLHAARPELQSVLTQPPSASGTPGQRVTISCSGSSSNIGSNYVNWYQQLPGTAPKLLIYGDYQRPSGVPDRFSGSKSGTSASLAISGLRSEDEADYYCATRDDSLSGSVVFGTGTKLTVLGLEGQPKANPTVTLFPPSSEELQANKATLVCLISDFYPGAVTVAWKADGSPVKAGVETTKPSKQSNNKYAASSYLSLTPEQWKSHRSYSCQVTHEGSTVEKTVAPTECSGSQSFGLLDPKLCYLLDGILFIYGVILTALFLRVKFSRSADAPAYQQGQNQLYNELNLGRREEYDVLDKRRGRDPEMGGKPQRRKNPQEGLYNELQKDKMAEAYSEIGMKGERRRGKGHDGLYQGLSTATKDTYDALHMQALPPRRAKRSGSGATNFSLLKQAGDVEENPGPTSMDWIWRILFLVGAATGAHSFEEVQLVQSGAEVKKPGESLKISCKGSGYGFTSYWIGWVRQMPGKGLEWMGIIHPDDSDTKYSPSFQGQVTISADKSISTAYLQWSSLKASDTAMYYCASSYLRGLWGGYFDFWGQGTLVTVSSTRASTKGPSVFPLAPSSKSTSGGTAALGCLVKDYFPEPVTVSWNSGALTSGVHTFPAVLQSSGLYSLSSVVTVPSSSLGTQTYICNVNHKPSNTKVDKRVEPKSCGTGDIENTSLAPEDPTFPADTWGTYLLTTETGLQKDHALWDHTAQNLLRMGLAFLVLVALVWFLVEDWLSRKRTRERASRASTWEGRRRLNTQTLRAKRSGSGATNFSLLKQAGDVEENPGPSRGHMTEYKPTVRLATRDDVPRAVRTLAAAFADYPATRHTVDPDRHIERVTELQELFLTRVGLDIGKVWVADDGAAVAVWTTPESVEAGAVFAEIGPRMAELSGSRLAAQQQMEGLLAPHRPKEPAWFLATVGVSPDHQGKGLGSAVVLPGVEAAERAGVPAFLETSAPRNLPFYERLGFTVTADVEVPEGPRTWCMTRKPGA

SEQ ID NO: 20844 - protein, 1056 aa, synthetic construct
MALPVTALLLPLALLLHAARPELQSVLTQPPSASGTPGQRVTISCSGSSSNIGSNYVNWYQQLPGTAPKLLIYGDYQRPSGVPDRFSGSKSGTSASLAISGLRSEDEADYYCATRDDSLSGSVVFGTGTKLTVLGLEGQPKANPTVTLFPPSSEELQANKATLVCLISDFYPGAVTVAWKADGSPVKAGVETTKPSKQSNNKYAASSYLSLTPEQWKSHRSYSCQVTHEGSTVEKTVAPTECSGSQSFGLLDPKLCYLLDGILFIYGVILTALFLRVKFSRSADAPAYQQGQNQLYNELNLGRREEYDVLDKRRGRDPEMGGKPQRRKNPQEGLYNELQKDKMAEAYSEIGMKGERRRGKGHDGLYQGLSTATKDTYDALHMQALPPRRAKRSGSGATNFSLLKQAGDVEENPGPTSMDWIWRILFLVGAATGAHSFEEVQLVQSGAEVKKPGESLKISCKGSGYGFTSYWIGWVRQMPGKGLEWMGIIHPDDSDTKYSPSFQGQVTISADKSISTAYLQWSSLKASDTAMYYCASSYLRGLWGGYFDFWGQGTLVTVSSTRASTKGPSVFPLAPSSKSTSGGTAALGCLVKDYFPEPVTVSWNSGALTSGVHTFPAVLQSSGLYSLSSVVTVPSSSLGTQTYICNVNHKPSNTKVDKRVEPKSCGTKSVRFYLVVSPASASTQTSWTPRDLVSSQTQTQSCVPPTAGARQAPESPSTIPVPSQPQNSTLRPGPAAPIALVPVFCGLLVAKSLVLSALLVWWGDIWWKTMMELRSLDTQKATCHLQQVTDLPWTSVSSPVEREILYHTVARTKISDDDDEHTLRAKRSGSGVKQTLNFDLLKLAGDVESNPGPSRGHMTEYKPTVRLATRDDVPRAVRTLAAAFADYPATRHTVDPDRHIERVTELQELFLTRVGLDIGKVWVADDGAAVAVWTTPESVEAGAVFAEIGPRMAELSGSRLAAQQQMEGLLAPHRPKEPAWFLATVGVSPDHQGKGLGSAVVLPGVEAAERAGVPAFLETSAPRNLPFYERLGFTVTADVEVPEGPRTWCMTRKPGA

SEQ ID NO: 20845 - protein, 976 aa, synthetic construct
MALPVTALLLPLALLLHAARPELQSVLTQPPSASGTPGQRVTISCSGSSSNIGSNYVNWYQQLPGTAPKLLIYGDYQRPSGVPDRFSGSKSGTSASLAISGLRSEDEADYYCATRDDSLSGSVVFGTGTKLTVLGLEGQPKANPTVTLFPPSSEELQANKATLVCLISDFYPGAVTVAWKADGSPVKAGVETTKPSKQSNNKYAASSYLSLTPEQWKSHRSYSCQVTHEGSTVEKTVAPTECSGSQSFGLLDPKLCYLLDGILFIYGVILTALFLRVKFSRSADAPAYQQGQNQLYNELNLGRREEYDVLDKRRGRDPEMGGKPQRRKNPQEGLYNELQKDKMAEAYSEIGMKGERRRGKGHDGLYQGLSTATKDTYDALHMQALPPRRAKRSGSGATNFSLLKQAGDVEENPGPTSMDWIWRILFLVGAATGAHSFEEVQLVQSGAEVKKPGESLKISCKGSGYGFTSYWIGWVRQMPGKGLEWMGIIHPDDSDTKYSPSFQGQVTISADKSISTAYLQWSSLKASDTAMYYCASSYLRGLWGGYFDFWGQGTLVTVSSTRASTKGPSVFPLAPSSKSTSGGTAALGCLVKDYFPEPVTVSWNSGALTSGVHTFPAVLQSSGLYSLSSVVTVPSSSLGTQTYICNVNHKPSNTKVDKRVEPKSCGTVVEKEHPQLGAGTVLLLRAGFYAVSFLSVAVGSTVYYQGKCLTWKGPRRQLPAVVPAPLPPPCGSSAHLLPPVPGGRAKRSGSGVKQTLNFDLLKLAGDVESNPGPSRGHMTEYKPTVRLATRDDVPRAVRTLAAAFADYPATRHTVDPDRHIERVTELQELFLTRVGLDIGKVWVADDGAAVAVWTTPESVEAGAVFAEIGPRMAELSGSRLAAQQQMEGLLAPHRPKEPAWFLATVGVSPDHQGKGLGSAVVLPGVEAAERAGVPAFLETSAPRNLPFYERLGFTVTADVEVPEGPRTWCMTRKPGA

SEQ ID NO: 20846 - protein, 1005 aa, synthetic construct
MALPVTALLLPLALLLHAARPELQSVLTQPPSASGTPGQRVTISCSGSSSNIGSNYVNWYQQLPGTAPKLLIYGDYQRPSGVPDRFSGSKSGTSASLAISGLRSEDEADYYCATRDDSLSGSVVFGTGTKLTVLGLEDLKNVFPPEVAVFEPSEAEISHTQKATLVCLATGFYPDHVELSWWVNGKEVHSGVSTDPQPLKEQPALNDSRYCLSSRLRVSATFWQNPRNHFRCQVQFYGLSENDEWTQDRAKPVTQIVSAEAWGRADCGSQSFGLLDPKLCYLLDGILFIYGVILTALFLRVKFSRSADAPAYQQGQNQLYNELNLGRREEYDVLDKRRGRDPEMGGKPQRRKNPQEGLYNELQKDKMAEAYSEIGMKGERRRGKGHDGLYQGLSTATKDTYDALHMQALPPRRAKRSGSGATNFSLLKQAGDVEENPGPTSMDWIWRILFLVGAATGAHSFEEVQLVQSGAEVKKPGESLKISCKGSGYGFTSYWIGWVRQMPGKGLEWMGIIHPDDSDTKYSPSFQGQVTISADKSISTAYLQWSSLKASDTAMYYCASSYLRGLWGGYFDFWGQGTLVTVSSTRIQNPDPAVYQLRDSKSSDKSVCLFTDFDSQTNVSQSKDSDVYITDKTVLDMRSMDFKSNSAVAWSNKSDFACANAFNNSIIPEDTFFPSPESSCGTGDIENTSLAPEDPTFPADTWGTYLLTTETGLQKDHALWDHTAQNLLRMGLAFLVLVALVWFLVEDWLSRKRTRERASRASTWEGRRRLNTQTLRAKRSGSGATNFSLLKQAGDVEENPGPSRGHMTEYKPTVRLATRDDVPRAVRTLAAAFADYPATRHTVDPDRHIERVTELQELFLTRVGLDIGKVWVADDGAAVAVWTTPESVEAGAVFAEIGPRMAELSGSRLAAQQQMEGLLAPHRPKEPAWFLATVGVSPDHQGKGLGSAVVLPGVEAAERAGVPAFLETSAPRNLPFYERLGFTVTADVEVPEGPRTWCMTRKPGA

SEQ ID NO: 20847 - protein, 1071 aa, synthetic construct
MALPVTALLLPLALLLHAARPELQSVLTQPPSASGTPGQRVTISCSGSSSNIGSNYVNWYQQLPGTAPKLLIYGDYQRPSGVPDRFSGSKSGTSASLAISGLRSEDEADYYCATRDDSLSGSVVFGTGTKLTVLGLEDLKNVFPPEVAVFEPSEAEISHTQKATLVCLATGFYPDHVELSWWVNGKEVHSGVSTDPQPLKEQPALNDSRYCLSSRLRVSATFWQNPRNHFRCQVQFYGLSENDEWTQDRAKPVTQIVSAEAWGRADCGSQSFGLLDPKLCYLLDGILFIYGVILTALFLRVKFSRSADAPAYQQGQNQLYNELNLGRREEYDVLDKRRGRDPEMGGKPQRRKNPQEGLYNELQKDKMAEAYSEIGMKGERRRGKGHDGLYQGLSTATKDTYDALHMQALPPRRAKRSGSGATNFSLLKQAGDVEENPGPTSMDWIWRILFLVGAATGAHSFEEVQLVQSGAEVKKPGESLKISCKGSGYGFTSYWIGWVRQMPGKGLEWMGIIHPDDSDTKYSPSFQGQVTISADKSISTAYLQWSSLKASDTAMYYCASSYLRGLWGGYFDFWGQGTLVTVSSTRIQNPDPAVYQLRDSKSSDKSVCLFTDFDSQTNVSQSKDSDVYITDKTVLDMRSMDFKSNSAVAWSNKSDFACANAFNNSIIPEDTFFPSPESSCGTKSVRFYLVVSPASASTQTSWTPRDLVSSQTQTQSCVPPTAGARQAPESPSTIPVPSQPQNSTLRPGPAAPIALVPVFCGLLVAKSLVLSALLVWWGDIWWKTMMELRSLDTQKATCHLQQVTDLPWTSVSSPVEREILYHTVARTKISDDDDEHTLRAKRSGSGVKQTLNFDLLKLAGDVESNPGPSRGHMTEYKPTVRLATRDDVPRAVRTLAAAFADYPATRHTVDPDRHIERVTELQELFLTRVGLDIGKVWVADDGAAVAVWTTPESVEAGAVFAEIGPRMAELSGSRLAAQQQMEGLLAPHRPKEPAWFLATVGVSPDHQGKGLGSAVVLPGVEAAERAGVPAFLETSAPRNLPFYERLGFTVTADVEVPEGPRTWCMTRKPGA

SEQ ID NO: 20848 - protein, 991 aa, synthetic construct
MALPVTALLLPLALLLHAARPELQSVLTQPPSASGTPGQRVTISCSGSSSNIGSNYVNWYQQLPGTAPKLLIYGDYQRPSGVPDRFSGSKSGTSASLAISGLRSEDEADYYCATRDDSLSGSVVFGTGTKLTVLGLEDLKNVFPPEVAVFEPSEAEISHTQKATLVCLATGFYPDHVELSWWVNGKEVHSGVSTDPQPLKEQPALNDSRYCLSSRLRVSATFWQNPRNHFRCQVQFYGLSENDEWTQDRAKPVTQIVSAEAWGRADCGSQSFGLLDPKLCYLLDGILFIYGVILTALFLRVKFSRSADAPAYQQGQNQLYNELNLGRREEYDVLDKRRGRDPEMGGKPQRRKNPQEGLYNELQKDKMAEAYSEIGMKGERRRGKGHDGLYQGLSTATKDTYDALHMQALPPRRAKRSGSGATNFSLLKQAGDVEENPGPTSMDWIWRILFLVGAATGAHSFEEVQLVQSGAEVKKPGESLKISCKGSGYGFTSYWIGWVRQMPGKGLEWMGIIHPDDSDTKYSPSFQGQVTISADKSISTAYLQWSSLKASDTAMYYCASSYLRGLWGGYFDFWGQGTLVTVSSTRIQNPDPAVYQLRDSKSSDKSVCLFTDFDSQTNVSQSKDSDVYITDKTVLDMRSMDFKSNSAVAWSNKSDFACANAFNNSIIPEDTFFPSPESSCGTVVEKEHPQLGAGTVLLLRAGFYAVSFLSVAVGSTVYYQGKCLTWKGPRRQLPAVVPAPLPPPCGSSAHLLPPVPGGRAKRSGSGVKQTLNFDLLKLAGDVESNPGPSRGHMTEYKPTVRLATRDDVPRAVRTLAAAFADYPATRHTVDPDRHIERVTELQELFLTRVGLDIGKVWVADDGAAVAVWTTPESVEAGAVFAEIGPRMAELSGSRLAAQQQMEGLLAPHRPKEPAWFLATVGVSPDHQGKGLGSAVVLPGVEAAERAGVPAFLETSAPRNLPFYERLGFTVTADVEVPEGPRTWCMTRKPGA

SEQ ID NO: 20849 - protein, 962 aa, synthetic construct
MALPVTALLLPLALLLHAARPELQSVLTQPPSASGTPGQRVTISCSGSSSNIGSNYVNWYQQLPGTAPKLLIYGDYQRPSGVPDRFSGSKSGTSASLAISGLRSEDEADYYCATRDDSLSGSVVFGTGTKLTVLGLEGQPKANPTVTLFPPSSEELQANKATLVCLISDFYPGAVTVAWKADGSPVKAGVETTKPSKQSNNKYAASSYLSLTPEQWKSHRSYSCQVTHEGSTVEKTVAPTECSGSQSFGLLDPKLCYLLDGILFIYGVILTALFLRVKFSRSADAPAYQQGQNQLYNELNLGRREEYDVLDKRRGRDPEMGGKPQRRKNPQEGLYNELQKDKMAEAYSEIGMKGERRRGKGHDGLYQGLSTATKDTYDALHMQALPPRRAKRSGSGATNFSLLKQAGDVEENPGPTSMDWIWRILFLVGAATGAHSFEEVQLVQSGAEVKKPGESLKISCKGSGYGFTSYWIGWVRQMPGKGLEWMGIIHPDDSDTKYSPSFQGQVTISADKSISTAYLQWSSLKASDTAMYYCASSYLRGLWGGYFDFWGQGTLVTVSSTRASTKGPSVFPLAPSSKSTSGGTAALGCLVKDYFPEPVTVSWNSGALTSGVHTFPAVLQSSGLYSLSSVVTVPSSSLGTQTYICNVNHKPSNTKVDKRVEPKSCGTITQGLAVSTISSFFPPGYQVSFCLVMVLLFAVDTGLYFSVKTNIRSSTRDWKDHKFKWRKDPQDKRAKRSGSGATNFSLLKQAGDVEENPGPSRGHMTEYKPTVRLATRDDVPRAVRTLAAAFADYPATRHTVDPDRHIERVTELQELFLTRVGLDIGKVWVADDGAAVAVWTTPESVEAGAVFAEIGPRMAELSGSRLAAQQQMEGLLAPHRPKEPAWFLATVGVSPDHQGKGLGSAVVLPGVEAAERAGVPAFLETSAPRNLPFYERLGFTVTADVEVPEGPRTWCMTRKPGA

SEQ ID NO: 20850 - protein, 977 aa, synthetic construct
MALPVTALLLPLALLLHAARPELQSVLTQPPSASGTPGQRVTISCSGSSSNIGSNYVNWYQQLPGTAPKLLIYGDYQRPSGVPDRFSGSKSGTSASLAISGLRSEDEADYYCATRDDSLSGSVVFGTGTKLTVLGLEDLKNVFPPEVAVFEPSEAEISHTQKATLVCLATGFYPDHVELSWWVNGKEVHSGVSTDPQPLKEQPALNDSRYCLSSRLRVSATFWQNPRNHFRCQVQFYGLSENDEWTQDRAKPVTQIVSAEAWGRADCGSQSFGLLDPKLCYLLDGILFIYGVILTALFLRVKFSRSADAPAYQQGQNQLYNELNLGRREEYDVLDKRRGRDPEMGGKPQRRKNPQEGLYNELQKDKMAEAYSEIGMKGERRRGKGHDGLYQGLSTATKDTYDALHMQALPPRRAKRSGSGATNFSLLKQAGDVEENPGPTSMDWIWRILFLVGAATGAHSFEEVQLVQSGAEVKKPGESLKISCKGSGYGFTSYWIGWVRQMPGKGLEWMGIIHPDDSDTKYSPSFQGQVTISADKSISTAYLQWSSLKASDTAMYYCASSYLRGLWGGYFDFWGQGTLVTVSSTRIQNPDPAVYQLRDSKSSDKSVCLFTDFDSQTNVSQSKDSDVYITDKTVLDMRSMDFKSNSAVAWSNKSDFACANAFNNSIIPEDTFFPSPESSCGTITQGLAVSTISSFFPPGYQVSFCLVMVLLFAVDTGLYFSVKTNIRSSTRDWKDHKFKWRKDPQDKRAKRSGSGATNFSLLKQAGDVEENPGPSRGHMTEYKPTVRLATRDDVPRAVRTLAAAFADYPATRHTVDPDRHIERVTELQELFLTRVGLDIGKVWVADDGAAVAVWTTPESVEAGAVFAEIGPRMAELSGSRLAAQQQMEGLLAPHRPKEPAWFLATVGVSPDHQGKGLGSAVVLPGVEAAERAGVPAFLETSAPRNLPFYERLGFTVTADVEVPEGPRTWCMTRKPGA

SEQ ID NO: 20851 - protein, 660 aa, synthetic construct
MALPVTALLLPLALLLHAARPELQSVLTQPPSASGTPGQRVTISCSGSSSNIGSNYVNWYQQLPGTAPKLLIYGDYQRPSGVPDRFSGSKSGTSASLAISGLRSEDEADYYCATRDDSLSGSVVFGTGTKLTVLGLEGQPKANPTVTLFPPSSEELQANKATLVCLISDFYPGAVTVAWKADGSPVKAGVETTKPSKQSNNKYAASSYLSLTPEQWKSHRSYSCQVTHEGSTVEKTVAPTECSGSLGEPQLCYILDAILFLYGIVLTLLYCRLKIQVRKAAITSYEKSDGVYTGLSTRNQETYETLKHEKPPQRAKRSGSGATNFSLLKQAGDVEENPGPTSMDWIWRILFLVGAATGAHSFEEVQLVQSGAEVKKPGESLKISCKGSGYGFTSYWIGWVRQMPGKGLEWMGIIHPDDSDTKYSPSFQGQVTISADKSISTAYLQWSSLKASDTAMYYCASSYLRGLWGGYFDFWGQGTLVTVSSTRASTKGPSVFPLAPSSKSTSGGTAALGCLVKDYFPEPVTVSWNSGALTSGVHTFPAVLQSSGLYSLSSVVTVPSSSLGTQTYICNVNHKPSNTKVDKRVEPKSCGTLGEPQLCYILDAILFLYGIVLTLLYCRLKIQVRKAAITSYEKSDGVYTGLSTRNQETYETLKHEKPPQ

SEQ ID NO: 20852 - protein, 1037 aa, synthetic construct
MALPVTALLLPLALLLHAARPELQSVLTQPPSASGTPGQRVTISCSGSSSNIGSNYVNWYQQLPGTAPKLLIYGDYQRPSGVPDRFSGSKSGTSASLAISGLRSEDEADYYCATRDDSLSGSVVFGTGTKLTVLGGQPKANPTVTLFPPSSEELQANKATLVCLISDFYPGAVTVAWKADGSPVKAGVETTKPSKQSNNKYAASSYLSLTPEQWKSHRSYSCQVTHEGSTVEKTVAPTECSGSQSFGLLDPKLCYLLDGILFIYGVILTALFLRVKFSRSADAPAYQQGQNQLYNELNLGRREEYDVLDKRRGRDPEMGGKPRRKNPQEGLYNELQKDKMAEAYSEIGMKGERRRGKGHDGLYQGLSTATKDTYDALHMQALPPRRAKRSGSGATNFSLLKQAGDVEENPGPTSMDWIWRILFLVGAATGAHSFEEVQLVQSGAEVKKPGESLKISCKGSGYGFTSYWIGWVRQMPGKGLEWMGIIHPDDSDTKYSPSFQGQVTISADKSISTAYLQWSSLKASDTAMYYCASSYLRGLWGGYFDFWGQGTLVTVSSASTKGPSVFPLAPSSKSTSGGTAALGCLVKDYFPEPVTVSWNSGALTSGVHTFPAVLQSSGLYSLSSVVTVPSSSLGTQTYICNVNHKPSNTKVDKRVEPKSCGTQSFGLLDPKLCYLLDGILFIYGVILTALFLRVKFSRSADAPAYQQGQNQLYNELNLGRREEYDVLDKRRGRDPEMGGKPRRKNPQEGLYNELQKDKMAEAYSEIGMKGERRRGKGHDGLYQGLSTATKDTYDALHMQALPPRRAKRSGSGVKQTLNFDLLKLAGDVESNPGPSRGHMTEYKPTVRLATRDDVPRAVRTLAAAFADYPATRHTVDPDRHIERVTELQELFLTRVGLDIGKVWVADDGAAVAVWTTPESVEAGAVFAEIGPRMAELSGSRLAAQQQMEGLLAPHRPKEPAWFLATVGVSPDHQGKGLGSAVVLPGVEAAERAGVPAFLETSAPRNLPFYERLGFTVTADVEVPEGPRTWCMTRKPGA

SEQ ID NO: 20853 - protein, 823 aa, synthetic construct
MALPVTALLLPLALLLHAARPELQSVLTQPPSASGTPGQRVTISCSGSSSNIGSNYVNWYQQLPGTAPKLLIYGDYQRPSGVPDRFSGSKSGTSASLAISGLRSEDEADYYCATRDDSLSGSVVFGTGTKLTVLGLEDLKNVFPPEVAVFEPSEAEISHTQKATLVCLATGFYPDHVELSWWVNGKEVHSGVSTDPQPLKEQPALNDSRYCLSSRLRVSATFWQNPRNHFRCQVQFYGLSENDEWTQDRAKPVTQIVSAEAWGRADCGSQSFGLLDPKLCYLLDGILFIYGVILTALFLRVKFSRSADAPAYQQGQNQLYNELNLGRREEYDVLDKRRGRDPEMGGKPRRKNPQEGLYNELQKDKMAEAYSEIGMKGERRRGKGHDGLYQGLSTATKDTYDALHMQALPPRRAKRSGSGATNFSLLKQAGDVEENPGPTSMDWIWRILFLVGAATGAHSFEEVQLVQSGAEVKKPGESLKISCKGSGYGFTSYWIGWVRQMPGKGLEWMGIIHPDDSDTKYSPSFQGQVTISADKSISTAYLQWSSLKASDTAMYYCASSYLRGLWGGYFDFWGQGTLVTVSSTRIQNPDPAVYQLRDSKSSDKSVCLFTDFDSQTNVSQSKDSDVYITDKTVLDMRSMDFKSNSAVAWSNKSDFACANAFNNSIIPEDTFFPSPESSCGTQSFGLLDPKLCYLLDGILFIYGVILTALFLRVKFSRSADAPAYQQGQNQLYNELNLGRREEYDVLDKRRGRDPEMGGKPRRKNPQEGLYNELQKDKMAEAYSEIGMKGERRRGKGHDGLYQGLSTATKDTYDALHMQALPPR

SEQ ID NO: 20854 - protein, 492 aa, synthetic construct
MALPVTALLLPLALLLHAARPDIQMTQSPSSLSASVGDRVTITCLASEDIYDNLAWYQQKPGKAPKLLIYYASSLQDGVPSRFSGSGSGTDYTLTISSLQPEDFATYYCLQDSEYPWTFGGGGSGGGGSGGGGSEVTLKESGPALVKPTQTLTLTCTFSGFSLTTYGMGVGWIRQPPGKALEWLANIWWDDDKYYNPSLKNRLTISKDTSKNQVVLTMTNMDPVDTATYYCARIGPIKYPTAPYRYFDFWGQGTMVTVSSTREQKLISEEDLKIEVMYPPPYLDNEKSNGTIIHVKGKHLCPSPLFPGPSKPFWVLVVVGGVLACYSLLVTVAFIIFWVRSKRSRLLHSDYMNMTPRRPGPTRKHYQPYAPPRDFAAYRSRVKFSRSADAPAYQQGQNQLYNELNLGRREEYDVLDKRRGRDPEMGGKPRRKNPQEGLYNELQKDKMAEAYSEIGMKGERRRGKGHDGLYQGLSTATKDTYDALHMQALPPR

SEQ ID NO: 20855 - protein, 498 aa, synthetic construct
MALPVTALLLPLALLLHAARPDIQMTQSPSSLSASVGDRVTITCLASEDIYDNLAWYQQKPGKAPKLLIYYASSLQDGVPSRFSGSGSGTDYTLTISSLQPEDFATYYCLQDSEYPWTFGGGGSGGGGSGGGGSEVTLKESGPALVKPTQTLTLTCTFSGFSLTTYGMGVGWIRQPPGKALEWLANIWWDDDKYYNPSLKNRLTISKDTSKNQVVLTMTNMDPVDTATYYCARIGPIKYPTAPYRYFDFWGQGTMVTVSSTREQKLISEEDLAKPTTTPAPRPPTPAPTIASQPLSLRPEACRPAAGGAVHTRGLDFACDIYIWAPLAGTCGVLLLSLVITLYCKRGRKKLLYIFKQPFMRPVQTTQEEDGCSCRFPEEEEGGCELRVKFSRSADAPAYQQGQNQLYNELNLGRREEYDVLDKRRGRDPEMGGKPRRKNPQEGLYNELQKDKMAEAYSEIGMKGERRRGKGHDGLYQGLSTATKDTYDALHMQALPPR

SEQ ID NO: 20856 - protein, 498 aa, synthetic construct
MALPVTALLLPLALLLHAARPEVTLKESGPALVKPTQTLTLTCTFSGFSLTTYGMGVGWIRQPPGKALEWLANIWWDDDKYYNPSLKNRLTISKDTSKNQVVLTMTNMDPVDTATYYCARIGPIKYPTAPYRYFDFWGQGTMVTVSSGGGGSGGGGSGGGGSDIQMTQSPSSLSASVGDRVTITCLASEDIYDNLAWYQQKPGKAPKLLIYYASSLQDGVPSRFSGSGSGTDYTLTISSLQPEDFATYYCLQDSEYPWTFTREQKLISEEDLAKPTTTPAPRPPTPAPTIASQPLSLRPEACRPAAGGAVHTRGLDFACDIYIWAPLAGTCGVLLLSLVITLYCKRGRKKLLYIFKQPFMRPVQTTQEEDGCSCRFPEEEEGGCELRVKFSRSADAPAYQQGQNQLYNELNLGRREEYDVLDKRRGRDPEMGGKPRRKNPQEGLYNELQKDKMAEAYSEIGMKGERRRGKGHDGLYQGLSTATKDTYDALHMQALPPR

SEQ ID NO: 20857 - protein, 911 aa, synthetic construct
MALPVTALLLPLALLLHAARPDIQMTQSPSSLSASVGDRVTITCLASEDIYDNLAWYQQKPGKAPKLLIYYASSLQDGVPSRFSGSGSGTDYTLTISSLQPEDFATYYCLQDSEYPWTFGGGGSGGGGSGGGGSEVTLKESGPALVKPTQTLTLTCTFSGFSLTTYGMGVGWIRQPPGKALEWLANIWWDDDKYYNPSLKNRLTISKDTSKNQVVLTMTNMDPVDTATYYCARIGPIKYPTAPYRYFDFWGQGTMVTVSSTREQKLISEEDLAKPTTTPAPRPPTPAPTIASQPLSLRPEACRPAAGGAVHTRGLDFACDIYIWAPLAGTCGVLLLSLVITLYCGRARVKFSRSADAPAYQQGQNQLYNELNLGRREEYDVLDKRRGRDPEMGGKPRRKNPQEGLYNELQKDKMAEAYSEIGMKGERRRGKGHDGLYQGLSTATKDTYDALHMQALPPRSRGSGATNFSLLKQAGDVEENPGPGIHMATYEVLCEVARKLGTDDREVVLFLLNVFIPQPTLAQLIGALRALKEEGRLTFPLLAECLFRAGRRDLLRDLLHLDPRFLERHLAGTMSYFSPYQLTVLHVDGELCARDIRSLIFLSKDTIGSRSTPQTFLHWVYCMENLDLLGPTDVDALMSMLRSLSRVDLQRQVQTLMGLHLSGPSHSQHYRHTPLETDFYDYKDDDDKTSGSGEGRGSLLTCGDVEENPGPHMTEYKPTVRLATRDDVPRAVRTLAAAFADYPATRHTVDPDRHIERVTELQELFLTRVGLDIGKVWVADDGAAVAVWTTPESVEAGAVFAEIGPRMAELSGSRLAAQQQMEGLLAPHRPKEPAWFLATVGVSPDHQGKGLGSAVVLPGVEAAERAGVPAFLETSAPRNLPFYERLGFTVTADVEVPEGPRTWCMTRKPGA

SEQ ID NO: 20858 - protein, 851 aa, synthetic construct
MALPVTALLLPLALLLHAARPDIQMTQSPSSLSASVGDRVTITCLASEDIYDNLAWYQQKPGKAPKLLIYYASSLQDGVPSRFSGSGSGTDYTLTISSLQPEDFATYYCLQDSEYPWTFLEIQNPDPAVYQLRDSKSSDKSVCLFTDFDSQTNVSQSKDSDVYITDKCVLDMRSMDFKSNSAVAWSNKSDFACANAFNNSIIPEDTFFPSSDVPCDVKLVEKSFETDTNLNFQNLSVIGFRILLLKVAGFNLLMTLRLWSSRAKRSGSGVKQTLNFDLLKLAGDVESNPGPTSMDWIWRILFLVGAATGAHSFEEVTLKESGPALVKPTQTLTLTCTFSGFSLTTYGMGVGWIRQPPGKALEWLANIWWDDDKYYNPSLKNRLTISKDTSKNQVVLTMTNMDPVDTATYYCARIGPIKYPTAPYRYFDFWGQGTMVTVSSTREDLKNVFPPEVAVFEPSKAEIAHTQKATLVCLATGFYPDHVELSWWVNGKEVHSGVCTDPQPLKEQPALNDSRYCLSSRLRVSATFWQNPRNHFRCQVQFYGLSENDEWTQDRAKPVTQIVSAEAWGRADCGITSASYHQGVLSATILYEILLGKATLYAVLVSALVLMAMVKRKDSRGRAKRSGSGATNFSLLKQAGDVEENPGPSRGHMTEYKPTVRLATRDDVPRAVRTLAAAFADYPATRHTVDPDRHIERVTELQELFLTRVGLDIGKVWVADDGAAVAVWTTPESVEAGAVFAEIGPRMAELSGSRLAAQQQMEGLLAPHRPKEPAWFLATVGVSPDHQGKGLGSAVVLPGVEAAERAGVPAFLETSAPRNLPFYERLGFTVTADVEVPEGPRTWCMTRKPGA

SEQ ID NO: 20859 - protein, 850 aa, synthetic construct
MALPVTALLLPLALLLHAARPDIQMTQSPSSLSASVGDRVTITCLASEDIYDNLAWYQQKPGKAPKLLIYYASSLQDGVPSRFSGSGSGTDYTLTISSLQPEDFATYYCLQDSEYPWTFLEDLKNVFPPEVAVFEPSKAEIAHTQKATLVCLATGFYPDHVELSWWVNGKEVHSGVCTDPQPLKEQPALNDSRYCLSSRLRVSATFWQNPRNHFRCQVQFYGLSENDEWTQDRAKPVTQIVSAEAWGRADCGITSASYHQGVLSATILYEILLGKATLYAVLVSALVLMAMVKRKDSRGRAKRSGSGATNFSLLKQAGDVEENPGPTSMDWIWRILFLVGAATGAHSFEEVTLKESGPALVKPTQTLTLTCTFSGFSLTTYGMGVGWIRQPPGKALEWLANIWWDDDKYYNPSLKNRLTISKDTSKNQVVLTMTNMDPVDTATYYCARIGPIKYPTAPYRYFDFWGQGTMVTVSSTRIQNPDPAVYQLRDSKSSDKSVCLFTDFDSQTNVSQSKDSDVYITDKCVLDMRSMDFKSNSAVAWSNKSDFACANAFNNSIIPEDTFFPSSDVPCDVKLVEKSFETDTNLNFQNLSVIGFRILLLKVAGFNLLMTLRLWSSRAKRSGSGVKQTLNFDLLKLAGDVESNPGPSRGHMTEYKPTVRLATRDDVPRAVRTLAAAFADYPATRHTVDPDRHIERVTELQELFLTRVGLDIGKVWVADDGAAVAVWTTPESVEAGAVFAEIGPRMAELSGSRLAAQQQMEGLLAPHRPKEPAWFLATVGVSPDHQGKGLGSAVVLPGVEAAERAGVPAFLETSAPRNLPFYERLGFTVTADVEVPEGPRTWCMTRKPGA

SEQ ID NO: 20860 - protein, 617 aa, synthetic construct
MALPVTALLLPLALLLHAARPDIQMTQSPSSLSASVGDRVTITCLASEDIYDNLAWYQQKPGKAPKLLIYYASSLQDGVPSRFSGSGSGTDYTLTISSLQPEDFATYYCLQDSEYPWTFLEDLKNVFPPEVAVFEPSEAEISHTQKATLVCLATGFYPDHVELSWWVNGKEVHSGVCTDPQPLKEQPALNDSRYCLSSRLRVSATFWQNPRNHFRCQVQFYGLSENDEWTQDRAKPVTQIVSAEAWGRADCGFTSESYQQGVLSATILYEILLGKATLYAVLVSALVLMAMVKRKDSRGRAKRSGSGATNFSLLKQAGDVEENPGPTSMDWIWRILFLVGAATGAHSFEEVTLKESGPALVKPTQTLTLTCTFSGFSLTTYGMGVGWIRQPPGKALEWLANIWWDDDKYYNPSLKNRLTISKDTSKNQVVLTMTNMDPVDTATYYCARIGPIKYPTAPYRYFDFWGQGTMVTVSSTRIQNPDPAVYQLRDSKSSDKSVCLFTDFDSQTNVSQSKDSDVYITDKCVLDMRSMDFKSNSAVAWSNKSDFACANAFNNSIIPEDTFFPSPESSCDVKLVEKSFETDTNLNFQNLSVIGFRILLLKVAGFNLLMTLRLWSS

SEQ ID NO: 20861 - protein, 842 aa, synthetic construct
MALPVTALLLPLALLLHAARPDIQMTQSPSSLSASVGDRVTITCLASEDIYDNLAWYQQKPGKAPKLLIYYASSLQDGVPSRFSGSGSGTDYTLTISSLQPEDFATYYCLQDSEYPWTFLEDLKNVFPPEVAVFEPSEAEISHTQKATLVCLATGFYPDHVELSWWVNGKEVHSGVCTDPQPLKEQPALNDSRYCLSSRLRVSATFWQNPRNHFRCQVQFYGLSENDEWTQDRAKPVTQIVSAEAWGRADCGFTSESYQQGVLSATILYEILLGKATLYAVLVSALVLMAMVKRKDSRGRAKRSGSGATNFSLLKQAGDVEENPGPTSMDWIWRILFLVGAATGAHSFEEVTLKESGPALVKPTQTLTLTCTFSGFSLTTYGMGVGWIRQPPGKALEWLANIWWDDDKYYNPSLKNRLTISKDTSKNQVVLTMTNMDPVDTATYYCARIGPIKYPTAPYRYFDFWGQGTMVTVSSTRIQNPDPAVYQLRDSKSSDKSVCLFTDFDSQTNVSQSKDSDVYITDKCVLDMRSMDFKSNSAVAWSNKSDFACANAFNNSIIPEDTFFPSPESSCDVKLVEKSFETDTNLNFQNLSVIGFRILLLKVAGFNLLMTLRLWSSRAKRSGSGVKQTLNFDLLKLAGDVESNPGPSRGGIHTMATYEVLCEVARKLGTDDREVVLFLLNVFIPQPTLAQLIGALRALKEEGRLTFPLLAECLFRAGRRDLLRDLLHLDPRFLERHLAGTMSYFSPYQLTVLHVDGELCARDIRSLIFLSKDTIGSRSTPQTFLHWVYCMENLDLLGPTDVDALMSMLRSLSRVDLQRQVQTLMGLHLSGPSHSQHYRHTP

SEQ ID NO: 20862 - protein, 621 aa, synthetic construct
MALPVTALLLPLALLLHAARPDIQMTQSPSSLSASVGDRVTITCLASEDIYDNLAWYQQKPGKAPKLLIYYASSLQDGVPSRFSGSGSGTDYTLTISSLQPEDFATYYCLQDSEYPWTFLEIQNPDPAVYQLRDSKSSDKSVCLFTDFDSQTNVSQSKDSDVYITDKCVLDMRSMDFKSNSAVAWSNKSDFACANAFNNSIIPEDTFFPSPESSCDVKLVEKSFETDTNLNFQNLSVIGFRILLLKVAGFNLLMTLRLWSSRAKRSGSGVKQTLNFDLLKLAGDVESNPGPTSMDWIWRILFLVGAATGAHSFEEVTLKESGPALVKPTQTLTLTCTFSGFSLTTYGMGVGWIRQPPGKALEWLANIWWDDDKYYNPSLKNRLTISKDTSKNQVVLTMTNMDPVDTATYYCARIGPIKYPTAPYRYFDFWGQGTMVTVSSTREDLKNVFPPEVAVFEPSEAEISHTQKATLVCLATGFYPDHVELSWWVNGKEVHSGVCTDPQPLKEQPALNDSRYCLSSRLRVSATFWQNPRNHFRCQVQFYGLSENDEWTQDRAKPVTQIVSAEAWGRADCGFTSESYQQGVLSATILYEILLGKATLYAVLVSALVLMAMVKRKDSRG

SEQ ID NO: 20863 - protein, 843 aa, synthetic construct
MALPVTALLLPLALLLHAARPDIQMTQSPSSLSASVGDRVTITCLASEDIYDNLAWYQQKPGKAPKLLIYYASSLQDGVPSRFSGSGSGTDYTLTISSLQPEDFATYYCLQDSEYPWTFLEIQNPDPAVYQLRDSKSSDKSVCLFTDFDSQTNVSQSKDSDVYITDKCVLDMRSMDFKSNSAVAWSNKSDFACANAFNNSIIPEDTFFPSPESSCDVKLVEKSFETDTNLNFQNLSVIGFRILLLKVAGFNLLMTLRLWSSRAKRSGSGVKQTLNFDLLKLAGDVESNPGPTSMDWIWRILFLVGAATGAHSFEEVTLKESGPALVKPTQTLTLTCTFSGFSLTTYGMGVGWIRQPPGKALEWLANIWWDDDKYYNPSLKNRLTISKDTSKNQVVLTMTNMDPVDTATYYCARIGPIKYPTAPYRYFDFWGQGTMVTVSSTREDLKNVFPPEVAVFEPSEAEISHTQKATLVCLATGFYPDHVELSWWVNGKEVHSGVCTDPQPLKEQPALNDSRYCLSSRLRVSATFWQNPRNHFRCQVQFYGLSENDEWTQDRAKPVTQIVSAEAWGRADCGFTSESYQQGVLSATILYEILLGKATLYAVLVSALVLMAMVKRKDSRGRAKRSGSGATNFSLLKQAGDVEENPGPSRGGIHTMATYEVLCEVARKLGTDDREVVLFLLNVFIPQPTLAQLIGALRALKEEGRLTFPLLAECLFRAGRRDLLRDLLHLDPRFLERHLAGTMSYFSPYQLTVLHVDGELCARDIRSLIFLSKDTIGSRSTPQTFLHWVYCMENLDLLGPTDVDALMSMLRSLSRVDLQRQVQTLMGLHLSGPSHSQHYRHTP

SEQ ID NO: 20864 - protein, 895 aa, synthetic construct
MALPVTALLLPLALLLHAARPLEGKPIPNPLLGLDSTGSGEDLKNVFPPEVAVFEPSKAEIAHTQKATLVCLATGFYPDHVELSWWVNGKEVHSGVCTDPQPLKEQPALNDSRYCLSSRLRVSATFWQNPRNHFRCQVQFYGLSENDEWTQDRAKPVTQIVSAEAWGRADCGITSASYHQGVLSATILYEILLGKATLYAVLVSALVLMAMVKRKDSRGRAKRSGSGATNFSLLKQAGDVEENPGPTSMALPVTALLLPLALLLHAARPDIQMTQSPSSLSASVGDRVTITCLASEDIYDNLAWYQQKPGKAPKLLIYYASSLQDGVPSRFSGSGSGTDYTLTISSLQPEDFATYYCLQDSEYPWTFGGGGSGGGGSGGGGSEVTLKESGPALVKPTQTLTLTCTFSGFSLTTYGMGVGWIRQPPGKALEWLANIWWDDDKYYNPSLKNRLTISKDTSKNQVVLTMTNMDPVDTATYYCARIGPIKYPTAPYRYFDFWGQGTMVTVSSTREQKLISEEDGSGIQNPDPAVYQLRDSKSSDKSVCLFTDFDSQTNVSQSKDSDVYITDKCVLDMRSMDFKSNSAVAWSNKSDFACANAFNNSIIPEDTFFPSSDVPCDVKLVEKSFETDTNLNFQNLSVIGFRILLLKVAGFNLLMTLRLWSSRAKRSGSGVKQTLNFDLLKLAGDVESNPGPSRGHMTEYKPTVRLATRDDVPRAVRTLAAAFADYPATRHTVDPDRHIERVTELQELFLTRVGLDIGKVWVADDGAAVAVWTTPESVEAGAVFAEIGPRMAELSGSRLAAQQQMEGLLAPHRPKEPAWFLATVGVSPDHQGKGLGSAVVLPGVEAAERAGVPAFLETSAPRNLPFYERLGFTVTADVEVPEGPRTWCMTRKPGA

SEQ ID NO: 20865 - protein, 896 aa, synthetic construct
MALPVTALLLPLALLLHAARPLEQKLISEEDLGSGDRPDPAVYQLRDSKSSDKSVCLFTDFDSQTNVSQSKDSDVYITDKCVLDMRSMDFKSNSAVAWSNKSDFACANAFNNSIIPEDTFFPSPESSCDVKLVEKSFETDTNLNFQNLSVIGFRILLLKVAGFNLLMTLRLWSSSSRAKRSGSGVKQTLNFDLLKLAGDVESNPGPTSMALPVTALLLPLALLLHAARPDIQMTQSPSSLSASVGDRVTITCLASEDIYDNLAWYQQKPGKAPKLLIYYASSLQDGVPSRFSGSGSGTDYTLTISSLQPEDFATYYCLQDSEYPWTFGGGGSGGGGSGGGGSEVTLKESGPALVKPTQTLTLTCTFSGFSLTTYGMGVGWIRQPPGKALEWLANIWWDDDKYYNPSLKNRLTISKDTSKNQVVLTMTNMDPVDTATYYCARIGPIKYPTAPYRYFDFWGQGTMVTVSSTRGKPIPNPLLGLDSTGSGEDLKNVFPPEVAVFEPSEAEISHTQKATLVCLATGFYPDHVELSWWVNGKEVHSGVCTDPQPLKEQPALNDSRYCLSSRLRVSATFWQNPRNHFRCQVQFYGLSENDEWTQDRAKPVTQIVSAEAWGRADCGFTSESYQQGVLSATILYEILLGKATLYAVLVSALVLMAMVKRKDSRGRAKRSGSGATNFSLLKQAGDVEENPGPSRGHMTEYKPTVRLATRDDVPRAVRTLAAAFADYPATRHTVDPDRHIERVTELQELFLTRVGLDIGKVWVADDGAAVAVWTTPESVEAGAVFAEIGPRMAELSGSRLAAQQQMEGLLAPHRPKEPAWFLATVGVSPDHQGKGLGSAVVLPGVEAAERAGVPAFLETSAPRNLPFYERLGFTVTADVEVPEGPRTWCMTRKPGA

SEQ ID NO: 20866 - protein, 850 aa, synthetic construct
MALPVTALLLPLALLLHAARPDIQMTQSPSSLSASVGDRVTITCLASEDIYDNLAWYQQKPGKAPKLLIYYASSLQDGVPSRFSGSGSGTDYTLTISSLQPEDFATYYCLQDSEYPWTFLEDLKNVFPPEVAVFEPSEAEISHTQKATLVCLATGFYPDHVELSWWVNGKEVHSGVSTDPQPLKEQPALNDSRYCLSSRLRVSATFWQNPRNHFRCQVQFYGLSENDEWTQDRAKPVTQIVSAEAWGRADCGFTSESYQQGVLSATILYEILLGKATLYAVLVSALVLMAMVKRKDSRGRAKRSGSGATNFSLLKQAGDVEENPGPTSMDWIWRILFLVGAATGAHSFEEVTLKESGPALVKPTQTLTLTCTFSGFSLTTYGMGVGWIRQPPGKALEWLANIWWDDDKYYNPSLKNRLTISKDTSKNQVVLTMTNMDPVDTATYYCARIGPIKYPTAPYRYFDFWGQGTMVTVSSTRIQNPDPAVYQLRDSKSSDKSVCLFTDFDSQTNVSQSKDSDVYITDKTVLDMRSMDFKSNSAVAWSNKSDFACANAFNNSIIPEDTFFPSPESSCDVKLVEKSFETDTNLNFQNLSVIGFRILLLKVAGFNLLMTLRLWSSRAKRSGSGVKQTLNFDLLKLAGDVESNPGPSRGHMTEYKPTVRLATRDDVPRAVRTLAAAFADYPATRHTVDPDRHIERVTELQELFLTRVGLDIGKVWVADDGAAVAVWTTPESVEAGAVFAEIGPRMAELSGSRLAAQQQMEGLLAPHRPKEPAWFLATVGVSPDHQGKGLGSAVVLPGVEAAERAGVPAFLETSAPRNLPFYERLGFTVTADVEVPEGPRTWCMTRKPGA

SEQ ID NO: 20867 - protein, 932 aa, synthetic construct
MALPVTALLLPLALLLHAARPDIQMTQSPSSLSASVGDRVTITCLASEDIYDNLAWYQQKPGKAPKLLIYYASSLQDGVPSRFSGSGSGTDYTLTISSLQPEDFATYYCLQDSEYPWTFLEDLKNVFPPEVAVFEPSEAEISHTQKATLVCLATGFYPDHVELSWWVNGKEVHSGVSTDPQPLKEQPALNDSRYCLSSRLRVSATFWQNPRNHFRCQVQFYGLSENDEWTQDRAKPVTQIVSAEAWGRADCGFTSESYQQGVLSATILYEILLGKATLYAVLVSALVLMAMVKRKDSRGRAKRSGSGATNFSLLKQAGDVEENPGPTSMDWIWRILFLVGAATGAHSFEEVTLKESGPALVKPTQTLTLTCTFSGFSLTTYGMGVGWIRQPPGKALEWLANIWWDDDKYYNPSLKNRLTISKDTSKNQVVLTMTNMDPVDTATYYCARIGPIKYPTAPYRYFDFWGQGTMVTVSSTREQKLISEEDGSGTPFPSLAPPIMLLVDGKQQMVVVCLVLDVAPPGLDSPIWFSAGNGSALDAFTYGPSPATDGTWTNLAHLSLPSEELASWEPLVCHTGPGAEGHSRSTQPMHLSGEASTARTCPQEPLRGTPGGALWLGVLRLLLFKLLLFDLLLTCSCLCDPAGPLPSPATTTRLRALGSHRLHPATETGGREATSSPRPQPRDRRWGDTPPGRKPGSPVRAKRSGSGVKQTLNFDLLKLAGDVESNPGPSRGHMTEYKPTVRLATRDDVPRAVRTLAAAFADYPATRHTVDPDRHIERVTELQELFLTRVGLDIGKVWVADDGAAVAVWTTPESVEAGAVFAEIGPRMAELSGSRLAAQQQMEGLLAPHRPKEPAWFLATVGVSPDHQGKGLGSAVVLPGVEAAERAGVPAFLETSAPRNLPFYERLGFTVTADVEVPEGPRTWCMTRKPGA

SEQ ID NO: 20868 - protein, 950 aa, synthetic construct
MALPVTALLLPLALLLHAARPLEDLKNVFPPEVAVFEPSEAEISHTQKATLVCLATGFYPDHVELSWWVNGKEVHSGVSTDPQPLKEQPALNDSRYCLSSRLRVSATFWQNPRNHFRCQVQFYGLSENDEWTQDRAKPVTQIVSAEAWGRADCGFTSESYQQGVLSATILYEILLGKATLYAVLVSALVLMAMVKRKDSRGRAKRSGSGATNFSLLKQAGDVEENPGPTSMALPVTALLLPLALLLHAARPDIQMTQSPSSLSASVGDRVTITCLASEDIYDNLAWYQQKPGKAPKLLIYYASSLQDGVPSRFSGSGSGTDYTLTISSLQPEDFATYYCLQDSEYPWTFGGGGSGGGGSGGGGSEVTLKESGPALVKPTQTLTLTCTFSGFSLTTYGMGVGWIRQPPGKALEWLANIWWDDDKYYNPSLKNRLTISKDTSKNQVVLTMTNMDPVDTATYYCARIGPIKYPTAPYRYFDFWGQGTMVTVSSTREQKLISEEDLGSGTPFPSLAPPIMLLVDGKQQMVVVCLVLDVAPPGLDSPIWFSAGNGSALDAFTYGPSPATDGTWTNLAHLSLPSEELASWEPLVCHTGPGAEGHSRSTQPMHLSGEASTARTCPQEPLRGTPGGALWLGVLRLLLFKLLLFDLLLTCSCLCDPAGPLPSPATTTRLRALGSHRLHPATETGGREATSSPRPQPRDRRWGDTPPGRKPGSPVRAKRSGSGVKQTLNFDLLKLAGDVESNPGPSRSRGHMTEYKPTVRLATRDDVPRAVRTLAAAFADYPATRHTVDPDRHIERVTELQELFLTRVGLDIGKVWVADDGAAVAVWTTPESVEAGAVFAEIGPRMAELSGSRLAAQQQMEGLLAPHRPKEPAWFLATVGVSPDHQGKGLGSAVVLPGVEAAERAGVPAFLETSAPRNLPFYERLGFTVTADVEVPEGPRTWCMTRKPGA

SEQ ID NO: 20869 - protein, 887 aa, synthetic construct
MALPVTALLLPLALLLHAARPDIQMTQSPSSLSASVGDRVTITCLASEDIYDNLAWYQQKPGKAPKLLIYYASSLQDGVPSRFSGSGSGTDYTLTISSLQPEDFATYYCLQDSEYPWTFLEGKPIPNPLLGLDSTGSGDKQLDADVSPKPTIFLPSIAETKLQKAGTYLCLLEKFFPDVIKIHWQEKKSNTILGSQEGNTMKTNDTYMKFSWLTVPEKSLDKEHRCIVRHENNKNGVDQEIIFPPIKTDVITMDPKDNCSKDANDTLLLQLTNTSAYYMYLLLLLKSVVYFAIITCCLLRRTAFCCNGEKSRAKRSGSGATNFSLLKQAGDVEENPGPTSMDWIWRILFLVGAATGAHSFEEVTLKESGPALVKPTQTLTLTCTFSGFSLTTYGMGVGWIRQPPGKALEWLANIWWDDDKYYNPSLKNRLTISKDTSKNQVVLTMTNMDPVDTATYYCARIGPIKYPTAPYRYFDFWGQGTMVTVSSTREQKLISEEDGSGSQPHTKPSVFVMKNGTNVACLVKEFYPKDIRINLVSSKKITEFDPAIVISPSGKYNAVKLGKYEDSNSVTCSVQHDNKTVHSTDFEVKTDSTDHVKPKETENTKQPSKSCHKPKAIVHTEKVNMMSLTVLGLRMLFAKTVAVNFLLTAKLFFLRAKRSGSGVKQTLNFDLLKLAGDVESNPGPSRGHMTEYKPTVRLATRDDVPRAVRTLAAAFADYPATRHTVDPDRHIERVTELQELFLTRVGLDIGKVWVADDGAAVAVWTTPESVEAGAVFAEIGPRMAELSGSRLAAQQQMEGLLAPHRPKEPAWFLATVGVSPDHQGKGLGSAVVLPGVEAAERAGVPAFLETSAPRNLPFYERLGFTVTADVEVPEGPRTWCMTRKPGA

SEQ ID NO: 20870 - protein, 625 aa, synthetic construct
MALPVTALLLPLALLLHAARPDIQMTQSPSSLSASVGDRVTITCLASEDIYDNLAWYQQKPGKAPKLLIYYASSLQDGVPSRFSGSGSGTDYTLTISSLQPEDFATYYCLQDSEYPWTFLESQPHTKPSVFVMKNGTNVACLVKEFYPKDIRINLVSSKKITEFDPAIVISPSGKYNAVKLGKYEDSNSVTCSVQHDNKTVHSTDFEVKTDSTDHVKPKETENTKQPSKSCHKPKAIVHTEKVNMMSLTVLGLRMLFAKTVAVNFLLTAKLFFLRAKRSGSGATNFSLLKQAGDVEENPGPTSMDWIWRILFLVGAATGAHSFEEVTLKESGPALVKPTQTLTLTCTFSGFSLTTYGMGVGWIRQPPGKALEWLANIWWDDDKYYNPSLKNRLTISKDTSKNQVVLTMTNMDPVDTATYYCARIGPIKYPTAPYRYFDFWGQGTMVTVSSTRDKQLDADVSPKPTIFLPSIAETKLQKAGTYLCLLEKFFPDVIKIHWQEKKSNTILGSQEGNTMKTNDTYMKFSWLTVPEKSLDKEHRCIVRHENNKNGVDQEIIFPPIKTDVITMDPKDNCSKDANDTLLLQLTNTSAYYMYLLLLLKSVVYFAIITCCLLRRTAFCCNGEKS

SEQ ID NO: 20871 - protein, 902 aa, synthetic construct
MALPVTALLLPLALLLHAARPLEGKPIPNPLLGLDSTGSGDKQLDADVSPKPTIFLPSIAETKLQKAGTYLCLLEKFFPDVIKIHWQEKKSNTILGSQEGNTMKTNDTYMKFSWLTVPEKSLDKEHRCIVRHENNKNGVDQEIIFPPIKTDVITMDPKDNCSKDANDTLLLQLTNTSAYYMYLLLLLKSVVYFAIITCCLLRRTAFCCNGEKSRAKRSGSGATNFSLLKQAGDVEENPGPTSMALPVTALLLPLALLLHAARPDIQMTQSPSSLSASVGDRVTITCLASEDIYDNLAWYQQKPGKAPKLLIYYASSLQDGVPSRFSGSGSGTDYTLTISSLQPEDFATYYCLQDSEYPWTFGGGGSGGGGSGGGGSEVTLKESGPALVKPTQTLTLTCTFSGFSLTTYGMGVGWIRQPPGKALEWLANIWWDDDKYYNPSLKNRLTISKDTSKNQVVLTMTNMDPVDTATYYCARIGPIKYPTAPYRYFDFWGQGTMVTVSSTREQKLISEEDGSGSQPHTKPSVFVMKNGTNVACLVKEFYPKDIRINLVSSKKITEFDPAIVISPSGKYNAVKLGKYEDSNSVTCSVQHDNKTVHSTDFEVKTDSTDHVKPKETENTKQPSKSCHKPKAIVHTEKVNMMSLTVLGLRMLFAKTVAVNFLLTAKLFFLRAKRSGSGVKQTLNFDLLKLAGDVESNPGPSRGHMTEYKPTVRLATRDDVPRAVRTLAAAFADYPATRHTVDPDRHIERVTELQELFLTRVGLDIGKVWVADDGAAVAVWTTPESVEAGAVFAEIGPRMAELSGSRLAAQQQMEGLLAPHRPKEPAWFLATVGVSPDHQGKGLGSAVVLPGVEAAERAGVPAFLETSAPRNLPFYERLGFTVTADVEVPEGPRTWCMTRKPGA

SEQ ID NO: 20872 - protein, 1027 aa, synthetic construct
MALPVTALLLPLALLLHAARPDIQMTQSPSSLSASVGDRVTITCLASEDIYDNLAWYQQKPGKAPKLLIYYASSLQDGVPSRFSGSGSGTDYTLTISSLQPEDFATYYCLQDSEYPWTFGQPKANPTVTLFPPSSEELQANKATLVCLISDFYPGAVTVAWKADGSPVKAGVETTKPSKQSNNKYAASSYLSLTPEQWKSHRSYSCQVTHEGSTVEKTVAPTECSGSQSFGLLDPKLCYLLDGILFIYGVILTALFLRVKFSRSADAPAYQQGQNQLYNELNLGRREEYDVLDKRRGRDPEMGGKPQRRKNPQEGLYNELQKDKMAEAYSEIGMKGERRRGKGHDGLYQGLSTATKDTYDALHMQALPPRRAKRSGSGATNFSLLKQAGDVEENPGPTSMDWIWRILFLVGAATGAHSFEEVTLKESGPALVKPTQTLTLTCTFSGFSLTTYGMGVGWIRQPPGKALEWLANIWWDDDKYYNPSLKNRLTISKDTSKNQVVLTMTNMDPVDTATYYCARIGPIKYPTAPYRYFDFWGQGTMVTVSSASTKGPSVFPLAPSSKSTSGGTAALGCLVKDYFPEPVTVSWNSGALTSGVHTFPAVLQSSGLYSLSSVVTVPSSSLGTQTYICNVNHKPSNTKVDKRVEPKSCGTQSFGLLDPKLCYLLDGILFIYGVILTALFLRVKFSRSADAPAYQQGQNQLYNELNLGRREEYDVLDKRRGRDPEMGGKPQRRKNPQEGLYNELQKDKMAEAYSEIGMKGERRRGKGHDGLYQGLSTATKDTYDALHMQALPPRRAKRSGSGVKQTLNFDLLKLAGDVESNPGPSRGHMTEYKPTVRLATRDDVPRAVRTLAAAFADYPATRHTVDPDRHIERVTELQELFLTRVGLDIGKVWVADDGAAVAVWTTPESVEAGAVFAEIGPRMAELSGSRLAAQQQMEGLLAPHRPKEPAWFLATVGVSPDHQGKGLGSAVVLPGVEAAERAGVPAFLETSAPRNLPFYERLGFTVTADVEVPEGPRTWCMTRKPGA

SEQ ID NO: 20873 - protein, 813 aa, synthetic construct
MALPVTALLLPLALLLHAARPDIQMTQSPSSLSASVGDRVTITCLASEDIYDNLAWYQQKPGKAPKLLIYYASSLQDGVPSRFSGSGSGTDYTLTISSLQPEDFATYYCLQDSEYPWTFLEDLKNVFPPEVAVFEPSEAEISHTQKATLVCLATGFYPDHVELSWWVNGKEVHSGVSTDPQPLKEQPALNDSRYCLSSRLRVSATFWQNPRNHFRCQVQFYGLSENDEWTQDRAKPVTQIVSAEAWGRADCGSQSFGLLDPKLCYLLDGILFIYGVILTALFLRVKFSRSADAPAYQQGQNQLYNELNLGRREEYDVLDKRRGRDPEMGGKPQRRKNPQEGLYNELQKDKMAEAYSEIGMKGERRRGKGHDGLYQGLSTATKDTYDALHMQALPPRRAKRSGSGATNFSLLKQAGDVEENPGPTSMDWIWRILFLVGAATGAHSFEEVTLKESGPALVKPTQTLTLTCTFSGFSLTTYGMGVGWIRQPPGKALEWLANIWWDDDKYYNPSLKNRLTISKDTSKNQVVLTMTNMDPVDTATYYCARIGPIKYPTAPYRYFDFWGQGTMVTVSSTRIQNPDPAVYQLRDSKSSDKSVCLFTDFDSQTNVSQSKDSDVYITDKTVLDMRSMDFKSNSAVAWSNKSDFACANAFNNSIIPEDTFFPSPESSCGTQSFGLLDPKLCYLLDGILFIYGVILTALFLRVKFSRSADAPAYQQGQNQLYNELNLGRREEYDVLDKRRGRDPEMGGKPQRRKNPQEGLYNELQKDKMAEAYSEIGMKGERRRGKGHDGLYQGLSTATKDTYDALHMQALPPR

SEQ ID NO: 20874 - protein, 813 aa, synthetic construct
MALPVTALLLPLALLLHAARPDIQMTQSPSSLSASVGDRVTITCLASEDIYDNLAWYQQKPGKAPKLLIYYASSLQDGVPSRFSGSGSGTDYTLTISSLQPEDFATYYCLQDSEYPWTFLEDLKNVFPPEVAVFEPSKAEIAHTQKATLVCLATGFYPDHVELSWWVNGKEVHSGVCTDPQPLKEQPALNDSRYCLSSRLRVSATFWQNPRNHFRCQVQFYGLSENDEWTQDRAKPVTQIVSAEAWGRADCGSQSFGLLDPKLCYLLDGILFIYGVILTALFLRVKFSRSADAPAYQQGQNQLYNELNLGRREEYDVLDKRRGRDPEMGGKPQRRKNPQEGLYNELQKDKMAEAYSEIGMKGERRRGKGHDGLYQGLSTATKDTYDALHMQALPPRRAKRSGSGATNFSLLKQAGDVEENPGPTSMDWIWRILFLVGAATGAHSFEEVTLKESGPALVKPTQTLTLTCTFSGFSLTTYGMGVGWIRQPPGKALEWLANIWWDDDKYYNPSLKNRLTISKDTSKNQVVLTMTNMDPVDTATYYCARIGPIKYPTAPYRYFDFWGQGTMVTVSSTRIQNPDPAVYQLRDSKSSDKSVCLFTDFDSQTNVSQSKDSDVYITDKCVLDMRSMDFKSNSAVAWSNKSDFACANAFNNSIIPEDTFFPSSDVPCGTQSFGLLDPKLCYLLDGILFIYGVILTALFLRVKFSRSADAPAYQQGQNQLYNELNLGRREEYDVLDKRRGRDPEMGGKPQRRKNPQEGLYNELQKDKMAEAYSEIGMKGERRRGKGHDGLYQGLSTATKDTYDALHMQALPPR

SEQ ID NO: 20875 - protein, 884 aa, synthetic construct
MALPVTALLLPLALLLHAARPDIQMTQSPSSLSASVGDRVTITCLASEDIYDNLAWYQQKPGKAPKLLIYYASSLQDGVPSRFSGSGSGTDYTLTISSLQPEDFATYYCLQDSEYPWTFLEGKPIPNPLLGLDSTGSGEDLKNVFPPEVAVFEPSEAEISHTQKATLVCLATGFYPDHVELSWWVNGKEVHSGVSTDPQPLKEQPALNDSRYCLSSRLRVSATFWQNPRNHFRCQVQFYGLSENDEWTQDRAKPVTQIVSAEAWGRADCGSQSFGLLDPKLCYLLDGILFIYGVILTALFLRVKFSRSADAPAYQQGQNQLYNELNLGRREEYDVLDKRRGRDPEMGGKPQRRKNPQEGLYNELQKDKMAEAYSEIGMKGERRRGKGHDGLYQGLSTATKDTYDALHMQALPPRRAKRSGSGATNFSLLKQAGDVEENPGPTSMDWIWRILFLVGAATGAHSFEEVTLKESGPALVKPTQTLTLTCTFSGFSLTTYGMGVGWIRQPPGKALEWLANIWWDDDKYYNPSLKNRLTISKDTSKNQVVLTMTNMDPVDTATYYCARIGPIKYPTAPYRYFDFWGQGTMVTVSSTREQKLISEEDGSGIQNPDPAVYQLRDSKSSDKSVCLFTDFDSQTNVSQSKDSDVYITDKTVLDMRSMDFKSNSAVAWSNKSDFACANAFNNSIIPEDTFFPSPESSCGTQSFGLLDPKLCYLLDGILFIYGVILTALFLRSKRSRLLHSDYMNMTPRRPGPTRKHYQPYAPPRDFAAYRSRVKFSRSADAPAYQQGQNQLYNELNLGRREEYDVLDKRRGRDPEMGGKPQRRKNPQEGLYNELQKDKMAEAYSEIGMKGERRRGKGHDGLYQGLSTATKDTYDALHMQALPPR

SEQ ID NO: 20876 - protein, 925 aa, synthetic construct
MALPVTALLLPLALLLHAARPDIQMTQSPSSLSASVGDRVTITCLASEDIYDNLAWYQQKPGKAPKLLIYYASSLQDGVPSRFSGSGSGTDYTLTISSLQPEDFATYYCLQDSEYPWTFLEGKPIPNPLLGLDSTGSGEDLKNVFPPEVAVFEPSEAEISHTQKATLVCLATGFYPDHVELSWWVNGKEVHSGVSTDPQPLKEQPALNDSRYCLSSRLRVSATFWQNPRNHFRCQVQFYGLSENDEWTQDRAKPVTQIVSAEAWGRADCGSQSFGLLDPKLCYLLDGILFIYGVILTALFLRSKRSRLLHSDYMNMTPRRPGPTRKHYQPYAPPRDFAAYRSRVKFSRSADAPAYQQGQNQLYNELNLGRREEYDVLDKRRGRDPEMGGKPQRRKNPQEGLYNELQKDKMAEAYSEIGMKGERRRGKGHDGLYQGLSTATKDTYDALHMQALPPRRAKRSGSGATNFSLLKQAGDVEENPGPTSMDWIWRILFLVGAATGAHSFEEVTLKESGPALVKPTQTLTLTCTFSGFSLTTYGMGVGWIRQPPGKALEWLANIWWDDDKYYNPSLKNRLTISKDTSKNQVVLTMTNMDPVDTATYYCARIGPIKYPTAPYRYFDFWGQGTMVTVSSTREQKLISEEDGSGIQNPDPAVYQLRDSKSSDKSVCLFTDFDSQTNVSQSKDSDVYITDKTVLDMRSMDFKSNSAVAWSNKSDFACANAFNNSIIPEDTFFPSPESSCGTQSFGLLDPKLCYLLDGILFIYGVILTALFLRSKRSRLLHSDYMNMTPRRPGPTRKHYQPYAPPRDFAAYRSRVKFSRSADAPAYQQGQNQLYNELNLGRREEYDVLDKRRGRDPEMGGKPQRRKNPQEGLYNELQKDKMAEAYSEIGMKGERRRGKGHDGLYQGLSTATKDTYDALHMQALPPR

SEQ ID NO: 20877 - protein, 886 aa, synthetic construct
MALPVTALLLPLALLLHAARPDIQMTQSPSSLSASVGDRVTITCLASEDIYDNLAWYQQKPGKAPKLLIYYASSLQDGVPSRFSGSGSGTDYTLTISSLQPEDFATYYCLQDSEYPWTFLEGKPIPNPLLGLDSTGSGEDLKNVFPPEVAVFEPSEAEISHTQKATLVCLATGFYPDHVELSWWVNGKEVHSGVSTDPQPLKEQPALNDSRYCLSSRLRVSATFWQNPRNHFRCQVQFYGLSENDEWTQDRAKPVTQIVSAEAWGRADCGSQSFGLLDPKLCYLLDGILFIYGVILTALFLRVKFSRSADAPAYQQGQNQLYNELNLGRREEYDVLDKRRGRDPEMGGKPQRRKNPQEGLYNELQKDKMAEAYSEIGMKGERRRGKGHDGLYQGLSTATKDTYDALHMQALPPRRAKRSGSGATNFSLLKQAGDVEENPGPTSMDWIWRILFLVGAATGAHSFEEVTLKESGPALVKPTQTLTLTCTFSGFSLTTYGMGVGWIRQPPGKALEWLANIWWDDDKYYNPSLKNRLTISKDTSKNQVVLTMTNMDPVDTATYYCARIGPIKYPTAPYRYFDFWGQGTMVTVSSTREQKLISEEDLGSGIQNPDPAVYQLRDSKSSDKSVCLFTDFDSQTNVSQSKDSDVYITDKTVLDMRSMDFKSNSAVAWSNKSDFACANAFNNSIIPEDTFFPSPESSCGTQSFGLLDPKLCYLLDGILFIYGVILTALFLKRGRKKLLYIFKQPFMRPVQTTQEEDGCSCRFPEEEEGGCELRVKFSRSADAPAYQQGQNQLYNELNLGRREEYDVLDKRRGRDPEMGGKPQRRKNPQEGLYNELQKDKMAEAYSEIGMKGERRRGKGHDGLYQGLSTATKDTYDALHMQALPPR

SEQ ID NO: 20878 - protein, 928 aa, synthetic construct
MALPVTALLLPLALLLHAARPDIQMTQSPSSLSASVGDRVTITCLASEDIYDNLAWYQQKPGKAPKLLIYYASSLQDGVPSRFSGSGSGTDYTLTISSLQPEDFATYYCLQDSEYPWTFLEGKPIPNPLLGLDSTGSGEDLKNVFPPEVAVFEPSEAEISHTQKATLVCLATGFYPDHVELSWWVNGKEVHSGVSTDPQPLKEQPALNDSRYCLSSRLRVSATFWQNPRNHFRCQVQFYGLSENDEWTQDRAKPVTQIVSAEAWGRADCGSQSFGLLDPKLCYLLDGILFIYGVILTALFLKRGRKKLLYIFKQPFMRPVQTTQEEDGCSCRFPEEEEGGCELRVKFSRSADAPAYQQGQNQLYNELNLGRREEYDVLDKRRGRDPEMGGKPQRRKNPQEGLYNELQKDKMAEAYSEIGMKGERRRGKGHDGLYQGLSTATKDTYDALHMQALPPRRAKRSGSGATNFSLLKQAGDVEENPGPTSMDWIWRILFLVGAATGAHSFEEVTLKESGPALVKPTQTLTLTCTFSGFSLTTYGMGVGWIRQPPGKALEWLANIWWDDDKYYNPSLKNRLTISKDTSKNQVVLTMTNMDPVDTATYYCARIGPIKYPTAPYRYFDFWGQGTMVTVSSTREQKLISEEDLGSGIQNPDPAVYQLRDSKSSDKSVCLFTDFDSQTNVSQSKDSDVYITDKTVLDMRSMDFKSNSAVAWSNKSDFACANAFNNSIIPEDTFFPSPESSCGTQSFGLLDPKLCYLLDGILFIYGVILTALFLKRGRKKLLYIFKQPFMRPVQTTQEEDGCSCRFPEEEEGGCELRVKFSRSADAPAYQQGQNQLYNELNLGRREEYDVLDKRRGRDPEMGGKPQRRKNPQEGLYNELQKDKMAEAYSEIGMKGERRRGKGHDGLYQGLSTATKDTYDALHMQALPPR

SEQ ID NO: 20879 - protein, 818 aa, synthetic construct
MALPVTALLLPLALLLHAARPDIQMTQSPSSLSASVGDRVTITCLASEDIYDNLAWYQQKPGKAPKLLIYYASSLQDGVPSRFSGSGSGTDYTLTISSLQPEDFATYYCLQDSEYPWTFLEQSFGLLDPKLCYLLDGILFIYGVILTALFLRVKFSRSADAPAYQQGQNQLYNELNLGRREEYDVLDKRRGRDPEMGGKPQRRKNPQEGLYNELQKDKMAEAYSEIGMKGERRRGKGHDGLYQGLSTATKDTYDALHMQALPPRRAKRSGSGATNFSLLKQAGDVEENPGPTSMDWIWRILFLVGAATGAHSFEEVTLKESGPALVKPTQTLTLTCTFSGFSLTTYGMGVGWIRQPPGKALEWLANIWWDDDKYYNPSLKNRLTISKDTSKNQVVLTMTNMDPVDTATYYCARIGPIKYPTAPYRYFDFWGQGTMVTVSSTRQSFGLLDPKLCYLLDGILFIYGVILTALFLRVKFSRSADAPAYQQGQNQLYNELNLGRREEYDVLDKRRGRDPEMGGKPQRRKNPQEGLYNELQKDKMAEAYSEIGMKGERRRGKGHDGLYQGLSTATKDTYDALHMQALPPRRAKRSGSGVKQTLNFDLLKLAGDVESNPGPSRGHMTEYKPTVRLATRDDVPRAVRTLAAAFADYPATRHTVDPDRHIERVTELQELFLTRVGLDIGKVWVADDGAAVAVWTTPESVEAGAVFAEIGPRMAELSGSRLAAQQQMEGLLAPHRPKEPAWFLATVGVSPDHQGKGLGSAVVLPGVEAAERAGVPAFLETSAPRNLPFYERLGFTVTADVEVPEGPRTWCMTRKPGA

SEQ ID NO: 20880 - protein, 643 aa, synthetic construct
MALPVTALLLPLALLLHAARPDIQMTQSPSSLSASVGDRVTITCLASEDIYDNLAWYQQKPGKAPKLLIYYASSLQDGVPSRFSGSGSGTDYTLTISSLQPEDFATYYCLQDSEYPWTFLEGQPKANPTVTLFPPSSEELQANKATLVCLISDFYPGAVTVAWKADGSPVKAGVETTKPSKQSNNKYAASSYLSLTPEQWKSHRSYSCQVTHEGSTVEKTVAPTECSPIKTDVITMDPKDNCSKDANDTLLLQLTNTSAYYMYLLLLLKSVVYFAIITCCLLRRTAFCCNGEKSRAKRSGSGATNFSLLKQAGDVEENPGPTSMDWIWRILFLVGAATGAHSFEEVTLKESGPALVKPTQTLTLTCTFSGFSLTTYGMGVGWIRQPPGKALEWLANIWWDDDKYYNPSLKNRLTISKDTSKNQVVLTMTNMDPVDTATYYCARIGPIKYPTAPYRYFDFWGQGTMVTVSSTRASTKGPSVFPLAPSSKSTSGGTAALGCLVKDYFPEPVTVSWNSGALTSGVHTFPAVLQSSGLYSLSSVVTVPSSSLGTQTYICNVNHKPSNTKVDKRVEPKSCEVKTDSTDHVKPKETENTKQPSKSCHKPKAIVHTEKVNMMSLTVLGLRMLFAKTVAVNFLLTAKLFFL

SEQ ID NO: 20881 - protein, 621 aa, synthetic construct
MALPVTALLLPLALLLHAARPDIQMTQSPSSLSASVGDRVTITCLASEDIYDNLAWYQQKPGKAPKLLIYYASSLQDGVPSRFSGSGSGTDYTLTISSLQPEDFATYYCLQDSEYPWTFLEGQPKANPTVTLFPPSSEELQANKATLVCLISDFYPGAVTVAWKADGSPVKAGVETTKPSKQSNNKYAASSYLSLTPEQWKSHRSYSCQVTHEGSTVEKTVAPTECSGRADCGITSASYHQGVLSATILYEILLGKATLYAVLVSALVLMAMVKRKDSRGRAKRSGSGATNFSLLKQAGDVEENPGPTSMDWIWRILFLVGAATGAHSFEEVTLKESGPALVKPTQTLTLTCTFSGFSLTTYGMGVGWIRQPPGKALEWLANIWWDDDKYYNPSLKNRLTISKDTSKNQVVLTMTNMDPVDTATYYCARIGPIKYPTAPYRYFDFWGQGTMVTVSSTRASTKGPSVFPLAPSSKSTSGGTAALGCLVKDYFPEPVTVSWNSGALTSGVHTFPAVLQSSGLYSLSSVVTVPSSSLGTQTYICNVNHKPSNTKVDKRVEPKSCIPEDTFFPSSDVPCDVKLVEKSFETDTNLNFQNLSVIGFRILLLKVAGFNLLMTLRLWSS

SEQ ID NO: 20882 - protein, 621 aa, synthetic construct
MALPVTALLLPLALLLHAARPDIQMTQSPSSLSASVGDRVTITCLASEDIYDNLAWYQQKPGKAPKLLIYYASSLQDGVPSRFSGSGSGTDYTLTISSLQPEDFATYYCLQDSEYPWTFLEGQPKANPTVTLFPPSSEELQANKATLVCLISDFYPGAVTVAWKADGSPVKAGVETTKPSKQSNNKYAASSYLSLTPEQWKSHRSYSCQVTHEGSTVEKTVAPTECSGRADCGFTSESYQQGVLSATILYEILLGKATLYAVLVSALVLMAMVKRKDSRGRAKRSGSGATNFSLLKQAGDVEENPGPTSMDWIWRILFLVGAATGAHSFEEVTLKESGPALVKPTQTLTLTCTFSGFSLTTYGMGVGWIRQPPGKALEWLANIWWDDDKYYNPSLKNRLTISKDTSKNQVVLTMTNMDPVDTATYYCARIGPIKYPTAPYRYFDFWGQGTMVTVSSTRASTKGPSVFPLAPSSKSTSGGTAALGCLVKDYFPEPVTVSWNSGALTSGVHTFPAVLQSSGLYSLSSVVTVPSSSLGTQTYICNVNHKPSNTKVDKRVEPKSCIPEDTFFPSPESSCDVKLVEKSFETDTNLNFQNLSVIGFRILLLKVAGFNLLMTLRLWSS

SEQ ID NO: 20883 - protein, 447 aa, synthetic construct
MALPVTALLLPLALLLHAARPDIQMTQSPSSLSASVGDRVTITCLASEDIYDNLAWYQQKPGKAPKLLIYYASSLQDGVPSRFSGSGSGTDYTLTISSLQPEDFATYYCLQDSEYPWTFGGGGSGGGGSGGGGSEVTLKESGPALVKPTQTLTLTCTFSGFSLTTYGMGVGWIRQPPGKALEWLANIWWDDDKYYNPSLKNRLTISKDTSKNQVVLTMTNMDPVDTATYYCARIGPIKYPTAPYRYFDFWGQGTMVTVSSTRDGNEEMGGITQTPYKVSISGTTVILTCPQYPGSEILWQHNDKNIGGDEDDKNIGSDEDHLSLKEFSELEQSGYYVCYPRGSKPEDANFYLYLRARVCENCMEMDVMSVATIVIVDICITGGLLLLVYYWSKNRKAKAKPVTRGAGAGGRQRGQNKERPPPVPNPDYEPIRKGQRDLYSGLNQRRI

SEQ ID NO: 20884 - protein, 412 aa, synthetic construct
MALPVTALLLPLALLLHAARPDIQMTQSPSSLSASVGDRVTITCLASEDIYDNLAWYQQKPGKAPKLLIYYASSLQDGVPSRFSGSGSGTDYTLTISSLQPEDFATYYCLQDSEYPWTFGGGGSGGGGSGGGGSEVTLKESGPALVKPTQTLTLTCTFSGFSLTTYGMGVGWIRQPPGKALEWLANIWWDDDKYYNPSLKNRLTISKDTSKNQVVLTMTNMDPVDTATYYCARIGPIKYPTAPYRYFDFWGQGTMVTVSSTRFKIPIEELEDRVFVNCNTSITWVEGTVGTLLSDITRLDLGKRILDPRGIYRCNGTDIYKDKESTVQVHYRMCQSCVELDPATVAGIIVTDVIATLLLALGVFCFAGHETGRLSGAADTQALLRNDQVYQPLRDRDDAQYSHLGGNWARNK

SEQ ID NO: 20885 - protein, 422 aa, synthetic construct
MALPVTALLLPLALLLHAARPDIQMTQSPSSLSASVGDRVTITCLASEDIYDNLAWYQQKPGKAPKLLIYYASSLQDGVPSRFSGSGSGTDYTLTISSLQPEDFATYYCLQDSEYPWTFGGGGSGGGGSGGGGSEVTLKESGPALVKPTQTLTLTCTFSGFSLTTYGMGVGWIRQPPGKALEWLANIWWDDDKYYNPSLKNRLTISKDTSKNQVVLTMTNMDPVDTATYYCARIGPIKYPTAPYRYFDFWGQGTMVTVSSTRQSIKGNHLVKVYDYQEDGSVLLTCDAEAKNITWFKDGKMIGFLTEDKKKWNLGSNAKDPRGMYQCKGSQNKSKPLQVYYRMCQNCIELNAATISGFLFAEIVSIFVLAVGVYFIAGQDGVRQSRASDKQTLLPNDQLYQPLKDREDDQYSHLQGNQLRRN

SEQ ID NO: 20886 - protein, 405 aa, synthetic construct
MALPVTALLLPLALLLHAARPDIQMTQSPSSLSASVGDRVTITCLASEDIYDNLAWYQQKPGKAPKLLIYYASSLQDGVPSRFSGSGSGTDYTLTISSLQPEDFATYYCLQDSEYPWTFGGGGSGGGGSGGGGSEVTLKESGPALVKPTQTLTLTCTFSGFSLTTYGMGVGWIRQPPGKALEWLANIWWDDDKYYNPSLKNRLTISKDTSKNQVVLTMTNMDPVDTATYYCARIGPIKYPTAPYRYFDFWGQGTMVTVSSTRQSFGLLDPKLCYLLDGILFIYGVILTALFLRVKFSRSADAPAYQQGQNQLYNELNLGRREEYDVLDKRRGRDPEMGGKPQRRKNPQEGLYNELQKDKMAEAYSEIGMKGERRRGKGHDGLYQGLSTATKDTYDALHMQALPPR

SEQ ID NO: 20887 - protein, 447 aa, synthetic construct
MALPVTALLLPLALLLHAARPEVTLKESGPALVKPTQTLTLTCTFSGFSLTTYGMGVGWIRQPPGKALEWLANIWWDDDKYYNPSLKNRLTISKDTSKNQVVLTMTNMDPVDTATYYCARIGPIKYPTAPYRYFDFWGQGTMVTVSSGGGGSGGGGSGGGGSDIQMTQSPSSLSASVGDRVTITCLASEDIYDNLAWYQQKPGKAPKLLIYYASSLQDGVPSRFSGSGSGTDYTLTISSLQPEDFATYYCLQDSEYPWTFTRDGNEEMGGITQTPYKVSISGTTVILTCPQYPGSEILWQHNDKNIGGDEDDKNIGSDEDHLSLKEFSELEQSGYYVCYPRGSKPEDANFYLYLRARVCENCMEMDVMSVATIVIVDICITGGLLLLVYYWSKNRKAKAKPVTRGAGAGGRQRGQNKERPPPVPNPDYEPIRKGQRDLYSGLNQRRI

SEQ ID NO: 20888 - protein, 412 aa, synthetic construct
MALPVTALLLPLALLLHAARPEVTLKESGPALVKPTQTLTLTCTFSGFSLTTYGMGVGWIRQPPGKALEWLANIWWDDDKYYNPSLKNRLTISKDTSKNQVVLTMTNMDPVDTATYYCARIGPIKYPTAPYRYFDFWGQGTMVTVSSGGGGSGGGGSGGGGSDIQMTQSPSSLSASVGDRVTITCLASEDIYDNLAWYQQKPGKAPKLLIYYASSLQDGVPSRFSGSGSGTDYTLTISSLQPEDFATYYCLQDSEYPWTFTRFKIPIEELEDRVFVNCNTSITWVEGTVGTLLSDITRLDLGKRILDPRGIYRCNGTDIYKDKESTVQVHYRMCQSCVELDPATVAGIIVTDVIATLLLALGVFCFAGHETGRLSGAADTQALLRNDQVYQPLRDRDDAQYSHLGGNWARNK

SEQ ID NO: 20889 - protein, 422 aa, synthetic construct
MALPVTALLLPLALLLHAARPEVTLKESGPALVKPTQTLTLTCTFSGFSLTTYGMGVGWIRQPPGKALEWLANIWWDDDKYYNPSLKNRLTISKDTSKNQVVLTMTNMDPVDTATYYCARIGPIKYPTAPYRYFDFWGQGTMVTVSSGGGGSGGGGSGGGGSDIQMTQSPSSLSASVGDRVTITCLASEDIYDNLAWYQQKPGKAPKLLIYYASSLQDGVPSRFSGSGSGTDYTLTISSLQPEDFATYYCLQDSEYPWTFTRQSIKGNHLVKVYDYQEDGSVLLTCDAEAKNITWFKDGKMIGFLTEDKKKWNLGSNAKDPRGMYQCKGSQNKSKPLQVYYRMCQNCIELNAATISGFLFAEIVSIFVLAVGVYFIAGQDGVRQSRASDKQTLLPNDQLYQPLKDREDDQYSHLQGNQLRRN

SEQ ID NO: 20890 - protein, 405 aa, synthetic construct
MALPVTALLLPLALLLHAARPEVTLKESGPALVKPTQTLTLTCTFSGFSLTTYGMGVGWIRQPPGKALEWLANIWWDDDKYYNPSLKNRLTISKDTSKNQVVLTMTNMDPVDTATYYCARIGPIKYPTAPYRYFDFWGQGTMVTVSSGGGGSGGGGSGGGGSDIQMTQSPSSLSASVGDRVTITCLASEDIYDNLAWYQQKPGKAPKLLIYYASSLQDGVPSRFSGSGSGTDYTLTISSLQPEDFATYYCLQDSEYPWTFTRQSFGLLDPKLCYLLDGILFIYGVILTALFLRVKFSRSADAPAYQQGQNQLYNELNLGRREEYDVLDKRRGRDPEMGGKPQRRKNPQEGLYNELQKDKMAEAYSEIGMKGERRRGKGHDGLYQGLSTATKDTYDALHMQALPPR

SEQ ID NO: 20891 - protein, 500 aa, synthetic construct
MALPVTALLLPLALLLHAARPDIQMTQSPSSLSASVGDRVTITCLASEDIYDNLAWYQQKPGKAPKLLIYYASSLQDGVPSRFSGSGSGTDYTLTISSLQPEDFATYYCLQDSEYPWTFGGGGSGGGGSGGGGSEVTLKESGPALVKPTQTLTLTCTFSGFSLTTYGMGVGWIRQPPGKALEWLANIWWDDDKYYNPSLKNRLTISKDTSKNQVVLTMTNMDPVDTATYYCARIGPIKYPTAPYRYFDFWGQGTMVTVSSTRGMRTEDLPKAVVFLEPQWYRVLEKDSVTLKCQGAYSPEDNSTQWFHNESLISSQASSYFIDAATVDDSGEYRCQTNLSTLSDPVQLEVHIGWLLLQAPRWVFKEEDPIHLRCHSWKNTALHKVTYLQNGKGRKYFHHNSDFYIPKATLKDSGSYFCRGLVGSKNVSSETVNITITQGLAVPTISSFFPPGYQVSFCLVMVLLFAVDTGLYFSVKTNIRSSTRDWKDHKFKWRKDPQDK

SEQ ID NO: 20892 - protein, 782 aa, synthetic construct
MALPVTALLLPLALLLHAARPDIQMTQSPSSLSASVGDRVTITCLASEDIYDNLAWYQQKPGKAPKLLIYYASSLQDGVPSRFSGSGSGTDYTLTISSLQPEDFATYYCLQDSEYPWTFGGGGSGGGGSGGGGSEVTLKESGPALVKPTQTLTLTCTFSGFSLTTYGMGVGWIRQPPGKALEWLANIWWDDDKYYNPSLKNRLTISKDTSKNQVVLTMTNMDPVDTATYYCARIGPIKYPTAPYRYFDFWGQGTMVTVSSTRGGSGQQQTLPKPFIWAEPHFMVPKEKQVTICCQGNYGAVEYQLHFEGSLFAVDRPKPPERINKVQFYIPDMNSRMAGQYSCIYRVGELWSEPSNLLDLVVTEMYDTPTLSVHPGPEVISGEKVTFYCRLDTATSMFLLLKEGRSSHVQRGYGKVQAEFPLGPVTTAHRGTYRCFGSYNNHAWSFPSEPVKLLVTGDIENTSLAPEDPTFPADTWGTYLLTTETGLQKDHALWDHTAQNLLRMGLAFLVLVALVWFLVEDWLSRKRTRERASRASTWEGRRRLNTQTLRAKRSGSGVKQTLNFDLLKLAGDVESNPGPSRGHMTEYKPTVRLATRDDVPRAVRTLAAAFADYPATRHTVDPDRHIERVTELQELFLTRVGLDIGKVWVADDGAAVAVWTTPESVEAGAVFAEIGPRMAELSGSRLAAQQQMEGLLAPHRPKEPAWFLATVGVSPDHQGKGLGSAVVLPGVEAAERAGVPAFLETSAPRNLPFYERLGFTVTADVEVPEGPRTWCMTRKPGA

SEQ ID NO: 20893 - protein, 615 aa, synthetic construct
MALPVTALLLPLALLLHAARPDIQMTQSPSSLSASVGDRVTITCLASEDIYDNLAWYQQKPGKAPKLLIYYASSLQDGVPSRFSGSGSGTDYTLTISSLQPEDFATYYCLQDSEYPWTFGGGGSGGGGSGGGGSEVTLKESGPALVKPTQTLTLTCTFSGFSLTTYGMGVGWIRQPPGKALEWLANIWWDDDKYYNPSLKNRLTISKDTSKNQVVLTMTNMDPVDTATYYCARIGPIKYPTAPYRYFDFWGQGTMVTVSSTRKIEVMYPPPYLDNEKSNGTIIHVKGARGDIENTSLAPEDPTFPADTWGTYLLTTETGLQKDHALWDHTAQNLLRMGLAFLVLVALVWFLVEDWLSRKRTRERASRASTWEGRRRLNTQTLRAKRSGSGVKQTLNFDLLKLAGDVESNPGPSRGHMTEYKPTVRLATRDDVPRAVRTLAAAFADYPATRHTVDPDRHIERVTELQELFLTRVGLDIGKVWVADDGAAVAVWTTPESVEAGAVFAEIGPRMAELSGSRLAAQQQMEGLLAPHRPKEPAWFLATVGVSPDHQGKGLGSAVVLPGVEAAERAGVPAFLETSAPRNLPFYERLGFTVTADVEVPEGPRTWCMTRKPGA

SEQ ID NO: 20894 - protein, 702 aa, synthetic construct
MALPVTALLLPLALLLHAARPDIQMTQSPSSLSASVGDRVTITCLASEDIYDNLAWYQQKPGKAPKLLIYYASSLQDGVPSRFSGSGSGTDYTLTISSLQPEDFATYYCLQDSEYPWTFGGGGSGGGGSGGGGSEVTLKESGPALVKPTQTLTLTCTFSGFSLTTYGMGVGWIRQPPGKALEWLANIWWDDDKYYNPSLKNRLTISKDTSKNQVVLTMTNMDPVDTATYYCARIGPIKYPTAPYRYFDFWGQGTMVTVSSTRLWVSQPPEIRTLEGSSAFLPCSFNASQGRLAIGSVTWFRDEVVPGKEVRNGTPEFRGRLAPLASSRFLHDHQAELHIRDVRGHDASIYVCRVEVLGLGVGTGNGTRLVVEKEHPQLGAGTVLLLRAGFYAVSFLSVAVGSTVYYQGKCLTWKGPRRQLPAVVPAPLPPPCGSSAHLLPPVPGGRAKRSGSGVKQTLNFDLLKLAGDVESNPGPSRMYRMQLLSCIALSLALVTNSAPTSSSTKKTQLQLEHLLLDLQMILNGINNYKNPKLTEMLTAKFYMPKKATELKHLQCLEEELKPLEEVLNLAQSKNFHLRPRDLISNINVIVLELKGSETTFMCEYADETATIVEFLNRWITFCQSIISTLTKIEVMYPPPYLDNEKSNGTIIHVKGKHLCPSPLFPGPSKPFWVLVVVGGVLACYSLLVTVAFIIFWVRSKRS

SEQ ID NO: 20895 - protein, 678 aa, synthetic construct
MALPVTALLLPLALLLHAARPDIQMTQSPSSLSASVGDRVTITCLASEDIYDNLAWYQQKPGKAPKLLIYYASSLQDGVPSRFSGSGSGTDYTLTISSLQPEDFATYYCLQDSEYPWTFGGGGSGGGGSGGGGSEVTLKESGPALVKPTQTLTLTCTFSGFSLTTYGMGVGWIRQPPGKALEWLANIWWDDDKYYNPSLKNRLTISKDTSKNQVVLTMTNMDPVDTATYYCARIGPIKYPTAPYRYFDFWGQGTMVTVSSTRLWVSQPPEIRTLEGSSAFLPCSFNASQGRLAIGSVTWFRDEVVPGKEVRNGTPEFRGRLAPLASSRFLHDHQAELHIRDVRGHDASIYVCRVEVLGLGVGTGNGTRLVVEKEHPQLGAGTVLLLRAGFYAVSFLSVAVGSTVYYQGKCLTWKGPRRQLPAVVPAPLPPPCGSSAHLLPPVPGGRAKRSGSGVKQTLNFDLLKLAGDVESNPGPSRGHMTEYKPTVRLATRDDVPRAVRTLAAAFADYPATRHTVDPDRHIERVTELQELFLTRVGLDIGKVWVADDGAAVAVWTTPESVEAGAVFAEIGPRMAELSGSRLAAQQQMEGLLAPHRPKEPAWFLATVGVSPDHQGKGLGSAVVLPGVEAAERAGVPAFLETSAPRNLPFYERLGFTVTADVEVPEGPRTWCMTRKPGA

SEQ ID NO: 20896 - protein, 354 aa, synthetic construct
MALPVTALLLPLALLLHAARPDIQMTQSPSSLSASVGDRVTITCLASEDIYDNLAWYQQKPGKAPKLLIYYASSLQDGVPSRFSGSGSGTDYTLTISSLQPEDFATYYCLQDSEYPWTFGGGGSGGGGSGGGGSEVTLKESGPALVKPTQTLTLTCTFSGFSLTTYGMGVGWIRQPPGKALEWLANIWWDDDKYYNPSLKNRLTISKDTSKNQVVLTMTNMDPVDTATYYCARIGPIKYPTAPYRYFDFWGQGTMVTVSSTRKIEVMYPPPYLDNEKSNGTIIHVKGARITQGLAVSTISSFFPPGYQVSFCLVMVLLFAVDTGLYFSVKTNIRSSTRDWKDHKFKWRKDPQDK

SEQ ID NO: 20897 - protein, 354 aa, synthetic construct
MALPVTALLLPLALLLHAARPDIQMTQSPSSLSASVGDRVTITCLASEDIYDNLAWYQQKPGKAPKLLIYYASSLQDGVPSRFSGSGSGTDYTLTISSLQPEDFATYYCLQDSEYPWTFGGGGSGGGGSGGGGSEVTLKESGPALVKPTQTLTLTCTFSGFSLTTYGMGVGWIRQPPGKALEWLANIWWDDDKYYNPSLKNRLTISKDTSKNQVVLTMTNMDPVDTATYYCARIGPIKYPTAPYRYFDFWGQGTMVTVSSTRKIEVMYPPPYLDNEKSNGTIIHVKGARITQGLAVPTISSFFPPGYQVSFCLVMVLLFAVDTGLYFSVKTNIRSSTRDWKDHKFKWRKDPQDK

SEQ ID NO: 20898 - protein, 333 aa, synthetic construct
MALPVTALLLPLALLLHAARPDIQMTQSPSSLSASVGDRVTITCLASEDIYDNLAWYQQKPGKAPKLLIYYASSLQDGVPSRFSGSGSGTDYTLTISSLQPEDFATYYCLQDSEYPWTFGGGGSGGGGSGGGGSEVTLKESGPALVKPTQTLTLTCTFSGFSLTTYGMGVGWIRQPPGKALEWLANIWWDDDKYYNPSLKNRLTISKDTSKNQVVLTMTNMDPVDTATYYCARIGPIKYPTAPYRYFDFWGQGTMVTVSSTRKIEVMYPPPYLDNEKSNGTIIHVKGARITQGLAVSTISSFSPPGYQVSFCLVMVLLFAVDTGLYFSVKTNI

SEQ ID NO: 20899 - protein, 364 aa, synthetic construct
MALPVTALLLPLALLLHAARPDIQMTQSPSSLSASVGDRVTITCLASEDIYDNLAWYQQKPGKAPKLLIYYASSLQDGVPSRFSGSGSGTDYTLTISSLQPEDFATYYCLQDSEYPWTFGGGGSGGGGSGGGGSEVTLKESGPALVKPTQTLTLTCTFSGFSLTTYGMGVGWIRQPPGKALEWLANIWWDDDKYYNPSLKNRLTISKDTSKNQVVLTMTNMDPVDTATYYCARIGPIKYPTAPYRYFDFWGQGTMVTVSSTRKIEVMYPPPYLDNEKSNGTIIHVKGARVEKEHPQLGAGTVLLLRAGFYAVSFLSVAVGSTVYYQGKCLTWKGPRRQLPAVVPAPLPPPCGSSAHLLPPVPGG

SEQ ID NO: 20900 - protein, 445 aa, synthetic construct
MALPVTALLLPLALLLHAARPDIQMTQSPSSLSASVGDRVTITCLASEDIYDNLAWYQQKPGKAPKLLIYYASSLQDGVPSRFSGSGSGTDYTLTISSLQPEDFATYYCLQDSEYPWTFGGGGSGGGGSGGGGSEVTLKESGPALVKPTQTLTLTCTFSGFSLTTYGMGVGWIRQPPGKALEWLANIWWDDDKYYNPSLKNRLTISKDTSKNQVVLTMTNMDPVDTATYYCARIGPIKYPTAPYRYFDFWGQGTMVTVSSTRKIEVMYPPPYLDNEKSNGTIIHVKGARKSVRFYLVVSPASASTQTSWTPRDLVSSQTQTQSCVPPTAGARQAPESPSTIPVPSQPQNSTLRPGPAAPIALVPVFCGLLVAKSLVLSALLVWWGDIWWKTMMELRSLDTQKATCHLQQVTDLPWTSVSSPVEREILYHTVARTKISDDDDEHTL

SEQ ID NO: 20901 - protein, 382 aa, synthetic construct
MALPVTALLLPLALLLHAARPDIQMTQSPSSLSASVGDRVTITCLASEDIYDNLAWYQQKPGKAPKLLIYYASSLQDGVPSRFSGSGSGTDYTLTISSLQPEDFATYYCLQDSEYPWTFGGGGSGGGGSGGGGSEVTLKESGPALVKPTQTLTLTCTFSGFSLTTYGMGVGWIRQPPGKALEWLANIWWDDDKYYNPSLKNRLTISKDTSKNQVVLTMTNMDPVDTATYYCARIGPIKYPTAPYRYFDFWGQGTMVTVSSTRKIEVMYPPPYLDNEKSNGTIIHVKGARGDIENTSLAPEDPTFPADTWGTYLLTTETGLQKDHALWDHTAQNLLRMGLAFLVLVALVWFLVEDWLSRKRTRERASRASTWEGRRRLNTQTL

SEQ ID NO: 20902 - protein, 978 aa, synthetic construct
MALPVTALLLPLALLLHAARPDIQMTQSPSSLSASVGDRVTITCLASEDIYDNLAWYQQKPGKAPKLLIYYASSLQDGVPSRFSGSGSGTDYTLTISSLQPEDFATYYCLQDSEYPWTFLEGQPKANPTVTLFPPSSEELQANKATLVCLISDFYPGAVTVAWKADGSPVKAGVETTKPSKQSNNKYAASSYLSLTPEQWKSHRSYSCQVTHEGSTVEKTVAPTECSGSQSFGLLDPKLCYLLDGILFIYGVILTALFLRVKFSRSADAPAYQQGQNQLYNELNLGRREEYDVLDKRRGRDPEMGGKPQRRKNPQEGLYNELQKDKMAEAYSEIGMKGERRRGKGHDGLYQGLSTATKDTYDALHMQALPPRRAKRSGSGATNFSLLKQAGDVEENPGPTSMDWIWRILFLVGAATGAHSFEEVTLKESGPALVKPTQTLTLTCTFSGFSLTTYGMGVGWIRQPPGKALEWLANIWWDDDKYYNPSLKNRLTISKDTSKNQVVLTMTNMDPVDTATYYCARIGPIKYPTAPYRYFDFWGQGTMVTVSSTRASTKGPSVFPLAPSSKSTSGGTAALGCLVKDYFPEPVTVSWNSGALTSGVHTFPAVLQSSGLYSLSSVVTVPSSSLGTQTYICNVNHKPSNTKVDKRVEPKSCGTGDIENTSLAPEDPTFPADTWGTYLLTTETGLQKDHALWDHTAQNLLRMGLAFLVLVALVWFLVEDWLSRKRTRERASRASTWEGRRRLNTQTLRAKRSGSGATNFSLLKQAGDVEENPGPSRGHMTEYKPTVRLATRDDVPRAVRTLAAAFADYPATRHTVDPDRHIERVTELQELFLTRVGLDIGKVWVADDGAAVAVWTTPESVEAGAVFAEIGPRMAELSGSRLAAQQQMEGLLAPHRPKEPAWFLATVGVSPDHQGKGLGSAVVLPGVEAAERAGVPAFLETSAPRNLPFYERLGFTVTADVEVPEGPRTWCMTRKPGA

SEQ ID NO: 20903 - protein, 1044 aa, synthetic construct
MALPVTALLLPLALLLHAARPDIQMTQSPSSLSASVGDRVTITCLASEDIYDNLAWYQQKPGKAPKLLIYYASSLQDGVPSRFSGSGSGTDYTLTISSLQPEDFATYYCLQDSEYPWTFLEGQPKANPTVTLFPPSSEELQANKATLVCLISDFYPGAVTVAWKADGSPVKAGVETTKPSKQSNNKYAASSYLSLTPEQWKSHRSYSCQVTHEGSTVEKTVAPTECSGSQSFGLLDPKLCYLLDGILFIYGVILTALFLRVKFSRSADAPAYQQGQNQLYNELNLGRREEYDVLDKRRGRDPEMGGKPQRRKNPQEGLYNELQKDKMAEAYSEIGMKGERRRGKGHDGLYQGLSTATKDTYDALHMQALPPRRAKRSGSGATNFSLLKQAGDVEENPGPTSMDWIWRILFLVGAATGAHSFEEVTLKESGPALVKPTQTLTLTCTFSGFSLTTYGMGVGWIRQPPGKALEWLANIWWDDDKYYNPSLKNRLTISKDTSKNQVVLTMTNMDPVDTATYYCARIGPIKYPTAPYRYFDFWGQGTMVTVSSTRASTKGPSVFPLAPSSKSTSGGTAALGCLVKDYFPEPVTVSWNSGALTSGVHTFPAVLQSSGLYSLSSVVTVPSSSLGTQTYICNVNHKPSNTKVDKRVEPKSCGTKSVRFYLVVSPASASTQTSWTPRDLVSSQTQTQSCVPPTAGARQAPESPSTIPVPSQPQNSTLRPGPAAPIALVPVFCGLLVAKSLVLSALLVWWGDIWWKTMMELRSLDTQKATCHLQQVTDLPWTSVSSPVEREILYHTVARTKISDDDDEHTLRAKRSGSGVKQTLNFDLLKLAGDVESNPGPSRGHMTEYKPTVRLATRDDVPRAVRTLAAAFADYPATRHTVDPDRHIERVTELQELFLTRVGLDIGKVWVADDGAAVAVWTTPESVEAGAVFAEIGPRMAELSGSRLAAQQQMEGLLAPHRPKEPAWFLATVGVSPDHQGKGLGSAVVLPGVEAAERAGVPAFLETSAPRNLPFYERLGFTVTADVEVPEGPRTWCMTRKPGA

SEQ ID NO: 20904 - protein, 964 aa, synthetic construct
MALPVTALLLPLALLLHAARPDIQMTQSPSSLSASVGDRVTITCLASEDIYDNLAWYQQKPGKAPKLLIYYASSLQDGVPSRFSGSGSGTDYTLTISSLQPEDFATYYCLQDSEYPWTFLEGQPKANPTVTLFPPSSEELQANKATLVCLISDFYPGAVTVAWKADGSPVKAGVETTKPSKQSNNKYAASSYLSLTPEQWKSHRSYSCQVTHEGSTVEKTVAPTECSGSQSFGLLDPKLCYLLDGILFIYGVILTALFLRVKFSRSADAPAYQQGQNQLYNELNLGRREEYDVLDKRRGRDPEMGGKPQRRKNPQEGLYNELQKDKMAEAYSEIGMKGERRRGKGHDGLYQGLSTATKDTYDALHMQALPPRRAKRSGSGATNFSLLKQAGDVEENPGPTSMDWIWRILFLVGAATGAHSFEEVTLKESGPALVKPTQTLTLTCTFSGFSLTTYGMGVGWIRQPPGKALEWLANIWWDDDKYYNPSLKNRLTISKDTSKNQVVLTMTNMDPVDTATYYCARIGPIKYPTAPYRYFDFWGQGTMVTVSSTRASTKGPSVFPLAPSSKSTSGGTAALGCLVKDYFPEPVTVSWNSGALTSGVHTFPAVLQSSGLYSLSSVVTVPSSSLGTQTYICNVNHKPSNTKVDKRVEPKSCGTVVEKEHPQLGAGTVLLLRAGFYAVSFLSVAVGSTVYYQGKCLTWKGPRRQLPAVVPAPLPPPCGSSAHLLPPVPGGRAKRSGSGVKQTLNFDLLKLAGDVESNPGPSRGHMTEYKPTVRLATRDDVPRAVRTLAAAFADYPATRHTVDPDRHIERVTELQELFLTRVGLDIGKVWVADDGAAVAVWTTPESVEAGAVFAEIGPRMAELSGSRLAAQQQMEGLLAPHRPKEPAWFLATVGVSPDHQGKGLGSAVVLPGVEAAERAGVPAFLETSAPRNLPFYERLGFTVTADVEVPEGPRTWCMTRKPGA

SEQ ID NO: 20905 - protein, 993 aa, synthetic construct
MALPVTALLLPLALLLHAARPDIQMTQSPSSLSASVGDRVTITCLASEDIYDNLAWYQQKPGKAPKLLIYYASSLQDGVPSRFSGSGSGTDYTLTISSLQPEDFATYYCLQDSEYPWTFLEDLKNVFPPEVAVFEPSEAEISHTQKATLVCLATGFYPDHVELSWWVNGKEVHSGVSTDPQPLKEQPALNDSRYCLSSRLRVSATFWQNPRNHFRCQVQFYGLSENDEWTQDRAKPVTQIVSAEAWGRADCGSQSFGLLDPKLCYLLDGILFIYGVILTALFLRVKFSRSADAPAYQQGQNQLYNELNLGRREEYDVLDKRRGRDPEMGGKPQRRKNPQEGLYNELQKDKMAEAYSEIGMKGERRRGKGHDGLYQGLSTATKDTYDALHMQALPPRRAKRSGSGATNFSLLKQAGDVEENPGPTSMDWIWRILFLVGAATGAHSFEEVTLKESGPALVKPTQTLTLTCTFSGFSLTTYGMGVGWIRQPPGKALEWLANIWWDDDKYYNPSLKNRLTISKDTSKNQVVLTMTNMDPVDTATYYCARIGPIKYPTAPYRYFDFWGQGTMVTVSSTRIQNPDPAVYQLRDSKSSDKSVCLFTDFDSQTNVSQSKDSDVYITDKTVLDMRSMDFKSNSAVAWSNKSDFACANAFNNSIIPEDTFFPSPESSCGTGDIENTSLAPEDPTFPADTWGTYLLTTETGLQKDHALWDHTAQNLLRMGLAFLVLVALVWFLVEDWLSRKRTRERASRASTWEGRRRLNTQTLRAKRSGSGATNFSLLKQAGDVEENPGPSRGHMTEYKPTVRLATRDDVPRAVRTLAAAFADYPATRHTVDPDRHIERVTELQELFLTRVGLDIGKVWVADDGAAVAVWTTPESVEAGAVFAEIGPRMAELSGSRLAAQQQMEGLLAPHRPKEPAWFLATVGVSPDHQGKGLGSAVVLPGVEAAERAGVPAFLETSAPRNLPFYERLGFTVTADVEVPEGPRTWCMTRKPGA

SEQ ID NO: 20906 - protein, 1059 aa, synthetic construct
MALPVTALLLPLALLLHAARPDIQMTQSPSSLSASVGDRVTITCLASEDIYDNLAWYQQKPGKAPKLLIYYASSLQDGVPSRFSGSGSGTDYTLTISSLQPEDFATYYCLQDSEYPWTFLEDLKNVFPPEVAVFEPSEAEISHTQKATLVCLATGFYPDHVELSWWVNGKEVHSGVSTDPQPLKEQPALNDSRYCLSSRLRVSATFWQNPRNHFRCQVQFYGLSENDEWTQDRAKPVTQIVSAEAWGRADCGSQSFGLLDPKLCYLLDGILFIYGVILTALFLRVKFSRSADAPAYQQGQNQLYNELNLGRREEYDVLDKRRGRDPEMGGKPQRRKNPQEGLYNELQKDKMAEAYSEIGMKGERRRGKGHDGLYQGLSTATKDTYDALHMQALPPRRAKRSGSGATNFSLLKQAGDVEENPGPTSMDWIWRILFLVGAATGAHSFEEVTLKESGPALVKPTQTLTLTCTFSGFSLTTYGMGVGWIRQPPGKALEWLANIWWDDDKYYNPSLKNRLTISKDTSKNQVVLTMTNMDPVDTATYYCARIGPIKYPTAPYRYFDFWGQGTMVTVSSTRIQNPDPAVYQLRDSKSSDKSVCLFTDFDSQTNVSQSKDSDVYITDKTVLDMRSMDFKSNSAVAWSNKSDFACANAFNNSIIPEDTFFPSPESSCGTKSVRFYLVVSPASASTQTSWTPRDLVSSQTQTQSCVPPTAGARQAPESPSTIPVPSQPQNSTLRPGPAAPIALVPVFCGLLVAKSLVLSALLVWWGDIWWKTMMELRSLDTQKATCHLQQVTDLPWTSVSSPVEREILYHTVARTKISDDDDEHTLRAKRSGSGVKQTLNFDLLKLAGDVESNPGPSRGHMTEYKPTVRLATRDDVPRAVRTLAAAFADYPATRHTVDPDRHIERVTELQELFLTRVGLDIGKVWVADDGAAVAVWTTPESVEAGAVFAEIGPRMAELSGSRLAAQQQMEGLLAPHRPKEPAWFLATVGVSPDHQGKGLGSAVVLPGVEAAERAGVPAFLETSAPRNLPFYERLGFTVTADVEVPEGPRTWCMTRKPGA

SEQ ID NO: 20907 - protein, 979 aa, synthetic construct
MALPVTALLLPLALLLHAARPDIQMTQSPSSLSASVGDRVTITCLASEDIYDNLAWYQQKPGKAPKLLIYYASSLQDGVPSRFSGSGSGTDYTLTISSLQPEDFATYYCLQDSEYPWTFLEDLKNVFPPEVAVFEPSEAEISHTQKATLVCLATGFYPDHVELSWWVNGKEVHSGVSTDPQPLKEQPALNDSRYCLSSRLRVSATFWQNPRNHFRCQVQFYGLSENDEWTQDRAKPVTQIVSAEAWGRADCGSQSFGLLDPKLCYLLDGILFIYGVILTALFLRVKFSRSADAPAYQQGQNQLYNELNLGRREEYDVLDKRRGRDPEMGGKPQRRKNPQEGLYNELQKDKMAEAYSEIGMKGERRRGKGHDGLYQGLSTATKDTYDALHMQALPPRRAKRSGSGATNFSLLKQAGDVEENPGPTSMDWIWRILFLVGAATGAHSFEEVTLKESGPALVKPTQTLTLTCTFSGFSLTTYGMGVGWIRQPPGKALEWLANIWWDDDKYYNPSLKNRLTISKDTSKNQVVLTMTNMDPVDTATYYCARIGPIKYPTAPYRYFDFWGQGTMVTVSSTRIQNPDPAVYQLRDSKSSDKSVCLFTDFDSQTNVSQSKDSDVYITDKTVLDMRSMDFKSNSAVAWSNKSDFACANAFNNSIIPEDTFFPSPESSCGTVVEKEHPQLGAGTVLLLRAGFYAVSFLSVAVGSTVYYQGKCLTWKGPRRQLPAVVPAPLPPPCGSSAHLLPPVPGGRAKRSGSGVKQTLNFDLLKLAGDVESNPGPSRGHMTEYKPTVRLATRDDVPRAVRTLAAAFADYPATRHTVDPDRHIERVTELQELFLTRVGLDIGKVWVADDGAAVAVWTTPESVEAGAVFAEIGPRMAELSGSRLAAQQQMEGLLAPHRPKEPAWFLATVGVSPDHQGKGLGSAVVLPGVEAAERAGVPAFLETSAPRNLPFYERLGFTVTADVEVPEGPRTWCMTRKPGA

SEQ ID NO: 20908 - protein, 950 aa, synthetic construct
MALPVTALLLPLALLLHAARPDIQMTQSPSSLSASVGDRVTITCLASEDIYDNLAWYQQKPGKAPKLLIYYASSLQDGVPSRFSGSGSGTDYTLTISSLQPEDFATYYCLQDSEYPWTFLEGQPKANPTVTLFPPSSEELQANKATLVCLISDFYPGAVTVAWKADGSPVKAGVETTKPSKQSNNKYAASSYLSLTPEQWKSHRSYSCQVTHEGSTVEKTVAPTECSGSQSFGLLDPKLCYLLDGILFIYGVILTALFLRVKFSRSADAPAYQQGQNQLYNELNLGRREEYDVLDKRRGRDPEMGGKPQRRKNPQEGLYNELQKDKMAEAYSEIGMKGERRRGKGHDGLYQGLSTATKDTYDALHMQALPPRRAKRSGSGATNFSLLKQAGDVEENPGPTSMDWIWRILFLVGAATGAHSFEEVTLKESGPALVKPTQTLTLTCTFSGFSLTTYGMGVGWIRQPPGKALEWLANIWWDDDKYYNPSLKNRLTISKDTSKNQVVLTMTNMDPVDTATYYCARIGPIKYPTAPYRYFDFWGQGTMVTVSSTRASTKGPSVFPLAPSSKSTSGGTAALGCLVKDYFPEPVTVSWNSGALTSGVHTFPAVLQSSGLYSLSSVVTVPSSSLGTQTYICNVNHKPSNTKVDKRVEPKSCGTITQGLAVSTISSFFPPGYQVSFCLVMVLLFAVDTGLYFSVKTNIRSSTRDWKDHKFKWRKDPQDKRAKRSGSGATNFSLLKQAGDVEENPGPSRGHMTEYKPTVRLATRDDVPRAVRTLAAAFADYPATRHTVDPDRHIERVTELQELFLTRVGLDIGKVWVADDGAAVAVWTTPESVEAGAVFAEIGPRMAELSGSRLAAQQQMEGLLAPHRPKEPAWFLATVGVSPDHQGKGLGSAVVLPGVEAAERAGVPAFLETSAPRNLPFYERLGFTVTADVEVPEGPRTWCMTRKPGA

SEQ ID NO: 20909 - protein, 965 aa, synthetic construct
MALPVTALLLPLALLLHAARPDIQMTQSPSSLSASVGDRVTITCLASEDIYDNLAWYQQKPGKAPKLLIYYASSLQDGVPSRFSGSGSGTDYTLTISSLQPEDFATYYCLQDSEYPWTFLEDLKNVFPPEVAVFEPSEAEISHTQKATLVCLATGFYPDHVELSWWVNGKEVHSGVSTDPQPLKEQPALNDSRYCLSSRLRVSATFWQNPRNHFRCQVQFYGLSENDEWTQDRAKPVTQIVSAEAWGRADCGSQSFGLLDPKLCYLLDGILFIYGVILTALFLRVKFSRSADAPAYQQGQNQLYNELNLGRREEYDVLDKRRGRDPEMGGKPQRRKNPQEGLYNELQKDKMAEAYSEIGMKGERRRGKGHDGLYQGLSTATKDTYDALHMQALPPRRAKRSGSGATNFSLLKQAGDVEENPGPTSMDWIWRILFLVGAATGAHSFEEVTLKESGPALVKPTQTLTLTCTFSGFSLTTYGMGVGWIRQPPGKALEWLANIWWDDDKYYNPSLKNRLTISKDTSKNQVVLTMTNMDPVDTATYYCARIGPIKYPTAPYRYFDFWGQGTMVTVSSTRIQNPDPAVYQLRDSKSSDKSVCLFTDFDSQTNVSQSKDSDVYITDKTVLDMRSMDFKSNSAVAWSNKSDFACANAFNNSIIPEDTFFPSPESSCGTITQGLAVSTISSFFPPGYQVSFCLVMVLLFAVDTGLYFSVKTNIRSSTRDWKDHKFKWRKDPQDKRAKRSGSGATNFSLLKQAGDVEENPGPSRGHMTEYKPTVRLATRDDVPRAVRTLAAAFADYPATRHTVDPDRHIERVTELQELFLTRVGLDIGKVWVADDGAAVAVWTTPESVEAGAVFAEIGPRMAELSGSRLAAQQQMEGLLAPHRPKEPAWFLATVGVSPDHQGKGLGSAVVLPGVEAAERAGVPAFLETSAPRNLPFYERLGFTVTADVEVPEGPRTWCMTRKPGA

SEQ ID NO: 20910 - protein, 648 aa, synthetic construct
MALPVTALLLPLALLLHAARPDIQMTQSPSSLSASVGDRVTITCLASEDIYDNLAWYQQKPGKAPKLLIYYASSLQDGVPSRFSGSGSGTDYTLTISSLQPEDFATYYCLQDSEYPWTFLEGQPKANPTVTLFPPSSEELQANKATLVCLISDFYPGAVTVAWKADGSPVKAGVETTKPSKQSNNKYAASSYLSLTPEQWKSHRSYSCQVTHEGSTVEKTVAPTECSGSLGEPQLCYILDAILFLYGIVLTLLYCRLKIQVRKAAITSYEKSDGVYTGLSTRNQETYETLKHEKPPQRAKRSGSGATNFSLLKQAGDVEENPGPTSMDWIWRILFLVGAATGAHSFEEVTLKESGPALVKPTQTLTLTCTFSGFSLTTYGMGVGWIRQPPGKALEWLANIWWDDDKYYNPSLKNRLTISKDTSKNQVVLTMTNMDPVDTATYYCARIGPIKYPTAPYRYFDFWGQGTMVTVSSTRASTKGPSVFPLAPSSKSTSGGTAALGCLVKDYFPEPVTVSWNSGALTSGVHTFPAVLQSSGLYSLSSVVTVPSSSLGTQTYICNVNHKPSNTKVDKRVEPKSCGTLGEPQLCYILDAILFLYGIVLTLLYCRLKIQVRKAAITSYEKSDGVYTGLSTRNQETYETLKHEKPPQ

SEQ ID NO: 20911 - protein, 1025 aa, synthetic construct
MALPVTALLLPLALLLHAARPDIQMTQSPSSLSASVGDRVTITCLASEDIYDNLAWYQQKPGKAPKLLIYYASSLQDGVPSRFSGSGSGTDYTLTISSLQPEDFATYYCLQDSEYPWTFGQPKANPTVTLFPPSSEELQANKATLVCLISDFYPGAVTVAWKADGSPVKAGVETTKPSKQSNNKYAASSYLSLTPEQWKSHRSYSCQVTHEGSTVEKTVAPTECSGSQSFGLLDPKLCYLLDGILFIYGVILTALFLRVKFSRSADAPAYQQGQNQLYNELNLGRREEYDVLDKRRGRDPEMGGKPRRKNPQEGLYNELQKDKMAEAYSEIGMKGERRRGKGHDGLYQGLSTATKDTYDALHMQALPPRRAKRSGSGATNFSLLKQAGDVEENPGPTSMDWIWRILFLVGAATGAHSFEEVTLKESGPALVKPTQTLTLTCTFSGFSLTTYGMGVGWIRQPPGKALEWLANIWWDDDKYYNPSLKNRLTISKDTSKNQVVLTMTNMDPVDTATYYCARIGPIKYPTAPYRYFDFWGQGTMVTVSSASTKGPSVFPLAPSSKSTSGGTAALGCLVKDYFPEPVTVSWNSGALTSGVHTFPAVLQSSGLYSLSSVVTVPSSSLGTQTYICNVNHKPSNTKVDKRVEPKSCGTQSFGLLDPKLCYLLDGILFIYGVILTALFLRVKFSRSADAPAYQQGQNQLYNELNLGRREEYDVLDKRRGRDPEMGGKPRRKNPQEGLYNELQKDKMAEAYSEIGMKGERRRGKGHDGLYQGLSTATKDTYDALHMQALPPRRAKRSGSGVKQTLNFDLLKLAGDVESNPGPSRGHMTEYKPTVRLATRDDVPRAVRTLAAAFADYPATRHTVDPDRHIERVTELQELFLTRVGLDIGKVWVADDGAAVAVWTTPESVEAGAVFAEIGPRMAELSGSRLAAQQQMEGLLAPHRPKEPAWFLATVGVSPDHQGKGLGSAVVLPGVEAAERAGVPAFLETSAPRNLPFYERLGFTVTADVEVPEGPRTWCMTRKPGA

SEQ ID NO: 20912 - protein, 811 aa, synthetic construct
MALPVTALLLPLALLLHAARPDIQMTQSPSSLSASVGDRVTITCLASEDIYDNLAWYQQKPGKAPKLLIYYASSLQDGVPSRFSGSGSGTDYTLTISSLQPEDFATYYCLQDSEYPWTFLEDLKNVFPPEVAVFEPSEAEISHTQKATLVCLATGFYPDHVELSWWVNGKEVHSGVSTDPQPLKEQPALNDSRYCLSSRLRVSATFWQNPRNHFRCQVQFYGLSENDEWTQDRAKPVTQIVSAEAWGRADCGSQSFGLLDPKLCYLLDGILFIYGVILTALFLRVKFSRSADAPAYQQGQNQLYNELNLGRREEYDVLDKRRGRDPEMGGKPRRKNPQEGLYNELQKDKMAEAYSEIGMKGERRRGKGHDGLYQGLSTATKDTYDALHMQALPPRRAKRSGSGATNFSLLKQAGDVEENPGPTSMDWIWRILFLVGAATGAHSFEEVTLKESGPALVKPTQTLTLTCTFSGFSLTTYGMGVGWIRQPPGKALEWLANIWWDDDKYYNPSLKNRLTISKDTSKNQVVLTMTNMDPVDTATYYCARIGPIKYPTAPYRYFDFWGQGTMVTVSSTRIQNPDPAVYQLRDSKSSDKSVCLFTDFDSQTNVSQSKDSDVYITDKTVLDMRSMDFKSNSAVAWSNKSDFACANAFNNSIIPEDTFFPSPESSCGTQSFGLLDPKLCYLLDGILFIYGVILTALFLRVKFSRSADAPAYQQGQNQLYNELNLGRREEYDVLDKRRGRDPEMGGKPRRKNPQEGLYNELQKDKMAEAYSEIGMKGERRRGKGHDGLYQGLSTATKDTYDALHMQALPPR

SEQ ID NO: 20913 - protein, 492 aa, synthetic construct
MALPVTALLLPLALLLHAARPDIQMTQSPSSLSASVGDRVTITCLASEDIYNNLAWYQQKPGKAPKLLIYYASSLQDGVPSRFSGSGSGTDYTLTISSLQPEDFATYYCLQDSEYPWTFGGGGSGGGGSGGGGSEVTLKESGPALVKPTQTLTLTCTFSGFSLSTYGMGVGWIRQPPGKALEWLANIWWDDDKYYNPSLKNRLTISKDTSKNQVVLTMTNMDPVDTATYYCARIGPIKYPTAPYRYFDFWGQGTMVTVSSTREQKLISEEDLKIEVMYPPPYLDNEKSNGTIIHVKGKHLCPSPLFPGPSKPFWVLVVVGGVLACYSLLVTVAFIIFWVRSKRSRLLHSDYMNMTPRRPGPTRKHYQPYAPPRDFAAYRSRVKFSRSADAPAYQQGQNQLYNELNLGRREEYDVLDKRRGRDPEMGGKPRRKNPQEGLYNELQKDKMAEAYSEIGMKGERRRGKGHDGLYQGLSTATKDTYDALHMQALPPR

SEQ ID NO: 20914 - protein, 498 aa, synthetic construct
MALPVTALLLPLALLLHAARPDIQMTQSPSSLSASVGDRVTITCLASEDIYNNLAWYQQKPGKAPKLLIYYASSLQDGVPSRFSGSGSGTDYTLTISSLQPEDFATYYCLQDSEYPWTFGGGGSGGGGSGGGGSEVTLKESGPALVKPTQTLTLTCTFSGFSLSTYGMGVGWIRQPPGKALEWLANIWWDDDKYYNPSLKNRLTISKDTSKNQVVLTMTNMDPVDTATYYCARIGPIKYPTAPYRYFDFWGQGTMVTVSSTREQKLISEEDLAKPTTTPAPRPPTPAPTIASQPLSLRPEACRPAAGGAVHTRGLDFACDIYIWAPLAGTCGVLLLSLVITLYCKRGRKKLLYIFKQPFMRPVQTTQEEDGCSCRFPEEEEGGCELRVKFSRSADAPAYQQGQNQLYNELNLGRREEYDVLDKRRGRDPEMGGKPRRKNPQEGLYNELQKDKMAEAYSEIGMKGERRRGKGHDGLYQGLSTATKDTYDALHMQALPPR

SEQ ID NO: 20915 - protein, 498 aa, synthetic construct
MALPVTALLLPLALLLHAARPEVTLKESGPALVKPTQTLTLTCTFSGFSLSTYGMGVGWIRQPPGKALEWLANIWWDDDKYYNPSLKNRLTISKDTSKNQVVLTMTNMDPVDTATYYCARIGPIKYPTAPYRYFDFWGQGTMVTVSSGGGGSGGGGSGGGGSDIQMTQSPSSLSASVGDRVTITCLASEDIYNNLAWYQQKPGKAPKLLIYYASSLQDGVPSRFSGSGSGTDYTLTISSLQPEDFATYYCLQDSEYPWTFTREQKLISEEDLAKPTTTPAPRPPTPAPTIASQPLSLRPEACRPAAGGAVHTRGLDFACDIYIWAPLAGTCGVLLLSLVITLYCKRGRKKLLYIFKQPFMRPVQTTQEEDGCSCRFPEEEEGGCELRVKFSRSADAPAYQQGQNQLYNELNLGRREEYDVLDKRRGRDPEMGGKPRRKNPQEGLYNELQKDKMAEAYSEIGMKGERRRGKGHDGLYQGLSTATKDTYDALHMQALPPR

SEQ ID NO: 20916 - protein, 911 aa, synthetic construct
MALPVTALLLPLALLLHAARPDIQMTQSPSSLSASVGDRVTITCLASEDIYNNLAWYQQKPGKAPKLLIYYASSLQDGVPSRFSGSGSGTDYTLTISSLQPEDFATYYCLQDSEYPWTFGGGGSGGGGSGGGGSEVTLKESGPALVKPTQTLTLTCTFSGFSLSTYGMGVGWIRQPPGKALEWLANIWWDDDKYYNPSLKNRLTISKDTSKNQVVLTMTNMDPVDTATYYCARIGPIKYPTAPYRYFDFWGQGTMVTVSSTREQKLISEEDLAKPTTTPAPRPPTPAPTIASQPLSLRPEACRPAAGGAVHTRGLDFACDIYIWAPLAGTCGVLLLSLVITLYCGRARVKFSRSADAPAYQQGQNQLYNELNLGRREEYDVLDKRRGRDPEMGGKPRRKNPQEGLYNELQKDKMAEAYSEIGMKGERRRGKGHDGLYQGLSTATKDTYDALHMQALPPRSRGSGATNFSLLKQAGDVEENPGPGIHMATYEVLCEVARKLGTDDREVVLFLLNVFIPQPTLAQLIGALRALKEEGRLTFPLLAECLFRAGRRDLLRDLLHLDPRFLERHLAGTMSYFSPYQLTVLHVDGELCARDIRSLIFLSKDTIGSRSTPQTFLHWVYCMENLDLLGPTDVDALMSMLRSLSRVDLQRQVQTLMGLHLSGPSHSQHYRHTPLETDFYDYKDDDDKTSGSGEGRGSLLTCGDVEENPGPHMTEYKPTVRLATRDDVPRAVRTLAAAFADYPATRHTVDPDRHIERVTELQELFLTRVGLDIGKVWVADDGAAVAVWTTPESVEAGAVFAEIGPRMAELSGSRLAAQQQMEGLLAPHRPKEPAWFLATVGVSPDHQGKGLGSAVVLPGVEAAERAGVPAFLETSAPRNLPFYERLGFTVTADVEVPEGPRTWCMTRKPGA

SEQ ID NO: 20917 - protein, 851 aa, synthetic construct
MALPVTALLLPLALLLHAARPDIQMTQSPSSLSASVGDRVTITCLASEDIYNNLAWYQQKPGKAPKLLIYYASSLQDGVPSRFSGSGSGTDYTLTISSLQPEDFATYYCLQDSEYPWTFLEIQNPDPAVYQLRDSKSSDKSVCLFTDFDSQTNVSQSKDSDVYITDKCVLDMRSMDFKSNSAVAWSNKSDFACANAFNNSIIPEDTFFPSSDVPCDVKLVEKSFETDTNLNFQNLSVIGFRILLLKVAGFNLLMTLRLWSSRAKRSGSGVKQTLNFDLLKLAGDVESNPGPTSMDWIWRILFLVGAATGAHSFEEVTLKESGPALVKPTQTLTLTCTFSGFSLSTYGMGVGWIRQPPGKALEWLANIWWDDDKYYNPSLKNRLTISKDTSKNQVVLTMTNMDPVDTATYYCARIGPIKYPTAPYRYFDFWGQGTMVTVSSTREDLKNVFPPEVAVFEPSKAEIAHTQKATLVCLATGFYPDHVELSWWVNGKEVHSGVCTDPQPLKEQPALNDSRYCLSSRLRVSATFWQNPRNHFRCQVQFYGLSENDEWTQDRAKPVTQIVSAEAWGRADCGITSASYHQGVLSATILYEILLGKATLYAVLVSALVLMAMVKRKDSRGRAKRSGSGATNFSLLKQAGDVEENPGPSRGHMTEYKPTVRLATRDDVPRAVRTLAAAFADYPATRHTVDPDRHIERVTELQELFLTRVGLDIGKVWVADDGAAVAVWTTPESVEAGAVFAEIGPRMAELSGSRLAAQQQMEGLLAPHRPKEPAWFLATVGVSPDHQGKGLGSAVVLPGVEAAERAGVPAFLETSAPRNLPFYERLGFTVTADVEVPEGPRTWCMTRKPGA

SEQ ID NO: 20918 - protein, 850 aa, synthetic construct
MALPVTALLLPLALLLHAARPDIQMTQSPSSLSASVGDRVTITCLASEDIYNNLAWYQQKPGKAPKLLIYYASSLQDGVPSRFSGSGSGTDYTLTISSLQPEDFATYYCLQDSEYPWTFLEDLKNVFPPEVAVFEPSKAEIAHTQKATLVCLATGFYPDHVELSWWVNGKEVHSGVCTDPQPLKEQPALNDSRYCLSSRLRVSATFWQNPRNHFRCQVQFYGLSENDEWTQDRAKPVTQIVSAEAWGRADCGITSASYHQGVLSATILYEILLGKATLYAVLVSALVLMAMVKRKDSRGRAKRSGSGATNFSLLKQAGDVEENPGPTSMDWIWRILFLVGAATGAHSFEEVTLKESGPALVKPTQTLTLTCTFSGFSLSTYGMGVGWIRQPPGKALEWLANIWWDDDKYYNPSLKNRLTISKDTSKNQVVLTMTNMDPVDTATYYCARIGPIKYPTAPYRYFDFWGQGTMVTVSSTRIQNPDPAVYQLRDSKSSDKSVCLFTDFDSQTNVSQSKDSDVYITDKCVLDMRSMDFKSNSAVAWSNKSDFACANAFNNSIIPEDTFFPSSDVPCDVKLVEKSFETDTNLNFQNLSVIGFRILLLKVAGFNLLMTLRLWSSRAKRSGSGVKQTLNFDLLKLAGDVESNPGPSRGHMTEYKPTVRLATRDDVPRAVRTLAAAFADYPATRHTVDPDRHIERVTELQELFLTRVGLDIGKVWVADDGAAVAVWTTPESVEAGAVFAEIGPRMAELSGSRLAAQQQMEGLLAPHRPKEPAWFLATVGVSPDHQGKGLGSAVVLPGVEAAERAGVPAFLETSAPRNLPFYERLGFTVTADVEVPEGPRTWCMTRKPGA

SEQ ID NO: 20919 - protein, 617 aa, synthetic construct
MALPVTALLLPLALLLHAARPDIQMTQSPSSLSASVGDRVTITCLASEDIYNNLAWYQQKPGKAPKLLIYYASSLQDGVPSRFSGSGSGTDYTLTISSLQPEDFATYYCLQDSEYPWTFLEDLKNVFPPEVAVFEPSEAEISHTQKATLVCLATGFYPDHVELSWWVNGKEVHSGVCTDPQPLKEQPALNDSRYCLSSRLRVSATFWQNPRNHFRCQVQFYGLSENDEWTQDRAKPVTQIVSAEAWGRADCGFTSESYQQGVLSATILYEILLGKATLYAVLVSALVLMAMVKRKDSRGRAKRSGSGATNFSLLKQAGDVEENPGPTSMDWIWRILFLVGAATGAHSFEEVTLKESGPALVKPTQTLTLTCTFSGFSLSTYGMGVGWIRQPPGKALEWLANIWWDDDKYYNPSLKNRLTISKDTSKNQVVLTMTNMDPVDTATYYCARIGPIKYPTAPYRYFDFWGQGTMVTVSSTRIQNPDPAVYQLRDSKSSDKSVCLFTDFDSQTNVSQSKDSDVYITDKCVLDMRSMDFKSNSAVAWSNKSDFACANAFNNSIIPEDTFFPSPESSCDVKLVEKSFETDTNLNFQNLSVIGFRILLLKVAGFNLLMTLRLWSS

SEQ ID NO: 20920 - protein, 842 aa, synthetic construct
MALPVTALLLPLALLLHAARPDIQMTQSPSSLSASVGDRVTITCLASEDIYNNLAWYQQKPGKAPKLLIYYASSLQDGVPSRFSGSGSGTDYTLTISSLQPEDFATYYCLQDSEYPWTFLEDLKNVFPPEVAVFEPSEAEISHTQKATLVCLATGFYPDHVELSWWVNGKEVHSGVCTDPQPLKEQPALNDSRYCLSSRLRVSATFWQNPRNHFRCQVQFYGLSENDEWTQDRAKPVTQIVSAEAWGRADCGFTSESYQQGVLSATILYEILLGKATLYAVLVSALVLMAMVKRKDSRGRAKRSGSGATNFSLLKQAGDVEENPGPTSMDWIWRILFLVGAATGAHSFEEVTLKESGPALVKPTQTLTLTCTFSGFSLSTYGMGVGWIRQPPGKALEWLANIWWDDDKYYNPSLKNRLTISKDTSKNQVVLTMTNMDPVDTATYYCARIGPIKYPTAPYRYFDFWGQGTMVTVSSTRIQNPDPAVYQLRDSKSSDKSVCLFTDFDSQTNVSQSKDSDVYITDKCVLDMRSMDFKSNSAVAWSNKSDFACANAFNNSIIPEDTFFPSPESSCDVKLVEKSFETDTNLNFQNLSVIGFRILLLKVAGFNLLMTLRLWSSRAKRSGSGVKQTLNFDLLKLAGDVESNPGPSRGGIHTMATYEVLCEVARKLGTDDREVVLFLLNVFIPQPTLAQLIGALRALKEEGRLTFPLLAECLFRAGRRDLLRDLLHLDPRFLERHLAGTMSYFSPYQLTVLHVDGELCARDIRSLIFLSKDTIGSRSTPQTFLHWVYCMENLDLLGPTDVDALMSMLRSLSRVDLQRQVQTLMGLHLSGPSHSQHYRHTP

SEQ ID NO: 20921 - protein, 621 aa, synthetic construct
MALPVTALLLPLALLLHAARPDIQMTQSPSSLSASVGDRVTITCLASEDIYNNLAWYQQKPGKAPKLLIYYASSLQDGVPSRFSGSGSGTDYTLTISSLQPEDFATYYCLQDSEYPWTFLEIQNPDPAVYQLRDSKSSDKSVCLFTDFDSQTNVSQSKDSDVYITDKCVLDMRSMDFKSNSAVAWSNKSDFACANAFNNSIIPEDTFFPSPESSCDVKLVEKSFETDTNLNFQNLSVIGFRILLLKVAGFNLLMTLRLWSSRAKRSGSGVKQTLNFDLLKLAGDVESNPGPTSMDWIWRILFLVGAATGAHSFEEVTLKESGPALVKPTQTLTLTCTFSGFSLSTYGMGVGWIRQPPGKALEWLANIWWDDDKYYNPSLKNRLTISKDTSKNQVVLTMTNMDPVDTATYYCARIGPIKYPTAPYRYFDFWGQGTMVTVSSTREDLKNVFPPEVAVFEPSEAEISHTQKATLVCLATGFYPDHVELSWWVNGKEVHSGVCTDPQPLKEQPALNDSRYCLSSRLRVSATFWQNPRNHFRCQVQFYGLSENDEWTQDRAKPVTQIVSAEAWGRADCGFTSESYQQGVLSATILYEILLGKATLYAVLVSALVLMAMVKRKDSRG

SEQ ID NO: 20922 - protein, 843 aa, synthetic construct
MALPVTALLLPLALLLHAARPDIQMTQSPSSLSASVGDRVTITCLASEDIYNNLAWYQQKPGKAPKLLIYYASSLQDGVPSRFSGSGSGTDYTLTISSLQPEDFATYYCLQDSEYPWTFLEIQNPDPAVYQLRDSKSSDKSVCLFTDFDSQTNVSQSKDSDVYITDKCVLDMRSMDFKSNSAVAWSNKSDFACANAFNNSIIPEDTFFPSPESSCDVKLVEKSFETDTNLNFQNLSVIGFRILLLKVAGFNLLMTLRLWSSRAKRSGSGVKQTLNFDLLKLAGDVESNPGPTSMDWIWRILFLVGAATGAHSFEEVTLKESGPALVKPTQTLTLTCTFSGFSLSTYGMGVGWIRQPPGKALEWLANIWWDDDKYYNPSLKNRLTISKDTSKNQVVLTMTNMDPVDTATYYCARIGPIKYPTAPYRYFDFWGQGTMVTVSSTREDLKNVFPPEVAVFEPSEAEISHTQKATLVCLATGFYPDHVELSWWVNGKEVHSGVCTDPQPLKEQPALNDSRYCLSSRLRVSATFWQNPRNHFRCQVQFYGLSENDEWTQDRAKPVTQIVSAEAWGRADCGFTSESYQQGVLSATILYEILLGKATLYAVLVSALVLMAMVKRKDSRGRAKRSGSGATNFSLLKQAGDVEENPGPSRGGIHTMATYEVLCEVARKLGTDDREVVLFLLNVFIPQPTLAQLIGALRALKEEGRLTFPLLAECLFRAGRRDLLRDLLHLDPRFLERHLAGTMSYFSPYQLTVLHVDGELCARDIRSLIFLSKDTIGSRSTPQTFLHWVYCMENLDLLGPTDVDALMSMLRSLSRVDLQRQVQTLMGLHLSGPSHSQHYRHTP

SEQ ID NO: 20923 - protein, 895 aa, synthetic construct
MALPVTALLLPLALLLHAARPLEGKPIPNPLLGLDSTGSGEDLKNVFPPEVAVFEPSKAEIAHTQKATLVCLATGFYPDHVELSWWVNGKEVHSGVCTDPQPLKEQPALNDSRYCLSSRLRVSATFWQNPRNHFRCQVQFYGLSENDEWTQDRAKPVTQIVSAEAWGRADCGITSASYHQGVLSATILYEILLGKATLYAVLVSALVLMAMVKRKDSRGRAKRSGSGATNFSLLKQAGDVEENPGPTSMALPVTALLLPLALLLHAARPDIQMTQSPSSLSASVGDRVTITCLASEDIYNNLAWYQQKPGKAPKLLIYYASSLQDGVPSRFSGSGSGTDYTLTISSLQPEDFATYYCLQDSEYPWTFGGGGSGGGGSGGGGSEVTLKESGPALVKPTQTLTLTCTFSGFSLSTYGMGVGWIRQPPGKALEWLANIWWDDDKYYNPSLKNRLTISKDTSKNQVVLTMTNMDPVDTATYYCARIGPIKYPTAPYRYFDFWGQGTMVTVSSTREQKLISEEDGSGIQNPDPAVYQLRDSKSSDKSVCLFTDFDSQTNVSQSKDSDVYITDKCVLDMRSMDFKSNSAVAWSNKSDFACANAFNNSIIPEDTFFPSSDVPCDVKLVEKSFETDTNLNFQNLSVIGFRILLLKVAGFNLLMTLRLWSSRAKRSGSGVKQTLNFDLLKLAGDVESNPGPSRGHMTEYKPTVRLATRDDVPRAVRTLAAAFADYPATRHTVDPDRHIERVTELQELFLTRVGLDIGKVWVADDGAAVAVWTTPESVEAGAVFAEIGPRMAELSGSRLAAQQQMEGLLAPHRPKEPAWFLATVGVSPDHQGKGLGSAVVLPGVEAAERAGVPAFLETSAPRNLPFYERLGFTVTADVEVPEGPRTWCMTRKPGA

SEQ ID NO: 20924 - protein, 896 aa, synthetic construct
MALPVTALLLPLALLLHAARPLEQKLISEEDLGSGDRPDPAVYQLRDSKSSDKSVCLFTDFDSQTNVSQSKDSDVYITDKCVLDMRSMDFKSNSAVAWSNKSDFACANAFNNSIIPEDTFFPSPESSCDVKLVEKSFETDTNLNFQNLSVIGFRILLLKVAGFNLLMTLRLWSSSSRAKRSGSGVKQTLNFDLLKLAGDVESNPGPTSMALPVTALLLPLALLLHAARPDIQMTQSPSSLSASVGDRVTITCLASEDIYNNLAWYQQKPGKAPKLLIYYASSLQDGVPSRFSGSGSGTDYTLTISSLQPEDFATYYCLQDSEYPWTFGGGGSGGGGSGGGGSEVTLKESGPALVKPTQTLTLTCTFSGFSLSTYGMGVGWIRQPPGKALEWLANIWWDDDKYYNPSLKNRLTISKDTSKNQVVLTMTNMDPVDTATYYCARIGPIKYPTAPYRYFDFWGQGTMVTVSSTRGKPIPNPLLGLDSTGSGEDLKNVFPPEVAVFEPSEAEISHTQKATLVCLATGFYPDHVELSWWVNGKEVHSGVCTDPQPLKEQPALNDSRYCLSSRLRVSATFWQNPRNHFRCQVQFYGLSENDEWTQDRAKPVTQIVSAEAWGRADCGFTSESYQQGVLSATILYEILLGKATLYAVLVSALVLMAMVKRKDSRGRAKRSGSGATNFSLLKQAGDVEENPGPSRGHMTEYKPTVRLATRDDVPRAVRTLAAAFADYPATRHTVDPDRHIERVTELQELFLTRVGLDIGKVWVADDGAAVAVWTTPESVEAGAVFAEIGPRMAELSGSRLAAQQQMEGLLAPHRPKEPAWFLATVGVSPDHQGKGLGSAVVLPGVEAAERAGVPAFLETSAPRNLPFYERLGFTVTADVEVPEGPRTWCMTRKPGA

SEQ ID NO: 20925 - protein, 850 aa, synthetic construct
MALPVTALLLPLALLLHAARPDIQMTQSPSSLSASVGDRVTITCLASEDIYNNLAWYQQKPGKAPKLLIYYASSLQDGVPSRFSGSGSGTDYTLTISSLQPEDFATYYCLQDSEYPWTFLEDLKNVFPPEVAVFEPSEAEISHTQKATLVCLATGFYPDHVELSWWVNGKEVHSGVSTDPQPLKEQPALNDSRYCLSSRLRVSATFWQNPRNHFRCQVQFYGLSENDEWTQDRAKPVTQIVSAEAWGRADCGFTSESYQQGVLSATILYEILLGKATLYAVLVSALVLMAMVKRKDSRGRAKRSGSGATNFSLLKQAGDVEENPGPTSMDWIWRILFLVGAATGAHSFEEVTLKESGPALVKPTQTLTLTCTFSGFSLSTYGMGVGWIRQPPGKALEWLANIWWDDDKYYNPSLKNRLTISKDTSKNQVVLTMTNMDPVDTATYYCARIGPIKYPTAPYRYFDFWGQGTMVTVSSTRIQNPDPAVYQLRDSKSSDKSVCLFTDFDSQTNVSQSKDSDVYITDKTVLDMRSMDFKSNSAVAWSNKSDFACANAFNNSIIPEDTFFPSPESSCDVKLVEKSFETDTNLNFQNLSVIGFRILLLKVAGFNLLMTLRLWSSRAKRSGSGVKQTLNFDLLKLAGDVESNPGPSRGHMTEYKPTVRLATRDDVPRAVRTLAAAFADYPATRHTVDPDRHIERVTELQELFLTRVGLDIGKVWVADDGAAVAVWTTPESVEAGAVFAEIGPRMAELSGSRLAAQQQMEGLLAPHRPKEPAWFLATVGVSPDHQGKGLGSAVVLPGVEAAERAGVPAFLETSAPRNLPFYERLGFTVTADVEVPEGPRTWCMTRKPGA

SEQ ID NO: 20926 - protein, 932 aa, synthetic construct
MALPVTALLLPLALLLHAARPDIQMTQSPSSLSASVGDRVTITCLASEDIYNNLAWYQQKPGKAPKLLIYYASSLQDGVPSRFSGSGSGTDYTLTISSLQPEDFATYYCLQDSEYPWTFLEDLKNVFPPEVAVFEPSEAEISHTQKATLVCLATGFYPDHVELSWWVNGKEVHSGVSTDPQPLKEQPALNDSRYCLSSRLRVSATFWQNPRNHFRCQVQFYGLSENDEWTQDRAKPVTQIVSAEAWGRADCGFTSESYQQGVLSATILYEILLGKATLYAVLVSALVLMAMVKRKDSRGRAKRSGSGATNFSLLKQAGDVEENPGPTSMDWIWRILFLVGAATGAHSFEEVTLKESGPALVKPTQTLTLTCTFSGFSLSTYGMGVGWIRQPPGKALEWLANIWWDDDKYYNPSLKNRLTISKDTSKNQVVLTMTNMDPVDTATYYCARIGPIKYPTAPYRYFDFWGQGTMVTVSSTREQKLISEEDGSGTPFPSLAPPIMLLVDGKQQMVVVCLVLDVAPPGLDSPIWFSAGNGSALDAFTYGPSPATDGTWTNLAHLSLPSEELASWEPLVCHTGPGAEGHSRSTQPMHLSGEASTARTCPQEPLRGTPGGALWLGVLRLLLFKLLLFDLLLTCSCLCDPAGPLPSPATTTRLRALGSHRLHPATETGGREATSSPRPQPRDRRWGDTPPGRKPGSPVRAKRSGSGVKQTLNFDLLKLAGDVESNPGPSRGHMTEYKPTVRLATRDDVPRAVRTLAAAFADYPATRHTVDPDRHIERVTELQELFLTRVGLDIGKVWVADDGAAVAVWTTPESVEAGAVFAEIGPRMAELSGSRLAAQQQMEGLLAPHRPKEPAWFLATVGVSPDHQGKGLGSAVVLPGVEAAERAGVPAFLETSAPRNLPFYERLGFTVTADVEVPEGPRTWCMTRKPGA

SEQ ID NO: 20927 - protein, 950 aa, synthetic construct
MALPVTALLLPLALLLHAARPLEDLKNVFPPEVAVFEPSEAEISHTQKATLVCLATGFYPDHVELSWWVNGKEVHSGVSTDPQPLKEQPALNDSRYCLSSRLRVSATFWQNPRNHFRCQVQFYGLSENDEWTQDRAKPVTQIVSAEAWGRADCGFTSESYQQGVLSATILYEILLGKATLYAVLVSALVLMAMVKRKDSRGRAKRSGSGATNFSLLKQAGDVEENPGPTSMALPVTALLLPLALLLHAARPDIQMTQSPSSLSASVGDRVTITCLASEDIYNNLAWYQQKPGKAPKLLIYYASSLQDGVPSRFSGSGSGTDYTLTISSLQPEDFATYYCLQDSEYPWTFGGGGSGGGGSGGGGSEVTLKESGPALVKPTQTLTLTCTFSGFSLSTYGMGVGWIRQPPGKALEWLANIWWDDDKYYNPSLKNRLTISKDTSKNQVVLTMTNMDPVDTATYYCARIGPIKYPTAPYRYFDFWGQGTMVTVSSTREQKLISEEDLGSGTPFPSLAPPIMLLVDGKQQMVVVCLVLDVAPPGLDSPIWFSAGNGSALDAFTYGPSPATDGTWTNLAHLSLPSEELASWEPLVCHTGPGAEGHSRSTQPMHLSGEASTARTCPQEPLRGTPGGALWLGVLRLLLFKLLLFDLLLTCSCLCDPAGPLPSPATTTRLRALGSHRLHPATETGGREATSSPRPQPRDRRWGDTPPGRKPGSPVRAKRSGSGVKQTLNFDLLKLAGDVESNPGPSRSRGHMTEYKPTVRLATRDDVPRAVRTLAAAFADYPATRHTVDPDRHIERVTELQELFLTRVGLDIGKVWVADDGAAVAVWTTPESVEAGAVFAEIGPRMAELSGSRLAAQQQMEGLLAPHRPKEPAWFLATVGVSPDHQGKGLGSAVVLPGVEAAERAGVPAFLETSAPRNLPFYERLGFTVTADVEVPEGPRTWCMTRKPGA

SEQ ID NO: 20928 - protein, 887 aa, synthetic construct
MALPVTALLLPLALLLHAARPDIQMTQSPSSLSASVGDRVTITCLASEDIYNNLAWYQQKPGKAPKLLIYYASSLQDGVPSRFSGSGSGTDYTLTISSLQPEDFATYYCLQDSEYPWTFLEGKPIPNPLLGLDSTGSGDKQLDADVSPKPTIFLPSIAETKLQKAGTYLCLLEKFFPDVIKIHWQEKKSNTILGSQEGNTMKTNDTYMKFSWLTVPEKSLDKEHRCIVRHENNKNGVDQEIIFPPIKTDVITMDPKDNCSKDANDTLLLQLTNTSAYYMYLLLLLKSVVYFAIITCCLLRRTAFCCNGEKSRAKRSGSGATNFSLLKQAGDVEENPGPTSMDWIWRILFLVGAATGAHSFEEVTLKESGPALVKPTQTLTLTCTFSGFSLSTYGMGVGWIRQPPGKALEWLANIWWDDDKYYNPSLKNRLTISKDTSKNQVVLTMTNMDPVDTATYYCARIGPIKYPTAPYRYFDFWGQGTMVTVSSTREQKLISEEDGSGSQPHTKPSVFVMKNGTNVACLVKEFYPKDIRINLVSSKKITEFDPAIVISPSGKYNAVKLGKYEDSNSVTCSVQHDNKTVHSTDFEVKTDSTDHVKPKETENTKQPSKSCHKPKAIVHTEKVNMMSLTVLGLRMLFAKTVAVNFLLTAKLFFLRAKRSGSGVKQTLNFDLLKLAGDVESNPGPSRGHMTEYKPTVRLATRDDVPRAVRTLAAAFADYPATRHTVDPDRHIERVTELQELFLTRVGLDIGKVWVADDGAAVAVWTTPESVEAGAVFAEIGPRMAELSGSRLAAQQQMEGLLAPHRPKEPAWFLATVGVSPDHQGKGLGSAVVLPGVEAAERAGVPAFLETSAPRNLPFYERLGFTVTADVEVPEGPRTWCMTRKPGA

SEQ ID NO: 20929 - protein, 625 aa, synthetic construct
MALPVTALLLPLALLLHAARPDIQMTQSPSSLSASVGDRVTITCLASEDIYNNLAWYQQKPGKAPKLLIYYASSLQDGVPSRFSGSGSGTDYTLTISSLQPEDFATYYCLQDSEYPWTFLESQPHTKPSVFVMKNGTNVACLVKEFYPKDIRINLVSSKKITEFDPAIVISPSGKYNAVKLGKYEDSNSVTCSVQHDNKTVHSTDFEVKTDSTDHVKPKETENTKQPSKSCHKPKAIVHTEKVNMMSLTVLGLRMLFAKTVAVNFLLTAKLFFLRAKRSGSGATNFSLLKQAGDVEENPGPTSMDWIWRILFLVGAATGAHSFEEVTLKESGPALVKPTQTLTLTCTFSGFSLSTYGMGVGWIRQPPGKALEWLANIWWDDDKYYNPSLKNRLTISKDTSKNQVVLTMTNMDPVDTATYYCARIGPIKYPTAPYRYFDFWGQGTMVTVSSTRDKQLDADVSPKPTIFLPSIAETKLQKAGTYLCLLEKFFPDVIKIHWQEKKSNTILGSQEGNTMKTNDTYMKFSWLTVPEKSLDKEHRCIVRHENNKNGVDQEIIFPPIKTDVITMDPKDNCSKDANDTLLLQLTNTSAYYMYLLLLLKSVVYFAIITCCLLRRTAFCCNGEKS

SEQ ID NO: 20930 - protein, 902 aa, synthetic construct
MALPVTALLLPLALLLHAARPLEGKPIPNPLLGLDSTGSGDKQLDADVSPKPTIFLPSIAETKLQKAGTYLCLLEKFFPDVIKIHWQEKKSNTILGSQEGNTMKTNDTYMKFSWLTVPEKSLDKEHRCIVRHENNKNGVDQEIIFPPIKTDVITMDPKDNCSKDANDTLLLQLTNTSAYYMYLLLLLKSVVYFAIITCCLLRRTAFCCNGEKSRAKRSGSGATNFSLLKQAGDVEENPGPTSMALPVTALLLPLALLLHAARPDIQMTQSPSSLSASVGDRVTITCLASEDIYNNLAWYQQKPGKAPKLLIYYASSLQDGVPSRFSGSGSGTDYTLTISSLQPEDFATYYCLQDSEYPWTFGGGGSGGGGSGGGGSEVTLKESGPALVKPTQTLTLTCTFSGFSLSTYGMGVGWIRQPPGKALEWLANIWWDDDKYYNPSLKNRLTISKDTSKNQVVLTMTNMDPVDTATYYCARIGPIKYPTAPYRYFDFWGQGTMVTVSSTREQKLISEEDGSGSQPHTKPSVFVMKNGTNVACLVKEFYPKDIRINLVSSKKITEFDPAIVISPSGKYNAVKLGKYEDSNSVTCSVQHDNKTVHSTDFEVKTDSTDHVKPKETENTKQPSKSCHKPKAIVHTEKVNMMSLTVLGLRMLFAKTVAVNFLLTAKLFFLRAKRSGSGVKQTLNFDLLKLAGDVESNPGPSRGHMTEYKPTVRLATRDDVPRAVRTLAAAFADYPATRHTVDPDRHIERVTELQELFLTRVGLDIGKVWVADDGAAVAVWTTPESVEAGAVFAEIGPRMAELSGSRLAAQQQMEGLLAPHRPKEPAWFLATVGVSPDHQGKGLGSAVVLPGVEAAERAGVPAFLETSAPRNLPFYERLGFTVTADVEVPEGPRTWCMTRKPGA

SEQ ID NO: 20931 - protein, 1027 aa, synthetic construct
MALPVTALLLPLALLLHAARPDIQMTQSPSSLSASVGDRVTITCLASEDIYNNLAWYQQKPGKAPKLLIYYASSLQDGVPSRFSGSGSGTDYTLTISSLQPEDFATYYCLQDSEYPWTFGQPKANPTVTLFPPSSEELQANKATLVCLISDFYPGAVTVAWKADGSPVKAGVETTKPSKQSNNKYAASSYLSLTPEQWKSHRSYSCQVTHEGSTVEKTVAPTECSGSQSFGLLDPKLCYLLDGILFIYGVILTALFLRVKFSRSADAPAYQQGQNQLYNELNLGRREEYDVLDKRRGRDPEMGGKPQRRKNPQEGLYNELQKDKMAEAYSEIGMKGERRRGKGHDGLYQGLSTATKDTYDALHMQALPPRRAKRSGSGATNFSLLKQAGDVEENPGPTSMDWIWRILFLVGAATGAHSFEEVTLKESGPALVKPTQTLTLTCTFSGFSLSTYGMGVGWIRQPPGKALEWLANIWWDDDKYYNPSLKNRLTISKDTSKNQVVLTMTNMDPVDTATYYCARIGPIKYPTAPYRYFDFWGQGTMVTVSSASTKGPSVFPLAPSSKSTSGGTAALGCLVKDYFPEPVTVSWNSGALTSGVHTFPAVLQSSGLYSLSSVVTVPSSSLGTQTYICNVNHKPSNTKVDKRVEPKSCGTQSFGLLDPKLCYLLDGILFIYGVILTALFLRVKFSRSADAPAYQQGQNQLYNELNLGRREEYDVLDKRRGRDPEMGGKPQRRKNPQEGLYNELQKDKMAEAYSEIGMKGERRRGKGHDGLYQGLSTATKDTYDALHMQALPPRRAKRSGSGVKQTLNFDLLKLAGDVESNPGPSRGHMTEYKPTVRLATRDDVPRAVRTLAAAFADYPATRHTVDPDRHIERVTELQELFLTRVGLDIGKVWVADDGAAVAVWTTPESVEAGAVFAEIGPRMAELSGSRLAAQQQMEGLLAPHRPKEPAWFLATVGVSPDHQGKGLGSAVVLPGVEAAERAGVPAFLETSAPRNLPFYERLGFTVTADVEVPEGPRTWCMTRKPGA

SEQ ID NO: 20932 - protein, 813 aa, synthetic construct
MALPVTALLLPLALLLHAARPDIQMTQSPSSLSASVGDRVTITCLASEDIYNNLAWYQQKPGKAPKLLIYYASSLQDGVPSRFSGSGSGTDYTLTISSLQPEDFATYYCLQDSEYPWTFLEDLKNVFPPEVAVFEPSEAEISHTQKATLVCLATGFYPDHVELSWWVNGKEVHSGVSTDPQPLKEQPALNDSRYCLSSRLRVSATFWQNPRNHFRCQVQFYGLSENDEWTQDRAKPVTQIVSAEAWGRADCGSQSFGLLDPKLCYLLDGILFIYGVILTALFLRVKFSRSADAPAYQQGQNQLYNELNLGRREEYDVLDKRRGRDPEMGGKPQRRKNPQEGLYNELQKDKMAEAYSEIGMKGERRRGKGHDGLYQGLSTATKDTYDALHMQALPPRRAKRSGSGATNFSLLKQAGDVEENPGPTSMDWIWRILFLVGAATGAHSFEEVTLKESGPALVKPTQTLTLTCTFSGFSLSTYGMGVGWIRQPPGKALEWLANIWWDDDKYYNPSLKNRLTISKDTSKNQVVLTMTNMDPVDTATYYCARIGPIKYPTAPYRYFDFWGQGTMVTVSSTRIQNPDPAVYQLRDSKSSDKSVCLFTDFDSQTNVSQSKDSDVYITDKTVLDMRSMDFKSNSAVAWSNKSDFACANAFNNSIIPEDTFFPSPESSCGTQSFGLLDPKLCYLLDGILFIYGVILTALFLRVKFSRSADAPAYQQGQNQLYNELNLGRREEYDVLDKRRGRDPEMGGKPQRRKNPQEGLYNELQKDKMAEAYSEIGMKGERRRGKGHDGLYQGLSTATKDTYDALHMQALPPR

SEQ ID NO: 20933 - protein, 813 aa, synthetic construct
MALPVTALLLPLALLLHAARPDIQMTQSPSSLSASVGDRVTITCLASEDIYNNLAWYQQKPGKAPKLLIYYASSLQDGVPSRFSGSGSGTDYTLTISSLQPEDFATYYCLQDSEYPWTFLEDLKNVFPPEVAVFEPSKAEIAHTQKATLVCLATGFYPDHVELSWWVNGKEVHSGVCTDPQPLKEQPALNDSRYCLSSRLRVSATFWQNPRNHFRCQVQFYGLSENDEWTQDRAKPVTQIVSAEAWGRADCGSQSFGLLDPKLCYLLDGILFIYGVILTALFLRVKFSRSADAPAYQQGQNQLYNELNLGRREEYDVLDKRRGRDPEMGGKPQRRKNPQEGLYNELQKDKMAEAYSEIGMKGERRRGKGHDGLYQGLSTATKDTYDALHMQALPPRRAKRSGSGATNFSLLKQAGDVEENPGPTSMDWIWRILFLVGAATGAHSFEEVTLKESGPALVKPTQTLTLTCTFSGFSLSTYGMGVGWIRQPPGKALEWLANIWWDDDKYYNPSLKNRLTISKDTSKNQVVLTMTNMDPVDTATYYCARIGPIKYPTAPYRYFDFWGQGTMVTVSSTRIQNPDPAVYQLRDSKSSDKSVCLFTDFDSQTNVSQSKDSDVYITDKCVLDMRSMDFKSNSAVAWSNKSDFACANAFNNSIIPEDTFFPSSDVPCGTQSFGLLDPKLCYLLDGILFIYGVILTALFLRVKFSRSADAPAYQQGQNQLYNELNLGRREEYDVLDKRRGRDPEMGGKPQRRKNPQEGLYNELQKDKMAEAYSEIGMKGERRRGKGHDGLYQGLSTATKDTYDALHMQALPPR

SEQ ID NO: 20934 - protein, 884 aa, synthetic construct
MALPVTALLLPLALLLHAARPDIQMTQSPSSLSASVGDRVTITCLASEDIYNNLAWYQQKPGKAPKLLIYYASSLQDGVPSRFSGSGSGTDYTLTISSLQPEDFATYYCLQDSEYPWTFLEGKPIPNPLLGLDSTGSGEDLKNVFPPEVAVFEPSEAEISHTQKATLVCLATGFYPDHVELSWWVNGKEVHSGVSTDPQPLKEQPALNDSRYCLSSRLRVSATFWQNPRNHFRCQVQFYGLSENDEWTQDRAKPVTQIVSAEAWGRADCGSQSFGLLDPKLCYLLDGILFIYGVILTALFLRVKFSRSADAPAYQQGQNQLYNELNLGRREEYDVLDKRRGRDPEMGGKPQRRKNPQEGLYNELQKDKMAEAYSEIGMKGERRRGKGHDGLYQGLSTATKDTYDALHMQALPPRRAKRSGSGATNFSLLKQAGDVEENPGPTSMDWIWRILFLVGAATGAHSFEEVTLKESGPALVKPTQTLTLTCTFSGFSLSTYGMGVGWIRQPPGKALEWLANIWWDDDKYYNPSLKNRLTISKDTSKNQVVLTMTNMDPVDTATYYCARIGPIKYPTAPYRYFDFWGQGTMVTVSSTREQKLISEEDGSGIQNPDPAVYQLRDSKSSDKSVCLFTDFDSQTNVSQSKDSDVYITDKTVLDMRSMDFKSNSAVAWSNKSDFACANAFNNSIIPEDTFFPSPESSCGTQSFGLLDPKLCYLLDGILFIYGVILTALFLRSKRSRLLHSDYMNMTPRRPGPTRKHYQPYAPPRDFAAYRSRVKFSRSADAPAYQQGQNQLYNELNLGRREEYDVLDKRRGRDPEMGGKPQRRKNPQEGLYNELQKDKMAEAYSEIGMKGERRRGKGHDGLYQGLSTATKDTYDALHMQALPPR

SEQ ID NO: 20935 - protein, 925 aa, synthetic construct
MALPVTALLLPLALLLHAARPDIQMTQSPSSLSASVGDRVTITCLASEDIYNNLAWYQQKPGKAPKLLIYYASSLQDGVPSRFSGSGSGTDYTLTISSLQPEDFATYYCLQDSEYPWTFLEGKPIPNPLLGLDSTGSGEDLKNVFPPEVAVFEPSEAEISHTQKATLVCLATGFYPDHVELSWWVNGKEVHSGVSTDPQPLKEQPALNDSRYCLSSRLRVSATFWQNPRNHFRCQVQFYGLSENDEWTQDRAKPVTQIVSAEAWGRADCGSQSFGLLDPKLCYLLDGILFIYGVILTALFLRSKRSRLLHSDYMNMTPRRPGPTRKHYQPYAPPRDFAAYRSRVKFSRSADAPAYQQGQNQLYNELNLGRREEYDVLDKRRGRDPEMGGKPQRRKNPQEGLYNELQKDKMAEAYSEIGMKGERRRGKGHDGLYQGLSTATKDTYDALHMQALPPRRAKRSGSGATNFSLLKQAGDVEENPGPTSMDWIWRILFLVGAATGAHSFEEVTLKESGPALVKPTQTLTLTCTFSGFSLSTYGMGVGWIRQPPGKALEWLANIWWDDDKYYNPSLKNRLTISKDTSKNQVVLTMTNMDPVDTATYYCARIGPIKYPTAPYRYFDFWGQGTMVTVSSTREQKLISEEDGSGIQNPDPAVYQLRDSKSSDKSVCLFTDFDSQTNVSQSKDSDVYITDKTVLDMRSMDFKSNSAVAWSNKSDFACANAFNNSIIPEDTFFPSPESSCGTQSFGLLDPKLCYLLDGILFIYGVILTALFLRSKRSRLLHSDYMNMTPRRPGPTRKHYQPYAPPRDFAAYRSRVKFSRSADAPAYQQGQNQLYNELNLGRREEYDVLDKRRGRDPEMGGKPQRRKNPQEGLYNELQKDKMAEAYSEIGMKGERRRGKGHDGLYQGLSTATKDTYDALHMQALPPR

SEQ ID NO: 20936 - protein, 886 aa, synthetic construct
MALPVTALLLPLALLLHAARPDIQMTQSPSSLSASVGDRVTITCLASEDIYNNLAWYQQKPGKAPKLLIYYASSLQDGVPSRFSGSGSGTDYTLTISSLQPEDFATYYCLQDSEYPWTFLEGKPIPNPLLGLDSTGSGEDLKNVFPPEVAVFEPSEAEISHTQKATLVCLATGFYPDHVELSWWVNGKEVHSGVSTDPQPLKEQPALNDSRYCLSSRLRVSATFWQNPRNHFRCQVQFYGLSENDEWTQDRAKPVTQIVSAEAWGRADCGSQSFGLLDPKLCYLLDGILFIYGVILTALFLRVKFSRSADAPAYQQGQNQLYNELNLGRREEYDVLDKRRGRDPEMGGKPQRRKNPQEGLYNELQKDKMAEAYSEIGMKGERRRGKGHDGLYQGLSTATKDTYDALHMQALPPRRAKRSGSGATNFSLLKQAGDVEENPGPTSMDWIWRILFLVGAATGAHSFEEVTLKESGPALVKPTQTLTLTCTFSGFSLSTYGMGVGWIRQPPGKALEWLANIWWDDDKYYNPSLKNRLTISKDTSKNQVVLTMTNMDPVDTATYYCARIGPIKYPTAPYRYFDFWGQGTMVTVSSTREQKLISEEDLGSGIQNPDPAVYQLRDSKSSDKSVCLFTDFDSQTNVSQSKDSDVYITDKTVLDMRSMDFKSNSAVAWSNKSDFACANAFNNSIIPEDTFFPSPESSCGTQSFGLLDPKLCYLLDGILFIYGVILTALFLKRGRKKLLYIFKQPFMRPVQTTQEEDGCSCRFPEEEEGGCELRVKFSRSADAPAYQQGQNQLYNELNLGRREEYDVLDKRRGRDPEMGGKPQRRKNPQEGLYNELQKDKMAEAYSEIGMKGERRRGKGHDGLYQGLSTATKDTYDALHMQALPPR

SEQ ID NO: 20937 - protein, 928 aa, synthetic construct
MALPVTALLLPLALLLHAARPDIQMTQSPSSLSASVGDRVTITCLASEDIYNNLAWYQQKPGKAPKLLIYYASSLQDGVPSRFSGSGSGTDYTLTISSLQPEDFATYYCLQDSEYPWTFLEGKPIPNPLLGLDSTGSGEDLKNVFPPEVAVFEPSEAEISHTQKATLVCLATGFYPDHVELSWWVNGKEVHSGVSTDPQPLKEQPALNDSRYCLSSRLRVSATFWQNPRNHFRCQVQFYGLSENDEWTQDRAKPVTQIVSAEAWGRADCGSQSFGLLDPKLCYLLDGILFIYGVILTALFLKRGRKKLLYIFKQPFMRPVQTTQEEDGCSCRFPEEEEGGCELRVKFSRSADAPAYQQGQNQLYNELNLGRREEYDVLDKRRGRDPEMGGKPQRRKNPQEGLYNELQKDKMAEAYSEIGMKGERRRGKGHDGLYQGLSTATKDTYDALHMQALPPRRAKRSGSGATNFSLLKQAGDVEENPGPTSMDWIWRILFLVGAATGAHSFEEVTLKESGPALVKPTQTLTLTCTFSGFSLSTYGMGVGWIRQPPGKALEWLANIWWDDDKYYNPSLKNRLTISKDTSKNQVVLTMTNMDPVDTATYYCARIGPIKYPTAPYRYFDFWGQGTMVTVSSTREQKLISEEDLGSGIQNPDPAVYQLRDSKSSDKSVCLFTDFDSQTNVSQSKDSDVYITDKTVLDMRSMDFKSNSAVAWSNKSDFACANAFNNSIIPEDTFFPSPESSCGTQSFGLLDPKLCYLLDGILFIYGVILTALFLKRGRKKLLYIFKQPFMRPVQTTQEEDGCSCRFPEEEEGGCELRVKFSRSADAPAYQQGQNQLYNELNLGRREEYDVLDKRRGRDPEMGGKPQRRKNPQEGLYNELQKDKMAEAYSEIGMKGERRRGKGHDGLYQGLSTATKDTYDALHMQALPPR

SEQ ID NO: 20938 - protein, 818 aa, synthetic construct
MALPVTALLLPLALLLHAARPDIQMTQSPSSLSASVGDRVTITCLASEDIYNNLAWYQQKPGKAPKLLIYYASSLQDGVPSRFSGSGSGTDYTLTISSLQPEDFATYYCLQDSEYPWTFLEQSFGLLDPKLCYLLDGILFIYGVILTALFLRVKFSRSADAPAYQQGQNQLYNELNLGRREEYDVLDKRRGRDPEMGGKPQRRKNPQEGLYNELQKDKMAEAYSEIGMKGERRRGKGHDGLYQGLSTATKDTYDALHMQALPPRRAKRSGSGATNFSLLKQAGDVEENPGPTSMDWIWRILFLVGAATGAHSFEEVTLKESGPALVKPTQTLTLTCTFSGFSLSTYGMGVGWIRQPPGKALEWLANIWWDDDKYYNPSLKNRLTISKDTSKNQVVLTMTNMDPVDTATYYCARIGPIKYPTAPYRYFDFWGQGTMVTVSSTRQSFGLLDPKLCYLLDGILFIYGVILTALFLRVKFSRSADAPAYQQGQNQLYNELNLGRREEYDVLDKRRGRDPEMGGKPQRRKNPQEGLYNELQKDKMAEAYSEIGMKGERRRGKGHDGLYQGLSTATKDTYDALHMQALPPRRAKRSGSGVKQTLNFDLLKLAGDVESNPGPSRGHMTEYKPTVRLATRDDVPRAVRTLAAAFADYPATRHTVDPDRHIERVTELQELFLTRVGLDIGKVWVADDGAAVAVWTTPESVEAGAVFAEIGPRMAELSGSRLAAQQQMEGLLAPHRPKEPAWFLATVGVSPDHQGKGLGSAVVLPGVEAAERAGVPAFLETSAPRNLPFYERLGFTVTADVEVPEGPRTWCMTRKPGA

SEQ ID NO: 20939 - protein, 643 aa, synthetic construct
MALPVTALLLPLALLLHAARPDIQMTQSPSSLSASVGDRVTITCLASEDIYNNLAWYQQKPGKAPKLLIYYASSLQDGVPSRFSGSGSGTDYTLTISSLQPEDFATYYCLQDSEYPWTFLEGQPKANPTVTLFPPSSEELQANKATLVCLISDFYPGAVTVAWKADGSPVKAGVETTKPSKQSNNKYAASSYLSLTPEQWKSHRSYSCQVTHEGSTVEKTVAPTECSPIKTDVITMDPKDNCSKDANDTLLLQLTNTSAYYMYLLLLLKSVVYFAIITCCLLRRTAFCCNGEKSRAKRSGSGATNFSLLKQAGDVEENPGPTSMDWIWRILFLVGAATGAHSFEEVTLKESGPALVKPTQTLTLTCTFSGFSLSTYGMGVGWIRQPPGKALEWLANIWWDDDKYYNPSLKNRLTISKDTSKNQVVLTMTNMDPVDTATYYCARIGPIKYPTAPYRYFDFWGQGTMVTVSSTRASTKGPSVFPLAPSSKSTSGGTAALGCLVKDYFPEPVTVSWNSGALTSGVHTFPAVLQSSGLYSLSSVVTVPSSSLGTQTYICNVNHKPSNTKVDKRVEPKSCEVKTDSTDHVKPKETENTKQPSKSCHKPKAIVHTEKVNMMSLTVLGLRMLFAKTVAVNFLLTAKLFFL

SEQ ID NO: 20940 - protein, 621 aa, synthetic construct
MALPVTALLLPLALLLHAARPDIQMTQSPSSLSASVGDRVTITCLASEDIYNNLAWYQQKPGKAPKLLIYYASSLQDGVPSRFSGSGSGTDYTLTISSLQPEDFATYYCLQDSEYPWTFLEGQPKANPTVTLFPPSSEELQANKATLVCLISDFYPGAVTVAWKADGSPVKAGVETTKPSKQSNNKYAASSYLSLTPEQWKSHRSYSCQVTHEGSTVEKTVAPTECSGRADCGITSASYHQGVLSATILYEILLGKATLYAVLVSALVLMAMVKRKDSRGRAKRSGSGATNFSLLKQAGDVEENPGPTSMDWIWRILFLVGAATGAHSFEEVTLKESGPALVKPTQTLTLTCTFSGFSLSTYGMGVGWIRQPPGKALEWLANIWWDDDKYYNPSLKNRLTISKDTSKNQVVLTMTNMDPVDTATYYCARIGPIKYPTAPYRYFDFWGQGTMVTVSSTRASTKGPSVFPLAPSSKSTSGGTAALGCLVKDYFPEPVTVSWNSGALTSGVHTFPAVLQSSGLYSLSSVVTVPSSSLGTQTYICNVNHKPSNTKVDKRVEPKSCIPEDTFFPSSDVPCDVKLVEKSFETDTNLNFQNLSVIGFRILLLKVAGFNLLMTLRLWSS

SEQ ID NO: 20941 - protein, 621 aa, synthetic construct
MALPVTALLLPLALLLHAARPDIQMTQSPSSLSASVGDRVTITCLASEDIYNNLAWYQQKPGKAPKLLIYYASSLQDGVPSRFSGSGSGTDYTLTISSLQPEDFATYYCLQDSEYPWTFLEGQPKANPTVTLFPPSSEELQANKATLVCLISDFYPGAVTVAWKADGSPVKAGVETTKPSKQSNNKYAASSYLSLTPEQWKSHRSYSCQVTHEGSTVEKTVAPTECSGRADCGFTSESYQQGVLSATILYEILLGKATLYAVLVSALVLMAMVKRKDSRGRAKRSGSGATNFSLLKQAGDVEENPGPTSMDWIWRILFLVGAATGAHSFEEVTLKESGPALVKPTQTLTLTCTFSGFSLSTYGMGVGWIRQPPGKALEWLANIWWDDDKYYNPSLKNRLTISKDTSKNQVVLTMTNMDPVDTATYYCARIGPIKYPTAPYRYFDFWGQGTMVTVSSTRASTKGPSVFPLAPSSKSTSGGTAALGCLVKDYFPEPVTVSWNSGALTSGVHTFPAVLQSSGLYSLSSVVTVPSSSLGTQTYICNVNHKPSNTKVDKRVEPKSCIPEDTFFPSPESSCDVKLVEKSFETDTNLNFQNLSVIGFRILLLKVAGFNLLMTLRLWSS

SEQ ID NO: 20942 - protein, 447 aa, synthetic construct
MALPVTALLLPLALLLHAARPDIQMTQSPSSLSASVGDRVTITCLASEDIYNNLAWYQQKPGKAPKLLIYYASSLQDGVPSRFSGSGSGTDYTLTISSLQPEDFATYYCLQDSEYPWTFGGGGSGGGGSGGGGSEVTLKESGPALVKPTQTLTLTCTFSGFSLSTYGMGVGWIRQPPGKALEWLANIWWDDDKYYNPSLKNRLTISKDTSKNQVVLTMTNMDPVDTATYYCARIGPIKYPTAPYRYFDFWGQGTMVTVSSTRDGNEEMGGITQTPYKVSISGTTVILTCPQYPGSEILWQHNDKNIGGDEDDKNIGSDEDHLSLKEFSELEQSGYYVCYPRGSKPEDANFYLYLRARVCENCMEMDVMSVATIVIVDICITGGLLLLVYYWSKNRKAKAKPVTRGAGAGGRQRGQNKERPPPVPNPDYEPIRKGQRDLYSGLNQRRI

SEQ ID NO: 20943 - protein, 412 aa, synthetic construct
MALPVTALLLPLALLLHAARPDIQMTQSPSSLSASVGDRVTITCLASEDIYNNLAWYQQKPGKAPKLLIYYASSLQDGVPSRFSGSGSGTDYTLTISSLQPEDFATYYCLQDSEYPWTFGGGGSGGGGSGGGGSEVTLKESGPALVKPTQTLTLTCTFSGFSLSTYGMGVGWIRQPPGKALEWLANIWWDDDKYYNPSLKNRLTISKDTSKNQVVLTMTNMDPVDTATYYCARIGPIKYPTAPYRYFDFWGQGTMVTVSSTRFKIPIEELEDRVFVNCNTSITWVEGTVGTLLSDITRLDLGKRILDPRGIYRCNGTDIYKDKESTVQVHYRMCQSCVELDPATVAGIIVTDVIATLLLALGVFCFAGHETGRLSGAADTQALLRNDQVYQPLRDRDDAQYSHLGGNWARNK

SEQ ID NO: 20944 - protein, 422 aa, synthetic construct
MALPVTALLLPLALLLHAARPDIQMTQSPSSLSASVGDRVTITCLASEDIYNNLAWYQQKPGKAPKLLIYYASSLQDGVPSRFSGSGSGTDYTLTISSLQPEDFATYYCLQDSEYPWTFGGGGSGGGGSGGGGSEVTLKESGPALVKPTQTLTLTCTFSGFSLSTYGMGVGWIRQPPGKALEWLANIWWDDDKYYNPSLKNRLTISKDTSKNQVVLTMTNMDPVDTATYYCARIGPIKYPTAPYRYFDFWGQGTMVTVSSTRQSIKGNHLVKVYDYQEDGSVLLTCDAEAKNITWFKDGKMIGFLTEDKKKWNLGSNAKDPRGMYQCKGSQNKSKPLQVYYRMCQNCIELNAATISGFLFAEIVSIFVLAVGVYFIAGQDGVRQSRASDKQTLLPNDQLYQPLKDREDDQYSHLQGNQLRRN

SEQ ID NO: 20945 - protein, 405 aa, synthetic construct
MALPVTALLLPLALLLHAARPDIQMTQSPSSLSASVGDRVTITCLASEDIYNNLAWYQQKPGKAPKLLIYYASSLQDGVPSRFSGSGSGTDYTLTISSLQPEDFATYYCLQDSEYPWTFGGGGSGGGGSGGGGSEVTLKESGPALVKPTQTLTLTCTFSGFSLSTYGMGVGWIRQPPGKALEWLANIWWDDDKYYNPSLKNRLTISKDTSKNQVVLTMTNMDPVDTATYYCARIGPIKYPTAPYRYFDFWGQGTMVTVSSTRQSFGLLDPKLCYLLDGILFIYGVILTALFLRVKFSRSADAPAYQQGQNQLYNELNLGRREEYDVLDKRRGRDPEMGGKPQRRKNPQEGLYNELQKDKMAEAYSEIGMKGERRRGKGHDGLYQGLSTATKDTYDALHMQALPPR

SEQ ID NO: 20946 - protein, 447 aa, synthetic construct
MALPVTALLLPLALLLHAARPEVTLKESGPALVKPTQTLTLTCTFSGFSLSTYGMGVGWIRQPPGKALEWLANIWWDDDKYYNPSLKNRLTISKDTSKNQVVLTMTNMDPVDTATYYCARIGPIKYPTAPYRYFDFWGQGTMVTVSSGGGGSGGGGSGGGGSDIQMTQSPSSLSASVGDRVTITCLASEDIYNNLAWYQQKPGKAPKLLIYYASSLQDGVPSRFSGSGSGTDYTLTISSLQPEDFATYYCLQDSEYPWTFTRDGNEEMGGITQTPYKVSISGTTVILTCPQYPGSEILWQHNDKNIGGDEDDKNIGSDEDHLSLKEFSELEQSGYYVCYPRGSKPEDANFYLYLRARVCENCMEMDVMSVATIVIVDICITGGLLLLVYYWSKNRKAKAKPVTRGAGAGGRQRGQNKERPPPVPNPDYEPIRKGQRDLYSGLNQRRI

SEQ ID NO: 20947 - protein, 412 aa, synthetic construct
MALPVTALLLPLALLLHAARPEVTLKESGPALVKPTQTLTLTCTFSGFSLSTYGMGVGWIRQPPGKALEWLANIWWDDDKYYNPSLKNRLTISKDTSKNQVVLTMTNMDPVDTATYYCARIGPIKYPTAPYRYFDFWGQGTMVTVSSGGGGSGGGGSGGGGSDIQMTQSPSSLSASVGDRVTITCLASEDIYNNLAWYQQKPGKAPKLLIYYASSLQDGVPSRFSGSGSGTDYTLTISSLQPEDFATYYCLQDSEYPWTFTRFKIPIEELEDRVFVNCNTSITWVEGTVGTLLSDITRLDLGKRILDPRGIYRCNGTDIYKDKESTVQVHYRMCQSCVELDPATVAGIIVTDVIATLLLALGVFCFAGHETGRLSGAADTQALLRNDQVYQPLRDRDDAQYSHLGGNWARNK

SEQ ID NO: 20948 - protein, 422 aa, synthetic construct
MALPVTALLLPLALLLHAARPEVTLKESGPALVKPTQTLTLTCTFSGFSLSTYGMGVGWIRQPPGKALEWLANIWWDDDKYYNPSLKNRLTISKDTSKNQVVLTMTNMDPVDTATYYCARIGPIKYPTAPYRYFDFWGQGTMVTVSSGGGGSGGGGSGGGGSDIQMTQSPSSLSASVGDRVTITCLASEDIYNNLAWYQQKPGKAPKLLIYYASSLQDGVPSRFSGSGSGTDYTLTISSLQPEDFATYYCLQDSEYPWTFTRQSIKGNHLVKVYDYQEDGSVLLTCDAEAKNITWFKDGKMIGFLTEDKKKWNLGSNAKDPRGMYQCKGSQNKSKPLQVYYRMCQNCIELNAATISGFLFAEIVSIFVLAVGVYFIAGQDGVRQSRASDKQTLLPNDQLYQPLKDREDDQYSHLQGNQLRRN

SEQ ID NO: 20949 - protein, 405 aa, synthetic construct
MALPVTALLLPLALLLHAARPEVTLKESGPALVKPTQTLTLTCTFSGFSLSTYGMGVGWIRQPPGKALEWLANIWWDDDKYYNPSLKNRLTISKDTSKNQVVLTMTNMDPVDTATYYCARIGPIKYPTAPYRYFDFWGQGTMVTVSSGGGGSGGGGSGGGGSDIQMTQSPSSLSASVGDRVTITCLASEDIYNNLAWYQQKPGKAPKLLIYYASSLQDGVPSRFSGSGSGTDYTLTISSLQPEDFATYYCLQDSEYPWTFTRQSFGLLDPKLCYLLDGILFIYGVILTALFLRVKFSRSADAPAYQQGQNQLYNELNLGRREEYDVLDKRRGRDPEMGGKPQRRKNPQEGLYNELQKDKMAEAYSEIGMKGERRRGKGHDGLYQGLSTATKDTYDALHMQALPPR

SEQ ID NO: 20950 - protein, 500 aa, synthetic construct
MALPVTALLLPLALLLHAARPDIQMTQSPSSLSASVGDRVTITCLASEDIYNNLAWYQQKPGKAPKLLIYYASSLQDGVPSRFSGSGSGTDYTLTISSLQPEDFATYYCLQDSEYPWTFGGGGSGGGGSGGGGSEVTLKESGPALVKPTQTLTLTCTFSGFSLSTYGMGVGWIRQPPGKALEWLANIWWDDDKYYNPSLKNRLTISKDTSKNQVVLTMTNMDPVDTATYYCARIGPIKYPTAPYRYFDFWGQGTMVTVSSTRGMRTEDLPKAVVFLEPQWYRVLEKDSVTLKCQGAYSPEDNSTQWFHNESLISSQASSYFIDAATVDDSGEYRCQTNLSTLSDPVQLEVHIGWLLLQAPRWVFKEEDPIHLRCHSWKNTALHKVTYLQNGKGRKYFHHNSDFYIPKATLKDSGSYFCRGLVGSKNVSSETVNITITQGLAVPTISSFFPPGYQVSFCLVMVLLFAVDTGLYFSVKTNIRSSTRDWKDHKFKWRKDPQDK

SEQ ID NO: 20951 - protein, 782 aa, synthetic construct
MALPVTALLLPLALLLHAARPDIQMTQSPSSLSASVGDRVTITCLASEDIYNNLAWYQQKPGKAPKLLIYYASSLQDGVPSRFSGSGSGTDYTLTISSLQPEDFATYYCLQDSEYPWTFGGGGSGGGGSGGGGSEVTLKESGPALVKPTQTLTLTCTFSGFSLSTYGMGVGWIRQPPGKALEWLANIWWDDDKYYNPSLKNRLTISKDTSKNQVVLTMTNMDPVDTATYYCARIGPIKYPTAPYRYFDFWGQGTMVTVSSTRGGSGQQQTLPKPFIWAEPHFMVPKEKQVTICCQGNYGAVEYQLHFEGSLFAVDRPKPPERINKVQFYIPDMNSRMAGQYSCIYRVGELWSEPSNLLDLVVTEMYDTPTLSVHPGPEVISGEKVTFYCRLDTATSMFLLLKEGRSSHVQRGYGKVQAEFPLGPVTTAHRGTYRCFGSYNNHAWSFPSEPVKLLVTGDIENTSLAPEDPTFPADTWGTYLLTTETGLQKDHALWDHTAQNLLRMGLAFLVLVALVWFLVEDWLSRKRTRERASRASTWEGRRRLNTQTLRAKRSGSGVKQTLNFDLLKLAGDVESNPGPSRGHMTEYKPTVRLATRDDVPRAVRTLAAAFADYPATRHTVDPDRHIERVTELQELFLTRVGLDIGKVWVADDGAAVAVWTTPESVEAGAVFAEIGPRMAELSGSRLAAQQQMEGLLAPHRPKEPAWFLATVGVSPDHQGKGLGSAVVLPGVEAAERAGVPAFLETSAPRNLPFYERLGFTVTADVEVPEGPRTWCMTRKPGA

SEQ ID NO: 20952 - protein, 615 aa, synthetic construct
MALPVTALLLPLALLLHAARPDIQMTQSPSSLSASVGDRVTITCLASEDIYNNLAWYQQKPGKAPKLLIYYASSLQDGVPSRFSGSGSGTDYTLTISSLQPEDFATYYCLQDSEYPWTFGGGGSGGGGSGGGGSEVTLKESGPALVKPTQTLTLTCTFSGFSLSTYGMGVGWIRQPPGKALEWLANIWWDDDKYYNPSLKNRLTISKDTSKNQVVLTMTNMDPVDTATYYCARIGPIKYPTAPYRYFDFWGQGTMVTVSSTRKIEVMYPPPYLDNEKSNGTIIHVKGARGDIENTSLAPEDPTFPADTWGTYLLTTETGLQKDHALWDHTAQNLLRMGLAFLVLVALVWFLVEDWLSRKRTRERASRASTWEGRRRLNTQTLRAKRSGSGVKQTLNFDLLKLAGDVESNPGPSRGHMTEYKPTVRLATRDDVPRAVRTLAAAFADYPATRHTVDPDRHIERVTELQELFLTRVGLDIGKVWVADDGAAVAVWTTPESVEAGAVFAEIGPRMAELSGSRLAAQQQMEGLLAPHRPKEPAWFLATVGVSPDHQGKGLGSAVVLPGVEAAERAGVPAFLETSAPRNLPFYERLGFTVTADVEVPEGPRTWCMTRKPGA

SEQ ID NO: 20953 - protein, 702 aa, synthetic construct
MALPVTALLLPLALLLHAARPDIQMTQSPSSLSASVGDRVTITCLASEDIYNNLAWYQQKPGKAPKLLIYYASSLQDGVPSRFSGSGSGTDYTLTISSLQPEDFATYYCLQDSEYPWTFGGGGSGGGGSGGGGSEVTLKESGPALVKPTQTLTLTCTFSGFSLSTYGMGVGWIRQPPGKALEWLANIWWDDDKYYNPSLKNRLTISKDTSKNQVVLTMTNMDPVDTATYYCARIGPIKYPTAPYRYFDFWGQGTMVTVSSTRLWVSQPPEIRTLEGSSAFLPCSFNASQGRLAIGSVTWFRDEVVPGKEVRNGTPEFRGRLAPLASSRFLHDHQAELHIRDVRGHDASIYVCRVEVLGLGVGTGNGTRLVVEKEHPQLGAGTVLLLRAGFYAVSFLSVAVGSTVYYQGKCLTWKGPRRQLPAVVPAPLPPPCGSSAHLLPPVPGGRAKRSGSGVKQTLNFDLLKLAGDVESNPGPSRMYRMQLLSCIALSLALVTNSAPTSSSTKKTQLQLEHLLLDLQMILNGINNYKNPKLTEMLTAKFYMPKKATELKHLQCLEEELKPLEEVLNLAQSKNFHLRPRDLISNINVIVLELKGSETTFMCEYADETATIVEFLNRWITFCQSIISTLTKIEVMYPPPYLDNEKSNGTIIHVKGKHLCPSPLFPGPSKPFWVLVVVGGVLACYSLLVTVAFIIFWVRSKRS

SEQ ID NO: 20954 - protein, 678 aa, synthetic construct
MALPVTALLLPLALLLHAARPDIQMTQSPSSLSASVGDRVTITCLASEDIYNNLAWYQQKPGKAPKLLIYYASSLQDGVPSRFSGSGSGTDYTLTISSLQPEDFATYYCLQDSEYPWTFGGGGSGGGGSGGGGSEVTLKESGPALVKPTQTLTLTCTFSGFSLSTYGMGVGWIRQPPGKALEWLANIWWDDDKYYNPSLKNRLTISKDTSKNQVVLTMTNMDPVDTATYYCARIGPIKYPTAPYRYFDFWGQGTMVTVSSTRLWVSQPPEIRTLEGSSAFLPCSFNASQGRLAIGSVTWFRDEVVPGKEVRNGTPEFRGRLAPLASSRFLHDHQAELHIRDVRGHDASIYVCRVEVLGLGVGTGNGTRLVVEKEHPQLGAGTVLLLRAGFYAVSFLSVAVGSTVYYQGKCLTWKGPRRQLPAVVPAPLPPPCGSSAHLLPPVPGGRAKRSGSGVKQTLNFDLLKLAGDVESNPGPSRGHMTEYKPTVRLATRDDVPRAVRTLAAAFADYPATRHTVDPDRHIERVTELQELFLTRVGLDIGKVWVADDGAAVAVWTTPESVEAGAVFAEIGPRMAELSGSRLAAQQQMEGLLAPHRPKEPAWFLATVGVSPDHQGKGLGSAVVLPGVEAAERAGVPAFLETSAPRNLPFYERLGFTVTADVEVPEGPRTWCMTRKPGA

SEQ ID NO: 20955 - protein, 354 aa, synthetic construct
MALPVTALLLPLALLLHAARPDIQMTQSPSSLSASVGDRVTITCLASEDIYNNLAWYQQKPGKAPKLLIYYASSLQDGVPSRFSGSGSGTDYTLTISSLQPEDFATYYCLQDSEYPWTFGGGGSGGGGSGGGGSEVTLKESGPALVKPTQTLTLTCTFSGFSLSTYGMGVGWIRQPPGKALEWLANIWWDDDKYYNPSLKNRLTISKDTSKNQVVLTMTNMDPVDTATYYCARIGPIKYPTAPYRYFDFWGQGTMVTVSSTRKIEVMYPPPYLDNEKSNGTIIHVKGARITQGLAVSTISSFFPPGYQVSFCLVMVLLFAVDTGLYFSVKTNIRSSTRDWKDHKFKWRKDPQDK

SEQ ID NO: 20956 - protein, 354 aa, synthetic construct
MALPVTALLLPLALLLHAARPDIQMTQSPSSLSASVGDRVTITCLASEDIYNNLAWYQQKPGKAPKLLIYYASSLQDGVPSRFSGSGSGTDYTLTISSLQPEDFATYYCLQDSEYPWTFGGGGSGGGGSGGGGSEVTLKESGPALVKPTQTLTLTCTFSGFSLSTYGMGVGWIRQPPGKALEWLANIWWDDDKYYNPSLKNRLTISKDTSKNQVVLTMTNMDPVDTATYYCARIGPIKYPTAPYRYFDFWGQGTMVTVSSTRKIEVMYPPPYLDNEKSNGTIIHVKGARITQGLAVPTISSFFPPGYQVSFCLVMVLLFAVDTGLYFSVKTNIRSSTRDWKDHKFKWRKDPQDK

SEQ ID NO: 20957 - protein, 333 aa, synthetic construct
MALPVTALLLPLALLLHAARPDIQMTQSPSSLSASVGDRVTITCLASEDIYNNLAWYQQKPGKAPKLLIYYASSLQDGVPSRFSGSGSGTDYTLTISSLQPEDFATYYCLQDSEYPWTFGGGGSGGGGSGGGGSEVTLKESGPALVKPTQTLTLTCTFSGFSLSTYGMGVGWIRQPPGKALEWLANIWWDDDKYYNPSLKNRLTISKDTSKNQVVLTMTNMDPVDTATYYCARIGPIKYPTAPYRYFDFWGQGTMVTVSSTRKIEVMYPPPYLDNEKSNGTIIHVKGARITQGLAVSTISSFSPPGYQVSFCLVMVLLFAVDTGLYFSVKTNI

SEQ ID NO: 20958 - protein, 364 aa, synthetic construct
MALPVTALLLPLALLLHAARPDIQMTQSPSSLSASVGDRVTITCLASEDIYNNLAWYQQKPGKAPKLLIYYASSLQDGVPSRFSGSGSGTDYTLTISSLQPEDFATYYCLQDSEYPWTFGGGGSGGGGSGGGGSEVTLKESGPALVKPTQTLTLTCTFSGFSLSTYGMGVGWIRQPPGKALEWLANIWWDDDKYYNPSLKNRLTISKDTSKNQVVLTMTNMDPVDTATYYCARIGPIKYPTAPYRYFDFWGQGTMVTVSSTRKIEVMYPPPYLDNEKSNGTIIHVKGARVEKEHPQLGAGTVLLLRAGFYAVSFLSVAVGSTVYYQGKCLTWKGPRRQLPAVVPAPLPPPCGSSAHLLPPVPGG

SEQ ID NO: 20959 - protein, 445 aa, synthetic construct
MALPVTALLLPLALLLHAARPDIQMTQSPSSLSASVGDRVTITCLASEDIYNNLAWYQQKPGKAPKLLIYYASSLQDGVPSRFSGSGSGTDYTLTISSLQPEDFATYYCLQDSEYPWTFGGGGSGGGGSGGGGSEVTLKESGPALVKPTQTLTLTCTFSGFSLSTYGMGVGWIRQPPGKALEWLANIWWDDDKYYNPSLKNRLTISKDTSKNQVVLTMTNMDPVDTATYYCARIGPIKYPTAPYRYFDFWGQGTMVTVSSTRKIEVMYPPPYLDNEKSNGTIIHVKGARKSVRFYLVVSPASASTQTSWTPRDLVSSQTQTQSCVPPTAGARQAPESPSTIPVPSQPQNSTLRPGPAAPIALVPVFCGLLVAKSLVLSALLVWWGDIWWKTMMELRSLDTQKATCHLQQVTDLPWTSVSSPVEREILYHTVARTKISDDDDEHTL

SEQ ID NO: 20960 - protein, 382 aa, synthetic construct
MALPVTALLLPLALLLHAARPDIQMTQSPSSLSASVGDRVTITCLASEDIYNNLAWYQQKPGKAPKLLIYYASSLQDGVPSRFSGSGSGTDYTLTISSLQPEDFATYYCLQDSEYPWTFGGGGSGGGGSGGGGSEVTLKESGPALVKPTQTLTLTCTFSGFSLSTYGMGVGWIRQPPGKALEWLANIWWDDDKYYNPSLKNRLTISKDTSKNQVVLTMTNMDPVDTATYYCARIGPIKYPTAPYRYFDFWGQGTMVTVSSTRKIEVMYPPPYLDNEKSNGTIIHVKGARGDIENTSLAPEDPTFPADTWGTYLLTTETGLQKDHALWDHTAQNLLRMGLAFLVLVALVWFLVEDWLSRKRTRERASRASTWEGRRRLNTQTL

SEQ ID NO: 20961 - protein, 978 aa, synthetic construct
MALPVTALLLPLALLLHAARPDIQMTQSPSSLSASVGDRVTITCLASEDIYNNLAWYQQKPGKAPKLLIYYASSLQDGVPSRFSGSGSGTDYTLTISSLQPEDFATYYCLQDSEYPWTFLEGQPKANPTVTLFPPSSEELQANKATLVCLISDFYPGAVTVAWKADGSPVKAGVETTKPSKQSNNKYAASSYLSLTPEQWKSHRSYSCQVTHEGSTVEKTVAPTECSGSQSFGLLDPKLCYLLDGILFIYGVILTALFLRVKFSRSADAPAYQQGQNQLYNELNLGRREEYDVLDKRRGRDPEMGGKPQRRKNPQEGLYNELQKDKMAEAYSEIGMKGERRRGKGHDGLYQGLSTATKDTYDALHMQALPPRRAKRSGSGATNFSLLKQAGDVEENPGPTSMDWIWRILFLVGAATGAHSFEEVTLKESGPALVKPTQTLTLTCTFSGFSLSTYGMGVGWIRQPPGKALEWLANIWWDDDKYYNPSLKNRLTISKDTSKNQVVLTMTNMDPVDTATYYCARIGPIKYPTAPYRYFDFWGQGTMVTVSSTRASTKGPSVFPLAPSSKSTSGGTAALGCLVKDYFPEPVTVSWNSGALTSGVHTFPAVLQSSGLYSLSSVVTVPSSSLGTQTYICNVNHKPSNTKVDKRVEPKSCGTGDIENTSLAPEDPTFPADTWGTYLLTTETGLQKDHALWDHTAQNLLRMGLAFLVLVALVWFLVEDWLSRKRTRERASRASTWEGRRRLNTQTLRAKRSGSGATNFSLLKQAGDVEENPGPSRGHMTEYKPTVRLATRDDVPRAVRTLAAAFADYPATRHTVDPDRHIERVTELQELFLTRVGLDIGKVWVADDGAAVAVWTTPESVEAGAVFAEIGPRMAELSGSRLAAQQQMEGLLAPHRPKEPAWFLATVGVSPDHQGKGLGSAVVLPGVEAAERAGVPAFLETSAPRNLPFYERLGFTVTADVEVPEGPRTWCMTRKPGA

SEQ ID NO: 20962 - protein, 1044 aa, synthetic construct
MALPVTALLLPLALLLHAARPDIQMTQSPSSLSASVGDRVTITCLASEDIYNNLAWYQQKPGKAPKLLIYYASSLQDGVPSRFSGSGSGTDYTLTISSLQPEDFATYYCLQDSEYPWTFLEGQPKANPTVTLFPPSSEELQANKATLVCLISDFYPGAVTVAWKADGSPVKAGVETTKPSKQSNNKYAASSYLSLTPEQWKSHRSYSCQVTHEGSTVEKTVAPTECSGSQSFGLLDPKLCYLLDGILFIYGVILTALFLRVKFSRSADAPAYQQGQNQLYNELNLGRREEYDVLDKRRGRDPEMGGKPQRRKNPQEGLYNELQKDKMAEAYSEIGMKGERRRGKGHDGLYQGLSTATKDTYDALHMQALPPRRAKRSGSGATNFSLLKQAGDVEENPGPTSMDWIWRILFLVGAATGAHSFEEVTLKESGPALVKPTQTLTLTCTFSGFSLSTYGMGVGWIRQPPGKALEWLANIWWDDDKYYNPSLKNRLTISKDTSKNQVVLTMTNMDPVDTATYYCARIGPIKYPTAPYRYFDFWGQGTMVTVSSTRASTKGPSVFPLAPSSKSTSGGTAALGCLVKDYFPEPVTVSWNSGALTSGVHTFPAVLQSSGLYSLSSVVTVPSSSLGTQTYICNVNHKPSNTKVDKRVEPKSCGTKSVRFYLVVSPASASTQTSWTPRDLVSSQTQTQSCVPPTAGARQAPESPSTIPVPSQPQNSTLRPGPAAPIALVPVFCGLLVAKSLVLSALLVWWGDIWWKTMMELRSLDTQKATCHLQQVTDLPWTSVSSPVEREILYHTVARTKISDDDDEHTLRAKRSGSGVKQTLNFDLLKLAGDVESNPGPSRGHMTEYKPTVRLATRDDVPRAVRTLAAAFADYPATRHTVDPDRHIERVTELQELFLTRVGLDIGKVWVADDGAAVAVWTTPESVEAGAVFAEIGPRMAELSGSRLAAQQQMEGLLAPHRPKEPAWFLATVGVSPDHQGKGLGSAVVLPGVEAAERAGVPAFLETSAPRNLPFYERLGFTVTADVEVPEGPRTWCMTRKPGA

SEQ ID NO: 20963 - protein, 964 aa, synthetic construct
MALPVTALLLPLALLLHAARPDIQMTQSPSSLSASVGDRVTITCLASEDIYNNLAWYQQKPGKAPKLLIYYASSLQDGVPSRFSGSGSGTDYTLTISSLQPEDFATYYCLQDSEYPWTFLEGQPKANPTVTLFPPSSEELQANKATLVCLISDFYPGAVTVAWKADGSPVKAGVETTKPSKQSNNKYAASSYLSLTPEQWKSHRSYSCQVTHEGSTVEKTVAPTECSGSQSFGLLDPKLCYLLDGILFIYGVILTALFLRVKFSRSADAPAYQQGQNQLYNELNLGRREEYDVLDKRRGRDPEMGGKPQRRKNPQEGLYNELQKDKMAEAYSEIGMKGERRRGKGHDGLYQGLSTATKDTYDALHMQALPPRRAKRSGSGATNFSLLKQAGDVEENPGPTSMDWIWRILFLVGAATGAHSFEEVTLKESGPALVKPTQTLTLTCTFSGFSLSTYGMGVGWIRQPPGKALEWLANIWWDDDKYYNPSLKNRLTISKDTSKNQVVLTMTNMDPVDTATYYCARIGPIKYPTAPYRYFDFWGQGTMVTVSSTRASTKGPSVFPLAPSSKSTSGGTAALGCLVKDYFPEPVTVSWNSGALTSGVHTFPAVLQSSGLYSLSSVVTVPSSSLGTQTYICNVNHKPSNTKVDKRVEPKSCGTVVEKEHPQLGAGTVLLLRAGFYAVSFLSVAVGSTVYYQGKCLTWKGPRRQLPAVVPAPLPPPCGSSAHLLPPVPGGRAKRSGSGVKQTLNFDLLKLAGDVESNPGPSRGHMTEYKPTVRLATRDDVPRAVRTLAAAFADYPATRHTVDPDRHIERVTELQELFLTRVGLDIGKVWVADDGAAVAVWTTPESVEAGAVFAEIGPRMAELSGSRLAAQQQMEGLLAPHRPKEPAWFLATVGVSPDHQGKGLGSAVVLPGVEAAERAGVPAFLETSAPRNLPFYERLGFTVTADVEVPEGPRTWCMTRKPGA

SEQ ID NO: 20964 - protein, 993 aa, synthetic construct
MALPVTALLLPLALLLHAARPDIQMTQSPSSLSASVGDRVTITCLASEDIYNNLAWYQQKPGKAPKLLIYYASSLQDGVPSRFSGSGSGTDYTLTISSLQPEDFATYYCLQDSEYPWTFLEDLKNVFPPEVAVFEPSEAEISHTQKATLVCLATGFYPDHVELSWWVNGKEVHSGVSTDPQPLKEQPALNDSRYCLSSRLRVSATFWQNPRNHFRCQVQFYGLSENDEWTQDRAKPVTQIVSAEAWGRADCGSQSFGLLDPKLCYLLDGILFIYGVILTALFLRVKFSRSADAPAYQQGQNQLYNELNLGRREEYDVLDKRRGRDPEMGGKPQRRKNPQEGLYNELQKDKMAEAYSEIGMKGERRRGKGHDGLYQGLSTATKDTYDALHMQALPPRRAKRSGSGATNFSLLKQAGDVEENPGPTSMDWIWRILFLVGAATGAHSFEEVTLKESGPALVKPTQTLTLTCTFSGFSLSTYGMGVGWIRQPPGKALEWLANIWWDDDKYYNPSLKNRLTISKDTSKNQVVLTMTNMDPVDTATYYCARIGPIKYPTAPYRYFDFWGQGTMVTVSSTRIQNPDPAVYQLRDSKSSDKSVCLFTDFDSQTNVSQSKDSDVYITDKTVLDMRSMDFKSNSAVAWSNKSDFACANAFNNSIIPEDTFFPSPESSCGTGDIENTSLAPEDPTFPADTWGTYLLTTETGLQKDHALWDHTAQNLLRMGLAFLVLVALVWFLVEDWLSRKRTRERASRASTWEGRRRLNTQTLRAKRSGSGATNFSLLKQAGDVEENPGPSRGHMTEYKPTVRLATRDDVPRAVRTLAAAFADYPATRHTVDPDRHIERVTELQELFLTRVGLDIGKVWVADDGAAVAVWTTPESVEAGAVFAEIGPRMAELSGSRLAAQQQMEGLLAPHRPKEPAWFLATVGVSPDHQGKGLGSAVVLPGVEAAERAGVPAFLETSAPRNLPFYERLGFTVTADVEVPEGPRTWCMTRKPGA

SEQ ID NO: 20965 - protein, 1059 aa, synthetic construct
MALPVTALLLPLALLLHAARPDIQMTQSPSSLSASVGDRVTITCLASEDIYNNLAWYQQKPGKAPKLLIYYASSLQDGVPSRFSGSGSGTDYTLTISSLQPEDFATYYCLQDSEYPWTFLEDLKNVFPPEVAVFEPSEAEISHTQKATLVCLATGFYPDHVELSWWVNGKEVHSGVSTDPQPLKEQPALNDSRYCLSSRLRVSATFWQNPRNHFRCQVQFYGLSENDEWTQDRAKPVTQIVSAEAWGRADCGSQSFGLLDPKLCYLLDGILFIYGVILTALFLRVKFSRSADAPAYQQGQNQLYNELNLGRREEYDVLDKRRGRDPEMGGKPQRRKNPQEGLYNELQKDKMAEAYSEIGMKGERRRGKGHDGLYQGLSTATKDTYDALHMQALPPRRAKRSGSGATNFSLLKQAGDVEENPGPTSMDWIWRILFLVGAATGAHSFEEVTLKESGPALVKPTQTLTLTCTFSGFSLSTYGMGVGWIRQPPGKALEWLANIWWDDDKYYNPSLKNRLTISKDTSKNQVVLTMTNMDPVDTATYYCARIGPIKYPTAPYRYFDFWGQGTMVTVSSTRIQNPDPAVYQLRDSKSSDKSVCLFTDFDSQTNVSQSKDSDVYITDKTVLDMRSMDFKSNSAVAWSNKSDFACANAFNNSIIPEDTFFPSPESSCGTKSVRFYLVVSPASASTQTSWTPRDLVSSQTQTQSCVPPTAGARQAPESPSTIPVPSQPQNSTLRPGPAAPIALVPVFCGLLVAKSLVLSALLVWWGDIWWKTMMELRSLDTQKATCHLQQVTDLPWTSVSSPVEREILYHTVARTKISDDDDEHTLRAKRSGSGVKQTLNFDLLKLAGDVESNPGPSRGHMTEYKPTVRLATRDDVPRAVRTLAAAFADYPATRHTVDPDRHIERVTELQELFLTRVGLDIGKVWVADDGAAVAVWTTPESVEAGAVFAEIGPRMAELSGSRLAAQQQMEGLLAPHRPKEPAWFLATVGVSPDHQGKGLGSAVVLPGVEAAERAGVPAFLETSAPRNLPFYERLGFTVTADVEVPEGPRTWCMTRKPGA

SEQ ID NO: 20966 - protein, 979 aa, synthetic construct
MALPVTALLLPLALLLHAARPDIQMTQSPSSLSASVGDRVTITCLASEDIYNNLAWYQQKPGKAPKLLIYYASSLQDGVPSRFSGSGSGTDYTLTISSLQPEDFATYYCLQDSEYPWTFLEDLKNVFPPEVAVFEPSEAEISHTQKATLVCLATGFYPDHVELSWWVNGKEVHSGVSTDPQPLKEQPALNDSRYCLSSRLRVSATFWQNPRNHFRCQVQFYGLSENDEWTQDRAKPVTQIVSAEAWGRADCGSQSFGLLDPKLCYLLDGILFIYGVILTALFLRVKFSRSADAPAYQQGQNQLYNELNLGRREEYDVLDKRRGRDPEMGGKPQRRKNPQEGLYNELQKDKMAEAYSEIGMKGERRRGKGHDGLYQGLSTATKDTYDALHMQALPPRRAKRSGSGATNFSLLKQAGDVEENPGPTSMDWIWRILFLVGAATGAHSFEEVTLKESGPALVKPTQTLTLTCTFSGFSLSTYGMGVGWIRQPPGKALEWLANIWWDDDKYYNPSLKNRLTISKDTSKNQVVLTMTNMDPVDTATYYCARIGPIKYPTAPYRYFDFWGQGTMVTVSSTRIQNPDPAVYQLRDSKSSDKSVCLFTDFDSQTNVSQSKDSDVYITDKTVLDMRSMDFKSNSAVAWSNKSDFACANAFNNSIIPEDTFFPSPESSCGTVVEKEHPQLGAGTVLLLRAGFYAVSFLSVAVGSTVYYQGKCLTWKGPRRQLPAVVPAPLPPPCGSSAHLLPPVPGGRAKRSGSGVKQTLNFDLLKLAGDVESNPGPSRGHMTEYKPTVRLATRDDVPRAVRTLAAAFADYPATRHTVDPDRHIERVTELQELFLTRVGLDIGKVWVADDGAAVAVWTTPESVEAGAVFAEIGPRMAELSGSRLAAQQQMEGLLAPHRPKEPAWFLATVGVSPDHQGKGLGSAVVLPGVEAAERAGVPAFLETSAPRNLPFYERLGFTVTADVEVPEGPRTWCMTRKPGA

SEQ ID NO: 20967 - protein, 950 aa, synthetic construct
MALPVTALLLPLALLLHAARPDIQMTQSPSSLSASVGDRVTITCLASEDIYNNLAWYQQKPGKAPKLLIYYASSLQDGVPSRFSGSGSGTDYTLTISSLQPEDFATYYCLQDSEYPWTFLEGQPKANPTVTLFPPSSEELQANKATLVCLISDFYPGAVTVAWKADGSPVKAGVETTKPSKQSNNKYAASSYLSLTPEQWKSHRSYSCQVTHEGSTVEKTVAPTECSGSQSFGLLDPKLCYLLDGILFIYGVILTALFLRVKFSRSADAPAYQQGQNQLYNELNLGRREEYDVLDKRRGRDPEMGGKPQRRKNPQEGLYNELQKDKMAEAYSEIGMKGERRRGKGHDGLYQGLSTATKDTYDALHMQALPPRRAKRSGSGATNFSLLKQAGDVEENPGPTSMDWIWRILFLVGAATGAHSFEEVTLKESGPALVKPTQTLTLTCTFSGFSLSTYGMGVGWIRQPPGKALEWLANIWWDDDKYYNPSLKNRLTISKDTSKNQVVLTMTNMDPVDTATYYCARIGPIKYPTAPYRYFDFWGQGTMVTVSSTRASTKGPSVFPLAPSSKSTSGGTAALGCLVKDYFPEPVTVSWNSGALTSGVHTFPAVLQSSGLYSLSSVVTVPSSSLGTQTYICNVNHKPSNTKVDKRVEPKSCGTITQGLAVSTISSFFPPGYQVSFCLVMVLLFAVDTGLYFSVKTNIRSSTRDWKDHKFKWRKDPQDKRAKRSGSGATNFSLLKQAGDVEENPGPSRGHMTEYKPTVRLATRDDVPRAVRTLAAAFADYPATRHTVDPDRHIERVTELQELFLTRVGLDIGKVWVADDGAAVAVWTTPESVEAGAVFAEIGPRMAELSGSRLAAQQQMEGLLAPHRPKEPAWFLATVGVSPDHQGKGLGSAVVLPGVEAAERAGVPAFLETSAPRNLPFYERLGFTVTADVEVPEGPRTWCMTRKPGA

SEQ ID NO: 20968 - protein, 965 aa, synthetic construct
MALPVTALLLPLALLLHAARPDIQMTQSPSSLSASVGDRVTITCLASEDIYNNLAWYQQKPGKAPKLLIYYASSLQDGVPSRFSGSGSGTDYTLTISSLQPEDFATYYCLQDSEYPWTFLEDLKNVFPPEVAVFEPSEAEISHTQKATLVCLATGFYPDHVELSWWVNGKEVHSGVSTDPQPLKEQPALNDSRYCLSSRLRVSATFWQNPRNHFRCQVQFYGLSENDEWTQDRAKPVTQIVSAEAWGRADCGSQSFGLLDPKLCYLLDGILFIYGVILTALFLRVKFSRSADAPAYQQGQNQLYNELNLGRREEYDVLDKRRGRDPEMGGKPQRRKNPQEGLYNELQKDKMAEAYSEIGMKGERRRGKGHDGLYQGLSTATKDTYDALHMQALPPRRAKRSGSGATNFSLLKQAGDVEENPGPTSMDWIWRILFLVGAATGAHSFEEVTLKESGPALVKPTQTLTLTCTFSGFSLSTYGMGVGWIRQPPGKALEWLANIWWDDDKYYNPSLKNRLTISKDTSKNQVVLTMTNMDPVDTATYYCARIGPIKYPTAPYRYFDFWGQGTMVTVSSTRIQNPDPAVYQLRDSKSSDKSVCLFTDFDSQTNVSQSKDSDVYITDKTVLDMRSMDFKSNSAVAWSNKSDFACANAFNNSIIPEDTFFPSPESSCGTITQGLAVSTISSFFPPGYQVSFCLVMVLLFAVDTGLYFSVKTNIRSSTRDWKDHKFKWRKDPQDKRAKRSGSGATNFSLLKQAGDVEENPGPSRGHMTEYKPTVRLATRDDVPRAVRTLAAAFADYPATRHTVDPDRHIERVTELQELFLTRVGLDIGKVWVADDGAAVAVWTTPESVEAGAVFAEIGPRMAELSGSRLAAQQQMEGLLAPHRPKEPAWFLATVGVSPDHQGKGLGSAVVLPGVEAAERAGVPAFLETSAPRNLPFYERLGFTVTADVEVPEGPRTWCMTRKPGA

SEQ ID NO: 20969 - protein, 648 aa, synthetic construct
MALPVTALLLPLALLLHAARPDIQMTQSPSSLSASVGDRVTITCLASEDIYNNLAWYQQKPGKAPKLLIYYASSLQDGVPSRFSGSGSGTDYTLTISSLQPEDFATYYCLQDSEYPWTFLEGQPKANPTVTLFPPSSEELQANKATLVCLISDFYPGAVTVAWKADGSPVKAGVETTKPSKQSNNKYAASSYLSLTPEQWKSHRSYSCQVTHEGSTVEKTVAPTECSGSLGEPQLCYILDAILFLYGIVLTLLYCRLKIQVRKAAITSYEKSDGVYTGLSTRNQETYETLKHEKPPQRAKRSGSGATNFSLLKQAGDVEENPGPTSMDWIWRILFLVGAATGAHSFEEVTLKESGPALVKPTQTLTLTCTFSGFSLSTYGMGVGWIRQPPGKALEWLANIWWDDDKYYNPSLKNRLTISKDTSKNQVVLTMTNMDPVDTATYYCARIGPIKYPTAPYRYFDFWGQGTMVTVSSTRASTKGPSVFPLAPSSKSTSGGTAALGCLVKDYFPEPVTVSWNSGALTSGVHTFPAVLQSSGLYSLSSVVTVPSSSLGTQTYICNVNHKPSNTKVDKRVEPKSCGTLGEPQLCYILDAILFLYGIVLTLLYCRLKIQVRKAAITSYEKSDGVYTGLSTRNQETYETLKHEKPPQ

SEQ ID NO: 20970 - protein, 1025 aa, synthetic construct
MALPVTALLLPLALLLHAARPDIQMTQSPSSLSASVGDRVTITCLASEDIYNNLAWYQQKPGKAPKLLIYYASSLQDGVPSRFSGSGSGTDYTLTISSLQPEDFATYYCLQDSEYPWTFGQPKANPTVTLFPPSSEELQANKATLVCLISDFYPGAVTVAWKADGSPVKAGVETTKPSKQSNNKYAASSYLSLTPEQWKSHRSYSCQVTHEGSTVEKTVAPTECSGSQSFGLLDPKLCYLLDGILFIYGVILTALFLRVKFSRSADAPAYQQGQNQLYNELNLGRREEYDVLDKRRGRDPEMGGKPRRKNPQEGLYNELQKDKMAEAYSEIGMKGERRRGKGHDGLYQGLSTATKDTYDALHMQALPPRRAKRSGSGATNFSLLKQAGDVEENPGPTSMDWIWRILFLVGAATGAHSFEEVTLKESGPALVKPTQTLTLTCTFSGFSLSTYGMGVGWIRQPPGKALEWLANIWWDDDKYYNPSLKNRLTISKDTSKNQVVLTMTNMDPVDTATYYCARIGPIKYPTAPYRYFDFWGQGTMVTVSSASTKGPSVFPLAPSSKSTSGGTAALGCLVKDYFPEPVTVSWNSGALTSGVHTFPAVLQSSGLYSLSSVVTVPSSSLGTQTYICNVNHKPSNTKVDKRVEPKSCGTQSFGLLDPKLCYLLDGILFIYGVILTALFLRVKFSRSADAPAYQQGQNQLYNELNLGRREEYDVLDKRRGRDPEMGGKPRRKNPQEGLYNELQKDKMAEAYSEIGMKGERRRGKGHDGLYQGLSTATKDTYDALHMQALPPRRAKRSGSGVKQTLNFDLLKLAGDVESNPGPSRGHMTEYKPTVRLATRDDVPRAVRTLAAAFADYPATRHTVDPDRHIERVTELQELFLTRVGLDIGKVWVADDGAAVAVWTTPESVEAGAVFAEIGPRMAELSGSRLAAQQQMEGLLAPHRPKEPAWFLATVGVSPDHQGKGLGSAVVLPGVEAAERAGVPAFLETSAPRNLPFYERLGFTVTADVEVPEGPRTWCMTRKPGA

SEQ ID NO: 20971 - protein, 811 aa, synthetic construct
MALPVTALLLPLALLLHAARPDIQMTQSPSSLSASVGDRVTITCLASEDIYNNLAWYQQKPGKAPKLLIYYASSLQDGVPSRFSGSGSGTDYTLTISSLQPEDFATYYCLQDSEYPWTFLEDLKNVFPPEVAVFEPSEAEISHTQKATLVCLATGFYPDHVELSWWVNGKEVHSGVSTDPQPLKEQPALNDSRYCLSSRLRVSATFWQNPRNHFRCQVQFYGLSENDEWTQDRAKPVTQIVSAEAWGRADCGSQSFGLLDPKLCYLLDGILFIYGVILTALFLRVKFSRSADAPAYQQGQNQLYNELNLGRREEYDVLDKRRGRDPEMGGKPRRKNPQEGLYNELQKDKMAEAYSEIGMKGERRRGKGHDGLYQGLSTATKDTYDALHMQALPPRRAKRSGSGATNFSLLKQAGDVEENPGPTSMDWIWRILFLVGAATGAHSFEEVTLKESGPALVKPTQTLTLTCTFSGFSLSTYGMGVGWIRQPPGKALEWLANIWWDDDKYYNPSLKNRLTISKDTSKNQVVLTMTNMDPVDTATYYCARIGPIKYPTAPYRYFDFWGQGTMVTVSSTRIQNPDPAVYQLRDSKSSDKSVCLFTDFDSQTNVSQSKDSDVYITDKTVLDMRSMDFKSNSAVAWSNKSDFACANAFNNSIIPEDTFFPSPESSCGTQSFGLLDPKLCYLLDGILFIYGVILTALFLRVKFSRSADAPAYQQGQNQLYNELNLGRREEYDVLDKRRGRDPEMGGKPRRKNPQEGLYNELQKDKMAEAYSEIGMKGERRRGKGHDGLYQGLSTATKDTYDALHMQALPPR

SEQ ID NO: 20972 - protein, 31 aa, synthetic construct; identical to SEQ ID NO: 20385

SEQ ID NO: 20973 - protein, 31 aa, synthetic construct; identical to SEQ ID NO: 20385

SEQ ID NO: 20974 - protein, 31 aa, synthetic construct; identical to SEQ ID NO: 20385

SEQ ID NO: 20975 - protein, 31 aa, synthetic construct; identical to SEQ ID NO: 20385

SEQ ID NO: 20976 - protein, 31 aa, synthetic construct; identical to SEQ ID NO: 20385

SEQ ID NO: 20977 - protein, 31 aa, synthetic construct; identical to SEQ ID NO: 20385

SEQ ID NO: 20978 - protein, 31 aa, synthetic construct; identical to SEQ ID NO: 20385

SEQ ID NO: 20979 - protein, 31 aa, synthetic construct; identical to SEQ ID NO: 20385

SEQ ID NO: 20980 - protein, 31 aa, synthetic construct; identical to SEQ ID NO: 20385

SEQ ID NO: 20981 - protein, 31 aa, synthetic construct; identical to SEQ ID NO: 20385

SEQ ID NO: 20982 - protein, 31 aa, synthetic construct; identical to SEQ ID NO: 20385

SEQ ID NO: 20983 - protein, 31 aa, synthetic construct; identical to SEQ ID NO: 20385

SEQ ID NO: 20984 - protein, 31 aa, synthetic construct; identical to SEQ ID NO: 20385

SEQ ID NO: 20985 - protein, 31 aa, synthetic construct; identical to SEQ ID NO: 20385

SEQ ID NO: 20986 - protein, 31 aa, synthetic construct; identical to SEQ ID NO: 20385

SEQ ID NO: 20987 - protein, 31 aa, synthetic construct; identical to SEQ ID NO: 20385

SEQ ID NO: 20988 - protein, 31 aa, synthetic construct; identical to SEQ ID NO: 20385

SEQ ID NO: 20989 - protein, 6 aa, synthetic construct
DHINNW

SEQ ID NO: 20990 - protein, 10 aa, synthetic construct
KSVSTSGYSY

SEQ ID NO: 20991 - protein, 6 aa, synthetic construct
QNVGTA

SEQ ID NO: 20992 - protein, 6 aa, synthetic construct
QSVGTA

SEQ ID NO: 20993 - protein, 8 aa, synthetic construct
SSNIGNNF

SEQ ID NO: 20994 - protein, 7 aa, synthetic construct
SGHSSYI

SEQ ID NO: 20995 - protein, 7 aa, synthetic construct
SGHSSYI

SEQ ID NO: 20996 - protein, 12 aa, synthetic construct
QSLLNSGNQKNY

SEQ ID NO: 20997 - protein, 12 aa, synthetic construct
QSLLNSGNQKNY

SEQ ID NO: 20998 - protein, 6 aa, synthetic construct
QSVSND

SEQ ID NO: 20999 - protein, 6 aa, synthetic construct
QDVSTA

SEQ ID NO: 21000 - protein, 12 aa, synthetic construct
QSLLYSSNSKNY

SEQ ID NO: 21001 - protein, 6 aa, synthetic construct
QDISNY

SEQ ID NO: 21002 - protein, 6 aa, synthetic construct
QDISNY

SEQ ID NO: 21003 - protein, 6 aa, synthetic construct
QDVNTA

SEQ ID NO: 21004 - protein, 6 aa, synthetic construct
NIGGKS

SEQ ID NO: 21005 - protein, 10 aa, synthetic construct
ESVTILGSHL

SEQ ID NO: 21006 - protein, 10 aa, synthetic construct
ESVTILGSHL

SEQ ID NO: 21007 - protein, 7 aa, synthetic construct
QSVRSSY

SEQ ID NO: 21008 - protein, 7 aa, synthetic construct
QSIRSSY

SEQ ID NO: 21009 - protein, 6 aa, synthetic construct
QSVSSY

SEQ ID NO: 21010 - protein, 6 aa, synthetic construct
QGISSW

SEQ ID NO: 21011 - protein, 7 aa, synthetic construct
SSNIGSN

SEQ ID NO: 21012 - protein, 6 aa, synthetic construct
EDIYDN

SEQ ID NO: 21013 - protein, 6 aa, synthetic construct
EDIYNN

SEQ ID NO: 21014 - protein, 5 aa, synthetic construct
SISNW

SEQ ID NO: 21015 - protein, 5 aa, synthetic construct
SIRNY

SEQ ID NO: 21016 - protein, 31 aa, synthetic construct; identical to SEQ ID NO: 20385

SEQ ID NO: 21017 - protein, 31 aa, synthetic construct; identical to SEQ ID NO: 20385

SEQ ID NO: 21018 - protein, 31 aa, synthetic construct; identical to SEQ ID NO: 20385

SEQ ID NO: 21019 - protein, 31 aa, synthetic construct; identical to SEQ ID NO: 20385

SEQ ID NO: 21020 - protein, 31 aa, synthetic construct; identical to SEQ ID NO: 20385

SEQ ID NO: 21021 - protein, 31 aa, synthetic construct; identical to SEQ ID NO: 20385

SEQ ID NO: 21022 - protein, 31 aa, synthetic construct; identical to SEQ ID NO: 20385

SEQ ID NO: 21023 - protein, 31 aa, synthetic construct; identical to SEQ ID NO: 20385

SEQ ID NO: 21024 - protein, 5 aa, synthetic construct
GATTL

SEQ ID NO: 21025 - protein, 4 aa, synthetic construct
LASN

SEQ ID NO: 21026 - protein, 4 aa, synthetic construct
SASN

SEQ ID NO: 21027 - protein, 4 aa, synthetic construct
SASN

SEQ ID NO: 21028 - protein, 4 aa, synthetic construct
RNNQ

SEQ ID NO: 21029 - protein, 4 aa, synthetic construct
VEGS

SEQ ID NO: 21030 - protein, 4 aa, synthetic construct
VEGS

SEQ ID NO: 21031 - protein, 4 aa, synthetic construct
WAST

SEQ ID NO: 21032 - protein, 4 aa, synthetic construct
WAST

SEQ ID NO: 21033 - protein, 4 aa, synthetic construct
YASN

SEQ ID NO: 21034 - protein, 4 aa, synthetic construct
SASF

SEQ ID NO: 21035 - protein, 4 aa, synthetic construct
WAST

SEQ ID NO: 21036 - protein, 4 aa, synthetic construct
YTSR

SEQ ID NO: 21037 - protein, 4 aa, synthetic construct
YTSR

SEQ ID NO: 21038 - protein, 4 aa, synthetic construct
SASF

SEQ ID NO: 21039 - protein, 4 aa, synthetic construct
DDSD

SEQ ID NO: 21040 - protein, 4 aa, synthetic construct
LASN

SEQ ID NO: 21041 - protein, 4 aa, synthetic construct
LASN

SEQ ID NO: 21042 - protein, 4 aa, synthetic construct
GASS

SEQ ID NO: 21043 - protein, 4 aa, synthetic construct
GASS

SEQ ID NO: 21044 - protein, 4 aa, synthetic construct
DASN

SEQ ID NO: 21045 - protein, 4 aa, synthetic construct
AASS

SEQ ID NO: 21046 - protein, 4 aa, synthetic construct
GDYQ

SEQ ID NO: 21047 - protein, 4 aa, synthetic construct
YASS

SEQ ID NO: 21048 - protein, 4 aa, synthetic construct
YASS

SEQ ID NO: 21049 - protein, 4 aa, synthetic construct
KASS

SEQ ID NO: 21050 - protein, 4 aa, synthetic construct
AASS

SEQ ID NO: 21051 - protein, 31 aa, synthetic construct; identical to SEQ ID NO: 20385

SEQ ID NO: 21052 - protein, 31 aa, synthetic construct; identical to SEQ ID NO: 20385

SEQ ID NO: 21053 - protein, 31 aa, synthetic construct; identical to SEQ ID NO: 20385

SEQ ID NO: 21054 - protein, 31 aa, synthetic construct; identical to SEQ ID NO: 20385

SEQ ID NO: 21055 - protein, 31 aa, synthetic construct; identical to SEQ ID NO: 20385

SEQ ID NO: 21056 - protein, 31 aa, synthetic construct; identical to SEQ ID NO: 20385

SEQ ID NO: 21057 - protein, 31 aa, synthetic construct; identical to SEQ ID NO: 20385

SEQ ID NO: 21058 - protein, 31 aa, synthetic construct; identical to SEQ ID NO: 20385

SEQ ID NO: 21059 - protein, 9 aa, synthetic construct
CQQSWNTPW

SEQ ID NO: 21060 - protein, 10 aa, synthetic construct
CQHSRELPFT

SEQ ID NO: 21061 - protein, 7 aa, synthetic construct
CQQYSTY

SEQ ID NO: 21062 - protein, 7 aa, synthetic construct
CQQYSTY

SEQ ID NO: 21063 - protein, 9 aa, synthetic construct
CAAWDDSVR

SEQ ID NO: 21064 - protein, 7 aa, synthetic construct
CETWDSN

SEQ ID NO: 21065 - protein, 7 aa, synthetic construct
CETWDSN

SEQ ID NO: 21066 - protein, 7 aa, synthetic construct
CQNDYSY

SEQ ID NO: 21067 - protein, 7 aa, synthetic construct
CQNDYSY

SEQ ID NO: 21068 - protein, 9 aa, synthetic construct
CQQDYTSPW

SEQ ID NO: 21069 - protein, 9 aa, synthetic construct
CQQYLYQPW

SEQ ID NO: 21070 - protein, 7 aa, synthetic construct
CQQPYSY

SEQ ID NO: 21071 - protein, 9 aa, synthetic construct
CQQGNTLPY

SEQ ID NO: 21072 - protein, 7 aa, synthetic construct
CQQYNSY

SEQ ID NO: 21073 - protein, 7 aa, synthetic construct
CQQAYTT

SEQ ID NO: 21074 - protein, 9 aa, synthetic construct
CQVWDSSSD

SEQ ID NO: 21075 - protein, 9 aa, synthetic construct
CLQSRTIPR

SEQ ID NO: 21076 - protein, 9 aa, synthetic construct
CLQSRTIPR

SEQ ID NO: 21077 - protein, 9 aa, synthetic construct
CQQYGYSPP

SEQ ID NO: 21078 - protein, 8 aa, synthetic construct
CQQYGDLP

SEQ ID NO: 21079 - protein, 8 aa, synthetic construct
CQQRTNWP

SEQ ID NO: 21080 - protein, 8 aa, synthetic construct [sequence omitted]

SEQ ID NO: 21081 - protein, 10 aa, synthetic construct
CATRDDSLSG

SEQ ID NO: 21082 - protein, 8 aa, synthetic construct
CLQDSEYP

SEQ ID NO: 21083 - protein, 8 aa, synthetic construct
CLQDSEYP

SEQ ID NO: 21084 - protein, 9 aa, synthetic construct
CQQYYSYSY

SEQ ID NO: 21085 - protein, 10 aa, synthetic construct
CQQSYSAPPI

SEQ ID NO: 21086 - protein, 31 aa, synthetic construct; identical to SEQ ID NO: 20385

SEQ ID NO: 21087 - protein, 31 aa, synthetic construct; identical to SEQ ID NO: 20385

SEQ ID NO: 21088 - protein, 31 aa, synthetic construct; identical to SEQ ID NO: 20385

SEQ ID NO: 21089 - protein, 31 aa, synthetic construct; identical to SEQ ID NO: 20385

SEQ ID NO: 21090 - protein, 31 aa, synthetic construct; identical to SEQ ID NO: 20385

SEQ ID NO: 21091 - protein, 31 aa, synthetic construct; identical to SEQ ID NO: 20385

SEQ ID NO: 21092 - protein, 31 aa, synthetic construct; identical to SEQ ID NO: 20385

SEQ ID NO: 21093 - protein, 31 aa, synthetic construct; identical to SEQ ID NO: 20385

SEQ ID NO: 21094 - protein, 8 aa, synthetic construct
GYAFSSYW

SEQ ID NO: 21095 - protein, 8 aa, synthetic construct
GFDFSRYW

SEQ ID NO: 21096 - protein, 8 aa, synthetic construct
GFTFSTYG

SEQ ID NO: 21097 - protein, 8 aa, synthetic construct
GFTFNDFG

SEQ ID NO: 21098 - protein, 8 aa, synthetic construct
SSNIGNNF

SEQ ID NO: 21099 - protein, 8 aa, synthetic construct
GYTFTSYY

SEQ ID NO: 21100 - protein, 8 aa, synthetic construct
GYTFTSYY

SEQ ID NO: 21101 - protein, 8 aa, synthetic construct
GYTFTNYG

SEQ ID NO: 21102 - protein, 8 aa, synthetic construct
GYTFTNYG

SEQ ID NO: 21103 - protein, 8 aa, synthetic construct
GYTFTNYG

SEQ ID NO: 21104 - protein, 8 aa, synthetic construct
GFNIDYYG

SEQ ID NO: 21105 - protein, 8 aa, synthetic construct
GYTFTDHA

SEQ ID NO: 21106 - protein, 8 aa, synthetic construct
GYTFSDYF

SEQ ID NO: 21107 - protein, 8 aa, synthetic construct
GYTFTEYT

SEQ ID NO: 21108 - protein, 8 aa, synthetic construct
GFNIKDTY

SEQ ID NO: 21109 - protein, 8 aa, synthetic construct
GGSISSSS

SEQ ID NO: 21110 - protein, 8 aa, synthetic construct
GYTFRHYS

SEQ ID NO: 21111 - protein, 7 aa, synthetic construct
GYTFTDY

SEQ ID NO: 21112 - protein, 8 aa, synthetic construct
GFTFSSYA

SEQ ID NO: 21113 - protein, 8 aa, synthetic construct
GFTFSSYA

SEQ ID NO: 21114 - protein, 8 aa, synthetic construct
GFTFSSYI

SEQ ID NO: 21115 - protein, 8 aa, synthetic construct
GFTFSDHG

SEQ ID NO: 21116 - protein, 8 aa, synthetic construct
GYGFTSYW

SEQ ID NO: 21117 - protein, 10 aa, synthetic construct
GFSLTTYGMG

SEQ ID NO: 21118 - protein, 10 aa, synthetic construct
GFSLSTYGMG

SEQ ID NO: 21119 - protein, 7 aa, synthetic construct
GFTISSY

SEQ ID NO: 21120 - protein, 8 aa, synthetic construct
GDSVSSNR

SEQ ID NO: 21121 - protein, 31 aa, synthetic construct; identical to SEQ ID NO: 20385

SEQ ID NO: 21122 - protein, 31 aa, synthetic construct; identical to SEQ ID NO: 20385

SEQ ID NO: 21123 - protein, 31 aa, synthetic construct; identical to SEQ ID NO: 20385

SEQ ID NO: 21124 - protein, 31 aa, synthetic construct; identical to SEQ ID NO: 20385

SEQ ID NO: 21125 - protein, 31 aa, synthetic construct; identical to SEQ ID NO: 20385

SEQ ID NO: 21126 - protein, 31 aa, synthetic construct; identical to SEQ ID NO: 20385

SEQ ID NO: 21127 - protein, 31 aa, synthetic construct; identical to SEQ ID NO: 20385

SEQ ID NO: 21128 - protein, 31 aa, synthetic construct; identical to SEQ ID NO: 20385

SEQ ID NO: 21129 - protein, 4 aa, synthetic construct
IYPG

SEQ ID NO: 21130 - protein, 4 aa, synthetic construct
INPT

SEQ ID NO: 21131 - protein, 4 aa, synthetic construct
INSN

SEQ ID NO: 21132 - protein, 4 aa, synthetic construct
INTN

SEQ ID NO: 21133 - protein, 4 aa, synthetic construct
RNNQ

SEQ ID NO: 21134 - protein, 4 aa, synthetic construct
INPS

SEQ ID NO: 21135 - protein, 4 aa, synthetic construct
INPS

SEQ ID NO: 21136 - protein, 4 aa, synthetic construct
INTN

SEQ ID NO: 21137 - protein, 4 aa, synthetic construct
INTY

SEQ ID NO: 21138 - protein, 4 aa, synthetic construct
INTY

SEQ ID NO: 21139 - protein, 4 aa, synthetic construct
LYGG

SEQ ID NO: 21140 - protein, 4 aa, synthetic construct
FSPG

SEQ ID NO: 21141 - protein, 4 aa, synthetic construct
ISNG

SEQ ID NO: 21142 - protein, 4 aa, synthetic construct
INPN

SEQ ID NO: 21143 - protein, 4 aa, synthetic construct
IYPT

SEQ ID NO: 21144 - protein, 4 aa, synthetic construct
IYYS

SEQ ID NO: 21145 - protein, 8 aa, synthetic construct
INTESGVP

SEQ ID NO: 21146 - protein, 8 aa, synthetic construct
INTETREP

SEQ ID NO: 21147 - protein, 8 aa, synthetic construct
ISGSGGRP

SEQ ID NO: 21148 - protein, 8 aa, synthetic construct
ISGSGGRT

SEQ ID NO: 21149 - protein, 8 aa, synthetic construct
ISYDGRNK

SEQ ID NO: 21150 - protein, 8 aa, synthetic construct
IWYDGSNK

SEQ ID NO: 21151 - protein, 8 aa, synthetic construct
IHPDDSDT

SEQ ID NO: 21152 - protein, 7 aa, synthetic construct
IWWDDDK

SEQ ID NO: 21153 - protein, 7 aa, synthetic construct
IWWDDDK

SEQ ID NO: 21154 - protein, 8 aa, synthetic construct
ISYDGGNK

SEQ ID NO: 21155 - protein, 9 aa, synthetic construct
TYYRSKWYN

SEQ ID NO: 21156 - protein, 31 aa, synthetic construct; identical to SEQ ID NO: 20385

SEQ ID NO: 21157 - protein, 31 aa, synthetic construct; identical to SEQ ID NO: 20385

SEQ ID NO: 21158 - protein, 31 aa, synthetic construct; identical to SEQ ID NO: 20385

SEQ ID NO: 21159 - protein, 31 aa, synthetic construct; identical to SEQ ID NO: 20385

SEQ ID NO: 21160 - protein, 31 aa, synthetic construct; identical to SEQ ID NO: 20385

SEQ ID NO: 21161 - protein, 31 aa, synthetic construct; identical to SEQ ID NO: 20385

SEQ ID NO: 21162 - protein, 31 aa, synthetic construct; identical to SEQ ID NO: 20385

SEQ ID NO: 21163 - protein, 31 aa, synthetic construct; identical to SEQ ID NO: 20385

SEQ ID NO: 21164 - protein, 5 aa, synthetic construct
AMDYW

SEQ ID NO: 21165 - protein, 6 aa, synthetic construct
DAMDYW

SEQ ID NO: 21166 - protein, 8 aa, synthetic construct
TREGLDYW

SEQ ID NO: 21167 - protein, 8 aa, synthetic construct
PREGLDYW

SEQ ID NO: 21168 - protein, 8 aa, synthetic construct
AAWDDSVR

SEQ ID NO: 21169 - protein, 11 aa, synthetic construct
SGGSCYSIDYW

SEQ ID NO: 21170 - protein, 11 aa, synthetic construct
SGGSCYSIDYW

SEQ ID NO: 21171 - protein, 7 aa, synthetic construct
GNAMDYW

SEQ ID NO: 21172 - protein, 7 aa, synthetic construct
GNAMDYW

SEQ ID NO: 21173 - protein, 9 aa, synthetic construct
GDSSPSDYW

SEQ ID NO: 21174 - protein, 11 aa, synthetic construct
SRQYSAYFDYW

SEQ ID NO: 21175 - protein, 9 aa, synthetic construct
TRSLNMAYW

SEQ ID NO: 21176 - protein, 11 aa, synthetic construct
ARFDGYIFDYW

SEQ ID NO: 21177 - protein, 9 aa, synthetic construct
ARGWNFDYW

SEQ ID NO: 21178 - protein, 8 aa, synthetic construct
GAYAMDVW

SEQ ID NO: 21179 - protein, 10 aa, synthetic construct
GAVAGLFDYW

SEQ ID NO: 21180 - protein, 10 aa, synthetic construct
CSNDYLYSLD

SEQ ID NO: 21181 - protein, 10 aa, synthetic construct
CALDYSYAMD

SEQ ID NO: 21182 - protein, 9 aa, synthetic construct
CAKVDYSNY

SEQ ID NO: 21183 - protein, 10 aa, synthetic construct
CAKHDYSNYP

SEQ ID NO: 21184 - protein, 11 aa, synthetic construct
CARDTDGYDFD

SEQ ID NO: 21185 - protein, 11 aa, synthetic construct
CARDSIMVRGD

SEQ ID NO: 21186 - protein, 9 aa, synthetic construct
CASSYLRGL

SEQ ID NO: 21187 - protein, 9 aa, synthetic construct
CARIGPIKY

SEQ ID NO: 21188 - protein, 9 aa, synthetic construct
CARIGPIKY

SEQ ID NO: 21189 - protein, 9 aa, synthetic construct
CARGRYFDL

SEQ ID NO: 21190 - protein, 9 aa, synthetic construct
CARAGIVVV

SEQ ID NO: 21191 - protein, 31 aa, synthetic construct; identical to SEQ ID NO: 20385

SEQ ID NO: 21192 - protein, 31 aa, synthetic construct; identical to SEQ ID NO: 20385

SEQ ID NO: 21193 - protein, 31 aa, synthetic construct; identical to SEQ ID NO: 20385

SEQ ID NO: 21194 - protein, 31 aa, synthetic construct; identical to SEQ ID NO: 20385

SEQ ID NO: 21195 - protein, 31 aa, synthetic construct; identical to SEQ ID NO: 20385

SEQ ID NO: 21196 - protein, 31 aa, synthetic construct; identical to SEQ ID NO: 20385

SEQ ID NO: 21197 - protein, 31 aa, synthetic construct; identical to SEQ ID NO: 20385

SEQ ID NO: 21198 - protein, 31 aa, synthetic construct; identical to SEQ ID NO: 20385

SEQ ID NO: 21199 - DNA, 408 bp, synthetic construct
  source 1..408: mol_type = other DNA
atccagaaccctgaacctgccgtgtaccagctgaaggaccccagaagccaggacagcaccctgtgcctgttcaccgacttcgacagccagatcaacgtgcccaagacaatggaaagcggcaccttcatcaccgacaagtgcgtgctggacatgaaggctatggacagcaagagcaacggcgccattgcctggtccaaccagaccagcttcacatgccaggacatcttcaaagagacaaacgccacctacccctccagcgacgtgccctgtgacgccaccctgaccgagaagtccttcgagacagacatgaacctcaacttccagaacctgagcgtgatgggcctgcgaatcctgctgctgaaagtggccggcttcaacctgctgatgaccctgcggctgtggtccagc

SEQ ID NO: 21200 - DNA, 405 bp, synthetic construct
  source 1..405: mol_type = other DNA
cagaaccctgaacctgccgtgtaccagctgaaggaccccagaagccaggacagcaccctgtgcctgttcaccgacttcgacagccagatcaacgtgcccaagacaatggaaagcggcaccttcatcaccgacaagtgcgtgctggacatgaaggctatggacagcaagagcaacggcgccattgcctggtccaaccagaccagcttcacatgccaggacatcttcaaagagacaaacgccacctacccctccagcgacgtgccctgtgacgccaccctgaccgagaagtccttcgagacagacatgaacctcaacttccagaacctgagcgtgatgggcctgcgaatcctgctgctgaaagtggccggcttcaacctgctgatgaccctgcggctgtggtccagc

SEQ ID NO: 21201 - DNA, 402 bp, synthetic construct
  source 1..402: mol_type = other DNA
aaccctgaacctgccgtgtaccagctgaaggaccccagaagccaggacagcaccctgtgcctgttcaccgacttcgacagccagatcaacgtgcccaagacaatggaaagcggcaccttcatcaccgacaagtgcgtgctggacatgaaggctatggacagcaagagcaacggcgccattgcctggtccaaccagaccagcttcacatgccaggacatcttcaaagagacaaacgccacctacccctccagcgacgtgccctgtgacgccaccctgaccgagaagtccttcgagacagacatgaacctcaacttccagaacctgagcgtgatgggcctgcgaatcctgctgctgaaagtggccggcttcaacctgctgatgaccctgcggctgtggtccagc

SEQ ID NO: 21202 - DNA, 399 bp, synthetic construct
  source 1..399: mol_type = other DNA
cctgaacctgccgtgtaccagctgaaggaccccagaagccaggacagcaccctgtgcctgttcaccgacttcgacagccagatcaacgtgcccaagacaatggaaagcggcaccttcatcaccgacaagtgcgtgctggacatgaaggctatggacagcaagagcaacggcgccattgcctggtccaaccagaccagcttcacatgccaggacatcttcaaagagacaaacgccacctacccctccagcgacgtgccctgtgacgccaccctgaccgagaagtccttcgagacagacatgaacctcaacttccagaacctgagcgtgatgggcctgcgaatcctgctgctgaaagtggccggcttcaacctgctgatgaccctgcggctgtggtccagc

SEQ ID NO: 21203 - DNA, 396 bp, synthetic construct
  source 1..396: mol_type = other DNA
gaacctgccgtgtaccagctgaaggaccccagaagccaggacagcaccctgtgcctgttcaccgacttcgacagccagatcaacgtgcccaagacaatggaaagcggcaccttcatcaccgacaagtgcgtgctggacatgaaggctatggacagcaagagcaacggcgccattgcctggtccaaccagaccagcttcacatgccaggacatcttcaaagagacaaacgccacctacccctccagcgacgtgccctgtgacgccaccctgaccgagaagtccttcgagacagacatgaacctcaacttccagaacctgagcgtgatgggcctgcgaatcctgctgctgaaagtggccggcttcaacctgctgatgaccctgcggctgtggtccagc

SEQ ID NO: 21204 - DNA, 393 bp, synthetic construct
  source 1..393: mol_type = other DNA
cctgccgtgtaccagctgaaggaccccagaagccaggacagcaccctgtgcctgttcaccgacttcgacagccagatcaacgtgcccaagacaatggaaagcggcaccttcatcaccgacaagtgcgtgctggacatgaaggctatggacagcaagagcaacggcgccattgcctggtccaaccagaccagcttcacatgccaggacatcttcaaagagacaaacgccacctacccctccagcgacgtgccctgtgacgccaccctgaccgagaagtccttcgagacagacatgaacctcaacttccagaacctgagcgtgatgggcctgcgaatcctgctgctgaaagtggccggcttcaacctgctgatgaccctgcggctgtggtccagc

SEQ ID NO: 21205 - DNA, 390 bp, synthetic construct
  source 1..390: mol_type = other DNA
gccgtgtaccagctgaaggaccccagaagccaggacagcaccctgtgcctgttcaccgacttcgacagccagatcaacgtgcccaagacaatggaaagcggcaccttcatcaccgacaagtgcgtgctggacatgaaggctatggacagcaagagcaacggcgccattgcctggtccaaccagaccagcttcacatgccaggacatcttcaaagagacaaacgccacctacccctccagcgacgtgccctgtgacgccaccctgaccgagaagtccttcgagacagacatgaacctcaacttccagaacctgagcgtgatgggcctgcgaatcctgctgctgaaagtggccggcttcaacctgctgatgaccctgcggctgtggtccagc

SEQ ID NO: 21206 - DNA, 387 bp, synthetic construct
  source 1..387: mol_type = other DNA
gtgtaccagctgaaggaccccagaagccaggacagcaccctgtgcctgttcaccgacttcgacagccagatcaacgtgcccaagacaatggaaagcggcaccttcatcaccgacaagtgcgtgctggacatgaaggctatggacagcaagagcaacggcgccattgcctggtccaaccagaccagcttcacatgccaggacatcttcaaagagacaaacgccacctacccctccagcgacgtgccctgtgacgccaccctgaccgagaagtccttcgagacagacatgaacctcaacttccagaacctgagcgtgatgggcctgcgaatcctgctgctgaaagtggccggcttcaacctgctgatgaccctgcggctgtggtccagc

SEQ ID NO: 21207 - DNA, 384 bp, synthetic construct
  source 1..384: mol_type = other DNA
taccagctgaaggaccccagaagccaggacagcaccctgtgcctgttcaccgacttcgacagccagatcaacgtgcccaagacaatggaaagcggcaccttcatcaccgacaagtgcgtgctggacatgaaggctatggacagcaagagcaacggcgccattgcctggtccaaccagaccagcttcacatgccaggacatcttcaaagagacaaacgccacctacccctccagcgacgtgccctgtgacgccaccctgaccgagaagtccttcgagacagacatgaacctcaacttccagaacctgagcgtgatgggcctgcgaatcctgctgctgaaagtggccggcttcaacctgctgatgaccctgcggctgtggtccagc

SEQ ID NO: 21208 - DNA, 381 bp, synthetic construct
  source 1..381: mol_type = other DNA
cagctgaaggaccccagaagccaggacagcaccctgtgcctgttcaccgacttcgacagccagatcaacgtgcccaagacaatggaaagcggcaccttcatcaccgacaagtgcgtgctggacatgaaggctatggacagcaagagcaacggcgccattgcctggtccaaccagaccagcttcacatgccaggacatcttcaaagagacaaacgccacctacccctccagcgacgtgccctgtgacgccaccctgaccgagaagtccttcgagacagacatgaacctcaacttccagaacctgagcgtgatgggcctgcgaatcctgctgctgaaagtggccggcttcaacctgctgatgaccctgcggctgtggtccagc

SEQ ID NO: 21209 - DNA, 378 bp, synthetic construct
  source 1..378: mol_type = other DNA
ctgaaggaccccagaagccaggacagcaccctgtgcctgttcaccgacttcgacagccagatcaacgtgcccaagacaatggaaagcggcaccttcatcaccgacaagtgcgtgctggacatgaaggctatggacagcaagagcaacggcgccattgcctggtccaaccagaccagcttcacatgccaggacatcttcaaagagacaaacgccacctacccctccagcgacgtgccctgtgacgccaccctgaccgagaagtccttcgagacagacatgaacctcaacttccagaacctgagcgtgatgggcctgcgaatcctgctgctgaaagtggccggcttcaacctgctgatgaccctgcggctgtggtccagc

SEQ ID NO: 21210 - DNA, 363 bp, synthetic construct
  source 1..363: mol_type = other DNA
agccaggacagcaccctgtgcctgttcaccgacttcgacagccagatcaacgtgcccaagacaatggaaagcggcaccttcatcaccgacaagtgcgtgctggacatgaaggctatggacagcaagagcaacggcgccattgcctggtccaaccagaccagcttcacatgccaggacatcttcaaagagacaaacgccacctacccctccagcgacgtgccctgtgacgccaccctgaccgagaagtccttcgagacagacatgaacctcaacttccagaacctgagcgtgatgggcctgcgaatcctgctgctgaaagtggccggcttcaacctgctgatgaccctgcggctgtggtccagc

SEQ ID NO: 21211 - DNA, 348 bp, synthetic construct
  source 1..348: mol_type = other DNA
ctgtgcctgttcaccgacttcgacagccagatcaacgtgcccaagacaatggaaagcggcaccttcatcaccgacaagtgcgtgctggacatgaaggctatggacagcaagagcaacggcgccattgcctggtccaaccagaccagcttcacatgccaggacatcttcaaagagacaaacgccacctacccctccagcgacgtgccctgtgacgccaccctgaccgagaagtccttcgagacagacatgaacctcaacttccagaacctgagcgtgatgggcctgcgaatcctgctgctgaaagtggccggcttcaacctgctgatgaccctgcggctgtggtccagc

SEQ ID NO: 21212 - DNA, 408 bp, synthetic construct
  source 1..408: mol_type = other DNA
atccagaaccctgaacctgccgtgtaccagctgaaggaccccagaagccaggacagcaccctgtgcctgttcaccgacttcgacagccagatcaacgtgcccaagacaatggaaagcggcaccttcatcaccgacaagtgcgtgctggacatgaaggctatggacagcaagagcaacggcgccattgcctggtccaaccagaccagcttcacatgccaggacatcttcaaagagacaaacgccacctacccctccagcgacgtgccctgtgacgccaccctgaccgagaagtccttcgagacagacatgaacctcaacttccagaacctgctggtggtgggcctgcgaatcctgctgctgaaagtggccggcttcaacctgctgatgaccctgcggctgtggtccagc

SEQ ID NO: 21213 - DNA, 405 bp, synthetic construct
  source 1..405: mol_type = other DNA
cagaaccctgaacctgccgtgtaccagctgaaggaccccagaagccaggacagcaccctgtgcctgttcaccgacttcgacagccagatcaacgtgcccaagacaatggaaagcggcaccttcatcaccgacaagtgcgtgctggacatgaaggctatggacagcaagagcaacggcgccattgcctggtccaaccagaccagcttcacatgccaggacatcttcaaagagacaaacgccacctacccctccagcgacgtgccctgtgacgccaccctgaccgagaagtccttcgagacagacatgaacctcaacttccagaacctgctggtggtgggcctgcgaatcctgctgctgaaagtggccggcttcaacctgctgatgaccctgcggctgtggtccagc

SEQ ID NO: 21214 - DNA, 402 bp, synthetic construct
  source 1..402: mol_type = other DNA
aaccctgaacctgccgtgtaccagctgaaggaccccagaagccaggacagcaccctgtgcctgttcaccgacttcgacagccagatcaacgtgcccaagacaatggaaagcggcaccttcatcaccgacaagtgcgtgctggacatgaaggctatggacagcaagagcaacggcgccattgcctggtccaaccagaccagcttcacatgccaggacatcttcaaagagacaaacgccacctacccctccagcgacgtgccctgtgacgccaccctgaccgagaagtccttcgagacagacatgaacctcaacttccagaacctgctggtggtgggcctgcgaatcctgctgctgaaagtggccggcttcaacctgctgatgaccctgcggctgtggtccagc

SEQ ID NO: 21215 - DNA, 399 bp, synthetic construct
  source 1..399: mol_type = other DNA
cctgaacctgccgtgtaccagctgaaggaccccagaagccaggacagcaccctgtgcctgttcaccgacttcgacagccagatcaacgtgcccaagacaatggaaagcggcaccttcatcaccgacaagtgcgtgctggacatgaaggctatggacagcaagagcaacggcgccattgcctggtccaaccagaccagcttcacatgccaggacatcttcaaagagacaaacgccacctacccctccagcgacgtgccctgtgacgccaccctgaccgagaagtccttcgagacagacatgaacctcaacttccagaacctgctggtggtgggcctgcgaatcctgctgctgaaagtggccggcttcaacctgctgatgaccctgcggctgtggtccagc

SEQ ID NO: 21216 - DNA, 396 bp, synthetic construct
  source 1..396: mol_type = other DNA
gaacctgccgtgtaccagctgaaggaccccagaagccaggacagcaccctgtgcctgttcaccgacttcgacagccagatcaacgtgcccaagacaatggaaagcggcaccttcatcaccgacaagtgcgtgctggacatgaaggctatggacagcaagagcaacggcgccattgcctggtccaaccagaccagcttcacatgccaggacatcttcaaagagacaaacgccacctacccctccagcgacgtgccctgtgacgccaccctgaccgagaagtccttcgagacagacatgaacctcaacttccagaacctgctggtggtgggcctgcgaatcctgctgctgaaagtggccggcttcaacctgctgatgaccctgcggctgtggtccagc

SEQ ID NO: 21217 - DNA, 393 bp, synthetic construct
  source 1..393: mol_type = other DNA
cctgccgtgtaccagctgaaggaccccagaagccaggacagcaccctgtgcctgttcaccgacttcgacagccagatcaacgtgcccaagacaatggaaagcggcaccttcatcaccgacaagtgcgtgctggacatgaaggctatggacagcaagagcaacggcgccattgcctggtccaaccagaccagcttcacatgccaggacatcttcaaagagacaaacgccacctacccctccagcgacgtgccctgtgacgccaccctgaccgagaagtccttcgagacagacatgaacctcaacttccagaacctgctggtggtgggcctgcgaatcctgctgctgaaagtggccggcttcaacctgctgatgaccctgcggctgtggtccagc

SEQ ID NO: 21218 - DNA, 390 bp, synthetic construct
  source 1..390: mol_type = other DNA
gccgtgtaccagctgaaggaccccagaagccaggacagcaccctgtgcctgttcaccgacttcgacagccagatcaacgtgcccaagacaatggaaagcggcaccttcatcaccgacaagtgcgtgctggacatgaaggctatggacagcaagagcaacggcgccattgcctggtccaaccagaccagcttcacatgccaggacatcttcaaagagacaaacgccacctacccctccagcgacgtgccctgtgacgccaccctgaccgagaagtccttcgagacagacatgaacctcaacttccagaacctgctggtggtgggcctgcgaatcctgctgctgaaagtggccggcttcaacctgctgatgaccctgcggctgtggtccagc

SEQ ID NO: 21219 - DNA, 387 bp, synthetic construct
  source 1..387: mol_type = other DNA
gtgtaccagctgaaggaccccagaagccaggacagcaccctgtgcctgttcaccgacttcgacagccagatcaacgtgcccaagacaatggaaagcggcaccttcatcaccgacaagtgcgtgctggacatgaaggctatggacagcaagagcaacggcgccattgcctggtccaaccagaccagcttcacatgccaggacatcttcaaagagacaaacgccacctacccctccagcgacgtgccctgtgacgccaccctgaccgagaagtccttcgagacagacatgaacctcaacttccagaacctgctggtggtgggcctgcgaatcctgctgctgaaagtggccggcttcaacctgctgatgaccctgcggctgtggtccagc

SEQ ID NO: 21220 - DNA, 384 bp, synthetic construct
  source 1..384: mol_type = other DNA
taccagctgaaggaccccagaagccaggacagcaccctgtgcctgttcaccgacttcgacagccagatcaacgtgcccaagacaatggaaagcggcaccttcatcaccgacaagtgcgtgctggacatgaaggctatggacagcaagagcaacggcgccattgcctggtccaaccagaccagcttcacatgccaggacatcttcaaagagacaaacgccacctacccctccagcgacgtgccctgtgacgccaccctgaccgagaagtccttcgagacagacatgaacctcaacttccagaacctgctggtggtgggcctgcgaatcctgctgctgaaagtggccggcttcaacctgctgatgaccctgcggctgtggtccagc

SEQ ID NO: 21221 - DNA, 381 bp, synthetic construct
  source 1..381: mol_type = other DNA
cagctgaaggaccccagaagccaggacagcaccctgtgcctgttcaccgacttcgacagccagatcaacgtgcccaagacaatggaaagcggcaccttcatcaccgacaagtgcgtgctggacatgaaggctatggacagcaagagcaacggcgccattgcctggtccaaccagaccagcttcacatgccaggacatcttcaaagagacaaacgccacctacccctccagcgacgtgccctgtgacgccaccctgaccgagaagtccttcgagacagacatgaacctcaacttccagaacctgctggtggtgggcctgcgaatcctgctgctgaaagtggccggcttcaacctgctgatgaccctgcggctgtggtccagc

SEQ ID NO: 21222 - DNA, 378 bp, synthetic construct
  source 1..378: mol_type = other DNA
ctgaaggaccccagaagccaggacagcaccctgtgcctgttcaccgacttcgacagccagatcaacgtgcccaagacaatggaaagcggcaccttcatcaccgacaagtgcgtgctggacatgaaggctatggacagcaagagcaacggcgccattgcctggtccaaccagaccagcttcacatgccaggacatcttcaaagagacaaacgccacctacccctccagcgacgtgccctgtgacgccaccctgaccgagaagtccttcgagacagacatgaacctcaacttccagaacctgctggtggtgggcctgcgaatcctgctgctgaaagtggccggcttcaacctgctgatgaccctgcggctgtggtccagc

SEQ ID NO: 21223 - DNA, 363 bp, synthetic construct
  source 1..363: mol_type = other DNA
agccaggacagcaccctgtgcctgttcaccgacttcgacagccagatcaacgtgcccaagacaatggaaagcggcaccttcatcaccgacaagtgcgtgctggacatgaaggctatggacagcaagagcaacggcgccattgcctggtccaaccagaccagcttcacatgccaggacatcttcaaagagacaaacgccacctacccctccagcgacgtgccctgtgacgccaccctgaccgagaagtccttcgagacagacatgaacctcaacttccagaacctgctggtggtgggcctgcgaatcctgctgctgaaagtggccggcttcaacctgctgatgaccctgcggctgtggtccagc

SEQ ID NO: 21224 - DNA, 348 bp, synthetic construct
  source 1..348: mol_type = other DNA
ctgtgcctgttcaccgacttcgacagccagatcaacgtgcccaagacaatggaaagcggcaccttcatcaccgacaagtgcgtgctggacatgaaggctatggacagcaagagcaacggcgccattgcctggtccaaccagaccagcttcacatgccaggacatcttcaaagagacaaacgccacctacccctccagcgacgtgccctgtgacgccaccctgaccgagaagtccttcgagacagacatgaacctcaacttccagaacctgctggtggtgggcctgcgaatcctgctgctgaaagtggccggcttcaacctgctgatgaccctgcggctgtggtccagc

SEQ ID NO: 21225 - DNA, 513 bp, synthetic construct
  source 1..513: mol_type = other DNA
gaggatctgcggaacgtgaccccacccaaggtgtccctgttcgagcccagcaaggccgagatcgccaataaacagaaggccaccctcgtgtgcctggccagaggcttcttccccgaccacgtggaactgtcttggtgggtcaacggcaaagaggtgcacagcggcgtctgcaccgaccctcaggcctacaaagagagcaactacagctactgcctgagcagtcggctgcgggtgtccgccaccttctggcacaacccccggaaccacttcagatgccaggtgcagttccacggcctgagcgaagaggacaagtggcccgaaggcagccctaagcctgtcacccagaacatcagcgccgaggcctggggcagagcctgtggcatcaccagcagctaccagcagggcgtgctgagcgccaccatcctgtacgagatcctgctgggcaaggccaccctgtacgccgtgctggtgtccaccctggtggtcatggctatggtcaagcggaagaacagc

SEQ ID NO: 21226 - DNA, 510 bp, synthetic construct
  source 1..510: mol_type = other DNA
gatctgcggaacgtgaccccacccaaggtgtccctgttcgagcccagcaaggccgagatcgccaataaacagaaggccaccctcgtgtgcctggccagaggcttcttccccgaccacgtggaactgtcttggtgggtcaacggcaaagaggtgcacagcggcgtctgcaccgaccctcaggcctacaaagagagcaactacagctactgcctgagcagtcggctgcgggtgtccgccaccttctggcacaacccccggaaccacttcagatgccaggtgcagttccacggcctgagcgaagaggacaagtggcccgaaggcagccctaagcctgtcacccagaacatcagcgccgaggcctggggcagagcctgtggcatcaccagcagctaccagcagggcgtgctgagcgccaccatcctgtacgagatcctgctgggcaaggccaccctgtacgccgtgctggtgtccaccctggtggtcatggctatggtcaagcggaagaacagc

SEQ ID NO: 21227 - DNA, 504 bp, synthetic construct
  source 1..504: mol_type = other DNA
cggaacgtgaccccacccaaggtgtccctgttcgagcccagcaaggccgagatcgccaataaacagaaggccaccctcgtgtgcctggccagaggcttcttccccgaccacgtggaactgtcttggtgggtcaacggcaaagaggtgcacagcggcgtctgcaccgaccctcaggcctacaaagagagcaactacagctactgcctgagcagtcggctgcgggtgtccgccaccttctggcacaacccccggaaccacttcagatgccaggtgcagttccacggcctgagcgaagaggacaagtggcccgaaggcagccctaagcctgtcacccagaacatcagcgccgaggcctggggcagagcctgtggcatcaccagcagctaccagcagggcgtgctgagcgccaccatcctgtacgagatcctgctgggcaaggccaccctgtacgccgtgctggtgtccaccctggtggtcatggctatggtcaagcggaagaacagc

SEQ ID NO: 21228 - DNA, 501 bp, synthetic construct
  source 1..501: mol_type = other DNA
aacgtgaccccacccaaggtgtccctgttcgagcccagcaaggccgagatcgccaataaacagaaggccaccctcgtgtgcctggccagaggcttcttccccgaccacgtggaactgtcttggtgggtcaacggcaaagaggtgcacagcggcgtctgcaccgaccctcaggcctacaaagagagcaactacagctactgcctgagcagtcggctgcgggtgtccgccaccttctggcacaacccccggaaccacttcagatgccaggtgcagttccacggcctgagcgaagaggacaagtggcccgaaggcagccctaagcctgtcacccagaacatcagcgccgaggcctggggcagagcctgtggcatcaccagcagctaccagcagggcgtgctgagcgccaccatcctgtacgagatcctgctgggcaaggccaccctgtacgccgtgctggtgtccaccctggtggtcatggctatggtcaagcggaagaacagc

SEQ ID NO: 21229 - DNA, 498 bp, synthetic construct
  source 1..498: mol_type = other DNA
gtgaccccacccaaggtgtccctgttcgagcccagcaaggccgagatcgccaataaacagaaggccaccctcgtgtgcctggccagaggcttcttccccgaccacgtggaactgtcttggtgggtcaacggcaaagaggtgcacagcggcgtctgcaccgaccctcaggcctacaaagagagcaactacagctactgcctgagcagtcggctgcgggtgtccgccaccttctggcacaacccccggaaccacttcagatgccaggtgcagttccacggcctgagcgaagaggacaagtggcccgaaggcagccctaagcctgtcacccagaacatcagcgccgaggcctggggcagagcctgtggcatcaccagcagctaccagcagggcgtgctgagcgccaccatcctgtacgagatcctgctgggcaaggccaccctgtacgccgtgctggtgtccaccctggtggtcatggctatggtcaagcggaagaacagc

SEQ ID NO: 21230 - DNA, 495 bp, synthetic construct
  source 1..495: mol_type = other DNA
accccacccaaggtgtccctgttcgagcccagcaaggccgagatcgccaataaacagaaggccaccctcgtgtgcctggccagaggcttcttccccgaccacgtggaactgtcttggtgggtcaacggcaaagaggtgcacagcggcgtctgcaccgaccctcaggcctacaaagagagcaactacagctactgcctgagcagtcggctgcgggtgtccgccaccttctggcacaacccccggaaccacttcagatgccaggtgcagttccacggcctgagcgaagaggacaagtggcccgaaggcagccctaagcctgtcacccagaacatcagcgccgaggcctggggcagagcctgtggcatcaccagcagctaccagcagggcgtgctgagcgccaccatcctgtacgagatcctgctgggcaaggccaccctgtacgccgtgctggtgtccaccctggtggtcatggctatggtcaagcggaagaacagc

SEQ ID NO: 21231 - DNA, 492 bp, synthetic construct
  source 1..492: mol_type = other DNA
ccacccaaggtgtccctgttcgagcccagcaaggccgagatcgccaataaacagaaggccaccctcgtgtgcctggccagaggcttcttccccgaccacgtggaactgtcttggtgggtcaacggcaaagaggtgcacagcggcgtctgcaccgaccctcaggcctacaaagagagcaactacagctactgcctgagcagtcggctgcgggtgtccgccaccttctggcacaacccccggaaccacttcagatgccaggtgcagttccacggcctgagcgaagaggacaagtggcccgaaggcagccctaagcctgtcacccagaacatcagcgccgaggcctggggcagagcctgtggcatcaccagcagctaccagcagggcgtgctgagcgccaccatcctgtacgagatcctgctgggcaaggccaccctgtacgccgtgctggtgtccaccctggtggtcatggctatggtcaagcggaagaacagc

SEQ ID NO: 21232 - DNA, 489 bp, synthetic construct
  source 1..489: mol_type = other DNA
cccaaggtgtccctgttcgagcccagcaaggccgagatcgccaataaacagaaggccaccctcgtgtgcctggccagaggcttcttccccgaccacgtggaactgtcttggtgggtcaacggcaaagaggtgcacagcggcgtctgcaccgaccctcaggcctacaaagagagcaactacagctactgcctgagcagtcggctgcgggtgtccgccaccttctggcacaacccccggaaccacttcagatgccaggtgcagttccacggcctgagcgaagaggacaagtggcccgaaggcagccctaagcctgtcacccagaacatcagcgccgaggcctggggcagagcctgtggcatcaccagcagctaccagcagggcgtgctgagcgccaccatcctgtacgagatcctgctgggcaaggccaccctgtacgccgtgctggtgtccaccctggtggtcatggctatggtcaagcggaagaacagc

SEQ ID NO: 21233 - DNA, 486 bp, synthetic construct
  source 1..486: mol_type = other DNA
aaggtgtccctgttcgagcccagcaaggccgagatcgccaataaacagaaggccaccctcgtgtgcctggccagaggcttcttccccgaccacgtggaactgtcttggtgggtcaacggcaaagaggtgcacagcggcgtctgcaccgaccctcaggcctacaaagagagcaactacagctactgcctgagcagtcggctgcgggtgtccgccaccttctggcacaacccccggaaccacttcagatgccaggtgcagttccacggcctgagcgaagaggacaagtggcccgaaggcagccctaagcctgtcacccagaacatcagcgccgaggcctggggcagagcctgtggcatcaccagcagctaccagcagggcgtgctgagcgccaccatcctgtacgagatcctgctgggcaaggccaccctgtacgccgtgctggtgtccaccctggtggtcatggctatggtcaagcggaagaacagc

SEQ ID NO: 21234 - DNA, 483 bp, synthetic construct
  source 1..483: mol_type = other DNA
gtgtccctgttcgagcccagcaaggccgagatcgccaataaacagaaggccaccctcgtgtgcctggccagaggcttcttccccgaccacgtggaactgtcttggtgggtcaacggcaaagaggtgcacagcggcgtctgcaccgaccctcaggcctacaaagagagcaactacagctactgcctgagcagtcggctgcgggtgtccgccaccttctggcacaacccccggaaccacttcagatgccaggtgcagttccacggcctgagcgaagaggacaagtggcccgaaggcagccctaagcctgtcacccagaacatcagcgccgaggcctggggcagagcctgtggcatcaccagcagctaccagcagggcgtgctgagcgccaccatcctgtacgagatcctgctgggcaaggccaccctgtacgccgtgctggtgtccaccctggtggtcatggctatggtcaagcggaagaacagc

SEQ ID NO: 21235 - DNA, 513 bp, synthetic construct; identical to SEQ ID NO: 21225
  source 1..513: mol_type = other DNA

SEQ ID NO: 21236 - DNA, 498 bp, synthetic construct; identical to SEQ ID NO: 21229
  source 1..498: mol_type = other DNA

SEQ ID NO: 21237 - DNA, 483 bp, synthetic construct; identical to SEQ ID NO: 21234
  source 1..483: mol_type = other DNA

SEQ ID NO: 21238 - DNA, 420 bp, synthetic construct
  source 1..420: mol_type = other DNA
atccagaaccctgatcctgccgtgtaccagctgcgggatagcaagagcagcgacaagagcgtgtgtctgttcaccgacttcgacagccagaccaacgtgtcccagagcaaggactccgacgtgtacatcaccgataagtgcgtgctggacatgcggagcatggacttcaagagcaactccgccgtggcctggtccaacaagtccgatttcgcctgcgccaacgccttcaacaacagcattatccccgaggacacattcttcccaagccccgagagcagctgcgacgtgaagctggtggaaaagagcttcgagacagacaccaacctgaacttccagaacctgctggtgatcgtgctgagaatcctgctgctgaaagtggccggctttaacctgctgatgaccctgcggctgtggtccagc

SEQ ID NO: 21239 - DNA, 417 bp, synthetic construct
  source 1..417: mol_type = other DNA
cagaaccctgatcctgccgtgtaccagctgcgggatagcaagagcagcgacaagagcgtgtgtctgttcaccgacttcgacagccagaccaacgtgtcccagagcaaggactccgacgtgtacatcaccgataagtgcgtgctggacatgcggagcatggacttcaagagcaactccgccgtggcctggtccaacaagtccgatttcgcctgcgccaacgccttcaacaacagcattatccccgaggacacattcttcccaagccccgagagcagctgcgacgtgaagctggtggaaaagagcttcgagacagacaccaacctgaacttccagaacctgctggtgatcgtgctgagaatcctgctgctgaaagtggccggctttaacctgctgatgaccctgcggctgtggtccagc

SEQ ID NO: 21240 - DNA, 414 bp, synthetic construct
  source 1..414: mol_type = other DNA
aaccctgatcctgccgtgtaccagctgcgggatagcaagagcagcgacaagagcgtgtgtctgttcaccgacttcgacagccagaccaacgtgtcccagagcaaggactccgacgtgtacatcaccgataagtgcgtgctggacatgcggagcatggacttcaagagcaactccgccgtggcctggtccaacaagtccgatttcgcctgcgccaacgccttcaacaacagcattatccccgaggacacattcttcccaagccccgagagcagctgcgacgtgaagctggtggaaaagagcttcgagacagacaccaacctgaacttccagaacctgctggtgatcgtgctgagaatcctgctgctgaaagtggccggctttaacctgctgatgaccctgcggctgtggtccagc

SEQ ID NO: 21241 - DNA, 411 bp, synthetic construct
  source 1..411: mol_type = other DNA
cctgatcctgccgtgtaccagctgcgggatagcaagagcagcgacaagagcgtgtgtctgttcaccgacttcgacagccagaccaacgtgtcccagagcaaggactccgacgtgtacatcaccgataagtgcgtgctggacatgcggagcatggacttcaagagcaactccgccgtggcctggtccaacaagtccgatttcgcctgcgccaacgccttcaacaacagcattatccccgaggacacattcttcccaagccccgagagcagctgcgacgtgaagctggtggaaaagagcttcgagacagacaccaacctgaacttccagaacctgctggtgatcgtgctgagaatcctgctgctgaaagtggccggctttaacctgctgatgaccctgcggctgtggtccagc

SEQ ID NO: 21242 - DNA, 408 bp, synthetic construct
  source 1..408: mol_type = other DNA
gatcctgccgtgtaccagctgcgggatagcaagagcagcgacaagagcgtgtgtctgttcaccgacttcgacagccagaccaacgtgtcccagagcaaggactccgacgtgtacatcaccgataagtgcgtgctggacatgcggagcatggacttcaagagcaactccgccgtggcctggtccaacaagtccgatttcgcctgcgccaacgccttcaacaacagcattatccccgaggacacattcttcccaagccccgagagcagctgcgacgtgaagctggtggaaaagagcttcgagacagacaccaacctgaacttccagaacctgctggtgatcgtgctgagaatcctgctgctgaaagtggccggctttaacctgctgatgaccctgcggctgtggtccagc

SEQ ID NO: 21243 - DNA, 405 bp, synthetic construct
  source 1..405: mol_type = other DNA
cctgccgtgtaccagctgcgggatagcaagagcagcgacaagagcgtgtgtctgttcaccgacttcgacagccagaccaacgtgtcccagagcaaggactccgacgtgtacatcaccgataagtgcgtgctggacatgcggagcatggacttcaagagcaactccgccgtggcctggtccaacaagtccgatttcgcctgcgccaacgccttcaacaacagcattatccccgaggacacattcttcccaagccccgagagcagctgcgacgtgaagctggtggaaaagagcttcgagacagacaccaacctgaacttccagaacctgctggtgatcgtgctgagaatcctgctgctgaaagtggccggctttaacctgctgatgaccctgcggctgtggtccagc

SEQ ID NO: 21244 - DNA, 402 bp, synthetic construct
  source 1..402: mol_type = other DNA
gccgtgtaccagctgcgggatagcaagagcagcgacaagagcgtgtgtctgttcaccgacttcgacagccagaccaacgtgtcccagagcaaggactccgacgtgtacatcaccgataagtgcgtgctggacatgcggagcatggacttcaagagcaactccgccgtggcctggtccaacaagtccgatttcgcctgcgccaacgccttcaacaacagcattatccccgaggacacattcttcccaagccccgagagcagctgcgacgtgaagctggtggaaaagagcttcgagacagacaccaacctgaacttccagaacctgctggtgatcgtgctgagaatcctgctgctgaaagtggccggctttaacctgctgatgaccctgcggctgtggtccagc

SEQ ID NO: 21245 - DNA, 399 bp, synthetic construct
  source 1..399: mol_type = other DNA
gtgtaccagctgcgggatagcaagagcagcgacaagagcgtgtgtctgttcaccgacttcgacagccagaccaacgtgtcccagagcaaggactccgacgtgtacatcaccgataagtgcgtgctggacatgcggagcatggacttcaagagcaactccgccgtggcctggtccaacaagtccgatttcgcctgcgccaacgccttcaacaacagcattatccccgaggacacattcttcccaagccccgagagcagctgcgacgtgaagctggtggaaaagagcttcgagacagacaccaacctgaacttccagaacctgctggtgatcgtgctgagaatcctgctgctgaaagtggccggctttaacctgctgatgaccctgcggctgtggtccagc

SEQ ID NO: 21246 - DNA, 396 bp, synthetic construct
  source 1..396: mol_type = other DNA
taccagctgcgggatagcaagagcagcgacaagagcgtgtgtctgttcaccgacttcgacagccagaccaacgtgtcccagagcaaggactccgacgtgtacatcaccgataagtgcgtgctggacatgcggagcatggacttcaagagcaactccgccgtggcctggtccaacaagtccgatttcgcctgcgccaacgccttcaacaacagcattatccccgaggacacattcttcccaagccccgagagcagctgcgacgtgaagctggtggaaaagagcttcgagacagacaccaacctgaacttccagaacctgctggtgatcgtgctgagaatcctgctgctgaaagtggccggctttaacctgctgatgaccctgcggctgtggtccagc

SEQ ID NO: 21247 - DNA, 393 bp, synthetic construct
  source 1..393: mol_type = other DNA
cagctgcgggatagcaagagcagcgacaagagcgtgtgtctgttcaccgacttcgacagccagaccaacgtgtcccagagcaaggactccgacgtgtacatcaccgataagtgcgtgctggacatgcggagcatggacttcaagagcaactccgccgtggcctggtccaacaagtccgatttcgcctgcgccaacgccttcaacaacagcattatccccgaggacacattcttcccaagccccgagagcagctgcgacgtgaagctggtggaaaagagcttcgagacagacaccaacctgaacttccagaacctgctggtgatcgtgctgagaatcctgctgctgaaagtggccggctttaacctgctgatgaccctgcggctgtggtccagc

SEQ ID NO: 21248 - DNA, 390 bp, synthetic construct
  source 1..390: mol_type = other DNA
ctgcgggatagcaagagcagcgacaagagcgtgtgtctgttcaccgacttcgacagccagaccaacgtgtcccagagcaaggactccgacgtgtacatcaccgataagtgcgtgctggacatgcggagcatggacttcaagagcaactccgccgtggcctggtccaacaagtccgatttcgcctgcgccaacgccttcaacaacagcattatccccgaggacacattcttcccaagccccgagagcagctgcgacgtgaagctggtggaaaagagcttcgagacagacaccaacctgaacttccagaacctgctggtgatcgtgctgagaatcctgctgctgaaagtggccggctttaacctgctgatgaccctgcggctgtggtccagc

SEQ ID NO: 21249 - DNA, 387 bp, synthetic construct
  source 1..387: mol_type = other DNA
cgggatagcaagagcagcgacaagagcgtgtgtctgttcaccgacttcgacagccagaccaacgtgtcccagagcaaggactccgacgtgtacatcaccgataagtgcgtgctggacatgcggagcatggacttcaagagcaactccgccgtggcctggtccaacaagtccgatttcgcctgcgccaacgccttcaacaacagcattatccccgaggacacattcttcccaagccccgagagcagctgcgacgtgaagctggtggaaaagagcttcgagacagacaccaacctgaacttccagaacctgctggtgatcgtgctgagaatcctgctgctgaaagtggccggctttaacctgctgatgaccctgcggctgtggtccagc

SEQ ID NO: 21250 - DNA, 384 bp, synthetic construct
  source 1..384: mol_type = other DNA
gatagcaagagcagcgacaagagcgtgtgtctgttcaccgacttcgacagccagaccaacgtgtcccagagcaaggactccgacgtgtacatcaccgataagtgcgtgctggacatgcggagcatggacttcaagagcaactccgccgtggcctggtccaacaagtccgatttcgcctgcgccaacgccttcaacaacagcattatccccgaggacacattcttcccaagccccgagagcagctgcgacgtgaagctggtggaaaagagcttcgagacagacaccaacctgaacttccagaacctgctggtgatcgtgctgagaatcctgctgctgaaagtggccggctttaacctgctgatgaccctgcggctgtggtccagc

SEQ ID NO: 21251 - DNA, 381 bp, synthetic construct
  source 1..381: mol_type = other DNA
agcaagagcagcgacaagagcgtgtgtctgttcaccgacttcgacagccagaccaacgtgtcccagagcaaggactccgacgtgtacatcaccgataagtgcgtgctggacatgcggagcatggacttcaagagcaactccgccgtggcctggtccaacaagtccgatttcgcctgcgccaacgccttcaacaacagcattatccccgaggacacattcttcccaagccccgagagcagctgcgacgtgaagctggtggaaaagagcttcgagacagacaccaacctgaacttccagaacctgctggtgatcgtgctgagaatcctgctgctgaaagtggccggctttaacctgctgatgaccctgcggctgtggtccagc

SEQ ID NO: 21252 - DNA, 378 bp, synthetic construct
  source 1..378: mol_type = other DNA
aagagcagcgacaagagcgtgtgtctgttcaccgacttcgacagccagaccaacgtgtcccagagcaaggactccgacgtgtacatcaccgataagtgcgtgctggacatgcggagcatggacttcaagagcaactccgccgtggcctggtccaacaagtccgatttcgcctgcgccaacgccttcaacaacagcattatccccgaggacacattcttcccaagccccgagagcagctgcgacgtgaagctggtggaaaagagcttcgagacagacaccaacctgaacttccagaacctgctggtgatcgtgctgagaatcctgctgctgaaagtggccggctttaacctgctgatgaccctgcggctgtggtccagc

SEQ ID NO: 21253 - DNA, 375 bp, synthetic construct
  source 1..375: mol_type = other DNA
agcagcgacaagagcgtgtgtctgttcaccgacttcgacagccagaccaacgtgtcccagagcaaggactccgacgtgtacatcaccgataagtgcgtgctggacatgcggagcatggacttcaagagcaactccgccgtggcctggtccaacaagtccgatttcgcctgcgccaacgccttcaacaacagcattatccccgaggacacattcttcccaagccccgagagcagctgcgacgtgaagctggtggaaaagagcttcgagacagacaccaacctgaacttccagaacctgctggtgatcgtgctgagaatcctgctgctgaaagtggccggctttaacctgctgatgaccctgcggctgtggtccagc

SEQ ID NO: 21254 - DNA, 372 bp, synthetic construct
  source 1..372: mol_type = other DNA
agcgacaagagcgtgtgtctgttcaccgacttcgacagccagaccaacgtgtcccagagcaaggactccgacgtgtacatcaccgataagtgcgtgctggacatgcggagcatggacttcaagagcaactccgccgtggcctggtccaacaagtccgatttcgcctgcgccaacgccttcaacaacagcattatccccgaggacacattcttcccaagccccgagagcagctgcgacgtgaagctggtggaaaagagcttcgagacagacaccaacctgaacttccagaacctgctggtgatcgtgctgagaatcctgctgctgaaagtggccggctttaacctgctgatgaccctgcggctgtggtccagc

SEQ ID NO: 21255 - DNA, 369 bp, synthetic construct
  source 1..369: mol_type = other DNA
gacaagagcgtgtgtctgttcaccgacttcgacagccagaccaacgtgtcccagagcaaggactccgacgtgtacatcaccgataagtgcgtgctggacatgcggagcatggacttcaagagcaactccgccgtggcctggtccaacaagtccgatttcgcctgcgccaacgccttcaacaacagcattatccccgaggacacattcttcccaagccccgagagcagctgcgacgtgaagctggtggaaaagagcttcgagacagacaccaacctgaacttccagaacctgctggtgatcgtgctgagaatcctgctgctgaaagtggccggctttaacctgctgatgaccctgcggctgtggtccagc

SEQ ID NO: 21256 - DNA, 366 bp, synthetic construct
  source 1..366: mol_type = other DNA
aagagcgtgtgtctgttcaccgacttcgacagccagaccaacgtgtcccagagcaaggactccgacgtgtacatcaccgataagtgcgtgctggacatgcggagcatggacttcaagagcaactccgccgtggcctggtccaacaagtccgatttcgcctgcgccaacgccttcaacaacagcattatccccgaggacacattcttcccaagccccgagagcagctgcgacgtgaagctggtggaaaagagcttcgagacagacaccaacctgaacttccagaacctgctggtgatcgtgctgagaatcctgctgctgaaagtggccggctttaacctgctgatgaccctgcggctgtggtccagc

SEQ ID NO: 21257 - DNA, 363 bp, synthetic construct
  source 1..363: mol_type = other DNA
agcgtgtgtctgttcaccgacttcgacagccagaccaacgtgtcccagagcaaggactccgacgtgtacatcaccgataagtgcgtgctggacatgcggagcatggacttcaagagcaactccgccgtggcctggtccaacaagtccgatttcgcctgcgccaacgccttcaacaacagcattatccccgaggacacattcttcccaagccccgagagcagctgcgacgtgaagctggtggaaaagagcttcgagacagacaccaacctgaacttccagaacctgctggtgatcgtgctgagaatcctgctgctgaaagtggccggctttaacctgctgatgaccctgcggctgtggtccagc

SEQ ID NO: 21258 - DNA, 360 bp, synthetic construct
  source 1..360: mol_type = other DNA
gtgtgtctgttcaccgacttcgacagccagaccaacgtgtcccagagcaaggactccgacgtgtacatcaccgataagtgcgtgctggacatgcggagcatggacttcaagagcaactccgccgtggcctggtccaacaagtccgatttcgcctgcgccaacgccttcaacaacagcattatccccgaggacacattcttcccaagccccgagagcagctgcgacgtgaagctggtggaaaagagcttcgagacagacaccaacctgaacttccagaacctgctggtgatcgtgctgagaatcctgctgctgaaagtggccggctttaacctgctgatgaccctgcggctgtggtccagc

SEQ ID NO: 21259 - DNA, 357 bp, synthetic construct
  source 1..357: mol_type = other DNA
tgtctgttcaccgacttcgacagccagaccaacgtgtcccagagcaaggactccgacgtgtacatcaccgataagtgcgtgctggacatgcggagcatggacttcaagagcaactccgccgtggcctggtccaacaagtccgatttcgcctgcgccaacgccttcaacaacagcattatccccgaggacacattcttcccaagccccgagagcagctgcgacgtgaagctggtggaaaagagcttcgagacagacaccaacctgaacttccagaacctgctggtgatcgtgctgagaatcctgctgctgaaagtggccggctttaacctgctgatgaccctgcggctgtggtccagc

SEQ ID NO: 21260 - DNA, 354 bp, synthetic construct
  source 1..354: mol_type = other DNA
ctgttcaccgacttcgacagccagaccaacgtgtcccagagcaaggactccgacgtgtacatcaccgataagtgcgtgctggacatgcggagcatggacttcaagagcaactccgccgtggcctggtccaacaagtccgatttcgcctgcgccaacgccttcaacaacagcattatccccgaggacacattcttcccaagccccgagagcagctgcgacgtgaagctggtggaaaagagcttcgagacagacaccaacctgaacttccagaacctgctggtgatcgtgctgagaatcctgctgctgaaagtggccggctttaacctgctgatgaccctgcggctgtggtccagc

SEQ ID NO: 21261 - DNA, 351 bp, synthetic construct
  source 1..351: mol_type = other DNA
ttcaccgacttcgacagccagaccaacgtgtcccagagcaaggactccgacgtgtacatcaccgataagtgcgtgctggacatgcggagcatggacttcaagagcaactccgccgtggcctggtccaacaagtccgatttcgcctgcgccaacgccttcaacaacagcattatccccgaggacacattcttcccaagccccgagagcagctgcgacgtgaagctggtggaaaagagcttcgagacagacaccaacctgaacttccagaacctgctggtgatcgtgctgagaatcctgctgctgaaagtggccggctttaacctgctgatgaccctgcggctgtggtccagc

SEQ ID NO: 21262 - DNA, 348 bp, synthetic construct
  source 1..348: mol_type = other DNA
accgacttcgacagccagaccaacgtgtcccagagcaaggactccgacgtgtacatcaccgataagtgcgtgctggacatgcggagcatggacttcaagagcaactccgccgtggcctggtccaacaagtccgatttcgcctgcgccaacgccttcaacaacagcattatccccgaggacacattcttcccaagccccgagagcagctgcgacgtgaagctggtggaaaagagcttcgagacagacaccaacctgaacttccagaacctgctggtgatcgtgctgagaatcctgctgctgaaagtggccggctttaacctgctgatgaccctgcggctgtggtccagc

SEQ ID NO: 21263 - DNA, 345 bp, synthetic construct
  source 1..345: mol_type = other DNA
gacttcgacagccagaccaacgtgtcccagagcaaggactccgacgtgtacatcaccgataagtgcgtgctggacatgcggagcatggacttcaagagcaactccgccgtggcctggtccaacaagtccgatttcgcctgcgccaacgccttcaacaacagcattatccccgaggacacattcttcccaagccccgagagcagctgcgacgtgaagctggtggaaaagagcttcgagacagacaccaacctgaacttccagaacctgctggtgatcgtgctgagaatcctgctgctgaaagtggccggctttaacctgctgatgaccctgcggctgtggtccagc

SEQ ID NO: 21264 - DNA, 342 bp, synthetic construct
  source 1..342: mol_type = other DNA
ttcgacagccagaccaacgtgtcccagagcaaggactccgacgtgtacatcaccgataagtgcgtgctggacatgcggagcatggacttcaagagcaactccgccgtggcctggtccaacaagtccgatttcgcctgcgccaacgccttcaacaacagcattatccccgaggacacattcttcccaagccccgagagcagctgcgacgtgaagctggtggaaaagagcttcgagacagacaccaacctgaacttccagaacctgctggtgatcgtgctgagaatcctgctgctgaaagtggccggctttaacctgctgatgaccctgcggctgtggtccagc

SEQ ID NO: 21265 - DNA, 339 bp, synthetic construct
  source 1..339: mol_type = other DNA
gacagccagaccaacgtgtcccagagcaaggactccgacgtgtacatcaccgataagtgcgtgctggacatgcggagcatggacttcaagagcaactccgccgtggcctggtccaacaagtccgatttcgcctgcgccaacgccttcaacaacagcattatccccgaggacacattcttcccaagccccgagagcagctgcgacgtgaagctggtggaaaagagcttcgagacagacaccaacctgaacttccagaacctgctggtgatcgtgctgagaatcctgctgctgaaagtggccggctttaacctgctgatgaccctgcggctgtggtccagc

SEQ ID NO: 21266 - DNA, 336 bp, synthetic construct
  source 1..336: mol_type = other DNA
agccagaccaacgtgtcccagagcaaggactccgacgtgtacatcaccgataagtgcgtgctggacatgcggagcatggacttcaagagcaactccgccgtggcctggtccaacaagtccgatttcgcctgcgccaacgccttcaacaacagcattatccccgaggacacattcttcccaagccccgagagcagctgcgacgtgaagctggtggaaaagagcttcgagacagacaccaacctgaacttccagaacctgctggtgatcgtgctgagaatcctgctgctgaaagtggccggctttaacctgctgatgaccctgcggctgtggtccagc

SEQ ID NO: 21267 - DNA, 333 bp, synthetic construct
  source 1..333: mol_type = other DNA
cagaccaacgtgtcccagagcaaggactccgacgtgtacatcaccgataagtgcgtgctggacatgcggagcatggacttcaagagcaactccgccgtggcctggtccaacaagtccgatttcgcctgcgccaacgccttcaacaacagcattatccccgaggacacattcttcccaagccccgagagcagctgcgacgtgaagctggtggaaaagagcttcgagacagacaccaacctgaacttccagaacctgctggtgatcgtgctgagaatcctgctgctgaaagtggccggctttaacctgctgatgaccctgcggctgtggtccagc

SEQ ID NO: 21268 - DNA, 330 bp, synthetic construct
  source 1..330: mol_type = other DNA
accaacgtgtcccagagcaaggactccgacgtgtacatcaccgataagtgcgtgctggacatgcggagcatggacttcaagagcaactccgccgtggcctggtccaacaagtccgatttcgcctgcgccaacgccttcaacaacagcattatccccgaggacacattcttcccaagccccgagagcagctgcgacgtgaagctggtggaaaagagcttcgagacagacaccaacctgaacttccagaacctgctggtgatcgtgctgagaatcctgctgctgaaagtggccggctttaacctgctgatgaccctgcggctgtggtccagc

SEQ ID NO: 21269 - DNA, 327 bp, synthetic construct
  source 1..327: mol_type = other DNA
aacgtgtcccagagcaaggactccgacgtgtacatcaccgataagtgcgtgctggacatgcggagcatggacttcaagagcaactccgccgtggcctggtccaacaagtccgatttcgcctgcgccaacgccttcaacaacagcattatccccgaggacacattcttcccaagccccgagagcagctgcgacgtgaagctggtggaaaagagcttcgagacagacaccaacctgaacttccagaacctgctggtgatcgtgctgagaatcctgctgctgaaagtggccggctttaacctgctgatgaccctgcggctgtggtccagc

SEQ ID NO: 21270 - DNA, 324 bp, synthetic construct
  source 1..324: mol_type = other DNA
gtgtcccagagcaaggactccgacgtgtacatcaccgataagtgcgtgctggacatgcggagcatggacttcaagagcaactccgccgtggcctggtccaacaagtccgatttcgcctgcgccaacgccttcaacaacagcattatccccgaggacacattcttcccaagccccgagagcagctgcgacgtgaagctggtggaaaagagcttcgagacagacaccaacctgaacttccagaacctgctggtgatcgtgctgagaatcctgctgctgaaagtggccggctttaacctgctgatgaccctgcggctgtggtccagc

SEQ ID NO: 21271 - DNA, 321 bp, synthetic construct
  source 1..321: mol_type = other DNA
tcccagagcaaggactccgacgtgtacatcaccgataagtgcgtgctggacatgcggagcatggacttcaagagcaactccgccgtggcctggtccaacaagtccgatttcgcctgcgccaacgccttcaacaacagcattatccccgaggacacattcttcccaagccccgagagcagctgcgacgtgaagctggtggaaaagagcttcgagacagacaccaacctgaacttccagaacctgctggtgatcgtgctgagaatcctgctgctgaaagtggccggctttaacctgctgatgaccctgcggctgtggtccagc

SEQ ID NO: 21272 - DNA, 318 bp, synthetic construct
  source 1..318: mol_type = other DNA
cagagcaaggactccgacgtgtacatcaccgataagtgcgtgctggacatgcggagcatggacttcaagagcaactccgccgtggcctggtccaacaagtccgatttcgcctgcgccaacgccttcaacaacagcattatccccgaggacacattcttcccaagccccgagagcagctgcgacgtgaagctggtggaaaagagcttcgagacagacaccaacctgaacttccagaacctgctggtgatcgtgctgagaatcctgctgctgaaagtggccggctttaacctgctgatgaccctgcggctgtggtccagc

SEQ ID NO: 21273 - DNA, 315 bp, synthetic construct
  source 1..315: mol_type = other DNA
agcaaggactccgacgtgtacatcaccgataagtgcgtgctggacatgcggagcatggacttcaagagcaactccgccgtggcctggtccaacaagtccgatttcgcctgcgccaacgccttcaacaacagcattatccccgaggacacattcttcccaagccccgagagcagctgcgacgtgaagctggtggaaaagagcttcgagacagacaccaacctgaacttccagaacctgctggtgatcgtgctgagaatcctgctgctgaaagtggccggctttaacctgctgatgaccctgcggctgtggtccagc

SEQ ID NO: 21274 - DNA, 312 bp, synthetic construct
  source 1..312: mol_type = other DNA
aaggactccgacgtgtacatcaccgataagtgcgtgctggacatgcggagcatggacttcaagagcaactccgccgtggcctggtccaacaagtccgatttcgcctgcgccaacgccttcaacaacagcattatccccgaggacacattcttcccaagccccgagagcagctgcgacgtgaagctggtggaaaagagcttcgagacagacaccaacctgaacttccagaacctgctggtgatcgtgctgagaatcctgctgctgaaagtggccggctttaacctgctgatgaccctgcggctgtggtccagc

SEQ ID NO: 21275 - DNA, 309 bp, synthetic construct
  source 1..309: mol_type = other DNA
gactccgacgtgtacatcaccgataagtgcgtgctggacatgcggagcatggacttcaagagcaactccgccgtggcctggtccaacaagtccgatttcgcctgcgccaacgccttcaacaacagcattatccccgaggacacattcttcccaagccccgagagcagctgcgacgtgaagctggtggaaaagagcttcgagacagacaccaacctgaacttccagaacctgctggtgatcgtgctgagaatcctgctgctgaaagtggccggctttaacctgctgatgaccctgcggctgtggtccagc

SEQ ID NO: 21276 - DNA, 306 bp, synthetic construct
  source 1..306: mol_type = other DNA
tccgacgtgtacatcaccgataagtgcgtgctggacatgcggagcatggacttcaagagcaactccgccgtggcctggtccaacaagtccgatttcgcctgcgccaacgccttcaacaacagcattatccccgaggacacattcttcccaagccccgagagcagctgcgacgtgaagctggtggaaaagagcttcgagacagacaccaacctgaacttccagaacctgctggtgatcgtgctgagaatcctgctgctgaaagtggccggctttaacctgctgatgaccctgcggctgtggtccagc

SEQ ID NO: 21277 - DNA, 303 bp, synthetic construct
  source 1..303: mol_type = other DNA
gacgtgtacatcaccgataagtgcgtgctggacatgcggagcatggacttcaagagcaactccgccgtggcctggtccaacaagtccgatttcgcctgcgccaacgccttcaacaacagcattatccccgaggacacattcttcccaagccccgagagcagctgcgacgtgaagctggtggaaaagagcttcgagacagacaccaacctgaacttccagaacctgctggtgatcgtgctgagaatcctgctgctgaaagtggccggctttaacctgctgatgaccctgcggctgtggtccagc

SEQ ID NO: 21278 - DNA, 300 bp, synthetic construct
  source 1..300: mol_type = other DNA
gtgtacatcaccgataagtgcgtgctggacatgcggagcatggacttcaagagcaactccgccgtggcctggtccaacaagtccgatttcgcctgcgccaacgccttcaacaacagcattatccccgaggacacattcttcccaagccccgagagcagctgcgacgtgaagctggtggaaaagagcttcgagacagacaccaacctgaacttccagaacctgctggtgatcgtgctgagaatcctgctgctgaaagtggccggctttaacctgctgatgaccctgcggctgtggtccagc

SEQ ID NO: 21279 - DNA, 297 bp, synthetic construct
  source 1..297: mol_type = other DNA
tacatcaccgataagtgcgtgctggacatgcggagcatggacttcaagagcaactccgccgtggcctggtccaacaagtccgatttcgcctgcgccaacgccttcaacaacagcattatccccgaggacacattcttcccaagccccgagagcagctgcgacgtgaagctggtggaaaagagcttcgagacagacaccaacctgaacttccagaacctgctggtgatcgtgctgagaatcctgctgctgaaagtggccggctttaacctgctgatgaccctgcggctgtggtccagc

SEQ ID NO: 21280 - DNA, 294 bp, synthetic construct
  source 1..294: mol_type = other DNA
atcaccgataagtgcgtgctggacatgcggagcatggacttcaagagcaactccgccgtggcctggtccaacaagtccgatttcgcctgcgccaacgccttcaacaacagcattatccccgaggacacattcttcccaagccccgagagcagctgcgacgtgaagctggtggaaaagagcttcgagacagacaccaacctgaacttccagaacctgctggtgatcgtgctgagaatcctgctgctgaaagtggccggctttaacctgctgatgaccctgcggctgtggtccagc

SEQ ID NO: 21281 - DNA, 291 bp, synthetic construct
  source 1..291: mol_type = other DNA
accgataagtgcgtgctggacatgcggagcatggacttcaagagcaactccgccgtggcctggtccaacaagtccgatttcgcctgcgccaacgccttcaacaacagcattatccccgaggacacattcttcccaagccccgagagcagctgcgacgtgaagctggtggaaaagagcttcgagacagacaccaacctgaacttccagaacctgctggtgatcgtgctgagaatcctgctgctgaaagtggccggctttaacctgctgatgaccctgcggctgtggtccagc

SEQ ID NO: 21282 - DNA, 288 bp, synthetic construct
  source 1..288: mol_type = other DNA
gataagtgcgtgctggacatgcggagcatggacttcaagagcaactccgccgtggcctggtccaacaagtccgatttcgcctgcgccaacgccttcaacaacagcattatccccgaggacacattcttcccaagccccgagagcagctgcgacgtgaagctggtggaaaagagcttcgagacagacaccaacctgaacttccagaacctgctggtgatcgtgctgagaatcctgctgctgaaagtggccggctttaacctgctgatgaccctgcggctgtggtccagc

SEQ ID NO: 21283 - DNA, 282 bp, synthetic construct
  source 1..282: mol_type = other DNA
tgcgtgctggacatgcggagcatggacttcaagagcaactccgccgtggcctggtccaacaagtccgatttcgcctgcgccaacgccttcaacaacagcattatccccgaggacacattcttcccaagccccgagagcagctgcgacgtgaagctggtggaaaagagcttcgagacagacaccaacctgaacttccagaacctgctggtgatcgtgctgagaatcctgctgctgaaagtggccggctttaacctgctgatgaccctgcggctgtggtccagc

SEQ ID NO: 21284 - DNA, 279 bp, synthetic construct
  source 1..279: mol_type = other DNA
gtgctggacatgcggagcatggacttcaagagcaactccgccgtggcctggtccaacaagtccgatttcgcctgcgccaacgccttcaacaacagcattatccccgaggacacattcttcccaagccccgagagcagctgcgacgtgaagctggtggaaaagagcttcgagacagacaccaacctgaacttccagaacctgctggtgatcgtgctgagaatcctgctgctgaaagtggccggctttaacctgctgatgaccctgcggctgtggtccagc

SEQ ID NO: 21285 - DNA, 276 bp, synthetic construct
  source 1..276: mol_type = other DNA
ctggacatgcggagcatggacttcaagagcaactccgccgtggcctggtccaacaagtccgatttcgcctgcgccaacgccttcaacaacagcattatccccgaggacacattcttcccaagccccgagagcagctgcgacgtgaagctggtggaaaagagcttcgagacagacaccaacctgaacttccagaacctgctggtgatcgtgctgagaatcctgctgctgaaagtggccggctttaacctgctgatgaccctgcggctgtggtccagc

SEQ ID NO: 21286 - DNA, 273 bp, synthetic construct
  source 1..273: mol_type = other DNA
gacatgcggagcatggacttcaagagcaactccgccgtggcctggtccaacaagtccgatttcgcctgcgccaacgccttcaacaacagcattatccccgaggacacattcttcccaagccccgagagcagctgcgacgtgaagctggtggaaaagagcttcgagacagacaccaacctgaacttccagaacctgctggtgatcgtgctgagaatcctgctgctgaaagtggccggctttaacctgctgatgaccctgcggctgtggtccagc

SEQ ID NO: 21287 - DNA, 270 bp, synthetic construct
  source 1..270: mol_type = other DNA
atgcggagcatggacttcaagagcaactccgccgtggcctggtccaacaagtccgatttcgcctgcgccaacgccttcaacaacagcattatccccgaggacacattcttcccaagccccgagagcagctgcgacgtgaagctggtggaaaagagcttcgagacagacaccaacctgaacttccagaacctgctggtgatcgtgctgagaatcctgctgctgaaagtggccggctttaacctgctgatgaccctgcggctgtggtccagc

SEQ ID NO: 21288 - DNA, 267 bp, synthetic construct
  source 1..267: mol_type = other DNA
cggagcatggacttcaagagcaactccgccgtggcctggtccaacaagtccgatttcgcctgcgccaacgccttcaacaacagcattatccccgaggacacattcttcccaagccccgagagcagctgcgacgtgaagctggtggaaaagagcttcgagacagacaccaacctgaacttccagaacctgctggtgatcgtgctgagaatcctgctgctgaaagtggccggctttaacctgctgatgaccctgcggctgtggtccagc

SEQ ID NO: 21289 - DNA, 264 bp, synthetic construct
  source 1..264: mol_type = other DNA
agcatggacttcaagagcaactccgccgtggcctggtccaacaagtccgatttcgcctgcgccaacgccttcaacaacagcattatccccgaggacacattcttcccaagccccgagagcagctgcgacgtgaagctggtggaaaagagcttcgagacagacaccaacctgaacttccagaacctgctggtgatcgtgctgagaatcctgctgctgaaagtggccggctttaacctgctgatgaccctgcggctgtggtccagc

SEQ ID NO: 21290 - DNA, 261 bp, synthetic construct
  source 1..261: mol_type = other DNA
atggacttcaagagcaactccgccgtggcctggtccaacaagtccgatttcgcctgcgccaacgccttcaacaacagcattatccccgaggacacattcttcccaagccccgagagcagctgcgacgtgaagctggtggaaaagagcttcgagacagacaccaacctgaacttccagaacctgctggtgatcgtgctgagaatcctgctgctgaaagtggccggctttaacctgctgatgaccctgcggctgtggtccagc

SEQ ID NO: 21291 - DNA, 258 bp, synthetic construct
  source 1..258: mol_type = other DNA
gacttcaagagcaactccgccgtggcctggtccaacaagtccgatttcgcctgcgccaacgccttcaacaacagcattatccccgaggacacattcttcccaagccccgagagcagctgcgacgtgaagctggtggaaaagagcttcgagacagacaccaacctgaacttccagaacctgctggtgatcgtgctgagaatcctgctgctgaaagtggccggctttaacctgctgatgaccctgcggctgtggtccagc

SEQ ID NO: 21292 - DNA, 255 bp, synthetic construct
  source 1..255: mol_type = other DNA
ttcaagagcaactccgccgtggcctggtccaacaagtccgatttcgcctgcgccaacgccttcaacaacagcattatccccgaggacacattcttcccaagccccgagagcagctgcgacgtgaagctggtggaaaagagcttcgagacagacaccaacctgaacttccagaacctgctggtgatcgtgctgagaatcctgctgctgaaagtggccggctttaacctgctgatgaccctgcggctgtggtccagc

SEQ ID NO: 21293 - DNA, 252 bp, synthetic construct
  source 1..252: mol_type = other DNA
aagagcaactccgccgtggcctggtccaacaagtccgatttcgcctgcgccaacgccttcaacaacagcattatccccgaggacacattcttcccaagccccgagagcagctgcgacgtgaagctggtggaaaagagcttcgagacagacaccaacctgaacttccagaacctgctggtgatcgtgctgagaatcctgctgctgaaagtggccggctttaacctgctgatgaccctgcggctgtggtccagc

SEQ ID NO: 21294 - DNA, 249 bp, synthetic construct
  source 1..249: mol_type = other DNA
agcaactccgccgtggcctggtccaacaagtccgatttcgcctgcgccaacgccttcaacaacagcattatccccgaggacacattcttcccaagccccgagagcagctgcgacgtgaagctggtggaaaagagcttcgagacagacaccaacctgaacttccagaacctgctggtgatcgtgctgagaatcctgctgctgaaagtggccggctttaacctgctgatgaccctgcggctgtggtccagc

SEQ ID NO: 21295 - DNA, 246 bp, synthetic construct
  source 1..246: mol_type = other DNA
aactccgccgtggcctggtccaacaagtccgatttcgcctgcgccaacgccttcaacaacagcattatccccgaggacacattcttcccaagccccgagagcagctgcgacgtgaagctggtggaaaagagcttcgagacagacaccaacctgaacttccagaacctgctggtgatcgtgctgagaatcctgctgctgaaagtggccggctttaacctgctgatgaccctgcggctgtggtccagc

SEQ ID NO: 21296 - DNA, 243 bp, synthetic construct
  source 1..243: mol_type = other DNA
tccgccgtggcctggtccaacaagtccgatttcgcctgcgccaacgccttcaacaacagcattatccccgaggacacattcttcccaagccccgagagcagctgcgacgtgaagctggtggaaaagagcttcgagacagacaccaacctgaacttccagaacctgctggtgatcgtgctgagaatcctgctgctgaaagtggccggctttaacctgctgatgaccctgcggctgtggtccagc

SEQ ID NO: 21297 - DNA, 240 bp, synthetic construct
  source 1..240: mol_type = other DNA
gccgtggcctggtccaacaagtccgatttcgcctgcgccaacgccttcaacaacagcattatccccgaggacacattcttcccaagccccgagagcagctgcgacgtgaagctggtggaaaagagcttcgagacagacaccaacctgaacttccagaacctgctggtgatcgtgctgagaatcctgctgctgaaagtggccggctttaacctgctgatgaccctgcggctgtggtccagc

SEQ ID NO: 21298 - DNA, 237 bp, synthetic construct
  source 1..237: mol_type = other DNA
gtggcctggtccaacaagtccgatttcgcctgcgccaacgccttcaacaacagcattatccccgaggacacattcttcccaagccccgagagcagctgcgacgtgaagctggtggaaaagagcttcgagacagacaccaacctgaacttccagaacctgctggtgatcgtgctgagaatcctgctgctgaaagtggccggctttaacctgctgatgaccctgcggctgtggtccagc

SEQ ID NO: 21299 - DNA, 234 bp, synthetic construct
  source 1..234: mol_type = other DNA
gcctggtccaacaagtccgatttcgcctgcgccaacgccttcaacaacagcattatccccgaggacacattcttcccaagccccgagagcagctgcgacgtgaagctggtggaaaagagcttcgagacagacaccaacctgaacttccagaacctgctggtgatcgtgctgagaatcctgctgctgaaagtggccggctttaacctgctgatgaccctgcggctgtggtccagc

SEQ ID NO: 21300 - DNA, 231 bp, synthetic construct
  source 1..231: mol_type = other DNA
tggtccaacaagtccgatttcgcctgcgccaacgccttcaacaacagcattatccccgaggacacattcttcccaagccccgagagcagctgcgacgtgaagctggtggaaaagagcttcgagacagacaccaacctgaacttccagaacctgctggtgatcgtgctgagaatcctgctgctgaaagtggccggctttaacctgctgatgaccctgcggctgtggtccagc

SEQ ID NO: 21301 - DNA, 228 bp, synthetic construct
  source 1..228: mol_type = other DNA
tccaacaagtccgatttcgcctgcgccaacgccttcaacaacagcattatccccgaggacacattcttcccaagccccgagagcagctgcgacgtgaagctggtggaaaagagcttcgagacagacaccaacctgaacttccagaacctgctggtgatcgtgctgagaatcctgctgctgaaagtggccggctttaacctgctgatgaccctgcggctgtggtccagc

SEQ ID NO: 21302 - DNA, 225 bp, synthetic construct
  source 1..225: mol_type = other DNA
aacaagtccgatttcgcctgcgccaacgccttcaacaacagcattatccccgaggacacattcttcccaagccccgagagcagctgcgacgtgaagctggtggaaaagagcttcgagacagacaccaacctgaacttccagaacctgctggtgatcgtgctgagaatcctgctgctgaaagtggccggctttaacctgctgatgaccctgcggctgtggtccagc

SEQ ID NO: 21303 - DNA, 222 bp, synthetic construct
  source 1..222: mol_type = other DNA
aagtccgatttcgcctgcgccaacgccttcaacaacagcattatccccgaggacacattcttcccaagccccgagagcagctgcgacgtgaagctggtggaaaagagcttcgagacagacaccaacctgaacttccagaacctgctggtgatcgtgctgagaatcctgctgctgaaagtggccggctttaacctgctgatgaccctgcggctgtggtccagc

SEQ ID NO: 21304 - DNA, 219 bp, synthetic construct
  source 1..219: mol_type = other DNA
tccgatttcgcctgcgccaacgccttcaacaacagcattatccccgaggacacattcttcccaagccccgagagcagctgcgacgtgaagctggtggaaaagagcttcgagacagacaccaacctgaacttccagaacctgctggtgatcgtgctgagaatcctgctgctgaaagtggccggctttaacctgctgatgaccctgcggctgtggtccagc

SEQ ID NO: 21305 - DNA, 216 bp, synthetic construct
  source 1..216: mol_type = other DNA
gatttcgcctgcgccaacgccttcaacaacagcattatccccgaggacacattcttcccaagccccgagagcagctgcgacgtgaagctggtggaaaagagcttcgagacagacaccaacctgaacttccagaacctgctggtgatcgtgctgagaatcctgctgctgaaagtggccggctttaacctgctgatgaccctgcggctgtggtccagc

SEQ ID NO: 21306 - DNA, 213 bp, synthetic construct
  source 1..213: mol_type = other DNA
ttcgcctgcgccaacgccttcaacaacagcattatccccgaggacacattcttcccaagccccgagagcagctgcgacgtgaagctggtggaaaagagcttcgagacagacaccaacctgaacttccagaacctgctggtgatcgtgctgagaatcctgctgctgaaagtggccggctttaacctgctgatgaccctgcggctgtggtccagc

SEQ ID NO: 21307 - DNA, 210 bp, synthetic construct
  source 1..210: mol_type = other DNA
gcctgcgccaacgccttcaacaacagcattatccccgaggacacattcttcccaagccccgagagcagctgcgacgtgaagctggtggaaaagagcttcgagacagacaccaacctgaacttccagaacctgctggtgatcgtgctgagaatcctgctgctgaaagtggccggctttaacctgctgatgaccctgcggctgtggtccagc

SEQ ID NO: 21308 - DNA, 207 bp, synthetic construct
  source 1..207: mol_type = other DNA
tgcgccaacgccttcaacaacagcattatccccgaggacacattcttcccaagccccgagagcagctgcgacgtgaagctggtggaaaagagcttcgagacagacaccaacctgaacttccagaacctgctggtgatcgtgctgagaatcctgctgctgaaagtggccggctttaacctgctgatgaccctgcggctgtggtccagc

SEQ ID NO: 21309 - DNA, 204 bp, synthetic construct
  source 1..204: mol_type = other DNA
gccaacgccttcaacaacagcattatccccgaggacacattcttcccaagccccgagagcagctgcgacgtgaagctggtggaaaagagcttcgagacagacaccaacctgaacttccagaacctgctggtgatcgtgctgagaatcctgctgctgaaagtggccggctttaacctgctgatgaccctgcggctgtggtccagc

SEQ ID NO: 21310 - DNA, 201 bp, synthetic construct
  source 1..201: mol_type = other DNA
aacgccttcaacaacagcattatccccgaggacacattcttcccaagccccgagagcagctgcgacgtgaagctggtggaaaagagcttcgagacagacaccaacctgaacttccagaacctgctggtgatcgtgctgagaatcctgctgctgaaagtggccggctttaacctgctgatgaccctgcggctgtggtccagc

SEQ ID NO: 21311 - DNA, 198 bp, synthetic construct
  source 1..198: mol_type = other DNA
gccttcaacaacagcattatccccgaggacacattcttcccaagccccgagagcagctgcgacgtgaagctggtggaaaagagcttcgagacagacaccaacctgaacttccagaacctgctggtgatcgtgctgagaatcctgctgctgaaagtggccggctttaacctgctgatgaccctgcggctgtggtccagc

SEQ ID NO: 21312 - DNA, 195 bp, synthetic construct
  source 1..195: mol_type = other DNA
ttcaacaacagcattatccccgaggacacattcttcccaagccccgagagcagctgcgacgtgaagctggtggaaaagagcttcgagacagacaccaacctgaacttccagaacctgctggtgatcgtgctgagaatcctgctgctgaaagtggccggctttaacctgctgatgaccctgcggctgtggtccagc

SEQ ID NO: 21313 - DNA, 192 bp, synthetic construct
  source 1..192: mol_type = other DNA
aacaacagcattatccccgaggacacattcttcccaagccccgagagcagctgcgacgtgaagctggtggaaaagagcttcgagacagacaccaacctgaacttccagaacctgctggtgatcgtgctgagaatcctgctgctgaaagtggccggctttaacctgctgatgaccctgcggctgtggtccagc

SEQ ID NO: 21314 - DNA, 189 bp, synthetic construct
  source 1..189: mol_type = other DNA
aacagcattatccccgaggacacattcttcccaagccccgagagcagctgcgacgtgaagctggtggaaaagagcttcgagacagacaccaacctgaacttccagaacctgctggtgatcgtgctgagaatcctgctgctgaaagtggccggctttaacctgctgatgaccctgcggctgtggtccagc

SEQ ID NO: 21315 - DNA, 186 bp, synthetic construct
  source 1..186: mol_type = other DNA
agcattatccccgaggacacattcttcccaagccccgagagcagctgcgacgtgaagctggtggaaaagagcttcgagacagacaccaacctgaacttccagaacctgctggtgatcgtgctgagaatcctgctgctgaaagtggccggctttaacctgctgatgaccctgcggctgtggtccagc

SEQ ID NO: 21316 - DNA, 183 bp, synthetic construct
  source 1..183: mol_type = other DNA
attatccccgaggacacattcttcccaagccccgagagcagctgcgacgtgaagctggtggaaaagagcttcgagacagacaccaacctgaacttccagaacctgctggtgatcgtgctgagaatcctgctgctgaaagtggccggctttaacctgctgatgaccctgcggctgtggtccagc

SEQ ID NO: 21317 - DNA, 180 bp, synthetic construct
  source 1..180: mol_type = other DNA
atccccgaggacacattcttcccaagccccgagagcagctgcgacgtgaagctggtggaaaagagcttcgagacagacaccaacctgaacttccagaacctgctggtgatcgtgctgagaatcctgctgctgaaagtggccggctttaacctgctgatgaccctgcggctgtggtccagc

SEQ ID NO: 21318 - DNA, 177 bp, synthetic construct
  source 1..177: mol_type = other DNA
cccgaggacacattcttcccaagccccgagagcagctgcgacgtgaagctggtggaaaagagcttcgagacagacaccaacctgaacttccagaacctgctggtgatcgtgctgagaatcctgctgctgaaagtggccggctttaacctgctgatgaccctgcggctgtggtccagc

SEQ ID NO: 21319 - DNA, 174 bp, synthetic construct
  source 1..174: mol_type = other DNA
gaggacacattcttcccaagccccgagagcagctgcgacgtgaagctggtggaaaagagcttcgagacagacaccaacctgaacttccagaacctgctggtgatcgtgctgagaatcctgctgctgaaagtggccggctttaacctgctgatgaccctgcggctgtggtccagc

SEQ ID NO: 21320 - DNA, 171 bp, synthetic construct
  source 1..171: mol_type = other DNA
gacacattcttcccaagccccgagagcagctgcgacgtgaagctggtggaaaagagcttcgagacagacaccaacctgaacttccagaacctgctggtgatcgtgctgagaatcctgctgctgaaagtggccggctttaacctgctgatgaccctgcggctgtggtccagc

SEQ ID NO: 21321 - DNA, 168 bp, synthetic construct
  source 1..168: mol_type = other DNA
acattcttcccaagccccgagagcagctgcgacgtgaagctggtggaaaagagcttcgagacagacaccaacctgaacttccagaacctgctggtgatcgtgctgagaatcctgctgctgaaagtggccggctttaacctgctgatgaccctgcggctgtggtccagc

SEQ ID NO: 21322 - DNA, 165 bp, synthetic construct
  source 1..165: mol_type = other DNA
ttcttcccaagccccgagagcagctgcgacgtgaagctggtggaaaagagcttcgagacagacaccaacctgaacttccagaacctgctggtgatcgtgctgagaatcctgctgctgaaagtggccggctttaacctgctgatgaccctgcggctgtggtccagc

SEQ ID NO: 21323 - DNA, 162 bp, synthetic construct
  source 1..162: mol_type = other DNA
ttcccaagccccgagagcagctgcgacgtgaagctggtggaaaagagcttcgagacagacaccaacctgaacttccagaacctgctggtgatcgtgctgagaatcctgctgctgaaagtggccggctttaacctgctgatgaccctgcggctgtggtccagc

SEQ ID NO: 21324 - DNA, 159 bp, synthetic construct
  source 1..159: mol_type = other DNA
ccaagccccgagagcagctgcgacgtgaagctggtggaaaagagcttcgagacagacaccaacctgaacttccagaacctgctggtgatcgtgctgagaatcctgctgctgaaagtggccggctttaacctgctgatgaccctgcggctgtggtccagc

SEQ ID NO: 21325 - DNA, 156 bp, synthetic construct
  source 1..156: mol_type = other DNA
agccccgagagcagctgcgacgtgaagctggtggaaaagagcttcgagacagacaccaacctgaacttccagaacctgctggtgatcgtgctgagaatcctgctgctgaaagtggccggctttaacctgctgatgaccctgcggctgtggtccagc

SEQ ID NO: 21326 - DNA, 153 bp, synthetic construct
  source 1..153: mol_type = other DNA
cccgagagcagctgcgacgtgaagctggtggaaaagagcttcgagacagacaccaacctgaacttccagaacctgctggtgatcgtgctgagaatcctgctgctgaaagtggccggctttaacctgctgatgaccctgcggctgtggtccagc

SEQ ID NO: 21327 - DNA, 150 bp, synthetic construct
  source 1..150: mol_type = other DNA
gagagcagctgcgacgtgaagctggtggaaaagagcttcgagacagacaccaacctgaacttccagaacctgctggtgatcgtgctgagaatcctgctgctgaaagtggccggctttaacctgctgatgaccctgcggctgtggtccagc

SEQ ID NO: 21328 - DNA, 147 bp, synthetic construct
  source 1..147: mol_type = other DNA
agcagctgcgacgtgaagctggtggaaaagagcttcgagacagacaccaacctgaacttccagaacctgctggtgatcgtgctgagaatcctgctgctgaaagtggccggctttaacctgctgatgaccctgcggctgtggtccagc

SEQ ID NO: 21329 - DNA, 144 bp, synthetic construct
  source 1..144: mol_type = other DNA
agctgcgacgtgaagctggtggaaaagagcttcgagacagacaccaacctgaacttccagaacctgctggtgatcgtgctgagaatcctgctgctgaaagtggccggctttaacctgctgatgaccctgcggctgtggtccagc

SEQ ID NO: 21330 - DNA, 141 bp, synthetic construct
  source 1..141: mol_type = other DNA
tgcgacgtgaagctggtggaaaagagcttcgagacagacaccaacctgaacttccagaacctgctggtgatcgtgctgagaatcctgctgctgaaagtggccggctttaacctgctgatgaccctgcggctgtggtccagc

SEQ ID NO: 21331 - DNA, 138 bp, synthetic construct
  source 1..138: mol_type = other DNA
gacgtgaagctggtggaaaagagcttcgagacagacaccaacctgaacttccagaacctgctggtgatcgtgctgagaatcctgctgctgaaagtggccggctttaacctgctgatgaccctgcggctgtggtccagc

SEQ ID NO: 21332 - DNA, 135 bp, synthetic construct
  source 1..135: mol_type = other DNA
gtgaagctggtggaaaagagcttcgagacagacaccaacctgaacttccagaacctgctggtgatcgtgctgagaatcctgctgctgaaagtggccggctttaacctgctgatgaccctgcggctgtggtccagc

SEQ ID NO: 21333 - DNA, 132 bp, synthetic construct
  source 1..132: mol_type = other DNA
aagctggtggaaaagagcttcgagacagacaccaacctgaacttccagaacctgctggtgatcgtgctgagaatcctgctgctgaaagtggccggctttaacctgctgatgaccctgcggctgtggtccagc

SEQ ID NO: 21334 - DNA, 129 bp, synthetic construct
  source 1..129: mol_type = other DNA
ctggtggaaaagagcttcgagacagacaccaacctgaacttccagaacctgctggtgatcgtgctgagaatcctgctgctgaaagtggccggctttaacctgctgatgaccctgcggctgtggtccagc

SEQ ID NO: 21335 - DNA, 126 bp, synthetic construct
  source 1..126: mol_type = other DNA
gtggaaaagagcttcgagacagacaccaacctgaacttccagaacctgctggtgatcgtgctgagaatcctgctgctgaaagtggccggctttaacctgctgatgaccctgcggctgtggtccagc

SEQ ID NO: 21336 - DNA, 123 bp, synthetic construct
  source 1..123: mol_type = other DNA
gaaaagagcttcgagacagacaccaacctgaacttccagaacctgctggtgatcgtgctgagaatcctgctgctgaaagtggccggctttaacctgctgatgaccctgcggctgtggtccagc

SEQ ID NO: 21337 - DNA, 120 bp, synthetic construct
  source 1..120: mol_type = other DNA
aagagcttcgagacagacaccaacctgaacttccagaacctgctggtgatcgtgctgagaatcctgctgctgaaagtggccggctttaacctgctgatgaccctgcggctgtggtccagc

SEQ ID NO: 21338 - DNA, 117 bp, synthetic construct
  source 1..117: mol_type = other DNA
agcttcgagacagacaccaacctgaacttccagaacctgctggtgatcgtgctgagaatcctgctgctgaaagtggccggctttaacctgctgatgaccctgcggctgtggtccagc

SEQ ID NO: 21339 - DNA, 498 bp, synthetic construct
  source 1..498: mol_type = other DNA
ggacagcctaaggccaatcctaccgtgacactgttccctccaagcagcgaagaactccaggccaacaaggccacacttgtgtgcctgatctccgacttctaccctggggctgtgacagtggcttggaaggccgatggatctcctgtgaaagccggcgtggaaaccaccaagccatccaagcagagcaacaacaaatacgccgccagctcctacctgagcctgacacctgagcagtggaagtcccacagatcctacagctgccaagtgacccacgaaggcagcaccgtggaaaagacagtggcccctacagagtgcagcatccccgaggacacattcttcccaagccccgagagcagctgcgacgtgaagctggtggaaaagagcttcgagacagacaccaacctgaacttccagaacctgctggtgatcgtgctgagaatcctgctgctgaaagtggccggctttaacctgctgatgaccctgcggctgtggtccagc

SEQ ID NO: 21340 - DNA, 495 bp, synthetic construct
  source 1..495: mol_type = other DNA
cagcctaaggccaatcctaccgtgacactgttccctccaagcagcgaagaactccaggccaacaaggccacacttgtgtgcctgatctccgacttctaccctggggctgtgacagtggcttggaaggccgatggatctcctgtgaaagccggcgtggaaaccaccaagccatccaagcagagcaacaacaaatacgccgccagctcctacctgagcctgacacctgagcagtggaagtcccacagatcctacagctgccaagtgacccacgaaggcagcaccgtggaaaagacagtggcccctacagagtgcagcatccccgaggacacattcttcccaagccccgagagcagctgcgacgtgaagctggtggaaaagagcttcgagacagacaccaacctgaacttccagaacctgctggtgatcgtgctgagaatcctgctgctgaaagtggccggctttaacctgctgatgaccctgcggctgtggtccagc

SEQ ID NO: 21341 - DNA, 492 bp, synthetic construct
  source 1..492: mol_type = other DNA
cctaaggccaatcctaccgtgacactgttccctccaagcagcgaagaactccaggccaacaaggccacacttgtgtgcctgatctccgacttctaccctggggctgtgacagtggcttggaaggccgatggatctcctgtgaaagccggcgtggaaaccaccaagccatccaagcagagcaacaacaaatacgccgccagctcctacctgagcctgacacctgagcagtggaagtcccacagatcctacagctgccaagtgacccacgaaggcagcaccgtggaaaagacagtggcccctacagagtgcagcatccccgaggacacattcttcccaagccccgagagcagctgcgacgtgaagctggtggaaaagagcttcgagacagacaccaacctgaacttccagaacctgctggtgatcgtgctgagaatcctgctgctgaaagtggccggctttaacctgctgatgaccctgcggctgtggtccagc

SEQ ID NO: 21342 - DNA, 489 bp, synthetic construct
  source 1..489: mol_type = other DNA
aaggccaatcctaccgtgacactgttccctccaagcagcgaagaactccaggccaacaaggccacacttgtgtgcctgatctccgacttctaccctggggctgtgacagtggcttggaaggccgatggatctcctgtgaaagccggcgtggaaaccaccaagccatccaagcagagcaacaacaaatacgccgccagctcctacctgagcctgacacctgagcagtggaagtcccacagatcctacagctgccaagtgacccacgaaggcagcaccgtggaaaagacagtggcccctacagagtgcagcatccccgaggacacattcttcccaagccccgagagcagctgcgacgtgaagctggtggaaaagagcttcgagacagacaccaacctgaacttccagaacctgctggtgatcgtgctgagaatcctgctgctgaaagtggccggctttaacctgctgatgaccctgcggctgtggtccagc

SEQ ID NO: 21343 - DNA, 486 bp, synthetic construct
  source 1..486: mol_type = other DNA
gccaatcctaccgtgacactgttccctccaagcagcgaagaactccaggccaacaaggccacacttgtgtgcctgatctccgacttctaccctggggctgtgacagtggcttggaaggccgatggatctcctgtgaaagccggcgtggaaaccaccaagccatccaagcagagcaacaacaaatacgccgccagctcctacctgagcctgacacctgagcagtggaagtcccacagatcctacagctgccaagtgacccacgaaggcagcaccgtggaaaagacagtggcccctacagagtgcagcatccccgaggacacattcttcccaagccccgagagcagctgcgacgtgaagctggtggaaaagagcttcgagacagacaccaacctgaacttccagaacctgctggtgatcgtgctgagaatcctgctgctgaaagtggccggctttaacctgctgatgaccctgcggctgtggtccagc

SEQ ID NO: 21344 - DNA, 483 bp, synthetic construct
  source 1..483: mol_type = other DNA
aatcctaccgtgacactgttccctccaagcagcgaagaactccaggccaacaaggccacacttgtgtgcctgatctccgacttctaccctggggctgtgacagtggcttggaaggccgatggatctcctgtgaaagccggcgtggaaaccaccaagccatccaagcagagcaacaacaaatacgccgccagctcctacctgagcctgacacctgagcagtggaagtcccacagatcctacagctgccaagtgacccacgaaggcagcaccgtggaaaagacagtggcccctacagagtgcagcatccccgaggacacattcttcccaagccccgagagcagctgcgacgtgaagctggtggaaaagagcttcgagacagacaccaacctgaacttccagaacctgctggtgatcgtgctgagaatcctgctgctgaaagtggccggctttaacctgctgatgaccctgcggctgtggtccagc

SEQ ID NO: 21345 - DNA, 480 bp, synthetic construct
  source 1..480: mol_type = other DNA
cctaccgtgacactgttccctccaagcagcgaagaactccaggccaacaaggccacacttgtgtgcctgatctccgacttctaccctggggctgtgacagtggcttggaaggccgatggatctcctgtgaaagccggcgtggaaaccaccaagccatccaagcagagcaacaacaaatacgccgccagctcctacctgagcctgacacctgagcagtggaagtcccacagatcctacagctgccaagtgacccacgaaggcagcaccgtggaaaagacagtggcccctacagagtgcagcatccccgaggacacattcttcccaagccccgagagcagctgcgacgtgaagctggtggaaaagagcttcgagacagacaccaacctgaacttccagaacctgctggtgatcgtgctgagaatcctgctgctgaaagtggccggctttaacctgctgatgaccctgcggctgtggtccagc

SEQ ID NO: 21346 - DNA, 477 bp, synthetic construct
  source 1..477: mol_type = other DNA
accgtgacactgttccctccaagcagcgaagaactccaggccaacaaggccacacttgtgtgcctgatctccgacttctaccctggggctgtgacagtggcttggaaggccgatggatctcctgtgaaagccggcgtggaaaccaccaagccatccaagcagagcaacaacaaatacgccgccagctcctacctgagcctgacacctgagcagtggaagtcccacagatcctacagctgccaagtgacccacgaaggcagcaccgtggaaaagacagtggcccctacagagtgcagcatccccgaggacacattcttcccaagccccgagagcagctgcgacgtgaagctggtggaaaagagcttcgagacagacaccaacctgaacttccagaacctgctggtgatcgtgctgagaatcctgctgctgaaagtggccggctttaacctgctgatgaccctgcggctgtggtccagc

SEQ ID NO: 21347 - DNA, 474 bp, synthetic construct
  source 1..474: mol_type = other DNA
gtgacactgttccctccaagcagcgaagaactccaggccaacaaggccacacttgtgtgcctgatctccgacttctaccctggggctgtgacagtggcttggaaggccgatggatctcctgtgaaagccggcgtggaaaccaccaagccatccaagcagagcaacaacaaatacgccgccagctcctacctgagcctgacacctgagcagtggaagtcccacagatcctacagctgccaagtgacccacgaaggcagcaccgtggaaaagacagtggcccctacagagtgcagcatccccgaggacacattcttcccaagccccgagagcagctgcgacgtgaagctggtggaaaagagcttcgagacagacaccaacctgaacttccagaacctgctggtgatcgtgctgagaatcctgctgctgaaagtggccggctttaacctgctgatgaccctgcggctgtggtccagc

SEQ ID NO: 21348 - DNA, 471 bp, synthetic construct
  source 1..471: mol_type = other DNA
acactgttccctccaagcagcgaagaactccaggccaacaaggccacacttgtgtgcctgatctccgacttctaccctggggctgtgacagtggcttggaaggccgatggatctcctgtgaaagccggcgtggaaaccaccaagccatccaagcagagcaacaacaaatacgccgccagctcctacctgagcctgacacctgagcagtggaagtcccacagatcctacagctgccaagtgacccacgaaggcagcaccgtggaaaagacagtggcccctacagagtgcagcatccccgaggacacattcttcccaagccccgagagcagctgcgacgtgaagctggtggaaaagagcttcgagacagacaccaacctgaacttccagaacctgctggtgatcgtgctgagaatcctgctgctgaaagtggccggctttaacctgctgatgaccctgcggctgtggtccagc

SEQ ID NO: 21349 - DNA, 468 bp, synthetic construct
  source 1..468: mol_type = other DNA
ctgttccctccaagcagcgaagaactccaggccaacaaggccacacttgtgtgcctgatctccgacttctaccctggggctgtgacagtggcttggaaggccgatggatctcctgtgaaagccggcgtggaaaccaccaagccatccaagcagagcaacaacaaatacgccgccagctcctacctgagcctgacacctgagcagtggaagtcccacagatcctacagctgccaagtgacccacgaaggcagcaccgtggaaaagacagtggcccctacagagtgcagcatccccgaggacacattcttcccaagccccgagagcagctgcgacgtgaagctggtggaaaagagcttcgagacagacaccaacctgaacttccagaacctgctggtgatcgtgctgagaatcctgctgctgaaagtggccggctttaacctgctgatgaccctgcggctgtggtccagc

SEQ ID NO: 21350 - DNA, 528 bp, synthetic construct
  source 1..528: mol_type = other DNA
gacctgaagaacgtgttcccacctgaggtggccgtgttcgagcctagcgaggccgagatcagccacacccagaaagccaccctcgtgtgcctggctaccggcttctaccccgaccatgtggaactgtcttggtgggtcaacggcaaagaggtgcacagcggcgtgtgtaccgacccccagccactgaaagaacagcccgccctgaacgacagccggtactgcctgagcagcagactgagagtgtccgccaccttctggcagaacccccggaaccacttcagatgccaggtgcagttctacggcctgagcgagaacgacgagtggacccaggacagagccaagcccgtgacccagatcgtgtctgccgaagcctggggcagagccgattgcgacgtgaagctggtggaaaagagcttcgagacagacaccaacctgaacttccagaacctgctggtgatcgtgctgagaatcctgctgctgaaagtggccggctttaacctgctgatgaccctgcggctgtggtccagc

SEQ ID NO: 21351 - DNA, 525 bp, synthetic construct
  source 1..525: mol_type = other DNA
ctgaagaacgtgttcccacctgaggtggccgtgttcgagcctagcgaggccgagatcagccacacccagaaagccaccctcgtgtgcctggctaccggcttctaccccgaccatgtggaactgtcttggtgggtcaacggcaaagaggtgcacagcggcgtgtgtaccgacccccagccactgaaagaacagcccgccctgaacgacagccggtactgcctgagcagcagactgagagtgtccgccaccttctggcagaacccccggaaccacttcagatgccaggtgcagttctacggcctgagcgagaacgacgagtggacccaggacagagccaagcccgtgacccagatcgtgtctgccgaagcctggggcagagccgattgcgacgtgaagctggtggaaaagagcttcgagacagacaccaacctgaacttccagaacctgctggtgatcgtgctgagaatcctgctgctgaaagtggccggctttaacctgctgatgaccctgcggctgtggtccagc

SEQ ID NO: 21352 - DNA, 522 bp, synthetic construct
  source 1..522: mol_type = other DNA
aagaacgtgttcccacctgaggtggccgtgttcgagcctagcgaggccgagatcagccacacccagaaagccaccctcgtgtgcctggctaccggcttctaccccgaccatgtggaactgtcttggtgggtcaacggcaaagaggtgcacagcggcgtgtgtaccgacccccagccactgaaagaacagcccgccctgaacgacagccggtactgcctgagcagcagactgagagtgtccgccaccttctggcagaacccccggaaccacttcagatgccaggtgcagttctacggcctgagcgagaacgacgagtggacccaggacagagccaagcccgtgacccagatcgtgtctgccgaagcctggggcagagccgattgcgacgtgaagctggtggaaaagagcttcgagacagacaccaacctgaacttccagaacctgctggtgatcgtgctgagaatcctgctgctgaaagtggccggctttaacctgctgatgaccctgcggctgtggtccagc

SEQ ID NO: 21353 - DNA, 519 bp, synthetic construct
  source 1..519: mol_type = other DNA
aacgtgttcccacctgaggtggccgtgttcgagcctagcgaggccgagatcagccacacccagaaagccaccctcgtgtgcctggctaccggcttctaccccgaccatgtggaactgtcttggtgggtcaacggcaaagaggtgcacagcggcgtgtgtaccgacccccagccactgaaagaacagcccgccctgaacgacagccggtactgcctgagcagcagactgagagtgtccgccaccttctggcagaacccccggaaccacttcagatgccaggtgcagttctacggcctgagcgagaacgacgagtggacccaggacagagccaagcccgtgacccagatcgtgtctgccgaagcctggggcagagccgattgcgacgtgaagctggtggaaaagagcttcgagacagacaccaacctgaacttccagaacctgctggtgatcgtgctgagaatcctgctgctgaaagtggccggctttaacctgctgatgaccctgcggctgtggtccagc

SEQ ID NO: 21354 - DNA, 516 bp, synthetic construct
  source 1..516: mol_type = other DNA
gtgttcccacctgaggtggccgtgttcgagcctagcgaggccgagatcagccacacccagaaagccaccctcgtgtgcctggctaccggcttctaccccgaccatgtggaactgtcttggtgggtcaacggcaaagaggtgcacagcggcgtgtgtaccgacccccagccactgaaagaacagcccgccctgaacgacagccggtactgcctgagcagcagactgagagtgtccgccaccttctggcagaacccccggaaccacttcagatgccaggtgcagttctacggcctgagcgagaacgacgagtggacccaggacagagccaagcccgtgacccagatcgtgtctgccgaagcctggggcagagccgattgcgacgtgaagctggtggaaaagagcttcgagacagacaccaacctgaacttccagaacctgctggtgatcgtgctgagaatcctgctgctgaaagtggccggctttaacctgctgatgaccctgcggctgtggtccagc

SEQ ID NO: 21355 - DNA, 513 bp, synthetic construct
  source 1..513: mol_type = other DNA
ttcccacctgaggtggccgtgttcgagcctagcgaggccgagatcagccacacccagaaagccaccctcgtgtgcctggctaccggcttctaccccgaccatgtggaactgtcttggtgggtcaacggcaaagaggtgcacagcggcgtgtgtaccgacccccagccactgaaagaacagcccgccctgaacgacagccggtactgcctgagcagcagactgagagtgtccgccaccttctggcagaacccccggaaccacttcagatgccaggtgcagttctacggcctgagcgagaacgacgagtggacccaggacagagccaagcccgtgacccagatcgtgtctgccgaagcctggggcagagccgattgcgacgtgaagctggtggaaaagagcttcgagacagacaccaacctgaacttccagaacctgctggtgatcgtgctgagaatcctgctgctgaaagtggccggctttaacctgctgatgaccctgcggctgtggtccagc

SEQ ID NO: 21356 - DNA, 510 bp, synthetic construct
  source 1..510: mol_type = other DNA
ccacctgaggtggccgtgttcgagcctagcgaggccgagatcagccacacccagaaagccaccctcgtgtgcctggctaccggcttctaccccgaccatgtggaactgtcttggtgggtcaacggcaaagaggtgcacagcggcgtgtgtaccgacccccagccactgaaagaacagcccgccctgaacgacagccggtactgcctgagcagcagactgagagtgtccgccaccttctggcagaacccccggaaccacttcagatgccaggtgcagttctacggcctgagcgagaacgacgagtggacccaggacagagccaagcccgtgacccagatcgtgtctgccgaagcctggggcagagccgattgcgacgtgaagctggtggaaaagagcttcgagacagacaccaacctgaacttccagaacctgctggtgatcgtgctgagaatcctgctgctgaaagtggccggctttaacctgctgatgaccctgcggctgtggtccagc

SEQ ID NO: 21357 - DNA, 507 bp, synthetic construct
  source 1..507: mol_type = other DNA
cctgaggtggccgtgttcgagcctagcgaggccgagatcagccacacccagaaagccaccctcgtgtgcctggctaccggcttctaccccgaccatgtggaactgtcttggtgggtcaacggcaaagaggtgcacagcggcgtgtgtaccgacccccagccactgaaagaacagcccgccctgaacgacagccggtactgcctgagcagcagactgagagtgtccgccaccttctggcagaacccccggaaccacttcagatgccaggtgcagttctacggcctgagcgagaacgacgagtggacccaggacagagccaagcccgtgacccagatcgtgtctgccgaagcctggggcagagccgattgcgacgtgaagctggtggaaaagagcttcgagacagacaccaacctgaacttccagaacctgctggtgatcgtgctgagaatcctgctgctgaaagtggccggctttaacctgctgatgaccctgcggctgtggtccagc

SEQ ID NO: 21358 - DNA, 504 bp, synthetic construct
  source 1..504: mol_type = other DNA
gaggtggccgtgttcgagcctagcgaggccgagatcagccacacccagaaagccaccctcgtgtgcctggctaccggcttctaccccgaccatgtggaactgtcttggtgggtcaacggcaaagaggtgcacagcggcgtgtgtaccgacccccagccactgaaagaacagcccgccctgaacgacagccggtactgcctgagcagcagactgagagtgtccgccaccttctggcagaacccccggaaccacttcagatgccaggtgcagttctacggcctgagcgagaacgacgagtggacccaggacagagccaagcccgtgacccagatcgtgtctgccgaagcctggggcagagccgattgcgacgtgaagctggtggaaaagagcttcgagacagacaccaacctgaacttccagaacctgctggtgatcgtgctgagaatcctgctgctgaaagtggccggctttaacctgctgatgaccctgcggctgtggtccagc

SEQ ID NO: 21359 - DNA, 501 bp, synthetic construct
  source 1..501: mol_type = other DNA
gtggccgtgttcgagcctagcgaggccgagatcagccacacccagaaagccaccctcgtgtgcctggctaccggcttctaccccgaccatgtggaactgtcttggtgggtcaacggcaaagaggtgcacagcggcgtgtgtaccgacccccagccactgaaagaacagcccgccctgaacgacagccggtactgcctgagcagcagactgagagtgtccgccaccttctggcagaacccccggaaccacttcagatgccaggtgcagttctacggcctgagcgagaacgacgagtggacccaggacagagccaagcccgtgacccagatcgtgtctgccgaagcctggggcagagccgattgcgacgtgaagctggtggaaaagagcttcgagacagacaccaacctgaacttccagaacctgctggtgatcgtgctgagaatcctgctgctgaaagtggccggctttaacctgctgatgaccctgcggctgtggtccagc

SEQ ID NO: 21360 - DNA, 498 bp, synthetic construct
  source 1..498: mol_type = other DNA
gccgtgttcgagcctagcgaggccgagatcagccacacccagaaagccaccctcgtgtgcctggctaccggcttctaccccgaccatgtggaactgtcttggtgggtcaacggcaaagaggtgcacagcggcgtgtgtaccgacccccagccactgaaagaacagcccgccctgaacgacagccggtactgcctgagcagcagactgagagtgtccgccaccttctggcagaacccccggaaccacttcagatgccaggtgcagttctacggcctgagcgagaacgacgagtggacccaggacagagccaagcccgtgacccagatcgtgtctgccgaagcctggggcagagccgattgcgacgtgaagctggtggaaaagagcttcgagacagacaccaacctgaacttccagaacctgctggtgatcgtgctgagaatcctgctgctgaaagtggccggctttaacctgctgatgaccctgcggctgtggtccagc

SEQ ID NO: 21361 - DNA, 495 bp, synthetic construct
  source 1..495: mol_type = other DNA
gtgttcgagcctagcgaggccgagatcagccacacccagaaagccaccctcgtgtgcctggctaccggcttctaccccgaccatgtggaactgtcttggtgggtcaacggcaaagaggtgcacagcggcgtgtgtaccgacccccagccactgaaagaacagcccgccctgaacgacagccggtactgcctgagcagcagactgagagtgtccgccaccttctggcagaacccccggaaccacttcagatgccaggtgcagttctacggcctgagcgagaacgacgagtggacccaggacagagccaagcccgtgacccagatcgtgtctgccgaagcctggggcagagccgattgcgacgtgaagctggtggaaaagagcttcgagacagacaccaacctgaacttccagaacctgctggtgatcgtgctgagaatcctgctgctgaaagtggccggctttaacctgctgatgaccctgcggctgtggtccagc

SEQ ID NO: 21362 - DNA, 492 bp, synthetic construct
  source 1..492: mol_type = other DNA
ttcgagcctagcgaggccgagatcagccacacccagaaagccaccctcgtgtgcctggctaccggcttctaccccgaccatgtggaactgtcttggtgggtcaacggcaaagaggtgcacagcggcgtgtgtaccgacccccagccactgaaagaacagcccgccctgaacgacagccggtactgcctgagcagcagactgagagtgtccgccaccttctggcagaacccccggaaccacttcagatgccaggtgcagttctacggcctgagcgagaacgacgagtggacccaggacagagccaagcccgtgacccagatcgtgtctgccgaagcctggggcagagccgattgcgacgtgaagctggtggaaaagagcttcgagacagacaccaacctgaacttccagaacctgctggtgatcgtgctgagaatcctgctgctgaaagtggccggctttaacctgctgatgaccctgcggctgtggtccagc

SEQ ID NO: 21363 - DNA, 489 bp, synthetic construct
  source 1..489: mol_type = other DNA
gagcctagcgaggccgagatcagccacacccagaaagccaccctcgtgtgcctggctaccggcttctaccccgaccatgtggaactgtcttggtgggtcaacggcaaagaggtgcacagcggcgtgtgtaccgacccccagccactgaaagaacagcccgccctgaacgacagccggtactgcctgagcagcagactgagagtgtccgccaccttctggcagaacccccggaaccacttcagatgccaggtgcagttctacggcctgagcgagaacgacgagtggacccaggacagagccaagcccgtgacccagatcgtgtctgccgaagcctggggcagagccgattgcgacgtgaagctggtggaaaagagcttcgagacagacaccaacctgaacttccagaacctgctggtgatcgtgctgagaatcctgctgctgaaagtggccggctttaacctgctgatgaccctgcggctgtggtccagc

SEQ ID NO: 21364 - DNA, 486 bp, synthetic construct
  source 1..486: mol_type = other DNA
cctagcgaggccgagatcagccacacccagaaagccaccctcgtgtgcctggctaccggcttctaccccgaccatgtggaactgtcttggtgggtcaacggcaaagaggtgcacagcggcgtgtgtaccgacccccagccactgaaagaacagcccgccctgaacgacagccggtactgcctgagcagcagactgagagtgtccgccaccttctggcagaacccccggaaccacttcagatgccaggtgcagttctacggcctgagcgagaacgacgagtggacccaggacagagccaagcccgtgacccagatcgtgtctgccgaagcctggggcagagccgattgcgacgtgaagctggtggaaaagagcttcgagacagacaccaacctgaacttccagaacctgctggtgatcgtgctgagaatcctgctgctgaaagtggccggctttaacctgctgatgaccctgcggctgtggtccagc

SEQ ID NO: 21365 - DNA, 483 bp, synthetic construct
  source 1..483: mol_type = other DNA
agcgaggccgagatcagccacacccagaaagccaccctcgtgtgcctggctaccggcttctaccccgaccatgtggaactgtcttggtgggtcaacggcaaagaggtgcacagcggcgtgtgtaccgacccccagccactgaaagaacagcccgccctgaacgacagccggtactgcctgagcagcagactgagagtgtccgccaccttctggcagaacccccggaaccacttcagatgccaggtgcagttctacggcctgagcgagaacgacgagtggacccaggacagagccaagcccgtgacccagatcgtgtctgccgaagcctggggcagagccgattgcgacgtgaagctggtggaaaagagcttcgagacagacaccaacctgaacttccagaacctgctggtgatcgtgctgagaatcctgctgctgaaagtggccggctttaacctgctgatgaccctgcggctgtggtccagc

SEQ ID NO: 21366 - DNA, 480 bp, synthetic construct
  source 1..480: mol_type = other DNA
gaggccgagatcagccacacccagaaagccaccctcgtgtgcctggctaccggcttctaccccgaccatgtggaactgtcttggtgggtcaacggcaaagaggtgcacagcggcgtgtgtaccgacccccagccactgaaagaacagcccgccctgaacgacagccggtactgcctgagcagcagactgagagtgtccgccaccttctggcagaacccccggaaccacttcagatgccaggtgcagttctacggcctgagcgagaacgacgagtggacccaggacagagccaagcccgtgacccagatcgtgtctgccgaagcctggggcagagccgattgcgacgtgaagctggtggaaaagagcttcgagacagacaccaacctgaacttccagaacctgctggtgatcgtgctgagaatcctgctgctgaaagtggccggctttaacctgctgatgaccctgcggctgtggtccagc

SEQ ID NO: 21367 - DNA, 477 bp, synthetic construct
  source 1..477: mol_type = other DNA
gccgagatcagccacacccagaaagccaccctcgtgtgcctggctaccggcttctaccccgaccatgtggaactgtcttggtgggtcaacggcaaagaggtgcacagcggcgtgtgtaccgacccccagccactgaaagaacagcccgccctgaacgacagccggtactgcctgagcagcagactgagagtgtccgccaccttctggcagaacccccggaaccacttcagatgccaggtgcagttctacggcctgagcgagaacgacgagtggacccaggacagagccaagcccgtgacccagatcgtgtctgccgaagcctggggcagagccgattgcgacgtgaagctggtggaaaagagcttcgagacagacaccaacctgaacttccagaacctgctggtgatcgtgctgagaatcctgctgctgaaagtggccggctttaacctgctgatgaccctgcggctgtggtccagc

SEQ ID NO: 21368 - DNA, 474 bp, synthetic construct
  source 1..474: mol_type = other DNA
gagatcagccacacccagaaagccaccctcgtgtgcctggctaccggcttctaccccgaccatgtggaactgtcttggtgggtcaacggcaaagaggtgcacagcggcgtgtgtaccgacccccagccactgaaagaacagcccgccctgaacgacagccggtactgcctgagcagcagactgagagtgtccgccaccttctggcagaacccccggaaccacttcagatgccaggtgcagttctacggcctgagcgagaacgacgagtggacccaggacagagccaagcccgtgacccagatcgtgtctgccgaagcctggggcagagccgattgcgacgtgaagctggtggaaaagagcttcgagacagacaccaacctgaacttccagaacctgctggtgatcgtgctgagaatcctgctgctgaaagtggccggctttaacctgctgatgaccctgcggctgtggtccagc

SEQ ID NO: 21369 - DNA, 471 bp, synthetic construct
  source 1..471: mol_type = other DNA
atcagccacacccagaaagccaccctcgtgtgcctggctaccggcttctaccccgaccatgtggaactgtcttggtgggtcaacggcaaagaggtgcacagcggcgtgtgtaccgacccccagccactgaaagaacagcccgccctgaacgacagccggtactgcctgagcagcagactgagagtgtccgccaccttctggcagaacccccggaaccacttcagatgccaggtgcagttctacggcctgagcgagaacgacgagtggacccaggacagagccaagcccgtgacccagatcgtgtctgccgaagcctggggcagagccgattgcgacgtgaagctggtggaaaagagcttcgagacagacaccaacctgaacttccagaacctgctggtgatcgtgctgagaatcctgctgctgaaagtggccggctttaacctgctgatgaccctgcggctgtggtccagc

SEQ ID NO: 21370 - DNA, 468 bp, synthetic construct
  source 1..468: mol_type = other DNA
agccacacccagaaagccaccctcgtgtgcctggctaccggcttctaccccgaccatgtggaactgtcttggtgggtcaacggcaaagaggtgcacagcggcgtgtgtaccgacccccagccactgaaagaacagcccgccctgaacgacagccggtactgcctgagcagcagactgagagtgtccgccaccttctggcagaacccccggaaccacttcagatgccaggtgcagttctacggcctgagcgagaacgacgagtggacccaggacagagccaagcccgtgacccagatcgtgtctgccgaagcctggggcagagccgattgcgacgtgaagctggtggaaaagagcttcgagacagacaccaacctgaacttccagaacctgctggtgatcgtgctgagaatcctgctgctgaaagtggccggctttaacctgctgatgaccctgcggctgtggtccagc

SEQ ID NO: 21371 - DNA, 453 bp, synthetic construct
  source 1..453: mol_type = other DNA
gccaccctcgtgtgcctggctaccggcttctaccccgaccatgtggaactgtcttggtgggtcaacggcaaagaggtgcacagcggcgtgtgtaccgacccccagccactgaaagaacagcccgccctgaacgacagccggtactgcctgagcagcagactgagagtgtccgccaccttctggcagaacccccggaaccacttcagatgccaggtgcagttctacggcctgagcgagaacgacgagtggacccaggacagagccaagcccgtgacccagatcgtgtctgccgaagcctggggcagagccgattgcgacgtgaagctggtggaaaagagcttcgagacagacaccaacctgaacttccagaacctgctggtgatcgtgctgagaatcctgctgctgaaagtggccggctttaacctgctgatgaccctgcggctgtggtccagc

SEQ ID NO: 21372 - DNA, 438 bp, synthetic construct
  source 1..438: mol_type = other DNA
ctggctaccggcttctaccccgaccatgtggaactgtcttggtgggtcaacggcaaagaggtgcacagcggcgtgtgtaccgacccccagccactgaaagaacagcccgccctgaacgacagccggtactgcctgagcagcagactgagagtgtccgccaccttctggcagaacccccggaaccacttcagatgccaggtgcagttctacggcctgagcgagaacgacgagtggacccaggacagagccaagcccgtgacccagatcgtgtctgccgaagcctggggcagagccgattgcgacgtgaagctggtggaaaagagcttcgagacagacaccaacctgaacttccagaacctgctggtgatcgtgctgagaatcctgctgctgaaagtggccggctttaacctgctgatgaccctgcggctgtggtccagc

SEQ ID NO: 21373 - DNA, 519 bp, synthetic construct
  source 1..519: mol_type = other DNA
gacctgaagaacgtgttcccacctgaggtggccgtgttcgagcctagcgaggccgagatcagccacacccagaaagccaccctcgtgtgcctggctaccggcttctaccccgaccatgtggaactgtcttggtgggtcaacggcaaagaggtgcacagcggcgtgtgtaccgacccccagccactgaaagaacagcccgccctgaacgacagccggtactgcctgagcagcagactgagagtgtccgccaccttctggcagaacccccggaaccacttcagatgccaggtgcagttctacggcctgagcgagaacgacgagtggacccaggacagagccaagcccgtgacccagatcgtgtctgccgaagcctggggcagagccgattgcggctttaccagcgagagctaccagcagggcgtgctgagcgccaccaacctgctggtgatcgtgctgagaatcctgctgctgaaagtggccggctttaacctgctgatgaccctgcggctgtggtccagc

SEQ ID NO: 21374 - DNA, 516 bp, synthetic construct
  source 1..516: mol_type = other DNA
ctgaagaacgtgttcccacctgaggtggccgtgttcgagcctagcgaggccgagatcagccacacccagaaagccaccctcgtgtgcctggctaccggcttctaccccgaccatgtggaactgtcttggtgggtcaacggcaaagaggtgcacagcggcgtgtgtaccgacccccagccactgaaagaacagcccgccctgaacgacagccggtactgcctgagcagcagactgagagtgtccgccaccttctggcagaacccccggaaccacttcagatgccaggtgcagttctacggcctgagcgagaacgacgagtggacccaggacagagccaagcccgtgacccagatcgtgtctgccgaagcctggggcagagccgattgcggctttaccagcgagagctaccagcagggcgtgctgagcgccaccaacctgctggtgatcgtgctgagaatcctgctgctgaaagtggccggctttaacctgctgatgaccctgcggctgtggtccagc

SEQ ID NO: 21375 - DNA, 513 bp, synthetic construct
  source 1..513: mol_type = other DNA
aagaacgtgttcccacctgaggtggccgtgttcgagcctagcgaggccgagatcagccacacccagaaagccaccctcgtgtgcctggctaccggcttctaccccgaccatgtggaactgtcttggtgggtcaacggcaaagaggtgcacagcggcgtgtgtaccgacccccagccactgaaagaacagcccgccctgaacgacagccggtactgcctgagcagcagactgagagtgtccgccaccttctggcagaacccccggaaccacttcagatgccaggtgcagttctacggcctgagcgagaacgacgagtggacccaggacagagccaagcccgtgacccagatcgtgtctgccgaagcctggggcagagccgattgcggctttaccagcgagagctaccagcagggcgtgctgagcgccaccaacctgctggtgatcgtgctgagaatcctgctgctgaaagtggccggctttaacctgctgatgaccctgcggctgtggtccagc

SEQ ID NO: 21376 - DNA, 510 bp, synthetic construct
  source 1..510: mol_type = other DNA
aacgtgttcccacctgaggtggccgtgttcgagcctagcgaggccgagatcagccacacccagaaagccaccctcgtgtgcctggctaccggcttctaccccgaccatgtggaactgtcttggtgggtcaacggcaaagaggtgcacagcggcgtgtgtaccgacccccagccactgaaagaacagcccgccctgaacgacagccggtactgcctgagcagcagactgagagtgtccgccaccttctggcagaacccccggaaccacttcagatgccaggtgcagttctacggcctgagcgagaacgacgagtggacccaggacagagccaagcccgtgacccagatcgtgtctgccgaagcctggggcagagccgattgcggctttaccagcgagagctaccagcagggcgtgctgagcgccaccaacctgctggtgatcgtgctgagaatcctgctgctgaaagtggccggctttaacctgctgatgaccctgcggctgtggtccagc

SEQ ID NO: 21377 - DNA, 507 bp, synthetic construct
  source 1..507: mol_type = other DNA
gtgttcccacctgaggtggccgtgttcgagcctagcgaggccgagatcagccacacccagaaagccaccctcgtgtgcctggctaccggcttctaccccgaccatgtggaactgtcttggtgggtcaacggcaaagaggtgcacagcggcgtgtgtaccgacccccagccactgaaagaacagcccgccctgaacgacagccggtactgcctgagcagcagactgagagtgtccgccaccttctggcagaacccccggaaccacttcagatgccaggtgcagttctacggcctgagcgagaacgacgagtggacccaggacagagccaagcccgtgacccagatcgtgtctgccgaagcctggggcagagccgattgcggctttaccagcgagagctaccagcagggcgtgctgagcgccaccaacctgctggtgatcgtgctgagaatcctgctgctgaaagtggccggctttaacctgctgatgaccctgcggctgtggtccagc

SEQ ID NO: 21378 - DNA, 504 bp, synthetic construct
  source 1..504: mol_type = other DNA
ttcccacctgaggtggccgtgttcgagcctagcgaggccgagatcagccacacccagaaagccaccctcgtgtgcctggctaccggcttctaccccgaccatgtggaactgtcttggtgggtcaacggcaaagaggtgcacagcggcgtgtgtaccgacccccagccactgaaagaacagcccgccctgaacgacagccggtactgcctgagcagcagactgagagtgtccgccaccttctggcagaacccccggaaccacttcagatgccaggtgcagttctacggcctgagcgagaacgacgagtggacccaggacagagccaagcccgtgacccagatcgtgtctgccgaagcctggggcagagccgattgcggctttaccagcgagagctaccagcagggcgtgctgagcgccaccaacctgctggtgatcgtgctgagaatcctgctgctgaaagtggccggctttaacctgctgatgaccctgcggctgtggtccagc

SEQ ID NO: 21379 - DNA, 501 bp, synthetic construct
  source 1..501: mol_type = other DNA
ccacctgaggtggccgtgttcgagcctagcgaggccgagatcagccacacccagaaagccaccctcgtgtgcctggctaccggcttctaccccgaccatgtggaactgtcttggtgggtcaacggcaaagaggtgcacagcggcgtgtgtaccgacccccagccactgaaagaacagcccgccctgaacgacagccggtactgcctgagcagcagactgagagtgtccgccaccttctggcagaacccccggaaccacttcagatgccaggtgcagttctacggcctgagcgagaacgacgagtggacccaggacagagccaagcccgtgacccagatcgtgtctgccgaagcctggggcagagccgattgcggctttaccagcgagagctaccagcagggcgtgctgagcgccaccaacctgctggtgatcgtgctgagaatcctgctgctgaaagtggccggctttaacctgctgatgaccctgcggctgtggtccagc

SEQ ID NO: 21380 - DNA, 498 bp, synthetic construct
  source 1..498: mol_type = other DNA
cctgaggtggccgtgttcgagcctagcgaggccgagatcagccacacccagaaagccaccctcgtgtgcctggctaccggcttctaccccgaccatgtggaactgtcttggtgggtcaacggcaaagaggtgcacagcggcgtgtgtaccgacccccagccactgaaagaacagcccgccctgaacgacagccggtactgcctgagcagcagactgagagtgtccgccaccttctggcagaacccccggaaccacttcagatgccaggtgcagttctacggcctgagcgagaacgacgagtggacccaggacagagccaagcccgtgacccagatcgtgtctgccgaagcctggggcagagccgattgcggctttaccagcgagagctaccagcagggcgtgctgagcgccaccaacctgctggtgatcgtgctgagaatcctgctgctgaaagtggccggctttaacctgctgatgaccctgcggctgtggtccagc

SEQ ID NO: 21381 - DNA, 495 bp, synthetic construct
  source 1..495: mol_type = other DNA
gaggtggccgtgttcgagcctagcgaggccgagatcagccacacccagaaagccaccctcgtgtgcctggctaccggcttctaccccgaccatgtggaactgtcttggtgggtcaacggcaaagaggtgcacagcggcgtgtgtaccgacccccagccactgaaagaacagcccgccctgaacgacagccggtactgcctgagcagcagactgagagtgtccgccaccttctggcagaacccccggaaccacttcagatgccaggtgcagttctacggcctgagcgagaacgacgagtggacccaggacagagccaagcccgtgacccagatcgtgtctgccgaagcctggggcagagccgattgcggctttaccagcgagagctaccagcagggcgtgctgagcgccaccaacctgctggtgatcgtgctgagaatcctgctgctgaaagtggccggctttaacctgctgatgaccctgcggctgtggtccagc

SEQ ID NO: 21382 - DNA, 492 bp, synthetic construct
  source 1..492: mol_type = other DNA
gtggccgtgttcgagcctagcgaggccgagatcagccacacccagaaagccaccctcgtgtgcctggctaccggcttctaccccgaccatgtggaactgtcttggtgggtcaacggcaaagaggtgcacagcggcgtgtgtaccgacccccagccactgaaagaacagcccgccctgaacgacagccggtactgcctgagcagcagactgagagtgtccgccaccttctggcagaacccccggaaccacttcagatgccaggtgcagttctacggcctgagcgagaacgacgagtggacccaggacagagccaagcccgtgacccagatcgtgtctgccgaagcctggggcagagccgattgcggctttaccagcgagagctaccagcagggcgtgctgagcgccaccaacctgctggtgatcgtgctgagaatcctgctgctgaaagtggccggctttaacctgctgatgaccctgcggctgtggtccagc

SEQ ID NO: 21383 - DNA, 489 bp, synthetic construct
  source 1..489: mol_type = other DNA
gccgtgttcgagcctagcgaggccgagatcagccacacccagaaagccaccctcgtgtgcctggctaccggcttctaccccgaccatgtggaactgtcttggtgggtcaacggcaaagaggtgcacagcggcgtgtgtaccgacccccagccactgaaagaacagcccgccctgaacgacagccggtactgcctgagcagcagactgagagtgtccgccaccttctggcagaacccccggaaccacttcagatgccaggtgcagttctacggcctgagcgagaacgacgagtggacccaggacagagccaagcccgtgacccagatcgtgtctgccgaagcctggggcagagccgattgcggctttaccagcgagagctaccagcagggcgtgctgagcgccaccaacctgctggtgatcgtgctgagaatcctgctgctgaaagtggccggctttaacctgctgatgaccctgcggctgtggtccagc

SEQ ID NO: 21384 - DNA, 486 bp, synthetic construct
  source 1..486: mol_type = other DNA
gtgttcgagcctagcgaggccgagatcagccacacccagaaagccaccctcgtgtgcctggctaccggcttctaccccgaccatgtggaactgtcttggtgggtcaacggcaaagaggtgcacagcggcgtgtgtaccgacccccagccactgaaagaacagcccgccctgaacgacagccggtactgcctgagcagcagactgagagtgtccgccaccttctggcagaacccccggaaccacttcagatgccaggtgcagttctacggcctgagcgagaacgacgagtggacccaggacagagccaagcccgtgacccagatcgtgtctgccgaagcctggggcagagccgattgcggctttaccagcgagagctaccagcagggcgtgctgagcgccaccaacctgctggtgatcgtgctgagaatcctgctgctgaaagtggccggctttaacctgctgatgaccctgcggctgtggtccagc

SEQ ID NO: 21385 - DNA, 483 bp, synthetic construct
  source 1..483: mol_type = other DNA
ttcgagcctagcgaggccgagatcagccacacccagaaagccaccctcgtgtgcctggctaccggcttctaccccgaccatgtggaactgtcttggtgggtcaacggcaaagaggtgcacagcggcgtgtgtaccgacccccagccactgaaagaacagcccgccctgaacgacagccggtactgcctgagcagcagactgagagtgtccgccaccttctggcagaacccccggaaccacttcagatgccaggtgcagttctacggcctgagcgagaacgacgagtggacccaggacagagccaagcccgtgacccagatcgtgtctgccgaagcctggggcagagccgattgcggctttaccagcgagagctaccagcagggcgtgctgagcgccaccaacctgctggtgatcgtgctgagaatcctgctgctgaaagtggccggctttaacctgctgatgaccctgcggctgtggtccagc

SEQ ID NO: 21386 - DNA, 480 bp, synthetic construct
  source 1..480: mol_type = other DNA
gagcctagcgaggccgagatcagccacacccagaaagccaccctcgtgtgcctggctaccggcttctaccccgaccatgtggaactgtcttggtgggtcaacggcaaagaggtgcacagcggcgtgtgtaccgacccccagccactgaaagaacagcccgccctgaacgacagccggtactgcctgagcagcagactgagagtgtccgccaccttctggcagaacccccggaaccacttcagatgccaggtgcagttctacggcctgagcgagaacgacgagtggacccaggacagagccaagcccgtgacccagatcgtgtctgccgaagcctggggcagagccgattgcggctttaccagcgagagctaccagcagggcgtgctgagcgccaccaacctgctggtgatcgtgctgagaatcctgctgctgaaagtggccggctttaacctgctgatgaccctgcggctgtggtccagc

SEQ ID NO: 21387 - DNA, 477 bp, synthetic construct
  source 1..477: mol_type = other DNA
cctagcgaggccgagatcagccacacccagaaagccaccctcgtgtgcctggctaccggcttctaccccgaccatgtggaactgtcttggtgggtcaacggcaaagaggtgcacagcggcgtgtgtaccgacccccagccactgaaagaacagcccgccctgaacgacagccggtactgcctgagcagcagactgagagtgtccgccaccttctggcagaacccccggaaccacttcagatgccaggtgcagttctacggcctgagcgagaacgacgagtggacccaggacagagccaagcccgtgacccagatcgtgtctgccgaagcctggggcagagccgattgcggctttaccagcgagagctaccagcagggcgtgctgagcgccaccaacctgctggtgatcgtgctgagaatcctgctgctgaaagtggccggctttaacctgctgatgaccctgcggctgtggtccagc

SEQ ID NO: 21388 - DNA, 474 bp, synthetic construct
  source 1..474: mol_type = other DNA
agcgaggccgagatcagccacacccagaaagccaccctcgtgtgcctggctaccggcttctaccccgaccatgtggaactgtcttggtgggtcaacggcaaagaggtgcacagcggcgtgtgtaccgacccccagccactgaaagaacagcccgccctgaacgacagccggtactgcctgagcagcagactgagagtgtccgccaccttctggcagaacccccggaaccacttcagatgccaggtgcagttctacggcctgagcgagaacgacgagtggacccaggacagagccaagcccgtgacccagatcgtgtctgccgaagcctggggcagagccgattgcggctttaccagcgagagctaccagcagggcgtgctgagcgccaccaacctgctggtgatcgtgctgagaatcctgctgctgaaagtggccggctttaacctgctgatgaccctgcggctgtggtccagc

SEQ ID NO: 21389 - DNA, 471 bp, synthetic construct
  source 1..471: mol_type = other DNA
gaggccgagatcagccacacccagaaagccaccctcgtgtgcctggctaccggcttctaccccgaccatgtggaactgtcttggtgggtcaacggcaaagaggtgcacagcggcgtgtgtaccgacccccagccactgaaagaacagcccgccctgaacgacagccggtactgcctgagcagcagactgagagtgtccgccaccttctggcagaacccccggaaccacttcagatgccaggtgcagttctacggcctgagcgagaacgacgagtggacccaggacagagccaagcccgtgacccagatcgtgtctgccgaagcctggggcagagccgattgcggctttaccagcgagagctaccagcagggcgtgctgagcgccaccaacctgctggtgatcgtgctgagaatcctgctgctgaaagtggccggctttaacctgctgatgaccctgcggctgtggtccagc

SEQ ID NO: 21390 - DNA, 468 bp, synthetic construct
  source 1..468: mol_type = other DNA
gccgagatcagccacacccagaaagccaccctcgtgtgcctggctaccggcttctaccccgaccatgtggaactgtcttggtgggtcaacggcaaagaggtgcacagcggcgtgtgtaccgacccccagccactgaaagaacagcccgccctgaacgacagccggtactgcctgagcagcagactgagagtgtccgccaccttctggcagaacccccggaaccacttcagatgccaggtgcagttctacggcctgagcgagaacgacgagtggacccaggacagagccaagcccgtgacccagatcgtgtctgccgaagcctggggcagagccgattgcggctttaccagcgagagctaccagcagggcgtgctgagcgccaccaacctgctggtgatcgtgctgagaatcctgctgctgaaagtggccggctttaacctgctgatgaccctgcggctgtggtccagc

SEQ ID NO: 21391 - DNA, 465 bp, synthetic construct
  source 1..465: mol_type = other DNA
gagatcagccacacccagaaagccaccctcgtgtgcctggctaccggcttctaccccgaccatgtggaactgtcttggtgggtcaacggcaaagaggtgcacagcggcgtgtgtaccgacccccagccactgaaagaacagcccgccctgaacgacagccggtactgcctgagcagcagactgagagtgtccgccaccttctggcagaacccccggaaccacttcagatgccaggtgcagttctacggcctgagcgagaacgacgagtggacccaggacagagccaagcccgtgacccagatcgtgtctgccgaagcctggggcagagccgattgcggctttaccagcgagagctaccagcagggcgtgctgagcgccaccaacctgctggtgatcgtgctgagaatcctgctgctgaaagtggccggctttaacctgctgatgaccctgcggctgtggtccagc

SEQ ID NO: 21392 - DNA, 462 bp, synthetic construct
  source 1..462: mol_type = other DNA
atcagccacacccagaaagccaccctcgtgtgcctggctaccggcttctaccccgaccatgtggaactgtcttggtgggtcaacggcaaagaggtgcacagcggcgtgtgtaccgacccccagccactgaaagaacagcccgccctgaacgacagccggtactgcctgagcagcagactgagagtgtccgccaccttctggcagaacccccggaaccacttcagatgccaggtgcagttctacggcctgagcgagaacgacgagtggacccaggacagagccaagcccgtgacccagatcgtgtctgccgaagcctggggcagagccgattgcggctttaccagcgagagctaccagcagggcgtgctgagcgccaccaacctgctggtgatcgtgctgagaatcctgctgctgaaagtggccggctttaacctgctgatgaccctgcggctgtggtccagc

SEQ ID NO: 21393 - DNA, 459 bp, synthetic construct
  source 1..459: mol_type = other DNA
agccacacccagaaagccaccctcgtgtgcctggctaccggcttctaccccgaccatgtggaactgtcttggtgggtcaacggcaaagaggtgcacagcggcgtgtgtaccgacccccagccactgaaagaacagcccgccctgaacgacagccggtactgcctgagcagcagactgagagtgtccgccaccttctggcagaacccccggaaccacttcagatgccaggtgcagttctacggcctgagcgagaacgacgagtggacccaggacagagccaagcccgtgacccagatcgtgtctgccgaagcctggggcagagccgattgcggctttaccagcgagagctaccagcagggcgtgctgagcgccaccaacctgctggtgatcgtgctgagaatcctgctgctgaaagtggccggctttaacctgctgatgaccctgcggctgtggtccagc

SEQ ID NO: 21394 - DNA, 444 bp, synthetic construct
  source 1..444: mol_type = other DNA
gccaccctcgtgtgcctggctaccggcttctaccccgaccatgtggaactgtcttggtgggtcaacggcaaagaggtgcacagcggcgtgtgtaccgacccccagccactgaaagaacagcccgccctgaacgacagccggtactgcctgagcagcagactgagagtgtccgccaccttctggcagaacccccggaaccacttcagatgccaggtgcagttctacggcctgagcgagaacgacgagtggacccaggacagagccaagcccgtgacccagatcgtgtctgccgaagcctggggcagagccgattgcggctttaccagcgagagctaccagcagggcgtgctgagcgccaccaacctgctggtgatcgtgctgagaatcctgctgctgaaagtggccggctttaacctgctgatgaccctgcggctgtggtccagc

SEQ ID NO: 21395 - DNA, 429 bp, synthetic construct
  source 1..429: mol_type = other DNA
ctggctaccggcttctaccccgaccatgtggaactgtcttggtgggtcaacggcaaagaggtgcacagcggcgtgtgtaccgacccccagccactgaaagaacagcccgccctgaacgacagccggtactgcctgagcagcagactgagagtgtccgccaccttctggcagaacccccggaaccacttcagatgccaggtgcagttctacggcctgagcgagaacgacgagtggacccaggacagagccaagcccgtgacccagatcgtgtctgccgaagcctggggcagagccgattgcggctttaccagcgagagctaccagcagggcgtgctgagcgccaccaacctgctggtgatcgtgctgagaatcctgctgctgaaagtggccggctttaacctgctgatgaccctgcggctgtggtccagc

SEQ ID NO: 21396 - DNA, 399 bp, synthetic construct
  source 1..399: mol_type = other DNA
atccagaaccctgatcctgccgtgtaccagctgcgggatagcaagagcagcgacaagagcgtgtgtctgttcaccgacttcgacagccagaccaacgtgtcccagagcaaggactccgacgtgtacatcaccgataagaccgtgctggacatgcggagcatggacttcaagagcaactccgccgtggcctggtccaacaagtccgatttcgcctgcgccaacgccttcaacaacagcattggcagagccgattgcggctttaccagcgagagctaccagcagggcgtgctgagcgccaccatcctgtacgagatcctgctgggcaaggccaccctgtacgccgtgctggtgtctgccctggtgctgatggctatggtcaagcggaaggacagccgggga

SEQ ID NO: 21397 - DNA, 393 bp, synthetic construct
  source 1..393: mol_type = other DNA
atccagaaccctgatcctgccgtgtaccagctgcgggatagcaagagcagcgacaagagcgtgtgtctgttcaccgacttcgacagccagaccaacgtgtcccagagcaaggactccgacgtgtacatcaccgataagaccgtgctggacatgcggagcatggacttcaagagcaactccgccgtggcctggtccaacaagtccgatttcgcctgcgccaacgccttcaacaacagcattgccgattgcggctttaccagcgagagctaccagcagggcgtgctgagcgccaccatcctgtacgagatcctgctgggcaaggccaccctgtacgccgtgctggtgtctgccctggtgctgatggctatggtcaagcggaaggacagccgggga

SEQ ID NO: 21398 - DNA, 423 bp, synthetic construct
  source 1..423: mol_type = other DNA
atccagaaccctgatcctgccgtgtaccagctgcgggatagcaagagcagcgacaagagcgtgtgtctgttcaccgacttcgacagccagaccaacgtgtcccagagcaaggactccgacgtgtacatcaccgataagaccgtgctggacatgcggagcatggacttcaagagcaactccgccgtggcctggtccaacaagtccgatttcgcctgcgccaacgccttcaacaacagcattcagatcgtgtctgccgaagcctggggcagagccgattgcggctttaccagcgagagctaccagcagggcgtgctgagcgccaccatcctgtacgagatcctgctgggcaaggccaccctgtacgccgtgctggtgtctgccctggtgctgatggctatggtcaagcggaaggacagccgggga

SEQ ID NO: 21399 - DNA, 447 bp, synthetic construct
  source 1..447: mol_type = other DNA
atccagaaccctgatcctgccgtgtaccagctgcgggatagcaagagcagcgacaagagcgtgtgtctgttcaccgacttcgacagccagaccaacgtgtcccagagcaaggactccgacgtgtacatcaccgataagaccgtgctggacatgcggagcatggacttcaagagcaactccgccgtggcctggtccaacaagtccgatttcgcctgcgccaacgccttcaacaacagcattttcccacccatcaagaccgatgtgattacaatggaccccaaggacaactgctccaaggacgccaacgataccctgctgctccagctgaccaacaccagcgcctactacatgtacttgttgctgctgctgaagtccgtggtgtacttcgccatcatcacatgctgcctgctgcggagaaccgccttctgctgcaacggcgagaagtct

SEQ ID NO: 21400 - DNA, 441 bp, synthetic construct
  source 1..441: mol_type = other DNA
atccagaaccctgatcctgccgtgtaccagctgcgggatagcaagagcagcgacaagagcgtgtgtctgttcaccgacttcgacagccagaccaacgtgtcccagagcaaggactccgacgtgtacatcaccgataagaccgtgctggacatgcggagcatggacttcaagagcaactccgccgtggcctggtccaacaagtccgatttcgcctgcgccaacgccttcaacaacagcattcccatcaagaccgatgtgattacaatggaccccaaggacaactgctccaaggacgccaacgataccctgctgctccagctgaccaacaccagcgcctactacatgtacttgttgctgctgctgaagtccgtggtgtacttcgccatcatcacatgctgcctgctgcggagaaccgccttctgctgcaacggcgagaagtct

SEQ ID NO: 21401 - DNA, 417 bp, synthetic construct
  source 1..417: mol_type = other DNA
atccagaaccctgatcctgccgtgtaccagctgcgggatagcaagagcagcgacaagagcgtgtgtctgttcaccgacttcgacagccagaccaacgtgtcccagagcaaggactccgacgtgtacatcaccgataagaccgtgctggacatgcggagcatggacttcaagagcaactccgccgtggcctggtccaacaagtccgatttcgcctgcgccaacgccttcaacaacagcattatggaccccaaggacaactgctccaaggacgccaacgataccctgctgctccagctgaccaacaccagcgcctactacatgtacttgttgctgctgctgaagtccgtggtgtacttcgccatcatcacatgctgcctgctgcggagaaccgccttctgctgcaacggcgagaagtct

SEQ ID NO: 21402 - DNA, 441 bp, synthetic construct; identical to SEQ ID NO: 21400
  source 1..441: mol_type = other DNA

SEQ ID NO: 21403 - DNA, 399 bp, synthetic construct
  source 1..399: mol_type = other DNA
atccagaaccctgatcctgccgtgtaccagctgcgggatagcaagagcagcgacaagagcgtgtgtctgttcaccgacttcgacagccagaccaacgtgtcccagagcaaggactccgacgtgtacatcaccgataagaccgtgctggacatgcggagcatggacttcaagagcaactccgccgtggcctggtccaacaagtccgatttcgcctgcgccaacgccttcaacaacagcatttgctccaaggacgccaacgataccctgctgctccagctgaccaacaccagcgcctactacatgtacttgttgctgctgctgaagtccgtggtgtacttcgccatcatcacatgctgcctgctgcggagaaccgccttctgctgcaacggcgagaagtct

SEQ ID NO: 21404 - DNA, 444 bp, synthetic construct
  source 1..444: mol_type = other DNA
atccagaaccctgatcctgccgtgtaccagctgcgggatagcaagagcagcgacaagagcgtgtgtctgttcaccgacttcgacagccagaccaacgtgtcccagagcaaggactccgacgtgtacatcaccgataagaccgtgctggacatgcggagcatggacttcaagagcaactccgccgtggcctggtccaacaagtccgatttcgcctgcgccaacgccttcaacaacagcattgaagtgaaaaccgactccaccgaccacgtgaagcccaaagagacagagaacaccaagcagcccagcaagagctgccacaagcccaaggccatcgtgcacaccgagaaagtgaacatgatgagcctgaccgtgctgggcctgcggatgctgttcgccaaaaccgtggccgtgaacttcctgctgaccgccaagctgttcttcctc

SEQ ID NO: 21405 - DNA, 423 bp, synthetic construct
  source 1..423: mol_type = other DNA
atccagaaccctgatcctgccgtgtaccagctgcgggatagcaagagcagcgacaagagcgtgtgtctgttcaccgacttcgacagccagaccaacgtgtcccagagcaaggactccgacgtgtacatcaccgataagaccgtgctggacatgcggagcatggacttcaagagcaactccgccgtggcctggtccaacaagtccgatttcgcctgcgccaacgccttcaacaacagcattgaccacgtgaagcccaaagagacagagaacaccaagcagcccagcaagagctgccacaagcccaaggccatcgtgcacaccgagaaagtgaacatgatgagcctgaccgtgctgggcctgcggatgctgttcgccaaaaccgtggccgtgaacttcctgctgaccgccaagctgttcttcctc

SEQ ID NO: 21406 - DNA, 429 bp, synthetic construct
  source 1..429: mol_type = other DNA
atccagaaccctgatcctgccgtgtaccagctgcgggatagcaagagcagcgacaagagcgtgtgtctgttcaccgacttcgacagccagaccaacgtgtcccagagcaaggactccgacgtgtacatcaccgataagaccgtgctggacatgcggagcatggacttcaagagcaactccgccgtggcctggtccaacaagtccgatttcgcctgcgccaacgccttcaacaacagcattatccccgaggacacattcttcccaagccccggcagagccgattgcggctttaccagcgagagctaccagcagggcgtgctgagcgccaccatcctgtacgagatcctgctgggcaaggccaccctgtacgccgtgctggtgtctgccctggtgctgatggctatggtcaagcggaaggacagccgggga

SEQ ID NO: 21407 - DNA, 423 bp, synthetic construct
  source 1..423: mol_type = other DNA
atccagaaccctgatcctgccgtgtaccagctgcgggatagcaagagcagcgacaagagcgtgtgtctgttcaccgacttcgacagccagaccaacgtgtcccagagcaaggactccgacgtgtacatcaccgataagaccgtgctggacatgcggagcatggacttcaagagcaactccgccgtggcctggtccaacaagtccgatttcgcctgcgccaacgccttcaacaacagcattatccccgaggacacattcttcccaagccccgccgattgcggctttaccagcgagagctaccagcagggcgtgctgagcgccaccatcctgtacgagatcctgctgggcaaggccaccctgtacgccgtgctggtgtctgccctggtgctgatggctatggtcaagcggaaggacagccgggga

SEQ ID NO: 21408 - DNA, 453 bp, synthetic construct
  source 1..453: mol_type = other DNA
atccagaaccctgatcctgccgtgtaccagctgcgggatagcaagagcagcgacaagagcgtgtgtctgttcaccgacttcgacagccagaccaacgtgtcccagagcaaggactccgacgtgtacatcaccgataagaccgtgctggacatgcggagcatggacttcaagagcaactccgccgtggcctggtccaacaagtccgatttcgcctgcgccaacgccttcaacaacagcattatccccgaggacacattcttcccaagcccccagatcgtgtctgccgaagcctggggcagagccgattgcggctttaccagcgagagctaccagcagggcgtgctgagcgccaccatcctgtacgagatcctgctgggcaaggccaccctgtacgccgtgctggtgtctgccctggtgctgatggctatggtcaagcggaaggacagccgggga

SEQ ID NO: 21409 - DNA, 477 bp, synthetic construct
  source 1..477: mol_type = other DNA
atccagaaccctgatcctgccgtgtaccagctgcgggatagcaagagcagcgacaagagcgtgtgtctgttcaccgacttcgacagccagaccaacgtgtcccagagcaaggactccgacgtgtacatcaccgataagaccgtgctggacatgcggagcatggacttcaagagcaactccgccgtggcctggtccaacaagtccgatttcgcctgcgccaacgccttcaacaacagcattatccccgaggacacattcttcccaagccccttcccacccatcaagaccgatgtgattacaatggaccccaaggacaactgctccaaggacgccaacgataccctgctgctccagctgaccaacaccagcgcctactacatgtacttgttgctgctgctgaagtccgtggtgtacttcgccatcatcacatgctgcctgctgcggagaaccgccttctgctgcaacggcgagaagtct

SEQ ID NO: 21410 - DNA, 471 bp, synthetic construct
  source 1..471: mol_type = other DNA
atccagaaccctgatcctgccgtgtaccagctgcgggatagcaagagcagcgacaagagcgtgtgtctgttcaccgacttcgacagccagaccaacgtgtcccagagcaaggactccgacgtgtacatcaccgataagaccgtgctggacatgcggagcatggacttcaagagcaactccgccgtggcctggtccaacaagtccgatttcgcctgcgccaacgccttcaacaacagcattatccccgaggacacattcttcccaagcccccccatcaagaccgatgtgattacaatggaccccaaggacaactgctccaaggacgccaacgataccctgctgctccagctgaccaacaccagcgcctactacatgtacttgttgctgctgctgaagtccgtggtgtacttcgccatcatcacatgctgcctgctgcggagaaccgccttctgctgcaacggcgagaagtct

SEQ ID NO: 21411 - DNA, 447 bp, synthetic construct
  source 1..447: mol_type = other DNA
atccagaaccctgatcctgccgtgtaccagctgcgggatagcaagagcagcgacaagagcgtgtgtctgttcaccgacttcgacagccagaccaacgtgtcccagagcaaggactccgacgtgtacatcaccgataagaccgtgctggacatgcggagcatggacttcaagagcaactccgccgtggcctggtccaacaagtccgatttcgcctgcgccaacgccttcaacaacagcattatccccgaggacacattcttcccaagccccatggaccccaaggacaactgctccaaggacgccaacgataccctgctgctccagctgaccaacaccagcgcctactacatgtacttgttgctgctgctgaagtccgtggtgtacttcgccatcatcacatgctgcctgctgcggagaaccgccttctgctgcaacggcgagaagtct

SEQ ID NO: 21412 - DNA, 471 bp, synthetic construct; identical to SEQ ID NO: 21410
  source 1..471: mol_type = other DNA

SEQ ID NO: 21413 - DNA, 429 bp, synthetic construct
  source 1..429: mol_type = other DNA
atccagaaccctgatcctgccgtgtaccagctgcgggatagcaagagcagcgacaagagcgtgtgtctgttcaccgacttcgacagccagaccaacgtgtcccagagcaaggactccgacgtgtacatcaccgataagaccgtgctggacatgcggagcatggacttcaagagcaactccgccgtggcctggtccaacaagtccgatttcgcctgcgccaacgccttcaacaacagcattatccccgaggacacattcttcccaagcccctgctccaaggacgccaacgataccctgctgctccagctgaccaacaccagcgcctactacatgtacttgttgctgctgctgaagtccgtggtgtacttcgccatcatcacatgctgcctgctgcggagaaccgccttctgctgcaacggcgagaagtct

SEQ ID NO: 21414 - DNA, 474 bp, synthetic construct
  source 1..474: mol_type = other DNA
atccagaaccctgatcctgccgtgtaccagctgcgggatagcaagagcagcgacaagagcgtgtgtctgttcaccgacttcgacagccagaccaacgtgtcccagagcaaggactccgacgtgtacatcaccgataagaccgtgctggacatgcggagcatggacttcaagagcaactccgccgtggcctggtccaacaagtccgatttcgcctgcgccaacgccttcaacaacagcattatccccgaggacacattcttcccaagccccgaagtgaaaaccgactccaccgaccacgtgaagcccaaagagacagagaacaccaagcagcccagcaagagctgccacaagcccaaggccatcgtgcacaccgagaaagtgaacatgatgagcctgaccgtgctgggcctgcggatgctgttcgccaaaaccgtggccgtgaacttcctgctgaccgccaagctgttcttcctc

SEQ ID NO: 21415 - DNA, 453 bp, synthetic construct
  source 1..453: mol_type = other DNA
atccagaaccctgatcctgccgtgtaccagctgcgggatagcaagagcagcgacaagagcgtgtgtctgttcaccgacttcgacagccagaccaacgtgtcccagagcaaggactccgacgtgtacatcaccgataagaccgtgctggacatgcggagcatggacttcaagagcaactccgccgtggcctggtccaacaagtccgatttcgcctgcgccaacgccttcaacaacagcattatccccgaggacacattcttcccaagccccgaccacgtgaagcccaaagagacagagaacaccaagcagcccagcaagagctgccacaagcccaaggccatcgtgcacaccgagaaagtgaacatgatgagcctgaccgtgctgggcctgcggatgctgttcgccaaaaccgtggccgtgaacttcctgctgaccgccaagctgttcttcctc

SEQ ID NO: 21416 - DNA, 441 bp, synthetic construct
  source 1..441: mol_type = other DNA
atccagaaccctgatcctgccgtgtaccagctgcgggatagcaagagcagcgacaagagcgtgtgtctgttcaccgacttcgacagccagaccaacgtgtcccagagcaaggactccgacgtgtacatcaccgataagaccgtgctggacatgcggagcatggacttcaagagcaactccgccgtggcctggtccaacaagtccgatttcgcctgcgccaacgccttcaacaacagcattatccccgaggacacattcttcccaagccccgagagcagctgcggcagagccgattgcggctttaccagcgagagctaccagcagggcgtgctgagcgccaccatcctgtacgagatcctgctgggcaaggccaccctgtacgccgtgctggtgtctgccctggtgctgatggctatggtcaagcggaaggacagccgggga

SEQ ID NO: 21417 - DNA, 435 bp, synthetic construct
  source 1..435: mol_type = other DNA
atccagaaccctgatcctgccgtgtaccagctgcgggatagcaagagcagcgacaagagcgtgtgtctgttcaccgacttcgacagccagaccaacgtgtcccagagcaaggactccgacgtgtacatcaccgataagaccgtgctggacatgcggagcatggacttcaagagcaactccgccgtggcctggtccaacaagtccgatttcgcctgcgccaacgccttcaacaacagcattatccccgaggacacattcttcccaagccccgagagcagctgcgccgattgcggctttaccagcgagagctaccagcagggcgtgctgagcgccaccatcctgtacgagatcctgctgggcaaggccaccctgtacgccgtgctggtgtctgccctggtgctgatggctatggtcaagcggaaggacagccgggga

SEQ ID NO: 21418 - DNA, 465 bp, synthetic construct
  source 1..465: mol_type = other DNA
atccagaaccctgatcctgccgtgtaccagctgcgggatagcaagagcagcgacaagagcgtgtgtctgttcaccgacttcgacagccagaccaacgtgtcccagagcaaggactccgacgtgtacatcaccgataagaccgtgctggacatgcggagcatggacttcaagagcaactccgccgtggcctggtccaacaagtccgatttcgcctgcgccaacgccttcaacaacagcattatccccgaggacacattcttcccaagccccgagagcagctgccagatcgtgtctgccgaagcctggggcagagccgattgcggctttaccagcgagagctaccagcagggcgtgctgagcgccaccatcctgtacgagatcctgctgggcaaggccaccctgtacgccgtgctggtgtctgccctggtgctgatggctatggtcaagcggaaggacagccgggga

SEQ ID NO: 21419 - DNA, 489 bp, synthetic construct
  source 1..489: mol_type = other DNA
atccagaaccctgatcctgccgtgtaccagctgcgggatagcaagagcagcgacaagagcgtgtgtctgttcaccgacttcgacagccagaccaacgtgtcccagagcaaggactccgacgtgtacatcaccgataagaccgtgctggacatgcggagcatggacttcaagagcaactccgccgtggcctggtccaacaagtccgatttcgcctgcgccaacgccttcaacaacagcattatccccgaggacacattcttcccaagccccgagagcagctgcttcccacccatcaagaccgatgtgattacaatggaccccaaggacaactgctccaaggacgccaacgataccctgctgctccagctgaccaacaccagcgcctactacatgtacttgttgctgctgctgaagtccgtggtgtacttcgccatcatcacatgctgcctgctgcggagaaccgccttctgctgcaacggcgagaagtct

SEQ ID NO: 21420 - DNA, 483 bp, synthetic construct
  source 1..483: mol_type = other DNA
atccagaaccctgatcctgccgtgtaccagctgcgggatagcaagagcagcgacaagagcgtgtgtctgttcaccgacttcgacagccagaccaacgtgtcccagagcaaggactccgacgtgtacatcaccgataagaccgtgctggacatgcggagcatggacttcaagagcaactccgccgtggcctggtccaacaagtccgatttcgcctgcgccaacgccttcaacaacagcattatccccgaggacacattcttcccaagccccgagagcagctgccccatcaagaccgatgtgattacaatggaccccaaggacaactgctccaaggacgccaacgataccctgctgctccagctgaccaacaccagcgcctactacatgtacttgttgctgctgctgaagtccgtggtgtacttcgccatcatcacatgctgcctgctgcggagaaccgccttctgctgcaacggcgagaagtct

SEQ ID NO: 21421 - DNA, 459 bp, synthetic construct
  source 1..459: mol_type = other DNA
atccagaaccctgatcctgccgtgtaccagctgcgggatagcaagagcagcgacaagagcgtgtgtctgttcaccgacttcgacagccagaccaacgtgtcccagagcaaggactccgacgtgtacatcaccgataagaccgtgctggacatgcggagcatggacttcaagagcaactccgccgtggcctggtccaacaagtccgatttcgcctgcgccaacgccttcaacaacagcattatccccgaggacacattcttcccaagccccgagagcagctgcatggaccccaaggacaactgctccaaggacgccaacgataccctgctgctccagctgaccaacaccagcgcctactacatgtacttgttgctgctgctgaagtccgtggtgtacttcgccatcatcacatgctgcctgctgcggagaaccgccttctgctgcaacggcgagaagtct

SEQ ID NO: 21422 - DNA, 483 bp, synthetic construct; identical to SEQ ID NO: 21420
  source 1..483: mol_type = other DNA

SEQ ID NO: 21423 - DNA, 441 bp, synthetic construct
  source 1..441: mol_type = other DNA
atccagaaccctgatcctgccgtgtaccagctgcgggatagcaagagcagcgacaagagcgtgtgtctgttcaccgacttcgacagccagaccaacgtgtcccagagcaaggactccgacgtgtacatcaccgataagaccgtgctggacatgcggagcatggacttcaagagcaactccgccgtggcctggtccaacaagtccgatttcgcctgcgccaacgccttcaacaacagcattatccccgaggacacattcttcccaagccccgagagcagctgctgctccaaggacgccaacgataccctgctgctccagctgaccaacaccagcgcctactacatgtacttgttgctgctgctgaagtccgtggtgtacttcgccatcatcacatgctgcctgctgcggagaaccgccttctgctgcaacggcgagaagtct

SEQ ID NO: 21424 - DNA, 486 bp, synthetic construct
  source 1..486: mol_type = other DNA
atccagaaccctgatcctgccgtgtaccagctgcgggatagcaagagcagcgacaagagcgtgtgtctgttcaccgacttcgacagccagaccaacgtgtcccagagcaaggactccgacgtgtacatcaccgataagaccgtgctggacatgcggagcatggacttcaagagcaactccgccgtggcctggtccaacaagtccgatttcgcctgcgccaacgccttcaacaacagcattatccccgaggacacattcttcccaagccccgagagcagctgcgaagtgaaaaccgactccaccgaccacgtgaagcccaaagagacagagaacaccaagcagcccagcaagagctgccacaagcccaaggccatcgtgcacaccgagaaagtgaacatgatgagcctgaccgtgctgggcctgcggatgctgttcgccaaaaccgtggccgtgaacttcctgctgaccgccaagctgttcttcctc

SEQ ID NO: 21425 - DNA, 465 bp, synthetic construct
  source 1..465: mol_type = other DNA
atccagaaccctgatcctgccgtgtaccagctgcgggatagcaagagcagcgacaagagcgtgtgtctgttcaccgacttcgacagccagaccaacgtgtcccagagcaaggactccgacgtgtacatcaccgataagaccgtgctggacatgcggagcatggacttcaagagcaactccgccgtggcctggtccaacaagtccgatttcgcctgcgccaacgccttcaacaacagcattatccccgaggacacattcttcccaagccccgagagcagctgcgaccacgtgaagcccaaagagacagagaacaccaagcagcccagcaagagctgccacaagcccaaggccatcgtgcacaccgagaaagtgaacatgatgagcctgaccgtgctgggcctgcggatgctgttcgccaaaaccgtggccgtgaacttcctgctgaccgccaagctgttcttcctc

SEQ ID NO: 21426 - DNA, 402 bp, synthetic construct
  source 1..402: mol_type = other DNA
atccagaaccctgatcctgccgtgtaccagctgcgggatagcaagagcagcgacaagagcgtgtgtctgttcaccgacttcgacagccagaccaacgtgtcccagagcaaggactccgacgtgtacatcaccgataagaccgtgctggacatgcggagcatggacttcaagagcaactccgccgtggcctggtccaacaagtccgatttcgcctgcgccaacgccttcaacaacagcattatcggcagagccgattgcggctttaccagcgagagctaccagcagggcgtgctgagcgccaccatcctgtacgagatcctgctgggcaaggccaccctgtacgccgtgctggtgtctgccctggtgctgatggctatggtcaagcggaaggacagccgggga

SEQ ID NO: 21427 - DNA, 396 bp, synthetic construct
  source 1..396: mol_type = other DNA
atccagaaccctgatcctgccgtgtaccagctgcgggatagcaagagcagcgacaagagcgtgtgtctgttcaccgacttcgacagccagaccaacgtgtcccagagcaaggactccgacgtgtacatcaccgataagaccgtgctggacatgcggagcatggacttcaagagcaactccgccgtggcctggtccaacaagtccgatttcgcctgcgccaacgccttcaacaacagcattatcgccgattgcggctttaccagcgagagctaccagcagggcgtgctgagcgccaccatcctgtacgagatcctgctgggcaaggccaccctgtacgccgtgctggtgtctgccctggtgctgatggctatggtcaagcggaaggacagccgggga

SEQ ID NO: 21428 - DNA, 426 bp, synthetic construct
  source 1..426: mol_type = other DNA
atccagaaccctgatcctgccgtgtaccagctgcgggatagcaagagcagcgacaagagcgtgtgtctgttcaccgacttcgacagccagaccaacgtgtcccagagcaaggactccgacgtgtacatcaccgataagaccgtgctggacatgcggagcatggacttcaagagcaactccgccgtggcctggtccaacaagtccgatttcgcctgcgccaacgccttcaacaacagcattatccagatcgtgtctgccgaagcctggggcagagccgattgcggctttaccagcgagagctaccagcagggcgtgctgagcgccaccatcctgtacgagatcctgctgggcaaggccaccctgtacgccgtgctggtgtctgccctggtgctgatggctatggtcaagcggaaggacagccgggga

SEQ ID NO: 21429 - DNA, 450 bp, synthetic construct
  source 1..450: mol_type = other DNA
atccagaaccctgatcctgccgtgtaccagctgcgggatagcaagagcagcgacaagagcgtgtgtctgttcaccgacttcgacagccagaccaacgtgtcccagagcaaggactccgacgtgtacatcaccgataagaccgtgctggacatgcggagcatggacttcaagagcaactccgccgtggcctggtccaacaagtccgatttcgcctgcgccaacgccttcaacaacagcattatcttcccacccatcaagaccgatgtgattacaatggaccccaaggacaactgctccaaggacgccaacgataccctgctgctccagctgaccaacaccagcgcctactacatgtacttgttgctgctgctgaagtccgtggtgtacttcgccatcatcacatgctgcctgctgcggagaaccgccttctgctgcaacggcgagaagtct

SEQ ID NO: 21430 - DNA, 444 bp, synthetic construct
  source 1..444: mol_type = other DNA
atccagaaccctgatcctgccgtgtaccagctgcgggatagcaagagcagcgacaagagcgtgtgtctgttcaccgacttcgacagccagaccaacgtgtcccagagcaaggactccgacgtgtacatcaccgataagaccgtgctggacatgcggagcatggacttcaagagcaactccgccgtggcctggtccaacaagtccgatttcgcctgcgccaacgccttcaacaacagcattatccccatcaagaccgatgtgattacaatggaccccaaggacaactgctccaaggacgccaacgataccctgctgctccagctgaccaacaccagcgcctactacatgtacttgttgctgctgctgaagtccgtggtgtacttcgccatcatcacatgctgcctgctgcggagaaccgccttctgctgcaacggcgagaagtct

SEQ ID NO: 21431 - DNA, 420 bp, synthetic construct
  source 1..420: mol_type = other DNA
atccagaaccctgatcctgccgtgtaccagctgcgggatagcaagagcagcgacaagagcgtgtgtctgttcaccgacttcgacagccagaccaacgtgtcccagagcaaggactccgacgtgtacatcaccgataagaccgtgctggacatgcggagcatggacttcaagagcaactccgccgtggcctggtccaacaagtccgatttcgcctgcgccaacgccttcaacaacagcattatcatggaccccaaggacaactgctccaaggacgccaacgataccctgctgctccagctgaccaacaccagcgcctactacatgtacttgttgctgctgctgaagtccgtggtgtacttcgccatcatcacatgctgcctgctgcggagaaccgccttctgctgcaacggcgagaagtct

SEQ ID NO: 21432 - DNA, 444 bp, synthetic construct; identical to SEQ ID NO: 21430
  source 1..444: mol_type = other DNA

SEQ ID NO: 21433 - DNA, 402 bp, synthetic construct
  source 1..402: mol_type = other DNA
atccagaaccctgatcctgccgtgtaccagctgcgggatagcaagagcagcgacaagagcgtgtgtctgttcaccgacttcgacagccagaccaacgtgtcccagagcaaggactccgacgtgtacatcaccgataagaccgtgctggacatgcggagcatggacttcaagagcaactccgccgtggcctggtccaacaagtccgatttcgcctgcgccaacgccttcaacaacagcattatctgctccaaggacgccaacgataccctgctgctccagctgaccaacaccagcgcctactacatgtacttgttgctgctgctgaagtccgtggtgtacttcgccatcatcacatgctgcctgctgcggagaaccgccttctgctgcaacggcgagaagtct

SEQ ID NO: 21434 - DNA, 447 bp, synthetic construct
  source 1..447: mol_type = other DNA
atccagaaccctgatcctgccgtgtaccagctgcgggatagcaagagcagcgacaagagcgtgtgtctgttcaccgacttcgacagccagaccaacgtgtcccagagcaaggactccgacgtgtacatcaccgataagaccgtgctggacatgcggagcatggacttcaagagcaactccgccgtggcctggtccaacaagtccgatttcgcctgcgccaacgccttcaacaacagcattatcgaagtgaaaaccgactccaccgaccacgtgaagcccaaagagacagagaacaccaagcagcccagcaagagctgccacaagcccaaggccatcgtgcacaccgagaaagtgaacatgatgagcctgaccgtgctgggcctgcggatgctgttcgccaaaaccgtggccgtgaacttcctgctgaccgccaagctgttcttcctc

SEQ ID NO: 21435 - DNA, 426 bp, synthetic construct
  source 1..426: mol_type = other DNA
atccagaaccctgatcctgccgtgtaccagctgcgggatagcaagagcagcgacaagagcgtgtgtctgttcaccgacttcgacagccagaccaacgtgtcccagagcaaggactccgacgtgtacatcaccgataagaccgtgctggacatgcggagcatggacttcaagagcaactccgccgtggcctggtccaacaagtccgatttcgcctgcgccaacgccttcaacaacagcattatcgaccacgtgaagcccaaagagacagagaacaccaagcagcccagcaagagctgccacaagcccaaggccatcgtgcacaccgagaaagtgaacatgatgagcctgaccgtgctgggcctgcggatgctgttcgccaaaaccgtggccgtgaacttcctgctgaccgccaagctgttcttcctc

SEQ ID NO: 21436 - DNA, 441 bp, synthetic construct; identical to SEQ ID NO: 21416
  source 1..441: mol_type = other DNA

SEQ ID NO: 21437 - DNA, 435 bp, synthetic construct; identical to SEQ ID NO: 21417
  source 1..435: mol_type = other DNA

SEQ ID NO: 21438 - DNA, 465 bp, synthetic construct; identical to SEQ ID NO: 21418
  source 1..465: mol_type = other DNA

SEQ ID NO: 21439 - DNA, 489 bp, synthetic construct; identical to SEQ ID NO: 21419
  source 1..489: mol_type = other DNA

SEQ ID NO: 21440 - DNA, 483 bp, synthetic construct; identical to SEQ ID NO: 21420
  source 1..483: mol_type = other DNA

SEQ ID NO: 21441 - DNA, 459 bp, synthetic construct; identical to SEQ ID NO: 21421
  source 1..459: mol_type = other DNA

SEQ ID NO: 21442 - DNA, 483 bp, synthetic construct; identical to SEQ ID NO: 21420
  source 1..483: mol_type = other DNA

SEQ ID NO: 21443 - DNA, 441 bp, synthetic construct; identical to SEQ ID NO: 21423
  source 1..441: mol_type = other DNA

SEQ ID NO: 21444 - DNA, 486 bp, synthetic construct; identical to SEQ ID NO: 21424
  source 1..486: mol_type = other DNA

SEQ ID NO: 21445 - DNA, 465 bp, synthetic construct; identical to SEQ ID NO: 21425
  source 1..465: mol_type = other DNA

SEQ ID NO: 21446 - DNA, 396 bp, synthetic construct
  source 1..396: mol_type = other DNA
aagagcagcgacaagagcgtgtgtctgttcaccgacttcgacagccagaccaacgtgtcccagagcaaggactccgacgtgtacatcaccgataagaccgtgctggacatgcggagcatggacttcaagagcaactccgccgtggcctggtccaacaagtccgatttcgcctgcgccaacgccttcaacaacagcattatccccgaggacacattcttcccaagccccgagagcagcggcagagccgattgcggctttaccagcgagagctaccagcagggcgtgctgagcgccaccatcctgtacgagatcctgctgggcaaggccaccctgtacgccgtgctggtgtctgccctggtgctgatggctatggtcaagcggaaggacagccgggga

SEQ ID NO: 21447 - DNA, 390 bp, synthetic construct
  source 1..390: mol_type = other DNA
aagagcagcgacaagagcgtgtgtctgttcaccgacttcgacagccagaccaacgtgtcccagagcaaggactccgacgtgtacatcaccgataagaccgtgctggacatgcggagcatggacttcaagagcaactccgccgtggcctggtccaacaagtccgatttcgcctgcgccaacgccttcaacaacagcattatccccgaggacacattcttcccaagccccgagagcagcgccgattgcggctttaccagcgagagctaccagcagggcgtgctgagcgccaccatcctgtacgagatcctgctgggcaaggccaccctgtacgccgtgctggtgtctgccctggtgctgatggctatggtcaagcggaaggacagccgggga

SEQ ID NO: 21448 - DNA, 420 bp, synthetic construct
  source 1..420: mol_type = other DNA
aagagcagcgacaagagcgtgtgtctgttcaccgacttcgacagccagaccaacgtgtcccagagcaaggactccgacgtgtacatcaccgataagaccgtgctggacatgcggagcatggacttcaagagcaactccgccgtggcctggtccaacaagtccgatttcgcctgcgccaacgccttcaacaacagcattatccccgaggacacattcttcccaagccccgagagcagccagatcgtgtctgccgaagcctggggcagagccgattgcggctttaccagcgagagctaccagcagggcgtgctgagcgccaccatcctgtacgagatcctgctgggcaaggccaccctgtacgccgtgctggtgtctgccctggtgctgatggctatggtcaagcggaaggacagccgggga

SEQ ID NO: 21449 - DNA, 444 bp, synthetic construct
  source 1..444: mol_type = other DNA
aagagcagcgacaagagcgtgtgtctgttcaccgacttcgacagccagaccaacgtgtcccagagcaaggactccgacgtgtacatcaccgataagaccgtgctggacatgcggagcatggacttcaagagcaactccgccgtggcctggtccaacaagtccgatttcgcctgcgccaacgccttcaacaacagcattatccccgaggacacattcttcccaagccccgagagcagcttcccacccatcaagaccgatgtgattacaatggaccccaaggacaactgctccaaggacgccaacgataccctgctgctccagctgaccaacaccagcgcctactacatgtacttgttgctgctgctgaagtccgtggtgtacttcgccatcatcacatgctgcctgctgcggagaaccgccttctgctgcaacggcgagaagtct

SEQ ID NO: 21450 - DNA, 438 bp, synthetic construct
  source 1..438: mol_type = other DNA
aagagcagcgacaagagcgtgtgtctgttcaccgacttcgacagccagaccaacgtgtcccagagcaaggactccgacgtgtacatcaccgataagaccgtgctggacatgcggagcatggacttcaagagcaactccgccgtggcctggtccaacaagtccgatttcgcctgcgccaacgccttcaacaacagcattatccccgaggacacattcttcccaagccccgagagcagccccatcaagaccgatgtgattacaatggaccccaaggacaactgctccaaggacgccaacgataccctgctgctccagctgaccaacaccagcgcctactacatgtacttgttgctgctgctgaagtccgtggtgtacttcgccatcatcacatgctgcctgctgcggagaaccgccttctgctgcaacggcgagaagtct

SEQ ID NO: 21451 - DNA, 414 bp, synthetic construct
  source 1..414: mol_type = other DNA
aagagcagcgacaagagcgtgtgtctgttcaccgacttcgacagccagaccaacgtgtcccagagcaaggactccgacgtgtacatcaccgataagaccgtgctggacatgcggagcatggacttcaagagcaactccgccgtggcctggtccaacaagtccgatttcgcctgcgccaacgccttcaacaacagcattatccccgaggacacattcttcccaagccccgagagcagcatggaccccaaggacaactgctccaaggacgccaacgataccctgctgctccagctgaccaacaccagcgcctactacatgtacttgttgctgctgctgaagtccgtggtgtacttcgccatcatcacatgctgcctgctgcggagaaccgccttctgctgcaacggcgagaagtct

SEQ ID NO: 21452 - DNA, 438 bp, synthetic construct; identical to SEQ ID NO: 21450
  source 1..438: mol_type = other DNA

SEQ ID NO: 21453 - DNA, 396 bp, synthetic construct
  source 1..396: mol_type = other DNA
aagagcagcgacaagagcgtgtgtctgttcaccgacttcgacagccagaccaacgtgtcccagagcaaggactccgacgtgtacatcaccgataagaccgtgctggacatgcggagcatggacttcaagagcaactccgccgtggcctggtccaacaagtccgatttcgcctgcgccaacgccttcaacaacagcattatccccgaggacacattcttcccaagccccgagagcagctgctccaaggacgccaacgataccctgctgctccagctgaccaacaccagcgcctactacatgtacttgttgctgctgctgaagtccgtggtgtacttcgccatcatcacatgctgcctgctgcggagaaccgccttctgctgcaacggcgagaagtct

SEQ ID NO: 21454 - DNA, 441 bp, synthetic construct
  source 1..441: mol_type = other DNA
aagagcagcgacaagagcgtgtgtctgttcaccgacttcgacagccagaccaacgtgtcccagagcaaggactccgacgtgtacatcaccgataagaccgtgctggacatgcggagcatggacttcaagagcaactccgccgtggcctggtccaacaagtccgatttcgcctgcgccaacgccttcaacaacagcattatccccgaggacacattcttcccaagccccgagagcagcgaagtgaaaaccgactccaccgaccacgtgaagcccaaagagacagagaacaccaagcagcccagcaagagctgccacaagcccaaggccatcgtgcacaccgagaaagtgaacatgatgagcctgaccgtgctgggcctgcggatgctgttcgccaaaaccgtggccgtgaacttcctgctgaccgccaagctgttcttcctc

SEQ ID NO: 21455 - DNA, 420 bp, synthetic construct
  source 1..420: mol_type = other DNA
aagagcagcgacaagagcgtgtgtctgttcaccgacttcgacagccagaccaacgtgtcccagagcaaggactccgacgtgtacatcaccgataagaccgtgctggacatgcggagcatggacttcaagagcaactccgccgtggcctggtccaacaagtccgatttcgcctgcgccaacgccttcaacaacagcattatccccgaggacacattcttcccaagccccgagagcagcgaccacgtgaagcccaaagagacagagaacaccaagcagcccagcaagagctgccacaagcccaaggccatcgtgcacaccgagaaagtgaacatgatgagcctgaccgtgctgggcctgcggatgctgttcgccaaaaccgtggccgtgaacttcctgctgaccgccaagctgttcttcctc

SEQ ID NO: 21456 - DNA, 558 bp, synthetic construct
  source 1..558: mol_type = other DNA
gaggacctgaagaacgtgttcccacctgaggtggccgtgttcgagcctagcgaggccgagatcagccacacccagaaagccaccctcgtgtgcctggctaccggcttctaccccgaccatgtggaactgtcttggtgggtcaacggcaaagaggtgcacagcggcgtgtctaccgacccccagccactgaaagaacagcccgccctgaacgacagccggtactgcctgagcagcagactgagagtgtccgccaccttctggcagaacccccggaaccacttcagatgccaggtgcagttctacggcctgagcgagaacgacgagtggacccaggacagagccaagcccgtgacccagatcgtgtctgccgaagcctggatccccgaggacacattcttcccaagccccgagagcagctgcgacgtgaagctggtggaaaagagcttcgagacagacaccaacctgaacttccagaacctgagcgtgatcggcttcagaatcctgctgctgaaagtggccggctttaacctgctgatgaccctgcggctgtggtccagc

SEQ ID NO: 21457 - DNA, 528 bp, synthetic construct
  source 1..528: mol_type = other DNA
gaggacctgaagaacgtgttcccacctgaggtggccgtgttcgagcctagcgaggccgagatcagccacacccagaaagccaccctcgtgtgcctggctaccggcttctaccccgaccatgtggaactgtcttggtgggtcaacggcaaagaggtgcacagcggcgtgtctaccgacccccagccactgaaagaacagcccgccctgaacgacagccggtactgcctgagcagcagactgagagtgtccgccaccttctggcagaacccccggaaccacttcagatgccaggtgcagttctacggcctgagcgagaacgacgagtggacccaggacagagccaagcccgtgacccagatcgtgtctgccgaagcctgggagagcagctgcgacgtgaagctggtggaaaagagcttcgagacagacaccaacctgaacttccagaacctgagcgtgatcggcttcagaatcctgctgctgaaagtggccggctttaacctgctgatgaccctgcggctgtggtccagc

SEQ ID NO: 21458 - DNA, 555 bp, synthetic construct
  source 1..555: mol_type = other DNA
gaggacctgaagaacgtgttcccacctgaggtggccgtgttcgagcctagcgaggccgagatcagccacacccagaaagccaccctcgtgtgcctggctaccggcttctaccccgaccatgtggaactgtcttggtgggtcaacggcaaagaggtgcacagcggcgtgtctaccgacccccagccactgaaagaacagcccgccctgaacgacagccggtactgcctgagcagcagactgagagtgtccgccaccttctggcagaacccccggaaccacttcagatgccaggtgcagttctacggcctgagcgagaacgacgagtggacccaggacagagccaagcccgtgacccagatcgtgtctgccgaagcctggcccgaggacacattcttcccaagccccgagagcagctgcgacgtgaagctggtggaaaagagcttcgagacagacaccaacctgaacttccagaacctgagcgtgatcggcttcagaatcctgctgctgaaagtggccggctttaacctgctgatgaccctgcggctgtggtccagc

SEQ ID NO: 21459 - DNA, 585 bp, synthetic construct
  source 1..585: mol_type = other DNA
gaggacctgaagaacgtgttcccacctgaggtggccgtgttcgagcctagcgaggccgagatcagccacacccagaaagccaccctcgtgtgcctggctaccggcttctaccccgaccatgtggaactgtcttggtgggtcaacggcaaagaggtgcacagcggcgtgtctaccgacccccagccactgaaagaacagcccgccctgaacgacagccggtactgcctgagcagcagactgagagtgtccgccaccttctggcagaacccccggaaccacttcagatgccaggtgcagttctacggcctgagcgagaacgacgagtggacccaggacagagccaagcccgtgacccagatcgtgtctgccgaagcctggttcccacccatcaagaccgatgtgattacaatggaccccaaggacaactgctccaaggacgccaacgataccctgctgctccagctgaccaacaccagcgcctactacatgtacttgttgctgctgctgaagtccgtggtgtacttcgccatcatcacatgctgcctgctgcggagaaccgccttctgctgcaacggcgagaagtct

SEQ ID NO: 21460 - DNA, 579 bp, synthetic construct
  source 1..579: mol_type = other DNA
gaggacctgaagaacgtgttcccacctgaggtggccgtgttcgagcctagcgaggccgagatcagccacacccagaaagccaccctcgtgtgcctggctaccggcttctaccccgaccatgtggaactgtcttggtgggtcaacggcaaagaggtgcacagcggcgtgtctaccgacccccagccactgaaagaacagcccgccctgaacgacagccggtactgcctgagcagcagactgagagtgtccgccaccttctggcagaacccccggaaccacttcagatgccaggtgcagttctacggcctgagcgagaacgacgagtggacccaggacagagccaagcccgtgacccagatcgtgtctgccgaagcctggcccatcaagaccgatgtgattacaatggaccccaaggacaactgctccaaggacgccaacgataccctgctgctccagctgaccaacaccagcgcctactacatgtacttgttgctgctgctgaagtccgtggtgtacttcgccatcatcacatgctgcctgctgcggagaaccgccttctgctgcaacggcgagaagtct

SEQ ID NO: 21461 - DNA, 555 bp, synthetic construct
  source 1..555: mol_type = other DNA
gaggacctgaagaacgtgttcccacctgaggtggccgtgttcgagcctagcgaggccgagatcagccacacccagaaagccaccctcgtgtgcctggctaccggcttctaccccgaccatgtggaactgtcttggtgggtcaacggcaaagaggtgcacagcggcgtgtctaccgacccccagccactgaaagaacagcccgccctgaacgacagccggtactgcctgagcagcagactgagagtgtccgccaccttctggcagaacccccggaaccacttcagatgccaggtgcagttctacggcctgagcgagaacgacgagtggacccaggacagagccaagcccgtgacccagatcgtgtctgccgaagcctggatggaccccaaggacaactgctccaaggacgccaacgataccctgctgctccagctgaccaacaccagcgcctactacatgtacttgttgctgctgctgaagtccgtggtgtacttcgccatcatcacatgctgcctgctgcggagaaccgccttctgctgcaacggcgagaagtct

SEQ ID NO: 21462 - DNA, 579 bp, synthetic construct; identical to SEQ ID NO: 21460
  source 1..579: mol_type = other DNA

SEQ ID NO: 21463 - DNA, 537 bp, synthetic construct
  source 1..537: mol_type = other DNA
gaggacctgaagaacgtgttcccacctgaggtggccgtgttcgagcctagcgaggccgagatcagccacacccagaaagccaccctcgtgtgcctggctaccggcttctaccccgaccatgtggaactgtcttggtgggtcaacggcaaagaggtgcacagcggcgtgtctaccgacccccagccactgaaagaacagcccgccctgaacgacagccggtactgcctgagcagcagactgagagtgtccgccaccttctggcagaacccccggaaccacttcagatgccaggtgcagttctacggcctgagcgagaacgacgagtggacccaggacagagccaagcccgtgacccagatcgtgtctgccgaagcctggtgctccaaggacgccaacgataccctgctgctccagctgaccaacaccagcgcctactacatgtacttgttgctgctgctgaagtccgtggtgtacttcgccatcatcacatgctgcctgctgcggagaaccgccttctgctgcaacggcgagaagtct

SEQ ID NO: 21464 - DNA, 582 bp, synthetic construct
  source 1..582: mol_type = other DNA
gaggacctgaagaacgtgttcccacctgaggtggccgtgttcgagcctagcgaggccgagatcagccacacccagaaagccaccctcgtgtgcctggctaccggcttctaccccgaccatgtggaactgtcttggtgggtcaacggcaaagaggtgcacagcggcgtgtctaccgacccccagccactgaaagaacagcccgccctgaacgacagccggtactgcctgagcagcagactgagagtgtccgccaccttctggcagaacccccggaaccacttcagatgccaggtgcagttctacggcctgagcgagaacgacgagtggacccaggacagagccaagcccgtgacccagatcgtgtctgccgaagcctgggaagtgaaaaccgactccaccgaccacgtgaagcccaaagagacagagaacaccaagcagcccagcaagagctgccacaagcccaaggccatcgtgcacaccgagaaagtgaacatgatgagcctgaccgtgctgggcctgcggatgctgttcgccaaaaccgtggccgtgaacttcctgctgaccgccaagctgttcttcctc

SEQ ID NO: 21465 - DNA, 561 bp, synthetic construct
  source 1..561: mol_type = other DNA
gaggacctgaagaacgtgttcccacctgaggtggccgtgttcgagcctagcgaggccgagatcagccacacccagaaagccaccctcgtgtgcctggctaccggcttctaccccgaccatgtggaactgtcttggtgggtcaacggcaaagaggtgcacagcggcgtgtctaccgacccccagccactgaaagaacagcccgccctgaacgacagccggtactgcctgagcagcagactgagagtgtccgccaccttctggcagaacccccggaaccacttcagatgccaggtgcagttctacggcctgagcgagaacgacgagtggacccaggacagagccaagcccgtgacccagatcgtgtctgccgaagcctgggaccacgtgaagcccaaagagacagagaacaccaagcagcccagcaagagctgccacaagcccaaggccatcgtgcacaccgagaaagtgaacatgatgagcctgaccgtgctgggcctgcggatgctgttcgccaaaaccgtggccgtgaacttcctgctgaccgccaagctgttcttcctc

SEQ ID NO: 21466 - DNA, 564 bp, synthetic construct
  source 1..564: mol_type = other DNA
gaggacctgaagaacgtgttcccacctgaggtggccgtgttcgagcctagcgaggccgagatcagccacacccagaaagccaccctcgtgtgcctggctaccggcttctaccccgaccatgtggaactgtcttggtgggtcaacggcaaagaggtgcacagcggcgtgtctaccgacccccagccactgaaagaacagcccgccctgaacgacagccggtactgcctgagcagcagactgagagtgtccgccaccttctggcagaacccccggaaccacttcagatgccaggtgcagttctacggcctgagcgagaacgacgagtggacccaggacagagccaagcccgtgacccagatcgtgtctgccgaagcctggggcagaatccccgaggacacattcttcccaagccccgagagcagctgcgacgtgaagctggtggaaaagagcttcgagacagacaccaacctgaacttccagaacctgagcgtgatcggcttcagaatcctgctgctgaaagtggccggctttaacctgctgatgaccctgcggctgtggtccagc

SEQ ID NO: 21467 - DNA, 534 bp, synthetic construct
  source 1..534: mol_type = other DNA
gaggacctgaagaacgtgttcccacctgaggtggccgtgttcgagcctagcgaggccgagatcagccacacccagaaagccaccctcgtgtgcctggctaccggcttctaccccgaccatgtggaactgtcttggtgggtcaacggcaaagaggtgcacagcggcgtgtctaccgacccccagccactgaaagaacagcccgccctgaacgacagccggtactgcctgagcagcagactgagagtgtccgccaccttctggcagaacccccggaaccacttcagatgccaggtgcagttctacggcctgagcgagaacgacgagtggacccaggacagagccaagcccgtgacccagatcgtgtctgccgaagcctggggcagagagagcagctgcgacgtgaagctggtggaaaagagcttcgagacagacaccaacctgaacttccagaacctgagcgtgatcggcttcagaatcctgctgctgaaagtggccggctttaacctgctgatgaccctgcggctgtggtccagc

SEQ ID NO: 21468 - DNA, 561 bp, synthetic construct
  source 1..561: mol_type = other DNA
gaggacctgaagaacgtgttcccacctgaggtggccgtgttcgagcctagcgaggccgagatcagccacacccagaaagccaccctcgtgtgcctggctaccggcttctaccccgaccatgtggaactgtcttggtgggtcaacggcaaagaggtgcacagcggcgtgtctaccgacccccagccactgaaagaacagcccgccctgaacgacagccggtactgcctgagcagcagactgagagtgtccgccaccttctggcagaacccccggaaccacttcagatgccaggtgcagttctacggcctgagcgagaacgacgagtggacccaggacagagccaagcccgtgacccagatcgtgtctgccgaagcctggggcagacccgaggacacattcttcccaagccccgagagcagctgcgacgtgaagctggtggaaaagagcttcgagacagacaccaacctgaacttccagaacctgagcgtgatcggcttcagaatcctgctgctgaaagtggccggctttaacctgctgatgaccctgcggctgtggtccagc

SEQ ID NO: 21469 - DNA, 591 bp, synthetic construct
  source 1..591: mol_type = other DNA
gaggacctgaagaacgtgttcccacctgaggtggccgtgttcgagcctagcgaggccgagatcagccacacccagaaagccaccctcgtgtgcctggctaccggcttctaccccgaccatgtggaactgtcttggtgggtcaacggcaaagaggtgcacagcggcgtgtctaccgacccccagccactgaaagaacagcccgccctgaacgacagccggtactgcctgagcagcagactgagagtgtccgccaccttctggcagaacccccggaaccacttcagatgccaggtgcagttctacggcctgagcgagaacgacgagtggacccaggacagagccaagcccgtgacccagatcgtgtctgccgaagcctggggcagattcccacccatcaagaccgatgtgattacaatggaccccaaggacaactgctccaaggacgccaacgataccctgctgctccagctgaccaacaccagcgcctactacatgtacttgttgctgctgctgaagtccgtggtgtacttcgccatcatcacatgctgcctgctgcggagaaccgccttctgctgcaacggcgagaagtct

SEQ ID NO: 21470 - DNA, 585 bp, synthetic construct
  source 1..585: mol_type = other DNA
gaggacctgaagaacgtgttcccacctgaggtggccgtgttcgagcctagcgaggccgagatcagccacacccagaaagccaccctcgtgtgcctggctaccggcttctaccccgaccatgtggaactgtcttggtgggtcaacggcaaagaggtgcacagcggcgtgtctaccgacccccagccactgaaagaacagcccgccctgaacgacagccggtactgcctgagcagcagactgagagtgtccgccaccttctggcagaacccccggaaccacttcagatgccaggtgcagttctacggcctgagcgagaacgacgagtggacccaggacagagccaagcccgtgacccagatcgtgtctgccgaagcctggggcagacccatcaagaccgatgtgattacaatggaccccaaggacaactgctccaaggacgccaacgataccctgctgctccagctgaccaacaccagcgcctactacatgtacttgttgctgctgctgaagtccgtggtgtacttcgccatcatcacatgctgcctgctgcggagaaccgccttctgctgcaacggcgagaagtct

SEQ ID NO: 21471 - DNA, 561 bp, synthetic construct
  source 1..561: mol_type = other DNA
gaggacctgaagaacgtgttcccacctgaggtggccgtgttcgagcctagcgaggccgagatcagccacacccagaaagccaccctcgtgtgcctggctaccggcttctaccccgaccatgtggaactgtcttggtgggtcaacggcaaagaggtgcacagcggcgtgtctaccgacccccagccactgaaagaacagcccgccctgaacgacagccggtactgcctgagcagcagactgagagtgtccgccaccttctggcagaacccccggaaccacttcagatgccaggtgcagttctacggcctgagcgagaacgacgagtggacccaggacagagccaagcccgtgacccagatcgtgtctgccgaagcctggggcagaatggaccccaaggacaactgctccaaggacgccaacgataccctgctgctccagctgaccaacaccagcgcctactacatgtacttgttgctgctgctgaagtccgtggtgtacttcgccatcatcacatgctgcctgctgcggagaaccgccttctgctgcaacggcgagaagtct

SEQ ID NO: 21472 - DNA, 585 bp, synthetic construct; identical to SEQ ID NO: 21470
  source 1..585: mol_type = other DNA

SEQ ID NO: 21473 - DNA, 543 bp, synthetic construct
  source 1..543: mol_type = other DNA
gaggacctgaagaacgtgttcccacctgaggtggccgtgttcgagcctagcgaggccgagatcagccacacccagaaagccaccctcgtgtgcctggctaccggcttctaccccgaccatgtggaactgtcttggtgggtcaacggcaaagaggtgcacagcggcgtgtctaccgacccccagccactgaaagaacagcccgccctgaacgacagccggtactgcctgagcagcagactgagagtgtccgccaccttctggcagaacccccggaaccacttcagatgccaggtgcagttctacggcctgagcgagaacgacgagtggacccaggacagagccaagcccgtgacccagatcgtgtctgccgaagcctggggcagatgctccaaggacgccaacgataccctgctgctccagctgaccaacaccagcgcctactacatgtacttgttgctgctgctgaagtccgtggtgtacttcgccatcatcacatgctgcctgctgcggagaaccgccttctgctgcaacggcgagaagtct

SEQ ID NO: 21474 - DNA, 588 bp, synthetic construct
  source 1..588: mol_type = other DNA
gaggacctgaagaacgtgttcccacctgaggtggccgtgttcgagcctagcgaggccgagatcagccacacccagaaagccaccctcgtgtgcctggctaccggcttctaccccgaccatgtggaactgtcttggtgggtcaacggcaaagaggtgcacagcggcgtgtctaccgacccccagccactgaaagaacagcccgccctgaacgacagccggtactgcctgagcagcagactgagagtgtccgccaccttctggcagaacccccggaaccacttcagatgccaggtgcagttctacggcctgagcgagaacgacgagtggacccaggacagagccaagcccgtgacccagatcgtgtctgccgaagcctggggcagagaagtgaaaaccgactccaccgaccacgtgaagcccaaagagacagagaacaccaagcagcccagcaagagctgccacaagcccaaggccatcgtgcacaccgagaaagtgaacatgatgagcctgaccgtgctgggcctgcggatgctgttcgccaaaaccgtggccgtgaacttcctgctgaccgccaagctgttcttcctc

SEQ ID NO: 21475 - DNA, 567 bp, synthetic construct
  source 1..567: mol_type = other DNA
gaggacctgaagaacgtgttcccacctgaggtggccgtgttcgagcctagcgaggccgagatcagccacacccagaaagccaccctcgtgtgcctggctaccggcttctaccccgaccatgtggaactgtcttggtgggtcaacggcaaagaggtgcacagcggcgtgtctaccgacccccagccactgaaagaacagcccgccctgaacgacagccggtactgcctgagcagcagactgagagtgtccgccaccttctggcagaacccccggaaccacttcagatgccaggtgcagttctacggcctgagcgagaacgacgagtggacccaggacagagccaagcccgtgacccagatcgtgtctgccgaagcctggggcagagaccacgtgaagcccaaagagacagagaacaccaagcagcccagcaagagctgccacaagcccaaggccatcgtgcacaccgagaaagtgaacatgatgagcctgaccgtgctgggcctgcggatgctgttcgccaaaaccgtggccgtgaacttcctgctgaccgccaagctgttcttcctc

SEQ ID NO: 21476 - DNA, 573 bp, synthetic construct
  source 1..573: mol_type = other DNA
gaggacctgaagaacgtgttcccacctgaggtggccgtgttcgagcctagcgaggccgagatcagccacacccagaaagccaccctcgtgtgcctggctaccggcttctaccccgaccatgtggaactgtcttggtgggtcaacggcaaagaggtgcacagcggcgtgtctaccgacccccagccactgaaagaacagcccgccctgaacgacagccggtactgcctgagcagcagactgagagtgtccgccaccttctggcagaacccccggaaccacttcagatgccaggtgcagttctacggcctgagcgagaacgacgagtggacccaggacagagccaagcccgtgacccagatcgtgtctgccgaagcctggggcagagccgattgcatccccgaggacacattcttcccaagccccgagagcagctgcgacgtgaagctggtggaaaagagcttcgagacagacaccaacctgaacttccagaacctgagcgtgatcggcttcagaatcctgctgctgaaagtggccggctttaacctgctgatgaccctgcggctgtggtccagc

SEQ ID NO: 21477 - DNA, 543 bp, synthetic construct
  source 1..543: mol_type = other DNA
gaggacctgaagaacgtgttcccacctgaggtggccgtgttcgagcctagcgaggccgagatcagccacacccagaaagccaccctcgtgtgcctggctaccggcttctaccccgaccatgtggaactgtcttggtgggtcaacggcaaagaggtgcacagcggcgtgtctaccgacccccagccactgaaagaacagcccgccctgaacgacagccggtactgcctgagcagcagactgagagtgtccgccaccttctggcagaacccccggaaccacttcagatgccaggtgcagttctacggcctgagcgagaacgacgagtggacccaggacagagccaagcccgtgacccagatcgtgtctgccgaagcctggggcagagccgattgcgagagcagctgcgacgtgaagctggtggaaaagagcttcgagacagacaccaacctgaacttccagaacctgagcgtgatcggcttcagaatcctgctgctgaaagtggccggctttaacctgctgatgaccctgcggctgtggtccagc

SEQ ID NO: 21478 - DNA, 570 bp, synthetic construct
  source 1..570: mol_type = other DNA
gaggacctgaagaacgtgttcccacctgaggtggccgtgttcgagcctagcgaggccgagatcagccacacccagaaagccaccctcgtgtgcctggctaccggcttctaccccgaccatgtggaactgtcttggtgggtcaacggcaaagaggtgcacagcggcgtgtctaccgacccccagccactgaaagaacagcccgccctgaacgacagccggtactgcctgagcagcagactgagagtgtccgccaccttctggcagaacccccggaaccacttcagatgccaggtgcagttctacggcctgagcgagaacgacgagtggacccaggacagagccaagcccgtgacccagatcgtgtctgccgaagcctggggcagagccgattgccccgaggacacattcttcccaagccccgagagcagctgcgacgtgaagctggtggaaaagagcttcgagacagacaccaacctgaacttccagaacctgagcgtgatcggcttcagaatcctgctgctgaaagtggccggctttaacctgctgatgaccctgcggctgtggtccagc

SEQ ID NO: 21479 - DNA, 600 bp, synthetic construct
  source 1..600: mol_type = other DNA
gaggacctgaagaacgtgttcccacctgaggtggccgtgttcgagcctagcgaggccgagatcagccacacccagaaagccaccctcgtgtgcctggctaccggcttctaccccgaccatgtggaactgtcttggtgggtcaacggcaaagaggtgcacagcggcgtgtctaccgacccccagccactgaaagaacagcccgccctgaacgacagccggtactgcctgagcagcagactgagagtgtccgccaccttctggcagaacccccggaaccacttcagatgccaggtgcagttctacggcctgagcgagaacgacgagtggacccaggacagagccaagcccgtgacccagatcgtgtctgccgaagcctggggcagagccgattgcttcccacccatcaagaccgatgtgattacaatggaccccaaggacaactgctccaaggacgccaacgataccctgctgctccagctgaccaacaccagcgcctactacatgtacttgttgctgctgctgaagtccgtggtgtacttcgccatcatcacatgctgcctgctgcggagaaccgccttctgctgcaacggcgagaagtct

SEQ ID NO: 21480 - DNA, 594 bp, synthetic construct
  source 1..594: mol_type = other DNA
gaggacctgaagaacgtgttcccacctgaggtggccgtgttcgagcctagcgaggccgagatcagccacacccagaaagccaccctcgtgtgcctggctaccggcttctaccccgaccatgtggaactgtcttggtgggtcaacggcaaagaggtgcacagcggcgtgtctaccgacccccagccactgaaagaacagcccgccctgaacgacagccggtactgcctgagcagcagactgagagtgtccgccaccttctggcagaacccccggaaccacttcagatgccaggtgcagttctacggcctgagcgagaacgacgagtggacccaggacagagccaagcccgtgacccagatcgtgtctgccgaagcctggggcagagccgattgccccatcaagaccgatgtgattacaatggaccccaaggacaactgctccaaggacgccaacgataccctgctgctccagctgaccaacaccagcgcctactacatgtacttgttgctgctgctgaagtccgtggtgtacttcgccatcatcacatgctgcctgctgcggagaaccgccttctgctgcaacggcgagaagtct

SEQ ID NO: 21481 - DNA, 570 bp, synthetic construct
  source 1..570: mol_type = other DNA
gaggacctgaagaacgtgttcccacctgaggtggccgtgttcgagcctagcgaggccgagatcagccacacccagaaagccaccctcgtgtgcctggctaccggcttctaccccgaccatgtggaactgtcttggtgggtcaacggcaaagaggtgcacagcggcgtgtctaccgacccccagccactgaaagaacagcccgccctgaacgacagccggtactgcctgagcagcagactgagagtgtccgccaccttctggcagaacccccggaaccacttcagatgccaggtgcagttctacggcctgagcgagaacgacgagtggacccaggacagagccaagcccgtgacccagatcgtgtctgccgaagcctggggcagagccgattgcatggaccccaaggacaactgctccaaggacgccaacgataccctgctgctccagctgaccaacaccagcgcctactacatgtacttgttgctgctgctgaagtccgtggtgtacttcgccatcatcacatgctgcctgctgcggagaaccgccttctgctgcaacggcgagaagtct

SEQ ID NO: 21482 - DNA, 594 bp, synthetic construct; identical to SEQ ID NO: 21480
  source 1..594: mol_type = other DNA

SEQ ID NO: 21483 - DNA, 552 bp, synthetic construct
  source 1..552: mol_type = other DNA
gaggacctgaagaacgtgttcccacctgaggtggccgtgttcgagcctagcgaggccgagatcagccacacccagaaagccaccctcgtgtgcctggctaccggcttctaccccgaccatgtggaactgtcttggtgggtcaacggcaaagaggtgcacagcggcgtgtctaccgacccccagccactgaaagaacagcccgccctgaacgacagccggtactgcctgagcagcagactgagagtgtccgccaccttctggcagaacccccggaaccacttcagatgccaggtgcagttctacggcctgagcgagaacgacgagtggacccaggacagagccaagcccgtgacccagatcgtgtctgccgaagcctggggcagagccgattgctgctccaaggacgccaacgataccctgctgctccagctgaccaacaccagcgcctactacatgtacttgttgctgctgctgaagtccgtggtgtacttcgccatcatcacatgctgcctgctgcggagaaccgccttctgctgcaacggcgagaagtct

SEQ ID NO: 21484 - DNA, 597 bp, synthetic construct
  source 1..597: mol_type = other DNA
gaggacctgaagaacgtgttcccacctgaggtggccgtgttcgagcctagcgaggccgagatcagccacacccagaaagccaccctcgtgtgcctggctaccggcttctaccccgaccatgtggaactgtcttggtgggtcaacggcaaagaggtgcacagcggcgtgtctaccgacccccagccactgaaagaacagcccgccctgaacgacagccggtactgcctgagcagcagactgagagtgtccgccaccttctggcagaacccccggaaccacttcagatgccaggtgcagttctacggcctgagcgagaacgacgagtggacccaggacagagccaagcccgtgacccagatcgtgtctgccgaagcctggggcagagccgattgcgaagtgaaaaccgactccaccgaccacgtgaagcccaaagagacagagaacaccaagcagcccagcaagagctgccacaagcccaaggccatcgtgcacaccgagaaagtgaacatgatgagcctgaccgtgctgggcctgcggatgctgttcgccaaaaccgtggccgtgaacttcctgctgaccgccaagctgttcttcctc

SEQ ID NO: 21485 - DNA, 576 bp, synthetic construct
  source 1..576: mol_type = other DNA
gaggacctgaagaacgtgttcccacctgaggtggccgtgttcgagcctagcgaggccgagatcagccacacccagaaagccaccctcgtgtgcctggctaccggcttctaccccgaccatgtggaactgtcttggtgggtcaacggcaaagaggtgcacagcggcgtgtctaccgacccccagccactgaaagaacagcccgccctgaacgacagccggtactgcctgagcagcagactgagagtgtccgccaccttctggcagaacccccggaaccacttcagatgccaggtgcagttctacggcctgagcgagaacgacgagtggacccaggacagagccaagcccgtgacccagatcgtgtctgccgaagcctggggcagagccgattgcgaccacgtgaagcccaaagagacagagaacaccaagcagcccagcaagagctgccacaagcccaaggccatcgtgcacaccgagaaagtgaacatgatgagcctgaccgtgctgggcctgcggatgctgttcgccaaaaccgtggccgtgaacttcctgctgaccgccaagctgttcttcctc

SEQ ID NO: 21486 - DNA, 534 bp, synthetic construct
  source 1..534: mol_type = other DNA
gaggacctgaagaacgtgttcccacctgaggtggccgtgttcgagcctagcgaggccgagatcagccacacccagaaagccaccctcgtgtgcctggctaccggcttctaccccgaccatgtggaactgtcttggtgggtcaacggcaaagaggtgcacagcggcgtgtctaccgacccccagccactgaaagaacagcccgccctgaacgacagccggtactgcctgagcagcagactgagagtgtccgccaccttctggcagaacccccggaaccacttcagatgccaggtgcagttctacggcctgagcgagaacgacgagtggacccaggacagagccaagcccgtgaccatccccgaggacacattcttcccaagccccgagagcagctgcgacgtgaagctggtggaaaagagcttcgagacagacaccaacctgaacttccagaacctgagcgtgatcggcttcagaatcctgctgctgaaagtggccggctttaacctgctgatgaccctgcggctgtggtccagc

SEQ ID NO: 21487 - DNA, 504 bp, synthetic construct
  source 1..504: mol_type = other DNA
gaggacctgaagaacgtgttcccacctgaggtggccgtgttcgagcctagcgaggccgagatcagccacacccagaaagccaccctcgtgtgcctggctaccggcttctaccccgaccatgtggaactgtcttggtgggtcaacggcaaagaggtgcacagcggcgtgtctaccgacccccagccactgaaagaacagcccgccctgaacgacagccggtactgcctgagcagcagactgagagtgtccgccaccttctggcagaacccccggaaccacttcagatgccaggtgcagttctacggcctgagcgagaacgacgagtggacccaggacagagccaagcccgtgaccgagagcagctgcgacgtgaagctggtggaaaagagcttcgagacagacaccaacctgaacttccagaacctgagcgtgatcggcttcagaatcctgctgctgaaagtggccggctttaacctgctgatgaccctgcggctgtggtccagc

SEQ ID NO: 21488 - DNA, 531 bp, synthetic construct
  source 1..531: mol_type = other DNA
gaggacctgaagaacgtgttcccacctgaggtggccgtgttcgagcctagcgaggccgagatcagccacacccagaaagccaccctcgtgtgcctggctaccggcttctaccccgaccatgtggaactgtcttggtgggtcaacggcaaagaggtgcacagcggcgtgtctaccgacccccagccactgaaagaacagcccgccctgaacgacagccggtactgcctgagcagcagactgagagtgtccgccaccttctggcagaacccccggaaccacttcagatgccaggtgcagttctacggcctgagcgagaacgacgagtggacccaggacagagccaagcccgtgacccccgaggacacattcttcccaagccccgagagcagctgcgacgtgaagctggtggaaaagagcttcgagacagacaccaacctgaacttccagaacctgagcgtgatcggcttcagaatcctgctgctgaaagtggccggctttaacctgctgatgaccctgcggctgtggtccagc

SEQ ID NO: 21489 - DNA, 561 bp, synthetic construct
  source 1..561: mol_type = other DNA
gaggacctgaagaacgtgttcccacctgaggtggccgtgttcgagcctagcgaggccgagatcagccacacccagaaagccaccctcgtgtgcctggctaccggcttctaccccgaccatgtggaactgtcttggtgggtcaacggcaaagaggtgcacagcggcgtgtctaccgacccccagccactgaaagaacagcccgccctgaacgacagccggtactgcctgagcagcagactgagagtgtccgccaccttctggcagaacccccggaaccacttcagatgccaggtgcagttctacggcctgagcgagaacgacgagtggacccaggacagagccaagcccgtgaccttcccacccatcaagaccgatgtgattacaatggaccccaaggacaactgctccaaggacgccaacgataccctgctgctccagctgaccaacaccagcgcctactacatgtacttgttgctgctgctgaagtccgtggtgtacttcgccatcatcacatgctgcctgctgcggagaaccgccttctgctgcaacggcgagaagtct

SEQ ID NO: 21490 - DNA, 555 bp, synthetic construct
  source 1..555: mol_type = other DNA
gaggacctgaagaacgtgttcccacctgaggtggccgtgttcgagcctagcgaggccgagatcagccacacccagaaagccaccctcgtgtgcctggctaccggcttctaccccgaccatgtggaactgtcttggtgggtcaacggcaaagaggtgcacagcggcgtgtctaccgacccccagccactgaaagaacagcccgccctgaacgacagccggtactgcctgagcagcagactgagagtgtccgccaccttctggcagaacccccggaaccacttcagatgccaggtgcagttctacggcctgagcgagaacgacgagtggacccaggacagagccaagcccgtgacccccatcaagaccgatgtgattacaatggaccccaaggacaactgctccaaggacgccaacgataccctgctgctccagctgaccaacaccagcgcctactacatgtacttgttgctgctgctgaagtccgtggtgtacttcgccatcatcacatgctgcctgctgcggagaaccgccttctgctgcaacggcgagaagtct

SEQ ID NO: 21491 - DNA, 531 bp, synthetic construct
  source 1..531: mol_type = other DNA
gaggacctgaagaacgtgttcccacctgaggtggccgtgttcgagcctagcgaggccgagatcagccacacccagaaagccaccctcgtgtgcctggctaccggcttctaccccgaccatgtggaactgtcttggtgggtcaacggcaaagaggtgcacagcggcgtgtctaccgacccccagccactgaaagaacagcccgccctgaacgacagccggtactgcctgagcagcagactgagagtgtccgccaccttctggcagaacccccggaaccacttcagatgccaggtgcagttctacggcctgagcgagaacgacgagtggacccaggacagagccaagcccgtgaccatggaccccaaggacaactgctccaaggacgccaacgataccctgctgctccagctgaccaacaccagcgcctactacatgtacttgttgctgctgctgaagtccgtggtgtacttcgccatcatcacatgctgcctgctgcggagaaccgccttctgctgcaacggcgagaagtct

SEQ ID NO: 21492 - DNA, 555 bp, synthetic construct; identical to SEQ ID NO: 21490
  source 1..555: mol_type = other DNA

SEQ ID NO: 21493 - DNA, 513 bp, synthetic construct
  source 1..513: mol_type = other DNA
gaggacctgaagaacgtgttcccacctgaggtggccgtgttcgagcctagcgaggccgagatcagccacacccagaaagccaccctcgtgtgcctggctaccggcttctaccccgaccatgtggaactgtcttggtgggtcaacggcaaagaggtgcacagcggcgtgtctaccgacccccagccactgaaagaacagcccgccctgaacgacagccggtactgcctgagcagcagactgagagtgtccgccaccttctggcagaacccccggaaccacttcagatgccaggtgcagttctacggcctgagcgagaacgacgagtggacccaggacagagccaagcccgtgacctgctccaaggacgccaacgataccctgctgctccagctgaccaacaccagcgcctactacatgtacttgttgctgctgctgaagtccgtggtgtacttcgccatcatcacatgctgcctgctgcggagaaccgccttctgctgcaacggcgagaagtct

SEQ ID NO: 21494 - DNA, 558 bp, synthetic construct
  source 1..558: mol_type = other DNA
gaggacctgaagaacgtgttcccacctgaggtggccgtgttcgagcctagcgaggccgagatcagccacacccagaaagccaccctcgtgtgcctggctaccggcttctaccccgaccatgtggaactgtcttggtgggtcaacggcaaagaggtgcacagcggcgtgtctaccgacccccagccactgaaagaacagcccgccctgaacgacagccggtactgcctgagcagcagactgagagtgtccgccaccttctggcagaacccccggaaccacttcagatgccaggtgcagttctacggcctgagcgagaacgacgagtggacccaggacagagccaagcccgtgaccgaagtgaaaaccgactccaccgaccacgtgaagcccaaagagacagagaacaccaagcagcccagcaagagctgccacaagcccaaggccatcgtgcacaccgagaaagtgaacatgatgagcctgaccgtgctgggcctgcggatgctgttcgccaaaaccgtggccgtgaacttcctgctgaccgccaagctgttcttcctc

SEQ ID NO: 21495 - DNA, 537 bp, synthetic construct
  source 1..537: mol_type = other DNA
gaggacctgaagaacgtgttcccacctgaggtggccgtgttcgagcctagcgaggccgagatcagccacacccagaaagccaccctcgtgtgcctggctaccggcttctaccccgaccatgtggaactgtcttggtgggtcaacggcaaagaggtgcacagcggcgtgtctaccgacccccagccactgaaagaacagcccgccctgaacgacagccggtactgcctgagcagcagactgagagtgtccgccaccttctggcagaacccccggaaccacttcagatgccaggtgcagttctacggcctgagcgagaacgacgagtggacccaggacagagccaagcccgtgaccgaccacgtgaagcccaaagagacagagaacaccaagcagcccagcaagagctgccacaagcccaaggccatcgtgcacaccgagaaagtgaacatgatgagcctgaccgtgctgggcctgcggatgctgttcgccaaaaccgtggccgtgaacttcctgctgaccgccaagctgttcttcctc

SEQ ID NO: 21496 - DNA, 558 bp, synthetic construct; identical to SEQ ID NO: 21456
  source 1..558: mol_type = other DNA

SEQ ID NO: 21497 - DNA, 528 bp, synthetic construct; identical to SEQ ID NO: 21457
  source 1..528: mol_type = other DNA

SEQ ID NO: 21498 - DNA, 555 bp, synthetic construct; identical to SEQ ID NO: 21458
  source 1..555: mol_type = other DNA

SEQ ID NO: 21499 - DNA, 585 bp, synthetic construct; identical to SEQ ID NO: 21459
  source 1..585: mol_type = other DNA

SEQ ID NO: 21500 - DNA, 579 bp, synthetic construct; identical to SEQ ID NO: 21460
  source 1..579: mol_type = other DNA

SEQ ID NO: 21501 - DNA, 555 bp, synthetic construct; identical to SEQ ID NO: 21461
  source 1..555: mol_type = other DNA

SEQ ID NO: 21502 - DNA, 579 bp, synthetic construct; identical to SEQ ID NO: 21460
  source 1..579: mol_type = other DNA

SEQ ID NO: 21503 - DNA, 537 bp, synthetic construct; identical to SEQ ID NO: 21463
  source 1..537: mol_type = other DNA

SEQ ID NO: 21504 - DNA, 582 bp, synthetic construct; identical to SEQ ID NO: 21464
  source 1..582: mol_type = other DNA

SEQ ID NO: 21505 - DNA, 561 bp, synthetic construct; identical to SEQ ID NO: 21465
  source 1..561: mol_type = other DNA

SEQ ID NO: 21506 - DNA, 510 bp, synthetic construct
  source 1..510: mol_type = other DNA
cctgaggtggccgtgttcgagcctagcgaggccgagatcagccacacccagaaagccaccctcgtgtgcctggctaccggcttctaccccgaccatgtggaactgtcttggtgggtcaacggcaaagaggtgcacagcggcgtgtctaccgacccccagccactgaaagaacagcccgccctgaacgacagccggtactgcctgagcagcagactgagagtgtccgccaccttctggcagaacccccggaaccacttcagatgccaggtgcagttctacggcctgagcgagaacgacgagtggacccaggacagagccaagcccgtgaccatccccgaggacacattcttcccaagccccgagagcagctgcgacgtgaagctggtggaaaagagcttcgagacagacaccaacctgaacttccagaacctgagcgtgatcggcttcagaatcctgctgctgaaagtggccggctttaacctgctgatgaccctgcggctgtggtccagc

SEQ ID NO: 21507 - DNA, 480 bp, synthetic construct
  source 1..480: mol_type = other DNA
cctgaggtggccgtgttcgagcctagcgaggccgagatcagccacacccagaaagccaccctcgtgtgcctggctaccggcttctaccccgaccatgtggaactgtcttggtgggtcaacggcaaagaggtgcacagcggcgtgtctaccgacccccagccactgaaagaacagcccgccctgaacgacagccggtactgcctgagcagcagactgagagtgtccgccaccttctggcagaacccccggaaccacttcagatgccaggtgcagttctacggcctgagcgagaacgacgagtggacccaggacagagccaagcccgtgaccgagagcagctgcgacgtgaagctggtggaaaagagcttcgagacagacaccaacctgaacttccagaacctgagcgtgatcggcttcagaatcctgctgctgaaagtggccggctttaacctgctgatgaccctgcggctgtggtccagc

SEQ ID NO: 21508 - DNA, 507 bp, synthetic construct
  source 1..507: mol_type = other DNA
cctgaggtggccgtgttcgagcctagcgaggccgagatcagccacacccagaaagccaccctcgtgtgcctggctaccggcttctaccccgaccatgtggaactgtcttggtgggtcaacggcaaagaggtgcacagcggcgtgtctaccgacccccagccactgaaagaacagcccgccctgaacgacagccggtactgcctgagcagcagactgagagtgtccgccaccttctggcagaacccccggaaccacttcagatgccaggtgcagttctacggcctgagcgagaacgacgagtggacccaggacagagccaagcccgtgacccccgaggacacattcttcccaagccccgagagcagctgcgacgtgaagctggtggaaaagagcttcgagacagacaccaacctgaacttccagaacctgagcgtgatcggcttcagaatcctgctgctgaaagtggccggctttaacctgctgatgaccctgcggctgtggtccagc

SEQ ID NO: 21509 - DNA, 537 bp, synthetic construct
  source 1..537: mol_type = other DNA
cctgaggtggccgtgttcgagcctagcgaggccgagatcagccacacccagaaagccaccctcgtgtgcctggctaccggcttctaccccgaccatgtggaactgtcttggtgggtcaacggcaaagaggtgcacagcggcgtgtctaccgacccccagccactgaaagaacagcccgccctgaacgacagccggtactgcctgagcagcagactgagagtgtccgccaccttctggcagaacccccggaaccacttcagatgccaggtgcagttctacggcctgagcgagaacgacgagtggacccaggacagagccaagcccgtgaccttcccacccatcaagaccgatgtgattacaatggaccccaaggacaactgctccaaggacgccaacgataccctgctgctccagctgaccaacaccagcgcctactacatgtacttgttgctgctgctgaagtccgtggtgtacttcgccatcatcacatgctgcctgctgcggagaaccgccttctgctgcaacggcgagaagtct

SEQ ID NO: 21510 - DNA, 531 bp, synthetic construct
  source 1..531: mol_type = other DNA
cctgaggtggccgtgttcgagcctagcgaggccgagatcagccacacccagaaagccaccctcgtgtgcctggctaccggcttctaccccgaccatgtggaactgtcttggtgggtcaacggcaaagaggtgcacagcggcgtgtctaccgacccccagccactgaaagaacagcccgccctgaacgacagccggtactgcctgagcagcagactgagagtgtccgccaccttctggcagaacccccggaaccacttcagatgccaggtgcagttctacggcctgagcgagaacgacgagtggacccaggacagagccaagcccgtgacccccatcaagaccgatgtgattacaatggaccccaaggacaactgctccaaggacgccaacgataccctgctgctccagctgaccaacaccagcgcctactacatgtacttgttgctgctgctgaagtccgtggtgtacttcgccatcatcacatgctgcctgctgcggagaaccgccttctgctgcaacggcgagaagtct

SEQ ID NO: 21511 - DNA, 507 bp, synthetic construct
  source 1..507: mol_type = other DNA
cctgaggtggccgtgttcgagcctagcgaggccgagatcagccacacccagaaagccaccctcgtgtgcctggctaccggcttctaccccgaccatgtggaactgtcttggtgggtcaacggcaaagaggtgcacagcggcgtgtctaccgacccccagccactgaaagaacagcccgccctgaacgacagccggtactgcctgagcagcagactgagagtgtccgccaccttctggcagaacccccggaaccacttcagatgccaggtgcagttctacggcctgagcgagaacgacgagtggacccaggacagagccaagcccgtgaccatggaccccaaggacaactgctccaaggacgccaacgataccctgctgctccagctgaccaacaccagcgcctactacatgtacttgttgctgctgctgaagtccgtggtgtacttcgccatcatcacatgctgcctgctgcggagaaccgccttctgctgcaacggcgagaagtct

SEQ ID NO: 21512 - DNA, 531 bp, synthetic construct; identical to SEQ ID NO: 21510
  source 1..531: mol_type = other DNA

SEQ ID NO: 21513 - DNA, 489 bp, synthetic construct
  source 1..489: mol_type = other DNA
cctgaggtggccgtgttcgagcctagcgaggccgagatcagccacacccagaaagccaccctcgtgtgcctggctaccggcttctaccccgaccatgtggaactgtcttggtgggtcaacggcaaagaggtgcacagcggcgtgtctaccgacccccagccactgaaagaacagcccgccctgaacgacagccggtactgcctgagcagcagactgagagtgtccgccaccttctggcagaacccccggaaccacttcagatgccaggtgcagttctacggcctgagcgagaacgacgagtggacccaggacagagccaagcccgtgacctgctccaaggacgccaacgataccctgctgctccagctgaccaacaccagcgcctactacatgtacttgttgctgctgctgaagtccgtggtgtacttcgccatcatcacatgctgcctgctgcggagaaccgccttctgctgcaacggcgagaagtct

SEQ ID NO: 21514 - DNA, 534 bp, synthetic construct
  source 1..534: mol_type = other DNA
cctgaggtggccgtgttcgagcctagcgaggccgagatcagccacacccagaaagccaccctcgtgtgcctggctaccggcttctaccccgaccatgtggaactgtcttggtgggtcaacggcaaagaggtgcacagcggcgtgtctaccgacccccagccactgaaagaacagcccgccctgaacgacagccggtactgcctgagcagcagactgagagtgtccgccaccttctggcagaacccccggaaccacttcagatgccaggtgcagttctacggcctgagcgagaacgacgagtggacccaggacagagccaagcccgtgaccgaagtgaaaaccgactccaccgaccacgtgaagcccaaagagacagagaacaccaagcagcccagcaagagctgccacaagcccaaggccatcgtgcacaccgagaaagtgaacatgatgagcctgaccgtgctgggcctgcggatgctgttcgccaaaaccgtggccgtgaacttcctgctgaccgccaagctgttcttcctc

SEQ ID NO: 21515 - DNA, 513 bp, synthetic construct
  source 1..513: mol_type = other DNA
cctgaggtggccgtgttcgagcctagcgaggccgagatcagccacacccagaaagccaccctcgtgtgcctggctaccggcttctaccccgaccatgtggaactgtcttggtgggtcaacggcaaagaggtgcacagcggcgtgtctaccgacccccagccactgaaagaacagcccgccctgaacgacagccggtactgcctgagcagcagactgagagtgtccgccaccttctggcagaacccccggaaccacttcagatgccaggtgcagttctacggcctgagcgagaacgacgagtggacccaggacagagccaagcccgtgaccgaccacgtgaagcccaaagagacagagaacaccaagcagcccagcaagagctgccacaagcccaaggccatcgtgcacaccgagaaagtgaacatgatgagcctgaccgtgctgggcctgcggatgctgttcgccaaaaccgtggccgtgaacttcctgctgaccgccaagctgttcttcctc

SEQ ID NO: 21516 - DNA, 492 bp, synthetic construct
  source 1..492: mol_type = other DNA
gacaagcagctggacgccgacgtgtcccccaagcctaccatcttcctgccctctatcgccgagacaaagctccagaaggccggcacctacctgtgcctgctggaaaagttcttcccagatgtgattaagatccactggcaggaaaagaagtccaacaccatcctgggcagccaggaaggcaacaccatgaagaccaacgacacctacatgaagttcagctggctgaccgtgcccgagaagtccctggacaaagaacacagatgcatcgtgcggcacgaaaacaacaagaacggcgtggaccaggaaatcatcatccccgaggacacattcttcccaagccccgagagcagctgcgacgtgaagctggtggaaaagagcttcgagacagacaccaacctgaacttccagaacctgagcgtgatcggcttcagaatcctgctgctgaaagtggccggctttaacctgctgatgaccctgcggctgtggtccagc

SEQ ID NO: 21517 - DNA, 462 bp, synthetic construct
  source 1..462: mol_type = other DNA
gacaagcagctggacgccgacgtgtcccccaagcctaccatcttcctgccctctatcgccgagacaaagctccagaaggccggcacctacctgtgcctgctggaaaagttcttcccagatgtgattaagatccactggcaggaaaagaagtccaacaccatcctgggcagccaggaaggcaacaccatgaagaccaacgacacctacatgaagttcagctggctgaccgtgcccgagaagtccctggacaaagaacacagatgcatcgtgcggcacgaaaacaacaagaacggcgtggaccaggaaatcatcgagagcagctgcgacgtgaagctggtggaaaagagcttcgagacagacaccaacctgaacttccagaacctgagcgtgatcggcttcagaatcctgctgctgaaagtggccggctttaacctgctgatgaccctgcggctgtggtccagc

SEQ ID NO: 21518 - DNA, 489 bp, synthetic construct
  source 1..489: mol_type = other DNA
gacaagcagctggacgccgacgtgtcccccaagcctaccatcttcctgccctctatcgccgagacaaagctccagaaggccggcacctacctgtgcctgctggaaaagttcttcccagatgtgattaagatccactggcaggaaaagaagtccaacaccatcctgggcagccaggaaggcaacaccatgaagaccaacgacacctacatgaagttcagctggctgaccgtgcccgagaagtccctggacaaagaacacagatgcatcgtgcggcacgaaaacaacaagaacggcgtggaccaggaaatcatccccgaggacacattcttcccaagccccgagagcagctgcgacgtgaagctggtggaaaagagcttcgagacagacaccaacctgaacttccagaacctgagcgtgatcggcttcagaatcctgctgctgaaagtggccggctttaacctgctgatgaccctgcggctgtggtccagc

SEQ ID NO: 21519 - DNA, 471 bp, synthetic construct
  source 1..471: mol_type = other DNA
gacaagcagctggacgccgacgtgtcccccaagcctaccatcttcctgccctctatcgccgagacaaagctccagaaggccggcacctacctgtgcctgctggaaaagttcttcccagatgtgattaagatccactggcaggaaaagaagtccaacaccatcctgggcagccaggaaggcaacaccatgaagaccaacgacacctacatgaagttcagctggctgaccgtgcccgagaagtccctggacaaagaacacagatgcatcgtgcggcacgaaaacaacaagaacggcgtggaccaggaaatcatcggcagagccgattgcggctttaccagcgagagctaccagcagggcgtgctgagcgccaccatcctgtacgagatcctgctgggcaaggccaccctgtacgccgtgctggtgtctgccctggtgctgatggctatggtcaagcggaaggacagccgggga

SEQ ID NO: 21520 - DNA, 465 bp, synthetic construct
  source 1..465: mol_type = other DNA
gacaagcagctggacgccgacgtgtcccccaagcctaccatcttcctgccctctatcgccgagacaaagctccagaaggccggcacctacctgtgcctgctggaaaagttcttcccagatgtgattaagatccactggcaggaaaagaagtccaacaccatcctgggcagccaggaaggcaacaccatgaagaccaacgacacctacatgaagttcagctggctgaccgtgcccgagaagtccctggacaaagaacacagatgcatcgtgcggcacgaaaacaacaagaacggcgtggaccaggaaatcatcgccgattgcggctttaccagcgagagctaccagcagggcgtgctgagcgccaccatcctgtacgagatcctgctgggcaaggccaccctgtacgccgtgctggtgtctgccctggtgctgatggctatggtcaagcggaaggacagccgggga

SEQ ID NO: 21521 - DNA, 495 bp, synthetic construct
  source 1..495: mol_type = other DNA
gacaagcagctggacgccgacgtgtcccccaagcctaccatcttcctgccctctatcgccgagacaaagctccagaaggccggcacctacctgtgcctgctggaaaagttcttcccagatgtgattaagatccactggcaggaaaagaagtccaacaccatcctgggcagccaggaaggcaacaccatgaagaccaacgacacctacatgaagttcagctggctgaccgtgcccgagaagtccctggacaaagaacacagatgcatcgtgcggcacgaaaacaacaagaacggcgtggaccaggaaatcatccagatcgtgtctgccgaagcctggggcagagccgattgcggctttaccagcgagagctaccagcagggcgtgctgagcgccaccatcctgtacgagatcctgctgggcaaggccaccctgtacgccgtgctggtgtctgccctggtgctgatggctatggtcaagcggaaggacagccgggga

SEQ ID NO: 21522 - DNA, 516 bp, synthetic construct
  source 1..516: mol_type = other DNA
gacaagcagctggacgccgacgtgtcccccaagcctaccatcttcctgccctctatcgccgagacaaagctccagaaggccggcacctacctgtgcctgctggaaaagttcttcccagatgtgattaagatccactggcaggaaaagaagtccaacaccatcctgggcagccaggaaggcaacaccatgaagaccaacgacacctacatgaagttcagctggctgaccgtgcccgagaagtccctggacaaagaacacagatgcatcgtgcggcacgaaaacaacaagaacggcgtggaccaggaaatcatcgaagtgaaaaccgactccaccgaccacgtgaagcccaaagagacagagaacaccaagcagcccagcaagagctgccacaagcccaaggccatcgtgcacaccgagaaagtgaacatgatgagcctgaccgtgctgggcctgcggatgctgttcgccaaaaccgtggccgtgaacttcctgctgaccgccaagctgttcttcctc

SEQ ID NO: 21523 - DNA, 495 bp, synthetic construct
  source 1..495: mol_type = other DNA
gacaagcagctggacgccgacgtgtcccccaagcctaccatcttcctgccctctatcgccgagacaaagctccagaaggccggcacctacctgtgcctgctggaaaagttcttcccagatgtgattaagatccactggcaggaaaagaagtccaacaccatcctgggcagccaggaaggcaacaccatgaagaccaacgacacctacatgaagttcagctggctgaccgtgcccgagaagtccctggacaaagaacacagatgcatcgtgcggcacgaaaacaacaagaacggcgtggaccaggaaatcatcgaccacgtgaagcccaaagagacagagaacaccaagcagcccagcaagagctgccacaagcccaaggccatcgtgcacaccgagaaagtgaacatgatgagcctgaccgtgctgggcctgcggatgctgttcgccaaaaccgtggccgtgaacttcctgctgaccgccaagctgttcttcctc

SEQ ID NO: 21524 - DNA, 498 bp, synthetic construct
  source 1..498: mol_type = other DNA
gacaagcagctggacgccgacgtgtcccccaagcctaccatcttcctgccctctatcgccgagacaaagctccagaaggccggcacctacctgtgcctgctggaaaagttcttcccagatgtgattaagatccactggcaggaaaagaagtccaacaccatcctgggcagccaggaaggcaacaccatgaagaccaacgacacctacatgaagttcagctggctgaccgtgcccgagaagtccctggacaaagaacacagatgcatcgtgcggcacgaaaacaacaagaacggcgtggaccaggaaatcatcttcccaatccccgaggacacattcttcccaagccccgagagcagctgcgacgtgaagctggtggaaaagagcttcgagacagacaccaacctgaacttccagaacctgagcgtgatcggcttcagaatcctgctgctgaaagtggccggctttaacctgctgatgaccctgcggctgtggtccagc

SEQ ID NO: 21525 - DNA, 468 bp, synthetic construct
  source 1..468: mol_type = other DNA
gacaagcagctggacgccgacgtgtcccccaagcctaccatcttcctgccctctatcgccgagacaaagctccagaaggccggcacctacctgtgcctgctggaaaagttcttcccagatgtgattaagatccactggcaggaaaagaagtccaacaccatcctgggcagccaggaaggcaacaccatgaagaccaacgacacctacatgaagttcagctggctgaccgtgcccgagaagtccctggacaaagaacacagatgcatcgtgcggcacgaaaacaacaagaacggcgtggaccaggaaatcatcttcccagagagcagctgcgacgtgaagctggtggaaaagagcttcgagacagacaccaacctgaacttccagaacctgagcgtgatcggcttcagaatcctgctgctgaaagtggccggctttaacctgctgatgaccctgcggctgtggtccagc

SEQ ID NO: 21526 - DNA, 495 bp, synthetic construct
  source 1..495: mol_type = other DNA
gacaagcagctggacgccgacgtgtcccccaagcctaccatcttcctgccctctatcgccgagacaaagctccagaaggccggcacctacctgtgcctgctggaaaagttcttcccagatgtgattaagatccactggcaggaaaagaagtccaacaccatcctgggcagccaggaaggcaacaccatgaagaccaacgacacctacatgaagttcagctggctgaccgtgcccgagaagtccctggacaaagaacacagatgcatcgtgcggcacgaaaacaacaagaacggcgtggaccaggaaatcatcttcccacccgaggacacattcttcccaagccccgagagcagctgcgacgtgaagctggtggaaaagagcttcgagacagacaccaacctgaacttccagaacctgagcgtgatcggcttcagaatcctgctgctgaaagtggccggctttaacctgctgatgaccctgcggctgtggtccagc

SEQ ID NO: 21527 - DNA, 477 bp, synthetic construct
  source 1..477: mol_type = other DNA
gacaagcagctggacgccgacgtgtcccccaagcctaccatcttcctgccctctatcgccgagacaaagctccagaaggccggcacctacctgtgcctgctggaaaagttcttcccagatgtgattaagatccactggcaggaaaagaagtccaacaccatcctgggcagccaggaaggcaacaccatgaagaccaacgacacctacatgaagttcagctggctgaccgtgcccgagaagtccctggacaaagaacacagatgcatcgtgcggcacgaaaacaacaagaacggcgtggaccaggaaatcatcttcccaggcagagccgattgcggctttaccagcgagagctaccagcagggcgtgctgagcgccaccatcctgtacgagatcctgctgggcaaggccaccctgtacgccgtgctggtgtctgccctggtgctgatggctatggtcaagcggaaggacagccgggga

SEQ ID NO: 21528 - DNA, 471 bp, synthetic construct
  source 1..471: mol_type = other DNA
gacaagcagctggacgccgacgtgtcccccaagcctaccatcttcctgccctctatcgccgagacaaagctccagaaggccggcacctacctgtgcctgctggaaaagttcttcccagatgtgattaagatccactggcaggaaaagaagtccaacaccatcctgggcagccaggaaggcaacaccatgaagaccaacgacacctacatgaagttcagctggctgaccgtgcccgagaagtccctggacaaagaacacagatgcatcgtgcggcacgaaaacaacaagaacggcgtggaccaggaaatcatcttcccagccgattgcggctttaccagcgagagctaccagcagggcgtgctgagcgccaccatcctgtacgagatcctgctgggcaaggccaccctgtacgccgtgctggtgtctgccctggtgctgatggctatggtcaagcggaaggacagccgggga

SEQ ID NO: 21529 - DNA, 501 bp, synthetic construct
  source 1..501: mol_type = other DNA
gacaagcagctggacgccgacgtgtcccccaagcctaccatcttcctgccctctatcgccgagacaaagctccagaaggccggcacctacctgtgcctgctggaaaagttcttcccagatgtgattaagatccactggcaggaaaagaagtccaacaccatcctgggcagccaggaaggcaacaccatgaagaccaacgacacctacatgaagttcagctggctgaccgtgcccgagaagtccctggacaaagaacacagatgcatcgtgcggcacgaaaacaacaagaacggcgtggaccaggaaatcatcttcccacagatcgtgtctgccgaagcctggggcagagccgattgcggctttaccagcgagagctaccagcagggcgtgctgagcgccaccatcctgtacgagatcctgctgggcaaggccaccctgtacgccgtgctggtgtctgccctggtgctgatggctatggtcaagcggaaggacagccgggga

SEQ ID NO: 21530 - DNA, 522 bp, synthetic construct
  source 1..522: mol_type = other DNA
gacaagcagctggacgccgacgtgtcccccaagcctaccatcttcctgccctctatcgccgagacaaagctccagaaggccggcacctacctgtgcctgctggaaaagttcttcccagatgtgattaagatccactggcaggaaaagaagtccaacaccatcctgggcagccaggaaggcaacaccatgaagaccaacgacacctacatgaagttcagctggctgaccgtgcccgagaagtccctggacaaagaacacagatgcatcgtgcggcacgaaaacaacaagaacggcgtggaccaggaaatcatcttcccagaagtgaaaaccgactccaccgaccacgtgaagcccaaagagacagagaacaccaagcagcccagcaagagctgccacaagcccaaggccatcgtgcacaccgagaaagtgaacatgatgagcctgaccgtgctgggcctgcggatgctgttcgccaaaaccgtggccgtgaacttcctgctgaccgccaagctgttcttcctc

SEQ ID NO: 21531 - DNA, 501 bp, synthetic construct
  source 1..501: mol_type = other DNA
gacaagcagctggacgccgacgtgtcccccaagcctaccatcttcctgccctctatcgccgagacaaagctccagaaggccggcacctacctgtgcctgctggaaaagttcttcccagatgtgattaagatccactggcaggaaaagaagtccaacaccatcctgggcagccaggaaggcaacaccatgaagaccaacgacacctacatgaagttcagctggctgaccgtgcccgagaagtccctggacaaagaacacagatgcatcgtgcggcacgaaaacaacaagaacggcgtggaccaggaaatcatcttcccagaccacgtgaagcccaaagagacagagaacaccaagcagcccagcaagagctgccacaagcccaaggccatcgtgcacaccgagaaagtgaacatgatgagcctgaccgtgctgggcctgcggatgctgttcgccaaaaccgtggccgtgaacttcctgctgaccgccaagctgttcttcctc

SEQ ID NO: 21532 - DNA, 522 bp, synthetic construct
  source 1..522: mol_type = other DNA
gacaagcagctggacgccgacgtgtcccccaagcctaccatcttcctgccctctatcgccgagacaaagctccagaaggccggcacctacctgtgcctgctggaaaagttcttcccagatgtgattaagatccactggcaggaaaagaagtccaacaccatcctgggcagccaggaaggcaacaccatgaagaccaacgacacctacatgaagttcagctggctgaccgtgcccgagaagtccctggacaaagaacacagatgcatcgtgcggcacgaaaacaacaagaacggcgtggaccaggaaatcatcttcccacccatcaagaccgatgtgattacaatccccgaggacacattcttcccaagccccgagagcagctgcgacgtgaagctggtggaaaagagcttcgagacagacaccaacctgaacttccagaacctgagcgtgatcggcttcagaatcctgctgctgaaagtggccggctttaacctgctgatgaccctgcggctgtggtccagc

SEQ ID NO: 21533 - DNA, 492 bp, synthetic construct
  source 1..492: mol_type = other DNA
gacaagcagctggacgccgacgtgtcccccaagcctaccatcttcctgccctctatcgccgagacaaagctccagaaggccggcacctacctgtgcctgctggaaaagttcttcccagatgtgattaagatccactggcaggaaaagaagtccaacaccatcctgggcagccaggaaggcaacaccatgaagaccaacgacacctacatgaagttcagctggctgaccgtgcccgagaagtccctggacaaagaacacagatgcatcgtgcggcacgaaaacaacaagaacggcgtggaccaggaaatcatcttcccacccatcaagaccgatgtgattacagagagcagctgcgacgtgaagctggtggaaaagagcttcgagacagacaccaacctgaacttccagaacctgagcgtgatcggcttcagaatcctgctgctgaaagtggccggctttaacctgctgatgaccctgcggctgtggtccagc

SEQ ID NO: 21534 - DNA, 519 bp, synthetic construct
  source 1..519: mol_type = other DNA
gacaagcagctggacgccgacgtgtcccccaagcctaccatcttcctgccctctatcgccgagacaaagctccagaaggccggcacctacctgtgcctgctggaaaagttcttcccagatgtgattaagatccactggcaggaaaagaagtccaacaccatcctgggcagccaggaaggcaacaccatgaagaccaacgacacctacatgaagttcagctggctgaccgtgcccgagaagtccctggacaaagaacacagatgcatcgtgcggcacgaaaacaacaagaacggcgtggaccaggaaatcatcttcccacccatcaagaccgatgtgattacacccgaggacacattcttcccaagccccgagagcagctgcgacgtgaagctggtggaaaagagcttcgagacagacaccaacctgaacttccagaacctgagcgtgatcggcttcagaatcctgctgctgaaagtggccggctttaacctgctgatgaccctgcggctgtggtccagc

SEQ ID NO: 21535 - DNA, 501 bp, synthetic construct
  source 1..501: mol_type = other DNA
gacaagcagctggacgccgacgtgtcccccaagcctaccatcttcctgccctctatcgccgagacaaagctccagaaggccggcacctacctgtgcctgctggaaaagttcttcccagatgtgattaagatccactggcaggaaaagaagtccaacaccatcctgggcagccaggaaggcaacaccatgaagaccaacgacacctacatgaagttcagctggctgaccgtgcccgagaagtccctggacaaagaacacagatgcatcgtgcggcacgaaaacaacaagaacggcgtggaccaggaaatcatcttcccacccatcaagaccgatgtgattacaggcagagccgattgcggctttaccagcgagagctaccagcagggcgtgctgagcgccaccatcctgtacgagatcctgctgggcaaggccaccctgtacgccgtgctggtgtctgccctggtgctgatggctatggtcaagcggaaggacagccgggga

SEQ ID NO: 21536 - DNA, 495 bp, synthetic construct
  source 1..495: mol_type = other DNA
gacaagcagctggacgccgacgtgtcccccaagcctaccatcttcctgccctctatcgccgagacaaagctccagaaggccggcacctacctgtgcctgctggaaaagttcttcccagatgtgattaagatccactggcaggaaaagaagtccaacaccatcctgggcagccaggaaggcaacaccatgaagaccaacgacacctacatgaagttcagctggctgaccgtgcccgagaagtccctggacaaagaacacagatgcatcgtgcggcacgaaaacaacaagaacggcgtggaccaggaaatcatcttcccacccatcaagaccgatgtgattacagccgattgcggctttaccagcgagagctaccagcagggcgtgctgagcgccaccatcctgtacgagatcctgctgggcaaggccaccctgtacgccgtgctggtgtctgccctggtgctgatggctatggtcaagcggaaggacagccgggga

SEQ ID NO: 21537 - DNA, 525 bp, synthetic construct
  source 1..525: mol_type = other DNA
gacaagcagctggacgccgacgtgtcccccaagcctaccatcttcctgccctctatcgccgagacaaagctccagaaggccggcacctacctgtgcctgctggaaaagttcttcccagatgtgattaagatccactggcaggaaaagaagtccaacaccatcctgggcagccaggaaggcaacaccatgaagaccaacgacacctacatgaagttcagctggctgaccgtgcccgagaagtccctggacaaagaacacagatgcatcgtgcggcacgaaaacaacaagaacggcgtggaccaggaaatcatcttcccacccatcaagaccgatgtgattacacagatcgtgtctgccgaagcctggggcagagccgattgcggctttaccagcgagagctaccagcagggcgtgctgagcgccaccatcctgtacgagatcctgctgggcaaggccaccctgtacgccgtgctggtgtctgccctggtgctgatggctatggtcaagcggaaggacagccgggga

SEQ ID NO: 21538 - DNA, 546 bp, synthetic construct
  source 1..546: mol_type = other DNA
gacaagcagctggacgccgacgtgtcccccaagcctaccatcttcctgccctctatcgccgagacaaagctccagaaggccggcacctacctgtgcctgctggaaaagttcttcccagatgtgattaagatccactggcaggaaaagaagtccaacaccatcctgggcagccaggaaggcaacaccatgaagaccaacgacacctacatgaagttcagctggctgaccgtgcccgagaagtccctggacaaagaacacagatgcatcgtgcggcacgaaaacaacaagaacggcgtggaccaggaaatcatcttcccacccatcaagaccgatgtgattacagaagtgaaaaccgactccaccgaccacgtgaagcccaaagagacagagaacaccaagcagcccagcaagagctgccacaagcccaaggccatcgtgcacaccgagaaagtgaacatgatgagcctgaccgtgctgggcctgcggatgctgttcgccaaaaccgtggccgtgaacttcctgctgaccgccaagctgttcttcctc

SEQ ID NO: 21539 - DNA, 525 bp, synthetic construct
  source 1..525: mol_type = other DNA
gacaagcagctggacgccgacgtgtcccccaagcctaccatcttcctgccctctatcgccgagacaaagctccagaaggccggcacctacctgtgcctgctggaaaagttcttcccagatgtgattaagatccactggcaggaaaagaagtccaacaccatcctgggcagccaggaaggcaacaccatgaagaccaacgacacctacatgaagttcagctggctgaccgtgcccgagaagtccctggacaaagaacacagatgcatcgtgcggcacgaaaacaacaagaacggcgtggaccaggaaatcatcttcccacccatcaagaccgatgtgattacagaccacgtgaagcccaaagagacagagaacaccaagcagcccagcaagagctgccacaagcccaaggccatcgtgcacaccgagaaagtgaacatgatgagcctgaccgtgctgggcctgcggatgctgttcgccaaaaccgtggccgtgaacttcctgctgaccgccaagctgttcttcctc

SEQ ID NO: 21540 - DNA, 381 bp, synthetic construct
  source 1..381: mol_type = other DNA
cccatcaagaccgatgtgattacaatggaccccaaggacaactgctccaaggacgccaacgataccctgctgctccagctgaccaacaccagcgcctactacatgtacttgttgctgctgctgaagtccgtggtgtacttcgccatcatcacatgctgcctgctgcggagaaccgccttctgctgcaacggcgagaagtctatccccgaggacacattcttcccaagccccgagagcagctgcgacgtgaagctggtggaaaagagcttcgagacagacaccaacctgaacttccagaacctgagcgtgatcggcttcagaatcctgctgctgaaagtggccggctttaacctgctgatgaccctgcggctgtggtccagc

SEQ ID NO: 21541 - DNA, 351 bp, synthetic construct
  source 1..351: mol_type = other DNA
cccatcaagaccgatgtgattacaatggaccccaaggacaactgctccaaggacgccaacgataccctgctgctccagctgaccaacaccagcgcctactacatgtacttgttgctgctgctgaagtccgtggtgtacttcgccatcatcacatgctgcctgctgcggagaaccgccttctgctgcaacggcgagaagtctgagagcagctgcgacgtgaagctggtggaaaagagcttcgagacagacaccaacctgaacttccagaacctgagcgtgatcggcttcagaatcctgctgctgaaagtggccggctttaacctgctgatgaccctgcggctgtggtccagc

SEQ ID NO: 21542 - DNA, 378 bp, synthetic construct
  source 1..378: mol_type = other DNA
cccatcaagaccgatgtgattacaatggaccccaaggacaactgctccaaggacgccaacgataccctgctgctccagctgaccaacaccagcgcctactacatgtacttgttgctgctgctgaagtccgtggtgtacttcgccatcatcacatgctgcctgctgcggagaaccgccttctgctgcaacggcgagaagtctcccgaggacacattcttcccaagccccgagagcagctgcgacgtgaagctggtggaaaagagcttcgagacagacaccaacctgaacttccagaacctgagcgtgatcggcttcagaatcctgctgctgaaagtggccggctttaacctgctgatgaccctgcggctgtggtccagc

SEQ ID NO: 21543 - DNA, 360 bp, synthetic construct
  source 1..360: mol_type = other DNA
cccatcaagaccgatgtgattacaatggaccccaaggacaactgctccaaggacgccaacgataccctgctgctccagctgaccaacaccagcgcctactacatgtacttgttgctgctgctgaagtccgtggtgtacttcgccatcatcacatgctgcctgctgcggagaaccgccttctgctgcaacggcgagaagtctggcagagccgattgcggctttaccagcgagagctaccagcagggcgtgctgagcgccaccatcctgtacgagatcctgctgggcaaggccaccctgtacgccgtgctggtgtctgccctggtgctgatggctatggtcaagcggaaggacagccgggga

SEQ ID NO: 21544 - DNA, 354 bp, synthetic construct
  source 1..354: mol_type = other DNA
cccatcaagaccgatgtgattacaatggaccccaaggacaactgctccaaggacgccaacgataccctgctgctccagctgaccaacaccagcgcctactacatgtacttgttgctgctgctgaagtccgtggtgtacttcgccatcatcacatgctgcctgctgcggagaaccgccttctgctgcaacggcgagaagtctgccgattgcggctttaccagcgagagctaccagcagggcgtgctgagcgccaccatcctgtacgagatcctgctgggcaaggccaccctgtacgccgtgctggtgtctgccctggtgctgatggctatggtcaagcggaaggacagccgggga

SEQ ID NO: 21545 - DNA, 384 bp, synthetic construct
  source 1..384: mol_type = other DNA
cccatcaagaccgatgtgattacaatggaccccaaggacaactgctccaaggacgccaacgataccctgctgctccagctgaccaacaccagcgcctactacatgtacttgttgctgctgctgaagtccgtggtgtacttcgccatcatcacatgctgcctgctgcggagaaccgccttctgctgcaacggcgagaagtctcagatcgtgtctgccgaagcctggggcagagccgattgcggctttaccagcgagagctaccagcagggcgtgctgagcgccaccatcctgtacgagatcctgctgggcaaggccaccctgtacgccgtgctggtgtctgccctggtgctgatggctatggtcaagcggaaggacagccgggga

SEQ ID NO: 21546 - DNA, 405 bp, synthetic construct
  source 1..405: mol_type = other DNA
cccatcaagaccgatgtgattacaatggaccccaaggacaactgctccaaggacgccaacgataccctgctgctccagctgaccaacaccagcgcctactacatgtacttgttgctgctgctgaagtccgtggtgtacttcgccatcatcacatgctgcctgctgcggagaaccgccttctgctgcaacggcgagaagtctgaagtgaaaaccgactccaccgaccacgtgaagcccaaagagacagagaacaccaagcagcccagcaagagctgccacaagcccaaggccatcgtgcacaccgagaaagtgaacatgatgagcctgaccgtgctgggcctgcggatgctgttcgccaaaaccgtggccgtgaacttcctgctgaccgccaagctgttcttcctc

SEQ ID NO: 21547 - DNA, 384 bp, synthetic construct
  source 1..384: mol_type = other DNA
cccatcaagaccgatgtgattacaatggaccccaaggacaactgctccaaggacgccaacgataccctgctgctccagctgaccaacaccagcgcctactacatgtacttgttgctgctgctgaagtccgtggtgtacttcgccatcatcacatgctgcctgctgcggagaaccgccttctgctgcaacggcgagaagtctgaccacgtgaagcccaaagagacagagaacaccaagcagcccagcaagagctgccacaagcccaaggccatcgtgcacaccgagaaagtgaacatgatgagcctgaccgtgctgggcctgcggatgctgttcgccaaaaccgtggccgtgaacttcctgctgaccgccaagctgttcttcctc

SEQ ID NO: 21548 - DNA, 537 bp, synthetic construct
  source 1..537: mol_type = other DNA
gacaagcagctggacgccgacgtgtcccccaagcctaccatcttcctgccctctatcgccgagacaaagctccagaaggccggcacctacctgtgcctgctggaaaagttcttcccagatgtgattaagatccactggcaggaaaagaagtccaacaccatcctgggcagccaggaaggcaacaccatgaagaccaacgacacctacatgaagttcagctggctgaccgtgcccgagaagtccctggacaaagaacacagatgcatcgtgcggcacgaaaacaacaagaacggcgtggaccaggaaatcatcttcccacccatcaagaccgatgtgattacaatggaccccaaggacatccccgaggacacattcttcccaagccccgagagcagctgcgacgtgaagctggtggaaaagagcttcgagacagacaccaacctgaacttccagaacctgagcgtgatcggcttcagaatcctgctgctgaaagtggccggctttaacctgctgatgaccctgcggctgtggtccagc

SEQ ID NO: 21549 - DNA, 507 bp, synthetic construct
  source 1..507: mol_type = other DNA
gacaagcagctggacgccgacgtgtcccccaagcctaccatcttcctgccctctatcgccgagacaaagctccagaaggccggcacctacctgtgcctgctggaaaagttcttcccagatgtgattaagatccactggcaggaaaagaagtccaacaccatcctgggcagccaggaaggcaacaccatgaagaccaacgacacctacatgaagttcagctggctgaccgtgcccgagaagtccctggacaaagaacacagatgcatcgtgcggcacgaaaacaacaagaacggcgtggaccaggaaatcatcttcccacccatcaagaccgatgtgattacaatggaccccaaggacgagagcagctgcgacgtgaagctggtggaaaagagcttcgagacagacaccaacctgaacttccagaacctgagcgtgatcggcttcagaatcctgctgctgaaagtggccggctttaacctgctgatgaccctgcggctgtggtccagc

SEQ ID NO: 21550 - DNA, 534 bp, synthetic construct
  source 1..534: mol_type = other DNA
gacaagcagctggacgccgacgtgtcccccaagcctaccatcttcctgccctctatcgccgagacaaagctccagaaggccggcacctacctgtgcctgctggaaaagttcttcccagatgtgattaagatccactggcaggaaaagaagtccaacaccatcctgggcagccaggaaggcaacaccatgaagaccaacgacacctacatgaagttcagctggctgaccgtgcccgagaagtccctggacaaagaacacagatgcatcgtgcggcacgaaaacaacaagaacggcgtggaccaggaaatcatcttcccacccatcaagaccgatgtgattacaatggaccccaaggaccccgaggacacattcttcccaagccccgagagcagctgcgacgtgaagctggtggaaaagagcttcgagacagacaccaacctgaacttccagaacctgagcgtgatcggcttcagaatcctgctgctgaaagtggccggctttaacctgctgatgaccctgcggctgtggtccagc

SEQ ID NO: 21551 - DNA, 516 bp, synthetic construct
  source 1..516: mol_type = other DNA
gacaagcagctggacgccgacgtgtcccccaagcctaccatcttcctgccctctatcgccgagacaaagctccagaaggccggcacctacctgtgcctgctggaaaagttcttcccagatgtgattaagatccactggcaggaaaagaagtccaacaccatcctgggcagccaggaaggcaacaccatgaagaccaacgacacctacatgaagttcagctggctgaccgtgcccgagaagtccctggacaaagaacacagatgcatcgtgcggcacgaaaacaacaagaacggcgtggaccaggaaatcatcttcccacccatcaagaccgatgtgattacaatggaccccaaggacggcagagccgattgcggctttaccagcgagagctaccagcagggcgtgctgagcgccaccatcctgtacgagatcctgctgggcaaggccaccctgtacgccgtgctggtgtctgccctggtgctgatggctatggtcaagcggaaggacagccgggga

SEQ ID NO: 21552 - DNA, 510 bp, synthetic construct
  source 1..510: mol_type = other DNA
gacaagcagctggacgccgacgtgtcccccaagcctaccatcttcctgccctctatcgccgagacaaagctccagaaggccggcacctacctgtgcctgctggaaaagttcttcccagatgtgattaagatccactggcaggaaaagaagtccaacaccatcctgggcagccaggaaggcaacaccatgaagaccaacgacacctacatgaagttcagctggctgaccgtgcccgagaagtccctggacaaagaacacagatgcatcgtgcggcacgaaaacaacaagaacggcgtggaccaggaaatcatcttcccacccatcaagaccgatgtgattacaatggaccccaaggacgccgattgcggctttaccagcgagagctaccagcagggcgtgctgagcgccaccatcctgtacgagatcctgctgggcaaggccaccctgtacgccgtgctggtgtctgccctggtgctgatggctatggtcaagcggaaggacagccgggga

SEQ ID NO: 21553 - DNA, 540 bp, synthetic construct
  source 1..540: mol_type = other DNA
gacaagcagctggacgccgacgtgtcccccaagcctaccatcttcctgccctctatcgccgagacaaagctccagaaggccggcacctacctgtgcctgctggaaaagttcttcccagatgtgattaagatccactggcaggaaaagaagtccaacaccatcctgggcagccaggaaggcaacaccatgaagaccaacgacacctacatgaagttcagctggctgaccgtgcccgagaagtccctggacaaagaacacagatgcatcgtgcggcacgaaaacaacaagaacggcgtggaccaggaaatcatcttcccacccatcaagaccgatgtgattacaatggaccccaaggaccagatcgtgtctgccgaagcctggggcagagccgattgcggctttaccagcgagagctaccagcagggcgtgctgagcgccaccatcctgtacgagatcctgctgggcaaggccaccctgtacgccgtgctggtgtctgccctggtgctgatggctatggtcaagcggaaggacagccgggga

SEQ ID NO: 21554 - DNA, 561 bp, synthetic construct
  source 1..561: mol_type = other DNA
gacaagcagctggacgccgacgtgtcccccaagcctaccatcttcctgccctctatcgccgagacaaagctccagaaggccggcacctacctgtgcctgctggaaaagttcttcccagatgtgattaagatccactggcaggaaaagaagtccaacaccatcctgggcagccaggaaggcaacaccatgaagaccaacgacacctacatgaagttcagctggctgaccgtgcccgagaagtccctggacaaagaacacagatgcatcgtgcggcacgaaaacaacaagaacggcgtggaccaggaaatcatcttcccacccatcaagaccgatgtgattacaatggaccccaaggacgaagtgaaaaccgactccaccgaccacgtgaagcccaaagagacagagaacaccaagcagcccagcaagagctgccacaagcccaaggccatcgtgcacaccgagaaagtgaacatgatgagcctgaccgtgctgggcctgcggatgctgttcgccaaaaccgtggccgtgaacttcctgctgaccgccaagctgttcttcctc

SEQ ID NO: 21555 - DNA, 540 bp, synthetic construct
  source 1..540: mol_type = other DNA
gacaagcagctggacgccgacgtgtcccccaagcctaccatcttcctgccctctatcgccgagacaaagctccagaaggccggcacctacctgtgcctgctggaaaagttcttcccagatgtgattaagatccactggcaggaaaagaagtccaacaccatcctgggcagccaggaaggcaacaccatgaagaccaacgacacctacatgaagttcagctggctgaccgtgcccgagaagtccctggacaaagaacacagatgcatcgtgcggcacgaaaacaacaagaacggcgtggaccaggaaatcatcttcccacccatcaagaccgatgtgattacaatggaccccaaggacgaccacgtgaagcccaaagagacagagaacaccaagcagcccagcaagagctgccacaagcccaaggccatcgtgcacaccgagaaagtgaacatgatgagcctgaccgtgctgggcctgcggatgctgttcgccaaaaccgtggccgtgaacttcctgctgaccgccaagctgttcttcctc

SEQ ID NO: 21556 - DNA, 522 bp, synthetic construct; identical to SEQ ID NO: 21532
  source 1..522: mol_type = other DNA

SEQ ID NO: 21557 - DNA, 492 bp, synthetic construct; identical to SEQ ID NO: 21533
  source 1..492: mol_type = other DNA

SEQ ID NO: 21558 - DNA, 519 bp, synthetic construct; identical to SEQ ID NO: 21534
  source 1..519: mol_type = other DNA

SEQ ID NO: 21559 - DNA, 501 bp, synthetic construct; identical to SEQ ID NO: 21535
  source 1..501: mol_type = other DNA

SEQ ID NO: 21560 - DNA, 495 bp, synthetic construct; identical to SEQ ID NO: 21536
  source 1..495: mol_type = other DNA

SEQ ID NO: 21561 - DNA, 525 bp, synthetic construct; identical to SEQ ID NO: 21537
  source 1..525: mol_type = other DNA

SEQ ID NO: 21562 - DNA, 546 bp, synthetic construct; identical to SEQ ID NO: 21538
  source 1..546: mol_type = other DNA

SEQ ID NO: 21563 - DNA, 525 bp, synthetic construct; identical to SEQ ID NO: 21539
  source 1..525: mol_type = other DNA

SEQ ID NO: 21564 - DNA, 465 bp, synthetic construct
  source 1..465: mol_type = other DNA
cccaagcctaccatcttcctgccctctatcgccgagacaaagctccagaaggccggcacctacctgtgcctgctggaaaagttcttcccagatgtgattaagatccactggcaggaaaagaagtccaacaccatcctgggcagccaggaaggcaacaccatgaagaccaacgacacctacatgaagttcagctggctgaccgtgcccgagaagtccctggacaaagaacacagatgcatcgtgcggcacgaaaacaacaagaacggcgtggaccaggaaatcatcatccccgaggacacattcttcccaagccccgagagcagctgcgacgtgaagctggtggaaaagagcttcgagacagacaccaacctgaacttccagaacctgagcgtgatcggcttcagaatcctgctgctgaaagtggccggctttaacctgctgatgaccctgcggctgtggtccagc

SEQ ID NO: 21565 - DNA, 435 bp, synthetic construct
  source 1..435: mol_type = other DNA
cccaagcctaccatcttcctgccctctatcgccgagacaaagctccagaaggccggcacctacctgtgcctgctggaaaagttcttcccagatgtgattaagatccactggcaggaaaagaagtccaacaccatcctgggcagccaggaaggcaacaccatgaagaccaacgacacctacatgaagttcagctggctgaccgtgcccgagaagtccctggacaaagaacacagatgcatcgtgcggcacgaaaacaacaagaacggcgtggaccaggaaatcatcgagagcagctgcgacgtgaagctggtggaaaagagcttcgagacagacaccaacctgaacttccagaacctgagcgtgatcggcttcagaatcctgctgctgaaagtggccggctttaacctgctgatgaccctgcggctgtggtccagc

SEQ ID NO: 21566 - DNA, 462 bp, synthetic construct
  source 1..462: mol_type = other DNA
cccaagcctaccatcttcctgccctctatcgccgagacaaagctccagaaggccggcacctacctgtgcctgctggaaaagttcttcccagatgtgattaagatccactggcaggaaaagaagtccaacaccatcctgggcagccaggaaggcaacaccatgaagaccaacgacacctacatgaagttcagctggctgaccgtgcccgagaagtccctggacaaagaacacagatgcatcgtgcggcacgaaaacaacaagaacggcgtggaccaggaaatcatccccgaggacacattcttcccaagccccgagagcagctgcgacgtgaagctggtggaaaagagcttcgagacagacaccaacctgaacttccagaacctgagcgtgatcggcttcagaatcctgctgctgaaagtggccggctttaacctgctgatgaccctgcggctgtggtccagc

SEQ ID NO: 21567 - DNA, 444 bp, synthetic construct
  source 1..444: mol_type = other DNA
cccaagcctaccatcttcctgccctctatcgccgagacaaagctccagaaggccggcacctacctgtgcctgctggaaaagttcttcccagatgtgattaagatccactggcaggaaaagaagtccaacaccatcctgggcagccaggaaggcaacaccatgaagaccaacgacacctacatgaagttcagctggctgaccgtgcccgagaagtccctggacaaagaacacagatgcatcgtgcggcacgaaaacaacaagaacggcgtggaccaggaaatcatcggcagagccgattgcggctttaccagcgagagctaccagcagggcgtgctgagcgccaccatcctgtacgagatcctgctgggcaaggccaccctgtacgccgtgctggtgtctgccctggtgctgatggctatggtcaagcggaaggacagccgggga

SEQ ID NO: 21568 - DNA, 438 bp, synthetic construct
  source 1..438: mol_type = other DNA
cccaagcctaccatcttcctgccctctatcgccgagacaaagctccagaaggccggcacctacctgtgcctgctggaaaagttcttcccagatgtgattaagatccactggcaggaaaagaagtccaacaccatcctgggcagccaggaaggcaacaccatgaagaccaacgacacctacatgaagttcagctggctgaccgtgcccgagaagtccctggacaaagaacacagatgcatcgtgcggcacgaaaacaacaagaacggcgtggaccaggaaatcatcgccgattgcggctttaccagcgagagctaccagcagggcgtgctgagcgccaccatcctgtacgagatcctgctgggcaaggccaccctgtacgccgtgctggtgtctgccctggtgctgatggctatggtcaagcggaaggacagccgggga

SEQ ID NO: 21569 - DNA, 468 bp, synthetic construct
  source 1..468: mol_type = other DNA
cccaagcctaccatcttcctgccctctatcgccgagacaaagctccagaaggccggcacctacctgtgcctgctggaaaagttcttcccagatgtgattaagatccactggcaggaaaagaagtccaacaccatcctgggcagccaggaaggcaacaccatgaagaccaacgacacctacatgaagttcagctggctgaccgtgcccgagaagtccctggacaaagaacacagatgcatcgtgcggcacgaaaacaacaagaacggcgtggaccaggaaatcatccagatcgtgtctgccgaagcctggggcagagccgattgcggctttaccagcgagagctaccagcagggcgtgctgagcgccaccatcctgtacgagatcctgctgggcaaggccaccctgtacgccgtgctggtgtctgccctggtgctgatggctatggtcaagcggaaggacagccgggga

SEQ ID NO: 21570 - DNA, 492 bp, synthetic construct; identical to SEQ ID NO: 17240
  source 1..492: mol_type = other DNA

SEQ ID NO: 21571 - DNA, 486 bp, synthetic construct
  source 1..486: mol_type = other DNA
cccaagcctaccatcttcctgccctctatcgccgagacaaagctccagaaggccggcacctacctgtgcctgctggaaaagttcttcccagatgtgattaagatccactggcaggaaaagaagtccaacaccatcctgggcagccaggaaggcaacaccatgaagaccaacgacacctacatgaagttcagctggctgaccgtgcccgagaagtccctggacaaagaacacagatgcatcgtgcggcacgaaaacaacaagaacggcgtggaccaggaaatcatccccatcaagaccgatgtgattacaatggaccccaaggacaactgctccaaggacgccaacgataccctgctgctccagctgaccaacaccagcgcctactacatgtacttgttgctgctgctgaagtccgtggtgtacttcgccatcatcacatgctgcctgctgcggagaaccgccttctgctgcaacggcgagaagtct

SEQ ID NO: 21572 - DNA, 462 bp, synthetic construct
  source 1..462: mol_type = other DNA
cccaagcctaccatcttcctgccctctatcgccgagacaaagctccagaaggccggcacctacctgtgcctgctggaaaagttcttcccagatgtgattaagatccactggcaggaaaagaagtccaacaccatcctgggcagccaggaaggcaacaccatgaagaccaacgacacctacatgaagttcagctggctgaccgtgcccgagaagtccctggacaaagaacacagatgcatcgtgcggcacgaaaacaacaagaacggcgtggaccaggaaatcatcatggaccccaaggacaactgctccaaggacgccaacgataccctgctgctccagctgaccaacaccagcgcctactacatgtacttgttgctgctgctgaagtccgtggtgtacttcgccatcatcacatgctgcctgctgcggagaaccgccttctgctgcaacggcgagaagtct

SEQ ID NO: 21573 - DNA, 486 bp, synthetic construct; identical to SEQ ID NO: 21571
  source 1..486: mol_type = other DNA

SEQ ID NO: 21574 - DNA, 444 bp, synthetic construct
  source 1..444: mol_type = other DNA
cccaagcctaccatcttcctgccctctatcgccgagacaaagctccagaaggccggcacctacctgtgcctgctggaaaagttcttcccagatgtgattaagatccactggcaggaaaagaagtccaacaccatcctgggcagccaggaaggcaacaccatgaagaccaacgacacctacatgaagttcagctggctgaccgtgcccgagaagtccctggacaaagaacacagatgcatcgtgcggcacgaaaacaacaagaacggcgtggaccaggaaatcatctgctccaaggacgccaacgataccctgctgctccagctgaccaacaccagcgcctactacatgtacttgttgctgctgctgaagtccgtggtgtacttcgccatcatcacatgctgcctgctgcggagaaccgccttctgctgcaacggcgagaagtct

SEQ ID NO: 21575 - DNA, 489 bp, synthetic construct
  source 1..489: mol_type = other DNA
cccaagcctaccatcttcctgccctctatcgccgagacaaagctccagaaggccggcacctacctgtgcctgctggaaaagttcttcccagatgtgattaagatccactggcaggaaaagaagtccaacaccatcctgggcagccaggaaggcaacaccatgaagaccaacgacacctacatgaagttcagctggctgaccgtgcccgagaagtccctggacaaagaacacagatgcatcgtgcggcacgaaaacaacaagaacggcgtggaccaggaaatcatcgaagtgaaaaccgactccaccgaccacgtgaagcccaaagagacagagaacaccaagcagcccagcaagagctgccacaagcccaaggccatcgtgcacaccgagaaagtgaacatgatgagcctgaccgtgctgggcctgcggatgctgttcgccaaaaccgtggccgtgaacttcctgctgaccgccaagctgttcttcctc

SEQ ID NO: 21576 - DNA, 468 bp, synthetic construct
  source 1..468: mol_type = other DNA
cccaagcctaccatcttcctgccctctatcgccgagacaaagctccagaaggccggcacctacctgtgcctgctggaaaagttcttcccagatgtgattaagatccactggcaggaaaagaagtccaacaccatcctgggcagccaggaaggcaacaccatgaagaccaacgacacctacatgaagttcagctggctgaccgtgcccgagaagtccctggacaaagaacacagatgcatcgtgcggcacgaaaacaacaagaacggcgtggaccaggaaatcatcgaccacgtgaagcccaaagagacagagaacaccaagcagcccagcaagagctgccacaagcccaaggccatcgtgcacaccgagaaagtgaacatgatgagcctgaccgtgctgggcctgcggatgctgttcgccaaaaccgtggccgtgaacttcctgctgaccgccaagctgttcttcctc

SEQ ID NO: 21577 - DNA, 435 bp, synthetic construct
  source 1..435: mol_type = other DNA
agccagcctcacaccaagcccagcgtgttcgtgatgaagaacggcaccaacgtggcctgcctcgtgaaagagttctaccccaaggacatcaggatcaacctggtgtccagcaagaagatcaccgagttcgaccccgccatcgtgatctcccccagcggcaagtacaacgccgtgaagctggggaagtacgaggacagcaacagcgtgacctgctccgtgcagcacgacaacaagaccgtgcacagcaccgactttatccccgaggacacattcttcccaagccccgagagcagctgcgacgtgaagctggtggaaaagagcttcgagacagacaccaacctgaacttccagaacctgagcgtgatcggcttcagaatcctgctgctgaaagtggccggctttaacctgctgatgaccctgcggctgtggtccagc

SEQ ID NO: 21578 - DNA, 405 bp, synthetic construct
  source 1..405: mol_type = other DNA
agccagcctcacaccaagcccagcgtgttcgtgatgaagaacggcaccaacgtggcctgcctcgtgaaagagttctaccccaaggacatcaggatcaacctggtgtccagcaagaagatcaccgagttcgaccccgccatcgtgatctcccccagcggcaagtacaacgccgtgaagctggggaagtacgaggacagcaacagcgtgacctgctccgtgcagcacgacaacaagaccgtgcacagcaccgactttgagagcagctgcgacgtgaagctggtggaaaagagcttcgagacagacaccaacctgaacttccagaacctgagcgtgatcggcttcagaatcctgctgctgaaagtggccggctttaacctgctgatgaccctgcggctgtggtccagc

SEQ ID NO: 21579 - DNA, 432 bp, synthetic construct
  source 1..432: mol_type = other DNA
agccagcctcacaccaagcccagcgtgttcgtgatgaagaacggcaccaacgtggcctgcctcgtgaaagagttctaccccaaggacatcaggatcaacctggtgtccagcaagaagatcaccgagttcgaccccgccatcgtgatctcccccagcggcaagtacaacgccgtgaagctggggaagtacgaggacagcaacagcgtgacctgctccgtgcagcacgacaacaagaccgtgcacagcaccgactttcccgaggacacattcttcccaagccccgagagcagctgcgacgtgaagctggtggaaaagagcttcgagacagacaccaacctgaacttccagaacctgagcgtgatcggcttcagaatcctgctgctgaaagtggccggctttaacctgctgatgaccctgcggctgtggtccagc

SEQ ID NO: 21580 - DNA, 414 bp, synthetic construct
  source 1..414: mol_type = other DNA
agccagcctcacaccaagcccagcgtgttcgtgatgaagaacggcaccaacgtggcctgcctcgtgaaagagttctaccccaaggacatcaggatcaacctggtgtccagcaagaagatcaccgagttcgaccccgccatcgtgatctcccccagcggcaagtacaacgccgtgaagctggggaagtacgaggacagcaacagcgtgacctgctccgtgcagcacgacaacaagaccgtgcacagcaccgactttggcagagccgattgcggctttaccagcgagagctaccagcagggcgtgctgagcgccaccatcctgtacgagatcctgctgggcaaggccaccctgtacgccgtgctggtgtctgccctggtgctgatggctatggtcaagcggaaggacagccgggga

SEQ ID NO: 21581 - DNA, 408 bp, synthetic construct
  source 1..408: mol_type = other DNA
agccagcctcacaccaagcccagcgtgttcgtgatgaagaacggcaccaacgtggcctgcctcgtgaaagagttctaccccaaggacatcaggatcaacctggtgtccagcaagaagatcaccgagttcgaccccgccatcgtgatctcccccagcggcaagtacaacgccgtgaagctggggaagtacgaggacagcaacagcgtgacctgctccgtgcagcacgacaacaagaccgtgcacagcaccgactttgccgattgcggctttaccagcgagagctaccagcagggcgtgctgagcgccaccatcctgtacgagatcctgctgggcaaggccaccctgtacgccgtgctggtgtctgccctggtgctgatggctatggtcaagcggaaggacagccgggga

SEQ ID NO: 21582 - DNA, 438 bp, synthetic construct
  source 1..438: mol_type = other DNA
agccagcctcacaccaagcccagcgtgttcgtgatgaagaacggcaccaacgtggcctgcctcgtgaaagagttctaccccaaggacatcaggatcaacctggtgtccagcaagaagatcaccgagttcgaccccgccatcgtgatctcccccagcggcaagtacaacgccgtgaagctggggaagtacgaggacagcaacagcgtgacctgctccgtgcagcacgacaacaagaccgtgcacagcaccgactttcagatcgtgtctgccgaagcctggggcagagccgattgcggctttaccagcgagagctaccagcagggcgtgctgagcgccaccatcctgtacgagatcctgctgggcaaggccaccctgtacgccgtgctggtgtctgccctggtgctgatggctatggtcaagcggaaggacagccgggga

SEQ ID NO: 21583 - DNA, 462 bp, synthetic construct
  source 1..462: mol_type = other DNA
agccagcctcacaccaagcccagcgtgttcgtgatgaagaacggcaccaacgtggcctgcctcgtgaaagagttctaccccaaggacatcaggatcaacctggtgtccagcaagaagatcaccgagttcgaccccgccatcgtgatctcccccagcggcaagtacaacgccgtgaagctggggaagtacgaggacagcaacagcgtgacctgctccgtgcagcacgacaacaagaccgtgcacagcaccgactttttcccacccatcaagaccgatgtgattacaatggaccccaaggacaactgctccaaggacgccaacgataccctgctgctccagctgaccaacaccagcgcctactacatgtacttgttgctgctgctgaagtccgtggtgtacttcgccatcatcacatgctgcctgctgcggagaaccgccttctgctgcaacggcgagaagtct

SEQ ID NO: 21584 - DNA, 456 bp, synthetic construct
  source 1..456: mol_type = other DNA
agccagcctcacaccaagcccagcgtgttcgtgatgaagaacggcaccaacgtggcctgcctcgtgaaagagttctaccccaaggacatcaggatcaacctggtgtccagcaagaagatcaccgagttcgaccccgccatcgtgatctcccccagcggcaagtacaacgccgtgaagctggggaagtacgaggacagcaacagcgtgacctgctccgtgcagcacgacaacaagaccgtgcacagcaccgactttcccatcaagaccgatgtgattacaatggaccccaaggacaactgctccaaggacgccaacgataccctgctgctccagctgaccaacaccagcgcctactacatgtacttgttgctgctgctgaagtccgtggtgtacttcgccatcatcacatgctgcctgctgcggagaaccgccttctgctgcaacggcgagaagtct

SEQ ID NO: 21585 - DNA, 432 bp, synthetic construct
  source 1..432: mol_type = other DNA
agccagcctcacaccaagcccagcgtgttcgtgatgaagaacggcaccaacgtggcctgcctcgtgaaagagttctaccccaaggacatcaggatcaacctggtgtccagcaagaagatcaccgagttcgaccccgccatcgtgatctcccccagcggcaagtacaacgccgtgaagctggggaagtacgaggacagcaacagcgtgacctgctccgtgcagcacgacaacaagaccgtgcacagcaccgactttatggaccccaaggacaactgctccaaggacgccaacgataccctgctgctccagctgaccaacaccagcgcctactacatgtacttgttgctgctgctgaagtccgtggtgtacttcgccatcatcacatgctgcctgctgcggagaaccgccttctgctgcaacggcgagaagtct

SEQ ID NO: 21586 - DNA, 459 bp, synthetic construct; identical to SEQ ID NO: 495
  source 1..459: mol_type = other DNA

SEQ ID NO: 21587 - DNA, 438 bp, synthetic construct
  source 1..438: mol_type = other DNA
agccagcctcacaccaagcccagcgtgttcgtgatgaagaacggcaccaacgtggcctgcctcgtgaaagagttctaccccaaggacatcaggatcaacctggtgtccagcaagaagatcaccgagttcgaccccgccatcgtgatctcccccagcggcaagtacaacgccgtgaagctggggaagtacgaggacagcaacagcgtgacctgctccgtgcagcacgacaacaagaccgtgcacagcaccgactttgaccacgtgaagcccaaagagacagagaacaccaagcagcccagcaagagctgccacaagcccaaggccatcgtgcacaccgagaaagtgaacatgatgagcctgaccgtgctgggcctgcggatgctgttcgccaaaaccgtggccgtgaacttcctgctgaccgccaagctgttcttcctc

SEQ ID NO: 21588 - DNA, 456 bp, synthetic construct
  source 1..456: mol_type = other DNA
agccagcctcacaccaagcccagcgtgttcgtgatgaagaacggcaccaacgtggcctgcctcgtgaaagagttctaccccaaggacatcaggatcaacctggtgtccagcaagaagatcaccgagttcgaccccgccatcgtgatctcccccagcggcaagtacaacgccgtgaagctggggaagtacgaggacagcaacagcgtgacctgctccgtgcagcacgacaacaagaccgtgcacagcaccgactttgaagtgaaaaccgactccaccatccccgaggacacattcttcccaagccccgagagcagctgcgacgtgaagctggtggaaaagagcttcgagacagacaccaacctgaacttccagaacctgagcgtgatcggcttcagaatcctgctgctgaaagtggccggctttaacctgctgatgaccctgcggctgtggtccagc

SEQ ID NO: 21589 - DNA, 426 bp, synthetic construct
  source 1..426: mol_type = other DNA
agccagcctcacaccaagcccagcgtgttcgtgatgaagaacggcaccaacgtggcctgcctcgtgaaagagttctaccccaaggacatcaggatcaacctggtgtccagcaagaagatcaccgagttcgaccccgccatcgtgatctcccccagcggcaagtacaacgccgtgaagctggggaagtacgaggacagcaacagcgtgacctgctccgtgcagcacgacaacaagaccgtgcacagcaccgactttgaagtgaaaaccgactccaccgagagcagctgcgacgtgaagctggtggaaaagagcttcgagacagacaccaacctgaacttccagaacctgagcgtgatcggcttcagaatcctgctgctgaaagtggccggctttaacctgctgatgaccctgcggctgtggtccagc

SEQ ID NO: 21590 - DNA, 453 bp, synthetic construct
  source 1..453: mol_type = other DNA
agccagcctcacaccaagcccagcgtgttcgtgatgaagaacggcaccaacgtggcctgcctcgtgaaagagttctaccccaaggacatcaggatcaacctggtgtccagcaagaagatcaccgagttcgaccccgccatcgtgatctcccccagcggcaagtacaacgccgtgaagctggggaagtacgaggacagcaacagcgtgacctgctccgtgcagcacgacaacaagaccgtgcacagcaccgactttgaagtgaaaaccgactccacccccgaggacacattcttcccaagccccgagagcagctgcgacgtgaagctggtggaaaagagcttcgagacagacaccaacctgaacttccagaacctgagcgtgatcggcttcagaatcctgctgctgaaagtggccggctttaacctgctgatgaccctgcggctgtggtccagc

SEQ ID NO: 21591 - DNA, 435 bp, synthetic construct
  source 1..435: mol_type = other DNA
agccagcctcacaccaagcccagcgtgttcgtgatgaagaacggcaccaacgtggcctgcctcgtgaaagagttctaccccaaggacatcaggatcaacctggtgtccagcaagaagatcaccgagttcgaccccgccatcgtgatctcccccagcggcaagtacaacgccgtgaagctggggaagtacgaggacagcaacagcgtgacctgctccgtgcagcacgacaacaagaccgtgcacagcaccgactttgaagtgaaaaccgactccaccggcagagccgattgcggctttaccagcgagagctaccagcagggcgtgctgagcgccaccatcctgtacgagatcctgctgggcaaggccaccctgtacgccgtgctggtgtctgccctggtgctgatggctatggtcaagcggaaggacagccgggga

SEQ ID NO: 21592 - DNA, 429 bp, synthetic construct
  source 1..429: mol_type = other DNA
agccagcctcacaccaagcccagcgtgttcgtgatgaagaacggcaccaacgtggcctgcctcgtgaaagagttctaccccaaggacatcaggatcaacctggtgtccagcaagaagatcaccgagttcgaccccgccatcgtgatctcccccagcggcaagtacaacgccgtgaagctggggaagtacgaggacagcaacagcgtgacctgctccgtgcagcacgacaacaagaccgtgcacagcaccgactttgaagtgaaaaccgactccaccgccgattgcggctttaccagcgagagctaccagcagggcgtgctgagcgccaccatcctgtacgagatcctgctgggcaaggccaccctgtacgccgtgctggtgtctgccctggtgctgatggctatggtcaagcggaaggacagccgggga

SEQ ID NO: 21593 - DNA, 459 bp, synthetic construct
  source 1..459: mol_type = other DNA
agccagcctcacaccaagcccagcgtgttcgtgatgaagaacggcaccaacgtggcctgcctcgtgaaagagttctaccccaaggacatcaggatcaacctggtgtccagcaagaagatcaccgagttcgaccccgccatcgtgatctcccccagcggcaagtacaacgccgtgaagctggggaagtacgaggacagcaacagcgtgacctgctccgtgcagcacgacaacaagaccgtgcacagcaccgactttgaagtgaaaaccgactccacccagatcgtgtctgccgaagcctggggcagagccgattgcggctttaccagcgagagctaccagcagggcgtgctgagcgccaccatcctgtacgagatcctgctgggcaaggccaccctgtacgccgtgctggtgtctgccctggtgctgatggctatggtcaagcggaaggacagccgggga

SEQ ID NO: 21594 - DNA, 483 bp, synthetic construct
  source 1..483: mol_type = other DNA
agccagcctcacaccaagcccagcgtgttcgtgatgaagaacggcaccaacgtggcctgcctcgtgaaagagttctaccccaaggacatcaggatcaacctggtgtccagcaagaagatcaccgagttcgaccccgccatcgtgatctcccccagcggcaagtacaacgccgtgaagctggggaagtacgaggacagcaacagcgtgacctgctccgtgcagcacgacaacaagaccgtgcacagcaccgactttgaagtgaaaaccgactccaccttcccacccatcaagaccgatgtgattacaatggaccccaaggacaactgctccaaggacgccaacgataccctgctgctccagctgaccaacaccagcgcctactacatgtacttgttgctgctgctgaagtccgtggtgtacttcgccatcatcacatgctgcctgctgcggagaaccgccttctgctgcaacggcgagaagtct

SEQ ID NO: 21595 - DNA, 477 bp, synthetic construct
  source 1..477: mol_type = other DNA
agccagcctcacaccaagcccagcgtgttcgtgatgaagaacggcaccaacgtggcctgcctcgtgaaagagttctaccccaaggacatcaggatcaacctggtgtccagcaagaagatcaccgagttcgaccccgccatcgtgatctcccccagcggcaagtacaacgccgtgaagctggggaagtacgaggacagcaacagcgtgacctgctccgtgcagcacgacaacaagaccgtgcacagcaccgactttgaagtgaaaaccgactccacccccatcaagaccgatgtgattacaatggaccccaaggacaactgctccaaggacgccaacgataccctgctgctccagctgaccaacaccagcgcctactacatgtacttgttgctgctgctgaagtccgtggtgtacttcgccatcatcacatgctgcctgctgcggagaaccgccttctgctgcaacggcgagaagtct

SEQ ID NO: 21596 - DNA, 453 bp, synthetic construct
  source 1..453: mol_type = other DNA
agccagcctcacaccaagcccagcgtgttcgtgatgaagaacggcaccaacgtggcctgcctcgtgaaagagttctaccccaaggacatcaggatcaacctggtgtccagcaagaagatcaccgagttcgaccccgccatcgtgatctcccccagcggcaagtacaacgccgtgaagctggggaagtacgaggacagcaacagcgtgacctgctccgtgcagcacgacaacaagaccgtgcacagcaccgactttgaagtgaaaaccgactccaccatggaccccaaggacaactgctccaaggacgccaacgataccctgctgctccagctgaccaacaccagcgcctactacatgtacttgttgctgctgctgaagtccgtggtgtacttcgccatcatcacatgctgcctgctgcggagaaccgccttctgctgcaacggcgagaagtct

SEQ ID NO: 21597 - DNA, 477 bp, synthetic construct; identical to SEQ ID NO: 21595
  source 1..477: mol_type = other DNA

SEQ ID NO: 21598 - DNA, 435 bp, synthetic construct
  source 1..435: mol_type = other DNA
agccagcctcacaccaagcccagcgtgttcgtgatgaagaacggcaccaacgtggcctgcctcgtgaaagagttctaccccaaggacatcaggatcaacctggtgtccagcaagaagatcaccgagttcgaccccgccatcgtgatctcccccagcggcaagtacaacgccgtgaagctggggaagtacgaggacagcaacagcgtgacctgctccgtgcagcacgacaacaagaccgtgcacagcaccgactttgaagtgaaaaccgactccacctgctccaaggacgccaacgataccctgctgctccagctgaccaacaccagcgcctactacatgtacttgttgctgctgctgaagtccgtggtgtacttcgccatcatcacatgctgcctgctgcggagaaccgccttctgctgcaacggcgagaagtct

SEQ ID NO: 21599 - DNA, 435 bp, synthetic construct; identical to SEQ ID NO: 21577
  source 1..435: mol_type = other DNA

SEQ ID NO: 21600 - DNA, 405 bp, synthetic construct; identical to SEQ ID NO: 21578
  source 1..405: mol_type = other DNA

SEQ ID NO: 21601 - DNA, 432 bp, synthetic construct; identical to SEQ ID NO: 21579
  source 1..432: mol_type = other DNA

SEQ ID NO: 21602 - DNA, 414 bp, synthetic construct; identical to SEQ ID NO: 21580
  source 1..414: mol_type = other DNA

SEQ ID NO: 21603 - DNA, 408 bp, synthetic construct; identical to SEQ ID NO: 21581
  source 1..408: mol_type = other DNA

SEQ ID NO: 21604 - DNA, 438 bp, synthetic construct; identical to SEQ ID NO: 21582
  source 1..438: mol_type = other DNA

SEQ ID NO: 21605 - DNA, 462 bp, synthetic construct; identical to SEQ ID NO: 21583
  source 1..462: mol_type = other DNA

SEQ ID NO: 21606 - DNA, 456 bp, synthetic construct; identical to SEQ ID NO: 21584
  source 1..456: mol_type = other DNA

SEQ ID NO: 21607 - DNA, 432 bp, synthetic construct; identical to SEQ ID NO: 21585
  source 1..432: mol_type = other DNA

SEQ ID NO: 21608 - DNA, 456 bp, synthetic construct; identical to SEQ ID NO: 21584
  source 1..456: mol_type = other DNA

SEQ ID NO: 21609 - DNA, 414 bp, synthetic construct
  source 1..414: mol_type = other DNA
agccagcctcacaccaagcccagcgtgttcgtgatgaagaacggcaccaacgtggcctgcctcgtgaaagagttctaccccaaggacatcaggatcaacctggtgtccagcaagaagatcaccgagttcgaccccgccatcgtgatctcccccagcggcaagtacaacgccgtgaagctggggaagtacgaggacagcaacagcgtgacctgctccgtgcagcacgacaacaagaccgtgcacagcaccgacttttgctccaaggacgccaacgataccctgctgctccagctgaccaacaccagcgcctactacatgtacttgttgctgctgctgaagtccgtggtgtacttcgccatcatcacatgctgcctgctgcggagaaccgccttctgctgcaacggcgagaagtct

SEQ ID NO: 21610 - DNA, 456 bp, synthetic construct; identical to SEQ ID NO: 21588
  source 1..456: mol_type = other DNA

SEQ ID NO: 21611 - DNA, 426 bp, synthetic construct; identical to SEQ ID NO: 21589
  source 1..426: mol_type = other DNA

SEQ ID NO: 21612 - DNA, 453 bp, synthetic construct; identical to SEQ ID NO: 21590
  source 1..453: mol_type = other DNA

SEQ ID NO: 21613 - DNA, 435 bp, synthetic construct; identical to SEQ ID NO: 21591
  source 1..435: mol_type = other DNA

SEQ ID NO: 21614 - DNA, 429 bp, synthetic construct; identical to SEQ ID NO: 21592
  source 1..429: mol_type = other DNA

SEQ ID NO: 21615 - DNA, 459 bp, synthetic construct; identical to SEQ ID NO: 21593
  source 1..459: mol_type = other DNA

SEQ ID NO: 21616 - DNA, 483 bp, synthetic construct; identical to SEQ ID NO: 21594
  source 1..483: mol_type = other DNA

SEQ ID NO: 21617 - DNA, 477 bp, synthetic construct; identical to SEQ ID NO: 21595
  source 1..477: mol_type = other DNA

SEQ ID NO: 21618 - DNA, 453 bp, synthetic construct; identical to SEQ ID NO: 21596
  source 1..453: mol_type = other DNA

SEQ ID NO: 21619 - DNA, 477 bp, synthetic construct; identical to SEQ ID NO: 21595
  source 1..477: mol_type = other DNA

SEQ ID NO: 21620 - DNA, 435 bp, synthetic construct; identical to SEQ ID NO: 21598
  source 1..435: mol_type = other DNA

SEQ ID NO: 21621 - DNA, 369 bp, synthetic construct
  source 1..369: mol_type = other DNA
ctgcgggatagcaagagcagcgacaagagcgtgtgtctgttcaccgacttcgacagccagaccaacgtgtcccagagcaaggactccgacgtgtacatcaccgataagaccgtgctggacatgcggagcatggacttcaagagcaactccgccgtggcctggtccaacaagtccgatttcgcctgcgccaacgccttcaacaacagcattggcagagccgattgcggctttaccagcgagagctaccagcagggcgtgctgagcgccaccatcctgtacgagatcctgctgggcaaggccaccctgtacgccgtgctggtgtctgccctggtgctgatggctatggtcaagcggaaggacagccgggga

SEQ ID NO: 21622 - DNA, 363 bp, synthetic construct
  source 1..363: mol_type = other DNA
ctgcgggatagcaagagcagcgacaagagcgtgtgtctgttcaccgacttcgacagccagaccaacgtgtcccagagcaaggactccgacgtgtacatcaccgataagaccgtgctggacatgcggagcatggacttcaagagcaactccgccgtggcctggtccaacaagtccgatttcgcctgcgccaacgccttcaacaacagcattgccgattgcggctttaccagcgagagctaccagcagggcgtgctgagcgccaccatcctgtacgagatcctgctgggcaaggccaccctgtacgccgtgctggtgtctgccctggtgctgatggctatggtcaagcggaaggacagccgggga

SEQ ID NO: 21623 - DNA, 393 bp, synthetic construct
  source 1..393: mol_type = other DNA
ctgcgggatagcaagagcagcgacaagagcgtgtgtctgttcaccgacttcgacagccagaccaacgtgtcccagagcaaggactccgacgtgtacatcaccgataagaccgtgctggacatgcggagcatggacttcaagagcaactccgccgtggcctggtccaacaagtccgatttcgcctgcgccaacgccttcaacaacagcattcagatcgtgtctgccgaagcctggggcagagccgattgcggctttaccagcgagagctaccagcagggcgtgctgagcgccaccatcctgtacgagatcctgctgggcaaggccaccctgtacgccgtgctggtgtctgccctggtgctgatggctatggtcaagcggaaggacagccgggga

SEQ ID NO: 21624 - DNA, 417 bp, synthetic construct
  source 1..417: mol_type = other DNA
ctgcgggatagcaagagcagcgacaagagcgtgtgtctgttcaccgacttcgacagccagaccaacgtgtcccagagcaaggactccgacgtgtacatcaccgataagaccgtgctggacatgcggagcatggacttcaagagcaactccgccgtggcctggtccaacaagtccgatttcgcctgcgccaacgccttcaacaacagcattttcccacccatcaagaccgatgtgattacaatggaccccaaggacaactgctccaaggacgccaacgataccctgctgctccagctgaccaacaccagcgcctactacatgtacttgttgctgctgctgaagtccgtggtgtacttcgccatcatcacatgctgcctgctgcggagaaccgccttctgctgcaacggcgagaagtct

SEQ ID NO: 21625 - DNA, 411 bp, synthetic construct
  source 1..411: mol_type = other DNA
ctgcgggatagcaagagcagcgacaagagcgtgtgtctgttcaccgacttcgacagccagaccaacgtgtcccagagcaaggactccgacgtgtacatcaccgataagaccgtgctggacatgcggagcatggacttcaagagcaactccgccgtggcctggtccaacaagtccgatttcgcctgcgccaacgccttcaacaacagcattcccatcaagaccgatgtgattacaatggaccccaaggacaactgctccaaggacgccaacgataccctgctgctccagctgaccaacaccagcgcctactacatgtacttgttgctgctgctgaagtccgtggtgtacttcgccatcatcacatgctgcctgctgcggagaaccgccttctgctgcaacggcgagaagtct

SEQ ID NO: 21626 - DNA, 387 bp, synthetic construct
  source 1..387: mol_type = other DNA
ctgcgggatagcaagagcagcgacaagagcgtgtgtctgttcaccgacttcgacagccagaccaacgtgtcccagagcaaggactccgacgtgtacatcaccgataagaccgtgctggacatgcggagcatggacttcaagagcaactccgccgtggcctggtccaacaagtccgatttcgcctgcgccaacgccttcaacaacagcattatggaccccaaggacaactgctccaaggacgccaacgataccctgctgctccagctgaccaacaccagcgcctactacatgtacttgttgctgctgctgaagtccgtggtgtacttcgccatcatcacatgctgcctgctgcggagaaccgccttctgctgcaacggcgagaagtct

SEQ ID NO: 21627 - DNA, 411 bp, synthetic construct; identical to SEQ ID NO: 21625
  source 1..411: mol_type = other DNA

SEQ ID NO: 21628 - DNA, 369 bp, synthetic construct
  source 1..369: mol_type = other DNA
ctgcgggatagcaagagcagcgacaagagcgtgtgtctgttcaccgacttcgacagccagaccaacgtgtcccagagcaaggactccgacgtgtacatcaccgataagaccgtgctggacatgcggagcatggacttcaagagcaactccgccgtggcctggtccaacaagtccgatttcgcctgcgccaacgccttcaacaacagcatttgctccaaggacgccaacgataccctgctgctccagctgaccaacaccagcgcctactacatgtacttgttgctgctgctgaagtccgtggtgtacttcgccatcatcacatgctgcctgctgcggagaaccgccttctgctgcaacggcgagaagtct

SEQ ID NO: 21629 - DNA, 414 bp, synthetic construct
  source 1..414: mol_type = other DNA
ctgcgggatagcaagagcagcgacaagagcgtgtgtctgttcaccgacttcgacagccagaccaacgtgtcccagagcaaggactccgacgtgtacatcaccgataagaccgtgctggacatgcggagcatggacttcaagagcaactccgccgtggcctggtccaacaagtccgatttcgcctgcgccaacgccttcaacaacagcattgaagtgaaaaccgactccaccgaccacgtgaagcccaaagagacagagaacaccaagcagcccagcaagagctgccacaagcccaaggccatcgtgcacaccgagaaagtgaacatgatgagcctgaccgtgctgggcctgcggatgctgttcgccaaaaccgtggccgtgaacttcctgctgaccgccaagctgttcttcctc

SEQ ID NO: 21630 - DNA, 393 bp, synthetic construct
  source 1..393: mol_type = other DNA
ctgcgggatagcaagagcagcgacaagagcgtgtgtctgttcaccgacttcgacagccagaccaacgtgtcccagagcaaggactccgacgtgtacatcaccgataagaccgtgctggacatgcggagcatggacttcaagagcaactccgccgtggcctggtccaacaagtccgatttcgcctgcgccaacgccttcaacaacagcattgaccacgtgaagcccaaagagacagagaacaccaagcagcccagcaagagctgccacaagcccaaggccatcgtgcacaccgagaaagtgaacatgatgagcctgaccgtgctgggcctgcggatgctgttcgccaaaaccgtggccgtgaacttcctgctgaccgccaagctgttcttcctc

SEQ ID NO: 21631 - DNA, 399 bp, synthetic construct
  source 1..399: mol_type = other DNA
ctgcgggatagcaagagcagcgacaagagcgtgtgtctgttcaccgacttcgacagccagaccaacgtgtcccagagcaaggactccgacgtgtacatcaccgataagaccgtgctggacatgcggagcatggacttcaagagcaactccgccgtggcctggtccaacaagtccgatttcgcctgcgccaacgccttcaacaacagcattatccccgaggacacattcttcccaagccccggcagagccgattgcggctttaccagcgagagctaccagcagggcgtgctgagcgccaccatcctgtacgagatcctgctgggcaaggccaccctgtacgccgtgctggtgtctgccctggtgctgatggctatggtcaagcggaaggacagccgggga

SEQ ID NO: 21632 - DNA, 393 bp, synthetic construct
  source 1..393: mol_type = other DNA
ctgcgggatagcaagagcagcgacaagagcgtgtgtctgttcaccgacttcgacagccagaccaacgtgtcccagagcaaggactccgacgtgtacatcaccgataagaccgtgctggacatgcggagcatggacttcaagagcaactccgccgtggcctggtccaacaagtccgatttcgcctgcgccaacgccttcaacaacagcattatccccgaggacacattcttcccaagccccgccgattgcggctttaccagcgagagctaccagcagggcgtgctgagcgccaccatcctgtacgagatcctgctgggcaaggccaccctgtacgccgtgctggtgtctgccctggtgctgatggctatggtcaagcggaaggacagccgggga

SEQ ID NO: 21633 - DNA, 423 bp, synthetic construct
  source 1..423: mol_type = other DNA
ctgcgggatagcaagagcagcgacaagagcgtgtgtctgttcaccgacttcgacagccagaccaacgtgtcccagagcaaggactccgacgtgtacatcaccgataagaccgtgctggacatgcggagcatggacttcaagagcaactccgccgtggcctggtccaacaagtccgatttcgcctgcgccaacgccttcaacaacagcattatccccgaggacacattcttcccaagcccccagatcgtgtctgccgaagcctggggcagagccgattgcggctttaccagcgagagctaccagcagggcgtgctgagcgccaccatcctgtacgagatcctgctgggcaaggccaccctgtacgccgtgctggtgtctgccctggtgctgatggctatggtcaagcggaaggacagccgggga

SEQ ID NO: 21634 - DNA, 447 bp, synthetic construct
  source 1..447: mol_type = other DNA
ctgcgggatagcaagagcagcgacaagagcgtgtgtctgttcaccgacttcgacagccagaccaacgtgtcccagagcaaggactccgacgtgtacatcaccgataagaccgtgctggacatgcggagcatggacttcaagagcaactccgccgtggcctggtccaacaagtccgatttcgcctgcgccaacgccttcaacaacagcattatccccgaggacacattcttcccaagccccttcccacccatcaagaccgatgtgattacaatggaccccaaggacaactgctccaaggacgccaacgataccctgctgctccagctgaccaacaccagcgcctactacatgtacttgttgctgctgctgaagtccgtggtgtacttcgccatcatcacatgctgcctgctgcggagaaccgccttctgctgcaacggcgagaagtct

SEQ ID NO: 21635 - DNA, 441 bp, synthetic construct
  source 1..441: mol_type = other DNA
ctgcgggatagcaagagcagcgacaagagcgtgtgtctgttcaccgacttcgacagccagaccaacgtgtcccagagcaaggactccgacgtgtacatcaccgataagaccgtgctggacatgcggagcatggacttcaagagcaactccgccgtggcctggtccaacaagtccgatttcgcctgcgccaacgccttcaacaacagcattatccccgaggacacattcttcccaagcccccccatcaagaccgatgtgattacaatggaccccaaggacaactgctccaaggacgccaacgataccctgctgctccagctgaccaacaccagcgcctactacatgtacttgttgctgctgctgaagtccgtggtgtacttcgccatcatcacatgctgcctgctgcggagaaccgccttctgctgcaacggcgagaagtct

SEQ ID NO: 21636 - DNA, 417 bp, synthetic construct
  source 1..417: mol_type = other DNA
ctgcgggatagcaagagcagcgacaagagcgtgtgtctgttcaccgacttcgacagccagaccaacgtgtcccagagcaaggactccgacgtgtacatcaccgataagaccgtgctggacatgcggagcatggacttcaagagcaactccgccgtggcctggtccaacaagtccgatttcgcctgcgccaacgccttcaacaacagcattatccccgaggacacattcttcccaagccccatggaccccaaggacaactgctccaaggacgccaacgataccctgctgctccagctgaccaacaccagcgcctactacatgtacttgttgctgctgctgaagtccgtggtgtacttcgccatcatcacatgctgcctgctgcggagaaccgccttctgctgcaacggcgagaagtct

SEQ ID NO: 21637 - DNA, 441 bp, synthetic construct; identical to SEQ ID NO: 21635
  source 1..441: mol_type = other DNA

SEQ ID NO: 21638 - DNA, 399 bp, synthetic construct
  source 1..399: mol_type = other DNA
ctgcgggatagcaagagcagcgacaagagcgtgtgtctgttcaccgacttcgacagccagaccaacgtgtcccagagcaaggactccgacgtgtacatcaccgataagaccgtgctggacatgcggagcatggacttcaagagcaactccgccgtggcctggtccaacaagtccgatttcgcctgcgccaacgccttcaacaacagcattatccccgaggacacattcttcccaagcccctgctccaaggacgccaacgataccctgctgctccagctgaccaacaccagcgcctactacatgtacttgttgctgctgctgaagtccgtggtgtacttcgccatcatcacatgctgcctgctgcggagaaccgccttctgctgcaacggcgagaagtct

SEQ ID NO: 21639 - DNA, 444 bp, synthetic construct
  source 1..444: mol_type = other DNA
ctgcgggatagcaagagcagcgacaagagcgtgtgtctgttcaccgacttcgacagccagaccaacgtgtcccagagcaaggactccgacgtgtacatcaccgataagaccgtgctggacatgcggagcatggacttcaagagcaactccgccgtggcctggtccaacaagtccgatttcgcctgcgccaacgccttcaacaacagcattatccccgaggacacattcttcccaagccccgaagtgaaaaccgactccaccgaccacgtgaagcccaaagagacagagaacaccaagcagcccagcaagagctgccacaagcccaaggccatcgtgcacaccgagaaagtgaacatgatgagcctgaccgtgctgggcctgcggatgctgttcgccaaaaccgtggccgtgaacttcctgctgaccgccaagctgttcttcctc

SEQ ID NO: 21640 - DNA, 423 bp, synthetic construct
  source 1..423: mol_type = other DNA
ctgcgggatagcaagagcagcgacaagagcgtgtgtctgttcaccgacttcgacagccagaccaacgtgtcccagagcaaggactccgacgtgtacatcaccgataagaccgtgctggacatgcggagcatggacttcaagagcaactccgccgtggcctggtccaacaagtccgatttcgcctgcgccaacgccttcaacaacagcattatccccgaggacacattcttcccaagccccgaccacgtgaagcccaaagagacagagaacaccaagcagcccagcaagagctgccacaagcccaaggccatcgtgcacaccgagaaagtgaacatgatgagcctgaccgtgctgggcctgcggatgctgttcgccaaaaccgtggccgtgaacttcctgctgaccgccaagctgttcttcctc

SEQ ID NO: 21641 - DNA, 411 bp, synthetic construct
  source 1..411: mol_type = other DNA
ctgcgggatagcaagagcagcgacaagagcgtgtgtctgttcaccgacttcgacagccagaccaacgtgtcccagagcaaggactccgacgtgtacatcaccgataagaccgtgctggacatgcggagcatggacttcaagagcaactccgccgtggcctggtccaacaagtccgatttcgcctgcgccaacgccttcaacaacagcattatccccgaggacacattcttcccaagccccgagagcagctgcggcagagccgattgcggctttaccagcgagagctaccagcagggcgtgctgagcgccaccatcctgtacgagatcctgctgggcaaggccaccctgtacgccgtgctggtgtctgccctggtgctgatggctatggtcaagcggaaggacagccgggga

SEQ ID NO: 21642 - DNA, 405 bp, synthetic construct
  source 1..405: mol_type = other DNA
ctgcgggatagcaagagcagcgacaagagcgtgtgtctgttcaccgacttcgacagccagaccaacgtgtcccagagcaaggactccgacgtgtacatcaccgataagaccgtgctggacatgcggagcatggacttcaagagcaactccgccgtggcctggtccaacaagtccgatttcgcctgcgccaacgccttcaacaacagcattatccccgaggacacattcttcccaagccccgagagcagctgcgccgattgcggctttaccagcgagagctaccagcagggcgtgctgagcgccaccatcctgtacgagatcctgctgggcaaggccaccctgtacgccgtgctggtgtctgccctggtgctgatggctatggtcaagcggaaggacagccgggga

SEQ ID NO: 21643 - DNA, 435 bp, synthetic construct
  source 1..435: mol_type = other DNA
ctgcgggatagcaagagcagcgacaagagcgtgtgtctgttcaccgacttcgacagccagaccaacgtgtcccagagcaaggactccgacgtgtacatcaccgataagaccgtgctggacatgcggagcatggacttcaagagcaactccgccgtggcctggtccaacaagtccgatttcgcctgcgccaacgccttcaacaacagcattatccccgaggacacattcttcccaagccccgagagcagctgccagatcgtgtctgccgaagcctggggcagagccgattgcggctttaccagcgagagctaccagcagggcgtgctgagcgccaccatcctgtacgagatcctgctgggcaaggccaccctgtacgccgtgctggtgtctgccctggtgctgatggctatggtcaagcggaaggacagccgggga

SEQ ID NO: 21644 - DNA, 459 bp, synthetic construct
  source 1..459: mol_type = other DNA
ctgcgggatagcaagagcagcgacaagagcgtgtgtctgttcaccgacttcgacagccagaccaacgtgtcccagagcaaggactccgacgtgtacatcaccgataagaccgtgctggacatgcggagcatggacttcaagagcaactccgccgtggcctggtccaacaagtccgatttcgcctgcgccaacgccttcaacaacagcattatccccgaggacacattcttcccaagccccgagagcagctgcttcccacccatcaagaccgatgtgattacaatggaccccaaggacaactgctccaaggacgccaacgataccctgctgctccagctgaccaacaccagcgcctactacatgtacttgttgctgctgctgaagtccgtggtgtacttcgccatcatcacatgctgcctgctgcggagaaccgccttctgctgcaacggcgagaagtct

SEQ ID NO: 21645 - DNA, 453 bp, synthetic construct
  source 1..453: mol_type = other DNA
ctgcgggatagcaagagcagcgacaagagcgtgtgtctgttcaccgacttcgacagccagaccaacgtgtcccagagcaaggactccgacgtgtacatcaccgataagaccgtgctggacatgcggagcatggacttcaagagcaactccgccgtggcctggtccaacaagtccgatttcgcctgcgccaacgccttcaacaacagcattatccccgaggacacattcttcccaagccccgagagcagctgccccatcaagaccgatgtgattacaatggaccccaaggacaactgctccaaggacgccaacgataccctgctgctccagctgaccaacaccagcgcctactacatgtacttgttgctgctgctgaagtccgtggtgtacttcgccatcatcacatgctgcctgctgcggagaaccgccttctgctgcaacggcgagaagtct

SEQ ID NO: 21646 - DNA, 429 bp, synthetic construct
  source 1..429: mol_type = other DNA
ctgcgggatagcaagagcagcgacaagagcgtgtgtctgttcaccgacttcgacagccagaccaacgtgtcccagagcaaggactccgacgtgtacatcaccgataagaccgtgctggacatgcggagcatggacttcaagagcaactccgccgtggcctggtccaacaagtccgatttcgcctgcgccaacgccttcaacaacagcattatccccgaggacacattcttcccaagccccgagagcagctgcatggaccccaaggacaactgctccaaggacgccaacgataccctgctgctccagctgaccaacaccagcgcctactacatgtacttgttgctgctgctgaagtccgtggtgtacttcgccatcatcacatgctgcctgctgcggagaaccgccttctgctgcaacggcgagaagtct

SEQ ID NO: 21647 - DNA, 453 bp, synthetic construct; identical to SEQ ID NO: 21645
  source 1..453: mol_type = other DNA

SEQ ID NO: 21648 - DNA, 411 bp, synthetic construct
  source 1..411: mol_type = other DNA
ctgcgggatagcaagagcagcgacaagagcgtgtgtctgttcaccgacttcgacagccagaccaacgtgtcccagagcaaggactccgacgtgtacatcaccgataagaccgtgctggacatgcggagcatggacttcaagagcaactccgccgtggcctggtccaacaagtccgatttcgcctgcgccaacgccttcaacaacagcattatccccgaggacacattcttcccaagccccgagagcagctgctgctccaaggacgccaacgataccctgctgctccagctgaccaacaccagcgcctactacatgtacttgttgctgctgctgaagtccgtggtgtacttcgccatcatcacatgctgcctgctgcggagaaccgccttctgctgcaacggcgagaagtct

SEQ ID NO: 21649 - DNA, 456 bp, synthetic construct
  source 1..456: mol_type = other DNA
ctgcgggatagcaagagcagcgacaagagcgtgtgtctgttcaccgacttcgacagccagaccaacgtgtcccagagcaaggactccgacgtgtacatcaccgataagaccgtgctggacatgcggagcatggacttcaagagcaactccgccgtggcctggtccaacaagtccgatttcgcctgcgccaacgccttcaacaacagcattatccccgaggacacattcttcccaagccccgagagcagctgcgaagtgaaaaccgactccaccgaccacgtgaagcccaaagagacagagaacaccaagcagcccagcaagagctgccacaagcccaaggccatcgtgcacaccgagaaagtgaacatgatgagcctgaccgtgctgggcctgcggatgctgttcgccaaaaccgtggccgtgaacttcctgctgaccgccaagctgttcttcctc

SEQ ID NO: 21650 - DNA, 435 bp, synthetic construct
  source 1..435: mol_type = other DNA
ctgcgggatagcaagagcagcgacaagagcgtgtgtctgttcaccgacttcgacagccagaccaacgtgtcccagagcaaggactccgacgtgtacatcaccgataagaccgtgctggacatgcggagcatggacttcaagagcaactccgccgtggcctggtccaacaagtccgatttcgcctgcgccaacgccttcaacaacagcattatccccgaggacacattcttcccaagccccgagagcagctgcgaccacgtgaagcccaaagagacagagaacaccaagcagcccagcaagagctgccacaagcccaaggccatcgtgcacaccgagaaagtgaacatgatgagcctgaccgtgctgggcctgcggatgctgttcgccaaaaccgtggccgtgaacttcctgctgaccgccaagctgttcttcctc

SEQ ID NO: 21651 - DNA, 372 bp, synthetic construct
  source 1..372: mol_type = other DNA
ctgcgggatagcaagagcagcgacaagagcgtgtgtctgttcaccgacttcgacagccagaccaacgtgtcccagagcaaggactccgacgtgtacatcaccgataagaccgtgctggacatgcggagcatggacttcaagagcaactccgccgtggcctggtccaacaagtccgatttcgcctgcgccaacgccttcaacaacagcattatcggcagagccgattgcggctttaccagcgagagctaccagcagggcgtgctgagcgccaccatcctgtacgagatcctgctgggcaaggccaccctgtacgccgtgctggtgtctgccctggtgctgatggctatggtcaagcggaaggacagccgggga

SEQ ID NO: 21652 - DNA, 366 bp, synthetic construct
  source 1..366: mol_type = other DNA
ctgcgggatagcaagagcagcgacaagagcgtgtgtctgttcaccgacttcgacagccagaccaacgtgtcccagagcaaggactccgacgtgtacatcaccgataagaccgtgctggacatgcggagcatggacttcaagagcaactccgccgtggcctggtccaacaagtccgatttcgcctgcgccaacgccttcaacaacagcattatcgccgattgcggctttaccagcgagagctaccagcagggcgtgctgagcgccaccatcctgtacgagatcctgctgggcaaggccaccctgtacgccgtgctggtgtctgccctggtgctgatggctatggtcaagcggaaggacagccgggga

SEQ ID NO: 21653 - DNA, 396 bp, synthetic construct
  source 1..396: mol_type = other DNA
ctgcgggatagcaagagcagcgacaagagcgtgtgtctgttcaccgacttcgacagccagaccaacgtgtcccagagcaaggactccgacgtgtacatcaccgataagaccgtgctggacatgcggagcatggacttcaagagcaactccgccgtggcctggtccaacaagtccgatttcgcctgcgccaacgccttcaacaacagcattatccagatcgtgtctgccgaagcctggggcagagccgattgcggctttaccagcgagagctaccagcagggcgtgctgagcgccaccatcctgtacgagatcctgctgggcaaggccaccctgtacgccgtgctggtgtctgccctggtgctgatggctatggtcaagcggaaggacagccgggga

SEQ ID NO: 21654 - DNA, 420 bp, synthetic construct
  source 1..420: mol_type = other DNA
ctgcgggatagcaagagcagcgacaagagcgtgtgtctgttcaccgacttcgacagccagaccaacgtgtcccagagcaaggactccgacgtgtacatcaccgataagaccgtgctggacatgcggagcatggacttcaagagcaactccgccgtggcctggtccaacaagtccgatttcgcctgcgccaacgccttcaacaacagcattatcttcccacccatcaagaccgatgtgattacaatggaccccaaggacaactgctccaaggacgccaacgataccctgctgctccagctgaccaacaccagcgcctactacatgtacttgttgctgctgctgaagtccgtggtgtacttcgccatcatcacatgctgcctgctgcggagaaccgccttctgctgcaacggcgagaagtct

SEQ ID NO: 21655 - DNA, 414 bp, synthetic construct
  source 1..414: mol_type = other DNA
ctgcgggatagcaagagcagcgacaagagcgtgtgtctgttcaccgacttcgacagccagaccaacgtgtcccagagcaaggactccgacgtgtacatcaccgataagaccgtgctggacatgcggagcatggacttcaagagcaactccgccgtggcctggtccaacaagtccgatttcgcctgcgccaacgccttcaacaacagcattatccccatcaagaccgatgtgattacaatggaccccaaggacaactgctccaaggacgccaacgataccctgctgctccagctgaccaacaccagcgcctactacatgtacttgttgctgctgctgaagtccgtggtgtacttcgccatcatcacatgctgcctgctgcggagaaccgccttctgctgcaacggcgagaagtct

SEQ ID NO: 21656 - DNA, 390 bp, synthetic construct
  source 1..390: mol_type = other DNA
ctgcgggatagcaagagcagcgacaagagcgtgtgtctgttcaccgacttcgacagccagaccaacgtgtcccagagcaaggactccgacgtgtacatcaccgataagaccgtgctggacatgcggagcatggacttcaagagcaactccgccgtggcctggtccaacaagtccgatttcgcctgcgccaacgccttcaacaacagcattatcatggaccccaaggacaactgctccaaggacgccaacgataccctgctgctccagctgaccaacaccagcgcctactacatgtacttgttgctgctgctgaagtccgtggtgtacttcgccatcatcacatgctgcctgctgcggagaaccgccttctgctgcaacggcgagaagtct

SEQ ID NO: 21657 - DNA, 414 bp, synthetic construct; identical to SEQ ID NO: 21655
  source 1..414: mol_type = other DNA

SEQ ID NO: 21658 - DNA, 372 bp, synthetic construct
  source 1..372: mol_type = other DNA
ctgcgggatagcaagagcagcgacaagagcgtgtgtctgttcaccgacttcgacagccagaccaacgtgtcccagagcaaggactccgacgtgtacatcaccgataagaccgtgctggacatgcggagcatggacttcaagagcaactccgccgtggcctggtccaacaagtccgatttcgcctgcgccaacgccttcaacaacagcattatctgctccaaggacgccaacgataccctgctgctccagctgaccaacaccagcgcctactacatgtacttgttgctgctgctgaagtccgtggtgtacttcgccatcatcacatgctgcctgctgcggagaaccgccttctgctgcaacggcgagaagtct

SEQ ID NO: 21659 - DNA, 417 bp, synthetic construct
  source 1..417: mol_type = other DNA
ctgcgggatagcaagagcagcgacaagagcgtgtgtctgttcaccgacttcgacagccagaccaacgtgtcccagagcaaggactccgacgtgtacatcaccgataagaccgtgctggacatgcggagcatggacttcaagagcaactccgccgtggcctggtccaacaagtccgatttcgcctgcgccaacgccttcaacaacagcattatcgaagtgaaaaccgactccaccgaccacgtgaagcccaaagagacagagaacaccaagcagcccagcaagagctgccacaagcccaaggccatcgtgcacaccgagaaagtgaacatgatgagcctgaccgtgctgggcctgcggatgctgttcgccaaaaccgtggccgtgaacttcctgctgaccgccaagctgttcttcctc

SEQ ID NO: 21660 - DNA, 396 bp, synthetic construct
  source 1..396: mol_type = other DNA
ctgcgggatagcaagagcagcgacaagagcgtgtgtctgttcaccgacttcgacagccagaccaacgtgtcccagagcaaggactccgacgtgtacatcaccgataagaccgtgctggacatgcggagcatggacttcaagagcaactccgccgtggcctggtccaacaagtccgatttcgcctgcgccaacgccttcaacaacagcattatcgaccacgtgaagcccaaagagacagagaacaccaagcagcccagcaagagctgccacaagcccaaggccatcgtgcacaccgagaaagtgaacatgatgagcctgaccgtgctgggcctgcggatgctgttcgccaaaaccgtggccgtgaacttcctgctgaccgccaagctgttcttcctc

SEQ ID NO: 21661 - DNA, 411 bp, synthetic construct; identical to SEQ ID NO: 21641
  source 1..411: mol_type = other DNA

SEQ ID NO: 21662 - DNA, 405 bp, synthetic construct; identical to SEQ ID NO: 21642
  source 1..405: mol_type = other DNA

SEQ ID NO: 21663 - DNA, 435 bp, synthetic construct; identical to SEQ ID NO: 21643
  source 1..435: mol_type = other DNA

SEQ ID NO: 21664 - DNA, 459 bp, synthetic construct; identical to SEQ ID NO: 21644
  source 1..459: mol_type = other DNA

SEQ ID NO: 21665 - DNA, 453 bp, synthetic construct; identical to SEQ ID NO: 21645
  source 1..453: mol_type = other DNA

SEQ ID NO: 21666 - DNA, 429 bp, synthetic construct; identical to SEQ ID NO: 21646
  source 1..429: mol_type = other DNA

SEQ ID NO: 21667 - DNA, 453 bp, synthetic construct; identical to SEQ ID NO: 21645
  source 1..453: mol_type = other DNA

SEQ ID NO: 21668 - DNA, 411 bp, synthetic construct; identical to SEQ ID NO: 21648
  source 1..411: mol_type = other DNA

SEQ ID NO: 21669 - DNA, 456 bp, synthetic construct; identical to SEQ ID NO: 21649
  source 1..456: mol_type = other DNA

SEQ ID NO: 21670 - DNA, 435 bp, synthetic construct; identical to SEQ ID NO: 21650
  source 1..435: mol_type = other DNA

SEQ ID NO: 21671 - DNA, 531 bp, synthetic construct
  source 1..531: mol_type = other DNA
gaggtggccgtgttcgagcctagcgaggccgagatcagccacacccagaaagccaccctcgtgtgcctggctaccggcttctaccccgaccatgtggaactgtcttggtgggtcaacggcaaagaggtgcacagcggcgtgtctaccgacccccagccactgaaagaacagcccgccctgaacgacagccggtactgcctgagcagcagactgagagtgtccgccaccttctggcagaacccccggaaccacttcagatgccaggtgcagttctacggcctgagcgagaacgacgagtggacccaggacagagccaagcccgtgacccagatcgtgtctgccgaagcctggatccccgaggacacattcttcccaagccccgagagcagctgcgacgtgaagctggtggaaaagagcttcgagacagacaccaacctgaacttccagaacctgagcgtgatcggcttcagaatcctgctgctgaaagtggccggctttaacctgctgatgaccctgcggctgtggtccagc

SEQ ID NO: 21672 - DNA, 501 bp, synthetic construct
  source 1..501: mol_type = other DNA
gaggtggccgtgttcgagcctagcgaggccgagatcagccacacccagaaagccaccctcgtgtgcctggctaccggcttctaccccgaccatgtggaactgtcttggtgggtcaacggcaaagaggtgcacagcggcgtgtctaccgacccccagccactgaaagaacagcccgccctgaacgacagccggtactgcctgagcagcagactgagagtgtccgccaccttctggcagaacccccggaaccacttcagatgccaggtgcagttctacggcctgagcgagaacgacgagtggacccaggacagagccaagcccgtgacccagatcgtgtctgccgaagcctgggagagcagctgcgacgtgaagctggtggaaaagagcttcgagacagacaccaacctgaacttccagaacctgagcgtgatcggcttcagaatcctgctgctgaaagtggccggctttaacctgctgatgaccctgcggctgtggtccagc

SEQ ID NO: 21673 - DNA, 528 bp, synthetic construct
  source 1..528: mol_type = other DNA
gaggtggccgtgttcgagcctagcgaggccgagatcagccacacccagaaagccaccctcgtgtgcctggctaccggcttctaccccgaccatgtggaactgtcttggtgggtcaacggcaaagaggtgcacagcggcgtgtctaccgacccccagccactgaaagaacagcccgccctgaacgacagccggtactgcctgagcagcagactgagagtgtccgccaccttctggcagaacccccggaaccacttcagatgccaggtgcagttctacggcctgagcgagaacgacgagtggacccaggacagagccaagcccgtgacccagatcgtgtctgccgaagcctggcccgaggacacattcttcccaagccccgagagcagctgcgacgtgaagctggtggaaaagagcttcgagacagacaccaacctgaacttccagaacctgagcgtgatcggcttcagaatcctgctgctgaaagtggccggctttaacctgctgatgaccctgcggctgtggtccagc

SEQ ID NO: 21674 - DNA, 558 bp, synthetic construct
  source 1..558: mol_type = other DNA
gaggtggccgtgttcgagcctagcgaggccgagatcagccacacccagaaagccaccctcgtgtgcctggctaccggcttctaccccgaccatgtggaactgtcttggtgggtcaacggcaaagaggtgcacagcggcgtgtctaccgacccccagccactgaaagaacagcccgccctgaacgacagccggtactgcctgagcagcagactgagagtgtccgccaccttctggcagaacccccggaaccacttcagatgccaggtgcagttctacggcctgagcgagaacgacgagtggacccaggacagagccaagcccgtgacccagatcgtgtctgccgaagcctggttcccacccatcaagaccgatgtgattacaatggaccccaaggacaactgctccaaggacgccaacgataccctgctgctccagctgaccaacaccagcgcctactacatgtacttgttgctgctgctgaagtccgtggtgtacttcgccatcatcacatgctgcctgctgcggagaaccgccttctgctgcaacggcgagaagtct

SEQ ID NO: 21675 - DNA, 552 bp, synthetic construct
  source 1..552: mol_type = other DNA
gaggtggccgtgttcgagcctagcgaggccgagatcagccacacccagaaagccaccctcgtgtgcctggctaccggcttctaccccgaccatgtggaactgtcttggtgggtcaacggcaaagaggtgcacagcggcgtgtctaccgacccccagccactgaaagaacagcccgccctgaacgacagccggtactgcctgagcagcagactgagagtgtccgccaccttctggcagaacccccggaaccacttcagatgccaggtgcagttctacggcctgagcgagaacgacgagtggacccaggacagagccaagcccgtgacccagatcgtgtctgccgaagcctggcccatcaagaccgatgtgattacaatggaccccaaggacaactgctccaaggacgccaacgataccctgctgctccagctgaccaacaccagcgcctactacatgtacttgttgctgctgctgaagtccgtggtgtacttcgccatcatcacatgctgcctgctgcggagaaccgccttctgctgcaacggcgagaagtct

SEQ ID NO: 21676 - DNA, 528 bp, synthetic construct
  source 1..528: mol_type = other DNA
gaggtggccgtgttcgagcctagcgaggccgagatcagccacacccagaaagccaccctcgtgtgcctggctaccggcttctaccccgaccatgtggaactgtcttggtgggtcaacggcaaagaggtgcacagcggcgtgtctaccgacccccagccactgaaagaacagcccgccctgaacgacagccggtactgcctgagcagcagactgagagtgtccgccaccttctggcagaacccccggaaccacttcagatgccaggtgcagttctacggcctgagcgagaacgacgagtggacccaggacagagccaagcccgtgacccagatcgtgtctgccgaagcctggatggaccccaaggacaactgctccaaggacgccaacgataccctgctgctccagctgaccaacaccagcgcctactacatgtacttgttgctgctgctgaagtccgtggtgtacttcgccatcatcacatgctgcctgctgcggagaaccgccttctgctgcaacggcgagaagtct

SEQ ID NO: 21677 - DNA, 552 bp, synthetic construct; identical to SEQ ID NO: 21675
  source 1..552: mol_type = other DNA

SEQ ID NO: 21678 - DNA, 510 bp, synthetic construct
  source 1..510: mol_type = other DNA
gaggtggccgtgttcgagcctagcgaggccgagatcagccacacccagaaagccaccctcgtgtgcctggctaccggcttctaccccgaccatgtggaactgtcttggtgggtcaacggcaaagaggtgcacagcggcgtgtctaccgacccccagccactgaaagaacagcccgccctgaacgacagccggtactgcctgagcagcagactgagagtgtccgccaccttctggcagaacccccggaaccacttcagatgccaggtgcagttctacggcctgagcgagaacgacgagtggacccaggacagagccaagcccgtgacccagatcgtgtctgccgaagcctggtgctccaaggacgccaacgataccctgctgctccagctgaccaacaccagcgcctactacatgtacttgttgctgctgctgaagtccgtggtgtacttcgccatcatcacatgctgcctgctgcggagaaccgccttctgctgcaacggcgagaagtct

SEQ ID NO: 21679 - DNA, 555 bp, synthetic construct
  source 1..555: mol_type = other DNA
gaggtggccgtgttcgagcctagcgaggccgagatcagccacacccagaaagccaccctcgtgtgcctggctaccggcttctaccccgaccatgtggaactgtcttggtgggtcaacggcaaagaggtgcacagcggcgtgtctaccgacccccagccactgaaagaacagcccgccctgaacgacagccggtactgcctgagcagcagactgagagtgtccgccaccttctggcagaacccccggaaccacttcagatgccaggtgcagttctacggcctgagcgagaacgacgagtggacccaggacagagccaagcccgtgacccagatcgtgtctgccgaagcctgggaagtgaaaaccgactccaccgaccacgtgaagcccaaagagacagagaacaccaagcagcccagcaagagctgccacaagcccaaggccatcgtgcacaccgagaaagtgaacatgatgagcctgaccgtgctgggcctgcggatgctgttcgccaaaaccgtggccgtgaacttcctgctgaccgccaagctgttcttcctc

SEQ ID NO: 21680 - DNA, 534 bp, synthetic construct
  source 1..534: mol_type = other DNA
gaggtggccgtgttcgagcctagcgaggccgagatcagccacacccagaaagccaccctcgtgtgcctggctaccggcttctaccccgaccatgtggaactgtcttggtgggtcaacggcaaagaggtgcacagcggcgtgtctaccgacccccagccactgaaagaacagcccgccctgaacgacagccggtactgcctgagcagcagactgagagtgtccgccaccttctggcagaacccccggaaccacttcagatgccaggtgcagttctacggcctgagcgagaacgacgagtggacccaggacagagccaagcccgtgacccagatcgtgtctgccgaagcctgggaccacgtgaagcccaaagagacagagaacaccaagcagcccagcaagagctgccacaagcccaaggccatcgtgcacaccgagaaagtgaacatgatgagcctgaccgtgctgggcctgcggatgctgttcgccaaaaccgtggccgtgaacttcctgctgaccgccaagctgttcttcctc

SEQ ID NO: 21681 - DNA, 537 bp, synthetic construct
  source 1..537: mol_type = other DNA
gaggtggccgtgttcgagcctagcgaggccgagatcagccacacccagaaagccaccctcgtgtgcctggctaccggcttctaccccgaccatgtggaactgtcttggtgggtcaacggcaaagaggtgcacagcggcgtgtctaccgacccccagccactgaaagaacagcccgccctgaacgacagccggtactgcctgagcagcagactgagagtgtccgccaccttctggcagaacccccggaaccacttcagatgccaggtgcagttctacggcctgagcgagaacgacgagtggacccaggacagagccaagcccgtgacccagatcgtgtctgccgaagcctggggcagaatccccgaggacacattcttcccaagccccgagagcagctgcgacgtgaagctggtggaaaagagcttcgagacagacaccaacctgaacttccagaacctgagcgtgatcggcttcagaatcctgctgctgaaagtggccggctttaacctgctgatgaccctgcggctgtggtccagc

SEQ ID NO: 21682 - DNA, 507 bp, synthetic construct
  source 1..507: mol_type = other DNA
gaggtggccgtgttcgagcctagcgaggccgagatcagccacacccagaaagccaccctcgtgtgcctggctaccggcttctaccccgaccatgtggaactgtcttggtgggtcaacggcaaagaggtgcacagcggcgtgtctaccgacccccagccactgaaagaacagcccgccctgaacgacagccggtactgcctgagcagcagactgagagtgtccgccaccttctggcagaacccccggaaccacttcagatgccaggtgcagttctacggcctgagcgagaacgacgagtggacccaggacagagccaagcccgtgacccagatcgtgtctgccgaagcctggggcagagagagcagctgcgacgtgaagctggtggaaaagagcttcgagacagacaccaacctgaacttccagaacctgagcgtgatcggcttcagaatcctgctgctgaaagtggccggctttaacctgctgatgaccctgcggctgtggtccagc

SEQ ID NO: 21683 - DNA, 534 bp, synthetic construct
  source 1..534: mol_type = other DNA
gaggtggccgtgttcgagcctagcgaggccgagatcagccacacccagaaagccaccctcgtgtgcctggctaccggcttctaccccgaccatgtggaactgtcttggtgggtcaacggcaaagaggtgcacagcggcgtgtctaccgacccccagccactgaaagaacagcccgccctgaacgacagccggtactgcctgagcagcagactgagagtgtccgccaccttctggcagaacccccggaaccacttcagatgccaggtgcagttctacggcctgagcgagaacgacgagtggacccaggacagagccaagcccgtgacccagatcgtgtctgccgaagcctggggcagacccgaggacacattcttcccaagccccgagagcagctgcgacgtgaagctggtggaaaagagcttcgagacagacaccaacctgaacttccagaacctgagcgtgatcggcttcagaatcctgctgctgaaagtggccggctttaacctgctgatgaccctgcggctgtggtccagc

SEQ ID NO: 21684 - DNA, 564 bp, synthetic construct
  source 1..564: mol_type = other DNA
gaggtggccgtgttcgagcctagcgaggccgagatcagccacacccagaaagccaccctcgtgtgcctggctaccggcttctaccccgaccatgtggaactgtcttggtgggtcaacggcaaagaggtgcacagcggcgtgtctaccgacccccagccactgaaagaacagcccgccctgaacgacagccggtactgcctgagcagcagactgagagtgtccgccaccttctggcagaacccccggaaccacttcagatgccaggtgcagttctacggcctgagcgagaacgacgagtggacccaggacagagccaagcccgtgacccagatcgtgtctgccgaagcctggggcagattcccacccatcaagaccgatgtgattacaatggaccccaaggacaactgctccaaggacgccaacgataccctgctgctccagctgaccaacaccagcgcctactacatgtacttgttgctgctgctgaagtccgtggtgtacttcgccatcatcacatgctgcctgctgcggagaaccgccttctgctgcaacggcgagaagtct

SEQ ID NO: 21685 - DNA, 558 bp, synthetic construct
  source 1..558: mol_type = other DNA
gaggtggccgtgttcgagcctagcgaggccgagatcagccacacccagaaagccaccctcgtgtgcctggctaccggcttctaccccgaccatgtggaactgtcttggtgggtcaacggcaaagaggtgcacagcggcgtgtctaccgacccccagccactgaaagaacagcccgccctgaacgacagccggtactgcctgagcagcagactgagagtgtccgccaccttctggcagaacccccggaaccacttcagatgccaggtgcagttctacggcctgagcgagaacgacgagtggacccaggacagagccaagcccgtgacccagatcgtgtctgccgaagcctggggcagacccatcaagaccgatgtgattacaatggaccccaaggacaactgctccaaggacgccaacgataccctgctgctccagctgaccaacaccagcgcctactacatgtacttgttgctgctgctgaagtccgtggtgtacttcgccatcatcacatgctgcctgctgcggagaaccgccttctgctgcaacggcgagaagtct

SEQ ID NO: 21686 - DNA, 534 bp, synthetic construct
  source 1..534: mol_type = other DNA
gaggtggccgtgttcgagcctagcgaggccgagatcagccacacccagaaagccaccctcgtgtgcctggctaccggcttctaccccgaccatgtggaactgtcttggtgggtcaacggcaaagaggtgcacagcggcgtgtctaccgacccccagccactgaaagaacagcccgccctgaacgacagccggtactgcctgagcagcagactgagagtgtccgccaccttctggcagaacccccggaaccacttcagatgccaggtgcagttctacggcctgagcgagaacgacgagtggacccaggacagagccaagcccgtgacccagatcgtgtctgccgaagcctggggcagaatggaccccaaggacaactgctccaaggacgccaacgataccctgctgctccagctgaccaacaccagcgcctactacatgtacttgttgctgctgctgaagtccgtggtgtacttcgccatcatcacatgctgcctgctgcggagaaccgccttctgctgcaacggcgagaagtct

SEQ ID NO: 21687 - DNA, 558 bp, synthetic construct; identical to SEQ ID NO: 21685
  source 1..558: mol_type = other DNA

SEQ ID NO: 21688 - DNA, 516 bp, synthetic construct
  source 1..516: mol_type = other DNA
gaggtggccgtgttcgagcctagcgaggccgagatcagccacacccagaaagccaccctcgtgtgcctggctaccggcttctaccccgaccatgtggaactgtcttggtgggtcaacggcaaagaggtgcacagcggcgtgtctaccgacccccagccactgaaagaacagcccgccctgaacgacagccggtactgcctgagcagcagactgagagtgtccgccaccttctggcagaacccccggaaccacttcagatgccaggtgcagttctacggcctgagcgagaacgacgagtggacccaggacagagccaagcccgtgacccagatcgtgtctgccgaagcctggggcagatgctccaaggacgccaacgataccctgctgctccagctgaccaacaccagcgcctactacatgtacttgttgctgctgctgaagtccgtggtgtacttcgccatcatcacatgctgcctgctgcggagaaccgccttctgctgcaacggcgagaagtct

SEQ ID NO: 21689 - DNA, 561 bp, synthetic construct
  source 1..561: mol_type = other DNA
gaggtggccgtgttcgagcctagcgaggccgagatcagccacacccagaaagccaccctcgtgtgcctggctaccggcttctaccccgaccatgtggaactgtcttggtgggtcaacggcaaagaggtgcacagcggcgtgtctaccgacccccagccactgaaagaacagcccgccctgaacgacagccggtactgcctgagcagcagactgagagtgtccgccaccttctggcagaacccccggaaccacttcagatgccaggtgcagttctacggcctgagcgagaacgacgagtggacccaggacagagccaagcccgtgacccagatcgtgtctgccgaagcctggggcagagaagtgaaaaccgactccaccgaccacgtgaagcccaaagagacagagaacaccaagcagcccagcaagagctgccacaagcccaaggccatcgtgcacaccgagaaagtgaacatgatgagcctgaccgtgctgggcctgcggatgctgttcgccaaaaccgtggccgtgaacttcctgctgaccgccaagctgttcttcctc

SEQ ID NO: 21690 - DNA, 540 bp, synthetic construct
  source 1..540: mol_type = other DNA
gaggtggccgtgttcgagcctagcgaggccgagatcagccacacccagaaagccaccctcgtgtgcctggctaccggcttctaccccgaccatgtggaactgtcttggtgggtcaacggcaaagaggtgcacagcggcgtgtctaccgacccccagccactgaaagaacagcccgccctgaacgacagccggtactgcctgagcagcagactgagagtgtccgccaccttctggcagaacccccggaaccacttcagatgccaggtgcagttctacggcctgagcgagaacgacgagtggacccaggacagagccaagcccgtgacccagatcgtgtctgccgaagcctggggcagagaccacgtgaagcccaaagagacagagaacaccaagcagcccagcaagagctgccacaagcccaaggccatcgtgcacaccgagaaagtgaacatgatgagcctgaccgtgctgggcctgcggatgctgttcgccaaaaccgtggccgtgaacttcctgctgaccgccaagctgttcttcctc

SEQ ID NO: 21691 - DNA, 546 bp, synthetic construct
  source 1..546: mol_type = other DNA
gaggtggccgtgttcgagcctagcgaggccgagatcagccacacccagaaagccaccctcgtgtgcctggctaccggcttctaccccgaccatgtggaactgtcttggtgggtcaacggcaaagaggtgcacagcggcgtgtctaccgacccccagccactgaaagaacagcccgccctgaacgacagccggtactgcctgagcagcagactgagagtgtccgccaccttctggcagaacccccggaaccacttcagatgccaggtgcagttctacggcctgagcgagaacgacgagtggacccaggacagagccaagcccgtgacccagatcgtgtctgccgaagcctggggcagagccgattgcatccccgaggacacattcttcccaagccccgagagcagctgcgacgtgaagctggtggaaaagagcttcgagacagacaccaacctgaacttccagaacctgagcgtgatcggcttcagaatcctgctgctgaaagtggccggctttaacctgctgatgaccctgcggctgtggtccagc

SEQ ID NO: 21692 - DNA, 516 bp, synthetic construct
  source 1..516: mol_type = other DNA
gaggtggccgtgttcgagcctagcgaggccgagatcagccacacccagaaagccaccctcgtgtgcctggctaccggcttctaccccgaccatgtggaactgtcttggtgggtcaacggcaaagaggtgcacagcggcgtgtctaccgacccccagccactgaaagaacagcccgccctgaacgacagccggtactgcctgagcagcagactgagagtgtccgccaccttctggcagaacccccggaaccacttcagatgccaggtgcagttctacggcctgagcgagaacgacgagtggacccaggacagagccaagcccgtgacccagatcgtgtctgccgaagcctggggcagagccgattgcgagagcagctgcgacgtgaagctggtggaaaagagcttcgagacagacaccaacctgaacttccagaacctgagcgtgatcggcttcagaatcctgctgctgaaagtggccggctttaacctgctgatgaccctgcggctgtggtccagc

SEQ ID NO: 21693 - DNA, 543 bp, synthetic construct
  source 1..543: mol_type = other DNA
gaggtggccgtgttcgagcctagcgaggccgagatcagccacacccagaaagccaccctcgtgtgcctggctaccggcttctaccccgaccatgtggaactgtcttggtgggtcaacggcaaagaggtgcacagcggcgtgtctaccgacccccagccactgaaagaacagcccgccctgaacgacagccggtactgcctgagcagcagactgagagtgtccgccaccttctggcagaacccccggaaccacttcagatgccaggtgcagttctacggcctgagcgagaacgacgagtggacccaggacagagccaagcccgtgacccagatcgtgtctgccgaagcctggggcagagccgattgccccgaggacacattcttcccaagccccgagagcagctgcgacgtgaagctggtggaaaagagcttcgagacagacaccaacctgaacttccagaacctgagcgtgatcggcttcagaatcctgctgctgaaagtggccggctttaacctgctgatgaccctgcggctgtggtccagc

SEQ ID NO: 21694 - DNA, 573 bp, synthetic construct
  source 1..573: mol_type = other DNA
gaggtggccgtgttcgagcctagcgaggccgagatcagccacacccagaaagccaccctcgtgtgcctggctaccggcttctaccccgaccatgtggaactgtcttggtgggtcaacggcaaagaggtgcacagcggcgtgtctaccgacccccagccactgaaagaacagcccgccctgaacgacagccggtactgcctgagcagcagactgagagtgtccgccaccttctggcagaacccccggaaccacttcagatgccaggtgcagttctacggcctgagcgagaacgacgagtggacccaggacagagccaagcccgtgacccagatcgtgtctgccgaagcctggggcagagccgattgcttcccacccatcaagaccgatgtgattacaatggaccccaaggacaactgctccaaggacgccaacgataccctgctgctccagctgaccaacaccagcgcctactacatgtacttgttgctgctgctgaagtccgtggtgtacttcgccatcatcacatgctgcctgctgcggagaaccgccttctgctgcaacggcgagaagtct

SEQ ID NO: 21695 - DNA, 567 bp, synthetic construct
  source 1..567: mol_type = other DNA
gaggtggccgtgttcgagcctagcgaggccgagatcagccacacccagaaagccaccctcgtgtgcctggctaccggcttctaccccgaccatgtggaactgtcttggtgggtcaacggcaaagaggtgcacagcggcgtgtctaccgacccccagccactgaaagaacagcccgccctgaacgacagccggtactgcctgagcagcagactgagagtgtccgccaccttctggcagaacccccggaaccacttcagatgccaggtgcagttctacggcctgagcgagaacgacgagtggacccaggacagagccaagcccgtgacccagatcgtgtctgccgaagcctggggcagagccgattgccccatcaagaccgatgtgattacaatggaccccaaggacaactgctccaaggacgccaacgataccctgctgctccagctgaccaacaccagcgcctactacatgtacttgttgctgctgctgaagtccgtggtgtacttcgccatcatcacatgctgcctgctgcggagaaccgccttctgctgcaacggcgagaagtct

SEQ ID NO: 21696 - DNA, 543 bp, synthetic construct
  source 1..543: mol_type = other DNA
gaggtggccgtgttcgagcctagcgaggccgagatcagccacacccagaaagccaccctcgtgtgcctggctaccggcttctaccccgaccatgtggaactgtcttggtgggtcaacggcaaagaggtgcacagcggcgtgtctaccgacccccagccactgaaagaacagcccgccctgaacgacagccggtactgcctgagcagcagactgagagtgtccgccaccttctggcagaacccccggaaccacttcagatgccaggtgcagttctacggcctgagcgagaacgacgagtggacccaggacagagccaagcccgtgacccagatcgtgtctgccgaagcctggggcagagccgattgcatggaccccaaggacaactgctccaaggacgccaacgataccctgctgctccagctgaccaacaccagcgcctactacatgtacttgttgctgctgctgaagtccgtggtgtacttcgccatcatcacatgctgcctgctgcggagaaccgccttctgctgcaacggcgagaagtct

SEQ ID NO: 21697 - DNA, 567 bp, synthetic construct; identical to SEQ ID NO: 21695
  source 1..567: mol_type = other DNA

SEQ ID NO: 21698 - DNA, 525 bp, synthetic construct
  source 1..525: mol_type = other DNA
gaggtggccgtgttcgagcctagcgaggccgagatcagccacacccagaaagccaccctcgtgtgcctggctaccggcttctaccccgaccatgtggaactgtcttggtgggtcaacggcaaagaggtgcacagcggcgtgtctaccgacccccagccactgaaagaacagcccgccctgaacgacagccggtactgcctgagcagcagactgagagtgtccgccaccttctggcagaacccccggaaccacttcagatgccaggtgcagttctacggcctgagcgagaacgacgagtggacccaggacagagccaagcccgtgacccagatcgtgtctgccgaagcctggggcagagccgattgctgctccaaggacgccaacgataccctgctgctccagctgaccaacaccagcgcctactacatgtacttgttgctgctgctgaagtccgtggtgtacttcgccatcatcacatgctgcctgctgcggagaaccgccttctgctgcaacggcgagaagtct

SEQ ID NO: 21699 - DNA, 570 bp, synthetic construct
  source 1..570: mol_type = other DNA
gaggtggccgtgttcgagcctagcgaggccgagatcagccacacccagaaagccaccctcgtgtgcctggctaccggcttctaccccgaccatgtggaactgtcttggtgggtcaacggcaaagaggtgcacagcggcgtgtctaccgacccccagccactgaaagaacagcccgccctgaacgacagccggtactgcctgagcagcagactgagagtgtccgccaccttctggcagaacccccggaaccacttcagatgccaggtgcagttctacggcctgagcgagaacgacgagtggacccaggacagagccaagcccgtgacccagatcgtgtctgccgaagcctggggcagagccgattgcgaagtgaaaaccgactccaccgaccacgtgaagcccaaagagacagagaacaccaagcagcccagcaagagctgccacaagcccaaggccatcgtgcacaccgagaaagtgaacatgatgagcctgaccgtgctgggcctgcggatgctgttcgccaaaaccgtggccgtgaacttcctgctgaccgccaagctgttcttcctc

SEQ ID NO: 21700 - DNA, 549 bp, synthetic construct
  source 1..549: mol_type = other DNA
gaggtggccgtgttcgagcctagcgaggccgagatcagccacacccagaaagccaccctcgtgtgcctggctaccggcttctaccccgaccatgtggaactgtcttggtgggtcaacggcaaagaggtgcacagcggcgtgtctaccgacccccagccactgaaagaacagcccgccctgaacgacagccggtactgcctgagcagcagactgagagtgtccgccaccttctggcagaacccccggaaccacttcagatgccaggtgcagttctacggcctgagcgagaacgacgagtggacccaggacagagccaagcccgtgacccagatcgtgtctgccgaagcctggggcagagccgattgcgaccacgtgaagcccaaagagacagagaacaccaagcagcccagcaagagctgccacaagcccaaggccatcgtgcacaccgagaaagtgaacatgatgagcctgaccgtgctgggcctgcggatgctgttcgccaaaaccgtggccgtgaacttcctgctgaccgccaagctgttcttcctc

SEQ ID NO: 21701 - DNA, 507 bp, synthetic construct
  source 1..507: mol_type = other DNA
gaggtggccgtgttcgagcctagcgaggccgagatcagccacacccagaaagccaccctcgtgtgcctggctaccggcttctaccccgaccatgtggaactgtcttggtgggtcaacggcaaagaggtgcacagcggcgtgtctaccgacccccagccactgaaagaacagcccgccctgaacgacagccggtactgcctgagcagcagactgagagtgtccgccaccttctggcagaacccccggaaccacttcagatgccaggtgcagttctacggcctgagcgagaacgacgagtggacccaggacagagccaagcccgtgaccatccccgaggacacattcttcccaagccccgagagcagctgcgacgtgaagctggtggaaaagagcttcgagacagacaccaacctgaacttccagaacctgagcgtgatcggcttcagaatcctgctgctgaaagtggccggctttaacctgctgatgaccctgcggctgtggtccagc

SEQ ID NO: 21702 - DNA, 477 bp, synthetic construct
  source 1..477: mol_type = other DNA
gaggtggccgtgttcgagcctagcgaggccgagatcagccacacccagaaagccaccctcgtgtgcctggctaccggcttctaccccgaccatgtggaactgtcttggtgggtcaacggcaaagaggtgcacagcggcgtgtctaccgacccccagccactgaaagaacagcccgccctgaacgacagccggtactgcctgagcagcagactgagagtgtccgccaccttctggcagaacccccggaaccacttcagatgccaggtgcagttctacggcctgagcgagaacgacgagtggacccaggacagagccaagcccgtgaccgagagcagctgcgacgtgaagctggtggaaaagagcttcgagacagacaccaacctgaacttccagaacctgagcgtgatcggcttcagaatcctgctgctgaaagtggccggctttaacctgctgatgaccctgcggctgtggtccagc

SEQ ID NO: 21703 - DNA, 504 bp, synthetic construct
  source 1..504: mol_type = other DNA
gaggtggccgtgttcgagcctagcgaggccgagatcagccacacccagaaagccaccctcgtgtgcctggctaccggcttctaccccgaccatgtggaactgtcttggtgggtcaacggcaaagaggtgcacagcggcgtgtctaccgacccccagccactgaaagaacagcccgccctgaacgacagccggtactgcctgagcagcagactgagagtgtccgccaccttctggcagaacccccggaaccacttcagatgccaggtgcagttctacggcctgagcgagaacgacgagtggacccaggacagagccaagcccgtgacccccgaggacacattcttcccaagccccgagagcagctgcgacgtgaagctggtggaaaagagcttcgagacagacaccaacctgaacttccagaacctgagcgtgatcggcttcagaatcctgctgctgaaagtggccggctttaacctgctgatgaccctgcggctgtggtccagc

SEQ ID NO: 21704 - DNA, 534 bp, synthetic construct
  source 1..534: mol_type = other DNA
gaggtggccgtgttcgagcctagcgaggccgagatcagccacacccagaaagccaccctcgtgtgcctggctaccggcttctaccccgaccatgtggaactgtcttggtgggtcaacggcaaagaggtgcacagcggcgtgtctaccgacccccagccactgaaagaacagcccgccctgaacgacagccggtactgcctgagcagcagactgagagtgtccgccaccttctggcagaacccccggaaccacttcagatgccaggtgcagttctacggcctgagcgagaacgacgagtggacccaggacagagccaagcccgtgaccttcccacccatcaagaccgatgtgattacaatggaccccaaggacaactgctccaaggacgccaacgataccctgctgctccagctgaccaacaccagcgcctactacatgtacttgttgctgctgctgaagtccgtggtgtacttcgccatcatcacatgctgcctgctgcggagaaccgccttctgctgcaacggcgagaagtct

SEQ ID NO: 21705 - DNA, 528 bp, synthetic construct
  source 1..528: mol_type = other DNA
gaggtggccgtgttcgagcctagcgaggccgagatcagccacacccagaaagccaccctcgtgtgcctggctaccggcttctaccccgaccatgtggaactgtcttggtgggtcaacggcaaagaggtgcacagcggcgtgtctaccgacccccagccactgaaagaacagcccgccctgaacgacagccggtactgcctgagcagcagactgagagtgtccgccaccttctggcagaacccccggaaccacttcagatgccaggtgcagttctacggcctgagcgagaacgacgagtggacccaggacagagccaagcccgtgacccccatcaagaccgatgtgattacaatggaccccaaggacaactgctccaaggacgccaacgataccctgctgctccagctgaccaacaccagcgcctactacatgtacttgttgctgctgctgaagtccgtggtgtacttcgccatcatcacatgctgcctgctgcggagaaccgccttctgctgcaacggcgagaagtct

SEQ ID NO: 21706 - DNA, 504 bp, synthetic construct
  source 1..504: mol_type = other DNA
gaggtggccgtgttcgagcctagcgaggccgagatcagccacacccagaaagccaccctcgtgtgcctggctaccggcttctaccccgaccatgtggaactgtcttggtgggtcaacggcaaagaggtgcacagcggcgtgtctaccgacccccagccactgaaagaacagcccgccctgaacgacagccggtactgcctgagcagcagactgagagtgtccgccaccttctggcagaacccccggaaccacttcagatgccaggtgcagttctacggcctgagcgagaacgacgagtggacccaggacagagccaagcccgtgaccatggaccccaaggacaactgctccaaggacgccaacgataccctgctgctccagctgaccaacaccagcgcctactacatgtacttgttgctgctgctgaagtccgtggtgtacttcgccatcatcacatgctgcctgctgcggagaaccgccttctgctgcaacggcgagaagtct

SEQ ID NO: 21707 - DNA, 528 bp, synthetic construct; identical to SEQ ID NO: 21705
  source 1..528: mol_type = other DNA

SEQ ID NO: 21708 - DNA, 486 bp, synthetic construct
  source 1..486: mol_type = other DNA
gaggtggccgtgttcgagcctagcgaggccgagatcagccacacccagaaagccaccctcgtgtgcctggctaccggcttctaccccgaccatgtggaactgtcttggtgggtcaacggcaaagaggtgcacagcggcgtgtctaccgacccccagccactgaaagaacagcccgccctgaacgacagccggtactgcctgagcagcagactgagagtgtccgccaccttctggcagaacccccggaaccacttcagatgccaggtgcagttctacggcctgagcgagaacgacgagtggacccaggacagagccaagcccgtgacctgctccaaggacgccaacgataccctgctgctccagctgaccaacaccagcgcctactacatgtacttgttgctgctgctgaagtccgtggtgtacttcgccatcatcacatgctgcctgctgcggagaaccgccttctgctgcaacggcgagaagtct

SEQ ID NO: 21709 - DNA, 531 bp, synthetic construct
  source 1..531: mol_type = other DNA
gaggtggccgtgttcgagcctagcgaggccgagatcagccacacccagaaagccaccctcgtgtgcctggctaccggcttctaccccgaccatgtggaactgtcttggtgggtcaacggcaaagaggtgcacagcggcgtgtctaccgacccccagccactgaaagaacagcccgccctgaacgacagccggtactgcctgagcagcagactgagagtgtccgccaccttctggcagaacccccggaaccacttcagatgccaggtgcagttctacggcctgagcgagaacgacgagtggacccaggacagagccaagcccgtgaccgaagtgaaaaccgactccaccgaccacgtgaagcccaaagagacagagaacaccaagcagcccagcaagagctgccacaagcccaaggccatcgtgcacaccgagaaagtgaacatgatgagcctgaccgtgctgggcctgcggatgctgttcgccaaaaccgtggccgtgaacttcctgctgaccgccaagctgttcttcctc

SEQ ID NO: 21710 - DNA, 510 bp, synthetic construct
  source 1..510: mol_type = other DNA
gaggtggccgtgttcgagcctagcgaggccgagatcagccacacccagaaagccaccctcgtgtgcctggctaccggcttctaccccgaccatgtggaactgtcttggtgggtcaacggcaaagaggtgcacagcggcgtgtctaccgacccccagccactgaaagaacagcccgccctgaacgacagccggtactgcctgagcagcagactgagagtgtccgccaccttctggcagaacccccggaaccacttcagatgccaggtgcagttctacggcctgagcgagaacgacgagtggacccaggacagagccaagcccgtgaccgaccacgtgaagcccaaagagacagagaacaccaagcagcccagcaagagctgccacaagcccaaggccatcgtgcacaccgagaaagtgaacatgatgagcctgaccgtgctgggcctgcggatgctgttcgccaaaaccgtggccgtgaacttcctgctgaccgccaagctgttcttcctc

SEQ ID NO: 21711 - DNA, 531 bp, synthetic construct; identical to SEQ ID NO: 21671
  source 1..531: mol_type = other DNA

SEQ ID NO: 21712 - DNA, 501 bp, synthetic construct; identical to SEQ ID NO: 21672
  source 1..501: mol_type = other DNA

SEQ ID NO: 21713 - DNA, 528 bp, synthetic construct; identical to SEQ ID NO: 21673
  source 1..528: mol_type = other DNA

SEQ ID NO: 21714 - DNA, 558 bp, synthetic construct; identical to SEQ ID NO: 21674
  source 1..558: mol_type = other DNA

SEQ ID NO: 21715 - DNA, 552 bp, synthetic construct; identical to SEQ ID NO: 21675
  source 1..552: mol_type = other DNA

SEQ ID NO: 21716 - DNA, 528 bp, synthetic construct; identical to SEQ ID NO: 21676
  source 1..528: mol_type = other DNA

SEQ ID NO: 21717 - DNA, 552 bp, synthetic construct; identical to SEQ ID NO: 21675
  source 1..552: mol_type = other DNA

SEQ ID NO: 21718 - DNA, 510 bp, synthetic construct; identical to SEQ ID NO: 21678
  source 1..510: mol_type = other DNA

SEQ ID NO: 21719 - DNA, 555 bp, synthetic construct; identical to SEQ ID NO: 21679
  source 1..555: mol_type = other DNA

SEQ ID NO: 21720 - DNA, 534 bp, synthetic construct; identical to SEQ ID NO: 21680
  source 1..534: mol_type = other DNA

SEQ ID NO: 21721 - DNA, 510 bp, synthetic construct; identical to SEQ ID NO: 21506
  source 1..510: mol_type = other DNA

SEQ ID NO: 21722 - DNA, 480 bp, synthetic construct; identical to SEQ ID NO: 21507
  source 1..480: mol_type = other DNA

SEQ ID NO: 21723 - DNA, 507 bp, synthetic construct; identical to SEQ ID NO: 21508
  source 1..507: mol_type = other DNA

SEQ ID NO: 21724 - DNA, 537 bp, synthetic construct; identical to SEQ ID NO: 21509
  source 1..537: mol_type = other DNA

SEQ ID NO: 21725 - DNA, 531 bp, synthetic construct; identical to SEQ ID NO: 21510
  source 1..531: mol_type = other DNA

SEQ ID NO: 21726 - DNA, 507 bp, synthetic construct; identical to SEQ ID NO: 21511
  source 1..507: mol_type = other DNA

SEQ ID NO: 21727 - DNA, 531 bp, synthetic construct; identical to SEQ ID NO: 21510
  source 1..531: mol_type = other DNA

SEQ ID NO: 21728 - DNA, 489 bp, synthetic construct; identical to SEQ ID NO: 21513
  source 1..489: mol_type = other DNA

SEQ ID NO: 21729 - DNA, 534 bp, synthetic construct; identical to SEQ ID NO: 21514
  source 1..534: mol_type = other DNA

SEQ ID NO: 21730 - DNA, 513 bp, synthetic construct; identical to SEQ ID NO: 21515
  source 1..513: mol_type = other DNA

SEQ ID NO: 21731 - DNA, 477 bp, synthetic construct
  source 1..477: mol_type = other DNA
gccgacgtgtcccccaagcctaccatcttcctgccctctatcgccgagacaaagctccagaaggccggcacctacctgtgcctgctggaaaagttcttcccagatgtgattaagatccactggcaggaaaagaagtccaacaccatcctgggcagccaggaaggcaacaccatgaagaccaacgacacctacatgaagttcagctggctgaccgtgcccgagaagtccctggacaaagaacacagatgcatcgtgcggcacgaaaacaacaagaacggcgtggaccaggaaatcatcatccccgaggacacattcttcccaagccccgagagcagctgcgacgtgaagctggtggaaaagagcttcgagacagacaccaacctgaacttccagaacctgagcgtgatcggcttcagaatcctgctgctgaaagtggccggctttaacctgctgatgaccctgcggctgtggtccagc

SEQ ID NO: 21732 - DNA, 447 bp, synthetic construct
  source 1..447: mol_type = other DNA
gccgacgtgtcccccaagcctaccatcttcctgccctctatcgccgagacaaagctccagaaggccggcacctacctgtgcctgctggaaaagttcttcccagatgtgattaagatccactggcaggaaaagaagtccaacaccatcctgggcagccaggaaggcaacaccatgaagaccaacgacacctacatgaagttcagctggctgaccgtgcccgagaagtccctggacaaagaacacagatgcatcgtgcggcacgaaaacaacaagaacggcgtggaccaggaaatcatcgagagcagctgcgacgtgaagctggtggaaaagagcttcgagacagacaccaacctgaacttccagaacctgagcgtgatcggcttcagaatcctgctgctgaaagtggccggctttaacctgctgatgaccctgcggctgtggtccagc

SEQ ID NO: 21733 - DNA, 474 bp, synthetic construct
  source 1..474: mol_type = other DNA
gccgacgtgtcccccaagcctaccatcttcctgccctctatcgccgagacaaagctccagaaggccggcacctacctgtgcctgctggaaaagttcttcccagatgtgattaagatccactggcaggaaaagaagtccaacaccatcctgggcagccaggaaggcaacaccatgaagaccaacgacacctacatgaagttcagctggctgaccgtgcccgagaagtccctggacaaagaacacagatgcatcgtgcggcacgaaaacaacaagaacggcgtggaccaggaaatcatccccgaggacacattcttcccaagccccgagagcagctgcgacgtgaagctggtggaaaagagcttcgagacagacaccaacctgaacttccagaacctgagcgtgatcggcttcagaatcctgctgctgaaagtggccggctttaacctgctgatgaccctgcggctgtggtccagc

SEQ ID NO: 21734 - DNA, 456 bp, synthetic construct
  source 1..456: mol_type = other DNA
gccgacgtgtcccccaagcctaccatcttcctgccctctatcgccgagacaaagctccagaaggccggcacctacctgtgcctgctggaaaagttcttcccagatgtgattaagatccactggcaggaaaagaagtccaacaccatcctgggcagccaggaaggcaacaccatgaagaccaacgacacctacatgaagttcagctggctgaccgtgcccgagaagtccctggacaaagaacacagatgcatcgtgcggcacgaaaacaacaagaacggcgtggaccaggaaatcatcggcagagccgattgcggctttaccagcgagagctaccagcagggcgtgctgagcgccaccatcctgtacgagatcctgctgggcaaggccaccctgtacgccgtgctggtgtctgccctggtgctgatggctatggtcaagcggaaggacagccgggga

SEQ ID NO: 21735 - DNA, 450 bp, synthetic construct
  source 1..450: mol_type = other DNA
gccgacgtgtcccccaagcctaccatcttcctgccctctatcgccgagacaaagctccagaaggccggcacctacctgtgcctgctggaaaagttcttcccagatgtgattaagatccactggcaggaaaagaagtccaacaccatcctgggcagccaggaaggcaacaccatgaagaccaacgacacctacatgaagttcagctggctgaccgtgcccgagaagtccctggacaaagaacacagatgcatcgtgcggcacgaaaacaacaagaacggcgtggaccaggaaatcatcgccgattgcggctttaccagcgagagctaccagcagggcgtgctgagcgccaccatcctgtacgagatcctgctgggcaaggccaccctgtacgccgtgctggtgtctgccctggtgctgatggctatggtcaagcggaaggacagccgggga

SEQ ID NO: 21736 - DNA, 480 bp, synthetic construct
  source 1..480: mol_type = other DNA
gccgacgtgtcccccaagcctaccatcttcctgccctctatcgccgagacaaagctccagaaggccggcacctacctgtgcctgctggaaaagttcttcccagatgtgattaagatccactggcaggaaaagaagtccaacaccatcctgggcagccaggaaggcaacaccatgaagaccaacgacacctacatgaagttcagctggctgaccgtgcccgagaagtccctggacaaagaacacagatgcatcgtgcggcacgaaaacaacaagaacggcgtggaccaggaaatcatccagatcgtgtctgccgaagcctggggcagagccgattgcggctttaccagcgagagctaccagcagggcgtgctgagcgccaccatcctgtacgagatcctgctgggcaaggccaccctgtacgccgtgctggtgtctgccctggtgctgatggctatggtcaagcggaaggacagccgggga

SEQ ID NO: 21737 - DNA, 501 bp, synthetic construct
  source 1..501: mol_type = other DNA
gccgacgtgtcccccaagcctaccatcttcctgccctctatcgccgagacaaagctccagaaggccggcacctacctgtgcctgctggaaaagttcttcccagatgtgattaagatccactggcaggaaaagaagtccaacaccatcctgggcagccaggaaggcaacaccatgaagaccaacgacacctacatgaagttcagctggctgaccgtgcccgagaagtccctggacaaagaacacagatgcatcgtgcggcacgaaaacaacaagaacggcgtggaccaggaaatcatcgaagtgaaaaccgactccaccgaccacgtgaagcccaaagagacagagaacaccaagcagcccagcaagagctgccacaagcccaaggccatcgtgcacaccgagaaagtgaacatgatgagcctgaccgtgctgggcctgcggatgctgttcgccaaaaccgtggccgtgaacttcctgctgaccgccaagctgttcttcctc

SEQ ID NO: 21738 - DNA, 480 bp, synthetic construct
  source 1..480: mol_type = other DNA
gccgacgtgtcccccaagcctaccatcttcctgccctctatcgccgagacaaagctccagaaggccggcacctacctgtgcctgctggaaaagttcttcccagatgtgattaagatccactggcaggaaaagaagtccaacaccatcctgggcagccaggaaggcaacaccatgaagaccaacgacacctacatgaagttcagctggctgaccgtgcccgagaagtccctggacaaagaacacagatgcatcgtgcggcacgaaaacaacaagaacggcgtggaccaggaaatcatcgaccacgtgaagcccaaagagacagagaacaccaagcagcccagcaagagctgccacaagcccaaggccatcgtgcacaccgagaaagtgaacatgatgagcctgaccgtgctgggcctgcggatgctgttcgccaaaaccgtggccgtgaacttcctgctgaccgccaagctgttcttcctc

SEQ ID NO: 21739 - DNA, 483 bp, synthetic construct
  source 1..483: mol_type = other DNA
gccgacgtgtcccccaagcctaccatcttcctgccctctatcgccgagacaaagctccagaaggccggcacctacctgtgcctgctggaaaagttcttcccagatgtgattaagatccactggcaggaaaagaagtccaacaccatcctgggcagccaggaaggcaacaccatgaagaccaacgacacctacatgaagttcagctggctgaccgtgcccgagaagtccctggacaaagaacacagatgcatcgtgcggcacgaaaacaacaagaacggcgtggaccaggaaatcatcttcccaatccccgaggacacattcttcccaagccccgagagcagctgcgacgtgaagctggtggaaaagagcttcgagacagacaccaacctgaacttccagaacctgagcgtgatcggcttcagaatcctgctgctgaaagtggccggctttaacctgctgatgaccctgcggctgtggtccagc

SEQ ID NO: 21740 - DNA, 453 bp, synthetic construct
  source 1..453: mol_type = other DNA
gccgacgtgtcccccaagcctaccatcttcctgccctctatcgccgagacaaagctccagaaggccggcacctacctgtgcctgctggaaaagttcttcccagatgtgattaagatccactggcaggaaaagaagtccaacaccatcctgggcagccaggaaggcaacaccatgaagaccaacgacacctacatgaagttcagctggctgaccgtgcccgagaagtccctggacaaagaacacagatgcatcgtgcggcacgaaaacaacaagaacggcgtggaccaggaaatcatcttcccagagagcagctgcgacgtgaagctggtggaaaagagcttcgagacagacaccaacctgaacttccagaacctgagcgtgatcggcttcagaatcctgctgctgaaagtggccggctttaacctgctgatgaccctgcggctgtggtccagc

SEQ ID NO: 21741 - DNA, 480 bp, synthetic construct
  source 1..480: mol_type = other DNA
gccgacgtgtcccccaagcctaccatcttcctgccctctatcgccgagacaaagctccagaaggccggcacctacctgtgcctgctggaaaagttcttcccagatgtgattaagatccactggcaggaaaagaagtccaacaccatcctgggcagccaggaaggcaacaccatgaagaccaacgacacctacatgaagttcagctggctgaccgtgcccgagaagtccctggacaaagaacacagatgcatcgtgcggcacgaaaacaacaagaacggcgtggaccaggaaatcatcttcccacccgaggacacattcttcccaagccccgagagcagctgcgacgtgaagctggtggaaaagagcttcgagacagacaccaacctgaacttccagaacctgagcgtgatcggcttcagaatcctgctgctgaaagtggccggctttaacctgctgatgaccctgcggctgtggtccagc

SEQ ID NO: 21742 - DNA, 462 bp, synthetic construct
  source 1..462: mol_type = other DNA
gccgacgtgtcccccaagcctaccatcttcctgccctctatcgccgagacaaagctccagaaggccggcacctacctgtgcctgctggaaaagttcttcccagatgtgattaagatccactggcaggaaaagaagtccaacaccatcctgggcagccaggaaggcaacaccatgaagaccaacgacacctacatgaagttcagctggctgaccgtgcccgagaagtccctggacaaagaacacagatgcatcgtgcggcacgaaaacaacaagaacggcgtggaccaggaaatcatcttcccaggcagagccgattgcggctttaccagcgagagctaccagcagggcgtgctgagcgccaccatcctgtacgagatcctgctgggcaaggccaccctgtacgccgtgctggtgtctgccctggtgctgatggctatggtcaagcggaaggacagccgggga

SEQ ID NO: 21743 - DNA, 456 bp, synthetic construct
  source 1..456: mol_type = other DNA
gccgacgtgtcccccaagcctaccatcttcctgccctctatcgccgagacaaagctccagaaggccggcacctacctgtgcctgctggaaaagttcttcccagatgtgattaagatccactggcaggaaaagaagtccaacaccatcctgggcagccaggaaggcaacaccatgaagaccaacgacacctacatgaagttcagctggctgaccgtgcccgagaagtccctggacaaagaacacagatgcatcgtgcggcacgaaaacaacaagaacggcgtggaccaggaaatcatcttcccagccgattgcggctttaccagcgagagctaccagcagggcgtgctgagcgccaccatcctgtacgagatcctgctgggcaaggccaccctgtacgccgtgctggtgtctgccctggtgctgatggctatggtcaagcggaaggacagccgggga

SEQ ID NO: 21744 - DNA, 486 bp, synthetic construct
  source 1..486: mol_type = other DNA
gccgacgtgtcccccaagcctaccatcttcctgccctctatcgccgagacaaagctccagaaggccggcacctacctgtgcctgctggaaaagttcttcccagatgtgattaagatccactggcaggaaaagaagtccaacaccatcctgggcagccaggaaggcaacaccatgaagaccaacgacacctacatgaagttcagctggctgaccgtgcccgagaagtccctggacaaagaacacagatgcatcgtgcggcacgaaaacaacaagaacggcgtggaccaggaaatcatcttcccacagatcgtgtctgccgaagcctggggcagagccgattgcggctttaccagcgagagctaccagcagggcgtgctgagcgccaccatcctgtacgagatcctgctgggcaaggccaccctgtacgccgtgctggtgtctgccctggtgctgatggctatggtcaagcggaaggacagccgggga

SEQ ID NO: 21745 - DNA, 507 bp, synthetic construct
  source 1..507: mol_type = other DNA
gccgacgtgtcccccaagcctaccatcttcctgccctctatcgccgagacaaagctccagaaggccggcacctacctgtgcctgctggaaaagttcttcccagatgtgattaagatccactggcaggaaaagaagtccaacaccatcctgggcagccaggaaggcaacaccatgaagaccaacgacacctacatgaagttcagctggctgaccgtgcccgagaagtccctggacaaagaacacagatgcatcgtgcggcacgaaaacaacaagaacggcgtggaccaggaaatcatcttcccagaagtgaaaaccgactccaccgaccacgtgaagcccaaagagacagagaacaccaagcagcccagcaagagctgccacaagcccaaggccatcgtgcacaccgagaaagtgaacatgatgagcctgaccgtgctgggcctgcggatgctgttcgccaaaaccgtggccgtgaacttcctgctgaccgccaagctgttcttcctc

SEQ ID NO: 21746 - DNA, 486 bp, synthetic construct
  source 1..486: mol_type = other DNA
gccgacgtgtcccccaagcctaccatcttcctgccctctatcgccgagacaaagctccagaaggccggcacctacctgtgcctgctggaaaagttcttcccagatgtgattaagatccactggcaggaaaagaagtccaacaccatcctgggcagccaggaaggcaacaccatgaagaccaacgacacctacatgaagttcagctggctgaccgtgcccgagaagtccctggacaaagaacacagatgcatcgtgcggcacgaaaacaacaagaacggcgtggaccaggaaatcatcttcccagaccacgtgaagcccaaagagacagagaacaccaagcagcccagcaagagctgccacaagcccaaggccatcgtgcacaccgagaaagtgaacatgatgagcctgaccgtgctgggcctgcggatgctgttcgccaaaaccgtggccgtgaacttcctgctgaccgccaagctgttcttcctc

SEQ ID NO: 21747 - DNA, 507 bp, synthetic construct
  source 1..507: mol_type = other DNA
gccgacgtgtcccccaagcctaccatcttcctgccctctatcgccgagacaaagctccagaaggccggcacctacctgtgcctgctggaaaagttcttcccagatgtgattaagatccactggcaggaaaagaagtccaacaccatcctgggcagccaggaaggcaacaccatgaagaccaacgacacctacatgaagttcagctggctgaccgtgcccgagaagtccctggacaaagaacacagatgcatcgtgcggcacgaaaacaacaagaacggcgtggaccaggaaatcatcttcccacccatcaagaccgatgtgattacaatccccgaggacacattcttcccaagccccgagagcagctgcgacgtgaagctggtggaaaagagcttcgagacagacaccaacctgaacttccagaacctgagcgtgatcggcttcagaatcctgctgctgaaagtggccggctttaacctgctgatgaccctgcggctgtggtccagc

SEQ ID NO: 21748 - DNA, 477 bp, synthetic construct
  source 1..477: mol_type = other DNA
gccgacgtgtcccccaagcctaccatcttcctgccctctatcgccgagacaaagctccagaaggccggcacctacctgtgcctgctggaaaagttcttcccagatgtgattaagatccactggcaggaaaagaagtccaacaccatcctgggcagccaggaaggcaacaccatgaagaccaacgacacctacatgaagttcagctggctgaccgtgcccgagaagtccctggacaaagaacacagatgcatcgtgcggcacgaaaacaacaagaacggcgtggaccaggaaatcatcttcccacccatcaagaccgatgtgattacagagagcagctgcgacgtgaagctggtggaaaagagcttcgagacagacaccaacctgaacttccagaacctgagcgtgatcggcttcagaatcctgctgctgaaagtggccggctttaacctgctgatgaccctgcggctgtggtccagc

SEQ ID NO: 21749 - DNA, 504 bp, synthetic construct
  source 1..504: mol_type = other DNA
gccgacgtgtcccccaagcctaccatcttcctgccctctatcgccgagacaaagctccagaaggccggcacctacctgtgcctgctggaaaagttcttcccagatgtgattaagatccactggcaggaaaagaagtccaacaccatcctgggcagccaggaaggcaacaccatgaagaccaacgacacctacatgaagttcagctggctgaccgtgcccgagaagtccctggacaaagaacacagatgcatcgtgcggcacgaaaacaacaagaacggcgtggaccaggaaatcatcttcccacccatcaagaccgatgtgattacacccgaggacacattcttcccaagccccgagagcagctgcgacgtgaagctggtggaaaagagcttcgagacagacaccaacctgaacttccagaacctgagcgtgatcggcttcagaatcctgctgctgaaagtggccggctttaacctgctgatgaccctgcggctgtggtccagc

SEQ ID NO: 21750 - DNA, 486 bp, synthetic construct
  source 1..486: mol_type = other DNA
gccgacgtgtcccccaagcctaccatcttcctgccctctatcgccgagacaaagctccagaaggccggcacctacctgtgcctgctggaaaagttcttcccagatgtgattaagatccactggcaggaaaagaagtccaacaccatcctgggcagccaggaaggcaacaccatgaagaccaacgacacctacatgaagttcagctggctgaccgtgcccgagaagtccctggacaaagaacacagatgcatcgtgcggcacgaaaacaacaagaacggcgtggaccaggaaatcatcttcccacccatcaagaccgatgtgattacaggcagagccgattgcggctttaccagcgagagctaccagcagggcgtgctgagcgccaccatcctgtacgagatcctgctgggcaaggccaccctgtacgccgtgctggtgtctgccctggtgctgatggctatggtcaagcggaaggacagccgggga

SEQ ID NO: 21751 - DNA, 480 bp, synthetic construct
  source 1..480: mol_type = other DNA
gccgacgtgtcccccaagcctaccatcttcctgccctctatcgccgagacaaagctccagaaggccggcacctacctgtgcctgctggaaaagttcttcccagatgtgattaagatccactggcaggaaaagaagtccaacaccatcctgggcagccaggaaggcaacaccatgaagaccaacgacacctacatgaagttcagctggctgaccgtgcccgagaagtccctggacaaagaacacagatgcatcgtgcggcacgaaaacaacaagaacggcgtggaccaggaaatcatcttcccacccatcaagaccgatgtgattacagccgattgcggctttaccagcgagagctaccagcagggcgtgctgagcgccaccatcctgtacgagatcctgctgggcaaggccaccctgtacgccgtgctggtgtctgccctggtgctgatggctatggtcaagcggaaggacagccgggga

SEQ ID NO: 21752 - DNA, 510 bp, synthetic construct
  source 1..510: mol_type = other DNA
gccgacgtgtcccccaagcctaccatcttcctgccctctatcgccgagacaaagctccagaaggccggcacctacctgtgcctgctggaaaagttcttcccagatgtgattaagatccactggcaggaaaagaagtccaacaccatcctgggcagccaggaaggcaacaccatgaagaccaacgacacctacatgaagttcagctggctgaccgtgcccgagaagtccctggacaaagaacacagatgcatcgtgcggcacgaaaacaacaagaacggcgtggaccaggaaatcatcttcccacccatcaagaccgatgtgattacacagatcgtgtctgccgaagcctggggcagagccgattgcggctttaccagcgagagctaccagcagggcgtgctgagcgccaccatcctgtacgagatcctgctgggcaaggccaccctgtacgccgtgctggtgtctgccctggtgctgatggctatggtcaagcggaaggacagccgggga

SEQ ID NO: 21753 - DNA, 531 bp, synthetic construct
  source 1..531: mol_type = other DNA
gccgacgtgtcccccaagcctaccatcttcctgccctctatcgccgagacaaagctccagaaggccggcacctacctgtgcctgctggaaaagttcttcccagatgtgattaagatccactggcaggaaaagaagtccaacaccatcctgggcagccaggaaggcaacaccatgaagaccaacgacacctacatgaagttcagctggctgaccgtgcccgagaagtccctggacaaagaacacagatgcatcgtgcggcacgaaaacaacaagaacggcgtggaccaggaaatcatcttcccacccatcaagaccgatgtgattacagaagtgaaaaccgactccaccgaccacgtgaagcccaaagagacagagaacaccaagcagcccagcaagagctgccacaagcccaaggccatcgtgcacaccgagaaagtgaacatgatgagcctgaccgtgctgggcctgcggatgctgttcgccaaaaccgtggccgtgaacttcctgctgaccgccaagctgttcttcctc

SEQ ID NO: 21754 - DNA, 510 bp, synthetic construct
  source 1..510: mol_type = other DNA
gccgacgtgtcccccaagcctaccatcttcctgccctctatcgccgagacaaagctccagaaggccggcacctacctgtgcctgctggaaaagttcttcccagatgtgattaagatccactggcaggaaaagaagtccaacaccatcctgggcagccaggaaggcaacaccatgaagaccaacgacacctacatgaagttcagctggctgaccgtgcccgagaagtccctggacaaagaacacagatgcatcgtgcggcacgaaaacaacaagaacggcgtggaccaggaaatcatcttcccacccatcaagaccgatgtgattacagaccacgtgaagcccaaagagacagagaacaccaagcagcccagcaagagctgccacaagcccaaggccatcgtgcacaccgagaaagtgaacatgatgagcctgaccgtgctgggcctgcggatgctgttcgccaaaaccgtggccgtgaacttcctgctgaccgccaagctgttcttcctc

SEQ ID NO: 21755 - DNA, 522 bp, synthetic construct
  source 1..522: mol_type = other DNA
gccgacgtgtcccccaagcctaccatcttcctgccctctatcgccgagacaaagctccagaaggccggcacctacctgtgcctgctggaaaagttcttcccagatgtgattaagatccactggcaggaaaagaagtccaacaccatcctgggcagccaggaaggcaacaccatgaagaccaacgacacctacatgaagttcagctggctgaccgtgcccgagaagtccctggacaaagaacacagatgcatcgtgcggcacgaaaacaacaagaacggcgtggaccaggaaatcatcttcccacccatcaagaccgatgtgattacaatggaccccaaggacatccccgaggacacattcttcccaagccccgagagcagctgcgacgtgaagctggtggaaaagagcttcgagacagacaccaacctgaacttccagaacctgagcgtgatcggcttcagaatcctgctgctgaaagtggccggctttaacctgctgatgaccctgcggctgtggtccagc

SEQ ID NO: 21756 - DNA, 492 bp, synthetic construct
  source 1..492: mol_type = other DNA
gccgacgtgtcccccaagcctaccatcttcctgccctctatcgccgagacaaagctccagaaggccggcacctacctgtgcctgctggaaaagttcttcccagatgtgattaagatccactggcaggaaaagaagtccaacaccatcctgggcagccaggaaggcaacaccatgaagaccaacgacacctacatgaagttcagctggctgaccgtgcccgagaagtccctggacaaagaacacagatgcatcgtgcggcacgaaaacaacaagaacggcgtggaccaggaaatcatcttcccacccatcaagaccgatgtgattacaatggaccccaaggacgagagcagctgcgacgtgaagctggtggaaaagagcttcgagacagacaccaacctgaacttccagaacctgagcgtgatcggcttcagaatcctgctgctgaaagtggccggctttaacctgctgatgaccctgcggctgtggtccagc

SEQ ID NO: 21757 - DNA, 519 bp, synthetic construct
  source 1..519: mol_type = other DNA
gccgacgtgtcccccaagcctaccatcttcctgccctctatcgccgagacaaagctccagaaggccggcacctacctgtgcctgctggaaaagttcttcccagatgtgattaagatccactggcaggaaaagaagtccaacaccatcctgggcagccaggaaggcaacaccatgaagaccaacgacacctacatgaagttcagctggctgaccgtgcccgagaagtccctggacaaagaacacagatgcatcgtgcggcacgaaaacaacaagaacggcgtggaccaggaaatcatcttcccacccatcaagaccgatgtgattacaatggaccccaaggaccccgaggacacattcttcccaagccccgagagcagctgcgacgtgaagctggtggaaaagagcttcgagacagacaccaacctgaacttccagaacctgagcgtgatcggcttcagaatcctgctgctgaaagtggccggctttaacctgctgatgaccctgcggctgtggtccagc

SEQ ID NO: 21758 - DNA, 501 bp, synthetic construct
  source 1..501: mol_type = other DNA
gccgacgtgtcccccaagcctaccatcttcctgccctctatcgccgagacaaagctccagaaggccggcacctacctgtgcctgctggaaaagttcttcccagatgtgattaagatccactggcaggaaaagaagtccaacaccatcctgggcagccaggaaggcaacaccatgaagaccaacgacacctacatgaagttcagctggctgaccgtgcccgagaagtccctggacaaagaacacagatgcatcgtgcggcacgaaaacaacaagaacggcgtggaccaggaaatcatcttcccacccatcaagaccgatgtgattacaatggaccccaaggacggcagagccgattgcggctttaccagcgagagctaccagcagggcgtgctgagcgccaccatcctgtacgagatcctgctgggcaaggccaccctgtacgccgtgctggtgtctgccctggtgctgatggctatggtcaagcggaaggacagccgggga

SEQ ID NO: 21759 - DNA, 495 bp, synthetic construct
  source 1..495: mol_type = other DNA
gccgacgtgtcccccaagcctaccatcttcctgccctctatcgccgagacaaagctccagaaggccggcacctacctgtgcctgctggaaaagttcttcccagatgtgattaagatccactggcaggaaaagaagtccaacaccatcctgggcagccaggaaggcaacaccatgaagaccaacgacacctacatgaagttcagctggctgaccgtgcccgagaagtccctggacaaagaacacagatgcatcgtgcggcacgaaaacaacaagaacggcgtggaccaggaaatcatcttcccacccatcaagaccgatgtgattacaatggaccccaaggacgccgattgcggctttaccagcgagagctaccagcagggcgtgctgagcgccaccatcctgtacgagatcctgctgggcaaggccaccctgtacgccgtgctggtgtctgccctggtgctgatggctatggtcaagcggaaggacagccgggga

SEQ ID NO: 21760 - DNA, 525 bp, synthetic construct
  source 1..525: mol_type = other DNA
gccgacgtgtcccccaagcctaccatcttcctgccctctatcgccgagacaaagctccagaaggccggcacctacctgtgcctgctggaaaagttcttcccagatgtgattaagatccactggcaggaaaagaagtccaacaccatcctgggcagccaggaaggcaacaccatgaagaccaacgacacctacatgaagttcagctggctgaccgtgcccgagaagtccctggacaaagaacacagatgcatcgtgcggcacgaaaacaacaagaacggcgtggaccaggaaatcatcttcccacccatcaagaccgatgtgattacaatggaccccaaggaccagatcgtgtctgccgaagcctggggcagagccgattgcggctttaccagcgagagctaccagcagggcgtgctgagcgccaccatcctgtacgagatcctgctgggcaaggccaccctgtacgccgtgctggtgtctgccctggtgctgatggctatggtcaagcggaaggacagccgggga

SEQ ID NO: 21761 - DNA, 546 bp, synthetic construct
  source 1..546: mol_type = other DNA
gccgacgtgtcccccaagcctaccatcttcctgccctctatcgccgagacaaagctccagaaggccggcacctacctgtgcctgctggaaaagttcttcccagatgtgattaagatccactggcaggaaaagaagtccaacaccatcctgggcagccaggaaggcaacaccatgaagaccaacgacacctacatgaagttcagctggctgaccgtgcccgagaagtccctggacaaagaacacagatgcatcgtgcggcacgaaaacaacaagaacggcgtggaccaggaaatcatcttcccacccatcaagaccgatgtgattacaatggaccccaaggacgaagtgaaaaccgactccaccgaccacgtgaagcccaaagagacagagaacaccaagcagcccagcaagagctgccacaagcccaaggccatcgtgcacaccgagaaagtgaacatgatgagcctgaccgtgctgggcctgcggatgctgttcgccaaaaccgtggccgtgaacttcctgctgaccgccaagctgttcttcctc

SEQ ID NO: 21762 - DNA, 525 bp, synthetic construct
  source 1..525: mol_type = other DNA
gccgacgtgtcccccaagcctaccatcttcctgccctctatcgccgagacaaagctccagaaggccggcacctacctgtgcctgctggaaaagttcttcccagatgtgattaagatccactggcaggaaaagaagtccaacaccatcctgggcagccaggaaggcaacaccatgaagaccaacgacacctacatgaagttcagctggctgaccgtgcccgagaagtccctggacaaagaacacagatgcatcgtgcggcacgaaaacaacaagaacggcgtggaccaggaaatcatcttcccacccatcaagaccgatgtgattacaatggaccccaaggacgaccacgtgaagcccaaagagacagagaacaccaagcagcccagcaagagctgccacaagcccaaggccatcgtgcacaccgagaaagtgaacatgatgagcctgaccgtgctgggcctgcggatgctgttcgccaaaaccgtggccgtgaacttcctgctgaccgccaagctgttcttcctc

SEQ ID NO: 21763 - DNA, 507 bp, synthetic construct; identical to SEQ ID NO: 21747
  source 1..507: mol_type = other DNA

SEQ ID NO: 21764 - DNA, 477 bp, synthetic construct; identical to SEQ ID NO: 21748
  source 1..477: mol_type = other DNA

SEQ ID NO: 21765 - DNA, 504 bp, synthetic construct; identical to SEQ ID NO: 21749
  source 1..504: mol_type = other DNA

SEQ ID NO: 21766 - DNA, 486 bp, synthetic construct; identical to SEQ ID NO: 21750
  source 1..486: mol_type = other DNA

SEQ ID NO: 21767 - DNA, 480 bp, synthetic construct; identical to SEQ ID NO: 21751
  source 1..480: mol_type = other DNA

SEQ ID NO: 21768 - DNA, 510 bp, synthetic construct; identical to SEQ ID NO: 21752
  source 1..510: mol_type = other DNA

SEQ ID NO: 21769 - DNA, 531 bp, synthetic construct; identical to SEQ ID NO: 21753
  source 1..531: mol_type = other DNA

SEQ ID NO: 21770 - DNA, 510 bp, synthetic construct; identical to SEQ ID NO: 21754
  source 1..510: mol_type = other DNA

SEQ ID NO: 21771 - DNA, 429 bp, synthetic construct
  source 1..429: mol_type = other DNA
cctcacaccaagcccagcgtgttcgtgatgaagaacggcaccaacgtggcctgcctcgtgaaagagttctaccccaaggacatcaggatcaacctggtgtccagcaagaagatcaccgagttcgaccccgccatcgtgatctcccccagcggcaagtacaacgccgtgaagctggggaagtacgaggacagcaacagcgtgacctgctccgtgcagcacgacaacaagaccgtgcacagcaccgactttatccccgaggacacattcttcccaagccccgagagcagctgcgacgtgaagctggtggaaaagagcttcgagacagacaccaacctgaacttccagaacctgagcgtgatcggcttcagaatcctgctgctgaaagtggccggctttaacctgctgatgaccctgcggctgtggtccagc

SEQ ID NO: 21772 - DNA, 399 bp, synthetic construct
  source 1..399: mol_type = other DNA
cctcacaccaagcccagcgtgttcgtgatgaagaacggcaccaacgtggcctgcctcgtgaaagagttctaccccaaggacatcaggatcaacctggtgtccagcaagaagatcaccgagttcgaccccgccatcgtgatctcccccagcggcaagtacaacgccgtgaagctggggaagtacgaggacagcaacagcgtgacctgctccgtgcagcacgacaacaagaccgtgcacagcaccgactttgagagcagctgcgacgtgaagctggtggaaaagagcttcgagacagacaccaacctgaacttccagaacctgagcgtgatcggcttcagaatcctgctgctgaaagtggccggctttaacctgctgatgaccctgcggctgtggtccagc

SEQ ID NO: 21773 - DNA, 426 bp, synthetic construct
  source 1..426: mol_type = other DNA
cctcacaccaagcccagcgtgttcgtgatgaagaacggcaccaacgtggcctgcctcgtgaaagagttctaccccaaggacatcaggatcaacctggtgtccagcaagaagatcaccgagttcgaccccgccatcgtgatctcccccagcggcaagtacaacgccgtgaagctggggaagtacgaggacagcaacagcgtgacctgctccgtgcagcacgacaacaagaccgtgcacagcaccgactttcccgaggacacattcttcccaagccccgagagcagctgcgacgtgaagctggtggaaaagagcttcgagacagacaccaacctgaacttccagaacctgagcgtgatcggcttcagaatcctgctgctgaaagtggccggctttaacctgctgatgaccctgcggctgtggtccagc

SEQ ID NO: 21774 - DNA, 408 bp, synthetic construct
  source 1..408: mol_type = other DNA
cctcacaccaagcccagcgtgttcgtgatgaagaacggcaccaacgtggcctgcctcgtgaaagagttctaccccaaggacatcaggatcaacctggtgtccagcaagaagatcaccgagttcgaccccgccatcgtgatctcccccagcggcaagtacaacgccgtgaagctggggaagtacgaggacagcaacagcgtgacctgctccgtgcagcacgacaacaagaccgtgcacagcaccgactttggcagagccgattgcggctttaccagcgagagctaccagcagggcgtgctgagcgccaccatcctgtacgagatcctgctgggcaaggccaccctgtacgccgtgctggtgtctgccctggtgctgatggctatggtcaagcggaaggacagccgggga

SEQ ID NO: 21775 - DNA, 402 bp, synthetic construct
  source 1..402: mol_type = other DNA
cctcacaccaagcccagcgtgttcgtgatgaagaacggcaccaacgtggcctgcctcgtgaaagagttctaccccaaggacatcaggatcaacctggtgtccagcaagaagatcaccgagttcgaccccgccatcgtgatctcccccagcggcaagtacaacgccgtgaagctggggaagtacgaggacagcaacagcgtgacctgctccgtgcagcacgacaacaagaccgtgcacagcaccgactttgccgattgcggctttaccagcgagagctaccagcagggcgtgctgagcgccaccatcctgtacgagatcctgctgggcaaggccaccctgtacgccgtgctggtgtctgccctggtgctgatggctatggtcaagcggaaggacagccgggga

SEQ ID NO: 21776 - DNA, 432 bp, synthetic construct
  source 1..432: mol_type = other DNA
cctcacaccaagcccagcgtgttcgtgatgaagaacggcaccaacgtggcctgcctcgtgaaagagttctaccccaaggacatcaggatcaacctggtgtccagcaagaagatcaccgagttcgaccccgccatcgtgatctcccccagcggcaagtacaacgccgtgaagctggggaagtacgaggacagcaacagcgtgacctgctccgtgcagcacgacaacaagaccgtgcacagcaccgactttcagatcgtgtctgccgaagcctggggcagagccgattgcggctttaccagcgagagctaccagcagggcgtgctgagcgccaccatcctgtacgagatcctgctgggcaaggccaccctgtacgccgtgctggtgtctgccctggtgctgatggctatggtcaagcggaaggacagccgggga

SEQ ID NO: 21777 - DNA, 456 bp, synthetic construct
  source 1..456: mol_type = other DNA
cctcacaccaagcccagcgtgttcgtgatgaagaacggcaccaacgtggcctgcctcgtgaaagagttctaccccaaggacatcaggatcaacctggtgtccagcaagaagatcaccgagttcgaccccgccatcgtgatctcccccagcggcaagtacaacgccgtgaagctggggaagtacgaggacagcaacagcgtgacctgctccgtgcagcacgacaacaagaccgtgcacagcaccgactttttcccacccatcaagaccgatgtgattacaatggaccccaaggacaactgctccaaggacgccaacgataccctgctgctccagctgaccaacaccagcgcctactacatgtacttgttgctgctgctgaagtccgtggtgtacttcgccatcatcacatgctgcctgctgcggagaaccgccttctgctgcaacggcgagaagtct

SEQ ID NO: 21778 - DNA, 450 bp, synthetic construct
  source 1..450: mol_type = other DNA
cctcacaccaagcccagcgtgttcgtgatgaagaacggcaccaacgtggcctgcctcgtgaaagagttctaccccaaggacatcaggatcaacctggtgtccagcaagaagatcaccgagttcgaccccgccatcgtgatctcccccagcggcaagtacaacgccgtgaagctggggaagtacgaggacagcaacagcgtgacctgctccgtgcagcacgacaacaagaccgtgcacagcaccgactttcccatcaagaccgatgtgattacaatggaccccaaggacaactgctccaaggacgccaacgataccctgctgctccagctgaccaacaccagcgcctactacatgtacttgttgctgctgctgaagtccgtggtgtacttcgccatcatcacatgctgcctgctgcggagaaccgccttctgctgcaacggcgagaagtct

SEQ ID NO: 21779 - DNA, 426 bp, synthetic construct
  source 1..426: mol_type = other DNA
cctcacaccaagcccagcgtgttcgtgatgaagaacggcaccaacgtggcctgcctcgtgaaagagttctaccccaaggacatcaggatcaacctggtgtccagcaagaagatcaccgagttcgaccccgccatcgtgatctcccccagcggcaagtacaacgccgtgaagctggggaagtacgaggacagcaacagcgtgacctgctccgtgcagcacgacaacaagaccgtgcacagcaccgactttatggaccccaaggacaactgctccaaggacgccaacgataccctgctgctccagctgaccaacaccagcgcctactacatgtacttgttgctgctgctgaagtccgtggtgtacttcgccatcatcacatgctgcctgctgcggagaaccgccttctgctgcaacggcgagaagtct

SEQ ID NO: 21780 - DNA, 453 bp, synthetic construct; identical to SEQ ID NO: 17334
  source 1..453: mol_type = other DNA

SEQ ID NO: 21781 - DNA, 432 bp, synthetic construct
  source 1..432: mol_type = other DNA
cctcacaccaagcccagcgtgttcgtgatgaagaacggcaccaacgtggcctgcctcgtgaaagagttctaccccaaggacatcaggatcaacctggtgtccagcaagaagatcaccgagttcgaccccgccatcgtgatctcccccagcggcaagtacaacgccgtgaagctggggaagtacgaggacagcaacagcgtgacctgctccgtgcagcacgacaacaagaccgtgcacagcaccgactttgaccacgtgaagcccaaagagacagagaacaccaagcagcccagcaagagctgccacaagcccaaggccatcgtgcacaccgagaaagtgaacatgatgagcctgaccgtgctgggcctgcggatgctgttcgccaaaaccgtggccgtgaacttcctgctgaccgccaagctgttcttcctc

SEQ ID NO: 21782 - DNA, 450 bp, synthetic construct
  source 1..450: mol_type = other DNA
cctcacaccaagcccagcgtgttcgtgatgaagaacggcaccaacgtggcctgcctcgtgaaagagttctaccccaaggacatcaggatcaacctggtgtccagcaagaagatcaccgagttcgaccccgccatcgtgatctcccccagcggcaagtacaacgccgtgaagctggggaagtacgaggacagcaacagcgtgacctgctccgtgcagcacgacaacaagaccgtgcacagcaccgactttgaagtgaaaaccgactccaccatccccgaggacacattcttcccaagccccgagagcagctgcgacgtgaagctggtggaaaagagcttcgagacagacaccaacctgaacttccagaacctgagcgtgatcggcttcagaatcctgctgctgaaagtggccggctttaacctgctgatgaccctgcggctgtggtccagc

SEQ ID NO: 21783 - DNA, 420 bp, synthetic construct
  source 1..420: mol_type = other DNA
cctcacaccaagcccagcgtgttcgtgatgaagaacggcaccaacgtggcctgcctcgtgaaagagttctaccccaaggacatcaggatcaacctggtgtccagcaagaagatcaccgagttcgaccccgccatcgtgatctcccccagcggcaagtacaacgccgtgaagctggggaagtacgaggacagcaacagcgtgacctgctccgtgcagcacgacaacaagaccgtgcacagcaccgactttgaagtgaaaaccgactccaccgagagcagctgcgacgtgaagctggtggaaaagagcttcgagacagacaccaacctgaacttccagaacctgagcgtgatcggcttcagaatcctgctgctgaaagtggccggctttaacctgctgatgaccctgcggctgtggtccagc

SEQ ID NO: 21784 - DNA, 447 bp, synthetic construct
  source 1..447: mol_type = other DNA
cctcacaccaagcccagcgtgttcgtgatgaagaacggcaccaacgtggcctgcctcgtgaaagagttctaccccaaggacatcaggatcaacctggtgtccagcaagaagatcaccgagttcgaccccgccatcgtgatctcccccagcggcaagtacaacgccgtgaagctggggaagtacgaggacagcaacagcgtgacctgctccgtgcagcacgacaacaagaccgtgcacagcaccgactttgaagtgaaaaccgactccacccccgaggacacattcttcccaagccccgagagcagctgcgacgtgaagctggtggaaaagagcttcgagacagacaccaacctgaacttccagaacctgagcgtgatcggcttcagaatcctgctgctgaaagtggccggctttaacctgctgatgaccctgcggctgtggtccagc

SEQ ID NO: 21785 - DNA, 429 bp, synthetic construct
  source 1..429: mol_type = other DNA
cctcacaccaagcccagcgtgttcgtgatgaagaacggcaccaacgtggcctgcctcgtgaaagagttctaccccaaggacatcaggatcaacctggtgtccagcaagaagatcaccgagttcgaccccgccatcgtgatctcccccagcggcaagtacaacgccgtgaagctggggaagtacgaggacagcaacagcgtgacctgctccgtgcagcacgacaacaagaccgtgcacagcaccgactttgaagtgaaaaccgactccaccggcagagccgattgcggctttaccagcgagagctaccagcagggcgtgctgagcgccaccatcctgtacgagatcctgctgggcaaggccaccctgtacgccgtgctggtgtctgccctggtgctgatggctatggtcaagcggaaggacagccgggga

SEQ ID NO: 21786 - DNA, 423 bp, synthetic construct
  source 1..423: mol_type = other DNA
cctcacaccaagcccagcgtgttcgtgatgaagaacggcaccaacgtggcctgcctcgtgaaagagttctaccccaaggacatcaggatcaacctggtgtccagcaagaagatcaccgagttcgaccccgccatcgtgatctcccccagcggcaagtacaacgccgtgaagctggggaagtacgaggacagcaacagcgtgacctgctccgtgcagcacgacaacaagaccgtgcacagcaccgactttgaagtgaaaaccgactccaccgccgattgcggctttaccagcgagagctaccagcagggcgtgctgagcgccaccatcctgtacgagatcctgctgggcaaggccaccctgtacgccgtgctggtgtctgccctggtgctgatggctatggtcaagcggaaggacagccgggga

SEQ ID NO: 21787 - DNA, 453 bp, synthetic construct
  source 1..453: mol_type = other DNA
cctcacaccaagcccagcgtgttcgtgatgaagaacggcaccaacgtggcctgcctcgtgaaagagttctaccccaaggacatcaggatcaacctggtgtccagcaagaagatcaccgagttcgaccccgccatcgtgatctcccccagcggcaagtacaacgccgtgaagctggggaagtacgaggacagcaacagcgtgacctgctccgtgcagcacgacaacaagaccgtgcacagcaccgactttgaagtgaaaaccgactccacccagatcgtgtctgccgaagcctggggcagagccgattgcggctttaccagcgagagctaccagcagggcgtgctgagcgccaccatcctgtacgagatcctgctgggcaaggccaccctgtacgccgtgctggtgtctgccctggtgctgatggctatggtcaagcggaaggacagccgggga

SEQ ID NO: 21788 - DNA, 477 bp, synthetic construct
  source 1..477: mol_type = other DNA
cctcacaccaagcccagcgtgttcgtgatgaagaacggcaccaacgtggcctgcctcgtgaaagagttctaccccaaggacatcaggatcaacctggtgtccagcaagaagatcaccgagttcgaccccgccatcgtgatctcccccagcggcaagtacaacgccgtgaagctggggaagtacgaggacagcaacagcgtgacctgctccgtgcagcacgacaacaagaccgtgcacagcaccgactttgaagtgaaaaccgactccaccttcccacccatcaagaccgatgtgattacaatggaccccaaggacaactgctccaaggacgccaacgataccctgctgctccagctgaccaacaccagcgcctactacatgtacttgttgctgctgctgaagtccgtggtgtacttcgccatcatcacatgctgcctgctgcggagaaccgccttctgctgcaacggcgagaagtct

SEQ ID NO: 21789 - DNA, 471 bp, synthetic construct
  source 1..471: mol_type = other DNA
cctcacaccaagcccagcgtgttcgtgatgaagaacggcaccaacgtggcctgcctcgtgaaagagttctaccccaaggacatcaggatcaacctggtgtccagcaagaagatcaccgagttcgaccccgccatcgtgatctcccccagcggcaagtacaacgccgtgaagctggggaagtacgaggacagcaacagcgtgacctgctccgtgcagcacgacaacaagaccgtgcacagcaccgactttgaagtgaaaaccgactccacccccatcaagaccgatgtgattacaatggaccccaaggacaactgctccaaggacgccaacgataccctgctgctccagctgaccaacaccagcgcctactacatgtacttgttgctgctgctgaagtccgtggtgtacttcgccatcatcacatgctgcctgctgcggagaaccgccttctgctgcaacggcgagaagtct

SEQ ID NO: 21790 - DNA, 447 bp, synthetic construct
  source 1..447: mol_type = other DNA
cctcacaccaagcccagcgtgttcgtgatgaagaacggcaccaacgtggcctgcctcgtgaaagagttctaccccaaggacatcaggatcaacctggtgtccagcaagaagatcaccgagttcgaccccgccatcgtgatctcccccagcggcaagtacaacgccgtgaagctggggaagtacgaggacagcaacagcgtgacctgctccgtgcagcacgacaacaagaccgtgcacagcaccgactttgaagtgaaaaccgactccaccatggaccccaaggacaactgctccaaggacgccaacgataccctgctgctccagctgaccaacaccagcgcctactacatgtacttgttgctgctgctgaagtccgtggtgtacttcgccatcatcacatgctgcctgctgcggagaaccgccttctgctgcaacggcgagaagtct

SEQ ID NO: 21791 - DNA, 471 bp, synthetic construct; identical to SEQ ID NO: 21789
  source 1..471: mol_type = other DNA

SEQ ID NO: 21792 - DNA, 429 bp, synthetic construct
  source 1..429: mol_type = other DNA
cctcacaccaagcccagcgtgttcgtgatgaagaacggcaccaacgtggcctgcctcgtgaaagagttctaccccaaggacatcaggatcaacctggtgtccagcaagaagatcaccgagttcgaccccgccatcgtgatctcccccagcggcaagtacaacgccgtgaagctggggaagtacgaggacagcaacagcgtgacctgctccgtgcagcacgacaacaagaccgtgcacagcaccgactttgaagtgaaaaccgactccacctgctccaaggacgccaacgataccctgctgctccagctgaccaacaccagcgcctactacatgtacttgttgctgctgctgaagtccgtggtgtacttcgccatcatcacatgctgcctgctgcggagaaccgccttctgctgcaacggcgagaagtct

SEQ ID NO: 21793 - DNA, 429 bp, synthetic construct; identical to SEQ ID NO: 21771
  source 1..429: mol_type = other DNA

SEQ ID NO: 21794 - DNA, 399 bp, synthetic construct; identical to SEQ ID NO: 21772
  source 1..399: mol_type = other DNA

SEQ ID NO: 21795 - DNA, 426 bp, synthetic construct; identical to SEQ ID NO: 21773
  source 1..426: mol_type = other DNA

SEQ ID NO: 21796 - DNA, 408 bp, synthetic construct; identical to SEQ ID NO: 21774
  source 1..408: mol_type = other DNA

SEQ ID NO: 21797 - DNA, 402 bp, synthetic construct; identical to SEQ ID NO: 21775
  source 1..402: mol_type = other DNA

SEQ ID NO: 21798 - DNA, 432 bp, synthetic construct; identical to SEQ ID NO: 21776
  source 1..432: mol_type = other DNA

SEQ ID NO: 21799 - DNA, 456 bp, synthetic construct; identical to SEQ ID NO: 21777
  source 1..456: mol_type = other DNA

SEQ ID NO: 21800 - DNA, 450 bp, synthetic construct; identical to SEQ ID NO: 21778
  source 1..450: mol_type = other DNA

SEQ ID NO: 21801 - DNA, 426 bp, synthetic construct; identical to SEQ ID NO: 21779
  source 1..426: mol_type = other DNA

SEQ ID NO: 21802 - DNA, 450 bp, synthetic construct; identical to SEQ ID NO: 21778
  source 1..450: mol_type = other DNA

SEQ ID NO: 21803 - DNA, 408 bp, synthetic construct
  source 1..408: mol_type = other DNA
cctcacaccaagcccagcgtgttcgtgatgaagaacggcaccaacgtggcctgcctcgtgaaagagttctaccccaaggacatcaggatcaacctggtgtccagcaagaagatcaccgagttcgaccccgccatcgtgatctcccccagcggcaagtacaacgccgtgaagctggggaagtacgaggacagcaacagcgtgacctgctccgtgcagcacgacaacaagaccgtgcacagcaccgacttttgctccaaggacgccaacgataccctgctgctccagctgaccaacaccagcgcctactacatgtacttgttgctgctgctgaagtccgtggtgtacttcgccatcatcacatgctgcctgctgcggagaaccgccttctgctgcaacggcgagaagtct

SEQ ID NO: 21804 - DNA, 450 bp, synthetic construct; identical to SEQ ID NO: 21782
  source 1..450: mol_type = other DNA

SEQ ID NO: 21805 - DNA, 420 bp, synthetic construct; identical to SEQ ID NO: 21783
  source 1..420: mol_type = other DNA

SEQ ID NO: 21806 - DNA, 447 bp, synthetic construct; identical to SEQ ID NO: 21784
  source 1..447: mol_type = other DNA

SEQ ID NO: 21807 - DNA, 429 bp, synthetic construct; identical to SEQ ID NO: 21785
  source 1..429: mol_type = other DNA

SEQ ID NO: 21808 - DNA, 423 bp, synthetic construct; identical to SEQ ID NO: 21786
  source 1..423: mol_type = other DNA

SEQ ID NO: 21809 - DNA, 453 bp, synthetic construct; identical to SEQ ID NO: 21787
  source 1..453: mol_type = other DNA

SEQ ID NO: 21810 - DNA, 477 bp, synthetic construct; identical to SEQ ID NO: 21788
  source 1..477: mol_type = other DNA

SEQ ID NO: 21811 - DNA, 471 bp, synthetic construct; identical to SEQ ID NO: 21789
  source 1..471: mol_type = other DNA

SEQ ID NO: 21812 - DNA, 447 bp, synthetic construct; identical to SEQ ID NO: 21790
  source 1..447: mol_type = other DNA

SEQ ID NO: 21813 - DNA, 471 bp, synthetic construct; identical to SEQ ID NO: 21789
  source 1..471: mol_type = other DNA

SEQ ID NO: 21814 - DNA, 429 bp, synthetic construct; identical to SEQ ID NO: 21792
  source 1..429: mol_type = other DNA

SEQ ID NO: 21815 - DNA, 17 bp, synthetic construct
  source 1..17: mol_type = other DNA
ggggggggggggggggg

SEQ ID NO: 21816 - DNA, 17 bp, synthetic construct
  source 1..17: mol_type = other DNA
ggggggggggggggggg

SEQ ID NO: 21817 - DNA, 17 bp, synthetic construct
  source 1..17: mol_type = other DNA
ggggggggggggggggg

SEQ ID NO: 21818 - DNA, 17 bp, synthetic construct
  source 1..17: mol_type = other DNA
ggggggggggggggggg

SEQ ID NO: 21819 - DNA, 17 bp, synthetic construct
  source 1..17: mol_type = other DNA
ggggggggggggggggg

SEQ ID NO: 21820 - DNA, 17 bp, synthetic construct
  source 1..17: mol_type = other DNA
ggggggggggggggggg

SEQ ID NO: 21821 - DNA, 17 bp, synthetic construct
  source 1..17: mol_type = other DNA
ggggggggggggggggg

SEQ ID NO: 21822 - DNA, 17 bp, synthetic construct
  source 1..17: mol_type = other DNA
ggggggggggggggggg

SEQ ID NO: 21823 - DNA, 17 bp, synthetic construct
  source 1..17: mol_type = other DNA
ggggggggggggggggg

SEQ ID NO: 21824 - DNA, 17 bp, synthetic construct
  source 1..17: mol_type = other DNA
ggggggggggggggggg

SEQ ID NO: 21825 - DNA, 17 bp, synthetic construct
  source 1..17: mol_type = other DNA
ggggggggggggggggg

SEQ ID NO: 21826 - DNA, 17 bp, synthetic construct
  source 1..17: mol_type = other DNA
ggggggggggggggggg

SEQ ID NO: 21827 - DNA, 17 bp, synthetic construct
  source 1..17: mol_type = other DNA
ggggggggggggggggg

SEQ ID NO: 21828 - DNA, 17 bp, synthetic construct
  source 1..17: mol_type = other DNA
ggggggggggggggggg

SEQ ID NO: 21829 - DNA, 17 bp, synthetic construct
  source 1..17: mol_type = other DNA
ggggggggggggggggg

SEQ ID NO: 21830 - DNA, 17 bp, synthetic construct
  source 1..17: mol_type = other DNA
ggggggggggggggggg

SEQ ID NO: 21831 - DNA, 1470 bp, synthetic construct
  source 1..1470: mol_type = other DNA
atggccttaccagtgaccgccttgctcctgccgctggccttgctgctccacgccgccaggccggacatccagatgacccagtctccaagcacactgagcgccagcgtgggcgacagagtgaccattacatgtagagccagccagagcatcagcaactggctggcctggtatcagcagaagccaggcagagcccctaacctgctgatctctaaggccagcagcctgaagtctggcgtgcccagcagattttctggctctggcagcggcaccgagttcaccctgacagtctctagcctccagcctgacgacttcgccacctactactgccagcagtattacagctactcctacaccttcggccagggcaccaagctggaaatcaagggcggaggcggaagtggaggcggaggatctggcggcggaggctctcaggtgcagctggttgaatctggtggcggagttgtgcagcctggcagaagcctgagactgagctgtgtggcctccggctttaccatcagcagctacggcatgaactgggtccgacaggcccctggcaaaggactggaatgggttgccgtgatctcctacgacggcggcaacaagtacagcgtggacagcgtgaagggcagattcaccatcagccgggacaacagcaagaacaccctgtacctccagatgaacagcctgagagccgaggacagcgccgtgtactattgtgccagaggccggtacttcgacctgtggggaagaggcacactggtcacagtttctagcacgcgtgagcagaaactgatctcggaagaggatctgaaaattgaagttatgtatcctcctccttacctagacaatgagaagagcaatggaaccattatccatgtgaaagggaaacacctttgtccaagtcccctatttcccggaccttctaagcccttttgggtgctggtggtggttgggggagtcctggcttgctatagcttgctagtaacagtggcctttattattttctgggtgaggagtaagaggagcaggctcctgcacagtgactacatgaacatgactccacgccgccccggacccacccgcaagcattaccagccctatgccccaccacgcgacttcgcagcctatcgctccagagtgaagttcagcaggagcgcagacgcccccgcgtaccagcagggccagaaccagctctataacgagctcaatctaggacgaagagaggagtacgatgttttggacaagagacgtggccgggaccctgagatggggggaaagccgagaaggaagaaccctcaggaaggcctgtacaatgaactgcagaaagataagatggcggaggcctacagtgagattgggatgaaaggcgagcgccggaggggcaaggggcacgatggcctttaccagggtctcagtacagccaccaaggacacctacgacgcccttcacatgcaggccctgccccctcgc

SEQ ID NO: 21832 - DNA, 1491 bp, synthetic construct
  source 1..1491: mol_type = other DNA
atggccttaccagtgaccgccttgctcctgccgctggccttgctgctccacgccgccaggccggacatccagatgacccagtctccaagcacactgagcgccagcgtgggcgacagagtgaccattacatgtagagccagccagagcatcagcaactggctggcctggtatcagcagaagccaggcagagcccctaacctgctgatctctaaggccagcagcctgaagtctggcgtgcccagcagattttctggctctggcagcggcaccgagttcaccctgacagtctctagcctccagcctgacgacttcgccacctactactgccagcagtattacagctactcctacaccttcggccagggcaccaagctggaaatcaagggcggaggcggaagtggaggcggaggatctggcggcggaggctctcaggtgcagctggttgaatctggtggcggagttgtgcagcctggcagaagcctgagactgagctgtgtggcctccggctttaccatcagcagctacggcatgaactgggtccgacaggcccctggcaaaggactggaatgggttgccgtgatctcctacgacggcggcaacaagtacagcgtggacagcgtgaagggcagattcaccatcagccgggacaacagcaagaacaccctgtacctccagatgaacagcctgagagccgaggacagcgccgtgtactattgtgccagaggccggtacttcgacctgtggggaagaggcacactggtcacagtttctagcacgcgtgagcagaaactgatctcggaagaggatctggcgaagcccaccacgacgccagcgccgcgaccaccaacaccggcgcccaccatcgcgtcgcagcccctgtccctgcgcccagaggcgtgccggccagcggcggggggcgcagtgcacacgagggggctggacttcgcctgtgacatctacatctgggcgcccttggccgggacttgtggggtccttctcctgtcactggttatcaccctttactgcaaacggggcagaaagaaactcctgtatatattcaaacaaccatttatgagaccagtacaaactactcaagaggaagatggctgtagctgccgatttccagaagaagaagaaggaggatgtgaactgagagtgaagttcagcaggagcgcagacgcccccgcgtaccagcagggccagaaccagctctataacgagctgaatctaggacgaagagaggagtacgatgttttggacaagagacgtggccgggaccctgagatggggggaaagccgagaaggaagaaccctcaggaaggcctgtacaatgaactgcagaaagataagatggcggaggcctacagtgagattgggatgaaaggcgagcgccggaggggcaaggggcacgatggcctttaccagggtctcagtacagccaccaaggacacctacgacgcccttcacatgcaggccctgccccctcgctga

SEQ ID NO: 21833 - DNA, 1491 bp, synthetic construct
  source 1..1491: mol_type = other DNA
atggccttaccagtgaccgccttgctcctgccgctggccttgctgctccacgccgccaggccgcaggtgcagctggttgaatctggtggcggagttgtgcagcctggcagaagcctgagactgagctgtgtggcctccggctttaccatcagcagctacggcatgaactgggtccgacaggcccctggcaaaggactggaatgggttgccgtgatctcctacgacggcggcaacaagtacagcgtggacagcgtgaagggcagattcaccatcagccgggacaacagcaagaacaccctgtacctccagatgaacagcctgagagccgaggacagcgccgtgtactattgtgccagaggccggtacttcgacctgtggggaagaggcacactggtcacagtttctagcggcggaggcggaagtggaggcggaggatctggcggcggaggctctgacatccagatgacccagtctccaagcacactgagcgccagcgtgggcgacagagtgaccattacatgtagagccagccagagcatcagcaactggctggcctggtatcagcagaagccaggcagagcccctaacctgctgatctctaaggccagcagcctgaagtctggcgtgcccagcagattttctggctctggcagcggcaccgagttcaccctgacagtctctagcctccagcctgacgacttcgccacctactactgccagcagtattacagctactcctacaccttcggccagggcaccaagctggaaatcaagacgcgtgagcagaaactgatctcggaagaggatctggcgaagcccaccacgacgccagcgccgcgaccaccaacaccggcgcccaccatcgcgtcgcagcccctgtccctgcgcccagaggcgtgccggccagcggcggggggcgcagtgcacacgagggggctggacttcgcctgtgacatctacatctgggcgcccttggccgggacttgtggggtccttctcctgtcactggttatcaccctttactgcaaacggggcagaaagaaactcctgtatatattcaaacaaccatttatgagaccagtacaaactactcaagaggaagatggctgtagctgccgatttccagaagaagaagaaggaggatgtgaactgagagtgaagttcagcaggagcgcagacgcccccgcgtaccagcagggccagaaccagctctataacgagctgaatctaggacgaagagaggagtacgatgttttggacaagagacgtggccgggaccctgagatggggggaaagccgagaaggaagaaccctcaggaaggcctgtacaatgaactgcagaaagataagatggcggaggcctacagtgagattgggatgaaaggcgagcgccggaggggcaaggggcacgatggcctttaccagggtctcagtacagccaccaaggacacctacgacgcccttcacatgcaggccctgccccctcgctga

SEQ ID NO: 21834 - DNA, 2730 bp, synthetic construct
  source 1..2730: mol_type = other DNA
atggccttaccagtgaccgccttgctcctgccgctggccttgctgctccacgccgccaggccggacatccagatgacccagtctccaagcacactgagcgccagcgtgggcgacagagtgaccattacatgtagagccagccagagcatcagcaactggctggcctggtatcagcagaagccaggcagagcccctaacctgctgatctctaaggccagcagcctgaagtctggcgtgcccagcagattttctggctctggcagcggcaccgagttcaccctgacagtctctagcctccagcctgacgacttcgccacctactactgccagcagtattacagctactcctacaccttcggccagggcaccaagctggaaatcaagggcggaggcggaagtggaggcggaggatctggcggcggaggctctcaggtgcagctggttgaatctggtggcggagttgtgcagcctggcagaagcctgagactgagctgtgtggcctccggctttaccatcagcagctacggcatgaactgggtccgacaggcccctggcaaaggactggaatgggttgccgtgatctcctacgacggcggcaacaagtacagcgtggacagcgtgaagggcagattcaccatcagccgggacaacagcaagaacaccctgtacctccagatgaacagcctgagagccgaggacagcgccgtgtactattgtgccagaggccggtacttcgacctgtggggaagaggcacactggtcacagtttctagcacgcgtgagcagaaactgatctcggaagaggatctggcgaagcccaccacgacgccagcgccgcgaccaccaacaccggcgcccaccatcgcgtcgcagcccctgtccctgcgcccagaggcgtgccggccagcggcggggggcgcagtgcacacgagggggctggacttcgcctgtgacatctacatctgggcgcccttggccgggacttgtggggtccttctcctgtcactggttatcaccctttactgcgggcgcgccagagtgaagttcagcaggagcgcagacgcccccgcgtaccagcagggccagaaccagctctataacgagctgaatctaggacgaagagaggagtacgatgttttggacaagagacgtggccgggaccctgagatggggggaaagccgagaaggaagaaccctcaggaaggcctgtacaatgaactgcagaaagataagatggcggaggcctacagtgagattgggatgaaaggcgagcgccggaggggcaaggggcacgatggcctttaccagggtctcagtacagccaccaaggacacctacgacgcccttcacatgcaggccctgccccctcgctctagaggatctggagcaacaaacttctcactactcaaacaagcaggtgacgtggaggagaatcccgggcctgggatccacatggccacttacgaggttctctgtgaggtggcgcggaaactgggcacggatgacagggaagtggtattgttcctcctaaacgtgttcatacctcaacccacactggcccaattaattggagctcttagagctttaaaggaggagggcaggttaacgtttcccctgttagcggaatgtctgtttcgtgcaggtcgcagagacctcttgcgcgacctgcttcacttagacccgcgttttttagagcgccacctagcgggcacaatgagttatttcagcccttatcagctcactgttctccacgtagacggggagctgtgtgcgagggatattaggtctttgatatttttaagcaaggacactatagggtctcgcagcacaccacagacattcttacactgggtgtactgtatggaaaacttagacctactgggtcccactgacgtggatgccctaatgtcaatgcttagatctttgtcaagagtagacctacagcgccaagtgcaaaccctaatgggccttcacctttccggcccatcacactcccaacactatcgccatacaccactcgagaccgatttctacgactacaaggacgacgatgacaagactagtggctccggcgagggcagaggaagtctactaacctgcggagatgtggaagaaaatcctggcccacatatgaccgagtacaagcccacggtgcgcctcgccacccgcgacgacgtccccagggccgtacgcaccctcgccgccgcgttcgccgactaccccgccacgcgccacaccgtcgatccggaccgccacatcgagcgggtcaccgagctgcaagaactcttcctcacgcgcgtcgggctcgacatcggcaaggtgtgggtcgcggacgacggcgccgcggtggcggtctggaccacgccggagagcgtcgaagcgggggcggtgttcgccgagatcggcccgcgcatggccgagttgagcggttcccggctggccgcgcagcaacagatggaaggcctcctggcgccgcaccggcccaaggagcccgcgtggttcctggccaccgtcggcgtctcgcccgaccaccagggcaagggtctgggcagcgccgtcgtgctccccggagtggaggcggccgagcgcgccggggtgcccgccttcctggagacctccgcgccccgcaacctccccttctacgagcggctcggcttcaccgtcaccgccgacgtcgaggtgcccgaaggaccgcgcacctggtgcatgacccgcaagcccggtgcctga

SEQ ID NO: 21835 - DNA, 2550 bp, synthetic construct
  source 1..2550: mol_type = other DNA
atggccttaccagtgaccgccttgctcctgccgctggccttgctgctccacgccgccaggccggacatccagatgacccagtctccaagcacactgagcgccagcgtgggcgacagagtgaccattacatgtagagccagccagagcatcagcaactggctggcctggtatcagcagaagccaggcagagcccctaacctgctgatctctaaggccagcagcctgaagtctggcgtgcccagcagattttctggctctggcagcggcaccgagttcaccctgacagtctctagcctccagcctgacgacttcgccacctactactgccagcagtattacagctactcctacaccttcggccagggcaccaagctggaaatcaagctcgagatccagaaccctgatcctgccgtgtaccagctgcgggatagcaagagcagcgacaagagcgtgtgtctgttcaccgacttcgacagccagaccaacgtgtcccagagcaaggactccgacgtgtacatcaccgataagtgcgtgctggacatgcggagcatggacttcaagagcaactccgccgtggcctggtccaacaagtccgatttcgcctgcgccaacgccttcaacaacagcattatccccgaggacacattcttcccaagcagcgacgtgccctgcgacgtgaagctggtggaaaagagcttcgagacagacaccaacctgaacttccagaacctgagcgtgatcggcttcagaatcctgctgctgaaagtggccggctttaacctgctgatgaccctgcggctgtggtccagccgcgccaagagaagcggatctggcgtgaagcagaccctgaatttcgacctgctgaagctggctggcgacgtggaatccaacccaggccctactagtatggactggatttggcgcatccttttccttgtcggcgctgctaccggcgcgcattccttcgaacaggtgcagctggttgaatctggtggcggagttgtgcagcctggcagaagcctgagactgagctgtgtggcctccggctttaccatcagcagctacggcatgaactgggtccgacaggcccctggcaaaggactggaatgggttgccgtgatctcctacgacggcggcaacaagtacagcgtggacagcgtgaagggcagattcaccatcagccgggacaacagcaagaacaccctgtacctccagatgaacagcctgagagccgaggacagcgccgtgtactattgtgccagaggccggtacttcgacctgtggggaagaggcacactggtcacagtttctagcacgcgtgaggacctgaagaacgtgttcccacctgaggtggccgtgttcgagcctagcaaggccgagatcgcccacacccagaaagccaccctcgtgtgcctggctaccggcttctaccccgaccatgtggaactgtcttggtgggtcaacggcaaagaggtgcacagcggcgtgtgtaccgacccccagccactgaaagaacagcccgccctgaacgacagccggtactgcctgagcagcagactgagagtgtccgccaccttctggcagaacccccggaaccacttcagatgccaggtgcagttctacggcctgagcgagaacgacgagtggacccaggacagagccaagcccgtgacccagatcgtgtctgccgaagcctggggcagagccgattgcggcatcaccagcgccagctaccaccagggcgtgctgagcgccaccatcctgtacgagatcctgctgggcaaggccaccctgtacgccgtgctggtgtctgccctggtgctgatggctatggtcaagcggaaggacagccggggaagggccaagcgatctggatctggagcaacaaacttctcactactcaaacaagcaggtgacgtggaggagaatcccgggccttctagaggccatatgaccgagtacaagcccacggtgcgcctcgccacccgcgacgacgtccccagggccgtacgcaccctcgccgccgcgttcgccgactaccccgccacgcgccacaccgtcgatccggaccgccacatcgagcgggtcaccgagctgcaagaactcttcctcacgcgcgtcgggctcgacatcggcaaggtgtgggtcgcggacgacggcgccgcggtggcggtctggaccacgccggagagcgtcgaagcgggggcggtgttcgccgagatcggcccgcgcatggccgagttgagcggttcccggctggccgcgcagcaacagatggaaggcctcctggcgccgcaccggcccaaggagcccgcgtggttcctggccaccgtcggcgtctcgcccgaccaccagggcaagggtctgggcagcgccgtcgtgctccccggagtggaggcggccgagcgcgccggggtgcccgccttcctggagacctccgcgccccgcaacctccccttctacgagcggctcggcttcaccgtcaccgccgacgtcgaggtgcccgaaggaccgcgcacctggtgcatgacccgcaagcccggtgcctga

SEQ ID NO: 21836 - DNA, 2547 bp, synthetic construct
  source 1..2547: mol_type = other DNA
atggccttaccagtgaccgccttgctcctgccgctggccttgctgctccacgccgccaggccggacatccagatgacccagtctccaagcacactgagcgccagcgtgggcgacagagtgaccattacatgtagagccagccagagcatcagcaactggctggcctggtatcagcagaagccaggcagagcccctaacctgctgatctctaaggccagcagcctgaagtctggcgtgcccagcagattttctggctctggcagcggcaccgagttcaccctgacagtctctagcctccagcctgacgacttcgccacctactactgccagcagtattacagctactcctacaccttcggccagggcaccaagctggaaatcaagctcgaggacctgaagaacgtgttcccacctgaggtggccgtgttcgagcctagcaaggccgagatcgcccacacccagaaagccaccctcgtgtgcctggctaccggcttctaccccgaccatgtggaactgtcttggtgggtcaacggcaaagaggtgcacagcggcgtgtgtaccgacccccagccactgaaagaacagcccgccctgaacgacagccggtactgcctgagcagcagactgagagtgtccgccaccttctggcagaacccccggaaccacttcagatgccaggtgcagttctacggcctgagcgagaacgacgagtggacccaggacagagccaagcccgtgacccagatcgtgtctgccgaagcctggggcagagccgattgcggcatcaccagcgccagctaccaccagggcgtgctgagcgccaccatcctgtacgagatcctgctgggcaaggccaccctgtacgccgtgctggtgtctgccctggtgctgatggctatggtcaagcggaaggacagccggggaagggccaagcgatctggatctggagcaacaaacttctcactactcaaacaagcaggtgacgtggaggagaatcccgggcctactagtatggactggatttggcgcatccttttccttgtcggcgctgctaccggcgcgcattccttcgaacaggtgcagctggttgaatctggtggcggagttgtgcagcctggcagaagcctgagactgagctgtgtggcctccggctttaccatcagcagctacggcatgaactgggtccgacaggcccctggcaaaggactggaatgggttgccgtgatctcctacgacggcggcaacaagtacagcgtggacagcgtgaagggcagattcaccatcagccgggacaacagcaagaacaccctgtacctccagatgaacagcctgagagccgaggacagcgccgtgtactattgtgccagaggccggtacttcgacctgtggggaagaggcacactggtcacagtttctagcacgcgtatccagaaccctgatcctgccgtgtaccagctgcgggatagcaagagcagcgacaagagcgtgtgtctgttcaccgacttcgacagccagaccaacgtgtcccagagcaaggactccgacgtgtacatcaccgataagtgcgtgctggacatgcggagcatggacttcaagagcaactccgccgtggcctggtccaacaagtccgatttcgcctgcgccaacgccttcaacaacagcattatccccgaggacacattcttcccaagcagcgacgtgccctgcgacgtgaagctggtggaaaagagcttcgagacagacaccaacctgaacttccagaacctgagcgtgatcggcttcagaatcctgctgctgaaagtggccggctttaacctgctgatgaccctgcggctgtggtccagccgcgccaagagaagcggatctggcgtgaagcagaccctgaatttcgacctgctgaagctggctggcgacgtggaatccaacccaggcccttctagaggccatatgaccgagtacaagcccacggtgcgcctcgccacccgcgacgacgtccccagggccgtacgcaccctcgccgccgcgttcgccgactaccccgccacgcgccacaccgtcgatccggaccgccacatcgagcgggtcaccgagctgcaagaactcttcctcacgcgcgtcgggctcgacatcggcaaggtgtgggtcgcggacgacggcgccgcggtggcggtctggaccacgccggagagcgtcgaagcgggggcggtgttcgccgagatcggcccgcgcatggccgagttgagcggttcccggctggccgcgcagcaacagatggaaggcctcctggcgccgcaccggcccaaggagcccgcgtggttcctggccaccgtcggcgtctcgcccgaccaccagggcaagggtctgggcagcgccgtcgtgctccccggagtggaggcggccgagcgcgccggggtgcccgccttcctggagacctccgcgccccgcaacctccccttctacgagcggctcggcttcaccgtcaccgccgacgtcgaggtgcccgaaggaccgcgcacctggtgcatgacccgcaagcccggtgcctga

SEQ ID NO: 21837 - DNA, 1845 bp, synthetic construct
  source 1..1845: mol_type = other DNA
atggccttaccagtgaccgccttgctcctgccgctggccttgctgctccacgccgccaggccggacatccagatgacccagtctccaagcacactgagcgccagcgtgggcgacagagtgaccattacatgtagagccagccagagcatcagcaactggctggcctggtatcagcagaagccaggcagagcccctaacctgctgatctctaaggccagcagcctgaagtctggcgtgcccagcagattttctggctctggcagcggcaccgagttcaccctgacagtctctagcctccagcctgacgacttcgccacctactactgccagcagtattacagctactcctacaccttcggccagggcaccaagctggaaatcaagctcgaggacctgaagaacgtgttcccacctgaggtggccgtgttcgagcctagcgaggccgagatcagccacacccagaaagccaccctcgtgtgcctggctaccggcttctaccccgaccatgtggaactgtcttggtgggtcaacggcaaagaggtgcacagcggcgtgtgtaccgacccccagccactgaaagaacagcccgccctgaacgacagccggtactgcctgagcagcagactgagagtgtccgccaccttctggcagaacccccggaaccacttcagatgccaggtgcagttctacggcctgagcgagaacgacgagtggacccaggacagagccaagcccgtgacccagatcgtgtctgccgaagcctggggcagagccgattgcggctttaccagcgagagctaccagcagggcgtgctgagcgccaccatcctgtacgagatcctgctgggcaaggccaccctgtacgccgtgctggtgtctgccctggtgctgatggctatggtcaagcggaaggacagccggggaagggccaagcgatctggatctggagcaacaaacttctcactactcaaacaagcaggtgacgtggaggagaatcccgggcctactagtatggactggatttggcgcatccttttccttgtcggcgctgctaccggcgcgcattccttcgaacaggtgcagctggttgaatctggtggcggagttgtgcagcctggcagaagcctgagactgagctgtgtggcctccggctttaccatcagcagctacggcatgaactgggtccgacaggcccctggcaaaggactggaatgggttgccgtgatctcctacgacggcggcaacaagtacagcgtggacagcgtgaagggcagattcaccatcagccgggacaacagcaagaacaccctgtacctccagatgaacagcctgagagccgaggacagcgccgtgtactattgtgccagaggccggtacttcgacctgtggggaagaggcacactggtcacagtttctagcacgcgtatccagaaccctgatcctgccgtgtaccagctgcgggatagcaagagcagcgacaagagcgtgtgtctgttcaccgacttcgacagccagaccaacgtgtcccagagcaaggactccgacgtgtacatcaccgataagtgcgtgctggacatgcggagcatggacttcaagagcaactccgccgtggcctggtccaacaagtccgatttcgcctgcgccaacgccttcaacaacagcattatccccgaggacacattcttcccaagccccgagagcagctgcgacgtgaagctggtggaaaagagcttcgagacagacaccaacctgaacttccagaacctgagcgtgatcggcttcagaatcctgctgctgaaagtggccggctttaacctgctgatgaccctgcggctgtggtccagc

SEQ ID NO: 21838 - DNA, 2520 bp, synthetic construct
  source 1..2520: mol_type = other DNA
atggccttaccagtgaccgccttgctcctgccgctggccttgctgctccacgccgccaggccggacatccagatgacccagtctccaagcacactgagcgccagcgtgggcgacagagtgaccattacatgtagagccagccagagcatcagcaactggctggcctggtatcagcagaagccaggcagagcccctaacctgctgatctctaaggccagcagcctgaagtctggcgtgcccagcagattttctggctctggcagcggcaccgagttcaccctgacagtctctagcctccagcctgacgacttcgccacctactactgccagcagtattacagctactcctacaccttcggccagggcaccaagctggaaatcaagctcgaggacctgaagaacgtgttcccacctgaggtggccgtgttcgagcctagcgaggccgagatcagccacacccagaaagccaccctcgtgtgcctggctaccggcttctaccccgaccatgtggaactgtcttggtgggtcaacggcaaagaggtgcacagcggcgtgtgtaccgacccccagccactgaaagaacagcccgccctgaacgacagccggtactgcctgagcagcagactgagagtgtccgccaccttctggcagaacccccggaaccacttcagatgccaggtgcagttctacggcctgagcgagaacgacgagtggacccaggacagagccaagcccgtgacccagatcgtgtctgccgaagcctggggcagagccgattgcggctttaccagcgagagctaccagcagggcgtgctgagcgccaccatcctgtacgagatcctgctgggcaaggccaccctgtacgccgtgctggtgtctgccctggtgctgatggctatggtcaagcggaaggacagccggggaagggccaagcgatctggatctggagcaacaaacttctcactactcaaacaagcaggtgacgtggaggagaatcccgggcctactagtatggactggatttggcgcatccttttccttgtcggcgctgctaccggcgcgcattccttcgaacaggtgcagctggttgaatctggtggcggagttgtgcagcctggcagaagcctgagactgagctgtgtggcctccggctttaccatcagcagctacggcatgaactgggtccgacaggcccctggcaaaggactggaatgggttgccgtgatctcctacgacggcggcaacaagtacagcgtggacagcgtgaagggcagattcaccatcagccgggacaacagcaagaacaccctgtacctccagatgaacagcctgagagccgaggacagcgccgtgtactattgtgccagaggccggtacttcgacctgtggggaagaggcacactggtcacagtttctagcacgcgtatccagaaccctgatcctgccgtgtaccagctgcgggatagcaagagcagcgacaagagcgtgtgtctgttcaccgacttcgacagccagaccaacgtgtcccagagcaaggactccgacgtgtacatcaccgataagtgcgtgctggacatgcggagcatggacttcaagagcaactccgccgtggcctggtccaacaagtccgatttcgcctgcgccaacgccttcaacaacagcattatccccgaggacacattcttcccaagccccgagagcagctgcgacgtgaagctggtggaaaagagcttcgagacagacaccaacctgaacttccagaacctgagcgtgatcggcttcagaatcctgctgctgaaagtggccggctttaacctgctgatgaccctgcggctgtggtccagccgcgccaagagaagcggatctggcgtgaagcagaccctgaatttcgacctgctgaagctggctggcgacgtggaatccaacccaggcccttctagaggcgggatccacaccatggctacctacgaggtgctgtgcgaggtggcaagaaagctgggcaccgacgacagagaagtggtgctgttcctgctgaacgtgttcatccctcagcctacactggcccagctgatcggtgcactgagagccctgaaagaggaaggccggctgacctttcctctgctggccgaatgcctgttcagagccggaagaagggatctgctgcgggacctgctgcatctggaccccagatttctggaaagacacctggccggcaccatgagctacttcagcccttaccagctgaccgtgctgcacgttgacggcgaactgtgcgccagagatattcggagcctgatcttcctgagcaaggacaccatcggcagccggtctacccctcagacatttctgcactgggtgtactgcatggaaaacctggacctgctcggccccacagatgtggatgccctgatgtccatgctgagaagcctgagcagagtggacctccagagacaggtgcagacactgatgggactgcacctgagcggacctagccacagccagcactacagacacacccct

SEQ ID NO: 21839 - DNA, 1857 bp, synthetic construct
  source 1..1857: mol_type = other DNA
atggccttaccagtgaccgccttgctcctgccgctggccttgctgctccacgccgccaggccggacatccagatgacccagtctccaagcacactgagcgccagcgtgggcgacagagtgaccattacatgtagagccagccagagcatcagcaactggctggcctggtatcagcagaagccaggcagagcccctaacctgctgatctctaaggccagcagcctgaagtctggcgtgcccagcagattttctggctctggcagcggcaccgagttcaccctgacagtctctagcctccagcctgacgacttcgccacctactactgccagcagtattacagctactcctacaccttcggccagggcaccaagctggaaatcaagctcgagatccagaaccctgatcctgccgtgtaccagctgcgggatagcaagagcagcgacaagagcgtgtgtctgttcaccgacttcgacagccagaccaacgtgtcccagagcaaggactccgacgtgtacatcaccgataagtgcgtgctggacatgcggagcatggacttcaagagcaactccgccgtggcctggtccaacaagtccgatttcgcctgcgccaacgccttcaacaacagcattatccccgaggacacattcttcccaagccccgagagcagctgcgacgtgaagctggtggaaaagagcttcgagacagacaccaacctgaacttccagaacctgagcgtgatcggcttcagaatcctgctgctgaaagtggccggctttaacctgctgatgaccctgcggctgtggtccagccgcgccaagagaagcggatctggcgtgaagcagaccctgaatttcgacctgctgaagctggctggcgacgtggaatccaacccaggccctactagtatggactggatttggcgcatccttttccttgtcggcgctgctaccggcgcgcattccttcgaacaggtgcagctggttgaatctggtggcggagttgtgcagcctggcagaagcctgagactgagctgtgtggcctccggctttaccatcagcagctacggcatgaactgggtccgacaggcccctggcaaaggactggaatgggttgccgtgatctcctacgacggcggcaacaagtacagcgtggacagcgtgaagggcagattcaccatcagccgggacaacagcaagaacaccctgtacctccagatgaacagcctgagagccgaggacagcgccgtgtactattgtgccagaggccggtacttcgacctgtggggaagaggcacactggtcacagtttctagcacgcgtgaggacctgaagaacgtgttcccacctgaggtggccgtgttcgagcctagcgaggccgagatcagccacacccagaaagccaccctcgtgtgcctggctaccggcttctaccccgaccatgtggaactgtcttggtgggtcaacggcaaagaggtgcacagcggcgtgtgtaccgacccccagccactgaaagaacagcccgccctgaacgacagccggtactgcctgagcagcagactgagagtgtccgccaccttctggcagaacccccggaaccacttcagatgccaggtgcagttctacggcctgagcgagaacgacgagtggacccaggacagagccaagcccgtgacccagatcgtgtctgccgaagcctggggcagagccgattgcggctttaccagcgagagctaccagcagggcgtgctgagcgccaccatcctgtacgagatcctgctgggcaaggccaccctgtacgccgtgctggtgtctgccctggtgctgatggctatggtcaagcggaaggacagccgggga

SEQ ID NO: 21840 - DNA, 2523 bp, synthetic construct
  source 1..2523: mol_type = other DNA
atggccttaccagtgaccgccttgctcctgccgctggccttgctgctccacgccgccaggccggacatccagatgacccagtctccaagcacactgagcgccagcgtgggcgacagagtgaccattacatgtagagccagccagagcatcagcaactggctggcctggtatcagcagaagccaggcagagcccctaacctgctgatctctaaggccagcagcctgaagtctggcgtgcccagcagattttctggctctggcagcggcaccgagttcaccctgacagtctctagcctccagcctgacgacttcgccacctactactgccagcagtattacagctactcctacaccttcggccagggcaccaagctggaaatcaagctcgagatccagaaccctgatcctgccgtgtaccagctgcgggatagcaagagcagcgacaagagcgtgtgtctgttcaccgacttcgacagccagaccaacgtgtcccagagcaaggactccgacgtgtacatcaccgataagtgcgtgctggacatgcggagcatggacttcaagagcaactccgccgtggcctggtccaacaagtccgatttcgcctgcgccaacgccttcaacaacagcattatccccgaggacacattcttcccaagccccgagagcagctgcgacgtgaagctggtggaaaagagcttcgagacagacaccaacctgaacttccagaacctgagcgtgatcggcttcagaatcctgctgctgaaagtggccggctttaacctgctgatgaccctgcggctgtggtccagccgcgccaagagaagcggatctggcgtgaagcagaccctgaatttcgacctgctgaagctggctggcgacgtggaatccaacccaggccctactagtatggactggatttggcgcatccttttccttgtcggcgctgctaccggcgcgcattccttcgaacaggtgcagctggttgaatctggtggcggagttgtgcagcctggcagaagcctgagactgagctgtgtggcctccggctttaccatcagcagctacggcatgaactgggtccgacaggcccctggcaaaggactggaatgggttgccgtgatctcctacgacggcggcaacaagtacagcgtggacagcgtgaagggcagattcaccatcagccgggacaacagcaagaacaccctgtacctccagatgaacagcctgagagccgaggacagcgccgtgtactattgtgccagaggccggtacttcgacctgtggggaagaggcacactggtcacagtttctagcacgcgtgaggacctgaagaacgtgttcccacctgaggtggccgtgttcgagcctagcgaggccgagatcagccacacccagaaagccaccctcgtgtgcctggctaccggcttctaccccgaccatgtggaactgtcttggtgggtcaacggcaaagaggtgcacagcggcgtgtgtaccgacccccagccactgaaagaacagcccgccctgaacgacagccggtactgcctgagcagcagactgagagtgtccgccaccttctggcagaacccccggaaccacttcagatgccaggtgcagttctacggcctgagcgagaacgacgagtggacccaggacagagccaagcccgtgacccagatcgtgtctgccgaagcctggggcagagccgattgcggctttaccagcgagagctaccagcagggcgtgctgagcgccaccatcctgtacgagatcctgctgggcaaggccaccctgtacgccgtgctggtgtctgccctggtgctgatggctatggtcaagcggaaggacagccggggaagggccaagcgatctggatctggagcaacaaacttctcactactcaaacaagcaggtgacgtggaggagaatcccgggccttctagaggcgggatccacaccatggctacctacgaggtgctgtgcgaggtggcaagaaagctgggcaccgacgacagagaagtggtgctgttcctgctgaacgtgttcatccctcagcctacactggcccagctgatcggtgcactgagagccctgaaagaggaaggccggctgacctttcctctgctggccgaatgcctgttcagagccggaagaagggatctgctgcgggacctgctgcatctggaccccagatttctggaaagacacctggccggcaccatgagctacttcagcccttaccagctgaccgtgctgcacgttgacggcgaactgtgcgccagagatattcggagcctgatcttcctgagcaaggacaccatcggcagccggtctacccctcagacatttctgcactgggtgtactgcatggaaaacctggacctgctcggccccacagatgtggatgccctgatgtccatgctgagaagcctgagcagagtggacctccagagacaggtgcagacactgatgggactgcacctgagcggacctagccacagccagcactacagacacacccct

SEQ ID NO: 21841 - DNA, 2682 bp, synthetic construct
  source 1..2682: mol_type = other DNA
atggccttaccagtgaccgccttgctcctgccgctggccttgctgctccacgccgccaggccgctcgaggggaaaccaattcccaaccctcttctgggactggattcaaccggcagcggcgaggacctgaagaacgtgttcccacctgaggtggccgtgttcgagcctagcaaggccgagatcgcccacacccagaaagccaccctcgtgtgcctggctaccggcttctaccccgaccatgtggaactgtcttggtgggtcaacggcaaagaggtgcacagcggcgtgtgtaccgacccccagccactgaaagaacagcccgccctgaacgacagccggtactgcctgagcagcagactgagagtgtccgccaccttctggcagaacccccggaaccacttcagatgccaggtgcagttctacggcctgagcgagaacgacgagtggacccaggacagagccaagcccgtgacccagatcgtgtctgccgaagcctggggcagagccgattgcggcatcaccagcgccagctaccaccagggcgtgctgagcgccaccatcctgtacgagatcctgctgggcaaggccaccctgtacgccgtgctggtgtctgccctggtgctgatggctatggtcaagcggaaggacagccggggaagggccaagcgatctggatctggagcaacaaacttctcactactcaaacaagcaggtgacgtggaggagaatcccgggcctactagcatggccttaccagtgaccgccttgctcctgccgctggccttgctgctccacgccgccaggccggacatccagatgacccagtctccaagcacactgagcgccagcgtgggcgacagagtgaccattacatgtagagccagccagagcatcagcaactggctggcctggtatcagcagaagccaggcagagcccctaacctgctgatctctaaggccagcagcctgaagtctggcgtgcccagcagattttctggctctggcagcggcaccgagttcaccctgacagtctctagcctccagcctgacgacttcgccacctactactgccagcagtattacagctactcctacaccttcggccagggcaccaagctggaaatcaagggcggaggcggaagtggaggcggaggatctggcggcggaggctctcaggtgcagctggttgaatctggtggcggagttgtgcagcctggcagaagcctgagactgagctgtgtggcctccggctttaccatcagcagctacggcatgaactgggtccgacaggcccctggcaaaggactggaatgggttgccgtgatctcctacgacggcggcaacaagtacagcgtggacagcgtgaagggcagattcaccatcagccgggacaacagcaagaacaccctgtacctccagatgaacagcctgagagccgaggacagcgccgtgtactattgtgccagaggccggtacttcgacctgtggggaagaggcacactggtcacagtttctagcacgcgtgagcagaaactgatctcggaagaggatgggagcggcatccagaaccctgatcctgccgtgtaccagctgcgggatagcaagagcagcgacaagagcgtgtgtctgttcaccgacttcgacagccagaccaacgtgtcccagagcaaggactccgacgtgtacatcaccgataagtgcgtgctggacatgcggagcatggacttcaagagcaactccgccgtggcctggtccaacaagtccgatttcgcctgcgccaacgccttcaacaacagcattatccccgaggacacattcttcccaagcagcgacgtgccctgcgacgtgaagctggtggaaaagagcttcgagacagacaccaacctgaacttccagaacctgagcgtgatcggcttcagaatcctgctgctgaaagtggccggctttaacctgctgatgaccctgcggctgtggtccagccgcgccaagagaagcggatctggcgtgaagcagaccctgaatttcgacctgctgaagctggctggcgacgtggaatccaacccaggcccttctagaggccatatgaccgagtacaagcccacggtgcgcctcgccacccgcgacgacgtccccagggccgtacgcaccctcgccgccgcgttcgccgactaccccgccacgcgccacaccgtcgatccggaccgccacatcgagcgggtcaccgagctgcaagaactcttcctcacgcgcgtcgggctcgacatcggcaaggtgtgggtcgcggacgacggcgccgcggtggcggtctggaccacgccggagagcgtcgaagcgggggcggtgttcgccgagatcggcccgcgcatggccgagttgagcggttcccggctggccgcgcagcaacagatggaaggcctcctggcgccgcaccggcccaaggagcccgcgtggttcctggccaccgtcggcgtctcgcccgaccaccagggcaagggtctgggcagcgccgtcgtgctccccggagtggaggcggccgagcgcgccggggtgcccgccttcctggagacctccgcgccccgcaacctccccttctacgagcggctcggcttcaccgtcaccgccgacgtcgaggtgcccgaaggaccgcgcacctggtgcatgacccgcaagcccggtgcctga

SEQ ID NO: 21842 - DNA, 2685 bp, synthetic construct
  source 1..2685: mol_type = other DNA
atggccttaccagtgaccgccttgctcctgccgctggccttgctgctccacgccgccaggccgctcgagcagaaactgatctcggaagaggatctgggctccggcgatcgccctgatcctgccgtgtaccagctgcgggatagcaagagcagcgacaagagcgtgtgtctgttcaccgacttcgacagccagaccaacgtgtcccagagcaaggactccgacgtgtacatcaccgataagtgcgtgctggacatgcggagcatggacttcaagagcaactccgccgtggcctggtccaacaagtccgatttcgcctgcgccaacgccttcaacaacagcattatccccgaggacacattcttcccaagccccgagagcagctgcgacgtgaagctggtggaaaagagcttcgagacagacaccaacctgaacttccagaacctgagcgtgatcggcttcagaatcctgctgctgaaagtggccggctttaacctgctgatgaccctgcggctgtggtccagctctagtcgcgccaagagaagcggatctggcgtgaagcagaccctgaatttcgacctgctgaagctggctggcgacgtggaatccaacccaggccccactagcatggccttaccagtgaccgccttgctcctgccgctggccttgctgctccacgccgccaggccggacatccagatgacccagtctccaagcacactgagcgccagcgtgggcgacagagtgaccattacatgtagagccagccagagcatcagcaactggctggcctggtatcagcagaagccaggcagagcccctaacctgctgatctctaaggccagcagcctgaagtctggcgtgcccagcagattttctggctctggcagcggcaccgagttcaccctgacagtctctagcctccagcctgacgacttcgccacctactactgccagcagtattacagctactcctacaccttcggccagggcaccaagctggaaatcaagggcggaggcggaagtggaggcggaggatctggcggcggaggctctcaggtgcagctggttgaatctggtggcggagttgtgcagcctggcagaagcctgagactgagctgtgtggcctccggctttaccatcagcagctacggcatgaactgggtccgacaggcccctggcaaaggactggaatgggttgccgtgatctcctacgacggcggcaacaagtacagcgtggacagcgtgaagggcagattcaccatcagccgggacaacagcaagaacaccctgtacctccagatgaacagcctgagagccgaggacagcgccgtgtactattgtgccagaggccggtacttcgacctgtggggaagaggcacactggtcacagtttctagcacgcgtgggaaaccaattcccaaccctcttctgggactggattcaaccggcagcggcgaggacctgaagaacgtgttcccacctgaggtggccgtgttcgagcctagcgaggccgagatcagccacacccagaaagccaccctcgtgtgcctggctaccggcttctaccccgaccatgtggaactgtcttggtgggtcaacggcaaagaggtgcacagcggcgtgtgtaccgacccccagccactgaaagaacagcccgccctgaacgacagccggtactgcctgagcagcagactgagagtgtccgccaccttctggcagaacccccggaaccacttcagatgccaggtgcagttctacggcctgagcgagaacgacgagtggacccaggacagagccaagcccgtgacccagatcgtgtctgccgaagcctggggcagagccgattgcggctttaccagcgagagctaccagcagggcgtgctgagcgccaccatcctgtacgagatcctgctgggcaaggccaccctgtacgccgtgctggtgtctgccctggtgctgatggctatggtcaagcggaaggacagccggggaagggccaagcgatctggatctggagcaacaaacttctcactactcaaacaagcaggtgacgtggaggagaatcccgggccttctagaggccatatgaccgagtacaagcccacggtgcgcctcgccacccgcgacgacgtccccagggccgtacgcaccctcgccgccgcgttcgccgactaccccgccacgcgccacaccgtcgatccggaccgccacatcgagcgggtcaccgagctgcaagaactcttcctcacgcgcgtcgggctcgacatcggcaaggtgtgggtcgcggacgacggcgccgcggtggcggtctggaccacgccggagagcgtcgaagcgggggcggtgttcgccgagatcggcccgcgcatggccgagttgagcggttcccggctggccgcgcagcaacagatggaaggcctcctggcgccgcaccggcccaaggagcccgcgtggttcctggccaccgtcggcgtctcgcccgaccaccagggcaagggtctgggcagcgccgtcgtgctccccggagtggaggcggccgagcgcgccggggtgcccgccttcctggagacctccgcgccccgcaacctccccttctacgagcggctcggcttcaccgtcaccgccgacgtcgaggtgcccgaaggaccgcgcacctggtgcatgacccgcaagcccggtgcctga

SEQ ID NO: 21843 - DNA, 2547 bp, synthetic construct
  source 1..2547: mol_type = other DNA
atggccttaccagtgaccgccttgctcctgccgctggccttgctgctccacgccgccaggccggacatccagatgacccagtctccaagcacactgagcgccagcgtgggcgacagagtgaccattacatgtagagccagccagagcatcagcaactggctggcctggtatcagcagaagccaggcagagcccctaacctgctgatctctaaggccagcagcctgaagtctggcgtgcccagcagattttctggctctggcagcggcaccgagttcaccctgacagtctctagcctccagcctgacgacttcgccacctactactgccagcagtattacagctactcctacaccttcggccagggcaccaagctggaaatcaagctcgaggacctgaagaacgtgttcccacctgaggtggccgtgttcgagcctagcgaggccgagatcagccacacccagaaagccaccctcgtgtgcctggctaccggcttctaccccgaccatgtggaactgtcttggtgggtcaacggcaaagaggtgcacagcggcgtgtctaccgacccccagccactgaaagaacagcccgccctgaacgacagccggtactgcctgagcagcagactgagagtgtccgccaccttctggcagaacccccggaaccacttcagatgccaggtgcagttctacggcctgagcgagaacgacgagtggacccaggacagagccaagcccgtgacccagatcgtgtctgccgaagcctggggcagagccgattgcggctttaccagcgagagctaccagcagggcgtgctgagcgccaccatcctgtacgagatcctgctgggcaaggccaccctgtacgccgtgctggtgtctgccctggtgctgatggctatggtcaagcggaaggacagccggggaagggccaagcgatctggatctggagcaacaaacttctcactactcaaacaagcaggtgacgtggaggagaatcccgggcctactagtatggactggatttggcgcatccttttccttgtcggcgctgctaccggcgcgcattccttcgaacaggtgcagctggttgaatctggtggcggagttgtgcagcctggcagaagcctgagactgagctgtgtggcctccggctttaccatcagcagctacggcatgaactgggtccgacaggcccctggcaaaggactggaatgggttgccgtgatctcctacgacggcggcaacaagtacagcgtggacagcgtgaagggcagattcaccatcagccgggacaacagcaagaacaccctgtacctccagatgaacagcctgagagccgaggacagcgccgtgtactattgtgccagaggccggtacttcgacctgtggggaagaggcacactggtcacagtttctagcacgcgtatccagaaccctgatcctgccgtgtaccagctgcgggatagcaagagcagcgacaagagcgtgtgtctgttcaccgacttcgacagccagaccaacgtgtcccagagcaaggactccgacgtgtacatcaccgataagaccgtgctggacatgcggagcatggacttcaagagcaactccgccgtggcctggtccaacaagtccgatttcgcctgcgccaacgccttcaacaacagcattatccccgaggacacattcttcccaagccccgagagcagctgcgacgtgaagctggtggaaaagagcttcgagacagacaccaacctgaacttccagaacctgagcgtgatcggcttcagaatcctgctgctgaaagtggccggctttaacctgctgatgaccctgcggctgtggtccagccgcgccaagagaagcggatctggcgtgaagcagaccctgaatttcgacctgctgaagctggctggcgacgtggaatccaacccaggcccttctagaggccatatgaccgagtacaagcccacggtgcgcctcgccacccgcgacgacgtccccagggccgtacgcaccctcgccgccgcgttcgccgactaccccgccacgcgccacaccgtcgatccggaccgccacatcgagcgggtcaccgagctgcaagaactcttcctcacgcgcgtcgggctcgacatcggcaaggtgtgggtcgcggacgacggcgccgcggtggcggtctggaccacgccggagagcgtcgaagcgggggcggtgttcgccgagatcggcccgcgcatggccgagttgagcggttcccggctggccgcgcagcaacagatggaaggcctcctggcgccgcaccggcccaaggagcccgcgtggttcctggccaccgtcggcgtctcgcccgaccaccagggcaagggtctgggcagcgccgtcgtgctccccggagtggaggcggccgagcgcgccggggtgcccgccttcctggagacctccgcgccccgcaacctccccttctacgagcggctcggcttcaccgtcaccgccgacgtcgaggtgcccgaaggaccgcgcacctggtgcatgacccgcaagcccggtgcctga

SEQ ID NO: 21844 - DNA, 2793 bp, synthetic construct
  source 1..2793: mol_type = other DNA
atggccttaccagtgaccgccttgctcctgccgctggccttgctgctccacgccgccaggccggacatccagatgacccagtctccaagcacactgagcgccagcgtgggcgacagagtgaccattacatgtagagccagccagagcatcagcaactggctggcctggtatcagcagaagccaggcagagcccctaacctgctgatctctaaggccagcagcctgaagtctggcgtgcccagcagattttctggctctggcagcggcaccgagttcaccctgacagtctctagcctccagcctgacgacttcgccacctactactgccagcagtattacagctactcctacaccttcggccagggcaccaagctggaaatcaagctcgaggacctgaagaacgtgttcccacctgaggtggccgtgttcgagcctagcgaggccgagatcagccacacccagaaagccaccctcgtgtgcctggctaccggcttctaccccgaccatgtggaactgtcttggtgggtcaacggcaaagaggtgcacagcggcgtgtctaccgacccccagccactgaaagaacagcccgccctgaacgacagccggtactgcctgagcagcagactgagagtgtccgccaccttctggcagaacccccggaaccacttcagatgccaggtgcagttctacggcctgagcgagaacgacgagtggacccaggacagagccaagcccgtgacccagatcgtgtctgccgaagcctggggcagagccgattgcggctttaccagcgagagctaccagcagggcgtgctgagcgccaccatcctgtacgagatcctgctgggcaaggccaccctgtacgccgtgctggtgtctgccctggtgctgatggctatggtcaagcggaaggacagccggggaagggccaagcgatctggatctggagcaacaaacttctcactactcaaacaagcaggtgacgtggaggagaatcccgggcctactagtatggactggatttggcgcatccttttccttgtcggcgctgctaccggcgcgcattccttcgaacaggtgcagctggttgaatctggtggcggagttgtgcagcctggcagaagcctgagactgagctgtgtggcctccggctttaccatcagcagctacggcatgaactgggtccgacaggcccctggcaaaggactggaatgggttgccgtgatctcctacgacggcggcaacaagtacagcgtggacagcgtgaagggcagattcaccatcagccgggacaacagcaagaacaccctgtacctccagatgaacagcctgagagccgaggacagcgccgtgtactattgtgccagaggccggtacttcgacctgtggggaagaggcacactggtcacagtttctagcacgcgtgagcagaaactgatctcggaagaggatgggagcggcaccccattcccttctctggcccctcccatcatgctgctggtggacggcaagcagcagatggtggtcgtgtgcctggtgctggatgtggccccacctggactggacagccccatctggtttagcgccggcaatggctctgccctggacgcctttacctacggcccaagccctgccaccgatggcacctggacaaatctggcccacctgagcctgcccagcgaggaactggcttcttgggagcctctcgtgtgccacacaggacctggcgctgagggacacagcagatccacccagcctatgcacctgtctggcgaggccagcaccgccagaacctgtcctcaggaacctctgagaggcacccctggcggagcactgtggctgggagtgctgagactgctgctgttcaagctgctgctgtttgacctgctgctgacctgctcctgtctgtgcgatcctgccggccctctgccttctcctgccaccaccacaagactgagagccctgggcagccacagactgcaccctgccacagagacaggcggcagagaggccacaagcagccctagaccccagcccagagacagaagatggggcgataccccccctggcagaaagcctggatctccagtccgcgccaagagaagcggatctggcgtgaagcagaccctgaatttcgacctgctgaagctggctggcgacgtggaatccaacccaggcccttctagaggccatatgaccgagtacaagcccacggtgcgcctcgccacccgcgacgacgtccccagggccgtacgcaccctcgccgccgcgttcgccgactaccccgccacgcgccacaccgtcgatccggaccgccacatcgagcgggtcaccgagctgcaagaactcttcctcacgcgcgtcgggctcgacatcggcaaggtgtgggtcgcggacgacggcgccgcggtggcggtctggaccacgccggagagcgtcgaagcgggggcggtgttcgccgagatcggcccgcgcatggccgagttgagcggttcccggctggccgcgcagcaacagatggaaggcctcctggcgccgcaccggcccaaggagcccgcgtggttcctggccaccgtcggcgtctcgcccgaccaccagggcaagggtctgggcagcgccgtcgtgctccccggagtggaggcggccgagcgcgccggggtgcccgccttcctggagacctccgcgccccgcaacctccccttctacgagcggctcggcttcaccgtcaccgccgacgtcgaggtgcccgaaggaccgcgcacctggtgcatgacccgcaagcccggtgcctga

SEQ ID NO: 21845 - DNA, 2847 bp, synthetic construct
  source 1..2847: mol_type = other DNA
atggccttaccagtgaccgccttgctcctgccgctggccttgctgctccacgccgccaggccgctcgaggacctgaagaacgtgttcccacctgaggtggccgtgttcgagcctagcgaggccgagatcagccacacccagaaagccaccctcgtgtgcctggctaccggcttctaccccgaccatgtggaactgtcttggtgggtcaacggcaaagaggtgcacagcggcgtgtctaccgacccccagccactgaaagaacagcccgccctgaacgacagccggtactgcctgagcagcagactgagagtgtccgccaccttctggcagaacccccggaaccacttcagatgccaggtgcagttctacggcctgagcgagaacgacgagtggacccaggacagagccaagcccgtgacccagatcgtgtctgccgaagcctggggcagagccgattgcggctttaccagcgagagctaccagcagggcgtgctgagcgccaccatcctgtacgagatcctgctgggcaaggccaccctgtacgccgtgctggtgtctgccctggtgctgatggctatggtcaagcggaaggacagccggggaagggccaagcgatctggatctggagcaacaaacttctcactactcaaacaagcaggtgacgtggaggagaatcccgggcctactagcatggccttaccagtgaccgccttgctcctgccgctggccttgctgctccacgccgccaggccggacatccagatgacccagtctccaagcacactgagcgccagcgtgggcgacagagtgaccattacatgtagagccagccagagcatcagcaactggctggcctggtatcagcagaagccaggcagagcccctaacctgctgatctctaaggccagcagcctgaagtctggcgtgcccagcagattttctggctctggcagcggcaccgagttcaccctgacagtctctagcctccagcctgacgacttcgccacctactactgccagcagtattacagctactcctacaccttcggccagggcaccaagctggaaatcaagggcggaggcggaagtggaggcggaggatctggcggcggaggctctcaggtgcagctggttgaatctggtggcggagttgtgcagcctggcagaagcctgagactgagctgtgtggcctccggctttaccatcagcagctacggcatgaactgggtccgacaggcccctggcaaaggactggaatgggttgccgtgatctcctacgacggcggcaacaagtacagcgtggacagcgtgaagggcagattcaccatcagccgggacaacagcaagaacaccctgtacctccagatgaacagcctgagagccgaggacagcgccgtgtactattgtgccagaggccggtacttcgacctgtggggaagaggcacactggtcacagtttctagcacgcgtgagcagaaactgatctcggaagaggatctggggagcggcaccccattcccttctctggcccctcccatcatgctgctggtggacggcaagcagcagatggtggtcgtgtgcctggtgctggatgtggccccacctggactggacagccccatctggtttagcgccggcaatggctctgccctggacgcctttacctacggcccaagccctgccaccgatggcacctggacaaatctggcccacctgagcctgcccagcgaggaactggcttcttgggagcctctcgtgtgccacacaggacctggcgctgagggacacagcagatccacccagcctatgcacctgtctggcgaggccagcaccgccagaacctgtcctcaggaacctctgagaggcacccctggcggagcactgtggctgggagtgctgagactgctgctgttcaagctgctgctgtttgacctgctgctgacctgctcctgtctgtgcgatcctgccggccctctgccttctcctgccaccaccacaagactgagagccctgggcagccacagactgcaccctgccacagagacaggcggcagagaggccacaagcagccctagaccccagcccagagacagaagatggggcgataccccccctggcagaaagcctggatctccagtccgcgccaagagaagcggatctggcgtgaagcagaccctgaatttcgacctgctgaagctggctggcgacgtggaatccaacccaggcccttctagatctagaggccatatgaccgagtacaagcccacggtgcgcctcgccacccgcgacgacgtccccagggccgtacgcaccctcgccgccgcgttcgccgactaccccgccacgcgccacaccgtcgatccggaccgccacatcgagcgggtcaccgagctgcaagaactcttcctcacgcgcgtcgggctcgacatcggcaaggtgtgggtcgcggacgacggcgccgcggtggcggtctggaccacgccggagagcgtcgaagcgggggcggtgttcgccgagatcggcccgcgcatggccgagttgagcggttcccggctggccgcgcagcaacagatggaaggcctcctggcgccgcaccggcccaaggagcccgcgtggttcctggccaccgtcggcgtctcgcccgaccaccagggcaagggtctgggcagcgccgtcgtgctccccggagtggaggcggccgagcgcgccggggtgcccgccttcctggagacctccgcgccccgcaacctccccttctacgagcggctcggcttcaccgtcaccgccgacgtcgaggtgcccgaaggaccgcgcacctggtgcatgacccgcaagcccggtgcctga

SEQ ID NO: 21846 - DNA, 2658 bp, synthetic construct
  source 1..2658: mol_type = other DNA
atggccttaccagtgaccgccttgctcctgccgctggccttgctgctccacgccgccaggccggacatccagatgacccagtctccaagcacactgagcgccagcgtgggcgacagagtgaccattacatgtagagccagccagagcatcagcaactggctggcctggtatcagcagaagccaggcagagcccctaacctgctgatctctaaggccagcagcctgaagtctggcgtgcccagcagattttctggctctggcagcggcaccgagttcaccctgacagtctctagcctccagcctgacgacttcgccacctactactgccagcagtattacagctactcctacaccttcggccagggcaccaagctggaaatcaagctcgaggggaaaccaattcccaaccctcttctgggactggattcaaccggcagcggcgacaagcagctggacgccgacgtgtcccccaagcctaccatcttcctgccctctatcgccgagacaaagctccagaaggccggcacctacctgtgcctgctggaaaagttcttcccagatgtgattaagatccactggcaggaaaagaagtccaacaccatcctgggcagccaggaaggcaacaccatgaagaccaacgacacctacatgaagttcagctggctgaccgtgcccgagaagtccctggacaaagaacacagatgcatcgtgcggcacgaaaacaacaagaacggcgtggaccaggaaatcatcttcccacccatcaagaccgatgtgattacaatggaccccaaggacaactgctccaaggacgccaacgataccctgctgctccagctgaccaacaccagcgcctactacatgtacttgttgctgctgctgaagtccgtggtgtacttcgccatcatcacatgctgcctgctgcggagaaccgccttctgctgcaacggcgagaagtctagggccaagcgatctggatctggagcaacaaacttctcactactcaaacaagcaggtgacgtggaggagaatcccgggcctactagtatggactggatttggcgcatccttttccttgtcggcgctgctaccggcgcgcattccttcgaacaggtgcagctggttgaatctggtggcggagttgtgcagcctggcagaagcctgagactgagctgtgtggcctccggctttaccatcagcagctacggcatgaactgggtccgacaggcccctggcaaaggactggaatgggttgccgtgatctcctacgacggcggcaacaagtacagcgtggacagcgtgaagggcagattcaccatcagccgggacaacagcaagaacaccctgtacctccagatgaacagcctgagagccgaggacagcgccgtgtactattgtgccagaggccggtacttcgacctgtggggaagaggcacactggtcacagtttctagcacgcgtgagcagaaactgatctcggaagaggatgggagcggcagccagcctcacaccaagcccagcgtgttcgtgatgaagaacggcaccaacgtggcctgcctcgtgaaagagttctaccccaaggacatcaggatcaacctggtgtccagcaagaagatcaccgagttcgaccccgccatcgtgatctcccccagcggcaagtacaacgccgtgaagctggggaagtacgaggacagcaacagcgtgacctgctccgtgcagcacgacaacaagaccgtgcacagcaccgactttgaagtgaaaaccgactccaccgaccacgtgaagcccaaagagacagagaacaccaagcagcccagcaagagctgccacaagcccaaggccatcgtgcacaccgagaaagtgaacatgatgagcctgaccgtgctgggcctgcggatgctgttcgccaaaaccgtggccgtgaacttcctgctgaccgccaagctgttcttcctccgcgccaagagaagcggatctggcgtgaagcagaccctgaatttcgacctgctgaagctggctggcgacgtggaatccaacccaggcccttctagaggccatatgaccgagtacaagcccacggtgcgcctcgccacccgcgacgacgtccccagggccgtacgcaccctcgccgccgcgttcgccgactaccccgccacgcgccacaccgtcgatccggaccgccacatcgagcgggtcaccgagctgcaagaactcttcctcacgcgcgtcgggctcgacatcggcaaggtgtgggtcgcggacgacggcgccgcggtggcggtctggaccacgccggagagcgtcgaagcgggggcggtgttcgccgagatcggcccgcgcatggccgagttgagcggttcccggctggccgcgcagcaacagatggaaggcctcctggcgccgcaccggcccaaggagcccgcgtggttcctggccaccgtcggcgtctcgcccgaccaccagggcaagggtctgggcagcgccgtcgtgctccccggagtggaggcggccgagcgcgccggggtgcccgccttcctggagacctccgcgccccgcaacctccccttctacgagcggctcggcttcaccgtcaccgccgacgtcgaggtgcccgaaggaccgcgcacctggtgcatgacccgcaagcccggtgcctga

SEQ ID NO: 21847 - DNA, 1869 bp, synthetic construct
  source 1..1869: mol_type = other DNA
atggccttaccagtgaccgccttgctcctgccgctggccttgctgctccacgccgccaggccggacatccagatgacccagtctccaagcacactgagcgccagcgtgggcgacagagtgaccattacatgtagagccagccagagcatcagcaactggctggcctggtatcagcagaagccaggcagagcccctaacctgctgatctctaaggccagcagcctgaagtctggcgtgcccagcagattttctggctctggcagcggcaccgagttcaccctgacagtctctagcctccagcctgacgacttcgccacctactactgccagcagtattacagctactcctacaccttcggccagggcaccaagctggaaatcaagctcgagagccagcctcacaccaagcccagcgtgttcgtgatgaagaacggcaccaacgtggcctgcctcgtgaaagagttctaccccaaggacatcaggatcaacctggtgtccagcaagaagatcaccgagttcgaccccgccatcgtgatctcccccagcggcaagtacaacgccgtgaagctggggaagtacgaggacagcaacagcgtgacctgctccgtgcagcacgacaacaagaccgtgcacagcaccgactttgaagtgaaaaccgactccaccgaccacgtgaagcccaaagagacagagaacaccaagcagcccagcaagagctgccacaagcccaaggccatcgtgcacaccgagaaagtgaacatgatgagcctgaccgtgctgggcctgcggatgctgttcgccaaaaccgtggccgtgaacttcctgctgaccgccaagctgttcttcctcagggccaagcgatctggatctggagcaacaaacttctcactactcaaacaagcaggtgacgtggaggagaatcccgggcctactagtatggactggatttggcgcatccttttccttgtcggcgctgctaccggcgcgcattccttcgaacaggtgcagctggttgaatctggtggcggagttgtgcagcctggcagaagcctgagactgagctgtgtggcctccggctttaccatcagcagctacggcatgaactgggtccgacaggcccctggcaaaggactggaatgggttgccgtgatctcctacgacggcggcaacaagtacagcgtggacagcgtgaagggcagattcaccatcagccgggacaacagcaagaacaccctgtacctccagatgaacagcctgagagccgaggacagcgccgtgtactattgtgccagaggccggtacttcgacctgtggggaagaggcacactggtcacagtttctagcacgcgtgacaagcagctggacgccgacgtgtcccccaagcctaccatcttcctgccctctatcgccgagacaaagctccagaaggccggcacctacctgtgcctgctggaaaagttcttcccagatgtgattaagatccactggcaggaaaagaagtccaacaccatcctgggcagccaggaaggcaacaccatgaagaccaacgacacctacatgaagttcagctggctgaccgtgcccgagaagtccctggacaaagaacacagatgcatcgtgcggcacgaaaacaacaagaacggcgtggaccaggaaatcatcttcccacccatcaagaccgatgtgattacaatggaccccaaggacaactgctccaaggacgccaacgataccctgctgctccagctgaccaacaccagcgcctactacatgtacttgttgctgctgctgaagtccgtggtgtacttcgccatcatcacatgctgcctgctgcggagaaccgccttctgctgcaacggcgagaagtct

SEQ ID NO: 21848 - DNA, 2703 bp, synthetic construct
  source 1..2703: mol_type = other DNA
atggccttaccagtgaccgccttgctcctgccgctggccttgctgctccacgccgccaggccgctcgaggggaaaccaattcccaaccctcttctgggactggattcaaccggcagcggcgacaagcagctggacgccgacgtgtcccccaagcctaccatcttcctgccctctatcgccgagacaaagctccagaaggccggcacctacctgtgcctgctggaaaagttcttcccagatgtgattaagatccactggcaggaaaagaagtccaacaccatcctgggcagccaggaaggcaacaccatgaagaccaacgacacctacatgaagttcagctggctgaccgtgcccgagaagtccctggacaaagaacacagatgcatcgtgcggcacgaaaacaacaagaacggcgtggaccaggaaatcatcttcccacccatcaagaccgatgtgattacaatggaccccaaggacaactgctccaaggacgccaacgataccctgctgctccagctgaccaacaccagcgcctactacatgtacttgttgctgctgctgaagtccgtggtgtacttcgccatcatcacatgctgcctgctgcggagaaccgccttctgctgcaacggcgagaagtctagggccaagcgatctggatctggagcaacaaacttctcactactcaaacaagcaggtgacgtggaggagaatcccgggcctactagcatggccttaccagtgaccgccttgctcctgccgctggccttgctgctccacgccgccaggccggacatccagatgacccagtctccaagcacactgagcgccagcgtgggcgacagagtgaccattacatgtagagccagccagagcatcagcaactggctggcctggtatcagcagaagccaggcagagcccctaacctgctgatctctaaggccagcagcctgaagtctggcgtgcccagcagattttctggctctggcagcggcaccgagttcaccctgacagtctctagcctccagcctgacgacttcgccacctactactgccagcagtattacagctactcctacaccttcggccagggcaccaagctggaaatcaagggcggaggcggaagtggaggcggaggatctggcggcggaggctctcaggtgcagctggttgaatctggtggcggagttgtgcagcctggcagaagcctgagactgagctgtgtggcctccggctttaccatcagcagctacggcatgaactgggtccgacaggcccctggcaaaggactggaatgggttgccgtgatctcctacgacggcggcaacaagtacagcgtggacagcgtgaagggcagattcaccatcagccgggacaacagcaagaacaccctgtacctccagatgaacagcctgagagccgaggacagcgccgtgtactattgtgccagaggccggtacttcgacctgtggggaagaggcacactggtcacagtttctagcacgcgtgagcagaaactgatctcggaagaggatgggagcggcagccagcctcacaccaagcccagcgtgttcgtgatgaagaacggcaccaacgtggcctgcctcgtgaaagagttctaccccaaggacatcaggatcaacctggtgtccagcaagaagatcaccgagttcgaccccgccatcgtgatctcccccagcggcaagtacaacgccgtgaagctggggaagtacgaggacagcaacagcgtgacctgctccgtgcagcacgacaacaagaccgtgcacagcaccgactttgaagtgaaaaccgactccaccgaccacgtgaagcccaaagagacagagaacaccaagcagcccagcaagagctgccacaagcccaaggccatcgtgcacaccgagaaagtgaacatgatgagcctgaccgtgctgggcctgcggatgctgttcgccaaaaccgtggccgtgaacttcctgctgaccgccaagctgttcttcctccgcgccaagagaagcggatctggcgtgaagcagaccctgaatttcgacctgctgaagctggctggcgacgtggaatccaacccaggcccttctagaggccatatgaccgagtacaagcccacggtgcgcctcgccacccgcgacgacgtccccagggccgtacgcaccctcgccgccgcgttcgccgactaccccgccacgcgccacaccgtcgatccggaccgccacatcgagcgggtcaccgagctgcaagaactcttcctcacgcgcgtcgggctcgacatcggcaaggtgtgggtcgcggacgacggcgccgcggtggcggtctggaccacgccggagagcgtcgaagcgggggcggtgttcgccgagatcggcccgcgcatggccgagttgagcggttcccggctggccgcgcagcaacagatggaaggcctcctggcgccgcaccggcccaaggagcccgcgtggttcctggccaccgtcggcgtctcgcccgaccaccagggcaagggtctgggcagcgccgtcgtgctccccggagtggaggcggccgagcgcgccggggtgcccgccttcctggagacctccgcgccccgcaacctccccttctacgagcggctcggcttcaccgtcaccgccgacgtcgaggtgcccgaaggaccgcgcacctggtgcatgacccgcaagcccggtgcctga

SEQ ID NO: 21849 - DNA, 3078 bp, synthetic construct
  source 1..3078: mol_type = other DNA
atggccttaccagtgaccgccttgctcctgccgctggccttgctgctccacgccgccaggccggacatccagatgacccagtctccaagcacactgagcgccagcgtgggcgacagagtgaccattacatgtagagccagccagagcatcagcaactggctggcctggtatcagcagaagccaggcagagcccctaacctgctgatctctaaggccagcagcctgaagtctggcgtgcccagcagattttctggctctggcagcggcaccgagttcaccctgacagtctctagcctccagcctgacgacttcgccacctactactgccagcagtattacagctactcctacaccttcggccagggcaccaagctggaaatcaagggacagcctaaggccaatcctaccgtgacactgttccctccaagcagcgaagaactccaggccaacaaggccacacttgtgtgcctgatctccgacttctaccctggggctgtgacagtggcttggaaggccgatggatctcctgtgaaagccggcgtggaaaccaccaagccatccaagcagagcaacaacaaatacgccgccagctcctacctgagcctgacacctgagcagtggaagtcccacagatcctacagctgccaagtgacccacgaaggcagcaccgtggaaaagacagtggcccctacagagtgcagcggatcccagagcttcggcctgctggaccccaagctgtgctacctgctggatggcatcctgttcatctacggcgtgatcctgaccgccctgttcctgagagtgaagttcagcagaagcgccgacgcccctgcctaccagcagggacagaaccaactgtacaacgagctgaacctgggcagacgggaagagtacgacgtgctggacaagcggagaggcagggaccctgagatgggcggaaagccccagcggagaaagaacccccaggaaggactgtataacgaactccagaaagacaagatggccgaagcctacagcgagatcggcatgaagggcgagcggagaagaggcaagggccacgatggcctgtaccagggcctgagcaccgccaccaaggacacctatgacgccctgcacatgcaggccctgcctccaagaagggccaagcgatctggatctggagcaacaaacttctcactactcaaacaagcaggtgacgtggaggagaatcccgggcctactagtatggactggatttggcgcatccttttccttgtcggcgctgctaccggcgcgcattccttcgaacaggtgcagctggttgaatctggtggcggagttgtgcagcctggcagaagcctgagactgagctgtgtggcctccggctttaccatcagcagctacggcatgaactgggtccgacaggcccctggcaaaggactggaatgggttgccgtgatctcctacgacggcggcaacaagtacagcgtggacagcgtgaagggcagattcaccatcagccgggacaacagcaagaacaccctgtacctccagatgaacagcctgagagccgaggacagcgccgtgtactattgtgccagaggccggtacttcgacctgtggggaagaggcacactggtcacagtttctagcgcctctacaaagggaccctccgtgtttcctctggctcccagcagcaagtctacaagcggaggaacagccgctctgggctgcctggtcaaggattactttcccgagcctgtgaccgtgtcctggaatagcggagcactgacaagcggcgtgcacacctttccagccgtgctgcaaagcagcggcctgtactctctgagcagcgtggtcacagtgcctagctctagcctgggcacccagacctacatctgcaatgtgaaccacaagcctagcaacaccaaggtggacaagagagtggaacccaagagctgtggtacccagagttttgggttgttggaccctaaattgtgctatctgttggacggaatcctgttcatttacggagtgatcctgaccgcattgttcctgcgggttaagttttccagatccgcagacgcacccgcttaccaacaagggcagaaccaactctacaatgaacttaatttggggcggagggaagagtacgacgttctggacaaaaggaggggacgagatcccgagatgggcggaaagcctcagcgaaggaagaatccgcaagaggggctttataacgaactccagaaagataaaatggcagaagcctatagtgagattgggatgaagggagaaaggaggaggggtaaaggtcacgatgggttgtaccaaggattgagcacagccactaaagatacctatgatgcgctccacatgcaggccctgccgccaagacgcgccaagagaagcggatctggcgtgaagcagaccctgaatttcgacctgctgaagctggctggcgacgtggaatccaacccaggcccttctagaggccatatgaccgagtacaagcccacggtgcgcctcgccacccgcgacgacgtccccagggccgtacgcaccctcgccgccgcgttcgccgactaccccgccacgcgccacaccgtcgatccggaccgccacatcgagcgggtcaccgagctgcaagaactcttcctcacgcgcgtcgggctcgacatcggcaaggtgtgggtcgcggacgacggcgccgcggtggcggtctggaccacgccggagagcgtcgaagcgggggcggtgttcgccgagatcggcccgcgcatggccgagttgagcggttcccggctggccgcgcagcaacagatggaaggcctcctggcgccgcaccggcccaaggagcccgcgtggttcctggccaccgtcggcgtctcgcccgaccaccagggcaagggtctgggcagcgccgtcgtgctccccggagtggaggcggccgagcgcgccggggtgcccgccttcctggagacctccgcgccccgcaacctccccttctacgagcggctcggcttcaccgtcaccgccgacgtcgaggtgcccgaaggaccgcgcacctggtgcatgacccgcaagcccggtgcctga

SEQ ID NO: 21850 - DNA, 2433 bp, synthetic construct
  source 1..2433: mol_type = other DNA
atggccttaccagtgaccgccttgctcctgccgctggccttgctgctccacgccgccaggccggacatccagatgacccagtctccaagcacactgagcgccagcgtgggcgacagagtgaccattacatgtagagccagccagagcatcagcaactggctggcctggtatcagcagaagccaggcagagcccctaacctgctgatctctaaggccagcagcctgaagtctggcgtgcccagcagattttctggctctggcagcggcaccgagttcaccctgacagtctctagcctccagcctgacgacttcgccacctactactgccagcagtattacagctactcctacaccttcggccagggcaccaagctggaaatcaagctcgaggacctgaagaacgtgttcccacctgaggtggccgtgttcgagcctagcgaggccgagatcagccacacccagaaagccaccctcgtgtgcctggctaccggcttctaccccgaccatgtggaactgtcttggtgggtcaacggcaaagaggtgcacagcggcgtgtctaccgacccccagccactgaaagaacagcccgccctgaacgacagccggtactgcctgagcagcagactgagagtgtccgccaccttctggcagaacccccggaaccacttcagatgccaggtgcagttctacggcctgagcgagaacgacgagtggacccaggacagagccaagcccgtgacccagatcgtgtctgccgaagcctggggcagagccgattgcggatcccagagcttcggcctgctggaccccaagctgtgctacctgctggatggcatcctgttcatctacggcgtgatcctgaccgccctgttcctgagagtgaagttcagcagaagcgccgacgcccctgcctaccagcagggacagaaccaactgtacaacgagctgaacctgggcagacgggaagagtacgacgtgctggacaagcggagaggcagggaccctgagatgggcggaaagccccagcggagaaagaacccccaggaaggactgtataacgaactccagaaagacaagatggccgaagcctacagcgagatcggcatgaagggcgagcggagaagaggcaagggccacgatggcctgtaccagggcctgagcaccgccaccaaggacacctatgacgccctgcacatgcaggccctgcctccaagaagggccaagcgatctggatctggagcaacaaacttctcactactcaaacaagcaggtgacgtggaggagaatcccgggcctactagtatggactggatttggcgcatccttttccttgtcggcgctgctaccggcgcgcattccttcgaacaggtgcagctggttgaatctggtggcggagttgtgcagcctggcagaagcctgagactgagctgtgtggcctccggctttaccatcagcagctacggcatgaactgggtccgacaggcccctggcaaaggactggaatgggttgccgtgatctcctacgacggcggcaacaagtacagcgtggacagcgtgaagggcagattcaccatcagccgggacaacagcaagaacaccctgtacctccagatgaacagcctgagagccgaggacagcgccgtgtactattgtgccagaggccggtacttcgacctgtggggaagaggcacactggtcacagtttctagcacgcgtatccagaaccctgatcctgccgtgtaccagctgcgggatagcaagagcagcgacaagagcgtgtgtctgttcaccgacttcgacagccagaccaacgtgtcccagagcaaggactccgacgtgtacatcaccgataagaccgtgctggacatgcggagcatggacttcaagagcaactccgccgtggcctggtccaacaagtccgatttcgcctgcgccaacgccttcaacaacagcattatccccgaggacacattcttcccaagccccgagagcagctgcggtacccagagttttgggttgttggaccctaaattgtgctatctgttggacggaatcctgttcatttacggagtgatcctgaccgcattgttcctgcgggttaagttttccagatccgcagacgcacccgcttaccaacaagggcagaaccaactctacaatgaacttaatttggggcggagggaagagtacgacgttctggacaaaaggaggggacgagatcccgagatgggcggaaagcctcagcgaaggaagaatccgcaagaggggctttataacgaactccagaaagataaaatggcagaagcctatagtgagattgggatgaagggagaaaggaggaggggtaaaggtcacgatgggttgtaccaaggattgagcacagccactaaagatacctatgatgcgctccacatgcaggccctgccgccaaga

SEQ ID NO: 21851 - DNA, 2433 bp, synthetic construct
  source 1..2433: mol_type = other DNA
atggccttaccagtgaccgccttgctcctgccgctggccttgctgctccacgccgccaggccggacatccagatgacccagtctccaagcacactgagcgccagcgtgggcgacagagtgaccattacatgtagagccagccagagcatcagcaactggctggcctggtatcagcagaagccaggcagagcccctaacctgctgatctctaaggccagcagcctgaagtctggcgtgcccagcagattttctggctctggcagcggcaccgagttcaccctgacagtctctagcctccagcctgacgacttcgccacctactactgccagcagtattacagctactcctacaccttcggccagggcaccaagctggaaatcaagctcgaggacctgaagaacgtgttcccacctgaggtggccgtgttcgagcctagcaaggccgagatcgcccacacccagaaagccaccctcgtgtgcctggctaccggcttctaccccgaccatgtggaactgtcttggtgggtcaacggcaaagaggtgcacagcggcgtgtgtaccgacccccagccactgaaagaacagcccgccctgaacgacagccggtactgcctgagcagcagactgagagtgtccgccaccttctggcagaacccccggaaccacttcagatgccaggtgcagttctacggcctgagcgagaacgacgagtggacccaggacagagccaagcccgtgacccagatcgtgtctgccgaagcctggggcagagccgattgcggatcccagagcttcggcctgctggaccccaagctgtgctacctgctggatggcatcctgttcatctacggcgtgatcctgaccgccctgttcctgagagtgaagttcagcagaagcgccgacgcccctgcctaccagcagggacagaaccaactgtacaacgagctgaacctgggcagacgggaagagtacgacgtgctggacaagcggagaggcagggaccctgagatgggcggaaagccccagcggagaaagaacccccaggaaggactgtataacgaactccagaaagacaagatggccgaagcctacagcgagatcggcatgaagggcgagcggagaagaggcaagggccacgatggcctgtaccagggcctgagcaccgccaccaaggacacctatgacgccctgcacatgcaggccctgcctccaagaagggccaagcgatctggatctggagcaacaaacttctcactactcaaacaagcaggtgacgtggaggagaatcccgggcctactagtatggactggatttggcgcatccttttccttgtcggcgctgctaccggcgcgcattccttcgaacaggtgcagctggttgaatctggtggcggagttgtgcagcctggcagaagcctgagactgagctgtgtggcctccggctttaccatcagcagctacggcatgaactgggtccgacaggcccctggcaaaggactggaatgggttgccgtgatctcctacgacggcggcaacaagtacagcgtggacagcgtgaagggcagattcaccatcagccgggacaacagcaagaacaccctgtacctccagatgaacagcctgagagccgaggacagcgccgtgtactattgtgccagaggccggtacttcgacctgtggggaagaggcacactggtcacagtttctagcacgcgtatccagaaccctgatcctgccgtgtaccagctgcgggatagcaagagcagcgacaagagcgtgtgtctgttcaccgacttcgacagccagaccaacgtgtcccagagcaaggactccgacgtgtacatcaccgataagtgcgtgctggacatgcggagcatggacttcaagagcaactccgccgtggcctggtccaacaagtccgatttcgcctgcgccaacgccttcaacaacagcattatccccgaggacacattcttcccaagcagcgacgtgccctgcggtacccagagttttgggttgttggaccctaaattgtgctatctgttggacggaatcctgttcatttacggagtgatcctgaccgcattgttcctgcgggttaagttttccagatccgcagacgcacccgcttaccaacaagggcagaaccaactctacaatgaacttaatttggggcggagggaagagtacgacgttctggacaaaaggaggggacgagatcccgagatgggcggaaagcctcagcgaaggaagaatccgcaagaggggctttataacgaactccagaaagataaaatggcagaagcctatagtgagattgggatgaagggagaaaggaggaggggtaaaggtcacgatgggttgtaccaaggattgagcacagccactaaagatacctatgatgcgctccacatgcaggccctgccgccaaga

SEQ ID NO: 21852 - DNA, 2646 bp, synthetic construct
  source 1..2646: mol_type = other DNA
atggccttaccagtgaccgccttgctcctgccgctggccttgctgctccacgccgccaggccggacatccagatgacccagtctccaagcacactgagcgccagcgtgggcgacagagtgaccattacatgtagagccagccagagcatcagcaactggctggcctggtatcagcagaagccaggcagagcccctaacctgctgatctctaaggccagcagcctgaagtctggcgtgcccagcagattttctggctctggcagcggcaccgagttcaccctgacagtctctagcctccagcctgacgacttcgccacctactactgccagcagtattacagctactcctacaccttcggccagggcaccaagctggaaatcaagctcgaggggaaaccaattcccaaccctcttctgggactggattcaaccggcagcggcgaggacctgaagaacgtgttcccacctgaggtggccgtgttcgagcctagcgaggccgagatcagccacacccagaaagccaccctcgtgtgcctggctaccggcttctaccccgaccatgtggaactgtcttggtgggtcaacggcaaagaggtgcacagcggcgtgtctaccgacccccagccactgaaagaacagcccgccctgaacgacagccggtactgcctgagcagcagactgagagtgtccgccaccttctggcagaacccccggaaccacttcagatgccaggtgcagttctacggcctgagcgagaacgacgagtggacccaggacagagccaagcccgtgacccagatcgtgtctgccgaagcctggggcagagccgattgcggatcccagagcttcggcctgctggaccccaagctgtgctacctgctggatggcatcctgttcatctacggcgtgatcctgaccgccctgttcctgagagtgaagttcagcagaagcgccgacgcccctgcctaccagcagggacagaaccaactgtacaacgagctgaacctgggcagacgggaagagtacgacgtgctggacaagcggagaggcagggaccctgagatgggcggaaagccccagcggagaaagaacccccaggaaggactgtataacgaactccagaaagacaagatggccgaagcctacagcgagatcggcatgaagggcgagcggagaagaggcaagggccacgatggcctgtaccagggcctgagcaccgccaccaaggacacctatgacgccctgcacatgcaggccctgcctccaagaagggccaagcgatctggatctggagcaacaaacttctcactactcaaacaagcaggtgacgtggaggagaatcccgggcctactagtatggactggatttggcgcatccttttccttgtcggcgctgctaccggcgcgcattccttcgaacaggtgcagctggttgaatctggtggcggagttgtgcagcctggcagaagcctgagactgagctgtgtggcctccggctttaccatcagcagctacggcatgaactgggtccgacaggcccctggcaaaggactggaatgggttgccgtgatctcctacgacggcggcaacaagtacagcgtggacagcgtgaagggcagattcaccatcagccgggacaacagcaagaacaccctgtacctccagatgaacagcctgagagccgaggacagcgccgtgtactattgtgccagaggccggtacttcgacctgtggggaagaggcacactggtcacagtttctagcacgcgtgagcagaaactgatctcggaagaggatgggagcggcatccagaaccctgatcctgccgtgtaccagctgcgggatagcaagagcagcgacaagagcgtgtgtctgttcaccgacttcgacagccagaccaacgtgtcccagagcaaggactccgacgtgtacatcaccgataagaccgtgctggacatgcggagcatggacttcaagagcaactccgccgtggcctggtccaacaagtccgatttcgcctgcgccaacgccttcaacaacagcattatccccgaggacacattcttcccaagccccgagagcagctgcggtacccagagttttgggttgttggaccctaaattgtgctatctgttggacggaatcctgttcatttacggagtgatcctgaccgcattgttcctgaggagcaagcggtcacggctgctccacagcgattacatgaatatgacaccacgaagaccgggtcctactcgcaaacactaccaaccctacgcacctccccgcgactttgcagcgtaccgatctcgggttaagttttccagatccgcagacgcacccgcttaccaacaagggcagaaccaactctacaatgaacttaatttggggcggagggaagagtacgacgttctggacaaaaggaggggacgagatcccgagatgggcggaaagcctcagcgaaggaagaatccgcaagaggggctttataacgaactccagaaagataaaatggcagaagcctatagtgagattgggatgaagggagaaaggaggaggggtaaaggtcacgatgggttgtaccaaggattgagcacagccactaaagatacctatgatgcgctccacatgcaggccctgccgccaaga

SEQ ID NO: 21853 - DNA, 2769 bp, synthetic construct
  source 1..2769: mol_type = other DNA
atggccttaccagtgaccgccttgctcctgccgctggccttgctgctccacgccgccaggccggacatccagatgacccagtctccaagcacactgagcgccagcgtgggcgacagagtgaccattacatgtagagccagccagagcatcagcaactggctggcctggtatcagcagaagccaggcagagcccctaacctgctgatctctaaggccagcagcctgaagtctggcgtgcccagcagattttctggctctggcagcggcaccgagttcaccctgacagtctctagcctccagcctgacgacttcgccacctactactgccagcagtattacagctactcctacaccttcggccagggcaccaagctggaaatcaagctcgaggggaaaccaattcccaaccctcttctgggactggattcaaccggcagcggcgaggacctgaagaacgtgttcccacctgaggtggccgtgttcgagcctagcgaggccgagatcagccacacccagaaagccaccctcgtgtgcctggctaccggcttctaccccgaccatgtggaactgtcttggtgggtcaacggcaaagaggtgcacagcggcgtgtctaccgacccccagccactgaaagaacagcccgccctgaacgacagccggtactgcctgagcagcagactgagagtgtccgccaccttctggcagaacccccggaaccacttcagatgccaggtgcagttctacggcctgagcgagaacgacgagtggacccaggacagagccaagcccgtgacccagatcgtgtctgccgaagcctggggcagagccgattgcggatcccagagcttcggcctgctggaccccaagctgtgctacctgctggatggcatcctgttcatctacggcgtgatcctgaccgccctgttcctgaggagtaagaggagcaggctcctgcacagtgactacatgaacatgactccacgccgccccggacccacccgcaagcattaccagccctatgccccaccacgcgacttcgcagcctatcgctccagagtgaagttcagcagaagcgccgacgcccctgcctaccagcagggacagaaccaactgtacaacgagctgaacctgggcagacgggaagagtacgacgtgctggacaagcggagaggcagggaccctgagatgggcggaaagccccagcggagaaagaacccccaggaaggactgtataacgaactccagaaagacaagatggccgaagcctacagcgagatcggcatgaagggcgagcggagaagaggcaagggccacgatggcctgtaccagggcctgagcaccgccaccaaggacacctatgacgccctgcacatgcaggccctgcctccaagaagggccaagcgatctggatctggagcaacaaacttctcactactcaaacaagcaggtgacgtggaggagaatcccgggcctactagtatggactggatttggcgcatccttttccttgtcggcgctgctaccggcgcgcattccttcgaacaggtgcagctggttgaatctggtggcggagttgtgcagcctggcagaagcctgagactgagctgtgtggcctccggctttaccatcagcagctacggcatgaactgggtccgacaggcccctggcaaaggactggaatgggttgccgtgatctcctacgacggcggcaacaagtacagcgtggacagcgtgaagggcagattcaccatcagccgggacaacagcaagaacaccctgtacctccagatgaacagcctgagagccgaggacagcgccgtgtactattgtgccagaggccggtacttcgacctgtggggaagaggcacactggtcacagtttctagcacgcgtgagcagaaactgatctcggaagaggatgggagcggcatccagaaccctgatcctgccgtgtaccagctgcgggatagcaagagcagcgacaagagcgtgtgtctgttcaccgacttcgacagccagaccaacgtgtcccagagcaaggactccgacgtgtacatcaccgataagaccgtgctggacatgcggagcatggacttcaagagcaactccgccgtggcctggtccaacaagtccgatttcgcctgcgccaacgccttcaacaacagcattatccccgaggacacattcttcccaagccccgagagcagctgcggtacccagagttttgggttgttggaccctaaattgtgctatctgttggacggaatcctgttcatttacggagtgatcctgaccgcattgttcctgaggagcaagcggtcacggctgctccacagcgattacatgaatatgacaccacgaagaccgggtcctactcgcaaacactaccaaccctacgcacctccccgcgactttgcagcgtaccgatctcgggttaagttttccagatccgcagacgcacccgcttaccaacaagggcagaaccaactctacaatgaacttaatttggggcggagggaagagtacgacgttctggacaaaaggaggggacgagatcccgagatgggcggaaagcctcagcgaaggaagaatccgcaagaggggctttataacgaactccagaaagataaaatggcagaagcctatagtgagattgggatgaagggagaaaggaggaggggtaaaggtcacgatgggttgtaccaaggattgagcacagccactaaagatacctatgatgcgctccacatgcaggccctgccgccaaga

SEQ ID NO: 21854 - DNA, 2652 bp, synthetic construct
  source 1..2652: mol_type = other DNA
atggccttaccagtgaccgccttgctcctgccgctggccttgctgctccacgccgccaggccggacatccagatgacccagtctccaagcacactgagcgccagcgtgggcgacagagtgaccattacatgtagagccagccagagcatcagcaactggctggcctggtatcagcagaagccaggcagagcccctaacctgctgatctctaaggccagcagcctgaagtctggcgtgcccagcagattttctggctctggcagcggcaccgagttcaccctgacagtctctagcctccagcctgacgacttcgccacctactactgccagcagtattacagctactcctacaccttcggccagggcaccaagctggaaatcaagctcgaggggaaaccaattcccaaccctcttctgggactggattcaaccggcagcggcgaggacctgaagaacgtgttcccacctgaggtggccgtgttcgagcctagcgaggccgagatcagccacacccagaaagccaccctcgtgtgcctggctaccggcttctaccccgaccatgtggaactgtcttggtgggtcaacggcaaagaggtgcacagcggcgtgtctaccgacccccagccactgaaagaacagcccgccctgaacgacagccggtactgcctgagcagcagactgagagtgtccgccaccttctggcagaacccccggaaccacttcagatgccaggtgcagttctacggcctgagcgagaacgacgagtggacccaggacagagccaagcccgtgacccagatcgtgtctgccgaagcctggggcagagccgattgcggatcccagagcttcggcctgctggaccccaagctgtgctacctgctggatggcatcctgttcatctacggcgtgatcctgaccgccctgttcctgagagtgaagttcagcagaagcgccgacgcccctgcctaccagcagggacagaaccaactgtacaacgagctgaacctgggcagacgggaagagtacgacgtgctggacaagcggagaggcagggaccctgagatgggcggaaagccccagcggagaaagaacccccaggaaggactgtataacgaactccagaaagacaagatggccgaagcctacagcgagatcggcatgaagggcgagcggagaagaggcaagggccacgatggcctgtaccagggcctgagcaccgccaccaaggacacctatgacgccctgcacatgcaggccctgcctccaagaagggccaagcgatctggatctggagcaacaaacttctcactactcaaacaagcaggtgacgtggaggagaatcccgggcctactagtatggactggatttggcgcatccttttccttgtcggcgctgctaccggcgcgcattccttcgaacaggtgcagctggttgaatctggtggcggagttgtgcagcctggcagaagcctgagactgagctgtgtggcctccggctttaccatcagcagctacggcatgaactgggtccgacaggcccctggcaaaggactggaatgggttgccgtgatctcctacgacggcggcaacaagtacagcgtggacagcgtgaagggcagattcaccatcagccgggacaacagcaagaacaccctgtacctccagatgaacagcctgagagccgaggacagcgccgtgtactattgtgccagaggccggtacttcgacctgtggggaagaggcacactggtcacagtttctagcacgcgtgagcagaaactgatctcggaagaggatctggggagcggcatccagaaccctgatcctgccgtgtaccagctgcgggatagcaagagcagcgacaagagcgtgtgtctgttcaccgacttcgacagccagaccaacgtgtcccagagcaaggactccgacgtgtacatcaccgataagaccgtgctggacatgcggagcatggacttcaagagcaactccgccgtggcctggtccaacaagtccgatttcgcctgcgccaacgccttcaacaacagcattatccccgaggacacattcttcccaagccccgagagcagctgcggtacccagagttttgggttgttggaccctaaattgtgctatctgttggacggaatcctgttcatttacggagtgatcctgaccgcattgttcctgaagagaggccggaagaagctgctgtacatcttcaagcagcctttcatgcggcccgtgcagaccacccaggaagaggacggctgctcctgccggttccccgaggaagaagaaggcggctgcgagctgcgggttaagttttccagatccgcagacgcacccgcttaccaacaagggcagaaccaactctacaatgaacttaatttggggcggagggaagagtacgacgttctggacaaaaggaggggacgagatcccgagatgggcggaaagcctcagcgaaggaagaatccgcaagaggggctttataacgaactccagaaagataaaatggcagaagcctatagtgagattgggatgaagggagaaaggaggaggggtaaaggtcacgatgggttgtaccaaggattgagcacagccactaaagatacctatgatgcgctccacatgcaggccctgccgccaaga

SEQ ID NO: 21855 - DNA, 2778 bp, synthetic construct
  source 1..2778: mol_type = other DNA
atggccttaccagtgaccgccttgctcctgccgctggccttgctgctccacgccgccaggccggacatccagatgacccagtctccaagcacactgagcgccagcgtgggcgacagagtgaccattacatgtagagccagccagagcatcagcaactggctggcctggtatcagcagaagccaggcagagcccctaacctgctgatctctaaggccagcagcctgaagtctggcgtgcccagcagattttctggctctggcagcggcaccgagttcaccctgacagtctctagcctccagcctgacgacttcgccacctactactgccagcagtattacagctactcctacaccttcggccagggcaccaagctggaaatcaagctcgaggggaaaccaattcccaaccctcttctgggactggattcaaccggcagcggcgaggacctgaagaacgtgttcccacctgaggtggccgtgttcgagcctagcgaggccgagatcagccacacccagaaagccaccctcgtgtgcctggctaccggcttctaccccgaccatgtggaactgtcttggtgggtcaacggcaaagaggtgcacagcggcgtgtctaccgacccccagccactgaaagaacagcccgccctgaacgacagccggtactgcctgagcagcagactgagagtgtccgccaccttctggcagaacccccggaaccacttcagatgccaggtgcagttctacggcctgagcgagaacgacgagtggacccaggacagagccaagcccgtgacccagatcgtgtctgccgaagcctggggcagagccgattgcggatcccagagcttcggcctgctggaccccaagctgtgctacctgctggatggcatcctgttcatctacggcgtgatcctgaccgccctgttcctgaaacggggcagaaagaaactcctgtatatattcaaacaaccatttatgagaccagtacaaactactcaagaggaagatggctgtagctgccgatttccagaagaagaagaaggaggatgtgaactgagagtgaagttcagcagaagcgccgacgcccctgcctaccagcagggacagaaccaactgtacaacgagctgaacctgggcagacgggaagagtacgacgtgctggacaagcggagaggcagggaccctgagatgggcggaaagccccagcggagaaagaacccccaggaaggactgtataacgaactccagaaagacaagatggccgaagcctacagcgagatcggcatgaagggcgagcggagaagaggcaagggccacgatggcctgtaccagggcctgagcaccgccaccaaggacacctatgacgccctgcacatgcaggccctgcctccaagaagggccaagcgatctggatctggagcaacaaacttctcactactcaaacaagcaggtgacgtggaggagaatcccgggcctactagtatggactggatttggcgcatccttttccttgtcggcgctgctaccggcgcgcattccttcgaacaggtgcagctggttgaatctggtggcggagttgtgcagcctggcagaagcctgagactgagctgtgtggcctccggctttaccatcagcagctacggcatgaactgggtccgacaggcccctggcaaaggactggaatgggttgccgtgatctcctacgacggcggcaacaagtacagcgtggacagcgtgaagggcagattcaccatcagccgggacaacagcaagaacaccctgtacctccagatgaacagcctgagagccgaggacagcgccgtgtactattgtgccagaggccggtacttcgacctgtggggaagaggcacactggtcacagtttctagcacgcgtgagcagaaactgatctcggaagaggatctggggagcggcatccagaaccctgatcctgccgtgtaccagctgcgggatagcaagagcagcgacaagagcgtgtgtctgttcaccgacttcgacagccagaccaacgtgtcccagagcaaggactccgacgtgtacatcaccgataagaccgtgctggacatgcggagcatggacttcaagagcaactccgccgtggcctggtccaacaagtccgatttcgcctgcgccaacgccttcaacaacagcattatccccgaggacacattcttcccaagccccgagagcagctgcggtacccagagttttgggttgttggaccctaaattgtgctatctgttggacggaatcctgttcatttacggagtgatcctgaccgcattgttcctgaagagaggccggaagaagctgctgtacatcttcaagcagcctttcatgcggcccgtgcagaccacccaggaagaggacggctgctcctgccggttccccgaggaagaagaaggcggctgcgagctgcgggttaagttttccagatccgcagacgcacccgcttaccaacaagggcagaaccaactctacaatgaacttaatttggggcggagggaagagtacgacgttctggacaaaaggaggggacgagatcccgagatgggcggaaagcctcagcgaaggaagaatccgcaagaggggctttataacgaactccagaaagataaaatggcagaagcctatagtgagattgggatgaagggagaaaggaggaggggtaaaggtcacgatgggttgtaccaaggattgagcacagccactaaagatacctatgatgcgctccacatgcaggccctgccgccaaga

SEQ ID NO: 21856 - DNA, 2451 bp, synthetic construct
  source 1..2451: mol_type = other DNA
atggccttaccagtgaccgccttgctcctgccgctggccttgctgctccacgccgccaggccggacatccagatgacccagtctccaagcacactgagcgccagcgtgggcgacagagtgaccattacatgtagagccagccagagcatcagcaactggctggcctggtatcagcagaagccaggcagagcccctaacctgctgatctctaaggccagcagcctgaagtctggcgtgcccagcagattttctggctctggcagcggcaccgagttcaccctgacagtctctagcctccagcctgacgacttcgccacctactactgccagcagtattacagctactcctacaccttcggccagggcaccaagctggaaatcaagctcgagcagagcttcggcctgctggaccccaagctgtgctacctgctggatggcatcctgttcatctacggcgtgatcctgaccgccctgttcctgagagtgaagttcagcagaagcgccgacgcccctgcctaccagcagggacagaaccaactgtacaacgagctgaacctgggcagacgggaagagtacgacgtgctggacaagcggagaggcagggaccctgagatgggcggaaagccccagcggagaaagaacccccaggaaggactgtataacgaactccagaaagacaagatggccgaagcctacagcgagatcggcatgaagggcgagcggagaagaggcaagggccacgatggcctgtaccagggcctgagcaccgccaccaaggacacctatgacgccctgcacatgcaggccctgcctccaagaagggccaagcgatctggatctggagcaacaaacttctcactactcaaacaagcaggtgacgtggaggagaatcccgggcctactagtatggactggatttggcgcatccttttccttgtcggcgctgctaccggcgcgcattccttcgaacaggtgcagctggttgaatctggtggcggagttgtgcagcctggcagaagcctgagactgagctgtgtggcctccggctttaccatcagcagctacggcatgaactgggtccgacaggcccctggcaaaggactggaatgggttgccgtgatctcctacgacggcggcaacaagtacagcgtggacagcgtgaagggcagattcaccatcagccgggacaacagcaagaacaccctgtacctccagatgaacagcctgagagccgaggacagcgccgtgtactattgtgccagaggccggtacttcgacctgtggggaagaggcacactggtcacagtttctagcacgcgtcagagttttgggttgttggaccctaaattgtgctatctgttggacggaatcctgttcatttacggagtgatcctgaccgcattgttcctgcgggttaagttttccagatccgcagacgcacccgcttaccaacaagggcagaaccaactctacaatgaacttaatttggggcggagggaagagtacgacgttctggacaaaaggaggggacgagatcccgagatgggcggaaagcctcagcgaaggaagaatccgcaagaggggctttataacgaactccagaaagataaaatggcagaagcctatagtgagattgggatgaagggagaaaggaggaggggtaaaggtcacgatgggttgtaccaaggattgagcacagccactaaagatacctatgatgcgctccacatgcaggccctgccgccaagacgcgccaagagaagcggatctggcgtgaagcagaccctgaatttcgacctgctgaagctggctggcgacgtggaatccaacccaggcccttctagaggccatatgaccgagtacaagcccacggtgcgcctcgccacccgcgacgacgtccccagggccgtacgcaccctcgccgccgcgttcgccgactaccccgccacgcgccacaccgtcgatccggaccgccacatcgagcgggtcaccgagctgcaagaactcttcctcacgcgcgtcgggctcgacatcggcaaggtgtgggtcgcggacgacggcgccgcggtggcggtctggaccacgccggagagcgtcgaagcgggggcggtgttcgccgagatcggcccgcgcatggccgagttgagcggttcccggctggccgcgcagcaacagatggaaggcctcctggcgccgcaccggcccaaggagcccgcgtggttcctggccaccgtcggcgtctcgcccgaccaccagggcaagggtctgggcagcgccgtcgtgctccccggagtggaggcggccgagcgcgccggggtgcccgccttcctggagacctccgcgccccgcaacctccccttctacgagcggctcggcttcaccgtcaccgccgacgtcgaggtgcccgaaggaccgcgcacctggtgcatgacccgcaagcccggtgcctga

SEQ ID NO: 21857 - DNA, 1923 bp, synthetic construct
  source 1..1923: mol_type = other DNA
atggccttaccagtgaccgccttgctcctgccgctggccttgctgctccacgccgccaggccggacatccagatgacccagtctccaagcacactgagcgccagcgtgggcgacagagtgaccattacatgtagagccagccagagcatcagcaactggctggcctggtatcagcagaagccaggcagagcccctaacctgctgatctctaaggccagcagcctgaagtctggcgtgcccagcagattttctggctctggcagcggcaccgagttcaccctgacagtctctagcctccagcctgacgacttcgccacctactactgccagcagtattacagctactcctacaccttcggccagggcaccaagctggaaatcaagctcgagggacagcctaaggccaatcctaccgtgacactgttccctccaagcagcgaagaactccaggccaacaaggccacacttgtgtgcctgatctccgacttctaccctggggctgtgacagtggcttggaaggccgatggatctcctgtgaaagccggcgtggaaaccaccaagccatccaagcagagcaacaacaaatacgccgccagctcctacctgagcctgacacctgagcagtggaagtcccacagatcctacagctgccaagtgacccacgaaggcagcaccgtggaaaagacagtggcccctacagagtgcagccccatcaagaccgatgtgattacaatggaccccaaggacaactgctccaaggacgccaacgataccctgctgctccagctgaccaacaccagcgcctactacatgtacttgttgctgctgctgaagtccgtggtgtacttcgccatcatcacatgctgcctgctgcggagaaccgccttctgctgcaacggcgagaagtctagggccaagcgatctggatctggagcaacaaacttctcactactcaaacaagcaggtgacgtggaggagaatcccgggcctactagtatggactggatttggcgcatccttttccttgtcggcgctgctaccggcgcgcattccttcgaacaggtgcagctggttgaatctggtggcggagttgtgcagcctggcagaagcctgagactgagctgtgtggcctccggctttaccatcagcagctacggcatgaactgggtccgacaggcccctggcaaaggactggaatgggttgccgtgatctcctacgacggcggcaacaagtacagcgtggacagcgtgaagggcagattcaccatcagccgggacaacagcaagaacaccctgtacctccagatgaacagcctgagagccgaggacagcgccgtgtactattgtgccagaggccggtacttcgacctgtggggaagaggcacactggtcacagtttctagcacgcgtgcctctacaaagggaccctccgtgtttcctctggctcccagcagcaagtctacaagcggaggaacagccgctctgggctgcctggtcaaggattactttcccgagcctgtgaccgtgtcctggaatagcggagcactgacaagcggcgtgcacacctttccagccgtgctgcaaagcagcggcctgtactctctgagcagcgtggtcacagtgcctagctctagcctgggcacccagacctacatctgcaatgtgaaccacaagcctagcaacaccaaggtggacaagagagtggaacccaagagctgtgaagtgaaaaccgactccaccgaccacgtgaagcccaaagagacagagaacaccaagcagcccagcaagagctgccacaagcccaaggccatcgtgcacaccgagaaagtgaacatgatgagcctgaccgtgctgggcctgcggatgctgttcgccaaaaccgtggccgtgaacttcctgctgaccgccaagctgttcttcctc

SEQ ID NO: 21858 - DNA, 1857 bp, synthetic construct
  source 1..1857: mol_type = other DNA
atggccttaccagtgaccgccttgctcctgccgctggccttgctgctccacgccgccaggccggacatccagatgacccagtctccaagcacactgagcgccagcgtgggcgacagagtgaccattacatgtagagccagccagagcatcagcaactggctggcctggtatcagcagaagccaggcagagcccctaacctgctgatctctaaggccagcagcctgaagtctggcgtgcccagcagattttctggctctggcagcggcaccgagttcaccctgacagtctctagcctccagcctgacgacttcgccacctactactgccagcagtattacagctactcctacaccttcggccagggcaccaagctggaaatcaagctcgagggacagcctaaggccaatcctaccgtgacactgttccctccaagcagcgaagaactccaggccaacaaggccacacttgtgtgcctgatctccgacttctaccctggggctgtgacagtggcttggaaggccgatggatctcctgtgaaagccggcgtggaaaccaccaagccatccaagcagagcaacaacaaatacgccgccagctcctacctgagcctgacacctgagcagtggaagtcccacagatcctacagctgccaagtgacccacgaaggcagcaccgtggaaaagacagtggcccctacagagtgcagcggcagagccgattgcggcatcaccagcgccagctaccaccagggcgtgctgagcgccaccatcctgtacgagatcctgctgggcaaggccaccctgtacgccgtgctggtgtctgccctggtgctgatggctatggtcaagcggaaggacagccggggaagggccaagcgatctggatctggagcaacaaacttctcactactcaaacaagcaggtgacgtggaggagaatcccgggcctactagtatggactggatttggcgcatccttttccttgtcggcgctgctaccggcgcgcattccttcgaacaggtgcagctggttgaatctggtggcggagttgtgcagcctggcagaagcctgagactgagctgtgtggcctccggctttaccatcagcagctacggcatgaactgggtccgacaggcccctggcaaaggactggaatgggttgccgtgatctcctacgacggcggcaacaagtacagcgtggacagcgtgaagggcagattcaccatcagccgggacaacagcaagaacaccctgtacctccagatgaacagcctgagagccgaggacagcgccgtgtactattgtgccagaggccggtacttcgacctgtggggaagaggcacactggtcacagtttctagcacgcgtgcctctacaaagggaccctccgtgtttcctctggctcccagcagcaagtctacaagcggaggaacagccgctctgggctgcctggtcaaggattactttcccgagcctgtgaccgtgtcctggaatagcggagcactgacaagcggcgtgcacacctttccagccgtgctgcaaagcagcggcctgtactctctgagcagcgtggtcacagtgcctagctctagcctgggcacccagacctacatctgcaatgtgaaccacaagcctagcaacaccaaggtggacaagagagtggaacccaagagctgtatccccgaggacacattcttcccaagcagcgacgtgccctgcgacgtgaagctggtggaaaagagcttcgagacagacaccaacctgaacttccagaacctgagcgtgatcggcttcagaatcctgctgctgaaagtggccggctttaacctgctgatgaccctgcggctgtggtccagc

SEQ ID NO: 21859 - DNA, 1857 bp, synthetic construct
  source 1..1857: mol_type = other DNA
atggccttaccagtgaccgccttgctcctgccgctggccttgctgctccacgccgccaggccggacatccagatgacccagtctccaagcacactgagcgccagcgtgggcgacagagtgaccattacatgtagagccagccagagcatcagcaactggctggcctggtatcagcagaagccaggcagagcccctaacctgctgatctctaaggccagcagcctgaagtctggcgtgcccagcagattttctggctctggcagcggcaccgagttcaccctgacagtctctagcctccagcctgacgacttcgccacctactactgccagcagtattacagctactcctacaccttcggccagggcaccaagctggaaatcaagctcgagggacagcctaaggccaatcctaccgtgacactgttccctccaagcagcgaagaactccaggccaacaaggccacacttgtgtgcctgatctccgacttctaccctggggctgtgacagtggcttggaaggccgatggatctcctgtgaaagccggcgtggaaaccaccaagccatccaagcagagcaacaacaaatacgccgccagctcctacctgagcctgacacctgagcagtggaagtcccacagatcctacagctgccaagtgacccacgaaggcagcaccgtggaaaagacagtggcccctacagagtgcagcggcagagccgattgcggctttaccagcgagagctaccagcagggcgtgctgagcgccaccatcctgtacgagatcctgctgggcaaggccaccctgtacgccgtgctggtgtctgccctggtgctgatggctatggtcaagcggaaggacagccggggaagggccaagcgatctggatctggagcaacaaacttctcactactcaaacaagcaggtgacgtggaggagaatcccgggcctactagtatggactggatttggcgcatccttttccttgtcggcgctgctaccggcgcgcattccttcgaacaggtgcagctggttgaatctggtggcggagttgtgcagcctggcagaagcctgagactgagctgtgtggcctccggctttaccatcagcagctacggcatgaactgggtccgacaggcccctggcaaaggactggaatgggttgccgtgatctcctacgacggcggcaacaagtacagcgtggacagcgtgaagggcagattcaccatcagccgggacaacagcaagaacaccctgtacctccagatgaacagcctgagagccgaggacagcgccgtgtactattgtgccagaggccggtacttcgacctgtggggaagaggcacactggtcacagtttctagcacgcgtgcctctacaaagggaccctccgtgtttcctctggctcccagcagcaagtctacaagcggaggaacagccgctctgggctgcctggtcaaggattactttcccgagcctgtgaccgtgtcctggaatagcggagcactgacaagcggcgtgcacacctttccagccgtgctgcaaagcagcggcctgtactctctgagcagcgtggtcacagtgcctagctctagcctgggcacccagacctacatctgcaatgtgaaccacaagcctagcaacaccaaggtggacaagagagtggaacccaagagctgtatccccgaggacacattcttcccaagccccgagagcagctgcgacgtgaagctggtggaaaagagcttcgagacagacaccaacctgaacttccagaacctgagcgtgatcggcttcagaatcctgctgctgaaagtggccggctttaacctgctgatgaccctgcggctgtggtccagc

SEQ ID NO: 21860 - DNA, 1335 bp, synthetic construct
  source 1..1335: mol_type = other DNA
atggccttaccagtgaccgccttgctcctgccgctggccttgctgctccacgccgccaggccggacatccagatgacccagtctccaagcacactgagcgccagcgtgggcgacagagtgaccattacatgtagagccagccagagcatcagcaactggctggcctggtatcagcagaagccaggcagagcccctaacctgctgatctctaaggccagcagcctgaagtctggcgtgcccagcagattttctggctctggcagcggcaccgagttcaccctgacagtctctagcctccagcctgacgacttcgccacctactactgccagcagtattacagctactcctacaccttcggccagggcaccaagctggaaatcaagggcggaggcggaagtggaggcggaggatctggcggcggaggctctcaggtgcagctggttgaatctggtggcggagttgtgcagcctggcagaagcctgagactgagctgtgtggcctccggctttaccatcagcagctacggcatgaactgggtccgacaggcccctggcaaaggactggaatgggttgccgtgatctcctacgacggcggcaacaagtacagcgtggacagcgtgaagggcagattcaccatcagccgggacaacagcaagaacaccctgtacctccagatgaacagcctgagagccgaggacagcgccgtgtactattgtgccagaggccggtacttcgacctgtggggaagaggcacactggtcacagtttctagcacgcgtgacggtaacgaggagatgggaggaatcactcaaaccccttacaaagtctcaatttcaggaacaactgttatccttacatgtccccagtatcctggcagcgagatcctttggcagcataacgacaagaatatagggggagatgaagacgataagaatatcggatctgacgaggatcacttgagcctgaaagagttctccgagcttgaacaaagcggatattatgtgtgctatccgcgcgggtcaaagccggaagacgctaacttttacctttatctccgagccagagtgtgcgaaaattgcatggaaatggacgttatgtccgttgctacaatagttatcgtagatatatgcatcacgggtggactgcttctgctggtttattattggtccaagaatagaaaggccaaagctaaacccgtgaccagaggcgctggcgcaggcggaaggcaaaggggacaaaacaaagaacggccaccaccagtgccaaatccagattatgagcctattcggaaaggacagagggacctgtactctggcctgaatcagagaagaatc

SEQ ID NO: 21861 - DNA, 1230 bp, synthetic construct
  source 1..1230: mol_type = other DNA
atggccttaccagtgaccgccttgctcctgccgctggccttgctgctccacgccgccaggccggacatccagatgacccagtctccaagcacactgagcgccagcgtgggcgacagagtgaccattacatgtagagccagccagagcatcagcaactggctggcctggtatcagcagaagccaggcagagcccctaacctgctgatctctaaggccagcagcctgaagtctggcgtgcccagcagattttctggctctggcagcggcaccgagttcaccctgacagtctctagcctccagcctgacgacttcgccacctactactgccagcagtattacagctactcctacaccttcggccagggcaccaagctggaaatcaagggcggaggcggaagtggaggcggaggatctggcggcggaggctctcaggtgcagctggttgaatctggtggcggagttgtgcagcctggcagaagcctgagactgagctgtgtggcctccggctttaccatcagcagctacggcatgaactgggtccgacaggcccctggcaaaggactggaatgggttgccgtgatctcctacgacggcggcaacaagtacagcgtggacagcgtgaagggcagattcaccatcagccgggacaacagcaagaacaccctgtacctccagatgaacagcctgagagccgaggacagcgccgtgtactattgtgccagaggccggtacttcgacctgtggggaagaggcacactggtcacagtttctagcacgcgtttcaagatccccatcgaggaactggaagatcgggtgttcgtgaactgcaacacctctatcacctgggtggaaggcaccgtgggaacactgctgagcgacatcaccagactggacctcggcaagcggattctggaccctcggggcatctacagatgcaacggcaccgacatctacaaggacaaagaaagcaccgtgcaggtccactacagaatgtgccagtcctgcgtggaactggaccctgctacagtggccggcatcatcgtgaccgatgtgatcgctactctgctgctggctctgggagtgttctgcttcgccggacacgaaacaggcagactgtctggcgctgccgatacacaggccctgctgagaaacgaccaagtgtatcagcccctgcgcgacagagatgatgcccagtattctcacctcggcggcaactgggctagaaacaag

SEQ ID NO: 21862 - DNA, 1260 bp, synthetic construct
  source 1..1260: mol_type = other DNA
atggccttaccagtgaccgccttgctcctgccgctggccttgctgctccacgccgccaggccggacatccagatgacccagtctccaagcacactgagcgccagcgtgggcgacagagtgaccattacatgtagagccagccagagcatcagcaactggctggcctggtatcagcagaagccaggcagagcccctaacctgctgatctctaaggccagcagcctgaagtctggcgtgcccagcagattttctggctctggcagcggcaccgagttcaccctgacagtctctagcctccagcctgacgacttcgccacctactactgccagcagtattacagctactcctacaccttcggccagggcaccaagctggaaatcaagggcggaggcggaagtggaggcggaggatctggcggcggaggctctcaggtgcagctggttgaatctggtggcggagttgtgcagcctggcagaagcctgagactgagctgtgtggcctccggctttaccatcagcagctacggcatgaactgggtccgacaggcccctggcaaaggactggaatgggttgccgtgatctcctacgacggcggcaacaagtacagcgtggacagcgtgaagggcagattcaccatcagccgggacaacagcaagaacaccctgtacctccagatgaacagcctgagagccgaggacagcgccgtgtactattgtgccagaggccggtacttcgacctgtggggaagaggcacactggtcacagtttctagcacgcgtcagagcatcaagggcaaccacctggtcaaggtgtacgactaccaagaggacggcagcgtgctgctgacatgtgatgccgaggccaagaacatcacctggtttaaggacggcaagatgatcggcttcctgaccgaggacaagaagaagtggaacctgggcagcaacgctaaggaccccagaggcatgtatcagtgcaagggcagccagaacaagagcaagcccctccaggtgtactaccggatgtgccagaactgcatcgagctgaacgccgctaccatcagcggctttctgttcgccgagatcgtgtccatcttcgtgctggccgtgggcgtgtactttatcgctggacaggatggcgtgcggcagagcagagcttccgataagcaaaccctgctgcctaacgaccagctgtaccagcctctgaaggacagagaggacgaccagtacagccacctccagggcaatcagctgagaagaaac

SEQ ID NO: 21863 - DNA, 1209 bp, synthetic construct
  source 1..1209: mol_type = other DNA
atggccttaccagtgaccgccttgctcctgccgctggccttgctgctccacgccgccaggccggacatccagatgacccagtctccaagcacactgagcgccagcgtgggcgacagagtgaccattacatgtagagccagccagagcatcagcaactggctggcctggtatcagcagaagccaggcagagcccctaacctgctgatctctaaggccagcagcctgaagtctggcgtgcccagcagattttctggctctggcagcggcaccgagttcaccctgacagtctctagcctccagcctgacgacttcgccacctactactgccagcagtattacagctactcctacaccttcggccagggcaccaagctggaaatcaagggcggaggcggaagtggaggcggaggatctggcggcggaggctctcaggtgcagctggttgaatctggtggcggagttgtgcagcctggcagaagcctgagactgagctgtgtggcctccggctttaccatcagcagctacggcatgaactgggtccgacaggcccctggcaaaggactggaatgggttgccgtgatctcctacgacggcggcaacaagtacagcgtggacagcgtgaagggcagattcaccatcagccgggacaacagcaagaacaccctgtacctccagatgaacagcctgagagccgaggacagcgccgtgtactattgtgccagaggccggtacttcgacctgtggggaagaggcacactggtcacagtttctagcacgcgtcagagttttgggttgttggaccctaaattgtgctatctgttggacggaatcctgttcatttacggagtgatcctgaccgcattgttcctgcgggttaagttttccagatccgcagacgcacccgcttaccaacaagggcagaaccaactctacaatgaacttaatttggggcggagggaagagtacgacgttctggacaaaaggaggggacgagatcccgagatgggcggaaagcctcagcgaaggaagaatccgcaagaggggctttataacgaactccagaaagataaaatggcagaagcctatagtgagattgggatgaagggagaaaggaggaggggtaaaggtcacgatgggttgtaccaaggattgagcacagccactaaagatacctatgatgcgctccacatgcaggccctgccgccaaga

SEQ ID NO: 21864 - DNA, 1335 bp, synthetic construct
  source 1..1335: mol_type = other DNA
atggccttaccagtgaccgccttgctcctgccgctggccttgctgctccacgccgccaggccgcaggtgcagctggttgaatctggtggcggagttgtgcagcctggcagaagcctgagactgagctgtgtggcctccggctttaccatcagcagctacggcatgaactgggtccgacaggcccctggcaaaggactggaatgggttgccgtgatctcctacgacggcggcaacaagtacagcgtggacagcgtgaagggcagattcaccatcagccgggacaacagcaagaacaccctgtacctccagatgaacagcctgagagccgaggacagcgccgtgtactattgtgccagaggccggtacttcgacctgtggggaagaggcacactggtcacagtttctagcggcggaggcggaagtggaggcggaggatctggcggcggaggctctgacatccagatgacccagtctccaagcacactgagcgccagcgtgggcgacagagtgaccattacatgtagagccagccagagcatcagcaactggctggcctggtatcagcagaagccaggcagagcccctaacctgctgatctctaaggccagcagcctgaagtctggcgtgcccagcagattttctggctctggcagcggcaccgagttcaccctgacagtctctagcctccagcctgacgacttcgccacctactactgccagcagtattacagctactcctacaccttcggccagggcaccaagctggaaatcaagacgcgtgacggtaacgaggagatgggaggaatcactcaaaccccttacaaagtctcaatttcaggaacaactgttatccttacatgtccccagtatcctggcagcgagatcctttggcagcataacgacaagaatatagggggagatgaagacgataagaatatcggatctgacgaggatcacttgagcctgaaagagttctccgagcttgaacaaagcggatattatgtgtgctatccgcgcgggtcaaagccggaagacgctaacttttacctttatctccgagccagagtgtgcgaaaattgcatggaaatggacgttatgtccgttgctacaatagttatcgtagatatatgcatcacgggtggactgcttctgctggtttattattggtccaagaatagaaaggccaaagctaaacccgtgaccagaggcgctggcgcaggcggaaggcaaaggggacaaaacaaagaacggccaccaccagtgccaaatccagattatgagcctattcggaaaggacagagggacctgtactctggcctgaatcagagaagaatc

SEQ ID NO: 21865 - DNA, 1230 bp, synthetic construct
  source 1..1230: mol_type = other DNA
atggccttaccagtgaccgccttgctcctgccgctggccttgctgctccacgccgccaggccgcaggtgcagctggttgaatctggtggcggagttgtgcagcctggcagaagcctgagactgagctgtgtggcctccggctttaccatcagcagctacggcatgaactgggtccgacaggcccctggcaaaggactggaatgggttgccgtgatctcctacgacggcggcaacaagtacagcgtggacagcgtgaagggcagattcaccatcagccgggacaacagcaagaacaccctgtacctccagatgaacagcctgagagccgaggacagcgccgtgtactattgtgccagaggccggtacttcgacctgtggggaagaggcacactggtcacagtttctagcggcggaggcggaagtggaggcggaggatctggcggcggaggctctgacatccagatgacccagtctccaagcacactgagcgccagcgtgggcgacagagtgaccattacatgtagagccagccagagcatcagcaactggctggcctggtatcagcagaagccaggcagagcccctaacctgctgatctctaaggccagcagcctgaagtctggcgtgcccagcagattttctggctctggcagcggcaccgagttcaccctgacagtctctagcctccagcctgacgacttcgccacctactactgccagcagtattacagctactcctacaccttcggccagggcaccaagctggaaatcaagacgcgtttcaagatccccatcgaggaactggaagatcgggtgttcgtgaactgcaacacctctatcacctgggtggaaggcaccgtgggaacactgctgagcgacatcaccagactggacctcggcaagcggattctggaccctcggggcatctacagatgcaacggcaccgacatctacaaggacaaagaaagcaccgtgcaggtccactacagaatgtgccagtcctgcgtggaactggaccctgctacagtggccggcatcatcgtgaccgatgtgatcgctactctgctgctggctctgggagtgttctgcttcgccggacacgaaacaggcagactgtctggcgctgccgatacacaggccctgctgagaaacgaccaagtgtatcagcccctgcgcgacagagatgatgcccagtattctcacctcggcggcaactgggctagaaacaag

SEQ ID NO: 21866 - DNA, 1260 bp, synthetic construct
  source 1..1260: mol_type = other DNA
atggccttaccagtgaccgccttgctcctgccgctggccttgctgctccacgccgccaggccgcaggtgcagctggttgaatctggtggcggagttgtgcagcctggcagaagcctgagactgagctgtgtggcctccggctttaccatcagcagctacggcatgaactgggtccgacaggcccctggcaaaggactggaatgggttgccgtgatctcctacgacggcggcaacaagtacagcgtggacagcgtgaagggcagattcaccatcagccgggacaacagcaagaacaccctgtacctccagatgaacagcctgagagccgaggacagcgccgtgtactattgtgccagaggccggtacttcgacctgtggggaagaggcacactggtcacagtttctagcggcggaggcggaagtggaggcggaggatctggcggcggaggctctgacatccagatgacccagtctccaagcacactgagcgccagcgtgggcgacagagtgaccattacatgtagagccagccagagcatcagcaactggctggcctggtatcagcagaagccaggcagagcccctaacctgctgatctctaaggccagcagcctgaagtctggcgtgcccagcagattttctggctctggcagcggcaccgagttcaccctgacagtctctagcctccagcctgacgacttcgccacctactactgccagcagtattacagctactcctacaccttcggccagggcaccaagctggaaatcaagacgcgtcagagcatcaagggcaaccacctggtcaaggtgtacgactaccaagaggacggcagcgtgctgctgacatgtgatgccgaggccaagaacatcacctggtttaaggacggcaagatgatcggcttcctgaccgaggacaagaagaagtggaacctgggcagcaacgctaaggaccccagaggcatgtatcagtgcaagggcagccagaacaagagcaagcccctccaggtgtactaccggatgtgccagaactgcatcgagctgaacgccgctaccatcagcggctttctgttcgccgagatcgtgtccatcttcgtgctggccgtgggcgtgtactttatcgctggacaggatggcgtgcggcagagcagagcttccgataagcaaaccctgctgcctaacgaccagctgtaccagcctctgaaggacagagaggacgaccagtacagccacctccagggcaatcagctgagaagaaac

SEQ ID NO: 21867 - DNA, 1209 bp, synthetic construct
  source 1..1209: mol_type = other DNA
atggccttaccagtgaccgccttgctcctgccgctggccttgctgctccacgccgccaggccgcaggtgcagctggttgaatctggtggcggagttgtgcagcctggcagaagcctgagactgagctgtgtggcctccggctttaccatcagcagctacggcatgaactgggtccgacaggcccctggcaaaggactggaatgggttgccgtgatctcctacgacggcggcaacaagtacagcgtggacagcgtgaagggcagattcaccatcagccgggacaacagcaagaacaccctgtacctccagatgaacagcctgagagccgaggacagcgccgtgtactattgtgccagaggccggtacttcgacctgtggggaagaggcacactggtcacagtttctagcggcggaggcggaagtggaggcggaggatctggcggcggaggctctgacatccagatgacccagtctccaagcacactgagcgccagcgtgggcgacagagtgaccattacatgtagagccagccagagcatcagcaactggctggcctggtatcagcagaagccaggcagagcccctaacctgctgatctctaaggccagcagcctgaagtctggcgtgcccagcagattttctggctctggcagcggcaccgagttcaccctgacagtctctagcctccagcctgacgacttcgccacctactactgccagcagtattacagctactcctacaccttcggccagggcaccaagctggaaatcaagacgcgtcagagttttgggttgttggaccctaaattgtgctatctgttggacggaatcctgttcatttacggagtgatcctgaccgcattgttcctgcgggttaagttttccagatccgcagacgcacccgcttaccaacaagggcagaaccaactctacaatgaacttaatttggggcggagggaagagtacgacgttctggacaaaaggaggggacgagatcccgagatgggcggaaagcctcagcgaaggaagaatccgcaagaggggctttataacgaactccagaaagataaaatggcagaagcctatagtgagattgggatgaagggagaaaggaggaggggtaaaggtcacgatgggttgtaccaaggattgagcacagccactaaagatacctatgatgcgctccacatgcaggccctgccgccaaga

SEQ ID NO: 21868 - DNA, 1494 bp, synthetic construct
  source 1..1494: mol_type = other DNA
atggccttaccagtgaccgccttgctcctgccgctggccttgctgctccacgccgccaggccggacatccagatgacccagtctccaagcacactgagcgccagcgtgggcgacagagtgaccattacatgtagagccagccagagcatcagcaactggctggcctggtatcagcagaagccaggcagagcccctaacctgctgatctctaaggccagcagcctgaagtctggcgtgcccagcagattttctggctctggcagcggcaccgagttcaccctgacagtctctagcctccagcctgacgacttcgccacctactactgccagcagtattacagctactcctacaccttcggccagggcaccaagctggaaatcaagggcggaggcggaagtggaggcggaggatctggcggcggaggctctcaggtgcagctggttgaatctggtggcggagttgtgcagcctggcagaagcctgagactgagctgtgtggcctccggctttaccatcagcagctacggcatgaactgggtccgacaggcccctggcaaaggactggaatgggttgccgtgatctcctacgacggcggcaacaagtacagcgtggacagcgtgaagggcagattcaccatcagccgggacaacagcaagaacaccctgtacctccagatgaacagcctgagagccgaggacagcgccgtgtactattgtgccagaggccggtacttcgacctgtggggaagaggcacactggtcacagtttctagcacgcgtggaatgaggactgaggatcttcccaaagctgtcgtctttctcgaaccccaatggtatcgggtgctcgaaaaagactctgtgacactgaaatgccaaggggcctactctcccgaggacaactccacacagtggtttcataatgagtccctcatcagctctcaggccagctcttatttcattgatgccgctacagtggacgactccggcgagtatcggtgtcagaccaatctgtctacactgtctgaccccgtgcagcttgaggtccacattggatggttgctcttgcaagccccacgctgggttttcaaagaggaagatccaatccatctgcggtgccacagctggaaaaacaccgctctccacaaagtcacatacctgcaaaatggcaaaggacgcaaatacttccatcacaattccgatttttacattccgaaggctaccctgaaagacagcggcagctatttctgccggggactcgtcggctccaagaatgtgtcctccgaaaccgtgaatatcacgattacccaaggactggctgtgcctacaatctctagcttctttccgcctggataccaagtctccttctgtcttgtgatggtcctcctgtttgctgtggacacaggactgtacttttccgtgaaaacgaacatccgcagctccacacgcgattggaaagatcacaagtttaaatggcgcaaagatccccaggacaag

SEQ ID NO: 21869 - DNA, 2343 bp, synthetic construct
  source 1..2343: mol_type = other DNA
atggccttaccagtgaccgccttgctcctgccgctggccttgctgctccacgccgccaggccggacatccagatgacccagtctccaagcacactgagcgccagcgtgggcgacagagtgaccattacatgtagagccagccagagcatcagcaactggctggcctggtatcagcagaagccaggcagagcccctaacctgctgatctctaaggccagcagcctgaagtctggcgtgcccagcagattttctggctctggcagcggcaccgagttcaccctgacagtctctagcctccagcctgacgacttcgccacctactactgccagcagtattacagctactcctacaccttcggccagggcaccaagctggaaatcaagggcggaggcggaagtggaggcggaggatctggcggcggaggctctcaggtgcagctggttgaatctggtggcggagttgtgcagcctggcagaagcctgagactgagctgtgtggcctccggctttaccatcagcagctacggcatgaactgggtccgacaggcccctggcaaaggactggaatgggttgccgtgatctcctacgacggcggcaacaagtacagcgtggacagcgtgaagggcagattcaccatcagccgggacaacagcaagaacaccctgtacctccagatgaacagcctgagagccgaggacagcgccgtgtactattgtgccagaggccggtacttcgacctgtggggaagaggcacactggtcacagtttctagcacgcgtggaggctctggacaacaacagaccctgcctaaaccattcatctgggctgaaccccactttatggttccgaaagagaaacaagtcacgatttgttgccaagggaattacggggccgtcgagtatcagctccactttgagggctccctgtttgctgtggatcggcccaagccacctgaaagaatcaacaaagtccaattctatattcctgatatgaactcccgcatggcaggccagtattcatgtatctaccgcgtgggagaactttggagtgaaccctctaacctgctggacctcgtcgtgacagagatgtatgatacacccacactgtctgtgcaccctgggccagaagttatcagcggagaaaaagttaccttttattgccgcctcgataccgctacctctatgttcctcttgctgaaagagggccgcagctctcacgtgcagcgaggctacggaaaggtccaagctgagtttcctctcggccccgtgaccaccgctcacaggggcacatatagatgttttggctcttataacaatcatgcctggtcattcccatccgagcctgtgaaactgctggtcacaggcgatattgagaatacctctctggccccagaagatcctacattccccgccgacacatggggaacatatctgctgacaaccgaaaccgggctgcaaaaggaccatgctctgtgggatcataccgctcagaatctgcttcggatggggcttgcattcctggtcctggtggctcttgtctggtttctggtcgaggactggctgtcccggaagagaaccagagaaagagcttccagggccagcacctgggaaggcagacgcagactgaatactcagaccctgcgcgccaagagaagcggatctggcgtgaagcagaccctgaatttcgacctgctgaagctggctggcgacgtggaatccaacccaggcccttctagaggccatatgaccgagtacaagcccacggtgcgcctcgccacccgcgacgacgtccccagggccgtacgcaccctcgccgccgcgttcgccgactaccccgccacgcgccacaccgtcgatccggaccgccacatcgagcgggtcaccgagctgcaagaactcttcctcacgcgcgtcgggctcgacatcggcaaggtgtgggtcgcggacgacggcgccgcggtggcggtctggaccacgccggagagcgtcgaagcgggggcggtgttcgccgagatcggcccgcgcatggccgagttgagcggttcccggctggccgcgcagcaacagatggaaggcctcctggcgccgcaccggcccaaggagcccgcgtggttcctggccaccgtcggcgtctcgcccgaccaccagggcaagggtctgggcagcgccgtcgtgctccccggagtggaggcggccgagcgcgccggggtgcccgccttcctggagacctccgcgccccgcaacctccccttctacgagcggctcggcttcaccgtcaccgccgacgtcgaggtgcccgaaggaccgcgcacctggtgcatgacccgcaagcccggtgcctga

SEQ ID NO: 21870 - DNA, 1842 bp, synthetic construct
  source 1..1842: mol_type = other DNA
atggccttaccagtgaccgccttgctcctgccgctggccttgctgctccacgccgccaggccggacatccagatgacccagtctccaagcacactgagcgccagcgtgggcgacagagtgaccattacatgtagagccagccagagcatcagcaactggctggcctggtatcagcagaagccaggcagagcccctaacctgctgatctctaaggccagcagcctgaagtctggcgtgcccagcagattttctggctctggcagcggcaccgagttcaccctgacagtctctagcctccagcctgacgacttcgccacctactactgccagcagtattacagctactcctacaccttcggccagggcaccaagctggaaatcaagggcggaggcggaagtggaggcggaggatctggcggcggaggctctcaggtgcagctggttgaatctggtggcggagttgtgcagcctggcagaagcctgagactgagctgtgtggcctccggctttaccatcagcagctacggcatgaactgggtccgacaggcccctggcaaaggactggaatgggttgccgtgatctcctacgacggcggcaacaagtacagcgtggacagcgtgaagggcagattcaccatcagccgggacaacagcaagaacaccctgtacctccagatgaacagcctgagagccgaggacagcgccgtgtactattgtgccagaggccggtacttcgacctgtggggaagaggcacactggtcacagtttctagcacgcgtaaaattgaagttatgtatcctcctccttacctagacaatgagaagagcaatggaaccattatccatgtgaaaggggcgcgtggcgatattgagaatacctctctggccccagaagatcctacattccccgccgacacatggggaacatatctgctgacaaccgaaaccgggctgcaaaaggaccatgctctgtgggatcataccgctcagaatctgcttcggatggggcttgcattcctggtcctggtggctcttgtctggtttctggtcgaggactggctgtcccggaagagaaccagagaaagagcttccagggccagcacctgggaaggcagacgcagactgaatactcagaccctgcgcgccaagagaagcggatctggcgtgaagcagaccctgaatttcgacctgctgaagctggctggcgacgtggaatccaacccaggcccttctagaggccatatgaccgagtacaagcccacggtgcgcctcgccacccgcgacgacgtccccagggccgtacgcaccctcgccgccgcgttcgccgactaccccgccacgcgccacaccgtcgatccggaccgccacatcgagcgggtcaccgagctgcaagaactcttcctcacgcgcgtcgggctcgacatcggcaaggtgtgggtcgcggacgacggcgccgcggtggcggtctggaccacgccggagagcgtcgaagcgggggcggtgttcgccgagatcggcccgcgcatggccgagttgagcggttcccggctggccgcgcagcaacagatggaaggcctcctggcgccgcaccggcccaaggagcccgcgtggttcctggccaccgtcggcgtctcgcccgaccaccagggcaagggtctgggcagcgccgtcgtgctccccggagtggaggcggccgagcgcgccggggtgcccgccttcctggagacctccgcgccccgcaacctccccttctacgagcggctcggcttcaccgtcaccgccgacgtcgaggtgcccgaaggaccgcgcacctggtgcatgacccgcaagcccggtgcctga

SEQ ID NO: 21871 - DNA, 2103 bp, synthetic construct
  source 1..2103: mol_type = other DNA
atggccttaccagtgaccgccttgctcctgccgctggccttgctgctccacgccgccaggccggacatccagatgacccagtctccaagcacactgagcgccagcgtgggcgacagagtgaccattacatgtagagccagccagagcatcagcaactggctggcctggtatcagcagaagccaggcagagcccctaacctgctgatctctaaggccagcagcctgaagtctggcgtgcccagcagattttctggctctggcagcggcaccgagttcaccctgacagtctctagcctccagcctgacgacttcgccacctactactgccagcagtattacagctactcctacaccttcggccagggcaccaagctggaaatcaagggcggaggcggaagtggaggcggaggatctggcggcggaggctctcaggtgcagctggttgaatctggtggcggagttgtgcagcctggcagaagcctgagactgagctgtgtggcctccggctttaccatcagcagctacggcatgaactgggtccgacaggcccctggcaaaggactggaatgggttgccgtgatctcctacgacggcggcaacaagtacagcgtggacagcgtgaagggcagattcaccatcagccgggacaacagcaagaacaccctgtacctccagatgaacagcctgagagccgaggacagcgccgtgtactattgtgccagaggccggtacttcgacctgtggggaagaggcacactggtcacagtttctagcacgcgtctgtgggtgtcccagccacctgaaattcggacactggaaggctcctccgcctttctgccctgtagctttaacgccagccaggggagactcgccatcggctctgtgacatggttccgggatgaagtcgtccctggaaaagaagttcgcaacggaacaccagagttcagaggcagactcgccccactggcaagctccagattcctgcatgaccatcaggctgaactgcacattagggacgtgcggggccacgatgcctccatctatgtgtgtcgggtcgaagtgcttggactcggcgtcggaactggaaacggcactaggctggtggtcgagaaagaacatccacagcttggcgctggcaccgtcctgttgcttagagccggattctatgccgtcagcttcctgtccgtggctgtggggtctacagtgtattaccagggaaaatgtctcacctggaaaggccccagacgccagcttccagctgttgttcctgctccactgccaccaccttgtggctcctctgctcacttgcttccaccagtgcctggcggacgcgccaagagaagcggatctggcgtgaagcagaccctgaatttcgacctgctgaagctggctggcgacgtggaatccaacccaggcccttctagaatgtaccggatgcagctgctgagctgtatcgccctgtctctggccctggtcacaaatagcgcccctaccagcagcagcaccaagaaaacccagctgcaactggaacacctcctgctggacctccagatgatcctgaacggcatcaacaactacaagaaccccaagctgaccgagatgctgaccgccaagttctacatgcccaagaaggccaccgagctgaagcacctccagtgcctggaagaggaactgaagcccctggaagaagtgctgaatctggcccagagcaagaacttccacctgaggccaagggacctgatctccaacatcaacgtgatcgtgctggaactgaaaggcagcgagacaaccttcatgtgcgagtacgccgacgagacagctaccatcgtggaatttctgaatcggtggatcaccttctgccagagcatcatcagcaccctgacaaagatcgaagtgatgtaccctcctccttacctggacaacgagaagtccaacggcaccatcatccacgtgaagggcaagcacctgtgtccttctccactgttccccggacctagcaagcctttctgggtgctcgttgttgttggcggcgtgctggcctgttacagcctgctggttaccgtggccttcatcatcttttgggtccgaagcaagcggagctaa

SEQ ID NO: 21872 - DNA, 2031 bp, synthetic construct
  source 1..2031: mol_type = other DNA
atggccttaccagtgaccgccttgctcctgccgctggccttgctgctccacgccgccaggccggacatccagatgacccagtctccaagcacactgagcgccagcgtgggcgacagagtgaccattacatgtagagccagccagagcatcagcaactggctggcctggtatcagcagaagccaggcagagcccctaacctgctgatctctaaggccagcagcctgaagtctggcgtgcccagcagattttctggctctggcagcggcaccgagttcaccctgacagtctctagcctccagcctgacgacttcgccacctactactgccagcagtattacagctactcctacaccttcggccagggcaccaagctggaaatcaagggcggaggcggaagtggaggcggaggatctggcggcggaggctctcaggtgcagctggttgaatctggtggcggagttgtgcagcctggcagaagcctgagactgagctgtgtggcctccggctttaccatcagcagctacggcatgaactgggtccgacaggcccctggcaaaggactggaatgggttgccgtgatctcctacgacggcggcaacaagtacagcgtggacagcgtgaagggcagattcaccatcagccgggacaacagcaagaacaccctgtacctccagatgaacagcctgagagccgaggacagcgccgtgtactattgtgccagaggccggtacttcgacctgtggggaagaggcacactggtcacagtttctagcacgcgtctgtgggtgtcccagccacctgaaattcggacactggaaggctcctccgcctttctgccctgtagctttaacgccagccaggggagactcgccatcggctctgtgacatggttccgggatgaagtcgtccctggaaaagaagttcgcaacggaacaccagagttcagaggcagactcgccccactggcaagctccagattcctgcatgaccatcaggctgaactgcacattagggacgtgcggggccacgatgcctccatctatgtgtgtcgggtcgaagtgcttggactcggcgtcggaactggaaacggcactaggctggtggtcgagaaagaacatccacagcttggcgctggcaccgtcctgttgcttagagccggattctatgccgtcagcttcctgtccgtggctgtggggtctacagtgtattaccagggaaaatgtctcacctggaaaggccccagacgccagcttccagctgttgttcctgctccactgccaccaccttgtggctcctctgctcacttgcttccaccagtgcctggcggacgcgccaagagaagcggatctggcgtgaagcagaccctgaatttcgacctgctgaagctggctggcgacgtggaatccaacccaggcccttctagaggccatatgaccgagtacaagcccacggtgcgcctcgccacccgcgacgacgtccccagggccgtacgcaccctcgccgccgcgttcgccgactaccccgccacgcgccacaccgtcgatccggaccgccacatcgagcgggtcaccgagctgcaagaactcttcctcacgcgcgtcgggctcgacatcggcaaggtgtgggtcgcggacgacggcgccgcggtggcggtctggaccacgccggagagcgtcgaagcgggggcggtgttcgccgagatcggcccgcgcatggccgagttgagcggttcccggctggccgcgcagcaacagatggaaggcctcctggcgccgcaccggcccaaggagcccgcgtggttcctggccaccgtcggcgtctcgcccgaccaccagggcaagggtctgggcagcgccgtcgtgctccccggagtggaggcggccgagcgcgccggggtgcccgccttcctggagacctccgcgccccgcaacctccccttctacgagcggctcggcttcaccgtcaccgccgacgtcgaggtgcccgaaggaccgcgcacctggtgcatgacccgcaagcccggtgcctga

SEQ ID NO: 21873 - DNA, 1056 bp, synthetic construct
  source 1..1056: mol_type = other DNA
atggccttaccagtgaccgccttgctcctgccgctggccttgctgctccacgccgccaggccggacatccagatgacccagtctccaagcacactgagcgccagcgtgggcgacagagtgaccattacatgtagagccagccagagcatcagcaactggctggcctggtatcagcagaagccaggcagagcccctaacctgctgatctctaaggccagcagcctgaagtctggcgtgcccagcagattttctggctctggcagcggcaccgagttcaccctgacagtctctagcctccagcctgacgacttcgccacctactactgccagcagtattacagctactcctacaccttcggccagggcaccaagctggaaatcaagggcggaggcggaagtggaggcggaggatctggcggcggaggctctcaggtgcagctggttgaatctggtggcggagttgtgcagcctggcagaagcctgagactgagctgtgtggcctccggctttaccatcagcagctacggcatgaactgggtccgacaggcccctggcaaaggactggaatgggttgccgtgatctcctacgacggcggcaacaagtacagcgtggacagcgtgaagggcagattcaccatcagccgggacaacagcaagaacaccctgtacctccagatgaacagcctgagagccgaggacagcgccgtgtactattgtgccagaggccggtacttcgacctgtggggaagaggcacactggtcacagtttctagcacgcgtaaaattgaagttatgtatcctcctccttacctagacaatgagaagagcaatggaaccattatccatgtgaaaggggcgcgtatcacccagggcctggccgtgtctaccatcagcagctttttcccacccggctaccaggtgtccttctgcctcgtgatggtgctgctgttcgccgtggacaccggcctgtacttcagcgtgaaaacaaacatccggtccagcaccagagactggaaggaccacaagttcaagtggcggaaggacccccaggacaag

SEQ ID NO: 21874 - DNA, 1056 bp, synthetic construct
  source 1..1056: mol_type = other DNA
atggccttaccagtgaccgccttgctcctgccgctggccttgctgctccacgccgccaggccggacatccagatgacccagtctccaagcacactgagcgccagcgtgggcgacagagtgaccattacatgtagagccagccagagcatcagcaactggctggcctggtatcagcagaagccaggcagagcccctaacctgctgatctctaaggccagcagcctgaagtctggcgtgcccagcagattttctggctctggcagcggcaccgagttcaccctgacagtctctagcctccagcctgacgacttcgccacctactactgccagcagtattacagctactcctacaccttcggccagggcaccaagctggaaatcaagggcggaggcggaagtggaggcggaggatctggcggcggaggctctcaggtgcagctggttgaatctggtggcggagttgtgcagcctggcagaagcctgagactgagctgtgtggcctccggctttaccatcagcagctacggcatgaactgggtccgacaggcccctggcaaaggactggaatgggttgccgtgatctcctacgacggcggcaacaagtacagcgtggacagcgtgaagggcagattcaccatcagccgggacaacagcaagaacaccctgtacctccagatgaacagcctgagagccgaggacagcgccgtgtactattgtgccagaggccggtacttcgacctgtggggaagaggcacactggtcacagtttctagcacgcgtaaaattgaagttatgtatcctcctccttacctagacaatgagaagagcaatggaaccattatccatgtgaaaggggcgcgtattacccaaggactggctgtgcctacaatctctagcttctttccgcctggataccaagtctccttctgtcttgtgatggtcctcctgtttgctgtggacacaggactgtacttttccgtgaaaacgaacatccgcagctccacacgcgattggaaagatcacaagtttaaatggcgcaaagatccccaggacaag

SEQ ID NO: 21875 - DNA, 993 bp, synthetic construct
  source 1..993: mol_type = other DNA
atggccttaccagtgaccgccttgctcctgccgctggccttgctgctccacgccgccaggccggacatccagatgacccagtctccaagcacactgagcgccagcgtgggcgacagagtgaccattacatgtagagccagccagagcatcagcaactggctggcctggtatcagcagaagccaggcagagcccctaacctgctgatctctaaggccagcagcctgaagtctggcgtgcccagcagattttctggctctggcagcggcaccgagttcaccctgacagtctctagcctccagcctgacgacttcgccacctactactgccagcagtattacagctactcctacaccttcggccagggcaccaagctggaaatcaagggcggaggcggaagtggaggcggaggatctggcggcggaggctctcaggtgcagctggttgaatctggtggcggagttgtgcagcctggcagaagcctgagactgagctgtgtggcctccggctttaccatcagcagctacggcatgaactgggtccgacaggcccctggcaaaggactggaatgggttgccgtgatctcctacgacggcggcaacaagtacagcgtggacagcgtgaagggcagattcaccatcagccgggacaacagcaagaacaccctgtacctccagatgaacagcctgagagccgaggacagcgccgtgtactattgtgccagaggccggtacttcgacctgtggggaagaggcacactggtcacagtttctagcacgcgtaaaattgaagttatgtatcctcctccttacctagacaatgagaagagcaatggaaccattatccatgtgaaaggggcgcgtattacccaaggactggctgtgtctacaatctctagcttctctccgcctggataccaagtctccttctgtcttgtgatggtcctcctgtttgctgtggacacaggactgtacttttccgtgaaaacgaacatc

SEQ ID NO: 21876 - DNA, 1086 bp, synthetic construct
  source 1..1086: mol_type = other DNA
atggccttaccagtgaccgccttgctcctgccgctggccttgctgctccacgccgccaggccggacatccagatgacccagtctccaagcacactgagcgccagcgtgggcgacagagtgaccattacatgtagagccagccagagcatcagcaactggctggcctggtatcagcagaagccaggcagagcccctaacctgctgatctctaaggccagcagcctgaagtctggcgtgcccagcagattttctggctctggcagcggcaccgagttcaccctgacagtctctagcctccagcctgacgacttcgccacctactactgccagcagtattacagctactcctacaccttcggccagggcaccaagctggaaatcaagggcggaggcggaagtggaggcggaggatctggcggcggaggctctcaggtgcagctggttgaatctggtggcggagttgtgcagcctggcagaagcctgagactgagctgtgtggcctccggctttaccatcagcagctacggcatgaactgggtccgacaggcccctggcaaaggactggaatgggttgccgtgatctcctacgacggcggcaacaagtacagcgtggacagcgtgaagggcagattcaccatcagccgggacaacagcaagaacaccctgtacctccagatgaacagcctgagagccgaggacagcgccgtgtactattgtgccagaggccggtacttcgacctgtggggaagaggcacactggtcacagtttctagcacgcgtaaaattgaagttatgtatcctcctccttacctagacaatgagaagagcaatggaaccattatccatgtgaaaggggcgcgtgtcgagaaagaacatccacagcttggcgctggcaccgtcctgttgcttagagccggattctatgccgtcagcttcctgtccgtggctgtggggtctacagtgtattaccagggaaaatgtctcacctggaaaggccccagacgccagcttccagctgttgttcctgctccactgccaccaccttgtggctcctctgctcacttgcttccaccagtgcctggcgga

SEQ ID NO: 21877 - DNA, 1329 bp, synthetic construct
  source 1..1329: mol_type = other DNA
atggccttaccagtgaccgccttgctcctgccgctggccttgctgctccacgccgccaggccggacatccagatgacccagtctccaagcacactgagcgccagcgtgggcgacagagtgaccattacatgtagagccagccagagcatcagcaactggctggcctggtatcagcagaagccaggcagagcccctaacctgctgatctctaaggccagcagcctgaagtctggcgtgcccagcagattttctggctctggcagcggcaccgagttcaccctgacagtctctagcctccagcctgacgacttcgccacctactactgccagcagtattacagctactcctacaccttcggccagggcaccaagctggaaatcaagggcggaggcggaagtggaggcggaggatctggcggcggaggctctcaggtgcagctggttgaatctggtggcggagttgtgcagcctggcagaagcctgagactgagctgtgtggcctccggctttaccatcagcagctacggcatgaactgggtccgacaggcccctggcaaaggactggaatgggttgccgtgatctcctacgacggcggcaacaagtacagcgtggacagcgtgaagggcagattcaccatcagccgggacaacagcaagaacaccctgtacctccagatgaacagcctgagagccgaggacagcgccgtgtactattgtgccagaggccggtacttcgacctgtggggaagaggcacactggtcacagtttctagcacgcgtaaaattgaagttatgtatcctcctccttacctagacaatgagaagagcaatggaaccattatccatgtgaaaggggcgcgtaagtctgtgcgcttttacctggtcgtcagccctgccagtgcctccactcagacatcttggaccccaagggaccttgtgtcctctcagacacagacacagtcctgcgtgccaccaactgctggcgcaagacaggctccagagtctcccagcacaatccccgtcccttctcagccccagaactccacacttaggccaggaccagctgctccaatcgcactggtcccagtgttctgcggactgctggttgccaagtctctggtgctgagcgcactcctcgtttggtggggcgatatttggtggaaaacgatgatggaattgagatccctcgatacgcagaaagccacatgccaccttcagcaagtcacagacttgccttggaccagcgtcagctctcccgtggaacgggaaattctgtatcatacagtggcccgcaccaagatttccgacgatgacgacgagcacacactg

SEQ ID NO: 21878 - DNA, 1140 bp, synthetic construct
  source 1..1140: mol_type = other DNA
atggccttaccagtgaccgccttgctcctgccgctggccttgctgctccacgccgccaggccggacatccagatgacccagtctccaagcacactgagcgccagcgtgggcgacagagtgaccattacatgtagagccagccagagcatcagcaactggctggcctggtatcagcagaagccaggcagagcccctaacctgctgatctctaaggccagcagcctgaagtctggcgtgcccagcagattttctggctctggcagcggcaccgagttcaccctgacagtctctagcctccagcctgacgacttcgccacctactactgccagcagtattacagctactcctacaccttcggccagggcaccaagctggaaatcaagggcggaggcggaagtggaggcggaggatctggcggcggaggctctcaggtgcagctggttgaatctggtggcggagttgtgcagcctggcagaagcctgagactgagctgtgtggcctccggctttaccatcagcagctacggcatgaactgggtccgacaggcccctggcaaaggactggaatgggttgccgtgatctcctacgacggcggcaacaagtacagcgtggacagcgtgaagggcagattcaccatcagccgggacaacagcaagaacaccctgtacctccagatgaacagcctgagagccgaggacagcgccgtgtactattgtgccagaggccggtacttcgacctgtggggaagaggcacactggtcacagtttctagcacgcgtaaaattgaagttatgtatcctcctccttacctagacaatgagaagagcaatggaaccattatccatgtgaaaggggcgcgtggcgatattgagaatacctctctggccccagaagatcctacattccccgccgacacatggggaacatatctgctgacaaccgaaaccgggctgcaaaaggaccatgctctgtgggatcataccgctcagaatctgcttcggatggggcttgcattcctggtcctggtggctcttgtctggtttctggtcgaggactggctgtcccggaagagaaccagagaaagagcttccagggccagcacctgggaaggcagacgcagactgaatactcagaccctg

SEQ ID NO: 21879 - DNA, 2931 bp, synthetic construct
  source 1..2931: mol_type = other DNA
atggccttaccagtgaccgccttgctcctgccgctggccttgctgctccacgccgccaggccggacatccagatgacccagtctccaagcacactgagcgccagcgtgggcgacagagtgaccattacatgtagagccagccagagcatcagcaactggctggcctggtatcagcagaagccaggcagagcccctaacctgctgatctctaaggccagcagcctgaagtctggcgtgcccagcagattttctggctctggcagcggcaccgagttcaccctgacagtctctagcctccagcctgacgacttcgccacctactactgccagcagtattacagctactcctacaccttcggccagggcaccaagctggaaatcaagctcgagggacagcctaaggccaatcctaccgtgacactgttccctccaagcagcgaagaactccaggccaacaaggccacacttgtgtgcctgatctccgacttctaccctggggctgtgacagtggcttggaaggccgatggatctcctgtgaaagccggcgtggaaaccaccaagccatccaagcagagcaacaacaaatacgccgccagctcctacctgagcctgacacctgagcagtggaagtcccacagatcctacagctgccaagtgacccacgaaggcagcaccgtggaaaagacagtggcccctacagagtgcagcggatcccagagcttcggcctgctggaccccaagctgtgctacctgctggatggcatcctgttcatctacggcgtgatcctgaccgccctgttcctgagagtgaagttcagcagaagcgccgacgcccctgcctaccagcagggacagaaccaactgtacaacgagctgaacctgggcagacgggaagagtacgacgtgctggacaagcggagaggcagggaccctgagatgggcggaaagccccagcggagaaagaacccccaggaaggactgtataacgaactccagaaagacaagatggccgaagcctacagcgagatcggcatgaagggcgagcggagaagaggcaagggccacgatggcctgtaccagggcctgagcaccgccaccaaggacacctatgacgccctgcacatgcaggccctgcctccaagaagggccaagcgatctggatctggagcaacaaacttctcactactcaaacaagcaggtgacgtggaggagaatcccgggcctactagtatggactggatttggcgcatccttttccttgtcggcgctgctaccggcgcgcattccttcgaacaggtgcagctggttgaatctggtggcggagttgtgcagcctggcagaagcctgagactgagctgtgtggcctccggctttaccatcagcagctacggcatgaactgggtccgacaggcccctggcaaaggactggaatgggttgccgtgatctcctacgacggcggcaacaagtacagcgtggacagcgtgaagggcagattcaccatcagccgggacaacagcaagaacaccctgtacctccagatgaacagcctgagagccgaggacagcgccgtgtactattgtgccagaggccggtacttcgacctgtggggaagaggcacactggtcacagtttctagcacgcgtgcctctacaaagggaccctccgtgtttcctctggctcccagcagcaagtctacaagcggaggaacagccgctctgggctgcctggtcaaggattactttcccgagcctgtgaccgtgtcctggaatagcggagcactgacaagcggcgtgcacacctttccagccgtgctgcaaagcagcggcctgtactctctgagcagcgtggtcacagtgcctagctctagcctgggcacccagacctacatctgcaatgtgaaccacaagcctagcaacaccaaggtggacaagagagtggaacccaagagctgtggtaccggcgacatcgagaacaccagtctggcccctgaggaccctacctttcctgccgatacctggggcacctacctgctgaccacagagacaggactccagaaagatcacgccctgtgggaccacacagcccagaacctgctgagaatgggcctcgcctttctggtgctggttgccctcgtgtggttcctggtggaagattggctgagccggaagcggacaagagagagagccagcagagcctctacctgggagggaagaagaaggctgaacacccagacacttagggccaagcgatctggatctggagcaacaaacttctcactactcaaacaagcaggtgacgtggaggagaatcccgggccttctagaggccatatgaccgagtacaagcccacggtgcgcctcgccacccgcgacgacgtccccagggccgtacgcaccctcgccgccgcgttcgccgactaccccgccacgcgccacaccgtcgatccggaccgccacatcgagcgggtcaccgagctgcaagaactcttcctcacgcgcgtcgggctcgacatcggcaaggtgtgggtcgcggacgacggcgccgcggtggcggtctggaccacgccggagagcgtcgaagcgggggcggtgttcgccgagatcggcccgcgcatggccgagttgagcggttcccggctggccgcgcagcaacagatggaaggcctcctggcgccgcaccggcccaaggagcccgcgtggttcctggccaccgtcggcgtctcgcccgaccaccagggcaagggtctgggcagcgccgtcgtgctccccggagtggaggcggccgagcgcgccggggtgcccgccttcctggagacctccgcgccccgcaacctccccttctacgagcggctcggcttcaccgtcaccgccgacgtcgaggtgcccgaaggaccgcgcacctggtgcatgacccgcaagcccggtgcctga

SEQ ID NO: 21880 - DNA, 3129 bp, synthetic construct
  source 1..3129: mol_type = other DNA
atggccttaccagtgaccgccttgctcctgccgctggccttgctgctccacgccgccaggccggacatccagatgacccagtctccaagcacactgagcgccagcgtgggcgacagagtgaccattacatgtagagccagccagagcatcagcaactggctggcctggtatcagcagaagccaggcagagcccctaacctgctgatctctaaggccagcagcctgaagtctggcgtgcccagcagattttctggctctggcagcggcaccgagttcaccctgacagtctctagcctccagcctgacgacttcgccacctactactgccagcagtattacagctactcctacaccttcggccagggcaccaagctggaaatcaagctcgagggacagcctaaggccaatcctaccgtgacactgttccctccaagcagcgaagaactccaggccaacaaggccacacttgtgtgcctgatctccgacttctaccctggggctgtgacagtggcttggaaggccgatggatctcctgtgaaagccggcgtggaaaccaccaagccatccaagcagagcaacaacaaatacgccgccagctcctacctgagcctgacacctgagcagtggaagtcccacagatcctacagctgccaagtgacccacgaaggcagcaccgtggaaaagacagtggcccctacagagtgcagcggatcccagagcttcggcctgctggaccccaagctgtgctacctgctggatggcatcctgttcatctacggcgtgatcctgaccgccctgttcctgagagtgaagttcagcagaagcgccgacgcccctgcctaccagcagggacagaaccaactgtacaacgagctgaacctgggcagacgggaagagtacgacgtgctggacaagcggagaggcagggaccctgagatgggcggaaagccccagcggagaaagaacccccaggaaggactgtataacgaactccagaaagacaagatggccgaagcctacagcgagatcggcatgaagggcgagcggagaagaggcaagggccacgatggcctgtaccagggcctgagcaccgccaccaaggacacctatgacgccctgcacatgcaggccctgcctccaagaagggccaagcgatctggatctggagcaacaaacttctcactactcaaacaagcaggtgacgtggaggagaatcccgggcctactagtatggactggatttggcgcatccttttccttgtcggcgctgctaccggcgcgcattccttcgaacaggtgcagctggttgaatctggtggcggagttgtgcagcctggcagaagcctgagactgagctgtgtggcctccggctttaccatcagcagctacggcatgaactgggtccgacaggcccctggcaaaggactggaatgggttgccgtgatctcctacgacggcggcaacaagtacagcgtggacagcgtgaagggcagattcaccatcagccgggacaacagcaagaacaccctgtacctccagatgaacagcctgagagccgaggacagcgccgtgtactattgtgccagaggccggtacttcgacctgtggggaagaggcacactggtcacagtttctagcacgcgtgcctctacaaagggaccctccgtgtttcctctggctcccagcagcaagtctacaagcggaggaacagccgctctgggctgcctggtcaaggattactttcccgagcctgtgaccgtgtcctggaatagcggagcactgacaagcggcgtgcacacctttccagccgtgctgcaaagcagcggcctgtactctctgagcagcgtggtcacagtgcctagctctagcctgggcacccagacctacatctgcaatgtgaaccacaagcctagcaacaccaaggtggacaagagagtggaacccaagagctgtggtaccaagtctgtgcgcttttacctggtcgtcagccctgccagtgcctccactcagacatcttggaccccaagggaccttgtgtcctctcagacacagacacagtcctgcgtgccaccaactgctggcgcaagacaggctccagagtctcccagcacaatccccgtcccttctcagccccagaactccacacttaggccaggaccagctgctccaatcgcactggtcccagtgttctgcggactgctggttgccaagtctctggtgctgagcgcactcctcgtttggtggggcgatatttggtggaaaacgatgatggaattgagatccctcgatacgcagaaagccacatgccaccttcagcaagtcacagacttgccttggaccagcgtcagctctcccgtggaacgggaaattctgtatcatacagtggcccgcaccaagatttccgacgatgacgacgagcacacactgcgcgccaagagaagcggatctggcgtgaagcagaccctgaatttcgacctgctgaagctggctggcgacgtggaatccaacccaggcccttctagaggccatatgaccgagtacaagcccacggtgcgcctcgccacccgcgacgacgtccccagggccgtacgcaccctcgccgccgcgttcgccgactaccccgccacgcgccacaccgtcgatccggaccgccacatcgagcgggtcaccgagctgcaagaactcttcctcacgcgcgtcgggctcgacatcggcaaggtgtgggtcgcggacgacggcgccgcggtggcggtctggaccacgccggagagcgtcgaagcgggggcggtgttcgccgagatcggcccgcgcatggccgagttgagcggttcccggctggccgcgcagcaacagatggaaggcctcctggcgccgcaccggcccaaggagcccgcgtggttcctggccaccgtcggcgtctcgcccgaccaccagggcaagggtctgggcagcgccgtcgtgctccccggagtggaggcggccgagcgcgccggggtgcccgccttcctggagacctccgcgccccgcaacctccccttctacgagcggctcggcttcaccgtcaccgccgacgtcgaggtgcccgaaggaccgcgcacctggtgcatgacccgcaagcccggtgcctga

SEQ ID NO: 21881 - DNA, 2889 bp, synthetic construct
  source 1..2889: mol_type = other DNA
atggccttaccagtgaccgccttgctcctgccgctggccttgctgctccacgccgccaggccggacatccagatgacccagtctccaagcacactgagcgccagcgtgggcgacagagtgaccattacatgtagagccagccagagcatcagcaactggctggcctggtatcagcagaagccaggcagagcccctaacctgctgatctctaaggccagcagcctgaagtctggcgtgcccagcagattttctggctctggcagcggcaccgagttcaccctgacagtctctagcctccagcctgacgacttcgccacctactactgccagcagtattacagctactcctacaccttcggccagggcaccaagctggaaatcaagctcgagggacagcctaaggccaatcctaccgtgacactgttccctccaagcagcgaagaactccaggccaacaaggccacacttgtgtgcctgatctccgacttctaccctggggctgtgacagtggcttggaaggccgatggatctcctgtgaaagccggcgtggaaaccaccaagccatccaagcagagcaacaacaaatacgccgccagctcctacctgagcctgacacctgagcagtggaagtcccacagatcctacagctgccaagtgacccacgaaggcagcaccgtggaaaagacagtggcccctacagagtgcagcggatcccagagcttcggcctgctggaccccaagctgtgctacctgctggatggcatcctgttcatctacggcgtgatcctgaccgccctgttcctgagagtgaagttcagcagaagcgccgacgcccctgcctaccagcagggacagaaccaactgtacaacgagctgaacctgggcagacgggaagagtacgacgtgctggacaagcggagaggcagggaccctgagatgggcggaaagccccagcggagaaagaacccccaggaaggactgtataacgaactccagaaagacaagatggccgaagcctacagcgagatcggcatgaagggcgagcggagaagaggcaagggccacgatggcctgtaccagggcctgagcaccgccaccaaggacacctatgacgccctgcacatgcaggccctgcctccaagaagggccaagcgatctggatctggagcaacaaacttctcactactcaaacaagcaggtgacgtggaggagaatcccgggcctactagtatggactggatttggcgcatccttttccttgtcggcgctgctaccggcgcgcattccttcgaacaggtgcagctggttgaatctggtggcggagttgtgcagcctggcagaagcctgagactgagctgtgtggcctccggctttaccatcagcagctacggcatgaactgggtccgacaggcccctggcaaaggactggaatgggttgccgtgatctcctacgacggcggcaacaagtacagcgtggacagcgtgaagggcagattcaccatcagccgggacaacagcaagaacaccctgtacctccagatgaacagcctgagagccgaggacagcgccgtgtactattgtgccagaggccggtacttcgacctgtggggaagaggcacactggtcacagtttctagcacgcgtgcctctacaaagggaccctccgtgtttcctctggctcccagcagcaagtctacaagcggaggaacagccgctctgggctgcctggtcaaggattactttcccgagcctgtgaccgtgtcctggaatagcggagcactgacaagcggcgtgcacacctttccagccgtgctgcaaagcagcggcctgtactctctgagcagcgtggtcacagtgcctagctctagcctgggcacccagacctacatctgcaatgtgaaccacaagcctagcaacaccaaggtggacaagagagtggaacccaagagctgtggtaccgtggtcgagaaagaacatccacagcttggcgctggcaccgtcctgttgcttagagccggattctatgccgtcagcttcctgtccgtggctgtggggtctacagtgtattaccagggaaaatgtctcacctggaaaggccccagacgccagcttccagctgttgttcctgctccactgccaccaccttgtggctcctctgctcacttgcttccaccagtgcctggcggacgcgccaagagaagcggatctggcgtgaagcagaccctgaatttcgacctgctgaagctggctggcgacgtggaatccaacccaggcccttctagaggccatatgaccgagtacaagcccacggtgcgcctcgccacccgcgacgacgtccccagggccgtacgcaccctcgccgccgcgttcgccgactaccccgccacgcgccacaccgtcgatccggaccgccacatcgagcgggtcaccgagctgcaagaactcttcctcacgcgcgtcgggctcgacatcggcaaggtgtgggtcgcggacgacggcgccgcggtggcggtctggaccacgccggagagcgtcgaagcgggggcggtgttcgccgagatcggcccgcgcatggccgagttgagcggttcccggctggccgcgcagcaacagatggaaggcctcctggcgccgcaccggcccaaggagcccgcgtggttcctggccaccgtcggcgtctcgcccgaccaccagggcaagggtctgggcagcgccgtcgtgctccccggagtggaggcggccgagcgcgccggggtgcccgccttcctggagacctccgcgccccgcaacctccccttctacgagcggctcggcttcaccgtcaccgccgacgtcgaggtgcccgaaggaccgcgcacctggtgcatgacccgcaagcccggtgcctga

SEQ ID NO: 21882 - DNA, 2976 bp, synthetic construct
  source 1..2976: mol_type = other DNA
atggccttaccagtgaccgccttgctcctgccgctggccttgctgctccacgccgccaggccggacatccagatgacccagtctccaagcacactgagcgccagcgtgggcgacagagtgaccattacatgtagagccagccagagcatcagcaactggctggcctggtatcagcagaagccaggcagagcccctaacctgctgatctctaaggccagcagcctgaagtctggcgtgcccagcagattttctggctctggcagcggcaccgagttcaccctgacagtctctagcctccagcctgacgacttcgccacctactactgccagcagtattacagctactcctacaccttcggccagggcaccaagctggaaatcaagctcgaggacctgaagaacgtgttcccacctgaggtggccgtgttcgagcctagcgaggccgagatcagccacacccagaaagccaccctcgtgtgcctggctaccggcttctaccccgaccatgtggaactgtcttggtgggtcaacggcaaagaggtgcacagcggcgtgtctaccgacccccagccactgaaagaacagcccgccctgaacgacagccggtactgcctgagcagcagactgagagtgtccgccaccttctggcagaacccccggaaccacttcagatgccaggtgcagttctacggcctgagcgagaacgacgagtggacccaggacagagccaagcccgtgacccagatcgtgtctgccgaagcctggggcagagccgattgcggatcccagagcttcggcctgctggaccccaagctgtgctacctgctggatggcatcctgttcatctacggcgtgatcctgaccgccctgttcctgagagtgaagttcagcagaagcgccgacgcccctgcctaccagcagggacagaaccaactgtacaacgagctgaacctgggcagacgggaagagtacgacgtgctggacaagcggagaggcagggaccctgagatgggcggaaagccccagcggagaaagaacccccaggaaggactgtataacgaactccagaaagacaagatggccgaagcctacagcgagatcggcatgaagggcgagcggagaagaggcaagggccacgatggcctgtaccagggcctgagcaccgccaccaaggacacctatgacgccctgcacatgcaggccctgcctccaagaagggccaagcgatctggatctggagcaacaaacttctcactactcaaacaagcaggtgacgtggaggagaatcccgggcctactagtatggactggatttggcgcatccttttccttgtcggcgctgctaccggcgcgcattccttcgaacaggtgcagctggttgaatctggtggcggagttgtgcagcctggcagaagcctgagactgagctgtgtggcctccggctttaccatcagcagctacggcatgaactgggtccgacaggcccctggcaaaggactggaatgggttgccgtgatctcctacgacggcggcaacaagtacagcgtggacagcgtgaagggcagattcaccatcagccgggacaacagcaagaacaccctgtacctccagatgaacagcctgagagccgaggacagcgccgtgtactattgtgccagaggccggtacttcgacctgtggggaagaggcacactggtcacagtttctagcacgcgtatccagaaccctgatcctgccgtgtaccagctgcgggatagcaagagcagcgacaagagcgtgtgtctgttcaccgacttcgacagccagaccaacgtgtcccagagcaaggactccgacgtgtacatcaccgataagaccgtgctggacatgcggagcatggacttcaagagcaactccgccgtggcctggtccaacaagtccgatttcgcctgcgccaacgccttcaacaacagcattatccccgaggacacattcttcccaagccccgagagcagctgcggtaccggcgacatcgagaacaccagtctggcccctgaggaccctacctttcctgccgatacctggggcacctacctgctgaccacagagacaggactccagaaagatcacgccctgtgggaccacacagcccagaacctgctgagaatgggcctcgcctttctggtgctggttgccctcgtgtggttcctggtggaagattggctgagccggaagcggacaagagagagagccagcagagcctctacctgggagggaagaagaaggctgaacacccagacacttagggccaagcgatctggatctggagcaacaaacttctcactactcaaacaagcaggtgacgtggaggagaatcccgggccttctagaggccatatgaccgagtacaagcccacggtgcgcctcgccacccgcgacgacgtccccagggccgtacgcaccctcgccgccgcgttcgccgactaccccgccacgcgccacaccgtcgatccggaccgccacatcgagcgggtcaccgagctgcaagaactcttcctcacgcgcgtcgggctcgacatcggcaaggtgtgggtcgcggacgacggcgccgcggtggcggtctggaccacgccggagagcgtcgaagcgggggcggtgttcgccgagatcggcccgcgcatggccgagttgagcggttcccggctggccgcgcagcaacagatggaaggcctcctggcgccgcaccggcccaaggagcccgcgtggttcctggccaccgtcggcgtctcgcccgaccaccagggcaagggtctgggcagcgccgtcgtgctccccggagtggaggcggccgagcgcgccggggtgcccgccttcctggagacctccgcgccccgcaacctccccttctacgagcggctcggcttcaccgtcaccgccgacgtcgaggtgcccgaaggaccgcgcacctggtgcatgacccgcaagcccggtgcctga

SEQ ID NO: 21883 - DNA, 3174 bp, synthetic construct
  source 1..3174: mol_type = other DNA
atggccttaccagtgaccgccttgctcctgccgctggccttgctgctccacgccgccaggccggacatccagatgacccagtctccaagcacactgagcgccagcgtgggcgacagagtgaccattacatgtagagccagccagagcatcagcaactggctggcctggtatcagcagaagccaggcagagcccctaacctgctgatctctaaggccagcagcctgaagtctggcgtgcccagcagattttctggctctggcagcggcaccgagttcaccctgacagtctctagcctccagcctgacgacttcgccacctactactgccagcagtattacagctactcctacaccttcggccagggcaccaagctggaaatcaagctcgaggacctgaagaacgtgttcccacctgaggtggccgtgttcgagcctagcgaggccgagatcagccacacccagaaagccaccctcgtgtgcctggctaccggcttctaccccgaccatgtggaactgtcttggtgggtcaacggcaaagaggtgcacagcggcgtgtctaccgacccccagccactgaaagaacagcccgccctgaacgacagccggtactgcctgagcagcagactgagagtgtccgccaccttctggcagaacccccggaaccacttcagatgccaggtgcagttctacggcctgagcgagaacgacgagtggacccaggacagagccaagcccgtgacccagatcgtgtctgccgaagcctggggcagagccgattgcggatcccagagcttcggcctgctggaccccaagctgtgctacctgctggatggcatcctgttcatctacggcgtgatcctgaccgccctgttcctgagagtgaagttcagcagaagcgccgacgcccctgcctaccagcagggacagaaccaactgtacaacgagctgaacctgggcagacgggaagagtacgacgtgctggacaagcggagaggcagggaccctgagatgggcggaaagccccagcggagaaagaacccccaggaaggactgtataacgaactccagaaagacaagatggccgaagcctacagcgagatcggcatgaagggcgagcggagaagaggcaagggccacgatggcctgtaccagggcctgagcaccgccaccaaggacacctatgacgccctgcacatgcaggccctgcctccaagaagggccaagcgatctggatctggagcaacaaacttctcactactcaaacaagcaggtgacgtggaggagaatcccgggcctactagtatggactggatttggcgcatccttttccttgtcggcgctgctaccggcgcgcattccttcgaacaggtgcagctggttgaatctggtggcggagttgtgcagcctggcagaagcctgagactgagctgtgtggcctccggctttaccatcagcagctacggcatgaactgggtccgacaggcccctggcaaaggactggaatgggttgccgtgatctcctacgacggcggcaacaagtacagcgtggacagcgtgaagggcagattcaccatcagccgggacaacagcaagaacaccctgtacctccagatgaacagcctgagagccgaggacagcgccgtgtactattgtgccagaggccggtacttcgacctgtggggaagaggcacactggtcacagtttctagcacgcgtatccagaaccctgatcctgccgtgtaccagctgcgggatagcaagagcagcgacaagagcgtgtgtctgttcaccgacttcgacagccagaccaacgtgtcccagagcaaggactccgacgtgtacatcaccgataagaccgtgctggacatgcggagcatggacttcaagagcaactccgccgtggcctggtccaacaagtccgatttcgcctgcgccaacgccttcaacaacagcattatccccgaggacacattcttcccaagccccgagagcagctgcggtaccaagtctgtgcgcttttacctggtcgtcagccctgccagtgcctccactcagacatcttggaccccaagggaccttgtgtcctctcagacacagacacagtcctgcgtgccaccaactgctggcgcaagacaggctccagagtctcccagcacaatccccgtcccttctcagccccagaactccacacttaggccaggaccagctgctccaatcgcactggtcccagtgttctgcggactgctggttgccaagtctctggtgctgagcgcactcctcgtttggtggggcgatatttggtggaaaacgatgatggaattgagatccctcgatacgcagaaagccacatgccaccttcagcaagtcacagacttgccttggaccagcgtcagctctcccgtggaacgggaaattctgtatcatacagtggcccgcaccaagatttccgacgatgacgacgagcacacactgcgcgccaagagaagcggatctggcgtgaagcagaccctgaatttcgacctgctgaagctggctggcgacgtggaatccaacccaggcccttctagaggccatatgaccgagtacaagcccacggtgcgcctcgccacccgcgacgacgtccccagggccgtacgcaccctcgccgccgcgttcgccgactaccccgccacgcgccacaccgtcgatccggaccgccacatcgagcgggtcaccgagctgcaagaactcttcctcacgcgcgtcgggctcgacatcggcaaggtgtgggtcgcggacgacggcgccgcggtggcggtctggaccacgccggagagcgtcgaagcgggggcggtgttcgccgagatcggcccgcgcatggccgagttgagcggttcccggctggccgcgcagcaacagatggaaggcctcctggcgccgcaccggcccaaggagcccgcgtggttcctggccaccgtcggcgtctcgcccgaccaccagggcaagggtctgggcagcgccgtcgtgctccccggagtggaggcggccgagcgcgccggggtgcccgccttcctggagacctccgcgccccgcaacctccccttctacgagcggctcggcttcaccgtcaccgccgacgtcgaggtgcccgaaggaccgcgcacctggtgcatgacccgcaagcccggtgcctga

SEQ ID NO: 21884 - DNA, 2934 bp, synthetic construct
  source 1..2934: mol_type = other DNA
atggccttaccagtgaccgccttgctcctgccgctggccttgctgctccacgccgccaggccggacatccagatgacccagtctccaagcacactgagcgccagcgtgggcgacagagtgaccattacatgtagagccagccagagcatcagcaactggctggcctggtatcagcagaagccaggcagagcccctaacctgctgatctctaaggccagcagcctgaagtctggcgtgcccagcagattttctggctctggcagcggcaccgagttcaccctgacagtctctagcctccagcctgacgacttcgccacctactactgccagcagtattacagctactcctacaccttcggccagggcaccaagctggaaatcaagctcgaggacctgaagaacgtgttcccacctgaggtggccgtgttcgagcctagcgaggccgagatcagccacacccagaaagccaccctcgtgtgcctggctaccggcttctaccccgaccatgtggaactgtcttggtgggtcaacggcaaagaggtgcacagcggcgtgtctaccgacccccagccactgaaagaacagcccgccctgaacgacagccggtactgcctgagcagcagactgagagtgtccgccaccttctggcagaacccccggaaccacttcagatgccaggtgcagttctacggcctgagcgagaacgacgagtggacccaggacagagccaagcccgtgacccagatcgtgtctgccgaagcctggggcagagccgattgcggatcccagagcttcggcctgctggaccccaagctgtgctacctgctggatggcatcctgttcatctacggcgtgatcctgaccgccctgttcctgagagtgaagttcagcagaagcgccgacgcccctgcctaccagcagggacagaaccaactgtacaacgagctgaacctgggcagacgggaagagtacgacgtgctggacaagcggagaggcagggaccctgagatgggcggaaagccccagcggagaaagaacccccaggaaggactgtataacgaactccagaaagacaagatggccgaagcctacagcgagatcggcatgaagggcgagcggagaagaggcaagggccacgatggcctgtaccagggcctgagcaccgccaccaaggacacctatgacgccctgcacatgcaggccctgcctccaagaagggccaagcgatctggatctggagcaacaaacttctcactactcaaacaagcaggtgacgtggaggagaatcccgggcctactagtatggactggatttggcgcatccttttccttgtcggcgctgctaccggcgcgcattccttcgaacaggtgcagctggttgaatctggtggcggagttgtgcagcctggcagaagcctgagactgagctgtgtggcctccggctttaccatcagcagctacggcatgaactgggtccgacaggcccctggcaaaggactggaatgggttgccgtgatctcctacgacggcggcaacaagtacagcgtggacagcgtgaagggcagattcaccatcagccgggacaacagcaagaacaccctgtacctccagatgaacagcctgagagccgaggacagcgccgtgtactattgtgccagaggccggtacttcgacctgtggggaagaggcacactggtcacagtttctagcacgcgtatccagaaccctgatcctgccgtgtaccagctgcgggatagcaagagcagcgacaagagcgtgtgtctgttcaccgacttcgacagccagaccaacgtgtcccagagcaaggactccgacgtgtacatcaccgataagaccgtgctggacatgcggagcatggacttcaagagcaactccgccgtggcctggtccaacaagtccgatttcgcctgcgccaacgccttcaacaacagcattatccccgaggacacattcttcccaagccccgagagcagctgcggtaccgtggtcgagaaagaacatccacagcttggcgctggcaccgtcctgttgcttagagccggattctatgccgtcagcttcctgtccgtggctgtggggtctacagtgtattaccagggaaaatgtctcacctggaaaggccccagacgccagcttccagctgttgttcctgctccactgccaccaccttgtggctcctctgctcacttgcttccaccagtgcctggcggacgcgccaagagaagcggatctggcgtgaagcagaccctgaatttcgacctgctgaagctggctggcgacgtggaatccaacccaggcccttctagaggccatatgaccgagtacaagcccacggtgcgcctcgccacccgcgacgacgtccccagggccgtacgcaccctcgccgccgcgttcgccgactaccccgccacgcgccacaccgtcgatccggaccgccacatcgagcgggtcaccgagctgcaagaactcttcctcacgcgcgtcgggctcgacatcggcaaggtgtgggtcgcggacgacggcgccgcggtggcggtctggaccacgccggagagcgtcgaagcgggggcggtgttcgccgagatcggcccgcgcatggccgagttgagcggttcccggctggccgcgcagcaacagatggaaggcctcctggcgccgcaccggcccaaggagcccgcgtggttcctggccaccgtcggcgtctcgcccgaccaccagggcaagggtctgggcagcgccgtcgtgctccccggagtggaggcggccgagcgcgccggggtgcccgccttcctggagacctccgcgccccgcaacctccccttctacgagcggctcggcttcaccgtcaccgccgacgtcgaggtgcccgaaggaccgcgcacctggtgcatgacccgcaagcccggtgcctga

SEQ ID NO: 21885 - DNA, 2847 bp, synthetic construct
  source 1..2847: mol_type = other DNA
atggccttaccagtgaccgccttgctcctgccgctggccttgctgctccacgccgccaggccggacatccagatgacccagtctccaagcacactgagcgccagcgtgggcgacagagtgaccattacatgtagagccagccagagcatcagcaactggctggcctggtatcagcagaagccaggcagagcccctaacctgctgatctctaaggccagcagcctgaagtctggcgtgcccagcagattttctggctctggcagcggcaccgagttcaccctgacagtctctagcctccagcctgacgacttcgccacctactactgccagcagtattacagctactcctacaccttcggccagggcaccaagctggaaatcaagctcgagggacagcctaaggccaatcctaccgtgacactgttccctccaagcagcgaagaactccaggccaacaaggccacacttgtgtgcctgatctccgacttctaccctggggctgtgacagtggcttggaaggccgatggatctcctgtgaaagccggcgtggaaaccaccaagccatccaagcagagcaacaacaaatacgccgccagctcctacctgagcctgacacctgagcagtggaagtcccacagatcctacagctgccaagtgacccacgaaggcagcaccgtggaaaagacagtggcccctacagagtgcagcggatcccagagcttcggcctgctggaccccaagctgtgctacctgctggatggcatcctgttcatctacggcgtgatcctgaccgccctgttcctgagagtgaagttcagcagaagcgccgacgcccctgcctaccagcagggacagaaccaactgtacaacgagctgaacctgggcagacgggaagagtacgacgtgctggacaagcggagaggcagggaccctgagatgggcggaaagccccagcggagaaagaacccccaggaaggactgtataacgaactccagaaagacaagatggccgaagcctacagcgagatcggcatgaagggcgagcggagaagaggcaagggccacgatggcctgtaccagggcctgagcaccgccaccaaggacacctatgacgccctgcacatgcaggccctgcctccaagaagggccaagcgatctggatctggagcaacaaacttctcactactcaaacaagcaggtgacgtggaggagaatcccgggcctactagtatggactggatttggcgcatccttttccttgtcggcgctgctaccggcgcgcattccttcgaacaggtgcagctggttgaatctggtggcggagttgtgcagcctggcagaagcctgagactgagctgtgtggcctccggctttaccatcagcagctacggcatgaactgggtccgacaggcccctggcaaaggactggaatgggttgccgtgatctcctacgacggcggcaacaagtacagcgtggacagcgtgaagggcagattcaccatcagccgggacaacagcaagaacaccctgtacctccagatgaacagcctgagagccgaggacagcgccgtgtactattgtgccagaggccggtacttcgacctgtggggaagaggcacactggtcacagtttctagcacgcgtgcctctacaaagggaccctccgtgtttcctctggctcccagcagcaagtctacaagcggaggaacagccgctctgggctgcctggtcaaggattactttcccgagcctgtgaccgtgtcctggaatagcggagcactgacaagcggcgtgcacacctttccagccgtgctgcaaagcagcggcctgtactctctgagcagcgtggtcacagtgcctagctctagcctgggcacccagacctacatctgcaatgtgaaccacaagcctagcaacaccaaggtggacaagagagtggaacccaagagctgtggtaccatcactcaaggtttggcagtgtcaaccatctcatcattctttccacctggctaccaagtgtccttctgcctggtcatggtgctgctgttcgccgtggataccggcctgtacttcagcgtcaagaccaacatccggtccagcaccagagactggaaggaccacaagttcaagtggcggaaggaccctcaggacaagagggccaagcgatctggatctggagcaacaaacttctcactactcaaacaagcaggtgacgtggaggagaatcccgggccttctagaggccatatgaccgagtacaagcccacggtgcgcctcgccacccgcgacgacgtccccagggccgtacgcaccctcgccgccgcgttcgccgactaccccgccacgcgccacaccgtcgatccggaccgccacatcgagcgggtcaccgagctgcaagaactcttcctcacgcgcgtcgggctcgacatcggcaaggtgtgggtcgcggacgacggcgccgcggtggcggtctggaccacgccggagagcgtcgaagcgggggcggtgttcgccgagatcggcccgcgcatggccgagttgagcggttcccggctggccgcgcagcaacagatggaaggcctcctggcgccgcaccggcccaaggagcccgcgtggttcctggccaccgtcggcgtctcgcccgaccaccagggcaagggtctgggcagcgccgtcgtgctccccggagtggaggcggccgagcgcgccggggtgcccgccttcctggagacctccgcgccccgcaacctccccttctacgagcggctcggcttcaccgtcaccgccgacgtcgaggtgcccgaaggaccgcgcacctggtgcatgacccgcaagcccggtgcctga

SEQ ID NO: 21886 - DNA, 2892 bp, synthetic construct
  source 1..2892: mol_type = other DNA
atggccttaccagtgaccgccttgctcctgccgctggccttgctgctccacgccgccaggccggacatccagatgacccagtctccaagcacactgagcgccagcgtgggcgacagagtgaccattacatgtagagccagccagagcatcagcaactggctggcctggtatcagcagaagccaggcagagcccctaacctgctgatctctaaggccagcagcctgaagtctggcgtgcccagcagattttctggctctggcagcggcaccgagttcaccctgacagtctctagcctccagcctgacgacttcgccacctactactgccagcagtattacagctactcctacaccttcggccagggcaccaagctggaaatcaagctcgaggacctgaagaacgtgttcccacctgaggtggccgtgttcgagcctagcgaggccgagatcagccacacccagaaagccaccctcgtgtgcctggctaccggcttctaccccgaccatgtggaactgtcttggtgggtcaacggcaaagaggtgcacagcggcgtgtctaccgacccccagccactgaaagaacagcccgccctgaacgacagccggtactgcctgagcagcagactgagagtgtccgccaccttctggcagaacccccggaaccacttcagatgccaggtgcagttctacggcctgagcgagaacgacgagtggacccaggacagagccaagcccgtgacccagatcgtgtctgccgaagcctggggcagagccgattgcggatcccagagcttcggcctgctggaccccaagctgtgctacctgctggatggcatcctgttcatctacggcgtgatcctgaccgccctgttcctgagagtgaagttcagcagaagcgccgacgcccctgcctaccagcagggacagaaccaactgtacaacgagctgaacctgggcagacgggaagagtacgacgtgctggacaagcggagaggcagggaccctgagatgggcggaaagccccagcggagaaagaacccccaggaaggactgtataacgaactccagaaagacaagatggccgaagcctacagcgagatcggcatgaagggcgagcggagaagaggcaagggccacgatggcctgtaccagggcctgagcaccgccaccaaggacacctatgacgccctgcacatgcaggccctgcctccaagaagggccaagcgatctggatctggagcaacaaacttctcactactcaaacaagcaggtgacgtggaggagaatcccgggcctactagtatggactggatttggcgcatccttttccttgtcggcgctgctaccggcgcgcattccttcgaacaggtgcagctggttgaatctggtggcggagttgtgcagcctggcagaagcctgagactgagctgtgtggcctccggctttaccatcagcagctacggcatgaactgggtccgacaggcccctggcaaaggactggaatgggttgccgtgatctcctacgacggcggcaacaagtacagcgtggacagcgtgaagggcagattcaccatcagccgggacaacagcaagaacaccctgtacctccagatgaacagcctgagagccgaggacagcgccgtgtactattgtgccagaggccggtacttcgacctgtggggaagaggcacactggtcacagtttctagcacgcgtatccagaaccctgatcctgccgtgtaccagctgcgggatagcaagagcagcgacaagagcgtgtgtctgttcaccgacttcgacagccagaccaacgtgtcccagagcaaggactccgacgtgtacatcaccgataagaccgtgctggacatgcggagcatggacttcaagagcaactccgccgtggcctggtccaacaagtccgatttcgcctgcgccaacgccttcaacaacagcattatccccgaggacacattcttcccaagccccgagagcagctgcggtaccatcactcaaggtttggcagtgtcaaccatctcatcattctttccacctggctaccaagtgtccttctgcctggtcatggtgctgctgttcgccgtggataccggcctgtacttcagcgtcaagaccaacatccggtccagcaccagagactggaaggaccacaagttcaagtggcggaaggaccctcaggacaagagggccaagcgatctggatctggagcaacaaacttctcactactcaaacaagcaggtgacgtggaggagaatcccgggccttctagaggccatatgaccgagtacaagcccacggtgcgcctcgccacccgcgacgacgtccccagggccgtacgcaccctcgccgccgcgttcgccgactaccccgccacgcgccacaccgtcgatccggaccgccacatcgagcgggtcaccgagctgcaagaactcttcctcacgcgcgtcgggctcgacatcggcaaggtgtgggtcgcggacgacggcgccgcggtggcggtctggaccacgccggagagcgtcgaagcgggggcggtgttcgccgagatcggcccgcgcatggccgagttgagcggttcccggctggccgcgcagcaacagatggaaggcctcctggcgccgcaccggcccaaggagcccgcgtggttcctggccaccgtcggcgtctcgcccgaccaccagggcaagggtctgggcagcgccgtcgtgctccccggagtggaggcggccgagcgcgccggggtgcccgccttcctggagacctccgcgccccgcaacctccccttctacgagcggctcggcttcaccgtcaccgccgacgtcgaggtgcccgaaggaccgcgcacctggtgcatgacccgcaagcccggtgcctga

SEQ ID NO: 21887 - DNA, 1941 bp, synthetic construct
  source 1..1941: mol_type = other DNA
atggccttaccagtgaccgccttgctcctgccgctggccttgctgctccacgccgccaggccggacatccagatgacccagtctccaagcacactgagcgccagcgtgggcgacagagtgaccattacatgtagagccagccagagcatcagcaactggctggcctggtatcagcagaagccaggcagagcccctaacctgctgatctctaaggccagcagcctgaagtctggcgtgcccagcagattttctggctctggcagcggcaccgagttcaccctgacagtctctagcctccagcctgacgacttcgccacctactactgccagcagtattacagctactcctacaccttcggccagggcaccaagctggaaatcaagctcgagggacagcctaaggccaatcctaccgtgacactgttccctccaagcagcgaagaactccaggccaacaaggccacacttgtgtgcctgatctccgacttctaccctggggctgtgacagtggcttggaaggccgatggatctcctgtgaaagccggcgtggaaaccaccaagccatccaagcagagcaacaacaaatacgccgccagctcctacctgagcctgacacctgagcagtggaagtcccacagatcctacagctgccaagtgacccacgaaggcagcaccgtggaaaagacagtggcccctacagagtgcagcggatccctgggagagcctcagctgtgctatatcctggacgccatcctgtttctgtacggcatcgtgctgaccctgctgtactgccggctgaagatccaagtgcggaaggccgccatcaccagctacgagaaatccgacggcgtgtacaccggcctgagcaccagaaatcaagagacatacgagacactgaagcacgaaaagcctccacaaagggccaagcgatctggatctggagcaacaaacttctcactactcaaacaagcaggtgacgtggaggagaatcccgggcctactagtatggactggatttggcgcatccttttccttgtcggcgctgctaccggcgcgcattccttcgaacaggtgcagctggttgaatctggtggcggagttgtgcagcctggcagaagcctgagactgagctgtgtggcctccggctttaccatcagcagctacggcatgaactgggtccgacaggcccctggcaaaggactggaatgggttgccgtgatctcctacgacggcggcaacaagtacagcgtggacagcgtgaagggcagattcaccatcagccgggacaacagcaagaacaccctgtacctccagatgaacagcctgagagccgaggacagcgccgtgtactattgtgccagaggccggtacttcgacctgtggggaagaggcacactggtcacagtttctagcacgcgtgcctctacaaagggaccctccgtgtttcctctggctcccagcagcaagtctacaagcggaggaacagccgctctgggctgcctggtcaaggattactttcccgagcctgtgaccgtgtcctggaatagcggagcactgacaagcggcgtgcacacctttccagccgtgctgcaaagcagcggcctgtactctctgagcagcgtggtcacagtgcctagctctagcctgggcacccagacctacatctgcaatgtgaaccacaagcctagcaacaccaaggtggacaagagagtggaacccaagagctgtggtaccctcggagaaccacagctctgttacattctggatgctatcctgttcctctatgggatcgtcctgacactcctgtattgcagactcaaaattcaagttcgcaaagccgccattacctcttacgagaagagtgatggggtgtacacaggactgtctacccggaatcaagaaacctacgaaaccctcaaacatgagaagccacctcagtaa

SEQ ID NO: 21888 - DNA, 3072 bp, synthetic construct
  source 1..3072: mol_type = other DNA
atggccttaccagtgaccgccttgctcctgccgctggccttgctgctccacgccgccaggccggacatccagatgacccagtctccaagcacactgagcgccagcgtgggcgacagagtgaccattacatgtagagccagccagagcatcagcaactggctggcctggtatcagcagaagccaggcagagcccctaacctgctgatctctaaggccagcagcctgaagtctggcgtgcccagcagattttctggctctggcagcggcaccgagttcaccctgacagtctctagcctccagcctgacgacttcgccacctactactgccagcagtattacagctactcctacaccttcggccagggcaccaagctggaaatcaagggacagcctaaggccaatcctaccgtgacactgttccctccaagcagcgaagaactccaggccaacaaggccacacttgtgtgcctgatctccgacttctaccctggggctgtgacagtggcttggaaggccgatggatctcctgtgaaagccggcgtggaaaccaccaagccatccaagcagagcaacaacaaatacgccgccagctcctacctgagcctgacacctgagcagtggaagtcccacagatcctacagctgccaagtgacccacgaaggcagcaccgtggaaaagacagtggcccctacagagtgcagcggatcccagagcttcggcctgctggaccccaagctgtgctacctgctggatggcatcctgttcatctacggcgtgatcctgaccgccctgttcctgagagtgaagttcagcagaagcgccgacgcccctgcctaccagcagggacagaaccaactgtacaacgagctgaacctgggcagacgggaagagtacgacgtgctggacaagcggagaggcagggaccctgagatgggcggaaagccccggagaaagaacccccaggaaggactgtataacgaactccagaaagacaagatggccgaagcctacagcgagatcggcatgaagggcgagcggagaagaggcaagggccacgatggcctgtaccagggcctgagcaccgccaccaaggacacctatgacgccctgcacatgcaggccctgcctccaagaagggccaagcgatctggatctggagcaacaaacttctcactactcaaacaagcaggtgacgtggaggagaatcccgggcctactagtatggactggatttggcgcatccttttccttgtcggcgctgctaccggcgcgcattccttcgaacaggtgcagctggttgaatctggtggcggagttgtgcagcctggcagaagcctgagactgagctgtgtggcctccggctttaccatcagcagctacggcatgaactgggtccgacaggcccctggcaaaggactggaatgggttgccgtgatctcctacgacggcggcaacaagtacagcgtggacagcgtgaagggcagattcaccatcagccgggacaacagcaagaacaccctgtacctccagatgaacagcctgagagccgaggacagcgccgtgtactattgtgccagaggccggtacttcgacctgtggggaagaggcacactggtcacagtttctagcgcctctacaaagggaccctccgtgtttcctctggctcccagcagcaagtctacaagcggaggaacagccgctctgggctgcctggtcaaggattactttcccgagcctgtgaccgtgtcctggaatagcggagcactgacaagcggcgtgcacacctttccagccgtgctgcaaagcagcggcctgtactctctgagcagcgtggtcacagtgcctagctctagcctgggcacccagacctacatctgcaatgtgaaccacaagcctagcaacaccaaggtggacaagagagtggaacccaagagctgtggtacccagagttttgggttgttggaccctaaattgtgctatctgttggacggaatcctgttcatttacggagtgatcctgaccgcattgttcctgcgggttaagttttccagatccgcagacgcacccgcttaccaacaagggcagaaccaactctacaatgaacttaatttggggcggagggaagagtacgacgttctggacaaaaggaggggacgagatcccgagatgggcggaaagcctcgaaggaagaatccgcaagaggggctttataacgaactccagaaagataaaatggcagaagcctatagtgagattgggatgaagggagaaaggaggaggggtaaaggtcacgatgggttgtaccaaggattgagcacagccactaaagatacctatgatgcgctccacatgcaggccctgccgccaagacgcgccaagagaagcggatctggcgtgaagcagaccctgaatttcgacctgctgaagctggctggcgacgtggaatccaacccaggcccttctagaggccatatgaccgagtacaagcccacggtgcgcctcgccacccgcgacgacgtccccagggccgtacgcaccctcgccgccgcgttcgccgactaccccgccacgcgccacaccgtcgatccggaccgccacatcgagcgggtcaccgagctgcaagaactcttcctcacgcgcgtcgggctcgacatcggcaaggtgtgggtcgcggacgacggcgccgcggtggcggtctggaccacgccggagagcgtcgaagcgggggcggtgttcgccgagatcggcccgcgcatggccgagttgagcggttcccggctggccgcgcagcaacagatggaaggcctcctggcgccgcaccggcccaaggagcccgcgtggttcctggccaccgtcggcgtctcgcccgaccaccagggcaagggtctgggcagcgccgtcgtgctccccggagtggaggcggccgagcgcgccggggtgcccgccttcctggagacctccgcgccccgcaacctccccttctacgagcggctcggcttcaccgtcaccgccgacgtcgaggtgcccgaaggaccgcgcacctggtgcatgacccgcaagcccggtgcctga

SEQ ID NO: 21889 - DNA, 2427 bp, synthetic construct
  source 1..2427: mol_type = other DNA
atggccttaccagtgaccgccttgctcctgccgctggccttgctgctccacgccgccaggccggacatccagatgacccagtctccaagcacactgagcgccagcgtgggcgacagagtgaccattacatgtagagccagccagagcatcagcaactggctggcctggtatcagcagaagccaggcagagcccctaacctgctgatctctaaggccagcagcctgaagtctggcgtgcccagcagattttctggctctggcagcggcaccgagttcaccctgacagtctctagcctccagcctgacgacttcgccacctactactgccagcagtattacagctactcctacaccttcggccagggcaccaagctggaaatcaagctcgaggacctgaagaacgtgttcccacctgaggtggccgtgttcgagcctagcgaggccgagatcagccacacccagaaagccaccctcgtgtgcctggctaccggcttctaccccgaccatgtggaactgtcttggtgggtcaacggcaaagaggtgcacagcggcgtgtctaccgacccccagccactgaaagaacagcccgccctgaacgacagccggtactgcctgagcagcagactgagagtgtccgccaccttctggcagaacccccggaaccacttcagatgccaggtgcagttctacggcctgagcgagaacgacgagtggacccaggacagagccaagcccgtgacccagatcgtgtctgccgaagcctggggcagagccgattgcggatcccagagcttcggcctgctggaccccaagctgtgctacctgctggatggcatcctgttcatctacggcgtgatcctgaccgccctgttcctgagagtgaagttcagcagaagcgccgacgcccctgcctaccagcagggacagaaccaactgtacaacgagctgaacctgggcagacgggaagagtacgacgtgctggacaagcggagaggcagggaccctgagatgggcggaaagccccggagaaagaacccccaggaaggactgtataacgaactccagaaagacaagatggccgaagcctacagcgagatcggcatgaagggcgagcggagaagaggcaagggccacgatggcctgtaccagggcctgagcaccgccaccaaggacacctatgacgccctgcacatgcaggccctgcctccaagaagggccaagcgatctggatctggagcaacaaacttctcactactcaaacaagcaggtgacgtggaggagaatcccgggcctactagtatggactggatttggcgcatccttttccttgtcggcgctgctaccggcgcgcattccttcgaacaggtgcagctggttgaatctggtggcggagttgtgcagcctggcagaagcctgagactgagctgtgtggcctccggctttaccatcagcagctacggcatgaactgggtccgacaggcccctggcaaaggactggaatgggttgccgtgatctcctacgacggcggcaacaagtacagcgtggacagcgtgaagggcagattcaccatcagccgggacaacagcaagaacaccctgtacctccagatgaacagcctgagagccgaggacagcgccgtgtactattgtgccagaggccggtacttcgacctgtggggaagaggcacactggtcacagtttctagcacgcgtatccagaaccctgatcctgccgtgtaccagctgcgggatagcaagagcagcgacaagagcgtgtgtctgttcaccgacttcgacagccagaccaacgtgtcccagagcaaggactccgacgtgtacatcaccgataagaccgtgctggacatgcggagcatggacttcaagagcaactccgccgtggcctggtccaacaagtccgatttcgcctgcgccaacgccttcaacaacagcattatccccgaggacacattcttcccaagccccgagagcagctgcggtacccagagttttgggttgttggaccctaaattgtgctatctgttggacggaatcctgttcatttacggagtgatcctgaccgcattgttcctgcgggttaagttttccagatccgcagacgcacccgcttaccaacaagggcagaaccaactctacaatgaacttaatttggggcggagggaagagtacgacgttctggacaaaaggaggggacgagatcccgagatgggcggaaagcctcgaaggaagaatccgcaagaggggctttataacgaactccagaaagataaaatggcagaagcctatagtgagattgggatgaagggagaaaggaggaggggtaaaggtcacgatgggttgtaccaaggattgagcacagccactaaagatacctatgatgcgctccacatgcaggccctgccgccaaga

SEQ ID NO: 21890 - DNA, 1527 bp, synthetic construct
  source 1..1527: mol_type = other DNA
atggccttaccagtgaccgccttgctcctgccgctggccttgctgctccacgccgccaggccggacatccagatgacacagagcccctctagcctgtctgccagcgtgggagacagagtgaccatcacctgtagagccagccagagcatcagaaactacctgaactggtatcagcaaaagcccggcaaggcccctgagctgctgattcatgctgcaagcagcctccagagcggcgtgccaagcagattttctggcagcggcagcggaaccgacttcaccctgacaatatctagcctccagcctgaggacttcgccagctactactgccagcagagctacagcgcccctcctatcacctttggacagggcaccagactggaaatcaagggcggaggcggaagtggaggcggaggatctggcggcggaggctctcaggttcagctccagcagtctggacctggcctggtcaagcctagccagacactgtctctgacctgtgccatcagcggcgatagcgtgtcctctaatagagccgcctggaactggatcagacagagccctagcagaggactccagtggctgggcagaacctactaccgcagcaagtggtacaacgactacgccgtgtctctgcggagccggatcaccatcaatcccgtgaccagcaagaaccaggtggccctgcacatgaacagcgtgacccctgaagataccgccgtgtactactgtgccagagccggaattgtggtggtgcccggacctgagacattctactactacgaccacggcctggacgtgtggggccagggaacaacagtgactgtctcttctacgcgtgagcagaaactgatctcggaagaggatctgaaaattgaagttatgtatcctcctccttacctagacaatgagaagagcaatggaaccattatccatgtgaaagggaaacacctttgtccaagtcccctatttcccggaccttctaagcccttttgggtgctggtggtggttgggggagtcctggcttgctatagcttgctagtaacagtggcctttattattttctgggtgaggagtaagaggagcaggctcctgcacagtgactacatgaacatgactccacgccgccccggacccacccgcaagcattaccagccctatgccccaccacgcgacttcgcagcctatcgctccagagtgaagttcagcaggagcgcagacgcccccgcgtaccagcagggccagaaccagctctataacgagctcaatctaggacgaagagaggagtacgatgttttggacaagagacgtggccgggaccctgagatggggggaaagccgagaaggaagaaccctcaggaaggcctgtacaatgaactgcagaaagataagatggcggaggcctacagtgagattgggatgaaaggcgagcgccggaggggcaaggggcacgatggcctttaccagggtctcagtacagccaccaaggacacctacgacgcccttcacatgcaggccctgccccctcgc

SEQ ID NO: 21891 - DNA, 1548 bp, synthetic construct
  source 1..1548: mol_type = other DNA
atggccttaccagtgaccgccttgctcctgccgctggccttgctgctccacgccgccaggccggacatccagatgacacagagcccctctagcctgtctgccagcgtgggagacagagtgaccatcacctgtagagccagccagagcatcagaaactacctgaactggtatcagcaaaagcccggcaaggcccctgagctgctgattcatgctgcaagcagcctccagagcggcgtgccaagcagattttctggcagcggcagcggaaccgacttcaccctgacaatatctagcctccagcctgaggacttcgccagctactactgccagcagagctacagcgcccctcctatcacctttggacagggcaccagactggaaatcaagggcggaggcggaagtggaggcggaggatctggcggcggaggctctcaggttcagctccagcagtctggacctggcctggtcaagcctagccagacactgtctctgacctgtgccatcagcggcgatagcgtgtcctctaatagagccgcctggaactggatcagacagagccctagcagaggactccagtggctgggcagaacctactaccgcagcaagtggtacaacgactacgccgtgtctctgcggagccggatcaccatcaatcccgtgaccagcaagaaccaggtggccctgcacatgaacagcgtgacccctgaagataccgccgtgtactactgtgccagagccggaattgtggtggtgcccggacctgagacattctactactacgaccacggcctggacgtgtggggccagggaacaacagtgactgtctcttctacgcgtgagcagaaactgatctcggaagaggatctggcgaagcccaccacgacgccagcgccgcgaccaccaacaccggcgcccaccatcgcgtcgcagcccctgtccctgcgcccagaggcgtgccggccagcggcggggggcgcagtgcacacgagggggctggacttcgcctgtgacatctacatctgggcgcccttggccgggacttgtggggtccttctcctgtcactggttatcaccctttactgcaaacggggcagaaagaaactcctgtatatattcaaacaaccatttatgagaccagtacaaactactcaagaggaagatggctgtagctgccgatttccagaagaagaagaaggaggatgtgaactgagagtgaagttcagcaggagcgcagacgcccccgcgtaccagcagggccagaaccagctctataacgagctgaatctaggacgaagagaggagtacgatgttttggacaagagacgtggccgggaccctgagatggggggaaagccgagaaggaagaaccctcaggaaggcctgtacaatgaactgcagaaagataagatggcggaggcctacagtgagattgggatgaaaggcgagcgccggaggggcaaggggcacgatggcctttaccagggtctcagtacagccaccaaggacacctacgacgcccttcacatgcaggccctgccccctcgctga

SEQ ID NO: 21892 - DNA, 1548 bp, synthetic construct
  source 1..1548: mol_type = other DNA
atggccttaccagtgaccgccttgctcctgccgctggccttgctgctccacgccgccaggccgcaggttcagctccagcagtctggacctggcctggtcaagcctagccagacactgtctctgacctgtgccatcagcggcgatagcgtgtcctctaatagagccgcctggaactggatcagacagagccctagcagaggactccagtggctgggcagaacctactaccgcagcaagtggtacaacgactacgccgtgtctctgcggagccggatcaccatcaatcccgtgaccagcaagaaccaggtggccctgcacatgaacagcgtgacccctgaagataccgccgtgtactactgtgccagagccggaattgtggtggtgcccggacctgagacattctactactacgaccacggcctggacgtgtggggccagggaacaacagtgactgtctcttctggcggaggcggaagtggaggcggaggatctggcggcggaggctctgacatccagatgacacagagcccctctagcctgtctgccagcgtgggagacagagtgaccatcacctgtagagccagccagagcatcagaaactacctgaactggtatcagcaaaagcccggcaaggcccctgagctgctgattcatgctgcaagcagcctccagagcggcgtgccaagcagattttctggcagcggcagcggaaccgacttcaccctgacaatatctagcctccagcctgaggacttcgccagctactactgccagcagagctacagcgcccctcctatcacctttggacagggcaccagactggaaatcaagacgcgtgagcagaaactgatctcggaagaggatctggcgaagcccaccacgacgccagcgccgcgaccaccaacaccggcgcccaccatcgcgtcgcagcccctgtccctgcgcccagaggcgtgccggccagcggcggggggcgcagtgcacacgagggggctggacttcgcctgtgacatctacatctgggcgcccttggccgggacttgtggggtccttctcctgtcactggttatcaccctttactgcaaacggggcagaaagaaactcctgtatatattcaaacaaccatttatgagaccagtacaaactactcaagaggaagatggctgtagctgccgatttccagaagaagaagaaggaggatgtgaactgagagtgaagttcagcaggagcgcagacgcccccgcgtaccagcagggccagaaccagctctataacgagctgaatctaggacgaagagaggagtacgatgttttggacaagagacgtggccgggaccctgagatggggggaaagccgagaaggaagaaccctcaggaaggcctgtacaatgaactgcagaaagataagatggcggaggcctacagtgagattgggatgaaaggcgagcgccggaggggcaaggggcacgatggcctttaccagggtctcagtacagccaccaaggacacctacgacgcccttcacatgcaggccctgccccctcgctga

SEQ ID NO: 21893 - DNA, 2787 bp, synthetic construct
  source 1..2787: mol_type = other DNA
atggccttaccagtgaccgccttgctcctgccgctggccttgctgctccacgccgccaggccggacatccagatgacacagagcccctctagcctgtctgccagcgtgggagacagagtgaccatcacctgtagagccagccagagcatcagaaactacctgaactggtatcagcaaaagcccggcaaggcccctgagctgctgattcatgctgcaagcagcctccagagcggcgtgccaagcagattttctggcagcggcagcggaaccgacttcaccctgacaatatctagcctccagcctgaggacttcgccagctactactgccagcagagctacagcgcccctcctatcacctttggacagggcaccagactggaaatcaagggcggaggcggaagtggaggcggaggatctggcggcggaggctctcaggttcagctccagcagtctggacctggcctggtcaagcctagccagacactgtctctgacctgtgccatcagcggcgatagcgtgtcctctaatagagccgcctggaactggatcagacagagccctagcagaggactccagtggctgggcagaacctactaccgcagcaagtggtacaacgactacgccgtgtctctgcggagccggatcaccatcaatcccgtgaccagcaagaaccaggtggccctgcacatgaacagcgtgacccctgaagataccgccgtgtactactgtgccagagccggaattgtggtggtgcccggacctgagacattctactactacgaccacggcctggacgtgtggggccagggaacaacagtgactgtctcttctacgcgtgagcagaaactgatctcggaagaggatctggcgaagcccaccacgacgccagcgccgcgaccaccaacaccggcgcccaccatcgcgtcgcagcccctgtccctgcgcccagaggcgtgccggccagcggcggggggcgcagtgcacacgagggggctggacttcgcctgtgacatctacatctgggcgcccttggccgggacttgtggggtccttctcctgtcactggttatcaccctttactgcgggcgcgccagagtgaagttcagcaggagcgcagacgcccccgcgtaccagcagggccagaaccagctctataacgagctgaatctaggacgaagagaggagtacgatgttttggacaagagacgtggccgggaccctgagatggggggaaagccgagaaggaagaaccctcaggaaggcctgtacaatgaactgcagaaagataagatggcggaggcctacagtgagattgggatgaaaggcgagcgccggaggggcaaggggcacgatggcctttaccagggtctcagtacagccaccaaggacacctacgacgcccttcacatgcaggccctgccccctcgctctagaggatctggagcaacaaacttctcactactcaaacaagcaggtgacgtggaggagaatcccgggcctgggatccacatggccacttacgaggttctctgtgaggtggcgcggaaactgggcacggatgacagggaagtggtattgttcctcctaaacgtgttcatacctcaacccacactggcccaattaattggagctcttagagctttaaaggaggagggcaggttaacgtttcccctgttagcggaatgtctgtttcgtgcaggtcgcagagacctcttgcgcgacctgcttcacttagacccgcgttttttagagcgccacctagcgggcacaatgagttatttcagcccttatcagctcactgttctccacgtagacggggagctgtgtgcgagggatattaggtctttgatatttttaagcaaggacactatagggtctcgcagcacaccacagacattcttacactgggtgtactgtatggaaaacttagacctactgggtcccactgacgtggatgccctaatgtcaatgcttagatctttgtcaagagtagacctacagcgccaagtgcaaaccctaatgggccttcacctttccggcccatcacactcccaacactatcgccatacaccactcgagaccgatttctacgactacaaggacgacgatgacaagactagtggctccggcgagggcagaggaagtctactaacctgcggagatgtggaagaaaatcctggcccacatatgaccgagtacaagcccacggtgcgcctcgccacccgcgacgacgtccccagggccgtacgcaccctcgccgccgcgttcgccgactaccccgccacgcgccacaccgtcgatccggaccgccacatcgagcgggtcaccgagctgcaagaactcttcctcacgcgcgtcgggctcgacatcggcaaggtgtgggtcgcggacgacggcgccgcggtggcggtctggaccacgccggagagcgtcgaagcgggggcggtgttcgccgagatcggcccgcgcatggccgagttgagcggttcccggctggccgcgcagcaacagatggaaggcctcctggcgccgcaccggcccaaggagcccgcgtggttcctggccaccgtcggcgtctcgcccgaccaccagggcaagggtctgggcagcgccgtcgtgctccccggagtggaggcggccgagcgcgccggggtgcccgccttcctggagacctccgcgccccgcaacctccccttctacgagcggctcggcttcaccgtcaccgccgacgtcgaggtgcccgaaggaccgcgcacctggtgcatgacccgcaagcccggtgcctga

SEQ ID NO: 21894 - DNA, 2607 bp, synthetic construct
  source 1..2607: mol_type = other DNA
atggccttaccagtgaccgccttgctcctgccgctggccttgctgctccacgccgccaggccggacatccagatgacacagagcccctctagcctgtctgccagcgtgggagacagagtgaccatcacctgtagagccagccagagcatcagaaactacctgaactggtatcagcaaaagcccggcaaggcccctgagctgctgattcatgctgcaagcagcctccagagcggcgtgccaagcagattttctggcagcggcagcggaaccgacttcaccctgacaatatctagcctccagcctgaggacttcgccagctactactgccagcagagctacagcgcccctcctatcacctttggacagggcaccagactggaaatcaagctcgagatccagaaccctgatcctgccgtgtaccagctgcgggatagcaagagcagcgacaagagcgtgtgtctgttcaccgacttcgacagccagaccaacgtgtcccagagcaaggactccgacgtgtacatcaccgataagtgcgtgctggacatgcggagcatggacttcaagagcaactccgccgtggcctggtccaacaagtccgatttcgcctgcgccaacgccttcaacaacagcattatccccgaggacacattcttcccaagcagcgacgtgccctgcgacgtgaagctggtggaaaagagcttcgagacagacaccaacctgaacttccagaacctgagcgtgatcggcttcagaatcctgctgctgaaagtggccggctttaacctgctgatgaccctgcggctgtggtccagccgcgccaagagaagcggatctggcgtgaagcagaccctgaatttcgacctgctgaagctggctggcgacgtggaatccaacccaggccctactagtatggactggatttggcgcatccttttccttgtcggcgctgctaccggcgcgcattccttcgaacaggttcagctccagcagtctggacctggcctggtcaagcctagccagacactgtctctgacctgtgccatcagcggcgatagcgtgtcctctaatagagccgcctggaactggatcagacagagccctagcagaggactccagtggctgggcagaacctactaccgcagcaagtggtacaacgactacgccgtgtctctgcggagccggatcaccatcaatcccgtgaccagcaagaaccaggtggccctgcacatgaacagcgtgacccctgaagataccgccgtgtactactgtgccagagccggaattgtggtggtgcccggacctgagacattctactactacgaccacggcctggacgtgtggggccagggaacaacagtgactgtctcttctacgcgtgaggacctgaagaacgtgttcccacctgaggtggccgtgttcgagcctagcaaggccgagatcgcccacacccagaaagccaccctcgtgtgcctggctaccggcttctaccccgaccatgtggaactgtcttggtgggtcaacggcaaagaggtgcacagcggcgtgtgtaccgacccccagccactgaaagaacagcccgccctgaacgacagccggtactgcctgagcagcagactgagagtgtccgccaccttctggcagaacccccggaaccacttcagatgccaggtgcagttctacggcctgagcgagaacgacgagtggacccaggacagagccaagcccgtgacccagatcgtgtctgccgaagcctggggcagagccgattgcggcatcaccagcgccagctaccaccagggcgtgctgagcgccaccatcctgtacgagatcctgctgggcaaggccaccctgtacgccgtgctggtgtctgccctggtgctgatggctatggtcaagcggaaggacagccggggaagggccaagcgatctggatctggagcaacaaacttctcactactcaaacaagcaggtgacgtggaggagaatcccgggccttctagaggccatatgaccgagtacaagcccacggtgcgcctcgccacccgcgacgacgtccccagggccgtacgcaccctcgccgccgcgttcgccgactaccccgccacgcgccacaccgtcgatccggaccgccacatcgagcgggtcaccgagctgcaagaactcttcctcacgcgcgtcgggctcgacatcggcaaggtgtgggtcgcggacgacggcgccgcggtggcggtctggaccacgccggagagcgtcgaagcgggggcggtgttcgccgagatcggcccgcgcatggccgagttgagcggttcccggctggccgcgcagcaacagatggaaggcctcctggcgccgcaccggcccaaggagcccgcgtggttcctggccaccgtcggcgtctcgcccgaccaccagggcaagggtctgggcagcgccgtcgtgctccccggagtggaggcggccgagcgcgccggggtgcccgccttcctggagacctccgcgccccgcaacctccccttctacgagcggctcggcttcaccgtcaccgccgacgtcgaggtgcccgaaggaccgcgcacctggtgcatgacccgcaagcccggtgcctga

SEQ ID NO: 21895 - DNA, 2604 bp, synthetic construct
  source 1..2604: mol_type = other DNA
atggccttaccagtgaccgccttgctcctgccgctggccttgctgctccacgccgccaggccggacatccagatgacacagagcccctctagcctgtctgccagcgtgggagacagagtgaccatcacctgtagagccagccagagcatcagaaactacctgaactggtatcagcaaaagcccggcaaggcccctgagctgctgattcatgctgcaagcagcctccagagcggcgtgccaagcagattttctggcagcggcagcggaaccgacttcaccctgacaatatctagcctccagcctgaggacttcgccagctactactgccagcagagctacagcgcccctcctatcacctttggacagggcaccagactggaaatcaagctcgaggacctgaagaacgtgttcccacctgaggtggccgtgttcgagcctagcaaggccgagatcgcccacacccagaaagccaccctcgtgtgcctggctaccggcttctaccccgaccatgtggaactgtcttggtgggtcaacggcaaagaggtgcacagcggcgtgtgtaccgacccccagccactgaaagaacagcccgccctgaacgacagccggtactgcctgagcagcagactgagagtgtccgccaccttctggcagaacccccggaaccacttcagatgccaggtgcagttctacggcctgagcgagaacgacgagtggacccaggacagagccaagcccgtgacccagatcgtgtctgccgaagcctggggcagagccgattgcggcatcaccagcgccagctaccaccagggcgtgctgagcgccaccatcctgtacgagatcctgctgggcaaggccaccctgtacgccgtgctggtgtctgccctggtgctgatggctatggtcaagcggaaggacagccggggaagggccaagcgatctggatctggagcaacaaacttctcactactcaaacaagcaggtgacgtggaggagaatcccgggcctactagtatggactggatttggcgcatccttttccttgtcggcgctgctaccggcgcgcattccttcgaacaggttcagctccagcagtctggacctggcctggtcaagcctagccagacactgtctctgacctgtgccatcagcggcgatagcgtgtcctctaatagagccgcctggaactggatcagacagagccctagcagaggactccagtggctgggcagaacctactaccgcagcaagtggtacaacgactacgccgtgtctctgcggagccggatcaccatcaatcccgtgaccagcaagaaccaggtggccctgcacatgaacagcgtgacccctgaagataccgccgtgtactactgtgccagagccggaattgtggtggtgcccggacctgagacattctactactacgaccacggcctggacgtgtggggccagggaacaacagtgactgtctcttctacgcgtatccagaaccctgatcctgccgtgtaccagctgcgggatagcaagagcagcgacaagagcgtgtgtctgttcaccgacttcgacagccagaccaacgtgtcccagagcaaggactccgacgtgtacatcaccgataagtgcgtgctggacatgcggagcatggacttcaagagcaactccgccgtggcctggtccaacaagtccgatttcgcctgcgccaacgccttcaacaacagcattatccccgaggacacattcttcccaagcagcgacgtgccctgcgacgtgaagctggtggaaaagagcttcgagacagacaccaacctgaacttccagaacctgagcgtgatcggcttcagaatcctgctgctgaaagtggccggctttaacctgctgatgaccctgcggctgtggtccagccgcgccaagagaagcggatctggcgtgaagcagaccctgaatttcgacctgctgaagctggctggcgacgtggaatccaacccaggcccttctagaggccatatgaccgagtacaagcccacggtgcgcctcgccacccgcgacgacgtccccagggccgtacgcaccctcgccgccgcgttcgccgactaccccgccacgcgccacaccgtcgatccggaccgccacatcgagcgggtcaccgagctgcaagaactcttcctcacgcgcgtcgggctcgacatcggcaaggtgtgggtcgcggacgacggcgccgcggtggcggtctggaccacgccggagagcgtcgaagcgggggcggtgttcgccgagatcggcccgcgcatggccgagttgagcggttcccggctggccgcgcagcaacagatggaaggcctcctggcgccgcaccggcccaaggagcccgcgtggttcctggccaccgtcggcgtctcgcccgaccaccagggcaagggtctgggcagcgccgtcgtgctccccggagtggaggcggccgagcgcgccggggtgcccgccttcctggagacctccgcgccccgcaacctccccttctacgagcggctcggcttcaccgtcaccgccgacgtcgaggtgcccgaaggaccgcgcacctggtgcatgacccgcaagcccggtgcctga

SEQ ID NO: 21896 - DNA, 1902 bp, synthetic construct
  source 1..1902: mol_type = other DNA
atggccttaccagtgaccgccttgctcctgccgctggccttgctgctccacgccgccaggccggacatccagatgacacagagcccctctagcctgtctgccagcgtgggagacagagtgaccatcacctgtagagccagccagagcatcagaaactacctgaactggtatcagcaaaagcccggcaaggcccctgagctgctgattcatgctgcaagcagcctccagagcggcgtgccaagcagattttctggcagcggcagcggaaccgacttcaccctgacaatatctagcctccagcctgaggacttcgccagctactactgccagcagagctacagcgcccctcctatcacctttggacagggcaccagactggaaatcaagctcgaggacctgaagaacgtgttcccacctgaggtggccgtgttcgagcctagcgaggccgagatcagccacacccagaaagccaccctcgtgtgcctggctaccggcttctaccccgaccatgtggaactgtcttggtgggtcaacggcaaagaggtgcacagcggcgtgtgtaccgacccccagccactgaaagaacagcccgccctgaacgacagccggtactgcctgagcagcagactgagagtgtccgccaccttctggcagaacccccggaaccacttcagatgccaggtgcagttctacggcctgagcgagaacgacgagtggacccaggacagagccaagcccgtgacccagatcgtgtctgccgaagcctggggcagagccgattgcggctttaccagcgagagctaccagcagggcgtgctgagcgccaccatcctgtacgagatcctgctgggcaaggccaccctgtacgccgtgctggtgtctgccctggtgctgatggctatggtcaagcggaaggacagccggggaagggccaagcgatctggatctggagcaacaaacttctcactactcaaacaagcaggtgacgtggaggagaatcccgggcctactagtatggactggatttggcgcatccttttccttgtcggcgctgctaccggcgcgcattccttcgaacaggttcagctccagcagtctggacctggcctggtcaagcctagccagacactgtctctgacctgtgccatcagcggcgatagcgtgtcctctaatagagccgcctggaactggatcagacagagccctagcagaggactccagtggctgggcagaacctactaccgcagcaagtggtacaacgactacgccgtgtctctgcggagccggatcaccatcaatcccgtgaccagcaagaaccaggtggccctgcacatgaacagcgtgacccctgaagataccgccgtgtactactgtgccagagccggaattgtggtggtgcccggacctgagacattctactactacgaccacggcctggacgtgtggggccagggaacaacagtgactgtctcttctacgcgtatccagaaccctgatcctgccgtgtaccagctgcgggatagcaagagcagcgacaagagcgtgtgtctgttcaccgacttcgacagccagaccaacgtgtcccagagcaaggactccgacgtgtacatcaccgataagtgcgtgctggacatgcggagcatggacttcaagagcaactccgccgtggcctggtccaacaagtccgatttcgcctgcgccaacgccttcaacaacagcattatccccgaggacacattcttcccaagccccgagagcagctgcgacgtgaagctggtggaaaagagcttcgagacagacaccaacctgaacttccagaacctgagcgtgatcggcttcagaatcctgctgctgaaagtggccggctttaacctgctgatgaccctgcggctgtggtccagc

SEQ ID NO: 21897 - DNA, 2577 bp, synthetic construct
  source 1..2577: mol_type = other DNA
atggccttaccagtgaccgccttgctcctgccgctggccttgctgctccacgccgccaggccggacatccagatgacacagagcccctctagcctgtctgccagcgtgggagacagagtgaccatcacctgtagagccagccagagcatcagaaactacctgaactggtatcagcaaaagcccggcaaggcccctgagctgctgattcatgctgcaagcagcctccagagcggcgtgccaagcagattttctggcagcggcagcggaaccgacttcaccctgacaatatctagcctccagcctgaggacttcgccagctactactgccagcagagctacagcgcccctcctatcacctttggacagggcaccagactggaaatcaagctcgaggacctgaagaacgtgttcccacctgaggtggccgtgttcgagcctagcgaggccgagatcagccacacccagaaagccaccctcgtgtgcctggctaccggcttctaccccgaccatgtggaactgtcttggtgggtcaacggcaaagaggtgcacagcggcgtgtgtaccgacccccagccactgaaagaacagcccgccctgaacgacagccggtactgcctgagcagcagactgagagtgtccgccaccttctggcagaacccccggaaccacttcagatgccaggtgcagttctacggcctgagcgagaacgacgagtggacccaggacagagccaagcccgtgacccagatcgtgtctgccgaagcctggggcagagccgattgcggctttaccagcgagagctaccagcagggcgtgctgagcgccaccatcctgtacgagatcctgctgggcaaggccaccctgtacgccgtgctggtgtctgccctggtgctgatggctatggtcaagcggaaggacagccggggaagggccaagcgatctggatctggagcaacaaacttctcactactcaaacaagcaggtgacgtggaggagaatcccgggcctactagtatggactggatttggcgcatccttttccttgtcggcgctgctaccggcgcgcattccttcgaacaggttcagctccagcagtctggacctggcctggtcaagcctagccagacactgtctctgacctgtgccatcagcggcgatagcgtgtcctctaatagagccgcctggaactggatcagacagagccctagcagaggactccagtggctgggcagaacctactaccgcagcaagtggtacaacgactacgccgtgtctctgcggagccggatcaccatcaatcccgtgaccagcaagaaccaggtggccctgcacatgaacagcgtgacccctgaagataccgccgtgtactactgtgccagagccggaattgtggtggtgcccggacctgagacattctactactacgaccacggcctggacgtgtggggccagggaacaacagtgactgtctcttctacgcgtatccagaaccctgatcctgccgtgtaccagctgcgggatagcaagagcagcgacaagagcgtgtgtctgttcaccgacttcgacagccagaccaacgtgtcccagagcaaggactccgacgtgtacatcaccgataagtgcgtgctggacatgcggagcatggacttcaagagcaactccgccgtggcctggtccaacaagtccgatttcgcctgcgccaacgccttcaacaacagcattatccccgaggacacattcttcccaagccccgagagcagctgcgacgtgaagctggtggaaaagagcttcgagacagacaccaacctgaacttccagaacctgagcgtgatcggcttcagaatcctgctgctgaaagtggccggctttaacctgctgatgaccctgcggctgtggtccagccgcgccaagagaagcggatctggcgtgaagcagaccctgaatttcgacctgctgaagctggctggcgacgtggaatccaacccaggcccttctagaggcgggatccacaccatggctacctacgaggtgctgtgcgaggtggcaagaaagctgggcaccgacgacagagaagtggtgctgttcctgctgaacgtgttcatccctcagcctacactggcccagctgatcggtgcactgagagccctgaaagaggaaggccggctgacctttcctctgctggccgaatgcctgttcagagccggaagaagggatctgctgcgggacctgctgcatctggaccccagatttctggaaagacacctggccggcaccatgagctacttcagcccttaccagctgaccgtgctgcacgttgacggcgaactgtgcgccagagatattcggagcctgatcttcctgagcaaggacaccatcggcagccggtctacccctcagacatttctgcactgggtgtactgcatggaaaacctggacctgctcggccccacagatgtggatgccctgatgtccatgctgagaagcctgagcagagtggacctccagagacaggtgcagacactgatgggactgcacctgagcggacctagccacagccagcactacagacacacccct

SEQ ID NO: 21898 - DNA, 1914 bp, synthetic construct
  source 1..1914: mol_type = other DNA
atggccttaccagtgaccgccttgctcctgccgctggccttgctgctccacgccgccaggccggacatccagatgacacagagcccctctagcctgtctgccagcgtgggagacagagtgaccatcacctgtagagccagccagagcatcagaaactacctgaactggtatcagcaaaagcccggcaaggcccctgagctgctgattcatgctgcaagcagcctccagagcggcgtgccaagcagattttctggcagcggcagcggaaccgacttcaccctgacaatatctagcctccagcctgaggacttcgccagctactactgccagcagagctacagcgcccctcctatcacctttggacagggcaccagactggaaatcaagctcgagatccagaaccctgatcctgccgtgtaccagctgcgggatagcaagagcagcgacaagagcgtgtgtctgttcaccgacttcgacagccagaccaacgtgtcccagagcaaggactccgacgtgtacatcaccgataagtgcgtgctggacatgcggagcatggacttcaagagcaactccgccgtggcctggtccaacaagtccgatttcgcctgcgccaacgccttcaacaacagcattatccccgaggacacattcttcccaagccccgagagcagctgcgacgtgaagctggtggaaaagagcttcgagacagacaccaacctgaacttccagaacctgagcgtgatcggcttcagaatcctgctgctgaaagtggccggctttaacctgctgatgaccctgcggctgtggtccagccgcgccaagagaagcggatctggcgtgaagcagaccctgaatttcgacctgctgaagctggctggcgacgtggaatccaacccaggccctactagtatggactggatttggcgcatccttttccttgtcggcgctgctaccggcgcgcattccttcgaacaggttcagctccagcagtctggacctggcctggtcaagcctagccagacactgtctctgacctgtgccatcagcggcgatagcgtgtcctctaatagagccgcctggaactggatcagacagagccctagcagaggactccagtggctgggcagaacctactaccgcagcaagtggtacaacgactacgccgtgtctctgcggagccggatcaccatcaatcccgtgaccagcaagaaccaggtggccctgcacatgaacagcgtgacccctgaagataccgccgtgtactactgtgccagagccggaattgtggtggtgcccggacctgagacattctactactacgaccacggcctggacgtgtggggccagggaacaacagtgactgtctcttctacgcgtgaggacctgaagaacgtgttcccacctgaggtggccgtgttcgagcctagcgaggccgagatcagccacacccagaaagccaccctcgtgtgcctggctaccggcttctaccccgaccatgtggaactgtcttggtgggtcaacggcaaagaggtgcacagcggcgtgtgtaccgacccccagccactgaaagaacagcccgccctgaacgacagccggtactgcctgagcagcagactgagagtgtccgccaccttctggcagaacccccggaaccacttcagatgccaggtgcagttctacggcctgagcgagaacgacgagtggacccaggacagagccaagcccgtgacccagatcgtgtctgccgaagcctggggcagagccgattgcggctttaccagcgagagctaccagcagggcgtgctgagcgccaccatcctgtacgagatcctgctgggcaaggccaccctgtacgccgtgctggtgtctgccctggtgctgatggctatggtcaagcggaaggacagccgggga

SEQ ID NO: 21899 - DNA, 2580 bp, synthetic construct
  source 1..2580: mol_type = other DNA
atggccttaccagtgaccgccttgctcctgccgctggccttgctgctccacgccgccaggccggacatccagatgacacagagcccctctagcctgtctgccagcgtgggagacagagtgaccatcacctgtagagccagccagagcatcagaaactacctgaactggtatcagcaaaagcccggcaaggcccctgagctgctgattcatgctgcaagcagcctccagagcggcgtgccaagcagattttctggcagcggcagcggaaccgacttcaccctgacaatatctagcctccagcctgaggacttcgccagctactactgccagcagagctacagcgcccctcctatcacctttggacagggcaccagactggaaatcaagctcgagatccagaaccctgatcctgccgtgtaccagctgcgggatagcaagagcagcgacaagagcgtgtgtctgttcaccgacttcgacagccagaccaacgtgtcccagagcaaggactccgacgtgtacatcaccgataagtgcgtgctggacatgcggagcatggacttcaagagcaactccgccgtggcctggtccaacaagtccgatttcgcctgcgccaacgccttcaacaacagcattatccccgaggacacattcttcccaagccccgagagcagctgcgacgtgaagctggtggaaaagagcttcgagacagacaccaacctgaacttccagaacctgagcgtgatcggcttcagaatcctgctgctgaaagtggccggctttaacctgctgatgaccctgcggctgtggtccagccgcgccaagagaagcggatctggcgtgaagcagaccctgaatttcgacctgctgaagctggctggcgacgtggaatccaacccaggccctactagtatggactggatttggcgcatccttttccttgtcggcgctgctaccggcgcgcattccttcgaacaggttcagctccagcagtctggacctggcctggtcaagcctagccagacactgtctctgacctgtgccatcagcggcgatagcgtgtcctctaatagagccgcctggaactggatcagacagagccctagcagaggactccagtggctgggcagaacctactaccgcagcaagtggtacaacgactacgccgtgtctctgcggagccggatcaccatcaatcccgtgaccagcaagaaccaggtggccctgcacatgaacagcgtgacccctgaagataccgccgtgtactactgtgccagagccggaattgtggtggtgcccggacctgagacattctactactacgaccacggcctggacgtgtggggccagggaacaacagtgactgtctcttctacgcgtgaggacctgaagaacgtgttcccacctgaggtggccgtgttcgagcctagcgaggccgagatcagccacacccagaaagccaccctcgtgtgcctggctaccggcttctaccccgaccatgtggaactgtcttggtgggtcaacggcaaagaggtgcacagcggcgtgtgtaccgacccccagccactgaaagaacagcccgccctgaacgacagccggtactgcctgagcagcagactgagagtgtccgccaccttctggcagaacccccggaaccacttcagatgccaggtgcagttctacggcctgagcgagaacgacgagtggacccaggacagagccaagcccgtgacccagatcgtgtctgccgaagcctggggcagagccgattgcggctttaccagcgagagctaccagcagggcgtgctgagcgccaccatcctgtacgagatcctgctgggcaaggccaccctgtacgccgtgctggtgtctgccctggtgctgatggctatggtcaagcggaaggacagccggggaagggccaagcgatctggatctggagcaacaaacttctcactactcaaacaagcaggtgacgtggaggagaatcccgggccttctagaggcgggatccacaccatggctacctacgaggtgctgtgcgaggtggcaagaaagctgggcaccgacgacagagaagtggtgctgttcctgctgaacgtgttcatccctcagcctacactggcccagctgatcggtgcactgagagccctgaaagaggaaggccggctgacctttcctctgctggccgaatgcctgttcagagccggaagaagggatctgctgcgggacctgctgcatctggaccccagatttctggaaagacacctggccggcaccatgagctacttcagcccttaccagctgaccgtgctgcacgttgacggcgaactgtgcgccagagatattcggagcctgatcttcctgagcaaggacaccatcggcagccggtctacccctcagacatttctgcactgggtgtactgcatggaaaacctggacctgctcggccccacagatgtggatgccctgatgtccatgctgagaagcctgagcagagtggacctccagagacaggtgcagacactgatgggactgcacctgagcggacctagccacagccagcactacagacacacccct

SEQ ID NO: 21900 - DNA, 2739 bp, synthetic construct
  source 1..2739: mol_type = other DNA
atggccttaccagtgaccgccttgctcctgccgctggccttgctgctccacgccgccaggccgctcgaggggaaaccaattcccaaccctcttctgggactggattcaaccggcagcggcgaggacctgaagaacgtgttcccacctgaggtggccgtgttcgagcctagcaaggccgagatcgcccacacccagaaagccaccctcgtgtgcctggctaccggcttctaccccgaccatgtggaactgtcttggtgggtcaacggcaaagaggtgcacagcggcgtgtgtaccgacccccagccactgaaagaacagcccgccctgaacgacagccggtactgcctgagcagcagactgagagtgtccgccaccttctggcagaacccccggaaccacttcagatgccaggtgcagttctacggcctgagcgagaacgacgagtggacccaggacagagccaagcccgtgacccagatcgtgtctgccgaagcctggggcagagccgattgcggcatcaccagcgccagctaccaccagggcgtgctgagcgccaccatcctgtacgagatcctgctgggcaaggccaccctgtacgccgtgctggtgtctgccctggtgctgatggctatggtcaagcggaaggacagccggggaagggccaagcgatctggatctggagcaacaaacttctcactactcaaacaagcaggtgacgtggaggagaatcccgggcctactagcatggccttaccagtgaccgccttgctcctgccgctggccttgctgctccacgccgccaggccggacatccagatgacacagagcccctctagcctgtctgccagcgtgggagacagagtgaccatcacctgtagagccagccagagcatcagaaactacctgaactggtatcagcaaaagcccggcaaggcccctgagctgctgattcatgctgcaagcagcctccagagcggcgtgccaagcagattttctggcagcggcagcggaaccgacttcaccctgacaatatctagcctccagcctgaggacttcgccagctactactgccagcagagctacagcgcccctcctatcacctttggacagggcaccagactggaaatcaagggcggaggcggaagtggaggcggaggatctggcggcggaggctctcaggttcagctccagcagtctggacctggcctggtcaagcctagccagacactgtctctgacctgtgccatcagcggcgatagcgtgtcctctaatagagccgcctggaactggatcagacagagccctagcagaggactccagtggctgggcagaacctactaccgcagcaagtggtacaacgactacgccgtgtctctgcggagccggatcaccatcaatcccgtgaccagcaagaaccaggtggccctgcacatgaacagcgtgacccctgaagataccgccgtgtactactgtgccagagccggaattgtggtggtgcccggacctgagacattctactactacgaccacggcctggacgtgtggggccagggaacaacagtgactgtctcttctacgcgtgagcagaaactgatctcggaagaggatgggagcggcatccagaaccctgatcctgccgtgtaccagctgcgggatagcaagagcagcgacaagagcgtgtgtctgttcaccgacttcgacagccagaccaacgtgtcccagagcaaggactccgacgtgtacatcaccgataagtgcgtgctggacatgcggagcatggacttcaagagcaactccgccgtggcctggtccaacaagtccgatttcgcctgcgccaacgccttcaacaacagcattatccccgaggacacattcttcccaagcagcgacgtgccctgcgacgtgaagctggtggaaaagagcttcgagacagacaccaacctgaacttccagaacctgagcgtgatcggcttcagaatcctgctgctgaaagtggccggctttaacctgctgatgaccctgcggctgtggtccagccgcgccaagagaagcggatctggcgtgaagcagaccctgaatttcgacctgctgaagctggctggcgacgtggaatccaacccaggcccttctagaggccatatgaccgagtacaagcccacggtgcgcctcgccacccgcgacgacgtccccagggccgtacgcaccctcgccgccgcgttcgccgactaccccgccacgcgccacaccgtcgatccggaccgccacatcgagcgggtcaccgagctgcaagaactcttcctcacgcgcgtcgggctcgacatcggcaaggtgtgggtcgcggacgacggcgccgcggtggcggtctggaccacgccggagagcgtcgaagcgggggcggtgttcgccgagatcggcccgcgcatggccgagttgagcggttcccggctggccgcgcagcaacagatggaaggcctcctggcgccgcaccggcccaaggagcccgcgtggttcctggccaccgtcggcgtctcgcccgaccaccagggcaagggtctgggcagcgccgtcgtgctccccggagtggaggcggccgagcgcgccggggtgcccgccttcctggagacctccgcgccccgcaacctccccttctacgagcggctcggcttcaccgtcaccgccgacgtcgaggtgcccgaaggaccgcgcacctggtgcatgacccgcaagcccggtgcctga

SEQ ID NO: 21901 - DNA, 2742 bp, synthetic construct
  source 1..2742: mol_type = other DNA
atggccttaccagtgaccgccttgctcctgccgctggccttgctgctccacgccgccaggccgctcgagcagaaactgatctcggaagaggatctgggctccggcgatcgccctgatcctgccgtgtaccagctgcgggatagcaagagcagcgacaagagcgtgtgtctgttcaccgacttcgacagccagaccaacgtgtcccagagcaaggactccgacgtgtacatcaccgataagtgcgtgctggacatgcggagcatggacttcaagagcaactccgccgtggcctggtccaacaagtccgatttcgcctgcgccaacgccttcaacaacagcattatccccgaggacacattcttcccaagccccgagagcagctgcgacgtgaagctggtggaaaagagcttcgagacagacaccaacctgaacttccagaacctgagcgtgatcggcttcagaatcctgctgctgaaagtggccggctttaacctgctgatgaccctgcggctgtggtccagctctagtcgcgccaagagaagcggatctggcgtgaagcagaccctgaatttcgacctgctgaagctggctggcgacgtggaatccaacccaggccccactagcatggccttaccagtgaccgccttgctcctgccgctggccttgctgctccacgccgccaggccggacatccagatgacacagagcccctctagcctgtctgccagcgtgggagacagagtgaccatcacctgtagagccagccagagcatcagaaactacctgaactggtatcagcaaaagcccggcaaggcccctgagctgctgattcatgctgcaagcagcctccagagcggcgtgccaagcagattttctggcagcggcagcggaaccgacttcaccctgacaatatctagcctccagcctgaggacttcgccagctactactgccagcagagctacagcgcccctcctatcacctttggacagggcaccagactggaaatcaagggcggaggcggaagtggaggcggaggatctggcggcggaggctctcaggttcagctccagcagtctggacctggcctggtcaagcctagccagacactgtctctgacctgtgccatcagcggcgatagcgtgtcctctaatagagccgcctggaactggatcagacagagccctagcagaggactccagtggctgggcagaacctactaccgcagcaagtggtacaacgactacgccgtgtctctgcggagccggatcaccatcaatcccgtgaccagcaagaaccaggtggccctgcacatgaacagcgtgacccctgaagataccgccgtgtactactgtgccagagccggaattgtggtggtgcccggacctgagacattctactactacgaccacggcctggacgtgtggggccagggaacaacagtgactgtctcttctacgcgtgggaaaccaattcccaaccctcttctgggactggattcaaccggcagcggcgaggacctgaagaacgtgttcccacctgaggtggccgtgttcgagcctagcgaggccgagatcagccacacccagaaagccaccctcgtgtgcctggctaccggcttctaccccgaccatgtggaactgtcttggtgggtcaacggcaaagaggtgcacagcggcgtgtgtaccgacccccagccactgaaagaacagcccgccctgaacgacagccggtactgcctgagcagcagactgagagtgtccgccaccttctggcagaacccccggaaccacttcagatgccaggtgcagttctacggcctgagcgagaacgacgagtggacccaggacagagccaagcccgtgacccagatcgtgtctgccgaagcctggggcagagccgattgcggctttaccagcgagagctaccagcagggcgtgctgagcgccaccatcctgtacgagatcctgctgggcaaggccaccctgtacgccgtgctggtgtctgccctggtgctgatggctatggtcaagcggaaggacagccggggaagggccaagcgatctggatctggagcaacaaacttctcactactcaaacaagcaggtgacgtggaggagaatcccgggccttctagaggccatatgaccgagtacaagcccacggtgcgcctcgccacccgcgacgacgtccccagggccgtacgcaccctcgccgccgcgttcgccgactaccccgccacgcgccacaccgtcgatccggaccgccacatcgagcgggtcaccgagctgcaagaactcttcctcacgcgcgtcgggctcgacatcggcaaggtgtgggtcgcggacgacggcgccgcggtggcggtctggaccacgccggagagcgtcgaagcgggggcggtgttcgccgagatcggcccgcgcatggccgagttgagcggttcccggctggccgcgcagcaacagatggaaggcctcctggcgccgcaccggcccaaggagcccgcgtggttcctggccaccgtcggcgtctcgcccgaccaccagggcaagggtctgggcagcgccgtcgtgctccccggagtggaggcggccgagcgcgccggggtgcccgccttcctggagacctccgcgccccgcaacctccccttctacgagcggctcggcttcaccgtcaccgccgacgtcgaggtgcccgaaggaccgcgcacctggtgcatgacccgcaagcccggtgcctga

SEQ ID NO: 21902 - DNA, 2604 bp, synthetic construct
  source 1..2604: mol_type = other DNA
atggccttaccagtgaccgccttgctcctgccgctggccttgctgctccacgccgccaggccggacatccagatgacacagagcccctctagcctgtctgccagcgtgggagacagagtgaccatcacctgtagagccagccagagcatcagaaactacctgaactggtatcagcaaaagcccggcaaggcccctgagctgctgattcatgctgcaagcagcctccagagcggcgtgccaagcagattttctggcagcggcagcggaaccgacttcaccctgacaatatctagcctccagcctgaggacttcgccagctactactgccagcagagctacagcgcccctcctatcacctttggacagggcaccagactggaaatcaagctcgaggacctgaagaacgtgttcccacctgaggtggccgtgttcgagcctagcgaggccgagatcagccacacccagaaagccaccctcgtgtgcctggctaccggcttctaccccgaccatgtggaactgtcttggtgggtcaacggcaaagaggtgcacagcggcgtgtctaccgacccccagccactgaaagaacagcccgccctgaacgacagccggtactgcctgagcagcagactgagagtgtccgccaccttctggcagaacccccggaaccacttcagatgccaggtgcagttctacggcctgagcgagaacgacgagtggacccaggacagagccaagcccgtgacccagatcgtgtctgccgaagcctggggcagagccgattgcggctttaccagcgagagctaccagcagggcgtgctgagcgccaccatcctgtacgagatcctgctgggcaaggccaccctgtacgccgtgctggtgtctgccctggtgctgatggctatggtcaagcggaaggacagccggggaagggccaagcgatctggatctggagcaacaaacttctcactactcaaacaagcaggtgacgtggaggagaatcccgggcctactagtatggactggatttggcgcatccttttccttgtcggcgctgctaccggcgcgcattccttcgaacaggttcagctccagcagtctggacctggcctggtcaagcctagccagacactgtctctgacctgtgccatcagcggcgatagcgtgtcctctaatagagccgcctggaactggatcagacagagccctagcagaggactccagtggctgggcagaacctactaccgcagcaagtggtacaacgactacgccgtgtctctgcggagccggatcaccatcaatcccgtgaccagcaagaaccaggtggccctgcacatgaacagcgtgacccctgaagataccgccgtgtactactgtgccagagccggaattgtggtggtgcccggacctgagacattctactactacgaccacggcctggacgtgtggggccagggaacaacagtgactgtctcttctacgcgtatccagaaccctgatcctgccgtgtaccagctgcgggatagcaagagcagcgacaagagcgtgtgtctgttcaccgacttcgacagccagaccaacgtgtcccagagcaaggactccgacgtgtacatcaccgataagaccgtgctggacatgcggagcatggacttcaagagcaactccgccgtggcctggtccaacaagtccgatttcgcctgcgccaacgccttcaacaacagcattatccccgaggacacattcttcccaagccccgagagcagctgcgacgtgaagctggtggaaaagagcttcgagacagacaccaacctgaacttccagaacctgagcgtgatcggcttcagaatcctgctgctgaaagtggccggctttaacctgctgatgaccctgcggctgtggtccagccgcgccaagagaagcggatctggcgtgaagcagaccctgaatttcgacctgctgaagctggctggcgacgtggaatccaacccaggcccttctagaggccatatgaccgagtacaagcccacggtgcgcctcgccacccgcgacgacgtccccagggccgtacgcaccctcgccgccgcgttcgccgactaccccgccacgcgccacaccgtcgatccggaccgccacatcgagcgggtcaccgagctgcaagaactcttcctcacgcgcgtcgggctcgacatcggcaaggtgtgggtcgcggacgacggcgccgcggtggcggtctggaccacgccggagagcgtcgaagcgggggcggtgttcgccgagatcggcccgcgcatggccgagttgagcggttcccggctggccgcgcagcaacagatggaaggcctcctggcgccgcaccggcccaaggagcccgcgtggttcctggccaccgtcggcgtctcgcccgaccaccagggcaagggtctgggcagcgccgtcgtgctccccggagtggaggcggccgagcgcgccggggtgcccgccttcctggagacctccgcgccccgcaacctccccttctacgagcggctcggcttcaccgtcaccgccgacgtcgaggtgcccgaaggaccgcgcacctggtgcatgacccgcaagcccggtgcctga

SEQ ID NO: 21903 - DNA, 2850 bp, synthetic construct
  source 1..2850: mol_type = other DNA
atggccttaccagtgaccgccttgctcctgccgctggccttgctgctccacgccgccaggccggacatccagatgacacagagcccctctagcctgtctgccagcgtgggagacagagtgaccatcacctgtagagccagccagagcatcagaaactacctgaactggtatcagcaaaagcccggcaaggcccctgagctgctgattcatgctgcaagcagcctccagagcggcgtgccaagcagattttctggcagcggcagcggaaccgacttcaccctgacaatatctagcctccagcctgaggacttcgccagctactactgccagcagagctacagcgcccctcctatcacctttggacagggcaccagactggaaatcaagctcgaggacctgaagaacgtgttcccacctgaggtggccgtgttcgagcctagcgaggccgagatcagccacacccagaaagccaccctcgtgtgcctggctaccggcttctaccccgaccatgtggaactgtcttggtgggtcaacggcaaagaggtgcacagcggcgtgtctaccgacccccagccactgaaagaacagcccgccctgaacgacagccggtactgcctgagcagcagactgagagtgtccgccaccttctggcagaacccccggaaccacttcagatgccaggtgcagttctacggcctgagcgagaacgacgagtggacccaggacagagccaagcccgtgacccagatcgtgtctgccgaagcctggggcagagccgattgcggctttaccagcgagagctaccagcagggcgtgctgagcgccaccatcctgtacgagatcctgctgggcaaggccaccctgtacgccgtgctggtgtctgccctggtgctgatggctatggtcaagcggaaggacagccggggaagggccaagcgatctggatctggagcaacaaacttctcactactcaaacaagcaggtgacgtggaggagaatcccgggcctactagtatggactggatttggcgcatccttttccttgtcggcgctgctaccggcgcgcattccttcgaacaggttcagctccagcagtctggacctggcctggtcaagcctagccagacactgtctctgacctgtgccatcagcggcgatagcgtgtcctctaatagagccgcctggaactggatcagacagagccctagcagaggactccagtggctgggcagaacctactaccgcagcaagtggtacaacgactacgccgtgtctctgcggagccggatcaccatcaatcccgtgaccagcaagaaccaggtggccctgcacatgaacagcgtgacccctgaagataccgccgtgtactactgtgccagagccggaattgtggtggtgcccggacctgagacattctactactacgaccacggcctggacgtgtggggccagggaacaacagtgactgtctcttctacgcgtgagcagaaactgatctcggaagaggatgggagcggcaccccattcccttctctggcccctcccatcatgctgctggtggacggcaagcagcagatggtggtcgtgtgcctggtgctggatgtggccccacctggactggacagccccatctggtttagcgccggcaatggctctgccctggacgcctttacctacggcccaagccctgccaccgatggcacctggacaaatctggcccacctgagcctgcccagcgaggaactggcttcttgggagcctctcgtgtgccacacaggacctggcgctgagggacacagcagatccacccagcctatgcacctgtctggcgaggccagcaccgccagaacctgtcctcaggaacctctgagaggcacccctggcggagcactgtggctgggagtgctgagactgctgctgttcaagctgctgctgtttgacctgctgctgacctgctcctgtctgtgcgatcctgccggccctctgccttctcctgccaccaccacaagactgagagccctgggcagccacagactgcaccctgccacagagacaggcggcagagaggccacaagcagccctagaccccagcccagagacagaagatggggcgataccccccctggcagaaagcctggatctccagtccgcgccaagagaagcggatctggcgtgaagcagaccctgaatttcgacctgctgaagctggctggcgacgtggaatccaacccaggcccttctagaggccatatgaccgagtacaagcccacggtgcgcctcgccacccgcgacgacgtccccagggccgtacgcaccctcgccgccgcgttcgccgactaccccgccacgcgccacaccgtcgatccggaccgccacatcgagcgggtcaccgagctgcaagaactcttcctcacgcgcgtcgggctcgacatcggcaaggtgtgggtcgcggacgacggcgccgcggtggcggtctggaccacgccggagagcgtcgaagcgggggcggtgttcgccgagatcggcccgcgcatggccgagttgagcggttcccggctggccgcgcagcaacagatggaaggcctcctggcgccgcaccggcccaaggagcccgcgtggttcctggccaccgtcggcgtctcgcccgaccaccagggcaagggtctgggcagcgccgtcgtgctccccggagtggaggcggccgagcgcgccggggtgcccgccttcctggagacctccgcgccccgcaacctccccttctacgagcggctcggcttcaccgtcaccgccgacgtcgaggtgcccgaaggaccgcgcacctggtgcatgacccgcaagcccggtgcctga

SEQ ID NO: 21904 - DNA, 2904 bp, synthetic construct
  source 1..2904: mol_type = other DNA
atggccttaccagtgaccgccttgctcctgccgctggccttgctgctccacgccgccaggccgctcgaggacctgaagaacgtgttcccacctgaggtggccgtgttcgagcctagcgaggccgagatcagccacacccagaaagccaccctcgtgtgcctggctaccggcttctaccccgaccatgtggaactgtcttggtgggtcaacggcaaagaggtgcacagcggcgtgtctaccgacccccagccactgaaagaacagcccgccctgaacgacagccggtactgcctgagcagcagactgagagtgtccgccaccttctggcagaacccccggaaccacttcagatgccaggtgcagttctacggcctgagcgagaacgacgagtggacccaggacagagccaagcccgtgacccagatcgtgtctgccgaagcctggggcagagccgattgcggctttaccagcgagagctaccagcagggcgtgctgagcgccaccatcctgtacgagatcctgctgggcaaggccaccctgtacgccgtgctggtgtctgccctggtgctgatggctatggtcaagcggaaggacagccggggaagggccaagcgatctggatctggagcaacaaacttctcactactcaaacaagcaggtgacgtggaggagaatcccgggcctactagcatggccttaccagtgaccgccttgctcctgccgctggccttgctgctccacgccgccaggccggacatccagatgacacagagcccctctagcctgtctgccagcgtgggagacagagtgaccatcacctgtagagccagccagagcatcagaaactacctgaactggtatcagcaaaagcccggcaaggcccctgagctgctgattcatgctgcaagcagcctccagagcggcgtgccaagcagattttctggcagcggcagcggaaccgacttcaccctgacaatatctagcctccagcctgaggacttcgccagctactactgccagcagagctacagcgcccctcctatcacctttggacagggcaccagactggaaatcaagggcggaggcggaagtggaggcggaggatctggcggcggaggctctcaggttcagctccagcagtctggacctggcctggtcaagcctagccagacactgtctctgacctgtgccatcagcggcgatagcgtgtcctctaatagagccgcctggaactggatcagacagagccctagcagaggactccagtggctgggcagaacctactaccgcagcaagtggtacaacgactacgccgtgtctctgcggagccggatcaccatcaatcccgtgaccagcaagaaccaggtggccctgcacatgaacagcgtgacccctgaagataccgccgtgtactactgtgccagagccggaattgtggtggtgcccggacctgagacattctactactacgaccacggcctggacgtgtggggccagggaacaacagtgactgtctcttctacgcgtgagcagaaactgatctcggaagaggatctggggagcggcaccccattcccttctctggcccctcccatcatgctgctggtggacggcaagcagcagatggtggtcgtgtgcctggtgctggatgtggccccacctggactggacagccccatctggtttagcgccggcaatggctctgccctggacgcctttacctacggcccaagccctgccaccgatggcacctggacaaatctggcccacctgagcctgcccagcgaggaactggcttcttgggagcctctcgtgtgccacacaggacctggcgctgagggacacagcagatccacccagcctatgcacctgtctggcgaggccagcaccgccagaacctgtcctcaggaacctctgagaggcacccctggcggagcactgtggctgggagtgctgagactgctgctgttcaagctgctgctgtttgacctgctgctgacctgctcctgtctgtgcgatcctgccggccctctgccttctcctgccaccaccacaagactgagagccctgggcagccacagactgcaccctgccacagagacaggcggcagagaggccacaagcagccctagaccccagcccagagacagaagatggggcgataccccccctggcagaaagcctggatctccagtccgcgccaagagaagcggatctggcgtgaagcagaccctgaatttcgacctgctgaagctggctggcgacgtggaatccaacccaggcccttctagatctagaggccatatgaccgagtacaagcccacggtgcgcctcgccacccgcgacgacgtccccagggccgtacgcaccctcgccgccgcgttcgccgactaccccgccacgcgccacaccgtcgatccggaccgccacatcgagcgggtcaccgagctgcaagaactcttcctcacgcgcgtcgggctcgacatcggcaaggtgtgggtcgcggacgacggcgccgcggtggcggtctggaccacgccggagagcgtcgaagcgggggcggtgttcgccgagatcggcccgcgcatggccgagttgagcggttcccggctggccgcgcagcaacagatggaaggcctcctggcgccgcaccggcccaaggagcccgcgtggttcctggccaccgtcggcgtctcgcccgaccaccagggcaagggtctgggcagcgccgtcgtgctccccggagtggaggcggccgagcgcgccggggtgcccgccttcctggagacctccgcgccccgcaacctccccttctacgagcggctcggcttcaccgtcaccgccgacgtcgaggtgcccgaaggaccgcgcacctggtgcatgacccgcaagcccggtgcctga

SEQ ID NO: 21905 - DNA, 2715 bp, synthetic construct
  source 1..2715: mol_type = other DNA
atggccttaccagtgaccgccttgctcctgccgctggccttgctgctccacgccgccaggccggacatccagatgacacagagcccctctagcctgtctgccagcgtgggagacagagtgaccatcacctgtagagccagccagagcatcagaaactacctgaactggtatcagcaaaagcccggcaaggcccctgagctgctgattcatgctgcaagcagcctccagagcggcgtgccaagcagattttctggcagcggcagcggaaccgacttcaccctgacaatatctagcctccagcctgaggacttcgccagctactactgccagcagagctacagcgcccctcctatcacctttggacagggcaccagactggaaatcaagctcgaggggaaaccaattcccaaccctcttctgggactggattcaaccggcagcggcgacaagcagctggacgccgacgtgtcccccaagcctaccatcttcctgccctctatcgccgagacaaagctccagaaggccggcacctacctgtgcctgctggaaaagttcttcccagatgtgattaagatccactggcaggaaaagaagtccaacaccatcctgggcagccaggaaggcaacaccatgaagaccaacgacacctacatgaagttcagctggctgaccgtgcccgagaagtccctggacaaagaacacagatgcatcgtgcggcacgaaaacaacaagaacggcgtggaccaggaaatcatcttcccacccatcaagaccgatgtgattacaatggaccccaaggacaactgctccaaggacgccaacgataccctgctgctccagctgaccaacaccagcgcctactacatgtacttgttgctgctgctgaagtccgtggtgtacttcgccatcatcacatgctgcctgctgcggagaaccgccttctgctgcaacggcgagaagtctagggccaagcgatctggatctggagcaacaaacttctcactactcaaacaagcaggtgacgtggaggagaatcccgggcctactagtatggactggatttggcgcatccttttccttgtcggcgctgctaccggcgcgcattccttcgaacaggttcagctccagcagtctggacctggcctggtcaagcctagccagacactgtctctgacctgtgccatcagcggcgatagcgtgtcctctaatagagccgcctggaactggatcagacagagccctagcagaggactccagtggctgggcagaacctactaccgcagcaagtggtacaacgactacgccgtgtctctgcggagccggatcaccatcaatcccgtgaccagcaagaaccaggtggccctgcacatgaacagcgtgacccctgaagataccgccgtgtactactgtgccagagccggaattgtggtggtgcccggacctgagacattctactactacgaccacggcctggacgtgtggggccagggaacaacagtgactgtctcttctacgcgtgagcagaaactgatctcggaagaggatgggagcggcagccagcctcacaccaagcccagcgtgttcgtgatgaagaacggcaccaacgtggcctgcctcgtgaaagagttctaccccaaggacatcaggatcaacctggtgtccagcaagaagatcaccgagttcgaccccgccatcgtgatctcccccagcggcaagtacaacgccgtgaagctggggaagtacgaggacagcaacagcgtgacctgctccgtgcagcacgacaacaagaccgtgcacagcaccgactttgaagtgaaaaccgactccaccgaccacgtgaagcccaaagagacagagaacaccaagcagcccagcaagagctgccacaagcccaaggccatcgtgcacaccgagaaagtgaacatgatgagcctgaccgtgctgggcctgcggatgctgttcgccaaaaccgtggccgtgaacttcctgctgaccgccaagctgttcttcctccgcgccaagagaagcggatctggcgtgaagcagaccctgaatttcgacctgctgaagctggctggcgacgtggaatccaacccaggcccttctagaggccatatgaccgagtacaagcccacggtgcgcctcgccacccgcgacgacgtccccagggccgtacgcaccctcgccgccgcgttcgccgactaccccgccacgcgccacaccgtcgatccggaccgccacatcgagcgggtcaccgagctgcaagaactcttcctcacgcgcgtcgggctcgacatcggcaaggtgtgggtcgcggacgacggcgccgcggtggcggtctggaccacgccggagagcgtcgaagcgggggcggtgttcgccgagatcggcccgcgcatggccgagttgagcggttcccggctggccgcgcagcaacagatggaaggcctcctggcgccgcaccggcccaaggagcccgcgtggttcctggccaccgtcggcgtctcgcccgaccaccagggcaagggtctgggcagcgccgtcgtgctccccggagtggaggcggccgagcgcgccggggtgcccgccttcctggagacctccgcgccccgcaacctccccttctacgagcggctcggcttcaccgtcaccgccgacgtcgaggtgcccgaaggaccgcgcacctggtgcatgacccgcaagcccggtgcctga

SEQ ID NO: 21906 - DNA, 1926 bp, synthetic construct
  source 1..1926: mol_type = other DNA
atggccttaccagtgaccgccttgctcctgccgctggccttgctgctccacgccgccaggccggacatccagatgacacagagcccctctagcctgtctgccagcgtgggagacagagtgaccatcacctgtagagccagccagagcatcagaaactacctgaactggtatcagcaaaagcccggcaaggcccctgagctgctgattcatgctgcaagcagcctccagagcggcgtgccaagcagattttctggcagcggcagcggaaccgacttcaccctgacaatatctagcctccagcctgaggacttcgccagctactactgccagcagagctacagcgcccctcctatcacctttggacagggcaccagactggaaatcaagctcgagagccagcctcacaccaagcccagcgtgttcgtgatgaagaacggcaccaacgtggcctgcctcgtgaaagagttctaccccaaggacatcaggatcaacctggtgtccagcaagaagatcaccgagttcgaccccgccatcgtgatctcccccagcggcaagtacaacgccgtgaagctggggaagtacgaggacagcaacagcgtgacctgctccgtgcagcacgacaacaagaccgtgcacagcaccgactttgaagtgaaaaccgactccaccgaccacgtgaagcccaaagagacagagaacaccaagcagcccagcaagagctgccacaagcccaaggccatcgtgcacaccgagaaagtgaacatgatgagcctgaccgtgctgggcctgcggatgctgttcgccaaaaccgtggccgtgaacttcctgctgaccgccaagctgttcttcctcagggccaagcgatctggatctggagcaacaaacttctcactactcaaacaagcaggtgacgtggaggagaatcccgggcctactagtatggactggatttggcgcatccttttccttgtcggcgctgctaccggcgcgcattccttcgaacaggttcagctccagcagtctggacctggcctggtcaagcctagccagacactgtctctgacctgtgccatcagcggcgatagcgtgtcctctaatagagccgcctggaactggatcagacagagccctagcagaggactccagtggctgggcagaacctactaccgcagcaagtggtacaacgactacgccgtgtctctgcggagccggatcaccatcaatcccgtgaccagcaagaaccaggtggccctgcacatgaacagcgtgacccctgaagataccgccgtgtactactgtgccagagccggaattgtggtggtgcccggacctgagacattctactactacgaccacggcctggacgtgtggggccagggaacaacagtgactgtctcttctacgcgtgacaagcagctggacgccgacgtgtcccccaagcctaccatcttcctgccctctatcgccgagacaaagctccagaaggccggcacctacctgtgcctgctggaaaagttcttcccagatgtgattaagatccactggcaggaaaagaagtccaacaccatcctgggcagccaggaaggcaacaccatgaagaccaacgacacctacatgaagttcagctggctgaccgtgcccgagaagtccctggacaaagaacacagatgcatcgtgcggcacgaaaacaacaagaacggcgtggaccaggaaatcatcttcccacccatcaagaccgatgtgattacaatggaccccaaggacaactgctccaaggacgccaacgataccctgctgctccagctgaccaacaccagcgcctactacatgtacttgttgctgctgctgaagtccgtggtgtacttcgccatcatcacatgctgcctgctgcggagaaccgccttctgctgcaacggcgagaagtct

SEQ ID NO: 21907 - DNA, 2760 bp, synthetic construct
  source 1..2760: mol_type = other DNA
atggccttaccagtgaccgccttgctcctgccgctggccttgctgctccacgccgccaggccgctcgaggggaaaccaattcccaaccctcttctgggactggattcaaccggcagcggcgacaagcagctggacgccgacgtgtcccccaagcctaccatcttcctgccctctatcgccgagacaaagctccagaaggccggcacctacctgtgcctgctggaaaagttcttcccagatgtgattaagatccactggcaggaaaagaagtccaacaccatcctgggcagccaggaaggcaacaccatgaagaccaacgacacctacatgaagttcagctggctgaccgtgcccgagaagtccctggacaaagaacacagatgcatcgtgcggcacgaaaacaacaagaacggcgtggaccaggaaatcatcttcccacccatcaagaccgatgtgattacaatggaccccaaggacaactgctccaaggacgccaacgataccctgctgctccagctgaccaacaccagcgcctactacatgtacttgttgctgctgctgaagtccgtggtgtacttcgccatcatcacatgctgcctgctgcggagaaccgccttctgctgcaacggcgagaagtctagggccaagcgatctggatctggagcaacaaacttctcactactcaaacaagcaggtgacgtggaggagaatcccgggcctactagcatggccttaccagtgaccgccttgctcctgccgctggccttgctgctccacgccgccaggccggacatccagatgacacagagcccctctagcctgtctgccagcgtgggagacagagtgaccatcacctgtagagccagccagagcatcagaaactacctgaactggtatcagcaaaagcccggcaaggcccctgagctgctgattcatgctgcaagcagcctccagagcggcgtgccaagcagattttctggcagcggcagcggaaccgacttcaccctgacaatatctagcctccagcctgaggacttcgccagctactactgccagcagagctacagcgcccctcctatcacctttggacagggcaccagactggaaatcaagggcggaggcggaagtggaggcggaggatctggcggcggaggctctcaggttcagctccagcagtctggacctggcctggtcaagcctagccagacactgtctctgacctgtgccatcagcggcgatagcgtgtcctctaatagagccgcctggaactggatcagacagagccctagcagaggactccagtggctgggcagaacctactaccgcagcaagtggtacaacgactacgccgtgtctctgcggagccggatcaccatcaatcccgtgaccagcaagaaccaggtggccctgcacatgaacagcgtgacccctgaagataccgccgtgtactactgtgccagagccggaattgtggtggtgcccggacctgagacattctactactacgaccacggcctggacgtgtggggccagggaacaacagtgactgtctcttctacgcgtgagcagaaactgatctcggaagaggatgggagcggcagccagcctcacaccaagcccagcgtgttcgtgatgaagaacggcaccaacgtggcctgcctcgtgaaagagttctaccccaaggacatcaggatcaacctggtgtccagcaagaagatcaccgagttcgaccccgccatcgtgatctcccccagcggcaagtacaacgccgtgaagctggggaagtacgaggacagcaacagcgtgacctgctccgtgcagcacgacaacaagaccgtgcacagcaccgactttgaagtgaaaaccgactccaccgaccacgtgaagcccaaagagacagagaacaccaagcagcccagcaagagctgccacaagcccaaggccatcgtgcacaccgagaaagtgaacatgatgagcctgaccgtgctgggcctgcggatgctgttcgccaaaaccgtggccgtgaacttcctgctgaccgccaagctgttcttcctccgcgccaagagaagcggatctggcgtgaagcagaccctgaatttcgacctgctgaagctggctggcgacgtggaatccaacccaggcccttctagaggccatatgaccgagtacaagcccacggtgcgcctcgccacccgcgacgacgtccccagggccgtacgcaccctcgccgccgcgttcgccgactaccccgccacgcgccacaccgtcgatccggaccgccacatcgagcgggtcaccgagctgcaagaactcttcctcacgcgcgtcgggctcgacatcggcaaggtgtgggtcgcggacgacggcgccgcggtggcggtctggaccacgccggagagcgtcgaagcgggggcggtgttcgccgagatcggcccgcgcatggccgagttgagcggttcccggctggccgcgcagcaacagatggaaggcctcctggcgccgcaccggcccaaggagcccgcgtggttcctggccaccgtcggcgtctcgcccgaccaccagggcaagggtctgggcagcgccgtcgtgctccccggagtggaggcggccgagcgcgccggggtgcccgccttcctggagacctccgcgccccgcaacctccccttctacgagcggctcggcttcaccgtcaccgccgacgtcgaggtgcccgaaggaccgcgcacctggtgcatgacccgcaagcccggtgcctga

SEQ ID NO: 21908 - DNA, 3135 bp, synthetic construct
  source 1..3135: mol_type = other DNA
atggccttaccagtgaccgccttgctcctgccgctggccttgctgctccacgccgccaggccggacatccagatgacacagagcccctctagcctgtctgccagcgtgggagacagagtgaccatcacctgtagagccagccagagcatcagaaactacctgaactggtatcagcaaaagcccggcaaggcccctgagctgctgattcatgctgcaagcagcctccagagcggcgtgccaagcagattttctggcagcggcagcggaaccgacttcaccctgacaatatctagcctccagcctgaggacttcgccagctactactgccagcagagctacagcgcccctcctatcacctttggacagggcaccagactggaaatcaagggacagcctaaggccaatcctaccgtgacactgttccctccaagcagcgaagaactccaggccaacaaggccacacttgtgtgcctgatctccgacttctaccctggggctgtgacagtggcttggaaggccgatggatctcctgtgaaagccggcgtggaaaccaccaagccatccaagcagagcaacaacaaatacgccgccagctcctacctgagcctgacacctgagcagtggaagtcccacagatcctacagctgccaagtgacccacgaaggcagcaccgtggaaaagacagtggcccctacagagtgcagcggatcccagagcttcggcctgctggaccccaagctgtgctacctgctggatggcatcctgttcatctacggcgtgatcctgaccgccctgttcctgagagtgaagttcagcagaagcgccgacgcccctgcctaccagcagggacagaaccaactgtacaacgagctgaacctgggcagacgggaagagtacgacgtgctggacaagcggagaggcagggaccctgagatgggcggaaagccccagcggagaaagaacccccaggaaggactgtataacgaactccagaaagacaagatggccgaagcctacagcgagatcggcatgaagggcgagcggagaagaggcaagggccacgatggcctgtaccagggcctgagcaccgccaccaaggacacctatgacgccctgcacatgcaggccctgcctccaagaagggccaagcgatctggatctggagcaacaaacttctcactactcaaacaagcaggtgacgtggaggagaatcccgggcctactagtatggactggatttggcgcatccttttccttgtcggcgctgctaccggcgcgcattccttcgaacaggttcagctccagcagtctggacctggcctggtcaagcctagccagacactgtctctgacctgtgccatcagcggcgatagcgtgtcctctaatagagccgcctggaactggatcagacagagccctagcagaggactccagtggctgggcagaacctactaccgcagcaagtggtacaacgactacgccgtgtctctgcggagccggatcaccatcaatcccgtgaccagcaagaaccaggtggccctgcacatgaacagcgtgacccctgaagataccgccgtgtactactgtgccagagccggaattgtggtggtgcccggacctgagacattctactactacgaccacggcctggacgtgtggggccagggaacaacagtgactgtctcttctgcctctacaaagggaccctccgtgtttcctctggctcccagcagcaagtctacaagcggaggaacagccgctctgggctgcctggtcaaggattactttcccgagcctgtgaccgtgtcctggaatagcggagcactgacaagcggcgtgcacacctttccagccgtgctgcaaagcagcggcctgtactctctgagcagcgtggtcacagtgcctagctctagcctgggcacccagacctacatctgcaatgtgaaccacaagcctagcaacaccaaggtggacaagagagtggaacccaagagctgtggtacccagagttttgggttgttggaccctaaattgtgctatctgttggacggaatcctgttcatttacggagtgatcctgaccgcattgttcctgcgggttaagttttccagatccgcagacgcacccgcttaccaacaagggcagaaccaactctacaatgaacttaatttggggcggagggaagagtacgacgttctggacaaaaggaggggacgagatcccgagatgggcggaaagcctcagcgaaggaagaatccgcaagaggggctttataacgaactccagaaagataaaatggcagaagcctatagtgagattgggatgaagggagaaaggaggaggggtaaaggtcacgatgggttgtaccaaggattgagcacagccactaaagatacctatgatgcgctccacatgcaggccctgccgccaagacgcgccaagagaagcggatctggcgtgaagcagaccctgaatttcgacctgctgaagctggctggcgacgtggaatccaacccaggcccttctagaggccatatgaccgagtacaagcccacggtgcgcctcgccacccgcgacgacgtccccagggccgtacgcaccctcgccgccgcgttcgccgactaccccgccacgcgccacaccgtcgatccggaccgccacatcgagcgggtcaccgagctgcaagaactcttcctcacgcgcgtcgggctcgacatcggcaaggtgtgggtcgcggacgacggcgccgcggtggcggtctggaccacgccggagagcgtcgaagcgggggcggtgttcgccgagatcggcccgcgcatggccgagttgagcggttcccggctggccgcgcagcaacagatggaaggcctcctggcgccgcaccggcccaaggagcccgcgtggttcctggccaccgtcggcgtctcgcccgaccaccagggcaagggtctgggcagcgccgtcgtgctccccggagtggaggcggccgagcgcgccggggtgcccgccttcctggagacctccgcgccccgcaacctccccttctacgagcggctcggcttcaccgtcaccgccgacgtcgaggtgcccgaaggaccgcgcacctggtgcatgacccgcaagcccggtgcctga

SEQ ID NO: 21909 - DNA, 2490 bp, synthetic construct
  source 1..2490: mol_type = other DNA
atggccttaccagtgaccgccttgctcctgccgctggccttgctgctccacgccgccaggccggacatccagatgacacagagcccctctagcctgtctgccagcgtgggagacagagtgaccatcacctgtagagccagccagagcatcagaaactacctgaactggtatcagcaaaagcccggcaaggcccctgagctgctgattcatgctgcaagcagcctccagagcggcgtgccaagcagattttctggcagcggcagcggaaccgacttcaccctgacaatatctagcctccagcctgaggacttcgccagctactactgccagcagagctacagcgcccctcctatcacctttggacagggcaccagactggaaatcaagctcgaggacctgaagaacgtgttcccacctgaggtggccgtgttcgagcctagcgaggccgagatcagccacacccagaaagccaccctcgtgtgcctggctaccggcttctaccccgaccatgtggaactgtcttggtgggtcaacggcaaagaggtgcacagcggcgtgtctaccgacccccagccactgaaagaacagcccgccctgaacgacagccggtactgcctgagcagcagactgagagtgtccgccaccttctggcagaacccccggaaccacttcagatgccaggtgcagttctacggcctgagcgagaacgacgagtggacccaggacagagccaagcccgtgacccagatcgtgtctgccgaagcctggggcagagccgattgcggatcccagagcttcggcctgctggaccccaagctgtgctacctgctggatggcatcctgttcatctacggcgtgatcctgaccgccctgttcctgagagtgaagttcagcagaagcgccgacgcccctgcctaccagcagggacagaaccaactgtacaacgagctgaacctgggcagacgggaagagtacgacgtgctggacaagcggagaggcagggaccctgagatgggcggaaagccccagcggagaaagaacccccaggaaggactgtataacgaactccagaaagacaagatggccgaagcctacagcgagatcggcatgaagggcgagcggagaagaggcaagggccacgatggcctgtaccagggcctgagcaccgccaccaaggacacctatgacgccctgcacatgcaggccctgcctccaagaagggccaagcgatctggatctggagcaacaaacttctcactactcaaacaagcaggtgacgtggaggagaatcccgggcctactagtatggactggatttggcgcatccttttccttgtcggcgctgctaccggcgcgcattccttcgaacaggttcagctccagcagtctggacctggcctggtcaagcctagccagacactgtctctgacctgtgccatcagcggcgatagcgtgtcctctaatagagccgcctggaactggatcagacagagccctagcagaggactccagtggctgggcagaacctactaccgcagcaagtggtacaacgactacgccgtgtctctgcggagccggatcaccatcaatcccgtgaccagcaagaaccaggtggccctgcacatgaacagcgtgacccctgaagataccgccgtgtactactgtgccagagccggaattgtggtggtgcccggacctgagacattctactactacgaccacggcctggacgtgtggggccagggaacaacagtgactgtctcttctacgcgtatccagaaccctgatcctgccgtgtaccagctgcgggatagcaagagcagcgacaagagcgtgtgtctgttcaccgacttcgacagccagaccaacgtgtcccagagcaaggactccgacgtgtacatcaccgataagaccgtgctggacatgcggagcatggacttcaagagcaactccgccgtggcctggtccaacaagtccgatttcgcctgcgccaacgccttcaacaacagcattatccccgaggacacattcttcccaagccccgagagcagctgcggtacccagagttttgggttgttggaccctaaattgtgctatctgttggacggaatcctgttcatttacggagtgatcctgaccgcattgttcctgcgggttaagttttccagatccgcagacgcacccgcttaccaacaagggcagaaccaactctacaatgaacttaatttggggcggagggaagagtacgacgttctggacaaaaggaggggacgagatcccgagatgggcggaaagcctcagcgaaggaagaatccgcaagaggggctttataacgaactccagaaagataaaatggcagaagcctatagtgagattgggatgaagggagaaaggaggaggggtaaaggtcacgatgggttgtaccaaggattgagcacagccactaaagatacctatgatgcgctccacatgcaggccctgccgccaaga

SEQ ID NO: 21910 - DNA, 2490 bp, synthetic construct
  source 1..2490: mol_type = other DNA
atggccttaccagtgaccgccttgctcctgccgctggccttgctgctccacgccgccaggccggacatccagatgacacagagcccctctagcctgtctgccagcgtgggagacagagtgaccatcacctgtagagccagccagagcatcagaaactacctgaactggtatcagcaaaagcccggcaaggcccctgagctgctgattcatgctgcaagcagcctccagagcggcgtgccaagcagattttctggcagcggcagcggaaccgacttcaccctgacaatatctagcctccagcctgaggacttcgccagctactactgccagcagagctacagcgcccctcctatcacctttggacagggcaccagactggaaatcaagctcgaggacctgaagaacgtgttcccacctgaggtggccgtgttcgagcctagcaaggccgagatcgcccacacccagaaagccaccctcgtgtgcctggctaccggcttctaccccgaccatgtggaactgtcttggtgggtcaacggcaaagaggtgcacagcggcgtgtgtaccgacccccagccactgaaagaacagcccgccctgaacgacagccggtactgcctgagcagcagactgagagtgtccgccaccttctggcagaacccccggaaccacttcagatgccaggtgcagttctacggcctgagcgagaacgacgagtggacccaggacagagccaagcccgtgacccagatcgtgtctgccgaagcctggggcagagccgattgcggatcccagagcttcggcctgctggaccccaagctgtgctacctgctggatggcatcctgttcatctacggcgtgatcctgaccgccctgttcctgagagtgaagttcagcagaagcgccgacgcccctgcctaccagcagggacagaaccaactgtacaacgagctgaacctgggcagacgggaagagtacgacgtgctggacaagcggagaggcagggaccctgagatgggcggaaagccccagcggagaaagaacccccaggaaggactgtataacgaactccagaaagacaagatggccgaagcctacagcgagatcggcatgaagggcgagcggagaagaggcaagggccacgatggcctgtaccagggcctgagcaccgccaccaaggacacctatgacgccctgcacatgcaggccctgcctccaagaagggccaagcgatctggatctggagcaacaaacttctcactactcaaacaagcaggtgacgtggaggagaatcccgggcctactagtatggactggatttggcgcatccttttccttgtcggcgctgctaccggcgcgcattccttcgaacaggttcagctccagcagtctggacctggcctggtcaagcctagccagacactgtctctgacctgtgccatcagcggcgatagcgtgtcctctaatagagccgcctggaactggatcagacagagccctagcagaggactccagtggctgggcagaacctactaccgcagcaagtggtacaacgactacgccgtgtctctgcggagccggatcaccatcaatcccgtgaccagcaagaaccaggtggccctgcacatgaacagcgtgacccctgaagataccgccgtgtactactgtgccagagccggaattgtggtggtgcccggacctgagacattctactactacgaccacggcctggacgtgtggggccagggaacaacagtgactgtctcttctacgcgtatccagaaccctgatcctgccgtgtaccagctgcgggatagcaagagcagcgacaagagcgtgtgtctgttcaccgacttcgacagccagaccaacgtgtcccagagcaaggactccgacgtgtacatcaccgataagtgcgtgctggacatgcggagcatggacttcaagagcaactccgccgtggcctggtccaacaagtccgatttcgcctgcgccaacgccttcaacaacagcattatccccgaggacacattcttcccaagcagcgacgtgccctgcggtacccagagttttgggttgttggaccctaaattgtgctatctgttggacggaatcctgttcatttacggagtgatcctgaccgcattgttcctgcgggttaagttttccagatccgcagacgcacccgcttaccaacaagggcagaaccaactctacaatgaacttaatttggggcggagggaagagtacgacgttctggacaaaaggaggggacgagatcccgagatgggcggaaagcctcagcgaaggaagaatccgcaagaggggctttataacgaactccagaaagataaaatggcagaagcctatagtgagattgggatgaagggagaaaggaggaggggtaaaggtcacgatgggttgtaccaaggattgagcacagccactaaagatacctatgatgcgctccacatgcaggccctgccgccaaga

SEQ ID NO: 21911 - DNA, 2703 bp, synthetic construct
  source 1..2703: mol_type = other DNA
atggccttaccagtgaccgccttgctcctgccgctggccttgctgctccacgccgccaggccggacatccagatgacacagagcccctctagcctgtctgccagcgtgggagacagagtgaccatcacctgtagagccagccagagcatcagaaactacctgaactggtatcagcaaaagcccggcaaggcccctgagctgctgattcatgctgcaagcagcctccagagcggcgtgccaagcagattttctggcagcggcagcggaaccgacttcaccctgacaatatctagcctccagcctgaggacttcgccagctactactgccagcagagctacagcgcccctcctatcacctttggacagggcaccagactggaaatcaagctcgaggggaaaccaattcccaaccctcttctgggactggattcaaccggcagcggcgaggacctgaagaacgtgttcccacctgaggtggccgtgttcgagcctagcgaggccgagatcagccacacccagaaagccaccctcgtgtgcctggctaccggcttctaccccgaccatgtggaactgtcttggtgggtcaacggcaaagaggtgcacagcggcgtgtctaccgacccccagccactgaaagaacagcccgccctgaacgacagccggtactgcctgagcagcagactgagagtgtccgccaccttctggcagaacccccggaaccacttcagatgccaggtgcagttctacggcctgagcgagaacgacgagtggacccaggacagagccaagcccgtgacccagatcgtgtctgccgaagcctggggcagagccgattgcggatcccagagcttcggcctgctggaccccaagctgtgctacctgctggatggcatcctgttcatctacggcgtgatcctgaccgccctgttcctgagagtgaagttcagcagaagcgccgacgcccctgcctaccagcagggacagaaccaactgtacaacgagctgaacctgggcagacgggaagagtacgacgtgctggacaagcggagaggcagggaccctgagatgggcggaaagccccagcggagaaagaacccccaggaaggactgtataacgaactccagaaagacaagatggccgaagcctacagcgagatcggcatgaagggcgagcggagaagaggcaagggccacgatggcctgtaccagggcctgagcaccgccaccaaggacacctatgacgccctgcacatgcaggccctgcctccaagaagggccaagcgatctggatctggagcaacaaacttctcactactcaaacaagcaggtgacgtggaggagaatcccgggcctactagtatggactggatttggcgcatccttttccttgtcggcgctgctaccggcgcgcattccttcgaacaggttcagctccagcagtctggacctggcctggtcaagcctagccagacactgtctctgacctgtgccatcagcggcgatagcgtgtcctctaatagagccgcctggaactggatcagacagagccctagcagaggactccagtggctgggcagaacctactaccgcagcaagtggtacaacgactacgccgtgtctctgcggagccggatcaccatcaatcccgtgaccagcaagaaccaggtggccctgcacatgaacagcgtgacccctgaagataccgccgtgtactactgtgccagagccggaattgtggtggtgcccggacctgagacattctactactacgaccacggcctggacgtgtggggccagggaacaacagtgactgtctcttctacgcgtgagcagaaactgatctcggaagaggatgggagcggcatccagaaccctgatcctgccgtgtaccagctgcgggatagcaagagcagcgacaagagcgtgtgtctgttcaccgacttcgacagccagaccaacgtgtcccagagcaaggactccgacgtgtacatcaccgataagaccgtgctggacatgcggagcatggacttcaagagcaactccgccgtggcctggtccaacaagtccgatttcgcctgcgccaacgccttcaacaacagcattatccccgaggacacattcttcccaagccccgagagcagctgcggtacccagagttttgggttgttggaccctaaattgtgctatctgttggacggaatcctgttcatttacggagtgatcctgaccgcattgttcctgaggagcaagcggtcacggctgctccacagcgattacatgaatatgacaccacgaagaccgggtcctactcgcaaacactaccaaccctacgcacctccccgcgactttgcagcgtaccgatctcgggttaagttttccagatccgcagacgcacccgcttaccaacaagggcagaaccaactctacaatgaacttaatttggggcggagggaagagtacgacgttctggacaaaaggaggggacgagatcccgagatgggcggaaagcctcagcgaaggaagaatccgcaagaggggctttataacgaactccagaaagataaaatggcagaagcctatagtgagattgggatgaagggagaaaggaggaggggtaaaggtcacgatgggttgtaccaaggattgagcacagccactaaagatacctatgatgcgctccacatgcaggccctgccgccaaga

SEQ ID NO: 21912 - DNA, 2826 bp, synthetic construct
  source 1..2826: mol_type = other DNA
atggccttaccagtgaccgccttgctcctgccgctggccttgctgctccacgccgccaggccggacatccagatgacacagagcccctctagcctgtctgccagcgtgggagacagagtgaccatcacctgtagagccagccagagcatcagaaactacctgaactggtatcagcaaaagcccggcaaggcccctgagctgctgattcatgctgcaagcagcctccagagcggcgtgccaagcagattttctggcagcggcagcggaaccgacttcaccctgacaatatctagcctccagcctgaggacttcgccagctactactgccagcagagctacagcgcccctcctatcacctttggacagggcaccagactggaaatcaagctcgaggggaaaccaattcccaaccctcttctgggactggattcaaccggcagcggcgaggacctgaagaacgtgttcccacctgaggtggccgtgttcgagcctagcgaggccgagatcagccacacccagaaagccaccctcgtgtgcctggctaccggcttctaccccgaccatgtggaactgtcttggtgggtcaacggcaaagaggtgcacagcggcgtgtctaccgacccccagccactgaaagaacagcccgccctgaacgacagccggtactgcctgagcagcagactgagagtgtccgccaccttctggcagaacccccggaaccacttcagatgccaggtgcagttctacggcctgagcgagaacgacgagtggacccaggacagagccaagcccgtgacccagatcgtgtctgccgaagcctggggcagagccgattgcggatcccagagcttcggcctgctggaccccaagctgtgctacctgctggatggcatcctgttcatctacggcgtgatcctgaccgccctgttcctgaggagtaagaggagcaggctcctgcacagtgactacatgaacatgactccacgccgccccggacccacccgcaagcattaccagccctatgccccaccacgcgacttcgcagcctatcgctccagagtgaagttcagcagaagcgccgacgcccctgcctaccagcagggacagaaccaactgtacaacgagctgaacctgggcagacgggaagagtacgacgtgctggacaagcggagaggcagggaccctgagatgggcggaaagccccagcggagaaagaacccccaggaaggactgtataacgaactccagaaagacaagatggccgaagcctacagcgagatcggcatgaagggcgagcggagaagaggcaagggccacgatggcctgtaccagggcctgagcaccgccaccaaggacacctatgacgccctgcacatgcaggccctgcctccaagaagggccaagcgatctggatctggagcaacaaacttctcactactcaaacaagcaggtgacgtggaggagaatcccgggcctactagtatggactggatttggcgcatccttttccttgtcggcgctgctaccggcgcgcattccttcgaacaggttcagctccagcagtctggacctggcctggtcaagcctagccagacactgtctctgacctgtgccatcagcggcgatagcgtgtcctctaatagagccgcctggaactggatcagacagagccctagcagaggactccagtggctgggcagaacctactaccgcagcaagtggtacaacgactacgccgtgtctctgcggagccggatcaccatcaatcccgtgaccagcaagaaccaggtggccctgcacatgaacagcgtgacccctgaagataccgccgtgtactactgtgccagagccggaattgtggtggtgcccggacctgagacattctactactacgaccacggcctggacgtgtggggccagggaacaacagtgactgtctcttctacgcgtgagcagaaactgatctcggaagaggatgggagcggcatccagaaccctgatcctgccgtgtaccagctgcgggatagcaagagcagcgacaagagcgtgtgtctgttcaccgacttcgacagccagaccaacgtgtcccagagcaaggactccgacgtgtacatcaccgataagaccgtgctggacatgcggagcatggacttcaagagcaactccgccgtggcctggtccaacaagtccgatttcgcctgcgccaacgccttcaacaacagcattatccccgaggacacattcttcccaagccccgagagcagctgcggtacccagagttttgggttgttggaccctaaattgtgctatctgttggacggaatcctgttcatttacggagtgatcctgaccgcattgttcctgaggagcaagcggtcacggctgctccacagcgattacatgaatatgacaccacgaagaccgggtcctactcgcaaacactaccaaccctacgcacctccccgcgactttgcagcgtaccgatctcgggttaagttttccagatccgcagacgcacccgcttaccaacaagggcagaaccaactctacaatgaacttaatttggggcggagggaagagtacgacgttctggacaaaaggaggggacgagatcccgagatgggcggaaagcctcagcgaaggaagaatccgcaagaggggctttataacgaactccagaaagataaaatggcagaagcctatagtgagattgggatgaagggagaaaggaggaggggtaaaggtcacgatgggttgtaccaaggattgagcacagccactaaagatacctatgatgcgctccacatgcaggccctgccgccaaga

SEQ ID NO: 21913 - DNA, 2709 bp, synthetic construct
  source 1..2709: mol_type = other DNA
atggccttaccagtgaccgccttgctcctgccgctggccttgctgctccacgccgccaggccggacatccagatgacacagagcccctctagcctgtctgccagcgtgggagacagagtgaccatcacctgtagagccagccagagcatcagaaactacctgaactggtatcagcaaaagcccggcaaggcccctgagctgctgattcatgctgcaagcagcctccagagcggcgtgccaagcagattttctggcagcggcagcggaaccgacttcaccctgacaatatctagcctccagcctgaggacttcgccagctactactgccagcagagctacagcgcccctcctatcacctttggacagggcaccagactggaaatcaagctcgaggggaaaccaattcccaaccctcttctgggactggattcaaccggcagcggcgaggacctgaagaacgtgttcccacctgaggtggccgtgttcgagcctagcgaggccgagatcagccacacccagaaagccaccctcgtgtgcctggctaccggcttctaccccgaccatgtggaactgtcttggtgggtcaacggcaaagaggtgcacagcggcgtgtctaccgacccccagccactgaaagaacagcccgccctgaacgacagccggtactgcctgagcagcagactgagagtgtccgccaccttctggcagaacccccggaaccacttcagatgccaggtgcagttctacggcctgagcgagaacgacgagtggacccaggacagagccaagcccgtgacccagatcgtgtctgccgaagcctggggcagagccgattgcggatcccagagcttcggcctgctggaccccaagctgtgctacctgctggatggcatcctgttcatctacggcgtgatcctgaccgccctgttcctgagagtgaagttcagcagaagcgccgacgcccctgcctaccagcagggacagaaccaactgtacaacgagctgaacctgggcagacgggaagagtacgacgtgctggacaagcggagaggcagggaccctgagatgggcggaaagccccagcggagaaagaacccccaggaaggactgtataacgaactccagaaagacaagatggccgaagcctacagcgagatcggcatgaagggcgagcggagaagaggcaagggccacgatggcctgtaccagggcctgagcaccgccaccaaggacacctatgacgccctgcacatgcaggccctgcctccaagaagggccaagcgatctggatctggagcaacaaacttctcactactcaaacaagcaggtgacgtggaggagaatcccgggcctactagtatggactggatttggcgcatccttttccttgtcggcgctgctaccggcgcgcattccttcgaacaggttcagctccagcagtctggacctggcctggtcaagcctagccagacactgtctctgacctgtgccatcagcggcgatagcgtgtcctctaatagagccgcctggaactggatcagacagagccctagcagaggactccagtggctgggcagaacctactaccgcagcaagtggtacaacgactacgccgtgtctctgcggagccggatcaccatcaatcccgtgaccagcaagaaccaggtggccctgcacatgaacagcgtgacccctgaagataccgccgtgtactactgtgccagagccggaattgtggtggtgcccggacctgagacattctactactacgaccacggcctggacgtgtggggccagggaacaacagtgactgtctcttctacgcgtgagcagaaactgatctcggaagaggatctggggagcggcatccagaaccctgatcctgccgtgtaccagctgcgggatagcaagagcagcgacaagagcgtgtgtctgttcaccgacttcgacagccagaccaacgtgtcccagagcaaggactccgacgtgtacatcaccgataagaccgtgctggacatgcggagcatggacttcaagagcaactccgccgtggcctggtccaacaagtccgatttcgcctgcgccaacgccttcaacaacagcattatccccgaggacacattcttcccaagccccgagagcagctgcggtacccagagttttgggttgttggaccctaaattgtgctatctgttggacggaatcctgttcatttacggagtgatcctgaccgcattgttcctgaagagaggccggaagaagctgctgtacatcttcaagcagcctttcatgcggcccgtgcagaccacccaggaagaggacggctgctcctgccggttccccgaggaagaagaaggcggctgcgagctgcgggttaagttttccagatccgcagacgcacccgcttaccaacaagggcagaaccaactctacaatgaacttaatttggggcggagggaagagtacgacgttctggacaaaaggaggggacgagatcccgagatgggcggaaagcctcagcgaaggaagaatccgcaagaggggctttataacgaactccagaaagataaaatggcagaagcctatagtgagattgggatgaagggagaaaggaggaggggtaaaggtcacgatgggttgtaccaaggattgagcacagccactaaagatacctatgatgcgctccacatgcaggccctgccgccaaga

SEQ ID NO: 21914 - DNA, 2835 bp, synthetic construct
  source 1..2835: mol_type = other DNA
atggccttaccagtgaccgccttgctcctgccgctggccttgctgctccacgccgccaggccggacatccagatgacacagagcccctctagcctgtctgccagcgtgggagacagagtgaccatcacctgtagagccagccagagcatcagaaactacctgaactggtatcagcaaaagcccggcaaggcccctgagctgctgattcatgctgcaagcagcctccagagcggcgtgccaagcagattttctggcagcggcagcggaaccgacttcaccctgacaatatctagcctccagcctgaggacttcgccagctactactgccagcagagctacagcgcccctcctatcacctttggacagggcaccagactggaaatcaagctcgaggggaaaccaattcccaaccctcttctgggactggattcaaccggcagcggcgaggacctgaagaacgtgttcccacctgaggtggccgtgttcgagcctagcgaggccgagatcagccacacccagaaagccaccctcgtgtgcctggctaccggcttctaccccgaccatgtggaactgtcttggtgggtcaacggcaaagaggtgcacagcggcgtgtctaccgacccccagccactgaaagaacagcccgccctgaacgacagccggtactgcctgagcagcagactgagagtgtccgccaccttctggcagaacccccggaaccacttcagatgccaggtgcagttctacggcctgagcgagaacgacgagtggacccaggacagagccaagcccgtgacccagatcgtgtctgccgaagcctggggcagagccgattgcggatcccagagcttcggcctgctggaccccaagctgtgctacctgctggatggcatcctgttcatctacggcgtgatcctgaccgccctgttcctgaaacggggcagaaagaaactcctgtatatattcaaacaaccatttatgagaccagtacaaactactcaagaggaagatggctgtagctgccgatttccagaagaagaagaaggaggatgtgaactgagagtgaagttcagcagaagcgccgacgcccctgcctaccagcagggacagaaccaactgtacaacgagctgaacctgggcagacgggaagagtacgacgtgctggacaagcggagaggcagggaccctgagatgggcggaaagccccagcggagaaagaacccccaggaaggactgtataacgaactccagaaagacaagatggccgaagcctacagcgagatcggcatgaagggcgagcggagaagaggcaagggccacgatggcctgtaccagggcctgagcaccgccaccaaggacacctatgacgccctgcacatgcaggccctgcctccaagaagggccaagcgatctggatctggagcaacaaacttctcactactcaaacaagcaggtgacgtggaggagaatcccgggcctactagtatggactggatttggcgcatccttttccttgtcggcgctgctaccggcgcgcattccttcgaacaggttcagctccagcagtctggacctggcctggtcaagcctagccagacactgtctctgacctgtgccatcagcggcgatagcgtgtcctctaatagagccgcctggaactggatcagacagagccctagcagaggactccagtggctgggcagaacctactaccgcagcaagtggtacaacgactacgccgtgtctctgcggagccggatcaccatcaatcccgtgaccagcaagaaccaggtggccctgcacatgaacagcgtgacccctgaagataccgccgtgtactactgtgccagagccggaattgtggtggtgcccggacctgagacattctactactacgaccacggcctggacgtgtggggccagggaacaacagtgactgtctcttctacgcgtgagcagaaactgatctcggaagaggatctggggagcggcatccagaaccctgatcctgccgtgtaccagctgcgggatagcaagagcagcgacaagagcgtgtgtctgttcaccgacttcgacagccagaccaacgtgtcccagagcaaggactccgacgtgtacatcaccgataagaccgtgctggacatgcggagcatggacttcaagagcaactccgccgtggcctggtccaacaagtccgatttcgcctgcgccaacgccttcaacaacagcattatccccgaggacacattcttcccaagccccgagagcagctgcggtacccagagttttgggttgttggaccctaaattgtgctatctgttggacggaatcctgttcatttacggagtgatcctgaccgcattgttcctgaagagaggccggaagaagctgctgtacatcttcaagcagcctttcatgcggcccgtgcagaccacccaggaagaggacggctgctcctgccggttccccgaggaagaagaaggcggctgcgagctgcgggttaagttttccagatccgcagacgcacccgcttaccaacaagggcagaaccaactctacaatgaacttaatttggggcggagggaagagtacgacgttctggacaaaaggaggggacgagatcccgagatgggcggaaagcctcagcgaaggaagaatccgcaagaggggctttataacgaactccagaaagataaaatggcagaagcctatagtgagattgggatgaagggagaaaggaggaggggtaaaggtcacgatgggttgtaccaaggattgagcacagccactaaagatacctatgatgcgctccacatgcaggccctgccgccaaga

SEQ ID NO: 21915 - DNA, 2508 bp, synthetic construct
  source 1..2508: mol_type = other DNA
atggccttaccagtgaccgccttgctcctgccgctggccttgctgctccacgccgccaggccggacatccagatgacacagagcccctctagcctgtctgccagcgtgggagacagagtgaccatcacctgtagagccagccagagcatcagaaactacctgaactggtatcagcaaaagcccggcaaggcccctgagctgctgattcatgctgcaagcagcctccagagcggcgtgccaagcagattttctggcagcggcagcggaaccgacttcaccctgacaatatctagcctccagcctgaggacttcgccagctactactgccagcagagctacagcgcccctcctatcacctttggacagggcaccagactggaaatcaagctcgagcagagcttcggcctgctggaccccaagctgtgctacctgctggatggcatcctgttcatctacggcgtgatcctgaccgccctgttcctgagagtgaagttcagcagaagcgccgacgcccctgcctaccagcagggacagaaccaactgtacaacgagctgaacctgggcagacgggaagagtacgacgtgctggacaagcggagaggcagggaccctgagatgggcggaaagccccagcggagaaagaacccccaggaaggactgtataacgaactccagaaagacaagatggccgaagcctacagcgagatcggcatgaagggcgagcggagaagaggcaagggccacgatggcctgtaccagggcctgagcaccgccaccaaggacacctatgacgccctgcacatgcaggccctgcctccaagaagggccaagcgatctggatctggagcaacaaacttctcactactcaaacaagcaggtgacgtggaggagaatcccgggcctactagtatggactggatttggcgcatccttttccttgtcggcgctgctaccggcgcgcattccttcgaacaggttcagctccagcagtctggacctggcctggtcaagcctagccagacactgtctctgacctgtgccatcagcggcgatagcgtgtcctctaatagagccgcctggaactggatcagacagagccctagcagaggactccagtggctgggcagaacctactaccgcagcaagtggtacaacgactacgccgtgtctctgcggagccggatcaccatcaatcccgtgaccagcaagaaccaggtggccctgcacatgaacagcgtgacccctgaagataccgccgtgtactactgtgccagagccggaattgtggtggtgcccggacctgagacattctactactacgaccacggcctggacgtgtggggccagggaacaacagtgactgtctcttctacgcgtcagagttttgggttgttggaccctaaattgtgctatctgttggacggaatcctgttcatttacggagtgatcctgaccgcattgttcctgcgggttaagttttccagatccgcagacgcacccgcttaccaacaagggcagaaccaactctacaatgaacttaatttggggcggagggaagagtacgacgttctggacaaaaggaggggacgagatcccgagatgggcggaaagcctcagcgaaggaagaatccgcaagaggggctttataacgaactccagaaagataaaatggcagaagcctatagtgagattgggatgaagggagaaaggaggaggggtaaaggtcacgatgggttgtaccaaggattgagcacagccactaaagatacctatgatgcgctccacatgcaggccctgccgccaagacgcgccaagagaagcggatctggcgtgaagcagaccctgaatttcgacctgctgaagctggctggcgacgtggaatccaacccaggcccttctagaggccatatgaccgagtacaagcccacggtgcgcctcgccacccgcgacgacgtccccagggccgtacgcaccctcgccgccgcgttcgccgactaccccgccacgcgccacaccgtcgatccggaccgccacatcgagcgggtcaccgagctgcaagaactcttcctcacgcgcgtcgggctcgacatcggcaaggtgtgggtcgcggacgacggcgccgcggtggcggtctggaccacgccggagagcgtcgaagcgggggcggtgttcgccgagatcggcccgcgcatggccgagttgagcggttcccggctggccgcgcagcaacagatggaaggcctcctggcgccgcaccggcccaaggagcccgcgtggttcctggccaccgtcggcgtctcgcccgaccaccagggcaagggtctgggcagcgccgtcgtgctccccggagtggaggcggccgagcgcgccggggtgcccgccttcctggagacctccgcgccccgcaacctccccttctacgagcggctcggcttcaccgtcaccgccgacgtcgaggtgcccgaaggaccgcgcacctggtgcatgacccgcaagcccggtgcctga

SEQ ID NO: 21916 - DNA, 1980 bp, synthetic construct
  source 1..1980: mol_type = other DNA
atggccttaccagtgaccgccttgctcctgccgctggccttgctgctccacgccgccaggccggacatccagatgacacagagcccctctagcctgtctgccagcgtgggagacagagtgaccatcacctgtagagccagccagagcatcagaaactacctgaactggtatcagcaaaagcccggcaaggcccctgagctgctgattcatgctgcaagcagcctccagagcggcgtgccaagcagattttctggcagcggcagcggaaccgacttcaccctgacaatatctagcctccagcctgaggacttcgccagctactactgccagcagagctacagcgcccctcctatcacctttggacagggcaccagactggaaatcaagctcgagggacagcctaaggccaatcctaccgtgacactgttccctccaagcagcgaagaactccaggccaacaaggccacacttgtgtgcctgatctccgacttctaccctggggctgtgacagtggcttggaaggccgatggatctcctgtgaaagccggcgtggaaaccaccaagccatccaagcagagcaacaacaaatacgccgccagctcctacctgagcctgacacctgagcagtggaagtcccacagatcctacagctgccaagtgacccacgaaggcagcaccgtggaaaagacagtggcccctacagagtgcagccccatcaagaccgatgtgattacaatggaccccaaggacaactgctccaaggacgccaacgataccctgctgctccagctgaccaacaccagcgcctactacatgtacttgttgctgctgctgaagtccgtggtgtacttcgccatcatcacatgctgcctgctgcggagaaccgccttctgctgcaacggcgagaagtctagggccaagcgatctggatctggagcaacaaacttctcactactcaaacaagcaggtgacgtggaggagaatcccgggcctactagtatggactggatttggcgcatccttttccttgtcggcgctgctaccggcgcgcattccttcgaacaggttcagctccagcagtctggacctggcctggtcaagcctagccagacactgtctctgacctgtgccatcagcggcgatagcgtgtcctctaatagagccgcctggaactggatcagacagagccctagcagaggactccagtggctgggcagaacctactaccgcagcaagtggtacaacgactacgccgtgtctctgcggagccggatcaccatcaatcccgtgaccagcaagaaccaggtggccctgcacatgaacagcgtgacccctgaagataccgccgtgtactactgtgccagagccggaattgtggtggtgcccggacctgagacattctactactacgaccacggcctggacgtgtggggccagggaacaacagtgactgtctcttctacgcgtgcctctacaaagggaccctccgtgtttcctctggctcccagcagcaagtctacaagcggaggaacagccgctctgggctgcctggtcaaggattactttcccgagcctgtgaccgtgtcctggaatagcggagcactgacaagcggcgtgcacacctttccagccgtgctgcaaagcagcggcctgtactctctgagcagcgtggtcacagtgcctagctctagcctgggcacccagacctacatctgcaatgtgaaccacaagcctagcaacaccaaggtggacaagagagtggaacccaagagctgtgaagtgaaaaccgactccaccgaccacgtgaagcccaaagagacagagaacaccaagcagcccagcaagagctgccacaagcccaaggccatcgtgcacaccgagaaagtgaacatgatgagcctgaccgtgctgggcctgcggatgctgttcgccaaaaccgtggccgtgaacttcctgctgaccgccaagctgttcttcctc

SEQ ID NO: 21917 - DNA, 1914 bp, synthetic construct
  source 1..1914: mol_type = other DNA
atggccttaccagtgaccgccttgctcctgccgctggccttgctgctccacgccgccaggccggacatccagatgacacagagcccctctagcctgtctgccagcgtgggagacagagtgaccatcacctgtagagccagccagagcatcagaaactacctgaactggtatcagcaaaagcccggcaaggcccctgagctgctgattcatgctgcaagcagcctccagagcggcgtgccaagcagattttctggcagcggcagcggaaccgacttcaccctgacaatatctagcctccagcctgaggacttcgccagctactactgccagcagagctacagcgcccctcctatcacctttggacagggcaccagactggaaatcaagctcgagggacagcctaaggccaatcctaccgtgacactgttccctccaagcagcgaagaactccaggccaacaaggccacacttgtgtgcctgatctccgacttctaccctggggctgtgacagtggcttggaaggccgatggatctcctgtgaaagccggcgtggaaaccaccaagccatccaagcagagcaacaacaaatacgccgccagctcctacctgagcctgacacctgagcagtggaagtcccacagatcctacagctgccaagtgacccacgaaggcagcaccgtggaaaagacagtggcccctacagagtgcagcggcagagccgattgcggcatcaccagcgccagctaccaccagggcgtgctgagcgccaccatcctgtacgagatcctgctgggcaaggccaccctgtacgccgtgctggtgtctgccctggtgctgatggctatggtcaagcggaaggacagccggggaagggccaagcgatctggatctggagcaacaaacttctcactactcaaacaagcaggtgacgtggaggagaatcccgggcctactagtatggactggatttggcgcatccttttccttgtcggcgctgctaccggcgcgcattccttcgaacaggttcagctccagcagtctggacctggcctggtcaagcctagccagacactgtctctgacctgtgccatcagcggcgatagcgtgtcctctaatagagccgcctggaactggatcagacagagccctagcagaggactccagtggctgggcagaacctactaccgcagcaagtggtacaacgactacgccgtgtctctgcggagccggatcaccatcaatcccgtgaccagcaagaaccaggtggccctgcacatgaacagcgtgacccctgaagataccgccgtgtactactgtgccagagccggaattgtggtggtgcccggacctgagacattctactactacgaccacggcctggacgtgtggggccagggaacaacagtgactgtctcttctacgcgtgcctctacaaagggaccctccgtgtttcctctggctcccagcagcaagtctacaagcggaggaacagccgctctgggctgcctggtcaaggattactttcccgagcctgtgaccgtgtcctggaatagcggagcactgacaagcggcgtgcacacctttccagccgtgctgcaaagcagcggcctgtactctctgagcagcgtggtcacagtgcctagctctagcctgggcacccagacctacatctgcaatgtgaaccacaagcctagcaacaccaaggtggacaagagagtggaacccaagagctgtatccccgaggacacattcttcccaagcagcgacgtgccctgcgacgtgaagctggtggaaaagagcttcgagacagacaccaacctgaacttccagaacctgagcgtgatcggcttcagaatcctgctgctgaaagtggccggctttaacctgctgatgaccctgcggctgtggtccagc

SEQ ID NO: 21918 - DNA, 1914 bp, synthetic construct
  source 1..1914: mol_type = other DNA
atggccttaccagtgaccgccttgctcctgccgctggccttgctgctccacgccgccaggccggacatccagatgacacagagcccctctagcctgtctgccagcgtgggagacagagtgaccatcacctgtagagccagccagagcatcagaaactacctgaactggtatcagcaaaagcccggcaaggcccctgagctgctgattcatgctgcaagcagcctccagagcggcgtgccaagcagattttctggcagcggcagcggaaccgacttcaccctgacaatatctagcctccagcctgaggacttcgccagctactactgccagcagagctacagcgcccctcctatcacctttggacagggcaccagactggaaatcaagctcgagggacagcctaaggccaatcctaccgtgacactgttccctccaagcagcgaagaactccaggccaacaaggccacacttgtgtgcctgatctccgacttctaccctggggctgtgacagtggcttggaaggccgatggatctcctgtgaaagccggcgtggaaaccaccaagccatccaagcagagcaacaacaaatacgccgccagctcctacctgagcctgacacctgagcagtggaagtcccacagatcctacagctgccaagtgacccacgaaggcagcaccgtggaaaagacagtggcccctacagagtgcagcggcagagccgattgcggctttaccagcgagagctaccagcagggcgtgctgagcgccaccatcctgtacgagatcctgctgggcaaggccaccctgtacgccgtgctggtgtctgccctggtgctgatggctatggtcaagcggaaggacagccggggaagggccaagcgatctggatctggagcaacaaacttctcactactcaaacaagcaggtgacgtggaggagaatcccgggcctactagtatggactggatttggcgcatccttttccttgtcggcgctgctaccggcgcgcattccttcgaacaggttcagctccagcagtctggacctggcctggtcaagcctagccagacactgtctctgacctgtgccatcagcggcgatagcgtgtcctctaatagagccgcctggaactggatcagacagagccctagcagaggactccagtggctgggcagaacctactaccgcagcaagtggtacaacgactacgccgtgtctctgcggagccggatcaccatcaatcccgtgaccagcaagaaccaggtggccctgcacatgaacagcgtgacccctgaagataccgccgtgtactactgtgccagagccggaattgtggtggtgcccggacctgagacattctactactacgaccacggcctggacgtgtggggccagggaacaacagtgactgtctcttctacgcgtgcctctacaaagggaccctccgtgtttcctctggctcccagcagcaagtctacaagcggaggaacagccgctctgggctgcctggtcaaggattactttcccgagcctgtgaccgtgtcctggaatagcggagcactgacaagcggcgtgcacacctttccagccgtgctgcaaagcagcggcctgtactctctgagcagcgtggtcacagtgcctagctctagcctgggcacccagacctacatctgcaatgtgaaccacaagcctagcaacaccaaggtggacaagagagtggaacccaagagctgtatccccgaggacacattcttcccaagccccgagagcagctgcgacgtgaagctggtggaaaagagcttcgagacagacaccaacctgaacttccagaacctgagcgtgatcggcttcagaatcctgctgctgaaagtggccggctttaacctgctgatgaccctgcggctgtggtccagc

SEQ ID NO: 21919 - DNA, 1392 bp, synthetic construct
  source 1..1392: mol_type = other DNA
atggccttaccagtgaccgccttgctcctgccgctggccttgctgctccacgccgccaggccggacatccagatgacacagagcccctctagcctgtctgccagcgtgggagacagagtgaccatcacctgtagagccagccagagcatcagaaactacctgaactggtatcagcaaaagcccggcaaggcccctgagctgctgattcatgctgcaagcagcctccagagcggcgtgccaagcagattttctggcagcggcagcggaaccgacttcaccctgacaatatctagcctccagcctgaggacttcgccagctactactgccagcagagctacagcgcccctcctatcacctttggacagggcaccagactggaaatcaagggcggaggcggaagtggaggcggaggatctggcggcggaggctctcaggttcagctccagcagtctggacctggcctggtcaagcctagccagacactgtctctgacctgtgccatcagcggcgatagcgtgtcctctaatagagccgcctggaactggatcagacagagccctagcagaggactccagtggctgggcagaacctactaccgcagcaagtggtacaacgactacgccgtgtctctgcggagccggatcaccatcaatcccgtgaccagcaagaaccaggtggccctgcacatgaacagcgtgacccctgaagataccgccgtgtactactgtgccagagccggaattgtggtggtgcccggacctgagacattctactactacgaccacggcctggacgtgtggggccagggaacaacagtgactgtctcttctacgcgtgacggtaacgaggagatgggaggaatcactcaaaccccttacaaagtctcaatttcaggaacaactgttatccttacatgtccccagtatcctggcagcgagatcctttggcagcataacgacaagaatatagggggagatgaagacgataagaatatcggatctgacgaggatcacttgagcctgaaagagttctccgagcttgaacaaagcggatattatgtgtgctatccgcgcgggtcaaagccggaagacgctaacttttacctttatctccgagccagagtgtgcgaaaattgcatggaaatggacgttatgtccgttgctacaatagttatcgtagatatatgcatcacgggtggactgcttctgctggtttattattggtccaagaatagaaaggccaaagctaaacccgtgaccagaggcgctggcgcaggcggaaggcaaaggggacaaaacaaagaacggccaccaccagtgccaaatccagattatgagcctattcggaaaggacagagggacctgtactctggcctgaatcagagaagaatc

SEQ ID NO: 21920 - DNA, 1287 bp, synthetic construct
  source 1..1287: mol_type = other DNA
atggccttaccagtgaccgccttgctcctgccgctggccttgctgctccacgccgccaggccggacatccagatgacacagagcccctctagcctgtctgccagcgtgggagacagagtgaccatcacctgtagagccagccagagcatcagaaactacctgaactggtatcagcaaaagcccggcaaggcccctgagctgctgattcatgctgcaagcagcctccagagcggcgtgccaagcagattttctggcagcggcagcggaaccgacttcaccctgacaatatctagcctccagcctgaggacttcgccagctactactgccagcagagctacagcgcccctcctatcacctttggacagggcaccagactggaaatcaagggcggaggcggaagtggaggcggaggatctggcggcggaggctctcaggttcagctccagcagtctggacctggcctggtcaagcctagccagacactgtctctgacctgtgccatcagcggcgatagcgtgtcctctaatagagccgcctggaactggatcagacagagccctagcagaggactccagtggctgggcagaacctactaccgcagcaagtggtacaacgactacgccgtgtctctgcggagccggatcaccatcaatcccgtgaccagcaagaaccaggtggccctgcacatgaacagcgtgacccctgaagataccgccgtgtactactgtgccagagccggaattgtggtggtgcccggacctgagacattctactactacgaccacggcctggacgtgtggggccagggaacaacagtgactgtctcttctacgcgtttcaagatccccatcgaggaactggaagatcgggtgttcgtgaactgcaacacctctatcacctgggtggaaggcaccgtgggaacactgctgagcgacatcaccagactggacctcggcaagcggattctggaccctcggggcatctacagatgcaacggcaccgacatctacaaggacaaagaaagcaccgtgcaggtccactacagaatgtgccagtcctgcgtggaactggaccctgctacagtggccggcatcatcgtgaccgatgtgatcgctactctgctgctggctctgggagtgttctgcttcgccggacacgaaacaggcagactgtctggcgctgccgatacacaggccctgctgagaaacgaccaagtgtatcagcccctgcgcgacagagatgatgcccagtattctcacctcggcggcaactgggctagaaacaag

SEQ ID NO: 21921 - DNA, 1317 bp, synthetic construct
  source 1..1317: mol_type = other DNA
atggccttaccagtgaccgccttgctcctgccgctggccttgctgctccacgccgccaggccggacatccagatgacacagagcccctctagcctgtctgccagcgtgggagacagagtgaccatcacctgtagagccagccagagcatcagaaactacctgaactggtatcagcaaaagcccggcaaggcccctgagctgctgattcatgctgcaagcagcctccagagcggcgtgccaagcagattttctggcagcggcagcggaaccgacttcaccctgacaatatctagcctccagcctgaggacttcgccagctactactgccagcagagctacagcgcccctcctatcacctttggacagggcaccagactggaaatcaagggcggaggcggaagtggaggcggaggatctggcggcggaggctctcaggttcagctccagcagtctggacctggcctggtcaagcctagccagacactgtctctgacctgtgccatcagcggcgatagcgtgtcctctaatagagccgcctggaactggatcagacagagccctagcagaggactccagtggctgggcagaacctactaccgcagcaagtggtacaacgactacgccgtgtctctgcggagccggatcaccatcaatcccgtgaccagcaagaaccaggtggccctgcacatgaacagcgtgacccctgaagataccgccgtgtactactgtgccagagccggaattgtggtggtgcccggacctgagacattctactactacgaccacggcctggacgtgtggggccagggaacaacagtgactgtctcttctacgcgtcagagcatcaagggcaaccacctggtcaaggtgtacgactaccaagaggacggcagcgtgctgctgacatgtgatgccgaggccaagaacatcacctggtttaaggacggcaagatgatcggcttcctgaccgaggacaagaagaagtggaacctgggcagcaacgctaaggaccccagaggcatgtatcagtgcaagggcagccagaacaagagcaagcccctccaggtgtactaccggatgtgccagaactgcatcgagctgaacgccgctaccatcagcggctttctgttcgccgagatcgtgtccatcttcgtgctggccgtgggcgtgtactttatcgctggacaggatggcgtgcggcagagcagagcttccgataagcaaaccctgctgcctaacgaccagctgtaccagcctctgaaggacagagaggacgaccagtacagccacctccagggcaatcagctgagaagaaac

SEQ ID NO: 21922 - DNA, 1266 bp, synthetic construct
  source 1..1266: mol_type = other DNA
atggccttaccagtgaccgccttgctcctgccgctggccttgctgctccacgccgccaggccggacatccagatgacacagagcccctctagcctgtctgccagcgtgggagacagagtgaccatcacctgtagagccagccagagcatcagaaactacctgaactggtatcagcaaaagcccggcaaggcccctgagctgctgattcatgctgcaagcagcctccagagcggcgtgccaagcagattttctggcagcggcagcggaaccgacttcaccctgacaatatctagcctccagcctgaggacttcgccagctactactgccagcagagctacagcgcccctcctatcacctttggacagggcaccagactggaaatcaagggcggaggcggaagtggaggcggaggatctggcggcggaggctctcaggttcagctccagcagtctggacctggcctggtcaagcctagccagacactgtctctgacctgtgccatcagcggcgatagcgtgtcctctaatagagccgcctggaactggatcagacagagccctagcagaggactccagtggctgggcagaacctactaccgcagcaagtggtacaacgactacgccgtgtctctgcggagccggatcaccatcaatcccgtgaccagcaagaaccaggtggccctgcacatgaacagcgtgacccctgaagataccgccgtgtactactgtgccagagccggaattgtggtggtgcccggacctgagacattctactactacgaccacggcctggacgtgtggggccagggaacaacagtgactgtctcttctacgcgtcagagttttgggttgttggaccctaaattgtgctatctgttggacggaatcctgttcatttacggagtgatcctgaccgcattgttcctgcgggttaagttttccagatccgcagacgcacccgcttaccaacaagggcagaaccaactctacaatgaacttaatttggggcggagggaagagtacgacgttctggacaaaaggaggggacgagatcccgagatgggcggaaagcctcagcgaaggaagaatccgcaagaggggctttataacgaactccagaaagataaaatggcagaagcctatagtgagattgggatgaagggagaaaggaggaggggtaaaggtcacgatgggttgtaccaaggattgagcacagccactaaagatacctatgatgcgctccacatgcaggccctgccgccaaga

SEQ ID NO: 21923 - DNA, 1392 bp, synthetic construct
  source 1..1392: mol_type = other DNA
atggccttaccagtgaccgccttgctcctgccgctggccttgctgctccacgccgccaggccgcaggttcagctccagcagtctggacctggcctggtcaagcctagccagacactgtctctgacctgtgccatcagcggcgatagcgtgtcctctaatagagccgcctggaactggatcagacagagccctagcagaggactccagtggctgggcagaacctactaccgcagcaagtggtacaacgactacgccgtgtctctgcggagccggatcaccatcaatcccgtgaccagcaagaaccaggtggccctgcacatgaacagcgtgacccctgaagataccgccgtgtactactgtgccagagccggaattgtggtggtgcccggacctgagacattctactactacgaccacggcctggacgtgtggggccagggaacaacagtgactgtctcttctggcggaggcggaagtggaggcggaggatctggcggcggaggctctgacatccagatgacacagagcccctctagcctgtctgccagcgtgggagacagagtgaccatcacctgtagagccagccagagcatcagaaactacctgaactggtatcagcaaaagcccggcaaggcccctgagctgctgattcatgctgcaagcagcctccagagcggcgtgccaagcagattttctggcagcggcagcggaaccgacttcaccctgacaatatctagcctccagcctgaggacttcgccagctactactgccagcagagctacagcgcccctcctatcacctttggacagggcaccagactggaaatcaagacgcgtgacggtaacgaggagatgggaggaatcactcaaaccccttacaaagtctcaatttcaggaacaactgttatccttacatgtccccagtatcctggcagcgagatcctttggcagcataacgacaagaatatagggggagatgaagacgataagaatatcggatctgacgaggatcacttgagcctgaaagagttctccgagcttgaacaaagcggatattatgtgtgctatccgcgcgggtcaaagccggaagacgctaacttttacctttatctccgagccagagtgtgcgaaaattgcatggaaatggacgttatgtccgttgctacaatagttatcgtagatatatgcatcacgggtggactgcttctgctggtttattattggtccaagaatagaaaggccaaagctaaacccgtgaccagaggcgctggcgcaggcggaaggcaaaggggacaaaacaaagaacggccaccaccagtgccaaatccagattatgagcctattcggaaaggacagagggacctgtactctggcctgaatcagagaagaatc

SEQ ID NO: 21924 - DNA, 1287 bp, synthetic construct
  source 1..1287: mol_type = other DNA
atggccttaccagtgaccgccttgctcctgccgctggccttgctgctccacgccgccaggccgcaggttcagctccagcagtctggacctggcctggtcaagcctagccagacactgtctctgacctgtgccatcagcggcgatagcgtgtcctctaatagagccgcctggaactggatcagacagagccctagcagaggactccagtggctgggcagaacctactaccgcagcaagtggtacaacgactacgccgtgtctctgcggagccggatcaccatcaatcccgtgaccagcaagaaccaggtggccctgcacatgaacagcgtgacccctgaagataccgccgtgtactactgtgccagagccggaattgtggtggtgcccggacctgagacattctactactacgaccacggcctggacgtgtggggccagggaacaacagtgactgtctcttctggcggaggcggaagtggaggcggaggatctggcggcggaggctctgacatccagatgacacagagcccctctagcctgtctgccagcgtgggagacagagtgaccatcacctgtagagccagccagagcatcagaaactacctgaactggtatcagcaaaagcccggcaaggcccctgagctgctgattcatgctgcaagcagcctccagagcggcgtgccaagcagattttctggcagcggcagcggaaccgacttcaccctgacaatatctagcctccagcctgaggacttcgccagctactactgccagcagagctacagcgcccctcctatcacctttggacagggcaccagactggaaatcaagacgcgtttcaagatccccatcgaggaactggaagatcgggtgttcgtgaactgcaacacctctatcacctgggtggaaggcaccgtgggaacactgctgagcgacatcaccagactggacctcggcaagcggattctggaccctcggggcatctacagatgcaacggcaccgacatctacaaggacaaagaaagcaccgtgcaggtccactacagaatgtgccagtcctgcgtggaactggaccctgctacagtggccggcatcatcgtgaccgatgtgatcgctactctgctgctggctctgggagtgttctgcttcgccggacacgaaacaggcagactgtctggcgctgccgatacacaggccctgctgagaaacgaccaagtgtatcagcccctgcgcgacagagatgatgcccagtattctcacctcggcggcaactgggctagaaacaag

SEQ ID NO: 21925 - DNA, 1317 bp, synthetic construct
  source 1..1317: mol_type = other DNA
atggccttaccagtgaccgccttgctcctgccgctggccttgctgctccacgccgccaggccgcaggttcagctccagcagtctggacctggcctggtcaagcctagccagacactgtctctgacctgtgccatcagcggcgatagcgtgtcctctaatagagccgcctggaactggatcagacagagccctagcagaggactccagtggctgggcagaacctactaccgcagcaagtggtacaacgactacgccgtgtctctgcggagccggatcaccatcaatcccgtgaccagcaagaaccaggtggccctgcacatgaacagcgtgacccctgaagataccgccgtgtactactgtgccagagccggaattgtggtggtgcccggacctgagacattctactactacgaccacggcctggacgtgtggggccagggaacaacagtgactgtctcttctggcggaggcggaagtggaggcggaggatctggcggcggaggctctgacatccagatgacacagagcccctctagcctgtctgccagcgtgggagacagagtgaccatcacctgtagagccagccagagcatcagaaactacctgaactggtatcagcaaaagcccggcaaggcccctgagctgctgattcatgctgcaagcagcctccagagcggcgtgccaagcagattttctggcagcggcagcggaaccgacttcaccctgacaatatctagcctccagcctgaggacttcgccagctactactgccagcagagctacagcgcccctcctatcacctttggacagggcaccagactggaaatcaagacgcgtcagagcatcaagggcaaccacctggtcaaggtgtacgactaccaagaggacggcagcgtgctgctgacatgtgatgccgaggccaagaacatcacctggtttaaggacggcaagatgatcggcttcctgaccgaggacaagaagaagtggaacctgggcagcaacgctaaggaccccagaggcatgtatcagtgcaagggcagccagaacaagagcaagcccctccaggtgtactaccggatgtgccagaactgcatcgagctgaacgccgctaccatcagcggctttctgttcgccgagatcgtgtccatcttcgtgctggccgtgggcgtgtactttatcgctggacaggatggcgtgcggcagagcagagcttccgataagcaaaccctgctgcctaacgaccagctgtaccagcctctgaaggacagagaggacgaccagtacagccacctccagggcaatcagctgagaagaaac

SEQ ID NO: 21926 - DNA, 1266 bp, synthetic construct
  source 1..1266: mol_type = other DNA
atggccttaccagtgaccgccttgctcctgccgctggccttgctgctccacgccgccaggccgcaggttcagctccagcagtctggacctggcctggtcaagcctagccagacactgtctctgacctgtgccatcagcggcgatagcgtgtcctctaatagagccgcctggaactggatcagacagagccctagcagaggactccagtggctgggcagaacctactaccgcagcaagtggtacaacgactacgccgtgtctctgcggagccggatcaccatcaatcccgtgaccagcaagaaccaggtggccctgcacatgaacagcgtgacccctgaagataccgccgtgtactactgtgccagagccggaattgtggtggtgcccggacctgagacattctactactacgaccacggcctggacgtgtggggccagggaacaacagtgactgtctcttctggcggaggcggaagtggaggcggaggatctggcggcggaggctctgacatccagatgacacagagcccctctagcctgtctgccagcgtgggagacagagtgaccatcacctgtagagccagccagagcatcagaaactacctgaactggtatcagcaaaagcccggcaaggcccctgagctgctgattcatgctgcaagcagcctccagagcggcgtgccaagcagattttctggcagcggcagcggaaccgacttcaccctgacaatatctagcctccagcctgaggacttcgccagctactactgccagcagagctacagcgcccctcctatcacctttggacagggcaccagactggaaatcaagacgcgtcagagttttgggttgttggaccctaaattgtgctatctgttggacggaatcctgttcatttacggagtgatcctgaccgcattgttcctgcgggttaagttttccagatccgcagacgcacccgcttaccaacaagggcagaaccaactctacaatgaacttaatttggggcggagggaagagtacgacgttctggacaaaaggaggggacgagatcccgagatgggcggaaagcctcagcgaaggaagaatccgcaagaggggctttataacgaactccagaaagataaaatggcagaagcctatagtgagattgggatgaagggagaaaggaggaggggtaaaggtcacgatgggttgtaccaaggattgagcacagccactaaagatacctatgatgcgctccacatgcaggccctgccgccaaga

SEQ ID NO: 21927 - DNA, 1551 bp, synthetic construct
  source 1..1551: mol_type = other DNA
atggccttaccagtgaccgccttgctcctgccgctggccttgctgctccacgccgccaggccggacatccagatgacacagagcccctctagcctgtctgccagcgtgggagacagagtgaccatcacctgtagagccagccagagcatcagaaactacctgaactggtatcagcaaaagcccggcaaggcccctgagctgctgattcatgctgcaagcagcctccagagcggcgtgccaagcagattttctggcagcggcagcggaaccgacttcaccctgacaatatctagcctccagcctgaggacttcgccagctactactgccagcagagctacagcgcccctcctatcacctttggacagggcaccagactggaaatcaagggcggaggcggaagtggaggcggaggatctggcggcggaggctctcaggttcagctccagcagtctggacctggcctggtcaagcctagccagacactgtctctgacctgtgccatcagcggcgatagcgtgtcctctaatagagccgcctggaactggatcagacagagccctagcagaggactccagtggctgggcagaacctactaccgcagcaagtggtacaacgactacgccgtgtctctgcggagccggatcaccatcaatcccgtgaccagcaagaaccaggtggccctgcacatgaacagcgtgacccctgaagataccgccgtgtactactgtgccagagccggaattgtggtggtgcccggacctgagacattctactactacgaccacggcctggacgtgtggggccagggaacaacagtgactgtctcttctacgcgtggaatgaggactgaggatcttcccaaagctgtcgtctttctcgaaccccaatggtatcgggtgctcgaaaaagactctgtgacactgaaatgccaaggggcctactctcccgaggacaactccacacagtggtttcataatgagtccctcatcagctctcaggccagctcttatttcattgatgccgctacagtggacgactccggcgagtatcggtgtcagaccaatctgtctacactgtctgaccccgtgcagcttgaggtccacattggatggttgctcttgcaagccccacgctgggttttcaaagaggaagatccaatccatctgcggtgccacagctggaaaaacaccgctctccacaaagtcacatacctgcaaaatggcaaaggacgcaaatacttccatcacaattccgatttttacattccgaaggctaccctgaaagacagcggcagctatttctgccggggactcgtcggctccaagaatgtgtcctccgaaaccgtgaatatcacgattacccaaggactggctgtgcctacaatctctagcttctttccgcctggataccaagtctccttctgtcttgtgatggtcctcctgtttgctgtggacacaggactgtacttttccgtgaaaacgaacatccgcagctccacacgcgattggaaagatcacaagtttaaatggcgcaaagatccccaggacaag

SEQ ID NO: 21928 - DNA, 2400 bp, synthetic construct
  source 1..2400: mol_type = other DNA
atggccttaccagtgaccgccttgctcctgccgctggccttgctgctccacgccgccaggccggacatccagatgacacagagcccctctagcctgtctgccagcgtgggagacagagtgaccatcacctgtagagccagccagagcatcagaaactacctgaactggtatcagcaaaagcccggcaaggcccctgagctgctgattcatgctgcaagcagcctccagagcggcgtgccaagcagattttctggcagcggcagcggaaccgacttcaccctgacaatatctagcctccagcctgaggacttcgccagctactactgccagcagagctacagcgcccctcctatcacctttggacagggcaccagactggaaatcaagggcggaggcggaagtggaggcggaggatctggcggcggaggctctcaggttcagctccagcagtctggacctggcctggtcaagcctagccagacactgtctctgacctgtgccatcagcggcgatagcgtgtcctctaatagagccgcctggaactggatcagacagagccctagcagaggactccagtggctgggcagaacctactaccgcagcaagtggtacaacgactacgccgtgtctctgcggagccggatcaccatcaatcccgtgaccagcaagaaccaggtggccctgcacatgaacagcgtgacccctgaagataccgccgtgtactactgtgccagagccggaattgtggtggtgcccggacctgagacattctactactacgaccacggcctggacgtgtggggccagggaacaacagtgactgtctcttctacgcgtggaggctctggacaacaacagaccctgcctaaaccattcatctgggctgaaccccactttatggttccgaaagagaaacaagtcacgatttgttgccaagggaattacggggccgtcgagtatcagctccactttgagggctccctgtttgctgtggatcggcccaagccacctgaaagaatcaacaaagtccaattctatattcctgatatgaactcccgcatggcaggccagtattcatgtatctaccgcgtgggagaactttggagtgaaccctctaacctgctggacctcgtcgtgacagagatgtatgatacacccacactgtctgtgcaccctgggccagaagttatcagcggagaaaaagttaccttttattgccgcctcgataccgctacctctatgttcctcttgctgaaagagggccgcagctctcacgtgcagcgaggctacggaaaggtccaagctgagtttcctctcggccccgtgaccaccgctcacaggggcacatatagatgttttggctcttataacaatcatgcctggtcattcccatccgagcctgtgaaactgctggtcacaggcgatattgagaatacctctctggccccagaagatcctacattccccgccgacacatggggaacatatctgctgacaaccgaaaccgggctgcaaaaggaccatgctctgtgggatcataccgctcagaatctgcttcggatggggcttgcattcctggtcctggtggctcttgtctggtttctggtcgaggactggctgtcccggaagagaaccagagaaagagcttccagggccagcacctgggaaggcagacgcagactgaatactcagaccctgcgcgccaagagaagcggatctggcgtgaagcagaccctgaatttcgacctgctgaagctggctggcgacgtggaatccaacccaggcccttctagaggccatatgaccgagtacaagcccacggtgcgcctcgccacccgcgacgacgtccccagggccgtacgcaccctcgccgccgcgttcgccgactaccccgccacgcgccacaccgtcgatccggaccgccacatcgagcgggtcaccgagctgcaagaactcttcctcacgcgcgtcgggctcgacatcggcaaggtgtgggtcgcggacgacggcgccgcggtggcggtctggaccacgccggagagcgtcgaagcgggggcggtgttcgccgagatcggcccgcgcatggccgagttgagcggttcccggctggccgcgcagcaacagatggaaggcctcctggcgccgcaccggcccaaggagcccgcgtggttcctggccaccgtcggcgtctcgcccgaccaccagggcaagggtctgggcagcgccgtcgtgctccccggagtggaggcggccgagcgcgccggggtgcccgccttcctggagacctccgcgccccgcaacctccccttctacgagcggctcggcttcaccgtcaccgccgacgtcgaggtgcccgaaggaccgcgcacctggtgcatgacccgcaagcccggtgcctga

SEQ ID NO: 21929 - DNA, 1899 bp, synthetic construct
  source 1..1899: mol_type = other DNA
atggccttaccagtgaccgccttgctcctgccgctggccttgctgctccacgccgccaggccggacatccagatgacacagagcccctctagcctgtctgccagcgtgggagacagagtgaccatcacctgtagagccagccagagcatcagaaactacctgaactggtatcagcaaaagcccggcaaggcccctgagctgctgattcatgctgcaagcagcctccagagcggcgtgccaagcagattttctggcagcggcagcggaaccgacttcaccctgacaatatctagcctccagcctgaggacttcgccagctactactgccagcagagctacagcgcccctcctatcacctttggacagggcaccagactggaaatcaagggcggaggcggaagtggaggcggaggatctggcggcggaggctctcaggttcagctccagcagtctggacctggcctggtcaagcctagccagacactgtctctgacctgtgccatcagcggcgatagcgtgtcctctaatagagccgcctggaactggatcagacagagccctagcagaggactccagtggctgggcagaacctactaccgcagcaagtggtacaacgactacgccgtgtctctgcggagccggatcaccatcaatcccgtgaccagcaagaaccaggtggccctgcacatgaacagcgtgacccctgaagataccgccgtgtactactgtgccagagccggaattgtggtggtgcccggacctgagacattctactactacgaccacggcctggacgtgtggggccagggaacaacagtgactgtctcttctacgcgtaaaattgaagttatgtatcctcctccttacctagacaatgagaagagcaatggaaccattatccatgtgaaaggggcgcgtggcgatattgagaatacctctctggccccagaagatcctacattccccgccgacacatggggaacatatctgctgacaaccgaaaccgggctgcaaaaggaccatgctctgtgggatcataccgctcagaatctgcttcggatggggcttgcattcctggtcctggtggctcttgtctggtttctggtcgaggactggctgtcccggaagagaaccagagaaagagcttccagggccagcacctgggaaggcagacgcagactgaatactcagaccctgcgcgccaagagaagcggatctggcgtgaagcagaccctgaatttcgacctgctgaagctggctggcgacgtggaatccaacccaggcccttctagaggccatatgaccgagtacaagcccacggtgcgcctcgccacccgcgacgacgtccccagggccgtacgcaccctcgccgccgcgttcgccgactaccccgccacgcgccacaccgtcgatccggaccgccacatcgagcgggtcaccgagctgcaagaactcttcctcacgcgcgtcgggctcgacatcggcaaggtgtgggtcgcggacgacggcgccgcggtggcggtctggaccacgccggagagcgtcgaagcgggggcggtgttcgccgagatcggcccgcgcatggccgagttgagcggttcccggctggccgcgcagcaacagatggaaggcctcctggcgccgcaccggcccaaggagcccgcgtggttcctggccaccgtcggcgtctcgcccgaccaccagggcaagggtctgggcagcgccgtcgtgctccccggagtggaggcggccgagcgcgccggggtgcccgccttcctggagacctccgcgccccgcaacctccccttctacgagcggctcggcttcaccgtcaccgccgacgtcgaggtgcccgaaggaccgcgcacctggtgcatgacccgcaagcccggtgcctga

SEQ ID NO: 21930 - DNA, 2160 bp, synthetic construct
  source 1..2160: mol_type = other DNA
atggccttaccagtgaccgccttgctcctgccgctggccttgctgctccacgccgccaggccggacatccagatgacacagagcccctctagcctgtctgccagcgtgggagacagagtgaccatcacctgtagagccagccagagcatcagaaactacctgaactggtatcagcaaaagcccggcaaggcccctgagctgctgattcatgctgcaagcagcctccagagcggcgtgccaagcagattttctggcagcggcagcggaaccgacttcaccctgacaatatctagcctccagcctgaggacttcgccagctactactgccagcagagctacagcgcccctcctatcacctttggacagggcaccagactggaaatcaagggcggaggcggaagtggaggcggaggatctggcggcggaggctctcaggttcagctccagcagtctggacctggcctggtcaagcctagccagacactgtctctgacctgtgccatcagcggcgatagcgtgtcctctaatagagccgcctggaactggatcagacagagccctagcagaggactccagtggctgggcagaacctactaccgcagcaagtggtacaacgactacgccgtgtctctgcggagccggatcaccatcaatcccgtgaccagcaagaaccaggtggccctgcacatgaacagcgtgacccctgaagataccgccgtgtactactgtgccagagccggaattgtggtggtgcccggacctgagacattctactactacgaccacggcctggacgtgtggggccagggaacaacagtgactgtctcttctacgcgtctgtgggtgtcccagccacctgaaattcggacactggaaggctcctccgcctttctgccctgtagctttaacgccagccaggggagactcgccatcggctctgtgacatggttccgggatgaagtcgtccctggaaaagaagttcgcaacggaacaccagagttcagaggcagactcgccccactggcaagctccagattcctgcatgaccatcaggctgaactgcacattagggacgtgcggggccacgatgcctccatctatgtgtgtcgggtcgaagtgcttggactcggcgtcggaactggaaacggcactaggctggtggtcgagaaagaacatccacagcttggcgctggcaccgtcctgttgcttagagccggattctatgccgtcagcttcctgtccgtggctgtggggtctacagtgtattaccagggaaaatgtctcacctggaaaggccccagacgccagcttccagctgttgttcctgctccactgccaccaccttgtggctcctctgctcacttgcttccaccagtgcctggcggacgcgccaagagaagcggatctggcgtgaagcagaccctgaatttcgacctgctgaagctggctggcgacgtggaatccaacccaggcccttctagaatgtaccggatgcagctgctgagctgtatcgccctgtctctggccctggtcacaaatagcgcccctaccagcagcagcaccaagaaaacccagctgcaactggaacacctcctgctggacctccagatgatcctgaacggcatcaacaactacaagaaccccaagctgaccgagatgctgaccgccaagttctacatgcccaagaaggccaccgagctgaagcacctccagtgcctggaagaggaactgaagcccctggaagaagtgctgaatctggcccagagcaagaacttccacctgaggccaagggacctgatctccaacatcaacgtgatcgtgctggaactgaaaggcagcgagacaaccttcatgtgcgagtacgccgacgagacagctaccatcgtggaatttctgaatcggtggatcaccttctgccagagcatcatcagcaccctgacaaagatcgaagtgatgtaccctcctccttacctggacaacgagaagtccaacggcaccatcatccacgtgaagggcaagcacctgtgtccttctccactgttccccggacctagcaagcctttctgggtgctcgttgttgttggcggcgtgctggcctgttacagcctgctggttaccgtggccttcatcatcttttgggtccgaagcaagcggagctaa

SEQ ID NO: 21931 - DNA, 2088 bp, synthetic construct
  source 1..2088: mol_type = other DNA
atggccttaccagtgaccgccttgctcctgccgctggccttgctgctccacgccgccaggccggacatccagatgacacagagcccctctagcctgtctgccagcgtgggagacagagtgaccatcacctgtagagccagccagagcatcagaaactacctgaactggtatcagcaaaagcccggcaaggcccctgagctgctgattcatgctgcaagcagcctccagagcggcgtgccaagcagattttctggcagcggcagcggaaccgacttcaccctgacaatatctagcctccagcctgaggacttcgccagctactactgccagcagagctacagcgcccctcctatcacctttggacagggcaccagactggaaatcaagggcggaggcggaagtggaggcggaggatctggcggcggaggctctcaggttcagctccagcagtctggacctggcctggtcaagcctagccagacactgtctctgacctgtgccatcagcggcgatagcgtgtcctctaatagagccgcctggaactggatcagacagagccctagcagaggactccagtggctgggcagaacctactaccgcagcaagtggtacaacgactacgccgtgtctctgcggagccggatcaccatcaatcccgtgaccagcaagaaccaggtggccctgcacatgaacagcgtgacccctgaagataccgccgtgtactactgtgccagagccggaattgtggtggtgcccggacctgagacattctactactacgaccacggcctggacgtgtggggccagggaacaacagtgactgtctcttctacgcgtctgtgggtgtcccagccacctgaaattcggacactggaaggctcctccgcctttctgccctgtagctttaacgccagccaggggagactcgccatcggctctgtgacatggttccgggatgaagtcgtccctggaaaagaagttcgcaacggaacaccagagttcagaggcagactcgccccactggcaagctccagattcctgcatgaccatcaggctgaactgcacattagggacgtgcggggccacgatgcctccatctatgtgtgtcgggtcgaagtgcttggactcggcgtcggaactggaaacggcactaggctggtggtcgagaaagaacatccacagcttggcgctggcaccgtcctgttgcttagagccggattctatgccgtcagcttcctgtccgtggctgtggggtctacagtgtattaccagggaaaatgtctcacctggaaaggccccagacgccagcttccagctgttgttcctgctccactgccaccaccttgtggctcctctgctcacttgcttccaccagtgcctggcggacgcgccaagagaagcggatctggcgtgaagcagaccctgaatttcgacctgctgaagctggctggcgacgtggaatccaacccaggcccttctagaggccatatgaccgagtacaagcccacggtgcgcctcgccacccgcgacgacgtccccagggccgtacgcaccctcgccgccgcgttcgccgactaccccgccacgcgccacaccgtcgatccggaccgccacatcgagcgggtcaccgagctgcaagaactcttcctcacgcgcgtcgggctcgacatcggcaaggtgtgggtcgcggacgacggcgccgcggtggcggtctggaccacgccggagagcgtcgaagcgggggcggtgttcgccgagatcggcccgcgcatggccgagttgagcggttcccggctggccgcgcagcaacagatggaaggcctcctggcgccgcaccggcccaaggagcccgcgtggttcctggccaccgtcggcgtctcgcccgaccaccagggcaagggtctgggcagcgccgtcgtgctccccggagtggaggcggccgagcgcgccggggtgcccgccttcctggagacctccgcgccccgcaacctccccttctacgagcggctcggcttcaccgtcaccgccgacgtcgaggtgcccgaaggaccgcgcacctggtgcatgacccgcaagcccggtgcctga

SEQ ID NO: 21932 - DNA, 1113 bp, synthetic construct
  source 1..1113: mol_type = other DNA
atggccttaccagtgaccgccttgctcctgccgctggccttgctgctccacgccgccaggccggacatccagatgacacagagcccctctagcctgtctgccagcgtgggagacagagtgaccatcacctgtagagccagccagagcatcagaaactacctgaactggtatcagcaaaagcccggcaaggcccctgagctgctgattcatgctgcaagcagcctccagagcggcgtgccaagcagattttctggcagcggcagcggaaccgacttcaccctgacaatatctagcctccagcctgaggacttcgccagctactactgccagcagagctacagcgcccctcctatcacctttggacagggcaccagactggaaatcaagggcggaggcggaagtggaggcggaggatctggcggcggaggctctcaggttcagctccagcagtctggacctggcctggtcaagcctagccagacactgtctctgacctgtgccatcagcggcgatagcgtgtcctctaatagagccgcctggaactggatcagacagagccctagcagaggactccagtggctgggcagaacctactaccgcagcaagtggtacaacgactacgccgtgtctctgcggagccggatcaccatcaatcccgtgaccagcaagaaccaggtggccctgcacatgaacagcgtgacccctgaagataccgccgtgtactactgtgccagagccggaattgtggtggtgcccggacctgagacattctactactacgaccacggcctggacgtgtggggccagggaacaacagtgactgtctcttctacgcgtaaaattgaagttatgtatcctcctccttacctagacaatgagaagagcaatggaaccattatccatgtgaaaggggcgcgtatcacccagggcctggccgtgtctaccatcagcagctttttcccacccggctaccaggtgtccttctgcctcgtgatggtgctgctgttcgccgtggacaccggcctgtacttcagcgtgaaaacaaacatccggtccagcaccagagactggaaggaccacaagttcaagtggcggaaggacccccaggacaag

SEQ ID NO: 21933 - DNA, 1113 bp, synthetic construct
  source 1..1113: mol_type = other DNA
atggccttaccagtgaccgccttgctcctgccgctggccttgctgctccacgccgccaggccggacatccagatgacacagagcccctctagcctgtctgccagcgtgggagacagagtgaccatcacctgtagagccagccagagcatcagaaactacctgaactggtatcagcaaaagcccggcaaggcccctgagctgctgattcatgctgcaagcagcctccagagcggcgtgccaagcagattttctggcagcggcagcggaaccgacttcaccctgacaatatctagcctccagcctgaggacttcgccagctactactgccagcagagctacagcgcccctcctatcacctttggacagggcaccagactggaaatcaagggcggaggcggaagtggaggcggaggatctggcggcggaggctctcaggttcagctccagcagtctggacctggcctggtcaagcctagccagacactgtctctgacctgtgccatcagcggcgatagcgtgtcctctaatagagccgcctggaactggatcagacagagccctagcagaggactccagtggctgggcagaacctactaccgcagcaagtggtacaacgactacgccgtgtctctgcggagccggatcaccatcaatcccgtgaccagcaagaaccaggtggccctgcacatgaacagcgtgacccctgaagataccgccgtgtactactgtgccagagccggaattgtggtggtgcccggacctgagacattctactactacgaccacggcctggacgtgtggggccagggaacaacagtgactgtctcttctacgcgtaaaattgaagttatgtatcctcctccttacctagacaatgagaagagcaatggaaccattatccatgtgaaaggggcgcgtattacccaaggactggctgtgcctacaatctctagcttctttccgcctggataccaagtctccttctgtcttgtgatggtcctcctgtttgctgtggacacaggactgtacttttccgtgaaaacgaacatccgcagctccacacgcgattggaaagatcacaagtttaaatggcgcaaagatccccaggacaag

SEQ ID NO: 21934 - DNA, 1050 bp, synthetic construct
  source 1..1050: mol_type = other DNA
atggccttaccagtgaccgccttgctcctgccgctggccttgctgctccacgccgccaggccggacatccagatgacacagagcccctctagcctgtctgccagcgtgggagacagagtgaccatcacctgtagagccagccagagcatcagaaactacctgaactggtatcagcaaaagcccggcaaggcccctgagctgctgattcatgctgcaagcagcctccagagcggcgtgccaagcagattttctggcagcggcagcggaaccgacttcaccctgacaatatctagcctccagcctgaggacttcgccagctactactgccagcagagctacagcgcccctcctatcacctttggacagggcaccagactggaaatcaagggcggaggcggaagtggaggcggaggatctggcggcggaggctctcaggttcagctccagcagtctggacctggcctggtcaagcctagccagacactgtctctgacctgtgccatcagcggcgatagcgtgtcctctaatagagccgcctggaactggatcagacagagccctagcagaggactccagtggctgggcagaacctactaccgcagcaagtggtacaacgactacgccgtgtctctgcggagccggatcaccatcaatcccgtgaccagcaagaaccaggtggccctgcacatgaacagcgtgacccctgaagataccgccgtgtactactgtgccagagccggaattgtggtggtgcccggacctgagacattctactactacgaccacggcctggacgtgtggggccagggaacaacagtgactgtctcttctacgcgtaaaattgaagttatgtatcctcctccttacctagacaatgagaagagcaatggaaccattatccatgtgaaaggggcgcgtattacccaaggactggctgtgtctacaatctctagcttctctccgcctggataccaagtctccttctgtcttgtgatggtcctcctgtttgctgtggacacaggactgtacttttccgtgaaaacgaacatc

SEQ ID NO: 21935 - DNA, 1143 bp, synthetic construct
  source 1..1143: mol_type = other DNA
atggccttaccagtgaccgccttgctcctgccgctggccttgctgctccacgccgccaggccggacatccagatgacacagagcccctctagcctgtctgccagcgtgggagacagagtgaccatcacctgtagagccagccagagcatcagaaactacctgaactggtatcagcaaaagcccggcaaggcccctgagctgctgattcatgctgcaagcagcctccagagcggcgtgccaagcagattttctggcagcggcagcggaaccgacttcaccctgacaatatctagcctccagcctgaggacttcgccagctactactgccagcagagctacagcgcccctcctatcacctttggacagggcaccagactggaaatcaagggcggaggcggaagtggaggcggaggatctggcggcggaggctctcaggttcagctccagcagtctggacctggcctggtcaagcctagccagacactgtctctgacctgtgccatcagcggcgatagcgtgtcctctaatagagccgcctggaactggatcagacagagccctagcagaggactccagtggctgggcagaacctactaccgcagcaagtggtacaacgactacgccgtgtctctgcggagccggatcaccatcaatcccgtgaccagcaagaaccaggtggccctgcacatgaacagcgtgacccctgaagataccgccgtgtactactgtgccagagccggaattgtggtggtgcccggacctgagacattctactactacgaccacggcctggacgtgtggggccagggaacaacagtgactgtctcttctacgcgtaaaattgaagttatgtatcctcctccttacctagacaatgagaagagcaatggaaccattatccatgtgaaaggggcgcgtgtcgagaaagaacatccacagcttggcgctggcaccgtcctgttgcttagagccggattctatgccgtcagcttcctgtccgtggctgtggggtctacagtgtattaccagggaaaatgtctcacctggaaaggccccagacgccagcttccagctgttgttcctgctccactgccaccaccttgtggctcctctgctcacttgcttccaccagtgcctggcgga

SEQ ID NO: 21936 - DNA, 1386 bp, synthetic construct
  source 1..1386: mol_type = other DNA
atggccttaccagtgaccgccttgctcctgccgctggccttgctgctccacgccgccaggccggacatccagatgacacagagcccctctagcctgtctgccagcgtgggagacagagtgaccatcacctgtagagccagccagagcatcagaaactacctgaactggtatcagcaaaagcccggcaaggcccctgagctgctgattcatgctgcaagcagcctccagagcggcgtgccaagcagattttctggcagcggcagcggaaccgacttcaccctgacaatatctagcctccagcctgaggacttcgccagctactactgccagcagagctacagcgcccctcctatcacctttggacagggcaccagactggaaatcaagggcggaggcggaagtggaggcggaggatctggcggcggaggctctcaggttcagctccagcagtctggacctggcctggtcaagcctagccagacactgtctctgacctgtgccatcagcggcgatagcgtgtcctctaatagagccgcctggaactggatcagacagagccctagcagaggactccagtggctgggcagaacctactaccgcagcaagtggtacaacgactacgccgtgtctctgcggagccggatcaccatcaatcccgtgaccagcaagaaccaggtggccctgcacatgaacagcgtgacccctgaagataccgccgtgtactactgtgccagagccggaattgtggtggtgcccggacctgagacattctactactacgaccacggcctggacgtgtggggccagggaacaacagtgactgtctcttctacgcgtaaaattgaagttatgtatcctcctccttacctagacaatgagaagagcaatggaaccattatccatgtgaaaggggcgcgtaagtctgtgcgcttttacctggtcgtcagccctgccagtgcctccactcagacatcttggaccccaagggaccttgtgtcctctcagacacagacacagtcctgcgtgccaccaactgctggcgcaagacaggctccagagtctcccagcacaatccccgtcccttctcagccccagaactccacacttaggccaggaccagctgctccaatcgcactggtcccagtgttctgcggactgctggttgccaagtctctggtgctgagcgcactcctcgtttggtggggcgatatttggtggaaaacgatgatggaattgagatccctcgatacgcagaaagccacatgccaccttcagcaagtcacagacttgccttggaccagcgtcagctctcccgtggaacgggaaattctgtatcatacagtggcccgcaccaagatttccgacgatgacgacgagcacacactg

SEQ ID NO: 21937 - DNA, 1197 bp, synthetic construct
  source 1..1197: mol_type = other DNA
atggccttaccagtgaccgccttgctcctgccgctggccttgctgctccacgccgccaggccggacatccagatgacacagagcccctctagcctgtctgccagcgtgggagacagagtgaccatcacctgtagagccagccagagcatcagaaactacctgaactggtatcagcaaaagcccggcaaggcccctgagctgctgattcatgctgcaagcagcctccagagcggcgtgccaagcagattttctggcagcggcagcggaaccgacttcaccctgacaatatctagcctccagcctgaggacttcgccagctactactgccagcagagctacagcgcccctcctatcacctttggacagggcaccagactggaaatcaagggcggaggcggaagtggaggcggaggatctggcggcggaggctctcaggttcagctccagcagtctggacctggcctggtcaagcctagccagacactgtctctgacctgtgccatcagcggcgatagcgtgtcctctaatagagccgcctggaactggatcagacagagccctagcagaggactccagtggctgggcagaacctactaccgcagcaagtggtacaacgactacgccgtgtctctgcggagccggatcaccatcaatcccgtgaccagcaagaaccaggtggccctgcacatgaacagcgtgacccctgaagataccgccgtgtactactgtgccagagccggaattgtggtggtgcccggacctgagacattctactactacgaccacggcctggacgtgtggggccagggaacaacagtgactgtctcttctacgcgtaaaattgaagttatgtatcctcctccttacctagacaatgagaagagcaatggaaccattatccatgtgaaaggggcgcgtggcgatattgagaatacctctctggccccagaagatcctacattccccgccgacacatggggaacatatctgctgacaaccgaaaccgggctgcaaaaggaccatgctctgtgggatcataccgctcagaatctgcttcggatggggcttgcattcctggtcctggtggctcttgtctggtttctggtcgaggactggctgtcccggaagagaaccagagaaagagcttccagggccagcacctgggaaggcagacgcagactgaatactcagaccctg

SEQ ID NO: 21938 - DNA, 2988 bp, synthetic construct
  source 1..2988: mol_type = other DNA
atggccttaccagtgaccgccttgctcctgccgctggccttgctgctccacgccgccaggccggacatccagatgacacagagcccctctagcctgtctgccagcgtgggagacagagtgaccatcacctgtagagccagccagagcatcagaaactacctgaactggtatcagcaaaagcccggcaaggcccctgagctgctgattcatgctgcaagcagcctccagagcggcgtgccaagcagattttctggcagcggcagcggaaccgacttcaccctgacaatatctagcctccagcctgaggacttcgccagctactactgccagcagagctacagcgcccctcctatcacctttggacagggcaccagactggaaatcaagctcgagggacagcctaaggccaatcctaccgtgacactgttccctccaagcagcgaagaactccaggccaacaaggccacacttgtgtgcctgatctccgacttctaccctggggctgtgacagtggcttggaaggccgatggatctcctgtgaaagccggcgtggaaaccaccaagccatccaagcagagcaacaacaaatacgccgccagctcctacctgagcctgacacctgagcagtggaagtcccacagatcctacagctgccaagtgacccacgaaggcagcaccgtggaaaagacagtggcccctacagagtgcagcggatcccagagcttcggcctgctggaccccaagctgtgctacctgctggatggcatcctgttcatctacggcgtgatcctgaccgccctgttcctgagagtgaagttcagcagaagcgccgacgcccctgcctaccagcagggacagaaccaactgtacaacgagctgaacctgggcagacgggaagagtacgacgtgctggacaagcggagaggcagggaccctgagatgggcggaaagccccagcggagaaagaacccccaggaaggactgtataacgaactccagaaagacaagatggccgaagcctacagcgagatcggcatgaagggcgagcggagaagaggcaagggccacgatggcctgtaccagggcctgagcaccgccaccaaggacacctatgacgccctgcacatgcaggccctgcctccaagaagggccaagcgatctggatctggagcaacaaacttctcactactcaaacaagcaggtgacgtggaggagaatcccgggcctactagtatggactggatttggcgcatccttttccttgtcggcgctgctaccggcgcgcattccttcgaacaggttcagctccagcagtctggacctggcctggtcaagcctagccagacactgtctctgacctgtgccatcagcggcgatagcgtgtcctctaatagagccgcctggaactggatcagacagagccctagcagaggactccagtggctgggcagaacctactaccgcagcaagtggtacaacgactacgccgtgtctctgcggagccggatcaccatcaatcccgtgaccagcaagaaccaggtggccctgcacatgaacagcgtgacccctgaagataccgccgtgtactactgtgccagagccggaattgtggtggtgcccggacctgagacattctactactacgaccacggcctggacgtgtggggccagggaacaacagtgactgtctcttctacgcgtgcctctacaaagggaccctccgtgtttcctctggctcccagcagcaagtctacaagcggaggaacagccgctctgggctgcctggtcaaggattactttcccgagcctgtgaccgtgtcctggaatagcggagcactgacaagcggcgtgcacacctttccagccgtgctgcaaagcagcggcctgtactctctgagcagcgtggtcacagtgcctagctctagcctgggcacccagacctacatctgcaatgtgaaccacaagcctagcaacaccaaggtggacaagagagtggaacccaagagctgtggtaccggcgacatcgagaacaccagtctggcccctgaggaccctacctttcctgccgatacctggggcacctacctgctgaccacagagacaggactccagaaagatcacgccctgtgggaccacacagcccagaacctgctgagaatgggcctcgcctttctggtgctggttgccctcgtgtggttcctggtggaagattggctgagccggaagcggacaagagagagagccagcagagcctctacctgggagggaagaagaaggctgaacacccagacacttagggccaagcgatctggatctggagcaacaaacttctcactactcaaacaagcaggtgacgtggaggagaatcccgggccttctagaggccatatgaccgagtacaagcccacggtgcgcctcgccacccgcgacgacgtccccagggccgtacgcaccctcgccgccgcgttcgccgactaccccgccacgcgccacaccgtcgatccggaccgccacatcgagcgggtcaccgagctgcaagaactcttcctcacgcgcgtcgggctcgacatcggcaaggtgtgggtcgcggacgacggcgccgcggtggcggtctggaccacgccggagagcgtcgaagcgggggcggtgttcgccgagatcggcccgcgcatggccgagttgagcggttcccggctggccgcgcagcaacagatggaaggcctcctggcgccgcaccggcccaaggagcccgcgtggttcctggccaccgtcggcgtctcgcccgaccaccagggcaagggtctgggcagcgccgtcgtgctccccggagtggaggcggccgagcgcgccggggtgcccgccttcctggagacctccgcgccccgcaacctccccttctacgagcggctcggcttcaccgtcaccgccgacgtcgaggtgcccgaaggaccgcgcacctggtgcatgacccgcaagcccggtgcctga

SEQ ID NO: 21939 - DNA, 3186 bp, synthetic construct
  source 1..3186: mol_type = other DNA
atggccttaccagtgaccgccttgctcctgccgctggccttgctgctccacgccgccaggccggacatccagatgacacagagcccctctagcctgtctgccagcgtgggagacagagtgaccatcacctgtagagccagccagagcatcagaaactacctgaactggtatcagcaaaagcccggcaaggcccctgagctgctgattcatgctgcaagcagcctccagagcggcgtgccaagcagattttctggcagcggcagcggaaccgacttcaccctgacaatatctagcctccagcctgaggacttcgccagctactactgccagcagagctacagcgcccctcctatcacctttggacagggcaccagactggaaatcaagctcgagggacagcctaaggccaatcctaccgtgacactgttccctccaagcagcgaagaactccaggccaacaaggccacacttgtgtgcctgatctccgacttctaccctggggctgtgacagtggcttggaaggccgatggatctcctgtgaaagccggcgtggaaaccaccaagccatccaagcagagcaacaacaaatacgccgccagctcctacctgagcctgacacctgagcagtggaagtcccacagatcctacagctgccaagtgacccacgaaggcagcaccgtggaaaagacagtggcccctacagagtgcagcggatcccagagcttcggcctgctggaccccaagctgtgctacctgctggatggcatcctgttcatctacggcgtgatcctgaccgccctgttcctgagagtgaagttcagcagaagcgccgacgcccctgcctaccagcagggacagaaccaactgtacaacgagctgaacctgggcagacgggaagagtacgacgtgctggacaagcggagaggcagggaccctgagatgggcggaaagccccagcggagaaagaacccccaggaaggactgtataacgaactccagaaagacaagatggccgaagcctacagcgagatcggcatgaagggcgagcggagaagaggcaagggccacgatggcctgtaccagggcctgagcaccgccaccaaggacacctatgacgccctgcacatgcaggccctgcctccaagaagggccaagcgatctggatctggagcaacaaacttctcactactcaaacaagcaggtgacgtggaggagaatcccgggcctactagtatggactggatttggcgcatccttttccttgtcggcgctgctaccggcgcgcattccttcgaacaggttcagctccagcagtctggacctggcctggtcaagcctagccagacactgtctctgacctgtgccatcagcggcgatagcgtgtcctctaatagagccgcctggaactggatcagacagagccctagcagaggactccagtggctgggcagaacctactaccgcagcaagtggtacaacgactacgccgtgtctctgcggagccggatcaccatcaatcccgtgaccagcaagaaccaggtggccctgcacatgaacagcgtgacccctgaagataccgccgtgtactactgtgccagagccggaattgtggtggtgcccggacctgagacattctactactacgaccacggcctggacgtgtggggccagggaacaacagtgactgtctcttctacgcgtgcctctacaaagggaccctccgtgtttcctctggctcccagcagcaagtctacaagcggaggaacagccgctctgggctgcctggtcaaggattactttcccgagcctgtgaccgtgtcctggaatagcggagcactgacaagcggcgtgcacacctttccagccgtgctgcaaagcagcggcctgtactctctgagcagcgtggtcacagtgcctagctctagcctgggcacccagacctacatctgcaatgtgaaccacaagcctagcaacaccaaggtggacaagagagtggaacccaagagctgtggtaccaagtctgtgcgcttttacctggtcgtcagccctgccagtgcctccactcagacatcttggaccccaagggaccttgtgtcctctcagacacagacacagtcctgcgtgccaccaactgctggcgcaagacaggctccagagtctcccagcacaatccccgtcccttctcagccccagaactccacacttaggccaggaccagctgctccaatcgcactggtcccagtgttctgcggactgctggttgccaagtctctggtgctgagcgcactcctcgtttggtggggcgatatttggtggaaaacgatgatggaattgagatccctcgatacgcagaaagccacatgccaccttcagcaagtcacagacttgccttggaccagcgtcagctctcccgtggaacgggaaattctgtatcatacagtggcccgcaccaagatttccgacgatgacgacgagcacacactgcgcgccaagagaagcggatctggcgtgaagcagaccctgaatttcgacctgctgaagctggctggcgacgtggaatccaacccaggcccttctagaggccatatgaccgagtacaagcccacggtgcgcctcgccacccgcgacgacgtccccagggccgtacgcaccctcgccgccgcgttcgccgactaccccgccacgcgccacaccgtcgatccggaccgccacatcgagcgggtcaccgagctgcaagaactcttcctcacgcgcgtcgggctcgacatcggcaaggtgtgggtcgcggacgacggcgccgcggtggcggtctggaccacgccggagagcgtcgaagcgggggcggtgttcgccgagatcggcccgcgcatggccgagttgagcggttcccggctggccgcgcagcaacagatggaaggcctcctggcgccgcaccggcccaaggagcccgcgtggttcctggccaccgtcggcgtctcgcccgaccaccagggcaagggtctgggcagcgccgtcgtgctccccggagtggaggcggccgagcgcgccggggtgcccgccttcctggagacctccgcgccccgcaacctccccttctacgagcggctcggcttcaccgtcaccgccgacgtcgaggtgcccgaaggaccgcgcacctggtgcatgacccgcaagcccggtgcctga

SEQ ID NO: 21940 - DNA, 2946 bp, synthetic construct
  source 1..2946: mol_type = other DNA
atggccttaccagtgaccgccttgctcctgccgctggccttgctgctccacgccgccaggccggacatccagatgacacagagcccctctagcctgtctgccagcgtgggagacagagtgaccatcacctgtagagccagccagagcatcagaaactacctgaactggtatcagcaaaagcccggcaaggcccctgagctgctgattcatgctgcaagcagcctccagagcggcgtgccaagcagattttctggcagcggcagcggaaccgacttcaccctgacaatatctagcctccagcctgaggacttcgccagctactactgccagcagagctacagcgcccctcctatcacctttggacagggcaccagactggaaatcaagctcgagggacagcctaaggccaatcctaccgtgacactgttccctccaagcagcgaagaactccaggccaacaaggccacacttgtgtgcctgatctccgacttctaccctggggctgtgacagtggcttggaaggccgatggatctcctgtgaaagccggcgtggaaaccaccaagccatccaagcagagcaacaacaaatacgccgccagctcctacctgagcctgacacctgagcagtggaagtcccacagatcctacagctgccaagtgacccacgaaggcagcaccgtggaaaagacagtggcccctacagagtgcagcggatcccagagcttcggcctgctggaccccaagctgtgctacctgctggatggcatcctgttcatctacggcgtgatcctgaccgccctgttcctgagagtgaagttcagcagaagcgccgacgcccctgcctaccagcagggacagaaccaactgtacaacgagctgaacctgggcagacgggaagagtacgacgtgctggacaagcggagaggcagggaccctgagatgggcggaaagccccagcggagaaagaacccccaggaaggactgtataacgaactccagaaagacaagatggccgaagcctacagcgagatcggcatgaagggcgagcggagaagaggcaagggccacgatggcctgtaccagggcctgagcaccgccaccaaggacacctatgacgccctgcacatgcaggccctgcctccaagaagggccaagcgatctggatctggagcaacaaacttctcactactcaaacaagcaggtgacgtggaggagaatcccgggcctactagtatggactggatttggcgcatccttttccttgtcggcgctgctaccggcgcgcattccttcgaacaggttcagctccagcagtctggacctggcctggtcaagcctagccagacactgtctctgacctgtgccatcagcggcgatagcgtgtcctctaatagagccgcctggaactggatcagacagagccctagcagaggactccagtggctgggcagaacctactaccgcagcaagtggtacaacgactacgccgtgtctctgcggagccggatcaccatcaatcccgtgaccagcaagaaccaggtggccctgcacatgaacagcgtgacccctgaagataccgccgtgtactactgtgccagagccggaattgtggtggtgcccggacctgagacattctactactacgaccacggcctggacgtgtggggccagggaacaacagtgactgtctcttctacgcgtgcctctacaaagggaccctccgtgtttcctctggctcccagcagcaagtctacaagcggaggaacagccgctctgggctgcctggtcaaggattactttcccgagcctgtgaccgtgtcctggaatagcggagcactgacaagcggcgtgcacacctttccagccgtgctgcaaagcagcggcctgtactctctgagcagcgtggtcacagtgcctagctctagcctgggcacccagacctacatctgcaatgtgaaccacaagcctagcaacaccaaggtggacaagagagtggaacccaagagctgtggtaccgtggtcgagaaagaacatccacagcttggcgctggcaccgtcctgttgcttagagccggattctatgccgtcagcttcctgtccgtggctgtggggtctacagtgtattaccagggaaaatgtctcacctggaaaggccccagacgccagcttccagctgttgttcctgctccactgccaccaccttgtggctcctctgctcacttgcttccaccagtgcctggcggacgcgccaagagaagcggatctggcgtgaagcagaccctgaatttcgacctgctgaagctggctggcgacgtggaatccaacccaggcccttctagaggccatatgaccgagtacaagcccacggtgcgcctcgccacccgcgacgacgtccccagggccgtacgcaccctcgccgccgcgttcgccgactaccccgccacgcgccacaccgtcgatccggaccgccacatcgagcgggtcaccgagctgcaagaactcttcctcacgcgcgtcgggctcgacatcggcaaggtgtgggtcgcggacgacggcgccgcggtggcggtctggaccacgccggagagcgtcgaagcgggggcggtgttcgccgagatcggcccgcgcatggccgagttgagcggttcccggctggccgcgcagcaacagatggaaggcctcctggcgccgcaccggcccaaggagcccgcgtggttcctggccaccgtcggcgtctcgcccgaccaccagggcaagggtctgggcagcgccgtcgtgctccccggagtggaggcggccgagcgcgccggggtgcccgccttcctggagacctccgcgccccgcaacctccccttctacgagcggctcggcttcaccgtcaccgccgacgtcgaggtgcccgaaggaccgcgcacctggtgcatgacccgcaagcccggtgcctga

SEQ ID NO: 21941 - DNA, 3033 bp, synthetic construct
  source 1..3033: mol_type = other DNA
atggccttaccagtgaccgccttgctcctgccgctggccttgctgctccacgccgccaggccggacatccagatgacacagagcccctctagcctgtctgccagcgtgggagacagagtgaccatcacctgtagagccagccagagcatcagaaactacctgaactggtatcagcaaaagcccggcaaggcccctgagctgctgattcatgctgcaagcagcctccagagcggcgtgccaagcagattttctggcagcggcagcggaaccgacttcaccctgacaatatctagcctccagcctgaggacttcgccagctactactgccagcagagctacagcgcccctcctatcacctttggacagggcaccagactggaaatcaagctcgaggacctgaagaacgtgttcccacctgaggtggccgtgttcgagcctagcgaggccgagatcagccacacccagaaagccaccctcgtgtgcctggctaccggcttctaccccgaccatgtggaactgtcttggtgggtcaacggcaaagaggtgcacagcggcgtgtctaccgacccccagccactgaaagaacagcccgccctgaacgacagccggtactgcctgagcagcagactgagagtgtccgccaccttctggcagaacccccggaaccacttcagatgccaggtgcagttctacggcctgagcgagaacgacgagtggacccaggacagagccaagcccgtgacccagatcgtgtctgccgaagcctggggcagagccgattgcggatcccagagcttcggcctgctggaccccaagctgtgctacctgctggatggcatcctgttcatctacggcgtgatcctgaccgccctgttcctgagagtgaagttcagcagaagcgccgacgcccctgcctaccagcagggacagaaccaactgtacaacgagctgaacctgggcagacgggaagagtacgacgtgctggacaagcggagaggcagggaccctgagatgggcggaaagccccagcggagaaagaacccccaggaaggactgtataacgaactccagaaagacaagatggccgaagcctacagcgagatcggcatgaagggcgagcggagaagaggcaagggccacgatggcctgtaccagggcctgagcaccgccaccaaggacacctatgacgccctgcacatgcaggccctgcctccaagaagggccaagcgatctggatctggagcaacaaacttctcactactcaaacaagcaggtgacgtggaggagaatcccgggcctactagtatggactggatttggcgcatccttttccttgtcggcgctgctaccggcgcgcattccttcgaacaggttcagctccagcagtctggacctggcctggtcaagcctagccagacactgtctctgacctgtgccatcagcggcgatagcgtgtcctctaatagagccgcctggaactggatcagacagagccctagcagaggactccagtggctgggcagaacctactaccgcagcaagtggtacaacgactacgccgtgtctctgcggagccggatcaccatcaatcccgtgaccagcaagaaccaggtggccctgcacatgaacagcgtgacccctgaagataccgccgtgtactactgtgccagagccggaattgtggtggtgcccggacctgagacattctactactacgaccacggcctggacgtgtggggccagggaacaacagtgactgtctcttctacgcgtatccagaaccctgatcctgccgtgtaccagctgcgggatagcaagagcagcgacaagagcgtgtgtctgttcaccgacttcgacagccagaccaacgtgtcccagagcaaggactccgacgtgtacatcaccgataagaccgtgctggacatgcggagcatggacttcaagagcaactccgccgtggcctggtccaacaagtccgatttcgcctgcgccaacgccttcaacaacagcattatccccgaggacacattcttcccaagccccgagagcagctgcggtaccggcgacatcgagaacaccagtctggcccctgaggaccctacctttcctgccgatacctggggcacctacctgctgaccacagagacaggactccagaaagatcacgccctgtgggaccacacagcccagaacctgctgagaatgggcctcgcctttctggtgctggttgccctcgtgtggttcctggtggaagattggctgagccggaagcggacaagagagagagccagcagagcctctacctgggagggaagaagaaggctgaacacccagacacttagggccaagcgatctggatctggagcaacaaacttctcactactcaaacaagcaggtgacgtggaggagaatcccgggccttctagaggccatatgaccgagtacaagcccacggtgcgcctcgccacccgcgacgacgtccccagggccgtacgcaccctcgccgccgcgttcgccgactaccccgccacgcgccacaccgtcgatccggaccgccacatcgagcgggtcaccgagctgcaagaactcttcctcacgcgcgtcgggctcgacatcggcaaggtgtgggtcgcggacgacggcgccgcggtggcggtctggaccacgccggagagcgtcgaagcgggggcggtgttcgccgagatcggcccgcgcatggccgagttgagcggttcccggctggccgcgcagcaacagatggaaggcctcctggcgccgcaccggcccaaggagcccgcgtggttcctggccaccgtcggcgtctcgcccgaccaccagggcaagggtctgggcagcgccgtcgtgctccccggagtggaggcggccgagcgcgccggggtgcccgccttcctggagacctccgcgccccgcaacctccccttctacgagcggctcggcttcaccgtcaccgccgacgtcgaggtgcccgaaggaccgcgcacctggtgcatgacccgcaagcccggtgcctga

SEQ ID NO: 21942 - DNA, 3231 bp, synthetic construct
  source 1..3231: mol_type = other DNA
atggccttaccagtgaccgccttgctcctgccgctggccttgctgctccacgccgccaggccggacatccagatgacacagagcccctctagcctgtctgccagcgtgggagacagagtgaccatcacctgtagagccagccagagcatcagaaactacctgaactggtatcagcaaaagcccggcaaggcccctgagctgctgattcatgctgcaagcagcctccagagcggcgtgccaagcagattttctggcagcggcagcggaaccgacttcaccctgacaatatctagcctccagcctgaggacttcgccagctactactgccagcagagctacagcgcccctcctatcacctttggacagggcaccagactggaaatcaagctcgaggacctgaagaacgtgttcccacctgaggtggccgtgttcgagcctagcgaggccgagatcagccacacccagaaagccaccctcgtgtgcctggctaccggcttctaccccgaccatgtggaactgtcttggtgggtcaacggcaaagaggtgcacagcggcgtgtctaccgacccccagccactgaaagaacagcccgccctgaacgacagccggtactgcctgagcagcagactgagagtgtccgccaccttctggcagaacccccggaaccacttcagatgccaggtgcagttctacggcctgagcgagaacgacgagtggacccaggacagagccaagcccgtgacccagatcgtgtctgccgaagcctggggcagagccgattgcggatcccagagcttcggcctgctggaccccaagctgtgctacctgctggatggcatcctgttcatctacggcgtgatcctgaccgccctgttcctgagagtgaagttcagcagaagcgccgacgcccctgcctaccagcagggacagaaccaactgtacaacgagctgaacctgggcagacgggaagagtacgacgtgctggacaagcggagaggcagggaccctgagatgggcggaaagccccagcggagaaagaacccccaggaaggactgtataacgaactccagaaagacaagatggccgaagcctacagcgagatcggcatgaagggcgagcggagaagaggcaagggccacgatggcctgtaccagggcctgagcaccgccaccaaggacacctatgacgccctgcacatgcaggccctgcctccaagaagggccaagcgatctggatctggagcaacaaacttctcactactcaaacaagcaggtgacgtggaggagaatcccgggcctactagtatggactggatttggcgcatccttttccttgtcggcgctgctaccggcgcgcattccttcgaacaggttcagctccagcagtctggacctggcctggtcaagcctagccagacactgtctctgacctgtgccatcagcggcgatagcgtgtcctctaatagagccgcctggaactggatcagacagagccctagcagaggactccagtggctgggcagaacctactaccgcagcaagtggtacaacgactacgccgtgtctctgcggagccggatcaccatcaatcccgtgaccagcaagaaccaggtggccctgcacatgaacagcgtgacccctgaagataccgccgtgtactactgtgccagagccggaattgtggtggtgcccggacctgagacattctactactacgaccacggcctggacgtgtggggccagggaacaacagtgactgtctcttctacgcgtatccagaaccctgatcctgccgtgtaccagctgcgggatagcaagagcagcgacaagagcgtgtgtctgttcaccgacttcgacagccagaccaacgtgtcccagagcaaggactccgacgtgtacatcaccgataagaccgtgctggacatgcggagcatggacttcaagagcaactccgccgtggcctggtccaacaagtccgatttcgcctgcgccaacgccttcaacaacagcattatccccgaggacacattcttcccaagccccgagagcagctgcggtaccaagtctgtgcgcttttacctggtcgtcagccctgccagtgcctccactcagacatcttggaccccaagggaccttgtgtcctctcagacacagacacagtcctgcgtgccaccaactgctggcgcaagacaggctccagagtctcccagcacaatccccgtcccttctcagccccagaactccacacttaggccaggaccagctgctccaatcgcactggtcccagtgttctgcggactgctggttgccaagtctctggtgctgagcgcactcctcgtttggtggggcgatatttggtggaaaacgatgatggaattgagatccctcgatacgcagaaagccacatgccaccttcagcaagtcacagacttgccttggaccagcgtcagctctcccgtggaacgggaaattctgtatcatacagtggcccgcaccaagatttccgacgatgacgacgagcacacactgcgcgccaagagaagcggatctggcgtgaagcagaccctgaatttcgacctgctgaagctggctggcgacgtggaatccaacccaggcccttctagaggccatatgaccgagtacaagcccacggtgcgcctcgccacccgcgacgacgtccccagggccgtacgcaccctcgccgccgcgttcgccgactaccccgccacgcgccacaccgtcgatccggaccgccacatcgagcgggtcaccgagctgcaagaactcttcctcacgcgcgtcgggctcgacatcggcaaggtgtgggtcgcggacgacggcgccgcggtggcggtctggaccacgccggagagcgtcgaagcgggggcggtgttcgccgagatcggcccgcgcatggccgagttgagcggttcccggctggccgcgcagcaacagatggaaggcctcctggcgccgcaccggcccaaggagcccgcgtggttcctggccaccgtcggcgtctcgcccgaccaccagggcaagggtctgggcagcgccgtcgtgctccccggagtggaggcggccgagcgcgccggggtgcccgccttcctggagacctccgcgccccgcaacctccccttctacgagcggctcggcttcaccgtcaccgccgacgtcgaggtgcccgaaggaccgcgcacctggtgcatgacccgcaagcccggtgcctga

SEQ ID NO: 21943 - DNA, 2991 bp, synthetic construct
  source 1..2991: mol_type = other DNA
atggccttaccagtgaccgccttgctcctgccgctggccttgctgctccacgccgccaggccggacatccagatgacacagagcccctctagcctgtctgccagcgtgggagacagagtgaccatcacctgtagagccagccagagcatcagaaactacctgaactggtatcagcaaaagcccggcaaggcccctgagctgctgattcatgctgcaagcagcctccagagcggcgtgccaagcagattttctggcagcggcagcggaaccgacttcaccctgacaatatctagcctccagcctgaggacttcgccagctactactgccagcagagctacagcgcccctcctatcacctttggacagggcaccagactggaaatcaagctcgaggacctgaagaacgtgttcccacctgaggtggccgtgttcgagcctagcgaggccgagatcagccacacccagaaagccaccctcgtgtgcctggctaccggcttctaccccgaccatgtggaactgtcttggtgggtcaacggcaaagaggtgcacagcggcgtgtctaccgacccccagccactgaaagaacagcccgccctgaacgacagccggtactgcctgagcagcagactgagagtgtccgccaccttctggcagaacccccggaaccacttcagatgccaggtgcagttctacggcctgagcgagaacgacgagtggacccaggacagagccaagcccgtgacccagatcgtgtctgccgaagcctggggcagagccgattgcggatcccagagcttcggcctgctggaccccaagctgtgctacctgctggatggcatcctgttcatctacggcgtgatcctgaccgccctgttcctgagagtgaagttcagcagaagcgccgacgcccctgcctaccagcagggacagaaccaactgtacaacgagctgaacctgggcagacgggaagagtacgacgtgctggacaagcggagaggcagggaccctgagatgggcggaaagccccagcggagaaagaacccccaggaaggactgtataacgaactccagaaagacaagatggccgaagcctacagcgagatcggcatgaagggcgagcggagaagaggcaagggccacgatggcctgtaccagggcctgagcaccgccaccaaggacacctatgacgccctgcacatgcaggccctgcctccaagaagggccaagcgatctggatctggagcaacaaacttctcactactcaaacaagcaggtgacgtggaggagaatcccgggcctactagtatggactggatttggcgcatccttttccttgtcggcgctgctaccggcgcgcattccttcgaacaggttcagctccagcagtctggacctggcctggtcaagcctagccagacactgtctctgacctgtgccatcagcggcgatagcgtgtcctctaatagagccgcctggaactggatcagacagagccctagcagaggactccagtggctgggcagaacctactaccgcagcaagtggtacaacgactacgccgtgtctctgcggagccggatcaccatcaatcccgtgaccagcaagaaccaggtggccctgcacatgaacagcgtgacccctgaagataccgccgtgtactactgtgccagagccggaattgtggtggtgcccggacctgagacattctactactacgaccacggcctggacgtgtggggccagggaacaacagtgactgtctcttctacgcgtatccagaaccctgatcctgccgtgtaccagctgcgggatagcaagagcagcgacaagagcgtgtgtctgttcaccgacttcgacagccagaccaacgtgtcccagagcaaggactccgacgtgtacatcaccgataagaccgtgctggacatgcggagcatggacttcaagagcaactccgccgtggcctggtccaacaagtccgatttcgcctgcgccaacgccttcaacaacagcattatccccgaggacacattcttcccaagccccgagagcagctgcggtaccgtggtcgagaaagaacatccacagcttggcgctggcaccgtcctgttgcttagagccggattctatgccgtcagcttcctgtccgtggctgtggggtctacagtgtattaccagggaaaatgtctcacctggaaaggccccagacgccagcttccagctgttgttcctgctccactgccaccaccttgtggctcctctgctcacttgcttccaccagtgcctggcggacgcgccaagagaagcggatctggcgtgaagcagaccctgaatttcgacctgctgaagctggctggcgacgtggaatccaacccaggcccttctagaggccatatgaccgagtacaagcccacggtgcgcctcgccacccgcgacgacgtccccagggccgtacgcaccctcgccgccgcgttcgccgactaccccgccacgcgccacaccgtcgatccggaccgccacatcgagcgggtcaccgagctgcaagaactcttcctcacgcgcgtcgggctcgacatcggcaaggtgtgggtcgcggacgacggcgccgcggtggcggtctggaccacgccggagagcgtcgaagcgggggcggtgttcgccgagatcggcccgcgcatggccgagttgagcggttcccggctggccgcgcagcaacagatggaaggcctcctggcgccgcaccggcccaaggagcccgcgtggttcctggccaccgtcggcgtctcgcccgaccaccagggcaagggtctgggcagcgccgtcgtgctccccggagtggaggcggccgagcgcgccggggtgcccgccttcctggagacctccgcgccccgcaacctccccttctacgagcggctcggcttcaccgtcaccgccgacgtcgaggtgcccgaaggaccgcgcacctggtgcatgacccgcaagcccggtgcctga

SEQ ID NO: 21944 - DNA, 2904 bp, synthetic construct
  source 1..2904: mol_type = other DNA
atggccttaccagtgaccgccttgctcctgccgctggccttgctgctccacgccgccaggccggacatccagatgacacagagcccctctagcctgtctgccagcgtgggagacagagtgaccatcacctgtagagccagccagagcatcagaaactacctgaactggtatcagcaaaagcccggcaaggcccctgagctgctgattcatgctgcaagcagcctccagagcggcgtgccaagcagattttctggcagcggcagcggaaccgacttcaccctgacaatatctagcctccagcctgaggacttcgccagctactactgccagcagagctacagcgcccctcctatcacctttggacagggcaccagactggaaatcaagctcgagggacagcctaaggccaatcctaccgtgacactgttccctccaagcagcgaagaactccaggccaacaaggccacacttgtgtgcctgatctccgacttctaccctggggctgtgacagtggcttggaaggccgatggatctcctgtgaaagccggcgtggaaaccaccaagccatccaagcagagcaacaacaaatacgccgccagctcctacctgagcctgacacctgagcagtggaagtcccacagatcctacagctgccaagtgacccacgaaggcagcaccgtggaaaagacagtggcccctacagagtgcagcggatcccagagcttcggcctgctggaccccaagctgtgctacctgctggatggcatcctgttcatctacggcgtgatcctgaccgccctgttcctgagagtgaagttcagcagaagcgccgacgcccctgcctaccagcagggacagaaccaactgtacaacgagctgaacctgggcagacgggaagagtacgacgtgctggacaagcggagaggcagggaccctgagatgggcggaaagccccagcggagaaagaacccccaggaaggactgtataacgaactccagaaagacaagatggccgaagcctacagcgagatcggcatgaagggcgagcggagaagaggcaagggccacgatggcctgtaccagggcctgagcaccgccaccaaggacacctatgacgccctgcacatgcaggccctgcctccaagaagggccaagcgatctggatctggagcaacaaacttctcactactcaaacaagcaggtgacgtggaggagaatcccgggcctactagtatggactggatttggcgcatccttttccttgtcggcgctgctaccggcgcgcattccttcgaacaggttcagctccagcagtctggacctggcctggtcaagcctagccagacactgtctctgacctgtgccatcagcggcgatagcgtgtcctctaatagagccgcctggaactggatcagacagagccctagcagaggactccagtggctgggcagaacctactaccgcagcaagtggtacaacgactacgccgtgtctctgcggagccggatcaccatcaatcccgtgaccagcaagaaccaggtggccctgcacatgaacagcgtgacccctgaagataccgccgtgtactactgtgccagagccggaattgtggtggtgcccggacctgagacattctactactacgaccacggcctggacgtgtggggccagggaacaacagtgactgtctcttctacgcgtgcctctacaaagggaccctccgtgtttcctctggctcccagcagcaagtctacaagcggaggaacagccgctctgggctgcctggtcaaggattactttcccgagcctgtgaccgtgtcctggaatagcggagcactgacaagcggcgtgcacacctttccagccgtgctgcaaagcagcggcctgtactctctgagcagcgtggtcacagtgcctagctctagcctgggcacccagacctacatctgcaatgtgaaccacaagcctagcaacaccaaggtggacaagagagtggaacccaagagctgtggtaccatcactcaaggtttggcagtgtcaaccatctcatcattctttccacctggctaccaagtgtccttctgcctggtcatggtgctgctgttcgccgtggataccggcctgtacttcagcgtcaagaccaacatccggtccagcaccagagactggaaggaccacaagttcaagtggcggaaggaccctcaggacaagagggccaagcgatctggatctggagcaacaaacttctcactactcaaacaagcaggtgacgtggaggagaatcccgggccttctagaggccatatgaccgagtacaagcccacggtgcgcctcgccacccgcgacgacgtccccagggccgtacgcaccctcgccgccgcgttcgccgactaccccgccacgcgccacaccgtcgatccggaccgccacatcgagcgggtcaccgagctgcaagaactcttcctcacgcgcgtcgggctcgacatcggcaaggtgtgggtcgcggacgacggcgccgcggtggcggtctggaccacgccggagagcgtcgaagcgggggcggtgttcgccgagatcggcccgcgcatggccgagttgagcggttcccggctggccgcgcagcaacagatggaaggcctcctggcgccgcaccggcccaaggagcccgcgtggttcctggccaccgtcggcgtctcgcccgaccaccagggcaagggtctgggcagcgccgtcgtgctccccggagtggaggcggccgagcgcgccggggtgcccgccttcctggagacctccgcgccccgcaacctccccttctacgagcggctcggcttcaccgtcaccgccgacgtcgaggtgcccgaaggaccgcgcacctggtgcatgacccgcaagcccggtgcctga

SEQ ID NO: 21945 - DNA, 2949 bp, synthetic construct
  source 1..2949: mol_type = other DNA
atggccttaccagtgaccgccttgctcctgccgctggccttgctgctccacgccgccaggccggacatccagatgacacagagcccctctagcctgtctgccagcgtgggagacagagtgaccatcacctgtagagccagccagagcatcagaaactacctgaactggtatcagcaaaagcccggcaaggcccctgagctgctgattcatgctgcaagcagcctccagagcggcgtgccaagcagattttctggcagcggcagcggaaccgacttcaccctgacaatatctagcctccagcctgaggacttcgccagctactactgccagcagagctacagcgcccctcctatcacctttggacagggcaccagactggaaatcaagctcgaggacctgaagaacgtgttcccacctgaggtggccgtgttcgagcctagcgaggccgagatcagccacacccagaaagccaccctcgtgtgcctggctaccggcttctaccccgaccatgtggaactgtcttggtgggtcaacggcaaagaggtgcacagcggcgtgtctaccgacccccagccactgaaagaacagcccgccctgaacgacagccggtactgcctgagcagcagactgagagtgtccgccaccttctggcagaacccccggaaccacttcagatgccaggtgcagttctacggcctgagcgagaacgacgagtggacccaggacagagccaagcccgtgacccagatcgtgtctgccgaagcctggggcagagccgattgcggatcccagagcttcggcctgctggaccccaagctgtgctacctgctggatggcatcctgttcatctacggcgtgatcctgaccgccctgttcctgagagtgaagttcagcagaagcgccgacgcccctgcctaccagcagggacagaaccaactgtacaacgagctgaacctgggcagacgggaagagtacgacgtgctggacaagcggagaggcagggaccctgagatgggcggaaagccccagcggagaaagaacccccaggaaggactgtataacgaactccagaaagacaagatggccgaagcctacagcgagatcggcatgaagggcgagcggagaagaggcaagggccacgatggcctgtaccagggcctgagcaccgccaccaaggacacctatgacgccctgcacatgcaggccctgcctccaagaagggccaagcgatctggatctggagcaacaaacttctcactactcaaacaagcaggtgacgtggaggagaatcccgggcctactagtatggactggatttggcgcatccttttccttgtcggcgctgctaccggcgcgcattccttcgaacaggttcagctccagcagtctggacctggcctggtcaagcctagccagacactgtctctgacctgtgccatcagcggcgatagcgtgtcctctaatagagccgcctggaactggatcagacagagccctagcagaggactccagtggctgggcagaacctactaccgcagcaagtggtacaacgactacgccgtgtctctgcggagccggatcaccatcaatcccgtgaccagcaagaaccaggtggccctgcacatgaacagcgtgacccctgaagataccgccgtgtactactgtgccagagccggaattgtggtggtgcccggacctgagacattctactactacgaccacggcctggacgtgtggggccagggaacaacagtgactgtctcttctacgcgtatccagaaccctgatcctgccgtgtaccagctgcgggatagcaagagcagcgacaagagcgtgtgtctgttcaccgacttcgacagccagaccaacgtgtcccagagcaaggactccgacgtgtacatcaccgataagaccgtgctggacatgcggagcatggacttcaagagcaactccgccgtggcctggtccaacaagtccgatttcgcctgcgccaacgccttcaacaacagcattatccccgaggacacattcttcccaagccccgagagcagctgcggtaccatcactcaaggtttggcagtgtcaaccatctcatcattctttccacctggctaccaagtgtccttctgcctggtcatggtgctgctgttcgccgtggataccggcctgtacttcagcgtcaagaccaacatccggtccagcaccagagactggaaggaccacaagttcaagtggcggaaggaccctcaggacaagagggccaagcgatctggatctggagcaacaaacttctcactactcaaacaagcaggtgacgtggaggagaatcccgggccttctagaggccatatgaccgagtacaagcccacggtgcgcctcgccacccgcgacgacgtccccagggccgtacgcaccctcgccgccgcgttcgccgactaccccgccacgcgccacaccgtcgatccggaccgccacatcgagcgggtcaccgagctgcaagaactcttcctcacgcgcgtcgggctcgacatcggcaaggtgtgggtcgcggacgacggcgccgcggtggcggtctggaccacgccggagagcgtcgaagcgggggcggtgttcgccgagatcggcccgcgcatggccgagttgagcggttcccggctggccgcgcagcaacagatggaaggcctcctggcgccgcaccggcccaaggagcccgcgtggttcctggccaccgtcggcgtctcgcccgaccaccagggcaagggtctgggcagcgccgtcgtgctccccggagtggaggcggccgagcgcgccggggtgcccgccttcctggagacctccgcgccccgcaacctccccttctacgagcggctcggcttcaccgtcaccgccgacgtcgaggtgcccgaaggaccgcgcacctggtgcatgacccgcaagcccggtgcctga

SEQ ID NO: 21946 - DNA, 1998 bp, synthetic construct
  source 1..1998: mol_type = other DNA
atggccttaccagtgaccgccttgctcctgccgctggccttgctgctccacgccgccaggccggacatccagatgacacagagcccctctagcctgtctgccagcgtgggagacagagtgaccatcacctgtagagccagccagagcatcagaaactacctgaactggtatcagcaaaagcccggcaaggcccctgagctgctgattcatgctgcaagcagcctccagagcggcgtgccaagcagattttctggcagcggcagcggaaccgacttcaccctgacaatatctagcctccagcctgaggacttcgccagctactactgccagcagagctacagcgcccctcctatcacctttggacagggcaccagactggaaatcaagctcgagggacagcctaaggccaatcctaccgtgacactgttccctccaagcagcgaagaactccaggccaacaaggccacacttgtgtgcctgatctccgacttctaccctggggctgtgacagtggcttggaaggccgatggatctcctgtgaaagccggcgtggaaaccaccaagccatccaagcagagcaacaacaaatacgccgccagctcctacctgagcctgacacctgagcagtggaagtcccacagatcctacagctgccaagtgacccacgaaggcagcaccgtggaaaagacagtggcccctacagagtgcagcggatccctgggagagcctcagctgtgctatatcctggacgccatcctgtttctgtacggcatcgtgctgaccctgctgtactgccggctgaagatccaagtgcggaaggccgccatcaccagctacgagaaatccgacggcgtgtacaccggcctgagcaccagaaatcaagagacatacgagacactgaagcacgaaaagcctccacaaagggccaagcgatctggatctggagcaacaaacttctcactactcaaacaagcaggtgacgtggaggagaatcccgggcctactagtatggactggatttggcgcatccttttccttgtcggcgctgctaccggcgcgcattccttcgaacaggttcagctccagcagtctggacctggcctggtcaagcctagccagacactgtctctgacctgtgccatcagcggcgatagcgtgtcctctaatagagccgcctggaactggatcagacagagccctagcagaggactccagtggctgggcagaacctactaccgcagcaagtggtacaacgactacgccgtgtctctgcggagccggatcaccatcaatcccgtgaccagcaagaaccaggtggccctgcacatgaacagcgtgacccctgaagataccgccgtgtactactgtgccagagccggaattgtggtggtgcccggacctgagacattctactactacgaccacggcctggacgtgtggggccagggaacaacagtgactgtctcttctacgcgtgcctctacaaagggaccctccgtgtttcctctggctcccagcagcaagtctacaagcggaggaacagccgctctgggctgcctggtcaaggattactttcccgagcctgtgaccgtgtcctggaatagcggagcactgacaagcggcgtgcacacctttccagccgtgctgcaaagcagcggcctgtactctctgagcagcgtggtcacagtgcctagctctagcctgggcacccagacctacatctgcaatgtgaaccacaagcctagcaacaccaaggtggacaagagagtggaacccaagagctgtggtaccctcggagaaccacagctctgttacattctggatgctatcctgttcctctatgggatcgtcctgacactcctgtattgcagactcaaaattcaagttcgcaaagccgccattacctcttacgagaagagtgatggggtgtacacaggactgtctacccggaatcaagaaacctacgaaaccctcaaacatgagaagccacctcagtaa

SEQ ID NO: 21947 - DNA, 3129 bp, synthetic construct
  source 1..3129: mol_type = other DNA
atggccttaccagtgaccgccttgctcctgccgctggccttgctgctccacgccgccaggccggacatccagatgacacagagcccctctagcctgtctgccagcgtgggagacagagtgaccatcacctgtagagccagccagagcatcagaaactacctgaactggtatcagcaaaagcccggcaaggcccctgagctgctgattcatgctgcaagcagcctccagagcggcgtgccaagcagattttctggcagcggcagcggaaccgacttcaccctgacaatatctagcctccagcctgaggacttcgccagctactactgccagcagagctacagcgcccctcctatcacctttggacagggcaccagactggaaatcaagggacagcctaaggccaatcctaccgtgacactgttccctccaagcagcgaagaactccaggccaacaaggccacacttgtgtgcctgatctccgacttctaccctggggctgtgacagtggcttggaaggccgatggatctcctgtgaaagccggcgtggaaaccaccaagccatccaagcagagcaacaacaaatacgccgccagctcctacctgagcctgacacctgagcagtggaagtcccacagatcctacagctgccaagtgacccacgaaggcagcaccgtggaaaagacagtggcccctacagagtgcagcggatcccagagcttcggcctgctggaccccaagctgtgctacctgctggatggcatcctgttcatctacggcgtgatcctgaccgccctgttcctgagagtgaagttcagcagaagcgccgacgcccctgcctaccagcagggacagaaccaactgtacaacgagctgaacctgggcagacgggaagagtacgacgtgctggacaagcggagaggcagggaccctgagatgggcggaaagccccggagaaagaacccccaggaaggactgtataacgaactccagaaagacaagatggccgaagcctacagcgagatcggcatgaagggcgagcggagaagaggcaagggccacgatggcctgtaccagggcctgagcaccgccaccaaggacacctatgacgccctgcacatgcaggccctgcctccaagaagggccaagcgatctggatctggagcaacaaacttctcactactcaaacaagcaggtgacgtggaggagaatcccgggcctactagtatggactggatttggcgcatccttttccttgtcggcgctgctaccggcgcgcattccttcgaacaggttcagctccagcagtctggacctggcctggtcaagcctagccagacactgtctctgacctgtgccatcagcggcgatagcgtgtcctctaatagagccgcctggaactggatcagacagagccctagcagaggactccagtggctgggcagaacctactaccgcagcaagtggtacaacgactacgccgtgtctctgcggagccggatcaccatcaatcccgtgaccagcaagaaccaggtggccctgcacatgaacagcgtgacccctgaagataccgccgtgtactactgtgccagagccggaattgtggtggtgcccggacctgagacattctactactacgaccacggcctggacgtgtggggccagggaacaacagtgactgtctcttctgcctctacaaagggaccctccgtgtttcctctggctcccagcagcaagtctacaagcggaggaacagccgctctgggctgcctggtcaaggattactttcccgagcctgtgaccgtgtcctggaatagcggagcactgacaagcggcgtgcacacctttccagccgtgctgcaaagcagcggcctgtactctctgagcagcgtggtcacagtgcctagctctagcctgggcacccagacctacatctgcaatgtgaaccacaagcctagcaacaccaaggtggacaagagagtggaacccaagagctgtggtacccagagttttgggttgttggaccctaaattgtgctatctgttggacggaatcctgttcatttacggagtgatcctgaccgcattgttcctgcgggttaagttttccagatccgcagacgcacccgcttaccaacaagggcagaaccaactctacaatgaacttaatttggggcggagggaagagtacgacgttctggacaaaaggaggggacgagatcccgagatgggcggaaagcctcgaaggaagaatccgcaagaggggctttataacgaactccagaaagataaaatggcagaagcctatagtgagattgggatgaagggagaaaggaggaggggtaaaggtcacgatgggttgtaccaaggattgagcacagccactaaagatacctatgatgcgctccacatgcaggccctgccgccaagacgcgccaagagaagcggatctggcgtgaagcagaccctgaatttcgacctgctgaagctggctggcgacgtggaatccaacccaggcccttctagaggccatatgaccgagtacaagcccacggtgcgcctcgccacccgcgacgacgtccccagggccgtacgcaccctcgccgccgcgttcgccgactaccccgccacgcgccacaccgtcgatccggaccgccacatcgagcgggtcaccgagctgcaagaactcttcctcacgcgcgtcgggctcgacatcggcaaggtgtgggtcgcggacgacggcgccgcggtggcggtctggaccacgccggagagcgtcgaagcgggggcggtgttcgccgagatcggcccgcgcatggccgagttgagcggttcccggctggccgcgcagcaacagatggaaggcctcctggcgccgcaccggcccaaggagcccgcgtggttcctggccaccgtcggcgtctcgcccgaccaccagggcaagggtctgggcagcgccgtcgtgctccccggagtggaggcggccgagcgcgccggggtgcccgccttcctggagacctccgcgccccgcaacctccccttctacgagcggctcggcttcaccgtcaccgccgacgtcgaggtgcccgaaggaccgcgcacctggtgcatgacccgcaagcccggtgcctga

SEQ ID NO: 21948 - DNA, 2484 bp, synthetic construct
  source 1..2484: mol_type = other DNA
atggccttaccagtgaccgccttgctcctgccgctggccttgctgctccacgccgccaggccggacatccagatgacacagagcccctctagcctgtctgccagcgtgggagacagagtgaccatcacctgtagagccagccagagcatcagaaactacctgaactggtatcagcaaaagcccggcaaggcccctgagctgctgattcatgctgcaagcagcctccagagcggcgtgccaagcagattttctggcagcggcagcggaaccgacttcaccctgacaatatctagcctccagcctgaggacttcgccagctactactgccagcagagctacagcgcccctcctatcacctttggacagggcaccagactggaaatcaagctcgaggacctgaagaacgtgttcccacctgaggtggccgtgttcgagcctagcgaggccgagatcagccacacccagaaagccaccctcgtgtgcctggctaccggcttctaccccgaccatgtggaactgtcttggtgggtcaacggcaaagaggtgcacagcggcgtgtctaccgacccccagccactgaaagaacagcccgccctgaacgacagccggtactgcctgagcagcagactgagagtgtccgccaccttctggcagaacccccggaaccacttcagatgccaggtgcagttctacggcctgagcgagaacgacgagtggacccaggacagagccaagcccgtgacccagatcgtgtctgccgaagcctggggcagagccgattgcggatcccagagcttcggcctgctggaccccaagctgtgctacctgctggatggcatcctgttcatctacggcgtgatcctgaccgccctgttcctgagagtgaagttcagcagaagcgccgacgcccctgcctaccagcagggacagaaccaactgtacaacgagctgaacctgggcagacgggaagagtacgacgtgctggacaagcggagaggcagggaccctgagatgggcggaaagccccggagaaagaacccccaggaaggactgtataacgaactccagaaagacaagatggccgaagcctacagcgagatcggcatgaagggcgagcggagaagaggcaagggccacgatggcctgtaccagggcctgagcaccgccaccaaggacacctatgacgccctgcacatgcaggccctgcctccaagaagggccaagcgatctggatctggagcaacaaacttctcactactcaaacaagcaggtgacgtggaggagaatcccgggcctactagtatggactggatttggcgcatccttttccttgtcggcgctgctaccggcgcgcattccttcgaacaggttcagctccagcagtctggacctggcctggtcaagcctagccagacactgtctctgacctgtgccatcagcggcgatagcgtgtcctctaatagagccgcctggaactggatcagacagagccctagcagaggactccagtggctgggcagaacctactaccgcagcaagtggtacaacgactacgccgtgtctctgcggagccggatcaccatcaatcccgtgaccagcaagaaccaggtggccctgcacatgaacagcgtgacccctgaagataccgccgtgtactactgtgccagagccggaattgtggtggtgcccggacctgagacattctactactacgaccacggcctggacgtgtggggccagggaacaacagtgactgtctcttctacgcgtatccagaaccctgatcctgccgtgtaccagctgcgggatagcaagagcagcgacaagagcgtgtgtctgttcaccgacttcgacagccagaccaacgtgtcccagagcaaggactccgacgtgtacatcaccgataagaccgtgctggacatgcggagcatggacttcaagagcaactccgccgtggcctggtccaacaagtccgatttcgcctgcgccaacgccttcaacaacagcattatccccgaggacacattcttcccaagccccgagagcagctgcggtacccagagttttgggttgttggaccctaaattgtgctatctgttggacggaatcctgttcatttacggagtgatcctgaccgcattgttcctgcgggttaagttttccagatccgcagacgcacccgcttaccaacaagggcagaaccaactctacaatgaacttaatttggggcggagggaagagtacgacgttctggacaaaaggaggggacgagatcccgagatgggcggaaagcctcgaaggaagaatccgcaagaggggctttataacgaactccagaaagataaaatggcagaagcctatagtgagattgggatgaagggagaaaggaggaggggtaaaggtcacgatgggttgtaccaaggattgagcacagccactaaagatacctatgatgcgctccacatgcaggccctgccgccaaga

SEQ ID NO: 21949 - DNA, 21 bp, synthetic construct
  source 1..21: mol_type = other DNA
ggggggggggggggggggggg

SEQ ID NO: 21950 - DNA, 21 bp, synthetic construct
  source 1..21: mol_type = other DNA
ggggggggggggggggggggg

SEQ ID NO: 21951 - DNA, 21 bp, synthetic construct
  source 1..21: mol_type = other DNA
ggggggggggggggggggggg

SEQ ID NO: 21952 - DNA, 21 bp, synthetic construct
  source 1..21: mol_type = other DNA
ggggggggggggggggggggg

SEQ ID NO: 21953 - DNA, 21 bp, synthetic construct
  source 1..21: mol_type = other DNA
ggggggggggggggggggggg

SEQ ID NO: 21954 - DNA, 21 bp, synthetic construct
  source 1..21: mol_type = other DNA
ggggggggggggggggggggg

SEQ ID NO: 21955 - DNA, 21 bp, synthetic construct
  source 1..21: mol_type = other DNA
ggggggggggggggggggggg

SEQ ID NO: 21956 - DNA, 21 bp, synthetic construct
  source 1..21: mol_type = other DNA
ggggggggggggggggggggg

SEQ ID NO: 21957 - DNA, 21 bp, synthetic construct
  source 1..21: mol_type = other DNA
ggggggggggggggggggggg

SEQ ID NO: 21958 - DNA, 21 bp, synthetic construct
  source 1..21: mol_type = other DNA
ggggggggggggggggggggg

SEQ ID NO: 21959 - DNA, 21 bp, synthetic construct
  source 1..21: mol_type = other DNA
ggggggggggggggggggggg

SEQ ID NO: 21960 - DNA, 21 bp, synthetic construct
  source 1..21: mol_type = other DNA
ggggggggggggggggggggg

SEQ ID NO: 21961 - protein, 136 aa, synthetic construct
IQNPEPAVYQLKDPRSQDSTLCLFTDFDSQINVPKTMESGTFITDKCVLDMKAMDSKSNGAIAWSNQTSFTCQDIFKETNATYPSSDVPCDATLTEKSFETDMNLNFQNLSVMGLRILLLKVAGFNLLMTLRLWSS

SEQ ID NO: 21962 - protein, 135 aa, synthetic construct
QNPEPAVYQLKDPRSQDSTLCLFTDFDSQINVPKTMESGTFITDKCVLDMKAMDSKSNGAIAWSNQTSFTCQDIFKETNATYPSSDVPCDATLTEKSFETDMNLNFQNLSVMGLRILLLKVAGFNLLMTLRLWSS

SEQ ID NO: 21963 - protein, 134 aa, synthetic construct
NPEPAVYQLKDPRSQDSTLCLFTDFDSQINVPKTMESGTFITDKCVLDMKAMDSKSNGAIAWSNQTSFTCQDIFKETNATYPSSDVPCDATLTEKSFETDMNLNFQNLSVMGLRILLLKVAGFNLLMTLRLWSS

SEQ ID NO: 21964 - protein, 133 aa, synthetic construct
PEPAVYQLKDPRSQDSTLCLFTDFDSQINVPKTMESGTFITDKCVLDMKAMDSKSNGAIAWSNQTSFTCQDIFKETNATYPSSDVPCDATLTEKSFETDMNLNFQNLSVMGLRILLLKVAGFNLLMTLRLWSS

SEQ ID NO: 21965 - protein, 132 aa, synthetic construct
EPAVYQLKDPRSQDSTLCLFTDFDSQINVPKTMESGTFITDKCVLDMKAMDSKSNGAIAWSNQTSFTCQDIFKETNATYPSSDVPCDATLTEKSFETDMNLNFQNLSVMGLRILLLKVAGFNLLMTLRLWSS

SEQ ID NO: 21966 - protein, 131 aa, synthetic construct
PAVYQLKDPRSQDSTLCLFTDFDSQINVPKTMESGTFITDKCVLDMKAMDSKSNGAIAWSNQTSFTCQDIFKETNATYPSSDVPCDATLTEKSFETDMNLNFQNLSVMGLRILLLKVAGFNLLMTLRLWSS

SEQ ID NO: 21967 - protein, 130 aa, synthetic construct
AVYQLKDPRSQDSTLCLFTDFDSQINVPKTMESGTFITDKCVLDMKAMDSKSNGAIAWSNQTSFTCQDIFKETNATYPSSDVPCDATLTEKSFETDMNLNFQNLSVMGLRILLLKVAGFNLLMTLRLWSS

SEQ ID NO: 21968 - protein, 129 aa, synthetic construct
VYQLKDPRSQDSTLCLFTDFDSQINVPKTMESGTFITDKCVLDMKAMDSKSNGAIAWSNQTSFTCQDIFKETNATYPSSDVPCDATLTEKSFETDMNLNFQNLSVMGLRILLLKVAGFNLLMTLRLWSS

SEQ ID NO: 21969 - protein, 128 aa, synthetic construct
YQLKDPRSQDSTLCLFTDFDSQINVPKTMESGTFITDKCVLDMKAMDSKSNGAIAWSNQTSFTCQDIFKETNATYPSSDVPCDATLTEKSFETDMNLNFQNLSVMGLRILLLKVAGFNLLMTLRLWSS

SEQ ID NO: 21970 - protein, 127 aa, synthetic construct
QLKDPRSQDSTLCLFTDFDSQINVPKTMESGTFITDKCVLDMKAMDSKSNGAIAWSNQTSFTCQDIFKETNATYPSSDVPCDATLTEKSFETDMNLNFQNLSVMGLRILLLKVAGFNLLMTLRLWSS

SEQ ID NO: 21971 - protein, 126 aa, synthetic construct
LKDPRSQDSTLCLFTDFDSQINVPKTMESGTFITDKCVLDMKAMDSKSNGAIAWSNQTSFTCQDIFKETNATYPSSDVPCDATLTEKSFETDMNLNFQNLSVMGLRILLLKVAGFNLLMTLRLWSS

SEQ ID NO: 21972 - protein, 121 aa, synthetic construct
SQDSTLCLFTDFDSQINVPKTMESGTFITDKCVLDMKAMDSKSNGAIAWSNQTSFTCQDIFKETNATYPSSDVPCDATLTEKSFETDMNLNFQNLSVMGLRILLLKVAGFNLLMTLRLWSS

SEQ ID NO: 21973 - protein, 116 aa, synthetic construct
LCLFTDFDSQINVPKTMESGTFITDKCVLDMKAMDSKSNGAIAWSNQTSFTCQDIFKETNATYPSSDVPCDATLTEKSFETDMNLNFQNLSVMGLRILLLKVAGFNLLMTLRLWSS

SEQ ID NO: 21974 - protein, 136 aa, synthetic construct
IQNPEPAVYQLKDPRSQDSTLCLFTDFDSQINVPKTMESGTFITDKCVLDMKAMDSKSNGAIAWSNQTSFTCQDIFKETNATYPSSDVPCDATLTEKSFETDMNLNFQNLLVVGLRILLLKVAGFNLLMTLRLWSS

SEQ ID NO: 21975 - protein, 135 aa, synthetic construct
QNPEPAVYQLKDPRSQDSTLCLFTDFDSQINVPKTMESGTFITDKCVLDMKAMDSKSNGAIAWSNQTSFTCQDIFKETNATYPSSDVPCDATLTEKSFETDMNLNFQNLLVVGLRILLLKVAGFNLLMTLRLWSS

SEQ ID NO: 21976 - protein, 134 aa, synthetic construct
NPEPAVYQLKDPRSQDSTLCLFTDFDSQINVPKTMESGTFITDKCVLDMKAMDSKSNGAIAWSNQTSFTCQDIFKETNATYPSSDVPCDATLTEKSFETDMNLNFQNLLVVGLRILLLKVAGFNLLMTLRLWSS

SEQ ID NO: 21977 - protein, 133 aa, synthetic construct
PEPAVYQLKDPRSQDSTLCLFTDFDSQINVPKTMESGTFITDKCVLDMKAMDSKSNGAIAWSNQTSFTCQDIFKETNATYPSSDVPCDATLTEKSFETDMNLNFQNLLVVGLRILLLKVAGFNLLMTLRLWSS

SEQ ID NO: 21978 - protein, 132 aa, synthetic construct
EPAVYQLKDPRSQDSTLCLFTDFDSQINVPKTMESGTFITDKCVLDMKAMDSKSNGAIAWSNQTSFTCQDIFKETNATYPSSDVPCDATLTEKSFETDMNLNFQNLLVVGLRILLLKVAGFNLLMTLRLWSS

SEQ ID NO: 21979 - protein, 131 aa, synthetic construct
PAVYQLKDPRSQDSTLCLFTDFDSQINVPKTMESGTFITDKCVLDMKAMDSKSNGAIAWSNQTSFTCQDIFKETNATYPSSDVPCDATLTEKSFETDMNLNFQNLLVVGLRILLLKVAGFNLLMTLRLWSS

SEQ ID NO: 21980 - protein, 130 aa, synthetic construct
AVYQLKDPRSQDSTLCLFTDFDSQINVPKTMESGTFITDKCVLDMKAMDSKSNGAIAWSNQTSFTCQDIFKETNATYPSSDVPCDATLTEKSFETDMNLNFQNLLVVGLRILLLKVAGFNLLMTLRLWSS

SEQ ID NO: 21981 - protein, 129 aa, synthetic construct
VYQLKDPRSQDSTLCLFTDFDSQINVPKTMESGTFITDKCVLDMKAMDSKSNGAIAWSNQTSFTCQDIFKETNATYPSSDVPCDATLTEKSFETDMNLNFQNLLVVGLRILLLKVAGFNLLMTLRLWSS

SEQ ID NO: 21982 - protein, 128 aa, synthetic construct
YQLKDPRSQDSTLCLFTDFDSQINVPKTMESGTFITDKCVLDMKAMDSKSNGAIAWSNQTSFTCQDIFKETNATYPSSDVPCDATLTEKSFETDMNLNFQNLLVVGLRILLLKVAGFNLLMTLRLWSS

SEQ ID NO: 21983 - protein, 127 aa, synthetic construct
QLKDPRSQDSTLCLFTDFDSQINVPKTMESGTFITDKCVLDMKAMDSKSNGAIAWSNQTSFTCQDIFKETNATYPSSDVPCDATLTEKSFETDMNLNFQNLLVVGLRILLLKVAGFNLLMTLRLWSS

SEQ ID NO: 21984 - protein, 126 aa, synthetic construct
LKDPRSQDSTLCLFTDFDSQINVPKTMESGTFITDKCVLDMKAMDSKSNGAIAWSNQTSFTCQDIFKETNATYPSSDVPCDATLTEKSFETDMNLNFQNLLVVGLRILLLKVAGFNLLMTLRLWSS

SEQ ID NO: 21985 - protein, 121 aa, synthetic construct
SQDSTLCLFTDFDSQINVPKTMESGTFITDKCVLDMKAMDSKSNGAIAWSNQTSFTCQDIFKETNATYPSSDVPCDATLTEKSFETDMNLNFQNLLVVGLRILLLKVAGFNLLMTLRLWSS

SEQ ID NO: 21986 - protein, 116 aa, synthetic construct
LCLFTDFDSQINVPKTMESGTFITDKCVLDMKAMDSKSNGAIAWSNQTSFTCQDIFKETNATYPSSDVPCDATLTEKSFETDMNLNFQNLLVVGLRILLLKVAGFNLLMTLRLWSS

SEQ ID NO: 21987 - protein, 171 aa, synthetic construct
EDLRNVTPPKVSLFEPSKAEIANKQKATLVCLARGFFPDHVELSWWVNGKEVHSGVCTDPQAYKESNYSYCLSSRLRVSATFWHNPRNHFRCQVQFHGLSEEDKWPEGSPKPVTQNISAEAWGRACGITSSYQQGVLSATILYEILLGKATLYAVLVSTLVVMAMVKRKNS

SEQ ID NO: 21988 - protein, 170 aa, synthetic construct
DLRNVTPPKVSLFEPSKAEIANKQKATLVCLARGFFPDHVELSWWVNGKEVHSGVCTDPQAYKESNYSYCLSSRLRVSATFWHNPRNHFRCQVQFHGLSEEDKWPEGSPKPVTQNISAEAWGRACGITSSYQQGVLSATILYEILLGKATLYAVLVSTLVVMAMVKRKNS

SEQ ID NO: 21989 - protein, 168 aa, synthetic construct
RNVTPPKVSLFEPSKAEIANKQKATLVCLARGFFPDHVELSWWVNGKEVHSGVCTDPQAYKESNYSYCLSSRLRVSATFWHNPRNHFRCQVQFHGLSEEDKWPEGSPKPVTQNISAEAWGRACGITSSYQQGVLSATILYEILLGKATLYAVLVSTLVVMAMVKRKNS

SEQ ID NO: 21990 - protein, 167 aa, synthetic construct
NVTPPKVSLFEPSKAEIANKQKATLVCLARGFFPDHVELSWWVNGKEVHSGVCTDPQAYKESNYSYCLSSRLRVSATFWHNPRNHFRCQVQFHGLSEEDKWPEGSPKPVTQNISAEAWGRACGITSSYQQGVLSATILYEILLGKATLYAVLVSTLVVMAMVKRKNS

SEQ ID NO: 21991 - protein, 166 aa, synthetic construct
VTPPKVSLFEPSKAEIANKQKATLVCLARGFFPDHVELSWWVNGKEVHSGVCTDPQAYKESNYSYCLSSRLRVSATFWHNPRNHFRCQVQFHGLSEEDKWPEGSPKPVTQNISAEAWGRACGITSSYQQGVLSATILYEILLGKATLYAVLVSTLVVMAMVKRKNS

SEQ ID NO: 21992 - protein, 165 aa, synthetic construct
TPPKVSLFEPSKAEIANKQKATLVCLARGFFPDHVELSWWVNGKEVHSGVCTDPQAYKESNYSYCLSSRLRVSATFWHNPRNHFRCQVQFHGLSEEDKWPEGSPKPVTQNISAEAWGRACGITSSYQQGVLSATILYEILLGKATLYAVLVSTLVVMAMVKRKNS

SEQ ID NO: 21993 - protein, 164 aa, synthetic construct
PPKVSLFEPSKAEIANKQKATLVCLARGFFPDHVELSWWVNGKEVHSGVCTDPQAYKESNYSYCLSSRLRVSATFWHNPRNHFRCQVQFHGLSEEDKWPEGSPKPVTQNISAEAWGRACGITSSYQQGVLSATILYEILLGKATLYAVLVSTLVVMAMVKRKNS

SEQ ID NO: 21994 - protein, 163 aa, synthetic construct
PKVSLFEPSKAEIANKQKATLVCLARGFFPDHVELSWWVNGKEVHSGVCTDPQAYKESNYSYCLSSRLRVSATFWHNPRNHFRCQVQFHGLSEEDKWPEGSPKPVTQNISAEAWGRACGITSSYQQGVLSATILYEILLGKATLYAVLVSTLVVMAMVKRKNS

SEQ ID NO: 21995 - protein, 162 aa, synthetic construct
KVSLFEPSKAEIANKQKATLVCLARGFFPDHVELSWWVNGKEVHSGVCTDPQAYKESNYSYCLSSRLRVSATFWHNPRNHFRCQVQFHGLSEEDKWPEGSPKPVTQNISAEAWGRACGITSSYQQGVLSATILYEILLGKATLYAVLVSTLVVMAMVKRKNS

SEQ ID NO: 21996 - protein, 161 aa, synthetic construct
VSLFEPSKAEIANKQKATLVCLARGFFPDHVELSWWVNGKEVHSGVCTDPQAYKESNYSYCLSSRLRVSATFWHNPRNHFRCQVQFHGLSEEDKWPEGSPKPVTQNISAEAWGRACGITSSYQQGVLSATILYEILLGKATLYAVLVSTLVVMAMVKRKNS

SEQ ID NO: 21997 - protein, 171 aa, synthetic construct; identical to SEQ ID NO: 21987

SEQ ID NO: 21998 - protein, 166 aa, synthetic construct; identical to SEQ ID NO: 21991

SEQ ID NO: 21999 - protein, 161 aa, synthetic construct; identical to SEQ ID NO: 21996

SEQ ID NO: 22000 - protein, 140 aa, synthetic construct
IQNPDPAVYQLRDSKSSDKSVCLFTDFDSQTNVSQSKDSDVYITDKCVLDMRSMDFKSNSAVAWSNKSDFACANAFNNSIIPEDTFFPSPESSCDVKLVEKSFETDTNLNFQNLLVIVLRILLLKVAGFNLLMTLRLWSS

SEQ ID NO: 22001 - protein, 139 aa, synthetic construct
QNPDPAVYQLRDSKSSDKSVCLFTDFDSQTNVSQSKDSDVYITDKCVLDMRSMDFKSNSAVAWSNKSDFACANAFNNSIIPEDTFFPSPESSCDVKLVEKSFETDTNLNFQNLLVIVLRILLLKVAGFNLLMTLRLWSS

SEQ ID NO: 22002 - protein, 138 aa, synthetic construct
NPDPAVYQLRDSKSSDKSVCLFTDFDSQTNVSQSKDSDVYITDKCVLDMRSMDFKSNSAVAWSNKSDFACANAFNNSIIPEDTFFPSPESSCDVKLVEKSFETDTNLNFQNLLVIVLRILLLKVAGFNLLMTLRLWSS

SEQ ID NO: 22003 - protein, 137 aa, synthetic construct
PDPAVYQLRDSKSSDKSVCLFTDFDSQTNVSQSKDSDVYITDKCVLDMRSMDFKSNSAVAWSNKSDFACANAFNNSIIPEDTFFPSPESSCDVKLVEKSFETDTNLNFQNLLVIVLRILLLKVAGFNLLMTLRLWSS

SEQ ID NO: 22004 - protein, 136 aa, synthetic construct
DPAVYQLRDSKSSDKSVCLFTDFDSQTNVSQSKDSDVYITDKCVLDMRSMDFKSNSAVAWSNKSDFACANAFNNSIIPEDTFFPSPESSCDVKLVEKSFETDTNLNFQNLLVIVLRILLLKVAGFNLLMTLRLWSS

SEQ ID NO: 22005 - protein, 135 aa, synthetic construct
PAVYQLRDSKSSDKSVCLFTDFDSQTNVSQSKDSDVYITDKCVLDMRSMDFKSNSAVAWSNKSDFACANAFNNSIIPEDTFFPSPESSCDVKLVEKSFETDTNLNFQNLLVIVLRILLLKVAGFNLLMTLRLWSS

SEQ ID NO: 22006 - protein, 134 aa, synthetic construct
AVYQLRDSKSSDKSVCLFTDFDSQTNVSQSKDSDVYITDKCVLDMRSMDFKSNSAVAWSNKSDFACANAFNNSIIPEDTFFPSPESSCDVKLVEKSFETDTNLNFQNLLVIVLRILLLKVAGFNLLMTLRLWSS

SEQ ID NO: 22007 - protein, 133 aa, synthetic construct
VYQLRDSKSSDKSVCLFTDFDSQTNVSQSKDSDVYITDKCVLDMRSMDFKSNSAVAWSNKSDFACANAFNNSIIPEDTFFPSPESSCDVKLVEKSFETDTNLNFQNLLVIVLRILLLKVAGFNLLMTLRLWSS

SEQ ID NO: 22008 - protein, 132 aa, synthetic construct
YQLRDSKSSDKSVCLFTDFDSQTNVSQSKDSDVYITDKCVLDMRSMDFKSNSAVAWSNKSDFACANAFNNSIIPEDTFFPSPESSCDVKLVEKSFETDTNLNFQNLLVIVLRILLLKVAGFNLLMTLRLWSS

SEQ ID NO: 22009 - protein, 131 aa, synthetic construct
QLRDSKSSDKSVCLFTDFDSQTNVSQSKDSDVYITDKCVLDMRSMDFKSNSAVAWSNKSDFACANAFNNSIIPEDTFFPSPESSCDVKLVEKSFETDTNLNFQNLLVIVLRILLLKVAGFNLLMTLRLWSS

SEQ ID NO: 22010 - protein, 130 aa, synthetic construct
LRDSKSSDKSVCLFTDFDSQTNVSQSKDSDVYITDKCVLDMRSMDFKSNSAVAWSNKSDFACANAFNNSIIPEDTFFPSPESSCDVKLVEKSFETDTNLNFQNLLVIVLRILLLKVAGFNLLMTLRLWSS

SEQ ID NO: 22011 - protein, 129 aa, synthetic construct
RDSKSSDKSVCLFTDFDSQTNVSQSKDSDVYITDKCVLDMRSMDFKSNSAVAWSNKSDFACANAFNNSIIPEDTFFPSPESSCDVKLVEKSFETDTNLNFQNLLVIVLRILLLKVAGFNLLMTLRLWSS

SEQ ID NO: 22012 - protein, 128 aa, synthetic construct
DSKSSDKSVCLFTDFDSQTNVSQSKDSDVYITDKCVLDMRSMDFKSNSAVAWSNKSDFACANAFNNSIIPEDTFFPSPESSCDVKLVEKSFETDTNLNFQNLLVIVLRILLLKVAGFNLLMTLRLWSS

SEQ ID NO: 22013 - protein, 127 aa, synthetic construct
SKSSDKSVCLFTDFDSQTNVSQSKDSDVYITDKCVLDMRSMDFKSNSAVAWSNKSDFACANAFNNSIIPEDTFFPSPESSCDVKLVEKSFETDTNLNFQNLLVIVLRILLLKVAGFNLLMTLRLWSS

SEQ ID NO: 22014 - protein, 126 aa, synthetic construct
KSSDKSVCLFTDFDSQTNVSQSKDSDVYITDKCVLDMRSMDFKSNSAVAWSNKSDFACANAFNNSIIPEDTFFPSPESSCDVKLVEKSFETDTNLNFQNLLVIVLRILLLKVAGFNLLMTLRLWSS

SEQ ID NO: 22015 - protein, 125 aa, synthetic construct
SSDKSVCLFTDFDSQTNVSQSKDSDVYITDKCVLDMRSMDFKSNSAVAWSNKSDFACANAFNNSIIPEDTFFPSPESSCDVKLVEKSFETDTNLNFQNLLVIVLRILLLKVAGFNLLMTLRLWSS

SEQ ID NO: 22016 - protein, 124 aa, synthetic construct
SDKSVCLFTDFDSQTNVSQSKDSDVYITDKCVLDMRSMDFKSNSAVAWSNKSDFACANAFNNSIIPEDTFFPSPESSCDVKLVEKSFETDTNLNFQNLLVIVLRILLLKVAGFNLLMTLRLWSS

SEQ ID NO: 22017 - protein, 123 aa, synthetic construct
DKSVCLFTDFDSQTNVSQSKDSDVYITDKCVLDMRSMDFKSNSAVAWSNKSDFACANAFNNSIIPEDTFFPSPESSCDVKLVEKSFETDTNLNFQNLLVIVLRILLLKVAGFNLLMTLRLWSS

SEQ ID NO: 22018 - protein, 122 aa, synthetic construct
KSVCLFTDFDSQTNVSQSKDSDVYITDKCVLDMRSMDFKSNSAVAWSNKSDFACANAFNNSIIPEDTFFPSPESSCDVKLVEKSFETDTNLNFQNLLVIVLRILLLKVAGFNLLMTLRLWSS

SEQ ID NO: 22019 - protein, 121 aa, synthetic construct
SVCLFTDFDSQTNVSQSKDSDVYITDKCVLDMRSMDFKSNSAVAWSNKSDFACANAFNNSIIPEDTFFPSPESSCDVKLVEKSFETDTNLNFQNLLVIVLRILLLKVAGFNLLMTLRLWSS

SEQ ID NO: 22020 - protein, 120 aa, synthetic construct
VCLFTDFDSQTNVSQSKDSDVYITDKCVLDMRSMDFKSNSAVAWSNKSDFACANAFNNSIIPEDTFFPSPESSCDVKLVEKSFETDTNLNFQNLLVIVLRILLLKVAGFNLLMTLRLWSS

SEQ ID NO: 22021 - protein, 119 aa, synthetic construct
CLFTDFDSQTNVSQSKDSDVYITDKCVLDMRSMDFKSNSAVAWSNKSDFACANAFNNSIIPEDTFFPSPESSCDVKLVEKSFETDTNLNFQNLLVIVLRILLLKVAGFNLLMTLRLWSS

SEQ ID NO: 22022 - protein, 118 aa, synthetic construct
LFTDFDSQTNVSQSKDSDVYITDKCVLDMRSMDFKSNSAVAWSNKSDFACANAFNNSIIPEDTFFPSPESSCDVKLVEKSFETDTNLNFQNLLVIVLRILLLKVAGFNLLMTLRLWSS

SEQ ID NO: 22023 - protein, 117 aa, synthetic construct
FTDFDSQTNVSQSKDSDVYITDKCVLDMRSMDFKSNSAVAWSNKSDFACANAFNNSIIPEDTFFPSPESSCDVKLVEKSFETDTNLNFQNLLVIVLRILLLKVAGFNLLMTLRLWSS

SEQ ID NO: 22024 - protein, 116 aa, synthetic construct
TDFDSQTNVSQSKDSDVYITDKCVLDMRSMDFKSNSAVAWSNKSDFACANAFNNSIIPEDTFFPSPESSCDVKLVEKSFETDTNLNFQNLLVIVLRILLLKVAGFNLLMTLRLWSS

SEQ ID NO: 22025 - protein, 115 aa, synthetic construct
DFDSQTNVSQSKDSDVYITDKCVLDMRSMDFKSNSAVAWSNKSDFACANAFNNSIIPEDTFFPSPESSCDVKLVEKSFETDTNLNFQNLLVIVLRILLLKVAGFNLLMTLRLWSS

SEQ ID NO: 22026 - protein, 114 aa, synthetic construct
FDSQTNVSQSKDSDVYITDKCVLDMRSMDFKSNSAVAWSNKSDFACANAFNNSIIPEDTFFPSPESSCDVKLVEKSFETDTNLNFQNLLVIVLRILLLKVAGFNLLMTLRLWSS

SEQ ID NO: 22027 - protein, 113 aa, synthetic construct
DSQTNVSQSKDSDVYITDKCVLDMRSMDFKSNSAVAWSNKSDFACANAFNNSIIPEDTFFPSPESSCDVKLVEKSFETDTNLNFQNLLVIVLRILLLKVAGFNLLMTLRLWSS

SEQ ID NO: 22028 - protein, 112 aa, synthetic construct
SQTNVSQSKDSDVYITDKCVLDMRSMDFKSNSAVAWSNKSDFACANAFNNSIIPEDTFFPSPESSCDVKLVEKSFETDTNLNFQNLLVIVLRILLLKVAGFNLLMTLRLWSS

SEQ ID NO: 22029 - protein, 111 aa, synthetic construct
QTNVSQSKDSDVYITDKCVLDMRSMDFKSNSAVAWSNKSDFACANAFNNSIIPEDTFFPSPESSCDVKLVEKSFETDTNLNFQNLLVIVLRILLLKVAGFNLLMTLRLWSS

SEQ ID NO: 22030 - protein, 110 aa, synthetic construct
TNVSQSKDSDVYITDKCVLDMRSMDFKSNSAVAWSNKSDFACANAFNNSIIPEDTFFPSPESSCDVKLVEKSFETDTNLNFQNLLVIVLRILLLKVAGFNLLMTLRLWSS

SEQ ID NO: 22031 - protein, 109 aa, synthetic construct
NVSQSKDSDVYITDKCVLDMRSMDFKSNSAVAWSNKSDFACANAFNNSIIPEDTFFPSPESSCDVKLVEKSFETDTNLNFQNLLVIVLRILLLKVAGFNLLMTLRLWSS

SEQ ID NO: 22032 - protein, 108 aa, synthetic construct
VSQSKDSDVYITDKCVLDMRSMDFKSNSAVAWSNKSDFACANAFNNSIIPEDTFFPSPESSCDVKLVEKSFETDTNLNFQNLLVIVLRILLLKVAGFNLLMTLRLWSS

SEQ ID NO: 22033 - protein, 107 aa, synthetic construct
SQSKDSDVYITDKCVLDMRSMDFKSNSAVAWSNKSDFACANAFNNSIIPEDTFFPSPESSCDVKLVEKSFETDTNLNFQNLLVIVLRILLLKVAGFNLLMTLRLWSS

SEQ ID NO: 22034 - protein, 106 aa, synthetic construct
QSKDSDVYITDKCVLDMRSMDFKSNSAVAWSNKSDFACANAFNNSIIPEDTFFPSPESSCDVKLVEKSFETDTNLNFQNLLVIVLRILLLKVAGFNLLMTLRLWSS

SEQ ID NO: 22035 - protein, 105 aa, synthetic construct
SKDSDVYITDKCVLDMRSMDFKSNSAVAWSNKSDFACANAFNNSIIPEDTFFPSPESSCDVKLVEKSFETDTNLNFQNLLVIVLRILLLKVAGFNLLMTLRLWSS

SEQ ID NO: 22036 - protein, 104 aa, synthetic construct
KDSDVYITDKCVLDMRSMDFKSNSAVAWSNKSDFACANAFNNSIIPEDTFFPSPESSCDVKLVEKSFETDTNLNFQNLLVIVLRILLLKVAGFNLLMTLRLWSS

SEQ ID NO: 22037 - protein, 103 aa, synthetic construct
DSDVYITDKCVLDMRSMDFKSNSAVAWSNKSDFACANAFNNSIIPEDTFFPSPESSCDVKLVEKSFETDTNLNFQNLLVIVLRILLLKVAGFNLLMTLRLWSS

SEQ ID NO: 22038 - protein, 102 aa, synthetic construct
SDVYITDKCVLDMRSMDFKSNSAVAWSNKSDFACANAFNNSIIPEDTFFPSPESSCDVKLVEKSFETDTNLNFQNLLVIVLRILLLKVAGFNLLMTLRLWSS

SEQ ID NO: 22039 - protein, 101 aa, synthetic construct
DVYITDKCVLDMRSMDFKSNSAVAWSNKSDFACANAFNNSIIPEDTFFPSPESSCDVKLVEKSFETDTNLNFQNLLVIVLRILLLKVAGFNLLMTLRLWSS

SEQ ID NO: 22040 - protein, 100 aa, synthetic construct
VYITDKCVLDMRSMDFKSNSAVAWSNKSDFACANAFNNSIIPEDTFFPSPESSCDVKLVEKSFETDTNLNFQNLLVIVLRILLLKVAGFNLLMTLRLWSS

SEQ ID NO: 22041 - protein, 99 aa, synthetic construct
YITDKCVLDMRSMDFKSNSAVAWSNKSDFACANAFNNSIIPEDTFFPSPESSCDVKLVEKSFETDTNLNFQNLLVIVLRILLLKVAGFNLLMTLRLWSS

SEQ ID NO: 22042 - protein, 98 aa, synthetic construct
ITDKCVLDMRSMDFKSNSAVAWSNKSDFACANAFNNSIIPEDTFFPSPESSCDVKLVEKSFETDTNLNFQNLLVIVLRILLLKVAGFNLLMTLRLWSS

SEQ ID NO: 22043 - protein, 97 aa, synthetic construct
TDKCVLDMRSMDFKSNSAVAWSNKSDFACANAFNNSIIPEDTFFPSPESSCDVKLVEKSFETDTNLNFQNLLVIVLRILLLKVAGFNLLMTLRLWSS

SEQ ID NO: 22044 - protein, 96 aa, synthetic construct
DKCVLDMRSMDFKSNSAVAWSNKSDFACANAFNNSIIPEDTFFPSPESSCDVKLVEKSFETDTNLNFQNLLVIVLRILLLKVAGFNLLMTLRLWSS

SEQ ID NO: 22045 - protein, 94 aa, synthetic construct
CVLDMRSMDFKSNSAVAWSNKSDFACANAFNNSIIPEDTFFPSPESSCDVKLVEKSFETDTNLNFQNLLVIVLRILLLKVAGFNLLMTLRLWSS

SEQ ID NO: 22046 - protein, 93 aa, synthetic construct
VLDMRSMDFKSNSAVAWSNKSDFACANAFNNSIIPEDTFFPSPESSCDVKLVEKSFETDTNLNFQNLLVIVLRILLLKVAGFNLLMTLRLWSS

SEQ ID NO: 22047 - protein, 92 aa, synthetic construct
LDMRSMDFKSNSAVAWSNKSDFACANAFNNSIIPEDTFFPSPESSCDVKLVEKSFETDTNLNFQNLLVIVLRILLLKVAGFNLLMTLRLWSS

SEQ ID NO: 22048 - protein, 91 aa, synthetic construct
DMRSMDFKSNSAVAWSNKSDFACANAFNNSIIPEDTFFPSPESSCDVKLVEKSFETDTNLNFQNLLVIVLRILLLKVAGFNLLMTLRLWSS

SEQ ID NO: 22049 - protein, 90 aa, synthetic construct
MRSMDFKSNSAVAWSNKSDFACANAFNNSIIPEDTFFPSPESSCDVKLVEKSFETDTNLNFQNLLVIVLRILLLKVAGFNLLMTLRLWSS

SEQ ID NO: 22050 - protein, 89 aa, synthetic construct
RSMDFKSNSAVAWSNKSDFACANAFNNSIIPEDTFFPSPESSCDVKLVEKSFETDTNLNFQNLLVIVLRILLLKVAGFNLLMTLRLWSS

SEQ ID NO: 22051 - protein, 88 aa, synthetic construct
SMDFKSNSAVAWSNKSDFACANAFNNSIIPEDTFFPSPESSCDVKLVEKSFETDTNLNFQNLLVIVLRILLLKVAGFNLLMTLRLWSS

SEQ ID NO: 22052 - protein, 87 aa, synthetic construct
MDFKSNSAVAWSNKSDFACANAFNNSIIPEDTFFPSPESSCDVKLVEKSFETDTNLNFQNLLVIVLRILLLKVAGFNLLMTLRLWSS

SEQ ID NO: 22053 - protein, 86 aa, synthetic construct
DFKSNSAVAWSNKSDFACANAFNNSIIPEDTFFPSPESSCDVKLVEKSFETDTNLNFQNLLVIVLRILLLKVAGFNLLMTLRLWSS

SEQ ID NO: 22054 - protein, 85 aa, synthetic construct
FKSNSAVAWSNKSDFACANAFNNSIIPEDTFFPSPESSCDVKLVEKSFETDTNLNFQNLLVIVLRILLLKVAGFNLLMTLRLWSS

SEQ ID NO: 22055 - protein, 84 aa, synthetic construct
KSNSAVAWSNKSDFACANAFNNSIIPEDTFFPSPESSCDVKLVEKSFETDTNLNFQNLLVIVLRILLLKVAGFNLLMTLRLWSS

SEQ ID NO: 22056 - protein, 83 aa, synthetic construct
SNSAVAWSNKSDFACANAFNNSIIPEDTFFPSPESSCDVKLVEKSFETDTNLNFQNLLVIVLRILLLKVAGFNLLMTLRLWSS

SEQ ID NO: 22057 - protein, 82 aa, synthetic construct
NSAVAWSNKSDFACANAFNNSIIPEDTFFPSPESSCDVKLVEKSFETDTNLNFQNLLVIVLRILLLKVAGFNLLMTLRLWSS

SEQ ID NO: 22058 - protein, 81 aa, synthetic construct
SAVAWSNKSDFACANAFNNSIIPEDTFFPSPESSCDVKLVEKSFETDTNLNFQNLLVIVLRILLLKVAGFNLLMTLRLWSS

SEQ ID NO: 22059 - protein, 80 aa, synthetic construct
AVAWSNKSDFACANAFNNSIIPEDTFFPSPESSCDVKLVEKSFETDTNLNFQNLLVIVLRILLLKVAGFNLLMTLRLWSS

SEQ ID NO: 22060 - protein, 79 aa, synthetic construct
VAWSNKSDFACANAFNNSIIPEDTFFPSPESSCDVKLVEKSFETDTNLNFQNLLVIVLRILLLKVAGFNLLMTLRLWSS

SEQ ID NO: 22061 - protein, 78 aa, synthetic construct
AWSNKSDFACANAFNNSIIPEDTFFPSPESSCDVKLVEKSFETDTNLNFQNLLVIVLRILLLKVAGFNLLMTLRLWSS

SEQ ID NO: 22062 - protein, 77 aa, synthetic construct
WSNKSDFACANAFNNSIIPEDTFFPSPESSCDVKLVEKSFETDTNLNFQNLLVIVLRILLLKVAGFNLLMTLRLWSS

SEQ ID NO: 22063 - protein, 76 aa, synthetic construct
SNKSDFACANAFNNSIIPEDTFFPSPESSCDVKLVEKSFETDTNLNFQNLLVIVLRILLLKVAGFNLLMTLRLWSS

SEQ ID NO: 22064 - protein, 75 aa, synthetic construct
NKSDFACANAFNNSIIPEDTFFPSPESSCDVKLVEKSFETDTNLNFQNLLVIVLRILLLKVAGFNLLMTLRLWSS

SEQ ID NO: 22065 - protein, 74 aa, synthetic construct
KSDFACANAFNNSIIPEDTFFPSPESSCDVKLVEKSFETDTNLNFQNLLVIVLRILLLKVAGFNLLMTLRLWSS

SEQ ID NO: 22066 - protein, 73 aa, synthetic construct
SDFACANAFNNSIIPEDTFFPSPESSCDVKLVEKSFETDTNLNFQNLLVIVLRILLLKVAGFNLLMTLRLWSS

SEQ ID NO: 22067 - protein, 72 aa, synthetic construct
DFACANAFNNSIIPEDTFFPSPESSCDVKLVEKSFETDTNLNFQNLLVIVLRILLLKVAGFNLLMTLRLWSS

SEQ ID NO: 22068 - protein, 71 aa, synthetic construct
FACANAFNNSIIPEDTFFPSPESSCDVKLVEKSFETDTNLNFQNLLVIVLRILLLKVAGFNLLMTLRLWSS

SEQ ID NO: 22069 - protein, 70 aa, synthetic construct
ACANAFNNSIIPEDTFFPSPESSCDVKLVEKSFETDTNLNFQNLLVIVLRILLLKVAGFNLLMTLRLWSS

SEQ ID NO: 22070 - protein, 69 aa, synthetic construct
CANAFNNSIIPEDTFFPSPESSCDVKLVEKSFETDTNLNFQNLLVIVLRILLLKVAGFNLLMTLRLWSS

SEQ ID NO: 22071 - protein, 68 aa, synthetic construct
ANAFNNSIIPEDTFFPSPESSCDVKLVEKSFETDTNLNFQNLLVIVLRILLLKVAGFNLLMTLRLWSS

SEQ ID NO: 22072 - protein, 67 aa, synthetic construct
NAFNNSIIPEDTFFPSPESSCDVKLVEKSFETDTNLNFQNLLVIVLRILLLKVAGFNLLMTLRLWSS

SEQ ID NO: 22073 - protein, 66 aa, synthetic construct
AFNNSIIPEDTFFPSPESSCDVKLVEKSFETDTNLNFQNLLVIVLRILLLKVAGFNLLMTLRLWSS

SEQ ID NO: 22074 - protein, 65 aa, synthetic construct
FNNSIIPEDTFFPSPESSCDVKLVEKSFETDTNLNFQNLLVIVLRILLLKVAGFNLLMTLRLWSS

SEQ ID NO: 22075 - protein, 64 aa, synthetic construct
NNSIIPEDTFFPSPESSCDVKLVEKSFETDTNLNFQNLLVIVLRILLLKVAGFNLLMTLRLWSS

SEQ ID NO: 22076 - protein, 63 aa, synthetic construct
NSIIPEDTFFPSPESSCDVKLVEKSFETDTNLNFQNLLVIVLRILLLKVAGFNLLMTLRLWSS

SEQ ID NO: 22077 - protein, 62 aa, synthetic construct
SIIPEDTFFPSPESSCDVKLVEKSFETDTNLNFQNLLVIVLRILLLKVAGFNLLMTLRLWSS

SEQ ID NO: 22078 - protein, 61 aa, synthetic construct
IIPEDTFFPSPESSCDVKLVEKSFETDTNLNFQNLLVIVLRILLLKVAGFNLLMTLRLWSS

SEQ ID NO: 22079 - protein, 60 aa, synthetic construct
IPEDTFFPSPESSCDVKLVEKSFETDTNLNFQNLLVIVLRILLLKVAGFNLLMTLRLWSS

SEQ ID NO: 22080 - protein, 59 aa, synthetic construct
PEDTFFPSPESSCDVKLVEKSFETDTNLNFQNLLVIVLRILLLKVAGFNLLMTLRLWSS

SEQ ID NO: 22081 - protein, 58 aa, synthetic construct
EDTFFPSPESSCDVKLVEKSFETDTNLNFQNLLVIVLRILLLKVAGFNLLMTLRLWSS

SEQ ID NO: 22082 - protein, 57 aa, synthetic construct
DTFFPSPESSCDVKLVEKSFETDTNLNFQNLLVIVLRILLLKVAGFNLLMTLRLWSS

SEQ ID NO: 22083 - protein, 56 aa, synthetic construct
TFFPSPESSCDVKLVEKSFETDTNLNFQNLLVIVLRILLLKVAGFNLLMTLRLWSS

SEQ ID NO: 22084 - protein, 55 aa, synthetic construct
FFPSPESSCDVKLVEKSFETDTNLNFQNLLVIVLRILLLKVAGFNLLMTLRLWSS

SEQ ID NO: 22085 - protein, 54 aa, synthetic construct
FPSPESSCDVKLVEKSFETDTNLNFQNLLVIVLRILLLKVAGFNLLMTLRLWSS

SEQ ID NO: 22086 - protein, 53 aa, synthetic construct
PSPESSCDVKLVEKSFETDTNLNFQNLLVIVLRILLLKVAGFNLLMTLRLWSS

SEQ ID NO: 22087 - protein, 52 aa, synthetic construct
SPESSCDVKLVEKSFETDTNLNFQNLLVIVLRILLLKVAGFNLLMTLRLWSS

SEQ ID NO: 22088 - protein, 51 aa, synthetic construct
PESSCDVKLVEKSFETDTNLNFQNLLVIVLRILLLKVAGFNLLMTLRLWSS

SEQ ID NO: 22089 - protein, 50 aa, synthetic construct
ESSCDVKLVEKSFETDTNLNFQNLLVIVLRILLLKVAGFNLLMTLRLWSS

SEQ ID NO: 22090 - protein, 49 aa, synthetic construct
SSCDVKLVEKSFETDTNLNFQNLLVIVLRILLLKVAGFNLLMTLRLWSS

SEQ ID NO: 22091 - protein, 48 aa, synthetic construct
SCDVKLVEKSFETDTNLNFQNLLVIVLRILLLKVAGFNLLMTLRLWSS

SEQ ID NO: 22092 - protein, 47 aa, synthetic construct
CDVKLVEKSFETDTNLNFQNLLVIVLRILLLKVAGFNLLMTLRLWSS

SEQ ID NO: 22093 - protein, 46 aa, synthetic construct
DVKLVEKSFETDTNLNFQNLLVIVLRILLLKVAGFNLLMTLRLWSS

SEQ ID NO: 22094 - protein, 45 aa, synthetic construct
VKLVEKSFETDTNLNFQNLLVIVLRILLLKVAGFNLLMTLRLWSS

SEQ ID NO: 22095 - protein, 44 aa, synthetic construct
KLVEKSFETDTNLNFQNLLVIVLRILLLKVAGFNLLMTLRLWSS

SEQ ID NO: 22096 - protein, 43 aa, synthetic construct
LVEKSFETDTNLNFQNLLVIVLRILLLKVAGFNLLMTLRLWSS

SEQ ID NO: 22097 - protein, 42 aa, synthetic construct
VEKSFETDTNLNFQNLLVIVLRILLLKVAGFNLLMTLRLWSS

SEQ ID NO: 22098 - protein, 41 aa, synthetic construct
EKSFETDTNLNFQNLLVIVLRILLLKVAGFNLLMTLRLWSS

SEQ ID NO: 22099 - protein, 40 aa, synthetic construct
KSFETDTNLNFQNLLVIVLRILLLKVAGFNLLMTLRLWSS

SEQ ID NO: 22100 - protein, 39 aa, synthetic construct
SFETDTNLNFQNLLVIVLRILLLKVAGFNLLMTLRLWSS

SEQ ID NO: 22101 - protein, 166 aa, synthetic construct
GQPKANPTVTLFPPSSEELQANKATLVCLISDFYPGAVTVAWKADGSPVKAGVETTKPSKQSNNKYAASSYLSLTPEQWKSHRSYSCQVTHEGSTVEKTVAPTECSIPEDTFFPSPESSCDVKLVEKSFETDTNLNFQNLLVIVLRILLLKVAGFNLLMTLRLWSS

SEQ ID NO: 22102 - protein, 165 aa, synthetic construct
QPKANPTVTLFPPSSEELQANKATLVCLISDFYPGAVTVAWKADGSPVKAGVETTKPSKQSNNKYAASSYLSLTPEQWKSHRSYSCQVTHEGSTVEKTVAPTECSIPEDTFFPSPESSCDVKLVEKSFETDTNLNFQNLLVIVLRILLLKVAGFNLLMTLRLWSS

SEQ ID NO: 22103 - protein, 164 aa, synthetic construct
PKANPTVTLFPPSSEELQANKATLVCLISDFYPGAVTVAWKADGSPVKAGVETTKPSKQSNNKYAASSYLSLTPEQWKSHRSYSCQVTHEGSTVEKTVAPTECSIPEDTFFPSPESSCDVKLVEKSFETDTNLNFQNLLVIVLRILLLKVAGFNLLMTLRLWSS

SEQ ID NO: 22104 - protein, 163 aa, synthetic construct
KANPTVTLFPPSSEELQANKATLVCLISDFYPGAVTVAWKADGSPVKAGVETTKPSKQSNNKYAASSYLSLTPEQWKSHRSYSCQVTHEGSTVEKTVAPTECSIPEDTFFPSPESSCDVKLVEKSFETDTNLNFQNLLVIVLRILLLKVAGFNLLMTLRLWSS

SEQ ID NO: 22105 - protein, 162 aa, synthetic construct
ANPTVTLFPPSSEELQANKATLVCLISDFYPGAVTVAWKADGSPVKAGVETTKPSKQSNNKYAASSYLSLTPEQWKSHRSYSCQVTHEGSTVEKTVAPTECSIPEDTFFPSPESSCDVKLVEKSFETDTNLNFQNLLVIVLRILLLKVAGFNLLMTLRLWSS

SEQ ID NO: 22106 - protein, 161 aa, synthetic construct
NPTVTLFPPSSEELQANKATLVCLISDFYPGAVTVAWKADGSPVKAGVETTKPSKQSNNKYAASSYLSLTPEQWKSHRSYSCQVTHEGSTVEKTVAPTECSIPEDTFFPSPESSCDVKLVEKSFETDTNLNFQNLLVIVLRILLLKVAGFNLLMTLRLWSS

SEQ ID NO: 22107 - protein, 160 aa, synthetic construct
PTVTLFPPSSEELQANKATLVCLISDFYPGAVTVAWKADGSPVKAGVETTKPSKQSNNKYAASSYLSLTPEQWKSHRSYSCQVTHEGSTVEKTVAPTECSIPEDTFFPSPESSCDVKLVEKSFETDTNLNFQNLLVIVLRILLLKVAGFNLLMTLRLWSS

SEQ ID NO: 22108 - protein, 159 aa, synthetic construct
TVTLFPPSSEELQANKATLVCLISDFYPGAVTVAWKADGSPVKAGVETTKPSKQSNNKYAASSYLSLTPEQWKSHRSYSCQVTHEGSTVEKTVAPTECSIPEDTFFPSPESSCDVKLVEKSFETDTNLNFQNLLVIVLRILLLKVAGFNLLMTLRLWSS

SEQ ID NO: 22109 - protein, 158 aa, synthetic construct
VTLFPPSSEELQANKATLVCLISDFYPGAVTVAWKADGSPVKAGVETTKPSKQSNNKYAASSYLSLTPEQWKSHRSYSCQVTHEGSTVEKTVAPTECSIPEDTFFPSPESSCDVKLVEKSFETDTNLNFQNLLVIVLRILLLKVAGFNLLMTLRLWSS

SEQ ID NO: 22110 - protein, 157 aa, synthetic construct
TLFPPSSEELQANKATLVCLISDFYPGAVTVAWKADGSPVKAGVETTKPSKQSNNKYAASSYLSLTPEQWKSHRSYSCQVTHEGSTVEKTVAPTECSIPEDTFFPSPESSCDVKLVEKSFETDTNLNFQNLLVIVLRILLLKVAGFNLLMTLRLWSS

SEQ ID NO: 22111 - protein, 156 aa, synthetic construct
LFPPSSEELQANKATLVCLISDFYPGAVTVAWKADGSPVKAGVETTKPSKQSNNKYAASSYLSLTPEQWKSHRSYSCQVTHEGSTVEKTVAPTECSIPEDTFFPSPESSCDVKLVEKSFETDTNLNFQNLLVIVLRILLLKVAGFNLLMTLRLWSS

SEQ ID NO: 22112 - protein, 176 aa, synthetic construct
DLKNVFPPEVAVFEPSEAEISHTQKATLVCLATGFYPDHVELSWWVNGKEVHSGVCTDPQPLKEQPALNDSRYCLSSRLRVSATFWQNPRNHFRCQVQFYGLSENDEWTQDRAKPVTQIVSAEAWGRADCDVKLVEKSFETDTNLNFQNLLVIVLRILLLKVAGFNLLMTLRLWSS

SEQ ID NO: 22113 - protein, 175 aa, synthetic construct
LKNVFPPEVAVFEPSEAEISHTQKATLVCLATGFYPDHVELSWWVNGKEVHSGVCTDPQPLKEQPALNDSRYCLSSRLRVSATFWQNPRNHFRCQVQFYGLSENDEWTQDRAKPVTQIVSAEAWGRADCDVKLVEKSFETDTNLNFQNLLVIVLRILLLKVAGFNLLMTLRLWSS

SEQ ID NO: 22114 - protein, 174 aa, synthetic construct
KNVFPPEVAVFEPSEAEISHTQKATLVCLATGFYPDHVELSWWVNGKEVHSGVCTDPQPLKEQPALNDSRYCLSSRLRVSATFWQNPRNHFRCQVQFYGLSENDEWTQDRAKPVTQIVSAEAWGRADCDVKLVEKSFETDTNLNFQNLLVIVLRILLLKVAGFNLLMTLRLWSS

SEQ ID NO: 22115 - protein, 173 aa, synthetic construct
NVFPPEVAVFEPSEAEISHTQKATLVCLATGFYPDHVELSWWVNGKEVHSGVCTDPQPLKEQPALNDSRYCLSSRLRVSATFWQNPRNHFRCQVQFYGLSENDEWTQDRAKPVTQIVSAEAWGRADCDVKLVEKSFETDTNLNFQNLLVIVLRILLLKVAGFNLLMTLRLWSS

SEQ ID NO: 22116 - protein, 172 aa, synthetic construct
VFPPEVAVFEPSEAEISHTQKATLVCLATGFYPDHVELSWWVNGKEVHSGVCTDPQPLKEQPALNDSRYCLSSRLRVSATFWQNPRNHFRCQVQFYGLSENDEWTQDRAKPVTQIVSAEAWGRADCDVKLVEKSFETDTNLNFQNLLVIVLRILLLKVAGFNLLMTLRLWSS

SEQ ID NO: 22117 - protein, 171 aa, synthetic construct
FPPEVAVFEPSEAEISHTQKATLVCLATGFYPDHVELSWWVNGKEVHSGVCTDPQPLKEQPALNDSRYCLSSRLRVSATFWQNPRNHFRCQVQFYGLSENDEWTQDRAKPVTQIVSAEAWGRADCDVKLVEKSFETDTNLNFQNLLVIVLRILLLKVAGFNLLMTLRLWSS

SEQ ID NO: 22118 - protein, 170 aa, synthetic construct
PPEVAVFEPSEAEISHTQKATLVCLATGFYPDHVELSWWVNGKEVHSGVCTDPQPLKEQPALNDSRYCLSSRLRVSATFWQNPRNHFRCQVQFYGLSENDEWTQDRAKPVTQIVSAEAWGRADCDVKLVEKSFETDTNLNFQNLLVIVLRILLLKVAGFNLLMTLRLWSS

SEQ ID NO: 22119 - protein, 169 aa, synthetic construct
PEVAVFEPSEAEISHTQKATLVCLATGFYPDHVELSWWVNGKEVHSGVCTDPQPLKEQPALNDSRYCLSSRLRVSATFWQNPRNHFRCQVQFYGLSENDEWTQDRAKPVTQIVSAEAWGRADCDVKLVEKSFETDTNLNFQNLLVIVLRILLLKVAGFNLLMTLRLWSS

SEQ ID NO: 22120 - protein, 168 aa, synthetic construct
EVAVFEPSEAEISHTQKATLVCLATGFYPDHVELSWWVNGKEVHSGVCTDPQPLKEQPALNDSRYCLSSRLRVSATFWQNPRNHFRCQVQFYGLSENDEWTQDRAKPVTQIVSAEAWGRADCDVKLVEKSFETDTNLNFQNLLVIVLRILLLKVAGFNLLMTLRLWSS

SEQ ID NO: 22121 - protein, 167 aa, synthetic construct
VAVFEPSEAEISHTQKATLVCLATGFYPDHVELSWWVNGKEVHSGVCTDPQPLKEQPALNDSRYCLSSRLRVSATFWQNPRNHFRCQVQFYGLSENDEWTQDRAKPVTQIVSAEAWGRADCDVKLVEKSFETDTNLNFQNLLVIVLRILLLKVAGFNLLMTLRLWSS

SEQ ID NO: 22122 - protein, 166 aa, synthetic construct
AVFEPSEAEISHTQKATLVCLATGFYPDHVELSWWVNGKEVHSGVCTDPQPLKEQPALNDSRYCLSSRLRVSATFWQNPRNHFRCQVQFYGLSENDEWTQDRAKPVTQIVSAEAWGRADCDVKLVEKSFETDTNLNFQNLLVIVLRILLLKVAGFNLLMTLRLWSS

SEQ ID NO: 22123 - protein, 165 aa, synthetic construct
VFEPSEAEISHTQKATLVCLATGFYPDHVELSWWVNGKEVHSGVCTDPQPLKEQPALNDSRYCLSSRLRVSATFWQNPRNHFRCQVQFYGLSENDEWTQDRAKPVTQIVSAEAWGRADCDVKLVEKSFETDTNLNFQNLLVIVLRILLLKVAGFNLLMTLRLWSS

SEQ ID NO: 22124 - protein, 164 aa, synthetic construct
FEPSEAEISHTQKATLVCLATGFYPDHVELSWWVNGKEVHSGVCTDPQPLKEQPALNDSRYCLSSRLRVSATFWQNPRNHFRCQVQFYGLSENDEWTQDRAKPVTQIVSAEAWGRADCDVKLVEKSFETDTNLNFQNLLVIVLRILLLKVAGFNLLMTLRLWSS

SEQ ID NO: 22125 - protein, 163 aa, synthetic construct
EPSEAEISHTQKATLVCLATGFYPDHVELSWWVNGKEVHSGVCTDPQPLKEQPALNDSRYCLSSRLRVSATFWQNPRNHFRCQVQFYGLSENDEWTQDRAKPVTQIVSAEAWGRADCDVKLVEKSFETDTNLNFQNLLVIVLRILLLKVAGFNLLMTLRLWSS

SEQ ID NO: 22126 - protein, 162 aa, synthetic construct
PSEAEISHTQKATLVCLATGFYPDHVELSWWVNGKEVHSGVCTDPQPLKEQPALNDSRYCLSSRLRVSATFWQNPRNHFRCQVQFYGLSENDEWTQDRAKPVTQIVSAEAWGRADCDVKLVEKSFETDTNLNFQNLLVIVLRILLLKVAGFNLLMTLRLWSS

SEQ ID NO: 22127 - protein, 161 aa, synthetic construct
SEAEISHTQKATLVCLATGFYPDHVELSWWVNGKEVHSGVCTDPQPLKEQPALNDSRYCLSSRLRVSATFWQNPRNHFRCQVQFYGLSENDEWTQDRAKPVTQIVSAEAWGRADCDVKLVEKSFETDTNLNFQNLLVIVLRILLLKVAGFNLLMTLRLWSS

SEQ ID NO: 22128 - protein, 160 aa, synthetic construct
EAEISHTQKATLVCLATGFYPDHVELSWWVNGKEVHSGVCTDPQPLKEQPALNDSRYCLSSRLRVSATFWQNPRNHFRCQVQFYGLSENDEWTQDRAKPVTQIVSAEAWGRADCDVKLVEKSFETDTNLNFQNLLVIVLRILLLKVAGFNLLMTLRLWSS

SEQ ID NO: 22129 - protein, 159 aa, synthetic construct
AEISHTQKATLVCLATGFYPDHVELSWWVNGKEVHSGVCTDPQPLKEQPALNDSRYCLSSRLRVSATFWQNPRNHFRCQVQFYGLSENDEWTQDRAKPVTQIVSAEAWGRADCDVKLVEKSFETDTNLNFQNLLVIVLRILLLKVAGFNLLMTLRLWSS

SEQ ID NO: 22130 - protein, 158 aa, synthetic construct
EISHTQKATLVCLATGFYPDHVELSWWVNGKEVHSGVCTDPQPLKEQPALNDSRYCLSSRLRVSATFWQNPRNHFRCQVQFYGLSENDEWTQDRAKPVTQIVSAEAWGRADCDVKLVEKSFETDTNLNFQNLLVIVLRILLLKVAGFNLLMTLRLWSS

SEQ ID NO: 22131 - protein, 157 aa, synthetic construct
ISHTQKATLVCLATGFYPDHVELSWWVNGKEVHSGVCTDPQPLKEQPALNDSRYCLSSRLRVSATFWQNPRNHFRCQVQFYGLSENDEWTQDRAKPVTQIVSAEAWGRADCDVKLVEKSFETDTNLNFQNLLVIVLRILLLKVAGFNLLMTLRLWSS

SEQ ID NO: 22132 - protein, 156 aa, synthetic construct
SHTQKATLVCLATGFYPDHVELSWWVNGKEVHSGVCTDPQPLKEQPALNDSRYCLSSRLRVSATFWQNPRNHFRCQVQFYGLSENDEWTQDRAKPVTQIVSAEAWGRADCDVKLVEKSFETDTNLNFQNLLVIVLRILLLKVAGFNLLMTLRLWSS

SEQ ID NO: 22133 - protein, 151 aa, synthetic construct
ATLVCLATGFYPDHVELSWWVNGKEVHSGVCTDPQPLKEQPALNDSRYCLSSRLRVSATFWQNPRNHFRCQVQFYGLSENDEWTQDRAKPVTQIVSAEAWGRADCDVKLVEKSFETDTNLNFQNLLVIVLRILLLKVAGFNLLMTLRLWSS

SEQ ID NO: 22134 - protein, 146 aa, synthetic construct
LATGFYPDHVELSWWVNGKEVHSGVCTDPQPLKEQPALNDSRYCLSSRLRVSATFWQNPRNHFRCQVQFYGLSENDEWTQDRAKPVTQIVSAEAWGRADCDVKLVEKSFETDTNLNFQNLLVIVLRILLLKVAGFNLLMTLRLWSS

SEQ ID NO: 22135 - protein, 173 aa, synthetic construct
DLKNVFPPEVAVFEPSEAEISHTQKATLVCLATGFYPDHVELSWWVNGKEVHSGVCTDPQPLKEQPALNDSRYCLSSRLRVSATFWQNPRNHFRCQVQFYGLSENDEWTQDRAKPVTQIVSAEAWGRADCGFTSESYQQGVLSATNLLVIVLRILLLKVAGFNLLMTLRLWSS

SEQ ID NO: 22136 - protein, 172 aa, synthetic construct
LKNVFPPEVAVFEPSEAEISHTQKATLVCLATGFYPDHVELSWWVNGKEVHSGVCTDPQPLKEQPALNDSRYCLSSRLRVSATFWQNPRNHFRCQVQFYGLSENDEWTQDRAKPVTQIVSAEAWGRADCGFTSESYQQGVLSATNLLVIVLRILLLKVAGFNLLMTLRLWSS

SEQ ID NO: 22137 - protein, 171 aa, synthetic construct
KNVFPPEVAVFEPSEAEISHTQKATLVCLATGFYPDHVELSWWVNGKEVHSGVCTDPQPLKEQPALNDSRYCLSSRLRVSATFWQNPRNHFRCQVQFYGLSENDEWTQDRAKPVTQIVSAEAWGRADCGFTSESYQQGVLSATNLLVIVLRILLLKVAGFNLLMTLRLWSS

SEQ ID NO: 22138 - protein, 170 aa, synthetic construct
NVFPPEVAVFEPSEAEISHTQKATLVCLATGFYPDHVELSWWVNGKEVHSGVCTDPQPLKEQPALNDSRYCLSSRLRVSATFWQNPRNHFRCQVQFYGLSENDEWTQDRAKPVTQIVSAEAWGRADCGFTSESYQQGVLSATNLLVIVLRILLLKVAGFNLLMTLRLWSS

SEQ ID NO: 22139 - protein, 169 aa, synthetic construct
VFPPEVAVFEPSEAEISHTQKATLVCLATGFYPDHVELSWWVNGKEVHSGVCTDPQPLKEQPALNDSRYCLSSRLRVSATFWQNPRNHFRCQVQFYGLSENDEWTQDRAKPVTQIVSAEAWGRADCGFTSESYQQGVLSATNLLVIVLRILLLKVAGFNLLMTLRLWSS

SEQ ID NO: 22140 - protein, 168 aa, synthetic construct
FPPEVAVFEPSEAEISHTQKATLVCLATGFYPDHVELSWWVNGKEVHSGVCTDPQPLKEQPALNDSRYCLSSRLRVSATFWQNPRNHFRCQVQFYGLSENDEWTQDRAKPVTQIVSAEAWGRADCGFTSESYQQGVLSATNLLVIVLRILLLKVAGFNLLMTLRLWSS

SEQ ID NO: 22141 - protein, 167 aa, synthetic construct
PPEVAVFEPSEAEISHTQKATLVCLATGFYPDHVELSWWVNGKEVHSGVCTDPQPLKEQPALNDSRYCLSSRLRVSATFWQNPRNHFRCQVQFYGLSENDEWTQDRAKPVTQIVSAEAWGRADCGFTSESYQQGVLSATNLLVIVLRILLLKVAGFNLLMTLRLWSS

SEQ ID NO: 22142 - protein, 166 aa, synthetic construct
PEVAVFEPSEAEISHTQKATLVCLATGFYPDHVELSWWVNGKEVHSGVCTDPQPLKEQPALNDSRYCLSSRLRVSATFWQNPRNHFRCQVQFYGLSENDEWTQDRAKPVTQIVSAEAWGRADCGFTSESYQQGVLSATNLLVIVLRILLLKVAGFNLLMTLRLWSS

SEQ ID NO: 22143 - protein, 165 aa, synthetic construct
EVAVFEPSEAEISHTQKATLVCLATGFYPDHVELSWWVNGKEVHSGVCTDPQPLKEQPALNDSRYCLSSRLRVSATFWQNPRNHFRCQVQFYGLSENDEWTQDRAKPVTQIVSAEAWGRADCGFTSESYQQGVLSATNLLVIVLRILLLKVAGFNLLMTLRLWSS

SEQ ID NO: 22144 - protein, 164 aa, synthetic construct
VAVFEPSEAEISHTQKATLVCLATGFYPDHVELSWWVNGKEVHSGVCTDPQPLKEQPALNDSRYCLSSRLRVSATFWQNPRNHFRCQVQFYGLSENDEWTQDRAKPVTQIVSAEAWGRADCGFTSESYQQGVLSATNLLVIVLRILLLKVAGFNLLMTLRLWSS

SEQ ID NO: 22145 - protein, 163 aa, synthetic construct
AVFEPSEAEISHTQKATLVCLATGFYPDHVELSWWVNGKEVHSGVCTDPQPLKEQPALNDSRYCLSSRLRVSATFWQNPRNHFRCQVQFYGLSENDEWTQDRAKPVTQIVSAEAWGRADCGFTSESYQQGVLSATNLLVIVLRILLLKVAGFNLLMTLRLWSS

SEQ ID NO: 22146 - protein, 162 aa, synthetic construct
VFEPSEAEISHTQKATLVCLATGFYPDHVELSWWVNGKEVHSGVCTDPQPLKEQPALNDSRYCLSSRLRVSATFWQNPRNHFRCQVQFYGLSENDEWTQDRAKPVTQIVSAEAWGRADCGFTSESYQQGVLSATNLLVIVLRILLLKVAGFNLLMTLRLWSS

SEQ ID NO: 22147 - protein, 161 aa, synthetic construct
FEPSEAEISHTQKATLVCLATGFYPDHVELSWWVNGKEVHSGVCTDPQPLKEQPALNDSRYCLSSRLRVSATFWQNPRNHFRCQVQFYGLSENDEWTQDRAKPVTQIVSAEAWGRADCGFTSESYQQGVLSATNLLVIVLRILLLKVAGFNLLMTLRLWSS

SEQ ID NO: 22148 - protein, 160 aa, synthetic construct
EPSEAEISHTQKATLVCLATGFYPDHVELSWWVNGKEVHSGVCTDPQPLKEQPALNDSRYCLSSRLRVSATFWQNPRNHFRCQVQFYGLSENDEWTQDRAKPVTQIVSAEAWGRADCGFTSESYQQGVLSATNLLVIVLRILLLKVAGFNLLMTLRLWSS

SEQ ID NO: 22149 - protein, 159 aa, synthetic construct
PSEAEISHTQKATLVCLATGFYPDHVELSWWVNGKEVHSGVCTDPQPLKEQPALNDSRYCLSSRLRVSATFWQNPRNHFRCQVQFYGLSENDEWTQDRAKPVTQIVSAEAWGRADCGFTSESYQQGVLSATNLLVIVLRILLLKVAGFNLLMTLRLWSS

SEQ ID NO: 22150 - protein, 158 aa, synthetic construct
SEAEISHTQKATLVCLATGFYPDHVELSWWVNGKEVHSGVCTDPQPLKEQPALNDSRYCLSSRLRVSATFWQNPRNHFRCQVQFYGLSENDEWTQDRAKPVTQIVSAEAWGRADCGFTSESYQQGVLSATNLLVIVLRILLLKVAGFNLLMTLRLWSS

SEQ ID NO: 22151 - protein, 157 aa, synthetic construct
EAEISHTQKATLVCLATGFYPDHVELSWWVNGKEVHSGVCTDPQPLKEQPALNDSRYCLSSRLRVSATFWQNPRNHFRCQVQFYGLSENDEWTQDRAKPVTQIVSAEAWGRADCGFTSESYQQGVLSATNLLVIVLRILLLKVAGFNLLMTLRLWSS

SEQ ID NO: 22152 - protein, 156 aa, synthetic construct
AEISHTQKATLVCLATGFYPDHVELSWWVNGKEVHSGVCTDPQPLKEQPALNDSRYCLSSRLRVSATFWQNPRNHFRCQVQFYGLSENDEWTQDRAKPVTQIVSAEAWGRADCGFTSESYQQGVLSATNLLVIVLRILLLKVAGFNLLMTLRLWSS

SEQ ID NO: 22153 - protein, 155 aa, synthetic construct
EISHTQKATLVCLATGFYPDHVELSWWVNGKEVHSGVCTDPQPLKEQPALNDSRYCLSSRLRVSATFWQNPRNHFRCQVQFYGLSENDEWTQDRAKPVTQIVSAEAWGRADCGFTSESYQQGVLSATNLLVIVLRILLLKVAGFNLLMTLRLWSS

SEQ ID NO: 22154 - protein, 154 aa, synthetic construct
ISHTQKATLVCLATGFYPDHVELSWWVNGKEVHSGVCTDPQPLKEQPALNDSRYCLSSRLRVSATFWQNPRNHFRCQVQFYGLSENDEWTQDRAKPVTQIVSAEAWGRADCGFTSESYQQGVLSATNLLVIVLRILLLKVAGFNLLMTLRLWSS

SEQ ID NO: 22155 - protein, 153 aa, synthetic construct
SHTQKATLVCLATGFYPDHVELSWWVNGKEVHSGVCTDPQPLKEQPALNDSRYCLSSRLRVSATFWQNPRNHFRCQVQFYGLSENDEWTQDRAKPVTQIVSAEAWGRADCGFTSESYQQGVLSATNLLVIVLRILLLKVAGFNLLMTLRLWSS

SEQ ID NO: 22156 - protein, 148 aa, synthetic construct
ATLVCLATGFYPDHVELSWWVNGKEVHSGVCTDPQPLKEQPALNDSRYCLSSRLRVSATFWQNPRNHFRCQVQFYGLSENDEWTQDRAKPVTQIVSAEAWGRADCGFTSESYQQGVLSATNLLVIVLRILLLKVAGFNLLMTLRLWSS

SEQ ID NO: 22157 - protein, 143 aa, synthetic construct
LATGFYPDHVELSWWVNGKEVHSGVCTDPQPLKEQPALNDSRYCLSSRLRVSATFWQNPRNHFRCQVQFYGLSENDEWTQDRAKPVTQIVSAEAWGRADCGFTSESYQQGVLSATNLLVIVLRILLLKVAGFNLLMTLRLWSS

SEQ ID NO: 22158 - protein, 133 aa, synthetic construct
IQNPDPAVYQLRDSKSSDKSVCLFTDFDSQTNVSQSKDSDVYITDKTVLDMRSMDFKSNSAVAWSNKSDFACANAFNNSIGRADCGFTSESYQQGVLSATILYEILLGKATLYAVLVSALVLMAMVKRKDSRG

SEQ ID NO: 22159 - protein, 131 aa, synthetic construct
IQNPDPAVYQLRDSKSSDKSVCLFTDFDSQTNVSQSKDSDVYITDKTVLDMRSMDFKSNSAVAWSNKSDFACANAFNNSIADCGFTSESYQQGVLSATILYEILLGKATLYAVLVSALVLMAMVKRKDSRG

SEQ ID NO: 22160 - protein, 141 aa, synthetic construct
IQNPDPAVYQLRDSKSSDKSVCLFTDFDSQTNVSQSKDSDVYITDKTVLDMRSMDFKSNSAVAWSNKSDFACANAFNNSIQIVSAEAWGRADCGFTSESYQQGVLSATILYEILLGKATLYAVLVSALVLMAMVKRKDSRG

SEQ ID NO: 22161 - protein, 149 aa, synthetic construct
IQNPDPAVYQLRDSKSSDKSVCLFTDFDSQTNVSQSKDSDVYITDKTVLDMRSMDFKSNSAVAWSNKSDFACANAFNNSIFPPIKTDVITMDPKDNCSKDANDTLLLQLTNTSAYYMYLLLLLKSVVYFAIITCCLLRRTAFCCNGEKS

SEQ ID NO: 22162 - protein, 147 aa, synthetic construct
IQNPDPAVYQLRDSKSSDKSVCLFTDFDSQTNVSQSKDSDVYITDKTVLDMRSMDFKSNSAVAWSNKSDFACANAFNNSIPIKTDVITMDPKDNCSKDANDTLLLQLTNTSAYYMYLLLLLKSVVYFAIITCCLLRRTAFCCNGEKS

SEQ ID NO: 22163 - protein, 139 aa, synthetic construct
IQNPDPAVYQLRDSKSSDKSVCLFTDFDSQTNVSQSKDSDVYITDKTVLDMRSMDFKSNSAVAWSNKSDFACANAFNNSIMDPKDNCSKDANDTLLLQLTNTSAYYMYLLLLLKSVVYFAIITCCLLRRTAFCCNGEKS

SEQ ID NO: 22164 - protein, 147 aa, synthetic construct; identical to SEQ ID NO: 22162

SEQ ID NO: 22165 - protein, 133 aa, synthetic construct
IQNPDPAVYQLRDSKSSDKSVCLFTDFDSQTNVSQSKDSDVYITDKTVLDMRSMDFKSNSAVAWSNKSDFACANAFNNSICSKDANDTLLLQLTNTSAYYMYLLLLLKSVVYFAIITCCLLRRTAFCCNGEKS

SEQ ID NO: 22166 - protein, 148 aa, synthetic construct
IQNPDPAVYQLRDSKSSDKSVCLFTDFDSQTNVSQSKDSDVYITDKTVLDMRSMDFKSNSAVAWSNKSDFACANAFNNSIEVKTDSTDHVKPKETENTKQPSKSCHKPKAIVHTEKVNMMSLTVLGLRMLFAKTVAVNFLLTAKLFFL

SEQ ID NO: 22167 - protein, 141 aa, synthetic construct
IQNPDPAVYQLRDSKSSDKSVCLFTDFDSQTNVSQSKDSDVYITDKTVLDMRSMDFKSNSAVAWSNKSDFACANAFNNSIDHVKPKETENTKQPSKSCHKPKAIVHTEKVNMMSLTVLGLRMLFAKTVAVNFLLTAKLFFL

SEQ ID NO: 22168 - protein, 143 aa, synthetic construct
IQNPDPAVYQLRDSKSSDKSVCLFTDFDSQTNVSQSKDSDVYITDKTVLDMRSMDFKSNSAVAWSNKSDFACANAFNNSIIPEDTFFPSPGRADCGFTSESYQQGVLSATILYEILLGKATLYAVLVSALVLMAMVKRKDSRG

SEQ ID NO: 22169 - protein, 141 aa, synthetic construct
IQNPDPAVYQLRDSKSSDKSVCLFTDFDSQTNVSQSKDSDVYITDKTVLDMRSMDFKSNSAVAWSNKSDFACANAFNNSIIPEDTFFPSPADCGFTSESYQQGVLSATILYEILLGKATLYAVLVSALVLMAMVKRKDSRG

SEQ ID NO: 22170 - protein, 151 aa, synthetic construct
IQNPDPAVYQLRDSKSSDKSVCLFTDFDSQTNVSQSKDSDVYITDKTVLDMRSMDFKSNSAVAWSNKSDFACANAFNNSIIPEDTFFPSPQIVSAEAWGRADCGFTSESYQQGVLSATILYEILLGKATLYAVLVSALVLMAMVKRKDSRG

SEQ ID NO: 22171 - protein, 159 aa, synthetic construct
IQNPDPAVYQLRDSKSSDKSVCLFTDFDSQTNVSQSKDSDVYITDKTVLDMRSMDFKSNSAVAWSNKSDFACANAFNNSIIPEDTFFPSPFPPIKTDVITMDPKDNCSKDANDTLLLQLTNTSAYYMYLLLLLKSVVYFAIITCCLLRRTAFCCNGEKS

SEQ ID NO: 22172 - protein, 157 aa, synthetic construct
IQNPDPAVYQLRDSKSSDKSVCLFTDFDSQTNVSQSKDSDVYITDKTVLDMRSMDFKSNSAVAWSNKSDFACANAFNNSIIPEDTFFPSPPIKTDVITMDPKDNCSKDANDTLLLQLTNTSAYYMYLLLLLKSVVYFAIITCCLLRRTAFCCNGEKS

SEQ ID NO: 22173 - protein, 149 aa, synthetic construct
IQNPDPAVYQLRDSKSSDKSVCLFTDFDSQTNVSQSKDSDVYITDKTVLDMRSMDFKSNSAVAWSNKSDFACANAFNNSIIPEDTFFPSPMDPKDNCSKDANDTLLLQLTNTSAYYMYLLLLLKSVVYFAIITCCLLRRTAFCCNGEKS

SEQ ID NO: 22174 - protein, 157 aa, synthetic construct; identical to SEQ ID NO: 22172

SEQ ID NO: 22175 - protein, 143 aa, synthetic construct
IQNPDPAVYQLRDSKSSDKSVCLFTDFDSQTNVSQSKDSDVYITDKTVLDMRSMDFKSNSAVAWSNKSDFACANAFNNSIIPEDTFFPSPCSKDANDTLLLQLTNTSAYYMYLLLLLKSVVYFAIITCCLLRRTAFCCNGEKS

SEQ ID NO: 22176 - protein, 158 aa, synthetic construct
IQNPDPAVYQLRDSKSSDKSVCLFTDFDSQTNVSQSKDSDVYITDKTVLDMRSMDFKSNSAVAWSNKSDFACANAFNNSIIPEDTFFPSPEVKTDSTDHVKPKETENTKQPSKSCHKPKAIVHTEKVNMMSLTVLGLRMLFAKTVAVNFLLTAKLFFL

SEQ ID NO: 22177 - protein, 151 aa, synthetic construct
IQNPDPAVYQLRDSKSSDKSVCLFTDFDSQTNVSQSKDSDVYITDKTVLDMRSMDFKSNSAVAWSNKSDFACANAFNNSIIPEDTFFPSPDHVKPKETENTKQPSKSCHKPKAIVHTEKVNMMSLTVLGLRMLFAKTVAVNFLLTAKLFFL

SEQ ID NO: 22178 - protein, 147 aa, synthetic construct
IQNPDPAVYQLRDSKSSDKSVCLFTDFDSQTNVSQSKDSDVYITDKTVLDMRSMDFKSNSAVAWSNKSDFACANAFNNSIIPEDTFFPSPESSCGRADCGFTSESYQQGVLSATILYEILLGKATLYAVLVSALVLMAMVKRKDSRG

SEQ ID NO: 22179 - protein, 145 aa, synthetic construct
IQNPDPAVYQLRDSKSSDKSVCLFTDFDSQTNVSQSKDSDVYITDKTVLDMRSMDFKSNSAVAWSNKSDFACANAFNNSIIPEDTFFPSPESSCADCGFTSESYQQGVLSATILYEILLGKATLYAVLVSALVLMAMVKRKDSRG

SEQ ID NO: 22180 - protein, 155 aa, synthetic construct
IQNPDPAVYQLRDSKSSDKSVCLFTDFDSQTNVSQSKDSDVYITDKTVLDMRSMDFKSNSAVAWSNKSDFACANAFNNSIIPEDTFFPSPESSCQIVSAEAWGRADCGFTSESYQQGVLSATILYEILLGKATLYAVLVSALVLMAMVKRKDSRG

SEQ ID NO: 22181 - protein, 163 aa, synthetic construct
IQNPDPAVYQLRDSKSSDKSVCLFTDFDSQTNVSQSKDSDVYITDKTVLDMRSMDFKSNSAVAWSNKSDFACANAFNNSIIPEDTFFPSPESSCFPPIKTDVITMDPKDNCSKDANDTLLLQLTNTSAYYMYLLLLLKSVVYFAIITCCLLRRTAFCCNGEKS

SEQ ID NO: 22182 - protein, 161 aa, synthetic construct
IQNPDPAVYQLRDSKSSDKSVCLFTDFDSQTNVSQSKDSDVYITDKTVLDMRSMDFKSNSAVAWSNKSDFACANAFNNSIIPEDTFFPSPESSCPIKTDVITMDPKDNCSKDANDTLLLQLTNTSAYYMYLLLLLKSVVYFAIITCCLLRRTAFCCNGEKS

SEQ ID NO: 22183 - protein, 153 aa, synthetic construct
IQNPDPAVYQLRDSKSSDKSVCLFTDFDSQTNVSQSKDSDVYITDKTVLDMRSMDFKSNSAVAWSNKSDFACANAFNNSIIPEDTFFPSPESSCMDPKDNCSKDANDTLLLQLTNTSAYYMYLLLLLKSVVYFAIITCCLLRRTAFCCNGEKS

SEQ ID NO: 22184 - protein, 161 aa, synthetic construct; identical to SEQ ID NO: 22182

SEQ ID NO: 22185 - protein, 147 aa, synthetic construct
IQNPDPAVYQLRDSKSSDKSVCLFTDFDSQTNVSQSKDSDVYITDKTVLDMRSMDFKSNSAVAWSNKSDFACANAFNNSIIPEDTFFPSPESSCCSKDANDTLLLQLTNTSAYYMYLLLLLKSVVYFAIITCCLLRRTAFCCNGEKS

SEQ ID NO: 22186 - protein, 162 aa, synthetic construct
IQNPDPAVYQLRDSKSSDKSVCLFTDFDSQTNVSQSKDSDVYITDKTVLDMRSMDFKSNSAVAWSNKSDFACANAFNNSIIPEDTFFPSPESSCEVKTDSTDHVKPKETENTKQPSKSCHKPKAIVHTEKVNMMSLTVLGLRMLFAKTVAVNFLLTAKLFFL

SEQ ID NO: 22187 - protein, 155 aa, synthetic construct
IQNPDPAVYQLRDSKSSDKSVCLFTDFDSQTNVSQSKDSDVYITDKTVLDMRSMDFKSNSAVAWSNKSDFACANAFNNSIIPEDTFFPSPESSCDHVKPKETENTKQPSKSCHKPKAIVHTEKVNMMSLTVLGLRMLFAKTVAVNFLLTAKLFFL

SEQ ID NO: 22188 - protein, 134 aa, synthetic construct
IQNPDPAVYQLRDSKSSDKSVCLFTDFDSQTNVSQSKDSDVYITDKTVLDMRSMDFKSNSAVAWSNKSDFACANAFNNSIIGRADCGFTSESYQQGVLSATILYEILLGKATLYAVLVSALVLMAMVKRKDSRG

SEQ ID NO: 22189 - protein, 132 aa, synthetic construct
IQNPDPAVYQLRDSKSSDKSVCLFTDFDSQTNVSQSKDSDVYITDKTVLDMRSMDFKSNSAVAWSNKSDFACANAFNNSIIADCGFTSESYQQGVLSATILYEILLGKATLYAVLVSALVLMAMVKRKDSRG

SEQ ID NO: 22190 - protein, 142 aa, synthetic construct
IQNPDPAVYQLRDSKSSDKSVCLFTDFDSQTNVSQSKDSDVYITDKTVLDMRSMDFKSNSAVAWSNKSDFACANAFNNSIIQIVSAEAWGRADCGFTSESYQQGVLSATILYEILLGKATLYAVLVSALVLMAMVKRKDSRG

SEQ ID NO: 22191 - protein, 150 aa, synthetic construct
IQNPDPAVYQLRDSKSSDKSVCLFTDFDSQTNVSQSKDSDVYITDKTVLDMRSMDFKSNSAVAWSNKSDFACANAFNNSIIFPPIKTDVITMDPKDNCSKDANDTLLLQLTNTSAYYMYLLLLLKSVVYFAIITCCLLRRTAFCCNGEKS

SEQ ID NO: 22192 - protein, 148 aa, synthetic construct
IQNPDPAVYQLRDSKSSDKSVCLFTDFDSQTNVSQSKDSDVYITDKTVLDMRSMDFKSNSAVAWSNKSDFACANAFNNSIIPIKTDVITMDPKDNCSKDANDTLLLQLTNTSAYYMYLLLLLKSVVYFAIITCCLLRRTAFCCNGEKS

SEQ ID NO: 22193 - protein, 140 aa, synthetic construct
IQNPDPAVYQLRDSKSSDKSVCLFTDFDSQTNVSQSKDSDVYITDKTVLDMRSMDFKSNSAVAWSNKSDFACANAFNNSIIMDPKDNCSKDANDTLLLQLTNTSAYYMYLLLLLKSVVYFAIITCCLLRRTAFCCNGEKS

SEQ ID NO: 22194 - protein, 148 aa, synthetic construct; identical to SEQ ID NO: 22192

SEQ ID NO: 22195 - protein, 134 aa, synthetic construct
IQNPDPAVYQLRDSKSSDKSVCLFTDFDSQTNVSQSKDSDVYITDKTVLDMRSMDFKSNSAVAWSNKSDFACANAFNNSIICSKDANDTLLLQLTNTSAYYMYLLLLLKSVVYFAIITCCLLRRTAFCCNGEKS

SEQ ID NO: 22196 - protein, 149 aa, synthetic construct
IQNPDPAVYQLRDSKSSDKSVCLFTDFDSQTNVSQSKDSDVYITDKTVLDMRSMDFKSNSAVAWSNKSDFACANAFNNSIIEVKTDSTDHVKPKETENTKQPSKSCHKPKAIVHTEKVNMMSLTVLGLRMLFAKTVAVNFLLTAKLFFL

SEQ ID NO: 22197 - protein, 142 aa, synthetic construct
IQNPDPAVYQLRDSKSSDKSVCLFTDFDSQTNVSQSKDSDVYITDKTVLDMRSMDFKSNSAVAWSNKSDFACANAFNNSIIDHVKPKETENTKQPSKSCHKPKAIVHTEKVNMMSLTVLGLRMLFAKTVAVNFLLTAKLFFL

SEQ ID NO: 22198 - protein, 147 aa, synthetic construct; identical to SEQ ID NO: 22178

SEQ ID NO: 22199 - protein, 145 aa, synthetic construct; identical to SEQ ID NO: 22179

SEQ ID NO: 22200 - protein, 155 aa, synthetic construct; identical to SEQ ID NO: 22180

SEQ ID NO: 22201 - protein, 163 aa, synthetic construct; identical to SEQ ID NO: 22181

SEQ ID NO: 22202 - protein, 161 aa, synthetic construct; identical to SEQ ID NO: 22182

SEQ ID NO: 22203 - protein, 153 aa, synthetic construct; identical to SEQ ID NO: 22183

SEQ ID NO: 22204 - protein, 161 aa, synthetic construct; identical to SEQ ID NO: 22182

SEQ ID NO: 22205 - protein, 147 aa, synthetic construct; identical to SEQ ID NO: 22185

SEQ ID NO: 22206 - protein, 162 aa, synthetic construct; identical to SEQ ID NO: 22186

SEQ ID NO: 22207 - protein, 155 aa, synthetic construct; identical to SEQ ID NO: 22187

SEQ ID NO: 22208 - protein, 132 aa, synthetic construct
KSSDKSVCLFTDFDSQTNVSQSKDSDVYITDKTVLDMRSMDFKSNSAVAWSNKSDFACANAFNNSIIPEDTFFPSPESSGRADCGFTSESYQQGVLSATILYEILLGKATLYAVLVSALVLMAMVKRKDSRG

SEQ ID NO: 22209 - protein, 130 aa, synthetic construct
KSSDKSVCLFTDFDSQTNVSQSKDSDVYITDKTVLDMRSMDFKSNSAVAWSNKSDFACANAFNNSIIPEDTFFPSPESSADCGFTSESYQQGVLSATILYEILLGKATLYAVLVSALVLMAMVKRKDSRG

SEQ ID NO: 22210 - protein, 140 aa, synthetic construct
KSSDKSVCLFTDFDSQTNVSQSKDSDVYITDKTVLDMRSMDFKSNSAVAWSNKSDFACANAFNNSIIPEDTFFPSPESSQIVSAEAWGRADCGFTSESYQQGVLSATILYEILLGKATLYAVLVSALVLMAMVKRKDSRG

SEQ ID NO: 22211 - protein, 148 aa, synthetic construct
KSSDKSVCLFTDFDSQTNVSQSKDSDVYITDKTVLDMRSMDFKSNSAVAWSNKSDFACANAFNNSIIPEDTFFPSPESSFPPIKTDVITMDPKDNCSKDANDTLLLQLTNTSAYYMYLLLLLKSVVYFAIITCCLLRRTAFCCNGEKS

SEQ ID NO: 22212 - protein, 146 aa, synthetic construct
KSSDKSVCLFTDFDSQTNVSQSKDSDVYITDKTVLDMRSMDFKSNSAVAWSNKSDFACANAFNNSIIPEDTFFPSPESSPIKTDVITMDPKDNCSKDANDTLLLQLTNTSAYYMYLLLLLKSVVYFAIITCCLLRRTAFCCNGEKS

SEQ ID NO: 22213 - protein, 138 aa, synthetic construct
KSSDKSVCLFTDFDSQTNVSQSKDSDVYITDKTVLDMRSMDFKSNSAVAWSNKSDFACANAFNNSIIPEDTFFPSPESSMDPKDNCSKDANDTLLLQLTNTSAYYMYLLLLLKSVVYFAIITCCLLRRTAFCCNGEKS

SEQ ID NO: 22214 - protein, 146 aa, synthetic construct; identical to SEQ ID NO: 22212

SEQ ID NO: 22215 - protein, 132 aa, synthetic construct
KSSDKSVCLFTDFDSQTNVSQSKDSDVYITDKTVLDMRSMDFKSNSAVAWSNKSDFACANAFNNSIIPEDTFFPSPESSCSKDANDTLLLQLTNTSAYYMYLLLLLKSVVYFAIITCCLLRRTAFCCNGEKS

SEQ ID NO: 22216 - protein, 147 aa, synthetic construct
KSSDKSVCLFTDFDSQTNVSQSKDSDVYITDKTVLDMRSMDFKSNSAVAWSNKSDFACANAFNNSIIPEDTFFPSPESSEVKTDSTDHVKPKETENTKQPSKSCHKPKAIVHTEKVNMMSLTVLGLRMLFAKTVAVNFLLTAKLFFL

SEQ ID NO: 22217 - protein, 140 aa, synthetic construct
KSSDKSVCLFTDFDSQTNVSQSKDSDVYITDKTVLDMRSMDFKSNSAVAWSNKSDFACANAFNNSIIPEDTFFPSPESSDHVKPKETENTKQPSKSCHKPKAIVHTEKVNMMSLTVLGLRMLFAKTVAVNFLLTAKLFFL

SEQ ID NO: 22218 - protein, 186 aa, synthetic construct
EDLKNVFPPEVAVFEPSEAEISHTQKATLVCLATGFYPDHVELSWWVNGKEVHSGVSTDPQPLKEQPALNDSRYCLSSRLRVSATFWQNPRNHFRCQVQFYGLSENDEWTQDRAKPVTQIVSAEAWIPEDTFFPSPESSCDVKLVEKSFETDTNLNFQNLSVIGFRILLLKVAGFNLLMTLRLWSS

SEQ ID NO: 22219 - protein, 176 aa, synthetic construct
EDLKNVFPPEVAVFEPSEAEISHTQKATLVCLATGFYPDHVELSWWVNGKEVHSGVSTDPQPLKEQPALNDSRYCLSSRLRVSATFWQNPRNHFRCQVQFYGLSENDEWTQDRAKPVTQIVSAEAWESSCDVKLVEKSFETDTNLNFQNLSVIGFRILLLKVAGFNLLMTLRLWSS

SEQ ID NO: 22220 - protein, 185 aa, synthetic construct
EDLKNVFPPEVAVFEPSEAEISHTQKATLVCLATGFYPDHVELSWWVNGKEVHSGVSTDPQPLKEQPALNDSRYCLSSRLRVSATFWQNPRNHFRCQVQFYGLSENDEWTQDRAKPVTQIVSAEAWPEDTFFPSPESSCDVKLVEKSFETDTNLNFQNLSVIGFRILLLKVAGFNLLMTLRLWSS

SEQ ID NO: 22221 - protein, 195 aa, synthetic construct
EDLKNVFPPEVAVFEPSEAEISHTQKATLVCLATGFYPDHVELSWWVNGKEVHSGVSTDPQPLKEQPALNDSRYCLSSRLRVSATFWQNPRNHFRCQVQFYGLSENDEWTQDRAKPVTQIVSAEAWFPPIKTDVITMDPKDNCSKDANDTLLLQLTNTSAYYMYLLLLLKSVVYFAIITCCLLRRTAFCCNGEKS

SEQ ID NO: 22222 - protein, 193 aa, synthetic construct
EDLKNVFPPEVAVFEPSEAEISHTQKATLVCLATGFYPDHVELSWWVNGKEVHSGVSTDPQPLKEQPALNDSRYCLSSRLRVSATFWQNPRNHFRCQVQFYGLSENDEWTQDRAKPVTQIVSAEAWPIKTDVITMDPKDNCSKDANDTLLLQLTNTSAYYMYLLLLLKSVVYFAIITCCLLRRTAFCCNGEKS

SEQ ID NO: 22223 - protein, 185 aa, synthetic construct
EDLKNVFPPEVAVFEPSEAEISHTQKATLVCLATGFYPDHVELSWWVNGKEVHSGVSTDPQPLKEQPALNDSRYCLSSRLRVSATFWQNPRNHFRCQVQFYGLSENDEWTQDRAKPVTQIVSAEAWMDPKDNCSKDANDTLLLQLTNTSAYYMYLLLLLKSVVYFAIITCCLLRRTAFCCNGEKS

SEQ ID NO: 22224 - protein, 193 aa, synthetic construct; identical to SEQ ID NO: 22222

SEQ ID NO: 22225 - protein, 179 aa, synthetic construct
EDLKNVFPPEVAVFEPSEAEISHTQKATLVCLATGFYPDHVELSWWVNGKEVHSGVSTDPQPLKEQPALNDSRYCLSSRLRVSATFWQNPRNHFRCQVQFYGLSENDEWTQDRAKPVTQIVSAEAWCSKDANDTLLLQLTNTSAYYMYLLLLLKSVVYFAIITCCLLRRTAFCCNGEKS

SEQ ID NO: 22226 - protein, 194 aa, synthetic construct
EDLKNVFPPEVAVFEPSEAEISHTQKATLVCLATGFYPDHVELSWWVNGKEVHSGVSTDPQPLKEQPALNDSRYCLSSRLRVSATFWQNPRNHFRCQVQFYGLSENDEWTQDRAKPVTQIVSAEAWEVKTDSTDHVKPKETENTKQPSKSCHKPKAIVHTEKVNMMSLTVLGLRMLFAKTVAVNFLLTAKLFFL

SEQ ID NO: 22227 - protein, 187 aa, synthetic construct
EDLKNVFPPEVAVFEPSEAEISHTQKATLVCLATGFYPDHVELSWWVNGKEVHSGVSTDPQPLKEQPALNDSRYCLSSRLRVSATFWQNPRNHFRCQVQFYGLSENDEWTQDRAKPVTQIVSAEAWDHVKPKETENTKQPSKSCHKPKAIVHTEKVNMMSLTVLGLRMLFAKTVAVNFLLTAKLFFL

SEQ ID NO: 22228 - protein, 188 aa, synthetic construct
EDLKNVFPPEVAVFEPSEAEISHTQKATLVCLATGFYPDHVELSWWVNGKEVHSGVSTDPQPLKEQPALNDSRYCLSSRLRVSATFWQNPRNHFRCQVQFYGLSENDEWTQDRAKPVTQIVSAEAWGRIPEDTFFPSPESSCDVKLVEKSFETDTNLNFQNLSVIGFRILLLKVAGFNLLMTLRLWSS

SEQ ID NO: 22229 - protein, 178 aa, synthetic construct
EDLKNVFPPEVAVFEPSEAEISHTQKATLVCLATGFYPDHVELSWWVNGKEVHSGVSTDPQPLKEQPALNDSRYCLSSRLRVSATFWQNPRNHFRCQVQFYGLSENDEWTQDRAKPVTQIVSAEAWGRESSCDVKLVEKSFETDTNLNFQNLSVIGFRILLLKVAGFNLLMTLRLWSS

SEQ ID NO: 22230 - protein, 187 aa, synthetic construct
EDLKNVFPPEVAVFEPSEAEISHTQKATLVCLATGFYPDHVELSWWVNGKEVHSGVSTDPQPLKEQPALNDSRYCLSSRLRVSATFWQNPRNHFRCQVQFYGLSENDEWTQDRAKPVTQIVSAEAWGRPEDTFFPSPESSCDVKLVEKSFETDTNLNFQNLSVIGFRILLLKVAGFNLLMTLRLWSS

SEQ ID NO: 22231 - protein, 197 aa, synthetic construct
EDLKNVFPPEVAVFEPSEAEISHTQKATLVCLATGFYPDHVELSWWVNGKEVHSGVSTDPQPLKEQPALNDSRYCLSSRLRVSATFWQNPRNHFRCQVQFYGLSENDEWTQDRAKPVTQIVSAEAWGRFPPIKTDVITMDPKDNCSKDANDTLLLQLTNTSAYYMYLLLLLKSVVYFAIITCCLLRRTAFCCNGEKS

SEQ ID NO: 22232 - protein, 195 aa, synthetic construct
EDLKNVFPPEVAVFEPSEAEISHTQKATLVCLATGFYPDHVELSWWVNGKEVHSGVSTDPQPLKEQPALNDSRYCLSSRLRVSATFWQNPRNHFRCQVQFYGLSENDEWTQDRAKPVTQIVSAEAWGRPIKTDVITMDPKDNCSKDANDTLLLQLTNTSAYYMYLLLLLKSVVYFAIITCCLLRRTAFCCNGEKS

SEQ ID NO: 22233 - protein, 187 aa, synthetic construct
EDLKNVFPPEVAVFEPSEAEISHTQKATLVCLATGFYPDHVELSWWVNGKEVHSGVSTDPQPLKEQPALNDSRYCLSSRLRVSATFWQNPRNHFRCQVQFYGLSENDEWTQDRAKPVTQIVSAEAWGRMDPKDNCSKDANDTLLLQLTNTSAYYMYLLLLLKSVVYFAIITCCLLRRTAFCCNGEKS

SEQ ID NO: 22234 - protein, 195 aa, synthetic construct; identical to SEQ ID NO: 22232

SEQ ID NO: 22235 - protein, 181 aa, synthetic construct
EDLKNVFPPEVAVFEPSEAEISHTQKATLVCLATGFYPDHVELSWWVNGKEVHSGVSTDPQPLKEQPALNDSRYCLSSRLRVSATFWQNPRNHFRCQVQFYGLSENDEWTQDRAKPVTQIVSAEAWGRCSKDANDTLLLQLTNTSAYYMYLLLLLKSVVYFAIITCCLLRRTAFCCNGEKS

SEQ ID NO: 22236 - protein, 196 aa, synthetic construct
EDLKNVFPPEVAVFEPSEAEISHTQKATLVCLATGFYPDHVELSWWVNGKEVHSGVSTDPQPLKEQPALNDSRYCLSSRLRVSATFWQNPRNHFRCQVQFYGLSENDEWTQDRAKPVTQIVSAEAWGREVKTDSTDHVKPKETENTKQPSKSCHKPKAIVHTEKVNMMSLTVLGLRMLFAKTVAVNFLLTAKLFFL

SEQ ID NO: 22237 - protein, 189 aa, synthetic construct
EDLKNVFPPEVAVFEPSEAEISHTQKATLVCLATGFYPDHVELSWWVNGKEVHSGVSTDPQPLKEQPALNDSRYCLSSRLRVSATFWQNPRNHFRCQVQFYGLSENDEWTQDRAKPVTQIVSAEAWGRDHVKPKETENTKQPSKSCHKPKAIVHTEKVNMMSLTVLGLRMLFAKTVAVNFLLTAKLFFL

SEQ ID NO: 22238 - protein, 191 aa, synthetic construct
EDLKNVFPPEVAVFEPSEAEISHTQKATLVCLATGFYPDHVELSWWVNGKEVHSGVSTDPQPLKEQPALNDSRYCLSSRLRVSATFWQNPRNHFRCQVQFYGLSENDEWTQDRAKPVTQIVSAEAWGRADCIPEDTFFPSPESSCDVKLVEKSFETDTNLNFQNLSVIGFRILLLKVAGFNLLMTLRLWSS

SEQ ID NO: 22239 - protein, 181 aa, synthetic construct
EDLKNVFPPEVAVFEPSEAEISHTQKATLVCLATGFYPDHVELSWWVNGKEVHSGVSTDPQPLKEQPALNDSRYCLSSRLRVSATFWQNPRNHFRCQVQFYGLSENDEWTQDRAKPVTQIVSAEAWGRADCESSCDVKLVEKSFETDTNLNFQNLSVIGFRILLLKVAGFNLLMTLRLWSS

SEQ ID NO: 22240 - protein, 190 aa, synthetic construct
EDLKNVFPPEVAVFEPSEAEISHTQKATLVCLATGFYPDHVELSWWVNGKEVHSGVSTDPQPLKEQPALNDSRYCLSSRLRVSATFWQNPRNHFRCQVQFYGLSENDEWTQDRAKPVTQIVSAEAWGRADCPEDTFFPSPESSCDVKLVEKSFETDTNLNFQNLSVIGFRILLLKVAGFNLLMTLRLWSS

SEQ ID NO: 22241 - protein, 200 aa, synthetic construct
EDLKNVFPPEVAVFEPSEAEISHTQKATLVCLATGFYPDHVELSWWVNGKEVHSGVSTDPQPLKEQPALNDSRYCLSSRLRVSATFWQNPRNHFRCQVQFYGLSENDEWTQDRAKPVTQIVSAEAWGRADCFPPIKTDVITMDPKDNCSKDANDTLLLQLTNTSAYYMYLLLLLKSVVYFAIITCCLLRRTAFCCNGEKS

SEQ ID NO: 22242 - protein, 198 aa, synthetic construct
EDLKNVFPPEVAVFEPSEAEISHTQKATLVCLATGFYPDHVELSWWVNGKEVHSGVSTDPQPLKEQPALNDSRYCLSSRLRVSATFWQNPRNHFRCQVQFYGLSENDEWTQDRAKPVTQIVSAEAWGRADCPIKTDVITMDPKDNCSKDANDTLLLQLTNTSAYYMYLLLLLKSVVYFAIITCCLLRRTAFCCNGEKS

SEQ ID NO: 22243 - protein, 190 aa, synthetic construct
EDLKNVFPPEVAVFEPSEAEISHTQKATLVCLATGFYPDHVELSWWVNGKEVHSGVSTDPQPLKEQPALNDSRYCLSSRLRVSATFWQNPRNHFRCQVQFYGLSENDEWTQDRAKPVTQIVSAEAWGRADCMDPKDNCSKDANDTLLLQLTNTSAYYMYLLLLLKSVVYFAIITCCLLRRTAFCCNGEKS

SEQ ID NO: 22244 - protein, 198 aa, synthetic construct; identical to SEQ ID NO: 22242

SEQ ID NO: 22245 - protein, 184 aa, synthetic construct
EDLKNVFPPEVAVFEPSEAEISHTQKATLVCLATGFYPDHVELSWWVNGKEVHSGVSTDPQPLKEQPALNDSRYCLSSRLRVSATFWQNPRNHFRCQVQFYGLSENDEWTQDRAKPVTQIVSAEAWGRADCCSKDANDTLLLQLTNTSAYYMYLLLLLKSVVYFAIITCCLLRRTAFCCNGEKS

SEQ ID NO: 22246 - protein, 199 aa, synthetic construct
EDLKNVFPPEVAVFEPSEAEISHTQKATLVCLATGFYPDHVELSWWVNGKEVHSGVSTDPQPLKEQPALNDSRYCLSSRLRVSATFWQNPRNHFRCQVQFYGLSENDEWTQDRAKPVTQIVSAEAWGRADCEVKTDSTDHVKPKETENTKQPSKSCHKPKAIVHTEKVNMMSLTVLGLRMLFAKTVAVNFLLTAKLFFL

SEQ ID NO: 22247 - protein, 192 aa, synthetic construct
EDLKNVFPPEVAVFEPSEAEISHTQKATLVCLATGFYPDHVELSWWVNGKEVHSGVSTDPQPLKEQPALNDSRYCLSSRLRVSATFWQNPRNHFRCQVQFYGLSENDEWTQDRAKPVTQIVSAEAWGRADCDHVKPKETENTKQPSKSCHKPKAIVHTEKVNMMSLTVLGLRMLFAKTVAVNFLLTAKLFFL

SEQ ID NO: 22248 - protein, 178 aa, synthetic construct
EDLKNVFPPEVAVFEPSEAEISHTQKATLVCLATGFYPDHVELSWWVNGKEVHSGVSTDPQPLKEQPALNDSRYCLSSRLRVSATFWQNPRNHFRCQVQFYGLSENDEWTQDRAKPVTIPEDTFFPSPESSCDVKLVEKSFETDTNLNFQNLSVIGFRILLLKVAGFNLLMTLRLWSS

SEQ ID NO: 22249 - protein, 168 aa, synthetic construct
EDLKNVFPPEVAVFEPSEAEISHTQKATLVCLATGFYPDHVELSWWVNGKEVHSGVSTDPQPLKEQPALNDSRYCLSSRLRVSATFWQNPRNHFRCQVQFYGLSENDEWTQDRAKPVTESSCDVKLVEKSFETDTNLNFQNLSVIGFRILLLKVAGFNLLMTLRLWSS

SEQ ID NO: 22250 - protein, 177 aa, synthetic construct
EDLKNVFPPEVAVFEPSEAEISHTQKATLVCLATGFYPDHVELSWWVNGKEVHSGVSTDPQPLKEQPALNDSRYCLSSRLRVSATFWQNPRNHFRCQVQFYGLSENDEWTQDRAKPVTPEDTFFPSPESSCDVKLVEKSFETDTNLNFQNLSVIGFRILLLKVAGFNLLMTLRLWSS

SEQ ID NO: 22251 - protein, 187 aa, synthetic construct
EDLKNVFPPEVAVFEPSEAEISHTQKATLVCLATGFYPDHVELSWWVNGKEVHSGVSTDPQPLKEQPALNDSRYCLSSRLRVSATFWQNPRNHFRCQVQFYGLSENDEWTQDRAKPVTFPPIKTDVITMDPKDNCSKDANDTLLLQLTNTSAYYMYLLLLLKSVVYFAIITCCLLRRTAFCCNGEKS

SEQ ID NO: 22252 - protein, 185 aa, synthetic construct
EDLKNVFPPEVAVFEPSEAEISHTQKATLVCLATGFYPDHVELSWWVNGKEVHSGVSTDPQPLKEQPALNDSRYCLSSRLRVSATFWQNPRNHFRCQVQFYGLSENDEWTQDRAKPVTPIKTDVITMDPKDNCSKDANDTLLLQLTNTSAYYMYLLLLLKSVVYFAIITCCLLRRTAFCCNGEKS

SEQ ID NO: 22253 - protein, 177 aa, synthetic construct
EDLKNVFPPEVAVFEPSEAEISHTQKATLVCLATGFYPDHVELSWWVNGKEVHSGVSTDPQPLKEQPALNDSRYCLSSRLRVSATFWQNPRNHFRCQVQFYGLSENDEWTQDRAKPVTMDPKDNCSKDANDTLLLQLTNTSAYYMYLLLLLKSVVYFAIITCCLLRRTAFCCNGEKS

SEQ ID NO: 22254 - protein, 185 aa, synthetic construct; identical to SEQ ID NO: 22252

SEQ ID NO: 22255 - protein, 171 aa, synthetic construct
EDLKNVFPPEVAVFEPSEAEISHTQKATLVCLATGFYPDHVELSWWVNGKEVHSGVSTDPQPLKEQPALNDSRYCLSSRLRVSATFWQNPRNHFRCQVQFYGLSENDEWTQDRAKPVTCSKDANDTLLLQLTNTSAYYMYLLLLLKSVVYFAIITCCLLRRTAFCCNGEKS

SEQ ID NO: 22256 - protein, 186 aa, synthetic construct
EDLKNVFPPEVAVFEPSEAEISHTQKATLVCLATGFYPDHVELSWWVNGKEVHSGVSTDPQPLKEQPALNDSRYCLSSRLRVSATFWQNPRNHFRCQVQFYGLSENDEWTQDRAKPVTEVKTDSTDHVKPKETENTKQPSKSCHKPKAIVHTEKVNMMSLTVLGLRMLFAKTVAVNFLLTAKLFFL

SEQ ID NO: 22257 - protein, 179 aa, synthetic construct
EDLKNVFPPEVAVFEPSEAEISHTQKATLVCLATGFYPDHVELSWWVNGKEVHSGVSTDPQPLKEQPALNDSRYCLSSRLRVSATFWQNPRNHFRCQVQFYGLSENDEWTQDRAKPVTDHVKPKETENTKQPSKSCHKPKAIVHTEKVNMMSLTVLGLRMLFAKTVAVNFLLTAKLFFL

SEQ ID NO: 22258 - protein, 186 aa, synthetic construct; identical to SEQ ID NO: 22218

SEQ ID NO: 22259 - protein, 176 aa, synthetic construct; identical to SEQ ID NO: 22219

SEQ ID NO: 22260 - protein, 185 aa, synthetic construct; identical to SEQ ID NO: 22220

SEQ ID NO: 22261 - protein, 195 aa, synthetic construct; identical to SEQ ID NO: 22221

SEQ ID NO: 22262 - protein, 193 aa, synthetic construct; identical to SEQ ID NO: 22222

SEQ ID NO: 22263 - protein, 185 aa, synthetic construct; identical to SEQ ID NO: 22223

SEQ ID NO: 22264 - protein, 193 aa, synthetic construct; identical to SEQ ID NO: 22222

SEQ ID NO: 22265 - protein, 179 aa, synthetic construct; identical to SEQ ID NO: 22225

SEQ ID NO: 22266 - protein, 194 aa, synthetic construct; identical to SEQ ID NO: 22226

SEQ ID NO: 22267 - protein, 187 aa, synthetic construct; identical to SEQ ID NO: 22227

SEQ ID NO: 22268 - protein, 170 aa, synthetic construct
PEVAVFEPSEAEISHTQKATLVCLATGFYPDHVELSWWVNGKEVHSGVSTDPQPLKEQPALNDSRYCLSSRLRVSATFWQNPRNHFRCQVQFYGLSENDEWTQDRAKPVTIPEDTFFPSPESSCDVKLVEKSFETDTNLNFQNLSVIGFRILLLKVAGFNLLMTLRLWSS

SEQ ID NO: 22269 - protein, 160 aa, synthetic construct
PEVAVFEPSEAEISHTQKATLVCLATGFYPDHVELSWWVNGKEVHSGVSTDPQPLKEQPALNDSRYCLSSRLRVSATFWQNPRNHFRCQVQFYGLSENDEWTQDRAKPVTESSCDVKLVEKSFETDTNLNFQNLSVIGFRILLLKVAGFNLLMTLRLWSS

SEQ ID NO: 22270 - protein, 169 aa, synthetic construct
PEVAVFEPSEAEISHTQKATLVCLATGFYPDHVELSWWVNGKEVHSGVSTDPQPLKEQPALNDSRYCLSSRLRVSATFWQNPRNHFRCQVQFYGLSENDEWTQDRAKPVTPEDTFFPSPESSCDVKLVEKSFETDTNLNFQNLSVIGFRILLLKVAGFNLLMTLRLWSS

SEQ ID NO: 22271 - protein, 179 aa, synthetic construct
PEVAVFEPSEAEISHTQKATLVCLATGFYPDHVELSWWVNGKEVHSGVSTDPQPLKEQPALNDSRYCLSSRLRVSATFWQNPRNHFRCQVQFYGLSENDEWTQDRAKPVTFPPIKTDVITMDPKDNCSKDANDTLLLQLTNTSAYYMYLLLLLKSVVYFAIITCCLLRRTAFCCNGEKS

SEQ ID NO: 22272 - protein, 177 aa, synthetic construct
PEVAVFEPSEAEISHTQKATLVCLATGFYPDHVELSWWVNGKEVHSGVSTDPQPLKEQPALNDSRYCLSSRLRVSATFWQNPRNHFRCQVQFYGLSENDEWTQDRAKPVTPIKTDVITMDPKDNCSKDANDTLLLQLTNTSAYYMYLLLLLKSVVYFAIITCCLLRRTAFCCNGEKS

SEQ ID NO: 22273 - protein, 169 aa, synthetic construct
PEVAVFEPSEAEISHTQKATLVCLATGFYPDHVELSWWVNGKEVHSGVSTDPQPLKEQPALNDSRYCLSSRLRVSATFWQNPRNHFRCQVQFYGLSENDEWTQDRAKPVTMDPKDNCSKDANDTLLLQLTNTSAYYMYLLLLLKSVVYFAIITCCLLRRTAFCCNGEKS

SEQ ID NO: 22274 - protein, 177 aa, synthetic construct; identical to SEQ ID NO: 22272

SEQ ID NO: 22275 - protein, 163 aa, synthetic construct
PEVAVFEPSEAEISHTQKATLVCLATGFYPDHVELSWWVNGKEVHSGVSTDPQPLKEQPALNDSRYCLSSRLRVSATFWQNPRNHFRCQVQFYGLSENDEWTQDRAKPVTCSKDANDTLLLQLTNTSAYYMYLLLLLKSVVYFAIITCCLLRRTAFCCNGEKS

SEQ ID NO: 22276 - protein, 178 aa, synthetic construct
PEVAVFEPSEAEISHTQKATLVCLATGFYPDHVELSWWVNGKEVHSGVSTDPQPLKEQPALNDSRYCLSSRLRVSATFWQNPRNHFRCQVQFYGLSENDEWTQDRAKPVTEVKTDSTDHVKPKETENTKQPSKSCHKPKAIVHTEKVNMMSLTVLGLRMLFAKTVAVNFLLTAKLFFL

SEQ ID NO: 22277 - protein, 171 aa, synthetic construct
PEVAVFEPSEAEISHTQKATLVCLATGFYPDHVELSWWVNGKEVHSGVSTDPQPLKEQPALNDSRYCLSSRLRVSATFWQNPRNHFRCQVQFYGLSENDEWTQDRAKPVTDHVKPKETENTKQPSKSCHKPKAIVHTEKVNMMSLTVLGLRMLFAKTVAVNFLLTAKLFFL

SEQ ID NO: 22278 - protein, 164 aa, synthetic construct
DKQLDADVSPKPTIFLPSIAETKLQKAGTYLCLLEKFFPDVIKIHWQEKKSNTILGSQEGNTMKTNDTYMKFSWLTVPEKSLDKEHRCIVRHENNKNGVDQEIIIPEDTFFPSPESSCDVKLVEKSFETDTNLNFQNLSVIGFRILLLKVAGFNLLMTLRLWSS

SEQ ID NO: 22279 - protein, 154 aa, synthetic construct
DKQLDADVSPKPTIFLPSIAETKLQKAGTYLCLLEKFFPDVIKIHWQEKKSNTILGSQEGNTMKTNDTYMKFSWLTVPEKSLDKEHRCIVRHENNKNGVDQEIIESSCDVKLVEKSFETDTNLNFQNLSVIGFRILLLKVAGFNLLMTLRLWSS

SEQ ID NO: 22280 - protein, 163 aa, synthetic construct
DKQLDADVSPKPTIFLPSIAETKLQKAGTYLCLLEKFFPDVIKIHWQEKKSNTILGSQEGNTMKTNDTYMKFSWLTVPEKSLDKEHRCIVRHENNKNGVDQEIIPEDTFFPSPESSCDVKLVEKSFETDTNLNFQNLSVIGFRILLLKVAGFNLLMTLRLWSS

SEQ ID NO: 22281 - protein, 157 aa, synthetic construct
DKQLDADVSPKPTIFLPSIAETKLQKAGTYLCLLEKFFPDVIKIHWQEKKSNTILGSQEGNTMKTNDTYMKFSWLTVPEKSLDKEHRCIVRHENNKNGVDQEIIGRADCGFTSESYQQGVLSATILYEILLGKATLYAVLVSALVLMAMVKRKDSRG

SEQ ID NO: 22282 - protein, 155 aa, synthetic construct
DKQLDADVSPKPTIFLPSIAETKLQKAGTYLCLLEKFFPDVIKIHWQEKKSNTILGSQEGNTMKTNDTYMKFSWLTVPEKSLDKEHRCIVRHENNKNGVDQEIIADCGFTSESYQQGVLSATILYEILLGKATLYAVLVSALVLMAMVKRKDSRG

SEQ ID NO: 22283 - protein, 165 aa, synthetic construct
DKQLDADVSPKPTIFLPSIAETKLQKAGTYLCLLEKFFPDVIKIHWQEKKSNTILGSQEGNTMKTNDTYMKFSWLTVPEKSLDKEHRCIVRHENNKNGVDQEIIQIVSAEAWGRADCGFTSESYQQGVLSATILYEILLGKATLYAVLVSALVLMAMVKRKDSRG

SEQ ID NO: 22284 - protein, 172 aa, synthetic construct
DKQLDADVSPKPTIFLPSIAETKLQKAGTYLCLLEKFFPDVIKIHWQEKKSNTILGSQEGNTMKTNDTYMKFSWLTVPEKSLDKEHRCIVRHENNKNGVDQEIIEVKTDSTDHVKPKETENTKQPSKSCHKPKAIVHTEKVNMMSLTVLGLRMLFAKTVAVNFLLTAKLFFL

SEQ ID NO: 22285 - protein, 165 aa, synthetic construct
DKQLDADVSPKPTIFLPSIAETKLQKAGTYLCLLEKFFPDVIKIHWQEKKSNTILGSQEGNTMKTNDTYMKFSWLTVPEKSLDKEHRCIVRHENNKNGVDQEIIDHVKPKETENTKQPSKSCHKPKAIVHTEKVNMMSLTVLGLRMLFAKTVAVNFLLTAKLFFL

SEQ ID NO: 22286 - protein, 166 aa, synthetic construct
DKQLDADVSPKPTIFLPSIAETKLQKAGTYLCLLEKFFPDVIKIHWQEKKSNTILGSQEGNTMKTNDTYMKFSWLTVPEKSLDKEHRCIVRHENNKNGVDQEIIFPIPEDTFFPSPESSCDVKLVEKSFETDTNLNFQNLSVIGFRILLLKVAGFNLLMTLRLWSS

SEQ ID NO: 22287 - protein, 156 aa, synthetic construct
DKQLDADVSPKPTIFLPSIAETKLQKAGTYLCLLEKFFPDVIKIHWQEKKSNTILGSQEGNTMKTNDTYMKFSWLTVPEKSLDKEHRCIVRHENNKNGVDQEIIFPESSCDVKLVEKSFETDTNLNFQNLSVIGFRILLLKVAGFNLLMTLRLWSS

SEQ ID NO: 22288 - protein, 165 aa, synthetic construct
DKQLDADVSPKPTIFLPSIAETKLQKAGTYLCLLEKFFPDVIKIHWQEKKSNTILGSQEGNTMKTNDTYMKFSWLTVPEKSLDKEHRCIVRHENNKNGVDQEIIFPPEDTFFPSPESSCDVKLVEKSFETDTNLNFQNLSVIGFRILLLKVAGFNLLMTLRLWSS

SEQ ID NO: 22289 - protein, 159 aa, synthetic construct
DKQLDADVSPKPTIFLPSIAETKLQKAGTYLCLLEKFFPDVIKIHWQEKKSNTILGSQEGNTMKTNDTYMKFSWLTVPEKSLDKEHRCIVRHENNKNGVDQEIIFPGRADCGFTSESYQQGVLSATILYEILLGKATLYAVLVSALVLMAMVKRKDSRG

SEQ ID NO: 22290 - protein, 157 aa, synthetic construct
DKQLDADVSPKPTIFLPSIAETKLQKAGTYLCLLEKFFPDVIKIHWQEKKSNTILGSQEGNTMKTNDTYMKFSWLTVPEKSLDKEHRCIVRHENNKNGVDQEIIFPADCGFTSESYQQGVLSATILYEILLGKATLYAVLVSALVLMAMVKRKDSRG

SEQ ID NO: 22291 - protein, 167 aa, synthetic construct
DKQLDADVSPKPTIFLPSIAETKLQKAGTYLCLLEKFFPDVIKIHWQEKKSNTILGSQEGNTMKTNDTYMKFSWLTVPEKSLDKEHRCIVRHENNKNGVDQEIIFPQIVSAEAWGRADCGFTSESYQQGVLSATILYEILLGKATLYAVLVSALVLMAMVKRKDSRG

SEQ ID NO: 22292 - protein, 174 aa, synthetic construct
DKQLDADVSPKPTIFLPSIAETKLQKAGTYLCLLEKFFPDVIKIHWQEKKSNTILGSQEGNTMKTNDTYMKFSWLTVPEKSLDKEHRCIVRHENNKNGVDQEIIFPEVKTDSTDHVKPKETENTKQPSKSCHKPKAIVHTEKVNMMSLTVLGLRMLFAKTVAVNFLLTAKLFFL

SEQ ID NO: 22293 - protein, 167 aa, synthetic construct
DKQLDADVSPKPTIFLPSIAETKLQKAGTYLCLLEKFFPDVIKIHWQEKKSNTILGSQEGNTMKTNDTYMKFSWLTVPEKSLDKEHRCIVRHENNKNGVDQEIIFPDHVKPKETENTKQPSKSCHKPKAIVHTEKVNMMSLTVLGLRMLFAKTVAVNFLLTAKLFFL

SEQ ID NO: 22294 - protein, 174 aa, synthetic construct
DKQLDADVSPKPTIFLPSIAETKLQKAGTYLCLLEKFFPDVIKIHWQEKKSNTILGSQEGNTMKTNDTYMKFSWLTVPEKSLDKEHRCIVRHENNKNGVDQEIIFPPIKTDVITIPEDTFFPSPESSCDVKLVEKSFETDTNLNFQNLSVIGFRILLLKVAGFNLLMTLRLWSS

SEQ ID NO: 22295 - protein, 164 aa, synthetic construct
DKQLDADVSPKPTIFLPSIAETKLQKAGTYLCLLEKFFPDVIKIHWQEKKSNTILGSQEGNTMKTNDTYMKFSWLTVPEKSLDKEHRCIVRHENNKNGVDQEIIFPPIKTDVITESSCDVKLVEKSFETDTNLNFQNLSVIGFRILLLKVAGFNLLMTLRLWSS

SEQ ID NO: 22296 - protein, 173 aa, synthetic construct
DKQLDADVSPKPTIFLPSIAETKLQKAGTYLCLLEKFFPDVIKIHWQEKKSNTILGSQEGNTMKTNDTYMKFSWLTVPEKSLDKEHRCIVRHENNKNGVDQEIIFPPIKTDVITPEDTFFPSPESSCDVKLVEKSFETDTNLNFQNLSVIGFRILLLKVAGFNLLMTLRLWSS

SEQ ID NO: 22297 - protein, 167 aa, synthetic construct
DKQLDADVSPKPTIFLPSIAETKLQKAGTYLCLLEKFFPDVIKIHWQEKKSNTILGSQEGNTMKTNDTYMKFSWLTVPEKSLDKEHRCIVRHENNKNGVDQEIIFPPIKTDVITGRADCGFTSESYQQGVLSATILYEILLGKATLYAVLVSALVLMAMVKRKDSRG

SEQ ID NO: 22298 - protein, 165 aa, synthetic construct
DKQLDADVSPKPTIFLPSIAETKLQKAGTYLCLLEKFFPDVIKIHWQEKKSNTILGSQEGNTMKTNDTYMKFSWLTVPEKSLDKEHRCIVRHENNKNGVDQEIIFPPIKTDVITADCGFTSESYQQGVLSATILYEILLGKATLYAVLVSALVLMAMVKRKDSRG

SEQ ID NO: 22299 - protein, 175 aa, synthetic construct
DKQLDADVSPKPTIFLPSIAETKLQKAGTYLCLLEKFFPDVIKIHWQEKKSNTILGSQEGNTMKTNDTYMKFSWLTVPEKSLDKEHRCIVRHENNKNGVDQEIIFPPIKTDVITQIVSAEAWGRADCGFTSESYQQGVLSATILYEILLGKATLYAVLVSALVLMAMVKRKDSRG

SEQ ID NO: 22300 - protein, 182 aa, synthetic construct
DKQLDADVSPKPTIFLPSIAETKLQKAGTYLCLLEKFFPDVIKIHWQEKKSNTILGSQEGNTMKTNDTYMKFSWLTVPEKSLDKEHRCIVRHENNKNGVDQEIIFPPIKTDVITEVKTDSTDHVKPKETENTKQPSKSCHKPKAIVHTEKVNMMSLTVLGLRMLFAKTVAVNFLLTAKLFFL

SEQ ID NO: 22301 - protein, 175 aa, synthetic construct
DKQLDADVSPKPTIFLPSIAETKLQKAGTYLCLLEKFFPDVIKIHWQEKKSNTILGSQEGNTMKTNDTYMKFSWLTVPEKSLDKEHRCIVRHENNKNGVDQEIIFPPIKTDVITDHVKPKETENTKQPSKSCHKPKAIVHTEKVNMMSLTVLGLRMLFAKTVAVNFLLTAKLFFL

SEQ ID NO: 22302 - protein, 127 aa, synthetic construct
PIKTDVITMDPKDNCSKDANDTLLLQLTNTSAYYMYLLLLLKSVVYFAIITCCLLRRTAFCCNGEKSIPEDTFFPSPESSCDVKLVEKSFETDTNLNFQNLSVIGFRILLLKVAGFNLLMTLRLWSS

SEQ ID NO: 22303 - protein, 117 aa, synthetic construct
PIKTDVITMDPKDNCSKDANDTLLLQLTNTSAYYMYLLLLLKSVVYFAIITCCLLRRTAFCCNGEKSESSCDVKLVEKSFETDTNLNFQNLSVIGFRILLLKVAGFNLLMTLRLWSS

SEQ ID NO: 22304 - protein, 126 aa, synthetic construct
PIKTDVITMDPKDNCSKDANDTLLLQLTNTSAYYMYLLLLLKSVVYFAIITCCLLRRTAFCCNGEKSPEDTFFPSPESSCDVKLVEKSFETDTNLNFQNLSVIGFRILLLKVAGFNLLMTLRLWSS

SEQ ID NO: 22305 - protein, 120 aa, synthetic construct
PIKTDVITMDPKDNCSKDANDTLLLQLTNTSAYYMYLLLLLKSVVYFAIITCCLLRRTAFCCNGEKSGRADCGFTSESYQQGVLSATILYEILLGKATLYAVLVSALVLMAMVKRKDSRG

SEQ ID NO: 22306 - protein, 118 aa, synthetic construct
PIKTDVITMDPKDNCSKDANDTLLLQLTNTSAYYMYLLLLLKSVVYFAIITCCLLRRTAFCCNGEKSADCGFTSESYQQGVLSATILYEILLGKATLYAVLVSALVLMAMVKRKDSRG

SEQ ID NO: 22307 - protein, 128 aa, synthetic construct
PIKTDVITMDPKDNCSKDANDTLLLQLTNTSAYYMYLLLLLKSVVYFAIITCCLLRRTAFCCNGEKSQIVSAEAWGRADCGFTSESYQQGVLSATILYEILLGKATLYAVLVSALVLMAMVKRKDSRG

SEQ ID NO: 22308 - protein, 135 aa, synthetic construct
PIKTDVITMDPKDNCSKDANDTLLLQLTNTSAYYMYLLLLLKSVVYFAIITCCLLRRTAFCCNGEKSEVKTDSTDHVKPKETENTKQPSKSCHKPKAIVHTEKVNMMSLTVLGLRMLFAKTVAVNFLLTAKLFFL

SEQ ID NO: 22309 - protein, 128 aa, synthetic construct
PIKTDVITMDPKDNCSKDANDTLLLQLTNTSAYYMYLLLLLKSVVYFAIITCCLLRRTAFCCNGEKSDHVKPKETENTKQPSKSCHKPKAIVHTEKVNMMSLTVLGLRMLFAKTVAVNFLLTAKLFFL

SEQ ID NO: 22310 - protein, 179 aa, synthetic construct
DKQLDADVSPKPTIFLPSIAETKLQKAGTYLCLLEKFFPDVIKIHWQEKKSNTILGSQEGNTMKTNDTYMKFSWLTVPEKSLDKEHRCIVRHENNKNGVDQEIIFPPIKTDVITMDPKDIPEDTFFPSPESSCDVKLVEKSFETDTNLNFQNLSVIGFRILLLKVAGFNLLMTLRLWSS

SEQ ID NO: 22311 - protein, 169 aa, synthetic construct
DKQLDADVSPKPTIFLPSIAETKLQKAGTYLCLLEKFFPDVIKIHWQEKKSNTILGSQEGNTMKTNDTYMKFSWLTVPEKSLDKEHRCIVRHENNKNGVDQEIIFPPIKTDVITMDPKDESSCDVKLVEKSFETDTNLNFQNLSVIGFRILLLKVAGFNLLMTLRLWSS

SEQ ID NO: 22312 - protein, 178 aa, synthetic construct
DKQLDADVSPKPTIFLPSIAETKLQKAGTYLCLLEKFFPDVIKIHWQEKKSNTILGSQEGNTMKTNDTYMKFSWLTVPEKSLDKEHRCIVRHENNKNGVDQEIIFPPIKTDVITMDPKDPEDTFFPSPESSCDVKLVEKSFETDTNLNFQNLSVIGFRILLLKVAGFNLLMTLRLWSS

SEQ ID NO: 22313 - protein, 172 aa, synthetic construct
DKQLDADVSPKPTIFLPSIAETKLQKAGTYLCLLEKFFPDVIKIHWQEKKSNTILGSQEGNTMKTNDTYMKFSWLTVPEKSLDKEHRCIVRHENNKNGVDQEIIFPPIKTDVITMDPKDGRADCGFTSESYQQGVLSATILYEILLGKATLYAVLVSALVLMAMVKRKDSRG

SEQ ID NO: 22314 - protein, 170 aa, synthetic construct
DKQLDADVSPKPTIFLPSIAETKLQKAGTYLCLLEKFFPDVIKIHWQEKKSNTILGSQEGNTMKTNDTYMKFSWLTVPEKSLDKEHRCIVRHENNKNGVDQEIIFPPIKTDVITMDPKDADCGFTSESYQQGVLSATILYEILLGKATLYAVLVSALVLMAMVKRKDSRG

SEQ ID NO: 22315 - protein, 180 aa, synthetic construct
DKQLDADVSPKPTIFLPSIAETKLQKAGTYLCLLEKFFPDVIKIHWQEKKSNTILGSQEGNTMKTNDTYMKFSWLTVPEKSLDKEHRCIVRHENNKNGVDQEIIFPPIKTDVITMDPKDQIVSAEAWGRADCGFTSESYQQGVLSATILYEILLGKATLYAVLVSALVLMAMVKRKDSRG

SEQ ID NO: 22316 - protein, 187 aa, synthetic construct
DKQLDADVSPKPTIFLPSIAETKLQKAGTYLCLLEKFFPDVIKIHWQEKKSNTILGSQEGNTMKTNDTYMKFSWLTVPEKSLDKEHRCIVRHENNKNGVDQEIIFPPIKTDVITMDPKDEVKTDSTDHVKPKETENTKQPSKSCHKPKAIVHTEKVNMMSLTVLGLRMLFAKTVAVNFLLTAKLFFL

SEQ ID NO: 22317 - protein, 180 aa, synthetic construct
DKQLDADVSPKPTIFLPSIAETKLQKAGTYLCLLEKFFPDVIKIHWQEKKSNTILGSQEGNTMKTNDTYMKFSWLTVPEKSLDKEHRCIVRHENNKNGVDQEIIFPPIKTDVITMDPKDDHVKPKETENTKQPSKSCHKPKAIVHTEKVNMMSLTVLGLRMLFAKTVAVNFLLTAKLFFL

SEQ ID NO: 22318 - protein, 174 aa, synthetic construct; identical to SEQ ID NO: 22294

SEQ ID NO: 22319 - protein, 164 aa, synthetic construct; identical to SEQ ID NO: 22295

SEQ ID NO: 22320 - protein, 173 aa, synthetic construct; identical to SEQ ID NO: 22296

SEQ ID NO: 22321 - protein, 167 aa, synthetic construct; identical to SEQ ID NO: 22297

SEQ ID NO: 22322 - protein, 165 aa, synthetic construct; identical to SEQ ID NO: 22298

SEQ ID NO: 22323 - protein, 175 aa, synthetic construct; identical to SEQ ID NO: 22299

SEQ ID NO: 22324 - protein, 182 aa, synthetic construct; identical to SEQ ID NO: 22300

SEQ ID NO: 22325 - protein, 175 aa, synthetic construct; identical to SEQ ID NO: 22301

SEQ ID NO: 22326 - protein, 155 aa, synthetic construct
PKPTIFLPSIAETKLQKAGTYLCLLEKFFPDVIKIHWQEKKSNTILGSQEGNTMKTNDTYMKFSWLTVPEKSLDKEHRCIVRHENNKNGVDQEIIIPEDTFFPSPESSCDVKLVEKSFETDTNLNFQNLSVIGFRILLLKVAGFNLLMTLRLWSS

SEQ ID NO: 22327 - protein, 145 aa, synthetic construct
PKPTIFLPSIAETKLQKAGTYLCLLEKFFPDVIKIHWQEKKSNTILGSQEGNTMKTNDTYMKFSWLTVPEKSLDKEHRCIVRHENNKNGVDQEIIESSCDVKLVEKSFETDTNLNFQNLSVIGFRILLLKVAGFNLLMTLRLWSS

SEQ ID NO: 22328 - protein, 154 aa, synthetic construct
PKPTIFLPSIAETKLQKAGTYLCLLEKFFPDVIKIHWQEKKSNTILGSQEGNTMKTNDTYMKFSWLTVPEKSLDKEHRCIVRHENNKNGVDQEIIPEDTFFPSPESSCDVKLVEKSFETDTNLNFQNLSVIGFRILLLKVAGFNLLMTLRLWSS

SEQ ID NO: 22329 - protein, 148 aa, synthetic construct
PKPTIFLPSIAETKLQKAGTYLCLLEKFFPDVIKIHWQEKKSNTILGSQEGNTMKTNDTYMKFSWLTVPEKSLDKEHRCIVRHENNKNGVDQEIIGRADCGFTSESYQQGVLSATILYEILLGKATLYAVLVSALVLMAMVKRKDSRG

SEQ ID NO: 22330 - protein, 146 aa, synthetic construct
PKPTIFLPSIAETKLQKAGTYLCLLEKFFPDVIKIHWQEKKSNTILGSQEGNTMKTNDTYMKFSWLTVPEKSLDKEHRCIVRHENNKNGVDQEIIADCGFTSESYQQGVLSATILYEILLGKATLYAVLVSALVLMAMVKRKDSRG

SEQ ID NO: 22331 - protein, 156 aa, synthetic construct
PKPTIFLPSIAETKLQKAGTYLCLLEKFFPDVIKIHWQEKKSNTILGSQEGNTMKTNDTYMKFSWLTVPEKSLDKEHRCIVRHENNKNGVDQEIIQIVSAEAWGRADCGFTSESYQQGVLSATILYEILLGKATLYAVLVSALVLMAMVKRKDSRG

SEQ ID NO: 22332 - protein, 164 aa, synthetic construct; identical to SEQ ID NO: 18722

SEQ ID NO: 22333 - protein, 162 aa, synthetic construct
PKPTIFLPSIAETKLQKAGTYLCLLEKFFPDVIKIHWQEKKSNTILGSQEGNTMKTNDTYMKFSWLTVPEKSLDKEHRCIVRHENNKNGVDQEIIPIKTDVITMDPKDNCSKDANDTLLLQLTNTSAYYMYLLLLLKSVVYFAIITCCLLRRTAFCCNGEKS

SEQ ID NO: 22334 - protein, 154 aa, synthetic construct
PKPTIFLPSIAETKLQKAGTYLCLLEKFFPDVIKIHWQEKKSNTILGSQEGNTMKTNDTYMKFSWLTVPEKSLDKEHRCIVRHENNKNGVDQEIIMDPKDNCSKDANDTLLLQLTNTSAYYMYLLLLLKSVVYFAIITCCLLRRTAFCCNGEKS

SEQ ID NO: 22335 - protein, 162 aa, synthetic construct; identical to SEQ ID NO: 22333

SEQ ID NO: 22336 - protein, 148 aa, synthetic construct
PKPTIFLPSIAETKLQKAGTYLCLLEKFFPDVIKIHWQEKKSNTILGSQEGNTMKTNDTYMKFSWLTVPEKSLDKEHRCIVRHENNKNGVDQEIICSKDANDTLLLQLTNTSAYYMYLLLLLKSVVYFAIITCCLLRRTAFCCNGEKS

SEQ ID NO: 22337 - protein, 163 aa, synthetic construct
PKPTIFLPSIAETKLQKAGTYLCLLEKFFPDVIKIHWQEKKSNTILGSQEGNTMKTNDTYMKFSWLTVPEKSLDKEHRCIVRHENNKNGVDQEIIEVKTDSTDHVKPKETENTKQPSKSCHKPKAIVHTEKVNMMSLTVLGLRMLFAKTVAVNFLLTAKLFFL

SEQ ID NO: 22338 - protein, 156 aa, synthetic construct
PKPTIFLPSIAETKLQKAGTYLCLLEKFFPDVIKIHWQEKKSNTILGSQEGNTMKTNDTYMKFSWLTVPEKSLDKEHRCIVRHENNKNGVDQEIIDHVKPKETENTKQPSKSCHKPKAIVHTEKVNMMSLTVLGLRMLFAKTVAVNFLLTAKLFFL

SEQ ID NO: 22339 - protein, 145 aa, synthetic construct
SQPHTKPSVFVMKNGTNVACLVKEFYPKDIRINLVSSKKITEFDPAIVISPSGKYNAVKLGKYEDSNSVTCSVQHDNKTVHSTDFIPEDTFFPSPESSCDVKLVEKSFETDTNLNFQNLSVIGFRILLLKVAGFNLLMTLRLWSS

SEQ ID NO: 22340 - protein, 135 aa, synthetic construct
SQPHTKPSVFVMKNGTNVACLVKEFYPKDIRINLVSSKKITEFDPAIVISPSGKYNAVKLGKYEDSNSVTCSVQHDNKTVHSTDFESSCDVKLVEKSFETDTNLNFQNLSVIGFRILLLKVAGFNLLMTLRLWSS

SEQ ID NO: 22341 - protein, 144 aa, synthetic construct
SQPHTKPSVFVMKNGTNVACLVKEFYPKDIRINLVSSKKITEFDPAIVISPSGKYNAVKLGKYEDSNSVTCSVQHDNKTVHSTDFPEDTFFPSPESSCDVKLVEKSFETDTNLNFQNLSVIGFRILLLKVAGFNLLMTLRLWSS

SEQ ID NO: 22342 - protein, 138 aa, synthetic construct
SQPHTKPSVFVMKNGTNVACLVKEFYPKDIRINLVSSKKITEFDPAIVISPSGKYNAVKLGKYEDSNSVTCSVQHDNKTVHSTDFGRADCGFTSESYQQGVLSATILYEILLGKATLYAVLVSALVLMAMVKRKDSRG

SEQ ID NO: 22343 - protein, 136 aa, synthetic construct
SQPHTKPSVFVMKNGTNVACLVKEFYPKDIRINLVSSKKITEFDPAIVISPSGKYNAVKLGKYEDSNSVTCSVQHDNKTVHSTDFADCGFTSESYQQGVLSATILYEILLGKATLYAVLVSALVLMAMVKRKDSRG

SEQ ID NO: 22344 - protein, 146 aa, synthetic construct
SQPHTKPSVFVMKNGTNVACLVKEFYPKDIRINLVSSKKITEFDPAIVISPSGKYNAVKLGKYEDSNSVTCSVQHDNKTVHSTDFQIVSAEAWGRADCGFTSESYQQGVLSATILYEILLGKATLYAVLVSALVLMAMVKRKDSRG

SEQ ID NO: 22345 - protein, 154 aa, synthetic construct
SQPHTKPSVFVMKNGTNVACLVKEFYPKDIRINLVSSKKITEFDPAIVISPSGKYNAVKLGKYEDSNSVTCSVQHDNKTVHSTDFFPPIKTDVITMDPKDNCSKDANDTLLLQLTNTSAYYMYLLLLLKSVVYFAIITCCLLRRTAFCCNGEKS

SEQ ID NO: 22346 - protein, 152 aa, synthetic construct
SQPHTKPSVFVMKNGTNVACLVKEFYPKDIRINLVSSKKITEFDPAIVISPSGKYNAVKLGKYEDSNSVTCSVQHDNKTVHSTDFPIKTDVITMDPKDNCSKDANDTLLLQLTNTSAYYMYLLLLLKSVVYFAIITCCLLRRTAFCCNGEKS

SEQ ID NO: 22347 - protein, 144 aa, synthetic construct
SQPHTKPSVFVMKNGTNVACLVKEFYPKDIRINLVSSKKITEFDPAIVISPSGKYNAVKLGKYEDSNSVTCSVQHDNKTVHSTDFMDPKDNCSKDANDTLLLQLTNTSAYYMYLLLLLKSVVYFAIITCCLLRRTAFCCNGEKS

SEQ ID NO: 22348 - protein, 153 aa, synthetic construct; identical to SEQ ID NO: 8874

SEQ ID NO: 22349 - protein, 146 aa, synthetic construct
SQPHTKPSVFVMKNGTNVACLVKEFYPKDIRINLVSSKKITEFDPAIVISPSGKYNAVKLGKYEDSNSVTCSVQHDNKTVHSTDFDHVKPKETENTKQPSKSCHKPKAIVHTEKVNMMSLTVLGLRMLFAKTVAVNFLLTAKLFFL

SEQ ID NO: 22350 - protein, 152 aa, synthetic construct
SQPHTKPSVFVMKNGTNVACLVKEFYPKDIRINLVSSKKITEFDPAIVISPSGKYNAVKLGKYEDSNSVTCSVQHDNKTVHSTDFEVKTDSTIPEDTFFPSPESSCDVKLVEKSFETDTNLNFQNLSVIGFRILLLKVAGFNLLMTLRLWSS

SEQ ID NO: 22351 - protein, 142 aa, synthetic construct
SQPHTKPSVFVMKNGTNVACLVKEFYPKDIRINLVSSKKITEFDPAIVISPSGKYNAVKLGKYEDSNSVTCSVQHDNKTVHSTDFEVKTDSTESSCDVKLVEKSFETDTNLNFQNLSVIGFRILLLKVAGFNLLMTLRLWSS

SEQ ID NO: 22352 - protein, 151 aa, synthetic construct
SQPHTKPSVFVMKNGTNVACLVKEFYPKDIRINLVSSKKITEFDPAIVISPSGKYNAVKLGKYEDSNSVTCSVQHDNKTVHSTDFEVKTDSTPEDTFFPSPESSCDVKLVEKSFETDTNLNFQNLSVIGFRILLLKVAGFNLLMTLRLWSS

SEQ ID NO: 22353 - protein, 145 aa, synthetic construct
SQPHTKPSVFVMKNGTNVACLVKEFYPKDIRINLVSSKKITEFDPAIVISPSGKYNAVKLGKYEDSNSVTCSVQHDNKTVHSTDFEVKTDSTGRADCGFTSESYQQGVLSATILYEILLGKATLYAVLVSALVLMAMVKRKDSRG

SEQ ID NO: 22354 - protein, 143 aa, synthetic construct
SQPHTKPSVFVMKNGTNVACLVKEFYPKDIRINLVSSKKITEFDPAIVISPSGKYNAVKLGKYEDSNSVTCSVQHDNKTVHSTDFEVKTDSTADCGFTSESYQQGVLSATILYEILLGKATLYAVLVSALVLMAMVKRKDSRG

SEQ ID NO: 22355 - protein, 153 aa, synthetic construct
SQPHTKPSVFVMKNGTNVACLVKEFYPKDIRINLVSSKKITEFDPAIVISPSGKYNAVKLGKYEDSNSVTCSVQHDNKTVHSTDFEVKTDSTQIVSAEAWGRADCGFTSESYQQGVLSATILYEILLGKATLYAVLVSALVLMAMVKRKDSRG

SEQ ID NO: 22356 - protein, 161 aa, synthetic construct
SQPHTKPSVFVMKNGTNVACLVKEFYPKDIRINLVSSKKITEFDPAIVISPSGKYNAVKLGKYEDSNSVTCSVQHDNKTVHSTDFEVKTDSTFPPIKTDVITMDPKDNCSKDANDTLLLQLTNTSAYYMYLLLLLKSVVYFAIITCCLLRRTAFCCNGEKS

SEQ ID NO: 22357 - protein, 159 aa, synthetic construct
SQPHTKPSVFVMKNGTNVACLVKEFYPKDIRINLVSSKKITEFDPAIVISPSGKYNAVKLGKYEDSNSVTCSVQHDNKTVHSTDFEVKTDSTPIKTDVITMDPKDNCSKDANDTLLLQLTNTSAYYMYLLLLLKSVVYFAIITCCLLRRTAFCCNGEKS

SEQ ID NO: 22358 - protein, 151 aa, synthetic construct
SQPHTKPSVFVMKNGTNVACLVKEFYPKDIRINLVSSKKITEFDPAIVISPSGKYNAVKLGKYEDSNSVTCSVQHDNKTVHSTDFEVKTDSTMDPKDNCSKDANDTLLLQLTNTSAYYMYLLLLLKSVVYFAIITCCLLRRTAFCCNGEKS

SEQ ID NO: 22359 - protein, 159 aa, synthetic construct; identical to SEQ ID NO: 22357

SEQ ID NO: 22360 - protein, 145 aa, synthetic construct
SQPHTKPSVFVMKNGTNVACLVKEFYPKDIRINLVSSKKITEFDPAIVISPSGKYNAVKLGKYEDSNSVTCSVQHDNKTVHSTDFEVKTDSTCSKDANDTLLLQLTNTSAYYMYLLLLLKSVVYFAIITCCLLRRTAFCCNGEKS

SEQ ID NO: 22361 - protein, 145 aa, synthetic construct; identical to SEQ ID NO: 22339

SEQ ID NO: 22362 - protein, 135 aa, synthetic construct; identical to SEQ ID NO: 22340

SEQ ID NO: 22363 - protein, 144 aa, synthetic construct; identical to SEQ ID NO: 22341

SEQ ID NO: 22364 - protein, 138 aa, synthetic construct; identical to SEQ ID NO: 22342

SEQ ID NO: 22365 - protein, 136 aa, synthetic construct; identical to SEQ ID NO: 22343

SEQ ID NO: 22366 - protein, 146 aa, synthetic construct; identical to SEQ ID NO: 22344

SEQ ID NO: 22367 - protein, 154 aa, synthetic construct; identical to SEQ ID NO: 22345

SEQ ID NO: 22368 - protein, 152 aa, synthetic construct; identical to SEQ ID NO: 22346

SEQ ID NO: 22369 - protein, 144 aa, synthetic construct; identical to SEQ ID NO: 22347

SEQ ID NO: 22370 - protein, 152 aa, synthetic construct; identical to SEQ ID NO: 22346

SEQ ID NO: 22371 - protein, 138 aa, synthetic construct
SQPHTKPSVFVMKNGTNVACLVKEFYPKDIRINLVSSKKITEFDPAIVISPSGKYNAVKLGKYEDSNSVTCSVQHDNKTVHSTDFCSKDANDTLLLQLTNTSAYYMYLLLLLKSVVYFAIITCCLLRRTAFCCNGEKS

SEQ ID NO: 22372 - protein, 152 aa, synthetic construct; identical to SEQ ID NO: 22350

SEQ ID NO: 22373 - protein, 142 aa, synthetic construct; identical to SEQ ID NO: 22351

SEQ ID NO: 22374 - protein, 151 aa, synthetic construct; identical to SEQ ID NO: 22352

SEQ ID NO: 22375 - protein, 145 aa, synthetic construct; identical to SEQ ID NO: 22353

SEQ ID NO: 22376 - protein, 143 aa, synthetic construct; identical to SEQ ID NO: 22354

SEQ ID NO: 22377 - protein, 153 aa, synthetic construct; identical to SEQ ID NO: 22355

SEQ ID NO: 22378 - protein, 161 aa, synthetic construct; identical to SEQ ID NO: 22356

SEQ ID NO: 22379 - protein, 159 aa, synthetic construct; identical to SEQ ID NO: 22357

SEQ ID NO: 22380 - protein, 151 aa, synthetic construct; identical to SEQ ID NO: 22358

SEQ ID NO: 22381 - protein, 159 aa, synthetic construct; identical to SEQ ID NO: 22357

SEQ ID NO: 22382 - protein, 145 aa, synthetic construct; identical to SEQ ID NO: 22360

SEQ ID NO: 22383 - protein, 123 aa, synthetic construct
LRDSKSSDKSVCLFTDFDSQTNVSQSKDSDVYITDKTVLDMRSMDFKSNSAVAWSNKSDFACANAFNNSIGRADCGFTSESYQQGVLSATILYEILLGKATLYAVLVSALVLMAMVKRKDSRG

SEQ ID NO: 22384 - protein, 121 aa, synthetic construct
LRDSKSSDKSVCLFTDFDSQTNVSQSKDSDVYITDKTVLDMRSMDFKSNSAVAWSNKSDFACANAFNNSIADCGFTSESYQQGVLSATILYEILLGKATLYAVLVSALVLMAMVKRKDSRG

SEQ ID NO: 22385 - protein, 131 aa, synthetic construct
LRDSKSSDKSVCLFTDFDSQTNVSQSKDSDVYITDKTVLDMRSMDFKSNSAVAWSNKSDFACANAFNNSIQIVSAEAWGRADCGFTSESYQQGVLSATILYEILLGKATLYAVLVSALVLMAMVKRKDSRG

SEQ ID NO: 22386 - protein, 139 aa, synthetic construct
LRDSKSSDKSVCLFTDFDSQTNVSQSKDSDVYITDKTVLDMRSMDFKSNSAVAWSNKSDFACANAFNNSIFPPIKTDVITMDPKDNCSKDANDTLLLQLTNTSAYYMYLLLLLKSVVYFAIITCCLLRRTAFCCNGEKS

SEQ ID NO: 22387 - protein, 137 aa, synthetic construct
LRDSKSSDKSVCLFTDFDSQTNVSQSKDSDVYITDKTVLDMRSMDFKSNSAVAWSNKSDFACANAFNNSIPIKTDVITMDPKDNCSKDANDTLLLQLTNTSAYYMYLLLLLKSVVYFAIITCCLLRRTAFCCNGEKS

SEQ ID NO: 22388 - protein, 129 aa, synthetic construct
LRDSKSSDKSVCLFTDFDSQTNVSQSKDSDVYITDKTVLDMRSMDFKSNSAVAWSNKSDFACANAFNNSIMDPKDNCSKDANDTLLLQLTNTSAYYMYLLLLLKSVVYFAIITCCLLRRTAFCCNGEKS

SEQ ID NO: 22389 - protein, 137 aa, synthetic construct; identical to SEQ ID NO: 22387

SEQ ID NO: 22390 - protein, 123 aa, synthetic construct
LRDSKSSDKSVCLFTDFDSQTNVSQSKDSDVYITDKTVLDMRSMDFKSNSAVAWSNKSDFACANAFNNSICSKDANDTLLLQLTNTSAYYMYLLLLLKSVVYFAIITCCLLRRTAFCCNGEKS

SEQ ID NO: 22391 - protein, 138 aa, synthetic construct
LRDSKSSDKSVCLFTDFDSQTNVSQSKDSDVYITDKTVLDMRSMDFKSNSAVAWSNKSDFACANAFNNSIEVKTDSTDHVKPKETENTKQPSKSCHKPKAIVHTEKVNMMSLTVLGLRMLFAKTVAVNFLLTAKLFFL

SEQ ID NO: 22392 - protein, 131 aa, synthetic construct
LRDSKSSDKSVCLFTDFDSQTNVSQSKDSDVYITDKTVLDMRSMDFKSNSAVAWSNKSDFACANAFNNSIDHVKPKETENTKQPSKSCHKPKAIVHTEKVNMMSLTVLGLRMLFAKTVAVNFLLTAKLFFL

SEQ ID NO: 22393 - protein, 133 aa, synthetic construct
LRDSKSSDKSVCLFTDFDSQTNVSQSKDSDVYITDKTVLDMRSMDFKSNSAVAWSNKSDFACANAFNNSIIPEDTFFPSPGRADCGFTSESYQQGVLSATILYEILLGKATLYAVLVSALVLMAMVKRKDSRG

SEQ ID NO: 22394 - protein, 131 aa, synthetic construct
LRDSKSSDKSVCLFTDFDSQTNVSQSKDSDVYITDKTVLDMRSMDFKSNSAVAWSNKSDFACANAFNNSIIPEDTFFPSPADCGFTSESYQQGVLSATILYEILLGKATLYAVLVSALVLMAMVKRKDSRG

SEQ ID NO: 22395 - protein, 141 aa, synthetic construct
LRDSKSSDKSVCLFTDFDSQTNVSQSKDSDVYITDKTVLDMRSMDFKSNSAVAWSNKSDFACANAFNNSIIPEDTFFPSPQIVSAEAWGRADCGFTSESYQQGVLSATILYEILLGKATLYAVLVSALVLMAMVKRKDSRG

SEQ ID NO: 22396 - protein, 149 aa, synthetic construct
LRDSKSSDKSVCLFTDFDSQTNVSQSKDSDVYITDKTVLDMRSMDFKSNSAVAWSNKSDFACANAFNNSIIPEDTFFPSPFPPIKTDVITMDPKDNCSKDANDTLLLQLTNTSAYYMYLLLLLKSVVYFAIITCCLLRRTAFCCNGEKS

SEQ ID NO: 22397 - protein, 147 aa, synthetic construct
LRDSKSSDKSVCLFTDFDSQTNVSQSKDSDVYITDKTVLDMRSMDFKSNSAVAWSNKSDFACANAFNNSIIPEDTFFPSPPIKTDVITMDPKDNCSKDANDTLLLQLTNTSAYYMYLLLLLKSVVYFAIITCCLLRRTAFCCNGEKS

SEQ ID NO: 22398 - protein, 139 aa, synthetic construct
LRDSKSSDKSVCLFTDFDSQTNVSQSKDSDVYITDKTVLDMRSMDFKSNSAVAWSNKSDFACANAFNNSIIPEDTFFPSPMDPKDNCSKDANDTLLLQLTNTSAYYMYLLLLLKSVVYFAIITCCLLRRTAFCCNGEKS

SEQ ID NO: 22399 - protein, 147 aa, synthetic construct; identical to SEQ ID NO: 22397

SEQ ID NO: 22400 - protein, 133 aa, synthetic construct
LRDSKSSDKSVCLFTDFDSQTNVSQSKDSDVYITDKTVLDMRSMDFKSNSAVAWSNKSDFACANAFNNSIIPEDTFFPSPCSKDANDTLLLQLTNTSAYYMYLLLLLKSVVYFAIITCCLLRRTAFCCNGEKS

SEQ ID NO: 22401 - protein, 148 aa, synthetic construct
LRDSKSSDKSVCLFTDFDSQTNVSQSKDSDVYITDKTVLDMRSMDFKSNSAVAWSNKSDFACANAFNNSIIPEDTFFPSPEVKTDSTDHVKPKETENTKQPSKSCHKPKAIVHTEKVNMMSLTVLGLRMLFAKTVAVNFLLTAKLFFL

SEQ ID NO: 22402 - protein, 141 aa, synthetic construct
LRDSKSSDKSVCLFTDFDSQTNVSQSKDSDVYITDKTVLDMRSMDFKSNSAVAWSNKSDFACANAFNNSIIPEDTFFPSPDHVKPKETENTKQPSKSCHKPKAIVHTEKVNMMSLTVLGLRMLFAKTVAVNFLLTAKLFFL

SEQ ID NO: 22403 - protein, 137 aa, synthetic construct
LRDSKSSDKSVCLFTDFDSQTNVSQSKDSDVYITDKTVLDMRSMDFKSNSAVAWSNKSDFACANAFNNSIIPEDTFFPSPESSCGRADCGFTSESYQQGVLSATILYEILLGKATLYAVLVSALVLMAMVKRKDSRG

SEQ ID NO: 22404 - protein, 135 aa, synthetic construct
LRDSKSSDKSVCLFTDFDSQTNVSQSKDSDVYITDKTVLDMRSMDFKSNSAVAWSNKSDFACANAFNNSIIPEDTFFPSPESSCADCGFTSESYQQGVLSATILYEILLGKATLYAVLVSALVLMAMVKRKDSRG

SEQ ID NO: 22405 - protein, 145 aa, synthetic construct
LRDSKSSDKSVCLFTDFDSQTNVSQSKDSDVYITDKTVLDMRSMDFKSNSAVAWSNKSDFACANAFNNSIIPEDTFFPSPESSCQIVSAEAWGRADCGFTSESYQQGVLSATILYEILLGKATLYAVLVSALVLMAMVKRKDSRG

SEQ ID NO: 22406 - protein, 153 aa, synthetic construct
LRDSKSSDKSVCLFTDFDSQTNVSQSKDSDVYITDKTVLDMRSMDFKSNSAVAWSNKSDFACANAFNNSIIPEDTFFPSPESSCFPPIKTDVITMDPKDNCSKDANDTLLLQLTNTSAYYMYLLLLLKSVVYFAIITCCLLRRTAFCCNGEKS

SEQ ID NO: 22407 - protein, 151 aa, synthetic construct
LRDSKSSDKSVCLFTDFDSQTNVSQSKDSDVYITDKTVLDMRSMDFKSNSAVAWSNKSDFACANAFNNSIIPEDTFFPSPESSCPIKTDVITMDPKDNCSKDANDTLLLQLTNTSAYYMYLLLLLKSVVYFAIITCCLLRRTAFCCNGEKS

SEQ ID NO: 22408 - protein, 143 aa, synthetic construct
LRDSKSSDKSVCLFTDFDSQTNVSQSKDSDVYITDKTVLDMRSMDFKSNSAVAWSNKSDFACANAFNNSIIPEDTFFPSPESSCMDPKDNCSKDANDTLLLQLTNTSAYYMYLLLLLKSVVYFAIITCCLLRRTAFCCNGEKS

SEQ ID NO: 22409 - protein, 151 aa, synthetic construct; identical to SEQ ID NO: 22407

SEQ ID NO: 22410 - protein, 137 aa, synthetic construct
LRDSKSSDKSVCLFTDFDSQTNVSQSKDSDVYITDKTVLDMRSMDFKSNSAVAWSNKSDFACANAFNNSIIPEDTFFPSPESSCCSKDANDTLLLQLTNTSAYYMYLLLLLKSVVYFAIITCCLLRRTAFCCNGEKS

SEQ ID NO: 22411 - protein, 152 aa, synthetic construct
LRDSKSSDKSVCLFTDFDSQTNVSQSKDSDVYITDKTVLDMRSMDFKSNSAVAWSNKSDFACANAFNNSIIPEDTFFPSPESSCEVKTDSTDHVKPKETENTKQPSKSCHKPKAIVHTEKVNMMSLTVLGLRMLFAKTVAVNFLLTAKLFFL

SEQ ID NO: 22412 - protein, 145 aa, synthetic construct
LRDSKSSDKSVCLFTDFDSQTNVSQSKDSDVYITDKTVLDMRSMDFKSNSAVAWSNKSDFACANAFNNSIIPEDTFFPSPESSCDHVKPKETENTKQPSKSCHKPKAIVHTEKVNMMSLTVLGLRMLFAKTVAVNFLLTAKLFFL

SEQ ID NO: 22413 - protein, 124 aa, synthetic construct
LRDSKSSDKSVCLFTDFDSQTNVSQSKDSDVYITDKTVLDMRSMDFKSNSAVAWSNKSDFACANAFNNSIIGRADCGFTSESYQQGVLSATILYEILLGKATLYAVLVSALVLMAMVKRKDSRG

SEQ ID NO: 22414 - protein, 122 aa, synthetic construct
LRDSKSSDKSVCLFTDFDSQTNVSQSKDSDVYITDKTVLDMRSMDFKSNSAVAWSNKSDFACANAFNNSIIADCGFTSESYQQGVLSATILYEILLGKATLYAVLVSALVLMAMVKRKDSRG

SEQ ID NO: 22415 - protein, 132 aa, synthetic construct
LRDSKSSDKSVCLFTDFDSQTNVSQSKDSDVYITDKTVLDMRSMDFKSNSAVAWSNKSDFACANAFNNSIIQIVSAEAWGRADCGFTSESYQQGVLSATILYEILLGKATLYAVLVSALVLMAMVKRKDSRG

SEQ ID NO: 22416 - protein, 140 aa, synthetic construct
LRDSKSSDKSVCLFTDFDSQTNVSQSKDSDVYITDKTVLDMRSMDFKSNSAVAWSNKSDFACANAFNNSIIFPPIKTDVITMDPKDNCSKDANDTLLLQLTNTSAYYMYLLLLLKSVVYFAIITCCLLRRTAFCCNGEKS

SEQ ID NO: 22417 - protein, 138 aa, synthetic construct
LRDSKSSDKSVCLFTDFDSQTNVSQSKDSDVYITDKTVLDMRSMDFKSNSAVAWSNKSDFACANAFNNSIIPIKTDVITMDPKDNCSKDANDTLLLQLTNTSAYYMYLLLLLKSVVYFAIITCCLLRRTAFCCNGEKS

SEQ ID NO: 22418 - protein, 130 aa, synthetic construct
LRDSKSSDKSVCLFTDFDSQTNVSQSKDSDVYITDKTVLDMRSMDFKSNSAVAWSNKSDFACANAFNNSIIMDPKDNCSKDANDTLLLQLTNTSAYYMYLLLLLKSVVYFAIITCCLLRRTAFCCNGEKS

SEQ ID NO: 22419 - protein, 138 aa, synthetic construct; identical to SEQ ID NO: 22417

SEQ ID NO: 22420 - protein, 124 aa, synthetic construct
LRDSKSSDKSVCLFTDFDSQTNVSQSKDSDVYITDKTVLDMRSMDFKSNSAVAWSNKSDFACANAFNNSIICSKDANDTLLLQLTNTSAYYMYLLLLLKSVVYFAIITCCLLRRTAFCCNGEKS

SEQ ID NO: 22421 - protein, 139 aa, synthetic construct
LRDSKSSDKSVCLFTDFDSQTNVSQSKDSDVYITDKTVLDMRSMDFKSNSAVAWSNKSDFACANAFNNSIIEVKTDSTDHVKPKETENTKQPSKSCHKPKAIVHTEKVNMMSLTVLGLRMLFAKTVAVNFLLTAKLFFL

SEQ ID NO: 22422 - protein, 132 aa, synthetic construct
LRDSKSSDKSVCLFTDFDSQTNVSQSKDSDVYITDKTVLDMRSMDFKSNSAVAWSNKSDFACANAFNNSIIDHVKPKETENTKQPSKSCHKPKAIVHTEKVNMMSLTVLGLRMLFAKTVAVNFLLTAKLFFL

SEQ ID NO: 22423 - protein, 137 aa, synthetic construct; identical to SEQ ID NO: 22403

SEQ ID NO: 22424 - protein, 135 aa, synthetic construct; identical to SEQ ID NO: 22404

SEQ ID NO: 22425 - protein, 145 aa, synthetic construct; identical to SEQ ID NO: 22405

SEQ ID NO: 22426 - protein, 153 aa, synthetic construct; identical to SEQ ID NO: 22406

SEQ ID NO: 22427 - protein, 151 aa, synthetic construct; identical to SEQ ID NO: 22407

SEQ ID NO: 22428 - protein, 143 aa, synthetic construct; identical to SEQ ID NO: 22408

SEQ ID NO: 22429 - protein, 151 aa, synthetic construct; identical to SEQ ID NO: 22407

SEQ ID NO: 22430 - protein, 137 aa, synthetic construct; identical to SEQ ID NO: 22410

SEQ ID NO: 22431 - protein, 152 aa, synthetic construct; identical to SEQ ID NO: 22411

SEQ ID NO: 22432 - protein, 145 aa, synthetic construct; identical to SEQ ID NO: 22412

SEQ ID NO: 22433 - protein, 177 aa, synthetic construct
EVAVFEPSEAEISHTQKATLVCLATGFYPDHVELSWWVNGKEVHSGVSTDPQPLKEQPALNDSRYCLSSRLRVSATFWQNPRNHFRCQVQFYGLSENDEWTQDRAKPVTQIVSAEAWIPEDTFFPSPESSCDVKLVEKSFETDTNLNFQNLSVIGFRILLLKVAGFNLLMTLRLWSS

SEQ ID NO: 22434 - protein, 167 aa, synthetic construct
EVAVFEPSEAEISHTQKATLVCLATGFYPDHVELSWWVNGKEVHSGVSTDPQPLKEQPALNDSRYCLSSRLRVSATFWQNPRNHFRCQVQFYGLSENDEWTQDRAKPVTQIVSAEAWESSCDVKLVEKSFETDTNLNFQNLSVIGFRILLLKVAGFNLLMTLRLWSS

SEQ ID NO: 22435 - protein, 176 aa, synthetic construct
EVAVFEPSEAEISHTQKATLVCLATGFYPDHVELSWWVNGKEVHSGVSTDPQPLKEQPALNDSRYCLSSRLRVSATFWQNPRNHFRCQVQFYGLSENDEWTQDRAKPVTQIVSAEAWPEDTFFPSPESSCDVKLVEKSFETDTNLNFQNLSVIGFRILLLKVAGFNLLMTLRLWSS

SEQ ID NO: 22436 - protein, 186 aa, synthetic construct
EVAVFEPSEAEISHTQKATLVCLATGFYPDHVELSWWVNGKEVHSGVSTDPQPLKEQPALNDSRYCLSSRLRVSATFWQNPRNHFRCQVQFYGLSENDEWTQDRAKPVTQIVSAEAWFPPIKTDVITMDPKDNCSKDANDTLLLQLTNTSAYYMYLLLLLKSVVYFAIITCCLLRRTAFCCNGEKS

SEQ ID NO: 22437 - protein, 184 aa, synthetic construct
EVAVFEPSEAEISHTQKATLVCLATGFYPDHVELSWWVNGKEVHSGVSTDPQPLKEQPALNDSRYCLSSRLRVSATFWQNPRNHFRCQVQFYGLSENDEWTQDRAKPVTQIVSAEAWPIKTDVITMDPKDNCSKDANDTLLLQLTNTSAYYMYLLLLLKSVVYFAIITCCLLRRTAFCCNGEKS

SEQ ID NO: 22438 - protein, 176 aa, synthetic construct
EVAVFEPSEAEISHTQKATLVCLATGFYPDHVELSWWVNGKEVHSGVSTDPQPLKEQPALNDSRYCLSSRLRVSATFWQNPRNHFRCQVQFYGLSENDEWTQDRAKPVTQIVSAEAWMDPKDNCSKDANDTLLLQLTNTSAYYMYLLLLLKSVVYFAIITCCLLRRTAFCCNGEKS

SEQ ID NO: 22439 - protein, 184 aa, synthetic construct; identical to SEQ ID NO: 22437

SEQ ID NO: 22440 - protein, 170 aa, synthetic construct
EVAVFEPSEAEISHTQKATLVCLATGFYPDHVELSWWVNGKEVHSGVSTDPQPLKEQPALNDSRYCLSSRLRVSATFWQNPRNHFRCQVQFYGLSENDEWTQDRAKPVTQIVSAEAWCSKDANDTLLLQLTNTSAYYMYLLLLLKSVVYFAIITCCLLRRTAFCCNGEKS

SEQ ID NO: 22441 - protein, 185 aa, synthetic construct
EVAVFEPSEAEISHTQKATLVCLATGFYPDHVELSWWVNGKEVHSGVSTDPQPLKEQPALNDSRYCLSSRLRVSATFWQNPRNHFRCQVQFYGLSENDEWTQDRAKPVTQIVSAEAWEVKTDSTDHVKPKETENTKQPSKSCHKPKAIVHTEKVNMMSLTVLGLRMLFAKTVAVNFLLTAKLFFL

SEQ ID NO: 22442 - protein, 178 aa, synthetic construct
EVAVFEPSEAEISHTQKATLVCLATGFYPDHVELSWWVNGKEVHSGVSTDPQPLKEQPALNDSRYCLSSRLRVSATFWQNPRNHFRCQVQFYGLSENDEWTQDRAKPVTQIVSAEAWDHVKPKETENTKQPSKSCHKPKAIVHTEKVNMMSLTVLGLRMLFAKTVAVNFLLTAKLFFL

SEQ ID NO: 22443 - protein, 179 aa, synthetic construct
EVAVFEPSEAEISHTQKATLVCLATGFYPDHVELSWWVNGKEVHSGVSTDPQPLKEQPALNDSRYCLSSRLRVSATFWQNPRNHFRCQVQFYGLSENDEWTQDRAKPVTQIVSAEAWGRIPEDTFFPSPESSCDVKLVEKSFETDTNLNFQNLSVIGFRILLLKVAGFNLLMTLRLWSS

SEQ ID NO: 22444 - protein, 169 aa, synthetic construct
EVAVFEPSEAEISHTQKATLVCLATGFYPDHVELSWWVNGKEVHSGVSTDPQPLKEQPALNDSRYCLSSRLRVSATFWQNPRNHFRCQVQFYGLSENDEWTQDRAKPVTQIVSAEAWGRESSCDVKLVEKSFETDTNLNFQNLSVIGFRILLLKVAGFNLLMTLRLWSS

SEQ ID NO: 22445 - protein, 178 aa, synthetic construct
EVAVFEPSEAEISHTQKATLVCLATGFYPDHVELSWWVNGKEVHSGVSTDPQPLKEQPALNDSRYCLSSRLRVSATFWQNPRNHFRCQVQFYGLSENDEWTQDRAKPVTQIVSAEAWGRPEDTFFPSPESSCDVKLVEKSFETDTNLNFQNLSVIGFRILLLKVAGFNLLMTLRLWSS

SEQ ID NO: 22446 - protein, 188 aa, synthetic construct
EVAVFEPSEAEISHTQKATLVCLATGFYPDHVELSWWVNGKEVHSGVSTDPQPLKEQPALNDSRYCLSSRLRVSATFWQNPRNHFRCQVQFYGLSENDEWTQDRAKPVTQIVSAEAWGRFPPIKTDVITMDPKDNCSKDANDTLLLQLTNTSAYYMYLLLLLKSVVYFAIITCCLLRRTAFCCNGEKS

SEQ ID NO: 22447 - protein, 186 aa, synthetic construct
EVAVFEPSEAEISHTQKATLVCLATGFYPDHVELSWWVNGKEVHSGVSTDPQPLKEQPALNDSRYCLSSRLRVSATFWQNPRNHFRCQVQFYGLSENDEWTQDRAKPVTQIVSAEAWGRPIKTDVITMDPKDNCSKDANDTLLLQLTNTSAYYMYLLLLLKSVVYFAIITCCLLRRTAFCCNGEKS

SEQ ID NO: 22448 - protein, 178 aa, synthetic construct
EVAVFEPSEAEISHTQKATLVCLATGFYPDHVELSWWVNGKEVHSGVSTDPQPLKEQPALNDSRYCLSSRLRVSATFWQNPRNHFRCQVQFYGLSENDEWTQDRAKPVTQIVSAEAWGRMDPKDNCSKDANDTLLLQLTNTSAYYMYLLLLLKSVVYFAIITCCLLRRTAFCCNGEKS

SEQ ID NO: 22449 - protein, 186 aa, synthetic construct; identical to SEQ ID NO: 22447

SEQ ID NO: 22450 - protein, 172 aa, synthetic construct
EVAVFEPSEAEISHTQKATLVCLATGFYPDHVELSWWVNGKEVHSGVSTDPQPLKEQPALNDSRYCLSSRLRVSATFWQNPRNHFRCQVQFYGLSENDEWTQDRAKPVTQIVSAEAWGRCSKDANDTLLLQLTNTSAYYMYLLLLLKSVVYFAIITCCLLRRTAFCCNGEKS

SEQ ID NO: 22451 - protein, 187 aa, synthetic construct
EVAVFEPSEAEISHTQKATLVCLATGFYPDHVELSWWVNGKEVHSGVSTDPQPLKEQPALNDSRYCLSSRLRVSATFWQNPRNHFRCQVQFYGLSENDEWTQDRAKPVTQIVSAEAWGREVKTDSTDHVKPKETENTKQPSKSCHKPKAIVHTEKVNMMSLTVLGLRMLFAKTVAVNFLLTAKLFFL

SEQ ID NO: 22452 - protein, 180 aa, synthetic construct
EVAVFEPSEAEISHTQKATLVCLATGFYPDHVELSWWVNGKEVHSGVSTDPQPLKEQPALNDSRYCLSSRLRVSATFWQNPRNHFRCQVQFYGLSENDEWTQDRAKPVTQIVSAEAWGRDHVKPKETENTKQPSKSCHKPKAIVHTEKVNMMSLTVLGLRMLFAKTVAVNFLLTAKLFFL

SEQ ID NO: 22453 - protein, 182 aa, synthetic construct
EVAVFEPSEAEISHTQKATLVCLATGFYPDHVELSWWVNGKEVHSGVSTDPQPLKEQPALNDSRYCLSSRLRVSATFWQNPRNHFRCQVQFYGLSENDEWTQDRAKPVTQIVSAEAWGRADCIPEDTFFPSPESSCDVKLVEKSFETDTNLNFQNLSVIGFRILLLKVAGFNLLMTLRLWSS

SEQ ID NO: 22454 - protein, 172 aa, synthetic construct
EVAVFEPSEAEISHTQKATLVCLATGFYPDHVELSWWVNGKEVHSGVSTDPQPLKEQPALNDSRYCLSSRLRVSATFWQNPRNHFRCQVQFYGLSENDEWTQDRAKPVTQIVSAEAWGRADCESSCDVKLVEKSFETDTNLNFQNLSVIGFRILLLKVAGFNLLMTLRLWSS

SEQ ID NO: 22455 - protein, 181 aa, synthetic construct
EVAVFEPSEAEISHTQKATLVCLATGFYPDHVELSWWVNGKEVHSGVSTDPQPLKEQPALNDSRYCLSSRLRVSATFWQNPRNHFRCQVQFYGLSENDEWTQDRAKPVTQIVSAEAWGRADCPEDTFFPSPESSCDVKLVEKSFETDTNLNFQNLSVIGFRILLLKVAGFNLLMTLRLWSS

SEQ ID NO: 22456 - protein, 191 aa, synthetic construct
EVAVFEPSEAEISHTQKATLVCLATGFYPDHVELSWWVNGKEVHSGVSTDPQPLKEQPALNDSRYCLSSRLRVSATFWQNPRNHFRCQVQFYGLSENDEWTQDRAKPVTQIVSAEAWGRADCFPPIKTDVITMDPKDNCSKDANDTLLLQLTNTSAYYMYLLLLLKSVVYFAIITCCLLRRTAFCCNGEKS

SEQ ID NO: 22457 - protein, 189 aa, synthetic construct
EVAVFEPSEAEISHTQKATLVCLATGFYPDHVELSWWVNGKEVHSGVSTDPQPLKEQPALNDSRYCLSSRLRVSATFWQNPRNHFRCQVQFYGLSENDEWTQDRAKPVTQIVSAEAWGRADCPIKTDVITMDPKDNCSKDANDTLLLQLTNTSAYYMYLLLLLKSVVYFAIITCCLLRRTAFCCNGEKS

SEQ ID NO: 22458 - protein, 181 aa, synthetic construct
EVAVFEPSEAEISHTQKATLVCLATGFYPDHVELSWWVNGKEVHSGVSTDPQPLKEQPALNDSRYCLSSRLRVSATFWQNPRNHFRCQVQFYGLSENDEWTQDRAKPVTQIVSAEAWGRADCMDPKDNCSKDANDTLLLQLTNTSAYYMYLLLLLKSVVYFAIITCCLLRRTAFCCNGEKS

SEQ ID NO: 22459 - protein, 189 aa, synthetic construct; identical to SEQ ID NO: 22457

SEQ ID NO: 22460 - protein, 175 aa, synthetic construct
EVAVFEPSEAEISHTQKATLVCLATGFYPDHVELSWWVNGKEVHSGVSTDPQPLKEQPALNDSRYCLSSRLRVSATFWQNPRNHFRCQVQFYGLSENDEWTQDRAKPVTQIVSAEAWGRADCCSKDANDTLLLQLTNTSAYYMYLLLLLKSVVYFAIITCCLLRRTAFCCNGEKS

SEQ ID NO: 22461 - protein, 190 aa, synthetic construct
EVAVFEPSEAEISHTQKATLVCLATGFYPDHVELSWWVNGKEVHSGVSTDPQPLKEQPALNDSRYCLSSRLRVSATFWQNPRNHFRCQVQFYGLSENDEWTQDRAKPVTQIVSAEAWGRADCEVKTDSTDHVKPKETENTKQPSKSCHKPKAIVHTEKVNMMSLTVLGLRMLFAKTVAVNFLLTAKLFFL

SEQ ID NO: 22462 - protein, 183 aa, synthetic construct
EVAVFEPSEAEISHTQKATLVCLATGFYPDHVELSWWVNGKEVHSGVSTDPQPLKEQPALNDSRYCLSSRLRVSATFWQNPRNHFRCQVQFYGLSENDEWTQDRAKPVTQIVSAEAWGRADCDHVKPKETENTKQPSKSCHKPKAIVHTEKVNMMSLTVLGLRMLFAKTVAVNFLLTAKLFFL

SEQ ID NO: 22463 - protein, 169 aa, synthetic construct
EVAVFEPSEAEISHTQKATLVCLATGFYPDHVELSWWVNGKEVHSGVSTDPQPLKEQPALNDSRYCLSSRLRVSATFWQNPRNHFRCQVQFYGLSENDEWTQDRAKPVTIPEDTFFPSPESSCDVKLVEKSFETDTNLNFQNLSVIGFRILLLKVAGFNLLMTLRLWSS

SEQ ID NO: 22464 - protein, 159 aa, synthetic construct
EVAVFEPSEAEISHTQKATLVCLATGFYPDHVELSWWVNGKEVHSGVSTDPQPLKEQPALNDSRYCLSSRLRVSATFWQNPRNHFRCQVQFYGLSENDEWTQDRAKPVTESSCDVKLVEKSFETDTNLNFQNLSVIGFRILLLKVAGFNLLMTLRLWSS

SEQ ID NO: 22465 - protein, 168 aa, synthetic construct
EVAVFEPSEAEISHTQKATLVCLATGFYPDHVELSWWVNGKEVHSGVSTDPQPLKEQPALNDSRYCLSSRLRVSATFWQNPRNHFRCQVQFYGLSENDEWTQDRAKPVTPEDTFFPSPESSCDVKLVEKSFETDTNLNFQNLSVIGFRILLLKVAGFNLLMTLRLWSS

SEQ ID NO: 22466 - protein, 178 aa, synthetic construct
EVAVFEPSEAEISHTQKATLVCLATGFYPDHVELSWWVNGKEVHSGVSTDPQPLKEQPALNDSRYCLSSRLRVSATFWQNPRNHFRCQVQFYGLSENDEWTQDRAKPVTFPPIKTDVITMDPKDNCSKDANDTLLLQLTNTSAYYMYLLLLLKSVVYFAIITCCLLRRTAFCCNGEKS

SEQ ID NO: 22467 - protein, 176 aa, synthetic construct
EVAVFEPSEAEISHTQKATLVCLATGFYPDHVELSWWVNGKEVHSGVSTDPQPLKEQPALNDSRYCLSSRLRVSATFWQNPRNHFRCQVQFYGLSENDEWTQDRAKPVTPIKTDVITMDPKDNCSKDANDTLLLQLTNTSAYYMYLLLLLKSVVYFAIITCCLLRRTAFCCNGEKS

SEQ ID NO: 22468 - protein, 168 aa, synthetic construct
EVAVFEPSEAEISHTQKATLVCLATGFYPDHVELSWWVNGKEVHSGVSTDPQPLKEQPALNDSRYCLSSRLRVSATFWQNPRNHFRCQVQFYGLSENDEWTQDRAKPVTMDPKDNCSKDANDTLLLQLTNTSAYYMYLLLLLKSVVYFAIITCCLLRRTAFCCNGEKS

SEQ ID NO: 22469 - protein, 176 aa, synthetic construct; identical to SEQ ID NO: 22467

SEQ ID NO: 22470 - protein, 162 aa, synthetic construct
EVAVFEPSEAEISHTQKATLVCLATGFYPDHVELSWWVNGKEVHSGVSTDPQPLKEQPALNDSRYCLSSRLRVSATFWQNPRNHFRCQVQFYGLSENDEWTQDRAKPVTCSKDANDTLLLQLTNTSAYYMYLLLLLKSVVYFAIITCCLLRRTAFCCNGEKS

SEQ ID NO: 22471 - protein, 177 aa, synthetic construct
EVAVFEPSEAEISHTQKATLVCLATGFYPDHVELSWWVNGKEVHSGVSTDPQPLKEQPALNDSRYCLSSRLRVSATFWQNPRNHFRCQVQFYGLSENDEWTQDRAKPVTEVKTDSTDHVKPKETENTKQPSKSCHKPKAIVHTEKVNMMSLTVLGLRMLFAKTVAVNFLLTAKLFFL

SEQ ID NO: 22472 - protein, 170 aa, synthetic construct
EVAVFEPSEAEISHTQKATLVCLATGFYPDHVELSWWVNGKEVHSGVSTDPQPLKEQPALNDSRYCLSSRLRVSATFWQNPRNHFRCQVQFYGLSENDEWTQDRAKPVTDHVKPKETENTKQPSKSCHKPKAIVHTEKVNMMSLTVLGLRMLFAKTVAVNFLLTAKLFFL

SEQ ID NO: 22473 - protein, 177 aa, synthetic construct; identical to SEQ ID NO: 22433

SEQ ID NO: 22474 - protein, 167 aa, synthetic construct; identical to SEQ ID NO: 22434

SEQ ID NO: 22475 - protein, 176 aa, synthetic construct; identical to SEQ ID NO: 22435

SEQ ID NO: 22476 - protein, 186 aa, synthetic construct; identical to SEQ ID NO: 22436

SEQ ID NO: 22477 - protein, 184 aa, synthetic construct; identical to SEQ ID NO: 22437

SEQ ID NO: 22478 - protein, 176 aa, synthetic construct; identical to SEQ ID NO: 22438

SEQ ID NO: 22479 - protein, 184 aa, synthetic construct; identical to SEQ ID NO: 22437

SEQ ID NO: 22480 - protein, 170 aa, synthetic construct; identical to SEQ ID NO: 22440

SEQ ID NO: 22481 - protein, 185 aa, synthetic construct; identical to SEQ ID NO: 22441

SEQ ID NO: 22482 - protein, 178 aa, synthetic construct; identical to SEQ ID NO: 22442

SEQ ID NO: 22483 - protein, 170 aa, synthetic construct; identical to SEQ ID NO: 22268

SEQ ID NO: 22484 - protein, 160 aa, synthetic construct; identical to SEQ ID NO: 22269

SEQ ID NO: 22485 - protein, 169 aa, synthetic construct; identical to SEQ ID NO: 22270

SEQ ID NO: 22486 - protein, 179 aa, synthetic construct; identical to SEQ ID NO: 22271

SEQ ID NO: 22487 - protein, 177 aa, synthetic construct; identical to SEQ ID NO: 22272

SEQ ID NO: 22488 - protein, 169 aa, synthetic construct; identical to SEQ ID NO: 22273

SEQ ID NO: 22489 - protein, 177 aa, synthetic construct; identical to SEQ ID NO: 22272

SEQ ID NO: 22490 - protein, 163 aa, synthetic construct; identical to SEQ ID NO: 22275

SEQ ID NO: 22491 - protein, 178 aa, synthetic construct; identical to SEQ ID NO: 22276

SEQ ID NO: 22492 - protein, 171 aa, synthetic construct; identical to SEQ ID NO: 22277

SEQ ID NO: 22493 - protein, 159 aa, synthetic construct
ADVSPKPTIFLPSIAETKLQKAGTYLCLLEKFFPDVIKIHWQEKKSNTILGSQEGNTMKTNDTYMKFSWLTVPEKSLDKEHRCIVRHENNKNGVDQEIIIPEDTFFPSPESSCDVKLVEKSFETDTNLNFQNLSVIGFRILLLKVAGFNLLMTLRLWSS

SEQ ID NO: 22494 - protein, 149 aa, synthetic construct
ADVSPKPTIFLPSIAETKLQKAGTYLCLLEKFFPDVIKIHWQEKKSNTILGSQEGNTMKTNDTYMKFSWLTVPEKSLDKEHRCIVRHENNKNGVDQEIIESSCDVKLVEKSFETDTNLNFQNLSVIGFRILLLKVAGFNLLMTLRLWSS

SEQ ID NO: 22495 - protein, 158 aa, synthetic construct
ADVSPKPTIFLPSIAETKLQKAGTYLCLLEKFFPDVIKIHWQEKKSNTILGSQEGNTMKTNDTYMKFSWLTVPEKSLDKEHRCIVRHENNKNGVDQEIIPEDTFFPSPESSCDVKLVEKSFETDTNLNFQNLSVIGFRILLLKVAGFNLLMTLRLWSS

SEQ ID NO: 22496 - protein, 152 aa, synthetic construct
ADVSPKPTIFLPSIAETKLQKAGTYLCLLEKFFPDVIKIHWQEKKSNTILGSQEGNTMKTNDTYMKFSWLTVPEKSLDKEHRCIVRHENNKNGVDQEIIGRADCGFTSESYQQGVLSATILYEILLGKATLYAVLVSALVLMAMVKRKDSRG

SEQ ID NO: 22497 - protein, 150 aa, synthetic construct
ADVSPKPTIFLPSIAETKLQKAGTYLCLLEKFFPDVIKIHWQEKKSNTILGSQEGNTMKTNDTYMKFSWLTVPEKSLDKEHRCIVRHENNKNGVDQEIIADCGFTSESYQQGVLSATILYEILLGKATLYAVLVSALVLMAMVKRKDSRG

SEQ ID NO: 22498 - protein, 160 aa, synthetic construct
ADVSPKPTIFLPSIAETKLQKAGTYLCLLEKFFPDVIKIHWQEKKSNTILGSQEGNTMKTNDTYMKFSWLTVPEKSLDKEHRCIVRHENNKNGVDQEIIQIVSAEAWGRADCGFTSESYQQGVLSATILYEILLGKATLYAVLVSALVLMAMVKRKDSRG

SEQ ID NO: 22499 - protein, 167 aa, synthetic construct
ADVSPKPTIFLPSIAETKLQKAGTYLCLLEKFFPDVIKIHWQEKKSNTILGSQEGNTMKTNDTYMKFSWLTVPEKSLDKEHRCIVRHENNKNGVDQEIIEVKTDSTDHVKPKETENTKQPSKSCHKPKAIVHTEKVNMMSLTVLGLRMLFAKTVAVNFLLTAKLFFL

SEQ ID NO: 22500 - protein, 160 aa, synthetic construct
ADVSPKPTIFLPSIAETKLQKAGTYLCLLEKFFPDVIKIHWQEKKSNTILGSQEGNTMKTNDTYMKFSWLTVPEKSLDKEHRCIVRHENNKNGVDQEIIDHVKPKETENTKQPSKSCHKPKAIVHTEKVNMMSLTVLGLRMLFAKTVAVNFLLTAKLFFL

SEQ ID NO: 22501 - protein, 161 aa, synthetic construct
ADVSPKPTIFLPSIAETKLQKAGTYLCLLEKFFPDVIKIHWQEKKSNTILGSQEGNTMKTNDTYMKFSWLTVPEKSLDKEHRCIVRHENNKNGVDQEIIFPIPEDTFFPSPESSCDVKLVEKSFETDTNLNFQNLSVIGFRILLLKVAGFNLLMTLRLWSS

SEQ ID NO: 22502 - protein, 151 aa, synthetic construct
ADVSPKPTIFLPSIAETKLQKAGTYLCLLEKFFPDVIKIHWQEKKSNTILGSQEGNTMKTNDTYMKFSWLTVPEKSLDKEHRCIVRHENNKNGVDQEIIFPESSCDVKLVEKSFETDTNLNFQNLSVIGFRILLLKVAGFNLLMTLRLWSS

SEQ ID NO: 22503 - protein, 160 aa, synthetic construct
ADVSPKPTIFLPSIAETKLQKAGTYLCLLEKFFPDVIKIHWQEKKSNTILGSQEGNTMKTNDTYMKFSWLTVPEKSLDKEHRCIVRHENNKNGVDQEIIFPPEDTFFPSPESSCDVKLVEKSFETDTNLNFQNLSVIGFRILLLKVAGFNLLMTLRLWSS

SEQ ID NO: 22504 - protein, 154 aa, synthetic construct
ADVSPKPTIFLPSIAETKLQKAGTYLCLLEKFFPDVIKIHWQEKKSNTILGSQEGNTMKTNDTYMKFSWLTVPEKSLDKEHRCIVRHENNKNGVDQEIIFPGRADCGFTSESYQQGVLSATILYEILLGKATLYAVLVSALVLMAMVKRKDSRG

SEQ ID NO: 22505 - protein, 152 aa, synthetic construct
ADVSPKPTIFLPSIAETKLQKAGTYLCLLEKFFPDVIKIHWQEKKSNTILGSQEGNTMKTNDTYMKFSWLTVPEKSLDKEHRCIVRHENNKNGVDQEIIFPADCGFTSESYQQGVLSATILYEILLGKATLYAVLVSALVLMAMVKRKDSRG

SEQ ID NO: 22506 - protein, 162 aa, synthetic construct
ADVSPKPTIFLPSIAETKLQKAGTYLCLLEKFFPDVIKIHWQEKKSNTILGSQEGNTMKTNDTYMKFSWLTVPEKSLDKEHRCIVRHENNKNGVDQEIIFPQIVSAEAWGRADCGFTSESYQQGVLSATILYEILLGKATLYAVLVSALVLMAMVKRKDSRG

SEQ ID NO: 22507 - protein, 169 aa, synthetic construct
ADVSPKPTIFLPSIAETKLQKAGTYLCLLEKFFPDVIKIHWQEKKSNTILGSQEGNTMKTNDTYMKFSWLTVPEKSLDKEHRCIVRHENNKNGVDQEIIFPEVKTDSTDHVKPKETENTKQPSKSCHKPKAIVHTEKVNMMSLTVLGLRMLFAKTVAVNFLLTAKLFFL

SEQ ID NO: 22508 - protein, 162 aa, synthetic construct
ADVSPKPTIFLPSIAETKLQKAGTYLCLLEKFFPDVIKIHWQEKKSNTILGSQEGNTMKTNDTYMKFSWLTVPEKSLDKEHRCIVRHENNKNGVDQEIIFPDHVKPKETENTKQPSKSCHKPKAIVHTEKVNMMSLTVLGLRMLFAKTVAVNFLLTAKLFFL

SEQ ID NO: 22509 - protein, 169 aa, synthetic construct
ADVSPKPTIFLPSIAETKLQKAGTYLCLLEKFFPDVIKIHWQEKKSNTILGSQEGNTMKTNDTYMKFSWLTVPEKSLDKEHRCIVRHENNKNGVDQEIIFPPIKTDVITIPEDTFFPSPESSCDVKLVEKSFETDTNLNFQNLSVIGFRILLLKVAGFNLLMTLRLWSS

SEQ ID NO: 22510 - protein, 159 aa, synthetic construct
ADVSPKPTIFLPSIAETKLQKAGTYLCLLEKFFPDVIKIHWQEKKSNTILGSQEGNTMKTNDTYMKFSWLTVPEKSLDKEHRCIVRHENNKNGVDQEIIFPPIKTDVITESSCDVKLVEKSFETDTNLNFQNLSVIGFRILLLKVAGFNLLMTLRLWSS

SEQ ID NO: 22511 - protein, 168 aa, synthetic construct
ADVSPKPTIFLPSIAETKLQKAGTYLCLLEKFFPDVIKIHWQEKKSNTILGSQEGNTMKTNDTYMKFSWLTVPEKSLDKEHRCIVRHENNKNGVDQEIIFPPIKTDVITPEDTFFPSPESSCDVKLVEKSFETDTNLNFQNLSVIGFRILLLKVAGFNLLMTLRLWSS

SEQ ID NO: 22512 - protein, 162 aa, synthetic construct
ADVSPKPTIFLPSIAETKLQKAGTYLCLLEKFFPDVIKIHWQEKKSNTILGSQEGNTMKTNDTYMKFSWLTVPEKSLDKEHRCIVRHENNKNGVDQEIIFPPIKTDVITGRADCGFTSESYQQGVLSATILYEILLGKATLYAVLVSALVLMAMVKRKDSRG

SEQ ID NO: 22513 - protein, 160 aa, synthetic construct
ADVSPKPTIFLPSIAETKLQKAGTYLCLLEKFFPDVIKIHWQEKKSNTILGSQEGNTMKTNDTYMKFSWLTVPEKSLDKEHRCIVRHENNKNGVDQEIIFPPIKTDVITADCGFTSESYQQGVLSATILYEILLGKATLYAVLVSALVLMAMVKRKDSRG

SEQ ID NO: 22514 - protein, 170 aa, synthetic construct
ADVSPKPTIFLPSIAETKLQKAGTYLCLLEKFFPDVIKIHWQEKKSNTILGSQEGNTMKTNDTYMKFSWLTVPEKSLDKEHRCIVRHENNKNGVDQEIIFPPIKTDVITQIVSAEAWGRADCGFTSESYQQGVLSATILYEILLGKATLYAVLVSALVLMAMVKRKDSRG

SEQ ID NO: 22515 - protein, 177 aa, synthetic construct
ADVSPKPTIFLPSIAETKLQKAGTYLCLLEKFFPDVIKIHWQEKKSNTILGSQEGNTMKTNDTYMKFSWLTVPEKSLDKEHRCIVRHENNKNGVDQEIIFPPIKTDVITEVKTDSTDHVKPKETENTKQPSKSCHKPKAIVHTEKVNMMSLTVLGLRMLFAKTVAVNFLLTAKLFFL

SEQ ID NO: 22516 - protein, 170 aa, synthetic construct
ADVSPKPTIFLPSIAETKLQKAGTYLCLLEKFFPDVIKIHWQEKKSNTILGSQEGNTMKTNDTYMKFSWLTVPEKSLDKEHRCIVRHENNKNGVDQEIIFPPIKTDVITDHVKPKETENTKQPSKSCHKPKAIVHTEKVNMMSLTVLGLRMLFAKTVAVNFLLTAKLFFL

SEQ ID NO: 22517 - protein, 174 aa, synthetic construct
ADVSPKPTIFLPSIAETKLQKAGTYLCLLEKFFPDVIKIHWQEKKSNTILGSQEGNTMKTNDTYMKFSWLTVPEKSLDKEHRCIVRHENNKNGVDQEIIFPPIKTDVITMDPKDIPEDTFFPSPESSCDVKLVEKSFETDTNLNFQNLSVIGFRILLLKVAGFNLLMTLRLWSS

SEQ ID NO: 22518 - protein, 164 aa, synthetic construct
ADVSPKPTIFLPSIAETKLQKAGTYLCLLEKFFPDVIKIHWQEKKSNTILGSQEGNTMKTNDTYMKFSWLTVPEKSLDKEHRCIVRHENNKNGVDQEIIFPPIKTDVITMDPKDESSCDVKLVEKSFETDTNLNFQNLSVIGFRILLLKVAGFNLLMTLRLWSS

SEQ ID NO: 22519 - protein, 173 aa, synthetic construct
ADVSPKPTIFLPSIAETKLQKAGTYLCLLEKFFPDVIKIHWQEKKSNTILGSQEGNTMKTNDTYMKFSWLTVPEKSLDKEHRCIVRHENNKNGVDQEIIFPPIKTDVITMDPKDPEDTFFPSPESSCDVKLVEKSFETDTNLNFQNLSVIGFRILLLKVAGFNLLMTLRLWSS

SEQ ID NO: 22520 - protein, 167 aa, synthetic construct
ADVSPKPTIFLPSIAETKLQKAGTYLCLLEKFFPDVIKIHWQEKKSNTILGSQEGNTMKTNDTYMKFSWLTVPEKSLDKEHRCIVRHENNKNGVDQEIIFPPIKTDVITMDPKDGRADCGFTSESYQQGVLSATILYEILLGKATLYAVLVSALVLMAMVKRKDSRG

SEQ ID NO: 22521 - protein, 165 aa, synthetic construct
ADVSPKPTIFLPSIAETKLQKAGTYLCLLEKFFPDVIKIHWQEKKSNTILGSQEGNTMKTNDTYMKFSWLTVPEKSLDKEHRCIVRHENNKNGVDQEIIFPPIKTDVITMDPKDADCGFTSESYQQGVLSATILYEILLGKATLYAVLVSALVLMAMVKRKDSRG

SEQ ID NO: 22522 - protein, 175 aa, synthetic construct
ADVSPKPTIFLPSIAETKLQKAGTYLCLLEKFFPDVIKIHWQEKKSNTILGSQEGNTMKTNDTYMKFSWLTVPEKSLDKEHRCIVRHENNKNGVDQEIIFPPIKTDVITMDPKDQIVSAEAWGRADCGFTSESYQQGVLSATILYEILLGKATLYAVLVSALVLMAMVKRKDSRG

SEQ ID NO: 22523 - protein, 182 aa, synthetic construct
ADVSPKPTIFLPSIAETKLQKAGTYLCLLEKFFPDVIKIHWQEKKSNTILGSQEGNTMKTNDTYMKFSWLTVPEKSLDKEHRCIVRHENNKNGVDQEIIFPPIKTDVITMDPKDEVKTDSTDHVKPKETENTKQPSKSCHKPKAIVHTEKVNMMSLTVLGLRMLFAKTVAVNFLLTAKLFFL

SEQ ID NO: 22524 - protein, 175 aa, synthetic construct
ADVSPKPTIFLPSIAETKLQKAGTYLCLLEKFFPDVIKIHWQEKKSNTILGSQEGNTMKTNDTYMKFSWLTVPEKSLDKEHRCIVRHENNKNGVDQEIIFPPIKTDVITMDPKDDHVKPKETENTKQPSKSCHKPKAIVHTEKVNMMSLTVLGLRMLFAKTVAVNFLLTAKLFFL

SEQ ID NO: 22525 - protein, 169 aa, synthetic construct; identical to SEQ ID NO: 22509

SEQ ID NO: 22526 - protein, 159 aa, synthetic construct; identical to SEQ ID NO: 22510

SEQ ID NO: 22527 - protein, 168 aa, synthetic construct; identical to SEQ ID NO: 22511

SEQ ID NO: 22528 - protein, 162 aa, synthetic construct; identical to SEQ ID NO: 22512

SEQ ID NO: 22529 - protein, 160 aa, synthetic construct; identical to SEQ ID NO: 22513

SEQ ID NO: 22530 - protein, 170 aa, synthetic construct; identical to SEQ ID NO: 22514

SEQ ID NO: 22531 - protein, 177 aa, synthetic construct; identical to SEQ ID NO: 22515

SEQ ID NO: 22532 - protein, 170 aa, synthetic construct; identical to SEQ ID NO: 22516

SEQ ID NO: 22533 - protein, 143 aa, synthetic construct
PHTKPSVFVMKNGTNVACLVKEFYPKDIRINLVSSKKITEFDPAIVISPSGKYNAVKLGKYEDSNSVTCSVQHDNKTVHSTDFIPEDTFFPSPESSCDVKLVEKSFETDTNLNFQNLSVIGFRILLLKVAGFNLLMTLRLWSS

SEQ ID NO: 22534 - protein, 133 aa, synthetic construct
PHTKPSVFVMKNGTNVACLVKEFYPKDIRINLVSSKKITEFDPAIVISPSGKYNAVKLGKYEDSNSVTCSVQHDNKTVHSTDFESSCDVKLVEKSFETDTNLNFQNLSVIGFRILLLKVAGFNLLMTLRLWSS

SEQ ID NO: 22535 - protein, 142 aa, synthetic construct
PHTKPSVFVMKNGTNVACLVKEFYPKDIRINLVSSKKITEFDPAIVISPSGKYNAVKLGKYEDSNSVTCSVQHDNKTVHSTDFPEDTFFPSPESSCDVKLVEKSFETDTNLNFQNLSVIGFRILLLKVAGFNLLMTLRLWSS

SEQ ID NO: 22536 - protein, 136 aa, synthetic construct
PHTKPSVFVMKNGTNVACLVKEFYPKDIRINLVSSKKITEFDPAIVISPSGKYNAVKLGKYEDSNSVTCSVQHDNKTVHSTDFGRADCGFTSESYQQGVLSATILYEILLGKATLYAVLVSALVLMAMVKRKDSRG

SEQ ID NO: 22537 - protein, 134 aa, synthetic construct
PHTKPSVFVMKNGTNVACLVKEFYPKDIRINLVSSKKITEFDPAIVISPSGKYNAVKLGKYEDSNSVTCSVQHDNKTVHSTDFADCGFTSESYQQGVLSATILYEILLGKATLYAVLVSALVLMAMVKRKDSRG

SEQ ID NO: 22538 - protein, 144 aa, synthetic construct
PHTKPSVFVMKNGTNVACLVKEFYPKDIRINLVSSKKITEFDPAIVISPSGKYNAVKLGKYEDSNSVTCSVQHDNKTVHSTDFQIVSAEAWGRADCGFTSESYQQGVLSATILYEILLGKATLYAVLVSALVLMAMVKRKDSRG

SEQ ID NO: 22539 - protein, 152 aa, synthetic construct
PHTKPSVFVMKNGTNVACLVKEFYPKDIRINLVSSKKITEFDPAIVISPSGKYNAVKLGKYEDSNSVTCSVQHDNKTVHSTDFFPPIKTDVITMDPKDNCSKDANDTLLLQLTNTSAYYMYLLLLLKSVVYFAIITCCLLRRTAFCCNGEKS

SEQ ID NO: 22540 - protein, 150 aa, synthetic construct
PHTKPSVFVMKNGTNVACLVKEFYPKDIRINLVSSKKITEFDPAIVISPSGKYNAVKLGKYEDSNSVTCSVQHDNKTVHSTDFPIKTDVITMDPKDNCSKDANDTLLLQLTNTSAYYMYLLLLLKSVVYFAIITCCLLRRTAFCCNGEKS

SEQ ID NO: 22541 - protein, 142 aa, synthetic construct
PHTKPSVFVMKNGTNVACLVKEFYPKDIRINLVSSKKITEFDPAIVISPSGKYNAVKLGKYEDSNSVTCSVQHDNKTVHSTDFMDPKDNCSKDANDTLLLQLTNTSAYYMYLLLLLKSVVYFAIITCCLLRRTAFCCNGEKS

SEQ ID NO: 22542 - protein, 151 aa, synthetic construct; identical to SEQ ID NO: 18816

SEQ ID NO: 22543 - protein, 144 aa, synthetic construct
PHTKPSVFVMKNGTNVACLVKEFYPKDIRINLVSSKKITEFDPAIVISPSGKYNAVKLGKYEDSNSVTCSVQHDNKTVHSTDFDHVKPKETENTKQPSKSCHKPKAIVHTEKVNMMSLTVLGLRMLFAKTVAVNFLLTAKLFFL

SEQ ID NO: 22544 - protein, 150 aa, synthetic construct
PHTKPSVFVMKNGTNVACLVKEFYPKDIRINLVSSKKITEFDPAIVISPSGKYNAVKLGKYEDSNSVTCSVQHDNKTVHSTDFEVKTDSTIPEDTFFPSPESSCDVKLVEKSFETDTNLNFQNLSVIGFRILLLKVAGFNLLMTLRLWSS

SEQ ID NO: 22545 - protein, 140 aa, synthetic construct
PHTKPSVFVMKNGTNVACLVKEFYPKDIRINLVSSKKITEFDPAIVISPSGKYNAVKLGKYEDSNSVTCSVQHDNKTVHSTDFEVKTDSTESSCDVKLVEKSFETDTNLNFQNLSVIGFRILLLKVAGFNLLMTLRLWSS

SEQ ID NO: 22546 - protein, 149 aa, synthetic construct
PHTKPSVFVMKNGTNVACLVKEFYPKDIRINLVSSKKITEFDPAIVISPSGKYNAVKLGKYEDSNSVTCSVQHDNKTVHSTDFEVKTDSTPEDTFFPSPESSCDVKLVEKSFETDTNLNFQNLSVIGFRILLLKVAGFNLLMTLRLWSS

SEQ ID NO: 22547 - protein, 143 aa, synthetic construct
PHTKPSVFVMKNGTNVACLVKEFYPKDIRINLVSSKKITEFDPAIVISPSGKYNAVKLGKYEDSNSVTCSVQHDNKTVHSTDFEVKTDSTGRADCGFTSESYQQGVLSATILYEILLGKATLYAVLVSALVLMAMVKRKDSRG

SEQ ID NO: 22548 - protein, 141 aa, synthetic construct
PHTKPSVFVMKNGTNVACLVKEFYPKDIRINLVSSKKITEFDPAIVISPSGKYNAVKLGKYEDSNSVTCSVQHDNKTVHSTDFEVKTDSTADCGFTSESYQQGVLSATILYEILLGKATLYAVLVSALVLMAMVKRKDSRG

SEQ ID NO: 22549 - protein, 151 aa, synthetic construct
PHTKPSVFVMKNGTNVACLVKEFYPKDIRINLVSSKKITEFDPAIVISPSGKYNAVKLGKYEDSNSVTCSVQHDNKTVHSTDFEVKTDSTQIVSAEAWGRADCGFTSESYQQGVLSATILYEILLGKATLYAVLVSALVLMAMVKRKDSRG

SEQ ID NO: 22550 - protein, 159 aa, synthetic construct
PHTKPSVFVMKNGTNVACLVKEFYPKDIRINLVSSKKITEFDPAIVISPSGKYNAVKLGKYEDSNSVTCSVQHDNKTVHSTDFEVKTDSTFPPIKTDVITMDPKDNCSKDANDTLLLQLTNTSAYYMYLLLLLKSVVYFAIITCCLLRRTAFCCNGEKS

SEQ ID NO: 22551 - protein, 157 aa, synthetic construct
PHTKPSVFVMKNGTNVACLVKEFYPKDIRINLVSSKKITEFDPAIVISPSGKYNAVKLGKYEDSNSVTCSVQHDNKTVHSTDFEVKTDSTPIKTDVITMDPKDNCSKDANDTLLLQLTNTSAYYMYLLLLLKSVVYFAIITCCLLRRTAFCCNGEKS

SEQ ID NO: 22552 - protein, 149 aa, synthetic construct
PHTKPSVFVMKNGTNVACLVKEFYPKDIRINLVSSKKITEFDPAIVISPSGKYNAVKLGKYEDSNSVTCSVQHDNKTVHSTDFEVKTDSTMDPKDNCSKDANDTLLLQLTNTSAYYMYLLLLLKSVVYFAIITCCLLRRTAFCCNGEKS

SEQ ID NO: 22553 - protein, 157 aa, synthetic construct; identical to SEQ ID NO: 22551

SEQ ID NO: 22554 - protein, 143 aa, synthetic construct
PHTKPSVFVMKNGTNVACLVKEFYPKDIRINLVSSKKITEFDPAIVISPSGKYNAVKLGKYEDSNSVTCSVQHDNKTVHSTDFEVKTDSTCSKDANDTLLLQLTNTSAYYMYLLLLLKSVVYFAIITCCLLRRTAFCCNGEKS

SEQ ID NO: 22555 - protein, 143 aa, synthetic construct; identical to SEQ ID NO: 22533

SEQ ID NO: 22556 - protein, 133 aa, synthetic construct; identical to SEQ ID NO: 22534

SEQ ID NO: 22557 - protein, 142 aa, synthetic construct; identical to SEQ ID NO: 22535

SEQ ID NO: 22558 - protein, 136 aa, synthetic construct; identical to SEQ ID NO: 22536

SEQ ID NO: 22559 - protein, 134 aa, synthetic construct; identical to SEQ ID NO: 22537

SEQ ID NO: 22560 - protein, 144 aa, synthetic construct; identical to SEQ ID NO: 22538

SEQ ID NO: 22561 - protein, 152 aa, synthetic construct; identical to SEQ ID NO: 22539

SEQ ID NO: 22562 - protein, 150 aa, synthetic construct; identical to SEQ ID NO: 22540

SEQ ID NO: 22563 - protein, 142 aa, synthetic construct; identical to SEQ ID NO: 22541

SEQ ID NO: 22564 - protein, 150 aa, synthetic construct; identical to SEQ ID NO: 22540

SEQ ID NO: 22565 - protein, 136 aa, synthetic construct
PHTKPSVFVMKNGTNVACLVKEFYPKDIRINLVSSKKITEFDPAIVISPSGKYNAVKLGKYEDSNSVTCSVQHDNKTVHSTDFCSKDANDTLLLQLTNTSAYYMYLLLLLKSVVYFAIITCCLLRRTAFCCNGEKS

SEQ ID NO: 22566 - protein, 150 aa, synthetic construct; identical to SEQ ID NO: 22544

SEQ ID NO: 22567 - protein, 140 aa, synthetic construct; identical to SEQ ID NO: 22545

SEQ ID NO: 22568 - protein, 149 aa, synthetic construct; identical to SEQ ID NO: 22546

SEQ ID NO: 22569 - protein, 143 aa, synthetic construct; identical to SEQ ID NO: 22547

SEQ ID NO: 22570 - protein, 141 aa, synthetic construct; identical to SEQ ID NO: 22548

SEQ ID NO: 22571 - protein, 151 aa, synthetic construct; identical to SEQ ID NO: 22549

SEQ ID NO: 22572 - protein, 159 aa, synthetic construct; identical to SEQ ID NO: 22550

SEQ ID NO: 22573 - protein, 157 aa, synthetic construct; identical to SEQ ID NO: 22551

SEQ ID NO: 22574 - protein, 149 aa, synthetic construct; identical to SEQ ID NO: 22552

SEQ ID NO: 22575 - protein, 157 aa, synthetic construct; identical to SEQ ID NO: 22551

SEQ ID NO: 22576 - protein, 143 aa, synthetic construct; identical to SEQ ID NO: 22554

SEQ ID NO: 22577 - protein, 490 aa, synthetic construct
MALPVTALLLPLALLLHAARPDIQMTQSPSTLSASVGDRVTITCRASQSISNWLAWYQQKPGRAPNLLISKASSLKSGVPSRFSGSGSGTEFTLTVSSLQPDDFATYYCQQYYSYSYTFGQGTKLEIKGGGGSGGGGSGGGGSQVQLVESGGGVVQPGRSLRLSCVASGFTISSYGMNWVRQAPGKGLEWVAVISYDGGNKYSVDSVKGRFTISRDNSKNTLYLQMNSLRAEDSAVYYCARGRYFDLWGRGTLVTVSSTREQKLISEEDLKIEVMYPPPYLDNEKSNGTIIHVKGKHLCPSPLFPGPSKPFWVLVVVGGVLACYSLLVTVAFIIFWVRSKRSRLLHSDYMNMTPRRPGPTRKHYQPYAPPRDFAAYRSRVKFSRSADAPAYQQGQNQLYNELNLGRREEYDVLDKRRGRDPEMGGKPRRKNPQEGLYNELQKDKMAEAYSEIGMKGERRRGKGHDGLYQGLSTATKDTYDALHMQALPPR

SEQ ID NO: 22578 - protein, 496 aa, synthetic construct
MALPVTALLLPLALLLHAARPDIQMTQSPSTLSASVGDRVTITCRASQSISNWLAWYQQKPGRAPNLLISKASSLKSGVPSRFSGSGSGTEFTLTVSSLQPDDFATYYCQQYYSYSYTFGQGTKLEIKGGGGSGGGGSGGGGSQVQLVESGGGVVQPGRSLRLSCVASGFTISSYGMNWVRQAPGKGLEWVAVISYDGGNKYSVDSVKGRFTISRDNSKNTLYLQMNSLRAEDSAVYYCARGRYFDLWGRGTLVTVSSTREQKLISEEDLAKPTTTPAPRPPTPAPTIASQPLSLRPEACRPAAGGAVHTRGLDFACDIYIWAPLAGTCGVLLLSLVITLYCKRGRKKLLYIFKQPFMRPVQTTQEEDGCSCRFPEEEEGGCELRVKFSRSADAPAYQQGQNQLYNELNLGRREEYDVLDKRRGRDPEMGGKPRRKNPQEGLYNELQKDKMAEAYSEIGMKGERRRGKGHDGLYQGLSTATKDTYDALHMQALPPR

SEQ ID NO: 22579 - protein, 496 aa, synthetic construct
MALPVTALLLPLALLLHAARPQVQLVESGGGVVQPGRSLRLSCVASGFTISSYGMNWVRQAPGKGLEWVAVISYDGGNKYSVDSVKGRFTISRDNSKNTLYLQMNSLRAEDSAVYYCARGRYFDLWGRGTLVTVSSGGGGSGGGGSGGGGSDIQMTQSPSTLSASVGDRVTITCRASQSISNWLAWYQQKPGRAPNLLISKASSLKSGVPSRFSGSGSGTEFTLTVSSLQPDDFATYYCQQYYSYSYTFGQGTKLEIKTREQKLISEEDLAKPTTTPAPRPPTPAPTIASQPLSLRPEACRPAAGGAVHTRGLDFACDIYIWAPLAGTCGVLLLSLVITLYCKRGRKKLLYIFKQPFMRPVQTTQEEDGCSCRFPEEEEGGCELRVKFSRSADAPAYQQGQNQLYNELNLGRREEYDVLDKRRGRDPEMGGKPRRKNPQEGLYNELQKDKMAEAYSEIGMKGERRRGKGHDGLYQGLSTATKDTYDALHMQALPPR

SEQ ID NO: 22580 - protein, 909 aa, synthetic construct
MALPVTALLLPLALLLHAARPDIQMTQSPSTLSASVGDRVTITCRASQSISNWLAWYQQKPGRAPNLLISKASSLKSGVPSRFSGSGSGTEFTLTVSSLQPDDFATYYCQQYYSYSYTFGQGTKLEIKGGGGSGGGGSGGGGSQVQLVESGGGVVQPGRSLRLSCVASGFTISSYGMNWVRQAPGKGLEWVAVISYDGGNKYSVDSVKGRFTISRDNSKNTLYLQMNSLRAEDSAVYYCARGRYFDLWGRGTLVTVSSTREQKLISEEDLAKPTTTPAPRPPTPAPTIASQPLSLRPEACRPAAGGAVHTRGLDFACDIYIWAPLAGTCGVLLLSLVITLYCGRARVKFSRSADAPAYQQGQNQLYNELNLGRREEYDVLDKRRGRDPEMGGKPRRKNPQEGLYNELQKDKMAEAYSEIGMKGERRRGKGHDGLYQGLSTATKDTYDALHMQALPPRSRGSGATNFSLLKQAGDVEENPGPGIHMATYEVLCEVARKLGTDDREVVLFLLNVFIPQPTLAQLIGALRALKEEGRLTFPLLAECLFRAGRRDLLRDLLHLDPRFLERHLAGTMSYFSPYQLTVLHVDGELCARDIRSLIFLSKDTIGSRSTPQTFLHWVYCMENLDLLGPTDVDALMSMLRSLSRVDLQRQVQTLMGLHLSGPSHSQHYRHTPLETDFYDYKDDDDKTSGSGEGRGSLLTCGDVEENPGPHMTEYKPTVRLATRDDVPRAVRTLAAAFADYPATRHTVDPDRHIERVTELQELFLTRVGLDIGKVWVADDGAAVAVWTTPESVEAGAVFAEIGPRMAELSGSRLAAQQQMEGLLAPHRPKEPAWFLATVGVSPDHQGKGLGSAVVLPGVEAAERAGVPAFLETSAPRNLPFYERLGFTVTADVEVPEGPRTWCMTRKPGA

SEQ ID NO: 22581 - protein, 849 aa, synthetic construct
MALPVTALLLPLALLLHAARPDIQMTQSPSTLSASVGDRVTITCRASQSISNWLAWYQQKPGRAPNLLISKASSLKSGVPSRFSGSGSGTEFTLTVSSLQPDDFATYYCQQYYSYSYTFGQGTKLEIKLEIQNPDPAVYQLRDSKSSDKSVCLFTDFDSQTNVSQSKDSDVYITDKCVLDMRSMDFKSNSAVAWSNKSDFACANAFNNSIIPEDTFFPSSDVPCDVKLVEKSFETDTNLNFQNLSVIGFRILLLKVAGFNLLMTLRLWSSRAKRSGSGVKQTLNFDLLKLAGDVESNPGPTSMDWIWRILFLVGAATGAHSFEQVQLVESGGGVVQPGRSLRLSCVASGFTISSYGMNWVRQAPGKGLEWVAVISYDGGNKYSVDSVKGRFTISRDNSKNTLYLQMNSLRAEDSAVYYCARGRYFDLWGRGTLVTVSSTREDLKNVFPPEVAVFEPSKAEIAHTQKATLVCLATGFYPDHVELSWWVNGKEVHSGVCTDPQPLKEQPALNDSRYCLSSRLRVSATFWQNPRNHFRCQVQFYGLSENDEWTQDRAKPVTQIVSAEAWGRADCGITSASYHQGVLSATILYEILLGKATLYAVLVSALVLMAMVKRKDSRGRAKRSGSGATNFSLLKQAGDVEENPGPSRGHMTEYKPTVRLATRDDVPRAVRTLAAAFADYPATRHTVDPDRHIERVTELQELFLTRVGLDIGKVWVADDGAAVAVWTTPESVEAGAVFAEIGPRMAELSGSRLAAQQQMEGLLAPHRPKEPAWFLATVGVSPDHQGKGLGSAVVLPGVEAAERAGVPAFLETSAPRNLPFYERLGFTVTADVEVPEGPRTWCMTRKPGA

SEQ ID NO: 22582 - protein, 848 aa, synthetic construct
MALPVTALLLPLALLLHAARPDIQMTQSPSTLSASVGDRVTITCRASQSISNWLAWYQQKPGRAPNLLISKASSLKSGVPSRFSGSGSGTEFTLTVSSLQPDDFATYYCQQYYSYSYTFGQGTKLEIKLEDLKNVFPPEVAVFEPSKAEIAHTQKATLVCLATGFYPDHVELSWWVNGKEVHSGVCTDPQPLKEQPALNDSRYCLSSRLRVSATFWQNPRNHFRCQVQFYGLSENDEWTQDRAKPVTQIVSAEAWGRADCGITSASYHQGVLSATILYEILLGKATLYAVLVSALVLMAMVKRKDSRGRAKRSGSGATNFSLLKQAGDVEENPGPTSMDWIWRILFLVGAATGAHSFEQVQLVESGGGVVQPGRSLRLSCVASGFTISSYGMNWVRQAPGKGLEWVAVISYDGGNKYSVDSVKGRFTISRDNSKNTLYLQMNSLRAEDSAVYYCARGRYFDLWGRGTLVTVSSTRIQNPDPAVYQLRDSKSSDKSVCLFTDFDSQTNVSQSKDSDVYITDKCVLDMRSMDFKSNSAVAWSNKSDFACANAFNNSIIPEDTFFPSSDVPCDVKLVEKSFETDTNLNFQNLSVIGFRILLLKVAGFNLLMTLRLWSSRAKRSGSGVKQTLNFDLLKLAGDVESNPGPSRGHMTEYKPTVRLATRDDVPRAVRTLAAAFADYPATRHTVDPDRHIERVTELQELFLTRVGLDIGKVWVADDGAAVAVWTTPESVEAGAVFAEIGPRMAELSGSRLAAQQQMEGLLAPHRPKEPAWFLATVGVSPDHQGKGLGSAVVLPGVEAAERAGVPAFLETSAPRNLPFYERLGFTVTADVEVPEGPRTWCMTRKPGA

SEQ ID NO: 22583 - protein, 615 aa, synthetic construct
MALPVTALLLPLALLLHAARPDIQMTQSPSTLSASVGDRVTITCRASQSISNWLAWYQQKPGRAPNLLISKASSLKSGVPSRFSGSGSGTEFTLTVSSLQPDDFATYYCQQYYSYSYTFGQGTKLEIKLEDLKNVFPPEVAVFEPSEAEISHTQKATLVCLATGFYPDHVELSWWVNGKEVHSGVCTDPQPLKEQPALNDSRYCLSSRLRVSATFWQNPRNHFRCQVQFYGLSENDEWTQDRAKPVTQIVSAEAWGRADCGFTSESYQQGVLSATILYEILLGKATLYAVLVSALVLMAMVKRKDSRGRAKRSGSGATNFSLLKQAGDVEENPGPTSMDWIWRILFLVGAATGAHSFEQVQLVESGGGVVQPGRSLRLSCVASGFTISSYGMNWVRQAPGKGLEWVAVISYDGGNKYSVDSVKGRFTISRDNSKNTLYLQMNSLRAEDSAVYYCARGRYFDLWGRGTLVTVSSTRIQNPDPAVYQLRDSKSSDKSVCLFTDFDSQTNVSQSKDSDVYITDKCVLDMRSMDFKSNSAVAWSNKSDFACANAFNNSIIPEDTFFPSPESSCDVKLVEKSFETDTNLNFQNLSVIGFRILLLKVAGFNLLMTLRLWSS

SEQ ID NO: 22584 - protein, 840 aa, synthetic construct
MALPVTALLLPLALLLHAARPDIQMTQSPSTLSASVGDRVTITCRASQSISNWLAWYQQKPGRAPNLLISKASSLKSGVPSRFSGSGSGTEFTLTVSSLQPDDFATYYCQQYYSYSYTFGQGTKLEIKLEDLKNVFPPEVAVFEPSEAEISHTQKATLVCLATGFYPDHVELSWWVNGKEVHSGVCTDPQPLKEQPALNDSRYCLSSRLRVSATFWQNPRNHFRCQVQFYGLSENDEWTQDRAKPVTQIVSAEAWGRADCGFTSESYQQGVLSATILYEILLGKATLYAVLVSALVLMAMVKRKDSRGRAKRSGSGATNFSLLKQAGDVEENPGPTSMDWIWRILFLVGAATGAHSFEQVQLVESGGGVVQPGRSLRLSCVASGFTISSYGMNWVRQAPGKGLEWVAVISYDGGNKYSVDSVKGRFTISRDNSKNTLYLQMNSLRAEDSAVYYCARGRYFDLWGRGTLVTVSSTRIQNPDPAVYQLRDSKSSDKSVCLFTDFDSQTNVSQSKDSDVYITDKCVLDMRSMDFKSNSAVAWSNKSDFACANAFNNSIIPEDTFFPSPESSCDVKLVEKSFETDTNLNFQNLSVIGFRILLLKVAGFNLLMTLRLWSSRAKRSGSGVKQTLNFDLLKLAGDVESNPGPSRGGIHTMATYEVLCEVARKLGTDDREVVLFLLNVFIPQPTLAQLIGALRALKEEGRLTFPLLAECLFRAGRRDLLRDLLHLDPRFLERHLAGTMSYFSPYQLTVLHVDGELCARDIRSLIFLSKDTIGSRSTPQTFLHWVYCMENLDLLGPTDVDALMSMLRSLSRVDLQRQVQTLMGLHLSGPSHSQHYRHTP

SEQ ID NO: 22585 - protein, 619 aa, synthetic construct
MALPVTALLLPLALLLHAARPDIQMTQSPSTLSASVGDRVTITCRASQSISNWLAWYQQKPGRAPNLLISKASSLKSGVPSRFSGSGSGTEFTLTVSSLQPDDFATYYCQQYYSYSYTFGQGTKLEIKLEIQNPDPAVYQLRDSKSSDKSVCLFTDFDSQTNVSQSKDSDVYITDKCVLDMRSMDFKSNSAVAWSNKSDFACANAFNNSIIPEDTFFPSPESSCDVKLVEKSFETDTNLNFQNLSVIGFRILLLKVAGFNLLMTLRLWSSRAKRSGSGVKQTLNFDLLKLAGDVESNPGPTSMDWIWRILFLVGAATGAHSFEQVQLVESGGGVVQPGRSLRLSCVASGFTISSYGMNWVRQAPGKGLEWVAVISYDGGNKYSVDSVKGRFTISRDNSKNTLYLQMNSLRAEDSAVYYCARGRYFDLWGRGTLVTVSSTREDLKNVFPPEVAVFEPSEAEISHTQKATLVCLATGFYPDHVELSWWVNGKEVHSGVCTDPQPLKEQPALNDSRYCLSSRLRVSATFWQNPRNHFRCQVQFYGLSENDEWTQDRAKPVTQIVSAEAWGRADCGFTSESYQQGVLSATILYEILLGKATLYAVLVSALVLMAMVKRKDSRG

SEQ ID NO: 22586 - protein, 841 aa, synthetic construct
MALPVTALLLPLALLLHAARPDIQMTQSPSTLSASVGDRVTITCRASQSISNWLAWYQQKPGRAPNLLISKASSLKSGVPSRFSGSGSGTEFTLTVSSLQPDDFATYYCQQYYSYSYTFGQGTKLEIKLEIQNPDPAVYQLRDSKSSDKSVCLFTDFDSQTNVSQSKDSDVYITDKCVLDMRSMDFKSNSAVAWSNKSDFACANAFNNSIIPEDTFFPSPESSCDVKLVEKSFETDTNLNFQNLSVIGFRILLLKVAGFNLLMTLRLWSSRAKRSGSGVKQTLNFDLLKLAGDVESNPGPTSMDWIWRILFLVGAATGAHSFEQVQLVESGGGVVQPGRSLRLSCVASGFTISSYGMNWVRQAPGKGLEWVAVISYDGGNKYSVDSVKGRFTISRDNSKNTLYLQMNSLRAEDSAVYYCARGRYFDLWGRGTLVTVSSTREDLKNVFPPEVAVFEPSEAEISHTQKATLVCLATGFYPDHVELSWWVNGKEVHSGVCTDPQPLKEQPALNDSRYCLSSRLRVSATFWQNPRNHFRCQVQFYGLSENDEWTQDRAKPVTQIVSAEAWGRADCGFTSESYQQGVLSATILYEILLGKATLYAVLVSALVLMAMVKRKDSRGRAKRSGSGATNFSLLKQAGDVEENPGPSRGGIHTMATYEVLCEVARKLGTDDREVVLFLLNVFIPQPTLAQLIGALRALKEEGRLTFPLLAECLFRAGRRDLLRDLLHLDPRFLERHLAGTMSYFSPYQLTVLHVDGELCARDIRSLIFLSKDTIGSRSTPQTFLHWVYCMENLDLLGPTDVDALMSMLRSLSRVDLQRQVQTLMGLHLSGPSHSQHYRHTP

SEQ ID NO: 22587 - protein, 893 aa, synthetic construct
MALPVTALLLPLALLLHAARPLEGKPIPNPLLGLDSTGSGEDLKNVFPPEVAVFEPSKAEIAHTQKATLVCLATGFYPDHVELSWWVNGKEVHSGVCTDPQPLKEQPALNDSRYCLSSRLRVSATFWQNPRNHFRCQVQFYGLSENDEWTQDRAKPVTQIVSAEAWGRADCGITSASYHQGVLSATILYEILLGKATLYAVLVSALVLMAMVKRKDSRGRAKRSGSGATNFSLLKQAGDVEENPGPTSMALPVTALLLPLALLLHAARPDIQMTQSPSTLSASVGDRVTITCRASQSISNWLAWYQQKPGRAPNLLISKASSLKSGVPSRFSGSGSGTEFTLTVSSLQPDDFATYYCQQYYSYSYTFGQGTKLEIKGGGGSGGGGSGGGGSQVQLVESGGGVVQPGRSLRLSCVASGFTISSYGMNWVRQAPGKGLEWVAVISYDGGNKYSVDSVKGRFTISRDNSKNTLYLQMNSLRAEDSAVYYCARGRYFDLWGRGTLVTVSSTREQKLISEEDGSGIQNPDPAVYQLRDSKSSDKSVCLFTDFDSQTNVSQSKDSDVYITDKCVLDMRSMDFKSNSAVAWSNKSDFACANAFNNSIIPEDTFFPSSDVPCDVKLVEKSFETDTNLNFQNLSVIGFRILLLKVAGFNLLMTLRLWSSRAKRSGSGVKQTLNFDLLKLAGDVESNPGPSRGHMTEYKPTVRLATRDDVPRAVRTLAAAFADYPATRHTVDPDRHIERVTELQELFLTRVGLDIGKVWVADDGAAVAVWTTPESVEAGAVFAEIGPRMAELSGSRLAAQQQMEGLLAPHRPKEPAWFLATVGVSPDHQGKGLGSAVVLPGVEAAERAGVPAFLETSAPRNLPFYERLGFTVTADVEVPEGPRTWCMTRKPGA

SEQ ID NO: 22588 - protein, 894 aa, synthetic construct
MALPVTALLLPLALLLHAARPLEQKLISEEDLGSGDRPDPAVYQLRDSKSSDKSVCLFTDFDSQTNVSQSKDSDVYITDKCVLDMRSMDFKSNSAVAWSNKSDFACANAFNNSIIPEDTFFPSPESSCDVKLVEKSFETDTNLNFQNLSVIGFRILLLKVAGFNLLMTLRLWSSSSRAKRSGSGVKQTLNFDLLKLAGDVESNPGPTSMALPVTALLLPLALLLHAARPDIQMTQSPSTLSASVGDRVTITCRASQSISNWLAWYQQKPGRAPNLLISKASSLKSGVPSRFSGSGSGTEFTLTVSSLQPDDFATYYCQQYYSYSYTFGQGTKLEIKGGGGSGGGGSGGGGSQVQLVESGGGVVQPGRSLRLSCVASGFTISSYGMNWVRQAPGKGLEWVAVISYDGGNKYSVDSVKGRFTISRDNSKNTLYLQMNSLRAEDSAVYYCARGRYFDLWGRGTLVTVSSTRGKPIPNPLLGLDSTGSGEDLKNVFPPEVAVFEPSEAEISHTQKATLVCLATGFYPDHVELSWWVNGKEVHSGVCTDPQPLKEQPALNDSRYCLSSRLRVSATFWQNPRNHFRCQVQFYGLSENDEWTQDRAKPVTQIVSAEAWGRADCGFTSESYQQGVLSATILYEILLGKATLYAVLVSALVLMAMVKRKDSRGRAKRSGSGATNFSLLKQAGDVEENPGPSRGHMTEYKPTVRLATRDDVPRAVRTLAAAFADYPATRHTVDPDRHIERVTELQELFLTRVGLDIGKVWVADDGAAVAVWTTPESVEAGAVFAEIGPRMAELSGSRLAAQQQMEGLLAPHRPKEPAWFLATVGVSPDHQGKGLGSAVVLPGVEAAERAGVPAFLETSAPRNLPFYERLGFTVTADVEVPEGPRTWCMTRKPGA

SEQ ID NO: 22589 - protein, 848 aa, synthetic construct
MALPVTALLLPLALLLHAARPDIQMTQSPSTLSASVGDRVTITCRASQSISNWLAWYQQKPGRAPNLLISKASSLKSGVPSRFSGSGSGTEFTLTVSSLQPDDFATYYCQQYYSYSYTFGQGTKLEIKLEDLKNVFPPEVAVFEPSEAEISHTQKATLVCLATGFYPDHVELSWWVNGKEVHSGVSTDPQPLKEQPALNDSRYCLSSRLRVSATFWQNPRNHFRCQVQFYGLSENDEWTQDRAKPVTQIVSAEAWGRADCGFTSESYQQGVLSATILYEILLGKATLYAVLVSALVLMAMVKRKDSRGRAKRSGSGATNFSLLKQAGDVEENPGPTSMDWIWRILFLVGAATGAHSFEQVQLVESGGGVVQPGRSLRLSCVASGFTISSYGMNWVRQAPGKGLEWVAVISYDGGNKYSVDSVKGRFTISRDNSKNTLYLQMNSLRAEDSAVYYCARGRYFDLWGRGTLVTVSSTRIQNPDPAVYQLRDSKSSDKSVCLFTDFDSQTNVSQSKDSDVYITDKTVLDMRSMDFKSNSAVAWSNKSDFACANAFNNSIIPEDTFFPSPESSCDVKLVEKSFETDTNLNFQNLSVIGFRILLLKVAGFNLLMTLRLWSSRAKRSGSGVKQTLNFDLLKLAGDVESNPGPSRGHMTEYKPTVRLATRDDVPRAVRTLAAAFADYPATRHTVDPDRHIERVTELQELFLTRVGLDIGKVWVADDGAAVAVWTTPESVEAGAVFAEIGPRMAELSGSRLAAQQQMEGLLAPHRPKEPAWFLATVGVSPDHQGKGLGSAVVLPGVEAAERAGVPAFLETSAPRNLPFYERLGFTVTADVEVPEGPRTWCMTRKPGA

SEQ ID NO: 22590 - protein, 930 aa, synthetic construct
MALPVTALLLPLALLLHAARPDIQMTQSPSTLSASVGDRVTITCRASQSISNWLAWYQQKPGRAPNLLISKASSLKSGVPSRFSGSGSGTEFTLTVSSLQPDDFATYYCQQYYSYSYTFGQGTKLEIKLEDLKNVFPPEVAVFEPSEAEISHTQKATLVCLATGFYPDHVELSWWVNGKEVHSGVSTDPQPLKEQPALNDSRYCLSSRLRVSATFWQNPRNHFRCQVQFYGLSENDEWTQDRAKPVTQIVSAEAWGRADCGFTSESYQQGVLSATILYEILLGKATLYAVLVSALVLMAMVKRKDSRGRAKRSGSGATNFSLLKQAGDVEENPGPTSMDWIWRILFLVGAATGAHSFEQVQLVESGGGVVQPGRSLRLSCVASGFTISSYGMNWVRQAPGKGLEWVAVISYDGGNKYSVDSVKGRFTISRDNSKNTLYLQMNSLRAEDSAVYYCARGRYFDLWGRGTLVTVSSTREQKLISEEDGSGTPFPSLAPPIMLLVDGKQQMVVVCLVLDVAPPGLDSPIWFSAGNGSALDAFTYGPSPATDGTWTNLAHLSLPSEELASWEPLVCHTGPGAEGHSRSTQPMHLSGEASTARTCPQEPLRGTPGGALWLGVLRLLLFKLLLFDLLLTCSCLCDPAGPLPSPATTTRLRALGSHRLHPATETGGREATSSPRPQPRDRRWGDTPPGRKPGSPVRAKRSGSGVKQTLNFDLLKLAGDVESNPGPSRGHMTEYKPTVRLATRDDVPRAVRTLAAAFADYPATRHTVDPDRHIERVTELQELFLTRVGLDIGKVWVADDGAAVAVWTTPESVEAGAVFAEIGPRMAELSGSRLAAQQQMEGLLAPHRPKEPAWFLATVGVSPDHQGKGLGSAVVLPGVEAAERAGVPAFLETSAPRNLPFYERLGFTVTADVEVPEGPRTWCMTRKPGA

SEQ ID NO: 22591 - protein, 948 aa, synthetic construct
MALPVTALLLPLALLLHAARPLEDLKNVFPPEVAVFEPSEAEISHTQKATLVCLATGFYPDHVELSWWVNGKEVHSGVSTDPQPLKEQPALNDSRYCLSSRLRVSATFWQNPRNHFRCQVQFYGLSENDEWTQDRAKPVTQIVSAEAWGRADCGFTSESYQQGVLSATILYEILLGKATLYAVLVSALVLMAMVKRKDSRGRAKRSGSGATNFSLLKQAGDVEENPGPTSMALPVTALLLPLALLLHAARPDIQMTQSPSTLSASVGDRVTITCRASQSISNWLAWYQQKPGRAPNLLISKASSLKSGVPSRFSGSGSGTEFTLTVSSLQPDDFATYYCQQYYSYSYTFGQGTKLEIKGGGGSGGGGSGGGGSQVQLVESGGGVVQPGRSLRLSCVASGFTISSYGMNWVRQAPGKGLEWVAVISYDGGNKYSVDSVKGRFTISRDNSKNTLYLQMNSLRAEDSAVYYCARGRYFDLWGRGTLVTVSSTREQKLISEEDLGSGTPFPSLAPPIMLLVDGKQQMVVVCLVLDVAPPGLDSPIWFSAGNGSALDAFTYGPSPATDGTWTNLAHLSLPSEELASWEPLVCHTGPGAEGHSRSTQPMHLSGEASTARTCPQEPLRGTPGGALWLGVLRLLLFKLLLFDLLLTCSCLCDPAGPLPSPATTTRLRALGSHRLHPATETGGREATSSPRPQPRDRRWGDTPPGRKPGSPVRAKRSGSGVKQTLNFDLLKLAGDVESNPGPSRSRGHMTEYKPTVRLATRDDVPRAVRTLAAAFADYPATRHTVDPDRHIERVTELQELFLTRVGLDIGKVWVADDGAAVAVWTTPESVEAGAVFAEIGPRMAELSGSRLAAQQQMEGLLAPHRPKEPAWFLATVGVSPDHQGKGLGSAVVLPGVEAAERAGVPAFLETSAPRNLPFYERLGFTVTADVEVPEGPRTWCMTRKPGA

SEQ ID NO: 22592 - protein, 885 aa, synthetic construct
MALPVTALLLPLALLLHAARPDIQMTQSPSTLSASVGDRVTITCRASQSISNWLAWYQQKPGRAPNLLISKASSLKSGVPSRFSGSGSGTEFTLTVSSLQPDDFATYYCQQYYSYSYTFGQGTKLEIKLEGKPIPNPLLGLDSTGSGDKQLDADVSPKPTIFLPSIAETKLQKAGTYLCLLEKFFPDVIKIHWQEKKSNTILGSQEGNTMKTNDTYMKFSWLTVPEKSLDKEHRCIVRHENNKNGVDQEIIFPPIKTDVITMDPKDNCSKDANDTLLLQLTNTSAYYMYLLLLLKSVVYFAIITCCLLRRTAFCCNGEKSRAKRSGSGATNFSLLKQAGDVEENPGPTSMDWIWRILFLVGAATGAHSFEQVQLVESGGGVVQPGRSLRLSCVASGFTISSYGMNWVRQAPGKGLEWVAVISYDGGNKYSVDSVKGRFTISRDNSKNTLYLQMNSLRAEDSAVYYCARGRYFDLWGRGTLVTVSSTREQKLISEEDGSGSQPHTKPSVFVMKNGTNVACLVKEFYPKDIRINLVSSKKITEFDPAIVISPSGKYNAVKLGKYEDSNSVTCSVQHDNKTVHSTDFEVKTDSTDHVKPKETENTKQPSKSCHKPKAIVHTEKVNMMSLTVLGLRMLFAKTVAVNFLLTAKLFFLRAKRSGSGVKQTLNFDLLKLAGDVESNPGPSRGHMTEYKPTVRLATRDDVPRAVRTLAAAFADYPATRHTVDPDRHIERVTELQELFLTRVGLDIGKVWVADDGAAVAVWTTPESVEAGAVFAEIGPRMAELSGSRLAAQQQMEGLLAPHRPKEPAWFLATVGVSPDHQGKGLGSAVVLPGVEAAERAGVPAFLETSAPRNLPFYERLGFTVTADVEVPEGPRTWCMTRKPGA

SEQ ID NO: 22593 - protein, 623 aa, synthetic construct
MALPVTALLLPLALLLHAARPDIQMTQSPSTLSASVGDRVTITCRASQSISNWLAWYQQKPGRAPNLLISKASSLKSGVPSRFSGSGSGTEFTLTVSSLQPDDFATYYCQQYYSYSYTFGQGTKLEIKLESQPHTKPSVFVMKNGTNVACLVKEFYPKDIRINLVSSKKITEFDPAIVISPSGKYNAVKLGKYEDSNSVTCSVQHDNKTVHSTDFEVKTDSTDHVKPKETENTKQPSKSCHKPKAIVHTEKVNMMSLTVLGLRMLFAKTVAVNFLLTAKLFFLRAKRSGSGATNFSLLKQAGDVEENPGPTSMDWIWRILFLVGAATGAHSFEQVQLVESGGGVVQPGRSLRLSCVASGFTISSYGMNWVRQAPGKGLEWVAVISYDGGNKYSVDSVKGRFTISRDNSKNTLYLQMNSLRAEDSAVYYCARGRYFDLWGRGTLVTVSSTRDKQLDADVSPKPTIFLPSIAETKLQKAGTYLCLLEKFFPDVIKIHWQEKKSNTILGSQEGNTMKTNDTYMKFSWLTVPEKSLDKEHRCIVRHENNKNGVDQEIIFPPIKTDVITMDPKDNCSKDANDTLLLQLTNTSAYYMYLLLLLKSVVYFAIITCCLLRRTAFCCNGEKS

SEQ ID NO: 22594 - protein, 900 aa, synthetic construct
MALPVTALLLPLALLLHAARPLEGKPIPNPLLGLDSTGSGDKQLDADVSPKPTIFLPSIAETKLQKAGTYLCLLEKFFPDVIKIHWQEKKSNTILGSQEGNTMKTNDTYMKFSWLTVPEKSLDKEHRCIVRHENNKNGVDQEIIFPPIKTDVITMDPKDNCSKDANDTLLLQLTNTSAYYMYLLLLLKSVVYFAIITCCLLRRTAFCCNGEKSRAKRSGSGATNFSLLKQAGDVEENPGPTSMALPVTALLLPLALLLHAARPDIQMTQSPSTLSASVGDRVTITCRASQSISNWLAWYQQKPGRAPNLLISKASSLKSGVPSRFSGSGSGTEFTLTVSSLQPDDFATYYCQQYYSYSYTFGQGTKLEIKGGGGSGGGGSGGGGSQVQLVESGGGVVQPGRSLRLSCVASGFTISSYGMNWVRQAPGKGLEWVAVISYDGGNKYSVDSVKGRFTISRDNSKNTLYLQMNSLRAEDSAVYYCARGRYFDLWGRGTLVTVSSTREQKLISEEDGSGSQPHTKPSVFVMKNGTNVACLVKEFYPKDIRINLVSSKKITEFDPAIVISPSGKYNAVKLGKYEDSNSVTCSVQHDNKTVHSTDFEVKTDSTDHVKPKETENTKQPSKSCHKPKAIVHTEKVNMMSLTVLGLRMLFAKTVAVNFLLTAKLFFLRAKRSGSGVKQTLNFDLLKLAGDVESNPGPSRGHMTEYKPTVRLATRDDVPRAVRTLAAAFADYPATRHTVDPDRHIERVTELQELFLTRVGLDIGKVWVADDGAAVAVWTTPESVEAGAVFAEIGPRMAELSGSRLAAQQQMEGLLAPHRPKEPAWFLATVGVSPDHQGKGLGSAVVLPGVEAAERAGVPAFLETSAPRNLPFYERLGFTVTADVEVPEGPRTWCMTRKPGA

SEQ ID NO: 22595 - protein, 1025 aa, synthetic construct
MALPVTALLLPLALLLHAARPDIQMTQSPSTLSASVGDRVTITCRASQSISNWLAWYQQKPGRAPNLLISKASSLKSGVPSRFSGSGSGTEFTLTVSSLQPDDFATYYCQQYYSYSYTFGQGTKLEIKGQPKANPTVTLFPPSSEELQANKATLVCLISDFYPGAVTVAWKADGSPVKAGVETTKPSKQSNNKYAASSYLSLTPEQWKSHRSYSCQVTHEGSTVEKTVAPTECSGSQSFGLLDPKLCYLLDGILFIYGVILTALFLRVKFSRSADAPAYQQGQNQLYNELNLGRREEYDVLDKRRGRDPEMGGKPQRRKNPQEGLYNELQKDKMAEAYSEIGMKGERRRGKGHDGLYQGLSTATKDTYDALHMQALPPRRAKRSGSGATNFSLLKQAGDVEENPGPTSMDWIWRILFLVGAATGAHSFEQVQLVESGGGVVQPGRSLRLSCVASGFTISSYGMNWVRQAPGKGLEWVAVISYDGGNKYSVDSVKGRFTISRDNSKNTLYLQMNSLRAEDSAVYYCARGRYFDLWGRGTLVTVSSASTKGPSVFPLAPSSKSTSGGTAALGCLVKDYFPEPVTVSWNSGALTSGVHTFPAVLQSSGLYSLSSVVTVPSSSLGTQTYICNVNHKPSNTKVDKRVEPKSCGTQSFGLLDPKLCYLLDGILFIYGVILTALFLRVKFSRSADAPAYQQGQNQLYNELNLGRREEYDVLDKRRGRDPEMGGKPQRRKNPQEGLYNELQKDKMAEAYSEIGMKGERRRGKGHDGLYQGLSTATKDTYDALHMQALPPRRAKRSGSGVKQTLNFDLLKLAGDVESNPGPSRGHMTEYKPTVRLATRDDVPRAVRTLAAAFADYPATRHTVDPDRHIERVTELQELFLTRVGLDIGKVWVADDGAAVAVWTTPESVEAGAVFAEIGPRMAELSGSRLAAQQQMEGLLAPHRPKEPAWFLATVGVSPDHQGKGLGSAVVLPGVEAAERAGVPAFLETSAPRNLPFYERLGFTVTADVEVPEGPRTWCMTRKPGA

SEQ ID NO: 22596 - protein, 811 aa, synthetic construct
MALPVTALLLPLALLLHAARPDIQMTQSPSTLSASVGDRVTITCRASQSISNWLAWYQQKPGRAPNLLISKASSLKSGVPSRFSGSGSGTEFTLTVSSLQPDDFATYYCQQYYSYSYTFGQGTKLEIKLEDLKNVFPPEVAVFEPSEAEISHTQKATLVCLATGFYPDHVELSWWVNGKEVHSGVSTDPQPLKEQPALNDSRYCLSSRLRVSATFWQNPRNHFRCQVQFYGLSENDEWTQDRAKPVTQIVSAEAWGRADCGSQSFGLLDPKLCYLLDGILFIYGVILTALFLRVKFSRSADAPAYQQGQNQLYNELNLGRREEYDVLDKRRGRDPEMGGKPQRRKNPQEGLYNELQKDKMAEAYSEIGMKGERRRGKGHDGLYQGLSTATKDTYDALHMQALPPRRAKRSGSGATNFSLLKQAGDVEENPGPTSMDWIWRILFLVGAATGAHSFEQVQLVESGGGVVQPGRSLRLSCVASGFTISSYGMNWVRQAPGKGLEWVAVISYDGGNKYSVDSVKGRFTISRDNSKNTLYLQMNSLRAEDSAVYYCARGRYFDLWGRGTLVTVSSTRIQNPDPAVYQLRDSKSSDKSVCLFTDFDSQTNVSQSKDSDVYITDKTVLDMRSMDFKSNSAVAWSNKSDFACANAFNNSIIPEDTFFPSPESSCGTQSFGLLDPKLCYLLDGILFIYGVILTALFLRVKFSRSADAPAYQQGQNQLYNELNLGRREEYDVLDKRRGRDPEMGGKPQRRKNPQEGLYNELQKDKMAEAYSEIGMKGERRRGKGHDGLYQGLSTATKDTYDALHMQALPPR

SEQ ID NO: 22597 - protein, 811 aa, synthetic construct
MALPVTALLLPLALLLHAARPDIQMTQSPSTLSASVGDRVTITCRASQSISNWLAWYQQKPGRAPNLLISKASSLKSGVPSRFSGSGSGTEFTLTVSSLQPDDFATYYCQQYYSYSYTFGQGTKLEIKLEDLKNVFPPEVAVFEPSKAEIAHTQKATLVCLATGFYPDHVELSWWVNGKEVHSGVCTDPQPLKEQPALNDSRYCLSSRLRVSATFWQNPRNHFRCQVQFYGLSENDEWTQDRAKPVTQIVSAEAWGRADCGSQSFGLLDPKLCYLLDGILFIYGVILTALFLRVKFSRSADAPAYQQGQNQLYNELNLGRREEYDVLDKRRGRDPEMGGKPQRRKNPQEGLYNELQKDKMAEAYSEIGMKGERRRGKGHDGLYQGLSTATKDTYDALHMQALPPRRAKRSGSGATNFSLLKQAGDVEENPGPTSMDWIWRILFLVGAATGAHSFEQVQLVESGGGVVQPGRSLRLSCVASGFTISSYGMNWVRQAPGKGLEWVAVISYDGGNKYSVDSVKGRFTISRDNSKNTLYLQMNSLRAEDSAVYYCARGRYFDLWGRGTLVTVSSTRIQNPDPAVYQLRDSKSSDKSVCLFTDFDSQTNVSQSKDSDVYITDKCVLDMRSMDFKSNSAVAWSNKSDFACANAFNNSIIPEDTFFPSSDVPCGTQSFGLLDPKLCYLLDGILFIYGVILTALFLRVKFSRSADAPAYQQGQNQLYNELNLGRREEYDVLDKRRGRDPEMGGKPQRRKNPQEGLYNELQKDKMAEAYSEIGMKGERRRGKGHDGLYQGLSTATKDTYDALHMQALPPR

SEQ ID NO: 22598 - protein, 882 aa, synthetic construct
MALPVTALLLPLALLLHAARPDIQMTQSPSTLSASVGDRVTITCRASQSISNWLAWYQQKPGRAPNLLISKASSLKSGVPSRFSGSGSGTEFTLTVSSLQPDDFATYYCQQYYSYSYTFGQGTKLEIKLEGKPIPNPLLGLDSTGSGEDLKNVFPPEVAVFEPSEAEISHTQKATLVCLATGFYPDHVELSWWVNGKEVHSGVSTDPQPLKEQPALNDSRYCLSSRLRVSATFWQNPRNHFRCQVQFYGLSENDEWTQDRAKPVTQIVSAEAWGRADCGSQSFGLLDPKLCYLLDGILFIYGVILTALFLRVKFSRSADAPAYQQGQNQLYNELNLGRREEYDVLDKRRGRDPEMGGKPQRRKNPQEGLYNELQKDKMAEAYSEIGMKGERRRGKGHDGLYQGLSTATKDTYDALHMQALPPRRAKRSGSGATNFSLLKQAGDVEENPGPTSMDWIWRILFLVGAATGAHSFEQVQLVESGGGVVQPGRSLRLSCVASGFTISSYGMNWVRQAPGKGLEWVAVISYDGGNKYSVDSVKGRFTISRDNSKNTLYLQMNSLRAEDSAVYYCARGRYFDLWGRGTLVTVSSTREQKLISEEDGSGIQNPDPAVYQLRDSKSSDKSVCLFTDFDSQTNVSQSKDSDVYITDKTVLDMRSMDFKSNSAVAWSNKSDFACANAFNNSIIPEDTFFPSPESSCGTQSFGLLDPKLCYLLDGILFIYGVILTALFLRSKRSRLLHSDYMNMTPRRPGPTRKHYQPYAPPRDFAAYRSRVKFSRSADAPAYQQGQNQLYNELNLGRREEYDVLDKRRGRDPEMGGKPQRRKNPQEGLYNELQKDKMAEAYSEIGMKGERRRGKGHDGLYQGLSTATKDTYDALHMQALPPR

SEQ ID NO: 22599 - protein, 923 aa, synthetic construct
MALPVTALLLPLALLLHAARPDIQMTQSPSTLSASVGDRVTITCRASQSISNWLAWYQQKPGRAPNLLISKASSLKSGVPSRFSGSGSGTEFTLTVSSLQPDDFATYYCQQYYSYSYTFGQGTKLEIKLEGKPIPNPLLGLDSTGSGEDLKNVFPPEVAVFEPSEAEISHTQKATLVCLATGFYPDHVELSWWVNGKEVHSGVSTDPQPLKEQPALNDSRYCLSSRLRVSATFWQNPRNHFRCQVQFYGLSENDEWTQDRAKPVTQIVSAEAWGRADCGSQSFGLLDPKLCYLLDGILFIYGVILTALFLRSKRSRLLHSDYMNMTPRRPGPTRKHYQPYAPPRDFAAYRSRVKFSRSADAPAYQQGQNQLYNELNLGRREEYDVLDKRRGRDPEMGGKPQRRKNPQEGLYNELQKDKMAEAYSEIGMKGERRRGKGHDGLYQGLSTATKDTYDALHMQALPPRRAKRSGSGATNFSLLKQAGDVEENPGPTSMDWIWRILFLVGAATGAHSFEQVQLVESGGGVVQPGRSLRLSCVASGFTISSYGMNWVRQAPGKGLEWVAVISYDGGNKYSVDSVKGRFTISRDNSKNTLYLQMNSLRAEDSAVYYCARGRYFDLWGRGTLVTVSSTREQKLISEEDGSGIQNPDPAVYQLRDSKSSDKSVCLFTDFDSQTNVSQSKDSDVYITDKTVLDMRSMDFKSNSAVAWSNKSDFACANAFNNSIIPEDTFFPSPESSCGTQSFGLLDPKLCYLLDGILFIYGVILTALFLRSKRSRLLHSDYMNMTPRRPGPTRKHYQPYAPPRDFAAYRSRVKFSRSADAPAYQQGQNQLYNELNLGRREEYDVLDKRRGRDPEMGGKPQRRKNPQEGLYNELQKDKMAEAYSEIGMKGERRRGKGHDGLYQGLSTATKDTYDALHMQALPPR

SEQ ID NO: 22600 - protein, 884 aa, synthetic construct
MALPVTALLLPLALLLHAARPDIQMTQSPSTLSASVGDRVTITCRASQSISNWLAWYQQKPGRAPNLLISKASSLKSGVPSRFSGSGSGTEFTLTVSSLQPDDFATYYCQQYYSYSYTFGQGTKLEIKLEGKPIPNPLLGLDSTGSGEDLKNVFPPEVAVFEPSEAEISHTQKATLVCLATGFYPDHVELSWWVNGKEVHSGVSTDPQPLKEQPALNDSRYCLSSRLRVSATFWQNPRNHFRCQVQFYGLSENDEWTQDRAKPVTQIVSAEAWGRADCGSQSFGLLDPKLCYLLDGILFIYGVILTALFLRVKFSRSADAPAYQQGQNQLYNELNLGRREEYDVLDKRRGRDPEMGGKPQRRKNPQEGLYNELQKDKMAEAYSEIGMKGERRRGKGHDGLYQGLSTATKDTYDALHMQALPPRRAKRSGSGATNFSLLKQAGDVEENPGPTSMDWIWRILFLVGAATGAHSFEQVQLVESGGGVVQPGRSLRLSCVASGFTISSYGMNWVRQAPGKGLEWVAVISYDGGNKYSVDSVKGRFTISRDNSKNTLYLQMNSLRAEDSAVYYCARGRYFDLWGRGTLVTVSSTREQKLISEEDLGSGIQNPDPAVYQLRDSKSSDKSVCLFTDFDSQTNVSQSKDSDVYITDKTVLDMRSMDFKSNSAVAWSNKSDFACANAFNNSIIPEDTFFPSPESSCGTQSFGLLDPKLCYLLDGILFIYGVILTALFLKRGRKKLLYIFKQPFMRPVQTTQEEDGCSCRFPEEEEGGCELRVKFSRSADAPAYQQGQNQLYNELNLGRREEYDVLDKRRGRDPEMGGKPQRRKNPQEGLYNELQKDKMAEAYSEIGMKGERRRGKGHDGLYQGLSTATKDTYDALHMQALPPR

SEQ ID NO: 22601 - protein, 926 aa, synthetic construct
MALPVTALLLPLALLLHAARPDIQMTQSPSTLSASVGDRVTITCRASQSISNWLAWYQQKPGRAPNLLISKASSLKSGVPSRFSGSGSGTEFTLTVSSLQPDDFATYYCQQYYSYSYTFGQGTKLEIKLEGKPIPNPLLGLDSTGSGEDLKNVFPPEVAVFEPSEAEISHTQKATLVCLATGFYPDHVELSWWVNGKEVHSGVSTDPQPLKEQPALNDSRYCLSSRLRVSATFWQNPRNHFRCQVQFYGLSENDEWTQDRAKPVTQIVSAEAWGRADCGSQSFGLLDPKLCYLLDGILFIYGVILTALFLKRGRKKLLYIFKQPFMRPVQTTQEEDGCSCRFPEEEEGGCELRVKFSRSADAPAYQQGQNQLYNELNLGRREEYDVLDKRRGRDPEMGGKPQRRKNPQEGLYNELQKDKMAEAYSEIGMKGERRRGKGHDGLYQGLSTATKDTYDALHMQALPPRRAKRSGSGATNFSLLKQAGDVEENPGPTSMDWIWRILFLVGAATGAHSFEQVQLVESGGGVVQPGRSLRLSCVASGFTISSYGMNWVRQAPGKGLEWVAVISYDGGNKYSVDSVKGRFTISRDNSKNTLYLQMNSLRAEDSAVYYCARGRYFDLWGRGTLVTVSSTREQKLISEEDLGSGIQNPDPAVYQLRDSKSSDKSVCLFTDFDSQTNVSQSKDSDVYITDKTVLDMRSMDFKSNSAVAWSNKSDFACANAFNNSIIPEDTFFPSPESSCGTQSFGLLDPKLCYLLDGILFIYGVILTALFLKRGRKKLLYIFKQPFMRPVQTTQEEDGCSCRFPEEEEGGCELRVKFSRSADAPAYQQGQNQLYNELNLGRREEYDVLDKRRGRDPEMGGKPQRRKNPQEGLYNELQKDKMAEAYSEIGMKGERRRGKGHDGLYQGLSTATKDTYDALHMQALPPR

SEQ ID NO: 22602 - protein, 816 aa, synthetic construct
MALPVTALLLPLALLLHAARPDIQMTQSPSTLSASVGDRVTITCRASQSISNWLAWYQQKPGRAPNLLISKASSLKSGVPSRFSGSGSGTEFTLTVSSLQPDDFATYYCQQYYSYSYTFGQGTKLEIKLEQSFGLLDPKLCYLLDGILFIYGVILTALFLRVKFSRSADAPAYQQGQNQLYNELNLGRREEYDVLDKRRGRDPEMGGKPQRRKNPQEGLYNELQKDKMAEAYSEIGMKGERRRGKGHDGLYQGLSTATKDTYDALHMQALPPRRAKRSGSGATNFSLLKQAGDVEENPGPTSMDWIWRILFLVGAATGAHSFEQVQLVESGGGVVQPGRSLRLSCVASGFTISSYGMNWVRQAPGKGLEWVAVISYDGGNKYSVDSVKGRFTISRDNSKNTLYLQMNSLRAEDSAVYYCARGRYFDLWGRGTLVTVSSTRQSFGLLDPKLCYLLDGILFIYGVILTALFLRVKFSRSADAPAYQQGQNQLYNELNLGRREEYDVLDKRRGRDPEMGGKPQRRKNPQEGLYNELQKDKMAEAYSEIGMKGERRRGKGHDGLYQGLSTATKDTYDALHMQALPPRRAKRSGSGVKQTLNFDLLKLAGDVESNPGPSRGHMTEYKPTVRLATRDDVPRAVRTLAAAFADYPATRHTVDPDRHIERVTELQELFLTRVGLDIGKVWVADDGAAVAVWTTPESVEAGAVFAEIGPRMAELSGSRLAAQQQMEGLLAPHRPKEPAWFLATVGVSPDHQGKGLGSAVVLPGVEAAERAGVPAFLETSAPRNLPFYERLGFTVTADVEVPEGPRTWCMTRKPGA

SEQ ID NO: 22603 - protein, 641 aa, synthetic construct
MALPVTALLLPLALLLHAARPDIQMTQSPSTLSASVGDRVTITCRASQSISNWLAWYQQKPGRAPNLLISKASSLKSGVPSRFSGSGSGTEFTLTVSSLQPDDFATYYCQQYYSYSYTFGQGTKLEIKLEGQPKANPTVTLFPPSSEELQANKATLVCLISDFYPGAVTVAWKADGSPVKAGVETTKPSKQSNNKYAASSYLSLTPEQWKSHRSYSCQVTHEGSTVEKTVAPTECSPIKTDVITMDPKDNCSKDANDTLLLQLTNTSAYYMYLLLLLKSVVYFAIITCCLLRRTAFCCNGEKSRAKRSGSGATNFSLLKQAGDVEENPGPTSMDWIWRILFLVGAATGAHSFEQVQLVESGGGVVQPGRSLRLSCVASGFTISSYGMNWVRQAPGKGLEWVAVISYDGGNKYSVDSVKGRFTISRDNSKNTLYLQMNSLRAEDSAVYYCARGRYFDLWGRGTLVTVSSTRASTKGPSVFPLAPSSKSTSGGTAALGCLVKDYFPEPVTVSWNSGALTSGVHTFPAVLQSSGLYSLSSVVTVPSSSLGTQTYICNVNHKPSNTKVDKRVEPKSCEVKTDSTDHVKPKETENTKQPSKSCHKPKAIVHTEKVNMMSLTVLGLRMLFAKTVAVNFLLTAKLFFL

SEQ ID NO: 22604 - protein, 619 aa, synthetic construct
MALPVTALLLPLALLLHAARPDIQMTQSPSTLSASVGDRVTITCRASQSISNWLAWYQQKPGRAPNLLISKASSLKSGVPSRFSGSGSGTEFTLTVSSLQPDDFATYYCQQYYSYSYTFGQGTKLEIKLEGQPKANPTVTLFPPSSEELQANKATLVCLISDFYPGAVTVAWKADGSPVKAGVETTKPSKQSNNKYAASSYLSLTPEQWKSHRSYSCQVTHEGSTVEKTVAPTECSGRADCGITSASYHQGVLSATILYEILLGKATLYAVLVSALVLMAMVKRKDSRGRAKRSGSGATNFSLLKQAGDVEENPGPTSMDWIWRILFLVGAATGAHSFEQVQLVESGGGVVQPGRSLRLSCVASGFTISSYGMNWVRQAPGKGLEWVAVISYDGGNKYSVDSVKGRFTISRDNSKNTLYLQMNSLRAEDSAVYYCARGRYFDLWGRGTLVTVSSTRASTKGPSVFPLAPSSKSTSGGTAALGCLVKDYFPEPVTVSWNSGALTSGVHTFPAVLQSSGLYSLSSVVTVPSSSLGTQTYICNVNHKPSNTKVDKRVEPKSCIPEDTFFPSSDVPCDVKLVEKSFETDTNLNFQNLSVIGFRILLLKVAGFNLLMTLRLWSS

SEQ ID NO: 22605 - protein, 619 aa, synthetic construct
MALPVTALLLPLALLLHAARPDIQMTQSPSTLSASVGDRVTITCRASQSISNWLAWYQQKPGRAPNLLISKASSLKSGVPSRFSGSGSGTEFTLTVSSLQPDDFATYYCQQYYSYSYTFGQGTKLEIKLEGQPKANPTVTLFPPSSEELQANKATLVCLISDFYPGAVTVAWKADGSPVKAGVETTKPSKQSNNKYAASSYLSLTPEQWKSHRSYSCQVTHEGSTVEKTVAPTECSGRADCGFTSESYQQGVLSATILYEILLGKATLYAVLVSALVLMAMVKRKDSRGRAKRSGSGATNFSLLKQAGDVEENPGPTSMDWIWRILFLVGAATGAHSFEQVQLVESGGGVVQPGRSLRLSCVASGFTISSYGMNWVRQAPGKGLEWVAVISYDGGNKYSVDSVKGRFTISRDNSKNTLYLQMNSLRAEDSAVYYCARGRYFDLWGRGTLVTVSSTRASTKGPSVFPLAPSSKSTSGGTAALGCLVKDYFPEPVTVSWNSGALTSGVHTFPAVLQSSGLYSLSSVVTVPSSSLGTQTYICNVNHKPSNTKVDKRVEPKSCIPEDTFFPSPESSCDVKLVEKSFETDTNLNFQNLSVIGFRILLLKVAGFNLLMTLRLWSS

SEQ ID NO: 22606 - protein, 445 aa, synthetic construct
MALPVTALLLPLALLLHAARPDIQMTQSPSTLSASVGDRVTITCRASQSISNWLAWYQQKPGRAPNLLISKASSLKSGVPSRFSGSGSGTEFTLTVSSLQPDDFATYYCQQYYSYSYTFGQGTKLEIKGGGGSGGGGSGGGGSQVQLVESGGGVVQPGRSLRLSCVASGFTISSYGMNWVRQAPGKGLEWVAVISYDGGNKYSVDSVKGRFTISRDNSKNTLYLQMNSLRAEDSAVYYCARGRYFDLWGRGTLVTVSSTRDGNEEMGGITQTPYKVSISGTTVILTCPQYPGSEILWQHNDKNIGGDEDDKNIGSDEDHLSLKEFSELEQSGYYVCYPRGSKPEDANFYLYLRARVCENCMEMDVMSVATIVIVDICITGGLLLLVYYWSKNRKAKAKPVTRGAGAGGRQRGQNKERPPPVPNPDYEPIRKGQRDLYSGLNQRRI

SEQ ID NO: 22607 - protein, 410 aa, synthetic construct
MALPVTALLLPLALLLHAARPDIQMTQSPSTLSASVGDRVTITCRASQSISNWLAWYQQKPGRAPNLLISKASSLKSGVPSRFSGSGSGTEFTLTVSSLQPDDFATYYCQQYYSYSYTFGQGTKLEIKGGGGSGGGGSGGGGSQVQLVESGGGVVQPGRSLRLSCVASGFTISSYGMNWVRQAPGKGLEWVAVISYDGGNKYSVDSVKGRFTISRDNSKNTLYLQMNSLRAEDSAVYYCARGRYFDLWGRGTLVTVSSTRFKIPIEELEDRVFVNCNTSITWVEGTVGTLLSDITRLDLGKRILDPRGIYRCNGTDIYKDKESTVQVHYRMCQSCVELDPATVAGIIVTDVIATLLLALGVFCFAGHETGRLSGAADTQALLRNDQVYQPLRDRDDAQYSHLGGNWARNK

SEQ ID NO: 22608 - protein, 420 aa, synthetic construct
MALPVTALLLPLALLLHAARPDIQMTQSPSTLSASVGDRVTITCRASQSISNWLAWYQQKPGRAPNLLISKASSLKSGVPSRFSGSGSGTEFTLTVSSLQPDDFATYYCQQYYSYSYTFGQGTKLEIKGGGGSGGGGSGGGGSQVQLVESGGGVVQPGRSLRLSCVASGFTISSYGMNWVRQAPGKGLEWVAVISYDGGNKYSVDSVKGRFTISRDNSKNTLYLQMNSLRAEDSAVYYCARGRYFDLWGRGTLVTVSSTRQSIKGNHLVKVYDYQEDGSVLLTCDAEAKNITWFKDGKMIGFLTEDKKKWNLGSNAKDPRGMYQCKGSQNKSKPLQVYYRMCQNCIELNAATISGFLFAEIVSIFVLAVGVYFIAGQDGVRQSRASDKQTLLPNDQLYQPLKDREDDQYSHLQGNQLRRN

SEQ ID NO: 22609 - protein, 403 aa, synthetic construct
MALPVTALLLPLALLLHAARPDIQMTQSPSTLSASVGDRVTITCRASQSISNWLAWYQQKPGRAPNLLISKASSLKSGVPSRFSGSGSGTEFTLTVSSLQPDDFATYYCQQYYSYSYTFGQGTKLEIKGGGGSGGGGSGGGGSQVQLVESGGGVVQPGRSLRLSCVASGFTISSYGMNWVRQAPGKGLEWVAVISYDGGNKYSVDSVKGRFTISRDNSKNTLYLQMNSLRAEDSAVYYCARGRYFDLWGRGTLVTVSSTRQSFGLLDPKLCYLLDGILFIYGVILTALFLRVKFSRSADAPAYQQGQNQLYNELNLGRREEYDVLDKRRGRDPEMGGKPQRRKNPQEGLYNELQKDKMAEAYSEIGMKGERRRGKGHDGLYQGLSTATKDTYDALHMQALPPR

SEQ ID NO: 22610 - protein, 445 aa, synthetic construct
MALPVTALLLPLALLLHAARPQVQLVESGGGVVQPGRSLRLSCVASGFTISSYGMNWVRQAPGKGLEWVAVISYDGGNKYSVDSVKGRFTISRDNSKNTLYLQMNSLRAEDSAVYYCARGRYFDLWGRGTLVTVSSGGGGSGGGGSGGGGSDIQMTQSPSTLSASVGDRVTITCRASQSISNWLAWYQQKPGRAPNLLISKASSLKSGVPSRFSGSGSGTEFTLTVSSLQPDDFATYYCQQYYSYSYTFGQGTKLEIKTRDGNEEMGGITQTPYKVSISGTTVILTCPQYPGSEILWQHNDKNIGGDEDDKNIGSDEDHLSLKEFSELEQSGYYVCYPRGSKPEDANFYLYLRARVCENCMEMDVMSVATIVIVDICITGGLLLLVYYWSKNRKAKAKPVTRGAGAGGRQRGQNKERPPPVPNPDYEPIRKGQRDLYSGLNQRRI

SEQ ID NO: 22611 - protein, 410 aa, synthetic construct
MALPVTALLLPLALLLHAARPQVQLVESGGGVVQPGRSLRLSCVASGFTISSYGMNWVRQAPGKGLEWVAVISYDGGNKYSVDSVKGRFTISRDNSKNTLYLQMNSLRAEDSAVYYCARGRYFDLWGRGTLVTVSSGGGGSGGGGSGGGGSDIQMTQSPSTLSASVGDRVTITCRASQSISNWLAWYQQKPGRAPNLLISKASSLKSGVPSRFSGSGSGTEFTLTVSSLQPDDFATYYCQQYYSYSYTFGQGTKLEIKTRFKIPIEELEDRVFVNCNTSITWVEGTVGTLLSDITRLDLGKRILDPRGIYRCNGTDIYKDKESTVQVHYRMCQSCVELDPATVAGIIVTDVIATLLLALGVFCFAGHETGRLSGAADTQALLRNDQVYQPLRDRDDAQYSHLGGNWARNK

SEQ ID NO: 22612 - protein, 420 aa, synthetic construct
MALPVTALLLPLALLLHAARPQVQLVESGGGVVQPGRSLRLSCVASGFTISSYGMNWVRQAPGKGLEWVAVISYDGGNKYSVDSVKGRFTISRDNSKNTLYLQMNSLRAEDSAVYYCARGRYFDLWGRGTLVTVSSGGGGSGGGGSGGGGSDIQMTQSPSTLSASVGDRVTITCRASQSISNWLAWYQQKPGRAPNLLISKASSLKSGVPSRFSGSGSGTEFTLTVSSLQPDDFATYYCQQYYSYSYTFGQGTKLEIKTRQSIKGNHLVKVYDYQEDGSVLLTCDAEAKNITWFKDGKMIGFLTEDKKKWNLGSNAKDPRGMYQCKGSQNKSKPLQVYYRMCQNCIELNAATISGFLFAEIVSIFVLAVGVYFIAGQDGVRQSRASDKQTLLPNDQLYQPLKDREDDQYSHLQGNQLRRN

SEQ ID NO: 22613 - protein, 403 aa, synthetic construct
MALPVTALLLPLALLLHAARPQVQLVESGGGVVQPGRSLRLSCVASGFTISSYGMNWVRQAPGKGLEWVAVISYDGGNKYSVDSVKGRFTISRDNSKNTLYLQMNSLRAEDSAVYYCARGRYFDLWGRGTLVTVSSGGGGSGGGGSGGGGSDIQMTQSPSTLSASVGDRVTITCRASQSISNWLAWYQQKPGRAPNLLISKASSLKSGVPSRFSGSGSGTEFTLTVSSLQPDDFATYYCQQYYSYSYTFGQGTKLEIKTRQSFGLLDPKLCYLLDGILFIYGVILTALFLRVKFSRSADAPAYQQGQNQLYNELNLGRREEYDVLDKRRGRDPEMGGKPQRRKNPQEGLYNELQKDKMAEAYSEIGMKGERRRGKGHDGLYQGLSTATKDTYDALHMQALPPR

SEQ ID NO: 22614 - protein, 498 aa, synthetic construct
MALPVTALLLPLALLLHAARPDIQMTQSPSTLSASVGDRVTITCRASQSISNWLAWYQQKPGRAPNLLISKASSLKSGVPSRFSGSGSGTEFTLTVSSLQPDDFATYYCQQYYSYSYTFGQGTKLEIKGGGGSGGGGSGGGGSQVQLVESGGGVVQPGRSLRLSCVASGFTISSYGMNWVRQAPGKGLEWVAVISYDGGNKYSVDSVKGRFTISRDNSKNTLYLQMNSLRAEDSAVYYCARGRYFDLWGRGTLVTVSSTRGMRTEDLPKAVVFLEPQWYRVLEKDSVTLKCQGAYSPEDNSTQWFHNESLISSQASSYFIDAATVDDSGEYRCQTNLSTLSDPVQLEVHIGWLLLQAPRWVFKEEDPIHLRCHSWKNTALHKVTYLQNGKGRKYFHHNSDFYIPKATLKDSGSYFCRGLVGSKNVSSETVNITITQGLAVPTISSFFPPGYQVSFCLVMVLLFAVDTGLYFSVKTNIRSSTRDWKDHKFKWRKDPQDK

SEQ ID NO: 22615 - protein, 780 aa, synthetic construct
MALPVTALLLPLALLLHAARPDIQMTQSPSTLSASVGDRVTITCRASQSISNWLAWYQQKPGRAPNLLISKASSLKSGVPSRFSGSGSGTEFTLTVSSLQPDDFATYYCQQYYSYSYTFGQGTKLEIKGGGGSGGGGSGGGGSQVQLVESGGGVVQPGRSLRLSCVASGFTISSYGMNWVRQAPGKGLEWVAVISYDGGNKYSVDSVKGRFTISRDNSKNTLYLQMNSLRAEDSAVYYCARGRYFDLWGRGTLVTVSSTRGGSGQQQTLPKPFIWAEPHFMVPKEKQVTICCQGNYGAVEYQLHFEGSLFAVDRPKPPERINKVQFYIPDMNSRMAGQYSCIYRVGELWSEPSNLLDLVVTEMYDTPTLSVHPGPEVISGEKVTFYCRLDTATSMFLLLKEGRSSHVQRGYGKVQAEFPLGPVTTAHRGTYRCFGSYNNHAWSFPSEPVKLLVTGDIENTSLAPEDPTFPADTWGTYLLTTETGLQKDHALWDHTAQNLLRMGLAFLVLVALVWFLVEDWLSRKRTRERASRASTWEGRRRLNTQTLRAKRSGSGVKQTLNFDLLKLAGDVESNPGPSRGHMTEYKPTVRLATRDDVPRAVRTLAAAFADYPATRHTVDPDRHIERVTELQELFLTRVGLDIGKVWVADDGAAVAVWTTPESVEAGAVFAEIGPRMAELSGSRLAAQQQMEGLLAPHRPKEPAWFLATVGVSPDHQGKGLGSAVVLPGVEAAERAGVPAFLETSAPRNLPFYERLGFTVTADVEVPEGPRTWCMTRKPGA

SEQ ID NO: 22616 - protein, 613 aa, synthetic construct
MALPVTALLLPLALLLHAARPDIQMTQSPSTLSASVGDRVTITCRASQSISNWLAWYQQKPGRAPNLLISKASSLKSGVPSRFSGSGSGTEFTLTVSSLQPDDFATYYCQQYYSYSYTFGQGTKLEIKGGGGSGGGGSGGGGSQVQLVESGGGVVQPGRSLRLSCVASGFTISSYGMNWVRQAPGKGLEWVAVISYDGGNKYSVDSVKGRFTISRDNSKNTLYLQMNSLRAEDSAVYYCARGRYFDLWGRGTLVTVSSTRKIEVMYPPPYLDNEKSNGTIIHVKGARGDIENTSLAPEDPTFPADTWGTYLLTTETGLQKDHALWDHTAQNLLRMGLAFLVLVALVWFLVEDWLSRKRTRERASRASTWEGRRRLNTQTLRAKRSGSGVKQTLNFDLLKLAGDVESNPGPSRGHMTEYKPTVRLATRDDVPRAVRTLAAAFADYPATRHTVDPDRHIERVTELQELFLTRVGLDIGKVWVADDGAAVAVWTTPESVEAGAVFAEIGPRMAELSGSRLAAQQQMEGLLAPHRPKEPAWFLATVGVSPDHQGKGLGSAVVLPGVEAAERAGVPAFLETSAPRNLPFYERLGFTVTADVEVPEGPRTWCMTRKPGA

SEQ ID NO: 22617 - protein, 700 aa, synthetic construct
MALPVTALLLPLALLLHAARPDIQMTQSPSTLSASVGDRVTITCRASQSISNWLAWYQQKPGRAPNLLISKASSLKSGVPSRFSGSGSGTEFTLTVSSLQPDDFATYYCQQYYSYSYTFGQGTKLEIKGGGGSGGGGSGGGGSQVQLVESGGGVVQPGRSLRLSCVASGFTISSYGMNWVRQAPGKGLEWVAVISYDGGNKYSVDSVKGRFTISRDNSKNTLYLQMNSLRAEDSAVYYCARGRYFDLWGRGTLVTVSSTRLWVSQPPEIRTLEGSSAFLPCSFNASQGRLAIGSVTWFRDEVVPGKEVRNGTPEFRGRLAPLASSRFLHDHQAELHIRDVRGHDASIYVCRVEVLGLGVGTGNGTRLVVEKEHPQLGAGTVLLLRAGFYAVSFLSVAVGSTVYYQGKCLTWKGPRRQLPAVVPAPLPPPCGSSAHLLPPVPGGRAKRSGSGVKQTLNFDLLKLAGDVESNPGPSRMYRMQLLSCIALSLALVTNSAPTSSSTKKTQLQLEHLLLDLQMILNGINNYKNPKLTEMLTAKFYMPKKATELKHLQCLEEELKPLEEVLNLAQSKNFHLRPRDLISNINVIVLELKGSETTFMCEYADETATIVEFLNRWITFCQSIISTLTKIEVMYPPPYLDNEKSNGTIIHVKGKHLCPSPLFPGPSKPFWVLVVVGGVLACYSLLVTVAFIIFWVRSKRS

SEQ ID NO: 22618 - protein, 676 aa, synthetic construct
MALPVTALLLPLALLLHAARPDIQMTQSPSTLSASVGDRVTITCRASQSISNWLAWYQQKPGRAPNLLISKASSLKSGVPSRFSGSGSGTEFTLTVSSLQPDDFATYYCQQYYSYSYTFGQGTKLEIKGGGGSGGGGSGGGGSQVQLVESGGGVVQPGRSLRLSCVASGFTISSYGMNWVRQAPGKGLEWVAVISYDGGNKYSVDSVKGRFTISRDNSKNTLYLQMNSLRAEDSAVYYCARGRYFDLWGRGTLVTVSSTRLWVSQPPEIRTLEGSSAFLPCSFNASQGRLAIGSVTWFRDEVVPGKEVRNGTPEFRGRLAPLASSRFLHDHQAELHIRDVRGHDASIYVCRVEVLGLGVGTGNGTRLVVEKEHPQLGAGTVLLLRAGFYAVSFLSVAVGSTVYYQGKCLTWKGPRRQLPAVVPAPLPPPCGSSAHLLPPVPGGRAKRSGSGVKQTLNFDLLKLAGDVESNPGPSRGHMTEYKPTVRLATRDDVPRAVRTLAAAFADYPATRHTVDPDRHIERVTELQELFLTRVGLDIGKVWVADDGAAVAVWTTPESVEAGAVFAEIGPRMAELSGSRLAAQQQMEGLLAPHRPKEPAWFLATVGVSPDHQGKGLGSAVVLPGVEAAERAGVPAFLETSAPRNLPFYERLGFTVTADVEVPEGPRTWCMTRKPGA

SEQ ID NO: 22619 - protein, 352 aa, synthetic construct
MALPVTALLLPLALLLHAARPDIQMTQSPSTLSASVGDRVTITCRASQSISNWLAWYQQKPGRAPNLLISKASSLKSGVPSRFSGSGSGTEFTLTVSSLQPDDFATYYCQQYYSYSYTFGQGTKLEIKGGGGSGGGGSGGGGSQVQLVESGGGVVQPGRSLRLSCVASGFTISSYGMNWVRQAPGKGLEWVAVISYDGGNKYSVDSVKGRFTISRDNSKNTLYLQMNSLRAEDSAVYYCARGRYFDLWGRGTLVTVSSTRKIEVMYPPPYLDNEKSNGTIIHVKGARITQGLAVSTISSFFPPGYQVSFCLVMVLLFAVDTGLYFSVKTNIRSSTRDWKDHKFKWRKDPQDK

SEQ ID NO: 22620 - protein, 352 aa, synthetic construct
MALPVTALLLPLALLLHAARPDIQMTQSPSTLSASVGDRVTITCRASQSISNWLAWYQQKPGRAPNLLISKASSLKSGVPSRFSGSGSGTEFTLTVSSLQPDDFATYYCQQYYSYSYTFGQGTKLEIKGGGGSGGGGSGGGGSQVQLVESGGGVVQPGRSLRLSCVASGFTISSYGMNWVRQAPGKGLEWVAVISYDGGNKYSVDSVKGRFTISRDNSKNTLYLQMNSLRAEDSAVYYCARGRYFDLWGRGTLVTVSSTRKIEVMYPPPYLDNEKSNGTIIHVKGARITQGLAVPTISSFFPPGYQVSFCLVMVLLFAVDTGLYFSVKTNIRSSTRDWKDHKFKWRKDPQDK

SEQ ID NO: 22621 - protein, 331 aa, synthetic construct
MALPVTALLLPLALLLHAARPDIQMTQSPSTLSASVGDRVTITCRASQSISNWLAWYQQKPGRAPNLLISKASSLKSGVPSRFSGSGSGTEFTLTVSSLQPDDFATYYCQQYYSYSYTFGQGTKLEIKGGGGSGGGGSGGGGSQVQLVESGGGVVQPGRSLRLSCVASGFTISSYGMNWVRQAPGKGLEWVAVISYDGGNKYSVDSVKGRFTISRDNSKNTLYLQMNSLRAEDSAVYYCARGRYFDLWGRGTLVTVSSTRKIEVMYPPPYLDNEKSNGTIIHVKGARITQGLAVSTISSFSPPGYQVSFCLVMVLLFAVDTGLYFSVKTNI

SEQ ID NO: 22622 - protein, 362 aa, synthetic construct
MALPVTALLLPLALLLHAARPDIQMTQSPSTLSASVGDRVTITCRASQSISNWLAWYQQKPGRAPNLLISKASSLKSGVPSRFSGSGSGTEFTLTVSSLQPDDFATYYCQQYYSYSYTFGQGTKLEIKGGGGSGGGGSGGGGSQVQLVESGGGVVQPGRSLRLSCVASGFTISSYGMNWVRQAPGKGLEWVAVISYDGGNKYSVDSVKGRFTISRDNSKNTLYLQMNSLRAEDSAVYYCARGRYFDLWGRGTLVTVSSTRKIEVMYPPPYLDNEKSNGTIIHVKGARVEKEHPQLGAGTVLLLRAGFYAVSFLSVAVGSTVYYQGKCLTWKGPRRQLPAVVPAPLPPPCGSSAHLLPPVPGG

SEQ ID NO: 22623 - protein, 443 aa, synthetic construct
MALPVTALLLPLALLLHAARPDIQMTQSPSTLSASVGDRVTITCRASQSISNWLAWYQQKPGRAPNLLISKASSLKSGVPSRFSGSGSGTEFTLTVSSLQPDDFATYYCQQYYSYSYTFGQGTKLEIKGGGGSGGGGSGGGGSQVQLVESGGGVVQPGRSLRLSCVASGFTISSYGMNWVRQAPGKGLEWVAVISYDGGNKYSVDSVKGRFTISRDNSKNTLYLQMNSLRAEDSAVYYCARGRYFDLWGRGTLVTVSSTRKIEVMYPPPYLDNEKSNGTIIHVKGARKSVRFYLVVSPASASTQTSWTPRDLVSSQTQTQSCVPPTAGARQAPESPSTIPVPSQPQNSTLRPGPAAPIALVPVFCGLLVAKSLVLSALLVWWGDIWWKTMMELRSLDTQKATCHLQQVTDLPWTSVSSPVEREILYHTVARTKISDDDDEHTL

SEQ ID NO: 22624 - protein, 380 aa, synthetic construct
MALPVTALLLPLALLLHAARPDIQMTQSPSTLSASVGDRVTITCRASQSISNWLAWYQQKPGRAPNLLISKASSLKSGVPSRFSGSGSGTEFTLTVSSLQPDDFATYYCQQYYSYSYTFGQGTKLEIKGGGGSGGGGSGGGGSQVQLVESGGGVVQPGRSLRLSCVASGFTISSYGMNWVRQAPGKGLEWVAVISYDGGNKYSVDSVKGRFTISRDNSKNTLYLQMNSLRAEDSAVYYCARGRYFDLWGRGTLVTVSSTRKIEVMYPPPYLDNEKSNGTIIHVKGARGDIENTSLAPEDPTFPADTWGTYLLTTETGLQKDHALWDHTAQNLLRMGLAFLVLVALVWFLVEDWLSRKRTRERASRASTWEGRRRLNTQTL

SEQ ID NO: 22625 - protein, 976 aa, synthetic construct
MALPVTALLLPLALLLHAARPDIQMTQSPSTLSASVGDRVTITCRASQSISNWLAWYQQKPGRAPNLLISKASSLKSGVPSRFSGSGSGTEFTLTVSSLQPDDFATYYCQQYYSYSYTFGQGTKLEIKLEGQPKANPTVTLFPPSSEELQANKATLVCLISDFYPGAVTVAWKADGSPVKAGVETTKPSKQSNNKYAASSYLSLTPEQWKSHRSYSCQVTHEGSTVEKTVAPTECSGSQSFGLLDPKLCYLLDGILFIYGVILTALFLRVKFSRSADAPAYQQGQNQLYNELNLGRREEYDVLDKRRGRDPEMGGKPQRRKNPQEGLYNELQKDKMAEAYSEIGMKGERRRGKGHDGLYQGLSTATKDTYDALHMQALPPRRAKRSGSGATNFSLLKQAGDVEENPGPTSMDWIWRILFLVGAATGAHSFEQVQLVESGGGVVQPGRSLRLSCVASGFTISSYGMNWVRQAPGKGLEWVAVISYDGGNKYSVDSVKGRFTISRDNSKNTLYLQMNSLRAEDSAVYYCARGRYFDLWGRGTLVTVSSTRASTKGPSVFPLAPSSKSTSGGTAALGCLVKDYFPEPVTVSWNSGALTSGVHTFPAVLQSSGLYSLSSVVTVPSSSLGTQTYICNVNHKPSNTKVDKRVEPKSCGTGDIENTSLAPEDPTFPADTWGTYLLTTETGLQKDHALWDHTAQNLLRMGLAFLVLVALVWFLVEDWLSRKRTRERASRASTWEGRRRLNTQTLRAKRSGSGATNFSLLKQAGDVEENPGPSRGHMTEYKPTVRLATRDDVPRAVRTLAAAFADYPATRHTVDPDRHIERVTELQELFLTRVGLDIGKVWVADDGAAVAVWTTPESVEAGAVFAEIGPRMAELSGSRLAAQQQMEGLLAPHRPKEPAWFLATVGVSPDHQGKGLGSAVVLPGVEAAERAGVPAFLETSAPRNLPFYERLGFTVTADVEVPEGPRTWCMTRKPGA

SEQ ID NO: 22626 - protein, 1042 aa, synthetic construct
MALPVTALLLPLALLLHAARPDIQMTQSPSTLSASVGDRVTITCRASQSISNWLAWYQQKPGRAPNLLISKASSLKSGVPSRFSGSGSGTEFTLTVSSLQPDDFATYYCQQYYSYSYTFGQGTKLEIKLEGQPKANPTVTLFPPSSEELQANKATLVCLISDFYPGAVTVAWKADGSPVKAGVETTKPSKQSNNKYAASSYLSLTPEQWKSHRSYSCQVTHEGSTVEKTVAPTECSGSQSFGLLDPKLCYLLDGILFIYGVILTALFLRVKFSRSADAPAYQQGQNQLYNELNLGRREEYDVLDKRRGRDPEMGGKPQRRKNPQEGLYNELQKDKMAEAYSEIGMKGERRRGKGHDGLYQGLSTATKDTYDALHMQALPPRRAKRSGSGATNFSLLKQAGDVEENPGPTSMDWIWRILFLVGAATGAHSFEQVQLVESGGGVVQPGRSLRLSCVASGFTISSYGMNWVRQAPGKGLEWVAVISYDGGNKYSVDSVKGRFTISRDNSKNTLYLQMNSLRAEDSAVYYCARGRYFDLWGRGTLVTVSSTRASTKGPSVFPLAPSSKSTSGGTAALGCLVKDYFPEPVTVSWNSGALTSGVHTFPAVLQSSGLYSLSSVVTVPSSSLGTQTYICNVNHKPSNTKVDKRVEPKSCGTKSVRFYLVVSPASASTQTSWTPRDLVSSQTQTQSCVPPTAGARQAPESPSTIPVPSQPQNSTLRPGPAAPIALVPVFCGLLVAKSLVLSALLVWWGDIWWKTMMELRSLDTQKATCHLQQVTDLPWTSVSSPVEREILYHTVARTKISDDDDEHTLRAKRSGSGVKQTLNFDLLKLAGDVESNPGPSRGHMTEYKPTVRLATRDDVPRAVRTLAAAFADYPATRHTVDPDRHIERVTELQELFLTRVGLDIGKVWVADDGAAVAVWTTPESVEAGAVFAEIGPRMAELSGSRLAAQQQMEGLLAPHRPKEPAWFLATVGVSPDHQGKGLGSAVVLPGVEAAERAGVPAFLETSAPRNLPFYERLGFTVTADVEVPEGPRTWCMTRKPGA

SEQ ID NO: 22627 - protein, 962 aa, synthetic construct
MALPVTALLLPLALLLHAARPDIQMTQSPSTLSASVGDRVTITCRASQSISNWLAWYQQKPGRAPNLLISKASSLKSGVPSRFSGSGSGTEFTLTVSSLQPDDFATYYCQQYYSYSYTFGQGTKLEIKLEGQPKANPTVTLFPPSSEELQANKATLVCLISDFYPGAVTVAWKADGSPVKAGVETTKPSKQSNNKYAASSYLSLTPEQWKSHRSYSCQVTHEGSTVEKTVAPTECSGSQSFGLLDPKLCYLLDGILFIYGVILTALFLRVKFSRSADAPAYQQGQNQLYNELNLGRREEYDVLDKRRGRDPEMGGKPQRRKNPQEGLYNELQKDKMAEAYSEIGMKGERRRGKGHDGLYQGLSTATKDTYDALHMQALPPRRAKRSGSGATNFSLLKQAGDVEENPGPTSMDWIWRILFLVGAATGAHSFEQVQLVESGGGVVQPGRSLRLSCVASGFTISSYGMNWVRQAPGKGLEWVAVISYDGGNKYSVDSVKGRFTISRDNSKNTLYLQMNSLRAEDSAVYYCARGRYFDLWGRGTLVTVSSTRASTKGPSVFPLAPSSKSTSGGTAALGCLVKDYFPEPVTVSWNSGALTSGVHTFPAVLQSSGLYSLSSVVTVPSSSLGTQTYICNVNHKPSNTKVDKRVEPKSCGTVVEKEHPQLGAGTVLLLRAGFYAVSFLSVAVGSTVYYQGKCLTWKGPRRQLPAVVPAPLPPPCGSSAHLLPPVPGGRAKRSGSGVKQTLNFDLLKLAGDVESNPGPSRGHMTEYKPTVRLATRDDVPRAVRTLAAAFADYPATRHTVDPDRHIERVTELQELFLTRVGLDIGKVWVADDGAAVAVWTTPESVEAGAVFAEIGPRMAELSGSRLAAQQQMEGLLAPHRPKEPAWFLATVGVSPDHQGKGLGSAVVLPGVEAAERAGVPAFLETSAPRNLPFYERLGFTVTADVEVPEGPRTWCMTRKPGA

SEQ ID NO: 22628 - protein, 991 aa, synthetic construct
MALPVTALLLPLALLLHAARPDIQMTQSPSTLSASVGDRVTITCRASQSISNWLAWYQQKPGRAPNLLISKASSLKSGVPSRFSGSGSGTEFTLTVSSLQPDDFATYYCQQYYSYSYTFGQGTKLEIKLEDLKNVFPPEVAVFEPSEAEISHTQKATLVCLATGFYPDHVELSWWVNGKEVHSGVSTDPQPLKEQPALNDSRYCLSSRLRVSATFWQNPRNHFRCQVQFYGLSENDEWTQDRAKPVTQIVSAEAWGRADCGSQSFGLLDPKLCYLLDGILFIYGVILTALFLRVKFSRSADAPAYQQGQNQLYNELNLGRREEYDVLDKRRGRDPEMGGKPQRRKNPQEGLYNELQKDKMAEAYSEIGMKGERRRGKGHDGLYQGLSTATKDTYDALHMQALPPRRAKRSGSGATNFSLLKQAGDVEENPGPTSMDWIWRILFLVGAATGAHSFEQVQLVESGGGVVQPGRSLRLSCVASGFTISSYGMNWVRQAPGKGLEWVAVISYDGGNKYSVDSVKGRFTISRDNSKNTLYLQMNSLRAEDSAVYYCARGRYFDLWGRGTLVTVSSTRIQNPDPAVYQLRDSKSSDKSVCLFTDFDSQTNVSQSKDSDVYITDKTVLDMRSMDFKSNSAVAWSNKSDFACANAFNNSIIPEDTFFPSPESSCGTGDIENTSLAPEDPTFPADTWGTYLLTTETGLQKDHALWDHTAQNLLRMGLAFLVLVALVWFLVEDWLSRKRTRERASRASTWEGRRRLNTQTLRAKRSGSGATNFSLLKQAGDVEENPGPSRGHMTEYKPTVRLATRDDVPRAVRTLAAAFADYPATRHTVDPDRHIERVTELQELFLTRVGLDIGKVWVADDGAAVAVWTTPESVEAGAVFAEIGPRMAELSGSRLAAQQQMEGLLAPHRPKEPAWFLATVGVSPDHQGKGLGSAVVLPGVEAAERAGVPAFLETSAPRNLPFYERLGFTVTADVEVPEGPRTWCMTRKPGA

SEQ ID NO: 22629 - protein, 1057 aa, synthetic construct
MALPVTALLLPLALLLHAARPDIQMTQSPSTLSASVGDRVTITCRASQSISNWLAWYQQKPGRAPNLLISKASSLKSGVPSRFSGSGSGTEFTLTVSSLQPDDFATYYCQQYYSYSYTFGQGTKLEIKLEDLKNVFPPEVAVFEPSEAEISHTQKATLVCLATGFYPDHVELSWWVNGKEVHSGVSTDPQPLKEQPALNDSRYCLSSRLRVSATFWQNPRNHFRCQVQFYGLSENDEWTQDRAKPVTQIVSAEAWGRADCGSQSFGLLDPKLCYLLDGILFIYGVILTALFLRVKFSRSADAPAYQQGQNQLYNELNLGRREEYDVLDKRRGRDPEMGGKPQRRKNPQEGLYNELQKDKMAEAYSEIGMKGERRRGKGHDGLYQGLSTATKDTYDALHMQALPPRRAKRSGSGATNFSLLKQAGDVEENPGPTSMDWIWRILFLVGAATGAHSFEQVQLVESGGGVVQPGRSLRLSCVASGFTISSYGMNWVRQAPGKGLEWVAVISYDGGNKYSVDSVKGRFTISRDNSKNTLYLQMNSLRAEDSAVYYCARGRYFDLWGRGTLVTVSSTRIQNPDPAVYQLRDSKSSDKSVCLFTDFDSQTNVSQSKDSDVYITDKTVLDMRSMDFKSNSAVAWSNKSDFACANAFNNSIIPEDTFFPSPESSCGTKSVRFYLVVSPASASTQTSWTPRDLVSSQTQTQSCVPPTAGARQAPESPSTIPVPSQPQNSTLRPGPAAPIALVPVFCGLLVAKSLVLSALLVWWGDIWWKTMMELRSLDTQKATCHLQQVTDLPWTSVSSPVEREILYHTVARTKISDDDDEHTLRAKRSGSGVKQTLNFDLLKLAGDVESNPGPSRGHMTEYKPTVRLATRDDVPRAVRTLAAAFADYPATRHTVDPDRHIERVTELQELFLTRVGLDIGKVWVADDGAAVAVWTTPESVEAGAVFAEIGPRMAELSGSRLAAQQQMEGLLAPHRPKEPAWFLATVGVSPDHQGKGLGSAVVLPGVEAAERAGVPAFLETSAPRNLPFYERLGFTVTADVEVPEGPRTWCMTRKPGA

SEQ ID NO: 22630 - protein, 977 aa, synthetic construct
MALPVTALLLPLALLLHAARPDIQMTQSPSTLSASVGDRVTITCRASQSISNWLAWYQQKPGRAPNLLISKASSLKSGVPSRFSGSGSGTEFTLTVSSLQPDDFATYYCQQYYSYSYTFGQGTKLEIKLEDLKNVFPPEVAVFEPSEAEISHTQKATLVCLATGFYPDHVELSWWVNGKEVHSGVSTDPQPLKEQPALNDSRYCLSSRLRVSATFWQNPRNHFRCQVQFYGLSENDEWTQDRAKPVTQIVSAEAWGRADCGSQSFGLLDPKLCYLLDGILFIYGVILTALFLRVKFSRSADAPAYQQGQNQLYNELNLGRREEYDVLDKRRGRDPEMGGKPQRRKNPQEGLYNELQKDKMAEAYSEIGMKGERRRGKGHDGLYQGLSTATKDTYDALHMQALPPRRAKRSGSGATNFSLLKQAGDVEENPGPTSMDWIWRILFLVGAATGAHSFEQVQLVESGGGVVQPGRSLRLSCVASGFTISSYGMNWVRQAPGKGLEWVAVISYDGGNKYSVDSVKGRFTISRDNSKNTLYLQMNSLRAEDSAVYYCARGRYFDLWGRGTLVTVSSTRIQNPDPAVYQLRDSKSSDKSVCLFTDFDSQTNVSQSKDSDVYITDKTVLDMRSMDFKSNSAVAWSNKSDFACANAFNNSIIPEDTFFPSPESSCGTVVEKEHPQLGAGTVLLLRAGFYAVSFLSVAVGSTVYYQGKCLTWKGPRRQLPAVVPAPLPPPCGSSAHLLPPVPGGRAKRSGSGVKQTLNFDLLKLAGDVESNPGPSRGHMTEYKPTVRLATRDDVPRAVRTLAAAFADYPATRHTVDPDRHIERVTELQELFLTRVGLDIGKVWVADDGAAVAVWTTPESVEAGAVFAEIGPRMAELSGSRLAAQQQMEGLLAPHRPKEPAWFLATVGVSPDHQGKGLGSAVVLPGVEAAERAGVPAFLETSAPRNLPFYERLGFTVTADVEVPEGPRTWCMTRKPGA

SEQ ID NO: 22631 - protein, 948 aa, synthetic construct
MALPVTALLLPLALLLHAARPDIQMTQSPSTLSASVGDRVTITCRASQSISNWLAWYQQKPGRAPNLLISKASSLKSGVPSRFSGSGSGTEFTLTVSSLQPDDFATYYCQQYYSYSYTFGQGTKLEIKLEGQPKANPTVTLFPPSSEELQANKATLVCLISDFYPGAVTVAWKADGSPVKAGVETTKPSKQSNNKYAASSYLSLTPEQWKSHRSYSCQVTHEGSTVEKTVAPTECSGSQSFGLLDPKLCYLLDGILFIYGVILTALFLRVKFSRSADAPAYQQGQNQLYNELNLGRREEYDVLDKRRGRDPEMGGKPQRRKNPQEGLYNELQKDKMAEAYSEIGMKGERRRGKGHDGLYQGLSTATKDTYDALHMQALPPRRAKRSGSGATNFSLLKQAGDVEENPGPTSMDWIWRILFLVGAATGAHSFEQVQLVESGGGVVQPGRSLRLSCVASGFTISSYGMNWVRQAPGKGLEWVAVISYDGGNKYSVDSVKGRFTISRDNSKNTLYLQMNSLRAEDSAVYYCARGRYFDLWGRGTLVTVSSTRASTKGPSVFPLAPSSKSTSGGTAALGCLVKDYFPEPVTVSWNSGALTSGVHTFPAVLQSSGLYSLSSVVTVPSSSLGTQTYICNVNHKPSNTKVDKRVEPKSCGTITQGLAVSTISSFFPPGYQVSFCLVMVLLFAVDTGLYFSVKTNIRSSTRDWKDHKFKWRKDPQDKRAKRSGSGATNFSLLKQAGDVEENPGPSRGHMTEYKPTVRLATRDDVPRAVRTLAAAFADYPATRHTVDPDRHIERVTELQELFLTRVGLDIGKVWVADDGAAVAVWTTPESVEAGAVFAEIGPRMAELSGSRLAAQQQMEGLLAPHRPKEPAWFLATVGVSPDHQGKGLGSAVVLPGVEAAERAGVPAFLETSAPRNLPFYERLGFTVTADVEVPEGPRTWCMTRKPGA

SEQ ID NO: 22632 - protein, 963 aa, synthetic construct
MALPVTALLLPLALLLHAARPDIQMTQSPSTLSASVGDRVTITCRASQSISNWLAWYQQKPGRAPNLLISKASSLKSGVPSRFSGSGSGTEFTLTVSSLQPDDFATYYCQQYYSYSYTFGQGTKLEIKLEDLKNVFPPEVAVFEPSEAEISHTQKATLVCLATGFYPDHVELSWWVNGKEVHSGVSTDPQPLKEQPALNDSRYCLSSRLRVSATFWQNPRNHFRCQVQFYGLSENDEWTQDRAKPVTQIVSAEAWGRADCGSQSFGLLDPKLCYLLDGILFIYGVILTALFLRVKFSRSADAPAYQQGQNQLYNELNLGRREEYDVLDKRRGRDPEMGGKPQRRKNPQEGLYNELQKDKMAEAYSEIGMKGERRRGKGHDGLYQGLSTATKDTYDALHMQALPPRRAKRSGSGATNFSLLKQAGDVEENPGPTSMDWIWRILFLVGAATGAHSFEQVQLVESGGGVVQPGRSLRLSCVASGFTISSYGMNWVRQAPGKGLEWVAVISYDGGNKYSVDSVKGRFTISRDNSKNTLYLQMNSLRAEDSAVYYCARGRYFDLWGRGTLVTVSSTRIQNPDPAVYQLRDSKSSDKSVCLFTDFDSQTNVSQSKDSDVYITDKTVLDMRSMDFKSNSAVAWSNKSDFACANAFNNSIIPEDTFFPSPESSCGTITQGLAVSTISSFFPPGYQVSFCLVMVLLFAVDTGLYFSVKTNIRSSTRDWKDHKFKWRKDPQDKRAKRSGSGATNFSLLKQAGDVEENPGPSRGHMTEYKPTVRLATRDDVPRAVRTLAAAFADYPATRHTVDPDRHIERVTELQELFLTRVGLDIGKVWVADDGAAVAVWTTPESVEAGAVFAEIGPRMAELSGSRLAAQQQMEGLLAPHRPKEPAWFLATVGVSPDHQGKGLGSAVVLPGVEAAERAGVPAFLETSAPRNLPFYERLGFTVTADVEVPEGPRTWCMTRKPGA

SEQ ID NO: 22633 - protein, 646 aa, synthetic construct
MALPVTALLLPLALLLHAARPDIQMTQSPSTLSASVGDRVTITCRASQSISNWLAWYQQKPGRAPNLLISKASSLKSGVPSRFSGSGSGTEFTLTVSSLQPDDFATYYCQQYYSYSYTFGQGTKLEIKLEGQPKANPTVTLFPPSSEELQANKATLVCLISDFYPGAVTVAWKADGSPVKAGVETTKPSKQSNNKYAASSYLSLTPEQWKSHRSYSCQVTHEGSTVEKTVAPTECSGSLGEPQLCYILDAILFLYGIVLTLLYCRLKIQVRKAAITSYEKSDGVYTGLSTRNQETYETLKHEKPPQRAKRSGSGATNFSLLKQAGDVEENPGPTSMDWIWRILFLVGAATGAHSFEQVQLVESGGGVVQPGRSLRLSCVASGFTISSYGMNWVRQAPGKGLEWVAVISYDGGNKYSVDSVKGRFTISRDNSKNTLYLQMNSLRAEDSAVYYCARGRYFDLWGRGTLVTVSSTRASTKGPSVFPLAPSSKSTSGGTAALGCLVKDYFPEPVTVSWNSGALTSGVHTFPAVLQSSGLYSLSSVVTVPSSSLGTQTYICNVNHKPSNTKVDKRVEPKSCGTLGEPQLCYILDAILFLYGIVLTLLYCRLKIQVRKAAITSYEKSDGVYTGLSTRNQETYETLKHEKPPQ

SEQ ID NO: 22634 - protein, 1023 aa, synthetic construct
MALPVTALLLPLALLLHAARPDIQMTQSPSTLSASVGDRVTITCRASQSISNWLAWYQQKPGRAPNLLISKASSLKSGVPSRFSGSGSGTEFTLTVSSLQPDDFATYYCQQYYSYSYTFGQGTKLEIKGQPKANPTVTLFPPSSEELQANKATLVCLISDFYPGAVTVAWKADGSPVKAGVETTKPSKQSNNKYAASSYLSLTPEQWKSHRSYSCQVTHEGSTVEKTVAPTECSGSQSFGLLDPKLCYLLDGILFIYGVILTALFLRVKFSRSADAPAYQQGQNQLYNELNLGRREEYDVLDKRRGRDPEMGGKPRRKNPQEGLYNELQKDKMAEAYSEIGMKGERRRGKGHDGLYQGLSTATKDTYDALHMQALPPRRAKRSGSGATNFSLLKQAGDVEENPGPTSMDWIWRILFLVGAATGAHSFEQVQLVESGGGVVQPGRSLRLSCVASGFTISSYGMNWVRQAPGKGLEWVAVISYDGGNKYSVDSVKGRFTISRDNSKNTLYLQMNSLRAEDSAVYYCARGRYFDLWGRGTLVTVSSASTKGPSVFPLAPSSKSTSGGTAALGCLVKDYFPEPVTVSWNSGALTSGVHTFPAVLQSSGLYSLSSVVTVPSSSLGTQTYICNVNHKPSNTKVDKRVEPKSCGTQSFGLLDPKLCYLLDGILFIYGVILTALFLRVKFSRSADAPAYQQGQNQLYNELNLGRREEYDVLDKRRGRDPEMGGKPRRKNPQEGLYNELQKDKMAEAYSEIGMKGERRRGKGHDGLYQGLSTATKDTYDALHMQALPPRRAKRSGSGVKQTLNFDLLKLAGDVESNPGPSRGHMTEYKPTVRLATRDDVPRAVRTLAAAFADYPATRHTVDPDRHIERVTELQELFLTRVGLDIGKVWVADDGAAVAVWTTPESVEAGAVFAEIGPRMAELSGSRLAAQQQMEGLLAPHRPKEPAWFLATVGVSPDHQGKGLGSAVVLPGVEAAERAGVPAFLETSAPRNLPFYERLGFTVTADVEVPEGPRTWCMTRKPGA

SEQ ID NO: 22635 - protein, 809 aa, synthetic construct
MALPVTALLLPLALLLHAARPDIQMTQSPSTLSASVGDRVTITCRASQSISNWLAWYQQKPGRAPNLLISKASSLKSGVPSRFSGSGSGTEFTLTVSSLQPDDFATYYCQQYYSYSYTFGQGTKLEIKLEDLKNVFPPEVAVFEPSEAEISHTQKATLVCLATGFYPDHVELSWWVNGKEVHSGVSTDPQPLKEQPALNDSRYCLSSRLRVSATFWQNPRNHFRCQVQFYGLSENDEWTQDRAKPVTQIVSAEAWGRADCGSQSFGLLDPKLCYLLDGILFIYGVILTALFLRVKFSRSADAPAYQQGQNQLYNELNLGRREEYDVLDKRRGRDPEMGGKPRRKNPQEGLYNELQKDKMAEAYSEIGMKGERRRGKGHDGLYQGLSTATKDTYDALHMQALPPRRAKRSGSGATNFSLLKQAGDVEENPGPTSMDWIWRILFLVGAATGAHSFEQVQLVESGGGVVQPGRSLRLSCVASGFTISSYGMNWVRQAPGKGLEWVAVISYDGGNKYSVDSVKGRFTISRDNSKNTLYLQMNSLRAEDSAVYYCARGRYFDLWGRGTLVTVSSTRIQNPDPAVYQLRDSKSSDKSVCLFTDFDSQTNVSQSKDSDVYITDKTVLDMRSMDFKSNSAVAWSNKSDFACANAFNNSIIPEDTFFPSPESSCGTQSFGLLDPKLCYLLDGILFIYGVILTALFLRVKFSRSADAPAYQQGQNQLYNELNLGRREEYDVLDKRRGRDPEMGGKPRRKNPQEGLYNELQKDKMAEAYSEIGMKGERRRGKGHDGLYQGLSTATKDTYDALHMQALPPR

SEQ ID NO: 22636 - protein, 509 aa, synthetic construct
MALPVTALLLPLALLLHAARPDIQMTQSPSSLSASVGDRVTITCRASQSIRNYLNWYQQKPGKAPELLIHAASSLQSGVPSRFSGSGSGTDFTLTISSLQPEDFASYYCQQSYSAPPITFGQGTRLEIKGGGGSGGGGSGGGGSQVQLQQSGPGLVKPSQTLSLTCAISGDSVSSNRAAWNWIRQSPSRGLQWLGRTYYRSKWYNDYAVSLRSRITINPVTSKNQVALHMNSVTPEDTAVYYCARAGIVVVPGPETFYYYDHGLDVWGQGTTVTVSSTREQKLISEEDLKIEVMYPPPYLDNEKSNGTIIHVKGKHLCPSPLFPGPSKPFWVLVVVGGVLACYSLLVTVAFIIFWVRSKRSRLLHSDYMNMTPRRPGPTRKHYQPYAPPRDFAAYRSRVKFSRSADAPAYQQGQNQLYNELNLGRREEYDVLDKRRGRDPEMGGKPRRKNPQEGLYNELQKDKMAEAYSEIGMKGERRRGKGHDGLYQGLSTATKDTYDALHMQALPPR

SEQ ID NO: 22637 - protein, 515 aa, synthetic construct
MALPVTALLLPLALLLHAARPDIQMTQSPSSLSASVGDRVTITCRASQSIRNYLNWYQQKPGKAPELLIHAASSLQSGVPSRFSGSGSGTDFTLTISSLQPEDFASYYCQQSYSAPPITFGQGTRLEIKGGGGSGGGGSGGGGSQVQLQQSGPGLVKPSQTLSLTCAISGDSVSSNRAAWNWIRQSPSRGLQWLGRTYYRSKWYNDYAVSLRSRITINPVTSKNQVALHMNSVTPEDTAVYYCARAGIVVVPGPETFYYYDHGLDVWGQGTTVTVSSTREQKLISEEDLAKPTTTPAPRPPTPAPTIASQPLSLRPEACRPAAGGAVHTRGLDFACDIYIWAPLAGTCGVLLLSLVITLYCKRGRKKLLYIFKQPFMRPVQTTQEEDGCSCRFPEEEEGGCELRVKFSRSADAPAYQQGQNQLYNELNLGRREEYDVLDKRRGRDPEMGGKPRRKNPQEGLYNELQKDKMAEAYSEIGMKGERRRGKGHDGLYQGLSTATKDTYDALHMQALPPR

SEQ ID NO: 22638 - protein, 515 aa, synthetic construct
MALPVTALLLPLALLLHAARPQVQLQQSGPGLVKPSQTLSLTCAISGDSVSSNRAAWNWIRQSPSRGLQWLGRTYYRSKWYNDYAVSLRSRITINPVTSKNQVALHMNSVTPEDTAVYYCARAGIVVVPGPETFYYYDHGLDVWGQGTTVTVSSGGGGSGGGGSGGGGSDIQMTQSPSSLSASVGDRVTITCRASQSIRNYLNWYQQKPGKAPELLIHAASSLQSGVPSRFSGSGSGTDFTLTISSLQPEDFASYYCQQSYSAPPITFGQGTRLEIKTREQKLISEEDLAKPTTTPAPRPPTPAPTIASQPLSLRPEACRPAAGGAVHTRGLDFACDIYIWAPLAGTCGVLLLSLVITLYCKRGRKKLLYIFKQPFMRPVQTTQEEDGCSCRFPEEEEGGCELRVKFSRSADAPAYQQGQNQLYNELNLGRREEYDVLDKRRGRDPEMGGKPRRKNPQEGLYNELQKDKMAEAYSEIGMKGERRRGKGHDGLYQGLSTATKDTYDALHMQALPPR

SEQ ID NO: 22639 - protein, 928 aa, synthetic construct
MALPVTALLLPLALLLHAARPDIQMTQSPSSLSASVGDRVTITCRASQSIRNYLNWYQQKPGKAPELLIHAASSLQSGVPSRFSGSGSGTDFTLTISSLQPEDFASYYCQQSYSAPPITFGQGTRLEIKGGGGSGGGGSGGGGSQVQLQQSGPGLVKPSQTLSLTCAISGDSVSSNRAAWNWIRQSPSRGLQWLGRTYYRSKWYNDYAVSLRSRITINPVTSKNQVALHMNSVTPEDTAVYYCARAGIVVVPGPETFYYYDHGLDVWGQGTTVTVSSTREQKLISEEDLAKPTTTPAPRPPTPAPTIASQPLSLRPEACRPAAGGAVHTRGLDFACDIYIWAPLAGTCGVLLLSLVITLYCGRARVKFSRSADAPAYQQGQNQLYNELNLGRREEYDVLDKRRGRDPEMGGKPRRKNPQEGLYNELQKDKMAEAYSEIGMKGERRRGKGHDGLYQGLSTATKDTYDALHMQALPPRSRGSGATNFSLLKQAGDVEENPGPGIHMATYEVLCEVARKLGTDDREVVLFLLNVFIPQPTLAQLIGALRALKEEGRLTFPLLAECLFRAGRRDLLRDLLHLDPRFLERHLAGTMSYFSPYQLTVLHVDGELCARDIRSLIFLSKDTIGSRSTPQTFLHWVYCMENLDLLGPTDVDALMSMLRSLSRVDLQRQVQTLMGLHLSGPSHSQHYRHTPLETDFYDYKDDDDKTSGSGEGRGSLLTCGDVEENPGPHMTEYKPTVRLATRDDVPRAVRTLAAAFADYPATRHTVDPDRHIERVTELQELFLTRVGLDIGKVWVADDGAAVAVWTTPESVEAGAVFAEIGPRMAELSGSRLAAQQQMEGLLAPHRPKEPAWFLATVGVSPDHQGKGLGSAVVLPGVEAAERAGVPAFLETSAPRNLPFYERLGFTVTADVEVPEGPRTWCMTRKPGA

SEQ ID NO: 22640 - protein, 868 aa, synthetic construct
MALPVTALLLPLALLLHAARPDIQMTQSPSSLSASVGDRVTITCRASQSIRNYLNWYQQKPGKAPELLIHAASSLQSGVPSRFSGSGSGTDFTLTISSLQPEDFASYYCQQSYSAPPITFGQGTRLEIKLEIQNPDPAVYQLRDSKSSDKSVCLFTDFDSQTNVSQSKDSDVYITDKCVLDMRSMDFKSNSAVAWSNKSDFACANAFNNSIIPEDTFFPSSDVPCDVKLVEKSFETDTNLNFQNLSVIGFRILLLKVAGFNLLMTLRLWSSRAKRSGSGVKQTLNFDLLKLAGDVESNPGPTSMDWIWRILFLVGAATGAHSFEQVQLQQSGPGLVKPSQTLSLTCAISGDSVSSNRAAWNWIRQSPSRGLQWLGRTYYRSKWYNDYAVSLRSRITINPVTSKNQVALHMNSVTPEDTAVYYCARAGIVVVPGPETFYYYDHGLDVWGQGTTVTVSSTREDLKNVFPPEVAVFEPSKAEIAHTQKATLVCLATGFYPDHVELSWWVNGKEVHSGVCTDPQPLKEQPALNDSRYCLSSRLRVSATFWQNPRNHFRCQVQFYGLSENDEWTQDRAKPVTQIVSAEAWGRADCGITSASYHQGVLSATILYEILLGKATLYAVLVSALVLMAMVKRKDSRGRAKRSGSGATNFSLLKQAGDVEENPGPSRGHMTEYKPTVRLATRDDVPRAVRTLAAAFADYPATRHTVDPDRHIERVTELQELFLTRVGLDIGKVWVADDGAAVAVWTTPESVEAGAVFAEIGPRMAELSGSRLAAQQQMEGLLAPHRPKEPAWFLATVGVSPDHQGKGLGSAVVLPGVEAAERAGVPAFLETSAPRNLPFYERLGFTVTADVEVPEGPRTWCMTRKPGA

SEQ ID NO: 22641 - protein, 867 aa, synthetic construct
MALPVTALLLPLALLLHAARPDIQMTQSPSSLSASVGDRVTITCRASQSIRNYLNWYQQKPGKAPELLIHAASSLQSGVPSRFSGSGSGTDFTLTISSLQPEDFASYYCQQSYSAPPITFGQGTRLEIKLEDLKNVFPPEVAVFEPSKAEIAHTQKATLVCLATGFYPDHVELSWWVNGKEVHSGVCTDPQPLKEQPALNDSRYCLSSRLRVSATFWQNPRNHFRCQVQFYGLSENDEWTQDRAKPVTQIVSAEAWGRADCGITSASYHQGVLSATILYEILLGKATLYAVLVSALVLMAMVKRKDSRGRAKRSGSGATNFSLLKQAGDVEENPGPTSMDWIWRILFLVGAATGAHSFEQVQLQQSGPGLVKPSQTLSLTCAISGDSVSSNRAAWNWIRQSPSRGLQWLGRTYYRSKWYNDYAVSLRSRITINPVTSKNQVALHMNSVTPEDTAVYYCARAGIVVVPGPETFYYYDHGLDVWGQGTTVTVSSTRIQNPDPAVYQLRDSKSSDKSVCLFTDFDSQTNVSQSKDSDVYITDKCVLDMRSMDFKSNSAVAWSNKSDFACANAFNNSIIPEDTFFPSSDVPCDVKLVEKSFETDTNLNFQNLSVIGFRILLLKVAGFNLLMTLRLWSSRAKRSGSGVKQTLNFDLLKLAGDVESNPGPSRGHMTEYKPTVRLATRDDVPRAVRTLAAAFADYPATRHTVDPDRHIERVTELQELFLTRVGLDIGKVWVADDGAAVAVWTTPESVEAGAVFAEIGPRMAELSGSRLAAQQQMEGLLAPHRPKEPAWFLATVGVSPDHQGKGLGSAVVLPGVEAAERAGVPAFLETSAPRNLPFYERLGFTVTADVEVPEGPRTWCMTRKPGA

SEQ ID NO: 22642 - protein, 634 aa, synthetic construct
MALPVTALLLPLALLLHAARPDIQMTQSPSSLSASVGDRVTITCRASQSIRNYLNWYQQKPGKAPELLIHAASSLQSGVPSRFSGSGSGTDFTLTISSLQPEDFASYYCQQSYSAPPITFGQGTRLEIKLEDLKNVFPPEVAVFEPSEAEISHTQKATLVCLATGFYPDHVELSWWVNGKEVHSGVCTDPQPLKEQPALNDSRYCLSSRLRVSATFWQNPRNHFRCQVQFYGLSENDEWTQDRAKPVTQIVSAEAWGRADCGFTSESYQQGVLSATILYEILLGKATLYAVLVSALVLMAMVKRKDSRGRAKRSGSGATNFSLLKQAGDVEENPGPTSMDWIWRILFLVGAATGAHSFEQVQLQQSGPGLVKPSQTLSLTCAISGDSVSSNRAAWNWIRQSPSRGLQWLGRTYYRSKWYNDYAVSLRSRITINPVTSKNQVALHMNSVTPEDTAVYYCARAGIVVVPGPETFYYYDHGLDVWGQGTTVTVSSTRIQNPDPAVYQLRDSKSSDKSVCLFTDFDSQTNVSQSKDSDVYITDKCVLDMRSMDFKSNSAVAWSNKSDFACANAFNNSIIPEDTFFPSPESSCDVKLVEKSFETDTNLNFQNLSVIGFRILLLKVAGFNLLMTLRLWSS

SEQ ID NO: 22643 - protein, 859 aa, synthetic construct
MALPVTALLLPLALLLHAARPDIQMTQSPSSLSASVGDRVTITCRASQSIRNYLNWYQQKPGKAPELLIHAASSLQSGVPSRFSGSGSGTDFTLTISSLQPEDFASYYCQQSYSAPPITFGQGTRLEIKLEDLKNVFPPEVAVFEPSEAEISHTQKATLVCLATGFYPDHVELSWWVNGKEVHSGVCTDPQPLKEQPALNDSRYCLSSRLRVSATFWQNPRNHFRCQVQFYGLSENDEWTQDRAKPVTQIVSAEAWGRADCGFTSESYQQGVLSATILYEILLGKATLYAVLVSALVLMAMVKRKDSRGRAKRSGSGATNFSLLKQAGDVEENPGPTSMDWIWRILFLVGAATGAHSFEQVQLQQSGPGLVKPSQTLSLTCAISGDSVSSNRAAWNWIRQSPSRGLQWLGRTYYRSKWYNDYAVSLRSRITINPVTSKNQVALHMNSVTPEDTAVYYCARAGIVVVPGPETFYYYDHGLDVWGQGTTVTVSSTRIQNPDPAVYQLRDSKSSDKSVCLFTDFDSQTNVSQSKDSDVYITDKCVLDMRSMDFKSNSAVAWSNKSDFACANAFNNSIIPEDTFFPSPESSCDVKLVEKSFETDTNLNFQNLSVIGFRILLLKVAGFNLLMTLRLWSSRAKRSGSGVKQTLNFDLLKLAGDVESNPGPSRGGIHTMATYEVLCEVARKLGTDDREVVLFLLNVFIPQPTLAQLIGALRALKEEGRLTFPLLAECLFRAGRRDLLRDLLHLDPRFLERHLAGTMSYFSPYQLTVLHVDGELCARDIRSLIFLSKDTIGSRSTPQTFLHWVYCMENLDLLGPTDVDALMSMLRSLSRVDLQRQVQTLMGLHLSGPSHSQHYRHTP

SEQ ID NO: 22644 - protein, 638 aa, synthetic construct
MALPVTALLLPLALLLHAARPDIQMTQSPSSLSASVGDRVTITCRASQSIRNYLNWYQQKPGKAPELLIHAASSLQSGVPSRFSGSGSGTDFTLTISSLQPEDFASYYCQQSYSAPPITFGQGTRLEIKLEIQNPDPAVYQLRDSKSSDKSVCLFTDFDSQTNVSQSKDSDVYITDKCVLDMRSMDFKSNSAVAWSNKSDFACANAFNNSIIPEDTFFPSPESSCDVKLVEKSFETDTNLNFQNLSVIGFRILLLKVAGFNLLMTLRLWSSRAKRSGSGVKQTLNFDLLKLAGDVESNPGPTSMDWIWRILFLVGAATGAHSFEQVQLQQSGPGLVKPSQTLSLTCAISGDSVSSNRAAWNWIRQSPSRGLQWLGRTYYRSKWYNDYAVSLRSRITINPVTSKNQVALHMNSVTPEDTAVYYCARAGIVVVPGPETFYYYDHGLDVWGQGTTVTVSSTREDLKNVFPPEVAVFEPSEAEISHTQKATLVCLATGFYPDHVELSWWVNGKEVHSGVCTDPQPLKEQPALNDSRYCLSSRLRVSATFWQNPRNHFRCQVQFYGLSENDEWTQDRAKPVTQIVSAEAWGRADCGFTSESYQQGVLSATILYEILLGKATLYAVLVSALVLMAMVKRKDSRG

SEQ ID NO: 22645 - protein, 860 aa, synthetic construct
MALPVTALLLPLALLLHAARPDIQMTQSPSSLSASVGDRVTITCRASQSIRNYLNWYQQKPGKAPELLIHAASSLQSGVPSRFSGSGSGTDFTLTISSLQPEDFASYYCQQSYSAPPITFGQGTRLEIKLEIQNPDPAVYQLRDSKSSDKSVCLFTDFDSQTNVSQSKDSDVYITDKCVLDMRSMDFKSNSAVAWSNKSDFACANAFNNSIIPEDTFFPSPESSCDVKLVEKSFETDTNLNFQNLSVIGFRILLLKVAGFNLLMTLRLWSSRAKRSGSGVKQTLNFDLLKLAGDVESNPGPTSMDWIWRILFLVGAATGAHSFEQVQLQQSGPGLVKPSQTLSLTCAISGDSVSSNRAAWNWIRQSPSRGLQWLGRTYYRSKWYNDYAVSLRSRITINPVTSKNQVALHMNSVTPEDTAVYYCARAGIVVVPGPETFYYYDHGLDVWGQGTTVTVSSTREDLKNVFPPEVAVFEPSEAEISHTQKATLVCLATGFYPDHVELSWWVNGKEVHSGVCTDPQPLKEQPALNDSRYCLSSRLRVSATFWQNPRNHFRCQVQFYGLSENDEWTQDRAKPVTQIVSAEAWGRADCGFTSESYQQGVLSATILYEILLGKATLYAVLVSALVLMAMVKRKDSRGRAKRSGSGATNFSLLKQAGDVEENPGPSRGGIHTMATYEVLCEVARKLGTDDREVVLFLLNVFIPQPTLAQLIGALRALKEEGRLTFPLLAECLFRAGRRDLLRDLLHLDPRFLERHLAGTMSYFSPYQLTVLHVDGELCARDIRSLIFLSKDTIGSRSTPQTFLHWVYCMENLDLLGPTDVDALMSMLRSLSRVDLQRQVQTLMGLHLSGPSHSQHYRHTP

SEQ ID NO: 22646 - protein, 912 aa, synthetic construct
MALPVTALLLPLALLLHAARPLEGKPIPNPLLGLDSTGSGEDLKNVFPPEVAVFEPSKAEIAHTQKATLVCLATGFYPDHVELSWWVNGKEVHSGVCTDPQPLKEQPALNDSRYCLSSRLRVSATFWQNPRNHFRCQVQFYGLSENDEWTQDRAKPVTQIVSAEAWGRADCGITSASYHQGVLSATILYEILLGKATLYAVLVSALVLMAMVKRKDSRGRAKRSGSGATNFSLLKQAGDVEENPGPTSMALPVTALLLPLALLLHAARPDIQMTQSPSSLSASVGDRVTITCRASQSIRNYLNWYQQKPGKAPELLIHAASSLQSGVPSRFSGSGSGTDFTLTISSLQPEDFASYYCQQSYSAPPITFGQGTRLEIKGGGGSGGGGSGGGGSQVQLQQSGPGLVKPSQTLSLTCAISGDSVSSNRAAWNWIRQSPSRGLQWLGRTYYRSKWYNDYAVSLRSRITINPVTSKNQVALHMNSVTPEDTAVYYCARAGIVVVPGPETFYYYDHGLDVWGQGTTVTVSSTREQKLISEEDGSGIQNPDPAVYQLRDSKSSDKSVCLFTDFDSQTNVSQSKDSDVYITDKCVLDMRSMDFKSNSAVAWSNKSDFACANAFNNSIIPEDTFFPSSDVPCDVKLVEKSFETDTNLNFQNLSVIGFRILLLKVAGFNLLMTLRLWSSRAKRSGSGVKQTLNFDLLKLAGDVESNPGPSRGHMTEYKPTVRLATRDDVPRAVRTLAAAFADYPATRHTVDPDRHIERVTELQELFLTRVGLDIGKVWVADDGAAVAVWTTPESVEAGAVFAEIGPRMAELSGSRLAAQQQMEGLLAPHRPKEPAWFLATVGVSPDHQGKGLGSAVVLPGVEAAERAGVPAFLETSAPRNLPFYERLGFTVTADVEVPEGPRTWCMTRKPGA

SEQ ID NO: 22647 - protein, 913 aa, synthetic construct
MALPVTALLLPLALLLHAARPLEQKLISEEDLGSGDRPDPAVYQLRDSKSSDKSVCLFTDFDSQTNVSQSKDSDVYITDKCVLDMRSMDFKSNSAVAWSNKSDFACANAFNNSIIPEDTFFPSPESSCDVKLVEKSFETDTNLNFQNLSVIGFRILLLKVAGFNLLMTLRLWSSSSRAKRSGSGVKQTLNFDLLKLAGDVESNPGPTSMALPVTALLLPLALLLHAARPDIQMTQSPSSLSASVGDRVTITCRASQSIRNYLNWYQQKPGKAPELLIHAASSLQSGVPSRFSGSGSGTDFTLTISSLQPEDFASYYCQQSYSAPPITFGQGTRLEIKGGGGSGGGGSGGGGSQVQLQQSGPGLVKPSQTLSLTCAISGDSVSSNRAAWNWIRQSPSRGLQWLGRTYYRSKWYNDYAVSLRSRITINPVTSKNQVALHMNSVTPEDTAVYYCARAGIVVVPGPETFYYYDHGLDVWGQGTTVTVSSTRGKPIPNPLLGLDSTGSGEDLKNVFPPEVAVFEPSEAEISHTQKATLVCLATGFYPDHVELSWWVNGKEVHSGVCTDPQPLKEQPALNDSRYCLSSRLRVSATFWQNPRNHFRCQVQFYGLSENDEWTQDRAKPVTQIVSAEAWGRADCGFTSESYQQGVLSATILYEILLGKATLYAVLVSALVLMAMVKRKDSRGRAKRSGSGATNFSLLKQAGDVEENPGPSRGHMTEYKPTVRLATRDDVPRAVRTLAAAFADYPATRHTVDPDRHIERVTELQELFLTRVGLDIGKVWVADDGAAVAVWTTPESVEAGAVFAEIGPRMAELSGSRLAAQQQMEGLLAPHRPKEPAWFLATVGVSPDHQGKGLGSAVVLPGVEAAERAGVPAFLETSAPRNLPFYERLGFTVTADVEVPEGPRTWCMTRKPGA

SEQ ID NO: 22648 - protein, 867 aa, synthetic construct
MALPVTALLLPLALLLHAARPDIQMTQSPSSLSASVGDRVTITCRASQSIRNYLNWYQQKPGKAPELLIHAASSLQSGVPSRFSGSGSGTDFTLTISSLQPEDFASYYCQQSYSAPPITFGQGTRLEIKLEDLKNVFPPEVAVFEPSEAEISHTQKATLVCLATGFYPDHVELSWWVNGKEVHSGVSTDPQPLKEQPALNDSRYCLSSRLRVSATFWQNPRNHFRCQVQFYGLSENDEWTQDRAKPVTQIVSAEAWGRADCGFTSESYQQGVLSATILYEILLGKATLYAVLVSALVLMAMVKRKDSRGRAKRSGSGATNFSLLKQAGDVEENPGPTSMDWIWRILFLVGAATGAHSFEQVQLQQSGPGLVKPSQTLSLTCAISGDSVSSNRAAWNWIRQSPSRGLQWLGRTYYRSKWYNDYAVSLRSRITINPVTSKNQVALHMNSVTPEDTAVYYCARAGIVVVPGPETFYYYDHGLDVWGQGTTVTVSSTRIQNPDPAVYQLRDSKSSDKSVCLFTDFDSQTNVSQSKDSDVYITDKTVLDMRSMDFKSNSAVAWSNKSDFACANAFNNSIIPEDTFFPSPESSCDVKLVEKSFETDTNLNFQNLSVIGFRILLLKVAGFNLLMTLRLWSSRAKRSGSGVKQTLNFDLLKLAGDVESNPGPSRGHMTEYKPTVRLATRDDVPRAVRTLAAAFADYPATRHTVDPDRHIERVTELQELFLTRVGLDIGKVWVADDGAAVAVWTTPESVEAGAVFAEIGPRMAELSGSRLAAQQQMEGLLAPHRPKEPAWFLATVGVSPDHQGKGLGSAVVLPGVEAAERAGVPAFLETSAPRNLPFYERLGFTVTADVEVPEGPRTWCMTRKPGA

SEQ ID NO: 22649 - protein, 949 aa, synthetic construct
MALPVTALLLPLALLLHAARPDIQMTQSPSSLSASVGDRVTITCRASQSIRNYLNWYQQKPGKAPELLIHAASSLQSGVPSRFSGSGSGTDFTLTISSLQPEDFASYYCQQSYSAPPITFGQGTRLEIKLEDLKNVFPPEVAVFEPSEAEISHTQKATLVCLATGFYPDHVELSWWVNGKEVHSGVSTDPQPLKEQPALNDSRYCLSSRLRVSATFWQNPRNHFRCQVQFYGLSENDEWTQDRAKPVTQIVSAEAWGRADCGFTSESYQQGVLSATILYEILLGKATLYAVLVSALVLMAMVKRKDSRGRAKRSGSGATNFSLLKQAGDVEENPGPTSMDWIWRILFLVGAATGAHSFEQVQLQQSGPGLVKPSQTLSLTCAISGDSVSSNRAAWNWIRQSPSRGLQWLGRTYYRSKWYNDYAVSLRSRITINPVTSKNQVALHMNSVTPEDTAVYYCARAGIVVVPGPETFYYYDHGLDVWGQGTTVTVSSTREQKLISEEDGSGTPFPSLAPPIMLLVDGKQQMVVVCLVLDVAPPGLDSPIWFSAGNGSALDAFTYGPSPATDGTWTNLAHLSLPSEELASWEPLVCHTGPGAEGHSRSTQPMHLSGEASTARTCPQEPLRGTPGGALWLGVLRLLLFKLLLFDLLLTCSCLCDPAGPLPSPATTTRLRALGSHRLHPATETGGREATSSPRPQPRDRRWGDTPPGRKPGSPVRAKRSGSGVKQTLNFDLLKLAGDVESNPGPSRGHMTEYKPTVRLATRDDVPRAVRTLAAAFADYPATRHTVDPDRHIERVTELQELFLTRVGLDIGKVWVADDGAAVAVWTTPESVEAGAVFAEIGPRMAELSGSRLAAQQQMEGLLAPHRPKEPAWFLATVGVSPDHQGKGLGSAVVLPGVEAAERAGVPAFLETSAPRNLPFYERLGFTVTADVEVPEGPRTWCMTRKPGA

SEQ ID NO: 22650 - protein, 967 aa, synthetic construct
MALPVTALLLPLALLLHAARPLEDLKNVFPPEVAVFEPSEAEISHTQKATLVCLATGFYPDHVELSWWVNGKEVHSGVSTDPQPLKEQPALNDSRYCLSSRLRVSATFWQNPRNHFRCQVQFYGLSENDEWTQDRAKPVTQIVSAEAWGRADCGFTSESYQQGVLSATILYEILLGKATLYAVLVSALVLMAMVKRKDSRGRAKRSGSGATNFSLLKQAGDVEENPGPTSMALPVTALLLPLALLLHAARPDIQMTQSPSSLSASVGDRVTITCRASQSIRNYLNWYQQKPGKAPELLIHAASSLQSGVPSRFSGSGSGTDFTLTISSLQPEDFASYYCQQSYSAPPITFGQGTRLEIKGGGGSGGGGSGGGGSQVQLQQSGPGLVKPSQTLSLTCAISGDSVSSNRAAWNWIRQSPSRGLQWLGRTYYRSKWYNDYAVSLRSRITINPVTSKNQVALHMNSVTPEDTAVYYCARAGIVVVPGPETFYYYDHGLDVWGQGTTVTVSSTREQKLISEEDLGSGTPFPSLAPPIMLLVDGKQQMVVVCLVLDVAPPGLDSPIWFSAGNGSALDAFTYGPSPATDGTWTNLAHLSLPSEELASWEPLVCHTGPGAEGHSRSTQPMHLSGEASTARTCPQEPLRGTPGGALWLGVLRLLLFKLLLFDLLLTCSCLCDPAGPLPSPATTTRLRALGSHRLHPATETGGREATSSPRPQPRDRRWGDTPPGRKPGSPVRAKRSGSGVKQTLNFDLLKLAGDVESNPGPSRSRGHMTEYKPTVRLATRDDVPRAVRTLAAAFADYPATRHTVDPDRHIERVTELQELFLTRVGLDIGKVWVADDGAAVAVWTTPESVEAGAVFAEIGPRMAELSGSRLAAQQQMEGLLAPHRPKEPAWFLATVGVSPDHQGKGLGSAVVLPGVEAAERAGVPAFLETSAPRNLPFYERLGFTVTADVEVPEGPRTWCMTRKPGA

SEQ ID NO: 22651 - protein, 904 aa, synthetic construct
MALPVTALLLPLALLLHAARPDIQMTQSPSSLSASVGDRVTITCRASQSIRNYLNWYQQKPGKAPELLIHAASSLQSGVPSRFSGSGSGTDFTLTISSLQPEDFASYYCQQSYSAPPITFGQGTRLEIKLEGKPIPNPLLGLDSTGSGDKQLDADVSPKPTIFLPSIAETKLQKAGTYLCLLEKFFPDVIKIHWQEKKSNTILGSQEGNTMKTNDTYMKFSWLTVPEKSLDKEHRCIVRHENNKNGVDQEIIFPPIKTDVITMDPKDNCSKDANDTLLLQLTNTSAYYMYLLLLLKSVVYFAIITCCLLRRTAFCCNGEKSRAKRSGSGATNFSLLKQAGDVEENPGPTSMDWIWRILFLVGAATGAHSFEQVQLQQSGPGLVKPSQTLSLTCAISGDSVSSNRAAWNWIRQSPSRGLQWLGRTYYRSKWYNDYAVSLRSRITINPVTSKNQVALHMNSVTPEDTAVYYCARAGIVVVPGPETFYYYDHGLDVWGQGTTVTVSSTREQKLISEEDGSGSQPHTKPSVFVMKNGTNVACLVKEFYPKDIRINLVSSKKITEFDPAIVISPSGKYNAVKLGKYEDSNSVTCSVQHDNKTVHSTDFEVKTDSTDHVKPKETENTKQPSKSCHKPKAIVHTEKVNMMSLTVLGLRMLFAKTVAVNFLLTAKLFFLRAKRSGSGVKQTLNFDLLKLAGDVESNPGPSRGHMTEYKPTVRLATRDDVPRAVRTLAAAFADYPATRHTVDPDRHIERVTELQELFLTRVGLDIGKVWVADDGAAVAVWTTPESVEAGAVFAEIGPRMAELSGSRLAAQQQMEGLLAPHRPKEPAWFLATVGVSPDHQGKGLGSAVVLPGVEAAERAGVPAFLETSAPRNLPFYERLGFTVTADVEVPEGPRTWCMTRKPGA

SEQ ID NO: 22652 - protein, 642 aa, synthetic construct
MALPVTALLLPLALLLHAARPDIQMTQSPSSLSASVGDRVTITCRASQSIRNYLNWYQQKPGKAPELLIHAASSLQSGVPSRFSGSGSGTDFTLTISSLQPEDFASYYCQQSYSAPPITFGQGTRLEIKLESQPHTKPSVFVMKNGTNVACLVKEFYPKDIRINLVSSKKITEFDPAIVISPSGKYNAVKLGKYEDSNSVTCSVQHDNKTVHSTDFEVKTDSTDHVKPKETENTKQPSKSCHKPKAIVHTEKVNMMSLTVLGLRMLFAKTVAVNFLLTAKLFFLRAKRSGSGATNFSLLKQAGDVEENPGPTSMDWIWRILFLVGAATGAHSFEQVQLQQSGPGLVKPSQTLSLTCAISGDSVSSNRAAWNWIRQSPSRGLQWLGRTYYRSKWYNDYAVSLRSRITINPVTSKNQVALHMNSVTPEDTAVYYCARAGIVVVPGPETFYYYDHGLDVWGQGTTVTVSSTRDKQLDADVSPKPTIFLPSIAETKLQKAGTYLCLLEKFFPDVIKIHWQEKKSNTILGSQEGNTMKTNDTYMKFSWLTVPEKSLDKEHRCIVRHENNKNGVDQEIIFPPIKTDVITMDPKDNCSKDANDTLLLQLTNTSAYYMYLLLLLKSVVYFAIITCCLLRRTAFCCNGEKS

SEQ ID NO: 22653 - protein, 919 aa, synthetic construct
MALPVTALLLPLALLLHAARPLEGKPIPNPLLGLDSTGSGDKQLDADVSPKPTIFLPSIAETKLQKAGTYLCLLEKFFPDVIKIHWQEKKSNTILGSQEGNTMKTNDTYMKFSWLTVPEKSLDKEHRCIVRHENNKNGVDQEIIFPPIKTDVITMDPKDNCSKDANDTLLLQLTNTSAYYMYLLLLLKSVVYFAIITCCLLRRTAFCCNGEKSRAKRSGSGATNFSLLKQAGDVEENPGPTSMALPVTALLLPLALLLHAARPDIQMTQSPSSLSASVGDRVTITCRASQSIRNYLNWYQQKPGKAPELLIHAASSLQSGVPSRFSGSGSGTDFTLTISSLQPEDFASYYCQQSYSAPPITFGQGTRLEIKGGGGSGGGGSGGGGSQVQLQQSGPGLVKPSQTLSLTCAISGDSVSSNRAAWNWIRQSPSRGLQWLGRTYYRSKWYNDYAVSLRSRITINPVTSKNQVALHMNSVTPEDTAVYYCARAGIVVVPGPETFYYYDHGLDVWGQGTTVTVSSTREQKLISEEDGSGSQPHTKPSVFVMKNGTNVACLVKEFYPKDIRINLVSSKKITEFDPAIVISPSGKYNAVKLGKYEDSNSVTCSVQHDNKTVHSTDFEVKTDSTDHVKPKETENTKQPSKSCHKPKAIVHTEKVNMMSLTVLGLRMLFAKTVAVNFLLTAKLFFLRAKRSGSGVKQTLNFDLLKLAGDVESNPGPSRGHMTEYKPTVRLATRDDVPRAVRTLAAAFADYPATRHTVDPDRHIERVTELQELFLTRVGLDIGKVWVADDGAAVAVWTTPESVEAGAVFAEIGPRMAELSGSRLAAQQQMEGLLAPHRPKEPAWFLATVGVSPDHQGKGLGSAVVLPGVEAAERAGVPAFLETSAPRNLPFYERLGFTVTADVEVPEGPRTWCMTRKPGA

SEQ ID NO: 22654 - protein, 1044 aa, synthetic construct
MALPVTALLLPLALLLHAARPDIQMTQSPSSLSASVGDRVTITCRASQSIRNYLNWYQQKPGKAPELLIHAASSLQSGVPSRFSGSGSGTDFTLTISSLQPEDFASYYCQQSYSAPPITFGQGTRLEIKGQPKANPTVTLFPPSSEELQANKATLVCLISDFYPGAVTVAWKADGSPVKAGVETTKPSKQSNNKYAASSYLSLTPEQWKSHRSYSCQVTHEGSTVEKTVAPTECSGSQSFGLLDPKLCYLLDGILFIYGVILTALFLRVKFSRSADAPAYQQGQNQLYNELNLGRREEYDVLDKRRGRDPEMGGKPQRRKNPQEGLYNELQKDKMAEAYSEIGMKGERRRGKGHDGLYQGLSTATKDTYDALHMQALPPRRAKRSGSGATNFSLLKQAGDVEENPGPTSMDWIWRILFLVGAATGAHSFEQVQLQQSGPGLVKPSQTLSLTCAISGDSVSSNRAAWNWIRQSPSRGLQWLGRTYYRSKWYNDYAVSLRSRITINPVTSKNQVALHMNSVTPEDTAVYYCARAGIVVVPGPETFYYYDHGLDVWGQGTTVTVSSASTKGPSVFPLAPSSKSTSGGTAALGCLVKDYFPEPVTVSWNSGALTSGVHTFPAVLQSSGLYSLSSVVTVPSSSLGTQTYICNVNHKPSNTKVDKRVEPKSCGTQSFGLLDPKLCYLLDGILFIYGVILTALFLRVKFSRSADAPAYQQGQNQLYNELNLGRREEYDVLDKRRGRDPEMGGKPQRRKNPQEGLYNELQKDKMAEAYSEIGMKGERRRGKGHDGLYQGLSTATKDTYDALHMQALPPRRAKRSGSGVKQTLNFDLLKLAGDVESNPGPSRGHMTEYKPTVRLATRDDVPRAVRTLAAAFADYPATRHTVDPDRHIERVTELQELFLTRVGLDIGKVWVADDGAAVAVWTTPESVEAGAVFAEIGPRMAELSGSRLAAQQQMEGLLAPHRPKEPAWFLATVGVSPDHQGKGLGSAVVLPGVEAAERAGVPAFLETSAPRNLPFYERLGFTVTADVEVPEGPRTWCMTRKPGA

SEQ ID NO: 22655 - protein, 830 aa, synthetic construct
MALPVTALLLPLALLLHAARPDIQMTQSPSSLSASVGDRVTITCRASQSIRNYLNWYQQKPGKAPELLIHAASSLQSGVPSRFSGSGSGTDFTLTISSLQPEDFASYYCQQSYSAPPITFGQGTRLEIKLEDLKNVFPPEVAVFEPSEAEISHTQKATLVCLATGFYPDHVELSWWVNGKEVHSGVSTDPQPLKEQPALNDSRYCLSSRLRVSATFWQNPRNHFRCQVQFYGLSENDEWTQDRAKPVTQIVSAEAWGRADCGSQSFGLLDPKLCYLLDGILFIYGVILTALFLRVKFSRSADAPAYQQGQNQLYNELNLGRREEYDVLDKRRGRDPEMGGKPQRRKNPQEGLYNELQKDKMAEAYSEIGMKGERRRGKGHDGLYQGLSTATKDTYDALHMQALPPRRAKRSGSGATNFSLLKQAGDVEENPGPTSMDWIWRILFLVGAATGAHSFEQVQLQQSGPGLVKPSQTLSLTCAISGDSVSSNRAAWNWIRQSPSRGLQWLGRTYYRSKWYNDYAVSLRSRITINPVTSKNQVALHMNSVTPEDTAVYYCARAGIVVVPGPETFYYYDHGLDVWGQGTTVTVSSTRIQNPDPAVYQLRDSKSSDKSVCLFTDFDSQTNVSQSKDSDVYITDKTVLDMRSMDFKSNSAVAWSNKSDFACANAFNNSIIPEDTFFPSPESSCGTQSFGLLDPKLCYLLDGILFIYGVILTALFLRVKFSRSADAPAYQQGQNQLYNELNLGRREEYDVLDKRRGRDPEMGGKPQRRKNPQEGLYNELQKDKMAEAYSEIGMKGERRRGKGHDGLYQGLSTATKDTYDALHMQALPPR

SEQ ID NO: 22656 - protein, 830 aa, synthetic construct
MALPVTALLLPLALLLHAARPDIQMTQSPSSLSASVGDRVTITCRASQSIRNYLNWYQQKPGKAPELLIHAASSLQSGVPSRFSGSGSGTDFTLTISSLQPEDFASYYCQQSYSAPPITFGQGTRLEIKLEDLKNVFPPEVAVFEPSKAEIAHTQKATLVCLATGFYPDHVELSWWVNGKEVHSGVCTDPQPLKEQPALNDSRYCLSSRLRVSATFWQNPRNHFRCQVQFYGLSENDEWTQDRAKPVTQIVSAEAWGRADCGSQSFGLLDPKLCYLLDGILFIYGVILTALFLRVKFSRSADAPAYQQGQNQLYNELNLGRREEYDVLDKRRGRDPEMGGKPQRRKNPQEGLYNELQKDKMAEAYSEIGMKGERRRGKGHDGLYQGLSTATKDTYDALHMQALPPRRAKRSGSGATNFSLLKQAGDVEENPGPTSMDWIWRILFLVGAATGAHSFEQVQLQQSGPGLVKPSQTLSLTCAISGDSVSSNRAAWNWIRQSPSRGLQWLGRTYYRSKWYNDYAVSLRSRITINPVTSKNQVALHMNSVTPEDTAVYYCARAGIVVVPGPETFYYYDHGLDVWGQGTTVTVSSTRIQNPDPAVYQLRDSKSSDKSVCLFTDFDSQTNVSQSKDSDVYITDKCVLDMRSMDFKSNSAVAWSNKSDFACANAFNNSIIPEDTFFPSSDVPCGTQSFGLLDPKLCYLLDGILFIYGVILTALFLRVKFSRSADAPAYQQGQNQLYNELNLGRREEYDVLDKRRGRDPEMGGKPQRRKNPQEGLYNELQKDKMAEAYSEIGMKGERRRGKGHDGLYQGLSTATKDTYDALHMQALPPR

SEQ ID NO: 22657 - protein, 901 aa, synthetic construct
MALPVTALLLPLALLLHAARPDIQMTQSPSSLSASVGDRVTITCRASQSIRNYLNWYQQKPGKAPELLIHAASSLQSGVPSRFSGSGSGTDFTLTISSLQPEDFASYYCQQSYSAPPITFGQGTRLEIKLEGKPIPNPLLGLDSTGSGEDLKNVFPPEVAVFEPSEAEISHTQKATLVCLATGFYPDHVELSWWVNGKEVHSGVSTDPQPLKEQPALNDSRYCLSSRLRVSATFWQNPRNHFRCQVQFYGLSENDEWTQDRAKPVTQIVSAEAWGRADCGSQSFGLLDPKLCYLLDGILFIYGVILTALFLRVKFSRSADAPAYQQGQNQLYNELNLGRREEYDVLDKRRGRDPEMGGKPQRRKNPQEGLYNELQKDKMAEAYSEIGMKGERRRGKGHDGLYQGLSTATKDTYDALHMQALPPRRAKRSGSGATNFSLLKQAGDVEENPGPTSMDWIWRILFLVGAATGAHSFEQVQLQQSGPGLVKPSQTLSLTCAISGDSVSSNRAAWNWIRQSPSRGLQWLGRTYYRSKWYNDYAVSLRSRITINPVTSKNQVALHMNSVTPEDTAVYYCARAGIVVVPGPETFYYYDHGLDVWGQGTTVTVSSTREQKLISEEDGSGIQNPDPAVYQLRDSKSSDKSVCLFTDFDSQTNVSQSKDSDVYITDKTVLDMRSMDFKSNSAVAWSNKSDFACANAFNNSIIPEDTFFPSPESSCGTQSFGLLDPKLCYLLDGILFIYGVILTALFLRSKRSRLLHSDYMNMTPRRPGPTRKHYQPYAPPRDFAAYRSRVKFSRSADAPAYQQGQNQLYNELNLGRREEYDVLDKRRGRDPEMGGKPQRRKNPQEGLYNELQKDKMAEAYSEIGMKGERRRGKGHDGLYQGLSTATKDTYDALHMQALPPR

SEQ ID NO: 22658 - protein, 942 aa, synthetic construct
MALPVTALLLPLALLLHAARPDIQMTQSPSSLSASVGDRVTITCRASQSIRNYLNWYQQKPGKAPELLIHAASSLQSGVPSRFSGSGSGTDFTLTISSLQPEDFASYYCQQSYSAPPITFGQGTRLEIKLEGKPIPNPLLGLDSTGSGEDLKNVFPPEVAVFEPSEAEISHTQKATLVCLATGFYPDHVELSWWVNGKEVHSGVSTDPQPLKEQPALNDSRYCLSSRLRVSATFWQNPRNHFRCQVQFYGLSENDEWTQDRAKPVTQIVSAEAWGRADCGSQSFGLLDPKLCYLLDGILFIYGVILTALFLRSKRSRLLHSDYMNMTPRRPGPTRKHYQPYAPPRDFAAYRSRVKFSRSADAPAYQQGQNQLYNELNLGRREEYDVLDKRRGRDPEMGGKPQRRKNPQEGLYNELQKDKMAEAYSEIGMKGERRRGKGHDGLYQGLSTATKDTYDALHMQALPPRRAKRSGSGATNFSLLKQAGDVEENPGPTSMDWIWRILFLVGAATGAHSFEQVQLQQSGPGLVKPSQTLSLTCAISGDSVSSNRAAWNWIRQSPSRGLQWLGRTYYRSKWYNDYAVSLRSRITINPVTSKNQVALHMNSVTPEDTAVYYCARAGIVVVPGPETFYYYDHGLDVWGQGTTVTVSSTREQKLISEEDGSGIQNPDPAVYQLRDSKSSDKSVCLFTDFDSQTNVSQSKDSDVYITDKTVLDMRSMDFKSNSAVAWSNKSDFACANAFNNSIIPEDTFFPSPESSCGTQSFGLLDPKLCYLLDGILFIYGVILTALFLRSKRSRLLHSDYMNMTPRRPGPTRKHYQPYAPPRDFAAYRSRVKFSRSADAPAYQQGQNQLYNELNLGRREEYDVLDKRRGRDPEMGGKPQRRKNPQEGLYNELQKDKMAEAYSEIGMKGERRRGKGHDGLYQGLSTATKDTYDALHMQALPPR

SEQ ID NO: 22659 - protein, 903 aa, synthetic construct
MALPVTALLLPLALLLHAARPDIQMTQSPSSLSASVGDRVTITCRASQSIRNYLNWYQQKPGKAPELLIHAASSLQSGVPSRFSGSGSGTDFTLTISSLQPEDFASYYCQQSYSAPPITFGQGTRLEIKLEGKPIPNPLLGLDSTGSGEDLKNVFPPEVAVFEPSEAEISHTQKATLVCLATGFYPDHVELSWWVNGKEVHSGVSTDPQPLKEQPALNDSRYCLSSRLRVSATFWQNPRNHFRCQVQFYGLSENDEWTQDRAKPVTQIVSAEAWGRADCGSQSFGLLDPKLCYLLDGILFIYGVILTALFLRVKFSRSADAPAYQQGQNQLYNELNLGRREEYDVLDKRRGRDPEMGGKPQRRKNPQEGLYNELQKDKMAEAYSEIGMKGERRRGKGHDGLYQGLSTATKDTYDALHMQALPPRRAKRSGSGATNFSLLKQAGDVEENPGPTSMDWIWRILFLVGAATGAHSFEQVQLQQSGPGLVKPSQTLSLTCAISGDSVSSNRAAWNWIRQSPSRGLQWLGRTYYRSKWYNDYAVSLRSRITINPVTSKNQVALHMNSVTPEDTAVYYCARAGIVVVPGPETFYYYDHGLDVWGQGTTVTVSSTREQKLISEEDLGSGIQNPDPAVYQLRDSKSSDKSVCLFTDFDSQTNVSQSKDSDVYITDKTVLDMRSMDFKSNSAVAWSNKSDFACANAFNNSIIPEDTFFPSPESSCGTQSFGLLDPKLCYLLDGILFIYGVILTALFLKRGRKKLLYIFKQPFMRPVQTTQEEDGCSCRFPEEEEGGCELRVKFSRSADAPAYQQGQNQLYNELNLGRREEYDVLDKRRGRDPEMGGKPQRRKNPQEGLYNELQKDKMAEAYSEIGMKGERRRGKGHDGLYQGLSTATKDTYDALHMQALPPR

SEQ ID NO: 22660 - protein, 945 aa, synthetic construct
MALPVTALLLPLALLLHAARPDIQMTQSPSSLSASVGDRVTITCRASQSIRNYLNWYQQKPGKAPELLIHAASSLQSGVPSRFSGSGSGTDFTLTISSLQPEDFASYYCQQSYSAPPITFGQGTRLEIKLEGKPIPNPLLGLDSTGSGEDLKNVFPPEVAVFEPSEAEISHTQKATLVCLATGFYPDHVELSWWVNGKEVHSGVSTDPQPLKEQPALNDSRYCLSSRLRVSATFWQNPRNHFRCQVQFYGLSENDEWTQDRAKPVTQIVSAEAWGRADCGSQSFGLLDPKLCYLLDGILFIYGVILTALFLKRGRKKLLYIFKQPFMRPVQTTQEEDGCSCRFPEEEEGGCELRVKFSRSADAPAYQQGQNQLYNELNLGRREEYDVLDKRRGRDPEMGGKPQRRKNPQEGLYNELQKDKMAEAYSEIGMKGERRRGKGHDGLYQGLSTATKDTYDALHMQALPPRRAKRSGSGATNFSLLKQAGDVEENPGPTSMDWIWRILFLVGAATGAHSFEQVQLQQSGPGLVKPSQTLSLTCAISGDSVSSNRAAWNWIRQSPSRGLQWLGRTYYRSKWYNDYAVSLRSRITINPVTSKNQVALHMNSVTPEDTAVYYCARAGIVVVPGPETFYYYDHGLDVWGQGTTVTVSSTREQKLISEEDLGSGIQNPDPAVYQLRDSKSSDKSVCLFTDFDSQTNVSQSKDSDVYITDKTVLDMRSMDFKSNSAVAWSNKSDFACANAFNNSIIPEDTFFPSPESSCGTQSFGLLDPKLCYLLDGILFIYGVILTALFLKRGRKKLLYIFKQPFMRPVQTTQEEDGCSCRFPEEEEGGCELRVKFSRSADAPAYQQGQNQLYNELNLGRREEYDVLDKRRGRDPEMGGKPQRRKNPQEGLYNELQKDKMAEAYSEIGMKGERRRGKGHDGLYQGLSTATKDTYDALHMQALPPR

SEQ ID NO: 22661 - protein, 835 aa, synthetic construct
MALPVTALLLPLALLLHAARPDIQMTQSPSSLSASVGDRVTITCRASQSIRNYLNWYQQKPGKAPELLIHAASSLQSGVPSRFSGSGSGTDFTLTISSLQPEDFASYYCQQSYSAPPITFGQGTRLEIKLEQSFGLLDPKLCYLLDGILFIYGVILTALFLRVKFSRSADAPAYQQGQNQLYNELNLGRREEYDVLDKRRGRDPEMGGKPQRRKNPQEGLYNELQKDKMAEAYSEIGMKGERRRGKGHDGLYQGLSTATKDTYDALHMQALPPRRAKRSGSGATNFSLLKQAGDVEENPGPTSMDWIWRILFLVGAATGAHSFEQVQLQQSGPGLVKPSQTLSLTCAISGDSVSSNRAAWNWIRQSPSRGLQWLGRTYYRSKWYNDYAVSLRSRITINPVTSKNQVALHMNSVTPEDTAVYYCARAGIVVVPGPETFYYYDHGLDVWGQGTTVTVSSTRQSFGLLDPKLCYLLDGILFIYGVILTALFLRVKFSRSADAPAYQQGQNQLYNELNLGRREEYDVLDKRRGRDPEMGGKPQRRKNPQEGLYNELQKDKMAEAYSEIGMKGERRRGKGHDGLYQGLSTATKDTYDALHMQALPPRRAKRSGSGVKQTLNFDLLKLAGDVESNPGPSRGHMTEYKPTVRLATRDDVPRAVRTLAAAFADYPATRHTVDPDRHIERVTELQELFLTRVGLDIGKVWVADDGAAVAVWTTPESVEAGAVFAEIGPRMAELSGSRLAAQQQMEGLLAPHRPKEPAWFLATVGVSPDHQGKGLGSAVVLPGVEAAERAGVPAFLETSAPRNLPFYERLGFTVTADVEVPEGPRTWCMTRKPGA

SEQ ID NO: 22662 - protein, 660 aa, synthetic construct
MALPVTALLLPLALLLHAARPDIQMTQSPSSLSASVGDRVTITCRASQSIRNYLNWYQQKPGKAPELLIHAASSLQSGVPSRFSGSGSGTDFTLTISSLQPEDFASYYCQQSYSAPPITFGQGTRLEIKLEGQPKANPTVTLFPPSSEELQANKATLVCLISDFYPGAVTVAWKADGSPVKAGVETTKPSKQSNNKYAASSYLSLTPEQWKSHRSYSCQVTHEGSTVEKTVAPTECSPIKTDVITMDPKDNCSKDANDTLLLQLTNTSAYYMYLLLLLKSVVYFAIITCCLLRRTAFCCNGEKSRAKRSGSGATNFSLLKQAGDVEENPGPTSMDWIWRILFLVGAATGAHSFEQVQLQQSGPGLVKPSQTLSLTCAISGDSVSSNRAAWNWIRQSPSRGLQWLGRTYYRSKWYNDYAVSLRSRITINPVTSKNQVALHMNSVTPEDTAVYYCARAGIVVVPGPETFYYYDHGLDVWGQGTTVTVSSTRASTKGPSVFPLAPSSKSTSGGTAALGCLVKDYFPEPVTVSWNSGALTSGVHTFPAVLQSSGLYSLSSVVTVPSSSLGTQTYICNVNHKPSNTKVDKRVEPKSCEVKTDSTDHVKPKETENTKQPSKSCHKPKAIVHTEKVNMMSLTVLGLRMLFAKTVAVNFLLTAKLFFL

SEQ ID NO: 22663 - protein, 638 aa, synthetic construct
MALPVTALLLPLALLLHAARPDIQMTQSPSSLSASVGDRVTITCRASQSIRNYLNWYQQKPGKAPELLIHAASSLQSGVPSRFSGSGSGTDFTLTISSLQPEDFASYYCQQSYSAPPITFGQGTRLEIKLEGQPKANPTVTLFPPSSEELQANKATLVCLISDFYPGAVTVAWKADGSPVKAGVETTKPSKQSNNKYAASSYLSLTPEQWKSHRSYSCQVTHEGSTVEKTVAPTECSGRADCGITSASYHQGVLSATILYEILLGKATLYAVLVSALVLMAMVKRKDSRGRAKRSGSGATNFSLLKQAGDVEENPGPTSMDWIWRILFLVGAATGAHSFEQVQLQQSGPGLVKPSQTLSLTCAISGDSVSSNRAAWNWIRQSPSRGLQWLGRTYYRSKWYNDYAVSLRSRITINPVTSKNQVALHMNSVTPEDTAVYYCARAGIVVVPGPETFYYYDHGLDVWGQGTTVTVSSTRASTKGPSVFPLAPSSKSTSGGTAALGCLVKDYFPEPVTVSWNSGALTSGVHTFPAVLQSSGLYSLSSVVTVPSSSLGTQTYICNVNHKPSNTKVDKRVEPKSCIPEDTFFPSSDVPCDVKLVEKSFETDTNLNFQNLSVIGFRILLLKVAGFNLLMTLRLWSS

SEQ ID NO: 22664 - protein, 638 aa, synthetic construct
MALPVTALLLPLALLLHAARPDIQMTQSPSSLSASVGDRVTITCRASQSIRNYLNWYQQKPGKAPELLIHAASSLQSGVPSRFSGSGSGTDFTLTISSLQPEDFASYYCQQSYSAPPITFGQGTRLEIKLEGQPKANPTVTLFPPSSEELQANKATLVCLISDFYPGAVTVAWKADGSPVKAGVETTKPSKQSNNKYAASSYLSLTPEQWKSHRSYSCQVTHEGSTVEKTVAPTECSGRADCGFTSESYQQGVLSATILYEILLGKATLYAVLVSALVLMAMVKRKDSRGRAKRSGSGATNFSLLKQAGDVEENPGPTSMDWIWRILFLVGAATGAHSFEQVQLQQSGPGLVKPSQTLSLTCAISGDSVSSNRAAWNWIRQSPSRGLQWLGRTYYRSKWYNDYAVSLRSRITINPVTSKNQVALHMNSVTPEDTAVYYCARAGIVVVPGPETFYYYDHGLDVWGQGTTVTVSSTRASTKGPSVFPLAPSSKSTSGGTAALGCLVKDYFPEPVTVSWNSGALTSGVHTFPAVLQSSGLYSLSSVVTVPSSSLGTQTYICNVNHKPSNTKVDKRVEPKSCIPEDTFFPSPESSCDVKLVEKSFETDTNLNFQNLSVIGFRILLLKVAGFNLLMTLRLWSS

SEQ ID NO: 22665 - protein, 464 aa, synthetic construct
MALPVTALLLPLALLLHAARPDIQMTQSPSSLSASVGDRVTITCRASQSIRNYLNWYQQKPGKAPELLIHAASSLQSGVPSRFSGSGSGTDFTLTISSLQPEDFASYYCQQSYSAPPITFGQGTRLEIKGGGGSGGGGSGGGGSQVQLQQSGPGLVKPSQTLSLTCAISGDSVSSNRAAWNWIRQSPSRGLQWLGRTYYRSKWYNDYAVSLRSRITINPVTSKNQVALHMNSVTPEDTAVYYCARAGIVVVPGPETFYYYDHGLDVWGQGTTVTVSSTRDGNEEMGGITQTPYKVSISGTTVILTCPQYPGSEILWQHNDKNIGGDEDDKNIGSDEDHLSLKEFSELEQSGYYVCYPRGSKPEDANFYLYLRARVCENCMEMDVMSVATIVIVDICITGGLLLLVYYWSKNRKAKAKPVTRGAGAGGRQRGQNKERPPPVPNPDYEPIRKGQRDLYSGLNQRRI

SEQ ID NO: 22666 - protein, 429 aa, synthetic construct
MALPVTALLLPLALLLHAARPDIQMTQSPSSLSASVGDRVTITCRASQSIRNYLNWYQQKPGKAPELLIHAASSLQSGVPSRFSGSGSGTDFTLTISSLQPEDFASYYCQQSYSAPPITFGQGTRLEIKGGGGSGGGGSGGGGSQVQLQQSGPGLVKPSQTLSLTCAISGDSVSSNRAAWNWIRQSPSRGLQWLGRTYYRSKWYNDYAVSLRSRITINPVTSKNQVALHMNSVTPEDTAVYYCARAGIVVVPGPETFYYYDHGLDVWGQGTTVTVSSTRFKIPIEELEDRVFVNCNTSITWVEGTVGTLLSDITRLDLGKRILDPRGIYRCNGTDIYKDKESTVQVHYRMCQSCVELDPATVAGIIVTDVIATLLLALGVFCFAGHETGRLSGAADTQALLRNDQVYQPLRDRDDAQYSHLGGNWARNK

SEQ ID NO: 22667 - protein, 439 aa, synthetic construct
MALPVTALLLPLALLLHAARPDIQMTQSPSSLSASVGDRVTITCRASQSIRNYLNWYQQKPGKAPELLIHAASSLQSGVPSRFSGSGSGTDFTLTISSLQPEDFASYYCQQSYSAPPITFGQGTRLEIKGGGGSGGGGSGGGGSQVQLQQSGPGLVKPSQTLSLTCAISGDSVSSNRAAWNWIRQSPSRGLQWLGRTYYRSKWYNDYAVSLRSRITINPVTSKNQVALHMNSVTPEDTAVYYCARAGIVVVPGPETFYYYDHGLDVWGQGTTVTVSSTRQSIKGNHLVKVYDYQEDGSVLLTCDAEAKNITWFKDGKMIGFLTEDKKKWNLGSNAKDPRGMYQCKGSQNKSKPLQVYYRMCQNCIELNAATISGFLFAEIVSIFVLAVGVYFIAGQDGVRQSRASDKQTLLPNDQLYQPLKDREDDQYSHLQGNQLRRN

SEQ ID NO: 22668 - protein, 422 aa, synthetic construct
MALPVTALLLPLALLLHAARPDIQMTQSPSSLSASVGDRVTITCRASQSIRNYLNWYQQKPGKAPELLIHAASSLQSGVPSRFSGSGSGTDFTLTISSLQPEDFASYYCQQSYSAPPITFGQGTRLEIKGGGGSGGGGSGGGGSQVQLQQSGPGLVKPSQTLSLTCAISGDSVSSNRAAWNWIRQSPSRGLQWLGRTYYRSKWYNDYAVSLRSRITINPVTSKNQVALHMNSVTPEDTAVYYCARAGIVVVPGPETFYYYDHGLDVWGQGTTVTVSSTRQSFGLLDPKLCYLLDGILFIYGVILTALFLRVKFSRSADAPAYQQGQNQLYNELNLGRREEYDVLDKRRGRDPEMGGKPQRRKNPQEGLYNELQKDKMAEAYSEIGMKGERRRGKGHDGLYQGLSTATKDTYDALHMQALPPR

SEQ ID NO: 22669 - protein, 464 aa, synthetic construct
MALPVTALLLPLALLLHAARPQVQLQQSGPGLVKPSQTLSLTCAISGDSVSSNRAAWNWIRQSPSRGLQWLGRTYYRSKWYNDYAVSLRSRITINPVTSKNQVALHMNSVTPEDTAVYYCARAGIVVVPGPETFYYYDHGLDVWGQGTTVTVSSGGGGSGGGGSGGGGSDIQMTQSPSSLSASVGDRVTITCRASQSIRNYLNWYQQKPGKAPELLIHAASSLQSGVPSRFSGSGSGTDFTLTISSLQPEDFASYYCQQSYSAPPITFGQGTRLEIKTRDGNEEMGGITQTPYKVSISGTTVILTCPQYPGSEILWQHNDKNIGGDEDDKNIGSDEDHLSLKEFSELEQSGYYVCYPRGSKPEDANFYLYLRARVCENCMEMDVMSVATIVIVDICITGGLLLLVYYWSKNRKAKAKPVTRGAGAGGRQRGQNKERPPPVPNPDYEPIRKGQRDLYSGLNQRRI

SEQ ID NO: 22670 - protein, 429 aa, synthetic construct
MALPVTALLLPLALLLHAARPQVQLQQSGPGLVKPSQTLSLTCAISGDSVSSNRAAWNWIRQSPSRGLQWLGRTYYRSKWYNDYAVSLRSRITINPVTSKNQVALHMNSVTPEDTAVYYCARAGIVVVPGPETFYYYDHGLDVWGQGTTVTVSSGGGGSGGGGSGGGGSDIQMTQSPSSLSASVGDRVTITCRASQSIRNYLNWYQQKPGKAPELLIHAASSLQSGVPSRFSGSGSGTDFTLTISSLQPEDFASYYCQQSYSAPPITFGQGTRLEIKTRFKIPIEELEDRVFVNCNTSITWVEGTVGTLLSDITRLDLGKRILDPRGIYRCNGTDIYKDKESTVQVHYRMCQSCVELDPATVAGIIVTDVIATLLLALGVFCFAGHETGRLSGAADTQALLRNDQVYQPLRDRDDAQYSHLGGNWARNK

SEQ ID NO: 22671 - protein, 439 aa, synthetic construct
MALPVTALLLPLALLLHAARPQVQLQQSGPGLVKPSQTLSLTCAISGDSVSSNRAAWNWIRQSPSRGLQWLGRTYYRSKWYNDYAVSLRSRITINPVTSKNQVALHMNSVTPEDTAVYYCARAGIVVVPGPETFYYYDHGLDVWGQGTTVTVSSGGGGSGGGGSGGGGSDIQMTQSPSSLSASVGDRVTITCRASQSIRNYLNWYQQKPGKAPELLIHAASSLQSGVPSRFSGSGSGTDFTLTISSLQPEDFASYYCQQSYSAPPITFGQGTRLEIKTRQSIKGNHLVKVYDYQEDGSVLLTCDAEAKNITWFKDGKMIGFLTEDKKKWNLGSNAKDPRGMYQCKGSQNKSKPLQVYYRMCQNCIELNAATISGFLFAEIVSIFVLAVGVYFIAGQDGVRQSRASDKQTLLPNDQLYQPLKDREDDQYSHLQGNQLRRN

SEQ ID NO: 22672 - protein, 422 aa, synthetic construct
MALPVTALLLPLALLLHAARPQVQLQQSGPGLVKPSQTLSLTCAISGDSVSSNRAAWNWIRQSPSRGLQWLGRTYYRSKWYNDYAVSLRSRITINPVTSKNQVALHMNSVTPEDTAVYYCARAGIVVVPGPETFYYYDHGLDVWGQGTTVTVSSGGGGSGGGGSGGGGSDIQMTQSPSSLSASVGDRVTITCRASQSIRNYLNWYQQKPGKAPELLIHAASSLQSGVPSRFSGSGSGTDFTLTISSLQPEDFASYYCQQSYSAPPITFGQGTRLEIKTRQSFGLLDPKLCYLLDGILFIYGVILTALFLRVKFSRSADAPAYQQGQNQLYNELNLGRREEYDVLDKRRGRDPEMGGKPQRRKNPQEGLYNELQKDKMAEAYSEIGMKGERRRGKGHDGLYQGLSTATKDTYDALHMQALPPR

SEQ ID NO: 22673 - protein, 517 aa, synthetic construct
MALPVTALLLPLALLLHAARPDIQMTQSPSSLSASVGDRVTITCRASQSIRNYLNWYQQKPGKAPELLIHAASSLQSGVPSRFSGSGSGTDFTLTISSLQPEDFASYYCQQSYSAPPITFGQGTRLEIKGGGGSGGGGSGGGGSQVQLQQSGPGLVKPSQTLSLTCAISGDSVSSNRAAWNWIRQSPSRGLQWLGRTYYRSKWYNDYAVSLRSRITINPVTSKNQVALHMNSVTPEDTAVYYCARAGIVVVPGPETFYYYDHGLDVWGQGTTVTVSSTRGMRTEDLPKAVVFLEPQWYRVLEKDSVTLKCQGAYSPEDNSTQWFHNESLISSQASSYFIDAATVDDSGEYRCQTNLSTLSDPVQLEVHIGWLLLQAPRWVFKEEDPIHLRCHSWKNTALHKVTYLQNGKGRKYFHHNSDFYIPKATLKDSGSYFCRGLVGSKNVSSETVNITITQGLAVPTISSFFPPGYQVSFCLVMVLLFAVDTGLYFSVKTNIRSSTRDWKDHKFKWRKDPQDK

SEQ ID NO: 22674 - protein, 799 aa, synthetic construct
MALPVTALLLPLALLLHAARPDIQMTQSPSSLSASVGDRVTITCRASQSIRNYLNWYQQKPGKAPELLIHAASSLQSGVPSRFSGSGSGTDFTLTISSLQPEDFASYYCQQSYSAPPITFGQGTRLEIKGGGGSGGGGSGGGGSQVQLQQSGPGLVKPSQTLSLTCAISGDSVSSNRAAWNWIRQSPSRGLQWLGRTYYRSKWYNDYAVSLRSRITINPVTSKNQVALHMNSVTPEDTAVYYCARAGIVVVPGPETFYYYDHGLDVWGQGTTVTVSSTRGGSGQQQTLPKPFIWAEPHFMVPKEKQVTICCQGNYGAVEYQLHFEGSLFAVDRPKPPERINKVQFYIPDMNSRMAGQYSCIYRVGELWSEPSNLLDLVVTEMYDTPTLSVHPGPEVISGEKVTFYCRLDTATSMFLLLKEGRSSHVQRGYGKVQAEFPLGPVTTAHRGTYRCFGSYNNHAWSFPSEPVKLLVTGDIENTSLAPEDPTFPADTWGTYLLTTETGLQKDHALWDHTAQNLLRMGLAFLVLVALVWFLVEDWLSRKRTRERASRASTWEGRRRLNTQTLRAKRSGSGVKQTLNFDLLKLAGDVESNPGPSRGHMTEYKPTVRLATRDDVPRAVRTLAAAFADYPATRHTVDPDRHIERVTELQELFLTRVGLDIGKVWVADDGAAVAVWTTPESVEAGAVFAEIGPRMAELSGSRLAAQQQMEGLLAPHRPKEPAWFLATVGVSPDHQGKGLGSAVVLPGVEAAERAGVPAFLETSAPRNLPFYERLGFTVTADVEVPEGPRTWCMTRKPGA

SEQ ID NO: 22675 - protein, 632 aa, synthetic construct
MALPVTALLLPLALLLHAARPDIQMTQSPSSLSASVGDRVTITCRASQSIRNYLNWYQQKPGKAPELLIHAASSLQSGVPSRFSGSGSGTDFTLTISSLQPEDFASYYCQQSYSAPPITFGQGTRLEIKGGGGSGGGGSGGGGSQVQLQQSGPGLVKPSQTLSLTCAISGDSVSSNRAAWNWIRQSPSRGLQWLGRTYYRSKWYNDYAVSLRSRITINPVTSKNQVALHMNSVTPEDTAVYYCARAGIVVVPGPETFYYYDHGLDVWGQGTTVTVSSTRKIEVMYPPPYLDNEKSNGTIIHVKGARGDIENTSLAPEDPTFPADTWGTYLLTTETGLQKDHALWDHTAQNLLRMGLAFLVLVALVWFLVEDWLSRKRTRERASRASTWEGRRRLNTQTLRAKRSGSGVKQTLNFDLLKLAGDVESNPGPSRGHMTEYKPTVRLATRDDVPRAVRTLAAAFADYPATRHTVDPDRHIERVTELQELFLTRVGLDIGKVWVADDGAAVAVWTTPESVEAGAVFAEIGPRMAELSGSRLAAQQQMEGLLAPHRPKEPAWFLATVGVSPDHQGKGLGSAVVLPGVEAAERAGVPAFLETSAPRNLPFYERLGFTVTADVEVPEGPRTWCMTRKPGA

SEQ ID NO: 22676 - protein, 719 aa, synthetic construct
MALPVTALLLPLALLLHAARPDIQMTQSPSSLSASVGDRVTITCRASQSIRNYLNWYQQKPGKAPELLIHAASSLQSGVPSRFSGSGSGTDFTLTISSLQPEDFASYYCQQSYSAPPITFGQGTRLEIKGGGGSGGGGSGGGGSQVQLQQSGPGLVKPSQTLSLTCAISGDSVSSNRAAWNWIRQSPSRGLQWLGRTYYRSKWYNDYAVSLRSRITINPVTSKNQVALHMNSVTPEDTAVYYCARAGIVVVPGPETFYYYDHGLDVWGQGTTVTVSSTRLWVSQPPEIRTLEGSSAFLPCSFNASQGRLAIGSVTWFRDEVVPGKEVRNGTPEFRGRLAPLASSRFLHDHQAELHIRDVRGHDASIYVCRVEVLGLGVGTGNGTRLVVEKEHPQLGAGTVLLLRAGFYAVSFLSVAVGSTVYYQGKCLTWKGPRRQLPAVVPAPLPPPCGSSAHLLPPVPGGRAKRSGSGVKQTLNFDLLKLAGDVESNPGPSRMYRMQLLSCIALSLALVTNSAPTSSSTKKTQLQLEHLLLDLQMILNGINNYKNPKLTEMLTAKFYMPKKATELKHLQCLEEELKPLEEVLNLAQSKNFHLRPRDLISNINVIVLELKGSETTFMCEYADETATIVEFLNRWITFCQSIISTLTKIEVMYPPPYLDNEKSNGTIIHVKGKHLCPSPLFPGPSKPFWVLVVVGGVLACYSLLVTVAFIIFWVRSKRS

SEQ ID NO: 22677 - protein, 695 aa, synthetic construct
MALPVTALLLPLALLLHAARPDIQMTQSPSSLSASVGDRVTITCRASQSIRNYLNWYQQKPGKAPELLIHAASSLQSGVPSRFSGSGSGTDFTLTISSLQPEDFASYYCQQSYSAPPITFGQGTRLEIKGGGGSGGGGSGGGGSQVQLQQSGPGLVKPSQTLSLTCAISGDSVSSNRAAWNWIRQSPSRGLQWLGRTYYRSKWYNDYAVSLRSRITINPVTSKNQVALHMNSVTPEDTAVYYCARAGIVVVPGPETFYYYDHGLDVWGQGTTVTVSSTRLWVSQPPEIRTLEGSSAFLPCSFNASQGRLAIGSVTWFRDEVVPGKEVRNGTPEFRGRLAPLASSRFLHDHQAELHIRDVRGHDASIYVCRVEVLGLGVGTGNGTRLVVEKEHPQLGAGTVLLLRAGFYAVSFLSVAVGSTVYYQGKCLTWKGPRRQLPAVVPAPLPPPCGSSAHLLPPVPGGRAKRSGSGVKQTLNFDLLKLAGDVESNPGPSRGHMTEYKPTVRLATRDDVPRAVRTLAAAFADYPATRHTVDPDRHIERVTELQELFLTRVGLDIGKVWVADDGAAVAVWTTPESVEAGAVFAEIGPRMAELSGSRLAAQQQMEGLLAPHRPKEPAWFLATVGVSPDHQGKGLGSAVVLPGVEAAERAGVPAFLETSAPRNLPFYERLGFTVTADVEVPEGPRTWCMTRKPGA

SEQ ID NO: 22678 - protein, 371 aa, synthetic construct
MALPVTALLLPLALLLHAARPDIQMTQSPSSLSASVGDRVTITCRASQSIRNYLNWYQQKPGKAPELLIHAASSLQSGVPSRFSGSGSGTDFTLTISSLQPEDFASYYCQQSYSAPPITFGQGTRLEIKGGGGSGGGGSGGGGSQVQLQQSGPGLVKPSQTLSLTCAISGDSVSSNRAAWNWIRQSPSRGLQWLGRTYYRSKWYNDYAVSLRSRITINPVTSKNQVALHMNSVTPEDTAVYYCARAGIVVVPGPETFYYYDHGLDVWGQGTTVTVSSTRKIEVMYPPPYLDNEKSNGTIIHVKGARITQGLAVSTISSFFPPGYQVSFCLVMVLLFAVDTGLYFSVKTNIRSSTRDWKDHKFKWRKDPQDK

SEQ ID NO: 22679 - protein, 371 aa, synthetic construct
MALPVTALLLPLALLLHAARPDIQMTQSPSSLSASVGDRVTITCRASQSIRNYLNWYQQKPGKAPELLIHAASSLQSGVPSRFSGSGSGTDFTLTISSLQPEDFASYYCQQSYSAPPITFGQGTRLEIKGGGGSGGGGSGGGGSQVQLQQSGPGLVKPSQTLSLTCAISGDSVSSNRAAWNWIRQSPSRGLQWLGRTYYRSKWYNDYAVSLRSRITINPVTSKNQVALHMNSVTPEDTAVYYCARAGIVVVPGPETFYYYDHGLDVWGQGTTVTVSSTRKIEVMYPPPYLDNEKSNGTIIHVKGARITQGLAVPTISSFFPPGYQVSFCLVMVLLFAVDTGLYFSVKTNIRSSTRDWKDHKFKWRKDPQDK

SEQ ID NO: 22680 - protein, 350 aa, synthetic construct
MALPVTALLLPLALLLHAARPDIQMTQSPSSLSASVGDRVTITCRASQSIRNYLNWYQQKPGKAPELLIHAASSLQSGVPSRFSGSGSGTDFTLTISSLQPEDFASYYCQQSYSAPPITFGQGTRLEIKGGGGSGGGGSGGGGSQVQLQQSGPGLVKPSQTLSLTCAISGDSVSSNRAAWNWIRQSPSRGLQWLGRTYYRSKWYNDYAVSLRSRITINPVTSKNQVALHMNSVTPEDTAVYYCARAGIVVVPGPETFYYYDHGLDVWGQGTTVTVSSTRKIEVMYPPPYLDNEKSNGTIIHVKGARITQGLAVSTISSFSPPGYQVSFCLVMVLLFAVDTGLYFSVKTNI

SEQ ID NO: 22681 - protein, 381 aa, synthetic construct
MALPVTALLLPLALLLHAARPDIQMTQSPSSLSASVGDRVTITCRASQSIRNYLNWYQQKPGKAPELLIHAASSLQSGVPSRFSGSGSGTDFTLTISSLQPEDFASYYCQQSYSAPPITFGQGTRLEIKGGGGSGGGGSGGGGSQVQLQQSGPGLVKPSQTLSLTCAISGDSVSSNRAAWNWIRQSPSRGLQWLGRTYYRSKWYNDYAVSLRSRITINPVTSKNQVALHMNSVTPEDTAVYYCARAGIVVVPGPETFYYYDHGLDVWGQGTTVTVSSTRKIEVMYPPPYLDNEKSNGTIIHVKGARVEKEHPQLGAGTVLLLRAGFYAVSFLSVAVGSTVYYQGKCLTWKGPRRQLPAVVPAPLPPPCGSSAHLLPPVPGG

SEQ ID NO: 22682 - protein, 462 aa, synthetic construct
MALPVTALLLPLALLLHAARPDIQMTQSPSSLSASVGDRVTITCRASQSIRNYLNWYQQKPGKAPELLIHAASSLQSGVPSRFSGSGSGTDFTLTISSLQPEDFASYYCQQSYSAPPITFGQGTRLEIKGGGGSGGGGSGGGGSQVQLQQSGPGLVKPSQTLSLTCAISGDSVSSNRAAWNWIRQSPSRGLQWLGRTYYRSKWYNDYAVSLRSRITINPVTSKNQVALHMNSVTPEDTAVYYCARAGIVVVPGPETFYYYDHGLDVWGQGTTVTVSSTRKIEVMYPPPYLDNEKSNGTIIHVKGARKSVRFYLVVSPASASTQTSWTPRDLVSSQTQTQSCVPPTAGARQAPESPSTIPVPSQPQNSTLRPGPAAPIALVPVFCGLLVAKSLVLSALLVWWGDIWWKTMMELRSLDTQKATCHLQQVTDLPWTSVSSPVEREILYHTVARTKISDDDDEHTL

SEQ ID NO: 22683 - protein, 399 aa, synthetic construct
MALPVTALLLPLALLLHAARPDIQMTQSPSSLSASVGDRVTITCRASQSIRNYLNWYQQKPGKAPELLIHAASSLQSGVPSRFSGSGSGTDFTLTISSLQPEDFASYYCQQSYSAPPITFGQGTRLEIKGGGGSGGGGSGGGGSQVQLQQSGPGLVKPSQTLSLTCAISGDSVSSNRAAWNWIRQSPSRGLQWLGRTYYRSKWYNDYAVSLRSRITINPVTSKNQVALHMNSVTPEDTAVYYCARAGIVVVPGPETFYYYDHGLDVWGQGTTVTVSSTRKIEVMYPPPYLDNEKSNGTIIHVKGARGDIENTSLAPEDPTFPADTWGTYLLTTETGLQKDHALWDHTAQNLLRMGLAFLVLVALVWFLVEDWLSRKRTRERASRASTWEGRRRLNTQTL

SEQ ID NO: 22684 - protein, 995 aa, synthetic construct
MALPVTALLLPLALLLHAARPDIQMTQSPSSLSASVGDRVTITCRASQSIRNYLNWYQQKPGKAPELLIHAASSLQSGVPSRFSGSGSGTDFTLTISSLQPEDFASYYCQQSYSAPPITFGQGTRLEIKLEGQPKANPTVTLFPPSSEELQANKATLVCLISDFYPGAVTVAWKADGSPVKAGVETTKPSKQSNNKYAASSYLSLTPEQWKSHRSYSCQVTHEGSTVEKTVAPTECSGSQSFGLLDPKLCYLLDGILFIYGVILTALFLRVKFSRSADAPAYQQGQNQLYNELNLGRREEYDVLDKRRGRDPEMGGKPQRRKNPQEGLYNELQKDKMAEAYSEIGMKGERRRGKGHDGLYQGLSTATKDTYDALHMQALPPRRAKRSGSGATNFSLLKQAGDVEENPGPTSMDWIWRILFLVGAATGAHSFEQVQLQQSGPGLVKPSQTLSLTCAISGDSVSSNRAAWNWIRQSPSRGLQWLGRTYYRSKWYNDYAVSLRSRITINPVTSKNQVALHMNSVTPEDTAVYYCARAGIVVVPGPETFYYYDHGLDVWGQGTTVTVSSTRASTKGPSVFPLAPSSKSTSGGTAALGCLVKDYFPEPVTVSWNSGALTSGVHTFPAVLQSSGLYSLSSVVTVPSSSLGTQTYICNVNHKPSNTKVDKRVEPKSCGTGDIENTSLAPEDPTFPADTWGTYLLTTETGLQKDHALWDHTAQNLLRMGLAFLVLVALVWFLVEDWLSRKRTRERASRASTWEGRRRLNTQTLRAKRSGSGATNFSLLKQAGDVEENPGPSRGHMTEYKPTVRLATRDDVPRAVRTLAAAFADYPATRHTVDPDRHIERVTELQELFLTRVGLDIGKVWVADDGAAVAVWTTPESVEAGAVFAEIGPRMAELSGSRLAAQQQMEGLLAPHRPKEPAWFLATVGVSPDHQGKGLGSAVVLPGVEAAERAGVPAFLETSAPRNLPFYERLGFTVTADVEVPEGPRTWCMTRKPGA

SEQ ID NO: 22685 - protein, 1061 aa, synthetic construct
MALPVTALLLPLALLLHAARPDIQMTQSPSSLSASVGDRVTITCRASQSIRNYLNWYQQKPGKAPELLIHAASSLQSGVPSRFSGSGSGTDFTLTISSLQPEDFASYYCQQSYSAPPITFGQGTRLEIKLEGQPKANPTVTLFPPSSEELQANKATLVCLISDFYPGAVTVAWKADGSPVKAGVETTKPSKQSNNKYAASSYLSLTPEQWKSHRSYSCQVTHEGSTVEKTVAPTECSGSQSFGLLDPKLCYLLDGILFIYGVILTALFLRVKFSRSADAPAYQQGQNQLYNELNLGRREEYDVLDKRRGRDPEMGGKPQRRKNPQEGLYNELQKDKMAEAYSEIGMKGERRRGKGHDGLYQGLSTATKDTYDALHMQALPPRRAKRSGSGATNFSLLKQAGDVEENPGPTSMDWIWRILFLVGAATGAHSFEQVQLQQSGPGLVKPSQTLSLTCAISGDSVSSNRAAWNWIRQSPSRGLQWLGRTYYRSKWYNDYAVSLRSRITINPVTSKNQVALHMNSVTPEDTAVYYCARAGIVVVPGPETFYYYDHGLDVWGQGTTVTVSSTRASTKGPSVFPLAPSSKSTSGGTAALGCLVKDYFPEPVTVSWNSGALTSGVHTFPAVLQSSGLYSLSSVVTVPSSSLGTQTYICNVNHKPSNTKVDKRVEPKSCGTKSVRFYLVVSPASASTQTSWTPRDLVSSQTQTQSCVPPTAGARQAPESPSTIPVPSQPQNSTLRPGPAAPIALVPVFCGLLVAKSLVLSALLVWWGDIWWKTMMELRSLDTQKATCHLQQVTDLPWTSVSSPVEREILYHTVARTKISDDDDEHTLRAKRSGSGVKQTLNFDLLKLAGDVESNPGPSRGHMTEYKPTVRLATRDDVPRAVRTLAAAFADYPATRHTVDPDRHIERVTELQELFLTRVGLDIGKVWVADDGAAVAVWTTPESVEAGAVFAEIGPRMAELSGSRLAAQQQMEGLLAPHRPKEPAWFLATVGVSPDHQGKGLGSAVVLPGVEAAERAGVPAFLETSAPRNLPFYERLGFTVTADVEVPEGPRTWCMTRKPGA

SEQ ID NO: 22686 - protein, 981 aa, synthetic construct
MALPVTALLLPLALLLHAARPDIQMTQSPSSLSASVGDRVTITCRASQSIRNYLNWYQQKPGKAPELLIHAASSLQSGVPSRFSGSGSGTDFTLTISSLQPEDFASYYCQQSYSAPPITFGQGTRLEIKLEGQPKANPTVTLFPPSSEELQANKATLVCLISDFYPGAVTVAWKADGSPVKAGVETTKPSKQSNNKYAASSYLSLTPEQWKSHRSYSCQVTHEGSTVEKTVAPTECSGSQSFGLLDPKLCYLLDGILFIYGVILTALFLRVKFSRSADAPAYQQGQNQLYNELNLGRREEYDVLDKRRGRDPEMGGKPQRRKNPQEGLYNELQKDKMAEAYSEIGMKGERRRGKGHDGLYQGLSTATKDTYDALHMQALPPRRAKRSGSGATNFSLLKQAGDVEENPGPTSMDWIWRILFLVGAATGAHSFEQVQLQQSGPGLVKPSQTLSLTCAISGDSVSSNRAAWNWIRQSPSRGLQWLGRTYYRSKWYNDYAVSLRSRITINPVTSKNQVALHMNSVTPEDTAVYYCARAGIVVVPGPETFYYYDHGLDVWGQGTTVTVSSTRASTKGPSVFPLAPSSKSTSGGTAALGCLVKDYFPEPVTVSWNSGALTSGVHTFPAVLQSSGLYSLSSVVTVPSSSLGTQTYICNVNHKPSNTKVDKRVEPKSCGTVVEKEHPQLGAGTVLLLRAGFYAVSFLSVAVGSTVYYQGKCLTWKGPRRQLPAVVPAPLPPPCGSSAHLLPPVPGGRAKRSGSGVKQTLNFDLLKLAGDVESNPGPSRGHMTEYKPTVRLATRDDVPRAVRTLAAAFADYPATRHTVDPDRHIERVTELQELFLTRVGLDIGKVWVADDGAAVAVWTTPESVEAGAVFAEIGPRMAELSGSRLAAQQQMEGLLAPHRPKEPAWFLATVGVSPDHQGKGLGSAVVLPGVEAAERAGVPAFLETSAPRNLPFYERLGFTVTADVEVPEGPRTWCMTRKPGA

SEQ ID NO: 22687 - protein, 1010 aa, synthetic construct
MALPVTALLLPLALLLHAARPDIQMTQSPSSLSASVGDRVTITCRASQSIRNYLNWYQQKPGKAPELLIHAASSLQSGVPSRFSGSGSGTDFTLTISSLQPEDFASYYCQQSYSAPPITFGQGTRLEIKLEDLKNVFPPEVAVFEPSEAEISHTQKATLVCLATGFYPDHVELSWWVNGKEVHSGVSTDPQPLKEQPALNDSRYCLSSRLRVSATFWQNPRNHFRCQVQFYGLSENDEWTQDRAKPVTQIVSAEAWGRADCGSQSFGLLDPKLCYLLDGILFIYGVILTALFLRVKFSRSADAPAYQQGQNQLYNELNLGRREEYDVLDKRRGRDPEMGGKPQRRKNPQEGLYNELQKDKMAEAYSEIGMKGERRRGKGHDGLYQGLSTATKDTYDALHMQALPPRRAKRSGSGATNFSLLKQAGDVEENPGPTSMDWIWRILFLVGAATGAHSFEQVQLQQSGPGLVKPSQTLSLTCAISGDSVSSNRAAWNWIRQSPSRGLQWLGRTYYRSKWYNDYAVSLRSRITINPVTSKNQVALHMNSVTPEDTAVYYCARAGIVVVPGPETFYYYDHGLDVWGQGTTVTVSSTRIQNPDPAVYQLRDSKSSDKSVCLFTDFDSQTNVSQSKDSDVYITDKTVLDMRSMDFKSNSAVAWSNKSDFACANAFNNSIIPEDTFFPSPESSCGTGDIENTSLAPEDPTFPADTWGTYLLTTETGLQKDHALWDHTAQNLLRMGLAFLVLVALVWFLVEDWLSRKRTRERASRASTWEGRRRLNTQTLRAKRSGSGATNFSLLKQAGDVEENPGPSRGHMTEYKPTVRLATRDDVPRAVRTLAAAFADYPATRHTVDPDRHIERVTELQELFLTRVGLDIGKVWVADDGAAVAVWTTPESVEAGAVFAEIGPRMAELSGSRLAAQQQMEGLLAPHRPKEPAWFLATVGVSPDHQGKGLGSAVVLPGVEAAERAGVPAFLETSAPRNLPFYERLGFTVTADVEVPEGPRTWCMTRKPGA

SEQ ID NO: 22688 - protein, 1076 aa, synthetic construct
MALPVTALLLPLALLLHAARPDIQMTQSPSSLSASVGDRVTITCRASQSIRNYLNWYQQKPGKAPELLIHAASSLQSGVPSRFSGSGSGTDFTLTISSLQPEDFASYYCQQSYSAPPITFGQGTRLEIKLEDLKNVFPPEVAVFEPSEAEISHTQKATLVCLATGFYPDHVELSWWVNGKEVHSGVSTDPQPLKEQPALNDSRYCLSSRLRVSATFWQNPRNHFRCQVQFYGLSENDEWTQDRAKPVTQIVSAEAWGRADCGSQSFGLLDPKLCYLLDGILFIYGVILTALFLRVKFSRSADAPAYQQGQNQLYNELNLGRREEYDVLDKRRGRDPEMGGKPQRRKNPQEGLYNELQKDKMAEAYSEIGMKGERRRGKGHDGLYQGLSTATKDTYDALHMQALPPRRAKRSGSGATNFSLLKQAGDVEENPGPTSMDWIWRILFLVGAATGAHSFEQVQLQQSGPGLVKPSQTLSLTCAISGDSVSSNRAAWNWIRQSPSRGLQWLGRTYYRSKWYNDYAVSLRSRITINPVTSKNQVALHMNSVTPEDTAVYYCARAGIVVVPGPETFYYYDHGLDVWGQGTTVTVSSTRIQNPDPAVYQLRDSKSSDKSVCLFTDFDSQTNVSQSKDSDVYITDKTVLDMRSMDFKSNSAVAWSNKSDFACANAFNNSIIPEDTFFPSPESSCGTKSVRFYLVVSPASASTQTSWTPRDLVSSQTQTQSCVPPTAGARQAPESPSTIPVPSQPQNSTLRPGPAAPIALVPVFCGLLVAKSLVLSALLVWWGDIWWKTMMELRSLDTQKATCHLQQVTDLPWTSVSSPVEREILYHTVARTKISDDDDEHTLRAKRSGSGVKQTLNFDLLKLAGDVESNPGPSRGHMTEYKPTVRLATRDDVPRAVRTLAAAFADYPATRHTVDPDRHIERVTELQELFLTRVGLDIGKVWVADDGAAVAVWTTPESVEAGAVFAEIGPRMAELSGSRLAAQQQMEGLLAPHRPKEPAWFLATVGVSPDHQGKGLGSAVVLPGVEAAERAGVPAFLETSAPRNLPFYERLGFTVTADVEVPEGPRTWCMTRKPGA

SEQ ID NO: 22689 - protein, 996 aa, synthetic construct
MALPVTALLLPLALLLHAARPDIQMTQSPSSLSASVGDRVTITCRASQSIRNYLNWYQQKPGKAPELLIHAASSLQSGVPSRFSGSGSGTDFTLTISSLQPEDFASYYCQQSYSAPPITFGQGTRLEIKLEDLKNVFPPEVAVFEPSEAEISHTQKATLVCLATGFYPDHVELSWWVNGKEVHSGVSTDPQPLKEQPALNDSRYCLSSRLRVSATFWQNPRNHFRCQVQFYGLSENDEWTQDRAKPVTQIVSAEAWGRADCGSQSFGLLDPKLCYLLDGILFIYGVILTALFLRVKFSRSADAPAYQQGQNQLYNELNLGRREEYDVLDKRRGRDPEMGGKPQRRKNPQEGLYNELQKDKMAEAYSEIGMKGERRRGKGHDGLYQGLSTATKDTYDALHMQALPPRRAKRSGSGATNFSLLKQAGDVEENPGPTSMDWIWRILFLVGAATGAHSFEQVQLQQSGPGLVKPSQTLSLTCAISGDSVSSNRAAWNWIRQSPSRGLQWLGRTYYRSKWYNDYAVSLRSRITINPVTSKNQVALHMNSVTPEDTAVYYCARAGIVVVPGPETFYYYDHGLDVWGQGTTVTVSSTRIQNPDPAVYQLRDSKSSDKSVCLFTDFDSQTNVSQSKDSDVYITDKTVLDMRSMDFKSNSAVAWSNKSDFACANAFNNSIIPEDTFFPSPESSCGTVVEKEHPQLGAGTVLLLRAGFYAVSFLSVAVGSTVYYQGKCLTWKGPRRQLPAVVPAPLPPPCGSSAHLLPPVPGGRAKRSGSGVKQTLNFDLLKLAGDVESNPGPSRGHMTEYKPTVRLATRDDVPRAVRTLAAAFADYPATRHTVDPDRHIERVTELQELFLTRVGLDIGKVWVADDGAAVAVWTTPESVEAGAVFAEIGPRMAELSGSRLAAQQQMEGLLAPHRPKEPAWFLATVGVSPDHQGKGLGSAVVLPGVEAAERAGVPAFLETSAPRNLPFYERLGFTVTADVEVPEGPRTWCMTRKPGA

SEQ ID NO: 22690 - protein, 967 aa, synthetic construct
MALPVTALLLPLALLLHAARPDIQMTQSPSSLSASVGDRVTITCRASQSIRNYLNWYQQKPGKAPELLIHAASSLQSGVPSRFSGSGSGTDFTLTISSLQPEDFASYYCQQSYSAPPITFGQGTRLEIKLEGQPKANPTVTLFPPSSEELQANKATLVCLISDFYPGAVTVAWKADGSPVKAGVETTKPSKQSNNKYAASSYLSLTPEQWKSHRSYSCQVTHEGSTVEKTVAPTECSGSQSFGLLDPKLCYLLDGILFIYGVILTALFLRVKFSRSADAPAYQQGQNQLYNELNLGRREEYDVLDKRRGRDPEMGGKPQRRKNPQEGLYNELQKDKMAEAYSEIGMKGERRRGKGHDGLYQGLSTATKDTYDALHMQALPPRRAKRSGSGATNFSLLKQAGDVEENPGPTSMDWIWRILFLVGAATGAHSFEQVQLQQSGPGLVKPSQTLSLTCAISGDSVSSNRAAWNWIRQSPSRGLQWLGRTYYRSKWYNDYAVSLRSRITINPVTSKNQVALHMNSVTPEDTAVYYCARAGIVVVPGPETFYYYDHGLDVWGQGTTVTVSSTRASTKGPSVFPLAPSSKSTSGGTAALGCLVKDYFPEPVTVSWNSGALTSGVHTFPAVLQSSGLYSLSSVVTVPSSSLGTQTYICNVNHKPSNTKVDKRVEPKSCGTITQGLAVSTISSFFPPGYQVSFCLVMVLLFAVDTGLYFSVKTNIRSSTRDWKDHKFKWRKDPQDKRAKRSGSGATNFSLLKQAGDVEENPGPSRGHMTEYKPTVRLATRDDVPRAVRTLAAAFADYPATRHTVDPDRHIERVTELQELFLTRVGLDIGKVWVADDGAAVAVWTTPESVEAGAVFAEIGPRMAELSGSRLAAQQQMEGLLAPHRPKEPAWFLATVGVSPDHQGKGLGSAVVLPGVEAAERAGVPAFLETSAPRNLPFYERLGFTVTADVEVPEGPRTWCMTRKPGA

SEQ ID NO: 22691 - protein, 982 aa, synthetic construct
MALPVTALLLPLALLLHAARPDIQMTQSPSSLSASVGDRVTITCRASQSIRNYLNWYQQKPGKAPELLIHAASSLQSGVPSRFSGSGSGTDFTLTISSLQPEDFASYYCQQSYSAPPITFGQGTRLEIKLEDLKNVFPPEVAVFEPSEAEISHTQKATLVCLATGFYPDHVELSWWVNGKEVHSGVSTDPQPLKEQPALNDSRYCLSSRLRVSATFWQNPRNHFRCQVQFYGLSENDEWTQDRAKPVTQIVSAEAWGRADCGSQSFGLLDPKLCYLLDGILFIYGVILTALFLRVKFSRSADAPAYQQGQNQLYNELNLGRREEYDVLDKRRGRDPEMGGKPQRRKNPQEGLYNELQKDKMAEAYSEIGMKGERRRGKGHDGLYQGLSTATKDTYDALHMQALPPRRAKRSGSGATNFSLLKQAGDVEENPGPTSMDWIWRILFLVGAATGAHSFEQVQLQQSGPGLVKPSQTLSLTCAISGDSVSSNRAAWNWIRQSPSRGLQWLGRTYYRSKWYNDYAVSLRSRITINPVTSKNQVALHMNSVTPEDTAVYYCARAGIVVVPGPETFYYYDHGLDVWGQGTTVTVSSTRIQNPDPAVYQLRDSKSSDKSVCLFTDFDSQTNVSQSKDSDVYITDKTVLDMRSMDFKSNSAVAWSNKSDFACANAFNNSIIPEDTFFPSPESSCGTITQGLAVSTISSFFPPGYQVSFCLVMVLLFAVDTGLYFSVKTNIRSSTRDWKDHKFKWRKDPQDKRAKRSGSGATNFSLLKQAGDVEENPGPSRGHMTEYKPTVRLATRDDVPRAVRTLAAAFADYPATRHTVDPDRHIERVTELQELFLTRVGLDIGKVWVADDGAAVAVWTTPESVEAGAVFAEIGPRMAELSGSRLAAQQQMEGLLAPHRPKEPAWFLATVGVSPDHQGKGLGSAVVLPGVEAAERAGVPAFLETSAPRNLPFYERLGFTVTADVEVPEGPRTWCMTRKPGA

SEQ ID NO: 22692 - protein, 665 aa, synthetic construct
MALPVTALLLPLALLLHAARPDIQMTQSPSSLSASVGDRVTITCRASQSIRNYLNWYQQKPGKAPELLIHAASSLQSGVPSRFSGSGSGTDFTLTISSLQPEDFASYYCQQSYSAPPITFGQGTRLEIKLEGQPKANPTVTLFPPSSEELQANKATLVCLISDFYPGAVTVAWKADGSPVKAGVETTKPSKQSNNKYAASSYLSLTPEQWKSHRSYSCQVTHEGSTVEKTVAPTECSGSLGEPQLCYILDAILFLYGIVLTLLYCRLKIQVRKAAITSYEKSDGVYTGLSTRNQETYETLKHEKPPQRAKRSGSGATNFSLLKQAGDVEENPGPTSMDWIWRILFLVGAATGAHSFEQVQLQQSGPGLVKPSQTLSLTCAISGDSVSSNRAAWNWIRQSPSRGLQWLGRTYYRSKWYNDYAVSLRSRITINPVTSKNQVALHMNSVTPEDTAVYYCARAGIVVVPGPETFYYYDHGLDVWGQGTTVTVSSTRASTKGPSVFPLAPSSKSTSGGTAALGCLVKDYFPEPVTVSWNSGALTSGVHTFPAVLQSSGLYSLSSVVTVPSSSLGTQTYICNVNHKPSNTKVDKRVEPKSCGTLGEPQLCYILDAILFLYGIVLTLLYCRLKIQVRKAAITSYEKSDGVYTGLSTRNQETYETLKHEKPPQ

SEQ ID NO: 22693 - protein, 1042 aa, synthetic construct
MALPVTALLLPLALLLHAARPDIQMTQSPSSLSASVGDRVTITCRASQSIRNYLNWYQQKPGKAPELLIHAASSLQSGVPSRFSGSGSGTDFTLTISSLQPEDFASYYCQQSYSAPPITFGQGTRLEIKGQPKANPTVTLFPPSSEELQANKATLVCLISDFYPGAVTVAWKADGSPVKAGVETTKPSKQSNNKYAASSYLSLTPEQWKSHRSYSCQVTHEGSTVEKTVAPTECSGSQSFGLLDPKLCYLLDGILFIYGVILTALFLRVKFSRSADAPAYQQGQNQLYNELNLGRREEYDVLDKRRGRDPEMGGKPRRKNPQEGLYNELQKDKMAEAYSEIGMKGERRRGKGHDGLYQGLSTATKDTYDALHMQALPPRRAKRSGSGATNFSLLKQAGDVEENPGPTSMDWIWRILFLVGAATGAHSFEQVQLQQSGPGLVKPSQTLSLTCAISGDSVSSNRAAWNWIRQSPSRGLQWLGRTYYRSKWYNDYAVSLRSRITINPVTSKNQVALHMNSVTPEDTAVYYCARAGIVVVPGPETFYYYDHGLDVWGQGTTVTVSSASTKGPSVFPLAPSSKSTSGGTAALGCLVKDYFPEPVTVSWNSGALTSGVHTFPAVLQSSGLYSLSSVVTVPSSSLGTQTYICNVNHKPSNTKVDKRVEPKSCGTQSFGLLDPKLCYLLDGILFIYGVILTALFLRVKFSRSADAPAYQQGQNQLYNELNLGRREEYDVLDKRRGRDPEMGGKPRRKNPQEGLYNELQKDKMAEAYSEIGMKGERRRGKGHDGLYQGLSTATKDTYDALHMQALPPRRAKRSGSGVKQTLNFDLLKLAGDVESNPGPSRGHMTEYKPTVRLATRDDVPRAVRTLAAAFADYPATRHTVDPDRHIERVTELQELFLTRVGLDIGKVWVADDGAAVAVWTTPESVEAGAVFAEIGPRMAELSGSRLAAQQQMEGLLAPHRPKEPAWFLATVGVSPDHQGKGLGSAVVLPGVEAAERAGVPAFLETSAPRNLPFYERLGFTVTADVEVPEGPRTWCMTRKPGA

SEQ ID NO: 22694 - protein, 828 aa, synthetic construct
MALPVTALLLPLALLLHAARPDIQMTQSPSSLSASVGDRVTITCRASQSIRNYLNWYQQKPGKAPELLIHAASSLQSGVPSRFSGSGSGTDFTLTISSLQPEDFASYYCQQSYSAPPITFGQGTRLEIKLEDLKNVFPPEVAVFEPSEAEISHTQKATLVCLATGFYPDHVELSWWVNGKEVHSGVSTDPQPLKEQPALNDSRYCLSSRLRVSATFWQNPRNHFRCQVQFYGLSENDEWTQDRAKPVTQIVSAEAWGRADCGSQSFGLLDPKLCYLLDGILFIYGVILTALFLRVKFSRSADAPAYQQGQNQLYNELNLGRREEYDVLDKRRGRDPEMGGKPRRKNPQEGLYNELQKDKMAEAYSEIGMKGERRRGKGHDGLYQGLSTATKDTYDALHMQALPPRRAKRSGSGATNFSLLKQAGDVEENPGPTSMDWIWRILFLVGAATGAHSFEQVQLQQSGPGLVKPSQTLSLTCAISGDSVSSNRAAWNWIRQSPSRGLQWLGRTYYRSKWYNDYAVSLRSRITINPVTSKNQVALHMNSVTPEDTAVYYCARAGIVVVPGPETFYYYDHGLDVWGQGTTVTVSSTRIQNPDPAVYQLRDSKSSDKSVCLFTDFDSQTNVSQSKDSDVYITDKTVLDMRSMDFKSNSAVAWSNKSDFACANAFNNSIIPEDTFFPSPESSCGTQSFGLLDPKLCYLLDGILFIYGVILTALFLRVKFSRSADAPAYQQGQNQLYNELNLGRREEYDVLDKRRGRDPEMGGKPRRKNPQEGLYNELQKDKMAEAYSEIGMKGERRRGKGHDGLYQGLSTATKDTYDALHMQALPPR

SEQ ID NO: 22695 - DNA, 1470 bp, synthetic construct
  source 1..1470: mol_type = other DNA
atggccttaccagtgaccgccttgctcctgccgctggccttgctgctccacgccgccaggccggaggttcagctgctggaatctggcggaggaatggttcagcctggcggctctctgagactgtcttgtgccgccagcggcttcacctttagcagctacgccatgagctgggtccgacaggctcctggcaaaggactggaatgggtgtccgccatctctggctctggcggcagaaccttttacgccgatagcgtggaaggccggttcaccatcagccgggacaacagcaagaacaccctgtacctccagatgaacagcctgagagccgaggacaccgccgtgtactattgcgccaagcacgactacagcaactacccctacttcgactactggggccagggcacactggtcacagtttctagcggcggaggcggaagtggaggcggaggatctggcggcggaggctctgaaatcgtgctgacacagagccccggcacactgtctcttagccctggcgaaagagccacactgagctgtagagccagccagagcatcagaagcagctacctggcctggtatcagcagaagcctggacaggcaccccggctgttgatctacggtgcttctagcagagccacaggcatccccgatagattttctggcagcggctccggcaccgacttcaccctgacaatcagcagactggaacccgaggactttgccgtgtattactgccagcagtacggcgacctgcctttcacatttggccctggcaccaagctggaaatcaagacgcgtaccacgacgccagcgccgcgaccaccaacaccggcgcccaccatcgcgtcgcagcccctgtccctgcgcccagaggcgtgccggccagcggcggggggcgcagtgcacacgagggggctggacttcgcctgtgacatctacatctgggcgcccttggccgggacttgtggggtccttctcctgtcactggttatcaccctttactgcaaacggggcagaaagaaactcctgtatatattcaaacaaccatttatgagaccagtacaaactactcaagaggaagatggctgtagctgccgatttccagaagaagaagaaggaggatgtgaactgagagtgaagttcagcaggagcgcagacgcccccgcgtaccagcagggccagaaccagctctataacgagctgaatctaggacgaagagaggagtacgatgttttggacaagagacgtggccgggaccctgagatggggggaaagccgagaaggaagaaccctcaggaaggcctgtacaatgaactgcagaaagataagatggcggaggcctacagtgagattgggatgaaaggcgagcgccggaggggcaaggggcacgatggcctttaccagggtctcagtacagccaccaaggacacctacgacgcccttcacatgcaggccctgccccctcgctaa

SEQ ID NO: 22696 - DNA, 1470 bp, synthetic construct
  source 1..1470: mol_type = other DNA
atggccttaccagtgaccgccttgctcctgccgctggccttgctgctccacgccgccaggccggaggttcagctgcttgagtctggcggaggactggttcaacctggcggaagcctgagactgtcttgtgccgccagcggcttcacctttagcagctacgccatgagctgggtccgacaggctcctggcaaaggactggaatgggtgtccgtgatctctggctctggcggcagacccaattacgccgattctgtgaagggcagattcaccatcagccgggacaacagcaagaacaccctgtacctccagatgaacagcctgcgcgacgaggataccgccgtgtactattgtgccaaggtggactacagcaactacctgttcttcgactactggggccagggcaccctggtcacagtttctagcggcggaggcggaagtggaggcggaggatctggcggcggaggctctgaaatcgtgctgacacagagccccggcacactgtcactttctccaggcgaaggcgctaccctgtcttgtagagctggacagtctgtgcggagcagctacctcggatggtatcagcagaagcctggacaggcccctcggctgttgatctacggtgcttctagcagagccacaggcatccccgatagattttctggcagcggctccggcaccgacttcaccctgacaatcagcagactggaacccgaggacttcgccgtgtattactgccagcagtacggctacagccctcctacatttggcggaggcaccaagctggaaatcaagacgcgtaccacgacgccagcgccgcgaccaccaacaccggcgcccaccatcgcgtcgcagcccctgtccctgcgcccagaggcgtgccggccagcggcggggggcgcagtgcacacgagggggctggacttcgcctgtgacatctacatctgggcgcccttggccgggacttgtggggtccttctcctgtcactggttatcaccctttactgcaaacggggcagaaagaaactcctgtatatattcaaacaaccatttatgagaccagtacaaactactcaagaggaagatggctgtagctgccgatttccagaagaagaagaaggaggatgtgaactgagagtgaagttcagcaggagcgcagacgcccccgcgtaccagcagggccagaaccagctctataacgagctgaatctaggacgaagagaggagtacgatgttttggacaagagacgtggccgggaccctgagatggggggaaagccgagaaggaagaaccctcaggaaggcctgtacaatgaactgcagaaagataagatggcggaggcctacagtgagattgggatgaaaggcgagcgccggaggggcaaggggcacgatggcctttaccagggtctcagtacagccaccaaggacacctacgacgcccttcacatgcaggccctgccccctcgctaa

SEQ ID NO: 22697 - DNA, 1494 bp, synthetic construct
  source 1..1494: mol_type = other DNA
atggccttaccagtgaccgccttgctcctgccgctggccttgctgctccacgccgccaggccggaagttcagctggttcagagcggagccgaagtgaagaagcctggcgagagcctgaagattagctgcaaaggcagcggctacggcttcaccagctattggatcggctgggtccgacagatgcctggcaaaggactggaatggatgggcatcattcaccccgacgacagcgacaccaagtacagccctagcttccagggccaagtgaccatcagcgccgacaagagcatcagcacagcctacctccagtggtcctctctgaaggccagcgataccgccatgtactactgcgccagcagctacctgagaggactgtggggcggctacttcgatttttggggccagggcacactggtcaccgttagttctggcggaggcggaagtggaggcggaggatctggcggcggaggctctgaactgcaaagcgtgctgacacagcctcctagcgcctctggaacacctggacagagagtgacaatcagctgctccggcagctccagcaacatcggcagcaactacgtgaactggtatcagcagctgcctggcacagcccctaaactgctgatctacggcgactaccagaggccaagcggcgtgccagatagattcagcggcagcaagtctggcacaagcgccagcctggctatctctggactgagaagcgaggacgaggccgactactactgtgccaccagagatgatagcctgagcggcagcgtggtgtttggcacaggcacaaagctgacagtgctgggcacgcgtaccacgacgccagcgccgcgaccaccaacaccggcgcccaccatcgcgtcgcagcccctgtccctgcgcccagaggcgtgccggccagcggcggggggcgcagtgcacacgagggggctggacttcgcctgtgacatctacatctgggcgcccttggccgggacttgtggggtccttctcctgtcactggttatcaccctttactgcaaacggggcagaaagaaactcctgtatatattcaaacaaccatttatgagaccagtacaaactactcaagaggaagatggctgtagctgccgatttccagaagaagaagaaggaggatgtgaactgagagtgaagttcagcaggagcgcagacgcccccgcgtaccagcagggccagaaccagctctataacgagctgaatctaggacgaagagaggagtacgatgttttggacaagagacgtggccgggaccctgagatggggggaaagccgagaaggaagaaccctcaggaaggcctgtacaatgaactgcagaaagataagatggcggaggcctacagtgagattgggatgaaaggcgagcgccggaggggcaaggggcacgatggcctttaccagggtctcagtacagccaccaaggacacctacgacgcccttcacatgcaggccctgccccctcgctga

SEQ ID NO: 22698 - DNA, 1887 bp, synthetic construct; identical to SEQ ID NO: 1073
  source 1..1887: mol_type = other DNA

SEQ ID NO: 22699 - DNA, 2475 bp, synthetic construct
  source 1..2475: mol_type = other DNA
atggccttaccagtgaccgccttgctcctgccgctggccttgctgctccacgccgccaggccggaagttcagctggttcagagcggagccgaagtgaagaagcctggcgagagcctgaagattagctgcaaaggcagcggctacggcttcaccagctattggatcggctgggtccgacagatgcctggcaaaggactggaatggatgggcatcattcaccccgacgacagcgacaccaagtacagccctagcttccagggccaagtgaccatcagcgccgacaagagcatcagcacagcctacctccagtggtcctctctgaaggccagcgataccgccatgtactactgcgccagcagctacctgagaggactgtggggcggctacttcgatttttggggccagggcacactggtcaccgttagttctctcgaggacctgaagaacgtgttcccacctgaggtggccgtgttcgagcctagcgaggccgagatcagccacacccagaaagccaccctcgtgtgcctggctaccggcttctaccccgaccatgtggaactgtcttggtgggtcaacggcaaagaggtgcacagcggcgtgtctaccgacccccagccactgaaagaacagcccgccctgaacgacagccggtactgcctgagcagcagactgagagtgtccgccaccttctggcagaacccccggaaccacttcagatgccaggtgcagttctacggcctgagcgagaacgacgagtggacccaggacagagccaagcccgtgacccagatcgtgtctgccgaagcctggggcagagccgattgcggatcccagagcttcggcctgctggaccccaagctgtgctacctgctggatggcatcctgttcatctacggcgtgatcctgaccgccctgttcctgagagtgaagttcagcagaagcgccgacgcccctgcctaccagcagggacagaaccaactgtacaacgagctgaacctgggcagacgggaagagtacgacgtgctggacaagcggagaggcagggaccctgagatgggcggaaagccccagcggagaaagaacccccaggaaggactgtataacgaactccagaaagacaagatggccgaagcctacagcgagatcggcatgaagggcgagcggagaagaggcaagggccacgatggcctgtaccagggcctgagcaccgccaccaaggacacctatgacgccctgcacatgcaggccctgcctccaagaagggccaagcgatctggatctggagcaacaaacttctcactactcaaacaagcaggtgacgtggaggagaatcccgggcctactagtatggactggatttggcgcatccttttccttgtcggcgctgctaccggcgcgcattccttcgaactgcaaagcgtgctgacacagcctcctagcgcctctggaacacctggacagagagtgacaatcagctgctccggcagctccagcaacatcggcagcaactacgtgaactggtatcagcagctgcctggcacagcccctaaactgctgatctacggcgactaccagaggccaagcggcgtgccagatagattcagcggcagcaagtctggcacaagcgccagcctggctatctctggactgagaagcgaggacgaggccgactactactgtgccaccagagatgatagcctgagcggcagcgtggtgtttggcacaggcacaaagctgacagtgctgggcacgcgtatccagaaccctgatcctgccgtgtaccagctgcgggatagcaagagcagcgacaagagcgtgtgtctgttcaccgacttcgacagccagaccaacgtgtcccagagcaaggactccgacgtgtacatcaccgataagaccgtgctggacatgcggagcatggacttcaagagcaactccgccgtggcctggtccaacaagtccgatttcgcctgcgccaacgccttcaacaacagcattatccccgaggacacattcttcccaagccccgagagcagctgcggtacccagagttttgggttgttggaccctaaattgtgctatctgttggacggaatcctgttcatttacggagtgatcctgaccgcattgttcctgcgggttaagttttccagatccgcagacgcacccgcttaccaacaagggcagaaccaactctacaatgaacttaatttggggcggagggaagagtacgacgttctggacaaaaggaggggacgagatcccgagatgggcggaaagcctcagcgaaggaagaatccgcaagaggggctttataacgaactccagaaagataaaatggcagaagcctatagtgagattgggatgaagggagaaaggaggaggggtaaaggtcacgatgggttgtaccaaggattgagcacagccactaaagatacctatgatgcgctccacatgcaggccctgccgccaagataa

SEQ ID NO: 22700 - DNA, 3423 bp, synthetic construct
  source 1..3423: mol_type = other DNA
atggccttaccagtgaccgccttgctcctgccgctggccttgctgctccacgccgccaggccggcatgcgaagtgcagctgcttgaaagtggcggcggactgattcagcctggcggatctctgagactgagctgtgccgccagcggcttcaccttttctagccacgccatgacctgggtccgacaggcacctggaaaagggcttgaatgggtgtccgccatcagcggctctggcgattacacacactacgccgacagcgtgaagggcagattcaccatcagcagagacaacagcaagaacaccgtgtacctccagatgaacagcctgagagccgaggacagcgccgtgtattattgcgccaaggatgaggatggcggcagcctgcttggacacagaggacaaggcaccctggtcaccgtttcttccggtaccggcggaggcggatctggcggcggaggtagcggtggcggaggatctgaattcgacatccagatgacacagagccctagcagcctgtctgccagcgtgggagacagagtgaccatcacatgcaaggccagcgaccacatcaacaactggctggcctggtatcagcagaagcctggacaggcccctaagctgctgatctacggcgctaccacactggaaacaggcgtgcccagcagattttctggcagcggctctggcaccgactacaccctgacaatatccagcctccagcctgaggacttcgccacctactactgtcagcagagctggaacaccccttggacattcggccagggcaccaagctggaaatcaagagactcgaggacctgaagaacgtgttcccacctgaggtggccgtgttcgagcctagcgaggccgagatcagccacacccagaaagccaccctcgtgtgcctggctaccggcttctaccccgaccatgtggaactgtcttggtgggtcaacggcaaagaggtgcacagcggcgtgtgtaccgacccccagccactgaaagaacagcccgccctgaacgacagccggtactgcctgagcagcagactgagagtgtccgccaccttctggcagaacccccggaaccacttcagatgccaggtgcagttctacggcctgagcgagaacgacgagtggacccaggacagagccaagcccgtgacccagatcgtgtctgccgaagcctggggcagagccgattgcggctttaccagcgagagctaccagcagggcgtgctgagcgccaccatcctgtacgagatcctgctgggcaaggccaccctgtacgccgtgctggtgtctgccctggtgctgatggctatggtcaagcggaaggacagccggggaagggccaagcgatctggatctggagcaacaaacttctcactactcaaacaagcaggtgacgtggaggagaatcccgggcctactagtaccatggactggatttggcgcatccttttccttgtcggcgctgctaccggcgcccattccgggccccaagttcagctggtggaaagcggtggtggcgttgtgcaacctggtggaagtctgaggcttagctgcgccgccagcttttctggatacggcgtgtcaacaatggcatggtttaggcaggctccaggcaagggccttgaaggcgtggccgctatcacagtcggctccggcaatacctactacgccgatagcgtgaccggcaggttcacaatctccagagacaacagcaagaatacggtgtacctgcaaatgaacagcctccgcgccgaggatacagccatgtattactgtgccgtgggctacctgtctggcggctcttgggatgtgcccggcagatacaattactggggacagggaaccctggttaccgtgtctagtggatccggcggcggaggatctggcggaggcggatctgggggcggaggctctttcgaacaagttcagcttcaacagcctggcgctgagctggtcaaacctggcgcttctgtgaagatgagctgcaaagccagcggctacgccttcagcagctactggatcaactggatgaagcagaaacccggccagggactcgaatggatcggccaaatctatcccggcgacggcgacaccaactacaacggcaagttcaagggcagagccacactgaccgccgatacctctagcagcacagcctacatgcagctgagcagcctgaccagcgaagatagcgccgtgtacttctgtgcccggtccatcacaacagtcgtgggctgcgctatggactattggggccagggaacaagcgtgaccgtgtctagtacgcgtatccagaaccctgatcctgccgtgtaccagctgcgggatagcaagagcagcgacaagagcgtgtgtctgttcaccgacttcgacagccagaccaacgtgtcccagagcaaggactccgacgtgtacatcaccgataagtgcgtgctggacatgcggagcatggacttcaagagcaactccgccgtggcctggtccaacaagtccgatttcgcctgcgccaacgccttcaacaacagcattatccccgaggacacattcttcccaagccccgagagcagctgcgacgtgaagctggtggaaaagagcttcgagacagacaccaacctgaacttccagaacctgagcgtgatcggcttcagaatcctgctgctgaaagtggccggctttaacctgctgatgaccctgcggctgtggtccagccgcgccaagagaagcggatctggcgtgaagcagaccctgaatttcgacctgctgaagctggctggcgacgtggaatccaacccaggcccttctagaggccatatgaccgagtacaagcccacggtgcgcctcgccacccgcgacgacgtccccagggccgtacgcaccctcgccgccgcgttcgccgactaccccgccacgcgccacaccgtcgatccggaccgccacatcgagcgggtcaccgagctgcaagaactcttcctcacgcgcgtcgggctcgacatcggcaaggtgtgggtcgcggacgacggcgccgcggtggcggtctggaccacgccggagagcgtcgaagcgggggcggtgttcgccgagatcggcccgcgcatggccgagttgagcggttcccggctggccgcgcagcaacagatggaaggcctcctggcgccgcaccggcccaaggagcccgcgtggttcctggccaccgtcggcgtctcgcccgaccaccagggcaagggtctgggcagcgccgtcgtgctccccggagtggaggcggccgagcgcgccggggtgcccgccttcctggagacctccgcgccccgcaacctccccttctacgagcggctcggcttcaccgtcaccgccgacgtcgaggtgcccgaaggaccgcgcacctggtgcatgacccgcaagcccggtgcctga

SEQ ID NO: 22701 - DNA, 3423 bp, synthetic construct
  source 1..3423: mol_type = other DNA
atggccttaccagtgaccgccttgctcctgccgctggccttgctgctccacgccgccaggccggcatgccaggtgcagctggttgaatctggtggcggagttgttcagcctggcggctctctgagactgtcttgtgccgccagctttagcggctacggcgtgtcaacaatggcctggtttagacaggcccctggcaaaggactggaaggcgtggccgctatcacagtcggcagcggcaatacctactacgccgactctgtgaagggcagattcaccatcagccgggacaacagcaagaacaccgtgtacctccagatgaacagcctgagagccgaggacaccgccatgtactattgtgccgttggctggctgagcggcggatcttggcatgtgcctggcagatacaactactggggccagggcacactggtcacagtttctagcggtaccggcggaggcggatctggcggcggaggtagcggtggcggaggatctgaattcgacatccagatgacacagagccctagcagcctgtctgccagcgtgggagacagagtgaccatcacatgcaaggccagcgaccacatcaacaactggctggcctggtatcagcagaagcctggacaggcccctaagctgctgatctacggcgctaccacactggaaacaggcgtgcccagcagattttctggcagcggctctggcaccgactacaccctgacaatatccagcctccagcctgaggacttcgccacctactactgtcagcagagctggaacaccccttggacattcggccagggcaccaagctggaaatcaagagactcgaggacctgaagaacgtgttcccacctgaggtggccgtgttcgagcctagcgaggccgagatcagccacacccagaaagccaccctcgtgtgcctggctaccggcttctaccccgaccatgtggaactgtcttggtgggtcaacggcaaagaggtgcacagcggcgtgtgtaccgacccccagccactgaaagaacagcccgccctgaacgacagccggtactgcctgagcagcagactgagagtgtccgccaccttctggcagaacccccggaaccacttcagatgccaggtgcagttctacggcctgagcgagaacgacgagtggacccaggacagagccaagcccgtgacccagatcgtgtctgccgaagcctggggcagagccgattgcggctttaccagcgagagctaccagcagggcgtgctgagcgccaccatcctgtacgagatcctgctgggcaaggccaccctgtacgccgtgctggtgtctgccctggtgctgatggctatggtcaagcggaaggacagccggggaagggccaagcgatctggatctggagcaacaaacttctcactactcaaacaagcaggtgacgtggaggagaatcccgggcctactagtgccaccatggactggatttggcgcatccttttccttgtcggcgctgctaccggcgcccattccgggcccgaagtgcagctggttgaatctggcggaggactggttcaggctggcggatctctgagactgtcttgtgccgccagcggcagaacctttagcatgggctggtttagacaggcccctggcaaagagagagagttcgtcgccgccatcacatactctggcggcagcccttactacgccgactctgtgaagggcagattcaccatcagccgggacaacgccaagaacaccgtgtacctccagatgaacagcctgaagcctgaggacaccgccgtgtactactgcgccgccaatccaacatacggcagcgactggaacgccgagaattggggccagggaacccaagtgacagtgtctagcggatccggcggcggaggatctggcggaggcggatctgggggcggaggctctttcgaacaagttcagcttcaacagcctggcgctgagctggtcaaacctggcgcttctgtgaagatgagctgcaaagccagcggctacgccttcagcagctactggatcaactggatgaagcagaaacccggccagggactcgaatggatcggccaaatctatcccggcgacggcgacaccaactacaacggcaagttcaagggcagagccacactgaccgccgatacctctagcagcacagcctacatgcagctgagcagcctgaccagcgaagatagcgccgtgtacttctgtgcccggtccatcacaacagtcgtgggctgcgctatggactattggggccagggaacaagcgtgaccgtgtctagtacgcgtatccagaaccctgatcctgccgtgtaccagctgcgggatagcaagagcagcgacaagagcgtgtgtctgttcaccgacttcgacagccagaccaacgtgtcccagagcaaggactccgacgtgtacatcaccgataagtgcgtgctggacatgcggagcatggacttcaagagcaactccgccgtggcctggtccaacaagtccgatttcgcctgcgccaacgccttcaacaacagcattatccccgaggacacattcttcccaagccccgagagcagctgcgacgtgaagctggtggaaaagagcttcgagacagacaccaacctgaacttccagaacctgagcgtgatcggcttcagaatcctgctgctgaaagtggccggctttaacctgctgatgaccctgcggctgtggtccagccgcgccaagagaagcggatctggcgtgaagcagaccctgaatttcgacctgctgaagctggctggcgacgtggaatccaacccaggcccttctagaggccatatgaccgagtacaagcccacggtgcgcctcgccacccgcgacgacgtccccagggccgtacgcaccctcgccgccgcgttcgccgactaccccgccacgcgccacaccgtcgatccggaccgccacatcgagcgggtcaccgagctgcaagaactcttcctcacgcgcgtcgggctcgacatcggcaaggtgtgggtcgcggacgacggcgccgcggtggcggtctggaccacgccggagagcgtcgaagcgggggcggtgttcgccgagatcggcccgcgcatggccgagttgagcggttcccggctggccgcgcagcaacagatggaaggcctcctggcgccgcaccggcccaaggagcccgcgtggttcctggccaccgtcggcgtctcgcccgaccaccagggcaagggtctgggcagcgccgtcgtgctccccggagtggaggcggccgagcgcgccggggtgcccgccttcctggagacctccgcgccccgcaacctccccttctacgagcggctcggcttcaccgtcaccgccgacgtcgaggtgcccgaaggaccgcgcacctggtgcatgacccgcaagcccggtgcctga

SEQ ID NO: 22702 - DNA, 2238 bp, synthetic construct
  source 1..2238: mol_type = other DNA
atggccttaccagtgaccgccttgctcctgccgctggccttgctgctccacgccgccaggccggacatccagatgacacagagccctagcagcctgtctgccagcgtgggagacagagtgaccatcacatgcaaggccagccaggatgtgggcacagccgtggattggtatcagcagaagcctggcaaggcccctaagctgctgatctactgggccagcacaagacacacaggcgtgcccagcagattttctggcagcggctctggcaccgacttcaccctgacaatatccagcctccagcctgaggacttcgccacctactactgccagcagtacaacagctaccctctgaccttcggccagggcaccaaggtggaaatcaaaagactcgaggacctgaagaacgtgttcccacctgaggtggccgtgttcgagcctagcgaggccgagatcagccacacccagaaagccaccctcgtgtgcctggctaccggcttctaccccgaccatgtggaactgtcttggtgggtcaacggcaaagaggtgcacagcggcgtgtctaccgacccccagccactgaaagaacagcccgccctgaacgacagccggtactgcctgagcagcagactgagagtgtccgccaccttctggcagaacccccggaaccacttcagatgccaggtgcagttctacggcctgagcgagaacgacgagtggacccaggacagagccaagcccgtgacccagatcgtgtctgccgaagcctggggcagagccgattgcggatcccagagcttcggcctgctggaccccaagctgtgctacctgctggatggcatcctgttcatctacggcgtgatcctgaccgccctgttcctgagagtgaagttcagcagaagcgccgacgcccctgcctaccagcagggacagaaccaactgtacaacgagctgaacctgggcagacgggaagagtacgacgtgctggacaagcggagaggcagggaccctgagatgggcggaaagccccagcggagaaagaacccccaggaaggactgtataacgaactccagaaagacaagatggccgaagcctacagcgagatcggcatgaagggcgagcggagaagaggcaagggccacgatggcctgtaccagggcctgagcaccgccaccaaggacacctatgacgccctgcacatgcaggccctgcctccaagaagggccaagcgatctggatctggagcaacaaacttctcactactcaaacaagcaggtgacgtggaggagaatcccgggcctactagtatggactggatttggcgcatccttttccttgtcggcgctgctaccggcgcgcattccttcgaagtgcagctggttgaatcaggtggcggcctggttcaacctggcggatctctgagactgagctgtgccgccagcggctacacctttaccgagtacacaatccactgggtccgacaggcccctggcaaaggacttgagtgggtcgccaacatcaaccccaacaatggcggcaccacctacaaccagaagttcgaggacagattcaccatcagccgggacaacagcaagaacaccctgtacctccagatgaactccctgagagccgaggacaccgccgtgtactattgtgccagaggctggaacttcgactactggggccagggaacactggtcaccgttagctctacgcgtgcctctacaaagggaccctccgtgtttcctctggctcccagcagcaagtctacaagcggaggaacagccgctctgggctgcctggtcaaggattactttcccgagcctgtgaccgtgtcctggaatagcggagcactgacaagcggcgtgcacacctttccagccgtgctgcaaagcagcggcctgtactctctgagcagcgtggtcacagtgcctagctctagcctgggcacccagacctacatctgcaatgtgaaccacaagcctagcaacaccaaggtggacaagagagtggaacccaagagctgtggtaccctcggagaaccacagctctgttacattctggatgctatcctgttcctctatgggatcgtcctgacactcctgtattgcagactcaaaattcaagttcgcaaagccgccattacctcttacgagaagagtgatggggtgtacacaggactgtctacccggaatcaagaaacctacgaaaccctcaaacatgagaagccacctcagtaa

SEQ ID NO: 22703 - DNA, 2919 bp, synthetic construct
  source 1..2919: mol_type = other DNA
atggccttaccagtgaccgccttgctcctgccgctggccttgctgctccacgccgccaggccggacatccagatgacacagagccctagcagcctgtctgccagcgtgggagacagagtgaccatcacatgcaaggccagccaggatgtgggcacagccgtggattggtatcagcagaagcctggcaaggcccctaagctgctgatctactgggccagcacaagacacacaggcgtgcccagcagattttctggcagcggctctggcaccgacttcaccctgacaatatccagcctccagcctgaggacttcgccacctactactgccagcagtacaacagctaccctctgaccttcggccagggcaccaaggtggaaatcaaaagactcgaggacctgaagaacgtgttcccacctgaggtggccgtgttcgagcctagcgaggccgagatcagccacacccagaaagccaccctcgtgtgcctggctaccggcttctaccccgaccatgtggaactgtcttggtgggtcaacggcaaagaggtgcacagcggcgtgtctaccgacccccagccactgaaagaacagcccgccctgaacgacagccggtactgcctgagcagcagactgagagtgtccgccaccttctggcagaacccccggaaccacttcagatgccaggtgcagttctacggcctgagcgagaacgacgagtggacccaggacagagccaagcccgtgacccagatcgtgtctgccgaagcctggggcagagccgattgcggatcccagagcttcggcctgctggaccccaagctgtgctacctgctggatggcatcctgttcatctacggcgtgatcctgaccgccctgttcctgagagtgaagttcagcagaagcgccgacgcccctgcctaccagcagggacagaaccaactgtacaacgagctgaacctgggcagacgggaagagtacgacgtgctggacaagcggagaggcagggaccctgagatgggcggaaagccccagcggagaaagaacccccaggaaggactgtataacgaactccagaaagacaagatggccgaagcctacagcgagatcggcatgaagggcgagcggagaagaggcaagggccacgatggcctgtaccagggcctgagcaccgccaccaaggacacctatgacgccctgcacatgcaggccctgcctccaagaagggccaagcgatctggatctggagcaacaaacttctcactactcaaacaagcaggtgacgtggaggagaatcccgggcctactagtatggactggatttggcgcatccttttccttgtcggcgctgctaccggcgcgcattccttcgaagtgcagctggttgaatcaggtggcggcctggttcaacctggcggatctctgagactgagctgtgccgccagcggctacacctttaccgagtacacaatccactgggtccgacaggcccctggcaaaggacttgagtgggtcgccaacatcaaccccaacaatggcggcaccacctacaaccagaagttcgaggacagattcaccatcagccgggacaacagcaagaacaccctgtacctccagatgaactccctgagagccgaggacaccgccgtgtactattgtgccagaggctggaacttcgactactggggccagggaacactggtcaccgttagctctacgcgtgcctctacaaagggaccctccgtgtttcctctggctcccagcagcaagtctacaagcggaggaacagccgctctgggctgcctggtcaaggattactttcccgagcctgtgaccgtgtcctggaatagcggagcactgacaagcggcgtgcacacctttccagccgtgctgcaaagcagcggcctgtactctctgagcagcgtggtcacagtgcctagctctagcctgggcacccagacctacatctgcaatgtgaaccacaagcctagcaacaccaaggtggacaagagagtggaacccaagagctgtggtaccatcactcaaggtttggcagtgtcaaccatctcatcattctttccacctggctaccaagtgtccttctgcctggtcatggtgctgctgttcgccgtggataccggcctgtacttcagcgtcaagaccaacatccggtccagcaccagagactggaaggaccacaagttcaagtggcggaaggaccctcaggacaagagggccaagcgatctggatctggagcaacaaacttctcactactcaaacaagcaggtgacgtggaggagaatcccgggccttctagaggccatatgaccgagtacaagcccacggtgcgcctcgccacccgcgacgacgtccccagggccgtacgcaccctcgccgccgcgttcgccgactaccccgccacgcgccacaccgtcgatccggaccgccacatcgagcgggtcaccgagctgcaagaactcttcctcacgcgcgtcgggctcgacatcggcaaggtgtgggtcgcggacgacggcgccgcggtggcggtctggaccacgccggagagcgtcgaagcgggggcggtgttcgccgagatcggcccgcgcatggccgagttgagcggttcccggctggccgcgcagcaacagatggaaggcctcctggcgccgcaccggcccaaggagcccgcgtggttcctggccaccgtcggcgtctcgcccgaccaccagggcaagggtctgggcagcgccgtcgtgctccccggagtggaggcggccgagcgcgccggggtgcccgccttcctggagacctccgcgccccgcaacctccccttctacgagcggctcggcttcaccgtcaccgccgacgtcgaggtgcccgaaggaccgcgcacctggtgcatgacccgcaagcccggtgcctga

SEQ ID NO: 22704 - DNA, 2238 bp, synthetic construct; identical to SEQ ID NO: 22702
  source 1..2238: mol_type = other DNA

SEQ ID NO: 22705 - DNA, 3117 bp, synthetic construct
  source 1..3117: mol_type = other DNA
atggccttaccagtgaccgccttgctcctgccgctggccttgctgctccacgccgccaggccggcatgcgccgatcagctgaccgaggaacagatcgccgagttcaaagaagccttcagcctgttcgacaaggacggcgacggcaccatcaccaccaaagaactgggcaccgtgatgcggagcctgggccagaatcctacagaagccgaactccaggacatgattaacgaggtggacgccgatggcaatggcacaatcgacttccccgagttcctgaccatgatggcccggaagatgaaggacaccgacagcgaggaagagatccgggaagccttccgggttttcgataaggatggcaacggctacatctctgccgccgagctgagacacgtgatgaccaatctgggcgagaagctgacagacgaagaggttgacgagatgattagagaggccgacatcgacggcgacggacaagtgaactacgaagagttcgtgcagatgatgaccgccaaaggcggcggaggctccaagagaagatggaagaaaaactttatcgccgtgtccgccgccaaccgcttcaagaagattagctctagcggagccctcgaattcgacatccagatgacacagagccctagcagcctgtctgccagcgtgggagacagagtgaccatcacatgcaaggccagcgaccacatcaacaactggctggcctggtatcagcagaagcctggacaggcccctaagctgctgatctacggcgctaccacactggaaacaggcgtgcccagcagattttctggcagcggctctggcaccgactacaccctgacaatatccagcctccagcctgaggacttcgccacctactactgtcagcagagctggaacaccccttggacattcggccagggcaccaagctggaaatcaagagactcgaggacctgaagaacgtgttcccacctgaggtggccgtgttcgagcctagcgaggccgagatcagccacacccagaaagccaccctcgtgtgcctggctaccggcttctaccccgaccatgtggaactgtcttggtgggtcaacggcaaagaggtgcacagcggcgtgtgtaccgacccccagccactgaaagaacagcccgccctgaacgacagccggtactgcctgagcagcagactgagagtgtccgccaccttctggcagaacccccggaaccacttcagatgccaggtgcagttctacggcctgagcgagaacgacgagtggacccaggacagagccaagcccgtgacccagatcgtgtctgccgaagcctggggcagagccgattgcggctttaccagcgagagctaccagcagggcgtgctgagcgccaccatcctgtacgagatcctgctgggcaaggccaccctgtacgccgtgctggtgtctgccctggtgctgatggctatggtcaagcggaaggacagccggggaagggccaagcgatctggatctggagcaacaaacttctcactactcaaacaagcaggtgacgtggaggagaatcccgggcctactagtatggactggatttggcgcatccttttccttgtcggcgctgctaccggcgcgcattccttcgaacaagttcagcttcaacagcctggcgctgagctggtcaaacctggcgcttctgtgaagatgagctgcaaagccagcggctacgccttcagcagctactggatcaactggatgaagcagaaacccggccagggactcgaatggatcggccaaatctatcccggcgacggcgacaccaactacaacggcaagttcaagggcagagccacactgaccgccgatacctctagcagcacagcctacatgcagctgagcagcctgaccagcgaagatagcgccgtgtacttctgtgcccggtccatcacaacagtcgtgggctgcgctatggactattggggccagggaacaagcgtgaccgtgtctagtacgcgtatccagaaccctgatcctgccgtgtaccagctgcgggatagcaagagcagcgacaagagcgtgtgtctgttcaccgacttcgacagccagaccaacgtgtcccagagcaaggactccgacgtgtacatcaccgataagtgcgtgctggacatgcggagcatggacttcaagagcaactccgccgtggcctggtccaacaagtccgatttcgcctgcgccaacgccttcaacaacagcattatccccgaggacacattcttcccaagccccgagagcagctgcgacgtgaagctggtggaaaagagcttcgagacagacaccaacctgaacttccagaacctgagcgtgatcggcttcagaatcctgctgctgaaagtggccggctttaacctgctgatgaccctgcggctgtggtccagccgcgccaagagaagcggatctggcgtgaagcagaccctgaatttcgacctgctgaagctggctggcgacgtggaatccaacccaggcccttctagaggccatatgaccgagtacaagcccacggtgcgcctcgccacccgcgacgacgtccccagggccgtacgcaccctcgccgccgcgttcgccgactaccccgccacgcgccacaccgtcgatccggaccgccacatcgagcgggtcaccgagctgcaagaactcttcctcacgcgcgtcgggctcgacatcggcaaggtgtgggtcgcggacgacggcgccgcggtggcggtctggaccacgccggagagcgtcgaagcgggggcggtgttcgccgagatcggcccgcgcatggccgagttgagcggttcccggctggccgcgcagcaacagatggaaggcctcctggcgccgcaccggcccaaggagcccgcgtggttcctggccaccgtcggcgtctcgcccgaccaccagggcaagggtctgggcagcgccgtcgtgctccccggagtggaggcggccgagcgcgccggggtgcccgccttcctggagacctccgcgccccgcaacctccccttctacgagcggctcggcttcaccgtcaccgccgacgtcgaggtgcccgaaggaccgcgcacctggtgcatgacccgcaagcccggtgcctga

SEQ ID NO: 22706 - DNA, 4473 bp, synthetic construct; identical to SEQ ID NO: 1103
  source 1..4473: mol_type = other DNA

SEQ ID NO: 22707 - DNA, 3756 bp, synthetic construct; identical to SEQ ID NO: 1104
  source 1..3756: mol_type = other DNA

SEQ ID NO: 22708 - DNA, 3414 bp, synthetic construct
  source 1..3414: mol_type = other DNA
atggccttaccagtgaccgccttgctcctgccgctggccttgctgctccacgccgccaggccggcatgcgaggtgcagctggttgaatctggcggaggactggttcagcctggcggatctctgagactgtcttgtgccgccagcgccttcaccttcgatggacctgatatggcctggtacagacaggcccctggcaagggctgtgaactggtgtctatcatcagcgccgacggcagaacctactacaccgactctgtgaagggcagattcaccatcagccgggacaacagcaagaacaccgtgtacctccagatgaacagcctgagagccgaggacaccgccgtgtactactgtgctctggaccccagaaagaattgcagaggcggctactgctgtgccaactggggacagggaacactggtcaccgttagctctggtaccggcggaggcggatctggcggcggaggtagcggtggcggaggatctgaattcgacatccagatgacacagagccctagcagcctgtctgccagcgtgggagacagagtgaccatcacatgcaaggccagcgaccacatcaacaactggctggcctggtatcagcagaagcctggacaggcccctaagctgctgatctacggcgctaccacactggaaacaggcgtgcccagcagattttctggcagcggctctggcaccgactacaccctgacaatatccagcctccagcctgaggacttcgccacctactactgtcagcagagctggaacaccccttggacattcggccagggcaccaagctggaaatcaagagactcgaggacctgaagaacgtgttcccacctgaggtggccgtgttcgagcctagcgaggccgagatcagccacacccagaaagccaccctcgtgtgcctggctaccggcttctaccccgaccatgtggaactgtcttggtgggtcaacggcaaagaggtgcacagcggcgtgtgtaccgacccccagccactgaaagaacagcccgccctgaacgacagccggtactgcctgagcagcagactgagagtgtccgccaccttctggcagaacccccggaaccacttcagatgccaggtgcagttctacggcctgagcgagaacgacgagtggacccaggacagagccaagcccgtgacccagatcgtgtctgccgaagcctggggcagagccgattgcggctttaccagcgagagctaccagcagggcgtgctgagcgccaccatcctgtacgagatcctgctgggcaaggccaccctgtacgccgtgctggtgtctgccctggtgctgatggctatggtcaagcggaaggacagccggggaagggccaagcgatctggatctggagcaacaaacttctcactactcaaacaagcaggtgacgtggaggagaatcccgggcctactagtaccatggactggatttggcgcatccttttccttgtcggcgctgctaccggcgcccattccgggccccaagtgcagctccaagaaagtggcggtggccttgtgcaggctggtggttctctgagactgagctgtgctgccagcggctccatcagcagaatcggcgacatgggatggtataggcaggctccagggaaagaacgcgagttcgtggccgctattgcagccggcggaaccacatattacgccgacagcgtgaaaggccggttcaccatctccagagataatgccaagaatacggtctacttgcaaatgaactctctcaagcccgaggatacggctgtgtattactgcgccgccagccacgaaacccagcctacacagctggtgtattggggagccggaacacaagtgaccgtcagctctggatccggcggcggaggatctggcggaggcggatctgggggcggaggctctttcgaacaagttcagcttcaacagcctggcgctgagctggtcaaacctggcgcttctgtgaagatgagctgcaaagccagcggctacgccttcagcagctactggatcaactggatgaagcagaaacccggccagggactcgaatggatcggccaaatctatcccggcgacggcgacaccaactacaacggcaagttcaagggcagagccacactgaccgccgatacctctagcagcacagcctacatgcagctgagcagcctgaccagcgaagatagcgccgtgtacttctgtgcccggtccatcacaacagtcgtgggctgcgctatggactattggggccagggaacaagcgtgaccgtgtctagtacgcgtatccagaaccctgatcctgccgtgtaccagctgcgggatagcaagagcagcgacaagagcgtgtgtctgttcaccgacttcgacagccagaccaacgtgtcccagagcaaggactccgacgtgtacatcaccgataagtgcgtgctggacatgcggagcatggacttcaagagcaactccgccgtggcctggtccaacaagtccgatttcgcctgcgccaacgccttcaacaacagcattatccccgaggacacattcttcccaagccccgagagcagctgcgacgtgaagctggtggaaaagagcttcgagacagacaccaacctgaacttccagaacctgagcgtgatcggcttcagaatcctgctgctgaaagtggccggctttaacctgctgatgaccctgcggctgtggtccagccgcgccaagagaagcggatctggcgtgaagcagaccctgaatttcgacctgctgaagctggctggcgacgtggaatccaacccaggcccttctagaggccatatgaccgagtacaagcccacggtgcgcctcgccacccgcgacgacgtccccagggccgtacgcaccctcgccgccgcgttcgccgactaccccgccacgcgccacaccgtcgatccggaccgccacatcgagcgggtcaccgagctgcaagaactcttcctcacgcgcgtcgggctcgacatcggcaaggtgtgggtcgcggacgacggcgccgcggtggcggtctggaccacgccggagagcgtcgaagcgggggcggtgttcgccgagatcggcccgcgcatggccgagttgagcggttcccggctggccgcgcagcaacagatggaaggcctcctggcgccgcaccggcccaaggagcccgcgtggttcctggccaccgtcggcgtctcgcccgaccaccagggcaagggtctgggcagcgccgtcgtgctccccggagtggaggcggccgagcgcgccggggtgcccgccttcctggagacctccgcgccccgcaacctccccttctacgagcggctcggcttcaccgtcaccgccgacgtcgaggtgcccgaaggaccgcgcacctggtgcatgacccgcaagcccggtgcctga

SEQ ID NO: 22709 - DNA, 2685 bp, synthetic construct
  source 1..2685: mol_type = other DNA
atggccttaccagtgaccgccttgctcctgccgctggccttgctgctccacgccgccaggccggacatccagatgacacagagccctagcagcctgtctgccagcgtgggagacagagtgaccatcacatgcaaggccagcgaccacatcaacaactggctggcctggtatcagcagaagcctggacaggcccctaagctgctgatctacggcgctaccacactggaaacaggcgtgcccagcagattttctggcagcggctctggcaccgactacaccctgacaatatccagcctccagcctgaggacttcgccacctactactgtcagcagagctggaacaccccttggacattcggccagggcaccaagctggaaatcaagagaggcggaggcggaagtggaggcggaggatctggcggcggaggctctcaagttcagcttcaacagcctggcgctgagctggtcaaacctggcgcttctgtgaagatgagctgcaaagccagcggctacgccttcagcagctactggatcaactggatgaagcagaaacccggccagggactcgaatggatcggccaaatctatcccggcgacggcgacaccaactacaacggcaagttcaagggcagagccacactgaccgccgatacctctagcagcacagcctacatgcagctgagcagcctgaccagcgaagatagcgccgtgtacttctgtgcccggtccatcacaacagtcgtgggctgcgctatggactattggggccagggaacaagcgtgaccgtgtctagtacgcgtgccgatcagctgaccgaggaacagatcgccgagttcaaagaagccttcagcctgttcgacaaggacggcgacggcaccatcaccaccaaagaactgggcaccgtgatgcggagcctgggccagaatcctacagaagccgaactccaggacatgattaacgaggtggacgccgatggcaatggcacaatcgacttccccgagttcctgaccatgatggcccggaagatgaaggacaccgacagcgaggaagagatccgggaagccttccgggttttcgataaggatggcaacggctacatctctgccgccgagctgagacacgtgatgaccaatctgggcgagaagctgacagacgaagaggttgacgagatgattagagaggccgacatcgacggcgacggacaagtgaactacgaagagttcgtgcagatgatgaccgccaaaggcggcggaggctccaagagaagatggaagaaaaactttatcgccgtgtccgccgccaaccgcttcaagaagattagctctagcggagccctcgcgcgtaccacgacgccagcgccgcgaccaccaacaccggcgcccaccatcgcgtcgcagcccctgtccctgcgcccagaggcgtgccggccagcggcggggggcgcagtgcacacgagggggctggacttcgcctgtgacatctacatctgggcgcccttggccgggacttgtggggtccttctcctgtcactggttatcaccctttactgcaaacggggcagaaagaaactcctgtatatattcaaacaaccatttatgagaccagtacaaactactcaagaggaagatggctgtagctgccgatttccagaagaagaagaaggaggatgtgaactgagagtgaagttcagcaggagcgcagacgcccccgcgtaccagcagggccagaaccagctctataacgagctgaatctaggacgaagagaggagtacgatgttttggacaagagacgtggccgggaccctgagatggggggaaagccgagaaggaagaaccctcaggaaggcctgtacaatgaactgcagaaagataagatggcggaggcctacagtgagattgggatgaaaggcgagcgccggaggggcaaggggcacgatggcctttaccagggtctcagtacagccaccaaggacacctacgacgcccttcacatgcaggccctgccccctcgctctagtggctccggcgagggcagaggaagtctactaacctgcggagatgtggaagaaaatcctggcccacatatgaccgagtacaagcccacggtgcgcctcgccacccgcgacgacgtccccagggccgtacgcaccctcgccgccgcgttcgccgactaccccgccacgcgccacaccgtcgatccggaccgccacatcgagcgggtcaccgagctgcaagaactcttcctcacgcgcgtcgggctcgacatcggcaaggtgtgggtcgcggacgacggcgccgcggtggcggtctggaccacgccggagagcgtcgaagcgggggcggtgttcgccgagatcggcccgcgcatggccgagttgagcggttcccggctggccgcgcagcaacagatggaaggcctcctggcgccgcaccggcccaaggagcccgcgtggttcctggccaccgtcggcgtctcgcccgaccaccagggcaagggtctgggcagcgccgtcgtgctccccggagtggaggcggccgagcgcgccggggtgcccgccttcctggagacctccgcgccccgcaacctccccttctacgagcggctcggcttcaccgtcaccgccgacgtcgaggtgcccgaaggaccgcgcacctggtgcatgacccgcaagcccggtgcctga

SEQ ID NO: 22710 - DNA, 3414 bp, synthetic construct
  source 1..3414: mol_type = other DNA
atggccttaccagtgaccgccttgctcctgccgctggccttgctgctccacgccgccaggccggcatgccaggttcagctgcaagagtctggccctggcctggtcaagcctagccaaacactgagcctgacctgtaccgtgtctggcggctctatcaccaccggcgagttctactggaactggttcagacagcctcctggcaaaggactggaatggatgggagccattgccgccagcggcagcacaacatacagccctagcttcgagagccggaccagcatcagcagagacaccagcaagaatcagttcagcctgaagctgagcagcgtgacagccgccgatacagccgtgtattactgcggcagatcctttggagtggccgccgtgacaaccggccagaatagaggacagggcaccctggtcacagtgtctagcggtaccggcggaggcggatctggcggcggaggtagcggtggcggaggatctgaattcgacatccagatgacacagagccctagcagcctgtctgccagcgtgggagacagagtgaccatcacatgcaaggccagcgaccacatcaacaactggctggcctggtatcagcagaagcctggacaggcccctaagctgctgatctacggcgctaccacactggaaacaggcgtgcccagcagattttctggcagcggctctggcaccgactacaccctgacaatatccagcctccagcctgaggacttcgccacctactactgtcagcagagctggaacaccccttggacattcggccagggcaccaagctggaaatcaagagactcgaggacctgaagaacgtgttcccacctgaggtggccgtgttcgagcctagcgaggccgagatcagccacacccagaaagccaccctcgtgtgcctggctaccggcttctaccccgaccatgtggaactgtcttggtgggtcaacggcaaagaggtgcacagcggcgtgtgtaccgacccccagccactgaaagaacagcccgccctgaacgacagccggtactgcctgagcagcagactgagagtgtccgccaccttctggcagaacccccggaaccacttcagatgccaggtgcagttctacggcctgagcgagaacgacgagtggacccaggacagagccaagcccgtgacccagatcgtgtctgccgaagcctggggcagagccgattgcggctttaccagcgagagctaccagcagggcgtgctgagcgccaccatcctgtacgagatcctgctgggcaaggccaccctgtacgccgtgctggtgtctgccctggtgctgatggctatggtcaagcggaaggacagccggggaagggccaagcgatctggatctggagcaacaaacttctcactactcaaacaagcaggtgacgtggaggagaatcccgggcctactagtgccaccatggactggatttggcgcatccttttccttgtcggcgctgctaccggcgcccattccgggcccgaagtgcagctggttgaatctggcggaggactggttcaggctggcggatctctgagactgtcttgtgccgccagcggcagaacctttagcatgggctggtttagacaggcccctggcaaagagagagagttcgtcgccgccatcacatactctggcggcagcccttactacgccgactctgtgaagggcagattcaccatcagccgggacaacgccaagaacaccgtgtacctccagatgaacagcctgaagcctgaggacaccgccgtgtactactgcgccgccaatccaacatacggcagcgactggaacgccgagaattggggccagggaacccaagtgacagtgtctagcggatccggcggcggaggatctggcggaggcggatctgggggcggaggctctttcgaacaagttcagcttcaacagcctggcgctgagctggtcaaacctggcgcttctgtgaagatgagctgcaaagccagcggctacgccttcagcagctactggatcaactggatgaagcagaaacccggccagggactcgaatggatcggccaaatctatcccggcgacggcgacaccagctacaacggcaagttcaagggcagagccacactgaccgccgatacctctagcagcacagcctacatgcagctgagcagcctgaccagcgaagatagcgccgtgtacttctgtgcccggtccatcacaacagtcgtgggctgcgctatggactattggggccagggaacaagcgtgaccgtgtctagtacgcgtatccagaaccctgatcctgccgtgtaccagctgcgggatagcaagagcagcgacaagagcgtgtgtctgttcaccgacttcgacagccagaccaacgtgtcccagagcaaggactccgacgtgtacatcaccgataagtgcgtgctggacatgcggagcatggacttcaagagcaactccgccgtggcctggtccaacaagtccgatttcgcctgcgccaacgccttcaacaacagcattatccccgaggacacattcttcccaagccccgagagcagctgcgacgtgaagctggtggaaaagagcttcgagacagacaccaacctgaacttccagaacctgagcgtgatcggcttcagaatcctgctgctgaaagtggccggctttaacctgctgatgaccctgcggctgtggtccagccgcgccaagagaagcggatctggcgtgaagcagaccctgaatttcgacctgctgaagctggctggcgacgtggaatccaacccaggcccttctagaggccatatgaccgagtacaagcccacggtgcgcctcgccacccgcgacgacgtccccagggccgtacgcaccctcgccgccgcgttcgccgactaccccgccacgcgccacaccgtcgatccggaccgccacatcgagcgggtcaccgagctgcaagaactcttcctcacgcgcgtcgggctcgacatcggcaaggtgtgggtcgcggacgacggcgccgcggtggcggtctggaccacgccggagagcgtcgaagcgggggcggtgttcgccgagatcggcccgcgcatggccgagttgagcggttcccggctggccgcgcagcaacagatggaaggcctcctggcgccgcaccggcccaaggagcccgcgtggttcctggccaccgtcggcgtctcgcccgaccaccagggcaagggtctgggcagcgccgtcgtgctccccggagtggaggcggccgagcgcgccggggtgcccgccttcctggagacctccgcgccccgcaacctccccttctacgagcggctcggcttcaccgtcaccgccgacgtcgaggtgcccgaaggaccgcgcacctggtgcatgacccgcaagcccggtgcctga

SEQ ID NO: 22711 - DNA, 2250 bp, synthetic construct
  source 1..2250: mol_type = other DNA
atggccttaccagtgaccgccttgctcctgccgctggccttgctgctccacgccgccaggccggacgtcgtgatgacccagacaccactgagcctgcctgtgtctctgggcgatcaggccagcatcagctgtagaagcagccagagcctggtgcacagaaacggcaacacctacctgcactggtatctccagaagcctggacagagccccaagctgctgatccacaaggtgtccaacagattcagcggcgtgcccgacagattttctggcagcggcagcggaaccgacttcaccctgaagatcagcagagtggaagccgaggacctgggcgtgtacttctgtagccagagcacacacgtgccacctctgacatttggagccggcaccaagctggaactgaagagactcgaggacctgaagaacgtgttcccacctgaggtggccgtgttcgagcctagcgaggccgagatcagccacacccagaaagccaccctcgtgtgcctggctaccggcttctaccccgaccatgtggaactgtcttggtgggtcaacggcaaagaggtgcacagcggcgtgtctaccgacccccagccactgaaagaacagcccgccctgaacgacagccggtactgcctgagcagcagactgagagtgtccgccaccttctggcagaacccccggaaccacttcagatgccaggtgcagttctacggcctgagcgagaacgacgagtggacccaggacagagccaagcccgtgacccagatcgtgtctgccgaagcctggggcagagccgattgcggatcccagagcttcggcctgctggaccccaagctgtgctacctgctggatggcatcctgttcatctacggcgtgatcctgaccgccctgttcctgagagtgaagttcagcagaagcgccgacgcccctgcctaccagcagggacagaaccaactgtacaacgagctgaacctgggcagacgggaagagtacgacgtgctggacaagcggagaggcagggaccctgagatgggcggaaagccccagcggagaaagaacccccaggaaggactgtataacgaactccagaaagacaagatggccgaagcctacagcgagatcggcatgaagggcgagcggagaagaggcaagggccacgatggcctgtaccagggcctgagcaccgccaccaaggacacctatgacgccctgcacatgcaggccctgcctccaagaagggccaagcgatctggatctggagcaacaaacttctcactactcaaacaagcaggtgacgtggaggagaatcccgggcctactagtatggactggatttggcgcatccttttccttgtcggcgctgctaccggcgcgcattccttcgaagttcagctgctgcaaagcggccctgagctggaaaaacctggcgcttccgtgatgatctcctgcaaggccagcggctctagcttcaccggctacaacatgaactgggtccgacagaacatcggcaagagcctggaatggatcggcgctatcgacccttactacggcggcaccagctacaaccagaagttcaagggcagagccacactgaccgtggacaagagcagcagcacagcctacatgcacctgaagtccctgaccagcgaggacagcgccgtgtactattgtgtgtccggcatggaatactggggccagggcacaagcgtgaccgtttcttctacgcgtgcctctacaaagggaccctccgtgtttcctctggctcccagcagcaagtctacaagcggaggaacagccgctctgggctgcctggtcaaggattactttcccgagcctgtgaccgtgtcctggaatagcggagcactgacaagcggcgtgcacacctttccagccgtgctgcaaagcagcggcctgtactctctgagcagcgtggtcacagtgcctagctctagcctgggcacccagacctacatctgcaatgtgaaccacaagcctagcaacaccaaggtggacaagagagtggaacccaagagctgtggtaccctcggagaaccacagctctgttacattctggatgctatcctgttcctctatgggatcgtcctgacactcctgtattgcagactcaaaattcaagttcgcaaagccgccattacctcttacgagaagagtgatggggtgtacacaggactgtctacccggaatcaagaaacctacgaaaccctcaaacatgagaagccacctcagtaa

SEQ ID NO: 22712 - DNA, 2931 bp, synthetic construct
  source 1..2931: mol_type = other DNA
atggccttaccagtgaccgccttgctcctgccgctggccttgctgctccacgccgccaggccggacgtcgtgatgacccagacaccactgagcctgcctgtgtctctgggcgatcaggccagcatcagctgtagaagcagccagagcctggtgcacagaaacggcaacacctacctgcactggtatctccagaagcctggacagagccccaagctgctgatccacaaggtgtccaacagattcagcggcgtgcccgacagattttctggcagcggcagcggaaccgacttcaccctgaagatcagcagagtggaagccgaggacctgggcgtgtacttctgtagccagagcacacacgtgccacctctgacatttggagccggcaccaagctggaactgaagagactcgaggacctgaagaacgtgttcccacctgaggtggccgtgttcgagcctagcgaggccgagatcagccacacccagaaagccaccctcgtgtgcctggctaccggcttctaccccgaccatgtggaactgtcttggtgggtcaacggcaaagaggtgcacagcggcgtgtctaccgacccccagccactgaaagaacagcccgccctgaacgacagccggtactgcctgagcagcagactgagagtgtccgccaccttctggcagaacccccggaaccacttcagatgccaggtgcagttctacggcctgagcgagaacgacgagtggacccaggacagagccaagcccgtgacccagatcgtgtctgccgaagcctggggcagagccgattgcggatcccagagcttcggcctgctggaccccaagctgtgctacctgctggatggcatcctgttcatctacggcgtgatcctgaccgccctgttcctgagagtgaagttcagcagaagcgccgacgcccctgcctaccagcagggacagaaccaactgtacaacgagctgaacctgggcagacgggaagagtacgacgtgctggacaagcggagaggcagggaccctgagatgggcggaaagccccagcggagaaagaacccccaggaaggactgtataacgaactccagaaagacaagatggccgaagcctacagcgagatcggcatgaagggcgagcggagaagaggcaagggccacgatggcctgtaccagggcctgagcaccgccaccaaggacacctatgacgccctgcacatgcaggccctgcctccaagaagggccaagcgatctggatctggagcaacaaacttctcactactcaaacaagcaggtgacgtggaggagaatcccgggcctactagtatggactggatttggcgcatccttttccttgtcggcgctgctaccggcgcgcattccttcgaagttcagctgctgcaaagcggccctgagctggaaaaacctggcgcttccgtgatgatctcctgcaaggccagcggctctagcttcaccggctacaacatgaactgggtccgacagaacatcggcaagagcctggaatggatcggcgctatcgacccttactacggcggcaccagctacaaccagaagttcaagggcagagccacactgaccgtggacaagagcagcagcacagcctacatgcacctgaagtccctgaccagcgaggacagcgccgtgtactattgtgtgtccggcatggaatactggggccagggcacaagcgtgaccgtttcttctacgcgtgcctctacaaagggaccctccgtgtttcctctggctcccagcagcaagtctacaagcggaggaacagccgctctgggctgcctggtcaaggattactttcccgagcctgtgaccgtgtcctggaatagcggagcactgacaagcggcgtgcacacctttccagccgtgctgcaaagcagcggcctgtactctctgagcagcgtggtcacagtgcctagctctagcctgggcacccagacctacatctgcaatgtgaaccacaagcctagcaacaccaaggtggacaagagagtggaacccaagagctgtggtaccatcactcaaggtttggcagtgtcaaccatctcatcattctttccacctggctaccaagtgtccttctgcctggtcatggtgctgctgttcgccgtggataccggcctgtacttcagcgtcaagaccaacatccggtccagcaccagagactggaaggaccacaagttcaagtggcggaaggaccctcaggacaagagggccaagcgatctggatctggagcaacaaacttctcactactcaaacaagcaggtgacgtggaggagaatcccgggccttctagaggccatatgaccgagtacaagcccacggtgcgcctcgccacccgcgacgacgtccccagggccgtacgcaccctcgccgccgcgttcgccgactaccccgccacgcgccacaccgtcgatccggaccgccacatcgagcgggtcaccgagctgcaagaactcttcctcacgcgcgtcgggctcgacatcggcaaggtgtgggtcgcggacgacggcgccgcggtggcggtctggaccacgccggagagcgtcgaagcgggggcggtgttcgccgagatcggcccgcgcatggccgagttgagcggttcccggctggccgcgcagcaacagatggaaggcctcctggcgccgcaccggcccaaggagcccgcgtggttcctggccaccgtcggcgtctcgcccgaccaccagggcaagggtctgggcagcgccgtcgtgctccccggagtggaggcggccgagcgcgccggggtgcccgccttcctggagacctccgcgccccgcaacctccccttctacgagcggctcggcttcaccgtcaccgccgacgtcgaggtgcccgaaggaccgcgcacctggtgcatgacccgcaagcccggtgcctga

SEQ ID NO: 22713 - DNA, 2250 bp, synthetic construct; identical to SEQ ID NO: 22711
  source 1..2250: mol_type = other DNA

SEQ ID NO: 22714 - DNA, 2904 bp, synthetic construct
  source 1..2904: mol_type = other DNA
atggccttaccagtgaccgccttgctcctgccgctggccttgctgctccacgccgccaggccggacgtcgtgatgacccagacaccactgagcctgcctgtgtctctgggcgatcaggccagcatcagctgtagaagcagccagagcctggtgcacagaaacggcaacacctacctgcactggtatctccagaagcctggacagagccccaagctgctgatccacaaggtgtccaacagattcagcggcgtgcccgacagattttctggcagcggcagcggaaccgacttcaccctgaagatcagcagagtggaagccgaggacctgggcgtgtacttctgtagccagagcacacacgtgccacctctgacatttggagccggcaccaagctggaactgaagagactcgaggacctgaagaacgtgttcccacctgaggtggccgtgttcgagcctagcgaggccgagatcagccacacccagaaagccaccctcgtgtgcctggctaccggcttctaccccgaccatgtggaactgtcttggtgggtcaacggcaaagaggtgcacagcggcgtgtctaccgacccccagccactgaaagaacagcccgccctgaacgacagccggtactgcctgagcagcagactgagagtgtccgccaccttctggcagaacccccggaaccacttcagatgccaggtgcagttctacggcctgagcgagaacgacgagtggacccaggacagagccaagcccgtgacccagatcgtgtctgccgaagcctggggcagagccgattgcggatcccagagcttcggcctgctggaccccaagctgtgctacctgctggatggcatcctgttcatctacggcgtgatcctgaccgccctgttcctgagagtgaagttcagcagaagcgccgacgcccctgcctaccagcagggacagaaccaactgtacaacgagctgaacctgggcagacgggaagagtacgacgtgctggacaagcggagaggcagggaccctgagatgggcggaaagccccagcggagaaagaacccccaggaaggactgtataacgaactccagaaagacaagatggccgaagcctacagcgagatcggcatgaagggcgagcggagaagaggcaagggccacgatggcctgtaccagggcctgagcaccgccaccaaggacacctatgacgccctgcacatgcaggccctgcctccaagaagggccaagcgatctggatctggagcaacaaacttctcactactcaaacaagcaggtgacgtggaggagaatcccgggcctactagtatggactggatttggcgcatccttttccttgtcggcgctgctaccggcgcgcattccttcgaagttcagctgctgcaaagcggccctgagctggaaaaacctggcgcttccgtgatgatctcctgcaaggccagcggctctagcttcaccggctacaacatgaactgggtccgacagaacatcggcaagagcctggaatggatcggcgctatcgacccttactacggcggcaccagctacaaccagaagttcaagggcagagccacactgaccgtggacaagagcagcagcacagcctacatgcacctgaagtccctgaccagcgaggacagcgccgtgtactattgtgtgtccggcatggaatactggggccagggcacaagcgtgaccgtttcttctacgcgtatccagaaccctgatcctgccgtgtaccagctgcgggatagcaagagcagcgacaagagcgtgtgtctgttcaccgacttcgacagccagaccaacgtgtcccagagcaaggactccgacgtgtacatcaccgataagaccgtgctggacatgcggagcatggacttcaagagcaactccgccgtggcctggtccaacaagtccgatttcgcctgcgccaacgccttcaacaacagcattatccccgaggacacattcttcccaagccccgagagcagctgcggtaccatcactcaaggtttggcagtgtcaaccatctcatcattctttccacctggctaccaagtgtccttctgcctggtcatggtgctgctgttcgccgtggataccggcctgtacttcagcgtcaagaccaacatccggtccagcaccagagactggaaggaccacaagttcaagtggcggaaggaccctcaggacaagagggccaagcgatctggatctggagcaacaaacttctcactactcaaacaagcaggtgacgtggaggagaatcccgggccttctagaggccatatgaccgagtacaagcccacggtgcgcctcgccacccgcgacgacgtccccagggccgtacgcaccctcgccgccgcgttcgccgactaccccgccacgcgccacaccgtcgatccggaccgccacatcgagcgggtcaccgagctgcaagaactcttcctcacgcgcgtcgggctcgacatcggcaaggtgtgggtcgcggacgacggcgccgcggtggcggtctggaccacgccggagagcgtcgaagcgggggcggtgttcgccgagatcggcccgcgcatggccgagttgagcggttcccggctggccgcgcagcaacagatggaaggcctcctggcgccgcaccggcccaaggagcccgcgtggttcctggccaccgtcggcgtctcgcccgaccaccagggcaagggtctgggcagcgccgtcgtgctccccggagtggaggcggccgagcgcgccggggtgcccgccttcctggagacctccgcgccccgcaacctccccttctacgagcggctcggcttcaccgtcaccgccgacgtcgaggtgcccgaaggaccgcgcacctggtgcatgacccgcaagcccggtgcctga

SEQ ID NO: 22715 - DNA, 2931 bp, synthetic construct; identical to SEQ ID NO: 22712
  source 1..2931: mol_type = other DNA

SEQ ID NO: 22716 - DNA, 1857 bp, synthetic construct
  source 1..1857: mol_type = other DNA
atggccttaccagtgaccgccttgctcctgccgctggccttgctgctccacgccgccaggccggacgagatcgtgatgacccagacccctgccaccctgtctgtgtctgccggcgagagagtgaccattacctgcaaggccagccagagcgtgtccaacgacgtgacctggtatcagcagaagcccggccaggcccccagactgctgatctacagcgccagcaacagatacagcggcgtgcccgccagattttccggcagcggctacggcaccgagttcaccttcaccatcagcagcgtgcagagcgaggacttcgccgtgtacttctgtcagcaagactacagcagcttcggccagggcaccaagctggaaatcaagaggctcgaggacctgaagaacgtgttcccacctgaggtggccgtgttcgagcctagcgaggccgagatcagccacacccagaaagccaccctcgtgtgcctggctaccggcttctaccccgaccatgtggaactgtcttggtgggtcaacggcaaagaggtgcacagcggcgtgtgtaccgacccccagccactgaaagaacagcccgccctgaacgacagccggtactgcctgagcagcagactgagagtgtccgccaccttctggcagaacccccggaaccacttcagatgccaggtgcagttctacggcctgagcgagaacgacgagtggacccaggacagagccaagcccgtgacccagatcgtgtctgccgaagcctggggcagagccgattgcggctttaccagcgagagctaccagcagggcgtgctgagcgccaccatcctgtacgagatcctgctgggcaaggccaccctgtacgccgtgctggtgtctgccctggtgctgatggctatggtcaagcggaaggacagccggggaagggccaagcgatctggatctggagcaacaaacttctcactactcaaacaagcaggtgacgtggaggagaatcccgggcctactagtatggactggatttggcgcatccttttccttgtcggcgctgctaccggcgcgcattccttcgaacaggtgcagctggtggaatctggacctggcgtggtgcagcctggcagaagcctgagaatcagctgtgccgtgtccggcttcagcgtgaccaactacggcgtgcactgggtgcgccagccacctggaaaaggactggaatggctgggcgtgatctgggctggcggcatcaccaactacaacagcgccttcatgtcccggctgaccatctccaaggacaacagcaagaacaccgtgtacctccagatgaacagcctgcgggccgaggacaccgccatgtactactgtgcttccagaggcggccactacggctacgccctggattattggggccagggaaccctcgtgaccgtgtcctctacgcgtatccagaaccctgatcctgccgtgtaccagctgcgggatagcaagagcagcgacaagagcgtgtgtctgttcaccgacttcgacagccagaccaacgtgtcccagagcaaggactccgacgtgtacatcaccgataagtgcgtgctggacatgcggagcatggacttcaagagcaactccgccgtggcctggtccaacaagtccgatttcgcctgcgccaacgccttcaacaacagcattatccccgaggacacattcttcccaagccccgagagcagctgcgacgtgaagctggtggaaaagagcttcgagacagacaccaacctgaacttccagaacctgagcgtgatcggcttcagaatcctgctgctgaaagtggccggctttaacctgctgatgaccctgcggctgtggtccagctaa

SEQ ID NO: 22717 - DNA, 1440 bp, synthetic construct
  source 1..1440: mol_type = other DNA
atggccttaccagtgaccgccttgctcctgccgctggccttgctgctccacgccgccaggccggacatccagatgacacagagccctagcagcctgtctgccagcgtgggagacagagtgaccatcacatgcaaggccagcgaccacatcaacaactggctggcctggtatcagcagaagcctggacaggcccctaagctgctgatctacggcgctaccacactggaaacaggcgtgcccagcagattttctggcagcggctctggcaccgactacaccctgacaatatccagcctccagcctgaggacttcgccacctactactgtcagcagagctggaacaccccttggacattcggccagggcaccaagctggaaatcaagagaggcggaggcggaagtggaggcggaggatctggcggcggaggctctcaagttcagcttcaacagcctggcgctgagctggtcaaacctggcgcttctgtgaagatgagctgcaaagccagcggctacgccttcagcagctactggatcaactggatgaagcagaaacccggccagggactcgaatggatcggccaaatctatcccggcgacggcgacaccaactacaacggcaagttcaagggcagagccacactgaccgccgatacctctagcagcacagcctacatgcagctgagcagcctgaccagcgaagatagcgccgtgtacttctgtgcccggtccatcacaacagtcgtgggctgcgctatggactattggggccagggaacaagcgtgaccgtgtctagtacgcgtggaatgaggactgaggatcttcccaaagctgtcgtctttctcgaaccccaatggtatcgggtgctcgaaaaagactctgtgacactgaaatgccaaggggcctactctcccgaggacaactccacacagtggtttcataatgagtccctcatcagctctcaggccagctcttatttcattgatgccgctacagtggacgactccggcgagtatcggtgtcagaccaatctgtctacactgtctgaccccgtgcagcttgaggtccacattggatggttgctcttgcaagccccacgctgggttttcaaagaggaagatccaatccatctgcggtgccacagctggaaaaacaccgctctccacaaagtcacatacctgcaaaatggcaaaggacgcaaatacttccatcacaattccgatttttacattccgaaggctaccctgaaagacagcggcagctatttctgccggggactcgtcggctccaagaatgtgtcctccgaaaccgtgaatatcacgattacccaaggactggctgtgcctacaatctctagcttctttccgcctggataccaagtctccttctgtcttgtgatggtcctcctgtttgctgtggacacaggactgtacttttcctaa

SEQ ID NO: 22718 - DNA, 1443 bp, synthetic construct
  source 1..1443: mol_type = other DNA
atggccttaccagtgaccgccttgctcctgccgctggccttgctgctccacgccgccaggccggacatccagatgacacagagccctagcagcctgtctgccagcgtgggagacagagtgaccatcacatgcaaggccagcgaccacatcaacaactggctggcctggtatcagcagaagcctggacaggcccctaagctgctgatctacggcgctaccacactggaaacaggcgtgcccagcagattttctggcagcggctctggcaccgactacaccctgacaatatccagcctccagcctgaggacttcgccacctactactgtcagcagagctggaacaccccttggacattcggccagggcaccaagctggaaatcaagagaggcggaggcggaagtggaggcggaggatctggcggcggaggctctcaagttcagcttcaacagcctggcgctgagctggtcaaacctggcgcttctgtgaagatgagctgcaaagccagcggctacgccttcagcagctactggatcaactggatgaagcagaaacccggccagggactcgaatggatcggccaaatctatcccggcgacggcgacaccaactacaacggcaagttcaagggcagagccacactgaccgccgatacctctagcagcacagcctacatgcagctgagcagcctgaccagcgaagatagcgccgtgtacttctgtgcccggtccatcacaacagtcgtgggctgcgctatggactattggggccagggaacaagcgtgaccgtgtctagtacgcgtggaatgaggactgaggatcttcccaaagctgtcgtctttctcgaaccccaatggtatcgggtgctcgaaaaagactctgtgacactgaaatgccaaggggcctactctcccgaggacaactccacacagtggtttcataatgagtccctcatcagctctcaggccagctcttatttcattgatgccgctacagtggacgactccggcgagtatcggtgtcagaccaatctgtctacactgtctgaccccgtgcagcttgaggtccacattggatggttgctcttgcaagccccacgctgggttttcaaagaggaagatccaatccatctgcggtgccacagctggaaaaacaccgctctccacaaagtcacatacctgcaaaatggcaaaggacgcaaatacttccatcacaattccgatttttacattccgaaggctaccctgaaagacagcggcagctatttctgccggggactcgtcggctccaagaatgtgtcctccgaaaccgtgaatatcacgattacccaaggactggctgtgcctacaatctctagcttctttccgcctggataccaagtctccttctgtcttgtgatggtcctcctgtttgctgtggacacaggactgtacttttacgtgtaa

SEQ ID NO: 22719 - DNA, 2280 bp, synthetic construct
  source 1..2280: mol_type = other DNA
atggccttaccagtgaccgccttgctcctgccgctggccttgctgctccacgccgccaggccggaagtgcagctggttgaatctggcggaggactggttcaggctggcggatctctgagactgtcttgtgccgccagcggcagaacctttagcatgggctggtttagacaggcccctggcaaagagagagagttcgtcgccgccatcacatactctggcggcagcccttactacgccgactctgtgaagggcagattcaccatcagccgggacaacgccaagaacaccgtgtacctccagatgaacagcctgaagcctgaggacaccgccgtgtactactgcgccgccaatccaacatacggcagcgactggaacgccgagaattggggccagggaacccaagtgacagtgtctagcggtaccggcggaggcggatctggcggcggaggtagcggtggcggaggatctgaattcgacatccagatgacacagagccctagcagcctgtctgccagcgtgggagacagagtgaccatcacatgcaaggccagcgaccacatcaacaactggctggcctggtatcagcagaagcctggacaggcccctaagctgctgatctacggcgctaccacactggaaacaggcgtgcccagcagattttctggcagcggctctggcaccgactacaccctgacaatatccagcctccagcctgaggacttcgccacctactactgtcagcagagctggaacaccccttggacattcggccagggcaccaagctggaaatcaagagactcgaggacctgaagaacgtgttcccacctgaggtggccgtgttcgagcctagcgaggccgagatcagccacacccagaaagccaccctcgtgtgcctggctaccggcttctaccccgaccatgtggaactgtcttggtgggtcaacggcaaagaggtgcacagcggcgtgtgtaccgacccccagccactgaaagaacagcccgccctgaacgacagccggtactgcctgagcagcagactgagagtgtccgccaccttctggcagaacccccggaaccacttcagatgccaggtgcagttctacggcctgagcgagaacgacgagtggacccaggacagagccaagcccgtgacccagatcgtgtctgccgaagcctggggcagagccgattgcggctttaccagcgagagctaccagcagggcgtgctgagcgccaccatcctgtacgagatcctgctgggcaaggccaccctgtacgccgtgctggtgtctgccctggtgctgatggctatggtcaagcggaaggacagccggggaagggccaagcgatctggatctggagcaacaaacttctcactactcaaacaagcaggtgacgtggaggagaatcccgggcctactagtatggactggatttggcgcatccttttccttgtcggcgctgctaccggcgcgcattccttcgaacaagttcagcttcaacagcctggcgctgagctggtcaaacctggcgcttctgtgaagatgagctgcaaagccagcggctacgccttcagcagctactggatcaactggatgaagcagaaacccggccagggactcgaatggatcggccaaatctatcccggcgacggcgacaccaactacaacggcaagttcaagggcagagccacactgaccgccgatacctctagcagcacagcctacatgcagctgagcagcctgaccagcgaagatagcgccgtgtacttctgtgcccggtccatcacaacagtcgtgggctgcgctatggactattggggccagggaacaagcgtgaccgtgtctagtacgcgtatccagaaccctgatcctgccgtgtaccagctgcgggatagcaagagcagcgacaagagcgtgtgtctgttcaccgacttcgacagccagaccaacgtgtcccagagcaaggactccgacgtgtacatcaccgataagtgcgtgctggacatgcggagcatggacttcaagagcaactccgccgtggcctggtccaacaagtccgatttcgcctgcgccaacgccttcaacaacagcattatccccgaggacacattcttcccaagccccgagagcagctgcgacgtgaagctggtggaaaagagcttcgagacagacaccaacctgaacttccagaacctgagcgtgatcggcttcagaatcctgctgctgaaagtggccggctttaacctgctgatgaccctgcggctgtggtccagctaa

SEQ ID NO: 22720 - DNA, 2463 bp, synthetic construct
  source 1..2463: mol_type = other DNA
atggccttaccagtgaccgccttgctcctgccgctggccttgctgctccacgccgccaggccggacatcgtgatgacacagagccctagcagcctgacagtgacagccggcgagaaagtgaccatgagctgcaagagcagccagagcctgctgaacagcggcaaccagaagaactacctgacctggtatcagcagaagcccggccagcctcctaagctgctgatctactgggccagcaccagagaaagcggcgtgcccgatagattcacaggcagcggcagcggaaccgacttcaccctgacaatcagctctgtgcaggccgaggatctggccgtgtactactgccagaacgactacagctaccctctgacctttggagccggcaccaagctggaacttaaactcgaggacctgaagaacgtgttcccacctgaggtggccgtgttcgagcctagcgaggccgagatcagccacacccagaaagccaccctcgtgtgcctggctaccggcttctaccccgaccatgtggaactgtcttggtgggtcaacggcaaagaggtgcacagcggcgtgtctaccgacccccagccactgaaagaacagcccgccctgaacgacagccggtactgcctgagcagcagactgagagtgtccgccaccttctggcagaacccccggaaccacttcagatgccaggtgcagttctacggcctgagcgagaacgacgagtggacccaggacagagccaagcccgtgacccagatcgtgtctgccgaagcctggggcagagccgattgcggatcccagagcttcggcctgctggaccccaagctgtgctacctgctggatggcatcctgttcatctacggcgtgatcctgaccgccctgttcctgagagtgaagttcagcagaagcgccgacgcccctgcctaccagcagggacagaaccaactgtacaacgagctgaacctgggcagacgggaagagtacgacgtgctggacaagcggagaggcagggaccctgagatgggcggaaagccccagcggagaaagaacccccaggaaggactgtataacgaactccagaaagacaagatggccgaagcctacagcgagatcggcatgaagggcgagcggagaagaggcaagggccacgatggcctgtaccagggcctgagcaccgccaccaaggacacctatgacgccctgcacatgcaggccctgcctccaagaagggccaagcgatctggatctggagcaacaaacttctcactactcaaacaagcaggtgacgtggaggagaatcccgggcctactagtatggactggatttggcgcatccttttccttgtcggcgctgctaccggcgcgcattccttcgaacaaattcagctggtgcagtctggccccgagctgaagaaacctggcgagacagtgaagatttcctgcaaggccagcggctacaccttcaccaactacggcatgaactgggtcaagcaggcccctggcaagggcctgaaatggatgggctggatcaacaccaacaccggcgagcctacctacgccgaagagttcaagggcagattcgccttcagcctggaaaccagcgccagcacagcctacctccagatcaacaacctgaagaacgaggacaccgccacctacttttgcgccagactcggcttcggcaacgctatggattattggggccagggcaccagcgtgaccgtttcttctacgcgtatccagaaccctgatcctgccgtgtaccagctgcgggatagcaagagcagcgacaagagcgtgtgtctgttcaccgacttcgacagccagaccaacgtgtcccagagcaaggactccgacgtgtacatcaccgataagaccgtgctggacatgcggagcatggacttcaagagcaactccgccgtggcctggtccaacaagtccgatttcgcctgcgccaacgccttcaacaacagcattatccccgaggacacattcttcccaagccccgagagcagctgcggtacccagagttttgggttgttggaccctaaattgtgctatctgttggacggaatcctgttcatttacggagtgatcctgaccgcattgttcctgcgggttaagttttccagatccgcagacgcacccgcttaccaacaagggcagaaccaactctacaatgaacttaatttggggcggagggaagagtacgacgttctggacaaaaggaggggacgagatcccgagatgggcggaaagcctcagcgaaggaagaatccgcaagaggggctttataacgaactccagaaagataaaatggcagaagcctatagtgagattgggatgaagggagaaaggaggaggggtaaaggtcacgatgggttgtaccaaggattgagcacagccactaaagatacctatgatgcgctccacatgcaggccctgccgccaagataa

SEQ ID NO: 22721 - DNA, 2715 bp, synthetic construct
  source 1..2715: mol_type = other DNA
atggccttaccagtgaccgccttgctcctgccgctggccttgctgctccacgccgccaggccggcatgccaggttcagctgcaagagtctggccctggcctggtcaagcctagccaaacactgagcctgacctgtaccgtgtctggcggctctatcaccaccggcgagttctactggaactggttcagacagcctcctggcaaaggactggaatggatgggagccattgccgccagcggcagcacaacatacagccctagcttcgagagccggaccagcatcagcagagacaccagcaagaatcagttcagcctgaagctgagcagcgtgacagccgccgatacagccgtgtattactgcggcagatcctttggagtggccgccgtgacaaccggccagaatagaggacagggcaccctggtcacagtgtctagcggtaccggcggaggcggatctggcggcggaggtagcggtggcggaggatctgaattcgacatccagatgacacagagccctagcagcctgtctgccagcgtgggagacagagtgaccatcacatgcaaggccagcgaccacatcaacaactggctggcctggtatcagcagaagcctggacaggcccctaagctgctgatctacggcgctaccacactggaaacaggcgtgcccagcagattttctggcagcggctctggcaccgactacaccctgacaatatccagcctccagcctgaggacttcgccacctactactgtcagcagagctggaacaccccttggacattcggccagggcaccaagctggaaatcaagagactcgaggacctgaagaacgtgttcccacctgaggtggccgtgttcgagcctagcgaggccgagatcagccacacccagaaagccaccctcgtgtgcctggctaccggcttctaccccgaccatgtggaactgtcttggtgggtcaacggcaaagaggtgcacagcggcgtgtgtaccgacccccagccactgaaagaacagcccgccctgaacgacagccggtactgcctgagcagcagactgagagtgtccgccaccttctggcagaacccccggaaccacttcagatgccaggtgcagttctacggcctgagcgagaacgacgagtggacccaggacagagccaagcccgtgacccagatcgtgtctgccgaagcctggggcagagccgattgcggctttaccagcgagagctaccagcagggcgtgctgagcgccaccatcctgtacgagatcctgctgggcaaggccaccctgtacgccgtgctggtgtctgccctggtgctgatggctatggtcaagcggaaggacagccggggaagggccaagcgatctggatctggagcaacaaacttctcactactcaaacaagcaggtgacgtggaggagaatcccgggcctactagtgccaccatggactggatttggcgcatccttttccttgtcggcgctgctaccggcgcccattccgggcccgaagtgcaactggttgaatccggtggcggcctggtgcaagcaggcggatctctcagacttagctgtgccgcctccggcagaaccttcacaatgggatggtttaggcaggctccagggaaagagagagagttcgtcgccgccatctctctgtctcccacactggcctactacgccgactctgtgaaaggccggttcaccatctccagagataatgccaagaacaccgtggtgctgcaaatgaactctctgaaacccgaggatacagccctgtactattgtgccgctgaccggaagtccgtgatgagcatcagacccgattactggggacagggcacacaagtcacagtgtcctctggatccggcggcggaggatctggcggaggcggatctgggggcggaggctctttcgaacaagttcagcttcaacagcctggcgctgagctggtcaaacctggcgcttctgtgaagatgagctgcaaagccagcggctacgccttcagcagctactggatcaactggatgaagcagaaacccggccagggactcgaatggatcggccaaatctatcccggcgacggcgacaccaactacaacggcaagttcaagggcagagccacactgaccgccgatacctctagcagcacagcctacatgcagctgagcagcctgaccagcgaagatagcgccgtgtacttctgtgcccggtccatcacaacagtcgtgggctgcgctatggactattggggccagggaacaagcgtgaccgtgtctagtacgcgtatccagaaccctgatcctgccgtgtaccagctgcgggatagcaagagcagcgacaagagcgtgtgtctgttcaccgacttcgacagccagaccaacgtgtcccagagcaaggactccgacgtgtacatcaccgataagtgcgtgctggacatgcggagcatggacttcaagagcaactccgccgtggcctggtccaacaagtccgatttcgcctgcgccaacgccttcaacaacagcattatccccgaggacacattcttcccaagccccgagagcagctgcgacgtgaagctggtggaaaagagcttcgagacagacaccaacctgaacttccagaacctgagcgtgatcggcttcagaatcctgctgctgaaagtggccggctttaacctgctgatgaccctgcggctgtggtccagctaa

SEQ ID NO: 22722 - DNA, 2886 bp, synthetic construct
  source 1..2886: mol_type = other DNA
atggccttaccagtgaccgccttgctcctgccgctggccttgctgctccacgccgccaggccggcatgccaggttcagctgcaagagtctggccctggcctggtcaagcctagccaaacactgagcctgacctgtaccgtgtctggcggctctatcaccaccggcgagttctactggaactggttcagacagcctcctggcaaaggactggaatggatgggagccattgccgccagcggcagcacaacatacagccctagcttcgagagccggaccagcatcagcagagacaccagcaagaatcagttcagcctgaagctgagcagcgtgacagccgccgatacagccgtgtattactgcggcagatcctttggagtggccgccgtgacaaccggccagaatagaggacagggcaccctggtcacagtgtctagcggtaccggcggaggcggatctggcggcggaggtagcggtggcggaggatctgaattcgacatccagatgacacagagccctagcagcctgtctgccagcgtgggagacagagtgaccatcacatgcaaggccagcgaccacatcaacaactggctggcctggtatcagcagaagcctggacaggcccctaagctgctgatctacggcgctaccacactggaaacaggcgtgcccagcagattttctggcagcggctctggcaccgactacaccctgacaatatccagcctccagcctgaggacttcgccacctactactgtcagcagagctggaacaccccttggacattcggccagggcaccaagctggaaatcaagagactcgaggacctgaagaacgtgttcccacctgaggtggccgtgttcgagcctagcgaggccgagatcagccacacccagaaagccaccctcgtgtgcctggctaccggcttctaccccgaccatgtggaactgtcttggtgggtcaacggcaaagaggtgcacagcggcgtgtctaccgacccccagccactgaaagaacagcccgccctgaacgacagccggtactgcctgagcagcagactgagagtgtccgccaccttctggcagaacccccggaaccacttcagatgccaggtgcagttctacggcctgagcgagaacgacgagtggacccaggacagagccaagcccgtgacccagatcgtgtctgccgaagcctggggcagagccgattgcggatcccagagcttcggcctgctggaccccaagctgtgctacctgctggatggcatcctgttcatctacggcgtgatcctgaccgccctgttcctgagagtgaagttcagcagaagcgccgacgcccctgcctaccagcagggacagaaccaactgtacaacgagctgaacctgggcagacgggaagagtacgacgtgctggacaagcggagaggcagggaccctgagatgggcggaaagccccagcggagaaagaacccccaggaaggactgtataacgaactccagaaagacaagatggccgaagcctacagcgagatcggcatgaagggcgagcggagaagaggcaagggccacgatggcctgtaccagggcctgagcaccgccaccaaggacacctatgacgccctgcacatgcaggccctgcctccaagaagggccaagcgatctggatctggagcaacaaacttctcactactcaaacaagcaggtgacgtggaggagaatcccgggcctactagtatggactggatttggcgcatccttttccttgtcggcgctgctaccggcgcgcattccttcgaacaagttcagcttcaacagcctggcgctgagctggtcaaacctggcgcttctgtgaagatgagctgcaaagccagcggctacgccttcagcagctactggatcaactggatgaagcagaaacccggccagggactcgaatggatcggccaaatctatcccggcgacggcgacaccaactacaacggcaagttcaagggcagagccacactgaccgccgatacctctagcagcacagcctacatgcagctgagcagcctgaccagcgaagatagcgccgtgtacttctgtgcccggtccatcacaacagtcgtgggctgcgctatggactattggggccagggaacaagcgtgaccgtgtctagtacgcgtatccagaaccctgatcctgccgtgtaccagctgcgggatagcaagagcagcgacaagagcgtgtgtctgttcaccgacttcgacagccagaccaacgtgtcccagagcaaggactccgacgtgtacatcaccgataagaccgtgctggacatgcggagcatggacttcaagagcaactccgccgtggcctggtccaacaagtccgatttcgcctgcgccaacgccttcaacaacagcattatccccgaggacacattcttcccaagccccgagagcagctgcggtacccagagttttgggttgttggaccctaaattgtgctatctgttggacggaatcctgttcatttacggagtgatcctgaccgcattgttcctgcgggttaagttttccagatccgcagacgcacccgcttaccaacaagggcagaaccaactctacaatgaacttaatttggggcggagggaagagtacgacgttctggacaaaaggaggggacgagatcccgagatgggcggaaagcctcagcgaaggaagaatccgcaagaggggctttataacgaactccagaaagataaaatggcagaagcctatagtgagattgggatgaagggagaaaggaggaggggtaaaggtcacgatgggttgtaccaaggattgagcacagccactaaagatacctatgatgcgctccacatgcaggccctgccgccaagataa

SEQ ID NO: 22723 - DNA, 2661 bp, synthetic construct
  source 1..2661: mol_type = other DNA
atggccttaccagtgaccgccttgctcctgccgctggccttgctgctccacgccgccaggccggcatgccaggttcagctgcaagagtctggccctggcctggtcaagcctagccaaacactgagcctgacctgtaccgtgtctggcggctctatcaccaccggcgagttctactggaactggttcagacagcctcctggcaaaggactggaatggatgggagccattgccgccagcggcagcacaacatacagccctagcttcgagagccggaccagcatcagcagagacaccagcaagaatcagttcagcctgaagctgagcagcgtgacagccgccgatacagccgtgtattactgcggcagatcctttggagtggccgccgtgacaaccggccagaatagaggacagggcaccctggtcacagtgtctagcggtaccggcggaggcggatctggcggcggaggtagcggtggcggaggatctgaattcgacatccagatgacacagagccctagcagcctgtctgccagcgtgggagacagagtgaccatcacatgcaaggccagcgaccacatcaacaactggctggcctggtatcagcagaagcctggacaggcccctaagctgctgatctacggcgctaccacactggaaacaggcgtgcccagcagattttctggcagcggctctggcaccgactacaccctgacaatatccagcctccagcctgaggacttcgccacctactactgtcagcagagctggaacaccccttggacattcggccagggcaccaagctggaaatcaagagactcgaggacctgaagaacgtgttcccacctgaggtggccgtgttcgagcctagcgaggccgagatcagccacacccagaaagccaccctcgtgtgcctggctaccggcttctaccccgaccatgtggaactgtcttggtgggtcaacggcaaagaggtgcacagcggcgtgtctaccgacccccagccactgaaagaacagcccgccctgaacgacagccggtactgcctgagcagcagactgagagtgtccgccaccttctggcagaacccccggaaccacttcagatgccaggtgcagttctacggcctgagcgagaacgacgagtggacccaggacagagccaagcccgtgacccagatcgtgtctgccgaagcctggggcagagccgattgcggatcccagagcttcggcctgctggaccccaagctgtgctacctgctggatggcatcctgttcatctacggcgtgatcctgaccgccctgttcctgagagtgaagttcagcagaagcgccgacgcccctgcctaccagcagggacagaaccaactgtacaacgagctgaacctgggcagacgggaagagtacgacgtgctggacaagcggagaggcagggaccctgagatgggcggaaagccccagcggagaaagaacccccaggaaggactgtataacgaactccagaaagacaagatggccgaagcctacagcgagatcggcatgaagggcgagcggagaagaggcaagggccacgatggcctgtaccagggcctgagcaccgccaccaaggacacctatgacgccctgcacatgcaggccctgcctccaagaagggccaagcgatctggatctggagcaacaaacttctcactactcaaacaagcaggtgacgtggaggagaatcccgggcctactagtatggactggatttggcgcatccttttccttgtcggcgctgctaccggcgcgcattccttcgaacaagttcagcttcaacagcctggcgctgagctggtcaaacctggcgcttctgtgaagatgagctgcaaagccagcggctacgccttcagcagctactggatcaactggatgaagcagaaacccggccagggactcgaatggatcggccaaatctatcccggcgacggcgacaccaactacaacggcaagttcaagggcagagccacactgaccgccgatacctctagcagcacagcctacatgcagctgagcagcctgaccagcgaagatagcgccgtgtacttctgtgcccggtccatcacaacagtcgtgggctgcgctatggactattggggccagggaacaagcgtgaccgtgtctagtacgcgtatccagaaccctgatcctgccgtgtaccagctgcgggatagcaagagcagcgacaagagcgtgtgtctgttcaccgacttcgacagccagaccaacgtgtcccagagcaaggactccgacgtgtacatcaccgataagaccgtgctggacatgcggagcatggacttcaagagcaactccgccgtggcctggtccaacaagtccgatttcgcctgcgccaacgccttcaacaacagcattatccccgaggacacattcttcccaagccccgagagcagctgcggtaccctcggagaaccacagctctgttacattctggatgctatcctgttcctctatgggatcgtcctgacactcctgtattgcagactcaaaattcaagttcgcaaagccgccattacctcttacgagaagagtgatggggtgtacacaggactgtctacccggaatcaagaaacctacgaaaccctcaaacatgagaagccacctcagtaa

SEQ ID NO: 22724 - DNA, 3303 bp, synthetic construct
  source 1..3303: mol_type = other DNA
atggccttaccagtgaccgccttgctcctgccgctggccttgctgctccacgccgccaggccggcatgccaggttcagctgcaagagtctggccctggcctggtcaagcctagccaaacactgagcctgacctgtaccgtgtctggcggctctatcaccaccggcgagttctactggaactggttcagacagcctcctggcaaaggactggaatggatgggagccattgccgccagcggcagcacaacatacagccctagcttcgagagccggaccagcatcagcagagacaccagcaagaatcagttcagcctgaagctgagcagcgtgacagccgccgatacagccgtgtattactgcggcagatcctttggagtggccgccgtgacaaccggccagaatagaggacagggcaccctggtcacagtgtctagcggtaccggcggaggcggatctggcggcggaggtagcggtggcggaggatctgaattcgacatccagatgacacagagccctagcagcctgtctgccagcgtgggagacagagtgaccatcacatgcaaggccagcgaccacatcaacaactggctggcctggtatcagcagaagcctggacaggcccctaagctgctgatctacggcgctaccacactggaaacaggcgtgcccagcagattttctggcagcggctctggcaccgactacaccctgacaatatccagcctccagcctgaggacttcgccacctactactgtcagcagagctggaacaccccttggacattcggccagggcaccaagctggaaatcaagagactcgaggacctgaagaacgtgttcccacctgaggtggccgtgttcgagcctagcgaggccgagatcagccacacccagaaagccaccctcgtgtgcctggctaccggcttctaccccgaccatgtggaactgtcttggtgggtcaacggcaaagaggtgcacagcggcgtgtctaccgacccccagccactgaaagaacagcccgccctgaacgacagccggtactgcctgagcagcagactgagagtgtccgccaccttctggcagaacccccggaaccacttcagatgccaggtgcagttctacggcctgagcgagaacgacgagtggacccaggacagagccaagcccgtgacccagatcgtgtctgccgaagcctggggcagagccgattgcggatcccagagcttcggcctgctggaccccaagctgtgctacctgctggatggcatcctgttcatctacggcgtgatcctgaccgccctgttcctgagagtgaagttcagcagaagcgccgacgcccctgcctaccagcagggacagaaccaactgtacaacgagctgaacctgggcagacgggaagagtacgacgtgctggacaagcggagaggcagggaccctgagatgggcggaaagccccagcggagaaagaacccccaggaaggactgtataacgaactccagaaagacaagatggccgaagcctacagcgagatcggcatgaagggcgagcggagaagaggcaagggccacgatggcctgtaccagggcctgagcaccgccaccaaggacacctatgacgccctgcacatgcaggccctgcctccaagaagggccaagcgatctggatctggagcaacaaacttctcactactcaaacaagcaggtgacgtggaggagaatcccgggcctactagtgccaccatggactggatttggcgcatccttttccttgtcggcgctgctaccggcgcccattccgggcccgaagtgcaactggttgaatccggtggcggcctggtgcaagcaggcggatctctcagacttagctgtgccgcctccggcagaaccttcacaatgggatggtttaggcaggctccagggaaagagagagagttcgtcgccgccatctctctgtctcccacactggcctactacgccgactctgtgaaaggccggttcaccatctccagagataatgccaagaacaccgtggtgctgcaaatgaactctctgaaacccgaggatacagccctgtactattgtgccgctgaccggaagtccgtgatgagcatcagacccgattactggggacagggcacacaagtcacagtgtcctctggatccggcggcggaggatctggcggaggcggatctgggggcggaggctctttcgaacaagttcagcttcaacagcctggcgctgagctggtcaaacctggcgcttctgtgaagatgagctgcaaagccagcggctacgccttcagcagctactggatcaactggatgaagcagaaacccggccagggactcgaatggatcggccaaatctatcccggcgacggcgacaccaactacaacggcaagttcaagggcagagccacactgaccgccgatacctctagcagcacagcctacatgcagctgagcagcctgaccagcgaagatagcgccgtgtacttctgtgcccggtccatcacaacagtcgtgggctgcgctatggactattggggccagggaacaagcgtgaccgtgtctagtacgcgtatccagaaccctgatcctgccgtgtaccagctgcgggatagcaagagcagcgacaagagcgtgtgtctgttcaccgacttcgacagccagaccaacgtgtcccagagcaaggactccgacgtgtacatcaccgataagaccgtgctggacatgcggagcatggacttcaagagcaactccgccgtggcctggtccaacaagtccgatttcgcctgcgccaacgccttcaacaacagcattatccccgaggacacattcttcccaagccccgagagcagctgcggtacccagagttttgggttgttggaccctaaattgtgctatctgttggacggaatcctgttcatttacggagtgatcctgaccgcattgttcctgcgggttaagttttccagatccgcagacgcacccgcttaccaacaagggcagaaccaactctacaatgaacttaatttggggcggagggaagagtacgacgttctggacaaaaggaggggacgagatcccgagatgggcggaaagcctcagcgaaggaagaatccgcaagaggggctttataacgaactccagaaagataaaatggcagaagcctatagtgagattgggatgaagggagaaaggaggaggggtaaaggtcacgatgggttgtaccaaggattgagcacagccactaaagatacctatgatgcgctccacatgcaggccctgccgccaagataa

SEQ ID NO: 22725 - DNA, 3303 bp, synthetic construct
  source 1..3303: mol_type = other DNA
atggccttaccagtgaccgccttgctcctgccgctggccttgctgctccacgccgccaggccggcatgccaggttcagctgcaagagtctggccctggcctggtcaagcctagccaaacactgagcctgacctgtaccgtgtctggcggctctatcaccaccggcgagttctactggaactggttcagacagcctcctggcaaaggactggaatggatgggagccattgccgccagcggcagcacaacatacagccctagcttcgagagccggaccagcatcagcagagacaccagcaagaatcagttcagcctgaagctgagcagcgtgacagccgccgatacagccgtgtattactgcggcagatcctttggagtggccgccgtgacaaccggccagaatagaggacagggcaccctggtcacagtgtctagcggtaccggcggaggcggatctggcggcggaggtagcggtggcggaggatctgaattcgacatccagatgacacagagccctagcagcctgtctgccagcgtgggagacagagtgaccatcacatgcaaggccagcgaccacatcaacaactggctggcctggtatcagcagaagcctggacaggcccctaagctgctgatctacggcgctaccacactggaaacaggcgtgcccagcagattttctggcagcggctctggcaccgactacaccctgacaatatccagcctccagcctgaggacttcgccacctactactgtcagcagagctggaacaccccttggacattcggccagggcaccaagctggaaatcaagagactcgaggacctgaagaacgtgttcccacctgaggtggccgtgttcgagcctagcgaggccgagatcagccacacccagaaagccaccctcgtgtgcctggctaccggcttctaccccgaccatgtggaactgtcttggtgggtcaacggcaaagaggtgcacagcggcgtgtctaccgacccccagccactgaaagaacagcccgccctgaacgacagccggtactgcctgagcagcagactgagagtgtccgccaccttctggcagaacccccggaaccacttcagatgccaggtgcagttctacggcctgagcgagaacgacgagtggacccaggacagagccaagcccgtgacccagatcgtgtctgccgaagcctggggcagagccgattgcggatcccagagcttcggcctgctggaccccaagctgtgctacctgctggatggcatcctgttcatctacggcgtgatcctgaccgccctgttcctgagagtgaagttcagcagaagcgccgacgcccctgcctaccagcagggacagaaccaactgtacaacgagctgaacctgggcagacgggaagagtacgacgtgctggacaagcggagaggcagggaccctgagatgggcggaaagccccagcggagaaagaacccccaggaaggactgtataacgaactccagaaagacaagatggccgaagcctacagcgagatcggcatgaagggcgagcggagaagaggcaagggccacgatggcctgtaccagggcctgagcaccgccaccaaggacacctatgacgccctgcacatgcaggccctgcctccaagaagggccaagcgatctggatctggagcaacaaacttctcactactcaaacaagcaggtgacgtggaggagaatcccgggcctactagtgccaccatggactggatttggcgcatccttttccttgtcggcgctgctaccggcgcccattccgggcccgaagtgcagctggttgaatctggcggaggactggttcaggctggcggatctctgagactgtcttgtgccgccagcggcagaacctttagcatgggctggtttagacaggcccctggcaaagagagagagttcgtcgccgccatcacatactctggcggcagcccttactacgccgactctgtgaagggcagattcaccatcagccgggacaacgccaagaacaccgtgtacctccagatgaacagcctgaagcctgaggacaccgccgtgtactactgcgccgccaatccaacatacggcagcgactggaacgccgagaattggggccagggaacccaagtgacagtgtctagcggatccggcggcggaggatctggcggaggcggatctgggggcggaggctctttcgaacaagttcagcttcaacagcctggcgctgagctggtcaaacctggcgcttctgtgaagatgagctgcaaagccagcggctacgccttcagcagctactggatcaactggatgaagcagaaacccggccagggactcgaatggatcggccaaatctatcccggcgacggcgacaccaactacaacggcaagttcaagggcagagccacactgaccgccgatacctctagcagcacagcctacatgcagctgagcagcctgaccagcgaagatagcgccgtgtacttctgtgcccggtccatcacaacagtcgtgggctgcgctatggactattggggccagggaacaagcgtgaccgtgtctagtacgcgtatccagaaccctgatcctgccgtgtaccagctgcgggatagcaagagcagcgacaagagcgtgtgtctgttcaccgacttcgacagccagaccaacgtgtcccagagcaaggactccgacgtgtacatcaccgataagaccgtgctggacatgcggagcatggacttcaagagcaactccgccgtggcctggtccaacaagtccgatttcgcctgcgccaacgccttcaacaacagcattatccccgaggacacattcttcccaagccccgagagcagctgcggtacccagagttttgggttgttggaccctaaattgtgctatctgttggacggaatcctgttcatttacggagtgatcctgaccgcattgttcctgcgggttaagttttccagatccgcagacgcacccgcttaccaacaagggcagaaccaactctacaatgaacttaatttggggcggagggaagagtacgacgttctggacaaaaggaggggacgagatcccgagatgggcggaaagcctcagcgaaggaagaatccgcaagaggggctttataacgaactccagaaagataaaatggcagaagcctatagtgagattgggatgaagggagaaaggaggaggggtaaaggtcacgatgggttgtaccaaggattgagcacagccactaaagatacctatgatgcgctccacatgcaggccctgccgccaagataa

SEQ ID NO: 22726 - DNA, 2394 bp, synthetic construct
  source 1..2394: mol_type = other DNA
atggccttaccagtgaccgccttgctcctgccgctggccttgctgctccacgccgccaggccggacttcgtgatgacacagagccctgatagcctggccgtgtctctcggcgagcgagtgaccatgagctgcaagtctagccagagcctgctgaacagcggcaaccagaagaactacctgacctggtatcagcagaagcccggccagcctcctaagctgctgatctactgggccagcaccagagaaagcggcgtgcccgatagattttctggctctggcagcggcaccgacttcaccctgacaatttctagcctgcaagccgaggacgtggccgtgtactactgccagaacgactacagctacccctacaccttcggccagggcaccaagctggaaatcaaactcgagggacagcctaaggccaatcctaccgtgacactgttccctccaagcagcgaagaactccaggccaacaaggccacacttgtgtgcctgatctccgacttctaccctggggctgtgacagtggcttggaaggccgatggatctcctgtgaaagccggcgtggaaaccaccaagccatccaagcagagcaacaacaaatacgccgccagctcctacctgagcctgacacctgagcagtggaagtcccacagatcctacagctgccaagtgacccacgaaggcagcaccgtggaaaagacagtggcccctacagagtgcagcggatcccagagcttcggcctgctggaccccaagctgtgctacctgctggatggcatcctgttcatctacggcgtgatcctgaccgccctgttcctgagagtgaagttcagcagaagcgccgacgcccctgcctaccagcagggacagaaccaactgtacaacgagctgaacctgggcagacgggaagagtacgacgtgctggacaagcggagaggcagggaccctgagatgggcggaaagccccagcggagaaagaacccccaggaaggactgtataacgaactccagaaagacaagatggccgaagcctacagcgagatcggcatgaagggcgagcggagaagaggcaagggccacgatggcctgtaccagggcctgagcaccgccaccaaggacacctatgacgccctgcacatgcaggccctgcctccaagaagggccaagcgatctggatctggagcaacaaacttctcactactcaaacaagcaggtgacgtggaggagaatcccgggcctactagtatggactggatttggcgcatccttttccttgtcggcgctgctaccggcgcgcattccttcgaagtgcaactggttcagagcggagccgagctgaagaaacctggggccagcgtgaaggtgtcctgtaaagccagcggctacacctttaccgactactacatgaaatgggtccgacaggccccaggccagggactcgaatggatcggcgatattatccccagcaacggggccaccttctacaaccagaaattcaagggccgcgtgaccatcaccgtggacaagagcacaagcaccgcctacatggaactgagcagcctgagaagcgaggacaccgccgtgtattattgcgccagaagccatctgctgcgggccagttggttcgcctattggggacagggaaccctggtcaccgttagctctacgcgtatccagaaccctgatcctgccgtgtaccagctgcgggatagcaagagcagcgacaagagcgtgtgtctgttcaccgacttcgacagccagaccaacgtgtcccagagcaaggactccgacgtgtacatcaccgataagaccgtgctggacatgcggagcatggacttcaagagcaactccgccgtggcctggtccaacaagtccgatttcgcctgcgccaacgccttcaacaacagcattatccccgaggacacattcttcccaagccccgagagcagctgcggtacccagagttttgggttgttggaccctaaattgtgctatctgttggacggaatcctgttcatttacggagtgatcctgaccgcattgttcctgcgggttaagttttccagatccgcagacgcacccgcttaccaacaagggcagaaccaactctacaatgaacttaatttggggcggagggaagagtacgacgttctggacaaaaggaggggacgagatcccgagatgggcggaaagcctcagcgaaggaagaatccgcaagaggggctttataacgaactccagaaagataaaatggcagaagcctatagtgagattgggatgaagggagaaaggaggaggggtaaaggtcacgatgggttgtaccaaggattgagcacagccactaaagatacctatgatgcgctccacatgcaggccctgccgccaagataa

SEQ ID NO: 22727 - DNA, 2169 bp, synthetic construct
  source 1..2169: mol_type = other DNA
atggccttaccagtgaccgccttgctcctgccgctggccttgctgctccacgccgccaggccggacttcgtgatgacacagagccctgatagcctggccgtgtctctcggcgagcgagtgaccatgagctgcaagtctagccagagcctgctgaacagcggcaaccagaagaactacctgacctggtatcagcagaagcccggccagcctcctaagctgctgatctactgggccagcaccagagaaagcggcgtgcccgatagattttctggctctggcagcggcaccgacttcaccctgacaatttctagcctgcaagccgaggacgtggccgtgtactactgccagaacgactacagctacccctacaccttcggccagggcaccaagctggaaatcaaactcgagggacagcctaaggccaatcctaccgtgacactgttccctccaagcagcgaagaactccaggccaacaaggccacacttgtgtgcctgatctccgacttctaccctggggctgtgacagtggcttggaaggccgatggatctcctgtgaaagccggcgtggaaaccaccaagccatccaagcagagcaacaacaaatacgccgccagctcctacctgagcctgacacctgagcagtggaagtcccacagatcctacagctgccaagtgacccacgaaggcagcaccgtggaaaagacagtggcccctacagagtgcagcggatccctgggagagcctcagctgtgctatatcctggacgccatcctgtttctgtacggcatcgtgctgaccctgctgtactgccggctgaagatccaagtgcggaaggccgccatcaccagctacgagaaatccgacggcgtgtacaccggcctgagcaccagaaatcaagagacatacgagacactgaagcacgaaaagcctccacaaagggccaagcgatctggatctggagcaacaaacttctcactactcaaacaagcaggtgacgtggaggagaatcccgggcctactagtatggactggatttggcgcatccttttccttgtcggcgctgctaccggcgcgcattccttcgaagtgcaactggttcagagcggagccgagctgaagaaacctggggccagcgtgaaggtgtcctgtaaagccagcggctacacctttaccgactactacatgaaatgggtccgacaggccccaggccagggactcgaatggatcggcgatattatccccagcaacggggccaccttctacaaccagaaattcaagggccgcgtgaccatcaccgtggacaagagcacaagcaccgcctacatggaactgagcagcctgagaagcgaggacaccgccgtgtattattgcgccagaagccatctgctgcgggccagttggttcgcctattggggacagggaaccctggtcaccgttagctctacgcgtatccagaaccctgatcctgccgtgtaccagctgcgggatagcaagagcagcgacaagagcgtgtgtctgttcaccgacttcgacagccagaccaacgtgtcccagagcaaggactccgacgtgtacatcaccgataagaccgtgctggacatgcggagcatggacttcaagagcaactccgccgtggcctggtccaacaagtccgatttcgcctgcgccaacgccttcaacaacagcattatccccgaggacacattcttcccaagccccgagagcagctgcggtacccagagttttgggttgttggaccctaaattgtgctatctgttggacggaatcctgttcatttacggagtgatcctgaccgcattgttcctgcgggttaagttttccagatccgcagacgcacccgcttaccaacaagggcagaaccaactctacaatgaacttaatttggggcggagggaagagtacgacgttctggacaaaaggaggggacgagatcccgagatgggcggaaagcctcagcgaaggaagaatccgcaagaggggctttataacgaactccagaaagataaaatggcagaagcctatagtgagattgggatgaagggagaaaggaggaggggtaaaggtcacgatgggttgtaccaaggattgagcacagccactaaagatacctatgatgcgctccacatgcaggccctgccgccaagataa

SEQ ID NO: 22728 - DNA, 2268 bp, synthetic construct
  source 1..2268: mol_type = other DNA
atggccttaccagtgaccgccttgctcctgccgctggccttgctgctccacgccgccaggccggacttcgtgatgacacagagccctgatagcctggccgtgtctctcggcgagcgagtgaccatgagctgcaagtctagccagagcctgctgaacagcggcaaccagaagaactacctgacctggtatcagcagaagcccggccagcctcctaagctgctgatctactgggccagcaccagagaaagcggcgtgcccgatagattttctggctctggcagcggcaccgacttcaccctgacaatttctagcctgcaagccgaggacgtggccgtgtactactgccagaacgactacagctacccctacaccttcggccagggcaccaagctggaaatcaaactcgaggacctgaagaacgtgttcccacctgaggtggccgtgttcgagcctagcgaggccgagatcagccacacccagaaagccaccctcgtgtgcctggctaccggcttctaccccgaccatgtggaactgtcttggtgggtcaacggcaaagaggtgcacagcggcgtgtctaccgacccccagccactgaaagaacagcccgccctgaacgacagccggtactgcctgagcagcagactgagagtgtccgccaccttctggcagaacccccggaaccacttcagatgccaggtgcagttctacggcctgagcgagaacgacgagtggacccaggacagagccaagcccgtgacccagatcgtgtctgccgaagcctggggcagagccgattgcggatcccagagcttcggcctgctggaccccaagctgtgctacctgctggatggcatcctgttcatctacggcgtgatcctgaccgccctgttcctgagagtgaagttcagcagaagcgccgacgcccctgcctaccagcagggacagaaccaactgtacaacgagctgaacctgggcagacgggaagagtacgacgtgctggacaagcggagaggcagggaccctgagatgggcggaaagccccagcggagaaagaacccccaggaaggactgtataacgaactccagaaagacaagatggccgaagcctacagcgagatcggcatgaagggcgagcggagaagaggcaagggccacgatggcctgtaccagggcctgagcaccgccaccaaggacacctatgacgccctgcacatgcaggccctgcctccaagaagggccaagcgatctggatctggagcaacaaacttctcactactcaaacaagcaggtgacgtggaggagaatcccgggcctactagtatggactggatttggcgcatccttttccttgtcggcgctgctaccggcgcgcattccttcgaagtgcaactggttcagagcggagccgagctgaagaaacctggggccagcgtgaaggtgtcctgtaaagccagcggctacacctttaccgactactacatgaaatgggtccgacaggccccaggccagggactcgaatggatcggcgatattatccccagcaacggggccaccttctacaaccagaaattcaagggccgcgtgaccatcaccgtggacaagagcacaagcaccgcctacatggaactgagcagcctgagaagcgaggacaccgccgtgtattattgcgccagaagccatctgctgcgggccagttggttcgcctattggggacagggaaccctggtcaccgttagctctacgcgtgcctctacaaagggaccctccgtgtttcctctggctcccagcagcaagtctacaagcggaggaacagccgctctgggctgcctggtcaaggattactttcccgagcctgtgaccgtgtcctggaatagcggagcactgacaagcggcgtgcacacctttccagccgtgctgcaaagcagcggcctgtactctctgagcagcgtggtcacagtgcctagctctagcctgggcacccagacctacatctgcaatgtgaaccacaagcctagcaacaccaaggtggacaagagagtggaacccaagagctgtggtaccctcggagaaccacagctctgttacattctggatgctatcctgttcctctatgggatcgtcctgacactcctgtattgcagactcaaaattcaagttcgcaaagccgccattacctcttacgagaagagtgatggggtgtacacaggactgtctacccggaatcaagaaacctacgaaaccctcaaacatgagaagccacctcagtaa

SEQ ID NO: 22729 - DNA, 2949 bp, synthetic construct
  source 1..2949: mol_type = other DNA
atggccttaccagtgaccgccttgctcctgccgctggccttgctgctccacgccgccaggccggacttcgtgatgacacagagccctgatagcctggccgtgtctctcggcgagcgagtgaccatgagctgcaagtctagccagagcctgctgaacagcggcaaccagaagaactacctgacctggtatcagcagaagcccggccagcctcctaagctgctgatctactgggccagcaccagagaaagcggcgtgcccgatagattttctggctctggcagcggcaccgacttcaccctgacaatttctagcctgcaagccgaggacgtggccgtgtactactgccagaacgactacagctacccctacaccttcggccagggcaccaagctggaaatcaaactcgaggacctgaagaacgtgttcccacctgaggtggccgtgttcgagcctagcgaggccgagatcagccacacccagaaagccaccctcgtgtgcctggctaccggcttctaccccgaccatgtggaactgtcttggtgggtcaacggcaaagaggtgcacagcggcgtgtctaccgacccccagccactgaaagaacagcccgccctgaacgacagccggtactgcctgagcagcagactgagagtgtccgccaccttctggcagaacccccggaaccacttcagatgccaggtgcagttctacggcctgagcgagaacgacgagtggacccaggacagagccaagcccgtgacccagatcgtgtctgccgaagcctggggcagagccgattgcggatcccagagcttcggcctgctggaccccaagctgtgctacctgctggatggcatcctgttcatctacggcgtgatcctgaccgccctgttcctgagagtgaagttcagcagaagcgccgacgcccctgcctaccagcagggacagaaccaactgtacaacgagctgaacctgggcagacgggaagagtacgacgtgctggacaagcggagaggcagggaccctgagatgggcggaaagccccagcggagaaagaacccccaggaaggactgtataacgaactccagaaagacaagatggccgaagcctacagcgagatcggcatgaagggcgagcggagaagaggcaagggccacgatggcctgtaccagggcctgagcaccgccaccaaggacacctatgacgccctgcacatgcaggccctgcctccaagaagggccaagcgatctggatctggagcaacaaacttctcactactcaaacaagcaggtgacgtggaggagaatcccgggcctactagtatggactggatttggcgcatccttttccttgtcggcgctgctaccggcgcgcattccttcgaagtgcaactggttcagagcggagccgagctgaagaaacctggggccagcgtgaaggtgtcctgtaaagccagcggctacacctttaccgactactacatgaaatgggtccgacaggccccaggccagggactcgaatggatcggcgatattatccccagcaacggggccaccttctacaaccagaaattcaagggccgcgtgaccatcaccgtggacaagagcacaagcaccgcctacatggaactgagcagcctgagaagcgaggacaccgccgtgtattattgcgccagaagccatctgctgcgggccagttggttcgcctattggggacagggaaccctggtcaccgttagctctacgcgtgcctctacaaagggaccctccgtgtttcctctggctcccagcagcaagtctacaagcggaggaacagccgctctgggctgcctggtcaaggattactttcccgagcctgtgaccgtgtcctggaatagcggagcactgacaagcggcgtgcacacctttccagccgtgctgcaaagcagcggcctgtactctctgagcagcgtggtcacagtgcctagctctagcctgggcacccagacctacatctgcaatgtgaaccacaagcctagcaacaccaaggtggacaagagagtggaacccaagagctgtggtaccatcactcaaggtttggcagtgtcaaccatctcatcattctttccacctggctaccaagtgtccttctgcctggtcatggtgctgctgttcgccgtggataccggcctgtacttcagcgtcaagaccaacatccggtccagcaccagagactggaaggaccacaagttcaagtggcggaaggaccctcaggacaagagggccaagcgatctggatctggagcaacaaacttctcactactcaaacaagcaggtgacgtggaggagaatcccgggccttctagaggccatatgaccgagtacaagcccacggtgcgcctcgccacccgcgacgacgtccccagggccgtacgcaccctcgccgccgcgttcgccgactaccccgccacgcgccacaccgtcgatccggaccgccacatcgagcgggtcaccgagctgcaagaactcttcctcacgcgcgtcgggctcgacatcggcaaggtgtgggtcgcggacgacggcgccgcggtggcggtctggaccacgccggagagcgtcgaagcgggggcggtgttcgccgagatcggcccgcgcatggccgagttgagcggttcccggctggccgcgcagcaacagatggaaggcctcctggcgccgcaccggcccaaggagcccgcgtggttcctggccaccgtcggcgtctcgcccgaccaccagggcaagggtctgggcagcgccgtcgtgctccccggagtggaggcggccgagcgcgccggggtgcccgccttcctggagacctccgcgccccgcaacctccccttctacgagcggctcggcttcaccgtcaccgccgacgtcgaggtgcccgaaggaccgcgcacctggtgcatgacccgcaagcccggtgcctga

SEQ ID NO: 22730 - DNA, 2268 bp, synthetic construct; identical to SEQ ID NO: 22728
  source 1..2268: mol_type = other DNA

SEQ ID NO: 22731 - DNA, 2493 bp, synthetic construct
  source 1..2493: mol_type = other DNA
atggccttaccagtgaccgccttgctcctgccgctggccttgctgctccacgccgccaggccggacttcgtgatgacacagagccctgatagcctggccgtgtctctcggcgagcgagtgaccatgagctgcaagtctagccagagcctgctgaacagcggcaaccagaagaactacctgacctggtatcagcagaagcccggccagcctcctaagctgctgatctactgggccagcaccagagaaagcggcgtgcccgatagattttctggctctggcagcggcaccgacttcaccctgacaatttctagcctgcaagccgaggacgtggccgtgtactactgccagaacgactacagctacccctacaccttcggccagggcaccaagctggaaatcaaactcgaggacctgaagaacgtgttcccacctgaggtggccgtgttcgagcctagcgaggccgagatcagccacacccagaaagccaccctcgtgtgcctggctaccggcttctaccccgaccatgtggaactgtcttggtgggtcaacggcaaagaggtgcacagcggcgtgtctaccgacccccagccactgaaagaacagcccgccctgaacgacagccggtactgcctgagcagcagactgagagtgtccgccaccttctggcagaacccccggaaccacttcagatgccaggtgcagttctacggcctgagcgagaacgacgagtggacccaggacagagccaagcccgtgacccagatcgtgtctgccgaagcctggggcagagccgattgcggatcccagagcttcggcctgctggaccccaagctgtgctacctgctggatggcatcctgttcatctacggcgtgatcctgaccgccctgttcctgagagtgaagttcagcagaagcgccgacgcccctgcctaccagcagggacagaaccaactgtacaacgagctgaacctgggcagacgggaagagtacgacgtgctggacaagcggagaggcagggaccctgagatgggcggaaagccccagcggagaaagaacccccaggaaggactgtataacgaactccagaaagacaagatggccgaagcctacagcgagatcggcatgaagggcgagcggagaagaggcaagggccacgatggcctgtaccagggcctgagcaccgccaccaaggacacctatgacgccctgcacatgcaggccctgcctccaagaagggccaagcgatctggatctggagcaacaaacttctcactactcaaacaagcaggtgacgtggaggagaatcccgggcctactagtatggactggatttggcgcatccttttccttgtcggcgctgctaccggcgcgcattccttcgaagtgcaactggttcagagcggagccgagctgaagaaacctggggccagcgtgaaggtgtcctgtaaagccagcggctacacctttaccgactactacatgaaatgggtccgacaggccccaggccagggactcgaatggatcggcgatattatccccagcaacggggccaccttctacaaccagaaattcaagggccgcgtgaccatcaccgtggacaagagcacaagcaccgcctacatggaactgagcagcctgagaagcgaggacaccgccgtgtattattgcgccagaagccatctgctgcgggccagttggttcgcctattggggacagggaaccctggtcaccgttagctctacgcgtgcgtccactaagggtccgtcagtcttcccgctggcgccctgttcccgcagcacgagtgaatctaccgccgcccttgggtgcttggtaaaagactattttcctgagcccgttacagtatcatggaacagcggggctctgactagcggggtgcatacgttccctgcggttctgcaatctagcggactgtattctctctccagtgttgtgaccgtgccaagctccagcctcggtactaaaacttatacatgtaatgtggatcataaaccttcaaataccaaggttgacaaaagggtagagagtaagtacggtggtacccagagttttgggttgttggaccctaaattgtgctatctgttggacggaatcctgttcatttacggagtgatcctgaccgcattgttcctgcgggttaagttttccagatccgcagacgcacccgcttaccaacaagggcagaaccaactctacaatgaacttaatttggggcggagggaagagtacgacgttctggacaaaaggaggggacgagatcccgagatgggcggaaagcctcagcgaaggaagaatccgcaagaggggctttataacgaactccagaaagataaaatggcagaagcctatagtgagattgggatgaagggagaaaggaggaggggtaaaggtcacgatgggttgtaccaaggattgagcacagccactaaagatacctatgatgcgctccacatgcaggccctgccgccaagataa

SEQ ID NO: 22732 - DNA, 2922 bp, synthetic construct
  source 1..2922: mol_type = other DNA
atggccttaccagtgaccgccttgctcctgccgctggccttgctgctccacgccgccaggccggacttcgtgatgacacagagccctgatagcctggccgtgtctctcggcgagcgagtgaccatgagctgcaagtctagccagagcctgctgaacagcggcaaccagaagaactacctgacctggtatcagcagaagcccggccagcctcctaagctgctgatctactgggccagcaccagagaaagcggcgtgcccgatagattttctggctctggcagcggcaccgacttcaccctgacaatttctagcctgcaagccgaggacgtggccgtgtactactgccagaacgactacagctacccctacaccttcggccagggcaccaagctggaaatcaaactcgaggacctgaagaacgtgttcccacctgaggtggccgtgttcgagcctagcgaggccgagatcagccacacccagaaagccaccctcgtgtgcctggctaccggcttctaccccgaccatgtggaactgtcttggtgggtcaacggcaaagaggtgcacagcggcgtgtctaccgacccccagccactgaaagaacagcccgccctgaacgacagccggtactgcctgagcagcagactgagagtgtccgccaccttctggcagaacccccggaaccacttcagatgccaggtgcagttctacggcctgagcgagaacgacgagtggacccaggacagagccaagcccgtgacccagatcgtgtctgccgaagcctggggcagagccgattgcggatcccagagcttcggcctgctggaccccaagctgtgctacctgctggatggcatcctgttcatctacggcgtgatcctgaccgccctgttcctgagagtgaagttcagcagaagcgccgacgcccctgcctaccagcagggacagaaccaactgtacaacgagctgaacctgggcagacgggaagagtacgacgtgctggacaagcggagaggcagggaccctgagatgggcggaaagccccagcggagaaagaacccccaggaaggactgtataacgaactccagaaagacaagatggccgaagcctacagcgagatcggcatgaagggcgagcggagaagaggcaagggccacgatggcctgtaccagggcctgagcaccgccaccaaggacacctatgacgccctgcacatgcaggccctgcctccaagaagggccaagcgatctggatctggagcaacaaacttctcactactcaaacaagcaggtgacgtggaggagaatcccgggcctactagtatggactggatttggcgcatccttttccttgtcggcgctgctaccggcgcgcattccttcgaagtgcaactggttcagagcggagccgagctgaagaaacctggggccagcgtgaaggtgtcctgtaaagccagcggctacacctttaccgactactacatgaaatgggtccgacaggccccaggccagggactcgaatggatcggcgatattatccccagcaacggggccaccttctacaaccagaaattcaagggccgcgtgaccatcaccgtggacaagagcacaagcaccgcctacatggaactgagcagcctgagaagcgaggacaccgccgtgtattattgcgccagaagccatctgctgcgggccagttggttcgcctattggggacagggaaccctggtcaccgttagctctacgcgtatccagaaccctgatcctgccgtgtaccagctgcgggatagcaagagcagcgacaagagcgtgtgtctgttcaccgacttcgacagccagaccaacgtgtcccagagcaaggactccgacgtgtacatcaccgataagaccgtgctggacatgcggagcatggacttcaagagcaactccgccgtggcctggtccaacaagtccgatttcgcctgcgccaacgccttcaacaacagcattatccccgaggacacattcttcccaagccccgagagcagctgcggtaccatcactcaaggtttggcagtgtcaaccatctcatcattctttccacctggctaccaagtgtccttctgcctggtcatggtgctgctgttcgccgtggataccggcctgtacttcagcgtcaagaccaacatccggtccagcaccagagactggaaggaccacaagttcaagtggcggaaggaccctcaggacaagagggccaagcgatctggatctggagcaacaaacttctcactactcaaacaagcaggtgacgtggaggagaatcccgggccttctagaggccatatgaccgagtacaagcccacggtgcgcctcgccacccgcgacgacgtccccagggccgtacgcaccctcgccgccgcgttcgccgactaccccgccacgcgccacaccgtcgatccggaccgccacatcgagcgggtcaccgagctgcaagaactcttcctcacgcgcgtcgggctcgacatcggcaaggtgtgggtcgcggacgacggcgccgcggtggcggtctggaccacgccggagagcgtcgaagcgggggcggtgttcgccgagatcggcccgcgcatggccgagttgagcggttcccggctggccgcgcagcaacagatggaaggcctcctggcgccgcaccggcccaaggagcccgcgtggttcctggccaccgtcggcgtctcgcccgaccaccagggcaagggtctgggcagcgccgtcgtgctccccggagtggaggcggccgagcgcgccggggtgcccgccttcctggagacctccgcgccccgcaacctccccttctacgagcggctcggcttcaccgtcaccgccgacgtcgaggtgcccgaaggaccgcgcacctggtgcatgacccgcaagcccggtgcctga

SEQ ID NO: 22733 - DNA, 2175 bp, synthetic construct
  source 1..2175: mol_type = other DNA
atggccttaccagtgaccgccttgctcctgccgctggccttgctgctccacgccgccaggccggacttcgtgatgacacagagccctgatagcctggccgtgtctctcggcgagcgagtgaccatgagctgcaagtctagccagagcctgctgaacagcggcaaccagaagaactacctgacctggtatcagcagaagcccggccagcctcctaagctgctgatctactgggccagcaccagagaaagcggcgtgcccgatagattttctggctctggcagcggcaccgacttcaccctgacaatttctagcctgcaagccgaggacgtggccgtgtactactgccagaacgactacagctacccctacaccttcggccagggcaccaagctggaaatcaaactcgaggacctgaagaacgtgttcccacctgaggtggccgtgttcgagcctagcgaggccgagatcagccacacccagaaagccaccctcgtgtgcctggctaccggcttctaccccgaccatgtggaactgtcttggtgggtcaacggcaaagaggtgcacagcggcgtgtctaccgacccccagccactgaaagaacagcccgccctgaacgacagccggtactgcctgagcagcagactgagagtgtccgccaccttctggcagaacccccggaaccacttcagatgccaggtgcagttctacggcctgagcgagaacgacgagtggacccaggacagagccaagcccgtgacccagatcgtgtctgccgaagcctggggcagagccgattgcggatcccagagcttcggcctgctggaccccaagctgtgctacctgctggatggcatcctgttcatctacggcgtgatcctgaccgccctgttcctgagagtgaagttcagcagaagcgccgacgcccctgcctaccagcagggacagaaccaactgtacaacgagctgaacctgggcagacgggaagagtacgacgtgctggacaagcggagaggcagggaccctgagatgggcggaaagccccagcggagaaagaacccccaggaaggactgtataacgaactccagaaagacaagatggccgaagcctacagcgagatcggcatgaagggcgagcggagaagaggcaagggccacgatggcctgtaccagggcctgagcaccgccaccaaggacacctatgacgccctgcacatgcaggccctgcctccaagaagggccaagcgatctggatctggagcaacaaacttctcactactcaaacaagcaggtgacgtggaggagaatcccgggcctactagtatggactggatttggcgcatccttttccttgtcggcgctgctaccggcgcgcattccttcgaagtgcaactggttcagagcggagccgagctgaagaaacctggggccagcgtgaaggtgtcctgtaaagccagcggctacacctttaccgactactacatgaaatgggtccgacaggccccaggccagggactcgaatggatcggcgatattatccccagcaacggggccaccttctacaaccagaaattcaagggccgcgtgaccatcaccgtggacaagagcacaagcaccgcctacatggaactgagcagcctgagaagcgaggacaccgccgtgtattattgcgccagaagccatctgctgcgggccagttggttcgcctattggggacagggaaccctggtcaccgttagctctacgcgtatccagaaccctgatcctgccgtgtaccagctgcgggatagcaagagcagcgacaagagcgtgtgtctgttcaccgacttcgacagccagaccaacgtgtcccagagcaaggactccgacgtgtacatcaccgataagtgcgtgctggacatgcggagcatggacttcaagagcaactccgccgtggcctggtccaacaagtccgatttcgcctgcgccaacgccttcaacaacagcattatccccgaggacacattcttcccaagccccgagagcagctgcggctttaccagcgagagctaccagcagggcgtgctgagcgccaccatcctgtacgagatcctgctgggcaaggccaccctgtacgccgtgctggtgtctgccctggtgctgatggctatggtcaagcggaaggacagccggggataa

SEQ ID NO: 22734 - DNA, 19 bp, synthetic construct
  source 1..19: mol_type = other DNA
ggggggggggggggggggg

SEQ ID NO: 22735 - DNA, 19 bp, synthetic construct
  source 1..19: mol_type = other DNA
ggggggggggggggggggg

SEQ ID NO: 22736 - DNA, 19 bp, synthetic construct
  source 1..19: mol_type = other DNA
ggggggggggggggggggg

SEQ ID NO: 22737 - DNA, 19 bp, synthetic construct
  source 1..19: mol_type = other DNA
ggggggggggggggggggg

SEQ ID NO: 22738 - DNA, 19 bp, synthetic construct
  source 1..19: mol_type = other DNA
ggggggggggggggggggg

SEQ ID NO: 22739 - DNA, 19 bp, synthetic construct
  source 1..19: mol_type = other DNA
ggggggggggggggggggg

SEQ ID NO: 22740 - DNA, 19 bp, synthetic construct
  source 1..19: mol_type = other DNA
ggggggggggggggggggg

SEQ ID NO: 22741 - protein, 489 aa, synthetic construct
MALPVTALLLPLALLLHAARPEVQLLESGGGMVQPGGSLRLSCAASGFTFSSYAMSWVRQAPGKGLEWVSAISGSGGRTFYADSVEGRFTISRDNSKNTLYLQMNSLRAEDTAVYYCAKHDYSNYPYFDYWGQGTLVTVSSGGGGSGGGGSGGGGSEIVLTQSPGTLSLSPGERATLSCRASQSIRSSYLAWYQQKPGQAPRLLIYGASSRATGIPDRFSGSGSGTDFTLTISRLEPEDFAVYYCQQYGDLPFTFGPGTKLEIKTRTTTPAPRPPTPAPTIASQPLSLRPEACRPAAGGAVHTRGLDFACDIYIWAPLAGTCGVLLLSLVITLYCKRGRKKLLYIFKQPFMRPVQTTQEEDGCSCRFPEEEEGGCELRVKFSRSADAPAYQQGQNQLYNELNLGRREEYDVLDKRRGRDPEMGGKPRRKNPQEGLYNELQKDKMAEAYSEIGMKGERRRGKGHDGLYQGLSTATKDTYDALHMQALPPR

SEQ ID NO: 22742 - protein, 489 aa, synthetic construct
MALPVTALLLPLALLLHAARPEVQLLESGGGLVQPGGSLRLSCAASGFTFSSYAMSWVRQAPGKGLEWVSVISGSGGRPNYADSVKGRFTISRDNSKNTLYLQMNSLRDEDTAVYYCAKVDYSNYLFFDYWGQGTLVTVSSGGGGSGGGGSGGGGSEIVLTQSPGTLSLSPGEGATLSCRAGQSVRSSYLGWYQQKPGQAPRLLIYGASSRATGIPDRFSGSGSGTDFTLTISRLEPEDFAVYYCQQYGYSPPTFGGGTKLEIKTRTTTPAPRPPTPAPTIASQPLSLRPEACRPAAGGAVHTRGLDFACDIYIWAPLAGTCGVLLLSLVITLYCKRGRKKLLYIFKQPFMRPVQTTQEEDGCSCRFPEEEEGGCELRVKFSRSADAPAYQQGQNQLYNELNLGRREEYDVLDKRRGRDPEMGGKPRRKNPQEGLYNELQKDKMAEAYSEIGMKGERRRGKGHDGLYQGLSTATKDTYDALHMQALPPR

SEQ ID NO: 22743 - protein, 497 aa, synthetic construct; identical to SEQ ID NO: 9393

SEQ ID NO: 22744 - protein, 628 aa, synthetic construct; identical to SEQ ID NO: 9453

SEQ ID NO: 22745 - protein, 824 aa, synthetic construct
MALPVTALLLPLALLLHAARPEVQLVQSGAEVKKPGESLKISCKGSGYGFTSYWIGWVRQMPGKGLEWMGIIHPDDSDTKYSPSFQGQVTISADKSISTAYLQWSSLKASDTAMYYCASSYLRGLWGGYFDFWGQGTLVTVSSLEDLKNVFPPEVAVFEPSEAEISHTQKATLVCLATGFYPDHVELSWWVNGKEVHSGVSTDPQPLKEQPALNDSRYCLSSRLRVSATFWQNPRNHFRCQVQFYGLSENDEWTQDRAKPVTQIVSAEAWGRADCGSQSFGLLDPKLCYLLDGILFIYGVILTALFLRVKFSRSADAPAYQQGQNQLYNELNLGRREEYDVLDKRRGRDPEMGGKPQRRKNPQEGLYNELQKDKMAEAYSEIGMKGERRRGKGHDGLYQGLSTATKDTYDALHMQALPPRRAKRSGSGATNFSLLKQAGDVEENPGPTSMDWIWRILFLVGAATGAHSFELQSVLTQPPSASGTPGQRVTISCSGSSSNIGSNYVNWYQQLPGTAPKLLIYGDYQRPSGVPDRFSGSKSGTSASLAISGLRSEDEADYYCATRDDSLSGSVVFGTGTKLTVLGTRIQNPDPAVYQLRDSKSSDKSVCLFTDFDSQTNVSQSKDSDVYITDKTVLDMRSMDFKSNSAVAWSNKSDFACANAFNNSIIPEDTFFPSPESSCGTQSFGLLDPKLCYLLDGILFIYGVILTALFLRVKFSRSADAPAYQQGQNQLYNELNLGRREEYDVLDKRRGRDPEMGGKPQRRKNPQEGLYNELQKDKMAEAYSEIGMKGERRRGKGHDGLYQGLSTATKDTYDALHMQALPPR

SEQ ID NO: 22746 - protein, 1140 aa, synthetic construct
MALPVTALLLPLALLLHAARPACEVQLLESGGGLIQPGGSLRLSCAASGFTFSSHAMTWVRQAPGKGLEWVSAISGSGDYTHYADSVKGRFTISRDNSKNTVYLQMNSLRAEDSAVYYCAKDEDGGSLLGHRGQGTLVTVSSGTGGGGSGGGGSGGGGSEFDIQMTQSPSSLSASVGDRVTITCKASDHINNWLAWYQQKPGQAPKLLIYGATTLETGVPSRFSGSGSGTDYTLTISSLQPEDFATYYCQQSWNTPWTFGQGTKLEIKRLEDLKNVFPPEVAVFEPSEAEISHTQKATLVCLATGFYPDHVELSWWVNGKEVHSGVCTDPQPLKEQPALNDSRYCLSSRLRVSATFWQNPRNHFRCQVQFYGLSENDEWTQDRAKPVTQIVSAEAWGRADCGFTSESYQQGVLSATILYEILLGKATLYAVLVSALVLMAMVKRKDSRGRAKRSGSGATNFSLLKQAGDVEENPGPTSTMDWIWRILFLVGAATGAHSGPQVQLVESGGGVVQPGGSLRLSCAASFSGYGVSTMAWFRQAPGKGLEGVAAITVGSGNTYYADSVTGRFTISRDNSKNTVYLQMNSLRAEDTAMYYCAVGYLSGGSWDVPGRYNYWGQGTLVTVSSGSGGGGSGGGGSGGGGSFEQVQLQQPGAELVKPGASVKMSCKASGYAFSSYWINWMKQKPGQGLEWIGQIYPGDGDTNYNGKFKGRATLTADTSSSTAYMQLSSLTSEDSAVYFCARSITTVVGCAMDYWGQGTSVTVSSTRIQNPDPAVYQLRDSKSSDKSVCLFTDFDSQTNVSQSKDSDVYITDKCVLDMRSMDFKSNSAVAWSNKSDFACANAFNNSIIPEDTFFPSPESSCDVKLVEKSFETDTNLNFQNLSVIGFRILLLKVAGFNLLMTLRLWSSRAKRSGSGVKQTLNFDLLKLAGDVESNPGPSRGHMTEYKPTVRLATRDDVPRAVRTLAAAFADYPATRHTVDPDRHIERVTELQELFLTRVGLDIGKVWVADDGAAVAVWTTPESVEAGAVFAEIGPRMAELSGSRLAAQQQMEGLLAPHRPKEPAWFLATVGVSPDHQGKGLGSAVVLPGVEAAERAGVPAFLETSAPRNLPFYERLGFTVTADVEVPEGPRTWCMTRKPGA

SEQ ID NO: 22747 - protein, 1140 aa, synthetic construct
MALPVTALLLPLALLLHAARPACQVQLVESGGGVVQPGGSLRLSCAASFSGYGVSTMAWFRQAPGKGLEGVAAITVGSGNTYYADSVKGRFTISRDNSKNTVYLQMNSLRAEDTAMYYCAVGWLSGGSWHVPGRYNYWGQGTLVTVSSGTGGGGSGGGGSGGGGSEFDIQMTQSPSSLSASVGDRVTITCKASDHINNWLAWYQQKPGQAPKLLIYGATTLETGVPSRFSGSGSGTDYTLTISSLQPEDFATYYCQQSWNTPWTFGQGTKLEIKRLEDLKNVFPPEVAVFEPSEAEISHTQKATLVCLATGFYPDHVELSWWVNGKEVHSGVCTDPQPLKEQPALNDSRYCLSSRLRVSATFWQNPRNHFRCQVQFYGLSENDEWTQDRAKPVTQIVSAEAWGRADCGFTSESYQQGVLSATILYEILLGKATLYAVLVSALVLMAMVKRKDSRGRAKRSGSGATNFSLLKQAGDVEENPGPTSATMDWIWRILFLVGAATGAHSGPEVQLVESGGGLVQAGGSLRLSCAASGRTFSMGWFRQAPGKEREFVAAITYSGGSPYYADSVKGRFTISRDNAKNTVYLQMNSLKPEDTAVYYCAANPTYGSDWNAENWGQGTQVTVSSGSGGGGSGGGGSGGGGSFEQVQLQQPGAELVKPGASVKMSCKASGYAFSSYWINWMKQKPGQGLEWIGQIYPGDGDTNYNGKFKGRATLTADTSSSTAYMQLSSLTSEDSAVYFCARSITTVVGCAMDYWGQGTSVTVSSTRIQNPDPAVYQLRDSKSSDKSVCLFTDFDSQTNVSQSKDSDVYITDKCVLDMRSMDFKSNSAVAWSNKSDFACANAFNNSIIPEDTFFPSPESSCDVKLVEKSFETDTNLNFQNLSVIGFRILLLKVAGFNLLMTLRLWSSRAKRSGSGVKQTLNFDLLKLAGDVESNPGPSRGHMTEYKPTVRLATRDDVPRAVRTLAAAFADYPATRHTVDPDRHIERVTELQELFLTRVGLDIGKVWVADDGAAVAVWTTPESVEAGAVFAEIGPRMAELSGSRLAAQQQMEGLLAPHRPKEPAWFLATVGVSPDHQGKGLGSAVVLPGVEAAERAGVPAFLETSAPRNLPFYERLGFTVTADVEVPEGPRTWCMTRKPGA

SEQ ID NO: 22748 - protein, 745 aa, synthetic construct
MALPVTALLLPLALLLHAARPDIQMTQSPSSLSASVGDRVTITCKASQDVGTAVDWYQQKPGKAPKLLIYWASTRHTGVPSRFSGSGSGTDFTLTISSLQPEDFATYYCQQYNSYPLTFGQGTKVEIKRLEDLKNVFPPEVAVFEPSEAEISHTQKATLVCLATGFYPDHVELSWWVNGKEVHSGVSTDPQPLKEQPALNDSRYCLSSRLRVSATFWQNPRNHFRCQVQFYGLSENDEWTQDRAKPVTQIVSAEAWGRADCGSQSFGLLDPKLCYLLDGILFIYGVILTALFLRVKFSRSADAPAYQQGQNQLYNELNLGRREEYDVLDKRRGRDPEMGGKPQRRKNPQEGLYNELQKDKMAEAYSEIGMKGERRRGKGHDGLYQGLSTATKDTYDALHMQALPPRRAKRSGSGATNFSLLKQAGDVEENPGPTSMDWIWRILFLVGAATGAHSFEVQLVESGGGLVQPGGSLRLSCAASGYTFTEYTIHWVRQAPGKGLEWVANINPNNGGTTYNQKFEDRFTISRDNSKNTLYLQMNSLRAEDTAVYYCARGWNFDYWGQGTLVTVSSTRASTKGPSVFPLAPSSKSTSGGTAALGCLVKDYFPEPVTVSWNSGALTSGVHTFPAVLQSSGLYSLSSVVTVPSSSLGTQTYICNVNHKPSNTKVDKRVEPKSCGTLGEPQLCYILDAILFLYGIVLTLLYCRLKIQVRKAAITSYEKSDGVYTGLSTRNQETYETLKHEKPPQ

SEQ ID NO: 22749 - protein, 972 aa, synthetic construct
MALPVTALLLPLALLLHAARPDIQMTQSPSSLSASVGDRVTITCKASQDVGTAVDWYQQKPGKAPKLLIYWASTRHTGVPSRFSGSGSGTDFTLTISSLQPEDFATYYCQQYNSYPLTFGQGTKVEIKRLEDLKNVFPPEVAVFEPSEAEISHTQKATLVCLATGFYPDHVELSWWVNGKEVHSGVSTDPQPLKEQPALNDSRYCLSSRLRVSATFWQNPRNHFRCQVQFYGLSENDEWTQDRAKPVTQIVSAEAWGRADCGSQSFGLLDPKLCYLLDGILFIYGVILTALFLRVKFSRSADAPAYQQGQNQLYNELNLGRREEYDVLDKRRGRDPEMGGKPQRRKNPQEGLYNELQKDKMAEAYSEIGMKGERRRGKGHDGLYQGLSTATKDTYDALHMQALPPRRAKRSGSGATNFSLLKQAGDVEENPGPTSMDWIWRILFLVGAATGAHSFEVQLVESGGGLVQPGGSLRLSCAASGYTFTEYTIHWVRQAPGKGLEWVANINPNNGGTTYNQKFEDRFTISRDNSKNTLYLQMNSLRAEDTAVYYCARGWNFDYWGQGTLVTVSSTRASTKGPSVFPLAPSSKSTSGGTAALGCLVKDYFPEPVTVSWNSGALTSGVHTFPAVLQSSGLYSLSSVVTVPSSSLGTQTYICNVNHKPSNTKVDKRVEPKSCGTITQGLAVSTISSFFPPGYQVSFCLVMVLLFAVDTGLYFSVKTNIRSSTRDWKDHKFKWRKDPQDKRAKRSGSGATNFSLLKQAGDVEENPGPSRGHMTEYKPTVRLATRDDVPRAVRTLAAAFADYPATRHTVDPDRHIERVTELQELFLTRVGLDIGKVWVADDGAAVAVWTTPESVEAGAVFAEIGPRMAELSGSRLAAQQQMEGLLAPHRPKEPAWFLATVGVSPDHQGKGLGSAVVLPGVEAAERAGVPAFLETSAPRNLPFYERLGFTVTADVEVPEGPRTWCMTRKPGA

SEQ ID NO: 22750 - protein, 745 aa, synthetic construct; identical to SEQ ID NO: 22748

SEQ ID NO: 22751 - protein, 1038 aa, synthetic construct
MALPVTALLLPLALLLHAARPACADQLTEEQIAEFKEAFSLFDKDGDGTITTKELGTVMRSLGQNPTEAELQDMINEVDADGNGTIDFPEFLTMMARKMKDTDSEEEIREAFRVFDKDGNGYISAAELRHVMTNLGEKLTDEEVDEMIREADIDGDGQVNYEEFVQMMTAKGGGGSKRRWKKNFIAVSAANRFKKISSSGALEFDIQMTQSPSSLSASVGDRVTITCKASDHINNWLAWYQQKPGQAPKLLIYGATTLETGVPSRFSGSGSGTDYTLTISSLQPEDFATYYCQQSWNTPWTFGQGTKLEIKRLEDLKNVFPPEVAVFEPSEAEISHTQKATLVCLATGFYPDHVELSWWVNGKEVHSGVCTDPQPLKEQPALNDSRYCLSSRLRVSATFWQNPRNHFRCQVQFYGLSENDEWTQDRAKPVTQIVSAEAWGRADCGFTSESYQQGVLSATILYEILLGKATLYAVLVSALVLMAMVKRKDSRGRAKRSGSGATNFSLLKQAGDVEENPGPTSMDWIWRILFLVGAATGAHSFEQVQLQQPGAELVKPGASVKMSCKASGYAFSSYWINWMKQKPGQGLEWIGQIYPGDGDTNYNGKFKGRATLTADTSSSTAYMQLSSLTSEDSAVYFCARSITTVVGCAMDYWGQGTSVTVSSTRIQNPDPAVYQLRDSKSSDKSVCLFTDFDSQTNVSQSKDSDVYITDKCVLDMRSMDFKSNSAVAWSNKSDFACANAFNNSIIPEDTFFPSPESSCDVKLVEKSFETDTNLNFQNLSVIGFRILLLKVAGFNLLMTLRLWSSRAKRSGSGVKQTLNFDLLKLAGDVESNPGPSRGHMTEYKPTVRLATRDDVPRAVRTLAAAFADYPATRHTVDPDRHIERVTELQELFLTRVGLDIGKVWVADDGAAVAVWTTPESVEAGAVFAEIGPRMAELSGSRLAAQQQMEGLLAPHRPKEPAWFLATVGVSPDHQGKGLGSAVVLPGVEAAERAGVPAFLETSAPRNLPFYERLGFTVTADVEVPEGPRTWCMTRKPGA

SEQ ID NO: 22752 - protein, 1490 aa, synthetic construct; identical to SEQ ID NO: 9483

SEQ ID NO: 22753 - protein, 1251 aa, synthetic construct; identical to SEQ ID NO: 9484

SEQ ID NO: 22754 - protein, 1137 aa, synthetic construct
MALPVTALLLPLALLLHAARPACEVQLVESGGGLVQPGGSLRLSCAASAFTFDGPDMAWYRQAPGKGCELVSIISADGRTYYTDSVKGRFTISRDNSKNTVYLQMNSLRAEDTAVYYCALDPRKNCRGGYCCANWGQGTLVTVSSGTGGGGSGGGGSGGGGSEFDIQMTQSPSSLSASVGDRVTITCKASDHINNWLAWYQQKPGQAPKLLIYGATTLETGVPSRFSGSGSGTDYTLTISSLQPEDFATYYCQQSWNTPWTFGQGTKLEIKRLEDLKNVFPPEVAVFEPSEAEISHTQKATLVCLATGFYPDHVELSWWVNGKEVHSGVCTDPQPLKEQPALNDSRYCLSSRLRVSATFWQNPRNHFRCQVQFYGLSENDEWTQDRAKPVTQIVSAEAWGRADCGFTSESYQQGVLSATILYEILLGKATLYAVLVSALVLMAMVKRKDSRGRAKRSGSGATNFSLLKQAGDVEENPGPTSTMDWIWRILFLVGAATGAHSGPQVQLQESGGGLVQAGGSLRLSCAASGSISRIGDMGWYRQAPGKEREFVAAIAAGGTTYYADSVKGRFTISRDNAKNTVYLQMNSLKPEDTAVYYCAASHETQPTQLVYWGAGTQVTVSSGSGGGGSGGGGSGGGGSFEQVQLQQPGAELVKPGASVKMSCKASGYAFSSYWINWMKQKPGQGLEWIGQIYPGDGDTNYNGKFKGRATLTADTSSSTAYMQLSSLTSEDSAVYFCARSITTVVGCAMDYWGQGTSVTVSSTRIQNPDPAVYQLRDSKSSDKSVCLFTDFDSQTNVSQSKDSDVYITDKCVLDMRSMDFKSNSAVAWSNKSDFACANAFNNSIIPEDTFFPSPESSCDVKLVEKSFETDTNLNFQNLSVIGFRILLLKVAGFNLLMTLRLWSSRAKRSGSGVKQTLNFDLLKLAGDVESNPGPSRGHMTEYKPTVRLATRDDVPRAVRTLAAAFADYPATRHTVDPDRHIERVTELQELFLTRVGLDIGKVWVADDGAAVAVWTTPESVEAGAVFAEIGPRMAELSGSRLAAQQQMEGLLAPHRPKEPAWFLATVGVSPDHQGKGLGSAVVLPGVEAAERAGVPAFLETSAPRNLPFYERLGFTVTADVEVPEGPRTWCMTRKPGA

SEQ ID NO: 22755 - protein, 894 aa, synthetic construct
MALPVTALLLPLALLLHAARPDIQMTQSPSSLSASVGDRVTITCKASDHINNWLAWYQQKPGQAPKLLIYGATTLETGVPSRFSGSGSGTDYTLTISSLQPEDFATYYCQQSWNTPWTFGQGTKLEIKRGGGGSGGGGSGGGGSQVQLQQPGAELVKPGASVKMSCKASGYAFSSYWINWMKQKPGQGLEWIGQIYPGDGDTNYNGKFKGRATLTADTSSSTAYMQLSSLTSEDSAVYFCARSITTVVGCAMDYWGQGTSVTVSSTRADQLTEEQIAEFKEAFSLFDKDGDGTITTKELGTVMRSLGQNPTEAELQDMINEVDADGNGTIDFPEFLTMMARKMKDTDSEEEIREAFRVFDKDGNGYISAAELRHVMTNLGEKLTDEEVDEMIREADIDGDGQVNYEEFVQMMTAKGGGGSKRRWKKNFIAVSAANRFKKISSSGALARTTTPAPRPPTPAPTIASQPLSLRPEACRPAAGGAVHTRGLDFACDIYIWAPLAGTCGVLLLSLVITLYCKRGRKKLLYIFKQPFMRPVQTTQEEDGCSCRFPEEEEGGCELRVKFSRSADAPAYQQGQNQLYNELNLGRREEYDVLDKRRGRDPEMGGKPRRKNPQEGLYNELQKDKMAEAYSEIGMKGERRRGKGHDGLYQGLSTATKDTYDALHMQALPPRSSGSGEGRGSLLTCGDVEENPGPHMTEYKPTVRLATRDDVPRAVRTLAAAFADYPATRHTVDPDRHIERVTELQELFLTRVGLDIGKVWVADDGAAVAVWTTPESVEAGAVFAEIGPRMAELSGSRLAAQQQMEGLLAPHRPKEPAWFLATVGVSPDHQGKGLGSAVVLPGVEAAERAGVPAFLETSAPRNLPFYERLGFTVTADVEVPEGPRTWCMTRKPGA

SEQ ID NO: 22756 - protein, 1137 aa, synthetic construct
MALPVTALLLPLALLLHAARPACQVQLQESGPGLVKPSQTLSLTCTVSGGSITTGEFYWNWFRQPPGKGLEWMGAIAASGSTTYSPSFESRTSISRDTSKNQFSLKLSSVTAADTAVYYCGRSFGVAAVTTGQNRGQGTLVTVSSGTGGGGSGGGGSGGGGSEFDIQMTQSPSSLSASVGDRVTITCKASDHINNWLAWYQQKPGQAPKLLIYGATTLETGVPSRFSGSGSGTDYTLTISSLQPEDFATYYCQQSWNTPWTFGQGTKLEIKRLEDLKNVFPPEVAVFEPSEAEISHTQKATLVCLATGFYPDHVELSWWVNGKEVHSGVCTDPQPLKEQPALNDSRYCLSSRLRVSATFWQNPRNHFRCQVQFYGLSENDEWTQDRAKPVTQIVSAEAWGRADCGFTSESYQQGVLSATILYEILLGKATLYAVLVSALVLMAMVKRKDSRGRAKRSGSGATNFSLLKQAGDVEENPGPTSATMDWIWRILFLVGAATGAHSGPEVQLVESGGGLVQAGGSLRLSCAASGRTFSMGWFRQAPGKEREFVAAITYSGGSPYYADSVKGRFTISRDNAKNTVYLQMNSLKPEDTAVYYCAANPTYGSDWNAENWGQGTQVTVSSGSGGGGSGGGGSGGGGSFEQVQLQQPGAELVKPGASVKMSCKASGYAFSSYWINWMKQKPGQGLEWIGQIYPGDGDTSYNGKFKGRATLTADTSSSTAYMQLSSLTSEDSAVYFCARSITTVVGCAMDYWGQGTSVTVSSTRIQNPDPAVYQLRDSKSSDKSVCLFTDFDSQTNVSQSKDSDVYITDKCVLDMRSMDFKSNSAVAWSNKSDFACANAFNNSIIPEDTFFPSPESSCDVKLVEKSFETDTNLNFQNLSVIGFRILLLKVAGFNLLMTLRLWSSRAKRSGSGVKQTLNFDLLKLAGDVESNPGPSRGHMTEYKPTVRLATRDDVPRAVRTLAAAFADYPATRHTVDPDRHIERVTELQELFLTRVGLDIGKVWVADDGAAVAVWTTPESVEAGAVFAEIGPRMAELSGSRLAAQQQMEGLLAPHRPKEPAWFLATVGVSPDHQGKGLGSAVVLPGVEAAERAGVPAFLETSAPRNLPFYERLGFTVTADVEVPEGPRTWCMTRKPGA

SEQ ID NO: 22757 - protein, 749 aa, synthetic construct
MALPVTALLLPLALLLHAARPDVVMTQTPLSLPVSLGDQASISCRSSQSLVHRNGNTYLHWYLQKPGQSPKLLIHKVSNRFSGVPDRFSGSGSGTDFTLKISRVEAEDLGVYFCSQSTHVPPLTFGAGTKLELKRLEDLKNVFPPEVAVFEPSEAEISHTQKATLVCLATGFYPDHVELSWWVNGKEVHSGVSTDPQPLKEQPALNDSRYCLSSRLRVSATFWQNPRNHFRCQVQFYGLSENDEWTQDRAKPVTQIVSAEAWGRADCGSQSFGLLDPKLCYLLDGILFIYGVILTALFLRVKFSRSADAPAYQQGQNQLYNELNLGRREEYDVLDKRRGRDPEMGGKPQRRKNPQEGLYNELQKDKMAEAYSEIGMKGERRRGKGHDGLYQGLSTATKDTYDALHMQALPPRRAKRSGSGATNFSLLKQAGDVEENPGPTSMDWIWRILFLVGAATGAHSFEVQLLQSGPELEKPGASVMISCKASGSSFTGYNMNWVRQNIGKSLEWIGAIDPYYGGTSYNQKFKGRATLTVDKSSSTAYMHLKSLTSEDSAVYYCVSGMEYWGQGTSVTVSSTRASTKGPSVFPLAPSSKSTSGGTAALGCLVKDYFPEPVTVSWNSGALTSGVHTFPAVLQSSGLYSLSSVVTVPSSSLGTQTYICNVNHKPSNTKVDKRVEPKSCGTLGEPQLCYILDAILFLYGIVLTLLYCRLKIQVRKAAITSYEKSDGVYTGLSTRNQETYETLKHEKPPQ

SEQ ID NO: 22758 - protein, 976 aa, synthetic construct
MALPVTALLLPLALLLHAARPDVVMTQTPLSLPVSLGDQASISCRSSQSLVHRNGNTYLHWYLQKPGQSPKLLIHKVSNRFSGVPDRFSGSGSGTDFTLKISRVEAEDLGVYFCSQSTHVPPLTFGAGTKLELKRLEDLKNVFPPEVAVFEPSEAEISHTQKATLVCLATGFYPDHVELSWWVNGKEVHSGVSTDPQPLKEQPALNDSRYCLSSRLRVSATFWQNPRNHFRCQVQFYGLSENDEWTQDRAKPVTQIVSAEAWGRADCGSQSFGLLDPKLCYLLDGILFIYGVILTALFLRVKFSRSADAPAYQQGQNQLYNELNLGRREEYDVLDKRRGRDPEMGGKPQRRKNPQEGLYNELQKDKMAEAYSEIGMKGERRRGKGHDGLYQGLSTATKDTYDALHMQALPPRRAKRSGSGATNFSLLKQAGDVEENPGPTSMDWIWRILFLVGAATGAHSFEVQLLQSGPELEKPGASVMISCKASGSSFTGYNMNWVRQNIGKSLEWIGAIDPYYGGTSYNQKFKGRATLTVDKSSSTAYMHLKSLTSEDSAVYYCVSGMEYWGQGTSVTVSSTRASTKGPSVFPLAPSSKSTSGGTAALGCLVKDYFPEPVTVSWNSGALTSGVHTFPAVLQSSGLYSLSSVVTVPSSSLGTQTYICNVNHKPSNTKVDKRVEPKSCGTITQGLAVSTISSFFPPGYQVSFCLVMVLLFAVDTGLYFSVKTNIRSSTRDWKDHKFKWRKDPQDKRAKRSGSGATNFSLLKQAGDVEENPGPSRGHMTEYKPTVRLATRDDVPRAVRTLAAAFADYPATRHTVDPDRHIERVTELQELFLTRVGLDIGKVWVADDGAAVAVWTTPESVEAGAVFAEIGPRMAELSGSRLAAQQQMEGLLAPHRPKEPAWFLATVGVSPDHQGKGLGSAVVLPGVEAAERAGVPAFLETSAPRNLPFYERLGFTVTADVEVPEGPRTWCMTRKPGA

SEQ ID NO: 22759 - protein, 749 aa, synthetic construct; identical to SEQ ID NO: 22757

SEQ ID NO: 22760 - protein, 967 aa, synthetic construct
MALPVTALLLPLALLLHAARPDVVMTQTPLSLPVSLGDQASISCRSSQSLVHRNGNTYLHWYLQKPGQSPKLLIHKVSNRFSGVPDRFSGSGSGTDFTLKISRVEAEDLGVYFCSQSTHVPPLTFGAGTKLELKRLEDLKNVFPPEVAVFEPSEAEISHTQKATLVCLATGFYPDHVELSWWVNGKEVHSGVSTDPQPLKEQPALNDSRYCLSSRLRVSATFWQNPRNHFRCQVQFYGLSENDEWTQDRAKPVTQIVSAEAWGRADCGSQSFGLLDPKLCYLLDGILFIYGVILTALFLRVKFSRSADAPAYQQGQNQLYNELNLGRREEYDVLDKRRGRDPEMGGKPQRRKNPQEGLYNELQKDKMAEAYSEIGMKGERRRGKGHDGLYQGLSTATKDTYDALHMQALPPRRAKRSGSGATNFSLLKQAGDVEENPGPTSMDWIWRILFLVGAATGAHSFEVQLLQSGPELEKPGASVMISCKASGSSFTGYNMNWVRQNIGKSLEWIGAIDPYYGGTSYNQKFKGRATLTVDKSSSTAYMHLKSLTSEDSAVYYCVSGMEYWGQGTSVTVSSTRIQNPDPAVYQLRDSKSSDKSVCLFTDFDSQTNVSQSKDSDVYITDKTVLDMRSMDFKSNSAVAWSNKSDFACANAFNNSIIPEDTFFPSPESSCGTITQGLAVSTISSFFPPGYQVSFCLVMVLLFAVDTGLYFSVKTNIRSSTRDWKDHKFKWRKDPQDKRAKRSGSGATNFSLLKQAGDVEENPGPSRGHMTEYKPTVRLATRDDVPRAVRTLAAAFADYPATRHTVDPDRHIERVTELQELFLTRVGLDIGKVWVADDGAAVAVWTTPESVEAGAVFAEIGPRMAELSGSRLAAQQQMEGLLAPHRPKEPAWFLATVGVSPDHQGKGLGSAVVLPGVEAAERAGVPAFLETSAPRNLPFYERLGFTVTADVEVPEGPRTWCMTRKPGA

SEQ ID NO: 22761 - protein, 976 aa, synthetic construct; identical to SEQ ID NO: 22758

SEQ ID NO: 22762 - protein, 618 aa, synthetic construct
MALPVTALLLPLALLLHAARPDEIVMTQTPATLSVSAGERVTITCKASQSVSNDVTWYQQKPGQAPRLLIYSASNRYSGVPARFSGSGYGTEFTFTISSVQSEDFAVYFCQQDYSSFGQGTKLEIKRLEDLKNVFPPEVAVFEPSEAEISHTQKATLVCLATGFYPDHVELSWWVNGKEVHSGVCTDPQPLKEQPALNDSRYCLSSRLRVSATFWQNPRNHFRCQVQFYGLSENDEWTQDRAKPVTQIVSAEAWGRADCGFTSESYQQGVLSATILYEILLGKATLYAVLVSALVLMAMVKRKDSRGRAKRSGSGATNFSLLKQAGDVEENPGPTSMDWIWRILFLVGAATGAHSFEQVQLVESGPGVVQPGRSLRISCAVSGFSVTNYGVHWVRQPPGKGLEWLGVIWAGGITNYNSAFMSRLTISKDNSKNTVYLQMNSLRAEDTAMYYCASRGGHYGYALDYWGQGTLVTVSSTRIQNPDPAVYQLRDSKSSDKSVCLFTDFDSQTNVSQSKDSDVYITDKCVLDMRSMDFKSNSAVAWSNKSDFACANAFNNSIIPEDTFFPSPESSCDVKLVEKSFETDTNLNFQNLSVIGFRILLLKVAGFNLLMTLRLWSS

SEQ ID NO: 22763 - protein, 479 aa, synthetic construct; identical to SEQ ID NO: 10156

SEQ ID NO: 22764 - protein, 480 aa, synthetic construct; identical to SEQ ID NO: 10437

SEQ ID NO: 22765 - protein, 759 aa, synthetic construct
MALPVTALLLPLALLLHAARPEVQLVESGGGLVQAGGSLRLSCAASGRTFSMGWFRQAPGKEREFVAAITYSGGSPYYADSVKGRFTISRDNAKNTVYLQMNSLKPEDTAVYYCAANPTYGSDWNAENWGQGTQVTVSSGTGGGGSGGGGSGGGGSEFDIQMTQSPSSLSASVGDRVTITCKASDHINNWLAWYQQKPGQAPKLLIYGATTLETGVPSRFSGSGSGTDYTLTISSLQPEDFATYYCQQSWNTPWTFGQGTKLEIKRLEDLKNVFPPEVAVFEPSEAEISHTQKATLVCLATGFYPDHVELSWWVNGKEVHSGVCTDPQPLKEQPALNDSRYCLSSRLRVSATFWQNPRNHFRCQVQFYGLSENDEWTQDRAKPVTQIVSAEAWGRADCGFTSESYQQGVLSATILYEILLGKATLYAVLVSALVLMAMVKRKDSRGRAKRSGSGATNFSLLKQAGDVEENPGPTSMDWIWRILFLVGAATGAHSFEQVQLQQPGAELVKPGASVKMSCKASGYAFSSYWINWMKQKPGQGLEWIGQIYPGDGDTNYNGKFKGRATLTADTSSSTAYMQLSSLTSEDSAVYFCARSITTVVGCAMDYWGQGTSVTVSSTRIQNPDPAVYQLRDSKSSDKSVCLFTDFDSQTNVSQSKDSDVYITDKCVLDMRSMDFKSNSAVAWSNKSDFACANAFNNSIIPEDTFFPSPESSCDVKLVEKSFETDTNLNFQNLSVIGFRILLLKVAGFNLLMTLRLWSS

SEQ ID NO: 22766 - protein, 820 aa, synthetic construct; identical to SEQ ID NO: 12044

SEQ ID NO: 22767 - protein, 904 aa, synthetic construct
MALPVTALLLPLALLLHAARPACQVQLQESGPGLVKPSQTLSLTCTVSGGSITTGEFYWNWFRQPPGKGLEWMGAIAASGSTTYSPSFESRTSISRDTSKNQFSLKLSSVTAADTAVYYCGRSFGVAAVTTGQNRGQGTLVTVSSGTGGGGSGGGGSGGGGSEFDIQMTQSPSSLSASVGDRVTITCKASDHINNWLAWYQQKPGQAPKLLIYGATTLETGVPSRFSGSGSGTDYTLTISSLQPEDFATYYCQQSWNTPWTFGQGTKLEIKRLEDLKNVFPPEVAVFEPSEAEISHTQKATLVCLATGFYPDHVELSWWVNGKEVHSGVCTDPQPLKEQPALNDSRYCLSSRLRVSATFWQNPRNHFRCQVQFYGLSENDEWTQDRAKPVTQIVSAEAWGRADCGFTSESYQQGVLSATILYEILLGKATLYAVLVSALVLMAMVKRKDSRGRAKRSGSGATNFSLLKQAGDVEENPGPTSATMDWIWRILFLVGAATGAHSGPEVQLVESGGGLVQAGGSLRLSCAASGRTFTMGWFRQAPGKEREFVAAISLSPTLAYYADSVKGRFTISRDNAKNTVVLQMNSLKPEDTALYYCAADRKSVMSIRPDYWGQGTQVTVSSGSGGGGSGGGGSGGGGSFEQVQLQQPGAELVKPGASVKMSCKASGYAFSSYWINWMKQKPGQGLEWIGQIYPGDGDTNYNGKFKGRATLTADTSSSTAYMQLSSLTSEDSAVYFCARSITTVVGCAMDYWGQGTSVTVSSTRIQNPDPAVYQLRDSKSSDKSVCLFTDFDSQTNVSQSKDSDVYITDKCVLDMRSMDFKSNSAVAWSNKSDFACANAFNNSIIPEDTFFPSPESSCDVKLVEKSFETDTNLNFQNLSVIGFRILLLKVAGFNLLMTLRLWSS

SEQ ID NO: 22768 - protein, 961 aa, synthetic construct
MALPVTALLLPLALLLHAARPACQVQLQESGPGLVKPSQTLSLTCTVSGGSITTGEFYWNWFRQPPGKGLEWMGAIAASGSTTYSPSFESRTSISRDTSKNQFSLKLSSVTAADTAVYYCGRSFGVAAVTTGQNRGQGTLVTVSSGTGGGGSGGGGSGGGGSEFDIQMTQSPSSLSASVGDRVTITCKASDHINNWLAWYQQKPGQAPKLLIYGATTLETGVPSRFSGSGSGTDYTLTISSLQPEDFATYYCQQSWNTPWTFGQGTKLEIKRLEDLKNVFPPEVAVFEPSEAEISHTQKATLVCLATGFYPDHVELSWWVNGKEVHSGVSTDPQPLKEQPALNDSRYCLSSRLRVSATFWQNPRNHFRCQVQFYGLSENDEWTQDRAKPVTQIVSAEAWGRADCGSQSFGLLDPKLCYLLDGILFIYGVILTALFLRVKFSRSADAPAYQQGQNQLYNELNLGRREEYDVLDKRRGRDPEMGGKPQRRKNPQEGLYNELQKDKMAEAYSEIGMKGERRRGKGHDGLYQGLSTATKDTYDALHMQALPPRRAKRSGSGATNFSLLKQAGDVEENPGPTSMDWIWRILFLVGAATGAHSFEQVQLQQPGAELVKPGASVKMSCKASGYAFSSYWINWMKQKPGQGLEWIGQIYPGDGDTNYNGKFKGRATLTADTSSSTAYMQLSSLTSEDSAVYFCARSITTVVGCAMDYWGQGTSVTVSSTRIQNPDPAVYQLRDSKSSDKSVCLFTDFDSQTNVSQSKDSDVYITDKTVLDMRSMDFKSNSAVAWSNKSDFACANAFNNSIIPEDTFFPSPESSCGTQSFGLLDPKLCYLLDGILFIYGVILTALFLRVKFSRSADAPAYQQGQNQLYNELNLGRREEYDVLDKRRGRDPEMGGKPQRRKNPQEGLYNELQKDKMAEAYSEIGMKGERRRGKGHDGLYQGLSTATKDTYDALHMQALPPR

SEQ ID NO: 22769 - protein, 886 aa, synthetic construct
MALPVTALLLPLALLLHAARPACQVQLQESGPGLVKPSQTLSLTCTVSGGSITTGEFYWNWFRQPPGKGLEWMGAIAASGSTTYSPSFESRTSISRDTSKNQFSLKLSSVTAADTAVYYCGRSFGVAAVTTGQNRGQGTLVTVSSGTGGGGSGGGGSGGGGSEFDIQMTQSPSSLSASVGDRVTITCKASDHINNWLAWYQQKPGQAPKLLIYGATTLETGVPSRFSGSGSGTDYTLTISSLQPEDFATYYCQQSWNTPWTFGQGTKLEIKRLEDLKNVFPPEVAVFEPSEAEISHTQKATLVCLATGFYPDHVELSWWVNGKEVHSGVSTDPQPLKEQPALNDSRYCLSSRLRVSATFWQNPRNHFRCQVQFYGLSENDEWTQDRAKPVTQIVSAEAWGRADCGSQSFGLLDPKLCYLLDGILFIYGVILTALFLRVKFSRSADAPAYQQGQNQLYNELNLGRREEYDVLDKRRGRDPEMGGKPQRRKNPQEGLYNELQKDKMAEAYSEIGMKGERRRGKGHDGLYQGLSTATKDTYDALHMQALPPRRAKRSGSGATNFSLLKQAGDVEENPGPTSMDWIWRILFLVGAATGAHSFEQVQLQQPGAELVKPGASVKMSCKASGYAFSSYWINWMKQKPGQGLEWIGQIYPGDGDTNYNGKFKGRATLTADTSSSTAYMQLSSLTSEDSAVYFCARSITTVVGCAMDYWGQGTSVTVSSTRIQNPDPAVYQLRDSKSSDKSVCLFTDFDSQTNVSQSKDSDVYITDKTVLDMRSMDFKSNSAVAWSNKSDFACANAFNNSIIPEDTFFPSPESSCGTLGEPQLCYILDAILFLYGIVLTLLYCRLKIQVRKAAITSYEKSDGVYTGLSTRNQETYETLKHEKPPQ

SEQ ID NO: 22770 - protein, 1100 aa, synthetic construct
MALPVTALLLPLALLLHAARPACQVQLQESGPGLVKPSQTLSLTCTVSGGSITTGEFYWNWFRQPPGKGLEWMGAIAASGSTTYSPSFESRTSISRDTSKNQFSLKLSSVTAADTAVYYCGRSFGVAAVTTGQNRGQGTLVTVSSGTGGGGSGGGGSGGGGSEFDIQMTQSPSSLSASVGDRVTITCKASDHINNWLAWYQQKPGQAPKLLIYGATTLETGVPSRFSGSGSGTDYTLTISSLQPEDFATYYCQQSWNTPWTFGQGTKLEIKRLEDLKNVFPPEVAVFEPSEAEISHTQKATLVCLATGFYPDHVELSWWVNGKEVHSGVSTDPQPLKEQPALNDSRYCLSSRLRVSATFWQNPRNHFRCQVQFYGLSENDEWTQDRAKPVTQIVSAEAWGRADCGSQSFGLLDPKLCYLLDGILFIYGVILTALFLRVKFSRSADAPAYQQGQNQLYNELNLGRREEYDVLDKRRGRDPEMGGKPQRRKNPQEGLYNELQKDKMAEAYSEIGMKGERRRGKGHDGLYQGLSTATKDTYDALHMQALPPRRAKRSGSGATNFSLLKQAGDVEENPGPTSATMDWIWRILFLVGAATGAHSGPEVQLVESGGGLVQAGGSLRLSCAASGRTFTMGWFRQAPGKEREFVAAISLSPTLAYYADSVKGRFTISRDNAKNTVVLQMNSLKPEDTALYYCAADRKSVMSIRPDYWGQGTQVTVSSGSGGGGSGGGGSGGGGSFEQVQLQQPGAELVKPGASVKMSCKASGYAFSSYWINWMKQKPGQGLEWIGQIYPGDGDTNYNGKFKGRATLTADTSSSTAYMQLSSLTSEDSAVYFCARSITTVVGCAMDYWGQGTSVTVSSTRIQNPDPAVYQLRDSKSSDKSVCLFTDFDSQTNVSQSKDSDVYITDKTVLDMRSMDFKSNSAVAWSNKSDFACANAFNNSIIPEDTFFPSPESSCGTQSFGLLDPKLCYLLDGILFIYGVILTALFLRVKFSRSADAPAYQQGQNQLYNELNLGRREEYDVLDKRRGRDPEMGGKPQRRKNPQEGLYNELQKDKMAEAYSEIGMKGERRRGKGHDGLYQGLSTATKDTYDALHMQALPPR

SEQ ID NO: 22771 - protein, 1100 aa, synthetic construct
MALPVTALLLPLALLLHAARPACQVQLQESGPGLVKPSQTLSLTCTVSGGSITTGEFYWNWFRQPPGKGLEWMGAIAASGSTTYSPSFESRTSISRDTSKNQFSLKLSSVTAADTAVYYCGRSFGVAAVTTGQNRGQGTLVTVSSGTGGGGSGGGGSGGGGSEFDIQMTQSPSSLSASVGDRVTITCKASDHINNWLAWYQQKPGQAPKLLIYGATTLETGVPSRFSGSGSGTDYTLTISSLQPEDFATYYCQQSWNTPWTFGQGTKLEIKRLEDLKNVFPPEVAVFEPSEAEISHTQKATLVCLATGFYPDHVELSWWVNGKEVHSGVSTDPQPLKEQPALNDSRYCLSSRLRVSATFWQNPRNHFRCQVQFYGLSENDEWTQDRAKPVTQIVSAEAWGRADCGSQSFGLLDPKLCYLLDGILFIYGVILTALFLRVKFSRSADAPAYQQGQNQLYNELNLGRREEYDVLDKRRGRDPEMGGKPQRRKNPQEGLYNELQKDKMAEAYSEIGMKGERRRGKGHDGLYQGLSTATKDTYDALHMQALPPRRAKRSGSGATNFSLLKQAGDVEENPGPTSATMDWIWRILFLVGAATGAHSGPEVQLVESGGGLVQAGGSLRLSCAASGRTFSMGWFRQAPGKEREFVAAITYSGGSPYYADSVKGRFTISRDNAKNTVYLQMNSLKPEDTAVYYCAANPTYGSDWNAENWGQGTQVTVSSGSGGGGSGGGGSGGGGSFEQVQLQQPGAELVKPGASVKMSCKASGYAFSSYWINWMKQKPGQGLEWIGQIYPGDGDTNYNGKFKGRATLTADTSSSTAYMQLSSLTSEDSAVYFCARSITTVVGCAMDYWGQGTSVTVSSTRIQNPDPAVYQLRDSKSSDKSVCLFTDFDSQTNVSQSKDSDVYITDKTVLDMRSMDFKSNSAVAWSNKSDFACANAFNNSIIPEDTFFPSPESSCGTQSFGLLDPKLCYLLDGILFIYGVILTALFLRVKFSRSADAPAYQQGQNQLYNELNLGRREEYDVLDKRRGRDPEMGGKPQRRKNPQEGLYNELQKDKMAEAYSEIGMKGERRRGKGHDGLYQGLSTATKDTYDALHMQALPPR

SEQ ID NO: 22772 - protein, 797 aa, synthetic construct
MALPVTALLLPLALLLHAARPDFVMTQSPDSLAVSLGERVTMSCKSSQSLLNSGNQKNYLTWYQQKPGQPPKLLIYWASTRESGVPDRFSGSGSGTDFTLTISSLQAEDVAVYYCQNDYSYPYTFGQGTKLEIKLEGQPKANPTVTLFPPSSEELQANKATLVCLISDFYPGAVTVAWKADGSPVKAGVETTKPSKQSNNKYAASSYLSLTPEQWKSHRSYSCQVTHEGSTVEKTVAPTECSGSQSFGLLDPKLCYLLDGILFIYGVILTALFLRVKFSRSADAPAYQQGQNQLYNELNLGRREEYDVLDKRRGRDPEMGGKPQRRKNPQEGLYNELQKDKMAEAYSEIGMKGERRRGKGHDGLYQGLSTATKDTYDALHMQALPPRRAKRSGSGATNFSLLKQAGDVEENPGPTSMDWIWRILFLVGAATGAHSFEVQLVQSGAELKKPGASVKVSCKASGYTFTDYYMKWVRQAPGQGLEWIGDIIPSNGATFYNQKFKGRVTITVDKSTSTAYMELSSLRSEDTAVYYCARSHLLRASWFAYWGQGTLVTVSSTRIQNPDPAVYQLRDSKSSDKSVCLFTDFDSQTNVSQSKDSDVYITDKTVLDMRSMDFKSNSAVAWSNKSDFACANAFNNSIIPEDTFFPSPESSCGTQSFGLLDPKLCYLLDGILFIYGVILTALFLRVKFSRSADAPAYQQGQNQLYNELNLGRREEYDVLDKRRGRDPEMGGKPQRRKNPQEGLYNELQKDKMAEAYSEIGMKGERRRGKGHDGLYQGLSTATKDTYDALHMQALPPR

SEQ ID NO: 22773 - protein, 722 aa, synthetic construct
MALPVTALLLPLALLLHAARPDFVMTQSPDSLAVSLGERVTMSCKSSQSLLNSGNQKNYLTWYQQKPGQPPKLLIYWASTRESGVPDRFSGSGSGTDFTLTISSLQAEDVAVYYCQNDYSYPYTFGQGTKLEIKLEGQPKANPTVTLFPPSSEELQANKATLVCLISDFYPGAVTVAWKADGSPVKAGVETTKPSKQSNNKYAASSYLSLTPEQWKSHRSYSCQVTHEGSTVEKTVAPTECSGSLGEPQLCYILDAILFLYGIVLTLLYCRLKIQVRKAAITSYEKSDGVYTGLSTRNQETYETLKHEKPPQRAKRSGSGATNFSLLKQAGDVEENPGPTSMDWIWRILFLVGAATGAHSFEVQLVQSGAELKKPGASVKVSCKASGYTFTDYYMKWVRQAPGQGLEWIGDIIPSNGATFYNQKFKGRVTITVDKSTSTAYMELSSLRSEDTAVYYCARSHLLRASWFAYWGQGTLVTVSSTRIQNPDPAVYQLRDSKSSDKSVCLFTDFDSQTNVSQSKDSDVYITDKTVLDMRSMDFKSNSAVAWSNKSDFACANAFNNSIIPEDTFFPSPESSCGTQSFGLLDPKLCYLLDGILFIYGVILTALFLRVKFSRSADAPAYQQGQNQLYNELNLGRREEYDVLDKRRGRDPEMGGKPQRRKNPQEGLYNELQKDKMAEAYSEIGMKGERRRGKGHDGLYQGLSTATKDTYDALHMQALPPR

SEQ ID NO: 22774 - protein, 755 aa, synthetic construct
MALPVTALLLPLALLLHAARPDFVMTQSPDSLAVSLGERVTMSCKSSQSLLNSGNQKNYLTWYQQKPGQPPKLLIYWASTRESGVPDRFSGSGSGTDFTLTISSLQAEDVAVYYCQNDYSYPYTFGQGTKLEIKLEDLKNVFPPEVAVFEPSEAEISHTQKATLVCLATGFYPDHVELSWWVNGKEVHSGVSTDPQPLKEQPALNDSRYCLSSRLRVSATFWQNPRNHFRCQVQFYGLSENDEWTQDRAKPVTQIVSAEAWGRADCGSQSFGLLDPKLCYLLDGILFIYGVILTALFLRVKFSRSADAPAYQQGQNQLYNELNLGRREEYDVLDKRRGRDPEMGGKPQRRKNPQEGLYNELQKDKMAEAYSEIGMKGERRRGKGHDGLYQGLSTATKDTYDALHMQALPPRRAKRSGSGATNFSLLKQAGDVEENPGPTSMDWIWRILFLVGAATGAHSFEVQLVQSGAELKKPGASVKVSCKASGYTFTDYYMKWVRQAPGQGLEWIGDIIPSNGATFYNQKFKGRVTITVDKSTSTAYMELSSLRSEDTAVYYCARSHLLRASWFAYWGQGTLVTVSSTRASTKGPSVFPLAPSSKSTSGGTAALGCLVKDYFPEPVTVSWNSGALTSGVHTFPAVLQSSGLYSLSSVVTVPSSSLGTQTYICNVNHKPSNTKVDKRVEPKSCGTLGEPQLCYILDAILFLYGIVLTLLYCRLKIQVRKAAITSYEKSDGVYTGLSTRNQETYETLKHEKPPQ

SEQ ID NO: 22775 - protein, 982 aa, synthetic construct
MALPVTALLLPLALLLHAARPDFVMTQSPDSLAVSLGERVTMSCKSSQSLLNSGNQKNYLTWYQQKPGQPPKLLIYWASTRESGVPDRFSGSGSGTDFTLTISSLQAEDVAVYYCQNDYSYPYTFGQGTKLEIKLEDLKNVFPPEVAVFEPSEAEISHTQKATLVCLATGFYPDHVELSWWVNGKEVHSGVSTDPQPLKEQPALNDSRYCLSSRLRVSATFWQNPRNHFRCQVQFYGLSENDEWTQDRAKPVTQIVSAEAWGRADCGSQSFGLLDPKLCYLLDGILFIYGVILTALFLRVKFSRSADAPAYQQGQNQLYNELNLGRREEYDVLDKRRGRDPEMGGKPQRRKNPQEGLYNELQKDKMAEAYSEIGMKGERRRGKGHDGLYQGLSTATKDTYDALHMQALPPRRAKRSGSGATNFSLLKQAGDVEENPGPTSMDWIWRILFLVGAATGAHSFEVQLVQSGAELKKPGASVKVSCKASGYTFTDYYMKWVRQAPGQGLEWIGDIIPSNGATFYNQKFKGRVTITVDKSTSTAYMELSSLRSEDTAVYYCARSHLLRASWFAYWGQGTLVTVSSTRASTKGPSVFPLAPSSKSTSGGTAALGCLVKDYFPEPVTVSWNSGALTSGVHTFPAVLQSSGLYSLSSVVTVPSSSLGTQTYICNVNHKPSNTKVDKRVEPKSCGTITQGLAVSTISSFFPPGYQVSFCLVMVLLFAVDTGLYFSVKTNIRSSTRDWKDHKFKWRKDPQDKRAKRSGSGATNFSLLKQAGDVEENPGPSRGHMTEYKPTVRLATRDDVPRAVRTLAAAFADYPATRHTVDPDRHIERVTELQELFLTRVGLDIGKVWVADDGAAVAVWTTPESVEAGAVFAEIGPRMAELSGSRLAAQQQMEGLLAPHRPKEPAWFLATVGVSPDHQGKGLGSAVVLPGVEAAERAGVPAFLETSAPRNLPFYERLGFTVTADVEVPEGPRTWCMTRKPGA

SEQ ID NO: 22776 - protein, 755 aa, synthetic construct; identical to SEQ ID NO: 22774

SEQ ID NO: 22777 - protein, 830 aa, synthetic construct
MALPVTALLLPLALLLHAARPDFVMTQSPDSLAVSLGERVTMSCKSSQSLLNSGNQKNYLTWYQQKPGQPPKLLIYWASTRESGVPDRFSGSGSGTDFTLTISSLQAEDVAVYYCQNDYSYPYTFGQGTKLEIKLEDLKNVFPPEVAVFEPSEAEISHTQKATLVCLATGFYPDHVELSWWVNGKEVHSGVSTDPQPLKEQPALNDSRYCLSSRLRVSATFWQNPRNHFRCQVQFYGLSENDEWTQDRAKPVTQIVSAEAWGRADCGSQSFGLLDPKLCYLLDGILFIYGVILTALFLRVKFSRSADAPAYQQGQNQLYNELNLGRREEYDVLDKRRGRDPEMGGKPQRRKNPQEGLYNELQKDKMAEAYSEIGMKGERRRGKGHDGLYQGLSTATKDTYDALHMQALPPRRAKRSGSGATNFSLLKQAGDVEENPGPTSMDWIWRILFLVGAATGAHSFEVQLVQSGAELKKPGASVKVSCKASGYTFTDYYMKWVRQAPGQGLEWIGDIIPSNGATFYNQKFKGRVTITVDKSTSTAYMELSSLRSEDTAVYYCARSHLLRASWFAYWGQGTLVTVSSTRASTKGPSVFPLAPCSRSTSESTAALGCLVKDYFPEPVTVSWNSGALTSGVHTFPAVLQSSGLYSLSSVVTVPSSSLGTKTYTCNVDHKPSNTKVDKRVESKYGGTQSFGLLDPKLCYLLDGILFIYGVILTALFLRVKFSRSADAPAYQQGQNQLYNELNLGRREEYDVLDKRRGRDPEMGGKPQRRKNPQEGLYNELQKDKMAEAYSEIGMKGERRRGKGHDGLYQGLSTATKDTYDALHMQALPPR

SEQ ID NO: 22778 - protein, 973 aa, synthetic construct
MALPVTALLLPLALLLHAARPDFVMTQSPDSLAVSLGERVTMSCKSSQSLLNSGNQKNYLTWYQQKPGQPPKLLIYWASTRESGVPDRFSGSGSGTDFTLTISSLQAEDVAVYYCQNDYSYPYTFGQGTKLEIKLEDLKNVFPPEVAVFEPSEAEISHTQKATLVCLATGFYPDHVELSWWVNGKEVHSGVSTDPQPLKEQPALNDSRYCLSSRLRVSATFWQNPRNHFRCQVQFYGLSENDEWTQDRAKPVTQIVSAEAWGRADCGSQSFGLLDPKLCYLLDGILFIYGVILTALFLRVKFSRSADAPAYQQGQNQLYNELNLGRREEYDVLDKRRGRDPEMGGKPQRRKNPQEGLYNELQKDKMAEAYSEIGMKGERRRGKGHDGLYQGLSTATKDTYDALHMQALPPRRAKRSGSGATNFSLLKQAGDVEENPGPTSMDWIWRILFLVGAATGAHSFEVQLVQSGAELKKPGASVKVSCKASGYTFTDYYMKWVRQAPGQGLEWIGDIIPSNGATFYNQKFKGRVTITVDKSTSTAYMELSSLRSEDTAVYYCARSHLLRASWFAYWGQGTLVTVSSTRIQNPDPAVYQLRDSKSSDKSVCLFTDFDSQTNVSQSKDSDVYITDKTVLDMRSMDFKSNSAVAWSNKSDFACANAFNNSIIPEDTFFPSPESSCGTITQGLAVSTISSFFPPGYQVSFCLVMVLLFAVDTGLYFSVKTNIRSSTRDWKDHKFKWRKDPQDKRAKRSGSGATNFSLLKQAGDVEENPGPSRGHMTEYKPTVRLATRDDVPRAVRTLAAAFADYPATRHTVDPDRHIERVTELQELFLTRVGLDIGKVWVADDGAAVAVWTTPESVEAGAVFAEIGPRMAELSGSRLAAQQQMEGLLAPHRPKEPAWFLATVGVSPDHQGKGLGSAVVLPGVEAAERAGVPAFLETSAPRNLPFYERLGFTVTADVEVPEGPRTWCMTRKPGA

SEQ ID NO: 22779 - protein, 724 aa, synthetic construct
MALPVTALLLPLALLLHAARPDFVMTQSPDSLAVSLGERVTMSCKSSQSLLNSGNQKNYLTWYQQKPGQPPKLLIYWASTRESGVPDRFSGSGSGTDFTLTISSLQAEDVAVYYCQNDYSYPYTFGQGTKLEIKLEDLKNVFPPEVAVFEPSEAEISHTQKATLVCLATGFYPDHVELSWWVNGKEVHSGVSTDPQPLKEQPALNDSRYCLSSRLRVSATFWQNPRNHFRCQVQFYGLSENDEWTQDRAKPVTQIVSAEAWGRADCGSQSFGLLDPKLCYLLDGILFIYGVILTALFLRVKFSRSADAPAYQQGQNQLYNELNLGRREEYDVLDKRRGRDPEMGGKPQRRKNPQEGLYNELQKDKMAEAYSEIGMKGERRRGKGHDGLYQGLSTATKDTYDALHMQALPPRRAKRSGSGATNFSLLKQAGDVEENPGPTSMDWIWRILFLVGAATGAHSFEVQLVQSGAELKKPGASVKVSCKASGYTFTDYYMKWVRQAPGQGLEWIGDIIPSNGATFYNQKFKGRVTITVDKSTSTAYMELSSLRSEDTAVYYCARSHLLRASWFAYWGQGTLVTVSSTRIQNPDPAVYQLRDSKSSDKSVCLFTDFDSQTNVSQSKDSDVYITDKCVLDMRSMDFKSNSAVAWSNKSDFACANAFNNSIIPEDTFFPSPESSCGFTSESYQQGVLSATILYEILLGKATLYAVLVSALVLMAMVKRKDSRG

SEQ ID NO: 22780 - protein, 9 aa, synthetic construct
IMDQVPFSV

SEQ ID NO: 22781 - protein, 9 aa, synthetic construct
YLEPGPVTV

SEQ ID NO: 22782 - protein, 9 aa, synthetic construct
KTWGQYWQV

SEQ ID NO: 22783 - protein, 9 aa, synthetic construct
NLTISDVSV

SEQ ID NO: 22784 - protein, 9 aa, synthetic construct
LLLTVLTVV

SEQ ID NO: 22785 - protein, 9 aa, synthetic construct
LLFGYPVYV

SEQ ID NO: 22786 - protein, 9 aa, synthetic construct
ILAKFLHWL

SEQ ID NO: 22787 - protein, 9 aa, synthetic construct
RLVDDFLLV

SEQ ID NO: 22788 - protein, 9 aa, synthetic construct
SLYNTVATL

SEQ ID NO: 22789 - protein, 9 aa, synthetic construct
NLVPMVATV

SEQ ID NO: 22790 - protein, 10 aa, synthetic construct
EAAGIGILTV

SEQ ID NO: 22791 - protein, 9 aa, synthetic construct
SVRDRLARL

SEQ ID NO: 22792 - protein, 10 aa, synthetic construct
LLDFVRFMGV

SEQ ID NO: 22793 - protein, 9 aa, synthetic construct
VLQELNVTV

SEQ ID NO: 22794 - protein, 9 aa, synthetic construct
LVVVGAVGV

SEQ ID NO: 22795 - protein, 10 aa, synthetic construct
VVVGADGVGK

SEQ ID NO: 22796 - protein, 9 aa, synthetic construct
LVVVGAGGV

SEQ ID NO: 22797 - protein, 9 aa, synthetic construct
QLSLLMWIT

SEQ ID NO: 22798 - protein, 9 aa, synthetic construct
SLLMWITQC

SEQ ID NO: 22799 - protein, 11 aa, synthetic construct
SLLMWITQCFL

SEQ ID NO: 22800 - protein, 10 aa, synthetic construct
KLLGPHVEGL

SEQ ID NO: 22801 - protein, 9 aa, synthetic construct
FMNKFIYEI

SEQ ID NO: 22802 - protein, 9 aa, synthetic construct
FLWGPRALV

SEQ ID NO: 22803 - protein, 9 aa, synthetic construct
KVAELVHFL

SEQ ID NO: 22804 - protein, 10 aa, synthetic construct
GVYDGREHTV

SEQ ID NO: 22805 - protein, 9 aa, synthetic construct
VLDFAPPGA

SEQ ID NO: 22806 - protein, 9 aa, synthetic construct
RMFPNAPYL

SEQ ID NO: 22807 - protein, 10 aa, synthetic construct
TIHDIILECV

SEQ ID NO: 22808 - protein, 9 aa, synthetic construct
YMLDLQPET

SEQ ID NO: 22809 - protein, 9 aa, synthetic construct
IMQLMPFGC

SEQ ID NO: 22810 - protein, 9 aa, synthetic construct
VLHDDLLEA

SEQ ID NO: 22811 - protein, 10 aa, synthetic construct
RPIPIKYKAM

SEQ ID NO: 22812 - protein, 8 aa, synthetic construct
GLCTLVAM

SEQ ID NO: 22813 - protein, 9 aa, synthetic construct
CLGGLLTMV

SEQ ID NO: 22814 - protein, 9 aa, synthetic construct
GILGFVFTL

SEQ ID NO: 22815 - protein, 9 aa, synthetic construct
VMNILLQYV

SEQ ID NO: 22816 - protein, 9 aa, synthetic construct
ALNTLVKQL

SEQ ID NO: 22817 - protein, 10 aa, synthetic construct
GMNQRPILTI

SEQ ID NO: 22818 - protein, 9 aa, synthetic construct
HMTEVVRHC

SEQ ID NO: 22819 - DNA, 354 bp, synthetic construct
  source 1..354: mol_type = other DNA
gaggacctgaagaacgtgttcccacctgaggtggccgtgttcgagcctagcgaggccgagatcagccacacccagaaagccaccctcgtgtgcctggctaccggcttctaccccgaccatgtggaactgtcttggtgggtcaacggcaaagaggtgcacagcggcgtgtctaccgacccccagccactgaaagaacagcccgccctgaacgacagccggtactgcctgagcagcagactgagagtgtccgccaccttctggcagaacccccggaaccacttcagatgccaggtgcagttctacggcctgagcgagaacgacgagtggacccaggacagagccaagcccgtgacc

SEQ ID NO: 22820 - DNA, 183 bp, synthetic construct; identical to SEQ ID NO: 17222
  source 1..183: mol_type = other DNA

SEQ ID NO: 22821 - DNA, 318 bp, synthetic construct; identical to SEQ ID NO: 601
  source 1..318: mol_type = other DNA

SEQ ID NO: 22822 - DNA, 357 bp, synthetic construct
  source 1..357: mol_type = other DNA
gacaagcagctggacgccgacgtgtcccccaagcctaccatcttcctgccctctatcgccgagacaaagctccagaaggccggcacctacctgtgcctgctggaaaagttcttcccagatgtgattaagatccactggcaggaaaagaagtccaacaccatcctgggcagccaggaaggcaacaccatgaagaccaacgacacctacatgaagttcagctggctgaccgtgcccgagaagtccctggacaaagaacacagatgcatcgtgcggcacgaaaacaacaagaacggcgtggaccaggaaatcatcttcccacccatcaagaccgatgtgattacaatggaccccaaggac

SEQ ID NO: 22823 - DNA, 201 bp, synthetic construct; identical to SEQ ID NO: 524
  source 1..201: mol_type = other DNA

SEQ ID NO: 22824 - DNA, 159 bp, synthetic construct
  source 1..159: mol_type = other DNA
tgctccaaggacgccaacgataccctgctgctccagctgaccaacaccagcgcctactacatgtacttgttgctgctgctgaagtccgtggtgtacttcgccatcatcacatgctgcctgctgcggagaaccgccttctgctgcaacggcgagaagtct

SEQ ID NO: 22825 - DNA, 255 bp, synthetic construct; identical to SEQ ID NO: 603
  source 1..255: mol_type = other DNA

SEQ ID NO: 22826 - DNA, 204 bp, synthetic construct; identical to SEQ ID NO: 527
  source 1..204: mol_type = other DNA

SEQ ID NO: 22827 - DNA, 351 bp, synthetic construct
  source 1..351: mol_type = other DNA
atccagaaccctgatcctgccgtgtaccagctgcgggatagcaagagcagcgacaagagcgtgtgtctgttcaccgacttcgacagccagaccaacgtgtcccagagcaaggactccgacgtgtacatcaccgataagtgcgtgctggacatgcggagcatggacttcaagagcaactccgccgtggcctggtccaacaagtccgatttcgcctgcgccaacgccttcaacaacagcattatccccgaggacacattcttcccaagccccgagagcagctgcgacgtgaagctggtggaaaagagcttcgagacagacaccaacctgaacttccagaacctgagcgtgatc

SEQ ID NO: 22828 - DNA, 348 bp, synthetic construct
  source 1..348: mol_type = other DNA
atccagaaccctgatcctgccgtgtaccagctgcgggatagcaagagcagcgacaagagcgtgtgtctgttcaccgacttcgacagccagaccaacgtgtcccagagcaaggactccgacgtgtacatcaccgataagtgcgtgctggacatgcggagcatggacttcaagagcaactccgccgtggcctggtccaacaagtccgatttcgcctgcgccaacgccttcaacaacagcattatccccgaggacacattcttcccaagccccgagagcagctgcgacgtgaagctggtggaaaagagcttcgagacagacaccaacctgaacttccagaacctgagcgtg

SEQ ID NO: 22829 - DNA, 345 bp, synthetic construct
  source 1..345: mol_type = other DNA
atccagaaccctgatcctgccgtgtaccagctgcgggatagcaagagcagcgacaagagcgtgtgtctgttcaccgacttcgacagccagaccaacgtgtcccagagcaaggactccgacgtgtacatcaccgataagtgcgtgctggacatgcggagcatggacttcaagagcaactccgccgtggcctggtccaacaagtccgatttcgcctgcgccaacgccttcaacaacagcattatccccgaggacacattcttcccaagccccgagagcagctgcgacgtgaagctggtggaaaagagcttcgagacagacaccaacctgaacttccagaacctgagc

SEQ ID NO: 22830 - DNA, 69 bp, synthetic construct
  source 1..69: mol_type = other DNA
ggcttcagaatcctgctgctgaaagtggccggctttaacctgctgatgaccctgcggctgtggtccagc

SEQ ID NO: 22831 - DNA, 72 bp, synthetic construct
  source 1..72: mol_type = other DNA
atcggcttcagaatcctgctgctgaaagtggccggctttaacctgctgatgaccctgcggctgtggtccagc

SEQ ID NO: 22832 - DNA, 75 bp, synthetic construct
  source 1..75: mol_type = other DNA
gtgatcggcttcagaatcctgctgctgaaagtggccggctttaacctgctgatgaccctgcggctgtggtccagc

SEQ ID NO: 22833 - DNA, 390 bp, synthetic construct
  source 1..390: mol_type = other DNA
agccagcctcacaccaagcccagcgtgttcgtgatgaagaacggcaccaacgtggcctgcctcgtgaaagagttctaccccaaggacatcaggatcaacctggtgtccagcaagaagatcaccgagttcgaccccgccatcgtgatctcccccagcggcaagtacaacgccgtgaagctggggaagtacgaggacagcaacagcgtgacctgctccgtgcagcacgacaacaagaccgtgcacagcaccgactttgaagtgaaaaccgactccaccgaccacgtgaagcccaaagagacagagaacaccaagcagcccagcaagagctgccacaagcccaaggccatcgtgcacaccgagaaagtgaacatgatgagcctgaccgtgctg

SEQ ID NO: 22834 - DNA, 387 bp, synthetic construct
  source 1..387: mol_type = other DNA
agccagcctcacaccaagcccagcgtgttcgtgatgaagaacggcaccaacgtggcctgcctcgtgaaagagttctaccccaaggacatcaggatcaacctggtgtccagcaagaagatcaccgagttcgaccccgccatcgtgatctcccccagcggcaagtacaacgccgtgaagctggggaagtacgaggacagcaacagcgtgacctgctccgtgcagcacgacaacaagaccgtgcacagcaccgactttgaagtgaaaaccgactccaccgaccacgtgaagcccaaagagacagagaacaccaagcagcccagcaagagctgccacaagcccaaggccatcgtgcacaccgagaaagtgaacatgatgagcctgaccgtg

SEQ ID NO: 22835 - DNA, 384 bp, synthetic construct
  source 1..384: mol_type = other DNA
agccagcctcacaccaagcccagcgtgttcgtgatgaagaacggcaccaacgtggcctgcctcgtgaaagagttctaccccaaggacatcaggatcaacctggtgtccagcaagaagatcaccgagttcgaccccgccatcgtgatctcccccagcggcaagtacaacgccgtgaagctggggaagtacgaggacagcaacagcgtgacctgctccgtgcagcacgacaacaagaccgtgcacagcaccgactttgaagtgaaaaccgactccaccgaccacgtgaagcccaaagagacagagaacaccaagcagcccagcaagagctgccacaagcccaaggccatcgtgcacaccgagaaagtgaacatgatgagcctgacc

SEQ ID NO: 22836 - DNA, 69 bp, synthetic construct
  source 1..69: mol_type = other DNA
ggcctgcggatgctgttcgccaaaaccgtggccgtgaacttcctgctgaccgccaagctgttcttcctc

SEQ ID NO: 22837 - DNA, 72 bp, synthetic construct
  source 1..72: mol_type = other DNA
ctgggcctgcggatgctgttcgccaaaaccgtggccgtgaacttcctgctgaccgccaagctgttcttcctc

SEQ ID NO: 22838 - DNA, 75 bp, synthetic construct
  source 1..75: mol_type = other DNA
gtgctgggcctgcggatgctgttcgccaaaaccgtggccgtgaacttcctgctgaccgccaagctgttcttcctc

SEQ ID NO: 22839 - DNA, 447 bp, synthetic construct
  source 1..447: mol_type = other DNA
gaggacctgaagaacgtgttcccacctgaggtggccgtgttcgagcctagcgaggccgagatcagccacacccagaaagccaccctcgtgtgcctggctaccggcttctaccccgaccatgtggaactgtcttggtgggtcaacggcaaagaggtgcacagcggcgtgtgtaccgacccccagccactgaaagaacagcccgccctgaacgacagccggtactgcctgagcagcagactgagagtgtccgccaccttctggcagaacccccggaaccacttcagatgccaggtgcagttctacggcctgagcgagaacgacgagtggacccaggacagagccaagcccgtgacccagatcgtgtctgccgaagcctggggcagagccgattgcggctttaccagcgagagctaccagcagggcgtgctgagcgccaccatcctgtac

SEQ ID NO: 22840 - DNA, 435 bp, synthetic construct
  source 1..435: mol_type = other DNA
gaggacctgaagaacgtgttcccacctgaggtggccgtgttcgagcctagcgaggccgagatcagccacacccagaaagccaccctcgtgtgcctggctaccggcttctaccccgaccatgtggaactgtcttggtgggtcaacggcaaagaggtgcacagcggcgtgtgtaccgacccccagccactgaaagaacagcccgccctgaacgacagccggtactgcctgagcagcagactgagagtgtccgccaccttctggcagaacccccggaaccacttcagatgccaggtgcagttctacggcctgagcgagaacgacgagtggacccaggacagagccaagcccgtgacccagatcgtgtctgccgaagcctggggcagagccgattgcggctttaccagcgagagctaccagcagggcgtgctgagcgcc

SEQ ID NO: 22841 - DNA, 90 bp, synthetic construct
  source 1..90: mol_type = other DNA
gagatcctgctgggcaaggccaccctgtacgccgtgctggtgtctgccctggtgctgatggctatggtcaagcggaaggacagccgggga

SEQ ID NO: 22842 - DNA, 102 bp, synthetic construct
  source 1..102: mol_type = other DNA
accatcctgtacgagatcctgctgggcaaggccaccctgtacgccgtgctggtgtctgccctggtgctgatggctatggtcaagcggaaggacagccgggga

SEQ ID NO: 22843 - DNA, 426 bp, synthetic construct
  source 1..426: mol_type = other DNA
gacaagcagctggacgccgacgtgtcccccaagcctaccatcttcctgccctctatcgccgagacaaagctccagaaggccggcacctacctgtgcctgctggaaaagttcttcccagatgtgattaagatccactggcaggaaaagaagtccaacaccatcctgggcagccaggaaggcaacaccatgaagaccaacgacacctacatgaagttcagctggctgaccgtgcccgagaagtccctggacaaagaacacagatgcatcgtgcggcacgaaaacaacaagaacggcgtggaccaggaaatcatcttcccacccatcaagaccgatgtgattacaatggaccccaaggacaactgctccaaggacgccaacgataccctgctgctccagctgaccaacaccagcgcctactacatgtac

SEQ ID NO: 22844 - DNA, 414 bp, synthetic construct
  source 1..414: mol_type = other DNA
gacaagcagctggacgccgacgtgtcccccaagcctaccatcttcctgccctctatcgccgagacaaagctccagaaggccggcacctacctgtgcctgctggaaaagttcttcccagatgtgattaagatccactggcaggaaaagaagtccaacaccatcctgggcagccaggaaggcaacaccatgaagaccaacgacacctacatgaagttcagctggctgaccgtgcccgagaagtccctggacaaagaacacagatgcatcgtgcggcacgaaaacaacaagaacggcgtggaccaggaaatcatcttcccacccatcaagaccgatgtgattacaatggaccccaaggacaactgctccaaggacgccaacgataccctgctgctccagctgaccaacaccagcgcc

SEQ ID NO: 22845 - DNA, 93 bp, synthetic construct
  source 1..93: mol_type = other DNA
ttgttgctgctgctgaagtccgtggtgtacttcgccatcatcacatgctgcctgctgcggagaaccgccttctgctgcaacggcgagaagtct

SEQ ID NO: 22846 - DNA, 105 bp, synthetic construct
  source 1..105: mol_type = other DNA
tactacatgtacttgttgctgctgctgaagtccgtggtgtacttcgccatcatcacatgctgcctgctgcggagaaccgccttctgctgcaacggcgagaagtct

SEQ ID NO: 22847 - DNA, 25 bp, synthetic construct
  source 1..25: mol_type = other DNA
ggggggggggggggggggggggggg

SEQ ID NO: 22848 - DNA, 408 bp, synthetic construct; identical to SEQ ID NO: 21212
  source 1..408: mol_type = other DNA

SEQ ID NO: 22849 - DNA, 405 bp, synthetic construct; identical to SEQ ID NO: 21213
  source 1..405: mol_type = other DNA

SEQ ID NO: 22850 - DNA, 402 bp, synthetic construct; identical to SEQ ID NO: 21214
  source 1..402: mol_type = other DNA

SEQ ID NO: 22851 - DNA, 399 bp, synthetic construct; identical to SEQ ID NO: 21215
  source 1..399: mol_type = other DNA

SEQ ID NO: 22852 - DNA, 396 bp, synthetic construct; identical to SEQ ID NO: 21216
  source 1..396: mol_type = other DNA

SEQ ID NO: 22853 - DNA, 393 bp, synthetic construct; identical to SEQ ID NO: 21217
  source 1..393: mol_type = other DNA

SEQ ID NO: 22854 - DNA, 390 bp, synthetic construct; identical to SEQ ID NO: 21218
  source 1..390: mol_type = other DNA

SEQ ID NO: 22855 - DNA, 387 bp, synthetic construct; identical to SEQ ID NO: 21219
  source 1..387: mol_type = other DNA

SEQ ID NO: 22856 - DNA, 384 bp, synthetic construct; identical to SEQ ID NO: 21220
  source 1..384: mol_type = other DNA

SEQ ID NO: 22857 - DNA, 381 bp, synthetic construct; identical to SEQ ID NO: 21221
  source 1..381: mol_type = other DNA

SEQ ID NO: 22858 - DNA, 378 bp, synthetic construct; identical to SEQ ID NO: 21222
  source 1..378: mol_type = other DNA

SEQ ID NO: 22859 - DNA, 363 bp, synthetic construct; identical to SEQ ID NO: 21223
  source 1..363: mol_type = other DNA

SEQ ID NO: 22860 - DNA, 348 bp, synthetic construct; identical to SEQ ID NO: 21224
  source 1..348: mol_type = other DNA

SEQ ID NO: 22861 - DNA, 25 bp, synthetic construct
  source 1..25: mol_type = other DNA
ggggggggggggggggggggggggg

SEQ ID NO: 22862 - DNA, 420 bp, synthetic construct; identical to SEQ ID NO: 21238
  source 1..420: mol_type = other DNA

SEQ ID NO: 22863 - DNA, 417 bp, synthetic construct; identical to SEQ ID NO: 21239
  source 1..417: mol_type = other DNA

SEQ ID NO: 22864 - DNA, 414 bp, synthetic construct; identical to SEQ ID NO: 21240
  source 1..414: mol_type = other DNA

SEQ ID NO: 22865 - DNA, 411 bp, synthetic construct; identical to SEQ ID NO: 21241
  source 1..411: mol_type = other DNA

SEQ ID NO: 22866 - DNA, 408 bp, synthetic construct; identical to SEQ ID NO: 21242
  source 1..408: mol_type = other DNA

SEQ ID NO: 22867 - DNA, 405 bp, synthetic construct; identical to SEQ ID NO: 21243
  source 1..405: mol_type = other DNA

SEQ ID NO: 22868 - DNA, 402 bp, synthetic construct; identical to SEQ ID NO: 21244
  source 1..402: mol_type = other DNA

SEQ ID NO: 22869 - DNA, 399 bp, synthetic construct; identical to SEQ ID NO: 21245
  source 1..399: mol_type = other DNA

SEQ ID NO: 22870 - DNA, 396 bp, synthetic construct; identical to SEQ ID NO: 21246
  source 1..396: mol_type = other DNA

SEQ ID NO: 22871 - DNA, 393 bp, synthetic construct; identical to SEQ ID NO: 21247
  source 1..393: mol_type = other DNA

SEQ ID NO: 22872 - DNA, 390 bp, synthetic construct; identical to SEQ ID NO: 21248
  source 1..390: mol_type = other DNA

SEQ ID NO: 22873 - DNA, 387 bp, synthetic construct; identical to SEQ ID NO: 21249
  source 1..387: mol_type = other DNA

SEQ ID NO: 22874 - DNA, 384 bp, synthetic construct; identical to SEQ ID NO: 21250
  source 1..384: mol_type = other DNA

SEQ ID NO: 22875 - DNA, 381 bp, synthetic construct; identical to SEQ ID NO: 21251
  source 1..381: mol_type = other DNA

SEQ ID NO: 22876 - DNA, 378 bp, synthetic construct; identical to SEQ ID NO: 21252
  source 1..378: mol_type = other DNA

SEQ ID NO: 22877 - DNA, 375 bp, synthetic construct; identical to SEQ ID NO: 21253
  source 1..375: mol_type = other DNA

SEQ ID NO: 22878 - DNA, 372 bp, synthetic construct; identical to SEQ ID NO: 21254
  source 1..372: mol_type = other DNA

SEQ ID NO: 22879 - DNA, 369 bp, synthetic construct; identical to SEQ ID NO: 21255
  source 1..369: mol_type = other DNA

SEQ ID NO: 22880 - DNA, 366 bp, synthetic construct; identical to SEQ ID NO: 21256
  source 1..366: mol_type = other DNA

SEQ ID NO: 22881 - DNA, 363 bp, synthetic construct; identical to SEQ ID NO: 21257
  source 1..363: mol_type = other DNA

SEQ ID NO: 22882 - DNA, 360 bp, synthetic construct; identical to SEQ ID NO: 21258
  source 1..360: mol_type = other DNA

SEQ ID NO: 22883 - DNA, 357 bp, synthetic construct; identical to SEQ ID NO: 21259
  source 1..357: mol_type = other DNA

SEQ ID NO: 22884 - DNA, 354 bp, synthetic construct; identical to SEQ ID NO: 21260
  source 1..354: mol_type = other DNA

SEQ ID NO: 22885 - DNA, 351 bp, synthetic construct; identical to SEQ ID NO: 21261
  source 1..351: mol_type = other DNA

SEQ ID NO: 22886 - DNA, 348 bp, synthetic construct; identical to SEQ ID NO: 21262
  source 1..348: mol_type = other DNA

SEQ ID NO: 22887 - DNA, 345 bp, synthetic construct; identical to SEQ ID NO: 21263
  source 1..345: mol_type = other DNA

SEQ ID NO: 22888 - DNA, 342 bp, synthetic construct; identical to SEQ ID NO: 21264
  source 1..342: mol_type = other DNA

SEQ ID NO: 22889 - DNA, 339 bp, synthetic construct; identical to SEQ ID NO: 21265
  source 1..339: mol_type = other DNA

SEQ ID NO: 22890 - DNA, 336 bp, synthetic construct; identical to SEQ ID NO: 21266
  source 1..336: mol_type = other DNA

SEQ ID NO: 22891 - DNA, 333 bp, synthetic construct; identical to SEQ ID NO: 21267
  source 1..333: mol_type = other DNA

SEQ ID NO: 22892 - DNA, 330 bp, synthetic construct; identical to SEQ ID NO: 21268
  source 1..330: mol_type = other DNA

SEQ ID NO: 22893 - DNA, 327 bp, synthetic construct; identical to SEQ ID NO: 21269
  source 1..327: mol_type = other DNA

SEQ ID NO: 22894 - DNA, 324 bp, synthetic construct; identical to SEQ ID NO: 21270
  source 1..324: mol_type = other DNA

SEQ ID NO: 22895 - DNA, 321 bp, synthetic construct; identical to SEQ ID NO: 21271
  source 1..321: mol_type = other DNA

SEQ ID NO: 22896 - DNA, 318 bp, synthetic construct; identical to SEQ ID NO: 21272
  source 1..318: mol_type = other DNA

SEQ ID NO: 22897 - DNA, 315 bp, synthetic construct; identical to SEQ ID NO: 21273
  source 1..315: mol_type = other DNA

SEQ ID NO: 22898 - DNA, 312 bp, synthetic construct; identical to SEQ ID NO: 21274
  source 1..312: mol_type = other DNA

SEQ ID NO: 22899 - DNA, 309 bp, synthetic construct; identical to SEQ ID NO: 21275
  source 1..309: mol_type = other DNA

SEQ ID NO: 22900 - DNA, 306 bp, synthetic construct; identical to SEQ ID NO: 21276
  source 1..306: mol_type = other DNA

SEQ ID NO: 22901 - DNA, 303 bp, synthetic construct; identical to SEQ ID NO: 21277
  source 1..303: mol_type = other DNA

SEQ ID NO: 22902 - DNA, 300 bp, synthetic construct; identical to SEQ ID NO: 21278
  source 1..300: mol_type = other DNA

SEQ ID NO: 22903 - DNA, 297 bp, synthetic construct; identical to SEQ ID NO: 21279
  source 1..297: mol_type = other DNA

SEQ ID NO: 22904 - DNA, 294 bp, synthetic construct; identical to SEQ ID NO: 21280
  source 1..294: mol_type = other DNA

SEQ ID NO: 22905 - DNA, 291 bp, synthetic construct; identical to SEQ ID NO: 21281
  source 1..291: mol_type = other DNA

SEQ ID NO: 22906 - DNA, 288 bp, synthetic construct; identical to SEQ ID NO: 21282
  source 1..288: mol_type = other DNA

SEQ ID NO: 22907 - DNA, 282 bp, synthetic construct; identical to SEQ ID NO: 21283
  source 1..282: mol_type = other DNA

SEQ ID NO: 22908 - DNA, 279 bp, synthetic construct; identical to SEQ ID NO: 21284
  source 1..279: mol_type = other DNA

SEQ ID NO: 22909 - DNA, 276 bp, synthetic construct; identical to SEQ ID NO: 21285
  source 1..276: mol_type = other DNA

SEQ ID NO: 22910 - DNA, 273 bp, synthetic construct; identical to SEQ ID NO: 21286
  source 1..273: mol_type = other DNA

SEQ ID NO: 22911 - DNA, 270 bp, synthetic construct; identical to SEQ ID NO: 21287
  source 1..270: mol_type = other DNA

SEQ ID NO: 22912 - DNA, 267 bp, synthetic construct; identical to SEQ ID NO: 21288
  source 1..267: mol_type = other DNA

SEQ ID NO: 22913 - DNA, 264 bp, synthetic construct; identical to SEQ ID NO: 21289
  source 1..264: mol_type = other DNA

SEQ ID NO: 22914 - DNA, 261 bp, synthetic construct; identical to SEQ ID NO: 21290
  source 1..261: mol_type = other DNA

SEQ ID NO: 22915 - DNA, 258 bp, synthetic construct; identical to SEQ ID NO: 21291
  source 1..258: mol_type = other DNA

SEQ ID NO: 22916 - DNA, 255 bp, synthetic construct; identical to SEQ ID NO: 21292
  source 1..255: mol_type = other DNA

SEQ ID NO: 22917 - DNA, 252 bp, synthetic construct; identical to SEQ ID NO: 21293
  source 1..252: mol_type = other DNA

SEQ ID NO: 22918 - DNA, 249 bp, synthetic construct; identical to SEQ ID NO: 21294
  source 1..249: mol_type = other DNA

SEQ ID NO: 22919 - DNA, 246 bp, synthetic construct; identical to SEQ ID NO: 21295
  source 1..246: mol_type = other DNA

SEQ ID NO: 22920 - DNA, 243 bp, synthetic construct; identical to SEQ ID NO: 21296
  source 1..243: mol_type = other DNA

SEQ ID NO: 22921 - DNA, 240 bp, synthetic construct; identical to SEQ ID NO: 21297
  source 1..240: mol_type = other DNA

SEQ ID NO: 22922 - DNA, 237 bp, synthetic construct; identical to SEQ ID NO: 21298
  source 1..237: mol_type = other DNA

SEQ ID NO: 22923 - DNA, 234 bp, synthetic construct; identical to SEQ ID NO: 21299
  source 1..234: mol_type = other DNA

SEQ ID NO: 22924 - DNA, 231 bp, synthetic construct; identical to SEQ ID NO: 21300
  source 1..231: mol_type = other DNA

SEQ ID NO: 22925 - DNA, 228 bp, synthetic construct; identical to SEQ ID NO: 21301
  source 1..228: mol_type = other DNA

SEQ ID NO: 22926 - DNA, 225 bp, synthetic construct; identical to SEQ ID NO: 21302
  source 1..225: mol_type = other DNA

SEQ ID NO: 22927 - DNA, 222 bp, synthetic construct; identical to SEQ ID NO: 21303
  source 1..222: mol_type = other DNA

SEQ ID NO: 22928 - DNA, 219 bp, synthetic construct; identical to SEQ ID NO: 21304
  source 1..219: mol_type = other DNA

SEQ ID NO: 22929 - DNA, 216 bp, synthetic construct; identical to SEQ ID NO: 21305
  source 1..216: mol_type = other DNA

SEQ ID NO: 22930 - DNA, 213 bp, synthetic construct; identical to SEQ ID NO: 21306
  source 1..213: mol_type = other DNA

SEQ ID NO: 22931 - DNA, 210 bp, synthetic construct; identical to SEQ ID NO: 21307
  source 1..210: mol_type = other DNA

SEQ ID NO: 22932 - DNA, 207 bp, synthetic construct; identical to SEQ ID NO: 21308
  source 1..207: mol_type = other DNA

SEQ ID NO: 22933 - DNA, 204 bp, synthetic construct; identical to SEQ ID NO: 21309
  source 1..204: mol_type = other DNA

SEQ ID NO: 22934 - DNA, 201 bp, synthetic construct; identical to SEQ ID NO: 21310
  source 1..201: mol_type = other DNA

SEQ ID NO: 22935 - DNA, 198 bp, synthetic construct; identical to SEQ ID NO: 21311
  source 1..198: mol_type = other DNA

SEQ ID NO: 22936 - DNA, 195 bp, synthetic construct; identical to SEQ ID NO: 21312
  source 1..195: mol_type = other DNA

SEQ ID NO: 22937 - DNA, 192 bp, synthetic construct; identical to SEQ ID NO: 21313
  source 1..192: mol_type = other DNA

SEQ ID NO: 22938 - DNA, 189 bp, synthetic construct; identical to SEQ ID NO: 21314
  source 1..189: mol_type = other DNA

SEQ ID NO: 22939 - DNA, 186 bp, synthetic construct; identical to SEQ ID NO: 21315
  source 1..186: mol_type = other DNA

SEQ ID NO: 22940 - DNA, 183 bp, synthetic construct; identical to SEQ ID NO: 21316
  source 1..183: mol_type = other DNA

SEQ ID NO: 22941 - DNA, 180 bp, synthetic construct; identical to SEQ ID NO: 21317
  source 1..180: mol_type = other DNA

SEQ ID NO: 22942 - DNA, 177 bp, synthetic construct; identical to SEQ ID NO: 21318
  source 1..177: mol_type = other DNA

SEQ ID NO: 22943 - DNA, 174 bp, synthetic construct; identical to SEQ ID NO: 21319
  source 1..174: mol_type = other DNA

SEQ ID NO: 22944 - DNA, 171 bp, synthetic construct; identical to SEQ ID NO: 21320
  source 1..171: mol_type = other DNA

SEQ ID NO: 22945 - DNA, 168 bp, synthetic construct; identical to SEQ ID NO: 21321
  source 1..168: mol_type = other DNA

SEQ ID NO: 22946 - DNA, 165 bp, synthetic construct; identical to SEQ ID NO: 21322
  source 1..165: mol_type = other DNA

SEQ ID NO: 22947 - DNA, 162 bp, synthetic construct; identical to SEQ ID NO: 21323
  source 1..162: mol_type = other DNA

SEQ ID NO: 22948 - DNA, 159 bp, synthetic construct; identical to SEQ ID NO: 21324
  source 1..159: mol_type = other DNA

SEQ ID NO: 22949 - DNA, 156 bp, synthetic construct; identical to SEQ ID NO: 21325
  source 1..156: mol_type = other DNA

SEQ ID NO: 22950 - DNA, 153 bp, synthetic construct; identical to SEQ ID NO: 21326
  source 1..153: mol_type = other DNA

SEQ ID NO: 22951 - DNA, 150 bp, synthetic construct; identical to SEQ ID NO: 21327
  source 1..150: mol_type = other DNA

SEQ ID NO: 22952 - DNA, 147 bp, synthetic construct; identical to SEQ ID NO: 21328
  source 1..147: mol_type = other DNA

SEQ ID NO: 22953 - DNA, 144 bp, synthetic construct; identical to SEQ ID NO: 21329
  source 1..144: mol_type = other DNA

SEQ ID NO: 22954 - DNA, 141 bp, synthetic construct; identical to SEQ ID NO: 21330
  source 1..141: mol_type = other DNA

SEQ ID NO: 22955 - DNA, 138 bp, synthetic construct; identical to SEQ ID NO: 21331
  source 1..138: mol_type = other DNA

SEQ ID NO: 22956 - DNA, 135 bp, synthetic construct; identical to SEQ ID NO: 21332
  source 1..135: mol_type = other DNA

SEQ ID NO: 22957 - DNA, 132 bp, synthetic construct; identical to SEQ ID NO: 21333
  source 1..132: mol_type = other DNA

SEQ ID NO: 22958 - DNA, 129 bp, synthetic construct; identical to SEQ ID NO: 21334
  source 1..129: mol_type = other DNA

SEQ ID NO: 22959 - DNA, 126 bp, synthetic construct; identical to SEQ ID NO: 21335
  source 1..126: mol_type = other DNA

SEQ ID NO: 22960 - DNA, 123 bp, synthetic construct; identical to SEQ ID NO: 21336
  source 1..123: mol_type = other DNA

SEQ ID NO: 22961 - DNA, 120 bp, synthetic construct; identical to SEQ ID NO: 21337
  source 1..120: mol_type = other DNA

SEQ ID NO: 22962 - DNA, 117 bp, synthetic construct; identical to SEQ ID NO: 21338
  source 1..117: mol_type = other DNA

SEQ ID NO: 22963 - DNA, 498 bp, synthetic construct; identical to SEQ ID NO: 21339
  source 1..498: mol_type = other DNA

SEQ ID NO: 22964 - DNA, 495 bp, synthetic construct; identical to SEQ ID NO: 21340
  source 1..495: mol_type = other DNA

SEQ ID NO: 22965 - DNA, 492 bp, synthetic construct; identical to SEQ ID NO: 21341
  source 1..492: mol_type = other DNA

SEQ ID NO: 22966 - DNA, 489 bp, synthetic construct; identical to SEQ ID NO: 21342
  source 1..489: mol_type = other DNA

SEQ ID NO: 22967 - DNA, 486 bp, synthetic construct; identical to SEQ ID NO: 21343
  source 1..486: mol_type = other DNA

SEQ ID NO: 22968 - DNA, 483 bp, synthetic construct; identical to SEQ ID NO: 21344
  source 1..483: mol_type = other DNA

SEQ ID NO: 22969 - DNA, 480 bp, synthetic construct; identical to SEQ ID NO: 21345
  source 1..480: mol_type = other DNA

SEQ ID NO: 22970 - DNA, 477 bp, synthetic construct; identical to SEQ ID NO: 21346
  source 1..477: mol_type = other DNA

SEQ ID NO: 22971 - DNA, 474 bp, synthetic construct; identical to SEQ ID NO: 21347
  source 1..474: mol_type = other DNA

SEQ ID NO: 22972 - DNA, 471 bp, synthetic construct; identical to SEQ ID NO: 21348
  source 1..471: mol_type = other DNA

SEQ ID NO: 22973 - DNA, 468 bp, synthetic construct; identical to SEQ ID NO: 21349
  source 1..468: mol_type = other DNA

SEQ ID NO: 22974 - DNA, 528 bp, synthetic construct; identical to SEQ ID NO: 21350
  source 1..528: mol_type = other DNA

SEQ ID NO: 22975 - DNA, 525 bp, synthetic construct; identical to SEQ ID NO: 21351
  source 1..525: mol_type = other DNA

SEQ ID NO: 22976 - DNA, 522 bp, synthetic construct; identical to SEQ ID NO: 21352
  source 1..522: mol_type = other DNA

SEQ ID NO: 22977 - DNA, 519 bp, synthetic construct; identical to SEQ ID NO: 21353
  source 1..519: mol_type = other DNA

SEQ ID NO: 22978 - DNA, 516 bp, synthetic construct; identical to SEQ ID NO: 21354
  source 1..516: mol_type = other DNA

SEQ ID NO: 22979 - DNA, 513 bp, synthetic construct; identical to SEQ ID NO: 21355
  source 1..513: mol_type = other DNA

SEQ ID NO: 22980 - DNA, 510 bp, synthetic construct; identical to SEQ ID NO: 21356
  source 1..510: mol_type = other DNA

SEQ ID NO: 22981 - DNA, 507 bp, synthetic construct; identical to SEQ ID NO: 21357
  source 1..507: mol_type = other DNA

SEQ ID NO: 22982 - DNA, 504 bp, synthetic construct; identical to SEQ ID NO: 21358
  source 1..504: mol_type = other DNA

SEQ ID NO: 22983 - DNA, 501 bp, synthetic construct; identical to SEQ ID NO: 21359
  source 1..501: mol_type = other DNA

SEQ ID NO: 22984 - DNA, 498 bp, synthetic construct; identical to SEQ ID NO: 21360
  source 1..498: mol_type = other DNA

SEQ ID NO: 22985 - DNA, 495 bp, synthetic construct; identical to SEQ ID NO: 21361
  source 1..495: mol_type = other DNA

SEQ ID NO: 22986 - DNA, 492 bp, synthetic construct; identical to SEQ ID NO: 21362
  source 1..492: mol_type = other DNA

SEQ ID NO: 22987 - DNA, 489 bp, synthetic construct; identical to SEQ ID NO: 21363
  source 1..489: mol_type = other DNA

SEQ ID NO: 22988 - DNA, 486 bp, synthetic construct; identical to SEQ ID NO: 21364
  source 1..486: mol_type = other DNA

SEQ ID NO: 22989 - DNA, 483 bp, synthetic construct; identical to SEQ ID NO: 21365
  source 1..483: mol_type = other DNA

SEQ ID NO: 22990 - DNA, 480 bp, synthetic construct; identical to SEQ ID NO: 21366
  source 1..480: mol_type = other DNA

SEQ ID NO: 22991 - DNA, 477 bp, synthetic construct; identical to SEQ ID NO: 21367
  source 1..477: mol_type = other DNA

SEQ ID NO: 22992 - DNA, 474 bp, synthetic construct; identical to SEQ ID NO: 21368
  source 1..474: mol_type = other DNA

SEQ ID NO: 22993 - DNA, 471 bp, synthetic construct; identical to SEQ ID NO: 21369
  source 1..471: mol_type = other DNA

SEQ ID NO: 22994 - DNA, 468 bp, synthetic construct; identical to SEQ ID NO: 21370
  source 1..468: mol_type = other DNA

SEQ ID NO: 22995 - DNA, 453 bp, synthetic construct; identical to SEQ ID NO: 21371
  source 1..453: mol_type = other DNA

SEQ ID NO: 22996 - DNA, 438 bp, synthetic construct; identical to SEQ ID NO: 21372
  source 1..438: mol_type = other DNA

SEQ ID NO: 22997 - DNA, 519 bp, synthetic construct; identical to SEQ ID NO: 21373
  source 1..519: mol_type = other DNA

SEQ ID NO: 22998 - DNA, 516 bp, synthetic construct; identical to SEQ ID NO: 21374
  source 1..516: mol_type = other DNA

SEQ ID NO: 22999 - DNA, 513 bp, synthetic construct; identical to SEQ ID NO: 21375
  source 1..513: mol_type = other DNA

SEQ ID NO: 23000 - DNA, 510 bp, synthetic construct; identical to SEQ ID NO: 21376
  source 1..510: mol_type = other DNA

SEQ ID NO: 23001 - DNA, 507 bp, synthetic construct; identical to SEQ ID NO: 21377
  source 1..507: mol_type = other DNA

SEQ ID NO: 23002 - DNA, 504 bp, synthetic construct; identical to SEQ ID NO: 21378
  source 1..504: mol_type = other DNA

SEQ ID NO: 23003 - DNA, 501 bp, synthetic construct; identical to SEQ ID NO: 21379
  source 1..501: mol_type = other DNA

SEQ ID NO: 23004 - DNA, 498 bp, synthetic construct; identical to SEQ ID NO: 21380
  source 1..498: mol_type = other DNA

SEQ ID NO: 23005 - DNA, 495 bp, synthetic construct; identical to SEQ ID NO: 21381
  source 1..495: mol_type = other DNA

SEQ ID NO: 23006 - DNA, 492 bp, synthetic construct; identical to SEQ ID NO: 21382
  source 1..492: mol_type = other DNA

SEQ ID NO: 23007 - DNA, 489 bp, synthetic construct; identical to SEQ ID NO: 21383
  source 1..489: mol_type = other DNA

SEQ ID NO: 23008 - DNA, 486 bp, synthetic construct; identical to SEQ ID NO: 21384
  source 1..486: mol_type = other DNA

SEQ ID NO: 23009 - DNA, 483 bp, synthetic construct; identical to SEQ ID NO: 21385
  source 1..483: mol_type = other DNA

SEQ ID NO: 23010 - DNA, 480 bp, synthetic construct; identical to SEQ ID NO: 21386
  source 1..480: mol_type = other DNA

SEQ ID NO: 23011 - DNA, 477 bp, synthetic construct; identical to SEQ ID NO: 21387
  source 1..477: mol_type = other DNA

SEQ ID NO: 23012 - DNA, 474 bp, synthetic construct; identical to SEQ ID NO: 21388
  source 1..474: mol_type = other DNA

SEQ ID NO: 23013 - DNA, 471 bp, synthetic construct; identical to SEQ ID NO: 21389
  source 1..471: mol_type = other DNA

SEQ ID NO: 23014 - DNA, 468 bp, synthetic construct; identical to SEQ ID NO: 21390
  source 1..468: mol_type = other DNA

SEQ ID NO: 23015 - DNA, 465 bp, synthetic construct; identical to SEQ ID NO: 21391
  source 1..465: mol_type = other DNA

SEQ ID NO: 23016 - DNA, 462 bp, synthetic construct; identical to SEQ ID NO: 21392
  source 1..462: mol_type = other DNA

SEQ ID NO: 23017 - DNA, 459 bp, synthetic construct; identical to SEQ ID NO: 21393
  source 1..459: mol_type = other DNA

SEQ ID NO: 23018 - DNA, 444 bp, synthetic construct; identical to SEQ ID NO: 21394
  source 1..444: mol_type = other DNA

SEQ ID NO: 23019 - DNA, 429 bp, synthetic construct; identical to SEQ ID NO: 21395
  source 1..429: mol_type = other DNA

SEQ ID NO: 23020 - DNA, 25 bp, synthetic construct
  source 1..25: mol_type = other DNA
ggggggggggggggggggggggggg

SEQ ID NO: 23021 - DNA, 369 bp, synthetic construct; identical to SEQ ID NO: 21621
  source 1..369: mol_type = other DNA

SEQ ID NO: 23022 - DNA, 363 bp, synthetic construct; identical to SEQ ID NO: 21622
  source 1..363: mol_type = other DNA

SEQ ID NO: 23023 - DNA, 393 bp, synthetic construct; identical to SEQ ID NO: 21623
  source 1..393: mol_type = other DNA

SEQ ID NO: 23024 - DNA, 417 bp, synthetic construct; identical to SEQ ID NO: 21624
  source 1..417: mol_type = other DNA

SEQ ID NO: 23025 - DNA, 411 bp, synthetic construct; identical to SEQ ID NO: 21625
  source 1..411: mol_type = other DNA

SEQ ID NO: 23026 - DNA, 387 bp, synthetic construct; identical to SEQ ID NO: 21626
  source 1..387: mol_type = other DNA

SEQ ID NO: 23027 - DNA, 411 bp, synthetic construct; identical to SEQ ID NO: 21625
  source 1..411: mol_type = other DNA

SEQ ID NO: 23028 - DNA, 369 bp, synthetic construct; identical to SEQ ID NO: 21628
  source 1..369: mol_type = other DNA

SEQ ID NO: 23029 - DNA, 414 bp, synthetic construct; identical to SEQ ID NO: 21629
  source 1..414: mol_type = other DNA

SEQ ID NO: 23030 - DNA, 393 bp, synthetic construct; identical to SEQ ID NO: 21630
  source 1..393: mol_type = other DNA

SEQ ID NO: 23031 - DNA, 399 bp, synthetic construct; identical to SEQ ID NO: 21631
  source 1..399: mol_type = other DNA

SEQ ID NO: 23032 - DNA, 393 bp, synthetic construct; identical to SEQ ID NO: 21632
  source 1..393: mol_type = other DNA

SEQ ID NO: 23033 - DNA, 423 bp, synthetic construct; identical to SEQ ID NO: 21633
  source 1..423: mol_type = other DNA

SEQ ID NO: 23034 - DNA, 447 bp, synthetic construct; identical to SEQ ID NO: 21634
  source 1..447: mol_type = other DNA

SEQ ID NO: 23035 - DNA, 441 bp, synthetic construct; identical to SEQ ID NO: 21635
  source 1..441: mol_type = other DNA

SEQ ID NO: 23036 - DNA, 417 bp, synthetic construct; identical to SEQ ID NO: 21636
  source 1..417: mol_type = other DNA

SEQ ID NO: 23037 - DNA, 441 bp, synthetic construct; identical to SEQ ID NO: 21635
  source 1..441: mol_type = other DNA

SEQ ID NO: 23038 - DNA, 399 bp, synthetic construct; identical to SEQ ID NO: 21638
  source 1..399: mol_type = other DNA

SEQ ID NO: 23039 - DNA, 444 bp, synthetic construct; identical to SEQ ID NO: 21639
  source 1..444: mol_type = other DNA

SEQ ID NO: 23040 - DNA, 423 bp, synthetic construct; identical to SEQ ID NO: 21640
  source 1..423: mol_type = other DNA

SEQ ID NO: 23041 - DNA, 411 bp, synthetic construct; identical to SEQ ID NO: 21641
  source 1..411: mol_type = other DNA

SEQ ID NO: 23042 - DNA, 405 bp, synthetic construct; identical to SEQ ID NO: 21642
  source 1..405: mol_type = other DNA

SEQ ID NO: 23043 - DNA, 435 bp, synthetic construct; identical to SEQ ID NO: 21643
  source 1..435: mol_type = other DNA

SEQ ID NO: 23044 - DNA, 459 bp, synthetic construct; identical to SEQ ID NO: 21644
  source 1..459: mol_type = other DNA

SEQ ID NO: 23045 - DNA, 453 bp, synthetic construct; identical to SEQ ID NO: 21645
  source 1..453: mol_type = other DNA

SEQ ID NO: 23046 - DNA, 429 bp, synthetic construct; identical to SEQ ID NO: 21646
  source 1..429: mol_type = other DNA

SEQ ID NO: 23047 - DNA, 453 bp, synthetic construct; identical to SEQ ID NO: 21645
  source 1..453: mol_type = other DNA

SEQ ID NO: 23048 - DNA, 411 bp, synthetic construct; identical to SEQ ID NO: 21648
  source 1..411: mol_type = other DNA

SEQ ID NO: 23049 - DNA, 456 bp, synthetic construct; identical to SEQ ID NO: 21649
  source 1..456: mol_type = other DNA

SEQ ID NO: 23050 - DNA, 435 bp, synthetic construct; identical to SEQ ID NO: 21650
  source 1..435: mol_type = other DNA

SEQ ID NO: 23051 - DNA, 372 bp, synthetic construct; identical to SEQ ID NO: 21651
  source 1..372: mol_type = other DNA

SEQ ID NO: 23052 - DNA, 366 bp, synthetic construct; identical to SEQ ID NO: 21652
  source 1..366: mol_type = other DNA

SEQ ID NO: 23053 - DNA, 396 bp, synthetic construct; identical to SEQ ID NO: 21653
  source 1..396: mol_type = other DNA

SEQ ID NO: 23054 - DNA, 420 bp, synthetic construct; identical to SEQ ID NO: 21654
  source 1..420: mol_type = other DNA

SEQ ID NO: 23055 - DNA, 414 bp, synthetic construct; identical to SEQ ID NO: 21655
  source 1..414: mol_type = other DNA

SEQ ID NO: 23056 - DNA, 390 bp, synthetic construct; identical to SEQ ID NO: 21656
  source 1..390: mol_type = other DNA

SEQ ID NO: 23057 - DNA, 414 bp, synthetic construct; identical to SEQ ID NO: 21655
  source 1..414: mol_type = other DNA

SEQ ID NO: 23058 - DNA, 372 bp, synthetic construct; identical to SEQ ID NO: 21658
  source 1..372: mol_type = other DNA

SEQ ID NO: 23059 - DNA, 417 bp, synthetic construct; identical to SEQ ID NO: 21659
  source 1..417: mol_type = other DNA

SEQ ID NO: 23060 - DNA, 396 bp, synthetic construct; identical to SEQ ID NO: 21660
  source 1..396: mol_type = other DNA

SEQ ID NO: 23061 - DNA, 411 bp, synthetic construct; identical to SEQ ID NO: 21641
  source 1..411: mol_type = other DNA

SEQ ID NO: 23062 - DNA, 405 bp, synthetic construct; identical to SEQ ID NO: 21642
  source 1..405: mol_type = other DNA

SEQ ID NO: 23063 - DNA, 435 bp, synthetic construct; identical to SEQ ID NO: 21643
  source 1..435: mol_type = other DNA

SEQ ID NO: 23064 - DNA, 459 bp, synthetic construct; identical to SEQ ID NO: 21644
  source 1..459: mol_type = other DNA

SEQ ID NO: 23065 - DNA, 453 bp, synthetic construct; identical to SEQ ID NO: 21645
  source 1..453: mol_type = other DNA

SEQ ID NO: 23066 - DNA, 429 bp, synthetic construct; identical to SEQ ID NO: 21646
  source 1..429: mol_type = other DNA

SEQ ID NO: 23067 - DNA, 453 bp, synthetic construct; identical to SEQ ID NO: 21645
  source 1..453: mol_type = other DNA

SEQ ID NO: 23068 - DNA, 411 bp, synthetic construct; identical to SEQ ID NO: 21648
  source 1..411: mol_type = other DNA

SEQ ID NO: 23069 - DNA, 456 bp, synthetic construct; identical to SEQ ID NO: 21649
  source 1..456: mol_type = other DNA

SEQ ID NO: 23070 - DNA, 435 bp, synthetic construct; identical to SEQ ID NO: 21650
  source 1..435: mol_type = other DNA

SEQ ID NO: 23071 - DNA, 25 bp, synthetic construct
  source 1..25: mol_type = other DNA
ggggggggggggggggggggggggg

SEQ ID NO: 23072 - DNA, 531 bp, synthetic construct; identical to SEQ ID NO: 21671
  source 1..531: mol_type = other DNA

SEQ ID NO: 23073 - DNA, 501 bp, synthetic construct; identical to SEQ ID NO: 21672
  source 1..501: mol_type = other DNA

SEQ ID NO: 23074 - DNA, 528 bp, synthetic construct; identical to SEQ ID NO: 21673
  source 1..528: mol_type = other DNA

SEQ ID NO: 23075 - DNA, 558 bp, synthetic construct; identical to SEQ ID NO: 21674
  source 1..558: mol_type = other DNA

SEQ ID NO: 23076 - DNA, 552 bp, synthetic construct; identical to SEQ ID NO: 21675
  source 1..552: mol_type = other DNA

SEQ ID NO: 23077 - DNA, 528 bp, synthetic construct; identical to SEQ ID NO: 21676
  source 1..528: mol_type = other DNA

SEQ ID NO: 23078 - DNA, 552 bp, synthetic construct; identical to SEQ ID NO: 21675
  source 1..552: mol_type = other DNA

SEQ ID NO: 23079 - DNA, 510 bp, synthetic construct; identical to SEQ ID NO: 21678
  source 1..510: mol_type = other DNA

SEQ ID NO: 23080 - DNA, 555 bp, synthetic construct; identical to SEQ ID NO: 21679
  source 1..555: mol_type = other DNA

SEQ ID NO: 23081 - DNA, 534 bp, synthetic construct; identical to SEQ ID NO: 21680
  source 1..534: mol_type = other DNA

SEQ ID NO: 23082 - DNA, 537 bp, synthetic construct; identical to SEQ ID NO: 21681
  source 1..537: mol_type = other DNA

SEQ ID NO: 23083 - DNA, 507 bp, synthetic construct; identical to SEQ ID NO: 21682
  source 1..507: mol_type = other DNA

SEQ ID NO: 23084 - DNA, 534 bp, synthetic construct; identical to SEQ ID NO: 21683
  source 1..534: mol_type = other DNA

SEQ ID NO: 23085 - DNA, 564 bp, synthetic construct; identical to SEQ ID NO: 21684
  source 1..564: mol_type = other DNA

SEQ ID NO: 23086 - DNA, 558 bp, synthetic construct; identical to SEQ ID NO: 21685
  source 1..558: mol_type = other DNA

SEQ ID NO: 23087 - DNA, 534 bp, synthetic construct; identical to SEQ ID NO: 21686
  source 1..534: mol_type = other DNA

SEQ ID NO: 23088 - DNA, 558 bp, synthetic construct; identical to SEQ ID NO: 21685
  source 1..558: mol_type = other DNA

SEQ ID NO: 23089 - DNA, 516 bp, synthetic construct; identical to SEQ ID NO: 21688
  source 1..516: mol_type = other DNA

SEQ ID NO: 23090 - DNA, 561 bp, synthetic construct; identical to SEQ ID NO: 21689
  source 1..561: mol_type = other DNA

SEQ ID NO: 23091 - DNA, 540 bp, synthetic construct; identical to SEQ ID NO: 21690
  source 1..540: mol_type = other DNA

SEQ ID NO: 23092 - DNA, 546 bp, synthetic construct; identical to SEQ ID NO: 21691
  source 1..546: mol_type = other DNA

SEQ ID NO: 23093 - DNA, 516 bp, synthetic construct; identical to SEQ ID NO: 21692
  source 1..516: mol_type = other DNA

SEQ ID NO: 23094 - DNA, 543 bp, synthetic construct; identical to SEQ ID NO: 21693
  source 1..543: mol_type = other DNA

SEQ ID NO: 23095 - DNA, 573 bp, synthetic construct; identical to SEQ ID NO: 21694
  source 1..573: mol_type = other DNA

SEQ ID NO: 23096 - DNA, 567 bp, synthetic construct; identical to SEQ ID NO: 21695
  source 1..567: mol_type = other DNA

SEQ ID NO: 23097 - DNA, 543 bp, synthetic construct; identical to SEQ ID NO: 21696
  source 1..543: mol_type = other DNA

SEQ ID NO: 23098 - DNA, 567 bp, synthetic construct; identical to SEQ ID NO: 21695
  source 1..567: mol_type = other DNA

SEQ ID NO: 23099 - DNA, 525 bp, synthetic construct; identical to SEQ ID NO: 21698
  source 1..525: mol_type = other DNA

SEQ ID NO: 23100 - DNA, 570 bp, synthetic construct; identical to SEQ ID NO: 21699
  source 1..570: mol_type = other DNA

SEQ ID NO: 23101 - DNA, 549 bp, synthetic construct; identical to SEQ ID NO: 21700
  source 1..549: mol_type = other DNA

SEQ ID NO: 23102 - DNA, 507 bp, synthetic construct; identical to SEQ ID NO: 21701
  source 1..507: mol_type = other DNA

SEQ ID NO: 23103 - DNA, 477 bp, synthetic construct; identical to SEQ ID NO: 21702
  source 1..477: mol_type = other DNA

SEQ ID NO: 23104 - DNA, 504 bp, synthetic construct; identical to SEQ ID NO: 21703
  source 1..504: mol_type = other DNA

SEQ ID NO: 23105 - DNA, 534 bp, synthetic construct; identical to SEQ ID NO: 21704
  source 1..534: mol_type = other DNA

SEQ ID NO: 23106 - DNA, 528 bp, synthetic construct; identical to SEQ ID NO: 21705
  source 1..528: mol_type = other DNA

SEQ ID NO: 23107 - DNA, 504 bp, synthetic construct; identical to SEQ ID NO: 21706
  source 1..504: mol_type = other DNA

SEQ ID NO: 23108 - DNA, 528 bp, synthetic construct; identical to SEQ ID NO: 21705
  source 1..528: mol_type = other DNA

SEQ ID NO: 23109 - DNA, 486 bp, synthetic construct; identical to SEQ ID NO: 21708
  source 1..486: mol_type = other DNA

SEQ ID NO: 23110 - DNA, 531 bp, synthetic construct; identical to SEQ ID NO: 21709
  source 1..531: mol_type = other DNA

SEQ ID NO: 23111 - DNA, 510 bp, synthetic construct; identical to SEQ ID NO: 21710
  source 1..510: mol_type = other DNA

SEQ ID NO: 23112 - DNA, 531 bp, synthetic construct; identical to SEQ ID NO: 21671
  source 1..531: mol_type = other DNA

SEQ ID NO: 23113 - DNA, 501 bp, synthetic construct; identical to SEQ ID NO: 21672
  source 1..501: mol_type = other DNA

SEQ ID NO: 23114 - DNA, 528 bp, synthetic construct; identical to SEQ ID NO: 21673
  source 1..528: mol_type = other DNA

SEQ ID NO: 23115 - DNA, 558 bp, synthetic construct; identical to SEQ ID NO: 21674
  source 1..558: mol_type = other DNA

SEQ ID NO: 23116 - DNA, 552 bp, synthetic construct; identical to SEQ ID NO: 21675
  source 1..552: mol_type = other DNA

SEQ ID NO: 23117 - DNA, 528 bp, synthetic construct; identical to SEQ ID NO: 21676
  source 1..528: mol_type = other DNA

SEQ ID NO: 23118 - DNA, 552 bp, synthetic construct; identical to SEQ ID NO: 21675
  source 1..552: mol_type = other DNA

SEQ ID NO: 23119 - DNA, 510 bp, synthetic construct; identical to SEQ ID NO: 21678
  source 1..510: mol_type = other DNA

SEQ ID NO: 23120 - DNA, 555 bp, synthetic construct; identical to SEQ ID NO: 21679
  source 1..555: mol_type = other DNA

SEQ ID NO: 23121 - DNA, 534 bp, synthetic construct; identical to SEQ ID NO: 21680
  source 1..534: mol_type = other DNA

SEQ ID NO: 23122 - DNA, 510 bp, synthetic construct; identical to SEQ ID NO: 21506
  source 1..510: mol_type = other DNA

SEQ ID NO: 23123 - DNA, 480 bp, synthetic construct; identical to SEQ ID NO: 21507
  source 1..480: mol_type = other DNA

SEQ ID NO: 23124 - DNA, 507 bp, synthetic construct; identical to SEQ ID NO: 21508
  source 1..507: mol_type = other DNA

SEQ ID NO: 23125 - DNA, 537 bp, synthetic construct; identical to SEQ ID NO: 21509
  source 1..537: mol_type = other DNA

SEQ ID NO: 23126 - DNA, 531 bp, synthetic construct; identical to SEQ ID NO: 21510
  source 1..531: mol_type = other DNA

SEQ ID NO: 23127 - DNA, 507 bp, synthetic construct; identical to SEQ ID NO: 21511
  source 1..507: mol_type = other DNA

SEQ ID NO: 23128 - DNA, 531 bp, synthetic construct; identical to SEQ ID NO: 21510
  source 1..531: mol_type = other DNA

SEQ ID NO: 23129 - DNA, 489 bp, synthetic construct; identical to SEQ ID NO: 21513
  source 1..489: mol_type = other DNA

SEQ ID NO: 23130 - DNA, 534 bp, synthetic construct; identical to SEQ ID NO: 21514
  source 1..534: mol_type = other DNA

SEQ ID NO: 23131 - DNA, 513 bp, synthetic construct; identical to SEQ ID NO: 21515
  source 1..513: mol_type = other DNA

SEQ ID NO: 23132 - DNA, 26 bp, synthetic construct
  source 1..26: mol_type = other DNA
gggggggggggggggggggggggggg

SEQ ID NO: 23133 - DNA, 477 bp, synthetic construct; identical to SEQ ID NO: 21731
  source 1..477: mol_type = other DNA

SEQ ID NO: 23134 - DNA, 447 bp, synthetic construct; identical to SEQ ID NO: 21732
  source 1..447: mol_type = other DNA

SEQ ID NO: 23135 - DNA, 474 bp, synthetic construct; identical to SEQ ID NO: 21733
  source 1..474: mol_type = other DNA

SEQ ID NO: 23136 - DNA, 456 bp, synthetic construct; identical to SEQ ID NO: 21734
  source 1..456: mol_type = other DNA

SEQ ID NO: 23137 - DNA, 450 bp, synthetic construct; identical to SEQ ID NO: 21735
  source 1..450: mol_type = other DNA

SEQ ID NO: 23138 - DNA, 480 bp, synthetic construct; identical to SEQ ID NO: 21736
  source 1..480: mol_type = other DNA

SEQ ID NO: 23139 - DNA, 501 bp, synthetic construct; identical to SEQ ID NO: 21737
  source 1..501: mol_type = other DNA

SEQ ID NO: 23140 - DNA, 480 bp, synthetic construct; identical to SEQ ID NO: 21738
  source 1..480: mol_type = other DNA

SEQ ID NO: 23141 - DNA, 483 bp, synthetic construct; identical to SEQ ID NO: 21739
  source 1..483: mol_type = other DNA

SEQ ID NO: 23142 - DNA, 453 bp, synthetic construct; identical to SEQ ID NO: 21740
  source 1..453: mol_type = other DNA

SEQ ID NO: 23143 - DNA, 480 bp, synthetic construct; identical to SEQ ID NO: 21741
  source 1..480: mol_type = other DNA

SEQ ID NO: 23144 - DNA, 462 bp, synthetic construct; identical to SEQ ID NO: 21742
  source 1..462: mol_type = other DNA

SEQ ID NO: 23145 - DNA, 456 bp, synthetic construct; identical to SEQ ID NO: 21743
  source 1..456: mol_type = other DNA

SEQ ID NO: 23146 - DNA, 486 bp, synthetic construct; identical to SEQ ID NO: 21744
  source 1..486: mol_type = other DNA

SEQ ID NO: 23147 - DNA, 507 bp, synthetic construct; identical to SEQ ID NO: 21745
  source 1..507: mol_type = other DNA

SEQ ID NO: 23148 - DNA, 486 bp, synthetic construct; identical to SEQ ID NO: 21746
  source 1..486: mol_type = other DNA

SEQ ID NO: 23149 - DNA, 507 bp, synthetic construct; identical to SEQ ID NO: 21747
  source 1..507: mol_type = other DNA

SEQ ID NO: 23150 - DNA, 477 bp, synthetic construct; identical to SEQ ID NO: 21748
  source 1..477: mol_type = other DNA

SEQ ID NO: 23151 - DNA, 504 bp, synthetic construct; identical to SEQ ID NO: 21749
  source 1..504: mol_type = other DNA

SEQ ID NO: 23152 - DNA, 486 bp, synthetic construct; identical to SEQ ID NO: 21750
  source 1..486: mol_type = other DNA

SEQ ID NO: 23153 - DNA, 480 bp, synthetic construct; identical to SEQ ID NO: 21751
  source 1..480: mol_type = other DNA

SEQ ID NO: 23154 - DNA, 510 bp, synthetic construct; identical to SEQ ID NO: 21752
  source 1..510: mol_type = other DNA

SEQ ID NO: 23155 - DNA, 531 bp, synthetic construct; identical to SEQ ID NO: 21753
  source 1..531: mol_type = other DNA

SEQ ID NO: 23156 - DNA, 510 bp, synthetic construct; identical to SEQ ID NO: 21754
  source 1..510: mol_type = other DNA

SEQ ID NO: 23157 - DNA, 522 bp, synthetic construct; identical to SEQ ID NO: 21755
  source 1..522: mol_type = other DNA

SEQ ID NO: 23158 - DNA, 492 bp, synthetic construct; identical to SEQ ID NO: 21756
  source 1..492: mol_type = other DNA

SEQ ID NO: 23159 - DNA, 519 bp, synthetic construct; identical to SEQ ID NO: 21757
  source 1..519: mol_type = other DNA

SEQ ID NO: 23160 - DNA, 501 bp, synthetic construct; identical to SEQ ID NO: 21758
  source 1..501: mol_type = other DNA

SEQ ID NO: 23161 - DNA, 495 bp, synthetic construct; identical to SEQ ID NO: 21759
  source 1..495: mol_type = other DNA

SEQ ID NO: 23162 - DNA, 525 bp, synthetic construct; identical to SEQ ID NO: 21760
  source 1..525: mol_type = other DNA

SEQ ID NO: 23163 - DNA, 546 bp, synthetic construct; identical to SEQ ID NO: 21761
  source 1..546: mol_type = other DNA

SEQ ID NO: 23164 - DNA, 525 bp, synthetic construct; identical to SEQ ID NO: 21762
  source 1..525: mol_type = other DNA

SEQ ID NO: 23165 - DNA, 507 bp, synthetic construct; identical to SEQ ID NO: 21747
  source 1..507: mol_type = other DNA

SEQ ID NO: 23166 - DNA, 477 bp, synthetic construct; identical to SEQ ID NO: 21748
  source 1..477: mol_type = other DNA

SEQ ID NO: 23167 - DNA, 504 bp, synthetic construct; identical to SEQ ID NO: 21749
  source 1..504: mol_type = other DNA

SEQ ID NO: 23168 - DNA, 486 bp, synthetic construct; identical to SEQ ID NO: 21750
  source 1..486: mol_type = other DNA

SEQ ID NO: 23169 - DNA, 480 bp, synthetic construct; identical to SEQ ID NO: 21751
  source 1..480: mol_type = other DNA

SEQ ID NO: 23170 - DNA, 510 bp, synthetic construct; identical to SEQ ID NO: 21752
  source 1..510: mol_type = other DNA

SEQ ID NO: 23171 - DNA, 531 bp, synthetic construct; identical to SEQ ID NO: 21753
  source 1..531: mol_type = other DNA

SEQ ID NO: 23172 - DNA, 510 bp, synthetic construct; identical to SEQ ID NO: 21754
  source 1..510: mol_type = other DNA

SEQ ID NO: 23173 - DNA, 31 bp, synthetic construct; identical to SEQ ID NO: 304
  source 1..31: mol_type = other DNA

SEQ ID NO: 23174 - DNA, 429 bp, synthetic construct; identical to SEQ ID NO: 21771
  source 1..429: mol_type = other DNA

SEQ ID NO: 23175 - DNA, 399 bp, synthetic construct; identical to SEQ ID NO: 21772
  source 1..399: mol_type = other DNA

SEQ ID NO: 23176 - DNA, 426 bp, synthetic construct; identical to SEQ ID NO: 21773
  source 1..426: mol_type = other DNA

SEQ ID NO: 23177 - DNA, 408 bp, synthetic construct; identical to SEQ ID NO: 21774
  source 1..408: mol_type = other DNA

SEQ ID NO: 23178 - DNA, 402 bp, synthetic construct; identical to SEQ ID NO: 21775
  source 1..402: mol_type = other DNA

SEQ ID NO: 23179 - DNA, 432 bp, synthetic construct; identical to SEQ ID NO: 21776
  source 1..432: mol_type = other DNA

SEQ ID NO: 23180 - DNA, 456 bp, synthetic construct; identical to SEQ ID NO: 21777
  source 1..456: mol_type = other DNA

SEQ ID NO: 23181 - DNA, 450 bp, synthetic construct; identical to SEQ ID NO: 21778
  source 1..450: mol_type = other DNA

SEQ ID NO: 23182 - DNA, 426 bp, synthetic construct; identical to SEQ ID NO: 21779
  source 1..426: mol_type = other DNA

SEQ ID NO: 23183 - DNA, 453 bp, synthetic construct; identical to SEQ ID NO: 17334
  source 1..453: mol_type = other DNA

SEQ ID NO: 23184 - DNA, 432 bp, synthetic construct; identical to SEQ ID NO: 21781
  source 1..432: mol_type = other DNA

SEQ ID NO: 23185 - DNA, 450 bp, synthetic construct; identical to SEQ ID NO: 21782
  source 1..450: mol_type = other DNA

SEQ ID NO: 23186 - DNA, 420 bp, synthetic construct; identical to SEQ ID NO: 21783
  source 1..420: mol_type = other DNA

SEQ ID NO: 23187 - DNA, 447 bp, synthetic construct; identical to SEQ ID NO: 21784
  source 1..447: mol_type = other DNA

SEQ ID NO: 23188 - DNA, 429 bp, synthetic construct; identical to SEQ ID NO: 21785
  source 1..429: mol_type = other DNA

SEQ ID NO: 23189 - DNA, 423 bp, synthetic construct; identical to SEQ ID NO: 21786
  source 1..423: mol_type = other DNA

SEQ ID NO: 23190 - DNA, 453 bp, synthetic construct; identical to SEQ ID NO: 21787
  source 1..453: mol_type = other DNA

SEQ ID NO: 23191 - DNA, 477 bp, synthetic construct; identical to SEQ ID NO: 21788
  source 1..477: mol_type = other DNA

SEQ ID NO: 23192 - DNA, 471 bp, synthetic construct; identical to SEQ ID NO: 21789
  source 1..471: mol_type = other DNA

SEQ ID NO: 23193 - DNA, 447 bp, synthetic construct; identical to SEQ ID NO: 21790
  source 1..447: mol_type = other DNA

SEQ ID NO: 23194 - DNA, 471 bp, synthetic construct; identical to SEQ ID NO: 21789
  source 1..471: mol_type = other DNA

SEQ ID NO: 23195 - DNA, 429 bp, synthetic construct; identical to SEQ ID NO: 21792
  source 1..429: mol_type = other DNA

SEQ ID NO: 23196 - DNA, 429 bp, synthetic construct; identical to SEQ ID NO: 21771
  source 1..429: mol_type = other DNA

SEQ ID NO: 23197 - DNA, 399 bp, synthetic construct; identical to SEQ ID NO: 21772
  source 1..399: mol_type = other DNA

SEQ ID NO: 23198 - DNA, 426 bp, synthetic construct; identical to SEQ ID NO: 21773
  source 1..426: mol_type = other DNA

SEQ ID NO: 23199 - DNA, 408 bp, synthetic construct; identical to SEQ ID NO: 21774
  source 1..408: mol_type = other DNA

SEQ ID NO: 23200 - DNA, 402 bp, synthetic construct; identical to SEQ ID NO: 21775
  source 1..402: mol_type = other DNA

SEQ ID NO: 23201 - DNA, 432 bp, synthetic construct; identical to SEQ ID NO: 21776
  source 1..432: mol_type = other DNA

SEQ ID NO: 23202 - DNA, 456 bp, synthetic construct; identical to SEQ ID NO: 21777
  source 1..456: mol_type = other DNA

SEQ ID NO: 23203 - DNA, 450 bp, synthetic construct; identical to SEQ ID NO: 21778
  source 1..450: mol_type = other DNA

SEQ ID NO: 23204 - DNA, 426 bp, synthetic construct; identical to SEQ ID NO: 21779
  source 1..426: mol_type = other DNA

SEQ ID NO: 23205 - DNA, 450 bp, synthetic construct; identical to SEQ ID NO: 21778
  source 1..450: mol_type = other DNA

SEQ ID NO: 23206 - DNA, 408 bp, synthetic construct; identical to SEQ ID NO: 21803
  source 1..408: mol_type = other DNA

SEQ ID NO: 23207 - DNA, 450 bp, synthetic construct; identical to SEQ ID NO: 21782
  source 1..450: mol_type = other DNA

SEQ ID NO: 23208 - DNA, 420 bp, synthetic construct; identical to SEQ ID NO: 21783
  source 1..420: mol_type = other DNA

SEQ ID NO: 23209 - DNA, 447 bp, synthetic construct; identical to SEQ ID NO: 21784
  source 1..447: mol_type = other DNA

SEQ ID NO: 23210 - DNA, 429 bp, synthetic construct; identical to SEQ ID NO: 21785
  source 1..429: mol_type = other DNA

SEQ ID NO: 23211 - DNA, 423 bp, synthetic construct; identical to SEQ ID NO: 21786
  source 1..423: mol_type = other DNA

SEQ ID NO: 23212 - DNA, 453 bp, synthetic construct; identical to SEQ ID NO: 21787
  source 1..453: mol_type = other DNA

SEQ ID NO: 23213 - DNA, 477 bp, synthetic construct; identical to SEQ ID NO: 21788
  source 1..477: mol_type = other DNA

SEQ ID NO: 23214 - DNA, 471 bp, synthetic construct; identical to SEQ ID NO: 21789
  source 1..471: mol_type = other DNA

SEQ ID NO: 23215 - DNA, 447 bp, synthetic construct; identical to SEQ ID NO: 21790
  source 1..447: mol_type = other DNA

SEQ ID NO: 23216 - DNA, 471 bp, synthetic construct; identical to SEQ ID NO: 21789
  source 1..471: mol_type = other DNA

SEQ ID NO: 23217 - DNA, 429 bp, synthetic construct; identical to SEQ ID NO: 21792
  source 1..429: mol_type = other DNA

SEQ ID NO: 23218 - DNA, 546 bp, synthetic construct; identical to SEQ ID NO: 21538
  source 1..546: mol_type = other DNA

SEQ ID NO: 23219 - DNA, 522 bp, synthetic construct; identical to SEQ ID NO: 21530
  source 1..522: mol_type = other DNA

SEQ ID NO: 23220 - DNA, 561 bp, synthetic construct; identical to SEQ ID NO: 21554
  source 1..561: mol_type = other DNA

SEQ ID NO: 23221 - DNA, 456 bp, synthetic construct; identical to SEQ ID NO: 21584
  source 1..456: mol_type = other DNA

SEQ ID NO: 23222 - DNA, 414 bp, synthetic construct; identical to SEQ ID NO: 21609
  source 1..414: mol_type = other DNA

SEQ ID NO: 23223 - DNA, 420 bp, synthetic construct
  source 1..420: mol_type = other DNA
atccagaaccctgatcctgccgtgtaccagctgcgggatagcaagagcagcgacaagagcgtgtgtctgttcaccgacttcgacagccagaccaacgtgtcccagagcaaggactccgacgtgtacatcaccgataagtgcgtgctggacatgcggagcatggacttcaagagcaactccgccgtggcctggtccaacaagtccgatttcgcctgcgccaacgccttcaacaacagcattatccccgaggacacattcttcccaagccccgagagcagctgcgacgtgaagctggtggaaaagagcttcgagacagacaccaacctgaacttccagaacctgagcgtgatcggcctgcggatgctgttcgccaaaaccgtggccgtgaacttcctgctgaccgccaagctgttcttcctc

SEQ ID NO: 23224 - DNA, 420 bp, synthetic construct
  source 1..420: mol_type = other DNA
atccagaaccctgatcctgccgtgtaccagctgcgggatagcaagagcagcgacaagagcgtgtgtctgttcaccgacttcgacagccagaccaacgtgtcccagagcaaggactccgacgtgtacatcaccgataagtgcgtgctggacatgcggagcatggacttcaagagcaactccgccgtggcctggtccaacaagtccgatttcgcctgcgccaacgccttcaacaacagcattatccccgaggacacattcttcccaagccccgagagcagctgcgacgtgaagctggtggaaaagagcttcgagacagacaccaacctgaacttccagaacctgagcgtgctgggcctgcggatgctgttcgccaaaaccgtggccgtgaacttcctgctgaccgccaagctgttcttcctc

SEQ ID NO: 23225 - DNA, 420 bp, synthetic construct; identical to SEQ ID NO: 23224
  source 1..420: mol_type = other DNA

SEQ ID NO: 23226 - DNA, 459 bp, synthetic construct
  source 1..459: mol_type = other DNA
agccagcctcacaccaagcccagcgtgttcgtgatgaagaacggcaccaacgtggcctgcctcgtgaaagagttctaccccaaggacatcaggatcaacctggtgtccagcaagaagatcaccgagttcgaccccgccatcgtgatctcccccagcggcaagtacaacgccgtgaagctggggaagtacgaggacagcaacagcgtgacctgctccgtgcagcacgacaacaagaccgtgcacagcaccgactttgaagtgaaaaccgactccaccgaccacgtgaagcccaaagagacagagaacaccaagcagcccagcaagagctgccacaagcccaaggccatcgtgcacaccgagaaagtgaacatgatgagcctgaccgtgctgggcttcagaatcctgctgctgaaagtggccggctttaacctgctgatgaccctgcggctgtggtccagc

SEQ ID NO: 23227 - DNA, 459 bp, synthetic construct
  source 1..459: mol_type = other DNA
agccagcctcacaccaagcccagcgtgttcgtgatgaagaacggcaccaacgtggcctgcctcgtgaaagagttctaccccaaggacatcaggatcaacctggtgtccagcaagaagatcaccgagttcgaccccgccatcgtgatctcccccagcggcaagtacaacgccgtgaagctggggaagtacgaggacagcaacagcgtgacctgctccgtgcagcacgacaacaagaccgtgcacagcaccgactttgaagtgaaaaccgactccaccgaccacgtgaagcccaaagagacagagaacaccaagcagcccagcaagagctgccacaagcccaaggccatcgtgcacaccgagaaagtgaacatgatgagcctgaccgtgatcggcttcagaatcctgctgctgaaagtggccggctttaacctgctgatgaccctgcggctgtggtccagc

SEQ ID NO: 23228 - DNA, 540 bp, synthetic construct
  source 1..540: mol_type = other DNA
gaggacctgaagaacgtgttcccacctgaggtggccgtgttcgagcctagcgaggccgagatcagccacacccagaaagccaccctcgtgtgcctggctaccggcttctaccccgaccatgtggaactgtcttggtgggtcaacggcaaagaggtgcacagcggcgtgtgtaccgacccccagccactgaaagaacagcccgccctgaacgacagccggtactgcctgagcagcagactgagagtgtccgccaccttctggcagaacccccggaaccacttcagatgccaggtgcagttctacggcctgagcgagaacgacgagtggacccaggacagagccaagcccgtgacccagatcgtgtctgccgaagcctggggcagagccgattgcggctttaccagcgagagctaccagcagggcgtgctgagcgccaccatcctgtacttgttgctgctgctgaagtccgtggtgtacttcgccatcatcacatgctgcctgctgcggagaaccgccttctgctgcaacggcgagaagtct

SEQ ID NO: 23229 - DNA, 540 bp, synthetic construct
  source 1..540: mol_type = other DNA
gaggacctgaagaacgtgttcccacctgaggtggccgtgttcgagcctagcgaggccgagatcagccacacccagaaagccaccctcgtgtgcctggctaccggcttctaccccgaccatgtggaactgtcttggtgggtcaacggcaaagaggtgcacagcggcgtgtgtaccgacccccagccactgaaagaacagcccgccctgaacgacagccggtactgcctgagcagcagactgagagtgtccgccaccttctggcagaacccccggaaccacttcagatgccaggtgcagttctacggcctgagcgagaacgacgagtggacccaggacagagccaagcccgtgacccagatcgtgtctgccgaagcctggggcagagccgattgcggctttaccagcgagagctaccagcagggcgtgctgagcgcctactacatgtacttgttgctgctgctgaagtccgtggtgtacttcgccatcatcacatgctgcctgctgcggagaaccgccttctgctgcaacggcgagaagtct

SEQ ID NO: 23230 - DNA, 516 bp, synthetic construct
  source 1..516: mol_type = other DNA
gacaagcagctggacgccgacgtgtcccccaagcctaccatcttcctgccctctatcgccgagacaaagctccagaaggccggcacctacctgtgcctgctggaaaagttcttcccagatgtgattaagatccactggcaggaaaagaagtccaacaccatcctgggcagccaggaaggcaacaccatgaagaccaacgacacctacatgaagttcagctggctgaccgtgcccgagaagtccctggacaaagaacacagatgcatcgtgcggcacgaaaacaacaagaacggcgtggaccaggaaatcatcttcccacccatcaagaccgatgtgattacaatggaccccaaggacaactgctccaaggacgccaacgataccctgctgctccagctgaccaacaccagcgcctactacatgtacgagatcctgctgggcaaggccaccctgtacgccgtgctggtgtctgccctggtgctgatggctatggtcaagcggaaggacagccgggga

SEQ ID NO: 23231 - DNA, 516 bp, synthetic construct
  source 1..516: mol_type = other DNA
gacaagcagctggacgccgacgtgtcccccaagcctaccatcttcctgccctctatcgccgagacaaagctccagaaggccggcacctacctgtgcctgctggaaaagttcttcccagatgtgattaagatccactggcaggaaaagaagtccaacaccatcctgggcagccaggaaggcaacaccatgaagaccaacgacacctacatgaagttcagctggctgaccgtgcccgagaagtccctggacaaagaacacagatgcatcgtgcggcacgaaaacaacaagaacggcgtggaccaggaaatcatcttcccacccatcaagaccgatgtgattacaatggaccccaaggacaactgctccaaggacgccaacgataccctgctgctccagctgaccaacaccagcgccaccatcctgtacgagatcctgctgggcaaggccaccctgtacgccgtgctggtgtctgccctggtgctgatggctatggtcaagcggaaggacagccgggga

SEQ ID NO: 23232 - DNA, 537 bp, synthetic construct
  source 1..537: mol_type = other DNA
gaggacctgaagaacgtgttcccacctgaggtggccgtgttcgagcctagcgaggccgagatcagccacacccagaaagccaccctcgtgtgcctggctaccggcttctaccccgaccatgtggaactgtcttggtgggtcaacggcaaagaggtgcacagcggcgtgtgtaccgacccccagccactgaaagaacagcccgccctgaacgacagccggtactgcctgagcagcagactgagagtgtccgccaccttctggcagaacccccggaaccacttcagatgccaggtgcagttctacggcctgagcgagaacgacgagtggacccaggacagagccaagcccgtgacccagatcgtgtctgccgaagcctggggcagagccgatagcggctttaccagcgagagctaccagcagggcgtgctgagcgccaccatcctgtacgagatcctgctgggcaaggccaccctgtacgccgtgctggtgtctgccctggtgctgatggctatggtcaagcggaaggacagccgggga

SEQ ID NO: 23233 - DNA, 420 bp, synthetic construct
  source 1..420: mol_type = other DNA
atccagaaccctgatcctgccgtgtaccagctgcgggatagcaagagcagcgacaagagcgtgtgtctgttcaccgacttcgacagccagaccaacgtgtcccagagcaaggactccgacgtgtacatcaccgataagtgcgtgctggacatgcggagcatggacttcaagagcaactccgccgtggcctggtccaacaagtccgatttcgcctgcgccaacgccttcaacaacagcattatccccgaggacacattcttcccaagccccgagagcagcagcgacgtgaagctggtggaaaagagcttcgagacagacaccaacctgaacttccagaacctgagcgtgatcggcttcagaatcctgctgctgaaagtggccggctttaacctgctgatgaccctgcggctgtggtccagc

SEQ ID NO: 23234 - DNA, 537 bp, synthetic construct
  source 1..537: mol_type = other DNA
gaggacctgaagaacgtgttcccacctgaggtggccgtgttcgagcctagcgaggccgagatcagccacacccagaaagccaccctcgtgtgcctggctaccggcttctaccccgaccatgtggaactgtcttggtgggtcaacggcaaagaggtgcacagcggcgtgtgtaccgacccccagccactgaaagaacagcccgccctgaacgacagccggtactgcctgagcagcagactgagagtgtccgccaccttctggcagaacccccggaaccacttcagatgccaggtgcagttctacggcctgagcgagaacgacgagtggacccaggacagagccaagcccgtgacccagatcgtgtctgccgaagcctggggcagagccgatggcggctttaccagcgagagctaccagcagggcgtgctgagcgccaccatcctgtacgagatcctgctgggcaaggccaccctgtacgccgtgctggtgtctgccctggtgctgatggctatggtcaagcggaaggacagccgggga

SEQ ID NO: 23235 - DNA, 420 bp, synthetic construct
  source 1..420: mol_type = other DNA
atccagaaccctgatcctgccgtgtaccagctgcgggatagcaagagcagcgacaagagcgtgtgtctgttcaccgacttcgacagccagaccaacgtgtcccagagcaaggactccgacgtgtacatcaccgataagtgcgtgctggacatgcggagcatggacttcaagagcaactccgccgtggcctggtccaacaagtccgatttcgcctgcgccaacgccttcaacaacagcattatccccgaggacacattcttcccaagccccgagagcagccgggacgtgaagctggtggaaaagagcttcgagacagacaccaacctgaacttccagaacctgagcgtgatcggcttcagaatcctgctgctgaaagtggccggctttaacctgctgatgaccctgcggctgtggtccagc

SEQ ID NO: 23236 - DNA, 2538 bp, synthetic construct
  source 1..2538: mol_type = other DNA
atggccttaccagtgaccgccttgctcctgccgctggccttgctgctccacgccgccaggccggaacctgaagtgacacagacccctagccaccaagtgacccagatgggccaagaagtgatcctgcgctgcgtgcccatcagcaaccacctgtacttctactggtatcggcagatcctgggccagaaagtggaatttctggtgtccttctacaacaacgagatcagcgagaagtccgagattttcgacgaccagttcagcgtggaaagacccgacggcagcaatttcaccctgaagatcagaagcaccaagttggaggactccgccatgtacttttgcgccagcagtagactggctggcggcatggatgagcagttctttggccctggcaccagactgaccgtgctcgagggacagcctaaggccaatcctaccgtgacactgttccctccaagcagcgaagaactccaggccaacaaggccacacttgtgtgcctgatctccgacttctaccctggggctgtgacagtggcttggaaggccgatggatctcctgtgaaagccggcgtggaaaccaccaagccatccaagcagagcaacaacaaatacgccgccagctcctacctgagcctgacacctgagcagtggaagtcccacagatcctacagctgccaagtgacccacgaaggcagcaccgtggaaaagacagtggcccctacagagtgcagccccatcaagaccgatgtgattacaatggaccccaaggacaactgctccaaggacgccaacgataccctgctgctccagctgaccaacaccagcgcctactacatgtacttgttgctgctgctgaagtccgtggtgtacttcgccatcatcacatgctgcctgctgcggagaaccgccttctgctgcaacggcgagaagtctagggccaagcgatctggatctggagcaacaaacttctcactactcaaacaagcaggtgacgtggaggagaatcccgggcctactagtatggactggatttggcgcatccttttccttgtcggcgctgctaccggcgcccattccttcgaaatcctgaacgtggaacagagccctcagagcctgcatgtgcaagagggcgacagcaccaacttcacctgtagcttccccagcagcaacttctacgccctgcactggtacagatgggagacagccaagtctcccgaggcactgttcgtgatgaccctgaacggcgacgagaagaagaagggcagaatcagcgccacactgaacaccaaagagggctactcctacctgtacatcaagggcagccagcctgaggacagcgccacttacctgtgcgcctttaaagccgccggaaacaagctgaccttcggcggaggaacaagagtgctggtcaagcccaacatccagaaccctgatcctgccgtgtaccagctgcgggatagcaagagcagcgacaagagcgtgtgtctgttcaccgacttcgacagccagaccaacgtgtcccagagcaaggactccgacgtgtacatcaccgataagtgcgtgctggacatgcggagcatggacttcaagagcaactccgccgtggcctggtccaacaagtccgatttcgcctgcgccaacgccttcaacaacagcattatccccgaggacacattcttcccaagccccgagagcagctgcgacgtgaagctggtggaaaagagcttcgagacagacaccaacctgaacttccagaacctgagcgtgatcggcttcagaatcctgctgctgaaagtggccggctttaacctgctgatgaccctgcggctgtggtccagccgcgccaagagaagcggatctggcgtgaagcagaccctgaatttcgacctgctgaagctggctggcgacgtggaatccaacccaggcccttctagaggccatatgaccgagtacaagcccacggtgcgcctcgccacccgcgacgacgtccccagggccgtacgcaccctcgccgccgcgttcgccgactaccccgccacgcgccacaccgtcgatccggaccgccacatcgagcgggtcaccgagctgcaagaactcttcctcacgcgcgtcgggctcgacatcggcaaggtgtgggtcgcggacgacggcgccgcggtggcggtctggaccacgccggagagcgtcgaagcgggggcggtgttcgccgagatcggcccgcgcatggccgagttgagcggttcccggctggccgcgcagcaacagatggaaggcctcctggcgccgcaccggcccaaggagcccgcgtggttcctggccaccgtcggcgtctcgcccgaccaccagggcaagggtctgggcagcgccgtcgtgctccccggagtggaggcggccgagcgcgccggggtgcccgccttcctggagacctccgcgccccgcaacctccccttctacgagcggctcggcttcaccgtcaccgccgacgtcgaggtgcccgaaggaccgcgcacctggtgcatgacccgcaagcccggtgcctga

SEQ ID NO: 23237 - DNA, 1884 bp, synthetic construct
  source 1..1884: mol_type = other DNA
atggccttaccagtgaccgccttgctcctgccgctggccttgctgctccacgccgccaggccggacatccagatgacacagagccctagcagcctgtctgccagcgtgggagacagagtgaccatcacatgcaaggccagcgaccacatcaacaactggctggcctggtatcagcagaagcctggacaggcccctaagctgctgatctacggcgctaccacactggaaacaggcgtgcccagcagattttctggcagcggctctggcaccgactacaccctgacaatatccagcctccagcctgaggacttcgccacctactactgtcagcagagctggaacaccccttggacattcggccagggcaccaagctggaaatcaagagactcgacaagcagctggacgccgacgtgtcccccaagcctaccatcttcctgccctctatcgccgagacaaagctccagaaggccggcacctacctgtgcctgctggaaaagttcttcccagatgtgattaagatccactggcaggaaaagaagtccaacaccatcctgggcagccaggaaggcaacaccatgaagaccaacgacacctacatgaagttcagctggctgaccgtgcccgagaagtccctggacaaagaacacagatgcatcgtgcggcacgaaaacaacaagaacggcgtggaccaggaaatcatcttcccacccatcaagaccgatgtgattacaatggaccccaaggacaactgctccaaggacgccaacgataccctgctgctccagctgaccaacaccagcgcctactacatgtacgagatcctgctgggcaaggccaccctgtacgccgtgctggtgtctgccctggtgctgatggctatggtcaagcggaaggacagccggggaagggccaagcgatctggatctggagcaacaaacttctcactactcaaacaagcaggtgacgtggaggagaatcccgggcctactagtatggactggatttggcgcatccttttccttgtcggcgctgctaccggcgcgcattccttcgaacaagttcagcttcaacagcctggcgctgagctggtcaaacctggcgcttctgtgaagatgagctgcaaagccagcggctacgccttcagcagctactggatcaactggatgaagcagaaacccggccagggactcgaatggatcggccaaatctatcccggcgacggcgacaccaactacaacggcaagttcaagggcagagccacactgaccgccgatacctctagcagcacagcctacatgcagctgagcagcctgaccagcgaagatagcgccgtgtacttctgtgcccggtccatcacaacagtcgtgggctgcgctatggactattggggccagggaacaagcgtgaccgtgtctagtacgcgtagccagcctcacaccaagcccagcgtgttcgtgatgaagaacggcaccaacgtggcctgcctcgtgaaagagttctaccccaaggacatcaggatcaacctggtgtccagcaagaagatcaccgagttcgaccccgccatcgtgatctcccccagcggcaagtacaacgccgtgaagctggggaagtacgaggacagcaacagcgtgacctgctccgtgcagcacgacaacaagaccgtgcacagcaccgactttgaagtgaaaaccgactccaccgaccacgtgaagcccaaagagacagagaacaccaagcagcccagcaagagctgccacaagcccaaggccatcgtgcacaccgagaaagtgaacatgatgagcctgaccgtgctgggcttcagaatcctgctgctgaaagtggccggctttaacctgctgatgaccctgcggctgtggtccagc

SEQ ID NO: 23238 - DNA, 1875 bp, synthetic construct
  source 1..1875: mol_type = other DNA
atggccttaccagtgaccgccttgctcctgccgctggccttgctgctccacgccgccaggccggacatccagatgacacagactacatcctccctgtctgcctctctgggagacagagtcaccatcagttgcagggcaagtcaggacattagtaagtacctgaactggtatcagcagaaaccagatggaactgttaaactcctgatctaccatacatcaagattacactcaggagtcccatcaaggttcagtggcagtgggtctggaacagattattctctcaccattagcaacctggagcaagaagatattgccacttacttttgccaacagggtaatacgcttccgtacacgttcggaggggggaccaagctggagatcacactcgacaagcagctggacgccgacgtgtcccccaagcctaccatcttcctgccctctatcgccgagacaaagctccagaaggccggcacctacctgtgcctgctggaaaagttcttcccagatgtgattaagatccactggcaggaaaagaagtccaacaccatcctgggcagccaggaaggcaacaccatgaagaccaacgacacctacatgaagttcagctggctgaccgtgcccgagaagtccctggacaaagaacacagatgcatcgtgcggcacgaaaacaacaagaacggcgtggaccaggaaatcatcttcccacccatcaagaccgatgtgattacaatggaccccaaggacaactgctccaaggacgccaacgataccctgctgctccagctgaccaacaccagcgcctactacatgtacgagatcctgctgggcaaggccaccctgtacgccgtgctggtgtctgccctggtgctgatggctatggtcaagcggaaggacagccggggaagggccaagcgatctggatctggagcaacaaacttctcactactcaaacaagcaggtgacgtggaggagaatcccgggcctactagtatggactggatttggcgcatccttttccttgtcggcgctgctaccggcgcgcattccttcgaagtgaaactgcaggagtcaggacctggcctggtggcgccctcacagagcctgtccgtcacatgcactgtctcaggggtctcattacccgactatggtgtaagctggattcgccagcctccacgaaagggtctggagtggctgggagtaatatggggtagtgaaaccacatactataattcagctctcaaatccagactgaccatcatcaaggacaactccaagagccaagttttcttaaaaatgaacagtctgcaaactgatgacacagccatttactactgtgccaaacattattactacggtggtagctatgctatggactactggggccaaggaacctcagtcaccgtctcctcaacgcgtagccagcctcacaccaagcccagcgtgttcgtgatgaagaacggcaccaacgtggcctgcctcgtgaaagagttctaccccaaggacatcaggatcaacctggtgtccagcaagaagatcaccgagttcgaccccgccatcgtgatctcccccagcggcaagtacaacgccgtgaagctggggaagtacgaggacagcaacagcgtgacctgctccgtgcagcacgacaacaagaccgtgcacagcaccgactttgaagtgaaaaccgactccaccgaccacgtgaagcccaaagagacagagaacaccaagcagcccagcaagagctgccacaagcccaaggccatcgtgcacaccgagaaagtgaacatgatgagcctgaccgtgctgggcttcagaatcctgctgctgaaagtggccggctttaacctgctgatgaccctgcggctgtggtccagc

SEQ ID NO: 23239 - DNA, 1878 bp, synthetic construct
  source 1..1878: mol_type = other DNA
atggccttaccagtgaccgccttgctcctgccgctggccttgctgctccacgccgccaggccggagatcgtgatgacccagagccctgccaccctgtctctgagccctggcgaaagagccaccctgagctgtagagccagccaggacatcagcaagtacctgaactggtatcagcagaagcccggccaggcccccagactgctgatctaccacaccagcagactgcacagcggcatccccgccagattttctggctctggcagcggcaccgactacaccctgacaatcagcagcctccagcccgaggacttcgccgtgtacttctgtcagcaaggcaacaccctgccctacaccttcggccagggcaccaagctggaaatcaagctcgacaagcagctggacgccgacgtgtcccccaagcctaccatcttcctgccctctatcgccgagacaaagctccagaaggccggcacctacctgtgcctgctggaaaagttcttcccagatgtgattaagatccactggcaggaaaagaagtccaacaccatcctgggcagccaggaaggcaacaccatgaagaccaacgacacctacatgaagttcagctggctgaccgtgcccgagaagtccctggacaaagaacacagatgcatcgtgcggcacgaaaacaacaagaacggcgtggaccaggaaatcatcttcccacccatcaagaccgatgtgattacaatggaccccaaggacaactgctccaaggacgccaacgataccctgctgctccagctgaccaacaccagcgcctactacatgtacgagatcctgctgggcaaggccaccctgtacgccgtgctggtgtctgccctggtgctgatggctatggtcaagcggaaggacagccggggaagggccaagcgatctggatctggagcaacaaacttctcactactcaaacaagcaggtgacgtggaggagaatcccgggcctactagtatggactggatttggcgcatccttttccttgtcggcgctgctaccggcgcgcattccttcgaacaggtgcaactccaggaatctggccctggcctcgtgaagcccagcgagacactgagcctgacctgtaccgtgtccggcgtgtccctgcctgactatggcgtgtcctggatcagacagccccctggcaagggcctggaatggatcggagtgatttggggcagcgaaaccacctactacaacagctccctgaagtccagagtgaccatctccaaggacaactccaagaaccaggtgtccctgaagctgagcagcgtgacagccgccgacaccgccgtgtattactgcgccaagcactactactacggcggcagctacgctatggactactggggccagggaaccctcgtgaccgtgtctagtacgcgtagccagcctcacaccaagcccagcgtgttcgtgatgaagaacggcaccaacgtggcctgcctcgtgaaagagttctaccccaaggacatcaggatcaacctggtgtccagcaagaagatcaccgagttcgaccccgccatcgtgatctcccccagcggcaagtacaacgccgtgaagctggggaagtacgaggacagcaacagcgtgacctgctccgtgcagcacgacaacaagaccgtgcacagcaccgactttgaagtgaaaaccgactccaccgaccacgtgaagcccaaagagacagagaacaccaagcagcccagcaagagctgccacaagcccaaggccatcgtgcacaccgagaaagtgaacatgatgagcctgaccgtgctgggcttcagaatcctgctgctgaaagtggccggctttaacctgctgatgaccctgcggctgtggtccagc

SEQ ID NO: 23240 - DNA, 1881 bp, synthetic construct
  source 1..1881: mol_type = other DNA
atggccttaccagtgaccgccttgctcctgccgctggccttgctgctccacgccgccaggccggacgagatcgtgctgacacagagccccgccaccctgtcactgtctccaggcgaaagagccaccctgagctgtagcgccagcagcagcgtgtcctacatgcactggtatcagcagaagcccggccaggcccccagactgctgatctacgataccagcaagctggcctccggcatccccgccagattttctggcagcggctccggcaccgacttcaccctgacaatcagcagcctggaacccgaggacgtggccgtgtactactgttttcaaggcagcgtgtaccccttcaccttcggccagggcaccaagctggaaatcaagagactcgacaagcagctggacgccgacgtgtcccccaagcctaccatcttcctgccctctatcgccgagacaaagctccagaaggccggcacctacctgtgcctgctggaaaagttcttcccagatgtgattaagatccactggcaggaaaagaagtccaacaccatcctgggcagccaggaaggcaacaccatgaagaccaacgacacctacatgaagttcagctggctgaccgtgcccgagaagtccctggacaaagaacacagatgcatcgtgcggcacgaaaacaacaagaacggcgtggaccaggaaatcatcttcccacccatcaagaccgatgtgattacaatggaccccaaggacaactgctccaaggacgccaacgataccctgctgctccagctgaccaacaccagcgcctactacatgtacgagatcctgctgggcaaggccaccctgtacgccgtgctggtgtctgccctggtgctgatggctatggtcaagcggaaggacagccggggaagggccaagcgatctggatctggagcaacaaacttctcactactcaaacaagcaggtgacgtggaggagaatcccgggcctactagtatggactggatttggcgcatccttttccttgtcggcgctgctaccggcgcgcattccttcgaacaggtgcagctccaggaatctggccctggcctcgtgaagcctagccagaccctgagcctgacctgtaccgtgtctggcggcagcatcagcacaagcggcatgggcgtgggctggatcagacagcaccctggcaagggcctggaatggatcggccacatttggtgggacgacgacaagcggtacaaccccgccctgaagtccagagtgaccatcagcgtggacaccagcaagaaccagttcagcctgaagctgagcagcgtgacagccgccgataccgccgtgtattattgcgcccggatggaactgtggtcctactacttcgactactggggccagggaaccctcgtgaccgtgtctagtacgcgtagccagcctcacaccaagcccagcgtgttcgtgatgaagaacggcaccaacgtggcctgcctcgtgaaagagttctaccccaaggacatcaggatcaacctggtgtccagcaagaagatcaccgagttcgaccccgccatcgtgatctcccccagcggcaagtacaacgccgtgaagctggggaagtacgaggacagcaacagcgtgacctgctccgtgcagcacgacaacaagaccgtgcacagcaccgactttgaagtgaaaaccgactccaccgaccacgtgaagcccaaagagacagagaacaccaagcagcccagcaagagctgccacaagcccaaggccatcgtgcacaccgagaaagtgaacatgatgagcctgaccgtgctgggcttcagaatcctgctgctgaaagtggccggctttaacctgctgatgaccctgcggctgtggtccagc

SEQ ID NO: 23241 - DNA, 1875 bp, synthetic construct
  source 1..1875: mol_type = other DNA
atggccttaccagtgaccgccttgctcctgccgctggccttgctgctccacgccgccaggccggactacatccacgtgacacagagccctagcagcctgtccgtgtccatcggcgatagagtgaccatcaactgccagacctctcaaggcgtgggcagcgacctgcactggtatcagcacaaacctggcagagcccctaagctgctgatccaccatgccagctctgtggaagatggcgtgcccagcagattttccggcaccggatttcacaccagcttcaacctgacaatcaacgacctccaggccgacgacatcggcacctactactgtcaagtgctccagagcttcggcagaggcagcagactggatacaaaactcgacaagcagctggacgccgacgtgtcccccaagcctaccatcttcctgccctctatcgccgagacaaagctccagaaggccggcacctacctgtgcctgctggaaaagttcttcccagatgtgattaagatccactggcaggaaaagaagtccaacaccatcctgggcagccaggaaggcaacaccatgaagaccaacgacacctacatgaagttcagctggctgaccgtgcccgagaagtccctggacaaagaacacagatgcatcgtgcggcacgaaaacaacaagaacggcgtggaccaggaaatcatcttcccacccatcaagaccgatgtgattacaatggaccccaaggacaactgctccaaggacgccaacgataccctgctgctccagctgaccaacaccagcgcctactacatgtacgagatcctgctgggcaaggccaccctgtacgccgtgctggtgtctgccctggtgctgatggctatggtcaagcggaaggacagccggggaagggccaagcgatctggatctggagcaacaaacttctcactactcaaacaagcaggtgacgtggaggagaatcccgggcctactagtatggactggatttggcgcatccttttccttgtcggcgctgctaccggcgcgcattccttcgaaagggcacacctggtgcagtctggcaccgccatgaagaaacctggcgcttccgtcagagtgtcctgtcagacaagcggctacaccttcacagcccacatcctgttctggttcagacaggccccaggcagaggactggaatgggtcggatggatcaagccccagtacggggccgtgaatttcggcggaggcttcagagacagagtgaccctgaccagggacgtgtaccgggaaatcgcctacatggacatccggggcctgaagcctgatgacaccgccgtgtactactgcgccagggatagaagctacggcgacagctcttgggctctcgatgcttggggacagggcacaacagtggtggtgtctgctacgcgtagccagcctcacaccaagcccagcgtgttcgtgatgaagaacggcaccaacgtggcctgcctcgtgaaagagttctaccccaaggacatcaggatcaacctggtgtccagcaagaagatcaccgagttcgaccccgccatcgtgatctcccccagcggcaagtacaacgccgtgaagctggggaagtacgaggacagcaacagcgtgacctgctccgtgcagcacgacaacaagaccgtgcacagcaccgactttgaagtgaaaaccgactccaccgaccacgtgaagcccaaagagacagagaacaccaagcagcccagcaagagctgccacaagcccaaggccatcgtgcacaccgagaaagtgaacatgatgagcctgaccgtgctgggcttcagaatcctgctgctgaaagtggccggctttaacctgctgatgaccctgcggctgtggtccagc

SEQ ID NO: 23242 - DNA, 1905 bp, synthetic construct
  source 1..1905: mol_type = other DNA
atggccttaccagtgaccgccttgctcctgccgctggccttgctgctccacgccgccaggccggacgtgcagatgatccagacccccgatagcctggccgtgtccctgggacagagagccaccatctcttgcagagccagcgagagcgtggacaactacggcatcagcttcatgcactggtatcagcagaagcccggccagagccccaagctgctgatctacagagcctccaacctggaaagcggcatccccgccagattttccggcagcggcagcagaaccgacttcaccctgaccatcaaccccgtggaaaccgacgacgtggcaacctactactgccagcagaacaacaaggacccccccacctttggcggaggcaccaagctggaaatcaagctcgacaagcagctggacgccgacgtgtcccccaagcctaccatcttcctgccctctatcgccgagacaaagctccagaaggccggcacctacctgtgcctgctggaaaagttcttcccagatgtgattaagatccactggcaggaaaagaagtccaacaccatcctgggcagccaggaaggcaacaccatgaagaccaacgacacctacatgaagttcagctggctgaccgtgcccgagaagtccctggacaaagaacacagatgcatcgtgcggcacgaaaacaacaagaacggcgtggaccaggaaatcatcttcccacccatcaagaccgatgtgattacaatggaccccaaggacaactgctccaaggacgccaacgataccctgctgctccagctgaccaacaccagcgcctactacatgtacgagatcctgctgggcaaggccaccctgtacgccgtgctggtgtctgccctggtgctgatggctatggtcaagcggaaggacagccggggaagggccaagcgatctggatctggagcaacaaacttctcactactcaaacaagcaggtgacgtggaggagaatcccgggcctactagtatggactggatttggcgcatccttttccttgtcggcgctgctaccggcgcgcattccttcgaagggggaggcggctctcaggtgcaactccagcagtctggcgctgagcttgtgaagcctggggccagcgtgaagattagctgcaaggccagcggctacgccttcagcagctactggatgaactgggtcaagcagcggcctggcaagggcctggaatggatcggccaaatctaccccggcgacggcgacaccacctacaacggcaagttcaagggcaaggccaccctgacagccgacaagagcagcagcaccgtgtacatgcaactgaacagcctgaccagcgaggacagcgccgtgtacttctgcgtgcggtactactacggcagctccggctacttcgactattggggccagggcaccacactgaccgtgtcctctacgcgtagccagcctcacaccaagcccagcgtgttcgtgatgaagaacggcaccaacgtggcctgcctcgtgaaagagttctaccccaaggacatcaggatcaacctggtgtccagcaagaagatcaccgagttcgaccccgccatcgtgatctcccccagcggcaagtacaacgccgtgaagctggggaagtacgaggacagcaacagcgtgacctgctccgtgcagcacgacaacaagaccgtgcacagcaccgactttgaagtgaaaaccgactccaccgaccacgtgaagcccaaagagacagagaacaccaagcagcccagcaagagctgccacaagcccaaggccatcgtgcacaccgagaaagtgaacatgatgagcctgaccgtgctgggcttcagaatcctgctgctgaaagtggccggctttaacctgctgatgaccctgcggctgtggtccagc

SEQ ID NO: 23243 - DNA, 1878 bp, synthetic construct
  source 1..1878: mol_type = other DNA
atggccttaccagtgaccgccttgctcctgccgctggccttgctgctccacgccgccaggccggacgtgcagatgatccagacccccagcagcctgtctgccagcctgggcgatagagtgaccatcagctgtcgggccagccaggacatcggcaactacctgaactggtatcagcagaaacccgacggcaccgtgaagctgctgatctactacaccagcagactgcacagcggcgtgcccagcagattttctggcagcggctctggcaccgagtacagcctgaccatctccaacctggaacaggaagatattgctacctacttctgtcagcaaggcagcgccctgccccctacatttggcggcggaacaaagctggaaatcaacctcgacaagcagctggacgccgacgtgtcccccaagcctaccatcttcctgccctctatcgccgagacaaagctccagaaggccggcacctacctgtgcctgctggaaaagttcttcccagatgtgattaagatccactggcaggaaaagaagtccaacaccatcctgggcagccaggaaggcaacaccatgaagaccaacgacacctacatgaagttcagctggctgaccgtgcccgagaagtccctggacaaagaacacagatgcatcgtgcggcacgaaaacaacaagaacggcgtggaccaggaaatcatcttcccacccatcaagaccgatgtgattacaatggaccccaaggacaactgctccaaggacgccaacgataccctgctgctccagctgaccaacaccagcgcctactacatgtacgagatcctgctgggcaaggccaccctgtacgccgtgctggtgtctgccctggtgctgatggctatggtcaagcggaaggacagccggggaagggccaagcgatctggatctggagcaacaaacttctcactactcaaacaagcaggtgacgtggaggagaatcccgggcctactagtatggactggatttggcgcatccttttccttgtcggcgctgctaccggcgcgcattccttcgaagctctccagctccagcagtctggcgcagaactcgtgcggcctggcgcttctgtgaccctgagctgtaaagccagcggctacaccttcaccgactacgagatgcactgggtcaagcagacccctgtgcacggcctggaatggatcggagccatcgaccctgagacaggcggcaccgcctacaaccagaagttcgagggcaaggccatcctgaccgccgacaagagcagcagcacagcctacatggaactgcggagcctgacctccgaggacagccccgtgtactactgtgccagacggcggtactacggcagcagctccttcgactattggggccagggcaccaccctgaccgtgtctagtacgcgtagccagcctcacaccaagcccagcgtgttcgtgatgaagaacggcaccaacgtggcctgcctcgtgaaagagttctaccccaaggacatcaggatcaacctggtgtccagcaagaagatcaccgagttcgaccccgccatcgtgatctcccccagcggcaagtacaacgccgtgaagctggggaagtacgaggacagcaacagcgtgacctgctccgtgcagcacgacaacaagaccgtgcacagcaccgactttgaagtgaaaaccgactccaccgaccacgtgaagcccaaagagacagagaacaccaagcagcccagcaagagctgccacaagcccaaggccatcgtgcacaccgagaaagtgaacatgatgagcctgaccgtgctgggcttcagaatcctgctgctgaaagtggccggctttaacctgctgatgaccctgcggctgtggtccagc

SEQ ID NO: 23244 - DNA, 1866 bp, synthetic construct
  source 1..1866: mol_type = other DNA
atggccttaccagtgaccgccttgctcctgccgctggccttgctgctccacgccgccaggccggacatccagatgacacagagccctagcagcctgtctgccagcgtgggagacagagtgaccatcacatgcaaggccagcgaccacatcaacaactggctggcctggtatcagcagaagcctggacaggcccctaagctgctgatctacggcgctaccacactggaaacaggcgtgcccagcagattttctggcagcggctctggcaccgactacaccctgacaatatccagcctccagcctgaggacttcgccacctactactgtcagcagagctggaacaccccttggacattcggccagggcaccaagctggaaatcaagagactcgaggacctgaagaacgtgttcccacctgaggtggccgtgttcgagcctagcgaggccgagatcagccacacccagaaagccaccctcgtgtgcctggctaccggcttctaccccgaccatgtggaactgtcttggtgggtcaacggcaaagaggtgcacagcggcgtgtgtaccgacccccagccactgaaagaacagcccgccctgaacgacagccggtactgcctgagcagcagactgagagtgtccgccaccttctggcagaacccccggaaccacttcagatgccaggtgcagttctacggcctgagcgagaacgacgagtggacccaggacagagccaagcccgtgacccagatcgtgtctgccgaagcctggggcagagccgatagcggctttaccagcgagagctaccagcagggcgtgctgagcgccaccatcctgtacgagatcctgctgggcaaggccaccctgtacgccgtgctggtgtctgccctggtgctgatggctatggtcaagcggaaggacagccggggaagggccaagcgatctggatctggagcaacaaacttctcactactcaaacaagcaggtgacgtggaggagaatcccgggcctactagtatggactggatttggcgcatccttttccttgtcggcgctgctaccggcgcgcattccttcgaacaagttcagcttcaacagcctggcgctgagctggtcaaacctggcgcttctgtgaagatgagctgcaaagccagcggctacgccttcagcagctactggatcaactggatgaagcagaaacccggccagggactcgaatggatcggccaaatctatcccggcgacggcgacaccaactacaacggcaagttcaagggcagagccacactgaccgccgatacctctagcagcacagcctacatgcagctgagcagcctgaccagcgaagatagcgccgtgtacttctgtgcccggtccatcacaacagtcgtgggctgcgctatggactattggggccagggaacaagcgtgaccgtgtctagtacgcgtatccagaaccctgatcctgccgtgtaccagctgcgggatagcaagagcagcgacaagagcgtgtgtctgttcaccgacttcgacagccagaccaacgtgtcccagagcaaggactccgacgtgtacatcaccgataagtgcgtgctggacatgcggagcatggacttcaagagcaactccgccgtggcctggtccaacaagtccgatttcgcctgcgccaacgccttcaacaacagcattatccccgaggacacattcttcccaagccccgagagcagcagcgacgtgaagctggtggaaaagagcttcgagacagacaccaacctgaacttccagaacctgagcgtgatcggcttcagaatcctgctgctgaaagtggccggctttaacctgctgatgaccctgcggctgtggtccagc

SEQ ID NO: 23245 - DNA, 1857 bp, synthetic construct
  source 1..1857: mol_type = other DNA
atggccttaccagtgaccgccttgctcctgccgctggccttgctgctccacgccgccaggccggacatccagatgacacagactacatcctccctgtctgcctctctgggagacagagtcaccatcagttgcagggcaagtcaggacattagtaagtacctgaactggtatcagcagaaaccagatggaactgttaaactcctgatctaccatacatcaagattacactcaggagtcccatcaaggttcagtggcagtgggtctggaacagattattctctcaccattagcaacctggagcaagaagatattgccacttacttttgccaacagggtaatacgcttccgtacacgttcggaggggggaccaagctggagatcacactcgaggacctgaagaacgtgttcccacctgaggtggccgtgttcgagcctagcgaggccgagatcagccacacccagaaagccaccctcgtgtgcctggctaccggcttctaccccgaccatgtggaactgtcttggtgggtcaacggcaaagaggtgcacagcggcgtgtgtaccgacccccagccactgaaagaacagcccgccctgaacgacagccggtactgcctgagcagcagactgagagtgtccgccaccttctggcagaacccccggaaccacttcagatgccaggtgcagttctacggcctgagcgagaacgacgagtggacccaggacagagccaagcccgtgacccagatcgtgtctgccgaagcctggggcagagccgatagcggctttaccagcgagagctaccagcagggcgtgctgagcgccaccatcctgtacgagatcctgctgggcaaggccaccctgtacgccgtgctggtgtctgccctggtgctgatggctatggtcaagcggaaggacagccggggaagggccaagcgatctggatctggagcaacaaacttctcactactcaaacaagcaggtgacgtggaggagaatcccgggcctactagtatggactggatttggcgcatccttttccttgtcggcgctgctaccggcgcgcattccttcgaagtgaaactgcaggagtcaggacctggcctggtggcgccctcacagagcctgtccgtcacatgcactgtctcaggggtctcattacccgactatggtgtaagctggattcgccagcctccacgaaagggtctggagtggctgggagtaatatggggtagtgaaaccacatactataattcagctctcaaatccagactgaccatcatcaaggacaactccaagagccaagttttcttaaaaatgaacagtctgcaaactgatgacacagccatttactactgtgccaaacattattactacggtggtagctatgctatggactactggggccaaggaacctcagtcaccgtctcctcaacgcgtatccagaaccctgatcctgccgtgtaccagctgcgggatagcaagagcagcgacaagagcgtgtgtctgttcaccgacttcgacagccagaccaacgtgtcccagagcaaggactccgacgtgtacatcaccgataagtgcgtgctggacatgcggagcatggacttcaagagcaactccgccgtggcctggtccaacaagtccgatttcgcctgcgccaacgccttcaacaacagcattatccccgaggacacattcttcccaagccccgagagcagcagcgacgtgaagctggtggaaaagagcttcgagacagacaccaacctgaacttccagaacctgagcgtgatcggcttcagaatcctgctgctgaaagtggccggctttaacctgctgatgaccctgcggctgtggtccagc

SEQ ID NO: 23246 - DNA, 1860 bp, synthetic construct
  source 1..1860: mol_type = other DNA
atggccttaccagtgaccgccttgctcctgccgctggccttgctgctccacgccgccaggccggagatcgtgatgacccagagccctgccaccctgtctctgagccctggcgaaagagccaccctgagctgtagagccagccaggacatcagcaagtacctgaactggtatcagcagaagcccggccaggcccccagactgctgatctaccacaccagcagactgcacagcggcatccccgccagattttctggctctggcagcggcaccgactacaccctgacaatcagcagcctccagcccgaggacttcgccgtgtacttctgtcagcaaggcaacaccctgccctacaccttcggccagggcaccaagctggaaatcaagctcgaggacctgaagaacgtgttcccacctgaggtggccgtgttcgagcctagcgaggccgagatcagccacacccagaaagccaccctcgtgtgcctggctaccggcttctaccccgaccatgtggaactgtcttggtgggtcaacggcaaagaggtgcacagcggcgtgtgtaccgacccccagccactgaaagaacagcccgccctgaacgacagccggtactgcctgagcagcagactgagagtgtccgccaccttctggcagaacccccggaaccacttcagatgccaggtgcagttctacggcctgagcgagaacgacgagtggacccaggacagagccaagcccgtgacccagatcgtgtctgccgaagcctggggcagagccgatagcggctttaccagcgagagctaccagcagggcgtgctgagcgccaccatcctgtacgagatcctgctgggcaaggccaccctgtacgccgtgctggtgtctgccctggtgctgatggctatggtcaagcggaaggacagccggggaagggccaagcgatctggatctggagcaacaaacttctcactactcaaacaagcaggtgacgtggaggagaatcccgggcctactagtatggactggatttggcgcatccttttccttgtcggcgctgctaccggcgcgcattccttcgaacaggtgcaactccaggaatctggccctggcctcgtgaagcccagcgagacactgagcctgacctgtaccgtgtccggcgtgtccctgcctgactatggcgtgtcctggatcagacagccccctggcaagggcctggaatggatcggagtgatttggggcagcgaaaccacctactacaacagctccctgaagtccagagtgaccatctccaaggacaactccaagaaccaggtgtccctgaagctgagcagcgtgacagccgccgacaccgccgtgtattactgcgccaagcactactactacggcggcagctacgctatggactactggggccagggaaccctcgtgaccgtgtctagtacgcgtatccagaaccctgatcctgccgtgtaccagctgcgggatagcaagagcagcgacaagagcgtgtgtctgttcaccgacttcgacagccagaccaacgtgtcccagagcaaggactccgacgtgtacatcaccgataagtgcgtgctggacatgcggagcatggacttcaagagcaactccgccgtggcctggtccaacaagtccgatttcgcctgcgccaacgccttcaacaacagcattatccccgaggacacattcttcccaagccccgagagcagcagcgacgtgaagctggtggaaaagagcttcgagacagacaccaacctgaacttccagaacctgagcgtgatcggcttcagaatcctgctgctgaaagtggccggctttaacctgctgatgaccctgcggctgtggtccagc

SEQ ID NO: 23247 - DNA, 1863 bp, synthetic construct
  source 1..1863: mol_type = other DNA
atggccttaccagtgaccgccttgctcctgccgctggccttgctgctccacgccgccaggccggacgagatcgtgctgacacagagccccgccaccctgtcactgtctccaggcgaaagagccaccctgagctgtagcgccagcagcagcgtgtcctacatgcactggtatcagcagaagcccggccaggcccccagactgctgatctacgataccagcaagctggcctccggcatccccgccagattttctggcagcggctccggcaccgacttcaccctgacaatcagcagcctggaacccgaggacgtggccgtgtactactgttttcaaggcagcgtgtaccccttcaccttcggccagggcaccaagctggaaatcaagagactcgaggacctgaagaacgtgttcccacctgaggtggccgtgttcgagcctagcgaggccgagatcagccacacccagaaagccaccctcgtgtgcctggctaccggcttctaccccgaccatgtggaactgtcttggtgggtcaacggcaaagaggtgcacagcggcgtgtgtaccgacccccagccactgaaagaacagcccgccctgaacgacagccggtactgcctgagcagcagactgagagtgtccgccaccttctggcagaacccccggaaccacttcagatgccaggtgcagttctacggcctgagcgagaacgacgagtggacccaggacagagccaagcccgtgacccagatcgtgtctgccgaagcctggggcagagccgatagcggctttaccagcgagagctaccagcagggcgtgctgagcgccaccatcctgtacgagatcctgctgggcaaggccaccctgtacgccgtgctggtgtctgccctggtgctgatggctatggtcaagcggaaggacagccggggaagggccaagcgatctggatctggagcaacaaacttctcactactcaaacaagcaggtgacgtggaggagaatcccgggcctactagtatggactggatttggcgcatccttttccttgtcggcgctgctaccggcgcgcattccttcgaacaggtgcagctccaggaatctggccctggcctcgtgaagcctagccagaccctgagcctgacctgtaccgtgtctggcggcagcatcagcacaagcggcatgggcgtgggctggatcagacagcaccctggcaagggcctggaatggatcggccacatttggtgggacgacgacaagcggtacaaccccgccctgaagtccagagtgaccatcagcgtggacaccagcaagaaccagttcagcctgaagctgagcagcgtgacagccgccgataccgccgtgtattattgcgcccggatggaactgtggtcctactacttcgactactggggccagggaaccctcgtgaccgtgtctagtacgcgtatccagaaccctgatcctgccgtgtaccagctgcgggatagcaagagcagcgacaagagcgtgtgtctgttcaccgacttcgacagccagaccaacgtgtcccagagcaaggactccgacgtgtacatcaccgataagtgcgtgctggacatgcggagcatggacttcaagagcaactccgccgtggcctggtccaacaagtccgatttcgcctgcgccaacgccttcaacaacagcattatccccgaggacacattcttcccaagccccgagagcagcagcgacgtgaagctggtggaaaagagcttcgagacagacaccaacctgaacttccagaacctgagcgtgatcggcttcagaatcctgctgctgaaagtggccggctttaacctgctgatgaccctgcggctgtggtccagc

SEQ ID NO: 23248 - DNA, 1857 bp, synthetic construct
  source 1..1857: mol_type = other DNA
atggccttaccagtgaccgccttgctcctgccgctggccttgctgctccacgccgccaggccggactacatccacgtgacacagagccctagcagcctgtccgtgtccatcggcgatagagtgaccatcaactgccagacctctcaaggcgtgggcagcgacctgcactggtatcagcacaaacctggcagagcccctaagctgctgatccaccatgccagctctgtggaagatggcgtgcccagcagattttccggcaccggatttcacaccagcttcaacctgacaatcaacgacctccaggccgacgacatcggcacctactactgtcaagtgctccagagcttcggcagaggcagcagactggatacaaaactcgaggacctgaagaacgtgttcccacctgaggtggccgtgttcgagcctagcgaggccgagatcagccacacccagaaagccaccctcgtgtgcctggctaccggcttctaccccgaccatgtggaactgtcttggtgggtcaacggcaaagaggtgcacagcggcgtgtgtaccgacccccagccactgaaagaacagcccgccctgaacgacagccggtactgcctgagcagcagactgagagtgtccgccaccttctggcagaacccccggaaccacttcagatgccaggtgcagttctacggcctgagcgagaacgacgagtggacccaggacagagccaagcccgtgacccagatcgtgtctgccgaagcctggggcagagccgatagcggctttaccagcgagagctaccagcagggcgtgctgagcgccaccatcctgtacgagatcctgctgggcaaggccaccctgtacgccgtgctggtgtctgccctggtgctgatggctatggtcaagcggaaggacagccggggaagggccaagcgatctggatctggagcaacaaacttctcactactcaaacaagcaggtgacgtggaggagaatcccgggcctactagtatggactggatttggcgcatccttttccttgtcggcgctgctaccggcgcgcattccttcgaaagggcacacctggtgcagtctggcaccgccatgaagaaacctggcgcttccgtcagagtgtcctgtcagacaagcggctacaccttcacagcccacatcctgttctggttcagacaggccccaggcagaggactggaatgggtcggatggatcaagccccagtacggggccgtgaatttcggcggaggcttcagagacagagtgaccctgaccagggacgtgtaccgggaaatcgcctacatggacatccggggcctgaagcctgatgacaccgccgtgtactactgcgccagggatagaagctacggcgacagctcttgggctctcgatgcttggggacagggcacaacagtggtggtgtctgctacgcgtatccagaaccctgatcctgccgtgtaccagctgcgggatagcaagagcagcgacaagagcgtgtgtctgttcaccgacttcgacagccagaccaacgtgtcccagagcaaggactccgacgtgtacatcaccgataagtgcgtgctggacatgcggagcatggacttcaagagcaactccgccgtggcctggtccaacaagtccgatttcgcctgcgccaacgccttcaacaacagcattatccccgaggacacattcttcccaagccccgagagcagcagcgacgtgaagctggtggaaaagagcttcgagacagacaccaacctgaacttccagaacctgagcgtgatcggcttcagaatcctgctgctgaaagtggccggctttaacctgctgatgaccctgcggctgtggtccagc

SEQ ID NO: 23249 - DNA, 1887 bp, synthetic construct
  source 1..1887: mol_type = other DNA
atggccttaccagtgaccgccttgctcctgccgctggccttgctgctccacgccgccaggccggacgtgcagatgatccagacccccgatagcctggccgtgtccctgggacagagagccaccatctcttgcagagccagcgagagcgtggacaactacggcatcagcttcatgcactggtatcagcagaagcccggccagagccccaagctgctgatctacagagcctccaacctggaaagcggcatccccgccagattttccggcagcggcagcagaaccgacttcaccctgaccatcaaccccgtggaaaccgacgacgtggcaacctactactgccagcagaacaacaaggacccccccacctttggcggaggcaccaagctggaaatcaagctcgaggacctgaagaacgtgttcccacctgaggtggccgtgttcgagcctagcgaggccgagatcagccacacccagaaagccaccctcgtgtgcctggctaccggcttctaccccgaccatgtggaactgtcttggtgggtcaacggcaaagaggtgcacagcggcgtgtgtaccgacccccagccactgaaagaacagcccgccctgaacgacagccggtactgcctgagcagcagactgagagtgtccgccaccttctggcagaacccccggaaccacttcagatgccaggtgcagttctacggcctgagcgagaacgacgagtggacccaggacagagccaagcccgtgacccagatcgtgtctgccgaagcctggggcagagccgatagcggctttaccagcgagagctaccagcagggcgtgctgagcgccaccatcctgtacgagatcctgctgggcaaggccaccctgtacgccgtgctggtgtctgccctggtgctgatggctatggtcaagcggaaggacagccggggaagggccaagcgatctggatctggagcaacaaacttctcactactcaaacaagcaggtgacgtggaggagaatcccgggcctactagtatggactggatttggcgcatccttttccttgtcggcgctgctaccggcgcgcattccttcgaagggggaggcggctctcaggtgcaactccagcagtctggcgctgagcttgtgaagcctggggccagcgtgaagattagctgcaaggccagcggctacgccttcagcagctactggatgaactgggtcaagcagcggcctggcaagggcctggaatggatcggccaaatctaccccggcgacggcgacaccacctacaacggcaagttcaagggcaaggccaccctgacagccgacaagagcagcagcaccgtgtacatgcaactgaacagcctgaccagcgaggacagcgccgtgtacttctgcgtgcggtactactacggcagctccggctacttcgactattggggccagggcaccacactgaccgtgtcctctacgcgtatccagaaccctgatcctgccgtgtaccagctgcgggatagcaagagcagcgacaagagcgtgtgtctgttcaccgacttcgacagccagaccaacgtgtcccagagcaaggactccgacgtgtacatcaccgataagtgcgtgctggacatgcggagcatggacttcaagagcaactccgccgtggcctggtccaacaagtccgatttcgcctgcgccaacgccttcaacaacagcattatccccgaggacacattcttcccaagccccgagagcagcagcgacgtgaagctggtggaaaagagcttcgagacagacaccaacctgaacttccagaacctgagcgtgatcggcttcagaatcctgctgctgaaagtggccggctttaacctgctgatgaccctgcggctgtggtccagc

SEQ ID NO: 23250 - DNA, 1860 bp, synthetic construct
  source 1..1860: mol_type = other DNA
atggccttaccagtgaccgccttgctcctgccgctggccttgctgctccacgccgccaggccggacgtgcagatgatccagacccccagcagcctgtctgccagcctgggcgatagagtgaccatcagctgtcgggccagccaggacatcggcaactacctgaactggtatcagcagaaacccgacggcaccgtgaagctgctgatctactacaccagcagactgcacagcggcgtgcccagcagattttctggcagcggctctggcaccgagtacagcctgaccatctccaacctggaacaggaagatattgctacctacttctgtcagcaaggcagcgccctgccccctacatttggcggcggaacaaagctggaaatcaacctcgaggacctgaagaacgtgttcccacctgaggtggccgtgttcgagcctagcgaggccgagatcagccacacccagaaagccaccctcgtgtgcctggctaccggcttctaccccgaccatgtggaactgtcttggtgggtcaacggcaaagaggtgcacagcggcgtgtgtaccgacccccagccactgaaagaacagcccgccctgaacgacagccggtactgcctgagcagcagactgagagtgtccgccaccttctggcagaacccccggaaccacttcagatgccaggtgcagttctacggcctgagcgagaacgacgagtggacccaggacagagccaagcccgtgacccagatcgtgtctgccgaagcctggggcagagccgatagcggctttaccagcgagagctaccagcagggcgtgctgagcgccaccatcctgtacgagatcctgctgggcaaggccaccctgtacgccgtgctggtgtctgccctggtgctgatggctatggtcaagcggaaggacagccggggaagggccaagcgatctggatctggagcaacaaacttctcactactcaaacaagcaggtgacgtggaggagaatcccgggcctactagtatggactggatttggcgcatccttttccttgtcggcgctgctaccggcgcgcattccttcgaagctctccagctccagcagtctggcgcagaactcgtgcggcctggcgcttctgtgaccctgagctgtaaagccagcggctacaccttcaccgactacgagatgcactgggtcaagcagacccctgtgcacggcctggaatggatcggagccatcgaccctgagacaggcggcaccgcctacaaccagaagttcgagggcaaggccatcctgaccgccgacaagagcagcagcacagcctacatggaactgcggagcctgacctccgaggacagccccgtgtactactgtgccagacggcggtactacggcagcagctccttcgactattggggccagggcaccaccctgaccgtgtctagtacgcgtatccagaaccctgatcctgccgtgtaccagctgcgggatagcaagagcagcgacaagagcgtgtgtctgttcaccgacttcgacagccagaccaacgtgtcccagagcaaggactccgacgtgtacatcaccgataagtgcgtgctggacatgcggagcatggacttcaagagcaactccgccgtggcctggtccaacaagtccgatttcgcctgcgccaacgccttcaacaacagcattatccccgaggacacattcttcccaagccccgagagcagcagcgacgtgaagctggtggaaaagagcttcgagacagacaccaacctgaacttccagaacctgagcgtgatcggcttcagaatcctgctgctgaaagtggccggctttaacctgctgatgaccctgcggctgtggtccagc

SEQ ID NO: 23251 - DNA, 1869 bp, synthetic construct
  source 1..1869: mol_type = other DNA
atggccttaccagtgaccgccttgctcctgccgctggccttgctgctccacgccgccaggccggacatccagatgacacagagccctagcagcctgtctgccagcgtgggagacagagtgaccatcacatgcaaggccagcgaccacatcaacaactggctggcctggtatcagcagaagcctggacaggcccctaagctgctgatctacggcgctaccacactggaaacaggcgtgcccagcagattttctggcagcggctctggcaccgactacaccctgacaatatccagcctccagcctgaggacttcgccacctactactgtcagcagagctggaacaccccttggacattcggccagggcaccaagctggaaatcaagagactcgaggacctgaagaacgtgttcccacctgaggtggccgtgttcgagcctagcgaggccgagatcagccacacccagaaagccaccctcgtgtgcctggctaccggcttctaccccgaccatgtggaactgtcttggtgggtcaacggcaaagaggtgcacagcggcgtgtgtaccgacccccagccactgaaagaacagcccgccctgaacgacagccggtactgcctgagcagcagactgagagtgtccgccaccttctggcagaacccccggaaccacttcagatgccaggtgcagttctacggcctgagcgagaacgacgagtggacccaggacagagccaagcccgtgacccagatcgtgtctgccgaagcctggggcagagccgattgcggctttaccagcgagagctaccagcagggcgtgctgagcgccaccatcctgtacttgttgctgctgctgaagtccgtggtgtacttcgccatcatcacatgctgcctgctgcggagaaccgccttctgctgcaacggcgagaagtctagggccaagcgatctggatctggagcaacaaacttctcactactcaaacaagcaggtgacgtggaggagaatcccgggcctactagtatggactggatttggcgcatccttttccttgtcggcgctgctaccggcgcgcattccttcgaacaagttcagcttcaacagcctggcgctgagctggtcaaacctggcgcttctgtgaagatgagctgcaaagccagcggctacgccttcagcagctactggatcaactggatgaagcagaaacccggccagggactcgaatggatcggccaaatctatcccggcgacggcgacaccaactacaacggcaagttcaagggcagagccacactgaccgccgatacctctagcagcacagcctacatgcagctgagcagcctgaccagcgaagatagcgccgtgtacttctgtgcccggtccatcacaacagtcgtgggctgcgctatggactattggggccagggaacaagcgtgaccgtgtctagtacgcgtatccagaaccctgatcctgccgtgtaccagctgcgggatagcaagagcagcgacaagagcgtgtgtctgttcaccgacttcgacagccagaccaacgtgtcccagagcaaggactccgacgtgtacatcaccgataagtgcgtgctggacatgcggagcatggacttcaagagcaactccgccgtggcctggtccaacaagtccgatttcgcctgcgccaacgccttcaacaacagcattatccccgaggacacattcttcccaagccccgagagcagcagcgacgtgaagctggtggaaaagagcttcgagacagacaccaacctgaacttccagaacctgagcgtgatcggcttcagaatcctgctgctgaaagtggccggctttaacctgctgatgaccctgcggctgtggtccagc

SEQ ID NO: 23252 - DNA, 1860 bp, synthetic construct
  source 1..1860: mol_type = other DNA
atggccttaccagtgaccgccttgctcctgccgctggccttgctgctccacgccgccaggccggacatccagatgacacagactacatcctccctgtctgcctctctgggagacagagtcaccatcagttgcagggcaagtcaggacattagtaagtacctgaactggtatcagcagaaaccagatggaactgttaaactcctgatctaccatacatcaagattacactcaggagtcccatcaaggttcagtggcagtgggtctggaacagattattctctcaccattagcaacctggagcaagaagatattgccacttacttttgccaacagggtaatacgcttccgtacacgttcggaggggggaccaagctggagatcacactcgaggacctgaagaacgtgttcccacctgaggtggccgtgttcgagcctagcgaggccgagatcagccacacccagaaagccaccctcgtgtgcctggctaccggcttctaccccgaccatgtggaactgtcttggtgggtcaacggcaaagaggtgcacagcggcgtgtgtaccgacccccagccactgaaagaacagcccgccctgaacgacagccggtactgcctgagcagcagactgagagtgtccgccaccttctggcagaacccccggaaccacttcagatgccaggtgcagttctacggcctgagcgagaacgacgagtggacccaggacagagccaagcccgtgacccagatcgtgtctgccgaagcctggggcagagccgattgcggctttaccagcgagagctaccagcagggcgtgctgagcgccaccatcctgtacttgttgctgctgctgaagtccgtggtgtacttcgccatcatcacatgctgcctgctgcggagaaccgccttctgctgcaacggcgagaagtctagggccaagcgatctggatctggagcaacaaacttctcactactcaaacaagcaggtgacgtggaggagaatcccgggcctactagtatggactggatttggcgcatccttttccttgtcggcgctgctaccggcgcgcattccttcgaagtgaaactgcaggagtcaggacctggcctggtggcgccctcacagagcctgtccgtcacatgcactgtctcaggggtctcattacccgactatggtgtaagctggattcgccagcctccacgaaagggtctggagtggctgggagtaatatggggtagtgaaaccacatactataattcagctctcaaatccagactgaccatcatcaaggacaactccaagagccaagttttcttaaaaatgaacagtctgcaaactgatgacacagccatttactactgtgccaaacattattactacggtggtagctatgctatggactactggggccaaggaacctcagtcaccgtctcctcaacgcgtatccagaaccctgatcctgccgtgtaccagctgcgggatagcaagagcagcgacaagagcgtgtgtctgttcaccgacttcgacagccagaccaacgtgtcccagagcaaggactccgacgtgtacatcaccgataagtgcgtgctggacatgcggagcatggacttcaagagcaactccgccgtggcctggtccaacaagtccgatttcgcctgcgccaacgccttcaacaacagcattatccccgaggacacattcttcccaagccccgagagcagcagcgacgtgaagctggtggaaaagagcttcgagacagacaccaacctgaacttccagaacctgagcgtgatcggcttcagaatcctgctgctgaaagtggccggctttaacctgctgatgaccctgcggctgtggtccagc

SEQ ID NO: 23253 - DNA, 1863 bp, synthetic construct
  source 1..1863: mol_type = other DNA
atggccttaccagtgaccgccttgctcctgccgctggccttgctgctccacgccgccaggccggagatcgtgatgacccagagccctgccaccctgtctctgagccctggcgaaagagccaccctgagctgtagagccagccaggacatcagcaagtacctgaactggtatcagcagaagcccggccaggcccccagactgctgatctaccacaccagcagactgcacagcggcatccccgccagattttctggctctggcagcggcaccgactacaccctgacaatcagcagcctccagcccgaggacttcgccgtgtacttctgtcagcaaggcaacaccctgccctacaccttcggccagggcaccaagctggaaatcaagctcgaggacctgaagaacgtgttcccacctgaggtggccgtgttcgagcctagcgaggccgagatcagccacacccagaaagccaccctcgtgtgcctggctaccggcttctaccccgaccatgtggaactgtcttggtgggtcaacggcaaagaggtgcacagcggcgtgtgtaccgacccccagccactgaaagaacagcccgccctgaacgacagccggtactgcctgagcagcagactgagagtgtccgccaccttctggcagaacccccggaaccacttcagatgccaggtgcagttctacggcctgagcgagaacgacgagtggacccaggacagagccaagcccgtgacccagatcgtgtctgccgaagcctggggcagagccgattgcggctttaccagcgagagctaccagcagggcgtgctgagcgccaccatcctgtacttgttgctgctgctgaagtccgtggtgtacttcgccatcatcacatgctgcctgctgcggagaaccgccttctgctgcaacggcgagaagtctagggccaagcgatctggatctggagcaacaaacttctcactactcaaacaagcaggtgacgtggaggagaatcccgggcctactagtatggactggatttggcgcatccttttccttgtcggcgctgctaccggcgcgcattccttcgaacaggtgcaactccaggaatctggccctggcctcgtgaagcccagcgagacactgagcctgacctgtaccgtgtccggcgtgtccctgcctgactatggcgtgtcctggatcagacagccccctggcaagggcctggaatggatcggagtgatttggggcagcgaaaccacctactacaacagctccctgaagtccagagtgaccatctccaaggacaactccaagaaccaggtgtccctgaagctgagcagcgtgacagccgccgacaccgccgtgtattactgcgccaagcactactactacggcggcagctacgctatggactactggggccagggaaccctcgtgaccgtgtctagtacgcgtatccagaaccctgatcctgccgtgtaccagctgcgggatagcaagagcagcgacaagagcgtgtgtctgttcaccgacttcgacagccagaccaacgtgtcccagagcaaggactccgacgtgtacatcaccgataagtgcgtgctggacatgcggagcatggacttcaagagcaactccgccgtggcctggtccaacaagtccgatttcgcctgcgccaacgccttcaacaacagcattatccccgaggacacattcttcccaagccccgagagcagcagcgacgtgaagctggtggaaaagagcttcgagacagacaccaacctgaacttccagaacctgagcgtgatcggcttcagaatcctgctgctgaaagtggccggctttaacctgctgatgaccctgcggctgtggtccagc

SEQ ID NO: 23254 - DNA, 1866 bp, synthetic construct
  source 1..1866: mol_type = other DNA
atggccttaccagtgaccgccttgctcctgccgctggccttgctgctccacgccgccaggccggacgagatcgtgctgacacagagccccgccaccctgtcactgtctccaggcgaaagagccaccctgagctgtagcgccagcagcagcgtgtcctacatgcactggtatcagcagaagcccggccaggcccccagactgctgatctacgataccagcaagctggcctccggcatccccgccagattttctggcagcggctccggcaccgacttcaccctgacaatcagcagcctggaacccgaggacgtggccgtgtactactgttttcaaggcagcgtgtaccccttcaccttcggccagggcaccaagctggaaatcaagagactcgaggacctgaagaacgtgttcccacctgaggtggccgtgttcgagcctagcgaggccgagatcagccacacccagaaagccaccctcgtgtgcctggctaccggcttctaccccgaccatgtggaactgtcttggtgggtcaacggcaaagaggtgcacagcggcgtgtgtaccgacccccagccactgaaagaacagcccgccctgaacgacagccggtactgcctgagcagcagactgagagtgtccgccaccttctggcagaacccccggaaccacttcagatgccaggtgcagttctacggcctgagcgagaacgacgagtggacccaggacagagccaagcccgtgacccagatcgtgtctgccgaagcctggggcagagccgattgcggctttaccagcgagagctaccagcagggcgtgctgagcgccaccatcctgtacttgttgctgctgctgaagtccgtggtgtacttcgccatcatcacatgctgcctgctgcggagaaccgccttctgctgcaacggcgagaagtctagggccaagcgatctggatctggagcaacaaacttctcactactcaaacaagcaggtgacgtggaggagaatcccgggcctactagtatggactggatttggcgcatccttttccttgtcggcgctgctaccggcgcgcattccttcgaacaggtgcagctccaggaatctggccctggcctcgtgaagcctagccagaccctgagcctgacctgtaccgtgtctggcggcagcatcagcacaagcggcatgggcgtgggctggatcagacagcaccctggcaagggcctggaatggatcggccacatttggtgggacgacgacaagcggtacaaccccgccctgaagtccagagtgaccatcagcgtggacaccagcaagaaccagttcagcctgaagctgagcagcgtgacagccgccgataccgccgtgtattattgcgcccggatggaactgtggtcctactacttcgactactggggccagggaaccctcgtgaccgtgtctagtacgcgtatccagaaccctgatcctgccgtgtaccagctgcgggatagcaagagcagcgacaagagcgtgtgtctgttcaccgacttcgacagccagaccaacgtgtcccagagcaaggactccgacgtgtacatcaccgataagtgcgtgctggacatgcggagcatggacttcaagagcaactccgccgtggcctggtccaacaagtccgatttcgcctgcgccaacgccttcaacaacagcattatccccgaggacacattcttcccaagccccgagagcagcagcgacgtgaagctggtggaaaagagcttcgagacagacaccaacctgaacttccagaacctgagcgtgatcggcttcagaatcctgctgctgaaagtggccggctttaacctgctgatgaccctgcggctgtggtccagc

SEQ ID NO: 23255 - DNA, 1860 bp, synthetic construct
  source 1..1860: mol_type = other DNA
atggccttaccagtgaccgccttgctcctgccgctggccttgctgctccacgccgccaggccggactacatccacgtgacacagagccctagcagcctgtccgtgtccatcggcgatagagtgaccatcaactgccagacctctcaaggcgtgggcagcgacctgcactggtatcagcacaaacctggcagagcccctaagctgctgatccaccatgccagctctgtggaagatggcgtgcccagcagattttccggcaccggatttcacaccagcttcaacctgacaatcaacgacctccaggccgacgacatcggcacctactactgtcaagtgctccagagcttcggcagaggcagcagactggatacaaaactcgaggacctgaagaacgtgttcccacctgaggtggccgtgttcgagcctagcgaggccgagatcagccacacccagaaagccaccctcgtgtgcctggctaccggcttctaccccgaccatgtggaactgtcttggtgggtcaacggcaaagaggtgcacagcggcgtgtgtaccgacccccagccactgaaagaacagcccgccctgaacgacagccggtactgcctgagcagcagactgagagtgtccgccaccttctggcagaacccccggaaccacttcagatgccaggtgcagttctacggcctgagcgagaacgacgagtggacccaggacagagccaagcccgtgacccagatcgtgtctgccgaagcctggggcagagccgattgcggctttaccagcgagagctaccagcagggcgtgctgagcgccaccatcctgtacttgttgctgctgctgaagtccgtggtgtacttcgccatcatcacatgctgcctgctgcggagaaccgccttctgctgcaacggcgagaagtctagggccaagcgatctggatctggagcaacaaacttctcactactcaaacaagcaggtgacgtggaggagaatcccgggcctactagtatggactggatttggcgcatccttttccttgtcggcgctgctaccggcgcgcattccttcgaaagggcacacctggtgcagtctggcaccgccatgaagaaacctggcgcttccgtcagagtgtcctgtcagacaagcggctacaccttcacagcccacatcctgttctggttcagacaggccccaggcagaggactggaatgggtcggatggatcaagccccagtacggggccgtgaatttcggcggaggcttcagagacagagtgaccctgaccagggacgtgtaccgggaaatcgcctacatggacatccggggcctgaagcctgatgacaccgccgtgtactactgcgccagggatagaagctacggcgacagctcttgggctctcgatgcttggggacagggcacaacagtggtggtgtctgctacgcgtatccagaaccctgatcctgccgtgtaccagctgcgggatagcaagagcagcgacaagagcgtgtgtctgttcaccgacttcgacagccagaccaacgtgtcccagagcaaggactccgacgtgtacatcaccgataagtgcgtgctggacatgcggagcatggacttcaagagcaactccgccgtggcctggtccaacaagtccgatttcgcctgcgccaacgccttcaacaacagcattatccccgaggacacattcttcccaagccccgagagcagcagcgacgtgaagctggtggaaaagagcttcgagacagacaccaacctgaacttccagaacctgagcgtgatcggcttcagaatcctgctgctgaaagtggccggctttaacctgctgatgaccctgcggctgtggtccagc

SEQ ID NO: 23256 - DNA, 1890 bp, synthetic construct
  source 1..1890: mol_type = other DNA
atggccttaccagtgaccgccttgctcctgccgctggccttgctgctccacgccgccaggccggacgtgcagatgatccagacccccgatagcctggccgtgtccctgggacagagagccaccatctcttgcagagccagcgagagcgtggacaactacggcatcagcttcatgcactggtatcagcagaagcccggccagagccccaagctgctgatctacagagcctccaacctggaaagcggcatccccgccagattttccggcagcggcagcagaaccgacttcaccctgaccatcaaccccgtggaaaccgacgacgtggcaacctactactgccagcagaacaacaaggacccccccacctttggcggaggcaccaagctggaaatcaagctcgaggacctgaagaacgtgttcccacctgaggtggccgtgttcgagcctagcgaggccgagatcagccacacccagaaagccaccctcgtgtgcctggctaccggcttctaccccgaccatgtggaactgtcttggtgggtcaacggcaaagaggtgcacagcggcgtgtgtaccgacccccagccactgaaagaacagcccgccctgaacgacagccggtactgcctgagcagcagactgagagtgtccgccaccttctggcagaacccccggaaccacttcagatgccaggtgcagttctacggcctgagcgagaacgacgagtggacccaggacagagccaagcccgtgacccagatcgtgtctgccgaagcctggggcagagccgattgcggctttaccagcgagagctaccagcagggcgtgctgagcgccaccatcctgtacttgttgctgctgctgaagtccgtggtgtacttcgccatcatcacatgctgcctgctgcggagaaccgccttctgctgcaacggcgagaagtctagggccaagcgatctggatctggagcaacaaacttctcactactcaaacaagcaggtgacgtggaggagaatcccgggcctactagtatggactggatttggcgcatccttttccttgtcggcgctgctaccggcgcgcattccttcgaagggggaggcggctctcaggtgcaactccagcagtctggcgctgagcttgtgaagcctggggccagcgtgaagattagctgcaaggccagcggctacgccttcagcagctactggatgaactgggtcaagcagcggcctggcaagggcctggaatggatcggccaaatctaccccggcgacggcgacaccacctacaacggcaagttcaagggcaaggccaccctgacagccgacaagagcagcagcaccgtgtacatgcaactgaacagcctgaccagcgaggacagcgccgtgtacttctgcgtgcggtactactacggcagctccggctacttcgactattggggccagggcaccacactgaccgtgtcctctacgcgtatccagaaccctgatcctgccgtgtaccagctgcgggatagcaagagcagcgacaagagcgtgtgtctgttcaccgacttcgacagccagaccaacgtgtcccagagcaaggactccgacgtgtacatcaccgataagtgcgtgctggacatgcggagcatggacttcaagagcaactccgccgtggcctggtccaacaagtccgatttcgcctgcgccaacgccttcaacaacagcattatccccgaggacacattcttcccaagccccgagagcagcagcgacgtgaagctggtggaaaagagcttcgagacagacaccaacctgaacttccagaacctgagcgtgatcggcttcagaatcctgctgctgaaagtggccggctttaacctgctgatgaccctgcggctgtggtccagc

SEQ ID NO: 23257 - DNA, 1863 bp, synthetic construct
  source 1..1863: mol_type = other DNA
atggccttaccagtgaccgccttgctcctgccgctggccttgctgctccacgccgccaggccggacgtgcagatgatccagacccccagcagcctgtctgccagcctgggcgatagagtgaccatcagctgtcgggccagccaggacatcggcaactacctgaactggtatcagcagaaacccgacggcaccgtgaagctgctgatctactacaccagcagactgcacagcggcgtgcccagcagattttctggcagcggctctggcaccgagtacagcctgaccatctccaacctggaacaggaagatattgctacctacttctgtcagcaaggcagcgccctgccccctacatttggcggcggaacaaagctggaaatcaacctcgaggacctgaagaacgtgttcccacctgaggtggccgtgttcgagcctagcgaggccgagatcagccacacccagaaagccaccctcgtgtgcctggctaccggcttctaccccgaccatgtggaactgtcttggtgggtcaacggcaaagaggtgcacagcggcgtgtgtaccgacccccagccactgaaagaacagcccgccctgaacgacagccggtactgcctgagcagcagactgagagtgtccgccaccttctggcagaacccccggaaccacttcagatgccaggtgcagttctacggcctgagcgagaacgacgagtggacccaggacagagccaagcccgtgacccagatcgtgtctgccgaagcctggggcagagccgattgcggctttaccagcgagagctaccagcagggcgtgctgagcgccaccatcctgtacttgttgctgctgctgaagtccgtggtgtacttcgccatcatcacatgctgcctgctgcggagaaccgccttctgctgcaacggcgagaagtctagggccaagcgatctggatctggagcaacaaacttctcactactcaaacaagcaggtgacgtggaggagaatcccgggcctactagtatggactggatttggcgcatccttttccttgtcggcgctgctaccggcgcgcattccttcgaagctctccagctccagcagtctggcgcagaactcgtgcggcctggcgcttctgtgaccctgagctgtaaagccagcggctacaccttcaccgactacgagatgcactgggtcaagcagacccctgtgcacggcctggaatggatcggagccatcgaccctgagacaggcggcaccgcctacaaccagaagttcgagggcaaggccatcctgaccgccgacaagagcagcagcacagcctacatggaactgcggagcctgacctccgaggacagccccgtgtactactgtgccagacggcggtactacggcagcagctccttcgactattggggccagggcaccaccctgaccgtgtctagtacgcgtatccagaaccctgatcctgccgtgtaccagctgcgggatagcaagagcagcgacaagagcgtgtgtctgttcaccgacttcgacagccagaccaacgtgtcccagagcaaggactccgacgtgtacatcaccgataagtgcgtgctggacatgcggagcatggacttcaagagcaactccgccgtggcctggtccaacaagtccgatttcgcctgcgccaacgccttcaacaacagcattatccccgaggacacattcttcccaagccccgagagcagcagcgacgtgaagctggtggaaaagagcttcgagacagacaccaacctgaacttccagaacctgagcgtgatcggcttcagaatcctgctgctgaaagtggccggctttaacctgctgatgaccctgcggctgtggtccagc

SEQ ID NO: 23258 - DNA, 1869 bp, synthetic construct
  source 1..1869: mol_type = other DNA
atggccttaccagtgaccgccttgctcctgccgctggccttgctgctccacgccgccaggccggacatccagatgacacagagccctagcagcctgtctgccagcgtgggagacagagtgaccatcacatgcaaggccagcgaccacatcaacaactggctggcctggtatcagcagaagcctggacaggcccctaagctgctgatctacggcgctaccacactggaaacaggcgtgcccagcagattttctggcagcggctctggcaccgactacaccctgacaatatccagcctccagcctgaggacttcgccacctactactgtcagcagagctggaacaccccttggacattcggccagggcaccaagctggaaatcaagagactcgaggacctgaagaacgtgttcccacctgaggtggccgtgttcgagcctagcgaggccgagatcagccacacccagaaagccaccctcgtgtgcctggctaccggcttctaccccgaccatgtggaactgtcttggtgggtcaacggcaaagaggtgcacagcggcgtgtgtaccgacccccagccactgaaagaacagcccgccctgaacgacagccggtactgcctgagcagcagactgagagtgtccgccaccttctggcagaacccccggaaccacttcagatgccaggtgcagttctacggcctgagcgagaacgacgagtggacccaggacagagccaagcccgtgacccagatcgtgtctgccgaagcctggggcagagccgattgcggctttaccagcgagagctaccagcagggcgtgctgagcgccaccatcctgtacttgttgctgctgctgaagtccgtggtgtacttcgccatcatcacatgctgcctgctgcggagaaccgccttctgctgcaacggcgagaagtctagggccaagcgatctggatctggagcaacaaacttctcactactcaaacaagcaggtgacgtggaggagaatcccgggcctactagtatggactggatttggcgcatccttttccttgtcggcgctgctaccggcgcgcattccttcgaacaagttcagcttcaacagcctggcgctgagctggtcaaacctggcgcttctgtgaagatgagctgcaaagccagcggctacgccttcagcagctactggatcaactggatgaagcagaaacccggccagggactcgaatggatcggccaaatctatcccggcgacggcgacaccaactacaacggcaagttcaagggcagagccacactgaccgccgatacctctagcagcacagcctacatgcagctgagcagcctgaccagcgaagatagcgccgtgtacttctgtgcccggtccatcacaacagtcgtgggctgcgctatggactattggggccagggaacaagcgtgaccgtgtctagtacgcgtatccagaaccctgatcctgccgtgtaccagctgcgggatagcaagagcagcgacaagagcgtgtgtctgttcaccgacttcgacagccagaccaacgtgtcccagagcaaggactccgacgtgtacatcaccgataagtgcgtgctggacatgcggagcatggacttcaagagcaactccgccgtggcctggtccaacaagtccgatttcgcctgcgccaacgccttcaacaacagcattatccccgaggacacattcttcccaagccccgagagcagctgcgacgtgaagctggtggaaaagagcttcgagacagacaccaacctgaacttccagaacctgagcgtgatcggcctgcggatgctgttcgccaaaaccgtggccgtgaacttcctgctgaccgccaagctgttcttcctc

SEQ ID NO: 23259 - DNA, 1860 bp, synthetic construct
  source 1..1860: mol_type = other DNA
atggccttaccagtgaccgccttgctcctgccgctggccttgctgctccacgccgccaggccggacatccagatgacacagactacatcctccctgtctgcctctctgggagacagagtcaccatcagttgcagggcaagtcaggacattagtaagtacctgaactggtatcagcagaaaccagatggaactgttaaactcctgatctaccatacatcaagattacactcaggagtcccatcaaggttcagtggcagtgggtctggaacagattattctctcaccattagcaacctggagcaagaagatattgccacttacttttgccaacagggtaatacgcttccgtacacgttcggaggggggaccaagctggagatcacactcgaggacctgaagaacgtgttcccacctgaggtggccgtgttcgagcctagcgaggccgagatcagccacacccagaaagccaccctcgtgtgcctggctaccggcttctaccccgaccatgtggaactgtcttggtgggtcaacggcaaagaggtgcacagcggcgtgtgtaccgacccccagccactgaaagaacagcccgccctgaacgacagccggtactgcctgagcagcagactgagagtgtccgccaccttctggcagaacccccggaaccacttcagatgccaggtgcagttctacggcctgagcgagaacgacgagtggacccaggacagagccaagcccgtgacccagatcgtgtctgccgaagcctggggcagagccgattgcggctttaccagcgagagctaccagcagggcgtgctgagcgccaccatcctgtacttgttgctgctgctgaagtccgtggtgtacttcgccatcatcacatgctgcctgctgcggagaaccgccttctgctgcaacggcgagaagtctagggccaagcgatctggatctggagcaacaaacttctcactactcaaacaagcaggtgacgtggaggagaatcccgggcctactagtatggactggatttggcgcatccttttccttgtcggcgctgctaccggcgcgcattccttcgaagtgaaactgcaggagtcaggacctggcctggtggcgccctcacagagcctgtccgtcacatgcactgtctcaggggtctcattacccgactatggtgtaagctggattcgccagcctccacgaaagggtctggagtggctgggagtaatatggggtagtgaaaccacatactataattcagctctcaaatccagactgaccatcatcaaggacaactccaagagccaagttttcttaaaaatgaacagtctgcaaactgatgacacagccatttactactgtgccaaacattattactacggtggtagctatgctatggactactggggccaaggaacctcagtcaccgtctcctcaacgcgtatccagaaccctgatcctgccgtgtaccagctgcgggatagcaagagcagcgacaagagcgtgtgtctgttcaccgacttcgacagccagaccaacgtgtcccagagcaaggactccgacgtgtacatcaccgataagtgcgtgctggacatgcggagcatggacttcaagagcaactccgccgtggcctggtccaacaagtccgatttcgcctgcgccaacgccttcaacaacagcattatccccgaggacacattcttcccaagccccgagagcagctgcgacgtgaagctggtggaaaagagcttcgagacagacaccaacctgaacttccagaacctgagcgtgatcggcctgcggatgctgttcgccaaaaccgtggccgtgaacttcctgctgaccgccaagctgttcttcctc

SEQ ID NO: 23260 - DNA, 1863 bp, synthetic construct
  source 1..1863: mol_type = other DNA
atggccttaccagtgaccgccttgctcctgccgctggccttgctgctccacgccgccaggccggagatcgtgatgacccagagccctgccaccctgtctctgagccctggcgaaagagccaccctgagctgtagagccagccaggacatcagcaagtacctgaactggtatcagcagaagcccggccaggcccccagactgctgatctaccacaccagcagactgcacagcggcatccccgccagattttctggctctggcagcggcaccgactacaccctgacaatcagcagcctccagcccgaggacttcgccgtgtacttctgtcagcaaggcaacaccctgccctacaccttcggccagggcaccaagctggaaatcaagctcgaggacctgaagaacgtgttcccacctgaggtggccgtgttcgagcctagcgaggccgagatcagccacacccagaaagccaccctcgtgtgcctggctaccggcttctaccccgaccatgtggaactgtcttggtgggtcaacggcaaagaggtgcacagcggcgtgtgtaccgacccccagccactgaaagaacagcccgccctgaacgacagccggtactgcctgagcagcagactgagagtgtccgccaccttctggcagaacccccggaaccacttcagatgccaggtgcagttctacggcctgagcgagaacgacgagtggacccaggacagagccaagcccgtgacccagatcgtgtctgccgaagcctggggcagagccgattgcggctttaccagcgagagctaccagcagggcgtgctgagcgccaccatcctgtacttgttgctgctgctgaagtccgtggtgtacttcgccatcatcacatgctgcctgctgcggagaaccgccttctgctgcaacggcgagaagtctagggccaagcgatctggatctggagcaacaaacttctcactactcaaacaagcaggtgacgtggaggagaatcccgggcctactagtatggactggatttggcgcatccttttccttgtcggcgctgctaccggcgcgcattccttcgaacaggtgcaactccaggaatctggccctggcctcgtgaagcccagcgagacactgagcctgacctgtaccgtgtccggcgtgtccctgcctgactatggcgtgtcctggatcagacagccccctggcaagggcctggaatggatcggagtgatttggggcagcgaaaccacctactacaacagctccctgaagtccagagtgaccatctccaaggacaactccaagaaccaggtgtccctgaagctgagcagcgtgacagccgccgacaccgccgtgtattactgcgccaagcactactactacggcggcagctacgctatggactactggggccagggaaccctcgtgaccgtgtctagtacgcgtatccagaaccctgatcctgccgtgtaccagctgcgggatagcaagagcagcgacaagagcgtgtgtctgttcaccgacttcgacagccagaccaacgtgtcccagagcaaggactccgacgtgtacatcaccgataagtgcgtgctggacatgcggagcatggacttcaagagcaactccgccgtggcctggtccaacaagtccgatttcgcctgcgccaacgccttcaacaacagcattatccccgaggacacattcttcccaagccccgagagcagctgcgacgtgaagctggtggaaaagagcttcgagacagacaccaacctgaacttccagaacctgagcgtgatcggcctgcggatgctgttcgccaaaaccgtggccgtgaacttcctgctgaccgccaagctgttcttcctc

SEQ ID NO: 23261 - DNA, 1866 bp, synthetic construct
  source 1..1866: mol_type = other DNA
atggccttaccagtgaccgccttgctcctgccgctggccttgctgctccacgccgccaggccggacgagatcgtgctgacacagagccccgccaccctgtcactgtctccaggcgaaagagccaccctgagctgtagcgccagcagcagcgtgtcctacatgcactggtatcagcagaagcccggccaggcccccagactgctgatctacgataccagcaagctggcctccggcatccccgccagattttctggcagcggctccggcaccgacttcaccctgacaatcagcagcctggaacccgaggacgtggccgtgtactactgttttcaaggcagcgtgtaccccttcaccttcggccagggcaccaagctggaaatcaagagactcgaggacctgaagaacgtgttcccacctgaggtggccgtgttcgagcctagcgaggccgagatcagccacacccagaaagccaccctcgtgtgcctggctaccggcttctaccccgaccatgtggaactgtcttggtgggtcaacggcaaagaggtgcacagcggcgtgtgtaccgacccccagccactgaaagaacagcccgccctgaacgacagccggtactgcctgagcagcagactgagagtgtccgccaccttctggcagaacccccggaaccacttcagatgccaggtgcagttctacggcctgagcgagaacgacgagtggacccaggacagagccaagcccgtgacccagatcgtgtctgccgaagcctggggcagagccgattgcggctttaccagcgagagctaccagcagggcgtgctgagcgccaccatcctgtacttgttgctgctgctgaagtccgtggtgtacttcgccatcatcacatgctgcctgctgcggagaaccgccttctgctgcaacggcgagaagtctagggccaagcgatctggatctggagcaacaaacttctcactactcaaacaagcaggtgacgtggaggagaatcccgggcctactagtatggactggatttggcgcatccttttccttgtcggcgctgctaccggcgcgcattccttcgaacaggtgcagctccaggaatctggccctggcctcgtgaagcctagccagaccctgagcctgacctgtaccgtgtctggcggcagcatcagcacaagcggcatgggcgtgggctggatcagacagcaccctggcaagggcctggaatggatcggccacatttggtgggacgacgacaagcggtacaaccccgccctgaagtccagagtgaccatcagcgtggacaccagcaagaaccagttcagcctgaagctgagcagcgtgacagccgccgataccgccgtgtattattgcgcccggatggaactgtggtcctactacttcgactactggggccagggaaccctcgtgaccgtgtctagtacgcgtatccagaaccctgatcctgccgtgtaccagctgcgggatagcaagagcagcgacaagagcgtgtgtctgttcaccgacttcgacagccagaccaacgtgtcccagagcaaggactccgacgtgtacatcaccgataagtgcgtgctggacatgcggagcatggacttcaagagcaactccgccgtggcctggtccaacaagtccgatttcgcctgcgccaacgccttcaacaacagcattatccccgaggacacattcttcccaagccccgagagcagctgcgacgtgaagctggtggaaaagagcttcgagacagacaccaacctgaacttccagaacctgagcgtgatcggcctgcggatgctgttcgccaaaaccgtggccgtgaacttcctgctgaccgccaagctgttcttcctc

SEQ ID NO: 23262 - DNA, 1860 bp, synthetic construct
  source 1..1860: mol_type = other DNA
atggccttaccagtgaccgccttgctcctgccgctggccttgctgctccacgccgccaggccggactacatccacgtgacacagagccctagcagcctgtccgtgtccatcggcgatagagtgaccatcaactgccagacctctcaaggcgtgggcagcgacctgcactggtatcagcacaaacctggcagagcccctaagctgctgatccaccatgccagctctgtggaagatggcgtgcccagcagattttccggcaccggatttcacaccagcttcaacctgacaatcaacgacctccaggccgacgacatcggcacctactactgtcaagtgctccagagcttcggcagaggcagcagactggatacaaaactcgaggacctgaagaacgtgttcccacctgaggtggccgtgttcgagcctagcgaggccgagatcagccacacccagaaagccaccctcgtgtgcctggctaccggcttctaccccgaccatgtggaactgtcttggtgggtcaacggcaaagaggtgcacagcggcgtgtgtaccgacccccagccactgaaagaacagcccgccctgaacgacagccggtactgcctgagcagcagactgagagtgtccgccaccttctggcagaacccccggaaccacttcagatgccaggtgcagttctacggcctgagcgagaacgacgagtggacccaggacagagccaagcccgtgacccagatcgtgtctgccgaagcctggggcagagccgattgcggctttaccagcgagagctaccagcagggcgtgctgagcgccaccatcctgtacttgttgctgctgctgaagtccgtggtgtacttcgccatcatcacatgctgcctgctgcggagaaccgccttctgctgcaacggcgagaagtctagggccaagcgatctggatctggagcaacaaacttctcactactcaaacaagcaggtgacgtggaggagaatcccgggcctactagtatggactggatttggcgcatccttttccttgtcggcgctgctaccggcgcgcattccttcgaaagggcacacctggtgcagtctggcaccgccatgaagaaacctggcgcttccgtcagagtgtcctgtcagacaagcggctacaccttcacagcccacatcctgttctggttcagacaggccccaggcagaggactggaatgggtcggatggatcaagccccagtacggggccgtgaatttcggcggaggcttcagagacagagtgaccctgaccagggacgtgtaccgggaaatcgcctacatggacatccggggcctgaagcctgatgacaccgccgtgtactactgcgccagggatagaagctacggcgacagctcttgggctctcgatgcttggggacagggcacaacagtggtggtgtctgctacgcgtatccagaaccctgatcctgccgtgtaccagctgcgggatagcaagagcagcgacaagagcgtgtgtctgttcaccgacttcgacagccagaccaacgtgtcccagagcaaggactccgacgtgtacatcaccgataagtgcgtgctggacatgcggagcatggacttcaagagcaactccgccgtggcctggtccaacaagtccgatttcgcctgcgccaacgccttcaacaacagcattatccccgaggacacattcttcccaagccccgagagcagctgcgacgtgaagctggtggaaaagagcttcgagacagacaccaacctgaacttccagaacctgagcgtgatcggcctgcggatgctgttcgccaaaaccgtggccgtgaacttcctgctgaccgccaagctgttcttcctc

SEQ ID NO: 23263 - DNA, 1890 bp, synthetic construct
  source 1..1890: mol_type = other DNA
atggccttaccagtgaccgccttgctcctgccgctggccttgctgctccacgccgccaggccggacgtgcagatgatccagacccccgatagcctggccgtgtccctgggacagagagccaccatctcttgcagagccagcgagagcgtggacaactacggcatcagcttcatgcactggtatcagcagaagcccggccagagccccaagctgctgatctacagagcctccaacctggaaagcggcatccccgccagattttccggcagcggcagcagaaccgacttcaccctgaccatcaaccccgtggaaaccgacgacgtggcaacctactactgccagcagaacaacaaggacccccccacctttggcggaggcaccaagctggaaatcaagctcgaggacctgaagaacgtgttcccacctgaggtggccgtgttcgagcctagcgaggccgagatcagccacacccagaaagccaccctcgtgtgcctggctaccggcttctaccccgaccatgtggaactgtcttggtgggtcaacggcaaagaggtgcacagcggcgtgtgtaccgacccccagccactgaaagaacagcccgccctgaacgacagccggtactgcctgagcagcagactgagagtgtccgccaccttctggcagaacccccggaaccacttcagatgccaggtgcagttctacggcctgagcgagaacgacgagtggacccaggacagagccaagcccgtgacccagatcgtgtctgccgaagcctggggcagagccgattgcggctttaccagcgagagctaccagcagggcgtgctgagcgccaccatcctgtacttgttgctgctgctgaagtccgtggtgtacttcgccatcatcacatgctgcctgctgcggagaaccgccttctgctgcaacggcgagaagtctagggccaagcgatctggatctggagcaacaaacttctcactactcaaacaagcaggtgacgtggaggagaatcccgggcctactagtatggactggatttggcgcatccttttccttgtcggcgctgctaccggcgcgcattccttcgaagggggaggcggctctcaggtgcaactccagcagtctggcgctgagcttgtgaagcctggggccagcgtgaagattagctgcaaggccagcggctacgccttcagcagctactggatgaactgggtcaagcagcggcctggcaagggcctggaatggatcggccaaatctaccccggcgacggcgacaccacctacaacggcaagttcaagggcaaggccaccctgacagccgacaagagcagcagcaccgtgtacatgcaactgaacagcctgaccagcgaggacagcgccgtgtacttctgcgtgcggtactactacggcagctccggctacttcgactattggggccagggcaccacactgaccgtgtcctctacgcgtatccagaaccctgatcctgccgtgtaccagctgcgggatagcaagagcagcgacaagagcgtgtgtctgttcaccgacttcgacagccagaccaacgtgtcccagagcaaggactccgacgtgtacatcaccgataagtgcgtgctggacatgcggagcatggacttcaagagcaactccgccgtggcctggtccaacaagtccgatttcgcctgcgccaacgccttcaacaacagcattatccccgaggacacattcttcccaagccccgagagcagctgcgacgtgaagctggtggaaaagagcttcgagacagacaccaacctgaacttccagaacctgagcgtgatcggcctgcggatgctgttcgccaaaaccgtggccgtgaacttcctgctgaccgccaagctgttcttcctc

SEQ ID NO: 23264 - DNA, 1863 bp, synthetic construct
  source 1..1863: mol_type = other DNA
atggccttaccagtgaccgccttgctcctgccgctggccttgctgctccacgccgccaggccggacgtgcagatgatccagacccccagcagcctgtctgccagcctgggcgatagagtgaccatcagctgtcgggccagccaggacatcggcaactacctgaactggtatcagcagaaacccgacggcaccgtgaagctgctgatctactacaccagcagactgcacagcggcgtgcccagcagattttctggcagcggctctggcaccgagtacagcctgaccatctccaacctggaacaggaagatattgctacctacttctgtcagcaaggcagcgccctgccccctacatttggcggcggaacaaagctggaaatcaacctcgaggacctgaagaacgtgttcccacctgaggtggccgtgttcgagcctagcgaggccgagatcagccacacccagaaagccaccctcgtgtgcctggctaccggcttctaccccgaccatgtggaactgtcttggtgggtcaacggcaaagaggtgcacagcggcgtgtgtaccgacccccagccactgaaagaacagcccgccctgaacgacagccggtactgcctgagcagcagactgagagtgtccgccaccttctggcagaacccccggaaccacttcagatgccaggtgcagttctacggcctgagcgagaacgacgagtggacccaggacagagccaagcccgtgacccagatcgtgtctgccgaagcctggggcagagccgattgcggctttaccagcgagagctaccagcagggcgtgctgagcgccaccatcctgtacttgttgctgctgctgaagtccgtggtgtacttcgccatcatcacatgctgcctgctgcggagaaccgccttctgctgcaacggcgagaagtctagggccaagcgatctggatctggagcaacaaacttctcactactcaaacaagcaggtgacgtggaggagaatcccgggcctactagtatggactggatttggcgcatccttttccttgtcggcgctgctaccggcgcgcattccttcgaagctctccagctccagcagtctggcgcagaactcgtgcggcctggcgcttctgtgaccctgagctgtaaagccagcggctacaccttcaccgactacgagatgcactgggtcaagcagacccctgtgcacggcctggaatggatcggagccatcgaccctgagacaggcggcaccgcctacaaccagaagttcgagggcaaggccatcctgaccgccgacaagagcagcagcacagcctacatggaactgcggagcctgacctccgaggacagccccgtgtactactgtgccagacggcggtactacggcagcagctccttcgactattggggccagggcaccaccctgaccgtgtctagtacgcgtatccagaaccctgatcctgccgtgtaccagctgcgggatagcaagagcagcgacaagagcgtgtgtctgttcaccgacttcgacagccagaccaacgtgtcccagagcaaggactccgacgtgtacatcaccgataagtgcgtgctggacatgcggagcatggacttcaagagcaactccgccgtggcctggtccaacaagtccgatttcgcctgcgccaacgccttcaacaacagcattatccccgaggacacattcttcccaagccccgagagcagctgcgacgtgaagctggtggaaaagagcttcgagacagacaccaacctgaacttccagaacctgagcgtgatcggcctgcggatgctgttcgccaaaaccgtggccgtgaacttcctgctgaccgccaagctgttcttcctc

SEQ ID NO: 23265 - protein, 118 aa, synthetic construct
EDLKNVFPPEVAVFEPSEAEISHTQKATLVCLATGFYPDHVELSWWVNGKEVHSGVSTDPQPLKEQPALNDSRYCLSSRLRVSATFWQNPRNHFRCQVQFYGLSENDEWTQDRAKPVT

SEQ ID NO: 23266 - protein, 61 aa, synthetic construct; identical to SEQ ID NO: 18704

SEQ ID NO: 23267 - protein, 106 aa, synthetic construct; identical to SEQ ID NO: 8981

SEQ ID NO: 23268 - protein, 119 aa, synthetic construct
DKQLDADVSPKPTIFLPSIAETKLQKAGTYLCLLEKFFPDVIKIHWQEKKSNTILGSQEGNTMKTNDTYMKFSWLTVPEKSLDKEHRCIVRHENNKNGVDQEIIFPPIKTDVITMDPKD

SEQ ID NO: 23269 - protein, 67 aa, synthetic construct; identical to SEQ ID NO: 8904

SEQ ID NO: 23270 - protein, 53 aa, synthetic construct
CSKDANDTLLLQLTNTSAYYMYLLLLLKSVVYFAIITCCLLRRTAFCCNGEKS

SEQ ID NO: 23271 - protein, 85 aa, synthetic construct; identical to SEQ ID NO: 8983

SEQ ID NO: 23272 - protein, 68 aa, synthetic construct; identical to SEQ ID NO: 8907

SEQ ID NO: 23273 - protein, 117 aa, synthetic construct
IQNPDPAVYQLRDSKSSDKSVCLFTDFDSQTNVSQSKDSDVYITDKCVLDMRSMDFKSNSAVAWSNKSDFACANAFNNSIIPEDTFFPSPESSCDVKLVEKSFETDTNLNFQNLSVI

SEQ ID NO: 23274 - protein, 116 aa, synthetic construct
IQNPDPAVYQLRDSKSSDKSVCLFTDFDSQTNVSQSKDSDVYITDKCVLDMRSMDFKSNSAVAWSNKSDFACANAFNNSIIPEDTFFPSPESSCDVKLVEKSFETDTNLNFQNLSV

SEQ ID NO: 23275 - protein, 115 aa, synthetic construct
IQNPDPAVYQLRDSKSSDKSVCLFTDFDSQTNVSQSKDSDVYITDKCVLDMRSMDFKSNSAVAWSNKSDFACANAFNNSIIPEDTFFPSPESSCDVKLVEKSFETDTNLNFQNLS

SEQ ID NO: 23276 - protein, 23 aa, synthetic construct
GFRILLLKVAGFNLLMTLRLWSS

SEQ ID NO: 23277 - protein, 24 aa, synthetic construct
IGFRILLLKVAGFNLLMTLRLWSS

SEQ ID NO: 23278 - protein, 25 aa, synthetic construct
VIGFRILLLKVAGFNLLMTLRLWSS

SEQ ID NO: 23279 - protein, 130 aa, synthetic construct
SQPHTKPSVFVMKNGTNVACLVKEFYPKDIRINLVSSKKITEFDPAIVISPSGKYNAVKLGKYEDSNSVTCSVQHDNKTVHSTDFEVKTDSTDHVKPKETENTKQPSKSCHKPKAIVHTEKVNMMSLTVL

SEQ ID NO: 23280 - protein, 129 aa, synthetic construct
SQPHTKPSVFVMKNGTNVACLVKEFYPKDIRINLVSSKKITEFDPAIVISPSGKYNAVKLGKYEDSNSVTCSVQHDNKTVHSTDFEVKTDSTDHVKPKETENTKQPSKSCHKPKAIVHTEKVNMMSLTV

SEQ ID NO: 23281 - protein, 128 aa, synthetic construct
SQPHTKPSVFVMKNGTNVACLVKEFYPKDIRINLVSSKKITEFDPAIVISPSGKYNAVKLGKYEDSNSVTCSVQHDNKTVHSTDFEVKTDSTDHVKPKETENTKQPSKSCHKPKAIVHTEKVNMMSLT

SEQ ID NO: 23282 - protein, 23 aa, synthetic construct
GLRMLFAKTVAVNFLLTAKLFFL

SEQ ID NO: 23283 - protein, 24 aa, synthetic construct
LGLRMLFAKTVAVNFLLTAKLFFL

SEQ ID NO: 23284 - protein, 25 aa, synthetic construct
VLGLRMLFAKTVAVNFLLTAKLFFL

SEQ ID NO: 23285 - protein, 149 aa, synthetic construct
EDLKNVFPPEVAVFEPSEAEISHTQKATLVCLATGFYPDHVELSWWVNGKEVHSGVCTDPQPLKEQPALNDSRYCLSSRLRVSATFWQNPRNHFRCQVQFYGLSENDEWTQDRAKPVTQIVSAEAWGRADCGFTSESYQQGVLSATILY

SEQ ID NO: 23286 - protein, 145 aa, synthetic construct
EDLKNVFPPEVAVFEPSEAEISHTQKATLVCLATGFYPDHVELSWWVNGKEVHSGVCTDPQPLKEQPALNDSRYCLSSRLRVSATFWQNPRNHFRCQVQFYGLSENDEWTQDRAKPVTQIVSAEAWGRADCGFTSESYQQGVLSA

SEQ ID NO: 23287 - protein, 30 aa, synthetic construct
EILLGKATLYAVLVSALVLMAMVKRKDSRG

SEQ ID NO: 23288 - protein, 34 aa, synthetic construct
TILYEILLGKATLYAVLVSALVLMAMVKRKDSRG

SEQ ID NO: 23289 - protein, 142 aa, synthetic construct
DKQLDADVSPKPTIFLPSIAETKLQKAGTYLCLLEKFFPDVIKIHWQEKKSNTILGSQEGNTMKTNDTYMKFSWLTVPEKSLDKEHRCIVRHENNKNGVDQEIIFPPIKTDVITMDPKDNCSKDANDTLLLQLTNTSAYYMY

SEQ ID NO: 23290 - protein, 138 aa, synthetic construct
DKQLDADVSPKPTIFLPSIAETKLQKAGTYLCLLEKFFPDVIKIHWQEKKSNTILGSQEGNTMKTNDTYMKFSWLTVPEKSLDKEHRCIVRHENNKNGVDQEIIFPPIKTDVITMDPKDNCSKDANDTLLLQLTNTSA

SEQ ID NO: 23291 - protein, 31 aa, synthetic construct
LLLLLKSVVYFAIITCCLLRRTAFCCNGEKS

SEQ ID NO: 23292 - protein, 35 aa, synthetic construct
YYMYLLLLLKSVVYFAIITCCLLRRTAFCCNGEKS

SEQ ID NO: 23293 - protein, 8 aa, synthetic construct
GGGGGGGG

SEQ ID NO: 23294 - protein, 136 aa, synthetic construct; identical to SEQ ID NO: 21974

SEQ ID NO: 23295 - protein, 135 aa, synthetic construct; identical to SEQ ID NO: 21975

SEQ ID NO: 23296 - protein, 134 aa, synthetic construct; identical to SEQ ID NO: 21976

SEQ ID NO: 23297 - protein, 133 aa, synthetic construct; identical to SEQ ID NO: 21977

SEQ ID NO: 23298 - protein, 132 aa, synthetic construct; identical to SEQ ID NO: 21978

SEQ ID NO: 23299 - protein, 131 aa, synthetic construct; identical to SEQ ID NO: 21979

SEQ ID NO: 23300 - protein, 130 aa, synthetic construct; identical to SEQ ID NO: 21980

SEQ ID NO: 23301 - protein, 129 aa, synthetic construct; identical to SEQ ID NO: 21981

SEQ ID NO: 23302 - protein, 128 aa, synthetic construct; identical to SEQ ID NO: 21982

SEQ ID NO: 23303 - protein, 127 aa, synthetic construct; identical to SEQ ID NO: 21983

SEQ ID NO: 23304 - protein, 126 aa, synthetic construct; identical to SEQ ID NO: 21984

SEQ ID NO: 23305 - protein, 121 aa, synthetic construct; identical to SEQ ID NO: 21985

SEQ ID NO: 23306 - protein, 116 aa, synthetic construct; identical to SEQ ID NO: 21986

SEQ ID NO: 23307 - protein, 8 aa, synthetic construct
GGGGGGGG

SEQ ID NO: 23308 - protein, 140 aa, synthetic construct; identical to SEQ ID NO: 22000

SEQ ID NO: 23309 - protein, 139 aa, synthetic construct; identical to SEQ ID NO: 22001

SEQ ID NO: 23310 - protein, 138 aa, synthetic construct; identical to SEQ ID NO: 22002

SEQ ID NO: 23311 - protein, 137 aa, synthetic construct; identical to SEQ ID NO: 22003

SEQ ID NO: 23312 - protein, 136 aa, synthetic construct; identical to SEQ ID NO: 22004

SEQ ID NO: 23313 - protein, 135 aa, synthetic construct; identical to SEQ ID NO: 22005

SEQ ID NO: 23314 - protein, 134 aa, synthetic construct; identical to SEQ ID NO: 22006

SEQ ID NO: 23315 - protein, 133 aa, synthetic construct; identical to SEQ ID NO: 22007

SEQ ID NO: 23316 - protein, 132 aa, synthetic construct; identical to SEQ ID NO: 22008

SEQ ID NO: 23317 - protein, 131 aa, synthetic construct; identical to SEQ ID NO: 22009

SEQ ID NO: 23318 - protein, 130 aa, synthetic construct; identical to SEQ ID NO: 22010

SEQ ID NO: 23319 - protein, 129 aa, synthetic construct; identical to SEQ ID NO: 22011

SEQ ID NO: 23320 - protein, 128 aa, synthetic construct; identical to SEQ ID NO: 22012

SEQ ID NO: 23321 - protein, 127 aa, synthetic construct; identical to SEQ ID NO: 22013

SEQ ID NO: 23322 - protein, 126 aa, synthetic construct; identical to SEQ ID NO: 22014

SEQ ID NO: 23323 - protein, 125 aa, synthetic construct; identical to SEQ ID NO: 22015

SEQ ID NO: 23324 - protein, 124 aa, synthetic construct; identical to SEQ ID NO: 22016

SEQ ID NO: 23325 - protein, 123 aa, synthetic construct; identical to SEQ ID NO: 22017

SEQ ID NO: 23326 - protein, 122 aa, synthetic construct; identical to SEQ ID NO: 22018

SEQ ID NO: 23327 - protein, 121 aa, synthetic construct; identical to SEQ ID NO: 22019

SEQ ID NO: 23328 - protein, 120 aa, synthetic construct; identical to SEQ ID NO: 22020

SEQ ID NO: 23329 - protein, 119 aa, synthetic construct; identical to SEQ ID NO: 22021

SEQ ID NO: 23330 - protein, 118 aa, synthetic construct; identical to SEQ ID NO: 22022

SEQ ID NO: 23331 - protein, 117 aa, synthetic construct; identical to SEQ ID NO: 22023

SEQ ID NO: 23332 - protein, 116 aa, synthetic construct; identical to SEQ ID NO: 22024

SEQ ID NO: 23333 - protein, 115 aa, synthetic construct; identical to SEQ ID NO: 22025

SEQ ID NO: 23334 - protein, 114 aa, synthetic construct; identical to SEQ ID NO: 22026

SEQ ID NO: 23335 - protein, 113 aa, synthetic construct; identical to SEQ ID NO: 22027

SEQ ID NO: 23336 - protein, 112 aa, synthetic construct; identical to SEQ ID NO: 22028

SEQ ID NO: 23337 - protein, 111 aa, synthetic construct; identical to SEQ ID NO: 22029

SEQ ID NO: 23338 - protein, 110 aa, synthetic construct; identical to SEQ ID NO: 22030

SEQ ID NO: 23339 - protein, 109 aa, synthetic construct; identical to SEQ ID NO: 22031

SEQ ID NO: 23340 - protein, 108 aa, synthetic construct; identical to SEQ ID NO: 22032

SEQ ID NO: 23341 - protein, 107 aa, synthetic construct; identical to SEQ ID NO: 22033

SEQ ID NO: 23342 - protein, 106 aa, synthetic construct; identical to SEQ ID NO: 22034

SEQ ID NO: 23343 - protein, 105 aa, synthetic construct; identical to SEQ ID NO: 22035

SEQ ID NO: 23344 - protein, 104 aa, synthetic construct; identical to SEQ ID NO: 22036

SEQ ID NO: 23345 - protein, 103 aa, synthetic construct; identical to SEQ ID NO: 22037

SEQ ID NO: 23346 - protein, 102 aa, synthetic construct; identical to SEQ ID NO: 22038

SEQ ID NO: 23347 - protein, 101 aa, synthetic construct; identical to SEQ ID NO: 22039

SEQ ID NO: 23348 - protein, 100 aa, synthetic construct; identical to SEQ ID NO: 22040

SEQ ID NO: 23349 - protein, 99 aa, synthetic construct; identical to SEQ ID NO: 22041

SEQ ID NO: 23350 - protein, 98 aa, synthetic construct; identical to SEQ ID NO: 22042

SEQ ID NO: 23351 - protein, 97 aa, synthetic construct; identical to SEQ ID NO: 22043

SEQ ID NO: 23352 - protein, 96 aa, synthetic construct; identical to SEQ ID NO: 22044

SEQ ID NO: 23353 - protein, 94 aa, synthetic construct; identical to SEQ ID NO: 22045

SEQ ID NO: 23354 - protein, 93 aa, synthetic construct; identical to SEQ ID NO: 22046

SEQ ID NO: 23355 - protein, 92 aa, synthetic construct; identical to SEQ ID NO: 22047

SEQ ID NO: 23356 - protein, 91 aa, synthetic construct; identical to SEQ ID NO: 22048

SEQ ID NO: 23357 - protein, 90 aa, synthetic construct; identical to SEQ ID NO: 22049

SEQ ID NO: 23358 - protein, 89 aa, synthetic construct; identical to SEQ ID NO: 22050

SEQ ID NO: 23359 - protein, 88 aa, synthetic construct; identical to SEQ ID NO: 22051

SEQ ID NO: 23360 - protein, 87 aa, synthetic construct; identical to SEQ ID NO: 22052

SEQ ID NO: 23361 - protein, 86 aa, synthetic construct; identical to SEQ ID NO: 22053

SEQ ID NO: 23362 - protein, 85 aa, synthetic construct; identical to SEQ ID NO: 22054

SEQ ID NO: 23363 - protein, 84 aa, synthetic construct; identical to SEQ ID NO: 22055

SEQ ID NO: 23364 - protein, 83 aa, synthetic construct; identical to SEQ ID NO: 22056

SEQ ID NO: 23365 - protein, 82 aa, synthetic construct; identical to SEQ ID NO: 22057

SEQ ID NO: 23366 - protein, 81 aa, synthetic construct; identical to SEQ ID NO: 22058

SEQ ID NO: 23367 - protein, 80 aa, synthetic construct; identical to SEQ ID NO: 22059

SEQ ID NO: 23368 - protein, 79 aa, synthetic construct; identical to SEQ ID NO: 22060

SEQ ID NO: 23369 - protein, 78 aa, synthetic construct; identical to SEQ ID NO: 22061

SEQ ID NO: 23370 - protein, 77 aa, synthetic construct; identical to SEQ ID NO: 22062

SEQ ID NO: 23371 - protein, 76 aa, synthetic construct; identical to SEQ ID NO: 22063

SEQ ID NO: 23372 - protein, 75 aa, synthetic construct; identical to SEQ ID NO: 22064

SEQ ID NO: 23373 - protein, 74 aa, synthetic construct; identical to SEQ ID NO: 22065

SEQ ID NO: 23374 - protein, 73 aa, synthetic construct; identical to SEQ ID NO: 22066

SEQ ID NO: 23375 - protein, 72 aa, synthetic construct; identical to SEQ ID NO: 22067

SEQ ID NO: 23376 - protein, 71 aa, synthetic construct; identical to SEQ ID NO: 22068

SEQ ID NO: 23377 - protein, 70 aa, synthetic construct; identical to SEQ ID NO: 22069

SEQ ID NO: 23378 - protein, 69 aa, synthetic construct; identical to SEQ ID NO: 22070

SEQ ID NO: 23379 - protein, 68 aa, synthetic construct; identical to SEQ ID NO: 22071

SEQ ID NO: 23380 - protein, 67 aa, synthetic construct; identical to SEQ ID NO: 22072

SEQ ID NO: 23381 - protein, 66 aa, synthetic construct; identical to SEQ ID NO: 22073

SEQ ID NO: 23382 - protein, 65 aa, synthetic construct; identical to SEQ ID NO: 22074

SEQ ID NO: 23383 - protein, 64 aa, synthetic construct; identical to SEQ ID NO: 22075

SEQ ID NO: 23384 - protein, 63 aa, synthetic construct; identical to SEQ ID NO: 22076

SEQ ID NO: 23385 - protein, 62 aa, synthetic construct; identical to SEQ ID NO: 22077

SEQ ID NO: 23386 - protein, 61 aa, synthetic construct; identical to SEQ ID NO: 22078

SEQ ID NO: 23387 - protein, 60 aa, synthetic construct; identical to SEQ ID NO: 22079

SEQ ID NO: 23388 - protein, 59 aa, synthetic construct; identical to SEQ ID NO: 22080

SEQ ID NO: 23389 - protein, 58 aa, synthetic construct; identical to SEQ ID NO: 22081

SEQ ID NO: 23390 - protein, 57 aa, synthetic construct; identical to SEQ ID NO: 22082

SEQ ID NO: 23391 - protein, 56 aa, synthetic construct; identical to SEQ ID NO: 22083

SEQ ID NO: 23392 - protein, 55 aa, synthetic construct; identical to SEQ ID NO: 22084

SEQ ID NO: 23393 - protein, 54 aa, synthetic construct; identical to SEQ ID NO: 22085

SEQ ID NO: 23394 - protein, 53 aa, synthetic construct; identical to SEQ ID NO: 22086

SEQ ID NO: 23395 - protein, 52 aa, synthetic construct; identical to SEQ ID NO: 22087

SEQ ID NO: 23396 - protein, 51 aa, synthetic construct; identical to SEQ ID NO: 22088

SEQ ID NO: 23397 - protein, 50 aa, synthetic construct; identical to SEQ ID NO: 22089

SEQ ID NO: 23398 - protein, 49 aa, synthetic construct; identical to SEQ ID NO: 22090

SEQ ID NO: 23399 - protein, 48 aa, synthetic construct; identical to SEQ ID NO: 22091

SEQ ID NO: 23400 - protein, 47 aa, synthetic construct; identical to SEQ ID NO: 22092

SEQ ID NO: 23401 - protein, 46 aa, synthetic construct; identical to SEQ ID NO: 22093

SEQ ID NO: 23402 - protein, 45 aa, synthetic construct; identical to SEQ ID NO: 22094

SEQ ID NO: 23403 - protein, 44 aa, synthetic construct; identical to SEQ ID NO: 22095

SEQ ID NO: 23404 - protein, 43 aa, synthetic construct; identical to SEQ ID NO: 22096

SEQ ID NO: 23405 - protein, 42 aa, synthetic construct; identical to SEQ ID NO: 22097

SEQ ID NO: 23406 - protein, 41 aa, synthetic construct; identical to SEQ ID NO: 22098

SEQ ID NO: 23407 - protein, 40 aa, synthetic construct; identical to SEQ ID NO: 22099

SEQ ID NO: 23408 - protein, 39 aa, synthetic construct; identical to SEQ ID NO: 22100

SEQ ID NO: 23409 - protein, 166 aa, synthetic construct; identical to SEQ ID NO: 22101

SEQ ID NO: 23410 - protein, 165 aa, synthetic construct; identical to SEQ ID NO: 22102

SEQ ID NO: 23411 - protein, 164 aa, synthetic construct; identical to SEQ ID NO: 22103

SEQ ID NO: 23412 - protein, 163 aa, synthetic construct; identical to SEQ ID NO: 22104

SEQ ID NO: 23413 - protein, 162 aa, synthetic construct; identical to SEQ ID NO: 22105

SEQ ID NO: 23414 - protein, 161 aa, synthetic construct; identical to SEQ ID NO: 22106

SEQ ID NO: 23415 - protein, 160 aa, synthetic construct; identical to SEQ ID NO: 22107

SEQ ID NO: 23416 - protein, 159 aa, synthetic construct; identical to SEQ ID NO: 22108

SEQ ID NO: 23417 - protein, 158 aa, synthetic construct; identical to SEQ ID NO: 22109

SEQ ID NO: 23418 - protein, 157 aa, synthetic construct; identical to SEQ ID NO: 22110

SEQ ID NO: 23419 - protein, 156 aa, synthetic construct; identical to SEQ ID NO: 22111

SEQ ID NO: 23420 - protein, 176 aa, synthetic construct; identical to SEQ ID NO: 22112

SEQ ID NO: 23421 - protein, 175 aa, synthetic construct; identical to SEQ ID NO: 22113

SEQ ID NO: 23422 - protein, 174 aa, synthetic construct; identical to SEQ ID NO: 22114

SEQ ID NO: 23423 - protein, 173 aa, synthetic construct; identical to SEQ ID NO: 22115

SEQ ID NO: 23424 - protein, 172 aa, synthetic construct; identical to SEQ ID NO: 22116

SEQ ID NO: 23425 - protein, 171 aa, synthetic construct; identical to SEQ ID NO: 22117

SEQ ID NO: 23426 - protein, 170 aa, synthetic construct; identical to SEQ ID NO: 22118

SEQ ID NO: 23427 - protein, 169 aa, synthetic construct; identical to SEQ ID NO: 22119

SEQ ID NO: 23428 - protein, 168 aa, synthetic construct; identical to SEQ ID NO: 22120

SEQ ID NO: 23429 - protein, 167 aa, synthetic construct; identical to SEQ ID NO: 22121

SEQ ID NO: 23430 - protein, 166 aa, synthetic construct; identical to SEQ ID NO: 22122

SEQ ID NO: 23431 - protein, 165 aa, synthetic construct; identical to SEQ ID NO: 22123

SEQ ID NO: 23432 - protein, 164 aa, synthetic construct; identical to SEQ ID NO: 22124

SEQ ID NO: 23433 - protein, 163 aa, synthetic construct; identical to SEQ ID NO: 22125

SEQ ID NO: 23434 - protein, 162 aa, synthetic construct; identical to SEQ ID NO: 22126

SEQ ID NO: 23435 - protein, 161 aa, synthetic construct; identical to SEQ ID NO: 22127

SEQ ID NO: 23436 - protein, 160 aa, synthetic construct; identical to SEQ ID NO: 22128

SEQ ID NO: 23437 - protein, 159 aa, synthetic construct; identical to SEQ ID NO: 22129

SEQ ID NO: 23438 - protein, 158 aa, synthetic construct; identical to SEQ ID NO: 22130

SEQ ID NO: 23439 - protein, 157 aa, synthetic construct; identical to SEQ ID NO: 22131

SEQ ID NO: 23440 - protein, 156 aa, synthetic construct; identical to SEQ ID NO: 22132

SEQ ID NO: 23441 - protein, 151 aa, synthetic construct; identical to SEQ ID NO: 22133

SEQ ID NO: 23442 - protein, 146 aa, synthetic construct; identical to SEQ ID NO: 22134

SEQ ID NO: 23443 - protein, 173 aa, synthetic construct; identical to SEQ ID NO: 22135

SEQ ID NO: 23444 - protein, 172 aa, synthetic construct; identical to SEQ ID NO: 22136

SEQ ID NO: 23445 - protein, 171 aa, synthetic construct; identical to SEQ ID NO: 22137

SEQ ID NO: 23446 - protein, 170 aa, synthetic construct; identical to SEQ ID NO: 22138

SEQ ID NO: 23447 - protein, 169 aa, synthetic construct; identical to SEQ ID NO: 22139

SEQ ID NO: 23448 - protein, 168 aa, synthetic construct; identical to SEQ ID NO: 22140

SEQ ID NO: 23449 - protein, 167 aa, synthetic construct; identical to SEQ ID NO: 22141

SEQ ID NO: 23450 - protein, 166 aa, synthetic construct; identical to SEQ ID NO: 22142

SEQ ID NO: 23451 - protein, 165 aa, synthetic construct; identical to SEQ ID NO: 22143

SEQ ID NO: 23452 - protein, 164 aa, synthetic construct; identical to SEQ ID NO: 22144

SEQ ID NO: 23453 - protein, 163 aa, synthetic construct; identical to SEQ ID NO: 22145

SEQ ID NO: 23454 - protein, 162 aa, synthetic construct; identical to SEQ ID NO: 22146

SEQ ID NO: 23455 - protein, 161 aa, synthetic construct; identical to SEQ ID NO: 22147

SEQ ID NO: 23456 - protein, 160 aa, synthetic construct; identical to SEQ ID NO: 22148

SEQ ID NO: 23457 - protein, 159 aa, synthetic construct; identical to SEQ ID NO: 22149

SEQ ID NO: 23458 - protein, 158 aa, synthetic construct; identical to SEQ ID NO: 22150

SEQ ID NO: 23459 - protein, 157 aa, synthetic construct; identical to SEQ ID NO: 22151

SEQ ID NO: 23460 - protein, 156 aa, synthetic construct; identical to SEQ ID NO: 22152

SEQ ID NO: 23461 - protein, 155 aa, synthetic construct; identical to SEQ ID NO: 22153

SEQ ID NO: 23462 - protein, 154 aa, synthetic construct; identical to SEQ ID NO: 22154

SEQ ID NO: 23463 - protein, 153 aa, synthetic construct; identical to SEQ ID NO: 22155

SEQ ID NO: 23464 - protein, 148 aa, synthetic construct; identical to SEQ ID NO: 22156

SEQ ID NO: 23465 - protein, 143 aa, synthetic construct; identical to SEQ ID NO: 22157

SEQ ID NO: 23466 - protein, 8 aa, synthetic construct
GGGGGGGG

SEQ ID NO: 23467 - protein, 123 aa, synthetic construct; identical to SEQ ID NO: 22383

SEQ ID NO: 23468 - protein, 121 aa, synthetic construct; identical to SEQ ID NO: 22384

SEQ ID NO: 23469 - protein, 131 aa, synthetic construct; identical to SEQ ID NO: 22385

SEQ ID NO: 23470 - protein, 139 aa, synthetic construct; identical to SEQ ID NO: 22386

SEQ ID NO: 23471 - protein, 137 aa, synthetic construct; identical to SEQ ID NO: 22387

SEQ ID NO: 23472 - protein, 129 aa, synthetic construct; identical to SEQ ID NO: 22388

SEQ ID NO: 23473 - protein, 137 aa, synthetic construct; identical to SEQ ID NO: 22387

SEQ ID NO: 23474 - protein, 123 aa, synthetic construct; identical to SEQ ID NO: 22390

SEQ ID NO: 23475 - protein, 138 aa, synthetic construct; identical to SEQ ID NO: 22391

SEQ ID NO: 23476 - protein, 131 aa, synthetic construct; identical to SEQ ID NO: 22392

SEQ ID NO: 23477 - protein, 133 aa, synthetic construct; identical to SEQ ID NO: 22393

SEQ ID NO: 23478 - protein, 131 aa, synthetic construct; identical to SEQ ID NO: 22394

SEQ ID NO: 23479 - protein, 141 aa, synthetic construct; identical to SEQ ID NO: 22395

SEQ ID NO: 23480 - protein, 149 aa, synthetic construct; identical to SEQ ID NO: 22396

SEQ ID NO: 23481 - protein, 147 aa, synthetic construct; identical to SEQ ID NO: 22397

SEQ ID NO: 23482 - protein, 139 aa, synthetic construct; identical to SEQ ID NO: 22398

SEQ ID NO: 23483 - protein, 147 aa, synthetic construct; identical to SEQ ID NO: 22397

SEQ ID NO: 23484 - protein, 133 aa, synthetic construct; identical to SEQ ID NO: 22400

SEQ ID NO: 23485 - protein, 148 aa, synthetic construct; identical to SEQ ID NO: 22401

SEQ ID NO: 23486 - protein, 141 aa, synthetic construct; identical to SEQ ID NO: 22402

SEQ ID NO: 23487 - protein, 137 aa, synthetic construct; identical to SEQ ID NO: 22403

SEQ ID NO: 23488 - protein, 135 aa, synthetic construct; identical to SEQ ID NO: 22404

SEQ ID NO: 23489 - protein, 145 aa, synthetic construct; identical to SEQ ID NO: 22405

SEQ ID NO: 23490 - protein, 153 aa, synthetic construct; identical to SEQ ID NO: 22406

SEQ ID NO: 23491 - protein, 151 aa, synthetic construct; identical to SEQ ID NO: 22407

SEQ ID NO: 23492 - protein, 143 aa, synthetic construct; identical to SEQ ID NO: 22408

SEQ ID NO: 23493 - protein, 151 aa, synthetic construct; identical to SEQ ID NO: 22407

SEQ ID NO: 23494 - protein, 137 aa, synthetic construct; identical to SEQ ID NO: 22410

SEQ ID NO: 23495 - protein, 152 aa, synthetic construct; identical to SEQ ID NO: 22411

SEQ ID NO: 23496 - protein, 145 aa, synthetic construct; identical to SEQ ID NO: 22412

SEQ ID NO: 23497 - protein, 124 aa, synthetic construct; identical to SEQ ID NO: 22413

SEQ ID NO: 23498 - protein, 122 aa, synthetic construct; identical to SEQ ID NO: 22414

SEQ ID NO: 23499 - protein, 132 aa, synthetic construct; identical to SEQ ID NO: 22415

SEQ ID NO: 23500 - protein, 140 aa, synthetic construct; identical to SEQ ID NO: 22416

SEQ ID NO: 23501 - protein, 138 aa, synthetic construct; identical to SEQ ID NO: 22417

SEQ ID NO: 23502 - protein, 130 aa, synthetic construct; identical to SEQ ID NO: 22418

SEQ ID NO: 23503 - protein, 138 aa, synthetic construct; identical to SEQ ID NO: 22417

SEQ ID NO: 23504 - protein, 124 aa, synthetic construct; identical to SEQ ID NO: 22420

SEQ ID NO: 23505 - protein, 139 aa, synthetic construct; identical to SEQ ID NO: 22421

SEQ ID NO: 23506 - protein, 132 aa, synthetic construct; identical to SEQ ID NO: 22422

SEQ ID NO: 23507 - protein, 137 aa, synthetic construct; identical to SEQ ID NO: 22403

SEQ ID NO: 23508 - protein, 135 aa, synthetic construct; identical to SEQ ID NO: 22404

SEQ ID NO: 23509 - protein, 145 aa, synthetic construct; identical to SEQ ID NO: 22405

SEQ ID NO: 23510 - protein, 153 aa, synthetic construct; identical to SEQ ID NO: 22406

SEQ ID NO: 23511 - protein, 151 aa, synthetic construct; identical to SEQ ID NO: 22407

SEQ ID NO: 23512 - protein, 143 aa, synthetic construct; identical to SEQ ID NO: 22408

SEQ ID NO: 23513 - protein, 151 aa, synthetic construct; identical to SEQ ID NO: 22407

SEQ ID NO: 23514 - protein, 137 aa, synthetic construct; identical to SEQ ID NO: 22410

SEQ ID NO: 23515 - protein, 152 aa, synthetic construct; identical to SEQ ID NO: 22411

SEQ ID NO: 23516 - protein, 145 aa, synthetic construct; identical to SEQ ID NO: 22412

SEQ ID NO: 23517 - protein, 8 aa, synthetic construct
GGGGGGGG

SEQ ID NO: 23518 - protein, 177 aa, synthetic construct; identical to SEQ ID NO: 22433

SEQ ID NO: 23519 - protein, 167 aa, synthetic construct; identical to SEQ ID NO: 22434

SEQ ID NO: 23520 - protein, 176 aa, synthetic construct; identical to SEQ ID NO: 22435

SEQ ID NO: 23521 - protein, 186 aa, synthetic construct; identical to SEQ ID NO: 22436

SEQ ID NO: 23522 - protein, 184 aa, synthetic construct; identical to SEQ ID NO: 22437

SEQ ID NO: 23523 - protein, 176 aa, synthetic construct; identical to SEQ ID NO: 22438

SEQ ID NO: 23524 - protein, 184 aa, synthetic construct; identical to SEQ ID NO: 22437

SEQ ID NO: 23525 - protein, 170 aa, synthetic construct; identical to SEQ ID NO: 22440

SEQ ID NO: 23526 - protein, 185 aa, synthetic construct; identical to SEQ ID NO: 22441

SEQ ID NO: 23527 - protein, 178 aa, synthetic construct; identical to SEQ ID NO: 22442

SEQ ID NO: 23528 - protein, 179 aa, synthetic construct; identical to SEQ ID NO: 22443

SEQ ID NO: 23529 - protein, 169 aa, synthetic construct; identical to SEQ ID NO: 22444

SEQ ID NO: 23530 - protein, 178 aa, synthetic construct; identical to SEQ ID NO: 22445

SEQ ID NO: 23531 - protein, 188 aa, synthetic construct; identical to SEQ ID NO: 22446

SEQ ID NO: 23532 - protein, 186 aa, synthetic construct; identical to SEQ ID NO: 22447

SEQ ID NO: 23533 - protein, 178 aa, synthetic construct; identical to SEQ ID NO: 22448

SEQ ID NO: 23534 - protein, 186 aa, synthetic construct; identical to SEQ ID NO: 22447

SEQ ID NO: 23535 - protein, 172 aa, synthetic construct; identical to SEQ ID NO: 22450

SEQ ID NO: 23536 - protein, 187 aa, synthetic construct; identical to SEQ ID NO: 22451

SEQ ID NO: 23537 - protein, 180 aa, synthetic construct; identical to SEQ ID NO: 22452

SEQ ID NO: 23538 - protein, 182 aa, synthetic construct; identical to SEQ ID NO: 22453

SEQ ID NO: 23539 - protein, 172 aa, synthetic construct; identical to SEQ ID NO: 22454

SEQ ID NO: 23540 - protein, 181 aa, synthetic construct; identical to SEQ ID NO: 22455

SEQ ID NO: 23541 - protein, 191 aa, synthetic construct; identical to SEQ ID NO: 22456

SEQ ID NO: 23542 - protein, 189 aa, synthetic construct; identical to SEQ ID NO: 22457

SEQ ID NO: 23543 - protein, 181 aa, synthetic construct; identical to SEQ ID NO: 22458

SEQ ID NO: 23544 - protein, 189 aa, synthetic construct; identical to SEQ ID NO: 22457

SEQ ID NO: 23545 - protein, 175 aa, synthetic construct; identical to SEQ ID NO: 22460

SEQ ID NO: 23546 - protein, 190 aa, synthetic construct; identical to SEQ ID NO: 22461

SEQ ID NO: 23547 - protein, 183 aa, synthetic construct; identical to SEQ ID NO: 22462

SEQ ID NO: 23548 - protein, 169 aa, synthetic construct; identical to SEQ ID NO: 22463

SEQ ID NO: 23549 - protein, 159 aa, synthetic construct; identical to SEQ ID NO: 22464

SEQ ID NO: 23550 - protein, 168 aa, synthetic construct; identical to SEQ ID NO: 22465

SEQ ID NO: 23551 - protein, 178 aa, synthetic construct; identical to SEQ ID NO: 22466

SEQ ID NO: 23552 - protein, 176 aa, synthetic construct; identical to SEQ ID NO: 22467

SEQ ID NO: 23553 - protein, 168 aa, synthetic construct; identical to SEQ ID NO: 22468

SEQ ID NO: 23554 - protein, 176 aa, synthetic construct; identical to SEQ ID NO: 22467

SEQ ID NO: 23555 - protein, 162 aa, synthetic construct; identical to SEQ ID NO: 22470

SEQ ID NO: 23556 - protein, 177 aa, synthetic construct; identical to SEQ ID NO: 22471

SEQ ID NO: 23557 - protein, 170 aa, synthetic construct; identical to SEQ ID NO: 22472

SEQ ID NO: 23558 - protein, 177 aa, synthetic construct; identical to SEQ ID NO: 22433

SEQ ID NO: 23559 - protein, 167 aa, synthetic construct; identical to SEQ ID NO: 22434

SEQ ID NO: 23560 - protein, 176 aa, synthetic construct; identical to SEQ ID NO: 22435

SEQ ID NO: 23561 - protein, 186 aa, synthetic construct; identical to SEQ ID NO: 22436

SEQ ID NO: 23562 - protein, 184 aa, synthetic construct; identical to SEQ ID NO: 22437

SEQ ID NO: 23563 - protein, 176 aa, synthetic construct; identical to SEQ ID NO: 22438

SEQ ID NO: 23564 - protein, 184 aa, synthetic construct; identical to SEQ ID NO: 22437

SEQ ID NO: 23565 - protein, 170 aa, synthetic construct; identical to SEQ ID NO: 22440

SEQ ID NO: 23566 - protein, 185 aa, synthetic construct; identical to SEQ ID NO: 22441

SEQ ID NO: 23567 - protein, 178 aa, synthetic construct; identical to SEQ ID NO: 22442

SEQ ID NO: 23568 - protein, 170 aa, synthetic construct; identical to SEQ ID NO: 22268

SEQ ID NO: 23569 - protein, 160 aa, synthetic construct; identical to SEQ ID NO: 22269

SEQ ID NO: 23570 - protein, 169 aa, synthetic construct; identical to SEQ ID NO: 22270

SEQ ID NO: 23571 - protein, 179 aa, synthetic construct; identical to SEQ ID NO: 22271

SEQ ID NO: 23572 - protein, 177 aa, synthetic construct; identical to SEQ ID NO: 22272

SEQ ID NO: 23573 - protein, 169 aa, synthetic construct; identical to SEQ ID NO: 22273

SEQ ID NO: 23574 - protein, 177 aa, synthetic construct; identical to SEQ ID NO: 22272

SEQ ID NO: 23575 - protein, 163 aa, synthetic construct; identical to SEQ ID NO: 22275

SEQ ID NO: 23576 - protein, 178 aa, synthetic construct; identical to SEQ ID NO: 22276

SEQ ID NO: 23577 - protein, 171 aa, synthetic construct; identical to SEQ ID NO: 22277

SEQ ID NO: 23578 - protein, 8 aa, synthetic construct
GGGGGGGG

SEQ ID NO: 23579 - protein, 159 aa, synthetic construct; identical to SEQ ID NO: 22493

SEQ ID NO: 23580 - protein, 149 aa, synthetic construct; identical to SEQ ID NO: 22494

SEQ ID NO: 23581 - protein, 158 aa, synthetic construct; identical to SEQ ID NO: 22495

SEQ ID NO: 23582 - protein, 152 aa, synthetic construct; identical to SEQ ID NO: 22496

SEQ ID NO: 23583 - protein, 150 aa, synthetic construct; identical to SEQ ID NO: 22497

SEQ ID NO: 23584 - protein, 160 aa, synthetic construct; identical to SEQ ID NO: 22498

SEQ ID NO: 23585 - protein, 167 aa, synthetic construct; identical to SEQ ID NO: 22499

SEQ ID NO: 23586 - protein, 160 aa, synthetic construct; identical to SEQ ID NO: 22500

SEQ ID NO: 23587 - protein, 161 aa, synthetic construct; identical to SEQ ID NO: 22501

SEQ ID NO: 23588 - protein, 151 aa, synthetic construct; identical to SEQ ID NO: 22502

SEQ ID NO: 23589 - protein, 160 aa, synthetic construct; identical to SEQ ID NO: 22503

SEQ ID NO: 23590 - protein, 154 aa, synthetic construct; identical to SEQ ID NO: 22504

SEQ ID NO: 23591 - protein, 152 aa, synthetic construct; identical to SEQ ID NO: 22505

SEQ ID NO: 23592 - protein, 162 aa, synthetic construct; identical to SEQ ID NO: 22506

SEQ ID NO: 23593 - protein, 169 aa, synthetic construct; identical to SEQ ID NO: 22507

SEQ ID NO: 23594 - protein, 162 aa, synthetic construct; identical to SEQ ID NO: 22508

SEQ ID NO: 23595 - protein, 169 aa, synthetic construct; identical to SEQ ID NO: 22509

SEQ ID NO: 23596 - protein, 159 aa, synthetic construct; identical to SEQ ID NO: 22510

SEQ ID NO: 23597 - protein, 168 aa, synthetic construct; identical to SEQ ID NO: 22511

SEQ ID NO: 23598 - protein, 162 aa, synthetic construct; identical to SEQ ID NO: 22512

SEQ ID NO: 23599 - protein, 160 aa, synthetic construct; identical to SEQ ID NO: 22513

SEQ ID NO: 23600 - protein, 170 aa, synthetic construct; identical to SEQ ID NO: 22514

SEQ ID NO: 23601 - protein, 177 aa, synthetic construct; identical to SEQ ID NO: 22515

SEQ ID NO: 23602 - protein, 170 aa, synthetic construct; identical to SEQ ID NO: 22516

SEQ ID NO: 23603 - protein, 174 aa, synthetic construct; identical to SEQ ID NO: 22517

SEQ ID NO: 23604 - protein, 164 aa, synthetic construct; identical to SEQ ID NO: 22518

SEQ ID NO: 23605 - protein, 173 aa, synthetic construct; identical to SEQ ID NO: 22519

SEQ ID NO: 23606 - protein, 167 aa, synthetic construct; identical to SEQ ID NO: 22520

SEQ ID NO: 23607 - protein, 165 aa, synthetic construct; identical to SEQ ID NO: 22521

SEQ ID NO: 23608 - protein, 175 aa, synthetic construct; identical to SEQ ID NO: 22522

SEQ ID NO: 23609 - protein, 182 aa, synthetic construct; identical to SEQ ID NO: 22523

SEQ ID NO: 23610 - protein, 175 aa, synthetic construct; identical to SEQ ID NO: 22524

SEQ ID NO: 23611 - protein, 169 aa, synthetic construct; identical to SEQ ID NO: 22509

SEQ ID NO: 23612 - protein, 159 aa, synthetic construct; identical to SEQ ID NO: 22510

SEQ ID NO: 23613 - protein, 168 aa, synthetic construct; identical to SEQ ID NO: 22511

SEQ ID NO: 23614 - protein, 162 aa, synthetic construct; identical to SEQ ID NO: 22512

SEQ ID NO: 23615 - protein, 160 aa, synthetic construct; identical to SEQ ID NO: 22513

SEQ ID NO: 23616 - protein, 170 aa, synthetic construct; identical to SEQ ID NO: 22514

SEQ ID NO: 23617 - protein, 177 aa, synthetic construct; identical to SEQ ID NO: 22515

SEQ ID NO: 23618 - protein, 170 aa, synthetic construct; identical to SEQ ID NO: 22516

SEQ ID NO: 23619 - protein, 10 aa, synthetic construct
GGGGGGGGGG

SEQ ID NO: 23620 - protein, 143 aa, synthetic construct; identical to SEQ ID NO: 22533

SEQ ID NO: 23621 - protein, 133 aa, synthetic construct; identical to SEQ ID NO: 22534

SEQ ID NO: 23622 - protein, 142 aa, synthetic construct; identical to SEQ ID NO: 22535

SEQ ID NO: 23623 - protein, 136 aa, synthetic construct; identical to SEQ ID NO: 22536

SEQ ID NO: 23624 - protein, 134 aa, synthetic construct; identical to SEQ ID NO: 22537

SEQ ID NO: 23625 - protein, 144 aa, synthetic construct; identical to SEQ ID NO: 22538

SEQ ID NO: 23626 - protein, 152 aa, synthetic construct; identical to SEQ ID NO: 22539

SEQ ID NO: 23627 - protein, 150 aa, synthetic construct; identical to SEQ ID NO: 22540

SEQ ID NO: 23628 - protein, 142 aa, synthetic construct; identical to SEQ ID NO: 22541

SEQ ID NO: 23629 - protein, 151 aa, synthetic construct; identical to SEQ ID NO: 18816

SEQ ID NO: 23630 - protein, 144 aa, synthetic construct; identical to SEQ ID NO: 22543

SEQ ID NO: 23631 - protein, 150 aa, synthetic construct; identical to SEQ ID NO: 22544

SEQ ID NO: 23632 - protein, 140 aa, synthetic construct; identical to SEQ ID NO: 22545

SEQ ID NO: 23633 - protein, 149 aa, synthetic construct; identical to SEQ ID NO: 22546

SEQ ID NO: 23634 - protein, 143 aa, synthetic construct; identical to SEQ ID NO: 22547

SEQ ID NO: 23635 - protein, 141 aa, synthetic construct; identical to SEQ ID NO: 22548

SEQ ID NO: 23636 - protein, 151 aa, synthetic construct; identical to SEQ ID NO: 22549

SEQ ID NO: 23637 - protein, 159 aa, synthetic construct; identical to SEQ ID NO: 22550

SEQ ID NO: 23638 - protein, 157 aa, synthetic construct; identical to SEQ ID NO: 22551

SEQ ID NO: 23639 - protein, 149 aa, synthetic construct; identical to SEQ ID NO: 22552

SEQ ID NO: 23640 - protein, 157 aa, synthetic construct; identical to SEQ ID NO: 22551

SEQ ID NO: 23641 - protein, 143 aa, synthetic construct; identical to SEQ ID NO: 22554

SEQ ID NO: 23642 - protein, 143 aa, synthetic construct; identical to SEQ ID NO: 22533

SEQ ID NO: 23643 - protein, 133 aa, synthetic construct; identical to SEQ ID NO: 22534

SEQ ID NO: 23644 - protein, 142 aa, synthetic construct; identical to SEQ ID NO: 22535

SEQ ID NO: 23645 - protein, 136 aa, synthetic construct; identical to SEQ ID NO: 22536

SEQ ID NO: 23646 - protein, 134 aa, synthetic construct; identical to SEQ ID NO: 22537

SEQ ID NO: 23647 - protein, 144 aa, synthetic construct; identical to SEQ ID NO: 22538

SEQ ID NO: 23648 - protein, 152 aa, synthetic construct; identical to SEQ ID NO: 22539

SEQ ID NO: 23649 - protein, 150 aa, synthetic construct; identical to SEQ ID NO: 22540

SEQ ID NO: 23650 - protein, 142 aa, synthetic construct; identical to SEQ ID NO: 22541

SEQ ID NO: 23651 - protein, 150 aa, synthetic construct; identical to SEQ ID NO: 22540

SEQ ID NO: 23652 - protein, 136 aa, synthetic construct; identical to SEQ ID NO: 22565

SEQ ID NO: 23653 - protein, 150 aa, synthetic construct; identical to SEQ ID NO: 22544

SEQ ID NO: 23654 - protein, 140 aa, synthetic construct; identical to SEQ ID NO: 22545

SEQ ID NO: 23655 - protein, 149 aa, synthetic construct; identical to SEQ ID NO: 22546

SEQ ID NO: 23656 - protein, 143 aa, synthetic construct; identical to SEQ ID NO: 22547

SEQ ID NO: 23657 - protein, 141 aa, synthetic construct; identical to SEQ ID NO: 22548

SEQ ID NO: 23658 - protein, 151 aa, synthetic construct; identical to SEQ ID NO: 22549

SEQ ID NO: 23659 - protein, 159 aa, synthetic construct; identical to SEQ ID NO: 22550

SEQ ID NO: 23660 - protein, 157 aa, synthetic construct; identical to SEQ ID NO: 22551

SEQ ID NO: 23661 - protein, 149 aa, synthetic construct; identical to SEQ ID NO: 22552

SEQ ID NO: 23662 - protein, 157 aa, synthetic construct; identical to SEQ ID NO: 22551

SEQ ID NO: 23663 - protein, 143 aa, synthetic construct; identical to SEQ ID NO: 22554

SEQ ID NO: 23664 - protein, 182 aa, synthetic construct; identical to SEQ ID NO: 22300

SEQ ID NO: 23665 - protein, 174 aa, synthetic construct; identical to SEQ ID NO: 22292

SEQ ID NO: 23666 - protein, 187 aa, synthetic construct; identical to SEQ ID NO: 22316

SEQ ID NO: 23667 - protein, 152 aa, synthetic construct; identical to SEQ ID NO: 22346

SEQ ID NO: 23668 - protein, 138 aa, synthetic construct; identical to SEQ ID NO: 22371

SEQ ID NO: 23669 - protein, 140 aa, synthetic construct
IQNPDPAVYQLRDSKSSDKSVCLFTDFDSQTNVSQSKDSDVYITDKCVLDMRSMDFKSNSAVAWSNKSDFACANAFNNSIIPEDTFFPSPESSCDVKLVEKSFETDTNLNFQNLSVIGLRMLFAKTVAVNFLLTAKLFFL

SEQ ID NO: 23670 - protein, 140 aa, synthetic construct
IQNPDPAVYQLRDSKSSDKSVCLFTDFDSQTNVSQSKDSDVYITDKCVLDMRSMDFKSNSAVAWSNKSDFACANAFNNSIIPEDTFFPSPESSCDVKLVEKSFETDTNLNFQNLSVLGLRMLFAKTVAVNFLLTAKLFFL

SEQ ID NO: 23671 - protein, 140 aa, synthetic construct; identical to SEQ ID NO: 23670

SEQ ID NO: 23672 - protein, 153 aa, synthetic construct
SQPHTKPSVFVMKNGTNVACLVKEFYPKDIRINLVSSKKITEFDPAIVISPSGKYNAVKLGKYEDSNSVTCSVQHDNKTVHSTDFEVKTDSTDHVKPKETENTKQPSKSCHKPKAIVHTEKVNMMSLTVLGFRILLLKVAGFNLLMTLRLWSS

SEQ ID NO: 23673 - protein, 153 aa, synthetic construct
SQPHTKPSVFVMKNGTNVACLVKEFYPKDIRINLVSSKKITEFDPAIVISPSGKYNAVKLGKYEDSNSVTCSVQHDNKTVHSTDFEVKTDSTDHVKPKETENTKQPSKSCHKPKAIVHTEKVNMMSLTVIGFRILLLKVAGFNLLMTLRLWSS

SEQ ID NO: 23674 - protein, 180 aa, synthetic construct
EDLKNVFPPEVAVFEPSEAEISHTQKATLVCLATGFYPDHVELSWWVNGKEVHSGVCTDPQPLKEQPALNDSRYCLSSRLRVSATFWQNPRNHFRCQVQFYGLSENDEWTQDRAKPVTQIVSAEAWGRADCGFTSESYQQGVLSATILYLLLLLKSVVYFAIITCCLLRRTAFCCNGEKS

SEQ ID NO: 23675 - protein, 180 aa, synthetic construct
EDLKNVFPPEVAVFEPSEAEISHTQKATLVCLATGFYPDHVELSWWVNGKEVHSGVCTDPQPLKEQPALNDSRYCLSSRLRVSATFWQNPRNHFRCQVQFYGLSENDEWTQDRAKPVTQIVSAEAWGRADCGFTSESYQQGVLSAYYMYLLLLLKSVVYFAIITCCLLRRTAFCCNGEKS

SEQ ID NO: 23676 - protein, 172 aa, synthetic construct
DKQLDADVSPKPTIFLPSIAETKLQKAGTYLCLLEKFFPDVIKIHWQEKKSNTILGSQEGNTMKTNDTYMKFSWLTVPEKSLDKEHRCIVRHENNKNGVDQEIIFPPIKTDVITMDPKDNCSKDANDTLLLQLTNTSAYYMYEILLGKATLYAVLVSALVLMAMVKRKDSRG

SEQ ID NO: 23677 - protein, 172 aa, synthetic construct
DKQLDADVSPKPTIFLPSIAETKLQKAGTYLCLLEKFFPDVIKIHWQEKKSNTILGSQEGNTMKTNDTYMKFSWLTVPEKSLDKEHRCIVRHENNKNGVDQEIIFPPIKTDVITMDPKDNCSKDANDTLLLQLTNTSATILYEILLGKATLYAVLVSALVLMAMVKRKDSRG

SEQ ID NO: 23678 - protein, 179 aa, synthetic construct
EDLKNVFPPEVAVFEPSEAEISHTQKATLVCLATGFYPDHVELSWWVNGKEVHSGVCTDPQPLKEQPALNDSRYCLSSRLRVSATFWQNPRNHFRCQVQFYGLSENDEWTQDRAKPVTQIVSAEAWGRADSGFTSESYQQGVLSATILYEILLGKATLYAVLVSALVLMAMVKRKDSRG

SEQ ID NO: 23679 - protein, 140 aa, synthetic construct
IQNPDPAVYQLRDSKSSDKSVCLFTDFDSQTNVSQSKDSDVYITDKCVLDMRSMDFKSNSAVAWSNKSDFACANAFNNSIIPEDTFFPSPESSSDVKLVEKSFETDTNLNFQNLSVIGFRILLLKVAGFNLLMTLRLWSS

SEQ ID NO: 23680 - protein, 179 aa, synthetic construct
EDLKNVFPPEVAVFEPSEAEISHTQKATLVCLATGFYPDHVELSWWVNGKEVHSGVCTDPQPLKEQPALNDSRYCLSSRLRVSATFWQNPRNHFRCQVQFYGLSENDEWTQDRAKPVTQIVSAEAWGRADGGFTSESYQQGVLSATILYEILLGKATLYAVLVSALVLMAMVKRKDSRG

SEQ ID NO: 23681 - protein, 140 aa, synthetic construct
IQNPDPAVYQLRDSKSSDKSVCLFTDFDSQTNVSQSKDSDVYITDKCVLDMRSMDFKSNSAVAWSNKSDFACANAFNNSIIPEDTFFPSPESSRDVKLVEKSFETDTNLNFQNLSVIGFRILLLKVAGFNLLMTLRLWSS

SEQ ID NO: 23682 - protein, 845 aa, synthetic construct
MALPVTALLLPLALLLHAARPEPEVTQTPSHQVTQMGQEVILRCVPISNHLYFYWYRQILGQKVEFLVSFYNNEISEKSEIFDDQFSVERPDGSNFTLKIRSTKLEDSAMYFCASSRLAGGMDEQFFGPGTRLTVLEGQPKANPTVTLFPPSSEELQANKATLVCLISDFYPGAVTVAWKADGSPVKAGVETTKPSKQSNNKYAASSYLSLTPEQWKSHRSYSCQVTHEGSTVEKTVAPTECSPIKTDVITMDPKDNCSKDANDTLLLQLTNTSAYYMYLLLLLKSVVYFAIITCCLLRRTAFCCNGEKSRAKRSGSGATNFSLLKQAGDVEENPGPTSMDWIWRILFLVGAATGAHSFEILNVEQSPQSLHVQEGDSTNFTCSFPSSNFYALHWYRWETAKSPEALFVMTLNGDEKKKGRISATLNTKEGYSYLYIKGSQPEDSATYLCAFKAAGNKLTFGGGTRVLVKPNIQNPDPAVYQLRDSKSSDKSVCLFTDFDSQTNVSQSKDSDVYITDKCVLDMRSMDFKSNSAVAWSNKSDFACANAFNNSIIPEDTFFPSPESSCDVKLVEKSFETDTNLNFQNLSVIGFRILLLKVAGFNLLMTLRLWSSRAKRSGSGVKQTLNFDLLKLAGDVESNPGPSRGHMTEYKPTVRLATRDDVPRAVRTLAAAFADYPATRHTVDPDRHIERVTELQELFLTRVGLDIGKVWVADDGAAVAVWTTPESVEAGAVFAEIGPRMAELSGSRLAAQQQMEGLLAPHRPKEPAWFLATVGVSPDHQGKGLGSAVVLPGVEAAERAGVPAFLETSAPRNLPFYERLGFTVTADVEVPEGPRTWCMTRKPGA

SEQ ID NO: 23683 - protein, 628 aa, synthetic construct
MALPVTALLLPLALLLHAARPDIQMTQSPSSLSASVGDRVTITCKASDHINNWLAWYQQKPGQAPKLLIYGATTLETGVPSRFSGSGSGTDYTLTISSLQPEDFATYYCQQSWNTPWTFGQGTKLEIKRLDKQLDADVSPKPTIFLPSIAETKLQKAGTYLCLLEKFFPDVIKIHWQEKKSNTILGSQEGNTMKTNDTYMKFSWLTVPEKSLDKEHRCIVRHENNKNGVDQEIIFPPIKTDVITMDPKDNCSKDANDTLLLQLTNTSAYYMYEILLGKATLYAVLVSALVLMAMVKRKDSRGRAKRSGSGATNFSLLKQAGDVEENPGPTSMDWIWRILFLVGAATGAHSFEQVQLQQPGAELVKPGASVKMSCKASGYAFSSYWINWMKQKPGQGLEWIGQIYPGDGDTNYNGKFKGRATLTADTSSSTAYMQLSSLTSEDSAVYFCARSITTVVGCAMDYWGQGTSVTVSSTRSQPHTKPSVFVMKNGTNVACLVKEFYPKDIRINLVSSKKITEFDPAIVISPSGKYNAVKLGKYEDSNSVTCSVQHDNKTVHSTDFEVKTDSTDHVKPKETENTKQPSKSCHKPKAIVHTEKVNMMSLTVLGFRILLLKVAGFNLLMTLRLWSS

SEQ ID NO: 23684 - protein, 625 aa, synthetic construct
MALPVTALLLPLALLLHAARPDIQMTQTTSSLSASLGDRVTISCRASQDISKYLNWYQQKPDGTVKLLIYHTSRLHSGVPSRFSGSGSGTDYSLTISNLEQEDIATYFCQQGNTLPYTFGGGTKLEITLDKQLDADVSPKPTIFLPSIAETKLQKAGTYLCLLEKFFPDVIKIHWQEKKSNTILGSQEGNTMKTNDTYMKFSWLTVPEKSLDKEHRCIVRHENNKNGVDQEIIFPPIKTDVITMDPKDNCSKDANDTLLLQLTNTSAYYMYEILLGKATLYAVLVSALVLMAMVKRKDSRGRAKRSGSGATNFSLLKQAGDVEENPGPTSMDWIWRILFLVGAATGAHSFEVKLQESGPGLVAPSQSLSVTCTVSGVSLPDYGVSWIRQPPRKGLEWLGVIWGSETTYYNSALKSRLTIIKDNSKSQVFLKMNSLQTDDTAIYYCAKHYYYGGSYAMDYWGQGTSVTVSSTRSQPHTKPSVFVMKNGTNVACLVKEFYPKDIRINLVSSKKITEFDPAIVISPSGKYNAVKLGKYEDSNSVTCSVQHDNKTVHSTDFEVKTDSTDHVKPKETENTKQPSKSCHKPKAIVHTEKVNMMSLTVLGFRILLLKVAGFNLLMTLRLWSS

SEQ ID NO: 23685 - protein, 626 aa, synthetic construct
MALPVTALLLPLALLLHAARPEIVMTQSPATLSLSPGERATLSCRASQDISKYLNWYQQKPGQAPRLLIYHTSRLHSGIPARFSGSGSGTDYTLTISSLQPEDFAVYFCQQGNTLPYTFGQGTKLEIKLDKQLDADVSPKPTIFLPSIAETKLQKAGTYLCLLEKFFPDVIKIHWQEKKSNTILGSQEGNTMKTNDTYMKFSWLTVPEKSLDKEHRCIVRHENNKNGVDQEIIFPPIKTDVITMDPKDNCSKDANDTLLLQLTNTSAYYMYEILLGKATLYAVLVSALVLMAMVKRKDSRGRAKRSGSGATNFSLLKQAGDVEENPGPTSMDWIWRILFLVGAATGAHSFEQVQLQESGPGLVKPSETLSLTCTVSGVSLPDYGVSWIRQPPGKGLEWIGVIWGSETTYYNSSLKSRVTISKDNSKNQVSLKLSSVTAADTAVYYCAKHYYYGGSYAMDYWGQGTLVTVSSTRSQPHTKPSVFVMKNGTNVACLVKEFYPKDIRINLVSSKKITEFDPAIVISPSGKYNAVKLGKYEDSNSVTCSVQHDNKTVHSTDFEVKTDSTDHVKPKETENTKQPSKSCHKPKAIVHTEKVNMMSLTVLGFRILLLKVAGFNLLMTLRLWSS

SEQ ID NO: 23686 - protein, 627 aa, synthetic construct
MALPVTALLLPLALLLHAARPDEIVLTQSPATLSLSPGERATLSCSASSSVSYMHWYQQKPGQAPRLLIYDTSKLASGIPARFSGSGSGTDFTLTISSLEPEDVAVYYCFQGSVYPFTFGQGTKLEIKRLDKQLDADVSPKPTIFLPSIAETKLQKAGTYLCLLEKFFPDVIKIHWQEKKSNTILGSQEGNTMKTNDTYMKFSWLTVPEKSLDKEHRCIVRHENNKNGVDQEIIFPPIKTDVITMDPKDNCSKDANDTLLLQLTNTSAYYMYEILLGKATLYAVLVSALVLMAMVKRKDSRGRAKRSGSGATNFSLLKQAGDVEENPGPTSMDWIWRILFLVGAATGAHSFEQVQLQESGPGLVKPSQTLSLTCTVSGGSISTSGMGVGWIRQHPGKGLEWIGHIWWDDDKRYNPALKSRVTISVDTSKNQFSLKLSSVTAADTAVYYCARMELWSYYFDYWGQGTLVTVSSTRSQPHTKPSVFVMKNGTNVACLVKEFYPKDIRINLVSSKKITEFDPAIVISPSGKYNAVKLGKYEDSNSVTCSVQHDNKTVHSTDFEVKTDSTDHVKPKETENTKQPSKSCHKPKAIVHTEKVNMMSLTVLGFRILLLKVAGFNLLMTLRLWSS

SEQ ID NO: 23687 - protein, 625 aa, synthetic construct
MALPVTALLLPLALLLHAARPDYIHVTQSPSSLSVSIGDRVTINCQTSQGVGSDLHWYQHKPGRAPKLLIHHASSVEDGVPSRFSGTGFHTSFNLTINDLQADDIGTYYCQVLQSFGRGSRLDTKLDKQLDADVSPKPTIFLPSIAETKLQKAGTYLCLLEKFFPDVIKIHWQEKKSNTILGSQEGNTMKTNDTYMKFSWLTVPEKSLDKEHRCIVRHENNKNGVDQEIIFPPIKTDVITMDPKDNCSKDANDTLLLQLTNTSAYYMYEILLGKATLYAVLVSALVLMAMVKRKDSRGRAKRSGSGATNFSLLKQAGDVEENPGPTSMDWIWRILFLVGAATGAHSFERAHLVQSGTAMKKPGASVRVSCQTSGYTFTAHILFWFRQAPGRGLEWVGWIKPQYGAVNFGGGFRDRVTLTRDVYREIAYMDIRGLKPDDTAVYYCARDRSYGDSSWALDAWGQGTTVVVSATRSQPHTKPSVFVMKNGTNVACLVKEFYPKDIRINLVSSKKITEFDPAIVISPSGKYNAVKLGKYEDSNSVTCSVQHDNKTVHSTDFEVKTDSTDHVKPKETENTKQPSKSCHKPKAIVHTEKVNMMSLTVLGFRILLLKVAGFNLLMTLRLWSS

SEQ ID NO: 23688 - protein, 635 aa, synthetic construct
MALPVTALLLPLALLLHAARPDVQMIQTPDSLAVSLGQRATISCRASESVDNYGISFMHWYQQKPGQSPKLLIYRASNLESGIPARFSGSGSRTDFTLTINPVETDDVATYYCQQNNKDPPTFGGGTKLEIKLDKQLDADVSPKPTIFLPSIAETKLQKAGTYLCLLEKFFPDVIKIHWQEKKSNTILGSQEGNTMKTNDTYMKFSWLTVPEKSLDKEHRCIVRHENNKNGVDQEIIFPPIKTDVITMDPKDNCSKDANDTLLLQLTNTSAYYMYEILLGKATLYAVLVSALVLMAMVKRKDSRGRAKRSGSGATNFSLLKQAGDVEENPGPTSMDWIWRILFLVGAATGAHSFEGGGGSQVQLQQSGAELVKPGASVKISCKASGYAFSSYWMNWVKQRPGKGLEWIGQIYPGDGDTTYNGKFKGKATLTADKSSSTVYMQLNSLTSEDSAVYFCVRYYYGSSGYFDYWGQGTTLTVSSTRSQPHTKPSVFVMKNGTNVACLVKEFYPKDIRINLVSSKKITEFDPAIVISPSGKYNAVKLGKYEDSNSVTCSVQHDNKTVHSTDFEVKTDSTDHVKPKETENTKQPSKSCHKPKAIVHTEKVNMMSLTVLGFRILLLKVAGFNLLMTLRLWSS

SEQ ID NO: 23689 - protein, 626 aa, synthetic construct
MALPVTALLLPLALLLHAARPDVQMIQTPSSLSASLGDRVTISCRASQDIGNYLNWYQQKPDGTVKLLIYYTSRLHSGVPSRFSGSGSGTEYSLTISNLEQEDIATYFCQQGSALPPTFGGGTKLEINLDKQLDADVSPKPTIFLPSIAETKLQKAGTYLCLLEKFFPDVIKIHWQEKKSNTILGSQEGNTMKTNDTYMKFSWLTVPEKSLDKEHRCIVRHENNKNGVDQEIIFPPIKTDVITMDPKDNCSKDANDTLLLQLTNTSAYYMYEILLGKATLYAVLVSALVLMAMVKRKDSRGRAKRSGSGATNFSLLKQAGDVEENPGPTSMDWIWRILFLVGAATGAHSFEALQLQQSGAELVRPGASVTLSCKASGYTFTDYEMHWVKQTPVHGLEWIGAIDPETGGTAYNQKFEGKAILTADKSSSTAYMELRSLTSEDSPVYYCARRRYYGSSSFDYWGQGTTLTVSSTRSQPHTKPSVFVMKNGTNVACLVKEFYPKDIRINLVSSKKITEFDPAIVISPSGKYNAVKLGKYEDSNSVTCSVQHDNKTVHSTDFEVKTDSTDHVKPKETENTKQPSKSCHKPKAIVHTEKVNMMSLTVLGFRILLLKVAGFNLLMTLRLWSS

SEQ ID NO: 23690 - protein, 622 aa, synthetic construct
MALPVTALLLPLALLLHAARPDIQMTQSPSSLSASVGDRVTITCKASDHINNWLAWYQQKPGQAPKLLIYGATTLETGVPSRFSGSGSGTDYTLTISSLQPEDFATYYCQQSWNTPWTFGQGTKLEIKRLEDLKNVFPPEVAVFEPSEAEISHTQKATLVCLATGFYPDHVELSWWVNGKEVHSGVCTDPQPLKEQPALNDSRYCLSSRLRVSATFWQNPRNHFRCQVQFYGLSENDEWTQDRAKPVTQIVSAEAWGRADSGFTSESYQQGVLSATILYEILLGKATLYAVLVSALVLMAMVKRKDSRGRAKRSGSGATNFSLLKQAGDVEENPGPTSMDWIWRILFLVGAATGAHSFEQVQLQQPGAELVKPGASVKMSCKASGYAFSSYWINWMKQKPGQGLEWIGQIYPGDGDTNYNGKFKGRATLTADTSSSTAYMQLSSLTSEDSAVYFCARSITTVVGCAMDYWGQGTSVTVSSTRIQNPDPAVYQLRDSKSSDKSVCLFTDFDSQTNVSQSKDSDVYITDKCVLDMRSMDFKSNSAVAWSNKSDFACANAFNNSIIPEDTFFPSPESSSDVKLVEKSFETDTNLNFQNLSVIGFRILLLKVAGFNLLMTLRLWSS

SEQ ID NO: 23691 - protein, 619 aa, synthetic construct
MALPVTALLLPLALLLHAARPDIQMTQTTSSLSASLGDRVTISCRASQDISKYLNWYQQKPDGTVKLLIYHTSRLHSGVPSRFSGSGSGTDYSLTISNLEQEDIATYFCQQGNTLPYTFGGGTKLEITLEDLKNVFPPEVAVFEPSEAEISHTQKATLVCLATGFYPDHVELSWWVNGKEVHSGVCTDPQPLKEQPALNDSRYCLSSRLRVSATFWQNPRNHFRCQVQFYGLSENDEWTQDRAKPVTQIVSAEAWGRADSGFTSESYQQGVLSATILYEILLGKATLYAVLVSALVLMAMVKRKDSRGRAKRSGSGATNFSLLKQAGDVEENPGPTSMDWIWRILFLVGAATGAHSFEVKLQESGPGLVAPSQSLSVTCTVSGVSLPDYGVSWIRQPPRKGLEWLGVIWGSETTYYNSALKSRLTIIKDNSKSQVFLKMNSLQTDDTAIYYCAKHYYYGGSYAMDYWGQGTSVTVSSTRIQNPDPAVYQLRDSKSSDKSVCLFTDFDSQTNVSQSKDSDVYITDKCVLDMRSMDFKSNSAVAWSNKSDFACANAFNNSIIPEDTFFPSPESSSDVKLVEKSFETDTNLNFQNLSVIGFRILLLKVAGFNLLMTLRLWSS

SEQ ID NO: 23692 - protein, 620 aa, synthetic construct
MALPVTALLLPLALLLHAARPEIVMTQSPATLSLSPGERATLSCRASQDISKYLNWYQQKPGQAPRLLIYHTSRLHSGIPARFSGSGSGTDYTLTISSLQPEDFAVYFCQQGNTLPYTFGQGTKLEIKLEDLKNVFPPEVAVFEPSEAEISHTQKATLVCLATGFYPDHVELSWWVNGKEVHSGVCTDPQPLKEQPALNDSRYCLSSRLRVSATFWQNPRNHFRCQVQFYGLSENDEWTQDRAKPVTQIVSAEAWGRADSGFTSESYQQGVLSATILYEILLGKATLYAVLVSALVLMAMVKRKDSRGRAKRSGSGATNFSLLKQAGDVEENPGPTSMDWIWRILFLVGAATGAHSFEQVQLQESGPGLVKPSETLSLTCTVSGVSLPDYGVSWIRQPPGKGLEWIGVIWGSETTYYNSSLKSRVTISKDNSKNQVSLKLSSVTAADTAVYYCAKHYYYGGSYAMDYWGQGTLVTVSSTRIQNPDPAVYQLRDSKSSDKSVCLFTDFDSQTNVSQSKDSDVYITDKCVLDMRSMDFKSNSAVAWSNKSDFACANAFNNSIIPEDTFFPSPESSSDVKLVEKSFETDTNLNFQNLSVIGFRILLLKVAGFNLLMTLRLWSS

SEQ ID NO: 23693 - protein, 621 aa, synthetic construct
MALPVTALLLPLALLLHAARPDEIVLTQSPATLSLSPGERATLSCSASSSVSYMHWYQQKPGQAPRLLIYDTSKLASGIPARFSGSGSGTDFTLTISSLEPEDVAVYYCFQGSVYPFTFGQGTKLEIKRLEDLKNVFPPEVAVFEPSEAEISHTQKATLVCLATGFYPDHVELSWWVNGKEVHSGVCTDPQPLKEQPALNDSRYCLSSRLRVSATFWQNPRNHFRCQVQFYGLSENDEWTQDRAKPVTQIVSAEAWGRADSGFTSESYQQGVLSATILYEILLGKATLYAVLVSALVLMAMVKRKDSRGRAKRSGSGATNFSLLKQAGDVEENPGPTSMDWIWRILFLVGAATGAHSFEQVQLQESGPGLVKPSQTLSLTCTVSGGSISTSGMGVGWIRQHPGKGLEWIGHIWWDDDKRYNPALKSRVTISVDTSKNQFSLKLSSVTAADTAVYYCARMELWSYYFDYWGQGTLVTVSSTRIQNPDPAVYQLRDSKSSDKSVCLFTDFDSQTNVSQSKDSDVYITDKCVLDMRSMDFKSNSAVAWSNKSDFACANAFNNSIIPEDTFFPSPESSSDVKLVEKSFETDTNLNFQNLSVIGFRILLLKVAGFNLLMTLRLWSS

SEQ ID NO: 23694 - protein, 619 aa, synthetic construct
MALPVTALLLPLALLLHAARPDYIHVTQSPSSLSVSIGDRVTINCQTSQGVGSDLHWYQHKPGRAPKLLIHHASSVEDGVPSRFSGTGFHTSFNLTINDLQADDIGTYYCQVLQSFGRGSRLDTKLEDLKNVFPPEVAVFEPSEAEISHTQKATLVCLATGFYPDHVELSWWVNGKEVHSGVCTDPQPLKEQPALNDSRYCLSSRLRVSATFWQNPRNHFRCQVQFYGLSENDEWTQDRAKPVTQIVSAEAWGRADSGFTSESYQQGVLSATILYEILLGKATLYAVLVSALVLMAMVKRKDSRGRAKRSGSGATNFSLLKQAGDVEENPGPTSMDWIWRILFLVGAATGAHSFERAHLVQSGTAMKKPGASVRVSCQTSGYTFTAHILFWFRQAPGRGLEWVGWIKPQYGAVNFGGGFRDRVTLTRDVYREIAYMDIRGLKPDDTAVYYCARDRSYGDSSWALDAWGQGTTVVVSATRIQNPDPAVYQLRDSKSSDKSVCLFTDFDSQTNVSQSKDSDVYITDKCVLDMRSMDFKSNSAVAWSNKSDFACANAFNNSIIPEDTFFPSPESSSDVKLVEKSFETDTNLNFQNLSVIGFRILLLKVAGFNLLMTLRLWSS

SEQ ID NO: 23695 - protein, 629 aa, synthetic construct
MALPVTALLLPLALLLHAARPDVQMIQTPDSLAVSLGQRATISCRASESVDNYGISFMHWYQQKPGQSPKLLIYRASNLESGIPARFSGSGSRTDFTLTINPVETDDVATYYCQQNNKDPPTFGGGTKLEIKLEDLKNVFPPEVAVFEPSEAEISHTQKATLVCLATGFYPDHVELSWWVNGKEVHSGVCTDPQPLKEQPALNDSRYCLSSRLRVSATFWQNPRNHFRCQVQFYGLSENDEWTQDRAKPVTQIVSAEAWGRADSGFTSESYQQGVLSATILYEILLGKATLYAVLVSALVLMAMVKRKDSRGRAKRSGSGATNFSLLKQAGDVEENPGPTSMDWIWRILFLVGAATGAHSFEGGGGSQVQLQQSGAELVKPGASVKISCKASGYAFSSYWMNWVKQRPGKGLEWIGQIYPGDGDTTYNGKFKGKATLTADKSSSTVYMQLNSLTSEDSAVYFCVRYYYGSSGYFDYWGQGTTLTVSSTRIQNPDPAVYQLRDSKSSDKSVCLFTDFDSQTNVSQSKDSDVYITDKCVLDMRSMDFKSNSAVAWSNKSDFACANAFNNSIIPEDTFFPSPESSSDVKLVEKSFETDTNLNFQNLSVIGFRILLLKVAGFNLLMTLRLWSS

SEQ ID NO: 23696 - protein, 620 aa, synthetic construct
MALPVTALLLPLALLLHAARPDVQMIQTPSSLSASLGDRVTISCRASQDIGNYLNWYQQKPDGTVKLLIYYTSRLHSGVPSRFSGSGSGTEYSLTISNLEQEDIATYFCQQGSALPPTFGGGTKLEINLEDLKNVFPPEVAVFEPSEAEISHTQKATLVCLATGFYPDHVELSWWVNGKEVHSGVCTDPQPLKEQPALNDSRYCLSSRLRVSATFWQNPRNHFRCQVQFYGLSENDEWTQDRAKPVTQIVSAEAWGRADSGFTSESYQQGVLSATILYEILLGKATLYAVLVSALVLMAMVKRKDSRGRAKRSGSGATNFSLLKQAGDVEENPGPTSMDWIWRILFLVGAATGAHSFEALQLQQSGAELVRPGASVTLSCKASGYTFTDYEMHWVKQTPVHGLEWIGAIDPETGGTAYNQKFEGKAILTADKSSSTAYMELRSLTSEDSPVYYCARRRYYGSSSFDYWGQGTTLTVSSTRIQNPDPAVYQLRDSKSSDKSVCLFTDFDSQTNVSQSKDSDVYITDKCVLDMRSMDFKSNSAVAWSNKSDFACANAFNNSIIPEDTFFPSPESSSDVKLVEKSFETDTNLNFQNLSVIGFRILLLKVAGFNLLMTLRLWSS

SEQ ID NO: 23697 - protein, 623 aa, synthetic construct
MALPVTALLLPLALLLHAARPDIQMTQSPSSLSASVGDRVTITCKASDHINNWLAWYQQKPGQAPKLLIYGATTLETGVPSRFSGSGSGTDYTLTISSLQPEDFATYYCQQSWNTPWTFGQGTKLEIKRLEDLKNVFPPEVAVFEPSEAEISHTQKATLVCLATGFYPDHVELSWWVNGKEVHSGVCTDPQPLKEQPALNDSRYCLSSRLRVSATFWQNPRNHFRCQVQFYGLSENDEWTQDRAKPVTQIVSAEAWGRADCGFTSESYQQGVLSATILYLLLLLKSVVYFAIITCCLLRRTAFCCNGEKSRAKRSGSGATNFSLLKQAGDVEENPGPTSMDWIWRILFLVGAATGAHSFEQVQLQQPGAELVKPGASVKMSCKASGYAFSSYWINWMKQKPGQGLEWIGQIYPGDGDTNYNGKFKGRATLTADTSSSTAYMQLSSLTSEDSAVYFCARSITTVVGCAMDYWGQGTSVTVSSTRIQNPDPAVYQLRDSKSSDKSVCLFTDFDSQTNVSQSKDSDVYITDKCVLDMRSMDFKSNSAVAWSNKSDFACANAFNNSIIPEDTFFPSPESSSDVKLVEKSFETDTNLNFQNLSVIGFRILLLKVAGFNLLMTLRLWSS

SEQ ID NO: 23698 - protein, 620 aa, synthetic construct
MALPVTALLLPLALLLHAARPDIQMTQTTSSLSASLGDRVTISCRASQDISKYLNWYQQKPDGTVKLLIYHTSRLHSGVPSRFSGSGSGTDYSLTISNLEQEDIATYFCQQGNTLPYTFGGGTKLEITLEDLKNVFPPEVAVFEPSEAEISHTQKATLVCLATGFYPDHVELSWWVNGKEVHSGVCTDPQPLKEQPALNDSRYCLSSRLRVSATFWQNPRNHFRCQVQFYGLSENDEWTQDRAKPVTQIVSAEAWGRADCGFTSESYQQGVLSATILYLLLLLKSVVYFAIITCCLLRRTAFCCNGEKSRAKRSGSGATNFSLLKQAGDVEENPGPTSMDWIWRILFLVGAATGAHSFEVKLQESGPGLVAPSQSLSVTCTVSGVSLPDYGVSWIRQPPRKGLEWLGVIWGSETTYYNSALKSRLTIIKDNSKSQVFLKMNSLQTDDTAIYYCAKHYYYGGSYAMDYWGQGTSVTVSSTRIQNPDPAVYQLRDSKSSDKSVCLFTDFDSQTNVSQSKDSDVYITDKCVLDMRSMDFKSNSAVAWSNKSDFACANAFNNSIIPEDTFFPSPESSSDVKLVEKSFETDTNLNFQNLSVIGFRILLLKVAGFNLLMTLRLWSS

SEQ ID NO: 23699 - protein, 621 aa, synthetic construct
MALPVTALLLPLALLLHAARPEIVMTQSPATLSLSPGERATLSCRASQDISKYLNWYQQKPGQAPRLLIYHTSRLHSGIPARFSGSGSGTDYTLTISSLQPEDFAVYFCQQGNTLPYTFGQGTKLEIKLEDLKNVFPPEVAVFEPSEAEISHTQKATLVCLATGFYPDHVELSWWVNGKEVHSGVCTDPQPLKEQPALNDSRYCLSSRLRVSATFWQNPRNHFRCQVQFYGLSENDEWTQDRAKPVTQIVSAEAWGRADCGFTSESYQQGVLSATILYLLLLLKSVVYFAIITCCLLRRTAFCCNGEKSRAKRSGSGATNFSLLKQAGDVEENPGPTSMDWIWRILFLVGAATGAHSFEQVQLQESGPGLVKPSETLSLTCTVSGVSLPDYGVSWIRQPPGKGLEWIGVIWGSETTYYNSSLKSRVTISKDNSKNQVSLKLSSVTAADTAVYYCAKHYYYGGSYAMDYWGQGTLVTVSSTRIQNPDPAVYQLRDSKSSDKSVCLFTDFDSQTNVSQSKDSDVYITDKCVLDMRSMDFKSNSAVAWSNKSDFACANAFNNSIIPEDTFFPSPESSSDVKLVEKSFETDTNLNFQNLSVIGFRILLLKVAGFNLLMTLRLWSS

SEQ ID NO: 23700 - protein, 622 aa, synthetic construct
MALPVTALLLPLALLLHAARPDEIVLTQSPATLSLSPGERATLSCSASSSVSYMHWYQQKPGQAPRLLIYDTSKLASGIPARFSGSGSGTDFTLTISSLEPEDVAVYYCFQGSVYPFTFGQGTKLEIKRLEDLKNVFPPEVAVFEPSEAEISHTQKATLVCLATGFYPDHVELSWWVNGKEVHSGVCTDPQPLKEQPALNDSRYCLSSRLRVSATFWQNPRNHFRCQVQFYGLSENDEWTQDRAKPVTQIVSAEAWGRADCGFTSESYQQGVLSATILYLLLLLKSVVYFAIITCCLLRRTAFCCNGEKSRAKRSGSGATNFSLLKQAGDVEENPGPTSMDWIWRILFLVGAATGAHSFEQVQLQESGPGLVKPSQTLSLTCTVSGGSISTSGMGVGWIRQHPGKGLEWIGHIWWDDDKRYNPALKSRVTISVDTSKNQFSLKLSSVTAADTAVYYCARMELWSYYFDYWGQGTLVTVSSTRIQNPDPAVYQLRDSKSSDKSVCLFTDFDSQTNVSQSKDSDVYITDKCVLDMRSMDFKSNSAVAWSNKSDFACANAFNNSIIPEDTFFPSPESSSDVKLVEKSFETDTNLNFQNLSVIGFRILLLKVAGFNLLMTLRLWSS

SEQ ID NO: 23701 - protein, 620 aa, synthetic construct
MALPVTALLLPLALLLHAARPDYIHVTQSPSSLSVSIGDRVTINCQTSQGVGSDLHWYQHKPGRAPKLLIHHASSVEDGVPSRFSGTGFHTSFNLTINDLQADDIGTYYCQVLQSFGRGSRLDTKLEDLKNVFPPEVAVFEPSEAEISHTQKATLVCLATGFYPDHVELSWWVNGKEVHSGVCTDPQPLKEQPALNDSRYCLSSRLRVSATFWQNPRNHFRCQVQFYGLSENDEWTQDRAKPVTQIVSAEAWGRADCGFTSESYQQGVLSATILYLLLLLKSVVYFAIITCCLLRRTAFCCNGEKSRAKRSGSGATNFSLLKQAGDVEENPGPTSMDWIWRILFLVGAATGAHSFERAHLVQSGTAMKKPGASVRVSCQTSGYTFTAHILFWFRQAPGRGLEWVGWIKPQYGAVNFGGGFRDRVTLTRDVYREIAYMDIRGLKPDDTAVYYCARDRSYGDSSWALDAWGQGTTVVVSATRIQNPDPAVYQLRDSKSSDKSVCLFTDFDSQTNVSQSKDSDVYITDKCVLDMRSMDFKSNSAVAWSNKSDFACANAFNNSIIPEDTFFPSPESSSDVKLVEKSFETDTNLNFQNLSVIGFRILLLKVAGFNLLMTLRLWSS

SEQ ID NO: 23702 - protein, 630 aa, synthetic construct
MALPVTALLLPLALLLHAARPDVQMIQTPDSLAVSLGQRATISCRASESVDNYGISFMHWYQQKPGQSPKLLIYRASNLESGIPARFSGSGSRTDFTLTINPVETDDVATYYCQQNNKDPPTFGGGTKLEIKLEDLKNVFPPEVAVFEPSEAEISHTQKATLVCLATGFYPDHVELSWWVNGKEVHSGVCTDPQPLKEQPALNDSRYCLSSRLRVSATFWQNPRNHFRCQVQFYGLSENDEWTQDRAKPVTQIVSAEAWGRADCGFTSESYQQGVLSATILYLLLLLKSVVYFAIITCCLLRRTAFCCNGEKSRAKRSGSGATNFSLLKQAGDVEENPGPTSMDWIWRILFLVGAATGAHSFEGGGGSQVQLQQSGAELVKPGASVKISCKASGYAFSSYWMNWVKQRPGKGLEWIGQIYPGDGDTTYNGKFKGKATLTADKSSSTVYMQLNSLTSEDSAVYFCVRYYYGSSGYFDYWGQGTTLTVSSTRIQNPDPAVYQLRDSKSSDKSVCLFTDFDSQTNVSQSKDSDVYITDKCVLDMRSMDFKSNSAVAWSNKSDFACANAFNNSIIPEDTFFPSPESSSDVKLVEKSFETDTNLNFQNLSVIGFRILLLKVAGFNLLMTLRLWSS

SEQ ID NO: 23703 - protein, 621 aa, synthetic construct
MALPVTALLLPLALLLHAARPDVQMIQTPSSLSASLGDRVTISCRASQDIGNYLNWYQQKPDGTVKLLIYYTSRLHSGVPSRFSGSGSGTEYSLTISNLEQEDIATYFCQQGSALPPTFGGGTKLEINLEDLKNVFPPEVAVFEPSEAEISHTQKATLVCLATGFYPDHVELSWWVNGKEVHSGVCTDPQPLKEQPALNDSRYCLSSRLRVSATFWQNPRNHFRCQVQFYGLSENDEWTQDRAKPVTQIVSAEAWGRADCGFTSESYQQGVLSATILYLLLLLKSVVYFAIITCCLLRRTAFCCNGEKSRAKRSGSGATNFSLLKQAGDVEENPGPTSMDWIWRILFLVGAATGAHSFEALQLQQSGAELVRPGASVTLSCKASGYTFTDYEMHWVKQTPVHGLEWIGAIDPETGGTAYNQKFEGKAILTADKSSSTAYMELRSLTSEDSPVYYCARRRYYGSSSFDYWGQGTTLTVSSTRIQNPDPAVYQLRDSKSSDKSVCLFTDFDSQTNVSQSKDSDVYITDKCVLDMRSMDFKSNSAVAWSNKSDFACANAFNNSIIPEDTFFPSPESSSDVKLVEKSFETDTNLNFQNLSVIGFRILLLKVAGFNLLMTLRLWSS

SEQ ID NO: 23704 - protein, 623 aa, synthetic construct
MALPVTALLLPLALLLHAARPDIQMTQSPSSLSASVGDRVTITCKASDHINNWLAWYQQKPGQAPKLLIYGATTLETGVPSRFSGSGSGTDYTLTISSLQPEDFATYYCQQSWNTPWTFGQGTKLEIKRLEDLKNVFPPEVAVFEPSEAEISHTQKATLVCLATGFYPDHVELSWWVNGKEVHSGVCTDPQPLKEQPALNDSRYCLSSRLRVSATFWQNPRNHFRCQVQFYGLSENDEWTQDRAKPVTQIVSAEAWGRADCGFTSESYQQGVLSATILYLLLLLKSVVYFAIITCCLLRRTAFCCNGEKSRAKRSGSGATNFSLLKQAGDVEENPGPTSMDWIWRILFLVGAATGAHSFEQVQLQQPGAELVKPGASVKMSCKASGYAFSSYWINWMKQKPGQGLEWIGQIYPGDGDTNYNGKFKGRATLTADTSSSTAYMQLSSLTSEDSAVYFCARSITTVVGCAMDYWGQGTSVTVSSTRIQNPDPAVYQLRDSKSSDKSVCLFTDFDSQTNVSQSKDSDVYITDKCVLDMRSMDFKSNSAVAWSNKSDFACANAFNNSIIPEDTFFPSPESSCDVKLVEKSFETDTNLNFQNLSVIGLRMLFAKTVAVNFLLTAKLFFL

SEQ ID NO: 23705 - protein, 620 aa, synthetic construct
MALPVTALLLPLALLLHAARPDIQMTQTTSSLSASLGDRVTISCRASQDISKYLNWYQQKPDGTVKLLIYHTSRLHSGVPSRFSGSGSGTDYSLTISNLEQEDIATYFCQQGNTLPYTFGGGTKLEITLEDLKNVFPPEVAVFEPSEAEISHTQKATLVCLATGFYPDHVELSWWVNGKEVHSGVCTDPQPLKEQPALNDSRYCLSSRLRVSATFWQNPRNHFRCQVQFYGLSENDEWTQDRAKPVTQIVSAEAWGRADCGFTSESYQQGVLSATILYLLLLLKSVVYFAIITCCLLRRTAFCCNGEKSRAKRSGSGATNFSLLKQAGDVEENPGPTSMDWIWRILFLVGAATGAHSFEVKLQESGPGLVAPSQSLSVTCTVSGVSLPDYGVSWIRQPPRKGLEWLGVIWGSETTYYNSALKSRLTIIKDNSKSQVFLKMNSLQTDDTAIYYCAKHYYYGGSYAMDYWGQGTSVTVSSTRIQNPDPAVYQLRDSKSSDKSVCLFTDFDSQTNVSQSKDSDVYITDKCVLDMRSMDFKSNSAVAWSNKSDFACANAFNNSIIPEDTFFPSPESSCDVKLVEKSFETDTNLNFQNLSVIGLRMLFAKTVAVNFLLTAKLFFL

SEQ ID NO: 23706 - protein, 621 aa, synthetic construct
MALPVTALLLPLALLLHAARPEIVMTQSPATLSLSPGERATLSCRASQDISKYLNWYQQKPGQAPRLLIYHTSRLHSGIPARFSGSGSGTDYTLTISSLQPEDFAVYFCQQGNTLPYTFGQGTKLEIKLEDLKNVFPPEVAVFEPSEAEISHTQKATLVCLATGFYPDHVELSWWVNGKEVHSGVCTDPQPLKEQPALNDSRYCLSSRLRVSATFWQNPRNHFRCQVQFYGLSENDEWTQDRAKPVTQIVSAEAWGRADCGFTSESYQQGVLSATILYLLLLLKSVVYFAIITCCLLRRTAFCCNGEKSRAKRSGSGATNFSLLKQAGDVEENPGPTSMDWIWRILFLVGAATGAHSFEQVQLQESGPGLVKPSETLSLTCTVSGVSLPDYGVSWIRQPPGKGLEWIGVIWGSETTYYNSSLKSRVTISKDNSKNQVSLKLSSVTAADTAVYYCAKHYYYGGSYAMDYWGQGTLVTVSSTRIQNPDPAVYQLRDSKSSDKSVCLFTDFDSQTNVSQSKDSDVYITDKCVLDMRSMDFKSNSAVAWSNKSDFACANAFNNSIIPEDTFFPSPESSCDVKLVEKSFETDTNLNFQNLSVIGLRMLFAKTVAVNFLLTAKLFFL

SEQ ID NO: 23707 - protein, 622 aa, synthetic construct
MALPVTALLLPLALLLHAARPDEIVLTQSPATLSLSPGERATLSCSASSSVSYMHWYQQKPGQAPRLLIYDTSKLASGIPARFSGSGSGTDFTLTISSLEPEDVAVYYCFQGSVYPFTFGQGTKLEIKRLEDLKNVFPPEVAVFEPSEAEISHTQKATLVCLATGFYPDHVELSWWVNGKEVHSGVCTDPQPLKEQPALNDSRYCLSSRLRVSATFWQNPRNHFRCQVQFYGLSENDEWTQDRAKPVTQIVSAEAWGRADCGFTSESYQQGVLSATILYLLLLLKSVVYFAIITCCLLRRTAFCCNGEKSRAKRSGSGATNFSLLKQAGDVEENPGPTSMDWIWRILFLVGAATGAHSFEQVQLQESGPGLVKPSQTLSLTCTVSGGSISTSGMGVGWIRQHPGKGLEWIGHIWWDDDKRYNPALKSRVTISVDTSKNQFSLKLSSVTAADTAVYYCARMELWSYYFDYWGQGTLVTVSSTRIQNPDPAVYQLRDSKSSDKSVCLFTDFDSQTNVSQSKDSDVYITDKCVLDMRSMDFKSNSAVAWSNKSDFACANAFNNSIIPEDTFFPSPESSCDVKLVEKSFETDTNLNFQNLSVIGLRMLFAKTVAVNFLLTAKLFFL

SEQ ID NO: 23708 - protein, 620 aa, synthetic construct
MALPVTALLLPLALLLHAARPDYIHVTQSPSSLSVSIGDRVTINCQTSQGVGSDLHWYQHKPGRAPKLLIHHASSVEDGVPSRFSGTGFHTSFNLTINDLQADDIGTYYCQVLQSFGRGSRLDTKLEDLKNVFPPEVAVFEPSEAEISHTQKATLVCLATGFYPDHVELSWWVNGKEVHSGVCTDPQPLKEQPALNDSRYCLSSRLRVSATFWQNPRNHFRCQVQFYGLSENDEWTQDRAKPVTQIVSAEAWGRADCGFTSESYQQGVLSATILYLLLLLKSVVYFAIITCCLLRRTAFCCNGEKSRAKRSGSGATNFSLLKQAGDVEENPGPTSMDWIWRILFLVGAATGAHSFERAHLVQSGTAMKKPGASVRVSCQTSGYTFTAHILFWFRQAPGRGLEWVGWIKPQYGAVNFGGGFRDRVTLTRDVYREIAYMDIRGLKPDDTAVYYCARDRSYGDSSWALDAWGQGTTVVVSATRIQNPDPAVYQLRDSKSSDKSVCLFTDFDSQTNVSQSKDSDVYITDKCVLDMRSMDFKSNSAVAWSNKSDFACANAFNNSIIPEDTFFPSPESSCDVKLVEKSFETDTNLNFQNLSVIGLRMLFAKTVAVNFLLTAKLFFL

SEQ ID NO: 23709 - protein, 630 aa, synthetic construct
MALPVTALLLPLALLLHAARPDVQMIQTPDSLAVSLGQRATISCRASESVDNYGISFMHWYQQKPGQSPKLLIYRASNLESGIPARFSGSGSRTDFTLTINPVETDDVATYYCQQNNKDPPTFGGGTKLEIKLEDLKNVFPPEVAVFEPSEAEISHTQKATLVCLATGFYPDHVELSWWVNGKEVHSGVCTDPQPLKEQPALNDSRYCLSSRLRVSATFWQNPRNHFRCQVQFYGLSENDEWTQDRAKPVTQIVSAEAWGRADCGFTSESYQQGVLSATILYLLLLLKSVVYFAIITCCLLRRTAFCCNGEKSRAKRSGSGATNFSLLKQAGDVEENPGPTSMDWIWRILFLVGAATGAHSFEGGGGSQVQLQQSGAELVKPGASVKISCKASGYAFSSYWMNWVKQRPGKGLEWIGQIYPGDGDTTYNGKFKGKATLTADKSSSTVYMQLNSLTSEDSAVYFCVRYYYGSSGYFDYWGQGTTLTVSSTRIQNPDPAVYQLRDSKSSDKSVCLFTDFDSQTNVSQSKDSDVYITDKCVLDMRSMDFKSNSAVAWSNKSDFACANAFNNSIIPEDTFFPSPESSCDVKLVEKSFETDTNLNFQNLSVIGLRMLFAKTVAVNFLLTAKLFFL

SEQ ID NO: 23710 - protein, 621 aa, synthetic construct
MALPVTALLLPLALLLHAARPDVQMIQTPSSLSASLGDRVTISCRASQDIGNYLNWYQQKPDGTVKLLIYYTSRLHSGVPSRFSGSGSGTEYSLTISNLEQEDIATYFCQQGSALPPTFGGGTKLEINLEDLKNVFPPEVAVFEPSEAEISHTQKATLVCLATGFYPDHVELSWWVNGKEVHSGVCTDPQPLKEQPALNDSRYCLSSRLRVSATFWQNPRNHFRCQVQFYGLSENDEWTQDRAKPVTQIVSAEAWGRADCGFTSESYQQGVLSATILYLLLLLKSVVYFAIITCCLLRRTAFCCNGEKSRAKRSGSGATNFSLLKQAGDVEENPGPTSMDWIWRILFLVGAATGAHSFEALQLQQSGAELVRPGASVTLSCKASGYTFTDYEMHWVKQTPVHGLEWIGAIDPETGGTAYNQKFEGKAILTADKSSSTAYMELRSLTSEDSPVYYCARRRYYGSSSFDYWGQGTTLTVSSTRIQNPDPAVYQLRDSKSSDKSVCLFTDFDSQTNVSQSKDSDVYITDKCVLDMRSMDFKSNSAVAWSNKSDFACANAFNNSIIPEDTFFPSPESSCDVKLVEKSFETDTNLNFQNLSVIGLRMLFAKTVAVNFLLTAKLFFL

SEQ ID NO: 23711 - protein, 628 aa, synthetic construct; identical to SEQ ID NO: 23683

SEQ ID NO: 23712 - protein, 625 aa, synthetic construct; identical to SEQ ID NO: 23684

SEQ ID NO: 23713 - protein, 626 aa, synthetic construct; identical to SEQ ID NO: 23685

SEQ ID NO: 23714 - protein, 627 aa, synthetic construct; identical to SEQ ID NO: 23686

SEQ ID NO: 23715 - protein, 625 aa, synthetic construct; identical to SEQ ID NO: 23687

SEQ ID NO: 23716 - protein, 635 aa, synthetic construct; identical to SEQ ID NO: 23688

SEQ ID NO: 23717 - protein, 626 aa, synthetic construct; identical to SEQ ID NO: 23689

SEQ ID NO: 23718 - DNA, 2394 bp, synthetic construct
  source 1..2394: mol_type = other DNA
atggcttgcaattgtcagttgatgcaggatacaccactcctcaagtttccatgtccaaggctcattcttctctttgtgctgctgattcgtctttcacaagtgtcttcagatgttgatgaacaactgtccaagtcagtgaaagataaggtattgctgccttgccgttacaactctcctcatgaagatgagtctgaagaccgaatctactggcaaaaacatgacaaagtggtgctgtctgtcattgctgggaaactaaaagtgtggcccgagtataagaaccggactttatatgacaacactacctactctcttatcatcctgggcctggtcctttcagaccggggcacatacagctgtgtcgttcaaaagaaggaaagaggaacgtatgaagttaaacacttggctttagtaaagttgtccatcaaagctgacttctctacccccaacataactgagtctggaaacccatctgcagacactaaaaggattacctgctttgcttccgggggtttcccaaagcctcgcttctcttggttggaaaatggaagagaattacctggcatcaatacgacaatttcccaggatcctgaatctgaattgtacaccattagtagccaactagatttcaatacgactcgcaaccacaccattaagtgtctcattaaatatggagatgctcacgtgtcagaggacttcacctgggaaaaacccccagaagaccctcctgatagcaagaacacacttgtgctctttggggcaggattcggcgcagtaataacagtcgtcgtcatcgttgtcatcatcaaatgcttctgtaagcacagaagctgtttcagaagaaatgaggcaagcagagaaacaaacaacagccttaccttcgggcctgaagaagcattagctgaacagaccgtcttccttaccactagtcactatcccatagtcccactggacagcaagatctcgctgcccatccggaatggctctgaagtgcgggacccactggtcacctatgagggatctctcccaccagcatccccgctgcaagacaacctggttatcgccctgcacagttatgagccctcccatgatggagacttgggctttgagaagggtgaacagctccgaatcctggagcagagcggtgagtggtggaaggctcagtccctgacgactggccaagaaggcttcattcccttcaacttcgtggcgaaagcaaacagcctggagcctgaaccttggttcttcaagaatctgagccgtaaggacgccgagcggcagcttttggcgcccgggaacacgcatggatccttcctgatccgggaaagcgaaagcactgcggggtccttttccctgtcggtcagagacttcgaccagaaccagggagaagtggtgaaacattacaagatccgtaacctagacaacggtggcttctacatctcccctcgtatcacttttcccggattgcacgatctagtccgccattacaccaacgcctctgatgggctgtgcacaaagttgagccgtccttgccagacccagaagccccagaaaccatggtgggaggacgaatgggaagttcccagggaaacactgaagttggtggagcggctgggagctggccagttcggggaagtgtggatggggtactacaacggacacacgaaggtggcggtgaagagtctgaaacaagggagcatgtcccccgacgccttcctggctgaggctaacctcatgaagcagctgcagcacccgcggctagtccggctttatgcagtggtcacccaggaacccatctacatcatcacggaatacatggagaacgggagcctagtagattttctcaagactccctcgggcatcaagttgaatgtcaacaaacttttggacatggcagcccagattgcagagggcatggcgttcatcgaagaacagaattacatccatcgggacctgcgcgccgccaacatcctggtgtctgacacgctgagctgcaagattgcagactttggcctggcgcgcctcattgaggacaatgagtacacggcccgggagggggccaaatttcccattaagtggacagcaccagaagccattaactatgggaccttcaccatcaagtcagacgtgtggtccttcgggatcttgcttacagagatcgtcacccacggtcgaatcccttacccaggaatgaccaaccctgaagtcattcagaacctggagagaggctaccgcatggtgagacctgacaactgtccggaagagctgtaccacctcatgatgctgtgctggaaggagcgcccagaggaccggcccacgtttgactaccttcggagtgttctggatgacttcttcacagccacagagggccagtaccagccccagcctggtacctag

SEQ ID NO: 23719 - DNA, 648 bp, synthetic construct
  source 1..648: mol_type = other DNA
atggccacaattggagccctgctggtaagatttttcttcattgctgttctgatgagctcccagaagtcatgggctatcaaagaggaacacaccatcatccaggcggagttctatcttttaccagacaaacgtggagagtttatgtttgactttgacggcgatgagattttccatgtagacattgaaaagtcagagaccatctggagacttgaagaatttgcaaagtttgccagctttgaggctcagggtgcactggctaatatagctgtggacaaagctaacctggatgtcatgaaagagcgttccaacaacactccagatgccaacgtggccccagaggtgactgtactctccagaagccctgtgaacctgggagagcccaacatcctcatctgtttcattgacaagttctcccctccagtggtcaatgtcacctggctccggaatggacggcctgtcaccgaaggcgtgtcagagacagtgtttctcccgagggacgatcacctcttccgcaaattccactatctgaccttcctgccctccacagatgatttctatgactgtgaggtggatcactggggcttggaggagcctctgcggaagcactgggagtttgaagagaaaaccctcctcccagaaactaaagag

SEQ ID NO: 23720 - DNA, 795 bp, synthetic construct
  source 1..795: mol_type = other DNA
atggtgtggctccccagagttccctgtgtggcagctgtgatcctgttgctgacagtgctgagcccttcagtggctttggtcagagactccggatccgccaacgagagggccgacctgatcgcctacctgaagcaggccaccaaggaattcagatccggaggcggaggctccctggtgcctcggggctccggaggcggaggctccgtcgacagaccatggtttttggaatactgtaaatctgagtgtcatttctacaacgggacgcagcgcgtgcggcttctggtaagatacttctacaacctggaggagaacctgcgcttcgacagcgacgtgggcgagttccgcgcggtgaccgagctggggcggccagacgccgagaactggaacagccagccggagttcctggagcaaaagcgggccgaggtggacacggtgtgcagacacaactatgagatcttcgataacttccttgtgccgcggagagttgagcctacggtgactgtgtaccccacaaagacgcagcccctggaacaccacaacctcctggtctgctctgtgagtgacttctaccctggcaacattgaagtcagatggttccggaatggcaaggaggagaaaacaggaattgtgtccacgggcctggtccgaaatggagactggaccttccagacactggtgatgctggagacggttcctcagagtggagaggtttacacctgccaggtggagcatcccagcctgaccgaccctgtcacggtcgagtggaaagcacagtccacatctgcacagaacaag

SEQ ID NO: 23721 - DNA, 786 bp, synthetic construct
  source 1..786: mol_type = other DNA
atggtgtggctccccagagttccctgtgtggcagctgtgatcctgttgctgacagtgctgagcccttcagtggctttggtcagagactccggatccggcaagaaggtgatcaccgccttcaacgagggcctgaaggaattcagatccggaggcggaggctccctggtgcctcggggctccggaggcggaggctccgtcgacagaccatggtttttggaatactgtaaatctgagtgtcatttctacaacgggacgcagcgcgtgcggcttctggtaagatacttctacaacctggaggagaacctgcgcttcgacagcgacgtgggcgagttccgcgcggtgaccgagctggggcggccagacgccgagaactggaacagccagccggagttcctggagcaaaagcgggccgaggtggacacggtgtgcagacacaactatgagatcttcgataacttccttgtgccgcggagagttgagcctacggtgactgtgtaccccacaaagacgcagcccctggaacaccacaacctcctggtctgctctgtgagtgacttctaccctggcaacattgaagtcagatggttccggaatggcaaggaggagaaaacaggaattgtgtccacgggcctggtccgaaatggagactggaccttccagacactggtgatgctggagacggttcctcagagtggagaggtttacacctgccaggtggagcatcccagcctgaccgaccctgtcacggtcgagtggaaagcacagtccacatctgcacagaacaag

SEQ ID NO: 23722 - DNA, 795 bp, synthetic construct
  source 1..795: mol_type = other DNA
atggtgtggctccccagagttccctgtgtggcagctgtgatcctgttgctgacagtgctgagcccttcagtggctttggtcagagactccggatccgccaacgagagggccgacctgatcgcctacctgaagcaggcctccaaggaattcagatccggaggcggaggctccctggtgcctcggggctccggaggcggaggctccgtcgacagaccatggtttttggaatactgtaaatctgagtgtcatttctacaacgggacgcagcgcgtgcggcttctggtaagatacttctacaacctggaggagaacctgcgcttcgacagcgacgtgggcgagttccgcgcggtgaccgagctggggcggccagacgccgagaactggaacagccagccggagttcctggagcaaaagcgggccgaggtggacacggtgtgcagacacaactatgagatcttcgataacttccttgtgccgcggagagttgagcctacggtgactgtgtaccccacaaagacgcagcccctggaacaccacaacctcctggtctgctctgtgagtgacttctaccctggcaacattgaagtcagatggttccggaatggcaaggaggagaaaacaggaattgtgtccacgggcctggtccgaaatggagactggaccttccagacactggtgatgctggagacggttcctcagagtggagaggtttacacctgccaggtggagcatcccagcctgaccgaccctgtcacggtcgagtggaaagcacagtccacatctgcacagaacaag

SEQ ID NO: 23723 - DNA, 795 bp, synthetic construct
  source 1..795: mol_type = other DNA
atggtgtggctccccagagttccctgtgtggcagctgtgatcctgttgctgacagtgctgagcccttcagtggctttggtcagagactccggatccgccaacgagagggccgacctgatcgcctacctgaagcaggccggcaaggaattcagatccggaggcggaggctccctggtgcctcggggctccggaggcggaggctccgtcgacagaccatggtttttggaatactgtaaatctgagtgtcatttctacaacgggacgcagcgcgtgcggcttctggtaagatacttctacaacctggaggagaacctgcgcttcgacagcgacgtgggcgagttccgcgcggtgaccgagctggggcggccagacgccgagaactggaacagccagccggagttcctggagcaaaagcgggccgaggtggacacggtgtgcagacacaactatgagatcttcgataacttccttgtgccgcggagagttgagcctacggtgactgtgtaccccacaaagacgcagcccctggaacaccacaacctcctggtctgctctgtgagtgacttctaccctggcaacattgaagtcagatggttccggaatggcaaggaggagaaaacaggaattgtgtccacgggcctggtccgaaatggagactggaccttccagacactggtgatgctggagacggttcctcagagtggagaggtttacacctgccaggtggagcatcccagcctgaccgaccctgtcacggtcgagtggaaagcacagtccacatctgcacagaacaag

SEQ ID NO: 23724 - DNA, 798 bp, synthetic construct
  source 1..798: mol_type = other DNA
atggtgtggctccccagagttccctgtgtggcagctgtgatcctgttgctgacagtgctgagcccttcagtggctttggtcagagactccggatccgccaacgagagggccgacctgatcgcctacttcaaggcagccaccaagttcgaattcagatccggaggcggaggctccctggtgcctcggggctccggaggcggaggctccgtcgacagaccatggtttttggaatactgtaaatctgagtgtcatttctacaacgggacgcagcgcgtgcggcttctggtaagatacttctacaacctggaggagaacctgcgcttcgacagcgacgtgggcgagttccgcgcggtgaccgagctggggcggccagacgccgagaactggaacagccagccggagttcctggagcaaaagcgggccgaggtggacacggtgtgcagacacaactatgagatcttcgataacttccttgtgccgcggagagttgagcctacggtgactgtgtaccccacaaagacgcagcccctggaacaccacaacctcctggtctgctctgtgagtgacttctaccctggcaacattgaagtcagatggttccggaatggcaaggaggagaaaacaggaattgtgtccacgggcctggtccgaaatggagactggaccttccagacactggtgatgctggagacggttcctcagagtggagaggtttacacctgccaggtggagcatcccagcctgaccgaccctgtcacggtcgagtggaaagcacagtccacatctgcacagaacaag

SEQ ID NO: 23725 - DNA, 660 bp, synthetic construct
  source 1..660: mol_type = other DNA
atgccgtgcagcagagctctgattctgggggtcctcgccctgaacaccatgctcagcctctgcggaggtgaagacgacattgaggccgaccacgtaggcttctatggtacaactgtttatcagtctcctggagacattggccagtacacacatgaatttgatggtgatgagttgttctatgtggacttggataagaagaaaactgtctggaggcttcctgagtttggccaattgatactctttgagccccaaggtggactgcaaaacatagctgcagaaaaacacaacttgggaatcttgactaagaggtcaaatttcaccccagctaccaatgaggctcctcaagcgactgtgttccccaagtcccctgtgctgctgggtcagcccaacacccttatctgctttgtggacaacatcttcccacctgtgatcaacatcacatggctcagaaatagcaagtcagtcacagacggcgtttatgagaccagcttcctcgtcaaccgtgaccattccttccacaagctgtcttatctcaccttcatcccttctgatgatgacatttatgactgcaaggtggagcactggggcctggaggagccggttctgaaacactgggaacctgagattccagcccccatgtcagagctgacagaaactgtg

SEQ ID NO: 23726 - DNA, 810 bp, synthetic construct
  source 1..810: mol_type = other DNA
atggctctgcagatccccagcctcctcctctcggctgctgtggtggtgctgatggtgctgagcagcccagggactgagggcggagactccgcggatccccgcttgggcttgtggagtaggatggaccaattagccaaggaattgactgcggaggtcgacggaggtggcgggtcactagtgccccgaggaagtggaggtggagggtctccagggactgagggcggagactccgaaaggcatttcgtgcaccagttcaagggcgagtgctacttcaccaacgggacgcagcgcatacggctcgtgaccagatacatctacaaccgggaggagtacctgcgcttcgacagcgacgtgggcgagtaccgcgcggtgaccgagctggggcggcactcagccgagtactacaataagcagtacctggagcgaacgcgggccgagctggacacggcgtgcagacacaactacgaggagacggaggtccccacctccctgcggcggcttgaacagcccaatgtcgccatctccctgtccaggacagaggccctcaaccaccacaacactctggtctgttcggtgacagatttctacccagccaagatcaaagtgcgctggttcaggaatggccaggaggagacagtgggggtctcatccacacagcttattaggaatggggactggaccttccaggtcctggtcatgctggagatgacccctcatcagggagaggtctacacctgccatgtggagcatcccagcctgaagagccccatcactgtggagtggagggcacagtccgagtctgcccggagc

SEQ ID NO: 23727 - DNA, 795 bp, synthetic construct
  source 1..795: mol_type = other DNA
atggctctgcagatccccagcctcctcctctcggctgctgtggtggtgctgatggtgctgagcagcccagggactgagggcggagactccgcggatcccttatctattgcgcttcacgtgggcttcgatcactttgaagtcgacggaggtggcgggtcactagtgccccgaggaagtggaggtggagggtctccagggactgagggcggagactccgaaaggcatttcgtgcaccagttcaagggcgagtgctacttcaccaacgggacgcagcgcatacggctcgtgaccagatacatctacaaccgggaggagtacctgcgcttcgacagcgacgtgggcgagtaccgcgcggtgaccgagctggggcggcactcagccgagtactacaataagcagtacctggagcgaacgcgggccgagctggacacggcgtgcagacacaactacgaggagacggaggtccccacctccctgcggcggcttgaacagcccaatgtcgccatctccctgtccaggacagaggccctcaaccaccacaacactctggtctgttcggtgacagatttctacccagccaagatcaaagtgcgctggttcaggaatggccaggaggagacagtgggggtctcatccacacagcttattaggaatggggactggaccttccaggtcctggtcatgctggagatgacccctcatcagggagaggtctacacctgccatgtggagcatcccagcctgaagagccccatcactgtggagtggagggcacagtccgagtctgcccggagc

SEQ ID NO: 23728 - DNA, 801 bp, synthetic construct
  source 1..801: mol_type = other DNA
atggctctgcagatccccagcctcctcctctcggctgctgtggtggtgctgatggtgctgagcagcccagggactgagggcggagactccgcggatccctcacatctagttgaagcgctatatctagtttgcggagaaagaggcgtcgacggaggtggcgggtcactagtgccccgaggaagtggaggtggagggtctccagggactgagggcggagactccgaaaggcatttcgtgcaccagttcaagggcgagtgctacttcaccaacgggacgcagcgcatacggctcgtgaccagatacatctacaaccgggaggagtacctgcgcttcgacagcgacgtgggcgagtaccgcgcggtgaccgagctggggcggcactcagccgagtactacaataagcagtacctggagcgaacgcgggccgagctggacacggcgtgcagacacaactacgaggagacggaggtccccacctccctgcggcggcttgaacagcccaatgtcgccatctccctgtccaggacagaggccctcaaccaccacaacactctggtctgttcggtgacagatttctacccagccaagatcaaagtgcgctggttcaggaatggccaggaggagacagtgggggtctcatccacacagcttattaggaatggggactggaccttccaggtcctggtcatgctggagatgacccctcatcagggagaggtctacacctgccatgtggagcatcccagcctgaagagccccatcactgtggagtggagggcacagtccgagtctgcccggagc

SEQ ID NO: 23729 - DNA, 795 bp, synthetic construct
  source 1..795: mol_type = other DNA
atggctctgcagatccccagcctcctcctctcggctgctgtggtggtgctgatggtgctgagcagcccagggactgagggcggagactccgcggatcccggcgacctgcagactctggccctgtggagcaggatggacgtcgacggaggtggcgggtcactagtgccccgaggaagtggaggtggagggtctccagggactgagggcggagactccgaaaggcatttcgtgcaccagttcaagggcgagtgctacttcaccaacgggacgcagcgcatacggctcgtgaccagatacatctacaaccgggaggagtacctgcgcttcgacagcgacgtgggcgagtaccgcgcggtgaccgagctggggcggcactcagccgagtactacaataagcagtacctggagcgaacgcgggccgagctggacacggcgtgcagacacaactacgaggagacggaggtccccacctccctgcggcggcttgaacagcccaatgtcgccatctccctgtccaggacagaggccctcaaccaccacaacactctggtctgttcggtgacagatttctacccagccaagatcaaagtgcgctggttcaggaatggccaggaggagacagtgggggtctcatccacacagcttattaggaatggggactggaccttccaggtcctggtcatgctggagatgacccctcatcagggagaggtctacacctgccatgtggagcatcccagcctgaagagccccatcactgtggagtggagggcacagtccgagtctgcccggagc

SEQ ID NO: 23730 - DNA, 795 bp, synthetic construct
  source 1..795: mol_type = other DNA
atggctctgcagatccccagcctcctcctctcggctgctgtggtggtgctgatggtgctgagcagcccagggactgagggcggagactccgcggatcccggcgacctgcagactctggccctgaacgccgccagggacgtcgacggaggtggcgggtcactagtgccccgaggaagtggaggtggagggtctccagggactgagggcggagactccgaaaggcatttcgtgcaccagttcaagggcgagtgctacttcaccaacgggacgcagcgcatacggctcgtgaccagatacatctacaaccgggaggagtacctgcgcttcgacagcgacgtgggcgagtaccgcgcggtgaccgagctggggcggcactcagccgagtactacaataagcagtacctggagcgaacgcgggccgagctggacacggcgtgcagacacaactacgaggagacggaggtccccacctccctgcggcggcttgaacagcccaatgtcgccatctccctgtccaggacagaggccctcaaccaccacaacactctggtctgttcggtgacagatttctacccagccaagatcaaagtgcgctggttcaggaatggccaggaggagacagtgggggtctcatccacacagcttattaggaatggggactggaccttccaggtcctggtcatgctggagatgacccctcatcagggagaggtctacacctgccatgtggagcatcccagcctgaagagccccatcactgtggagtggagggcacagtccgagtctgcccggagc

SEQ ID NO: 23731 - DNA, 780 bp, synthetic construct
  source 1..780: mol_type = other DNA
atgaggcccgaggaccggatgtttcacatcagagccgtgatcctgagagccctgagcctggcctttctgctgtctcttagaggcgctggcgctatcaaggccgatcacgtgtcaacctacgccgccttcgtgcagacccatagacctaccggcgagttcatgttcgagttcgacgaggacgagatgttctacgtggacctggacaagaaagaaaccgtgtggcacctggaagagttcggccaggctttcagctttgaggcccaaggcggcctggctaatatcgccatcctgaacaacaacctgaacaccctgatccagcggagcaatcacacccaggccaccaacgatccacctgaagtgaccgtgtttcccaaagaacccgtggaactgggccagcctaacacactgatctgccacatcgacaagttcttcccacctgtgctgaacgtgacctggctgtgcaatggcgagctggtcacagaaggcgtggccgagtctctgttcctgcctagaaccgactacagcttccacaagttccactacctgaccttcgtgcccagcgccgaggacttctacgattgcagagtggaacactggggcctcgaccagcctctgctgaaacactgggaagcccaagagcctatccagatgcctgagacaaccgagacagtgctgtgtgccctgggacttgtgctgggccttgtgggaatcatcgtgggcaccgtgctgattatcaagagcctgcggagcggacacgaccctagagcacagggaacactt

SEQ ID NO: 23732 - DNA, 666 bp, synthetic construct
  source 1..666: mol_type = other DNA
atgaggcccgaggaccggatgtttcacatcagagccgtgatcctgagagccctgagcctggcctttctgctgtctcttagaggcgctggcgctatcaaggccgatcacgtgtcaacctacgccgccttcgtgcagacccatagacctaccggcgagttcatgttcgagttcgacgaggacgagatgttctacgtggacctggacaagaaagaaaccgtgtggcacctggaagagttcggccaggctttcagctttgaggcccaaggcggcctggctaatatcgccatcctgaacaacaacctgaacaccctgatccagcggagcaatcacacccaggccaccaacgatccacctgaagtgaccgtgtttcccaaagaacccgtggaactgggccagcctaacacactgatctgccacatcgacaagttcttcccacctgtgctgaacgtgacctggctgtgcaatggcgagctggtcacagaaggcgtggccgagtctctgttcctgcctagaaccgactacagcttccacaagttccactacctgaccttcgtgcccagcgccgaggacttctacgattgcagagtggaacactggggcctcgaccagcctctgctgaaacactgggaagcccaagagcctatccagatgcctgagacaaccgag

SEQ ID NO: 23733 - DNA, 630 bp, synthetic construct
  source 1..630: mol_type = other DNA
atgaggcccgaggaccggatgtttcacatcagagccgtgatcctgagagccctgagcctggcctttctgctgtctcttagaggcgctggcgctatcaaggccgatcacgtgtcaacctacgccgccttcgtgcagacccatagacctaccggcgagttcatgttcgagttcgacgaggacgagatgttctacgtggacctggacaagaaagaaaccgtgtggcacctggaagagttcggccaggctttcagctttgaggcccaaggcggcctggctaatatcgccatcctgaacaacaacctgaacaccctgatccagcggagcaatcacacccaggccaccaacgatccacctgaagtgaccgtgtttcccaaagaacccgtggaactgggccagcctaacacactgatctgccacatcgacaagttcttcccacctgtgctgaacgtgacctggctgtgcaatggcgagctggtcacagaaggcgtggccgagtctctgttcctgcctagaaccgactacagcttccacaagttccactacctgaccttcgtgcccagcgccgaggacttctacgattgcagagtggaacactggggcctcgaccagcctctgctgaaacactgggaa

SEQ ID NO: 23734 - DNA, 36 bp, synthetic construct
  source 1..36: mol_type = other DNA
gcccaagagcctatccagatgcctgagacaaccgag

SEQ ID NO: 23735 - DNA, 69 bp, synthetic construct
  source 1..69: mol_type = other DNA
acagtgctgtgtgccctgggacttgtgctgggccttgtgggaatcatcgtgggcaccgtgctgattatc

SEQ ID NO: 23736 - DNA, 45 bp, synthetic construct
  source 1..45: mol_type = other DNA
aagagcctgcggagcggacacgaccctagagcacagggaacactt

SEQ ID NO: 23737 - DNA, 774 bp, synthetic construct
  source 1..774: mol_type = other DNA
atgatggtgctgcaagtgtccgccgctcctagaacagtggctctgacagctctgctgatggtcctgctgaccagcgttgtgcagggcagagccacacctgagaactacctgtttcagggcagacaagagtgctacgccttcaacggcacccagcggtttctggaacggtacatctacaaccgggaagagttcgccagattcgacagcgacgtgggcgagtttagagccgtgacagaactgggcagacctgccgccgagtattggaacagccagaaggacatcctggaagagaagcgggccgtgcctgacagaatgtgcaggcacaactacgagcttggcggccctatgacactccagagaagagtgcagcccagagtgaacgtgtcccctagcaagaagggacccctccagcaccacaacctgcttgtgtgccacgtgaccgacttctaccccggctctattcaagtgcggtggttcctgaacggccaagaggaaacagccggcgtcgtcagcaccaacctgattagaaacggcgactggaccttccagatcctggtcatgctggaaatgacccctcagcaaggcgacgtgtacacctgtcaggtggaacacaccagcctggacagccctgtgaccgtggaatggaaagcccagagcgatagcgccagaagcaagacccttacaggcgctggcggatttgtgctgggcctgattatttgcggcgtgggcatcttcatgcaccggcggtctaagaaggtgcagagaggatctgct

SEQ ID NO: 23738 - DNA, 675 bp, synthetic construct
  source 1..675: mol_type = other DNA
atgatggtgctgcaagtgtccgccgctcctagaacagtggctctgacagctctgctgatggtcctgctgaccagcgttgtgcagggcagagccacacctgagaactacctgtttcagggcagacaagagtgctacgccttcaacggcacccagcggtttctggaacggtacatctacaaccgggaagagttcgccagattcgacagcgacgtgggcgagtttagagccgtgacagaactgggcagacctgccgccgagtattggaacagccagaaggacatcctggaagagaagcgggccgtgcctgacagaatgtgcaggcacaactacgagcttggcggccctatgacactccagagaagagtgcagcccagagtgaacgtgtcccctagcaagaagggacccctccagcaccacaacctgcttgtgtgccacgtgaccgacttctaccccggctctattcaagtgcggtggttcctgaacggccaagaggaaacagccggcgtcgtcagcaccaacctgattagaaacggcgactggaccttccagatcctggtcatgctggaaatgacccctcagcaaggcgacgtgtacacctgtcaggtggaacacaccagcctggacagccctgtgaccgtggaatggaaagcccagagcgatagcgccagaagcaag

SEQ ID NO: 23739 - DNA, 636 bp, synthetic construct
  source 1..636: mol_type = other DNA
atgatggtgctgcaagtgtccgccgctcctagaacagtggctctgacagctctgctgatggtcctgctgaccagcgttgtgcagggcagagccacacctgagaactacctgtttcagggcagacaagagtgctacgccttcaacggcacccagcggtttctggaacggtacatctacaaccgggaagagttcgccagattcgacagcgacgtgggcgagtttagagccgtgacagaactgggcagacctgccgccgagtattggaacagccagaaggacatcctggaagagaagcgggccgtgcctgacagaatgtgcaggcacaactacgagcttggcggccctatgacactccagagaagagtgcagcccagagtgaacgtgtcccctagcaagaagggacccctccagcaccacaacctgcttgtgtgccacgtgaccgacttctaccccggctctattcaagtgcggtggttcctgaacggccaagaggaaacagccggcgtcgtcagcaccaacctgattagaaacggcgactggaccttccagatcctggtcatgctggaaatgacccctcagcaaggcgacgtgtacacctgtcaggtggaacacaccagcctggacagccctgtgacc

SEQ ID NO: 23740 - DNA, 63 bp, synthetic construct
  source 1..63: mol_type = other DNA
acccttacaggcgctggcggatttgtgctgggcctgattatttgcggcgtgggcatcttcatg

SEQ ID NO: 23741 - DNA, 36 bp, synthetic construct
  source 1..36: mol_type = other DNA
caccggcggtctaagaaggtgcagagaggatctgct

SEQ ID NO: 23742 - DNA, 762 bp, synthetic construct
  source 1..762: mol_type = other DNA
atggctatcagcggagtgcctgtgctgggcttcttcatcattgccgtgctgatgagcgcccaagagagctgggccatcaaagaggaacacgtcatcatccaggccgagttctatctgaaccccgaccagagcggcgagttcatgttcgacttcgacggcgacgagatttttcacgtggacatggctaagaaagaaaccgtgtggcggctggaagagttcggcagattcgccagctttgaagcccaaggcgctctggctaatatcgccgtggacaaggccaacctggaaattatgaccaagcggagcaactacacccctatcaccaacgtgccacctgaagtgaccgtgctgacaaacagccctgtggaactgcgcgagcccaacgtgctgatctgcttcatcgacaagttcacccctccagtggtcaacgtgacctggctgagaaacggcaagcctgtgacaaccggcgtgtccgagacagtgttcctgcctagagaggaccacctgttccgcaagttccactacctgccttttctgcccagcaccgaggacgtgtacgattgcagagtggaacactggggcctcgacgagcctctgctgaagcactgggaatttgacgccccatctcctctgccagagacaaccgagaatgtcgtgtgtgccctgggcctgacagtgggccttgtgggaatcatcatcggcaccatctttatcatcaaaggcgtgcggaagtccaacgccgccgagagaagaggacctctt

SEQ ID NO: 23743 - DNA, 648 bp, synthetic construct
  source 1..648: mol_type = other DNA
atggctatcagcggagtgcctgtgctgggcttcttcatcattgccgtgctgatgagcgcccaagagagctgggccatcaaagaggaacacgtcatcatccaggccgagttctatctgaaccccgaccagagcggcgagttcatgttcgacttcgacggcgacgagatttttcacgtggacatggctaagaaagaaaccgtgtggcggctggaagagttcggcagattcgccagctttgaagcccaaggcgctctggctaatatcgccgtggacaaggccaacctggaaattatgaccaagcggagcaactacacccctatcaccaacgtgccacctgaagtgaccgtgctgacaaacagccctgtggaactgcgcgagcccaacgtgctgatctgcttcatcgacaagttcacccctccagtggtcaacgtgacctggctgagaaacggcaagcctgtgacaaccggcgtgtccgagacagtgttcctgcctagagaggaccacctgttccgcaagttccactacctgccttttctgcccagcaccgaggacgtgtacgattgcagagtggaacactggggcctcgacgagcctctgctgaagcactgggaatttgacgccccatctcctctgccagagacaaccgag

SEQ ID NO: 23744 - DNA, 612 bp, synthetic construct
  source 1..612: mol_type = other DNA
atggctatcagcggagtgcctgtgctgggcttcttcatcattgccgtgctgatgagcgcccaagagagctgggccatcaaagaggaacacgtcatcatccaggccgagttctatctgaaccccgaccagagcggcgagttcatgttcgacttcgacggcgacgagatttttcacgtggacatggctaagaaagaaaccgtgtggcggctggaagagttcggcagattcgccagctttgaagcccaaggcgctctggctaatatcgccgtggacaaggccaacctggaaattatgaccaagcggagcaactacacccctatcaccaacgtgccacctgaagtgaccgtgctgacaaacagccctgtggaactgcgcgagcccaacgtgctgatctgcttcatcgacaagttcacccctccagtggtcaacgtgacctggctgagaaacggcaagcctgtgacaaccggcgtgtccgagacagtgttcctgcctagagaggaccacctgttccgcaagttccactacctgccttttctgcccagcaccgaggacgtgtacgattgcagagtggaacactggggcctcgacgagcctctgctgaagcactgggaa

SEQ ID NO: 23745 - DNA, 51 bp, synthetic construct
  source 1..51: mol_type = other DNA
aatgtcgtgtgtgccctgggcctgacagtgggccttgtgggaatcatcatc

SEQ ID NO: 23746 - DNA, 45 bp, synthetic construct
  source 1..45: mol_type = other DNA
aaaggcgtgcggaagtccaacgccgccgagagaagaggacctctt

SEQ ID NO: 23747 - DNA, 786 bp, synthetic construct
  source 1..786: mol_type = other DNA
atggtctgcctgagactgcctggcggatcttgtatggccgtgctgaccgtgacactgatggtgctgagtagccctctggctctggccggcgataccagacctagattcctggaatactctaccagcgagtgccacttcttcaacggaaccgagagagtgcggttcctggatcggtacttctacaatcaagaggaatacgtccgcttcgacagcgacgtgggcgagtttagagccgtgacagaactgggcagacccgacgaggaatactggaacagccagaaggacttcctggaagatcggagagccgccgtggacacctactgccgacacaattatggcgtgggagagtccttcaccgtgcagagaagagtgcaccccaaagtgacagtgtaccccagcaagacccagcctctccagcaccacaatctgcttgtgtgtagcgtgtccggcttctaccccggctctattgaagtgcggtggttcagaaacggccaagaggaaaagaccggcgtcgtcagcacaggactgatccacaatggcgactggacctttcagaccctggtcatgctggaaaccgtgcctagaagcggcgaggtgtacacatgccaggtggaacaccctagcgtgacaagccctctgaccgttgaatggcgggccagaagcgagagcgcccagtctaagatgctgtctggcgttggcggctttgtgctgggcctgctgtttcttggagccggcctgttcatctactttcggaaccagaagggccacagcggcctccaacctaga

SEQ ID NO: 23748 - DNA, 681 bp, synthetic construct
  source 1..681: mol_type = other DNA
atggtctgcctgagactgcctggcggatcttgtatggccgtgctgaccgtgacactgatggtgctgagtagccctctggctctggccggcgataccagacctagattcctggaatactctaccagcgagtgccacttcttcaacggaaccgagagagtgcggttcctggatcggtacttctacaatcaagaggaatacgtccgcttcgacagcgacgtgggcgagtttagagccgtgacagaactgggcagacccgacgaggaatactggaacagccagaaggacttcctggaagatcggagagccgccgtggacacctactgccgacacaattatggcgtgggagagtccttcaccgtgcagagaagagtgcaccccaaagtgacagtgtaccccagcaagacccagcctctccagcaccacaatctgcttgtgtgtagcgtgtccggcttctaccccggctctattgaagtgcggtggttcagaaacggccaagaggaaaagaccggcgtcgtcagcacaggactgatccacaatggcgactggacctttcagaccctggtcatgctggaaaccgtgcctagaagcggcgaggtgtacacatgccaggtggaacaccctagcgtgacaagccctctgaccgttgaatggcgggccagaagcgagagcgcccagtctaag

SEQ ID NO: 23749 - DNA, 642 bp, synthetic construct
  source 1..642: mol_type = other DNA
atggtctgcctgagactgcctggcggatcttgtatggccgtgctgaccgtgacactgatggtgctgagtagccctctggctctggccggcgataccagacctagattcctggaatactctaccagcgagtgccacttcttcaacggaaccgagagagtgcggttcctggatcggtacttctacaatcaagaggaatacgtccgcttcgacagcgacgtgggcgagtttagagccgtgacagaactgggcagacccgacgaggaatactggaacagccagaaggacttcctggaagatcggagagccgccgtggacacctactgccgacacaattatggcgtgggagagtccttcaccgtgcagagaagagtgcaccccaaagtgacagtgtaccccagcaagacccagcctctccagcaccacaatctgcttgtgtgtagcgtgtccggcttctaccccggctctattgaagtgcggtggttcagaaacggccaagaggaaaagaccggcgtcgtcagcacaggactgatccacaatggcgactggacctttcagaccctggtcatgctggaaaccgtgcctagaagcggcgaggtgtacacatgccaggtggaacaccctagcgtgacaagccctctgacc

SEQ ID NO: 23750 - DNA, 63 bp, synthetic construct
  source 1..63: mol_type = other DNA
atgctgtctggcgttggcggctttgtgctgggcctgctgtttcttggagccggcctgttcatc

SEQ ID NO: 23751 - DNA, 42 bp, synthetic construct
  source 1..42: mol_type = other DNA
tactttcggaaccagaagggccacagcggcctccaacctaga

SEQ ID NO: 23752 - DNA, 267 bp, synthetic construct
  source 1..267: mol_type = other DNA
gctggcgctatcaaggccgatcacgtgtcaacctacgccgccttcgtgcagacccatagacctaccggcgagttcatgttcgagttcgacgaggacgagatgttctacgtggacctggacaagaaagaaaccgtgtggcacctggaagagttcggccaggctttcagctttgaggcccaaggcggcctggctaatatcgccatcctgaacaacaacctgaacaccctgatccagcggagcaatcacacccaggccaccaacgatcca

SEQ ID NO: 23753 - DNA, 279 bp, synthetic construct
  source 1..279: mol_type = other DNA
cctgaagtgaccgtgtttcccaaagaacccgtggaactgggccagcctaacacactgatctgccacatcgacaagttcttcccacctgtgctgaacgtgacctggctgtgcaatggcgagctggtcacagaaggcgtggccgagtctctgttcctgcctagaaccgactacagcttccacaagttccactacctgaccttcgtgcccagcgccgaggacttctacgattgcagagtggaacactggggcctcgaccagcctctgctgaaacactgggaa

SEQ ID NO: 23754 - DNA, 27 bp, synthetic construct
  source 1..27: mol_type = other DNA
gcccaagagcctatccagatgcctgag

SEQ ID NO: 23755 - DNA, 282 bp, synthetic construct
  source 1..282: mol_type = other DNA
agagccacacctgagaactacctgtttcagggcagacaagagtgctacgccttcaacggcacccagcggtttctggaacggtacatctacaaccgggaagagttcgccagattcgacagcgacgtgggcgagtttagagccgtgacagaactgggcagacctgccgccgagtattggaacagccagaaggacatcctggaagagaagcgggccgtgcctgacagaatgtgcaggcacaactacgagcttggcggccctatgacactccagagaagagtgcag

SEQ ID NO: 23756 - DNA, 267 bp, synthetic construct
  source 1..267: mol_type = other DNA
cccagagtgaacgtgtcccctagcaagaagggacccctccagcaccacaacctgcttgtgtgccacgtgaccgacttctaccccggctctattcaagtgcggtggttcctgaacggccaagaggaaacagccggcgtcgtcagcaccaacctgattagaaacggcgactggaccttccagatcctggtcatgctggaaatgacccctcagcaaggcgacgtgtacacctgtcaggtggaacacaccagcctggacagccctgtgacc

SEQ ID NO: 23757 - DNA, 39 bp, synthetic construct
  source 1..39: mol_type = other DNA
gtggaatggaaagcccagagcgatagcgccagaagcaag

SEQ ID NO: 23758 - DNA, 258 bp, synthetic construct
  source 1..258: mol_type = other DNA
atcaaagaggaacacgtcatcatccaggccgagttctatctgaaccccgaccagagcggcgagttcatgttcgacttcgacggcgacgagatttttcacgtggacatggctaagaaagaaaccgtgtggcggctggaagagttcggcagattcgccagctttgaagcccaaggcgctctggctaatatcgccgtggacaaggccaacctggaaattatgaccaagcggagcaactacacccctatcaccaacgtgcca

SEQ ID NO: 23759 - DNA, 279 bp, synthetic construct
  source 1..279: mol_type = other DNA
cctgaagtgaccgtgctgacaaacagccctgtggaactgcgcgagcccaacgtgctgatctgcttcatcgacaagttcacccctccagtggtcaacgtgacctggctgagaaacggcaagcctgtgacaaccggcgtgtccgagacagtgttcctgcctagagaggaccacctgttccgcaagttccactacctgccttttctgcccagcaccgaggacgtgtacgattgcagagtggaacactggggcctcgacgagcctctgctgaagcactgggaa

SEQ ID NO: 23760 - DNA, 36 bp, synthetic construct
  source 1..36: mol_type = other DNA
tttgacgccccatctcctctgccagagacaaccgag

SEQ ID NO: 23761 - DNA, 282 bp, synthetic construct
  source 1..282: mol_type = other DNA
accagacctagattcctggaatactctaccagcgagtgccacttcttcaacggaaccgagagagtgcggttcctggatcggtacttctacaatcaagaggaatacgtccgcttcgacagcgacgtgggcgagtttagagccgtgacagaactgggcagacccgacgaggaatactggaacagccagaaggacttcctggaagatcggagagccgccgtggacacctactgccgacacaattatggcgtgggagagtccttcaccgtgcagagaagagtgcac

SEQ ID NO: 23762 - DNA, 267 bp, synthetic construct
  source 1..267: mol_type = other DNA
cccaaagtgacagtgtaccccagcaagacccagcctctccagcaccacaatctgcttgtgtgtagcgtgtccggcttctaccccggctctattgaagtgcggtggttcagaaacggccaagaggaaaagaccggcgtcgtcagcacaggactgatccacaatggcgactggacctttcagaccctggtcatgctggaaaccgtgcctagaagcggcgaggtgtacacatgccaggtggaacaccctagcgtgacaagccctctgacc

SEQ ID NO: 23763 - DNA, 39 bp, synthetic construct
  source 1..39: mol_type = other DNA
gttgaatggcgggccagaagcgagagcgcccagtctaag

SEQ ID NO: 23764 - DNA, 762 bp, synthetic construct
  source 1..762: mol_type = other DNA
atgatcctcaataaagcactcatgctcggtgctctggccctgactactgtcatgtccccctgtgggggagaagatatagttgccgaccatgtagcatcatacggggtgaacctctatcagtcctatggccctagcggacagtacactcacgagttcgatggagatgagcaattctatgtggacctcggtcggaaagaaacagtatggtgcctccccgttcttcgacaatttagatttgatccacaatttgcgctcacgaatatcgcagtgctgaaacataatctcaatagtttgattaagcgatccaatagcacggctgcaaccaatgaagtaccggaggtgactgtcttttccaagagccccgtgaccctgggacaacctaatattcttatctgcttggttgataacatattcccgccggtggtcaatataacatggctctctaatggtcactcagtcaccgaaggtgtgtcagaaaccagctttttgtcaaaatcagaccattcattctttaagatctcctaccttactctcttgccctccgcggaggagtcttatgattgtaaagtagagcactgggggcttgacaaaccgctgcttaaacattgggaacctgaaatccccgcccccatgtcagaattgacggagactgtggtgtgcgcgttgggtcttagcgtcggtttggttgggatcgttgtgggaaccgttttcattatccgcggccttcggtcagttggagctagtcgccatcaaggaccgctg

SEQ ID NO: 23765 - DNA, 693 bp, synthetic construct
  source 1..693: mol_type = other DNA
gaagatatagttgccgaccatgtagcatcatacggggtgaacctctatcagtcctatggccctagcggacagtacactcacgagttcgatggagatgagcaattctatgtggacctcggtcggaaagaaacagtatggtgcctccccgttcttcgacaatttagatttgatccacaatttgcgctcacgaatatcgcagtgctgaaacataatctcaatagtttgattaagcgatccaatagcacggctgcaaccaatgaagtaccggaggtgactgtcttttccaagagccccgtgaccctgggacaacctaatattcttatctgcttggttgataacatattcccgccggtggtcaatataacatggctctctaatggtcactcagtcaccgaaggtgtgtcagaaaccagctttttgtcaaaatcagaccattcattctttaagatctcctaccttactctcttgccctccgcggaggagtcttatgattgtaaagtagagcactgggggcttgacaaaccgctgcttaaacattgggaacctgaaatccccgcccccatgtcagaattgacggagactgtggtgtgcgcgttgggtcttagcgtcggtttggttgggatcgttgtgggaaccgttttcattatccgcggccttcggtcagttggagctagtcgccatcaaggaccgctg

SEQ ID NO: 23766 - DNA, 648 bp, synthetic construct
  source 1..648: mol_type = other DNA
atgatcctcaataaagcactcatgctcggtgctctggccctgactactgtcatgtccccctgtgggggagaagatatagttgccgaccatgtagcatcatacggggtgaacctctatcagtcctatggccctagcggacagtacactcacgagttcgatggagatgagcaattctatgtggacctcggtcggaaagaaacagtatggtgcctccccgttcttcgacaatttagatttgatccacaatttgcgctcacgaatatcgcagtgctgaaacataatctcaatagtttgattaagcgatccaatagcacggctgcaaccaatgaagtaccggaggtgactgtcttttccaagagccccgtgaccctgggacaacctaatattcttatctgcttggttgataacatattcccgccggtggtcaatataacatggctctctaatggtcactcagtcaccgaaggtgtgtcagaaaccagctttttgtcaaaatcagaccattcattctttaagatctcctaccttactctcttgccctccgcggaggagtcttatgattgtaaagtagagcactgggggcttgacaaaccgctgcttaaacattgggaacctgaaatccccgcccccatgtcagaattgacggag

SEQ ID NO: 23767 - DNA, 612 bp, synthetic construct
  source 1..612: mol_type = other DNA
atgatcctcaataaagcactcatgctcggtgctctggccctgactactgtcatgtccccctgtgggggagaagatatagttgccgaccatgtagcatcatacggggtgaacctctatcagtcctatggccctagcggacagtacactcacgagttcgatggagatgagcaattctatgtggacctcggtcggaaagaaacagtatggtgcctccccgttcttcgacaatttagatttgatccacaatttgcgctcacgaatatcgcagtgctgaaacataatctcaatagtttgattaagcgatccaatagcacggctgcaaccaatgaagtaccggaggtgactgtcttttccaagagccccgtgaccctgggacaacctaatattcttatctgcttggttgataacatattcccgccggtggtcaatataacatggctctctaatggtcactcagtcaccgaaggtgtgtcagaaaccagctttttgtcaaaatcagaccattcattctttaagatctcctaccttactctcttgccctccgcggaggagtcttatgattgtaaagtagagcactgggggcttgacaaaccgctgcttaaacattgggaa

SEQ ID NO: 23768 - DNA, 36 bp, synthetic construct
  source 1..36: mol_type = other DNA
cctgaaatccccgcccccatgtcagaattgacggag

SEQ ID NO: 23769 - DNA, 69 bp, synthetic construct
  source 1..69: mol_type = other DNA
actgtggtgtgcgcgttgggtcttagcgtcggtttggttgggatcgttgtgggaaccgttttcattatc

SEQ ID NO: 23770 - DNA, 45 bp, synthetic construct
  source 1..45: mol_type = other DNA
cgcggccttcggtcagttggagctagtcgccatcaaggaccgctg

SEQ ID NO: 23771 - DNA, 264 bp, synthetic construct
  source 1..264: mol_type = other DNA
gaagatatagttgccgaccatgtagcatcatacggggtgaacctctatcagtcctatggccctagcggacagtacactcacgagttcgatggagatgagcaattctatgtggacctcggtcggaaagaaacagtatggtgcctccccgttcttcgacaatttagatttgatccacaatttgcgctcacgaatatcgcagtgctgaaacataatctcaatagtttgattaagcgatccaatagcacggctgcaaccaatgaagta

SEQ ID NO: 23772 - DNA, 783 bp, synthetic construct
  source 1..783: mol_type = other DNA
atgtcctggaagaaggcgcttaggatacctggtggtcttcgagcagcgaccgtcaccctcatgctggctatgctgtcaacacctgtcgcggaaggccgcgactctcccgaagatttcgtctaccagttcaaagctatgtgctatttcaccaacggtactgagagagtcagatatgtgactcgctatatatacaatcgggaggagtacgctagattcgacagtgacgtggaagtttatcgcgcagttacgccccttggtccaccagacgccgagtattggaactctcaaaaggaggtgcttgagcgcacccgagccgaattggatacggtgtgtcggcacaactaccagttggaactgcgcacgactctccagcggcgggtcgaacccactgtaactattagtcctagtcggaccgaggccctgaatcatcacaatttgttggtttgctctgtaactgacttctatccagcacaaattaaagttcgctggttcaggaatgaccaggaagagacaactggggtggttagtacgcccttgatacgcaatggggattggacctttcaaatccttgtcatgttggagatgactcctcagcatggtgacgtttatacctgccacgtagaacatcccagtttgcagaatccgataaccgtagaatggagggctcagagcgaaagtgcccagtctaaaatgctcagcggtattggaggtttcgttttgggattgatcttccttgggctgggtctcataattcatcatcgctctcagaaggggctgctgcac

SEQ ID NO: 23773 - DNA, 279 bp, synthetic construct
  source 1..279: mol_type = other DNA
ccggaggtgactgtcttttccaagagccccgtgaccctgggacaacctaatattcttatctgcttggttgataacatattcccgccggtggtcaatataacatggctctctaatggtcactcagtcaccgaaggtgtgtcagaaaccagctttttgtcaaaatcagaccattcattctttaagatctcctaccttactctcttgccctccgcggaggagtcttatgattgtaaagtagagcactgggggcttgacaaaccgctgcttaaacattgggaa

SEQ ID NO: 23774 - DNA, 36 bp, synthetic construct; identical to SEQ ID NO: 23768
  source 1..36: mol_type = other DNA

SEQ ID NO: 23775 - DNA, 288 bp, synthetic construct
  source 1..288: mol_type = other DNA
cgcgactctcccgaagatttcgtctaccagttcaaagctatgtgctatttcaccaacggtactgagagagtcagatatgtgactcgctatatatacaatcgggaggagtacgctagattcgacagtgacgtggaagtttatcgcgcagttacgccccttggtccaccagacgccgagtattggaactctcaaaaggaggtgcttgagcgcacccgagccgaattggatacggtgtgtcggcacaactaccagttggaactgcgcacgactctccagcggcgggtcgaa

SEQ ID NO: 23776 - DNA, 267 bp, synthetic construct
  source 1..267: mol_type = other DNA
cccactgtaactattagtcctagtcggaccgaggccctgaatcatcacaatttgttggtttgctctgtaactgacttctatccagcacaaattaaagttcgctggttcaggaatgaccaggaagagacaactggggtggttagtacgcccttgatacgcaatggggattggacctttcaaatccttgtcatgttggagatgactcctcagcatggtgacgtttatacctgccacgtagaacatcccagtttgcagaatccgataacc

SEQ ID NO: 23777 - DNA, 63 bp, synthetic construct
  source 1..63: mol_type = other DNA
atgctcagcggtattggaggtttcgttttgggattgatcttccttgggctgggtctcataatt

SEQ ID NO: 23778 - DNA, 63 bp, synthetic construct; identical to SEQ ID NO: 23777
  source 1..63: mol_type = other DNA

SEQ ID NO: 23779 - DNA, 30 bp, synthetic construct
  source 1..30: mol_type = other DNA
catcatcgctctcagaaggggctgctgcac

SEQ ID NO: 23780 - DNA, 2403 bp, synthetic construct
  source 1..2403: mol_type = other DNA
atggccttaccagtgaccgccttgctcctgccgctggccttgctgctccacgccgccaggccggcatgccgcttctacaagaccctgagagccgaacagggtaccggcggaggcggatctggcggcggaggtagcggtggcggaggatctgaattcggcgataccagacctagattcctggaatactctaccagcgagtgccacttcttcaacggaaccgagagagtgcggttcctggatcggtacttctacaatcaagaggaatacgtccgcttcgacagcgacgtgggcgagtttagagccgtgacagaactgggcagacccgacgaggaatactggaacagccagaaggacttcctggaagatcggagagccgccgtggacacctactgccgacacaattatggcgtgggagagtccttcaccgtgcagagaagagtgcacctcgaggacctgaagaacgtgttcccacctgaggtggccgtgttcgagcctagcgaggccgagatcagccacacccagaaagccaccctcgtgtgcctggctaccggcttctaccccgaccatgtggaactgtcttggtgggtcaacggcaaagaggtgcacagcggcgtgtctaccgacccccagccactgaaagaacagcccgccctgaacgacagccggtactgcctgagcagcagactgagagtgtccgccaccttctggcagaacccccggaaccacttcagatgccaggtgcagttctacggcctgagcgagaacgacgagtggacccaggacagagccaagcccgtgacccagatcgtgtctgccgaagcctggggcagagccgattgcggatcccagagcttcggcctgctggaccccaagctgtgctacctgctggatggcatcctgttcatctacggcgtgatcctgaccgccctgttcctgagagtgaagttcagcagaagcgccgacgcccctgcctaccagcagggacagaaccaactgtacaacgagctgaacctgggcagacgggaagagtacgacgtgctggacaagcggagaggcagggaccctgagatgggcggaaagccccggagaaagaacccccaggaaggactgtataacgaactccagaaagacaagatggccgaagcctacagcgagatcggcatgaagggcgagcggagaagaggcaagggccacgatggcctgtaccagggcctgagcaccgccaccaaggacacctatgacgccctgcacatgcaggccctgcctccaagaagggccaagcgatctggatctggagcaacaaacttctcactactcaaacaagcaggtgacgtggaggagaatcccgggcctactagtatggactggatttggcgcatccttttccttgtcggcgctgctaccggcgcgcattccttcgaaatcaaagaggaacacgtcatcatccaggccgagttctatctgaaccccgaccagagcggcgagttcatgttcgacttcgacggcgacgagatttttcacgtggacatggctaagaaagaaaccgtgtggcggctggaagagttcggcagattcgccagctttgaagcccaaggcgctctggctaatatcgccgtggacaaggccaacctggaaattatgaccaagcggagcaactacacccctatcaccaacgtgccaacgcgtatccagaaccctgatcctgccgtgtaccagctgcgggatagcaagagcagcgacaagagcgtgtgtctgttcaccgacttcgacagccagaccaacgtgtcccagagcaaggactccgacgtgtacatcaccgataagaccgtgctggacatgcggagcatggacttcaagagcaactccgccgtggcctggtccaacaagtccgatttcgcctgcgccaacgccttcaacaacagcattatccccgaggacacattcttcccaagccccgagagcagctgcggtacccagagttttgggttgttggaccctaaattgtgctatctgttggacggaatcctgttcatttacggagtgatcctgaccgcattgttcctgcgggttaagttttccagatccgcagacgcacccgcttaccaacaagggcagaaccaactctacaatgaacttaatttggggcggagggaagagtacgacgttctggacaaaaggaggggacgagatcccgagatgggcggaaagcctcgaaggaagaatccgcaagaggggctttataacgaactccagaaagataaaatggcagaagcctatagtgagattgggatgaagggagaaaggaggaggggtaaaggtcacgatgggttgtaccaaggattgagcacagccactaaagatacctatgatgcgctccacatgcaggccctgccgccaagataa

SEQ ID NO: 23781 - DNA, 2265 bp, synthetic construct
  source 1..2265: mol_type = other DNA
atggccttaccagtgaccgccttgctcctgccgctggccttgctgctccacgccgccaggccggcatgccgcttctacaagaccctgagagccgaacagggtaccggcggaggcggatctggcggcggaggtagcggtggcggaggatctgaattcggcgataccagacctagattcctggaatactctaccagcgagtgccacttcttcaacggaaccgagagagtgcggttcctggatcggtacttctacaatcaagaggaatacgtccgcttcgacagcgacgtgggcgagtttagagccgtgacagaactgggcagacccgacgaggaatactggaacagccagaaggacttcctggaagatcggagagccgccgtggacacctactgccgacacaattatggcgtgggagagtccttcaccgtgcagagaagagtgcaccccaaagtgacagtgtaccccagcaagacccagcctctccagcaccacaatctgcttgtgtgtagcgtgtccggcttctaccccggctctattgaagtgcggtggttcagaaacggccaagaggaaaagaccggcgtcgtcagcacaggactgatccacaatggcgactggacctttcagaccctggtcatgctggaaaccgtgcctagaagcggcgaggtgtacacatgccaggtggaacaccctagcgtgacaagccctctgaccggatcccagagcttcggcctgctggaccccaagctgtgctacctgctggatggcatcctgttcatctacggcgtgatcctgaccgccctgttcctgagagtgaagttcagcagaagcgccgacgcccctgcctaccagcagggacagaaccaactgtacaacgagctgaacctgggcagacgggaagagtacgacgtgctggacaagcggagaggcagggaccctgagatgggcggaaagccccggagaaagaacccccaggaaggactgtataacgaactccagaaagacaagatggccgaagcctacagcgagatcggcatgaagggcgagcggagaagaggcaagggccacgatggcctgtaccagggcctgagcaccgccaccaaggacacctatgacgccctgcacatgcaggccctgcctccaagaagggccaagcgatctggatctggagcaacaaacttctcactactcaaacaagcaggtgacgtggaggagaatcccgggcctactagtatggactggatttggcgcatccttttccttgtcggcgctgctaccggcgcgcattccttcgaaatcaaagaggaacacgtcatcatccaggccgagttctatctgaaccccgaccagagcggcgagttcatgttcgacttcgacggcgacgagatttttcacgtggacatggctaagaaagaaaccgtgtggcggctggaagagttcggcagattcgccagctttgaagcccaaggcgctctggctaatatcgccgtggacaaggccaacctggaaattatgaccaagcggagcaactacacccctatcaccaacgtgccacctgaagtgaccgtgctgacaaacagccctgtggaactgcgcgagcccaacgtgctgatctgcttcatcgacaagttcacccctccagtggtcaacgtgacctggctgagaaacggcaagcctgtgacaaccggcgtgtccgagacagtgttcctgcctagagaggaccacctgttccgcaagttccactacctgccttttctgcccagcaccgaggacgtgtacgattgcagagtggaacactggggcctcgacgagcctctgctgaagcactgggaaggtacccagagttttgggttgttggaccctaaattgtgctatctgttggacggaatcctgttcatttacggagtgatcctgaccgcattgttcctgcgggttaagttttccagatccgcagacgcacccgcttaccaacaagggcagaaccaactctacaatgaacttaatttggggcggagggaagagtacgacgttctggacaaaaggaggggacgagatcccgagatgggcggaaagcctcgaaggaagaatccgcaagaggggctttataacgaactccagaaagataaaatggcagaagcctatagtgagattgggatgaagggagaaaggaggaggggtaaaggtcacgatgggttgtaccaaggattgagcacagccactaaagatacctatgatgcgctccacatgcaggccctgccgccaagataa

SEQ ID NO: 23782 - DNA, 2340 bp, synthetic construct
  source 1..2340: mol_type = other DNA
atggccttaccagtgaccgccttgctcctgccgctggccttgctgctccacgccgccaggccggcatgccgcttctacaagaccctgagagccgaacagggtaccggcggaggcggatctggcggcggaggtagcggtggcggaggatctgaattcggcgataccagacctagattcctggaatactctaccagcgagtgccacttcttcaacggaaccgagagagtgcggttcctggatcggtacttctacaatcaagaggaatacgtccgcttcgacagcgacgtgggcgagtttagagccgtgacagaactgggcagacccgacgaggaatactggaacagccagaaggacttcctggaagatcggagagccgccgtggacacctactgccgacacaattatggcgtgggagagtccttcaccgtgcagagaagagtgcaccccaaagtgacagtgtaccccagcaagacccagcctctccagcaccacaatctgcttgtgtgtagcgtgtccggcttctaccccggctctattgaagtgcggtggttcagaaacggccaagaggaaaagaccggcgtcgtcagcacaggactgatccacaatggcgactggacctttcagaccctggtcatgctggaaaccgtgcctagaagcggcgaggtgtacacatgccaggtggaacaccctagcgtgacaagccctctgaccgttgaatggcgggccagaagcgagagcgcccagtctaagggatcccagagcttcggcctgctggaccccaagctgtgctacctgctggatggcatcctgttcatctacggcgtgatcctgaccgccctgttcctgagagtgaagttcagcagaagcgccgacgcccctgcctaccagcagggacagaaccaactgtacaacgagctgaacctgggcagacgggaagagtacgacgtgctggacaagcggagaggcagggaccctgagatgggcggaaagccccggagaaagaacccccaggaaggactgtataacgaactccagaaagacaagatggccgaagcctacagcgagatcggcatgaagggcgagcggagaagaggcaagggccacgatggcctgtaccagggcctgagcaccgccaccaaggacacctatgacgccctgcacatgcaggccctgcctccaagaagggccaagcgatctggatctggagcaacaaacttctcactactcaaacaagcaggtgacgtggaggagaatcccgggcctactagtatggactggatttggcgcatccttttccttgtcggcgctgctaccggcgcgcattccttcgaaatcaaagaggaacacgtcatcatccaggccgagttctatctgaaccccgaccagagcggcgagttcatgttcgacttcgacggcgacgagatttttcacgtggacatggctaagaaagaaaccgtgtggcggctggaagagttcggcagattcgccagctttgaagcccaaggcgctctggctaatatcgccgtggacaaggccaacctggaaattatgaccaagcggagcaactacacccctatcaccaacgtgccacctgaagtgaccgtgctgacaaacagccctgtggaactgcgcgagcccaacgtgctgatctgcttcatcgacaagttcacccctccagtggtcaacgtgacctggctgagaaacggcaagcctgtgacaaccggcgtgtccgagacagtgttcctgcctagagaggaccacctgttccgcaagttccactacctgccttttctgcccagcaccgaggacgtgtacgattgcagagtggaacactggggcctcgacgagcctctgctgaagcactgggaatttgacgccccatctcctctgccagagacaaccgagggtacccagagttttgggttgttggaccctaaattgtgctatctgttggacggaatcctgttcatttacggagtgatcctgaccgcattgttcctgcgggttaagttttccagatccgcagacgcacccgcttaccaacaagggcagaaccaactctacaatgaacttaatttggggcggagggaagagtacgacgttctggacaaaaggaggggacgagatcccgagatgggcggaaagcctcgaaggaagaatccgcaagaggggctttataacgaactccagaaagataaaatggcagaagcctatagtgagattgggatgaagggagaaaggaggaggggtaaaggtcacgatgggttgtaccaaggattgagcacagccactaaagatacctatgatgcgctccacatgcaggccctgccgccaagataa

SEQ ID NO: 23783 - DNA, 2352 bp, synthetic construct
  source 1..2352: mol_type = other DNA
atggccttaccagtgaccgccttgctcctgccgctggccttgctgctccacgccgccaggccggcatgccgcttctacaagaccctgagagccgaacagggtaccggcggaggcggatctggcggcggaggtagcggtggcggaggatctgaattcggcgataccagacctagattcctggaatactctaccagcgagtgccacttcttcaacggaaccgagagagtgcggttcctggatcggtacttctacaatcaagaggaatacgtccgcttcgacagcgacgtgggcgagtttagagccgtgacagaactgggcagacccgacgaggaatactggaacagccagaaggacttcctggaagatcggagagccgccgtggacacctactgccgacacaattatggcgtgggagagtccttcaccgtgcagagaagagtgcacctcgagggacagcctaaggccaatcctaccgtgacactgttccctccaagcagcgaagaactccaggccaacaaggccacacttgtgtgcctgatctccgacttctaccctggggctgtgacagtggcttggaaggccgatggatctcctgtgaaagccggcgtggaaaccaccaagccatccaagcagagcaacaacaaatacgccgccagctcctacctgagcctgacacctgagcagtggaagtcccacagatcctacagctgccaagtgacccacgaaggcagcaccgtggaaaagacagtggcccctacagagtgcagcggatcccagagcttcggcctgctggaccccaagctgtgctacctgctggatggcatcctgttcatctacggcgtgatcctgaccgccctgttcctgagagtgaagttcagcagaagcgccgacgcccctgcctaccagcagggacagaaccaactgtacaacgagctgaacctgggcagacgggaagagtacgacgtgctggacaagcggagaggcagggaccctgagatgggcggaaagccccggagaaagaacccccaggaaggactgtataacgaactccagaaagacaagatggccgaagcctacagcgagatcggcatgaagggcgagcggagaagaggcaagggccacgatggcctgtaccagggcctgagcaccgccaccaaggacacctatgacgccctgcacatgcaggccctgcctccaagaagggccaagcgatctggatctggagcaacaaacttctcactactcaaacaagcaggtgacgtggaggagaatcccgggcctactagtatggactggatttggcgcatccttttccttgtcggcgctgctaccggcgcgcattccttcgaaatcaaagaggaacacgtcatcatccaggccgagttctatctgaaccccgaccagagcggcgagttcatgttcgacttcgacggcgacgagatttttcacgtggacatggctaagaaagaaaccgtgtggcggctggaagagttcggcagattcgccagctttgaagcccaaggcgctctggctaatatcgccgtggacaaggccaacctggaaattatgaccaagcggagcaactacacccctatcaccaacgtgccagcctctacaaagggaccctccgtgtttcctctggctcccagcagcaagtctacaagcggaggaacagccgctctgggctgcctggtcaaggattactttcccgagcctgtgaccgtgtcctggaatagcggagcactgacaagcggcgtgcacacctttccagccgtgctgcaaagcagcggcctgtactctctgagcagcgtggtcacagtgcctagctctagcctgggcacccagacctacatctgcaatgtgaaccacaagcctagcaacaccaaggtggacaagagagtggaacccaagagctgtggtacccagagttttgggttgttggaccctaaattgtgctatctgttggacggaatcctgttcatttacggagtgatcctgaccgcattgttcctgcgggttaagttttccagatccgcagacgcacccgcttaccaacaagggcagaaccaactctacaatgaacttaatttggggcggagggaagagtacgacgttctggacaaaaggaggggacgagatcccgagatgggcggaaagcctcgaaggaagaatccgcaagaggggctttataacgaactccagaaagataaaatggcagaagcctatagtgagattgggatgaagggagaaaggaggaggggtaaaggtcacgatgggttgtaccaaggattgagcacagccactaaagatacctatgatgcgctccacatgcaggccctgccgccaagataa

SEQ ID NO: 23784 - DNA, 2118 bp, synthetic construct
  source 1..2118: mol_type = other DNA
atggccttaccagtgaccgccttgctcctgccgctggccttgctgctccacgccgccaggccggcatgccgcttctacaagaccctgagagccgaacagggtaccggcggaggcggatctggcggcggaggtagcggtggcggaggatctgaattcggcgataccagacctagattcctggaatactctaccagcgagtgccacttcttcaacggaaccgagagagtgcggttcctggatcggtacttctacaatcaagaggaatacgtccgcttcgacagcgacgtgggcgagtttagagccgtgacagaactgggcagacccgacgaggaatactggaacagccagaaggacttcctggaagatcggagagccgccgtggacacctactgccgacacaattatggcgtgggagagtccttcaccgtgcagagaagagtgcacctcgagggacagcctaaggccaatcctaccgtgacactgttccctccaagcagcgaagaactccaggccaacaaggccacacttgtgtgcctgatctccgacttctaccctggggctgtgacagtggcttggaaggccgatggatctcctgtgaaagccggcgtggaaaccaccaagccatccaagcagagcaacaacaaatacgccgccagctcctacctgagcctgacacctgagcagtggaagtcccacagatcctacagctgccaagtgacccacgaaggcagcaccgtggaaaagacagtggcccctacagagtgcagcggatcccagagcttcggcctgctggaccccaagctgtgctacctgctggatggcatcctgttcatctacggcgtgatcctgaccgccctgttcctgagagtgaagttcagcagaagcgccgacgcccctgcctaccagcagggacagaaccaactgtacaacgagctgaacctgggcagacgggaagagtacgacgtgctggacaagcggagaggcagggaccctgagatgggcggaaagccccggagaaagaacccccaggaaggactgtataacgaactccagaaagacaagatggccgaagcctacagcgagatcggcatgaagggcgagcggagaagaggcaagggccacgatggcctgtaccagggcctgagcaccgccaccaaggacacctatgacgccctgcacatgcaggccctgcctccaagaagggccaagcgatctggatctggagcaacaaacttctcactactcaaacaagcaggtgacgtggaggagaatcccgggcctactagtatggactggatttggcgcatccttttccttgtcggcgctgctaccggcgcgcattccttcgaaatcaaagaggaacacgtcatcatccaggccgagttctatctgaaccccgaccagagcggcgagttcatgttcgacttcgacggcgacgagatttttcacgtggacatggctaagaaagaaaccgtgtggcggctggaagagttcggcagattcgccagctttgaagcccaaggcgctctggctaatatcgccgtggacaaggccaacctggaaattatgaccaagcggagcaactacacccctatcaccaacgtgccagcctctacaaagggaccctccgtgtttcctctggctcccagcagcaagtctacaagcggaggaacagccgctctgggctgcctggtcaaggattactttcccgagcctgtgaccgtgtcctggaatagcggagcactgacaagcggcgtgcacacctttccagccgtgctgcaaagcagcggcctgtactctctgagcagcgtggtcacagtgcctagctctagcctgggcacccagacctacatctgcaatgtgaaccacaagcctagcaacaccaaggtggacaagagagtggaacccaagagctgtggtaccatcactcaaggtttggcagtgtcaaccatctcatcattctttccacctggctaccaagtgtccttctgcctggtcatggtgctgctgttcgccgtggataccggcctgtacttcagcgtcaagaccaacatccggtccagcaccagagactggaaggaccacaagttcaagtggcggaaggaccctcaggacaag

SEQ ID NO: 23785 - DNA, 2130 bp, synthetic construct
  source 1..2130: mol_type = other DNA
atggccttaccagtgaccgccttgctcctgccgctggccttgctgctccacgccgccaggccggcatgccgcttctacaagaccctgagagccgaacagggtaccggcggaggcggatctggcggcggaggtagcggtggcggaggatctgaattcggcgataccagacctagattcctggaatactctaccagcgagtgccacttcttcaacggaaccgagagagtgcggttcctggatcggtacttctacaatcaagaggaatacgtccgcttcgacagcgacgtgggcgagtttagagccgtgacagaactgggcagacccgacgaggaatactggaacagccagaaggacttcctggaagatcggagagccgccgtggacacctactgccgacacaattatggcgtgggagagtccttcaccgtgcagagaagagtgcacctcgagggacagcctaaggccaatcctaccgtgacactgttccctccaagcagcgaagaactccaggccaacaaggccacacttgtgtgcctgatctccgacttctaccctggggctgtgacagtggcttggaaggccgatggatctcctgtgaaagccggcgtggaaaccaccaagccatccaagcagagcaacaacaaatacgccgccagctcctacctgagcctgacacctgagcagtggaagtcccacagatcctacagctgccaagtgacccacgaaggcagcaccgtggaaaagacagtggcccctacagagtgcagcggatcccagagcttcggcctgctggaccccaagctgtgctacctgctggatggcatcctgttcatctacggcgtgatcctgaccgccctgttcctgagagtgaagttcagcagaagcgccgacgcccctgcctaccagcagggacagaaccaactgtacaacgagctgaacctgggcagacgggaagagtacgacgtgctggacaagcggagaggcagggaccctgagatgggcggaaagccccggagaaagaacccccaggaaggactgtataacgaactccagaaagacaagatggccgaagcctacagcgagatcggcatgaagggcgagcggagaagaggcaagggccacgatggcctgtaccagggcctgagcaccgccaccaaggacacctatgacgccctgcacatgcaggccctgcctccaagaagggccaagcgatctggatctggagcaacaaacttctcactactcaaacaagcaggtgacgtggaggagaatcccgggcctactagtatggactggatttggcgcatccttttccttgtcggcgctgctaccggcgcgcattccttcgaaatcaaagaggaacacgtcatcatccaggccgagttctatctgaaccccgaccagagcggcgagttcatgttcgacttcgacggcgacgagatttttcacgtggacatggctaagaaagaaaccgtgtggcggctggaagagttcggcagattcgccagctttgaagcccaaggcgctctggctaatatcgccgtggacaaggccaacctggaaattatgaccaagcggagcaactacacccctatcaccaacgtgccagcctctacaaagggaccctccgtgtttcctctggctcccagcagcaagtctacaagcggaggaacagccgctctgggctgcctggtcaaggattactttcccgagcctgtgaccgtgtcctggaatagcggagcactgacaagcggcgtgcacacctttccagccgtgctgcaaagcagcggcctgtactctctgagcagcgtggtcacagtgcctagctctagcctgggcacccagacctacatctgcaatgtgaaccacaagcctagcaacaccaaggtggacaagagagtggaacccaagagctgtggtaccctcggagaaccacagctctgttacattctggatgctatcctgttcctctatgggatcgtcctgacactcctgtattgcagactcaaaattcaagttcgcaaagccgccattacctcttacgagaagagtgatggggtgtacacaggactgtctacccggaatcaagaaacctacgaaaccctcaaacatgagaagccacctcagtaa

SEQ ID NO: 23786 - DNA, 2478 bp, synthetic construct
  source 1..2478: mol_type = other DNA
atggccttaccagtgaccgccttgctcctgccgctggccttgctgctccacgccgccaggccggcatgccgcttctacaagaccctgagagccgaacagggtaccggcggaggcggatctggcggcggaggtagcggtggcggaggatctgaattcggcgataccagacctagattcctggaatactctaccagcgagtgccacttcttcaacggaaccgagagagtgcggttcctggatcggtacttctacaatcaagaggaatacgtccgcttcgacagcgacgtgggcgagtttagagccgtgacagaactgggcagacccgacgaggaatactggaacagccagaaggacttcctggaagatcggagagccgccgtggacacctactgccgacacaattatggcgtgggagagtccttcaccgtgcagagaagagtgcacctcgagggacagcctaaggccaatcctaccgtgacactgttccctccaagcagcgaagaactccaggccaacaaggccacacttgtgtgcctgatctccgacttctaccctggggctgtgacagtggcttggaaggccgatggatctcctgtgaaagccggcgtggaaaccaccaagccatccaagcagagcaacaacaaatacgccgccagctcctacctgagcctgacacctgagcagtggaagtcccacagatcctacagctgccaagtgacccacgaaggcagcaccgtggaaaagacagtggcccctacagagtgcagcggatcccagagcttcggcctgctggaccccaagctgtgctacctgctggatggcatcctgttcatctacggcgtgatcctgaccgccctgttcctgagagtgaagttcagcagaagcgccgacgcccctgcctaccagcagggacagaaccaactgtacaacgagctgaacctgggcagacgggaagagtacgacgtgctggacaagcggagaggcagggaccctgagatgggcggaaagccccggagaaagaacccccaggaaggactgtataacgaactccagaaagacaagatggccgaagcctacagcgagatcggcatgaagggcgagcggagaagaggcaagggccacgatggcctgtaccagggcctgagcaccgccaccaaggacacctatgacgccctgcacatgcaggccctgcctccaagaagggccaagcgatctggatctggagcaacaaacttctcactactcaaacaagcaggtgacgtggaggagaatcccgggcctactagtatggactggatttggcgcatccttttccttgtcggcgctgctaccggcgcgcattccttcgaaatcaaagaggaacacgtcatcatccaggccgagttctatctgaaccccgaccagagcggcgagttcatgttcgacttcgacggcgacgagatttttcacgtggacatggctaagaaagaaaccgtgtggcggctggaagagttcggcagattcgccagctttgaagcccaaggcgctctggctaatatcgccgtggacaaggccaacctggaaattatgaccaagcggagcaactacacccctatcaccaacgtgccagcctctacaaagggaccctccgtgtttcctctggctcccagcagcaagtctacaagcggaggaacagccgctctgggctgcctggtcaaggattactttcccgagcctgtgaccgtgtcctggaatagcggagcactgacaagcggcgtgcacacctttccagccgtgctgcaaagcagcggcctgtactctctgagcagcgtggtcacagtgcctagctctagcctgggcacccagacctacatctgcaatgtgaaccacaagcctagcaacaccaaggtggacaagagagtggaacccaagagctgtggtacccagagcttcggcctgctggaccccaagctgtgctacctgctggatggcatcctgttcatctacggcgtgatcctgaccgccctgttcctgaaacggggcagaaagaaactcctgtatatattcaaacaaccatttatgagaccagtacaaactactcaagaggaagatggctgtagctgccgatttccagaagaagaagaaggaggatgtgaactgagagtgaagttcagcagaagcgccgacgcccctgcctaccagcagggacagaaccaactgtacaacgagctgaacctgggcagacgggaagagtacgacgtgctggacaagcggagaggcagggaccctgagatgggcggaaagccccggagaaagaacccccaggaaggactgtataacgaactccagaaagacaagatggccgaagcctacagcgagatcggcatgaagggcgagcggagaagaggcaagggccacgatggcctgtaccagggcctgagcaccgccaccaaggacacctatgacgccctgcacatgcaggccctgcctccaagataa

SEQ ID NO: 23787 - DNA, 3282 bp, synthetic construct
  source 1..3282: mol_type = other DNA
atggccttaccagtgaccgccttgctcctgccgctggccttgctgctccacgccgccaggccggcatgccgcttctacaagaccctgagagccgaacagggtaccggcggaggcggatctggcggcggaggtagcggtggcggaggatctgaattcggcgataccagacctagattcctggaatactctaccagcgagtgccacttcttcaacggaaccgagagagtgcggttcctggatcggtacttctacaatcaagaggaatacgtccgcttcgacagcgacgtgggcgagtttagagccgtgacagaactgggcagacccgacgaggaatactggaacagccagaaggacttcctggaagatcggagagccgccgtggacacctactgccgacacaattatggcgtgggagagtccttcaccgtgcagagaagagtgcacctcgagggacagcctaaggccaatcctaccgtgacactgttccctccaagcagcgaagaactccaggccaacaaggccacacttgtgtgcctgatctccgacttctaccctggggctgtgacagtggcttggaaggccgatggatctcctgtgaaagccggcgtggaaaccaccaagccatccaagcagagcaacaacaaatacgccgccagctcctacctgagcctgacacctgagcagtggaagtcccacagatcctacagctgccaagtgacccacgaaggcagcaccgtggaaaagacagtggcccctacagagtgcagcggatcccagagcttcggcctgctggaccccaagctgtgctacctgctggatggcatcctgttcatctacggcgtgatcctgaccgccctgttcctgagagtgaagttcagcagaagcgccgacgcccctgcctaccagcagggacagaaccaactgtacaacgagctgaacctgggcagacgggaagagtacgacgtgctggacaagcggagaggcagggaccctgagatgggcggaaagccccggagaaagaacccccaggaaggactgtataacgaactccagaaagacaagatggccgaagcctacagcgagatcggcatgaagggcgagcggagaagaggcaagggccacgatggcctgtaccagggcctgagcaccgccaccaaggacacctatgacgccctgcacatgcaggccctgcctccaagaagggccaagcgatctggatctggagcaacaaacttctcactactcaaacaagcaggtgacgtggaggagaatcccgggcctactagtatggactggatttggcgcatccttttccttgtcggcgctgctaccggcgcgcattccttcgaaatcaaagaggaacacgtcatcatccaggccgagttctatctgaaccccgaccagagcggcgagttcatgttcgacttcgacggcgacgagatttttcacgtggacatggctaagaaagaaaccgtgtggcggctggaagagttcggcagattcgccagctttgaagcccaaggcgctctggctaatatcgccgtggacaaggccaacctggaaattatgaccaagcggagcaactacacccctatcaccaacgtgccagcctctacaaagggaccctccgtgtttcctctggctcccagcagcaagtctacaagcggaggaacagccgctctgggctgcctggtcaaggattactttcccgagcctgtgaccgtgtcctggaatagcggagcactgacaagcggcgtgcacacctttccagccgtgctgcaaagcagcggcctgtactctctgagcagcgtggtcacagtgcctagctctagcctgggcacccagacctacatctgcaatgtgaaccacaagcctagcaacaccaaggtggacaagagagtggaacccaagagctgtggtacccagagcttcggcctgctggaccccaagctgtgctacctgctggatggcatcctgttcatctacggcgtgatcctgaccgccctgttcctgaaacggggcagaaagaaactcctgtatatattcaaacaaccatttatgagaccagtacaaactactcaagaggaagatggctgtagctgccgatttccagaagaagaagaaggaggatgtgaactgagagtgaagttcagcagaagcgccgacgcccctgcctaccagcagggacagaaccaactgtacaacgagctgaacctgggcagacgggaagagtacgacgtgctggacaagcggagaggcagggaccctgagatgggcggaaagccccggagaaagaacccccaggaaggactgtataacgaactccagaaagacaagatggccgaagcctacagcgagatcggcatgaagggcgagcggagaagaggcaagggccacgatggcctgtaccagggcctgagcaccgccaccaaggacacctatgacgccctgcacatgcaggccctgcctccaagacgcgccaagagaagcggatctggcgtgaagcagaccctgaatttcgacctgctgaagctggctggcgacgtggaatccaacccaggcccttctagaggccatatggctctgcctgtgacagctctgctgctgcctctggcactgctgcttcatgctgctagacctagccagtttagagtgtcccctctggacagaacctggaacctgggcgagacagtggaactgaagtgccaggtgctgctgagcaaccctacaagcggctgctcctggctgtttcagcctagaggtgcagccgcctctcctacctttctgctgtacctgagccagaacaagcccaaggccgccgaaggactggacacccagagattcagcggcaagagactgggcgacaccttcgtgctgaccctgagcgacttcagaagagagaacgagggctactacttctgtagcgccctgagcaacagcatcatgtacttcagccacttcgtgcccgtgtttctgcccgccaagcctacaacaacccctgctcctagacctcctacaccagctcctacaatcgccagccagcctctgtctctcagacccgaagcctgtagacctgctgctggcggagctgtgcataccagaggactggatttcgcctgcgacatctacatctgggctcctctggctggcacatgtggcgtgctgctgctgtccctggtcatcaccctgtactgcaaccaccggaacaggcggagagtgtgcaagtgccctagacctgtggtcaagagcggcgacaagcctagcctgagcgccagatatgtt

SEQ ID NO: 23788 - DNA, 1830 bp, synthetic construct
  source 1..1830: mol_type = other DNA
atggccttaccagtgaccgccttgctcctgccgctggccttgctgctccacgccgccaggccggcatgccgcttctacaagaccctgagagccgaacagggtaccggcggaggcggatctggcggcggaggtagcggtggcggaggatctgaattcggcgataccagacctagattcctggaatactctaccagcgagtgccacttcttcaacggaaccgagagagtgcggttcctggatcggtacttctacaatcaagaggaatacgtccgcttcgacagcgacgtgggcgagtttagagccgtgacagaactgggcagacccgacgaggaatactggaacagccagaaggacttcctggaagatcggagagccgccgtggacacctactgccgacacaattatggcgtgggagagtccttcaccgtgcagagaagagtgcacctcgagggacagcctaaggccaatcctaccgtgacactgttccctccaagcagcgaagaactccaggccaacaaggccacacttgtgtgcctgatctccgacttctaccctggggctgtgacagtggcttggaaggccgatggatctcctgtgaaagccggcgtggaaaccaccaagccatccaagcagagcaacaacaaatacgccgccagctcctacctgagcctgacacctgagcagtggaagtcccacagatcctacagctgccaagtgacccacgaaggcagcaccgtggaaaagacagtggcccctacagagtgcagcggcagagccgattgcggctttaccagcgagagctaccagcagggcgtgctgagcgccaccatcctgtacgagatcctgctgggcaaggccaccctgtacgccgtgctggtgtctgccctggtgctgatggctatggtcaagcggaaggacagccggggaagggccaagcgatctggatctggagcaacaaacttctcactactcaaacaagcaggtgacgtggaggagaatcccgggcctactagtatggactggatttggcgcatccttttccttgtcggcgctgctaccggcgcgcattccttcgaaatcaaagaggaacacgtcatcatccaggccgagttctatctgaaccccgaccagagcggcgagttcatgttcgacttcgacggcgacgagatttttcacgtggacatggctaagaaagaaaccgtgtggcggctggaagagttcggcagattcgccagctttgaagcccaaggcgctctggctaatatcgccgtggacaaggccaacctggaaattatgaccaagcggagcaactacacccctatcaccaacgtgccaacgcgtgcctctacaaagggaccctccgtgtttcctctggctcccagcagcaagtctacaagcggaggaacagccgctctgggctgcctggtcaaggattactttcccgagcctgtgaccgtgtcctggaatagcggagcactgacaagcggcgtgcacacctttccagccgtgctgcaaagcagcggcctgtactctctgagcagcgtggtcacagtgcctagctctagcctgggcacccagacctacatctgcaatgtgaaccacaagcctagcaacaccaaggtggacaagagagtggaacccaagagctgtatccccgaggacacattcttcccaagccccgagagcagctgcgacgtgaagctggtggaaaagagcttcgagacagacaccaacctgaacttccagaacctgagcgtgatcggcttcagaatcctgctgctgaaagtggccggctttaacctgctgatgaccctgcggctgtggtccagc

SEQ ID NO: 23789 - DNA, 1896 bp, synthetic construct
  source 1..1896: mol_type = other DNA
atggccttaccagtgaccgccttgctcctgccgctggccttgctgctccacgccgccaggccggcatgccgcttctacaagaccctgagagccgaacagggtaccggcggaggcggatctggcggcggaggtagcggtggcggaggatctgaattcggcgataccagacctagattcctggaatactctaccagcgagtgccacttcttcaacggaaccgagagagtgcggttcctggatcggtacttctacaatcaagaggaatacgtccgcttcgacagcgacgtgggcgagtttagagccgtgacagaactgggcagacccgacgaggaatactggaacagccagaaggacttcctggaagatcggagagccgccgtggacacctactgccgacacaattatggcgtgggagagtccttcaccgtgcagagaagagtgcacctcgagggacagcctaaggccaatcctaccgtgacactgttccctccaagcagcgaagaactccaggccaacaaggccacacttgtgtgcctgatctccgacttctaccctggggctgtgacagtggcttggaaggccgatggatctcctgtgaaagccggcgtggaaaccaccaagccatccaagcagagcaacaacaaatacgccgccagctcctacctgagcctgacacctgagcagtggaagtcccacagatcctacagctgccaagtgacccacgaaggcagcaccgtggaaaagacagtggcccctacagagtgcagccccatcaagaccgatgtgattacaatggaccccaaggacaactgctccaaggacgccaacgataccctgctgctccagctgaccaacaccagcgcctactacatgtacttgttgctgctgctgaagtccgtggtgtacttcgccatcatcacatgctgcctgctgcggagaaccgccttctgctgcaacggcgagaagtctagggccaagcgatctggatctggagcaacaaacttctcactactcaaacaagcaggtgacgtggaggagaatcccgggcctactagtatggactggatttggcgcatccttttccttgtcggcgctgctaccggcgcgcattccttcgaaatcaaagaggaacacgtcatcatccaggccgagttctatctgaaccccgaccagagcggcgagttcatgttcgacttcgacggcgacgagatttttcacgtggacatggctaagaaagaaaccgtgtggcggctggaagagttcggcagattcgccagctttgaagcccaaggcgctctggctaatatcgccgtggacaaggccaacctggaaattatgaccaagcggagcaactacacccctatcaccaacgtgccaacgcgtgcctctacaaagggaccctccgtgtttcctctggctcccagcagcaagtctacaagcggaggaacagccgctctgggctgcctggtcaaggattactttcccgagcctgtgaccgtgtcctggaatagcggagcactgacaagcggcgtgcacacctttccagccgtgctgcaaagcagcggcctgtactctctgagcagcgtggtcacagtgcctagctctagcctgggcacccagacctacatctgcaatgtgaaccacaagcctagcaacaccaaggtggacaagagagtggaacccaagagctgtgaagtgaaaaccgactccaccgaccacgtgaagcccaaagagacagagaacaccaagcagcccagcaagagctgccacaagcccaaggccatcgtgcacaccgagaaagtgaacatgatgagcctgaccgtgctgggcctgcggatgctgttcgccaaaaccgtggccgtgaacttcctgctgaccgccaagctgttcttcctc

SEQ ID NO: 23790 - DNA, 1818 bp, synthetic construct
  source 1..1818: mol_type = other DNA
atggccttaccagtgaccgccttgctcctgccgctggccttgctgctccacgccgccaggccggcatgccgcttctacaagaccctgagagccgaacagggtaccggcggaggcggatctggcggcggaggtagcggtggcggaggatctgaattcggcgataccagacctagattcctggaatactctaccagcgagtgccacttcttcaacggaaccgagagagtgcggttcctggatcggtacttctacaatcaagaggaatacgtccgcttcgacagcgacgtgggcgagtttagagccgtgacagaactgggcagacccgacgaggaatactggaacagccagaaggacttcctggaagatcggagagccgccgtggacacctactgccgacacaattatggcgtgggagagtccttcaccgtgcagagaagagtgcacctcgaggacctgaagaacgtgttcccacctgaggtggccgtgttcgagcctagcgaggccgagatcagccacacccagaaagccaccctcgtgtgcctggctaccggcttctaccccgaccatgtggaactgtcttggtgggtcaacggcaaagaggtgcacagcggcgtgtgtaccgacccccagccactgaaagaacagcccgccctgaacgacagccggtactgcctgagcagcagactgagagtgtccgccaccttctggcagaacccccggaaccacttcagatgccaggtgcagttctacggcctgagcgagaacgacgagtggacccaggacagagccaagcccgtgacccagatcgtgtctgccgaagcctggggcagagccgattgcggctttaccagcgagagctaccagcagggcgtgctgagcgccaccatcctgtacgagatcctgctgggcaaggccaccctgtacgccgtgctggtgtctgccctggtgctgatggctatggtcaagcggaaggacagccggggaagggccaagcgatctggatctggagcaacaaacttctcactactcaaacaagcaggtgacgtggaggagaatcccgggcctactagtatggactggatttggcgcatccttttccttgtcggcgctgctaccggcgcgcattccttcgaaatcaaagaggaacacgtcatcatccaggccgagttctatctgaaccccgaccagagcggcgagttcatgttcgacttcgacggcgacgagatttttcacgtggacatggctaagaaagaaaccgtgtggcggctggaagagttcggcagattcgccagctttgaagcccaaggcgctctggctaatatcgccgtggacaaggccaacctggaaattatgaccaagcggagcaactacacccctatcaccaacgtgccaacgcgtatccagaaccctgatcctgccgtgtaccagctgcgggatagcaagagcagcgacaagagcgtgtgtctgttcaccgacttcgacagccagaccaacgtgtcccagagcaaggactccgacgtgtacatcaccgataagtgcgtgctggacatgcggagcatggacttcaagagcaactccgccgtggcctggtccaacaagtccgatttcgcctgcgccaacgccttcaacaacagcattatccccgaggacacattcttcccaagccccgagagcagctgcgacgtgaagctggtggaaaagagcttcgagacagacaccaacctgaacttccagaacctgagcgtgatcggcttcagaatcctgctgctgaaagtggccggctttaacctgctgatgaccctgcggctgtggtccagc

SEQ ID NO: 23791 - DNA, 1757 bp, synthetic construct
  source 1..1757: mol_type = other DNA
atggccttaccagtgaccgccttgctcctgccgctggccttgctgctccacgccgccaggccggcatgccgcttctacaagaccctgagagccgaacagggtaccggcggaggcggatctggcggcggaggtagcggtggcggaggatctgaattcggcgataccagacctagattcctggaatactctaccagcgagtgccacttcttcaacggaaccgagagagtgcggttcctggatcggtacttctacaatcaagaggaatacgtccgcttcgacagcgacgtgggcgagtttagagccgtgacagaactgggcagacccgacgaggaatactggaacagccagaaggacttcctggaagatcggagagccgccgtggacacctactgccgacacaattatggcgtgggagagtccttcaccgtgcagagaagagtgcacctcgagatccagaaccctgatcctgccgtgtaccagctgcgggatagcaagagcagcgacaagagcgtgtgtctgttcaccgacttcgacagccagaccaacgtgtcccagagcaaggactccgacgtgtacatcaccgataagtgcgtgctggacatgcggagcatggacttcaagagcaactccgccgtggcctggtccaacaagtccgatttcgcctgcgccaacgccttcaacaacagcattatccccgaggacacattcttcccaagcagcgacgtgccctgcgacgtgaagctggtggaaaagagcttcgagacagacaccaacctgaacttccagaacctgagcgtgatcggcttcagaatcctgctgctgaaagtggccggctttaacctgctgatgaccctgcggctgtggtccagccgcgccaagagaagcggatctggcgtgaagcagaccctgaatttcgacctgctgaagctggctggcgacgtggaatccaacccaggccctactagtatggactggatttggcgcatccttttccttgtcggcgctgctaccggcgcgcattccttcgaaatcaaagaggaacacgtcatcatccaggccgagttctatctgaaccccgaccagagcggcgagttcatgttcgacttcgacggcgacgagatttttcacgtggacatggctaagaaagaaaccgtgtggcggctggaagagttcggcagattcgccagctttgaagcccaaggcgctctggctaatatcgccgtggacaaggccaacctggaaattatgaccaagcggagcaactacacccctatcaccaacgtgccaacgcgtgaggacctgaagaacgtgttcccacctgaggtggccgtgttcgagcctagcaaggccgagatcgcccacacccagaaagccaccctcgtgtgcctggctaccggcttctaccccgaccatgtggaactgtcttggtgggtcaacggcaaagaggtgcacagcggcgtgtgtaccgacccccagccactgaaagaacagcccgccctgaacgacagccggtactgcctgagcagcagactgagagtgtccgccaccttctggcagaacccccggaaccacttcagatgccaggtgcagttctacggcctgagcgagaacgacgagtggacccaggacagagccaagcccgtgacccagatcgtgtctgccgaagcctggggcagagccgattgcggcatcaccagcgccagctaccaccagggcgtgctgagcgccaccatcctgtacgagatcctgctgggcaa

SEQ ID NO: 23792 - DNA, 1842 bp, synthetic construct
  source 1..1842: mol_type = other DNA
atggccttaccagtgaccgccttgctcctgccgctggccttgctgctccacgccgccaggccggcatgccgcttctacaagaccctgagagccgaacagggtaccggcggaggcggatctggcggcggaggtagcggtggcggaggatctgaattcggcgataccagacctagattcctggaatactctaccagcgagtgccacttcttcaacggaaccgagagagtgcggttcctggatcggtacttctacaatcaagaggaatacgtccgcttcgacagcgacgtgggcgagtttagagccgtgacagaactgggcagacccgacgaggaatactggaacagccagaaggacttcctggaagatcggagagccgccgtggacacctactgccgacacaattatggcgtgggagagtccttcaccgtgcagagaagagtgcacctcgaggacaagcagctggacgccgacgtgtcccccaagcctaccatcttcctgccctctatcgccgagacaaagctccagaaggccggcacctacctgtgcctgctggaaaagttcttcccagatgtgattaagatccactggcaggaaaagaagtccaacaccatcctgggcagccaggaaggcaacaccatgaagaccaacgacacctacatgaagttcagctggctgaccgtgcccgagaagtccctggacaaagaacacagatgcatcgtgcggcacgaaaacaacaagaacggcgtggaccaggaaatcatcttcccacccatcaagaccgatgtgattacaatggaccccaaggacaactgctccaaggacgccaacgataccctgctgctccagctgaccaacaccagcgcctactacatgtacttgttgctgctgctgaagtccgtggtgtacttcgccatcatcacatgctgcctgctgcggagaaccgccttctgctgcaacggcgagaagtctagggccaagcgatctggatctggagcaacaaacttctcactactcaaacaagcaggtgacgtggaggagaatcccgggcctactagtatggactggatttggcgcatccttttccttgtcggcgctgctaccggcgcgcattccttcgaaatcaaagaggaacacgtcatcatccaggccgagttctatctgaaccccgaccagagcggcgagttcatgttcgacttcgacggcgacgagatttttcacgtggacatggctaagaaagaaaccgtgtggcggctggaagagttcggcagattcgccagctttgaagcccaaggcgctctggctaatatcgccgtggacaaggccaacctggaaattatgaccaagcggagcaactacacccctatcaccaacgtgccaacgcgtagccagcctcacaccaagcccagcgtgttcgtgatgaagaacggcaccaacgtggcctgcctcgtgaaagagttctaccccaaggacatcaggatcaacctggtgtccagcaagaagatcaccgagttcgaccccgccatcgtgatctcccccagcggcaagtacaacgccgtgaagctggggaagtacgaggacagcaacagcgtgacctgctccgtgcagcacgacaacaagaccgtgcacagcaccgactttgaagtgaaaaccgactccaccgaccacgtgaagcccaaagagacagagaacaccaagcagcccagcaagagctgccacaagcccaaggccatcgtgcacaccgagaaagtgaacatgatgagcctgaccgtgctgggcctgcggatgctgttcgccaaaaccgtggccgtgaacttcctgctgaccgccaagctgttcttcctc

SEQ ID NO: 23793 - DNA, 1842 bp, synthetic construct
  source 1..1842: mol_type = other DNA
atggccttaccagtgaccgccttgctcctgccgctggccttgctgctccacgccgccaggccggcatgccgcttctacaagaccctgagagccgaacagggtaccggcggaggcggatctggcggcggaggtagcggtggcggaggatctgaattcggcgataccagacctagattcctggaatactctaccagcgagtgccacttcttcaacggaaccgagagagtgcggttcctggatcggtacttctacaatcaagaggaatacgtccgcttcgacagcgacgtgggcgagtttagagccgtgacagaactgggcagacccgacgaggaatactggaacagccagaaggacttcctggaagatcggagagccgccgtggacacctactgccgacacaattatggcgtgggagagtccttcaccgtgcagagaagagtgcacctcgagagccagcctcacaccaagcccagcgtgttcgtgatgaagaacggcaccaacgtggcctgcctcgtgaaagagttctaccccaaggacatcaggatcaacctggtgtccagcaagaagatcaccgagttcgaccccgccatcgtgatctcccccagcggcaagtacaacgccgtgaagctggggaagtacgaggacagcaacagcgtgacctgctccgtgcagcacgacaacaagaccgtgcacagcaccgactttgaagtgaaaaccgactccaccgaccacgtgaagcccaaagagacagagaacaccaagcagcccagcaagagctgccacaagcccaaggccatcgtgcacaccgagaaagtgaacatgatgagcctgaccgtgctgggcctgcggatgctgttcgccaaaaccgtggccgtgaacttcctgctgaccgccaagctgttcttcctcagggccaagcgatctggatctggagcaacaaacttctcactactcaaacaagcaggtgacgtggaggagaatcccgggcctactagtatggactggatttggcgcatccttttccttgtcggcgctgctaccggcgcgcattccttcgaaatcaaagaggaacacgtcatcatccaggccgagttctatctgaaccccgaccagagcggcgagttcatgttcgacttcgacggcgacgagatttttcacgtggacatggctaagaaagaaaccgtgtggcggctggaagagttcggcagattcgccagctttgaagcccaaggcgctctggctaatatcgccgtggacaaggccaacctggaaattatgaccaagcggagcaactacacccctatcaccaacgtgccaacgcgtgacaagcagctggacgccgacgtgtcccccaagcctaccatcttcctgccctctatcgccgagacaaagctccagaaggccggcacctacctgtgcctgctggaaaagttcttcccagatgtgattaagatccactggcaggaaaagaagtccaacaccatcctgggcagccaggaaggcaacaccatgaagaccaacgacacctacatgaagttcagctggctgaccgtgcccgagaagtccctggacaaagaacacagatgcatcgtgcggcacgaaaacaacaagaacggcgtggaccaggaaatcatcttcccacccatcaagaccgatgtgattacaatggaccccaaggacaactgctccaaggacgccaacgataccctgctgctccagctgaccaacaccagcgcctactacatgtacttgttgctgctgctgaagtccgtggtgtacttcgccatcatcacatgctgcctgctgcggagaaccgccttctgctgcaacggcgagaagtct

SEQ ID NO: 23794 - DNA, 1818 bp, synthetic construct
  source 1..1818: mol_type = other DNA
atggccttaccagtgaccgccttgctcctgccgctggccttgctgctccacgccgccaggccggcatgccgcttctacaagaccctgagagccgaacagggtaccggcggaggcggatctggcggcggaggtagcggtggcggaggatctgaattcggcgataccagacctagattcctggaatactctaccagcgagtgccacttcttcaacggaaccgagagagtgcggttcctggatcggtacttctacaatcaagaggaatacgtccgcttcgacagcgacgtgggcgagtttagagccgtgacagaactgggcagacccgacgaggaatactggaacagccagaaggacttcctggaagatcggagagccgccgtggacacctactgccgacacaattatggcgtgggagagtccttcaccgtgcagagaagagtgcacctcgaggacctgaagaacgtgttcccacctgaggtggccgtgttcgagcctagcgaggccgagatcagccacacccagaaagccaccctcgtgtgcctggctaccggcttctaccccgaccatgtggaactgtcttggtgggtcaacggcaaagaggtgcacagcggcgtgtctaccgacccccagccactgaaagaacagcccgccctgaacgacagccggtactgcctgagcagcagactgagagtgtccgccaccttctggcagaacccccggaaccacttcagatgccaggtgcagttctacggcctgagcgagaacgacgagtggacccaggacagagccaagcccgtgacccagatcgtgtctgccgaagcctggggcagagccgattgcgacgtgaagctggtggaaaagagcttcgagacagacaccaacctgaacttccagaacctgagcgtgatcggcttcagaatcctgctgctgaaagtggccggctttaacctgctgatgaccctgcggctgtggtccagcagggccaagcgatctggatctggagcaacaaacttctcactactcaaacaagcaggtgacgtggaggagaatcccgggcctactagtatggactggatttggcgcatccttttccttgtcggcgctgctaccggcgcgcattccttcgaaatcaaagaggaacacgtcatcatccaggccgagttctatctgaaccccgaccagagcggcgagttcatgttcgacttcgacggcgacgagatttttcacgtggacatggctaagaaagaaaccgtgtggcggctggaagagttcggcagattcgccagctttgaagcccaaggcgctctggctaatatcgccgtggacaaggccaacctggaaattatgaccaagcggagcaactacacccctatcaccaacgtgccaacgcgtatccagaaccctgatcctgccgtgtaccagctgcgggatagcaagagcagcgacaagagcgtgtgtctgttcaccgacttcgacagccagaccaacgtgtcccagagcaaggactccgacgtgtacatcaccgataagaccgtgctggacatgcggagcatggacttcaagagcaactccgccgtggcctggtccaacaagtccgatttcgcctgcgccaacgccttcaacaacagcattatccccgaggacacattcttcccaagccccgagagcagctgcggctttaccagcgagagctaccagcagggcgtgctgagcgccaccatcctgtacgagatcctgctgggcaaggccaccctgtacgccgtgctggtgtctgccctggtgctgatggctatggtcaagcggaaggacagccgggga

SEQ ID NO: 23795 - DNA, 23 bp, synthetic construct
  source 1..23: mol_type = other DNA
ggggggggggggggggggggggg

SEQ ID NO: 23796 - DNA, 1677 bp, synthetic construct
  source 1..1677: mol_type = other DNA
atggccttaccagtgaccgccttgctcctgccgctggccttgctgctccacgccgccaggccggacatccagatgacacagagccctagcagcctgtctgccagcgtgggagacagagtgaccatcacatgcaaggccagcgaccacatcaacaactggctggcctggtatcagcagaagcctggacaggcccctaagctgctgatctacggcgctaccacactggaaacaggcgtgcccagcagattttctggcagcggctctggcaccgactacaccctgacaatatccagcctccagcctgaggacttcgccacctactactgtcagcagagctggaacaccccttggacattcggccagggcaccaagctggaaatcaagagaggcggaggcggaagtggaggcggaggatctggcggcggaggctctcaagttcagcttcaacagcctggcgctgagctggtcaaacctggcgcttctgtgaagatgagctgcaaagccagcggctacgccttcagcagctactggatcaactggatgaagcagaaacccggccagggactcgaatggatcggccaaatctatcccggcgacggcgacaccaactacaacggcaagttcaagggcagagccacactgaccgccgatacctctagcagcacagcctacatgcagctgagcagcctgaccagcgaagatagcgccgtgtacttctgtgcccggtccatcacaacagtcgtgggctgcgctatggactattggggccagggaacaagcgtgaccgtgtctagtacgcgtggaatgaggactgaggatcttcccaaagctgtcgtctttctcgaaccccaatggtatcgggtgctcgaaaaagactctgtgacactgaaatgccaaggggcctactctcccgaggacaactccacacagtggtttcataatgagtccctcatcagctctcaggccagctcttatttcattgatgccgctacagtggacgactccggcgagtatcggtgtcagaccaatctgtctacactgtctgaccccgtgcagcttgaggtccacattggatggttgctcttgcaagccccacgctgggttttcaaagaggaagatccaatccatctgcggtgccacagctggaaaaacaccgctctccacaaagtcacatacctgcaaaatggcaaaggacgcaaatacttccatcacaattccgatttttacattccgaaggctaccctgaaagacagcggcagctatttctgccggggactcgtcggctccaagaatgtgtcctccgaaaccgtgaatatcacgattacccaaggactggctgtgcctacaatctctagcttctttccgcctggataccaagtctccttctgtcttgtgatggtcctcctgtttgctgtggacacaggactgtacttttccgtgaaaggtggatctggattcaatgtgctgatggtgcacagaagaagccacaccggcgagaggcccttccagtgtaatcagtgcggagccagcttcacccagagaggcaatctgctgcggcacatcagactgcacacaggcgagcggcctttcagatgccacctgtgcaattacgcctgccagagaagagatgccctgaccgcctctgccgaggccagacatattagagccgaaatgggc

SEQ ID NO: 23797 - DNA, 1674 bp, synthetic construct
  source 1..1674: mol_type = other DNA
atggccttaccagtgaccgccttgctcctgccgctggccttgctgctccacgccgccaggccggacatccagatgacacagagccctagcagcctgtctgccagcgtgggagacagagtgaccatcacatgcaaggccagcgaccacatcaacaactggctggcctggtatcagcagaagcctggacaggcccctaagctgctgatctacggcgctaccacactggaaacaggcgtgcccagcagattttctggcagcggctctggcaccgactacaccctgacaatatccagcctccagcctgaggacttcgccacctactactgtcagcagagctggaacaccccttggacattcggccagggcaccaagctggaaatcaagagaggcggaggcggaagtggaggcggaggatctggcggcggaggctctcaagttcagcttcaacagcctggcgctgagctggtcaaacctggcgcttctgtgaagatgagctgcaaagccagcggctacgccttcagcagctactggatcaactggatgaagcagaaacccggccagggactcgaatggatcggccaaatctatcccggcgacggcgacaccaactacaacggcaagttcaagggcagagccacactgaccgccgatacctctagcagcacagcctacatgcagctgagcagcctgaccagcgaagatagcgccgtgtacttctgtgcccggtccatcacaacagtcgtgggctgcgctatggactattggggccagggaacaagcgtgaccgtgtctagtacgcgtggaatgaggactgaggatcttcccaaagctgtcgtctttctcgaaccccaatggtatcgggtgctcgaaaaagactctgtgacactgaaatgccaaggggcctactctcccgaggacaactccacacagtggtttcataatgagtccctcatcagctctcaggccagctcttatttcattgatgccgctacagtggacgactccggcgagtatcggtgtcagaccaatctgtctacactgtctgaccccgtgcagcttgaggtccacattggatggttgctcttgcaagccccacgctgggttttcaaagaggaagatccaatccatctgcggtgccacagctggaaaaacaccgctctccacaaagtcacatacctgcaaaatggcaaaggacgcaaatacttccatcacaattccgatttttacattccgaaggctaccctgaaagacagcggcagctatttctgccggggactcgtcggctccaagaatgtgtcctccgaaaccgtgaatatcacgattacccaaggactggctgtgcctacaatctctagcttctttccgcctggataccaagtctccttctgtcttgtgatggtcctcctgtttgctgtggacacaggactgtacttttccgtgggtggatctggattcaatgtgctgatggtgcacagaagaagccacaccggcgagaggcccttccagtgtaatcagtgcggagccagcttcacccagagaggcaatctgctgcggcacatcagactgcacacaggcgagcggcctttcagatgccacctgtgcaattacgcctgccagagaagagatgccctgaccgcctctgccgaggccagacatattagagccgaaatgggc

SEQ ID NO: 23798 - DNA, 1671 bp, synthetic construct
  source 1..1671: mol_type = other DNA
atggccttaccagtgaccgccttgctcctgccgctggccttgctgctccacgccgccaggccggacatccagatgacacagagccctagcagcctgtctgccagcgtgggagacagagtgaccatcacatgcaaggccagcgaccacatcaacaactggctggcctggtatcagcagaagcctggacaggcccctaagctgctgatctacggcgctaccacactggaaacaggcgtgcccagcagattttctggcagcggctctggcaccgactacaccctgacaatatccagcctccagcctgaggacttcgccacctactactgtcagcagagctggaacaccccttggacattcggccagggcaccaagctggaaatcaagagaggcggaggcggaagtggaggcggaggatctggcggcggaggctctcaagttcagcttcaacagcctggcgctgagctggtcaaacctggcgcttctgtgaagatgagctgcaaagccagcggctacgccttcagcagctactggatcaactggatgaagcagaaacccggccagggactcgaatggatcggccaaatctatcccggcgacggcgacaccaactacaacggcaagttcaagggcagagccacactgaccgccgatacctctagcagcacagcctacatgcagctgagcagcctgaccagcgaagatagcgccgtgtacttctgtgcccggtccatcacaacagtcgtgggctgcgctatggactattggggccagggaacaagcgtgaccgtgtctagtacgcgtggaatgaggactgaggatcttcccaaagctgtcgtctttctcgaaccccaatggtatcgggtgctcgaaaaagactctgtgacactgaaatgccaaggggcctactctcccgaggacaactccacacagtggtttcataatgagtccctcatcagctctcaggccagctcttatttcattgatgccgctacagtggacgactccggcgagtatcggtgtcagaccaatctgtctacactgtctgaccccgtgcagcttgaggtccacattggatggttgctcttgcaagccccacgctgggttttcaaagaggaagatccaatccatctgcggtgccacagctggaaaaacaccgctctccacaaagtcacatacctgcaaaatggcaaaggacgcaaatacttccatcacaattccgatttttacattccgaaggctaccctgaaagacagcggcagctatttctgccggggactcgtcggctccaagaatgtgtcctccgaaaccgtgaatatcacgattacccaaggactggctgtgcctacaatctctagcttctttccgcctggataccaagtctccttctgtcttgtgatggtcctcctgtttgctgtggacacaggactgtacttttccggtggatctggattcaatgtgctgatggtgcacagaagaagccacaccggcgagaggcccttccagtgtaatcagtgcggagccagcttcacccagagaggcaatctgctgcggcacatcagactgcacacaggcgagcggcctttcagatgccacctgtgcaattacgcctgccagagaagagatgccctgaccgcctctgccgaggccagacatattagagccgaaatgggc

SEQ ID NO: 23799 - DNA, 1746 bp, synthetic construct
  source 1..1746: mol_type = other DNA
atggccttaccagtgaccgccttgctcctgccgctggccttgctgctccacgccgccaggccggacatccagatgacacagagccctagcagcctgtctgccagcgtgggagacagagtgaccatcacatgcaaggccagcgaccacatcaacaactggctggcctggtatcagcagaagcctggacaggcccctaagctgctgatctacggcgctaccacactggaaacaggcgtgcccagcagattttctggcagcggctctggcaccgactacaccctgacaatatccagcctccagcctgaggacttcgccacctactactgtcagcagagctggaacaccccttggacattcggccagggcaccaagctggaaatcaagagaggcggaggcggaagtggaggcggaggatctggcggcggaggctctcaagttcagcttcaacagcctggcgctgagctggtcaaacctggcgcttctgtgaagatgagctgcaaagccagcggctacgccttcagcagctactggatcaactggatgaagcagaaacccggccagggactcgaatggatcggccaaatctatcccggcgacggcgacaccaactacaacggcaagttcaagggcagagccacactgaccgccgatacctctagcagcacagcctacatgcagctgagcagcctgaccagcgaagatagcgccgtgtacttctgtgcccggtccatcacaacagtcgtgggctgcgctatggactattggggccagggaacaagcgtgaccgtgtctagtacgcgtggaatgaggactgaggatcttcccaaagctgtcgtctttctcgaaccccaatggtatcgggtgctcgaaaaagactctgtgacactgaaatgccaaggggcctactctcccgaggacaactccacacagtggtttcataatgagtccctcatcagctctcaggccagctcttatttcattgatgccgctacagtggacgactccggcgagtatcggtgtcagaccaatctgtctacactgtctgaccccgtgcagcttgaggtccacattggatggttgctcttgcaagccccacgctgggttttcaaagaggaagatccaatccatctgcggtgccacagctggaaaaacaccgctctccacaaagtcacatacctgcaaaatggcaaaggacgcaaatacttccatcacaattccgatttttacattccgaaggctaccctgaaagacagcggcagctatttctgccggggactcgtcggctccaagaatgtgtcctccgaaaccgtgaatatcacgattacccaaggactggctgtgcctacaatctctagcttctttccgcctggataccaagtctccttctgtcttgtgatggtcctcctgtttgctgtggacacaggactgtacttttccgtgaaaacgaacatccgcagctccacacgcgattggaaagatcacaagtttaaatggcgcaaagatccccaggacaagggaggcagctttaacgttctgatggtccaccgccgcagccatacaggcgaaagacctttccaatgcaaccagtgcggggcctcttttacccagaggggaaacctgctgagacacattcggctgcacaccggggaaagacccttcaggtgtcacctgtgtaactatgcctgtcagcggcgggatgctctgacagcttctgctgaagcccgccacatcagagctgagatggga

SEQ ID NO: 23800 - DNA, 1674 bp, synthetic construct
  source 1..1674: mol_type = other DNA
atggccttaccagtgaccgccttgctcctgccgctggccttgctgctccacgccgccaggccggacatccagatgacacagagccctagcagcctgtctgccagcgtgggagacagagtgaccatcacatgcaaggccagcgaccacatcaacaactggctggcctggtatcagcagaagcctggacaggcccctaagctgctgatctacggcgctaccacactggaaacaggcgtgcccagcagattttctggcagcggctctggcaccgactacaccctgacaatatccagcctccagcctgaggacttcgccacctactactgtcagcagagctggaacaccccttggacattcggccagggcaccaagctggaaatcaagagaggcggaggcggaagtggaggcggaggatctggcggcggaggctctcaagttcagcttcaacagcctggcgctgagctggtcaaacctggcgcttctgtgaagatgagctgcaaagccagcggctacgccttcagcagctactggatcaactggatgaagcagaaacccggccagggactcgaatggatcggccaaatctatcccggcgacggcgacaccaactacaacggcaagttcaagggcagagccacactgaccgccgatacctctagcagcacagcctacatgcagctgagcagcctgaccagcgaagatagcgccgtgtacttctgtgcccggtccatcacaacagtcgtgggctgcgctatggactattggggccagggaacaagcgtgaccgtgtctagtacgcgtggaatgaggactgaggatcttcccaaagctgtcgtctttctcgaaccccaatggtatcgggtgctcgaaaaagactctgtgacactgaaatgccaaggggcctactctcccgaggacaactccacacagtggtttcataatgagtccctcatcagctctcaggccagctcttatttcattgatgccgctacagtggacgactccggcgagtatcggtgtcagaccaatctgtctacactgtctgaccccgtgcagcttgaggtccacattggatggttgctcttgcaagccccacgctgggttttcaaagaggaagatccaatccatctgcggtgccacagctggaaaaacaccgctctccacaaagtcacatacctgcaaaatggcaaaggacgcaaatacttccatcacaattccgatttttacattccgaaggctaccctgaaagacagcggcagctatttctgccggggactcgtcggctccaagaatgtgtcctccgaaaccgtgaatatcacgattacccaaggactggctgtgcctacaatctctagcttctttccgcctggataccaagtctccttctgtcttgtgatggtcctcctgtttgctgtggacacaggactgtacttttccgtgaaaggaggcagctttaacgttctgatggtccaccgccgcagccatacaggcgaaagacctttccaatgcaaccagtgcggggcctcttttacccagaggggaaacctgctgagacacattcggctgcacaccggggaaagacccttcaggtgtcacctgtgtaactatgcctgtcagcggcgggatgctctgacagcttctgctgaagcccgccacatcagagctgagatggga

SEQ ID NO: 23801 - DNA, 1671 bp, synthetic construct
  source 1..1671: mol_type = other DNA
atggccttaccagtgaccgccttgctcctgccgctggccttgctgctccacgccgccaggccggacatccagatgacacagagccctagcagcctgtctgccagcgtgggagacagagtgaccatcacatgcaaggccagcgaccacatcaacaactggctggcctggtatcagcagaagcctggacaggcccctaagctgctgatctacggcgctaccacactggaaacaggcgtgcccagcagattttctggcagcggctctggcaccgactacaccctgacaatatccagcctccagcctgaggacttcgccacctactactgtcagcagagctggaacaccccttggacattcggccagggcaccaagctggaaatcaagagaggcggaggcggaagtggaggcggaggatctggcggcggaggctctcaagttcagcttcaacagcctggcgctgagctggtcaaacctggcgcttctgtgaagatgagctgcaaagccagcggctacgccttcagcagctactggatcaactggatgaagcagaaacccggccagggactcgaatggatcggccaaatctatcccggcgacggcgacaccaactacaacggcaagttcaagggcagagccacactgaccgccgatacctctagcagcacagcctacatgcagctgagcagcctgaccagcgaagatagcgccgtgtacttctgtgcccggtccatcacaacagtcgtgggctgcgctatggactattggggccagggaacaagcgtgaccgtgtctagtacgcgtggaatgaggactgaggatcttcccaaagctgtcgtctttctcgaaccccaatggtatcgggtgctcgaaaaagactctgtgacactgaaatgccaaggggcctactctcccgaggacaactccacacagtggtttcataatgagtccctcatcagctctcaggccagctcttatttcattgatgccgctacagtggacgactccggcgagtatcggtgtcagaccaatctgtctacactgtctgaccccgtgcagcttgaggtccacattggatggttgctcttgcaagccccacgctgggttttcaaagaggaagatccaatccatctgcggtgccacagctggaaaaacaccgctctccacaaagtcacatacctgcaaaatggcaaaggacgcaaatacttccatcacaattccgatttttacattccgaaggctaccctgaaagacagcggcagctatttctgccggggactcgtcggctccaagaatgtgtcctccgaaaccgtgaatatcacgattacccaaggactggctgtgcctacaatctctagcttctttccgcctggataccaagtctccttctgtcttgtgatggtcctcctgtttgctgtggacacaggactgtacttttccaaaggaggcagctttaacgttctgatggtccaccgccgcagccatacaggcgaaagacctttccaatgcaaccagtgcggggcctcttttacccagaggggaaacctgctgagacacattcggctgcacaccggggaaagacccttcaggtgtcacctgtgtaactatgcctgtcagcggcgggatgctctgacagcttctgctgaagcccgccacatcagagctgagatggga

SEQ ID NO: 23802 - DNA, 1668 bp, synthetic construct
  source 1..1668: mol_type = other DNA
atggccttaccagtgaccgccttgctcctgccgctggccttgctgctccacgccgccaggccggacatccagatgacacagagccctagcagcctgtctgccagcgtgggagacagagtgaccatcacatgcaaggccagcgaccacatcaacaactggctggcctggtatcagcagaagcctggacaggcccctaagctgctgatctacggcgctaccacactggaaacaggcgtgcccagcagattttctggcagcggctctggcaccgactacaccctgacaatatccagcctccagcctgaggacttcgccacctactactgtcagcagagctggaacaccccttggacattcggccagggcaccaagctggaaatcaagagaggcggaggcggaagtggaggcggaggatctggcggcggaggctctcaagttcagcttcaacagcctggcgctgagctggtcaaacctggcgcttctgtgaagatgagctgcaaagccagcggctacgccttcagcagctactggatcaactggatgaagcagaaacccggccagggactcgaatggatcggccaaatctatcccggcgacggcgacaccaactacaacggcaagttcaagggcagagccacactgaccgccgatacctctagcagcacagcctacatgcagctgagcagcctgaccagcgaagatagcgccgtgtacttctgtgcccggtccatcacaacagtcgtgggctgcgctatggactattggggccagggaacaagcgtgaccgtgtctagtacgcgtggaatgaggactgaggatcttcccaaagctgtcgtctttctcgaaccccaatggtatcgggtgctcgaaaaagactctgtgacactgaaatgccaaggggcctactctcccgaggacaactccacacagtggtttcataatgagtccctcatcagctctcaggccagctcttatttcattgatgccgctacagtggacgactccggcgagtatcggtgtcagaccaatctgtctacactgtctgaccccgtgcagcttgaggtccacattggatggttgctcttgcaagccccacgctgggttttcaaagaggaagatccaatccatctgcggtgccacagctggaaaaacaccgctctccacaaagtcacatacctgcaaaatggcaaaggacgcaaatacttccatcacaattccgatttttacattccgaaggctaccctgaaagacagcggcagctatttctgccggggactcgtcggctccaagaatgtgtcctccgaaaccgtgaatatcacgattacccaaggactggctgtgcctacaatctctagcttctttccgcctggataccaagtctccttctgtcttgtgatggtcctcctgtttgctgtggacacaggactgtacttttccggaggcagctttaacgttctgatggtccaccgccgcagccatacaggcgaaagacctttccaatgcaaccagtgcggggcctcttttacccagaggggaaacctgctgagacacattcggctgcacaccggggaaagacccttcaggtgtcacctgtgtaactatgcctgtcagcggcgggatgctctgacagcttctgctgaagcccgccacatcagagctgagatggga

SEQ ID NO: 23803 - DNA, 1746 bp, synthetic construct; identical to SEQ ID NO: 23799
  source 1..1746: mol_type = other DNA

SEQ ID NO: 23804 - DNA, 66 bp, synthetic construct
  source 1..66: mol_type = other DNA
cccggagacgagatggaagaatgctcacaacatctgcccggcgcgggatctagcggcgacataatg

SEQ ID NO: 23805 - DNA, 201 bp, synthetic construct
  source 1..201: mol_type = other DNA
cccattacaaaaatcgacactaagtatattatgacgtgtatgtcagcggatctcgaggtcgtaacgtctacctgggtcttggtgggtggtgttctcgctgccttggcagcctattgtttgagtacgggttgcgtggtcatcgtgggccggattgtgctctctggcaagccggccataataccagatagggaagtgctttat

SEQ ID NO: 23806 - DNA, 918 bp, synthetic construct
  source 1..918: mol_type = other DNA
cccggagacgagatggaagaatgctcacaacatctgcccggcgcgggatctagcggcgacataatggactacaaagatgacgatgataaaggaagttccggcaccgggtcaggttccggcacttccgcacctattaccgcatatgcccagcagacccgaggtttgttgggatgcattataacgagtctcaccggacgagataagaaccaggttgaaggggaggtacagatagtatcaactgctacccaaacattcctggccacatgcattaacggggtgtgttgggcggtatatcacggggctgggactcgaactatagcttcacccaaggggcctgtcatccaaatgtacaccaatgtggatcaggatttggtaggttggcccgccccgcaaggcagtagaagcttgacaccgtgtacgtgtggaagctccgatctgtacctggtgacacggcatgccgatgttatccccgtgagacgcaggggagatagccgcggatctctgcttagtcctaggccaatatcttacctgaagggttcatcaggcggcccactcttgtgtcccgctggccacgctgtaggtctcttccgcgcggcagtctgcaccaggggcgtagctaaggcagtcgactttatacccgtcgagaacctcgagacgacgatgcggtcaccggttttcacagataactccagtcccccggctgtcactcttacccatcccattacaaaaatcgacactaagtatattatgacgtgtatgtcagcggatctcgaggtcgtaacgtctacctgggtcttggtgggtggtgttctcgctgccttggcagcctattgtttgagtacgggttgcgtggtcatcgtgggccggattgtgctctctggcaagccggccataataccagatagggaagtgctttat

SEQ ID NO: 23807 - DNA, 2358 bp, synthetic construct
  source 1..2358: mol_type = other DNA
atggccttaccagtgaccgccttgctcctgccgctggccttgctgctccacgccgccaggccggacatccagatgacacagagccctagcagcctgtctgccagcgtgggagacagagtgaccatcacatgcaaggccagcgaccacatcaacaactggctggcctggtatcagcagaagcctggacaggcccctaagctgctgatctacggcgctaccacactggaaacaggcgtgcccagcagattttctggcagcggctctggcaccgactacaccctgacaatatccagcctccagcctgaggacttcgccacctactactgtcagcagagctggaacaccccttggacattcggccagggcaccaagctggaaatcaagagaggcggaggcggaagtggaggcggaggatctggcggcggaggctctcaagttcagcttcaacagcctggcgctgagctggtcaaacctggcgcttctgtgaagatgagctgcaaagccagcggctacgccttcagcagctactggatcaactggatgaagcagaaacccggccagggactcgaatggatcggccaaatctatcccggcgacggcgacaccaactacaacggcaagttcaagggcagagccacactgaccgccgatacctctagcagcacagcctacatgcagctgagcagcctgaccagcgaagatagcgccgtgtacttctgtgcccggtccatcacaacagtcgtgggctgcgctatggactattggggccagggaacaagcgtgaccgtgtctagtacgcgtggaatgaggactgaggatcttcccaaagctgtcgtctttctcgaaccccaatggtatcgggtgctcgaaaaagactctgtgacactgaaatgccaaggggcctactctcccgaggacaactccacacagtggtttcataatgagtccctcatcagctctcaggccagctcttatttcattgatgccgctacagtggacgactccggcgagtatcggtgtcagaccaatctgtctacactgtctgaccccgtgcagcttgaggtccacattggatggttgctcttgcaagccccacgctgggttttcaaagaggaagatccaatccatctgcggtgccacagctggaaaaacaccgctctccacaaagtcacatacctgcaaaatggcaaaggacgcaaatacttccatcacaattccgatttttacattccgaaggctaccctgaaagacagcggcagctatttctgccggggactcgtcggctccaagaatgtgtcctccgaaaccgtgaatatcacgattacccaaggactggctgtgcctacaatctctagcttctttccgcctggataccaagtctccttctgtcttgtgatggtcctcctgtttgctgtggacacaggactgtacttttccgtgcccggagacgagatggaagaatgctcacaacatctgcccggcgcgggatctagcggcgacataatggactacaaagatgacgatgataaaggaagttccggcaccgggtcaggttccggcacttccgcacctattaccgcatatgcccagcagacccgaggtttgttgggatgcattataacgagtctcaccggacgagataagaaccaggttgaaggggaggtacagatagtatcaactgctacccaaacattcctggccacatgcattaacggggtgtgttgggcggtatatcacggggctgggactcgaactatagcttcacccaaggggcctgtcatccaaatgtacaccaatgtggatcaggatttggtaggttggcccgccccgcaaggcagtagaagcttgacaccgtgtacgtgtggaagctccgatctgtacctggtgacacggcatgccgatgttatccccgtgagacgcaggggagatagccgcggatctctgcttagtcctaggccaatatcttacctgaagggttcatcaggcggcccactcttgtgtcccgctggccacgctgtaggtctcttccgcgcggcagtctgcaccaggggcgtagctaaggcagtcgactttatacccgtcgagaacctcgagacgacgatgcggtcaccggttttcacagataactccagtcccccggctgtcactcttacccatcccattacaaaaatcgacactaagtatattatgacgtgtatgtcagcggatctcgaggtcgtaacgtctacctgggtcttggtgggtggtgttctcgctgccttggcagcctattgtttgagtacgggttgcgtggtcatcgtgggccggattgtgctctctggcaagccggccataataccagatagggaagtgctttat

SEQ ID NO: 23808 - DNA, 2784 bp, synthetic construct
  source 1..2784: mol_type = other DNA
atggccttaccagtgaccgccttgctcctgccgctggccttgctgctccacgccgccaggccggacatccagatgacacagagccctagcagcctgtctgccagcgtgggagacagagtgaccatcacatgcaaggccagcgaccacatcaacaactggctggcctggtatcagcagaagcctggacaggcccctaagctgctgatctacggcgctaccacactggaaacaggcgtgcccagcagattttctggcagcggctctggcaccgactacaccctgacaatatccagcctccagcctgaggacttcgccacctactactgtcagcagagctggaacaccccttggacattcggccagggcaccaagctggaaatcaagagactcgaggacctgaagaacgtgttcccacctgaggtggccgtgttcgagcctagcgaggccgagatcagccacacccagaaagccaccctcgtgtgcctggctaccggcttctaccccgaccatgtggaactgtcttggtgggtcaacggcaaagaggtgcacagcggcgtgtgtaccgacccccagccactgaaagaacagcccgccctgaacgacagccggtactgcctgagcagcagactgagagtgtccgccaccttctggcagaacccccggaaccacttcagatgccaggtgcagttctacggcctgagcgagaacgacgagtggacccaggacagagccaagcccgtgacccagatcgtgtctgccgaagcctggggcagagccgattgcggctttaccagcgagagctaccagcagggcgtgctgagcgccaccatcctgtacgagatcctgctgggcaaggccaccctgtacgccgtgctggtgtctgccctggtgctgatggctatggtcaagcggaaggacagccggggacccggagacgagatggaagaatgctcacaacatctgcccggcgcgggatctagcggcgacataatggactacaaagatgacgatgataaaggaagttccggcaccgggtcaggttccggcacttccgcacctattaccgcatatgcccagcagacccgaggtttgttgggatgcattataacgagtctcaccggacgagataagaaccaggttgaaggggaggtacagatagtatcaactgctacccaaacattcctggccacatgcattaacggggtgtgttgggcggtatatcacggggctgggactcgaactatagcttcacccaaggggcctgtcatccaaatgtacaccaatgtggatcaggatttggtaggttggcccgccccgcaaggcagtagaagcttgacaccgtgtacgtgtggaagctccgatctgtacctggtgacacggcatgccgatgttatccccgtgagacgcaggggagatagccgcggatctctgcttagtcctaggccaatatcttacctgaagggttcatcaggcggcccactcttgtgtcccgctggccacgctgtaggtctcttccgcgcggcagtctgcaccaggggcgtagctaaggcagtcgactttatacccgtcgagaacctcgagacgacgatgcggtcaccggttttcacagataactccagtcccccggctgtcactcttacccatcccattacaaaaatcgacactaagtatattatgacgtgtatgtcagcggatctcgaggtcgtaacgtctacctgggtcttggtgggtggtgttctcgctgccttggcagcctattgtttgagtacgggttgcgtggtcatcgtgggccggattgtgctctctggcaagccggccataataccagatagggaagtgctttatagggccaagcgatctggatctggagcaacaaacttctcactactcaaacaagcaggtgacgtggaggagaatcccgggcctactagtatggactggatttggcgcatccttttccttgtcggcgctgctaccggcgcgcattccttcgaacaagttcagcttcaacagcctggcgctgagctggtcaaacctggcgcttctgtgaagatgagctgcaaagccagcggctacgccttcagcagctactggatcaactggatgaagcagaaacccggccagggactcgaatggatcggccaaatctatcccggcgacggcgacaccaactacaacggcaagttcaagggcagagccacactgaccgccgatacctctagcagcacagcctacatgcagctgagcagcctgaccagcgaagatagcgccgtgtacttctgtgcccggtccatcacaacagtcgtgggctgcgctatggactattggggccagggaacaagcgtgaccgtgtctagtacgcgtatccagaaccctgatcctgccgtgtaccagctgcgggatagcaagagcagcgacaagagcgtgtgtctgttcaccgacttcgacagccagaccaacgtgtcccagagcaaggactccgacgtgtacatcaccgataagtgcgtgctggacatgcggagcatggacttcaagagcaactccgccgtggcctggtccaacaagtccgatttcgcctgcgccaacgccttcaacaacagcattatccccgaggacacattcttcccaagccccgagagcagctgcgacgtgaagctggtggaaaagagcttcgagacagacaccaacctgaacttccagaacctgagcgtgatcggcttcagaatcctgctgctgaaagtggccggctttaacctgctgatgaccctgcggctgtggtccagc

SEQ ID NO: 23809 - DNA, 2784 bp, synthetic construct
  source 1..2784: mol_type = other DNA
atggccttaccagtgaccgccttgctcctgccgctggccttgctgctccacgccgccaggccggacatccagatgacacagagccctagcagcctgtctgccagcgtgggagacagagtgaccatcacatgcaaggccagcgaccacatcaacaactggctggcctggtatcagcagaagcctggacaggcccctaagctgctgatctacggcgctaccacactggaaacaggcgtgcccagcagattttctggcagcggctctggcaccgactacaccctgacaatatccagcctccagcctgaggacttcgccacctactactgtcagcagagctggaacaccccttggacattcggccagggcaccaagctggaaatcaagagactcgaggacctgaagaacgtgttcccacctgaggtggccgtgttcgagcctagcgaggccgagatcagccacacccagaaagccaccctcgtgtgcctggctaccggcttctaccccgaccatgtggaactgtcttggtgggtcaacggcaaagaggtgcacagcggcgtgtgtaccgacccccagccactgaaagaacagcccgccctgaacgacagccggtactgcctgagcagcagactgagagtgtccgccaccttctggcagaacccccggaaccacttcagatgccaggtgcagttctacggcctgagcgagaacgacgagtggacccaggacagagccaagcccgtgacccagatcgtgtctgccgaagcctggggcagagccgattgcggctttaccagcgagagctaccagcagggcgtgctgagcgccaccatcctgtacgagatcctgctgggcaaggccaccctgtacgccgtgctggtgtctgccctggtgctgatggctatggtcaagcggaaggacagccggggaagggccaagcgatctggatctggagcaacaaacttctcactactcaaacaagcaggtgacgtggaggagaatcccgggcctactagtatggactggatttggcgcatccttttccttgtcggcgctgctaccggcgcgcattccttcgaacaagttcagcttcaacagcctggcgctgagctggtcaaacctggcgcttctgtgaagatgagctgcaaagccagcggctacgccttcagcagctactggatcaactggatgaagcagaaacccggccagggactcgaatggatcggccaaatctatcccggcgacggcgacaccaactacaacggcaagttcaagggcagagccacactgaccgccgatacctctagcagcacagcctacatgcagctgagcagcctgaccagcgaagatagcgccgtgtacttctgtgcccggtccatcacaacagtcgtgggctgcgctatggactattggggccagggaacaagcgtgaccgtgtctagtacgcgtatccagaaccctgatcctgccgtgtaccagctgcgggatagcaagagcagcgacaagagcgtgtgtctgttcaccgacttcgacagccagaccaacgtgtcccagagcaaggactccgacgtgtacatcaccgataagtgcgtgctggacatgcggagcatggacttcaagagcaactccgccgtggcctggtccaacaagtccgatttcgcctgcgccaacgccttcaacaacagcattatccccgaggacacattcttcccaagccccgagagcagctgcgacgtgaagctggtggaaaagagcttcgagacagacaccaacctgaacttccagaacctgagcgtgatcggcttcagaatcctgctgctgaaagtggccggctttaacctgctgatgaccctgcggctgtggtccagccccggagacgagatggaagaatgctcacaacatctgcccggcgcgggatctagcggcgacataatggactacaaagatgacgatgataaaggaagttccggcaccgggtcaggttccggcacttccgcacctattaccgcatatgcccagcagacccgaggtttgttgggatgcattataacgagtctcaccggacgagataagaaccaggttgaaggggaggtacagatagtatcaactgctacccaaacattcctggccacatgcattaacggggtgtgttgggcggtatatcacggggctgggactcgaactatagcttcacccaaggggcctgtcatccaaatgtacaccaatgtggatcaggatttggtaggttggcccgccccgcaaggcagtagaagcttgacaccgtgtacgtgtggaagctccgatctgtacctggtgacacggcatgccgatgttatccccgtgagacgcaggggagatagccgcggatctctgcttagtcctaggccaatatcttacctgaagggttcatcaggcggcccactcttgtgtcccgctggccacgctgtaggtctcttccgcgcggcagtctgcaccaggggcgtagctaaggcagtcgactttatacccgtcgagaacctcgagacgacgatgcggtcaccggttttcacagataactccagtcccccggctgtcactcttacccatcccattacaaaaatcgacactaagtatattatgacgtgtatgtcagcggatctcgaggtcgtaacgtctacctgggtcttggtgggtggtgttctcgctgccttggcagcctattgtttgagtacgggttgcgtggtcatcgtgggccggattgtgctctctggcaagccggccataataccagatagggaagtgctttat

SEQ ID NO: 23810 - DNA, 3372 bp, synthetic construct
  source 1..3372: mol_type = other DNA
atggccttaccagtgaccgccttgctcctgccgctggccttgctgctccacgccgccaggccggacatccagatgacacagagccctagcagcctgtctgccagcgtgggagacagagtgaccatcacatgcaaggccagcgaccacatcaacaactggctggcctggtatcagcagaagcctggacaggcccctaagctgctgatctacggcgctaccacactggaaacaggcgtgcccagcagattttctggcagcggctctggcaccgactacaccctgacaatatccagcctccagcctgaggacttcgccacctactactgtcagcagagctggaacaccccttggacattcggccagggcaccaagctggaaatcaagagactcgaggacctgaagaacgtgttcccacctgaggtggccgtgttcgagcctagcgaggccgagatcagccacacccagaaagccaccctcgtgtgcctggctaccggcttctaccccgaccatgtggaactgtcttggtgggtcaacggcaaagaggtgcacagcggcgtgtctaccgacccccagccactgaaagaacagcccgccctgaacgacagccggtactgcctgagcagcagactgagagtgtccgccaccttctggcagaacccccggaaccacttcagatgccaggtgcagttctacggcctgagcgagaacgacgagtggacccaggacagagccaagcccgtgacccagatcgtgtctgccgaagcctggggcagagccgattgcggatcccagagcttcggcctgctggaccccaagctgtgctacctgctggatggcatcctgttcatctacggcgtgatcctgaccgccctgttcctgagagtgaagttcagcagaagcgccgacgcccctgcctaccagcagggacagaaccaactgtacaacgagctgaacctgggcagacgggaagagtacgacgtgctggacaagcggagaggcagggaccctgagatgggcggaaagccccagcggagaaagaacccccaggaaggactgtataacgaactccagaaagacaagatggccgaagcctacagcgagatcggcatgaagggcgagcggagaagaggcaagggccacgatggcctgtaccagggcctgagcaccgccaccaaggacacctatgacgccctgcacatgcaggccctgcctccaagaagggccaagcgatctggatctggagcaacaaacttctcactactcaaacaagcaggtgacgtggaggagaatcccgggcctactagtatggactggatttggcgcatccttttccttgtcggcgctgctaccggcgcgcattccttcgaacaagttcagcttcaacagcctggcgctgagctggtcaaacctggcgcttctgtgaagatgagctgcaaagccagcggctacgccttcagcagctactggatcaactggatgaagcagaaacccggccagggactcgaatggatcggccaaatctatcccggcgacggcgacaccaactacaacggcaagttcaagggcagagccacactgaccgccgatacctctagcagcacagcctacatgcagctgagcagcctgaccagcgaagatagcgccgtgtacttctgtgcccggtccatcacaacagtcgtgggctgcgctatggactattggggccagggaacaagcgtgaccgtgtctagtacgcgtatccagaaccctgatcctgccgtgtaccagctgcgggatagcaagagcagcgacaagagcgtgtgtctgttcaccgacttcgacagccagaccaacgtgtcccagagcaaggactccgacgtgtacatcaccgataagaccgtgctggacatgcggagcatggacttcaagagcaactccgccgtggcctggtccaacaagtccgatttcgcctgcgccaacgccttcaacaacagcattatccccgaggacacattcttcccaagccccgagagcagctgcggtacccagagttttgggttgttggaccctaaattgtgctatctgttggacggaatcctgttcatttacggagtgatcctgaccgcattgttcctgcgggttaagttttccagatccgcagacgcacccgcttaccaacaagggcagaaccaactctacaatgaacttaatttggggcggagggaagagtacgacgttctggacaaaaggaggggacgagatcccgagatgggcggaaagcctcagcgaaggaagaatccgcaagaggggctttataacgaactccagaaagataaaatggcagaagcctatagtgagattgggatgaagggagaaaggaggaggggtaaaggtcacgatgggttgtaccaaggattgagcacagccactaaagatacctatgatgcgctccacatgcaggccctgccgccaagacccggagacgagatggaagaatgctcacaacatctgcccggcgcgggatctagcggcgacataatggactacaaagatgacgatgataaaggaagttccggcaccgggtcaggttccggcacttccgcacctattaccgcatatgcccagcagacccgaggtttgttgggatgcattataacgagtctcaccggacgagataagaaccaggttgaaggggaggtacagatagtatcaactgctacccaaacattcctggccacatgcattaacggggtgtgttgggcggtatatcacggggctgggactcgaactatagcttcacccaaggggcctgtcatccaaatgtacaccaatgtggatcaggatttggtaggttggcccgccccgcaaggcagtagaagcttgacaccgtgtacgtgtggaagctccgatctgtacctggtgacacggcatgccgatgttatccccgtgagacgcaggggagatagccgcggatctctgcttagtcctaggccaatatcttacctgaagggttcatcaggcggcccactcttgtgtcccgctggccacgctgtaggtctcttccgcgcggcagtctgcaccaggggcgtagctaaggcagtcgactttatacccgtcgagaacctcgagacgacgatgcggtcaccggttttcacagataactccagtcccccggctgtcactcttacccatcccattacaaaaatcgacactaagtatattatgacgtgtatgtcagcggatctcgaggtcgtaacgtctacctgggtcttggtgggtggtgttctcgctgccttggcagcctattgtttgagtacgggttgcgtggtcatcgtgggccggattgtgctctctggcaagccggccataataccagatagggaagtgctttat

SEQ ID NO: 23811 - DNA, 1536 bp, synthetic construct
  source 1..1536: mol_type = other DNA
atggccttaccagtgaccgccttgctcctgccgctggccttgctgctccacgccgccaggccggacggtaacgaggagatgggaggaatcactcaaaccccttacaaagtctcaatttcaggaacaactgttatccttacatgtccccagtatcctggcagcgagatcctttggcagcataacgacaagaatatagggggagatgaagacgataagaatatcggatctgacgaggatcacttgagcctgaaagagttctccgagcttgaacaaagcggatattatgtgtgctatccgcgcgggtcaaagccggaagacgctaacttttacctttatctccgagccagagtgtgcgaaaattgcatggaaatggacgttatgtccgttgctacaatagttatcgtagatatatgcatcacgggtggactgcttctgctggtttattattggtccaagaatagaaaggccaaagctaaacccgtgaccagaggcgctggcgcaggcggaaggcaaaggggacaaaacaaagaacggccaccaccagtgccaaatccagattatgagcctattcggaaaggacagagggacctgtactctggcctgaatcagagaagaatccccggagacgagatggaagaatgctcacaacatctgcccggcgcgggatctagcggcgacataatggactacaaagatgacgatgataaaggaagttccggcaccgggtcaggttccggcacttccgcacctattaccgcatatgcccagcagacccgaggtttgttgggatgcattataacgagtctcaccggacgagataagaaccaggttgaaggggaggtacagatagtatcaactgctacccaaacattcctggccacatgcattaacggggtgtgttgggcggtatatcacggggctgggactcgaactatagcttcacccaaggggcctgtcatccaaatgtacaccaatgtggatcaggatttggtaggttggcccgccccgcaaggcagtagaagcttgacaccgtgtacgtgtggaagctccgatctgtacctggtgacacggcatgccgatgttatccccgtgagacgcaggggagatagccgcggatctctgcttagtcctaggccaatatcttacctgaagggttcatcaggcggcccactcttgtgtcccgctggccacgctgtaggtctcttccgcgcggcagtctgcaccaggggcgtagctaaggcagtcgactttatacccgtcgagaacctcgagacgacgatgcggtcaccggttttcacagataactccagtcccccggctgtcactcttacccatcccattacaaaaatcgacactaagtatattatgacgtgtatgtcagcggatctcgaggtcgtaacgtctacctgggtcttggtgggtggtgttctcgctgccttggcagcctattgtttgagtacgggttgcgtggtcatcgtgggccggattgtgctctctggcaagccggccataataccagatagggaagtgctttat

SEQ ID NO: 23812 - DNA, 1431 bp, synthetic construct
  source 1..1431: mol_type = other DNA
atggccttaccagtgaccgccttgctcctgccgctggccttgctgctccacgccgccaggccgttcaagatccccatcgaggaactggaagatcgggtgttcgtgaactgcaacacctctatcacctgggtggaaggcaccgtgggaacactgctgagcgacatcaccagactggacctcggcaagcggattctggaccctcggggcatctacagatgcaacggcaccgacatctacaaggacaaagaaagcaccgtgcaggtccactacagaatgtgccagtcctgcgtggaactggaccctgctacagtggccggcatcatcgtgaccgatgtgatcgctactctgctgctggctctgggagtgttctgcttcgccggacacgaaacaggcagactgtctggcgctgccgatacacaggccctgctgagaaacgaccaagtgtatcagcccctgcgcgacagagatgatgcccagtattctcacctcggcggcaactgggctagaaacaagcccggagacgagatggaagaatgctcacaacatctgcccggcgcgggatctagcggcgacataatggactacaaagatgacgatgataaaggaagttccggcaccgggtcaggttccggcacttccgcacctattaccgcatatgcccagcagacccgaggtttgttgggatgcattataacgagtctcaccggacgagataagaaccaggttgaaggggaggtacagatagtatcaactgctacccaaacattcctggccacatgcattaacggggtgtgttgggcggtatatcacggggctgggactcgaactatagcttcacccaaggggcctgtcatccaaatgtacaccaatgtggatcaggatttggtaggttggcccgccccgcaaggcagtagaagcttgacaccgtgtacgtgtggaagctccgatctgtacctggtgacacggcatgccgatgttatccccgtgagacgcaggggagatagccgcggatctctgcttagtcctaggccaatatcttacctgaagggttcatcaggcggcccactcttgtgtcccgctggccacgctgtaggtctcttccgcgcggcagtctgcaccaggggcgtagctaaggcagtcgactttatacccgtcgagaacctcgagacgacgatgcggtcaccggttttcacagataactccagtcccccggctgtcactcttacccatcccattacaaaaatcgacactaagtatattatgacgtgtatgtcagcggatctcgaggtcgtaacgtctacctgggtcttggtgggtggtgttctcgctgccttggcagcctattgtttgagtacgggttgcgtggtcatcgtgggccggattgtgctctctggcaagccggccataataccagatagggaagtgctttat

SEQ ID NO: 23813 - DNA, 1461 bp, synthetic construct
  source 1..1461: mol_type = other DNA
atggccttaccagtgaccgccttgctcctgccgctggccttgctgctccacgccgccaggccgcagagcatcaagggcaaccacctggtcaaggtgtacgactaccaagaggacggcagcgtgctgctgacatgtgatgccgaggccaagaacatcacctggtttaaggacggcaagatgatcggcttcctgaccgaggacaagaagaagtggaacctgggcagcaacgctaaggaccccagaggcatgtatcagtgcaagggcagccagaacaagagcaagcccctccaggtgtactaccggatgtgccagaactgcatcgagctgaacgccgctaccatcagcggctttctgttcgccgagatcgtgtccatcttcgtgctggccgtgggcgtgtactttatcgctggacaggatggcgtgcggcagagcagagcttccgataagcaaaccctgctgcctaacgaccagctgtaccagcctctgaaggacagagaggacgaccagtacagccacctccagggcaatcagctgagaagaaaccccggagacgagatggaagaatgctcacaacatctgcccggcgcgggatctagcggcgacataatggactacaaagatgacgatgataaaggaagttccggcaccgggtcaggttccggcacttccgcacctattaccgcatatgcccagcagacccgaggtttgttgggatgcattataacgagtctcaccggacgagataagaaccaggttgaaggggaggtacagatagtatcaactgctacccaaacattcctggccacatgcattaacggggtgtgttgggcggtatatcacggggctgggactcgaactatagcttcacccaaggggcctgtcatccaaatgtacaccaatgtggatcaggatttggtaggttggcccgccccgcaaggcagtagaagcttgacaccgtgtacgtgtggaagctccgatctgtacctggtgacacggcatgccgatgttatccccgtgagacgcaggggagatagccgcggatctctgcttagtcctaggccaatatcttacctgaagggttcatcaggcggcccactcttgtgtcccgctggccacgctgtaggtctcttccgcgcggcagtctgcaccaggggcgtagctaaggcagtcgactttatacccgtcgagaacctcgagacgacgatgcggtcaccggttttcacagataactccagtcccccggctgtcactcttacccatcccattacaaaaatcgacactaagtatattatgacgtgtatgtcagcggatctcgaggtcgtaacgtctacctgggtcttggtgggtggtgttctcgctgccttggcagcctattgtttgagtacgggttgcgtggtcatcgtgggccggattgtgctctctggcaagccggccataataccagatagggaagtgctttat

SEQ ID NO: 23814 - DNA, 1410 bp, synthetic construct
  source 1..1410: mol_type = other DNA
atggccttaccagtgaccgccttgctcctgccgctggccttgctgctccacgccgccaggccgcagagttttgggttgttggaccctaaattgtgctatctgttggacggaatcctgttcatttacggagtgatcctgaccgcattgttcctgcgggttaagttttccagatccgcagacgcacccgcttaccaacaagggcagaaccaactctacaatgaacttaatttggggcggagggaagagtacgacgttctggacaaaaggaggggacgagatcccgagatgggcggaaagcctcagcgaaggaagaatccgcaagaggggctttataacgaactccagaaagataaaatggcagaagcctatagtgagattgggatgaagggagaaaggaggaggggtaaaggtcacgatgggttgtaccaaggattgagcacagccactaaagatacctatgatgcgctccacatgcaggccctgccgccaagacccggagacgagatggaagaatgctcacaacatctgcccggcgcgggatctagcggcgacataatggactacaaagatgacgatgataaaggaagttccggcaccgggtcaggttccggcacttccgcacctattaccgcatatgcccagcagacccgaggtttgttgggatgcattataacgagtctcaccggacgagataagaaccaggttgaaggggaggtacagatagtatcaactgctacccaaacattcctggccacatgcattaacggggtgtgttgggcggtatatcacggggctgggactcgaactatagcttcacccaaggggcctgtcatccaaatgtacaccaatgtggatcaggatttggtaggttggcccgccccgcaaggcagtagaagcttgacaccgtgtacgtgtggaagctccgatctgtacctggtgacacggcatgccgatgttatccccgtgagacgcaggggagatagccgcggatctctgcttagtcctaggccaatatcttacctgaagggttcatcaggcggcccactcttgtgtcccgctggccacgctgtaggtctcttccgcgcggcagtctgcaccaggggcgtagctaaggcagtcgactttatacccgtcgagaacctcgagacgacgatgcggtcaccggttttcacagataactccagtcccccggctgtcactcttacccatcccattacaaaaatcgacactaagtatattatgacgtgtatgtcagcggatctcgaggtcgtaacgtctacctgggtcttggtgggtggtgttctcgctgccttggcagcctattgtttgagtacgggttgcgtggtcatcgtgggccggattgtgctctctggcaagccggccataataccagatagggaagtgctttat

SEQ ID NO: 23815 - protein, 797 aa, synthetic construct
MACNCQLMQDTPLLKFPCPRLILLFVLLIRLSQVSSDVDEQLSKSVKDKVLLPCRYNSPHEDESEDRIYWQKHDKVVLSVIAGKLKVWPEYKNRTLYDNTTYSLIILGLVLSDRGTYSCVVQKKERGTYEVKHLALVKLSIKADFSTPNITESGNPSADTKRITCFASGGFPKPRFSWLENGRELPGINTTISQDPESELYTISSQLDFNTTRNHTIKCLIKYGDAHVSEDFTWEKPPEDPPDSKNTLVLFGAGFGAVITVVVIVVIIKCFCKHRSCFRRNEASRETNNSLTFGPEEALAEQTVFLTTSHYPIVPLDSKISLPIRNGSEVRDPLVTYEGSLPPASPLQDNLVIALHSYEPSHDGDLGFEKGEQLRILEQSGEWWKAQSLTTGQEGFIPFNFVAKANSLEPEPWFFKNLSRKDAERQLLAPGNTHGSFLIRESESTAGSFSLSVRDFDQNQGEVVKHYKIRNLDNGGFYISPRITFPGLHDLVRHYTNASDGLCTKLSRPCQTQKPQKPWWEDEWEVPRETLKLVERLGAGQFGEVWMGYYNGHTKVAVKSLKQGSMSPDAFLAEANLMKQLQHPRLVRLYAVVTQEPIYIITEYMENGSLVDFLKTPSGIKLNVNKLLDMAAQIAEGMAFIEEQNYIHRDLRAANILVSDTLSCKIADFGLARLIEDNEYTAREGAKFPIKWTAPEAINYGTFTIKSDVWSFGILLTEIVTHGRIPYPGMTNPEVIQNLERGYRMVRPDNCPEELYHLMMLCWKERPEDRPTFDYLRSVLDDFFTATEGQYQPQPGT

SEQ ID NO: 23816 - protein, 216 aa, synthetic construct
MATIGALLVRFFFIAVLMSSQKSWAIKEEHTIIQAEFYLLPDKRGEFMFDFDGDEIFHVDIEKSETIWRLEEFAKFASFEAQGALANIAVDKANLDVMKERSNNTPDANVAPEVTVLSRSPVNLGEPNILICFIDKFSPPVVNVTWLRNGRPVTEGVSETVFLPRDDHLFRKFHYLTFLPSTDDFYDCEVDHWGLEEPLRKHWEFEEKTLLPETKE

SEQ ID NO: 23817 - protein, 265 aa, synthetic construct
MVWLPRVPCVAAVILLLTVLSPSVALVRDSGSANERADLIAYLKQATKEFRSGGGGSLVPRGSGGGGSVDRPWFLEYCKSECHFYNGTQRVRLLVRYFYNLEENLRFDSDVGEFRAVTELGRPDAENWNSQPEFLEQKRAEVDTVCRHNYEIFDNFLVPRRVEPTVTVYPTKTQPLEHHNLLVCSVSDFYPGNIEVRWFRNGKEEKTGIVSTGLVRNGDWTFQTLVMLETVPQSGEVYTCQVEHPSLTDPVTVEWKAQSTSAQNK

SEQ ID NO: 23818 - protein, 262 aa, synthetic construct
MVWLPRVPCVAAVILLLTVLSPSVALVRDSGSGKKVITAFNEGLKEFRSGGGGSLVPRGSGGGGSVDRPWFLEYCKSECHFYNGTQRVRLLVRYFYNLEENLRFDSDVGEFRAVTELGRPDAENWNSQPEFLEQKRAEVDTVCRHNYEIFDNFLVPRRVEPTVTVYPTKTQPLEHHNLLVCSVSDFYPGNIEVRWFRNGKEEKTGIVSTGLVRNGDWTFQTLVMLETVPQSGEVYTCQVEHPSLTDPVTVEWKAQSTSAQNK

SEQ ID NO: 23819 - protein, 265 aa, synthetic construct
MVWLPRVPCVAAVILLLTVLSPSVALVRDSGSANERADLIAYLKQASKEFRSGGGGSLVPRGSGGGGSVDRPWFLEYCKSECHFYNGTQRVRLLVRYFYNLEENLRFDSDVGEFRAVTELGRPDAENWNSQPEFLEQKRAEVDTVCRHNYEIFDNFLVPRRVEPTVTVYPTKTQPLEHHNLLVCSVSDFYPGNIEVRWFRNGKEEKTGIVSTGLVRNGDWTFQTLVMLETVPQSGEVYTCQVEHPSLTDPVTVEWKAQSTSAQNK

SEQ ID NO: 23820 - protein, 265 aa, synthetic construct
MVWLPRVPCVAAVILLLTVLSPSVALVRDSGSANERADLIAYLKQAGKEFRSGGGGSLVPRGSGGGGSVDRPWFLEYCKSECHFYNGTQRVRLLVRYFYNLEENLRFDSDVGEFRAVTELGRPDAENWNSQPEFLEQKRAEVDTVCRHNYEIFDNFLVPRRVEPTVTVYPTKTQPLEHHNLLVCSVSDFYPGNIEVRWFRNGKEEKTGIVSTGLVRNGDWTFQTLVMLETVPQSGEVYTCQVEHPSLTDPVTVEWKAQSTSAQNK

SEQ ID NO: 23821 - protein, 266 aa, synthetic construct
MVWLPRVPCVAAVILLLTVLSPSVALVRDSGSANERADLIAYFKAATKFEFRSGGGGSLVPRGSGGGGSVDRPWFLEYCKSECHFYNGTQRVRLLVRYFYNLEENLRFDSDVGEFRAVTELGRPDAENWNSQPEFLEQKRAEVDTVCRHNYEIFDNFLVPRRVEPTVTVYPTKTQPLEHHNLLVCSVSDFYPGNIEVRWFRNGKEEKTGIVSTGLVRNGDWTFQTLVMLETVPQSGEVYTCQVEHPSLTDPVTVEWKAQSTSAQNK

SEQ ID NO: 23822 - protein, 220 aa, synthetic construct
MPCSRALILGVLALNTMLSLCGGEDDIEADHVGFYGTTVYQSPGDIGQYTHEFDGDELFYVDLDKKKTVWRLPEFGQLILFEPQGGLQNIAAEKHNLGILTKRSNFTPATNEAPQATVFPKSPVLLGQPNTLICFVDNIFPPVINITWLRNSKSVTDGVYETSFLVNRDHSFHKLSYLTFIPSDDDIYDCKVEHWGLEEPVLKHWEPEIPAPMSELTETV

SEQ ID NO: 23823 - protein, 270 aa, synthetic construct
MALQIPSLLLSAAVVVLMVLSSPGTEGGDSADPRLGLWSRMDQLAKELTAEVDGGGGSLVPRGSGGGGSPGTEGGDSERHFVHQFKGECYFTNGTQRIRLVTRYIYNREEYLRFDSDVGEYRAVTELGRHSAEYYNKQYLERTRAELDTACRHNYEETEVPTSLRRLEQPNVAISLSRTEALNHHNTLVCSVTDFYPAKIKVRWFRNGQEETVGVSSTQLIRNGDWTFQVLVMLEMTPHQGEVYTCHVEHPSLKSPITVEWRAQSESARS

SEQ ID NO: 23824 - protein, 265 aa, synthetic construct
MALQIPSLLLSAAVVVLMVLSSPGTEGGDSADPLSIALHVGFDHFEVDGGGGSLVPRGSGGGGSPGTEGGDSERHFVHQFKGECYFTNGTQRIRLVTRYIYNREEYLRFDSDVGEYRAVTELGRHSAEYYNKQYLERTRAELDTACRHNYEETEVPTSLRRLEQPNVAISLSRTEALNHHNTLVCSVTDFYPAKIKVRWFRNGQEETVGVSSTQLIRNGDWTFQVLVMLEMTPHQGEVYTCHVEHPSLKSPITVEWRAQSESARS

SEQ ID NO: 23825 - protein, 267 aa, synthetic construct
MALQIPSLLLSAAVVVLMVLSSPGTEGGDSADPSHLVEALYLVCGERGVDGGGGSLVPRGSGGGGSPGTEGGDSERHFVHQFKGECYFTNGTQRIRLVTRYIYNREEYLRFDSDVGEYRAVTELGRHSAEYYNKQYLERTRAELDTACRHNYEETEVPTSLRRLEQPNVAISLSRTEALNHHNTLVCSVTDFYPAKIKVRWFRNGQEETVGVSSTQLIRNGDWTFQVLVMLEMTPHQGEVYTCHVEHPSLKSPITVEWRAQSESARS

SEQ ID NO: 23826 - protein, 265 aa, synthetic construct
MALQIPSLLLSAAVVVLMVLSSPGTEGGDSADPGDLQTLALWSRMDVDGGGGSLVPRGSGGGGSPGTEGGDSERHFVHQFKGECYFTNGTQRIRLVTRYIYNREEYLRFDSDVGEYRAVTELGRHSAEYYNKQYLERTRAELDTACRHNYEETEVPTSLRRLEQPNVAISLSRTEALNHHNTLVCSVTDFYPAKIKVRWFRNGQEETVGVSSTQLIRNGDWTFQVLVMLEMTPHQGEVYTCHVEHPSLKSPITVEWRAQSESARS

SEQ ID NO: 23827 - protein, 265 aa, synthetic construct
MALQIPSLLLSAAVVVLMVLSSPGTEGGDSADPGDLQTLALNAARDVDGGGGSLVPRGSGGGGSPGTEGGDSERHFVHQFKGECYFTNGTQRIRLVTRYIYNREEYLRFDSDVGEYRAVTELGRHSAEYYNKQYLERTRAELDTACRHNYEETEVPTSLRRLEQPNVAISLSRTEALNHHNTLVCSVTDFYPAKIKVRWFRNGQEETVGVSSTQLIRNGDWTFQVLVMLEMTPHQGEVYTCHVEHPSLKSPITVEWRAQSESARS

SEQ ID NO: 23828 - protein, 260 aa, synthetic construct
MRPEDRMFHIRAVILRALSLAFLLSLRGAGAIKADHVSTYAAFVQTHRPTGEFMFEFDEDEMFYVDLDKKETVWHLEEFGQAFSFEAQGGLANIAILNNNLNTLIQRSNHTQATNDPPEVTVFPKEPVELGQPNTLICHIDKFFPPVLNVTWLCNGELVTEGVAESLFLPRTDYSFHKFHYLTFVPSAEDFYDCRVEHWGLDQPLLKHWEAQEPIQMPETTETVLCALGLVLGLVGIIVGTVLIIKSLRSGHDPRAQGTL

SEQ ID NO: 23829 - protein, 222 aa, synthetic construct
MRPEDRMFHIRAVILRALSLAFLLSLRGAGAIKADHVSTYAAFVQTHRPTGEFMFEFDEDEMFYVDLDKKETVWHLEEFGQAFSFEAQGGLANIAILNNNLNTLIQRSNHTQATNDPPEVTVFPKEPVELGQPNTLICHIDKFFPPVLNVTWLCNGELVTEGVAESLFLPRTDYSFHKFHYLTFVPSAEDFYDCRVEHWGLDQPLLKHWEAQEPIQMPETTE

SEQ ID NO: 23830 - protein, 210 aa, synthetic construct
MRPEDRMFHIRAVILRALSLAFLLSLRGAGAIKADHVSTYAAFVQTHRPTGEFMFEFDEDEMFYVDLDKKETVWHLEEFGQAFSFEAQGGLANIAILNNNLNTLIQRSNHTQATNDPPEVTVFPKEPVELGQPNTLICHIDKFFPPVLNVTWLCNGELVTEGVAESLFLPRTDYSFHKFHYLTFVPSAEDFYDCRVEHWGLDQPLLKHWE

SEQ ID NO: 23831 - protein, 12 aa, synthetic construct
AQEPIQMPETTE

SEQ ID NO: 23832 - protein, 23 aa, synthetic construct
TVLCALGLVLGLVGIIVGTVLII

SEQ ID NO: 23833 - protein, 15 aa, synthetic construct
KSLRSGHDPRAQGTL

SEQ ID NO: 23834 - protein, 258 aa, synthetic construct
MMVLQVSAAPRTVALTALLMVLLTSVVQGRATPENYLFQGRQECYAFNGTQRFLERYIYNREEFARFDSDVGEFRAVTELGRPAAEYWNSQKDILEEKRAVPDRMCRHNYELGGPMTLQRRVQPRVNVSPSKKGPLQHHNLLVCHVTDFYPGSIQVRWFLNGQEETAGVVSTNLIRNGDWTFQILVMLEMTPQQGDVYTCQVEHTSLDSPVTVEWKAQSDSARSKTLTGAGGFVLGLIICGVGIFMHRRSKKVQRGSA

SEQ ID NO: 23835 - protein, 225 aa, synthetic construct
MMVLQVSAAPRTVALTALLMVLLTSVVQGRATPENYLFQGRQECYAFNGTQRFLERYIYNREEFARFDSDVGEFRAVTELGRPAAEYWNSQKDILEEKRAVPDRMCRHNYELGGPMTLQRRVQPRVNVSPSKKGPLQHHNLLVCHVTDFYPGSIQVRWFLNGQEETAGVVSTNLIRNGDWTFQILVMLEMTPQQGDVYTCQVEHTSLDSPVTVEWKAQSDSARSK

SEQ ID NO: 23836 - protein, 212 aa, synthetic construct
MMVLQVSAAPRTVALTALLMVLLTSVVQGRATPENYLFQGRQECYAFNGTQRFLERYIYNREEFARFDSDVGEFRAVTELGRPAAEYWNSQKDILEEKRAVPDRMCRHNYELGGPMTLQRRVQPRVNVSPSKKGPLQHHNLLVCHVTDFYPGSIQVRWFLNGQEETAGVVSTNLIRNGDWTFQILVMLEMTPQQGDVYTCQVEHTSLDSPVT

SEQ ID NO: 23837 - protein, 21 aa, synthetic construct
TLTGAGGFVLGLIICGVGIFM

SEQ ID NO: 23838 - protein, 12 aa, synthetic construct
HRRSKKVQRGSA

SEQ ID NO: 23839 - protein, 254 aa, synthetic construct
MAISGVPVLGFFIIAVLMSAQESWAIKEEHVIIQAEFYLNPDQSGEFMFDFDGDEIFHVDMAKKETVWRLEEFGRFASFEAQGALANIAVDKANLEIMTKRSNYTPITNVPPEVTVLTNSPVELREPNVLICFIDKFTPPVVNVTWLRNGKPVTTGVSETVFLPREDHLFRKFHYLPFLPSTEDVYDCRVEHWGLDEPLLKHWEFDAPSPLPETTENVVCALGLTVGLVGIIIGTIFIIKGVRKSNAAERRGPL

SEQ ID NO: 23840 - protein, 216 aa, synthetic construct
MAISGVPVLGFFIIAVLMSAQESWAIKEEHVIIQAEFYLNPDQSGEFMFDFDGDEIFHVDMAKKETVWRLEEFGRFASFEAQGALANIAVDKANLEIMTKRSNYTPITNVPPEVTVLTNSPVELREPNVLICFIDKFTPPVVNVTWLRNGKPVTTGVSETVFLPREDHLFRKFHYLPFLPSTEDVYDCRVEHWGLDEPLLKHWEFDAPSPLPETTE

SEQ ID NO: 23841 - protein, 204 aa, synthetic construct
MAISGVPVLGFFIIAVLMSAQESWAIKEEHVIIQAEFYLNPDQSGEFMFDFDGDEIFHVDMAKKETVWRLEEFGRFASFEAQGALANIAVDKANLEIMTKRSNYTPITNVPPEVTVLTNSPVELREPNVLICFIDKFTPPVVNVTWLRNGKPVTTGVSETVFLPREDHLFRKFHYLPFLPSTEDVYDCRVEHWGLDEPLLKHWE

SEQ ID NO: 23842 - protein, 17 aa, synthetic construct
NVVCALGLTVGLVGIII

SEQ ID NO: 23843 - protein, 15 aa, synthetic construct
KGVRKSNAAERRGPL

SEQ ID NO: 23844 - protein, 262 aa, synthetic construct
MVCLRLPGGSCMAVLTVTLMVLSSPLALAGDTRPRFLEYSTSECHFFNGTERVRFLDRYFYNQEEYVRFDSDVGEFRAVTELGRPDEEYWNSQKDFLEDRRAAVDTYCRHNYGVGESFTVQRRVHPKVTVYPSKTQPLQHHNLLVCSVSGFYPGSIEVRWFRNGQEEKTGVVSTGLIHNGDWTFQTLVMLETVPRSGEVYTCQVEHPSVTSPLTVEWRARSESAQSKMLSGVGGFVLGLLFLGAGLFIYFRNQKGHSGLQPR

SEQ ID NO: 23845 - protein, 227 aa, synthetic construct
MVCLRLPGGSCMAVLTVTLMVLSSPLALAGDTRPRFLEYSTSECHFFNGTERVRFLDRYFYNQEEYVRFDSDVGEFRAVTELGRPDEEYWNSQKDFLEDRRAAVDTYCRHNYGVGESFTVQRRVHPKVTVYPSKTQPLQHHNLLVCSVSGFYPGSIEVRWFRNGQEEKTGVVSTGLIHNGDWTFQTLVMLETVPRSGEVYTCQVEHPSVTSPLTVEWRARSESAQSK

SEQ ID NO: 23846 - protein, 214 aa, synthetic construct
MVCLRLPGGSCMAVLTVTLMVLSSPLALAGDTRPRFLEYSTSECHFFNGTERVRFLDRYFYNQEEYVRFDSDVGEFRAVTELGRPDEEYWNSQKDFLEDRRAAVDTYCRHNYGVGESFTVQRRVHPKVTVYPSKTQPLQHHNLLVCSVSGFYPGSIEVRWFRNGQEEKTGVVSTGLIHNGDWTFQTLVMLETVPRSGEVYTCQVEHPSVTSPLT

SEQ ID NO: 23847 - protein, 21 aa, synthetic construct
MLSGVGGFVLGLLFLGAGLFI

SEQ ID NO: 23848 - protein, 14 aa, synthetic construct
YFRNQKGHSGLQPR

SEQ ID NO: 23849 - protein, 89 aa, synthetic construct
AGAIKADHVSTYAAFVQTHRPTGEFMFEFDEDEMFYVDLDKKETVWHLEEFGQAFSFEAQGGLANIAILNNNLNTLIQRSNHTQATNDP

SEQ ID NO: 23850 - protein, 93 aa, synthetic construct
PEVTVFPKEPVELGQPNTLICHIDKFFPPVLNVTWLCNGELVTEGVAESLFLPRTDYSFHKFHYLTFVPSAEDFYDCRVEHWGLDQPLLKHWE

SEQ ID NO: 23851 - protein, 9 aa, synthetic construct
AQEPIQMPE

SEQ ID NO: 23852 - protein, 94 aa, synthetic construct
RATPENYLFQGRQECYAFNGTQRFLERYIYNREEFARFDSDVGEFRAVTELGRPAAEYWNSQKDILEEKRAVPDRMCRHNYELGGPMTLQRRVQ

SEQ ID NO: 23853 - protein, 89 aa, synthetic construct
PRVNVSPSKKGPLQHHNLLVCHVTDFYPGSIQVRWFLNGQEETAGVVSTNLIRNGDWTFQILVMLEMTPQQGDVYTCQVEHTSLDSPVT

SEQ ID NO: 23854 - protein, 13 aa, synthetic construct
VEWKAQSDSARSK

SEQ ID NO: 23855 - protein, 86 aa, synthetic construct
IKEEHVIIQAEFYLNPDQSGEFMFDFDGDEIFHVDMAKKETVWRLEEFGRFASFEAQGALANIAVDKANLEIMTKRSNYTPITNVP

SEQ ID NO: 23856 - protein, 93 aa, synthetic construct
PEVTVLTNSPVELREPNVLICFIDKFTPPVVNVTWLRNGKPVTTGVSETVFLPREDHLFRKFHYLPFLPSTEDVYDCRVEHWGLDEPLLKHWE

SEQ ID NO: 23857 - protein, 12 aa, synthetic construct
FDAPSPLPETTE

SEQ ID NO: 23858 - protein, 94 aa, synthetic construct
TRPRFLEYSTSECHFFNGTERVRFLDRYFYNQEEYVRFDSDVGEFRAVTELGRPDEEYWNSQKDFLEDRRAAVDTYCRHNYGVGESFTVQRRVH

SEQ ID NO: 23859 - protein, 89 aa, synthetic construct
PKVTVYPSKTQPLQHHNLLVCSVSGFYPGSIEVRWFRNGQEEKTGVVSTGLIHNGDWTFQTLVMLETVPRSGEVYTCQVEHPSVTSPLT

SEQ ID NO: 23860 - protein, 13 aa, synthetic construct
VEWRARSESAQSK

SEQ ID NO: 23861 - protein, 254 aa, synthetic construct
MILNKALMLGALALTTVMSPCGGEDIVADHVASYGVNLYQSYGPSGQYTHEFDGDEQFYVDLGRKETVWCLPVLRQFRFDPQFALTNIAVLKHNLNSLIKRSNSTAATNEVPEVTVFSKSPVTLGQPNILICLVDNIFPPVVNITWLSNGHSVTEGVSETSFLSKSDHSFFKISYLTLLPSAEESYDCKVEHWGLDKPLLKHWEPEIPAPMSELTETVVCALGLSVGLVGIVVGTVFIIRGLRSVGASRHQGPL

SEQ ID NO: 23862 - protein, 231 aa, synthetic construct
EDIVADHVASYGVNLYQSYGPSGQYTHEFDGDEQFYVDLGRKETVWCLPVLRQFRFDPQFALTNIAVLKHNLNSLIKRSNSTAATNEVPEVTVFSKSPVTLGQPNILICLVDNIFPPVVNITWLSNGHSVTEGVSETSFLSKSDHSFFKISYLTLLPSAEESYDCKVEHWGLDKPLLKHWEPEIPAPMSELTETVVCALGLSVGLVGIVVGTVFIIRGLRSVGASRHQGPL

SEQ ID NO: 23863 - protein, 216 aa, synthetic construct
MILNKALMLGALALTTVMSPCGGEDIVADHVASYGVNLYQSYGPSGQYTHEFDGDEQFYVDLGRKETVWCLPVLRQFRFDPQFALTNIAVLKHNLNSLIKRSNSTAATNEVPEVTVFSKSPVTLGQPNILICLVDNIFPPVVNITWLSNGHSVTEGVSETSFLSKSDHSFFKISYLTLLPSAEESYDCKVEHWGLDKPLLKHWEPEIPAPMSELTE

SEQ ID NO: 23864 - protein, 204 aa, synthetic construct
MILNKALMLGALALTTVMSPCGGEDIVADHVASYGVNLYQSYGPSGQYTHEFDGDEQFYVDLGRKETVWCLPVLRQFRFDPQFALTNIAVLKHNLNSLIKRSNSTAATNEVPEVTVFSKSPVTLGQPNILICLVDNIFPPVVNITWLSNGHSVTEGVSETSFLSKSDHSFFKISYLTLLPSAEESYDCKVEHWGLDKPLLKHWE

SEQ ID NO: 23865 - protein, 12 aa, synthetic construct
PEIPAPMSELTE

SEQ ID NO: 23866 - protein, 23 aa, synthetic construct
TVVCALGLSVGLVGIVVGTVFII

SEQ ID NO: 23867 - protein, 15 aa, synthetic construct
RGLRSVGASRHQGPL

SEQ ID NO: 23868 - protein, 88 aa, synthetic construct
EDIVADHVASYGVNLYQSYGPSGQYTHEFDGDEQFYVDLGRKETVWCLPVLRQFRFDPQFALTNIAVLKHNLNSLIKRSNSTAATNEV

SEQ ID NO: 23869 - protein, 261 aa, synthetic construct
MSWKKALRIPGGLRAATVTLMLAMLSTPVAEGRDSPEDFVYQFKAMCYFTNGTERVRYVTRYIYNREEYARFDSDVEVYRAVTPLGPPDAEYWNSQKEVLERTRAELDTVCRHNYQLELRTTLQRRVEPTVTISPSRTEALNHHNLLVCSVTDFYPAQIKVRWFRNDQEETTGVVSTPLIRNGDWTFQILVMLEMTPQHGDVYTCHVEHPSLQNPITVEWRAQSESAQSKMLSGIGGFVLGLIFLGLGLIIHHRSQKGLLH

SEQ ID NO: 23870 - protein, 93 aa, synthetic construct
PEVTVFSKSPVTLGQPNILICLVDNIFPPVVNITWLSNGHSVTEGVSETSFLSKSDHSFFKISYLTLLPSAEESYDCKVEHWGLDKPLLKHWE

SEQ ID NO: 23871 - protein, 12 aa, synthetic construct
PEIPAPMSELTE

SEQ ID NO: 23872 - protein, 96 aa, synthetic construct
RDSPEDFVYQFKAMCYFTNGTERVRYVTRYIYNREEYARFDSDVEVYRAVTPLGPPDAEYWNSQKEVLERTRAELDTVCRHNYQLELRTTLQRRVE

SEQ ID NO: 23873 - protein, 89 aa, synthetic construct
PTVTISPSRTEALNHHNLLVCSVTDFYPAQIKVRWFRNDQEETTGVVSTPLIRNGDWTFQILVMLEMTPQHGDVYTCHVEHPSLQNPIT

SEQ ID NO: 23874 - protein, 21 aa, synthetic construct
MLSGIGGFVLGLIFLGLGLII

SEQ ID NO: 23875 - protein, 21 aa, synthetic construct
MLSGIGGFVLGLIFLGLGLII

SEQ ID NO: 23876 - protein, 10 aa, synthetic construct
HHRSQKGLLH

SEQ ID NO: 23877 - protein, 800 aa, synthetic construct
MALPVTALLLPLALLLHAARPACRFYKTLRAEQGTGGGGSGGGGSGGGGSEFGDTRPRFLEYSTSECHFFNGTERVRFLDRYFYNQEEYVRFDSDVGEFRAVTELGRPDEEYWNSQKDFLEDRRAAVDTYCRHNYGVGESFTVQRRVHLEDLKNVFPPEVAVFEPSEAEISHTQKATLVCLATGFYPDHVELSWWVNGKEVHSGVSTDPQPLKEQPALNDSRYCLSSRLRVSATFWQNPRNHFRCQVQFYGLSENDEWTQDRAKPVTQIVSAEAWGRADCGSQSFGLLDPKLCYLLDGILFIYGVILTALFLRVKFSRSADAPAYQQGQNQLYNELNLGRREEYDVLDKRRGRDPEMGGKPRRKNPQEGLYNELQKDKMAEAYSEIGMKGERRRGKGHDGLYQGLSTATKDTYDALHMQALPPRRAKRSGSGATNFSLLKQAGDVEENPGPTSMDWIWRILFLVGAATGAHSFEIKEEHVIIQAEFYLNPDQSGEFMFDFDGDEIFHVDMAKKETVWRLEEFGRFASFEAQGALANIAVDKANLEIMTKRSNYTPITNVPTRIQNPDPAVYQLRDSKSSDKSVCLFTDFDSQTNVSQSKDSDVYITDKTVLDMRSMDFKSNSAVAWSNKSDFACANAFNNSIIPEDTFFPSPESSCGTQSFGLLDPKLCYLLDGILFIYGVILTALFLRVKFSRSADAPAYQQGQNQLYNELNLGRREEYDVLDKRRGRDPEMGGKPRRKNPQEGLYNELQKDKMAEAYSEIGMKGERRRGKGHDGLYQGLSTATKDTYDALHMQALPPR

SEQ ID NO: 23878 - protein, 754 aa, synthetic construct
MALPVTALLLPLALLLHAARPACRFYKTLRAEQGTGGGGSGGGGSGGGGSEFGDTRPRFLEYSTSECHFFNGTERVRFLDRYFYNQEEYVRFDSDVGEFRAVTELGRPDEEYWNSQKDFLEDRRAAVDTYCRHNYGVGESFTVQRRVHPKVTVYPSKTQPLQHHNLLVCSVSGFYPGSIEVRWFRNGQEEKTGVVSTGLIHNGDWTFQTLVMLETVPRSGEVYTCQVEHPSVTSPLTGSQSFGLLDPKLCYLLDGILFIYGVILTALFLRVKFSRSADAPAYQQGQNQLYNELNLGRREEYDVLDKRRGRDPEMGGKPRRKNPQEGLYNELQKDKMAEAYSEIGMKGERRRGKGHDGLYQGLSTATKDTYDALHMQALPPRRAKRSGSGATNFSLLKQAGDVEENPGPTSMDWIWRILFLVGAATGAHSFEIKEEHVIIQAEFYLNPDQSGEFMFDFDGDEIFHVDMAKKETVWRLEEFGRFASFEAQGALANIAVDKANLEIMTKRSNYTPITNVPPEVTVLTNSPVELREPNVLICFIDKFTPPVVNVTWLRNGKPVTTGVSETVFLPREDHLFRKFHYLPFLPSTEDVYDCRVEHWGLDEPLLKHWEGTQSFGLLDPKLCYLLDGILFIYGVILTALFLRVKFSRSADAPAYQQGQNQLYNELNLGRREEYDVLDKRRGRDPEMGGKPRRKNPQEGLYNELQKDKMAEAYSEIGMKGERRRGKGHDGLYQGLSTATKDTYDALHMQALPPR

SEQ ID NO: 23879 - protein, 779 aa, synthetic construct
MALPVTALLLPLALLLHAARPACRFYKTLRAEQGTGGGGSGGGGSGGGGSEFGDTRPRFLEYSTSECHFFNGTERVRFLDRYFYNQEEYVRFDSDVGEFRAVTELGRPDEEYWNSQKDFLEDRRAAVDTYCRHNYGVGESFTVQRRVHPKVTVYPSKTQPLQHHNLLVCSVSGFYPGSIEVRWFRNGQEEKTGVVSTGLIHNGDWTFQTLVMLETVPRSGEVYTCQVEHPSVTSPLTVEWRARSESAQSKGSQSFGLLDPKLCYLLDGILFIYGVILTALFLRVKFSRSADAPAYQQGQNQLYNELNLGRREEYDVLDKRRGRDPEMGGKPRRKNPQEGLYNELQKDKMAEAYSEIGMKGERRRGKGHDGLYQGLSTATKDTYDALHMQALPPRRAKRSGSGATNFSLLKQAGDVEENPGPTSMDWIWRILFLVGAATGAHSFEIKEEHVIIQAEFYLNPDQSGEFMFDFDGDEIFHVDMAKKETVWRLEEFGRFASFEAQGALANIAVDKANLEIMTKRSNYTPITNVPPEVTVLTNSPVELREPNVLICFIDKFTPPVVNVTWLRNGKPVTTGVSETVFLPREDHLFRKFHYLPFLPSTEDVYDCRVEHWGLDEPLLKHWEFDAPSPLPETTEGTQSFGLLDPKLCYLLDGILFIYGVILTALFLRVKFSRSADAPAYQQGQNQLYNELNLGRREEYDVLDKRRGRDPEMGGKPRRKNPQEGLYNELQKDKMAEAYSEIGMKGERRRGKGHDGLYQGLSTATKDTYDALHMQALPPR

SEQ ID NO: 23880 - protein, 783 aa, synthetic construct
MALPVTALLLPLALLLHAARPACRFYKTLRAEQGTGGGGSGGGGSGGGGSEFGDTRPRFLEYSTSECHFFNGTERVRFLDRYFYNQEEYVRFDSDVGEFRAVTELGRPDEEYWNSQKDFLEDRRAAVDTYCRHNYGVGESFTVQRRVHLEGQPKANPTVTLFPPSSEELQANKATLVCLISDFYPGAVTVAWKADGSPVKAGVETTKPSKQSNNKYAASSYLSLTPEQWKSHRSYSCQVTHEGSTVEKTVAPTECSGSQSFGLLDPKLCYLLDGILFIYGVILTALFLRVKFSRSADAPAYQQGQNQLYNELNLGRREEYDVLDKRRGRDPEMGGKPRRKNPQEGLYNELQKDKMAEAYSEIGMKGERRRGKGHDGLYQGLSTATKDTYDALHMQALPPRRAKRSGSGATNFSLLKQAGDVEENPGPTSMDWIWRILFLVGAATGAHSFEIKEEHVIIQAEFYLNPDQSGEFMFDFDGDEIFHVDMAKKETVWRLEEFGRFASFEAQGALANIAVDKANLEIMTKRSNYTPITNVPASTKGPSVFPLAPSSKSTSGGTAALGCLVKDYFPEPVTVSWNSGALTSGVHTFPAVLQSSGLYSLSSVVTVPSSSLGTQTYICNVNHKPSNTKVDKRVEPKSCGTQSFGLLDPKLCYLLDGILFIYGVILTALFLRVKFSRSADAPAYQQGQNQLYNELNLGRREEYDVLDKRRGRDPEMGGKPRRKNPQEGLYNELQKDKMAEAYSEIGMKGERRRGKGHDGLYQGLSTATKDTYDALHMQALPPR

SEQ ID NO: 23881 - protein, 706 aa, synthetic construct
MALPVTALLLPLALLLHAARPACRFYKTLRAEQGTGGGGSGGGGSGGGGSEFGDTRPRFLEYSTSECHFFNGTERVRFLDRYFYNQEEYVRFDSDVGEFRAVTELGRPDEEYWNSQKDFLEDRRAAVDTYCRHNYGVGESFTVQRRVHLEGQPKANPTVTLFPPSSEELQANKATLVCLISDFYPGAVTVAWKADGSPVKAGVETTKPSKQSNNKYAASSYLSLTPEQWKSHRSYSCQVTHEGSTVEKTVAPTECSGSQSFGLLDPKLCYLLDGILFIYGVILTALFLRVKFSRSADAPAYQQGQNQLYNELNLGRREEYDVLDKRRGRDPEMGGKPRRKNPQEGLYNELQKDKMAEAYSEIGMKGERRRGKGHDGLYQGLSTATKDTYDALHMQALPPRRAKRSGSGATNFSLLKQAGDVEENPGPTSMDWIWRILFLVGAATGAHSFEIKEEHVIIQAEFYLNPDQSGEFMFDFDGDEIFHVDMAKKETVWRLEEFGRFASFEAQGALANIAVDKANLEIMTKRSNYTPITNVPASTKGPSVFPLAPSSKSTSGGTAALGCLVKDYFPEPVTVSWNSGALTSGVHTFPAVLQSSGLYSLSSVVTVPSSSLGTQTYICNVNHKPSNTKVDKRVEPKSCGTITQGLAVSTISSFFPPGYQVSFCLVMVLLFAVDTGLYFSVKTNIRSSTRDWKDHKFKWRKDPQDK

SEQ ID NO: 23882 - protein, 709 aa, synthetic construct
MALPVTALLLPLALLLHAARPACRFYKTLRAEQGTGGGGSGGGGSGGGGSEFGDTRPRFLEYSTSECHFFNGTERVRFLDRYFYNQEEYVRFDSDVGEFRAVTELGRPDEEYWNSQKDFLEDRRAAVDTYCRHNYGVGESFTVQRRVHLEGQPKANPTVTLFPPSSEELQANKATLVCLISDFYPGAVTVAWKADGSPVKAGVETTKPSKQSNNKYAASSYLSLTPEQWKSHRSYSCQVTHEGSTVEKTVAPTECSGSQSFGLLDPKLCYLLDGILFIYGVILTALFLRVKFSRSADAPAYQQGQNQLYNELNLGRREEYDVLDKRRGRDPEMGGKPRRKNPQEGLYNELQKDKMAEAYSEIGMKGERRRGKGHDGLYQGLSTATKDTYDALHMQALPPRRAKRSGSGATNFSLLKQAGDVEENPGPTSMDWIWRILFLVGAATGAHSFEIKEEHVIIQAEFYLNPDQSGEFMFDFDGDEIFHVDMAKKETVWRLEEFGRFASFEAQGALANIAVDKANLEIMTKRSNYTPITNVPASTKGPSVFPLAPSSKSTSGGTAALGCLVKDYFPEPVTVSWNSGALTSGVHTFPAVLQSSGLYSLSSVVTVPSSSLGTQTYICNVNHKPSNTKVDKRVEPKSCGTLGEPQLCYILDAILFLYGIVLTLLYCRLKIQVRKAAITSYEKSDGVYTGLSTRNQETYETLKHEKPPQ

SEQ ID NO: 23883 - protein, 825 aa, synthetic construct
MALPVTALLLPLALLLHAARPACRFYKTLRAEQGTGGGGSGGGGSGGGGSEFGDTRPRFLEYSTSECHFFNGTERVRFLDRYFYNQEEYVRFDSDVGEFRAVTELGRPDEEYWNSQKDFLEDRRAAVDTYCRHNYGVGESFTVQRRVHLEGQPKANPTVTLFPPSSEELQANKATLVCLISDFYPGAVTVAWKADGSPVKAGVETTKPSKQSNNKYAASSYLSLTPEQWKSHRSYSCQVTHEGSTVEKTVAPTECSGSQSFGLLDPKLCYLLDGILFIYGVILTALFLRVKFSRSADAPAYQQGQNQLYNELNLGRREEYDVLDKRRGRDPEMGGKPRRKNPQEGLYNELQKDKMAEAYSEIGMKGERRRGKGHDGLYQGLSTATKDTYDALHMQALPPRRAKRSGSGATNFSLLKQAGDVEENPGPTSMDWIWRILFLVGAATGAHSFEIKEEHVIIQAEFYLNPDQSGEFMFDFDGDEIFHVDMAKKETVWRLEEFGRFASFEAQGALANIAVDKANLEIMTKRSNYTPITNVPASTKGPSVFPLAPSSKSTSGGTAALGCLVKDYFPEPVTVSWNSGALTSGVHTFPAVLQSSGLYSLSSVVTVPSSSLGTQTYICNVNHKPSNTKVDKRVEPKSCGTQSFGLLDPKLCYLLDGILFIYGVILTALFLKRGRKKLLYIFKQPFMRPVQTTQEEDGCSCRFPEEEEGGCELRVKFSRSADAPAYQQGQNQLYNELNLGRREEYDVLDKRRGRDPEMGGKPRRKNPQEGLYNELQKDKMAEAYSEIGMKGERRRGKGHDGLYQGLSTATKDTYDALHMQALPPR

SEQ ID NO: 23884 - protein, 1094 aa, synthetic construct
MALPVTALLLPLALLLHAARPACRFYKTLRAEQGTGGGGSGGGGSGGGGSEFGDTRPRFLEYSTSECHFFNGTERVRFLDRYFYNQEEYVRFDSDVGEFRAVTELGRPDEEYWNSQKDFLEDRRAAVDTYCRHNYGVGESFTVQRRVHLEGQPKANPTVTLFPPSSEELQANKATLVCLISDFYPGAVTVAWKADGSPVKAGVETTKPSKQSNNKYAASSYLSLTPEQWKSHRSYSCQVTHEGSTVEKTVAPTECSGSQSFGLLDPKLCYLLDGILFIYGVILTALFLRVKFSRSADAPAYQQGQNQLYNELNLGRREEYDVLDKRRGRDPEMGGKPRRKNPQEGLYNELQKDKMAEAYSEIGMKGERRRGKGHDGLYQGLSTATKDTYDALHMQALPPRRAKRSGSGATNFSLLKQAGDVEENPGPTSMDWIWRILFLVGAATGAHSFEIKEEHVIIQAEFYLNPDQSGEFMFDFDGDEIFHVDMAKKETVWRLEEFGRFASFEAQGALANIAVDKANLEIMTKRSNYTPITNVPASTKGPSVFPLAPSSKSTSGGTAALGCLVKDYFPEPVTVSWNSGALTSGVHTFPAVLQSSGLYSLSSVVTVPSSSLGTQTYICNVNHKPSNTKVDKRVEPKSCGTQSFGLLDPKLCYLLDGILFIYGVILTALFLKRGRKKLLYIFKQPFMRPVQTTQEEDGCSCRFPEEEEGGCELRVKFSRSADAPAYQQGQNQLYNELNLGRREEYDVLDKRRGRDPEMGGKPRRKNPQEGLYNELQKDKMAEAYSEIGMKGERRRGKGHDGLYQGLSTATKDTYDALHMQALPPRRAKRSGSGVKQTLNFDLLKLAGDVESNPGPSRGHMALPVTALLLPLALLLHAARPSQFRVSPLDRTWNLGETVELKCQVLLSNPTSGCSWLFQPRGAAASPTFLLYLSQNKPKAAEGLDTQRFSGKRLGDTFVLTLSDFRRENEGYYFCSALSNSIMYFSHFVPVFLPAKPTTTPAPRPPTPAPTIASQPLSLRPEACRPAAGGAVHTRGLDFACDIYIWAPLAGTCGVLLLSLVITLYCNHRNRRRVCKCPRPVVKSGDKPSLSARYV

SEQ ID NO: 23885 - protein, 610 aa, synthetic construct
MALPVTALLLPLALLLHAARPACRFYKTLRAEQGTGGGGSGGGGSGGGGSEFGDTRPRFLEYSTSECHFFNGTERVRFLDRYFYNQEEYVRFDSDVGEFRAVTELGRPDEEYWNSQKDFLEDRRAAVDTYCRHNYGVGESFTVQRRVHLEGQPKANPTVTLFPPSSEELQANKATLVCLISDFYPGAVTVAWKADGSPVKAGVETTKPSKQSNNKYAASSYLSLTPEQWKSHRSYSCQVTHEGSTVEKTVAPTECSGRADCGFTSESYQQGVLSATILYEILLGKATLYAVLVSALVLMAMVKRKDSRGRAKRSGSGATNFSLLKQAGDVEENPGPTSMDWIWRILFLVGAATGAHSFEIKEEHVIIQAEFYLNPDQSGEFMFDFDGDEIFHVDMAKKETVWRLEEFGRFASFEAQGALANIAVDKANLEIMTKRSNYTPITNVPTRASTKGPSVFPLAPSSKSTSGGTAALGCLVKDYFPEPVTVSWNSGALTSGVHTFPAVLQSSGLYSLSSVVTVPSSSLGTQTYICNVNHKPSNTKVDKRVEPKSCIPEDTFFPSPESSCDVKLVEKSFETDTNLNFQNLSVIGFRILLLKVAGFNLLMTLRLWSS

SEQ ID NO: 23886 - protein, 632 aa, synthetic construct
MALPVTALLLPLALLLHAARPACRFYKTLRAEQGTGGGGSGGGGSGGGGSEFGDTRPRFLEYSTSECHFFNGTERVRFLDRYFYNQEEYVRFDSDVGEFRAVTELGRPDEEYWNSQKDFLEDRRAAVDTYCRHNYGVGESFTVQRRVHLEGQPKANPTVTLFPPSSEELQANKATLVCLISDFYPGAVTVAWKADGSPVKAGVETTKPSKQSNNKYAASSYLSLTPEQWKSHRSYSCQVTHEGSTVEKTVAPTECSPIKTDVITMDPKDNCSKDANDTLLLQLTNTSAYYMYLLLLLKSVVYFAIITCCLLRRTAFCCNGEKSRAKRSGSGATNFSLLKQAGDVEENPGPTSMDWIWRILFLVGAATGAHSFEIKEEHVIIQAEFYLNPDQSGEFMFDFDGDEIFHVDMAKKETVWRLEEFGRFASFEAQGALANIAVDKANLEIMTKRSNYTPITNVPTRASTKGPSVFPLAPSSKSTSGGTAALGCLVKDYFPEPVTVSWNSGALTSGVHTFPAVLQSSGLYSLSSVVTVPSSSLGTQTYICNVNHKPSNTKVDKRVEPKSCEVKTDSTDHVKPKETENTKQPSKSCHKPKAIVHTEKVNMMSLTVLGLRMLFAKTVAVNFLLTAKLFFL

SEQ ID NO: 23887 - protein, 606 aa, synthetic construct
MALPVTALLLPLALLLHAARPACRFYKTLRAEQGTGGGGSGGGGSGGGGSEFGDTRPRFLEYSTSECHFFNGTERVRFLDRYFYNQEEYVRFDSDVGEFRAVTELGRPDEEYWNSQKDFLEDRRAAVDTYCRHNYGVGESFTVQRRVHLEDLKNVFPPEVAVFEPSEAEISHTQKATLVCLATGFYPDHVELSWWVNGKEVHSGVCTDPQPLKEQPALNDSRYCLSSRLRVSATFWQNPRNHFRCQVQFYGLSENDEWTQDRAKPVTQIVSAEAWGRADCGFTSESYQQGVLSATILYEILLGKATLYAVLVSALVLMAMVKRKDSRGRAKRSGSGATNFSLLKQAGDVEENPGPTSMDWIWRILFLVGAATGAHSFEIKEEHVIIQAEFYLNPDQSGEFMFDFDGDEIFHVDMAKKETVWRLEEFGRFASFEAQGALANIAVDKANLEIMTKRSNYTPITNVPTRIQNPDPAVYQLRDSKSSDKSVCLFTDFDSQTNVSQSKDSDVYITDKCVLDMRSMDFKSNSAVAWSNKSDFACANAFNNSIIPEDTFFPSPESSCDVKLVEKSFETDTNLNFQNLSVIGFRILLLKVAGFNLLMTLRLWSS

SEQ ID NO: 23888 - protein, 585 aa, synthetic construct
MALPVTALLLPLALLLHAARPACRFYKTLRAEQGTGGGGSGGGGSGGGGSEFGDTRPRFLEYSTSECHFFNGTERVRFLDRYFYNQEEYVRFDSDVGEFRAVTELGRPDEEYWNSQKDFLEDRRAAVDTYCRHNYGVGESFTVQRRVHLEIQNPDPAVYQLRDSKSSDKSVCLFTDFDSQTNVSQSKDSDVYITDKCVLDMRSMDFKSNSAVAWSNKSDFACANAFNNSIIPEDTFFPSSDVPCDVKLVEKSFETDTNLNFQNLSVIGFRILLLKVAGFNLLMTLRLWSSRAKRSGSGVKQTLNFDLLKLAGDVESNPGPTSMDWIWRILFLVGAATGAHSFEIKEEHVIIQAEFYLNPDQSGEFMFDFDGDEIFHVDMAKKETVWRLEEFGRFASFEAQGALANIAVDKANLEIMTKRSNYTPITNVPTREDLKNVFPPEVAVFEPSKAEIAHTQKATLVCLATGFYPDHVELSWWVNGKEVHSGVCTDPQPLKEQPALNDSRYCLSSRLRVSATFWQNPRNHFRCQVQFYGLSENDEWTQDRAKPVTQIVSAEAWGRADCGITSASYHQGVLSATILYEILLG

SEQ ID NO: 23889 - protein, 614 aa, synthetic construct
MALPVTALLLPLALLLHAARPACRFYKTLRAEQGTGGGGSGGGGSGGGGSEFGDTRPRFLEYSTSECHFFNGTERVRFLDRYFYNQEEYVRFDSDVGEFRAVTELGRPDEEYWNSQKDFLEDRRAAVDTYCRHNYGVGESFTVQRRVHLEDKQLDADVSPKPTIFLPSIAETKLQKAGTYLCLLEKFFPDVIKIHWQEKKSNTILGSQEGNTMKTNDTYMKFSWLTVPEKSLDKEHRCIVRHENNKNGVDQEIIFPPIKTDVITMDPKDNCSKDANDTLLLQLTNTSAYYMYLLLLLKSVVYFAIITCCLLRRTAFCCNGEKSRAKRSGSGATNFSLLKQAGDVEENPGPTSMDWIWRILFLVGAATGAHSFEIKEEHVIIQAEFYLNPDQSGEFMFDFDGDEIFHVDMAKKETVWRLEEFGRFASFEAQGALANIAVDKANLEIMTKRSNYTPITNVPTRSQPHTKPSVFVMKNGTNVACLVKEFYPKDIRINLVSSKKITEFDPAIVISPSGKYNAVKLGKYEDSNSVTCSVQHDNKTVHSTDFEVKTDSTDHVKPKETENTKQPSKSCHKPKAIVHTEKVNMMSLTVLGLRMLFAKTVAVNFLLTAKLFFL

SEQ ID NO: 23890 - protein, 614 aa, synthetic construct
MALPVTALLLPLALLLHAARPACRFYKTLRAEQGTGGGGSGGGGSGGGGSEFGDTRPRFLEYSTSECHFFNGTERVRFLDRYFYNQEEYVRFDSDVGEFRAVTELGRPDEEYWNSQKDFLEDRRAAVDTYCRHNYGVGESFTVQRRVHLESQPHTKPSVFVMKNGTNVACLVKEFYPKDIRINLVSSKKITEFDPAIVISPSGKYNAVKLGKYEDSNSVTCSVQHDNKTVHSTDFEVKTDSTDHVKPKETENTKQPSKSCHKPKAIVHTEKVNMMSLTVLGLRMLFAKTVAVNFLLTAKLFFLRAKRSGSGATNFSLLKQAGDVEENPGPTSMDWIWRILFLVGAATGAHSFEIKEEHVIIQAEFYLNPDQSGEFMFDFDGDEIFHVDMAKKETVWRLEEFGRFASFEAQGALANIAVDKANLEIMTKRSNYTPITNVPTRDKQLDADVSPKPTIFLPSIAETKLQKAGTYLCLLEKFFPDVIKIHWQEKKSNTILGSQEGNTMKTNDTYMKFSWLTVPEKSLDKEHRCIVRHENNKNGVDQEIIFPPIKTDVITMDPKDNCSKDANDTLLLQLTNTSAYYMYLLLLLKSVVYFAIITCCLLRRTAFCCNGEKS

SEQ ID NO: 23891 - protein, 606 aa, synthetic construct
MALPVTALLLPLALLLHAARPACRFYKTLRAEQGTGGGGSGGGGSGGGGSEFGDTRPRFLEYSTSECHFFNGTERVRFLDRYFYNQEEYVRFDSDVGEFRAVTELGRPDEEYWNSQKDFLEDRRAAVDTYCRHNYGVGESFTVQRRVHLEDLKNVFPPEVAVFEPSEAEISHTQKATLVCLATGFYPDHVELSWWVNGKEVHSGVSTDPQPLKEQPALNDSRYCLSSRLRVSATFWQNPRNHFRCQVQFYGLSENDEWTQDRAKPVTQIVSAEAWGRADCDVKLVEKSFETDTNLNFQNLSVIGFRILLLKVAGFNLLMTLRLWSSRAKRSGSGATNFSLLKQAGDVEENPGPTSMDWIWRILFLVGAATGAHSFEIKEEHVIIQAEFYLNPDQSGEFMFDFDGDEIFHVDMAKKETVWRLEEFGRFASFEAQGALANIAVDKANLEIMTKRSNYTPITNVPTRIQNPDPAVYQLRDSKSSDKSVCLFTDFDSQTNVSQSKDSDVYITDKTVLDMRSMDFKSNSAVAWSNKSDFACANAFNNSIIPEDTFFPSPESSCGFTSESYQQGVLSATILYEILLGKATLYAVLVSALVLMAMVKRKDSRG

SEQ ID NO: 23892 - protein, 10 aa, synthetic construct
RFYKTLRAEQ

SEQ ID NO: 23893 - protein, 559 aa, synthetic construct
MALPVTALLLPLALLLHAARPDIQMTQSPSSLSASVGDRVTITCKASDHINNWLAWYQQKPGQAPKLLIYGATTLETGVPSRFSGSGSGTDYTLTISSLQPEDFATYYCQQSWNTPWTFGQGTKLEIKRGGGGSGGGGSGGGGSQVQLQQPGAELVKPGASVKMSCKASGYAFSSYWINWMKQKPGQGLEWIGQIYPGDGDTNYNGKFKGRATLTADTSSSTAYMQLSSLTSEDSAVYFCARSITTVVGCAMDYWGQGTSVTVSSTRGMRTEDLPKAVVFLEPQWYRVLEKDSVTLKCQGAYSPEDNSTQWFHNESLISSQASSYFIDAATVDDSGEYRCQTNLSTLSDPVQLEVHIGWLLLQAPRWVFKEEDPIHLRCHSWKNTALHKVTYLQNGKGRKYFHHNSDFYIPKATLKDSGSYFCRGLVGSKNVSSETVNITITQGLAVPTISSFFPPGYQVSFCLVMVLLFAVDTGLYFSVKGGSGFNVLMVHRRSHTGERPFQCNQCGASFTQRGNLLRHIRLHTGERPFRCHLCNYACQRRDALTASAEARHIRAEMG

SEQ ID NO: 23894 - protein, 558 aa, synthetic construct
MALPVTALLLPLALLLHAARPDIQMTQSPSSLSASVGDRVTITCKASDHINNWLAWYQQKPGQAPKLLIYGATTLETGVPSRFSGSGSGTDYTLTISSLQPEDFATYYCQQSWNTPWTFGQGTKLEIKRGGGGSGGGGSGGGGSQVQLQQPGAELVKPGASVKMSCKASGYAFSSYWINWMKQKPGQGLEWIGQIYPGDGDTNYNGKFKGRATLTADTSSSTAYMQLSSLTSEDSAVYFCARSITTVVGCAMDYWGQGTSVTVSSTRGMRTEDLPKAVVFLEPQWYRVLEKDSVTLKCQGAYSPEDNSTQWFHNESLISSQASSYFIDAATVDDSGEYRCQTNLSTLSDPVQLEVHIGWLLLQAPRWVFKEEDPIHLRCHSWKNTALHKVTYLQNGKGRKYFHHNSDFYIPKATLKDSGSYFCRGLVGSKNVSSETVNITITQGLAVPTISSFFPPGYQVSFCLVMVLLFAVDTGLYFSVGGSGFNVLMVHRRSHTGERPFQCNQCGASFTQRGNLLRHIRLHTGERPFRCHLCNYACQRRDALTASAEARHIRAEMG

SEQ ID NO: 23895 - protein, 557 aa, synthetic construct
MALPVTALLLPLALLLHAARPDIQMTQSPSSLSASVGDRVTITCKASDHINNWLAWYQQKPGQAPKLLIYGATTLETGVPSRFSGSGSGTDYTLTISSLQPEDFATYYCQQSWNTPWTFGQGTKLEIKRGGGGSGGGGSGGGGSQVQLQQPGAELVKPGASVKMSCKASGYAFSSYWINWMKQKPGQGLEWIGQIYPGDGDTNYNGKFKGRATLTADTSSSTAYMQLSSLTSEDSAVYFCARSITTVVGCAMDYWGQGTSVTVSSTRGMRTEDLPKAVVFLEPQWYRVLEKDSVTLKCQGAYSPEDNSTQWFHNESLISSQASSYFIDAATVDDSGEYRCQTNLSTLSDPVQLEVHIGWLLLQAPRWVFKEEDPIHLRCHSWKNTALHKVTYLQNGKGRKYFHHNSDFYIPKATLKDSGSYFCRGLVGSKNVSSETVNITITQGLAVPTISSFFPPGYQVSFCLVMVLLFAVDTGLYFSGGSGFNVLMVHRRSHTGERPFQCNQCGASFTQRGNLLRHIRLHTGERPFRCHLCNYACQRRDALTASAEARHIRAEMG

SEQ ID NO: 23896 - protein, 582 aa, synthetic construct
MALPVTALLLPLALLLHAARPDIQMTQSPSSLSASVGDRVTITCKASDHINNWLAWYQQKPGQAPKLLIYGATTLETGVPSRFSGSGSGTDYTLTISSLQPEDFATYYCQQSWNTPWTFGQGTKLEIKRGGGGSGGGGSGGGGSQVQLQQPGAELVKPGASVKMSCKASGYAFSSYWINWMKQKPGQGLEWIGQIYPGDGDTNYNGKFKGRATLTADTSSSTAYMQLSSLTSEDSAVYFCARSITTVVGCAMDYWGQGTSVTVSSTRGMRTEDLPKAVVFLEPQWYRVLEKDSVTLKCQGAYSPEDNSTQWFHNESLISSQASSYFIDAATVDDSGEYRCQTNLSTLSDPVQLEVHIGWLLLQAPRWVFKEEDPIHLRCHSWKNTALHKVTYLQNGKGRKYFHHNSDFYIPKATLKDSGSYFCRGLVGSKNVSSETVNITITQGLAVPTISSFFPPGYQVSFCLVMVLLFAVDTGLYFSVKTNIRSSTRDWKDHKFKWRKDPQDKGGSFNVLMVHRRSHTGERPFQCNQCGASFTQRGNLLRHIRLHTGERPFRCHLCNYACQRRDALTASAEARHIRAEMG

SEQ ID NO: 23897 - protein, 558 aa, synthetic construct
MALPVTALLLPLALLLHAARPDIQMTQSPSSLSASVGDRVTITCKASDHINNWLAWYQQKPGQAPKLLIYGATTLETGVPSRFSGSGSGTDYTLTISSLQPEDFATYYCQQSWNTPWTFGQGTKLEIKRGGGGSGGGGSGGGGSQVQLQQPGAELVKPGASVKMSCKASGYAFSSYWINWMKQKPGQGLEWIGQIYPGDGDTNYNGKFKGRATLTADTSSSTAYMQLSSLTSEDSAVYFCARSITTVVGCAMDYWGQGTSVTVSSTRGMRTEDLPKAVVFLEPQWYRVLEKDSVTLKCQGAYSPEDNSTQWFHNESLISSQASSYFIDAATVDDSGEYRCQTNLSTLSDPVQLEVHIGWLLLQAPRWVFKEEDPIHLRCHSWKNTALHKVTYLQNGKGRKYFHHNSDFYIPKATLKDSGSYFCRGLVGSKNVSSETVNITITQGLAVPTISSFFPPGYQVSFCLVMVLLFAVDTGLYFSVKGGSFNVLMVHRRSHTGERPFQCNQCGASFTQRGNLLRHIRLHTGERPFRCHLCNYACQRRDALTASAEARHIRAEMG

SEQ ID NO: 23898 - protein, 557 aa, synthetic construct
MALPVTALLLPLALLLHAARPDIQMTQSPSSLSASVGDRVTITCKASDHINNWLAWYQQKPGQAPKLLIYGATTLETGVPSRFSGSGSGTDYTLTISSLQPEDFATYYCQQSWNTPWTFGQGTKLEIKRGGGGSGGGGSGGGGSQVQLQQPGAELVKPGASVKMSCKASGYAFSSYWINWMKQKPGQGLEWIGQIYPGDGDTNYNGKFKGRATLTADTSSSTAYMQLSSLTSEDSAVYFCARSITTVVGCAMDYWGQGTSVTVSSTRGMRTEDLPKAVVFLEPQWYRVLEKDSVTLKCQGAYSPEDNSTQWFHNESLISSQASSYFIDAATVDDSGEYRCQTNLSTLSDPVQLEVHIGWLLLQAPRWVFKEEDPIHLRCHSWKNTALHKVTYLQNGKGRKYFHHNSDFYIPKATLKDSGSYFCRGLVGSKNVSSETVNITITQGLAVPTISSFFPPGYQVSFCLVMVLLFAVDTGLYFSKGGSFNVLMVHRRSHTGERPFQCNQCGASFTQRGNLLRHIRLHTGERPFRCHLCNYACQRRDALTASAEARHIRAEMG

SEQ ID NO: 23899 - protein, 556 aa, synthetic construct
MALPVTALLLPLALLLHAARPDIQMTQSPSSLSASVGDRVTITCKASDHINNWLAWYQQKPGQAPKLLIYGATTLETGVPSRFSGSGSGTDYTLTISSLQPEDFATYYCQQSWNTPWTFGQGTKLEIKRGGGGSGGGGSGGGGSQVQLQQPGAELVKPGASVKMSCKASGYAFSSYWINWMKQKPGQGLEWIGQIYPGDGDTNYNGKFKGRATLTADTSSSTAYMQLSSLTSEDSAVYFCARSITTVVGCAMDYWGQGTSVTVSSTRGMRTEDLPKAVVFLEPQWYRVLEKDSVTLKCQGAYSPEDNSTQWFHNESLISSQASSYFIDAATVDDSGEYRCQTNLSTLSDPVQLEVHIGWLLLQAPRWVFKEEDPIHLRCHSWKNTALHKVTYLQNGKGRKYFHHNSDFYIPKATLKDSGSYFCRGLVGSKNVSSETVNITITQGLAVPTISSFFPPGYQVSFCLVMVLLFAVDTGLYFSGGSFNVLMVHRRSHTGERPFQCNQCGASFTQRGNLLRHIRLHTGERPFRCHLCNYACQRRDALTASAEARHIRAEMG

SEQ ID NO: 23900 - protein, 582 aa, synthetic construct; identical to SEQ ID NO: 23896

SEQ ID NO: 23901 - DNA, 762 bp, synthetic construct
  source 1..762: mol_type = other DNA
gatatccagaaccctgaccctgccgtgtaccagctgagagactctaaatccagtgacaagtctgtctgcctattcaccgattttgattctcaaacaaatgtgtcacaaagtaaggattctgatgtgtatatcacagacaaaactgtgctagacatgaggtctatggacttcaagagcaacagtgctgtggcctggagcaacaaatctgactttgcatgtgcaaacgccttcaacaacagcattattccagaagacaccttcttccccagcccagaaagttcctgtgatgtcaagctggtcgagaaaagctttgaaacagatacgaacctaaactttcaaaacctgtcagtgattgggttccgaatcctcctcctgaaagtggccgggtttaatctgctcatgacgctgcggctgtggtccagccgggttaagttttccagatccgcagacgcacccgcttaccaacaagggcagaaccaactctacaatgaacttaatttggggcggagggaagagtacgacgttctggacaaaaggaggggacgagatcccgagatgggcggaaagcctcagcgaaggaagaatccgcaagaggggctttataacgaactccagaaagataaaatggcagaagcctatagtgagattgggatgaagggagaaaggaggaggggtaaaggtcacgatgggttgtaccaaggattgagcacagccactaaagatacctatgatgcgctccacatgcaggccctgccgccaaga

SEQ ID NO: 23902 - DNA, 759 bp, synthetic construct
  source 1..759: mol_type = other DNA
atccagaaccctgaccctgccgtgtaccagctgagagactctaaatccagtgacaagtctgtctgcctattcaccgattttgattctcaaacaaatgtgtcacaaagtaaggattctgatgtgtatatcacagacaaaactgtgctagacatgaggtctatggacttcaagagcaacagtgctgtggcctggagcaacaaatctgactttgcatgtgcaaacgccttcaacaacagcattattccagaagacaccttcttccccagcccagaaagttcctgtgatgtcaagctggtcgagaaaagctttgaaacagatacgaacctaaactttcaaaacctgtcagtgattgggttccgaatcctcctcctgaaagtggccgggtttaatctgctcatgacgctgcggctgtggtccagccgggttaagttttccagatccgcagacgcacccgcttaccaacaagggcagaaccaactctacaatgaacttaatttggggcggagggaagagtacgacgttctggacaaaaggaggggacgagatcccgagatgggcggaaagcctcagcgaaggaagaatccgcaagaggggctttataacgaactccagaaagataaaatggcagaagcctatagtgagattgggatgaagggagaaaggaggaggggtaaaggtcacgatgggttgtaccaaggattgagcacagccactaaagatacctatgatgcgctccacatgcaggccctgccgccaaga

SEQ ID NO: 23903 - DNA, 759 bp, synthetic construct
  source 1..759: mol_type = other DNA
atccagaaccctgatcctgccgtgtaccagctgcgggatagcaagagcagcgacaagagcgtgtgtctgttcaccgacttcgacagccagaccaacgtgtcccagagcaaggactccgacgtgtacatcaccgataagtgcgtgctggacatgcggagcatggacttcaagagcaactccgccgtggcctggtccaacaagtccgatttcgcctgcgccaacgccttcaacaacagcattatccccgaggacacattcttcccaagcagcgacgtgccctgcgacgtgaagctggtggaaaagagcttcgagacagacaccaacctgaacttccagaacctgagcgtgatcggcttcagaatcctgctgctgaaagtggccggctttaacctgctgatgaccctgcggctgtggtccagccgggttaagttttccagatccgcagacgcacccgcttaccaacaagggcagaaccaactctacaatgaacttaatttggggcggagggaagagtacgacgttctggacaaaaggaggggacgagatcccgagatgggcggaaagcctcagcgaaggaagaatccgcaagaggggctttataacgaactccagaaagataaaatggcagaagcctatagtgagattgggatgaagggagaaaggaggaggggtaaaggtcacgatgggttgtaccaaggattgagcacagccactaaagatacctatgatgcgctccacatgcaggccctgccgccaaga

SEQ ID NO: 23904 - DNA, 759 bp, synthetic construct
  source 1..759: mol_type = other DNA
atccagaaccctgatcctgccgtgtaccagctgcgggatagcaagagcagcgacaagagcgtgtgtctgttcaccgacttcgacagccagaccaacgtgtcccagagcaaggactccgacgtgtacatcaccgataagaccgtgctggacatgcggagcatggacttcaagagcaactccgccgtggcctggtccaacaagtccgatttcgcctgcgccaacgccttcaacaacagcattatccccgaggacacattcttcccaagccccgagagcagctgcgacgtgaagctggtggaaaagagcttcgagacagacaccaacctgaacttccagaacctgagcgtgatcggcttcagaatcctgctgctgaaagtggccggctttaacctgctgatgaccctgcggctgtggtccagccgggttaagttttccagatccgcagacgcacccgcttaccaacaagggcagaaccaactctacaatgaacttaatttggggcggagggaagagtacgacgttctggacaaaaggaggggacgagatcccgagatgggcggaaagcctcagcgaaggaagaatccgcaagaggggctttataacgaactccagaaagataaaatggcagaagcctatagtgagattgggatgaagggagaaaggaggaggggtaaaggtcacgatgggttgtaccaaggattgagcacagccactaaagatacctatgatgcgctccacatgcaggccctgccgccaaga

SEQ ID NO: 23905 - DNA, 750 bp, synthetic construct
  source 1..750: mol_type = other DNA
cctgatcctgccgtgtaccagctgcgggatagcaagagcagcgacaagagcgtgtgcctgttcaccgacttcgacagccagaccaacgtgtctcagtctaaggatagtgatgtgtatatcaccgacaagaccgtgctggacatgcggagcatggacttcaagagcaacagcgccgtggcctggtccaacaagagcgacttcgcctgcgccaacgccttcaacaacagcatcatccccgaggacaccttcttccccagccccgagagcagctgcgacgtgaaactggtggagaagagcttcgagacagacaccaacctgaacttccagaacctgagcgtgatcggcttcagaatcctgctgctgaaggtggccggcttcaacctgctgatgaccctgcggctgtggagcagccgggttaagttttccagatccgcagacgcacccgcttaccaacaagggcagaaccaactctacaatgaacttaatttggggcggagggaagagtacgacgttctggacaaaaggaggggacgagatcccgagatgggcggaaagcctcagcgaaggaagaatccgcaagaggggctttataacgaactccagaaagataaaatggcagaagcctatagtgagattgggatgaagggagaaaggaggaggggtaaaggtcacgatgggttgtaccaaggattgagcacagccactaaagatacctatgatgcgctccacatgcaggccctgccgccaaga

SEQ ID NO: 23906 - DNA, 759 bp, synthetic construct
  source 1..759: mol_type = other DNA
atccagaaccctgatcctgccgtgtaccagctgcgggatagcaagagcagcgacaagagcgtgtgtctgttcaccgacttcgacagccagaccaacgtgtcccagagcaaggactccgacgtgtacatcaccgataagtgcgtgctggacatgcggagcatggacttcaagagcaactccgccgtggcctggtccaacaagtccgatttcgcctgcgccaacgccttcaacaacagcattatccccgaggacacattcttcccaagccccgagagcagctgcgacgtgaagctggtggaaaagagcttcgagacagacaccaacctgaacttccagaacctgagcgtgatcggcttcagaatcctgctgctgaaagtggccggctttaacctgctgatgaccctgcggctgtggtccagccgggttaagttttccagatccgcagacgcacccgcttaccaacaagggcagaaccaactctacaatgaacttaatttggggcggagggaagagtacgacgttctggacaaaaggaggggacgagatcccgagatgggcggaaagcctcagcgaaggaagaatccgcaagaggggctttataacgaactccagaaagataaaatggcagaagcctatagtgagattgggatgaagggagaaaggaggaggggtaaaggtcacgatgggttgtaccaaggattgagcacagccactaaagatacctatgatgcgctccacatgcaggccctgccgccaaga

SEQ ID NO: 23907 - DNA, 750 bp, synthetic construct
  source 1..750: mol_type = other DNA
cctgatcctgccgtgtaccagctgcgggatagcaagagcagcgacaagagcgtgtgtctgttcaccgacttcgacagccagaccaacgtgtcccagagcaaggactccgacgtgtacatcaccgataagtgcgtgctggacatgcggagcatggacttcaagagcaactccgccgtggcctggtccaacaagtccgatttcgcctgcgccaacgccttcaacaacagcattatccccgaggacacattcttcccaagccccgagagcagctgcgacgtgaagctggtggaaaagagcttcgagacagacaccaacctgaacttccagaacctgagcgtgatcggcttcagaatcctgctgctgaaagtggccggctttaacctgctgatgaccctgcggctgtggtccagccgggttaagttttccagatccgcagacgcacccgcttaccaacaagggcagaaccaactctacaatgaacttaatttggggcggagggaagagtacgacgttctggacaaaaggaggggacgagatcccgagatgggcggaaagcctcagcgaaggaagaatccgcaagaggggctttataacgaactccagaaagataaaatggcagaagcctatagtgagattgggatgaagggagaaaggaggaggggtaaaggtcacgatgggttgtaccaaggattgagcacagccactaaagatacctatgatgcgctccacatgcaggccctgccgccaaga

SEQ ID NO: 23908 - DNA, 759 bp, synthetic construct
  source 1..759: mol_type = other DNA
atccagaaccctgatcctgccgtgtaccagctgcgggatagcaagagcagcgacaagagcgtgtgtctgttcaccgacttcgacagccagaccaacgtgtcccagagcaaggactccgacgtgtacatcaccgataagaccgtgctggacatgcggagcatggacttcaagagcaactccgccgtggcctggtccaacaagtccgatttcgcctgcgccaacgccttcaacaacagcattatccccgaggacacattcttcccaagcagcgacgtgccctgcgacgtgaagctggtggaaaagagcttcgagacagacaccaacctgaacttccagaacctgagcgtgatcggcttcagaatcctgctgctgaaagtggccggctttaacctgctgatgaccctgcggctgtggtccagccgggttaagttttccagatccgcagacgcacccgcttaccaacaagggcagaaccaactctacaatgaacttaatttggggcggagggaagagtacgacgttctggacaaaaggaggggacgagatcccgagatgggcggaaagcctcagcgaaggaagaatccgcaagaggggctttataacgaactccagaaagataaaatggcagaagcctatagtgagattgggatgaagggagaaaggaggaggggtaaaggtcacgatgggttgtaccaaggattgagcacagccactaaagatacctatgatgcgctccacatgcaggccctgccgccaaga

SEQ ID NO: 23909 - DNA, 759 bp, synthetic construct
  source 1..759: mol_type = other DNA
atccagaaccctgatcctgccgtgtaccagctgcgggatagcaagagcagcgacaagagcgtgtgtctgttcaccgacttcgacagccagaccaacgtgtcccagagcaaggactccgacgtgtacatcaccgataagaccgtgctggacatgcggagcatggacttcaagagcaaccgcgccgtggcctggtccaacaagtccgatttcgcctgcgccaacgccttcaacaacagcattatccccgaggacacattcttcccaagccccgagagcagctgcgacgtgaagctggtggaaaagagcttcgagacagacaccaacctgaacttccagaacctgagcgtgatcggcttcagaatcctgctgctgaaagtggccggctttaacctgctgatgaccctgcggctgtggtccagccgggttaagttttccagatccgcagacgcacccgcttaccaacaagggcagaaccaactctacaatgaacttaatttggggcggagggaagagtacgacgttctggacaaaaggaggggacgagatcccgagatgggcggaaagcctcagcgaaggaagaatccgcaagaggggctttataacgaactccagaaagataaaatggcagaagcctatagtgagattgggatgaagggagaaaggaggaggggtaaaggtcacgatgggttgtaccaaggattgagcacagccactaaagatacctatgatgcgctccacatgcaggccctgccgccaaga

SEQ ID NO: 23910 - DNA, 759 bp, synthetic construct
  source 1..759: mol_type = other DNA
atccagaaccctgatcctgccgtgtaccagctgcgggatagcaagagcagcgacaagagcgtgtgtctgttcaccgacttcgacagccagaccaacgtgtcccagagcaaggactccgacgtgtacatcaccgataagaccgtgctggacatgcggagcatggacttcaagagcaaccgcgccgtggcctggtccaacaagtccgatttcgcctgcgccaacgccttcaacaacagcattatccccgaggacacattcttcccaagcagcgacgtgccctgcgacgtgaagctggtggaaaagagcttcgagacagacaccaacctgaacttccagaacctgagcgtgatcggcttcagaatcctgctgctgaaagtggccggctttaacctgctgatgaccctgcggctgtggtccagccgggttaagttttccagatccgcagacgcacccgcttaccaacaagggcagaaccaactctacaatgaacttaatttggggcggagggaagagtacgacgttctggacaaaaggaggggacgagatcccgagatgggcggaaagcctcagcgaaggaagaatccgcaagaggggctttataacgaactccagaaagataaaatggcagaagcctatagtgagattgggatgaagggagaaaggaggaggggtaaaggtcacgatgggttgtaccaaggattgagcacagccactaaagatacctatgatgcgctccacatgcaggccctgccgccaaga

SEQ ID NO: 23911 - DNA, 759 bp, synthetic construct
  source 1..759: mol_type = other DNA
atccagaaccctgatcctgccgtgtaccagctgcgggatagcaagagcagcgacaagagcgtgtgtctgttcaccgacttcgacagccagaccaacgtgtcccagagcaaggactccgacgtgtacatcaccgataagaccgtgctggacatgcggagcatggacttcaagagcaactccgccgtggcctggtccaacaagtccgatttcgcctgcgccaacgccttcaacaacagcattatccccgaggacacattcttcccaagcagcgacagcagctgcgacgtgaagctggtggaaaagagcttcgagacagacaccaacctgaacttccagaacctgagcgtgatcggcttcagaatcctgctgctgaaagtggccggctttaacctgctgatgaccctgcggctgtggtccagccgggttaagttttccagatccgcagacgcacccgcttaccaacaagggcagaaccaactctacaatgaacttaatttggggcggagggaagagtacgacgttctggacaaaaggaggggacgagatcccgagatgggcggaaagcctcagcgaaggaagaatccgcaagaggggctttataacgaactccagaaagataaaatggcagaagcctatagtgagattgggatgaagggagaaaggaggaggggtaaaggtcacgatgggttgtaccaaggattgagcacagccactaaagatacctatgatgcgctccacatgcaggccctgccgccaaga

SEQ ID NO: 23912 - DNA, 1056 bp, synthetic construct
  source 1..1056: mol_type = other DNA
atccagaaccctgatcctgccgtgtaccagctgcgggatagcaagagcagcgacaagagcgtgtgtctgttcaccgacttcgacagccagaccaacgtgtcccagagcaaggactccgacgtgtacatcaccgataagaccgtgctggacatgcggagcatggacttcaagagcaactccgccgtggcctggtccaacaagtccgatttcgcctgcgccaacgccttcaacaacagcattatccccgaggacacattcttcccaagccccgagagcagctgcggtacccagagttttgggttgttggaccctaaattgtgctatctgttggacggaatcctgttcatttacggagtgatcctgaccgcattgttcctgcgggttaagttttccagatccgcagacgcacccgcttaccaacaagggcagaaccaactctacaatgaacttaatttggggcggagggaagagtacgacgttctggacaaaaggaggggacgagatcccgagatgggcggaaagcctcagcgaaggaagaatccgcaagaggggctttataacgaactccagaaagataaaatggcagaagcctatagtgagattgggatgaagggagaaaggaggaggggtaaaggtcacgatgggttgtaccaaggattgagcacagccactaaagatacctatgatgcgctccacatgcaggccctgccgccaagacgggttaagttttccagatccgcagacgcacccgcttaccaacaagggcagaaccaactctacaatgaacttaatttggggcggagggaagagtacgacgttctggacaaaaggaggggacgagatcccgagatgggcggaaagcctcagcgaaggaagaatccgcaagaggggctttataacgaactccagaaagataaaatggcagaagcctatagtgagattgggatgaagggagaaaggaggaggggtaaaggtcacgatgggttgtaccaaggattgagcacagccactaaagatacctatgatgcgctccacatgcaggccctgccgccaaga

SEQ ID NO: 23913 - DNA, 747 bp, synthetic construct
  source 1..747: mol_type = other DNA
atccagaaccctgaacctgccgtgtaccagctgaaggaccccagaagccaggacagcaccctgtgcctgttcaccgacttcgacagccagatcaacgtgcccaagacaatggaaagcggcaccttcatcaccgacaagaccgtgctggacatgaaggctatggacagcaagagcaacggcgccattgcctggtccaaccagaccagcttcacatgccaggacatcttcaaagagacaaacgccacctacccctccagcgacgtgccctgtgacgccaccctgaccgagaagtccttcgagacagacatgaacctcaacttccagaacctgagcgtgatgggcctgcgaatcctgctgctgaaagtggccggcttcaacctgctgatgaccctgcggctgtggtccagccgggttaagttttccagatccgcagacgcacccgcttaccaacaagggcagaaccaactctacaatgaacttaatttggggcggagggaagagtacgacgttctggacaaaaggaggggacgagatcccgagatgggcggaaagcctcagcgaaggaagaatccgcaagaggggctttataacgaactccagaaagataaaatggcagaagcctatagtgagattgggatgaagggagaaaggaggaggggtaaaggtcacgatgggttgtaccaaggattgagcacagccactaaagatacctatgatgcgctccacatgcaggccctgccgccaaga

SEQ ID NO: 23914 - DNA, 738 bp, synthetic construct
  source 1..738: mol_type = other DNA
gtgcaggaccctgaccctagcgtgtaccagatgagaagccccaagaccggcaggaccgtgtgcctgttcaccgacttcgacagccaggccgacttccagaagcctgagggggccaccgtgatctccctgaacagcaccgtgctggacatgaaagtgatggacagcaagagcaacggcgctctgacctggaacagcgagacaaacatcgagtgcaaagagaacttccagcagcccttctaccccagcagcaactactcctgcgacgccaagctgatcgagaagtccttcgagacagacatggacctgaacttctacaacctgctggtcatcggcctgagaatcctgctgctgaaagtgatcggcttcaacctgttcatgaccctgaggctgtggtcctgccgggttaagttttccagatccgcagacgcacccgcttaccaacaagggcagaaccaactctacaatgaacttaatttggggcggagggaagagtacgacgttctggacaaaaggaggggacgagatcccgagatgggcggaaagcctcagcgaaggaagaatccgcaagaggggctttataacgaactccagaaagataaaatggcagaagcctatagtgagattgggatgaagggagaaaggaggaggggtaaaggtcacgatgggttgtaccaaggattgagcacagccactaaagatacctatgatgcgctccacatgcaggccctgccgccaaga

SEQ ID NO: 23915 - DNA, 870 bp, synthetic construct
  source 1..870: mol_type = other DNA
gaggacctgaacaaggtgttcccacccgaggtcgctgtgtttgagccatcagaagcagagatctcccacacccaaaaggccacactggtgtgcctggccacaggcttcttccccgaccacgtggagctgagctggtgggtgaatgggaaggaggtgcacagtggggtcagcacagacccgcagcccctcaaggagcagcccgccctcaatgactccagatactgcctgagcagccgcctgagggtctcggccaccttctggcagaacccccgcaaccacttccgctgtcaagtccagttctacgggctctcggagaatgacgagtggacccaggatagggccaaacccgtcacccagatcgtcagcgccgaggcctggggtagagcagactgtggctttacctcggtgtcctaccagcaaggggtcctgtctgccaccatcctctatgagatcctgctagggaaggccaccctgtatgctgtgctggtcagcgcccttgtgttgatggccatggtcaagagaaaggatttccgggttaagttttccagatccgcagacgcacccgcttaccaacaagggcagaaccaactctacaatgaacttaatttggggcggagggaagagtacgacgttctggacaaaaggaggggacgagatcccgagatgggcggaaagcctcagcgaaggaagaatccgcaagaggggctttataacgaactccagaaagataaaatggcagaagcctatagtgagattgggatgaagggagaaaggaggaggggtaaaggtcacgatgggttgtaccaaggattgagcacagccactaaagatacctatgatgcgctccacatgcaggccctgccgccaaga

SEQ ID NO: 23916 - DNA, 876 bp, synthetic construct
  source 1..876: mol_type = other DNA
gaggacctgaaaaacgtgttcccacccgaggtcgctgtgtttgagccatcagaagcagagatctcccacacccaaaaggccacactggtatgcctggccacaggcttctaccccgaccacgtggagctgagctggtgggtgaatgggaaggaggtgcacagtggggtcagcacagacccgcagcccctcaaggagcagcccgccctcaatgactccagatactgcctgagcagccgcctgagggtctcggccaccttctggcagaacccccgcaaccacttccgctgtcaagtccagttctacgggctctcggagaatgacgagtggacccaggatagggccaaacccgtcacccagatcgtcagcgccgaggcctggggtagagcagactgtggcttcacctccgagtcttaccagcaaggggtcctgtctgccaccatcctctatgagatcttgctagggaaggccaccttgtatgccgtgctggtcagtgccctcgtgctgatggccatggtcaagagaaaggattccagaggccgggttaagttttccagatccgcagacgcacccgcttaccaacaagggcagaaccaactctacaatgaacttaatttggggcggagggaagagtacgacgttctggacaaaaggaggggacgagatcccgagatgggcggaaagcctcagcgaaggaagaatccgcaagaggggctttataacgaactccagaaagataaaatggcagaagcctatagtgagattgggatgaagggagaaaggaggaggggtaaaggtcacgatgggttgtaccaaggattgagcacagccactaaagatacctatgatgcgctccacatgcaggccctgccgccaaga

SEQ ID NO: 23917 - DNA, 876 bp, synthetic construct; identical to SEQ ID NO: 23916
  source 1..876: mol_type = other DNA

SEQ ID NO: 23918 - DNA, 876 bp, synthetic construct
  source 1..876: mol_type = other DNA
gaggacctgaagaacgtgttcccacctgaggtggccgtgttcgagcctagcgaggccgagatcagccacacccagaaagccaccctcgtgtgcctggctaccggcttctaccccgaccatgtggaactgtcttggtgggtcaacggcaaagaggtgcacagcggcgtgtgtaccgacccccagccactgaaagaacagcccgccctgaacgacagccggtactgcctgagcagcagactgagagtgtccgccaccttctggcagaacccccggaaccacttcagatgccaggtgcagttctacggcctgagcgagaacgacgagtggacccaggacagagccaagcccgtgacccagatcgtgtctgccgaagcctggggcagagccgattgcggctttaccagcgagagctaccagcagggcgtgctgagcgccaccatcctgtacgagatcctgctgggcaaggccaccctgtacgccgtgctggtgtctgccctggtgctgatggctatggtcaagcggaaggacagccggggacgggttaagttttccagatccgcagacgcacccgcttaccaacaagggcagaaccaactctacaatgaacttaatttggggcggagggaagagtacgacgttctggacaaaaggaggggacgagatcccgagatgggcggaaagcctcagcgaaggaagaatccgcaagaggggctttataacgaactccagaaagataaaatggcagaagcctatagtgagattgggatgaagggagaaaggaggaggggtaaaggtcacgatgggttgtaccaaggattgagcacagccactaaagatacctatgatgcgctccacatgcaggccctgccgccaaga

SEQ ID NO: 23919 - DNA, 876 bp, synthetic construct
  source 1..876: mol_type = other DNA
gaggacctgaagaacgtgttcccacctgaggtggccgtgttcgagcctagcaaggccgagatcgcccacacccagaaagccaccctcgtgtgcctggctaccggcttctaccccgaccatgtggaactgtcttggtgggtcaacggcaaagaggtgcacagcggcgtgtgtaccgacccccagccactgaaagaacagcccgccctgaacgacagccggtactgcctgagcagcagactgagagtgtccgccaccttctggcagaacccccggaaccacttcagatgccaggtgcagttctacggcctgagcgagaacgacgagtggacccaggacagagccaagcccgtgacccagatcgtgtctgccgaagcctggggcagagccgattgcggcatcaccagcgccagctaccaccagggcgtgctgagcgccaccatcctgtacgagatcctgctgggcaaggccaccctgtacgccgtgctggtgtctgccctggtgctgatggctatggtcaagcggaaggacagccggggacgggttaagttttccagatccgcagacgcacccgcttaccaacaagggcagaaccaactctacaatgaacttaatttggggcggagggaagagtacgacgttctggacaaaaggaggggacgagatcccgagatgggcggaaagcctcagcgaaggaagaatccgcaagaggggctttataacgaactccagaaagataaaatggcagaagcctatagtgagattgggatgaagggagaaaggaggaggggtaaaggtcacgatgggttgtaccaaggattgagcacagccactaaagatacctatgatgcgctccacatgcaggccctgccgccaaga

SEQ ID NO: 23920 - DNA, 876 bp, synthetic construct
  source 1..876: mol_type = other DNA
gaggacctgaagaacgtgttcccacctgaggtggccgtgttcgagcctagcgaggccgagatcagccacacccagaaagccaccctcgtgtgcctggctaccggcttctaccccgaccatgtggaactgtcttggtgggtcaacggcaaagaggtgcacagcggcgtgtctaccgacccccagccactgaaagaacagcccgccctgaacgacagccggtactgcctgagcagcagactgagagtgtccgccaccttctggcagaacccccggaaccacttcagatgccaggtgcagttctacggcctgagcgagaacgacgagtggacccaggacagagccaagcccgtgacccagatcgtgtctgccgaagcctggggcagagccgattgcggctttaccagcgagagctaccagcagggcgtgctgagcgccaccatcctgtacgagatcctgctgggcaaggccaccctgtacgccgtgctggtgtctgccctggtgctgatggctatggtcaagcggaaggacagccggggacgggttaagttttccagatccgcagacgcacccgcttaccaacaagggcagaaccaactctacaatgaacttaatttggggcggagggaagagtacgacgttctggacaaaaggaggggacgagatcccgagatgggcggaaagcctcagcgaaggaagaatccgcaagaggggctttataacgaactccagaaagataaaatggcagaagcctatagtgagattgggatgaagggagaaaggaggaggggtaaaggtcacgatgggttgtaccaaggattgagcacagccactaaagatacctatgatgcgctccacatgcaggccctgccgccaaga

SEQ ID NO: 23921 - DNA, 873 bp, synthetic construct
  source 1..873: mol_type = other DNA
gacctgaagaacgtgttcccacctgaggtggccgtgttcgagcctagcgaggccgagatcagccacacccagaaagccaccctcgtgtgcctggctaccggcttctaccccgaccatgtggaactgtcttggtgggtcaacggcaaagaggtgcacagcggcgtgtctaccgacccccagccactgaaagaacagcccgccctgaacgacagccggtactgcctgagcagcagactgagagtgtccgccaccttctggcagaacccccggaaccacttcagatgccaggtgcagttctacggcctgagcgagaacgacgagtggacccaggacagagccaagcccgtgacccagatcgtgtctgccgaagcctggggcagagccgattgcggctttaccagcgagagctaccagcagggcgtgctgagcgccaccatcctgtacgagatcctgctgggcaaggccaccctgtacgccgtgctggtgtctgccctggtgctgatggctatggtcaagcggaaggacagccggggacgggttaagttttccagatccgcagacgcacccgcttaccaacaagggcagaaccaactctacaatgaacttaatttggggcggagggaagagtacgacgttctggacaaaaggaggggacgagatcccgagatgggcggaaagcctcagcgaaggaagaatccgcaagaggggctttataacgaactccagaaagataaaatggcagaagcctatagtgagattgggatgaagggagaaaggaggaggggtaaaggtcacgatgggttgtaccaaggattgagcacagccactaaagatacctatgatgcgctccacatgcaggccctgccgccaaga

SEQ ID NO: 23922 - DNA, 870 bp, synthetic construct
  source 1..870: mol_type = other DNA
gaggacctgaagaacgtgttcccacctgaggtggccgtgttcgagcccagcgaggccgagatttcacacactcagaaagccacactcgtatgtctggcgactggtttctttcccgaccacgtggagctgtcttggtgggtgaacggcaaagaggtgcacagcggggtctctaccgacccccagccactgaaagagcagcccgccctgaacgacagccggtactgcctctcttctcggctgagagtgtccgccaccttctggcagaacccccggaaccacttcagatgccaggtgcagttctacggcctgagcgagaacgacgagtggacccaggacagagccaagcctgtgacccagatcgtgagtgctgaagcgtggggacgcgccgattgcggctttaccagcgagagctaccagcagggcgtgctgtctgccaccatcctgtacgagatcctgctgggcaaggccaccctgtacgccgtgctggtgtccgccctggtgctgatggctatggtgaagcggaaggacttccgggttaagttttccagatccgcagacgcacccgcttaccaacaagggcagaaccaactctacaatgaacttaatttggggcggagggaagagtacgacgttctggacaaaaggaggggacgagatcccgagatgggcggaaagcctcagcgaaggaagaatccgcaagaggggctttataacgaactccagaaagataaaatggcagaagcctatagtgagattgggatgaagggagaaaggaggaggggtaaaggtcacgatgggttgtaccaaggattgagcacagccactaaagatacctatgatgcgctccacatgcaggccctgccgccaaga

SEQ ID NO: 23923 - DNA, 870 bp, synthetic construct
  source 1..870: mol_type = other DNA
gaggacctgaacaaggtgttcccacctgaggtggccgtgttcgagcccagcgaggccgagatttcacacactcagaaagccacactcgtatgtctggcgactggtttctttcccgaccacgtggagctgtcttggtgggtgaacggcaaagaggtgcacagcggggtctctaccgacccccagccactgaaagagcagcccgccctgaacgacagccggtactgcctctcttctcggctgagagtgtccgccaccttctggcagaacccccggaaccacttcagatgccaggtgcagttctacggcctgagcgagaacgacgagtggacccaggacagagccaagcctgtgacccagatcgtgagtgctgaagcgtggggacgcgccgattgcggctttaccagcgtgagctaccagcagggcgtgctgtctgccaccatcctgtacgagatcctgctgggcaaggccaccctgtacgccgtgctggtgtccgccctggtgctgatggctatggtgaagcggaaggacttccgggttaagttttccagatccgcagacgcacccgcttaccaacaagggcagaaccaactctacaatgaacttaatttggggcggagggaagagtacgacgttctggacaaaaggaggggacgagatcccgagatgggcggaaagcctcagcgaaggaagaatccgcaagaggggctttataacgaactccagaaagataaaatggcagaagcctatagtgagattgggatgaagggagaaaggaggaggggtaaaggtcacgatgggttgtaccaaggattgagcacagccactaaagatacctatgatgcgctccacatgcaggccctgccgccaaga

SEQ ID NO: 23924 - DNA, 876 bp, synthetic construct
  source 1..876: mol_type = other DNA
gaggacctgaagaacgtgttcccacctgaggtggccgtgttcgagcctagcaaggccgagatcgcccacacccagaaagccaccctcgtgtgcctggctaccggcttctaccccgaccatgtggaactgtcttggtgggtcaacggcaaagaggtgcacagcggcgtgtctaccgacccccagccactgaaagaacagcccgccctgaacgacagccggtactgcctgagcagcagactgagagtgtccgccaccttctggcagaacccccggaaccacttcagatgccaggtgcagttctacggcctgagcgagaacgacgagtggacccaggacagagccaagcccgtgacccagatcgtgtctgccgaagcctggggcagagccgattgcggcatcaccagcgccagctaccaccagggcgtgctgagcgccaccatcctgtacgagatcctgctgggcaaggccaccctgtacgccgtgctggtgtctgccctggtgctgatggctatggtcaagcggaaggacagccggggacgggttaagttttccagatccgcagacgcacccgcttaccaacaagggcagaaccaactctacaatgaacttaatttggggcggagggaagagtacgacgttctggacaaaaggaggggacgagatcccgagatgggcggaaagcctcagcgaaggaagaatccgcaagaggggctttataacgaactccagaaagataaaatggcagaagcctatagtgagattgggatgaagggagaaaggaggaggggtaaaggtcacgatgggttgtaccaaggattgagcacagccactaaagatacctatgatgcgctccacatgcaggccctgccgccaaga

SEQ ID NO: 23925 - DNA, 876 bp, synthetic construct
  source 1..876: mol_type = other DNA
gaggacctgaagaacgtgttcccacctgaggtggccgtgttcgagcctagcaaggccgagatcgcccacacccagaaagccaccctcgtgtgcctggctaccggcttctaccccgaccatgtggaactgtcttggtgggtcaacggcaaagaggtgcacagcggcgtgtctaccgacccccagccactgaaagaacagcccgccctgaacgacagccggtactgcctgagcagcagactgagagtgtccgccaccttctggcagaacccccggaaccacttcagatgccaggtgcagttctacggcctgagcgagaacgacgagtggacccaggacagagccaagcccgtgacccagatcgtgtctgccgaagcctggggcagagccgattgcggctttaccagcgagagctaccagcagggcgtgctgagcgccaccatcctgtacgagatcctgctgggcaaggccaccctgtacgccgtgctggtgtctgccctggtgctgatggctatggtcaagcggaaggacagccggggacgggttaagttttccagatccgcagacgcacccgcttaccaacaagggcagaaccaactctacaatgaacttaatttggggcggagggaagagtacgacgttctggacaaaaggaggggacgagatcccgagatgggcggaaagcctcagcgaaggaagaatccgcaagaggggctttataacgaactccagaaagataaaatggcagaagcctatagtgagattgggatgaagggagaaaggaggaggggtaaaggtcacgatgggttgtaccaaggattgagcacagccactaaagatacctatgatgcgctccacatgcaggccctgccgccaaga

SEQ ID NO: 23926 - DNA, 876 bp, synthetic construct
  source 1..876: mol_type = other DNA
gaggacctgaagaacgtgttcccacctgaggtggccgtgttcgagcctagcaaggccgagatcagccacacccagaaagccaccctcgtgtgcctggctaccggcttctaccccgaccatgtggaactgtcttggtgggtcaacggcaaagaggtgcacagcggcgtgtctaccgacccccagccactgaaagaacagcccgccctgaacgacagccggtactgcctgagcagcagactgagagtgtccgccaccttctggcagaacccccggaaccacttcagatgccaggtgcagttctacggcctgagcgagaacgacgagtggacccaggacagagccaagcccgtgacccagatcgtgtctgccgaagcctggggcagagccgattgcggcatcaccagcgagagctaccagcagggcgtgctgagcgccaccatcctgtacgagatcctgctgggcaaggccaccctgtacgccgtgctggtgtctgccctggtgctgatggctatggtcaagcggaaggacagccggggacgggttaagttttccagatccgcagacgcacccgcttaccaacaagggcagaaccaactctacaatgaacttaatttggggcggagggaagagtacgacgttctggacaaaaggaggggacgagatcccgagatgggcggaaagcctcagcgaaggaagaatccgcaagaggggctttataacgaactccagaaagataaaatggcagaagcctatagtgagattgggatgaagggagaaaggaggaggggtaaaggtcacgatgggttgtaccaaggattgagcacagccactaaagatacctatgatgcgctccacatgcaggccctgccgccaaga

SEQ ID NO: 23927 - DNA, 876 bp, synthetic construct
  source 1..876: mol_type = other DNA
gaggacctgaagaacgtgttcccacctgaggtggccgtgttcgagcctagcaaggccgagatcagccacacccagaaagccaccctcgtgtgcctggctaccggcttctaccccgaccatgtggaactgtcttggtgggtcaacggcaaagaggtgcacagcggcgtgtctaccgacccccagccactgaaagaacagcccgccctgaacgacagccggtactgcctgagcagcagactgagagtgtccgccaccttctggcagaacccccggaaccacttcagatgccaggtgcagttctacggcctgagcgagaacgacgagtggacccaggacagagccaagcccgtgacccagatcgtgtctgccgaagcctggggcagagccgattgcggctttaccagcgccagctaccagcagggcgtgctgagcgccaccatcctgtacgagatcctgctgggcaaggccaccctgtacgccgtgctggtgtctgccctggtgctgatggctatggtcaagcggaaggacagccggggacgggttaagttttccagatccgcagacgcacccgcttaccaacaagggcagaaccaactctacaatgaacttaatttggggcggagggaagagtacgacgttctggacaaaaggaggggacgagatcccgagatgggcggaaagcctcagcgaaggaagaatccgcaagaggggctttataacgaactccagaaagataaaatggcagaagcctatagtgagattgggatgaagggagaaaggaggaggggtaaaggtcacgatgggttgtaccaaggattgagcacagccactaaagatacctatgatgcgctccacatgcaggccctgccgccaaga

SEQ ID NO: 23928 - DNA, 876 bp, synthetic construct
  source 1..876: mol_type = other DNA
gaggacctgaagaacgtgttcccacctgaggtggccgtgttcgagcctagcaaggccgagatcagccacacccagaaagccaccctcgtgtgcctggctaccggcttctaccccgaccatgtggaactgtcttggtgggtcaacggcaaagaggtgcacagcggcgtgtctaccgacccccagccactgaaagaacagcccgccctgaacgacagccggtactgcctgagcagcagactgagagtgtccgccaccttctggcagaacccccggaaccacttcagatgccaggtgcagttctacggcctgagcgagaacgacgagtggacccaggacagagccaagcccgtgacccagatcgtgtctgccgaagcctggggcagagccgattgcggctttaccagcgagagctaccaccagggcgtgctgagcgccaccatcctgtacgagatcctgctgggcaaggccaccctgtacgccgtgctggtgtctgccctggtgctgatggctatggtcaagcggaaggacagccggggacgggttaagttttccagatccgcagacgcacccgcttaccaacaagggcagaaccaactctacaatgaacttaatttggggcggagggaagagtacgacgttctggacaaaaggaggggacgagatcccgagatgggcggaaagcctcagcgaaggaagaatccgcaagaggggctttataacgaactccagaaagataaaatggcagaagcctatagtgagattgggatgaagggagaaaggaggaggggtaaaggtcacgatgggttgtaccaaggattgagcacagccactaaagatacctatgatgcgctccacatgcaggccctgccgccaaga

SEQ ID NO: 23929 - DNA, 876 bp, synthetic construct
  source 1..876: mol_type = other DNA
gaggacctgaagaacgtgttcccacctgaggtggccgtgttcgagcctagcagggccgagatcgcccacacccagaaagccaccctcgtgtgcctggctaccggcttctaccccgaccatgtggaactgtcttggtgggtcaacggcaaagaggtgcacagcggcgtgtctaccgacccccagccactgaaagaacagcccgccctgaacgacagccggtactgcctgagcagcagactgagagtgtccgccaccttctggcagaacccccggaaccacttcagatgccaggtgcagttctacggcctgagcgagaacgacgagtggacccaggacagagccaagcccgtgacccagatcgtgtctgccgaagcctggggcagagccgattgcggctttaccagcgagagctaccagcagggcgtgctgagcgccaccatcctgtacgagatcctgctgggcaaggccaccctgtacgccgtgctggtgtctgccctggtgctgatggctatggtcaagcggaaggacagccggggacgggttaagttttccagatccgcagacgcacccgcttaccaacaagggcagaaccaactctacaatgaacttaatttggggcggagggaagagtacgacgttctggacaaaaggaggggacgagatcccgagatgggcggaaagcctcagcgaaggaagaatccgcaagaggggctttataacgaactccagaaagataaaatggcagaagcctatagtgagattgggatgaagggagaaaggaggaggggtaaaggtcacgatgggttgtaccaaggattgagcacagccactaaagatacctatgatgcgctccacatgcaggccctgccgccaaga

SEQ ID NO: 23930 - DNA, 876 bp, synthetic construct
  source 1..876: mol_type = other DNA
gaggacctgaagaacgtgttcccacctgaggtggccgtgttcgagcctagcagggccgagatcagccacacccagaaagccaccctcgtgtgcctggctaccggcttctaccccgaccatgtggaactgtcttggtgggtcaacggcaaagaggtgcacagcggcgtgtctaccgacccccagccactgaaagaacagcccgccctgaacgacagccggtactgcctgagcagcagactgagagtgtccgccaccttctggcagaacccccggaaccacttcagatgccaggtgcagttctacggcctgagcgagaacgacgagtggacccaggacagagccaagcccgtgacccagatcgtgtctgccgaagcctggggcagagccgattgcggctttaccagcgagagctaccagcagggcgtgctgagcgccaccatcctgtacgagatcctgctgggcaaggccaccctgtacgccgtgctggtgtctgccctggtgctgatggctatggtcaagcggaaggacagccggggacgggttaagttttccagatccgcagacgcacccgcttaccaacaagggcagaaccaactctacaatgaacttaatttggggcggagggaagagtacgacgttctggacaaaaggaggggacgagatcccgagatgggcggaaagcctcagcgaaggaagaatccgcaagaggggctttataacgaactccagaaagataaaatggcagaagcctatagtgagattgggatgaagggagaaaggaggaggggtaaaggtcacgatgggttgtaccaaggattgagcacagccactaaagatacctatgatgcgctccacatgcaggccctgccgccaaga

SEQ ID NO: 23931 - DNA, 876 bp, synthetic construct
  source 1..876: mol_type = other DNA
gaggacctgaagaacgtgttcccacctgaggtggccgtgttcgagcctagcaaggccgagatcgcccacacccagaaagccaccctcgtgtgcctggctaccggcttctaccccgaccatgtggaactgtcttggtgggtcaacggcaaagaggtgcacagcggcgtgtctaccgacccccagccactgaaagaacagcccgccctgaacgacagccggtactgcctgagcagcggactgagagtgtccgccaccttctggcagaacccccggaaccacttcagatgccaggtgcagttctacggcctgagcgagaacgacgagtggacccaggacagagccaagcccgtgacccagatcgtgtctgccgaagcctggggcagagccgattgcggcatcaccagcgccagctaccaccagggcgtgctgagcgccaccatcctgtacgagatcctgctgggcaaggccaccctgtacgccgtgctggtgtctgccctggtgctgatggctatggtcaagcggaaggacagccggggacgggttaagttttccagatccgcagacgcacccgcttaccaacaagggcagaaccaactctacaatgaacttaatttggggcggagggaagagtacgacgttctggacaaaaggaggggacgagatcccgagatgggcggaaagcctcagcgaaggaagaatccgcaagaggggctttataacgaactccagaaagataaaatggcagaagcctatagtgagattgggatgaagggagaaaggaggaggggtaaaggtcacgatgggttgtaccaaggattgagcacagccactaaagatacctatgatgcgctccacatgcaggccctgccgccaaga

SEQ ID NO: 23932 - DNA, 876 bp, synthetic construct
  source 1..876: mol_type = other DNA
gaggacctgaagaacgtgttcccacctgaggtggccgtgttcgagcctagcaaggccgagatcgcccacacccagaaagccaccctcgtgtgcctggctaccggcttctaccccgaccatgtggaactgtcttggtgggtcaacggcaaagaggtgcacagcggcgtgtctaccgacccccagccactgaaagaacagcccgccctgaacgacagccggtactgcctgagcagcggactgagagtgtccgccaccttctggcagaacccccggaaccacttcagatgccaggtgcagttctacggcctgagcgagaacgacgagtggacccaggacagagccaagcccgtgacccagatcgtgtctgccgaagcctggggcagagccgattgcggctttaccagcgagagctaccagcagggcgtgctgagcgccaccatcctgtacgagatcctgctgggcaaggccaccctgtacgccgtgctggtgtctgccctggtgctgatggctatggtcaagcggaaggacagccggggacgggttaagttttccagatccgcagacgcacccgcttaccaacaagggcagaaccaactctacaatgaacttaatttggggcggagggaagagtacgacgttctggacaaaaggaggggacgagatcccgagatgggcggaaagcctcagcgaaggaagaatccgcaagaggggctttataacgaactccagaaagataaaatggcagaagcctatagtgagattgggatgaagggagaaaggaggaggggtaaaggtcacgatgggttgtaccaaggattgagcacagccactaaagatacctatgatgcgctccacatgcaggccctgccgccaaga

SEQ ID NO: 23933 - DNA, 876 bp, synthetic construct
  source 1..876: mol_type = other DNA
gaggacctgaagaacgtgttcccacctgaggtggccgtgttcgagcctagcgaggccgagatcagccacacccagaaagccaccctcgtgtgcctggctaccggcttctaccccgaccatgtggaactgtcttggtgggtcaacggcaaagaggtgcacagcggcgtgtctaccgacccccagccactgaaagaacagcccgccctgaacgacagccggtactgcctgagcagcggactgagagtgtccgccaccttctggcagaacccccggaaccacttcagatgccaggtgcagttctacggcctgagcgagaacgacgagtggacccaggacagagccaagcccgtgacccagatcgtgtctgccgaagcctggggcagagccgattgcggctttaccagcgagagctaccagcagggcgtgctgagcgccaccatcctgtacgagatcctgctgggcaaggccaccctgtacgccgtgctggtgtctgccctggtgctgatggctatggtcaagcggaaggacagccggggacgggttaagttttccagatccgcagacgcacccgcttaccaacaagggcagaaccaactctacaatgaacttaatttggggcggagggaagagtacgacgttctggacaaaaggaggggacgagatcccgagatgggcggaaagcctcagcgaaggaagaatccgcaagaggggctttataacgaactccagaaagataaaatggcagaagcctatagtgagattgggatgaagggagaaaggaggaggggtaaaggtcacgatgggttgtaccaaggattgagcacagccactaaagatacctatgatgcgctccacatgcaggccctgccgccaaga

SEQ ID NO: 23934 - DNA, 852 bp, synthetic construct
  source 1..852: mol_type = other DNA
gaggatctgcggaacgtgaccccacccaaggtgtccctgttcgagcccagcaaggccgagatcgccaataaacagaaggccaccctcgtgtgcctggccagaggcttcttccccgaccacgtggaactgtcttggtgggtcaacggcaaagaggtgcacagcggcgtcagcaccgaccctcaggcctacaaagagagcaactacagctactgcctgagcagtcggctgcgggtgtccgccaccttctggcacaacccccggaaccacttcagatgccaggtgcagttccacggcctgagcgaagaggacaagtggcccgagggcagccccaagcctgtcacccagaacatcagcgccgaggcctggggcagagcctgtggcatcaccagcagctaccagcagggcgtgctgagcgccaccatcctgtacgagatcctgctgggcaaggccaccctgtacgccgtgctggtgtccaccctggtggtcatggctatggtcaagcggaagaacagccgggttaagttttccagatccgcagacgcacccgcttaccaacaagggcagaaccaactctacaatgaacttaatttggggcggagggaagagtacgacgttctggacaaaaggaggggacgagatcccgagatgggcggaaagcctcagcgaaggaagaatccgcaagaggggctttataacgaactccagaaagataaaatggcagaagcctatagtgagattgggatgaagggagaaaggaggaggggtaaaggtcacgatgggttgtaccaaggattgagcacagccactaaagatacctatgatgcgctccacatgcaggccctgccgccaaga

SEQ ID NO: 23935 - DNA, 870 bp, synthetic construct
  source 1..870: mol_type = other DNA
gaggacctccagaaagtgaccccccctaccgtgaccgtgttcgagccttctgaggccgagatcagccggacccagaaagccacactcgtgtgcctggctcggggcttctaccccgatcacgtggaactgtcttggtgggtcaacggcaaagaagtgaccagcggcttcagcaccgacccccagcctgacaaagagcggcccagcgagaacgacagcagctactgcctgagcagcagactgagagtgtccgccagcttctggcacaacccccggaaccacttcagatgccaggtgcagttctacggcctgggcgacgacgacgagtggaagtacgacagagtgaagcccatcacccagaacatcagcgccgaagcctggggcagagccgattgcggctttacctccgtcagctaccaccagggcgtgctgagcgccaccatcctgtacgagatcctgctgggcaaggccaccctgtacgccgtgctggtgtctatcctggtgctgatggctaaagtgaagcggaagggcagccgggttaagttttccagatccgcagacgcacccgcttaccaacaagggcagaaccaactctacaatgaacttaatttggggcggagggaagagtacgacgttctggacaaaaggaggggacgagatcccgagatgggcggaaagcctcagcgaaggaagaatccgcaagaggggctttataacgaactccagaaagataaaatggcagaagcctatagtgagattgggatgaagggagaaaggaggaggggtaaaggtcacgatgggttgtaccaaggattgagcacagccactaaagatacctatgatgcgctccacatgcaggccctgccgccaaga

SEQ ID NO: 23936 - DNA, 1167 bp, synthetic construct
  source 1..1167: mol_type = other DNA
gaggacctgaagaacgtgttcccacctgaggtggccgtgttcgagcctagcgaggccgagatcagccacacccagaaagccaccctcgtgtgcctggctaccggcttctaccccgaccatgtggaactgtcttggtgggtcaacggcaaagaggtgcacagcggcgtgtctaccgacccccagccactgaaagaacagcccgccctgaacgacagccggtactgcctgagcagcagactgagagtgtccgccaccttctggcagaacccccggaaccacttcagatgccaggtgcagttctacggcctgagcgagaacgacgagtggacccaggacagagccaagcccgtgacccagatcgtgtctgccgaagcctggggcagagccgattgcggatcccagagcttcggcctgctggaccccaagctgtgctacctgctggatggcatcctgttcatctacggcgtgatcctgaccgccctgttcctgagagtgaagttcagcagaagcgccgacgcccctgcctaccagcagggacagaaccaactgtacaacgagctgaacctgggcagacgggaagagtacgacgtgctggacaagcggagaggcagggaccctgagatgggcggaaagccccagcggagaaagaacccccaggaaggactgtataacgaactccagaaagacaagatggccgaagcctacagcgagatcggcatgaagggcgagcggagaagaggcaagggccacgatggcctgtaccagggcctgagcaccgccaccaaggacacctatgacgccctgcacatgcaggccctgcctccaagacgggttaagttttccagatccgcagacgcacccgcttaccaacaagggcagaaccaactctacaatgaacttaatttggggcggagggaagagtacgacgttctggacaaaaggaggggacgagatcccgagatgggcggaaagcctcagcgaaggaagaatccgcaagaggggctttataacgaactccagaaagataaaatggcagaagcctatagtgagattgggatgaagggagaaaggaggaggggtaaaggtcacgatgggttgtaccaaggattgagcacagccactaaagatacctatgatgcgctccacatgcaggccctgccgccaaga

SEQ ID NO: 23937 - DNA, 1146 bp, synthetic construct
  misc_feature 540: note = n is a, c, g, or t
  source 1..1146: mol_type = other DNA
gggtgtccagccctacccacaggtgtgggcggcacaccctttccttctctggccccaccaatcatgctgctggtggatggaaagcagcagatggtggtggtctgcctggtccttgatgttgcaccccctggccttgacagccccatctggttctcagccggcaatggcagtgcactggatgccttcacctatggcccttccccagcaacggatggcacctggaccaacttggcccatctctccctgccttctgaggagctggcatcctgggagcctttggtctgccacactgggcctggggctgagggtcacagcaggagtacacagcccatgcatctgtcaggagaggcttctacagccaggacctgcccccaggagcctctcagggggacaccgggtggggcgctgtggctgggggtcctgcggctgctgctcttcaagctgctgctgtttgacctgctcctgacctgcagctgcctgtgcgaccccgcgggcccgctgccttcccccgcaaccaccacccgcctgcgagccctcggntcccatcgactgcacccggccacggagactgggggacgagaggccaccagctcacccagaccccagcctcgggaccgccgctggggtgacacccctccgggtcggaagcccgggagcccagtatggggggaagggtcttacctcagcagttaccccacttgcccagcacaggcctggtgctcaagatctcgcctcagggctccttcctccagtcttggagcattttttgcaggtgacctgcctcctcctctgcaggctggagctgcccgggttaagttttccagatccgcagacgcacccgcttaccaacaagggcagaaccaactctacaatgaacttaatttggggcggagggaagagtacgacgttctggacaaaaggaggggacgagatcccgagatgggcggaaagcctcagcgaaggaagaatccgcaagaggggctttataacgaactccagaaagataaaatggcagaagcctatagtgagattgggatgaagggagaaaggaggaggggtaaaggtcacgatgggttgtaccaaggattgagcacagccactaaagatacctatgatgcgctccacatgcaggccctgccgccaaga

SEQ ID NO: 23938 - DNA, 1113 bp, synthetic construct
  source 1..1113: mol_type = other DNA
accccattcccttctctggcccctcccatcatgctgctggtggacggcaagcagcagatggtggtcgtgtgcctggtgctggatgtggccccacctggactggacagccccatctggtttagcgccggcaatggctctgccctggacgcctttacctacggcccaagccctgccaccgatggcacctggacaaatctggcccacctgagcctgcccagcgaggaactggcttcttgggagcctctcgtgtgccacacaggacctggcgctgagggacacagcagatccacccagcctatgcacctgtctggcgaggccagcaccgccagaacctgtcctcaggaacctctgagaggcacccctggcggagcactgtggctgggagtgctgagactgctgctgttcaagctgctgctgtttgacctgctgctgacctgctcctgtctgtgcgatcctgccggccctctgccttctcctgccaccaccacaagactgagagccctgggcagccacagactgcaccctgccacagagacaggcggcagagaggccacaagcagccctagaccccagcccagagacagaagatggggcgataccccccctggcagaaagcctggatctccagtgtggggcgagggcagctacctgagcagctaccctacatgccctgcccaggcttggtgcagcagaagcgcactgagagcacccagctctagcctgggagccttctttgccggcgatctgcctccaccactccaggctggcgctgctcgggttaagttttccagatccgcagacgcacccgcttaccaacaagggcagaaccaactctacaatgaacttaatttggggcggagggaagagtacgacgttctggacaaaaggaggggacgagatcccgagatgggcggaaagcctcagcgaaggaagaatccgcaagaggggctttataacgaactccagaaagataaaatggcagaagcctatagtgagattgggatgaagggagaaaggaggaggggtaaaggtcacgatgggttgtaccaaggattgagcacagccactaaagatacctatgatgcgctccacatgcaggccctgccgccaaga

SEQ ID NO: 23939 - DNA, 969 bp, synthetic construct
  source 1..969: mol_type = other DNA
accccattcccttctctggcccctcccatcatgctgctggtggacggcaagcagcagatggtggtcgtgtgcctggtgctggatgtggccccacctggactggacagccccatctggtttagcgccggcaatggctctgccctggacgcctttacctacggcccaagccctgccaccgatggcacctggacaaatctggcccacctgagcctgcccagcgaggaactggcttcttgggagcctctcgtgtgccacacaggacctggcgctgagggacacagcagatccacccagcctatgcacctgtctggcgaggccagcaccgccagaacctgtcctcaggaacctctgagaggcacccctggcggagcactgtggctgggagtgctgagactgctgctgttcaagctgctgctgtttgacctgctgctgacctgctcctgtctgtgcgatcctgccggccctctgccttctcctgccaccaccacaagactgagagccctgggcagccacagactgcaccctgccacagagacaggcggcagagaggccacaagcagccctagaccccagcccagagacagaagatggggcgataccccccctggcagaaagcctggatctccagtccgggttaagttttccagatccgcagacgcacccgcttaccaacaagggcagaaccaactctacaatgaacttaatttggggcggagggaagagtacgacgttctggacaaaaggaggggacgagatcccgagatgggcggaaagcctcagcgaaggaagaatccgcaagaggggctttataacgaactccagaaagataaaatggcagaagcctatagtgagattgggatgaagggagaaaggaggaggggtaaaggtcacgatgggttgtaccaaggattgagcacagccactaaagatacctatgatgcgctccacatgcaggccctgccgccaaga

SEQ ID NO: 23940 - DNA, 906 bp, synthetic construct
  source 1..906: mol_type = other DNA
gataaacaacttgatgcagatgtttcccccaagcccactatttttcttccttcaattgctgaaacaaaactccagaaggctggaacatacctttgtcttcttgagaaatttttcccagatattattaagatacattggcaagaaaagaagagcaacacgattctgggatcccaggaggggaacaccatgaagactaacgacacatacatgaaatttagctggttaacggtgccagaagagtcactggacaaagaacacagatgtatcgtcagacatgagaataataaaaacggaattgatcaagaaattatctttcctccaataaagacagatgtcaccacagtggatcccaaatacaattattcaaaggatgcaaatgatgtcatcacaatggatcccaaagacaattggtcaaaagatgcaaatgatacactactgctgcagctcacaaacacctctgcatattacatgtacctcctcctgctcctcaagagtgtggtctattttgccatcatcacctgctgtctgcttggaagaacggctttctgctgcaatggagagaaatcacgggttaagttttccagatccgcagacgcacccgcttaccaacaagggcagaaccaactctacaatgaacttaatttggggcggagggaagagtacgacgttctggacaaaaggaggggacgagatcccgagatgggcggaaagcctcagcgaaggaagaatccgcaagaggggctttataacgaactccagaaagataaaatggcagaagcctatagtgagattgggatgaagggagaaaggaggaggggtaaaggtcacgatgggttgtaccaaggattgagcacagccactaaagatacctatgatgcgctccacatgcaggccctgccgccaaga

SEQ ID NO: 23941 - DNA, 858 bp, synthetic construct
  source 1..858: mol_type = other DNA
gacaagcagctggacgccgacgtgtcccccaagcctaccatcttcctgccctctatcgccgagacaaagctccagaaggccggcacctacctgtgcctgctggaaaagttcttcccagatgtgattaagatccactggcaggaaaagaagtccaacaccatcctgggcagccaggaaggcaacaccatgaagaccaacgacacctacatgaagttcagctggctgaccgtgcccgagaagtccctggacaaagaacacagatgcatcgtgcggcacgaaaacaacaagaacggcgtggaccaggaaatcatcttcccacccatcaagaccgatgtgattacaatggaccccaaggacaactgctccaaggacgccaacgataccctgctgctccagctgaccaacaccagcgcctactacatgtacttgttgctgctgctgaagtccgtggtgtacttcgccatcatcacatgctgcctgctgcggagaaccgccttctgctgcaacggcgagaagtctcgggttaagttttccagatccgcagacgcacccgcttaccaacaagggcagaaccaactctacaatgaacttaatttggggcggagggaagagtacgacgttctggacaaaaggaggggacgagatcccgagatgggcggaaagcctcagcgaaggaagaatccgcaagaggggctttataacgaactccagaaagataaaatggcagaagcctatagtgagattgggatgaagggagaaaggaggaggggtaaaggtcacgatgggttgtaccaaggattgagcacagccactaaagatacctatgatgcgctccacatgcaggccctgccgccaaga

SEQ ID NO: 23942 - DNA, 798 bp, synthetic construct
  source 1..798: mol_type = other DNA
agtcagcctcataccaaaccatccgtttttgtcatgaaaaatggaacaaatgtcgcttgtctggtgaaggaattctaccccaaggatataagaataaatctcgtgtcatccaagaagataacagagtttgatcctgctattgtcatctctcccagtgggaagtacaatgctgtcaagcttggtaaatatgaagattcaaattcagtgacatgttcagttcaacacgacaataaaactgtgcactccactgactttgaagtgaagacagattctacagatcacgtaaaaccaaaggaaactgaaaacacaaagcaaccttcaaagagctgccataaacccaaagccatagttcataccgagaaggtgaacatgatgtccctcacagtgcttgggctacgaatgctgtttgcaaagactgttgccgtcaattttctcttgactgccaagttatttttcttgcgggttaagttttccagatccgcagacgcacccgcttaccaacaagggcagaaccaactctacaatgaacttaatttggggcggagggaagagtacgacgttctggacaaaaggaggggacgagatcccgagatgggcggaaagcctcagcgaaggaagaatccgcaagaggggctttataacgaactccagaaagataaaatggcagaagcctatagtgagattgggatgaagggagaaaggaggaggggtaaaggtcacgatgggttgtaccaaggattgagcacagccactaaagatacctatgatgcgctccacatgcaggccctgccgccaaga

SEQ ID NO: 23943 - DNA, 798 bp, synthetic construct
  source 1..798: mol_type = other DNA
agccagcctcacaccaagcccagcgtgttcgtgatgaagaacggcaccaacgtggcctgcctcgtgaaagagttctaccccaaggacatcaggatcaacctggtgtccagcaagaagatcaccgagttcgaccccgccatcgtgatctcccccagcggcaagtacaacgccgtgaagctggggaagtacgaggacagcaacagcgtgacctgctccgtgcagcacgacaacaagaccgtgcacagcaccgactttgaagtgaaaaccgactccaccgaccacgtgaagcccaaagagacagagaacaccaagcagcccagcaagagctgccacaagcccaaggccatcgtgcacaccgagaaagtgaacatgatgagcctgaccgtgctgggcctgcggatgctgttcgccaaaaccgtggccgtgaacttcctgctgaccgccaagctgttcttcctccgggttaagttttccagatccgcagacgcacccgcttaccaacaagggcagaaccaactctacaatgaacttaatttggggcggagggaagagtacgacgttctggacaaaaggaggggacgagatcccgagatgggcggaaagcctcagcgaaggaagaatccgcaagaggggctttataacgaactccagaaagataaaatggcagaagcctatagtgagattgggatgaagggagaaaggaggaggggtaaaggtcacgatgggttgtaccaaggattgagcacagccactaaagatacctatgatgcgctccacatgcaggccctgccgccaaga

SEQ ID NO: 23944 - DNA, 660 bp, synthetic construct
  source 1..660: mol_type = other DNA
atccagaaccctgatcctgccgtgtacatcaccgataagaccgtgctggacatgcggagcatggacttcaagagcaactccgccgtggcctggtccaacaagtccgatttcgcctgcgccaacgccttcaacaacagcattatccccgaggacacattcttcccaagccccgagagcagctgcgacgtgaagctggtggaaaagagcttcgagacagacaccaacctgaacttccagaacctgagcgtgatcggcttcagaatcctgctgctgaaagtggccggctttaacctgctgatgaccctgcggctgtggtccagccgggttaagttttccagatccgcagacgcacccgcttaccaacaagggcagaaccaactctacaatgaacttaatttggggcggagggaagagtacgacgttctggacaaaaggaggggacgagatcccgagatgggcggaaagcctcagcgaaggaagaatccgcaagaggggctttataacgaactccagaaagataaaatggcagaagcctatagtgagattgggatgaagggagaaaggaggaggggtaaaggtcacgatgggttgtaccaaggattgagcacagccactaaagatacctatgatgcgctccacatgcaggccctgccgccaaga

SEQ ID NO: 23945 - DNA, 876 bp, synthetic construct
  source 1..876: mol_type = other DNA
gaggacctgaagaacgtgttcccacctgaggtggccgtgttcgagcctagcagggccgagatcagccacacccagaaagccaccctcgtgtgcctggctaccggcttctaccccgaccatgtggaactgtcttggtgggtcaacggcaaagaggtgcacagcggcgtgtgtaccgacccccagccactgaaagaacagcccgccctgaacgacagccggtactgcctgagcagcagactgagagtgtccgccaccttctggcagaacccccggaaccacttcagatgccaggtgcagttctacggcctgagcgagaacgacgagtggacccaggacagagccaagcccgtgacccagatcgtgtctgccgaagcctggggcagagccgattgcggctttaccagcgagagctaccagcagggcgtgctgagcgccaccatcctgtacgagatcctgctgggcaaggccaccctgtacgccgtgctggtgtctgccctggtgctgatggctatggtcaagcggaaggacagccggggacgggttaagttttccagatccgcagacgcacccgcttaccaacaagggcagaaccaactctacaatgaacttaatttggggcggagggaagagtacgacgttctggacaaaaggaggggacgagatcccgagatgggcggaaagcctcagcgaaggaagaatccgcaagaggggctttataacgaactccagaaagataaaatggcagaagcctatagtgagattgggatgaagggagaaaggaggaggggtaaaggtcacgatgggttgtaccaaggattgagcacagccactaaagatacctatgatgcgctccacatgcaggccctgccgccaaga

SEQ ID NO: 23946 - DNA, 876 bp, synthetic construct
  source 1..876: mol_type = other DNA
gaggacctgaagaacgtgttcccacctgaggtggccgtgttcgagcctagcagggccgagatcgcccacacccagaaagccaccctcgtgtgcctggctaccggcttctaccccgaccatgtggaactgtcttggtgggtcaacggcaaagaggtgcacagcggcgtgtgtaccgacccccagccactgaaagaacagcccgccctgaacgacagccggtactgcctgagcagcagactgagagtgtccgccaccttctggcagaacccccggaaccacttcagatgccaggtgcagttctacggcctgagcgagaacgacgagtggacccaggacagagccaagcccgtgacccagatcgtgtctgccgaagcctggggcagagccgattgcggctttaccagcgagagctaccagcagggcgtgctgagcgccaccatcctgtacgagatcctgctgggcaaggccaccctgtacgccgtgctggtgtctgccctggtgctgatggctatggtcaagcggaaggacagccggggacgggttaagttttccagatccgcagacgcacccgcttaccaacaagggcagaaccaactctacaatgaacttaatttggggcggagggaagagtacgacgttctggacaaaaggaggggacgagatcccgagatgggcggaaagcctcagcgaaggaagaatccgcaagaggggctttataacgaactccagaaagataaaatggcagaagcctatagtgagattgggatgaagggagaaaggaggaggggtaaaggtcacgatgggttgtaccaaggattgagcacagccactaaagatacctatgatgcgctccacatgcaggccctgccgccaaga

SEQ ID NO: 23947 - DNA, 519 bp, synthetic construct
  source 1..519: mol_type = other DNA
atccccgaggacacattcttcccaagccccgagagcagctgcgacgtgaagctggtggaaaagagcttcgagacagacaccaacctgaacttccagaacctgagcgtgatcggcttcagaatcctgctgctgaaagtggccggctttaacctgctgatgaccctgcggctgtggtccagccgggttaagttttccagatccgcagacgcacccgcttaccaacaagggcagaaccaactctacaatgaacttaatttggggcggagggaagagtacgacgttctggacaaaaggaggggacgagatcccgagatgggcggaaagcctcagcgaaggaagaatccgcaagaggggctttataacgaactccagaaagataaaatggcagaagcctatagtgagattgggatgaagggagaaaggaggaggggtaaaggtcacgatgggttgtaccaaggattgagcacagccactaaagatacctatgatgcgctccacatgcaggccctgccgccaaga

SEQ ID NO: 23948 - DNA, 489 bp, synthetic construct
  source 1..489: mol_type = other DNA
gagagcagctgcgacgtgaagctggtggaaaagagcttcgagacagacaccaacctgaacttccagaacctgagcgtgatcggcttcagaatcctgctgctgaaagtggccggctttaacctgctgatgaccctgcggctgtggtccagccgggttaagttttccagatccgcagacgcacccgcttaccaacaagggcagaaccaactctacaatgaacttaatttggggcggagggaagagtacgacgttctggacaaaaggaggggacgagatcccgagatgggcggaaagcctcagcgaaggaagaatccgcaagaggggctttataacgaactccagaaagataaaatggcagaagcctatagtgagattgggatgaagggagaaaggaggaggggtaaaggtcacgatgggttgtaccaaggattgagcacagccactaaagatacctatgatgcgctccacatgcaggccctgccgccaaga

SEQ ID NO: 23949 - DNA, 876 bp, synthetic construct; identical to SEQ ID NO: 23918
  source 1..876: mol_type = other DNA

SEQ ID NO: 23950 - DNA, 684 bp, synthetic construct
  source 1..684: mol_type = other DNA
gaacagcccgccctgaacgacagccggtactgcctgagcagcagactgagagtgtccgccaccttctggcagaacccccggaaccacttcagatgccaggtgcagttctacggcctgagcgagaacgacgagtggacccaggacagagccaagcccgtgacccagatcgtgtctgccgaagcctggggcagagccgattgcggctttaccagcgagagctaccagcagggcgtgctgagcgccaccatcctgtacgagatcctgctgggcaaggccaccctgtacgccgtgctggtgtctgccctggtgctgatggctatggtcaagcggaaggacagccggggacgggttaagttttccagatccgcagacgcacccgcttaccaacaagggcagaaccaactctacaatgaacttaatttggggcggagggaagagtacgacgttctggacaaaaggaggggacgagatcccgagatgggcggaaagcctcagcgaaggaagaatccgcaagaggggctttataacgaactccagaaagataaaatggcagaagcctatagtgagattgggatgaagggagaaaggaggaggggtaaaggtcacgatgggttgtaccaaggattgagcacagccactaaagatacctatgatgcgctccacatgcaggccctgccgccaaga

SEQ ID NO: 23951 - DNA, 498 bp, synthetic construct
  source 1..498: mol_type = other DNA
ggcagagccgattgcggctttaccagcgagagctaccagcagggcgtgctgagcgccaccatcctgtacgagatcctgctgggcaaggccaccctgtacgccgtgctggtgtctgccctggtgctgatggctatggtcaagcggaaggacagccggggacgggttaagttttccagatccgcagacgcacccgcttaccaacaagggcagaaccaactctacaatgaacttaatttggggcggagggaagagtacgacgttctggacaaaaggaggggacgagatcccgagatgggcggaaagcctcagcgaaggaagaatccgcaagaggggctttataacgaactccagaaagataaaatggcagaagcctatagtgagattgggatgaagggagaaaggaggaggggtaaaggtcacgatgggttgtaccaaggattgagcacagccactaaagatacctatgatgcgctccacatgcaggccctgccgccaaga

SEQ ID NO: 23952 - DNA, 492 bp, synthetic construct
  source 1..492: mol_type = other DNA
gccgattgcggctttaccagcgagagctaccagcagggcgtgctgagcgccaccatcctgtacgagatcctgctgggcaaggccaccctgtacgccgtgctggtgtctgccctggtgctgatggctatggtcaagcggaaggacagccggggacgggttaagttttccagatccgcagacgcacccgcttaccaacaagggcagaaccaactctacaatgaacttaatttggggcggagggaagagtacgacgttctggacaaaaggaggggacgagatcccgagatgggcggaaagcctcagcgaaggaagaatccgcaagaggggctttataacgaactccagaaagataaaatggcagaagcctatagtgagattgggatgaagggagaaaggaggaggggtaaaggtcacgatgggttgtaccaaggattgagcacagccactaaagatacctatgatgcgctccacatgcaggccctgccgccaaga

SEQ ID NO: 23953 - DNA, 858 bp, synthetic construct; identical to SEQ ID NO: 23941
  source 1..858: mol_type = other DNA

SEQ ID NO: 23954 - DNA, 843 bp, synthetic construct
  source 1..843: mol_type = other DNA
gccgacgtgtcccccaagcctaccatcttcctgccctctatcgccgagacaaagctccagaaggccggcacctacctgtgcctgctggaaaagttcttcccagatgtgattaagatccactggcaggaaaagaagtccaacaccatcctgggcagccaggaaggcaacaccatgaagaccaacgacacctacatgaagttcagctggctgaccgtgcccgagaagtccctggacaaagaacacagatgcatcgtgcggcacgaaaacaacaagaacggcgtggaccaggaaatcatcttcccacccatcaagaccgatgtgattacaatggaccccaaggacaactgctccaaggacgccaacgataccctgctgctccagctgaccaacaccagcgcctactacatgtacttgttgctgctgctgaagtccgtggtgtacttcgccatcatcacatgctgcctgctgcggagaaccgccttctgctgcaacggcgagaagtctcgggttaagttttccagatccgcagacgcacccgcttaccaacaagggcagaaccaactctacaatgaacttaatttggggcggagggaagagtacgacgttctggacaaaaggaggggacgagatcccgagatgggcggaaagcctcagcgaaggaagaatccgcaagaggggctttataacgaactccagaaagataaaatggcagaagcctatagtgagattgggatgaagggagaaaggaggaggggtaaaggtcacgatgggttgtaccaaggattgagcacagccactaaagatacctatgatgcgctccacatgcaggccctgccgccaaga

SEQ ID NO: 23955 - DNA, 837 bp, synthetic construct
  source 1..837: mol_type = other DNA
gtgtcccccaagcctaccatcttcctgccctctatcgccgagacaaagctccagaaggccggcacctacctgtgcctgctggaaaagttcttcccagatgtgattaagatccactggcaggaaaagaagtccaacaccatcctgggcagccaggaaggcaacaccatgaagaccaacgacacctacatgaagttcagctggctgaccgtgcccgagaagtccctggacaaagaacacagatgcatcgtgcggcacgaaaacaacaagaacggcgtggaccaggaaatcatcttcccacccatcaagaccgatgtgattacaatggaccccaaggacaactgctccaaggacgccaacgataccctgctgctccagctgaccaacaccagcgcctactacatgtacttgttgctgctgctgaagtccgtggtgtacttcgccatcatcacatgctgcctgctgcggagaaccgccttctgctgcaacggcgagaagtctcgggttaagttttccagatccgcagacgcacccgcttaccaacaagggcagaaccaactctacaatgaacttaatttggggcggagggaagagtacgacgttctggacaaaaggaggggacgagatcccgagatgggcggaaagcctcagcgaaggaagaatccgcaagaggggctttataacgaactccagaaagataaaatggcagaagcctatagtgagattgggatgaagggagaaaggaggaggggtaaaggtcacgatgggttgtaccaaggattgagcacagccactaaagatacctatgatgcgctccacatgcaggccctgccgccaaga

SEQ ID NO: 23956 - DNA, 822 bp, synthetic construct
  source 1..822: mol_type = other DNA
accatcttcctgccctctatcgccgagacaaagctccagaaggccggcacctacctgtgcctgctggaaaagttcttcccagatgtgattaagatccactggcaggaaaagaagtccaacaccatcctgggcagccaggaaggcaacaccatgaagaccaacgacacctacatgaagttcagctggctgaccgtgcccgagaagtccctggacaaagaacacagatgcatcgtgcggcacgaaaacaacaagaacggcgtggaccaggaaatcatcttcccacccatcaagaccgatgtgattacaatggaccccaaggacaactgctccaaggacgccaacgataccctgctgctccagctgaccaacaccagcgcctactacatgtacttgttgctgctgctgaagtccgtggtgtacttcgccatcatcacatgctgcctgctgcggagaaccgccttctgctgcaacggcgagaagtctcgggttaagttttccagatccgcagacgcacccgcttaccaacaagggcagaaccaactctacaatgaacttaatttggggcggagggaagagtacgacgttctggacaaaaggaggggacgagatcccgagatgggcggaaagcctcagcgaaggaagaatccgcaagaggggctttataacgaactccagaaagataaaatggcagaagcctatagtgagattgggatgaagggagaaaggaggaggggtaaaggtcacgatgggttgtaccaaggattgagcacagccactaaagatacctatgatgcgctccacatgcaggccctgccgccaaga

SEQ ID NO: 23957 - DNA, 540 bp, synthetic construct
  source 1..540: mol_type = other DNA
cccatcaagaccgatgtgattacaatggaccccaaggacaactgctccaaggacgccaacgataccctgctgctccagctgaccaacaccagcgcctactacatgtacttgttgctgctgctgaagtccgtggtgtacttcgccatcatcacatgctgcctgctgcggagaaccgccttctgctgcaacggcgagaagtctcgggttaagttttccagatccgcagacgcacccgcttaccaacaagggcagaaccaactctacaatgaacttaatttggggcggagggaagagtacgacgttctggacaaaaggaggggacgagatcccgagatgggcggaaagcctcagcgaaggaagaatccgcaagaggggctttataacgaactccagaaagataaaatggcagaagcctatagtgagattgggatgaagggagaaaggaggaggggtaaaggtcacgatgggttgtaccaaggattgagcacagccactaaagatacctatgatgcgctccacatgcaggccctgccgccaaga

SEQ ID NO: 23958 - DNA, 516 bp, synthetic construct
  source 1..516: mol_type = other DNA
atggaccccaaggacaactgctccaaggacgccaacgataccctgctgctccagctgaccaacaccagcgcctactacatgtacttgttgctgctgctgaagtccgtggtgtacttcgccatcatcacatgctgcctgctgcggagaaccgccttctgctgcaacggcgagaagtctcgggttaagttttccagatccgcagacgcacccgcttaccaacaagggcagaaccaactctacaatgaacttaatttggggcggagggaagagtacgacgttctggacaaaaggaggggacgagatcccgagatgggcggaaagcctcagcgaaggaagaatccgcaagaggggctttataacgaactccagaaagataaaatggcagaagcctatagtgagattgggatgaagggagaaaggaggaggggtaaaggtcacgatgggttgtaccaaggattgagcacagccactaaagatacctatgatgcgctccacatgcaggccctgccgccaaga

SEQ ID NO: 23959 - DNA, 798 bp, synthetic construct; identical to SEQ ID NO: 23943
  source 1..798: mol_type = other DNA

SEQ ID NO: 23960 - DNA, 543 bp, synthetic construct
  source 1..543: mol_type = other DNA
gaagtgaaaaccgactccaccgaccacgtgaagcccaaagagacagagaacaccaagcagcccagcaagagctgccacaagcccaaggccatcgtgcacaccgagaaagtgaacatgatgagcctgaccgtgctgggcctgcggatgctgttcgccaaaaccgtggccgtgaacttcctgctgaccgccaagctgttcttcctccgggttaagttttccagatccgcagacgcacccgcttaccaacaagggcagaaccaactctacaatgaacttaatttggggcggagggaagagtacgacgttctggacaaaaggaggggacgagatcccgagatgggcggaaagcctcagcgaaggaagaatccgcaagaggggctttataacgaactccagaaagataaaatggcagaagcctatagtgagattgggatgaagggagaaaggaggaggggtaaaggtcacgatgggttgtaccaaggattgagcacagccactaaagatacctatgatgcgctccacatgcaggccctgccgccaaga

SEQ ID NO: 23961 - DNA, 522 bp, synthetic construct
  source 1..522: mol_type = other DNA
gaccacgtgaagcccaaagagacagagaacaccaagcagcccagcaagagctgccacaagcccaaggccatcgtgcacaccgagaaagtgaacatgatgagcctgaccgtgctgggcctgcggatgctgttcgccaaaaccgtggccgtgaacttcctgctgaccgccaagctgttcttcctccgggttaagttttccagatccgcagacgcacccgcttaccaacaagggcagaaccaactctacaatgaacttaatttggggcggagggaagagtacgacgttctggacaaaaggaggggacgagatcccgagatgggcggaaagcctcagcgaaggaagaatccgcaagaggggctttataacgaactccagaaagataaaatggcagaagcctatagtgagattgggatgaagggagaaaggaggaggggtaaaggtcacgatgggttgtaccaaggattgagcacagccactaaagatacctatgatgcgctccacatgcaggccctgccgccaaga

SEQ ID NO: 23962 - DNA, 870 bp, synthetic construct
  source 1..870: mol_type = other DNA
gaggacctgaagaacgtgttcccacctgaggtggccgtgttcgagcctagcgaggccgagatcagccacacccagaaagccaccctcgtgtgcctggctaccggcttctaccccgaccatgtggaactgtcttggtgggtcaacggcaaagaggtgcacagcggcgtgtgtaccgacccccagccactgaaagaacagcccgccctgaacgacagccggtactgcctgagcagcagactgagagtgtccgccaccttctggcagaacccccggaaccacttcagatgccaggtgcagttctacggcctgagcgagaacgacgagtggacccaggacagagccaagcccgtgacccagatcgtgtctgccgaagcctggggcagagccgattgcgacgtgaagctggtggaaaagagcttcgagacagacaccaacctgaacttccagaacctgagcgtgatcggcttcagaatcctgctgctgaaagtggccggctttaacctgctgatgaccctgcggctgtggtccagccgggttaagttttccagatccgcagacgcacccgcttaccaacaagggcagaaccaactctacaatgaacttaatttggggcggagggaagagtacgacgttctggacaaaaggaggggacgagatcccgagatgggcggaaagcctcagcgaaggaagaatccgcaagaggggctttataacgaactccagaaagataaaatggcagaagcctatagtgagattgggatgaagggagaaaggaggaggggtaaaggtcacgatgggttgtaccaaggattgagcacagccactaaagatacctatgatgcgctccacatgcaggccctgccgccaaga

SEQ ID NO: 23963 - DNA, 765 bp, synthetic construct
  source 1..765: mol_type = other DNA
atccagaaccctgatcctgccgtgtaccagctgcgggatagcaagagcagcgacaagagcgtgtgtctgttcaccgacttcgacagccagaccaacgtgtcccagagcaaggactccgacgtgtacatcaccgataagtgcgtgctggacatgcggagcatggacttcaagagcaactccgccgtggcctggtccaacaagtccgatttcgcctgcgccaacgccttcaacaacagcattatccccgaggacacattcttcccaagccccgagagcagctgcggctttaccagcgagagctaccagcagggcgtgctgagcgccaccatcctgtacgagatcctgctgggcaaggccaccctgtacgccgtgctggtgtctgccctggtgctgatggctatggtcaagcggaaggacagccggggacgggttaagttttccagatccgcagacgcacccgcttaccaacaagggcagaaccaactctacaatgaacttaatttggggcggagggaagagtacgacgttctggacaaaaggaggggacgagatcccgagatgggcggaaagcctcagcgaaggaagaatccgcaagaggggctttataacgaactccagaaagataaaatggcagaagcctatagtgagattgggatgaagggagaaaggaggaggggtaaaggtcacgatgggttgtaccaaggattgagcacagccactaaagatacctatgatgcgctccacatgcaggccctgccgccaaga

SEQ ID NO: 23964 - DNA, 861 bp, synthetic construct
  source 1..861: mol_type = other DNA
gaggacctgaagaacgtgttcccacctgaggtggccgtgttcgagcctagcgaggccgagatcagccacacccagaaagccaccctcgtgtgcctggctaccggcttctaccccgaccatgtggaactgtcttggtgggtcaacggcaaagaggtgcacagcggcgtgtgtaccgacccccagccactgaaagaacagcccgccctgaacgacagccggtactgcctgagcagcagactgagagtgtccgccaccttctggcagaacccccggaaccacttcagatgccaggtgcagttctacggcctgagcgagaacgacgagtggacccaggacagagccaagcccgtgacccagatcgtgtctgccgaagcctggggcagagccgattgcggctttaccagcgagagctaccagcagggcgtgctgagcgccaccaacctgagcgtgatcggcttcagaatcctgctgctgaaagtggccggctttaacctgctgatgaccctgcggctgtggtccagccgggttaagttttccagatccgcagacgcacccgcttaccaacaagggcagaaccaactctacaatgaacttaatttggggcggagggaagagtacgacgttctggacaaaaggaggggacgagatcccgagatgggcggaaagcctcagcgaaggaagaatccgcaagaggggctttataacgaactccagaaagataaaatggcagaagcctatagtgagattgggatgaagggagaaaggaggaggggtaaaggtcacgatgggttgtaccaaggattgagcacagccactaaagatacctatgatgcgctccacatgcaggccctgccgccaaga

SEQ ID NO: 23965 - DNA, 774 bp, synthetic construct
  source 1..774: mol_type = other DNA
atccagaaccctgatcctgccgtgtaccagctgcgggatagcaagagcagcgacaagagcgtgtgtctgttcaccgacttcgacagccagaccaacgtgtcccagagcaaggactccgacgtgtacatcaccgataagtgcgtgctggacatgcggagcatggacttcaagagcaactccgccgtggcctggtccaacaagtccgatttcgcctgcgccaacgccttcaacaacagcattatccccgaggacacattcttcccaagccccgagagcagctgcgacgtgaagctggtggaaaagagcttcgagacagacaccaacctgaacttccagatcctgtacgagatcctgctgggcaaggccaccctgtacgccgtgctggtgtctgccctggtgctgatggctatggtcaagcggaaggacagccggggacgggttaagttttccagatccgcagacgcacccgcttaccaacaagggcagaaccaactctacaatgaacttaatttggggcggagggaagagtacgacgttctggacaaaaggaggggacgagatcccgagatgggcggaaagcctcagcgaaggaagaatccgcaagaggggctttataacgaactccagaaagataaaatggcagaagcctatagtgagattgggatgaagggagaaaggaggaggggtaaaggtcacgatgggttgtaccaaggattgagcacagccactaaagatacctatgatgcgctccacatgcaggccctgccgccaaga

SEQ ID NO: 23966 - DNA, 819 bp, synthetic construct
  source 1..819: mol_type = other DNA
atccagaaccctgatcctgccgtgtaccagctgcgggatagcaagagcagcgacaagagcgtgtgtctgttcaccgacttcgacagccagaccaacgtgtcccagagcaaggactccgacgtgtacatcaccgataagtgcgtgctggacatgcggagcatggacttcaagagcaactccgccgtggcctggtccaacaagtccgatttcgcctgcgccaacgccttcaacaacagcattatccccgaggacacattcttcccaagccccgagagcagcgactccaccgaccacgtgaagcccaaagagacagagaacaccaagcagcccagcaagagctgccacaagcccaaggccatcgtgcacaccgagaaagtgaacatgatgagcctgaccgtgctgggcctgcggatgctgttcgccaaaaccgtggccgtgaacttcctgctgaccgccaagctgttcttcctcctcaccgcccgggttaagttttccagatccgcagacgcacccgcttaccaacaagggcagaaccaactctacaatgaacttaatttggggcggagggaagagtacgacgttctggacaaaaggaggggacgagatcccgagatgggcggaaagcctcagcgaaggaagaatccgcaagaggggctttataacgaactccagaaagataaaatggcagaagcctatagtgagattgggatgaagggagaaaggaggaggggtaaaggtcacgatgggttgtaccaaggattgagcacagccactaaagatacctatgatgcgctccacatgcaggccctgccgccaaga

SEQ ID NO: 23967 - DNA, 1128 bp, synthetic construct
  source 1..1128: mol_type = other DNA
gaggacctgaagaacgtgttcccacctgaggtggccgtgttcgagcctagcgaggccgagatcagccacacccagaaagccaccctcgtgtgcctggctaccggcttctaccccgaccatgtggaactgtcttggtgggtcaacggcaaagaggtgcacagcggcgtgtgtaccgacccccagccactgaaagaacagcccgccctgaacgacagccggtactgcctgagcagcagactgagagtgtccgccaccttctggcagaacccccggaaccacttcagatgccaggtgcagttctacggcctgagcgagaacgacgagtggacccaggacagagccaagcccgtgacccagatcgtgtctgccgaagcctggggcagagccgatgatgtgattaagatccactggcaggaaaagaagtccaacaccatcctgggcagccaggaaggcaacaccatgaagaccaacgacacctacatgaagttcagctggctgaccgtgcccgagaagtccctggacaaagaacacagatgcatcgtgcggcacgaaaacaacaagaacggcgtggaccaggaaatcatcttcccacccatcaagaccgatgtgattacaatggaccccaaggacaactgctccaaggacgccaacgataccctgctgctccagctgaccaacaccagcgcctactacatgtacttgttgctgctgctgaagtccgtggtgtacttcgccatcatcacatgctgcctgctgatggctatggtcaagcggaaggacagccggggacgggttaagttttccagatccgcagacgcacccgcttaccaacaagggcagaaccaactctacaatgaacttaatttggggcggagggaagagtacgacgttctggacaaaaggaggggacgagatcccgagatgggcggaaagcctcagcgaaggaagaatccgcaagaggggctttataacgaactccagaaagataaaatggcagaagcctatagtgagattgggatgaagggagaaaggaggaggggtaaaggtcacgatgggttgtaccaaggattgagcacagccactaaagatacctatgatgcgctccacatgcaggccctgccgccaaga

SEQ ID NO: 23968 - DNA, 870 bp, synthetic construct
  source 1..870: mol_type = other DNA
gaggacctgaagaacgtgttcccacctgaggtggccgtgttcgagcctagcgaggccgagatcagccacacccagaaagccaccctcgtgtgcctggctaccggcttctaccccgaccatgtggaactgtcttggtgggtcaacggcaaagaggtgcacagcggcgtgtctaccgacccccagccactgaaagaacagcccgccctgaacgacagccggtactgcctgagcagcagactgagagtgtccgccaccttctggcagaacccccggaaccacttcagatgccaggtgcagttctacggcctgagcgagaacgacgagtggacccaggacagagccaagcccgtgacccagatcgtgtctgccgaagcctggggcagagccgattgcgacgtgaagctggtggaaaagagcttcgagacagacaccaacctgaacttccagaacctgagcgtgatcggcttcagaatcctgctgctgaaagtggccggctttaacctgctgatgaccctgcggctgtggtccagccgggttaagttttccagatccgcagacgcacccgcttaccaacaagggcagaaccaactctacaatgaacttaatttggggcggagggaagagtacgacgttctggacaaaaggaggggacgagatcccgagatgggcggaaagcctcagcgaaggaagaatccgcaagaggggctttataacgaactccagaaagataaaatggcagaagcctatagtgagattgggatgaagggagaaaggaggaggggtaaaggtcacgatgggttgtaccaaggattgagcacagccactaaagatacctatgatgcgctccacatgcaggccctgccgccaaga

SEQ ID NO: 23969 - DNA, 765 bp, synthetic construct
  source 1..765: mol_type = other DNA
atccagaaccctgatcctgccgtgtaccagctgcgggatagcaagagcagcgacaagagcgtgtgtctgttcaccgacttcgacagccagaccaacgtgtcccagagcaaggactccgacgtgtacatcaccgataagaccgtgctggacatgcggagcatggacttcaagagcaactccgccgtggcctggtccaacaagtccgatttcgcctgcgccaacgccttcaacaacagcattatccccgaggacacattcttcccaagccccgagagcagctgcggctttaccagcgagagctaccagcagggcgtgctgagcgccaccatcctgtacgagatcctgctgggcaaggccaccctgtacgccgtgctggtgtctgccctggtgctgatggctatggtcaagcggaaggacagccggggacgggttaagttttccagatccgcagacgcacccgcttaccaacaagggcagaaccaactctacaatgaacttaatttggggcggagggaagagtacgacgttctggacaaaaggaggggacgagatcccgagatgggcggaaagcctcagcgaaggaagaatccgcaagaggggctttataacgaactccagaaagataaaatggcagaagcctatagtgagattgggatgaagggagaaaggaggaggggtaaaggtcacgatgggttgtaccaaggattgagcacagccactaaagatacctatgatgcgctccacatgcaggccctgccgccaaga

SEQ ID NO: 23970 - DNA, 861 bp, synthetic construct
  source 1..861: mol_type = other DNA
gaggacctgaagaacgtgttcccacctgaggtggccgtgttcgagcctagcgaggccgagatcagccacacccagaaagccaccctcgtgtgcctggctaccggcttctaccccgaccatgtggaactgtcttggtgggtcaacggcaaagaggtgcacagcggcgtgtctaccgacccccagccactgaaagaacagcccgccctgaacgacagccggtactgcctgagcagcagactgagagtgtccgccaccttctggcagaacccccggaaccacttcagatgccaggtgcagttctacggcctgagcgagaacgacgagtggacccaggacagagccaagcccgtgacccagatcgtgtctgccgaagcctggggcagagccgattgcggctttaccagcgagagctaccagcagggcgtgctgagcgccaccaacctgagcgtgatcggcttcagaatcctgctgctgaaagtggccggctttaacctgctgatgaccctgcggctgtggtccagccgggttaagttttccagatccgcagacgcacccgcttaccaacaagggcagaaccaactctacaatgaacttaatttggggcggagggaagagtacgacgttctggacaaaaggaggggacgagatcccgagatgggcggaaagcctcagcgaaggaagaatccgcaagaggggctttataacgaactccagaaagataaaatggcagaagcctatagtgagattgggatgaagggagaaaggaggaggggtaaaggtcacgatgggttgtaccaaggattgagcacagccactaaagatacctatgatgcgctccacatgcaggccctgccgccaaga

SEQ ID NO: 23971 - DNA, 774 bp, synthetic construct
  source 1..774: mol_type = other DNA
atccagaaccctgatcctgccgtgtaccagctgcgggatagcaagagcagcgacaagagcgtgtgtctgttcaccgacttcgacagccagaccaacgtgtcccagagcaaggactccgacgtgtacatcaccgataagaccgtgctggacatgcggagcatggacttcaagagcaactccgccgtggcctggtccaacaagtccgatttcgcctgcgccaacgccttcaacaacagcattatccccgaggacacattcttcccaagccccgagagcagctgcgacgtgaagctggtggaaaagagcttcgagacagacaccaacctgaacttccagatcctgtacgagatcctgctgggcaaggccaccctgtacgccgtgctggtgtctgccctggtgctgatggctatggtcaagcggaaggacagccggggacgggttaagttttccagatccgcagacgcacccgcttaccaacaagggcagaaccaactctacaatgaacttaatttggggcggagggaagagtacgacgttctggacaaaaggaggggacgagatcccgagatgggcggaaagcctcagcgaaggaagaatccgcaagaggggctttataacgaactccagaaagataaaatggcagaagcctatagtgagattgggatgaagggagaaaggaggaggggtaaaggtcacgatgggttgtaccaaggattgagcacagccactaaagatacctatgatgcgctccacatgcaggccctgccgccaaga

SEQ ID NO: 23972 - DNA, 819 bp, synthetic construct
  source 1..819: mol_type = other DNA
atccagaaccctgatcctgccgtgtaccagctgcgggatagcaagagcagcgacaagagcgtgtgtctgttcaccgacttcgacagccagaccaacgtgtcccagagcaaggactccgacgtgtacatcaccgataagaccgtgctggacatgcggagcatggacttcaagagcaactccgccgtggcctggtccaacaagtccgatttcgcctgcgccaacgccttcaacaacagcattatccccgaggacacattcttcccaagccccgagagcagcgactccaccgaccacgtgaagcccaaagagacagagaacaccaagcagcccagcaagagctgccacaagcccaaggccatcgtgcacaccgagaaagtgaacatgatgagcctgaccgtgctgggcctgcggatgctgttcgccaaaaccgtggccgtgaacttcctgctgaccgccaagctgttcttcctcctcaccgcccgggttaagttttccagatccgcagacgcacccgcttaccaacaagggcagaaccaactctacaatgaacttaatttggggcggagggaagagtacgacgttctggacaaaaggaggggacgagatcccgagatgggcggaaagcctcagcgaaggaagaatccgcaagaggggctttataacgaactccagaaagataaaatggcagaagcctatagtgagattgggatgaagggagaaaggaggaggggtaaaggtcacgatgggttgtaccaaggattgagcacagccactaaagatacctatgatgcgctccacatgcaggccctgccgccaaga

SEQ ID NO: 23973 - DNA, 1128 bp, synthetic construct
  source 1..1128: mol_type = other DNA
gaggacctgaagaacgtgttcccacctgaggtggccgtgttcgagcctagcgaggccgagatcagccacacccagaaagccaccctcgtgtgcctggctaccggcttctaccccgaccatgtggaactgtcttggtgggtcaacggcaaagaggtgcacagcggcgtgtctaccgacccccagccactgaaagaacagcccgccctgaacgacagccggtactgcctgagcagcagactgagagtgtccgccaccttctggcagaacccccggaaccacttcagatgccaggtgcagttctacggcctgagcgagaacgacgagtggacccaggacagagccaagcccgtgacccagatcgtgtctgccgaagcctggggcagagccgatgatgtgattaagatccactggcaggaaaagaagtccaacaccatcctgggcagccaggaaggcaacaccatgaagaccaacgacacctacatgaagttcagctggctgaccgtgcccgagaagtccctggacaaagaacacagatgcatcgtgcggcacgaaaacaacaagaacggcgtggaccaggaaatcatcttcccacccatcaagaccgatgtgattacaatggaccccaaggacaactgctccaaggacgccaacgataccctgctgctccagctgaccaacaccagcgcctactacatgtacttgttgctgctgctgaagtccgtggtgtacttcgccatcatcacatgctgcctgctgatggctatggtcaagcggaaggacagccggggacgggttaagttttccagatccgcagacgcacccgcttaccaacaagggcagaaccaactctacaatgaacttaatttggggcggagggaagagtacgacgttctggacaaaaggaggggacgagatcccgagatgggcggaaagcctcagcgaaggaagaatccgcaagaggggctttataacgaactccagaaagataaaatggcagaagcctatagtgagattgggatgaagggagaaaggaggaggggtaaaggtcacgatgggttgtaccaaggattgagcacagccactaaagatacctatgatgcgctccacatgcaggccctgccgccaaga

SEQ ID NO: 23974 - DNA, 810 bp, synthetic construct
  source 1..810: mol_type = other DNA
atccagaaccctgatcctgccgtgtaccagctgcgggatagcaagagcagcgacaagagcgtgtgtctgttcaccgacttcgacagccagaccaacgtgtcccagagcaaggactccgacgtgtacatcaccgataagtgcgtgctggacatgcggagcatggacttcaagagcaactccgccgtggcctggtccaacaagtccgatttcgcctgcgccaacgccttcaacaacagcattatccccgaggacacattcttcccaagccccgagagcagcgactccaccgaccacgtgaagcccaaagagacagagaacaccaagcagcccagcaagagctgccacaagcccaaggccatcgtgcacaccgagaaagtgaacatgatgagcctgaccgtgctgggcctgcggatgctgttcgccaaaaccgtggccgtgaacttcctgctgaccgccaagctgttcttcctccgggttaagttttccagatccgcagacgcacccgcttaccaacaagggcagaaccaactctacaatgaacttaatttggggcggagggaagagtacgacgttctggacaaaaggaggggacgagatcccgagatgggcggaaagcctcagcgaaggaagaatccgcaagaggggctttataacgaactccagaaagataaaatggcagaagcctatagtgagattgggatgaagggagaaaggaggaggggtaaaggtcacgatgggttgtaccaaggattgagcacagccactaaagatacctatgatgcgctccacatgcaggccctgccgccaaga

SEQ ID NO: 23975 - DNA, 1131 bp, synthetic construct
  source 1..1131: mol_type = other DNA
gaggacctgaagaacgtgttcccacctgaggtggccgtgttcgagcctagcgaggccgagatcagccacacccagaaagccaccctcgtgtgcctggctaccggcttctaccccgaccatgtggaactgtcttggtgggtcaacggcaaagaggtgcacagcggcgtgtgtaccgacccccagccactgaaagaacagcccgccctgaacgacagccggtactgcctgagcagcagactgagagtgtccgccaccttctggcagaacccccggaaccacttcagatgccaggtgcagttctacggcctgagcgagaacgacgagtggacccaggacagagccaagcccgtgacccagatcgtgtctgccgaagcctggggcagagccgatgatgtgattaagatccactggcaggaaaagaagtccaacaccatcctgggcagccaggaaggcaacaccatgaagaccaacgacacctacatgaagttcagctggctgaccgtgcccgagaagtccctggacaaagaacacagatgcatcgtgcggcacgaaaacaacaagaacggcgtggaccaggaaatcatcttcccacccatcaagaccgatgtgattacaatggaccccaaggacaactgctccaaggacgccaacgataccctgctgctccagctgaccaacaccagcgcctactacatgtacttgttgctgctgctgaagtccgtggtgtacttcgccatcatcacatgctgcctgctgcggagaaccgccttctgctgcaacggcgagaagtctcgggttaagttttccagatccgcagacgcacccgcttaccaacaagggcagaaccaactctacaatgaacttaatttggggcggagggaagagtacgacgttctggacaaaaggaggggacgagatcccgagatgggcggaaagcctcagcgaaggaagaatccgcaagaggggctttataacgaactccagaaagataaaatggcagaagcctatagtgagattgggatgaagggagaaaggaggaggggtaaaggtcacgatgggttgtaccaaggattgagcacagccactaaagatacctatgatgcgctccacatgcaggccctgccgccaaga

SEQ ID NO: 23976 - DNA, 810 bp, synthetic construct
  source 1..810: mol_type = other DNA
atccagaaccctgatcctgccgtgtaccagctgcgggatagcaagagcagcgacaagagcgtgtgtctgttcaccgacttcgacagccagaccaacgtgtcccagagcaaggactccgacgtgtacatcaccgataagaccgtgctggacatgcggagcatggacttcaagagcaactccgccgtggcctggtccaacaagtccgatttcgcctgcgccaacgccttcaacaacagcattatccccgaggacacattcttcccaagccccgagagcagcgactccaccgaccacgtgaagcccaaagagacagagaacaccaagcagcccagcaagagctgccacaagcccaaggccatcgtgcacaccgagaaagtgaacatgatgagcctgaccgtgctgggcctgcggatgctgttcgccaaaaccgtggccgtgaacttcctgctgaccgccaagctgttcttcctccgggttaagttttccagatccgcagacgcacccgcttaccaacaagggcagaaccaactctacaatgaacttaatttggggcggagggaagagtacgacgttctggacaaaaggaggggacgagatcccgagatgggcggaaagcctcagcgaaggaagaatccgcaagaggggctttataacgaactccagaaagataaaatggcagaagcctatagtgagattgggatgaagggagaaaggaggaggggtaaaggtcacgatgggttgtaccaaggattgagcacagccactaaagatacctatgatgcgctccacatgcaggccctgccgccaaga

SEQ ID NO: 23977 - DNA, 1131 bp, synthetic construct
  source 1..1131: mol_type = other DNA
gaggacctgaagaacgtgttcccacctgaggtggccgtgttcgagcctagcgaggccgagatcagccacacccagaaagccaccctcgtgtgcctggctaccggcttctaccccgaccatgtggaactgtcttggtgggtcaacggcaaagaggtgcacagcggcgtgtctaccgacccccagccactgaaagaacagcccgccctgaacgacagccggtactgcctgagcagcagactgagagtgtccgccaccttctggcagaacccccggaaccacttcagatgccaggtgcagttctacggcctgagcgagaacgacgagtggacccaggacagagccaagcccgtgacccagatcgtgtctgccgaagcctggggcagagccgatgatgtgattaagatccactggcaggaaaagaagtccaacaccatcctgggcagccaggaaggcaacaccatgaagaccaacgacacctacatgaagttcagctggctgaccgtgcccgagaagtccctggacaaagaacacagatgcatcgtgcggcacgaaaacaacaagaacggcgtggaccaggaaatcatcttcccacccatcaagaccgatgtgattacaatggaccccaaggacaactgctccaaggacgccaacgataccctgctgctccagctgaccaacaccagcgcctactacatgtacttgttgctgctgctgaagtccgtggtgtacttcgccatcatcacatgctgcctgctgcggagaaccgccttctgctgcaacggcgagaagtctcgggttaagttttccagatccgcagacgcacccgcttaccaacaagggcagaaccaactctacaatgaacttaatttggggcggagggaagagtacgacgttctggacaaaaggaggggacgagatcccgagatgggcggaaagcctcagcgaaggaagaatccgcaagaggggctttataacgaactccagaaagataaaatggcagaagcctatagtgagattgggatgaagggagaaaggaggaggggtaaaggtcacgatgggttgtaccaaggattgagcacagccactaaagatacctatgatgcgctccacatgcaggccctgccgccaaga

SEQ ID NO: 23978 - DNA, 765 bp, synthetic construct; identical to SEQ ID NO: 23963
  source 1..765: mol_type = other DNA

SEQ ID NO: 23979 - DNA, 762 bp, synthetic construct
  source 1..762: mol_type = other DNA
cagaaccctgatcctgccgtgtaccagctgcgggatagcaagagcagcgacaagagcgtgtgtctgttcaccgacttcgacagccagaccaacgtgtcccagagcaaggactccgacgtgtacatcaccgataagtgcgtgctggacatgcggagcatggacttcaagagcaactccgccgtggcctggtccaacaagtccgatttcgcctgcgccaacgccttcaacaacagcattatccccgaggacacattcttcccaagccccgagagcagctgcggctttaccagcgagagctaccagcagggcgtgctgagcgccaccatcctgtacgagatcctgctgggcaaggccaccctgtacgccgtgctggtgtctgccctggtgctgatggctatggtcaagcggaaggacagccggggacgggttaagttttccagatccgcagacgcacccgcttaccaacaagggcagaaccaactctacaatgaacttaatttggggcggagggaagagtacgacgttctggacaaaaggaggggacgagatcccgagatgggcggaaagcctcagcgaaggaagaatccgcaagaggggctttataacgaactccagaaagataaaatggcagaagcctatagtgagattgggatgaagggagaaaggaggaggggtaaaggtcacgatgggttgtaccaaggattgagcacagccactaaagatacctatgatgcgctccacatgcaggccctgccgccaaga

SEQ ID NO: 23980 - DNA, 759 bp, synthetic construct
  source 1..759: mol_type = other DNA
aaccctgatcctgccgtgtaccagctgcgggatagcaagagcagcgacaagagcgtgtgtctgttcaccgacttcgacagccagaccaacgtgtcccagagcaaggactccgacgtgtacatcaccgataagtgcgtgctggacatgcggagcatggacttcaagagcaactccgccgtggcctggtccaacaagtccgatttcgcctgcgccaacgccttcaacaacagcattatccccgaggacacattcttcccaagccccgagagcagctgcggctttaccagcgagagctaccagcagggcgtgctgagcgccaccatcctgtacgagatcctgctgggcaaggccaccctgtacgccgtgctggtgtctgccctggtgctgatggctatggtcaagcggaaggacagccggggacgggttaagttttccagatccgcagacgcacccgcttaccaacaagggcagaaccaactctacaatgaacttaatttggggcggagggaagagtacgacgttctggacaaaaggaggggacgagatcccgagatgggcggaaagcctcagcgaaggaagaatccgcaagaggggctttataacgaactccagaaagataaaatggcagaagcctatagtgagattgggatgaagggagaaaggaggaggggtaaaggtcacgatgggttgtaccaaggattgagcacagccactaaagatacctatgatgcgctccacatgcaggccctgccgccaaga

SEQ ID NO: 23981 - DNA, 756 bp, synthetic construct
  source 1..756: mol_type = other DNA
cctgatcctgccgtgtaccagctgcgggatagcaagagcagcgacaagagcgtgtgtctgttcaccgacttcgacagccagaccaacgtgtcccagagcaaggactccgacgtgtacatcaccgataagtgcgtgctggacatgcggagcatggacttcaagagcaactccgccgtggcctggtccaacaagtccgatttcgcctgcgccaacgccttcaacaacagcattatccccgaggacacattcttcccaagccccgagagcagctgcggctttaccagcgagagctaccagcagggcgtgctgagcgccaccatcctgtacgagatcctgctgggcaaggccaccctgtacgccgtgctggtgtctgccctggtgctgatggctatggtcaagcggaaggacagccggggacgggttaagttttccagatccgcagacgcacccgcttaccaacaagggcagaaccaactctacaatgaacttaatttggggcggagggaagagtacgacgttctggacaaaaggaggggacgagatcccgagatgggcggaaagcctcagcgaaggaagaatccgcaagaggggctttataacgaactccagaaagataaaatggcagaagcctatagtgagattgggatgaagggagaaaggaggaggggtaaaggtcacgatgggttgtaccaaggattgagcacagccactaaagatacctatgatgcgctccacatgcaggccctgccgccaaga

SEQ ID NO: 23982 - DNA, 753 bp, synthetic construct
  source 1..753: mol_type = other DNA
gatcctgccgtgtaccagctgcgggatagcaagagcagcgacaagagcgtgtgtctgttcaccgacttcgacagccagaccaacgtgtcccagagcaaggactccgacgtgtacatcaccgataagtgcgtgctggacatgcggagcatggacttcaagagcaactccgccgtggcctggtccaacaagtccgatttcgcctgcgccaacgccttcaacaacagcattatccccgaggacacattcttcccaagccccgagagcagctgcggctttaccagcgagagctaccagcagggcgtgctgagcgccaccatcctgtacgagatcctgctgggcaaggccaccctgtacgccgtgctggtgtctgccctggtgctgatggctatggtcaagcggaaggacagccggggacgggttaagttttccagatccgcagacgcacccgcttaccaacaagggcagaaccaactctacaatgaacttaatttggggcggagggaagagtacgacgttctggacaaaaggaggggacgagatcccgagatgggcggaaagcctcagcgaaggaagaatccgcaagaggggctttataacgaactccagaaagataaaatggcagaagcctatagtgagattgggatgaagggagaaaggaggaggggtaaaggtcacgatgggttgtaccaaggattgagcacagccactaaagatacctatgatgcgctccacatgcaggccctgccgccaaga

SEQ ID NO: 23983 - DNA, 750 bp, synthetic construct
  source 1..750: mol_type = other DNA
cctgccgtgtaccagctgcgggatagcaagagcagcgacaagagcgtgtgtctgttcaccgacttcgacagccagaccaacgtgtcccagagcaaggactccgacgtgtacatcaccgataagtgcgtgctggacatgcggagcatggacttcaagagcaactccgccgtggcctggtccaacaagtccgatttcgcctgcgccaacgccttcaacaacagcattatccccgaggacacattcttcccaagccccgagagcagctgcggctttaccagcgagagctaccagcagggcgtgctgagcgccaccatcctgtacgagatcctgctgggcaaggccaccctgtacgccgtgctggtgtctgccctggtgctgatggctatggtcaagcggaaggacagccggggacgggttaagttttccagatccgcagacgcacccgcttaccaacaagggcagaaccaactctacaatgaacttaatttggggcggagggaagagtacgacgttctggacaaaaggaggggacgagatcccgagatgggcggaaagcctcagcgaaggaagaatccgcaagaggggctttataacgaactccagaaagataaaatggcagaagcctatagtgagattgggatgaagggagaaaggaggaggggtaaaggtcacgatgggttgtaccaaggattgagcacagccactaaagatacctatgatgcgctccacatgcaggccctgccgccaaga

SEQ ID NO: 23984 - DNA, 747 bp, synthetic construct
  source 1..747: mol_type = other DNA
gccgtgtaccagctgcgggatagcaagagcagcgacaagagcgtgtgtctgttcaccgacttcgacagccagaccaacgtgtcccagagcaaggactccgacgtgtacatcaccgataagtgcgtgctggacatgcggagcatggacttcaagagcaactccgccgtggcctggtccaacaagtccgatttcgcctgcgccaacgccttcaacaacagcattatccccgaggacacattcttcccaagccccgagagcagctgcggctttaccagcgagagctaccagcagggcgtgctgagcgccaccatcctgtacgagatcctgctgggcaaggccaccctgtacgccgtgctggtgtctgccctggtgctgatggctatggtcaagcggaaggacagccggggacgggttaagttttccagatccgcagacgcacccgcttaccaacaagggcagaaccaactctacaatgaacttaatttggggcggagggaagagtacgacgttctggacaaaaggaggggacgagatcccgagatgggcggaaagcctcagcgaaggaagaatccgcaagaggggctttataacgaactccagaaagataaaatggcagaagcctatagtgagattgggatgaagggagaaaggaggaggggtaaaggtcacgatgggttgtaccaaggattgagcacagccactaaagatacctatgatgcgctccacatgcaggccctgccgccaaga

SEQ ID NO: 23985 - DNA, 744 bp, synthetic construct
  source 1..744: mol_type = other DNA
gtgtaccagctgcgggatagcaagagcagcgacaagagcgtgtgtctgttcaccgacttcgacagccagaccaacgtgtcccagagcaaggactccgacgtgtacatcaccgataagtgcgtgctggacatgcggagcatggacttcaagagcaactccgccgtggcctggtccaacaagtccgatttcgcctgcgccaacgccttcaacaacagcattatccccgaggacacattcttcccaagccccgagagcagctgcggctttaccagcgagagctaccagcagggcgtgctgagcgccaccatcctgtacgagatcctgctgggcaaggccaccctgtacgccgtgctggtgtctgccctggtgctgatggctatggtcaagcggaaggacagccggggacgggttaagttttccagatccgcagacgcacccgcttaccaacaagggcagaaccaactctacaatgaacttaatttggggcggagggaagagtacgacgttctggacaaaaggaggggacgagatcccgagatgggcggaaagcctcagcgaaggaagaatccgcaagaggggctttataacgaactccagaaagataaaatggcagaagcctatagtgagattgggatgaagggagaaaggaggaggggtaaaggtcacgatgggttgtaccaaggattgagcacagccactaaagatacctatgatgcgctccacatgcaggccctgccgccaaga

SEQ ID NO: 23986 - DNA, 741 bp, synthetic construct
  source 1..741: mol_type = other DNA
taccagctgcgggatagcaagagcagcgacaagagcgtgtgtctgttcaccgacttcgacagccagaccaacgtgtcccagagcaaggactccgacgtgtacatcaccgataagtgcgtgctggacatgcggagcatggacttcaagagcaactccgccgtggcctggtccaacaagtccgatttcgcctgcgccaacgccttcaacaacagcattatccccgaggacacattcttcccaagccccgagagcagctgcggctttaccagcgagagctaccagcagggcgtgctgagcgccaccatcctgtacgagatcctgctgggcaaggccaccctgtacgccgtgctggtgtctgccctggtgctgatggctatggtcaagcggaaggacagccggggacgggttaagttttccagatccgcagacgcacccgcttaccaacaagggcagaaccaactctacaatgaacttaatttggggcggagggaagagtacgacgttctggacaaaaggaggggacgagatcccgagatgggcggaaagcctcagcgaaggaagaatccgcaagaggggctttataacgaactccagaaagataaaatggcagaagcctatagtgagattgggatgaagggagaaaggaggaggggtaaaggtcacgatgggttgtaccaaggattgagcacagccactaaagatacctatgatgcgctccacatgcaggccctgccgccaaga

SEQ ID NO: 23987 - DNA, 738 bp, synthetic construct
  source 1..738: mol_type = other DNA
cagctgcgggatagcaagagcagcgacaagagcgtgtgtctgttcaccgacttcgacagccagaccaacgtgtcccagagcaaggactccgacgtgtacatcaccgataagtgcgtgctggacatgcggagcatggacttcaagagcaactccgccgtggcctggtccaacaagtccgatttcgcctgcgccaacgccttcaacaacagcattatccccgaggacacattcttcccaagccccgagagcagctgcggctttaccagcgagagctaccagcagggcgtgctgagcgccaccatcctgtacgagatcctgctgggcaaggccaccctgtacgccgtgctggtgtctgccctggtgctgatggctatggtcaagcggaaggacagccggggacgggttaagttttccagatccgcagacgcacccgcttaccaacaagggcagaaccaactctacaatgaacttaatttggggcggagggaagagtacgacgttctggacaaaaggaggggacgagatcccgagatgggcggaaagcctcagcgaaggaagaatccgcaagaggggctttataacgaactccagaaagataaaatggcagaagcctatagtgagattgggatgaagggagaaaggaggaggggtaaaggtcacgatgggttgtaccaaggattgagcacagccactaaagatacctatgatgcgctccacatgcaggccctgccgccaaga

SEQ ID NO: 23988 - DNA, 735 bp, synthetic construct
  source 1..735: mol_type = other DNA
ctgcgggatagcaagagcagcgacaagagcgtgtgtctgttcaccgacttcgacagccagaccaacgtgtcccagagcaaggactccgacgtgtacatcaccgataagtgcgtgctggacatgcggagcatggacttcaagagcaactccgccgtggcctggtccaacaagtccgatttcgcctgcgccaacgccttcaacaacagcattatccccgaggacacattcttcccaagccccgagagcagctgcggctttaccagcgagagctaccagcagggcgtgctgagcgccaccatcctgtacgagatcctgctgggcaaggccaccctgtacgccgtgctggtgtctgccctggtgctgatggctatggtcaagcggaaggacagccggggacgggttaagttttccagatccgcagacgcacccgcttaccaacaagggcagaaccaactctacaatgaacttaatttggggcggagggaagagtacgacgttctggacaaaaggaggggacgagatcccgagatgggcggaaagcctcagcgaaggaagaatccgcaagaggggctttataacgaactccagaaagataaaatggcagaagcctatagtgagattgggatgaagggagaaaggaggaggggtaaaggtcacgatgggttgtaccaaggattgagcacagccactaaagatacctatgatgcgctccacatgcaggccctgccgccaaga

SEQ ID NO: 23989 - DNA, 732 bp, synthetic construct
  source 1..732: mol_type = other DNA
cgggatagcaagagcagcgacaagagcgtgtgtctgttcaccgacttcgacagccagaccaacgtgtcccagagcaaggactccgacgtgtacatcaccgataagtgcgtgctggacatgcggagcatggacttcaagagcaactccgccgtggcctggtccaacaagtccgatttcgcctgcgccaacgccttcaacaacagcattatccccgaggacacattcttcccaagccccgagagcagctgcggctttaccagcgagagctaccagcagggcgtgctgagcgccaccatcctgtacgagatcctgctgggcaaggccaccctgtacgccgtgctggtgtctgccctggtgctgatggctatggtcaagcggaaggacagccggggacgggttaagttttccagatccgcagacgcacccgcttaccaacaagggcagaaccaactctacaatgaacttaatttggggcggagggaagagtacgacgttctggacaaaaggaggggacgagatcccgagatgggcggaaagcctcagcgaaggaagaatccgcaagaggggctttataacgaactccagaaagataaaatggcagaagcctatagtgagattgggatgaagggagaaaggaggaggggtaaaggtcacgatgggttgtaccaaggattgagcacagccactaaagatacctatgatgcgctccacatgcaggccctgccgccaaga

SEQ ID NO: 23990 - DNA, 729 bp, synthetic construct
  source 1..729: mol_type = other DNA
gatagcaagagcagcgacaagagcgtgtgtctgttcaccgacttcgacagccagaccaacgtgtcccagagcaaggactccgacgtgtacatcaccgataagtgcgtgctggacatgcggagcatggacttcaagagcaactccgccgtggcctggtccaacaagtccgatttcgcctgcgccaacgccttcaacaacagcattatccccgaggacacattcttcccaagccccgagagcagctgcggctttaccagcgagagctaccagcagggcgtgctgagcgccaccatcctgtacgagatcctgctgggcaaggccaccctgtacgccgtgctggtgtctgccctggtgctgatggctatggtcaagcggaaggacagccggggacgggttaagttttccagatccgcagacgcacccgcttaccaacaagggcagaaccaactctacaatgaacttaatttggggcggagggaagagtacgacgttctggacaaaaggaggggacgagatcccgagatgggcggaaagcctcagcgaaggaagaatccgcaagaggggctttataacgaactccagaaagataaaatggcagaagcctatagtgagattgggatgaagggagaaaggaggaggggtaaaggtcacgatgggttgtaccaaggattgagcacagccactaaagatacctatgatgcgctccacatgcaggccctgccgccaaga

SEQ ID NO: 23991 - DNA, 726 bp, synthetic construct
  source 1..726: mol_type = other DNA
agcaagagcagcgacaagagcgtgtgtctgttcaccgacttcgacagccagaccaacgtgtcccagagcaaggactccgacgtgtacatcaccgataagtgcgtgctggacatgcggagcatggacttcaagagcaactccgccgtggcctggtccaacaagtccgatttcgcctgcgccaacgccttcaacaacagcattatccccgaggacacattcttcccaagccccgagagcagctgcggctttaccagcgagagctaccagcagggcgtgctgagcgccaccatcctgtacgagatcctgctgggcaaggccaccctgtacgccgtgctggtgtctgccctggtgctgatggctatggtcaagcggaaggacagccggggacgggttaagttttccagatccgcagacgcacccgcttaccaacaagggcagaaccaactctacaatgaacttaatttggggcggagggaagagtacgacgttctggacaaaaggaggggacgagatcccgagatgggcggaaagcctcagcgaaggaagaatccgcaagaggggctttataacgaactccagaaagataaaatggcagaagcctatagtgagattgggatgaagggagaaaggaggaggggtaaaggtcacgatgggttgtaccaaggattgagcacagccactaaagatacctatgatgcgctccacatgcaggccctgccgccaaga

SEQ ID NO: 23992 - DNA, 723 bp, synthetic construct
  source 1..723: mol_type = other DNA
aagagcagcgacaagagcgtgtgtctgttcaccgacttcgacagccagaccaacgtgtcccagagcaaggactccgacgtgtacatcaccgataagtgcgtgctggacatgcggagcatggacttcaagagcaactccgccgtggcctggtccaacaagtccgatttcgcctgcgccaacgccttcaacaacagcattatccccgaggacacattcttcccaagccccgagagcagctgcggctttaccagcgagagctaccagcagggcgtgctgagcgccaccatcctgtacgagatcctgctgggcaaggccaccctgtacgccgtgctggtgtctgccctggtgctgatggctatggtcaagcggaaggacagccggggacgggttaagttttccagatccgcagacgcacccgcttaccaacaagggcagaaccaactctacaatgaacttaatttggggcggagggaagagtacgacgttctggacaaaaggaggggacgagatcccgagatgggcggaaagcctcagcgaaggaagaatccgcaagaggggctttataacgaactccagaaagataaaatggcagaagcctatagtgagattgggatgaagggagaaaggaggaggggtaaaggtcacgatgggttgtaccaaggattgagcacagccactaaagatacctatgatgcgctccacatgcaggccctgccgccaaga

SEQ ID NO: 23993 - DNA, 720 bp, synthetic construct
  source 1..720: mol_type = other DNA
agcagcgacaagagcgtgtgtctgttcaccgacttcgacagccagaccaacgtgtcccagagcaaggactccgacgtgtacatcaccgataagtgcgtgctggacatgcggagcatggacttcaagagcaactccgccgtggcctggtccaacaagtccgatttcgcctgcgccaacgccttcaacaacagcattatccccgaggacacattcttcccaagccccgagagcagctgcggctttaccagcgagagctaccagcagggcgtgctgagcgccaccatcctgtacgagatcctgctgggcaaggccaccctgtacgccgtgctggtgtctgccctggtgctgatggctatggtcaagcggaaggacagccggggacgggttaagttttccagatccgcagacgcacccgcttaccaacaagggcagaaccaactctacaatgaacttaatttggggcggagggaagagtacgacgttctggacaaaaggaggggacgagatcccgagatgggcggaaagcctcagcgaaggaagaatccgcaagaggggctttataacgaactccagaaagataaaatggcagaagcctatagtgagattgggatgaagggagaaaggaggaggggtaaaggtcacgatgggttgtaccaaggattgagcacagccactaaagatacctatgatgcgctccacatgcaggccctgccgccaaga

SEQ ID NO: 23994 - DNA, 717 bp, synthetic construct
  source 1..717: mol_type = other DNA
agcgacaagagcgtgtgtctgttcaccgacttcgacagccagaccaacgtgtcccagagcaaggactccgacgtgtacatcaccgataagtgcgtgctggacatgcggagcatggacttcaagagcaactccgccgtggcctggtccaacaagtccgatttcgcctgcgccaacgccttcaacaacagcattatccccgaggacacattcttcccaagccccgagagcagctgcggctttaccagcgagagctaccagcagggcgtgctgagcgccaccatcctgtacgagatcctgctgggcaaggccaccctgtacgccgtgctggtgtctgccctggtgctgatggctatggtcaagcggaaggacagccggggacgggttaagttttccagatccgcagacgcacccgcttaccaacaagggcagaaccaactctacaatgaacttaatttggggcggagggaagagtacgacgttctggacaaaaggaggggacgagatcccgagatgggcggaaagcctcagcgaaggaagaatccgcaagaggggctttataacgaactccagaaagataaaatggcagaagcctatagtgagattgggatgaagggagaaaggaggaggggtaaaggtcacgatgggttgtaccaaggattgagcacagccactaaagatacctatgatgcgctccacatgcaggccctgccgccaaga

SEQ ID NO: 23995 - DNA, 714 bp, synthetic construct
  source 1..714: mol_type = other DNA
gacaagagcgtgtgtctgttcaccgacttcgacagccagaccaacgtgtcccagagcaaggactccgacgtgtacatcaccgataagtgcgtgctggacatgcggagcatggacttcaagagcaactccgccgtggcctggtccaacaagtccgatttcgcctgcgccaacgccttcaacaacagcattatccccgaggacacattcttcccaagccccgagagcagctgcggctttaccagcgagagctaccagcagggcgtgctgagcgccaccatcctgtacgagatcctgctgggcaaggccaccctgtacgccgtgctggtgtctgccctggtgctgatggctatggtcaagcggaaggacagccggggacgggttaagttttccagatccgcagacgcacccgcttaccaacaagggcagaaccaactctacaatgaacttaatttggggcggagggaagagtacgacgttctggacaaaaggaggggacgagatcccgagatgggcggaaagcctcagcgaaggaagaatccgcaagaggggctttataacgaactccagaaagataaaatggcagaagcctatagtgagattgggatgaagggagaaaggaggaggggtaaaggtcacgatgggttgtaccaaggattgagcacagccactaaagatacctatgatgcgctccacatgcaggccctgccgccaaga

SEQ ID NO: 23996 - DNA, 711 bp, synthetic construct
  source 1..711: mol_type = other DNA
aagagcgtgtgtctgttcaccgacttcgacagccagaccaacgtgtcccagagcaaggactccgacgtgtacatcaccgataagtgcgtgctggacatgcggagcatggacttcaagagcaactccgccgtggcctggtccaacaagtccgatttcgcctgcgccaacgccttcaacaacagcattatccccgaggacacattcttcccaagccccgagagcagctgcggctttaccagcgagagctaccagcagggcgtgctgagcgccaccatcctgtacgagatcctgctgggcaaggccaccctgtacgccgtgctggtgtctgccctggtgctgatggctatggtcaagcggaaggacagccggggacgggttaagttttccagatccgcagacgcacccgcttaccaacaagggcagaaccaactctacaatgaacttaatttggggcggagggaagagtacgacgttctggacaaaaggaggggacgagatcccgagatgggcggaaagcctcagcgaaggaagaatccgcaagaggggctttataacgaactccagaaagataaaatggcagaagcctatagtgagattgggatgaagggagaaaggaggaggggtaaaggtcacgatgggttgtaccaaggattgagcacagccactaaagatacctatgatgcgctccacatgcaggccctgccgccaaga

SEQ ID NO: 23997 - DNA, 708 bp, synthetic construct
  source 1..708: mol_type = other DNA
agcgtgtgtctgttcaccgacttcgacagccagaccaacgtgtcccagagcaaggactccgacgtgtacatcaccgataagtgcgtgctggacatgcggagcatggacttcaagagcaactccgccgtggcctggtccaacaagtccgatttcgcctgcgccaacgccttcaacaacagcattatccccgaggacacattcttcccaagccccgagagcagctgcggctttaccagcgagagctaccagcagggcgtgctgagcgccaccatcctgtacgagatcctgctgggcaaggccaccctgtacgccgtgctggtgtctgccctggtgctgatggctatggtcaagcggaaggacagccggggacgggttaagttttccagatccgcagacgcacccgcttaccaacaagggcagaaccaactctacaatgaacttaatttggggcggagggaagagtacgacgttctggacaaaaggaggggacgagatcccgagatgggcggaaagcctcagcgaaggaagaatccgcaagaggggctttataacgaactccagaaagataaaatggcagaagcctatagtgagattgggatgaagggagaaaggaggaggggtaaaggtcacgatgggttgtaccaaggattgagcacagccactaaagatacctatgatgcgctccacatgcaggccctgccgccaaga

SEQ ID NO: 23998 - DNA, 705 bp, synthetic construct
  source 1..705: mol_type = other DNA
gtgtgtctgttcaccgacttcgacagccagaccaacgtgtcccagagcaaggactccgacgtgtacatcaccgataagtgcgtgctggacatgcggagcatggacttcaagagcaactccgccgtggcctggtccaacaagtccgatttcgcctgcgccaacgccttcaacaacagcattatccccgaggacacattcttcccaagccccgagagcagctgcggctttaccagcgagagctaccagcagggcgtgctgagcgccaccatcctgtacgagatcctgctgggcaaggccaccctgtacgccgtgctggtgtctgccctggtgctgatggctatggtcaagcggaaggacagccggggacgggttaagttttccagatccgcagacgcacccgcttaccaacaagggcagaaccaactctacaatgaacttaatttggggcggagggaagagtacgacgttctggacaaaaggaggggacgagatcccgagatgggcggaaagcctcagcgaaggaagaatccgcaagaggggctttataacgaactccagaaagataaaatggcagaagcctatagtgagattgggatgaagggagaaaggaggaggggtaaaggtcacgatgggttgtaccaaggattgagcacagccactaaagatacctatgatgcgctccacatgcaggccctgccgccaaga

SEQ ID NO: 23999 - DNA, 690 bp, synthetic construct
  source 1..690: mol_type = other DNA
gacttcgacagccagaccaacgtgtcccagagcaaggactccgacgtgtacatcaccgataagtgcgtgctggacatgcggagcatggacttcaagagcaactccgccgtggcctggtccaacaagtccgatttcgcctgcgccaacgccttcaacaacagcattatccccgaggacacattcttcccaagccccgagagcagctgcggctttaccagcgagagctaccagcagggcgtgctgagcgccaccatcctgtacgagatcctgctgggcaaggccaccctgtacgccgtgctggtgtctgccctggtgctgatggctatggtcaagcggaaggacagccggggacgggttaagttttccagatccgcagacgcacccgcttaccaacaagggcagaaccaactctacaatgaacttaatttggggcggagggaagagtacgacgttctggacaaaaggaggggacgagatcccgagatgggcggaaagcctcagcgaaggaagaatccgcaagaggggctttataacgaactccagaaagataaaatggcagaagcctatagtgagattgggatgaagggagaaaggaggaggggtaaaggtcacgatgggttgtaccaaggattgagcacagccactaaagatacctatgatgcgctccacatgcaggccctgccgccaaga

SEQ ID NO: 24000 - DNA, 675 bp, synthetic construct
  source 1..675: mol_type = other DNA
accaacgtgtcccagagcaaggactccgacgtgtacatcaccgataagtgcgtgctggacatgcggagcatggacttcaagagcaactccgccgtggcctggtccaacaagtccgatttcgcctgcgccaacgccttcaacaacagcattatccccgaggacacattcttcccaagccccgagagcagctgcggctttaccagcgagagctaccagcagggcgtgctgagcgccaccatcctgtacgagatcctgctgggcaaggccaccctgtacgccgtgctggtgtctgccctggtgctgatggctatggtcaagcggaaggacagccggggacgggttaagttttccagatccgcagacgcacccgcttaccaacaagggcagaaccaactctacaatgaacttaatttggggcggagggaagagtacgacgttctggacaaaaggaggggacgagatcccgagatgggcggaaagcctcagcgaaggaagaatccgcaagaggggctttataacgaactccagaaagataaaatggcagaagcctatagtgagattgggatgaagggagaaaggaggaggggtaaaggtcacgatgggttgtaccaaggattgagcacagccactaaagatacctatgatgcgctccacatgcaggccctgccgccaaga

SEQ ID NO: 24001 - DNA, 774 bp, synthetic construct; identical to SEQ ID NO: 23965
  source 1..774: mol_type = other DNA

SEQ ID NO: 24002 - DNA, 771 bp, synthetic construct
  source 1..771: mol_type = other DNA
cagaaccctgatcctgccgtgtaccagctgcgggatagcaagagcagcgacaagagcgtgtgtctgttcaccgacttcgacagccagaccaacgtgtcccagagcaaggactccgacgtgtacatcaccgataagtgcgtgctggacatgcggagcatggacttcaagagcaactccgccgtggcctggtccaacaagtccgatttcgcctgcgccaacgccttcaacaacagcattatccccgaggacacattcttcccaagccccgagagcagctgcgacgtgaagctggtggaaaagagcttcgagacagacaccaacctgaacttccagatcctgtacgagatcctgctgggcaaggccaccctgtacgccgtgctggtgtctgccctggtgctgatggctatggtcaagcggaaggacagccggggacgggttaagttttccagatccgcagacgcacccgcttaccaacaagggcagaaccaactctacaatgaacttaatttggggcggagggaagagtacgacgttctggacaaaaggaggggacgagatcccgagatgggcggaaagcctcagcgaaggaagaatccgcaagaggggctttataacgaactccagaaagataaaatggcagaagcctatagtgagattgggatgaagggagaaaggaggaggggtaaaggtcacgatgggttgtaccaaggattgagcacagccactaaagatacctatgatgcgctccacatgcaggccctgccgccaaga

SEQ ID NO: 24003 - DNA, 768 bp, synthetic construct
  source 1..768: mol_type = other DNA
aaccctgatcctgccgtgtaccagctgcgggatagcaagagcagcgacaagagcgtgtgtctgttcaccgacttcgacagccagaccaacgtgtcccagagcaaggactccgacgtgtacatcaccgataagtgcgtgctggacatgcggagcatggacttcaagagcaactccgccgtggcctggtccaacaagtccgatttcgcctgcgccaacgccttcaacaacagcattatccccgaggacacattcttcccaagccccgagagcagctgcgacgtgaagctggtggaaaagagcttcgagacagacaccaacctgaacttccagatcctgtacgagatcctgctgggcaaggccaccctgtacgccgtgctggtgtctgccctggtgctgatggctatggtcaagcggaaggacagccggggacgggttaagttttccagatccgcagacgcacccgcttaccaacaagggcagaaccaactctacaatgaacttaatttggggcggagggaagagtacgacgttctggacaaaaggaggggacgagatcccgagatgggcggaaagcctcagcgaaggaagaatccgcaagaggggctttataacgaactccagaaagataaaatggcagaagcctatagtgagattgggatgaagggagaaaggaggaggggtaaaggtcacgatgggttgtaccaaggattgagcacagccactaaagatacctatgatgcgctccacatgcaggccctgccgccaaga

SEQ ID NO: 24004 - DNA, 765 bp, synthetic construct
  source 1..765: mol_type = other DNA
cctgatcctgccgtgtaccagctgcgggatagcaagagcagcgacaagagcgtgtgtctgttcaccgacttcgacagccagaccaacgtgtcccagagcaaggactccgacgtgtacatcaccgataagtgcgtgctggacatgcggagcatggacttcaagagcaactccgccgtggcctggtccaacaagtccgatttcgcctgcgccaacgccttcaacaacagcattatccccgaggacacattcttcccaagccccgagagcagctgcgacgtgaagctggtggaaaagagcttcgagacagacaccaacctgaacttccagatcctgtacgagatcctgctgggcaaggccaccctgtacgccgtgctggtgtctgccctggtgctgatggctatggtcaagcggaaggacagccggggacgggttaagttttccagatccgcagacgcacccgcttaccaacaagggcagaaccaactctacaatgaacttaatttggggcggagggaagagtacgacgttctggacaaaaggaggggacgagatcccgagatgggcggaaagcctcagcgaaggaagaatccgcaagaggggctttataacgaactccagaaagataaaatggcagaagcctatagtgagattgggatgaagggagaaaggaggaggggtaaaggtcacgatgggttgtaccaaggattgagcacagccactaaagatacctatgatgcgctccacatgcaggccctgccgccaaga

SEQ ID NO: 24005 - DNA, 762 bp, synthetic construct
  source 1..762: mol_type = other DNA
gatcctgccgtgtaccagctgcgggatagcaagagcagcgacaagagcgtgtgtctgttcaccgacttcgacagccagaccaacgtgtcccagagcaaggactccgacgtgtacatcaccgataagtgcgtgctggacatgcggagcatggacttcaagagcaactccgccgtggcctggtccaacaagtccgatttcgcctgcgccaacgccttcaacaacagcattatccccgaggacacattcttcccaagccccgagagcagctgcgacgtgaagctggtggaaaagagcttcgagacagacaccaacctgaacttccagatcctgtacgagatcctgctgggcaaggccaccctgtacgccgtgctggtgtctgccctggtgctgatggctatggtcaagcggaaggacagccggggacgggttaagttttccagatccgcagacgcacccgcttaccaacaagggcagaaccaactctacaatgaacttaatttggggcggagggaagagtacgacgttctggacaaaaggaggggacgagatcccgagatgggcggaaagcctcagcgaaggaagaatccgcaagaggggctttataacgaactccagaaagataaaatggcagaagcctatagtgagattgggatgaagggagaaaggaggaggggtaaaggtcacgatgggttgtaccaaggattgagcacagccactaaagatacctatgatgcgctccacatgcaggccctgccgccaaga

SEQ ID NO: 24006 - DNA, 759 bp, synthetic construct
  source 1..759: mol_type = other DNA
cctgccgtgtaccagctgcgggatagcaagagcagcgacaagagcgtgtgtctgttcaccgacttcgacagccagaccaacgtgtcccagagcaaggactccgacgtgtacatcaccgataagtgcgtgctggacatgcggagcatggacttcaagagcaactccgccgtggcctggtccaacaagtccgatttcgcctgcgccaacgccttcaacaacagcattatccccgaggacacattcttcccaagccccgagagcagctgcgacgtgaagctggtggaaaagagcttcgagacagacaccaacctgaacttccagatcctgtacgagatcctgctgggcaaggccaccctgtacgccgtgctggtgtctgccctggtgctgatggctatggtcaagcggaaggacagccggggacgggttaagttttccagatccgcagacgcacccgcttaccaacaagggcagaaccaactctacaatgaacttaatttggggcggagggaagagtacgacgttctggacaaaaggaggggacgagatcccgagatgggcggaaagcctcagcgaaggaagaatccgcaagaggggctttataacgaactccagaaagataaaatggcagaagcctatagtgagattgggatgaagggagaaaggaggaggggtaaaggtcacgatgggttgtaccaaggattgagcacagccactaaagatacctatgatgcgctccacatgcaggccctgccgccaaga

SEQ ID NO: 24007 - DNA, 756 bp, synthetic construct
  source 1..756: mol_type = other DNA
gccgtgtaccagctgcgggatagcaagagcagcgacaagagcgtgtgtctgttcaccgacttcgacagccagaccaacgtgtcccagagcaaggactccgacgtgtacatcaccgataagtgcgtgctggacatgcggagcatggacttcaagagcaactccgccgtggcctggtccaacaagtccgatttcgcctgcgccaacgccttcaacaacagcattatccccgaggacacattcttcccaagccccgagagcagctgcgacgtgaagctggtggaaaagagcttcgagacagacaccaacctgaacttccagatcctgtacgagatcctgctgggcaaggccaccctgtacgccgtgctggtgtctgccctggtgctgatggctatggtcaagcggaaggacagccggggacgggttaagttttccagatccgcagacgcacccgcttaccaacaagggcagaaccaactctacaatgaacttaatttggggcggagggaagagtacgacgttctggacaaaaggaggggacgagatcccgagatgggcggaaagcctcagcgaaggaagaatccgcaagaggggctttataacgaactccagaaagataaaatggcagaagcctatagtgagattgggatgaagggagaaaggaggaggggtaaaggtcacgatgggttgtaccaaggattgagcacagccactaaagatacctatgatgcgctccacatgcaggccctgccgccaaga

SEQ ID NO: 24008 - DNA, 753 bp, synthetic construct
  source 1..753: mol_type = other DNA
gtgtaccagctgcgggatagcaagagcagcgacaagagcgtgtgtctgttcaccgacttcgacagccagaccaacgtgtcccagagcaaggactccgacgtgtacatcaccgataagtgcgtgctggacatgcggagcatggacttcaagagcaactccgccgtggcctggtccaacaagtccgatttcgcctgcgccaacgccttcaacaacagcattatccccgaggacacattcttcccaagccccgagagcagctgcgacgtgaagctggtggaaaagagcttcgagacagacaccaacctgaacttccagatcctgtacgagatcctgctgggcaaggccaccctgtacgccgtgctggtgtctgccctggtgctgatggctatggtcaagcggaaggacagccggggacgggttaagttttccagatccgcagacgcacccgcttaccaacaagggcagaaccaactctacaatgaacttaatttggggcggagggaagagtacgacgttctggacaaaaggaggggacgagatcccgagatgggcggaaagcctcagcgaaggaagaatccgcaagaggggctttataacgaactccagaaagataaaatggcagaagcctatagtgagattgggatgaagggagaaaggaggaggggtaaaggtcacgatgggttgtaccaaggattgagcacagccactaaagatacctatgatgcgctccacatgcaggccctgccgccaaga

SEQ ID NO: 24009 - DNA, 750 bp, synthetic construct
  source 1..750: mol_type = other DNA
taccagctgcgggatagcaagagcagcgacaagagcgtgtgtctgttcaccgacttcgacagccagaccaacgtgtcccagagcaaggactccgacgtgtacatcaccgataagtgcgtgctggacatgcggagcatggacttcaagagcaactccgccgtggcctggtccaacaagtccgatttcgcctgcgccaacgccttcaacaacagcattatccccgaggacacattcttcccaagccccgagagcagctgcgacgtgaagctggtggaaaagagcttcgagacagacaccaacctgaacttccagatcctgtacgagatcctgctgggcaaggccaccctgtacgccgtgctggtgtctgccctggtgctgatggctatggtcaagcggaaggacagccggggacgggttaagttttccagatccgcagacgcacccgcttaccaacaagggcagaaccaactctacaatgaacttaatttggggcggagggaagagtacgacgttctggacaaaaggaggggacgagatcccgagatgggcggaaagcctcagcgaaggaagaatccgcaagaggggctttataacgaactccagaaagataaaatggcagaagcctatagtgagattgggatgaagggagaaaggaggaggggtaaaggtcacgatgggttgtaccaaggattgagcacagccactaaagatacctatgatgcgctccacatgcaggccctgccgccaaga

SEQ ID NO: 24010 - DNA, 747 bp, synthetic construct
  source 1..747: mol_type = other DNA
cagctgcgggatagcaagagcagcgacaagagcgtgtgtctgttcaccgacttcgacagccagaccaacgtgtcccagagcaaggactccgacgtgtacatcaccgataagtgcgtgctggacatgcggagcatggacttcaagagcaactccgccgtggcctggtccaacaagtccgatttcgcctgcgccaacgccttcaacaacagcattatccccgaggacacattcttcccaagccccgagagcagctgcgacgtgaagctggtggaaaagagcttcgagacagacaccaacctgaacttccagatcctgtacgagatcctgctgggcaaggccaccctgtacgccgtgctggtgtctgccctggtgctgatggctatggtcaagcggaaggacagccggggacgggttaagttttccagatccgcagacgcacccgcttaccaacaagggcagaaccaactctacaatgaacttaatttggggcggagggaagagtacgacgttctggacaaaaggaggggacgagatcccgagatgggcggaaagcctcagcgaaggaagaatccgcaagaggggctttataacgaactccagaaagataaaatggcagaagcctatagtgagattgggatgaagggagaaaggaggaggggtaaaggtcacgatgggttgtaccaaggattgagcacagccactaaagatacctatgatgcgctccacatgcaggccctgccgccaaga

SEQ ID NO: 24011 - DNA, 744 bp, synthetic construct
  source 1..744: mol_type = other DNA
ctgcgggatagcaagagcagcgacaagagcgtgtgtctgttcaccgacttcgacagccagaccaacgtgtcccagagcaaggactccgacgtgtacatcaccgataagtgcgtgctggacatgcggagcatggacttcaagagcaactccgccgtggcctggtccaacaagtccgatttcgcctgcgccaacgccttcaacaacagcattatccccgaggacacattcttcccaagccccgagagcagctgcgacgtgaagctggtggaaaagagcttcgagacagacaccaacctgaacttccagatcctgtacgagatcctgctgggcaaggccaccctgtacgccgtgctggtgtctgccctggtgctgatggctatggtcaagcggaaggacagccggggacgggttaagttttccagatccgcagacgcacccgcttaccaacaagggcagaaccaactctacaatgaacttaatttggggcggagggaagagtacgacgttctggacaaaaggaggggacgagatcccgagatgggcggaaagcctcagcgaaggaagaatccgcaagaggggctttataacgaactccagaaagataaaatggcagaagcctatagtgagattgggatgaagggagaaaggaggaggggtaaaggtcacgatgggttgtaccaaggattgagcacagccactaaagatacctatgatgcgctccacatgcaggccctgccgccaaga

SEQ ID NO: 24012 - DNA, 741 bp, synthetic construct
  source 1..741: mol_type = other DNA
cgggatagcaagagcagcgacaagagcgtgtgtctgttcaccgacttcgacagccagaccaacgtgtcccagagcaaggactccgacgtgtacatcaccgataagtgcgtgctggacatgcggagcatggacttcaagagcaactccgccgtggcctggtccaacaagtccgatttcgcctgcgccaacgccttcaacaacagcattatccccgaggacacattcttcccaagccccgagagcagctgcgacgtgaagctggtggaaaagagcttcgagacagacaccaacctgaacttccagatcctgtacgagatcctgctgggcaaggccaccctgtacgccgtgctggtgtctgccctggtgctgatggctatggtcaagcggaaggacagccggggacgggttaagttttccagatccgcagacgcacccgcttaccaacaagggcagaaccaactctacaatgaacttaatttggggcggagggaagagtacgacgttctggacaaaaggaggggacgagatcccgagatgggcggaaagcctcagcgaaggaagaatccgcaagaggggctttataacgaactccagaaagataaaatggcagaagcctatagtgagattgggatgaagggagaaaggaggaggggtaaaggtcacgatgggttgtaccaaggattgagcacagccactaaagatacctatgatgcgctccacatgcaggccctgccgccaaga

SEQ ID NO: 24013 - DNA, 738 bp, synthetic construct
  source 1..738: mol_type = other DNA
gatagcaagagcagcgacaagagcgtgtgtctgttcaccgacttcgacagccagaccaacgtgtcccagagcaaggactccgacgtgtacatcaccgataagtgcgtgctggacatgcggagcatggacttcaagagcaactccgccgtggcctggtccaacaagtccgatttcgcctgcgccaacgccttcaacaacagcattatccccgaggacacattcttcccaagccccgagagcagctgcgacgtgaagctggtggaaaagagcttcgagacagacaccaacctgaacttccagatcctgtacgagatcctgctgggcaaggccaccctgtacgccgtgctggtgtctgccctggtgctgatggctatggtcaagcggaaggacagccggggacgggttaagttttccagatccgcagacgcacccgcttaccaacaagggcagaaccaactctacaatgaacttaatttggggcggagggaagagtacgacgttctggacaaaaggaggggacgagatcccgagatgggcggaaagcctcagcgaaggaagaatccgcaagaggggctttataacgaactccagaaagataaaatggcagaagcctatagtgagattgggatgaagggagaaaggaggaggggtaaaggtcacgatgggttgtaccaaggattgagcacagccactaaagatacctatgatgcgctccacatgcaggccctgccgccaaga

SEQ ID NO: 24014 - DNA, 735 bp, synthetic construct
  source 1..735: mol_type = other DNA
agcaagagcagcgacaagagcgtgtgtctgttcaccgacttcgacagccagaccaacgtgtcccagagcaaggactccgacgtgtacatcaccgataagtgcgtgctggacatgcggagcatggacttcaagagcaactccgccgtggcctggtccaacaagtccgatttcgcctgcgccaacgccttcaacaacagcattatccccgaggacacattcttcccaagccccgagagcagctgcgacgtgaagctggtggaaaagagcttcgagacagacaccaacctgaacttccagatcctgtacgagatcctgctgggcaaggccaccctgtacgccgtgctggtgtctgccctggtgctgatggctatggtcaagcggaaggacagccggggacgggttaagttttccagatccgcagacgcacccgcttaccaacaagggcagaaccaactctacaatgaacttaatttggggcggagggaagagtacgacgttctggacaaaaggaggggacgagatcccgagatgggcggaaagcctcagcgaaggaagaatccgcaagaggggctttataacgaactccagaaagataaaatggcagaagcctatagtgagattgggatgaagggagaaaggaggaggggtaaaggtcacgatgggttgtaccaaggattgagcacagccactaaagatacctatgatgcgctccacatgcaggccctgccgccaaga

SEQ ID NO: 24015 - DNA, 732 bp, synthetic construct
  source 1..732: mol_type = other DNA
aagagcagcgacaagagcgtgtgtctgttcaccgacttcgacagccagaccaacgtgtcccagagcaaggactccgacgtgtacatcaccgataagtgcgtgctggacatgcggagcatggacttcaagagcaactccgccgtggcctggtccaacaagtccgatttcgcctgcgccaacgccttcaacaacagcattatccccgaggacacattcttcccaagccccgagagcagctgcgacgtgaagctggtggaaaagagcttcgagacagacaccaacctgaacttccagatcctgtacgagatcctgctgggcaaggccaccctgtacgccgtgctggtgtctgccctggtgctgatggctatggtcaagcggaaggacagccggggacgggttaagttttccagatccgcagacgcacccgcttaccaacaagggcagaaccaactctacaatgaacttaatttggggcggagggaagagtacgacgttctggacaaaaggaggggacgagatcccgagatgggcggaaagcctcagcgaaggaagaatccgcaagaggggctttataacgaactccagaaagataaaatggcagaagcctatagtgagattgggatgaagggagaaaggaggaggggtaaaggtcacgatgggttgtaccaaggattgagcacagccactaaagatacctatgatgcgctccacatgcaggccctgccgccaaga

SEQ ID NO: 24016 - DNA, 729 bp, synthetic construct
  source 1..729: mol_type = other DNA
agcagcgacaagagcgtgtgtctgttcaccgacttcgacagccagaccaacgtgtcccagagcaaggactccgacgtgtacatcaccgataagtgcgtgctggacatgcggagcatggacttcaagagcaactccgccgtggcctggtccaacaagtccgatttcgcctgcgccaacgccttcaacaacagcattatccccgaggacacattcttcccaagccccgagagcagctgcgacgtgaagctggtggaaaagagcttcgagacagacaccaacctgaacttccagatcctgtacgagatcctgctgggcaaggccaccctgtacgccgtgctggtgtctgccctggtgctgatggctatggtcaagcggaaggacagccggggacgggttaagttttccagatccgcagacgcacccgcttaccaacaagggcagaaccaactctacaatgaacttaatttggggcggagggaagagtacgacgttctggacaaaaggaggggacgagatcccgagatgggcggaaagcctcagcgaaggaagaatccgcaagaggggctttataacgaactccagaaagataaaatggcagaagcctatagtgagattgggatgaagggagaaaggaggaggggtaaaggtcacgatgggttgtaccaaggattgagcacagccactaaagatacctatgatgcgctccacatgcaggccctgccgccaaga

SEQ ID NO: 24017 - DNA, 726 bp, synthetic construct
  source 1..726: mol_type = other DNA
agcgacaagagcgtgtgtctgttcaccgacttcgacagccagaccaacgtgtcccagagcaaggactccgacgtgtacatcaccgataagtgcgtgctggacatgcggagcatggacttcaagagcaactccgccgtggcctggtccaacaagtccgatttcgcctgcgccaacgccttcaacaacagcattatccccgaggacacattcttcccaagccccgagagcagctgcgacgtgaagctggtggaaaagagcttcgagacagacaccaacctgaacttccagatcctgtacgagatcctgctgggcaaggccaccctgtacgccgtgctggtgtctgccctggtgctgatggctatggtcaagcggaaggacagccggggacgggttaagttttccagatccgcagacgcacccgcttaccaacaagggcagaaccaactctacaatgaacttaatttggggcggagggaagagtacgacgttctggacaaaaggaggggacgagatcccgagatgggcggaaagcctcagcgaaggaagaatccgcaagaggggctttataacgaactccagaaagataaaatggcagaagcctatagtgagattgggatgaagggagaaaggaggaggggtaaaggtcacgatgggttgtaccaaggattgagcacagccactaaagatacctatgatgcgctccacatgcaggccctgccgccaaga

SEQ ID NO: 24018 - DNA, 723 bp, synthetic construct
  source 1..723: mol_type = other DNA
gacaagagcgtgtgtctgttcaccgacttcgacagccagaccaacgtgtcccagagcaaggactccgacgtgtacatcaccgataagtgcgtgctggacatgcggagcatggacttcaagagcaactccgccgtggcctggtccaacaagtccgatttcgcctgcgccaacgccttcaacaacagcattatccccgaggacacattcttcccaagccccgagagcagctgcgacgtgaagctggtggaaaagagcttcgagacagacaccaacctgaacttccagatcctgtacgagatcctgctgggcaaggccaccctgtacgccgtgctggtgtctgccctggtgctgatggctatggtcaagcggaaggacagccggggacgggttaagttttccagatccgcagacgcacccgcttaccaacaagggcagaaccaactctacaatgaacttaatttggggcggagggaagagtacgacgttctggacaaaaggaggggacgagatcccgagatgggcggaaagcctcagcgaaggaagaatccgcaagaggggctttataacgaactccagaaagataaaatggcagaagcctatagtgagattgggatgaagggagaaaggaggaggggtaaaggtcacgatgggttgtaccaaggattgagcacagccactaaagatacctatgatgcgctccacatgcaggccctgccgccaaga

SEQ ID NO: 24019 - DNA, 720 bp, synthetic construct
  source 1..720: mol_type = other DNA
aagagcgtgtgtctgttcaccgacttcgacagccagaccaacgtgtcccagagcaaggactccgacgtgtacatcaccgataagtgcgtgctggacatgcggagcatggacttcaagagcaactccgccgtggcctggtccaacaagtccgatttcgcctgcgccaacgccttcaacaacagcattatccccgaggacacattcttcccaagccccgagagcagctgcgacgtgaagctggtggaaaagagcttcgagacagacaccaacctgaacttccagatcctgtacgagatcctgctgggcaaggccaccctgtacgccgtgctggtgtctgccctggtgctgatggctatggtcaagcggaaggacagccggggacgggttaagttttccagatccgcagacgcacccgcttaccaacaagggcagaaccaactctacaatgaacttaatttggggcggagggaagagtacgacgttctggacaaaaggaggggacgagatcccgagatgggcggaaagcctcagcgaaggaagaatccgcaagaggggctttataacgaactccagaaagataaaatggcagaagcctatagtgagattgggatgaagggagaaaggaggaggggtaaaggtcacgatgggttgtaccaaggattgagcacagccactaaagatacctatgatgcgctccacatgcaggccctgccgccaaga

SEQ ID NO: 24020 - DNA, 717 bp, synthetic construct
  source 1..717: mol_type = other DNA
agcgtgtgtctgttcaccgacttcgacagccagaccaacgtgtcccagagcaaggactccgacgtgtacatcaccgataagtgcgtgctggacatgcggagcatggacttcaagagcaactccgccgtggcctggtccaacaagtccgatttcgcctgcgccaacgccttcaacaacagcattatccccgaggacacattcttcccaagccccgagagcagctgcgacgtgaagctggtggaaaagagcttcgagacagacaccaacctgaacttccagatcctgtacgagatcctgctgggcaaggccaccctgtacgccgtgctggtgtctgccctggtgctgatggctatggtcaagcggaaggacagccggggacgggttaagttttccagatccgcagacgcacccgcttaccaacaagggcagaaccaactctacaatgaacttaatttggggcggagggaagagtacgacgttctggacaaaaggaggggacgagatcccgagatgggcggaaagcctcagcgaaggaagaatccgcaagaggggctttataacgaactccagaaagataaaatggcagaagcctatagtgagattgggatgaagggagaaaggaggaggggtaaaggtcacgatgggttgtaccaaggattgagcacagccactaaagatacctatgatgcgctccacatgcaggccctgccgccaaga

SEQ ID NO: 24021 - DNA, 714 bp, synthetic construct
  source 1..714: mol_type = other DNA
gtgtgtctgttcaccgacttcgacagccagaccaacgtgtcccagagcaaggactccgacgtgtacatcaccgataagtgcgtgctggacatgcggagcatggacttcaagagcaactccgccgtggcctggtccaacaagtccgatttcgcctgcgccaacgccttcaacaacagcattatccccgaggacacattcttcccaagccccgagagcagctgcgacgtgaagctggtggaaaagagcttcgagacagacaccaacctgaacttccagatcctgtacgagatcctgctgggcaaggccaccctgtacgccgtgctggtgtctgccctggtgctgatggctatggtcaagcggaaggacagccggggacgggttaagttttccagatccgcagacgcacccgcttaccaacaagggcagaaccaactctacaatgaacttaatttggggcggagggaagagtacgacgttctggacaaaaggaggggacgagatcccgagatgggcggaaagcctcagcgaaggaagaatccgcaagaggggctttataacgaactccagaaagataaaatggcagaagcctatagtgagattgggatgaagggagaaaggaggaggggtaaaggtcacgatgggttgtaccaaggattgagcacagccactaaagatacctatgatgcgctccacatgcaggccctgccgccaaga

SEQ ID NO: 24022 - DNA, 699 bp, synthetic construct
  source 1..699: mol_type = other DNA
gacttcgacagccagaccaacgtgtcccagagcaaggactccgacgtgtacatcaccgataagtgcgtgctggacatgcggagcatggacttcaagagcaactccgccgtggcctggtccaacaagtccgatttcgcctgcgccaacgccttcaacaacagcattatccccgaggacacattcttcccaagccccgagagcagctgcgacgtgaagctggtggaaaagagcttcgagacagacaccaacctgaacttccagatcctgtacgagatcctgctgggcaaggccaccctgtacgccgtgctggtgtctgccctggtgctgatggctatggtcaagcggaaggacagccggggacgggttaagttttccagatccgcagacgcacccgcttaccaacaagggcagaaccaactctacaatgaacttaatttggggcggagggaagagtacgacgttctggacaaaaggaggggacgagatcccgagatgggcggaaagcctcagcgaaggaagaatccgcaagaggggctttataacgaactccagaaagataaaatggcagaagcctatagtgagattgggatgaagggagaaaggaggaggggtaaaggtcacgatgggttgtaccaaggattgagcacagccactaaagatacctatgatgcgctccacatgcaggccctgccgccaaga

SEQ ID NO: 24023 - DNA, 684 bp, synthetic construct
  source 1..684: mol_type = other DNA
accaacgtgtcccagagcaaggactccgacgtgtacatcaccgataagtgcgtgctggacatgcggagcatggacttcaagagcaactccgccgtggcctggtccaacaagtccgatttcgcctgcgccaacgccttcaacaacagcattatccccgaggacacattcttcccaagccccgagagcagctgcgacgtgaagctggtggaaaagagcttcgagacagacaccaacctgaacttccagatcctgtacgagatcctgctgggcaaggccaccctgtacgccgtgctggtgtctgccctggtgctgatggctatggtcaagcggaaggacagccggggacgggttaagttttccagatccgcagacgcacccgcttaccaacaagggcagaaccaactctacaatgaacttaatttggggcggagggaagagtacgacgttctggacaaaaggaggggacgagatcccgagatgggcggaaagcctcagcgaaggaagaatccgcaagaggggctttataacgaactccagaaagataaaatggcagaagcctatagtgagattgggatgaagggagaaaggaggaggggtaaaggtcacgatgggttgtaccaaggattgagcacagccactaaagatacctatgatgcgctccacatgcaggccctgccgccaaga

SEQ ID NO: 24024 - DNA, 819 bp, synthetic construct; identical to SEQ ID NO: 23966
  source 1..819: mol_type = other DNA

SEQ ID NO: 24025 - DNA, 816 bp, synthetic construct
  source 1..816: mol_type = other DNA
cagaaccctgatcctgccgtgtaccagctgcgggatagcaagagcagcgacaagagcgtgtgtctgttcaccgacttcgacagccagaccaacgtgtcccagagcaaggactccgacgtgtacatcaccgataagtgcgtgctggacatgcggagcatggacttcaagagcaactccgccgtggcctggtccaacaagtccgatttcgcctgcgccaacgccttcaacaacagcattatccccgaggacacattcttcccaagccccgagagcagcgactccaccgaccacgtgaagcccaaagagacagagaacaccaagcagcccagcaagagctgccacaagcccaaggccatcgtgcacaccgagaaagtgaacatgatgagcctgaccgtgctgggcctgcggatgctgttcgccaaaaccgtggccgtgaacttcctgctgaccgccaagctgttcttcctcctcaccgcccgggttaagttttccagatccgcagacgcacccgcttaccaacaagggcagaaccaactctacaatgaacttaatttggggcggagggaagagtacgacgttctggacaaaaggaggggacgagatcccgagatgggcggaaagcctcagcgaaggaagaatccgcaagaggggctttataacgaactccagaaagataaaatggcagaagcctatagtgagattgggatgaagggagaaaggaggaggggtaaaggtcacgatgggttgtaccaaggattgagcacagccactaaagatacctatgatgcgctccacatgcaggccctgccgccaaga

SEQ ID NO: 24026 - DNA, 813 bp, synthetic construct
  source 1..813: mol_type = other DNA
aaccctgatcctgccgtgtaccagctgcgggatagcaagagcagcgacaagagcgtgtgtctgttcaccgacttcgacagccagaccaacgtgtcccagagcaaggactccgacgtgtacatcaccgataagtgcgtgctggacatgcggagcatggacttcaagagcaactccgccgtggcctggtccaacaagtccgatttcgcctgcgccaacgccttcaacaacagcattatccccgaggacacattcttcccaagccccgagagcagcgactccaccgaccacgtgaagcccaaagagacagagaacaccaagcagcccagcaagagctgccacaagcccaaggccatcgtgcacaccgagaaagtgaacatgatgagcctgaccgtgctgggcctgcggatgctgttcgccaaaaccgtggccgtgaacttcctgctgaccgccaagctgttcttcctcctcaccgcccgggttaagttttccagatccgcagacgcacccgcttaccaacaagggcagaaccaactctacaatgaacttaatttggggcggagggaagagtacgacgttctggacaaaaggaggggacgagatcccgagatgggcggaaagcctcagcgaaggaagaatccgcaagaggggctttataacgaactccagaaagataaaatggcagaagcctatagtgagattgggatgaagggagaaaggaggaggggtaaaggtcacgatgggttgtaccaaggattgagcacagccactaaagatacctatgatgcgctccacatgcaggccctgccgccaaga

SEQ ID NO: 24027 - DNA, 810 bp, synthetic construct
  source 1..810: mol_type = other DNA
cctgatcctgccgtgtaccagctgcgggatagcaagagcagcgacaagagcgtgtgtctgttcaccgacttcgacagccagaccaacgtgtcccagagcaaggactccgacgtgtacatcaccgataagtgcgtgctggacatgcggagcatggacttcaagagcaactccgccgtggcctggtccaacaagtccgatttcgcctgcgccaacgccttcaacaacagcattatccccgaggacacattcttcccaagccccgagagcagcgactccaccgaccacgtgaagcccaaagagacagagaacaccaagcagcccagcaagagctgccacaagcccaaggccatcgtgcacaccgagaaagtgaacatgatgagcctgaccgtgctgggcctgcggatgctgttcgccaaaaccgtggccgtgaacttcctgctgaccgccaagctgttcttcctcctcaccgcccgggttaagttttccagatccgcagacgcacccgcttaccaacaagggcagaaccaactctacaatgaacttaatttggggcggagggaagagtacgacgttctggacaaaaggaggggacgagatcccgagatgggcggaaagcctcagcgaaggaagaatccgcaagaggggctttataacgaactccagaaagataaaatggcagaagcctatagtgagattgggatgaagggagaaaggaggaggggtaaaggtcacgatgggttgtaccaaggattgagcacagccactaaagatacctatgatgcgctccacatgcaggccctgccgccaaga

SEQ ID NO: 24028 - DNA, 807 bp, synthetic construct
  source 1..807: mol_type = other DNA
gatcctgccgtgtaccagctgcgggatagcaagagcagcgacaagagcgtgtgtctgttcaccgacttcgacagccagaccaacgtgtcccagagcaaggactccgacgtgtacatcaccgataagtgcgtgctggacatgcggagcatggacttcaagagcaactccgccgtggcctggtccaacaagtccgatttcgcctgcgccaacgccttcaacaacagcattatccccgaggacacattcttcccaagccccgagagcagcgactccaccgaccacgtgaagcccaaagagacagagaacaccaagcagcccagcaagagctgccacaagcccaaggccatcgtgcacaccgagaaagtgaacatgatgagcctgaccgtgctgggcctgcggatgctgttcgccaaaaccgtggccgtgaacttcctgctgaccgccaagctgttcttcctcctcaccgcccgggttaagttttccagatccgcagacgcacccgcttaccaacaagggcagaaccaactctacaatgaacttaatttggggcggagggaagagtacgacgttctggacaaaaggaggggacgagatcccgagatgggcggaaagcctcagcgaaggaagaatccgcaagaggggctttataacgaactccagaaagataaaatggcagaagcctatagtgagattgggatgaagggagaaaggaggaggggtaaaggtcacgatgggttgtaccaaggattgagcacagccactaaagatacctatgatgcgctccacatgcaggccctgccgccaaga

SEQ ID NO: 24029 - DNA, 804 bp, synthetic construct
  source 1..804: mol_type = other DNA
cctgccgtgtaccagctgcgggatagcaagagcagcgacaagagcgtgtgtctgttcaccgacttcgacagccagaccaacgtgtcccagagcaaggactccgacgtgtacatcaccgataagtgcgtgctggacatgcggagcatggacttcaagagcaactccgccgtggcctggtccaacaagtccgatttcgcctgcgccaacgccttcaacaacagcattatccccgaggacacattcttcccaagccccgagagcagcgactccaccgaccacgtgaagcccaaagagacagagaacaccaagcagcccagcaagagctgccacaagcccaaggccatcgtgcacaccgagaaagtgaacatgatgagcctgaccgtgctgggcctgcggatgctgttcgccaaaaccgtggccgtgaacttcctgctgaccgccaagctgttcttcctcctcaccgcccgggttaagttttccagatccgcagacgcacccgcttaccaacaagggcagaaccaactctacaatgaacttaatttggggcggagggaagagtacgacgttctggacaaaaggaggggacgagatcccgagatgggcggaaagcctcagcgaaggaagaatccgcaagaggggctttataacgaactccagaaagataaaatggcagaagcctatagtgagattgggatgaagggagaaaggaggaggggtaaaggtcacgatgggttgtaccaaggattgagcacagccactaaagatacctatgatgcgctccacatgcaggccctgccgccaaga

SEQ ID NO: 24030 - DNA, 801 bp, synthetic construct
  source 1..801: mol_type = other DNA
gccgtgtaccagctgcgggatagcaagagcagcgacaagagcgtgtgtctgttcaccgacttcgacagccagaccaacgtgtcccagagcaaggactccgacgtgtacatcaccgataagtgcgtgctggacatgcggagcatggacttcaagagcaactccgccgtggcctggtccaacaagtccgatttcgcctgcgccaacgccttcaacaacagcattatccccgaggacacattcttcccaagccccgagagcagcgactccaccgaccacgtgaagcccaaagagacagagaacaccaagcagcccagcaagagctgccacaagcccaaggccatcgtgcacaccgagaaagtgaacatgatgagcctgaccgtgctgggcctgcggatgctgttcgccaaaaccgtggccgtgaacttcctgctgaccgccaagctgttcttcctcctcaccgcccgggttaagttttccagatccgcagacgcacccgcttaccaacaagggcagaaccaactctacaatgaacttaatttggggcggagggaagagtacgacgttctggacaaaaggaggggacgagatcccgagatgggcggaaagcctcagcgaaggaagaatccgcaagaggggctttataacgaactccagaaagataaaatggcagaagcctatagtgagattgggatgaagggagaaaggaggaggggtaaaggtcacgatgggttgtaccaaggattgagcacagccactaaagatacctatgatgcgctccacatgcaggccctgccgccaaga

SEQ ID NO: 24031 - DNA, 798 bp, synthetic construct
  source 1..798: mol_type = other DNA
gtgtaccagctgcgggatagcaagagcagcgacaagagcgtgtgtctgttcaccgacttcgacagccagaccaacgtgtcccagagcaaggactccgacgtgtacatcaccgataagtgcgtgctggacatgcggagcatggacttcaagagcaactccgccgtggcctggtccaacaagtccgatttcgcctgcgccaacgccttcaacaacagcattatccccgaggacacattcttcccaagccccgagagcagcgactccaccgaccacgtgaagcccaaagagacagagaacaccaagcagcccagcaagagctgccacaagcccaaggccatcgtgcacaccgagaaagtgaacatgatgagcctgaccgtgctgggcctgcggatgctgttcgccaaaaccgtggccgtgaacttcctgctgaccgccaagctgttcttcctcctcaccgcccgggttaagttttccagatccgcagacgcacccgcttaccaacaagggcagaaccaactctacaatgaacttaatttggggcggagggaagagtacgacgttctggacaaaaggaggggacgagatcccgagatgggcggaaagcctcagcgaaggaagaatccgcaagaggggctttataacgaactccagaaagataaaatggcagaagcctatagtgagattgggatgaagggagaaaggaggaggggtaaaggtcacgatgggttgtaccaaggattgagcacagccactaaagatacctatgatgcgctccacatgcaggccctgccgccaaga

SEQ ID NO: 24032 - DNA, 795 bp, synthetic construct
  source 1..795: mol_type = other DNA
taccagctgcgggatagcaagagcagcgacaagagcgtgtgtctgttcaccgacttcgacagccagaccaacgtgtcccagagcaaggactccgacgtgtacatcaccgataagtgcgtgctggacatgcggagcatggacttcaagagcaactccgccgtggcctggtccaacaagtccgatttcgcctgcgccaacgccttcaacaacagcattatccccgaggacacattcttcccaagccccgagagcagcgactccaccgaccacgtgaagcccaaagagacagagaacaccaagcagcccagcaagagctgccacaagcccaaggccatcgtgcacaccgagaaagtgaacatgatgagcctgaccgtgctgggcctgcggatgctgttcgccaaaaccgtggccgtgaacttcctgctgaccgccaagctgttcttcctcctcaccgcccgggttaagttttccagatccgcagacgcacccgcttaccaacaagggcagaaccaactctacaatgaacttaatttggggcggagggaagagtacgacgttctggacaaaaggaggggacgagatcccgagatgggcggaaagcctcagcgaaggaagaatccgcaagaggggctttataacgaactccagaaagataaaatggcagaagcctatagtgagattgggatgaagggagaaaggaggaggggtaaaggtcacgatgggttgtaccaaggattgagcacagccactaaagatacctatgatgcgctccacatgcaggccctgccgccaaga

SEQ ID NO: 24033 - DNA, 792 bp, synthetic construct
  source 1..792: mol_type = other DNA
cagctgcgggatagcaagagcagcgacaagagcgtgtgtctgttcaccgacttcgacagccagaccaacgtgtcccagagcaaggactccgacgtgtacatcaccgataagtgcgtgctggacatgcggagcatggacttcaagagcaactccgccgtggcctggtccaacaagtccgatttcgcctgcgccaacgccttcaacaacagcattatccccgaggacacattcttcccaagccccgagagcagcgactccaccgaccacgtgaagcccaaagagacagagaacaccaagcagcccagcaagagctgccacaagcccaaggccatcgtgcacaccgagaaagtgaacatgatgagcctgaccgtgctgggcctgcggatgctgttcgccaaaaccgtggccgtgaacttcctgctgaccgccaagctgttcttcctcctcaccgcccgggttaagttttccagatccgcagacgcacccgcttaccaacaagggcagaaccaactctacaatgaacttaatttggggcggagggaagagtacgacgttctggacaaaaggaggggacgagatcccgagatgggcggaaagcctcagcgaaggaagaatccgcaagaggggctttataacgaactccagaaagataaaatggcagaagcctatagtgagattgggatgaagggagaaaggaggaggggtaaaggtcacgatgggttgtaccaaggattgagcacagccactaaagatacctatgatgcgctccacatgcaggccctgccgccaaga

SEQ ID NO: 24034 - DNA, 789 bp, synthetic construct
  source 1..789: mol_type = other DNA
ctgcgggatagcaagagcagcgacaagagcgtgtgtctgttcaccgacttcgacagccagaccaacgtgtcccagagcaaggactccgacgtgtacatcaccgataagtgcgtgctggacatgcggagcatggacttcaagagcaactccgccgtggcctggtccaacaagtccgatttcgcctgcgccaacgccttcaacaacagcattatccccgaggacacattcttcccaagccccgagagcagcgactccaccgaccacgtgaagcccaaagagacagagaacaccaagcagcccagcaagagctgccacaagcccaaggccatcgtgcacaccgagaaagtgaacatgatgagcctgaccgtgctgggcctgcggatgctgttcgccaaaaccgtggccgtgaacttcctgctgaccgccaagctgttcttcctcctcaccgcccgggttaagttttccagatccgcagacgcacccgcttaccaacaagggcagaaccaactctacaatgaacttaatttggggcggagggaagagtacgacgttctggacaaaaggaggggacgagatcccgagatgggcggaaagcctcagcgaaggaagaatccgcaagaggggctttataacgaactccagaaagataaaatggcagaagcctatagtgagattgggatgaagggagaaaggaggaggggtaaaggtcacgatgggttgtaccaaggattgagcacagccactaaagatacctatgatgcgctccacatgcaggccctgccgccaaga

SEQ ID NO: 24035 - DNA, 786 bp, synthetic construct
  source 1..786: mol_type = other DNA
cgggatagcaagagcagcgacaagagcgtgtgtctgttcaccgacttcgacagccagaccaacgtgtcccagagcaaggactccgacgtgtacatcaccgataagtgcgtgctggacatgcggagcatggacttcaagagcaactccgccgtggcctggtccaacaagtccgatttcgcctgcgccaacgccttcaacaacagcattatccccgaggacacattcttcccaagccccgagagcagcgactccaccgaccacgtgaagcccaaagagacagagaacaccaagcagcccagcaagagctgccacaagcccaaggccatcgtgcacaccgagaaagtgaacatgatgagcctgaccgtgctgggcctgcggatgctgttcgccaaaaccgtggccgtgaacttcctgctgaccgccaagctgttcttcctcctcaccgcccgggttaagttttccagatccgcagacgcacccgcttaccaacaagggcagaaccaactctacaatgaacttaatttggggcggagggaagagtacgacgttctggacaaaaggaggggacgagatcccgagatgggcggaaagcctcagcgaaggaagaatccgcaagaggggctttataacgaactccagaaagataaaatggcagaagcctatagtgagattgggatgaagggagaaaggaggaggggtaaaggtcacgatgggttgtaccaaggattgagcacagccactaaagatacctatgatgcgctccacatgcaggccctgccgccaaga

SEQ ID NO: 24036 - DNA, 783 bp, synthetic construct
  source 1..783: mol_type = other DNA
gatagcaagagcagcgacaagagcgtgtgtctgttcaccgacttcgacagccagaccaacgtgtcccagagcaaggactccgacgtgtacatcaccgataagtgcgtgctggacatgcggagcatggacttcaagagcaactccgccgtggcctggtccaacaagtccgatttcgcctgcgccaacgccttcaacaacagcattatccccgaggacacattcttcccaagccccgagagcagcgactccaccgaccacgtgaagcccaaagagacagagaacaccaagcagcccagcaagagctgccacaagcccaaggccatcgtgcacaccgagaaagtgaacatgatgagcctgaccgtgctgggcctgcggatgctgttcgccaaaaccgtggccgtgaacttcctgctgaccgccaagctgttcttcctcctcaccgcccgggttaagttttccagatccgcagacgcacccgcttaccaacaagggcagaaccaactctacaatgaacttaatttggggcggagggaagagtacgacgttctggacaaaaggaggggacgagatcccgagatgggcggaaagcctcagcgaaggaagaatccgcaagaggggctttataacgaactccagaaagataaaatggcagaagcctatagtgagattgggatgaagggagaaaggaggaggggtaaaggtcacgatgggttgtaccaaggattgagcacagccactaaagatacctatgatgcgctccacatgcaggccctgccgccaaga

SEQ ID NO: 24037 - DNA, 780 bp, synthetic construct
  source 1..780: mol_type = other DNA
agcaagagcagcgacaagagcgtgtgtctgttcaccgacttcgacagccagaccaacgtgtcccagagcaaggactccgacgtgtacatcaccgataagtgcgtgctggacatgcggagcatggacttcaagagcaactccgccgtggcctggtccaacaagtccgatttcgcctgcgccaacgccttcaacaacagcattatccccgaggacacattcttcccaagccccgagagcagcgactccaccgaccacgtgaagcccaaagagacagagaacaccaagcagcccagcaagagctgccacaagcccaaggccatcgtgcacaccgagaaagtgaacatgatgagcctgaccgtgctgggcctgcggatgctgttcgccaaaaccgtggccgtgaacttcctgctgaccgccaagctgttcttcctcctcaccgcccgggttaagttttccagatccgcagacgcacccgcttaccaacaagggcagaaccaactctacaatgaacttaatttggggcggagggaagagtacgacgttctggacaaaaggaggggacgagatcccgagatgggcggaaagcctcagcgaaggaagaatccgcaagaggggctttataacgaactccagaaagataaaatggcagaagcctatagtgagattgggatgaagggagaaaggaggaggggtaaaggtcacgatgggttgtaccaaggattgagcacagccactaaagatacctatgatgcgctccacatgcaggccctgccgccaaga

SEQ ID NO: 24038 - DNA, 777 bp, synthetic construct
  source 1..777: mol_type = other DNA
aagagcagcgacaagagcgtgtgtctgttcaccgacttcgacagccagaccaacgtgtcccagagcaaggactccgacgtgtacatcaccgataagtgcgtgctggacatgcggagcatggacttcaagagcaactccgccgtggcctggtccaacaagtccgatttcgcctgcgccaacgccttcaacaacagcattatccccgaggacacattcttcccaagccccgagagcagcgactccaccgaccacgtgaagcccaaagagacagagaacaccaagcagcccagcaagagctgccacaagcccaaggccatcgtgcacaccgagaaagtgaacatgatgagcctgaccgtgctgggcctgcggatgctgttcgccaaaaccgtggccgtgaacttcctgctgaccgccaagctgttcttcctcctcaccgcccgggttaagttttccagatccgcagacgcacccgcttaccaacaagggcagaaccaactctacaatgaacttaatttggggcggagggaagagtacgacgttctggacaaaaggaggggacgagatcccgagatgggcggaaagcctcagcgaaggaagaatccgcaagaggggctttataacgaactccagaaagataaaatggcagaagcctatagtgagattgggatgaagggagaaaggaggaggggtaaaggtcacgatgggttgtaccaaggattgagcacagccactaaagatacctatgatgcgctccacatgcaggccctgccgccaaga

SEQ ID NO: 24039 - DNA, 774 bp, synthetic construct
  source 1..774: mol_type = other DNA
agcagcgacaagagcgtgtgtctgttcaccgacttcgacagccagaccaacgtgtcccagagcaaggactccgacgtgtacatcaccgataagtgcgtgctggacatgcggagcatggacttcaagagcaactccgccgtggcctggtccaacaagtccgatttcgcctgcgccaacgccttcaacaacagcattatccccgaggacacattcttcccaagccccgagagcagcgactccaccgaccacgtgaagcccaaagagacagagaacaccaagcagcccagcaagagctgccacaagcccaaggccatcgtgcacaccgagaaagtgaacatgatgagcctgaccgtgctgggcctgcggatgctgttcgccaaaaccgtggccgtgaacttcctgctgaccgccaagctgttcttcctcctcaccgcccgggttaagttttccagatccgcagacgcacccgcttaccaacaagggcagaaccaactctacaatgaacttaatttggggcggagggaagagtacgacgttctggacaaaaggaggggacgagatcccgagatgggcggaaagcctcagcgaaggaagaatccgcaagaggggctttataacgaactccagaaagataaaatggcagaagcctatagtgagattgggatgaagggagaaaggaggaggggtaaaggtcacgatgggttgtaccaaggattgagcacagccactaaagatacctatgatgcgctccacatgcaggccctgccgccaaga

SEQ ID NO: 24040 - DNA, 771 bp, synthetic construct
  source 1..771: mol_type = other DNA
agcgacaagagcgtgtgtctgttcaccgacttcgacagccagaccaacgtgtcccagagcaaggactccgacgtgtacatcaccgataagtgcgtgctggacatgcggagcatggacttcaagagcaactccgccgtggcctggtccaacaagtccgatttcgcctgcgccaacgccttcaacaacagcattatccccgaggacacattcttcccaagccccgagagcagcgactccaccgaccacgtgaagcccaaagagacagagaacaccaagcagcccagcaagagctgccacaagcccaaggccatcgtgcacaccgagaaagtgaacatgatgagcctgaccgtgctgggcctgcggatgctgttcgccaaaaccgtggccgtgaacttcctgctgaccgccaagctgttcttcctcctcaccgcccgggttaagttttccagatccgcagacgcacccgcttaccaacaagggcagaaccaactctacaatgaacttaatttggggcggagggaagagtacgacgttctggacaaaaggaggggacgagatcccgagatgggcggaaagcctcagcgaaggaagaatccgcaagaggggctttataacgaactccagaaagataaaatggcagaagcctatagtgagattgggatgaagggagaaaggaggaggggtaaaggtcacgatgggttgtaccaaggattgagcacagccactaaagatacctatgatgcgctccacatgcaggccctgccgccaaga

SEQ ID NO: 24041 - DNA, 768 bp, synthetic construct
  source 1..768: mol_type = other DNA
gacaagagcgtgtgtctgttcaccgacttcgacagccagaccaacgtgtcccagagcaaggactccgacgtgtacatcaccgataagtgcgtgctggacatgcggagcatggacttcaagagcaactccgccgtggcctggtccaacaagtccgatttcgcctgcgccaacgccttcaacaacagcattatccccgaggacacattcttcccaagccccgagagcagcgactccaccgaccacgtgaagcccaaagagacagagaacaccaagcagcccagcaagagctgccacaagcccaaggccatcgtgcacaccgagaaagtgaacatgatgagcctgaccgtgctgggcctgcggatgctgttcgccaaaaccgtggccgtgaacttcctgctgaccgccaagctgttcttcctcctcaccgcccgggttaagttttccagatccgcagacgcacccgcttaccaacaagggcagaaccaactctacaatgaacttaatttggggcggagggaagagtacgacgttctggacaaaaggaggggacgagatcccgagatgggcggaaagcctcagcgaaggaagaatccgcaagaggggctttataacgaactccagaaagataaaatggcagaagcctatagtgagattgggatgaagggagaaaggaggaggggtaaaggtcacgatgggttgtaccaaggattgagcacagccactaaagatacctatgatgcgctccacatgcaggccctgccgccaaga

SEQ ID NO: 24042 - DNA, 765 bp, synthetic construct
  source 1..765: mol_type = other DNA
aagagcgtgtgtctgttcaccgacttcgacagccagaccaacgtgtcccagagcaaggactccgacgtgtacatcaccgataagtgcgtgctggacatgcggagcatggacttcaagagcaactccgccgtggcctggtccaacaagtccgatttcgcctgcgccaacgccttcaacaacagcattatccccgaggacacattcttcccaagccccgagagcagcgactccaccgaccacgtgaagcccaaagagacagagaacaccaagcagcccagcaagagctgccacaagcccaaggccatcgtgcacaccgagaaagtgaacatgatgagcctgaccgtgctgggcctgcggatgctgttcgccaaaaccgtggccgtgaacttcctgctgaccgccaagctgttcttcctcctcaccgcccgggttaagttttccagatccgcagacgcacccgcttaccaacaagggcagaaccaactctacaatgaacttaatttggggcggagggaagagtacgacgttctggacaaaaggaggggacgagatcccgagatgggcggaaagcctcagcgaaggaagaatccgcaagaggggctttataacgaactccagaaagataaaatggcagaagcctatagtgagattgggatgaagggagaaaggaggaggggtaaaggtcacgatgggttgtaccaaggattgagcacagccactaaagatacctatgatgcgctccacatgcaggccctgccgccaaga

SEQ ID NO: 24043 - DNA, 762 bp, synthetic construct
  source 1..762: mol_type = other DNA
agcgtgtgtctgttcaccgacttcgacagccagaccaacgtgtcccagagcaaggactccgacgtgtacatcaccgataagtgcgtgctggacatgcggagcatggacttcaagagcaactccgccgtggcctggtccaacaagtccgatttcgcctgcgccaacgccttcaacaacagcattatccccgaggacacattcttcccaagccccgagagcagcgactccaccgaccacgtgaagcccaaagagacagagaacaccaagcagcccagcaagagctgccacaagcccaaggccatcgtgcacaccgagaaagtgaacatgatgagcctgaccgtgctgggcctgcggatgctgttcgccaaaaccgtggccgtgaacttcctgctgaccgccaagctgttcttcctcctcaccgcccgggttaagttttccagatccgcagacgcacccgcttaccaacaagggcagaaccaactctacaatgaacttaatttggggcggagggaagagtacgacgttctggacaaaaggaggggacgagatcccgagatgggcggaaagcctcagcgaaggaagaatccgcaagaggggctttataacgaactccagaaagataaaatggcagaagcctatagtgagattgggatgaagggagaaaggaggaggggtaaaggtcacgatgggttgtaccaaggattgagcacagccactaaagatacctatgatgcgctccacatgcaggccctgccgccaaga

SEQ ID NO: 24044 - DNA, 759 bp, synthetic construct
  source 1..759: mol_type = other DNA
gtgtgtctgttcaccgacttcgacagccagaccaacgtgtcccagagcaaggactccgacgtgtacatcaccgataagtgcgtgctggacatgcggagcatggacttcaagagcaactccgccgtggcctggtccaacaagtccgatttcgcctgcgccaacgccttcaacaacagcattatccccgaggacacattcttcccaagccccgagagcagcgactccaccgaccacgtgaagcccaaagagacagagaacaccaagcagcccagcaagagctgccacaagcccaaggccatcgtgcacaccgagaaagtgaacatgatgagcctgaccgtgctgggcctgcggatgctgttcgccaaaaccgtggccgtgaacttcctgctgaccgccaagctgttcttcctcctcaccgcccgggttaagttttccagatccgcagacgcacccgcttaccaacaagggcagaaccaactctacaatgaacttaatttggggcggagggaagagtacgacgttctggacaaaaggaggggacgagatcccgagatgggcggaaagcctcagcgaaggaagaatccgcaagaggggctttataacgaactccagaaagataaaatggcagaagcctatagtgagattgggatgaagggagaaaggaggaggggtaaaggtcacgatgggttgtaccaaggattgagcacagccactaaagatacctatgatgcgctccacatgcaggccctgccgccaaga

SEQ ID NO: 24045 - DNA, 744 bp, synthetic construct
  source 1..744: mol_type = other DNA
gacttcgacagccagaccaacgtgtcccagagcaaggactccgacgtgtacatcaccgataagtgcgtgctggacatgcggagcatggacttcaagagcaactccgccgtggcctggtccaacaagtccgatttcgcctgcgccaacgccttcaacaacagcattatccccgaggacacattcttcccaagccccgagagcagcgactccaccgaccacgtgaagcccaaagagacagagaacaccaagcagcccagcaagagctgccacaagcccaaggccatcgtgcacaccgagaaagtgaacatgatgagcctgaccgtgctgggcctgcggatgctgttcgccaaaaccgtggccgtgaacttcctgctgaccgccaagctgttcttcctcctcaccgcccgggttaagttttccagatccgcagacgcacccgcttaccaacaagggcagaaccaactctacaatgaacttaatttggggcggagggaagagtacgacgttctggacaaaaggaggggacgagatcccgagatgggcggaaagcctcagcgaaggaagaatccgcaagaggggctttataacgaactccagaaagataaaatggcagaagcctatagtgagattgggatgaagggagaaaggaggaggggtaaaggtcacgatgggttgtaccaaggattgagcacagccactaaagatacctatgatgcgctccacatgcaggccctgccgccaaga

SEQ ID NO: 24046 - DNA, 729 bp, synthetic construct
  source 1..729: mol_type = other DNA
accaacgtgtcccagagcaaggactccgacgtgtacatcaccgataagtgcgtgctggacatgcggagcatggacttcaagagcaactccgccgtggcctggtccaacaagtccgatttcgcctgcgccaacgccttcaacaacagcattatccccgaggacacattcttcccaagccccgagagcagcgactccaccgaccacgtgaagcccaaagagacagagaacaccaagcagcccagcaagagctgccacaagcccaaggccatcgtgcacaccgagaaagtgaacatgatgagcctgaccgtgctgggcctgcggatgctgttcgccaaaaccgtggccgtgaacttcctgctgaccgccaagctgttcttcctcctcaccgcccgggttaagttttccagatccgcagacgcacccgcttaccaacaagggcagaaccaactctacaatgaacttaatttggggcggagggaagagtacgacgttctggacaaaaggaggggacgagatcccgagatgggcggaaagcctcagcgaaggaagaatccgcaagaggggctttataacgaactccagaaagataaaatggcagaagcctatagtgagattgggatgaagggagaaaggaggaggggtaaaggtcacgatgggttgtaccaaggattgagcacagccactaaagatacctatgatgcgctccacatgcaggccctgccgccaaga

SEQ ID NO: 24047 - DNA, 810 bp, synthetic construct; identical to SEQ ID NO: 23974
  source 1..810: mol_type = other DNA

SEQ ID NO: 24048 - DNA, 807 bp, synthetic construct
  source 1..807: mol_type = other DNA
cagaaccctgatcctgccgtgtaccagctgcgggatagcaagagcagcgacaagagcgtgtgtctgttcaccgacttcgacagccagaccaacgtgtcccagagcaaggactccgacgtgtacatcaccgataagtgcgtgctggacatgcggagcatggacttcaagagcaactccgccgtggcctggtccaacaagtccgatttcgcctgcgccaacgccttcaacaacagcattatccccgaggacacattcttcccaagccccgagagcagcgactccaccgaccacgtgaagcccaaagagacagagaacaccaagcagcccagcaagagctgccacaagcccaaggccatcgtgcacaccgagaaagtgaacatgatgagcctgaccgtgctgggcctgcggatgctgttcgccaaaaccgtggccgtgaacttcctgctgaccgccaagctgttcttcctccgggttaagttttccagatccgcagacgcacccgcttaccaacaagggcagaaccaactctacaatgaacttaatttggggcggagggaagagtacgacgttctggacaaaaggaggggacgagatcccgagatgggcggaaagcctcagcgaaggaagaatccgcaagaggggctttataacgaactccagaaagataaaatggcagaagcctatagtgagattgggatgaagggagaaaggaggaggggtaaaggtcacgatgggttgtaccaaggattgagcacagccactaaagatacctatgatgcgctccacatgcaggccctgccgccaaga

SEQ ID NO: 24049 - DNA, 804 bp, synthetic construct
  source 1..804: mol_type = other DNA
aaccctgatcctgccgtgtaccagctgcgggatagcaagagcagcgacaagagcgtgtgtctgttcaccgacttcgacagccagaccaacgtgtcccagagcaaggactccgacgtgtacatcaccgataagtgcgtgctggacatgcggagcatggacttcaagagcaactccgccgtggcctggtccaacaagtccgatttcgcctgcgccaacgccttcaacaacagcattatccccgaggacacattcttcccaagccccgagagcagcgactccaccgaccacgtgaagcccaaagagacagagaacaccaagcagcccagcaagagctgccacaagcccaaggccatcgtgcacaccgagaaagtgaacatgatgagcctgaccgtgctgggcctgcggatgctgttcgccaaaaccgtggccgtgaacttcctgctgaccgccaagctgttcttcctccgggttaagttttccagatccgcagacgcacccgcttaccaacaagggcagaaccaactctacaatgaacttaatttggggcggagggaagagtacgacgttctggacaaaaggaggggacgagatcccgagatgggcggaaagcctcagcgaaggaagaatccgcaagaggggctttataacgaactccagaaagataaaatggcagaagcctatagtgagattgggatgaagggagaaaggaggaggggtaaaggtcacgatgggttgtaccaaggattgagcacagccactaaagatacctatgatgcgctccacatgcaggccctgccgccaaga

SEQ ID NO: 24050 - DNA, 801 bp, synthetic construct
  source 1..801: mol_type = other DNA
cctgatcctgccgtgtaccagctgcgggatagcaagagcagcgacaagagcgtgtgtctgttcaccgacttcgacagccagaccaacgtgtcccagagcaaggactccgacgtgtacatcaccgataagtgcgtgctggacatgcggagcatggacttcaagagcaactccgccgtggcctggtccaacaagtccgatttcgcctgcgccaacgccttcaacaacagcattatccccgaggacacattcttcccaagccccgagagcagcgactccaccgaccacgtgaagcccaaagagacagagaacaccaagcagcccagcaagagctgccacaagcccaaggccatcgtgcacaccgagaaagtgaacatgatgagcctgaccgtgctgggcctgcggatgctgttcgccaaaaccgtggccgtgaacttcctgctgaccgccaagctgttcttcctccgggttaagttttccagatccgcagacgcacccgcttaccaacaagggcagaaccaactctacaatgaacttaatttggggcggagggaagagtacgacgttctggacaaaaggaggggacgagatcccgagatgggcggaaagcctcagcgaaggaagaatccgcaagaggggctttataacgaactccagaaagataaaatggcagaagcctatagtgagattgggatgaagggagaaaggaggaggggtaaaggtcacgatgggttgtaccaaggattgagcacagccactaaagatacctatgatgcgctccacatgcaggccctgccgccaaga

SEQ ID NO: 24051 - DNA, 798 bp, synthetic construct
  source 1..798: mol_type = other DNA
gatcctgccgtgtaccagctgcgggatagcaagagcagcgacaagagcgtgtgtctgttcaccgacttcgacagccagaccaacgtgtcccagagcaaggactccgacgtgtacatcaccgataagtgcgtgctggacatgcggagcatggacttcaagagcaactccgccgtggcctggtccaacaagtccgatttcgcctgcgccaacgccttcaacaacagcattatccccgaggacacattcttcccaagccccgagagcagcgactccaccgaccacgtgaagcccaaagagacagagaacaccaagcagcccagcaagagctgccacaagcccaaggccatcgtgcacaccgagaaagtgaacatgatgagcctgaccgtgctgggcctgcggatgctgttcgccaaaaccgtggccgtgaacttcctgctgaccgccaagctgttcttcctccgggttaagttttccagatccgcagacgcacccgcttaccaacaagggcagaaccaactctacaatgaacttaatttggggcggagggaagagtacgacgttctggacaaaaggaggggacgagatcccgagatgggcggaaagcctcagcgaaggaagaatccgcaagaggggctttataacgaactccagaaagataaaatggcagaagcctatagtgagattgggatgaagggagaaaggaggaggggtaaaggtcacgatgggttgtaccaaggattgagcacagccactaaagatacctatgatgcgctccacatgcaggccctgccgccaaga

SEQ ID NO: 24052 - DNA, 795 bp, synthetic construct
  source 1..795: mol_type = other DNA
cctgccgtgtaccagctgcgggatagcaagagcagcgacaagagcgtgtgtctgttcaccgacttcgacagccagaccaacgtgtcccagagcaaggactccgacgtgtacatcaccgataagtgcgtgctggacatgcggagcatggacttcaagagcaactccgccgtggcctggtccaacaagtccgatttcgcctgcgccaacgccttcaacaacagcattatccccgaggacacattcttcccaagccccgagagcagcgactccaccgaccacgtgaagcccaaagagacagagaacaccaagcagcccagcaagagctgccacaagcccaaggccatcgtgcacaccgagaaagtgaacatgatgagcctgaccgtgctgggcctgcggatgctgttcgccaaaaccgtggccgtgaacttcctgctgaccgccaagctgttcttcctccgggttaagttttccagatccgcagacgcacccgcttaccaacaagggcagaaccaactctacaatgaacttaatttggggcggagggaagagtacgacgttctggacaaaaggaggggacgagatcccgagatgggcggaaagcctcagcgaaggaagaatccgcaagaggggctttataacgaactccagaaagataaaatggcagaagcctatagtgagattgggatgaagggagaaaggaggaggggtaaaggtcacgatgggttgtaccaaggattgagcacagccactaaagatacctatgatgcgctccacatgcaggccctgccgccaaga

SEQ ID NO: 24053 - DNA, 792 bp, synthetic construct
  source 1..792: mol_type = other DNA
gccgtgtaccagctgcgggatagcaagagcagcgacaagagcgtgtgtctgttcaccgacttcgacagccagaccaacgtgtcccagagcaaggactccgacgtgtacatcaccgataagtgcgtgctggacatgcggagcatggacttcaagagcaactccgccgtggcctggtccaacaagtccgatttcgcctgcgccaacgccttcaacaacagcattatccccgaggacacattcttcccaagccccgagagcagcgactccaccgaccacgtgaagcccaaagagacagagaacaccaagcagcccagcaagagctgccacaagcccaaggccatcgtgcacaccgagaaagtgaacatgatgagcctgaccgtgctgggcctgcggatgctgttcgccaaaaccgtggccgtgaacttcctgctgaccgccaagctgttcttcctccgggttaagttttccagatccgcagacgcacccgcttaccaacaagggcagaaccaactctacaatgaacttaatttggggcggagggaagagtacgacgttctggacaaaaggaggggacgagatcccgagatgggcggaaagcctcagcgaaggaagaatccgcaagaggggctttataacgaactccagaaagataaaatggcagaagcctatagtgagattgggatgaagggagaaaggaggaggggtaaaggtcacgatgggttgtaccaaggattgagcacagccactaaagatacctatgatgcgctccacatgcaggccctgccgccaaga

SEQ ID NO: 24054 - DNA, 789 bp, synthetic construct
  source 1..789: mol_type = other DNA
gtgtaccagctgcgggatagcaagagcagcgacaagagcgtgtgtctgttcaccgacttcgacagccagaccaacgtgtcccagagcaaggactccgacgtgtacatcaccgataagtgcgtgctggacatgcggagcatggacttcaagagcaactccgccgtggcctggtccaacaagtccgatttcgcctgcgccaacgccttcaacaacagcattatccccgaggacacattcttcccaagccccgagagcagcgactccaccgaccacgtgaagcccaaagagacagagaacaccaagcagcccagcaagagctgccacaagcccaaggccatcgtgcacaccgagaaagtgaacatgatgagcctgaccgtgctgggcctgcggatgctgttcgccaaaaccgtggccgtgaacttcctgctgaccgccaagctgttcttcctccgggttaagttttccagatccgcagacgcacccgcttaccaacaagggcagaaccaactctacaatgaacttaatttggggcggagggaagagtacgacgttctggacaaaaggaggggacgagatcccgagatgggcggaaagcctcagcgaaggaagaatccgcaagaggggctttataacgaactccagaaagataaaatggcagaagcctatagtgagattgggatgaagggagaaaggaggaggggtaaaggtcacgatgggttgtaccaaggattgagcacagccactaaagatacctatgatgcgctccacatgcaggccctgccgccaaga

SEQ ID NO: 24055 - DNA, 786 bp, synthetic construct
  source 1..786: mol_type = other DNA
taccagctgcgggatagcaagagcagcgacaagagcgtgtgtctgttcaccgacttcgacagccagaccaacgtgtcccagagcaaggactccgacgtgtacatcaccgataagtgcgtgctggacatgcggagcatggacttcaagagcaactccgccgtggcctggtccaacaagtccgatttcgcctgcgccaacgccttcaacaacagcattatccccgaggacacattcttcccaagccccgagagcagcgactccaccgaccacgtgaagcccaaagagacagagaacaccaagcagcccagcaagagctgccacaagcccaaggccatcgtgcacaccgagaaagtgaacatgatgagcctgaccgtgctgggcctgcggatgctgttcgccaaaaccgtggccgtgaacttcctgctgaccgccaagctgttcttcctccgggttaagttttccagatccgcagacgcacccgcttaccaacaagggcagaaccaactctacaatgaacttaatttggggcggagggaagagtacgacgttctggacaaaaggaggggacgagatcccgagatgggcggaaagcctcagcgaaggaagaatccgcaagaggggctttataacgaactccagaaagataaaatggcagaagcctatagtgagattgggatgaagggagaaaggaggaggggtaaaggtcacgatgggttgtaccaaggattgagcacagccactaaagatacctatgatgcgctccacatgcaggccctgccgccaaga

SEQ ID NO: 24056 - DNA, 783 bp, synthetic construct
  source 1..783: mol_type = other DNA
cagctgcgggatagcaagagcagcgacaagagcgtgtgtctgttcaccgacttcgacagccagaccaacgtgtcccagagcaaggactccgacgtgtacatcaccgataagtgcgtgctggacatgcggagcatggacttcaagagcaactccgccgtggcctggtccaacaagtccgatttcgcctgcgccaacgccttcaacaacagcattatccccgaggacacattcttcccaagccccgagagcagcgactccaccgaccacgtgaagcccaaagagacagagaacaccaagcagcccagcaagagctgccacaagcccaaggccatcgtgcacaccgagaaagtgaacatgatgagcctgaccgtgctgggcctgcggatgctgttcgccaaaaccgtggccgtgaacttcctgctgaccgccaagctgttcttcctccgggttaagttttccagatccgcagacgcacccgcttaccaacaagggcagaaccaactctacaatgaacttaatttggggcggagggaagagtacgacgttctggacaaaaggaggggacgagatcccgagatgggcggaaagcctcagcgaaggaagaatccgcaagaggggctttataacgaactccagaaagataaaatggcagaagcctatagtgagattgggatgaagggagaaaggaggaggggtaaaggtcacgatgggttgtaccaaggattgagcacagccactaaagatacctatgatgcgctccacatgcaggccctgccgccaaga

SEQ ID NO: 24057 - DNA, 780 bp, synthetic construct
  source 1..780: mol_type = other DNA
ctgcgggatagcaagagcagcgacaagagcgtgtgtctgttcaccgacttcgacagccagaccaacgtgtcccagagcaaggactccgacgtgtacatcaccgataagtgcgtgctggacatgcggagcatggacttcaagagcaactccgccgtggcctggtccaacaagtccgatttcgcctgcgccaacgccttcaacaacagcattatccccgaggacacattcttcccaagccccgagagcagcgactccaccgaccacgtgaagcccaaagagacagagaacaccaagcagcccagcaagagctgccacaagcccaaggccatcgtgcacaccgagaaagtgaacatgatgagcctgaccgtgctgggcctgcggatgctgttcgccaaaaccgtggccgtgaacttcctgctgaccgccaagctgttcttcctccgggttaagttttccagatccgcagacgcacccgcttaccaacaagggcagaaccaactctacaatgaacttaatttggggcggagggaagagtacgacgttctggacaaaaggaggggacgagatcccgagatgggcggaaagcctcagcgaaggaagaatccgcaagaggggctttataacgaactccagaaagataaaatggcagaagcctatagtgagattgggatgaagggagaaaggaggaggggtaaaggtcacgatgggttgtaccaaggattgagcacagccactaaagatacctatgatgcgctccacatgcaggccctgccgccaaga

SEQ ID NO: 24058 - DNA, 777 bp, synthetic construct
  source 1..777: mol_type = other DNA
cgggatagcaagagcagcgacaagagcgtgtgtctgttcaccgacttcgacagccagaccaacgtgtcccagagcaaggactccgacgtgtacatcaccgataagtgcgtgctggacatgcggagcatggacttcaagagcaactccgccgtggcctggtccaacaagtccgatttcgcctgcgccaacgccttcaacaacagcattatccccgaggacacattcttcccaagccccgagagcagcgactccaccgaccacgtgaagcccaaagagacagagaacaccaagcagcccagcaagagctgccacaagcccaaggccatcgtgcacaccgagaaagtgaacatgatgagcctgaccgtgctgggcctgcggatgctgttcgccaaaaccgtggccgtgaacttcctgctgaccgccaagctgttcttcctccgggttaagttttccagatccgcagacgcacccgcttaccaacaagggcagaaccaactctacaatgaacttaatttggggcggagggaagagtacgacgttctggacaaaaggaggggacgagatcccgagatgggcggaaagcctcagcgaaggaagaatccgcaagaggggctttataacgaactccagaaagataaaatggcagaagcctatagtgagattgggatgaagggagaaaggaggaggggtaaaggtcacgatgggttgtaccaaggattgagcacagccactaaagatacctatgatgcgctccacatgcaggccctgccgccaaga

SEQ ID NO: 24059 - DNA, 774 bp, synthetic construct
  source 1..774: mol_type = other DNA
gatagcaagagcagcgacaagagcgtgtgtctgttcaccgacttcgacagccagaccaacgtgtcccagagcaaggactccgacgtgtacatcaccgataagtgcgtgctggacatgcggagcatggacttcaagagcaactccgccgtggcctggtccaacaagtccgatttcgcctgcgccaacgccttcaacaacagcattatccccgaggacacattcttcccaagccccgagagcagcgactccaccgaccacgtgaagcccaaagagacagagaacaccaagcagcccagcaagagctgccacaagcccaaggccatcgtgcacaccgagaaagtgaacatgatgagcctgaccgtgctgggcctgcggatgctgttcgccaaaaccgtggccgtgaacttcctgctgaccgccaagctgttcttcctccgggttaagttttccagatccgcagacgcacccgcttaccaacaagggcagaaccaactctacaatgaacttaatttggggcggagggaagagtacgacgttctggacaaaaggaggggacgagatcccgagatgggcggaaagcctcagcgaaggaagaatccgcaagaggggctttataacgaactccagaaagataaaatggcagaagcctatagtgagattgggatgaagggagaaaggaggaggggtaaaggtcacgatgggttgtaccaaggattgagcacagccactaaagatacctatgatgcgctccacatgcaggccctgccgccaaga

SEQ ID NO: 24060 - DNA, 771 bp, synthetic construct
  source 1..771: mol_type = other DNA
agcaagagcagcgacaagagcgtgtgtctgttcaccgacttcgacagccagaccaacgtgtcccagagcaaggactccgacgtgtacatcaccgataagtgcgtgctggacatgcggagcatggacttcaagagcaactccgccgtggcctggtccaacaagtccgatttcgcctgcgccaacgccttcaacaacagcattatccccgaggacacattcttcccaagccccgagagcagcgactccaccgaccacgtgaagcccaaagagacagagaacaccaagcagcccagcaagagctgccacaagcccaaggccatcgtgcacaccgagaaagtgaacatgatgagcctgaccgtgctgggcctgcggatgctgttcgccaaaaccgtggccgtgaacttcctgctgaccgccaagctgttcttcctccgggttaagttttccagatccgcagacgcacccgcttaccaacaagggcagaaccaactctacaatgaacttaatttggggcggagggaagagtacgacgttctggacaaaaggaggggacgagatcccgagatgggcggaaagcctcagcgaaggaagaatccgcaagaggggctttataacgaactccagaaagataaaatggcagaagcctatagtgagattgggatgaagggagaaaggaggaggggtaaaggtcacgatgggttgtaccaaggattgagcacagccactaaagatacctatgatgcgctccacatgcaggccctgccgccaaga

SEQ ID NO: 24061 - DNA, 768 bp, synthetic construct
  source 1..768: mol_type = other DNA
aagagcagcgacaagagcgtgtgtctgttcaccgacttcgacagccagaccaacgtgtcccagagcaaggactccgacgtgtacatcaccgataagtgcgtgctggacatgcggagcatggacttcaagagcaactccgccgtggcctggtccaacaagtccgatttcgcctgcgccaacgccttcaacaacagcattatccccgaggacacattcttcccaagccccgagagcagcgactccaccgaccacgtgaagcccaaagagacagagaacaccaagcagcccagcaagagctgccacaagcccaaggccatcgtgcacaccgagaaagtgaacatgatgagcctgaccgtgctgggcctgcggatgctgttcgccaaaaccgtggccgtgaacttcctgctgaccgccaagctgttcttcctccgggttaagttttccagatccgcagacgcacccgcttaccaacaagggcagaaccaactctacaatgaacttaatttggggcggagggaagagtacgacgttctggacaaaaggaggggacgagatcccgagatgggcggaaagcctcagcgaaggaagaatccgcaagaggggctttataacgaactccagaaagataaaatggcagaagcctatagtgagattgggatgaagggagaaaggaggaggggtaaaggtcacgatgggttgtaccaaggattgagcacagccactaaagatacctatgatgcgctccacatgcaggccctgccgccaaga

SEQ ID NO: 24062 - DNA, 765 bp, synthetic construct
  source 1..765: mol_type = other DNA
agcagcgacaagagcgtgtgtctgttcaccgacttcgacagccagaccaacgtgtcccagagcaaggactccgacgtgtacatcaccgataagtgcgtgctggacatgcggagcatggacttcaagagcaactccgccgtggcctggtccaacaagtccgatttcgcctgcgccaacgccttcaacaacagcattatccccgaggacacattcttcccaagccccgagagcagcgactccaccgaccacgtgaagcccaaagagacagagaacaccaagcagcccagcaagagctgccacaagcccaaggccatcgtgcacaccgagaaagtgaacatgatgagcctgaccgtgctgggcctgcggatgctgttcgccaaaaccgtggccgtgaacttcctgctgaccgccaagctgttcttcctccgggttaagttttccagatccgcagacgcacccgcttaccaacaagggcagaaccaactctacaatgaacttaatttggggcggagggaagagtacgacgttctggacaaaaggaggggacgagatcccgagatgggcggaaagcctcagcgaaggaagaatccgcaagaggggctttataacgaactccagaaagataaaatggcagaagcctatagtgagattgggatgaagggagaaaggaggaggggtaaaggtcacgatgggttgtaccaaggattgagcacagccactaaagatacctatgatgcgctccacatgcaggccctgccgccaaga

SEQ ID NO: 24063 - DNA, 762 bp, synthetic construct
  source 1..762: mol_type = other DNA
agcgacaagagcgtgtgtctgttcaccgacttcgacagccagaccaacgtgtcccagagcaaggactccgacgtgtacatcaccgataagtgcgtgctggacatgcggagcatggacttcaagagcaactccgccgtggcctggtccaacaagtccgatttcgcctgcgccaacgccttcaacaacagcattatccccgaggacacattcttcccaagccccgagagcagcgactccaccgaccacgtgaagcccaaagagacagagaacaccaagcagcccagcaagagctgccacaagcccaaggccatcgtgcacaccgagaaagtgaacatgatgagcctgaccgtgctgggcctgcggatgctgttcgccaaaaccgtggccgtgaacttcctgctgaccgccaagctgttcttcctccgggttaagttttccagatccgcagacgcacccgcttaccaacaagggcagaaccaactctacaatgaacttaatttggggcggagggaagagtacgacgttctggacaaaaggaggggacgagatcccgagatgggcggaaagcctcagcgaaggaagaatccgcaagaggggctttataacgaactccagaaagataaaatggcagaagcctatagtgagattgggatgaagggagaaaggaggaggggtaaaggtcacgatgggttgtaccaaggattgagcacagccactaaagatacctatgatgcgctccacatgcaggccctgccgccaaga

SEQ ID NO: 24064 - DNA, 759 bp, synthetic construct
  source 1..759: mol_type = other DNA
gacaagagcgtgtgtctgttcaccgacttcgacagccagaccaacgtgtcccagagcaaggactccgacgtgtacatcaccgataagtgcgtgctggacatgcggagcatggacttcaagagcaactccgccgtggcctggtccaacaagtccgatttcgcctgcgccaacgccttcaacaacagcattatccccgaggacacattcttcccaagccccgagagcagcgactccaccgaccacgtgaagcccaaagagacagagaacaccaagcagcccagcaagagctgccacaagcccaaggccatcgtgcacaccgagaaagtgaacatgatgagcctgaccgtgctgggcctgcggatgctgttcgccaaaaccgtggccgtgaacttcctgctgaccgccaagctgttcttcctccgggttaagttttccagatccgcagacgcacccgcttaccaacaagggcagaaccaactctacaatgaacttaatttggggcggagggaagagtacgacgttctggacaaaaggaggggacgagatcccgagatgggcggaaagcctcagcgaaggaagaatccgcaagaggggctttataacgaactccagaaagataaaatggcagaagcctatagtgagattgggatgaagggagaaaggaggaggggtaaaggtcacgatgggttgtaccaaggattgagcacagccactaaagatacctatgatgcgctccacatgcaggccctgccgccaaga

SEQ ID NO: 24065 - DNA, 756 bp, synthetic construct
  source 1..756: mol_type = other DNA
aagagcgtgtgtctgttcaccgacttcgacagccagaccaacgtgtcccagagcaaggactccgacgtgtacatcaccgataagtgcgtgctggacatgcggagcatggacttcaagagcaactccgccgtggcctggtccaacaagtccgatttcgcctgcgccaacgccttcaacaacagcattatccccgaggacacattcttcccaagccccgagagcagcgactccaccgaccacgtgaagcccaaagagacagagaacaccaagcagcccagcaagagctgccacaagcccaaggccatcgtgcacaccgagaaagtgaacatgatgagcctgaccgtgctgggcctgcggatgctgttcgccaaaaccgtggccgtgaacttcctgctgaccgccaagctgttcttcctccgggttaagttttccagatccgcagacgcacccgcttaccaacaagggcagaaccaactctacaatgaacttaatttggggcggagggaagagtacgacgttctggacaaaaggaggggacgagatcccgagatgggcggaaagcctcagcgaaggaagaatccgcaagaggggctttataacgaactccagaaagataaaatggcagaagcctatagtgagattgggatgaagggagaaaggaggaggggtaaaggtcacgatgggttgtaccaaggattgagcacagccactaaagatacctatgatgcgctccacatgcaggccctgccgccaaga

SEQ ID NO: 24066 - DNA, 753 bp, synthetic construct
  source 1..753: mol_type = other DNA
agcgtgtgtctgttcaccgacttcgacagccagaccaacgtgtcccagagcaaggactccgacgtgtacatcaccgataagtgcgtgctggacatgcggagcatggacttcaagagcaactccgccgtggcctggtccaacaagtccgatttcgcctgcgccaacgccttcaacaacagcattatccccgaggacacattcttcccaagccccgagagcagcgactccaccgaccacgtgaagcccaaagagacagagaacaccaagcagcccagcaagagctgccacaagcccaaggccatcgtgcacaccgagaaagtgaacatgatgagcctgaccgtgctgggcctgcggatgctgttcgccaaaaccgtggccgtgaacttcctgctgaccgccaagctgttcttcctccgggttaagttttccagatccgcagacgcacccgcttaccaacaagggcagaaccaactctacaatgaacttaatttggggcggagggaagagtacgacgttctggacaaaaggaggggacgagatcccgagatgggcggaaagcctcagcgaaggaagaatccgcaagaggggctttataacgaactccagaaagataaaatggcagaagcctatagtgagattgggatgaagggagaaaggaggaggggtaaaggtcacgatgggttgtaccaaggattgagcacagccactaaagatacctatgatgcgctccacatgcaggccctgccgccaaga

SEQ ID NO: 24067 - DNA, 750 bp, synthetic construct
  source 1..750: mol_type = other DNA
gtgtgtctgttcaccgacttcgacagccagaccaacgtgtcccagagcaaggactccgacgtgtacatcaccgataagtgcgtgctggacatgcggagcatggacttcaagagcaactccgccgtggcctggtccaacaagtccgatttcgcctgcgccaacgccttcaacaacagcattatccccgaggacacattcttcccaagccccgagagcagcgactccaccgaccacgtgaagcccaaagagacagagaacaccaagcagcccagcaagagctgccacaagcccaaggccatcgtgcacaccgagaaagtgaacatgatgagcctgaccgtgctgggcctgcggatgctgttcgccaaaaccgtggccgtgaacttcctgctgaccgccaagctgttcttcctccgggttaagttttccagatccgcagacgcacccgcttaccaacaagggcagaaccaactctacaatgaacttaatttggggcggagggaagagtacgacgttctggacaaaaggaggggacgagatcccgagatgggcggaaagcctcagcgaaggaagaatccgcaagaggggctttataacgaactccagaaagataaaatggcagaagcctatagtgagattgggatgaagggagaaaggaggaggggtaaaggtcacgatgggttgtaccaaggattgagcacagccactaaagatacctatgatgcgctccacatgcaggccctgccgccaaga

SEQ ID NO: 24068 - DNA, 735 bp, synthetic construct
  source 1..735: mol_type = other DNA
gacttcgacagccagaccaacgtgtcccagagcaaggactccgacgtgtacatcaccgataagtgcgtgctggacatgcggagcatggacttcaagagcaactccgccgtggcctggtccaacaagtccgatttcgcctgcgccaacgccttcaacaacagcattatccccgaggacacattcttcccaagccccgagagcagcgactccaccgaccacgtgaagcccaaagagacagagaacaccaagcagcccagcaagagctgccacaagcccaaggccatcgtgcacaccgagaaagtgaacatgatgagcctgaccgtgctgggcctgcggatgctgttcgccaaaaccgtggccgtgaacttcctgctgaccgccaagctgttcttcctccgggttaagttttccagatccgcagacgcacccgcttaccaacaagggcagaaccaactctacaatgaacttaatttggggcggagggaagagtacgacgttctggacaaaaggaggggacgagatcccgagatgggcggaaagcctcagcgaaggaagaatccgcaagaggggctttataacgaactccagaaagataaaatggcagaagcctatagtgagattgggatgaagggagaaaggaggaggggtaaaggtcacgatgggttgtaccaaggattgagcacagccactaaagatacctatgatgcgctccacatgcaggccctgccgccaaga

SEQ ID NO: 24069 - DNA, 720 bp, synthetic construct
  source 1..720: mol_type = other DNA
accaacgtgtcccagagcaaggactccgacgtgtacatcaccgataagtgcgtgctggacatgcggagcatggacttcaagagcaactccgccgtggcctggtccaacaagtccgatttcgcctgcgccaacgccttcaacaacagcattatccccgaggacacattcttcccaagccccgagagcagcgactccaccgaccacgtgaagcccaaagagacagagaacaccaagcagcccagcaagagctgccacaagcccaaggccatcgtgcacaccgagaaagtgaacatgatgagcctgaccgtgctgggcctgcggatgctgttcgccaaaaccgtggccgtgaacttcctgctgaccgccaagctgttcttcctccgggttaagttttccagatccgcagacgcacccgcttaccaacaagggcagaaccaactctacaatgaacttaatttggggcggagggaagagtacgacgttctggacaaaaggaggggacgagatcccgagatgggcggaaagcctcagcgaaggaagaatccgcaagaggggctttataacgaactccagaaagataaaatggcagaagcctatagtgagattgggatgaagggagaaaggaggaggggtaaaggtcacgatgggttgtaccaaggattgagcacagccactaaagatacctatgatgcgctccacatgcaggccctgccgccaaga

SEQ ID NO: 24070 - DNA, 858 bp, synthetic construct
  source 1..858: mol_type = other DNA
ggacagcctaaggccaatcctaccgtgacactgttccctccaagcagcgaagaactccaggccaacaaggccacacttgtgtgcctgatctccgacttctaccctggggctgtgacagtggcttggaaggccgatggatctcctgtgaaagccggcgtggaaaccaccaagccatccaagcagagcaacaacaaatacgccgccagctcctacctgagcctgacacctgagcagtggaagtcccacagatcctacagctgccaagtgacccacgaaggcagcaccgtggaaaagacagtggcccctacagagtgcagccccatcaagaccgatgtgattacaatggaccccaaggacaactgctccaaggacgccaacgataccctgctgctccagctgaccaacaccagcgcctactacatgtacttgttgctgctgctgaagtccgtggtgtacttcgccatcatcacatgctgcctgctgcggagaaccgccttctgctgcaacggcgagaagtctcgggttaagttttccagatccgcagacgcacccgcttaccaacaagggcagaaccaactctacaatgaacttaatttggggcggagggaagagtacgacgttctggacaaaaggaggggacgagatcccgagatgggcggaaagcctcagcgaaggaagaatccgcaagaggggctttataacgaactccagaaagataaaatggcagaagcctatagtgagattgggatgaagggagaaaggaggaggggtaaaggtcacgatgggttgtaccaaggattgagcacagccactaaagatacctatgatgcgctccacatgcaggccctgccgccaaga

SEQ ID NO: 24071 - DNA, 855 bp, synthetic construct
  source 1..855: mol_type = other DNA
cagcctaaggccaatcctaccgtgacactgttccctccaagcagcgaagaactccaggccaacaaggccacacttgtgtgcctgatctccgacttctaccctggggctgtgacagtggcttggaaggccgatggatctcctgtgaaagccggcgtggaaaccaccaagccatccaagcagagcaacaacaaatacgccgccagctcctacctgagcctgacacctgagcagtggaagtcccacagatcctacagctgccaagtgacccacgaaggcagcaccgtggaaaagacagtggcccctacagagtgcagccccatcaagaccgatgtgattacaatggaccccaaggacaactgctccaaggacgccaacgataccctgctgctccagctgaccaacaccagcgcctactacatgtacttgttgctgctgctgaagtccgtggtgtacttcgccatcatcacatgctgcctgctgcggagaaccgccttctgctgcaacggcgagaagtctcgggttaagttttccagatccgcagacgcacccgcttaccaacaagggcagaaccaactctacaatgaacttaatttggggcggagggaagagtacgacgttctggacaaaaggaggggacgagatcccgagatgggcggaaagcctcagcgaaggaagaatccgcaagaggggctttataacgaactccagaaagataaaatggcagaagcctatagtgagattgggatgaagggagaaaggaggaggggtaaaggtcacgatgggttgtaccaaggattgagcacagccactaaagatacctatgatgcgctccacatgcaggccctgccgccaaga

SEQ ID NO: 24072 - DNA, 852 bp, synthetic construct
  source 1..852: mol_type = other DNA
cctaaggccaatcctaccgtgacactgttccctccaagcagcgaagaactccaggccaacaaggccacacttgtgtgcctgatctccgacttctaccctggggctgtgacagtggcttggaaggccgatggatctcctgtgaaagccggcgtggaaaccaccaagccatccaagcagagcaacaacaaatacgccgccagctcctacctgagcctgacacctgagcagtggaagtcccacagatcctacagctgccaagtgacccacgaaggcagcaccgtggaaaagacagtggcccctacagagtgcagccccatcaagaccgatgtgattacaatggaccccaaggacaactgctccaaggacgccaacgataccctgctgctccagctgaccaacaccagcgcctactacatgtacttgttgctgctgctgaagtccgtggtgtacttcgccatcatcacatgctgcctgctgcggagaaccgccttctgctgcaacggcgagaagtctcgggttaagttttccagatccgcagacgcacccgcttaccaacaagggcagaaccaactctacaatgaacttaatttggggcggagggaagagtacgacgttctggacaaaaggaggggacgagatcccgagatgggcggaaagcctcagcgaaggaagaatccgcaagaggggctttataacgaactccagaaagataaaatggcagaagcctatagtgagattgggatgaagggagaaaggaggaggggtaaaggtcacgatgggttgtaccaaggattgagcacagccactaaagatacctatgatgcgctccacatgcaggccctgccgccaaga

SEQ ID NO: 24073 - DNA, 849 bp, synthetic construct
  source 1..849: mol_type = other DNA
aaggccaatcctaccgtgacactgttccctccaagcagcgaagaactccaggccaacaaggccacacttgtgtgcctgatctccgacttctaccctggggctgtgacagtggcttggaaggccgatggatctcctgtgaaagccggcgtggaaaccaccaagccatccaagcagagcaacaacaaatacgccgccagctcctacctgagcctgacacctgagcagtggaagtcccacagatcctacagctgccaagtgacccacgaaggcagcaccgtggaaaagacagtggcccctacagagtgcagccccatcaagaccgatgtgattacaatggaccccaaggacaactgctccaaggacgccaacgataccctgctgctccagctgaccaacaccagcgcctactacatgtacttgttgctgctgctgaagtccgtggtgtacttcgccatcatcacatgctgcctgctgcggagaaccgccttctgctgcaacggcgagaagtctcgggttaagttttccagatccgcagacgcacccgcttaccaacaagggcagaaccaactctacaatgaacttaatttggggcggagggaagagtacgacgttctggacaaaaggaggggacgagatcccgagatgggcggaaagcctcagcgaaggaagaatccgcaagaggggctttataacgaactccagaaagataaaatggcagaagcctatagtgagattgggatgaagggagaaaggaggaggggtaaaggtcacgatgggttgtaccaaggattgagcacagccactaaagatacctatgatgcgctccacatgcaggccctgccgccaaga

SEQ ID NO: 24074 - DNA, 846 bp, synthetic construct
  source 1..846: mol_type = other DNA
gccaatcctaccgtgacactgttccctccaagcagcgaagaactccaggccaacaaggccacacttgtgtgcctgatctccgacttctaccctggggctgtgacagtggcttggaaggccgatggatctcctgtgaaagccggcgtggaaaccaccaagccatccaagcagagcaacaacaaatacgccgccagctcctacctgagcctgacacctgagcagtggaagtcccacagatcctacagctgccaagtgacccacgaaggcagcaccgtggaaaagacagtggcccctacagagtgcagccccatcaagaccgatgtgattacaatggaccccaaggacaactgctccaaggacgccaacgataccctgctgctccagctgaccaacaccagcgcctactacatgtacttgttgctgctgctgaagtccgtggtgtacttcgccatcatcacatgctgcctgctgcggagaaccgccttctgctgcaacggcgagaagtctcgggttaagttttccagatccgcagacgcacccgcttaccaacaagggcagaaccaactctacaatgaacttaatttggggcggagggaagagtacgacgttctggacaaaaggaggggacgagatcccgagatgggcggaaagcctcagcgaaggaagaatccgcaagaggggctttataacgaactccagaaagataaaatggcagaagcctatagtgagattgggatgaagggagaaaggaggaggggtaaaggtcacgatgggttgtaccaaggattgagcacagccactaaagatacctatgatgcgctccacatgcaggccctgccgccaaga

SEQ ID NO: 24075 - DNA, 843 bp, synthetic construct
  source 1..843: mol_type = other DNA
aatcctaccgtgacactgttccctccaagcagcgaagaactccaggccaacaaggccacacttgtgtgcctgatctccgacttctaccctggggctgtgacagtggcttggaaggccgatggatctcctgtgaaagccggcgtggaaaccaccaagccatccaagcagagcaacaacaaatacgccgccagctcctacctgagcctgacacctgagcagtggaagtcccacagatcctacagctgccaagtgacccacgaaggcagcaccgtggaaaagacagtggcccctacagagtgcagccccatcaagaccgatgtgattacaatggaccccaaggacaactgctccaaggacgccaacgataccctgctgctccagctgaccaacaccagcgcctactacatgtacttgttgctgctgctgaagtccgtggtgtacttcgccatcatcacatgctgcctgctgcggagaaccgccttctgctgcaacggcgagaagtctcgggttaagttttccagatccgcagacgcacccgcttaccaacaagggcagaaccaactctacaatgaacttaatttggggcggagggaagagtacgacgttctggacaaaaggaggggacgagatcccgagatgggcggaaagcctcagcgaaggaagaatccgcaagaggggctttataacgaactccagaaagataaaatggcagaagcctatagtgagattgggatgaagggagaaaggaggaggggtaaaggtcacgatgggttgtaccaaggattgagcacagccactaaagatacctatgatgcgctccacatgcaggccctgccgccaaga

SEQ ID NO: 24076 - DNA, 840 bp, synthetic construct
  source 1..840: mol_type = other DNA
cctaccgtgacactgttccctccaagcagcgaagaactccaggccaacaaggccacacttgtgtgcctgatctccgacttctaccctggggctgtgacagtggcttggaaggccgatggatctcctgtgaaagccggcgtggaaaccaccaagccatccaagcagagcaacaacaaatacgccgccagctcctacctgagcctgacacctgagcagtggaagtcccacagatcctacagctgccaagtgacccacgaaggcagcaccgtggaaaagacagtggcccctacagagtgcagccccatcaagaccgatgtgattacaatggaccccaaggacaactgctccaaggacgccaacgataccctgctgctccagctgaccaacaccagcgcctactacatgtacttgttgctgctgctgaagtccgtggtgtacttcgccatcatcacatgctgcctgctgcggagaaccgccttctgctgcaacggcgagaagtctcgggttaagttttccagatccgcagacgcacccgcttaccaacaagggcagaaccaactctacaatgaacttaatttggggcggagggaagagtacgacgttctggacaaaaggaggggacgagatcccgagatgggcggaaagcctcagcgaaggaagaatccgcaagaggggctttataacgaactccagaaagataaaatggcagaagcctatagtgagattgggatgaagggagaaaggaggaggggtaaaggtcacgatgggttgtaccaaggattgagcacagccactaaagatacctatgatgcgctccacatgcaggccctgccgccaaga

SEQ ID NO: 24077 - DNA, 837 bp, synthetic construct
  source 1..837: mol_type = other DNA
accgtgacactgttccctccaagcagcgaagaactccaggccaacaaggccacacttgtgtgcctgatctccgacttctaccctggggctgtgacagtggcttggaaggccgatggatctcctgtgaaagccggcgtggaaaccaccaagccatccaagcagagcaacaacaaatacgccgccagctcctacctgagcctgacacctgagcagtggaagtcccacagatcctacagctgccaagtgacccacgaaggcagcaccgtggaaaagacagtggcccctacagagtgcagccccatcaagaccgatgtgattacaatggaccccaaggacaactgctccaaggacgccaacgataccctgctgctccagctgaccaacaccagcgcctactacatgtacttgttgctgctgctgaagtccgtggtgtacttcgccatcatcacatgctgcctgctgcggagaaccgccttctgctgcaacggcgagaagtctcgggttaagttttccagatccgcagacgcacccgcttaccaacaagggcagaaccaactctacaatgaacttaatttggggcggagggaagagtacgacgttctggacaaaaggaggggacgagatcccgagatgggcggaaagcctcagcgaaggaagaatccgcaagaggggctttataacgaactccagaaagataaaatggcagaagcctatagtgagattgggatgaagggagaaaggaggaggggtaaaggtcacgatgggttgtaccaaggattgagcacagccactaaagatacctatgatgcgctccacatgcaggccctgccgccaaga

SEQ ID NO: 24078 - DNA, 834 bp, synthetic construct
  source 1..834: mol_type = other DNA
gtgacactgttccctccaagcagcgaagaactccaggccaacaaggccacacttgtgtgcctgatctccgacttctaccctggggctgtgacagtggcttggaaggccgatggatctcctgtgaaagccggcgtggaaaccaccaagccatccaagcagagcaacaacaaatacgccgccagctcctacctgagcctgacacctgagcagtggaagtcccacagatcctacagctgccaagtgacccacgaaggcagcaccgtggaaaagacagtggcccctacagagtgcagccccatcaagaccgatgtgattacaatggaccccaaggacaactgctccaaggacgccaacgataccctgctgctccagctgaccaacaccagcgcctactacatgtacttgttgctgctgctgaagtccgtggtgtacttcgccatcatcacatgctgcctgctgcggagaaccgccttctgctgcaacggcgagaagtctcgggttaagttttccagatccgcagacgcacccgcttaccaacaagggcagaaccaactctacaatgaacttaatttggggcggagggaagagtacgacgttctggacaaaaggaggggacgagatcccgagatgggcggaaagcctcagcgaaggaagaatccgcaagaggggctttataacgaactccagaaagataaaatggcagaagcctatagtgagattgggatgaagggagaaaggaggaggggtaaaggtcacgatgggttgtaccaaggattgagcacagccactaaagatacctatgatgcgctccacatgcaggccctgccgccaaga

SEQ ID NO: 24079 - DNA, 831 bp, synthetic construct
  source 1..831: mol_type = other DNA
acactgttccctccaagcagcgaagaactccaggccaacaaggccacacttgtgtgcctgatctccgacttctaccctggggctgtgacagtggcttggaaggccgatggatctcctgtgaaagccggcgtggaaaccaccaagccatccaagcagagcaacaacaaatacgccgccagctcctacctgagcctgacacctgagcagtggaagtcccacagatcctacagctgccaagtgacccacgaaggcagcaccgtggaaaagacagtggcccctacagagtgcagccccatcaagaccgatgtgattacaatggaccccaaggacaactgctccaaggacgccaacgataccctgctgctccagctgaccaacaccagcgcctactacatgtacttgttgctgctgctgaagtccgtggtgtacttcgccatcatcacatgctgcctgctgcggagaaccgccttctgctgcaacggcgagaagtctcgggttaagttttccagatccgcagacgcacccgcttaccaacaagggcagaaccaactctacaatgaacttaatttggggcggagggaagagtacgacgttctggacaaaaggaggggacgagatcccgagatgggcggaaagcctcagcgaaggaagaatccgcaagaggggctttataacgaactccagaaagataaaatggcagaagcctatagtgagattgggatgaagggagaaaggaggaggggtaaaggtcacgatgggttgtaccaaggattgagcacagccactaaagatacctatgatgcgctccacatgcaggccctgccgccaaga

SEQ ID NO: 24080 - DNA, 828 bp, synthetic construct
  source 1..828: mol_type = other DNA
ctgttccctccaagcagcgaagaactccaggccaacaaggccacacttgtgtgcctgatctccgacttctaccctggggctgtgacagtggcttggaaggccgatggatctcctgtgaaagccggcgtggaaaccaccaagccatccaagcagagcaacaacaaatacgccgccagctcctacctgagcctgacacctgagcagtggaagtcccacagatcctacagctgccaagtgacccacgaaggcagcaccgtggaaaagacagtggcccctacagagtgcagccccatcaagaccgatgtgattacaatggaccccaaggacaactgctccaaggacgccaacgataccctgctgctccagctgaccaacaccagcgcctactacatgtacttgttgctgctgctgaagtccgtggtgtacttcgccatcatcacatgctgcctgctgcggagaaccgccttctgctgcaacggcgagaagtctcgggttaagttttccagatccgcagacgcacccgcttaccaacaagggcagaaccaactctacaatgaacttaatttggggcggagggaagagtacgacgttctggacaaaaggaggggacgagatcccgagatgggcggaaagcctcagcgaaggaagaatccgcaagaggggctttataacgaactccagaaagataaaatggcagaagcctatagtgagattgggatgaagggagaaaggaggaggggtaaaggtcacgatgggttgtaccaaggattgagcacagccactaaagatacctatgatgcgctccacatgcaggccctgccgccaaga

SEQ ID NO: 24081 - DNA, 861 bp, synthetic construct
  source 1..861: mol_type = other DNA
ggacagcctaaggccaatcctaccgtgacactgttccctccaagcagcgaagaactccaggccaacaaggccacacttgtgtgcctgatctccgacttctaccctggggctgtgacagtggcttggaaggccgatggatctcctgtgaaagccggcgtggaaaccaccaagccatccaagcagagcaacaacaaatacgccgccagctcctacctgagcctgacacctgagcagtggaagtcccacagatcctacagctgccaagtgacccacgaaggcagcaccgtggaaaagacagtggcccctacagagtgcagcgaagtgaaaaccgactccaccgaccacgtgaagcccaaagagacagagaacaccaagcagcccagcaagagctgccacaagcccaaggccatcgtgcacaccgagaaagtgaacatgatgagcctgaccgtgctgggcctgcggatgctgttcgccaaaaccgtggccgtgaacttcctgctgaccgccaagctgttcttcctccgggttaagttttccagatccgcagacgcacccgcttaccaacaagggcagaaccaactctacaatgaacttaatttggggcggagggaagagtacgacgttctggacaaaaggaggggacgagatcccgagatgggcggaaagcctcagcgaaggaagaatccgcaagaggggctttataacgaactccagaaagataaaatggcagaagcctatagtgagattgggatgaagggagaaaggaggaggggtaaaggtcacgatgggttgtaccaaggattgagcacagccactaaagatacctatgatgcgctccacatgcaggccctgccgccaaga

SEQ ID NO: 24082 - DNA, 858 bp, synthetic construct
  source 1..858: mol_type = other DNA
cagcctaaggccaatcctaccgtgacactgttccctccaagcagcgaagaactccaggccaacaaggccacacttgtgtgcctgatctccgacttctaccctggggctgtgacagtggcttggaaggccgatggatctcctgtgaaagccggcgtggaaaccaccaagccatccaagcagagcaacaacaaatacgccgccagctcctacctgagcctgacacctgagcagtggaagtcccacagatcctacagctgccaagtgacccacgaaggcagcaccgtggaaaagacagtggcccctacagagtgcagcgaagtgaaaaccgactccaccgaccacgtgaagcccaaagagacagagaacaccaagcagcccagcaagagctgccacaagcccaaggccatcgtgcacaccgagaaagtgaacatgatgagcctgaccgtgctgggcctgcggatgctgttcgccaaaaccgtggccgtgaacttcctgctgaccgccaagctgttcttcctccgggttaagttttccagatccgcagacgcacccgcttaccaacaagggcagaaccaactctacaatgaacttaatttggggcggagggaagagtacgacgttctggacaaaaggaggggacgagatcccgagatgggcggaaagcctcagcgaaggaagaatccgcaagaggggctttataacgaactccagaaagataaaatggcagaagcctatagtgagattgggatgaagggagaaaggaggaggggtaaaggtcacgatgggttgtaccaaggattgagcacagccactaaagatacctatgatgcgctccacatgcaggccctgccgccaaga

SEQ ID NO: 24083 - DNA, 855 bp, synthetic construct
  source 1..855: mol_type = other DNA
cctaaggccaatcctaccgtgacactgttccctccaagcagcgaagaactccaggccaacaaggccacacttgtgtgcctgatctccgacttctaccctggggctgtgacagtggcttggaaggccgatggatctcctgtgaaagccggcgtggaaaccaccaagccatccaagcagagcaacaacaaatacgccgccagctcctacctgagcctgacacctgagcagtggaagtcccacagatcctacagctgccaagtgacccacgaaggcagcaccgtggaaaagacagtggcccctacagagtgcagcgaagtgaaaaccgactccaccgaccacgtgaagcccaaagagacagagaacaccaagcagcccagcaagagctgccacaagcccaaggccatcgtgcacaccgagaaagtgaacatgatgagcctgaccgtgctgggcctgcggatgctgttcgccaaaaccgtggccgtgaacttcctgctgaccgccaagctgttcttcctccgggttaagttttccagatccgcagacgcacccgcttaccaacaagggcagaaccaactctacaatgaacttaatttggggcggagggaagagtacgacgttctggacaaaaggaggggacgagatcccgagatgggcggaaagcctcagcgaaggaagaatccgcaagaggggctttataacgaactccagaaagataaaatggcagaagcctatagtgagattgggatgaagggagaaaggaggaggggtaaaggtcacgatgggttgtaccaaggattgagcacagccactaaagatacctatgatgcgctccacatgcaggccctgccgccaaga

SEQ ID NO: 24084 - DNA, 852 bp, synthetic construct
  source 1..852: mol_type = other DNA
aaggccaatcctaccgtgacactgttccctccaagcagcgaagaactccaggccaacaaggccacacttgtgtgcctgatctccgacttctaccctggggctgtgacagtggcttggaaggccgatggatctcctgtgaaagccggcgtggaaaccaccaagccatccaagcagagcaacaacaaatacgccgccagctcctacctgagcctgacacctgagcagtggaagtcccacagatcctacagctgccaagtgacccacgaaggcagcaccgtggaaaagacagtggcccctacagagtgcagcgaagtgaaaaccgactccaccgaccacgtgaagcccaaagagacagagaacaccaagcagcccagcaagagctgccacaagcccaaggccatcgtgcacaccgagaaagtgaacatgatgagcctgaccgtgctgggcctgcggatgctgttcgccaaaaccgtggccgtgaacttcctgctgaccgccaagctgttcttcctccgggttaagttttccagatccgcagacgcacccgcttaccaacaagggcagaaccaactctacaatgaacttaatttggggcggagggaagagtacgacgttctggacaaaaggaggggacgagatcccgagatgggcggaaagcctcagcgaaggaagaatccgcaagaggggctttataacgaactccagaaagataaaatggcagaagcctatagtgagattgggatgaagggagaaaggaggaggggtaaaggtcacgatgggttgtaccaaggattgagcacagccactaaagatacctatgatgcgctccacatgcaggccctgccgccaaga

SEQ ID NO: 24085 - DNA, 849 bp, synthetic construct
  source 1..849: mol_type = other DNA
gccaatcctaccgtgacactgttccctccaagcagcgaagaactccaggccaacaaggccacacttgtgtgcctgatctccgacttctaccctggggctgtgacagtggcttggaaggccgatggatctcctgtgaaagccggcgtggaaaccaccaagccatccaagcagagcaacaacaaatacgccgccagctcctacctgagcctgacacctgagcagtggaagtcccacagatcctacagctgccaagtgacccacgaaggcagcaccgtggaaaagacagtggcccctacagagtgcagcgaagtgaaaaccgactccaccgaccacgtgaagcccaaagagacagagaacaccaagcagcccagcaagagctgccacaagcccaaggccatcgtgcacaccgagaaagtgaacatgatgagcctgaccgtgctgggcctgcggatgctgttcgccaaaaccgtggccgtgaacttcctgctgaccgccaagctgttcttcctccgggttaagttttccagatccgcagacgcacccgcttaccaacaagggcagaaccaactctacaatgaacttaatttggggcggagggaagagtacgacgttctggacaaaaggaggggacgagatcccgagatgggcggaaagcctcagcgaaggaagaatccgcaagaggggctttataacgaactccagaaagataaaatggcagaagcctatagtgagattgggatgaagggagaaaggaggaggggtaaaggtcacgatgggttgtaccaaggattgagcacagccactaaagatacctatgatgcgctccacatgcaggccctgccgccaaga

SEQ ID NO: 24086 - DNA, 846 bp, synthetic construct
  source 1..846: mol_type = other DNA
aatcctaccgtgacactgttccctccaagcagcgaagaactccaggccaacaaggccacacttgtgtgcctgatctccgacttctaccctggggctgtgacagtggcttggaaggccgatggatctcctgtgaaagccggcgtggaaaccaccaagccatccaagcagagcaacaacaaatacgccgccagctcctacctgagcctgacacctgagcagtggaagtcccacagatcctacagctgccaagtgacccacgaaggcagcaccgtggaaaagacagtggcccctacagagtgcagcgaagtgaaaaccgactccaccgaccacgtgaagcccaaagagacagagaacaccaagcagcccagcaagagctgccacaagcccaaggccatcgtgcacaccgagaaagtgaacatgatgagcctgaccgtgctgggcctgcggatgctgttcgccaaaaccgtggccgtgaacttcctgctgaccgccaagctgttcttcctccgggttaagttttccagatccgcagacgcacccgcttaccaacaagggcagaaccaactctacaatgaacttaatttggggcggagggaagagtacgacgttctggacaaaaggaggggacgagatcccgagatgggcggaaagcctcagcgaaggaagaatccgcaagaggggctttataacgaactccagaaagataaaatggcagaagcctatagtgagattgggatgaagggagaaaggaggaggggtaaaggtcacgatgggttgtaccaaggattgagcacagccactaaagatacctatgatgcgctccacatgcaggccctgccgccaaga

SEQ ID NO: 24087 - DNA, 843 bp, synthetic construct
  source 1..843: mol_type = other DNA
cctaccgtgacactgttccctccaagcagcgaagaactccaggccaacaaggccacacttgtgtgcctgatctccgacttctaccctggggctgtgacagtggcttggaaggccgatggatctcctgtgaaagccggcgtggaaaccaccaagccatccaagcagagcaacaacaaatacgccgccagctcctacctgagcctgacacctgagcagtggaagtcccacagatcctacagctgccaagtgacccacgaaggcagcaccgtggaaaagacagtggcccctacagagtgcagcgaagtgaaaaccgactccaccgaccacgtgaagcccaaagagacagagaacaccaagcagcccagcaagagctgccacaagcccaaggccatcgtgcacaccgagaaagtgaacatgatgagcctgaccgtgctgggcctgcggatgctgttcgccaaaaccgtggccgtgaacttcctgctgaccgccaagctgttcttcctccgggttaagttttccagatccgcagacgcacccgcttaccaacaagggcagaaccaactctacaatgaacttaatttggggcggagggaagagtacgacgttctggacaaaaggaggggacgagatcccgagatgggcggaaagcctcagcgaaggaagaatccgcaagaggggctttataacgaactccagaaagataaaatggcagaagcctatagtgagattgggatgaagggagaaaggaggaggggtaaaggtcacgatgggttgtaccaaggattgagcacagccactaaagatacctatgatgcgctccacatgcaggccctgccgccaaga

SEQ ID NO: 24088 - DNA, 840 bp, synthetic construct
  source 1..840: mol_type = other DNA
accgtgacactgttccctccaagcagcgaagaactccaggccaacaaggccacacttgtgtgcctgatctccgacttctaccctggggctgtgacagtggcttggaaggccgatggatctcctgtgaaagccggcgtggaaaccaccaagccatccaagcagagcaacaacaaatacgccgccagctcctacctgagcctgacacctgagcagtggaagtcccacagatcctacagctgccaagtgacccacgaaggcagcaccgtggaaaagacagtggcccctacagagtgcagcgaagtgaaaaccgactccaccgaccacgtgaagcccaaagagacagagaacaccaagcagcccagcaagagctgccacaagcccaaggccatcgtgcacaccgagaaagtgaacatgatgagcctgaccgtgctgggcctgcggatgctgttcgccaaaaccgtggccgtgaacttcctgctgaccgccaagctgttcttcctccgggttaagttttccagatccgcagacgcacccgcttaccaacaagggcagaaccaactctacaatgaacttaatttggggcggagggaagagtacgacgttctggacaaaaggaggggacgagatcccgagatgggcggaaagcctcagcgaaggaagaatccgcaagaggggctttataacgaactccagaaagataaaatggcagaagcctatagtgagattgggatgaagggagaaaggaggaggggtaaaggtcacgatgggttgtaccaaggattgagcacagccactaaagatacctatgatgcgctccacatgcaggccctgccgccaaga

SEQ ID NO: 24089 - DNA, 837 bp, synthetic construct
  source 1..837: mol_type = other DNA
gtgacactgttccctccaagcagcgaagaactccaggccaacaaggccacacttgtgtgcctgatctccgacttctaccctggggctgtgacagtggcttggaaggccgatggatctcctgtgaaagccggcgtggaaaccaccaagccatccaagcagagcaacaacaaatacgccgccagctcctacctgagcctgacacctgagcagtggaagtcccacagatcctacagctgccaagtgacccacgaaggcagcaccgtggaaaagacagtggcccctacagagtgcagcgaagtgaaaaccgactccaccgaccacgtgaagcccaaagagacagagaacaccaagcagcccagcaagagctgccacaagcccaaggccatcgtgcacaccgagaaagtgaacatgatgagcctgaccgtgctgggcctgcggatgctgttcgccaaaaccgtggccgtgaacttcctgctgaccgccaagctgttcttcctccgggttaagttttccagatccgcagacgcacccgcttaccaacaagggcagaaccaactctacaatgaacttaatttggggcggagggaagagtacgacgttctggacaaaaggaggggacgagatcccgagatgggcggaaagcctcagcgaaggaagaatccgcaagaggggctttataacgaactccagaaagataaaatggcagaagcctatagtgagattgggatgaagggagaaaggaggaggggtaaaggtcacgatgggttgtaccaaggattgagcacagccactaaagatacctatgatgcgctccacatgcaggccctgccgccaaga

SEQ ID NO: 24090 - DNA, 834 bp, synthetic construct
  source 1..834: mol_type = other DNA
acactgttccctccaagcagcgaagaactccaggccaacaaggccacacttgtgtgcctgatctccgacttctaccctggggctgtgacagtggcttggaaggccgatggatctcctgtgaaagccggcgtggaaaccaccaagccatccaagcagagcaacaacaaatacgccgccagctcctacctgagcctgacacctgagcagtggaagtcccacagatcctacagctgccaagtgacccacgaaggcagcaccgtggaaaagacagtggcccctacagagtgcagcgaagtgaaaaccgactccaccgaccacgtgaagcccaaagagacagagaacaccaagcagcccagcaagagctgccacaagcccaaggccatcgtgcacaccgagaaagtgaacatgatgagcctgaccgtgctgggcctgcggatgctgttcgccaaaaccgtggccgtgaacttcctgctgaccgccaagctgttcttcctccgggttaagttttccagatccgcagacgcacccgcttaccaacaagggcagaaccaactctacaatgaacttaatttggggcggagggaagagtacgacgttctggacaaaaggaggggacgagatcccgagatgggcggaaagcctcagcgaaggaagaatccgcaagaggggctttataacgaactccagaaagataaaatggcagaagcctatagtgagattgggatgaagggagaaaggaggaggggtaaaggtcacgatgggttgtaccaaggattgagcacagccactaaagatacctatgatgcgctccacatgcaggccctgccgccaaga

SEQ ID NO: 24091 - DNA, 831 bp, synthetic construct
  source 1..831: mol_type = other DNA
ctgttccctccaagcagcgaagaactccaggccaacaaggccacacttgtgtgcctgatctccgacttctaccctggggctgtgacagtggcttggaaggccgatggatctcctgtgaaagccggcgtggaaaccaccaagccatccaagcagagcaacaacaaatacgccgccagctcctacctgagcctgacacctgagcagtggaagtcccacagatcctacagctgccaagtgacccacgaaggcagcaccgtggaaaagacagtggcccctacagagtgcagcgaagtgaaaaccgactccaccgaccacgtgaagcccaaagagacagagaacaccaagcagcccagcaagagctgccacaagcccaaggccatcgtgcacaccgagaaagtgaacatgatgagcctgaccgtgctgggcctgcggatgctgttcgccaaaaccgtggccgtgaacttcctgctgaccgccaagctgttcttcctccgggttaagttttccagatccgcagacgcacccgcttaccaacaagggcagaaccaactctacaatgaacttaatttggggcggagggaagagtacgacgttctggacaaaaggaggggacgagatcccgagatgggcggaaagcctcagcgaaggaagaatccgcaagaggggctttataacgaactccagaaagataaaatggcagaagcctatagtgagattgggatgaagggagaaaggaggaggggtaaaggtcacgatgggttgtaccaaggattgagcacagccactaaagatacctatgatgcgctccacatgcaggccctgccgccaaga

SEQ ID NO: 24092 - DNA, 816 bp, synthetic construct
  source 1..816: mol_type = other DNA
ggacagcctaaggccaatcctaccgtgacactgttccctccaagcagcgaagaactccaggccaacaaggccacacttgtgtgcctgatctccgacttctaccctggggctgtgacagtggcttggaaggccgatggatctcctgtgaaagccggcgtggaaaccaccaagccatccaagcagagcaacaacaaatacgccgccagctcctacctgagcctgacacctgagcagtggaagtcccacagatcctacagctgccaagtgacccacgaaggcagcaccgtggaaaagacagtggcccctacagagtgcagcggcagagccgattgcggctttaccagcgagagctaccagcagggcgtgctgagcgccaccatcctgtacgagatcctgctgggcaaggccaccctgtacgccgtgctggtgtctgccctggtgctgatggctatggtcaagcggaaggacagccggggacgggttaagttttccagatccgcagacgcacccgcttaccaacaagggcagaaccaactctacaatgaacttaatttggggcggagggaagagtacgacgttctggacaaaaggaggggacgagatcccgagatgggcggaaagcctcagcgaaggaagaatccgcaagaggggctttataacgaactccagaaagataaaatggcagaagcctatagtgagattgggatgaagggagaaaggaggaggggtaaaggtcacgatgggttgtaccaaggattgagcacagccactaaagatacctatgatgcgctccacatgcaggccctgccgccaaga

SEQ ID NO: 24093 - DNA, 813 bp, synthetic construct
  source 1..813: mol_type = other DNA
cagcctaaggccaatcctaccgtgacactgttccctccaagcagcgaagaactccaggccaacaaggccacacttgtgtgcctgatctccgacttctaccctggggctgtgacagtggcttggaaggccgatggatctcctgtgaaagccggcgtggaaaccaccaagccatccaagcagagcaacaacaaatacgccgccagctcctacctgagcctgacacctgagcagtggaagtcccacagatcctacagctgccaagtgacccacgaaggcagcaccgtggaaaagacagtggcccctacagagtgcagcggcagagccgattgcggctttaccagcgagagctaccagcagggcgtgctgagcgccaccatcctgtacgagatcctgctgggcaaggccaccctgtacgccgtgctggtgtctgccctggtgctgatggctatggtcaagcggaaggacagccggggacgggttaagttttccagatccgcagacgcacccgcttaccaacaagggcagaaccaactctacaatgaacttaatttggggcggagggaagagtacgacgttctggacaaaaggaggggacgagatcccgagatgggcggaaagcctcagcgaaggaagaatccgcaagaggggctttataacgaactccagaaagataaaatggcagaagcctatagtgagattgggatgaagggagaaaggaggaggggtaaaggtcacgatgggttgtaccaaggattgagcacagccactaaagatacctatgatgcgctccacatgcaggccctgccgccaaga

SEQ ID NO: 24094 - DNA, 810 bp, synthetic construct
  source 1..810: mol_type = other DNA
cctaaggccaatcctaccgtgacactgttccctccaagcagcgaagaactccaggccaacaaggccacacttgtgtgcctgatctccgacttctaccctggggctgtgacagtggcttggaaggccgatggatctcctgtgaaagccggcgtggaaaccaccaagccatccaagcagagcaacaacaaatacgccgccagctcctacctgagcctgacacctgagcagtggaagtcccacagatcctacagctgccaagtgacccacgaaggcagcaccgtggaaaagacagtggcccctacagagtgcagcggcagagccgattgcggctttaccagcgagagctaccagcagggcgtgctgagcgccaccatcctgtacgagatcctgctgggcaaggccaccctgtacgccgtgctggtgtctgccctggtgctgatggctatggtcaagcggaaggacagccggggacgggttaagttttccagatccgcagacgcacccgcttaccaacaagggcagaaccaactctacaatgaacttaatttggggcggagggaagagtacgacgttctggacaaaaggaggggacgagatcccgagatgggcggaaagcctcagcgaaggaagaatccgcaagaggggctttataacgaactccagaaagataaaatggcagaagcctatagtgagattgggatgaagggagaaaggaggaggggtaaaggtcacgatgggttgtaccaaggattgagcacagccactaaagatacctatgatgcgctccacatgcaggccctgccgccaaga

SEQ ID NO: 24095 - DNA, 807 bp, synthetic construct
  source 1..807: mol_type = other DNA
aaggccaatcctaccgtgacactgttccctccaagcagcgaagaactccaggccaacaaggccacacttgtgtgcctgatctccgacttctaccctggggctgtgacagtggcttggaaggccgatggatctcctgtgaaagccggcgtggaaaccaccaagccatccaagcagagcaacaacaaatacgccgccagctcctacctgagcctgacacctgagcagtggaagtcccacagatcctacagctgccaagtgacccacgaaggcagcaccgtggaaaagacagtggcccctacagagtgcagcggcagagccgattgcggctttaccagcgagagctaccagcagggcgtgctgagcgccaccatcctgtacgagatcctgctgggcaaggccaccctgtacgccgtgctggtgtctgccctggtgctgatggctatggtcaagcggaaggacagccggggacgggttaagttttccagatccgcagacgcacccgcttaccaacaagggcagaaccaactctacaatgaacttaatttggggcggagggaagagtacgacgttctggacaaaaggaggggacgagatcccgagatgggcggaaagcctcagcgaaggaagaatccgcaagaggggctttataacgaactccagaaagataaaatggcagaagcctatagtgagattgggatgaagggagaaaggaggaggggtaaaggtcacgatgggttgtaccaaggattgagcacagccactaaagatacctatgatgcgctccacatgcaggccctgccgccaaga

SEQ ID NO: 24096 - DNA, 804 bp, synthetic construct
  source 1..804: mol_type = other DNA
gccaatcctaccgtgacactgttccctccaagcagcgaagaactccaggccaacaaggccacacttgtgtgcctgatctccgacttctaccctggggctgtgacagtggcttggaaggccgatggatctcctgtgaaagccggcgtggaaaccaccaagccatccaagcagagcaacaacaaatacgccgccagctcctacctgagcctgacacctgagcagtggaagtcccacagatcctacagctgccaagtgacccacgaaggcagcaccgtggaaaagacagtggcccctacagagtgcagcggcagagccgattgcggctttaccagcgagagctaccagcagggcgtgctgagcgccaccatcctgtacgagatcctgctgggcaaggccaccctgtacgccgtgctggtgtctgccctggtgctgatggctatggtcaagcggaaggacagccggggacgggttaagttttccagatccgcagacgcacccgcttaccaacaagggcagaaccaactctacaatgaacttaatttggggcggagggaagagtacgacgttctggacaaaaggaggggacgagatcccgagatgggcggaaagcctcagcgaaggaagaatccgcaagaggggctttataacgaactccagaaagataaaatggcagaagcctatagtgagattgggatgaagggagaaaggaggaggggtaaaggtcacgatgggttgtaccaaggattgagcacagccactaaagatacctatgatgcgctccacatgcaggccctgccgccaaga

SEQ ID NO: 24097 - DNA, 801 bp, synthetic construct
  source 1..801: mol_type = other DNA
aatcctaccgtgacactgttccctccaagcagcgaagaactccaggccaacaaggccacacttgtgtgcctgatctccgacttctaccctggggctgtgacagtggcttggaaggccgatggatctcctgtgaaagccggcgtggaaaccaccaagccatccaagcagagcaacaacaaatacgccgccagctcctacctgagcctgacacctgagcagtggaagtcccacagatcctacagctgccaagtgacccacgaaggcagcaccgtggaaaagacagtggcccctacagagtgcagcggcagagccgattgcggctttaccagcgagagctaccagcagggcgtgctgagcgccaccatcctgtacgagatcctgctgggcaaggccaccctgtacgccgtgctggtgtctgccctggtgctgatggctatggtcaagcggaaggacagccggggacgggttaagttttccagatccgcagacgcacccgcttaccaacaagggcagaaccaactctacaatgaacttaatttggggcggagggaagagtacgacgttctggacaaaaggaggggacgagatcccgagatgggcggaaagcctcagcgaaggaagaatccgcaagaggggctttataacgaactccagaaagataaaatggcagaagcctatagtgagattgggatgaagggagaaaggaggaggggtaaaggtcacgatgggttgtaccaaggattgagcacagccactaaagatacctatgatgcgctccacatgcaggccctgccgccaaga

SEQ ID NO: 24098 - DNA, 798 bp, synthetic construct
  source 1..798: mol_type = other DNA
cctaccgtgacactgttccctccaagcagcgaagaactccaggccaacaaggccacacttgtgtgcctgatctccgacttctaccctggggctgtgacagtggcttggaaggccgatggatctcctgtgaaagccggcgtggaaaccaccaagccatccaagcagagcaacaacaaatacgccgccagctcctacctgagcctgacacctgagcagtggaagtcccacagatcctacagctgccaagtgacccacgaaggcagcaccgtggaaaagacagtggcccctacagagtgcagcggcagagccgattgcggctttaccagcgagagctaccagcagggcgtgctgagcgccaccatcctgtacgagatcctgctgggcaaggccaccctgtacgccgtgctggtgtctgccctggtgctgatggctatggtcaagcggaaggacagccggggacgggttaagttttccagatccgcagacgcacccgcttaccaacaagggcagaaccaactctacaatgaacttaatttggggcggagggaagagtacgacgttctggacaaaaggaggggacgagatcccgagatgggcggaaagcctcagcgaaggaagaatccgcaagaggggctttataacgaactccagaaagataaaatggcagaagcctatagtgagattgggatgaagggagaaaggaggaggggtaaaggtcacgatgggttgtaccaaggattgagcacagccactaaagatacctatgatgcgctccacatgcaggccctgccgccaaga

SEQ ID NO: 24099 - DNA, 795 bp, synthetic construct
  source 1..795: mol_type = other DNA
accgtgacactgttccctccaagcagcgaagaactccaggccaacaaggccacacttgtgtgcctgatctccgacttctaccctggggctgtgacagtggcttggaaggccgatggatctcctgtgaaagccggcgtggaaaccaccaagccatccaagcagagcaacaacaaatacgccgccagctcctacctgagcctgacacctgagcagtggaagtcccacagatcctacagctgccaagtgacccacgaaggcagcaccgtggaaaagacagtggcccctacagagtgcagcggcagagccgattgcggctttaccagcgagagctaccagcagggcgtgctgagcgccaccatcctgtacgagatcctgctgggcaaggccaccctgtacgccgtgctggtgtctgccctggtgctgatggctatggtcaagcggaaggacagccggggacgggttaagttttccagatccgcagacgcacccgcttaccaacaagggcagaaccaactctacaatgaacttaatttggggcggagggaagagtacgacgttctggacaaaaggaggggacgagatcccgagatgggcggaaagcctcagcgaaggaagaatccgcaagaggggctttataacgaactccagaaagataaaatggcagaagcctatagtgagattgggatgaagggagaaaggaggaggggtaaaggtcacgatgggttgtaccaaggattgagcacagccactaaagatacctatgatgcgctccacatgcaggccctgccgccaaga

SEQ ID NO: 24100 - DNA, 792 bp, synthetic construct
  source 1..792: mol_type = other DNA
gtgacactgttccctccaagcagcgaagaactccaggccaacaaggccacacttgtgtgcctgatctccgacttctaccctggggctgtgacagtggcttggaaggccgatggatctcctgtgaaagccggcgtggaaaccaccaagccatccaagcagagcaacaacaaatacgccgccagctcctacctgagcctgacacctgagcagtggaagtcccacagatcctacagctgccaagtgacccacgaaggcagcaccgtggaaaagacagtggcccctacagagtgcagcggcagagccgattgcggctttaccagcgagagctaccagcagggcgtgctgagcgccaccatcctgtacgagatcctgctgggcaaggccaccctgtacgccgtgctggtgtctgccctggtgctgatggctatggtcaagcggaaggacagccggggacgggttaagttttccagatccgcagacgcacccgcttaccaacaagggcagaaccaactctacaatgaacttaatttggggcggagggaagagtacgacgttctggacaaaaggaggggacgagatcccgagatgggcggaaagcctcagcgaaggaagaatccgcaagaggggctttataacgaactccagaaagataaaatggcagaagcctatagtgagattgggatgaagggagaaaggaggaggggtaaaggtcacgatgggttgtaccaaggattgagcacagccactaaagatacctatgatgcgctccacatgcaggccctgccgccaaga

SEQ ID NO: 24101 - DNA, 789 bp, synthetic construct
  source 1..789: mol_type = other DNA
acactgttccctccaagcagcgaagaactccaggccaacaaggccacacttgtgtgcctgatctccgacttctaccctggggctgtgacagtggcttggaaggccgatggatctcctgtgaaagccggcgtggaaaccaccaagccatccaagcagagcaacaacaaatacgccgccagctcctacctgagcctgacacctgagcagtggaagtcccacagatcctacagctgccaagtgacccacgaaggcagcaccgtggaaaagacagtggcccctacagagtgcagcggcagagccgattgcggctttaccagcgagagctaccagcagggcgtgctgagcgccaccatcctgtacgagatcctgctgggcaaggccaccctgtacgccgtgctggtgtctgccctggtgctgatggctatggtcaagcggaaggacagccggggacgggttaagttttccagatccgcagacgcacccgcttaccaacaagggcagaaccaactctacaatgaacttaatttggggcggagggaagagtacgacgttctggacaaaaggaggggacgagatcccgagatgggcggaaagcctcagcgaaggaagaatccgcaagaggggctttataacgaactccagaaagataaaatggcagaagcctatagtgagattgggatgaagggagaaaggaggaggggtaaaggtcacgatgggttgtaccaaggattgagcacagccactaaagatacctatgatgcgctccacatgcaggccctgccgccaaga

SEQ ID NO: 24102 - DNA, 786 bp, synthetic construct
  source 1..786: mol_type = other DNA
ctgttccctccaagcagcgaagaactccaggccaacaaggccacacttgtgtgcctgatctccgacttctaccctggggctgtgacagtggcttggaaggccgatggatctcctgtgaaagccggcgtggaaaccaccaagccatccaagcagagcaacaacaaatacgccgccagctcctacctgagcctgacacctgagcagtggaagtcccacagatcctacagctgccaagtgacccacgaaggcagcaccgtggaaaagacagtggcccctacagagtgcagcggcagagccgattgcggctttaccagcgagagctaccagcagggcgtgctgagcgccaccatcctgtacgagatcctgctgggcaaggccaccctgtacgccgtgctggtgtctgccctggtgctgatggctatggtcaagcggaaggacagccggggacgggttaagttttccagatccgcagacgcacccgcttaccaacaagggcagaaccaactctacaatgaacttaatttggggcggagggaagagtacgacgttctggacaaaaggaggggacgagatcccgagatgggcggaaagcctcagcgaaggaagaatccgcaagaggggctttataacgaactccagaaagataaaatggcagaagcctatagtgagattgggatgaagggagaaaggaggaggggtaaaggtcacgatgggttgtaccaaggattgagcacagccactaaagatacctatgatgcgctccacatgcaggccctgccgccaaga

SEQ ID NO: 24103 - DNA, 837 bp, synthetic construct
  source 1..837: mol_type = other DNA
ggacagcctaaggccaatcctaccgtgacactgttccctccaagcagcgaagaactccaggccaacaaggccacacttgtgtgcctgatctccgacttctaccctggggctgtgacagtggcttggaaggccgatggatctcctgtgaaagccggcgtggaaaccaccaagccatccaagcagagcaacaacaaatacgccgccagctcctacctgagcctgacacctgagcagtggaagtcccacagatcctacagctgccaagtgacccacgaaggcagcaccgtggaaaagacagtggcccctacagagtgcagcatccccgaggacacattcttcccaagccccgagagcagctgcgacgtgaagctggtggaaaagagcttcgagacagacaccaacctgaacttccagaacctgagcgtgatcggcttcagaatcctgctgctgaaagtggccggctttaacctgctgatgaccctgcggctgtggtccagccgggttaagttttccagatccgcagacgcacccgcttaccaacaagggcagaaccaactctacaatgaacttaatttggggcggagggaagagtacgacgttctggacaaaaggaggggacgagatcccgagatgggcggaaagcctcagcgaaggaagaatccgcaagaggggctttataacgaactccagaaagataaaatggcagaagcctatagtgagattgggatgaagggagaaaggaggaggggtaaaggtcacgatgggttgtaccaaggattgagcacagccactaaagatacctatgatgcgctccacatgcaggccctgccgccaaga

SEQ ID NO: 24104 - DNA, 834 bp, synthetic construct
  source 1..834: mol_type = other DNA
cagcctaaggccaatcctaccgtgacactgttccctccaagcagcgaagaactccaggccaacaaggccacacttgtgtgcctgatctccgacttctaccctggggctgtgacagtggcttggaaggccgatggatctcctgtgaaagccggcgtggaaaccaccaagccatccaagcagagcaacaacaaatacgccgccagctcctacctgagcctgacacctgagcagtggaagtcccacagatcctacagctgccaagtgacccacgaaggcagcaccgtggaaaagacagtggcccctacagagtgcagcatccccgaggacacattcttcccaagccccgagagcagctgcgacgtgaagctggtggaaaagagcttcgagacagacaccaacctgaacttccagaacctgagcgtgatcggcttcagaatcctgctgctgaaagtggccggctttaacctgctgatgaccctgcggctgtggtccagccgggttaagttttccagatccgcagacgcacccgcttaccaacaagggcagaaccaactctacaatgaacttaatttggggcggagggaagagtacgacgttctggacaaaaggaggggacgagatcccgagatgggcggaaagcctcagcgaaggaagaatccgcaagaggggctttataacgaactccagaaagataaaatggcagaagcctatagtgagattgggatgaagggagaaaggaggaggggtaaaggtcacgatgggttgtaccaaggattgagcacagccactaaagatacctatgatgcgctccacatgcaggccctgccgccaaga

SEQ ID NO: 24105 - DNA, 831 bp, synthetic construct
  source 1..831: mol_type = other DNA
cctaaggccaatcctaccgtgacactgttccctccaagcagcgaagaactccaggccaacaaggccacacttgtgtgcctgatctccgacttctaccctggggctgtgacagtggcttggaaggccgatggatctcctgtgaaagccggcgtggaaaccaccaagccatccaagcagagcaacaacaaatacgccgccagctcctacctgagcctgacacctgagcagtggaagtcccacagatcctacagctgccaagtgacccacgaaggcagcaccgtggaaaagacagtggcccctacagagtgcagcatccccgaggacacattcttcccaagccccgagagcagctgcgacgtgaagctggtggaaaagagcttcgagacagacaccaacctgaacttccagaacctgagcgtgatcggcttcagaatcctgctgctgaaagtggccggctttaacctgctgatgaccctgcggctgtggtccagccgggttaagttttccagatccgcagacgcacccgcttaccaacaagggcagaaccaactctacaatgaacttaatttggggcggagggaagagtacgacgttctggacaaaaggaggggacgagatcccgagatgggcggaaagcctcagcgaaggaagaatccgcaagaggggctttataacgaactccagaaagataaaatggcagaagcctatagtgagattgggatgaagggagaaaggaggaggggtaaaggtcacgatgggttgtaccaaggattgagcacagccactaaagatacctatgatgcgctccacatgcaggccctgccgccaaga

SEQ ID NO: 24106 - DNA, 828 bp, synthetic construct
  source 1..828: mol_type = other DNA
aaggccaatcctaccgtgacactgttccctccaagcagcgaagaactccaggccaacaaggccacacttgtgtgcctgatctccgacttctaccctggggctgtgacagtggcttggaaggccgatggatctcctgtgaaagccggcgtggaaaccaccaagccatccaagcagagcaacaacaaatacgccgccagctcctacctgagcctgacacctgagcagtggaagtcccacagatcctacagctgccaagtgacccacgaaggcagcaccgtggaaaagacagtggcccctacagagtgcagcatccccgaggacacattcttcccaagccccgagagcagctgcgacgtgaagctggtggaaaagagcttcgagacagacaccaacctgaacttccagaacctgagcgtgatcggcttcagaatcctgctgctgaaagtggccggctttaacctgctgatgaccctgcggctgtggtccagccgggttaagttttccagatccgcagacgcacccgcttaccaacaagggcagaaccaactctacaatgaacttaatttggggcggagggaagagtacgacgttctggacaaaaggaggggacgagatcccgagatgggcggaaagcctcagcgaaggaagaatccgcaagaggggctttataacgaactccagaaagataaaatggcagaagcctatagtgagattgggatgaagggagaaaggaggaggggtaaaggtcacgatgggttgtaccaaggattgagcacagccactaaagatacctatgatgcgctccacatgcaggccctgccgccaaga

SEQ ID NO: 24107 - DNA, 825 bp, synthetic construct
  source 1..825: mol_type = other DNA
gccaatcctaccgtgacactgttccctccaagcagcgaagaactccaggccaacaaggccacacttgtgtgcctgatctccgacttctaccctggggctgtgacagtggcttggaaggccgatggatctcctgtgaaagccggcgtggaaaccaccaagccatccaagcagagcaacaacaaatacgccgccagctcctacctgagcctgacacctgagcagtggaagtcccacagatcctacagctgccaagtgacccacgaaggcagcaccgtggaaaagacagtggcccctacagagtgcagcatccccgaggacacattcttcccaagccccgagagcagctgcgacgtgaagctggtggaaaagagcttcgagacagacaccaacctgaacttccagaacctgagcgtgatcggcttcagaatcctgctgctgaaagtggccggctttaacctgctgatgaccctgcggctgtggtccagccgggttaagttttccagatccgcagacgcacccgcttaccaacaagggcagaaccaactctacaatgaacttaatttggggcggagggaagagtacgacgttctggacaaaaggaggggacgagatcccgagatgggcggaaagcctcagcgaaggaagaatccgcaagaggggctttataacgaactccagaaagataaaatggcagaagcctatagtgagattgggatgaagggagaaaggaggaggggtaaaggtcacgatgggttgtaccaaggattgagcacagccactaaagatacctatgatgcgctccacatgcaggccctgccgccaaga

SEQ ID NO: 24108 - DNA, 822 bp, synthetic construct
  source 1..822: mol_type = other DNA
aatcctaccgtgacactgttccctccaagcagcgaagaactccaggccaacaaggccacacttgtgtgcctgatctccgacttctaccctggggctgtgacagtggcttggaaggccgatggatctcctgtgaaagccggcgtggaaaccaccaagccatccaagcagagcaacaacaaatacgccgccagctcctacctgagcctgacacctgagcagtggaagtcccacagatcctacagctgccaagtgacccacgaaggcagcaccgtggaaaagacagtggcccctacagagtgcagcatccccgaggacacattcttcccaagccccgagagcagctgcgacgtgaagctggtggaaaagagcttcgagacagacaccaacctgaacttccagaacctgagcgtgatcggcttcagaatcctgctgctgaaagtggccggctttaacctgctgatgaccctgcggctgtggtccagccgggttaagttttccagatccgcagacgcacccgcttaccaacaagggcagaaccaactctacaatgaacttaatttggggcggagggaagagtacgacgttctggacaaaaggaggggacgagatcccgagatgggcggaaagcctcagcgaaggaagaatccgcaagaggggctttataacgaactccagaaagataaaatggcagaagcctatagtgagattgggatgaagggagaaaggaggaggggtaaaggtcacgatgggttgtaccaaggattgagcacagccactaaagatacctatgatgcgctccacatgcaggccctgccgccaaga

SEQ ID NO: 24109 - DNA, 819 bp, synthetic construct
  source 1..819: mol_type = other DNA
cctaccgtgacactgttccctccaagcagcgaagaactccaggccaacaaggccacacttgtgtgcctgatctccgacttctaccctggggctgtgacagtggcttggaaggccgatggatctcctgtgaaagccggcgtggaaaccaccaagccatccaagcagagcaacaacaaatacgccgccagctcctacctgagcctgacacctgagcagtggaagtcccacagatcctacagctgccaagtgacccacgaaggcagcaccgtggaaaagacagtggcccctacagagtgcagcatccccgaggacacattcttcccaagccccgagagcagctgcgacgtgaagctggtggaaaagagcttcgagacagacaccaacctgaacttccagaacctgagcgtgatcggcttcagaatcctgctgctgaaagtggccggctttaacctgctgatgaccctgcggctgtggtccagccgggttaagttttccagatccgcagacgcacccgcttaccaacaagggcagaaccaactctacaatgaacttaatttggggcggagggaagagtacgacgttctggacaaaaggaggggacgagatcccgagatgggcggaaagcctcagcgaaggaagaatccgcaagaggggctttataacgaactccagaaagataaaatggcagaagcctatagtgagattgggatgaagggagaaaggaggaggggtaaaggtcacgatgggttgtaccaaggattgagcacagccactaaagatacctatgatgcgctccacatgcaggccctgccgccaaga

SEQ ID NO: 24110 - DNA, 816 bp, synthetic construct
  source 1..816: mol_type = other DNA
accgtgacactgttccctccaagcagcgaagaactccaggccaacaaggccacacttgtgtgcctgatctccgacttctaccctggggctgtgacagtggcttggaaggccgatggatctcctgtgaaagccggcgtggaaaccaccaagccatccaagcagagcaacaacaaatacgccgccagctcctacctgagcctgacacctgagcagtggaagtcccacagatcctacagctgccaagtgacccacgaaggcagcaccgtggaaaagacagtggcccctacagagtgcagcatccccgaggacacattcttcccaagccccgagagcagctgcgacgtgaagctggtggaaaagagcttcgagacagacaccaacctgaacttccagaacctgagcgtgatcggcttcagaatcctgctgctgaaagtggccggctttaacctgctgatgaccctgcggctgtggtccagccgggttaagttttccagatccgcagacgcacccgcttaccaacaagggcagaaccaactctacaatgaacttaatttggggcggagggaagagtacgacgttctggacaaaaggaggggacgagatcccgagatgggcggaaagcctcagcgaaggaagaatccgcaagaggggctttataacgaactccagaaagataaaatggcagaagcctatagtgagattgggatgaagggagaaaggaggaggggtaaaggtcacgatgggttgtaccaaggattgagcacagccactaaagatacctatgatgcgctccacatgcaggccctgccgccaaga

SEQ ID NO: 24111 - DNA, 813 bp, synthetic construct
  source 1..813: mol_type = other DNA
gtgacactgttccctccaagcagcgaagaactccaggccaacaaggccacacttgtgtgcctgatctccgacttctaccctggggctgtgacagtggcttggaaggccgatggatctcctgtgaaagccggcgtggaaaccaccaagccatccaagcagagcaacaacaaatacgccgccagctcctacctgagcctgacacctgagcagtggaagtcccacagatcctacagctgccaagtgacccacgaaggcagcaccgtggaaaagacagtggcccctacagagtgcagcatccccgaggacacattcttcccaagccccgagagcagctgcgacgtgaagctggtggaaaagagcttcgagacagacaccaacctgaacttccagaacctgagcgtgatcggcttcagaatcctgctgctgaaagtggccggctttaacctgctgatgaccctgcggctgtggtccagccgggttaagttttccagatccgcagacgcacccgcttaccaacaagggcagaaccaactctacaatgaacttaatttggggcggagggaagagtacgacgttctggacaaaaggaggggacgagatcccgagatgggcggaaagcctcagcgaaggaagaatccgcaagaggggctttataacgaactccagaaagataaaatggcagaagcctatagtgagattgggatgaagggagaaaggaggaggggtaaaggtcacgatgggttgtaccaaggattgagcacagccactaaagatacctatgatgcgctccacatgcaggccctgccgccaaga

SEQ ID NO: 24112 - DNA, 810 bp, synthetic construct
  source 1..810: mol_type = other DNA
acactgttccctccaagcagcgaagaactccaggccaacaaggccacacttgtgtgcctgatctccgacttctaccctggggctgtgacagtggcttggaaggccgatggatctcctgtgaaagccggcgtggaaaccaccaagccatccaagcagagcaacaacaaatacgccgccagctcctacctgagcctgacacctgagcagtggaagtcccacagatcctacagctgccaagtgacccacgaaggcagcaccgtggaaaagacagtggcccctacagagtgcagcatccccgaggacacattcttcccaagccccgagagcagctgcgacgtgaagctggtggaaaagagcttcgagacagacaccaacctgaacttccagaacctgagcgtgatcggcttcagaatcctgctgctgaaagtggccggctttaacctgctgatgaccctgcggctgtggtccagccgggttaagttttccagatccgcagacgcacccgcttaccaacaagggcagaaccaactctacaatgaacttaatttggggcggagggaagagtacgacgttctggacaaaaggaggggacgagatcccgagatgggcggaaagcctcagcgaaggaagaatccgcaagaggggctttataacgaactccagaaagataaaatggcagaagcctatagtgagattgggatgaagggagaaaggaggaggggtaaaggtcacgatgggttgtaccaaggattgagcacagccactaaagatacctatgatgcgctccacatgcaggccctgccgccaaga

SEQ ID NO: 24113 - DNA, 807 bp, synthetic construct
  source 1..807: mol_type = other DNA
ctgttccctccaagcagcgaagaactccaggccaacaaggccacacttgtgtgcctgatctccgacttctaccctggggctgtgacagtggcttggaaggccgatggatctcctgtgaaagccggcgtggaaaccaccaagccatccaagcagagcaacaacaaatacgccgccagctcctacctgagcctgacacctgagcagtggaagtcccacagatcctacagctgccaagtgacccacgaaggcagcaccgtggaaaagacagtggcccctacagagtgcagcatccccgaggacacattcttcccaagccccgagagcagctgcgacgtgaagctggtggaaaagagcttcgagacagacaccaacctgaacttccagaacctgagcgtgatcggcttcagaatcctgctgctgaaagtggccggctttaacctgctgatgaccctgcggctgtggtccagccgggttaagttttccagatccgcagacgcacccgcttaccaacaagggcagaaccaactctacaatgaacttaatttggggcggagggaagagtacgacgttctggacaaaaggaggggacgagatcccgagatgggcggaaagcctcagcgaaggaagaatccgcaagaggggctttataacgaactccagaaagataaaatggcagaagcctatagtgagattgggatgaagggagaaaggaggaggggtaaaggtcacgatgggttgtaccaaggattgagcacagccactaaagatacctatgatgcgctccacatgcaggccctgccgccaaga

SEQ ID NO: 24114 - DNA, 867 bp, synthetic construct
  source 1..867: mol_type = other DNA
gacctgaagaacgtgttcccacctgaggtggccgtgttcgagcctagcgaggccgagatcagccacacccagaaagccaccctcgtgtgcctggctaccggcttctaccccgaccatgtggaactgtcttggtgggtcaacggcaaagaggtgcacagcggcgtgtgtaccgacccccagccactgaaagaacagcccgccctgaacgacagccggtactgcctgagcagcagactgagagtgtccgccaccttctggcagaacccccggaaccacttcagatgccaggtgcagttctacggcctgagcgagaacgacgagtggacccaggacagagccaagcccgtgacccagatcgtgtctgccgaagcctggggcagagccgattgcgacgtgaagctggtggaaaagagcttcgagacagacaccaacctgaacttccagaacctgagcgtgatcggcttcagaatcctgctgctgaaagtggccggctttaacctgctgatgaccctgcggctgtggtccagccgggttaagttttccagatccgcagacgcacccgcttaccaacaagggcagaaccaactctacaatgaacttaatttggggcggagggaagagtacgacgttctggacaaaaggaggggacgagatcccgagatgggcggaaagcctcagcgaaggaagaatccgcaagaggggctttataacgaactccagaaagataaaatggcagaagcctatagtgagattgggatgaagggagaaaggaggaggggtaaaggtcacgatgggttgtaccaaggattgagcacagccactaaagatacctatgatgcgctccacatgcaggccctgccgccaaga

SEQ ID NO: 24115 - DNA, 864 bp, synthetic construct
  source 1..864: mol_type = other DNA
ctgaagaacgtgttcccacctgaggtggccgtgttcgagcctagcgaggccgagatcagccacacccagaaagccaccctcgtgtgcctggctaccggcttctaccccgaccatgtggaactgtcttggtgggtcaacggcaaagaggtgcacagcggcgtgtgtaccgacccccagccactgaaagaacagcccgccctgaacgacagccggtactgcctgagcagcagactgagagtgtccgccaccttctggcagaacccccggaaccacttcagatgccaggtgcagttctacggcctgagcgagaacgacgagtggacccaggacagagccaagcccgtgacccagatcgtgtctgccgaagcctggggcagagccgattgcgacgtgaagctggtggaaaagagcttcgagacagacaccaacctgaacttccagaacctgagcgtgatcggcttcagaatcctgctgctgaaagtggccggctttaacctgctgatgaccctgcggctgtggtccagccgggttaagttttccagatccgcagacgcacccgcttaccaacaagggcagaaccaactctacaatgaacttaatttggggcggagggaagagtacgacgttctggacaaaaggaggggacgagatcccgagatgggcggaaagcctcagcgaaggaagaatccgcaagaggggctttataacgaactccagaaagataaaatggcagaagcctatagtgagattgggatgaagggagaaaggaggaggggtaaaggtcacgatgggttgtaccaaggattgagcacagccactaaagatacctatgatgcgctccacatgcaggccctgccgccaaga

SEQ ID NO: 24116 - DNA, 861 bp, synthetic construct
  source 1..861: mol_type = other DNA
aagaacgtgttcccacctgaggtggccgtgttcgagcctagcgaggccgagatcagccacacccagaaagccaccctcgtgtgcctggctaccggcttctaccccgaccatgtggaactgtcttggtgggtcaacggcaaagaggtgcacagcggcgtgtgtaccgacccccagccactgaaagaacagcccgccctgaacgacagccggtactgcctgagcagcagactgagagtgtccgccaccttctggcagaacccccggaaccacttcagatgccaggtgcagttctacggcctgagcgagaacgacgagtggacccaggacagagccaagcccgtgacccagatcgtgtctgccgaagcctggggcagagccgattgcgacgtgaagctggtggaaaagagcttcgagacagacaccaacctgaacttccagaacctgagcgtgatcggcttcagaatcctgctgctgaaagtggccggctttaacctgctgatgaccctgcggctgtggtccagccgggttaagttttccagatccgcagacgcacccgcttaccaacaagggcagaaccaactctacaatgaacttaatttggggcggagggaagagtacgacgttctggacaaaaggaggggacgagatcccgagatgggcggaaagcctcagcgaaggaagaatccgcaagaggggctttataacgaactccagaaagataaaatggcagaagcctatagtgagattgggatgaagggagaaaggaggaggggtaaaggtcacgatgggttgtaccaaggattgagcacagccactaaagatacctatgatgcgctccacatgcaggccctgccgccaaga

SEQ ID NO: 24117 - DNA, 858 bp, synthetic construct
  source 1..858: mol_type = other DNA
aacgtgttcccacctgaggtggccgtgttcgagcctagcgaggccgagatcagccacacccagaaagccaccctcgtgtgcctggctaccggcttctaccccgaccatgtggaactgtcttggtgggtcaacggcaaagaggtgcacagcggcgtgtgtaccgacccccagccactgaaagaacagcccgccctgaacgacagccggtactgcctgagcagcagactgagagtgtccgccaccttctggcagaacccccggaaccacttcagatgccaggtgcagttctacggcctgagcgagaacgacgagtggacccaggacagagccaagcccgtgacccagatcgtgtctgccgaagcctggggcagagccgattgcgacgtgaagctggtggaaaagagcttcgagacagacaccaacctgaacttccagaacctgagcgtgatcggcttcagaatcctgctgctgaaagtggccggctttaacctgctgatgaccctgcggctgtggtccagccgggttaagttttccagatccgcagacgcacccgcttaccaacaagggcagaaccaactctacaatgaacttaatttggggcggagggaagagtacgacgttctggacaaaaggaggggacgagatcccgagatgggcggaaagcctcagcgaaggaagaatccgcaagaggggctttataacgaactccagaaagataaaatggcagaagcctatagtgagattgggatgaagggagaaaggaggaggggtaaaggtcacgatgggttgtaccaaggattgagcacagccactaaagatacctatgatgcgctccacatgcaggccctgccgccaaga

SEQ ID NO: 24118 - DNA, 855 bp, synthetic construct
  source 1..855: mol_type = other DNA
gtgttcccacctgaggtggccgtgttcgagcctagcgaggccgagatcagccacacccagaaagccaccctcgtgtgcctggctaccggcttctaccccgaccatgtggaactgtcttggtgggtcaacggcaaagaggtgcacagcggcgtgtgtaccgacccccagccactgaaagaacagcccgccctgaacgacagccggtactgcctgagcagcagactgagagtgtccgccaccttctggcagaacccccggaaccacttcagatgccaggtgcagttctacggcctgagcgagaacgacgagtggacccaggacagagccaagcccgtgacccagatcgtgtctgccgaagcctggggcagagccgattgcgacgtgaagctggtggaaaagagcttcgagacagacaccaacctgaacttccagaacctgagcgtgatcggcttcagaatcctgctgctgaaagtggccggctttaacctgctgatgaccctgcggctgtggtccagccgggttaagttttccagatccgcagacgcacccgcttaccaacaagggcagaaccaactctacaatgaacttaatttggggcggagggaagagtacgacgttctggacaaaaggaggggacgagatcccgagatgggcggaaagcctcagcgaaggaagaatccgcaagaggggctttataacgaactccagaaagataaaatggcagaagcctatagtgagattgggatgaagggagaaaggaggaggggtaaaggtcacgatgggttgtaccaaggattgagcacagccactaaagatacctatgatgcgctccacatgcaggccctgccgccaaga

SEQ ID NO: 24119 - DNA, 852 bp, synthetic construct
  source 1..852: mol_type = other DNA
ttcccacctgaggtggccgtgttcgagcctagcgaggccgagatcagccacacccagaaagccaccctcgtgtgcctggctaccggcttctaccccgaccatgtggaactgtcttggtgggtcaacggcaaagaggtgcacagcggcgtgtgtaccgacccccagccactgaaagaacagcccgccctgaacgacagccggtactgcctgagcagcagactgagagtgtccgccaccttctggcagaacccccggaaccacttcagatgccaggtgcagttctacggcctgagcgagaacgacgagtggacccaggacagagccaagcccgtgacccagatcgtgtctgccgaagcctggggcagagccgattgcgacgtgaagctggtggaaaagagcttcgagacagacaccaacctgaacttccagaacctgagcgtgatcggcttcagaatcctgctgctgaaagtggccggctttaacctgctgatgaccctgcggctgtggtccagccgggttaagttttccagatccgcagacgcacccgcttaccaacaagggcagaaccaactctacaatgaacttaatttggggcggagggaagagtacgacgttctggacaaaaggaggggacgagatcccgagatgggcggaaagcctcagcgaaggaagaatccgcaagaggggctttataacgaactccagaaagataaaatggcagaagcctatagtgagattgggatgaagggagaaaggaggaggggtaaaggtcacgatgggttgtaccaaggattgagcacagccactaaagatacctatgatgcgctccacatgcaggccctgccgccaaga

SEQ ID NO: 24120 - DNA, 849 bp, synthetic construct
  source 1..849: mol_type = other DNA
ccacctgaggtggccgtgttcgagcctagcgaggccgagatcagccacacccagaaagccaccctcgtgtgcctggctaccggcttctaccccgaccatgtggaactgtcttggtgggtcaacggcaaagaggtgcacagcggcgtgtgtaccgacccccagccactgaaagaacagcccgccctgaacgacagccggtactgcctgagcagcagactgagagtgtccgccaccttctggcagaacccccggaaccacttcagatgccaggtgcagttctacggcctgagcgagaacgacgagtggacccaggacagagccaagcccgtgacccagatcgtgtctgccgaagcctggggcagagccgattgcgacgtgaagctggtggaaaagagcttcgagacagacaccaacctgaacttccagaacctgagcgtgatcggcttcagaatcctgctgctgaaagtggccggctttaacctgctgatgaccctgcggctgtggtccagccgggttaagttttccagatccgcagacgcacccgcttaccaacaagggcagaaccaactctacaatgaacttaatttggggcggagggaagagtacgacgttctggacaaaaggaggggacgagatcccgagatgggcggaaagcctcagcgaaggaagaatccgcaagaggggctttataacgaactccagaaagataaaatggcagaagcctatagtgagattgggatgaagggagaaaggaggaggggtaaaggtcacgatgggttgtaccaaggattgagcacagccactaaagatacctatgatgcgctccacatgcaggccctgccgccaaga

SEQ ID NO: 24121 - DNA, 846 bp, synthetic construct
  source 1..846: mol_type = other DNA
cctgaggtggccgtgttcgagcctagcgaggccgagatcagccacacccagaaagccaccctcgtgtgcctggctaccggcttctaccccgaccatgtggaactgtcttggtgggtcaacggcaaagaggtgcacagcggcgtgtgtaccgacccccagccactgaaagaacagcccgccctgaacgacagccggtactgcctgagcagcagactgagagtgtccgccaccttctggcagaacccccggaaccacttcagatgccaggtgcagttctacggcctgagcgagaacgacgagtggacccaggacagagccaagcccgtgacccagatcgtgtctgccgaagcctggggcagagccgattgcgacgtgaagctggtggaaaagagcttcgagacagacaccaacctgaacttccagaacctgagcgtgatcggcttcagaatcctgctgctgaaagtggccggctttaacctgctgatgaccctgcggctgtggtccagccgggttaagttttccagatccgcagacgcacccgcttaccaacaagggcagaaccaactctacaatgaacttaatttggggcggagggaagagtacgacgttctggacaaaaggaggggacgagatcccgagatgggcggaaagcctcagcgaaggaagaatccgcaagaggggctttataacgaactccagaaagataaaatggcagaagcctatagtgagattgggatgaagggagaaaggaggaggggtaaaggtcacgatgggttgtaccaaggattgagcacagccactaaagatacctatgatgcgctccacatgcaggccctgccgccaaga

SEQ ID NO: 24122 - DNA, 843 bp, synthetic construct
  source 1..843: mol_type = other DNA
gaggtggccgtgttcgagcctagcgaggccgagatcagccacacccagaaagccaccctcgtgtgcctggctaccggcttctaccccgaccatgtggaactgtcttggtgggtcaacggcaaagaggtgcacagcggcgtgtgtaccgacccccagccactgaaagaacagcccgccctgaacgacagccggtactgcctgagcagcagactgagagtgtccgccaccttctggcagaacccccggaaccacttcagatgccaggtgcagttctacggcctgagcgagaacgacgagtggacccaggacagagccaagcccgtgacccagatcgtgtctgccgaagcctggggcagagccgattgcgacgtgaagctggtggaaaagagcttcgagacagacaccaacctgaacttccagaacctgagcgtgatcggcttcagaatcctgctgctgaaagtggccggctttaacctgctgatgaccctgcggctgtggtccagccgggttaagttttccagatccgcagacgcacccgcttaccaacaagggcagaaccaactctacaatgaacttaatttggggcggagggaagagtacgacgttctggacaaaaggaggggacgagatcccgagatgggcggaaagcctcagcgaaggaagaatccgcaagaggggctttataacgaactccagaaagataaaatggcagaagcctatagtgagattgggatgaagggagaaaggaggaggggtaaaggtcacgatgggttgtaccaaggattgagcacagccactaaagatacctatgatgcgctccacatgcaggccctgccgccaaga

SEQ ID NO: 24123 - DNA, 840 bp, synthetic construct
  source 1..840: mol_type = other DNA
gtggccgtgttcgagcctagcgaggccgagatcagccacacccagaaagccaccctcgtgtgcctggctaccggcttctaccccgaccatgtggaactgtcttggtgggtcaacggcaaagaggtgcacagcggcgtgtgtaccgacccccagccactgaaagaacagcccgccctgaacgacagccggtactgcctgagcagcagactgagagtgtccgccaccttctggcagaacccccggaaccacttcagatgccaggtgcagttctacggcctgagcgagaacgacgagtggacccaggacagagccaagcccgtgacccagatcgtgtctgccgaagcctggggcagagccgattgcgacgtgaagctggtggaaaagagcttcgagacagacaccaacctgaacttccagaacctgagcgtgatcggcttcagaatcctgctgctgaaagtggccggctttaacctgctgatgaccctgcggctgtggtccagccgggttaagttttccagatccgcagacgcacccgcttaccaacaagggcagaaccaactctacaatgaacttaatttggggcggagggaagagtacgacgttctggacaaaaggaggggacgagatcccgagatgggcggaaagcctcagcgaaggaagaatccgcaagaggggctttataacgaactccagaaagataaaatggcagaagcctatagtgagattgggatgaagggagaaaggaggaggggtaaaggtcacgatgggttgtaccaaggattgagcacagccactaaagatacctatgatgcgctccacatgcaggccctgccgccaaga

SEQ ID NO: 24124 - DNA, 837 bp, synthetic construct
  source 1..837: mol_type = other DNA
gccgtgttcgagcctagcgaggccgagatcagccacacccagaaagccaccctcgtgtgcctggctaccggcttctaccccgaccatgtggaactgtcttggtgggtcaacggcaaagaggtgcacagcggcgtgtgtaccgacccccagccactgaaagaacagcccgccctgaacgacagccggtactgcctgagcagcagactgagagtgtccgccaccttctggcagaacccccggaaccacttcagatgccaggtgcagttctacggcctgagcgagaacgacgagtggacccaggacagagccaagcccgtgacccagatcgtgtctgccgaagcctggggcagagccgattgcgacgtgaagctggtggaaaagagcttcgagacagacaccaacctgaacttccagaacctgagcgtgatcggcttcagaatcctgctgctgaaagtggccggctttaacctgctgatgaccctgcggctgtggtccagccgggttaagttttccagatccgcagacgcacccgcttaccaacaagggcagaaccaactctacaatgaacttaatttggggcggagggaagagtacgacgttctggacaaaaggaggggacgagatcccgagatgggcggaaagcctcagcgaaggaagaatccgcaagaggggctttataacgaactccagaaagataaaatggcagaagcctatagtgagattgggatgaagggagaaaggaggaggggtaaaggtcacgatgggttgtaccaaggattgagcacagccactaaagatacctatgatgcgctccacatgcaggccctgccgccaaga

SEQ ID NO: 24125 - DNA, 834 bp, synthetic construct
  source 1..834: mol_type = other DNA
gtgttcgagcctagcgaggccgagatcagccacacccagaaagccaccctcgtgtgcctggctaccggcttctaccccgaccatgtggaactgtcttggtgggtcaacggcaaagaggtgcacagcggcgtgtgtaccgacccccagccactgaaagaacagcccgccctgaacgacagccggtactgcctgagcagcagactgagagtgtccgccaccttctggcagaacccccggaaccacttcagatgccaggtgcagttctacggcctgagcgagaacgacgagtggacccaggacagagccaagcccgtgacccagatcgtgtctgccgaagcctggggcagagccgattgcgacgtgaagctggtggaaaagagcttcgagacagacaccaacctgaacttccagaacctgagcgtgatcggcttcagaatcctgctgctgaaagtggccggctttaacctgctgatgaccctgcggctgtggtccagccgggttaagttttccagatccgcagacgcacccgcttaccaacaagggcagaaccaactctacaatgaacttaatttggggcggagggaagagtacgacgttctggacaaaaggaggggacgagatcccgagatgggcggaaagcctcagcgaaggaagaatccgcaagaggggctttataacgaactccagaaagataaaatggcagaagcctatagtgagattgggatgaagggagaaaggaggaggggtaaaggtcacgatgggttgtaccaaggattgagcacagccactaaagatacctatgatgcgctccacatgcaggccctgccgccaaga

SEQ ID NO: 24126 - DNA, 831 bp, synthetic construct
  source 1..831: mol_type = other DNA
ttcgagcctagcgaggccgagatcagccacacccagaaagccaccctcgtgtgcctggctaccggcttctaccccgaccatgtggaactgtcttggtgggtcaacggcaaagaggtgcacagcggcgtgtgtaccgacccccagccactgaaagaacagcccgccctgaacgacagccggtactgcctgagcagcagactgagagtgtccgccaccttctggcagaacccccggaaccacttcagatgccaggtgcagttctacggcctgagcgagaacgacgagtggacccaggacagagccaagcccgtgacccagatcgtgtctgccgaagcctggggcagagccgattgcgacgtgaagctggtggaaaagagcttcgagacagacaccaacctgaacttccagaacctgagcgtgatcggcttcagaatcctgctgctgaaagtggccggctttaacctgctgatgaccctgcggctgtggtccagccgggttaagttttccagatccgcagacgcacccgcttaccaacaagggcagaaccaactctacaatgaacttaatttggggcggagggaagagtacgacgttctggacaaaaggaggggacgagatcccgagatgggcggaaagcctcagcgaaggaagaatccgcaagaggggctttataacgaactccagaaagataaaatggcagaagcctatagtgagattgggatgaagggagaaaggaggaggggtaaaggtcacgatgggttgtaccaaggattgagcacagccactaaagatacctatgatgcgctccacatgcaggccctgccgccaaga

SEQ ID NO: 24127 - DNA, 828 bp, synthetic construct
  source 1..828: mol_type = other DNA
gagcctagcgaggccgagatcagccacacccagaaagccaccctcgtgtgcctggctaccggcttctaccccgaccatgtggaactgtcttggtgggtcaacggcaaagaggtgcacagcggcgtgtgtaccgacccccagccactgaaagaacagcccgccctgaacgacagccggtactgcctgagcagcagactgagagtgtccgccaccttctggcagaacccccggaaccacttcagatgccaggtgcagttctacggcctgagcgagaacgacgagtggacccaggacagagccaagcccgtgacccagatcgtgtctgccgaagcctggggcagagccgattgcgacgtgaagctggtggaaaagagcttcgagacagacaccaacctgaacttccagaacctgagcgtgatcggcttcagaatcctgctgctgaaagtggccggctttaacctgctgatgaccctgcggctgtggtccagccgggttaagttttccagatccgcagacgcacccgcttaccaacaagggcagaaccaactctacaatgaacttaatttggggcggagggaagagtacgacgttctggacaaaaggaggggacgagatcccgagatgggcggaaagcctcagcgaaggaagaatccgcaagaggggctttataacgaactccagaaagataaaatggcagaagcctatagtgagattgggatgaagggagaaaggaggaggggtaaaggtcacgatgggttgtaccaaggattgagcacagccactaaagatacctatgatgcgctccacatgcaggccctgccgccaaga

SEQ ID NO: 24128 - DNA, 825 bp, synthetic construct
  source 1..825: mol_type = other DNA
cctagcgaggccgagatcagccacacccagaaagccaccctcgtgtgcctggctaccggcttctaccccgaccatgtggaactgtcttggtgggtcaacggcaaagaggtgcacagcggcgtgtgtaccgacccccagccactgaaagaacagcccgccctgaacgacagccggtactgcctgagcagcagactgagagtgtccgccaccttctggcagaacccccggaaccacttcagatgccaggtgcagttctacggcctgagcgagaacgacgagtggacccaggacagagccaagcccgtgacccagatcgtgtctgccgaagcctggggcagagccgattgcgacgtgaagctggtggaaaagagcttcgagacagacaccaacctgaacttccagaacctgagcgtgatcggcttcagaatcctgctgctgaaagtggccggctttaacctgctgatgaccctgcggctgtggtccagccgggttaagttttccagatccgcagacgcacccgcttaccaacaagggcagaaccaactctacaatgaacttaatttggggcggagggaagagtacgacgttctggacaaaaggaggggacgagatcccgagatgggcggaaagcctcagcgaaggaagaatccgcaagaggggctttataacgaactccagaaagataaaatggcagaagcctatagtgagattgggatgaagggagaaaggaggaggggtaaaggtcacgatgggttgtaccaaggattgagcacagccactaaagatacctatgatgcgctccacatgcaggccctgccgccaaga

SEQ ID NO: 24129 - DNA, 822 bp, synthetic construct
  source 1..822: mol_type = other DNA
agcgaggccgagatcagccacacccagaaagccaccctcgtgtgcctggctaccggcttctaccccgaccatgtggaactgtcttggtgggtcaacggcaaagaggtgcacagcggcgtgtgtaccgacccccagccactgaaagaacagcccgccctgaacgacagccggtactgcctgagcagcagactgagagtgtccgccaccttctggcagaacccccggaaccacttcagatgccaggtgcagttctacggcctgagcgagaacgacgagtggacccaggacagagccaagcccgtgacccagatcgtgtctgccgaagcctggggcagagccgattgcgacgtgaagctggtggaaaagagcttcgagacagacaccaacctgaacttccagaacctgagcgtgatcggcttcagaatcctgctgctgaaagtggccggctttaacctgctgatgaccctgcggctgtggtccagccgggttaagttttccagatccgcagacgcacccgcttaccaacaagggcagaaccaactctacaatgaacttaatttggggcggagggaagagtacgacgttctggacaaaaggaggggacgagatcccgagatgggcggaaagcctcagcgaaggaagaatccgcaagaggggctttataacgaactccagaaagataaaatggcagaagcctatagtgagattgggatgaagggagaaaggaggaggggtaaaggtcacgatgggttgtaccaaggattgagcacagccactaaagatacctatgatgcgctccacatgcaggccctgccgccaaga

SEQ ID NO: 24130 - DNA, 819 bp, synthetic construct
  source 1..819: mol_type = other DNA
gaggccgagatcagccacacccagaaagccaccctcgtgtgcctggctaccggcttctaccccgaccatgtggaactgtcttggtgggtcaacggcaaagaggtgcacagcggcgtgtgtaccgacccccagccactgaaagaacagcccgccctgaacgacagccggtactgcctgagcagcagactgagagtgtccgccaccttctggcagaacccccggaaccacttcagatgccaggtgcagttctacggcctgagcgagaacgacgagtggacccaggacagagccaagcccgtgacccagatcgtgtctgccgaagcctggggcagagccgattgcgacgtgaagctggtggaaaagagcttcgagacagacaccaacctgaacttccagaacctgagcgtgatcggcttcagaatcctgctgctgaaagtggccggctttaacctgctgatgaccctgcggctgtggtccagccgggttaagttttccagatccgcagacgcacccgcttaccaacaagggcagaaccaactctacaatgaacttaatttggggcggagggaagagtacgacgttctggacaaaaggaggggacgagatcccgagatgggcggaaagcctcagcgaaggaagaatccgcaagaggggctttataacgaactccagaaagataaaatggcagaagcctatagtgagattgggatgaagggagaaaggaggaggggtaaaggtcacgatgggttgtaccaaggattgagcacagccactaaagatacctatgatgcgctccacatgcaggccctgccgccaaga

SEQ ID NO: 24131 - DNA, 816 bp, synthetic construct
  source 1..816: mol_type = other DNA
gccgagatcagccacacccagaaagccaccctcgtgtgcctggctaccggcttctaccccgaccatgtggaactgtcttggtgggtcaacggcaaagaggtgcacagcggcgtgtgtaccgacccccagccactgaaagaacagcccgccctgaacgacagccggtactgcctgagcagcagactgagagtgtccgccaccttctggcagaacccccggaaccacttcagatgccaggtgcagttctacggcctgagcgagaacgacgagtggacccaggacagagccaagcccgtgacccagatcgtgtctgccgaagcctggggcagagccgattgcgacgtgaagctggtggaaaagagcttcgagacagacaccaacctgaacttccagaacctgagcgtgatcggcttcagaatcctgctgctgaaagtggccggctttaacctgctgatgaccctgcggctgtggtccagccgggttaagttttccagatccgcagacgcacccgcttaccaacaagggcagaaccaactctacaatgaacttaatttggggcggagggaagagtacgacgttctggacaaaaggaggggacgagatcccgagatgggcggaaagcctcagcgaaggaagaatccgcaagaggggctttataacgaactccagaaagataaaatggcagaagcctatagtgagattgggatgaagggagaaaggaggaggggtaaaggtcacgatgggttgtaccaaggattgagcacagccactaaagatacctatgatgcgctccacatgcaggccctgccgccaaga

SEQ ID NO: 24132 - DNA, 813 bp, synthetic construct
  source 1..813: mol_type = other DNA
gagatcagccacacccagaaagccaccctcgtgtgcctggctaccggcttctaccccgaccatgtggaactgtcttggtgggtcaacggcaaagaggtgcacagcggcgtgtgtaccgacccccagccactgaaagaacagcccgccctgaacgacagccggtactgcctgagcagcagactgagagtgtccgccaccttctggcagaacccccggaaccacttcagatgccaggtgcagttctacggcctgagcgagaacgacgagtggacccaggacagagccaagcccgtgacccagatcgtgtctgccgaagcctggggcagagccgattgcgacgtgaagctggtggaaaagagcttcgagacagacaccaacctgaacttccagaacctgagcgtgatcggcttcagaatcctgctgctgaaagtggccggctttaacctgctgatgaccctgcggctgtggtccagccgggttaagttttccagatccgcagacgcacccgcttaccaacaagggcagaaccaactctacaatgaacttaatttggggcggagggaagagtacgacgttctggacaaaaggaggggacgagatcccgagatgggcggaaagcctcagcgaaggaagaatccgcaagaggggctttataacgaactccagaaagataaaatggcagaagcctatagtgagattgggatgaagggagaaaggaggaggggtaaaggtcacgatgggttgtaccaaggattgagcacagccactaaagatacctatgatgcgctccacatgcaggccctgccgccaaga

SEQ ID NO: 24133 - DNA, 810 bp, synthetic construct
  source 1..810: mol_type = other DNA
atcagccacacccagaaagccaccctcgtgtgcctggctaccggcttctaccccgaccatgtggaactgtcttggtgggtcaacggcaaagaggtgcacagcggcgtgtgtaccgacccccagccactgaaagaacagcccgccctgaacgacagccggtactgcctgagcagcagactgagagtgtccgccaccttctggcagaacccccggaaccacttcagatgccaggtgcagttctacggcctgagcgagaacgacgagtggacccaggacagagccaagcccgtgacccagatcgtgtctgccgaagcctggggcagagccgattgcgacgtgaagctggtggaaaagagcttcgagacagacaccaacctgaacttccagaacctgagcgtgatcggcttcagaatcctgctgctgaaagtggccggctttaacctgctgatgaccctgcggctgtggtccagccgggttaagttttccagatccgcagacgcacccgcttaccaacaagggcagaaccaactctacaatgaacttaatttggggcggagggaagagtacgacgttctggacaaaaggaggggacgagatcccgagatgggcggaaagcctcagcgaaggaagaatccgcaagaggggctttataacgaactccagaaagataaaatggcagaagcctatagtgagattgggatgaagggagaaaggaggaggggtaaaggtcacgatgggttgtaccaaggattgagcacagccactaaagatacctatgatgcgctccacatgcaggccctgccgccaaga

SEQ ID NO: 24134 - DNA, 807 bp, synthetic construct
  source 1..807: mol_type = other DNA
agccacacccagaaagccaccctcgtgtgcctggctaccggcttctaccccgaccatgtggaactgtcttggtgggtcaacggcaaagaggtgcacagcggcgtgtgtaccgacccccagccactgaaagaacagcccgccctgaacgacagccggtactgcctgagcagcagactgagagtgtccgccaccttctggcagaacccccggaaccacttcagatgccaggtgcagttctacggcctgagcgagaacgacgagtggacccaggacagagccaagcccgtgacccagatcgtgtctgccgaagcctggggcagagccgattgcgacgtgaagctggtggaaaagagcttcgagacagacaccaacctgaacttccagaacctgagcgtgatcggcttcagaatcctgctgctgaaagtggccggctttaacctgctgatgaccctgcggctgtggtccagccgggttaagttttccagatccgcagacgcacccgcttaccaacaagggcagaaccaactctacaatgaacttaatttggggcggagggaagagtacgacgttctggacaaaaggaggggacgagatcccgagatgggcggaaagcctcagcgaaggaagaatccgcaagaggggctttataacgaactccagaaagataaaatggcagaagcctatagtgagattgggatgaagggagaaaggaggaggggtaaaggtcacgatgggttgtaccaaggattgagcacagccactaaagatacctatgatgcgctccacatgcaggccctgccgccaaga

SEQ ID NO: 24135 - DNA, 792 bp, synthetic construct
  source 1..792: mol_type = other DNA
gccaccctcgtgtgcctggctaccggcttctaccccgaccatgtggaactgtcttggtgggtcaacggcaaagaggtgcacagcggcgtgtgtaccgacccccagccactgaaagaacagcccgccctgaacgacagccggtactgcctgagcagcagactgagagtgtccgccaccttctggcagaacccccggaaccacttcagatgccaggtgcagttctacggcctgagcgagaacgacgagtggacccaggacagagccaagcccgtgacccagatcgtgtctgccgaagcctggggcagagccgattgcgacgtgaagctggtggaaaagagcttcgagacagacaccaacctgaacttccagaacctgagcgtgatcggcttcagaatcctgctgctgaaagtggccggctttaacctgctgatgaccctgcggctgtggtccagccgggttaagttttccagatccgcagacgcacccgcttaccaacaagggcagaaccaactctacaatgaacttaatttggggcggagggaagagtacgacgttctggacaaaaggaggggacgagatcccgagatgggcggaaagcctcagcgaaggaagaatccgcaagaggggctttataacgaactccagaaagataaaatggcagaagcctatagtgagattgggatgaagggagaaaggaggaggggtaaaggtcacgatgggttgtaccaaggattgagcacagccactaaagatacctatgatgcgctccacatgcaggccctgccgccaaga

SEQ ID NO: 24136 - DNA, 777 bp, synthetic construct
  source 1..777: mol_type = other DNA
ctggctaccggcttctaccccgaccatgtggaactgtcttggtgggtcaacggcaaagaggtgcacagcggcgtgtgtaccgacccccagccactgaaagaacagcccgccctgaacgacagccggtactgcctgagcagcagactgagagtgtccgccaccttctggcagaacccccggaaccacttcagatgccaggtgcagttctacggcctgagcgagaacgacgagtggacccaggacagagccaagcccgtgacccagatcgtgtctgccgaagcctggggcagagccgattgcgacgtgaagctggtggaaaagagcttcgagacagacaccaacctgaacttccagaacctgagcgtgatcggcttcagaatcctgctgctgaaagtggccggctttaacctgctgatgaccctgcggctgtggtccagccgggttaagttttccagatccgcagacgcacccgcttaccaacaagggcagaaccaactctacaatgaacttaatttggggcggagggaagagtacgacgttctggacaaaaggaggggacgagatcccgagatgggcggaaagcctcagcgaaggaagaatccgcaagaggggctttataacgaactccagaaagataaaatggcagaagcctatagtgagattgggatgaagggagaaaggaggaggggtaaaggtcacgatgggttgtaccaaggattgagcacagccactaaagatacctatgatgcgctccacatgcaggccctgccgccaaga

SEQ ID NO: 24137 - DNA, 858 bp, synthetic construct
  source 1..858: mol_type = other DNA
gacctgaagaacgtgttcccacctgaggtggccgtgttcgagcctagcgaggccgagatcagccacacccagaaagccaccctcgtgtgcctggctaccggcttctaccccgaccatgtggaactgtcttggtgggtcaacggcaaagaggtgcacagcggcgtgtgtaccgacccccagccactgaaagaacagcccgccctgaacgacagccggtactgcctgagcagcagactgagagtgtccgccaccttctggcagaacccccggaaccacttcagatgccaggtgcagttctacggcctgagcgagaacgacgagtggacccaggacagagccaagcccgtgacccagatcgtgtctgccgaagcctggggcagagccgattgcggctttaccagcgagagctaccagcagggcgtgctgagcgccaccaacctgagcgtgatcggcttcagaatcctgctgctgaaagtggccggctttaacctgctgatgaccctgcggctgtggtccagccgggttaagttttccagatccgcagacgcacccgcttaccaacaagggcagaaccaactctacaatgaacttaatttggggcggagggaagagtacgacgttctggacaaaaggaggggacgagatcccgagatgggcggaaagcctcagcgaaggaagaatccgcaagaggggctttataacgaactccagaaagataaaatggcagaagcctatagtgagattgggatgaagggagaaaggaggaggggtaaaggtcacgatgggttgtaccaaggattgagcacagccactaaagatacctatgatgcgctccacatgcaggccctgccgccaaga

SEQ ID NO: 24138 - DNA, 855 bp, synthetic construct
  source 1..855: mol_type = other DNA
ctgaagaacgtgttcccacctgaggtggccgtgttcgagcctagcgaggccgagatcagccacacccagaaagccaccctcgtgtgcctggctaccggcttctaccccgaccatgtggaactgtcttggtgggtcaacggcaaagaggtgcacagcggcgtgtgtaccgacccccagccactgaaagaacagcccgccctgaacgacagccggtactgcctgagcagcagactgagagtgtccgccaccttctggcagaacccccggaaccacttcagatgccaggtgcagttctacggcctgagcgagaacgacgagtggacccaggacagagccaagcccgtgacccagatcgtgtctgccgaagcctggggcagagccgattgcggctttaccagcgagagctaccagcagggcgtgctgagcgccaccaacctgagcgtgatcggcttcagaatcctgctgctgaaagtggccggctttaacctgctgatgaccctgcggctgtggtccagccgggttaagttttccagatccgcagacgcacccgcttaccaacaagggcagaaccaactctacaatgaacttaatttggggcggagggaagagtacgacgttctggacaaaaggaggggacgagatcccgagatgggcggaaagcctcagcgaaggaagaatccgcaagaggggctttataacgaactccagaaagataaaatggcagaagcctatagtgagattgggatgaagggagaaaggaggaggggtaaaggtcacgatgggttgtaccaaggattgagcacagccactaaagatacctatgatgcgctccacatgcaggccctgccgccaaga

SEQ ID NO: 24139 - DNA, 852 bp, synthetic construct
  source 1..852: mol_type = other DNA
aagaacgtgttcccacctgaggtggccgtgttcgagcctagcgaggccgagatcagccacacccagaaagccaccctcgtgtgcctggctaccggcttctaccccgaccatgtggaactgtcttggtgggtcaacggcaaagaggtgcacagcggcgtgtgtaccgacccccagccactgaaagaacagcccgccctgaacgacagccggtactgcctgagcagcagactgagagtgtccgccaccttctggcagaacccccggaaccacttcagatgccaggtgcagttctacggcctgagcgagaacgacgagtggacccaggacagagccaagcccgtgacccagatcgtgtctgccgaagcctggggcagagccgattgcggctttaccagcgagagctaccagcagggcgtgctgagcgccaccaacctgagcgtgatcggcttcagaatcctgctgctgaaagtggccggctttaacctgctgatgaccctgcggctgtggtccagccgggttaagttttccagatccgcagacgcacccgcttaccaacaagggcagaaccaactctacaatgaacttaatttggggcggagggaagagtacgacgttctggacaaaaggaggggacgagatcccgagatgggcggaaagcctcagcgaaggaagaatccgcaagaggggctttataacgaactccagaaagataaaatggcagaagcctatagtgagattgggatgaagggagaaaggaggaggggtaaaggtcacgatgggttgtaccaaggattgagcacagccactaaagatacctatgatgcgctccacatgcaggccctgccgccaaga

SEQ ID NO: 24140 - DNA, 849 bp, synthetic construct
  source 1..849: mol_type = other DNA
aacgtgttcccacctgaggtggccgtgttcgagcctagcgaggccgagatcagccacacccagaaagccaccctcgtgtgcctggctaccggcttctaccccgaccatgtggaactgtcttggtgggtcaacggcaaagaggtgcacagcggcgtgtgtaccgacccccagccactgaaagaacagcccgccctgaacgacagccggtactgcctgagcagcagactgagagtgtccgccaccttctggcagaacccccggaaccacttcagatgccaggtgcagttctacggcctgagcgagaacgacgagtggacccaggacagagccaagcccgtgacccagatcgtgtctgccgaagcctggggcagagccgattgcggctttaccagcgagagctaccagcagggcgtgctgagcgccaccaacctgagcgtgatcggcttcagaatcctgctgctgaaagtggccggctttaacctgctgatgaccctgcggctgtggtccagccgggttaagttttccagatccgcagacgcacccgcttaccaacaagggcagaaccaactctacaatgaacttaatttggggcggagggaagagtacgacgttctggacaaaaggaggggacgagatcccgagatgggcggaaagcctcagcgaaggaagaatccgcaagaggggctttataacgaactccagaaagataaaatggcagaagcctatagtgagattgggatgaagggagaaaggaggaggggtaaaggtcacgatgggttgtaccaaggattgagcacagccactaaagatacctatgatgcgctccacatgcaggccctgccgccaaga

SEQ ID NO: 24141 - DNA, 846 bp, synthetic construct
  source 1..846: mol_type = other DNA
gtgttcccacctgaggtggccgtgttcgagcctagcgaggccgagatcagccacacccagaaagccaccctcgtgtgcctggctaccggcttctaccccgaccatgtggaactgtcttggtgggtcaacggcaaagaggtgcacagcggcgtgtgtaccgacccccagccactgaaagaacagcccgccctgaacgacagccggtactgcctgagcagcagactgagagtgtccgccaccttctggcagaacccccggaaccacttcagatgccaggtgcagttctacggcctgagcgagaacgacgagtggacccaggacagagccaagcccgtgacccagatcgtgtctgccgaagcctggggcagagccgattgcggctttaccagcgagagctaccagcagggcgtgctgagcgccaccaacctgagcgtgatcggcttcagaatcctgctgctgaaagtggccggctttaacctgctgatgaccctgcggctgtggtccagccgggttaagttttccagatccgcagacgcacccgcttaccaacaagggcagaaccaactctacaatgaacttaatttggggcggagggaagagtacgacgttctggacaaaaggaggggacgagatcccgagatgggcggaaagcctcagcgaaggaagaatccgcaagaggggctttataacgaactccagaaagataaaatggcagaagcctatagtgagattgggatgaagggagaaaggaggaggggtaaaggtcacgatgggttgtaccaaggattgagcacagccactaaagatacctatgatgcgctccacatgcaggccctgccgccaaga

SEQ ID NO: 24142 - DNA, 843 bp, synthetic construct
  source 1..843: mol_type = other DNA
ttcccacctgaggtggccgtgttcgagcctagcgaggccgagatcagccacacccagaaagccaccctcgtgtgcctggctaccggcttctaccccgaccatgtggaactgtcttggtgggtcaacggcaaagaggtgcacagcggcgtgtgtaccgacccccagccactgaaagaacagcccgccctgaacgacagccggtactgcctgagcagcagactgagagtgtccgccaccttctggcagaacccccggaaccacttcagatgccaggtgcagttctacggcctgagcgagaacgacgagtggacccaggacagagccaagcccgtgacccagatcgtgtctgccgaagcctggggcagagccgattgcggctttaccagcgagagctaccagcagggcgtgctgagcgccaccaacctgagcgtgatcggcttcagaatcctgctgctgaaagtggccggctttaacctgctgatgaccctgcggctgtggtccagccgggttaagttttccagatccgcagacgcacccgcttaccaacaagggcagaaccaactctacaatgaacttaatttggggcggagggaagagtacgacgttctggacaaaaggaggggacgagatcccgagatgggcggaaagcctcagcgaaggaagaatccgcaagaggggctttataacgaactccagaaagataaaatggcagaagcctatagtgagattgggatgaagggagaaaggaggaggggtaaaggtcacgatgggttgtaccaaggattgagcacagccactaaagatacctatgatgcgctccacatgcaggccctgccgccaaga

SEQ ID NO: 24143 - DNA, 840 bp, synthetic construct
  source 1..840: mol_type = other DNA
ccacctgaggtggccgtgttcgagcctagcgaggccgagatcagccacacccagaaagccaccctcgtgtgcctggctaccggcttctaccccgaccatgtggaactgtcttggtgggtcaacggcaaagaggtgcacagcggcgtgtgtaccgacccccagccactgaaagaacagcccgccctgaacgacagccggtactgcctgagcagcagactgagagtgtccgccaccttctggcagaacccccggaaccacttcagatgccaggtgcagttctacggcctgagcgagaacgacgagtggacccaggacagagccaagcccgtgacccagatcgtgtctgccgaagcctggggcagagccgattgcggctttaccagcgagagctaccagcagggcgtgctgagcgccaccaacctgagcgtgatcggcttcagaatcctgctgctgaaagtggccggctttaacctgctgatgaccctgcggctgtggtccagccgggttaagttttccagatccgcagacgcacccgcttaccaacaagggcagaaccaactctacaatgaacttaatttggggcggagggaagagtacgacgttctggacaaaaggaggggacgagatcccgagatgggcggaaagcctcagcgaaggaagaatccgcaagaggggctttataacgaactccagaaagataaaatggcagaagcctatagtgagattgggatgaagggagaaaggaggaggggtaaaggtcacgatgggttgtaccaaggattgagcacagccactaaagatacctatgatgcgctccacatgcaggccctgccgccaaga

SEQ ID NO: 24144 - DNA, 837 bp, synthetic construct
  source 1..837: mol_type = other DNA
cctgaggtggccgtgttcgagcctagcgaggccgagatcagccacacccagaaagccaccctcgtgtgcctggctaccggcttctaccccgaccatgtggaactgtcttggtgggtcaacggcaaagaggtgcacagcggcgtgtgtaccgacccccagccactgaaagaacagcccgccctgaacgacagccggtactgcctgagcagcagactgagagtgtccgccaccttctggcagaacccccggaaccacttcagatgccaggtgcagttctacggcctgagcgagaacgacgagtggacccaggacagagccaagcccgtgacccagatcgtgtctgccgaagcctggggcagagccgattgcggctttaccagcgagagctaccagcagggcgtgctgagcgccaccaacctgagcgtgatcggcttcagaatcctgctgctgaaagtggccggctttaacctgctgatgaccctgcggctgtggtccagccgggttaagttttccagatccgcagacgcacccgcttaccaacaagggcagaaccaactctacaatgaacttaatttggggcggagggaagagtacgacgttctggacaaaaggaggggacgagatcccgagatgggcggaaagcctcagcgaaggaagaatccgcaagaggggctttataacgaactccagaaagataaaatggcagaagcctatagtgagattgggatgaagggagaaaggaggaggggtaaaggtcacgatgggttgtaccaaggattgagcacagccactaaagatacctatgatgcgctccacatgcaggccctgccgccaaga

SEQ ID NO: 24145 - DNA, 834 bp, synthetic construct
  source 1..834: mol_type = other DNA
gaggtggccgtgttcgagcctagcgaggccgagatcagccacacccagaaagccaccctcgtgtgcctggctaccggcttctaccccgaccatgtggaactgtcttggtgggtcaacggcaaagaggtgcacagcggcgtgtgtaccgacccccagccactgaaagaacagcccgccctgaacgacagccggtactgcctgagcagcagactgagagtgtccgccaccttctggcagaacccccggaaccacttcagatgccaggtgcagttctacggcctgagcgagaacgacgagtggacccaggacagagccaagcccgtgacccagatcgtgtctgccgaagcctggggcagagccgattgcggctttaccagcgagagctaccagcagggcgtgctgagcgccaccaacctgagcgtgatcggcttcagaatcctgctgctgaaagtggccggctttaacctgctgatgaccctgcggctgtggtccagccgggttaagttttccagatccgcagacgcacccgcttaccaacaagggcagaaccaactctacaatgaacttaatttggggcggagggaagagtacgacgttctggacaaaaggaggggacgagatcccgagatgggcggaaagcctcagcgaaggaagaatccgcaagaggggctttataacgaactccagaaagataaaatggcagaagcctatagtgagattgggatgaagggagaaaggaggaggggtaaaggtcacgatgggttgtaccaaggattgagcacagccactaaagatacctatgatgcgctccacatgcaggccctgccgccaaga

SEQ ID NO: 24146 - DNA, 831 bp, synthetic construct
  source 1..831: mol_type = other DNA
gtggccgtgttcgagcctagcgaggccgagatcagccacacccagaaagccaccctcgtgtgcctggctaccggcttctaccccgaccatgtggaactgtcttggtgggtcaacggcaaagaggtgcacagcggcgtgtgtaccgacccccagccactgaaagaacagcccgccctgaacgacagccggtactgcctgagcagcagactgagagtgtccgccaccttctggcagaacccccggaaccacttcagatgccaggtgcagttctacggcctgagcgagaacgacgagtggacccaggacagagccaagcccgtgacccagatcgtgtctgccgaagcctggggcagagccgattgcggctttaccagcgagagctaccagcagggcgtgctgagcgccaccaacctgagcgtgatcggcttcagaatcctgctgctgaaagtggccggctttaacctgctgatgaccctgcggctgtggtccagccgggttaagttttccagatccgcagacgcacccgcttaccaacaagggcagaaccaactctacaatgaacttaatttggggcggagggaagagtacgacgttctggacaaaaggaggggacgagatcccgagatgggcggaaagcctcagcgaaggaagaatccgcaagaggggctttataacgaactccagaaagataaaatggcagaagcctatagtgagattgggatgaagggagaaaggaggaggggtaaaggtcacgatgggttgtaccaaggattgagcacagccactaaagatacctatgatgcgctccacatgcaggccctgccgccaaga

SEQ ID NO: 24147 - DNA, 828 bp, synthetic construct
  source 1..828: mol_type = other DNA
gccgtgttcgagcctagcgaggccgagatcagccacacccagaaagccaccctcgtgtgcctggctaccggcttctaccccgaccatgtggaactgtcttggtgggtcaacggcaaagaggtgcacagcggcgtgtgtaccgacccccagccactgaaagaacagcccgccctgaacgacagccggtactgcctgagcagcagactgagagtgtccgccaccttctggcagaacccccggaaccacttcagatgccaggtgcagttctacggcctgagcgagaacgacgagtggacccaggacagagccaagcccgtgacccagatcgtgtctgccgaagcctggggcagagccgattgcggctttaccagcgagagctaccagcagggcgtgctgagcgccaccaacctgagcgtgatcggcttcagaatcctgctgctgaaagtggccggctttaacctgctgatgaccctgcggctgtggtccagccgggttaagttttccagatccgcagacgcacccgcttaccaacaagggcagaaccaactctacaatgaacttaatttggggcggagggaagagtacgacgttctggacaaaaggaggggacgagatcccgagatgggcggaaagcctcagcgaaggaagaatccgcaagaggggctttataacgaactccagaaagataaaatggcagaagcctatagtgagattgggatgaagggagaaaggaggaggggtaaaggtcacgatgggttgtaccaaggattgagcacagccactaaagatacctatgatgcgctccacatgcaggccctgccgccaaga

SEQ ID NO: 24148 - DNA, 825 bp, synthetic construct
  source 1..825: mol_type = other DNA
gtgttcgagcctagcgaggccgagatcagccacacccagaaagccaccctcgtgtgcctggctaccggcttctaccccgaccatgtggaactgtcttggtgggtcaacggcaaagaggtgcacagcggcgtgtgtaccgacccccagccactgaaagaacagcccgccctgaacgacagccggtactgcctgagcagcagactgagagtgtccgccaccttctggcagaacccccggaaccacttcagatgccaggtgcagttctacggcctgagcgagaacgacgagtggacccaggacagagccaagcccgtgacccagatcgtgtctgccgaagcctggggcagagccgattgcggctttaccagcgagagctaccagcagggcgtgctgagcgccaccaacctgagcgtgatcggcttcagaatcctgctgctgaaagtggccggctttaacctgctgatgaccctgcggctgtggtccagccgggttaagttttccagatccgcagacgcacccgcttaccaacaagggcagaaccaactctacaatgaacttaatttggggcggagggaagagtacgacgttctggacaaaaggaggggacgagatcccgagatgggcggaaagcctcagcgaaggaagaatccgcaagaggggctttataacgaactccagaaagataaaatggcagaagcctatagtgagattgggatgaagggagaaaggaggaggggtaaaggtcacgatgggttgtaccaaggattgagcacagccactaaagatacctatgatgcgctccacatgcaggccctgccgccaaga

SEQ ID NO: 24149 - DNA, 822 bp, synthetic construct
  source 1..822: mol_type = other DNA
ttcgagcctagcgaggccgagatcagccacacccagaaagccaccctcgtgtgcctggctaccggcttctaccccgaccatgtggaactgtcttggtgggtcaacggcaaagaggtgcacagcggcgtgtgtaccgacccccagccactgaaagaacagcccgccctgaacgacagccggtactgcctgagcagcagactgagagtgtccgccaccttctggcagaacccccggaaccacttcagatgccaggtgcagttctacggcctgagcgagaacgacgagtggacccaggacagagccaagcccgtgacccagatcgtgtctgccgaagcctggggcagagccgattgcggctttaccagcgagagctaccagcagggcgtgctgagcgccaccaacctgagcgtgatcggcttcagaatcctgctgctgaaagtggccggctttaacctgctgatgaccctgcggctgtggtccagccgggttaagttttccagatccgcagacgcacccgcttaccaacaagggcagaaccaactctacaatgaacttaatttggggcggagggaagagtacgacgttctggacaaaaggaggggacgagatcccgagatgggcggaaagcctcagcgaaggaagaatccgcaagaggggctttataacgaactccagaaagataaaatggcagaagcctatagtgagattgggatgaagggagaaaggaggaggggtaaaggtcacgatgggttgtaccaaggattgagcacagccactaaagatacctatgatgcgctccacatgcaggccctgccgccaaga

SEQ ID NO: 24150 - DNA, 819 bp, synthetic construct
  source 1..819: mol_type = other DNA
gagcctagcgaggccgagatcagccacacccagaaagccaccctcgtgtgcctggctaccggcttctaccccgaccatgtggaactgtcttggtgggtcaacggcaaagaggtgcacagcggcgtgtgtaccgacccccagccactgaaagaacagcccgccctgaacgacagccggtactgcctgagcagcagactgagagtgtccgccaccttctggcagaacccccggaaccacttcagatgccaggtgcagttctacggcctgagcgagaacgacgagtggacccaggacagagccaagcccgtgacccagatcgtgtctgccgaagcctggggcagagccgattgcggctttaccagcgagagctaccagcagggcgtgctgagcgccaccaacctgagcgtgatcggcttcagaatcctgctgctgaaagtggccggctttaacctgctgatgaccctgcggctgtggtccagccgggttaagttttccagatccgcagacgcacccgcttaccaacaagggcagaaccaactctacaatgaacttaatttggggcggagggaagagtacgacgttctggacaaaaggaggggacgagatcccgagatgggcggaaagcctcagcgaaggaagaatccgcaagaggggctttataacgaactccagaaagataaaatggcagaagcctatagtgagattgggatgaagggagaaaggaggaggggtaaaggtcacgatgggttgtaccaaggattgagcacagccactaaagatacctatgatgcgctccacatgcaggccctgccgccaaga

SEQ ID NO: 24151 - DNA, 816 bp, synthetic construct
  source 1..816: mol_type = other DNA
cctagcgaggccgagatcagccacacccagaaagccaccctcgtgtgcctggctaccggcttctaccccgaccatgtggaactgtcttggtgggtcaacggcaaagaggtgcacagcggcgtgtgtaccgacccccagccactgaaagaacagcccgccctgaacgacagccggtactgcctgagcagcagactgagagtgtccgccaccttctggcagaacccccggaaccacttcagatgccaggtgcagttctacggcctgagcgagaacgacgagtggacccaggacagagccaagcccgtgacccagatcgtgtctgccgaagcctggggcagagccgattgcggctttaccagcgagagctaccagcagggcgtgctgagcgccaccaacctgagcgtgatcggcttcagaatcctgctgctgaaagtggccggctttaacctgctgatgaccctgcggctgtggtccagccgggttaagttttccagatccgcagacgcacccgcttaccaacaagggcagaaccaactctacaatgaacttaatttggggcggagggaagagtacgacgttctggacaaaaggaggggacgagatcccgagatgggcggaaagcctcagcgaaggaagaatccgcaagaggggctttataacgaactccagaaagataaaatggcagaagcctatagtgagattgggatgaagggagaaaggaggaggggtaaaggtcacgatgggttgtaccaaggattgagcacagccactaaagatacctatgatgcgctccacatgcaggccctgccgccaaga

SEQ ID NO: 24152 - DNA, 813 bp, synthetic construct
  source 1..813: mol_type = other DNA
agcgaggccgagatcagccacacccagaaagccaccctcgtgtgcctggctaccggcttctaccccgaccatgtggaactgtcttggtgggtcaacggcaaagaggtgcacagcggcgtgtgtaccgacccccagccactgaaagaacagcccgccctgaacgacagccggtactgcctgagcagcagactgagagtgtccgccaccttctggcagaacccccggaaccacttcagatgccaggtgcagttctacggcctgagcgagaacgacgagtggacccaggacagagccaagcccgtgacccagatcgtgtctgccgaagcctggggcagagccgattgcggctttaccagcgagagctaccagcagggcgtgctgagcgccaccaacctgagcgtgatcggcttcagaatcctgctgctgaaagtggccggctttaacctgctgatgaccctgcggctgtggtccagccgggttaagttttccagatccgcagacgcacccgcttaccaacaagggcagaaccaactctacaatgaacttaatttggggcggagggaagagtacgacgttctggacaaaaggaggggacgagatcccgagatgggcggaaagcctcagcgaaggaagaatccgcaagaggggctttataacgaactccagaaagataaaatggcagaagcctatagtgagattgggatgaagggagaaaggaggaggggtaaaggtcacgatgggttgtaccaaggattgagcacagccactaaagatacctatgatgcgctccacatgcaggccctgccgccaaga

SEQ ID NO: 24153 - DNA, 810 bp, synthetic construct
  source 1..810: mol_type = other DNA
gaggccgagatcagccacacccagaaagccaccctcgtgtgcctggctaccggcttctaccccgaccatgtggaactgtcttggtgggtcaacggcaaagaggtgcacagcggcgtgtgtaccgacccccagccactgaaagaacagcccgccctgaacgacagccggtactgcctgagcagcagactgagagtgtccgccaccttctggcagaacccccggaaccacttcagatgccaggtgcagttctacggcctgagcgagaacgacgagtggacccaggacagagccaagcccgtgacccagatcgtgtctgccgaagcctggggcagagccgattgcggctttaccagcgagagctaccagcagggcgtgctgagcgccaccaacctgagcgtgatcggcttcagaatcctgctgctgaaagtggccggctttaacctgctgatgaccctgcggctgtggtccagccgggttaagttttccagatccgcagacgcacccgcttaccaacaagggcagaaccaactctacaatgaacttaatttggggcggagggaagagtacgacgttctggacaaaaggaggggacgagatcccgagatgggcggaaagcctcagcgaaggaagaatccgcaagaggggctttataacgaactccagaaagataaaatggcagaagcctatagtgagattgggatgaagggagaaaggaggaggggtaaaggtcacgatgggttgtaccaaggattgagcacagccactaaagatacctatgatgcgctccacatgcaggccctgccgccaaga

SEQ ID NO: 24154 - DNA, 807 bp, synthetic construct
  source 1..807: mol_type = other DNA
gccgagatcagccacacccagaaagccaccctcgtgtgcctggctaccggcttctaccccgaccatgtggaactgtcttggtgggtcaacggcaaagaggtgcacagcggcgtgtgtaccgacccccagccactgaaagaacagcccgccctgaacgacagccggtactgcctgagcagcagactgagagtgtccgccaccttctggcagaacccccggaaccacttcagatgccaggtgcagttctacggcctgagcgagaacgacgagtggacccaggacagagccaagcccgtgacccagatcgtgtctgccgaagcctggggcagagccgattgcggctttaccagcgagagctaccagcagggcgtgctgagcgccaccaacctgagcgtgatcggcttcagaatcctgctgctgaaagtggccggctttaacctgctgatgaccctgcggctgtggtccagccgggttaagttttccagatccgcagacgcacccgcttaccaacaagggcagaaccaactctacaatgaacttaatttggggcggagggaagagtacgacgttctggacaaaaggaggggacgagatcccgagatgggcggaaagcctcagcgaaggaagaatccgcaagaggggctttataacgaactccagaaagataaaatggcagaagcctatagtgagattgggatgaagggagaaaggaggaggggtaaaggtcacgatgggttgtaccaaggattgagcacagccactaaagatacctatgatgcgctccacatgcaggccctgccgccaaga

SEQ ID NO: 24155 - DNA, 804 bp, synthetic construct
  source 1..804: mol_type = other DNA
gagatcagccacacccagaaagccaccctcgtgtgcctggctaccggcttctaccccgaccatgtggaactgtcttggtgggtcaacggcaaagaggtgcacagcggcgtgtgtaccgacccccagccactgaaagaacagcccgccctgaacgacagccggtactgcctgagcagcagactgagagtgtccgccaccttctggcagaacccccggaaccacttcagatgccaggtgcagttctacggcctgagcgagaacgacgagtggacccaggacagagccaagcccgtgacccagatcgtgtctgccgaagcctggggcagagccgattgcggctttaccagcgagagctaccagcagggcgtgctgagcgccaccaacctgagcgtgatcggcttcagaatcctgctgctgaaagtggccggctttaacctgctgatgaccctgcggctgtggtccagccgggttaagttttccagatccgcagacgcacccgcttaccaacaagggcagaaccaactctacaatgaacttaatttggggcggagggaagagtacgacgttctggacaaaaggaggggacgagatcccgagatgggcggaaagcctcagcgaaggaagaatccgcaagaggggctttataacgaactccagaaagataaaatggcagaagcctatagtgagattgggatgaagggagaaaggaggaggggtaaaggtcacgatgggttgtaccaaggattgagcacagccactaaagatacctatgatgcgctccacatgcaggccctgccgccaaga

SEQ ID NO: 24156 - DNA, 801 bp, synthetic construct
  source 1..801: mol_type = other DNA
atcagccacacccagaaagccaccctcgtgtgcctggctaccggcttctaccccgaccatgtggaactgtcttggtgggtcaacggcaaagaggtgcacagcggcgtgtgtaccgacccccagccactgaaagaacagcccgccctgaacgacagccggtactgcctgagcagcagactgagagtgtccgccaccttctggcagaacccccggaaccacttcagatgccaggtgcagttctacggcctgagcgagaacgacgagtggacccaggacagagccaagcccgtgacccagatcgtgtctgccgaagcctggggcagagccgattgcggctttaccagcgagagctaccagcagggcgtgctgagcgccaccaacctgagcgtgatcggcttcagaatcctgctgctgaaagtggccggctttaacctgctgatgaccctgcggctgtggtccagccgggttaagttttccagatccgcagacgcacccgcttaccaacaagggcagaaccaactctacaatgaacttaatttggggcggagggaagagtacgacgttctggacaaaaggaggggacgagatcccgagatgggcggaaagcctcagcgaaggaagaatccgcaagaggggctttataacgaactccagaaagataaaatggcagaagcctatagtgagattgggatgaagggagaaaggaggaggggtaaaggtcacgatgggttgtaccaaggattgagcacagccactaaagatacctatgatgcgctccacatgcaggccctgccgccaaga

SEQ ID NO: 24157 - DNA, 798 bp, synthetic construct
  source 1..798: mol_type = other DNA
agccacacccagaaagccaccctcgtgtgcctggctaccggcttctaccccgaccatgtggaactgtcttggtgggtcaacggcaaagaggtgcacagcggcgtgtgtaccgacccccagccactgaaagaacagcccgccctgaacgacagccggtactgcctgagcagcagactgagagtgtccgccaccttctggcagaacccccggaaccacttcagatgccaggtgcagttctacggcctgagcgagaacgacgagtggacccaggacagagccaagcccgtgacccagatcgtgtctgccgaagcctggggcagagccgattgcggctttaccagcgagagctaccagcagggcgtgctgagcgccaccaacctgagcgtgatcggcttcagaatcctgctgctgaaagtggccggctttaacctgctgatgaccctgcggctgtggtccagccgggttaagttttccagatccgcagacgcacccgcttaccaacaagggcagaaccaactctacaatgaacttaatttggggcggagggaagagtacgacgttctggacaaaaggaggggacgagatcccgagatgggcggaaagcctcagcgaaggaagaatccgcaagaggggctttataacgaactccagaaagataaaatggcagaagcctatagtgagattgggatgaagggagaaaggaggaggggtaaaggtcacgatgggttgtaccaaggattgagcacagccactaaagatacctatgatgcgctccacatgcaggccctgccgccaaga

SEQ ID NO: 24158 - DNA, 783 bp, synthetic construct
  source 1..783: mol_type = other DNA
gccaccctcgtgtgcctggctaccggcttctaccccgaccatgtggaactgtcttggtgggtcaacggcaaagaggtgcacagcggcgtgtgtaccgacccccagccactgaaagaacagcccgccctgaacgacagccggtactgcctgagcagcagactgagagtgtccgccaccttctggcagaacccccggaaccacttcagatgccaggtgcagttctacggcctgagcgagaacgacgagtggacccaggacagagccaagcccgtgacccagatcgtgtctgccgaagcctggggcagagccgattgcggctttaccagcgagagctaccagcagggcgtgctgagcgccaccaacctgagcgtgatcggcttcagaatcctgctgctgaaagtggccggctttaacctgctgatgaccctgcggctgtggtccagccgggttaagttttccagatccgcagacgcacccgcttaccaacaagggcagaaccaactctacaatgaacttaatttggggcggagggaagagtacgacgttctggacaaaaggaggggacgagatcccgagatgggcggaaagcctcagcgaaggaagaatccgcaagaggggctttataacgaactccagaaagataaaatggcagaagcctatagtgagattgggatgaagggagaaaggaggaggggtaaaggtcacgatgggttgtaccaaggattgagcacagccactaaagatacctatgatgcgctccacatgcaggccctgccgccaaga

SEQ ID NO: 24159 - DNA, 768 bp, synthetic construct
  source 1..768: mol_type = other DNA
ctggctaccggcttctaccccgaccatgtggaactgtcttggtgggtcaacggcaaagaggtgcacagcggcgtgtgtaccgacccccagccactgaaagaacagcccgccctgaacgacagccggtactgcctgagcagcagactgagagtgtccgccaccttctggcagaacccccggaaccacttcagatgccaggtgcagttctacggcctgagcgagaacgacgagtggacccaggacagagccaagcccgtgacccagatcgtgtctgccgaagcctggggcagagccgattgcggctttaccagcgagagctaccagcagggcgtgctgagcgccaccaacctgagcgtgatcggcttcagaatcctgctgctgaaagtggccggctttaacctgctgatgaccctgcggctgtggtccagccgggttaagttttccagatccgcagacgcacccgcttaccaacaagggcagaaccaactctacaatgaacttaatttggggcggagggaagagtacgacgttctggacaaaaggaggggacgagatcccgagatgggcggaaagcctcagcgaaggaagaatccgcaagaggggctttataacgaactccagaaagataaaatggcagaagcctatagtgagattgggatgaagggagaaaggaggaggggtaaaggtcacgatgggttgtaccaaggattgagcacagccactaaagatacctatgatgcgctccacatgcaggccctgccgccaaga

SEQ ID NO: 24160 - DNA, 1125 bp, synthetic construct
  source 1..1125: mol_type = other DNA
gacctgaagaacgtgttcccacctgaggtggccgtgttcgagcctagcgaggccgagatcagccacacccagaaagccaccctcgtgtgcctggctaccggcttctaccccgaccatgtggaactgtcttggtgggtcaacggcaaagaggtgcacagcggcgtgtgtaccgacccccagccactgaaagaacagcccgccctgaacgacagccggtactgcctgagcagcagactgagagtgtccgccaccttctggcagaacccccggaaccacttcagatgccaggtgcagttctacggcctgagcgagaacgacgagtggacccaggacagagccaagcccgtgacccagatcgtgtctgccgaagcctggggcagagccgatgatgtgattaagatccactggcaggaaaagaagtccaacaccatcctgggcagccaggaaggcaacaccatgaagaccaacgacacctacatgaagttcagctggctgaccgtgcccgagaagtccctggacaaagaacacagatgcatcgtgcggcacgaaaacaacaagaacggcgtggaccaggaaatcatcttcccacccatcaagaccgatgtgattacaatggaccccaaggacaactgctccaaggacgccaacgataccctgctgctccagctgaccaacaccagcgcctactacatgtacttgttgctgctgctgaagtccgtggtgtacttcgccatcatcacatgctgcctgctgatggctatggtcaagcggaaggacagccggggacgggttaagttttccagatccgcagacgcacccgcttaccaacaagggcagaaccaactctacaatgaacttaatttggggcggagggaagagtacgacgttctggacaaaaggaggggacgagatcccgagatgggcggaaagcctcagcgaaggaagaatccgcaagaggggctttataacgaactccagaaagataaaatggcagaagcctatagtgagattgggatgaagggagaaaggaggaggggtaaaggtcacgatgggttgtaccaaggattgagcacagccactaaagatacctatgatgcgctccacatgcaggccctgccgccaaga

SEQ ID NO: 24161 - DNA, 1122 bp, synthetic construct
  source 1..1122: mol_type = other DNA
ctgaagaacgtgttcccacctgaggtggccgtgttcgagcctagcgaggccgagatcagccacacccagaaagccaccctcgtgtgcctggctaccggcttctaccccgaccatgtggaactgtcttggtgggtcaacggcaaagaggtgcacagcggcgtgtgtaccgacccccagccactgaaagaacagcccgccctgaacgacagccggtactgcctgagcagcagactgagagtgtccgccaccttctggcagaacccccggaaccacttcagatgccaggtgcagttctacggcctgagcgagaacgacgagtggacccaggacagagccaagcccgtgacccagatcgtgtctgccgaagcctggggcagagccgatgatgtgattaagatccactggcaggaaaagaagtccaacaccatcctgggcagccaggaaggcaacaccatgaagaccaacgacacctacatgaagttcagctggctgaccgtgcccgagaagtccctggacaaagaacacagatgcatcgtgcggcacgaaaacaacaagaacggcgtggaccaggaaatcatcttcccacccatcaagaccgatgtgattacaatggaccccaaggacaactgctccaaggacgccaacgataccctgctgctccagctgaccaacaccagcgcctactacatgtacttgttgctgctgctgaagtccgtggtgtacttcgccatcatcacatgctgcctgctgatggctatggtcaagcggaaggacagccggggacgggttaagttttccagatccgcagacgcacccgcttaccaacaagggcagaaccaactctacaatgaacttaatttggggcggagggaagagtacgacgttctggacaaaaggaggggacgagatcccgagatgggcggaaagcctcagcgaaggaagaatccgcaagaggggctttataacgaactccagaaagataaaatggcagaagcctatagtgagattgggatgaagggagaaaggaggaggggtaaaggtcacgatgggttgtaccaaggattgagcacagccactaaagatacctatgatgcgctccacatgcaggccctgccgccaaga

SEQ ID NO: 24162 - DNA, 1119 bp, synthetic construct
  source 1..1119: mol_type = other DNA
aagaacgtgttcccacctgaggtggccgtgttcgagcctagcgaggccgagatcagccacacccagaaagccaccctcgtgtgcctggctaccggcttctaccccgaccatgtggaactgtcttggtgggtcaacggcaaagaggtgcacagcggcgtgtgtaccgacccccagccactgaaagaacagcccgccctgaacgacagccggtactgcctgagcagcagactgagagtgtccgccaccttctggcagaacccccggaaccacttcagatgccaggtgcagttctacggcctgagcgagaacgacgagtggacccaggacagagccaagcccgtgacccagatcgtgtctgccgaagcctggggcagagccgatgatgtgattaagatccactggcaggaaaagaagtccaacaccatcctgggcagccaggaaggcaacaccatgaagaccaacgacacctacatgaagttcagctggctgaccgtgcccgagaagtccctggacaaagaacacagatgcatcgtgcggcacgaaaacaacaagaacggcgtggaccaggaaatcatcttcccacccatcaagaccgatgtgattacaatggaccccaaggacaactgctccaaggacgccaacgataccctgctgctccagctgaccaacaccagcgcctactacatgtacttgttgctgctgctgaagtccgtggtgtacttcgccatcatcacatgctgcctgctgatggctatggtcaagcggaaggacagccggggacgggttaagttttccagatccgcagacgcacccgcttaccaacaagggcagaaccaactctacaatgaacttaatttggggcggagggaagagtacgacgttctggacaaaaggaggggacgagatcccgagatgggcggaaagcctcagcgaaggaagaatccgcaagaggggctttataacgaactccagaaagataaaatggcagaagcctatagtgagattgggatgaagggagaaaggaggaggggtaaaggtcacgatgggttgtaccaaggattgagcacagccactaaagatacctatgatgcgctccacatgcaggccctgccgccaaga

SEQ ID NO: 24163 - DNA, 1116 bp, synthetic construct
  source 1..1116: mol_type = other DNA
aacgtgttcccacctgaggtggccgtgttcgagcctagcgaggccgagatcagccacacccagaaagccaccctcgtgtgcctggctaccggcttctaccccgaccatgtggaactgtcttggtgggtcaacggcaaagaggtgcacagcggcgtgtgtaccgacccccagccactgaaagaacagcccgccctgaacgacagccggtactgcctgagcagcagactgagagtgtccgccaccttctggcagaacccccggaaccacttcagatgccaggtgcagttctacggcctgagcgagaacgacgagtggacccaggacagagccaagcccgtgacccagatcgtgtctgccgaagcctggggcagagccgatgatgtgattaagatccactggcaggaaaagaagtccaacaccatcctgggcagccaggaaggcaacaccatgaagaccaacgacacctacatgaagttcagctggctgaccgtgcccgagaagtccctggacaaagaacacagatgcatcgtgcggcacgaaaacaacaagaacggcgtggaccaggaaatcatcttcccacccatcaagaccgatgtgattacaatggaccccaaggacaactgctccaaggacgccaacgataccctgctgctccagctgaccaacaccagcgcctactacatgtacttgttgctgctgctgaagtccgtggtgtacttcgccatcatcacatgctgcctgctgatggctatggtcaagcggaaggacagccggggacgggttaagttttccagatccgcagacgcacccgcttaccaacaagggcagaaccaactctacaatgaacttaatttggggcggagggaagagtacgacgttctggacaaaaggaggggacgagatcccgagatgggcggaaagcctcagcgaaggaagaatccgcaagaggggctttataacgaactccagaaagataaaatggcagaagcctatagtgagattgggatgaagggagaaaggaggaggggtaaaggtcacgatgggttgtaccaaggattgagcacagccactaaagatacctatgatgcgctccacatgcaggccctgccgccaaga

SEQ ID NO: 24164 - DNA, 1113 bp, synthetic construct
  source 1..1113: mol_type = other DNA
gtgttcccacctgaggtggccgtgttcgagcctagcgaggccgagatcagccacacccagaaagccaccctcgtgtgcctggctaccggcttctaccccgaccatgtggaactgtcttggtgggtcaacggcaaagaggtgcacagcggcgtgtgtaccgacccccagccactgaaagaacagcccgccctgaacgacagccggtactgcctgagcagcagactgagagtgtccgccaccttctggcagaacccccggaaccacttcagatgccaggtgcagttctacggcctgagcgagaacgacgagtggacccaggacagagccaagcccgtgacccagatcgtgtctgccgaagcctggggcagagccgatgatgtgattaagatccactggcaggaaaagaagtccaacaccatcctgggcagccaggaaggcaacaccatgaagaccaacgacacctacatgaagttcagctggctgaccgtgcccgagaagtccctggacaaagaacacagatgcatcgtgcggcacgaaaacaacaagaacggcgtggaccaggaaatcatcttcccacccatcaagaccgatgtgattacaatggaccccaaggacaactgctccaaggacgccaacgataccctgctgctccagctgaccaacaccagcgcctactacatgtacttgttgctgctgctgaagtccgtggtgtacttcgccatcatcacatgctgcctgctgatggctatggtcaagcggaaggacagccggggacgggttaagttttccagatccgcagacgcacccgcttaccaacaagggcagaaccaactctacaatgaacttaatttggggcggagggaagagtacgacgttctggacaaaaggaggggacgagatcccgagatgggcggaaagcctcagcgaaggaagaatccgcaagaggggctttataacgaactccagaaagataaaatggcagaagcctatagtgagattgggatgaagggagaaaggaggaggggtaaaggtcacgatgggttgtaccaaggattgagcacagccactaaagatacctatgatgcgctccacatgcaggccctgccgccaaga

SEQ ID NO: 24165 - DNA, 1110 bp, synthetic construct
  source 1..1110: mol_type = other DNA
ttcccacctgaggtggccgtgttcgagcctagcgaggccgagatcagccacacccagaaagccaccctcgtgtgcctggctaccggcttctaccccgaccatgtggaactgtcttggtgggtcaacggcaaagaggtgcacagcggcgtgtgtaccgacccccagccactgaaagaacagcccgccctgaacgacagccggtactgcctgagcagcagactgagagtgtccgccaccttctggcagaacccccggaaccacttcagatgccaggtgcagttctacggcctgagcgagaacgacgagtggacccaggacagagccaagcccgtgacccagatcgtgtctgccgaagcctggggcagagccgatgatgtgattaagatccactggcaggaaaagaagtccaacaccatcctgggcagccaggaaggcaacaccatgaagaccaacgacacctacatgaagttcagctggctgaccgtgcccgagaagtccctggacaaagaacacagatgcatcgtgcggcacgaaaacaacaagaacggcgtggaccaggaaatcatcttcccacccatcaagaccgatgtgattacaatggaccccaaggacaactgctccaaggacgccaacgataccctgctgctccagctgaccaacaccagcgcctactacatgtacttgttgctgctgctgaagtccgtggtgtacttcgccatcatcacatgctgcctgctgatggctatggtcaagcggaaggacagccggggacgggttaagttttccagatccgcagacgcacccgcttaccaacaagggcagaaccaactctacaatgaacttaatttggggcggagggaagagtacgacgttctggacaaaaggaggggacgagatcccgagatgggcggaaagcctcagcgaaggaagaatccgcaagaggggctttataacgaactccagaaagataaaatggcagaagcctatagtgagattgggatgaagggagaaaggaggaggggtaaaggtcacgatgggttgtaccaaggattgagcacagccactaaagatacctatgatgcgctccacatgcaggccctgccgccaaga

SEQ ID NO: 24166 - DNA, 1107 bp, synthetic construct
  source 1..1107: mol_type = other DNA
ccacctgaggtggccgtgttcgagcctagcgaggccgagatcagccacacccagaaagccaccctcgtgtgcctggctaccggcttctaccccgaccatgtggaactgtcttggtgggtcaacggcaaagaggtgcacagcggcgtgtgtaccgacccccagccactgaaagaacagcccgccctgaacgacagccggtactgcctgagcagcagactgagagtgtccgccaccttctggcagaacccccggaaccacttcagatgccaggtgcagttctacggcctgagcgagaacgacgagtggacccaggacagagccaagcccgtgacccagatcgtgtctgccgaagcctggggcagagccgatgatgtgattaagatccactggcaggaaaagaagtccaacaccatcctgggcagccaggaaggcaacaccatgaagaccaacgacacctacatgaagttcagctggctgaccgtgcccgagaagtccctggacaaagaacacagatgcatcgtgcggcacgaaaacaacaagaacggcgtggaccaggaaatcatcttcccacccatcaagaccgatgtgattacaatggaccccaaggacaactgctccaaggacgccaacgataccctgctgctccagctgaccaacaccagcgcctactacatgtacttgttgctgctgctgaagtccgtggtgtacttcgccatcatcacatgctgcctgctgatggctatggtcaagcggaaggacagccggggacgggttaagttttccagatccgcagacgcacccgcttaccaacaagggcagaaccaactctacaatgaacttaatttggggcggagggaagagtacgacgttctggacaaaaggaggggacgagatcccgagatgggcggaaagcctcagcgaaggaagaatccgcaagaggggctttataacgaactccagaaagataaaatggcagaagcctatagtgagattgggatgaagggagaaaggaggaggggtaaaggtcacgatgggttgtaccaaggattgagcacagccactaaagatacctatgatgcgctccacatgcaggccctgccgccaaga

SEQ ID NO: 24167 - DNA, 1104 bp, synthetic construct
  source 1..1104: mol_type = other DNA
cctgaggtggccgtgttcgagcctagcgaggccgagatcagccacacccagaaagccaccctcgtgtgcctggctaccggcttctaccccgaccatgtggaactgtcttggtgggtcaacggcaaagaggtgcacagcggcgtgtgtaccgacccccagccactgaaagaacagcccgccctgaacgacagccggtactgcctgagcagcagactgagagtgtccgccaccttctggcagaacccccggaaccacttcagatgccaggtgcagttctacggcctgagcgagaacgacgagtggacccaggacagagccaagcccgtgacccagatcgtgtctgccgaagcctggggcagagccgatgatgtgattaagatccactggcaggaaaagaagtccaacaccatcctgggcagccaggaaggcaacaccatgaagaccaacgacacctacatgaagttcagctggctgaccgtgcccgagaagtccctggacaaagaacacagatgcatcgtgcggcacgaaaacaacaagaacggcgtggaccaggaaatcatcttcccacccatcaagaccgatgtgattacaatggaccccaaggacaactgctccaaggacgccaacgataccctgctgctccagctgaccaacaccagcgcctactacatgtacttgttgctgctgctgaagtccgtggtgtacttcgccatcatcacatgctgcctgctgatggctatggtcaagcggaaggacagccggggacgggttaagttttccagatccgcagacgcacccgcttaccaacaagggcagaaccaactctacaatgaacttaatttggggcggagggaagagtacgacgttctggacaaaaggaggggacgagatcccgagatgggcggaaagcctcagcgaaggaagaatccgcaagaggggctttataacgaactccagaaagataaaatggcagaagcctatagtgagattgggatgaagggagaaaggaggaggggtaaaggtcacgatgggttgtaccaaggattgagcacagccactaaagatacctatgatgcgctccacatgcaggccctgccgccaaga

SEQ ID NO: 24168 - DNA, 1101 bp, synthetic construct
  source 1..1101: mol_type = other DNA
gaggtggccgtgttcgagcctagcgaggccgagatcagccacacccagaaagccaccctcgtgtgcctggctaccggcttctaccccgaccatgtggaactgtcttggtgggtcaacggcaaagaggtgcacagcggcgtgtgtaccgacccccagccactgaaagaacagcccgccctgaacgacagccggtactgcctgagcagcagactgagagtgtccgccaccttctggcagaacccccggaaccacttcagatgccaggtgcagttctacggcctgagcgagaacgacgagtggacccaggacagagccaagcccgtgacccagatcgtgtctgccgaagcctggggcagagccgatgatgtgattaagatccactggcaggaaaagaagtccaacaccatcctgggcagccaggaaggcaacaccatgaagaccaacgacacctacatgaagttcagctggctgaccgtgcccgagaagtccctggacaaagaacacagatgcatcgtgcggcacgaaaacaacaagaacggcgtggaccaggaaatcatcttcccacccatcaagaccgatgtgattacaatggaccccaaggacaactgctccaaggacgccaacgataccctgctgctccagctgaccaacaccagcgcctactacatgtacttgttgctgctgctgaagtccgtggtgtacttcgccatcatcacatgctgcctgctgatggctatggtcaagcggaaggacagccggggacgggttaagttttccagatccgcagacgcacccgcttaccaacaagggcagaaccaactctacaatgaacttaatttggggcggagggaagagtacgacgttctggacaaaaggaggggacgagatcccgagatgggcggaaagcctcagcgaaggaagaatccgcaagaggggctttataacgaactccagaaagataaaatggcagaagcctatagtgagattgggatgaagggagaaaggaggaggggtaaaggtcacgatgggttgtaccaaggattgagcacagccactaaagatacctatgatgcgctccacatgcaggccctgccgccaaga

SEQ ID NO: 24169 - DNA, 1098 bp, synthetic construct
  source 1..1098: mol_type = other DNA
gtggccgtgttcgagcctagcgaggccgagatcagccacacccagaaagccaccctcgtgtgcctggctaccggcttctaccccgaccatgtggaactgtcttggtgggtcaacggcaaagaggtgcacagcggcgtgtgtaccgacccccagccactgaaagaacagcccgccctgaacgacagccggtactgcctgagcagcagactgagagtgtccgccaccttctggcagaacccccggaaccacttcagatgccaggtgcagttctacggcctgagcgagaacgacgagtggacccaggacagagccaagcccgtgacccagatcgtgtctgccgaagcctggggcagagccgatgatgtgattaagatccactggcaggaaaagaagtccaacaccatcctgggcagccaggaaggcaacaccatgaagaccaacgacacctacatgaagttcagctggctgaccgtgcccgagaagtccctggacaaagaacacagatgcatcgtgcggcacgaaaacaacaagaacggcgtggaccaggaaatcatcttcccacccatcaagaccgatgtgattacaatggaccccaaggacaactgctccaaggacgccaacgataccctgctgctccagctgaccaacaccagcgcctactacatgtacttgttgctgctgctgaagtccgtggtgtacttcgccatcatcacatgctgcctgctgatggctatggtcaagcggaaggacagccggggacgggttaagttttccagatccgcagacgcacccgcttaccaacaagggcagaaccaactctacaatgaacttaatttggggcggagggaagagtacgacgttctggacaaaaggaggggacgagatcccgagatgggcggaaagcctcagcgaaggaagaatccgcaagaggggctttataacgaactccagaaagataaaatggcagaagcctatagtgagattgggatgaagggagaaaggaggaggggtaaaggtcacgatgggttgtaccaaggattgagcacagccactaaagatacctatgatgcgctccacatgcaggccctgccgccaaga

SEQ ID NO: 24170 - DNA, 1095 bp, synthetic construct
  source 1..1095: mol_type = other DNA
gccgtgttcgagcctagcgaggccgagatcagccacacccagaaagccaccctcgtgtgcctggctaccggcttctaccccgaccatgtggaactgtcttggtgggtcaacggcaaagaggtgcacagcggcgtgtgtaccgacccccagccactgaaagaacagcccgccctgaacgacagccggtactgcctgagcagcagactgagagtgtccgccaccttctggcagaacccccggaaccacttcagatgccaggtgcagttctacggcctgagcgagaacgacgagtggacccaggacagagccaagcccgtgacccagatcgtgtctgccgaagcctggggcagagccgatgatgtgattaagatccactggcaggaaaagaagtccaacaccatcctgggcagccaggaaggcaacaccatgaagaccaacgacacctacatgaagttcagctggctgaccgtgcccgagaagtccctggacaaagaacacagatgcatcgtgcggcacgaaaacaacaagaacggcgtggaccaggaaatcatcttcccacccatcaagaccgatgtgattacaatggaccccaaggacaactgctccaaggacgccaacgataccctgctgctccagctgaccaacaccagcgcctactacatgtacttgttgctgctgctgaagtccgtggtgtacttcgccatcatcacatgctgcctgctgatggctatggtcaagcggaaggacagccggggacgggttaagttttccagatccgcagacgcacccgcttaccaacaagggcagaaccaactctacaatgaacttaatttggggcggagggaagagtacgacgttctggacaaaaggaggggacgagatcccgagatgggcggaaagcctcagcgaaggaagaatccgcaagaggggctttataacgaactccagaaagataaaatggcagaagcctatagtgagattgggatgaagggagaaaggaggaggggtaaaggtcacgatgggttgtaccaaggattgagcacagccactaaagatacctatgatgcgctccacatgcaggccctgccgccaaga

SEQ ID NO: 24171 - DNA, 1131 bp, synthetic construct; identical to SEQ ID NO: 23975
  source 1..1131: mol_type = other DNA

SEQ ID NO: 24172 - DNA, 1128 bp, synthetic construct
  source 1..1128: mol_type = other DNA
gacctgaagaacgtgttcccacctgaggtggccgtgttcgagcctagcgaggccgagatcagccacacccagaaagccaccctcgtgtgcctggctaccggcttctaccccgaccatgtggaactgtcttggtgggtcaacggcaaagaggtgcacagcggcgtgtgtaccgacccccagccactgaaagaacagcccgccctgaacgacagccggtactgcctgagcagcagactgagagtgtccgccaccttctggcagaacccccggaaccacttcagatgccaggtgcagttctacggcctgagcgagaacgacgagtggacccaggacagagccaagcccgtgacccagatcgtgtctgccgaagcctggggcagagccgatgatgtgattaagatccactggcaggaaaagaagtccaacaccatcctgggcagccaggaaggcaacaccatgaagaccaacgacacctacatgaagttcagctggctgaccgtgcccgagaagtccctggacaaagaacacagatgcatcgtgcggcacgaaaacaacaagaacggcgtggaccaggaaatcatcttcccacccatcaagaccgatgtgattacaatggaccccaaggacaactgctccaaggacgccaacgataccctgctgctccagctgaccaacaccagcgcctactacatgtacttgttgctgctgctgaagtccgtggtgtacttcgccatcatcacatgctgcctgctgcggagaaccgccttctgctgcaacggcgagaagtctcgggttaagttttccagatccgcagacgcacccgcttaccaacaagggcagaaccaactctacaatgaacttaatttggggcggagggaagagtacgacgttctggacaaaaggaggggacgagatcccgagatgggcggaaagcctcagcgaaggaagaatccgcaagaggggctttataacgaactccagaaagataaaatggcagaagcctatagtgagattgggatgaagggagaaaggaggaggggtaaaggtcacgatgggttgtaccaaggattgagcacagccactaaagatacctatgatgcgctccacatgcaggccctgccgccaaga

SEQ ID NO: 24173 - DNA, 1125 bp, synthetic construct
  source 1..1125: mol_type = other DNA
ctgaagaacgtgttcccacctgaggtggccgtgttcgagcctagcgaggccgagatcagccacacccagaaagccaccctcgtgtgcctggctaccggcttctaccccgaccatgtggaactgtcttggtgggtcaacggcaaagaggtgcacagcggcgtgtgtaccgacccccagccactgaaagaacagcccgccctgaacgacagccggtactgcctgagcagcagactgagagtgtccgccaccttctggcagaacccccggaaccacttcagatgccaggtgcagttctacggcctgagcgagaacgacgagtggacccaggacagagccaagcccgtgacccagatcgtgtctgccgaagcctggggcagagccgatgatgtgattaagatccactggcaggaaaagaagtccaacaccatcctgggcagccaggaaggcaacaccatgaagaccaacgacacctacatgaagttcagctggctgaccgtgcccgagaagtccctggacaaagaacacagatgcatcgtgcggcacgaaaacaacaagaacggcgtggaccaggaaatcatcttcccacccatcaagaccgatgtgattacaatggaccccaaggacaactgctccaaggacgccaacgataccctgctgctccagctgaccaacaccagcgcctactacatgtacttgttgctgctgctgaagtccgtggtgtacttcgccatcatcacatgctgcctgctgcggagaaccgccttctgctgcaacggcgagaagtctcgggttaagttttccagatccgcagacgcacccgcttaccaacaagggcagaaccaactctacaatgaacttaatttggggcggagggaagagtacgacgttctggacaaaaggaggggacgagatcccgagatgggcggaaagcctcagcgaaggaagaatccgcaagaggggctttataacgaactccagaaagataaaatggcagaagcctatagtgagattgggatgaagggagaaaggaggaggggtaaaggtcacgatgggttgtaccaaggattgagcacagccactaaagatacctatgatgcgctccacatgcaggccctgccgccaaga

SEQ ID NO: 24174 - DNA, 1122 bp, synthetic construct
  source 1..1122: mol_type = other DNA
aagaacgtgttcccacctgaggtggccgtgttcgagcctagcgaggccgagatcagccacacccagaaagccaccctcgtgtgcctggctaccggcttctaccccgaccatgtggaactgtcttggtgggtcaacggcaaagaggtgcacagcggcgtgtgtaccgacccccagccactgaaagaacagcccgccctgaacgacagccggtactgcctgagcagcagactgagagtgtccgccaccttctggcagaacccccggaaccacttcagatgccaggtgcagttctacggcctgagcgagaacgacgagtggacccaggacagagccaagcccgtgacccagatcgtgtctgccgaagcctggggcagagccgatgatgtgattaagatccactggcaggaaaagaagtccaacaccatcctgggcagccaggaaggcaacaccatgaagaccaacgacacctacatgaagttcagctggctgaccgtgcccgagaagtccctggacaaagaacacagatgcatcgtgcggcacgaaaacaacaagaacggcgtggaccaggaaatcatcttcccacccatcaagaccgatgtgattacaatggaccccaaggacaactgctccaaggacgccaacgataccctgctgctccagctgaccaacaccagcgcctactacatgtacttgttgctgctgctgaagtccgtggtgtacttcgccatcatcacatgctgcctgctgcggagaaccgccttctgctgcaacggcgagaagtctcgggttaagttttccagatccgcagacgcacccgcttaccaacaagggcagaaccaactctacaatgaacttaatttggggcggagggaagagtacgacgttctggacaaaaggaggggacgagatcccgagatgggcggaaagcctcagcgaaggaagaatccgcaagaggggctttataacgaactccagaaagataaaatggcagaagcctatagtgagattgggatgaagggagaaaggaggaggggtaaaggtcacgatgggttgtaccaaggattgagcacagccactaaagatacctatgatgcgctccacatgcaggccctgccgccaaga

SEQ ID NO: 24175 - DNA, 1119 bp, synthetic construct
  source 1..1119: mol_type = other DNA
aacgtgttcccacctgaggtggccgtgttcgagcctagcgaggccgagatcagccacacccagaaagccaccctcgtgtgcctggctaccggcttctaccccgaccatgtggaactgtcttggtgggtcaacggcaaagaggtgcacagcggcgtgtgtaccgacccccagccactgaaagaacagcccgccctgaacgacagccggtactgcctgagcagcagactgagagtgtccgccaccttctggcagaacccccggaaccacttcagatgccaggtgcagttctacggcctgagcgagaacgacgagtggacccaggacagagccaagcccgtgacccagatcgtgtctgccgaagcctggggcagagccgatgatgtgattaagatccactggcaggaaaagaagtccaacaccatcctgggcagccaggaaggcaacaccatgaagaccaacgacacctacatgaagttcagctggctgaccgtgcccgagaagtccctggacaaagaacacagatgcatcgtgcggcacgaaaacaacaagaacggcgtggaccaggaaatcatcttcccacccatcaagaccgatgtgattacaatggaccccaaggacaactgctccaaggacgccaacgataccctgctgctccagctgaccaacaccagcgcctactacatgtacttgttgctgctgctgaagtccgtggtgtacttcgccatcatcacatgctgcctgctgcggagaaccgccttctgctgcaacggcgagaagtctcgggttaagttttccagatccgcagacgcacccgcttaccaacaagggcagaaccaactctacaatgaacttaatttggggcggagggaagagtacgacgttctggacaaaaggaggggacgagatcccgagatgggcggaaagcctcagcgaaggaagaatccgcaagaggggctttataacgaactccagaaagataaaatggcagaagcctatagtgagattgggatgaagggagaaaggaggaggggtaaaggtcacgatgggttgtaccaaggattgagcacagccactaaagatacctatgatgcgctccacatgcaggccctgccgccaaga

SEQ ID NO: 24176 - DNA, 1116 bp, synthetic construct
  source 1..1116: mol_type = other DNA
gtgttcccacctgaggtggccgtgttcgagcctagcgaggccgagatcagccacacccagaaagccaccctcgtgtgcctggctaccggcttctaccccgaccatgtggaactgtcttggtgggtcaacggcaaagaggtgcacagcggcgtgtgtaccgacccccagccactgaaagaacagcccgccctgaacgacagccggtactgcctgagcagcagactgagagtgtccgccaccttctggcagaacccccggaaccacttcagatgccaggtgcagttctacggcctgagcgagaacgacgagtggacccaggacagagccaagcccgtgacccagatcgtgtctgccgaagcctggggcagagccgatgatgtgattaagatccactggcaggaaaagaagtccaacaccatcctgggcagccaggaaggcaacaccatgaagaccaacgacacctacatgaagttcagctggctgaccgtgcccgagaagtccctggacaaagaacacagatgcatcgtgcggcacgaaaacaacaagaacggcgtggaccaggaaatcatcttcccacccatcaagaccgatgtgattacaatggaccccaaggacaactgctccaaggacgccaacgataccctgctgctccagctgaccaacaccagcgcctactacatgtacttgttgctgctgctgaagtccgtggtgtacttcgccatcatcacatgctgcctgctgcggagaaccgccttctgctgcaacggcgagaagtctcgggttaagttttccagatccgcagacgcacccgcttaccaacaagggcagaaccaactctacaatgaacttaatttggggcggagggaagagtacgacgttctggacaaaaggaggggacgagatcccgagatgggcggaaagcctcagcgaaggaagaatccgcaagaggggctttataacgaactccagaaagataaaatggcagaagcctatagtgagattgggatgaagggagaaaggaggaggggtaaaggtcacgatgggttgtaccaaggattgagcacagccactaaagatacctatgatgcgctccacatgcaggccctgccgccaaga

SEQ ID NO: 24177 - DNA, 1113 bp, synthetic construct
  source 1..1113: mol_type = other DNA
ttcccacctgaggtggccgtgttcgagcctagcgaggccgagatcagccacacccagaaagccaccctcgtgtgcctggctaccggcttctaccccgaccatgtggaactgtcttggtgggtcaacggcaaagaggtgcacagcggcgtgtgtaccgacccccagccactgaaagaacagcccgccctgaacgacagccggtactgcctgagcagcagactgagagtgtccgccaccttctggcagaacccccggaaccacttcagatgccaggtgcagttctacggcctgagcgagaacgacgagtggacccaggacagagccaagcccgtgacccagatcgtgtctgccgaagcctggggcagagccgatgatgtgattaagatccactggcaggaaaagaagtccaacaccatcctgggcagccaggaaggcaacaccatgaagaccaacgacacctacatgaagttcagctggctgaccgtgcccgagaagtccctggacaaagaacacagatgcatcgtgcggcacgaaaacaacaagaacggcgtggaccaggaaatcatcttcccacccatcaagaccgatgtgattacaatggaccccaaggacaactgctccaaggacgccaacgataccctgctgctccagctgaccaacaccagcgcctactacatgtacttgttgctgctgctgaagtccgtggtgtacttcgccatcatcacatgctgcctgctgcggagaaccgccttctgctgcaacggcgagaagtctcgggttaagttttccagatccgcagacgcacccgcttaccaacaagggcagaaccaactctacaatgaacttaatttggggcggagggaagagtacgacgttctggacaaaaggaggggacgagatcccgagatgggcggaaagcctcagcgaaggaagaatccgcaagaggggctttataacgaactccagaaagataaaatggcagaagcctatagtgagattgggatgaagggagaaaggaggaggggtaaaggtcacgatgggttgtaccaaggattgagcacagccactaaagatacctatgatgcgctccacatgcaggccctgccgccaaga

SEQ ID NO: 24178 - DNA, 1110 bp, synthetic construct
  source 1..1110: mol_type = other DNA
ccacctgaggtggccgtgttcgagcctagcgaggccgagatcagccacacccagaaagccaccctcgtgtgcctggctaccggcttctaccccgaccatgtggaactgtcttggtgggtcaacggcaaagaggtgcacagcggcgtgtgtaccgacccccagccactgaaagaacagcccgccctgaacgacagccggtactgcctgagcagcagactgagagtgtccgccaccttctggcagaacccccggaaccacttcagatgccaggtgcagttctacggcctgagcgagaacgacgagtggacccaggacagagccaagcccgtgacccagatcgtgtctgccgaagcctggggcagagccgatgatgtgattaagatccactggcaggaaaagaagtccaacaccatcctgggcagccaggaaggcaacaccatgaagaccaacgacacctacatgaagttcagctggctgaccgtgcccgagaagtccctggacaaagaacacagatgcatcgtgcggcacgaaaacaacaagaacggcgtggaccaggaaatcatcttcccacccatcaagaccgatgtgattacaatggaccccaaggacaactgctccaaggacgccaacgataccctgctgctccagctgaccaacaccagcgcctactacatgtacttgttgctgctgctgaagtccgtggtgtacttcgccatcatcacatgctgcctgctgcggagaaccgccttctgctgcaacggcgagaagtctcgggttaagttttccagatccgcagacgcacccgcttaccaacaagggcagaaccaactctacaatgaacttaatttggggcggagggaagagtacgacgttctggacaaaaggaggggacgagatcccgagatgggcggaaagcctcagcgaaggaagaatccgcaagaggggctttataacgaactccagaaagataaaatggcagaagcctatagtgagattgggatgaagggagaaaggaggaggggtaaaggtcacgatgggttgtaccaaggattgagcacagccactaaagatacctatgatgcgctccacatgcaggccctgccgccaaga

SEQ ID NO: 24179 - DNA, 1107 bp, synthetic construct
  source 1..1107: mol_type = other DNA
cctgaggtggccgtgttcgagcctagcgaggccgagatcagccacacccagaaagccaccctcgtgtgcctggctaccggcttctaccccgaccatgtggaactgtcttggtgggtcaacggcaaagaggtgcacagcggcgtgtgtaccgacccccagccactgaaagaacagcccgccctgaacgacagccggtactgcctgagcagcagactgagagtgtccgccaccttctggcagaacccccggaaccacttcagatgccaggtgcagttctacggcctgagcgagaacgacgagtggacccaggacagagccaagcccgtgacccagatcgtgtctgccgaagcctggggcagagccgatgatgtgattaagatccactggcaggaaaagaagtccaacaccatcctgggcagccaggaaggcaacaccatgaagaccaacgacacctacatgaagttcagctggctgaccgtgcccgagaagtccctggacaaagaacacagatgcatcgtgcggcacgaaaacaacaagaacggcgtggaccaggaaatcatcttcccacccatcaagaccgatgtgattacaatggaccccaaggacaactgctccaaggacgccaacgataccctgctgctccagctgaccaacaccagcgcctactacatgtacttgttgctgctgctgaagtccgtggtgtacttcgccatcatcacatgctgcctgctgcggagaaccgccttctgctgcaacggcgagaagtctcgggttaagttttccagatccgcagacgcacccgcttaccaacaagggcagaaccaactctacaatgaacttaatttggggcggagggaagagtacgacgttctggacaaaaggaggggacgagatcccgagatgggcggaaagcctcagcgaaggaagaatccgcaagaggggctttataacgaactccagaaagataaaatggcagaagcctatagtgagattgggatgaagggagaaaggaggaggggtaaaggtcacgatgggttgtaccaaggattgagcacagccactaaagatacctatgatgcgctccacatgcaggccctgccgccaaga

SEQ ID NO: 24180 - DNA, 1104 bp, synthetic construct
  source 1..1104: mol_type = other DNA
gaggtggccgtgttcgagcctagcgaggccgagatcagccacacccagaaagccaccctcgtgtgcctggctaccggcttctaccccgaccatgtggaactgtcttggtgggtcaacggcaaagaggtgcacagcggcgtgtgtaccgacccccagccactgaaagaacagcccgccctgaacgacagccggtactgcctgagcagcagactgagagtgtccgccaccttctggcagaacccccggaaccacttcagatgccaggtgcagttctacggcctgagcgagaacgacgagtggacccaggacagagccaagcccgtgacccagatcgtgtctgccgaagcctggggcagagccgatgatgtgattaagatccactggcaggaaaagaagtccaacaccatcctgggcagccaggaaggcaacaccatgaagaccaacgacacctacatgaagttcagctggctgaccgtgcccgagaagtccctggacaaagaacacagatgcatcgtgcggcacgaaaacaacaagaacggcgtggaccaggaaatcatcttcccacccatcaagaccgatgtgattacaatggaccccaaggacaactgctccaaggacgccaacgataccctgctgctccagctgaccaacaccagcgcctactacatgtacttgttgctgctgctgaagtccgtggtgtacttcgccatcatcacatgctgcctgctgcggagaaccgccttctgctgcaacggcgagaagtctcgggttaagttttccagatccgcagacgcacccgcttaccaacaagggcagaaccaactctacaatgaacttaatttggggcggagggaagagtacgacgttctggacaaaaggaggggacgagatcccgagatgggcggaaagcctcagcgaaggaagaatccgcaagaggggctttataacgaactccagaaagataaaatggcagaagcctatagtgagattgggatgaagggagaaaggaggaggggtaaaggtcacgatgggttgtaccaaggattgagcacagccactaaagatacctatgatgcgctccacatgcaggccctgccgccaaga

SEQ ID NO: 24181 - DNA, 1101 bp, synthetic construct
  source 1..1101: mol_type = other DNA
gtggccgtgttcgagcctagcgaggccgagatcagccacacccagaaagccaccctcgtgtgcctggctaccggcttctaccccgaccatgtggaactgtcttggtgggtcaacggcaaagaggtgcacagcggcgtgtgtaccgacccccagccactgaaagaacagcccgccctgaacgacagccggtactgcctgagcagcagactgagagtgtccgccaccttctggcagaacccccggaaccacttcagatgccaggtgcagttctacggcctgagcgagaacgacgagtggacccaggacagagccaagcccgtgacccagatcgtgtctgccgaagcctggggcagagccgatgatgtgattaagatccactggcaggaaaagaagtccaacaccatcctgggcagccaggaaggcaacaccatgaagaccaacgacacctacatgaagttcagctggctgaccgtgcccgagaagtccctggacaaagaacacagatgcatcgtgcggcacgaaaacaacaagaacggcgtggaccaggaaatcatcttcccacccatcaagaccgatgtgattacaatggaccccaaggacaactgctccaaggacgccaacgataccctgctgctccagctgaccaacaccagcgcctactacatgtacttgttgctgctgctgaagtccgtggtgtacttcgccatcatcacatgctgcctgctgcggagaaccgccttctgctgcaacggcgagaagtctcgggttaagttttccagatccgcagacgcacccgcttaccaacaagggcagaaccaactctacaatgaacttaatttggggcggagggaagagtacgacgttctggacaaaaggaggggacgagatcccgagatgggcggaaagcctcagcgaaggaagaatccgcaagaggggctttataacgaactccagaaagataaaatggcagaagcctatagtgagattgggatgaagggagaaaggaggaggggtaaaggtcacgatgggttgtaccaaggattgagcacagccactaaagatacctatgatgcgctccacatgcaggccctgccgccaaga

SEQ ID NO: 24182 - DNA, 759 bp, synthetic construct; identical to SEQ ID NO: 23906
  source 1..759: mol_type = other DNA

SEQ ID NO: 24183 - DNA, 756 bp, synthetic construct
  source 1..756: mol_type = other DNA
cagaaccctgatcctgccgtgtaccagctgcgggatagcaagagcagcgacaagagcgtgtgtctgttcaccgacttcgacagccagaccaacgtgtcccagagcaaggactccgacgtgtacatcaccgataagtgcgtgctggacatgcggagcatggacttcaagagcaactccgccgtggcctggtccaacaagtccgatttcgcctgcgccaacgccttcaacaacagcattatccccgaggacacattcttcccaagccccgagagcagctgcgacgtgaagctggtggaaaagagcttcgagacagacaccaacctgaacttccagaacctgagcgtgatcggcttcagaatcctgctgctgaaagtggccggctttaacctgctgatgaccctgcggctgtggtccagccgggttaagttttccagatccgcagacgcacccgcttaccaacaagggcagaaccaactctacaatgaacttaatttggggcggagggaagagtacgacgttctggacaaaaggaggggacgagatcccgagatgggcggaaagcctcagcgaaggaagaatccgcaagaggggctttataacgaactccagaaagataaaatggcagaagcctatagtgagattgggatgaagggagaaaggaggaggggtaaaggtcacgatgggttgtaccaaggattgagcacagccactaaagatacctatgatgcgctccacatgcaggccctgccgccaaga

SEQ ID NO: 24184 - DNA, 753 bp, synthetic construct
  source 1..753: mol_type = other DNA
aaccctgatcctgccgtgtaccagctgcgggatagcaagagcagcgacaagagcgtgtgtctgttcaccgacttcgacagccagaccaacgtgtcccagagcaaggactccgacgtgtacatcaccgataagtgcgtgctggacatgcggagcatggacttcaagagcaactccgccgtggcctggtccaacaagtccgatttcgcctgcgccaacgccttcaacaacagcattatccccgaggacacattcttcccaagccccgagagcagctgcgacgtgaagctggtggaaaagagcttcgagacagacaccaacctgaacttccagaacctgagcgtgatcggcttcagaatcctgctgctgaaagtggccggctttaacctgctgatgaccctgcggctgtggtccagccgggttaagttttccagatccgcagacgcacccgcttaccaacaagggcagaaccaactctacaatgaacttaatttggggcggagggaagagtacgacgttctggacaaaaggaggggacgagatcccgagatgggcggaaagcctcagcgaaggaagaatccgcaagaggggctttataacgaactccagaaagataaaatggcagaagcctatagtgagattgggatgaagggagaaaggaggaggggtaaaggtcacgatgggttgtaccaaggattgagcacagccactaaagatacctatgatgcgctccacatgcaggccctgccgccaaga

SEQ ID NO: 24185 - DNA, 750 bp, synthetic construct; identical to SEQ ID NO: 23907
  source 1..750: mol_type = other DNA

SEQ ID NO: 24186 - DNA, 747 bp, synthetic construct
  source 1..747: mol_type = other DNA
gatcctgccgtgtaccagctgcgggatagcaagagcagcgacaagagcgtgtgtctgttcaccgacttcgacagccagaccaacgtgtcccagagcaaggactccgacgtgtacatcaccgataagtgcgtgctggacatgcggagcatggacttcaagagcaactccgccgtggcctggtccaacaagtccgatttcgcctgcgccaacgccttcaacaacagcattatccccgaggacacattcttcccaagccccgagagcagctgcgacgtgaagctggtggaaaagagcttcgagacagacaccaacctgaacttccagaacctgagcgtgatcggcttcagaatcctgctgctgaaagtggccggctttaacctgctgatgaccctgcggctgtggtccagccgggttaagttttccagatccgcagacgcacccgcttaccaacaagggcagaaccaactctacaatgaacttaatttggggcggagggaagagtacgacgttctggacaaaaggaggggacgagatcccgagatgggcggaaagcctcagcgaaggaagaatccgcaagaggggctttataacgaactccagaaagataaaatggcagaagcctatagtgagattgggatgaagggagaaaggaggaggggtaaaggtcacgatgggttgtaccaaggattgagcacagccactaaagatacctatgatgcgctccacatgcaggccctgccgccaaga

SEQ ID NO: 24187 - DNA, 744 bp, synthetic construct
  source 1..744: mol_type = other DNA
cctgccgtgtaccagctgcgggatagcaagagcagcgacaagagcgtgtgtctgttcaccgacttcgacagccagaccaacgtgtcccagagcaaggactccgacgtgtacatcaccgataagtgcgtgctggacatgcggagcatggacttcaagagcaactccgccgtggcctggtccaacaagtccgatttcgcctgcgccaacgccttcaacaacagcattatccccgaggacacattcttcccaagccccgagagcagctgcgacgtgaagctggtggaaaagagcttcgagacagacaccaacctgaacttccagaacctgagcgtgatcggcttcagaatcctgctgctgaaagtggccggctttaacctgctgatgaccctgcggctgtggtccagccgggttaagttttccagatccgcagacgcacccgcttaccaacaagggcagaaccaactctacaatgaacttaatttggggcggagggaagagtacgacgttctggacaaaaggaggggacgagatcccgagatgggcggaaagcctcagcgaaggaagaatccgcaagaggggctttataacgaactccagaaagataaaatggcagaagcctatagtgagattgggatgaagggagaaaggaggaggggtaaaggtcacgatgggttgtaccaaggattgagcacagccactaaagatacctatgatgcgctccacatgcaggccctgccgccaaga

SEQ ID NO: 24188 - DNA, 741 bp, synthetic construct
  source 1..741: mol_type = other DNA
gccgtgtaccagctgcgggatagcaagagcagcgacaagagcgtgtgtctgttcaccgacttcgacagccagaccaacgtgtcccagagcaaggactccgacgtgtacatcaccgataagtgcgtgctggacatgcggagcatggacttcaagagcaactccgccgtggcctggtccaacaagtccgatttcgcctgcgccaacgccttcaacaacagcattatccccgaggacacattcttcccaagccccgagagcagctgcgacgtgaagctggtggaaaagagcttcgagacagacaccaacctgaacttccagaacctgagcgtgatcggcttcagaatcctgctgctgaaagtggccggctttaacctgctgatgaccctgcggctgtggtccagccgggttaagttttccagatccgcagacgcacccgcttaccaacaagggcagaaccaactctacaatgaacttaatttggggcggagggaagagtacgacgttctggacaaaaggaggggacgagatcccgagatgggcggaaagcctcagcgaaggaagaatccgcaagaggggctttataacgaactccagaaagataaaatggcagaagcctatagtgagattgggatgaagggagaaaggaggaggggtaaaggtcacgatgggttgtaccaaggattgagcacagccactaaagatacctatgatgcgctccacatgcaggccctgccgccaaga

SEQ ID NO: 24189 - DNA, 738 bp, synthetic construct
  source 1..738: mol_type = other DNA
gtgtaccagctgcgggatagcaagagcagcgacaagagcgtgtgtctgttcaccgacttcgacagccagaccaacgtgtcccagagcaaggactccgacgtgtacatcaccgataagtgcgtgctggacatgcggagcatggacttcaagagcaactccgccgtggcctggtccaacaagtccgatttcgcctgcgccaacgccttcaacaacagcattatccccgaggacacattcttcccaagccccgagagcagctgcgacgtgaagctggtggaaaagagcttcgagacagacaccaacctgaacttccagaacctgagcgtgatcggcttcagaatcctgctgctgaaagtggccggctttaacctgctgatgaccctgcggctgtggtccagccgggttaagttttccagatccgcagacgcacccgcttaccaacaagggcagaaccaactctacaatgaacttaatttggggcggagggaagagtacgacgttctggacaaaaggaggggacgagatcccgagatgggcggaaagcctcagcgaaggaagaatccgcaagaggggctttataacgaactccagaaagataaaatggcagaagcctatagtgagattgggatgaagggagaaaggaggaggggtaaaggtcacgatgggttgtaccaaggattgagcacagccactaaagatacctatgatgcgctccacatgcaggccctgccgccaaga

SEQ ID NO: 24190 - DNA, 735 bp, synthetic construct
  source 1..735: mol_type = other DNA
taccagctgcgggatagcaagagcagcgacaagagcgtgtgtctgttcaccgacttcgacagccagaccaacgtgtcccagagcaaggactccgacgtgtacatcaccgataagtgcgtgctggacatgcggagcatggacttcaagagcaactccgccgtggcctggtccaacaagtccgatttcgcctgcgccaacgccttcaacaacagcattatccccgaggacacattcttcccaagccccgagagcagctgcgacgtgaagctggtggaaaagagcttcgagacagacaccaacctgaacttccagaacctgagcgtgatcggcttcagaatcctgctgctgaaagtggccggctttaacctgctgatgaccctgcggctgtggtccagccgggttaagttttccagatccgcagacgcacccgcttaccaacaagggcagaaccaactctacaatgaacttaatttggggcggagggaagagtacgacgttctggacaaaaggaggggacgagatcccgagatgggcggaaagcctcagcgaaggaagaatccgcaagaggggctttataacgaactccagaaagataaaatggcagaagcctatagtgagattgggatgaagggagaaaggaggaggggtaaaggtcacgatgggttgtaccaaggattgagcacagccactaaagatacctatgatgcgctccacatgcaggccctgccgccaaga

SEQ ID NO: 24191 - DNA, 732 bp, synthetic construct
  source 1..732: mol_type = other DNA
cagctgcgggatagcaagagcagcgacaagagcgtgtgtctgttcaccgacttcgacagccagaccaacgtgtcccagagcaaggactccgacgtgtacatcaccgataagtgcgtgctggacatgcggagcatggacttcaagagcaactccgccgtggcctggtccaacaagtccgatttcgcctgcgccaacgccttcaacaacagcattatccccgaggacacattcttcccaagccccgagagcagctgcgacgtgaagctggtggaaaagagcttcgagacagacaccaacctgaacttccagaacctgagcgtgatcggcttcagaatcctgctgctgaaagtggccggctttaacctgctgatgaccctgcggctgtggtccagccgggttaagttttccagatccgcagacgcacccgcttaccaacaagggcagaaccaactctacaatgaacttaatttggggcggagggaagagtacgacgttctggacaaaaggaggggacgagatcccgagatgggcggaaagcctcagcgaaggaagaatccgcaagaggggctttataacgaactccagaaagataaaatggcagaagcctatagtgagattgggatgaagggagaaaggaggaggggtaaaggtcacgatgggttgtaccaaggattgagcacagccactaaagatacctatgatgcgctccacatgcaggccctgccgccaaga

SEQ ID NO: 24192 - DNA, 729 bp, synthetic construct
  source 1..729: mol_type = other DNA
ctgcgggatagcaagagcagcgacaagagcgtgtgtctgttcaccgacttcgacagccagaccaacgtgtcccagagcaaggactccgacgtgtacatcaccgataagtgcgtgctggacatgcggagcatggacttcaagagcaactccgccgtggcctggtccaacaagtccgatttcgcctgcgccaacgccttcaacaacagcattatccccgaggacacattcttcccaagccccgagagcagctgcgacgtgaagctggtggaaaagagcttcgagacagacaccaacctgaacttccagaacctgagcgtgatcggcttcagaatcctgctgctgaaagtggccggctttaacctgctgatgaccctgcggctgtggtccagccgggttaagttttccagatccgcagacgcacccgcttaccaacaagggcagaaccaactctacaatgaacttaatttggggcggagggaagagtacgacgttctggacaaaaggaggggacgagatcccgagatgggcggaaagcctcagcgaaggaagaatccgcaagaggggctttataacgaactccagaaagataaaatggcagaagcctatagtgagattgggatgaagggagaaaggaggaggggtaaaggtcacgatgggttgtaccaaggattgagcacagccactaaagatacctatgatgcgctccacatgcaggccctgccgccaaga

SEQ ID NO: 24193 - DNA, 726 bp, synthetic construct
  source 1..726: mol_type = other DNA
cgggatagcaagagcagcgacaagagcgtgtgtctgttcaccgacttcgacagccagaccaacgtgtcccagagcaaggactccgacgtgtacatcaccgataagtgcgtgctggacatgcggagcatggacttcaagagcaactccgccgtggcctggtccaacaagtccgatttcgcctgcgccaacgccttcaacaacagcattatccccgaggacacattcttcccaagccccgagagcagctgcgacgtgaagctggtggaaaagagcttcgagacagacaccaacctgaacttccagaacctgagcgtgatcggcttcagaatcctgctgctgaaagtggccggctttaacctgctgatgaccctgcggctgtggtccagccgggttaagttttccagatccgcagacgcacccgcttaccaacaagggcagaaccaactctacaatgaacttaatttggggcggagggaagagtacgacgttctggacaaaaggaggggacgagatcccgagatgggcggaaagcctcagcgaaggaagaatccgcaagaggggctttataacgaactccagaaagataaaatggcagaagcctatagtgagattgggatgaagggagaaaggaggaggggtaaaggtcacgatgggttgtaccaaggattgagcacagccactaaagatacctatgatgcgctccacatgcaggccctgccgccaaga

SEQ ID NO: 24194 - DNA, 723 bp, synthetic construct
  source 1..723: mol_type = other DNA
gatagcaagagcagcgacaagagcgtgtgtctgttcaccgacttcgacagccagaccaacgtgtcccagagcaaggactccgacgtgtacatcaccgataagtgcgtgctggacatgcggagcatggacttcaagagcaactccgccgtggcctggtccaacaagtccgatttcgcctgcgccaacgccttcaacaacagcattatccccgaggacacattcttcccaagccccgagagcagctgcgacgtgaagctggtggaaaagagcttcgagacagacaccaacctgaacttccagaacctgagcgtgatcggcttcagaatcctgctgctgaaagtggccggctttaacctgctgatgaccctgcggctgtggtccagccgggttaagttttccagatccgcagacgcacccgcttaccaacaagggcagaaccaactctacaatgaacttaatttggggcggagggaagagtacgacgttctggacaaaaggaggggacgagatcccgagatgggcggaaagcctcagcgaaggaagaatccgcaagaggggctttataacgaactccagaaagataaaatggcagaagcctatagtgagattgggatgaagggagaaaggaggaggggtaaaggtcacgatgggttgtaccaaggattgagcacagccactaaagatacctatgatgcgctccacatgcaggccctgccgccaaga

SEQ ID NO: 24195 - DNA, 720 bp, synthetic construct
  source 1..720: mol_type = other DNA
agcaagagcagcgacaagagcgtgtgtctgttcaccgacttcgacagccagaccaacgtgtcccagagcaaggactccgacgtgtacatcaccgataagtgcgtgctggacatgcggagcatggacttcaagagcaactccgccgtggcctggtccaacaagtccgatttcgcctgcgccaacgccttcaacaacagcattatccccgaggacacattcttcccaagccccgagagcagctgcgacgtgaagctggtggaaaagagcttcgagacagacaccaacctgaacttccagaacctgagcgtgatcggcttcagaatcctgctgctgaaagtggccggctttaacctgctgatgaccctgcggctgtggtccagccgggttaagttttccagatccgcagacgcacccgcttaccaacaagggcagaaccaactctacaatgaacttaatttggggcggagggaagagtacgacgttctggacaaaaggaggggacgagatcccgagatgggcggaaagcctcagcgaaggaagaatccgcaagaggggctttataacgaactccagaaagataaaatggcagaagcctatagtgagattgggatgaagggagaaaggaggaggggtaaaggtcacgatgggttgtaccaaggattgagcacagccactaaagatacctatgatgcgctccacatgcaggccctgccgccaaga

SEQ ID NO: 24196 - DNA, 717 bp, synthetic construct
  source 1..717: mol_type = other DNA
aagagcagcgacaagagcgtgtgtctgttcaccgacttcgacagccagaccaacgtgtcccagagcaaggactccgacgtgtacatcaccgataagtgcgtgctggacatgcggagcatggacttcaagagcaactccgccgtggcctggtccaacaagtccgatttcgcctgcgccaacgccttcaacaacagcattatccccgaggacacattcttcccaagccccgagagcagctgcgacgtgaagctggtggaaaagagcttcgagacagacaccaacctgaacttccagaacctgagcgtgatcggcttcagaatcctgctgctgaaagtggccggctttaacctgctgatgaccctgcggctgtggtccagccgggttaagttttccagatccgcagacgcacccgcttaccaacaagggcagaaccaactctacaatgaacttaatttggggcggagggaagagtacgacgttctggacaaaaggaggggacgagatcccgagatgggcggaaagcctcagcgaaggaagaatccgcaagaggggctttataacgaactccagaaagataaaatggcagaagcctatagtgagattgggatgaagggagaaaggaggaggggtaaaggtcacgatgggttgtaccaaggattgagcacagccactaaagatacctatgatgcgctccacatgcaggccctgccgccaaga

SEQ ID NO: 24197 - DNA, 714 bp, synthetic construct
  source 1..714: mol_type = other DNA
agcagcgacaagagcgtgtgtctgttcaccgacttcgacagccagaccaacgtgtcccagagcaaggactccgacgtgtacatcaccgataagtgcgtgctggacatgcggagcatggacttcaagagcaactccgccgtggcctggtccaacaagtccgatttcgcctgcgccaacgccttcaacaacagcattatccccgaggacacattcttcccaagccccgagagcagctgcgacgtgaagctggtggaaaagagcttcgagacagacaccaacctgaacttccagaacctgagcgtgatcggcttcagaatcctgctgctgaaagtggccggctttaacctgctgatgaccctgcggctgtggtccagccgggttaagttttccagatccgcagacgcacccgcttaccaacaagggcagaaccaactctacaatgaacttaatttggggcggagggaagagtacgacgttctggacaaaaggaggggacgagatcccgagatgggcggaaagcctcagcgaaggaagaatccgcaagaggggctttataacgaactccagaaagataaaatggcagaagcctatagtgagattgggatgaagggagaaaggaggaggggtaaaggtcacgatgggttgtaccaaggattgagcacagccactaaagatacctatgatgcgctccacatgcaggccctgccgccaaga

SEQ ID NO: 24198 - DNA, 711 bp, synthetic construct
  source 1..711: mol_type = other DNA
agcgacaagagcgtgtgtctgttcaccgacttcgacagccagaccaacgtgtcccagagcaaggactccgacgtgtacatcaccgataagtgcgtgctggacatgcggagcatggacttcaagagcaactccgccgtggcctggtccaacaagtccgatttcgcctgcgccaacgccttcaacaacagcattatccccgaggacacattcttcccaagccccgagagcagctgcgacgtgaagctggtggaaaagagcttcgagacagacaccaacctgaacttccagaacctgagcgtgatcggcttcagaatcctgctgctgaaagtggccggctttaacctgctgatgaccctgcggctgtggtccagccgggttaagttttccagatccgcagacgcacccgcttaccaacaagggcagaaccaactctacaatgaacttaatttggggcggagggaagagtacgacgttctggacaaaaggaggggacgagatcccgagatgggcggaaagcctcagcgaaggaagaatccgcaagaggggctttataacgaactccagaaagataaaatggcagaagcctatagtgagattgggatgaagggagaaaggaggaggggtaaaggtcacgatgggttgtaccaaggattgagcacagccactaaagatacctatgatgcgctccacatgcaggccctgccgccaaga

SEQ ID NO: 24199 - DNA, 708 bp, synthetic construct
  source 1..708: mol_type = other DNA
gacaagagcgtgtgtctgttcaccgacttcgacagccagaccaacgtgtcccagagcaaggactccgacgtgtacatcaccgataagtgcgtgctggacatgcggagcatggacttcaagagcaactccgccgtggcctggtccaacaagtccgatttcgcctgcgccaacgccttcaacaacagcattatccccgaggacacattcttcccaagccccgagagcagctgcgacgtgaagctggtggaaaagagcttcgagacagacaccaacctgaacttccagaacctgagcgtgatcggcttcagaatcctgctgctgaaagtggccggctttaacctgctgatgaccctgcggctgtggtccagccgggttaagttttccagatccgcagacgcacccgcttaccaacaagggcagaaccaactctacaatgaacttaatttggggcggagggaagagtacgacgttctggacaaaaggaggggacgagatcccgagatgggcggaaagcctcagcgaaggaagaatccgcaagaggggctttataacgaactccagaaagataaaatggcagaagcctatagtgagattgggatgaagggagaaaggaggaggggtaaaggtcacgatgggttgtaccaaggattgagcacagccactaaagatacctatgatgcgctccacatgcaggccctgccgccaaga

SEQ ID NO: 24200 - DNA, 705 bp, synthetic construct
  source 1..705: mol_type = other DNA
aagagcgtgtgtctgttcaccgacttcgacagccagaccaacgtgtcccagagcaaggactccgacgtgtacatcaccgataagtgcgtgctggacatgcggagcatggacttcaagagcaactccgccgtggcctggtccaacaagtccgatttcgcctgcgccaacgccttcaacaacagcattatccccgaggacacattcttcccaagccccgagagcagctgcgacgtgaagctggtggaaaagagcttcgagacagacaccaacctgaacttccagaacctgagcgtgatcggcttcagaatcctgctgctgaaagtggccggctttaacctgctgatgaccctgcggctgtggtccagccgggttaagttttccagatccgcagacgcacccgcttaccaacaagggcagaaccaactctacaatgaacttaatttggggcggagggaagagtacgacgttctggacaaaaggaggggacgagatcccgagatgggcggaaagcctcagcgaaggaagaatccgcaagaggggctttataacgaactccagaaagataaaatggcagaagcctatagtgagattgggatgaagggagaaaggaggaggggtaaaggtcacgatgggttgtaccaaggattgagcacagccactaaagatacctatgatgcgctccacatgcaggccctgccgccaaga

SEQ ID NO: 24201 - DNA, 702 bp, synthetic construct
  source 1..702: mol_type = other DNA
agcgtgtgtctgttcaccgacttcgacagccagaccaacgtgtcccagagcaaggactccgacgtgtacatcaccgataagtgcgtgctggacatgcggagcatggacttcaagagcaactccgccgtggcctggtccaacaagtccgatttcgcctgcgccaacgccttcaacaacagcattatccccgaggacacattcttcccaagccccgagagcagctgcgacgtgaagctggtggaaaagagcttcgagacagacaccaacctgaacttccagaacctgagcgtgatcggcttcagaatcctgctgctgaaagtggccggctttaacctgctgatgaccctgcggctgtggtccagccgggttaagttttccagatccgcagacgcacccgcttaccaacaagggcagaaccaactctacaatgaacttaatttggggcggagggaagagtacgacgttctggacaaaaggaggggacgagatcccgagatgggcggaaagcctcagcgaaggaagaatccgcaagaggggctttataacgaactccagaaagataaaatggcagaagcctatagtgagattgggatgaagggagaaaggaggaggggtaaaggtcacgatgggttgtaccaaggattgagcacagccactaaagatacctatgatgcgctccacatgcaggccctgccgccaaga

SEQ ID NO: 24202 - DNA, 699 bp, synthetic construct
  source 1..699: mol_type = other DNA
gtgtgtctgttcaccgacttcgacagccagaccaacgtgtcccagagcaaggactccgacgtgtacatcaccgataagtgcgtgctggacatgcggagcatggacttcaagagcaactccgccgtggcctggtccaacaagtccgatttcgcctgcgccaacgccttcaacaacagcattatccccgaggacacattcttcccaagccccgagagcagctgcgacgtgaagctggtggaaaagagcttcgagacagacaccaacctgaacttccagaacctgagcgtgatcggcttcagaatcctgctgctgaaagtggccggctttaacctgctgatgaccctgcggctgtggtccagccgggttaagttttccagatccgcagacgcacccgcttaccaacaagggcagaaccaactctacaatgaacttaatttggggcggagggaagagtacgacgttctggacaaaaggaggggacgagatcccgagatgggcggaaagcctcagcgaaggaagaatccgcaagaggggctttataacgaactccagaaagataaaatggcagaagcctatagtgagattgggatgaagggagaaaggaggaggggtaaaggtcacgatgggttgtaccaaggattgagcacagccactaaagatacctatgatgcgctccacatgcaggccctgccgccaaga

SEQ ID NO: 24203 - DNA, 696 bp, synthetic construct
  source 1..696: mol_type = other DNA
tgtctgttcaccgacttcgacagccagaccaacgtgtcccagagcaaggactccgacgtgtacatcaccgataagtgcgtgctggacatgcggagcatggacttcaagagcaactccgccgtggcctggtccaacaagtccgatttcgcctgcgccaacgccttcaacaacagcattatccccgaggacacattcttcccaagccccgagagcagctgcgacgtgaagctggtggaaaagagcttcgagacagacaccaacctgaacttccagaacctgagcgtgatcggcttcagaatcctgctgctgaaagtggccggctttaacctgctgatgaccctgcggctgtggtccagccgggttaagttttccagatccgcagacgcacccgcttaccaacaagggcagaaccaactctacaatgaacttaatttggggcggagggaagagtacgacgttctggacaaaaggaggggacgagatcccgagatgggcggaaagcctcagcgaaggaagaatccgcaagaggggctttataacgaactccagaaagataaaatggcagaagcctatagtgagattgggatgaagggagaaaggaggaggggtaaaggtcacgatgggttgtaccaaggattgagcacagccactaaagatacctatgatgcgctccacatgcaggccctgccgccaaga

SEQ ID NO: 24204 - DNA, 693 bp, synthetic construct
  source 1..693: mol_type = other DNA
ctgttcaccgacttcgacagccagaccaacgtgtcccagagcaaggactccgacgtgtacatcaccgataagtgcgtgctggacatgcggagcatggacttcaagagcaactccgccgtggcctggtccaacaagtccgatttcgcctgcgccaacgccttcaacaacagcattatccccgaggacacattcttcccaagccccgagagcagctgcgacgtgaagctggtggaaaagagcttcgagacagacaccaacctgaacttccagaacctgagcgtgatcggcttcagaatcctgctgctgaaagtggccggctttaacctgctgatgaccctgcggctgtggtccagccgggttaagttttccagatccgcagacgcacccgcttaccaacaagggcagaaccaactctacaatgaacttaatttggggcggagggaagagtacgacgttctggacaaaaggaggggacgagatcccgagatgggcggaaagcctcagcgaaggaagaatccgcaagaggggctttataacgaactccagaaagataaaatggcagaagcctatagtgagattgggatgaagggagaaaggaggaggggtaaaggtcacgatgggttgtaccaaggattgagcacagccactaaagatacctatgatgcgctccacatgcaggccctgccgccaaga

SEQ ID NO: 24205 - DNA, 690 bp, synthetic construct
  source 1..690: mol_type = other DNA
ttcaccgacttcgacagccagaccaacgtgtcccagagcaaggactccgacgtgtacatcaccgataagtgcgtgctggacatgcggagcatggacttcaagagcaactccgccgtggcctggtccaacaagtccgatttcgcctgcgccaacgccttcaacaacagcattatccccgaggacacattcttcccaagccccgagagcagctgcgacgtgaagctggtggaaaagagcttcgagacagacaccaacctgaacttccagaacctgagcgtgatcggcttcagaatcctgctgctgaaagtggccggctttaacctgctgatgaccctgcggctgtggtccagccgggttaagttttccagatccgcagacgcacccgcttaccaacaagggcagaaccaactctacaatgaacttaatttggggcggagggaagagtacgacgttctggacaaaaggaggggacgagatcccgagatgggcggaaagcctcagcgaaggaagaatccgcaagaggggctttataacgaactccagaaagataaaatggcagaagcctatagtgagattgggatgaagggagaaaggaggaggggtaaaggtcacgatgggttgtaccaaggattgagcacagccactaaagatacctatgatgcgctccacatgcaggccctgccgccaaga

SEQ ID NO: 24206 - DNA, 687 bp, synthetic construct
  source 1..687: mol_type = other DNA
accgacttcgacagccagaccaacgtgtcccagagcaaggactccgacgtgtacatcaccgataagtgcgtgctggacatgcggagcatggacttcaagagcaactccgccgtggcctggtccaacaagtccgatttcgcctgcgccaacgccttcaacaacagcattatccccgaggacacattcttcccaagccccgagagcagctgcgacgtgaagctggtggaaaagagcttcgagacagacaccaacctgaacttccagaacctgagcgtgatcggcttcagaatcctgctgctgaaagtggccggctttaacctgctgatgaccctgcggctgtggtccagccgggttaagttttccagatccgcagacgcacccgcttaccaacaagggcagaaccaactctacaatgaacttaatttggggcggagggaagagtacgacgttctggacaaaaggaggggacgagatcccgagatgggcggaaagcctcagcgaaggaagaatccgcaagaggggctttataacgaactccagaaagataaaatggcagaagcctatagtgagattgggatgaagggagaaaggaggaggggtaaaggtcacgatgggttgtaccaaggattgagcacagccactaaagatacctatgatgcgctccacatgcaggccctgccgccaaga

SEQ ID NO: 24207 - DNA, 684 bp, synthetic construct
  source 1..684: mol_type = other DNA
gacttcgacagccagaccaacgtgtcccagagcaaggactccgacgtgtacatcaccgataagtgcgtgctggacatgcggagcatggacttcaagagcaactccgccgtggcctggtccaacaagtccgatttcgcctgcgccaacgccttcaacaacagcattatccccgaggacacattcttcccaagccccgagagcagctgcgacgtgaagctggtggaaaagagcttcgagacagacaccaacctgaacttccagaacctgagcgtgatcggcttcagaatcctgctgctgaaagtggccggctttaacctgctgatgaccctgcggctgtggtccagccgggttaagttttccagatccgcagacgcacccgcttaccaacaagggcagaaccaactctacaatgaacttaatttggggcggagggaagagtacgacgttctggacaaaaggaggggacgagatcccgagatgggcggaaagcctcagcgaaggaagaatccgcaagaggggctttataacgaactccagaaagataaaatggcagaagcctatagtgagattgggatgaagggagaaaggaggaggggtaaaggtcacgatgggttgtaccaaggattgagcacagccactaaagatacctatgatgcgctccacatgcaggccctgccgccaaga

SEQ ID NO: 24208 - DNA, 681 bp, synthetic construct
  source 1..681: mol_type = other DNA
ttcgacagccagaccaacgtgtcccagagcaaggactccgacgtgtacatcaccgataagtgcgtgctggacatgcggagcatggacttcaagagcaactccgccgtggcctggtccaacaagtccgatttcgcctgcgccaacgccttcaacaacagcattatccccgaggacacattcttcccaagccccgagagcagctgcgacgtgaagctggtggaaaagagcttcgagacagacaccaacctgaacttccagaacctgagcgtgatcggcttcagaatcctgctgctgaaagtggccggctttaacctgctgatgaccctgcggctgtggtccagccgggttaagttttccagatccgcagacgcacccgcttaccaacaagggcagaaccaactctacaatgaacttaatttggggcggagggaagagtacgacgttctggacaaaaggaggggacgagatcccgagatgggcggaaagcctcagcgaaggaagaatccgcaagaggggctttataacgaactccagaaagataaaatggcagaagcctatagtgagattgggatgaagggagaaaggaggaggggtaaaggtcacgatgggttgtaccaaggattgagcacagccactaaagatacctatgatgcgctccacatgcaggccctgccgccaaga

SEQ ID NO: 24209 - DNA, 678 bp, synthetic construct
  source 1..678: mol_type = other DNA
gacagccagaccaacgtgtcccagagcaaggactccgacgtgtacatcaccgataagtgcgtgctggacatgcggagcatggacttcaagagcaactccgccgtggcctggtccaacaagtccgatttcgcctgcgccaacgccttcaacaacagcattatccccgaggacacattcttcccaagccccgagagcagctgcgacgtgaagctggtggaaaagagcttcgagacagacaccaacctgaacttccagaacctgagcgtgatcggcttcagaatcctgctgctgaaagtggccggctttaacctgctgatgaccctgcggctgtggtccagccgggttaagttttccagatccgcagacgcacccgcttaccaacaagggcagaaccaactctacaatgaacttaatttggggcggagggaagagtacgacgttctggacaaaaggaggggacgagatcccgagatgggcggaaagcctcagcgaaggaagaatccgcaagaggggctttataacgaactccagaaagataaaatggcagaagcctatagtgagattgggatgaagggagaaaggaggaggggtaaaggtcacgatgggttgtaccaaggattgagcacagccactaaagatacctatgatgcgctccacatgcaggccctgccgccaaga

SEQ ID NO: 24210 - DNA, 675 bp, synthetic construct
  source 1..675: mol_type = other DNA
agccagaccaacgtgtcccagagcaaggactccgacgtgtacatcaccgataagtgcgtgctggacatgcggagcatggacttcaagagcaactccgccgtggcctggtccaacaagtccgatttcgcctgcgccaacgccttcaacaacagcattatccccgaggacacattcttcccaagccccgagagcagctgcgacgtgaagctggtggaaaagagcttcgagacagacaccaacctgaacttccagaacctgagcgtgatcggcttcagaatcctgctgctgaaagtggccggctttaacctgctgatgaccctgcggctgtggtccagccgggttaagttttccagatccgcagacgcacccgcttaccaacaagggcagaaccaactctacaatgaacttaatttggggcggagggaagagtacgacgttctggacaaaaggaggggacgagatcccgagatgggcggaaagcctcagcgaaggaagaatccgcaagaggggctttataacgaactccagaaagataaaatggcagaagcctatagtgagattgggatgaagggagaaaggaggaggggtaaaggtcacgatgggttgtaccaaggattgagcacagccactaaagatacctatgatgcgctccacatgcaggccctgccgccaaga

SEQ ID NO: 24211 - DNA, 672 bp, synthetic construct
  source 1..672: mol_type = other DNA
cagaccaacgtgtcccagagcaaggactccgacgtgtacatcaccgataagtgcgtgctggacatgcggagcatggacttcaagagcaactccgccgtggcctggtccaacaagtccgatttcgcctgcgccaacgccttcaacaacagcattatccccgaggacacattcttcccaagccccgagagcagctgcgacgtgaagctggtggaaaagagcttcgagacagacaccaacctgaacttccagaacctgagcgtgatcggcttcagaatcctgctgctgaaagtggccggctttaacctgctgatgaccctgcggctgtggtccagccgggttaagttttccagatccgcagacgcacccgcttaccaacaagggcagaaccaactctacaatgaacttaatttggggcggagggaagagtacgacgttctggacaaaaggaggggacgagatcccgagatgggcggaaagcctcagcgaaggaagaatccgcaagaggggctttataacgaactccagaaagataaaatggcagaagcctatagtgagattgggatgaagggagaaaggaggaggggtaaaggtcacgatgggttgtaccaaggattgagcacagccactaaagatacctatgatgcgctccacatgcaggccctgccgccaaga

SEQ ID NO: 24212 - DNA, 669 bp, synthetic construct
  source 1..669: mol_type = other DNA
accaacgtgtcccagagcaaggactccgacgtgtacatcaccgataagtgcgtgctggacatgcggagcatggacttcaagagcaactccgccgtggcctggtccaacaagtccgatttcgcctgcgccaacgccttcaacaacagcattatccccgaggacacattcttcccaagccccgagagcagctgcgacgtgaagctggtggaaaagagcttcgagacagacaccaacctgaacttccagaacctgagcgtgatcggcttcagaatcctgctgctgaaagtggccggctttaacctgctgatgaccctgcggctgtggtccagccgggttaagttttccagatccgcagacgcacccgcttaccaacaagggcagaaccaactctacaatgaacttaatttggggcggagggaagagtacgacgttctggacaaaaggaggggacgagatcccgagatgggcggaaagcctcagcgaaggaagaatccgcaagaggggctttataacgaactccagaaagataaaatggcagaagcctatagtgagattgggatgaagggagaaaggaggaggggtaaaggtcacgatgggttgtaccaaggattgagcacagccactaaagatacctatgatgcgctccacatgcaggccctgccgccaaga

SEQ ID NO: 24213 - DNA, 666 bp, synthetic construct
  source 1..666: mol_type = other DNA
aacgtgtcccagagcaaggactccgacgtgtacatcaccgataagtgcgtgctggacatgcggagcatggacttcaagagcaactccgccgtggcctggtccaacaagtccgatttcgcctgcgccaacgccttcaacaacagcattatccccgaggacacattcttcccaagccccgagagcagctgcgacgtgaagctggtggaaaagagcttcgagacagacaccaacctgaacttccagaacctgagcgtgatcggcttcagaatcctgctgctgaaagtggccggctttaacctgctgatgaccctgcggctgtggtccagccgggttaagttttccagatccgcagacgcacccgcttaccaacaagggcagaaccaactctacaatgaacttaatttggggcggagggaagagtacgacgttctggacaaaaggaggggacgagatcccgagatgggcggaaagcctcagcgaaggaagaatccgcaagaggggctttataacgaactccagaaagataaaatggcagaagcctatagtgagattgggatgaagggagaaaggaggaggggtaaaggtcacgatgggttgtaccaaggattgagcacagccactaaagatacctatgatgcgctccacatgcaggccctgccgccaaga

SEQ ID NO: 24214 - DNA, 663 bp, synthetic construct
  source 1..663: mol_type = other DNA
gtgtcccagagcaaggactccgacgtgtacatcaccgataagtgcgtgctggacatgcggagcatggacttcaagagcaactccgccgtggcctggtccaacaagtccgatttcgcctgcgccaacgccttcaacaacagcattatccccgaggacacattcttcccaagccccgagagcagctgcgacgtgaagctggtggaaaagagcttcgagacagacaccaacctgaacttccagaacctgagcgtgatcggcttcagaatcctgctgctgaaagtggccggctttaacctgctgatgaccctgcggctgtggtccagccgggttaagttttccagatccgcagacgcacccgcttaccaacaagggcagaaccaactctacaatgaacttaatttggggcggagggaagagtacgacgttctggacaaaaggaggggacgagatcccgagatgggcggaaagcctcagcgaaggaagaatccgcaagaggggctttataacgaactccagaaagataaaatggcagaagcctatagtgagattgggatgaagggagaaaggaggaggggtaaaggtcacgatgggttgtaccaaggattgagcacagccactaaagatacctatgatgcgctccacatgcaggccctgccgccaaga

SEQ ID NO: 24215 - DNA, 660 bp, synthetic construct
  source 1..660: mol_type = other DNA
tcccagagcaaggactccgacgtgtacatcaccgataagtgcgtgctggacatgcggagcatggacttcaagagcaactccgccgtggcctggtccaacaagtccgatttcgcctgcgccaacgccttcaacaacagcattatccccgaggacacattcttcccaagccccgagagcagctgcgacgtgaagctggtggaaaagagcttcgagacagacaccaacctgaacttccagaacctgagcgtgatcggcttcagaatcctgctgctgaaagtggccggctttaacctgctgatgaccctgcggctgtggtccagccgggttaagttttccagatccgcagacgcacccgcttaccaacaagggcagaaccaactctacaatgaacttaatttggggcggagggaagagtacgacgttctggacaaaaggaggggacgagatcccgagatgggcggaaagcctcagcgaaggaagaatccgcaagaggggctttataacgaactccagaaagataaaatggcagaagcctatagtgagattgggatgaagggagaaaggaggaggggtaaaggtcacgatgggttgtaccaaggattgagcacagccactaaagatacctatgatgcgctccacatgcaggccctgccgccaaga

SEQ ID NO: 24216 - DNA, 657 bp, synthetic construct
  source 1..657: mol_type = other DNA
cagagcaaggactccgacgtgtacatcaccgataagtgcgtgctggacatgcggagcatggacttcaagagcaactccgccgtggcctggtccaacaagtccgatttcgcctgcgccaacgccttcaacaacagcattatccccgaggacacattcttcccaagccccgagagcagctgcgacgtgaagctggtggaaaagagcttcgagacagacaccaacctgaacttccagaacctgagcgtgatcggcttcagaatcctgctgctgaaagtggccggctttaacctgctgatgaccctgcggctgtggtccagccgggttaagttttccagatccgcagacgcacccgcttaccaacaagggcagaaccaactctacaatgaacttaatttggggcggagggaagagtacgacgttctggacaaaaggaggggacgagatcccgagatgggcggaaagcctcagcgaaggaagaatccgcaagaggggctttataacgaactccagaaagataaaatggcagaagcctatagtgagattgggatgaagggagaaaggaggaggggtaaaggtcacgatgggttgtaccaaggattgagcacagccactaaagatacctatgatgcgctccacatgcaggccctgccgccaaga

SEQ ID NO: 24217 - DNA, 654 bp, synthetic construct
  source 1..654: mol_type = other DNA
agcaaggactccgacgtgtacatcaccgataagtgcgtgctggacatgcggagcatggacttcaagagcaactccgccgtggcctggtccaacaagtccgatttcgcctgcgccaacgccttcaacaacagcattatccccgaggacacattcttcccaagccccgagagcagctgcgacgtgaagctggtggaaaagagcttcgagacagacaccaacctgaacttccagaacctgagcgtgatcggcttcagaatcctgctgctgaaagtggccggctttaacctgctgatgaccctgcggctgtggtccagccgggttaagttttccagatccgcagacgcacccgcttaccaacaagggcagaaccaactctacaatgaacttaatttggggcggagggaagagtacgacgttctggacaaaaggaggggacgagatcccgagatgggcggaaagcctcagcgaaggaagaatccgcaagaggggctttataacgaactccagaaagataaaatggcagaagcctatagtgagattgggatgaagggagaaaggaggaggggtaaaggtcacgatgggttgtaccaaggattgagcacagccactaaagatacctatgatgcgctccacatgcaggccctgccgccaaga

SEQ ID NO: 24218 - DNA, 651 bp, synthetic construct
  source 1..651: mol_type = other DNA
aaggactccgacgtgtacatcaccgataagtgcgtgctggacatgcggagcatggacttcaagagcaactccgccgtggcctggtccaacaagtccgatttcgcctgcgccaacgccttcaacaacagcattatccccgaggacacattcttcccaagccccgagagcagctgcgacgtgaagctggtggaaaagagcttcgagacagacaccaacctgaacttccagaacctgagcgtgatcggcttcagaatcctgctgctgaaagtggccggctttaacctgctgatgaccctgcggctgtggtccagccgggttaagttttccagatccgcagacgcacccgcttaccaacaagggcagaaccaactctacaatgaacttaatttggggcggagggaagagtacgacgttctggacaaaaggaggggacgagatcccgagatgggcggaaagcctcagcgaaggaagaatccgcaagaggggctttataacgaactccagaaagataaaatggcagaagcctatagtgagattgggatgaagggagaaaggaggaggggtaaaggtcacgatgggttgtaccaaggattgagcacagccactaaagatacctatgatgcgctccacatgcaggccctgccgccaaga

SEQ ID NO: 24219 - DNA, 648 bp, synthetic construct
  source 1..648: mol_type = other DNA
gactccgacgtgtacatcaccgataagtgcgtgctggacatgcggagcatggacttcaagagcaactccgccgtggcctggtccaacaagtccgatttcgcctgcgccaacgccttcaacaacagcattatccccgaggacacattcttcccaagccccgagagcagctgcgacgtgaagctggtggaaaagagcttcgagacagacaccaacctgaacttccagaacctgagcgtgatcggcttcagaatcctgctgctgaaagtggccggctttaacctgctgatgaccctgcggctgtggtccagccgggttaagttttccagatccgcagacgcacccgcttaccaacaagggcagaaccaactctacaatgaacttaatttggggcggagggaagagtacgacgttctggacaaaaggaggggacgagatcccgagatgggcggaaagcctcagcgaaggaagaatccgcaagaggggctttataacgaactccagaaagataaaatggcagaagcctatagtgagattgggatgaagggagaaaggaggaggggtaaaggtcacgatgggttgtaccaaggattgagcacagccactaaagatacctatgatgcgctccacatgcaggccctgccgccaaga

SEQ ID NO: 24220 - DNA, 645 bp, synthetic construct
  source 1..645: mol_type = other DNA
tccgacgtgtacatcaccgataagtgcgtgctggacatgcggagcatggacttcaagagcaactccgccgtggcctggtccaacaagtccgatttcgcctgcgccaacgccttcaacaacagcattatccccgaggacacattcttcccaagccccgagagcagctgcgacgtgaagctggtggaaaagagcttcgagacagacaccaacctgaacttccagaacctgagcgtgatcggcttcagaatcctgctgctgaaagtggccggctttaacctgctgatgaccctgcggctgtggtccagccgggttaagttttccagatccgcagacgcacccgcttaccaacaagggcagaaccaactctacaatgaacttaatttggggcggagggaagagtacgacgttctggacaaaaggaggggacgagatcccgagatgggcggaaagcctcagcgaaggaagaatccgcaagaggggctttataacgaactccagaaagataaaatggcagaagcctatagtgagattgggatgaagggagaaaggaggaggggtaaaggtcacgatgggttgtaccaaggattgagcacagccactaaagatacctatgatgcgctccacatgcaggccctgccgccaaga

SEQ ID NO: 24221 - DNA, 642 bp, synthetic construct
  source 1..642: mol_type = other DNA
gacgtgtacatcaccgataagtgcgtgctggacatgcggagcatggacttcaagagcaactccgccgtggcctggtccaacaagtccgatttcgcctgcgccaacgccttcaacaacagcattatccccgaggacacattcttcccaagccccgagagcagctgcgacgtgaagctggtggaaaagagcttcgagacagacaccaacctgaacttccagaacctgagcgtgatcggcttcagaatcctgctgctgaaagtggccggctttaacctgctgatgaccctgcggctgtggtccagccgggttaagttttccagatccgcagacgcacccgcttaccaacaagggcagaaccaactctacaatgaacttaatttggggcggagggaagagtacgacgttctggacaaaaggaggggacgagatcccgagatgggcggaaagcctcagcgaaggaagaatccgcaagaggggctttataacgaactccagaaagataaaatggcagaagcctatagtgagattgggatgaagggagaaaggaggaggggtaaaggtcacgatgggttgtaccaaggattgagcacagccactaaagatacctatgatgcgctccacatgcaggccctgccgccaaga

SEQ ID NO: 24222 - DNA, 639 bp, synthetic construct
  source 1..639: mol_type = other DNA
gtgtacatcaccgataagtgcgtgctggacatgcggagcatggacttcaagagcaactccgccgtggcctggtccaacaagtccgatttcgcctgcgccaacgccttcaacaacagcattatccccgaggacacattcttcccaagccccgagagcagctgcgacgtgaagctggtggaaaagagcttcgagacagacaccaacctgaacttccagaacctgagcgtgatcggcttcagaatcctgctgctgaaagtggccggctttaacctgctgatgaccctgcggctgtggtccagccgggttaagttttccagatccgcagacgcacccgcttaccaacaagggcagaaccaactctacaatgaacttaatttggggcggagggaagagtacgacgttctggacaaaaggaggggacgagatcccgagatgggcggaaagcctcagcgaaggaagaatccgcaagaggggctttataacgaactccagaaagataaaatggcagaagcctatagtgagattgggatgaagggagaaaggaggaggggtaaaggtcacgatgggttgtaccaaggattgagcacagccactaaagatacctatgatgcgctccacatgcaggccctgccgccaaga

SEQ ID NO: 24223 - DNA, 636 bp, synthetic construct
  source 1..636: mol_type = other DNA
tacatcaccgataagtgcgtgctggacatgcggagcatggacttcaagagcaactccgccgtggcctggtccaacaagtccgatttcgcctgcgccaacgccttcaacaacagcattatccccgaggacacattcttcccaagccccgagagcagctgcgacgtgaagctggtggaaaagagcttcgagacagacaccaacctgaacttccagaacctgagcgtgatcggcttcagaatcctgctgctgaaagtggccggctttaacctgctgatgaccctgcggctgtggtccagccgggttaagttttccagatccgcagacgcacccgcttaccaacaagggcagaaccaactctacaatgaacttaatttggggcggagggaagagtacgacgttctggacaaaaggaggggacgagatcccgagatgggcggaaagcctcagcgaaggaagaatccgcaagaggggctttataacgaactccagaaagataaaatggcagaagcctatagtgagattgggatgaagggagaaaggaggaggggtaaaggtcacgatgggttgtaccaaggattgagcacagccactaaagatacctatgatgcgctccacatgcaggccctgccgccaaga

SEQ ID NO: 24224 - DNA, 633 bp, synthetic construct
  source 1..633: mol_type = other DNA
atcaccgataagtgcgtgctggacatgcggagcatggacttcaagagcaactccgccgtggcctggtccaacaagtccgatttcgcctgcgccaacgccttcaacaacagcattatccccgaggacacattcttcccaagccccgagagcagctgcgacgtgaagctggtggaaaagagcttcgagacagacaccaacctgaacttccagaacctgagcgtgatcggcttcagaatcctgctgctgaaagtggccggctttaacctgctgatgaccctgcggctgtggtccagccgggttaagttttccagatccgcagacgcacccgcttaccaacaagggcagaaccaactctacaatgaacttaatttggggcggagggaagagtacgacgttctggacaaaaggaggggacgagatcccgagatgggcggaaagcctcagcgaaggaagaatccgcaagaggggctttataacgaactccagaaagataaaatggcagaagcctatagtgagattgggatgaagggagaaaggaggaggggtaaaggtcacgatgggttgtaccaaggattgagcacagccactaaagatacctatgatgcgctccacatgcaggccctgccgccaaga

SEQ ID NO: 24225 - DNA, 630 bp, synthetic construct
  source 1..630: mol_type = other DNA
accgataagtgcgtgctggacatgcggagcatggacttcaagagcaactccgccgtggcctggtccaacaagtccgatttcgcctgcgccaacgccttcaacaacagcattatccccgaggacacattcttcccaagccccgagagcagctgcgacgtgaagctggtggaaaagagcttcgagacagacaccaacctgaacttccagaacctgagcgtgatcggcttcagaatcctgctgctgaaagtggccggctttaacctgctgatgaccctgcggctgtggtccagccgggttaagttttccagatccgcagacgcacccgcttaccaacaagggcagaaccaactctacaatgaacttaatttggggcggagggaagagtacgacgttctggacaaaaggaggggacgagatcccgagatgggcggaaagcctcagcgaaggaagaatccgcaagaggggctttataacgaactccagaaagataaaatggcagaagcctatagtgagattgggatgaagggagaaaggaggaggggtaaaggtcacgatgggttgtaccaaggattgagcacagccactaaagatacctatgatgcgctccacatgcaggccctgccgccaaga

SEQ ID NO: 24226 - DNA, 627 bp, synthetic construct
  source 1..627: mol_type = other DNA
gataagtgcgtgctggacatgcggagcatggacttcaagagcaactccgccgtggcctggtccaacaagtccgatttcgcctgcgccaacgccttcaacaacagcattatccccgaggacacattcttcccaagccccgagagcagctgcgacgtgaagctggtggaaaagagcttcgagacagacaccaacctgaacttccagaacctgagcgtgatcggcttcagaatcctgctgctgaaagtggccggctttaacctgctgatgaccctgcggctgtggtccagccgggttaagttttccagatccgcagacgcacccgcttaccaacaagggcagaaccaactctacaatgaacttaatttggggcggagggaagagtacgacgttctggacaaaaggaggggacgagatcccgagatgggcggaaagcctcagcgaaggaagaatccgcaagaggggctttataacgaactccagaaagataaaatggcagaagcctatagtgagattgggatgaagggagaaaggaggaggggtaaaggtcacgatgggttgtaccaaggattgagcacagccactaaagatacctatgatgcgctccacatgcaggccctgccgccaaga

SEQ ID NO: 24227 - DNA, 621 bp, synthetic construct
  source 1..621: mol_type = other DNA
tgcgtgctggacatgcggagcatggacttcaagagcaactccgccgtggcctggtccaacaagtccgatttcgcctgcgccaacgccttcaacaacagcattatccccgaggacacattcttcccaagccccgagagcagctgcgacgtgaagctggtggaaaagagcttcgagacagacaccaacctgaacttccagaacctgagcgtgatcggcttcagaatcctgctgctgaaagtggccggctttaacctgctgatgaccctgcggctgtggtccagccgggttaagttttccagatccgcagacgcacccgcttaccaacaagggcagaaccaactctacaatgaacttaatttggggcggagggaagagtacgacgttctggacaaaaggaggggacgagatcccgagatgggcggaaagcctcagcgaaggaagaatccgcaagaggggctttataacgaactccagaaagataaaatggcagaagcctatagtgagattgggatgaagggagaaaggaggaggggtaaaggtcacgatgggttgtaccaaggattgagcacagccactaaagatacctatgatgcgctccacatgcaggccctgccgccaaga

SEQ ID NO: 24228 - DNA, 618 bp, synthetic construct
  source 1..618: mol_type = other DNA
gtgctggacatgcggagcatggacttcaagagcaactccgccgtggcctggtccaacaagtccgatttcgcctgcgccaacgccttcaacaacagcattatccccgaggacacattcttcccaagccccgagagcagctgcgacgtgaagctggtggaaaagagcttcgagacagacaccaacctgaacttccagaacctgagcgtgatcggcttcagaatcctgctgctgaaagtggccggctttaacctgctgatgaccctgcggctgtggtccagccgggttaagttttccagatccgcagacgcacccgcttaccaacaagggcagaaccaactctacaatgaacttaatttggggcggagggaagagtacgacgttctggacaaaaggaggggacgagatcccgagatgggcggaaagcctcagcgaaggaagaatccgcaagaggggctttataacgaactccagaaagataaaatggcagaagcctatagtgagattgggatgaagggagaaaggaggaggggtaaaggtcacgatgggttgtaccaaggattgagcacagccactaaagatacctatgatgcgctccacatgcaggccctgccgccaaga

SEQ ID NO: 24229 - DNA, 615 bp, synthetic construct
  source 1..615: mol_type = other DNA
ctggacatgcggagcatggacttcaagagcaactccgccgtggcctggtccaacaagtccgatttcgcctgcgccaacgccttcaacaacagcattatccccgaggacacattcttcccaagccccgagagcagctgcgacgtgaagctggtggaaaagagcttcgagacagacaccaacctgaacttccagaacctgagcgtgatcggcttcagaatcctgctgctgaaagtggccggctttaacctgctgatgaccctgcggctgtggtccagccgggttaagttttccagatccgcagacgcacccgcttaccaacaagggcagaaccaactctacaatgaacttaatttggggcggagggaagagtacgacgttctggacaaaaggaggggacgagatcccgagatgggcggaaagcctcagcgaaggaagaatccgcaagaggggctttataacgaactccagaaagataaaatggcagaagcctatagtgagattgggatgaagggagaaaggaggaggggtaaaggtcacgatgggttgtaccaaggattgagcacagccactaaagatacctatgatgcgctccacatgcaggccctgccgccaaga

SEQ ID NO: 24230 - DNA, 612 bp, synthetic construct
  source 1..612: mol_type = other DNA
gacatgcggagcatggacttcaagagcaactccgccgtggcctggtccaacaagtccgatttcgcctgcgccaacgccttcaacaacagcattatccccgaggacacattcttcccaagccccgagagcagctgcgacgtgaagctggtggaaaagagcttcgagacagacaccaacctgaacttccagaacctgagcgtgatcggcttcagaatcctgctgctgaaagtggccggctttaacctgctgatgaccctgcggctgtggtccagccgggttaagttttccagatccgcagacgcacccgcttaccaacaagggcagaaccaactctacaatgaacttaatttggggcggagggaagagtacgacgttctggacaaaaggaggggacgagatcccgagatgggcggaaagcctcagcgaaggaagaatccgcaagaggggctttataacgaactccagaaagataaaatggcagaagcctatagtgagattgggatgaagggagaaaggaggaggggtaaaggtcacgatgggttgtaccaaggattgagcacagccactaaagatacctatgatgcgctccacatgcaggccctgccgccaaga

SEQ ID NO: 24231 - DNA, 609 bp, synthetic construct
  source 1..609: mol_type = other DNA
atgcggagcatggacttcaagagcaactccgccgtggcctggtccaacaagtccgatttcgcctgcgccaacgccttcaacaacagcattatccccgaggacacattcttcccaagccccgagagcagctgcgacgtgaagctggtggaaaagagcttcgagacagacaccaacctgaacttccagaacctgagcgtgatcggcttcagaatcctgctgctgaaagtggccggctttaacctgctgatgaccctgcggctgtggtccagccgggttaagttttccagatccgcagacgcacccgcttaccaacaagggcagaaccaactctacaatgaacttaatttggggcggagggaagagtacgacgttctggacaaaaggaggggacgagatcccgagatgggcggaaagcctcagcgaaggaagaatccgcaagaggggctttataacgaactccagaaagataaaatggcagaagcctatagtgagattgggatgaagggagaaaggaggaggggtaaaggtcacgatgggttgtaccaaggattgagcacagccactaaagatacctatgatgcgctccacatgcaggccctgccgccaaga

SEQ ID NO: 24232 - DNA, 606 bp, synthetic construct
  source 1..606: mol_type = other DNA
cggagcatggacttcaagagcaactccgccgtggcctggtccaacaagtccgatttcgcctgcgccaacgccttcaacaacagcattatccccgaggacacattcttcccaagccccgagagcagctgcgacgtgaagctggtggaaaagagcttcgagacagacaccaacctgaacttccagaacctgagcgtgatcggcttcagaatcctgctgctgaaagtggccggctttaacctgctgatgaccctgcggctgtggtccagccgggttaagttttccagatccgcagacgcacccgcttaccaacaagggcagaaccaactctacaatgaacttaatttggggcggagggaagagtacgacgttctggacaaaaggaggggacgagatcccgagatgggcggaaagcctcagcgaaggaagaatccgcaagaggggctttataacgaactccagaaagataaaatggcagaagcctatagtgagattgggatgaagggagaaaggaggaggggtaaaggtcacgatgggttgtaccaaggattgagcacagccactaaagatacctatgatgcgctccacatgcaggccctgccgccaaga

SEQ ID NO: 24233 - DNA, 603 bp, synthetic construct
  source 1..603: mol_type = other DNA
agcatggacttcaagagcaactccgccgtggcctggtccaacaagtccgatttcgcctgcgccaacgccttcaacaacagcattatccccgaggacacattcttcccaagccccgagagcagctgcgacgtgaagctggtggaaaagagcttcgagacagacaccaacctgaacttccagaacctgagcgtgatcggcttcagaatcctgctgctgaaagtggccggctttaacctgctgatgaccctgcggctgtggtccagccgggttaagttttccagatccgcagacgcacccgcttaccaacaagggcagaaccaactctacaatgaacttaatttggggcggagggaagagtacgacgttctggacaaaaggaggggacgagatcccgagatgggcggaaagcctcagcgaaggaagaatccgcaagaggggctttataacgaactccagaaagataaaatggcagaagcctatagtgagattgggatgaagggagaaaggaggaggggtaaaggtcacgatgggttgtaccaaggattgagcacagccactaaagatacctatgatgcgctccacatgcaggccctgccgccaaga

SEQ ID NO: 24234 - DNA, 600 bp, synthetic construct
  source 1..600: mol_type = other DNA
atggacttcaagagcaactccgccgtggcctggtccaacaagtccgatttcgcctgcgccaacgccttcaacaacagcattatccccgaggacacattcttcccaagccccgagagcagctgcgacgtgaagctggtggaaaagagcttcgagacagacaccaacctgaacttccagaacctgagcgtgatcggcttcagaatcctgctgctgaaagtggccggctttaacctgctgatgaccctgcggctgtggtccagccgggttaagttttccagatccgcagacgcacccgcttaccaacaagggcagaaccaactctacaatgaacttaatttggggcggagggaagagtacgacgttctggacaaaaggaggggacgagatcccgagatgggcggaaagcctcagcgaaggaagaatccgcaagaggggctttataacgaactccagaaagataaaatggcagaagcctatagtgagattgggatgaagggagaaaggaggaggggtaaaggtcacgatgggttgtaccaaggattgagcacagccactaaagatacctatgatgcgctccacatgcaggccctgccgccaaga

SEQ ID NO: 24235 - DNA, 597 bp, synthetic construct
  source 1..597: mol_type = other DNA
gacttcaagagcaactccgccgtggcctggtccaacaagtccgatttcgcctgcgccaacgccttcaacaacagcattatccccgaggacacattcttcccaagccccgagagcagctgcgacgtgaagctggtggaaaagagcttcgagacagacaccaacctgaacttccagaacctgagcgtgatcggcttcagaatcctgctgctgaaagtggccggctttaacctgctgatgaccctgcggctgtggtccagccgggttaagttttccagatccgcagacgcacccgcttaccaacaagggcagaaccaactctacaatgaacttaatttggggcggagggaagagtacgacgttctggacaaaaggaggggacgagatcccgagatgggcggaaagcctcagcgaaggaagaatccgcaagaggggctttataacgaactccagaaagataaaatggcagaagcctatagtgagattgggatgaagggagaaaggaggaggggtaaaggtcacgatgggttgtaccaaggattgagcacagccactaaagatacctatgatgcgctccacatgcaggccctgccgccaaga

SEQ ID NO: 24236 - DNA, 594 bp, synthetic construct
  source 1..594: mol_type = other DNA
ttcaagagcaactccgccgtggcctggtccaacaagtccgatttcgcctgcgccaacgccttcaacaacagcattatccccgaggacacattcttcccaagccccgagagcagctgcgacgtgaagctggtggaaaagagcttcgagacagacaccaacctgaacttccagaacctgagcgtgatcggcttcagaatcctgctgctgaaagtggccggctttaacctgctgatgaccctgcggctgtggtccagccgggttaagttttccagatccgcagacgcacccgcttaccaacaagggcagaaccaactctacaatgaacttaatttggggcggagggaagagtacgacgttctggacaaaaggaggggacgagatcccgagatgggcggaaagcctcagcgaaggaagaatccgcaagaggggctttataacgaactccagaaagataaaatggcagaagcctatagtgagattgggatgaagggagaaaggaggaggggtaaaggtcacgatgggttgtaccaaggattgagcacagccactaaagatacctatgatgcgctccacatgcaggccctgccgccaaga

SEQ ID NO: 24237 - DNA, 591 bp, synthetic construct
  source 1..591: mol_type = other DNA
aagagcaactccgccgtggcctggtccaacaagtccgatttcgcctgcgccaacgccttcaacaacagcattatccccgaggacacattcttcccaagccccgagagcagctgcgacgtgaagctggtggaaaagagcttcgagacagacaccaacctgaacttccagaacctgagcgtgatcggcttcagaatcctgctgctgaaagtggccggctttaacctgctgatgaccctgcggctgtggtccagccgggttaagttttccagatccgcagacgcacccgcttaccaacaagggcagaaccaactctacaatgaacttaatttggggcggagggaagagtacgacgttctggacaaaaggaggggacgagatcccgagatgggcggaaagcctcagcgaaggaagaatccgcaagaggggctttataacgaactccagaaagataaaatggcagaagcctatagtgagattgggatgaagggagaaaggaggaggggtaaaggtcacgatgggttgtaccaaggattgagcacagccactaaagatacctatgatgcgctccacatgcaggccctgccgccaaga

SEQ ID NO: 24238 - DNA, 588 bp, synthetic construct
  source 1..588: mol_type = other DNA
agcaactccgccgtggcctggtccaacaagtccgatttcgcctgcgccaacgccttcaacaacagcattatccccgaggacacattcttcccaagccccgagagcagctgcgacgtgaagctggtggaaaagagcttcgagacagacaccaacctgaacttccagaacctgagcgtgatcggcttcagaatcctgctgctgaaagtggccggctttaacctgctgatgaccctgcggctgtggtccagccgggttaagttttccagatccgcagacgcacccgcttaccaacaagggcagaaccaactctacaatgaacttaatttggggcggagggaagagtacgacgttctggacaaaaggaggggacgagatcccgagatgggcggaaagcctcagcgaaggaagaatccgcaagaggggctttataacgaactccagaaagataaaatggcagaagcctatagtgagattgggatgaagggagaaaggaggaggggtaaaggtcacgatgggttgtaccaaggattgagcacagccactaaagatacctatgatgcgctccacatgcaggccctgccgccaaga

SEQ ID NO: 24239 - DNA, 585 bp, synthetic construct
  source 1..585: mol_type = other DNA
aactccgccgtggcctggtccaacaagtccgatttcgcctgcgccaacgccttcaacaacagcattatccccgaggacacattcttcccaagccccgagagcagctgcgacgtgaagctggtggaaaagagcttcgagacagacaccaacctgaacttccagaacctgagcgtgatcggcttcagaatcctgctgctgaaagtggccggctttaacctgctgatgaccctgcggctgtggtccagccgggttaagttttccagatccgcagacgcacccgcttaccaacaagggcagaaccaactctacaatgaacttaatttggggcggagggaagagtacgacgttctggacaaaaggaggggacgagatcccgagatgggcggaaagcctcagcgaaggaagaatccgcaagaggggctttataacgaactccagaaagataaaatggcagaagcctatagtgagattgggatgaagggagaaaggaggaggggtaaaggtcacgatgggttgtaccaaggattgagcacagccactaaagatacctatgatgcgctccacatgcaggccctgccgccaaga

SEQ ID NO: 24240 - DNA, 582 bp, synthetic construct
  source 1..582: mol_type = other DNA
tccgccgtggcctggtccaacaagtccgatttcgcctgcgccaacgccttcaacaacagcattatccccgaggacacattcttcccaagccccgagagcagctgcgacgtgaagctggtggaaaagagcttcgagacagacaccaacctgaacttccagaacctgagcgtgatcggcttcagaatcctgctgctgaaagtggccggctttaacctgctgatgaccctgcggctgtggtccagccgggttaagttttccagatccgcagacgcacccgcttaccaacaagggcagaaccaactctacaatgaacttaatttggggcggagggaagagtacgacgttctggacaaaaggaggggacgagatcccgagatgggcggaaagcctcagcgaaggaagaatccgcaagaggggctttataacgaactccagaaagataaaatggcagaagcctatagtgagattgggatgaagggagaaaggaggaggggtaaaggtcacgatgggttgtaccaaggattgagcacagccactaaagatacctatgatgcgctccacatgcaggccctgccgccaaga

SEQ ID NO: 24241 - DNA, 579 bp, synthetic construct
  source 1..579: mol_type = other DNA
gccgtggcctggtccaacaagtccgatttcgcctgcgccaacgccttcaacaacagcattatccccgaggacacattcttcccaagccccgagagcagctgcgacgtgaagctggtggaaaagagcttcgagacagacaccaacctgaacttccagaacctgagcgtgatcggcttcagaatcctgctgctgaaagtggccggctttaacctgctgatgaccctgcggctgtggtccagccgggttaagttttccagatccgcagacgcacccgcttaccaacaagggcagaaccaactctacaatgaacttaatttggggcggagggaagagtacgacgttctggacaaaaggaggggacgagatcccgagatgggcggaaagcctcagcgaaggaagaatccgcaagaggggctttataacgaactccagaaagataaaatggcagaagcctatagtgagattgggatgaagggagaaaggaggaggggtaaaggtcacgatgggttgtaccaaggattgagcacagccactaaagatacctatgatgcgctccacatgcaggccctgccgccaaga

SEQ ID NO: 24242 - DNA, 576 bp, synthetic construct
  source 1..576: mol_type = other DNA
gtggcctggtccaacaagtccgatttcgcctgcgccaacgccttcaacaacagcattatccccgaggacacattcttcccaagccccgagagcagctgcgacgtgaagctggtggaaaagagcttcgagacagacaccaacctgaacttccagaacctgagcgtgatcggcttcagaatcctgctgctgaaagtggccggctttaacctgctgatgaccctgcggctgtggtccagccgggttaagttttccagatccgcagacgcacccgcttaccaacaagggcagaaccaactctacaatgaacttaatttggggcggagggaagagtacgacgttctggacaaaaggaggggacgagatcccgagatgggcggaaagcctcagcgaaggaagaatccgcaagaggggctttataacgaactccagaaagataaaatggcagaagcctatagtgagattgggatgaagggagaaaggaggaggggtaaaggtcacgatgggttgtaccaaggattgagcacagccactaaagatacctatgatgcgctccacatgcaggccctgccgccaaga

SEQ ID NO: 24243 - DNA, 573 bp, synthetic construct
  source 1..573: mol_type = other DNA
gcctggtccaacaagtccgatttcgcctgcgccaacgccttcaacaacagcattatccccgaggacacattcttcccaagccccgagagcagctgcgacgtgaagctggtggaaaagagcttcgagacagacaccaacctgaacttccagaacctgagcgtgatcggcttcagaatcctgctgctgaaagtggccggctttaacctgctgatgaccctgcggctgtggtccagccgggttaagttttccagatccgcagacgcacccgcttaccaacaagggcagaaccaactctacaatgaacttaatttggggcggagggaagagtacgacgttctggacaaaaggaggggacgagatcccgagatgggcggaaagcctcagcgaaggaagaatccgcaagaggggctttataacgaactccagaaagataaaatggcagaagcctatagtgagattgggatgaagggagaaaggaggaggggtaaaggtcacgatgggttgtaccaaggattgagcacagccactaaagatacctatgatgcgctccacatgcaggccctgccgccaaga

SEQ ID NO: 24244 - DNA, 570 bp, synthetic construct
  source 1..570: mol_type = other DNA
tggtccaacaagtccgatttcgcctgcgccaacgccttcaacaacagcattatccccgaggacacattcttcccaagccccgagagcagctgcgacgtgaagctggtggaaaagagcttcgagacagacaccaacctgaacttccagaacctgagcgtgatcggcttcagaatcctgctgctgaaagtggccggctttaacctgctgatgaccctgcggctgtggtccagccgggttaagttttccagatccgcagacgcacccgcttaccaacaagggcagaaccaactctacaatgaacttaatttggggcggagggaagagtacgacgttctggacaaaaggaggggacgagatcccgagatgggcggaaagcctcagcgaaggaagaatccgcaagaggggctttataacgaactccagaaagataaaatggcagaagcctatagtgagattgggatgaagggagaaaggaggaggggtaaaggtcacgatgggttgtaccaaggattgagcacagccactaaagatacctatgatgcgctccacatgcaggccctgccgccaaga

SEQ ID NO: 24245 - DNA, 567 bp, synthetic construct
  source 1..567: mol_type = other DNA
tccaacaagtccgatttcgcctgcgccaacgccttcaacaacagcattatccccgaggacacattcttcccaagccccgagagcagctgcgacgtgaagctggtggaaaagagcttcgagacagacaccaacctgaacttccagaacctgagcgtgatcggcttcagaatcctgctgctgaaagtggccggctttaacctgctgatgaccctgcggctgtggtccagccgggttaagttttccagatccgcagacgcacccgcttaccaacaagggcagaaccaactctacaatgaacttaatttggggcggagggaagagtacgacgttctggacaaaaggaggggacgagatcccgagatgggcggaaagcctcagcgaaggaagaatccgcaagaggggctttataacgaactccagaaagataaaatggcagaagcctatagtgagattgggatgaagggagaaaggaggaggggtaaaggtcacgatgggttgtaccaaggattgagcacagccactaaagatacctatgatgcgctccacatgcaggccctgccgccaaga

SEQ ID NO: 24246 - DNA, 564 bp, synthetic construct
  source 1..564: mol_type = other DNA
aacaagtccgatttcgcctgcgccaacgccttcaacaacagcattatccccgaggacacattcttcccaagccccgagagcagctgcgacgtgaagctggtggaaaagagcttcgagacagacaccaacctgaacttccagaacctgagcgtgatcggcttcagaatcctgctgctgaaagtggccggctttaacctgctgatgaccctgcggctgtggtccagccgggttaagttttccagatccgcagacgcacccgcttaccaacaagggcagaaccaactctacaatgaacttaatttggggcggagggaagagtacgacgttctggacaaaaggaggggacgagatcccgagatgggcggaaagcctcagcgaaggaagaatccgcaagaggggctttataacgaactccagaaagataaaatggcagaagcctatagtgagattgggatgaagggagaaaggaggaggggtaaaggtcacgatgggttgtaccaaggattgagcacagccactaaagatacctatgatgcgctccacatgcaggccctgccgccaaga

SEQ ID NO: 24247 - DNA, 561 bp, synthetic construct
  source 1..561: mol_type = other DNA
aagtccgatttcgcctgcgccaacgccttcaacaacagcattatccccgaggacacattcttcccaagccccgagagcagctgcgacgtgaagctggtggaaaagagcttcgagacagacaccaacctgaacttccagaacctgagcgtgatcggcttcagaatcctgctgctgaaagtggccggctttaacctgctgatgaccctgcggctgtggtccagccgggttaagttttccagatccgcagacgcacccgcttaccaacaagggcagaaccaactctacaatgaacttaatttggggcggagggaagagtacgacgttctggacaaaaggaggggacgagatcccgagatgggcggaaagcctcagcgaaggaagaatccgcaagaggggctttataacgaactccagaaagataaaatggcagaagcctatagtgagattgggatgaagggagaaaggaggaggggtaaaggtcacgatgggttgtaccaaggattgagcacagccactaaagatacctatgatgcgctccacatgcaggccctgccgccaaga

SEQ ID NO: 24248 - DNA, 558 bp, synthetic construct
  source 1..558: mol_type = other DNA
tccgatttcgcctgcgccaacgccttcaacaacagcattatccccgaggacacattcttcccaagccccgagagcagctgcgacgtgaagctggtggaaaagagcttcgagacagacaccaacctgaacttccagaacctgagcgtgatcggcttcagaatcctgctgctgaaagtggccggctttaacctgctgatgaccctgcggctgtggtccagccgggttaagttttccagatccgcagacgcacccgcttaccaacaagggcagaaccaactctacaatgaacttaatttggggcggagggaagagtacgacgttctggacaaaaggaggggacgagatcccgagatgggcggaaagcctcagcgaaggaagaatccgcaagaggggctttataacgaactccagaaagataaaatggcagaagcctatagtgagattgggatgaagggagaaaggaggaggggtaaaggtcacgatgggttgtaccaaggattgagcacagccactaaagatacctatgatgcgctccacatgcaggccctgccgccaaga

SEQ ID NO: 24249 - DNA, 555 bp, synthetic construct
  source 1..555: mol_type = other DNA
gatttcgcctgcgccaacgccttcaacaacagcattatccccgaggacacattcttcccaagccccgagagcagctgcgacgtgaagctggtggaaaagagcttcgagacagacaccaacctgaacttccagaacctgagcgtgatcggcttcagaatcctgctgctgaaagtggccggctttaacctgctgatgaccctgcggctgtggtccagccgggttaagttttccagatccgcagacgcacccgcttaccaacaagggcagaaccaactctacaatgaacttaatttggggcggagggaagagtacgacgttctggacaaaaggaggggacgagatcccgagatgggcggaaagcctcagcgaaggaagaatccgcaagaggggctttataacgaactccagaaagataaaatggcagaagcctatagtgagattgggatgaagggagaaaggaggaggggtaaaggtcacgatgggttgtaccaaggattgagcacagccactaaagatacctatgatgcgctccacatgcaggccctgccgccaaga

SEQ ID NO: 24250 - DNA, 552 bp, synthetic construct
  source 1..552: mol_type = other DNA
ttcgcctgcgccaacgccttcaacaacagcattatccccgaggacacattcttcccaagccccgagagcagctgcgacgtgaagctggtggaaaagagcttcgagacagacaccaacctgaacttccagaacctgagcgtgatcggcttcagaatcctgctgctgaaagtggccggctttaacctgctgatgaccctgcggctgtggtccagccgggttaagttttccagatccgcagacgcacccgcttaccaacaagggcagaaccaactctacaatgaacttaatttggggcggagggaagagtacgacgttctggacaaaaggaggggacgagatcccgagatgggcggaaagcctcagcgaaggaagaatccgcaagaggggctttataacgaactccagaaagataaaatggcagaagcctatagtgagattgggatgaagggagaaaggaggaggggtaaaggtcacgatgggttgtaccaaggattgagcacagccactaaagatacctatgatgcgctccacatgcaggccctgccgccaaga

SEQ ID NO: 24251 - DNA, 549 bp, synthetic construct
  source 1..549: mol_type = other DNA
gcctgcgccaacgccttcaacaacagcattatccccgaggacacattcttcccaagccccgagagcagctgcgacgtgaagctggtggaaaagagcttcgagacagacaccaacctgaacttccagaacctgagcgtgatcggcttcagaatcctgctgctgaaagtggccggctttaacctgctgatgaccctgcggctgtggtccagccgggttaagttttccagatccgcagacgcacccgcttaccaacaagggcagaaccaactctacaatgaacttaatttggggcggagggaagagtacgacgttctggacaaaaggaggggacgagatcccgagatgggcggaaagcctcagcgaaggaagaatccgcaagaggggctttataacgaactccagaaagataaaatggcagaagcctatagtgagattgggatgaagggagaaaggaggaggggtaaaggtcacgatgggttgtaccaaggattgagcacagccactaaagatacctatgatgcgctccacatgcaggccctgccgccaaga

SEQ ID NO: 24252 - DNA, 546 bp, synthetic construct
  source 1..546: mol_type = other DNA
tgcgccaacgccttcaacaacagcattatccccgaggacacattcttcccaagccccgagagcagctgcgacgtgaagctggtggaaaagagcttcgagacagacaccaacctgaacttccagaacctgagcgtgatcggcttcagaatcctgctgctgaaagtggccggctttaacctgctgatgaccctgcggctgtggtccagccgggttaagttttccagatccgcagacgcacccgcttaccaacaagggcagaaccaactctacaatgaacttaatttggggcggagggaagagtacgacgttctggacaaaaggaggggacgagatcccgagatgggcggaaagcctcagcgaaggaagaatccgcaagaggggctttataacgaactccagaaagataaaatggcagaagcctatagtgagattgggatgaagggagaaaggaggaggggtaaaggtcacgatgggttgtaccaaggattgagcacagccactaaagatacctatgatgcgctccacatgcaggccctgccgccaaga

SEQ ID NO: 24253 - DNA, 543 bp, synthetic construct
  source 1..543: mol_type = other DNA
gccaacgccttcaacaacagcattatccccgaggacacattcttcccaagccccgagagcagctgcgacgtgaagctggtggaaaagagcttcgagacagacaccaacctgaacttccagaacctgagcgtgatcggcttcagaatcctgctgctgaaagtggccggctttaacctgctgatgaccctgcggctgtggtccagccgggttaagttttccagatccgcagacgcacccgcttaccaacaagggcagaaccaactctacaatgaacttaatttggggcggagggaagagtacgacgttctggacaaaaggaggggacgagatcccgagatgggcggaaagcctcagcgaaggaagaatccgcaagaggggctttataacgaactccagaaagataaaatggcagaagcctatagtgagattgggatgaagggagaaaggaggaggggtaaaggtcacgatgggttgtaccaaggattgagcacagccactaaagatacctatgatgcgctccacatgcaggccctgccgccaaga

SEQ ID NO: 24254 - DNA, 540 bp, synthetic construct
  source 1..540: mol_type = other DNA
aacgccttcaacaacagcattatccccgaggacacattcttcccaagccccgagagcagctgcgacgtgaagctggtggaaaagagcttcgagacagacaccaacctgaacttccagaacctgagcgtgatcggcttcagaatcctgctgctgaaagtggccggctttaacctgctgatgaccctgcggctgtggtccagccgggttaagttttccagatccgcagacgcacccgcttaccaacaagggcagaaccaactctacaatgaacttaatttggggcggagggaagagtacgacgttctggacaaaaggaggggacgagatcccgagatgggcggaaagcctcagcgaaggaagaatccgcaagaggggctttataacgaactccagaaagataaaatggcagaagcctatagtgagattgggatgaagggagaaaggaggaggggtaaaggtcacgatgggttgtaccaaggattgagcacagccactaaagatacctatgatgcgctccacatgcaggccctgccgccaaga

SEQ ID NO: 24255 - DNA, 537 bp, synthetic construct
  source 1..537: mol_type = other DNA
gccttcaacaacagcattatccccgaggacacattcttcccaagccccgagagcagctgcgacgtgaagctggtggaaaagagcttcgagacagacaccaacctgaacttccagaacctgagcgtgatcggcttcagaatcctgctgctgaaagtggccggctttaacctgctgatgaccctgcggctgtggtccagccgggttaagttttccagatccgcagacgcacccgcttaccaacaagggcagaaccaactctacaatgaacttaatttggggcggagggaagagtacgacgttctggacaaaaggaggggacgagatcccgagatgggcggaaagcctcagcgaaggaagaatccgcaagaggggctttataacgaactccagaaagataaaatggcagaagcctatagtgagattgggatgaagggagaaaggaggaggggtaaaggtcacgatgggttgtaccaaggattgagcacagccactaaagatacctatgatgcgctccacatgcaggccctgccgccaaga

SEQ ID NO: 24256 - DNA, 534 bp, synthetic construct
  source 1..534: mol_type = other DNA
ttcaacaacagcattatccccgaggacacattcttcccaagccccgagagcagctgcgacgtgaagctggtggaaaagagcttcgagacagacaccaacctgaacttccagaacctgagcgtgatcggcttcagaatcctgctgctgaaagtggccggctttaacctgctgatgaccctgcggctgtggtccagccgggttaagttttccagatccgcagacgcacccgcttaccaacaagggcagaaccaactctacaatgaacttaatttggggcggagggaagagtacgacgttctggacaaaaggaggggacgagatcccgagatgggcggaaagcctcagcgaaggaagaatccgcaagaggggctttataacgaactccagaaagataaaatggcagaagcctatagtgagattgggatgaagggagaaaggaggaggggtaaaggtcacgatgggttgtaccaaggattgagcacagccactaaagatacctatgatgcgctccacatgcaggccctgccgccaaga

SEQ ID NO: 24257 - DNA, 531 bp, synthetic construct
  source 1..531: mol_type = other DNA
aacaacagcattatccccgaggacacattcttcccaagccccgagagcagctgcgacgtgaagctggtggaaaagagcttcgagacagacaccaacctgaacttccagaacctgagcgtgatcggcttcagaatcctgctgctgaaagtggccggctttaacctgctgatgaccctgcggctgtggtccagccgggttaagttttccagatccgcagacgcacccgcttaccaacaagggcagaaccaactctacaatgaacttaatttggggcggagggaagagtacgacgttctggacaaaaggaggggacgagatcccgagatgggcggaaagcctcagcgaaggaagaatccgcaagaggggctttataacgaactccagaaagataaaatggcagaagcctatagtgagattgggatgaagggagaaaggaggaggggtaaaggtcacgatgggttgtaccaaggattgagcacagccactaaagatacctatgatgcgctccacatgcaggccctgccgccaaga

SEQ ID NO: 24258 - DNA, 528 bp, synthetic construct
  source 1..528: mol_type = other DNA
aacagcattatccccgaggacacattcttcccaagccccgagagcagctgcgacgtgaagctggtggaaaagagcttcgagacagacaccaacctgaacttccagaacctgagcgtgatcggcttcagaatcctgctgctgaaagtggccggctttaacctgctgatgaccctgcggctgtggtccagccgggttaagttttccagatccgcagacgcacccgcttaccaacaagggcagaaccaactctacaatgaacttaatttggggcggagggaagagtacgacgttctggacaaaaggaggggacgagatcccgagatgggcggaaagcctcagcgaaggaagaatccgcaagaggggctttataacgaactccagaaagataaaatggcagaagcctatagtgagattgggatgaagggagaaaggaggaggggtaaaggtcacgatgggttgtaccaaggattgagcacagccactaaagatacctatgatgcgctccacatgcaggccctgccgccaaga

SEQ ID NO: 24259 - DNA, 525 bp, synthetic construct
  source 1..525: mol_type = other DNA
agcattatccccgaggacacattcttcccaagccccgagagcagctgcgacgtgaagctggtggaaaagagcttcgagacagacaccaacctgaacttccagaacctgagcgtgatcggcttcagaatcctgctgctgaaagtggccggctttaacctgctgatgaccctgcggctgtggtccagccgggttaagttttccagatccgcagacgcacccgcttaccaacaagggcagaaccaactctacaatgaacttaatttggggcggagggaagagtacgacgttctggacaaaaggaggggacgagatcccgagatgggcggaaagcctcagcgaaggaagaatccgcaagaggggctttataacgaactccagaaagataaaatggcagaagcctatagtgagattgggatgaagggagaaaggaggaggggtaaaggtcacgatgggttgtaccaaggattgagcacagccactaaagatacctatgatgcgctccacatgcaggccctgccgccaaga

SEQ ID NO: 24260 - DNA, 522 bp, synthetic construct
  source 1..522: mol_type = other DNA
attatccccgaggacacattcttcccaagccccgagagcagctgcgacgtgaagctggtggaaaagagcttcgagacagacaccaacctgaacttccagaacctgagcgtgatcggcttcagaatcctgctgctgaaagtggccggctttaacctgctgatgaccctgcggctgtggtccagccgggttaagttttccagatccgcagacgcacccgcttaccaacaagggcagaaccaactctacaatgaacttaatttggggcggagggaagagtacgacgttctggacaaaaggaggggacgagatcccgagatgggcggaaagcctcagcgaaggaagaatccgcaagaggggctttataacgaactccagaaagataaaatggcagaagcctatagtgagattgggatgaagggagaaaggaggaggggtaaaggtcacgatgggttgtaccaaggattgagcacagccactaaagatacctatgatgcgctccacatgcaggccctgccgccaaga

SEQ ID NO: 24261 - DNA, 519 bp, synthetic construct; identical to SEQ ID NO: 23947
  source 1..519: mol_type = other DNA

SEQ ID NO: 24262 - DNA, 516 bp, synthetic construct
  source 1..516: mol_type = other DNA
cccgaggacacattcttcccaagccccgagagcagctgcgacgtgaagctggtggaaaagagcttcgagacagacaccaacctgaacttccagaacctgagcgtgatcggcttcagaatcctgctgctgaaagtggccggctttaacctgctgatgaccctgcggctgtggtccagccgggttaagttttccagatccgcagacgcacccgcttaccaacaagggcagaaccaactctacaatgaacttaatttggggcggagggaagagtacgacgttctggacaaaaggaggggacgagatcccgagatgggcggaaagcctcagcgaaggaagaatccgcaagaggggctttataacgaactccagaaagataaaatggcagaagcctatagtgagattgggatgaagggagaaaggaggaggggtaaaggtcacgatgggttgtaccaaggattgagcacagccactaaagatacctatgatgcgctccacatgcaggccctgccgccaaga

SEQ ID NO: 24263 - DNA, 513 bp, synthetic construct
  source 1..513: mol_type = other DNA
gaggacacattcttcccaagccccgagagcagctgcgacgtgaagctggtggaaaagagcttcgagacagacaccaacctgaacttccagaacctgagcgtgatcggcttcagaatcctgctgctgaaagtggccggctttaacctgctgatgaccctgcggctgtggtccagccgggttaagttttccagatccgcagacgcacccgcttaccaacaagggcagaaccaactctacaatgaacttaatttggggcggagggaagagtacgacgttctggacaaaaggaggggacgagatcccgagatgggcggaaagcctcagcgaaggaagaatccgcaagaggggctttataacgaactccagaaagataaaatggcagaagcctatagtgagattgggatgaagggagaaaggaggaggggtaaaggtcacgatgggttgtaccaaggattgagcacagccactaaagatacctatgatgcgctccacatgcaggccctgccgccaaga

SEQ ID NO: 24264 - DNA, 510 bp, synthetic construct
  source 1..510: mol_type = other DNA
gacacattcttcccaagccccgagagcagctgcgacgtgaagctggtggaaaagagcttcgagacagacaccaacctgaacttccagaacctgagcgtgatcggcttcagaatcctgctgctgaaagtggccggctttaacctgctgatgaccctgcggctgtggtccagccgggttaagttttccagatccgcagacgcacccgcttaccaacaagggcagaaccaactctacaatgaacttaatttggggcggagggaagagtacgacgttctggacaaaaggaggggacgagatcccgagatgggcggaaagcctcagcgaaggaagaatccgcaagaggggctttataacgaactccagaaagataaaatggcagaagcctatagtgagattgggatgaagggagaaaggaggaggggtaaaggtcacgatgggttgtaccaaggattgagcacagccactaaagatacctatgatgcgctccacatgcaggccctgccgccaaga

SEQ ID NO: 24265 - DNA, 507 bp, synthetic construct
  source 1..507: mol_type = other DNA
acattcttcccaagccccgagagcagctgcgacgtgaagctggtggaaaagagcttcgagacagacaccaacctgaacttccagaacctgagcgtgatcggcttcagaatcctgctgctgaaagtggccggctttaacctgctgatgaccctgcggctgtggtccagccgggttaagttttccagatccgcagacgcacccgcttaccaacaagggcagaaccaactctacaatgaacttaatttggggcggagggaagagtacgacgttctggacaaaaggaggggacgagatcccgagatgggcggaaagcctcagcgaaggaagaatccgcaagaggggctttataacgaactccagaaagataaaatggcagaagcctatagtgagattgggatgaagggagaaaggaggaggggtaaaggtcacgatgggttgtaccaaggattgagcacagccactaaagatacctatgatgcgctccacatgcaggccctgccgccaaga

SEQ ID NO: 24266 - DNA, 504 bp, synthetic construct
  source 1..504: mol_type = other DNA
ttcttcccaagccccgagagcagctgcgacgtgaagctggtggaaaagagcttcgagacagacaccaacctgaacttccagaacctgagcgtgatcggcttcagaatcctgctgctgaaagtggccggctttaacctgctgatgaccctgcggctgtggtccagccgggttaagttttccagatccgcagacgcacccgcttaccaacaagggcagaaccaactctacaatgaacttaatttggggcggagggaagagtacgacgttctggacaaaaggaggggacgagatcccgagatgggcggaaagcctcagcgaaggaagaatccgcaagaggggctttataacgaactccagaaagataaaatggcagaagcctatagtgagattgggatgaagggagaaaggaggaggggtaaaggtcacgatgggttgtaccaaggattgagcacagccactaaagatacctatgatgcgctccacatgcaggccctgccgccaaga

SEQ ID NO: 24267 - DNA, 501 bp, synthetic construct
  source 1..501: mol_type = other DNA
ttcccaagccccgagagcagctgcgacgtgaagctggtggaaaagagcttcgagacagacaccaacctgaacttccagaacctgagcgtgatcggcttcagaatcctgctgctgaaagtggccggctttaacctgctgatgaccctgcggctgtggtccagccgggttaagttttccagatccgcagacgcacccgcttaccaacaagggcagaaccaactctacaatgaacttaatttggggcggagggaagagtacgacgttctggacaaaaggaggggacgagatcccgagatgggcggaaagcctcagcgaaggaagaatccgcaagaggggctttataacgaactccagaaagataaaatggcagaagcctatagtgagattgggatgaagggagaaaggaggaggggtaaaggtcacgatgggttgtaccaaggattgagcacagccactaaagatacctatgatgcgctccacatgcaggccctgccgccaaga

SEQ ID NO: 24268 - DNA, 498 bp, synthetic construct
  source 1..498: mol_type = other DNA
ccaagccccgagagcagctgcgacgtgaagctggtggaaaagagcttcgagacagacaccaacctgaacttccagaacctgagcgtgatcggcttcagaatcctgctgctgaaagtggccggctttaacctgctgatgaccctgcggctgtggtccagccgggttaagttttccagatccgcagacgcacccgcttaccaacaagggcagaaccaactctacaatgaacttaatttggggcggagggaagagtacgacgttctggacaaaaggaggggacgagatcccgagatgggcggaaagcctcagcgaaggaagaatccgcaagaggggctttataacgaactccagaaagataaaatggcagaagcctatagtgagattgggatgaagggagaaaggaggaggggtaaaggtcacgatgggttgtaccaaggattgagcacagccactaaagatacctatgatgcgctccacatgcaggccctgccgccaaga

SEQ ID NO: 24269 - DNA, 495 bp, synthetic construct
  source 1..495: mol_type = other DNA
agccccgagagcagctgcgacgtgaagctggtggaaaagagcttcgagacagacaccaacctgaacttccagaacctgagcgtgatcggcttcagaatcctgctgctgaaagtggccggctttaacctgctgatgaccctgcggctgtggtccagccgggttaagttttccagatccgcagacgcacccgcttaccaacaagggcagaaccaactctacaatgaacttaatttggggcggagggaagagtacgacgttctggacaaaaggaggggacgagatcccgagatgggcggaaagcctcagcgaaggaagaatccgcaagaggggctttataacgaactccagaaagataaaatggcagaagcctatagtgagattgggatgaagggagaaaggaggaggggtaaaggtcacgatgggttgtaccaaggattgagcacagccactaaagatacctatgatgcgctccacatgcaggccctgccgccaaga

SEQ ID NO: 24270 - DNA, 492 bp, synthetic construct
  source 1..492: mol_type = other DNA
cccgagagcagctgcgacgtgaagctggtggaaaagagcttcgagacagacaccaacctgaacttccagaacctgagcgtgatcggcttcagaatcctgctgctgaaagtggccggctttaacctgctgatgaccctgcggctgtggtccagccgggttaagttttccagatccgcagacgcacccgcttaccaacaagggcagaaccaactctacaatgaacttaatttggggcggagggaagagtacgacgttctggacaaaaggaggggacgagatcccgagatgggcggaaagcctcagcgaaggaagaatccgcaagaggggctttataacgaactccagaaagataaaatggcagaagcctatagtgagattgggatgaagggagaaaggaggaggggtaaaggtcacgatgggttgtaccaaggattgagcacagccactaaagatacctatgatgcgctccacatgcaggccctgccgccaaga

SEQ ID NO: 24271 - DNA, 489 bp, synthetic construct; identical to SEQ ID NO: 23948
  source 1..489: mol_type = other DNA

SEQ ID NO: 24272 - DNA, 486 bp, synthetic construct
  source 1..486: mol_type = other DNA
agcagctgcgacgtgaagctggtggaaaagagcttcgagacagacaccaacctgaacttccagaacctgagcgtgatcggcttcagaatcctgctgctgaaagtggccggctttaacctgctgatgaccctgcggctgtggtccagccgggttaagttttccagatccgcagacgcacccgcttaccaacaagggcagaaccaactctacaatgaacttaatttggggcggagggaagagtacgacgttctggacaaaaggaggggacgagatcccgagatgggcggaaagcctcagcgaaggaagaatccgcaagaggggctttataacgaactccagaaagataaaatggcagaagcctatagtgagattgggatgaagggagaaaggaggaggggtaaaggtcacgatgggttgtaccaaggattgagcacagccactaaagatacctatgatgcgctccacatgcaggccctgccgccaaga

SEQ ID NO: 24273 - DNA, 483 bp, synthetic construct
  source 1..483: mol_type = other DNA
agctgcgacgtgaagctggtggaaaagagcttcgagacagacaccaacctgaacttccagaacctgagcgtgatcggcttcagaatcctgctgctgaaagtggccggctttaacctgctgatgaccctgcggctgtggtccagccgggttaagttttccagatccgcagacgcacccgcttaccaacaagggcagaaccaactctacaatgaacttaatttggggcggagggaagagtacgacgttctggacaaaaggaggggacgagatcccgagatgggcggaaagcctcagcgaaggaagaatccgcaagaggggctttataacgaactccagaaagataaaatggcagaagcctatagtgagattgggatgaagggagaaaggaggaggggtaaaggtcacgatgggttgtaccaaggattgagcacagccactaaagatacctatgatgcgctccacatgcaggccctgccgccaaga

SEQ ID NO: 24274 - DNA, 480 bp, synthetic construct
  source 1..480: mol_type = other DNA
tgcgacgtgaagctggtggaaaagagcttcgagacagacaccaacctgaacttccagaacctgagcgtgatcggcttcagaatcctgctgctgaaagtggccggctttaacctgctgatgaccctgcggctgtggtccagccgggttaagttttccagatccgcagacgcacccgcttaccaacaagggcagaaccaactctacaatgaacttaatttggggcggagggaagagtacgacgttctggacaaaaggaggggacgagatcccgagatgggcggaaagcctcagcgaaggaagaatccgcaagaggggctttataacgaactccagaaagataaaatggcagaagcctatagtgagattgggatgaagggagaaaggaggaggggtaaaggtcacgatgggttgtaccaaggattgagcacagccactaaagatacctatgatgcgctccacatgcaggccctgccgccaaga

SEQ ID NO: 24275 - DNA, 477 bp, synthetic construct
  source 1..477: mol_type = other DNA
gacgtgaagctggtggaaaagagcttcgagacagacaccaacctgaacttccagaacctgagcgtgatcggcttcagaatcctgctgctgaaagtggccggctttaacctgctgatgaccctgcggctgtggtccagccgggttaagttttccagatccgcagacgcacccgcttaccaacaagggcagaaccaactctacaatgaacttaatttggggcggagggaagagtacgacgttctggacaaaaggaggggacgagatcccgagatgggcggaaagcctcagcgaaggaagaatccgcaagaggggctttataacgaactccagaaagataaaatggcagaagcctatagtgagattgggatgaagggagaaaggaggaggggtaaaggtcacgatgggttgtaccaaggattgagcacagccactaaagatacctatgatgcgctccacatgcaggccctgccgccaaga

SEQ ID NO: 24276 - DNA, 474 bp, synthetic construct
  source 1..474: mol_type = other DNA
gtgaagctggtggaaaagagcttcgagacagacaccaacctgaacttccagaacctgagcgtgatcggcttcagaatcctgctgctgaaagtggccggctttaacctgctgatgaccctgcggctgtggtccagccgggttaagttttccagatccgcagacgcacccgcttaccaacaagggcagaaccaactctacaatgaacttaatttggggcggagggaagagtacgacgttctggacaaaaggaggggacgagatcccgagatgggcggaaagcctcagcgaaggaagaatccgcaagaggggctttataacgaactccagaaagataaaatggcagaagcctatagtgagattgggatgaagggagaaaggaggaggggtaaaggtcacgatgggttgtaccaaggattgagcacagccactaaagatacctatgatgcgctccacatgcaggccctgccgccaaga

SEQ ID NO: 24277 - DNA, 471 bp, synthetic construct
  source 1..471: mol_type = other DNA
aagctggtggaaaagagcttcgagacagacaccaacctgaacttccagaacctgagcgtgatcggcttcagaatcctgctgctgaaagtggccggctttaacctgctgatgaccctgcggctgtggtccagccgggttaagttttccagatccgcagacgcacccgcttaccaacaagggcagaaccaactctacaatgaacttaatttggggcggagggaagagtacgacgttctggacaaaaggaggggacgagatcccgagatgggcggaaagcctcagcgaaggaagaatccgcaagaggggctttataacgaactccagaaagataaaatggcagaagcctatagtgagattgggatgaagggagaaaggaggaggggtaaaggtcacgatgggttgtaccaaggattgagcacagccactaaagatacctatgatgcgctccacatgcaggccctgccgccaaga

SEQ ID NO: 24278 - DNA, 468 bp, synthetic construct
  source 1..468: mol_type = other DNA
ctggtggaaaagagcttcgagacagacaccaacctgaacttccagaacctgagcgtgatcggcttcagaatcctgctgctgaaagtggccggctttaacctgctgatgaccctgcggctgtggtccagccgggttaagttttccagatccgcagacgcacccgcttaccaacaagggcagaaccaactctacaatgaacttaatttggggcggagggaagagtacgacgttctggacaaaaggaggggacgagatcccgagatgggcggaaagcctcagcgaaggaagaatccgcaagaggggctttataacgaactccagaaagataaaatggcagaagcctatagtgagattgggatgaagggagaaaggaggaggggtaaaggtcacgatgggttgtaccaaggattgagcacagccactaaagatacctatgatgcgctccacatgcaggccctgccgccaaga

SEQ ID NO: 24279 - DNA, 465 bp, synthetic construct
  source 1..465: mol_type = other DNA
gtggaaaagagcttcgagacagacaccaacctgaacttccagaacctgagcgtgatcggcttcagaatcctgctgctgaaagtggccggctttaacctgctgatgaccctgcggctgtggtccagccgggttaagttttccagatccgcagacgcacccgcttaccaacaagggcagaaccaactctacaatgaacttaatttggggcggagggaagagtacgacgttctggacaaaaggaggggacgagatcccgagatgggcggaaagcctcagcgaaggaagaatccgcaagaggggctttataacgaactccagaaagataaaatggcagaagcctatagtgagattgggatgaagggagaaaggaggaggggtaaaggtcacgatgggttgtaccaaggattgagcacagccactaaagatacctatgatgcgctccacatgcaggccctgccgccaaga

SEQ ID NO: 24280 - DNA, 462 bp, synthetic construct
  source 1..462: mol_type = other DNA
gaaaagagcttcgagacagacaccaacctgaacttccagaacctgagcgtgatcggcttcagaatcctgctgctgaaagtggccggctttaacctgctgatgaccctgcggctgtggtccagccgggttaagttttccagatccgcagacgcacccgcttaccaacaagggcagaaccaactctacaatgaacttaatttggggcggagggaagagtacgacgttctggacaaaaggaggggacgagatcccgagatgggcggaaagcctcagcgaaggaagaatccgcaagaggggctttataacgaactccagaaagataaaatggcagaagcctatagtgagattgggatgaagggagaaaggaggaggggtaaaggtcacgatgggttgtaccaaggattgagcacagccactaaagatacctatgatgcgctccacatgcaggccctgccgccaaga

SEQ ID NO: 24281 - DNA, 459 bp, synthetic construct
  source 1..459: mol_type = other DNA
aagagcttcgagacagacaccaacctgaacttccagaacctgagcgtgatcggcttcagaatcctgctgctgaaagtggccggctttaacctgctgatgaccctgcggctgtggtccagccgggttaagttttccagatccgcagacgcacccgcttaccaacaagggcagaaccaactctacaatgaacttaatttggggcggagggaagagtacgacgttctggacaaaaggaggggacgagatcccgagatgggcggaaagcctcagcgaaggaagaatccgcaagaggggctttataacgaactccagaaagataaaatggcagaagcctatagtgagattgggatgaagggagaaaggaggaggggtaaaggtcacgatgggttgtaccaaggattgagcacagccactaaagatacctatgatgcgctccacatgcaggccctgccgccaaga

SEQ ID NO: 24282 - DNA, 456 bp, synthetic construct
  source 1..456: mol_type = other DNA
agcttcgagacagacaccaacctgaacttccagaacctgagcgtgatcggcttcagaatcctgctgctgaaagtggccggctttaacctgctgatgaccctgcggctgtggtccagccgggttaagttttccagatccgcagacgcacccgcttaccaacaagggcagaaccaactctacaatgaacttaatttggggcggagggaagagtacgacgttctggacaaaaggaggggacgagatcccgagatgggcggaaagcctcagcgaaggaagaatccgcaagaggggctttataacgaactccagaaagataaaatggcagaagcctatagtgagattgggatgaagggagaaaggaggaggggtaaaggtcacgatgggttgtaccaaggattgagcacagccactaaagatacctatgatgcgctccacatgcaggccctgccgccaaga

SEQ ID NO: 24283 - DNA, 876 bp, synthetic construct; identical to SEQ ID NO: 23918
  source 1..876: mol_type = other DNA

SEQ ID NO: 24284 - DNA, 873 bp, synthetic construct
  source 1..873: mol_type = other DNA
gacctgaagaacgtgttcccacctgaggtggccgtgttcgagcctagcgaggccgagatcagccacacccagaaagccaccctcgtgtgcctggctaccggcttctaccccgaccatgtggaactgtcttggtgggtcaacggcaaagaggtgcacagcggcgtgtgtaccgacccccagccactgaaagaacagcccgccctgaacgacagccggtactgcctgagcagcagactgagagtgtccgccaccttctggcagaacccccggaaccacttcagatgccaggtgcagttctacggcctgagcgagaacgacgagtggacccaggacagagccaagcccgtgacccagatcgtgtctgccgaagcctggggcagagccgattgcggctttaccagcgagagctaccagcagggcgtgctgagcgccaccatcctgtacgagatcctgctgggcaaggccaccctgtacgccgtgctggtgtctgccctggtgctgatggctatggtcaagcggaaggacagccggggacgggttaagttttccagatccgcagacgcacccgcttaccaacaagggcagaaccaactctacaatgaacttaatttggggcggagggaagagtacgacgttctggacaaaaggaggggacgagatcccgagatgggcggaaagcctcagcgaaggaagaatccgcaagaggggctttataacgaactccagaaagataaaatggcagaagcctatagtgagattgggatgaagggagaaaggaggaggggtaaaggtcacgatgggttgtaccaaggattgagcacagccactaaagatacctatgatgcgctccacatgcaggccctgccgccaaga

SEQ ID NO: 24285 - DNA, 870 bp, synthetic construct
  source 1..870: mol_type = other DNA
ctgaagaacgtgttcccacctgaggtggccgtgttcgagcctagcgaggccgagatcagccacacccagaaagccaccctcgtgtgcctggctaccggcttctaccccgaccatgtggaactgtcttggtgggtcaacggcaaagaggtgcacagcggcgtgtgtaccgacccccagccactgaaagaacagcccgccctgaacgacagccggtactgcctgagcagcagactgagagtgtccgccaccttctggcagaacccccggaaccacttcagatgccaggtgcagttctacggcctgagcgagaacgacgagtggacccaggacagagccaagcccgtgacccagatcgtgtctgccgaagcctggggcagagccgattgcggctttaccagcgagagctaccagcagggcgtgctgagcgccaccatcctgtacgagatcctgctgggcaaggccaccctgtacgccgtgctggtgtctgccctggtgctgatggctatggtcaagcggaaggacagccggggacgggttaagttttccagatccgcagacgcacccgcttaccaacaagggcagaaccaactctacaatgaacttaatttggggcggagggaagagtacgacgttctggacaaaaggaggggacgagatcccgagatgggcggaaagcctcagcgaaggaagaatccgcaagaggggctttataacgaactccagaaagataaaatggcagaagcctatagtgagattgggatgaagggagaaaggaggaggggtaaaggtcacgatgggttgtaccaaggattgagcacagccactaaagatacctatgatgcgctccacatgcaggccctgccgccaaga

SEQ ID NO: 24286 - DNA, 867 bp, synthetic construct
  source 1..867: mol_type = other DNA
aagaacgtgttcccacctgaggtggccgtgttcgagcctagcgaggccgagatcagccacacccagaaagccaccctcgtgtgcctggctaccggcttctaccccgaccatgtggaactgtcttggtgggtcaacggcaaagaggtgcacagcggcgtgtgtaccgacccccagccactgaaagaacagcccgccctgaacgacagccggtactgcctgagcagcagactgagagtgtccgccaccttctggcagaacccccggaaccacttcagatgccaggtgcagttctacggcctgagcgagaacgacgagtggacccaggacagagccaagcccgtgacccagatcgtgtctgccgaagcctggggcagagccgattgcggctttaccagcgagagctaccagcagggcgtgctgagcgccaccatcctgtacgagatcctgctgggcaaggccaccctgtacgccgtgctggtgtctgccctggtgctgatggctatggtcaagcggaaggacagccggggacgggttaagttttccagatccgcagacgcacccgcttaccaacaagggcagaaccaactctacaatgaacttaatttggggcggagggaagagtacgacgttctggacaaaaggaggggacgagatcccgagatgggcggaaagcctcagcgaaggaagaatccgcaagaggggctttataacgaactccagaaagataaaatggcagaagcctatagtgagattgggatgaagggagaaaggaggaggggtaaaggtcacgatgggttgtaccaaggattgagcacagccactaaagatacctatgatgcgctccacatgcaggccctgccgccaaga

SEQ ID NO: 24287 - DNA, 864 bp, synthetic construct
  source 1..864: mol_type = other DNA
aacgtgttcccacctgaggtggccgtgttcgagcctagcgaggccgagatcagccacacccagaaagccaccctcgtgtgcctggctaccggcttctaccccgaccatgtggaactgtcttggtgggtcaacggcaaagaggtgcacagcggcgtgtgtaccgacccccagccactgaaagaacagcccgccctgaacgacagccggtactgcctgagcagcagactgagagtgtccgccaccttctggcagaacccccggaaccacttcagatgccaggtgcagttctacggcctgagcgagaacgacgagtggacccaggacagagccaagcccgtgacccagatcgtgtctgccgaagcctggggcagagccgattgcggctttaccagcgagagctaccagcagggcgtgctgagcgccaccatcctgtacgagatcctgctgggcaaggccaccctgtacgccgtgctggtgtctgccctggtgctgatggctatggtcaagcggaaggacagccggggacgggttaagttttccagatccgcagacgcacccgcttaccaacaagggcagaaccaactctacaatgaacttaatttggggcggagggaagagtacgacgttctggacaaaaggaggggacgagatcccgagatgggcggaaagcctcagcgaaggaagaatccgcaagaggggctttataacgaactccagaaagataaaatggcagaagcctatagtgagattgggatgaagggagaaaggaggaggggtaaaggtcacgatgggttgtaccaaggattgagcacagccactaaagatacctatgatgcgctccacatgcaggccctgccgccaaga

SEQ ID NO: 24288 - DNA, 861 bp, synthetic construct
  source 1..861: mol_type = other DNA
gtgttcccacctgaggtggccgtgttcgagcctagcgaggccgagatcagccacacccagaaagccaccctcgtgtgcctggctaccggcttctaccccgaccatgtggaactgtcttggtgggtcaacggcaaagaggtgcacagcggcgtgtgtaccgacccccagccactgaaagaacagcccgccctgaacgacagccggtactgcctgagcagcagactgagagtgtccgccaccttctggcagaacccccggaaccacttcagatgccaggtgcagttctacggcctgagcgagaacgacgagtggacccaggacagagccaagcccgtgacccagatcgtgtctgccgaagcctggggcagagccgattgcggctttaccagcgagagctaccagcagggcgtgctgagcgccaccatcctgtacgagatcctgctgggcaaggccaccctgtacgccgtgctggtgtctgccctggtgctgatggctatggtcaagcggaaggacagccggggacgggttaagttttccagatccgcagacgcacccgcttaccaacaagggcagaaccaactctacaatgaacttaatttggggcggagggaagagtacgacgttctggacaaaaggaggggacgagatcccgagatgggcggaaagcctcagcgaaggaagaatccgcaagaggggctttataacgaactccagaaagataaaatggcagaagcctatagtgagattgggatgaagggagaaaggaggaggggtaaaggtcacgatgggttgtaccaaggattgagcacagccactaaagatacctatgatgcgctccacatgcaggccctgccgccaaga

SEQ ID NO: 24289 - DNA, 858 bp, synthetic construct
  source 1..858: mol_type = other DNA
ttcccacctgaggtggccgtgttcgagcctagcgaggccgagatcagccacacccagaaagccaccctcgtgtgcctggctaccggcttctaccccgaccatgtggaactgtcttggtgggtcaacggcaaagaggtgcacagcggcgtgtgtaccgacccccagccactgaaagaacagcccgccctgaacgacagccggtactgcctgagcagcagactgagagtgtccgccaccttctggcagaacccccggaaccacttcagatgccaggtgcagttctacggcctgagcgagaacgacgagtggacccaggacagagccaagcccgtgacccagatcgtgtctgccgaagcctggggcagagccgattgcggctttaccagcgagagctaccagcagggcgtgctgagcgccaccatcctgtacgagatcctgctgggcaaggccaccctgtacgccgtgctggtgtctgccctggtgctgatggctatggtcaagcggaaggacagccggggacgggttaagttttccagatccgcagacgcacccgcttaccaacaagggcagaaccaactctacaatgaacttaatttggggcggagggaagagtacgacgttctggacaaaaggaggggacgagatcccgagatgggcggaaagcctcagcgaaggaagaatccgcaagaggggctttataacgaactccagaaagataaaatggcagaagcctatagtgagattgggatgaagggagaaaggaggaggggtaaaggtcacgatgggttgtaccaaggattgagcacagccactaaagatacctatgatgcgctccacatgcaggccctgccgccaaga

SEQ ID NO: 24290 - DNA, 855 bp, synthetic construct
  source 1..855: mol_type = other DNA
ccacctgaggtggccgtgttcgagcctagcgaggccgagatcagccacacccagaaagccaccctcgtgtgcctggctaccggcttctaccccgaccatgtggaactgtcttggtgggtcaacggcaaagaggtgcacagcggcgtgtgtaccgacccccagccactgaaagaacagcccgccctgaacgacagccggtactgcctgagcagcagactgagagtgtccgccaccttctggcagaacccccggaaccacttcagatgccaggtgcagttctacggcctgagcgagaacgacgagtggacccaggacagagccaagcccgtgacccagatcgtgtctgccgaagcctggggcagagccgattgcggctttaccagcgagagctaccagcagggcgtgctgagcgccaccatcctgtacgagatcctgctgggcaaggccaccctgtacgccgtgctggtgtctgccctggtgctgatggctatggtcaagcggaaggacagccggggacgggttaagttttccagatccgcagacgcacccgcttaccaacaagggcagaaccaactctacaatgaacttaatttggggcggagggaagagtacgacgttctggacaaaaggaggggacgagatcccgagatgggcggaaagcctcagcgaaggaagaatccgcaagaggggctttataacgaactccagaaagataaaatggcagaagcctatagtgagattgggatgaagggagaaaggaggaggggtaaaggtcacgatgggttgtaccaaggattgagcacagccactaaagatacctatgatgcgctccacatgcaggccctgccgccaaga

SEQ ID NO: 24291 - DNA, 852 bp, synthetic construct
  source 1..852: mol_type = other DNA
cctgaggtggccgtgttcgagcctagcgaggccgagatcagccacacccagaaagccaccctcgtgtgcctggctaccggcttctaccccgaccatgtggaactgtcttggtgggtcaacggcaaagaggtgcacagcggcgtgtgtaccgacccccagccactgaaagaacagcccgccctgaacgacagccggtactgcctgagcagcagactgagagtgtccgccaccttctggcagaacccccggaaccacttcagatgccaggtgcagttctacggcctgagcgagaacgacgagtggacccaggacagagccaagcccgtgacccagatcgtgtctgccgaagcctggggcagagccgattgcggctttaccagcgagagctaccagcagggcgtgctgagcgccaccatcctgtacgagatcctgctgggcaaggccaccctgtacgccgtgctggtgtctgccctggtgctgatggctatggtcaagcggaaggacagccggggacgggttaagttttccagatccgcagacgcacccgcttaccaacaagggcagaaccaactctacaatgaacttaatttggggcggagggaagagtacgacgttctggacaaaaggaggggacgagatcccgagatgggcggaaagcctcagcgaaggaagaatccgcaagaggggctttataacgaactccagaaagataaaatggcagaagcctatagtgagattgggatgaagggagaaaggaggaggggtaaaggtcacgatgggttgtaccaaggattgagcacagccactaaagatacctatgatgcgctccacatgcaggccctgccgccaaga

SEQ ID NO: 24292 - DNA, 849 bp, synthetic construct
  source 1..849: mol_type = other DNA
gaggtggccgtgttcgagcctagcgaggccgagatcagccacacccagaaagccaccctcgtgtgcctggctaccggcttctaccccgaccatgtggaactgtcttggtgggtcaacggcaaagaggtgcacagcggcgtgtgtaccgacccccagccactgaaagaacagcccgccctgaacgacagccggtactgcctgagcagcagactgagagtgtccgccaccttctggcagaacccccggaaccacttcagatgccaggtgcagttctacggcctgagcgagaacgacgagtggacccaggacagagccaagcccgtgacccagatcgtgtctgccgaagcctggggcagagccgattgcggctttaccagcgagagctaccagcagggcgtgctgagcgccaccatcctgtacgagatcctgctgggcaaggccaccctgtacgccgtgctggtgtctgccctggtgctgatggctatggtcaagcggaaggacagccggggacgggttaagttttccagatccgcagacgcacccgcttaccaacaagggcagaaccaactctacaatgaacttaatttggggcggagggaagagtacgacgttctggacaaaaggaggggacgagatcccgagatgggcggaaagcctcagcgaaggaagaatccgcaagaggggctttataacgaactccagaaagataaaatggcagaagcctatagtgagattgggatgaagggagaaaggaggaggggtaaaggtcacgatgggttgtaccaaggattgagcacagccactaaagatacctatgatgcgctccacatgcaggccctgccgccaaga

SEQ ID NO: 24293 - DNA, 846 bp, synthetic construct
  source 1..846: mol_type = other DNA
gtggccgtgttcgagcctagcgaggccgagatcagccacacccagaaagccaccctcgtgtgcctggctaccggcttctaccccgaccatgtggaactgtcttggtgggtcaacggcaaagaggtgcacagcggcgtgtgtaccgacccccagccactgaaagaacagcccgccctgaacgacagccggtactgcctgagcagcagactgagagtgtccgccaccttctggcagaacccccggaaccacttcagatgccaggtgcagttctacggcctgagcgagaacgacgagtggacccaggacagagccaagcccgtgacccagatcgtgtctgccgaagcctggggcagagccgattgcggctttaccagcgagagctaccagcagggcgtgctgagcgccaccatcctgtacgagatcctgctgggcaaggccaccctgtacgccgtgctggtgtctgccctggtgctgatggctatggtcaagcggaaggacagccggggacgggttaagttttccagatccgcagacgcacccgcttaccaacaagggcagaaccaactctacaatgaacttaatttggggcggagggaagagtacgacgttctggacaaaaggaggggacgagatcccgagatgggcggaaagcctcagcgaaggaagaatccgcaagaggggctttataacgaactccagaaagataaaatggcagaagcctatagtgagattgggatgaagggagaaaggaggaggggtaaaggtcacgatgggttgtaccaaggattgagcacagccactaaagatacctatgatgcgctccacatgcaggccctgccgccaaga

SEQ ID NO: 24294 - DNA, 843 bp, synthetic construct
  source 1..843: mol_type = other DNA
gccgtgttcgagcctagcgaggccgagatcagccacacccagaaagccaccctcgtgtgcctggctaccggcttctaccccgaccatgtggaactgtcttggtgggtcaacggcaaagaggtgcacagcggcgtgtgtaccgacccccagccactgaaagaacagcccgccctgaacgacagccggtactgcctgagcagcagactgagagtgtccgccaccttctggcagaacccccggaaccacttcagatgccaggtgcagttctacggcctgagcgagaacgacgagtggacccaggacagagccaagcccgtgacccagatcgtgtctgccgaagcctggggcagagccgattgcggctttaccagcgagagctaccagcagggcgtgctgagcgccaccatcctgtacgagatcctgctgggcaaggccaccctgtacgccgtgctggtgtctgccctggtgctgatggctatggtcaagcggaaggacagccggggacgggttaagttttccagatccgcagacgcacccgcttaccaacaagggcagaaccaactctacaatgaacttaatttggggcggagggaagagtacgacgttctggacaaaaggaggggacgagatcccgagatgggcggaaagcctcagcgaaggaagaatccgcaagaggggctttataacgaactccagaaagataaaatggcagaagcctatagtgagattgggatgaagggagaaaggaggaggggtaaaggtcacgatgggttgtaccaaggattgagcacagccactaaagatacctatgatgcgctccacatgcaggccctgccgccaaga

SEQ ID NO: 24295 - DNA, 840 bp, synthetic construct
  source 1..840: mol_type = other DNA
gtgttcgagcctagcgaggccgagatcagccacacccagaaagccaccctcgtgtgcctggctaccggcttctaccccgaccatgtggaactgtcttggtgggtcaacggcaaagaggtgcacagcggcgtgtgtaccgacccccagccactgaaagaacagcccgccctgaacgacagccggtactgcctgagcagcagactgagagtgtccgccaccttctggcagaacccccggaaccacttcagatgccaggtgcagttctacggcctgagcgagaacgacgagtggacccaggacagagccaagcccgtgacccagatcgtgtctgccgaagcctggggcagagccgattgcggctttaccagcgagagctaccagcagggcgtgctgagcgccaccatcctgtacgagatcctgctgggcaaggccaccctgtacgccgtgctggtgtctgccctggtgctgatggctatggtcaagcggaaggacagccggggacgggttaagttttccagatccgcagacgcacccgcttaccaacaagggcagaaccaactctacaatgaacttaatttggggcggagggaagagtacgacgttctggacaaaaggaggggacgagatcccgagatgggcggaaagcctcagcgaaggaagaatccgcaagaggggctttataacgaactccagaaagataaaatggcagaagcctatagtgagattgggatgaagggagaaaggaggaggggtaaaggtcacgatgggttgtaccaaggattgagcacagccactaaagatacctatgatgcgctccacatgcaggccctgccgccaaga

SEQ ID NO: 24296 - DNA, 837 bp, synthetic construct
  source 1..837: mol_type = other DNA
ttcgagcctagcgaggccgagatcagccacacccagaaagccaccctcgtgtgcctggctaccggcttctaccccgaccatgtggaactgtcttggtgggtcaacggcaaagaggtgcacagcggcgtgtgtaccgacccccagccactgaaagaacagcccgccctgaacgacagccggtactgcctgagcagcagactgagagtgtccgccaccttctggcagaacccccggaaccacttcagatgccaggtgcagttctacggcctgagcgagaacgacgagtggacccaggacagagccaagcccgtgacccagatcgtgtctgccgaagcctggggcagagccgattgcggctttaccagcgagagctaccagcagggcgtgctgagcgccaccatcctgtacgagatcctgctgggcaaggccaccctgtacgccgtgctggtgtctgccctggtgctgatggctatggtcaagcggaaggacagccggggacgggttaagttttccagatccgcagacgcacccgcttaccaacaagggcagaaccaactctacaatgaacttaatttggggcggagggaagagtacgacgttctggacaaaaggaggggacgagatcccgagatgggcggaaagcctcagcgaaggaagaatccgcaagaggggctttataacgaactccagaaagataaaatggcagaagcctatagtgagattgggatgaagggagaaaggaggaggggtaaaggtcacgatgggttgtaccaaggattgagcacagccactaaagatacctatgatgcgctccacatgcaggccctgccgccaaga

SEQ ID NO: 24297 - DNA, 834 bp, synthetic construct
  source 1..834: mol_type = other DNA
gagcctagcgaggccgagatcagccacacccagaaagccaccctcgtgtgcctggctaccggcttctaccccgaccatgtggaactgtcttggtgggtcaacggcaaagaggtgcacagcggcgtgtgtaccgacccccagccactgaaagaacagcccgccctgaacgacagccggtactgcctgagcagcagactgagagtgtccgccaccttctggcagaacccccggaaccacttcagatgccaggtgcagttctacggcctgagcgagaacgacgagtggacccaggacagagccaagcccgtgacccagatcgtgtctgccgaagcctggggcagagccgattgcggctttaccagcgagagctaccagcagggcgtgctgagcgccaccatcctgtacgagatcctgctgggcaaggccaccctgtacgccgtgctggtgtctgccctggtgctgatggctatggtcaagcggaaggacagccggggacgggttaagttttccagatccgcagacgcacccgcttaccaacaagggcagaaccaactctacaatgaacttaatttggggcggagggaagagtacgacgttctggacaaaaggaggggacgagatcccgagatgggcggaaagcctcagcgaaggaagaatccgcaagaggggctttataacgaactccagaaagataaaatggcagaagcctatagtgagattgggatgaagggagaaaggaggaggggtaaaggtcacgatgggttgtaccaaggattgagcacagccactaaagatacctatgatgcgctccacatgcaggccctgccgccaaga

SEQ ID NO: 24298 - DNA, 831 bp, synthetic construct
  source 1..831: mol_type = other DNA
cctagcgaggccgagatcagccacacccagaaagccaccctcgtgtgcctggctaccggcttctaccccgaccatgtggaactgtcttggtgggtcaacggcaaagaggtgcacagcggcgtgtgtaccgacccccagccactgaaagaacagcccgccctgaacgacagccggtactgcctgagcagcagactgagagtgtccgccaccttctggcagaacccccggaaccacttcagatgccaggtgcagttctacggcctgagcgagaacgacgagtggacccaggacagagccaagcccgtgacccagatcgtgtctgccgaagcctggggcagagccgattgcggctttaccagcgagagctaccagcagggcgtgctgagcgccaccatcctgtacgagatcctgctgggcaaggccaccctgtacgccgtgctggtgtctgccctggtgctgatggctatggtcaagcggaaggacagccggggacgggttaagttttccagatccgcagacgcacccgcttaccaacaagggcagaaccaactctacaatgaacttaatttggggcggagggaagagtacgacgttctggacaaaaggaggggacgagatcccgagatgggcggaaagcctcagcgaaggaagaatccgcaagaggggctttataacgaactccagaaagataaaatggcagaagcctatagtgagattgggatgaagggagaaaggaggaggggtaaaggtcacgatgggttgtaccaaggattgagcacagccactaaagatacctatgatgcgctccacatgcaggccctgccgccaaga

SEQ ID NO: 24299 - DNA, 828 bp, synthetic construct
  source 1..828: mol_type = other DNA
agcgaggccgagatcagccacacccagaaagccaccctcgtgtgcctggctaccggcttctaccccgaccatgtggaactgtcttggtgggtcaacggcaaagaggtgcacagcggcgtgtgtaccgacccccagccactgaaagaacagcccgccctgaacgacagccggtactgcctgagcagcagactgagagtgtccgccaccttctggcagaacccccggaaccacttcagatgccaggtgcagttctacggcctgagcgagaacgacgagtggacccaggacagagccaagcccgtgacccagatcgtgtctgccgaagcctggggcagagccgattgcggctttaccagcgagagctaccagcagggcgtgctgagcgccaccatcctgtacgagatcctgctgggcaaggccaccctgtacgccgtgctggtgtctgccctggtgctgatggctatggtcaagcggaaggacagccggggacgggttaagttttccagatccgcagacgcacccgcttaccaacaagggcagaaccaactctacaatgaacttaatttggggcggagggaagagtacgacgttctggacaaaaggaggggacgagatcccgagatgggcggaaagcctcagcgaaggaagaatccgcaagaggggctttataacgaactccagaaagataaaatggcagaagcctatagtgagattgggatgaagggagaaaggaggaggggtaaaggtcacgatgggttgtaccaaggattgagcacagccactaaagatacctatgatgcgctccacatgcaggccctgccgccaaga

SEQ ID NO: 24300 - DNA, 825 bp, synthetic construct
  source 1..825: mol_type = other DNA
gaggccgagatcagccacacccagaaagccaccctcgtgtgcctggctaccggcttctaccccgaccatgtggaactgtcttggtgggtcaacggcaaagaggtgcacagcggcgtgtgtaccgacccccagccactgaaagaacagcccgccctgaacgacagccggtactgcctgagcagcagactgagagtgtccgccaccttctggcagaacccccggaaccacttcagatgccaggtgcagttctacggcctgagcgagaacgacgagtggacccaggacagagccaagcccgtgacccagatcgtgtctgccgaagcctggggcagagccgattgcggctttaccagcgagagctaccagcagggcgtgctgagcgccaccatcctgtacgagatcctgctgggcaaggccaccctgtacgccgtgctggtgtctgccctggtgctgatggctatggtcaagcggaaggacagccggggacgggttaagttttccagatccgcagacgcacccgcttaccaacaagggcagaaccaactctacaatgaacttaatttggggcggagggaagagtacgacgttctggacaaaaggaggggacgagatcccgagatgggcggaaagcctcagcgaaggaagaatccgcaagaggggctttataacgaactccagaaagataaaatggcagaagcctatagtgagattgggatgaagggagaaaggaggaggggtaaaggtcacgatgggttgtaccaaggattgagcacagccactaaagatacctatgatgcgctccacatgcaggccctgccgccaaga

SEQ ID NO: 24301 - DNA, 822 bp, synthetic construct
  source 1..822: mol_type = other DNA
gccgagatcagccacacccagaaagccaccctcgtgtgcctggctaccggcttctaccccgaccatgtggaactgtcttggtgggtcaacggcaaagaggtgcacagcggcgtgtgtaccgacccccagccactgaaagaacagcccgccctgaacgacagccggtactgcctgagcagcagactgagagtgtccgccaccttctggcagaacccccggaaccacttcagatgccaggtgcagttctacggcctgagcgagaacgacgagtggacccaggacagagccaagcccgtgacccagatcgtgtctgccgaagcctggggcagagccgattgcggctttaccagcgagagctaccagcagggcgtgctgagcgccaccatcctgtacgagatcctgctgggcaaggccaccctgtacgccgtgctggtgtctgccctggtgctgatggctatggtcaagcggaaggacagccggggacgggttaagttttccagatccgcagacgcacccgcttaccaacaagggcagaaccaactctacaatgaacttaatttggggcggagggaagagtacgacgttctggacaaaaggaggggacgagatcccgagatgggcggaaagcctcagcgaaggaagaatccgcaagaggggctttataacgaactccagaaagataaaatggcagaagcctatagtgagattgggatgaagggagaaaggaggaggggtaaaggtcacgatgggttgtaccaaggattgagcacagccactaaagatacctatgatgcgctccacatgcaggccctgccgccaaga

SEQ ID NO: 24302 - DNA, 819 bp, synthetic construct
  source 1..819: mol_type = other DNA
gagatcagccacacccagaaagccaccctcgtgtgcctggctaccggcttctaccccgaccatgtggaactgtcttggtgggtcaacggcaaagaggtgcacagcggcgtgtgtaccgacccccagccactgaaagaacagcccgccctgaacgacagccggtactgcctgagcagcagactgagagtgtccgccaccttctggcagaacccccggaaccacttcagatgccaggtgcagttctacggcctgagcgagaacgacgagtggacccaggacagagccaagcccgtgacccagatcgtgtctgccgaagcctggggcagagccgattgcggctttaccagcgagagctaccagcagggcgtgctgagcgccaccatcctgtacgagatcctgctgggcaaggccaccctgtacgccgtgctggtgtctgccctggtgctgatggctatggtcaagcggaaggacagccggggacgggttaagttttccagatccgcagacgcacccgcttaccaacaagggcagaaccaactctacaatgaacttaatttggggcggagggaagagtacgacgttctggacaaaaggaggggacgagatcccgagatgggcggaaagcctcagcgaaggaagaatccgcaagaggggctttataacgaactccagaaagataaaatggcagaagcctatagtgagattgggatgaagggagaaaggaggaggggtaaaggtcacgatgggttgtaccaaggattgagcacagccactaaagatacctatgatgcgctccacatgcaggccctgccgccaaga

SEQ ID NO: 24303 - DNA, 816 bp, synthetic construct
  source 1..816: mol_type = other DNA
atcagccacacccagaaagccaccctcgtgtgcctggctaccggcttctaccccgaccatgtggaactgtcttggtgggtcaacggcaaagaggtgcacagcggcgtgtgtaccgacccccagccactgaaagaacagcccgccctgaacgacagccggtactgcctgagcagcagactgagagtgtccgccaccttctggcagaacccccggaaccacttcagatgccaggtgcagttctacggcctgagcgagaacgacgagtggacccaggacagagccaagcccgtgacccagatcgtgtctgccgaagcctggggcagagccgattgcggctttaccagcgagagctaccagcagggcgtgctgagcgccaccatcctgtacgagatcctgctgggcaaggccaccctgtacgccgtgctggtgtctgccctggtgctgatggctatggtcaagcggaaggacagccggggacgggttaagttttccagatccgcagacgcacccgcttaccaacaagggcagaaccaactctacaatgaacttaatttggggcggagggaagagtacgacgttctggacaaaaggaggggacgagatcccgagatgggcggaaagcctcagcgaaggaagaatccgcaagaggggctttataacgaactccagaaagataaaatggcagaagcctatagtgagattgggatgaagggagaaaggaggaggggtaaaggtcacgatgggttgtaccaaggattgagcacagccactaaagatacctatgatgcgctccacatgcaggccctgccgccaaga

SEQ ID NO: 24304 - DNA, 813 bp, synthetic construct
  source 1..813: mol_type = other DNA
agccacacccagaaagccaccctcgtgtgcctggctaccggcttctaccccgaccatgtggaactgtcttggtgggtcaacggcaaagaggtgcacagcggcgtgtgtaccgacccccagccactgaaagaacagcccgccctgaacgacagccggtactgcctgagcagcagactgagagtgtccgccaccttctggcagaacccccggaaccacttcagatgccaggtgcagttctacggcctgagcgagaacgacgagtggacccaggacagagccaagcccgtgacccagatcgtgtctgccgaagcctggggcagagccgattgcggctttaccagcgagagctaccagcagggcgtgctgagcgccaccatcctgtacgagatcctgctgggcaaggccaccctgtacgccgtgctggtgtctgccctggtgctgatggctatggtcaagcggaaggacagccggggacgggttaagttttccagatccgcagacgcacccgcttaccaacaagggcagaaccaactctacaatgaacttaatttggggcggagggaagagtacgacgttctggacaaaaggaggggacgagatcccgagatgggcggaaagcctcagcgaaggaagaatccgcaagaggggctttataacgaactccagaaagataaaatggcagaagcctatagtgagattgggatgaagggagaaaggaggaggggtaaaggtcacgatgggttgtaccaaggattgagcacagccactaaagatacctatgatgcgctccacatgcaggccctgccgccaaga

SEQ ID NO: 24305 - DNA, 810 bp, synthetic construct
  source 1..810: mol_type = other DNA
cacacccagaaagccaccctcgtgtgcctggctaccggcttctaccccgaccatgtggaactgtcttggtgggtcaacggcaaagaggtgcacagcggcgtgtgtaccgacccccagccactgaaagaacagcccgccctgaacgacagccggtactgcctgagcagcagactgagagtgtccgccaccttctggcagaacccccggaaccacttcagatgccaggtgcagttctacggcctgagcgagaacgacgagtggacccaggacagagccaagcccgtgacccagatcgtgtctgccgaagcctggggcagagccgattgcggctttaccagcgagagctaccagcagggcgtgctgagcgccaccatcctgtacgagatcctgctgggcaaggccaccctgtacgccgtgctggtgtctgccctggtgctgatggctatggtcaagcggaaggacagccggggacgggttaagttttccagatccgcagacgcacccgcttaccaacaagggcagaaccaactctacaatgaacttaatttggggcggagggaagagtacgacgttctggacaaaaggaggggacgagatcccgagatgggcggaaagcctcagcgaaggaagaatccgcaagaggggctttataacgaactccagaaagataaaatggcagaagcctatagtgagattgggatgaagggagaaaggaggaggggtaaaggtcacgatgggttgtaccaaggattgagcacagccactaaagatacctatgatgcgctccacatgcaggccctgccgccaaga

SEQ ID NO: 24306 - DNA, 807 bp, synthetic construct
  source 1..807: mol_type = other DNA
acccagaaagccaccctcgtgtgcctggctaccggcttctaccccgaccatgtggaactgtcttggtgggtcaacggcaaagaggtgcacagcggcgtgtgtaccgacccccagccactgaaagaacagcccgccctgaacgacagccggtactgcctgagcagcagactgagagtgtccgccaccttctggcagaacccccggaaccacttcagatgccaggtgcagttctacggcctgagcgagaacgacgagtggacccaggacagagccaagcccgtgacccagatcgtgtctgccgaagcctggggcagagccgattgcggctttaccagcgagagctaccagcagggcgtgctgagcgccaccatcctgtacgagatcctgctgggcaaggccaccctgtacgccgtgctggtgtctgccctggtgctgatggctatggtcaagcggaaggacagccggggacgggttaagttttccagatccgcagacgcacccgcttaccaacaagggcagaaccaactctacaatgaacttaatttggggcggagggaagagtacgacgttctggacaaaaggaggggacgagatcccgagatgggcggaaagcctcagcgaaggaagaatccgcaagaggggctttataacgaactccagaaagataaaatggcagaagcctatagtgagattgggatgaagggagaaaggaggaggggtaaaggtcacgatgggttgtaccaaggattgagcacagccactaaagatacctatgatgcgctccacatgcaggccctgccgccaaga

SEQ ID NO: 24307 - DNA, 804 bp, synthetic construct
  source 1..804: mol_type = other DNA
cagaaagccaccctcgtgtgcctggctaccggcttctaccccgaccatgtggaactgtcttggtgggtcaacggcaaagaggtgcacagcggcgtgtgtaccgacccccagccactgaaagaacagcccgccctgaacgacagccggtactgcctgagcagcagactgagagtgtccgccaccttctggcagaacccccggaaccacttcagatgccaggtgcagttctacggcctgagcgagaacgacgagtggacccaggacagagccaagcccgtgacccagatcgtgtctgccgaagcctggggcagagccgattgcggctttaccagcgagagctaccagcagggcgtgctgagcgccaccatcctgtacgagatcctgctgggcaaggccaccctgtacgccgtgctggtgtctgccctggtgctgatggctatggtcaagcggaaggacagccggggacgggttaagttttccagatccgcagacgcacccgcttaccaacaagggcagaaccaactctacaatgaacttaatttggggcggagggaagagtacgacgttctggacaaaaggaggggacgagatcccgagatgggcggaaagcctcagcgaaggaagaatccgcaagaggggctttataacgaactccagaaagataaaatggcagaagcctatagtgagattgggatgaagggagaaaggaggaggggtaaaggtcacgatgggttgtaccaaggattgagcacagccactaaagatacctatgatgcgctccacatgcaggccctgccgccaaga

SEQ ID NO: 24308 - DNA, 801 bp, synthetic construct
  source 1..801: mol_type = other DNA
aaagccaccctcgtgtgcctggctaccggcttctaccccgaccatgtggaactgtcttggtgggtcaacggcaaagaggtgcacagcggcgtgtgtaccgacccccagccactgaaagaacagcccgccctgaacgacagccggtactgcctgagcagcagactgagagtgtccgccaccttctggcagaacccccggaaccacttcagatgccaggtgcagttctacggcctgagcgagaacgacgagtggacccaggacagagccaagcccgtgacccagatcgtgtctgccgaagcctggggcagagccgattgcggctttaccagcgagagctaccagcagggcgtgctgagcgccaccatcctgtacgagatcctgctgggcaaggccaccctgtacgccgtgctggtgtctgccctggtgctgatggctatggtcaagcggaaggacagccggggacgggttaagttttccagatccgcagacgcacccgcttaccaacaagggcagaaccaactctacaatgaacttaatttggggcggagggaagagtacgacgttctggacaaaaggaggggacgagatcccgagatgggcggaaagcctcagcgaaggaagaatccgcaagaggggctttataacgaactccagaaagataaaatggcagaagcctatagtgagattgggatgaagggagaaaggaggaggggtaaaggtcacgatgggttgtaccaaggattgagcacagccactaaagatacctatgatgcgctccacatgcaggccctgccgccaaga

SEQ ID NO: 24309 - DNA, 798 bp, synthetic construct
  source 1..798: mol_type = other DNA
gccaccctcgtgtgcctggctaccggcttctaccccgaccatgtggaactgtcttggtgggtcaacggcaaagaggtgcacagcggcgtgtgtaccgacccccagccactgaaagaacagcccgccctgaacgacagccggtactgcctgagcagcagactgagagtgtccgccaccttctggcagaacccccggaaccacttcagatgccaggtgcagttctacggcctgagcgagaacgacgagtggacccaggacagagccaagcccgtgacccagatcgtgtctgccgaagcctggggcagagccgattgcggctttaccagcgagagctaccagcagggcgtgctgagcgccaccatcctgtacgagatcctgctgggcaaggccaccctgtacgccgtgctggtgtctgccctggtgctgatggctatggtcaagcggaaggacagccggggacgggttaagttttccagatccgcagacgcacccgcttaccaacaagggcagaaccaactctacaatgaacttaatttggggcggagggaagagtacgacgttctggacaaaaggaggggacgagatcccgagatgggcggaaagcctcagcgaaggaagaatccgcaagaggggctttataacgaactccagaaagataaaatggcagaagcctatagtgagattgggatgaagggagaaaggaggaggggtaaaggtcacgatgggttgtaccaaggattgagcacagccactaaagatacctatgatgcgctccacatgcaggccctgccgccaaga

SEQ ID NO: 24310 - DNA, 795 bp, synthetic construct
  source 1..795: mol_type = other DNA
accctcgtgtgcctggctaccggcttctaccccgaccatgtggaactgtcttggtgggtcaacggcaaagaggtgcacagcggcgtgtgtaccgacccccagccactgaaagaacagcccgccctgaacgacagccggtactgcctgagcagcagactgagagtgtccgccaccttctggcagaacccccggaaccacttcagatgccaggtgcagttctacggcctgagcgagaacgacgagtggacccaggacagagccaagcccgtgacccagatcgtgtctgccgaagcctggggcagagccgattgcggctttaccagcgagagctaccagcagggcgtgctgagcgccaccatcctgtacgagatcctgctgggcaaggccaccctgtacgccgtgctggtgtctgccctggtgctgatggctatggtcaagcggaaggacagccggggacgggttaagttttccagatccgcagacgcacccgcttaccaacaagggcagaaccaactctacaatgaacttaatttggggcggagggaagagtacgacgttctggacaaaaggaggggacgagatcccgagatgggcggaaagcctcagcgaaggaagaatccgcaagaggggctttataacgaactccagaaagataaaatggcagaagcctatagtgagattgggatgaagggagaaaggaggaggggtaaaggtcacgatgggttgtaccaaggattgagcacagccactaaagatacctatgatgcgctccacatgcaggccctgccgccaaga

SEQ ID NO: 24311 - DNA, 792 bp, synthetic construct
  source 1..792: mol_type = other DNA
ctcgtgtgcctggctaccggcttctaccccgaccatgtggaactgtcttggtgggtcaacggcaaagaggtgcacagcggcgtgtgtaccgacccccagccactgaaagaacagcccgccctgaacgacagccggtactgcctgagcagcagactgagagtgtccgccaccttctggcagaacccccggaaccacttcagatgccaggtgcagttctacggcctgagcgagaacgacgagtggacccaggacagagccaagcccgtgacccagatcgtgtctgccgaagcctggggcagagccgattgcggctttaccagcgagagctaccagcagggcgtgctgagcgccaccatcctgtacgagatcctgctgggcaaggccaccctgtacgccgtgctggtgtctgccctggtgctgatggctatggtcaagcggaaggacagccggggacgggttaagttttccagatccgcagacgcacccgcttaccaacaagggcagaaccaactctacaatgaacttaatttggggcggagggaagagtacgacgttctggacaaaaggaggggacgagatcccgagatgggcggaaagcctcagcgaaggaagaatccgcaagaggggctttataacgaactccagaaagataaaatggcagaagcctatagtgagattgggatgaagggagaaaggaggaggggtaaaggtcacgatgggttgtaccaaggattgagcacagccactaaagatacctatgatgcgctccacatgcaggccctgccgccaaga

SEQ ID NO: 24312 - DNA, 789 bp, synthetic construct
  source 1..789: mol_type = other DNA
gtgtgcctggctaccggcttctaccccgaccatgtggaactgtcttggtgggtcaacggcaaagaggtgcacagcggcgtgtgtaccgacccccagccactgaaagaacagcccgccctgaacgacagccggtactgcctgagcagcagactgagagtgtccgccaccttctggcagaacccccggaaccacttcagatgccaggtgcagttctacggcctgagcgagaacgacgagtggacccaggacagagccaagcccgtgacccagatcgtgtctgccgaagcctggggcagagccgattgcggctttaccagcgagagctaccagcagggcgtgctgagcgccaccatcctgtacgagatcctgctgggcaaggccaccctgtacgccgtgctggtgtctgccctggtgctgatggctatggtcaagcggaaggacagccggggacgggttaagttttccagatccgcagacgcacccgcttaccaacaagggcagaaccaactctacaatgaacttaatttggggcggagggaagagtacgacgttctggacaaaaggaggggacgagatcccgagatgggcggaaagcctcagcgaaggaagaatccgcaagaggggctttataacgaactccagaaagataaaatggcagaagcctatagtgagattgggatgaagggagaaaggaggaggggtaaaggtcacgatgggttgtaccaaggattgagcacagccactaaagatacctatgatgcgctccacatgcaggccctgccgccaaga

SEQ ID NO: 24313 - DNA, 786 bp, synthetic construct
  source 1..786: mol_type = other DNA
tgcctggctaccggcttctaccccgaccatgtggaactgtcttggtgggtcaacggcaaagaggtgcacagcggcgtgtgtaccgacccccagccactgaaagaacagcccgccctgaacgacagccggtactgcctgagcagcagactgagagtgtccgccaccttctggcagaacccccggaaccacttcagatgccaggtgcagttctacggcctgagcgagaacgacgagtggacccaggacagagccaagcccgtgacccagatcgtgtctgccgaagcctggggcagagccgattgcggctttaccagcgagagctaccagcagggcgtgctgagcgccaccatcctgtacgagatcctgctgggcaaggccaccctgtacgccgtgctggtgtctgccctggtgctgatggctatggtcaagcggaaggacagccggggacgggttaagttttccagatccgcagacgcacccgcttaccaacaagggcagaaccaactctacaatgaacttaatttggggcggagggaagagtacgacgttctggacaaaaggaggggacgagatcccgagatgggcggaaagcctcagcgaaggaagaatccgcaagaggggctttataacgaactccagaaagataaaatggcagaagcctatagtgagattgggatgaagggagaaaggaggaggggtaaaggtcacgatgggttgtaccaaggattgagcacagccactaaagatacctatgatgcgctccacatgcaggccctgccgccaaga

SEQ ID NO: 24314 - DNA, 783 bp, synthetic construct
  source 1..783: mol_type = other DNA
ctggctaccggcttctaccccgaccatgtggaactgtcttggtgggtcaacggcaaagaggtgcacagcggcgtgtgtaccgacccccagccactgaaagaacagcccgccctgaacgacagccggtactgcctgagcagcagactgagagtgtccgccaccttctggcagaacccccggaaccacttcagatgccaggtgcagttctacggcctgagcgagaacgacgagtggacccaggacagagccaagcccgtgacccagatcgtgtctgccgaagcctggggcagagccgattgcggctttaccagcgagagctaccagcagggcgtgctgagcgccaccatcctgtacgagatcctgctgggcaaggccaccctgtacgccgtgctggtgtctgccctggtgctgatggctatggtcaagcggaaggacagccggggacgggttaagttttccagatccgcagacgcacccgcttaccaacaagggcagaaccaactctacaatgaacttaatttggggcggagggaagagtacgacgttctggacaaaaggaggggacgagatcccgagatgggcggaaagcctcagcgaaggaagaatccgcaagaggggctttataacgaactccagaaagataaaatggcagaagcctatagtgagattgggatgaagggagaaaggaggaggggtaaaggtcacgatgggttgtaccaaggattgagcacagccactaaagatacctatgatgcgctccacatgcaggccctgccgccaaga

SEQ ID NO: 24315 - DNA, 780 bp, synthetic construct
  source 1..780: mol_type = other DNA
gctaccggcttctaccccgaccatgtggaactgtcttggtgggtcaacggcaaagaggtgcacagcggcgtgtgtaccgacccccagccactgaaagaacagcccgccctgaacgacagccggtactgcctgagcagcagactgagagtgtccgccaccttctggcagaacccccggaaccacttcagatgccaggtgcagttctacggcctgagcgagaacgacgagtggacccaggacagagccaagcccgtgacccagatcgtgtctgccgaagcctggggcagagccgattgcggctttaccagcgagagctaccagcagggcgtgctgagcgccaccatcctgtacgagatcctgctgggcaaggccaccctgtacgccgtgctggtgtctgccctggtgctgatggctatggtcaagcggaaggacagccggggacgggttaagttttccagatccgcagacgcacccgcttaccaacaagggcagaaccaactctacaatgaacttaatttggggcggagggaagagtacgacgttctggacaaaaggaggggacgagatcccgagatgggcggaaagcctcagcgaaggaagaatccgcaagaggggctttataacgaactccagaaagataaaatggcagaagcctatagtgagattgggatgaagggagaaaggaggaggggtaaaggtcacgatgggttgtaccaaggattgagcacagccactaaagatacctatgatgcgctccacatgcaggccctgccgccaaga

SEQ ID NO: 24316 - DNA, 777 bp, synthetic construct
  source 1..777: mol_type = other DNA
accggcttctaccccgaccatgtggaactgtcttggtgggtcaacggcaaagaggtgcacagcggcgtgtgtaccgacccccagccactgaaagaacagcccgccctgaacgacagccggtactgcctgagcagcagactgagagtgtccgccaccttctggcagaacccccggaaccacttcagatgccaggtgcagttctacggcctgagcgagaacgacgagtggacccaggacagagccaagcccgtgacccagatcgtgtctgccgaagcctggggcagagccgattgcggctttaccagcgagagctaccagcagggcgtgctgagcgccaccatcctgtacgagatcctgctgggcaaggccaccctgtacgccgtgctggtgtctgccctggtgctgatggctatggtcaagcggaaggacagccggggacgggttaagttttccagatccgcagacgcacccgcttaccaacaagggcagaaccaactctacaatgaacttaatttggggcggagggaagagtacgacgttctggacaaaaggaggggacgagatcccgagatgggcggaaagcctcagcgaaggaagaatccgcaagaggggctttataacgaactccagaaagataaaatggcagaagcctatagtgagattgggatgaagggagaaaggaggaggggtaaaggtcacgatgggttgtaccaaggattgagcacagccactaaagatacctatgatgcgctccacatgcaggccctgccgccaaga

SEQ ID NO: 24317 - DNA, 774 bp, synthetic construct
  source 1..774: mol_type = other DNA
ggcttctaccccgaccatgtggaactgtcttggtgggtcaacggcaaagaggtgcacagcggcgtgtgtaccgacccccagccactgaaagaacagcccgccctgaacgacagccggtactgcctgagcagcagactgagagtgtccgccaccttctggcagaacccccggaaccacttcagatgccaggtgcagttctacggcctgagcgagaacgacgagtggacccaggacagagccaagcccgtgacccagatcgtgtctgccgaagcctggggcagagccgattgcggctttaccagcgagagctaccagcagggcgtgctgagcgccaccatcctgtacgagatcctgctgggcaaggccaccctgtacgccgtgctggtgtctgccctggtgctgatggctatggtcaagcggaaggacagccggggacgggttaagttttccagatccgcagacgcacccgcttaccaacaagggcagaaccaactctacaatgaacttaatttggggcggagggaagagtacgacgttctggacaaaaggaggggacgagatcccgagatgggcggaaagcctcagcgaaggaagaatccgcaagaggggctttataacgaactccagaaagataaaatggcagaagcctatagtgagattgggatgaagggagaaaggaggaggggtaaaggtcacgatgggttgtaccaaggattgagcacagccactaaagatacctatgatgcgctccacatgcaggccctgccgccaaga

SEQ ID NO: 24318 - DNA, 771 bp, synthetic construct
  source 1..771: mol_type = other DNA
ttctaccccgaccatgtggaactgtcttggtgggtcaacggcaaagaggtgcacagcggcgtgtgtaccgacccccagccactgaaagaacagcccgccctgaacgacagccggtactgcctgagcagcagactgagagtgtccgccaccttctggcagaacccccggaaccacttcagatgccaggtgcagttctacggcctgagcgagaacgacgagtggacccaggacagagccaagcccgtgacccagatcgtgtctgccgaagcctggggcagagccgattgcggctttaccagcgagagctaccagcagggcgtgctgagcgccaccatcctgtacgagatcctgctgggcaaggccaccctgtacgccgtgctggtgtctgccctggtgctgatggctatggtcaagcggaaggacagccggggacgggttaagttttccagatccgcagacgcacccgcttaccaacaagggcagaaccaactctacaatgaacttaatttggggcggagggaagagtacgacgttctggacaaaaggaggggacgagatcccgagatgggcggaaagcctcagcgaaggaagaatccgcaagaggggctttataacgaactccagaaagataaaatggcagaagcctatagtgagattgggatgaagggagaaaggaggaggggtaaaggtcacgatgggttgtaccaaggattgagcacagccactaaagatacctatgatgcgctccacatgcaggccctgccgccaaga

SEQ ID NO: 24319 - DNA, 768 bp, synthetic construct
  source 1..768: mol_type = other DNA
taccccgaccatgtggaactgtcttggtgggtcaacggcaaagaggtgcacagcggcgtgtgtaccgacccccagccactgaaagaacagcccgccctgaacgacagccggtactgcctgagcagcagactgagagtgtccgccaccttctggcagaacccccggaaccacttcagatgccaggtgcagttctacggcctgagcgagaacgacgagtggacccaggacagagccaagcccgtgacccagatcgtgtctgccgaagcctggggcagagccgattgcggctttaccagcgagagctaccagcagggcgtgctgagcgccaccatcctgtacgagatcctgctgggcaaggccaccctgtacgccgtgctggtgtctgccctggtgctgatggctatggtcaagcggaaggacagccggggacgggttaagttttccagatccgcagacgcacccgcttaccaacaagggcagaaccaactctacaatgaacttaatttggggcggagggaagagtacgacgttctggacaaaaggaggggacgagatcccgagatgggcggaaagcctcagcgaaggaagaatccgcaagaggggctttataacgaactccagaaagataaaatggcagaagcctatagtgagattgggatgaagggagaaaggaggaggggtaaaggtcacgatgggttgtaccaaggattgagcacagccactaaagatacctatgatgcgctccacatgcaggccctgccgccaaga

SEQ ID NO: 24320 - DNA, 765 bp, synthetic construct
  source 1..765: mol_type = other DNA
cccgaccatgtggaactgtcttggtgggtcaacggcaaagaggtgcacagcggcgtgtgtaccgacccccagccactgaaagaacagcccgccctgaacgacagccggtactgcctgagcagcagactgagagtgtccgccaccttctggcagaacccccggaaccacttcagatgccaggtgcagttctacggcctgagcgagaacgacgagtggacccaggacagagccaagcccgtgacccagatcgtgtctgccgaagcctggggcagagccgattgcggctttaccagcgagagctaccagcagggcgtgctgagcgccaccatcctgtacgagatcctgctgggcaaggccaccctgtacgccgtgctggtgtctgccctggtgctgatggctatggtcaagcggaaggacagccggggacgggttaagttttccagatccgcagacgcacccgcttaccaacaagggcagaaccaactctacaatgaacttaatttggggcggagggaagagtacgacgttctggacaaaaggaggggacgagatcccgagatgggcggaaagcctcagcgaaggaagaatccgcaagaggggctttataacgaactccagaaagataaaatggcagaagcctatagtgagattgggatgaagggagaaaggaggaggggtaaaggtcacgatgggttgtaccaaggattgagcacagccactaaagatacctatgatgcgctccacatgcaggccctgccgccaaga

SEQ ID NO: 24321 - DNA, 762 bp, synthetic construct
  source 1..762: mol_type = other DNA
gaccatgtggaactgtcttggtgggtcaacggcaaagaggtgcacagcggcgtgtgtaccgacccccagccactgaaagaacagcccgccctgaacgacagccggtactgcctgagcagcagactgagagtgtccgccaccttctggcagaacccccggaaccacttcagatgccaggtgcagttctacggcctgagcgagaacgacgagtggacccaggacagagccaagcccgtgacccagatcgtgtctgccgaagcctggggcagagccgattgcggctttaccagcgagagctaccagcagggcgtgctgagcgccaccatcctgtacgagatcctgctgggcaaggccaccctgtacgccgtgctggtgtctgccctggtgctgatggctatggtcaagcggaaggacagccggggacgggttaagttttccagatccgcagacgcacccgcttaccaacaagggcagaaccaactctacaatgaacttaatttggggcggagggaagagtacgacgttctggacaaaaggaggggacgagatcccgagatgggcggaaagcctcagcgaaggaagaatccgcaagaggggctttataacgaactccagaaagataaaatggcagaagcctatagtgagattgggatgaagggagaaaggaggaggggtaaaggtcacgatgggttgtaccaaggattgagcacagccactaaagatacctatgatgcgctccacatgcaggccctgccgccaaga

SEQ ID NO: 24322 - DNA, 759 bp, synthetic construct
  source 1..759: mol_type = other DNA
catgtggaactgtcttggtgggtcaacggcaaagaggtgcacagcggcgtgtgtaccgacccccagccactgaaagaacagcccgccctgaacgacagccggtactgcctgagcagcagactgagagtgtccgccaccttctggcagaacccccggaaccacttcagatgccaggtgcagttctacggcctgagcgagaacgacgagtggacccaggacagagccaagcccgtgacccagatcgtgtctgccgaagcctggggcagagccgattgcggctttaccagcgagagctaccagcagggcgtgctgagcgccaccatcctgtacgagatcctgctgggcaaggccaccctgtacgccgtgctggtgtctgccctggtgctgatggctatggtcaagcggaaggacagccggggacgggttaagttttccagatccgcagacgcacccgcttaccaacaagggcagaaccaactctacaatgaacttaatttggggcggagggaagagtacgacgttctggacaaaaggaggggacgagatcccgagatgggcggaaagcctcagcgaaggaagaatccgcaagaggggctttataacgaactccagaaagataaaatggcagaagcctatagtgagattgggatgaagggagaaaggaggaggggtaaaggtcacgatgggttgtaccaaggattgagcacagccactaaagatacctatgatgcgctccacatgcaggccctgccgccaaga

SEQ ID NO: 24323 - DNA, 756 bp, synthetic construct
  source 1..756: mol_type = other DNA
gtggaactgtcttggtgggtcaacggcaaagaggtgcacagcggcgtgtgtaccgacccccagccactgaaagaacagcccgccctgaacgacagccggtactgcctgagcagcagactgagagtgtccgccaccttctggcagaacccccggaaccacttcagatgccaggtgcagttctacggcctgagcgagaacgacgagtggacccaggacagagccaagcccgtgacccagatcgtgtctgccgaagcctggggcagagccgattgcggctttaccagcgagagctaccagcagggcgtgctgagcgccaccatcctgtacgagatcctgctgggcaaggccaccctgtacgccgtgctggtgtctgccctggtgctgatggctatggtcaagcggaaggacagccggggacgggttaagttttccagatccgcagacgcacccgcttaccaacaagggcagaaccaactctacaatgaacttaatttggggcggagggaagagtacgacgttctggacaaaaggaggggacgagatcccgagatgggcggaaagcctcagcgaaggaagaatccgcaagaggggctttataacgaactccagaaagataaaatggcagaagcctatagtgagattgggatgaagggagaaaggaggaggggtaaaggtcacgatgggttgtaccaaggattgagcacagccactaaagatacctatgatgcgctccacatgcaggccctgccgccaaga

SEQ ID NO: 24324 - DNA, 753 bp, synthetic construct
  source 1..753: mol_type = other DNA
gaactgtcttggtgggtcaacggcaaagaggtgcacagcggcgtgtgtaccgacccccagccactgaaagaacagcccgccctgaacgacagccggtactgcctgagcagcagactgagagtgtccgccaccttctggcagaacccccggaaccacttcagatgccaggtgcagttctacggcctgagcgagaacgacgagtggacccaggacagagccaagcccgtgacccagatcgtgtctgccgaagcctggggcagagccgattgcggctttaccagcgagagctaccagcagggcgtgctgagcgccaccatcctgtacgagatcctgctgggcaaggccaccctgtacgccgtgctggtgtctgccctggtgctgatggctatggtcaagcggaaggacagccggggacgggttaagttttccagatccgcagacgcacccgcttaccaacaagggcagaaccaactctacaatgaacttaatttggggcggagggaagagtacgacgttctggacaaaaggaggggacgagatcccgagatgggcggaaagcctcagcgaaggaagaatccgcaagaggggctttataacgaactccagaaagataaaatggcagaagcctatagtgagattgggatgaagggagaaaggaggaggggtaaaggtcacgatgggttgtaccaaggattgagcacagccactaaagatacctatgatgcgctccacatgcaggccctgccgccaaga

SEQ ID NO: 24325 - DNA, 750 bp, synthetic construct
  source 1..750: mol_type = other DNA
ctgtcttggtgggtcaacggcaaagaggtgcacagcggcgtgtgtaccgacccccagccactgaaagaacagcccgccctgaacgacagccggtactgcctgagcagcagactgagagtgtccgccaccttctggcagaacccccggaaccacttcagatgccaggtgcagttctacggcctgagcgagaacgacgagtggacccaggacagagccaagcccgtgacccagatcgtgtctgccgaagcctggggcagagccgattgcggctttaccagcgagagctaccagcagggcgtgctgagcgccaccatcctgtacgagatcctgctgggcaaggccaccctgtacgccgtgctggtgtctgccctggtgctgatggctatggtcaagcggaaggacagccggggacgggttaagttttccagatccgcagacgcacccgcttaccaacaagggcagaaccaactctacaatgaacttaatttggggcggagggaagagtacgacgttctggacaaaaggaggggacgagatcccgagatgggcggaaagcctcagcgaaggaagaatccgcaagaggggctttataacgaactccagaaagataaaatggcagaagcctatagtgagattgggatgaagggagaaaggaggaggggtaaaggtcacgatgggttgtaccaaggattgagcacagccactaaagatacctatgatgcgctccacatgcaggccctgccgccaaga

SEQ ID NO: 24326 - DNA, 747 bp, synthetic construct
  source 1..747: mol_type = other DNA
tcttggtgggtcaacggcaaagaggtgcacagcggcgtgtgtaccgacccccagccactgaaagaacagcccgccctgaacgacagccggtactgcctgagcagcagactgagagtgtccgccaccttctggcagaacccccggaaccacttcagatgccaggtgcagttctacggcctgagcgagaacgacgagtggacccaggacagagccaagcccgtgacccagatcgtgtctgccgaagcctggggcagagccgattgcggctttaccagcgagagctaccagcagggcgtgctgagcgccaccatcctgtacgagatcctgctgggcaaggccaccctgtacgccgtgctggtgtctgccctggtgctgatggctatggtcaagcggaaggacagccggggacgggttaagttttccagatccgcagacgcacccgcttaccaacaagggcagaaccaactctacaatgaacttaatttggggcggagggaagagtacgacgttctggacaaaaggaggggacgagatcccgagatgggcggaaagcctcagcgaaggaagaatccgcaagaggggctttataacgaactccagaaagataaaatggcagaagcctatagtgagattgggatgaagggagaaaggaggaggggtaaaggtcacgatgggttgtaccaaggattgagcacagccactaaagatacctatgatgcgctccacatgcaggccctgccgccaaga

SEQ ID NO: 24327 - DNA, 744 bp, synthetic construct
  source 1..744: mol_type = other DNA
tggtgggtcaacggcaaagaggtgcacagcggcgtgtgtaccgacccccagccactgaaagaacagcccgccctgaacgacagccggtactgcctgagcagcagactgagagtgtccgccaccttctggcagaacccccggaaccacttcagatgccaggtgcagttctacggcctgagcgagaacgacgagtggacccaggacagagccaagcccgtgacccagatcgtgtctgccgaagcctggggcagagccgattgcggctttaccagcgagagctaccagcagggcgtgctgagcgccaccatcctgtacgagatcctgctgggcaaggccaccctgtacgccgtgctggtgtctgccctggtgctgatggctatggtcaagcggaaggacagccggggacgggttaagttttccagatccgcagacgcacccgcttaccaacaagggcagaaccaactctacaatgaacttaatttggggcggagggaagagtacgacgttctggacaaaaggaggggacgagatcccgagatgggcggaaagcctcagcgaaggaagaatccgcaagaggggctttataacgaactccagaaagataaaatggcagaagcctatagtgagattgggatgaagggagaaaggaggaggggtaaaggtcacgatgggttgtaccaaggattgagcacagccactaaagatacctatgatgcgctccacatgcaggccctgccgccaaga

SEQ ID NO: 24328 - DNA, 741 bp, synthetic construct
  source 1..741: mol_type = other DNA
tgggtcaacggcaaagaggtgcacagcggcgtgtgtaccgacccccagccactgaaagaacagcccgccctgaacgacagccggtactgcctgagcagcagactgagagtgtccgccaccttctggcagaacccccggaaccacttcagatgccaggtgcagttctacggcctgagcgagaacgacgagtggacccaggacagagccaagcccgtgacccagatcgtgtctgccgaagcctggggcagagccgattgcggctttaccagcgagagctaccagcagggcgtgctgagcgccaccatcctgtacgagatcctgctgggcaaggccaccctgtacgccgtgctggtgtctgccctggtgctgatggctatggtcaagcggaaggacagccggggacgggttaagttttccagatccgcagacgcacccgcttaccaacaagggcagaaccaactctacaatgaacttaatttggggcggagggaagagtacgacgttctggacaaaaggaggggacgagatcccgagatgggcggaaagcctcagcgaaggaagaatccgcaagaggggctttataacgaactccagaaagataaaatggcagaagcctatagtgagattgggatgaagggagaaaggaggaggggtaaaggtcacgatgggttgtaccaaggattgagcacagccactaaagatacctatgatgcgctccacatgcaggccctgccgccaaga

SEQ ID NO: 24329 - DNA, 738 bp, synthetic construct
  source 1..738: mol_type = other DNA
gtcaacggcaaagaggtgcacagcggcgtgtgtaccgacccccagccactgaaagaacagcccgccctgaacgacagccggtactgcctgagcagcagactgagagtgtccgccaccttctggcagaacccccggaaccacttcagatgccaggtgcagttctacggcctgagcgagaacgacgagtggacccaggacagagccaagcccgtgacccagatcgtgtctgccgaagcctggggcagagccgattgcggctttaccagcgagagctaccagcagggcgtgctgagcgccaccatcctgtacgagatcctgctgggcaaggccaccctgtacgccgtgctggtgtctgccctggtgctgatggctatggtcaagcggaaggacagccggggacgggttaagttttccagatccgcagacgcacccgcttaccaacaagggcagaaccaactctacaatgaacttaatttggggcggagggaagagtacgacgttctggacaaaaggaggggacgagatcccgagatgggcggaaagcctcagcgaaggaagaatccgcaagaggggctttataacgaactccagaaagataaaatggcagaagcctatagtgagattgggatgaagggagaaaggaggaggggtaaaggtcacgatgggttgtaccaaggattgagcacagccactaaagatacctatgatgcgctccacatgcaggccctgccgccaaga

SEQ ID NO: 24330 - DNA, 735 bp, synthetic construct
  source 1..735: mol_type = other DNA
aacggcaaagaggtgcacagcggcgtgtgtaccgacccccagccactgaaagaacagcccgccctgaacgacagccggtactgcctgagcagcagactgagagtgtccgccaccttctggcagaacccccggaaccacttcagatgccaggtgcagttctacggcctgagcgagaacgacgagtggacccaggacagagccaagcccgtgacccagatcgtgtctgccgaagcctggggcagagccgattgcggctttaccagcgagagctaccagcagggcgtgctgagcgccaccatcctgtacgagatcctgctgggcaaggccaccctgtacgccgtgctggtgtctgccctggtgctgatggctatggtcaagcggaaggacagccggggacgggttaagttttccagatccgcagacgcacccgcttaccaacaagggcagaaccaactctacaatgaacttaatttggggcggagggaagagtacgacgttctggacaaaaggaggggacgagatcccgagatgggcggaaagcctcagcgaaggaagaatccgcaagaggggctttataacgaactccagaaagataaaatggcagaagcctatagtgagattgggatgaagggagaaaggaggaggggtaaaggtcacgatgggttgtaccaaggattgagcacagccactaaagatacctatgatgcgctccacatgcaggccctgccgccaaga

SEQ ID NO: 24331 - DNA, 732 bp, synthetic construct
  source 1..732: mol_type = other DNA
ggcaaagaggtgcacagcggcgtgtgtaccgacccccagccactgaaagaacagcccgccctgaacgacagccggtactgcctgagcagcagactgagagtgtccgccaccttctggcagaacccccggaaccacttcagatgccaggtgcagttctacggcctgagcgagaacgacgagtggacccaggacagagccaagcccgtgacccagatcgtgtctgccgaagcctggggcagagccgattgcggctttaccagcgagagctaccagcagggcgtgctgagcgccaccatcctgtacgagatcctgctgggcaaggccaccctgtacgccgtgctggtgtctgccctggtgctgatggctatggtcaagcggaaggacagccggggacgggttaagttttccagatccgcagacgcacccgcttaccaacaagggcagaaccaactctacaatgaacttaatttggggcggagggaagagtacgacgttctggacaaaaggaggggacgagatcccgagatgggcggaaagcctcagcgaaggaagaatccgcaagaggggctttataacgaactccagaaagataaaatggcagaagcctatagtgagattgggatgaagggagaaaggaggaggggtaaaggtcacgatgggttgtaccaaggattgagcacagccactaaagatacctatgatgcgctccacatgcaggccctgccgccaaga

SEQ ID NO: 24332 - DNA, 729 bp, synthetic construct
  source 1..729: mol_type = other DNA
aaagaggtgcacagcggcgtgtgtaccgacccccagccactgaaagaacagcccgccctgaacgacagccggtactgcctgagcagcagactgagagtgtccgccaccttctggcagaacccccggaaccacttcagatgccaggtgcagttctacggcctgagcgagaacgacgagtggacccaggacagagccaagcccgtgacccagatcgtgtctgccgaagcctggggcagagccgattgcggctttaccagcgagagctaccagcagggcgtgctgagcgccaccatcctgtacgagatcctgctgggcaaggccaccctgtacgccgtgctggtgtctgccctggtgctgatggctatggtcaagcggaaggacagccggggacgggttaagttttccagatccgcagacgcacccgcttaccaacaagggcagaaccaactctacaatgaacttaatttggggcggagggaagagtacgacgttctggacaaaaggaggggacgagatcccgagatgggcggaaagcctcagcgaaggaagaatccgcaagaggggctttataacgaactccagaaagataaaatggcagaagcctatagtgagattgggatgaagggagaaaggaggaggggtaaaggtcacgatgggttgtaccaaggattgagcacagccactaaagatacctatgatgcgctccacatgcaggccctgccgccaaga

SEQ ID NO: 24333 - DNA, 726 bp, synthetic construct
  source 1..726: mol_type = other DNA
gaggtgcacagcggcgtgtgtaccgacccccagccactgaaagaacagcccgccctgaacgacagccggtactgcctgagcagcagactgagagtgtccgccaccttctggcagaacccccggaaccacttcagatgccaggtgcagttctacggcctgagcgagaacgacgagtggacccaggacagagccaagcccgtgacccagatcgtgtctgccgaagcctggggcagagccgattgcggctttaccagcgagagctaccagcagggcgtgctgagcgccaccatcctgtacgagatcctgctgggcaaggccaccctgtacgccgtgctggtgtctgccctggtgctgatggctatggtcaagcggaaggacagccggggacgggttaagttttccagatccgcagacgcacccgcttaccaacaagggcagaaccaactctacaatgaacttaatttggggcggagggaagagtacgacgttctggacaaaaggaggggacgagatcccgagatgggcggaaagcctcagcgaaggaagaatccgcaagaggggctttataacgaactccagaaagataaaatggcagaagcctatagtgagattgggatgaagggagaaaggaggaggggtaaaggtcacgatgggttgtaccaaggattgagcacagccactaaagatacctatgatgcgctccacatgcaggccctgccgccaaga

SEQ ID NO: 24334 - DNA, 723 bp, synthetic construct
  source 1..723: mol_type = other DNA
gtgcacagcggcgtgtgtaccgacccccagccactgaaagaacagcccgccctgaacgacagccggtactgcctgagcagcagactgagagtgtccgccaccttctggcagaacccccggaaccacttcagatgccaggtgcagttctacggcctgagcgagaacgacgagtggacccaggacagagccaagcccgtgacccagatcgtgtctgccgaagcctggggcagagccgattgcggctttaccagcgagagctaccagcagggcgtgctgagcgccaccatcctgtacgagatcctgctgggcaaggccaccctgtacgccgtgctggtgtctgccctggtgctgatggctatggtcaagcggaaggacagccggggacgggttaagttttccagatccgcagacgcacccgcttaccaacaagggcagaaccaactctacaatgaacttaatttggggcggagggaagagtacgacgttctggacaaaaggaggggacgagatcccgagatgggcggaaagcctcagcgaaggaagaatccgcaagaggggctttataacgaactccagaaagataaaatggcagaagcctatagtgagattgggatgaagggagaaaggaggaggggtaaaggtcacgatgggttgtaccaaggattgagcacagccactaaagatacctatgatgcgctccacatgcaggccctgccgccaaga

SEQ ID NO: 24335 - DNA, 720 bp, synthetic construct
  source 1..720: mol_type = other DNA
cacagcggcgtgtgtaccgacccccagccactgaaagaacagcccgccctgaacgacagccggtactgcctgagcagcagactgagagtgtccgccaccttctggcagaacccccggaaccacttcagatgccaggtgcagttctacggcctgagcgagaacgacgagtggacccaggacagagccaagcccgtgacccagatcgtgtctgccgaagcctggggcagagccgattgcggctttaccagcgagagctaccagcagggcgtgctgagcgccaccatcctgtacgagatcctgctgggcaaggccaccctgtacgccgtgctggtgtctgccctggtgctgatggctatggtcaagcggaaggacagccggggacgggttaagttttccagatccgcagacgcacccgcttaccaacaagggcagaaccaactctacaatgaacttaatttggggcggagggaagagtacgacgttctggacaaaaggaggggacgagatcccgagatgggcggaaagcctcagcgaaggaagaatccgcaagaggggctttataacgaactccagaaagataaaatggcagaagcctatagtgagattgggatgaagggagaaaggaggaggggtaaaggtcacgatgggttgtaccaaggattgagcacagccactaaagatacctatgatgcgctccacatgcaggccctgccgccaaga

SEQ ID NO: 24336 - DNA, 717 bp, synthetic construct
  source 1..717: mol_type = other DNA
agcggcgtgtgtaccgacccccagccactgaaagaacagcccgccctgaacgacagccggtactgcctgagcagcagactgagagtgtccgccaccttctggcagaacccccggaaccacttcagatgccaggtgcagttctacggcctgagcgagaacgacgagtggacccaggacagagccaagcccgtgacccagatcgtgtctgccgaagcctggggcagagccgattgcggctttaccagcgagagctaccagcagggcgtgctgagcgccaccatcctgtacgagatcctgctgggcaaggccaccctgtacgccgtgctggtgtctgccctggtgctgatggctatggtcaagcggaaggacagccggggacgggttaagttttccagatccgcagacgcacccgcttaccaacaagggcagaaccaactctacaatgaacttaatttggggcggagggaagagtacgacgttctggacaaaaggaggggacgagatcccgagatgggcggaaagcctcagcgaaggaagaatccgcaagaggggctttataacgaactccagaaagataaaatggcagaagcctatagtgagattgggatgaagggagaaaggaggaggggtaaaggtcacgatgggttgtaccaaggattgagcacagccactaaagatacctatgatgcgctccacatgcaggccctgccgccaaga

SEQ ID NO: 24337 - DNA, 714 bp, synthetic construct
  source 1..714: mol_type = other DNA
ggcgtgtgtaccgacccccagccactgaaagaacagcccgccctgaacgacagccggtactgcctgagcagcagactgagagtgtccgccaccttctggcagaacccccggaaccacttcagatgccaggtgcagttctacggcctgagcgagaacgacgagtggacccaggacagagccaagcccgtgacccagatcgtgtctgccgaagcctggggcagagccgattgcggctttaccagcgagagctaccagcagggcgtgctgagcgccaccatcctgtacgagatcctgctgggcaaggccaccctgtacgccgtgctggtgtctgccctggtgctgatggctatggtcaagcggaaggacagccggggacgggttaagttttccagatccgcagacgcacccgcttaccaacaagggcagaaccaactctacaatgaacttaatttggggcggagggaagagtacgacgttctggacaaaaggaggggacgagatcccgagatgggcggaaagcctcagcgaaggaagaatccgcaagaggggctttataacgaactccagaaagataaaatggcagaagcctatagtgagattgggatgaagggagaaaggaggaggggtaaaggtcacgatgggttgtaccaaggattgagcacagccactaaagatacctatgatgcgctccacatgcaggccctgccgccaaga

SEQ ID NO: 24338 - DNA, 711 bp, synthetic construct
  source 1..711: mol_type = other DNA
gtgtgtaccgacccccagccactgaaagaacagcccgccctgaacgacagccggtactgcctgagcagcagactgagagtgtccgccaccttctggcagaacccccggaaccacttcagatgccaggtgcagttctacggcctgagcgagaacgacgagtggacccaggacagagccaagcccgtgacccagatcgtgtctgccgaagcctggggcagagccgattgcggctttaccagcgagagctaccagcagggcgtgctgagcgccaccatcctgtacgagatcctgctgggcaaggccaccctgtacgccgtgctggtgtctgccctggtgctgatggctatggtcaagcggaaggacagccggggacgggttaagttttccagatccgcagacgcacccgcttaccaacaagggcagaaccaactctacaatgaacttaatttggggcggagggaagagtacgacgttctggacaaaaggaggggacgagatcccgagatgggcggaaagcctcagcgaaggaagaatccgcaagaggggctttataacgaactccagaaagataaaatggcagaagcctatagtgagattgggatgaagggagaaaggaggaggggtaaaggtcacgatgggttgtaccaaggattgagcacagccactaaagatacctatgatgcgctccacatgcaggccctgccgccaaga

SEQ ID NO: 24339 - DNA, 708 bp, synthetic construct
  source 1..708: mol_type = other DNA
tgtaccgacccccagccactgaaagaacagcccgccctgaacgacagccggtactgcctgagcagcagactgagagtgtccgccaccttctggcagaacccccggaaccacttcagatgccaggtgcagttctacggcctgagcgagaacgacgagtggacccaggacagagccaagcccgtgacccagatcgtgtctgccgaagcctggggcagagccgattgcggctttaccagcgagagctaccagcagggcgtgctgagcgccaccatcctgtacgagatcctgctgggcaaggccaccctgtacgccgtgctggtgtctgccctggtgctgatggctatggtcaagcggaaggacagccggggacgggttaagttttccagatccgcagacgcacccgcttaccaacaagggcagaaccaactctacaatgaacttaatttggggcggagggaagagtacgacgttctggacaaaaggaggggacgagatcccgagatgggcggaaagcctcagcgaaggaagaatccgcaagaggggctttataacgaactccagaaagataaaatggcagaagcctatagtgagattgggatgaagggagaaaggaggaggggtaaaggtcacgatgggttgtaccaaggattgagcacagccactaaagatacctatgatgcgctccacatgcaggccctgccgccaaga

SEQ ID NO: 24340 - DNA, 705 bp, synthetic construct
  source 1..705: mol_type = other DNA
accgacccccagccactgaaagaacagcccgccctgaacgacagccggtactgcctgagcagcagactgagagtgtccgccaccttctggcagaacccccggaaccacttcagatgccaggtgcagttctacggcctgagcgagaacgacgagtggacccaggacagagccaagcccgtgacccagatcgtgtctgccgaagcctggggcagagccgattgcggctttaccagcgagagctaccagcagggcgtgctgagcgccaccatcctgtacgagatcctgctgggcaaggccaccctgtacgccgtgctggtgtctgccctggtgctgatggctatggtcaagcggaaggacagccggggacgggttaagttttccagatccgcagacgcacccgcttaccaacaagggcagaaccaactctacaatgaacttaatttggggcggagggaagagtacgacgttctggacaaaaggaggggacgagatcccgagatgggcggaaagcctcagcgaaggaagaatccgcaagaggggctttataacgaactccagaaagataaaatggcagaagcctatagtgagattgggatgaagggagaaaggaggaggggtaaaggtcacgatgggttgtaccaaggattgagcacagccactaaagatacctatgatgcgctccacatgcaggccctgccgccaaga

SEQ ID NO: 24341 - DNA, 702 bp, synthetic construct
  source 1..702: mol_type = other DNA
gacccccagccactgaaagaacagcccgccctgaacgacagccggtactgcctgagcagcagactgagagtgtccgccaccttctggcagaacccccggaaccacttcagatgccaggtgcagttctacggcctgagcgagaacgacgagtggacccaggacagagccaagcccgtgacccagatcgtgtctgccgaagcctggggcagagccgattgcggctttaccagcgagagctaccagcagggcgtgctgagcgccaccatcctgtacgagatcctgctgggcaaggccaccctgtacgccgtgctggtgtctgccctggtgctgatggctatggtcaagcggaaggacagccggggacgggttaagttttccagatccgcagacgcacccgcttaccaacaagggcagaaccaactctacaatgaacttaatttggggcggagggaagagtacgacgttctggacaaaaggaggggacgagatcccgagatgggcggaaagcctcagcgaaggaagaatccgcaagaggggctttataacgaactccagaaagataaaatggcagaagcctatagtgagattgggatgaagggagaaaggaggaggggtaaaggtcacgatgggttgtaccaaggattgagcacagccactaaagatacctatgatgcgctccacatgcaggccctgccgccaaga

SEQ ID NO: 24342 - DNA, 699 bp, synthetic construct
  source 1..699: mol_type = other DNA
ccccagccactgaaagaacagcccgccctgaacgacagccggtactgcctgagcagcagactgagagtgtccgccaccttctggcagaacccccggaaccacttcagatgccaggtgcagttctacggcctgagcgagaacgacgagtggacccaggacagagccaagcccgtgacccagatcgtgtctgccgaagcctggggcagagccgattgcggctttaccagcgagagctaccagcagggcgtgctgagcgccaccatcctgtacgagatcctgctgggcaaggccaccctgtacgccgtgctggtgtctgccctggtgctgatggctatggtcaagcggaaggacagccggggacgggttaagttttccagatccgcagacgcacccgcttaccaacaagggcagaaccaactctacaatgaacttaatttggggcggagggaagagtacgacgttctggacaaaaggaggggacgagatcccgagatgggcggaaagcctcagcgaaggaagaatccgcaagaggggctttataacgaactccagaaagataaaatggcagaagcctatagtgagattgggatgaagggagaaaggaggaggggtaaaggtcacgatgggttgtaccaaggattgagcacagccactaaagatacctatgatgcgctccacatgcaggccctgccgccaaga

SEQ ID NO: 24343 - DNA, 696 bp, synthetic construct
  source 1..696: mol_type = other DNA
cagccactgaaagaacagcccgccctgaacgacagccggtactgcctgagcagcagactgagagtgtccgccaccttctggcagaacccccggaaccacttcagatgccaggtgcagttctacggcctgagcgagaacgacgagtggacccaggacagagccaagcccgtgacccagatcgtgtctgccgaagcctggggcagagccgattgcggctttaccagcgagagctaccagcagggcgtgctgagcgccaccatcctgtacgagatcctgctgggcaaggccaccctgtacgccgtgctggtgtctgccctggtgctgatggctatggtcaagcggaaggacagccggggacgggttaagttttccagatccgcagacgcacccgcttaccaacaagggcagaaccaactctacaatgaacttaatttggggcggagggaagagtacgacgttctggacaaaaggaggggacgagatcccgagatgggcggaaagcctcagcgaaggaagaatccgcaagaggggctttataacgaactccagaaagataaaatggcagaagcctatagtgagattgggatgaagggagaaaggaggaggggtaaaggtcacgatgggttgtaccaaggattgagcacagccactaaagatacctatgatgcgctccacatgcaggccctgccgccaaga

SEQ ID NO: 24344 - DNA, 693 bp, synthetic construct
  source 1..693: mol_type = other DNA
ccactgaaagaacagcccgccctgaacgacagccggtactgcctgagcagcagactgagagtgtccgccaccttctggcagaacccccggaaccacttcagatgccaggtgcagttctacggcctgagcgagaacgacgagtggacccaggacagagccaagcccgtgacccagatcgtgtctgccgaagcctggggcagagccgattgcggctttaccagcgagagctaccagcagggcgtgctgagcgccaccatcctgtacgagatcctgctgggcaaggccaccctgtacgccgtgctggtgtctgccctggtgctgatggctatggtcaagcggaaggacagccggggacgggttaagttttccagatccgcagacgcacccgcttaccaacaagggcagaaccaactctacaatgaacttaatttggggcggagggaagagtacgacgttctggacaaaaggaggggacgagatcccgagatgggcggaaagcctcagcgaaggaagaatccgcaagaggggctttataacgaactccagaaagataaaatggcagaagcctatagtgagattgggatgaagggagaaaggaggaggggtaaaggtcacgatgggttgtaccaaggattgagcacagccactaaagatacctatgatgcgctccacatgcaggccctgccgccaaga

SEQ ID NO: 24345 - DNA, 690 bp, synthetic construct
  source 1..690: mol_type = other DNA
ctgaaagaacagcccgccctgaacgacagccggtactgcctgagcagcagactgagagtgtccgccaccttctggcagaacccccggaaccacttcagatgccaggtgcagttctacggcctgagcgagaacgacgagtggacccaggacagagccaagcccgtgacccagatcgtgtctgccgaagcctggggcagagccgattgcggctttaccagcgagagctaccagcagggcgtgctgagcgccaccatcctgtacgagatcctgctgggcaaggccaccctgtacgccgtgctggtgtctgccctggtgctgatggctatggtcaagcggaaggacagccggggacgggttaagttttccagatccgcagacgcacccgcttaccaacaagggcagaaccaactctacaatgaacttaatttggggcggagggaagagtacgacgttctggacaaaaggaggggacgagatcccgagatgggcggaaagcctcagcgaaggaagaatccgcaagaggggctttataacgaactccagaaagataaaatggcagaagcctatagtgagattgggatgaagggagaaaggaggaggggtaaaggtcacgatgggttgtaccaaggattgagcacagccactaaagatacctatgatgcgctccacatgcaggccctgccgccaaga

SEQ ID NO: 24346 - DNA, 687 bp, synthetic construct
  source 1..687: mol_type = other DNA
aaagaacagcccgccctgaacgacagccggtactgcctgagcagcagactgagagtgtccgccaccttctggcagaacccccggaaccacttcagatgccaggtgcagttctacggcctgagcgagaacgacgagtggacccaggacagagccaagcccgtgacccagatcgtgtctgccgaagcctggggcagagccgattgcggctttaccagcgagagctaccagcagggcgtgctgagcgccaccatcctgtacgagatcctgctgggcaaggccaccctgtacgccgtgctggtgtctgccctggtgctgatggctatggtcaagcggaaggacagccggggacgggttaagttttccagatccgcagacgcacccgcttaccaacaagggcagaaccaactctacaatgaacttaatttggggcggagggaagagtacgacgttctggacaaaaggaggggacgagatcccgagatgggcggaaagcctcagcgaaggaagaatccgcaagaggggctttataacgaactccagaaagataaaatggcagaagcctatagtgagattgggatgaagggagaaaggaggaggggtaaaggtcacgatgggttgtaccaaggattgagcacagccactaaagatacctatgatgcgctccacatgcaggccctgccgccaaga

SEQ ID NO: 24347 - DNA, 684 bp, synthetic construct; identical to SEQ ID NO: 23950
  source 1..684: mol_type = other DNA

SEQ ID NO: 24348 - DNA, 681 bp, synthetic construct
  source 1..681: mol_type = other DNA
cagcccgccctgaacgacagccggtactgcctgagcagcagactgagagtgtccgccaccttctggcagaacccccggaaccacttcagatgccaggtgcagttctacggcctgagcgagaacgacgagtggacccaggacagagccaagcccgtgacccagatcgtgtctgccgaagcctggggcagagccgattgcggctttaccagcgagagctaccagcagggcgtgctgagcgccaccatcctgtacgagatcctgctgggcaaggccaccctgtacgccgtgctggtgtctgccctggtgctgatggctatggtcaagcggaaggacagccggggacgggttaagttttccagatccgcagacgcacccgcttaccaacaagggcagaaccaactctacaatgaacttaatttggggcggagggaagagtacgacgttctggacaaaaggaggggacgagatcccgagatgggcggaaagcctcagcgaaggaagaatccgcaagaggggctttataacgaactccagaaagataaaatggcagaagcctatagtgagattgggatgaagggagaaaggaggaggggtaaaggtcacgatgggttgtaccaaggattgagcacagccactaaagatacctatgatgcgctccacatgcaggccctgccgccaaga

SEQ ID NO: 24349 - DNA, 678 bp, synthetic construct
  source 1..678: mol_type = other DNA
cccgccctgaacgacagccggtactgcctgagcagcagactgagagtgtccgccaccttctggcagaacccccggaaccacttcagatgccaggtgcagttctacggcctgagcgagaacgacgagtggacccaggacagagccaagcccgtgacccagatcgtgtctgccgaagcctggggcagagccgattgcggctttaccagcgagagctaccagcagggcgtgctgagcgccaccatcctgtacgagatcctgctgggcaaggccaccctgtacgccgtgctggtgtctgccctggtgctgatggctatggtcaagcggaaggacagccggggacgggttaagttttccagatccgcagacgcacccgcttaccaacaagggcagaaccaactctacaatgaacttaatttggggcggagggaagagtacgacgttctggacaaaaggaggggacgagatcccgagatgggcggaaagcctcagcgaaggaagaatccgcaagaggggctttataacgaactccagaaagataaaatggcagaagcctatagtgagattgggatgaagggagaaaggaggaggggtaaaggtcacgatgggttgtaccaaggattgagcacagccactaaagatacctatgatgcgctccacatgcaggccctgccgccaaga

SEQ ID NO: 24350 - DNA, 675 bp, synthetic construct
  source 1..675: mol_type = other DNA
gccctgaacgacagccggtactgcctgagcagcagactgagagtgtccgccaccttctggcagaacccccggaaccacttcagatgccaggtgcagttctacggcctgagcgagaacgacgagtggacccaggacagagccaagcccgtgacccagatcgtgtctgccgaagcctggggcagagccgattgcggctttaccagcgagagctaccagcagggcgtgctgagcgccaccatcctgtacgagatcctgctgggcaaggccaccctgtacgccgtgctggtgtctgccctggtgctgatggctatggtcaagcggaaggacagccggggacgggttaagttttccagatccgcagacgcacccgcttaccaacaagggcagaaccaactctacaatgaacttaatttggggcggagggaagagtacgacgttctggacaaaaggaggggacgagatcccgagatgggcggaaagcctcagcgaaggaagaatccgcaagaggggctttataacgaactccagaaagataaaatggcagaagcctatagtgagattgggatgaagggagaaaggaggaggggtaaaggtcacgatgggttgtaccaaggattgagcacagccactaaagatacctatgatgcgctccacatgcaggccctgccgccaaga

SEQ ID NO: 24351 - DNA, 672 bp, synthetic construct
  source 1..672: mol_type = other DNA
ctgaacgacagccggtactgcctgagcagcagactgagagtgtccgccaccttctggcagaacccccggaaccacttcagatgccaggtgcagttctacggcctgagcgagaacgacgagtggacccaggacagagccaagcccgtgacccagatcgtgtctgccgaagcctggggcagagccgattgcggctttaccagcgagagctaccagcagggcgtgctgagcgccaccatcctgtacgagatcctgctgggcaaggccaccctgtacgccgtgctggtgtctgccctggtgctgatggctatggtcaagcggaaggacagccggggacgggttaagttttccagatccgcagacgcacccgcttaccaacaagggcagaaccaactctacaatgaacttaatttggggcggagggaagagtacgacgttctggacaaaaggaggggacgagatcccgagatgggcggaaagcctcagcgaaggaagaatccgcaagaggggctttataacgaactccagaaagataaaatggcagaagcctatagtgagattgggatgaagggagaaaggaggaggggtaaaggtcacgatgggttgtaccaaggattgagcacagccactaaagatacctatgatgcgctccacatgcaggccctgccgccaaga

SEQ ID NO: 24352 - DNA, 669 bp, synthetic construct
  source 1..669: mol_type = other DNA
aacgacagccggtactgcctgagcagcagactgagagtgtccgccaccttctggcagaacccccggaaccacttcagatgccaggtgcagttctacggcctgagcgagaacgacgagtggacccaggacagagccaagcccgtgacccagatcgtgtctgccgaagcctggggcagagccgattgcggctttaccagcgagagctaccagcagggcgtgctgagcgccaccatcctgtacgagatcctgctgggcaaggccaccctgtacgccgtgctggtgtctgccctggtgctgatggctatggtcaagcggaaggacagccggggacgggttaagttttccagatccgcagacgcacccgcttaccaacaagggcagaaccaactctacaatgaacttaatttggggcggagggaagagtacgacgttctggacaaaaggaggggacgagatcccgagatgggcggaaagcctcagcgaaggaagaatccgcaagaggggctttataacgaactccagaaagataaaatggcagaagcctatagtgagattgggatgaagggagaaaggaggaggggtaaaggtcacgatgggttgtaccaaggattgagcacagccactaaagatacctatgatgcgctccacatgcaggccctgccgccaaga

SEQ ID NO: 24353 - DNA, 666 bp, synthetic construct
  source 1..666: mol_type = other DNA
gacagccggtactgcctgagcagcagactgagagtgtccgccaccttctggcagaacccccggaaccacttcagatgccaggtgcagttctacggcctgagcgagaacgacgagtggacccaggacagagccaagcccgtgacccagatcgtgtctgccgaagcctggggcagagccgattgcggctttaccagcgagagctaccagcagggcgtgctgagcgccaccatcctgtacgagatcctgctgggcaaggccaccctgtacgccgtgctggtgtctgccctggtgctgatggctatggtcaagcggaaggacagccggggacgggttaagttttccagatccgcagacgcacccgcttaccaacaagggcagaaccaactctacaatgaacttaatttggggcggagggaagagtacgacgttctggacaaaaggaggggacgagatcccgagatgggcggaaagcctcagcgaaggaagaatccgcaagaggggctttataacgaactccagaaagataaaatggcagaagcctatagtgagattgggatgaagggagaaaggaggaggggtaaaggtcacgatgggttgtaccaaggattgagcacagccactaaagatacctatgatgcgctccacatgcaggccctgccgccaaga

SEQ ID NO: 24354 - DNA, 663 bp, synthetic construct
  source 1..663: mol_type = other DNA
agccggtactgcctgagcagcagactgagagtgtccgccaccttctggcagaacccccggaaccacttcagatgccaggtgcagttctacggcctgagcgagaacgacgagtggacccaggacagagccaagcccgtgacccagatcgtgtctgccgaagcctggggcagagccgattgcggctttaccagcgagagctaccagcagggcgtgctgagcgccaccatcctgtacgagatcctgctgggcaaggccaccctgtacgccgtgctggtgtctgccctggtgctgatggctatggtcaagcggaaggacagccggggacgggttaagttttccagatccgcagacgcacccgcttaccaacaagggcagaaccaactctacaatgaacttaatttggggcggagggaagagtacgacgttctggacaaaaggaggggacgagatcccgagatgggcggaaagcctcagcgaaggaagaatccgcaagaggggctttataacgaactccagaaagataaaatggcagaagcctatagtgagattgggatgaagggagaaaggaggaggggtaaaggtcacgatgggttgtaccaaggattgagcacagccactaaagatacctatgatgcgctccacatgcaggccctgccgccaaga

SEQ ID NO: 24355 - DNA, 660 bp, synthetic construct
  source 1..660: mol_type = other DNA
cggtactgcctgagcagcagactgagagtgtccgccaccttctggcagaacccccggaaccacttcagatgccaggtgcagttctacggcctgagcgagaacgacgagtggacccaggacagagccaagcccgtgacccagatcgtgtctgccgaagcctggggcagagccgattgcggctttaccagcgagagctaccagcagggcgtgctgagcgccaccatcctgtacgagatcctgctgggcaaggccaccctgtacgccgtgctggtgtctgccctggtgctgatggctatggtcaagcggaaggacagccggggacgggttaagttttccagatccgcagacgcacccgcttaccaacaagggcagaaccaactctacaatgaacttaatttggggcggagggaagagtacgacgttctggacaaaaggaggggacgagatcccgagatgggcggaaagcctcagcgaaggaagaatccgcaagaggggctttataacgaactccagaaagataaaatggcagaagcctatagtgagattgggatgaagggagaaaggaggaggggtaaaggtcacgatgggttgtaccaaggattgagcacagccactaaagatacctatgatgcgctccacatgcaggccctgccgccaaga

SEQ ID NO: 24356 - DNA, 657 bp, synthetic construct
  source 1..657: mol_type = other DNA
tactgcctgagcagcagactgagagtgtccgccaccttctggcagaacccccggaaccacttcagatgccaggtgcagttctacggcctgagcgagaacgacgagtggacccaggacagagccaagcccgtgacccagatcgtgtctgccgaagcctggggcagagccgattgcggctttaccagcgagagctaccagcagggcgtgctgagcgccaccatcctgtacgagatcctgctgggcaaggccaccctgtacgccgtgctggtgtctgccctggtgctgatggctatggtcaagcggaaggacagccggggacgggttaagttttccagatccgcagacgcacccgcttaccaacaagggcagaaccaactctacaatgaacttaatttggggcggagggaagagtacgacgttctggacaaaaggaggggacgagatcccgagatgggcggaaagcctcagcgaaggaagaatccgcaagaggggctttataacgaactccagaaagataaaatggcagaagcctatagtgagattgggatgaagggagaaaggaggaggggtaaaggtcacgatgggttgtaccaaggattgagcacagccactaaagatacctatgatgcgctccacatgcaggccctgccgccaaga

SEQ ID NO: 24357 - DNA, 654 bp, synthetic construct
  source 1..654: mol_type = other DNA
tgcctgagcagcagactgagagtgtccgccaccttctggcagaacccccggaaccacttcagatgccaggtgcagttctacggcctgagcgagaacgacgagtggacccaggacagagccaagcccgtgacccagatcgtgtctgccgaagcctggggcagagccgattgcggctttaccagcgagagctaccagcagggcgtgctgagcgccaccatcctgtacgagatcctgctgggcaaggccaccctgtacgccgtgctggtgtctgccctggtgctgatggctatggtcaagcggaaggacagccggggacgggttaagttttccagatccgcagacgcacccgcttaccaacaagggcagaaccaactctacaatgaacttaatttggggcggagggaagagtacgacgttctggacaaaaggaggggacgagatcccgagatgggcggaaagcctcagcgaaggaagaatccgcaagaggggctttataacgaactccagaaagataaaatggcagaagcctatagtgagattgggatgaagggagaaaggaggaggggtaaaggtcacgatgggttgtaccaaggattgagcacagccactaaagatacctatgatgcgctccacatgcaggccctgccgccaaga

SEQ ID NO: 24358 - DNA, 651 bp, synthetic construct
  source 1..651: mol_type = other DNA
ctgagcagcagactgagagtgtccgccaccttctggcagaacccccggaaccacttcagatgccaggtgcagttctacggcctgagcgagaacgacgagtggacccaggacagagccaagcccgtgacccagatcgtgtctgccgaagcctggggcagagccgattgcggctttaccagcgagagctaccagcagggcgtgctgagcgccaccatcctgtacgagatcctgctgggcaaggccaccctgtacgccgtgctggtgtctgccctggtgctgatggctatggtcaagcggaaggacagccggggacgggttaagttttccagatccgcagacgcacccgcttaccaacaagggcagaaccaactctacaatgaacttaatttggggcggagggaagagtacgacgttctggacaaaaggaggggacgagatcccgagatgggcggaaagcctcagcgaaggaagaatccgcaagaggggctttataacgaactccagaaagataaaatggcagaagcctatagtgagattgggatgaagggagaaaggaggaggggtaaaggtcacgatgggttgtaccaaggattgagcacagccactaaagatacctatgatgcgctccacatgcaggccctgccgccaaga

SEQ ID NO: 24359 - DNA, 648 bp, synthetic construct
  source 1..648: mol_type = other DNA
agcagcagactgagagtgtccgccaccttctggcagaacccccggaaccacttcagatgccaggtgcagttctacggcctgagcgagaacgacgagtggacccaggacagagccaagcccgtgacccagatcgtgtctgccgaagcctggggcagagccgattgcggctttaccagcgagagctaccagcagggcgtgctgagcgccaccatcctgtacgagatcctgctgggcaaggccaccctgtacgccgtgctggtgtctgccctggtgctgatggctatggtcaagcggaaggacagccggggacgggttaagttttccagatccgcagacgcacccgcttaccaacaagggcagaaccaactctacaatgaacttaatttggggcggagggaagagtacgacgttctggacaaaaggaggggacgagatcccgagatgggcggaaagcctcagcgaaggaagaatccgcaagaggggctttataacgaactccagaaagataaaatggcagaagcctatagtgagattgggatgaagggagaaaggaggaggggtaaaggtcacgatgggttgtaccaaggattgagcacagccactaaagatacctatgatgcgctccacatgcaggccctgccgccaaga

SEQ ID NO: 24360 - DNA, 645 bp, synthetic construct
  source 1..645: mol_type = other DNA
agcagactgagagtgtccgccaccttctggcagaacccccggaaccacttcagatgccaggtgcagttctacggcctgagcgagaacgacgagtggacccaggacagagccaagcccgtgacccagatcgtgtctgccgaagcctggggcagagccgattgcggctttaccagcgagagctaccagcagggcgtgctgagcgccaccatcctgtacgagatcctgctgggcaaggccaccctgtacgccgtgctggtgtctgccctggtgctgatggctatggtcaagcggaaggacagccggggacgggttaagttttccagatccgcagacgcacccgcttaccaacaagggcagaaccaactctacaatgaacttaatttggggcggagggaagagtacgacgttctggacaaaaggaggggacgagatcccgagatgggcggaaagcctcagcgaaggaagaatccgcaagaggggctttataacgaactccagaaagataaaatggcagaagcctatagtgagattgggatgaagggagaaaggaggaggggtaaaggtcacgatgggttgtaccaaggattgagcacagccactaaagatacctatgatgcgctccacatgcaggccctgccgccaaga

SEQ ID NO: 24361 - DNA, 642 bp, synthetic construct
  source 1..642: mol_type = other DNA
agactgagagtgtccgccaccttctggcagaacccccggaaccacttcagatgccaggtgcagttctacggcctgagcgagaacgacgagtggacccaggacagagccaagcccgtgacccagatcgtgtctgccgaagcctggggcagagccgattgcggctttaccagcgagagctaccagcagggcgtgctgagcgccaccatcctgtacgagatcctgctgggcaaggccaccctgtacgccgtgctggtgtctgccctggtgctgatggctatggtcaagcggaaggacagccggggacgggttaagttttccagatccgcagacgcacccgcttaccaacaagggcagaaccaactctacaatgaacttaatttggggcggagggaagagtacgacgttctggacaaaaggaggggacgagatcccgagatgggcggaaagcctcagcgaaggaagaatccgcaagaggggctttataacgaactccagaaagataaaatggcagaagcctatagtgagattgggatgaagggagaaaggaggaggggtaaaggtcacgatgggttgtaccaaggattgagcacagccactaaagatacctatgatgcgctccacatgcaggccctgccgccaaga

SEQ ID NO: 24362 - DNA, 639 bp, synthetic construct
  source 1..639: mol_type = other DNA
ctgagagtgtccgccaccttctggcagaacccccggaaccacttcagatgccaggtgcagttctacggcctgagcgagaacgacgagtggacccaggacagagccaagcccgtgacccagatcgtgtctgccgaagcctggggcagagccgattgcggctttaccagcgagagctaccagcagggcgtgctgagcgccaccatcctgtacgagatcctgctgggcaaggccaccctgtacgccgtgctggtgtctgccctggtgctgatggctatggtcaagcggaaggacagccggggacgggttaagttttccagatccgcagacgcacccgcttaccaacaagggcagaaccaactctacaatgaacttaatttggggcggagggaagagtacgacgttctggacaaaaggaggggacgagatcccgagatgggcggaaagcctcagcgaaggaagaatccgcaagaggggctttataacgaactccagaaagataaaatggcagaagcctatagtgagattgggatgaagggagaaaggaggaggggtaaaggtcacgatgggttgtaccaaggattgagcacagccactaaagatacctatgatgcgctccacatgcaggccctgccgccaaga

SEQ ID NO: 24363 - DNA, 636 bp, synthetic construct
  source 1..636: mol_type = other DNA
agagtgtccgccaccttctggcagaacccccggaaccacttcagatgccaggtgcagttctacggcctgagcgagaacgacgagtggacccaggacagagccaagcccgtgacccagatcgtgtctgccgaagcctggggcagagccgattgcggctttaccagcgagagctaccagcagggcgtgctgagcgccaccatcctgtacgagatcctgctgggcaaggccaccctgtacgccgtgctggtgtctgccctggtgctgatggctatggtcaagcggaaggacagccggggacgggttaagttttccagatccgcagacgcacccgcttaccaacaagggcagaaccaactctacaatgaacttaatttggggcggagggaagagtacgacgttctggacaaaaggaggggacgagatcccgagatgggcggaaagcctcagcgaaggaagaatccgcaagaggggctttataacgaactccagaaagataaaatggcagaagcctatagtgagattgggatgaagggagaaaggaggaggggtaaaggtcacgatgggttgtaccaaggattgagcacagccactaaagatacctatgatgcgctccacatgcaggccctgccgccaaga

SEQ ID NO: 24364 - DNA, 633 bp, synthetic construct
  source 1..633: mol_type = other DNA
gtgtccgccaccttctggcagaacccccggaaccacttcagatgccaggtgcagttctacggcctgagcgagaacgacgagtggacccaggacagagccaagcccgtgacccagatcgtgtctgccgaagcctggggcagagccgattgcggctttaccagcgagagctaccagcagggcgtgctgagcgccaccatcctgtacgagatcctgctgggcaaggccaccctgtacgccgtgctggtgtctgccctggtgctgatggctatggtcaagcggaaggacagccggggacgggttaagttttccagatccgcagacgcacccgcttaccaacaagggcagaaccaactctacaatgaacttaatttggggcggagggaagagtacgacgttctggacaaaaggaggggacgagatcccgagatgggcggaaagcctcagcgaaggaagaatccgcaagaggggctttataacgaactccagaaagataaaatggcagaagcctatagtgagattgggatgaagggagaaaggaggaggggtaaaggtcacgatgggttgtaccaaggattgagcacagccactaaagatacctatgatgcgctccacatgcaggccctgccgccaaga

SEQ ID NO: 24365 - DNA, 630 bp, synthetic construct
  source 1..630: mol_type = other DNA
tccgccaccttctggcagaacccccggaaccacttcagatgccaggtgcagttctacggcctgagcgagaacgacgagtggacccaggacagagccaagcccgtgacccagatcgtgtctgccgaagcctggggcagagccgattgcggctttaccagcgagagctaccagcagggcgtgctgagcgccaccatcctgtacgagatcctgctgggcaaggccaccctgtacgccgtgctggtgtctgccctggtgctgatggctatggtcaagcggaaggacagccggggacgggttaagttttccagatccgcagacgcacccgcttaccaacaagggcagaaccaactctacaatgaacttaatttggggcggagggaagagtacgacgttctggacaaaaggaggggacgagatcccgagatgggcggaaagcctcagcgaaggaagaatccgcaagaggggctttataacgaactccagaaagataaaatggcagaagcctatagtgagattgggatgaagggagaaaggaggaggggtaaaggtcacgatgggttgtaccaaggattgagcacagccactaaagatacctatgatgcgctccacatgcaggccctgccgccaaga

SEQ ID NO: 24366 - DNA, 627 bp, synthetic construct
  source 1..627: mol_type = other DNA
gccaccttctggcagaacccccggaaccacttcagatgccaggtgcagttctacggcctgagcgagaacgacgagtggacccaggacagagccaagcccgtgacccagatcgtgtctgccgaagcctggggcagagccgattgcggctttaccagcgagagctaccagcagggcgtgctgagcgccaccatcctgtacgagatcctgctgggcaaggccaccctgtacgccgtgctggtgtctgccctggtgctgatggctatggtcaagcggaaggacagccggggacgggttaagttttccagatccgcagacgcacccgcttaccaacaagggcagaaccaactctacaatgaacttaatttggggcggagggaagagtacgacgttctggacaaaaggaggggacgagatcccgagatgggcggaaagcctcagcgaaggaagaatccgcaagaggggctttataacgaactccagaaagataaaatggcagaagcctatagtgagattgggatgaagggagaaaggaggaggggtaaaggtcacgatgggttgtaccaaggattgagcacagccactaaagatacctatgatgcgctccacatgcaggccctgccgccaaga

SEQ ID NO: 24367 - DNA, 624 bp, synthetic construct
  source 1..624: mol_type = other DNA
accttctggcagaacccccggaaccacttcagatgccaggtgcagttctacggcctgagcgagaacgacgagtggacccaggacagagccaagcccgtgacccagatcgtgtctgccgaagcctggggcagagccgattgcggctttaccagcgagagctaccagcagggcgtgctgagcgccaccatcctgtacgagatcctgctgggcaaggccaccctgtacgccgtgctggtgtctgccctggtgctgatggctatggtcaagcggaaggacagccggggacgggttaagttttccagatccgcagacgcacccgcttaccaacaagggcagaaccaactctacaatgaacttaatttggggcggagggaagagtacgacgttctggacaaaaggaggggacgagatcccgagatgggcggaaagcctcagcgaaggaagaatccgcaagaggggctttataacgaactccagaaagataaaatggcagaagcctatagtgagattgggatgaagggagaaaggaggaggggtaaaggtcacgatgggttgtaccaaggattgagcacagccactaaagatacctatgatgcgctccacatgcaggccctgccgccaaga

SEQ ID NO: 24368 - DNA, 621 bp, synthetic construct
  source 1..621: mol_type = other DNA
ttctggcagaacccccggaaccacttcagatgccaggtgcagttctacggcctgagcgagaacgacgagtggacccaggacagagccaagcccgtgacccagatcgtgtctgccgaagcctggggcagagccgattgcggctttaccagcgagagctaccagcagggcgtgctgagcgccaccatcctgtacgagatcctgctgggcaaggccaccctgtacgccgtgctggtgtctgccctggtgctgatggctatggtcaagcggaaggacagccggggacgggttaagttttccagatccgcagacgcacccgcttaccaacaagggcagaaccaactctacaatgaacttaatttggggcggagggaagagtacgacgttctggacaaaaggaggggacgagatcccgagatgggcggaaagcctcagcgaaggaagaatccgcaagaggggctttataacgaactccagaaagataaaatggcagaagcctatagtgagattgggatgaagggagaaaggaggaggggtaaaggtcacgatgggttgtaccaaggattgagcacagccactaaagatacctatgatgcgctccacatgcaggccctgccgccaaga

SEQ ID NO: 24369 - DNA, 618 bp, synthetic construct
  source 1..618: mol_type = other DNA
tggcagaacccccggaaccacttcagatgccaggtgcagttctacggcctgagcgagaacgacgagtggacccaggacagagccaagcccgtgacccagatcgtgtctgccgaagcctggggcagagccgattgcggctttaccagcgagagctaccagcagggcgtgctgagcgccaccatcctgtacgagatcctgctgggcaaggccaccctgtacgccgtgctggtgtctgccctggtgctgatggctatggtcaagcggaaggacagccggggacgggttaagttttccagatccgcagacgcacccgcttaccaacaagggcagaaccaactctacaatgaacttaatttggggcggagggaagagtacgacgttctggacaaaaggaggggacgagatcccgagatgggcggaaagcctcagcgaaggaagaatccgcaagaggggctttataacgaactccagaaagataaaatggcagaagcctatagtgagattgggatgaagggagaaaggaggaggggtaaaggtcacgatgggttgtaccaaggattgagcacagccactaaagatacctatgatgcgctccacatgcaggccctgccgccaaga

SEQ ID NO: 24370 - DNA, 615 bp, synthetic construct
  source 1..615: mol_type = other DNA
cagaacccccggaaccacttcagatgccaggtgcagttctacggcctgagcgagaacgacgagtggacccaggacagagccaagcccgtgacccagatcgtgtctgccgaagcctggggcagagccgattgcggctttaccagcgagagctaccagcagggcgtgctgagcgccaccatcctgtacgagatcctgctgggcaaggccaccctgtacgccgtgctggtgtctgccctggtgctgatggctatggtcaagcggaaggacagccggggacgggttaagttttccagatccgcagacgcacccgcttaccaacaagggcagaaccaactctacaatgaacttaatttggggcggagggaagagtacgacgttctggacaaaaggaggggacgagatcccgagatgggcggaaagcctcagcgaaggaagaatccgcaagaggggctttataacgaactccagaaagataaaatggcagaagcctatagtgagattgggatgaagggagaaaggaggaggggtaaaggtcacgatgggttgtaccaaggattgagcacagccactaaagatacctatgatgcgctccacatgcaggccctgccgccaaga

SEQ ID NO: 24371 - DNA, 612 bp, synthetic construct
  source 1..612: mol_type = other DNA
aacccccggaaccacttcagatgccaggtgcagttctacggcctgagcgagaacgacgagtggacccaggacagagccaagcccgtgacccagatcgtgtctgccgaagcctggggcagagccgattgcggctttaccagcgagagctaccagcagggcgtgctgagcgccaccatcctgtacgagatcctgctgggcaaggccaccctgtacgccgtgctggtgtctgccctggtgctgatggctatggtcaagcggaaggacagccggggacgggttaagttttccagatccgcagacgcacccgcttaccaacaagggcagaaccaactctacaatgaacttaatttggggcggagggaagagtacgacgttctggacaaaaggaggggacgagatcccgagatgggcggaaagcctcagcgaaggaagaatccgcaagaggggctttataacgaactccagaaagataaaatggcagaagcctatagtgagattgggatgaagggagaaaggaggaggggtaaaggtcacgatgggttgtaccaaggattgagcacagccactaaagatacctatgatgcgctccacatgcaggccctgccgccaaga

SEQ ID NO: 24372 - DNA, 609 bp, synthetic construct
  source 1..609: mol_type = other DNA
ccccggaaccacttcagatgccaggtgcagttctacggcctgagcgagaacgacgagtggacccaggacagagccaagcccgtgacccagatcgtgtctgccgaagcctggggcagagccgattgcggctttaccagcgagagctaccagcagggcgtgctgagcgccaccatcctgtacgagatcctgctgggcaaggccaccctgtacgccgtgctggtgtctgccctggtgctgatggctatggtcaagcggaaggacagccggggacgggttaagttttccagatccgcagacgcacccgcttaccaacaagggcagaaccaactctacaatgaacttaatttggggcggagggaagagtacgacgttctggacaaaaggaggggacgagatcccgagatgggcggaaagcctcagcgaaggaagaatccgcaagaggggctttataacgaactccagaaagataaaatggcagaagcctatagtgagattgggatgaagggagaaaggaggaggggtaaaggtcacgatgggttgtaccaaggattgagcacagccactaaagatacctatgatgcgctccacatgcaggccctgccgccaaga

SEQ ID NO: 24373 - DNA, 606 bp, synthetic construct
  source 1..606: mol_type = other DNA
cggaaccacttcagatgccaggtgcagttctacggcctgagcgagaacgacgagtggacccaggacagagccaagcccgtgacccagatcgtgtctgccgaagcctggggcagagccgattgcggctttaccagcgagagctaccagcagggcgtgctgagcgccaccatcctgtacgagatcctgctgggcaaggccaccctgtacgccgtgctggtgtctgccctggtgctgatggctatggtcaagcggaaggacagccggggacgggttaagttttccagatccgcagacgcacccgcttaccaacaagggcagaaccaactctacaatgaacttaatttggggcggagggaagagtacgacgttctggacaaaaggaggggacgagatcccgagatgggcggaaagcctcagcgaaggaagaatccgcaagaggggctttataacgaactccagaaagataaaatggcagaagcctatagtgagattgggatgaagggagaaaggaggaggggtaaaggtcacgatgggttgtaccaaggattgagcacagccactaaagatacctatgatgcgctccacatgcaggccctgccgccaaga

SEQ ID NO: 24374 - DNA, 603 bp, synthetic construct
  source 1..603: mol_type = other DNA
aaccacttcagatgccaggtgcagttctacggcctgagcgagaacgacgagtggacccaggacagagccaagcccgtgacccagatcgtgtctgccgaagcctggggcagagccgattgcggctttaccagcgagagctaccagcagggcgtgctgagcgccaccatcctgtacgagatcctgctgggcaaggccaccctgtacgccgtgctggtgtctgccctggtgctgatggctatggtcaagcggaaggacagccggggacgggttaagttttccagatccgcagacgcacccgcttaccaacaagggcagaaccaactctacaatgaacttaatttggggcggagggaagagtacgacgttctggacaaaaggaggggacgagatcccgagatgggcggaaagcctcagcgaaggaagaatccgcaagaggggctttataacgaactccagaaagataaaatggcagaagcctatagtgagattgggatgaagggagaaaggaggaggggtaaaggtcacgatgggttgtaccaaggattgagcacagccactaaagatacctatgatgcgctccacatgcaggccctgccgccaaga

SEQ ID NO: 24375 - DNA, 600 bp, synthetic construct
  source 1..600: mol_type = other DNA
cacttcagatgccaggtgcagttctacggcctgagcgagaacgacgagtggacccaggacagagccaagcccgtgacccagatcgtgtctgccgaagcctggggcagagccgattgcggctttaccagcgagagctaccagcagggcgtgctgagcgccaccatcctgtacgagatcctgctgggcaaggccaccctgtacgccgtgctggtgtctgccctggtgctgatggctatggtcaagcggaaggacagccggggacgggttaagttttccagatccgcagacgcacccgcttaccaacaagggcagaaccaactctacaatgaacttaatttggggcggagggaagagtacgacgttctggacaaaaggaggggacgagatcccgagatgggcggaaagcctcagcgaaggaagaatccgcaagaggggctttataacgaactccagaaagataaaatggcagaagcctatagtgagattgggatgaagggagaaaggaggaggggtaaaggtcacgatgggttgtaccaaggattgagcacagccactaaagatacctatgatgcgctccacatgcaggccctgccgccaaga

SEQ ID NO: 24376 - DNA, 597 bp, synthetic construct
  source 1..597: mol_type = other DNA
ttcagatgccaggtgcagttctacggcctgagcgagaacgacgagtggacccaggacagagccaagcccgtgacccagatcgtgtctgccgaagcctggggcagagccgattgcggctttaccagcgagagctaccagcagggcgtgctgagcgccaccatcctgtacgagatcctgctgggcaaggccaccctgtacgccgtgctggtgtctgccctggtgctgatggctatggtcaagcggaaggacagccggggacgggttaagttttccagatccgcagacgcacccgcttaccaacaagggcagaaccaactctacaatgaacttaatttggggcggagggaagagtacgacgttctggacaaaaggaggggacgagatcccgagatgggcggaaagcctcagcgaaggaagaatccgcaagaggggctttataacgaactccagaaagataaaatggcagaagcctatagtgagattgggatgaagggagaaaggaggaggggtaaaggtcacgatgggttgtaccaaggattgagcacagccactaaagatacctatgatgcgctccacatgcaggccctgccgccaaga

SEQ ID NO: 24377 - DNA, 594 bp, synthetic construct
  source 1..594: mol_type = other DNA
agatgccaggtgcagttctacggcctgagcgagaacgacgagtggacccaggacagagccaagcccgtgacccagatcgtgtctgccgaagcctggggcagagccgattgcggctttaccagcgagagctaccagcagggcgtgctgagcgccaccatcctgtacgagatcctgctgggcaaggccaccctgtacgccgtgctggtgtctgccctggtgctgatggctatggtcaagcggaaggacagccggggacgggttaagttttccagatccgcagacgcacccgcttaccaacaagggcagaaccaactctacaatgaacttaatttggggcggagggaagagtacgacgttctggacaaaaggaggggacgagatcccgagatgggcggaaagcctcagcgaaggaagaatccgcaagaggggctttataacgaactccagaaagataaaatggcagaagcctatagtgagattgggatgaagggagaaaggaggaggggtaaaggtcacgatgggttgtaccaaggattgagcacagccactaaagatacctatgatgcgctccacatgcaggccctgccgccaaga

SEQ ID NO: 24378 - DNA, 591 bp, synthetic construct
  source 1..591: mol_type = other DNA
tgccaggtgcagttctacggcctgagcgagaacgacgagtggacccaggacagagccaagcccgtgacccagatcgtgtctgccgaagcctggggcagagccgattgcggctttaccagcgagagctaccagcagggcgtgctgagcgccaccatcctgtacgagatcctgctgggcaaggccaccctgtacgccgtgctggtgtctgccctggtgctgatggctatggtcaagcggaaggacagccggggacgggttaagttttccagatccgcagacgcacccgcttaccaacaagggcagaaccaactctacaatgaacttaatttggggcggagggaagagtacgacgttctggacaaaaggaggggacgagatcccgagatgggcggaaagcctcagcgaaggaagaatccgcaagaggggctttataacgaactccagaaagataaaatggcagaagcctatagtgagattgggatgaagggagaaaggaggaggggtaaaggtcacgatgggttgtaccaaggattgagcacagccactaaagatacctatgatgcgctccacatgcaggccctgccgccaaga

SEQ ID NO: 24379 - DNA, 588 bp, synthetic construct
  source 1..588: mol_type = other DNA
caggtgcagttctacggcctgagcgagaacgacgagtggacccaggacagagccaagcccgtgacccagatcgtgtctgccgaagcctggggcagagccgattgcggctttaccagcgagagctaccagcagggcgtgctgagcgccaccatcctgtacgagatcctgctgggcaaggccaccctgtacgccgtgctggtgtctgccctggtgctgatggctatggtcaagcggaaggacagccggggacgggttaagttttccagatccgcagacgcacccgcttaccaacaagggcagaaccaactctacaatgaacttaatttggggcggagggaagagtacgacgttctggacaaaaggaggggacgagatcccgagatgggcggaaagcctcagcgaaggaagaatccgcaagaggggctttataacgaactccagaaagataaaatggcagaagcctatagtgagattgggatgaagggagaaaggaggaggggtaaaggtcacgatgggttgtaccaaggattgagcacagccactaaagatacctatgatgcgctccacatgcaggccctgccgccaaga

SEQ ID NO: 24380 - DNA, 585 bp, synthetic construct
  source 1..585: mol_type = other DNA
gtgcagttctacggcctgagcgagaacgacgagtggacccaggacagagccaagcccgtgacccagatcgtgtctgccgaagcctggggcagagccgattgcggctttaccagcgagagctaccagcagggcgtgctgagcgccaccatcctgtacgagatcctgctgggcaaggccaccctgtacgccgtgctggtgtctgccctggtgctgatggctatggtcaagcggaaggacagccggggacgggttaagttttccagatccgcagacgcacccgcttaccaacaagggcagaaccaactctacaatgaacttaatttggggcggagggaagagtacgacgttctggacaaaaggaggggacgagatcccgagatgggcggaaagcctcagcgaaggaagaatccgcaagaggggctttataacgaactccagaaagataaaatggcagaagcctatagtgagattgggatgaagggagaaaggaggaggggtaaaggtcacgatgggttgtaccaaggattgagcacagccactaaagatacctatgatgcgctccacatgcaggccctgccgccaaga

SEQ ID NO: 24381 - DNA, 582 bp, synthetic construct
  source 1..582: mol_type = other DNA
cagttctacggcctgagcgagaacgacgagtggacccaggacagagccaagcccgtgacccagatcgtgtctgccgaagcctggggcagagccgattgcggctttaccagcgagagctaccagcagggcgtgctgagcgccaccatcctgtacgagatcctgctgggcaaggccaccctgtacgccgtgctggtgtctgccctggtgctgatggctatggtcaagcggaaggacagccggggacgggttaagttttccagatccgcagacgcacccgcttaccaacaagggcagaaccaactctacaatgaacttaatttggggcggagggaagagtacgacgttctggacaaaaggaggggacgagatcccgagatgggcggaaagcctcagcgaaggaagaatccgcaagaggggctttataacgaactccagaaagataaaatggcagaagcctatagtgagattgggatgaagggagaaaggaggaggggtaaaggtcacgatgggttgtaccaaggattgagcacagccactaaagatacctatgatgcgctccacatgcaggccctgccgccaaga

SEQ ID NO: 24382 - DNA, 579 bp, synthetic construct
  source 1..579: mol_type = other DNA
ttctacggcctgagcgagaacgacgagtggacccaggacagagccaagcccgtgacccagatcgtgtctgccgaagcctggggcagagccgattgcggctttaccagcgagagctaccagcagggcgtgctgagcgccaccatcctgtacgagatcctgctgggcaaggccaccctgtacgccgtgctggtgtctgccctggtgctgatggctatggtcaagcggaaggacagccggggacgggttaagttttccagatccgcagacgcacccgcttaccaacaagggcagaaccaactctacaatgaacttaatttggggcggagggaagagtacgacgttctggacaaaaggaggggacgagatcccgagatgggcggaaagcctcagcgaaggaagaatccgcaagaggggctttataacgaactccagaaagataaaatggcagaagcctatagtgagattgggatgaagggagaaaggaggaggggtaaaggtcacgatgggttgtaccaaggattgagcacagccactaaagatacctatgatgcgctccacatgcaggccctgccgccaaga

SEQ ID NO: 24383 - DNA, 576 bp, synthetic construct
  source 1..576: mol_type = other DNA
tacggcctgagcgagaacgacgagtggacccaggacagagccaagcccgtgacccagatcgtgtctgccgaagcctggggcagagccgattgcggctttaccagcgagagctaccagcagggcgtgctgagcgccaccatcctgtacgagatcctgctgggcaaggccaccctgtacgccgtgctggtgtctgccctggtgctgatggctatggtcaagcggaaggacagccggggacgggttaagttttccagatccgcagacgcacccgcttaccaacaagggcagaaccaactctacaatgaacttaatttggggcggagggaagagtacgacgttctggacaaaaggaggggacgagatcccgagatgggcggaaagcctcagcgaaggaagaatccgcaagaggggctttataacgaactccagaaagataaaatggcagaagcctatagtgagattgggatgaagggagaaaggaggaggggtaaaggtcacgatgggttgtaccaaggattgagcacagccactaaagatacctatgatgcgctccacatgcaggccctgccgccaaga

SEQ ID NO: 24384 - DNA, 573 bp, synthetic construct
  source 1..573: mol_type = other DNA
ggcctgagcgagaacgacgagtggacccaggacagagccaagcccgtgacccagatcgtgtctgccgaagcctggggcagagccgattgcggctttaccagcgagagctaccagcagggcgtgctgagcgccaccatcctgtacgagatcctgctgggcaaggccaccctgtacgccgtgctggtgtctgccctggtgctgatggctatggtcaagcggaaggacagccggggacgggttaagttttccagatccgcagacgcacccgcttaccaacaagggcagaaccaactctacaatgaacttaatttggggcggagggaagagtacgacgttctggacaaaaggaggggacgagatcccgagatgggcggaaagcctcagcgaaggaagaatccgcaagaggggctttataacgaactccagaaagataaaatggcagaagcctatagtgagattgggatgaagggagaaaggaggaggggtaaaggtcacgatgggttgtaccaaggattgagcacagccactaaagatacctatgatgcgctccacatgcaggccctgccgccaaga

SEQ ID NO: 24385 - DNA, 570 bp, synthetic construct
  source 1..570: mol_type = other DNA
ctgagcgagaacgacgagtggacccaggacagagccaagcccgtgacccagatcgtgtctgccgaagcctggggcagagccgattgcggctttaccagcgagagctaccagcagggcgtgctgagcgccaccatcctgtacgagatcctgctgggcaaggccaccctgtacgccgtgctggtgtctgccctggtgctgatggctatggtcaagcggaaggacagccggggacgggttaagttttccagatccgcagacgcacccgcttaccaacaagggcagaaccaactctacaatgaacttaatttggggcggagggaagagtacgacgttctggacaaaaggaggggacgagatcccgagatgggcggaaagcctcagcgaaggaagaatccgcaagaggggctttataacgaactccagaaagataaaatggcagaagcctatagtgagattgggatgaagggagaaaggaggaggggtaaaggtcacgatgggttgtaccaaggattgagcacagccactaaagatacctatgatgcgctccacatgcaggccctgccgccaaga

SEQ ID NO: 24386 - DNA, 567 bp, synthetic construct
  source 1..567: mol_type = other DNA
agcgagaacgacgagtggacccaggacagagccaagcccgtgacccagatcgtgtctgccgaagcctggggcagagccgattgcggctttaccagcgagagctaccagcagggcgtgctgagcgccaccatcctgtacgagatcctgctgggcaaggccaccctgtacgccgtgctggtgtctgccctggtgctgatggctatggtcaagcggaaggacagccggggacgggttaagttttccagatccgcagacgcacccgcttaccaacaagggcagaaccaactctacaatgaacttaatttggggcggagggaagagtacgacgttctggacaaaaggaggggacgagatcccgagatgggcggaaagcctcagcgaaggaagaatccgcaagaggggctttataacgaactccagaaagataaaatggcagaagcctatagtgagattgggatgaagggagaaaggaggaggggtaaaggtcacgatgggttgtaccaaggattgagcacagccactaaagatacctatgatgcgctccacatgcaggccctgccgccaaga

SEQ ID NO: 24387 - DNA, 564 bp, synthetic construct
  source 1..564: mol_type = other DNA
gagaacgacgagtggacccaggacagagccaagcccgtgacccagatcgtgtctgccgaagcctggggcagagccgattgcggctttaccagcgagagctaccagcagggcgtgctgagcgccaccatcctgtacgagatcctgctgggcaaggccaccctgtacgccgtgctggtgtctgccctggtgctgatggctatggtcaagcggaaggacagccggggacgggttaagttttccagatccgcagacgcacccgcttaccaacaagggcagaaccaactctacaatgaacttaatttggggcggagggaagagtacgacgttctggacaaaaggaggggacgagatcccgagatgggcggaaagcctcagcgaaggaagaatccgcaagaggggctttataacgaactccagaaagataaaatggcagaagcctatagtgagattgggatgaagggagaaaggaggaggggtaaaggtcacgatgggttgtaccaaggattgagcacagccactaaagatacctatgatgcgctccacatgcaggccctgccgccaaga

SEQ ID NO: 24388 - DNA, 561 bp, synthetic construct
  source 1..561: mol_type = other DNA
aacgacgagtggacccaggacagagccaagcccgtgacccagatcgtgtctgccgaagcctggggcagagccgattgcggctttaccagcgagagctaccagcagggcgtgctgagcgccaccatcctgtacgagatcctgctgggcaaggccaccctgtacgccgtgctggtgtctgccctggtgctgatggctatggtcaagcggaaggacagccggggacgggttaagttttccagatccgcagacgcacccgcttaccaacaagggcagaaccaactctacaatgaacttaatttggggcggagggaagagtacgacgttctggacaaaaggaggggacgagatcccgagatgggcggaaagcctcagcgaaggaagaatccgcaagaggggctttataacgaactccagaaagataaaatggcagaagcctatagtgagattgggatgaagggagaaaggaggaggggtaaaggtcacgatgggttgtaccaaggattgagcacagccactaaagatacctatgatgcgctccacatgcaggccctgccgccaaga

SEQ ID NO: 24389 - DNA, 558 bp, synthetic construct
  source 1..558: mol_type = other DNA
gacgagtggacccaggacagagccaagcccgtgacccagatcgtgtctgccgaagcctggggcagagccgattgcggctttaccagcgagagctaccagcagggcgtgctgagcgccaccatcctgtacgagatcctgctgggcaaggccaccctgtacgccgtgctggtgtctgccctggtgctgatggctatggtcaagcggaaggacagccggggacgggttaagttttccagatccgcagacgcacccgcttaccaacaagggcagaaccaactctacaatgaacttaatttggggcggagggaagagtacgacgttctggacaaaaggaggggacgagatcccgagatgggcggaaagcctcagcgaaggaagaatccgcaagaggggctttataacgaactccagaaagataaaatggcagaagcctatagtgagattgggatgaagggagaaaggaggaggggtaaaggtcacgatgggttgtaccaaggattgagcacagccactaaagatacctatgatgcgctccacatgcaggccctgccgccaaga

SEQ ID NO: 24390 - DNA, 555 bp, synthetic construct
  source 1..555: mol_type = other DNA
gagtggacccaggacagagccaagcccgtgacccagatcgtgtctgccgaagcctggggcagagccgattgcggctttaccagcgagagctaccagcagggcgtgctgagcgccaccatcctgtacgagatcctgctgggcaaggccaccctgtacgccgtgctggtgtctgccctggtgctgatggctatggtcaagcggaaggacagccggggacgggttaagttttccagatccgcagacgcacccgcttaccaacaagggcagaaccaactctacaatgaacttaatttggggcggagggaagagtacgacgttctggacaaaaggaggggacgagatcccgagatgggcggaaagcctcagcgaaggaagaatccgcaagaggggctttataacgaactccagaaagataaaatggcagaagcctatagtgagattgggatgaagggagaaaggaggaggggtaaaggtcacgatgggttgtaccaaggattgagcacagccactaaagatacctatgatgcgctccacatgcaggccctgccgccaaga

SEQ ID NO: 24391 - DNA, 552 bp, synthetic construct
  source 1..552: mol_type = other DNA
tggacccaggacagagccaagcccgtgacccagatcgtgtctgccgaagcctggggcagagccgattgcggctttaccagcgagagctaccagcagggcgtgctgagcgccaccatcctgtacgagatcctgctgggcaaggccaccctgtacgccgtgctggtgtctgccctggtgctgatggctatggtcaagcggaaggacagccggggacgggttaagttttccagatccgcagacgcacccgcttaccaacaagggcagaaccaactctacaatgaacttaatttggggcggagggaagagtacgacgttctggacaaaaggaggggacgagatcccgagatgggcggaaagcctcagcgaaggaagaatccgcaagaggggctttataacgaactccagaaagataaaatggcagaagcctatagtgagattgggatgaagggagaaaggaggaggggtaaaggtcacgatgggttgtaccaaggattgagcacagccactaaagatacctatgatgcgctccacatgcaggccctgccgccaaga

SEQ ID NO: 24392 - DNA, 549 bp, synthetic construct
  source 1..549: mol_type = other DNA
acccaggacagagccaagcccgtgacccagatcgtgtctgccgaagcctggggcagagccgattgcggctttaccagcgagagctaccagcagggcgtgctgagcgccaccatcctgtacgagatcctgctgggcaaggccaccctgtacgccgtgctggtgtctgccctggtgctgatggctatggtcaagcggaaggacagccggggacgggttaagttttccagatccgcagacgcacccgcttaccaacaagggcagaaccaactctacaatgaacttaatttggggcggagggaagagtacgacgttctggacaaaaggaggggacgagatcccgagatgggcggaaagcctcagcgaaggaagaatccgcaagaggggctttataacgaactccagaaagataaaatggcagaagcctatagtgagattgggatgaagggagaaaggaggaggggtaaaggtcacgatgggttgtaccaaggattgagcacagccactaaagatacctatgatgcgctccacatgcaggccctgccgccaaga

SEQ ID NO: 24393 - DNA, 546 bp, synthetic construct
  source 1..546: mol_type = other DNA
caggacagagccaagcccgtgacccagatcgtgtctgccgaagcctggggcagagccgattgcggctttaccagcgagagctaccagcagggcgtgctgagcgccaccatcctgtacgagatcctgctgggcaaggccaccctgtacgccgtgctggtgtctgccctggtgctgatggctatggtcaagcggaaggacagccggggacgggttaagttttccagatccgcagacgcacccgcttaccaacaagggcagaaccaactctacaatgaacttaatttggggcggagggaagagtacgacgttctggacaaaaggaggggacgagatcccgagatgggcggaaagcctcagcgaaggaagaatccgcaagaggggctttataacgaactccagaaagataaaatggcagaagcctatagtgagattgggatgaagggagaaaggaggaggggtaaaggtcacgatgggttgtaccaaggattgagcacagccactaaagatacctatgatgcgctccacatgcaggccctgccgccaaga

SEQ ID NO: 24394 - DNA, 543 bp, synthetic construct
  source 1..543: mol_type = other DNA
gacagagccaagcccgtgacccagatcgtgtctgccgaagcctggggcagagccgattgcggctttaccagcgagagctaccagcagggcgtgctgagcgccaccatcctgtacgagatcctgctgggcaaggccaccctgtacgccgtgctggtgtctgccctggtgctgatggctatggtcaagcggaaggacagccggggacgggttaagttttccagatccgcagacgcacccgcttaccaacaagggcagaaccaactctacaatgaacttaatttggggcggagggaagagtacgacgttctggacaaaaggaggggacgagatcccgagatgggcggaaagcctcagcgaaggaagaatccgcaagaggggctttataacgaactccagaaagataaaatggcagaagcctatagtgagattgggatgaagggagaaaggaggaggggtaaaggtcacgatgggttgtaccaaggattgagcacagccactaaagatacctatgatgcgctccacatgcaggccctgccgccaaga

SEQ ID NO: 24395 - DNA, 540 bp, synthetic construct
  source 1..540: mol_type = other DNA
agagccaagcccgtgacccagatcgtgtctgccgaagcctggggcagagccgattgcggctttaccagcgagagctaccagcagggcgtgctgagcgccaccatcctgtacgagatcctgctgggcaaggccaccctgtacgccgtgctggtgtctgccctggtgctgatggctatggtcaagcggaaggacagccggggacgggttaagttttccagatccgcagacgcacccgcttaccaacaagggcagaaccaactctacaatgaacttaatttggggcggagggaagagtacgacgttctggacaaaaggaggggacgagatcccgagatgggcggaaagcctcagcgaaggaagaatccgcaagaggggctttataacgaactccagaaagataaaatggcagaagcctatagtgagattgggatgaagggagaaaggaggaggggtaaaggtcacgatgggttgtaccaaggattgagcacagccactaaagatacctatgatgcgctccacatgcaggccctgccgccaaga

SEQ ID NO: 24396 - DNA, 537 bp, synthetic construct
  source 1..537: mol_type = other DNA
gccaagcccgtgacccagatcgtgtctgccgaagcctggggcagagccgattgcggctttaccagcgagagctaccagcagggcgtgctgagcgccaccatcctgtacgagatcctgctgggcaaggccaccctgtacgccgtgctggtgtctgccctggtgctgatggctatggtcaagcggaaggacagccggggacgggttaagttttccagatccgcagacgcacccgcttaccaacaagggcagaaccaactctacaatgaacttaatttggggcggagggaagagtacgacgttctggacaaaaggaggggacgagatcccgagatgggcggaaagcctcagcgaaggaagaatccgcaagaggggctttataacgaactccagaaagataaaatggcagaagcctatagtgagattgggatgaagggagaaaggaggaggggtaaaggtcacgatgggttgtaccaaggattgagcacagccactaaagatacctatgatgcgctccacatgcaggccctgccgccaaga

SEQ ID NO: 24397 - DNA, 534 bp, synthetic construct
  source 1..534: mol_type = other DNA
aagcccgtgacccagatcgtgtctgccgaagcctggggcagagccgattgcggctttaccagcgagagctaccagcagggcgtgctgagcgccaccatcctgtacgagatcctgctgggcaaggccaccctgtacgccgtgctggtgtctgccctggtgctgatggctatggtcaagcggaaggacagccggggacgggttaagttttccagatccgcagacgcacccgcttaccaacaagggcagaaccaactctacaatgaacttaatttggggcggagggaagagtacgacgttctggacaaaaggaggggacgagatcccgagatgggcggaaagcctcagcgaaggaagaatccgcaagaggggctttataacgaactccagaaagataaaatggcagaagcctatagtgagattgggatgaagggagaaaggaggaggggtaaaggtcacgatgggttgtaccaaggattgagcacagccactaaagatacctatgatgcgctccacatgcaggccctgccgccaaga

SEQ ID NO: 24398 - DNA, 531 bp, synthetic construct
  source 1..531: mol_type = other DNA
cccgtgacccagatcgtgtctgccgaagcctggggcagagccgattgcggctttaccagcgagagctaccagcagggcgtgctgagcgccaccatcctgtacgagatcctgctgggcaaggccaccctgtacgccgtgctggtgtctgccctggtgctgatggctatggtcaagcggaaggacagccggggacgggttaagttttccagatccgcagacgcacccgcttaccaacaagggcagaaccaactctacaatgaacttaatttggggcggagggaagagtacgacgttctggacaaaaggaggggacgagatcccgagatgggcggaaagcctcagcgaaggaagaatccgcaagaggggctttataacgaactccagaaagataaaatggcagaagcctatagtgagattgggatgaagggagaaaggaggaggggtaaaggtcacgatgggttgtaccaaggattgagcacagccactaaagatacctatgatgcgctccacatgcaggccctgccgccaaga

SEQ ID NO: 24399 - DNA, 528 bp, synthetic construct
  source 1..528: mol_type = other DNA
gtgacccagatcgtgtctgccgaagcctggggcagagccgattgcggctttaccagcgagagctaccagcagggcgtgctgagcgccaccatcctgtacgagatcctgctgggcaaggccaccctgtacgccgtgctggtgtctgccctggtgctgatggctatggtcaagcggaaggacagccggggacgggttaagttttccagatccgcagacgcacccgcttaccaacaagggcagaaccaactctacaatgaacttaatttggggcggagggaagagtacgacgttctggacaaaaggaggggacgagatcccgagatgggcggaaagcctcagcgaaggaagaatccgcaagaggggctttataacgaactccagaaagataaaatggcagaagcctatagtgagattgggatgaagggagaaaggaggaggggtaaaggtcacgatgggttgtaccaaggattgagcacagccactaaagatacctatgatgcgctccacatgcaggccctgccgccaaga

SEQ ID NO: 24400 - DNA, 525 bp, synthetic construct
  source 1..525: mol_type = other DNA
acccagatcgtgtctgccgaagcctggggcagagccgattgcggctttaccagcgagagctaccagcagggcgtgctgagcgccaccatcctgtacgagatcctgctgggcaaggccaccctgtacgccgtgctggtgtctgccctggtgctgatggctatggtcaagcggaaggacagccggggacgggttaagttttccagatccgcagacgcacccgcttaccaacaagggcagaaccaactctacaatgaacttaatttggggcggagggaagagtacgacgttctggacaaaaggaggggacgagatcccgagatgggcggaaagcctcagcgaaggaagaatccgcaagaggggctttataacgaactccagaaagataaaatggcagaagcctatagtgagattgggatgaagggagaaaggaggaggggtaaaggtcacgatgggttgtaccaaggattgagcacagccactaaagatacctatgatgcgctccacatgcaggccctgccgccaaga

SEQ ID NO: 24401 - DNA, 522 bp, synthetic construct
  source 1..522: mol_type = other DNA
cagatcgtgtctgccgaagcctggggcagagccgattgcggctttaccagcgagagctaccagcagggcgtgctgagcgccaccatcctgtacgagatcctgctgggcaaggccaccctgtacgccgtgctggtgtctgccctggtgctgatggctatggtcaagcggaaggacagccggggacgggttaagttttccagatccgcagacgcacccgcttaccaacaagggcagaaccaactctacaatgaacttaatttggggcggagggaagagtacgacgttctggacaaaaggaggggacgagatcccgagatgggcggaaagcctcagcgaaggaagaatccgcaagaggggctttataacgaactccagaaagataaaatggcagaagcctatagtgagattgggatgaagggagaaaggaggaggggtaaaggtcacgatgggttgtaccaaggattgagcacagccactaaagatacctatgatgcgctccacatgcaggccctgccgccaaga

SEQ ID NO: 24402 - DNA, 519 bp, synthetic construct
  source 1..519: mol_type = other DNA
atcgtgtctgccgaagcctggggcagagccgattgcggctttaccagcgagagctaccagcagggcgtgctgagcgccaccatcctgtacgagatcctgctgggcaaggccaccctgtacgccgtgctggtgtctgccctggtgctgatggctatggtcaagcggaaggacagccggggacgggttaagttttccagatccgcagacgcacccgcttaccaacaagggcagaaccaactctacaatgaacttaatttggggcggagggaagagtacgacgttctggacaaaaggaggggacgagatcccgagatgggcggaaagcctcagcgaaggaagaatccgcaagaggggctttataacgaactccagaaagataaaatggcagaagcctatagtgagattgggatgaagggagaaaggaggaggggtaaaggtcacgatgggttgtaccaaggattgagcacagccactaaagatacctatgatgcgctccacatgcaggccctgccgccaaga

SEQ ID NO: 24403 - DNA, 516 bp, synthetic construct
  source 1..516: mol_type = other DNA
gtgtctgccgaagcctggggcagagccgattgcggctttaccagcgagagctaccagcagggcgtgctgagcgccaccatcctgtacgagatcctgctgggcaaggccaccctgtacgccgtgctggtgtctgccctggtgctgatggctatggtcaagcggaaggacagccggggacgggttaagttttccagatccgcagacgcacccgcttaccaacaagggcagaaccaactctacaatgaacttaatttggggcggagggaagagtacgacgttctggacaaaaggaggggacgagatcccgagatgggcggaaagcctcagcgaaggaagaatccgcaagaggggctttataacgaactccagaaagataaaatggcagaagcctatagtgagattgggatgaagggagaaaggaggaggggtaaaggtcacgatgggttgtaccaaggattgagcacagccactaaagatacctatgatgcgctccacatgcaggccctgccgccaaga

SEQ ID NO: 24404 - DNA, 513 bp, synthetic construct
  source 1..513: mol_type = other DNA
tctgccgaagcctggggcagagccgattgcggctttaccagcgagagctaccagcagggcgtgctgagcgccaccatcctgtacgagatcctgctgggcaaggccaccctgtacgccgtgctggtgtctgccctggtgctgatggctatggtcaagcggaaggacagccggggacgggttaagttttccagatccgcagacgcacccgcttaccaacaagggcagaaccaactctacaatgaacttaatttggggcggagggaagagtacgacgttctggacaaaaggaggggacgagatcccgagatgggcggaaagcctcagcgaaggaagaatccgcaagaggggctttataacgaactccagaaagataaaatggcagaagcctatagtgagattgggatgaagggagaaaggaggaggggtaaaggtcacgatgggttgtaccaaggattgagcacagccactaaagatacctatgatgcgctccacatgcaggccctgccgccaaga

SEQ ID NO: 24405 - DNA, 510 bp, synthetic construct
  source 1..510: mol_type = other DNA
gccgaagcctggggcagagccgattgcggctttaccagcgagagctaccagcagggcgtgctgagcgccaccatcctgtacgagatcctgctgggcaaggccaccctgtacgccgtgctggtgtctgccctggtgctgatggctatggtcaagcggaaggacagccggggacgggttaagttttccagatccgcagacgcacccgcttaccaacaagggcagaaccaactctacaatgaacttaatttggggcggagggaagagtacgacgttctggacaaaaggaggggacgagatcccgagatgggcggaaagcctcagcgaaggaagaatccgcaagaggggctttataacgaactccagaaagataaaatggcagaagcctatagtgagattgggatgaagggagaaaggaggaggggtaaaggtcacgatgggttgtaccaaggattgagcacagccactaaagatacctatgatgcgctccacatgcaggccctgccgccaaga

SEQ ID NO: 24406 - DNA, 507 bp, synthetic construct
  source 1..507: mol_type = other DNA
gaagcctggggcagagccgattgcggctttaccagcgagagctaccagcagggcgtgctgagcgccaccatcctgtacgagatcctgctgggcaaggccaccctgtacgccgtgctggtgtctgccctggtgctgatggctatggtcaagcggaaggacagccggggacgggttaagttttccagatccgcagacgcacccgcttaccaacaagggcagaaccaactctacaatgaacttaatttggggcggagggaagagtacgacgttctggacaaaaggaggggacgagatcccgagatgggcggaaagcctcagcgaaggaagaatccgcaagaggggctttataacgaactccagaaagataaaatggcagaagcctatagtgagattgggatgaagggagaaaggaggaggggtaaaggtcacgatgggttgtaccaaggattgagcacagccactaaagatacctatgatgcgctccacatgcaggccctgccgccaaga

SEQ ID NO: 24407 - DNA, 504 bp, synthetic construct
  source 1..504: mol_type = other DNA
gcctggggcagagccgattgcggctttaccagcgagagctaccagcagggcgtgctgagcgccaccatcctgtacgagatcctgctgggcaaggccaccctgtacgccgtgctggtgtctgccctggtgctgatggctatggtcaagcggaaggacagccggggacgggttaagttttccagatccgcagacgcacccgcttaccaacaagggcagaaccaactctacaatgaacttaatttggggcggagggaagagtacgacgttctggacaaaaggaggggacgagatcccgagatgggcggaaagcctcagcgaaggaagaatccgcaagaggggctttataacgaactccagaaagataaaatggcagaagcctatagtgagattgggatgaagggagaaaggaggaggggtaaaggtcacgatgggttgtaccaaggattgagcacagccactaaagatacctatgatgcgctccacatgcaggccctgccgccaaga

SEQ ID NO: 24408 - DNA, 501 bp, synthetic construct
  source 1..501: mol_type = other DNA
tggggcagagccgattgcggctttaccagcgagagctaccagcagggcgtgctgagcgccaccatcctgtacgagatcctgctgggcaaggccaccctgtacgccgtgctggtgtctgccctggtgctgatggctatggtcaagcggaaggacagccggggacgggttaagttttccagatccgcagacgcacccgcttaccaacaagggcagaaccaactctacaatgaacttaatttggggcggagggaagagtacgacgttctggacaaaaggaggggacgagatcccgagatgggcggaaagcctcagcgaaggaagaatccgcaagaggggctttataacgaactccagaaagataaaatggcagaagcctatagtgagattgggatgaagggagaaaggaggaggggtaaaggtcacgatgggttgtaccaaggattgagcacagccactaaagatacctatgatgcgctccacatgcaggccctgccgccaaga

SEQ ID NO: 24409 - DNA, 498 bp, synthetic construct; identical to SEQ ID NO: 23951
  source 1..498: mol_type = other DNA

SEQ ID NO: 24410 - DNA, 858 bp, synthetic construct; identical to SEQ ID NO: 23941
  source 1..858: mol_type = other DNA

SEQ ID NO: 24411 - DNA, 855 bp, synthetic construct
  source 1..855: mol_type = other DNA
aagcagctggacgccgacgtgtcccccaagcctaccatcttcctgccctctatcgccgagacaaagctccagaaggccggcacctacctgtgcctgctggaaaagttcttcccagatgtgattaagatccactggcaggaaaagaagtccaacaccatcctgggcagccaggaaggcaacaccatgaagaccaacgacacctacatgaagttcagctggctgaccgtgcccgagaagtccctggacaaagaacacagatgcatcgtgcggcacgaaaacaacaagaacggcgtggaccaggaaatcatcttcccacccatcaagaccgatgtgattacaatggaccccaaggacaactgctccaaggacgccaacgataccctgctgctccagctgaccaacaccagcgcctactacatgtacttgttgctgctgctgaagtccgtggtgtacttcgccatcatcacatgctgcctgctgcggagaaccgccttctgctgcaacggcgagaagtctcgggttaagttttccagatccgcagacgcacccgcttaccaacaagggcagaaccaactctacaatgaacttaatttggggcggagggaagagtacgacgttctggacaaaaggaggggacgagatcccgagatgggcggaaagcctcagcgaaggaagaatccgcaagaggggctttataacgaactccagaaagataaaatggcagaagcctatagtgagattgggatgaagggagaaaggaggaggggtaaaggtcacgatgggttgtaccaaggattgagcacagccactaaagatacctatgatgcgctccacatgcaggccctgccgccaaga

SEQ ID NO: 24412 - DNA, 852 bp, synthetic construct
  source 1..852: mol_type = other DNA
cagctggacgccgacgtgtcccccaagcctaccatcttcctgccctctatcgccgagacaaagctccagaaggccggcacctacctgtgcctgctggaaaagttcttcccagatgtgattaagatccactggcaggaaaagaagtccaacaccatcctgggcagccaggaaggcaacaccatgaagaccaacgacacctacatgaagttcagctggctgaccgtgcccgagaagtccctggacaaagaacacagatgcatcgtgcggcacgaaaacaacaagaacggcgtggaccaggaaatcatcttcccacccatcaagaccgatgtgattacaatggaccccaaggacaactgctccaaggacgccaacgataccctgctgctccagctgaccaacaccagcgcctactacatgtacttgttgctgctgctgaagtccgtggtgtacttcgccatcatcacatgctgcctgctgcggagaaccgccttctgctgcaacggcgagaagtctcgggttaagttttccagatccgcagacgcacccgcttaccaacaagggcagaaccaactctacaatgaacttaatttggggcggagggaagagtacgacgttctggacaaaaggaggggacgagatcccgagatgggcggaaagcctcagcgaaggaagaatccgcaagaggggctttataacgaactccagaaagataaaatggcagaagcctatagtgagattgggatgaagggagaaaggaggaggggtaaaggtcacgatgggttgtaccaaggattgagcacagccactaaagatacctatgatgcgctccacatgcaggccctgccgccaaga

SEQ ID NO: 24413 - DNA, 849 bp, synthetic construct
  source 1..849: mol_type = other DNA
ctggacgccgacgtgtcccccaagcctaccatcttcctgccctctatcgccgagacaaagctccagaaggccggcacctacctgtgcctgctggaaaagttcttcccagatgtgattaagatccactggcaggaaaagaagtccaacaccatcctgggcagccaggaaggcaacaccatgaagaccaacgacacctacatgaagttcagctggctgaccgtgcccgagaagtccctggacaaagaacacagatgcatcgtgcggcacgaaaacaacaagaacggcgtggaccaggaaatcatcttcccacccatcaagaccgatgtgattacaatggaccccaaggacaactgctccaaggacgccaacgataccctgctgctccagctgaccaacaccagcgcctactacatgtacttgttgctgctgctgaagtccgtggtgtacttcgccatcatcacatgctgcctgctgcggagaaccgccttctgctgcaacggcgagaagtctcgggttaagttttccagatccgcagacgcacccgcttaccaacaagggcagaaccaactctacaatgaacttaatttggggcggagggaagagtacgacgttctggacaaaaggaggggacgagatcccgagatgggcggaaagcctcagcgaaggaagaatccgcaagaggggctttataacgaactccagaaagataaaatggcagaagcctatagtgagattgggatgaagggagaaaggaggaggggtaaaggtcacgatgggttgtaccaaggattgagcacagccactaaagatacctatgatgcgctccacatgcaggccctgccgccaaga

SEQ ID NO: 24414 - DNA, 846 bp, synthetic construct
  source 1..846: mol_type = other DNA
gacgccgacgtgtcccccaagcctaccatcttcctgccctctatcgccgagacaaagctccagaaggccggcacctacctgtgcctgctggaaaagttcttcccagatgtgattaagatccactggcaggaaaagaagtccaacaccatcctgggcagccaggaaggcaacaccatgaagaccaacgacacctacatgaagttcagctggctgaccgtgcccgagaagtccctggacaaagaacacagatgcatcgtgcggcacgaaaacaacaagaacggcgtggaccaggaaatcatcttcccacccatcaagaccgatgtgattacaatggaccccaaggacaactgctccaaggacgccaacgataccctgctgctccagctgaccaacaccagcgcctactacatgtacttgttgctgctgctgaagtccgtggtgtacttcgccatcatcacatgctgcctgctgcggagaaccgccttctgctgcaacggcgagaagtctcgggttaagttttccagatccgcagacgcacccgcttaccaacaagggcagaaccaactctacaatgaacttaatttggggcggagggaagagtacgacgttctggacaaaaggaggggacgagatcccgagatgggcggaaagcctcagcgaaggaagaatccgcaagaggggctttataacgaactccagaaagataaaatggcagaagcctatagtgagattgggatgaagggagaaaggaggaggggtaaaggtcacgatgggttgtaccaaggattgagcacagccactaaagatacctatgatgcgctccacatgcaggccctgccgccaaga

SEQ ID NO: 24415 - DNA, 843 bp, synthetic construct; identical to SEQ ID NO: 23954
  source 1..843: mol_type = other DNA

SEQ ID NO: 24416 - DNA, 840 bp, synthetic construct
  source 1..840: mol_type = other DNA
gacgtgtcccccaagcctaccatcttcctgccctctatcgccgagacaaagctccagaaggccggcacctacctgtgcctgctggaaaagttcttcccagatgtgattaagatccactggcaggaaaagaagtccaacaccatcctgggcagccaggaaggcaacaccatgaagaccaacgacacctacatgaagttcagctggctgaccgtgcccgagaagtccctggacaaagaacacagatgcatcgtgcggcacgaaaacaacaagaacggcgtggaccaggaaatcatcttcccacccatcaagaccgatgtgattacaatggaccccaaggacaactgctccaaggacgccaacgataccctgctgctccagctgaccaacaccagcgcctactacatgtacttgttgctgctgctgaagtccgtggtgtacttcgccatcatcacatgctgcctgctgcggagaaccgccttctgctgcaacggcgagaagtctcgggttaagttttccagatccgcagacgcacccgcttaccaacaagggcagaaccaactctacaatgaacttaatttggggcggagggaagagtacgacgttctggacaaaaggaggggacgagatcccgagatgggcggaaagcctcagcgaaggaagaatccgcaagaggggctttataacgaactccagaaagataaaatggcagaagcctatagtgagattgggatgaagggagaaaggaggaggggtaaaggtcacgatgggttgtaccaaggattgagcacagccactaaagatacctatgatgcgctccacatgcaggccctgccgccaaga

SEQ ID NO: 24417 - DNA, 837 bp, synthetic construct; identical to SEQ ID NO: 23955
  source 1..837: mol_type = other DNA

SEQ ID NO: 24418 - DNA, 834 bp, synthetic construct
  source 1..834: mol_type = other DNA
tcccccaagcctaccatcttcctgccctctatcgccgagacaaagctccagaaggccggcacctacctgtgcctgctggaaaagttcttcccagatgtgattaagatccactggcaggaaaagaagtccaacaccatcctgggcagccaggaaggcaacaccatgaagaccaacgacacctacatgaagttcagctggctgaccgtgcccgagaagtccctggacaaagaacacagatgcatcgtgcggcacgaaaacaacaagaacggcgtggaccaggaaatcatcttcccacccatcaagaccgatgtgattacaatggaccccaaggacaactgctccaaggacgccaacgataccctgctgctccagctgaccaacaccagcgcctactacatgtacttgttgctgctgctgaagtccgtggtgtacttcgccatcatcacatgctgcctgctgcggagaaccgccttctgctgcaacggcgagaagtctcgggttaagttttccagatccgcagacgcacccgcttaccaacaagggcagaaccaactctacaatgaacttaatttggggcggagggaagagtacgacgttctggacaaaaggaggggacgagatcccgagatgggcggaaagcctcagcgaaggaagaatccgcaagaggggctttataacgaactccagaaagataaaatggcagaagcctatagtgagattgggatgaagggagaaaggaggaggggtaaaggtcacgatgggttgtaccaaggattgagcacagccactaaagatacctatgatgcgctccacatgcaggccctgccgccaaga

SEQ ID NO: 24419 - DNA, 831 bp, synthetic construct
  source 1..831: mol_type = other DNA
cccaagcctaccatcttcctgccctctatcgccgagacaaagctccagaaggccggcacctacctgtgcctgctggaaaagttcttcccagatgtgattaagatccactggcaggaaaagaagtccaacaccatcctgggcagccaggaaggcaacaccatgaagaccaacgacacctacatgaagttcagctggctgaccgtgcccgagaagtccctggacaaagaacacagatgcatcgtgcggcacgaaaacaacaagaacggcgtggaccaggaaatcatcttcccacccatcaagaccgatgtgattacaatggaccccaaggacaactgctccaaggacgccaacgataccctgctgctccagctgaccaacaccagcgcctactacatgtacttgttgctgctgctgaagtccgtggtgtacttcgccatcatcacatgctgcctgctgcggagaaccgccttctgctgcaacggcgagaagtctcgggttaagttttccagatccgcagacgcacccgcttaccaacaagggcagaaccaactctacaatgaacttaatttggggcggagggaagagtacgacgttctggacaaaaggaggggacgagatcccgagatgggcggaaagcctcagcgaaggaagaatccgcaagaggggctttataacgaactccagaaagataaaatggcagaagcctatagtgagattgggatgaagggagaaaggaggaggggtaaaggtcacgatgggttgtaccaaggattgagcacagccactaaagatacctatgatgcgctccacatgcaggccctgccgccaaga

SEQ ID NO: 24420 - DNA, 828 bp, synthetic construct
  source 1..828: mol_type = other DNA
aagcctaccatcttcctgccctctatcgccgagacaaagctccagaaggccggcacctacctgtgcctgctggaaaagttcttcccagatgtgattaagatccactggcaggaaaagaagtccaacaccatcctgggcagccaggaaggcaacaccatgaagaccaacgacacctacatgaagttcagctggctgaccgtgcccgagaagtccctggacaaagaacacagatgcatcgtgcggcacgaaaacaacaagaacggcgtggaccaggaaatcatcttcccacccatcaagaccgatgtgattacaatggaccccaaggacaactgctccaaggacgccaacgataccctgctgctccagctgaccaacaccagcgcctactacatgtacttgttgctgctgctgaagtccgtggtgtacttcgccatcatcacatgctgcctgctgcggagaaccgccttctgctgcaacggcgagaagtctcgggttaagttttccagatccgcagacgcacccgcttaccaacaagggcagaaccaactctacaatgaacttaatttggggcggagggaagagtacgacgttctggacaaaaggaggggacgagatcccgagatgggcggaaagcctcagcgaaggaagaatccgcaagaggggctttataacgaactccagaaagataaaatggcagaagcctatagtgagattgggatgaagggagaaaggaggaggggtaaaggtcacgatgggttgtaccaaggattgagcacagccactaaagatacctatgatgcgctccacatgcaggccctgccgccaaga

SEQ ID NO: 24421 - DNA, 825 bp, synthetic construct
  source 1..825: mol_type = other DNA
cctaccatcttcctgccctctatcgccgagacaaagctccagaaggccggcacctacctgtgcctgctggaaaagttcttcccagatgtgattaagatccactggcaggaaaagaagtccaacaccatcctgggcagccaggaaggcaacaccatgaagaccaacgacacctacatgaagttcagctggctgaccgtgcccgagaagtccctggacaaagaacacagatgcatcgtgcggcacgaaaacaacaagaacggcgtggaccaggaaatcatcttcccacccatcaagaccgatgtgattacaatggaccccaaggacaactgctccaaggacgccaacgataccctgctgctccagctgaccaacaccagcgcctactacatgtacttgttgctgctgctgaagtccgtggtgtacttcgccatcatcacatgctgcctgctgcggagaaccgccttctgctgcaacggcgagaagtctcgggttaagttttccagatccgcagacgcacccgcttaccaacaagggcagaaccaactctacaatgaacttaatttggggcggagggaagagtacgacgttctggacaaaaggaggggacgagatcccgagatgggcggaaagcctcagcgaaggaagaatccgcaagaggggctttataacgaactccagaaagataaaatggcagaagcctatagtgagattgggatgaagggagaaaggaggaggggtaaaggtcacgatgggttgtaccaaggattgagcacagccactaaagatacctatgatgcgctccacatgcaggccctgccgccaaga

SEQ ID NO: 24422 - DNA, 822 bp, synthetic construct; identical to SEQ ID NO: 23956
  source 1..822: mol_type = other DNA

SEQ ID NO: 24423 - DNA, 819 bp, synthetic construct
  source 1..819: mol_type = other DNA
atcttcctgccctctatcgccgagacaaagctccagaaggccggcacctacctgtgcctgctggaaaagttcttcccagatgtgattaagatccactggcaggaaaagaagtccaacaccatcctgggcagccaggaaggcaacaccatgaagaccaacgacacctacatgaagttcagctggctgaccgtgcccgagaagtccctggacaaagaacacagatgcatcgtgcggcacgaaaacaacaagaacggcgtggaccaggaaatcatcttcccacccatcaagaccgatgtgattacaatggaccccaaggacaactgctccaaggacgccaacgataccctgctgctccagctgaccaacaccagcgcctactacatgtacttgttgctgctgctgaagtccgtggtgtacttcgccatcatcacatgctgcctgctgcggagaaccgccttctgctgcaacggcgagaagtctcgggttaagttttccagatccgcagacgcacccgcttaccaacaagggcagaaccaactctacaatgaacttaatttggggcggagggaagagtacgacgttctggacaaaaggaggggacgagatcccgagatgggcggaaagcctcagcgaaggaagaatccgcaagaggggctttataacgaactccagaaagataaaatggcagaagcctatagtgagattgggatgaagggagaaaggaggaggggtaaaggtcacgatgggttgtaccaaggattgagcacagccactaaagatacctatgatgcgctccacatgcaggccctgccgccaaga

SEQ ID NO: 24424 - DNA, 816 bp, synthetic construct
  source 1..816: mol_type = other DNA
ttcctgccctctatcgccgagacaaagctccagaaggccggcacctacctgtgcctgctggaaaagttcttcccagatgtgattaagatccactggcaggaaaagaagtccaacaccatcctgggcagccaggaaggcaacaccatgaagaccaacgacacctacatgaagttcagctggctgaccgtgcccgagaagtccctggacaaagaacacagatgcatcgtgcggcacgaaaacaacaagaacggcgtggaccaggaaatcatcttcccacccatcaagaccgatgtgattacaatggaccccaaggacaactgctccaaggacgccaacgataccctgctgctccagctgaccaacaccagcgcctactacatgtacttgttgctgctgctgaagtccgtggtgtacttcgccatcatcacatgctgcctgctgcggagaaccgccttctgctgcaacggcgagaagtctcgggttaagttttccagatccgcagacgcacccgcttaccaacaagggcagaaccaactctacaatgaacttaatttggggcggagggaagagtacgacgttctggacaaaaggaggggacgagatcccgagatgggcggaaagcctcagcgaaggaagaatccgcaagaggggctttataacgaactccagaaagataaaatggcagaagcctatagtgagattgggatgaagggagaaaggaggaggggtaaaggtcacgatgggttgtaccaaggattgagcacagccactaaagatacctatgatgcgctccacatgcaggccctgccgccaaga

SEQ ID NO: 24425 - DNA, 813 bp, synthetic construct
  source 1..813: mol_type = other DNA
ctgccctctatcgccgagacaaagctccagaaggccggcacctacctgtgcctgctggaaaagttcttcccagatgtgattaagatccactggcaggaaaagaagtccaacaccatcctgggcagccaggaaggcaacaccatgaagaccaacgacacctacatgaagttcagctggctgaccgtgcccgagaagtccctggacaaagaacacagatgcatcgtgcggcacgaaaacaacaagaacggcgtggaccaggaaatcatcttcccacccatcaagaccgatgtgattacaatggaccccaaggacaactgctccaaggacgccaacgataccctgctgctccagctgaccaacaccagcgcctactacatgtacttgttgctgctgctgaagtccgtggtgtacttcgccatcatcacatgctgcctgctgcggagaaccgccttctgctgcaacggcgagaagtctcgggttaagttttccagatccgcagacgcacccgcttaccaacaagggcagaaccaactctacaatgaacttaatttggggcggagggaagagtacgacgttctggacaaaaggaggggacgagatcccgagatgggcggaaagcctcagcgaaggaagaatccgcaagaggggctttataacgaactccagaaagataaaatggcagaagcctatagtgagattgggatgaagggagaaaggaggaggggtaaaggtcacgatgggttgtaccaaggattgagcacagccactaaagatacctatgatgcgctccacatgcaggccctgccgccaaga

SEQ ID NO: 24426 - DNA, 810 bp, synthetic construct
  source 1..810: mol_type = other DNA
ccctctatcgccgagacaaagctccagaaggccggcacctacctgtgcctgctggaaaagttcttcccagatgtgattaagatccactggcaggaaaagaagtccaacaccatcctgggcagccaggaaggcaacaccatgaagaccaacgacacctacatgaagttcagctggctgaccgtgcccgagaagtccctggacaaagaacacagatgcatcgtgcggcacgaaaacaacaagaacggcgtggaccaggaaatcatcttcccacccatcaagaccgatgtgattacaatggaccccaaggacaactgctccaaggacgccaacgataccctgctgctccagctgaccaacaccagcgcctactacatgtacttgttgctgctgctgaagtccgtggtgtacttcgccatcatcacatgctgcctgctgcggagaaccgccttctgctgcaacggcgagaagtctcgggttaagttttccagatccgcagacgcacccgcttaccaacaagggcagaaccaactctacaatgaacttaatttggggcggagggaagagtacgacgttctggacaaaaggaggggacgagatcccgagatgggcggaaagcctcagcgaaggaagaatccgcaagaggggctttataacgaactccagaaagataaaatggcagaagcctatagtgagattgggatgaagggagaaaggaggaggggtaaaggtcacgatgggttgtaccaaggattgagcacagccactaaagatacctatgatgcgctccacatgcaggccctgccgccaaga

SEQ ID NO: 24427 - DNA, 807 bp, synthetic construct
  source 1..807: mol_type = other DNA
tctatcgccgagacaaagctccagaaggccggcacctacctgtgcctgctggaaaagttcttcccagatgtgattaagatccactggcaggaaaagaagtccaacaccatcctgggcagccaggaaggcaacaccatgaagaccaacgacacctacatgaagttcagctggctgaccgtgcccgagaagtccctggacaaagaacacagatgcatcgtgcggcacgaaaacaacaagaacggcgtggaccaggaaatcatcttcccacccatcaagaccgatgtgattacaatggaccccaaggacaactgctccaaggacgccaacgataccctgctgctccagctgaccaacaccagcgcctactacatgtacttgttgctgctgctgaagtccgtggtgtacttcgccatcatcacatgctgcctgctgcggagaaccgccttctgctgcaacggcgagaagtctcgggttaagttttccagatccgcagacgcacccgcttaccaacaagggcagaaccaactctacaatgaacttaatttggggcggagggaagagtacgacgttctggacaaaaggaggggacgagatcccgagatgggcggaaagcctcagcgaaggaagaatccgcaagaggggctttataacgaactccagaaagataaaatggcagaagcctatagtgagattgggatgaagggagaaaggaggaggggtaaaggtcacgatgggttgtaccaaggattgagcacagccactaaagatacctatgatgcgctccacatgcaggccctgccgccaaga

SEQ ID NO: 24428 - DNA, 804 bp, synthetic construct
  source 1..804: mol_type = other DNA
atcgccgagacaaagctccagaaggccggcacctacctgtgcctgctggaaaagttcttcccagatgtgattaagatccactggcaggaaaagaagtccaacaccatcctgggcagccaggaaggcaacaccatgaagaccaacgacacctacatgaagttcagctggctgaccgtgcccgagaagtccctggacaaagaacacagatgcatcgtgcggcacgaaaacaacaagaacggcgtggaccaggaaatcatcttcccacccatcaagaccgatgtgattacaatggaccccaaggacaactgctccaaggacgccaacgataccctgctgctccagctgaccaacaccagcgcctactacatgtacttgttgctgctgctgaagtccgtggtgtacttcgccatcatcacatgctgcctgctgcggagaaccgccttctgctgcaacggcgagaagtctcgggttaagttttccagatccgcagacgcacccgcttaccaacaagggcagaaccaactctacaatgaacttaatttggggcggagggaagagtacgacgttctggacaaaaggaggggacgagatcccgagatgggcggaaagcctcagcgaaggaagaatccgcaagaggggctttataacgaactccagaaagataaaatggcagaagcctatagtgagattgggatgaagggagaaaggaggaggggtaaaggtcacgatgggttgtaccaaggattgagcacagccactaaagatacctatgatgcgctccacatgcaggccctgccgccaaga

SEQ ID NO: 24429 - DNA, 801 bp, synthetic construct
  source 1..801: mol_type = other DNA
gccgagacaaagctccagaaggccggcacctacctgtgcctgctggaaaagttcttcccagatgtgattaagatccactggcaggaaaagaagtccaacaccatcctgggcagccaggaaggcaacaccatgaagaccaacgacacctacatgaagttcagctggctgaccgtgcccgagaagtccctggacaaagaacacagatgcatcgtgcggcacgaaaacaacaagaacggcgtggaccaggaaatcatcttcccacccatcaagaccgatgtgattacaatggaccccaaggacaactgctccaaggacgccaacgataccctgctgctccagctgaccaacaccagcgcctactacatgtacttgttgctgctgctgaagtccgtggtgtacttcgccatcatcacatgctgcctgctgcggagaaccgccttctgctgcaacggcgagaagtctcgggttaagttttccagatccgcagacgcacccgcttaccaacaagggcagaaccaactctacaatgaacttaatttggggcggagggaagagtacgacgttctggacaaaaggaggggacgagatcccgagatgggcggaaagcctcagcgaaggaagaatccgcaagaggggctttataacgaactccagaaagataaaatggcagaagcctatagtgagattgggatgaagggagaaaggaggaggggtaaaggtcacgatgggttgtaccaaggattgagcacagccactaaagatacctatgatgcgctccacatgcaggccctgccgccaaga

SEQ ID NO: 24430 - DNA, 798 bp, synthetic construct
  source 1..798: mol_type = other DNA
gagacaaagctccagaaggccggcacctacctgtgcctgctggaaaagttcttcccagatgtgattaagatccactggcaggaaaagaagtccaacaccatcctgggcagccaggaaggcaacaccatgaagaccaacgacacctacatgaagttcagctggctgaccgtgcccgagaagtccctggacaaagaacacagatgcatcgtgcggcacgaaaacaacaagaacggcgtggaccaggaaatcatcttcccacccatcaagaccgatgtgattacaatggaccccaaggacaactgctccaaggacgccaacgataccctgctgctccagctgaccaacaccagcgcctactacatgtacttgttgctgctgctgaagtccgtggtgtacttcgccatcatcacatgctgcctgctgcggagaaccgccttctgctgcaacggcgagaagtctcgggttaagttttccagatccgcagacgcacccgcttaccaacaagggcagaaccaactctacaatgaacttaatttggggcggagggaagagtacgacgttctggacaaaaggaggggacgagatcccgagatgggcggaaagcctcagcgaaggaagaatccgcaagaggggctttataacgaactccagaaagataaaatggcagaagcctatagtgagattgggatgaagggagaaaggaggaggggtaaaggtcacgatgggttgtaccaaggattgagcacagccactaaagatacctatgatgcgctccacatgcaggccctgccgccaaga

SEQ ID NO: 24431 - DNA, 795 bp, synthetic construct
  source 1..795: mol_type = other DNA
acaaagctccagaaggccggcacctacctgtgcctgctggaaaagttcttcccagatgtgattaagatccactggcaggaaaagaagtccaacaccatcctgggcagccaggaaggcaacaccatgaagaccaacgacacctacatgaagttcagctggctgaccgtgcccgagaagtccctggacaaagaacacagatgcatcgtgcggcacgaaaacaacaagaacggcgtggaccaggaaatcatcttcccacccatcaagaccgatgtgattacaatggaccccaaggacaactgctccaaggacgccaacgataccctgctgctccagctgaccaacaccagcgcctactacatgtacttgttgctgctgctgaagtccgtggtgtacttcgccatcatcacatgctgcctgctgcggagaaccgccttctgctgcaacggcgagaagtctcgggttaagttttccagatccgcagacgcacccgcttaccaacaagggcagaaccaactctacaatgaacttaatttggggcggagggaagagtacgacgttctggacaaaaggaggggacgagatcccgagatgggcggaaagcctcagcgaaggaagaatccgcaagaggggctttataacgaactccagaaagataaaatggcagaagcctatagtgagattgggatgaagggagaaaggaggaggggtaaaggtcacgatgggttgtaccaaggattgagcacagccactaaagatacctatgatgcgctccacatgcaggccctgccgccaaga

SEQ ID NO: 24432 - DNA, 792 bp, synthetic construct
  source 1..792: mol_type = other DNA
aagctccagaaggccggcacctacctgtgcctgctggaaaagttcttcccagatgtgattaagatccactggcaggaaaagaagtccaacaccatcctgggcagccaggaaggcaacaccatgaagaccaacgacacctacatgaagttcagctggctgaccgtgcccgagaagtccctggacaaagaacacagatgcatcgtgcggcacgaaaacaacaagaacggcgtggaccaggaaatcatcttcccacccatcaagaccgatgtgattacaatggaccccaaggacaactgctccaaggacgccaacgataccctgctgctccagctgaccaacaccagcgcctactacatgtacttgttgctgctgctgaagtccgtggtgtacttcgccatcatcacatgctgcctgctgcggagaaccgccttctgctgcaacggcgagaagtctcgggttaagttttccagatccgcagacgcacccgcttaccaacaagggcagaaccaactctacaatgaacttaatttggggcggagggaagagtacgacgttctggacaaaaggaggggacgagatcccgagatgggcggaaagcctcagcgaaggaagaatccgcaagaggggctttataacgaactccagaaagataaaatggcagaagcctatagtgagattgggatgaagggagaaaggaggaggggtaaaggtcacgatgggttgtaccaaggattgagcacagccactaaagatacctatgatgcgctccacatgcaggccctgccgccaaga

SEQ ID NO: 24433 - DNA, 789 bp, synthetic construct
  source 1..789: mol_type = other DNA
ctccagaaggccggcacctacctgtgcctgctggaaaagttcttcccagatgtgattaagatccactggcaggaaaagaagtccaacaccatcctgggcagccaggaaggcaacaccatgaagaccaacgacacctacatgaagttcagctggctgaccgtgcccgagaagtccctggacaaagaacacagatgcatcgtgcggcacgaaaacaacaagaacggcgtggaccaggaaatcatcttcccacccatcaagaccgatgtgattacaatggaccccaaggacaactgctccaaggacgccaacgataccctgctgctccagctgaccaacaccagcgcctactacatgtacttgttgctgctgctgaagtccgtggtgtacttcgccatcatcacatgctgcctgctgcggagaaccgccttctgctgcaacggcgagaagtctcgggttaagttttccagatccgcagacgcacccgcttaccaacaagggcagaaccaactctacaatgaacttaatttggggcggagggaagagtacgacgttctggacaaaaggaggggacgagatcccgagatgggcggaaagcctcagcgaaggaagaatccgcaagaggggctttataacgaactccagaaagataaaatggcagaagcctatagtgagattgggatgaagggagaaaggaggaggggtaaaggtcacgatgggttgtaccaaggattgagcacagccactaaagatacctatgatgcgctccacatgcaggccctgccgccaaga

SEQ ID NO: 24434 - DNA, 786 bp, synthetic construct
  source 1..786: mol_type = other DNA
cagaaggccggcacctacctgtgcctgctggaaaagttcttcccagatgtgattaagatccactggcaggaaaagaagtccaacaccatcctgggcagccaggaaggcaacaccatgaagaccaacgacacctacatgaagttcagctggctgaccgtgcccgagaagtccctggacaaagaacacagatgcatcgtgcggcacgaaaacaacaagaacggcgtggaccaggaaatcatcttcccacccatcaagaccgatgtgattacaatggaccccaaggacaactgctccaaggacgccaacgataccctgctgctccagctgaccaacaccagcgcctactacatgtacttgttgctgctgctgaagtccgtggtgtacttcgccatcatcacatgctgcctgctgcggagaaccgccttctgctgcaacggcgagaagtctcgggttaagttttccagatccgcagacgcacccgcttaccaacaagggcagaaccaactctacaatgaacttaatttggggcggagggaagagtacgacgttctggacaaaaggaggggacgagatcccgagatgggcggaaagcctcagcgaaggaagaatccgcaagaggggctttataacgaactccagaaagataaaatggcagaagcctatagtgagattgggatgaagggagaaaggaggaggggtaaaggtcacgatgggttgtaccaaggattgagcacagccactaaagatacctatgatgcgctccacatgcaggccctgccgccaaga

SEQ ID NO: 24435 - DNA, 783 bp, synthetic construct
  source 1..783: mol_type = other DNA
aaggccggcacctacctgtgcctgctggaaaagttcttcccagatgtgattaagatccactggcaggaaaagaagtccaacaccatcctgggcagccaggaaggcaacaccatgaagaccaacgacacctacatgaagttcagctggctgaccgtgcccgagaagtccctggacaaagaacacagatgcatcgtgcggcacgaaaacaacaagaacggcgtggaccaggaaatcatcttcccacccatcaagaccgatgtgattacaatggaccccaaggacaactgctccaaggacgccaacgataccctgctgctccagctgaccaacaccagcgcctactacatgtacttgttgctgctgctgaagtccgtggtgtacttcgccatcatcacatgctgcctgctgcggagaaccgccttctgctgcaacggcgagaagtctcgggttaagttttccagatccgcagacgcacccgcttaccaacaagggcagaaccaactctacaatgaacttaatttggggcggagggaagagtacgacgttctggacaaaaggaggggacgagatcccgagatgggcggaaagcctcagcgaaggaagaatccgcaagaggggctttataacgaactccagaaagataaaatggcagaagcctatagtgagattgggatgaagggagaaaggaggaggggtaaaggtcacgatgggttgtaccaaggattgagcacagccactaaagatacctatgatgcgctccacatgcaggccctgccgccaaga

SEQ ID NO: 24436 - DNA, 780 bp, synthetic construct
  source 1..780: mol_type = other DNA
gccggcacctacctgtgcctgctggaaaagttcttcccagatgtgattaagatccactggcaggaaaagaagtccaacaccatcctgggcagccaggaaggcaacaccatgaagaccaacgacacctacatgaagttcagctggctgaccgtgcccgagaagtccctggacaaagaacacagatgcatcgtgcggcacgaaaacaacaagaacggcgtggaccaggaaatcatcttcccacccatcaagaccgatgtgattacaatggaccccaaggacaactgctccaaggacgccaacgataccctgctgctccagctgaccaacaccagcgcctactacatgtacttgttgctgctgctgaagtccgtggtgtacttcgccatcatcacatgctgcctgctgcggagaaccgccttctgctgcaacggcgagaagtctcgggttaagttttccagatccgcagacgcacccgcttaccaacaagggcagaaccaactctacaatgaacttaatttggggcggagggaagagtacgacgttctggacaaaaggaggggacgagatcccgagatgggcggaaagcctcagcgaaggaagaatccgcaagaggggctttataacgaactccagaaagataaaatggcagaagcctatagtgagattgggatgaagggagaaaggaggaggggtaaaggtcacgatgggttgtaccaaggattgagcacagccactaaagatacctatgatgcgctccacatgcaggccctgccgccaaga

SEQ ID NO: 24437 - DNA, 777 bp, synthetic construct
  source 1..777: mol_type = other DNA
ggcacctacctgtgcctgctggaaaagttcttcccagatgtgattaagatccactggcaggaaaagaagtccaacaccatcctgggcagccaggaaggcaacaccatgaagaccaacgacacctacatgaagttcagctggctgaccgtgcccgagaagtccctggacaaagaacacagatgcatcgtgcggcacgaaaacaacaagaacggcgtggaccaggaaatcatcttcccacccatcaagaccgatgtgattacaatggaccccaaggacaactgctccaaggacgccaacgataccctgctgctccagctgaccaacaccagcgcctactacatgtacttgttgctgctgctgaagtccgtggtgtacttcgccatcatcacatgctgcctgctgcggagaaccgccttctgctgcaacggcgagaagtctcgggttaagttttccagatccgcagacgcacccgcttaccaacaagggcagaaccaactctacaatgaacttaatttggggcggagggaagagtacgacgttctggacaaaaggaggggacgagatcccgagatgggcggaaagcctcagcgaaggaagaatccgcaagaggggctttataacgaactccagaaagataaaatggcagaagcctatagtgagattgggatgaagggagaaaggaggaggggtaaaggtcacgatgggttgtaccaaggattgagcacagccactaaagatacctatgatgcgctccacatgcaggccctgccgccaaga

SEQ ID NO: 24438 - DNA, 774 bp, synthetic construct
  source 1..774: mol_type = other DNA
acctacctgtgcctgctggaaaagttcttcccagatgtgattaagatccactggcaggaaaagaagtccaacaccatcctgggcagccaggaaggcaacaccatgaagaccaacgacacctacatgaagttcagctggctgaccgtgcccgagaagtccctggacaaagaacacagatgcatcgtgcggcacgaaaacaacaagaacggcgtggaccaggaaatcatcttcccacccatcaagaccgatgtgattacaatggaccccaaggacaactgctccaaggacgccaacgataccctgctgctccagctgaccaacaccagcgcctactacatgtacttgttgctgctgctgaagtccgtggtgtacttcgccatcatcacatgctgcctgctgcggagaaccgccttctgctgcaacggcgagaagtctcgggttaagttttccagatccgcagacgcacccgcttaccaacaagggcagaaccaactctacaatgaacttaatttggggcggagggaagagtacgacgttctggacaaaaggaggggacgagatcccgagatgggcggaaagcctcagcgaaggaagaatccgcaagaggggctttataacgaactccagaaagataaaatggcagaagcctatagtgagattgggatgaagggagaaaggaggaggggtaaaggtcacgatgggttgtaccaaggattgagcacagccactaaagatacctatgatgcgctccacatgcaggccctgccgccaaga

SEQ ID NO: 24439 - DNA, 771 bp, synthetic construct
  source 1..771: mol_type = other DNA
tacctgtgcctgctggaaaagttcttcccagatgtgattaagatccactggcaggaaaagaagtccaacaccatcctgggcagccaggaaggcaacaccatgaagaccaacgacacctacatgaagttcagctggctgaccgtgcccgagaagtccctggacaaagaacacagatgcatcgtgcggcacgaaaacaacaagaacggcgtggaccaggaaatcatcttcccacccatcaagaccgatgtgattacaatggaccccaaggacaactgctccaaggacgccaacgataccctgctgctccagctgaccaacaccagcgcctactacatgtacttgttgctgctgctgaagtccgtggtgtacttcgccatcatcacatgctgcctgctgcggagaaccgccttctgctgcaacggcgagaagtctcgggttaagttttccagatccgcagacgcacccgcttaccaacaagggcagaaccaactctacaatgaacttaatttggggcggagggaagagtacgacgttctggacaaaaggaggggacgagatcccgagatgggcggaaagcctcagcgaaggaagaatccgcaagaggggctttataacgaactccagaaagataaaatggcagaagcctatagtgagattgggatgaagggagaaaggaggaggggtaaaggtcacgatgggttgtaccaaggattgagcacagccactaaagatacctatgatgcgctccacatgcaggccctgccgccaaga

SEQ ID NO: 24440 - DNA, 768 bp, synthetic construct
  source 1..768: mol_type = other DNA
ctgtgcctgctggaaaagttcttcccagatgtgattaagatccactggcaggaaaagaagtccaacaccatcctgggcagccaggaaggcaacaccatgaagaccaacgacacctacatgaagttcagctggctgaccgtgcccgagaagtccctggacaaagaacacagatgcatcgtgcggcacgaaaacaacaagaacggcgtggaccaggaaatcatcttcccacccatcaagaccgatgtgattacaatggaccccaaggacaactgctccaaggacgccaacgataccctgctgctccagctgaccaacaccagcgcctactacatgtacttgttgctgctgctgaagtccgtggtgtacttcgccatcatcacatgctgcctgctgcggagaaccgccttctgctgcaacggcgagaagtctcgggttaagttttccagatccgcagacgcacccgcttaccaacaagggcagaaccaactctacaatgaacttaatttggggcggagggaagagtacgacgttctggacaaaaggaggggacgagatcccgagatgggcggaaagcctcagcgaaggaagaatccgcaagaggggctttataacgaactccagaaagataaaatggcagaagcctatagtgagattgggatgaagggagaaaggaggaggggtaaaggtcacgatgggttgtaccaaggattgagcacagccactaaagatacctatgatgcgctccacatgcaggccctgccgccaaga

SEQ ID NO: 24441 - DNA, 765 bp, synthetic construct
  source 1..765: mol_type = other DNA
tgcctgctggaaaagttcttcccagatgtgattaagatccactggcaggaaaagaagtccaacaccatcctgggcagccaggaaggcaacaccatgaagaccaacgacacctacatgaagttcagctggctgaccgtgcccgagaagtccctggacaaagaacacagatgcatcgtgcggcacgaaaacaacaagaacggcgtggaccaggaaatcatcttcccacccatcaagaccgatgtgattacaatggaccccaaggacaactgctccaaggacgccaacgataccctgctgctccagctgaccaacaccagcgcctactacatgtacttgttgctgctgctgaagtccgtggtgtacttcgccatcatcacatgctgcctgctgcggagaaccgccttctgctgcaacggcgagaagtctcgggttaagttttccagatccgcagacgcacccgcttaccaacaagggcagaaccaactctacaatgaacttaatttggggcggagggaagagtacgacgttctggacaaaaggaggggacgagatcccgagatgggcggaaagcctcagcgaaggaagaatccgcaagaggggctttataacgaactccagaaagataaaatggcagaagcctatagtgagattgggatgaagggagaaaggaggaggggtaaaggtcacgatgggttgtaccaaggattgagcacagccactaaagatacctatgatgcgctccacatgcaggccctgccgccaaga

SEQ ID NO: 24442 - DNA, 762 bp, synthetic construct
  source 1..762: mol_type = other DNA
ctgctggaaaagttcttcccagatgtgattaagatccactggcaggaaaagaagtccaacaccatcctgggcagccaggaaggcaacaccatgaagaccaacgacacctacatgaagttcagctggctgaccgtgcccgagaagtccctggacaaagaacacagatgcatcgtgcggcacgaaaacaacaagaacggcgtggaccaggaaatcatcttcccacccatcaagaccgatgtgattacaatggaccccaaggacaactgctccaaggacgccaacgataccctgctgctccagctgaccaacaccagcgcctactacatgtacttgttgctgctgctgaagtccgtggtgtacttcgccatcatcacatgctgcctgctgcggagaaccgccttctgctgcaacggcgagaagtctcgggttaagttttccagatccgcagacgcacccgcttaccaacaagggcagaaccaactctacaatgaacttaatttggggcggagggaagagtacgacgttctggacaaaaggaggggacgagatcccgagatgggcggaaagcctcagcgaaggaagaatccgcaagaggggctttataacgaactccagaaagataaaatggcagaagcctatagtgagattgggatgaagggagaaaggaggaggggtaaaggtcacgatgggttgtaccaaggattgagcacagccactaaagatacctatgatgcgctccacatgcaggccctgccgccaaga

SEQ ID NO: 24443 - DNA, 759 bp, synthetic construct
  source 1..759: mol_type = other DNA
ctggaaaagttcttcccagatgtgattaagatccactggcaggaaaagaagtccaacaccatcctgggcagccaggaaggcaacaccatgaagaccaacgacacctacatgaagttcagctggctgaccgtgcccgagaagtccctggacaaagaacacagatgcatcgtgcggcacgaaaacaacaagaacggcgtggaccaggaaatcatcttcccacccatcaagaccgatgtgattacaatggaccccaaggacaactgctccaaggacgccaacgataccctgctgctccagctgaccaacaccagcgcctactacatgtacttgttgctgctgctgaagtccgtggtgtacttcgccatcatcacatgctgcctgctgcggagaaccgccttctgctgcaacggcgagaagtctcgggttaagttttccagatccgcagacgcacccgcttaccaacaagggcagaaccaactctacaatgaacttaatttggggcggagggaagagtacgacgttctggacaaaaggaggggacgagatcccgagatgggcggaaagcctcagcgaaggaagaatccgcaagaggggctttataacgaactccagaaagataaaatggcagaagcctatagtgagattgggatgaagggagaaaggaggaggggtaaaggtcacgatgggttgtaccaaggattgagcacagccactaaagatacctatgatgcgctccacatgcaggccctgccgccaaga

SEQ ID NO: 24444 - DNA, 756 bp, synthetic construct
  source 1..756: mol_type = other DNA
gaaaagttcttcccagatgtgattaagatccactggcaggaaaagaagtccaacaccatcctgggcagccaggaaggcaacaccatgaagaccaacgacacctacatgaagttcagctggctgaccgtgcccgagaagtccctggacaaagaacacagatgcatcgtgcggcacgaaaacaacaagaacggcgtggaccaggaaatcatcttcccacccatcaagaccgatgtgattacaatggaccccaaggacaactgctccaaggacgccaacgataccctgctgctccagctgaccaacaccagcgcctactacatgtacttgttgctgctgctgaagtccgtggtgtacttcgccatcatcacatgctgcctgctgcggagaaccgccttctgctgcaacggcgagaagtctcgggttaagttttccagatccgcagacgcacccgcttaccaacaagggcagaaccaactctacaatgaacttaatttggggcggagggaagagtacgacgttctggacaaaaggaggggacgagatcccgagatgggcggaaagcctcagcgaaggaagaatccgcaagaggggctttataacgaactccagaaagataaaatggcagaagcctatagtgagattgggatgaagggagaaaggaggaggggtaaaggtcacgatgggttgtaccaaggattgagcacagccactaaagatacctatgatgcgctccacatgcaggccctgccgccaaga

SEQ ID NO: 24445 - DNA, 753 bp, synthetic construct
  source 1..753: mol_type = other DNA
aagttcttcccagatgtgattaagatccactggcaggaaaagaagtccaacaccatcctgggcagccaggaaggcaacaccatgaagaccaacgacacctacatgaagttcagctggctgaccgtgcccgagaagtccctggacaaagaacacagatgcatcgtgcggcacgaaaacaacaagaacggcgtggaccaggaaatcatcttcccacccatcaagaccgatgtgattacaatggaccccaaggacaactgctccaaggacgccaacgataccctgctgctccagctgaccaacaccagcgcctactacatgtacttgttgctgctgctgaagtccgtggtgtacttcgccatcatcacatgctgcctgctgcggagaaccgccttctgctgcaacggcgagaagtctcgggttaagttttccagatccgcagacgcacccgcttaccaacaagggcagaaccaactctacaatgaacttaatttggggcggagggaagagtacgacgttctggacaaaaggaggggacgagatcccgagatgggcggaaagcctcagcgaaggaagaatccgcaagaggggctttataacgaactccagaaagataaaatggcagaagcctatagtgagattgggatgaagggagaaaggaggaggggtaaaggtcacgatgggttgtaccaaggattgagcacagccactaaagatacctatgatgcgctccacatgcaggccctgccgccaaga

SEQ ID NO: 24446 - DNA, 750 bp, synthetic construct
  source 1..750: mol_type = other DNA
ttcttcccagatgtgattaagatccactggcaggaaaagaagtccaacaccatcctgggcagccaggaaggcaacaccatgaagaccaacgacacctacatgaagttcagctggctgaccgtgcccgagaagtccctggacaaagaacacagatgcatcgtgcggcacgaaaacaacaagaacggcgtggaccaggaaatcatcttcccacccatcaagaccgatgtgattacaatggaccccaaggacaactgctccaaggacgccaacgataccctgctgctccagctgaccaacaccagcgcctactacatgtacttgttgctgctgctgaagtccgtggtgtacttcgccatcatcacatgctgcctgctgcggagaaccgccttctgctgcaacggcgagaagtctcgggttaagttttccagatccgcagacgcacccgcttaccaacaagggcagaaccaactctacaatgaacttaatttggggcggagggaagagtacgacgttctggacaaaaggaggggacgagatcccgagatgggcggaaagcctcagcgaaggaagaatccgcaagaggggctttataacgaactccagaaagataaaatggcagaagcctatagtgagattgggatgaagggagaaaggaggaggggtaaaggtcacgatgggttgtaccaaggattgagcacagccactaaagatacctatgatgcgctccacatgcaggccctgccgccaaga

SEQ ID NO: 24447 - DNA, 747 bp, synthetic construct
  source 1..747: mol_type = other DNA
ttcccagatgtgattaagatccactggcaggaaaagaagtccaacaccatcctgggcagccaggaaggcaacaccatgaagaccaacgacacctacatgaagttcagctggctgaccgtgcccgagaagtccctggacaaagaacacagatgcatcgtgcggcacgaaaacaacaagaacggcgtggaccaggaaatcatcttcccacccatcaagaccgatgtgattacaatggaccccaaggacaactgctccaaggacgccaacgataccctgctgctccagctgaccaacaccagcgcctactacatgtacttgttgctgctgctgaagtccgtggtgtacttcgccatcatcacatgctgcctgctgcggagaaccgccttctgctgcaacggcgagaagtctcgggttaagttttccagatccgcagacgcacccgcttaccaacaagggcagaaccaactctacaatgaacttaatttggggcggagggaagagtacgacgttctggacaaaaggaggggacgagatcccgagatgggcggaaagcctcagcgaaggaagaatccgcaagaggggctttataacgaactccagaaagataaaatggcagaagcctatagtgagattgggatgaagggagaaaggaggaggggtaaaggtcacgatgggttgtaccaaggattgagcacagccactaaagatacctatgatgcgctccacatgcaggccctgccgccaaga

SEQ ID NO: 24448 - DNA, 744 bp, synthetic construct
  source 1..744: mol_type = other DNA
ccagatgtgattaagatccactggcaggaaaagaagtccaacaccatcctgggcagccaggaaggcaacaccatgaagaccaacgacacctacatgaagttcagctggctgaccgtgcccgagaagtccctggacaaagaacacagatgcatcgtgcggcacgaaaacaacaagaacggcgtggaccaggaaatcatcttcccacccatcaagaccgatgtgattacaatggaccccaaggacaactgctccaaggacgccaacgataccctgctgctccagctgaccaacaccagcgcctactacatgtacttgttgctgctgctgaagtccgtggtgtacttcgccatcatcacatgctgcctgctgcggagaaccgccttctgctgcaacggcgagaagtctcgggttaagttttccagatccgcagacgcacccgcttaccaacaagggcagaaccaactctacaatgaacttaatttggggcggagggaagagtacgacgttctggacaaaaggaggggacgagatcccgagatgggcggaaagcctcagcgaaggaagaatccgcaagaggggctttataacgaactccagaaagataaaatggcagaagcctatagtgagattgggatgaagggagaaaggaggaggggtaaaggtcacgatgggttgtaccaaggattgagcacagccactaaagatacctatgatgcgctccacatgcaggccctgccgccaaga

SEQ ID NO: 24449 - DNA, 741 bp, synthetic construct
  source 1..741: mol_type = other DNA
gatgtgattaagatccactggcaggaaaagaagtccaacaccatcctgggcagccaggaaggcaacaccatgaagaccaacgacacctacatgaagttcagctggctgaccgtgcccgagaagtccctggacaaagaacacagatgcatcgtgcggcacgaaaacaacaagaacggcgtggaccaggaaatcatcttcccacccatcaagaccgatgtgattacaatggaccccaaggacaactgctccaaggacgccaacgataccctgctgctccagctgaccaacaccagcgcctactacatgtacttgttgctgctgctgaagtccgtggtgtacttcgccatcatcacatgctgcctgctgcggagaaccgccttctgctgcaacggcgagaagtctcgggttaagttttccagatccgcagacgcacccgcttaccaacaagggcagaaccaactctacaatgaacttaatttggggcggagggaagagtacgacgttctggacaaaaggaggggacgagatcccgagatgggcggaaagcctcagcgaaggaagaatccgcaagaggggctttataacgaactccagaaagataaaatggcagaagcctatagtgagattgggatgaagggagaaaggaggaggggtaaaggtcacgatgggttgtaccaaggattgagcacagccactaaagatacctatgatgcgctccacatgcaggccctgccgccaaga

SEQ ID NO: 24450 - DNA, 738 bp, synthetic construct
  source 1..738: mol_type = other DNA
gtgattaagatccactggcaggaaaagaagtccaacaccatcctgggcagccaggaaggcaacaccatgaagaccaacgacacctacatgaagttcagctggctgaccgtgcccgagaagtccctggacaaagaacacagatgcatcgtgcggcacgaaaacaacaagaacggcgtggaccaggaaatcatcttcccacccatcaagaccgatgtgattacaatggaccccaaggacaactgctccaaggacgccaacgataccctgctgctccagctgaccaacaccagcgcctactacatgtacttgttgctgctgctgaagtccgtggtgtacttcgccatcatcacatgctgcctgctgcggagaaccgccttctgctgcaacggcgagaagtctcgggttaagttttccagatccgcagacgcacccgcttaccaacaagggcagaaccaactctacaatgaacttaatttggggcggagggaagagtacgacgttctggacaaaaggaggggacgagatcccgagatgggcggaaagcctcagcgaaggaagaatccgcaagaggggctttataacgaactccagaaagataaaatggcagaagcctatagtgagattgggatgaagggagaaaggaggaggggtaaaggtcacgatgggttgtaccaaggattgagcacagccactaaagatacctatgatgcgctccacatgcaggccctgccgccaaga

SEQ ID NO: 24451 - DNA, 735 bp, synthetic construct
  source 1..735: mol_type = other DNA
attaagatccactggcaggaaaagaagtccaacaccatcctgggcagccaggaaggcaacaccatgaagaccaacgacacctacatgaagttcagctggctgaccgtgcccgagaagtccctggacaaagaacacagatgcatcgtgcggcacgaaaacaacaagaacggcgtggaccaggaaatcatcttcccacccatcaagaccgatgtgattacaatggaccccaaggacaactgctccaaggacgccaacgataccctgctgctccagctgaccaacaccagcgcctactacatgtacttgttgctgctgctgaagtccgtggtgtacttcgccatcatcacatgctgcctgctgcggagaaccgccttctgctgcaacggcgagaagtctcgggttaagttttccagatccgcagacgcacccgcttaccaacaagggcagaaccaactctacaatgaacttaatttggggcggagggaagagtacgacgttctggacaaaaggaggggacgagatcccgagatgggcggaaagcctcagcgaaggaagaatccgcaagaggggctttataacgaactccagaaagataaaatggcagaagcctatagtgagattgggatgaagggagaaaggaggaggggtaaaggtcacgatgggttgtaccaaggattgagcacagccactaaagatacctatgatgcgctccacatgcaggccctgccgccaaga

SEQ ID NO: 24452 - DNA, 732 bp, synthetic construct
  source 1..732: mol_type = other DNA
aagatccactggcaggaaaagaagtccaacaccatcctgggcagccaggaaggcaacaccatgaagaccaacgacacctacatgaagttcagctggctgaccgtgcccgagaagtccctggacaaagaacacagatgcatcgtgcggcacgaaaacaacaagaacggcgtggaccaggaaatcatcttcccacccatcaagaccgatgtgattacaatggaccccaaggacaactgctccaaggacgccaacgataccctgctgctccagctgaccaacaccagcgcctactacatgtacttgttgctgctgctgaagtccgtggtgtacttcgccatcatcacatgctgcctgctgcggagaaccgccttctgctgcaacggcgagaagtctcgggttaagttttccagatccgcagacgcacccgcttaccaacaagggcagaaccaactctacaatgaacttaatttggggcggagggaagagtacgacgttctggacaaaaggaggggacgagatcccgagatgggcggaaagcctcagcgaaggaagaatccgcaagaggggctttataacgaactccagaaagataaaatggcagaagcctatagtgagattgggatgaagggagaaaggaggaggggtaaaggtcacgatgggttgtaccaaggattgagcacagccactaaagatacctatgatgcgctccacatgcaggccctgccgccaaga

SEQ ID NO: 24453 - DNA, 729 bp, synthetic construct
  source 1..729: mol_type = other DNA
atccactggcaggaaaagaagtccaacaccatcctgggcagccaggaaggcaacaccatgaagaccaacgacacctacatgaagttcagctggctgaccgtgcccgagaagtccctggacaaagaacacagatgcatcgtgcggcacgaaaacaacaagaacggcgtggaccaggaaatcatcttcccacccatcaagaccgatgtgattacaatggaccccaaggacaactgctccaaggacgccaacgataccctgctgctccagctgaccaacaccagcgcctactacatgtacttgttgctgctgctgaagtccgtggtgtacttcgccatcatcacatgctgcctgctgcggagaaccgccttctgctgcaacggcgagaagtctcgggttaagttttccagatccgcagacgcacccgcttaccaacaagggcagaaccaactctacaatgaacttaatttggggcggagggaagagtacgacgttctggacaaaaggaggggacgagatcccgagatgggcggaaagcctcagcgaaggaagaatccgcaagaggggctttataacgaactccagaaagataaaatggcagaagcctatagtgagattgggatgaagggagaaaggaggaggggtaaaggtcacgatgggttgtaccaaggattgagcacagccactaaagatacctatgatgcgctccacatgcaggccctgccgccaaga

SEQ ID NO: 24454 - DNA, 726 bp, synthetic construct
  source 1..726: mol_type = other DNA
cactggcaggaaaagaagtccaacaccatcctgggcagccaggaaggcaacaccatgaagaccaacgacacctacatgaagttcagctggctgaccgtgcccgagaagtccctggacaaagaacacagatgcatcgtgcggcacgaaaacaacaagaacggcgtggaccaggaaatcatcttcccacccatcaagaccgatgtgattacaatggaccccaaggacaactgctccaaggacgccaacgataccctgctgctccagctgaccaacaccagcgcctactacatgtacttgttgctgctgctgaagtccgtggtgtacttcgccatcatcacatgctgcctgctgcggagaaccgccttctgctgcaacggcgagaagtctcgggttaagttttccagatccgcagacgcacccgcttaccaacaagggcagaaccaactctacaatgaacttaatttggggcggagggaagagtacgacgttctggacaaaaggaggggacgagatcccgagatgggcggaaagcctcagcgaaggaagaatccgcaagaggggctttataacgaactccagaaagataaaatggcagaagcctatagtgagattgggatgaagggagaaaggaggaggggtaaaggtcacgatgggttgtaccaaggattgagcacagccactaaagatacctatgatgcgctccacatgcaggccctgccgccaaga

SEQ ID NO: 24455 - DNA, 723 bp, synthetic construct
  source 1..723: mol_type = other DNA
tggcaggaaaagaagtccaacaccatcctgggcagccaggaaggcaacaccatgaagaccaacgacacctacatgaagttcagctggctgaccgtgcccgagaagtccctggacaaagaacacagatgcatcgtgcggcacgaaaacaacaagaacggcgtggaccaggaaatcatcttcccacccatcaagaccgatgtgattacaatggaccccaaggacaactgctccaaggacgccaacgataccctgctgctccagctgaccaacaccagcgcctactacatgtacttgttgctgctgctgaagtccgtggtgtacttcgccatcatcacatgctgcctgctgcggagaaccgccttctgctgcaacggcgagaagtctcgggttaagttttccagatccgcagacgcacccgcttaccaacaagggcagaaccaactctacaatgaacttaatttggggcggagggaagagtacgacgttctggacaaaaggaggggacgagatcccgagatgggcggaaagcctcagcgaaggaagaatccgcaagaggggctttataacgaactccagaaagataaaatggcagaagcctatagtgagattgggatgaagggagaaaggaggaggggtaaaggtcacgatgggttgtaccaaggattgagcacagccactaaagatacctatgatgcgctccacatgcaggccctgccgccaaga

SEQ ID NO: 24456 - DNA, 720 bp, synthetic construct
  source 1..720: mol_type = other DNA
caggaaaagaagtccaacaccatcctgggcagccaggaaggcaacaccatgaagaccaacgacacctacatgaagttcagctggctgaccgtgcccgagaagtccctggacaaagaacacagatgcatcgtgcggcacgaaaacaacaagaacggcgtggaccaggaaatcatcttcccacccatcaagaccgatgtgattacaatggaccccaaggacaactgctccaaggacgccaacgataccctgctgctccagctgaccaacaccagcgcctactacatgtacttgttgctgctgctgaagtccgtggtgtacttcgccatcatcacatgctgcctgctgcggagaaccgccttctgctgcaacggcgagaagtctcgggttaagttttccagatccgcagacgcacccgcttaccaacaagggcagaaccaactctacaatgaacttaatttggggcggagggaagagtacgacgttctggacaaaaggaggggacgagatcccgagatgggcggaaagcctcagcgaaggaagaatccgcaagaggggctttataacgaactccagaaagataaaatggcagaagcctatagtgagattgggatgaagggagaaaggaggaggggtaaaggtcacgatgggttgtaccaaggattgagcacagccactaaagatacctatgatgcgctccacatgcaggccctgccgccaaga

SEQ ID NO: 24457 - DNA, 717 bp, synthetic construct
  source 1..717: mol_type = other DNA
gaaaagaagtccaacaccatcctgggcagccaggaaggcaacaccatgaagaccaacgacacctacatgaagttcagctggctgaccgtgcccgagaagtccctggacaaagaacacagatgcatcgtgcggcacgaaaacaacaagaacggcgtggaccaggaaatcatcttcccacccatcaagaccgatgtgattacaatggaccccaaggacaactgctccaaggacgccaacgataccctgctgctccagctgaccaacaccagcgcctactacatgtacttgttgctgctgctgaagtccgtggtgtacttcgccatcatcacatgctgcctgctgcggagaaccgccttctgctgcaacggcgagaagtctcgggttaagttttccagatccgcagacgcacccgcttaccaacaagggcagaaccaactctacaatgaacttaatttggggcggagggaagagtacgacgttctggacaaaaggaggggacgagatcccgagatgggcggaaagcctcagcgaaggaagaatccgcaagaggggctttataacgaactccagaaagataaaatggcagaagcctatagtgagattgggatgaagggagaaaggaggaggggtaaaggtcacgatgggttgtaccaaggattgagcacagccactaaagatacctatgatgcgctccacatgcaggccctgccgccaaga

SEQ ID NO: 24458 - DNA, 714 bp, synthetic construct
  source 1..714: mol_type = other DNA
aagaagtccaacaccatcctgggcagccaggaaggcaacaccatgaagaccaacgacacctacatgaagttcagctggctgaccgtgcccgagaagtccctggacaaagaacacagatgcatcgtgcggcacgaaaacaacaagaacggcgtggaccaggaaatcatcttcccacccatcaagaccgatgtgattacaatggaccccaaggacaactgctccaaggacgccaacgataccctgctgctccagctgaccaacaccagcgcctactacatgtacttgttgctgctgctgaagtccgtggtgtacttcgccatcatcacatgctgcctgctgcggagaaccgccttctgctgcaacggcgagaagtctcgggttaagttttccagatccgcagacgcacccgcttaccaacaagggcagaaccaactctacaatgaacttaatttggggcggagggaagagtacgacgttctggacaaaaggaggggacgagatcccgagatgggcggaaagcctcagcgaaggaagaatccgcaagaggggctttataacgaactccagaaagataaaatggcagaagcctatagtgagattgggatgaagggagaaaggaggaggggtaaaggtcacgatgggttgtaccaaggattgagcacagccactaaagatacctatgatgcgctccacatgcaggccctgccgccaaga

SEQ ID NO: 24459 - DNA, 711 bp, synthetic construct
  source 1..711: mol_type = other DNA
aagtccaacaccatcctgggcagccaggaaggcaacaccatgaagaccaacgacacctacatgaagttcagctggctgaccgtgcccgagaagtccctggacaaagaacacagatgcatcgtgcggcacgaaaacaacaagaacggcgtggaccaggaaatcatcttcccacccatcaagaccgatgtgattacaatggaccccaaggacaactgctccaaggacgccaacgataccctgctgctccagctgaccaacaccagcgcctactacatgtacttgttgctgctgctgaagtccgtggtgtacttcgccatcatcacatgctgcctgctgcggagaaccgccttctgctgcaacggcgagaagtctcgggttaagttttccagatccgcagacgcacccgcttaccaacaagggcagaaccaactctacaatgaacttaatttggggcggagggaagagtacgacgttctggacaaaaggaggggacgagatcccgagatgggcggaaagcctcagcgaaggaagaatccgcaagaggggctttataacgaactccagaaagataaaatggcagaagcctatagtgagattgggatgaagggagaaaggaggaggggtaaaggtcacgatgggttgtaccaaggattgagcacagccactaaagatacctatgatgcgctccacatgcaggccctgccgccaaga

SEQ ID NO: 24460 - DNA, 708 bp, synthetic construct
  source 1..708: mol_type = other DNA
tccaacaccatcctgggcagccaggaaggcaacaccatgaagaccaacgacacctacatgaagttcagctggctgaccgtgcccgagaagtccctggacaaagaacacagatgcatcgtgcggcacgaaaacaacaagaacggcgtggaccaggaaatcatcttcccacccatcaagaccgatgtgattacaatggaccccaaggacaactgctccaaggacgccaacgataccctgctgctccagctgaccaacaccagcgcctactacatgtacttgttgctgctgctgaagtccgtggtgtacttcgccatcatcacatgctgcctgctgcggagaaccgccttctgctgcaacggcgagaagtctcgggttaagttttccagatccgcagacgcacccgcttaccaacaagggcagaaccaactctacaatgaacttaatttggggcggagggaagagtacgacgttctggacaaaaggaggggacgagatcccgagatgggcggaaagcctcagcgaaggaagaatccgcaagaggggctttataacgaactccagaaagataaaatggcagaagcctatagtgagattgggatgaagggagaaaggaggaggggtaaaggtcacgatgggttgtaccaaggattgagcacagccactaaagatacctatgatgcgctccacatgcaggccctgccgccaaga

SEQ ID NO: 24461 - DNA, 705 bp, synthetic construct
  source 1..705: mol_type = other DNA
aacaccatcctgggcagccaggaaggcaacaccatgaagaccaacgacacctacatgaagttcagctggctgaccgtgcccgagaagtccctggacaaagaacacagatgcatcgtgcggcacgaaaacaacaagaacggcgtggaccaggaaatcatcttcccacccatcaagaccgatgtgattacaatggaccccaaggacaactgctccaaggacgccaacgataccctgctgctccagctgaccaacaccagcgcctactacatgtacttgttgctgctgctgaagtccgtggtgtacttcgccatcatcacatgctgcctgctgcggagaaccgccttctgctgcaacggcgagaagtctcgggttaagttttccagatccgcagacgcacccgcttaccaacaagggcagaaccaactctacaatgaacttaatttggggcggagggaagagtacgacgttctggacaaaaggaggggacgagatcccgagatgggcggaaagcctcagcgaaggaagaatccgcaagaggggctttataacgaactccagaaagataaaatggcagaagcctatagtgagattgggatgaagggagaaaggaggaggggtaaaggtcacgatgggttgtaccaaggattgagcacagccactaaagatacctatgatgcgctccacatgcaggccctgccgccaaga

SEQ ID NO: 24462 - DNA, 702 bp, synthetic construct
  source 1..702: mol_type = other DNA
accatcctgggcagccaggaaggcaacaccatgaagaccaacgacacctacatgaagttcagctggctgaccgtgcccgagaagtccctggacaaagaacacagatgcatcgtgcggcacgaaaacaacaagaacggcgtggaccaggaaatcatcttcccacccatcaagaccgatgtgattacaatggaccccaaggacaactgctccaaggacgccaacgataccctgctgctccagctgaccaacaccagcgcctactacatgtacttgttgctgctgctgaagtccgtggtgtacttcgccatcatcacatgctgcctgctgcggagaaccgccttctgctgcaacggcgagaagtctcgggttaagttttccagatccgcagacgcacccgcttaccaacaagggcagaaccaactctacaatgaacttaatttggggcggagggaagagtacgacgttctggacaaaaggaggggacgagatcccgagatgggcggaaagcctcagcgaaggaagaatccgcaagaggggctttataacgaactccagaaagataaaatggcagaagcctatagtgagattgggatgaagggagaaaggaggaggggtaaaggtcacgatgggttgtaccaaggattgagcacagccactaaagatacctatgatgcgctccacatgcaggccctgccgccaaga

SEQ ID NO: 24463 - DNA, 699 bp, synthetic construct
  source 1..699: mol_type = other DNA
atcctgggcagccaggaaggcaacaccatgaagaccaacgacacctacatgaagttcagctggctgaccgtgcccgagaagtccctggacaaagaacacagatgcatcgtgcggcacgaaaacaacaagaacggcgtggaccaggaaatcatcttcccacccatcaagaccgatgtgattacaatggaccccaaggacaactgctccaaggacgccaacgataccctgctgctccagctgaccaacaccagcgcctactacatgtacttgttgctgctgctgaagtccgtggtgtacttcgccatcatcacatgctgcctgctgcggagaaccgccttctgctgcaacggcgagaagtctcgggttaagttttccagatccgcagacgcacccgcttaccaacaagggcagaaccaactctacaatgaacttaatttggggcggagggaagagtacgacgttctggacaaaaggaggggacgagatcccgagatgggcggaaagcctcagcgaaggaagaatccgcaagaggggctttataacgaactccagaaagataaaatggcagaagcctatagtgagattgggatgaagggagaaaggaggaggggtaaaggtcacgatgggttgtaccaaggattgagcacagccactaaagatacctatgatgcgctccacatgcaggccctgccgccaaga

SEQ ID NO: 24464 - DNA, 696 bp, synthetic construct
  source 1..696: mol_type = other DNA
ctgggcagccaggaaggcaacaccatgaagaccaacgacacctacatgaagttcagctggctgaccgtgcccgagaagtccctggacaaagaacacagatgcatcgtgcggcacgaaaacaacaagaacggcgtggaccaggaaatcatcttcccacccatcaagaccgatgtgattacaatggaccccaaggacaactgctccaaggacgccaacgataccctgctgctccagctgaccaacaccagcgcctactacatgtacttgttgctgctgctgaagtccgtggtgtacttcgccatcatcacatgctgcctgctgcggagaaccgccttctgctgcaacggcgagaagtctcgggttaagttttccagatccgcagacgcacccgcttaccaacaagggcagaaccaactctacaatgaacttaatttggggcggagggaagagtacgacgttctggacaaaaggaggggacgagatcccgagatgggcggaaagcctcagcgaaggaagaatccgcaagaggggctttataacgaactccagaaagataaaatggcagaagcctatagtgagattgggatgaagggagaaaggaggaggggtaaaggtcacgatgggttgtaccaaggattgagcacagccactaaagatacctatgatgcgctccacatgcaggccctgccgccaaga

SEQ ID NO: 24465 - DNA, 693 bp, synthetic construct
  source 1..693: mol_type = other DNA
ggcagccaggaaggcaacaccatgaagaccaacgacacctacatgaagttcagctggctgaccgtgcccgagaagtccctggacaaagaacacagatgcatcgtgcggcacgaaaacaacaagaacggcgtggaccaggaaatcatcttcccacccatcaagaccgatgtgattacaatggaccccaaggacaactgctccaaggacgccaacgataccctgctgctccagctgaccaacaccagcgcctactacatgtacttgttgctgctgctgaagtccgtggtgtacttcgccatcatcacatgctgcctgctgcggagaaccgccttctgctgcaacggcgagaagtctcgggttaagttttccagatccgcagacgcacccgcttaccaacaagggcagaaccaactctacaatgaacttaatttggggcggagggaagagtacgacgttctggacaaaaggaggggacgagatcccgagatgggcggaaagcctcagcgaaggaagaatccgcaagaggggctttataacgaactccagaaagataaaatggcagaagcctatagtgagattgggatgaagggagaaaggaggaggggtaaaggtcacgatgggttgtaccaaggattgagcacagccactaaagatacctatgatgcgctccacatgcaggccctgccgccaaga

SEQ ID NO: 24466 - DNA, 690 bp, synthetic construct
  source 1..690: mol_type = other DNA
agccaggaaggcaacaccatgaagaccaacgacacctacatgaagttcagctggctgaccgtgcccgagaagtccctggacaaagaacacagatgcatcgtgcggcacgaaaacaacaagaacggcgtggaccaggaaatcatcttcccacccatcaagaccgatgtgattacaatggaccccaaggacaactgctccaaggacgccaacgataccctgctgctccagctgaccaacaccagcgcctactacatgtacttgttgctgctgctgaagtccgtggtgtacttcgccatcatcacatgctgcctgctgcggagaaccgccttctgctgcaacggcgagaagtctcgggttaagttttccagatccgcagacgcacccgcttaccaacaagggcagaaccaactctacaatgaacttaatttggggcggagggaagagtacgacgttctggacaaaaggaggggacgagatcccgagatgggcggaaagcctcagcgaaggaagaatccgcaagaggggctttataacgaactccagaaagataaaatggcagaagcctatagtgagattgggatgaagggagaaaggaggaggggtaaaggtcacgatgggttgtaccaaggattgagcacagccactaaagatacctatgatgcgctccacatgcaggccctgccgccaaga

SEQ ID NO: 24467 - DNA, 687 bp, synthetic construct
  source 1..687: mol_type = other DNA
caggaaggcaacaccatgaagaccaacgacacctacatgaagttcagctggctgaccgtgcccgagaagtccctggacaaagaacacagatgcatcgtgcggcacgaaaacaacaagaacggcgtggaccaggaaatcatcttcccacccatcaagaccgatgtgattacaatggaccccaaggacaactgctccaaggacgccaacgataccctgctgctccagctgaccaacaccagcgcctactacatgtacttgttgctgctgctgaagtccgtggtgtacttcgccatcatcacatgctgcctgctgcggagaaccgccttctgctgcaacggcgagaagtctcgggttaagttttccagatccgcagacgcacccgcttaccaacaagggcagaaccaactctacaatgaacttaatttggggcggagggaagagtacgacgttctggacaaaaggaggggacgagatcccgagatgggcggaaagcctcagcgaaggaagaatccgcaagaggggctttataacgaactccagaaagataaaatggcagaagcctatagtgagattgggatgaagggagaaaggaggaggggtaaaggtcacgatgggttgtaccaaggattgagcacagccactaaagatacctatgatgcgctccacatgcaggccctgccgccaaga

SEQ ID NO: 24468 - DNA, 684 bp, synthetic construct
  source 1..684: mol_type = other DNA
gaaggcaacaccatgaagaccaacgacacctacatgaagttcagctggctgaccgtgcccgagaagtccctggacaaagaacacagatgcatcgtgcggcacgaaaacaacaagaacggcgtggaccaggaaatcatcttcccacccatcaagaccgatgtgattacaatggaccccaaggacaactgctccaaggacgccaacgataccctgctgctccagctgaccaacaccagcgcctactacatgtacttgttgctgctgctgaagtccgtggtgtacttcgccatcatcacatgctgcctgctgcggagaaccgccttctgctgcaacggcgagaagtctcgggttaagttttccagatccgcagacgcacccgcttaccaacaagggcagaaccaactctacaatgaacttaatttggggcggagggaagagtacgacgttctggacaaaaggaggggacgagatcccgagatgggcggaaagcctcagcgaaggaagaatccgcaagaggggctttataacgaactccagaaagataaaatggcagaagcctatagtgagattgggatgaagggagaaaggaggaggggtaaaggtcacgatgggttgtaccaaggattgagcacagccactaaagatacctatgatgcgctccacatgcaggccctgccgccaaga

SEQ ID NO: 24469 - DNA, 681 bp, synthetic construct
  source 1..681: mol_type = other DNA
ggcaacaccatgaagaccaacgacacctacatgaagttcagctggctgaccgtgcccgagaagtccctggacaaagaacacagatgcatcgtgcggcacgaaaacaacaagaacggcgtggaccaggaaatcatcttcccacccatcaagaccgatgtgattacaatggaccccaaggacaactgctccaaggacgccaacgataccctgctgctccagctgaccaacaccagcgcctactacatgtacttgttgctgctgctgaagtccgtggtgtacttcgccatcatcacatgctgcctgctgcggagaaccgccttctgctgcaacggcgagaagtctcgggttaagttttccagatccgcagacgcacccgcttaccaacaagggcagaaccaactctacaatgaacttaatttggggcggagggaagagtacgacgttctggacaaaaggaggggacgagatcccgagatgggcggaaagcctcagcgaaggaagaatccgcaagaggggctttataacgaactccagaaagataaaatggcagaagcctatagtgagattgggatgaagggagaaaggaggaggggtaaaggtcacgatgggttgtaccaaggattgagcacagccactaaagatacctatgatgcgctccacatgcaggccctgccgccaaga

SEQ ID NO: 24470 - DNA, 678 bp, synthetic construct
  source 1..678: mol_type = other DNA
aacaccatgaagaccaacgacacctacatgaagttcagctggctgaccgtgcccgagaagtccctggacaaagaacacagatgcatcgtgcggcacgaaaacaacaagaacggcgtggaccaggaaatcatcttcccacccatcaagaccgatgtgattacaatggaccccaaggacaactgctccaaggacgccaacgataccctgctgctccagctgaccaacaccagcgcctactacatgtacttgttgctgctgctgaagtccgtggtgtacttcgccatcatcacatgctgcctgctgcggagaaccgccttctgctgcaacggcgagaagtctcgggttaagttttccagatccgcagacgcacccgcttaccaacaagggcagaaccaactctacaatgaacttaatttggggcggagggaagagtacgacgttctggacaaaaggaggggacgagatcccgagatgggcggaaagcctcagcgaaggaagaatccgcaagaggggctttataacgaactccagaaagataaaatggcagaagcctatagtgagattgggatgaagggagaaaggaggaggggtaaaggtcacgatgggttgtaccaaggattgagcacagccactaaagatacctatgatgcgctccacatgcaggccctgccgccaaga

SEQ ID NO: 24471 - DNA, 675 bp, synthetic construct
  source 1..675: mol_type = other DNA
accatgaagaccaacgacacctacatgaagttcagctggctgaccgtgcccgagaagtccctggacaaagaacacagatgcatcgtgcggcacgaaaacaacaagaacggcgtggaccaggaaatcatcttcccacccatcaagaccgatgtgattacaatggaccccaaggacaactgctccaaggacgccaacgataccctgctgctccagctgaccaacaccagcgcctactacatgtacttgttgctgctgctgaagtccgtggtgtacttcgccatcatcacatgctgcctgctgcggagaaccgccttctgctgcaacggcgagaagtctcgggttaagttttccagatccgcagacgcacccgcttaccaacaagggcagaaccaactctacaatgaacttaatttggggcggagggaagagtacgacgttctggacaaaaggaggggacgagatcccgagatgggcggaaagcctcagcgaaggaagaatccgcaagaggggctttataacgaactccagaaagataaaatggcagaagcctatagtgagattgggatgaagggagaaaggaggaggggtaaaggtcacgatgggttgtaccaaggattgagcacagccactaaagatacctatgatgcgctccacatgcaggccctgccgccaaga

SEQ ID NO: 24472 - DNA, 672 bp, synthetic construct
  source 1..672: mol_type = other DNA
atgaagaccaacgacacctacatgaagttcagctggctgaccgtgcccgagaagtccctggacaaagaacacagatgcatcgtgcggcacgaaaacaacaagaacggcgtggaccaggaaatcatcttcccacccatcaagaccgatgtgattacaatggaccccaaggacaactgctccaaggacgccaacgataccctgctgctccagctgaccaacaccagcgcctactacatgtacttgttgctgctgctgaagtccgtggtgtacttcgccatcatcacatgctgcctgctgcggagaaccgccttctgctgcaacggcgagaagtctcgggttaagttttccagatccgcagacgcacccgcttaccaacaagggcagaaccaactctacaatgaacttaatttggggcggagggaagagtacgacgttctggacaaaaggaggggacgagatcccgagatgggcggaaagcctcagcgaaggaagaatccgcaagaggggctttataacgaactccagaaagataaaatggcagaagcctatagtgagattgggatgaagggagaaaggaggaggggtaaaggtcacgatgggttgtaccaaggattgagcacagccactaaagatacctatgatgcgctccacatgcaggccctgccgccaaga

SEQ ID NO: 24473 - DNA, 669 bp, synthetic construct
  source 1..669: mol_type = other DNA
aagaccaacgacacctacatgaagttcagctggctgaccgtgcccgagaagtccctggacaaagaacacagatgcatcgtgcggcacgaaaacaacaagaacggcgtggaccaggaaatcatcttcccacccatcaagaccgatgtgattacaatggaccccaaggacaactgctccaaggacgccaacgataccctgctgctccagctgaccaacaccagcgcctactacatgtacttgttgctgctgctgaagtccgtggtgtacttcgccatcatcacatgctgcctgctgcggagaaccgccttctgctgcaacggcgagaagtctcgggttaagttttccagatccgcagacgcacccgcttaccaacaagggcagaaccaactctacaatgaacttaatttggggcggagggaagagtacgacgttctggacaaaaggaggggacgagatcccgagatgggcggaaagcctcagcgaaggaagaatccgcaagaggggctttataacgaactccagaaagataaaatggcagaagcctatagtgagattgggatgaagggagaaaggaggaggggtaaaggtcacgatgggttgtaccaaggattgagcacagccactaaagatacctatgatgcgctccacatgcaggccctgccgccaaga

SEQ ID NO: 24474 - DNA, 666 bp, synthetic construct
  source 1..666: mol_type = other DNA
accaacgacacctacatgaagttcagctggctgaccgtgcccgagaagtccctggacaaagaacacagatgcatcgtgcggcacgaaaacaacaagaacggcgtggaccaggaaatcatcttcccacccatcaagaccgatgtgattacaatggaccccaaggacaactgctccaaggacgccaacgataccctgctgctccagctgaccaacaccagcgcctactacatgtacttgttgctgctgctgaagtccgtggtgtacttcgccatcatcacatgctgcctgctgcggagaaccgccttctgctgcaacggcgagaagtctcgggttaagttttccagatccgcagacgcacccgcttaccaacaagggcagaaccaactctacaatgaacttaatttggggcggagggaagagtacgacgttctggacaaaaggaggggacgagatcccgagatgggcggaaagcctcagcgaaggaagaatccgcaagaggggctttataacgaactccagaaagataaaatggcagaagcctatagtgagattgggatgaagggagaaaggaggaggggtaaaggtcacgatgggttgtaccaaggattgagcacagccactaaagatacctatgatgcgctccacatgcaggccctgccgccaaga

SEQ ID NO: 24475 - DNA, 663 bp, synthetic construct
  source 1..663: mol_type = other DNA
aacgacacctacatgaagttcagctggctgaccgtgcccgagaagtccctggacaaagaacacagatgcatcgtgcggcacgaaaacaacaagaacggcgtggaccaggaaatcatcttcccacccatcaagaccgatgtgattacaatggaccccaaggacaactgctccaaggacgccaacgataccctgctgctccagctgaccaacaccagcgcctactacatgtacttgttgctgctgctgaagtccgtggtgtacttcgccatcatcacatgctgcctgctgcggagaaccgccttctgctgcaacggcgagaagtctcgggttaagttttccagatccgcagacgcacccgcttaccaacaagggcagaaccaactctacaatgaacttaatttggggcggagggaagagtacgacgttctggacaaaaggaggggacgagatcccgagatgggcggaaagcctcagcgaaggaagaatccgcaagaggggctttataacgaactccagaaagataaaatggcagaagcctatagtgagattgggatgaagggagaaaggaggaggggtaaaggtcacgatgggttgtaccaaggattgagcacagccactaaagatacctatgatgcgctccacatgcaggccctgccgccaaga

SEQ ID NO: 24476 - DNA, 660 bp, synthetic construct
  source 1..660: mol_type = other DNA
gacacctacatgaagttcagctggctgaccgtgcccgagaagtccctggacaaagaacacagatgcatcgtgcggcacgaaaacaacaagaacggcgtggaccaggaaatcatcttcccacccatcaagaccgatgtgattacaatggaccccaaggacaactgctccaaggacgccaacgataccctgctgctccagctgaccaacaccagcgcctactacatgtacttgttgctgctgctgaagtccgtggtgtacttcgccatcatcacatgctgcctgctgcggagaaccgccttctgctgcaacggcgagaagtctcgggttaagttttccagatccgcagacgcacccgcttaccaacaagggcagaaccaactctacaatgaacttaatttggggcggagggaagagtacgacgttctggacaaaaggaggggacgagatcccgagatgggcggaaagcctcagcgaaggaagaatccgcaagaggggctttataacgaactccagaaagataaaatggcagaagcctatagtgagattgggatgaagggagaaaggaggaggggtaaaggtcacgatgggttgtaccaaggattgagcacagccactaaagatacctatgatgcgctccacatgcaggccctgccgccaaga

SEQ ID NO: 24477 - DNA, 657 bp, synthetic construct
  source 1..657: mol_type = other DNA
acctacatgaagttcagctggctgaccgtgcccgagaagtccctggacaaagaacacagatgcatcgtgcggcacgaaaacaacaagaacggcgtggaccaggaaatcatcttcccacccatcaagaccgatgtgattacaatggaccccaaggacaactgctccaaggacgccaacgataccctgctgctccagctgaccaacaccagcgcctactacatgtacttgttgctgctgctgaagtccgtggtgtacttcgccatcatcacatgctgcctgctgcggagaaccgccttctgctgcaacggcgagaagtctcgggttaagttttccagatccgcagacgcacccgcttaccaacaagggcagaaccaactctacaatgaacttaatttggggcggagggaagagtacgacgttctggacaaaaggaggggacgagatcccgagatgggcggaaagcctcagcgaaggaagaatccgcaagaggggctttataacgaactccagaaagataaaatggcagaagcctatagtgagattgggatgaagggagaaaggaggaggggtaaaggtcacgatgggttgtaccaaggattgagcacagccactaaagatacctatgatgcgctccacatgcaggccctgccgccaaga

SEQ ID NO: 24478 - DNA, 654 bp, synthetic construct
  source 1..654: mol_type = other DNA
tacatgaagttcagctggctgaccgtgcccgagaagtccctggacaaagaacacagatgcatcgtgcggcacgaaaacaacaagaacggcgtggaccaggaaatcatcttcccacccatcaagaccgatgtgattacaatggaccccaaggacaactgctccaaggacgccaacgataccctgctgctccagctgaccaacaccagcgcctactacatgtacttgttgctgctgctgaagtccgtggtgtacttcgccatcatcacatgctgcctgctgcggagaaccgccttctgctgcaacggcgagaagtctcgggttaagttttccagatccgcagacgcacccgcttaccaacaagggcagaaccaactctacaatgaacttaatttggggcggagggaagagtacgacgttctggacaaaaggaggggacgagatcccgagatgggcggaaagcctcagcgaaggaagaatccgcaagaggggctttataacgaactccagaaagataaaatggcagaagcctatagtgagattgggatgaagggagaaaggaggaggggtaaaggtcacgatgggttgtaccaaggattgagcacagccactaaagatacctatgatgcgctccacatgcaggccctgccgccaaga

SEQ ID NO: 24479 - DNA, 651 bp, synthetic construct
  source 1..651: mol_type = other DNA
atgaagttcagctggctgaccgtgcccgagaagtccctggacaaagaacacagatgcatcgtgcggcacgaaaacaacaagaacggcgtggaccaggaaatcatcttcccacccatcaagaccgatgtgattacaatggaccccaaggacaactgctccaaggacgccaacgataccctgctgctccagctgaccaacaccagcgcctactacatgtacttgttgctgctgctgaagtccgtggtgtacttcgccatcatcacatgctgcctgctgcggagaaccgccttctgctgcaacggcgagaagtctcgggttaagttttccagatccgcagacgcacccgcttaccaacaagggcagaaccaactctacaatgaacttaatttggggcggagggaagagtacgacgttctggacaaaaggaggggacgagatcccgagatgggcggaaagcctcagcgaaggaagaatccgcaagaggggctttataacgaactccagaaagataaaatggcagaagcctatagtgagattgggatgaagggagaaaggaggaggggtaaaggtcacgatgggttgtaccaaggattgagcacagccactaaagatacctatgatgcgctccacatgcaggccctgccgccaaga

SEQ ID NO: 24480 - DNA, 648 bp, synthetic construct
  source 1..648: mol_type = other DNA
aagttcagctggctgaccgtgcccgagaagtccctggacaaagaacacagatgcatcgtgcggcacgaaaacaacaagaacggcgtggaccaggaaatcatcttcccacccatcaagaccgatgtgattacaatggaccccaaggacaactgctccaaggacgccaacgataccctgctgctccagctgaccaacaccagcgcctactacatgtacttgttgctgctgctgaagtccgtggtgtacttcgccatcatcacatgctgcctgctgcggagaaccgccttctgctgcaacggcgagaagtctcgggttaagttttccagatccgcagacgcacccgcttaccaacaagggcagaaccaactctacaatgaacttaatttggggcggagggaagagtacgacgttctggacaaaaggaggggacgagatcccgagatgggcggaaagcctcagcgaaggaagaatccgcaagaggggctttataacgaactccagaaagataaaatggcagaagcctatagtgagattgggatgaagggagaaaggaggaggggtaaaggtcacgatgggttgtaccaaggattgagcacagccactaaagatacctatgatgcgctccacatgcaggccctgccgccaaga

SEQ ID NO: 24481 - DNA, 645 bp, synthetic construct
  source 1..645: mol_type = other DNA
ttcagctggctgaccgtgcccgagaagtccctggacaaagaacacagatgcatcgtgcggcacgaaaacaacaagaacggcgtggaccaggaaatcatcttcccacccatcaagaccgatgtgattacaatggaccccaaggacaactgctccaaggacgccaacgataccctgctgctccagctgaccaacaccagcgcctactacatgtacttgttgctgctgctgaagtccgtggtgtacttcgccatcatcacatgctgcctgctgcggagaaccgccttctgctgcaacggcgagaagtctcgggttaagttttccagatccgcagacgcacccgcttaccaacaagggcagaaccaactctacaatgaacttaatttggggcggagggaagagtacgacgttctggacaaaaggaggggacgagatcccgagatgggcggaaagcctcagcgaaggaagaatccgcaagaggggctttataacgaactccagaaagataaaatggcagaagcctatagtgagattgggatgaagggagaaaggaggaggggtaaaggtcacgatgggttgtaccaaggattgagcacagccactaaagatacctatgatgcgctccacatgcaggccctgccgccaaga

SEQ ID NO: 24482 - DNA, 642 bp, synthetic construct
  source 1..642: mol_type = other DNA
agctggctgaccgtgcccgagaagtccctggacaaagaacacagatgcatcgtgcggcacgaaaacaacaagaacggcgtggaccaggaaatcatcttcccacccatcaagaccgatgtgattacaatggaccccaaggacaactgctccaaggacgccaacgataccctgctgctccagctgaccaacaccagcgcctactacatgtacttgttgctgctgctgaagtccgtggtgtacttcgccatcatcacatgctgcctgctgcggagaaccgccttctgctgcaacggcgagaagtctcgggttaagttttccagatccgcagacgcacccgcttaccaacaagggcagaaccaactctacaatgaacttaatttggggcggagggaagagtacgacgttctggacaaaaggaggggacgagatcccgagatgggcggaaagcctcagcgaaggaagaatccgcaagaggggctttataacgaactccagaaagataaaatggcagaagcctatagtgagattgggatgaagggagaaaggaggaggggtaaaggtcacgatgggttgtaccaaggattgagcacagccactaaagatacctatgatgcgctccacatgcaggccctgccgccaaga

SEQ ID NO: 24483 - DNA, 639 bp, synthetic construct
  source 1..639: mol_type = other DNA
tggctgaccgtgcccgagaagtccctggacaaagaacacagatgcatcgtgcggcacgaaaacaacaagaacggcgtggaccaggaaatcatcttcccacccatcaagaccgatgtgattacaatggaccccaaggacaactgctccaaggacgccaacgataccctgctgctccagctgaccaacaccagcgcctactacatgtacttgttgctgctgctgaagtccgtggtgtacttcgccatcatcacatgctgcctgctgcggagaaccgccttctgctgcaacggcgagaagtctcgggttaagttttccagatccgcagacgcacccgcttaccaacaagggcagaaccaactctacaatgaacttaatttggggcggagggaagagtacgacgttctggacaaaaggaggggacgagatcccgagatgggcggaaagcctcagcgaaggaagaatccgcaagaggggctttataacgaactccagaaagataaaatggcagaagcctatagtgagattgggatgaagggagaaaggaggaggggtaaaggtcacgatgggttgtaccaaggattgagcacagccactaaagatacctatgatgcgctccacatgcaggccctgccgccaaga

SEQ ID NO: 24484 - DNA, 636 bp, synthetic construct
  source 1..636: mol_type = other DNA
ctgaccgtgcccgagaagtccctggacaaagaacacagatgcatcgtgcggcacgaaaacaacaagaacggcgtggaccaggaaatcatcttcccacccatcaagaccgatgtgattacaatggaccccaaggacaactgctccaaggacgccaacgataccctgctgctccagctgaccaacaccagcgcctactacatgtacttgttgctgctgctgaagtccgtggtgtacttcgccatcatcacatgctgcctgctgcggagaaccgccttctgctgcaacggcgagaagtctcgggttaagttttccagatccgcagacgcacccgcttaccaacaagggcagaaccaactctacaatgaacttaatttggggcggagggaagagtacgacgttctggacaaaaggaggggacgagatcccgagatgggcggaaagcctcagcgaaggaagaatccgcaagaggggctttataacgaactccagaaagataaaatggcagaagcctatagtgagattgggatgaagggagaaaggaggaggggtaaaggtcacgatgggttgtaccaaggattgagcacagccactaaagatacctatgatgcgctccacatgcaggccctgccgccaaga

SEQ ID NO: 24485 - DNA, 633 bp, synthetic construct
  source 1..633: mol_type = other DNA
accgtgcccgagaagtccctggacaaagaacacagatgcatcgtgcggcacgaaaacaacaagaacggcgtggaccaggaaatcatcttcccacccatcaagaccgatgtgattacaatggaccccaaggacaactgctccaaggacgccaacgataccctgctgctccagctgaccaacaccagcgcctactacatgtacttgttgctgctgctgaagtccgtggtgtacttcgccatcatcacatgctgcctgctgcggagaaccgccttctgctgcaacggcgagaagtctcgggttaagttttccagatccgcagacgcacccgcttaccaacaagggcagaaccaactctacaatgaacttaatttggggcggagggaagagtacgacgttctggacaaaaggaggggacgagatcccgagatgggcggaaagcctcagcgaaggaagaatccgcaagaggggctttataacgaactccagaaagataaaatggcagaagcctatagtgagattgggatgaagggagaaaggaggaggggtaaaggtcacgatgggttgtaccaaggattgagcacagccactaaagatacctatgatgcgctccacatgcaggccctgccgccaaga

SEQ ID NO: 24486 - DNA, 630 bp, synthetic construct
  source 1..630: mol_type = other DNA
gtgcccgagaagtccctggacaaagaacacagatgcatcgtgcggcacgaaaacaacaagaacggcgtggaccaggaaatcatcttcccacccatcaagaccgatgtgattacaatggaccccaaggacaactgctccaaggacgccaacgataccctgctgctccagctgaccaacaccagcgcctactacatgtacttgttgctgctgctgaagtccgtggtgtacttcgccatcatcacatgctgcctgctgcggagaaccgccttctgctgcaacggcgagaagtctcgggttaagttttccagatccgcagacgcacccgcttaccaacaagggcagaaccaactctacaatgaacttaatttggggcggagggaagagtacgacgttctggacaaaaggaggggacgagatcccgagatgggcggaaagcctcagcgaaggaagaatccgcaagaggggctttataacgaactccagaaagataaaatggcagaagcctatagtgagattgggatgaagggagaaaggaggaggggtaaaggtcacgatgggttgtaccaaggattgagcacagccactaaagatacctatgatgcgctccacatgcaggccctgccgccaaga

SEQ ID NO: 24487 - DNA, 627 bp, synthetic construct
  source 1..627: mol_type = other DNA
cccgagaagtccctggacaaagaacacagatgcatcgtgcggcacgaaaacaacaagaacggcgtggaccaggaaatcatcttcccacccatcaagaccgatgtgattacaatggaccccaaggacaactgctccaaggacgccaacgataccctgctgctccagctgaccaacaccagcgcctactacatgtacttgttgctgctgctgaagtccgtggtgtacttcgccatcatcacatgctgcctgctgcggagaaccgccttctgctgcaacggcgagaagtctcgggttaagttttccagatccgcagacgcacccgcttaccaacaagggcagaaccaactctacaatgaacttaatttggggcggagggaagagtacgacgttctggacaaaaggaggggacgagatcccgagatgggcggaaagcctcagcgaaggaagaatccgcaagaggggctttataacgaactccagaaagataaaatggcagaagcctatagtgagattgggatgaagggagaaaggaggaggggtaaaggtcacgatgggttgtaccaaggattgagcacagccactaaagatacctatgatgcgctccacatgcaggccctgccgccaaga

SEQ ID NO: 24488 - DNA, 624 bp, synthetic construct
  source 1..624: mol_type = other DNA
gagaagtccctggacaaagaacacagatgcatcgtgcggcacgaaaacaacaagaacggcgtggaccaggaaatcatcttcccacccatcaagaccgatgtgattacaatggaccccaaggacaactgctccaaggacgccaacgataccctgctgctccagctgaccaacaccagcgcctactacatgtacttgttgctgctgctgaagtccgtggtgtacttcgccatcatcacatgctgcctgctgcggagaaccgccttctgctgcaacggcgagaagtctcgggttaagttttccagatccgcagacgcacccgcttaccaacaagggcagaaccaactctacaatgaacttaatttggggcggagggaagagtacgacgttctggacaaaaggaggggacgagatcccgagatgggcggaaagcctcagcgaaggaagaatccgcaagaggggctttataacgaactccagaaagataaaatggcagaagcctatagtgagattgggatgaagggagaaaggaggaggggtaaaggtcacgatgggttgtaccaaggattgagcacagccactaaagatacctatgatgcgctccacatgcaggccctgccgccaaga

SEQ ID NO: 24489 - DNA, 621 bp, synthetic construct
  source 1..621: mol_type = other DNA
aagtccctggacaaagaacacagatgcatcgtgcggcacgaaaacaacaagaacggcgtggaccaggaaatcatcttcccacccatcaagaccgatgtgattacaatggaccccaaggacaactgctccaaggacgccaacgataccctgctgctccagctgaccaacaccagcgcctactacatgtacttgttgctgctgctgaagtccgtggtgtacttcgccatcatcacatgctgcctgctgcggagaaccgccttctgctgcaacggcgagaagtctcgggttaagttttccagatccgcagacgcacccgcttaccaacaagggcagaaccaactctacaatgaacttaatttggggcggagggaagagtacgacgttctggacaaaaggaggggacgagatcccgagatgggcggaaagcctcagcgaaggaagaatccgcaagaggggctttataacgaactccagaaagataaaatggcagaagcctatagtgagattgggatgaagggagaaaggaggaggggtaaaggtcacgatgggttgtaccaaggattgagcacagccactaaagatacctatgatgcgctccacatgcaggccctgccgccaaga

SEQ ID NO: 24490 - DNA, 618 bp, synthetic construct
  source 1..618: mol_type = other DNA
tccctggacaaagaacacagatgcatcgtgcggcacgaaaacaacaagaacggcgtggaccaggaaatcatcttcccacccatcaagaccgatgtgattacaatggaccccaaggacaactgctccaaggacgccaacgataccctgctgctccagctgaccaacaccagcgcctactacatgtacttgttgctgctgctgaagtccgtggtgtacttcgccatcatcacatgctgcctgctgcggagaaccgccttctgctgcaacggcgagaagtctcgggttaagttttccagatccgcagacgcacccgcttaccaacaagggcagaaccaactctacaatgaacttaatttggggcggagggaagagtacgacgttctggacaaaaggaggggacgagatcccgagatgggcggaaagcctcagcgaaggaagaatccgcaagaggggctttataacgaactccagaaagataaaatggcagaagcctatagtgagattgggatgaagggagaaaggaggaggggtaaaggtcacgatgggttgtaccaaggattgagcacagccactaaagatacctatgatgcgctccacatgcaggccctgccgccaaga

SEQ ID NO: 24491 - DNA, 615 bp, synthetic construct
  source 1..615: mol_type = other DNA
ctggacaaagaacacagatgcatcgtgcggcacgaaaacaacaagaacggcgtggaccaggaaatcatcttcccacccatcaagaccgatgtgattacaatggaccccaaggacaactgctccaaggacgccaacgataccctgctgctccagctgaccaacaccagcgcctactacatgtacttgttgctgctgctgaagtccgtggtgtacttcgccatcatcacatgctgcctgctgcggagaaccgccttctgctgcaacggcgagaagtctcgggttaagttttccagatccgcagacgcacccgcttaccaacaagggcagaaccaactctacaatgaacttaatttggggcggagggaagagtacgacgttctggacaaaaggaggggacgagatcccgagatgggcggaaagcctcagcgaaggaagaatccgcaagaggggctttataacgaactccagaaagataaaatggcagaagcctatagtgagattgggatgaagggagaaaggaggaggggtaaaggtcacgatgggttgtaccaaggattgagcacagccactaaagatacctatgatgcgctccacatgcaggccctgccgccaaga

SEQ ID NO: 24492 - DNA, 612 bp, synthetic construct
  source 1..612: mol_type = other DNA
gacaaagaacacagatgcatcgtgcggcacgaaaacaacaagaacggcgtggaccaggaaatcatcttcccacccatcaagaccgatgtgattacaatggaccccaaggacaactgctccaaggacgccaacgataccctgctgctccagctgaccaacaccagcgcctactacatgtacttgttgctgctgctgaagtccgtggtgtacttcgccatcatcacatgctgcctgctgcggagaaccgccttctgctgcaacggcgagaagtctcgggttaagttttccagatccgcagacgcacccgcttaccaacaagggcagaaccaactctacaatgaacttaatttggggcggagggaagagtacgacgttctggacaaaaggaggggacgagatcccgagatgggcggaaagcctcagcgaaggaagaatccgcaagaggggctttataacgaactccagaaagataaaatggcagaagcctatagtgagattgggatgaagggagaaaggaggaggggtaaaggtcacgatgggttgtaccaaggattgagcacagccactaaagatacctatgatgcgctccacatgcaggccctgccgccaaga

SEQ ID NO: 24493 - DNA, 609 bp, synthetic construct
  source 1..609: mol_type = other DNA
aaagaacacagatgcatcgtgcggcacgaaaacaacaagaacggcgtggaccaggaaatcatcttcccacccatcaagaccgatgtgattacaatggaccccaaggacaactgctccaaggacgccaacgataccctgctgctccagctgaccaacaccagcgcctactacatgtacttgttgctgctgctgaagtccgtggtgtacttcgccatcatcacatgctgcctgctgcggagaaccgccttctgctgcaacggcgagaagtctcgggttaagttttccagatccgcagacgcacccgcttaccaacaagggcagaaccaactctacaatgaacttaatttggggcggagggaagagtacgacgttctggacaaaaggaggggacgagatcccgagatgggcggaaagcctcagcgaaggaagaatccgcaagaggggctttataacgaactccagaaagataaaatggcagaagcctatagtgagattgggatgaagggagaaaggaggaggggtaaaggtcacgatgggttgtaccaaggattgagcacagccactaaagatacctatgatgcgctccacatgcaggccctgccgccaaga

SEQ ID NO: 24494 - DNA, 606 bp, synthetic construct
  source 1..606: mol_type = other DNA
gaacacagatgcatcgtgcggcacgaaaacaacaagaacggcgtggaccaggaaatcatcttcccacccatcaagaccgatgtgattacaatggaccccaaggacaactgctccaaggacgccaacgataccctgctgctccagctgaccaacaccagcgcctactacatgtacttgttgctgctgctgaagtccgtggtgtacttcgccatcatcacatgctgcctgctgcggagaaccgccttctgctgcaacggcgagaagtctcgggttaagttttccagatccgcagacgcacccgcttaccaacaagggcagaaccaactctacaatgaacttaatttggggcggagggaagagtacgacgttctggacaaaaggaggggacgagatcccgagatgggcggaaagcctcagcgaaggaagaatccgcaagaggggctttataacgaactccagaaagataaaatggcagaagcctatagtgagattgggatgaagggagaaaggaggaggggtaaaggtcacgatgggttgtaccaaggattgagcacagccactaaagatacctatgatgcgctccacatgcaggccctgccgccaaga

SEQ ID NO: 24495 - DNA, 603 bp, synthetic construct
  source 1..603: mol_type = other DNA
cacagatgcatcgtgcggcacgaaaacaacaagaacggcgtggaccaggaaatcatcttcccacccatcaagaccgatgtgattacaatggaccccaaggacaactgctccaaggacgccaacgataccctgctgctccagctgaccaacaccagcgcctactacatgtacttgttgctgctgctgaagtccgtggtgtacttcgccatcatcacatgctgcctgctgcggagaaccgccttctgctgcaacggcgagaagtctcgggttaagttttccagatccgcagacgcacccgcttaccaacaagggcagaaccaactctacaatgaacttaatttggggcggagggaagagtacgacgttctggacaaaaggaggggacgagatcccgagatgggcggaaagcctcagcgaaggaagaatccgcaagaggggctttataacgaactccagaaagataaaatggcagaagcctatagtgagattgggatgaagggagaaaggaggaggggtaaaggtcacgatgggttgtaccaaggattgagcacagccactaaagatacctatgatgcgctccacatgcaggccctgccgccaaga

SEQ ID NO: 24496 - DNA, 600 bp, synthetic construct
  source 1..600: mol_type = other DNA
agatgcatcgtgcggcacgaaaacaacaagaacggcgtggaccaggaaatcatcttcccacccatcaagaccgatgtgattacaatggaccccaaggacaactgctccaaggacgccaacgataccctgctgctccagctgaccaacaccagcgcctactacatgtacttgttgctgctgctgaagtccgtggtgtacttcgccatcatcacatgctgcctgctgcggagaaccgccttctgctgcaacggcgagaagtctcgggttaagttttccagatccgcagacgcacccgcttaccaacaagggcagaaccaactctacaatgaacttaatttggggcggagggaagagtacgacgttctggacaaaaggaggggacgagatcccgagatgggcggaaagcctcagcgaaggaagaatccgcaagaggggctttataacgaactccagaaagataaaatggcagaagcctatagtgagattgggatgaagggagaaaggaggaggggtaaaggtcacgatgggttgtaccaaggattgagcacagccactaaagatacctatgatgcgctccacatgcaggccctgccgccaaga

SEQ ID NO: 24497 - DNA, 597 bp, synthetic construct
  source 1..597: mol_type = other DNA
tgcatcgtgcggcacgaaaacaacaagaacggcgtggaccaggaaatcatcttcccacccatcaagaccgatgtgattacaatggaccccaaggacaactgctccaaggacgccaacgataccctgctgctccagctgaccaacaccagcgcctactacatgtacttgttgctgctgctgaagtccgtggtgtacttcgccatcatcacatgctgcctgctgcggagaaccgccttctgctgcaacggcgagaagtctcgggttaagttttccagatccgcagacgcacccgcttaccaacaagggcagaaccaactctacaatgaacttaatttggggcggagggaagagtacgacgttctggacaaaaggaggggacgagatcccgagatgggcggaaagcctcagcgaaggaagaatccgcaagaggggctttataacgaactccagaaagataaaatggcagaagcctatagtgagattgggatgaagggagaaaggaggaggggtaaaggtcacgatgggttgtaccaaggattgagcacagccactaaagatacctatgatgcgctccacatgcaggccctgccgccaaga

SEQ ID NO: 24498 - DNA, 594 bp, synthetic construct
  source 1..594: mol_type = other DNA
atcgtgcggcacgaaaacaacaagaacggcgtggaccaggaaatcatcttcccacccatcaagaccgatgtgattacaatggaccccaaggacaactgctccaaggacgccaacgataccctgctgctccagctgaccaacaccagcgcctactacatgtacttgttgctgctgctgaagtccgtggtgtacttcgccatcatcacatgctgcctgctgcggagaaccgccttctgctgcaacggcgagaagtctcgggttaagttttccagatccgcagacgcacccgcttaccaacaagggcagaaccaactctacaatgaacttaatttggggcggagggaagagtacgacgttctggacaaaaggaggggacgagatcccgagatgggcggaaagcctcagcgaaggaagaatccgcaagaggggctttataacgaactccagaaagataaaatggcagaagcctatagtgagattgggatgaagggagaaaggaggaggggtaaaggtcacgatgggttgtaccaaggattgagcacagccactaaagatacctatgatgcgctccacatgcaggccctgccgccaaga

SEQ ID NO: 24499 - DNA, 591 bp, synthetic construct
  source 1..591: mol_type = other DNA
gtgcggcacgaaaacaacaagaacggcgtggaccaggaaatcatcttcccacccatcaagaccgatgtgattacaatggaccccaaggacaactgctccaaggacgccaacgataccctgctgctccagctgaccaacaccagcgcctactacatgtacttgttgctgctgctgaagtccgtggtgtacttcgccatcatcacatgctgcctgctgcggagaaccgccttctgctgcaacggcgagaagtctcgggttaagttttccagatccgcagacgcacccgcttaccaacaagggcagaaccaactctacaatgaacttaatttggggcggagggaagagtacgacgttctggacaaaaggaggggacgagatcccgagatgggcggaaagcctcagcgaaggaagaatccgcaagaggggctttataacgaactccagaaagataaaatggcagaagcctatagtgagattgggatgaagggagaaaggaggaggggtaaaggtcacgatgggttgtaccaaggattgagcacagccactaaagatacctatgatgcgctccacatgcaggccctgccgccaaga

SEQ ID NO: 24500 - DNA, 588 bp, synthetic construct
  source 1..588: mol_type = other DNA
cggcacgaaaacaacaagaacggcgtggaccaggaaatcatcttcccacccatcaagaccgatgtgattacaatggaccccaaggacaactgctccaaggacgccaacgataccctgctgctccagctgaccaacaccagcgcctactacatgtacttgttgctgctgctgaagtccgtggtgtacttcgccatcatcacatgctgcctgctgcggagaaccgccttctgctgcaacggcgagaagtctcgggttaagttttccagatccgcagacgcacccgcttaccaacaagggcagaaccaactctacaatgaacttaatttggggcggagggaagagtacgacgttctggacaaaaggaggggacgagatcccgagatgggcggaaagcctcagcgaaggaagaatccgcaagaggggctttataacgaactccagaaagataaaatggcagaagcctatagtgagattgggatgaagggagaaaggaggaggggtaaaggtcacgatgggttgtaccaaggattgagcacagccactaaagatacctatgatgcgctccacatgcaggccctgccgccaaga

SEQ ID NO: 24501 - DNA, 585 bp, synthetic construct
  source 1..585: mol_type = other DNA
cacgaaaacaacaagaacggcgtggaccaggaaatcatcttcccacccatcaagaccgatgtgattacaatggaccccaaggacaactgctccaaggacgccaacgataccctgctgctccagctgaccaacaccagcgcctactacatgtacttgttgctgctgctgaagtccgtggtgtacttcgccatcatcacatgctgcctgctgcggagaaccgccttctgctgcaacggcgagaagtctcgggttaagttttccagatccgcagacgcacccgcttaccaacaagggcagaaccaactctacaatgaacttaatttggggcggagggaagagtacgacgttctggacaaaaggaggggacgagatcccgagatgggcggaaagcctcagcgaaggaagaatccgcaagaggggctttataacgaactccagaaagataaaatggcagaagcctatagtgagattgggatgaagggagaaaggaggaggggtaaaggtcacgatgggttgtaccaaggattgagcacagccactaaagatacctatgatgcgctccacatgcaggccctgccgccaaga

SEQ ID NO: 24502 - DNA, 582 bp, synthetic construct
  source 1..582: mol_type = other DNA
gaaaacaacaagaacggcgtggaccaggaaatcatcttcccacccatcaagaccgatgtgattacaatggaccccaaggacaactgctccaaggacgccaacgataccctgctgctccagctgaccaacaccagcgcctactacatgtacttgttgctgctgctgaagtccgtggtgtacttcgccatcatcacatgctgcctgctgcggagaaccgccttctgctgcaacggcgagaagtctcgggttaagttttccagatccgcagacgcacccgcttaccaacaagggcagaaccaactctacaatgaacttaatttggggcggagggaagagtacgacgttctggacaaaaggaggggacgagatcccgagatgggcggaaagcctcagcgaaggaagaatccgcaagaggggctttataacgaactccagaaagataaaatggcagaagcctatagtgagattgggatgaagggagaaaggaggaggggtaaaggtcacgatgggttgtaccaaggattgagcacagccactaaagatacctatgatgcgctccacatgcaggccctgccgccaaga

SEQ ID NO: 24503 - DNA, 579 bp, synthetic construct
  source 1..579: mol_type = other DNA
aacaacaagaacggcgtggaccaggaaatcatcttcccacccatcaagaccgatgtgattacaatggaccccaaggacaactgctccaaggacgccaacgataccctgctgctccagctgaccaacaccagcgcctactacatgtacttgttgctgctgctgaagtccgtggtgtacttcgccatcatcacatgctgcctgctgcggagaaccgccttctgctgcaacggcgagaagtctcgggttaagttttccagatccgcagacgcacccgcttaccaacaagggcagaaccaactctacaatgaacttaatttggggcggagggaagagtacgacgttctggacaaaaggaggggacgagatcccgagatgggcggaaagcctcagcgaaggaagaatccgcaagaggggctttataacgaactccagaaagataaaatggcagaagcctatagtgagattgggatgaagggagaaaggaggaggggtaaaggtcacgatgggttgtaccaaggattgagcacagccactaaagatacctatgatgcgctccacatgcaggccctgccgccaaga

SEQ ID NO: 24504 - DNA, 576 bp, synthetic construct
  source 1..576: mol_type = other DNA
aacaagaacggcgtggaccaggaaatcatcttcccacccatcaagaccgatgtgattacaatggaccccaaggacaactgctccaaggacgccaacgataccctgctgctccagctgaccaacaccagcgcctactacatgtacttgttgctgctgctgaagtccgtggtgtacttcgccatcatcacatgctgcctgctgcggagaaccgccttctgctgcaacggcgagaagtctcgggttaagttttccagatccgcagacgcacccgcttaccaacaagggcagaaccaactctacaatgaacttaatttggggcggagggaagagtacgacgttctggacaaaaggaggggacgagatcccgagatgggcggaaagcctcagcgaaggaagaatccgcaagaggggctttataacgaactccagaaagataaaatggcagaagcctatagtgagattgggatgaagggagaaaggaggaggggtaaaggtcacgatgggttgtaccaaggattgagcacagccactaaagatacctatgatgcgctccacatgcaggccctgccgccaaga

SEQ ID NO: 24505 - DNA, 573 bp, synthetic construct
  source 1..573: mol_type = other DNA
aagaacggcgtggaccaggaaatcatcttcccacccatcaagaccgatgtgattacaatggaccccaaggacaactgctccaaggacgccaacgataccctgctgctccagctgaccaacaccagcgcctactacatgtacttgttgctgctgctgaagtccgtggtgtacttcgccatcatcacatgctgcctgctgcggagaaccgccttctgctgcaacggcgagaagtctcgggttaagttttccagatccgcagacgcacccgcttaccaacaagggcagaaccaactctacaatgaacttaatttggggcggagggaagagtacgacgttctggacaaaaggaggggacgagatcccgagatgggcggaaagcctcagcgaaggaagaatccgcaagaggggctttataacgaactccagaaagataaaatggcagaagcctatagtgagattgggatgaagggagaaaggaggaggggtaaaggtcacgatgggttgtaccaaggattgagcacagccactaaagatacctatgatgcgctccacatgcaggccctgccgccaaga

SEQ ID NO: 24506 - DNA, 570 bp, synthetic construct
  source 1..570: mol_type = other DNA
aacggcgtggaccaggaaatcatcttcccacccatcaagaccgatgtgattacaatggaccccaaggacaactgctccaaggacgccaacgataccctgctgctccagctgaccaacaccagcgcctactacatgtacttgttgctgctgctgaagtccgtggtgtacttcgccatcatcacatgctgcctgctgcggagaaccgccttctgctgcaacggcgagaagtctcgggttaagttttccagatccgcagacgcacccgcttaccaacaagggcagaaccaactctacaatgaacttaatttggggcggagggaagagtacgacgttctggacaaaaggaggggacgagatcccgagatgggcggaaagcctcagcgaaggaagaatccgcaagaggggctttataacgaactccagaaagataaaatggcagaagcctatagtgagattgggatgaagggagaaaggaggaggggtaaaggtcacgatgggttgtaccaaggattgagcacagccactaaagatacctatgatgcgctccacatgcaggccctgccgccaaga

SEQ ID NO: 24507 - DNA, 567 bp, synthetic construct
  source 1..567: mol_type = other DNA
ggcgtggaccaggaaatcatcttcccacccatcaagaccgatgtgattacaatggaccccaaggacaactgctccaaggacgccaacgataccctgctgctccagctgaccaacaccagcgcctactacatgtacttgttgctgctgctgaagtccgtggtgtacttcgccatcatcacatgctgcctgctgcggagaaccgccttctgctgcaacggcgagaagtctcgggttaagttttccagatccgcagacgcacccgcttaccaacaagggcagaaccaactctacaatgaacttaatttggggcggagggaagagtacgacgttctggacaaaaggaggggacgagatcccgagatgggcggaaagcctcagcgaaggaagaatccgcaagaggggctttataacgaactccagaaagataaaatggcagaagcctatagtgagattgggatgaagggagaaaggaggaggggtaaaggtcacgatgggttgtaccaaggattgagcacagccactaaagatacctatgatgcgctccacatgcaggccctgccgccaaga

SEQ ID NO: 24508 - DNA, 564 bp, synthetic construct
  source 1..564: mol_type = other DNA
gtggaccaggaaatcatcttcccacccatcaagaccgatgtgattacaatggaccccaaggacaactgctccaaggacgccaacgataccctgctgctccagctgaccaacaccagcgcctactacatgtacttgttgctgctgctgaagtccgtggtgtacttcgccatcatcacatgctgcctgctgcggagaaccgccttctgctgcaacggcgagaagtctcgggttaagttttccagatccgcagacgcacccgcttaccaacaagggcagaaccaactctacaatgaacttaatttggggcggagggaagagtacgacgttctggacaaaaggaggggacgagatcccgagatgggcggaaagcctcagcgaaggaagaatccgcaagaggggctttataacgaactccagaaagataaaatggcagaagcctatagtgagattgggatgaagggagaaaggaggaggggtaaaggtcacgatgggttgtaccaaggattgagcacagccactaaagatacctatgatgcgctccacatgcaggccctgccgccaaga

SEQ ID NO: 24509 - DNA, 561 bp, synthetic construct
  source 1..561: mol_type = other DNA
gaccaggaaatcatcttcccacccatcaagaccgatgtgattacaatggaccccaaggacaactgctccaaggacgccaacgataccctgctgctccagctgaccaacaccagcgcctactacatgtacttgttgctgctgctgaagtccgtggtgtacttcgccatcatcacatgctgcctgctgcggagaaccgccttctgctgcaacggcgagaagtctcgggttaagttttccagatccgcagacgcacccgcttaccaacaagggcagaaccaactctacaatgaacttaatttggggcggagggaagagtacgacgttctggacaaaaggaggggacgagatcccgagatgggcggaaagcctcagcgaaggaagaatccgcaagaggggctttataacgaactccagaaagataaaatggcagaagcctatagtgagattgggatgaagggagaaaggaggaggggtaaaggtcacgatgggttgtaccaaggattgagcacagccactaaagatacctatgatgcgctccacatgcaggccctgccgccaaga

SEQ ID NO: 24510 - DNA, 558 bp, synthetic construct
  source 1..558: mol_type = other DNA
caggaaatcatcttcccacccatcaagaccgatgtgattacaatggaccccaaggacaactgctccaaggacgccaacgataccctgctgctccagctgaccaacaccagcgcctactacatgtacttgttgctgctgctgaagtccgtggtgtacttcgccatcatcacatgctgcctgctgcggagaaccgccttctgctgcaacggcgagaagtctcgggttaagttttccagatccgcagacgcacccgcttaccaacaagggcagaaccaactctacaatgaacttaatttggggcggagggaagagtacgacgttctggacaaaaggaggggacgagatcccgagatgggcggaaagcctcagcgaaggaagaatccgcaagaggggctttataacgaactccagaaagataaaatggcagaagcctatagtgagattgggatgaagggagaaaggaggaggggtaaaggtcacgatgggttgtaccaaggattgagcacagccactaaagatacctatgatgcgctccacatgcaggccctgccgccaaga

SEQ ID NO: 24511 - DNA, 798 bp, synthetic construct; identical to SEQ ID NO: 23943
  source 1..798: mol_type = other DNA

SEQ ID NO: 24512 - DNA, 795 bp, synthetic construct
  source 1..795: mol_type = other DNA
cagcctcacaccaagcccagcgtgttcgtgatgaagaacggcaccaacgtggcctgcctcgtgaaagagttctaccccaaggacatcaggatcaacctggtgtccagcaagaagatcaccgagttcgaccccgccatcgtgatctcccccagcggcaagtacaacgccgtgaagctggggaagtacgaggacagcaacagcgtgacctgctccgtgcagcacgacaacaagaccgtgcacagcaccgactttgaagtgaaaaccgactccaccgaccacgtgaagcccaaagagacagagaacaccaagcagcccagcaagagctgccacaagcccaaggccatcgtgcacaccgagaaagtgaacatgatgagcctgaccgtgctgggcctgcggatgctgttcgccaaaaccgtggccgtgaacttcctgctgaccgccaagctgttcttcctccgggttaagttttccagatccgcagacgcacccgcttaccaacaagggcagaaccaactctacaatgaacttaatttggggcggagggaagagtacgacgttctggacaaaaggaggggacgagatcccgagatgggcggaaagcctcagcgaaggaagaatccgcaagaggggctttataacgaactccagaaagataaaatggcagaagcctatagtgagattgggatgaagggagaaaggaggaggggtaaaggtcacgatgggttgtaccaaggattgagcacagccactaaagatacctatgatgcgctccacatgcaggccctgccgccaaga

SEQ ID NO: 24513 - DNA, 792 bp, synthetic construct
  source 1..792: mol_type = other DNA
cctcacaccaagcccagcgtgttcgtgatgaagaacggcaccaacgtggcctgcctcgtgaaagagttctaccccaaggacatcaggatcaacctggtgtccagcaagaagatcaccgagttcgaccccgccatcgtgatctcccccagcggcaagtacaacgccgtgaagctggggaagtacgaggacagcaacagcgtgacctgctccgtgcagcacgacaacaagaccgtgcacagcaccgactttgaagtgaaaaccgactccaccgaccacgtgaagcccaaagagacagagaacaccaagcagcccagcaagagctgccacaagcccaaggccatcgtgcacaccgagaaagtgaacatgatgagcctgaccgtgctgggcctgcggatgctgttcgccaaaaccgtggccgtgaacttcctgctgaccgccaagctgttcttcctccgggttaagttttccagatccgcagacgcacccgcttaccaacaagggcagaaccaactctacaatgaacttaatttggggcggagggaagagtacgacgttctggacaaaaggaggggacgagatcccgagatgggcggaaagcctcagcgaaggaagaatccgcaagaggggctttataacgaactccagaaagataaaatggcagaagcctatagtgagattgggatgaagggagaaaggaggaggggtaaaggtcacgatgggttgtaccaaggattgagcacagccactaaagatacctatgatgcgctccacatgcaggccctgccgccaaga

SEQ ID NO: 24514 - DNA, 789 bp, synthetic construct
  source 1..789: mol_type = other DNA
cacaccaagcccagcgtgttcgtgatgaagaacggcaccaacgtggcctgcctcgtgaaagagttctaccccaaggacatcaggatcaacctggtgtccagcaagaagatcaccgagttcgaccccgccatcgtgatctcccccagcggcaagtacaacgccgtgaagctggggaagtacgaggacagcaacagcgtgacctgctccgtgcagcacgacaacaagaccgtgcacagcaccgactttgaagtgaaaaccgactccaccgaccacgtgaagcccaaagagacagagaacaccaagcagcccagcaagagctgccacaagcccaaggccatcgtgcacaccgagaaagtgaacatgatgagcctgaccgtgctgggcctgcggatgctgttcgccaaaaccgtggccgtgaacttcctgctgaccgccaagctgttcttcctccgggttaagttttccagatccgcagacgcacccgcttaccaacaagggcagaaccaactctacaatgaacttaatttggggcggagggaagagtacgacgttctggacaaaaggaggggacgagatcccgagatgggcggaaagcctcagcgaaggaagaatccgcaagaggggctttataacgaactccagaaagataaaatggcagaagcctatagtgagattgggatgaagggagaaaggaggaggggtaaaggtcacgatgggttgtaccaaggattgagcacagccactaaagatacctatgatgcgctccacatgcaggccctgccgccaaga

SEQ ID NO: 24515 - DNA, 786 bp, synthetic construct
  source 1..786: mol_type = other DNA
accaagcccagcgtgttcgtgatgaagaacggcaccaacgtggcctgcctcgtgaaagagttctaccccaaggacatcaggatcaacctggtgtccagcaagaagatcaccgagttcgaccccgccatcgtgatctcccccagcggcaagtacaacgccgtgaagctggggaagtacgaggacagcaacagcgtgacctgctccgtgcagcacgacaacaagaccgtgcacagcaccgactttgaagtgaaaaccgactccaccgaccacgtgaagcccaaagagacagagaacaccaagcagcccagcaagagctgccacaagcccaaggccatcgtgcacaccgagaaagtgaacatgatgagcctgaccgtgctgggcctgcggatgctgttcgccaaaaccgtggccgtgaacttcctgctgaccgccaagctgttcttcctccgggttaagttttccagatccgcagacgcacccgcttaccaacaagggcagaaccaactctacaatgaacttaatttggggcggagggaagagtacgacgttctggacaaaaggaggggacgagatcccgagatgggcggaaagcctcagcgaaggaagaatccgcaagaggggctttataacgaactccagaaagataaaatggcagaagcctatagtgagattgggatgaagggagaaaggaggaggggtaaaggtcacgatgggttgtaccaaggattgagcacagccactaaagatacctatgatgcgctccacatgcaggccctgccgccaaga

SEQ ID NO: 24516 - DNA, 783 bp, synthetic construct
  source 1..783: mol_type = other DNA
aagcccagcgtgttcgtgatgaagaacggcaccaacgtggcctgcctcgtgaaagagttctaccccaaggacatcaggatcaacctggtgtccagcaagaagatcaccgagttcgaccccgccatcgtgatctcccccagcggcaagtacaacgccgtgaagctggggaagtacgaggacagcaacagcgtgacctgctccgtgcagcacgacaacaagaccgtgcacagcaccgactttgaagtgaaaaccgactccaccgaccacgtgaagcccaaagagacagagaacaccaagcagcccagcaagagctgccacaagcccaaggccatcgtgcacaccgagaaagtgaacatgatgagcctgaccgtgctgggcctgcggatgctgttcgccaaaaccgtggccgtgaacttcctgctgaccgccaagctgttcttcctccgggttaagttttccagatccgcagacgcacccgcttaccaacaagggcagaaccaactctacaatgaacttaatttggggcggagggaagagtacgacgttctggacaaaaggaggggacgagatcccgagatgggcggaaagcctcagcgaaggaagaatccgcaagaggggctttataacgaactccagaaagataaaatggcagaagcctatagtgagattgggatgaagggagaaaggaggaggggtaaaggtcacgatgggttgtaccaaggattgagcacagccactaaagatacctatgatgcgctccacatgcaggccctgccgccaaga

SEQ ID NO: 24517 - DNA, 777 bp, synthetic construct
  source 1..777: mol_type = other DNA
agcgtgttcgtgatgaagaacggcaccaacgtggcctgcctcgtgaaagagttctaccccaaggacatcaggatcaacctggtgtccagcaagaagatcaccgagttcgaccccgccatcgtgatctcccccagcggcaagtacaacgccgtgaagctggggaagtacgaggacagcaacagcgtgacctgctccgtgcagcacgacaacaagaccgtgcacagcaccgactttgaagtgaaaaccgactccaccgaccacgtgaagcccaaagagacagagaacaccaagcagcccagcaagagctgccacaagcccaaggccatcgtgcacaccgagaaagtgaacatgatgagcctgaccgtgctgggcctgcggatgctgttcgccaaaaccgtggccgtgaacttcctgctgaccgccaagctgttcttcctccgggttaagttttccagatccgcagacgcacccgcttaccaacaagggcagaaccaactctacaatgaacttaatttggggcggagggaagagtacgacgttctggacaaaaggaggggacgagatcccgagatgggcggaaagcctcagcgaaggaagaatccgcaagaggggctttataacgaactccagaaagataaaatggcagaagcctatagtgagattgggatgaagggagaaaggaggaggggtaaaggtcacgatgggttgtaccaaggattgagcacagccactaaagatacctatgatgcgctccacatgcaggccctgccgccaaga

SEQ ID NO: 24518 - DNA, 774 bp, synthetic construct
  source 1..774: mol_type = other DNA
gtgttcgtgatgaagaacggcaccaacgtggcctgcctcgtgaaagagttctaccccaaggacatcaggatcaacctggtgtccagcaagaagatcaccgagttcgaccccgccatcgtgatctcccccagcggcaagtacaacgccgtgaagctggggaagtacgaggacagcaacagcgtgacctgctccgtgcagcacgacaacaagaccgtgcacagcaccgactttgaagtgaaaaccgactccaccgaccacgtgaagcccaaagagacagagaacaccaagcagcccagcaagagctgccacaagcccaaggccatcgtgcacaccgagaaagtgaacatgatgagcctgaccgtgctgggcctgcggatgctgttcgccaaaaccgtggccgtgaacttcctgctgaccgccaagctgttcttcctccgggttaagttttccagatccgcagacgcacccgcttaccaacaagggcagaaccaactctacaatgaacttaatttggggcggagggaagagtacgacgttctggacaaaaggaggggacgagatcccgagatgggcggaaagcctcagcgaaggaagaatccgcaagaggggctttataacgaactccagaaagataaaatggcagaagcctatagtgagattgggatgaagggagaaaggaggaggggtaaaggtcacgatgggttgtaccaaggattgagcacagccactaaagatacctatgatgcgctccacatgcaggccctgccgccaaga

SEQ ID NO: 24519 - DNA, 771 bp, synthetic construct
  source 1..771: mol_type = other DNA
ttcgtgatgaagaacggcaccaacgtggcctgcctcgtgaaagagttctaccccaaggacatcaggatcaacctggtgtccagcaagaagatcaccgagttcgaccccgccatcgtgatctcccccagcggcaagtacaacgccgtgaagctggggaagtacgaggacagcaacagcgtgacctgctccgtgcagcacgacaacaagaccgtgcacagcaccgactttgaagtgaaaaccgactccaccgaccacgtgaagcccaaagagacagagaacaccaagcagcccagcaagagctgccacaagcccaaggccatcgtgcacaccgagaaagtgaacatgatgagcctgaccgtgctgggcctgcggatgctgttcgccaaaaccgtggccgtgaacttcctgctgaccgccaagctgttcttcctccgggttaagttttccagatccgcagacgcacccgcttaccaacaagggcagaaccaactctacaatgaacttaatttggggcggagggaagagtacgacgttctggacaaaaggaggggacgagatcccgagatgggcggaaagcctcagcgaaggaagaatccgcaagaggggctttataacgaactccagaaagataaaatggcagaagcctatagtgagattgggatgaagggagaaaggaggaggggtaaaggtcacgatgggttgtaccaaggattgagcacagccactaaagatacctatgatgcgctccacatgcaggccctgccgccaaga

SEQ ID NO: 24520 - DNA, 768 bp, synthetic construct
  source 1..768: mol_type = other DNA
gtgatgaagaacggcaccaacgtggcctgcctcgtgaaagagttctaccccaaggacatcaggatcaacctggtgtccagcaagaagatcaccgagttcgaccccgccatcgtgatctcccccagcggcaagtacaacgccgtgaagctggggaagtacgaggacagcaacagcgtgacctgctccgtgcagcacgacaacaagaccgtgcacagcaccgactttgaagtgaaaaccgactccaccgaccacgtgaagcccaaagagacagagaacaccaagcagcccagcaagagctgccacaagcccaaggccatcgtgcacaccgagaaagtgaacatgatgagcctgaccgtgctgggcctgcggatgctgttcgccaaaaccgtggccgtgaacttcctgctgaccgccaagctgttcttcctccgggttaagttttccagatccgcagacgcacccgcttaccaacaagggcagaaccaactctacaatgaacttaatttggggcggagggaagagtacgacgttctggacaaaaggaggggacgagatcccgagatgggcggaaagcctcagcgaaggaagaatccgcaagaggggctttataacgaactccagaaagataaaatggcagaagcctatagtgagattgggatgaagggagaaaggaggaggggtaaaggtcacgatgggttgtaccaaggattgagcacagccactaaagatacctatgatgcgctccacatgcaggccctgccgccaaga

SEQ ID NO: 24521 - DNA, 765 bp, synthetic construct
  source 1..765: mol_type = other DNA
atgaagaacggcaccaacgtggcctgcctcgtgaaagagttctaccccaaggacatcaggatcaacctggtgtccagcaagaagatcaccgagttcgaccccgccatcgtgatctcccccagcggcaagtacaacgccgtgaagctggggaagtacgaggacagcaacagcgtgacctgctccgtgcagcacgacaacaagaccgtgcacagcaccgactttgaagtgaaaaccgactccaccgaccacgtgaagcccaaagagacagagaacaccaagcagcccagcaagagctgccacaagcccaaggccatcgtgcacaccgagaaagtgaacatgatgagcctgaccgtgctgggcctgcggatgctgttcgccaaaaccgtggccgtgaacttcctgctgaccgccaagctgttcttcctccgggttaagttttccagatccgcagacgcacccgcttaccaacaagggcagaaccaactctacaatgaacttaatttggggcggagggaagagtacgacgttctggacaaaaggaggggacgagatcccgagatgggcggaaagcctcagcgaaggaagaatccgcaagaggggctttataacgaactccagaaagataaaatggcagaagcctatagtgagattgggatgaagggagaaaggaggaggggtaaaggtcacgatgggttgtaccaaggattgagcacagccactaaagatacctatgatgcgctccacatgcaggccctgccgccaaga

SEQ ID NO: 24522 - DNA, 762 bp, synthetic construct
  source 1..762: mol_type = other DNA
aagaacggcaccaacgtggcctgcctcgtgaaagagttctaccccaaggacatcaggatcaacctggtgtccagcaagaagatcaccgagttcgaccccgccatcgtgatctcccccagcggcaagtacaacgccgtgaagctggggaagtacgaggacagcaacagcgtgacctgctccgtgcagcacgacaacaagaccgtgcacagcaccgactttgaagtgaaaaccgactccaccgaccacgtgaagcccaaagagacagagaacaccaagcagcccagcaagagctgccacaagcccaaggccatcgtgcacaccgagaaagtgaacatgatgagcctgaccgtgctgggcctgcggatgctgttcgccaaaaccgtggccgtgaacttcctgctgaccgccaagctgttcttcctccgggttaagttttccagatccgcagacgcacccgcttaccaacaagggcagaaccaactctacaatgaacttaatttggggcggagggaagagtacgacgttctggacaaaaggaggggacgagatcccgagatgggcggaaagcctcagcgaaggaagaatccgcaagaggggctttataacgaactccagaaagataaaatggcagaagcctatagtgagattgggatgaagggagaaaggaggaggggtaaaggtcacgatgggttgtaccaaggattgagcacagccactaaagatacctatgatgcgctccacatgcaggccctgccgccaaga

SEQ ID NO: 24523 - DNA, 759 bp, synthetic construct
  source 1..759: mol_type = other DNA
aacggcaccaacgtggcctgcctcgtgaaagagttctaccccaaggacatcaggatcaacctggtgtccagcaagaagatcaccgagttcgaccccgccatcgtgatctcccccagcggcaagtacaacgccgtgaagctggggaagtacgaggacagcaacagcgtgacctgctccgtgcagcacgacaacaagaccgtgcacagcaccgactttgaagtgaaaaccgactccaccgaccacgtgaagcccaaagagacagagaacaccaagcagcccagcaagagctgccacaagcccaaggccatcgtgcacaccgagaaagtgaacatgatgagcctgaccgtgctgggcctgcggatgctgttcgccaaaaccgtggccgtgaacttcctgctgaccgccaagctgttcttcctccgggttaagttttccagatccgcagacgcacccgcttaccaacaagggcagaaccaactctacaatgaacttaatttggggcggagggaagagtacgacgttctggacaaaaggaggggacgagatcccgagatgggcggaaagcctcagcgaaggaagaatccgcaagaggggctttataacgaactccagaaagataaaatggcagaagcctatagtgagattgggatgaagggagaaaggaggaggggtaaaggtcacgatgggttgtaccaaggattgagcacagccactaaagatacctatgatgcgctccacatgcaggccctgccgccaaga

SEQ ID NO: 24524 - DNA, 756 bp, synthetic construct
  source 1..756: mol_type = other DNA
ggcaccaacgtggcctgcctcgtgaaagagttctaccccaaggacatcaggatcaacctggtgtccagcaagaagatcaccgagttcgaccccgccatcgtgatctcccccagcggcaagtacaacgccgtgaagctggggaagtacgaggacagcaacagcgtgacctgctccgtgcagcacgacaacaagaccgtgcacagcaccgactttgaagtgaaaaccgactccaccgaccacgtgaagcccaaagagacagagaacaccaagcagcccagcaagagctgccacaagcccaaggccatcgtgcacaccgagaaagtgaacatgatgagcctgaccgtgctgggcctgcggatgctgttcgccaaaaccgtggccgtgaacttcctgctgaccgccaagctgttcttcctccgggttaagttttccagatccgcagacgcacccgcttaccaacaagggcagaaccaactctacaatgaacttaatttggggcggagggaagagtacgacgttctggacaaaaggaggggacgagatcccgagatgggcggaaagcctcagcgaaggaagaatccgcaagaggggctttataacgaactccagaaagataaaatggcagaagcctatagtgagattgggatgaagggagaaaggaggaggggtaaaggtcacgatgggttgtaccaaggattgagcacagccactaaagatacctatgatgcgctccacatgcaggccctgccgccaaga

SEQ ID NO: 24525 - DNA, 753 bp, synthetic construct
  source 1..753: mol_type = other DNA
accaacgtggcctgcctcgtgaaagagttctaccccaaggacatcaggatcaacctggtgtccagcaagaagatcaccgagttcgaccccgccatcgtgatctcccccagcggcaagtacaacgccgtgaagctggggaagtacgaggacagcaacagcgtgacctgctccgtgcagcacgacaacaagaccgtgcacagcaccgactttgaagtgaaaaccgactccaccgaccacgtgaagcccaaagagacagagaacaccaagcagcccagcaagagctgccacaagcccaaggccatcgtgcacaccgagaaagtgaacatgatgagcctgaccgtgctgggcctgcggatgctgttcgccaaaaccgtggccgtgaacttcctgctgaccgccaagctgttcttcctccgggttaagttttccagatccgcagacgcacccgcttaccaacaagggcagaaccaactctacaatgaacttaatttggggcggagggaagagtacgacgttctggacaaaaggaggggacgagatcccgagatgggcggaaagcctcagcgaaggaagaatccgcaagaggggctttataacgaactccagaaagataaaatggcagaagcctatagtgagattgggatgaagggagaaaggaggaggggtaaaggtcacgatgggttgtaccaaggattgagcacagccactaaagatacctatgatgcgctccacatgcaggccctgccgccaaga

SEQ ID NO: 24526 - DNA, 750 bp, synthetic construct
  source 1..750: mol_type = other DNA
aacgtggcctgcctcgtgaaagagttctaccccaaggacatcaggatcaacctggtgtccagcaagaagatcaccgagttcgaccccgccatcgtgatctcccccagcggcaagtacaacgccgtgaagctggggaagtacgaggacagcaacagcgtgacctgctccgtgcagcacgacaacaagaccgtgcacagcaccgactttgaagtgaaaaccgactccaccgaccacgtgaagcccaaagagacagagaacaccaagcagcccagcaagagctgccacaagcccaaggccatcgtgcacaccgagaaagtgaacatgatgagcctgaccgtgctgggcctgcggatgctgttcgccaaaaccgtggccgtgaacttcctgctgaccgccaagctgttcttcctccgggttaagttttccagatccgcagacgcacccgcttaccaacaagggcagaaccaactctacaatgaacttaatttggggcggagggaagagtacgacgttctggacaaaaggaggggacgagatcccgagatgggcggaaagcctcagcgaaggaagaatccgcaagaggggctttataacgaactccagaaagataaaatggcagaagcctatagtgagattgggatgaagggagaaaggaggaggggtaaaggtcacgatgggttgtaccaaggattgagcacagccactaaagatacctatgatgcgctccacatgcaggccctgccgccaaga

SEQ ID NO: 24527 - DNA, 747 bp, synthetic construct
  source 1..747: mol_type = other DNA
gtggcctgcctcgtgaaagagttctaccccaaggacatcaggatcaacctggtgtccagcaagaagatcaccgagttcgaccccgccatcgtgatctcccccagcggcaagtacaacgccgtgaagctggggaagtacgaggacagcaacagcgtgacctgctccgtgcagcacgacaacaagaccgtgcacagcaccgactttgaagtgaaaaccgactccaccgaccacgtgaagcccaaagagacagagaacaccaagcagcccagcaagagctgccacaagcccaaggccatcgtgcacaccgagaaagtgaacatgatgagcctgaccgtgctgggcctgcggatgctgttcgccaaaaccgtggccgtgaacttcctgctgaccgccaagctgttcttcctccgggttaagttttccagatccgcagacgcacccgcttaccaacaagggcagaaccaactctacaatgaacttaatttggggcggagggaagagtacgacgttctggacaaaaggaggggacgagatcccgagatgggcggaaagcctcagcgaaggaagaatccgcaagaggggctttataacgaactccagaaagataaaatggcagaagcctatagtgagattgggatgaagggagaaaggaggaggggtaaaggtcacgatgggttgtaccaaggattgagcacagccactaaagatacctatgatgcgctccacatgcaggccctgccgccaaga

SEQ ID NO: 24528 - DNA, 744 bp, synthetic construct
  source 1..744: mol_type = other DNA
gcctgcctcgtgaaagagttctaccccaaggacatcaggatcaacctggtgtccagcaagaagatcaccgagttcgaccccgccatcgtgatctcccccagcggcaagtacaacgccgtgaagctggggaagtacgaggacagcaacagcgtgacctgctccgtgcagcacgacaacaagaccgtgcacagcaccgactttgaagtgaaaaccgactccaccgaccacgtgaagcccaaagagacagagaacaccaagcagcccagcaagagctgccacaagcccaaggccatcgtgcacaccgagaaagtgaacatgatgagcctgaccgtgctgggcctgcggatgctgttcgccaaaaccgtggccgtgaacttcctgctgaccgccaagctgttcttcctccgggttaagttttccagatccgcagacgcacccgcttaccaacaagggcagaaccaactctacaatgaacttaatttggggcggagggaagagtacgacgttctggacaaaaggaggggacgagatcccgagatgggcggaaagcctcagcgaaggaagaatccgcaagaggggctttataacgaactccagaaagataaaatggcagaagcctatagtgagattgggatgaagggagaaaggaggaggggtaaaggtcacgatgggttgtaccaaggattgagcacagccactaaagatacctatgatgcgctccacatgcaggccctgccgccaaga

SEQ ID NO: 24529 - DNA, 741 bp, synthetic construct
  source 1..741: mol_type = other DNA
tgcctcgtgaaagagttctaccccaaggacatcaggatcaacctggtgtccagcaagaagatcaccgagttcgaccccgccatcgtgatctcccccagcggcaagtacaacgccgtgaagctggggaagtacgaggacagcaacagcgtgacctgctccgtgcagcacgacaacaagaccgtgcacagcaccgactttgaagtgaaaaccgactccaccgaccacgtgaagcccaaagagacagagaacaccaagcagcccagcaagagctgccacaagcccaaggccatcgtgcacaccgagaaagtgaacatgatgagcctgaccgtgctgggcctgcggatgctgttcgccaaaaccgtggccgtgaacttcctgctgaccgccaagctgttcttcctccgggttaagttttccagatccgcagacgcacccgcttaccaacaagggcagaaccaactctacaatgaacttaatttggggcggagggaagagtacgacgttctggacaaaaggaggggacgagatcccgagatgggcggaaagcctcagcgaaggaagaatccgcaagaggggctttataacgaactccagaaagataaaatggcagaagcctatagtgagattgggatgaagggagaaaggaggaggggtaaaggtcacgatgggttgtaccaaggattgagcacagccactaaagatacctatgatgcgctccacatgcaggccctgccgccaaga

SEQ ID NO: 24530 - DNA, 738 bp, synthetic construct
  source 1..738: mol_type = other DNA
ctcgtgaaagagttctaccccaaggacatcaggatcaacctggtgtccagcaagaagatcaccgagttcgaccccgccatcgtgatctcccccagcggcaagtacaacgccgtgaagctggggaagtacgaggacagcaacagcgtgacctgctccgtgcagcacgacaacaagaccgtgcacagcaccgactttgaagtgaaaaccgactccaccgaccacgtgaagcccaaagagacagagaacaccaagcagcccagcaagagctgccacaagcccaaggccatcgtgcacaccgagaaagtgaacatgatgagcctgaccgtgctgggcctgcggatgctgttcgccaaaaccgtggccgtgaacttcctgctgaccgccaagctgttcttcctccgggttaagttttccagatccgcagacgcacccgcttaccaacaagggcagaaccaactctacaatgaacttaatttggggcggagggaagagtacgacgttctggacaaaaggaggggacgagatcccgagatgggcggaaagcctcagcgaaggaagaatccgcaagaggggctttataacgaactccagaaagataaaatggcagaagcctatagtgagattgggatgaagggagaaaggaggaggggtaaaggtcacgatgggttgtaccaaggattgagcacagccactaaagatacctatgatgcgctccacatgcaggccctgccgccaaga

SEQ ID NO: 24531 - DNA, 735 bp, synthetic construct
  source 1..735: mol_type = other DNA
gtgaaagagttctaccccaaggacatcaggatcaacctggtgtccagcaagaagatcaccgagttcgaccccgccatcgtgatctcccccagcggcaagtacaacgccgtgaagctggggaagtacgaggacagcaacagcgtgacctgctccgtgcagcacgacaacaagaccgtgcacagcaccgactttgaagtgaaaaccgactccaccgaccacgtgaagcccaaagagacagagaacaccaagcagcccagcaagagctgccacaagcccaaggccatcgtgcacaccgagaaagtgaacatgatgagcctgaccgtgctgggcctgcggatgctgttcgccaaaaccgtggccgtgaacttcctgctgaccgccaagctgttcttcctccgggttaagttttccagatccgcagacgcacccgcttaccaacaagggcagaaccaactctacaatgaacttaatttggggcggagggaagagtacgacgttctggacaaaaggaggggacgagatcccgagatgggcggaaagcctcagcgaaggaagaatccgcaagaggggctttataacgaactccagaaagataaaatggcagaagcctatagtgagattgggatgaagggagaaaggaggaggggtaaaggtcacgatgggttgtaccaaggattgagcacagccactaaagatacctatgatgcgctccacatgcaggccctgccgccaaga

SEQ ID NO: 24532 - DNA, 732 bp, synthetic construct
  source 1..732: mol_type = other DNA
aaagagttctaccccaaggacatcaggatcaacctggtgtccagcaagaagatcaccgagttcgaccccgccatcgtgatctcccccagcggcaagtacaacgccgtgaagctggggaagtacgaggacagcaacagcgtgacctgctccgtgcagcacgacaacaagaccgtgcacagcaccgactttgaagtgaaaaccgactccaccgaccacgtgaagcccaaagagacagagaacaccaagcagcccagcaagagctgccacaagcccaaggccatcgtgcacaccgagaaagtgaacatgatgagcctgaccgtgctgggcctgcggatgctgttcgccaaaaccgtggccgtgaacttcctgctgaccgccaagctgttcttcctccgggttaagttttccagatccgcagacgcacccgcttaccaacaagggcagaaccaactctacaatgaacttaatttggggcggagggaagagtacgacgttctggacaaaaggaggggacgagatcccgagatgggcggaaagcctcagcgaaggaagaatccgcaagaggggctttataacgaactccagaaagataaaatggcagaagcctatagtgagattgggatgaagggagaaaggaggaggggtaaaggtcacgatgggttgtaccaaggattgagcacagccactaaagatacctatgatgcgctccacatgcaggccctgccgccaaga

SEQ ID NO: 24533 - DNA, 729 bp, synthetic construct
  source 1..729: mol_type = other DNA
gagttctaccccaaggacatcaggatcaacctggtgtccagcaagaagatcaccgagttcgaccccgccatcgtgatctcccccagcggcaagtacaacgccgtgaagctggggaagtacgaggacagcaacagcgtgacctgctccgtgcagcacgacaacaagaccgtgcacagcaccgactttgaagtgaaaaccgactccaccgaccacgtgaagcccaaagagacagagaacaccaagcagcccagcaagagctgccacaagcccaaggccatcgtgcacaccgagaaagtgaacatgatgagcctgaccgtgctgggcctgcggatgctgttcgccaaaaccgtggccgtgaacttcctgctgaccgccaagctgttcttcctccgggttaagttttccagatccgcagacgcacccgcttaccaacaagggcagaaccaactctacaatgaacttaatttggggcggagggaagagtacgacgttctggacaaaaggaggggacgagatcccgagatgggcggaaagcctcagcgaaggaagaatccgcaagaggggctttataacgaactccagaaagataaaatggcagaagcctatagtgagattgggatgaagggagaaaggaggaggggtaaaggtcacgatgggttgtaccaaggattgagcacagccactaaagatacctatgatgcgctccacatgcaggccctgccgccaaga

SEQ ID NO: 24534 - DNA, 726 bp, synthetic construct
  source 1..726: mol_type = other DNA
ttctaccccaaggacatcaggatcaacctggtgtccagcaagaagatcaccgagttcgaccccgccatcgtgatctcccccagcggcaagtacaacgccgtgaagctggggaagtacgaggacagcaacagcgtgacctgctccgtgcagcacgacaacaagaccgtgcacagcaccgactttgaagtgaaaaccgactccaccgaccacgtgaagcccaaagagacagagaacaccaagcagcccagcaagagctgccacaagcccaaggccatcgtgcacaccgagaaagtgaacatgatgagcctgaccgtgctgggcctgcggatgctgttcgccaaaaccgtggccgtgaacttcctgctgaccgccaagctgttcttcctccgggttaagttttccagatccgcagacgcacccgcttaccaacaagggcagaaccaactctacaatgaacttaatttggggcggagggaagagtacgacgttctggacaaaaggaggggacgagatcccgagatgggcggaaagcctcagcgaaggaagaatccgcaagaggggctttataacgaactccagaaagataaaatggcagaagcctatagtgagattgggatgaagggagaaaggaggaggggtaaaggtcacgatgggttgtaccaaggattgagcacagccactaaagatacctatgatgcgctccacatgcaggccctgccgccaaga

SEQ ID NO: 24535 - DNA, 723 bp, synthetic construct
  source 1..723: mol_type = other DNA
taccccaaggacatcaggatcaacctggtgtccagcaagaagatcaccgagttcgaccccgccatcgtgatctcccccagcggcaagtacaacgccgtgaagctggggaagtacgaggacagcaacagcgtgacctgctccgtgcagcacgacaacaagaccgtgcacagcaccgactttgaagtgaaaaccgactccaccgaccacgtgaagcccaaagagacagagaacaccaagcagcccagcaagagctgccacaagcccaaggccatcgtgcacaccgagaaagtgaacatgatgagcctgaccgtgctgggcctgcggatgctgttcgccaaaaccgtggccgtgaacttcctgctgaccgccaagctgttcttcctccgggttaagttttccagatccgcagacgcacccgcttaccaacaagggcagaaccaactctacaatgaacttaatttggggcggagggaagagtacgacgttctggacaaaaggaggggacgagatcccgagatgggcggaaagcctcagcgaaggaagaatccgcaagaggggctttataacgaactccagaaagataaaatggcagaagcctatagtgagattgggatgaagggagaaaggaggaggggtaaaggtcacgatgggttgtaccaaggattgagcacagccactaaagatacctatgatgcgctccacatgcaggccctgccgccaaga

SEQ ID NO: 24536 - DNA, 720 bp, synthetic construct
  source 1..720: mol_type = other DNA
cccaaggacatcaggatcaacctggtgtccagcaagaagatcaccgagttcgaccccgccatcgtgatctcccccagcggcaagtacaacgccgtgaagctggggaagtacgaggacagcaacagcgtgacctgctccgtgcagcacgacaacaagaccgtgcacagcaccgactttgaagtgaaaaccgactccaccgaccacgtgaagcccaaagagacagagaacaccaagcagcccagcaagagctgccacaagcccaaggccatcgtgcacaccgagaaagtgaacatgatgagcctgaccgtgctgggcctgcggatgctgttcgccaaaaccgtggccgtgaacttcctgctgaccgccaagctgttcttcctccgggttaagttttccagatccgcagacgcacccgcttaccaacaagggcagaaccaactctacaatgaacttaatttggggcggagggaagagtacgacgttctggacaaaaggaggggacgagatcccgagatgggcggaaagcctcagcgaaggaagaatccgcaagaggggctttataacgaactccagaaagataaaatggcagaagcctatagtgagattgggatgaagggagaaaggaggaggggtaaaggtcacgatgggttgtaccaaggattgagcacagccactaaagatacctatgatgcgctccacatgcaggccctgccgccaaga

SEQ ID NO: 24537 - DNA, 717 bp, synthetic construct
  source 1..717: mol_type = other DNA
aaggacatcaggatcaacctggtgtccagcaagaagatcaccgagttcgaccccgccatcgtgatctcccccagcggcaagtacaacgccgtgaagctggggaagtacgaggacagcaacagcgtgacctgctccgtgcagcacgacaacaagaccgtgcacagcaccgactttgaagtgaaaaccgactccaccgaccacgtgaagcccaaagagacagagaacaccaagcagcccagcaagagctgccacaagcccaaggccatcgtgcacaccgagaaagtgaacatgatgagcctgaccgtgctgggcctgcggatgctgttcgccaaaaccgtggccgtgaacttcctgctgaccgccaagctgttcttcctccgggttaagttttccagatccgcagacgcacccgcttaccaacaagggcagaaccaactctacaatgaacttaatttggggcggagggaagagtacgacgttctggacaaaaggaggggacgagatcccgagatgggcggaaagcctcagcgaaggaagaatccgcaagaggggctttataacgaactccagaaagataaaatggcagaagcctatagtgagattgggatgaagggagaaaggaggaggggtaaaggtcacgatgggttgtaccaaggattgagcacagccactaaagatacctatgatgcgctccacatgcaggccctgccgccaaga

SEQ ID NO: 24538 - DNA, 714 bp, synthetic construct
  source 1..714: mol_type = other DNA
gacatcaggatcaacctggtgtccagcaagaagatcaccgagttcgaccccgccatcgtgatctcccccagcggcaagtacaacgccgtgaagctggggaagtacgaggacagcaacagcgtgacctgctccgtgcagcacgacaacaagaccgtgcacagcaccgactttgaagtgaaaaccgactccaccgaccacgtgaagcccaaagagacagagaacaccaagcagcccagcaagagctgccacaagcccaaggccatcgtgcacaccgagaaagtgaacatgatgagcctgaccgtgctgggcctgcggatgctgttcgccaaaaccgtggccgtgaacttcctgctgaccgccaagctgttcttcctccgggttaagttttccagatccgcagacgcacccgcttaccaacaagggcagaaccaactctacaatgaacttaatttggggcggagggaagagtacgacgttctggacaaaaggaggggacgagatcccgagatgggcggaaagcctcagcgaaggaagaatccgcaagaggggctttataacgaactccagaaagataaaatggcagaagcctatagtgagattgggatgaagggagaaaggaggaggggtaaaggtcacgatgggttgtaccaaggattgagcacagccactaaagatacctatgatgcgctccacatgcaggccctgccgccaaga

SEQ ID NO: 24539 - DNA, 711 bp, synthetic construct
  source 1..711: mol_type = other DNA
atcaggatcaacctggtgtccagcaagaagatcaccgagttcgaccccgccatcgtgatctcccccagcggcaagtacaacgccgtgaagctggggaagtacgaggacagcaacagcgtgacctgctccgtgcagcacgacaacaagaccgtgcacagcaccgactttgaagtgaaaaccgactccaccgaccacgtgaagcccaaagagacagagaacaccaagcagcccagcaagagctgccacaagcccaaggccatcgtgcacaccgagaaagtgaacatgatgagcctgaccgtgctgggcctgcggatgctgttcgccaaaaccgtggccgtgaacttcctgctgaccgccaagctgttcttcctccgggttaagttttccagatccgcagacgcacccgcttaccaacaagggcagaaccaactctacaatgaacttaatttggggcggagggaagagtacgacgttctggacaaaaggaggggacgagatcccgagatgggcggaaagcctcagcgaaggaagaatccgcaagaggggctttataacgaactccagaaagataaaatggcagaagcctatagtgagattgggatgaagggagaaaggaggaggggtaaaggtcacgatgggttgtaccaaggattgagcacagccactaaagatacctatgatgcgctccacatgcaggccctgccgccaaga

SEQ ID NO: 24540 - DNA, 708 bp, synthetic construct
  source 1..708: mol_type = other DNA
aggatcaacctggtgtccagcaagaagatcaccgagttcgaccccgccatcgtgatctcccccagcggcaagtacaacgccgtgaagctggggaagtacgaggacagcaacagcgtgacctgctccgtgcagcacgacaacaagaccgtgcacagcaccgactttgaagtgaaaaccgactccaccgaccacgtgaagcccaaagagacagagaacaccaagcagcccagcaagagctgccacaagcccaaggccatcgtgcacaccgagaaagtgaacatgatgagcctgaccgtgctgggcctgcggatgctgttcgccaaaaccgtggccgtgaacttcctgctgaccgccaagctgttcttcctccgggttaagttttccagatccgcagacgcacccgcttaccaacaagggcagaaccaactctacaatgaacttaatttggggcggagggaagagtacgacgttctggacaaaaggaggggacgagatcccgagatgggcggaaagcctcagcgaaggaagaatccgcaagaggggctttataacgaactccagaaagataaaatggcagaagcctatagtgagattgggatgaagggagaaaggaggaggggtaaaggtcacgatgggttgtaccaaggattgagcacagccactaaagatacctatgatgcgctccacatgcaggccctgccgccaaga

SEQ ID NO: 24541 - DNA, 705 bp, synthetic construct
  source 1..705: mol_type = other DNA
atcaacctggtgtccagcaagaagatcaccgagttcgaccccgccatcgtgatctcccccagcggcaagtacaacgccgtgaagctggggaagtacgaggacagcaacagcgtgacctgctccgtgcagcacgacaacaagaccgtgcacagcaccgactttgaagtgaaaaccgactccaccgaccacgtgaagcccaaagagacagagaacaccaagcagcccagcaagagctgccacaagcccaaggccatcgtgcacaccgagaaagtgaacatgatgagcctgaccgtgctgggcctgcggatgctgttcgccaaaaccgtggccgtgaacttcctgctgaccgccaagctgttcttcctccgggttaagttttccagatccgcagacgcacccgcttaccaacaagggcagaaccaactctacaatgaacttaatttggggcggagggaagagtacgacgttctggacaaaaggaggggacgagatcccgagatgggcggaaagcctcagcgaaggaagaatccgcaagaggggctttataacgaactccagaaagataaaatggcagaagcctatagtgagattgggatgaagggagaaaggaggaggggtaaaggtcacgatgggttgtaccaaggattgagcacagccactaaagatacctatgatgcgctccacatgcaggccctgccgccaaga

SEQ ID NO: 24542 - DNA, 702 bp, synthetic construct
  source 1..702: mol_type = other DNA
aacctggtgtccagcaagaagatcaccgagttcgaccccgccatcgtgatctcccccagcggcaagtacaacgccgtgaagctggggaagtacgaggacagcaacagcgtgacctgctccgtgcagcacgacaacaagaccgtgcacagcaccgactttgaagtgaaaaccgactccaccgaccacgtgaagcccaaagagacagagaacaccaagcagcccagcaagagctgccacaagcccaaggccatcgtgcacaccgagaaagtgaacatgatgagcctgaccgtgctgggcctgcggatgctgttcgccaaaaccgtggccgtgaacttcctgctgaccgccaagctgttcttcctccgggttaagttttccagatccgcagacgcacccgcttaccaacaagggcagaaccaactctacaatgaacttaatttggggcggagggaagagtacgacgttctggacaaaaggaggggacgagatcccgagatgggcggaaagcctcagcgaaggaagaatccgcaagaggggctttataacgaactccagaaagataaaatggcagaagcctatagtgagattgggatgaagggagaaaggaggaggggtaaaggtcacgatgggttgtaccaaggattgagcacagccactaaagatacctatgatgcgctccacatgcaggccctgccgccaaga

SEQ ID NO: 24543 - DNA, 699 bp, synthetic construct
  source 1..699: mol_type = other DNA
ctggtgtccagcaagaagatcaccgagttcgaccccgccatcgtgatctcccccagcggcaagtacaacgccgtgaagctggggaagtacgaggacagcaacagcgtgacctgctccgtgcagcacgacaacaagaccgtgcacagcaccgactttgaagtgaaaaccgactccaccgaccacgtgaagcccaaagagacagagaacaccaagcagcccagcaagagctgccacaagcccaaggccatcgtgcacaccgagaaagtgaacatgatgagcctgaccgtgctgggcctgcggatgctgttcgccaaaaccgtggccgtgaacttcctgctgaccgccaagctgttcttcctccgggttaagttttccagatccgcagacgcacccgcttaccaacaagggcagaaccaactctacaatgaacttaatttggggcggagggaagagtacgacgttctggacaaaaggaggggacgagatcccgagatgggcggaaagcctcagcgaaggaagaatccgcaagaggggctttataacgaactccagaaagataaaatggcagaagcctatagtgagattgggatgaagggagaaaggaggaggggtaaaggtcacgatgggttgtaccaaggattgagcacagccactaaagatacctatgatgcgctccacatgcaggccctgccgccaaga

SEQ ID NO: 24544 - DNA, 696 bp, synthetic construct
  source 1..696: mol_type = other DNA
gtgtccagcaagaagatcaccgagttcgaccccgccatcgtgatctcccccagcggcaagtacaacgccgtgaagctggggaagtacgaggacagcaacagcgtgacctgctccgtgcagcacgacaacaagaccgtgcacagcaccgactttgaagtgaaaaccgactccaccgaccacgtgaagcccaaagagacagagaacaccaagcagcccagcaagagctgccacaagcccaaggccatcgtgcacaccgagaaagtgaacatgatgagcctgaccgtgctgggcctgcggatgctgttcgccaaaaccgtggccgtgaacttcctgctgaccgccaagctgttcttcctccgggttaagttttccagatccgcagacgcacccgcttaccaacaagggcagaaccaactctacaatgaacttaatttggggcggagggaagagtacgacgttctggacaaaaggaggggacgagatcccgagatgggcggaaagcctcagcgaaggaagaatccgcaagaggggctttataacgaactccagaaagataaaatggcagaagcctatagtgagattgggatgaagggagaaaggaggaggggtaaaggtcacgatgggttgtaccaaggattgagcacagccactaaagatacctatgatgcgctccacatgcaggccctgccgccaaga

SEQ ID NO: 24545 - DNA, 693 bp, synthetic construct
  source 1..693: mol_type = other DNA
tccagcaagaagatcaccgagttcgaccccgccatcgtgatctcccccagcggcaagtacaacgccgtgaagctggggaagtacgaggacagcaacagcgtgacctgctccgtgcagcacgacaacaagaccgtgcacagcaccgactttgaagtgaaaaccgactccaccgaccacgtgaagcccaaagagacagagaacaccaagcagcccagcaagagctgccacaagcccaaggccatcgtgcacaccgagaaagtgaacatgatgagcctgaccgtgctgggcctgcggatgctgttcgccaaaaccgtggccgtgaacttcctgctgaccgccaagctgttcttcctccgggttaagttttccagatccgcagacgcacccgcttaccaacaagggcagaaccaactctacaatgaacttaatttggggcggagggaagagtacgacgttctggacaaaaggaggggacgagatcccgagatgggcggaaagcctcagcgaaggaagaatccgcaagaggggctttataacgaactccagaaagataaaatggcagaagcctatagtgagattgggatgaagggagaaaggaggaggggtaaaggtcacgatgggttgtaccaaggattgagcacagccactaaagatacctatgatgcgctccacatgcaggccctgccgccaaga

SEQ ID NO: 24546 - DNA, 690 bp, synthetic construct
  source 1..690: mol_type = other DNA
agcaagaagatcaccgagttcgaccccgccatcgtgatctcccccagcggcaagtacaacgccgtgaagctggggaagtacgaggacagcaacagcgtgacctgctccgtgcagcacgacaacaagaccgtgcacagcaccgactttgaagtgaaaaccgactccaccgaccacgtgaagcccaaagagacagagaacaccaagcagcccagcaagagctgccacaagcccaaggccatcgtgcacaccgagaaagtgaacatgatgagcctgaccgtgctgggcctgcggatgctgttcgccaaaaccgtggccgtgaacttcctgctgaccgccaagctgttcttcctccgggttaagttttccagatccgcagacgcacccgcttaccaacaagggcagaaccaactctacaatgaacttaatttggggcggagggaagagtacgacgttctggacaaaaggaggggacgagatcccgagatgggcggaaagcctcagcgaaggaagaatccgcaagaggggctttataacgaactccagaaagataaaatggcagaagcctatagtgagattgggatgaagggagaaaggaggaggggtaaaggtcacgatgggttgtaccaaggattgagcacagccactaaagatacctatgatgcgctccacatgcaggccctgccgccaaga

SEQ ID NO: 24547 - DNA, 687 bp, synthetic construct
  source 1..687: mol_type = other DNA
aagaagatcaccgagttcgaccccgccatcgtgatctcccccagcggcaagtacaacgccgtgaagctggggaagtacgaggacagcaacagcgtgacctgctccgtgcagcacgacaacaagaccgtgcacagcaccgactttgaagtgaaaaccgactccaccgaccacgtgaagcccaaagagacagagaacaccaagcagcccagcaagagctgccacaagcccaaggccatcgtgcacaccgagaaagtgaacatgatgagcctgaccgtgctgggcctgcggatgctgttcgccaaaaccgtggccgtgaacttcctgctgaccgccaagctgttcttcctccgggttaagttttccagatccgcagacgcacccgcttaccaacaagggcagaaccaactctacaatgaacttaatttggggcggagggaagagtacgacgttctggacaaaaggaggggacgagatcccgagatgggcggaaagcctcagcgaaggaagaatccgcaagaggggctttataacgaactccagaaagataaaatggcagaagcctatagtgagattgggatgaagggagaaaggaggaggggtaaaggtcacgatgggttgtaccaaggattgagcacagccactaaagatacctatgatgcgctccacatgcaggccctgccgccaaga

SEQ ID NO: 24548 - DNA, 684 bp, synthetic construct
  source 1..684: mol_type = other DNA
aagatcaccgagttcgaccccgccatcgtgatctcccccagcggcaagtacaacgccgtgaagctggggaagtacgaggacagcaacagcgtgacctgctccgtgcagcacgacaacaagaccgtgcacagcaccgactttgaagtgaaaaccgactccaccgaccacgtgaagcccaaagagacagagaacaccaagcagcccagcaagagctgccacaagcccaaggccatcgtgcacaccgagaaagtgaacatgatgagcctgaccgtgctgggcctgcggatgctgttcgccaaaaccgtggccgtgaacttcctgctgaccgccaagctgttcttcctccgggttaagttttccagatccgcagacgcacccgcttaccaacaagggcagaaccaactctacaatgaacttaatttggggcggagggaagagtacgacgttctggacaaaaggaggggacgagatcccgagatgggcggaaagcctcagcgaaggaagaatccgcaagaggggctttataacgaactccagaaagataaaatggcagaagcctatagtgagattgggatgaagggagaaaggaggaggggtaaaggtcacgatgggttgtaccaaggattgagcacagccactaaagatacctatgatgcgctccacatgcaggccctgccgccaaga

SEQ ID NO: 24549 - DNA, 681 bp, synthetic construct
  source 1..681: mol_type = other DNA
atcaccgagttcgaccccgccatcgtgatctcccccagcggcaagtacaacgccgtgaagctggggaagtacgaggacagcaacagcgtgacctgctccgtgcagcacgacaacaagaccgtgcacagcaccgactttgaagtgaaaaccgactccaccgaccacgtgaagcccaaagagacagagaacaccaagcagcccagcaagagctgccacaagcccaaggccatcgtgcacaccgagaaagtgaacatgatgagcctgaccgtgctgggcctgcggatgctgttcgccaaaaccgtggccgtgaacttcctgctgaccgccaagctgttcttcctccgggttaagttttccagatccgcagacgcacccgcttaccaacaagggcagaaccaactctacaatgaacttaatttggggcggagggaagagtacgacgttctggacaaaaggaggggacgagatcccgagatgggcggaaagcctcagcgaaggaagaatccgcaagaggggctttataacgaactccagaaagataaaatggcagaagcctatagtgagattgggatgaagggagaaaggaggaggggtaaaggtcacgatgggttgtaccaaggattgagcacagccactaaagatacctatgatgcgctccacatgcaggccctgccgccaaga

SEQ ID NO: 24550 - DNA, 678 bp, synthetic construct
  source 1..678: mol_type = other DNA
accgagttcgaccccgccatcgtgatctcccccagcggcaagtacaacgccgtgaagctggggaagtacgaggacagcaacagcgtgacctgctccgtgcagcacgacaacaagaccgtgcacagcaccgactttgaagtgaaaaccgactccaccgaccacgtgaagcccaaagagacagagaacaccaagcagcccagcaagagctgccacaagcccaaggccatcgtgcacaccgagaaagtgaacatgatgagcctgaccgtgctgggcctgcggatgctgttcgccaaaaccgtggccgtgaacttcctgctgaccgccaagctgttcttcctccgggttaagttttccagatccgcagacgcacccgcttaccaacaagggcagaaccaactctacaatgaacttaatttggggcggagggaagagtacgacgttctggacaaaaggaggggacgagatcccgagatgggcggaaagcctcagcgaaggaagaatccgcaagaggggctttataacgaactccagaaagataaaatggcagaagcctatagtgagattgggatgaagggagaaaggaggaggggtaaaggtcacgatgggttgtaccaaggattgagcacagccactaaagatacctatgatgcgctccacatgcaggccctgccgccaaga

SEQ ID NO: 24551 - DNA, 675 bp, synthetic construct
  source 1..675: mol_type = other DNA
gagttcgaccccgccatcgtgatctcccccagcggcaagtacaacgccgtgaagctggggaagtacgaggacagcaacagcgtgacctgctccgtgcagcacgacaacaagaccgtgcacagcaccgactttgaagtgaaaaccgactccaccgaccacgtgaagcccaaagagacagagaacaccaagcagcccagcaagagctgccacaagcccaaggccatcgtgcacaccgagaaagtgaacatgatgagcctgaccgtgctgggcctgcggatgctgttcgccaaaaccgtggccgtgaacttcctgctgaccgccaagctgttcttcctccgggttaagttttccagatccgcagacgcacccgcttaccaacaagggcagaaccaactctacaatgaacttaatttggggcggagggaagagtacgacgttctggacaaaaggaggggacgagatcccgagatgggcggaaagcctcagcgaaggaagaatccgcaagaggggctttataacgaactccagaaagataaaatggcagaagcctatagtgagattgggatgaagggagaaaggaggaggggtaaaggtcacgatgggttgtaccaaggattgagcacagccactaaagatacctatgatgcgctccacatgcaggccctgccgccaaga

SEQ ID NO: 24552 - DNA, 672 bp, synthetic construct
  source 1..672: mol_type = other DNA
ttcgaccccgccatcgtgatctcccccagcggcaagtacaacgccgtgaagctggggaagtacgaggacagcaacagcgtgacctgctccgtgcagcacgacaacaagaccgtgcacagcaccgactttgaagtgaaaaccgactccaccgaccacgtgaagcccaaagagacagagaacaccaagcagcccagcaagagctgccacaagcccaaggccatcgtgcacaccgagaaagtgaacatgatgagcctgaccgtgctgggcctgcggatgctgttcgccaaaaccgtggccgtgaacttcctgctgaccgccaagctgttcttcctccgggttaagttttccagatccgcagacgcacccgcttaccaacaagggcagaaccaactctacaatgaacttaatttggggcggagggaagagtacgacgttctggacaaaaggaggggacgagatcccgagatgggcggaaagcctcagcgaaggaagaatccgcaagaggggctttataacgaactccagaaagataaaatggcagaagcctatagtgagattgggatgaagggagaaaggaggaggggtaaaggtcacgatgggttgtaccaaggattgagcacagccactaaagatacctatgatgcgctccacatgcaggccctgccgccaaga

SEQ ID NO: 24553 - DNA, 669 bp, synthetic construct
  source 1..669: mol_type = other DNA
gaccccgccatcgtgatctcccccagcggcaagtacaacgccgtgaagctggggaagtacgaggacagcaacagcgtgacctgctccgtgcagcacgacaacaagaccgtgcacagcaccgactttgaagtgaaaaccgactccaccgaccacgtgaagcccaaagagacagagaacaccaagcagcccagcaagagctgccacaagcccaaggccatcgtgcacaccgagaaagtgaacatgatgagcctgaccgtgctgggcctgcggatgctgttcgccaaaaccgtggccgtgaacttcctgctgaccgccaagctgttcttcctccgggttaagttttccagatccgcagacgcacccgcttaccaacaagggcagaaccaactctacaatgaacttaatttggggcggagggaagagtacgacgttctggacaaaaggaggggacgagatcccgagatgggcggaaagcctcagcgaaggaagaatccgcaagaggggctttataacgaactccagaaagataaaatggcagaagcctatagtgagattgggatgaagggagaaaggaggaggggtaaaggtcacgatgggttgtaccaaggattgagcacagccactaaagatacctatgatgcgctccacatgcaggccctgccgccaaga

SEQ ID NO: 24554 - DNA, 666 bp, synthetic construct
  source 1..666: mol_type = other DNA
cccgccatcgtgatctcccccagcggcaagtacaacgccgtgaagctggggaagtacgaggacagcaacagcgtgacctgctccgtgcagcacgacaacaagaccgtgcacagcaccgactttgaagtgaaaaccgactccaccgaccacgtgaagcccaaagagacagagaacaccaagcagcccagcaagagctgccacaagcccaaggccatcgtgcacaccgagaaagtgaacatgatgagcctgaccgtgctgggcctgcggatgctgttcgccaaaaccgtggccgtgaacttcctgctgaccgccaagctgttcttcctccgggttaagttttccagatccgcagacgcacccgcttaccaacaagggcagaaccaactctacaatgaacttaatttggggcggagggaagagtacgacgttctggacaaaaggaggggacgagatcccgagatgggcggaaagcctcagcgaaggaagaatccgcaagaggggctttataacgaactccagaaagataaaatggcagaagcctatagtgagattgggatgaagggagaaaggaggaggggtaaaggtcacgatgggttgtaccaaggattgagcacagccactaaagatacctatgatgcgctccacatgcaggccctgccgccaaga

SEQ ID NO: 24555 - DNA, 663 bp, synthetic construct
  source 1..663: mol_type = other DNA
gccatcgtgatctcccccagcggcaagtacaacgccgtgaagctggggaagtacgaggacagcaacagcgtgacctgctccgtgcagcacgacaacaagaccgtgcacagcaccgactttgaagtgaaaaccgactccaccgaccacgtgaagcccaaagagacagagaacaccaagcagcccagcaagagctgccacaagcccaaggccatcgtgcacaccgagaaagtgaacatgatgagcctgaccgtgctgggcctgcggatgctgttcgccaaaaccgtggccgtgaacttcctgctgaccgccaagctgttcttcctccgggttaagttttccagatccgcagacgcacccgcttaccaacaagggcagaaccaactctacaatgaacttaatttggggcggagggaagagtacgacgttctggacaaaaggaggggacgagatcccgagatgggcggaaagcctcagcgaaggaagaatccgcaagaggggctttataacgaactccagaaagataaaatggcagaagcctatagtgagattgggatgaagggagaaaggaggaggggtaaaggtcacgatgggttgtaccaaggattgagcacagccactaaagatacctatgatgcgctccacatgcaggccctgccgccaaga

SEQ ID NO: 24556 - DNA, 660 bp, synthetic construct
  source 1..660: mol_type = other DNA
atcgtgatctcccccagcggcaagtacaacgccgtgaagctggggaagtacgaggacagcaacagcgtgacctgctccgtgcagcacgacaacaagaccgtgcacagcaccgactttgaagtgaaaaccgactccaccgaccacgtgaagcccaaagagacagagaacaccaagcagcccagcaagagctgccacaagcccaaggccatcgtgcacaccgagaaagtgaacatgatgagcctgaccgtgctgggcctgcggatgctgttcgccaaaaccgtggccgtgaacttcctgctgaccgccaagctgttcttcctccgggttaagttttccagatccgcagacgcacccgcttaccaacaagggcagaaccaactctacaatgaacttaatttggggcggagggaagagtacgacgttctggacaaaaggaggggacgagatcccgagatgggcggaaagcctcagcgaaggaagaatccgcaagaggggctttataacgaactccagaaagataaaatggcagaagcctatagtgagattgggatgaagggagaaaggaggaggggtaaaggtcacgatgggttgtaccaaggattgagcacagccactaaagatacctatgatgcgctccacatgcaggccctgccgccaaga

SEQ ID NO: 24557 - DNA, 657 bp, synthetic construct
  source 1..657: mol_type = other DNA
gtgatctcccccagcggcaagtacaacgccgtgaagctggggaagtacgaggacagcaacagcgtgacctgctccgtgcagcacgacaacaagaccgtgcacagcaccgactttgaagtgaaaaccgactccaccgaccacgtgaagcccaaagagacagagaacaccaagcagcccagcaagagctgccacaagcccaaggccatcgtgcacaccgagaaagtgaacatgatgagcctgaccgtgctgggcctgcggatgctgttcgccaaaaccgtggccgtgaacttcctgctgaccgccaagctgttcttcctccgggttaagttttccagatccgcagacgcacccgcttaccaacaagggcagaaccaactctacaatgaacttaatttggggcggagggaagagtacgacgttctggacaaaaggaggggacgagatcccgagatgggcggaaagcctcagcgaaggaagaatccgcaagaggggctttataacgaactccagaaagataaaatggcagaagcctatagtgagattgggatgaagggagaaaggaggaggggtaaaggtcacgatgggttgtaccaaggattgagcacagccactaaagatacctatgatgcgctccacatgcaggccctgccgccaaga

SEQ ID NO: 24558 - DNA, 654 bp, synthetic construct
  source 1..654: mol_type = other DNA
atctcccccagcggcaagtacaacgccgtgaagctggggaagtacgaggacagcaacagcgtgacctgctccgtgcagcacgacaacaagaccgtgcacagcaccgactttgaagtgaaaaccgactccaccgaccacgtgaagcccaaagagacagagaacaccaagcagcccagcaagagctgccacaagcccaaggccatcgtgcacaccgagaaagtgaacatgatgagcctgaccgtgctgggcctgcggatgctgttcgccaaaaccgtggccgtgaacttcctgctgaccgccaagctgttcttcctccgggttaagttttccagatccgcagacgcacccgcttaccaacaagggcagaaccaactctacaatgaacttaatttggggcggagggaagagtacgacgttctggacaaaaggaggggacgagatcccgagatgggcggaaagcctcagcgaaggaagaatccgcaagaggggctttataacgaactccagaaagataaaatggcagaagcctatagtgagattgggatgaagggagaaaggaggaggggtaaaggtcacgatgggttgtaccaaggattgagcacagccactaaagatacctatgatgcgctccacatgcaggccctgccgccaaga

SEQ ID NO: 24559 - DNA, 651 bp, synthetic construct
  source 1..651: mol_type = other DNA
tcccccagcggcaagtacaacgccgtgaagctggggaagtacgaggacagcaacagcgtgacctgctccgtgcagcacgacaacaagaccgtgcacagcaccgactttgaagtgaaaaccgactccaccgaccacgtgaagcccaaagagacagagaacaccaagcagcccagcaagagctgccacaagcccaaggccatcgtgcacaccgagaaagtgaacatgatgagcctgaccgtgctgggcctgcggatgctgttcgccaaaaccgtggccgtgaacttcctgctgaccgccaagctgttcttcctccgggttaagttttccagatccgcagacgcacccgcttaccaacaagggcagaaccaactctacaatgaacttaatttggggcggagggaagagtacgacgttctggacaaaaggaggggacgagatcccgagatgggcggaaagcctcagcgaaggaagaatccgcaagaggggctttataacgaactccagaaagataaaatggcagaagcctatagtgagattgggatgaagggagaaaggaggaggggtaaaggtcacgatgggttgtaccaaggattgagcacagccactaaagatacctatgatgcgctccacatgcaggccctgccgccaaga

SEQ ID NO: 24560 - DNA, 648 bp, synthetic construct
  source 1..648: mol_type = other DNA
cccagcggcaagtacaacgccgtgaagctggggaagtacgaggacagcaacagcgtgacctgctccgtgcagcacgacaacaagaccgtgcacagcaccgactttgaagtgaaaaccgactccaccgaccacgtgaagcccaaagagacagagaacaccaagcagcccagcaagagctgccacaagcccaaggccatcgtgcacaccgagaaagtgaacatgatgagcctgaccgtgctgggcctgcggatgctgttcgccaaaaccgtggccgtgaacttcctgctgaccgccaagctgttcttcctccgggttaagttttccagatccgcagacgcacccgcttaccaacaagggcagaaccaactctacaatgaacttaatttggggcggagggaagagtacgacgttctggacaaaaggaggggacgagatcccgagatgggcggaaagcctcagcgaaggaagaatccgcaagaggggctttataacgaactccagaaagataaaatggcagaagcctatagtgagattgggatgaagggagaaaggaggaggggtaaaggtcacgatgggttgtaccaaggattgagcacagccactaaagatacctatgatgcgctccacatgcaggccctgccgccaaga

SEQ ID NO: 24561 - DNA, 645 bp, synthetic construct
  source 1..645: mol_type = other DNA
agcggcaagtacaacgccgtgaagctggggaagtacgaggacagcaacagcgtgacctgctccgtgcagcacgacaacaagaccgtgcacagcaccgactttgaagtgaaaaccgactccaccgaccacgtgaagcccaaagagacagagaacaccaagcagcccagcaagagctgccacaagcccaaggccatcgtgcacaccgagaaagtgaacatgatgagcctgaccgtgctgggcctgcggatgctgttcgccaaaaccgtggccgtgaacttcctgctgaccgccaagctgttcttcctccgggttaagttttccagatccgcagacgcacccgcttaccaacaagggcagaaccaactctacaatgaacttaatttggggcggagggaagagtacgacgttctggacaaaaggaggggacgagatcccgagatgggcggaaagcctcagcgaaggaagaatccgcaagaggggctttataacgaactccagaaagataaaatggcagaagcctatagtgagattgggatgaagggagaaaggaggaggggtaaaggtcacgatgggttgtaccaaggattgagcacagccactaaagatacctatgatgcgctccacatgcaggccctgccgccaaga

SEQ ID NO: 24562 - DNA, 642 bp, synthetic construct
  source 1..642: mol_type = other DNA
ggcaagtacaacgccgtgaagctggggaagtacgaggacagcaacagcgtgacctgctccgtgcagcacgacaacaagaccgtgcacagcaccgactttgaagtgaaaaccgactccaccgaccacgtgaagcccaaagagacagagaacaccaagcagcccagcaagagctgccacaagcccaaggccatcgtgcacaccgagaaagtgaacatgatgagcctgaccgtgctgggcctgcggatgctgttcgccaaaaccgtggccgtgaacttcctgctgaccgccaagctgttcttcctccgggttaagttttccagatccgcagacgcacccgcttaccaacaagggcagaaccaactctacaatgaacttaatttggggcggagggaagagtacgacgttctggacaaaaggaggggacgagatcccgagatgggcggaaagcctcagcgaaggaagaatccgcaagaggggctttataacgaactccagaaagataaaatggcagaagcctatagtgagattgggatgaagggagaaaggaggaggggtaaaggtcacgatgggttgtaccaaggattgagcacagccactaaagatacctatgatgcgctccacatgcaggccctgccgccaaga

SEQ ID NO: 24563 - DNA, 639 bp, synthetic construct
  source 1..639: mol_type = other DNA
aagtacaacgccgtgaagctggggaagtacgaggacagcaacagcgtgacctgctccgtgcagcacgacaacaagaccgtgcacagcaccgactttgaagtgaaaaccgactccaccgaccacgtgaagcccaaagagacagagaacaccaagcagcccagcaagagctgccacaagcccaaggccatcgtgcacaccgagaaagtgaacatgatgagcctgaccgtgctgggcctgcggatgctgttcgccaaaaccgtggccgtgaacttcctgctgaccgccaagctgttcttcctccgggttaagttttccagatccgcagacgcacccgcttaccaacaagggcagaaccaactctacaatgaacttaatttggggcggagggaagagtacgacgttctggacaaaaggaggggacgagatcccgagatgggcggaaagcctcagcgaaggaagaatccgcaagaggggctttataacgaactccagaaagataaaatggcagaagcctatagtgagattgggatgaagggagaaaggaggaggggtaaaggtcacgatgggttgtaccaaggattgagcacagccactaaagatacctatgatgcgctccacatgcaggccctgccgccaaga

SEQ ID NO: 24564 - DNA, 636 bp, synthetic construct
  source 1..636: mol_type = other DNA
tacaacgccgtgaagctggggaagtacgaggacagcaacagcgtgacctgctccgtgcagcacgacaacaagaccgtgcacagcaccgactttgaagtgaaaaccgactccaccgaccacgtgaagcccaaagagacagagaacaccaagcagcccagcaagagctgccacaagcccaaggccatcgtgcacaccgagaaagtgaacatgatgagcctgaccgtgctgggcctgcggatgctgttcgccaaaaccgtggccgtgaacttcctgctgaccgccaagctgttcttcctccgggttaagttttccagatccgcagacgcacccgcttaccaacaagggcagaaccaactctacaatgaacttaatttggggcggagggaagagtacgacgttctggacaaaaggaggggacgagatcccgagatgggcggaaagcctcagcgaaggaagaatccgcaagaggggctttataacgaactccagaaagataaaatggcagaagcctatagtgagattgggatgaagggagaaaggaggaggggtaaaggtcacgatgggttgtaccaaggattgagcacagccactaaagatacctatgatgcgctccacatgcaggccctgccgccaaga

SEQ ID NO: 24565 - DNA, 633 bp, synthetic construct
  source 1..633: mol_type = other DNA
aacgccgtgaagctggggaagtacgaggacagcaacagcgtgacctgctccgtgcagcacgacaacaagaccgtgcacagcaccgactttgaagtgaaaaccgactccaccgaccacgtgaagcccaaagagacagagaacaccaagcagcccagcaagagctgccacaagcccaaggccatcgtgcacaccgagaaagtgaacatgatgagcctgaccgtgctgggcctgcggatgctgttcgccaaaaccgtggccgtgaacttcctgctgaccgccaagctgttcttcctccgggttaagttttccagatccgcagacgcacccgcttaccaacaagggcagaaccaactctacaatgaacttaatttggggcggagggaagagtacgacgttctggacaaaaggaggggacgagatcccgagatgggcggaaagcctcagcgaaggaagaatccgcaagaggggctttataacgaactccagaaagataaaatggcagaagcctatagtgagattgggatgaagggagaaaggaggaggggtaaaggtcacgatgggttgtaccaaggattgagcacagccactaaagatacctatgatgcgctccacatgcaggccctgccgccaaga

SEQ ID NO: 24566 - DNA, 630 bp, synthetic construct
  source 1..630: mol_type = other DNA
gccgtgaagctggggaagtacgaggacagcaacagcgtgacctgctccgtgcagcacgacaacaagaccgtgcacagcaccgactttgaagtgaaaaccgactccaccgaccacgtgaagcccaaagagacagagaacaccaagcagcccagcaagagctgccacaagcccaaggccatcgtgcacaccgagaaagtgaacatgatgagcctgaccgtgctgggcctgcggatgctgttcgccaaaaccgtggccgtgaacttcctgctgaccgccaagctgttcttcctccgggttaagttttccagatccgcagacgcacccgcttaccaacaagggcagaaccaactctacaatgaacttaatttggggcggagggaagagtacgacgttctggacaaaaggaggggacgagatcccgagatgggcggaaagcctcagcgaaggaagaatccgcaagaggggctttataacgaactccagaaagataaaatggcagaagcctatagtgagattgggatgaagggagaaaggaggaggggtaaaggtcacgatgggttgtaccaaggattgagcacagccactaaagatacctatgatgcgctccacatgcaggccctgccgccaaga

SEQ ID NO: 24567 - DNA, 627 bp, synthetic construct
  source 1..627: mol_type = other DNA
gtgaagctggggaagtacgaggacagcaacagcgtgacctgctccgtgcagcacgacaacaagaccgtgcacagcaccgactttgaagtgaaaaccgactccaccgaccacgtgaagcccaaagagacagagaacaccaagcagcccagcaagagctgccacaagcccaaggccatcgtgcacaccgagaaagtgaacatgatgagcctgaccgtgctgggcctgcggatgctgttcgccaaaaccgtggccgtgaacttcctgctgaccgccaagctgttcttcctccgggttaagttttccagatccgcagacgcacccgcttaccaacaagggcagaaccaactctacaatgaacttaatttggggcggagggaagagtacgacgttctggacaaaaggaggggacgagatcccgagatgggcggaaagcctcagcgaaggaagaatccgcaagaggggctttataacgaactccagaaagataaaatggcagaagcctatagtgagattgggatgaagggagaaaggaggaggggtaaaggtcacgatgggttgtaccaaggattgagcacagccactaaagatacctatgatgcgctccacatgcaggccctgccgccaaga

SEQ ID NO: 24568 - DNA, 624 bp, synthetic construct
  source 1..624: mol_type = other DNA
aagctggggaagtacgaggacagcaacagcgtgacctgctccgtgcagcacgacaacaagaccgtgcacagcaccgactttgaagtgaaaaccgactccaccgaccacgtgaagcccaaagagacagagaacaccaagcagcccagcaagagctgccacaagcccaaggccatcgtgcacaccgagaaagtgaacatgatgagcctgaccgtgctgggcctgcggatgctgttcgccaaaaccgtggccgtgaacttcctgctgaccgccaagctgttcttcctccgggttaagttttccagatccgcagacgcacccgcttaccaacaagggcagaaccaactctacaatgaacttaatttggggcggagggaagagtacgacgttctggacaaaaggaggggacgagatcccgagatgggcggaaagcctcagcgaaggaagaatccgcaagaggggctttataacgaactccagaaagataaaatggcagaagcctatagtgagattgggatgaagggagaaaggaggaggggtaaaggtcacgatgggttgtaccaaggattgagcacagccactaaagatacctatgatgcgctccacatgcaggccctgccgccaaga

SEQ ID NO: 24569 - DNA, 621 bp, synthetic construct
  source 1..621: mol_type = other DNA
ctggggaagtacgaggacagcaacagcgtgacctgctccgtgcagcacgacaacaagaccgtgcacagcaccgactttgaagtgaaaaccgactccaccgaccacgtgaagcccaaagagacagagaacaccaagcagcccagcaagagctgccacaagcccaaggccatcgtgcacaccgagaaagtgaacatgatgagcctgaccgtgctgggcctgcggatgctgttcgccaaaaccgtggccgtgaacttcctgctgaccgccaagctgttcttcctccgggttaagttttccagatccgcagacgcacccgcttaccaacaagggcagaaccaactctacaatgaacttaatttggggcggagggaagagtacgacgttctggacaaaaggaggggacgagatcccgagatgggcggaaagcctcagcgaaggaagaatccgcaagaggggctttataacgaactccagaaagataaaatggcagaagcctatagtgagattgggatgaagggagaaaggaggaggggtaaaggtcacgatgggttgtaccaaggattgagcacagccactaaagatacctatgatgcgctccacatgcaggccctgccgccaaga

SEQ ID NO: 24570 - DNA, 618 bp, synthetic construct
  source 1..618: mol_type = other DNA
gggaagtacgaggacagcaacagcgtgacctgctccgtgcagcacgacaacaagaccgtgcacagcaccgactttgaagtgaaaaccgactccaccgaccacgtgaagcccaaagagacagagaacaccaagcagcccagcaagagctgccacaagcccaaggccatcgtgcacaccgagaaagtgaacatgatgagcctgaccgtgctgggcctgcggatgctgttcgccaaaaccgtggccgtgaacttcctgctgaccgccaagctgttcttcctccgggttaagttttccagatccgcagacgcacccgcttaccaacaagggcagaaccaactctacaatgaacttaatttggggcggagggaagagtacgacgttctggacaaaaggaggggacgagatcccgagatgggcggaaagcctcagcgaaggaagaatccgcaagaggggctttataacgaactccagaaagataaaatggcagaagcctatagtgagattgggatgaagggagaaaggaggaggggtaaaggtcacgatgggttgtaccaaggattgagcacagccactaaagatacctatgatgcgctccacatgcaggccctgccgccaaga

SEQ ID NO: 24571 - DNA, 615 bp, synthetic construct
  source 1..615: mol_type = other DNA
aagtacgaggacagcaacagcgtgacctgctccgtgcagcacgacaacaagaccgtgcacagcaccgactttgaagtgaaaaccgactccaccgaccacgtgaagcccaaagagacagagaacaccaagcagcccagcaagagctgccacaagcccaaggccatcgtgcacaccgagaaagtgaacatgatgagcctgaccgtgctgggcctgcggatgctgttcgccaaaaccgtggccgtgaacttcctgctgaccgccaagctgttcttcctccgggttaagttttccagatccgcagacgcacccgcttaccaacaagggcagaaccaactctacaatgaacttaatttggggcggagggaagagtacgacgttctggacaaaaggaggggacgagatcccgagatgggcggaaagcctcagcgaaggaagaatccgcaagaggggctttataacgaactccagaaagataaaatggcagaagcctatagtgagattgggatgaagggagaaaggaggaggggtaaaggtcacgatgggttgtaccaaggattgagcacagccactaaagatacctatgatgcgctccacatgcaggccctgccgccaaga

SEQ ID NO: 24572 - DNA, 612 bp, synthetic construct
  source 1..612: mol_type = other DNA
tacgaggacagcaacagcgtgacctgctccgtgcagcacgacaacaagaccgtgcacagcaccgactttgaagtgaaaaccgactccaccgaccacgtgaagcccaaagagacagagaacaccaagcagcccagcaagagctgccacaagcccaaggccatcgtgcacaccgagaaagtgaacatgatgagcctgaccgtgctgggcctgcggatgctgttcgccaaaaccgtggccgtgaacttcctgctgaccgccaagctgttcttcctccgggttaagttttccagatccgcagacgcacccgcttaccaacaagggcagaaccaactctacaatgaacttaatttggggcggagggaagagtacgacgttctggacaaaaggaggggacgagatcccgagatgggcggaaagcctcagcgaaggaagaatccgcaagaggggctttataacgaactccagaaagataaaatggcagaagcctatagtgagattgggatgaagggagaaaggaggaggggtaaaggtcacgatgggttgtaccaaggattgagcacagccactaaagatacctatgatgcgctccacatgcaggccctgccgccaaga

SEQ ID NO: 24573 - DNA, 609 bp, synthetic construct
  source 1..609: mol_type = other DNA
gaggacagcaacagcgtgacctgctccgtgcagcacgacaacaagaccgtgcacagcaccgactttgaagtgaaaaccgactccaccgaccacgtgaagcccaaagagacagagaacaccaagcagcccagcaagagctgccacaagcccaaggccatcgtgcacaccgagaaagtgaacatgatgagcctgaccgtgctgggcctgcggatgctgttcgccaaaaccgtggccgtgaacttcctgctgaccgccaagctgttcttcctccgggttaagttttccagatccgcagacgcacccgcttaccaacaagggcagaaccaactctacaatgaacttaatttggggcggagggaagagtacgacgttctggacaaaaggaggggacgagatcccgagatgggcggaaagcctcagcgaaggaagaatccgcaagaggggctttataacgaactccagaaagataaaatggcagaagcctatagtgagattgggatgaagggagaaaggaggaggggtaaaggtcacgatgggttgtaccaaggattgagcacagccactaaagatacctatgatgcgctccacatgcaggccctgccgccaaga

SEQ ID NO: 24574 - DNA, 606 bp, synthetic construct
  source 1..606: mol_type = other DNA
gacagcaacagcgtgacctgctccgtgcagcacgacaacaagaccgtgcacagcaccgactttgaagtgaaaaccgactccaccgaccacgtgaagcccaaagagacagagaacaccaagcagcccagcaagagctgccacaagcccaaggccatcgtgcacaccgagaaagtgaacatgatgagcctgaccgtgctgggcctgcggatgctgttcgccaaaaccgtggccgtgaacttcctgctgaccgccaagctgttcttcctccgggttaagttttccagatccgcagacgcacccgcttaccaacaagggcagaaccaactctacaatgaacttaatttggggcggagggaagagtacgacgttctggacaaaaggaggggacgagatcccgagatgggcggaaagcctcagcgaaggaagaatccgcaagaggggctttataacgaactccagaaagataaaatggcagaagcctatagtgagattgggatgaagggagaaaggaggaggggtaaaggtcacgatgggttgtaccaaggattgagcacagccactaaagatacctatgatgcgctccacatgcaggccctgccgccaaga

SEQ ID NO: 24575 - DNA, 603 bp, synthetic construct
  source 1..603: mol_type = other DNA
agcaacagcgtgacctgctccgtgcagcacgacaacaagaccgtgcacagcaccgactttgaagtgaaaaccgactccaccgaccacgtgaagcccaaagagacagagaacaccaagcagcccagcaagagctgccacaagcccaaggccatcgtgcacaccgagaaagtgaacatgatgagcctgaccgtgctgggcctgcggatgctgttcgccaaaaccgtggccgtgaacttcctgctgaccgccaagctgttcttcctccgggttaagttttccagatccgcagacgcacccgcttaccaacaagggcagaaccaactctacaatgaacttaatttggggcggagggaagagtacgacgttctggacaaaaggaggggacgagatcccgagatgggcggaaagcctcagcgaaggaagaatccgcaagaggggctttataacgaactccagaaagataaaatggcagaagcctatagtgagattgggatgaagggagaaaggaggaggggtaaaggtcacgatgggttgtaccaaggattgagcacagccactaaagatacctatgatgcgctccacatgcaggccctgccgccaaga

SEQ ID NO: 24576 - DNA, 600 bp, synthetic construct
  source 1..600: mol_type = other DNA
aacagcgtgacctgctccgtgcagcacgacaacaagaccgtgcacagcaccgactttgaagtgaaaaccgactccaccgaccacgtgaagcccaaagagacagagaacaccaagcagcccagcaagagctgccacaagcccaaggccatcgtgcacaccgagaaagtgaacatgatgagcctgaccgtgctgggcctgcggatgctgttcgccaaaaccgtggccgtgaacttcctgctgaccgccaagctgttcttcctccgggttaagttttccagatccgcagacgcacccgcttaccaacaagggcagaaccaactctacaatgaacttaatttggggcggagggaagagtacgacgttctggacaaaaggaggggacgagatcccgagatgggcggaaagcctcagcgaaggaagaatccgcaagaggggctttataacgaactccagaaagataaaatggcagaagcctatagtgagattgggatgaagggagaaaggaggaggggtaaaggtcacgatgggttgtaccaaggattgagcacagccactaaagatacctatgatgcgctccacatgcaggccctgccgccaaga

SEQ ID NO: 24577 - DNA, 597 bp, synthetic construct
  source 1..597: mol_type = other DNA
agcgtgacctgctccgtgcagcacgacaacaagaccgtgcacagcaccgactttgaagtgaaaaccgactccaccgaccacgtgaagcccaaagagacagagaacaccaagcagcccagcaagagctgccacaagcccaaggccatcgtgcacaccgagaaagtgaacatgatgagcctgaccgtgctgggcctgcggatgctgttcgccaaaaccgtggccgtgaacttcctgctgaccgccaagctgttcttcctccgggttaagttttccagatccgcagacgcacccgcttaccaacaagggcagaaccaactctacaatgaacttaatttggggcggagggaagagtacgacgttctggacaaaaggaggggacgagatcccgagatgggcggaaagcctcagcgaaggaagaatccgcaagaggggctttataacgaactccagaaagataaaatggcagaagcctatagtgagattgggatgaagggagaaaggaggaggggtaaaggtcacgatgggttgtaccaaggattgagcacagccactaaagatacctatgatgcgctccacatgcaggccctgccgccaaga

SEQ ID NO: 24578 - DNA, 594 bp, synthetic construct
  source 1..594: mol_type = other DNA
gtgacctgctccgtgcagcacgacaacaagaccgtgcacagcaccgactttgaagtgaaaaccgactccaccgaccacgtgaagcccaaagagacagagaacaccaagcagcccagcaagagctgccacaagcccaaggccatcgtgcacaccgagaaagtgaacatgatgagcctgaccgtgctgggcctgcggatgctgttcgccaaaaccgtggccgtgaacttcctgctgaccgccaagctgttcttcctccgggttaagttttccagatccgcagacgcacccgcttaccaacaagggcagaaccaactctacaatgaacttaatttggggcggagggaagagtacgacgttctggacaaaaggaggggacgagatcccgagatgggcggaaagcctcagcgaaggaagaatccgcaagaggggctttataacgaactccagaaagataaaatggcagaagcctatagtgagattgggatgaagggagaaaggaggaggggtaaaggtcacgatgggttgtaccaaggattgagcacagccactaaagatacctatgatgcgctccacatgcaggccctgccgccaaga

SEQ ID NO: 24579 - DNA, 591 bp, synthetic construct
  source 1..591: mol_type = other DNA
acctgctccgtgcagcacgacaacaagaccgtgcacagcaccgactttgaagtgaaaaccgactccaccgaccacgtgaagcccaaagagacagagaacaccaagcagcccagcaagagctgccacaagcccaaggccatcgtgcacaccgagaaagtgaacatgatgagcctgaccgtgctgggcctgcggatgctgttcgccaaaaccgtggccgtgaacttcctgctgaccgccaagctgttcttcctccgggttaagttttccagatccgcagacgcacccgcttaccaacaagggcagaaccaactctacaatgaacttaatttggggcggagggaagagtacgacgttctggacaaaaggaggggacgagatcccgagatgggcggaaagcctcagcgaaggaagaatccgcaagaggggctttataacgaactccagaaagataaaatggcagaagcctatagtgagattgggatgaagggagaaaggaggaggggtaaaggtcacgatgggttgtaccaaggattgagcacagccactaaagatacctatgatgcgctccacatgcaggccctgccgccaaga

SEQ ID NO: 24580 - DNA, 588 bp, synthetic construct
  source 1..588: mol_type = other DNA
tgctccgtgcagcacgacaacaagaccgtgcacagcaccgactttgaagtgaaaaccgactccaccgaccacgtgaagcccaaagagacagagaacaccaagcagcccagcaagagctgccacaagcccaaggccatcgtgcacaccgagaaagtgaacatgatgagcctgaccgtgctgggcctgcggatgctgttcgccaaaaccgtggccgtgaacttcctgctgaccgccaagctgttcttcctccgggttaagttttccagatccgcagacgcacccgcttaccaacaagggcagaaccaactctacaatgaacttaatttggggcggagggaagagtacgacgttctggacaaaaggaggggacgagatcccgagatgggcggaaagcctcagcgaaggaagaatccgcaagaggggctttataacgaactccagaaagataaaatggcagaagcctatagtgagattgggatgaagggagaaaggaggaggggtaaaggtcacgatgggttgtaccaaggattgagcacagccactaaagatacctatgatgcgctccacatgcaggccctgccgccaaga

SEQ ID NO: 24581 - DNA, 585 bp, synthetic construct
  source 1..585: mol_type = other DNA
tccgtgcagcacgacaacaagaccgtgcacagcaccgactttgaagtgaaaaccgactccaccgaccacgtgaagcccaaagagacagagaacaccaagcagcccagcaagagctgccacaagcccaaggccatcgtgcacaccgagaaagtgaacatgatgagcctgaccgtgctgggcctgcggatgctgttcgccaaaaccgtggccgtgaacttcctgctgaccgccaagctgttcttcctccgggttaagttttccagatccgcagacgcacccgcttaccaacaagggcagaaccaactctacaatgaacttaatttggggcggagggaagagtacgacgttctggacaaaaggaggggacgagatcccgagatgggcggaaagcctcagcgaaggaagaatccgcaagaggggctttataacgaactccagaaagataaaatggcagaagcctatagtgagattgggatgaagggagaaaggaggaggggtaaaggtcacgatgggttgtaccaaggattgagcacagccactaaagatacctatgatgcgctccacatgcaggccctgccgccaaga

SEQ ID NO: 24582 - DNA, 582 bp, synthetic construct
  source 1..582: mol_type = other DNA
gtgcagcacgacaacaagaccgtgcacagcaccgactttgaagtgaaaaccgactccaccgaccacgtgaagcccaaagagacagagaacaccaagcagcccagcaagagctgccacaagcccaaggccatcgtgcacaccgagaaagtgaacatgatgagcctgaccgtgctgggcctgcggatgctgttcgccaaaaccgtggccgtgaacttcctgctgaccgccaagctgttcttcctccgggttaagttttccagatccgcagacgcacccgcttaccaacaagggcagaaccaactctacaatgaacttaatttggggcggagggaagagtacgacgttctggacaaaaggaggggacgagatcccgagatgggcggaaagcctcagcgaaggaagaatccgcaagaggggctttataacgaactccagaaagataaaatggcagaagcctatagtgagattgggatgaagggagaaaggaggaggggtaaaggtcacgatgggttgtaccaaggattgagcacagccactaaagatacctatgatgcgctccacatgcaggccctgccgccaaga

SEQ ID NO: 24583 - DNA, 579 bp, synthetic construct
  source 1..579: mol_type = other DNA
cagcacgacaacaagaccgtgcacagcaccgactttgaagtgaaaaccgactccaccgaccacgtgaagcccaaagagacagagaacaccaagcagcccagcaagagctgccacaagcccaaggccatcgtgcacaccgagaaagtgaacatgatgagcctgaccgtgctgggcctgcggatgctgttcgccaaaaccgtggccgtgaacttcctgctgaccgccaagctgttcttcctccgggttaagttttccagatccgcagacgcacccgcttaccaacaagggcagaaccaactctacaatgaacttaatttggggcggagggaagagtacgacgttctggacaaaaggaggggacgagatcccgagatgggcggaaagcctcagcgaaggaagaatccgcaagaggggctttataacgaactccagaaagataaaatggcagaagcctatagtgagattgggatgaagggagaaaggaggaggggtaaaggtcacgatgggttgtaccaaggattgagcacagccactaaagatacctatgatgcgctccacatgcaggccctgccgccaaga

SEQ ID NO: 24584 - DNA, 576 bp, synthetic construct
  source 1..576: mol_type = other DNA
cacgacaacaagaccgtgcacagcaccgactttgaagtgaaaaccgactccaccgaccacgtgaagcccaaagagacagagaacaccaagcagcccagcaagagctgccacaagcccaaggccatcgtgcacaccgagaaagtgaacatgatgagcctgaccgtgctgggcctgcggatgctgttcgccaaaaccgtggccgtgaacttcctgctgaccgccaagctgttcttcctccgggttaagttttccagatccgcagacgcacccgcttaccaacaagggcagaaccaactctacaatgaacttaatttggggcggagggaagagtacgacgttctggacaaaaggaggggacgagatcccgagatgggcggaaagcctcagcgaaggaagaatccgcaagaggggctttataacgaactccagaaagataaaatggcagaagcctatagtgagattgggatgaagggagaaaggaggaggggtaaaggtcacgatgggttgtaccaaggattgagcacagccactaaagatacctatgatgcgctccacatgcaggccctgccgccaaga

SEQ ID NO: 24585 - DNA, 573 bp, synthetic construct
  source 1..573: mol_type = other DNA
gacaacaagaccgtgcacagcaccgactttgaagtgaaaaccgactccaccgaccacgtgaagcccaaagagacagagaacaccaagcagcccagcaagagctgccacaagcccaaggccatcgtgcacaccgagaaagtgaacatgatgagcctgaccgtgctgggcctgcggatgctgttcgccaaaaccgtggccgtgaacttcctgctgaccgccaagctgttcttcctccgggttaagttttccagatccgcagacgcacccgcttaccaacaagggcagaaccaactctacaatgaacttaatttggggcggagggaagagtacgacgttctggacaaaaggaggggacgagatcccgagatgggcggaaagcctcagcgaaggaagaatccgcaagaggggctttataacgaactccagaaagataaaatggcagaagcctatagtgagattgggatgaagggagaaaggaggaggggtaaaggtcacgatgggttgtaccaaggattgagcacagccactaaagatacctatgatgcgctccacatgcaggccctgccgccaaga

SEQ ID NO: 24586 - DNA, 570 bp, synthetic construct
  source 1..570: mol_type = other DNA
aacaagaccgtgcacagcaccgactttgaagtgaaaaccgactccaccgaccacgtgaagcccaaagagacagagaacaccaagcagcccagcaagagctgccacaagcccaaggccatcgtgcacaccgagaaagtgaacatgatgagcctgaccgtgctgggcctgcggatgctgttcgccaaaaccgtggccgtgaacttcctgctgaccgccaagctgttcttcctccgggttaagttttccagatccgcagacgcacccgcttaccaacaagggcagaaccaactctacaatgaacttaatttggggcggagggaagagtacgacgttctggacaaaaggaggggacgagatcccgagatgggcggaaagcctcagcgaaggaagaatccgcaagaggggctttataacgaactccagaaagataaaatggcagaagcctatagtgagattgggatgaagggagaaaggaggaggggtaaaggtcacgatgggttgtaccaaggattgagcacagccactaaagatacctatgatgcgctccacatgcaggccctgccgccaaga

SEQ ID NO: 24587 - DNA, 567 bp, synthetic construct
  source 1..567: mol_type = other DNA
aagaccgtgcacagcaccgactttgaagtgaaaaccgactccaccgaccacgtgaagcccaaagagacagagaacaccaagcagcccagcaagagctgccacaagcccaaggccatcgtgcacaccgagaaagtgaacatgatgagcctgaccgtgctgggcctgcggatgctgttcgccaaaaccgtggccgtgaacttcctgctgaccgccaagctgttcttcctccgggttaagttttccagatccgcagacgcacccgcttaccaacaagggcagaaccaactctacaatgaacttaatttggggcggagggaagagtacgacgttctggacaaaaggaggggacgagatcccgagatgggcggaaagcctcagcgaaggaagaatccgcaagaggggctttataacgaactccagaaagataaaatggcagaagcctatagtgagattgggatgaagggagaaaggaggaggggtaaaggtcacgatgggttgtaccaaggattgagcacagccactaaagatacctatgatgcgctccacatgcaggccctgccgccaaga

SEQ ID NO: 24588 - DNA, 564 bp, synthetic construct
  source 1..564: mol_type = other DNA
accgtgcacagcaccgactttgaagtgaaaaccgactccaccgaccacgtgaagcccaaagagacagagaacaccaagcagcccagcaagagctgccacaagcccaaggccatcgtgcacaccgagaaagtgaacatgatgagcctgaccgtgctgggcctgcggatgctgttcgccaaaaccgtggccgtgaacttcctgctgaccgccaagctgttcttcctccgggttaagttttccagatccgcagacgcacccgcttaccaacaagggcagaaccaactctacaatgaacttaatttggggcggagggaagagtacgacgttctggacaaaaggaggggacgagatcccgagatgggcggaaagcctcagcgaaggaagaatccgcaagaggggctttataacgaactccagaaagataaaatggcagaagcctatagtgagattgggatgaagggagaaaggaggaggggtaaaggtcacgatgggttgtaccaaggattgagcacagccactaaagatacctatgatgcgctccacatgcaggccctgccgccaaga

SEQ ID NO: 24589 - DNA, 561 bp, synthetic construct
  source 1..561: mol_type = other DNA
gtgcacagcaccgactttgaagtgaaaaccgactccaccgaccacgtgaagcccaaagagacagagaacaccaagcagcccagcaagagctgccacaagcccaaggccatcgtgcacaccgagaaagtgaacatgatgagcctgaccgtgctgggcctgcggatgctgttcgccaaaaccgtggccgtgaacttcctgctgaccgccaagctgttcttcctccgggttaagttttccagatccgcagacgcacccgcttaccaacaagggcagaaccaactctacaatgaacttaatttggggcggagggaagagtacgacgttctggacaaaaggaggggacgagatcccgagatgggcggaaagcctcagcgaaggaagaatccgcaagaggggctttataacgaactccagaaagataaaatggcagaagcctatagtgagattgggatgaagggagaaaggaggaggggtaaaggtcacgatgggttgtaccaaggattgagcacagccactaaagatacctatgatgcgctccacatgcaggccctgccgccaaga

SEQ ID NO: 24590 - DNA, 558 bp, synthetic construct
  source 1..558: mol_type = other DNA
cacagcaccgactttgaagtgaaaaccgactccaccgaccacgtgaagcccaaagagacagagaacaccaagcagcccagcaagagctgccacaagcccaaggccatcgtgcacaccgagaaagtgaacatgatgagcctgaccgtgctgggcctgcggatgctgttcgccaaaaccgtggccgtgaacttcctgctgaccgccaagctgttcttcctccgggttaagttttccagatccgcagacgcacccgcttaccaacaagggcagaaccaactctacaatgaacttaatttggggcggagggaagagtacgacgttctggacaaaaggaggggacgagatcccgagatgggcggaaagcctcagcgaaggaagaatccgcaagaggggctttataacgaactccagaaagataaaatggcagaagcctatagtgagattgggatgaagggagaaaggaggaggggtaaaggtcacgatgggttgtaccaaggattgagcacagccactaaagatacctatgatgcgctccacatgcaggccctgccgccaaga

SEQ ID NO: 24591 - DNA, 555 bp, synthetic construct
  source 1..555: mol_type = other DNA
agcaccgactttgaagtgaaaaccgactccaccgaccacgtgaagcccaaagagacagagaacaccaagcagcccagcaagagctgccacaagcccaaggccatcgtgcacaccgagaaagtgaacatgatgagcctgaccgtgctgggcctgcggatgctgttcgccaaaaccgtggccgtgaacttcctgctgaccgccaagctgttcttcctccgggttaagttttccagatccgcagacgcacccgcttaccaacaagggcagaaccaactctacaatgaacttaatttggggcggagggaagagtacgacgttctggacaaaaggaggggacgagatcccgagatgggcggaaagcctcagcgaaggaagaatccgcaagaggggctttataacgaactccagaaagataaaatggcagaagcctatagtgagattgggatgaagggagaaaggaggaggggtaaaggtcacgatgggttgtaccaaggattgagcacagccactaaagatacctatgatgcgctccacatgcaggccctgccgccaaga

SEQ ID NO: 24592 - DNA, 552 bp, synthetic construct
  source 1..552: mol_type = other DNA
accgactttgaagtgaaaaccgactccaccgaccacgtgaagcccaaagagacagagaacaccaagcagcccagcaagagctgccacaagcccaaggccatcgtgcacaccgagaaagtgaacatgatgagcctgaccgtgctgggcctgcggatgctgttcgccaaaaccgtggccgtgaacttcctgctgaccgccaagctgttcttcctccgggttaagttttccagatccgcagacgcacccgcttaccaacaagggcagaaccaactctacaatgaacttaatttggggcggagggaagagtacgacgttctggacaaaaggaggggacgagatcccgagatgggcggaaagcctcagcgaaggaagaatccgcaagaggggctttataacgaactccagaaagataaaatggcagaagcctatagtgagattgggatgaagggagaaaggaggaggggtaaaggtcacgatgggttgtaccaaggattgagcacagccactaaagatacctatgatgcgctccacatgcaggccctgccgccaaga

SEQ ID NO: 24593 - DNA, 549 bp, synthetic construct
  source 1..549: mol_type = other DNA
gactttgaagtgaaaaccgactccaccgaccacgtgaagcccaaagagacagagaacaccaagcagcccagcaagagctgccacaagcccaaggccatcgtgcacaccgagaaagtgaacatgatgagcctgaccgtgctgggcctgcggatgctgttcgccaaaaccgtggccgtgaacttcctgctgaccgccaagctgttcttcctccgggttaagttttccagatccgcagacgcacccgcttaccaacaagggcagaaccaactctacaatgaacttaatttggggcggagggaagagtacgacgttctggacaaaaggaggggacgagatcccgagatgggcggaaagcctcagcgaaggaagaatccgcaagaggggctttataacgaactccagaaagataaaatggcagaagcctatagtgagattgggatgaagggagaaaggaggaggggtaaaggtcacgatgggttgtaccaaggattgagcacagccactaaagatacctatgatgcgctccacatgcaggccctgccgccaaga

SEQ ID NO: 24594 - DNA, 546 bp, synthetic construct
  source 1..546: mol_type = other DNA
tttgaagtgaaaaccgactccaccgaccacgtgaagcccaaagagacagagaacaccaagcagcccagcaagagctgccacaagcccaaggccatcgtgcacaccgagaaagtgaacatgatgagcctgaccgtgctgggcctgcggatgctgttcgccaaaaccgtggccgtgaacttcctgctgaccgccaagctgttcttcctccgggttaagttttccagatccgcagacgcacccgcttaccaacaagggcagaaccaactctacaatgaacttaatttggggcggagggaagagtacgacgttctggacaaaaggaggggacgagatcccgagatgggcggaaagcctcagcgaaggaagaatccgcaagaggggctttataacgaactccagaaagataaaatggcagaagcctatagtgagattgggatgaagggagaaaggaggaggggtaaaggtcacgatgggttgtaccaaggattgagcacagccactaaagatacctatgatgcgctccacatgcaggccctgccgccaaga

SEQ ID NO: 24595 - DNA, 543 bp, synthetic construct; identical to SEQ ID NO: 23960
  source 1..543: mol_type = other DNA

SEQ ID NO: 24596 - DNA, 540 bp, synthetic construct
  source 1..540: mol_type = other DNA
gtgaaaaccgactccaccgaccacgtgaagcccaaagagacagagaacaccaagcagcccagcaagagctgccacaagcccaaggccatcgtgcacaccgagaaagtgaacatgatgagcctgaccgtgctgggcctgcggatgctgttcgccaaaaccgtggccgtgaacttcctgctgaccgccaagctgttcttcctccgggttaagttttccagatccgcagacgcacccgcttaccaacaagggcagaaccaactctacaatgaacttaatttggggcggagggaagagtacgacgttctggacaaaaggaggggacgagatcccgagatgggcggaaagcctcagcgaaggaagaatccgcaagaggggctttataacgaactccagaaagataaaatggcagaagcctatagtgagattgggatgaagggagaaaggaggaggggtaaaggtcacgatgggttgtaccaaggattgagcacagccactaaagatacctatgatgcgctccacatgcaggccctgccgccaaga

SEQ ID NO: 24597 - DNA, 537 bp, synthetic construct
  source 1..537: mol_type = other DNA
aaaaccgactccaccgaccacgtgaagcccaaagagacagagaacaccaagcagcccagcaagagctgccacaagcccaaggccatcgtgcacaccgagaaagtgaacatgatgagcctgaccgtgctgggcctgcggatgctgttcgccaaaaccgtggccgtgaacttcctgctgaccgccaagctgttcttcctccgggttaagttttccagatccgcagacgcacccgcttaccaacaagggcagaaccaactctacaatgaacttaatttggggcggagggaagagtacgacgttctggacaaaaggaggggacgagatcccgagatgggcggaaagcctcagcgaaggaagaatccgcaagaggggctttataacgaactccagaaagataaaatggcagaagcctatagtgagattgggatgaagggagaaaggaggaggggtaaaggtcacgatgggttgtaccaaggattgagcacagccactaaagatacctatgatgcgctccacatgcaggccctgccgccaaga

SEQ ID NO: 24598 - DNA, 534 bp, synthetic construct
  source 1..534: mol_type = other DNA
accgactccaccgaccacgtgaagcccaaagagacagagaacaccaagcagcccagcaagagctgccacaagcccaaggccatcgtgcacaccgagaaagtgaacatgatgagcctgaccgtgctgggcctgcggatgctgttcgccaaaaccgtggccgtgaacttcctgctgaccgccaagctgttcttcctccgggttaagttttccagatccgcagacgcacccgcttaccaacaagggcagaaccaactctacaatgaacttaatttggggcggagggaagagtacgacgttctggacaaaaggaggggacgagatcccgagatgggcggaaagcctcagcgaaggaagaatccgcaagaggggctttataacgaactccagaaagataaaatggcagaagcctatagtgagattgggatgaagggagaaaggaggaggggtaaaggtcacgatgggttgtaccaaggattgagcacagccactaaagatacctatgatgcgctccacatgcaggccctgccgccaaga

SEQ ID NO: 24599 - DNA, 531 bp, synthetic construct
  source 1..531: mol_type = other DNA
gactccaccgaccacgtgaagcccaaagagacagagaacaccaagcagcccagcaagagctgccacaagcccaaggccatcgtgcacaccgagaaagtgaacatgatgagcctgaccgtgctgggcctgcggatgctgttcgccaaaaccgtggccgtgaacttcctgctgaccgccaagctgttcttcctccgggttaagttttccagatccgcagacgcacccgcttaccaacaagggcagaaccaactctacaatgaacttaatttggggcggagggaagagtacgacgttctggacaaaaggaggggacgagatcccgagatgggcggaaagcctcagcgaaggaagaatccgcaagaggggctttataacgaactccagaaagataaaatggcagaagcctatagtgagattgggatgaagggagaaaggaggaggggtaaaggtcacgatgggttgtaccaaggattgagcacagccactaaagatacctatgatgcgctccacatgcaggccctgccgccaaga

SEQ ID NO: 24600 - DNA, 528 bp, synthetic construct
  source 1..528: mol_type = other DNA
tccaccgaccacgtgaagcccaaagagacagagaacaccaagcagcccagcaagagctgccacaagcccaaggccatcgtgcacaccgagaaagtgaacatgatgagcctgaccgtgctgggcctgcggatgctgttcgccaaaaccgtggccgtgaacttcctgctgaccgccaagctgttcttcctccgggttaagttttccagatccgcagacgcacccgcttaccaacaagggcagaaccaactctacaatgaacttaatttggggcggagggaagagtacgacgttctggacaaaaggaggggacgagatcccgagatgggcggaaagcctcagcgaaggaagaatccgcaagaggggctttataacgaactccagaaagataaaatggcagaagcctatagtgagattgggatgaagggagaaaggaggaggggtaaaggtcacgatgggttgtaccaaggattgagcacagccactaaagatacctatgatgcgctccacatgcaggccctgccgccaaga

SEQ ID NO: 24601 - DNA, 525 bp, synthetic construct
  source 1..525: mol_type = other DNA
accgaccacgtgaagcccaaagagacagagaacaccaagcagcccagcaagagctgccacaagcccaaggccatcgtgcacaccgagaaagtgaacatgatgagcctgaccgtgctgggcctgcggatgctgttcgccaaaaccgtggccgtgaacttcctgctgaccgccaagctgttcttcctccgggttaagttttccagatccgcagacgcacccgcttaccaacaagggcagaaccaactctacaatgaacttaatttggggcggagggaagagtacgacgttctggacaaaaggaggggacgagatcccgagatgggcggaaagcctcagcgaaggaagaatccgcaagaggggctttataacgaactccagaaagataaaatggcagaagcctatagtgagattgggatgaagggagaaaggaggaggggtaaaggtcacgatgggttgtaccaaggattgagcacagccactaaagatacctatgatgcgctccacatgcaggccctgccgccaaga

SEQ ID NO: 24602 - DNA, 522 bp, synthetic construct; identical to SEQ ID NO: 23961
  source 1..522: mol_type = other DNA

SEQ ID NO: 24603 - DNA, 519 bp, synthetic construct
  source 1..519: mol_type = other DNA
cacgtgaagcccaaagagacagagaacaccaagcagcccagcaagagctgccacaagcccaaggccatcgtgcacaccgagaaagtgaacatgatgagcctgaccgtgctgggcctgcggatgctgttcgccaaaaccgtggccgtgaacttcctgctgaccgccaagctgttcttcctccgggttaagttttccagatccgcagacgcacccgcttaccaacaagggcagaaccaactctacaatgaacttaatttggggcggagggaagagtacgacgttctggacaaaaggaggggacgagatcccgagatgggcggaaagcctcagcgaaggaagaatccgcaagaggggctttataacgaactccagaaagataaaatggcagaagcctatagtgagattgggatgaagggagaaaggaggaggggtaaaggtcacgatgggttgtaccaaggattgagcacagccactaaagatacctatgatgcgctccacatgcaggccctgccgccaaga

SEQ ID NO: 24604 - DNA, 516 bp, synthetic construct
  source 1..516: mol_type = other DNA
gtgaagcccaaagagacagagaacaccaagcagcccagcaagagctgccacaagcccaaggccatcgtgcacaccgagaaagtgaacatgatgagcctgaccgtgctgggcctgcggatgctgttcgccaaaaccgtggccgtgaacttcctgctgaccgccaagctgttcttcctccgggttaagttttccagatccgcagacgcacccgcttaccaacaagggcagaaccaactctacaatgaacttaatttggggcggagggaagagtacgacgttctggacaaaaggaggggacgagatcccgagatgggcggaaagcctcagcgaaggaagaatccgcaagaggggctttataacgaactccagaaagataaaatggcagaagcctatagtgagattgggatgaagggagaaaggaggaggggtaaaggtcacgatgggttgtaccaaggattgagcacagccactaaagatacctatgatgcgctccacatgcaggccctgccgccaaga

SEQ ID NO: 24605 - DNA, 513 bp, synthetic construct
  source 1..513: mol_type = other DNA
aagcccaaagagacagagaacaccaagcagcccagcaagagctgccacaagcccaaggccatcgtgcacaccgagaaagtgaacatgatgagcctgaccgtgctgggcctgcggatgctgttcgccaaaaccgtggccgtgaacttcctgctgaccgccaagctgttcttcctccgggttaagttttccagatccgcagacgcacccgcttaccaacaagggcagaaccaactctacaatgaacttaatttggggcggagggaagagtacgacgttctggacaaaaggaggggacgagatcccgagatgggcggaaagcctcagcgaaggaagaatccgcaagaggggctttataacgaactccagaaagataaaatggcagaagcctatagtgagattgggatgaagggagaaaggaggaggggtaaaggtcacgatgggttgtaccaaggattgagcacagccactaaagatacctatgatgcgctccacatgcaggccctgccgccaaga

SEQ ID NO: 24606 - DNA, 510 bp, synthetic construct
  source 1..510: mol_type = other DNA
cccaaagagacagagaacaccaagcagcccagcaagagctgccacaagcccaaggccatcgtgcacaccgagaaagtgaacatgatgagcctgaccgtgctgggcctgcggatgctgttcgccaaaaccgtggccgtgaacttcctgctgaccgccaagctgttcttcctccgggttaagttttccagatccgcagacgcacccgcttaccaacaagggcagaaccaactctacaatgaacttaatttggggcggagggaagagtacgacgttctggacaaaaggaggggacgagatcccgagatgggcggaaagcctcagcgaaggaagaatccgcaagaggggctttataacgaactccagaaagataaaatggcagaagcctatagtgagattgggatgaagggagaaaggaggaggggtaaaggtcacgatgggttgtaccaaggattgagcacagccactaaagatacctatgatgcgctccacatgcaggccctgccgccaaga

SEQ ID NO: 24607 - DNA, 507 bp, synthetic construct
  source 1..507: mol_type = other DNA
aaagagacagagaacaccaagcagcccagcaagagctgccacaagcccaaggccatcgtgcacaccgagaaagtgaacatgatgagcctgaccgtgctgggcctgcggatgctgttcgccaaaaccgtggccgtgaacttcctgctgaccgccaagctgttcttcctccgggttaagttttccagatccgcagacgcacccgcttaccaacaagggcagaaccaactctacaatgaacttaatttggggcggagggaagagtacgacgttctggacaaaaggaggggacgagatcccgagatgggcggaaagcctcagcgaaggaagaatccgcaagaggggctttataacgaactccagaaagataaaatggcagaagcctatagtgagattgggatgaagggagaaaggaggaggggtaaaggtcacgatgggttgtaccaaggattgagcacagccactaaagatacctatgatgcgctccacatgcaggccctgccgccaaga

SEQ ID NO: 24608 - DNA, 504 bp, synthetic construct
  source 1..504: mol_type = other DNA
gagacagagaacaccaagcagcccagcaagagctgccacaagcccaaggccatcgtgcacaccgagaaagtgaacatgatgagcctgaccgtgctgggcctgcggatgctgttcgccaaaaccgtggccgtgaacttcctgctgaccgccaagctgttcttcctccgggttaagttttccagatccgcagacgcacccgcttaccaacaagggcagaaccaactctacaatgaacttaatttggggcggagggaagagtacgacgttctggacaaaaggaggggacgagatcccgagatgggcggaaagcctcagcgaaggaagaatccgcaagaggggctttataacgaactccagaaagataaaatggcagaagcctatagtgagattgggatgaagggagaaaggaggaggggtaaaggtcacgatgggttgtaccaaggattgagcacagccactaaagatacctatgatgcgctccacatgcaggccctgccgccaaga

SEQ ID NO: 24609 - DNA, 501 bp, synthetic construct
  source 1..501: mol_type = other DNA
acagagaacaccaagcagcccagcaagagctgccacaagcccaaggccatcgtgcacaccgagaaagtgaacatgatgagcctgaccgtgctgggcctgcggatgctgttcgccaaaaccgtggccgtgaacttcctgctgaccgccaagctgttcttcctccgggttaagttttccagatccgcagacgcacccgcttaccaacaagggcagaaccaactctacaatgaacttaatttggggcggagggaagagtacgacgttctggacaaaaggaggggacgagatcccgagatgggcggaaagcctcagcgaaggaagaatccgcaagaggggctttataacgaactccagaaagataaaatggcagaagcctatagtgagattgggatgaagggagaaaggaggaggggtaaaggtcacgatgggttgtaccaaggattgagcacagccactaaagatacctatgatgcgctccacatgcaggccctgccgccaaga

SEQ ID NO: 24610 - DNA, 498 bp, synthetic construct
  source 1..498: mol_type = other DNA
gagaacaccaagcagcccagcaagagctgccacaagcccaaggccatcgtgcacaccgagaaagtgaacatgatgagcctgaccgtgctgggcctgcggatgctgttcgccaaaaccgtggccgtgaacttcctgctgaccgccaagctgttcttcctccgggttaagttttccagatccgcagacgcacccgcttaccaacaagggcagaaccaactctacaatgaacttaatttggggcggagggaagagtacgacgttctggacaaaaggaggggacgagatcccgagatgggcggaaagcctcagcgaaggaagaatccgcaagaggggctttataacgaactccagaaagataaaatggcagaagcctatagtgagattgggatgaagggagaaaggaggaggggtaaaggtcacgatgggttgtaccaaggattgagcacagccactaaagatacctatgatgcgctccacatgcaggccctgccgccaaga

SEQ ID NO: 24611 - DNA, 495 bp, synthetic construct
  source 1..495: mol_type = other DNA
aacaccaagcagcccagcaagagctgccacaagcccaaggccatcgtgcacaccgagaaagtgaacatgatgagcctgaccgtgctgggcctgcggatgctgttcgccaaaaccgtggccgtgaacttcctgctgaccgccaagctgttcttcctccgggttaagttttccagatccgcagacgcacccgcttaccaacaagggcagaaccaactctacaatgaacttaatttggggcggagggaagagtacgacgttctggacaaaaggaggggacgagatcccgagatgggcggaaagcctcagcgaaggaagaatccgcaagaggggctttataacgaactccagaaagataaaatggcagaagcctatagtgagattgggatgaagggagaaaggaggaggggtaaaggtcacgatgggttgtaccaaggattgagcacagccactaaagatacctatgatgcgctccacatgcaggccctgccgccaaga

SEQ ID NO: 24612 - DNA, 747 bp, synthetic construct
  source 1..747: mol_type = other DNA
atccagaaccctgaacctgccgtgtaccagctgaaggaccccagaagccaggacagcaccctgtgcctgttcaccgacttcgacagccagatcaacgtgcccaagacaatggaaagcggcaccttcatcaccgacaagtgcgtgctggacatgaaggctatggacagcaagagcaacggcgccattgcctggtccaaccagaccagcttcacatgccaggacatcttcaaagagacaaacgccacctacccctccagcgacgtgccctgtgacgccaccctgaccgagaagtccttcgagacagacatgaacctcaacttccagaacctgagcgtgatgggcctgcgaatcctgctgctgaaagtggccggcttcaacctgctgatgaccctgcggctgtggtccagccgggttaagttttccagatccgcagacgcacccgcttaccaacaagggcagaaccaactctacaatgaacttaatttggggcggagggaagagtacgacgttctggacaaaaggaggggacgagatcccgagatgggcggaaagcctcagcgaaggaagaatccgcaagaggggctttataacgaactccagaaagataaaatggcagaagcctatagtgagattgggatgaagggagaaaggaggaggggtaaaggtcacgatgggttgtaccaaggattgagcacagccactaaagatacctatgatgcgctccacatgcaggccctgccgccaaga

SEQ ID NO: 24613 - DNA, 744 bp, synthetic construct
  source 1..744: mol_type = other DNA
cagaaccctgaacctgccgtgtaccagctgaaggaccccagaagccaggacagcaccctgtgcctgttcaccgacttcgacagccagatcaacgtgcccaagacaatggaaagcggcaccttcatcaccgacaagtgcgtgctggacatgaaggctatggacagcaagagcaacggcgccattgcctggtccaaccagaccagcttcacatgccaggacatcttcaaagagacaaacgccacctacccctccagcgacgtgccctgtgacgccaccctgaccgagaagtccttcgagacagacatgaacctcaacttccagaacctgagcgtgatgggcctgcgaatcctgctgctgaaagtggccggcttcaacctgctgatgaccctgcggctgtggtccagccgggttaagttttccagatccgcagacgcacccgcttaccaacaagggcagaaccaactctacaatgaacttaatttggggcggagggaagagtacgacgttctggacaaaaggaggggacgagatcccgagatgggcggaaagcctcagcgaaggaagaatccgcaagaggggctttataacgaactccagaaagataaaatggcagaagcctatagtgagattgggatgaagggagaaaggaggaggggtaaaggtcacgatgggttgtaccaaggattgagcacagccactaaagatacctatgatgcgctccacatgcaggccctgccgccaaga

SEQ ID NO: 24614 - DNA, 741 bp, synthetic construct
  source 1..741: mol_type = other DNA
aaccctgaacctgccgtgtaccagctgaaggaccccagaagccaggacagcaccctgtgcctgttcaccgacttcgacagccagatcaacgtgcccaagacaatggaaagcggcaccttcatcaccgacaagtgcgtgctggacatgaaggctatggacagcaagagcaacggcgccattgcctggtccaaccagaccagcttcacatgccaggacatcttcaaagagacaaacgccacctacccctccagcgacgtgccctgtgacgccaccctgaccgagaagtccttcgagacagacatgaacctcaacttccagaacctgagcgtgatgggcctgcgaatcctgctgctgaaagtggccggcttcaacctgctgatgaccctgcggctgtggtccagccgggttaagttttccagatccgcagacgcacccgcttaccaacaagggcagaaccaactctacaatgaacttaatttggggcggagggaagagtacgacgttctggacaaaaggaggggacgagatcccgagatgggcggaaagcctcagcgaaggaagaatccgcaagaggggctttataacgaactccagaaagataaaatggcagaagcctatagtgagattgggatgaagggagaaaggaggaggggtaaaggtcacgatgggttgtaccaaggattgagcacagccactaaagatacctatgatgcgctccacatgcaggccctgccgccaaga

SEQ ID NO: 24615 - DNA, 738 bp, synthetic construct
  source 1..738: mol_type = other DNA
cctgaacctgccgtgtaccagctgaaggaccccagaagccaggacagcaccctgtgcctgttcaccgacttcgacagccagatcaacgtgcccaagacaatggaaagcggcaccttcatcaccgacaagtgcgtgctggacatgaaggctatggacagcaagagcaacggcgccattgcctggtccaaccagaccagcttcacatgccaggacatcttcaaagagacaaacgccacctacccctccagcgacgtgccctgtgacgccaccctgaccgagaagtccttcgagacagacatgaacctcaacttccagaacctgagcgtgatgggcctgcgaatcctgctgctgaaagtggccggcttcaacctgctgatgaccctgcggctgtggtccagccgggttaagttttccagatccgcagacgcacccgcttaccaacaagggcagaaccaactctacaatgaacttaatttggggcggagggaagagtacgacgttctggacaaaaggaggggacgagatcccgagatgggcggaaagcctcagcgaaggaagaatccgcaagaggggctttataacgaactccagaaagataaaatggcagaagcctatagtgagattgggatgaagggagaaaggaggaggggtaaaggtcacgatgggttgtaccaaggattgagcacagccactaaagatacctatgatgcgctccacatgcaggccctgccgccaaga

SEQ ID NO: 24616 - DNA, 735 bp, synthetic construct
  source 1..735: mol_type = other DNA
gaacctgccgtgtaccagctgaaggaccccagaagccaggacagcaccctgtgcctgttcaccgacttcgacagccagatcaacgtgcccaagacaatggaaagcggcaccttcatcaccgacaagtgcgtgctggacatgaaggctatggacagcaagagcaacggcgccattgcctggtccaaccagaccagcttcacatgccaggacatcttcaaagagacaaacgccacctacccctccagcgacgtgccctgtgacgccaccctgaccgagaagtccttcgagacagacatgaacctcaacttccagaacctgagcgtgatgggcctgcgaatcctgctgctgaaagtggccggcttcaacctgctgatgaccctgcggctgtggtccagccgggttaagttttccagatccgcagacgcacccgcttaccaacaagggcagaaccaactctacaatgaacttaatttggggcggagggaagagtacgacgttctggacaaaaggaggggacgagatcccgagatgggcggaaagcctcagcgaaggaagaatccgcaagaggggctttataacgaactccagaaagataaaatggcagaagcctatagtgagattgggatgaagggagaaaggaggaggggtaaaggtcacgatgggttgtaccaaggattgagcacagccactaaagatacctatgatgcgctccacatgcaggccctgccgccaaga

SEQ ID NO: 24617 - DNA, 732 bp, synthetic construct
  source 1..732: mol_type = other DNA
cctgccgtgtaccagctgaaggaccccagaagccaggacagcaccctgtgcctgttcaccgacttcgacagccagatcaacgtgcccaagacaatggaaagcggcaccttcatcaccgacaagtgcgtgctggacatgaaggctatggacagcaagagcaacggcgccattgcctggtccaaccagaccagcttcacatgccaggacatcttcaaagagacaaacgccacctacccctccagcgacgtgccctgtgacgccaccctgaccgagaagtccttcgagacagacatgaacctcaacttccagaacctgagcgtgatgggcctgcgaatcctgctgctgaaagtggccggcttcaacctgctgatgaccctgcggctgtggtccagccgggttaagttttccagatccgcagacgcacccgcttaccaacaagggcagaaccaactctacaatgaacttaatttggggcggagggaagagtacgacgttctggacaaaaggaggggacgagatcccgagatgggcggaaagcctcagcgaaggaagaatccgcaagaggggctttataacgaactccagaaagataaaatggcagaagcctatagtgagattgggatgaagggagaaaggaggaggggtaaaggtcacgatgggttgtaccaaggattgagcacagccactaaagatacctatgatgcgctccacatgcaggccctgccgccaaga

SEQ ID NO: 24618 - DNA, 729 bp, synthetic construct
  source 1..729: mol_type = other DNA
gccgtgtaccagctgaaggaccccagaagccaggacagcaccctgtgcctgttcaccgacttcgacagccagatcaacgtgcccaagacaatggaaagcggcaccttcatcaccgacaagtgcgtgctggacatgaaggctatggacagcaagagcaacggcgccattgcctggtccaaccagaccagcttcacatgccaggacatcttcaaagagacaaacgccacctacccctccagcgacgtgccctgtgacgccaccctgaccgagaagtccttcgagacagacatgaacctcaacttccagaacctgagcgtgatgggcctgcgaatcctgctgctgaaagtggccggcttcaacctgctgatgaccctgcggctgtggtccagccgggttaagttttccagatccgcagacgcacccgcttaccaacaagggcagaaccaactctacaatgaacttaatttggggcggagggaagagtacgacgttctggacaaaaggaggggacgagatcccgagatgggcggaaagcctcagcgaaggaagaatccgcaagaggggctttataacgaactccagaaagataaaatggcagaagcctatagtgagattgggatgaagggagaaaggaggaggggtaaaggtcacgatgggttgtaccaaggattgagcacagccactaaagatacctatgatgcgctccacatgcaggccctgccgccaaga

SEQ ID NO: 24619 - DNA, 726 bp, synthetic construct
  source 1..726: mol_type = other DNA
gtgtaccagctgaaggaccccagaagccaggacagcaccctgtgcctgttcaccgacttcgacagccagatcaacgtgcccaagacaatggaaagcggcaccttcatcaccgacaagtgcgtgctggacatgaaggctatggacagcaagagcaacggcgccattgcctggtccaaccagaccagcttcacatgccaggacatcttcaaagagacaaacgccacctacccctccagcgacgtgccctgtgacgccaccctgaccgagaagtccttcgagacagacatgaacctcaacttccagaacctgagcgtgatgggcctgcgaatcctgctgctgaaagtggccggcttcaacctgctgatgaccctgcggctgtggtccagccgggttaagttttccagatccgcagacgcacccgcttaccaacaagggcagaaccaactctacaatgaacttaatttggggcggagggaagagtacgacgttctggacaaaaggaggggacgagatcccgagatgggcggaaagcctcagcgaaggaagaatccgcaagaggggctttataacgaactccagaaagataaaatggcagaagcctatagtgagattgggatgaagggagaaaggaggaggggtaaaggtcacgatgggttgtaccaaggattgagcacagccactaaagatacctatgatgcgctccacatgcaggccctgccgccaaga

SEQ ID NO: 24620 - DNA, 723 bp, synthetic construct
  source 1..723: mol_type = other DNA
taccagctgaaggaccccagaagccaggacagcaccctgtgcctgttcaccgacttcgacagccagatcaacgtgcccaagacaatggaaagcggcaccttcatcaccgacaagtgcgtgctggacatgaaggctatggacagcaagagcaacggcgccattgcctggtccaaccagaccagcttcacatgccaggacatcttcaaagagacaaacgccacctacccctccagcgacgtgccctgtgacgccaccctgaccgagaagtccttcgagacagacatgaacctcaacttccagaacctgagcgtgatgggcctgcgaatcctgctgctgaaagtggccggcttcaacctgctgatgaccctgcggctgtggtccagccgggttaagttttccagatccgcagacgcacccgcttaccaacaagggcagaaccaactctacaatgaacttaatttggggcggagggaagagtacgacgttctggacaaaaggaggggacgagatcccgagatgggcggaaagcctcagcgaaggaagaatccgcaagaggggctttataacgaactccagaaagataaaatggcagaagcctatagtgagattgggatgaagggagaaaggaggaggggtaaaggtcacgatgggttgtaccaaggattgagcacagccactaaagatacctatgatgcgctccacatgcaggccctgccgccaaga

SEQ ID NO: 24621 - DNA, 720 bp, synthetic construct
  source 1..720: mol_type = other DNA
cagctgaaggaccccagaagccaggacagcaccctgtgcctgttcaccgacttcgacagccagatcaacgtgcccaagacaatggaaagcggcaccttcatcaccgacaagtgcgtgctggacatgaaggctatggacagcaagagcaacggcgccattgcctggtccaaccagaccagcttcacatgccaggacatcttcaaagagacaaacgccacctacccctccagcgacgtgccctgtgacgccaccctgaccgagaagtccttcgagacagacatgaacctcaacttccagaacctgagcgtgatgggcctgcgaatcctgctgctgaaagtggccggcttcaacctgctgatgaccctgcggctgtggtccagccgggttaagttttccagatccgcagacgcacccgcttaccaacaagggcagaaccaactctacaatgaacttaatttggggcggagggaagagtacgacgttctggacaaaaggaggggacgagatcccgagatgggcggaaagcctcagcgaaggaagaatccgcaagaggggctttataacgaactccagaaagataaaatggcagaagcctatagtgagattgggatgaagggagaaaggaggaggggtaaaggtcacgatgggttgtaccaaggattgagcacagccactaaagatacctatgatgcgctccacatgcaggccctgccgccaaga

SEQ ID NO: 24622 - DNA, 717 bp, synthetic construct
  source 1..717: mol_type = other DNA
ctgaaggaccccagaagccaggacagcaccctgtgcctgttcaccgacttcgacagccagatcaacgtgcccaagacaatggaaagcggcaccttcatcaccgacaagtgcgtgctggacatgaaggctatggacagcaagagcaacggcgccattgcctggtccaaccagaccagcttcacatgccaggacatcttcaaagagacaaacgccacctacccctccagcgacgtgccctgtgacgccaccctgaccgagaagtccttcgagacagacatgaacctcaacttccagaacctgagcgtgatgggcctgcgaatcctgctgctgaaagtggccggcttcaacctgctgatgaccctgcggctgtggtccagccgggttaagttttccagatccgcagacgcacccgcttaccaacaagggcagaaccaactctacaatgaacttaatttggggcggagggaagagtacgacgttctggacaaaaggaggggacgagatcccgagatgggcggaaagcctcagcgaaggaagaatccgcaagaggggctttataacgaactccagaaagataaaatggcagaagcctatagtgagattgggatgaagggagaaaggaggaggggtaaaggtcacgatgggttgtaccaaggattgagcacagccactaaagatacctatgatgcgctccacatgcaggccctgccgccaaga

SEQ ID NO: 24623 - DNA, 702 bp, synthetic construct
  source 1..702: mol_type = other DNA
agccaggacagcaccctgtgcctgttcaccgacttcgacagccagatcaacgtgcccaagacaatggaaagcggcaccttcatcaccgacaagtgcgtgctggacatgaaggctatggacagcaagagcaacggcgccattgcctggtccaaccagaccagcttcacatgccaggacatcttcaaagagacaaacgccacctacccctccagcgacgtgccctgtgacgccaccctgaccgagaagtccttcgagacagacatgaacctcaacttccagaacctgagcgtgatgggcctgcgaatcctgctgctgaaagtggccggcttcaacctgctgatgaccctgcggctgtggtccagccgggttaagttttccagatccgcagacgcacccgcttaccaacaagggcagaaccaactctacaatgaacttaatttggggcggagggaagagtacgacgttctggacaaaaggaggggacgagatcccgagatgggcggaaagcctcagcgaaggaagaatccgcaagaggggctttataacgaactccagaaagataaaatggcagaagcctatagtgagattgggatgaagggagaaaggaggaggggtaaaggtcacgatgggttgtaccaaggattgagcacagccactaaagatacctatgatgcgctccacatgcaggccctgccgccaaga

SEQ ID NO: 24624 - DNA, 687 bp, synthetic construct
  source 1..687: mol_type = other DNA
ctgtgcctgttcaccgacttcgacagccagatcaacgtgcccaagacaatggaaagcggcaccttcatcaccgacaagtgcgtgctggacatgaaggctatggacagcaagagcaacggcgccattgcctggtccaaccagaccagcttcacatgccaggacatcttcaaagagacaaacgccacctacccctccagcgacgtgccctgtgacgccaccctgaccgagaagtccttcgagacagacatgaacctcaacttccagaacctgagcgtgatgggcctgcgaatcctgctgctgaaagtggccggcttcaacctgctgatgaccctgcggctgtggtccagccgggttaagttttccagatccgcagacgcacccgcttaccaacaagggcagaaccaactctacaatgaacttaatttggggcggagggaagagtacgacgttctggacaaaaggaggggacgagatcccgagatgggcggaaagcctcagcgaaggaagaatccgcaagaggggctttataacgaactccagaaagataaaatggcagaagcctatagtgagattgggatgaagggagaaaggaggaggggtaaaggtcacgatgggttgtaccaaggattgagcacagccactaaagatacctatgatgcgctccacatgcaggccctgccgccaaga

SEQ ID NO: 24625 - DNA, 747 bp, synthetic construct
  source 1..747: mol_type = other DNA
atccagaaccctgaacctgccgtgtaccagctgaaggaccccagaagccaggacagcaccctgtgcctgttcaccgacttcgacagccagatcaacgtgcccaagacaatggaaagcggcaccttcatcaccgacaagtgcgtgctggacatgaaggctatggacagcaagagcaacggcgccattgcctggtccaaccagaccagcttcacatgccaggacatcttcaaagagacaaacgccacctacccctccagcgacgtgccctgtgacgccaccctgaccgagaagtccttcgagacagacatgaacctcaacttccagaacctgctggtggtgggcctgcgaatcctgctgctgaaagtggccggcttcaacctgctgatgaccctgcggctgtggtccagccgggttaagttttccagatccgcagacgcacccgcttaccaacaagggcagaaccaactctacaatgaacttaatttggggcggagggaagagtacgacgttctggacaaaaggaggggacgagatcccgagatgggcggaaagcctcagcgaaggaagaatccgcaagaggggctttataacgaactccagaaagataaaatggcagaagcctatagtgagattgggatgaagggagaaaggaggaggggtaaaggtcacgatgggttgtaccaaggattgagcacagccactaaagatacctatgatgcgctccacatgcaggccctgccgccaaga

SEQ ID NO: 24626 - DNA, 744 bp, synthetic construct
  source 1..744: mol_type = other DNA
cagaaccctgaacctgccgtgtaccagctgaaggaccccagaagccaggacagcaccctgtgcctgttcaccgacttcgacagccagatcaacgtgcccaagacaatggaaagcggcaccttcatcaccgacaagtgcgtgctggacatgaaggctatggacagcaagagcaacggcgccattgcctggtccaaccagaccagcttcacatgccaggacatcttcaaagagacaaacgccacctacccctccagcgacgtgccctgtgacgccaccctgaccgagaagtccttcgagacagacatgaacctcaacttccagaacctgctggtggtgggcctgcgaatcctgctgctgaaagtggccggcttcaacctgctgatgaccctgcggctgtggtccagccgggttaagttttccagatccgcagacgcacccgcttaccaacaagggcagaaccaactctacaatgaacttaatttggggcggagggaagagtacgacgttctggacaaaaggaggggacgagatcccgagatgggcggaaagcctcagcgaaggaagaatccgcaagaggggctttataacgaactccagaaagataaaatggcagaagcctatagtgagattgggatgaagggagaaaggaggaggggtaaaggtcacgatgggttgtaccaaggattgagcacagccactaaagatacctatgatgcgctccacatgcaggccctgccgccaaga

SEQ ID NO: 24627 - DNA, 741 bp, synthetic construct
  source 1..741: mol_type = other DNA
aaccctgaacctgccgtgtaccagctgaaggaccccagaagccaggacagcaccctgtgcctgttcaccgacttcgacagccagatcaacgtgcccaagacaatggaaagcggcaccttcatcaccgacaagtgcgtgctggacatgaaggctatggacagcaagagcaacggcgccattgcctggtccaaccagaccagcttcacatgccaggacatcttcaaagagacaaacgccacctacccctccagcgacgtgccctgtgacgccaccctgaccgagaagtccttcgagacagacatgaacctcaacttccagaacctgctggtggtgggcctgcgaatcctgctgctgaaagtggccggcttcaacctgctgatgaccctgcggctgtggtccagccgggttaagttttccagatccgcagacgcacccgcttaccaacaagggcagaaccaactctacaatgaacttaatttggggcggagggaagagtacgacgttctggacaaaaggaggggacgagatcccgagatgggcggaaagcctcagcgaaggaagaatccgcaagaggggctttataacgaactccagaaagataaaatggcagaagcctatagtgagattgggatgaagggagaaaggaggaggggtaaaggtcacgatgggttgtaccaaggattgagcacagccactaaagatacctatgatgcgctccacatgcaggccctgccgccaaga

SEQ ID NO: 24628 - DNA, 738 bp, synthetic construct
  source 1..738: mol_type = other DNA
cctgaacctgccgtgtaccagctgaaggaccccagaagccaggacagcaccctgtgcctgttcaccgacttcgacagccagatcaacgtgcccaagacaatggaaagcggcaccttcatcaccgacaagtgcgtgctggacatgaaggctatggacagcaagagcaacggcgccattgcctggtccaaccagaccagcttcacatgccaggacatcttcaaagagacaaacgccacctacccctccagcgacgtgccctgtgacgccaccctgaccgagaagtccttcgagacagacatgaacctcaacttccagaacctgctggtggtgggcctgcgaatcctgctgctgaaagtggccggcttcaacctgctgatgaccctgcggctgtggtccagccgggttaagttttccagatccgcagacgcacccgcttaccaacaagggcagaaccaactctacaatgaacttaatttggggcggagggaagagtacgacgttctggacaaaaggaggggacgagatcccgagatgggcggaaagcctcagcgaaggaagaatccgcaagaggggctttataacgaactccagaaagataaaatggcagaagcctatagtgagattgggatgaagggagaaaggaggaggggtaaaggtcacgatgggttgtaccaaggattgagcacagccactaaagatacctatgatgcgctccacatgcaggccctgccgccaaga

SEQ ID NO: 24629 - DNA, 735 bp, synthetic construct
  source 1..735: mol_type = other DNA
gaacctgccgtgtaccagctgaaggaccccagaagccaggacagcaccctgtgcctgttcaccgacttcgacagccagatcaacgtgcccaagacaatggaaagcggcaccttcatcaccgacaagtgcgtgctggacatgaaggctatggacagcaagagcaacggcgccattgcctggtccaaccagaccagcttcacatgccaggacatcttcaaagagacaaacgccacctacccctccagcgacgtgccctgtgacgccaccctgaccgagaagtccttcgagacagacatgaacctcaacttccagaacctgctggtggtgggcctgcgaatcctgctgctgaaagtggccggcttcaacctgctgatgaccctgcggctgtggtccagccgggttaagttttccagatccgcagacgcacccgcttaccaacaagggcagaaccaactctacaatgaacttaatttggggcggagggaagagtacgacgttctggacaaaaggaggggacgagatcccgagatgggcggaaagcctcagcgaaggaagaatccgcaagaggggctttataacgaactccagaaagataaaatggcagaagcctatagtgagattgggatgaagggagaaaggaggaggggtaaaggtcacgatgggttgtaccaaggattgagcacagccactaaagatacctatgatgcgctccacatgcaggccctgccgccaaga

SEQ ID NO: 24630 - DNA, 732 bp, synthetic construct
  source 1..732: mol_type = other DNA
cctgccgtgtaccagctgaaggaccccagaagccaggacagcaccctgtgcctgttcaccgacttcgacagccagatcaacgtgcccaagacaatggaaagcggcaccttcatcaccgacaagtgcgtgctggacatgaaggctatggacagcaagagcaacggcgccattgcctggtccaaccagaccagcttcacatgccaggacatcttcaaagagacaaacgccacctacccctccagcgacgtgccctgtgacgccaccctgaccgagaagtccttcgagacagacatgaacctcaacttccagaacctgctggtggtgggcctgcgaatcctgctgctgaaagtggccggcttcaacctgctgatgaccctgcggctgtggtccagccgggttaagttttccagatccgcagacgcacccgcttaccaacaagggcagaaccaactctacaatgaacttaatttggggcggagggaagagtacgacgttctggacaaaaggaggggacgagatcccgagatgggcggaaagcctcagcgaaggaagaatccgcaagaggggctttataacgaactccagaaagataaaatggcagaagcctatagtgagattgggatgaagggagaaaggaggaggggtaaaggtcacgatgggttgtaccaaggattgagcacagccactaaagatacctatgatgcgctccacatgcaggccctgccgccaaga

SEQ ID NO: 24631 - DNA, 729 bp, synthetic construct
  source 1..729: mol_type = other DNA
gccgtgtaccagctgaaggaccccagaagccaggacagcaccctgtgcctgttcaccgacttcgacagccagatcaacgtgcccaagacaatggaaagcggcaccttcatcaccgacaagtgcgtgctggacatgaaggctatggacagcaagagcaacggcgccattgcctggtccaaccagaccagcttcacatgccaggacatcttcaaagagacaaacgccacctacccctccagcgacgtgccctgtgacgccaccctgaccgagaagtccttcgagacagacatgaacctcaacttccagaacctgctggtggtgggcctgcgaatcctgctgctgaaagtggccggcttcaacctgctgatgaccctgcggctgtggtccagccgggttaagttttccagatccgcagacgcacccgcttaccaacaagggcagaaccaactctacaatgaacttaatttggggcggagggaagagtacgacgttctggacaaaaggaggggacgagatcccgagatgggcggaaagcctcagcgaaggaagaatccgcaagaggggctttataacgaactccagaaagataaaatggcagaagcctatagtgagattgggatgaagggagaaaggaggaggggtaaaggtcacgatgggttgtaccaaggattgagcacagccactaaagatacctatgatgcgctccacatgcaggccctgccgccaaga

SEQ ID NO: 24632 - DNA, 726 bp, synthetic construct
  source 1..726: mol_type = other DNA
gtgtaccagctgaaggaccccagaagccaggacagcaccctgtgcctgttcaccgacttcgacagccagatcaacgtgcccaagacaatggaaagcggcaccttcatcaccgacaagtgcgtgctggacatgaaggctatggacagcaagagcaacggcgccattgcctggtccaaccagaccagcttcacatgccaggacatcttcaaagagacaaacgccacctacccctccagcgacgtgccctgtgacgccaccctgaccgagaagtccttcgagacagacatgaacctcaacttccagaacctgctggtggtgggcctgcgaatcctgctgctgaaagtggccggcttcaacctgctgatgaccctgcggctgtggtccagccgggttaagttttccagatccgcagacgcacccgcttaccaacaagggcagaaccaactctacaatgaacttaatttggggcggagggaagagtacgacgttctggacaaaaggaggggacgagatcccgagatgggcggaaagcctcagcgaaggaagaatccgcaagaggggctttataacgaactccagaaagataaaatggcagaagcctatagtgagattgggatgaagggagaaaggaggaggggtaaaggtcacgatgggttgtaccaaggattgagcacagccactaaagatacctatgatgcgctccacatgcaggccctgccgccaaga

SEQ ID NO: 24633 - DNA, 723 bp, synthetic construct
  source 1..723: mol_type = other DNA
taccagctgaaggaccccagaagccaggacagcaccctgtgcctgttcaccgacttcgacagccagatcaacgtgcccaagacaatggaaagcggcaccttcatcaccgacaagtgcgtgctggacatgaaggctatggacagcaagagcaacggcgccattgcctggtccaaccagaccagcttcacatgccaggacatcttcaaagagacaaacgccacctacccctccagcgacgtgccctgtgacgccaccctgaccgagaagtccttcgagacagacatgaacctcaacttccagaacctgctggtggtgggcctgcgaatcctgctgctgaaagtggccggcttcaacctgctgatgaccctgcggctgtggtccagccgggttaagttttccagatccgcagacgcacccgcttaccaacaagggcagaaccaactctacaatgaacttaatttggggcggagggaagagtacgacgttctggacaaaaggaggggacgagatcccgagatgggcggaaagcctcagcgaaggaagaatccgcaagaggggctttataacgaactccagaaagataaaatggcagaagcctatagtgagattgggatgaagggagaaaggaggaggggtaaaggtcacgatgggttgtaccaaggattgagcacagccactaaagatacctatgatgcgctccacatgcaggccctgccgccaaga

SEQ ID NO: 24634 - DNA, 720 bp, synthetic construct
  source 1..720: mol_type = other DNA
cagctgaaggaccccagaagccaggacagcaccctgtgcctgttcaccgacttcgacagccagatcaacgtgcccaagacaatggaaagcggcaccttcatcaccgacaagtgcgtgctggacatgaaggctatggacagcaagagcaacggcgccattgcctggtccaaccagaccagcttcacatgccaggacatcttcaaagagacaaacgccacctacccctccagcgacgtgccctgtgacgccaccctgaccgagaagtccttcgagacagacatgaacctcaacttccagaacctgctggtggtgggcctgcgaatcctgctgctgaaagtggccggcttcaacctgctgatgaccctgcggctgtggtccagccgggttaagttttccagatccgcagacgcacccgcttaccaacaagggcagaaccaactctacaatgaacttaatttggggcggagggaagagtacgacgttctggacaaaaggaggggacgagatcccgagatgggcggaaagcctcagcgaaggaagaatccgcaagaggggctttataacgaactccagaaagataaaatggcagaagcctatagtgagattgggatgaagggagaaaggaggaggggtaaaggtcacgatgggttgtaccaaggattgagcacagccactaaagatacctatgatgcgctccacatgcaggccctgccgccaaga

SEQ ID NO: 24635 - DNA, 717 bp, synthetic construct
  source 1..717: mol_type = other DNA
ctgaaggaccccagaagccaggacagcaccctgtgcctgttcaccgacttcgacagccagatcaacgtgcccaagacaatggaaagcggcaccttcatcaccgacaagtgcgtgctggacatgaaggctatggacagcaagagcaacggcgccattgcctggtccaaccagaccagcttcacatgccaggacatcttcaaagagacaaacgccacctacccctccagcgacgtgccctgtgacgccaccctgaccgagaagtccttcgagacagacatgaacctcaacttccagaacctgctggtggtgggcctgcgaatcctgctgctgaaagtggccggcttcaacctgctgatgaccctgcggctgtggtccagccgggttaagttttccagatccgcagacgcacccgcttaccaacaagggcagaaccaactctacaatgaacttaatttggggcggagggaagagtacgacgttctggacaaaaggaggggacgagatcccgagatgggcggaaagcctcagcgaaggaagaatccgcaagaggggctttataacgaactccagaaagataaaatggcagaagcctatagtgagattgggatgaagggagaaaggaggaggggtaaaggtcacgatgggttgtaccaaggattgagcacagccactaaagatacctatgatgcgctccacatgcaggccctgccgccaaga

SEQ ID NO: 24636 - DNA, 702 bp, synthetic construct
  source 1..702: mol_type = other DNA
agccaggacagcaccctgtgcctgttcaccgacttcgacagccagatcaacgtgcccaagacaatggaaagcggcaccttcatcaccgacaagtgcgtgctggacatgaaggctatggacagcaagagcaacggcgccattgcctggtccaaccagaccagcttcacatgccaggacatcttcaaagagacaaacgccacctacccctccagcgacgtgccctgtgacgccaccctgaccgagaagtccttcgagacagacatgaacctcaacttccagaacctgctggtggtgggcctgcgaatcctgctgctgaaagtggccggcttcaacctgctgatgaccctgcggctgtggtccagccgggttaagttttccagatccgcagacgcacccgcttaccaacaagggcagaaccaactctacaatgaacttaatttggggcggagggaagagtacgacgttctggacaaaaggaggggacgagatcccgagatgggcggaaagcctcagcgaaggaagaatccgcaagaggggctttataacgaactccagaaagataaaatggcagaagcctatagtgagattgggatgaagggagaaaggaggaggggtaaaggtcacgatgggttgtaccaaggattgagcacagccactaaagatacctatgatgcgctccacatgcaggccctgccgccaaga

SEQ ID NO: 24637 - DNA, 687 bp, synthetic construct
  source 1..687: mol_type = other DNA
ctgtgcctgttcaccgacttcgacagccagatcaacgtgcccaagacaatggaaagcggcaccttcatcaccgacaagtgcgtgctggacatgaaggctatggacagcaagagcaacggcgccattgcctggtccaaccagaccagcttcacatgccaggacatcttcaaagagacaaacgccacctacccctccagcgacgtgccctgtgacgccaccctgaccgagaagtccttcgagacagacatgaacctcaacttccagaacctgctggtggtgggcctgcgaatcctgctgctgaaagtggccggcttcaacctgctgatgaccctgcggctgtggtccagccgggttaagttttccagatccgcagacgcacccgcttaccaacaagggcagaaccaactctacaatgaacttaatttggggcggagggaagagtacgacgttctggacaaaaggaggggacgagatcccgagatgggcggaaagcctcagcgaaggaagaatccgcaagaggggctttataacgaactccagaaagataaaatggcagaagcctatagtgagattgggatgaagggagaaaggaggaggggtaaaggtcacgatgggttgtaccaaggattgagcacagccactaaagatacctatgatgcgctccacatgcaggccctgccgccaaga

SEQ ID NO: 24638 - DNA, 852 bp, synthetic construct
  source 1..852: mol_type = other DNA
gaggatctgcggaacgtgaccccacccaaggtgtccctgttcgagcccagcaaggccgagatcgccaataaacagaaggccaccctcgtgtgcctggccagaggcttcttccccgaccacgtggaactgtcttggtgggtcaacggcaaagaggtgcacagcggcgtctgcaccgaccctcaggcctacaaagagagcaactacagctactgcctgagcagtcggctgcgggtgtccgccaccttctggcacaacccccggaaccacttcagatgccaggtgcagttccacggcctgagcgaagaggacaagtggcccgaaggcagccctaagcctgtcacccagaacatcagcgccgaggcctggggcagagcctgtggcatcaccagcagctaccagcagggcgtgctgagcgccaccatcctgtacgagatcctgctgggcaaggccaccctgtacgccgtgctggtgtccaccctggtggtcatggctatggtcaagcggaagaacagccgggttaagttttccagatccgcagacgcacccgcttaccaacaagggcagaaccaactctacaatgaacttaatttggggcggagggaagagtacgacgttctggacaaaaggaggggacgagatcccgagatgggcggaaagcctcagcgaaggaagaatccgcaagaggggctttataacgaactccagaaagataaaatggcagaagcctatagtgagattgggatgaagggagaaaggaggaggggtaaaggtcacgatgggttgtaccaaggattgagcacagccactaaagatacctatgatgcgctccacatgcaggccctgccgccaaga

SEQ ID NO: 24639 - DNA, 849 bp, synthetic construct
  source 1..849: mol_type = other DNA
gatctgcggaacgtgaccccacccaaggtgtccctgttcgagcccagcaaggccgagatcgccaataaacagaaggccaccctcgtgtgcctggccagaggcttcttccccgaccacgtggaactgtcttggtgggtcaacggcaaagaggtgcacagcggcgtctgcaccgaccctcaggcctacaaagagagcaactacagctactgcctgagcagtcggctgcgggtgtccgccaccttctggcacaacccccggaaccacttcagatgccaggtgcagttccacggcctgagcgaagaggacaagtggcccgaaggcagccctaagcctgtcacccagaacatcagcgccgaggcctggggcagagcctgtggcatcaccagcagctaccagcagggcgtgctgagcgccaccatcctgtacgagatcctgctgggcaaggccaccctgtacgccgtgctggtgtccaccctggtggtcatggctatggtcaagcggaagaacagccgggttaagttttccagatccgcagacgcacccgcttaccaacaagggcagaaccaactctacaatgaacttaatttggggcggagggaagagtacgacgttctggacaaaaggaggggacgagatcccgagatgggcggaaagcctcagcgaaggaagaatccgcaagaggggctttataacgaactccagaaagataaaatggcagaagcctatagtgagattgggatgaagggagaaaggaggaggggtaaaggtcacgatgggttgtaccaaggattgagcacagccactaaagatacctatgatgcgctccacatgcaggccctgccgccaaga

SEQ ID NO: 24640 - DNA, 843 bp, synthetic construct
  source 1..843: mol_type = other DNA
cggaacgtgaccccacccaaggtgtccctgttcgagcccagcaaggccgagatcgccaataaacagaaggccaccctcgtgtgcctggccagaggcttcttccccgaccacgtggaactgtcttggtgggtcaacggcaaagaggtgcacagcggcgtctgcaccgaccctcaggcctacaaagagagcaactacagctactgcctgagcagtcggctgcgggtgtccgccaccttctggcacaacccccggaaccacttcagatgccaggtgcagttccacggcctgagcgaagaggacaagtggcccgaaggcagccctaagcctgtcacccagaacatcagcgccgaggcctggggcagagcctgtggcatcaccagcagctaccagcagggcgtgctgagcgccaccatcctgtacgagatcctgctgggcaaggccaccctgtacgccgtgctggtgtccaccctggtggtcatggctatggtcaagcggaagaacagccgggttaagttttccagatccgcagacgcacccgcttaccaacaagggcagaaccaactctacaatgaacttaatttggggcggagggaagagtacgacgttctggacaaaaggaggggacgagatcccgagatgggcggaaagcctcagcgaaggaagaatccgcaagaggggctttataacgaactccagaaagataaaatggcagaagcctatagtgagattgggatgaagggagaaaggaggaggggtaaaggtcacgatgggttgtaccaaggattgagcacagccactaaagatacctatgatgcgctccacatgcaggccctgccgccaaga

SEQ ID NO: 24641 - DNA, 840 bp, synthetic construct
  source 1..840: mol_type = other DNA
aacgtgaccccacccaaggtgtccctgttcgagcccagcaaggccgagatcgccaataaacagaaggccaccctcgtgtgcctggccagaggcttcttccccgaccacgtggaactgtcttggtgggtcaacggcaaagaggtgcacagcggcgtctgcaccgaccctcaggcctacaaagagagcaactacagctactgcctgagcagtcggctgcgggtgtccgccaccttctggcacaacccccggaaccacttcagatgccaggtgcagttccacggcctgagcgaagaggacaagtggcccgaaggcagccctaagcctgtcacccagaacatcagcgccgaggcctggggcagagcctgtggcatcaccagcagctaccagcagggcgtgctgagcgccaccatcctgtacgagatcctgctgggcaaggccaccctgtacgccgtgctggtgtccaccctggtggtcatggctatggtcaagcggaagaacagccgggttaagttttccagatccgcagacgcacccgcttaccaacaagggcagaaccaactctacaatgaacttaatttggggcggagggaagagtacgacgttctggacaaaaggaggggacgagatcccgagatgggcggaaagcctcagcgaaggaagaatccgcaagaggggctttataacgaactccagaaagataaaatggcagaagcctatagtgagattgggatgaagggagaaaggaggaggggtaaaggtcacgatgggttgtaccaaggattgagcacagccactaaagatacctatgatgcgctccacatgcaggccctgccgccaaga

SEQ ID NO: 24642 - DNA, 837 bp, synthetic construct
  source 1..837: mol_type = other DNA
gtgaccccacccaaggtgtccctgttcgagcccagcaaggccgagatcgccaataaacagaaggccaccctcgtgtgcctggccagaggcttcttccccgaccacgtggaactgtcttggtgggtcaacggcaaagaggtgcacagcggcgtctgcaccgaccctcaggcctacaaagagagcaactacagctactgcctgagcagtcggctgcgggtgtccgccaccttctggcacaacccccggaaccacttcagatgccaggtgcagttccacggcctgagcgaagaggacaagtggcccgaaggcagccctaagcctgtcacccagaacatcagcgccgaggcctggggcagagcctgtggcatcaccagcagctaccagcagggcgtgctgagcgccaccatcctgtacgagatcctgctgggcaaggccaccctgtacgccgtgctggtgtccaccctggtggtcatggctatggtcaagcggaagaacagccgggttaagttttccagatccgcagacgcacccgcttaccaacaagggcagaaccaactctacaatgaacttaatttggggcggagggaagagtacgacgttctggacaaaaggaggggacgagatcccgagatgggcggaaagcctcagcgaaggaagaatccgcaagaggggctttataacgaactccagaaagataaaatggcagaagcctatagtgagattgggatgaagggagaaaggaggaggggtaaaggtcacgatgggttgtaccaaggattgagcacagccactaaagatacctatgatgcgctccacatgcaggccctgccgccaaga

SEQ ID NO: 24643 - DNA, 834 bp, synthetic construct
  source 1..834: mol_type = other DNA
accccacccaaggtgtccctgttcgagcccagcaaggccgagatcgccaataaacagaaggccaccctcgtgtgcctggccagaggcttcttccccgaccacgtggaactgtcttggtgggtcaacggcaaagaggtgcacagcggcgtctgcaccgaccctcaggcctacaaagagagcaactacagctactgcctgagcagtcggctgcgggtgtccgccaccttctggcacaacccccggaaccacttcagatgccaggtgcagttccacggcctgagcgaagaggacaagtggcccgaaggcagccctaagcctgtcacccagaacatcagcgccgaggcctggggcagagcctgtggcatcaccagcagctaccagcagggcgtgctgagcgccaccatcctgtacgagatcctgctgggcaaggccaccctgtacgccgtgctggtgtccaccctggtggtcatggctatggtcaagcggaagaacagccgggttaagttttccagatccgcagacgcacccgcttaccaacaagggcagaaccaactctacaatgaacttaatttggggcggagggaagagtacgacgttctggacaaaaggaggggacgagatcccgagatgggcggaaagcctcagcgaaggaagaatccgcaagaggggctttataacgaactccagaaagataaaatggcagaagcctatagtgagattgggatgaagggagaaaggaggaggggtaaaggtcacgatgggttgtaccaaggattgagcacagccactaaagatacctatgatgcgctccacatgcaggccctgccgccaaga

SEQ ID NO: 24644 - DNA, 831 bp, synthetic construct
  source 1..831: mol_type = other DNA
ccacccaaggtgtccctgttcgagcccagcaaggccgagatcgccaataaacagaaggccaccctcgtgtgcctggccagaggcttcttccccgaccacgtggaactgtcttggtgggtcaacggcaaagaggtgcacagcggcgtctgcaccgaccctcaggcctacaaagagagcaactacagctactgcctgagcagtcggctgcgggtgtccgccaccttctggcacaacccccggaaccacttcagatgccaggtgcagttccacggcctgagcgaagaggacaagtggcccgaaggcagccctaagcctgtcacccagaacatcagcgccgaggcctggggcagagcctgtggcatcaccagcagctaccagcagggcgtgctgagcgccaccatcctgtacgagatcctgctgggcaaggccaccctgtacgccgtgctggtgtccaccctggtggtcatggctatggtcaagcggaagaacagccgggttaagttttccagatccgcagacgcacccgcttaccaacaagggcagaaccaactctacaatgaacttaatttggggcggagggaagagtacgacgttctggacaaaaggaggggacgagatcccgagatgggcggaaagcctcagcgaaggaagaatccgcaagaggggctttataacgaactccagaaagataaaatggcagaagcctatagtgagattgggatgaagggagaaaggaggaggggtaaaggtcacgatgggttgtaccaaggattgagcacagccactaaagatacctatgatgcgctccacatgcaggccctgccgccaaga

SEQ ID NO: 24645 - DNA, 828 bp, synthetic construct
  source 1..828: mol_type = other DNA
cccaaggtgtccctgttcgagcccagcaaggccgagatcgccaataaacagaaggccaccctcgtgtgcctggccagaggcttcttccccgaccacgtggaactgtcttggtgggtcaacggcaaagaggtgcacagcggcgtctgcaccgaccctcaggcctacaaagagagcaactacagctactgcctgagcagtcggctgcgggtgtccgccaccttctggcacaacccccggaaccacttcagatgccaggtgcagttccacggcctgagcgaagaggacaagtggcccgaaggcagccctaagcctgtcacccagaacatcagcgccgaggcctggggcagagcctgtggcatcaccagcagctaccagcagggcgtgctgagcgccaccatcctgtacgagatcctgctgggcaaggccaccctgtacgccgtgctggtgtccaccctggtggtcatggctatggtcaagcggaagaacagccgggttaagttttccagatccgcagacgcacccgcttaccaacaagggcagaaccaactctacaatgaacttaatttggggcggagggaagagtacgacgttctggacaaaaggaggggacgagatcccgagatgggcggaaagcctcagcgaaggaagaatccgcaagaggggctttataacgaactccagaaagataaaatggcagaagcctatagtgagattgggatgaagggagaaaggaggaggggtaaaggtcacgatgggttgtaccaaggattgagcacagccactaaagatacctatgatgcgctccacatgcaggccctgccgccaaga

SEQ ID NO: 24646 - DNA, 825 bp, synthetic construct
  source 1..825: mol_type = other DNA
aaggtgtccctgttcgagcccagcaaggccgagatcgccaataaacagaaggccaccctcgtgtgcctggccagaggcttcttccccgaccacgtggaactgtcttggtgggtcaacggcaaagaggtgcacagcggcgtctgcaccgaccctcaggcctacaaagagagcaactacagctactgcctgagcagtcggctgcgggtgtccgccaccttctggcacaacccccggaaccacttcagatgccaggtgcagttccacggcctgagcgaagaggacaagtggcccgaaggcagccctaagcctgtcacccagaacatcagcgccgaggcctggggcagagcctgtggcatcaccagcagctaccagcagggcgtgctgagcgccaccatcctgtacgagatcctgctgggcaaggccaccctgtacgccgtgctggtgtccaccctggtggtcatggctatggtcaagcggaagaacagccgggttaagttttccagatccgcagacgcacccgcttaccaacaagggcagaaccaactctacaatgaacttaatttggggcggagggaagagtacgacgttctggacaaaaggaggggacgagatcccgagatgggcggaaagcctcagcgaaggaagaatccgcaagaggggctttataacgaactccagaaagataaaatggcagaagcctatagtgagattgggatgaagggagaaaggaggaggggtaaaggtcacgatgggttgtaccaaggattgagcacagccactaaagatacctatgatgcgctccacatgcaggccctgccgccaaga

SEQ ID NO: 24647 - DNA, 822 bp, synthetic construct
  source 1..822: mol_type = other DNA
gtgtccctgttcgagcccagcaaggccgagatcgccaataaacagaaggccaccctcgtgtgcctggccagaggcttcttccccgaccacgtggaactgtcttggtgggtcaacggcaaagaggtgcacagcggcgtctgcaccgaccctcaggcctacaaagagagcaactacagctactgcctgagcagtcggctgcgggtgtccgccaccttctggcacaacccccggaaccacttcagatgccaggtgcagttccacggcctgagcgaagaggacaagtggcccgaaggcagccctaagcctgtcacccagaacatcagcgccgaggcctggggcagagcctgtggcatcaccagcagctaccagcagggcgtgctgagcgccaccatcctgtacgagatcctgctgggcaaggccaccctgtacgccgtgctggtgtccaccctggtggtcatggctatggtcaagcggaagaacagccgggttaagttttccagatccgcagacgcacccgcttaccaacaagggcagaaccaactctacaatgaacttaatttggggcggagggaagagtacgacgttctggacaaaaggaggggacgagatcccgagatgggcggaaagcctcagcgaaggaagaatccgcaagaggggctttataacgaactccagaaagataaaatggcagaagcctatagtgagattgggatgaagggagaaaggaggaggggtaaaggtcacgatgggttgtaccaaggattgagcacagccactaaagatacctatgatgcgctccacatgcaggccctgccgccaaga

SEQ ID NO: 24648 - DNA, 852 bp, synthetic construct; identical to SEQ ID NO: 24638
  source 1..852: mol_type = other DNA

SEQ ID NO: 24649 - DNA, 837 bp, synthetic construct; identical to SEQ ID NO: 24642
  source 1..837: mol_type = other DNA

SEQ ID NO: 24650 - DNA, 822 bp, synthetic construct; identical to SEQ ID NO: 24647
  source 1..822: mol_type = other DNA

SEQ ID NO: 24651 - DNA, 759 bp, synthetic construct
  source 1..759: mol_type = other DNA
atccagaaccctgatcctgccgtgtaccagctgcgggatagcaagagcagcgacaagagcgtgtgtctgttcaccgacttcgacagccagaccaacgtgtcccagagcaaggactccgacgtgtacatcaccgataagtgcgtgctggacatgcggagcatggacttcaagagcaactccgccgtggcctggtccaacaagtccgatttcgcctgcgccaacgccttcaacaacagcattatccccgaggacacattcttcccaagccccgagagcagctgcgacgtgaagctggtggaaaagagcttcgagacagacaccaacctgaacttccagaacctgctggtgatcgtgctgagaatcctgctgctgaaagtggccggctttaacctgctgatgaccctgcggctgtggtccagccgggttaagttttccagatccgcagacgcacccgcttaccaacaagggcagaaccaactctacaatgaacttaatttggggcggagggaagagtacgacgttctggacaaaaggaggggacgagatcccgagatgggcggaaagcctcagcgaaggaagaatccgcaagaggggctttataacgaactccagaaagataaaatggcagaagcctatagtgagattgggatgaagggagaaaggaggaggggtaaaggtcacgatgggttgtaccaaggattgagcacagccactaaagatacctatgatgcgctccacatgcaggccctgccgccaaga

SEQ ID NO: 24652 - DNA, 756 bp, synthetic construct
  source 1..756: mol_type = other DNA
cagaaccctgatcctgccgtgtaccagctgcgggatagcaagagcagcgacaagagcgtgtgtctgttcaccgacttcgacagccagaccaacgtgtcccagagcaaggactccgacgtgtacatcaccgataagtgcgtgctggacatgcggagcatggacttcaagagcaactccgccgtggcctggtccaacaagtccgatttcgcctgcgccaacgccttcaacaacagcattatccccgaggacacattcttcccaagccccgagagcagctgcgacgtgaagctggtggaaaagagcttcgagacagacaccaacctgaacttccagaacctgctggtgatcgtgctgagaatcctgctgctgaaagtggccggctttaacctgctgatgaccctgcggctgtggtccagccgggttaagttttccagatccgcagacgcacccgcttaccaacaagggcagaaccaactctacaatgaacttaatttggggcggagggaagagtacgacgttctggacaaaaggaggggacgagatcccgagatgggcggaaagcctcagcgaaggaagaatccgcaagaggggctttataacgaactccagaaagataaaatggcagaagcctatagtgagattgggatgaagggagaaaggaggaggggtaaaggtcacgatgggttgtaccaaggattgagcacagccactaaagatacctatgatgcgctccacatgcaggccctgccgccaaga

SEQ ID NO: 24653 - DNA, 753 bp, synthetic construct
  source 1..753: mol_type = other DNA
aaccctgatcctgccgtgtaccagctgcgggatagcaagagcagcgacaagagcgtgtgtctgttcaccgacttcgacagccagaccaacgtgtcccagagcaaggactccgacgtgtacatcaccgataagtgcgtgctggacatgcggagcatggacttcaagagcaactccgccgtggcctggtccaacaagtccgatttcgcctgcgccaacgccttcaacaacagcattatccccgaggacacattcttcccaagccccgagagcagctgcgacgtgaagctggtggaaaagagcttcgagacagacaccaacctgaacttccagaacctgctggtgatcgtgctgagaatcctgctgctgaaagtggccggctttaacctgctgatgaccctgcggctgtggtccagccgggttaagttttccagatccgcagacgcacccgcttaccaacaagggcagaaccaactctacaatgaacttaatttggggcggagggaagagtacgacgttctggacaaaaggaggggacgagatcccgagatgggcggaaagcctcagcgaaggaagaatccgcaagaggggctttataacgaactccagaaagataaaatggcagaagcctatagtgagattgggatgaagggagaaaggaggaggggtaaaggtcacgatgggttgtaccaaggattgagcacagccactaaagatacctatgatgcgctccacatgcaggccctgccgccaaga

SEQ ID NO: 24654 - DNA, 750 bp, synthetic construct
  source 1..750: mol_type = other DNA
cctgatcctgccgtgtaccagctgcgggatagcaagagcagcgacaagagcgtgtgtctgttcaccgacttcgacagccagaccaacgtgtcccagagcaaggactccgacgtgtacatcaccgataagtgcgtgctggacatgcggagcatggacttcaagagcaactccgccgtggcctggtccaacaagtccgatttcgcctgcgccaacgccttcaacaacagcattatccccgaggacacattcttcccaagccccgagagcagctgcgacgtgaagctggtggaaaagagcttcgagacagacaccaacctgaacttccagaacctgctggtgatcgtgctgagaatcctgctgctgaaagtggccggctttaacctgctgatgaccctgcggctgtggtccagccgggttaagttttccagatccgcagacgcacccgcttaccaacaagggcagaaccaactctacaatgaacttaatttggggcggagggaagagtacgacgttctggacaaaaggaggggacgagatcccgagatgggcggaaagcctcagcgaaggaagaatccgcaagaggggctttataacgaactccagaaagataaaatggcagaagcctatagtgagattgggatgaagggagaaaggaggaggggtaaaggtcacgatgggttgtaccaaggattgagcacagccactaaagatacctatgatgcgctccacatgcaggccctgccgccaaga

SEQ ID NO: 24655 - DNA, 747 bp, synthetic construct
  source 1..747: mol_type = other DNA
gatcctgccgtgtaccagctgcgggatagcaagagcagcgacaagagcgtgtgtctgttcaccgacttcgacagccagaccaacgtgtcccagagcaaggactccgacgtgtacatcaccgataagtgcgtgctggacatgcggagcatggacttcaagagcaactccgccgtggcctggtccaacaagtccgatttcgcctgcgccaacgccttcaacaacagcattatccccgaggacacattcttcccaagccccgagagcagctgcgacgtgaagctggtggaaaagagcttcgagacagacaccaacctgaacttccagaacctgctggtgatcgtgctgagaatcctgctgctgaaagtggccggctttaacctgctgatgaccctgcggctgtggtccagccgggttaagttttccagatccgcagacgcacccgcttaccaacaagggcagaaccaactctacaatgaacttaatttggggcggagggaagagtacgacgttctggacaaaaggaggggacgagatcccgagatgggcggaaagcctcagcgaaggaagaatccgcaagaggggctttataacgaactccagaaagataaaatggcagaagcctatagtgagattgggatgaagggagaaaggaggaggggtaaaggtcacgatgggttgtaccaaggattgagcacagccactaaagatacctatgatgcgctccacatgcaggccctgccgccaaga

SEQ ID NO: 24656 - DNA, 744 bp, synthetic construct
  source 1..744: mol_type = other DNA
cctgccgtgtaccagctgcgggatagcaagagcagcgacaagagcgtgtgtctgttcaccgacttcgacagccagaccaacgtgtcccagagcaaggactccgacgtgtacatcaccgataagtgcgtgctggacatgcggagcatggacttcaagagcaactccgccgtggcctggtccaacaagtccgatttcgcctgcgccaacgccttcaacaacagcattatccccgaggacacattcttcccaagccccgagagcagctgcgacgtgaagctggtggaaaagagcttcgagacagacaccaacctgaacttccagaacctgctggtgatcgtgctgagaatcctgctgctgaaagtggccggctttaacctgctgatgaccctgcggctgtggtccagccgggttaagttttccagatccgcagacgcacccgcttaccaacaagggcagaaccaactctacaatgaacttaatttggggcggagggaagagtacgacgttctggacaaaaggaggggacgagatcccgagatgggcggaaagcctcagcgaaggaagaatccgcaagaggggctttataacgaactccagaaagataaaatggcagaagcctatagtgagattgggatgaagggagaaaggaggaggggtaaaggtcacgatgggttgtaccaaggattgagcacagccactaaagatacctatgatgcgctccacatgcaggccctgccgccaaga

SEQ ID NO: 24657 - DNA, 741 bp, synthetic construct
  source 1..741: mol_type = other DNA
gccgtgtaccagctgcgggatagcaagagcagcgacaagagcgtgtgtctgttcaccgacttcgacagccagaccaacgtgtcccagagcaaggactccgacgtgtacatcaccgataagtgcgtgctggacatgcggagcatggacttcaagagcaactccgccgtggcctggtccaacaagtccgatttcgcctgcgccaacgccttcaacaacagcattatccccgaggacacattcttcccaagccccgagagcagctgcgacgtgaagctggtggaaaagagcttcgagacagacaccaacctgaacttccagaacctgctggtgatcgtgctgagaatcctgctgctgaaagtggccggctttaacctgctgatgaccctgcggctgtggtccagccgggttaagttttccagatccgcagacgcacccgcttaccaacaagggcagaaccaactctacaatgaacttaatttggggcggagggaagagtacgacgttctggacaaaaggaggggacgagatcccgagatgggcggaaagcctcagcgaaggaagaatccgcaagaggggctttataacgaactccagaaagataaaatggcagaagcctatagtgagattgggatgaagggagaaaggaggaggggtaaaggtcacgatgggttgtaccaaggattgagcacagccactaaagatacctatgatgcgctccacatgcaggccctgccgccaaga

SEQ ID NO: 24658 - DNA, 738 bp, synthetic construct
  source 1..738: mol_type = other DNA
gtgtaccagctgcgggatagcaagagcagcgacaagagcgtgtgtctgttcaccgacttcgacagccagaccaacgtgtcccagagcaaggactccgacgtgtacatcaccgataagtgcgtgctggacatgcggagcatggacttcaagagcaactccgccgtggcctggtccaacaagtccgatttcgcctgcgccaacgccttcaacaacagcattatccccgaggacacattcttcccaagccccgagagcagctgcgacgtgaagctggtggaaaagagcttcgagacagacaccaacctgaacttccagaacctgctggtgatcgtgctgagaatcctgctgctgaaagtggccggctttaacctgctgatgaccctgcggctgtggtccagccgggttaagttttccagatccgcagacgcacccgcttaccaacaagggcagaaccaactctacaatgaacttaatttggggcggagggaagagtacgacgttctggacaaaaggaggggacgagatcccgagatgggcggaaagcctcagcgaaggaagaatccgcaagaggggctttataacgaactccagaaagataaaatggcagaagcctatagtgagattgggatgaagggagaaaggaggaggggtaaaggtcacgatgggttgtaccaaggattgagcacagccactaaagatacctatgatgcgctccacatgcaggccctgccgccaaga

SEQ ID NO: 24659 - DNA, 735 bp, synthetic construct
  source 1..735: mol_type = other DNA
taccagctgcgggatagcaagagcagcgacaagagcgtgtgtctgttcaccgacttcgacagccagaccaacgtgtcccagagcaaggactccgacgtgtacatcaccgataagtgcgtgctggacatgcggagcatggacttcaagagcaactccgccgtggcctggtccaacaagtccgatttcgcctgcgccaacgccttcaacaacagcattatccccgaggacacattcttcccaagccccgagagcagctgcgacgtgaagctggtggaaaagagcttcgagacagacaccaacctgaacttccagaacctgctggtgatcgtgctgagaatcctgctgctgaaagtggccggctttaacctgctgatgaccctgcggctgtggtccagccgggttaagttttccagatccgcagacgcacccgcttaccaacaagggcagaaccaactctacaatgaacttaatttggggcggagggaagagtacgacgttctggacaaaaggaggggacgagatcccgagatgggcggaaagcctcagcgaaggaagaatccgcaagaggggctttataacgaactccagaaagataaaatggcagaagcctatagtgagattgggatgaagggagaaaggaggaggggtaaaggtcacgatgggttgtaccaaggattgagcacagccactaaagatacctatgatgcgctccacatgcaggccctgccgccaaga

SEQ ID NO: 24660 - DNA, 732 bp, synthetic construct
  source 1..732: mol_type = other DNA
cagctgcgggatagcaagagcagcgacaagagcgtgtgtctgttcaccgacttcgacagccagaccaacgtgtcccagagcaaggactccgacgtgtacatcaccgataagtgcgtgctggacatgcggagcatggacttcaagagcaactccgccgtggcctggtccaacaagtccgatttcgcctgcgccaacgccttcaacaacagcattatccccgaggacacattcttcccaagccccgagagcagctgcgacgtgaagctggtggaaaagagcttcgagacagacaccaacctgaacttccagaacctgctggtgatcgtgctgagaatcctgctgctgaaagtggccggctttaacctgctgatgaccctgcggctgtggtccagccgggttaagttttccagatccgcagacgcacccgcttaccaacaagggcagaaccaactctacaatgaacttaatttggggcggagggaagagtacgacgttctggacaaaaggaggggacgagatcccgagatgggcggaaagcctcagcgaaggaagaatccgcaagaggggctttataacgaactccagaaagataaaatggcagaagcctatagtgagattgggatgaagggagaaaggaggaggggtaaaggtcacgatgggttgtaccaaggattgagcacagccactaaagatacctatgatgcgctccacatgcaggccctgccgccaaga

SEQ ID NO: 24661 - DNA, 729 bp, synthetic construct
  source 1..729: mol_type = other DNA
ctgcgggatagcaagagcagcgacaagagcgtgtgtctgttcaccgacttcgacagccagaccaacgtgtcccagagcaaggactccgacgtgtacatcaccgataagtgcgtgctggacatgcggagcatggacttcaagagcaactccgccgtggcctggtccaacaagtccgatttcgcctgcgccaacgccttcaacaacagcattatccccgaggacacattcttcccaagccccgagagcagctgcgacgtgaagctggtggaaaagagcttcgagacagacaccaacctgaacttccagaacctgctggtgatcgtgctgagaatcctgctgctgaaagtggccggctttaacctgctgatgaccctgcggctgtggtccagccgggttaagttttccagatccgcagacgcacccgcttaccaacaagggcagaaccaactctacaatgaacttaatttggggcggagggaagagtacgacgttctggacaaaaggaggggacgagatcccgagatgggcggaaagcctcagcgaaggaagaatccgcaagaggggctttataacgaactccagaaagataaaatggcagaagcctatagtgagattgggatgaagggagaaaggaggaggggtaaaggtcacgatgggttgtaccaaggattgagcacagccactaaagatacctatgatgcgctccacatgcaggccctgccgccaaga

SEQ ID NO: 24662 - DNA, 726 bp, synthetic construct
  source 1..726: mol_type = other DNA
cgggatagcaagagcagcgacaagagcgtgtgtctgttcaccgacttcgacagccagaccaacgtgtcccagagcaaggactccgacgtgtacatcaccgataagtgcgtgctggacatgcggagcatggacttcaagagcaactccgccgtggcctggtccaacaagtccgatttcgcctgcgccaacgccttcaacaacagcattatccccgaggacacattcttcccaagccccgagagcagctgcgacgtgaagctggtggaaaagagcttcgagacagacaccaacctgaacttccagaacctgctggtgatcgtgctgagaatcctgctgctgaaagtggccggctttaacctgctgatgaccctgcggctgtggtccagccgggttaagttttccagatccgcagacgcacccgcttaccaacaagggcagaaccaactctacaatgaacttaatttggggcggagggaagagtacgacgttctggacaaaaggaggggacgagatcccgagatgggcggaaagcctcagcgaaggaagaatccgcaagaggggctttataacgaactccagaaagataaaatggcagaagcctatagtgagattgggatgaagggagaaaggaggaggggtaaaggtcacgatgggttgtaccaaggattgagcacagccactaaagatacctatgatgcgctccacatgcaggccctgccgccaaga

SEQ ID NO: 24663 - DNA, 723 bp, synthetic construct
  source 1..723: mol_type = other DNA
gatagcaagagcagcgacaagagcgtgtgtctgttcaccgacttcgacagccagaccaacgtgtcccagagcaaggactccgacgtgtacatcaccgataagtgcgtgctggacatgcggagcatggacttcaagagcaactccgccgtggcctggtccaacaagtccgatttcgcctgcgccaacgccttcaacaacagcattatccccgaggacacattcttcccaagccccgagagcagctgcgacgtgaagctggtggaaaagagcttcgagacagacaccaacctgaacttccagaacctgctggtgatcgtgctgagaatcctgctgctgaaagtggccggctttaacctgctgatgaccctgcggctgtggtccagccgggttaagttttccagatccgcagacgcacccgcttaccaacaagggcagaaccaactctacaatgaacttaatttggggcggagggaagagtacgacgttctggacaaaaggaggggacgagatcccgagatgggcggaaagcctcagcgaaggaagaatccgcaagaggggctttataacgaactccagaaagataaaatggcagaagcctatagtgagattgggatgaagggagaaaggaggaggggtaaaggtcacgatgggttgtaccaaggattgagcacagccactaaagatacctatgatgcgctccacatgcaggccctgccgccaaga

SEQ ID NO: 24664 - DNA, 720 bp, synthetic construct
  source 1..720: mol_type = other DNA
agcaagagcagcgacaagagcgtgtgtctgttcaccgacttcgacagccagaccaacgtgtcccagagcaaggactccgacgtgtacatcaccgataagtgcgtgctggacatgcggagcatggacttcaagagcaactccgccgtggcctggtccaacaagtccgatttcgcctgcgccaacgccttcaacaacagcattatccccgaggacacattcttcccaagccccgagagcagctgcgacgtgaagctggtggaaaagagcttcgagacagacaccaacctgaacttccagaacctgctggtgatcgtgctgagaatcctgctgctgaaagtggccggctttaacctgctgatgaccctgcggctgtggtccagccgggttaagttttccagatccgcagacgcacccgcttaccaacaagggcagaaccaactctacaatgaacttaatttggggcggagggaagagtacgacgttctggacaaaaggaggggacgagatcccgagatgggcggaaagcctcagcgaaggaagaatccgcaagaggggctttataacgaactccagaaagataaaatggcagaagcctatagtgagattgggatgaagggagaaaggaggaggggtaaaggtcacgatgggttgtaccaaggattgagcacagccactaaagatacctatgatgcgctccacatgcaggccctgccgccaaga

SEQ ID NO: 24665 - DNA, 717 bp, synthetic construct
  source 1..717: mol_type = other DNA
aagagcagcgacaagagcgtgtgtctgttcaccgacttcgacagccagaccaacgtgtcccagagcaaggactccgacgtgtacatcaccgataagtgcgtgctggacatgcggagcatggacttcaagagcaactccgccgtggcctggtccaacaagtccgatttcgcctgcgccaacgccttcaacaacagcattatccccgaggacacattcttcccaagccccgagagcagctgcgacgtgaagctggtggaaaagagcttcgagacagacaccaacctgaacttccagaacctgctggtgatcgtgctgagaatcctgctgctgaaagtggccggctttaacctgctgatgaccctgcggctgtggtccagccgggttaagttttccagatccgcagacgcacccgcttaccaacaagggcagaaccaactctacaatgaacttaatttggggcggagggaagagtacgacgttctggacaaaaggaggggacgagatcccgagatgggcggaaagcctcagcgaaggaagaatccgcaagaggggctttataacgaactccagaaagataaaatggcagaagcctatagtgagattgggatgaagggagaaaggaggaggggtaaaggtcacgatgggttgtaccaaggattgagcacagccactaaagatacctatgatgcgctccacatgcaggccctgccgccaaga

SEQ ID NO: 24666 - DNA, 714 bp, synthetic construct
  source 1..714: mol_type = other DNA
agcagcgacaagagcgtgtgtctgttcaccgacttcgacagccagaccaacgtgtcccagagcaaggactccgacgtgtacatcaccgataagtgcgtgctggacatgcggagcatggacttcaagagcaactccgccgtggcctggtccaacaagtccgatttcgcctgcgccaacgccttcaacaacagcattatccccgaggacacattcttcccaagccccgagagcagctgcgacgtgaagctggtggaaaagagcttcgagacagacaccaacctgaacttccagaacctgctggtgatcgtgctgagaatcctgctgctgaaagtggccggctttaacctgctgatgaccctgcggctgtggtccagccgggttaagttttccagatccgcagacgcacccgcttaccaacaagggcagaaccaactctacaatgaacttaatttggggcggagggaagagtacgacgttctggacaaaaggaggggacgagatcccgagatgggcggaaagcctcagcgaaggaagaatccgcaagaggggctttataacgaactccagaaagataaaatggcagaagcctatagtgagattgggatgaagggagaaaggaggaggggtaaaggtcacgatgggttgtaccaaggattgagcacagccactaaagatacctatgatgcgctccacatgcaggccctgccgccaaga

SEQ ID NO: 24667 - DNA, 711 bp, synthetic construct
  source 1..711: mol_type = other DNA
agcgacaagagcgtgtgtctgttcaccgacttcgacagccagaccaacgtgtcccagagcaaggactccgacgtgtacatcaccgataagtgcgtgctggacatgcggagcatggacttcaagagcaactccgccgtggcctggtccaacaagtccgatttcgcctgcgccaacgccttcaacaacagcattatccccgaggacacattcttcccaagccccgagagcagctgcgacgtgaagctggtggaaaagagcttcgagacagacaccaacctgaacttccagaacctgctggtgatcgtgctgagaatcctgctgctgaaagtggccggctttaacctgctgatgaccctgcggctgtggtccagccgggttaagttttccagatccgcagacgcacccgcttaccaacaagggcagaaccaactctacaatgaacttaatttggggcggagggaagagtacgacgttctggacaaaaggaggggacgagatcccgagatgggcggaaagcctcagcgaaggaagaatccgcaagaggggctttataacgaactccagaaagataaaatggcagaagcctatagtgagattgggatgaagggagaaaggaggaggggtaaaggtcacgatgggttgtaccaaggattgagcacagccactaaagatacctatgatgcgctccacatgcaggccctgccgccaaga

SEQ ID NO: 24668 - DNA, 708 bp, synthetic construct
  source 1..708: mol_type = other DNA
gacaagagcgtgtgtctgttcaccgacttcgacagccagaccaacgtgtcccagagcaaggactccgacgtgtacatcaccgataagtgcgtgctggacatgcggagcatggacttcaagagcaactccgccgtggcctggtccaacaagtccgatttcgcctgcgccaacgccttcaacaacagcattatccccgaggacacattcttcccaagccccgagagcagctgcgacgtgaagctggtggaaaagagcttcgagacagacaccaacctgaacttccagaacctgctggtgatcgtgctgagaatcctgctgctgaaagtggccggctttaacctgctgatgaccctgcggctgtggtccagccgggttaagttttccagatccgcagacgcacccgcttaccaacaagggcagaaccaactctacaatgaacttaatttggggcggagggaagagtacgacgttctggacaaaaggaggggacgagatcccgagatgggcggaaagcctcagcgaaggaagaatccgcaagaggggctttataacgaactccagaaagataaaatggcagaagcctatagtgagattgggatgaagggagaaaggaggaggggtaaaggtcacgatgggttgtaccaaggattgagcacagccactaaagatacctatgatgcgctccacatgcaggccctgccgccaaga

SEQ ID NO: 24669 - DNA, 705 bp, synthetic construct
  source 1..705: mol_type = other DNA
aagagcgtgtgtctgttcaccgacttcgacagccagaccaacgtgtcccagagcaaggactccgacgtgtacatcaccgataagtgcgtgctggacatgcggagcatggacttcaagagcaactccgccgtggcctggtccaacaagtccgatttcgcctgcgccaacgccttcaacaacagcattatccccgaggacacattcttcccaagccccgagagcagctgcgacgtgaagctggtggaaaagagcttcgagacagacaccaacctgaacttccagaacctgctggtgatcgtgctgagaatcctgctgctgaaagtggccggctttaacctgctgatgaccctgcggctgtggtccagccgggttaagttttccagatccgcagacgcacccgcttaccaacaagggcagaaccaactctacaatgaacttaatttggggcggagggaagagtacgacgttctggacaaaaggaggggacgagatcccgagatgggcggaaagcctcagcgaaggaagaatccgcaagaggggctttataacgaactccagaaagataaaatggcagaagcctatagtgagattgggatgaagggagaaaggaggaggggtaaaggtcacgatgggttgtaccaaggattgagcacagccactaaagatacctatgatgcgctccacatgcaggccctgccgccaaga

SEQ ID NO: 24670 - DNA, 702 bp, synthetic construct
  source 1..702: mol_type = other DNA
agcgtgtgtctgttcaccgacttcgacagccagaccaacgtgtcccagagcaaggactccgacgtgtacatcaccgataagtgcgtgctggacatgcggagcatggacttcaagagcaactccgccgtggcctggtccaacaagtccgatttcgcctgcgccaacgccttcaacaacagcattatccccgaggacacattcttcccaagccccgagagcagctgcgacgtgaagctggtggaaaagagcttcgagacagacaccaacctgaacttccagaacctgctggtgatcgtgctgagaatcctgctgctgaaagtggccggctttaacctgctgatgaccctgcggctgtggtccagccgggttaagttttccagatccgcagacgcacccgcttaccaacaagggcagaaccaactctacaatgaacttaatttggggcggagggaagagtacgacgttctggacaaaaggaggggacgagatcccgagatgggcggaaagcctcagcgaaggaagaatccgcaagaggggctttataacgaactccagaaagataaaatggcagaagcctatagtgagattgggatgaagggagaaaggaggaggggtaaaggtcacgatgggttgtaccaaggattgagcacagccactaaagatacctatgatgcgctccacatgcaggccctgccgccaaga

SEQ ID NO: 24671 - DNA, 699 bp, synthetic construct
  source 1..699: mol_type = other DNA
gtgtgtctgttcaccgacttcgacagccagaccaacgtgtcccagagcaaggactccgacgtgtacatcaccgataagtgcgtgctggacatgcggagcatggacttcaagagcaactccgccgtggcctggtccaacaagtccgatttcgcctgcgccaacgccttcaacaacagcattatccccgaggacacattcttcccaagccccgagagcagctgcgacgtgaagctggtggaaaagagcttcgagacagacaccaacctgaacttccagaacctgctggtgatcgtgctgagaatcctgctgctgaaagtggccggctttaacctgctgatgaccctgcggctgtggtccagccgggttaagttttccagatccgcagacgcacccgcttaccaacaagggcagaaccaactctacaatgaacttaatttggggcggagggaagagtacgacgttctggacaaaaggaggggacgagatcccgagatgggcggaaagcctcagcgaaggaagaatccgcaagaggggctttataacgaactccagaaagataaaatggcagaagcctatagtgagattgggatgaagggagaaaggaggaggggtaaaggtcacgatgggttgtaccaaggattgagcacagccactaaagatacctatgatgcgctccacatgcaggccctgccgccaaga

SEQ ID NO: 24672 - DNA, 696 bp, synthetic construct
  source 1..696: mol_type = other DNA
tgtctgttcaccgacttcgacagccagaccaacgtgtcccagagcaaggactccgacgtgtacatcaccgataagtgcgtgctggacatgcggagcatggacttcaagagcaactccgccgtggcctggtccaacaagtccgatttcgcctgcgccaacgccttcaacaacagcattatccccgaggacacattcttcccaagccccgagagcagctgcgacgtgaagctggtggaaaagagcttcgagacagacaccaacctgaacttccagaacctgctggtgatcgtgctgagaatcctgctgctgaaagtggccggctttaacctgctgatgaccctgcggctgtggtccagccgggttaagttttccagatccgcagacgcacccgcttaccaacaagggcagaaccaactctacaatgaacttaatttggggcggagggaagagtacgacgttctggacaaaaggaggggacgagatcccgagatgggcggaaagcctcagcgaaggaagaatccgcaagaggggctttataacgaactccagaaagataaaatggcagaagcctatagtgagattgggatgaagggagaaaggaggaggggtaaaggtcacgatgggttgtaccaaggattgagcacagccactaaagatacctatgatgcgctccacatgcaggccctgccgccaaga

SEQ ID NO: 24673 - DNA, 693 bp, synthetic construct
  source 1..693: mol_type = other DNA
ctgttcaccgacttcgacagccagaccaacgtgtcccagagcaaggactccgacgtgtacatcaccgataagtgcgtgctggacatgcggagcatggacttcaagagcaactccgccgtggcctggtccaacaagtccgatttcgcctgcgccaacgccttcaacaacagcattatccccgaggacacattcttcccaagccccgagagcagctgcgacgtgaagctggtggaaaagagcttcgagacagacaccaacctgaacttccagaacctgctggtgatcgtgctgagaatcctgctgctgaaagtggccggctttaacctgctgatgaccctgcggctgtggtccagccgggttaagttttccagatccgcagacgcacccgcttaccaacaagggcagaaccaactctacaatgaacttaatttggggcggagggaagagtacgacgttctggacaaaaggaggggacgagatcccgagatgggcggaaagcctcagcgaaggaagaatccgcaagaggggctttataacgaactccagaaagataaaatggcagaagcctatagtgagattgggatgaagggagaaaggaggaggggtaaaggtcacgatgggttgtaccaaggattgagcacagccactaaagatacctatgatgcgctccacatgcaggccctgccgccaaga

SEQ ID NO: 24674 - DNA, 690 bp, synthetic construct
  source 1..690: mol_type = other DNA
ttcaccgacttcgacagccagaccaacgtgtcccagagcaaggactccgacgtgtacatcaccgataagtgcgtgctggacatgcggagcatggacttcaagagcaactccgccgtggcctggtccaacaagtccgatttcgcctgcgccaacgccttcaacaacagcattatccccgaggacacattcttcccaagccccgagagcagctgcgacgtgaagctggtggaaaagagcttcgagacagacaccaacctgaacttccagaacctgctggtgatcgtgctgagaatcctgctgctgaaagtggccggctttaacctgctgatgaccctgcggctgtggtccagccgggttaagttttccagatccgcagacgcacccgcttaccaacaagggcagaaccaactctacaatgaacttaatttggggcggagggaagagtacgacgttctggacaaaaggaggggacgagatcccgagatgggcggaaagcctcagcgaaggaagaatccgcaagaggggctttataacgaactccagaaagataaaatggcagaagcctatagtgagattgggatgaagggagaaaggaggaggggtaaaggtcacgatgggttgtaccaaggattgagcacagccactaaagatacctatgatgcgctccacatgcaggccctgccgccaaga

SEQ ID NO: 24675 - DNA, 687 bp, synthetic construct
  source 1..687: mol_type = other DNA
accgacttcgacagccagaccaacgtgtcccagagcaaggactccgacgtgtacatcaccgataagtgcgtgctggacatgcggagcatggacttcaagagcaactccgccgtggcctggtccaacaagtccgatttcgcctgcgccaacgccttcaacaacagcattatccccgaggacacattcttcccaagccccgagagcagctgcgacgtgaagctggtggaaaagagcttcgagacagacaccaacctgaacttccagaacctgctggtgatcgtgctgagaatcctgctgctgaaagtggccggctttaacctgctgatgaccctgcggctgtggtccagccgggttaagttttccagatccgcagacgcacccgcttaccaacaagggcagaaccaactctacaatgaacttaatttggggcggagggaagagtacgacgttctggacaaaaggaggggacgagatcccgagatgggcggaaagcctcagcgaaggaagaatccgcaagaggggctttataacgaactccagaaagataaaatggcagaagcctatagtgagattgggatgaagggagaaaggaggaggggtaaaggtcacgatgggttgtaccaaggattgagcacagccactaaagatacctatgatgcgctccacatgcaggccctgccgccaaga

SEQ ID NO: 24676 - DNA, 684 bp, synthetic construct
  source 1..684: mol_type = other DNA
gacttcgacagccagaccaacgtgtcccagagcaaggactccgacgtgtacatcaccgataagtgcgtgctggacatgcggagcatggacttcaagagcaactccgccgtggcctggtccaacaagtccgatttcgcctgcgccaacgccttcaacaacagcattatccccgaggacacattcttcccaagccccgagagcagctgcgacgtgaagctggtggaaaagagcttcgagacagacaccaacctgaacttccagaacctgctggtgatcgtgctgagaatcctgctgctgaaagtggccggctttaacctgctgatgaccctgcggctgtggtccagccgggttaagttttccagatccgcagacgcacccgcttaccaacaagggcagaaccaactctacaatgaacttaatttggggcggagggaagagtacgacgttctggacaaaaggaggggacgagatcccgagatgggcggaaagcctcagcgaaggaagaatccgcaagaggggctttataacgaactccagaaagataaaatggcagaagcctatagtgagattgggatgaagggagaaaggaggaggggtaaaggtcacgatgggttgtaccaaggattgagcacagccactaaagatacctatgatgcgctccacatgcaggccctgccgccaaga

SEQ ID NO: 24677 - DNA, 681 bp, synthetic construct
  source 1..681: mol_type = other DNA
ttcgacagccagaccaacgtgtcccagagcaaggactccgacgtgtacatcaccgataagtgcgtgctggacatgcggagcatggacttcaagagcaactccgccgtggcctggtccaacaagtccgatttcgcctgcgccaacgccttcaacaacagcattatccccgaggacacattcttcccaagccccgagagcagctgcgacgtgaagctggtggaaaagagcttcgagacagacaccaacctgaacttccagaacctgctggtgatcgtgctgagaatcctgctgctgaaagtggccggctttaacctgctgatgaccctgcggctgtggtccagccgggttaagttttccagatccgcagacgcacccgcttaccaacaagggcagaaccaactctacaatgaacttaatttggggcggagggaagagtacgacgttctggacaaaaggaggggacgagatcccgagatgggcggaaagcctcagcgaaggaagaatccgcaagaggggctttataacgaactccagaaagataaaatggcagaagcctatagtgagattgggatgaagggagaaaggaggaggggtaaaggtcacgatgggttgtaccaaggattgagcacagccactaaagatacctatgatgcgctccacatgcaggccctgccgccaaga

SEQ ID NO: 24678 - DNA, 678 bp, synthetic construct
  source 1..678: mol_type = other DNA
gacagccagaccaacgtgtcccagagcaaggactccgacgtgtacatcaccgataagtgcgtgctggacatgcggagcatggacttcaagagcaactccgccgtggcctggtccaacaagtccgatttcgcctgcgccaacgccttcaacaacagcattatccccgaggacacattcttcccaagccccgagagcagctgcgacgtgaagctggtggaaaagagcttcgagacagacaccaacctgaacttccagaacctgctggtgatcgtgctgagaatcctgctgctgaaagtggccggctttaacctgctgatgaccctgcggctgtggtccagccgggttaagttttccagatccgcagacgcacccgcttaccaacaagggcagaaccaactctacaatgaacttaatttggggcggagggaagagtacgacgttctggacaaaaggaggggacgagatcccgagatgggcggaaagcctcagcgaaggaagaatccgcaagaggggctttataacgaactccagaaagataaaatggcagaagcctatagtgagattgggatgaagggagaaaggaggaggggtaaaggtcacgatgggttgtaccaaggattgagcacagccactaaagatacctatgatgcgctccacatgcaggccctgccgccaaga

SEQ ID NO: 24679 - DNA, 675 bp, synthetic construct
  source 1..675: mol_type = other DNA
agccagaccaacgtgtcccagagcaaggactccgacgtgtacatcaccgataagtgcgtgctggacatgcggagcatggacttcaagagcaactccgccgtggcctggtccaacaagtccgatttcgcctgcgccaacgccttcaacaacagcattatccccgaggacacattcttcccaagccccgagagcagctgcgacgtgaagctggtggaaaagagcttcgagacagacaccaacctgaacttccagaacctgctggtgatcgtgctgagaatcctgctgctgaaagtggccggctttaacctgctgatgaccctgcggctgtggtccagccgggttaagttttccagatccgcagacgcacccgcttaccaacaagggcagaaccaactctacaatgaacttaatttggggcggagggaagagtacgacgttctggacaaaaggaggggacgagatcccgagatgggcggaaagcctcagcgaaggaagaatccgcaagaggggctttataacgaactccagaaagataaaatggcagaagcctatagtgagattgggatgaagggagaaaggaggaggggtaaaggtcacgatgggttgtaccaaggattgagcacagccactaaagatacctatgatgcgctccacatgcaggccctgccgccaaga

SEQ ID NO: 24680 - DNA, 672 bp, synthetic construct
  source 1..672: mol_type = other DNA
cagaccaacgtgtcccagagcaaggactccgacgtgtacatcaccgataagtgcgtgctggacatgcggagcatggacttcaagagcaactccgccgtggcctggtccaacaagtccgatttcgcctgcgccaacgccttcaacaacagcattatccccgaggacacattcttcccaagccccgagagcagctgcgacgtgaagctggtggaaaagagcttcgagacagacaccaacctgaacttccagaacctgctggtgatcgtgctgagaatcctgctgctgaaagtggccggctttaacctgctgatgaccctgcggctgtggtccagccgggttaagttttccagatccgcagacgcacccgcttaccaacaagggcagaaccaactctacaatgaacttaatttggggcggagggaagagtacgacgttctggacaaaaggaggggacgagatcccgagatgggcggaaagcctcagcgaaggaagaatccgcaagaggggctttataacgaactccagaaagataaaatggcagaagcctatagtgagattgggatgaagggagaaaggaggaggggtaaaggtcacgatgggttgtaccaaggattgagcacagccactaaagatacctatgatgcgctccacatgcaggccctgccgccaaga

SEQ ID NO: 24681 - DNA, 669 bp, synthetic construct
  source 1..669: mol_type = other DNA
accaacgtgtcccagagcaaggactccgacgtgtacatcaccgataagtgcgtgctggacatgcggagcatggacttcaagagcaactccgccgtggcctggtccaacaagtccgatttcgcctgcgccaacgccttcaacaacagcattatccccgaggacacattcttcccaagccccgagagcagctgcgacgtgaagctggtggaaaagagcttcgagacagacaccaacctgaacttccagaacctgctggtgatcgtgctgagaatcctgctgctgaaagtggccggctttaacctgctgatgaccctgcggctgtggtccagccgggttaagttttccagatccgcagacgcacccgcttaccaacaagggcagaaccaactctacaatgaacttaatttggggcggagggaagagtacgacgttctggacaaaaggaggggacgagatcccgagatgggcggaaagcctcagcgaaggaagaatccgcaagaggggctttataacgaactccagaaagataaaatggcagaagcctatagtgagattgggatgaagggagaaaggaggaggggtaaaggtcacgatgggttgtaccaaggattgagcacagccactaaagatacctatgatgcgctccacatgcaggccctgccgccaaga

SEQ ID NO: 24682 - DNA, 666 bp, synthetic construct
  source 1..666: mol_type = other DNA
aacgtgtcccagagcaaggactccgacgtgtacatcaccgataagtgcgtgctggacatgcggagcatggacttcaagagcaactccgccgtggcctggtccaacaagtccgatttcgcctgcgccaacgccttcaacaacagcattatccccgaggacacattcttcccaagccccgagagcagctgcgacgtgaagctggtggaaaagagcttcgagacagacaccaacctgaacttccagaacctgctggtgatcgtgctgagaatcctgctgctgaaagtggccggctttaacctgctgatgaccctgcggctgtggtccagccgggttaagttttccagatccgcagacgcacccgcttaccaacaagggcagaaccaactctacaatgaacttaatttggggcggagggaagagtacgacgttctggacaaaaggaggggacgagatcccgagatgggcggaaagcctcagcgaaggaagaatccgcaagaggggctttataacgaactccagaaagataaaatggcagaagcctatagtgagattgggatgaagggagaaaggaggaggggtaaaggtcacgatgggttgtaccaaggattgagcacagccactaaagatacctatgatgcgctccacatgcaggccctgccgccaaga

SEQ ID NO: 24683 - DNA, 663 bp, synthetic construct
  source 1..663: mol_type = other DNA
gtgtcccagagcaaggactccgacgtgtacatcaccgataagtgcgtgctggacatgcggagcatggacttcaagagcaactccgccgtggcctggtccaacaagtccgatttcgcctgcgccaacgccttcaacaacagcattatccccgaggacacattcttcccaagccccgagagcagctgcgacgtgaagctggtggaaaagagcttcgagacagacaccaacctgaacttccagaacctgctggtgatcgtgctgagaatcctgctgctgaaagtggccggctttaacctgctgatgaccctgcggctgtggtccagccgggttaagttttccagatccgcagacgcacccgcttaccaacaagggcagaaccaactctacaatgaacttaatttggggcggagggaagagtacgacgttctggacaaaaggaggggacgagatcccgagatgggcggaaagcctcagcgaaggaagaatccgcaagaggggctttataacgaactccagaaagataaaatggcagaagcctatagtgagattgggatgaagggagaaaggaggaggggtaaaggtcacgatgggttgtaccaaggattgagcacagccactaaagatacctatgatgcgctccacatgcaggccctgccgccaaga

SEQ ID NO: 24684 - DNA, 660 bp, synthetic construct
  source 1..660: mol_type = other DNA
tcccagagcaaggactccgacgtgtacatcaccgataagtgcgtgctggacatgcggagcatggacttcaagagcaactccgccgtggcctggtccaacaagtccgatttcgcctgcgccaacgccttcaacaacagcattatccccgaggacacattcttcccaagccccgagagcagctgcgacgtgaagctggtggaaaagagcttcgagacagacaccaacctgaacttccagaacctgctggtgatcgtgctgagaatcctgctgctgaaagtggccggctttaacctgctgatgaccctgcggctgtggtccagccgggttaagttttccagatccgcagacgcacccgcttaccaacaagggcagaaccaactctacaatgaacttaatttggggcggagggaagagtacgacgttctggacaaaaggaggggacgagatcccgagatgggcggaaagcctcagcgaaggaagaatccgcaagaggggctttataacgaactccagaaagataaaatggcagaagcctatagtgagattgggatgaagggagaaaggaggaggggtaaaggtcacgatgggttgtaccaaggattgagcacagccactaaagatacctatgatgcgctccacatgcaggccctgccgccaaga

SEQ ID NO: 24685 - DNA, 657 bp, synthetic construct
  source 1..657: mol_type = other DNA
cagagcaaggactccgacgtgtacatcaccgataagtgcgtgctggacatgcggagcatggacttcaagagcaactccgccgtggcctggtccaacaagtccgatttcgcctgcgccaacgccttcaacaacagcattatccccgaggacacattcttcccaagccccgagagcagctgcgacgtgaagctggtggaaaagagcttcgagacagacaccaacctgaacttccagaacctgctggtgatcgtgctgagaatcctgctgctgaaagtggccggctttaacctgctgatgaccctgcggctgtggtccagccgggttaagttttccagatccgcagacgcacccgcttaccaacaagggcagaaccaactctacaatgaacttaatttggggcggagggaagagtacgacgttctggacaaaaggaggggacgagatcccgagatgggcggaaagcctcagcgaaggaagaatccgcaagaggggctttataacgaactccagaaagataaaatggcagaagcctatagtgagattgggatgaagggagaaaggaggaggggtaaaggtcacgatgggttgtaccaaggattgagcacagccactaaagatacctatgatgcgctccacatgcaggccctgccgccaaga

SEQ ID NO: 24686 - DNA, 654 bp, synthetic construct
  source 1..654: mol_type = other DNA
agcaaggactccgacgtgtacatcaccgataagtgcgtgctggacatgcggagcatggacttcaagagcaactccgccgtggcctggtccaacaagtccgatttcgcctgcgccaacgccttcaacaacagcattatccccgaggacacattcttcccaagccccgagagcagctgcgacgtgaagctggtggaaaagagcttcgagacagacaccaacctgaacttccagaacctgctggtgatcgtgctgagaatcctgctgctgaaagtggccggctttaacctgctgatgaccctgcggctgtggtccagccgggttaagttttccagatccgcagacgcacccgcttaccaacaagggcagaaccaactctacaatgaacttaatttggggcggagggaagagtacgacgttctggacaaaaggaggggacgagatcccgagatgggcggaaagcctcagcgaaggaagaatccgcaagaggggctttataacgaactccagaaagataaaatggcagaagcctatagtgagattgggatgaagggagaaaggaggaggggtaaaggtcacgatgggttgtaccaaggattgagcacagccactaaagatacctatgatgcgctccacatgcaggccctgccgccaaga

SEQ ID NO: 24687 - DNA, 651 bp, synthetic construct
  source 1..651: mol_type = other DNA
aaggactccgacgtgtacatcaccgataagtgcgtgctggacatgcggagcatggacttcaagagcaactccgccgtggcctggtccaacaagtccgatttcgcctgcgccaacgccttcaacaacagcattatccccgaggacacattcttcccaagccccgagagcagctgcgacgtgaagctggtggaaaagagcttcgagacagacaccaacctgaacttccagaacctgctggtgatcgtgctgagaatcctgctgctgaaagtggccggctttaacctgctgatgaccctgcggctgtggtccagccgggttaagttttccagatccgcagacgcacccgcttaccaacaagggcagaaccaactctacaatgaacttaatttggggcggagggaagagtacgacgttctggacaaaaggaggggacgagatcccgagatgggcggaaagcctcagcgaaggaagaatccgcaagaggggctttataacgaactccagaaagataaaatggcagaagcctatagtgagattgggatgaagggagaaaggaggaggggtaaaggtcacgatgggttgtaccaaggattgagcacagccactaaagatacctatgatgcgctccacatgcaggccctgccgccaaga

SEQ ID NO: 24688 - DNA, 648 bp, synthetic construct
  source 1..648: mol_type = other DNA
gactccgacgtgtacatcaccgataagtgcgtgctggacatgcggagcatggacttcaagagcaactccgccgtggcctggtccaacaagtccgatttcgcctgcgccaacgccttcaacaacagcattatccccgaggacacattcttcccaagccccgagagcagctgcgacgtgaagctggtggaaaagagcttcgagacagacaccaacctgaacttccagaacctgctggtgatcgtgctgagaatcctgctgctgaaagtggccggctttaacctgctgatgaccctgcggctgtggtccagccgggttaagttttccagatccgcagacgcacccgcttaccaacaagggcagaaccaactctacaatgaacttaatttggggcggagggaagagtacgacgttctggacaaaaggaggggacgagatcccgagatgggcggaaagcctcagcgaaggaagaatccgcaagaggggctttataacgaactccagaaagataaaatggcagaagcctatagtgagattgggatgaagggagaaaggaggaggggtaaaggtcacgatgggttgtaccaaggattgagcacagccactaaagatacctatgatgcgctccacatgcaggccctgccgccaaga

SEQ ID NO: 24689 - DNA, 645 bp, synthetic construct
  source 1..645: mol_type = other DNA
tccgacgtgtacatcaccgataagtgcgtgctggacatgcggagcatggacttcaagagcaactccgccgtggcctggtccaacaagtccgatttcgcctgcgccaacgccttcaacaacagcattatccccgaggacacattcttcccaagccccgagagcagctgcgacgtgaagctggtggaaaagagcttcgagacagacaccaacctgaacttccagaacctgctggtgatcgtgctgagaatcctgctgctgaaagtggccggctttaacctgctgatgaccctgcggctgtggtccagccgggttaagttttccagatccgcagacgcacccgcttaccaacaagggcagaaccaactctacaatgaacttaatttggggcggagggaagagtacgacgttctggacaaaaggaggggacgagatcccgagatgggcggaaagcctcagcgaaggaagaatccgcaagaggggctttataacgaactccagaaagataaaatggcagaagcctatagtgagattgggatgaagggagaaaggaggaggggtaaaggtcacgatgggttgtaccaaggattgagcacagccactaaagatacctatgatgcgctccacatgcaggccctgccgccaaga

SEQ ID NO: 24690 - DNA, 642 bp, synthetic construct
  source 1..642: mol_type = other DNA
gacgtgtacatcaccgataagtgcgtgctggacatgcggagcatggacttcaagagcaactccgccgtggcctggtccaacaagtccgatttcgcctgcgccaacgccttcaacaacagcattatccccgaggacacattcttcccaagccccgagagcagctgcgacgtgaagctggtggaaaagagcttcgagacagacaccaacctgaacttccagaacctgctggtgatcgtgctgagaatcctgctgctgaaagtggccggctttaacctgctgatgaccctgcggctgtggtccagccgggttaagttttccagatccgcagacgcacccgcttaccaacaagggcagaaccaactctacaatgaacttaatttggggcggagggaagagtacgacgttctggacaaaaggaggggacgagatcccgagatgggcggaaagcctcagcgaaggaagaatccgcaagaggggctttataacgaactccagaaagataaaatggcagaagcctatagtgagattgggatgaagggagaaaggaggaggggtaaaggtcacgatgggttgtaccaaggattgagcacagccactaaagatacctatgatgcgctccacatgcaggccctgccgccaaga

SEQ ID NO: 24691 - DNA, 639 bp, synthetic construct
  source 1..639: mol_type = other DNA
gtgtacatcaccgataagtgcgtgctggacatgcggagcatggacttcaagagcaactccgccgtggcctggtccaacaagtccgatttcgcctgcgccaacgccttcaacaacagcattatccccgaggacacattcttcccaagccccgagagcagctgcgacgtgaagctggtggaaaagagcttcgagacagacaccaacctgaacttccagaacctgctggtgatcgtgctgagaatcctgctgctgaaagtggccggctttaacctgctgatgaccctgcggctgtggtccagccgggttaagttttccagatccgcagacgcacccgcttaccaacaagggcagaaccaactctacaatgaacttaatttggggcggagggaagagtacgacgttctggacaaaaggaggggacgagatcccgagatgggcggaaagcctcagcgaaggaagaatccgcaagaggggctttataacgaactccagaaagataaaatggcagaagcctatagtgagattgggatgaagggagaaaggaggaggggtaaaggtcacgatgggttgtaccaaggattgagcacagccactaaagatacctatgatgcgctccacatgcaggccctgccgccaaga

SEQ ID NO: 24692 - DNA, 636 bp, synthetic construct
  source 1..636: mol_type = other DNA
tacatcaccgataagtgcgtgctggacatgcggagcatggacttcaagagcaactccgccgtggcctggtccaacaagtccgatttcgcctgcgccaacgccttcaacaacagcattatccccgaggacacattcttcccaagccccgagagcagctgcgacgtgaagctggtggaaaagagcttcgagacagacaccaacctgaacttccagaacctgctggtgatcgtgctgagaatcctgctgctgaaagtggccggctttaacctgctgatgaccctgcggctgtggtccagccgggttaagttttccagatccgcagacgcacccgcttaccaacaagggcagaaccaactctacaatgaacttaatttggggcggagggaagagtacgacgttctggacaaaaggaggggacgagatcccgagatgggcggaaagcctcagcgaaggaagaatccgcaagaggggctttataacgaactccagaaagataaaatggcagaagcctatagtgagattgggatgaagggagaaaggaggaggggtaaaggtcacgatgggttgtaccaaggattgagcacagccactaaagatacctatgatgcgctccacatgcaggccctgccgccaaga

SEQ ID NO: 24693 - DNA, 633 bp, synthetic construct
  source 1..633: mol_type = other DNA
atcaccgataagtgcgtgctggacatgcggagcatggacttcaagagcaactccgccgtggcctggtccaacaagtccgatttcgcctgcgccaacgccttcaacaacagcattatccccgaggacacattcttcccaagccccgagagcagctgcgacgtgaagctggtggaaaagagcttcgagacagacaccaacctgaacttccagaacctgctggtgatcgtgctgagaatcctgctgctgaaagtggccggctttaacctgctgatgaccctgcggctgtggtccagccgggttaagttttccagatccgcagacgcacccgcttaccaacaagggcagaaccaactctacaatgaacttaatttggggcggagggaagagtacgacgttctggacaaaaggaggggacgagatcccgagatgggcggaaagcctcagcgaaggaagaatccgcaagaggggctttataacgaactccagaaagataaaatggcagaagcctatagtgagattgggatgaagggagaaaggaggaggggtaaaggtcacgatgggttgtaccaaggattgagcacagccactaaagatacctatgatgcgctccacatgcaggccctgccgccaaga

SEQ ID NO: 24694 - DNA, 630 bp, synthetic construct
  source 1..630: mol_type = other DNA
accgataagtgcgtgctggacatgcggagcatggacttcaagagcaactccgccgtggcctggtccaacaagtccgatttcgcctgcgccaacgccttcaacaacagcattatccccgaggacacattcttcccaagccccgagagcagctgcgacgtgaagctggtggaaaagagcttcgagacagacaccaacctgaacttccagaacctgctggtgatcgtgctgagaatcctgctgctgaaagtggccggctttaacctgctgatgaccctgcggctgtggtccagccgggttaagttttccagatccgcagacgcacccgcttaccaacaagggcagaaccaactctacaatgaacttaatttggggcggagggaagagtacgacgttctggacaaaaggaggggacgagatcccgagatgggcggaaagcctcagcgaaggaagaatccgcaagaggggctttataacgaactccagaaagataaaatggcagaagcctatagtgagattgggatgaagggagaaaggaggaggggtaaaggtcacgatgggttgtaccaaggattgagcacagccactaaagatacctatgatgcgctccacatgcaggccctgccgccaaga

SEQ ID NO: 24695 - DNA, 627 bp, synthetic construct
  source 1..627: mol_type = other DNA
gataagtgcgtgctggacatgcggagcatggacttcaagagcaactccgccgtggcctggtccaacaagtccgatttcgcctgcgccaacgccttcaacaacagcattatccccgaggacacattcttcccaagccccgagagcagctgcgacgtgaagctggtggaaaagagcttcgagacagacaccaacctgaacttccagaacctgctggtgatcgtgctgagaatcctgctgctgaaagtggccggctttaacctgctgatgaccctgcggctgtggtccagccgggttaagttttccagatccgcagacgcacccgcttaccaacaagggcagaaccaactctacaatgaacttaatttggggcggagggaagagtacgacgttctggacaaaaggaggggacgagatcccgagatgggcggaaagcctcagcgaaggaagaatccgcaagaggggctttataacgaactccagaaagataaaatggcagaagcctatagtgagattgggatgaagggagaaaggaggaggggtaaaggtcacgatgggttgtaccaaggattgagcacagccactaaagatacctatgatgcgctccacatgcaggccctgccgccaaga

SEQ ID NO: 24696 - DNA, 621 bp, synthetic construct
  source 1..621: mol_type = other DNA
tgcgtgctggacatgcggagcatggacttcaagagcaactccgccgtggcctggtccaacaagtccgatttcgcctgcgccaacgccttcaacaacagcattatccccgaggacacattcttcccaagccccgagagcagctgcgacgtgaagctggtggaaaagagcttcgagacagacaccaacctgaacttccagaacctgctggtgatcgtgctgagaatcctgctgctgaaagtggccggctttaacctgctgatgaccctgcggctgtggtccagccgggttaagttttccagatccgcagacgcacccgcttaccaacaagggcagaaccaactctacaatgaacttaatttggggcggagggaagagtacgacgttctggacaaaaggaggggacgagatcccgagatgggcggaaagcctcagcgaaggaagaatccgcaagaggggctttataacgaactccagaaagataaaatggcagaagcctatagtgagattgggatgaagggagaaaggaggaggggtaaaggtcacgatgggttgtaccaaggattgagcacagccactaaagatacctatgatgcgctccacatgcaggccctgccgccaaga

SEQ ID NO: 24697 - DNA, 618 bp, synthetic construct
  source 1..618: mol_type = other DNA
gtgctggacatgcggagcatggacttcaagagcaactccgccgtggcctggtccaacaagtccgatttcgcctgcgccaacgccttcaacaacagcattatccccgaggacacattcttcccaagccccgagagcagctgcgacgtgaagctggtggaaaagagcttcgagacagacaccaacctgaacttccagaacctgctggtgatcgtgctgagaatcctgctgctgaaagtggccggctttaacctgctgatgaccctgcggctgtggtccagccgggttaagttttccagatccgcagacgcacccgcttaccaacaagggcagaaccaactctacaatgaacttaatttggggcggagggaagagtacgacgttctggacaaaaggaggggacgagatcccgagatgggcggaaagcctcagcgaaggaagaatccgcaagaggggctttataacgaactccagaaagataaaatggcagaagcctatagtgagattgggatgaagggagaaaggaggaggggtaaaggtcacgatgggttgtaccaaggattgagcacagccactaaagatacctatgatgcgctccacatgcaggccctgccgccaaga

SEQ ID NO: 24698 - DNA, 615 bp, synthetic construct
  source 1..615: mol_type = other DNA
ctggacatgcggagcatggacttcaagagcaactccgccgtggcctggtccaacaagtccgatttcgcctgcgccaacgccttcaacaacagcattatccccgaggacacattcttcccaagccccgagagcagctgcgacgtgaagctggtggaaaagagcttcgagacagacaccaacctgaacttccagaacctgctggtgatcgtgctgagaatcctgctgctgaaagtggccggctttaacctgctgatgaccctgcggctgtggtccagccgggttaagttttccagatccgcagacgcacccgcttaccaacaagggcagaaccaactctacaatgaacttaatttggggcggagggaagagtacgacgttctggacaaaaggaggggacgagatcccgagatgggcggaaagcctcagcgaaggaagaatccgcaagaggggctttataacgaactccagaaagataaaatggcagaagcctatagtgagattgggatgaagggagaaaggaggaggggtaaaggtcacgatgggttgtaccaaggattgagcacagccactaaagatacctatgatgcgctccacatgcaggccctgccgccaaga

SEQ ID NO: 24699 - DNA, 612 bp, synthetic construct
  source 1..612: mol_type = other DNA
gacatgcggagcatggacttcaagagcaactccgccgtggcctggtccaacaagtccgatttcgcctgcgccaacgccttcaacaacagcattatccccgaggacacattcttcccaagccccgagagcagctgcgacgtgaagctggtggaaaagagcttcgagacagacaccaacctgaacttccagaacctgctggtgatcgtgctgagaatcctgctgctgaaagtggccggctttaacctgctgatgaccctgcggctgtggtccagccgggttaagttttccagatccgcagacgcacccgcttaccaacaagggcagaaccaactctacaatgaacttaatttggggcggagggaagagtacgacgttctggacaaaaggaggggacgagatcccgagatgggcggaaagcctcagcgaaggaagaatccgcaagaggggctttataacgaactccagaaagataaaatggcagaagcctatagtgagattgggatgaagggagaaaggaggaggggtaaaggtcacgatgggttgtaccaaggattgagcacagccactaaagatacctatgatgcgctccacatgcaggccctgccgccaaga

SEQ ID NO: 24700 - DNA, 609 bp, synthetic construct
  source 1..609: mol_type = other DNA
atgcggagcatggacttcaagagcaactccgccgtggcctggtccaacaagtccgatttcgcctgcgccaacgccttcaacaacagcattatccccgaggacacattcttcccaagccccgagagcagctgcgacgtgaagctggtggaaaagagcttcgagacagacaccaacctgaacttccagaacctgctggtgatcgtgctgagaatcctgctgctgaaagtggccggctttaacctgctgatgaccctgcggctgtggtccagccgggttaagttttccagatccgcagacgcacccgcttaccaacaagggcagaaccaactctacaatgaacttaatttggggcggagggaagagtacgacgttctggacaaaaggaggggacgagatcccgagatgggcggaaagcctcagcgaaggaagaatccgcaagaggggctttataacgaactccagaaagataaaatggcagaagcctatagtgagattgggatgaagggagaaaggaggaggggtaaaggtcacgatgggttgtaccaaggattgagcacagccactaaagatacctatgatgcgctccacatgcaggccctgccgccaaga

SEQ ID NO: 24701 - DNA, 606 bp, synthetic construct
  source 1..606: mol_type = other DNA
cggagcatggacttcaagagcaactccgccgtggcctggtccaacaagtccgatttcgcctgcgccaacgccttcaacaacagcattatccccgaggacacattcttcccaagccccgagagcagctgcgacgtgaagctggtggaaaagagcttcgagacagacaccaacctgaacttccagaacctgctggtgatcgtgctgagaatcctgctgctgaaagtggccggctttaacctgctgatgaccctgcggctgtggtccagccgggttaagttttccagatccgcagacgcacccgcttaccaacaagggcagaaccaactctacaatgaacttaatttggggcggagggaagagtacgacgttctggacaaaaggaggggacgagatcccgagatgggcggaaagcctcagcgaaggaagaatccgcaagaggggctttataacgaactccagaaagataaaatggcagaagcctatagtgagattgggatgaagggagaaaggaggaggggtaaaggtcacgatgggttgtaccaaggattgagcacagccactaaagatacctatgatgcgctccacatgcaggccctgccgccaaga

SEQ ID NO: 24702 - DNA, 603 bp, synthetic construct
  source 1..603: mol_type = other DNA
agcatggacttcaagagcaactccgccgtggcctggtccaacaagtccgatttcgcctgcgccaacgccttcaacaacagcattatccccgaggacacattcttcccaagccccgagagcagctgcgacgtgaagctggtggaaaagagcttcgagacagacaccaacctgaacttccagaacctgctggtgatcgtgctgagaatcctgctgctgaaagtggccggctttaacctgctgatgaccctgcggctgtggtccagccgggttaagttttccagatccgcagacgcacccgcttaccaacaagggcagaaccaactctacaatgaacttaatttggggcggagggaagagtacgacgttctggacaaaaggaggggacgagatcccgagatgggcggaaagcctcagcgaaggaagaatccgcaagaggggctttataacgaactccagaaagataaaatggcagaagcctatagtgagattgggatgaagggagaaaggaggaggggtaaaggtcacgatgggttgtaccaaggattgagcacagccactaaagatacctatgatgcgctccacatgcaggccctgccgccaaga

SEQ ID NO: 24703 - DNA, 600 bp, synthetic construct
  source 1..600: mol_type = other DNA
atggacttcaagagcaactccgccgtggcctggtccaacaagtccgatttcgcctgcgccaacgccttcaacaacagcattatccccgaggacacattcttcccaagccccgagagcagctgcgacgtgaagctggtggaaaagagcttcgagacagacaccaacctgaacttccagaacctgctggtgatcgtgctgagaatcctgctgctgaaagtggccggctttaacctgctgatgaccctgcggctgtggtccagccgggttaagttttccagatccgcagacgcacccgcttaccaacaagggcagaaccaactctacaatgaacttaatttggggcggagggaagagtacgacgttctggacaaaaggaggggacgagatcccgagatgggcggaaagcctcagcgaaggaagaatccgcaagaggggctttataacgaactccagaaagataaaatggcagaagcctatagtgagattgggatgaagggagaaaggaggaggggtaaaggtcacgatgggttgtaccaaggattgagcacagccactaaagatacctatgatgcgctccacatgcaggccctgccgccaaga

SEQ ID NO: 24704 - DNA, 597 bp, synthetic construct
  source 1..597: mol_type = other DNA
gacttcaagagcaactccgccgtggcctggtccaacaagtccgatttcgcctgcgccaacgccttcaacaacagcattatccccgaggacacattcttcccaagccccgagagcagctgcgacgtgaagctggtggaaaagagcttcgagacagacaccaacctgaacttccagaacctgctggtgatcgtgctgagaatcctgctgctgaaagtggccggctttaacctgctgatgaccctgcggctgtggtccagccgggttaagttttccagatccgcagacgcacccgcttaccaacaagggcagaaccaactctacaatgaacttaatttggggcggagggaagagtacgacgttctggacaaaaggaggggacgagatcccgagatgggcggaaagcctcagcgaaggaagaatccgcaagaggggctttataacgaactccagaaagataaaatggcagaagcctatagtgagattgggatgaagggagaaaggaggaggggtaaaggtcacgatgggttgtaccaaggattgagcacagccactaaagatacctatgatgcgctccacatgcaggccctgccgccaaga

SEQ ID NO: 24705 - DNA, 594 bp, synthetic construct
  source 1..594: mol_type = other DNA
ttcaagagcaactccgccgtggcctggtccaacaagtccgatttcgcctgcgccaacgccttcaacaacagcattatccccgaggacacattcttcccaagccccgagagcagctgcgacgtgaagctggtggaaaagagcttcgagacagacaccaacctgaacttccagaacctgctggtgatcgtgctgagaatcctgctgctgaaagtggccggctttaacctgctgatgaccctgcggctgtggtccagccgggttaagttttccagatccgcagacgcacccgcttaccaacaagggcagaaccaactctacaatgaacttaatttggggcggagggaagagtacgacgttctggacaaaaggaggggacgagatcccgagatgggcggaaagcctcagcgaaggaagaatccgcaagaggggctttataacgaactccagaaagataaaatggcagaagcctatagtgagattgggatgaagggagaaaggaggaggggtaaaggtcacgatgggttgtaccaaggattgagcacagccactaaagatacctatgatgcgctccacatgcaggccctgccgccaaga

SEQ ID NO: 24706 - DNA, 591 bp, synthetic construct
  source 1..591: mol_type = other DNA
aagagcaactccgccgtggcctggtccaacaagtccgatttcgcctgcgccaacgccttcaacaacagcattatccccgaggacacattcttcccaagccccgagagcagctgcgacgtgaagctggtggaaaagagcttcgagacagacaccaacctgaacttccagaacctgctggtgatcgtgctgagaatcctgctgctgaaagtggccggctttaacctgctgatgaccctgcggctgtggtccagccgggttaagttttccagatccgcagacgcacccgcttaccaacaagggcagaaccaactctacaatgaacttaatttggggcggagggaagagtacgacgttctggacaaaaggaggggacgagatcccgagatgggcggaaagcctcagcgaaggaagaatccgcaagaggggctttataacgaactccagaaagataaaatggcagaagcctatagtgagattgggatgaagggagaaaggaggaggggtaaaggtcacgatgggttgtaccaaggattgagcacagccactaaagatacctatgatgcgctccacatgcaggccctgccgccaaga

SEQ ID NO: 24707 - DNA, 588 bp, synthetic construct
  source 1..588: mol_type = other DNA
agcaactccgccgtggcctggtccaacaagtccgatttcgcctgcgccaacgccttcaacaacagcattatccccgaggacacattcttcccaagccccgagagcagctgcgacgtgaagctggtggaaaagagcttcgagacagacaccaacctgaacttccagaacctgctggtgatcgtgctgagaatcctgctgctgaaagtggccggctttaacctgctgatgaccctgcggctgtggtccagccgggttaagttttccagatccgcagacgcacccgcttaccaacaagggcagaaccaactctacaatgaacttaatttggggcggagggaagagtacgacgttctggacaaaaggaggggacgagatcccgagatgggcggaaagcctcagcgaaggaagaatccgcaagaggggctttataacgaactccagaaagataaaatggcagaagcctatagtgagattgggatgaagggagaaaggaggaggggtaaaggtcacgatgggttgtaccaaggattgagcacagccactaaagatacctatgatgcgctccacatgcaggccctgccgccaaga

SEQ ID NO: 24708 - DNA, 585 bp, synthetic construct
  source 1..585: mol_type = other DNA
aactccgccgtggcctggtccaacaagtccgatttcgcctgcgccaacgccttcaacaacagcattatccccgaggacacattcttcccaagccccgagagcagctgcgacgtgaagctggtggaaaagagcttcgagacagacaccaacctgaacttccagaacctgctggtgatcgtgctgagaatcctgctgctgaaagtggccggctttaacctgctgatgaccctgcggctgtggtccagccgggttaagttttccagatccgcagacgcacccgcttaccaacaagggcagaaccaactctacaatgaacttaatttggggcggagggaagagtacgacgttctggacaaaaggaggggacgagatcccgagatgggcggaaagcctcagcgaaggaagaatccgcaagaggggctttataacgaactccagaaagataaaatggcagaagcctatagtgagattgggatgaagggagaaaggaggaggggtaaaggtcacgatgggttgtaccaaggattgagcacagccactaaagatacctatgatgcgctccacatgcaggccctgccgccaaga

SEQ ID NO: 24709 - DNA, 582 bp, synthetic construct
  source 1..582: mol_type = other DNA
tccgccgtggcctggtccaacaagtccgatttcgcctgcgccaacgccttcaacaacagcattatccccgaggacacattcttcccaagccccgagagcagctgcgacgtgaagctggtggaaaagagcttcgagacagacaccaacctgaacttccagaacctgctggtgatcgtgctgagaatcctgctgctgaaagtggccggctttaacctgctgatgaccctgcggctgtggtccagccgggttaagttttccagatccgcagacgcacccgcttaccaacaagggcagaaccaactctacaatgaacttaatttggggcggagggaagagtacgacgttctggacaaaaggaggggacgagatcccgagatgggcggaaagcctcagcgaaggaagaatccgcaagaggggctttataacgaactccagaaagataaaatggcagaagcctatagtgagattgggatgaagggagaaaggaggaggggtaaaggtcacgatgggttgtaccaaggattgagcacagccactaaagatacctatgatgcgctccacatgcaggccctgccgccaaga

SEQ ID NO: 24710 - DNA, 579 bp, synthetic construct
  source 1..579: mol_type = other DNA
gccgtggcctggtccaacaagtccgatttcgcctgcgccaacgccttcaacaacagcattatccccgaggacacattcttcccaagccccgagagcagctgcgacgtgaagctggtggaaaagagcttcgagacagacaccaacctgaacttccagaacctgctggtgatcgtgctgagaatcctgctgctgaaagtggccggctttaacctgctgatgaccctgcggctgtggtccagccgggttaagttttccagatccgcagacgcacccgcttaccaacaagggcagaaccaactctacaatgaacttaatttggggcggagggaagagtacgacgttctggacaaaaggaggggacgagatcccgagatgggcggaaagcctcagcgaaggaagaatccgcaagaggggctttataacgaactccagaaagataaaatggcagaagcctatagtgagattgggatgaagggagaaaggaggaggggtaaaggtcacgatgggttgtaccaaggattgagcacagccactaaagatacctatgatgcgctccacatgcaggccctgccgccaaga

SEQ ID NO: 24711 - DNA, 576 bp, synthetic construct
  source 1..576: mol_type = other DNA
gtggcctggtccaacaagtccgatttcgcctgcgccaacgccttcaacaacagcattatccccgaggacacattcttcccaagccccgagagcagctgcgacgtgaagctggtggaaaagagcttcgagacagacaccaacctgaacttccagaacctgctggtgatcgtgctgagaatcctgctgctgaaagtggccggctttaacctgctgatgaccctgcggctgtggtccagccgggttaagttttccagatccgcagacgcacccgcttaccaacaagggcagaaccaactctacaatgaacttaatttggggcggagggaagagtacgacgttctggacaaaaggaggggacgagatcccgagatgggcggaaagcctcagcgaaggaagaatccgcaagaggggctttataacgaactccagaaagataaaatggcagaagcctatagtgagattgggatgaagggagaaaggaggaggggtaaaggtcacgatgggttgtaccaaggattgagcacagccactaaagatacctatgatgcgctccacatgcaggccctgccgccaaga

SEQ ID NO: 24712 - DNA, 573 bp, synthetic construct
  source 1..573: mol_type = other DNA
gcctggtccaacaagtccgatttcgcctgcgccaacgccttcaacaacagcattatccccgaggacacattcttcccaagccccgagagcagctgcgacgtgaagctggtggaaaagagcttcgagacagacaccaacctgaacttccagaacctgctggtgatcgtgctgagaatcctgctgctgaaagtggccggctttaacctgctgatgaccctgcggctgtggtccagccgggttaagttttccagatccgcagacgcacccgcttaccaacaagggcagaaccaactctacaatgaacttaatttggggcggagggaagagtacgacgttctggacaaaaggaggggacgagatcccgagatgggcggaaagcctcagcgaaggaagaatccgcaagaggggctttataacgaactccagaaagataaaatggcagaagcctatagtgagattgggatgaagggagaaaggaggaggggtaaaggtcacgatgggttgtaccaaggattgagcacagccactaaagatacctatgatgcgctccacatgcaggccctgccgccaaga

SEQ ID NO: 24713 - DNA, 570 bp, synthetic construct
  source 1..570: mol_type = other DNA
tggtccaacaagtccgatttcgcctgcgccaacgccttcaacaacagcattatccccgaggacacattcttcccaagccccgagagcagctgcgacgtgaagctggtggaaaagagcttcgagacagacaccaacctgaacttccagaacctgctggtgatcgtgctgagaatcctgctgctgaaagtggccggctttaacctgctgatgaccctgcggctgtggtccagccgggttaagttttccagatccgcagacgcacccgcttaccaacaagggcagaaccaactctacaatgaacttaatttggggcggagggaagagtacgacgttctggacaaaaggaggggacgagatcccgagatgggcggaaagcctcagcgaaggaagaatccgcaagaggggctttataacgaactccagaaagataaaatggcagaagcctatagtgagattgggatgaagggagaaaggaggaggggtaaaggtcacgatgggttgtaccaaggattgagcacagccactaaagatacctatgatgcgctccacatgcaggccctgccgccaaga

SEQ ID NO: 24714 - DNA, 567 bp, synthetic construct
  source 1..567: mol_type = other DNA
tccaacaagtccgatttcgcctgcgccaacgccttcaacaacagcattatccccgaggacacattcttcccaagccccgagagcagctgcgacgtgaagctggtggaaaagagcttcgagacagacaccaacctgaacttccagaacctgctggtgatcgtgctgagaatcctgctgctgaaagtggccggctttaacctgctgatgaccctgcggctgtggtccagccgggttaagttttccagatccgcagacgcacccgcttaccaacaagggcagaaccaactctacaatgaacttaatttggggcggagggaagagtacgacgttctggacaaaaggaggggacgagatcccgagatgggcggaaagcctcagcgaaggaagaatccgcaagaggggctttataacgaactccagaaagataaaatggcagaagcctatagtgagattgggatgaagggagaaaggaggaggggtaaaggtcacgatgggttgtaccaaggattgagcacagccactaaagatacctatgatgcgctccacatgcaggccctgccgccaaga

SEQ ID NO: 24715 - DNA, 564 bp, synthetic construct
  source 1..564: mol_type = other DNA
aacaagtccgatttcgcctgcgccaacgccttcaacaacagcattatccccgaggacacattcttcccaagccccgagagcagctgcgacgtgaagctggtggaaaagagcttcgagacagacaccaacctgaacttccagaacctgctggtgatcgtgctgagaatcctgctgctgaaagtggccggctttaacctgctgatgaccctgcggctgtggtccagccgggttaagttttccagatccgcagacgcacccgcttaccaacaagggcagaaccaactctacaatgaacttaatttggggcggagggaagagtacgacgttctggacaaaaggaggggacgagatcccgagatgggcggaaagcctcagcgaaggaagaatccgcaagaggggctttataacgaactccagaaagataaaatggcagaagcctatagtgagattgggatgaagggagaaaggaggaggggtaaaggtcacgatgggttgtaccaaggattgagcacagccactaaagatacctatgatgcgctccacatgcaggccctgccgccaaga

SEQ ID NO: 24716 - DNA, 561 bp, synthetic construct
  source 1..561: mol_type = other DNA
aagtccgatttcgcctgcgccaacgccttcaacaacagcattatccccgaggacacattcttcccaagccccgagagcagctgcgacgtgaagctggtggaaaagagcttcgagacagacaccaacctgaacttccagaacctgctggtgatcgtgctgagaatcctgctgctgaaagtggccggctttaacctgctgatgaccctgcggctgtggtccagccgggttaagttttccagatccgcagacgcacccgcttaccaacaagggcagaaccaactctacaatgaacttaatttggggcggagggaagagtacgacgttctggacaaaaggaggggacgagatcccgagatgggcggaaagcctcagcgaaggaagaatccgcaagaggggctttataacgaactccagaaagataaaatggcagaagcctatagtgagattgggatgaagggagaaaggaggaggggtaaaggtcacgatgggttgtaccaaggattgagcacagccactaaagatacctatgatgcgctccacatgcaggccctgccgccaaga

SEQ ID NO: 24717 - DNA, 558 bp, synthetic construct
  source 1..558: mol_type = other DNA
tccgatttcgcctgcgccaacgccttcaacaacagcattatccccgaggacacattcttcccaagccccgagagcagctgcgacgtgaagctggtggaaaagagcttcgagacagacaccaacctgaacttccagaacctgctggtgatcgtgctgagaatcctgctgctgaaagtggccggctttaacctgctgatgaccctgcggctgtggtccagccgggttaagttttccagatccgcagacgcacccgcttaccaacaagggcagaaccaactctacaatgaacttaatttggggcggagggaagagtacgacgttctggacaaaaggaggggacgagatcccgagatgggcggaaagcctcagcgaaggaagaatccgcaagaggggctttataacgaactccagaaagataaaatggcagaagcctatagtgagattgggatgaagggagaaaggaggaggggtaaaggtcacgatgggttgtaccaaggattgagcacagccactaaagatacctatgatgcgctccacatgcaggccctgccgccaaga

SEQ ID NO: 24718 - DNA, 555 bp, synthetic construct
  source 1..555: mol_type = other DNA
gatttcgcctgcgccaacgccttcaacaacagcattatccccgaggacacattcttcccaagccccgagagcagctgcgacgtgaagctggtggaaaagagcttcgagacagacaccaacctgaacttccagaacctgctggtgatcgtgctgagaatcctgctgctgaaagtggccggctttaacctgctgatgaccctgcggctgtggtccagccgggttaagttttccagatccgcagacgcacccgcttaccaacaagggcagaaccaactctacaatgaacttaatttggggcggagggaagagtacgacgttctggacaaaaggaggggacgagatcccgagatgggcggaaagcctcagcgaaggaagaatccgcaagaggggctttataacgaactccagaaagataaaatggcagaagcctatagtgagattgggatgaagggagaaaggaggaggggtaaaggtcacgatgggttgtaccaaggattgagcacagccactaaagatacctatgatgcgctccacatgcaggccctgccgccaaga

SEQ ID NO: 24719 - DNA, 552 bp, synthetic construct
  source 1..552: mol_type = other DNA
ttcgcctgcgccaacgccttcaacaacagcattatccccgaggacacattcttcccaagccccgagagcagctgcgacgtgaagctggtggaaaagagcttcgagacagacaccaacctgaacttccagaacctgctggtgatcgtgctgagaatcctgctgctgaaagtggccggctttaacctgctgatgaccctgcggctgtggtccagccgggttaagttttccagatccgcagacgcacccgcttaccaacaagggcagaaccaactctacaatgaacttaatttggggcggagggaagagtacgacgttctggacaaaaggaggggacgagatcccgagatgggcggaaagcctcagcgaaggaagaatccgcaagaggggctttataacgaactccagaaagataaaatggcagaagcctatagtgagattgggatgaagggagaaaggaggaggggtaaaggtcacgatgggttgtaccaaggattgagcacagccactaaagatacctatgatgcgctccacatgcaggccctgccgccaaga

SEQ ID NO: 24720 - DNA, 549 bp, synthetic construct
  source 1..549: mol_type = other DNA
gcctgcgccaacgccttcaacaacagcattatccccgaggacacattcttcccaagccccgagagcagctgcgacgtgaagctggtggaaaagagcttcgagacagacaccaacctgaacttccagaacctgctggtgatcgtgctgagaatcctgctgctgaaagtggccggctttaacctgctgatgaccctgcggctgtggtccagccgggttaagttttccagatccgcagacgcacccgcttaccaacaagggcagaaccaactctacaatgaacttaatttggggcggagggaagagtacgacgttctggacaaaaggaggggacgagatcccgagatgggcggaaagcctcagcgaaggaagaatccgcaagaggggctttataacgaactccagaaagataaaatggcagaagcctatagtgagattgggatgaagggagaaaggaggaggggtaaaggtcacgatgggttgtaccaaggattgagcacagccactaaagatacctatgatgcgctccacatgcaggccctgccgccaaga

SEQ ID NO: 24721 - DNA, 546 bp, synthetic construct
  source 1..546: mol_type = other DNA
tgcgccaacgccttcaacaacagcattatccccgaggacacattcttcccaagccccgagagcagctgcgacgtgaagctggtggaaaagagcttcgagacagacaccaacctgaacttccagaacctgctggtgatcgtgctgagaatcctgctgctgaaagtggccggctttaacctgctgatgaccctgcggctgtggtccagccgggttaagttttccagatccgcagacgcacccgcttaccaacaagggcagaaccaactctacaatgaacttaatttggggcggagggaagagtacgacgttctggacaaaaggaggggacgagatcccgagatgggcggaaagcctcagcgaaggaagaatccgcaagaggggctttataacgaactccagaaagataaaatggcagaagcctatagtgagattgggatgaagggagaaaggaggaggggtaaaggtcacgatgggttgtaccaaggattgagcacagccactaaagatacctatgatgcgctccacatgcaggccctgccgccaaga

SEQ ID NO: 24722 - DNA, 543 bp, synthetic construct
  source 1..543: mol_type = other DNA
gccaacgccttcaacaacagcattatccccgaggacacattcttcccaagccccgagagcagctgcgacgtgaagctggtggaaaagagcttcgagacagacaccaacctgaacttccagaacctgctggtgatcgtgctgagaatcctgctgctgaaagtggccggctttaacctgctgatgaccctgcggctgtggtccagccgggttaagttttccagatccgcagacgcacccgcttaccaacaagggcagaaccaactctacaatgaacttaatttggggcggagggaagagtacgacgttctggacaaaaggaggggacgagatcccgagatgggcggaaagcctcagcgaaggaagaatccgcaagaggggctttataacgaactccagaaagataaaatggcagaagcctatagtgagattgggatgaagggagaaaggaggaggggtaaaggtcacgatgggttgtaccaaggattgagcacagccactaaagatacctatgatgcgctccacatgcaggccctgccgccaaga

SEQ ID NO: 24723 - DNA, 540 bp, synthetic construct
  source 1..540: mol_type = other DNA
aacgccttcaacaacagcattatccccgaggacacattcttcccaagccccgagagcagctgcgacgtgaagctggtggaaaagagcttcgagacagacaccaacctgaacttccagaacctgctggtgatcgtgctgagaatcctgctgctgaaagtggccggctttaacctgctgatgaccctgcggctgtggtccagccgggttaagttttccagatccgcagacgcacccgcttaccaacaagggcagaaccaactctacaatgaacttaatttggggcggagggaagagtacgacgttctggacaaaaggaggggacgagatcccgagatgggcggaaagcctcagcgaaggaagaatccgcaagaggggctttataacgaactccagaaagataaaatggcagaagcctatagtgagattgggatgaagggagaaaggaggaggggtaaaggtcacgatgggttgtaccaaggattgagcacagccactaaagatacctatgatgcgctccacatgcaggccctgccgccaaga

SEQ ID NO: 24724 - DNA, 537 bp, synthetic construct
  source 1..537: mol_type = other DNA
gccttcaacaacagcattatccccgaggacacattcttcccaagccccgagagcagctgcgacgtgaagctggtggaaaagagcttcgagacagacaccaacctgaacttccagaacctgctggtgatcgtgctgagaatcctgctgctgaaagtggccggctttaacctgctgatgaccctgcggctgtggtccagccgggttaagttttccagatccgcagacgcacccgcttaccaacaagggcagaaccaactctacaatgaacttaatttggggcggagggaagagtacgacgttctggacaaaaggaggggacgagatcccgagatgggcggaaagcctcagcgaaggaagaatccgcaagaggggctttataacgaactccagaaagataaaatggcagaagcctatagtgagattgggatgaagggagaaaggaggaggggtaaaggtcacgatgggttgtaccaaggattgagcacagccactaaagatacctatgatgcgctccacatgcaggccctgccgccaaga

SEQ ID NO: 24725 - DNA, 534 bp, synthetic construct
  source 1..534: mol_type = other DNA
ttcaacaacagcattatccccgaggacacattcttcccaagccccgagagcagctgcgacgtgaagctggtggaaaagagcttcgagacagacaccaacctgaacttccagaacctgctggtgatcgtgctgagaatcctgctgctgaaagtggccggctttaacctgctgatgaccctgcggctgtggtccagccgggttaagttttccagatccgcagacgcacccgcttaccaacaagggcagaaccaactctacaatgaacttaatttggggcggagggaagagtacgacgttctggacaaaaggaggggacgagatcccgagatgggcggaaagcctcagcgaaggaagaatccgcaagaggggctttataacgaactccagaaagataaaatggcagaagcctatagtgagattgggatgaagggagaaaggaggaggggtaaaggtcacgatgggttgtaccaaggattgagcacagccactaaagatacctatgatgcgctccacatgcaggccctgccgccaaga

SEQ ID NO: 24726 - DNA, 531 bp, synthetic construct
  source 1..531: mol_type = other DNA
aacaacagcattatccccgaggacacattcttcccaagccccgagagcagctgcgacgtgaagctggtggaaaagagcttcgagacagacaccaacctgaacttccagaacctgctggtgatcgtgctgagaatcctgctgctgaaagtggccggctttaacctgctgatgaccctgcggctgtggtccagccgggttaagttttccagatccgcagacgcacccgcttaccaacaagggcagaaccaactctacaatgaacttaatttggggcggagggaagagtacgacgttctggacaaaaggaggggacgagatcccgagatgggcggaaagcctcagcgaaggaagaatccgcaagaggggctttataacgaactccagaaagataaaatggcagaagcctatagtgagattgggatgaagggagaaaggaggaggggtaaaggtcacgatgggttgtaccaaggattgagcacagccactaaagatacctatgatgcgctccacatgcaggccctgccgccaaga

SEQ ID NO: 24727 - DNA, 528 bp, synthetic construct
  source 1..528: mol_type = other DNA
aacagcattatccccgaggacacattcttcccaagccccgagagcagctgcgacgtgaagctggtggaaaagagcttcgagacagacaccaacctgaacttccagaacctgctggtgatcgtgctgagaatcctgctgctgaaagtggccggctttaacctgctgatgaccctgcggctgtggtccagccgggttaagttttccagatccgcagacgcacccgcttaccaacaagggcagaaccaactctacaatgaacttaatttggggcggagggaagagtacgacgttctggacaaaaggaggggacgagatcccgagatgggcggaaagcctcagcgaaggaagaatccgcaagaggggctttataacgaactccagaaagataaaatggcagaagcctatagtgagattgggatgaagggagaaaggaggaggggtaaaggtcacgatgggttgtaccaaggattgagcacagccactaaagatacctatgatgcgctccacatgcaggccctgccgccaaga

SEQ ID NO: 24728 - DNA, 525 bp, synthetic construct
  source 1..525: mol_type = other DNA
agcattatccccgaggacacattcttcccaagccccgagagcagctgcgacgtgaagctggtggaaaagagcttcgagacagacaccaacctgaacttccagaacctgctggtgatcgtgctgagaatcctgctgctgaaagtggccggctttaacctgctgatgaccctgcggctgtggtccagccgggttaagttttccagatccgcagacgcacccgcttaccaacaagggcagaaccaactctacaatgaacttaatttggggcggagggaagagtacgacgttctggacaaaaggaggggacgagatcccgagatgggcggaaagcctcagcgaaggaagaatccgcaagaggggctttataacgaactccagaaagataaaatggcagaagcctatagtgagattgggatgaagggagaaaggaggaggggtaaaggtcacgatgggttgtaccaaggattgagcacagccactaaagatacctatgatgcgctccacatgcaggccctgccgccaaga

SEQ ID NO: 24729 - DNA, 522 bp, synthetic construct
  source 1..522: mol_type = other DNA
attatccccgaggacacattcttcccaagccccgagagcagctgcgacgtgaagctggtggaaaagagcttcgagacagacaccaacctgaacttccagaacctgctggtgatcgtgctgagaatcctgctgctgaaagtggccggctttaacctgctgatgaccctgcggctgtggtccagccgggttaagttttccagatccgcagacgcacccgcttaccaacaagggcagaaccaactctacaatgaacttaatttggggcggagggaagagtacgacgttctggacaaaaggaggggacgagatcccgagatgggcggaaagcctcagcgaaggaagaatccgcaagaggggctttataacgaactccagaaagataaaatggcagaagcctatagtgagattgggatgaagggagaaaggaggaggggtaaaggtcacgatgggttgtaccaaggattgagcacagccactaaagatacctatgatgcgctccacatgcaggccctgccgccaaga

SEQ ID NO: 24730 - DNA, 519 bp, synthetic construct
  source 1..519: mol_type = other DNA
atccccgaggacacattcttcccaagccccgagagcagctgcgacgtgaagctggtggaaaagagcttcgagacagacaccaacctgaacttccagaacctgctggtgatcgtgctgagaatcctgctgctgaaagtggccggctttaacctgctgatgaccctgcggctgtggtccagccgggttaagttttccagatccgcagacgcacccgcttaccaacaagggcagaaccaactctacaatgaacttaatttggggcggagggaagagtacgacgttctggacaaaaggaggggacgagatcccgagatgggcggaaagcctcagcgaaggaagaatccgcaagaggggctttataacgaactccagaaagataaaatggcagaagcctatagtgagattgggatgaagggagaaaggaggaggggtaaaggtcacgatgggttgtaccaaggattgagcacagccactaaagatacctatgatgcgctccacatgcaggccctgccgccaaga

SEQ ID NO: 24731 - DNA, 516 bp, synthetic construct
  source 1..516: mol_type = other DNA
cccgaggacacattcttcccaagccccgagagcagctgcgacgtgaagctggtggaaaagagcttcgagacagacaccaacctgaacttccagaacctgctggtgatcgtgctgagaatcctgctgctgaaagtggccggctttaacctgctgatgaccctgcggctgtggtccagccgggttaagttttccagatccgcagacgcacccgcttaccaacaagggcagaaccaactctacaatgaacttaatttggggcggagggaagagtacgacgttctggacaaaaggaggggacgagatcccgagatgggcggaaagcctcagcgaaggaagaatccgcaagaggggctttataacgaactccagaaagataaaatggcagaagcctatagtgagattgggatgaagggagaaaggaggaggggtaaaggtcacgatgggttgtaccaaggattgagcacagccactaaagatacctatgatgcgctccacatgcaggccctgccgccaaga

SEQ ID NO: 24732 - DNA, 513 bp, synthetic construct
  source 1..513: mol_type = other DNA
gaggacacattcttcccaagccccgagagcagctgcgacgtgaagctggtggaaaagagcttcgagacagacaccaacctgaacttccagaacctgctggtgatcgtgctgagaatcctgctgctgaaagtggccggctttaacctgctgatgaccctgcggctgtggtccagccgggttaagttttccagatccgcagacgcacccgcttaccaacaagggcagaaccaactctacaatgaacttaatttggggcggagggaagagtacgacgttctggacaaaaggaggggacgagatcccgagatgggcggaaagcctcagcgaaggaagaatccgcaagaggggctttataacgaactccagaaagataaaatggcagaagcctatagtgagattgggatgaagggagaaaggaggaggggtaaaggtcacgatgggttgtaccaaggattgagcacagccactaaagatacctatgatgcgctccacatgcaggccctgccgccaaga

SEQ ID NO: 24733 - DNA, 510 bp, synthetic construct
  source 1..510: mol_type = other DNA
gacacattcttcccaagccccgagagcagctgcgacgtgaagctggtggaaaagagcttcgagacagacaccaacctgaacttccagaacctgctggtgatcgtgctgagaatcctgctgctgaaagtggccggctttaacctgctgatgaccctgcggctgtggtccagccgggttaagttttccagatccgcagacgcacccgcttaccaacaagggcagaaccaactctacaatgaacttaatttggggcggagggaagagtacgacgttctggacaaaaggaggggacgagatcccgagatgggcggaaagcctcagcgaaggaagaatccgcaagaggggctttataacgaactccagaaagataaaatggcagaagcctatagtgagattgggatgaagggagaaaggaggaggggtaaaggtcacgatgggttgtaccaaggattgagcacagccactaaagatacctatgatgcgctccacatgcaggccctgccgccaaga

SEQ ID NO: 24734 - DNA, 507 bp, synthetic construct
  source 1..507: mol_type = other DNA
acattcttcccaagccccgagagcagctgcgacgtgaagctggtggaaaagagcttcgagacagacaccaacctgaacttccagaacctgctggtgatcgtgctgagaatcctgctgctgaaagtggccggctttaacctgctgatgaccctgcggctgtggtccagccgggttaagttttccagatccgcagacgcacccgcttaccaacaagggcagaaccaactctacaatgaacttaatttggggcggagggaagagtacgacgttctggacaaaaggaggggacgagatcccgagatgggcggaaagcctcagcgaaggaagaatccgcaagaggggctttataacgaactccagaaagataaaatggcagaagcctatagtgagattgggatgaagggagaaaggaggaggggtaaaggtcacgatgggttgtaccaaggattgagcacagccactaaagatacctatgatgcgctccacatgcaggccctgccgccaaga

SEQ ID NO: 24735 - DNA, 504 bp, synthetic construct
  source 1..504: mol_type = other DNA
ttcttcccaagccccgagagcagctgcgacgtgaagctggtggaaaagagcttcgagacagacaccaacctgaacttccagaacctgctggtgatcgtgctgagaatcctgctgctgaaagtggccggctttaacctgctgatgaccctgcggctgtggtccagccgggttaagttttccagatccgcagacgcacccgcttaccaacaagggcagaaccaactctacaatgaacttaatttggggcggagggaagagtacgacgttctggacaaaaggaggggacgagatcccgagatgggcggaaagcctcagcgaaggaagaatccgcaagaggggctttataacgaactccagaaagataaaatggcagaagcctatagtgagattgggatgaagggagaaaggaggaggggtaaaggtcacgatgggttgtaccaaggattgagcacagccactaaagatacctatgatgcgctccacatgcaggccctgccgccaaga

SEQ ID NO: 24736 - DNA, 501 bp, synthetic construct
  source 1..501: mol_type = other DNA
ttcccaagccccgagagcagctgcgacgtgaagctggtggaaaagagcttcgagacagacaccaacctgaacttccagaacctgctggtgatcgtgctgagaatcctgctgctgaaagtggccggctttaacctgctgatgaccctgcggctgtggtccagccgggttaagttttccagatccgcagacgcacccgcttaccaacaagggcagaaccaactctacaatgaacttaatttggggcggagggaagagtacgacgttctggacaaaaggaggggacgagatcccgagatgggcggaaagcctcagcgaaggaagaatccgcaagaggggctttataacgaactccagaaagataaaatggcagaagcctatagtgagattgggatgaagggagaaaggaggaggggtaaaggtcacgatgggttgtaccaaggattgagcacagccactaaagatacctatgatgcgctccacatgcaggccctgccgccaaga

SEQ ID NO: 24737 - DNA, 498 bp, synthetic construct
  source 1..498: mol_type = other DNA
ccaagccccgagagcagctgcgacgtgaagctggtggaaaagagcttcgagacagacaccaacctgaacttccagaacctgctggtgatcgtgctgagaatcctgctgctgaaagtggccggctttaacctgctgatgaccctgcggctgtggtccagccgggttaagttttccagatccgcagacgcacccgcttaccaacaagggcagaaccaactctacaatgaacttaatttggggcggagggaagagtacgacgttctggacaaaaggaggggacgagatcccgagatgggcggaaagcctcagcgaaggaagaatccgcaagaggggctttataacgaactccagaaagataaaatggcagaagcctatagtgagattgggatgaagggagaaaggaggaggggtaaaggtcacgatgggttgtaccaaggattgagcacagccactaaagatacctatgatgcgctccacatgcaggccctgccgccaaga

SEQ ID NO: 24738 - DNA, 495 bp, synthetic construct
  source 1..495: mol_type = other DNA
agccccgagagcagctgcgacgtgaagctggtggaaaagagcttcgagacagacaccaacctgaacttccagaacctgctggtgatcgtgctgagaatcctgctgctgaaagtggccggctttaacctgctgatgaccctgcggctgtggtccagccgggttaagttttccagatccgcagacgcacccgcttaccaacaagggcagaaccaactctacaatgaacttaatttggggcggagggaagagtacgacgttctggacaaaaggaggggacgagatcccgagatgggcggaaagcctcagcgaaggaagaatccgcaagaggggctttataacgaactccagaaagataaaatggcagaagcctatagtgagattgggatgaagggagaaaggaggaggggtaaaggtcacgatgggttgtaccaaggattgagcacagccactaaagatacctatgatgcgctccacatgcaggccctgccgccaaga

SEQ ID NO: 24739 - DNA, 492 bp, synthetic construct
  source 1..492: mol_type = other DNA
cccgagagcagctgcgacgtgaagctggtggaaaagagcttcgagacagacaccaacctgaacttccagaacctgctggtgatcgtgctgagaatcctgctgctgaaagtggccggctttaacctgctgatgaccctgcggctgtggtccagccgggttaagttttccagatccgcagacgcacccgcttaccaacaagggcagaaccaactctacaatgaacttaatttggggcggagggaagagtacgacgttctggacaaaaggaggggacgagatcccgagatgggcggaaagcctcagcgaaggaagaatccgcaagaggggctttataacgaactccagaaagataaaatggcagaagcctatagtgagattgggatgaagggagaaaggaggaggggtaaaggtcacgatgggttgtaccaaggattgagcacagccactaaagatacctatgatgcgctccacatgcaggccctgccgccaaga

SEQ ID NO: 24740 - DNA, 489 bp, synthetic construct
  source 1..489: mol_type = other DNA
gagagcagctgcgacgtgaagctggtggaaaagagcttcgagacagacaccaacctgaacttccagaacctgctggtgatcgtgctgagaatcctgctgctgaaagtggccggctttaacctgctgatgaccctgcggctgtggtccagccgggttaagttttccagatccgcagacgcacccgcttaccaacaagggcagaaccaactctacaatgaacttaatttggggcggagggaagagtacgacgttctggacaaaaggaggggacgagatcccgagatgggcggaaagcctcagcgaaggaagaatccgcaagaggggctttataacgaactccagaaagataaaatggcagaagcctatagtgagattgggatgaagggagaaaggaggaggggtaaaggtcacgatgggttgtaccaaggattgagcacagccactaaagatacctatgatgcgctccacatgcaggccctgccgccaaga

SEQ ID NO: 24741 - DNA, 486 bp, synthetic construct
  source 1..486: mol_type = other DNA
agcagctgcgacgtgaagctggtggaaaagagcttcgagacagacaccaacctgaacttccagaacctgctggtgatcgtgctgagaatcctgctgctgaaagtggccggctttaacctgctgatgaccctgcggctgtggtccagccgggttaagttttccagatccgcagacgcacccgcttaccaacaagggcagaaccaactctacaatgaacttaatttggggcggagggaagagtacgacgttctggacaaaaggaggggacgagatcccgagatgggcggaaagcctcagcgaaggaagaatccgcaagaggggctttataacgaactccagaaagataaaatggcagaagcctatagtgagattgggatgaagggagaaaggaggaggggtaaaggtcacgatgggttgtaccaaggattgagcacagccactaaagatacctatgatgcgctccacatgcaggccctgccgccaaga

SEQ ID NO: 24742 - DNA, 483 bp, synthetic construct
  source 1..483: mol_type = other DNA
agctgcgacgtgaagctggtggaaaagagcttcgagacagacaccaacctgaacttccagaacctgctggtgatcgtgctgagaatcctgctgctgaaagtggccggctttaacctgctgatgaccctgcggctgtggtccagccgggttaagttttccagatccgcagacgcacccgcttaccaacaagggcagaaccaactctacaatgaacttaatttggggcggagggaagagtacgacgttctggacaaaaggaggggacgagatcccgagatgggcggaaagcctcagcgaaggaagaatccgcaagaggggctttataacgaactccagaaagataaaatggcagaagcctatagtgagattgggatgaagggagaaaggaggaggggtaaaggtcacgatgggttgtaccaaggattgagcacagccactaaagatacctatgatgcgctccacatgcaggccctgccgccaaga

SEQ ID NO: 24743 - DNA, 480 bp, synthetic construct
  source 1..480: mol_type = other DNA
tgcgacgtgaagctggtggaaaagagcttcgagacagacaccaacctgaacttccagaacctgctggtgatcgtgctgagaatcctgctgctgaaagtggccggctttaacctgctgatgaccctgcggctgtggtccagccgggttaagttttccagatccgcagacgcacccgcttaccaacaagggcagaaccaactctacaatgaacttaatttggggcggagggaagagtacgacgttctggacaaaaggaggggacgagatcccgagatgggcggaaagcctcagcgaaggaagaatccgcaagaggggctttataacgaactccagaaagataaaatggcagaagcctatagtgagattgggatgaagggagaaaggaggaggggtaaaggtcacgatgggttgtaccaaggattgagcacagccactaaagatacctatgatgcgctccacatgcaggccctgccgccaaga

SEQ ID NO: 24744 - DNA, 477 bp, synthetic construct
  source 1..477: mol_type = other DNA
gacgtgaagctggtggaaaagagcttcgagacagacaccaacctgaacttccagaacctgctggtgatcgtgctgagaatcctgctgctgaaagtggccggctttaacctgctgatgaccctgcggctgtggtccagccgggttaagttttccagatccgcagacgcacccgcttaccaacaagggcagaaccaactctacaatgaacttaatttggggcggagggaagagtacgacgttctggacaaaaggaggggacgagatcccgagatgggcggaaagcctcagcgaaggaagaatccgcaagaggggctttataacgaactccagaaagataaaatggcagaagcctatagtgagattgggatgaagggagaaaggaggaggggtaaaggtcacgatgggttgtaccaaggattgagcacagccactaaagatacctatgatgcgctccacatgcaggccctgccgccaaga

SEQ ID NO: 24745 - DNA, 474 bp, synthetic construct
  source 1..474: mol_type = other DNA
gtgaagctggtggaaaagagcttcgagacagacaccaacctgaacttccagaacctgctggtgatcgtgctgagaatcctgctgctgaaagtggccggctttaacctgctgatgaccctgcggctgtggtccagccgggttaagttttccagatccgcagacgcacccgcttaccaacaagggcagaaccaactctacaatgaacttaatttggggcggagggaagagtacgacgttctggacaaaaggaggggacgagatcccgagatgggcggaaagcctcagcgaaggaagaatccgcaagaggggctttataacgaactccagaaagataaaatggcagaagcctatagtgagattgggatgaagggagaaaggaggaggggtaaaggtcacgatgggttgtaccaaggattgagcacagccactaaagatacctatgatgcgctccacatgcaggccctgccgccaaga

SEQ ID NO: 24746 - DNA, 471 bp, synthetic construct
  source 1..471: mol_type = other DNA
aagctggtggaaaagagcttcgagacagacaccaacctgaacttccagaacctgctggtgatcgtgctgagaatcctgctgctgaaagtggccggctttaacctgctgatgaccctgcggctgtggtccagccgggttaagttttccagatccgcagacgcacccgcttaccaacaagggcagaaccaactctacaatgaacttaatttggggcggagggaagagtacgacgttctggacaaaaggaggggacgagatcccgagatgggcggaaagcctcagcgaaggaagaatccgcaagaggggctttataacgaactccagaaagataaaatggcagaagcctatagtgagattgggatgaagggagaaaggaggaggggtaaaggtcacgatgggttgtaccaaggattgagcacagccactaaagatacctatgatgcgctccacatgcaggccctgccgccaaga

SEQ ID NO: 24747 - DNA, 468 bp, synthetic construct
  source 1..468: mol_type = other DNA
ctggtggaaaagagcttcgagacagacaccaacctgaacttccagaacctgctggtgatcgtgctgagaatcctgctgctgaaagtggccggctttaacctgctgatgaccctgcggctgtggtccagccgggttaagttttccagatccgcagacgcacccgcttaccaacaagggcagaaccaactctacaatgaacttaatttggggcggagggaagagtacgacgttctggacaaaaggaggggacgagatcccgagatgggcggaaagcctcagcgaaggaagaatccgcaagaggggctttataacgaactccagaaagataaaatggcagaagcctatagtgagattgggatgaagggagaaaggaggaggggtaaaggtcacgatgggttgtaccaaggattgagcacagccactaaagatacctatgatgcgctccacatgcaggccctgccgccaaga

SEQ ID NO: 24748 - DNA, 465 bp, synthetic construct
  source 1..465: mol_type = other DNA
gtggaaaagagcttcgagacagacaccaacctgaacttccagaacctgctggtgatcgtgctgagaatcctgctgctgaaagtggccggctttaacctgctgatgaccctgcggctgtggtccagccgggttaagttttccagatccgcagacgcacccgcttaccaacaagggcagaaccaactctacaatgaacttaatttggggcggagggaagagtacgacgttctggacaaaaggaggggacgagatcccgagatgggcggaaagcctcagcgaaggaagaatccgcaagaggggctttataacgaactccagaaagataaaatggcagaagcctatagtgagattgggatgaagggagaaaggaggaggggtaaaggtcacgatgggttgtaccaaggattgagcacagccactaaagatacctatgatgcgctccacatgcaggccctgccgccaaga

SEQ ID NO: 24749 - DNA, 462 bp, synthetic construct
  source 1..462: mol_type = other DNA
gaaaagagcttcgagacagacaccaacctgaacttccagaacctgctggtgatcgtgctgagaatcctgctgctgaaagtggccggctttaacctgctgatgaccctgcggctgtggtccagccgggttaagttttccagatccgcagacgcacccgcttaccaacaagggcagaaccaactctacaatgaacttaatttggggcggagggaagagtacgacgttctggacaaaaggaggggacgagatcccgagatgggcggaaagcctcagcgaaggaagaatccgcaagaggggctttataacgaactccagaaagataaaatggcagaagcctatagtgagattgggatgaagggagaaaggaggaggggtaaaggtcacgatgggttgtaccaaggattgagcacagccactaaagatacctatgatgcgctccacatgcaggccctgccgccaaga

SEQ ID NO: 24750 - DNA, 459 bp, synthetic construct
  source 1..459: mol_type = other DNA
aagagcttcgagacagacaccaacctgaacttccagaacctgctggtgatcgtgctgagaatcctgctgctgaaagtggccggctttaacctgctgatgaccctgcggctgtggtccagccgggttaagttttccagatccgcagacgcacccgcttaccaacaagggcagaaccaactctacaatgaacttaatttggggcggagggaagagtacgacgttctggacaaaaggaggggacgagatcccgagatgggcggaaagcctcagcgaaggaagaatccgcaagaggggctttataacgaactccagaaagataaaatggcagaagcctatagtgagattgggatgaagggagaaaggaggaggggtaaaggtcacgatgggttgtaccaaggattgagcacagccactaaagatacctatgatgcgctccacatgcaggccctgccgccaaga

SEQ ID NO: 24751 - DNA, 456 bp, synthetic construct
  source 1..456: mol_type = other DNA
agcttcgagacagacaccaacctgaacttccagaacctgctggtgatcgtgctgagaatcctgctgctgaaagtggccggctttaacctgctgatgaccctgcggctgtggtccagccgggttaagttttccagatccgcagacgcacccgcttaccaacaagggcagaaccaactctacaatgaacttaatttggggcggagggaagagtacgacgttctggacaaaaggaggggacgagatcccgagatgggcggaaagcctcagcgaaggaagaatccgcaagaggggctttataacgaactccagaaagataaaatggcagaagcctatagtgagattgggatgaagggagaaaggaggaggggtaaaggtcacgatgggttgtaccaaggattgagcacagccactaaagatacctatgatgcgctccacatgcaggccctgccgccaaga

SEQ ID NO: 24752 - DNA, 837 bp, synthetic construct
  source 1..837: mol_type = other DNA
ggacagcctaaggccaatcctaccgtgacactgttccctccaagcagcgaagaactccaggccaacaaggccacacttgtgtgcctgatctccgacttctaccctggggctgtgacagtggcttggaaggccgatggatctcctgtgaaagccggcgtggaaaccaccaagccatccaagcagagcaacaacaaatacgccgccagctcctacctgagcctgacacctgagcagtggaagtcccacagatcctacagctgccaagtgacccacgaaggcagcaccgtggaaaagacagtggcccctacagagtgcagcatccccgaggacacattcttcccaagccccgagagcagctgcgacgtgaagctggtggaaaagagcttcgagacagacaccaacctgaacttccagaacctgctggtgatcgtgctgagaatcctgctgctgaaagtggccggctttaacctgctgatgaccctgcggctgtggtccagccgggttaagttttccagatccgcagacgcacccgcttaccaacaagggcagaaccaactctacaatgaacttaatttggggcggagggaagagtacgacgttctggacaaaaggaggggacgagatcccgagatgggcggaaagcctcagcgaaggaagaatccgcaagaggggctttataacgaactccagaaagataaaatggcagaagcctatagtgagattgggatgaagggagaaaggaggaggggtaaaggtcacgatgggttgtaccaaggattgagcacagccactaaagatacctatgatgcgctccacatgcaggccctgccgccaaga

SEQ ID NO: 24753 - DNA, 834 bp, synthetic construct
  source 1..834: mol_type = other DNA
cagcctaaggccaatcctaccgtgacactgttccctccaagcagcgaagaactccaggccaacaaggccacacttgtgtgcctgatctccgacttctaccctggggctgtgacagtggcttggaaggccgatggatctcctgtgaaagccggcgtggaaaccaccaagccatccaagcagagcaacaacaaatacgccgccagctcctacctgagcctgacacctgagcagtggaagtcccacagatcctacagctgccaagtgacccacgaaggcagcaccgtggaaaagacagtggcccctacagagtgcagcatccccgaggacacattcttcccaagccccgagagcagctgcgacgtgaagctggtggaaaagagcttcgagacagacaccaacctgaacttccagaacctgctggtgatcgtgctgagaatcctgctgctgaaagtggccggctttaacctgctgatgaccctgcggctgtggtccagccgggttaagttttccagatccgcagacgcacccgcttaccaacaagggcagaaccaactctacaatgaacttaatttggggcggagggaagagtacgacgttctggacaaaaggaggggacgagatcccgagatgggcggaaagcctcagcgaaggaagaatccgcaagaggggctttataacgaactccagaaagataaaatggcagaagcctatagtgagattgggatgaagggagaaaggaggaggggtaaaggtcacgatgggttgtaccaaggattgagcacagccactaaagatacctatgatgcgctccacatgcaggccctgccgccaaga

SEQ ID NO: 24754 - DNA, 831 bp, synthetic construct
  source 1..831: mol_type = other DNA
cctaaggccaatcctaccgtgacactgttccctccaagcagcgaagaactccaggccaacaaggccacacttgtgtgcctgatctccgacttctaccctggggctgtgacagtggcttggaaggccgatggatctcctgtgaaagccggcgtggaaaccaccaagccatccaagcagagcaacaacaaatacgccgccagctcctacctgagcctgacacctgagcagtggaagtcccacagatcctacagctgccaagtgacccacgaaggcagcaccgtggaaaagacagtggcccctacagagtgcagcatccccgaggacacattcttcccaagccccgagagcagctgcgacgtgaagctggtggaaaagagcttcgagacagacaccaacctgaacttccagaacctgctggtgatcgtgctgagaatcctgctgctgaaagtggccggctttaacctgctgatgaccctgcggctgtggtccagccgggttaagttttccagatccgcagacgcacccgcttaccaacaagggcagaaccaactctacaatgaacttaatttggggcggagggaagagtacgacgttctggacaaaaggaggggacgagatcccgagatgggcggaaagcctcagcgaaggaagaatccgcaagaggggctttataacgaactccagaaagataaaatggcagaagcctatagtgagattgggatgaagggagaaaggaggaggggtaaaggtcacgatgggttgtaccaaggattgagcacagccactaaagatacctatgatgcgctccacatgcaggccctgccgccaaga

SEQ ID NO: 24755 - DNA, 828 bp, synthetic construct
  source 1..828: mol_type = other DNA
aaggccaatcctaccgtgacactgttccctccaagcagcgaagaactccaggccaacaaggccacacttgtgtgcctgatctccgacttctaccctggggctgtgacagtggcttggaaggccgatggatctcctgtgaaagccggcgtggaaaccaccaagccatccaagcagagcaacaacaaatacgccgccagctcctacctgagcctgacacctgagcagtggaagtcccacagatcctacagctgccaagtgacccacgaaggcagcaccgtggaaaagacagtggcccctacagagtgcagcatccccgaggacacattcttcccaagccccgagagcagctgcgacgtgaagctggtggaaaagagcttcgagacagacaccaacctgaacttccagaacctgctggtgatcgtgctgagaatcctgctgctgaaagtggccggctttaacctgctgatgaccctgcggctgtggtccagccgggttaagttttccagatccgcagacgcacccgcttaccaacaagggcagaaccaactctacaatgaacttaatttggggcggagggaagagtacgacgttctggacaaaaggaggggacgagatcccgagatgggcggaaagcctcagcgaaggaagaatccgcaagaggggctttataacgaactccagaaagataaaatggcagaagcctatagtgagattgggatgaagggagaaaggaggaggggtaaaggtcacgatgggttgtaccaaggattgagcacagccactaaagatacctatgatgcgctccacatgcaggccctgccgccaaga

SEQ ID NO: 24756 - DNA, 825 bp, synthetic construct
  source 1..825: mol_type = other DNA
gccaatcctaccgtgacactgttccctccaagcagcgaagaactccaggccaacaaggccacacttgtgtgcctgatctccgacttctaccctggggctgtgacagtggcttggaaggccgatggatctcctgtgaaagccggcgtggaaaccaccaagccatccaagcagagcaacaacaaatacgccgccagctcctacctgagcctgacacctgagcagtggaagtcccacagatcctacagctgccaagtgacccacgaaggcagcaccgtggaaaagacagtggcccctacagagtgcagcatccccgaggacacattcttcccaagccccgagagcagctgcgacgtgaagctggtggaaaagagcttcgagacagacaccaacctgaacttccagaacctgctggtgatcgtgctgagaatcctgctgctgaaagtggccggctttaacctgctgatgaccctgcggctgtggtccagccgggttaagttttccagatccgcagacgcacccgcttaccaacaagggcagaaccaactctacaatgaacttaatttggggcggagggaagagtacgacgttctggacaaaaggaggggacgagatcccgagatgggcggaaagcctcagcgaaggaagaatccgcaagaggggctttataacgaactccagaaagataaaatggcagaagcctatagtgagattgggatgaagggagaaaggaggaggggtaaaggtcacgatgggttgtaccaaggattgagcacagccactaaagatacctatgatgcgctccacatgcaggccctgccgccaaga

SEQ ID NO: 24757 - DNA, 822 bp, synthetic construct
  source 1..822: mol_type = other DNA
aatcctaccgtgacactgttccctccaagcagcgaagaactccaggccaacaaggccacacttgtgtgcctgatctccgacttctaccctggggctgtgacagtggcttggaaggccgatggatctcctgtgaaagccggcgtggaaaccaccaagccatccaagcagagcaacaacaaatacgccgccagctcctacctgagcctgacacctgagcagtggaagtcccacagatcctacagctgccaagtgacccacgaaggcagcaccgtggaaaagacagtggcccctacagagtgcagcatccccgaggacacattcttcccaagccccgagagcagctgcgacgtgaagctggtggaaaagagcttcgagacagacaccaacctgaacttccagaacctgctggtgatcgtgctgagaatcctgctgctgaaagtggccggctttaacctgctgatgaccctgcggctgtggtccagccgggttaagttttccagatccgcagacgcacccgcttaccaacaagggcagaaccaactctacaatgaacttaatttggggcggagggaagagtacgacgttctggacaaaaggaggggacgagatcccgagatgggcggaaagcctcagcgaaggaagaatccgcaagaggggctttataacgaactccagaaagataaaatggcagaagcctatagtgagattgggatgaagggagaaaggaggaggggtaaaggtcacgatgggttgtaccaaggattgagcacagccactaaagatacctatgatgcgctccacatgcaggccctgccgccaaga

SEQ ID NO: 24758 - DNA, 819 bp, synthetic construct
  source 1..819: mol_type = other DNA
cctaccgtgacactgttccctccaagcagcgaagaactccaggccaacaaggccacacttgtgtgcctgatctccgacttctaccctggggctgtgacagtggcttggaaggccgatggatctcctgtgaaagccggcgtggaaaccaccaagccatccaagcagagcaacaacaaatacgccgccagctcctacctgagcctgacacctgagcagtggaagtcccacagatcctacagctgccaagtgacccacgaaggcagcaccgtggaaaagacagtggcccctacagagtgcagcatccccgaggacacattcttcccaagccccgagagcagctgcgacgtgaagctggtggaaaagagcttcgagacagacaccaacctgaacttccagaacctgctggtgatcgtgctgagaatcctgctgctgaaagtggccggctttaacctgctgatgaccctgcggctgtggtccagccgggttaagttttccagatccgcagacgcacccgcttaccaacaagggcagaaccaactctacaatgaacttaatttggggcggagggaagagtacgacgttctggacaaaaggaggggacgagatcccgagatgggcggaaagcctcagcgaaggaagaatccgcaagaggggctttataacgaactccagaaagataaaatggcagaagcctatagtgagattgggatgaagggagaaaggaggaggggtaaaggtcacgatgggttgtaccaaggattgagcacagccactaaagatacctatgatgcgctccacatgcaggccctgccgccaaga

SEQ ID NO: 24759 - DNA, 816 bp, synthetic construct
  source 1..816: mol_type = other DNA
accgtgacactgttccctccaagcagcgaagaactccaggccaacaaggccacacttgtgtgcctgatctccgacttctaccctggggctgtgacagtggcttggaaggccgatggatctcctgtgaaagccggcgtggaaaccaccaagccatccaagcagagcaacaacaaatacgccgccagctcctacctgagcctgacacctgagcagtggaagtcccacagatcctacagctgccaagtgacccacgaaggcagcaccgtggaaaagacagtggcccctacagagtgcagcatccccgaggacacattcttcccaagccccgagagcagctgcgacgtgaagctggtggaaaagagcttcgagacagacaccaacctgaacttccagaacctgctggtgatcgtgctgagaatcctgctgctgaaagtggccggctttaacctgctgatgaccctgcggctgtggtccagccgggttaagttttccagatccgcagacgcacccgcttaccaacaagggcagaaccaactctacaatgaacttaatttggggcggagggaagagtacgacgttctggacaaaaggaggggacgagatcccgagatgggcggaaagcctcagcgaaggaagaatccgcaagaggggctttataacgaactccagaaagataaaatggcagaagcctatagtgagattgggatgaagggagaaaggaggaggggtaaaggtcacgatgggttgtaccaaggattgagcacagccactaaagatacctatgatgcgctccacatgcaggccctgccgccaaga

SEQ ID NO: 24760 - DNA, 813 bp, synthetic construct
  source 1..813: mol_type = other DNA
gtgacactgttccctccaagcagcgaagaactccaggccaacaaggccacacttgtgtgcctgatctccgacttctaccctggggctgtgacagtggcttggaaggccgatggatctcctgtgaaagccggcgtggaaaccaccaagccatccaagcagagcaacaacaaatacgccgccagctcctacctgagcctgacacctgagcagtggaagtcccacagatcctacagctgccaagtgacccacgaaggcagcaccgtggaaaagacagtggcccctacagagtgcagcatccccgaggacacattcttcccaagccccgagagcagctgcgacgtgaagctggtggaaaagagcttcgagacagacaccaacctgaacttccagaacctgctggtgatcgtgctgagaatcctgctgctgaaagtggccggctttaacctgctgatgaccctgcggctgtggtccagccgggttaagttttccagatccgcagacgcacccgcttaccaacaagggcagaaccaactctacaatgaacttaatttggggcggagggaagagtacgacgttctggacaaaaggaggggacgagatcccgagatgggcggaaagcctcagcgaaggaagaatccgcaagaggggctttataacgaactccagaaagataaaatggcagaagcctatagtgagattgggatgaagggagaaaggaggaggggtaaaggtcacgatgggttgtaccaaggattgagcacagccactaaagatacctatgatgcgctccacatgcaggccctgccgccaaga

SEQ ID NO: 24761 - DNA, 810 bp, synthetic construct
  source 1..810: mol_type = other DNA
acactgttccctccaagcagcgaagaactccaggccaacaaggccacacttgtgtgcctgatctccgacttctaccctggggctgtgacagtggcttggaaggccgatggatctcctgtgaaagccggcgtggaaaccaccaagccatccaagcagagcaacaacaaatacgccgccagctcctacctgagcctgacacctgagcagtggaagtcccacagatcctacagctgccaagtgacccacgaaggcagcaccgtggaaaagacagtggcccctacagagtgcagcatccccgaggacacattcttcccaagccccgagagcagctgcgacgtgaagctggtggaaaagagcttcgagacagacaccaacctgaacttccagaacctgctggtgatcgtgctgagaatcctgctgctgaaagtggccggctttaacctgctgatgaccctgcggctgtggtccagccgggttaagttttccagatccgcagacgcacccgcttaccaacaagggcagaaccaactctacaatgaacttaatttggggcggagggaagagtacgacgttctggacaaaaggaggggacgagatcccgagatgggcggaaagcctcagcgaaggaagaatccgcaagaggggctttataacgaactccagaaagataaaatggcagaagcctatagtgagattgggatgaagggagaaaggaggaggggtaaaggtcacgatgggttgtaccaaggattgagcacagccactaaagatacctatgatgcgctccacatgcaggccctgccgccaaga

SEQ ID NO: 24762 - DNA, 807 bp, synthetic construct
  source 1..807: mol_type = other DNA
ctgttccctccaagcagcgaagaactccaggccaacaaggccacacttgtgtgcctgatctccgacttctaccctggggctgtgacagtggcttggaaggccgatggatctcctgtgaaagccggcgtggaaaccaccaagccatccaagcagagcaacaacaaatacgccgccagctcctacctgagcctgacacctgagcagtggaagtcccacagatcctacagctgccaagtgacccacgaaggcagcaccgtggaaaagacagtggcccctacagagtgcagcatccccgaggacacattcttcccaagccccgagagcagctgcgacgtgaagctggtggaaaagagcttcgagacagacaccaacctgaacttccagaacctgctggtgatcgtgctgagaatcctgctgctgaaagtggccggctttaacctgctgatgaccctgcggctgtggtccagccgggttaagttttccagatccgcagacgcacccgcttaccaacaagggcagaaccaactctacaatgaacttaatttggggcggagggaagagtacgacgttctggacaaaaggaggggacgagatcccgagatgggcggaaagcctcagcgaaggaagaatccgcaagaggggctttataacgaactccagaaagataaaatggcagaagcctatagtgagattgggatgaagggagaaaggaggaggggtaaaggtcacgatgggttgtaccaaggattgagcacagccactaaagatacctatgatgcgctccacatgcaggccctgccgccaaga

SEQ ID NO: 24763 - DNA, 867 bp, synthetic construct
  source 1..867: mol_type = other DNA
gacctgaagaacgtgttcccacctgaggtggccgtgttcgagcctagcgaggccgagatcagccacacccagaaagccaccctcgtgtgcctggctaccggcttctaccccgaccatgtggaactgtcttggtgggtcaacggcaaagaggtgcacagcggcgtgtgtaccgacccccagccactgaaagaacagcccgccctgaacgacagccggtactgcctgagcagcagactgagagtgtccgccaccttctggcagaacccccggaaccacttcagatgccaggtgcagttctacggcctgagcgagaacgacgagtggacccaggacagagccaagcccgtgacccagatcgtgtctgccgaagcctggggcagagccgattgcgacgtgaagctggtggaaaagagcttcgagacagacaccaacctgaacttccagaacctgctggtgatcgtgctgagaatcctgctgctgaaagtggccggctttaacctgctgatgaccctgcggctgtggtccagccgggttaagttttccagatccgcagacgcacccgcttaccaacaagggcagaaccaactctacaatgaacttaatttggggcggagggaagagtacgacgttctggacaaaaggaggggacgagatcccgagatgggcggaaagcctcagcgaaggaagaatccgcaagaggggctttataacgaactccagaaagataaaatggcagaagcctatagtgagattgggatgaagggagaaaggaggaggggtaaaggtcacgatgggttgtaccaaggattgagcacagccactaaagatacctatgatgcgctccacatgcaggccctgccgccaaga

SEQ ID NO: 24764 - DNA, 864 bp, synthetic construct
  source 1..864: mol_type = other DNA
ctgaagaacgtgttcccacctgaggtggccgtgttcgagcctagcgaggccgagatcagccacacccagaaagccaccctcgtgtgcctggctaccggcttctaccccgaccatgtggaactgtcttggtgggtcaacggcaaagaggtgcacagcggcgtgtgtaccgacccccagccactgaaagaacagcccgccctgaacgacagccggtactgcctgagcagcagactgagagtgtccgccaccttctggcagaacccccggaaccacttcagatgccaggtgcagttctacggcctgagcgagaacgacgagtggacccaggacagagccaagcccgtgacccagatcgtgtctgccgaagcctggggcagagccgattgcgacgtgaagctggtggaaaagagcttcgagacagacaccaacctgaacttccagaacctgctggtgatcgtgctgagaatcctgctgctgaaagtggccggctttaacctgctgatgaccctgcggctgtggtccagccgggttaagttttccagatccgcagacgcacccgcttaccaacaagggcagaaccaactctacaatgaacttaatttggggcggagggaagagtacgacgttctggacaaaaggaggggacgagatcccgagatgggcggaaagcctcagcgaaggaagaatccgcaagaggggctttataacgaactccagaaagataaaatggcagaagcctatagtgagattgggatgaagggagaaaggaggaggggtaaaggtcacgatgggttgtaccaaggattgagcacagccactaaagatacctatgatgcgctccacatgcaggccctgccgccaaga

SEQ ID NO: 24765 - DNA, 861 bp, synthetic construct
  source 1..861: mol_type = other DNA
aagaacgtgttcccacctgaggtggccgtgttcgagcctagcgaggccgagatcagccacacccagaaagccaccctcgtgtgcctggctaccggcttctaccccgaccatgtggaactgtcttggtgggtcaacggcaaagaggtgcacagcggcgtgtgtaccgacccccagccactgaaagaacagcccgccctgaacgacagccggtactgcctgagcagcagactgagagtgtccgccaccttctggcagaacccccggaaccacttcagatgccaggtgcagttctacggcctgagcgagaacgacgagtggacccaggacagagccaagcccgtgacccagatcgtgtctgccgaagcctggggcagagccgattgcgacgtgaagctggtggaaaagagcttcgagacagacaccaacctgaacttccagaacctgctggtgatcgtgctgagaatcctgctgctgaaagtggccggctttaacctgctgatgaccctgcggctgtggtccagccgggttaagttttccagatccgcagacgcacccgcttaccaacaagggcagaaccaactctacaatgaacttaatttggggcggagggaagagtacgacgttctggacaaaaggaggggacgagatcccgagatgggcggaaagcctcagcgaaggaagaatccgcaagaggggctttataacgaactccagaaagataaaatggcagaagcctatagtgagattgggatgaagggagaaaggaggaggggtaaaggtcacgatgggttgtaccaaggattgagcacagccactaaagatacctatgatgcgctccacatgcaggccctgccgccaaga

SEQ ID NO: 24766 - DNA, 858 bp, synthetic construct
  source 1..858: mol_type = other DNA
aacgtgttcccacctgaggtggccgtgttcgagcctagcgaggccgagatcagccacacccagaaagccaccctcgtgtgcctggctaccggcttctaccccgaccatgtggaactgtcttggtgggtcaacggcaaagaggtgcacagcggcgtgtgtaccgacccccagccactgaaagaacagcccgccctgaacgacagccggtactgcctgagcagcagactgagagtgtccgccaccttctggcagaacccccggaaccacttcagatgccaggtgcagttctacggcctgagcgagaacgacgagtggacccaggacagagccaagcccgtgacccagatcgtgtctgccgaagcctggggcagagccgattgcgacgtgaagctggtggaaaagagcttcgagacagacaccaacctgaacttccagaacctgctggtgatcgtgctgagaatcctgctgctgaaagtggccggctttaacctgctgatgaccctgcggctgtggtccagccgggttaagttttccagatccgcagacgcacccgcttaccaacaagggcagaaccaactctacaatgaacttaatttggggcggagggaagagtacgacgttctggacaaaaggaggggacgagatcccgagatgggcggaaagcctcagcgaaggaagaatccgcaagaggggctttataacgaactccagaaagataaaatggcagaagcctatagtgagattgggatgaagggagaaaggaggaggggtaaaggtcacgatgggttgtaccaaggattgagcacagccactaaagatacctatgatgcgctccacatgcaggccctgccgccaaga

SEQ ID NO: 24767 - DNA, 855 bp, synthetic construct
  source 1..855: mol_type = other DNA
gtgttcccacctgaggtggccgtgttcgagcctagcgaggccgagatcagccacacccagaaagccaccctcgtgtgcctggctaccggcttctaccccgaccatgtggaactgtcttggtgggtcaacggcaaagaggtgcacagcggcgtgtgtaccgacccccagccactgaaagaacagcccgccctgaacgacagccggtactgcctgagcagcagactgagagtgtccgccaccttctggcagaacccccggaaccacttcagatgccaggtgcagttctacggcctgagcgagaacgacgagtggacccaggacagagccaagcccgtgacccagatcgtgtctgccgaagcctggggcagagccgattgcgacgtgaagctggtggaaaagagcttcgagacagacaccaacctgaacttccagaacctgctggtgatcgtgctgagaatcctgctgctgaaagtggccggctttaacctgctgatgaccctgcggctgtggtccagccgggttaagttttccagatccgcagacgcacccgcttaccaacaagggcagaaccaactctacaatgaacttaatttggggcggagggaagagtacgacgttctggacaaaaggaggggacgagatcccgagatgggcggaaagcctcagcgaaggaagaatccgcaagaggggctttataacgaactccagaaagataaaatggcagaagcctatagtgagattgggatgaagggagaaaggaggaggggtaaaggtcacgatgggttgtaccaaggattgagcacagccactaaagatacctatgatgcgctccacatgcaggccctgccgccaaga

SEQ ID NO: 24768 - DNA, 852 bp, synthetic construct
  source 1..852: mol_type = other DNA
ttcccacctgaggtggccgtgttcgagcctagcgaggccgagatcagccacacccagaaagccaccctcgtgtgcctggctaccggcttctaccccgaccatgtggaactgtcttggtgggtcaacggcaaagaggtgcacagcggcgtgtgtaccgacccccagccactgaaagaacagcccgccctgaacgacagccggtactgcctgagcagcagactgagagtgtccgccaccttctggcagaacccccggaaccacttcagatgccaggtgcagttctacggcctgagcgagaacgacgagtggacccaggacagagccaagcccgtgacccagatcgtgtctgccgaagcctggggcagagccgattgcgacgtgaagctggtggaaaagagcttcgagacagacaccaacctgaacttccagaacctgctggtgatcgtgctgagaatcctgctgctgaaagtggccggctttaacctgctgatgaccctgcggctgtggtccagccgggttaagttttccagatccgcagacgcacccgcttaccaacaagggcagaaccaactctacaatgaacttaatttggggcggagggaagagtacgacgttctggacaaaaggaggggacgagatcccgagatgggcggaaagcctcagcgaaggaagaatccgcaagaggggctttataacgaactccagaaagataaaatggcagaagcctatagtgagattgggatgaagggagaaaggaggaggggtaaaggtcacgatgggttgtaccaaggattgagcacagccactaaagatacctatgatgcgctccacatgcaggccctgccgccaaga

SEQ ID NO: 24769 - DNA, 849 bp, synthetic construct
  source 1..849: mol_type = other DNA
ccacctgaggtggccgtgttcgagcctagcgaggccgagatcagccacacccagaaagccaccctcgtgtgcctggctaccggcttctaccccgaccatgtggaactgtcttggtgggtcaacggcaaagaggtgcacagcggcgtgtgtaccgacccccagccactgaaagaacagcccgccctgaacgacagccggtactgcctgagcagcagactgagagtgtccgccaccttctggcagaacccccggaaccacttcagatgccaggtgcagttctacggcctgagcgagaacgacgagtggacccaggacagagccaagcccgtgacccagatcgtgtctgccgaagcctggggcagagccgattgcgacgtgaagctggtggaaaagagcttcgagacagacaccaacctgaacttccagaacctgctggtgatcgtgctgagaatcctgctgctgaaagtggccggctttaacctgctgatgaccctgcggctgtggtccagccgggttaagttttccagatccgcagacgcacccgcttaccaacaagggcagaaccaactctacaatgaacttaatttggggcggagggaagagtacgacgttctggacaaaaggaggggacgagatcccgagatgggcggaaagcctcagcgaaggaagaatccgcaagaggggctttataacgaactccagaaagataaaatggcagaagcctatagtgagattgggatgaagggagaaaggaggaggggtaaaggtcacgatgggttgtaccaaggattgagcacagccactaaagatacctatgatgcgctccacatgcaggccctgccgccaaga

SEQ ID NO: 24770 - DNA, 846 bp, synthetic construct
  source 1..846: mol_type = other DNA
cctgaggtggccgtgttcgagcctagcgaggccgagatcagccacacccagaaagccaccctcgtgtgcctggctaccggcttctaccccgaccatgtggaactgtcttggtgggtcaacggcaaagaggtgcacagcggcgtgtgtaccgacccccagccactgaaagaacagcccgccctgaacgacagccggtactgcctgagcagcagactgagagtgtccgccaccttctggcagaacccccggaaccacttcagatgccaggtgcagttctacggcctgagcgagaacgacgagtggacccaggacagagccaagcccgtgacccagatcgtgtctgccgaagcctggggcagagccgattgcgacgtgaagctggtggaaaagagcttcgagacagacaccaacctgaacttccagaacctgctggtgatcgtgctgagaatcctgctgctgaaagtggccggctttaacctgctgatgaccctgcggctgtggtccagccgggttaagttttccagatccgcagacgcacccgcttaccaacaagggcagaaccaactctacaatgaacttaatttggggcggagggaagagtacgacgttctggacaaaaggaggggacgagatcccgagatgggcggaaagcctcagcgaaggaagaatccgcaagaggggctttataacgaactccagaaagataaaatggcagaagcctatagtgagattgggatgaagggagaaaggaggaggggtaaaggtcacgatgggttgtaccaaggattgagcacagccactaaagatacctatgatgcgctccacatgcaggccctgccgccaaga

SEQ ID NO: 24771 - DNA, 843 bp, synthetic construct
  source 1..843: mol_type = other DNA
gaggtggccgtgttcgagcctagcgaggccgagatcagccacacccagaaagccaccctcgtgtgcctggctaccggcttctaccccgaccatgtggaactgtcttggtgggtcaacggcaaagaggtgcacagcggcgtgtgtaccgacccccagccactgaaagaacagcccgccctgaacgacagccggtactgcctgagcagcagactgagagtgtccgccaccttctggcagaacccccggaaccacttcagatgccaggtgcagttctacggcctgagcgagaacgacgagtggacccaggacagagccaagcccgtgacccagatcgtgtctgccgaagcctggggcagagccgattgcgacgtgaagctggtggaaaagagcttcgagacagacaccaacctgaacttccagaacctgctggtgatcgtgctgagaatcctgctgctgaaagtggccggctttaacctgctgatgaccctgcggctgtggtccagccgggttaagttttccagatccgcagacgcacccgcttaccaacaagggcagaaccaactctacaatgaacttaatttggggcggagggaagagtacgacgttctggacaaaaggaggggacgagatcccgagatgggcggaaagcctcagcgaaggaagaatccgcaagaggggctttataacgaactccagaaagataaaatggcagaagcctatagtgagattgggatgaagggagaaaggaggaggggtaaaggtcacgatgggttgtaccaaggattgagcacagccactaaagatacctatgatgcgctccacatgcaggccctgccgccaaga

SEQ ID NO: 24772 - DNA, 840 bp, synthetic construct
  source 1..840: mol_type = other DNA
gtggccgtgttcgagcctagcgaggccgagatcagccacacccagaaagccaccctcgtgtgcctggctaccggcttctaccccgaccatgtggaactgtcttggtgggtcaacggcaaagaggtgcacagcggcgtgtgtaccgacccccagccactgaaagaacagcccgccctgaacgacagccggtactgcctgagcagcagactgagagtgtccgccaccttctggcagaacccccggaaccacttcagatgccaggtgcagttctacggcctgagcgagaacgacgagtggacccaggacagagccaagcccgtgacccagatcgtgtctgccgaagcctggggcagagccgattgcgacgtgaagctggtggaaaagagcttcgagacagacaccaacctgaacttccagaacctgctggtgatcgtgctgagaatcctgctgctgaaagtggccggctttaacctgctgatgaccctgcggctgtggtccagccgggttaagttttccagatccgcagacgcacccgcttaccaacaagggcagaaccaactctacaatgaacttaatttggggcggagggaagagtacgacgttctggacaaaaggaggggacgagatcccgagatgggcggaaagcctcagcgaaggaagaatccgcaagaggggctttataacgaactccagaaagataaaatggcagaagcctatagtgagattgggatgaagggagaaaggaggaggggtaaaggtcacgatgggttgtaccaaggattgagcacagccactaaagatacctatgatgcgctccacatgcaggccctgccgccaaga

SEQ ID NO: 24773 - DNA, 837 bp, synthetic construct
  source 1..837: mol_type = other DNA
gccgtgttcgagcctagcgaggccgagatcagccacacccagaaagccaccctcgtgtgcctggctaccggcttctaccccgaccatgtggaactgtcttggtgggtcaacggcaaagaggtgcacagcggcgtgtgtaccgacccccagccactgaaagaacagcccgccctgaacgacagccggtactgcctgagcagcagactgagagtgtccgccaccttctggcagaacccccggaaccacttcagatgccaggtgcagttctacggcctgagcgagaacgacgagtggacccaggacagagccaagcccgtgacccagatcgtgtctgccgaagcctggggcagagccgattgcgacgtgaagctggtggaaaagagcttcgagacagacaccaacctgaacttccagaacctgctggtgatcgtgctgagaatcctgctgctgaaagtggccggctttaacctgctgatgaccctgcggctgtggtccagccgggttaagttttccagatccgcagacgcacccgcttaccaacaagggcagaaccaactctacaatgaacttaatttggggcggagggaagagtacgacgttctggacaaaaggaggggacgagatcccgagatgggcggaaagcctcagcgaaggaagaatccgcaagaggggctttataacgaactccagaaagataaaatggcagaagcctatagtgagattgggatgaagggagaaaggaggaggggtaaaggtcacgatgggttgtaccaaggattgagcacagccactaaagatacctatgatgcgctccacatgcaggccctgccgccaaga

SEQ ID NO: 24774 - DNA, 834 bp, synthetic construct
  source 1..834: mol_type = other DNA
gtgttcgagcctagcgaggccgagatcagccacacccagaaagccaccctcgtgtgcctggctaccggcttctaccccgaccatgtggaactgtcttggtgggtcaacggcaaagaggtgcacagcggcgtgtgtaccgacccccagccactgaaagaacagcccgccctgaacgacagccggtactgcctgagcagcagactgagagtgtccgccaccttctggcagaacccccggaaccacttcagatgccaggtgcagttctacggcctgagcgagaacgacgagtggacccaggacagagccaagcccgtgacccagatcgtgtctgccgaagcctggggcagagccgattgcgacgtgaagctggtggaaaagagcttcgagacagacaccaacctgaacttccagaacctgctggtgatcgtgctgagaatcctgctgctgaaagtggccggctttaacctgctgatgaccctgcggctgtggtccagccgggttaagttttccagatccgcagacgcacccgcttaccaacaagggcagaaccaactctacaatgaacttaatttggggcggagggaagagtacgacgttctggacaaaaggaggggacgagatcccgagatgggcggaaagcctcagcgaaggaagaatccgcaagaggggctttataacgaactccagaaagataaaatggcagaagcctatagtgagattgggatgaagggagaaaggaggaggggtaaaggtcacgatgggttgtaccaaggattgagcacagccactaaagatacctatgatgcgctccacatgcaggccctgccgccaaga

SEQ ID NO: 24775 - DNA, 831 bp, synthetic construct
  source 1..831: mol_type = other DNA
ttcgagcctagcgaggccgagatcagccacacccagaaagccaccctcgtgtgcctggctaccggcttctaccccgaccatgtggaactgtcttggtgggtcaacggcaaagaggtgcacagcggcgtgtgtaccgacccccagccactgaaagaacagcccgccctgaacgacagccggtactgcctgagcagcagactgagagtgtccgccaccttctggcagaacccccggaaccacttcagatgccaggtgcagttctacggcctgagcgagaacgacgagtggacccaggacagagccaagcccgtgacccagatcgtgtctgccgaagcctggggcagagccgattgcgacgtgaagctggtggaaaagagcttcgagacagacaccaacctgaacttccagaacctgctggtgatcgtgctgagaatcctgctgctgaaagtggccggctttaacctgctgatgaccctgcggctgtggtccagccgggttaagttttccagatccgcagacgcacccgcttaccaacaagggcagaaccaactctacaatgaacttaatttggggcggagggaagagtacgacgttctggacaaaaggaggggacgagatcccgagatgggcggaaagcctcagcgaaggaagaatccgcaagaggggctttataacgaactccagaaagataaaatggcagaagcctatagtgagattgggatgaagggagaaaggaggaggggtaaaggtcacgatgggttgtaccaaggattgagcacagccactaaagatacctatgatgcgctccacatgcaggccctgccgccaaga

SEQ ID NO: 24776 - DNA, 828 bp, synthetic construct
  source 1..828: mol_type = other DNA
gagcctagcgaggccgagatcagccacacccagaaagccaccctcgtgtgcctggctaccggcttctaccccgaccatgtggaactgtcttggtgggtcaacggcaaagaggtgcacagcggcgtgtgtaccgacccccagccactgaaagaacagcccgccctgaacgacagccggtactgcctgagcagcagactgagagtgtccgccaccttctggcagaacccccggaaccacttcagatgccaggtgcagttctacggcctgagcgagaacgacgagtggacccaggacagagccaagcccgtgacccagatcgtgtctgccgaagcctggggcagagccgattgcgacgtgaagctggtggaaaagagcttcgagacagacaccaacctgaacttccagaacctgctggtgatcgtgctgagaatcctgctgctgaaagtggccggctttaacctgctgatgaccctgcggctgtggtccagccgggttaagttttccagatccgcagacgcacccgcttaccaacaagggcagaaccaactctacaatgaacttaatttggggcggagggaagagtacgacgttctggacaaaaggaggggacgagatcccgagatgggcggaaagcctcagcgaaggaagaatccgcaagaggggctttataacgaactccagaaagataaaatggcagaagcctatagtgagattgggatgaagggagaaaggaggaggggtaaaggtcacgatgggttgtaccaaggattgagcacagccactaaagatacctatgatgcgctccacatgcaggccctgccgccaaga

SEQ ID NO: 24777 - DNA, 825 bp, synthetic construct
  source 1..825: mol_type = other DNA
cctagcgaggccgagatcagccacacccagaaagccaccctcgtgtgcctggctaccggcttctaccccgaccatgtggaactgtcttggtgggtcaacggcaaagaggtgcacagcggcgtgtgtaccgacccccagccactgaaagaacagcccgccctgaacgacagccggtactgcctgagcagcagactgagagtgtccgccaccttctggcagaacccccggaaccacttcagatgccaggtgcagttctacggcctgagcgagaacgacgagtggacccaggacagagccaagcccgtgacccagatcgtgtctgccgaagcctggggcagagccgattgcgacgtgaagctggtggaaaagagcttcgagacagacaccaacctgaacttccagaacctgctggtgatcgtgctgagaatcctgctgctgaaagtggccggctttaacctgctgatgaccctgcggctgtggtccagccgggttaagttttccagatccgcagacgcacccgcttaccaacaagggcagaaccaactctacaatgaacttaatttggggcggagggaagagtacgacgttctggacaaaaggaggggacgagatcccgagatgggcggaaagcctcagcgaaggaagaatccgcaagaggggctttataacgaactccagaaagataaaatggcagaagcctatagtgagattgggatgaagggagaaaggaggaggggtaaaggtcacgatgggttgtaccaaggattgagcacagccactaaagatacctatgatgcgctccacatgcaggccctgccgccaaga

SEQ ID NO: 24778 - DNA, 822 bp, synthetic construct
  source 1..822: mol_type = other DNA
agcgaggccgagatcagccacacccagaaagccaccctcgtgtgcctggctaccggcttctaccccgaccatgtggaactgtcttggtgggtcaacggcaaagaggtgcacagcggcgtgtgtaccgacccccagccactgaaagaacagcccgccctgaacgacagccggtactgcctgagcagcagactgagagtgtccgccaccttctggcagaacccccggaaccacttcagatgccaggtgcagttctacggcctgagcgagaacgacgagtggacccaggacagagccaagcccgtgacccagatcgtgtctgccgaagcctggggcagagccgattgcgacgtgaagctggtggaaaagagcttcgagacagacaccaacctgaacttccagaacctgctggtgatcgtgctgagaatcctgctgctgaaagtggccggctttaacctgctgatgaccctgcggctgtggtccagccgggttaagttttccagatccgcagacgcacccgcttaccaacaagggcagaaccaactctacaatgaacttaatttggggcggagggaagagtacgacgttctggacaaaaggaggggacgagatcccgagatgggcggaaagcctcagcgaaggaagaatccgcaagaggggctttataacgaactccagaaagataaaatggcagaagcctatagtgagattgggatgaagggagaaaggaggaggggtaaaggtcacgatgggttgtaccaaggattgagcacagccactaaagatacctatgatgcgctccacatgcaggccctgccgccaaga

SEQ ID NO: 24779 - DNA, 819 bp, synthetic construct
  source 1..819: mol_type = other DNA
gaggccgagatcagccacacccagaaagccaccctcgtgtgcctggctaccggcttctaccccgaccatgtggaactgtcttggtgggtcaacggcaaagaggtgcacagcggcgtgtgtaccgacccccagccactgaaagaacagcccgccctgaacgacagccggtactgcctgagcagcagactgagagtgtccgccaccttctggcagaacccccggaaccacttcagatgccaggtgcagttctacggcctgagcgagaacgacgagtggacccaggacagagccaagcccgtgacccagatcgtgtctgccgaagcctggggcagagccgattgcgacgtgaagctggtggaaaagagcttcgagacagacaccaacctgaacttccagaacctgctggtgatcgtgctgagaatcctgctgctgaaagtggccggctttaacctgctgatgaccctgcggctgtggtccagccgggttaagttttccagatccgcagacgcacccgcttaccaacaagggcagaaccaactctacaatgaacttaatttggggcggagggaagagtacgacgttctggacaaaaggaggggacgagatcccgagatgggcggaaagcctcagcgaaggaagaatccgcaagaggggctttataacgaactccagaaagataaaatggcagaagcctatagtgagattgggatgaagggagaaaggaggaggggtaaaggtcacgatgggttgtaccaaggattgagcacagccactaaagatacctatgatgcgctccacatgcaggccctgccgccaaga

SEQ ID NO: 24780 - DNA, 816 bp, synthetic construct
  source 1..816: mol_type = other DNA
gccgagatcagccacacccagaaagccaccctcgtgtgcctggctaccggcttctaccccgaccatgtggaactgtcttggtgggtcaacggcaaagaggtgcacagcggcgtgtgtaccgacccccagccactgaaagaacagcccgccctgaacgacagccggtactgcctgagcagcagactgagagtgtccgccaccttctggcagaacccccggaaccacttcagatgccaggtgcagttctacggcctgagcgagaacgacgagtggacccaggacagagccaagcccgtgacccagatcgtgtctgccgaagcctggggcagagccgattgcgacgtgaagctggtggaaaagagcttcgagacagacaccaacctgaacttccagaacctgctggtgatcgtgctgagaatcctgctgctgaaagtggccggctttaacctgctgatgaccctgcggctgtggtccagccgggttaagttttccagatccgcagacgcacccgcttaccaacaagggcagaaccaactctacaatgaacttaatttggggcggagggaagagtacgacgttctggacaaaaggaggggacgagatcccgagatgggcggaaagcctcagcgaaggaagaatccgcaagaggggctttataacgaactccagaaagataaaatggcagaagcctatagtgagattgggatgaagggagaaaggaggaggggtaaaggtcacgatgggttgtaccaaggattgagcacagccactaaagatacctatgatgcgctccacatgcaggccctgccgccaaga

SEQ ID NO: 24781 - DNA, 813 bp, synthetic construct
  source 1..813: mol_type = other DNA
gagatcagccacacccagaaagccaccctcgtgtgcctggctaccggcttctaccccgaccatgtggaactgtcttggtgggtcaacggcaaagaggtgcacagcggcgtgtgtaccgacccccagccactgaaagaacagcccgccctgaacgacagccggtactgcctgagcagcagactgagagtgtccgccaccttctggcagaacccccggaaccacttcagatgccaggtgcagttctacggcctgagcgagaacgacgagtggacccaggacagagccaagcccgtgacccagatcgtgtctgccgaagcctggggcagagccgattgcgacgtgaagctggtggaaaagagcttcgagacagacaccaacctgaacttccagaacctgctggtgatcgtgctgagaatcctgctgctgaaagtggccggctttaacctgctgatgaccctgcggctgtggtccagccgggttaagttttccagatccgcagacgcacccgcttaccaacaagggcagaaccaactctacaatgaacttaatttggggcggagggaagagtacgacgttctggacaaaaggaggggacgagatcccgagatgggcggaaagcctcagcgaaggaagaatccgcaagaggggctttataacgaactccagaaagataaaatggcagaagcctatagtgagattgggatgaagggagaaaggaggaggggtaaaggtcacgatgggttgtaccaaggattgagcacagccactaaagatacctatgatgcgctccacatgcaggccctgccgccaaga

SEQ ID NO: 24782 - DNA, 810 bp, synthetic construct
  source 1..810: mol_type = other DNA
atcagccacacccagaaagccaccctcgtgtgcctggctaccggcttctaccccgaccatgtggaactgtcttggtgggtcaacggcaaagaggtgcacagcggcgtgtgtaccgacccccagccactgaaagaacagcccgccctgaacgacagccggtactgcctgagcagcagactgagagtgtccgccaccttctggcagaacccccggaaccacttcagatgccaggtgcagttctacggcctgagcgagaacgacgagtggacccaggacagagccaagcccgtgacccagatcgtgtctgccgaagcctggggcagagccgattgcgacgtgaagctggtggaaaagagcttcgagacagacaccaacctgaacttccagaacctgctggtgatcgtgctgagaatcctgctgctgaaagtggccggctttaacctgctgatgaccctgcggctgtggtccagccgggttaagttttccagatccgcagacgcacccgcttaccaacaagggcagaaccaactctacaatgaacttaatttggggcggagggaagagtacgacgttctggacaaaaggaggggacgagatcccgagatgggcggaaagcctcagcgaaggaagaatccgcaagaggggctttataacgaactccagaaagataaaatggcagaagcctatagtgagattgggatgaagggagaaaggaggaggggtaaaggtcacgatgggttgtaccaaggattgagcacagccactaaagatacctatgatgcgctccacatgcaggccctgccgccaaga

SEQ ID NO: 24783 - DNA, 807 bp, synthetic construct
  source 1..807: mol_type = other DNA
agccacacccagaaagccaccctcgtgtgcctggctaccggcttctaccccgaccatgtggaactgtcttggtgggtcaacggcaaagaggtgcacagcggcgtgtgtaccgacccccagccactgaaagaacagcccgccctgaacgacagccggtactgcctgagcagcagactgagagtgtccgccaccttctggcagaacccccggaaccacttcagatgccaggtgcagttctacggcctgagcgagaacgacgagtggacccaggacagagccaagcccgtgacccagatcgtgtctgccgaagcctggggcagagccgattgcgacgtgaagctggtggaaaagagcttcgagacagacaccaacctgaacttccagaacctgctggtgatcgtgctgagaatcctgctgctgaaagtggccggctttaacctgctgatgaccctgcggctgtggtccagccgggttaagttttccagatccgcagacgcacccgcttaccaacaagggcagaaccaactctacaatgaacttaatttggggcggagggaagagtacgacgttctggacaaaaggaggggacgagatcccgagatgggcggaaagcctcagcgaaggaagaatccgcaagaggggctttataacgaactccagaaagataaaatggcagaagcctatagtgagattgggatgaagggagaaaggaggaggggtaaaggtcacgatgggttgtaccaaggattgagcacagccactaaagatacctatgatgcgctccacatgcaggccctgccgccaaga

SEQ ID NO: 24784 - DNA, 792 bp, synthetic construct
  source 1..792: mol_type = other DNA
gccaccctcgtgtgcctggctaccggcttctaccccgaccatgtggaactgtcttggtgggtcaacggcaaagaggtgcacagcggcgtgtgtaccgacccccagccactgaaagaacagcccgccctgaacgacagccggtactgcctgagcagcagactgagagtgtccgccaccttctggcagaacccccggaaccacttcagatgccaggtgcagttctacggcctgagcgagaacgacgagtggacccaggacagagccaagcccgtgacccagatcgtgtctgccgaagcctggggcagagccgattgcgacgtgaagctggtggaaaagagcttcgagacagacaccaacctgaacttccagaacctgctggtgatcgtgctgagaatcctgctgctgaaagtggccggctttaacctgctgatgaccctgcggctgtggtccagccgggttaagttttccagatccgcagacgcacccgcttaccaacaagggcagaaccaactctacaatgaacttaatttggggcggagggaagagtacgacgttctggacaaaaggaggggacgagatcccgagatgggcggaaagcctcagcgaaggaagaatccgcaagaggggctttataacgaactccagaaagataaaatggcagaagcctatagtgagattgggatgaagggagaaaggaggaggggtaaaggtcacgatgggttgtaccaaggattgagcacagccactaaagatacctatgatgcgctccacatgcaggccctgccgccaaga

SEQ ID NO: 24785 - DNA, 777 bp, synthetic construct
  source 1..777: mol_type = other DNA
ctggctaccggcttctaccccgaccatgtggaactgtcttggtgggtcaacggcaaagaggtgcacagcggcgtgtgtaccgacccccagccactgaaagaacagcccgccctgaacgacagccggtactgcctgagcagcagactgagagtgtccgccaccttctggcagaacccccggaaccacttcagatgccaggtgcagttctacggcctgagcgagaacgacgagtggacccaggacagagccaagcccgtgacccagatcgtgtctgccgaagcctggggcagagccgattgcgacgtgaagctggtggaaaagagcttcgagacagacaccaacctgaacttccagaacctgctggtgatcgtgctgagaatcctgctgctgaaagtggccggctttaacctgctgatgaccctgcggctgtggtccagccgggttaagttttccagatccgcagacgcacccgcttaccaacaagggcagaaccaactctacaatgaacttaatttggggcggagggaagagtacgacgttctggacaaaaggaggggacgagatcccgagatgggcggaaagcctcagcgaaggaagaatccgcaagaggggctttataacgaactccagaaagataaaatggcagaagcctatagtgagattgggatgaagggagaaaggaggaggggtaaaggtcacgatgggttgtaccaaggattgagcacagccactaaagatacctatgatgcgctccacatgcaggccctgccgccaaga

SEQ ID NO: 24786 - DNA, 858 bp, synthetic construct
  source 1..858: mol_type = other DNA
gacctgaagaacgtgttcccacctgaggtggccgtgttcgagcctagcgaggccgagatcagccacacccagaaagccaccctcgtgtgcctggctaccggcttctaccccgaccatgtggaactgtcttggtgggtcaacggcaaagaggtgcacagcggcgtgtgtaccgacccccagccactgaaagaacagcccgccctgaacgacagccggtactgcctgagcagcagactgagagtgtccgccaccttctggcagaacccccggaaccacttcagatgccaggtgcagttctacggcctgagcgagaacgacgagtggacccaggacagagccaagcccgtgacccagatcgtgtctgccgaagcctggggcagagccgattgcggctttaccagcgagagctaccagcagggcgtgctgagcgccaccaacctgctggtgatcgtgctgagaatcctgctgctgaaagtggccggctttaacctgctgatgaccctgcggctgtggtccagccgggttaagttttccagatccgcagacgcacccgcttaccaacaagggcagaaccaactctacaatgaacttaatttggggcggagggaagagtacgacgttctggacaaaaggaggggacgagatcccgagatgggcggaaagcctcagcgaaggaagaatccgcaagaggggctttataacgaactccagaaagataaaatggcagaagcctatagtgagattgggatgaagggagaaaggaggaggggtaaaggtcacgatgggttgtaccaaggattgagcacagccactaaagatacctatgatgcgctccacatgcaggccctgccgccaaga

SEQ ID NO: 24787 - DNA, 855 bp, synthetic construct
  source 1..855: mol_type = other DNA
ctgaagaacgtgttcccacctgaggtggccgtgttcgagcctagcgaggccgagatcagccacacccagaaagccaccctcgtgtgcctggctaccggcttctaccccgaccatgtggaactgtcttggtgggtcaacggcaaagaggtgcacagcggcgtgtgtaccgacccccagccactgaaagaacagcccgccctgaacgacagccggtactgcctgagcagcagactgagagtgtccgccaccttctggcagaacccccggaaccacttcagatgccaggtgcagttctacggcctgagcgagaacgacgagtggacccaggacagagccaagcccgtgacccagatcgtgtctgccgaagcctggggcagagccgattgcggctttaccagcgagagctaccagcagggcgtgctgagcgccaccaacctgctggtgatcgtgctgagaatcctgctgctgaaagtggccggctttaacctgctgatgaccctgcggctgtggtccagccgggttaagttttccagatccgcagacgcacccgcttaccaacaagggcagaaccaactctacaatgaacttaatttggggcggagggaagagtacgacgttctggacaaaaggaggggacgagatcccgagatgggcggaaagcctcagcgaaggaagaatccgcaagaggggctttataacgaactccagaaagataaaatggcagaagcctatagtgagattgggatgaagggagaaaggaggaggggtaaaggtcacgatgggttgtaccaaggattgagcacagccactaaagatacctatgatgcgctccacatgcaggccctgccgccaaga

SEQ ID NO: 24788 - DNA, 852 bp, synthetic construct
  source 1..852: mol_type = other DNA
aagaacgtgttcccacctgaggtggccgtgttcgagcctagcgaggccgagatcagccacacccagaaagccaccctcgtgtgcctggctaccggcttctaccccgaccatgtggaactgtcttggtgggtcaacggcaaagaggtgcacagcggcgtgtgtaccgacccccagccactgaaagaacagcccgccctgaacgacagccggtactgcctgagcagcagactgagagtgtccgccaccttctggcagaacccccggaaccacttcagatgccaggtgcagttctacggcctgagcgagaacgacgagtggacccaggacagagccaagcccgtgacccagatcgtgtctgccgaagcctggggcagagccgattgcggctttaccagcgagagctaccagcagggcgtgctgagcgccaccaacctgctggtgatcgtgctgagaatcctgctgctgaaagtggccggctttaacctgctgatgaccctgcggctgtggtccagccgggttaagttttccagatccgcagacgcacccgcttaccaacaagggcagaaccaactctacaatgaacttaatttggggcggagggaagagtacgacgttctggacaaaaggaggggacgagatcccgagatgggcggaaagcctcagcgaaggaagaatccgcaagaggggctttataacgaactccagaaagataaaatggcagaagcctatagtgagattgggatgaagggagaaaggaggaggggtaaaggtcacgatgggttgtaccaaggattgagcacagccactaaagatacctatgatgcgctccacatgcaggccctgccgccaaga

SEQ ID NO: 24789 - DNA, 849 bp, synthetic construct
  source 1..849: mol_type = other DNA
aacgtgttcccacctgaggtggccgtgttcgagcctagcgaggccgagatcagccacacccagaaagccaccctcgtgtgcctggctaccggcttctaccccgaccatgtggaactgtcttggtgggtcaacggcaaagaggtgcacagcggcgtgtgtaccgacccccagccactgaaagaacagcccgccctgaacgacagccggtactgcctgagcagcagactgagagtgtccgccaccttctggcagaacccccggaaccacttcagatgccaggtgcagttctacggcctgagcgagaacgacgagtggacccaggacagagccaagcccgtgacccagatcgtgtctgccgaagcctggggcagagccgattgcggctttaccagcgagagctaccagcagggcgtgctgagcgccaccaacctgctggtgatcgtgctgagaatcctgctgctgaaagtggccggctttaacctgctgatgaccctgcggctgtggtccagccgggttaagttttccagatccgcagacgcacccgcttaccaacaagggcagaaccaactctacaatgaacttaatttggggcggagggaagagtacgacgttctggacaaaaggaggggacgagatcccgagatgggcggaaagcctcagcgaaggaagaatccgcaagaggggctttataacgaactccagaaagataaaatggcagaagcctatagtgagattgggatgaagggagaaaggaggaggggtaaaggtcacgatgggttgtaccaaggattgagcacagccactaaagatacctatgatgcgctccacatgcaggccctgccgccaaga

SEQ ID NO: 24790 - DNA, 846 bp, synthetic construct
  source 1..846: mol_type = other DNA
gtgttcccacctgaggtggccgtgttcgagcctagcgaggccgagatcagccacacccagaaagccaccctcgtgtgcctggctaccggcttctaccccgaccatgtggaactgtcttggtgggtcaacggcaaagaggtgcacagcggcgtgtgtaccgacccccagccactgaaagaacagcccgccctgaacgacagccggtactgcctgagcagcagactgagagtgtccgccaccttctggcagaacccccggaaccacttcagatgccaggtgcagttctacggcctgagcgagaacgacgagtggacccaggacagagccaagcccgtgacccagatcgtgtctgccgaagcctggggcagagccgattgcggctttaccagcgagagctaccagcagggcgtgctgagcgccaccaacctgctggtgatcgtgctgagaatcctgctgctgaaagtggccggctttaacctgctgatgaccctgcggctgtggtccagccgggttaagttttccagatccgcagacgcacccgcttaccaacaagggcagaaccaactctacaatgaacttaatttggggcggagggaagagtacgacgttctggacaaaaggaggggacgagatcccgagatgggcggaaagcctcagcgaaggaagaatccgcaagaggggctttataacgaactccagaaagataaaatggcagaagcctatagtgagattgggatgaagggagaaaggaggaggggtaaaggtcacgatgggttgtaccaaggattgagcacagccactaaagatacctatgatgcgctccacatgcaggccctgccgccaaga

SEQ ID NO: 24791 - DNA, 843 bp, synthetic construct
  source 1..843: mol_type = other DNA
ttcccacctgaggtggccgtgttcgagcctagcgaggccgagatcagccacacccagaaagccaccctcgtgtgcctggctaccggcttctaccccgaccatgtggaactgtcttggtgggtcaacggcaaagaggtgcacagcggcgtgtgtaccgacccccagccactgaaagaacagcccgccctgaacgacagccggtactgcctgagcagcagactgagagtgtccgccaccttctggcagaacccccggaaccacttcagatgccaggtgcagttctacggcctgagcgagaacgacgagtggacccaggacagagccaagcccgtgacccagatcgtgtctgccgaagcctggggcagagccgattgcggctttaccagcgagagctaccagcagggcgtgctgagcgccaccaacctgctggtgatcgtgctgagaatcctgctgctgaaagtggccggctttaacctgctgatgaccctgcggctgtggtccagccgggttaagttttccagatccgcagacgcacccgcttaccaacaagggcagaaccaactctacaatgaacttaatttggggcggagggaagagtacgacgttctggacaaaaggaggggacgagatcccgagatgggcggaaagcctcagcgaaggaagaatccgcaagaggggctttataacgaactccagaaagataaaatggcagaagcctatagtgagattgggatgaagggagaaaggaggaggggtaaaggtcacgatgggttgtaccaaggattgagcacagccactaaagatacctatgatgcgctccacatgcaggccctgccgccaaga

SEQ ID NO: 24792 - DNA, 840 bp, synthetic construct
  source 1..840: mol_type = other DNA
ccacctgaggtggccgtgttcgagcctagcgaggccgagatcagccacacccagaaagccaccctcgtgtgcctggctaccggcttctaccccgaccatgtggaactgtcttggtgggtcaacggcaaagaggtgcacagcggcgtgtgtaccgacccccagccactgaaagaacagcccgccctgaacgacagccggtactgcctgagcagcagactgagagtgtccgccaccttctggcagaacccccggaaccacttcagatgccaggtgcagttctacggcctgagcgagaacgacgagtggacccaggacagagccaagcccgtgacccagatcgtgtctgccgaagcctggggcagagccgattgcggctttaccagcgagagctaccagcagggcgtgctgagcgccaccaacctgctggtgatcgtgctgagaatcctgctgctgaaagtggccggctttaacctgctgatgaccctgcggctgtggtccagccgggttaagttttccagatccgcagacgcacccgcttaccaacaagggcagaaccaactctacaatgaacttaatttggggcggagggaagagtacgacgttctggacaaaaggaggggacgagatcccgagatgggcggaaagcctcagcgaaggaagaatccgcaagaggggctttataacgaactccagaaagataaaatggcagaagcctatagtgagattgggatgaagggagaaaggaggaggggtaaaggtcacgatgggttgtaccaaggattgagcacagccactaaagatacctatgatgcgctccacatgcaggccctgccgccaaga

SEQ ID NO: 24793 - DNA, 837 bp, synthetic construct
  source 1..837: mol_type = other DNA
cctgaggtggccgtgttcgagcctagcgaggccgagatcagccacacccagaaagccaccctcgtgtgcctggctaccggcttctaccccgaccatgtggaactgtcttggtgggtcaacggcaaagaggtgcacagcggcgtgtgtaccgacccccagccactgaaagaacagcccgccctgaacgacagccggtactgcctgagcagcagactgagagtgtccgccaccttctggcagaacccccggaaccacttcagatgccaggtgcagttctacggcctgagcgagaacgacgagtggacccaggacagagccaagcccgtgacccagatcgtgtctgccgaagcctggggcagagccgattgcggctttaccagcgagagctaccagcagggcgtgctgagcgccaccaacctgctggtgatcgtgctgagaatcctgctgctgaaagtggccggctttaacctgctgatgaccctgcggctgtggtccagccgggttaagttttccagatccgcagacgcacccgcttaccaacaagggcagaaccaactctacaatgaacttaatttggggcggagggaagagtacgacgttctggacaaaaggaggggacgagatcccgagatgggcggaaagcctcagcgaaggaagaatccgcaagaggggctttataacgaactccagaaagataaaatggcagaagcctatagtgagattgggatgaagggagaaaggaggaggggtaaaggtcacgatgggttgtaccaaggattgagcacagccactaaagatacctatgatgcgctccacatgcaggccctgccgccaaga

SEQ ID NO: 24794 - DNA, 834 bp, synthetic construct
  source 1..834: mol_type = other DNA
gaggtggccgtgttcgagcctagcgaggccgagatcagccacacccagaaagccaccctcgtgtgcctggctaccggcttctaccccgaccatgtggaactgtcttggtgggtcaacggcaaagaggtgcacagcggcgtgtgtaccgacccccagccactgaaagaacagcccgccctgaacgacagccggtactgcctgagcagcagactgagagtgtccgccaccttctggcagaacccccggaaccacttcagatgccaggtgcagttctacggcctgagcgagaacgacgagtggacccaggacagagccaagcccgtgacccagatcgtgtctgccgaagcctggggcagagccgattgcggctttaccagcgagagctaccagcagggcgtgctgagcgccaccaacctgctggtgatcgtgctgagaatcctgctgctgaaagtggccggctttaacctgctgatgaccctgcggctgtggtccagccgggttaagttttccagatccgcagacgcacccgcttaccaacaagggcagaaccaactctacaatgaacttaatttggggcggagggaagagtacgacgttctggacaaaaggaggggacgagatcccgagatgggcggaaagcctcagcgaaggaagaatccgcaagaggggctttataacgaactccagaaagataaaatggcagaagcctatagtgagattgggatgaagggagaaaggaggaggggtaaaggtcacgatgggttgtaccaaggattgagcacagccactaaagatacctatgatgcgctccacatgcaggccctgccgccaaga

SEQ ID NO: 24795 - DNA, 831 bp, synthetic construct
  source 1..831: mol_type = other DNA
gtggccgtgttcgagcctagcgaggccgagatcagccacacccagaaagccaccctcgtgtgcctggctaccggcttctaccccgaccatgtggaactgtcttggtgggtcaacggcaaagaggtgcacagcggcgtgtgtaccgacccccagccactgaaagaacagcccgccctgaacgacagccggtactgcctgagcagcagactgagagtgtccgccaccttctggcagaacccccggaaccacttcagatgccaggtgcagttctacggcctgagcgagaacgacgagtggacccaggacagagccaagcccgtgacccagatcgtgtctgccgaagcctggggcagagccgattgcggctttaccagcgagagctaccagcagggcgtgctgagcgccaccaacctgctggtgatcgtgctgagaatcctgctgctgaaagtggccggctttaacctgctgatgaccctgcggctgtggtccagccgggttaagttttccagatccgcagacgcacccgcttaccaacaagggcagaaccaactctacaatgaacttaatttggggcggagggaagagtacgacgttctggacaaaaggaggggacgagatcccgagatgggcggaaagcctcagcgaaggaagaatccgcaagaggggctttataacgaactccagaaagataaaatggcagaagcctatagtgagattgggatgaagggagaaaggaggaggggtaaaggtcacgatgggttgtaccaaggattgagcacagccactaaagatacctatgatgcgctccacatgcaggccctgccgccaaga

SEQ ID NO: 24796 - DNA, 828 bp, synthetic construct
  source 1..828: mol_type = other DNA
gccgtgttcgagcctagcgaggccgagatcagccacacccagaaagccaccctcgtgtgcctggctaccggcttctaccccgaccatgtggaactgtcttggtgggtcaacggcaaagaggtgcacagcggcgtgtgtaccgacccccagccactgaaagaacagcccgccctgaacgacagccggtactgcctgagcagcagactgagagtgtccgccaccttctggcagaacccccggaaccacttcagatgccaggtgcagttctacggcctgagcgagaacgacgagtggacccaggacagagccaagcccgtgacccagatcgtgtctgccgaagcctggggcagagccgattgcggctttaccagcgagagctaccagcagggcgtgctgagcgccaccaacctgctggtgatcgtgctgagaatcctgctgctgaaagtggccggctttaacctgctgatgaccctgcggctgtggtccagccgggttaagttttccagatccgcagacgcacccgcttaccaacaagggcagaaccaactctacaatgaacttaatttggggcggagggaagagtacgacgttctggacaaaaggaggggacgagatcccgagatgggcggaaagcctcagcgaaggaagaatccgcaagaggggctttataacgaactccagaaagataaaatggcagaagcctatagtgagattgggatgaagggagaaaggaggaggggtaaaggtcacgatgggttgtaccaaggattgagcacagccactaaagatacctatgatgcgctccacatgcaggccctgccgccaaga

SEQ ID NO: 24797 - DNA, 825 bp, synthetic construct
  source 1..825: mol_type = other DNA
gtgttcgagcctagcgaggccgagatcagccacacccagaaagccaccctcgtgtgcctggctaccggcttctaccccgaccatgtggaactgtcttggtgggtcaacggcaaagaggtgcacagcggcgtgtgtaccgacccccagccactgaaagaacagcccgccctgaacgacagccggtactgcctgagcagcagactgagagtgtccgccaccttctggcagaacccccggaaccacttcagatgccaggtgcagttctacggcctgagcgagaacgacgagtggacccaggacagagccaagcccgtgacccagatcgtgtctgccgaagcctggggcagagccgattgcggctttaccagcgagagctaccagcagggcgtgctgagcgccaccaacctgctggtgatcgtgctgagaatcctgctgctgaaagtggccggctttaacctgctgatgaccctgcggctgtggtccagccgggttaagttttccagatccgcagacgcacccgcttaccaacaagggcagaaccaactctacaatgaacttaatttggggcggagggaagagtacgacgttctggacaaaaggaggggacgagatcccgagatgggcggaaagcctcagcgaaggaagaatccgcaagaggggctttataacgaactccagaaagataaaatggcagaagcctatagtgagattgggatgaagggagaaaggaggaggggtaaaggtcacgatgggttgtaccaaggattgagcacagccactaaagatacctatgatgcgctccacatgcaggccctgccgccaaga

SEQ ID NO: 24798 - DNA, 822 bp, synthetic construct
  source 1..822: mol_type = other DNA
ttcgagcctagcgaggccgagatcagccacacccagaaagccaccctcgtgtgcctggctaccggcttctaccccgaccatgtggaactgtcttggtgggtcaacggcaaagaggtgcacagcggcgtgtgtaccgacccccagccactgaaagaacagcccgccctgaacgacagccggtactgcctgagcagcagactgagagtgtccgccaccttctggcagaacccccggaaccacttcagatgccaggtgcagttctacggcctgagcgagaacgacgagtggacccaggacagagccaagcccgtgacccagatcgtgtctgccgaagcctggggcagagccgattgcggctttaccagcgagagctaccagcagggcgtgctgagcgccaccaacctgctggtgatcgtgctgagaatcctgctgctgaaagtggccggctttaacctgctgatgaccctgcggctgtggtccagccgggttaagttttccagatccgcagacgcacccgcttaccaacaagggcagaaccaactctacaatgaacttaatttggggcggagggaagagtacgacgttctggacaaaaggaggggacgagatcccgagatgggcggaaagcctcagcgaaggaagaatccgcaagaggggctttataacgaactccagaaagataaaatggcagaagcctatagtgagattgggatgaagggagaaaggaggaggggtaaaggtcacgatgggttgtaccaaggattgagcacagccactaaagatacctatgatgcgctccacatgcaggccctgccgccaaga

SEQ ID NO: 24799 - DNA, 819 bp, synthetic construct
  source 1..819: mol_type = other DNA
gagcctagcgaggccgagatcagccacacccagaaagccaccctcgtgtgcctggctaccggcttctaccccgaccatgtggaactgtcttggtgggtcaacggcaaagaggtgcacagcggcgtgtgtaccgacccccagccactgaaagaacagcccgccctgaacgacagccggtactgcctgagcagcagactgagagtgtccgccaccttctggcagaacccccggaaccacttcagatgccaggtgcagttctacggcctgagcgagaacgacgagtggacccaggacagagccaagcccgtgacccagatcgtgtctgccgaagcctggggcagagccgattgcggctttaccagcgagagctaccagcagggcgtgctgagcgccaccaacctgctggtgatcgtgctgagaatcctgctgctgaaagtggccggctttaacctgctgatgaccctgcggctgtggtccagccgggttaagttttccagatccgcagacgcacccgcttaccaacaagggcagaaccaactctacaatgaacttaatttggggcggagggaagagtacgacgttctggacaaaaggaggggacgagatcccgagatgggcggaaagcctcagcgaaggaagaatccgcaagaggggctttataacgaactccagaaagataaaatggcagaagcctatagtgagattgggatgaagggagaaaggaggaggggtaaaggtcacgatgggttgtaccaaggattgagcacagccactaaagatacctatgatgcgctccacatgcaggccctgccgccaaga

SEQ ID NO: 24800 - DNA, 816 bp, synthetic construct
  source 1..816: mol_type = other DNA
cctagcgaggccgagatcagccacacccagaaagccaccctcgtgtgcctggctaccggcttctaccccgaccatgtggaactgtcttggtgggtcaacggcaaagaggtgcacagcggcgtgtgtaccgacccccagccactgaaagaacagcccgccctgaacgacagccggtactgcctgagcagcagactgagagtgtccgccaccttctggcagaacccccggaaccacttcagatgccaggtgcagttctacggcctgagcgagaacgacgagtggacccaggacagagccaagcccgtgacccagatcgtgtctgccgaagcctggggcagagccgattgcggctttaccagcgagagctaccagcagggcgtgctgagcgccaccaacctgctggtgatcgtgctgagaatcctgctgctgaaagtggccggctttaacctgctgatgaccctgcggctgtggtccagccgggttaagttttccagatccgcagacgcacccgcttaccaacaagggcagaaccaactctacaatgaacttaatttggggcggagggaagagtacgacgttctggacaaaaggaggggacgagatcccgagatgggcggaaagcctcagcgaaggaagaatccgcaagaggggctttataacgaactccagaaagataaaatggcagaagcctatagtgagattgggatgaagggagaaaggaggaggggtaaaggtcacgatgggttgtaccaaggattgagcacagccactaaagatacctatgatgcgctccacatgcaggccctgccgccaaga

SEQ ID NO: 24801 - DNA, 813 bp, synthetic construct
  source 1..813: mol_type = other DNA
agcgaggccgagatcagccacacccagaaagccaccctcgtgtgcctggctaccggcttctaccccgaccatgtggaactgtcttggtgggtcaacggcaaagaggtgcacagcggcgtgtgtaccgacccccagccactgaaagaacagcccgccctgaacgacagccggtactgcctgagcagcagactgagagtgtccgccaccttctggcagaacccccggaaccacttcagatgccaggtgcagttctacggcctgagcgagaacgacgagtggacccaggacagagccaagcccgtgacccagatcgtgtctgccgaagcctggggcagagccgattgcggctttaccagcgagagctaccagcagggcgtgctgagcgccaccaacctgctggtgatcgtgctgagaatcctgctgctgaaagtggccggctttaacctgctgatgaccctgcggctgtggtccagccgggttaagttttccagatccgcagacgcacccgcttaccaacaagggcagaaccaactctacaatgaacttaatttggggcggagggaagagtacgacgttctggacaaaaggaggggacgagatcccgagatgggcggaaagcctcagcgaaggaagaatccgcaagaggggctttataacgaactccagaaagataaaatggcagaagcctatagtgagattgggatgaagggagaaaggaggaggggtaaaggtcacgatgggttgtaccaaggattgagcacagccactaaagatacctatgatgcgctccacatgcaggccctgccgccaaga

SEQ ID NO: 24802 - DNA, 810 bp, synthetic construct
  source 1..810: mol_type = other DNA
gaggccgagatcagccacacccagaaagccaccctcgtgtgcctggctaccggcttctaccccgaccatgtggaactgtcttggtgggtcaacggcaaagaggtgcacagcggcgtgtgtaccgacccccagccactgaaagaacagcccgccctgaacgacagccggtactgcctgagcagcagactgagagtgtccgccaccttctggcagaacccccggaaccacttcagatgccaggtgcagttctacggcctgagcgagaacgacgagtggacccaggacagagccaagcccgtgacccagatcgtgtctgccgaagcctggggcagagccgattgcggctttaccagcgagagctaccagcagggcgtgctgagcgccaccaacctgctggtgatcgtgctgagaatcctgctgctgaaagtggccggctttaacctgctgatgaccctgcggctgtggtccagccgggttaagttttccagatccgcagacgcacccgcttaccaacaagggcagaaccaactctacaatgaacttaatttggggcggagggaagagtacgacgttctggacaaaaggaggggacgagatcccgagatgggcggaaagcctcagcgaaggaagaatccgcaagaggggctttataacgaactccagaaagataaaatggcagaagcctatagtgagattgggatgaagggagaaaggaggaggggtaaaggtcacgatgggttgtaccaaggattgagcacagccactaaagatacctatgatgcgctccacatgcaggccctgccgccaaga

SEQ ID NO: 24803 - DNA, 807 bp, synthetic construct
  source 1..807: mol_type = other DNA
gccgagatcagccacacccagaaagccaccctcgtgtgcctggctaccggcttctaccccgaccatgtggaactgtcttggtgggtcaacggcaaagaggtgcacagcggcgtgtgtaccgacccccagccactgaaagaacagcccgccctgaacgacagccggtactgcctgagcagcagactgagagtgtccgccaccttctggcagaacccccggaaccacttcagatgccaggtgcagttctacggcctgagcgagaacgacgagtggacccaggacagagccaagcccgtgacccagatcgtgtctgccgaagcctggggcagagccgattgcggctttaccagcgagagctaccagcagggcgtgctgagcgccaccaacctgctggtgatcgtgctgagaatcctgctgctgaaagtggccggctttaacctgctgatgaccctgcggctgtggtccagccgggttaagttttccagatccgcagacgcacccgcttaccaacaagggcagaaccaactctacaatgaacttaatttggggcggagggaagagtacgacgttctggacaaaaggaggggacgagatcccgagatgggcggaaagcctcagcgaaggaagaatccgcaagaggggctttataacgaactccagaaagataaaatggcagaagcctatagtgagattgggatgaagggagaaaggaggaggggtaaaggtcacgatgggttgtaccaaggattgagcacagccactaaagatacctatgatgcgctccacatgcaggccctgccgccaaga

SEQ ID NO: 24804 - DNA, 804 bp, synthetic construct
  source 1..804: mol_type = other DNA
gagatcagccacacccagaaagccaccctcgtgtgcctggctaccggcttctaccccgaccatgtggaactgtcttggtgggtcaacggcaaagaggtgcacagcggcgtgtgtaccgacccccagccactgaaagaacagcccgccctgaacgacagccggtactgcctgagcagcagactgagagtgtccgccaccttctggcagaacccccggaaccacttcagatgccaggtgcagttctacggcctgagcgagaacgacgagtggacccaggacagagccaagcccgtgacccagatcgtgtctgccgaagcctggggcagagccgattgcggctttaccagcgagagctaccagcagggcgtgctgagcgccaccaacctgctggtgatcgtgctgagaatcctgctgctgaaagtggccggctttaacctgctgatgaccctgcggctgtggtccagccgggttaagttttccagatccgcagacgcacccgcttaccaacaagggcagaaccaactctacaatgaacttaatttggggcggagggaagagtacgacgttctggacaaaaggaggggacgagatcccgagatgggcggaaagcctcagcgaaggaagaatccgcaagaggggctttataacgaactccagaaagataaaatggcagaagcctatagtgagattgggatgaagggagaaaggaggaggggtaaaggtcacgatgggttgtaccaaggattgagcacagccactaaagatacctatgatgcgctccacatgcaggccctgccgccaaga

SEQ ID NO: 24805 - DNA, 801 bp, synthetic construct
  source 1..801: mol_type = other DNA
atcagccacacccagaaagccaccctcgtgtgcctggctaccggcttctaccccgaccatgtggaactgtcttggtgggtcaacggcaaagaggtgcacagcggcgtgtgtaccgacccccagccactgaaagaacagcccgccctgaacgacagccggtactgcctgagcagcagactgagagtgtccgccaccttctggcagaacccccggaaccacttcagatgccaggtgcagttctacggcctgagcgagaacgacgagtggacccaggacagagccaagcccgtgacccagatcgtgtctgccgaagcctggggcagagccgattgcggctttaccagcgagagctaccagcagggcgtgctgagcgccaccaacctgctggtgatcgtgctgagaatcctgctgctgaaagtggccggctttaacctgctgatgaccctgcggctgtggtccagccgggttaagttttccagatccgcagacgcacccgcttaccaacaagggcagaaccaactctacaatgaacttaatttggggcggagggaagagtacgacgttctggacaaaaggaggggacgagatcccgagatgggcggaaagcctcagcgaaggaagaatccgcaagaggggctttataacgaactccagaaagataaaatggcagaagcctatagtgagattgggatgaagggagaaaggaggaggggtaaaggtcacgatgggttgtaccaaggattgagcacagccactaaagatacctatgatgcgctccacatgcaggccctgccgccaaga

SEQ ID NO: 24806 - DNA, 798 bp, synthetic construct
  source 1..798: mol_type = other DNA
agccacacccagaaagccaccctcgtgtgcctggctaccggcttctaccccgaccatgtggaactgtcttggtgggtcaacggcaaagaggtgcacagcggcgtgtgtaccgacccccagccactgaaagaacagcccgccctgaacgacagccggtactgcctgagcagcagactgagagtgtccgccaccttctggcagaacccccggaaccacttcagatgccaggtgcagttctacggcctgagcgagaacgacgagtggacccaggacagagccaagcccgtgacccagatcgtgtctgccgaagcctggggcagagccgattgcggctttaccagcgagagctaccagcagggcgtgctgagcgccaccaacctgctggtgatcgtgctgagaatcctgctgctgaaagtggccggctttaacctgctgatgaccctgcggctgtggtccagccgggttaagttttccagatccgcagacgcacccgcttaccaacaagggcagaaccaactctacaatgaacttaatttggggcggagggaagagtacgacgttctggacaaaaggaggggacgagatcccgagatgggcggaaagcctcagcgaaggaagaatccgcaagaggggctttataacgaactccagaaagataaaatggcagaagcctatagtgagattgggatgaagggagaaaggaggaggggtaaaggtcacgatgggttgtaccaaggattgagcacagccactaaagatacctatgatgcgctccacatgcaggccctgccgccaaga

SEQ ID NO: 24807 - DNA, 783 bp, synthetic construct
  source 1..783: mol_type = other DNA
gccaccctcgtgtgcctggctaccggcttctaccccgaccatgtggaactgtcttggtgggtcaacggcaaagaggtgcacagcggcgtgtgtaccgacccccagccactgaaagaacagcccgccctgaacgacagccggtactgcctgagcagcagactgagagtgtccgccaccttctggcagaacccccggaaccacttcagatgccaggtgcagttctacggcctgagcgagaacgacgagtggacccaggacagagccaagcccgtgacccagatcgtgtctgccgaagcctggggcagagccgattgcggctttaccagcgagagctaccagcagggcgtgctgagcgccaccaacctgctggtgatcgtgctgagaatcctgctgctgaaagtggccggctttaacctgctgatgaccctgcggctgtggtccagccgggttaagttttccagatccgcagacgcacccgcttaccaacaagggcagaaccaactctacaatgaacttaatttggggcggagggaagagtacgacgttctggacaaaaggaggggacgagatcccgagatgggcggaaagcctcagcgaaggaagaatccgcaagaggggctttataacgaactccagaaagataaaatggcagaagcctatagtgagattgggatgaagggagaaaggaggaggggtaaaggtcacgatgggttgtaccaaggattgagcacagccactaaagatacctatgatgcgctccacatgcaggccctgccgccaaga

SEQ ID NO: 24808 - DNA, 768 bp, synthetic construct
  source 1..768: mol_type = other DNA
ctggctaccggcttctaccccgaccatgtggaactgtcttggtgggtcaacggcaaagaggtgcacagcggcgtgtgtaccgacccccagccactgaaagaacagcccgccctgaacgacagccggtactgcctgagcagcagactgagagtgtccgccaccttctggcagaacccccggaaccacttcagatgccaggtgcagttctacggcctgagcgagaacgacgagtggacccaggacagagccaagcccgtgacccagatcgtgtctgccgaagcctggggcagagccgattgcggctttaccagcgagagctaccagcagggcgtgctgagcgccaccaacctgctggtgatcgtgctgagaatcctgctgctgaaagtggccggctttaacctgctgatgaccctgcggctgtggtccagccgggttaagttttccagatccgcagacgcacccgcttaccaacaagggcagaaccaactctacaatgaacttaatttggggcggagggaagagtacgacgttctggacaaaaggaggggacgagatcccgagatgggcggaaagcctcagcgaaggaagaatccgcaagaggggctttataacgaactccagaaagataaaatggcagaagcctatagtgagattgggatgaagggagaaaggaggaggggtaaaggtcacgatgggttgtaccaaggattgagcacagccactaaagatacctatgatgcgctccacatgcaggccctgccgccaaga

SEQ ID NO: 24809 - DNA, 738 bp, synthetic construct
  source 1..738: mol_type = other DNA
atccagaaccctgatcctgccgtgtaccagctgcgggatagcaagagcagcgacaagagcgtgtgtctgttcaccgacttcgacagccagaccaacgtgtcccagagcaaggactccgacgtgtacatcaccgataagaccgtgctggacatgcggagcatggacttcaagagcaactccgccgtggcctggtccaacaagtccgatttcgcctgcgccaacgccttcaacaacagcattggcagagccgattgcggctttaccagcgagagctaccagcagggcgtgctgagcgccaccatcctgtacgagatcctgctgggcaaggccaccctgtacgccgtgctggtgtctgccctggtgctgatggctatggtcaagcggaaggacagccggggacgggttaagttttccagatccgcagacgcacccgcttaccaacaagggcagaaccaactctacaatgaacttaatttggggcggagggaagagtacgacgttctggacaaaaggaggggacgagatcccgagatgggcggaaagcctcagcgaaggaagaatccgcaagaggggctttataacgaactccagaaagataaaatggcagaagcctatagtgagattgggatgaagggagaaaggaggaggggtaaaggtcacgatgggttgtaccaaggattgagcacagccactaaagatacctatgatgcgctccacatgcaggccctgccgccaaga

SEQ ID NO: 24810 - DNA, 732 bp, synthetic construct
  source 1..732: mol_type = other DNA
atccagaaccctgatcctgccgtgtaccagctgcgggatagcaagagcagcgacaagagcgtgtgtctgttcaccgacttcgacagccagaccaacgtgtcccagagcaaggactccgacgtgtacatcaccgataagaccgtgctggacatgcggagcatggacttcaagagcaactccgccgtggcctggtccaacaagtccgatttcgcctgcgccaacgccttcaacaacagcattgccgattgcggctttaccagcgagagctaccagcagggcgtgctgagcgccaccatcctgtacgagatcctgctgggcaaggccaccctgtacgccgtgctggtgtctgccctggtgctgatggctatggtcaagcggaaggacagccggggacgggttaagttttccagatccgcagacgcacccgcttaccaacaagggcagaaccaactctacaatgaacttaatttggggcggagggaagagtacgacgttctggacaaaaggaggggacgagatcccgagatgggcggaaagcctcagcgaaggaagaatccgcaagaggggctttataacgaactccagaaagataaaatggcagaagcctatagtgagattgggatgaagggagaaaggaggaggggtaaaggtcacgatgggttgtaccaaggattgagcacagccactaaagatacctatgatgcgctccacatgcaggccctgccgccaaga

SEQ ID NO: 24811 - DNA, 762 bp, synthetic construct
  source 1..762: mol_type = other DNA
atccagaaccctgatcctgccgtgtaccagctgcgggatagcaagagcagcgacaagagcgtgtgtctgttcaccgacttcgacagccagaccaacgtgtcccagagcaaggactccgacgtgtacatcaccgataagaccgtgctggacatgcggagcatggacttcaagagcaactccgccgtggcctggtccaacaagtccgatttcgcctgcgccaacgccttcaacaacagcattcagatcgtgtctgccgaagcctggggcagagccgattgcggctttaccagcgagagctaccagcagggcgtgctgagcgccaccatcctgtacgagatcctgctgggcaaggccaccctgtacgccgtgctggtgtctgccctggtgctgatggctatggtcaagcggaaggacagccggggacgggttaagttttccagatccgcagacgcacccgcttaccaacaagggcagaaccaactctacaatgaacttaatttggggcggagggaagagtacgacgttctggacaaaaggaggggacgagatcccgagatgggcggaaagcctcagcgaaggaagaatccgcaagaggggctttataacgaactccagaaagataaaatggcagaagcctatagtgagattgggatgaagggagaaaggaggaggggtaaaggtcacgatgggttgtaccaaggattgagcacagccactaaagatacctatgatgcgctccacatgcaggccctgccgccaaga

SEQ ID NO: 24812 - DNA, 786 bp, synthetic construct
  source 1..786: mol_type = other DNA
atccagaaccctgatcctgccgtgtaccagctgcgggatagcaagagcagcgacaagagcgtgtgtctgttcaccgacttcgacagccagaccaacgtgtcccagagcaaggactccgacgtgtacatcaccgataagaccgtgctggacatgcggagcatggacttcaagagcaactccgccgtggcctggtccaacaagtccgatttcgcctgcgccaacgccttcaacaacagcattttcccacccatcaagaccgatgtgattacaatggaccccaaggacaactgctccaaggacgccaacgataccctgctgctccagctgaccaacaccagcgcctactacatgtacttgttgctgctgctgaagtccgtggtgtacttcgccatcatcacatgctgcctgctgcggagaaccgccttctgctgcaacggcgagaagtctcgggttaagttttccagatccgcagacgcacccgcttaccaacaagggcagaaccaactctacaatgaacttaatttggggcggagggaagagtacgacgttctggacaaaaggaggggacgagatcccgagatgggcggaaagcctcagcgaaggaagaatccgcaagaggggctttataacgaactccagaaagataaaatggcagaagcctatagtgagattgggatgaagggagaaaggaggaggggtaaaggtcacgatgggttgtaccaaggattgagcacagccactaaagatacctatgatgcgctccacatgcaggccctgccgccaaga

SEQ ID NO: 24813 - DNA, 780 bp, synthetic construct
  source 1..780: mol_type = other DNA
atccagaaccctgatcctgccgtgtaccagctgcgggatagcaagagcagcgacaagagcgtgtgtctgttcaccgacttcgacagccagaccaacgtgtcccagagcaaggactccgacgtgtacatcaccgataagaccgtgctggacatgcggagcatggacttcaagagcaactccgccgtggcctggtccaacaagtccgatttcgcctgcgccaacgccttcaacaacagcattcccatcaagaccgatgtgattacaatggaccccaaggacaactgctccaaggacgccaacgataccctgctgctccagctgaccaacaccagcgcctactacatgtacttgttgctgctgctgaagtccgtggtgtacttcgccatcatcacatgctgcctgctgcggagaaccgccttctgctgcaacggcgagaagtctcgggttaagttttccagatccgcagacgcacccgcttaccaacaagggcagaaccaactctacaatgaacttaatttggggcggagggaagagtacgacgttctggacaaaaggaggggacgagatcccgagatgggcggaaagcctcagcgaaggaagaatccgcaagaggggctttataacgaactccagaaagataaaatggcagaagcctatagtgagattgggatgaagggagaaaggaggaggggtaaaggtcacgatgggttgtaccaaggattgagcacagccactaaagatacctatgatgcgctccacatgcaggccctgccgccaaga

SEQ ID NO: 24814 - DNA, 756 bp, synthetic construct
  source 1..756: mol_type = other DNA
atccagaaccctgatcctgccgtgtaccagctgcgggatagcaagagcagcgacaagagcgtgtgtctgttcaccgacttcgacagccagaccaacgtgtcccagagcaaggactccgacgtgtacatcaccgataagaccgtgctggacatgcggagcatggacttcaagagcaactccgccgtggcctggtccaacaagtccgatttcgcctgcgccaacgccttcaacaacagcattatggaccccaaggacaactgctccaaggacgccaacgataccctgctgctccagctgaccaacaccagcgcctactacatgtacttgttgctgctgctgaagtccgtggtgtacttcgccatcatcacatgctgcctgctgcggagaaccgccttctgctgcaacggcgagaagtctcgggttaagttttccagatccgcagacgcacccgcttaccaacaagggcagaaccaactctacaatgaacttaatttggggcggagggaagagtacgacgttctggacaaaaggaggggacgagatcccgagatgggcggaaagcctcagcgaaggaagaatccgcaagaggggctttataacgaactccagaaagataaaatggcagaagcctatagtgagattgggatgaagggagaaaggaggaggggtaaaggtcacgatgggttgtaccaaggattgagcacagccactaaagatacctatgatgcgctccacatgcaggccctgccgccaaga

SEQ ID NO: 24815 - DNA, 780 bp, synthetic construct; identical to SEQ ID NO: 24813
  source 1..780: mol_type = other DNA

SEQ ID NO: 24816 - DNA, 738 bp, synthetic construct
  source 1..738: mol_type = other DNA
atccagaaccctgatcctgccgtgtaccagctgcgggatagcaagagcagcgacaagagcgtgtgtctgttcaccgacttcgacagccagaccaacgtgtcccagagcaaggactccgacgtgtacatcaccgataagaccgtgctggacatgcggagcatggacttcaagagcaactccgccgtggcctggtccaacaagtccgatttcgcctgcgccaacgccttcaacaacagcatttgctccaaggacgccaacgataccctgctgctccagctgaccaacaccagcgcctactacatgtacttgttgctgctgctgaagtccgtggtgtacttcgccatcatcacatgctgcctgctgcggagaaccgccttctgctgcaacggcgagaagtctcgggttaagttttccagatccgcagacgcacccgcttaccaacaagggcagaaccaactctacaatgaacttaatttggggcggagggaagagtacgacgttctggacaaaaggaggggacgagatcccgagatgggcggaaagcctcagcgaaggaagaatccgcaagaggggctttataacgaactccagaaagataaaatggcagaagcctatagtgagattgggatgaagggagaaaggaggaggggtaaaggtcacgatgggttgtaccaaggattgagcacagccactaaagatacctatgatgcgctccacatgcaggccctgccgccaaga

SEQ ID NO: 24817 - DNA, 783 bp, synthetic construct
  source 1..783: mol_type = other DNA
atccagaaccctgatcctgccgtgtaccagctgcgggatagcaagagcagcgacaagagcgtgtgtctgttcaccgacttcgacagccagaccaacgtgtcccagagcaaggactccgacgtgtacatcaccgataagaccgtgctggacatgcggagcatggacttcaagagcaactccgccgtggcctggtccaacaagtccgatttcgcctgcgccaacgccttcaacaacagcattgaagtgaaaaccgactccaccgaccacgtgaagcccaaagagacagagaacaccaagcagcccagcaagagctgccacaagcccaaggccatcgtgcacaccgagaaagtgaacatgatgagcctgaccgtgctgggcctgcggatgctgttcgccaaaaccgtggccgtgaacttcctgctgaccgccaagctgttcttcctccgggttaagttttccagatccgcagacgcacccgcttaccaacaagggcagaaccaactctacaatgaacttaatttggggcggagggaagagtacgacgttctggacaaaaggaggggacgagatcccgagatgggcggaaagcctcagcgaaggaagaatccgcaagaggggctttataacgaactccagaaagataaaatggcagaagcctatagtgagattgggatgaagggagaaaggaggaggggtaaaggtcacgatgggttgtaccaaggattgagcacagccactaaagatacctatgatgcgctccacatgcaggccctgccgccaaga

SEQ ID NO: 24818 - DNA, 762 bp, synthetic construct
  source 1..762: mol_type = other DNA
atccagaaccctgatcctgccgtgtaccagctgcgggatagcaagagcagcgacaagagcgtgtgtctgttcaccgacttcgacagccagaccaacgtgtcccagagcaaggactccgacgtgtacatcaccgataagaccgtgctggacatgcggagcatggacttcaagagcaactccgccgtggcctggtccaacaagtccgatttcgcctgcgccaacgccttcaacaacagcattgaccacgtgaagcccaaagagacagagaacaccaagcagcccagcaagagctgccacaagcccaaggccatcgtgcacaccgagaaagtgaacatgatgagcctgaccgtgctgggcctgcggatgctgttcgccaaaaccgtggccgtgaacttcctgctgaccgccaagctgttcttcctccgggttaagttttccagatccgcagacgcacccgcttaccaacaagggcagaaccaactctacaatgaacttaatttggggcggagggaagagtacgacgttctggacaaaaggaggggacgagatcccgagatgggcggaaagcctcagcgaaggaagaatccgcaagaggggctttataacgaactccagaaagataaaatggcagaagcctatagtgagattgggatgaagggagaaaggaggaggggtaaaggtcacgatgggttgtaccaaggattgagcacagccactaaagatacctatgatgcgctccacatgcaggccctgccgccaaga

SEQ ID NO: 24819 - DNA, 768 bp, synthetic construct
  source 1..768: mol_type = other DNA
atccagaaccctgatcctgccgtgtaccagctgcgggatagcaagagcagcgacaagagcgtgtgtctgttcaccgacttcgacagccagaccaacgtgtcccagagcaaggactccgacgtgtacatcaccgataagaccgtgctggacatgcggagcatggacttcaagagcaactccgccgtggcctggtccaacaagtccgatttcgcctgcgccaacgccttcaacaacagcattatccccgaggacacattcttcccaagccccggcagagccgattgcggctttaccagcgagagctaccagcagggcgtgctgagcgccaccatcctgtacgagatcctgctgggcaaggccaccctgtacgccgtgctggtgtctgccctggtgctgatggctatggtcaagcggaaggacagccggggacgggttaagttttccagatccgcagacgcacccgcttaccaacaagggcagaaccaactctacaatgaacttaatttggggcggagggaagagtacgacgttctggacaaaaggaggggacgagatcccgagatgggcggaaagcctcagcgaaggaagaatccgcaagaggggctttataacgaactccagaaagataaaatggcagaagcctatagtgagattgggatgaagggagaaaggaggaggggtaaaggtcacgatgggttgtaccaaggattgagcacagccactaaagatacctatgatgcgctccacatgcaggccctgccgccaaga

SEQ ID NO: 24820 - DNA, 762 bp, synthetic construct
  source 1..762: mol_type = other DNA
atccagaaccctgatcctgccgtgtaccagctgcgggatagcaagagcagcgacaagagcgtgtgtctgttcaccgacttcgacagccagaccaacgtgtcccagagcaaggactccgacgtgtacatcaccgataagaccgtgctggacatgcggagcatggacttcaagagcaactccgccgtggcctggtccaacaagtccgatttcgcctgcgccaacgccttcaacaacagcattatccccgaggacacattcttcccaagccccgccgattgcggctttaccagcgagagctaccagcagggcgtgctgagcgccaccatcctgtacgagatcctgctgggcaaggccaccctgtacgccgtgctggtgtctgccctggtgctgatggctatggtcaagcggaaggacagccggggacgggttaagttttccagatccgcagacgcacccgcttaccaacaagggcagaaccaactctacaatgaacttaatttggggcggagggaagagtacgacgttctggacaaaaggaggggacgagatcccgagatgggcggaaagcctcagcgaaggaagaatccgcaagaggggctttataacgaactccagaaagataaaatggcagaagcctatagtgagattgggatgaagggagaaaggaggaggggtaaaggtcacgatgggttgtaccaaggattgagcacagccactaaagatacctatgatgcgctccacatgcaggccctgccgccaaga

SEQ ID NO: 24821 - DNA, 792 bp, synthetic construct
  source 1..792: mol_type = other DNA
atccagaaccctgatcctgccgtgtaccagctgcgggatagcaagagcagcgacaagagcgtgtgtctgttcaccgacttcgacagccagaccaacgtgtcccagagcaaggactccgacgtgtacatcaccgataagaccgtgctggacatgcggagcatggacttcaagagcaactccgccgtggcctggtccaacaagtccgatttcgcctgcgccaacgccttcaacaacagcattatccccgaggacacattcttcccaagcccccagatcgtgtctgccgaagcctggggcagagccgattgcggctttaccagcgagagctaccagcagggcgtgctgagcgccaccatcctgtacgagatcctgctgggcaaggccaccctgtacgccgtgctggtgtctgccctggtgctgatggctatggtcaagcggaaggacagccggggacgggttaagttttccagatccgcagacgcacccgcttaccaacaagggcagaaccaactctacaatgaacttaatttggggcggagggaagagtacgacgttctggacaaaaggaggggacgagatcccgagatgggcggaaagcctcagcgaaggaagaatccgcaagaggggctttataacgaactccagaaagataaaatggcagaagcctatagtgagattgggatgaagggagaaaggaggaggggtaaaggtcacgatgggttgtaccaaggattgagcacagccactaaagatacctatgatgcgctccacatgcaggccctgccgccaaga

SEQ ID NO: 24822 - DNA, 816 bp, synthetic construct
  source 1..816: mol_type = other DNA
atccagaaccctgatcctgccgtgtaccagctgcgggatagcaagagcagcgacaagagcgtgtgtctgttcaccgacttcgacagccagaccaacgtgtcccagagcaaggactccgacgtgtacatcaccgataagaccgtgctggacatgcggagcatggacttcaagagcaactccgccgtggcctggtccaacaagtccgatttcgcctgcgccaacgccttcaacaacagcattatccccgaggacacattcttcccaagccccttcccacccatcaagaccgatgtgattacaatggaccccaaggacaactgctccaaggacgccaacgataccctgctgctccagctgaccaacaccagcgcctactacatgtacttgttgctgctgctgaagtccgtggtgtacttcgccatcatcacatgctgcctgctgcggagaaccgccttctgctgcaacggcgagaagtctcgggttaagttttccagatccgcagacgcacccgcttaccaacaagggcagaaccaactctacaatgaacttaatttggggcggagggaagagtacgacgttctggacaaaaggaggggacgagatcccgagatgggcggaaagcctcagcgaaggaagaatccgcaagaggggctttataacgaactccagaaagataaaatggcagaagcctatagtgagattgggatgaagggagaaaggaggaggggtaaaggtcacgatgggttgtaccaaggattgagcacagccactaaagatacctatgatgcgctccacatgcaggccctgccgccaaga

SEQ ID NO: 24823 - DNA, 810 bp, synthetic construct
  source 1..810: mol_type = other DNA
atccagaaccctgatcctgccgtgtaccagctgcgggatagcaagagcagcgacaagagcgtgtgtctgttcaccgacttcgacagccagaccaacgtgtcccagagcaaggactccgacgtgtacatcaccgataagaccgtgctggacatgcggagcatggacttcaagagcaactccgccgtggcctggtccaacaagtccgatttcgcctgcgccaacgccttcaacaacagcattatccccgaggacacattcttcccaagcccccccatcaagaccgatgtgattacaatggaccccaaggacaactgctccaaggacgccaacgataccctgctgctccagctgaccaacaccagcgcctactacatgtacttgttgctgctgctgaagtccgtggtgtacttcgccatcatcacatgctgcctgctgcggagaaccgccttctgctgcaacggcgagaagtctcgggttaagttttccagatccgcagacgcacccgcttaccaacaagggcagaaccaactctacaatgaacttaatttggggcggagggaagagtacgacgttctggacaaaaggaggggacgagatcccgagatgggcggaaagcctcagcgaaggaagaatccgcaagaggggctttataacgaactccagaaagataaaatggcagaagcctatagtgagattgggatgaagggagaaaggaggaggggtaaaggtcacgatgggttgtaccaaggattgagcacagccactaaagatacctatgatgcgctccacatgcaggccctgccgccaaga

SEQ ID NO: 24824 - DNA, 786 bp, synthetic construct
  source 1..786: mol_type = other DNA
atccagaaccctgatcctgccgtgtaccagctgcgggatagcaagagcagcgacaagagcgtgtgtctgttcaccgacttcgacagccagaccaacgtgtcccagagcaaggactccgacgtgtacatcaccgataagaccgtgctggacatgcggagcatggacttcaagagcaactccgccgtggcctggtccaacaagtccgatttcgcctgcgccaacgccttcaacaacagcattatccccgaggacacattcttcccaagccccatggaccccaaggacaactgctccaaggacgccaacgataccctgctgctccagctgaccaacaccagcgcctactacatgtacttgttgctgctgctgaagtccgtggtgtacttcgccatcatcacatgctgcctgctgcggagaaccgccttctgctgcaacggcgagaagtctcgggttaagttttccagatccgcagacgcacccgcttaccaacaagggcagaaccaactctacaatgaacttaatttggggcggagggaagagtacgacgttctggacaaaaggaggggacgagatcccgagatgggcggaaagcctcagcgaaggaagaatccgcaagaggggctttataacgaactccagaaagataaaatggcagaagcctatagtgagattgggatgaagggagaaaggaggaggggtaaaggtcacgatgggttgtaccaaggattgagcacagccactaaagatacctatgatgcgctccacatgcaggccctgccgccaaga

SEQ ID NO: 24825 - DNA, 810 bp, synthetic construct; identical to SEQ ID NO: 24823
  source 1..810: mol_type = other DNA

SEQ ID NO: 24826 - DNA, 768 bp, synthetic construct
  source 1..768: mol_type = other DNA
atccagaaccctgatcctgccgtgtaccagctgcgggatagcaagagcagcgacaagagcgtgtgtctgttcaccgacttcgacagccagaccaacgtgtcccagagcaaggactccgacgtgtacatcaccgataagaccgtgctggacatgcggagcatggacttcaagagcaactccgccgtggcctggtccaacaagtccgatttcgcctgcgccaacgccttcaacaacagcattatccccgaggacacattcttcccaagcccctgctccaaggacgccaacgataccctgctgctccagctgaccaacaccagcgcctactacatgtacttgttgctgctgctgaagtccgtggtgtacttcgccatcatcacatgctgcctgctgcggagaaccgccttctgctgcaacggcgagaagtctcgggttaagttttccagatccgcagacgcacccgcttaccaacaagggcagaaccaactctacaatgaacttaatttggggcggagggaagagtacgacgttctggacaaaaggaggggacgagatcccgagatgggcggaaagcctcagcgaaggaagaatccgcaagaggggctttataacgaactccagaaagataaaatggcagaagcctatagtgagattgggatgaagggagaaaggaggaggggtaaaggtcacgatgggttgtaccaaggattgagcacagccactaaagatacctatgatgcgctccacatgcaggccctgccgccaaga

SEQ ID NO: 24827 - DNA, 813 bp, synthetic construct
  source 1..813: mol_type = other DNA
atccagaaccctgatcctgccgtgtaccagctgcgggatagcaagagcagcgacaagagcgtgtgtctgttcaccgacttcgacagccagaccaacgtgtcccagagcaaggactccgacgtgtacatcaccgataagaccgtgctggacatgcggagcatggacttcaagagcaactccgccgtggcctggtccaacaagtccgatttcgcctgcgccaacgccttcaacaacagcattatccccgaggacacattcttcccaagccccgaagtgaaaaccgactccaccgaccacgtgaagcccaaagagacagagaacaccaagcagcccagcaagagctgccacaagcccaaggccatcgtgcacaccgagaaagtgaacatgatgagcctgaccgtgctgggcctgcggatgctgttcgccaaaaccgtggccgtgaacttcctgctgaccgccaagctgttcttcctccgggttaagttttccagatccgcagacgcacccgcttaccaacaagggcagaaccaactctacaatgaacttaatttggggcggagggaagagtacgacgttctggacaaaaggaggggacgagatcccgagatgggcggaaagcctcagcgaaggaagaatccgcaagaggggctttataacgaactccagaaagataaaatggcagaagcctatagtgagattgggatgaagggagaaaggaggaggggtaaaggtcacgatgggttgtaccaaggattgagcacagccactaaagatacctatgatgcgctccacatgcaggccctgccgccaaga

SEQ ID NO: 24828 - DNA, 792 bp, synthetic construct
  source 1..792: mol_type = other DNA
atccagaaccctgatcctgccgtgtaccagctgcgggatagcaagagcagcgacaagagcgtgtgtctgttcaccgacttcgacagccagaccaacgtgtcccagagcaaggactccgacgtgtacatcaccgataagaccgtgctggacatgcggagcatggacttcaagagcaactccgccgtggcctggtccaacaagtccgatttcgcctgcgccaacgccttcaacaacagcattatccccgaggacacattcttcccaagccccgaccacgtgaagcccaaagagacagagaacaccaagcagcccagcaagagctgccacaagcccaaggccatcgtgcacaccgagaaagtgaacatgatgagcctgaccgtgctgggcctgcggatgctgttcgccaaaaccgtggccgtgaacttcctgctgaccgccaagctgttcttcctccgggttaagttttccagatccgcagacgcacccgcttaccaacaagggcagaaccaactctacaatgaacttaatttggggcggagggaagagtacgacgttctggacaaaaggaggggacgagatcccgagatgggcggaaagcctcagcgaaggaagaatccgcaagaggggctttataacgaactccagaaagataaaatggcagaagcctatagtgagattgggatgaagggagaaaggaggaggggtaaaggtcacgatgggttgtaccaaggattgagcacagccactaaagatacctatgatgcgctccacatgcaggccctgccgccaaga

SEQ ID NO: 24829 - DNA, 780 bp, synthetic construct
  source 1..780: mol_type = other DNA
atccagaaccctgatcctgccgtgtaccagctgcgggatagcaagagcagcgacaagagcgtgtgtctgttcaccgacttcgacagccagaccaacgtgtcccagagcaaggactccgacgtgtacatcaccgataagaccgtgctggacatgcggagcatggacttcaagagcaactccgccgtggcctggtccaacaagtccgatttcgcctgcgccaacgccttcaacaacagcattatccccgaggacacattcttcccaagccccgagagcagctgcggcagagccgattgcggctttaccagcgagagctaccagcagggcgtgctgagcgccaccatcctgtacgagatcctgctgggcaaggccaccctgtacgccgtgctggtgtctgccctggtgctgatggctatggtcaagcggaaggacagccggggacgggttaagttttccagatccgcagacgcacccgcttaccaacaagggcagaaccaactctacaatgaacttaatttggggcggagggaagagtacgacgttctggacaaaaggaggggacgagatcccgagatgggcggaaagcctcagcgaaggaagaatccgcaagaggggctttataacgaactccagaaagataaaatggcagaagcctatagtgagattgggatgaagggagaaaggaggaggggtaaaggtcacgatgggttgtaccaaggattgagcacagccactaaagatacctatgatgcgctccacatgcaggccctgccgccaaga

SEQ ID NO: 24830 - DNA, 774 bp, synthetic construct
  source 1..774: mol_type = other DNA
atccagaaccctgatcctgccgtgtaccagctgcgggatagcaagagcagcgacaagagcgtgtgtctgttcaccgacttcgacagccagaccaacgtgtcccagagcaaggactccgacgtgtacatcaccgataagaccgtgctggacatgcggagcatggacttcaagagcaactccgccgtggcctggtccaacaagtccgatttcgcctgcgccaacgccttcaacaacagcattatccccgaggacacattcttcccaagccccgagagcagctgcgccgattgcggctttaccagcgagagctaccagcagggcgtgctgagcgccaccatcctgtacgagatcctgctgggcaaggccaccctgtacgccgtgctggtgtctgccctggtgctgatggctatggtcaagcggaaggacagccggggacgggttaagttttccagatccgcagacgcacccgcttaccaacaagggcagaaccaactctacaatgaacttaatttggggcggagggaagagtacgacgttctggacaaaaggaggggacgagatcccgagatgggcggaaagcctcagcgaaggaagaatccgcaagaggggctttataacgaactccagaaagataaaatggcagaagcctatagtgagattgggatgaagggagaaaggaggaggggtaaaggtcacgatgggttgtaccaaggattgagcacagccactaaagatacctatgatgcgctccacatgcaggccctgccgccaaga

SEQ ID NO: 24831 - DNA, 804 bp, synthetic construct
  source 1..804: mol_type = other DNA
atccagaaccctgatcctgccgtgtaccagctgcgggatagcaagagcagcgacaagagcgtgtgtctgttcaccgacttcgacagccagaccaacgtgtcccagagcaaggactccgacgtgtacatcaccgataagaccgtgctggacatgcggagcatggacttcaagagcaactccgccgtggcctggtccaacaagtccgatttcgcctgcgccaacgccttcaacaacagcattatccccgaggacacattcttcccaagccccgagagcagctgccagatcgtgtctgccgaagcctggggcagagccgattgcggctttaccagcgagagctaccagcagggcgtgctgagcgccaccatcctgtacgagatcctgctgggcaaggccaccctgtacgccgtgctggtgtctgccctggtgctgatggctatggtcaagcggaaggacagccggggacgggttaagttttccagatccgcagacgcacccgcttaccaacaagggcagaaccaactctacaatgaacttaatttggggcggagggaagagtacgacgttctggacaaaaggaggggacgagatcccgagatgggcggaaagcctcagcgaaggaagaatccgcaagaggggctttataacgaactccagaaagataaaatggcagaagcctatagtgagattgggatgaagggagaaaggaggaggggtaaaggtcacgatgggttgtaccaaggattgagcacagccactaaagatacctatgatgcgctccacatgcaggccctgccgccaaga

SEQ ID NO: 24832 - DNA, 828 bp, synthetic construct
  source 1..828: mol_type = other DNA
atccagaaccctgatcctgccgtgtaccagctgcgggatagcaagagcagcgacaagagcgtgtgtctgttcaccgacttcgacagccagaccaacgtgtcccagagcaaggactccgacgtgtacatcaccgataagaccgtgctggacatgcggagcatggacttcaagagcaactccgccgtggcctggtccaacaagtccgatttcgcctgcgccaacgccttcaacaacagcattatccccgaggacacattcttcccaagccccgagagcagctgcttcccacccatcaagaccgatgtgattacaatggaccccaaggacaactgctccaaggacgccaacgataccctgctgctccagctgaccaacaccagcgcctactacatgtacttgttgctgctgctgaagtccgtggtgtacttcgccatcatcacatgctgcctgctgcggagaaccgccttctgctgcaacggcgagaagtctcgggttaagttttccagatccgcagacgcacccgcttaccaacaagggcagaaccaactctacaatgaacttaatttggggcggagggaagagtacgacgttctggacaaaaggaggggacgagatcccgagatgggcggaaagcctcagcgaaggaagaatccgcaagaggggctttataacgaactccagaaagataaaatggcagaagcctatagtgagattgggatgaagggagaaaggaggaggggtaaaggtcacgatgggttgtaccaaggattgagcacagccactaaagatacctatgatgcgctccacatgcaggccctgccgccaaga

SEQ ID NO: 24833 - DNA, 822 bp, synthetic construct
  source 1..822: mol_type = other DNA
atccagaaccctgatcctgccgtgtaccagctgcgggatagcaagagcagcgacaagagcgtgtgtctgttcaccgacttcgacagccagaccaacgtgtcccagagcaaggactccgacgtgtacatcaccgataagaccgtgctggacatgcggagcatggacttcaagagcaactccgccgtggcctggtccaacaagtccgatttcgcctgcgccaacgccttcaacaacagcattatccccgaggacacattcttcccaagccccgagagcagctgccccatcaagaccgatgtgattacaatggaccccaaggacaactgctccaaggacgccaacgataccctgctgctccagctgaccaacaccagcgcctactacatgtacttgttgctgctgctgaagtccgtggtgtacttcgccatcatcacatgctgcctgctgcggagaaccgccttctgctgcaacggcgagaagtctcgggttaagttttccagatccgcagacgcacccgcttaccaacaagggcagaaccaactctacaatgaacttaatttggggcggagggaagagtacgacgttctggacaaaaggaggggacgagatcccgagatgggcggaaagcctcagcgaaggaagaatccgcaagaggggctttataacgaactccagaaagataaaatggcagaagcctatagtgagattgggatgaagggagaaaggaggaggggtaaaggtcacgatgggttgtaccaaggattgagcacagccactaaagatacctatgatgcgctccacatgcaggccctgccgccaaga

SEQ ID NO: 24834 - DNA, 798 bp, synthetic construct
  source 1..798: mol_type = other DNA
atccagaaccctgatcctgccgtgtaccagctgcgggatagcaagagcagcgacaagagcgtgtgtctgttcaccgacttcgacagccagaccaacgtgtcccagagcaaggactccgacgtgtacatcaccgataagaccgtgctggacatgcggagcatggacttcaagagcaactccgccgtggcctggtccaacaagtccgatttcgcctgcgccaacgccttcaacaacagcattatccccgaggacacattcttcccaagccccgagagcagctgcatggaccccaaggacaactgctccaaggacgccaacgataccctgctgctccagctgaccaacaccagcgcctactacatgtacttgttgctgctgctgaagtccgtggtgtacttcgccatcatcacatgctgcctgctgcggagaaccgccttctgctgcaacggcgagaagtctcgggttaagttttccagatccgcagacgcacccgcttaccaacaagggcagaaccaactctacaatgaacttaatttggggcggagggaagagtacgacgttctggacaaaaggaggggacgagatcccgagatgggcggaaagcctcagcgaaggaagaatccgcaagaggggctttataacgaactccagaaagataaaatggcagaagcctatagtgagattgggatgaagggagaaaggaggaggggtaaaggtcacgatgggttgtaccaaggattgagcacagccactaaagatacctatgatgcgctccacatgcaggccctgccgccaaga

SEQ ID NO: 24835 - DNA, 822 bp, synthetic construct; identical to SEQ ID NO: 24833
  source 1..822: mol_type = other DNA

SEQ ID NO: 24836 - DNA, 780 bp, synthetic construct
  source 1..780: mol_type = other DNA
atccagaaccctgatcctgccgtgtaccagctgcgggatagcaagagcagcgacaagagcgtgtgtctgttcaccgacttcgacagccagaccaacgtgtcccagagcaaggactccgacgtgtacatcaccgataagaccgtgctggacatgcggagcatggacttcaagagcaactccgccgtggcctggtccaacaagtccgatttcgcctgcgccaacgccttcaacaacagcattatccccgaggacacattcttcccaagccccgagagcagctgctgctccaaggacgccaacgataccctgctgctccagctgaccaacaccagcgcctactacatgtacttgttgctgctgctgaagtccgtggtgtacttcgccatcatcacatgctgcctgctgcggagaaccgccttctgctgcaacggcgagaagtctcgggttaagttttccagatccgcagacgcacccgcttaccaacaagggcagaaccaactctacaatgaacttaatttggggcggagggaagagtacgacgttctggacaaaaggaggggacgagatcccgagatgggcggaaagcctcagcgaaggaagaatccgcaagaggggctttataacgaactccagaaagataaaatggcagaagcctatagtgagattgggatgaagggagaaaggaggaggggtaaaggtcacgatgggttgtaccaaggattgagcacagccactaaagatacctatgatgcgctccacatgcaggccctgccgccaaga

SEQ ID NO: 24837 - DNA, 825 bp, synthetic construct
  source 1..825: mol_type = other DNA
atccagaaccctgatcctgccgtgtaccagctgcgggatagcaagagcagcgacaagagcgtgtgtctgttcaccgacttcgacagccagaccaacgtgtcccagagcaaggactccgacgtgtacatcaccgataagaccgtgctggacatgcggagcatggacttcaagagcaactccgccgtggcctggtccaacaagtccgatttcgcctgcgccaacgccttcaacaacagcattatccccgaggacacattcttcccaagccccgagagcagctgcgaagtgaaaaccgactccaccgaccacgtgaagcccaaagagacagagaacaccaagcagcccagcaagagctgccacaagcccaaggccatcgtgcacaccgagaaagtgaacatgatgagcctgaccgtgctgggcctgcggatgctgttcgccaaaaccgtggccgtgaacttcctgctgaccgccaagctgttcttcctccgggttaagttttccagatccgcagacgcacccgcttaccaacaagggcagaaccaactctacaatgaacttaatttggggcggagggaagagtacgacgttctggacaaaaggaggggacgagatcccgagatgggcggaaagcctcagcgaaggaagaatccgcaagaggggctttataacgaactccagaaagataaaatggcagaagcctatagtgagattgggatgaagggagaaaggaggaggggtaaaggtcacgatgggttgtaccaaggattgagcacagccactaaagatacctatgatgcgctccacatgcaggccctgccgccaaga

SEQ ID NO: 24838 - DNA, 804 bp, synthetic construct
  source 1..804: mol_type = other DNA
atccagaaccctgatcctgccgtgtaccagctgcgggatagcaagagcagcgacaagagcgtgtgtctgttcaccgacttcgacagccagaccaacgtgtcccagagcaaggactccgacgtgtacatcaccgataagaccgtgctggacatgcggagcatggacttcaagagcaactccgccgtggcctggtccaacaagtccgatttcgcctgcgccaacgccttcaacaacagcattatccccgaggacacattcttcccaagccccgagagcagctgcgaccacgtgaagcccaaagagacagagaacaccaagcagcccagcaagagctgccacaagcccaaggccatcgtgcacaccgagaaagtgaacatgatgagcctgaccgtgctgggcctgcggatgctgttcgccaaaaccgtggccgtgaacttcctgctgaccgccaagctgttcttcctccgggttaagttttccagatccgcagacgcacccgcttaccaacaagggcagaaccaactctacaatgaacttaatttggggcggagggaagagtacgacgttctggacaaaaggaggggacgagatcccgagatgggcggaaagcctcagcgaaggaagaatccgcaagaggggctttataacgaactccagaaagataaaatggcagaagcctatagtgagattgggatgaagggagaaaggaggaggggtaaaggtcacgatgggttgtaccaaggattgagcacagccactaaagatacctatgatgcgctccacatgcaggccctgccgccaaga

SEQ ID NO: 24839 - DNA, 741 bp, synthetic construct
  source 1..741: mol_type = other DNA
atccagaaccctgatcctgccgtgtaccagctgcgggatagcaagagcagcgacaagagcgtgtgtctgttcaccgacttcgacagccagaccaacgtgtcccagagcaaggactccgacgtgtacatcaccgataagaccgtgctggacatgcggagcatggacttcaagagcaactccgccgtggcctggtccaacaagtccgatttcgcctgcgccaacgccttcaacaacagcattatcggcagagccgattgcggctttaccagcgagagctaccagcagggcgtgctgagcgccaccatcctgtacgagatcctgctgggcaaggccaccctgtacgccgtgctggtgtctgccctggtgctgatggctatggtcaagcggaaggacagccggggacgggttaagttttccagatccgcagacgcacccgcttaccaacaagggcagaaccaactctacaatgaacttaatttggggcggagggaagagtacgacgttctggacaaaaggaggggacgagatcccgagatgggcggaaagcctcagcgaaggaagaatccgcaagaggggctttataacgaactccagaaagataaaatggcagaagcctatagtgagattgggatgaagggagaaaggaggaggggtaaaggtcacgatgggttgtaccaaggattgagcacagccactaaagatacctatgatgcgctccacatgcaggccctgccgccaaga

SEQ ID NO: 24840 - DNA, 735 bp, synthetic construct
  source 1..735: mol_type = other DNA
atccagaaccctgatcctgccgtgtaccagctgcgggatagcaagagcagcgacaagagcgtgtgtctgttcaccgacttcgacagccagaccaacgtgtcccagagcaaggactccgacgtgtacatcaccgataagaccgtgctggacatgcggagcatggacttcaagagcaactccgccgtggcctggtccaacaagtccgatttcgcctgcgccaacgccttcaacaacagcattatcgccgattgcggctttaccagcgagagctaccagcagggcgtgctgagcgccaccatcctgtacgagatcctgctgggcaaggccaccctgtacgccgtgctggtgtctgccctggtgctgatggctatggtcaagcggaaggacagccggggacgggttaagttttccagatccgcagacgcacccgcttaccaacaagggcagaaccaactctacaatgaacttaatttggggcggagggaagagtacgacgttctggacaaaaggaggggacgagatcccgagatgggcggaaagcctcagcgaaggaagaatccgcaagaggggctttataacgaactccagaaagataaaatggcagaagcctatagtgagattgggatgaagggagaaaggaggaggggtaaaggtcacgatgggttgtaccaaggattgagcacagccactaaagatacctatgatgcgctccacatgcaggccctgccgccaaga

SEQ ID NO: 24841 - DNA, 765 bp, synthetic construct
  source 1..765: mol_type = other DNA
atccagaaccctgatcctgccgtgtaccagctgcgggatagcaagagcagcgacaagagcgtgtgtctgttcaccgacttcgacagccagaccaacgtgtcccagagcaaggactccgacgtgtacatcaccgataagaccgtgctggacatgcggagcatggacttcaagagcaactccgccgtggcctggtccaacaagtccgatttcgcctgcgccaacgccttcaacaacagcattatccagatcgtgtctgccgaagcctggggcagagccgattgcggctttaccagcgagagctaccagcagggcgtgctgagcgccaccatcctgtacgagatcctgctgggcaaggccaccctgtacgccgtgctggtgtctgccctggtgctgatggctatggtcaagcggaaggacagccggggacgggttaagttttccagatccgcagacgcacccgcttaccaacaagggcagaaccaactctacaatgaacttaatttggggcggagggaagagtacgacgttctggacaaaaggaggggacgagatcccgagatgggcggaaagcctcagcgaaggaagaatccgcaagaggggctttataacgaactccagaaagataaaatggcagaagcctatagtgagattgggatgaagggagaaaggaggaggggtaaaggtcacgatgggttgtaccaaggattgagcacagccactaaagatacctatgatgcgctccacatgcaggccctgccgccaaga

SEQ ID NO: 24842 - DNA, 789 bp, synthetic construct
  source 1..789: mol_type = other DNA
atccagaaccctgatcctgccgtgtaccagctgcgggatagcaagagcagcgacaagagcgtgtgtctgttcaccgacttcgacagccagaccaacgtgtcccagagcaaggactccgacgtgtacatcaccgataagaccgtgctggacatgcggagcatggacttcaagagcaactccgccgtggcctggtccaacaagtccgatttcgcctgcgccaacgccttcaacaacagcattatcttcccacccatcaagaccgatgtgattacaatggaccccaaggacaactgctccaaggacgccaacgataccctgctgctccagctgaccaacaccagcgcctactacatgtacttgttgctgctgctgaagtccgtggtgtacttcgccatcatcacatgctgcctgctgcggagaaccgccttctgctgcaacggcgagaagtctcgggttaagttttccagatccgcagacgcacccgcttaccaacaagggcagaaccaactctacaatgaacttaatttggggcggagggaagagtacgacgttctggacaaaaggaggggacgagatcccgagatgggcggaaagcctcagcgaaggaagaatccgcaagaggggctttataacgaactccagaaagataaaatggcagaagcctatagtgagattgggatgaagggagaaaggaggaggggtaaaggtcacgatgggttgtaccaaggattgagcacagccactaaagatacctatgatgcgctccacatgcaggccctgccgccaaga

SEQ ID NO: 24843 - DNA, 783 bp, synthetic construct
  source 1..783: mol_type = other DNA
atccagaaccctgatcctgccgtgtaccagctgcgggatagcaagagcagcgacaagagcgtgtgtctgttcaccgacttcgacagccagaccaacgtgtcccagagcaaggactccgacgtgtacatcaccgataagaccgtgctggacatgcggagcatggacttcaagagcaactccgccgtggcctggtccaacaagtccgatttcgcctgcgccaacgccttcaacaacagcattatccccatcaagaccgatgtgattacaatggaccccaaggacaactgctccaaggacgccaacgataccctgctgctccagctgaccaacaccagcgcctactacatgtacttgttgctgctgctgaagtccgtggtgtacttcgccatcatcacatgctgcctgctgcggagaaccgccttctgctgcaacggcgagaagtctcgggttaagttttccagatccgcagacgcacccgcttaccaacaagggcagaaccaactctacaatgaacttaatttggggcggagggaagagtacgacgttctggacaaaaggaggggacgagatcccgagatgggcggaaagcctcagcgaaggaagaatccgcaagaggggctttataacgaactccagaaagataaaatggcagaagcctatagtgagattgggatgaagggagaaaggaggaggggtaaaggtcacgatgggttgtaccaaggattgagcacagccactaaagatacctatgatgcgctccacatgcaggccctgccgccaaga

SEQ ID NO: 24844 - DNA, 759 bp, synthetic construct
  source 1..759: mol_type = other DNA
atccagaaccctgatcctgccgtgtaccagctgcgggatagcaagagcagcgacaagagcgtgtgtctgttcaccgacttcgacagccagaccaacgtgtcccagagcaaggactccgacgtgtacatcaccgataagaccgtgctggacatgcggagcatggacttcaagagcaactccgccgtggcctggtccaacaagtccgatttcgcctgcgccaacgccttcaacaacagcattatcatggaccccaaggacaactgctccaaggacgccaacgataccctgctgctccagctgaccaacaccagcgcctactacatgtacttgttgctgctgctgaagtccgtggtgtacttcgccatcatcacatgctgcctgctgcggagaaccgccttctgctgcaacggcgagaagtctcgggttaagttttccagatccgcagacgcacccgcttaccaacaagggcagaaccaactctacaatgaacttaatttggggcggagggaagagtacgacgttctggacaaaaggaggggacgagatcccgagatgggcggaaagcctcagcgaaggaagaatccgcaagaggggctttataacgaactccagaaagataaaatggcagaagcctatagtgagattgggatgaagggagaaaggaggaggggtaaaggtcacgatgggttgtaccaaggattgagcacagccactaaagatacctatgatgcgctccacatgcaggccctgccgccaaga

SEQ ID NO: 24845 - DNA, 783 bp, synthetic construct; identical to SEQ ID NO: 24843
  source 1..783: mol_type = other DNA

SEQ ID NO: 24846 - DNA, 741 bp, synthetic construct
  source 1..741: mol_type = other DNA
atccagaaccctgatcctgccgtgtaccagctgcgggatagcaagagcagcgacaagagcgtgtgtctgttcaccgacttcgacagccagaccaacgtgtcccagagcaaggactccgacgtgtacatcaccgataagaccgtgctggacatgcggagcatggacttcaagagcaactccgccgtggcctggtccaacaagtccgatttcgcctgcgccaacgccttcaacaacagcattatctgctccaaggacgccaacgataccctgctgctccagctgaccaacaccagcgcctactacatgtacttgttgctgctgctgaagtccgtggtgtacttcgccatcatcacatgctgcctgctgcggagaaccgccttctgctgcaacggcgagaagtctcgggttaagttttccagatccgcagacgcacccgcttaccaacaagggcagaaccaactctacaatgaacttaatttggggcggagggaagagtacgacgttctggacaaaaggaggggacgagatcccgagatgggcggaaagcctcagcgaaggaagaatccgcaagaggggctttataacgaactccagaaagataaaatggcagaagcctatagtgagattgggatgaagggagaaaggaggaggggtaaaggtcacgatgggttgtaccaaggattgagcacagccactaaagatacctatgatgcgctccacatgcaggccctgccgccaaga

SEQ ID NO: 24847 - DNA, 786 bp, synthetic construct
  source 1..786: mol_type = other DNA
atccagaaccctgatcctgccgtgtaccagctgcgggatagcaagagcagcgacaagagcgtgtgtctgttcaccgacttcgacagccagaccaacgtgtcccagagcaaggactccgacgtgtacatcaccgataagaccgtgctggacatgcggagcatggacttcaagagcaactccgccgtggcctggtccaacaagtccgatttcgcctgcgccaacgccttcaacaacagcattatcgaagtgaaaaccgactccaccgaccacgtgaagcccaaagagacagagaacaccaagcagcccagcaagagctgccacaagcccaaggccatcgtgcacaccgagaaagtgaacatgatgagcctgaccgtgctgggcctgcggatgctgttcgccaaaaccgtggccgtgaacttcctgctgaccgccaagctgttcttcctccgggttaagttttccagatccgcagacgcacccgcttaccaacaagggcagaaccaactctacaatgaacttaatttggggcggagggaagagtacgacgttctggacaaaaggaggggacgagatcccgagatgggcggaaagcctcagcgaaggaagaatccgcaagaggggctttataacgaactccagaaagataaaatggcagaagcctatagtgagattgggatgaagggagaaaggaggaggggtaaaggtcacgatgggttgtaccaaggattgagcacagccactaaagatacctatgatgcgctccacatgcaggccctgccgccaaga

SEQ ID NO: 24848 - DNA, 765 bp, synthetic construct
  source 1..765: mol_type = other DNA
atccagaaccctgatcctgccgtgtaccagctgcgggatagcaagagcagcgacaagagcgtgtgtctgttcaccgacttcgacagccagaccaacgtgtcccagagcaaggactccgacgtgtacatcaccgataagaccgtgctggacatgcggagcatggacttcaagagcaactccgccgtggcctggtccaacaagtccgatttcgcctgcgccaacgccttcaacaacagcattatcgaccacgtgaagcccaaagagacagagaacaccaagcagcccagcaagagctgccacaagcccaaggccatcgtgcacaccgagaaagtgaacatgatgagcctgaccgtgctgggcctgcggatgctgttcgccaaaaccgtggccgtgaacttcctgctgaccgccaagctgttcttcctccgggttaagttttccagatccgcagacgcacccgcttaccaacaagggcagaaccaactctacaatgaacttaatttggggcggagggaagagtacgacgttctggacaaaaggaggggacgagatcccgagatgggcggaaagcctcagcgaaggaagaatccgcaagaggggctttataacgaactccagaaagataaaatggcagaagcctatagtgagattgggatgaagggagaaaggaggaggggtaaaggtcacgatgggttgtaccaaggattgagcacagccactaaagatacctatgatgcgctccacatgcaggccctgccgccaaga

SEQ ID NO: 24849 - DNA, 780 bp, synthetic construct; identical to SEQ ID NO: 24829
  source 1..780: mol_type = other DNA

SEQ ID NO: 24850 - DNA, 774 bp, synthetic construct; identical to SEQ ID NO: 24830
  source 1..774: mol_type = other DNA

SEQ ID NO: 24851 - DNA, 804 bp, synthetic construct; identical to SEQ ID NO: 24831
  source 1..804: mol_type = other DNA

SEQ ID NO: 24852 - DNA, 828 bp, synthetic construct; identical to SEQ ID NO: 24832
  source 1..828: mol_type = other DNA

SEQ ID NO: 24853 - DNA, 822 bp, synthetic construct; identical to SEQ ID NO: 24833
  source 1..822: mol_type = other DNA

SEQ ID NO: 24854 - DNA, 798 bp, synthetic construct; identical to SEQ ID NO: 24834
  source 1..798: mol_type = other DNA

SEQ ID NO: 24855 - DNA, 822 bp, synthetic construct; identical to SEQ ID NO: 24833
  source 1..822: mol_type = other DNA

SEQ ID NO: 24856 - DNA, 780 bp, synthetic construct; identical to SEQ ID NO: 24836
  source 1..780: mol_type = other DNA

SEQ ID NO: 24857 - DNA, 825 bp, synthetic construct; identical to SEQ ID NO: 24837
  source 1..825: mol_type = other DNA

SEQ ID NO: 24858 - DNA, 804 bp, synthetic construct; identical to SEQ ID NO: 24838
  source 1..804: mol_type = other DNA

SEQ ID NO: 24859 - DNA, 735 bp, synthetic construct
  source 1..735: mol_type = other DNA
aagagcagcgacaagagcgtgtgtctgttcaccgacttcgacagccagaccaacgtgtcccagagcaaggactccgacgtgtacatcaccgataagaccgtgctggacatgcggagcatggacttcaagagcaactccgccgtggcctggtccaacaagtccgatttcgcctgcgccaacgccttcaacaacagcattatccccgaggacacattcttcccaagccccgagagcagcggcagagccgattgcggctttaccagcgagagctaccagcagggcgtgctgagcgccaccatcctgtacgagatcctgctgggcaaggccaccctgtacgccgtgctggtgtctgccctggtgctgatggctatggtcaagcggaaggacagccggggacgggttaagttttccagatccgcagacgcacccgcttaccaacaagggcagaaccaactctacaatgaacttaatttggggcggagggaagagtacgacgttctggacaaaaggaggggacgagatcccgagatgggcggaaagcctcagcgaaggaagaatccgcaagaggggctttataacgaactccagaaagataaaatggcagaagcctatagtgagattgggatgaagggagaaaggaggaggggtaaaggtcacgatgggttgtaccaaggattgagcacagccactaaagatacctatgatgcgctccacatgcaggccctgccgccaaga

SEQ ID NO: 24860 - DNA, 729 bp, synthetic construct
  source 1..729: mol_type = other DNA
aagagcagcgacaagagcgtgtgtctgttcaccgacttcgacagccagaccaacgtgtcccagagcaaggactccgacgtgtacatcaccgataagaccgtgctggacatgcggagcatggacttcaagagcaactccgccgtggcctggtccaacaagtccgatttcgcctgcgccaacgccttcaacaacagcattatccccgaggacacattcttcccaagccccgagagcagcgccgattgcggctttaccagcgagagctaccagcagggcgtgctgagcgccaccatcctgtacgagatcctgctgggcaaggccaccctgtacgccgtgctggtgtctgccctggtgctgatggctatggtcaagcggaaggacagccggggacgggttaagttttccagatccgcagacgcacccgcttaccaacaagggcagaaccaactctacaatgaacttaatttggggcggagggaagagtacgacgttctggacaaaaggaggggacgagatcccgagatgggcggaaagcctcagcgaaggaagaatccgcaagaggggctttataacgaactccagaaagataaaatggcagaagcctatagtgagattgggatgaagggagaaaggaggaggggtaaaggtcacgatgggttgtaccaaggattgagcacagccactaaagatacctatgatgcgctccacatgcaggccctgccgccaaga

SEQ ID NO: 24861 - DNA, 759 bp, synthetic construct
  source 1..759: mol_type = other DNA
aagagcagcgacaagagcgtgtgtctgttcaccgacttcgacagccagaccaacgtgtcccagagcaaggactccgacgtgtacatcaccgataagaccgtgctggacatgcggagcatggacttcaagagcaactccgccgtggcctggtccaacaagtccgatttcgcctgcgccaacgccttcaacaacagcattatccccgaggacacattcttcccaagccccgagagcagccagatcgtgtctgccgaagcctggggcagagccgattgcggctttaccagcgagagctaccagcagggcgtgctgagcgccaccatcctgtacgagatcctgctgggcaaggccaccctgtacgccgtgctggtgtctgccctggtgctgatggctatggtcaagcggaaggacagccggggacgggttaagttttccagatccgcagacgcacccgcttaccaacaagggcagaaccaactctacaatgaacttaatttggggcggagggaagagtacgacgttctggacaaaaggaggggacgagatcccgagatgggcggaaagcctcagcgaaggaagaatccgcaagaggggctttataacgaactccagaaagataaaatggcagaagcctatagtgagattgggatgaagggagaaaggaggaggggtaaaggtcacgatgggttgtaccaaggattgagcacagccactaaagatacctatgatgcgctccacatgcaggccctgccgccaaga

SEQ ID NO: 24862 - DNA, 783 bp, synthetic construct
  source 1..783: mol_type = other DNA
aagagcagcgacaagagcgtgtgtctgttcaccgacttcgacagccagaccaacgtgtcccagagcaaggactccgacgtgtacatcaccgataagaccgtgctggacatgcggagcatggacttcaagagcaactccgccgtggcctggtccaacaagtccgatttcgcctgcgccaacgccttcaacaacagcattatccccgaggacacattcttcccaagccccgagagcagcttcccacccatcaagaccgatgtgattacaatggaccccaaggacaactgctccaaggacgccaacgataccctgctgctccagctgaccaacaccagcgcctactacatgtacttgttgctgctgctgaagtccgtggtgtacttcgccatcatcacatgctgcctgctgcggagaaccgccttctgctgcaacggcgagaagtctcgggttaagttttccagatccgcagacgcacccgcttaccaacaagggcagaaccaactctacaatgaacttaatttggggcggagggaagagtacgacgttctggacaaaaggaggggacgagatcccgagatgggcggaaagcctcagcgaaggaagaatccgcaagaggggctttataacgaactccagaaagataaaatggcagaagcctatagtgagattgggatgaagggagaaaggaggaggggtaaaggtcacgatgggttgtaccaaggattgagcacagccactaaagatacctatgatgcgctccacatgcaggccctgccgccaaga

SEQ ID NO: 24863 - DNA, 777 bp, synthetic construct
  source 1..777: mol_type = other DNA
aagagcagcgacaagagcgtgtgtctgttcaccgacttcgacagccagaccaacgtgtcccagagcaaggactccgacgtgtacatcaccgataagaccgtgctggacatgcggagcatggacttcaagagcaactccgccgtggcctggtccaacaagtccgatttcgcctgcgccaacgccttcaacaacagcattatccccgaggacacattcttcccaagccccgagagcagccccatcaagaccgatgtgattacaatggaccccaaggacaactgctccaaggacgccaacgataccctgctgctccagctgaccaacaccagcgcctactacatgtacttgttgctgctgctgaagtccgtggtgtacttcgccatcatcacatgctgcctgctgcggagaaccgccttctgctgcaacggcgagaagtctcgggttaagttttccagatccgcagacgcacccgcttaccaacaagggcagaaccaactctacaatgaacttaatttggggcggagggaagagtacgacgttctggacaaaaggaggggacgagatcccgagatgggcggaaagcctcagcgaaggaagaatccgcaagaggggctttataacgaactccagaaagataaaatggcagaagcctatagtgagattgggatgaagggagaaaggaggaggggtaaaggtcacgatgggttgtaccaaggattgagcacagccactaaagatacctatgatgcgctccacatgcaggccctgccgccaaga

SEQ ID NO: 24864 - DNA, 753 bp, synthetic construct
  source 1..753: mol_type = other DNA
aagagcagcgacaagagcgtgtgtctgttcaccgacttcgacagccagaccaacgtgtcccagagcaaggactccgacgtgtacatcaccgataagaccgtgctggacatgcggagcatggacttcaagagcaactccgccgtggcctggtccaacaagtccgatttcgcctgcgccaacgccttcaacaacagcattatccccgaggacacattcttcccaagccccgagagcagcatggaccccaaggacaactgctccaaggacgccaacgataccctgctgctccagctgaccaacaccagcgcctactacatgtacttgttgctgctgctgaagtccgtggtgtacttcgccatcatcacatgctgcctgctgcggagaaccgccttctgctgcaacggcgagaagtctcgggttaagttttccagatccgcagacgcacccgcttaccaacaagggcagaaccaactctacaatgaacttaatttggggcggagggaagagtacgacgttctggacaaaaggaggggacgagatcccgagatgggcggaaagcctcagcgaaggaagaatccgcaagaggggctttataacgaactccagaaagataaaatggcagaagcctatagtgagattgggatgaagggagaaaggaggaggggtaaaggtcacgatgggttgtaccaaggattgagcacagccactaaagatacctatgatgcgctccacatgcaggccctgccgccaaga

SEQ ID NO: 24865 - DNA, 777 bp, synthetic construct; identical to SEQ ID NO: 24863
  source 1..777: mol_type = other DNA

SEQ ID NO: 24866 - DNA, 735 bp, synthetic construct
  source 1..735: mol_type = other DNA
aagagcagcgacaagagcgtgtgtctgttcaccgacttcgacagccagaccaacgtgtcccagagcaaggactccgacgtgtacatcaccgataagaccgtgctggacatgcggagcatggacttcaagagcaactccgccgtggcctggtccaacaagtccgatttcgcctgcgccaacgccttcaacaacagcattatccccgaggacacattcttcccaagccccgagagcagctgctccaaggacgccaacgataccctgctgctccagctgaccaacaccagcgcctactacatgtacttgttgctgctgctgaagtccgtggtgtacttcgccatcatcacatgctgcctgctgcggagaaccgccttctgctgcaacggcgagaagtctcgggttaagttttccagatccgcagacgcacccgcttaccaacaagggcagaaccaactctacaatgaacttaatttggggcggagggaagagtacgacgttctggacaaaaggaggggacgagatcccgagatgggcggaaagcctcagcgaaggaagaatccgcaagaggggctttataacgaactccagaaagataaaatggcagaagcctatagtgagattgggatgaagggagaaaggaggaggggtaaaggtcacgatgggttgtaccaaggattgagcacagccactaaagatacctatgatgcgctccacatgcaggccctgccgccaaga

SEQ ID NO: 24867 - DNA, 780 bp, synthetic construct
  source 1..780: mol_type = other DNA
aagagcagcgacaagagcgtgtgtctgttcaccgacttcgacagccagaccaacgtgtcccagagcaaggactccgacgtgtacatcaccgataagaccgtgctggacatgcggagcatggacttcaagagcaactccgccgtggcctggtccaacaagtccgatttcgcctgcgccaacgccttcaacaacagcattatccccgaggacacattcttcccaagccccgagagcagcgaagtgaaaaccgactccaccgaccacgtgaagcccaaagagacagagaacaccaagcagcccagcaagagctgccacaagcccaaggccatcgtgcacaccgagaaagtgaacatgatgagcctgaccgtgctgggcctgcggatgctgttcgccaaaaccgtggccgtgaacttcctgctgaccgccaagctgttcttcctccgggttaagttttccagatccgcagacgcacccgcttaccaacaagggcagaaccaactctacaatgaacttaatttggggcggagggaagagtacgacgttctggacaaaaggaggggacgagatcccgagatgggcggaaagcctcagcgaaggaagaatccgcaagaggggctttataacgaactccagaaagataaaatggcagaagcctatagtgagattgggatgaagggagaaaggaggaggggtaaaggtcacgatgggttgtaccaaggattgagcacagccactaaagatacctatgatgcgctccacatgcaggccctgccgccaaga

SEQ ID NO: 24868 - DNA, 759 bp, synthetic construct
  source 1..759: mol_type = other DNA
aagagcagcgacaagagcgtgtgtctgttcaccgacttcgacagccagaccaacgtgtcccagagcaaggactccgacgtgtacatcaccgataagaccgtgctggacatgcggagcatggacttcaagagcaactccgccgtggcctggtccaacaagtccgatttcgcctgcgccaacgccttcaacaacagcattatccccgaggacacattcttcccaagccccgagagcagcgaccacgtgaagcccaaagagacagagaacaccaagcagcccagcaagagctgccacaagcccaaggccatcgtgcacaccgagaaagtgaacatgatgagcctgaccgtgctgggcctgcggatgctgttcgccaaaaccgtggccgtgaacttcctgctgaccgccaagctgttcttcctccgggttaagttttccagatccgcagacgcacccgcttaccaacaagggcagaaccaactctacaatgaacttaatttggggcggagggaagagtacgacgttctggacaaaaggaggggacgagatcccgagatgggcggaaagcctcagcgaaggaagaatccgcaagaggggctttataacgaactccagaaagataaaatggcagaagcctatagtgagattgggatgaagggagaaaggaggaggggtaaaggtcacgatgggttgtaccaaggattgagcacagccactaaagatacctatgatgcgctccacatgcaggccctgccgccaaga

SEQ ID NO: 24869 - DNA, 897 bp, synthetic construct
  source 1..897: mol_type = other DNA
gaggacctgaagaacgtgttcccacctgaggtggccgtgttcgagcctagcgaggccgagatcagccacacccagaaagccaccctcgtgtgcctggctaccggcttctaccccgaccatgtggaactgtcttggtgggtcaacggcaaagaggtgcacagcggcgtgtctaccgacccccagccactgaaagaacagcccgccctgaacgacagccggtactgcctgagcagcagactgagagtgtccgccaccttctggcagaacccccggaaccacttcagatgccaggtgcagttctacggcctgagcgagaacgacgagtggacccaggacagagccaagcccgtgacccagatcgtgtctgccgaagcctggatccccgaggacacattcttcccaagccccgagagcagctgcgacgtgaagctggtggaaaagagcttcgagacagacaccaacctgaacttccagaacctgagcgtgatcggcttcagaatcctgctgctgaaagtggccggctttaacctgctgatgaccctgcggctgtggtccagccgggttaagttttccagatccgcagacgcacccgcttaccaacaagggcagaaccaactctacaatgaacttaatttggggcggagggaagagtacgacgttctggacaaaaggaggggacgagatcccgagatgggcggaaagcctcagcgaaggaagaatccgcaagaggggctttataacgaactccagaaagataaaatggcagaagcctatagtgagattgggatgaagggagaaaggaggaggggtaaaggtcacgatgggttgtaccaaggattgagcacagccactaaagatacctatgatgcgctccacatgcaggccctgccgccaaga

SEQ ID NO: 24870 - DNA, 867 bp, synthetic construct
  source 1..867: mol_type = other DNA
gaggacctgaagaacgtgttcccacctgaggtggccgtgttcgagcctagcgaggccgagatcagccacacccagaaagccaccctcgtgtgcctggctaccggcttctaccccgaccatgtggaactgtcttggtgggtcaacggcaaagaggtgcacagcggcgtgtctaccgacccccagccactgaaagaacagcccgccctgaacgacagccggtactgcctgagcagcagactgagagtgtccgccaccttctggcagaacccccggaaccacttcagatgccaggtgcagttctacggcctgagcgagaacgacgagtggacccaggacagagccaagcccgtgacccagatcgtgtctgccgaagcctgggagagcagctgcgacgtgaagctggtggaaaagagcttcgagacagacaccaacctgaacttccagaacctgagcgtgatcggcttcagaatcctgctgctgaaagtggccggctttaacctgctgatgaccctgcggctgtggtccagccgggttaagttttccagatccgcagacgcacccgcttaccaacaagggcagaaccaactctacaatgaacttaatttggggcggagggaagagtacgacgttctggacaaaaggaggggacgagatcccgagatgggcggaaagcctcagcgaaggaagaatccgcaagaggggctttataacgaactccagaaagataaaatggcagaagcctatagtgagattgggatgaagggagaaaggaggaggggtaaaggtcacgatgggttgtaccaaggattgagcacagccactaaagatacctatgatgcgctccacatgcaggccctgccgccaaga

SEQ ID NO: 24871 - DNA, 894 bp, synthetic construct
  source 1..894: mol_type = other DNA
gaggacctgaagaacgtgttcccacctgaggtggccgtgttcgagcctagcgaggccgagatcagccacacccagaaagccaccctcgtgtgcctggctaccggcttctaccccgaccatgtggaactgtcttggtgggtcaacggcaaagaggtgcacagcggcgtgtctaccgacccccagccactgaaagaacagcccgccctgaacgacagccggtactgcctgagcagcagactgagagtgtccgccaccttctggcagaacccccggaaccacttcagatgccaggtgcagttctacggcctgagcgagaacgacgagtggacccaggacagagccaagcccgtgacccagatcgtgtctgccgaagcctggcccgaggacacattcttcccaagccccgagagcagctgcgacgtgaagctggtggaaaagagcttcgagacagacaccaacctgaacttccagaacctgagcgtgatcggcttcagaatcctgctgctgaaagtggccggctttaacctgctgatgaccctgcggctgtggtccagccgggttaagttttccagatccgcagacgcacccgcttaccaacaagggcagaaccaactctacaatgaacttaatttggggcggagggaagagtacgacgttctggacaaaaggaggggacgagatcccgagatgggcggaaagcctcagcgaaggaagaatccgcaagaggggctttataacgaactccagaaagataaaatggcagaagcctatagtgagattgggatgaagggagaaaggaggaggggtaaaggtcacgatgggttgtaccaaggattgagcacagccactaaagatacctatgatgcgctccacatgcaggccctgccgccaaga

SEQ ID NO: 24872 - DNA, 924 bp, synthetic construct
  source 1..924: mol_type = other DNA
gaggacctgaagaacgtgttcccacctgaggtggccgtgttcgagcctagcgaggccgagatcagccacacccagaaagccaccctcgtgtgcctggctaccggcttctaccccgaccatgtggaactgtcttggtgggtcaacggcaaagaggtgcacagcggcgtgtctaccgacccccagccactgaaagaacagcccgccctgaacgacagccggtactgcctgagcagcagactgagagtgtccgccaccttctggcagaacccccggaaccacttcagatgccaggtgcagttctacggcctgagcgagaacgacgagtggacccaggacagagccaagcccgtgacccagatcgtgtctgccgaagcctggttcccacccatcaagaccgatgtgattacaatggaccccaaggacaactgctccaaggacgccaacgataccctgctgctccagctgaccaacaccagcgcctactacatgtacttgttgctgctgctgaagtccgtggtgtacttcgccatcatcacatgctgcctgctgcggagaaccgccttctgctgcaacggcgagaagtctcgggttaagttttccagatccgcagacgcacccgcttaccaacaagggcagaaccaactctacaatgaacttaatttggggcggagggaagagtacgacgttctggacaaaaggaggggacgagatcccgagatgggcggaaagcctcagcgaaggaagaatccgcaagaggggctttataacgaactccagaaagataaaatggcagaagcctatagtgagattgggatgaagggagaaaggaggaggggtaaaggtcacgatgggttgtaccaaggattgagcacagccactaaagatacctatgatgcgctccacatgcaggccctgccgccaaga

SEQ ID NO: 24873 - DNA, 918 bp, synthetic construct
  source 1..918: mol_type = other DNA
gaggacctgaagaacgtgttcccacctgaggtggccgtgttcgagcctagcgaggccgagatcagccacacccagaaagccaccctcgtgtgcctggctaccggcttctaccccgaccatgtggaactgtcttggtgggtcaacggcaaagaggtgcacagcggcgtgtctaccgacccccagccactgaaagaacagcccgccctgaacgacagccggtactgcctgagcagcagactgagagtgtccgccaccttctggcagaacccccggaaccacttcagatgccaggtgcagttctacggcctgagcgagaacgacgagtggacccaggacagagccaagcccgtgacccagatcgtgtctgccgaagcctggcccatcaagaccgatgtgattacaatggaccccaaggacaactgctccaaggacgccaacgataccctgctgctccagctgaccaacaccagcgcctactacatgtacttgttgctgctgctgaagtccgtggtgtacttcgccatcatcacatgctgcctgctgcggagaaccgccttctgctgcaacggcgagaagtctcgggttaagttttccagatccgcagacgcacccgcttaccaacaagggcagaaccaactctacaatgaacttaatttggggcggagggaagagtacgacgttctggacaaaaggaggggacgagatcccgagatgggcggaaagcctcagcgaaggaagaatccgcaagaggggctttataacgaactccagaaagataaaatggcagaagcctatagtgagattgggatgaagggagaaaggaggaggggtaaaggtcacgatgggttgtaccaaggattgagcacagccactaaagatacctatgatgcgctccacatgcaggccctgccgccaaga

SEQ ID NO: 24874 - DNA, 894 bp, synthetic construct
  source 1..894: mol_type = other DNA
gaggacctgaagaacgtgttcccacctgaggtggccgtgttcgagcctagcgaggccgagatcagccacacccagaaagccaccctcgtgtgcctggctaccggcttctaccccgaccatgtggaactgtcttggtgggtcaacggcaaagaggtgcacagcggcgtgtctaccgacccccagccactgaaagaacagcccgccctgaacgacagccggtactgcctgagcagcagactgagagtgtccgccaccttctggcagaacccccggaaccacttcagatgccaggtgcagttctacggcctgagcgagaacgacgagtggacccaggacagagccaagcccgtgacccagatcgtgtctgccgaagcctggatggaccccaaggacaactgctccaaggacgccaacgataccctgctgctccagctgaccaacaccagcgcctactacatgtacttgttgctgctgctgaagtccgtggtgtacttcgccatcatcacatgctgcctgctgcggagaaccgccttctgctgcaacggcgagaagtctcgggttaagttttccagatccgcagacgcacccgcttaccaacaagggcagaaccaactctacaatgaacttaatttggggcggagggaagagtacgacgttctggacaaaaggaggggacgagatcccgagatgggcggaaagcctcagcgaaggaagaatccgcaagaggggctttataacgaactccagaaagataaaatggcagaagcctatagtgagattgggatgaagggagaaaggaggaggggtaaaggtcacgatgggttgtaccaaggattgagcacagccactaaagatacctatgatgcgctccacatgcaggccctgccgccaaga

SEQ ID NO: 24875 - DNA, 918 bp, synthetic construct; identical to SEQ ID NO: 24873
  source 1..918: mol_type = other DNA

SEQ ID NO: 24876 - DNA, 876 bp, synthetic construct
  source 1..876: mol_type = other DNA
gaggacctgaagaacgtgttcccacctgaggtggccgtgttcgagcctagcgaggccgagatcagccacacccagaaagccaccctcgtgtgcctggctaccggcttctaccccgaccatgtggaactgtcttggtgggtcaacggcaaagaggtgcacagcggcgtgtctaccgacccccagccactgaaagaacagcccgccctgaacgacagccggtactgcctgagcagcagactgagagtgtccgccaccttctggcagaacccccggaaccacttcagatgccaggtgcagttctacggcctgagcgagaacgacgagtggacccaggacagagccaagcccgtgacccagatcgtgtctgccgaagcctggtgctccaaggacgccaacgataccctgctgctccagctgaccaacaccagcgcctactacatgtacttgttgctgctgctgaagtccgtggtgtacttcgccatcatcacatgctgcctgctgcggagaaccgccttctgctgcaacggcgagaagtctcgggttaagttttccagatccgcagacgcacccgcttaccaacaagggcagaaccaactctacaatgaacttaatttggggcggagggaagagtacgacgttctggacaaaaggaggggacgagatcccgagatgggcggaaagcctcagcgaaggaagaatccgcaagaggggctttataacgaactccagaaagataaaatggcagaagcctatagtgagattgggatgaagggagaaaggaggaggggtaaaggtcacgatgggttgtaccaaggattgagcacagccactaaagatacctatgatgcgctccacatgcaggccctgccgccaaga

SEQ ID NO: 24877 - DNA, 921 bp, synthetic construct
  source 1..921: mol_type = other DNA
gaggacctgaagaacgtgttcccacctgaggtggccgtgttcgagcctagcgaggccgagatcagccacacccagaaagccaccctcgtgtgcctggctaccggcttctaccccgaccatgtggaactgtcttggtgggtcaacggcaaagaggtgcacagcggcgtgtctaccgacccccagccactgaaagaacagcccgccctgaacgacagccggtactgcctgagcagcagactgagagtgtccgccaccttctggcagaacccccggaaccacttcagatgccaggtgcagttctacggcctgagcgagaacgacgagtggacccaggacagagccaagcccgtgacccagatcgtgtctgccgaagcctgggaagtgaaaaccgactccaccgaccacgtgaagcccaaagagacagagaacaccaagcagcccagcaagagctgccacaagcccaaggccatcgtgcacaccgagaaagtgaacatgatgagcctgaccgtgctgggcctgcggatgctgttcgccaaaaccgtggccgtgaacttcctgctgaccgccaagctgttcttcctccgggttaagttttccagatccgcagacgcacccgcttaccaacaagggcagaaccaactctacaatgaacttaatttggggcggagggaagagtacgacgttctggacaaaaggaggggacgagatcccgagatgggcggaaagcctcagcgaaggaagaatccgcaagaggggctttataacgaactccagaaagataaaatggcagaagcctatagtgagattgggatgaagggagaaaggaggaggggtaaaggtcacgatgggttgtaccaaggattgagcacagccactaaagatacctatgatgcgctccacatgcaggccctgccgccaaga

SEQ ID NO: 24878 - DNA, 900 bp, synthetic construct
  source 1..900: mol_type = other DNA
gaggacctgaagaacgtgttcccacctgaggtggccgtgttcgagcctagcgaggccgagatcagccacacccagaaagccaccctcgtgtgcctggctaccggcttctaccccgaccatgtggaactgtcttggtgggtcaacggcaaagaggtgcacagcggcgtgtctaccgacccccagccactgaaagaacagcccgccctgaacgacagccggtactgcctgagcagcagactgagagtgtccgccaccttctggcagaacccccggaaccacttcagatgccaggtgcagttctacggcctgagcgagaacgacgagtggacccaggacagagccaagcccgtgacccagatcgtgtctgccgaagcctgggaccacgtgaagcccaaagagacagagaacaccaagcagcccagcaagagctgccacaagcccaaggccatcgtgcacaccgagaaagtgaacatgatgagcctgaccgtgctgggcctgcggatgctgttcgccaaaaccgtggccgtgaacttcctgctgaccgccaagctgttcttcctccgggttaagttttccagatccgcagacgcacccgcttaccaacaagggcagaaccaactctacaatgaacttaatttggggcggagggaagagtacgacgttctggacaaaaggaggggacgagatcccgagatgggcggaaagcctcagcgaaggaagaatccgcaagaggggctttataacgaactccagaaagataaaatggcagaagcctatagtgagattgggatgaagggagaaaggaggaggggtaaaggtcacgatgggttgtaccaaggattgagcacagccactaaagatacctatgatgcgctccacatgcaggccctgccgccaaga

SEQ ID NO: 24879 - DNA, 903 bp, synthetic construct
  source 1..903: mol_type = other DNA
gaggacctgaagaacgtgttcccacctgaggtggccgtgttcgagcctagcgaggccgagatcagccacacccagaaagccaccctcgtgtgcctggctaccggcttctaccccgaccatgtggaactgtcttggtgggtcaacggcaaagaggtgcacagcggcgtgtctaccgacccccagccactgaaagaacagcccgccctgaacgacagccggtactgcctgagcagcagactgagagtgtccgccaccttctggcagaacccccggaaccacttcagatgccaggtgcagttctacggcctgagcgagaacgacgagtggacccaggacagagccaagcccgtgacccagatcgtgtctgccgaagcctggggcagaatccccgaggacacattcttcccaagccccgagagcagctgcgacgtgaagctggtggaaaagagcttcgagacagacaccaacctgaacttccagaacctgagcgtgatcggcttcagaatcctgctgctgaaagtggccggctttaacctgctgatgaccctgcggctgtggtccagccgggttaagttttccagatccgcagacgcacccgcttaccaacaagggcagaaccaactctacaatgaacttaatttggggcggagggaagagtacgacgttctggacaaaaggaggggacgagatcccgagatgggcggaaagcctcagcgaaggaagaatccgcaagaggggctttataacgaactccagaaagataaaatggcagaagcctatagtgagattgggatgaagggagaaaggaggaggggtaaaggtcacgatgggttgtaccaaggattgagcacagccactaaagatacctatgatgcgctccacatgcaggccctgccgccaaga

SEQ ID NO: 24880 - DNA, 873 bp, synthetic construct
  source 1..873: mol_type = other DNA
gaggacctgaagaacgtgttcccacctgaggtggccgtgttcgagcctagcgaggccgagatcagccacacccagaaagccaccctcgtgtgcctggctaccggcttctaccccgaccatgtggaactgtcttggtgggtcaacggcaaagaggtgcacagcggcgtgtctaccgacccccagccactgaaagaacagcccgccctgaacgacagccggtactgcctgagcagcagactgagagtgtccgccaccttctggcagaacccccggaaccacttcagatgccaggtgcagttctacggcctgagcgagaacgacgagtggacccaggacagagccaagcccgtgacccagatcgtgtctgccgaagcctggggcagagagagcagctgcgacgtgaagctggtggaaaagagcttcgagacagacaccaacctgaacttccagaacctgagcgtgatcggcttcagaatcctgctgctgaaagtggccggctttaacctgctgatgaccctgcggctgtggtccagccgggttaagttttccagatccgcagacgcacccgcttaccaacaagggcagaaccaactctacaatgaacttaatttggggcggagggaagagtacgacgttctggacaaaaggaggggacgagatcccgagatgggcggaaagcctcagcgaaggaagaatccgcaagaggggctttataacgaactccagaaagataaaatggcagaagcctatagtgagattgggatgaagggagaaaggaggaggggtaaaggtcacgatgggttgtaccaaggattgagcacagccactaaagatacctatgatgcgctccacatgcaggccctgccgccaaga

SEQ ID NO: 24881 - DNA, 900 bp, synthetic construct
  source 1..900: mol_type = other DNA
gaggacctgaagaacgtgttcccacctgaggtggccgtgttcgagcctagcgaggccgagatcagccacacccagaaagccaccctcgtgtgcctggctaccggcttctaccccgaccatgtggaactgtcttggtgggtcaacggcaaagaggtgcacagcggcgtgtctaccgacccccagccactgaaagaacagcccgccctgaacgacagccggtactgcctgagcagcagactgagagtgtccgccaccttctggcagaacccccggaaccacttcagatgccaggtgcagttctacggcctgagcgagaacgacgagtggacccaggacagagccaagcccgtgacccagatcgtgtctgccgaagcctggggcagacccgaggacacattcttcccaagccccgagagcagctgcgacgtgaagctggtggaaaagagcttcgagacagacaccaacctgaacttccagaacctgagcgtgatcggcttcagaatcctgctgctgaaagtggccggctttaacctgctgatgaccctgcggctgtggtccagccgggttaagttttccagatccgcagacgcacccgcttaccaacaagggcagaaccaactctacaatgaacttaatttggggcggagggaagagtacgacgttctggacaaaaggaggggacgagatcccgagatgggcggaaagcctcagcgaaggaagaatccgcaagaggggctttataacgaactccagaaagataaaatggcagaagcctatagtgagattgggatgaagggagaaaggaggaggggtaaaggtcacgatgggttgtaccaaggattgagcacagccactaaagatacctatgatgcgctccacatgcaggccctgccgccaaga

SEQ ID NO: 24882 - DNA, 930 bp, synthetic construct
  source 1..930: mol_type = other DNA
gaggacctgaagaacgtgttcccacctgaggtggccgtgttcgagcctagcgaggccgagatcagccacacccagaaagccaccctcgtgtgcctggctaccggcttctaccccgaccatgtggaactgtcttggtgggtcaacggcaaagaggtgcacagcggcgtgtctaccgacccccagccactgaaagaacagcccgccctgaacgacagccggtactgcctgagcagcagactgagagtgtccgccaccttctggcagaacccccggaaccacttcagatgccaggtgcagttctacggcctgagcgagaacgacgagtggacccaggacagagccaagcccgtgacccagatcgtgtctgccgaagcctggggcagattcccacccatcaagaccgatgtgattacaatggaccccaaggacaactgctccaaggacgccaacgataccctgctgctccagctgaccaacaccagcgcctactacatgtacttgttgctgctgctgaagtccgtggtgtacttcgccatcatcacatgctgcctgctgcggagaaccgccttctgctgcaacggcgagaagtctcgggttaagttttccagatccgcagacgcacccgcttaccaacaagggcagaaccaactctacaatgaacttaatttggggcggagggaagagtacgacgttctggacaaaaggaggggacgagatcccgagatgggcggaaagcctcagcgaaggaagaatccgcaagaggggctttataacgaactccagaaagataaaatggcagaagcctatagtgagattgggatgaagggagaaaggaggaggggtaaaggtcacgatgggttgtaccaaggattgagcacagccactaaagatacctatgatgcgctccacatgcaggccctgccgccaaga

SEQ ID NO: 24883 - DNA, 924 bp, synthetic construct
  source 1..924: mol_type = other DNA
gaggacctgaagaacgtgttcccacctgaggtggccgtgttcgagcctagcgaggccgagatcagccacacccagaaagccaccctcgtgtgcctggctaccggcttctaccccgaccatgtggaactgtcttggtgggtcaacggcaaagaggtgcacagcggcgtgtctaccgacccccagccactgaaagaacagcccgccctgaacgacagccggtactgcctgagcagcagactgagagtgtccgccaccttctggcagaacccccggaaccacttcagatgccaggtgcagttctacggcctgagcgagaacgacgagtggacccaggacagagccaagcccgtgacccagatcgtgtctgccgaagcctggggcagacccatcaagaccgatgtgattacaatggaccccaaggacaactgctccaaggacgccaacgataccctgctgctccagctgaccaacaccagcgcctactacatgtacttgttgctgctgctgaagtccgtggtgtacttcgccatcatcacatgctgcctgctgcggagaaccgccttctgctgcaacggcgagaagtctcgggttaagttttccagatccgcagacgcacccgcttaccaacaagggcagaaccaactctacaatgaacttaatttggggcggagggaagagtacgacgttctggacaaaaggaggggacgagatcccgagatgggcggaaagcctcagcgaaggaagaatccgcaagaggggctttataacgaactccagaaagataaaatggcagaagcctatagtgagattgggatgaagggagaaaggaggaggggtaaaggtcacgatgggttgtaccaaggattgagcacagccactaaagatacctatgatgcgctccacatgcaggccctgccgccaaga

SEQ ID NO: 24884 - DNA, 900 bp, synthetic construct
  source 1..900: mol_type = other DNA
gaggacctgaagaacgtgttcccacctgaggtggccgtgttcgagcctagcgaggccgagatcagccacacccagaaagccaccctcgtgtgcctggctaccggcttctaccccgaccatgtggaactgtcttggtgggtcaacggcaaagaggtgcacagcggcgtgtctaccgacccccagccactgaaagaacagcccgccctgaacgacagccggtactgcctgagcagcagactgagagtgtccgccaccttctggcagaacccccggaaccacttcagatgccaggtgcagttctacggcctgagcgagaacgacgagtggacccaggacagagccaagcccgtgacccagatcgtgtctgccgaagcctggggcagaatggaccccaaggacaactgctccaaggacgccaacgataccctgctgctccagctgaccaacaccagcgcctactacatgtacttgttgctgctgctgaagtccgtggtgtacttcgccatcatcacatgctgcctgctgcggagaaccgccttctgctgcaacggcgagaagtctcgggttaagttttccagatccgcagacgcacccgcttaccaacaagggcagaaccaactctacaatgaacttaatttggggcggagggaagagtacgacgttctggacaaaaggaggggacgagatcccgagatgggcggaaagcctcagcgaaggaagaatccgcaagaggggctttataacgaactccagaaagataaaatggcagaagcctatagtgagattgggatgaagggagaaaggaggaggggtaaaggtcacgatgggttgtaccaaggattgagcacagccactaaagatacctatgatgcgctccacatgcaggccctgccgccaaga

SEQ ID NO: 24885 - DNA, 924 bp, synthetic construct; identical to SEQ ID NO: 24883
  source 1..924: mol_type = other DNA

SEQ ID NO: 24886 - DNA, 882 bp, synthetic construct
  source 1..882: mol_type = other DNA
gaggacctgaagaacgtgttcccacctgaggtggccgtgttcgagcctagcgaggccgagatcagccacacccagaaagccaccctcgtgtgcctggctaccggcttctaccccgaccatgtggaactgtcttggtgggtcaacggcaaagaggtgcacagcggcgtgtctaccgacccccagccactgaaagaacagcccgccctgaacgacagccggtactgcctgagcagcagactgagagtgtccgccaccttctggcagaacccccggaaccacttcagatgccaggtgcagttctacggcctgagcgagaacgacgagtggacccaggacagagccaagcccgtgacccagatcgtgtctgccgaagcctggggcagatgctccaaggacgccaacgataccctgctgctccagctgaccaacaccagcgcctactacatgtacttgttgctgctgctgaagtccgtggtgtacttcgccatcatcacatgctgcctgctgcggagaaccgccttctgctgcaacggcgagaagtctcgggttaagttttccagatccgcagacgcacccgcttaccaacaagggcagaaccaactctacaatgaacttaatttggggcggagggaagagtacgacgttctggacaaaaggaggggacgagatcccgagatgggcggaaagcctcagcgaaggaagaatccgcaagaggggctttataacgaactccagaaagataaaatggcagaagcctatagtgagattgggatgaagggagaaaggaggaggggtaaaggtcacgatgggttgtaccaaggattgagcacagccactaaagatacctatgatgcgctccacatgcaggccctgccgccaaga

SEQ ID NO: 24887 - DNA, 927 bp, synthetic construct
  source 1..927: mol_type = other DNA
gaggacctgaagaacgtgttcccacctgaggtggccgtgttcgagcctagcgaggccgagatcagccacacccagaaagccaccctcgtgtgcctggctaccggcttctaccccgaccatgtggaactgtcttggtgggtcaacggcaaagaggtgcacagcggcgtgtctaccgacccccagccactgaaagaacagcccgccctgaacgacagccggtactgcctgagcagcagactgagagtgtccgccaccttctggcagaacccccggaaccacttcagatgccaggtgcagttctacggcctgagcgagaacgacgagtggacccaggacagagccaagcccgtgacccagatcgtgtctgccgaagcctggggcagagaagtgaaaaccgactccaccgaccacgtgaagcccaaagagacagagaacaccaagcagcccagcaagagctgccacaagcccaaggccatcgtgcacaccgagaaagtgaacatgatgagcctgaccgtgctgggcctgcggatgctgttcgccaaaaccgtggccgtgaacttcctgctgaccgccaagctgttcttcctccgggttaagttttccagatccgcagacgcacccgcttaccaacaagggcagaaccaactctacaatgaacttaatttggggcggagggaagagtacgacgttctggacaaaaggaggggacgagatcccgagatgggcggaaagcctcagcgaaggaagaatccgcaagaggggctttataacgaactccagaaagataaaatggcagaagcctatagtgagattgggatgaagggagaaaggaggaggggtaaaggtcacgatgggttgtaccaaggattgagcacagccactaaagatacctatgatgcgctccacatgcaggccctgccgccaaga

SEQ ID NO: 24888 - DNA, 906 bp, synthetic construct
  source 1..906: mol_type = other DNA
gaggacctgaagaacgtgttcccacctgaggtggccgtgttcgagcctagcgaggccgagatcagccacacccagaaagccaccctcgtgtgcctggctaccggcttctaccccgaccatgtggaactgtcttggtgggtcaacggcaaagaggtgcacagcggcgtgtctaccgacccccagccactgaaagaacagcccgccctgaacgacagccggtactgcctgagcagcagactgagagtgtccgccaccttctggcagaacccccggaaccacttcagatgccaggtgcagttctacggcctgagcgagaacgacgagtggacccaggacagagccaagcccgtgacccagatcgtgtctgccgaagcctggggcagagaccacgtgaagcccaaagagacagagaacaccaagcagcccagcaagagctgccacaagcccaaggccatcgtgcacaccgagaaagtgaacatgatgagcctgaccgtgctgggcctgcggatgctgttcgccaaaaccgtggccgtgaacttcctgctgaccgccaagctgttcttcctccgggttaagttttccagatccgcagacgcacccgcttaccaacaagggcagaaccaactctacaatgaacttaatttggggcggagggaagagtacgacgttctggacaaaaggaggggacgagatcccgagatgggcggaaagcctcagcgaaggaagaatccgcaagaggggctttataacgaactccagaaagataaaatggcagaagcctatagtgagattgggatgaagggagaaaggaggaggggtaaaggtcacgatgggttgtaccaaggattgagcacagccactaaagatacctatgatgcgctccacatgcaggccctgccgccaaga

SEQ ID NO: 24889 - DNA, 912 bp, synthetic construct
  source 1..912: mol_type = other DNA
gaggacctgaagaacgtgttcccacctgaggtggccgtgttcgagcctagcgaggccgagatcagccacacccagaaagccaccctcgtgtgcctggctaccggcttctaccccgaccatgtggaactgtcttggtgggtcaacggcaaagaggtgcacagcggcgtgtctaccgacccccagccactgaaagaacagcccgccctgaacgacagccggtactgcctgagcagcagactgagagtgtccgccaccttctggcagaacccccggaaccacttcagatgccaggtgcagttctacggcctgagcgagaacgacgagtggacccaggacagagccaagcccgtgacccagatcgtgtctgccgaagcctggggcagagccgattgcatccccgaggacacattcttcccaagccccgagagcagctgcgacgtgaagctggtggaaaagagcttcgagacagacaccaacctgaacttccagaacctgagcgtgatcggcttcagaatcctgctgctgaaagtggccggctttaacctgctgatgaccctgcggctgtggtccagccgggttaagttttccagatccgcagacgcacccgcttaccaacaagggcagaaccaactctacaatgaacttaatttggggcggagggaagagtacgacgttctggacaaaaggaggggacgagatcccgagatgggcggaaagcctcagcgaaggaagaatccgcaagaggggctttataacgaactccagaaagataaaatggcagaagcctatagtgagattgggatgaagggagaaaggaggaggggtaaaggtcacgatgggttgtaccaaggattgagcacagccactaaagatacctatgatgcgctccacatgcaggccctgccgccaaga

SEQ ID NO: 24890 - DNA, 882 bp, synthetic construct
  source 1..882: mol_type = other DNA
gaggacctgaagaacgtgttcccacctgaggtggccgtgttcgagcctagcgaggccgagatcagccacacccagaaagccaccctcgtgtgcctggctaccggcttctaccccgaccatgtggaactgtcttggtgggtcaacggcaaagaggtgcacagcggcgtgtctaccgacccccagccactgaaagaacagcccgccctgaacgacagccggtactgcctgagcagcagactgagagtgtccgccaccttctggcagaacccccggaaccacttcagatgccaggtgcagttctacggcctgagcgagaacgacgagtggacccaggacagagccaagcccgtgacccagatcgtgtctgccgaagcctggggcagagccgattgcgagagcagctgcgacgtgaagctggtggaaaagagcttcgagacagacaccaacctgaacttccagaacctgagcgtgatcggcttcagaatcctgctgctgaaagtggccggctttaacctgctgatgaccctgcggctgtggtccagccgggttaagttttccagatccgcagacgcacccgcttaccaacaagggcagaaccaactctacaatgaacttaatttggggcggagggaagagtacgacgttctggacaaaaggaggggacgagatcccgagatgggcggaaagcctcagcgaaggaagaatccgcaagaggggctttataacgaactccagaaagataaaatggcagaagcctatagtgagattgggatgaagggagaaaggaggaggggtaaaggtcacgatgggttgtaccaaggattgagcacagccactaaagatacctatgatgcgctccacatgcaggccctgccgccaaga

SEQ ID NO: 24891 - DNA, 909 bp, synthetic construct
  source 1..909: mol_type = other DNA
gaggacctgaagaacgtgttcccacctgaggtggccgtgttcgagcctagcgaggccgagatcagccacacccagaaagccaccctcgtgtgcctggctaccggcttctaccccgaccatgtggaactgtcttggtgggtcaacggcaaagaggtgcacagcggcgtgtctaccgacccccagccactgaaagaacagcccgccctgaacgacagccggtactgcctgagcagcagactgagagtgtccgccaccttctggcagaacccccggaaccacttcagatgccaggtgcagttctacggcctgagcgagaacgacgagtggacccaggacagagccaagcccgtgacccagatcgtgtctgccgaagcctggggcagagccgattgccccgaggacacattcttcccaagccccgagagcagctgcgacgtgaagctggtggaaaagagcttcgagacagacaccaacctgaacttccagaacctgagcgtgatcggcttcagaatcctgctgctgaaagtggccggctttaacctgctgatgaccctgcggctgtggtccagccgggttaagttttccagatccgcagacgcacccgcttaccaacaagggcagaaccaactctacaatgaacttaatttggggcggagggaagagtacgacgttctggacaaaaggaggggacgagatcccgagatgggcggaaagcctcagcgaaggaagaatccgcaagaggggctttataacgaactccagaaagataaaatggcagaagcctatagtgagattgggatgaagggagaaaggaggaggggtaaaggtcacgatgggttgtaccaaggattgagcacagccactaaagatacctatgatgcgctccacatgcaggccctgccgccaaga

SEQ ID NO: 24892 - DNA, 939 bp, synthetic construct
  source 1..939: mol_type = other DNA
gaggacctgaagaacgtgttcccacctgaggtggccgtgttcgagcctagcgaggccgagatcagccacacccagaaagccaccctcgtgtgcctggctaccggcttctaccccgaccatgtggaactgtcttggtgggtcaacggcaaagaggtgcacagcggcgtgtctaccgacccccagccactgaaagaacagcccgccctgaacgacagccggtactgcctgagcagcagactgagagtgtccgccaccttctggcagaacccccggaaccacttcagatgccaggtgcagttctacggcctgagcgagaacgacgagtggacccaggacagagccaagcccgtgacccagatcgtgtctgccgaagcctggggcagagccgattgcttcccacccatcaagaccgatgtgattacaatggaccccaaggacaactgctccaaggacgccaacgataccctgctgctccagctgaccaacaccagcgcctactacatgtacttgttgctgctgctgaagtccgtggtgtacttcgccatcatcacatgctgcctgctgcggagaaccgccttctgctgcaacggcgagaagtctcgggttaagttttccagatccgcagacgcacccgcttaccaacaagggcagaaccaactctacaatgaacttaatttggggcggagggaagagtacgacgttctggacaaaaggaggggacgagatcccgagatgggcggaaagcctcagcgaaggaagaatccgcaagaggggctttataacgaactccagaaagataaaatggcagaagcctatagtgagattgggatgaagggagaaaggaggaggggtaaaggtcacgatgggttgtaccaaggattgagcacagccactaaagatacctatgatgcgctccacatgcaggccctgccgccaaga

SEQ ID NO: 24893 - DNA, 933 bp, synthetic construct
  source 1..933: mol_type = other DNA
gaggacctgaagaacgtgttcccacctgaggtggccgtgttcgagcctagcgaggccgagatcagccacacccagaaagccaccctcgtgtgcctggctaccggcttctaccccgaccatgtggaactgtcttggtgggtcaacggcaaagaggtgcacagcggcgtgtctaccgacccccagccactgaaagaacagcccgccctgaacgacagccggtactgcctgagcagcagactgagagtgtccgccaccttctggcagaacccccggaaccacttcagatgccaggtgcagttctacggcctgagcgagaacgacgagtggacccaggacagagccaagcccgtgacccagatcgtgtctgccgaagcctggggcagagccgattgccccatcaagaccgatgtgattacaatggaccccaaggacaactgctccaaggacgccaacgataccctgctgctccagctgaccaacaccagcgcctactacatgtacttgttgctgctgctgaagtccgtggtgtacttcgccatcatcacatgctgcctgctgcggagaaccgccttctgctgcaacggcgagaagtctcgggttaagttttccagatccgcagacgcacccgcttaccaacaagggcagaaccaactctacaatgaacttaatttggggcggagggaagagtacgacgttctggacaaaaggaggggacgagatcccgagatgggcggaaagcctcagcgaaggaagaatccgcaagaggggctttataacgaactccagaaagataaaatggcagaagcctatagtgagattgggatgaagggagaaaggaggaggggtaaaggtcacgatgggttgtaccaaggattgagcacagccactaaagatacctatgatgcgctccacatgcaggccctgccgccaaga

SEQ ID NO: 24894 - DNA, 909 bp, synthetic construct
  source 1..909: mol_type = other DNA
gaggacctgaagaacgtgttcccacctgaggtggccgtgttcgagcctagcgaggccgagatcagccacacccagaaagccaccctcgtgtgcctggctaccggcttctaccccgaccatgtggaactgtcttggtgggtcaacggcaaagaggtgcacagcggcgtgtctaccgacccccagccactgaaagaacagcccgccctgaacgacagccggtactgcctgagcagcagactgagagtgtccgccaccttctggcagaacccccggaaccacttcagatgccaggtgcagttctacggcctgagcgagaacgacgagtggacccaggacagagccaagcccgtgacccagatcgtgtctgccgaagcctggggcagagccgattgcatggaccccaaggacaactgctccaaggacgccaacgataccctgctgctccagctgaccaacaccagcgcctactacatgtacttgttgctgctgctgaagtccgtggtgtacttcgccatcatcacatgctgcctgctgcggagaaccgccttctgctgcaacggcgagaagtctcgggttaagttttccagatccgcagacgcacccgcttaccaacaagggcagaaccaactctacaatgaacttaatttggggcggagggaagagtacgacgttctggacaaaaggaggggacgagatcccgagatgggcggaaagcctcagcgaaggaagaatccgcaagaggggctttataacgaactccagaaagataaaatggcagaagcctatagtgagattgggatgaagggagaaaggaggaggggtaaaggtcacgatgggttgtaccaaggattgagcacagccactaaagatacctatgatgcgctccacatgcaggccctgccgccaaga

SEQ ID NO: 24895 - DNA, 933 bp, synthetic construct; identical to SEQ ID NO: 24893
  source 1..933: mol_type = other DNA

SEQ ID NO: 24896 - DNA, 891 bp, synthetic construct
  source 1..891: mol_type = other DNA
gaggacctgaagaacgtgttcccacctgaggtggccgtgttcgagcctagcgaggccgagatcagccacacccagaaagccaccctcgtgtgcctggctaccggcttctaccccgaccatgtggaactgtcttggtgggtcaacggcaaagaggtgcacagcggcgtgtctaccgacccccagccactgaaagaacagcccgccctgaacgacagccggtactgcctgagcagcagactgagagtgtccgccaccttctggcagaacccccggaaccacttcagatgccaggtgcagttctacggcctgagcgagaacgacgagtggacccaggacagagccaagcccgtgacccagatcgtgtctgccgaagcctggggcagagccgattgctgctccaaggacgccaacgataccctgctgctccagctgaccaacaccagcgcctactacatgtacttgttgctgctgctgaagtccgtggtgtacttcgccatcatcacatgctgcctgctgcggagaaccgccttctgctgcaacggcgagaagtctcgggttaagttttccagatccgcagacgcacccgcttaccaacaagggcagaaccaactctacaatgaacttaatttggggcggagggaagagtacgacgttctggacaaaaggaggggacgagatcccgagatgggcggaaagcctcagcgaaggaagaatccgcaagaggggctttataacgaactccagaaagataaaatggcagaagcctatagtgagattgggatgaagggagaaaggaggaggggtaaaggtcacgatgggttgtaccaaggattgagcacagccactaaagatacctatgatgcgctccacatgcaggccctgccgccaaga

SEQ ID NO: 24897 - DNA, 936 bp, synthetic construct
  source 1..936: mol_type = other DNA
gaggacctgaagaacgtgttcccacctgaggtggccgtgttcgagcctagcgaggccgagatcagccacacccagaaagccaccctcgtgtgcctggctaccggcttctaccccgaccatgtggaactgtcttggtgggtcaacggcaaagaggtgcacagcggcgtgtctaccgacccccagccactgaaagaacagcccgccctgaacgacagccggtactgcctgagcagcagactgagagtgtccgccaccttctggcagaacccccggaaccacttcagatgccaggtgcagttctacggcctgagcgagaacgacgagtggacccaggacagagccaagcccgtgacccagatcgtgtctgccgaagcctggggcagagccgattgcgaagtgaaaaccgactccaccgaccacgtgaagcccaaagagacagagaacaccaagcagcccagcaagagctgccacaagcccaaggccatcgtgcacaccgagaaagtgaacatgatgagcctgaccgtgctgggcctgcggatgctgttcgccaaaaccgtggccgtgaacttcctgctgaccgccaagctgttcttcctccgggttaagttttccagatccgcagacgcacccgcttaccaacaagggcagaaccaactctacaatgaacttaatttggggcggagggaagagtacgacgttctggacaaaaggaggggacgagatcccgagatgggcggaaagcctcagcgaaggaagaatccgcaagaggggctttataacgaactccagaaagataaaatggcagaagcctatagtgagattgggatgaagggagaaaggaggaggggtaaaggtcacgatgggttgtaccaaggattgagcacagccactaaagatacctatgatgcgctccacatgcaggccctgccgccaaga

SEQ ID NO: 24898 - DNA, 915 bp, synthetic construct
  source 1..915: mol_type = other DNA
gaggacctgaagaacgtgttcccacctgaggtggccgtgttcgagcctagcgaggccgagatcagccacacccagaaagccaccctcgtgtgcctggctaccggcttctaccccgaccatgtggaactgtcttggtgggtcaacggcaaagaggtgcacagcggcgtgtctaccgacccccagccactgaaagaacagcccgccctgaacgacagccggtactgcctgagcagcagactgagagtgtccgccaccttctggcagaacccccggaaccacttcagatgccaggtgcagttctacggcctgagcgagaacgacgagtggacccaggacagagccaagcccgtgacccagatcgtgtctgccgaagcctggggcagagccgattgcgaccacgtgaagcccaaagagacagagaacaccaagcagcccagcaagagctgccacaagcccaaggccatcgtgcacaccgagaaagtgaacatgatgagcctgaccgtgctgggcctgcggatgctgttcgccaaaaccgtggccgtgaacttcctgctgaccgccaagctgttcttcctccgggttaagttttccagatccgcagacgcacccgcttaccaacaagggcagaaccaactctacaatgaacttaatttggggcggagggaagagtacgacgttctggacaaaaggaggggacgagatcccgagatgggcggaaagcctcagcgaaggaagaatccgcaagaggggctttataacgaactccagaaagataaaatggcagaagcctatagtgagattgggatgaagggagaaaggaggaggggtaaaggtcacgatgggttgtaccaaggattgagcacagccactaaagatacctatgatgcgctccacatgcaggccctgccgccaaga

SEQ ID NO: 24899 - DNA, 873 bp, synthetic construct
  source 1..873: mol_type = other DNA
gaggacctgaagaacgtgttcccacctgaggtggccgtgttcgagcctagcgaggccgagatcagccacacccagaaagccaccctcgtgtgcctggctaccggcttctaccccgaccatgtggaactgtcttggtgggtcaacggcaaagaggtgcacagcggcgtgtctaccgacccccagccactgaaagaacagcccgccctgaacgacagccggtactgcctgagcagcagactgagagtgtccgccaccttctggcagaacccccggaaccacttcagatgccaggtgcagttctacggcctgagcgagaacgacgagtggacccaggacagagccaagcccgtgaccatccccgaggacacattcttcccaagccccgagagcagctgcgacgtgaagctggtggaaaagagcttcgagacagacaccaacctgaacttccagaacctgagcgtgatcggcttcagaatcctgctgctgaaagtggccggctttaacctgctgatgaccctgcggctgtggtccagccgggttaagttttccagatccgcagacgcacccgcttaccaacaagggcagaaccaactctacaatgaacttaatttggggcggagggaagagtacgacgttctggacaaaaggaggggacgagatcccgagatgggcggaaagcctcagcgaaggaagaatccgcaagaggggctttataacgaactccagaaagataaaatggcagaagcctatagtgagattgggatgaagggagaaaggaggaggggtaaaggtcacgatgggttgtaccaaggattgagcacagccactaaagatacctatgatgcgctccacatgcaggccctgccgccaaga

SEQ ID NO: 24900 - DNA, 843 bp, synthetic construct
  source 1..843: mol_type = other DNA
gaggacctgaagaacgtgttcccacctgaggtggccgtgttcgagcctagcgaggccgagatcagccacacccagaaagccaccctcgtgtgcctggctaccggcttctaccccgaccatgtggaactgtcttggtgggtcaacggcaaagaggtgcacagcggcgtgtctaccgacccccagccactgaaagaacagcccgccctgaacgacagccggtactgcctgagcagcagactgagagtgtccgccaccttctggcagaacccccggaaccacttcagatgccaggtgcagttctacggcctgagcgagaacgacgagtggacccaggacagagccaagcccgtgaccgagagcagctgcgacgtgaagctggtggaaaagagcttcgagacagacaccaacctgaacttccagaacctgagcgtgatcggcttcagaatcctgctgctgaaagtggccggctttaacctgctgatgaccctgcggctgtggtccagccgggttaagttttccagatccgcagacgcacccgcttaccaacaagggcagaaccaactctacaatgaacttaatttggggcggagggaagagtacgacgttctggacaaaaggaggggacgagatcccgagatgggcggaaagcctcagcgaaggaagaatccgcaagaggggctttataacgaactccagaaagataaaatggcagaagcctatagtgagattgggatgaagggagaaaggaggaggggtaaaggtcacgatgggttgtaccaaggattgagcacagccactaaagatacctatgatgcgctccacatgcaggccctgccgccaaga

SEQ ID NO: 24901 - DNA, 870 bp, synthetic construct
  source 1..870: mol_type = other DNA
gaggacctgaagaacgtgttcccacctgaggtggccgtgttcgagcctagcgaggccgagatcagccacacccagaaagccaccctcgtgtgcctggctaccggcttctaccccgaccatgtggaactgtcttggtgggtcaacggcaaagaggtgcacagcggcgtgtctaccgacccccagccactgaaagaacagcccgccctgaacgacagccggtactgcctgagcagcagactgagagtgtccgccaccttctggcagaacccccggaaccacttcagatgccaggtgcagttctacggcctgagcgagaacgacgagtggacccaggacagagccaagcccgtgacccccgaggacacattcttcccaagccccgagagcagctgcgacgtgaagctggtggaaaagagcttcgagacagacaccaacctgaacttccagaacctgagcgtgatcggcttcagaatcctgctgctgaaagtggccggctttaacctgctgatgaccctgcggctgtggtccagccgggttaagttttccagatccgcagacgcacccgcttaccaacaagggcagaaccaactctacaatgaacttaatttggggcggagggaagagtacgacgttctggacaaaaggaggggacgagatcccgagatgggcggaaagcctcagcgaaggaagaatccgcaagaggggctttataacgaactccagaaagataaaatggcagaagcctatagtgagattgggatgaagggagaaaggaggaggggtaaaggtcacgatgggttgtaccaaggattgagcacagccactaaagatacctatgatgcgctccacatgcaggccctgccgccaaga

SEQ ID NO: 24902 - DNA, 900 bp, synthetic construct
  source 1..900: mol_type = other DNA
gaggacctgaagaacgtgttcccacctgaggtggccgtgttcgagcctagcgaggccgagatcagccacacccagaaagccaccctcgtgtgcctggctaccggcttctaccccgaccatgtggaactgtcttggtgggtcaacggcaaagaggtgcacagcggcgtgtctaccgacccccagccactgaaagaacagcccgccctgaacgacagccggtactgcctgagcagcagactgagagtgtccgccaccttctggcagaacccccggaaccacttcagatgccaggtgcagttctacggcctgagcgagaacgacgagtggacccaggacagagccaagcccgtgaccttcccacccatcaagaccgatgtgattacaatggaccccaaggacaactgctccaaggacgccaacgataccctgctgctccagctgaccaacaccagcgcctactacatgtacttgttgctgctgctgaagtccgtggtgtacttcgccatcatcacatgctgcctgctgcggagaaccgccttctgctgcaacggcgagaagtctcgggttaagttttccagatccgcagacgcacccgcttaccaacaagggcagaaccaactctacaatgaacttaatttggggcggagggaagagtacgacgttctggacaaaaggaggggacgagatcccgagatgggcggaaagcctcagcgaaggaagaatccgcaagaggggctttataacgaactccagaaagataaaatggcagaagcctatagtgagattgggatgaagggagaaaggaggaggggtaaaggtcacgatgggttgtaccaaggattgagcacagccactaaagatacctatgatgcgctccacatgcaggccctgccgccaaga

SEQ ID NO: 24903 - DNA, 894 bp, synthetic construct
  source 1..894: mol_type = other DNA
gaggacctgaagaacgtgttcccacctgaggtggccgtgttcgagcctagcgaggccgagatcagccacacccagaaagccaccctcgtgtgcctggctaccggcttctaccccgaccatgtggaactgtcttggtgggtcaacggcaaagaggtgcacagcggcgtgtctaccgacccccagccactgaaagaacagcccgccctgaacgacagccggtactgcctgagcagcagactgagagtgtccgccaccttctggcagaacccccggaaccacttcagatgccaggtgcagttctacggcctgagcgagaacgacgagtggacccaggacagagccaagcccgtgacccccatcaagaccgatgtgattacaatggaccccaaggacaactgctccaaggacgccaacgataccctgctgctccagctgaccaacaccagcgcctactacatgtacttgttgctgctgctgaagtccgtggtgtacttcgccatcatcacatgctgcctgctgcggagaaccgccttctgctgcaacggcgagaagtctcgggttaagttttccagatccgcagacgcacccgcttaccaacaagggcagaaccaactctacaatgaacttaatttggggcggagggaagagtacgacgttctggacaaaaggaggggacgagatcccgagatgggcggaaagcctcagcgaaggaagaatccgcaagaggggctttataacgaactccagaaagataaaatggcagaagcctatagtgagattgggatgaagggagaaaggaggaggggtaaaggtcacgatgggttgtaccaaggattgagcacagccactaaagatacctatgatgcgctccacatgcaggccctgccgccaaga

SEQ ID NO: 24904 - DNA, 870 bp, synthetic construct
  source 1..870: mol_type = other DNA
gaggacctgaagaacgtgttcccacctgaggtggccgtgttcgagcctagcgaggccgagatcagccacacccagaaagccaccctcgtgtgcctggctaccggcttctaccccgaccatgtggaactgtcttggtgggtcaacggcaaagaggtgcacagcggcgtgtctaccgacccccagccactgaaagaacagcccgccctgaacgacagccggtactgcctgagcagcagactgagagtgtccgccaccttctggcagaacccccggaaccacttcagatgccaggtgcagttctacggcctgagcgagaacgacgagtggacccaggacagagccaagcccgtgaccatggaccccaaggacaactgctccaaggacgccaacgataccctgctgctccagctgaccaacaccagcgcctactacatgtacttgttgctgctgctgaagtccgtggtgtacttcgccatcatcacatgctgcctgctgcggagaaccgccttctgctgcaacggcgagaagtctcgggttaagttttccagatccgcagacgcacccgcttaccaacaagggcagaaccaactctacaatgaacttaatttggggcggagggaagagtacgacgttctggacaaaaggaggggacgagatcccgagatgggcggaaagcctcagcgaaggaagaatccgcaagaggggctttataacgaactccagaaagataaaatggcagaagcctatagtgagattgggatgaagggagaaaggaggaggggtaaaggtcacgatgggttgtaccaaggattgagcacagccactaaagatacctatgatgcgctccacatgcaggccctgccgccaaga

SEQ ID NO: 24905 - DNA, 894 bp, synthetic construct; identical to SEQ ID NO: 24903
  source 1..894: mol_type = other DNA

SEQ ID NO: 24906 - DNA, 852 bp, synthetic construct
  source 1..852: mol_type = other DNA
gaggacctgaagaacgtgttcccacctgaggtggccgtgttcgagcctagcgaggccgagatcagccacacccagaaagccaccctcgtgtgcctggctaccggcttctaccccgaccatgtggaactgtcttggtgggtcaacggcaaagaggtgcacagcggcgtgtctaccgacccccagccactgaaagaacagcccgccctgaacgacagccggtactgcctgagcagcagactgagagtgtccgccaccttctggcagaacccccggaaccacttcagatgccaggtgcagttctacggcctgagcgagaacgacgagtggacccaggacagagccaagcccgtgacctgctccaaggacgccaacgataccctgctgctccagctgaccaacaccagcgcctactacatgtacttgttgctgctgctgaagtccgtggtgtacttcgccatcatcacatgctgcctgctgcggagaaccgccttctgctgcaacggcgagaagtctcgggttaagttttccagatccgcagacgcacccgcttaccaacaagggcagaaccaactctacaatgaacttaatttggggcggagggaagagtacgacgttctggacaaaaggaggggacgagatcccgagatgggcggaaagcctcagcgaaggaagaatccgcaagaggggctttataacgaactccagaaagataaaatggcagaagcctatagtgagattgggatgaagggagaaaggaggaggggtaaaggtcacgatgggttgtaccaaggattgagcacagccactaaagatacctatgatgcgctccacatgcaggccctgccgccaaga

SEQ ID NO: 24907 - DNA, 897 bp, synthetic construct
  source 1..897: mol_type = other DNA
gaggacctgaagaacgtgttcccacctgaggtggccgtgttcgagcctagcgaggccgagatcagccacacccagaaagccaccctcgtgtgcctggctaccggcttctaccccgaccatgtggaactgtcttggtgggtcaacggcaaagaggtgcacagcggcgtgtctaccgacccccagccactgaaagaacagcccgccctgaacgacagccggtactgcctgagcagcagactgagagtgtccgccaccttctggcagaacccccggaaccacttcagatgccaggtgcagttctacggcctgagcgagaacgacgagtggacccaggacagagccaagcccgtgaccgaagtgaaaaccgactccaccgaccacgtgaagcccaaagagacagagaacaccaagcagcccagcaagagctgccacaagcccaaggccatcgtgcacaccgagaaagtgaacatgatgagcctgaccgtgctgggcctgcggatgctgttcgccaaaaccgtggccgtgaacttcctgctgaccgccaagctgttcttcctccgggttaagttttccagatccgcagacgcacccgcttaccaacaagggcagaaccaactctacaatgaacttaatttggggcggagggaagagtacgacgttctggacaaaaggaggggacgagatcccgagatgggcggaaagcctcagcgaaggaagaatccgcaagaggggctttataacgaactccagaaagataaaatggcagaagcctatagtgagattgggatgaagggagaaaggaggaggggtaaaggtcacgatgggttgtaccaaggattgagcacagccactaaagatacctatgatgcgctccacatgcaggccctgccgccaaga

SEQ ID NO: 24908 - DNA, 876 bp, synthetic construct
  source 1..876: mol_type = other DNA
gaggacctgaagaacgtgttcccacctgaggtggccgtgttcgagcctagcgaggccgagatcagccacacccagaaagccaccctcgtgtgcctggctaccggcttctaccccgaccatgtggaactgtcttggtgggtcaacggcaaagaggtgcacagcggcgtgtctaccgacccccagccactgaaagaacagcccgccctgaacgacagccggtactgcctgagcagcagactgagagtgtccgccaccttctggcagaacccccggaaccacttcagatgccaggtgcagttctacggcctgagcgagaacgacgagtggacccaggacagagccaagcccgtgaccgaccacgtgaagcccaaagagacagagaacaccaagcagcccagcaagagctgccacaagcccaaggccatcgtgcacaccgagaaagtgaacatgatgagcctgaccgtgctgggcctgcggatgctgttcgccaaaaccgtggccgtgaacttcctgctgaccgccaagctgttcttcctccgggttaagttttccagatccgcagacgcacccgcttaccaacaagggcagaaccaactctacaatgaacttaatttggggcggagggaagagtacgacgttctggacaaaaggaggggacgagatcccgagatgggcggaaagcctcagcgaaggaagaatccgcaagaggggctttataacgaactccagaaagataaaatggcagaagcctatagtgagattgggatgaagggagaaaggaggaggggtaaaggtcacgatgggttgtaccaaggattgagcacagccactaaagatacctatgatgcgctccacatgcaggccctgccgccaaga

SEQ ID NO: 24909 - DNA, 897 bp, synthetic construct; identical to SEQ ID NO: 24869
  source 1..897: mol_type = other DNA

SEQ ID NO: 24910 - DNA, 867 bp, synthetic construct; identical to SEQ ID NO: 24870
  source 1..867: mol_type = other DNA

SEQ ID NO: 24911 - DNA, 894 bp, synthetic construct; identical to SEQ ID NO: 24871
  source 1..894: mol_type = other DNA

SEQ ID NO: 24912 - DNA, 924 bp, synthetic construct; identical to SEQ ID NO: 24872
  source 1..924: mol_type = other DNA

SEQ ID NO: 24913 - DNA, 918 bp, synthetic construct; identical to SEQ ID NO: 24873
  source 1..918: mol_type = other DNA

SEQ ID NO: 24914 - DNA, 894 bp, synthetic construct; identical to SEQ ID NO: 24874
  source 1..894: mol_type = other DNA

SEQ ID NO: 24915 - DNA, 918 bp, synthetic construct; identical to SEQ ID NO: 24873
  source 1..918: mol_type = other DNA

SEQ ID NO: 24916 - DNA, 876 bp, synthetic construct; identical to SEQ ID NO: 24876
  source 1..876: mol_type = other DNA

SEQ ID NO: 24917 - DNA, 921 bp, synthetic construct; identical to SEQ ID NO: 24877
  source 1..921: mol_type = other DNA

SEQ ID NO: 24918 - DNA, 900 bp, synthetic construct; identical to SEQ ID NO: 24878
  source 1..900: mol_type = other DNA

SEQ ID NO: 24919 - DNA, 849 bp, synthetic construct
  source 1..849: mol_type = other DNA
cctgaggtggccgtgttcgagcctagcgaggccgagatcagccacacccagaaagccaccctcgtgtgcctggctaccggcttctaccccgaccatgtggaactgtcttggtgggtcaacggcaaagaggtgcacagcggcgtgtctaccgacccccagccactgaaagaacagcccgccctgaacgacagccggtactgcctgagcagcagactgagagtgtccgccaccttctggcagaacccccggaaccacttcagatgccaggtgcagttctacggcctgagcgagaacgacgagtggacccaggacagagccaagcccgtgaccatccccgaggacacattcttcccaagccccgagagcagctgcgacgtgaagctggtggaaaagagcttcgagacagacaccaacctgaacttccagaacctgagcgtgatcggcttcagaatcctgctgctgaaagtggccggctttaacctgctgatgaccctgcggctgtggtccagccgggttaagttttccagatccgcagacgcacccgcttaccaacaagggcagaaccaactctacaatgaacttaatttggggcggagggaagagtacgacgttctggacaaaaggaggggacgagatcccgagatgggcggaaagcctcagcgaaggaagaatccgcaagaggggctttataacgaactccagaaagataaaatggcagaagcctatagtgagattgggatgaagggagaaaggaggaggggtaaaggtcacgatgggttgtaccaaggattgagcacagccactaaagatacctatgatgcgctccacatgcaggccctgccgccaaga

SEQ ID NO: 24920 - DNA, 819 bp, synthetic construct
  source 1..819: mol_type = other DNA
cctgaggtggccgtgttcgagcctagcgaggccgagatcagccacacccagaaagccaccctcgtgtgcctggctaccggcttctaccccgaccatgtggaactgtcttggtgggtcaacggcaaagaggtgcacagcggcgtgtctaccgacccccagccactgaaagaacagcccgccctgaacgacagccggtactgcctgagcagcagactgagagtgtccgccaccttctggcagaacccccggaaccacttcagatgccaggtgcagttctacggcctgagcgagaacgacgagtggacccaggacagagccaagcccgtgaccgagagcagctgcgacgtgaagctggtggaaaagagcttcgagacagacaccaacctgaacttccagaacctgagcgtgatcggcttcagaatcctgctgctgaaagtggccggctttaacctgctgatgaccctgcggctgtggtccagccgggttaagttttccagatccgcagacgcacccgcttaccaacaagggcagaaccaactctacaatgaacttaatttggggcggagggaagagtacgacgttctggacaaaaggaggggacgagatcccgagatgggcggaaagcctcagcgaaggaagaatccgcaagaggggctttataacgaactccagaaagataaaatggcagaagcctatagtgagattgggatgaagggagaaaggaggaggggtaaaggtcacgatgggttgtaccaaggattgagcacagccactaaagatacctatgatgcgctccacatgcaggccctgccgccaaga

SEQ ID NO: 24921 - DNA, 846 bp, synthetic construct
  source 1..846: mol_type = other DNA
cctgaggtggccgtgttcgagcctagcgaggccgagatcagccacacccagaaagccaccctcgtgtgcctggctaccggcttctaccccgaccatgtggaactgtcttggtgggtcaacggcaaagaggtgcacagcggcgtgtctaccgacccccagccactgaaagaacagcccgccctgaacgacagccggtactgcctgagcagcagactgagagtgtccgccaccttctggcagaacccccggaaccacttcagatgccaggtgcagttctacggcctgagcgagaacgacgagtggacccaggacagagccaagcccgtgacccccgaggacacattcttcccaagccccgagagcagctgcgacgtgaagctggtggaaaagagcttcgagacagacaccaacctgaacttccagaacctgagcgtgatcggcttcagaatcctgctgctgaaagtggccggctttaacctgctgatgaccctgcggctgtggtccagccgggttaagttttccagatccgcagacgcacccgcttaccaacaagggcagaaccaactctacaatgaacttaatttggggcggagggaagagtacgacgttctggacaaaaggaggggacgagatcccgagatgggcggaaagcctcagcgaaggaagaatccgcaagaggggctttataacgaactccagaaagataaaatggcagaagcctatagtgagattgggatgaagggagaaaggaggaggggtaaaggtcacgatgggttgtaccaaggattgagcacagccactaaagatacctatgatgcgctccacatgcaggccctgccgccaaga

SEQ ID NO: 24922 - DNA, 876 bp, synthetic construct
  source 1..876: mol_type = other DNA
cctgaggtggccgtgttcgagcctagcgaggccgagatcagccacacccagaaagccaccctcgtgtgcctggctaccggcttctaccccgaccatgtggaactgtcttggtgggtcaacggcaaagaggtgcacagcggcgtgtctaccgacccccagccactgaaagaacagcccgccctgaacgacagccggtactgcctgagcagcagactgagagtgtccgccaccttctggcagaacccccggaaccacttcagatgccaggtgcagttctacggcctgagcgagaacgacgagtggacccaggacagagccaagcccgtgaccttcccacccatcaagaccgatgtgattacaatggaccccaaggacaactgctccaaggacgccaacgataccctgctgctccagctgaccaacaccagcgcctactacatgtacttgttgctgctgctgaagtccgtggtgtacttcgccatcatcacatgctgcctgctgcggagaaccgccttctgctgcaacggcgagaagtctcgggttaagttttccagatccgcagacgcacccgcttaccaacaagggcagaaccaactctacaatgaacttaatttggggcggagggaagagtacgacgttctggacaaaaggaggggacgagatcccgagatgggcggaaagcctcagcgaaggaagaatccgcaagaggggctttataacgaactccagaaagataaaatggcagaagcctatagtgagattgggatgaagggagaaaggaggaggggtaaaggtcacgatgggttgtaccaaggattgagcacagccactaaagatacctatgatgcgctccacatgcaggccctgccgccaaga

SEQ ID NO: 24923 - DNA, 870 bp, synthetic construct
  source 1..870: mol_type = other DNA
cctgaggtggccgtgttcgagcctagcgaggccgagatcagccacacccagaaagccaccctcgtgtgcctggctaccggcttctaccccgaccatgtggaactgtcttggtgggtcaacggcaaagaggtgcacagcggcgtgtctaccgacccccagccactgaaagaacagcccgccctgaacgacagccggtactgcctgagcagcagactgagagtgtccgccaccttctggcagaacccccggaaccacttcagatgccaggtgcagttctacggcctgagcgagaacgacgagtggacccaggacagagccaagcccgtgacccccatcaagaccgatgtgattacaatggaccccaaggacaactgctccaaggacgccaacgataccctgctgctccagctgaccaacaccagcgcctactacatgtacttgttgctgctgctgaagtccgtggtgtacttcgccatcatcacatgctgcctgctgcggagaaccgccttctgctgcaacggcgagaagtctcgggttaagttttccagatccgcagacgcacccgcttaccaacaagggcagaaccaactctacaatgaacttaatttggggcggagggaagagtacgacgttctggacaaaaggaggggacgagatcccgagatgggcggaaagcctcagcgaaggaagaatccgcaagaggggctttataacgaactccagaaagataaaatggcagaagcctatagtgagattgggatgaagggagaaaggaggaggggtaaaggtcacgatgggttgtaccaaggattgagcacagccactaaagatacctatgatgcgctccacatgcaggccctgccgccaaga

SEQ ID NO: 24924 - DNA, 846 bp, synthetic construct
  source 1..846: mol_type = other DNA
cctgaggtggccgtgttcgagcctagcgaggccgagatcagccacacccagaaagccaccctcgtgtgcctggctaccggcttctaccccgaccatgtggaactgtcttggtgggtcaacggcaaagaggtgcacagcggcgtgtctaccgacccccagccactgaaagaacagcccgccctgaacgacagccggtactgcctgagcagcagactgagagtgtccgccaccttctggcagaacccccggaaccacttcagatgccaggtgcagttctacggcctgagcgagaacgacgagtggacccaggacagagccaagcccgtgaccatggaccccaaggacaactgctccaaggacgccaacgataccctgctgctccagctgaccaacaccagcgcctactacatgtacttgttgctgctgctgaagtccgtggtgtacttcgccatcatcacatgctgcctgctgcggagaaccgccttctgctgcaacggcgagaagtctcgggttaagttttccagatccgcagacgcacccgcttaccaacaagggcagaaccaactctacaatgaacttaatttggggcggagggaagagtacgacgttctggacaaaaggaggggacgagatcccgagatgggcggaaagcctcagcgaaggaagaatccgcaagaggggctttataacgaactccagaaagataaaatggcagaagcctatagtgagattgggatgaagggagaaaggaggaggggtaaaggtcacgatgggttgtaccaaggattgagcacagccactaaagatacctatgatgcgctccacatgcaggccctgccgccaaga

SEQ ID NO: 24925 - DNA, 870 bp, synthetic construct; identical to SEQ ID NO: 24923
  source 1..870: mol_type = other DNA

SEQ ID NO: 24926 - DNA, 828 bp, synthetic construct
  source 1..828: mol_type = other DNA
cctgaggtggccgtgttcgagcctagcgaggccgagatcagccacacccagaaagccaccctcgtgtgcctggctaccggcttctaccccgaccatgtggaactgtcttggtgggtcaacggcaaagaggtgcacagcggcgtgtctaccgacccccagccactgaaagaacagcccgccctgaacgacagccggtactgcctgagcagcagactgagagtgtccgccaccttctggcagaacccccggaaccacttcagatgccaggtgcagttctacggcctgagcgagaacgacgagtggacccaggacagagccaagcccgtgacctgctccaaggacgccaacgataccctgctgctccagctgaccaacaccagcgcctactacatgtacttgttgctgctgctgaagtccgtggtgtacttcgccatcatcacatgctgcctgctgcggagaaccgccttctgctgcaacggcgagaagtctcgggttaagttttccagatccgcagacgcacccgcttaccaacaagggcagaaccaactctacaatgaacttaatttggggcggagggaagagtacgacgttctggacaaaaggaggggacgagatcccgagatgggcggaaagcctcagcgaaggaagaatccgcaagaggggctttataacgaactccagaaagataaaatggcagaagcctatagtgagattgggatgaagggagaaaggaggaggggtaaaggtcacgatgggttgtaccaaggattgagcacagccactaaagatacctatgatgcgctccacatgcaggccctgccgccaaga

SEQ ID NO: 24927 - DNA, 873 bp, synthetic construct
  source 1..873: mol_type = other DNA
cctgaggtggccgtgttcgagcctagcgaggccgagatcagccacacccagaaagccaccctcgtgtgcctggctaccggcttctaccccgaccatgtggaactgtcttggtgggtcaacggcaaagaggtgcacagcggcgtgtctaccgacccccagccactgaaagaacagcccgccctgaacgacagccggtactgcctgagcagcagactgagagtgtccgccaccttctggcagaacccccggaaccacttcagatgccaggtgcagttctacggcctgagcgagaacgacgagtggacccaggacagagccaagcccgtgaccgaagtgaaaaccgactccaccgaccacgtgaagcccaaagagacagagaacaccaagcagcccagcaagagctgccacaagcccaaggccatcgtgcacaccgagaaagtgaacatgatgagcctgaccgtgctgggcctgcggatgctgttcgccaaaaccgtggccgtgaacttcctgctgaccgccaagctgttcttcctccgggttaagttttccagatccgcagacgcacccgcttaccaacaagggcagaaccaactctacaatgaacttaatttggggcggagggaagagtacgacgttctggacaaaaggaggggacgagatcccgagatgggcggaaagcctcagcgaaggaagaatccgcaagaggggctttataacgaactccagaaagataaaatggcagaagcctatagtgagattgggatgaagggagaaaggaggaggggtaaaggtcacgatgggttgtaccaaggattgagcacagccactaaagatacctatgatgcgctccacatgcaggccctgccgccaaga

SEQ ID NO: 24928 - DNA, 852 bp, synthetic construct
  source 1..852: mol_type = other DNA
cctgaggtggccgtgttcgagcctagcgaggccgagatcagccacacccagaaagccaccctcgtgtgcctggctaccggcttctaccccgaccatgtggaactgtcttggtgggtcaacggcaaagaggtgcacagcggcgtgtctaccgacccccagccactgaaagaacagcccgccctgaacgacagccggtactgcctgagcagcagactgagagtgtccgccaccttctggcagaacccccggaaccacttcagatgccaggtgcagttctacggcctgagcgagaacgacgagtggacccaggacagagccaagcccgtgaccgaccacgtgaagcccaaagagacagagaacaccaagcagcccagcaagagctgccacaagcccaaggccatcgtgcacaccgagaaagtgaacatgatgagcctgaccgtgctgggcctgcggatgctgttcgccaaaaccgtggccgtgaacttcctgctgaccgccaagctgttcttcctccgggttaagttttccagatccgcagacgcacccgcttaccaacaagggcagaaccaactctacaatgaacttaatttggggcggagggaagagtacgacgttctggacaaaaggaggggacgagatcccgagatgggcggaaagcctcagcgaaggaagaatccgcaagaggggctttataacgaactccagaaagataaaatggcagaagcctatagtgagattgggatgaagggagaaaggaggaggggtaaaggtcacgatgggttgtaccaaggattgagcacagccactaaagatacctatgatgcgctccacatgcaggccctgccgccaaga

SEQ ID NO: 24929 - DNA, 831 bp, synthetic construct
  source 1..831: mol_type = other DNA
gacaagcagctggacgccgacgtgtcccccaagcctaccatcttcctgccctctatcgccgagacaaagctccagaaggccggcacctacctgtgcctgctggaaaagttcttcccagatgtgattaagatccactggcaggaaaagaagtccaacaccatcctgggcagccaggaaggcaacaccatgaagaccaacgacacctacatgaagttcagctggctgaccgtgcccgagaagtccctggacaaagaacacagatgcatcgtgcggcacgaaaacaacaagaacggcgtggaccaggaaatcatcatccccgaggacacattcttcccaagccccgagagcagctgcgacgtgaagctggtggaaaagagcttcgagacagacaccaacctgaacttccagaacctgagcgtgatcggcttcagaatcctgctgctgaaagtggccggctttaacctgctgatgaccctgcggctgtggtccagccgggttaagttttccagatccgcagacgcacccgcttaccaacaagggcagaaccaactctacaatgaacttaatttggggcggagggaagagtacgacgttctggacaaaaggaggggacgagatcccgagatgggcggaaagcctcagcgaaggaagaatccgcaagaggggctttataacgaactccagaaagataaaatggcagaagcctatagtgagattgggatgaagggagaaaggaggaggggtaaaggtcacgatgggttgtaccaaggattgagcacagccactaaagatacctatgatgcgctccacatgcaggccctgccgccaaga

SEQ ID NO: 24930 - DNA, 801 bp, synthetic construct
  source 1..801: mol_type = other DNA
gacaagcagctggacgccgacgtgtcccccaagcctaccatcttcctgccctctatcgccgagacaaagctccagaaggccggcacctacctgtgcctgctggaaaagttcttcccagatgtgattaagatccactggcaggaaaagaagtccaacaccatcctgggcagccaggaaggcaacaccatgaagaccaacgacacctacatgaagttcagctggctgaccgtgcccgagaagtccctggacaaagaacacagatgcatcgtgcggcacgaaaacaacaagaacggcgtggaccaggaaatcatcgagagcagctgcgacgtgaagctggtggaaaagagcttcgagacagacaccaacctgaacttccagaacctgagcgtgatcggcttcagaatcctgctgctgaaagtggccggctttaacctgctgatgaccctgcggctgtggtccagccgggttaagttttccagatccgcagacgcacccgcttaccaacaagggcagaaccaactctacaatgaacttaatttggggcggagggaagagtacgacgttctggacaaaaggaggggacgagatcccgagatgggcggaaagcctcagcgaaggaagaatccgcaagaggggctttataacgaactccagaaagataaaatggcagaagcctatagtgagattgggatgaagggagaaaggaggaggggtaaaggtcacgatgggttgtaccaaggattgagcacagccactaaagatacctatgatgcgctccacatgcaggccctgccgccaaga

SEQ ID NO: 24931 - DNA, 828 bp, synthetic construct
  source 1..828: mol_type = other DNA
gacaagcagctggacgccgacgtgtcccccaagcctaccatcttcctgccctctatcgccgagacaaagctccagaaggccggcacctacctgtgcctgctggaaaagttcttcccagatgtgattaagatccactggcaggaaaagaagtccaacaccatcctgggcagccaggaaggcaacaccatgaagaccaacgacacctacatgaagttcagctggctgaccgtgcccgagaagtccctggacaaagaacacagatgcatcgtgcggcacgaaaacaacaagaacggcgtggaccaggaaatcatccccgaggacacattcttcccaagccccgagagcagctgcgacgtgaagctggtggaaaagagcttcgagacagacaccaacctgaacttccagaacctgagcgtgatcggcttcagaatcctgctgctgaaagtggccggctttaacctgctgatgaccctgcggctgtggtccagccgggttaagttttccagatccgcagacgcacccgcttaccaacaagggcagaaccaactctacaatgaacttaatttggggcggagggaagagtacgacgttctggacaaaaggaggggacgagatcccgagatgggcggaaagcctcagcgaaggaagaatccgcaagaggggctttataacgaactccagaaagataaaatggcagaagcctatagtgagattgggatgaagggagaaaggaggaggggtaaaggtcacgatgggttgtaccaaggattgagcacagccactaaagatacctatgatgcgctccacatgcaggccctgccgccaaga

SEQ ID NO: 24932 - DNA, 810 bp, synthetic construct
  source 1..810: mol_type = other DNA
gacaagcagctggacgccgacgtgtcccccaagcctaccatcttcctgccctctatcgccgagacaaagctccagaaggccggcacctacctgtgcctgctggaaaagttcttcccagatgtgattaagatccactggcaggaaaagaagtccaacaccatcctgggcagccaggaaggcaacaccatgaagaccaacgacacctacatgaagttcagctggctgaccgtgcccgagaagtccctggacaaagaacacagatgcatcgtgcggcacgaaaacaacaagaacggcgtggaccaggaaatcatcggcagagccgattgcggctttaccagcgagagctaccagcagggcgtgctgagcgccaccatcctgtacgagatcctgctgggcaaggccaccctgtacgccgtgctggtgtctgccctggtgctgatggctatggtcaagcggaaggacagccggggacgggttaagttttccagatccgcagacgcacccgcttaccaacaagggcagaaccaactctacaatgaacttaatttggggcggagggaagagtacgacgttctggacaaaaggaggggacgagatcccgagatgggcggaaagcctcagcgaaggaagaatccgcaagaggggctttataacgaactccagaaagataaaatggcagaagcctatagtgagattgggatgaagggagaaaggaggaggggtaaaggtcacgatgggttgtaccaaggattgagcacagccactaaagatacctatgatgcgctccacatgcaggccctgccgccaaga

SEQ ID NO: 24933 - DNA, 804 bp, synthetic construct
  source 1..804: mol_type = other DNA
gacaagcagctggacgccgacgtgtcccccaagcctaccatcttcctgccctctatcgccgagacaaagctccagaaggccggcacctacctgtgcctgctggaaaagttcttcccagatgtgattaagatccactggcaggaaaagaagtccaacaccatcctgggcagccaggaaggcaacaccatgaagaccaacgacacctacatgaagttcagctggctgaccgtgcccgagaagtccctggacaaagaacacagatgcatcgtgcggcacgaaaacaacaagaacggcgtggaccaggaaatcatcgccgattgcggctttaccagcgagagctaccagcagggcgtgctgagcgccaccatcctgtacgagatcctgctgggcaaggccaccctgtacgccgtgctggtgtctgccctggtgctgatggctatggtcaagcggaaggacagccggggacgggttaagttttccagatccgcagacgcacccgcttaccaacaagggcagaaccaactctacaatgaacttaatttggggcggagggaagagtacgacgttctggacaaaaggaggggacgagatcccgagatgggcggaaagcctcagcgaaggaagaatccgcaagaggggctttataacgaactccagaaagataaaatggcagaagcctatagtgagattgggatgaagggagaaaggaggaggggtaaaggtcacgatgggttgtaccaaggattgagcacagccactaaagatacctatgatgcgctccacatgcaggccctgccgccaaga

SEQ ID NO: 24934 - DNA, 834 bp, synthetic construct
  source 1..834: mol_type = other DNA
gacaagcagctggacgccgacgtgtcccccaagcctaccatcttcctgccctctatcgccgagacaaagctccagaaggccggcacctacctgtgcctgctggaaaagttcttcccagatgtgattaagatccactggcaggaaaagaagtccaacaccatcctgggcagccaggaaggcaacaccatgaagaccaacgacacctacatgaagttcagctggctgaccgtgcccgagaagtccctggacaaagaacacagatgcatcgtgcggcacgaaaacaacaagaacggcgtggaccaggaaatcatccagatcgtgtctgccgaagcctggggcagagccgattgcggctttaccagcgagagctaccagcagggcgtgctgagcgccaccatcctgtacgagatcctgctgggcaaggccaccctgtacgccgtgctggtgtctgccctggtgctgatggctatggtcaagcggaaggacagccggggacgggttaagttttccagatccgcagacgcacccgcttaccaacaagggcagaaccaactctacaatgaacttaatttggggcggagggaagagtacgacgttctggacaaaaggaggggacgagatcccgagatgggcggaaagcctcagcgaaggaagaatccgcaagaggggctttataacgaactccagaaagataaaatggcagaagcctatagtgagattgggatgaagggagaaaggaggaggggtaaaggtcacgatgggttgtaccaaggattgagcacagccactaaagatacctatgatgcgctccacatgcaggccctgccgccaaga

SEQ ID NO: 24935 - DNA, 855 bp, synthetic construct
  source 1..855: mol_type = other DNA
gacaagcagctggacgccgacgtgtcccccaagcctaccatcttcctgccctctatcgccgagacaaagctccagaaggccggcacctacctgtgcctgctggaaaagttcttcccagatgtgattaagatccactggcaggaaaagaagtccaacaccatcctgggcagccaggaaggcaacaccatgaagaccaacgacacctacatgaagttcagctggctgaccgtgcccgagaagtccctggacaaagaacacagatgcatcgtgcggcacgaaaacaacaagaacggcgtggaccaggaaatcatcgaagtgaaaaccgactccaccgaccacgtgaagcccaaagagacagagaacaccaagcagcccagcaagagctgccacaagcccaaggccatcgtgcacaccgagaaagtgaacatgatgagcctgaccgtgctgggcctgcggatgctgttcgccaaaaccgtggccgtgaacttcctgctgaccgccaagctgttcttcctccgggttaagttttccagatccgcagacgcacccgcttaccaacaagggcagaaccaactctacaatgaacttaatttggggcggagggaagagtacgacgttctggacaaaaggaggggacgagatcccgagatgggcggaaagcctcagcgaaggaagaatccgcaagaggggctttataacgaactccagaaagataaaatggcagaagcctatagtgagattgggatgaagggagaaaggaggaggggtaaaggtcacgatgggttgtaccaaggattgagcacagccactaaagatacctatgatgcgctccacatgcaggccctgccgccaaga

SEQ ID NO: 24936 - DNA, 834 bp, synthetic construct
  source 1..834: mol_type = other DNA
gacaagcagctggacgccgacgtgtcccccaagcctaccatcttcctgccctctatcgccgagacaaagctccagaaggccggcacctacctgtgcctgctggaaaagttcttcccagatgtgattaagatccactggcaggaaaagaagtccaacaccatcctgggcagccaggaaggcaacaccatgaagaccaacgacacctacatgaagttcagctggctgaccgtgcccgagaagtccctggacaaagaacacagatgcatcgtgcggcacgaaaacaacaagaacggcgtggaccaggaaatcatcgaccacgtgaagcccaaagagacagagaacaccaagcagcccagcaagagctgccacaagcccaaggccatcgtgcacaccgagaaagtgaacatgatgagcctgaccgtgctgggcctgcggatgctgttcgccaaaaccgtggccgtgaacttcctgctgaccgccaagctgttcttcctccgggttaagttttccagatccgcagacgcacccgcttaccaacaagggcagaaccaactctacaatgaacttaatttggggcggagggaagagtacgacgttctggacaaaaggaggggacgagatcccgagatgggcggaaagcctcagcgaaggaagaatccgcaagaggggctttataacgaactccagaaagataaaatggcagaagcctatagtgagattgggatgaagggagaaaggaggaggggtaaaggtcacgatgggttgtaccaaggattgagcacagccactaaagatacctatgatgcgctccacatgcaggccctgccgccaaga

SEQ ID NO: 24937 - DNA, 837 bp, synthetic construct
  source 1..837: mol_type = other DNA
gacaagcagctggacgccgacgtgtcccccaagcctaccatcttcctgccctctatcgccgagacaaagctccagaaggccggcacctacctgtgcctgctggaaaagttcttcccagatgtgattaagatccactggcaggaaaagaagtccaacaccatcctgggcagccaggaaggcaacaccatgaagaccaacgacacctacatgaagttcagctggctgaccgtgcccgagaagtccctggacaaagaacacagatgcatcgtgcggcacgaaaacaacaagaacggcgtggaccaggaaatcatcttcccaatccccgaggacacattcttcccaagccccgagagcagctgcgacgtgaagctggtggaaaagagcttcgagacagacaccaacctgaacttccagaacctgagcgtgatcggcttcagaatcctgctgctgaaagtggccggctttaacctgctgatgaccctgcggctgtggtccagccgggttaagttttccagatccgcagacgcacccgcttaccaacaagggcagaaccaactctacaatgaacttaatttggggcggagggaagagtacgacgttctggacaaaaggaggggacgagatcccgagatgggcggaaagcctcagcgaaggaagaatccgcaagaggggctttataacgaactccagaaagataaaatggcagaagcctatagtgagattgggatgaagggagaaaggaggaggggtaaaggtcacgatgggttgtaccaaggattgagcacagccactaaagatacctatgatgcgctccacatgcaggccctgccgccaaga

SEQ ID NO: 24938 - DNA, 807 bp, synthetic construct
  source 1..807: mol_type = other DNA
gacaagcagctggacgccgacgtgtcccccaagcctaccatcttcctgccctctatcgccgagacaaagctccagaaggccggcacctacctgtgcctgctggaaaagttcttcccagatgtgattaagatccactggcaggaaaagaagtccaacaccatcctgggcagccaggaaggcaacaccatgaagaccaacgacacctacatgaagttcagctggctgaccgtgcccgagaagtccctggacaaagaacacagatgcatcgtgcggcacgaaaacaacaagaacggcgtggaccaggaaatcatcttcccagagagcagctgcgacgtgaagctggtggaaaagagcttcgagacagacaccaacctgaacttccagaacctgagcgtgatcggcttcagaatcctgctgctgaaagtggccggctttaacctgctgatgaccctgcggctgtggtccagccgggttaagttttccagatccgcagacgcacccgcttaccaacaagggcagaaccaactctacaatgaacttaatttggggcggagggaagagtacgacgttctggacaaaaggaggggacgagatcccgagatgggcggaaagcctcagcgaaggaagaatccgcaagaggggctttataacgaactccagaaagataaaatggcagaagcctatagtgagattgggatgaagggagaaaggaggaggggtaaaggtcacgatgggttgtaccaaggattgagcacagccactaaagatacctatgatgcgctccacatgcaggccctgccgccaaga

SEQ ID NO: 24939 - DNA, 834 bp, synthetic construct
  source 1..834: mol_type = other DNA
gacaagcagctggacgccgacgtgtcccccaagcctaccatcttcctgccctctatcgccgagacaaagctccagaaggccggcacctacctgtgcctgctggaaaagttcttcccagatgtgattaagatccactggcaggaaaagaagtccaacaccatcctgggcagccaggaaggcaacaccatgaagaccaacgacacctacatgaagttcagctggctgaccgtgcccgagaagtccctggacaaagaacacagatgcatcgtgcggcacgaaaacaacaagaacggcgtggaccaggaaatcatcttcccacccgaggacacattcttcccaagccccgagagcagctgcgacgtgaagctggtggaaaagagcttcgagacagacaccaacctgaacttccagaacctgagcgtgatcggcttcagaatcctgctgctgaaagtggccggctttaacctgctgatgaccctgcggctgtggtccagccgggttaagttttccagatccgcagacgcacccgcttaccaacaagggcagaaccaactctacaatgaacttaatttggggcggagggaagagtacgacgttctggacaaaaggaggggacgagatcccgagatgggcggaaagcctcagcgaaggaagaatccgcaagaggggctttataacgaactccagaaagataaaatggcagaagcctatagtgagattgggatgaagggagaaaggaggaggggtaaaggtcacgatgggttgtaccaaggattgagcacagccactaaagatacctatgatgcgctccacatgcaggccctgccgccaaga

SEQ ID NO: 24940 - DNA, 816 bp, synthetic construct
  source 1..816: mol_type = other DNA
gacaagcagctggacgccgacgtgtcccccaagcctaccatcttcctgccctctatcgccgagacaaagctccagaaggccggcacctacctgtgcctgctggaaaagttcttcccagatgtgattaagatccactggcaggaaaagaagtccaacaccatcctgggcagccaggaaggcaacaccatgaagaccaacgacacctacatgaagttcagctggctgaccgtgcccgagaagtccctggacaaagaacacagatgcatcgtgcggcacgaaaacaacaagaacggcgtggaccaggaaatcatcttcccaggcagagccgattgcggctttaccagcgagagctaccagcagggcgtgctgagcgccaccatcctgtacgagatcctgctgggcaaggccaccctgtacgccgtgctggtgtctgccctggtgctgatggctatggtcaagcggaaggacagccggggacgggttaagttttccagatccgcagacgcacccgcttaccaacaagggcagaaccaactctacaatgaacttaatttggggcggagggaagagtacgacgttctggacaaaaggaggggacgagatcccgagatgggcggaaagcctcagcgaaggaagaatccgcaagaggggctttataacgaactccagaaagataaaatggcagaagcctatagtgagattgggatgaagggagaaaggaggaggggtaaaggtcacgatgggttgtaccaaggattgagcacagccactaaagatacctatgatgcgctccacatgcaggccctgccgccaaga

SEQ ID NO: 24941 - DNA, 810 bp, synthetic construct
  source 1..810: mol_type = other DNA
gacaagcagctggacgccgacgtgtcccccaagcctaccatcttcctgccctctatcgccgagacaaagctccagaaggccggcacctacctgtgcctgctggaaaagttcttcccagatgtgattaagatccactggcaggaaaagaagtccaacaccatcctgggcagccaggaaggcaacaccatgaagaccaacgacacctacatgaagttcagctggctgaccgtgcccgagaagtccctggacaaagaacacagatgcatcgtgcggcacgaaaacaacaagaacggcgtggaccaggaaatcatcttcccagccgattgcggctttaccagcgagagctaccagcagggcgtgctgagcgccaccatcctgtacgagatcctgctgggcaaggccaccctgtacgccgtgctggtgtctgccctggtgctgatggctatggtcaagcggaaggacagccggggacgggttaagttttccagatccgcagacgcacccgcttaccaacaagggcagaaccaactctacaatgaacttaatttggggcggagggaagagtacgacgttctggacaaaaggaggggacgagatcccgagatgggcggaaagcctcagcgaaggaagaatccgcaagaggggctttataacgaactccagaaagataaaatggcagaagcctatagtgagattgggatgaagggagaaaggaggaggggtaaaggtcacgatgggttgtaccaaggattgagcacagccactaaagatacctatgatgcgctccacatgcaggccctgccgccaaga

SEQ ID NO: 24942 - DNA, 840 bp, synthetic construct
  source 1..840: mol_type = other DNA
gacaagcagctggacgccgacgtgtcccccaagcctaccatcttcctgccctctatcgccgagacaaagctccagaaggccggcacctacctgtgcctgctggaaaagttcttcccagatgtgattaagatccactggcaggaaaagaagtccaacaccatcctgggcagccaggaaggcaacaccatgaagaccaacgacacctacatgaagttcagctggctgaccgtgcccgagaagtccctggacaaagaacacagatgcatcgtgcggcacgaaaacaacaagaacggcgtggaccaggaaatcatcttcccacagatcgtgtctgccgaagcctggggcagagccgattgcggctttaccagcgagagctaccagcagggcgtgctgagcgccaccatcctgtacgagatcctgctgggcaaggccaccctgtacgccgtgctggtgtctgccctggtgctgatggctatggtcaagcggaaggacagccggggacgggttaagttttccagatccgcagacgcacccgcttaccaacaagggcagaaccaactctacaatgaacttaatttggggcggagggaagagtacgacgttctggacaaaaggaggggacgagatcccgagatgggcggaaagcctcagcgaaggaagaatccgcaagaggggctttataacgaactccagaaagataaaatggcagaagcctatagtgagattgggatgaagggagaaaggaggaggggtaaaggtcacgatgggttgtaccaaggattgagcacagccactaaagatacctatgatgcgctccacatgcaggccctgccgccaaga

SEQ ID NO: 24943 - DNA, 861 bp, synthetic construct
  source 1..861: mol_type = other DNA
gacaagcagctggacgccgacgtgtcccccaagcctaccatcttcctgccctctatcgccgagacaaagctccagaaggccggcacctacctgtgcctgctggaaaagttcttcccagatgtgattaagatccactggcaggaaaagaagtccaacaccatcctgggcagccaggaaggcaacaccatgaagaccaacgacacctacatgaagttcagctggctgaccgtgcccgagaagtccctggacaaagaacacagatgcatcgtgcggcacgaaaacaacaagaacggcgtggaccaggaaatcatcttcccagaagtgaaaaccgactccaccgaccacgtgaagcccaaagagacagagaacaccaagcagcccagcaagagctgccacaagcccaaggccatcgtgcacaccgagaaagtgaacatgatgagcctgaccgtgctgggcctgcggatgctgttcgccaaaaccgtggccgtgaacttcctgctgaccgccaagctgttcttcctccgggttaagttttccagatccgcagacgcacccgcttaccaacaagggcagaaccaactctacaatgaacttaatttggggcggagggaagagtacgacgttctggacaaaaggaggggacgagatcccgagatgggcggaaagcctcagcgaaggaagaatccgcaagaggggctttataacgaactccagaaagataaaatggcagaagcctatagtgagattgggatgaagggagaaaggaggaggggtaaaggtcacgatgggttgtaccaaggattgagcacagccactaaagatacctatgatgcgctccacatgcaggccctgccgccaaga

SEQ ID NO: 24944 - DNA, 840 bp, synthetic construct
  source 1..840: mol_type = other DNA
gacaagcagctggacgccgacgtgtcccccaagcctaccatcttcctgccctctatcgccgagacaaagctccagaaggccggcacctacctgtgcctgctggaaaagttcttcccagatgtgattaagatccactggcaggaaaagaagtccaacaccatcctgggcagccaggaaggcaacaccatgaagaccaacgacacctacatgaagttcagctggctgaccgtgcccgagaagtccctggacaaagaacacagatgcatcgtgcggcacgaaaacaacaagaacggcgtggaccaggaaatcatcttcccagaccacgtgaagcccaaagagacagagaacaccaagcagcccagcaagagctgccacaagcccaaggccatcgtgcacaccgagaaagtgaacatgatgagcctgaccgtgctgggcctgcggatgctgttcgccaaaaccgtggccgtgaacttcctgctgaccgccaagctgttcttcctccgggttaagttttccagatccgcagacgcacccgcttaccaacaagggcagaaccaactctacaatgaacttaatttggggcggagggaagagtacgacgttctggacaaaaggaggggacgagatcccgagatgggcggaaagcctcagcgaaggaagaatccgcaagaggggctttataacgaactccagaaagataaaatggcagaagcctatagtgagattgggatgaagggagaaaggaggaggggtaaaggtcacgatgggttgtaccaaggattgagcacagccactaaagatacctatgatgcgctccacatgcaggccctgccgccaaga

SEQ ID NO: 24945 - DNA, 861 bp, synthetic construct
  source 1..861: mol_type = other DNA
gacaagcagctggacgccgacgtgtcccccaagcctaccatcttcctgccctctatcgccgagacaaagctccagaaggccggcacctacctgtgcctgctggaaaagttcttcccagatgtgattaagatccactggcaggaaaagaagtccaacaccatcctgggcagccaggaaggcaacaccatgaagaccaacgacacctacatgaagttcagctggctgaccgtgcccgagaagtccctggacaaagaacacagatgcatcgtgcggcacgaaaacaacaagaacggcgtggaccaggaaatcatcttcccacccatcaagaccgatgtgattacaatccccgaggacacattcttcccaagccccgagagcagctgcgacgtgaagctggtggaaaagagcttcgagacagacaccaacctgaacttccagaacctgagcgtgatcggcttcagaatcctgctgctgaaagtggccggctttaacctgctgatgaccctgcggctgtggtccagccgggttaagttttccagatccgcagacgcacccgcttaccaacaagggcagaaccaactctacaatgaacttaatttggggcggagggaagagtacgacgttctggacaaaaggaggggacgagatcccgagatgggcggaaagcctcagcgaaggaagaatccgcaagaggggctttataacgaactccagaaagataaaatggcagaagcctatagtgagattgggatgaagggagaaaggaggaggggtaaaggtcacgatgggttgtaccaaggattgagcacagccactaaagatacctatgatgcgctccacatgcaggccctgccgccaaga

SEQ ID NO: 24946 - DNA, 831 bp, synthetic construct
  source 1..831: mol_type = other DNA
gacaagcagctggacgccgacgtgtcccccaagcctaccatcttcctgccctctatcgccgagacaaagctccagaaggccggcacctacctgtgcctgctggaaaagttcttcccagatgtgattaagatccactggcaggaaaagaagtccaacaccatcctgggcagccaggaaggcaacaccatgaagaccaacgacacctacatgaagttcagctggctgaccgtgcccgagaagtccctggacaaagaacacagatgcatcgtgcggcacgaaaacaacaagaacggcgtggaccaggaaatcatcttcccacccatcaagaccgatgtgattacagagagcagctgcgacgtgaagctggtggaaaagagcttcgagacagacaccaacctgaacttccagaacctgagcgtgatcggcttcagaatcctgctgctgaaagtggccggctttaacctgctgatgaccctgcggctgtggtccagccgggttaagttttccagatccgcagacgcacccgcttaccaacaagggcagaaccaactctacaatgaacttaatttggggcggagggaagagtacgacgttctggacaaaaggaggggacgagatcccgagatgggcggaaagcctcagcgaaggaagaatccgcaagaggggctttataacgaactccagaaagataaaatggcagaagcctatagtgagattgggatgaagggagaaaggaggaggggtaaaggtcacgatgggttgtaccaaggattgagcacagccactaaagatacctatgatgcgctccacatgcaggccctgccgccaaga

SEQ ID NO: 24947 - DNA, 858 bp, synthetic construct
  source 1..858: mol_type = other DNA
gacaagcagctggacgccgacgtgtcccccaagcctaccatcttcctgccctctatcgccgagacaaagctccagaaggccggcacctacctgtgcctgctggaaaagttcttcccagatgtgattaagatccactggcaggaaaagaagtccaacaccatcctgggcagccaggaaggcaacaccatgaagaccaacgacacctacatgaagttcagctggctgaccgtgcccgagaagtccctggacaaagaacacagatgcatcgtgcggcacgaaaacaacaagaacggcgtggaccaggaaatcatcttcccacccatcaagaccgatgtgattacacccgaggacacattcttcccaagccccgagagcagctgcgacgtgaagctggtggaaaagagcttcgagacagacaccaacctgaacttccagaacctgagcgtgatcggcttcagaatcctgctgctgaaagtggccggctttaacctgctgatgaccctgcggctgtggtccagccgggttaagttttccagatccgcagacgcacccgcttaccaacaagggcagaaccaactctacaatgaacttaatttggggcggagggaagagtacgacgttctggacaaaaggaggggacgagatcccgagatgggcggaaagcctcagcgaaggaagaatccgcaagaggggctttataacgaactccagaaagataaaatggcagaagcctatagtgagattgggatgaagggagaaaggaggaggggtaaaggtcacgatgggttgtaccaaggattgagcacagccactaaagatacctatgatgcgctccacatgcaggccctgccgccaaga

SEQ ID NO: 24948 - DNA, 840 bp, synthetic construct
  source 1..840: mol_type = other DNA
gacaagcagctggacgccgacgtgtcccccaagcctaccatcttcctgccctctatcgccgagacaaagctccagaaggccggcacctacctgtgcctgctggaaaagttcttcccagatgtgattaagatccactggcaggaaaagaagtccaacaccatcctgggcagccaggaaggcaacaccatgaagaccaacgacacctacatgaagttcagctggctgaccgtgcccgagaagtccctggacaaagaacacagatgcatcgtgcggcacgaaaacaacaagaacggcgtggaccaggaaatcatcttcccacccatcaagaccgatgtgattacaggcagagccgattgcggctttaccagcgagagctaccagcagggcgtgctgagcgccaccatcctgtacgagatcctgctgggcaaggccaccctgtacgccgtgctggtgtctgccctggtgctgatggctatggtcaagcggaaggacagccggggacgggttaagttttccagatccgcagacgcacccgcttaccaacaagggcagaaccaactctacaatgaacttaatttggggcggagggaagagtacgacgttctggacaaaaggaggggacgagatcccgagatgggcggaaagcctcagcgaaggaagaatccgcaagaggggctttataacgaactccagaaagataaaatggcagaagcctatagtgagattgggatgaagggagaaaggaggaggggtaaaggtcacgatgggttgtaccaaggattgagcacagccactaaagatacctatgatgcgctccacatgcaggccctgccgccaaga

SEQ ID NO: 24949 - DNA, 834 bp, synthetic construct
  source 1..834: mol_type = other DNA
gacaagcagctggacgccgacgtgtcccccaagcctaccatcttcctgccctctatcgccgagacaaagctccagaaggccggcacctacctgtgcctgctggaaaagttcttcccagatgtgattaagatccactggcaggaaaagaagtccaacaccatcctgggcagccaggaaggcaacaccatgaagaccaacgacacctacatgaagttcagctggctgaccgtgcccgagaagtccctggacaaagaacacagatgcatcgtgcggcacgaaaacaacaagaacggcgtggaccaggaaatcatcttcccacccatcaagaccgatgtgattacagccgattgcggctttaccagcgagagctaccagcagggcgtgctgagcgccaccatcctgtacgagatcctgctgggcaaggccaccctgtacgccgtgctggtgtctgccctggtgctgatggctatggtcaagcggaaggacagccggggacgggttaagttttccagatccgcagacgcacccgcttaccaacaagggcagaaccaactctacaatgaacttaatttggggcggagggaagagtacgacgttctggacaaaaggaggggacgagatcccgagatgggcggaaagcctcagcgaaggaagaatccgcaagaggggctttataacgaactccagaaagataaaatggcagaagcctatagtgagattgggatgaagggagaaaggaggaggggtaaaggtcacgatgggttgtaccaaggattgagcacagccactaaagatacctatgatgcgctccacatgcaggccctgccgccaaga

SEQ ID NO: 24950 - DNA, 864 bp, synthetic construct
  source 1..864: mol_type = other DNA
gacaagcagctggacgccgacgtgtcccccaagcctaccatcttcctgccctctatcgccgagacaaagctccagaaggccggcacctacctgtgcctgctggaaaagttcttcccagatgtgattaagatccactggcaggaaaagaagtccaacaccatcctgggcagccaggaaggcaacaccatgaagaccaacgacacctacatgaagttcagctggctgaccgtgcccgagaagtccctggacaaagaacacagatgcatcgtgcggcacgaaaacaacaagaacggcgtggaccaggaaatcatcttcccacccatcaagaccgatgtgattacacagatcgtgtctgccgaagcctggggcagagccgattgcggctttaccagcgagagctaccagcagggcgtgctgagcgccaccatcctgtacgagatcctgctgggcaaggccaccctgtacgccgtgctggtgtctgccctggtgctgatggctatggtcaagcggaaggacagccggggacgggttaagttttccagatccgcagacgcacccgcttaccaacaagggcagaaccaactctacaatgaacttaatttggggcggagggaagagtacgacgttctggacaaaaggaggggacgagatcccgagatgggcggaaagcctcagcgaaggaagaatccgcaagaggggctttataacgaactccagaaagataaaatggcagaagcctatagtgagattgggatgaagggagaaaggaggaggggtaaaggtcacgatgggttgtaccaaggattgagcacagccactaaagatacctatgatgcgctccacatgcaggccctgccgccaaga

SEQ ID NO: 24951 - DNA, 885 bp, synthetic construct
  source 1..885: mol_type = other DNA
gacaagcagctggacgccgacgtgtcccccaagcctaccatcttcctgccctctatcgccgagacaaagctccagaaggccggcacctacctgtgcctgctggaaaagttcttcccagatgtgattaagatccactggcaggaaaagaagtccaacaccatcctgggcagccaggaaggcaacaccatgaagaccaacgacacctacatgaagttcagctggctgaccgtgcccgagaagtccctggacaaagaacacagatgcatcgtgcggcacgaaaacaacaagaacggcgtggaccaggaaatcatcttcccacccatcaagaccgatgtgattacagaagtgaaaaccgactccaccgaccacgtgaagcccaaagagacagagaacaccaagcagcccagcaagagctgccacaagcccaaggccatcgtgcacaccgagaaagtgaacatgatgagcctgaccgtgctgggcctgcggatgctgttcgccaaaaccgtggccgtgaacttcctgctgaccgccaagctgttcttcctccgggttaagttttccagatccgcagacgcacccgcttaccaacaagggcagaaccaactctacaatgaacttaatttggggcggagggaagagtacgacgttctggacaaaaggaggggacgagatcccgagatgggcggaaagcctcagcgaaggaagaatccgcaagaggggctttataacgaactccagaaagataaaatggcagaagcctatagtgagattgggatgaagggagaaaggaggaggggtaaaggtcacgatgggttgtaccaaggattgagcacagccactaaagatacctatgatgcgctccacatgcaggccctgccgccaaga

SEQ ID NO: 24952 - DNA, 864 bp, synthetic construct
  source 1..864: mol_type = other DNA
gacaagcagctggacgccgacgtgtcccccaagcctaccatcttcctgccctctatcgccgagacaaagctccagaaggccggcacctacctgtgcctgctggaaaagttcttcccagatgtgattaagatccactggcaggaaaagaagtccaacaccatcctgggcagccaggaaggcaacaccatgaagaccaacgacacctacatgaagttcagctggctgaccgtgcccgagaagtccctggacaaagaacacagatgcatcgtgcggcacgaaaacaacaagaacggcgtggaccaggaaatcatcttcccacccatcaagaccgatgtgattacagaccacgtgaagcccaaagagacagagaacaccaagcagcccagcaagagctgccacaagcccaaggccatcgtgcacaccgagaaagtgaacatgatgagcctgaccgtgctgggcctgcggatgctgttcgccaaaaccgtggccgtgaacttcctgctgaccgccaagctgttcttcctccgggttaagttttccagatccgcagacgcacccgcttaccaacaagggcagaaccaactctacaatgaacttaatttggggcggagggaagagtacgacgttctggacaaaaggaggggacgagatcccgagatgggcggaaagcctcagcgaaggaagaatccgcaagaggggctttataacgaactccagaaagataaaatggcagaagcctatagtgagattgggatgaagggagaaaggaggaggggtaaaggtcacgatgggttgtaccaaggattgagcacagccactaaagatacctatgatgcgctccacatgcaggccctgccgccaaga

SEQ ID NO: 24953 - DNA, 720 bp, synthetic construct
  source 1..720: mol_type = other DNA
cccatcaagaccgatgtgattacaatggaccccaaggacaactgctccaaggacgccaacgataccctgctgctccagctgaccaacaccagcgcctactacatgtacttgttgctgctgctgaagtccgtggtgtacttcgccatcatcacatgctgcctgctgcggagaaccgccttctgctgcaacggcgagaagtctatccccgaggacacattcttcccaagccccgagagcagctgcgacgtgaagctggtggaaaagagcttcgagacagacaccaacctgaacttccagaacctgagcgtgatcggcttcagaatcctgctgctgaaagtggccggctttaacctgctgatgaccctgcggctgtggtccagccgggttaagttttccagatccgcagacgcacccgcttaccaacaagggcagaaccaactctacaatgaacttaatttggggcggagggaagagtacgacgttctggacaaaaggaggggacgagatcccgagatgggcggaaagcctcagcgaaggaagaatccgcaagaggggctttataacgaactccagaaagataaaatggcagaagcctatagtgagattgggatgaagggagaaaggaggaggggtaaaggtcacgatgggttgtaccaaggattgagcacagccactaaagatacctatgatgcgctccacatgcaggccctgccgccaaga

SEQ ID NO: 24954 - DNA, 690 bp, synthetic construct
  source 1..690: mol_type = other DNA
cccatcaagaccgatgtgattacaatggaccccaaggacaactgctccaaggacgccaacgataccctgctgctccagctgaccaacaccagcgcctactacatgtacttgttgctgctgctgaagtccgtggtgtacttcgccatcatcacatgctgcctgctgcggagaaccgccttctgctgcaacggcgagaagtctgagagcagctgcgacgtgaagctggtggaaaagagcttcgagacagacaccaacctgaacttccagaacctgagcgtgatcggcttcagaatcctgctgctgaaagtggccggctttaacctgctgatgaccctgcggctgtggtccagccgggttaagttttccagatccgcagacgcacccgcttaccaacaagggcagaaccaactctacaatgaacttaatttggggcggagggaagagtacgacgttctggacaaaaggaggggacgagatcccgagatgggcggaaagcctcagcgaaggaagaatccgcaagaggggctttataacgaactccagaaagataaaatggcagaagcctatagtgagattgggatgaagggagaaaggaggaggggtaaaggtcacgatgggttgtaccaaggattgagcacagccactaaagatacctatgatgcgctccacatgcaggccctgccgccaaga

SEQ ID NO: 24955 - DNA, 717 bp, synthetic construct
  source 1..717: mol_type = other DNA
cccatcaagaccgatgtgattacaatggaccccaaggacaactgctccaaggacgccaacgataccctgctgctccagctgaccaacaccagcgcctactacatgtacttgttgctgctgctgaagtccgtggtgtacttcgccatcatcacatgctgcctgctgcggagaaccgccttctgctgcaacggcgagaagtctcccgaggacacattcttcccaagccccgagagcagctgcgacgtgaagctggtggaaaagagcttcgagacagacaccaacctgaacttccagaacctgagcgtgatcggcttcagaatcctgctgctgaaagtggccggctttaacctgctgatgaccctgcggctgtggtccagccgggttaagttttccagatccgcagacgcacccgcttaccaacaagggcagaaccaactctacaatgaacttaatttggggcggagggaagagtacgacgttctggacaaaaggaggggacgagatcccgagatgggcggaaagcctcagcgaaggaagaatccgcaagaggggctttataacgaactccagaaagataaaatggcagaagcctatagtgagattgggatgaagggagaaaggaggaggggtaaaggtcacgatgggttgtaccaaggattgagcacagccactaaagatacctatgatgcgctccacatgcaggccctgccgccaaga

SEQ ID NO: 24956 - DNA, 699 bp, synthetic construct
  source 1..699: mol_type = other DNA
cccatcaagaccgatgtgattacaatggaccccaaggacaactgctccaaggacgccaacgataccctgctgctccagctgaccaacaccagcgcctactacatgtacttgttgctgctgctgaagtccgtggtgtacttcgccatcatcacatgctgcctgctgcggagaaccgccttctgctgcaacggcgagaagtctggcagagccgattgcggctttaccagcgagagctaccagcagggcgtgctgagcgccaccatcctgtacgagatcctgctgggcaaggccaccctgtacgccgtgctggtgtctgccctggtgctgatggctatggtcaagcggaaggacagccggggacgggttaagttttccagatccgcagacgcacccgcttaccaacaagggcagaaccaactctacaatgaacttaatttggggcggagggaagagtacgacgttctggacaaaaggaggggacgagatcccgagatgggcggaaagcctcagcgaaggaagaatccgcaagaggggctttataacgaactccagaaagataaaatggcagaagcctatagtgagattgggatgaagggagaaaggaggaggggtaaaggtcacgatgggttgtaccaaggattgagcacagccactaaagatacctatgatgcgctccacatgcaggccctgccgccaaga

SEQ ID NO: 24957 - DNA, 693 bp, synthetic construct
  source 1..693: mol_type = other DNA
cccatcaagaccgatgtgattacaatggaccccaaggacaactgctccaaggacgccaacgataccctgctgctccagctgaccaacaccagcgcctactacatgtacttgttgctgctgctgaagtccgtggtgtacttcgccatcatcacatgctgcctgctgcggagaaccgccttctgctgcaacggcgagaagtctgccgattgcggctttaccagcgagagctaccagcagggcgtgctgagcgccaccatcctgtacgagatcctgctgggcaaggccaccctgtacgccgtgctggtgtctgccctggtgctgatggctatggtcaagcggaaggacagccggggacgggttaagttttccagatccgcagacgcacccgcttaccaacaagggcagaaccaactctacaatgaacttaatttggggcggagggaagagtacgacgttctggacaaaaggaggggacgagatcccgagatgggcggaaagcctcagcgaaggaagaatccgcaagaggggctttataacgaactccagaaagataaaatggcagaagcctatagtgagattgggatgaagggagaaaggaggaggggtaaaggtcacgatgggttgtaccaaggattgagcacagccactaaagatacctatgatgcgctccacatgcaggccctgccgccaaga

SEQ ID NO: 24958 - DNA, 723 bp, synthetic construct
  source 1..723: mol_type = other DNA
cccatcaagaccgatgtgattacaatggaccccaaggacaactgctccaaggacgccaacgataccctgctgctccagctgaccaacaccagcgcctactacatgtacttgttgctgctgctgaagtccgtggtgtacttcgccatcatcacatgctgcctgctgcggagaaccgccttctgctgcaacggcgagaagtctcagatcgtgtctgccgaagcctggggcagagccgattgcggctttaccagcgagagctaccagcagggcgtgctgagcgccaccatcctgtacgagatcctgctgggcaaggccaccctgtacgccgtgctggtgtctgccctggtgctgatggctatggtcaagcggaaggacagccggggacgggttaagttttccagatccgcagacgcacccgcttaccaacaagggcagaaccaactctacaatgaacttaatttggggcggagggaagagtacgacgttctggacaaaaggaggggacgagatcccgagatgggcggaaagcctcagcgaaggaagaatccgcaagaggggctttataacgaactccagaaagataaaatggcagaagcctatagtgagattgggatgaagggagaaaggaggaggggtaaaggtcacgatgggttgtaccaaggattgagcacagccactaaagatacctatgatgcgctccacatgcaggccctgccgccaaga

SEQ ID NO: 24959 - DNA, 744 bp, synthetic construct
  source 1..744: mol_type = other DNA
cccatcaagaccgatgtgattacaatggaccccaaggacaactgctccaaggacgccaacgataccctgctgctccagctgaccaacaccagcgcctactacatgtacttgttgctgctgctgaagtccgtggtgtacttcgccatcatcacatgctgcctgctgcggagaaccgccttctgctgcaacggcgagaagtctgaagtgaaaaccgactccaccgaccacgtgaagcccaaagagacagagaacaccaagcagcccagcaagagctgccacaagcccaaggccatcgtgcacaccgagaaagtgaacatgatgagcctgaccgtgctgggcctgcggatgctgttcgccaaaaccgtggccgtgaacttcctgctgaccgccaagctgttcttcctccgggttaagttttccagatccgcagacgcacccgcttaccaacaagggcagaaccaactctacaatgaacttaatttggggcggagggaagagtacgacgttctggacaaaaggaggggacgagatcccgagatgggcggaaagcctcagcgaaggaagaatccgcaagaggggctttataacgaactccagaaagataaaatggcagaagcctatagtgagattgggatgaagggagaaaggaggaggggtaaaggtcacgatgggttgtaccaaggattgagcacagccactaaagatacctatgatgcgctccacatgcaggccctgccgccaaga

SEQ ID NO: 24960 - DNA, 723 bp, synthetic construct
  source 1..723: mol_type = other DNA
cccatcaagaccgatgtgattacaatggaccccaaggacaactgctccaaggacgccaacgataccctgctgctccagctgaccaacaccagcgcctactacatgtacttgttgctgctgctgaagtccgtggtgtacttcgccatcatcacatgctgcctgctgcggagaaccgccttctgctgcaacggcgagaagtctgaccacgtgaagcccaaagagacagagaacaccaagcagcccagcaagagctgccacaagcccaaggccatcgtgcacaccgagaaagtgaacatgatgagcctgaccgtgctgggcctgcggatgctgttcgccaaaaccgtggccgtgaacttcctgctgaccgccaagctgttcttcctccgggttaagttttccagatccgcagacgcacccgcttaccaacaagggcagaaccaactctacaatgaacttaatttggggcggagggaagagtacgacgttctggacaaaaggaggggacgagatcccgagatgggcggaaagcctcagcgaaggaagaatccgcaagaggggctttataacgaactccagaaagataaaatggcagaagcctatagtgagattgggatgaagggagaaaggaggaggggtaaaggtcacgatgggttgtaccaaggattgagcacagccactaaagatacctatgatgcgctccacatgcaggccctgccgccaaga

SEQ ID NO: 24961 - DNA, 876 bp, synthetic construct
  source 1..876: mol_type = other DNA
gacaagcagctggacgccgacgtgtcccccaagcctaccatcttcctgccctctatcgccgagacaaagctccagaaggccggcacctacctgtgcctgctggaaaagttcttcccagatgtgattaagatccactggcaggaaaagaagtccaacaccatcctgggcagccaggaaggcaacaccatgaagaccaacgacacctacatgaagttcagctggctgaccgtgcccgagaagtccctggacaaagaacacagatgcatcgtgcggcacgaaaacaacaagaacggcgtggaccaggaaatcatcttcccacccatcaagaccgatgtgattacaatggaccccaaggacatccccgaggacacattcttcccaagccccgagagcagctgcgacgtgaagctggtggaaaagagcttcgagacagacaccaacctgaacttccagaacctgagcgtgatcggcttcagaatcctgctgctgaaagtggccggctttaacctgctgatgaccctgcggctgtggtccagccgggttaagttttccagatccgcagacgcacccgcttaccaacaagggcagaaccaactctacaatgaacttaatttggggcggagggaagagtacgacgttctggacaaaaggaggggacgagatcccgagatgggcggaaagcctcagcgaaggaagaatccgcaagaggggctttataacgaactccagaaagataaaatggcagaagcctatagtgagattgggatgaagggagaaaggaggaggggtaaaggtcacgatgggttgtaccaaggattgagcacagccactaaagatacctatgatgcgctccacatgcaggccctgccgccaaga

SEQ ID NO: 24962 - DNA, 846 bp, synthetic construct
  source 1..846: mol_type = other DNA
gacaagcagctggacgccgacgtgtcccccaagcctaccatcttcctgccctctatcgccgagacaaagctccagaaggccggcacctacctgtgcctgctggaaaagttcttcccagatgtgattaagatccactggcaggaaaagaagtccaacaccatcctgggcagccaggaaggcaacaccatgaagaccaacgacacctacatgaagttcagctggctgaccgtgcccgagaagtccctggacaaagaacacagatgcatcgtgcggcacgaaaacaacaagaacggcgtggaccaggaaatcatcttcccacccatcaagaccgatgtgattacaatggaccccaaggacgagagcagctgcgacgtgaagctggtggaaaagagcttcgagacagacaccaacctgaacttccagaacctgagcgtgatcggcttcagaatcctgctgctgaaagtggccggctttaacctgctgatgaccctgcggctgtggtccagccgggttaagttttccagatccgcagacgcacccgcttaccaacaagggcagaaccaactctacaatgaacttaatttggggcggagggaagagtacgacgttctggacaaaaggaggggacgagatcccgagatgggcggaaagcctcagcgaaggaagaatccgcaagaggggctttataacgaactccagaaagataaaatggcagaagcctatagtgagattgggatgaagggagaaaggaggaggggtaaaggtcacgatgggttgtaccaaggattgagcacagccactaaagatacctatgatgcgctccacatgcaggccctgccgccaaga

SEQ ID NO: 24963 - DNA, 873 bp, synthetic construct
  source 1..873: mol_type = other DNA
gacaagcagctggacgccgacgtgtcccccaagcctaccatcttcctgccctctatcgccgagacaaagctccagaaggccggcacctacctgtgcctgctggaaaagttcttcccagatgtgattaagatccactggcaggaaaagaagtccaacaccatcctgggcagccaggaaggcaacaccatgaagaccaacgacacctacatgaagttcagctggctgaccgtgcccgagaagtccctggacaaagaacacagatgcatcgtgcggcacgaaaacaacaagaacggcgtggaccaggaaatcatcttcccacccatcaagaccgatgtgattacaatggaccccaaggaccccgaggacacattcttcccaagccccgagagcagctgcgacgtgaagctggtggaaaagagcttcgagacagacaccaacctgaacttccagaacctgagcgtgatcggcttcagaatcctgctgctgaaagtggccggctttaacctgctgatgaccctgcggctgtggtccagccgggttaagttttccagatccgcagacgcacccgcttaccaacaagggcagaaccaactctacaatgaacttaatttggggcggagggaagagtacgacgttctggacaaaaggaggggacgagatcccgagatgggcggaaagcctcagcgaaggaagaatccgcaagaggggctttataacgaactccagaaagataaaatggcagaagcctatagtgagattgggatgaagggagaaaggaggaggggtaaaggtcacgatgggttgtaccaaggattgagcacagccactaaagatacctatgatgcgctccacatgcaggccctgccgccaaga

SEQ ID NO: 24964 - DNA, 855 bp, synthetic construct
  source 1..855: mol_type = other DNA
gacaagcagctggacgccgacgtgtcccccaagcctaccatcttcctgccctctatcgccgagacaaagctccagaaggccggcacctacctgtgcctgctggaaaagttcttcccagatgtgattaagatccactggcaggaaaagaagtccaacaccatcctgggcagccaggaaggcaacaccatgaagaccaacgacacctacatgaagttcagctggctgaccgtgcccgagaagtccctggacaaagaacacagatgcatcgtgcggcacgaaaacaacaagaacggcgtggaccaggaaatcatcttcccacccatcaagaccgatgtgattacaatggaccccaaggacggcagagccgattgcggctttaccagcgagagctaccagcagggcgtgctgagcgccaccatcctgtacgagatcctgctgggcaaggccaccctgtacgccgtgctggtgtctgccctggtgctgatggctatggtcaagcggaaggacagccggggacgggttaagttttccagatccgcagacgcacccgcttaccaacaagggcagaaccaactctacaatgaacttaatttggggcggagggaagagtacgacgttctggacaaaaggaggggacgagatcccgagatgggcggaaagcctcagcgaaggaagaatccgcaagaggggctttataacgaactccagaaagataaaatggcagaagcctatagtgagattgggatgaagggagaaaggaggaggggtaaaggtcacgatgggttgtaccaaggattgagcacagccactaaagatacctatgatgcgctccacatgcaggccctgccgccaaga

SEQ ID NO: 24965 - DNA, 849 bp, synthetic construct
  source 1..849: mol_type = other DNA
gacaagcagctggacgccgacgtgtcccccaagcctaccatcttcctgccctctatcgccgagacaaagctccagaaggccggcacctacctgtgcctgctggaaaagttcttcccagatgtgattaagatccactggcaggaaaagaagtccaacaccatcctgggcagccaggaaggcaacaccatgaagaccaacgacacctacatgaagttcagctggctgaccgtgcccgagaagtccctggacaaagaacacagatgcatcgtgcggcacgaaaacaacaagaacggcgtggaccaggaaatcatcttcccacccatcaagaccgatgtgattacaatggaccccaaggacgccgattgcggctttaccagcgagagctaccagcagggcgtgctgagcgccaccatcctgtacgagatcctgctgggcaaggccaccctgtacgccgtgctggtgtctgccctggtgctgatggctatggtcaagcggaaggacagccggggacgggttaagttttccagatccgcagacgcacccgcttaccaacaagggcagaaccaactctacaatgaacttaatttggggcggagggaagagtacgacgttctggacaaaaggaggggacgagatcccgagatgggcggaaagcctcagcgaaggaagaatccgcaagaggggctttataacgaactccagaaagataaaatggcagaagcctatagtgagattgggatgaagggagaaaggaggaggggtaaaggtcacgatgggttgtaccaaggattgagcacagccactaaagatacctatgatgcgctccacatgcaggccctgccgccaaga

SEQ ID NO: 24966 - DNA, 879 bp, synthetic construct
  source 1..879: mol_type = other DNA
gacaagcagctggacgccgacgtgtcccccaagcctaccatcttcctgccctctatcgccgagacaaagctccagaaggccggcacctacctgtgcctgctggaaaagttcttcccagatgtgattaagatccactggcaggaaaagaagtccaacaccatcctgggcagccaggaaggcaacaccatgaagaccaacgacacctacatgaagttcagctggctgaccgtgcccgagaagtccctggacaaagaacacagatgcatcgtgcggcacgaaaacaacaagaacggcgtggaccaggaaatcatcttcccacccatcaagaccgatgtgattacaatggaccccaaggaccagatcgtgtctgccgaagcctggggcagagccgattgcggctttaccagcgagagctaccagcagggcgtgctgagcgccaccatcctgtacgagatcctgctgggcaaggccaccctgtacgccgtgctggtgtctgccctggtgctgatggctatggtcaagcggaaggacagccggggacgggttaagttttccagatccgcagacgcacccgcttaccaacaagggcagaaccaactctacaatgaacttaatttggggcggagggaagagtacgacgttctggacaaaaggaggggacgagatcccgagatgggcggaaagcctcagcgaaggaagaatccgcaagaggggctttataacgaactccagaaagataaaatggcagaagcctatagtgagattgggatgaagggagaaaggaggaggggtaaaggtcacgatgggttgtaccaaggattgagcacagccactaaagatacctatgatgcgctccacatgcaggccctgccgccaaga

SEQ ID NO: 24967 - DNA, 900 bp, synthetic construct
  source 1..900: mol_type = other DNA
gacaagcagctggacgccgacgtgtcccccaagcctaccatcttcctgccctctatcgccgagacaaagctccagaaggccggcacctacctgtgcctgctggaaaagttcttcccagatgtgattaagatccactggcaggaaaagaagtccaacaccatcctgggcagccaggaaggcaacaccatgaagaccaacgacacctacatgaagttcagctggctgaccgtgcccgagaagtccctggacaaagaacacagatgcatcgtgcggcacgaaaacaacaagaacggcgtggaccaggaaatcatcttcccacccatcaagaccgatgtgattacaatggaccccaaggacgaagtgaaaaccgactccaccgaccacgtgaagcccaaagagacagagaacaccaagcagcccagcaagagctgccacaagcccaaggccatcgtgcacaccgagaaagtgaacatgatgagcctgaccgtgctgggcctgcggatgctgttcgccaaaaccgtggccgtgaacttcctgctgaccgccaagctgttcttcctccgggttaagttttccagatccgcagacgcacccgcttaccaacaagggcagaaccaactctacaatgaacttaatttggggcggagggaagagtacgacgttctggacaaaaggaggggacgagatcccgagatgggcggaaagcctcagcgaaggaagaatccgcaagaggggctttataacgaactccagaaagataaaatggcagaagcctatagtgagattgggatgaagggagaaaggaggaggggtaaaggtcacgatgggttgtaccaaggattgagcacagccactaaagatacctatgatgcgctccacatgcaggccctgccgccaaga

SEQ ID NO: 24968 - DNA, 879 bp, synthetic construct
  source 1..879: mol_type = other DNA
gacaagcagctggacgccgacgtgtcccccaagcctaccatcttcctgccctctatcgccgagacaaagctccagaaggccggcacctacctgtgcctgctggaaaagttcttcccagatgtgattaagatccactggcaggaaaagaagtccaacaccatcctgggcagccaggaaggcaacaccatgaagaccaacgacacctacatgaagttcagctggctgaccgtgcccgagaagtccctggacaaagaacacagatgcatcgtgcggcacgaaaacaacaagaacggcgtggaccaggaaatcatcttcccacccatcaagaccgatgtgattacaatggaccccaaggacgaccacgtgaagcccaaagagacagagaacaccaagcagcccagcaagagctgccacaagcccaaggccatcgtgcacaccgagaaagtgaacatgatgagcctgaccgtgctgggcctgcggatgctgttcgccaaaaccgtggccgtgaacttcctgctgaccgccaagctgttcttcctccgggttaagttttccagatccgcagacgcacccgcttaccaacaagggcagaaccaactctacaatgaacttaatttggggcggagggaagagtacgacgttctggacaaaaggaggggacgagatcccgagatgggcggaaagcctcagcgaaggaagaatccgcaagaggggctttataacgaactccagaaagataaaatggcagaagcctatagtgagattgggatgaagggagaaaggaggaggggtaaaggtcacgatgggttgtaccaaggattgagcacagccactaaagatacctatgatgcgctccacatgcaggccctgccgccaaga

SEQ ID NO: 24969 - DNA, 861 bp, synthetic construct; identical to SEQ ID NO: 24945
  source 1..861: mol_type = other DNA

SEQ ID NO: 24970 - DNA, 831 bp, synthetic construct; identical to SEQ ID NO: 24946
  source 1..831: mol_type = other DNA

SEQ ID NO: 24971 - DNA, 858 bp, synthetic construct; identical to SEQ ID NO: 24947
  source 1..858: mol_type = other DNA

SEQ ID NO: 24972 - DNA, 840 bp, synthetic construct; identical to SEQ ID NO: 24948
  source 1..840: mol_type = other DNA

SEQ ID NO: 24973 - DNA, 834 bp, synthetic construct; identical to SEQ ID NO: 24949
  source 1..834: mol_type = other DNA

SEQ ID NO: 24974 - DNA, 864 bp, synthetic construct; identical to SEQ ID NO: 24950
  source 1..864: mol_type = other DNA

SEQ ID NO: 24975 - DNA, 885 bp, synthetic construct; identical to SEQ ID NO: 24951
  source 1..885: mol_type = other DNA

SEQ ID NO: 24976 - DNA, 864 bp, synthetic construct; identical to SEQ ID NO: 24952
  source 1..864: mol_type = other DNA

SEQ ID NO: 24977 - DNA, 804 bp, synthetic construct
  source 1..804: mol_type = other DNA
cccaagcctaccatcttcctgccctctatcgccgagacaaagctccagaaggccggcacctacctgtgcctgctggaaaagttcttcccagatgtgattaagatccactggcaggaaaagaagtccaacaccatcctgggcagccaggaaggcaacaccatgaagaccaacgacacctacatgaagttcagctggctgaccgtgcccgagaagtccctggacaaagaacacagatgcatcgtgcggcacgaaaacaacaagaacggcgtggaccaggaaatcatcatccccgaggacacattcttcccaagccccgagagcagctgcgacgtgaagctggtggaaaagagcttcgagacagacaccaacctgaacttccagaacctgagcgtgatcggcttcagaatcctgctgctgaaagtggccggctttaacctgctgatgaccctgcggctgtggtccagccgggttaagttttccagatccgcagacgcacccgcttaccaacaagggcagaaccaactctacaatgaacttaatttggggcggagggaagagtacgacgttctggacaaaaggaggggacgagatcccgagatgggcggaaagcctcagcgaaggaagaatccgcaagaggggctttataacgaactccagaaagataaaatggcagaagcctatagtgagattgggatgaagggagaaaggaggaggggtaaaggtcacgatgggttgtaccaaggattgagcacagccactaaagatacctatgatgcgctccacatgcaggccctgccgccaaga

SEQ ID NO: 24978 - DNA, 774 bp, synthetic construct
  source 1..774: mol_type = other DNA
cccaagcctaccatcttcctgccctctatcgccgagacaaagctccagaaggccggcacctacctgtgcctgctggaaaagttcttcccagatgtgattaagatccactggcaggaaaagaagtccaacaccatcctgggcagccaggaaggcaacaccatgaagaccaacgacacctacatgaagttcagctggctgaccgtgcccgagaagtccctggacaaagaacacagatgcatcgtgcggcacgaaaacaacaagaacggcgtggaccaggaaatcatcgagagcagctgcgacgtgaagctggtggaaaagagcttcgagacagacaccaacctgaacttccagaacctgagcgtgatcggcttcagaatcctgctgctgaaagtggccggctttaacctgctgatgaccctgcggctgtggtccagccgggttaagttttccagatccgcagacgcacccgcttaccaacaagggcagaaccaactctacaatgaacttaatttggggcggagggaagagtacgacgttctggacaaaaggaggggacgagatcccgagatgggcggaaagcctcagcgaaggaagaatccgcaagaggggctttataacgaactccagaaagataaaatggcagaagcctatagtgagattgggatgaagggagaaaggaggaggggtaaaggtcacgatgggttgtaccaaggattgagcacagccactaaagatacctatgatgcgctccacatgcaggccctgccgccaaga

SEQ ID NO: 24979 - DNA, 801 bp, synthetic construct
  source 1..801: mol_type = other DNA
cccaagcctaccatcttcctgccctctatcgccgagacaaagctccagaaggccggcacctacctgtgcctgctggaaaagttcttcccagatgtgattaagatccactggcaggaaaagaagtccaacaccatcctgggcagccaggaaggcaacaccatgaagaccaacgacacctacatgaagttcagctggctgaccgtgcccgagaagtccctggacaaagaacacagatgcatcgtgcggcacgaaaacaacaagaacggcgtggaccaggaaatcatccccgaggacacattcttcccaagccccgagagcagctgcgacgtgaagctggtggaaaagagcttcgagacagacaccaacctgaacttccagaacctgagcgtgatcggcttcagaatcctgctgctgaaagtggccggctttaacctgctgatgaccctgcggctgtggtccagccgggttaagttttccagatccgcagacgcacccgcttaccaacaagggcagaaccaactctacaatgaacttaatttggggcggagggaagagtacgacgttctggacaaaaggaggggacgagatcccgagatgggcggaaagcctcagcgaaggaagaatccgcaagaggggctttataacgaactccagaaagataaaatggcagaagcctatagtgagattgggatgaagggagaaaggaggaggggtaaaggtcacgatgggttgtaccaaggattgagcacagccactaaagatacctatgatgcgctccacatgcaggccctgccgccaaga

SEQ ID NO: 24980 - DNA, 783 bp, synthetic construct
  source 1..783: mol_type = other DNA
cccaagcctaccatcttcctgccctctatcgccgagacaaagctccagaaggccggcacctacctgtgcctgctggaaaagttcttcccagatgtgattaagatccactggcaggaaaagaagtccaacaccatcctgggcagccaggaaggcaacaccatgaagaccaacgacacctacatgaagttcagctggctgaccgtgcccgagaagtccctggacaaagaacacagatgcatcgtgcggcacgaaaacaacaagaacggcgtggaccaggaaatcatcggcagagccgattgcggctttaccagcgagagctaccagcagggcgtgctgagcgccaccatcctgtacgagatcctgctgggcaaggccaccctgtacgccgtgctggtgtctgccctggtgctgatggctatggtcaagcggaaggacagccggggacgggttaagttttccagatccgcagacgcacccgcttaccaacaagggcagaaccaactctacaatgaacttaatttggggcggagggaagagtacgacgttctggacaaaaggaggggacgagatcccgagatgggcggaaagcctcagcgaaggaagaatccgcaagaggggctttataacgaactccagaaagataaaatggcagaagcctatagtgagattgggatgaagggagaaaggaggaggggtaaaggtcacgatgggttgtaccaaggattgagcacagccactaaagatacctatgatgcgctccacatgcaggccctgccgccaaga

SEQ ID NO: 24981 - DNA, 777 bp, synthetic construct
  source 1..777: mol_type = other DNA
cccaagcctaccatcttcctgccctctatcgccgagacaaagctccagaaggccggcacctacctgtgcctgctggaaaagttcttcccagatgtgattaagatccactggcaggaaaagaagtccaacaccatcctgggcagccaggaaggcaacaccatgaagaccaacgacacctacatgaagttcagctggctgaccgtgcccgagaagtccctggacaaagaacacagatgcatcgtgcggcacgaaaacaacaagaacggcgtggaccaggaaatcatcgccgattgcggctttaccagcgagagctaccagcagggcgtgctgagcgccaccatcctgtacgagatcctgctgggcaaggccaccctgtacgccgtgctggtgtctgccctggtgctgatggctatggtcaagcggaaggacagccggggacgggttaagttttccagatccgcagacgcacccgcttaccaacaagggcagaaccaactctacaatgaacttaatttggggcggagggaagagtacgacgttctggacaaaaggaggggacgagatcccgagatgggcggaaagcctcagcgaaggaagaatccgcaagaggggctttataacgaactccagaaagataaaatggcagaagcctatagtgagattgggatgaagggagaaaggaggaggggtaaaggtcacgatgggttgtaccaaggattgagcacagccactaaagatacctatgatgcgctccacatgcaggccctgccgccaaga

SEQ ID NO: 24982 - DNA, 807 bp, synthetic construct
  source 1..807: mol_type = other DNA
cccaagcctaccatcttcctgccctctatcgccgagacaaagctccagaaggccggcacctacctgtgcctgctggaaaagttcttcccagatgtgattaagatccactggcaggaaaagaagtccaacaccatcctgggcagccaggaaggcaacaccatgaagaccaacgacacctacatgaagttcagctggctgaccgtgcccgagaagtccctggacaaagaacacagatgcatcgtgcggcacgaaaacaacaagaacggcgtggaccaggaaatcatccagatcgtgtctgccgaagcctggggcagagccgattgcggctttaccagcgagagctaccagcagggcgtgctgagcgccaccatcctgtacgagatcctgctgggcaaggccaccctgtacgccgtgctggtgtctgccctggtgctgatggctatggtcaagcggaaggacagccggggacgggttaagttttccagatccgcagacgcacccgcttaccaacaagggcagaaccaactctacaatgaacttaatttggggcggagggaagagtacgacgttctggacaaaaggaggggacgagatcccgagatgggcggaaagcctcagcgaaggaagaatccgcaagaggggctttataacgaactccagaaagataaaatggcagaagcctatagtgagattgggatgaagggagaaaggaggaggggtaaaggtcacgatgggttgtaccaaggattgagcacagccactaaagatacctatgatgcgctccacatgcaggccctgccgccaaga

SEQ ID NO: 24983 - DNA, 831 bp, synthetic construct; identical to SEQ ID NO: 24419
  source 1..831: mol_type = other DNA

SEQ ID NO: 24984 - DNA, 825 bp, synthetic construct
  source 1..825: mol_type = other DNA
cccaagcctaccatcttcctgccctctatcgccgagacaaagctccagaaggccggcacctacctgtgcctgctggaaaagttcttcccagatgtgattaagatccactggcaggaaaagaagtccaacaccatcctgggcagccaggaaggcaacaccatgaagaccaacgacacctacatgaagttcagctggctgaccgtgcccgagaagtccctggacaaagaacacagatgcatcgtgcggcacgaaaacaacaagaacggcgtggaccaggaaatcatccccatcaagaccgatgtgattacaatggaccccaaggacaactgctccaaggacgccaacgataccctgctgctccagctgaccaacaccagcgcctactacatgtacttgttgctgctgctgaagtccgtggtgtacttcgccatcatcacatgctgcctgctgcggagaaccgccttctgctgcaacggcgagaagtctcgggttaagttttccagatccgcagacgcacccgcttaccaacaagggcagaaccaactctacaatgaacttaatttggggcggagggaagagtacgacgttctggacaaaaggaggggacgagatcccgagatgggcggaaagcctcagcgaaggaagaatccgcaagaggggctttataacgaactccagaaagataaaatggcagaagcctatagtgagattgggatgaagggagaaaggaggaggggtaaaggtcacgatgggttgtaccaaggattgagcacagccactaaagatacctatgatgcgctccacatgcaggccctgccgccaaga

SEQ ID NO: 24985 - DNA, 801 bp, synthetic construct
  source 1..801: mol_type = other DNA
cccaagcctaccatcttcctgccctctatcgccgagacaaagctccagaaggccggcacctacctgtgcctgctggaaaagttcttcccagatgtgattaagatccactggcaggaaaagaagtccaacaccatcctgggcagccaggaaggcaacaccatgaagaccaacgacacctacatgaagttcagctggctgaccgtgcccgagaagtccctggacaaagaacacagatgcatcgtgcggcacgaaaacaacaagaacggcgtggaccaggaaatcatcatggaccccaaggacaactgctccaaggacgccaacgataccctgctgctccagctgaccaacaccagcgcctactacatgtacttgttgctgctgctgaagtccgtggtgtacttcgccatcatcacatgctgcctgctgcggagaaccgccttctgctgcaacggcgagaagtctcgggttaagttttccagatccgcagacgcacccgcttaccaacaagggcagaaccaactctacaatgaacttaatttggggcggagggaagagtacgacgttctggacaaaaggaggggacgagatcccgagatgggcggaaagcctcagcgaaggaagaatccgcaagaggggctttataacgaactccagaaagataaaatggcagaagcctatagtgagattgggatgaagggagaaaggaggaggggtaaaggtcacgatgggttgtaccaaggattgagcacagccactaaagatacctatgatgcgctccacatgcaggccctgccgccaaga

SEQ ID NO: 24986 - DNA, 825 bp, synthetic construct; identical to SEQ ID NO: 24984
  source 1..825: mol_type = other DNA

SEQ ID NO: 24987 - DNA, 783 bp, synthetic construct
  source 1..783: mol_type = other DNA
cccaagcctaccatcttcctgccctctatcgccgagacaaagctccagaaggccggcacctacctgtgcctgctggaaaagttcttcccagatgtgattaagatccactggcaggaaaagaagtccaacaccatcctgggcagccaggaaggcaacaccatgaagaccaacgacacctacatgaagttcagctggctgaccgtgcccgagaagtccctggacaaagaacacagatgcatcgtgcggcacgaaaacaacaagaacggcgtggaccaggaaatcatctgctccaaggacgccaacgataccctgctgctccagctgaccaacaccagcgcctactacatgtacttgttgctgctgctgaagtccgtggtgtacttcgccatcatcacatgctgcctgctgcggagaaccgccttctgctgcaacggcgagaagtctcgggttaagttttccagatccgcagacgcacccgcttaccaacaagggcagaaccaactctacaatgaacttaatttggggcggagggaagagtacgacgttctggacaaaaggaggggacgagatcccgagatgggcggaaagcctcagcgaaggaagaatccgcaagaggggctttataacgaactccagaaagataaaatggcagaagcctatagtgagattgggatgaagggagaaaggaggaggggtaaaggtcacgatgggttgtaccaaggattgagcacagccactaaagatacctatgatgcgctccacatgcaggccctgccgccaaga

SEQ ID NO: 24988 - DNA, 828 bp, synthetic construct
  source 1..828: mol_type = other DNA
cccaagcctaccatcttcctgccctctatcgccgagacaaagctccagaaggccggcacctacctgtgcctgctggaaaagttcttcccagatgtgattaagatccactggcaggaaaagaagtccaacaccatcctgggcagccaggaaggcaacaccatgaagaccaacgacacctacatgaagttcagctggctgaccgtgcccgagaagtccctggacaaagaacacagatgcatcgtgcggcacgaaaacaacaagaacggcgtggaccaggaaatcatcgaagtgaaaaccgactccaccgaccacgtgaagcccaaagagacagagaacaccaagcagcccagcaagagctgccacaagcccaaggccatcgtgcacaccgagaaagtgaacatgatgagcctgaccgtgctgggcctgcggatgctgttcgccaaaaccgtggccgtgaacttcctgctgaccgccaagctgttcttcctccgggttaagttttccagatccgcagacgcacccgcttaccaacaagggcagaaccaactctacaatgaacttaatttggggcggagggaagagtacgacgttctggacaaaaggaggggacgagatcccgagatgggcggaaagcctcagcgaaggaagaatccgcaagaggggctttataacgaactccagaaagataaaatggcagaagcctatagtgagattgggatgaagggagaaaggaggaggggtaaaggtcacgatgggttgtaccaaggattgagcacagccactaaagatacctatgatgcgctccacatgcaggccctgccgccaaga

SEQ ID NO: 24989 - DNA, 807 bp, synthetic construct
  source 1..807: mol_type = other DNA
cccaagcctaccatcttcctgccctctatcgccgagacaaagctccagaaggccggcacctacctgtgcctgctggaaaagttcttcccagatgtgattaagatccactggcaggaaaagaagtccaacaccatcctgggcagccaggaaggcaacaccatgaagaccaacgacacctacatgaagttcagctggctgaccgtgcccgagaagtccctggacaaagaacacagatgcatcgtgcggcacgaaaacaacaagaacggcgtggaccaggaaatcatcgaccacgtgaagcccaaagagacagagaacaccaagcagcccagcaagagctgccacaagcccaaggccatcgtgcacaccgagaaagtgaacatgatgagcctgaccgtgctgggcctgcggatgctgttcgccaaaaccgtggccgtgaacttcctgctgaccgccaagctgttcttcctccgggttaagttttccagatccgcagacgcacccgcttaccaacaagggcagaaccaactctacaatgaacttaatttggggcggagggaagagtacgacgttctggacaaaaggaggggacgagatcccgagatgggcggaaagcctcagcgaaggaagaatccgcaagaggggctttataacgaactccagaaagataaaatggcagaagcctatagtgagattgggatgaagggagaaaggaggaggggtaaaggtcacgatgggttgtaccaaggattgagcacagccactaaagatacctatgatgcgctccacatgcaggccctgccgccaaga

SEQ ID NO: 24990 - DNA, 774 bp, synthetic construct
  source 1..774: mol_type = other DNA
agccagcctcacaccaagcccagcgtgttcgtgatgaagaacggcaccaacgtggcctgcctcgtgaaagagttctaccccaaggacatcaggatcaacctggtgtccagcaagaagatcaccgagttcgaccccgccatcgtgatctcccccagcggcaagtacaacgccgtgaagctggggaagtacgaggacagcaacagcgtgacctgctccgtgcagcacgacaacaagaccgtgcacagcaccgactttatccccgaggacacattcttcccaagccccgagagcagctgcgacgtgaagctggtggaaaagagcttcgagacagacaccaacctgaacttccagaacctgagcgtgatcggcttcagaatcctgctgctgaaagtggccggctttaacctgctgatgaccctgcggctgtggtccagccgggttaagttttccagatccgcagacgcacccgcttaccaacaagggcagaaccaactctacaatgaacttaatttggggcggagggaagagtacgacgttctggacaaaaggaggggacgagatcccgagatgggcggaaagcctcagcgaaggaagaatccgcaagaggggctttataacgaactccagaaagataaaatggcagaagcctatagtgagattgggatgaagggagaaaggaggaggggtaaaggtcacgatgggttgtaccaaggattgagcacagccactaaagatacctatgatgcgctccacatgcaggccctgccgccaaga

SEQ ID NO: 24991 - DNA, 744 bp, synthetic construct
  source 1..744: mol_type = other DNA
agccagcctcacaccaagcccagcgtgttcgtgatgaagaacggcaccaacgtggcctgcctcgtgaaagagttctaccccaaggacatcaggatcaacctggtgtccagcaagaagatcaccgagttcgaccccgccatcgtgatctcccccagcggcaagtacaacgccgtgaagctggggaagtacgaggacagcaacagcgtgacctgctccgtgcagcacgacaacaagaccgtgcacagcaccgactttgagagcagctgcgacgtgaagctggtggaaaagagcttcgagacagacaccaacctgaacttccagaacctgagcgtgatcggcttcagaatcctgctgctgaaagtggccggctttaacctgctgatgaccctgcggctgtggtccagccgggttaagttttccagatccgcagacgcacccgcttaccaacaagggcagaaccaactctacaatgaacttaatttggggcggagggaagagtacgacgttctggacaaaaggaggggacgagatcccgagatgggcggaaagcctcagcgaaggaagaatccgcaagaggggctttataacgaactccagaaagataaaatggcagaagcctatagtgagattgggatgaagggagaaaggaggaggggtaaaggtcacgatgggttgtaccaaggattgagcacagccactaaagatacctatgatgcgctccacatgcaggccctgccgccaaga

SEQ ID NO: 24992 - DNA, 771 bp, synthetic construct
  source 1..771: mol_type = other DNA
agccagcctcacaccaagcccagcgtgttcgtgatgaagaacggcaccaacgtggcctgcctcgtgaaagagttctaccccaaggacatcaggatcaacctggtgtccagcaagaagatcaccgagttcgaccccgccatcgtgatctcccccagcggcaagtacaacgccgtgaagctggggaagtacgaggacagcaacagcgtgacctgctccgtgcagcacgacaacaagaccgtgcacagcaccgactttcccgaggacacattcttcccaagccccgagagcagctgcgacgtgaagctggtggaaaagagcttcgagacagacaccaacctgaacttccagaacctgagcgtgatcggcttcagaatcctgctgctgaaagtggccggctttaacctgctgatgaccctgcggctgtggtccagccgggttaagttttccagatccgcagacgcacccgcttaccaacaagggcagaaccaactctacaatgaacttaatttggggcggagggaagagtacgacgttctggacaaaaggaggggacgagatcccgagatgggcggaaagcctcagcgaaggaagaatccgcaagaggggctttataacgaactccagaaagataaaatggcagaagcctatagtgagattgggatgaagggagaaaggaggaggggtaaaggtcacgatgggttgtaccaaggattgagcacagccactaaagatacctatgatgcgctccacatgcaggccctgccgccaaga

SEQ ID NO: 24993 - DNA, 753 bp, synthetic construct
  source 1..753: mol_type = other DNA
agccagcctcacaccaagcccagcgtgttcgtgatgaagaacggcaccaacgtggcctgcctcgtgaaagagttctaccccaaggacatcaggatcaacctggtgtccagcaagaagatcaccgagttcgaccccgccatcgtgatctcccccagcggcaagtacaacgccgtgaagctggggaagtacgaggacagcaacagcgtgacctgctccgtgcagcacgacaacaagaccgtgcacagcaccgactttggcagagccgattgcggctttaccagcgagagctaccagcagggcgtgctgagcgccaccatcctgtacgagatcctgctgggcaaggccaccctgtacgccgtgctggtgtctgccctggtgctgatggctatggtcaagcggaaggacagccggggacgggttaagttttccagatccgcagacgcacccgcttaccaacaagggcagaaccaactctacaatgaacttaatttggggcggagggaagagtacgacgttctggacaaaaggaggggacgagatcccgagatgggcggaaagcctcagcgaaggaagaatccgcaagaggggctttataacgaactccagaaagataaaatggcagaagcctatagtgagattgggatgaagggagaaaggaggaggggtaaaggtcacgatgggttgtaccaaggattgagcacagccactaaagatacctatgatgcgctccacatgcaggccctgccgccaaga

SEQ ID NO: 24994 - DNA, 747 bp, synthetic construct
  source 1..747: mol_type = other DNA
agccagcctcacaccaagcccagcgtgttcgtgatgaagaacggcaccaacgtggcctgcctcgtgaaagagttctaccccaaggacatcaggatcaacctggtgtccagcaagaagatcaccgagttcgaccccgccatcgtgatctcccccagcggcaagtacaacgccgtgaagctggggaagtacgaggacagcaacagcgtgacctgctccgtgcagcacgacaacaagaccgtgcacagcaccgactttgccgattgcggctttaccagcgagagctaccagcagggcgtgctgagcgccaccatcctgtacgagatcctgctgggcaaggccaccctgtacgccgtgctggtgtctgccctggtgctgatggctatggtcaagcggaaggacagccggggacgggttaagttttccagatccgcagacgcacccgcttaccaacaagggcagaaccaactctacaatgaacttaatttggggcggagggaagagtacgacgttctggacaaaaggaggggacgagatcccgagatgggcggaaagcctcagcgaaggaagaatccgcaagaggggctttataacgaactccagaaagataaaatggcagaagcctatagtgagattgggatgaagggagaaaggaggaggggtaaaggtcacgatgggttgtaccaaggattgagcacagccactaaagatacctatgatgcgctccacatgcaggccctgccgccaaga

SEQ ID NO: 24995 - DNA, 777 bp, synthetic construct
  source 1..777: mol_type = other DNA
agccagcctcacaccaagcccagcgtgttcgtgatgaagaacggcaccaacgtggcctgcctcgtgaaagagttctaccccaaggacatcaggatcaacctggtgtccagcaagaagatcaccgagttcgaccccgccatcgtgatctcccccagcggcaagtacaacgccgtgaagctggggaagtacgaggacagcaacagcgtgacctgctccgtgcagcacgacaacaagaccgtgcacagcaccgactttcagatcgtgtctgccgaagcctggggcagagccgattgcggctttaccagcgagagctaccagcagggcgtgctgagcgccaccatcctgtacgagatcctgctgggcaaggccaccctgtacgccgtgctggtgtctgccctggtgctgatggctatggtcaagcggaaggacagccggggacgggttaagttttccagatccgcagacgcacccgcttaccaacaagggcagaaccaactctacaatgaacttaatttggggcggagggaagagtacgacgttctggacaaaaggaggggacgagatcccgagatgggcggaaagcctcagcgaaggaagaatccgcaagaggggctttataacgaactccagaaagataaaatggcagaagcctatagtgagattgggatgaagggagaaaggaggaggggtaaaggtcacgatgggttgtaccaaggattgagcacagccactaaagatacctatgatgcgctccacatgcaggccctgccgccaaga

SEQ ID NO: 24996 - DNA, 801 bp, synthetic construct
  source 1..801: mol_type = other DNA
agccagcctcacaccaagcccagcgtgttcgtgatgaagaacggcaccaacgtggcctgcctcgtgaaagagttctaccccaaggacatcaggatcaacctggtgtccagcaagaagatcaccgagttcgaccccgccatcgtgatctcccccagcggcaagtacaacgccgtgaagctggggaagtacgaggacagcaacagcgtgacctgctccgtgcagcacgacaacaagaccgtgcacagcaccgactttttcccacccatcaagaccgatgtgattacaatggaccccaaggacaactgctccaaggacgccaacgataccctgctgctccagctgaccaacaccagcgcctactacatgtacttgttgctgctgctgaagtccgtggtgtacttcgccatcatcacatgctgcctgctgcggagaaccgccttctgctgcaacggcgagaagtctcgggttaagttttccagatccgcagacgcacccgcttaccaacaagggcagaaccaactctacaatgaacttaatttggggcggagggaagagtacgacgttctggacaaaaggaggggacgagatcccgagatgggcggaaagcctcagcgaaggaagaatccgcaagaggggctttataacgaactccagaaagataaaatggcagaagcctatagtgagattgggatgaagggagaaaggaggaggggtaaaggtcacgatgggttgtaccaaggattgagcacagccactaaagatacctatgatgcgctccacatgcaggccctgccgccaaga

SEQ ID NO: 24997 - DNA, 795 bp, synthetic construct
  source 1..795: mol_type = other DNA
agccagcctcacaccaagcccagcgtgttcgtgatgaagaacggcaccaacgtggcctgcctcgtgaaagagttctaccccaaggacatcaggatcaacctggtgtccagcaagaagatcaccgagttcgaccccgccatcgtgatctcccccagcggcaagtacaacgccgtgaagctggggaagtacgaggacagcaacagcgtgacctgctccgtgcagcacgacaacaagaccgtgcacagcaccgactttcccatcaagaccgatgtgattacaatggaccccaaggacaactgctccaaggacgccaacgataccctgctgctccagctgaccaacaccagcgcctactacatgtacttgttgctgctgctgaagtccgtggtgtacttcgccatcatcacatgctgcctgctgcggagaaccgccttctgctgcaacggcgagaagtctcgggttaagttttccagatccgcagacgcacccgcttaccaacaagggcagaaccaactctacaatgaacttaatttggggcggagggaagagtacgacgttctggacaaaaggaggggacgagatcccgagatgggcggaaagcctcagcgaaggaagaatccgcaagaggggctttataacgaactccagaaagataaaatggcagaagcctatagtgagattgggatgaagggagaaaggaggaggggtaaaggtcacgatgggttgtaccaaggattgagcacagccactaaagatacctatgatgcgctccacatgcaggccctgccgccaaga

SEQ ID NO: 24998 - DNA, 771 bp, synthetic construct
  source 1..771: mol_type = other DNA
agccagcctcacaccaagcccagcgtgttcgtgatgaagaacggcaccaacgtggcctgcctcgtgaaagagttctaccccaaggacatcaggatcaacctggtgtccagcaagaagatcaccgagttcgaccccgccatcgtgatctcccccagcggcaagtacaacgccgtgaagctggggaagtacgaggacagcaacagcgtgacctgctccgtgcagcacgacaacaagaccgtgcacagcaccgactttatggaccccaaggacaactgctccaaggacgccaacgataccctgctgctccagctgaccaacaccagcgcctactacatgtacttgttgctgctgctgaagtccgtggtgtacttcgccatcatcacatgctgcctgctgcggagaaccgccttctgctgcaacggcgagaagtctcgggttaagttttccagatccgcagacgcacccgcttaccaacaagggcagaaccaactctacaatgaacttaatttggggcggagggaagagtacgacgttctggacaaaaggaggggacgagatcccgagatgggcggaaagcctcagcgaaggaagaatccgcaagaggggctttataacgaactccagaaagataaaatggcagaagcctatagtgagattgggatgaagggagaaaggaggaggggtaaaggtcacgatgggttgtaccaaggattgagcacagccactaaagatacctatgatgcgctccacatgcaggccctgccgccaaga

SEQ ID NO: 24999 - DNA, 798 bp, synthetic construct; identical to SEQ ID NO: 23943
  source 1..798: mol_type = other DNA

SEQ ID NO: 25000 - DNA, 777 bp, synthetic construct
  source 1..777: mol_type = other DNA
agccagcctcacaccaagcccagcgtgttcgtgatgaagaacggcaccaacgtggcctgcctcgtgaaagagttctaccccaaggacatcaggatcaacctggtgtccagcaagaagatcaccgagttcgaccccgccatcgtgatctcccccagcggcaagtacaacgccgtgaagctggggaagtacgaggacagcaacagcgtgacctgctccgtgcagcacgacaacaagaccgtgcacagcaccgactttgaccacgtgaagcccaaagagacagagaacaccaagcagcccagcaagagctgccacaagcccaaggccatcgtgcacaccgagaaagtgaacatgatgagcctgaccgtgctgggcctgcggatgctgttcgccaaaaccgtggccgtgaacttcctgctgaccgccaagctgttcttcctccgggttaagttttccagatccgcagacgcacccgcttaccaacaagggcagaaccaactctacaatgaacttaatttggggcggagggaagagtacgacgttctggacaaaaggaggggacgagatcccgagatgggcggaaagcctcagcgaaggaagaatccgcaagaggggctttataacgaactccagaaagataaaatggcagaagcctatagtgagattgggatgaagggagaaaggaggaggggtaaaggtcacgatgggttgtaccaaggattgagcacagccactaaagatacctatgatgcgctccacatgcaggccctgccgccaaga

SEQ ID NO: 25001 - DNA, 795 bp, synthetic construct
  source 1..795: mol_type = other DNA
agccagcctcacaccaagcccagcgtgttcgtgatgaagaacggcaccaacgtggcctgcctcgtgaaagagttctaccccaaggacatcaggatcaacctggtgtccagcaagaagatcaccgagttcgaccccgccatcgtgatctcccccagcggcaagtacaacgccgtgaagctggggaagtacgaggacagcaacagcgtgacctgctccgtgcagcacgacaacaagaccgtgcacagcaccgactttgaagtgaaaaccgactccaccatccccgaggacacattcttcccaagccccgagagcagctgcgacgtgaagctggtggaaaagagcttcgagacagacaccaacctgaacttccagaacctgagcgtgatcggcttcagaatcctgctgctgaaagtggccggctttaacctgctgatgaccctgcggctgtggtccagccgggttaagttttccagatccgcagacgcacccgcttaccaacaagggcagaaccaactctacaatgaacttaatttggggcggagggaagagtacgacgttctggacaaaaggaggggacgagatcccgagatgggcggaaagcctcagcgaaggaagaatccgcaagaggggctttataacgaactccagaaagataaaatggcagaagcctatagtgagattgggatgaagggagaaaggaggaggggtaaaggtcacgatgggttgtaccaaggattgagcacagccactaaagatacctatgatgcgctccacatgcaggccctgccgccaaga

SEQ ID NO: 25002 - DNA, 765 bp, synthetic construct
  source 1..765: mol_type = other DNA
agccagcctcacaccaagcccagcgtgttcgtgatgaagaacggcaccaacgtggcctgcctcgtgaaagagttctaccccaaggacatcaggatcaacctggtgtccagcaagaagatcaccgagttcgaccccgccatcgtgatctcccccagcggcaagtacaacgccgtgaagctggggaagtacgaggacagcaacagcgtgacctgctccgtgcagcacgacaacaagaccgtgcacagcaccgactttgaagtgaaaaccgactccaccgagagcagctgcgacgtgaagctggtggaaaagagcttcgagacagacaccaacctgaacttccagaacctgagcgtgatcggcttcagaatcctgctgctgaaagtggccggctttaacctgctgatgaccctgcggctgtggtccagccgggttaagttttccagatccgcagacgcacccgcttaccaacaagggcagaaccaactctacaatgaacttaatttggggcggagggaagagtacgacgttctggacaaaaggaggggacgagatcccgagatgggcggaaagcctcagcgaaggaagaatccgcaagaggggctttataacgaactccagaaagataaaatggcagaagcctatagtgagattgggatgaagggagaaaggaggaggggtaaaggtcacgatgggttgtaccaaggattgagcacagccactaaagatacctatgatgcgctccacatgcaggccctgccgccaaga

SEQ ID NO: 25003 - DNA, 792 bp, synthetic construct
  source 1..792: mol_type = other DNA
agccagcctcacaccaagcccagcgtgttcgtgatgaagaacggcaccaacgtggcctgcctcgtgaaagagttctaccccaaggacatcaggatcaacctggtgtccagcaagaagatcaccgagttcgaccccgccatcgtgatctcccccagcggcaagtacaacgccgtgaagctggggaagtacgaggacagcaacagcgtgacctgctccgtgcagcacgacaacaagaccgtgcacagcaccgactttgaagtgaaaaccgactccacccccgaggacacattcttcccaagccccgagagcagctgcgacgtgaagctggtggaaaagagcttcgagacagacaccaacctgaacttccagaacctgagcgtgatcggcttcagaatcctgctgctgaaagtggccggctttaacctgctgatgaccctgcggctgtggtccagccgggttaagttttccagatccgcagacgcacccgcttaccaacaagggcagaaccaactctacaatgaacttaatttggggcggagggaagagtacgacgttctggacaaaaggaggggacgagatcccgagatgggcggaaagcctcagcgaaggaagaatccgcaagaggggctttataacgaactccagaaagataaaatggcagaagcctatagtgagattgggatgaagggagaaaggaggaggggtaaaggtcacgatgggttgtaccaaggattgagcacagccactaaagatacctatgatgcgctccacatgcaggccctgccgccaaga

SEQ ID NO: 25004 - DNA, 774 bp, synthetic construct
  source 1..774: mol_type = other DNA
agccagcctcacaccaagcccagcgtgttcgtgatgaagaacggcaccaacgtggcctgcctcgtgaaagagttctaccccaaggacatcaggatcaacctggtgtccagcaagaagatcaccgagttcgaccccgccatcgtgatctcccccagcggcaagtacaacgccgtgaagctggggaagtacgaggacagcaacagcgtgacctgctccgtgcagcacgacaacaagaccgtgcacagcaccgactttgaagtgaaaaccgactccaccggcagagccgattgcggctttaccagcgagagctaccagcagggcgtgctgagcgccaccatcctgtacgagatcctgctgggcaaggccaccctgtacgccgtgctggtgtctgccctggtgctgatggctatggtcaagcggaaggacagccggggacgggttaagttttccagatccgcagacgcacccgcttaccaacaagggcagaaccaactctacaatgaacttaatttggggcggagggaagagtacgacgttctggacaaaaggaggggacgagatcccgagatgggcggaaagcctcagcgaaggaagaatccgcaagaggggctttataacgaactccagaaagataaaatggcagaagcctatagtgagattgggatgaagggagaaaggaggaggggtaaaggtcacgatgggttgtaccaaggattgagcacagccactaaagatacctatgatgcgctccacatgcaggccctgccgccaaga

SEQ ID NO: 25005 - DNA, 768 bp, synthetic construct
  source 1..768: mol_type = other DNA
agccagcctcacaccaagcccagcgtgttcgtgatgaagaacggcaccaacgtggcctgcctcgtgaaagagttctaccccaaggacatcaggatcaacctggtgtccagcaagaagatcaccgagttcgaccccgccatcgtgatctcccccagcggcaagtacaacgccgtgaagctggggaagtacgaggacagcaacagcgtgacctgctccgtgcagcacgacaacaagaccgtgcacagcaccgactttgaagtgaaaaccgactccaccgccgattgcggctttaccagcgagagctaccagcagggcgtgctgagcgccaccatcctgtacgagatcctgctgggcaaggccaccctgtacgccgtgctggtgtctgccctggtgctgatggctatggtcaagcggaaggacagccggggacgggttaagttttccagatccgcagacgcacccgcttaccaacaagggcagaaccaactctacaatgaacttaatttggggcggagggaagagtacgacgttctggacaaaaggaggggacgagatcccgagatgggcggaaagcctcagcgaaggaagaatccgcaagaggggctttataacgaactccagaaagataaaatggcagaagcctatagtgagattgggatgaagggagaaaggaggaggggtaaaggtcacgatgggttgtaccaaggattgagcacagccactaaagatacctatgatgcgctccacatgcaggccctgccgccaaga

SEQ ID NO: 25006 - DNA, 798 bp, synthetic construct
  source 1..798: mol_type = other DNA
agccagcctcacaccaagcccagcgtgttcgtgatgaagaacggcaccaacgtggcctgcctcgtgaaagagttctaccccaaggacatcaggatcaacctggtgtccagcaagaagatcaccgagttcgaccccgccatcgtgatctcccccagcggcaagtacaacgccgtgaagctggggaagtacgaggacagcaacagcgtgacctgctccgtgcagcacgacaacaagaccgtgcacagcaccgactttgaagtgaaaaccgactccacccagatcgtgtctgccgaagcctggggcagagccgattgcggctttaccagcgagagctaccagcagggcgtgctgagcgccaccatcctgtacgagatcctgctgggcaaggccaccctgtacgccgtgctggtgtctgccctggtgctgatggctatggtcaagcggaaggacagccggggacgggttaagttttccagatccgcagacgcacccgcttaccaacaagggcagaaccaactctacaatgaacttaatttggggcggagggaagagtacgacgttctggacaaaaggaggggacgagatcccgagatgggcggaaagcctcagcgaaggaagaatccgcaagaggggctttataacgaactccagaaagataaaatggcagaagcctatagtgagattgggatgaagggagaaaggaggaggggtaaaggtcacgatgggttgtaccaaggattgagcacagccactaaagatacctatgatgcgctccacatgcaggccctgccgccaaga

SEQ ID NO: 25007 - DNA, 822 bp, synthetic construct
  source 1..822: mol_type = other DNA
agccagcctcacaccaagcccagcgtgttcgtgatgaagaacggcaccaacgtggcctgcctcgtgaaagagttctaccccaaggacatcaggatcaacctggtgtccagcaagaagatcaccgagttcgaccccgccatcgtgatctcccccagcggcaagtacaacgccgtgaagctggggaagtacgaggacagcaacagcgtgacctgctccgtgcagcacgacaacaagaccgtgcacagcaccgactttgaagtgaaaaccgactccaccttcccacccatcaagaccgatgtgattacaatggaccccaaggacaactgctccaaggacgccaacgataccctgctgctccagctgaccaacaccagcgcctactacatgtacttgttgctgctgctgaagtccgtggtgtacttcgccatcatcacatgctgcctgctgcggagaaccgccttctgctgcaacggcgagaagtctcgggttaagttttccagatccgcagacgcacccgcttaccaacaagggcagaaccaactctacaatgaacttaatttggggcggagggaagagtacgacgttctggacaaaaggaggggacgagatcccgagatgggcggaaagcctcagcgaaggaagaatccgcaagaggggctttataacgaactccagaaagataaaatggcagaagcctatagtgagattgggatgaagggagaaaggaggaggggtaaaggtcacgatgggttgtaccaaggattgagcacagccactaaagatacctatgatgcgctccacatgcaggccctgccgccaaga

SEQ ID NO: 25008 - DNA, 816 bp, synthetic construct
  source 1..816: mol_type = other DNA
agccagcctcacaccaagcccagcgtgttcgtgatgaagaacggcaccaacgtggcctgcctcgtgaaagagttctaccccaaggacatcaggatcaacctggtgtccagcaagaagatcaccgagttcgaccccgccatcgtgatctcccccagcggcaagtacaacgccgtgaagctggggaagtacgaggacagcaacagcgtgacctgctccgtgcagcacgacaacaagaccgtgcacagcaccgactttgaagtgaaaaccgactccacccccatcaagaccgatgtgattacaatggaccccaaggacaactgctccaaggacgccaacgataccctgctgctccagctgaccaacaccagcgcctactacatgtacttgttgctgctgctgaagtccgtggtgtacttcgccatcatcacatgctgcctgctgcggagaaccgccttctgctgcaacggcgagaagtctcgggttaagttttccagatccgcagacgcacccgcttaccaacaagggcagaaccaactctacaatgaacttaatttggggcggagggaagagtacgacgttctggacaaaaggaggggacgagatcccgagatgggcggaaagcctcagcgaaggaagaatccgcaagaggggctttataacgaactccagaaagataaaatggcagaagcctatagtgagattgggatgaagggagaaaggaggaggggtaaaggtcacgatgggttgtaccaaggattgagcacagccactaaagatacctatgatgcgctccacatgcaggccctgccgccaaga

SEQ ID NO: 25009 - DNA, 792 bp, synthetic construct
  source 1..792: mol_type = other DNA
agccagcctcacaccaagcccagcgtgttcgtgatgaagaacggcaccaacgtggcctgcctcgtgaaagagttctaccccaaggacatcaggatcaacctggtgtccagcaagaagatcaccgagttcgaccccgccatcgtgatctcccccagcggcaagtacaacgccgtgaagctggggaagtacgaggacagcaacagcgtgacctgctccgtgcagcacgacaacaagaccgtgcacagcaccgactttgaagtgaaaaccgactccaccatggaccccaaggacaactgctccaaggacgccaacgataccctgctgctccagctgaccaacaccagcgcctactacatgtacttgttgctgctgctgaagtccgtggtgtacttcgccatcatcacatgctgcctgctgcggagaaccgccttctgctgcaacggcgagaagtctcgggttaagttttccagatccgcagacgcacccgcttaccaacaagggcagaaccaactctacaatgaacttaatttggggcggagggaagagtacgacgttctggacaaaaggaggggacgagatcccgagatgggcggaaagcctcagcgaaggaagaatccgcaagaggggctttataacgaactccagaaagataaaatggcagaagcctatagtgagattgggatgaagggagaaaggaggaggggtaaaggtcacgatgggttgtaccaaggattgagcacagccactaaagatacctatgatgcgctccacatgcaggccctgccgccaaga

SEQ ID NO: 25010 - DNA, 816 bp, synthetic construct; identical to SEQ ID NO: 25008
  source 1..816: mol_type = other DNA

SEQ ID NO: 25011 - DNA, 774 bp, synthetic construct
  source 1..774: mol_type = other DNA
agccagcctcacaccaagcccagcgtgttcgtgatgaagaacggcaccaacgtggcctgcctcgtgaaagagttctaccccaaggacatcaggatcaacctggtgtccagcaagaagatcaccgagttcgaccccgccatcgtgatctcccccagcggcaagtacaacgccgtgaagctggggaagtacgaggacagcaacagcgtgacctgctccgtgcagcacgacaacaagaccgtgcacagcaccgactttgaagtgaaaaccgactccacctgctccaaggacgccaacgataccctgctgctccagctgaccaacaccagcgcctactacatgtacttgttgctgctgctgaagtccgtggtgtacttcgccatcatcacatgctgcctgctgcggagaaccgccttctgctgcaacggcgagaagtctcgggttaagttttccagatccgcagacgcacccgcttaccaacaagggcagaaccaactctacaatgaacttaatttggggcggagggaagagtacgacgttctggacaaaaggaggggacgagatcccgagatgggcggaaagcctcagcgaaggaagaatccgcaagaggggctttataacgaactccagaaagataaaatggcagaagcctatagtgagattgggatgaagggagaaaggaggaggggtaaaggtcacgatgggttgtaccaaggattgagcacagccactaaagatacctatgatgcgctccacatgcaggccctgccgccaaga

SEQ ID NO: 25012 - DNA, 774 bp, synthetic construct; identical to SEQ ID NO: 24990
  source 1..774: mol_type = other DNA

SEQ ID NO: 25013 - DNA, 744 bp, synthetic construct; identical to SEQ ID NO: 24991
  source 1..744: mol_type = other DNA

SEQ ID NO: 25014 - DNA, 771 bp, synthetic construct; identical to SEQ ID NO: 24992
  source 1..771: mol_type = other DNA

SEQ ID NO: 25015 - DNA, 753 bp, synthetic construct; identical to SEQ ID NO: 24993
  source 1..753: mol_type = other DNA

SEQ ID NO: 25016 - DNA, 747 bp, synthetic construct; identical to SEQ ID NO: 24994
  source 1..747: mol_type = other DNA

SEQ ID NO: 25017 - DNA, 777 bp, synthetic construct; identical to SEQ ID NO: 24995
  source 1..777: mol_type = other DNA

SEQ ID NO: 25018 - DNA, 801 bp, synthetic construct; identical to SEQ ID NO: 24996
  source 1..801: mol_type = other DNA

SEQ ID NO: 25019 - DNA, 795 bp, synthetic construct; identical to SEQ ID NO: 24997
  source 1..795: mol_type = other DNA

SEQ ID NO: 25020 - DNA, 771 bp, synthetic construct; identical to SEQ ID NO: 24998
  source 1..771: mol_type = other DNA

SEQ ID NO: 25021 - DNA, 795 bp, synthetic construct; identical to SEQ ID NO: 24997
  source 1..795: mol_type = other DNA

SEQ ID NO: 25022 - DNA, 753 bp, synthetic construct
  source 1..753: mol_type = other DNA
agccagcctcacaccaagcccagcgtgttcgtgatgaagaacggcaccaacgtggcctgcctcgtgaaagagttctaccccaaggacatcaggatcaacctggtgtccagcaagaagatcaccgagttcgaccccgccatcgtgatctcccccagcggcaagtacaacgccgtgaagctggggaagtacgaggacagcaacagcgtgacctgctccgtgcagcacgacaacaagaccgtgcacagcaccgacttttgctccaaggacgccaacgataccctgctgctccagctgaccaacaccagcgcctactacatgtacttgttgctgctgctgaagtccgtggtgtacttcgccatcatcacatgctgcctgctgcggagaaccgccttctgctgcaacggcgagaagtctcgggttaagttttccagatccgcagacgcacccgcttaccaacaagggcagaaccaactctacaatgaacttaatttggggcggagggaagagtacgacgttctggacaaaaggaggggacgagatcccgagatgggcggaaagcctcagcgaaggaagaatccgcaagaggggctttataacgaactccagaaagataaaatggcagaagcctatagtgagattgggatgaagggagaaaggaggaggggtaaaggtcacgatgggttgtaccaaggattgagcacagccactaaagatacctatgatgcgctccacatgcaggccctgccgccaaga

SEQ ID NO: 25023 - DNA, 795 bp, synthetic construct; identical to SEQ ID NO: 25001
  source 1..795: mol_type = other DNA

SEQ ID NO: 25024 - DNA, 765 bp, synthetic construct; identical to SEQ ID NO: 25002
  source 1..765: mol_type = other DNA

SEQ ID NO: 25025 - DNA, 792 bp, synthetic construct; identical to SEQ ID NO: 25003
  source 1..792: mol_type = other DNA

SEQ ID NO: 25026 - DNA, 774 bp, synthetic construct; identical to SEQ ID NO: 25004
  source 1..774: mol_type = other DNA

SEQ ID NO: 25027 - DNA, 768 bp, synthetic construct; identical to SEQ ID NO: 25005
  source 1..768: mol_type = other DNA

SEQ ID NO: 25028 - DNA, 798 bp, synthetic construct; identical to SEQ ID NO: 25006
  source 1..798: mol_type = other DNA

SEQ ID NO: 25029 - DNA, 822 bp, synthetic construct; identical to SEQ ID NO: 25007
  source 1..822: mol_type = other DNA

SEQ ID NO: 25030 - DNA, 816 bp, synthetic construct; identical to SEQ ID NO: 25008
  source 1..816: mol_type = other DNA

SEQ ID NO: 25031 - DNA, 792 bp, synthetic construct; identical to SEQ ID NO: 25009
  source 1..792: mol_type = other DNA

SEQ ID NO: 25032 - DNA, 816 bp, synthetic construct; identical to SEQ ID NO: 25008
  source 1..816: mol_type = other DNA

SEQ ID NO: 25033 - DNA, 774 bp, synthetic construct; identical to SEQ ID NO: 25011
  source 1..774: mol_type = other DNA

SEQ ID NO: 25034 - DNA, 708 bp, synthetic construct
  source 1..708: mol_type = other DNA
ctgcgggatagcaagagcagcgacaagagcgtgtgtctgttcaccgacttcgacagccagaccaacgtgtcccagagcaaggactccgacgtgtacatcaccgataagaccgtgctggacatgcggagcatggacttcaagagcaactccgccgtggcctggtccaacaagtccgatttcgcctgcgccaacgccttcaacaacagcattggcagagccgattgcggctttaccagcgagagctaccagcagggcgtgctgagcgccaccatcctgtacgagatcctgctgggcaaggccaccctgtacgccgtgctggtgtctgccctggtgctgatggctatggtcaagcggaaggacagccggggacgggttaagttttccagatccgcagacgcacccgcttaccaacaagggcagaaccaactctacaatgaacttaatttggggcggagggaagagtacgacgttctggacaaaaggaggggacgagatcccgagatgggcggaaagcctcagcgaaggaagaatccgcaagaggggctttataacgaactccagaaagataaaatggcagaagcctatagtgagattgggatgaagggagaaaggaggaggggtaaaggtcacgatgggttgtaccaaggattgagcacagccactaaagatacctatgatgcgctccacatgcaggccctgccgccaaga

SEQ ID NO: 25035 - DNA, 702 bp, synthetic construct
  source 1..702: mol_type = other DNA
ctgcgggatagcaagagcagcgacaagagcgtgtgtctgttcaccgacttcgacagccagaccaacgtgtcccagagcaaggactccgacgtgtacatcaccgataagaccgtgctggacatgcggagcatggacttcaagagcaactccgccgtggcctggtccaacaagtccgatttcgcctgcgccaacgccttcaacaacagcattgccgattgcggctttaccagcgagagctaccagcagggcgtgctgagcgccaccatcctgtacgagatcctgctgggcaaggccaccctgtacgccgtgctggtgtctgccctggtgctgatggctatggtcaagcggaaggacagccggggacgggttaagttttccagatccgcagacgcacccgcttaccaacaagggcagaaccaactctacaatgaacttaatttggggcggagggaagagtacgacgttctggacaaaaggaggggacgagatcccgagatgggcggaaagcctcagcgaaggaagaatccgcaagaggggctttataacgaactccagaaagataaaatggcagaagcctatagtgagattgggatgaagggagaaaggaggaggggtaaaggtcacgatgggttgtaccaaggattgagcacagccactaaagatacctatgatgcgctccacatgcaggccctgccgccaaga

SEQ ID NO: 25036 - DNA, 732 bp, synthetic construct
  source 1..732: mol_type = other DNA
ctgcgggatagcaagagcagcgacaagagcgtgtgtctgttcaccgacttcgacagccagaccaacgtgtcccagagcaaggactccgacgtgtacatcaccgataagaccgtgctggacatgcggagcatggacttcaagagcaactccgccgtggcctggtccaacaagtccgatttcgcctgcgccaacgccttcaacaacagcattcagatcgtgtctgccgaagcctggggcagagccgattgcggctttaccagcgagagctaccagcagggcgtgctgagcgccaccatcctgtacgagatcctgctgggcaaggccaccctgtacgccgtgctggtgtctgccctggtgctgatggctatggtcaagcggaaggacagccggggacgggttaagttttccagatccgcagacgcacccgcttaccaacaagggcagaaccaactctacaatgaacttaatttggggcggagggaagagtacgacgttctggacaaaaggaggggacgagatcccgagatgggcggaaagcctcagcgaaggaagaatccgcaagaggggctttataacgaactccagaaagataaaatggcagaagcctatagtgagattgggatgaagggagaaaggaggaggggtaaaggtcacgatgggttgtaccaaggattgagcacagccactaaagatacctatgatgcgctccacatgcaggccctgccgccaaga

SEQ ID NO: 25037 - DNA, 756 bp, synthetic construct
  source 1..756: mol_type = other DNA
ctgcgggatagcaagagcagcgacaagagcgtgtgtctgttcaccgacttcgacagccagaccaacgtgtcccagagcaaggactccgacgtgtacatcaccgataagaccgtgctggacatgcggagcatggacttcaagagcaactccgccgtggcctggtccaacaagtccgatttcgcctgcgccaacgccttcaacaacagcattttcccacccatcaagaccgatgtgattacaatggaccccaaggacaactgctccaaggacgccaacgataccctgctgctccagctgaccaacaccagcgcctactacatgtacttgttgctgctgctgaagtccgtggtgtacttcgccatcatcacatgctgcctgctgcggagaaccgccttctgctgcaacggcgagaagtctcgggttaagttttccagatccgcagacgcacccgcttaccaacaagggcagaaccaactctacaatgaacttaatttggggcggagggaagagtacgacgttctggacaaaaggaggggacgagatcccgagatgggcggaaagcctcagcgaaggaagaatccgcaagaggggctttataacgaactccagaaagataaaatggcagaagcctatagtgagattgggatgaagggagaaaggaggaggggtaaaggtcacgatgggttgtaccaaggattgagcacagccactaaagatacctatgatgcgctccacatgcaggccctgccgccaaga

SEQ ID NO: 25038 - DNA, 750 bp, synthetic construct
  source 1..750: mol_type = other DNA
ctgcgggatagcaagagcagcgacaagagcgtgtgtctgttcaccgacttcgacagccagaccaacgtgtcccagagcaaggactccgacgtgtacatcaccgataagaccgtgctggacatgcggagcatggacttcaagagcaactccgccgtggcctggtccaacaagtccgatttcgcctgcgccaacgccttcaacaacagcattcccatcaagaccgatgtgattacaatggaccccaaggacaactgctccaaggacgccaacgataccctgctgctccagctgaccaacaccagcgcctactacatgtacttgttgctgctgctgaagtccgtggtgtacttcgccatcatcacatgctgcctgctgcggagaaccgccttctgctgcaacggcgagaagtctcgggttaagttttccagatccgcagacgcacccgcttaccaacaagggcagaaccaactctacaatgaacttaatttggggcggagggaagagtacgacgttctggacaaaaggaggggacgagatcccgagatgggcggaaagcctcagcgaaggaagaatccgcaagaggggctttataacgaactccagaaagataaaatggcagaagcctatagtgagattgggatgaagggagaaaggaggaggggtaaaggtcacgatgggttgtaccaaggattgagcacagccactaaagatacctatgatgcgctccacatgcaggccctgccgccaaga

SEQ ID NO: 25039 - DNA, 726 bp, synthetic construct
  source 1..726: mol_type = other DNA
ctgcgggatagcaagagcagcgacaagagcgtgtgtctgttcaccgacttcgacagccagaccaacgtgtcccagagcaaggactccgacgtgtacatcaccgataagaccgtgctggacatgcggagcatggacttcaagagcaactccgccgtggcctggtccaacaagtccgatttcgcctgcgccaacgccttcaacaacagcattatggaccccaaggacaactgctccaaggacgccaacgataccctgctgctccagctgaccaacaccagcgcctactacatgtacttgttgctgctgctgaagtccgtggtgtacttcgccatcatcacatgctgcctgctgcggagaaccgccttctgctgcaacggcgagaagtctcgggttaagttttccagatccgcagacgcacccgcttaccaacaagggcagaaccaactctacaatgaacttaatttggggcggagggaagagtacgacgttctggacaaaaggaggggacgagatcccgagatgggcggaaagcctcagcgaaggaagaatccgcaagaggggctttataacgaactccagaaagataaaatggcagaagcctatagtgagattgggatgaagggagaaaggaggaggggtaaaggtcacgatgggttgtaccaaggattgagcacagccactaaagatacctatgatgcgctccacatgcaggccctgccgccaaga

SEQ ID NO: 25040 - DNA, 750 bp, synthetic construct; identical to SEQ ID NO: 25038
  source 1..750: mol_type = other DNA

SEQ ID NO: 25041 - DNA, 708 bp, synthetic construct
  source 1..708: mol_type = other DNA
ctgcgggatagcaagagcagcgacaagagcgtgtgtctgttcaccgacttcgacagccagaccaacgtgtcccagagcaaggactccgacgtgtacatcaccgataagaccgtgctggacatgcggagcatggacttcaagagcaactccgccgtggcctggtccaacaagtccgatttcgcctgcgccaacgccttcaacaacagcatttgctccaaggacgccaacgataccctgctgctccagctgaccaacaccagcgcctactacatgtacttgttgctgctgctgaagtccgtggtgtacttcgccatcatcacatgctgcctgctgcggagaaccgccttctgctgcaacggcgagaagtctcgggttaagttttccagatccgcagacgcacccgcttaccaacaagggcagaaccaactctacaatgaacttaatttggggcggagggaagagtacgacgttctggacaaaaggaggggacgagatcccgagatgggcggaaagcctcagcgaaggaagaatccgcaagaggggctttataacgaactccagaaagataaaatggcagaagcctatagtgagattgggatgaagggagaaaggaggaggggtaaaggtcacgatgggttgtaccaaggattgagcacagccactaaagatacctatgatgcgctccacatgcaggccctgccgccaaga

SEQ ID NO: 25042 - DNA, 753 bp, synthetic construct
  source 1..753: mol_type = other DNA
ctgcgggatagcaagagcagcgacaagagcgtgtgtctgttcaccgacttcgacagccagaccaacgtgtcccagagcaaggactccgacgtgtacatcaccgataagaccgtgctggacatgcggagcatggacttcaagagcaactccgccgtggcctggtccaacaagtccgatttcgcctgcgccaacgccttcaacaacagcattgaagtgaaaaccgactccaccgaccacgtgaagcccaaagagacagagaacaccaagcagcccagcaagagctgccacaagcccaaggccatcgtgcacaccgagaaagtgaacatgatgagcctgaccgtgctgggcctgcggatgctgttcgccaaaaccgtggccgtgaacttcctgctgaccgccaagctgttcttcctccgggttaagttttccagatccgcagacgcacccgcttaccaacaagggcagaaccaactctacaatgaacttaatttggggcggagggaagagtacgacgttctggacaaaaggaggggacgagatcccgagatgggcggaaagcctcagcgaaggaagaatccgcaagaggggctttataacgaactccagaaagataaaatggcagaagcctatagtgagattgggatgaagggagaaaggaggaggggtaaaggtcacgatgggttgtaccaaggattgagcacagccactaaagatacctatgatgcgctccacatgcaggccctgccgccaaga

SEQ ID NO: 25043 - DNA, 732 bp, synthetic construct
  source 1..732: mol_type = other DNA
ctgcgggatagcaagagcagcgacaagagcgtgtgtctgttcaccgacttcgacagccagaccaacgtgtcccagagcaaggactccgacgtgtacatcaccgataagaccgtgctggacatgcggagcatggacttcaagagcaactccgccgtggcctggtccaacaagtccgatttcgcctgcgccaacgccttcaacaacagcattgaccacgtgaagcccaaagagacagagaacaccaagcagcccagcaagagctgccacaagcccaaggccatcgtgcacaccgagaaagtgaacatgatgagcctgaccgtgctgggcctgcggatgctgttcgccaaaaccgtggccgtgaacttcctgctgaccgccaagctgttcttcctccgggttaagttttccagatccgcagacgcacccgcttaccaacaagggcagaaccaactctacaatgaacttaatttggggcggagggaagagtacgacgttctggacaaaaggaggggacgagatcccgagatgggcggaaagcctcagcgaaggaagaatccgcaagaggggctttataacgaactccagaaagataaaatggcagaagcctatagtgagattgggatgaagggagaaaggaggaggggtaaaggtcacgatgggttgtaccaaggattgagcacagccactaaagatacctatgatgcgctccacatgcaggccctgccgccaaga

SEQ ID NO: 25044 - DNA, 738 bp, synthetic construct
  source 1..738: mol_type = other DNA
ctgcgggatagcaagagcagcgacaagagcgtgtgtctgttcaccgacttcgacagccagaccaacgtgtcccagagcaaggactccgacgtgtacatcaccgataagaccgtgctggacatgcggagcatggacttcaagagcaactccgccgtggcctggtccaacaagtccgatttcgcctgcgccaacgccttcaacaacagcattatccccgaggacacattcttcccaagccccggcagagccgattgcggctttaccagcgagagctaccagcagggcgtgctgagcgccaccatcctgtacgagatcctgctgggcaaggccaccctgtacgccgtgctggtgtctgccctggtgctgatggctatggtcaagcggaaggacagccggggacgggttaagttttccagatccgcagacgcacccgcttaccaacaagggcagaaccaactctacaatgaacttaatttggggcggagggaagagtacgacgttctggacaaaaggaggggacgagatcccgagatgggcggaaagcctcagcgaaggaagaatccgcaagaggggctttataacgaactccagaaagataaaatggcagaagcctatagtgagattgggatgaagggagaaaggaggaggggtaaaggtcacgatgggttgtaccaaggattgagcacagccactaaagatacctatgatgcgctccacatgcaggccctgccgccaaga

SEQ ID NO: 25045 - DNA, 732 bp, synthetic construct
  source 1..732: mol_type = other DNA
ctgcgggatagcaagagcagcgacaagagcgtgtgtctgttcaccgacttcgacagccagaccaacgtgtcccagagcaaggactccgacgtgtacatcaccgataagaccgtgctggacatgcggagcatggacttcaagagcaactccgccgtggcctggtccaacaagtccgatttcgcctgcgccaacgccttcaacaacagcattatccccgaggacacattcttcccaagccccgccgattgcggctttaccagcgagagctaccagcagggcgtgctgagcgccaccatcctgtacgagatcctgctgggcaaggccaccctgtacgccgtgctggtgtctgccctggtgctgatggctatggtcaagcggaaggacagccggggacgggttaagttttccagatccgcagacgcacccgcttaccaacaagggcagaaccaactctacaatgaacttaatttggggcggagggaagagtacgacgttctggacaaaaggaggggacgagatcccgagatgggcggaaagcctcagcgaaggaagaatccgcaagaggggctttataacgaactccagaaagataaaatggcagaagcctatagtgagattgggatgaagggagaaaggaggaggggtaaaggtcacgatgggttgtaccaaggattgagcacagccactaaagatacctatgatgcgctccacatgcaggccctgccgccaaga

SEQ ID NO: 25046 - DNA, 762 bp, synthetic construct
  source 1..762: mol_type = other DNA
ctgcgggatagcaagagcagcgacaagagcgtgtgtctgttcaccgacttcgacagccagaccaacgtgtcccagagcaaggactccgacgtgtacatcaccgataagaccgtgctggacatgcggagcatggacttcaagagcaactccgccgtggcctggtccaacaagtccgatttcgcctgcgccaacgccttcaacaacagcattatccccgaggacacattcttcccaagcccccagatcgtgtctgccgaagcctggggcagagccgattgcggctttaccagcgagagctaccagcagggcgtgctgagcgccaccatcctgtacgagatcctgctgggcaaggccaccctgtacgccgtgctggtgtctgccctggtgctgatggctatggtcaagcggaaggacagccggggacgggttaagttttccagatccgcagacgcacccgcttaccaacaagggcagaaccaactctacaatgaacttaatttggggcggagggaagagtacgacgttctggacaaaaggaggggacgagatcccgagatgggcggaaagcctcagcgaaggaagaatccgcaagaggggctttataacgaactccagaaagataaaatggcagaagcctatagtgagattgggatgaagggagaaaggaggaggggtaaaggtcacgatgggttgtaccaaggattgagcacagccactaaagatacctatgatgcgctccacatgcaggccctgccgccaaga

SEQ ID NO: 25047 - DNA, 786 bp, synthetic construct
  source 1..786: mol_type = other DNA
ctgcgggatagcaagagcagcgacaagagcgtgtgtctgttcaccgacttcgacagccagaccaacgtgtcccagagcaaggactccgacgtgtacatcaccgataagaccgtgctggacatgcggagcatggacttcaagagcaactccgccgtggcctggtccaacaagtccgatttcgcctgcgccaacgccttcaacaacagcattatccccgaggacacattcttcccaagccccttcccacccatcaagaccgatgtgattacaatggaccccaaggacaactgctccaaggacgccaacgataccctgctgctccagctgaccaacaccagcgcctactacatgtacttgttgctgctgctgaagtccgtggtgtacttcgccatcatcacatgctgcctgctgcggagaaccgccttctgctgcaacggcgagaagtctcgggttaagttttccagatccgcagacgcacccgcttaccaacaagggcagaaccaactctacaatgaacttaatttggggcggagggaagagtacgacgttctggacaaaaggaggggacgagatcccgagatgggcggaaagcctcagcgaaggaagaatccgcaagaggggctttataacgaactccagaaagataaaatggcagaagcctatagtgagattgggatgaagggagaaaggaggaggggtaaaggtcacgatgggttgtaccaaggattgagcacagccactaaagatacctatgatgcgctccacatgcaggccctgccgccaaga

SEQ ID NO: 25048 - DNA, 780 bp, synthetic construct
  source 1..780: mol_type = other DNA
ctgcgggatagcaagagcagcgacaagagcgtgtgtctgttcaccgacttcgacagccagaccaacgtgtcccagagcaaggactccgacgtgtacatcaccgataagaccgtgctggacatgcggagcatggacttcaagagcaactccgccgtggcctggtccaacaagtccgatttcgcctgcgccaacgccttcaacaacagcattatccccgaggacacattcttcccaagcccccccatcaagaccgatgtgattacaatggaccccaaggacaactgctccaaggacgccaacgataccctgctgctccagctgaccaacaccagcgcctactacatgtacttgttgctgctgctgaagtccgtggtgtacttcgccatcatcacatgctgcctgctgcggagaaccgccttctgctgcaacggcgagaagtctcgggttaagttttccagatccgcagacgcacccgcttaccaacaagggcagaaccaactctacaatgaacttaatttggggcggagggaagagtacgacgttctggacaaaaggaggggacgagatcccgagatgggcggaaagcctcagcgaaggaagaatccgcaagaggggctttataacgaactccagaaagataaaatggcagaagcctatagtgagattgggatgaagggagaaaggaggaggggtaaaggtcacgatgggttgtaccaaggattgagcacagccactaaagatacctatgatgcgctccacatgcaggccctgccgccaaga

SEQ ID NO: 25049 - DNA, 756 bp, synthetic construct
  source 1..756: mol_type = other DNA
ctgcgggatagcaagagcagcgacaagagcgtgtgtctgttcaccgacttcgacagccagaccaacgtgtcccagagcaaggactccgacgtgtacatcaccgataagaccgtgctggacatgcggagcatggacttcaagagcaactccgccgtggcctggtccaacaagtccgatttcgcctgcgccaacgccttcaacaacagcattatccccgaggacacattcttcccaagccccatggaccccaaggacaactgctccaaggacgccaacgataccctgctgctccagctgaccaacaccagcgcctactacatgtacttgttgctgctgctgaagtccgtggtgtacttcgccatcatcacatgctgcctgctgcggagaaccgccttctgctgcaacggcgagaagtctcgggttaagttttccagatccgcagacgcacccgcttaccaacaagggcagaaccaactctacaatgaacttaatttggggcggagggaagagtacgacgttctggacaaaaggaggggacgagatcccgagatgggcggaaagcctcagcgaaggaagaatccgcaagaggggctttataacgaactccagaaagataaaatggcagaagcctatagtgagattgggatgaagggagaaaggaggaggggtaaaggtcacgatgggttgtaccaaggattgagcacagccactaaagatacctatgatgcgctccacatgcaggccctgccgccaaga

SEQ ID NO: 25050 - DNA, 780 bp, synthetic construct; identical to SEQ ID NO: 25048
  source 1..780: mol_type = other DNA

SEQ ID NO: 25051 - DNA, 738 bp, synthetic construct
  source 1..738: mol_type = other DNA
ctgcgggatagcaagagcagcgacaagagcgtgtgtctgttcaccgacttcgacagccagaccaacgtgtcccagagcaaggactccgacgtgtacatcaccgataagaccgtgctggacatgcggagcatggacttcaagagcaactccgccgtggcctggtccaacaagtccgatttcgcctgcgccaacgccttcaacaacagcattatccccgaggacacattcttcccaagcccctgctccaaggacgccaacgataccctgctgctccagctgaccaacaccagcgcctactacatgtacttgttgctgctgctgaagtccgtggtgtacttcgccatcatcacatgctgcctgctgcggagaaccgccttctgctgcaacggcgagaagtctcgggttaagttttccagatccgcagacgcacccgcttaccaacaagggcagaaccaactctacaatgaacttaatttggggcggagggaagagtacgacgttctggacaaaaggaggggacgagatcccgagatgggcggaaagcctcagcgaaggaagaatccgcaagaggggctttataacgaactccagaaagataaaatggcagaagcctatagtgagattgggatgaagggagaaaggaggaggggtaaaggtcacgatgggttgtaccaaggattgagcacagccactaaagatacctatgatgcgctccacatgcaggccctgccgccaaga

SEQ ID NO: 25052 - DNA, 783 bp, synthetic construct
  source 1..783: mol_type = other DNA
ctgcgggatagcaagagcagcgacaagagcgtgtgtctgttcaccgacttcgacagccagaccaacgtgtcccagagcaaggactccgacgtgtacatcaccgataagaccgtgctggacatgcggagcatggacttcaagagcaactccgccgtggcctggtccaacaagtccgatttcgcctgcgccaacgccttcaacaacagcattatccccgaggacacattcttcccaagccccgaagtgaaaaccgactccaccgaccacgtgaagcccaaagagacagagaacaccaagcagcccagcaagagctgccacaagcccaaggccatcgtgcacaccgagaaagtgaacatgatgagcctgaccgtgctgggcctgcggatgctgttcgccaaaaccgtggccgtgaacttcctgctgaccgccaagctgttcttcctccgggttaagttttccagatccgcagacgcacccgcttaccaacaagggcagaaccaactctacaatgaacttaatttggggcggagggaagagtacgacgttctggacaaaaggaggggacgagatcccgagatgggcggaaagcctcagcgaaggaagaatccgcaagaggggctttataacgaactccagaaagataaaatggcagaagcctatagtgagattgggatgaagggagaaaggaggaggggtaaaggtcacgatgggttgtaccaaggattgagcacagccactaaagatacctatgatgcgctccacatgcaggccctgccgccaaga

SEQ ID NO: 25053 - DNA, 762 bp, synthetic construct
  source 1..762: mol_type = other DNA
ctgcgggatagcaagagcagcgacaagagcgtgtgtctgttcaccgacttcgacagccagaccaacgtgtcccagagcaaggactccgacgtgtacatcaccgataagaccgtgctggacatgcggagcatggacttcaagagcaactccgccgtggcctggtccaacaagtccgatttcgcctgcgccaacgccttcaacaacagcattatccccgaggacacattcttcccaagccccgaccacgtgaagcccaaagagacagagaacaccaagcagcccagcaagagctgccacaagcccaaggccatcgtgcacaccgagaaagtgaacatgatgagcctgaccgtgctgggcctgcggatgctgttcgccaaaaccgtggccgtgaacttcctgctgaccgccaagctgttcttcctccgggttaagttttccagatccgcagacgcacccgcttaccaacaagggcagaaccaactctacaatgaacttaatttggggcggagggaagagtacgacgttctggacaaaaggaggggacgagatcccgagatgggcggaaagcctcagcgaaggaagaatccgcaagaggggctttataacgaactccagaaagataaaatggcagaagcctatagtgagattgggatgaagggagaaaggaggaggggtaaaggtcacgatgggttgtaccaaggattgagcacagccactaaagatacctatgatgcgctccacatgcaggccctgccgccaaga

SEQ ID NO: 25054 - DNA, 750 bp, synthetic construct
  source 1..750: mol_type = other DNA
ctgcgggatagcaagagcagcgacaagagcgtgtgtctgttcaccgacttcgacagccagaccaacgtgtcccagagcaaggactccgacgtgtacatcaccgataagaccgtgctggacatgcggagcatggacttcaagagcaactccgccgtggcctggtccaacaagtccgatttcgcctgcgccaacgccttcaacaacagcattatccccgaggacacattcttcccaagccccgagagcagctgcggcagagccgattgcggctttaccagcgagagctaccagcagggcgtgctgagcgccaccatcctgtacgagatcctgctgggcaaggccaccctgtacgccgtgctggtgtctgccctggtgctgatggctatggtcaagcggaaggacagccggggacgggttaagttttccagatccgcagacgcacccgcttaccaacaagggcagaaccaactctacaatgaacttaatttggggcggagggaagagtacgacgttctggacaaaaggaggggacgagatcccgagatgggcggaaagcctcagcgaaggaagaatccgcaagaggggctttataacgaactccagaaagataaaatggcagaagcctatagtgagattgggatgaagggagaaaggaggaggggtaaaggtcacgatgggttgtaccaaggattgagcacagccactaaagatacctatgatgcgctccacatgcaggccctgccgccaaga

SEQ ID NO: 25055 - DNA, 744 bp, synthetic construct
  source 1..744: mol_type = other DNA
ctgcgggatagcaagagcagcgacaagagcgtgtgtctgttcaccgacttcgacagccagaccaacgtgtcccagagcaaggactccgacgtgtacatcaccgataagaccgtgctggacatgcggagcatggacttcaagagcaactccgccgtggcctggtccaacaagtccgatttcgcctgcgccaacgccttcaacaacagcattatccccgaggacacattcttcccaagccccgagagcagctgcgccgattgcggctttaccagcgagagctaccagcagggcgtgctgagcgccaccatcctgtacgagatcctgctgggcaaggccaccctgtacgccgtgctggtgtctgccctggtgctgatggctatggtcaagcggaaggacagccggggacgggttaagttttccagatccgcagacgcacccgcttaccaacaagggcagaaccaactctacaatgaacttaatttggggcggagggaagagtacgacgttctggacaaaaggaggggacgagatcccgagatgggcggaaagcctcagcgaaggaagaatccgcaagaggggctttataacgaactccagaaagataaaatggcagaagcctatagtgagattgggatgaagggagaaaggaggaggggtaaaggtcacgatgggttgtaccaaggattgagcacagccactaaagatacctatgatgcgctccacatgcaggccctgccgccaaga

SEQ ID NO: 25056 - DNA, 774 bp, synthetic construct
  source 1..774: mol_type = other DNA
ctgcgggatagcaagagcagcgacaagagcgtgtgtctgttcaccgacttcgacagccagaccaacgtgtcccagagcaaggactccgacgtgtacatcaccgataagaccgtgctggacatgcggagcatggacttcaagagcaactccgccgtggcctggtccaacaagtccgatttcgcctgcgccaacgccttcaacaacagcattatccccgaggacacattcttcccaagccccgagagcagctgccagatcgtgtctgccgaagcctggggcagagccgattgcggctttaccagcgagagctaccagcagggcgtgctgagcgccaccatcctgtacgagatcctgctgggcaaggccaccctgtacgccgtgctggtgtctgccctggtgctgatggctatggtcaagcggaaggacagccggggacgggttaagttttccagatccgcagacgcacccgcttaccaacaagggcagaaccaactctacaatgaacttaatttggggcggagggaagagtacgacgttctggacaaaaggaggggacgagatcccgagatgggcggaaagcctcagcgaaggaagaatccgcaagaggggctttataacgaactccagaaagataaaatggcagaagcctatagtgagattgggatgaagggagaaaggaggaggggtaaaggtcacgatgggttgtaccaaggattgagcacagccactaaagatacctatgatgcgctccacatgcaggccctgccgccaaga

SEQ ID NO: 25057 - DNA, 798 bp, synthetic construct
  source 1..798: mol_type = other DNA
ctgcgggatagcaagagcagcgacaagagcgtgtgtctgttcaccgacttcgacagccagaccaacgtgtcccagagcaaggactccgacgtgtacatcaccgataagaccgtgctggacatgcggagcatggacttcaagagcaactccgccgtggcctggtccaacaagtccgatttcgcctgcgccaacgccttcaacaacagcattatccccgaggacacattcttcccaagccccgagagcagctgcttcccacccatcaagaccgatgtgattacaatggaccccaaggacaactgctccaaggacgccaacgataccctgctgctccagctgaccaacaccagcgcctactacatgtacttgttgctgctgctgaagtccgtggtgtacttcgccatcatcacatgctgcctgctgcggagaaccgccttctgctgcaacggcgagaagtctcgggttaagttttccagatccgcagacgcacccgcttaccaacaagggcagaaccaactctacaatgaacttaatttggggcggagggaagagtacgacgttctggacaaaaggaggggacgagatcccgagatgggcggaaagcctcagcgaaggaagaatccgcaagaggggctttataacgaactccagaaagataaaatggcagaagcctatagtgagattgggatgaagggagaaaggaggaggggtaaaggtcacgatgggttgtaccaaggattgagcacagccactaaagatacctatgatgcgctccacatgcaggccctgccgccaaga

SEQ ID NO: 25058 - DNA, 792 bp, synthetic construct
  source 1..792: mol_type = other DNA
ctgcgggatagcaagagcagcgacaagagcgtgtgtctgttcaccgacttcgacagccagaccaacgtgtcccagagcaaggactccgacgtgtacatcaccgataagaccgtgctggacatgcggagcatggacttcaagagcaactccgccgtggcctggtccaacaagtccgatttcgcctgcgccaacgccttcaacaacagcattatccccgaggacacattcttcccaagccccgagagcagctgccccatcaagaccgatgtgattacaatggaccccaaggacaactgctccaaggacgccaacgataccctgctgctccagctgaccaacaccagcgcctactacatgtacttgttgctgctgctgaagtccgtggtgtacttcgccatcatcacatgctgcctgctgcggagaaccgccttctgctgcaacggcgagaagtctcgggttaagttttccagatccgcagacgcacccgcttaccaacaagggcagaaccaactctacaatgaacttaatttggggcggagggaagagtacgacgttctggacaaaaggaggggacgagatcccgagatgggcggaaagcctcagcgaaggaagaatccgcaagaggggctttataacgaactccagaaagataaaatggcagaagcctatagtgagattgggatgaagggagaaaggaggaggggtaaaggtcacgatgggttgtaccaaggattgagcacagccactaaagatacctatgatgcgctccacatgcaggccctgccgccaaga

SEQ ID NO: 25059 - DNA, 768 bp, synthetic construct
  source 1..768: mol_type = other DNA
ctgcgggatagcaagagcagcgacaagagcgtgtgtctgttcaccgacttcgacagccagaccaacgtgtcccagagcaaggactccgacgtgtacatcaccgataagaccgtgctggacatgcggagcatggacttcaagagcaactccgccgtggcctggtccaacaagtccgatttcgcctgcgccaacgccttcaacaacagcattatccccgaggacacattcttcccaagccccgagagcagctgcatggaccccaaggacaactgctccaaggacgccaacgataccctgctgctccagctgaccaacaccagcgcctactacatgtacttgttgctgctgctgaagtccgtggtgtacttcgccatcatcacatgctgcctgctgcggagaaccgccttctgctgcaacggcgagaagtctcgggttaagttttccagatccgcagacgcacccgcttaccaacaagggcagaaccaactctacaatgaacttaatttggggcggagggaagagtacgacgttctggacaaaaggaggggacgagatcccgagatgggcggaaagcctcagcgaaggaagaatccgcaagaggggctttataacgaactccagaaagataaaatggcagaagcctatagtgagattgggatgaagggagaaaggaggaggggtaaaggtcacgatgggttgtaccaaggattgagcacagccactaaagatacctatgatgcgctccacatgcaggccctgccgccaaga

SEQ ID NO: 25060 - DNA, 792 bp, synthetic construct; identical to SEQ ID NO: 25058
  source 1..792: mol_type = other DNA

SEQ ID NO: 25061 - DNA, 750 bp, synthetic construct
  source 1..750: mol_type = other DNA
ctgcgggatagcaagagcagcgacaagagcgtgtgtctgttcaccgacttcgacagccagaccaacgtgtcccagagcaaggactccgacgtgtacatcaccgataagaccgtgctggacatgcggagcatggacttcaagagcaactccgccgtggcctggtccaacaagtccgatttcgcctgcgccaacgccttcaacaacagcattatccccgaggacacattcttcccaagccccgagagcagctgctgctccaaggacgccaacgataccctgctgctccagctgaccaacaccagcgcctactacatgtacttgttgctgctgctgaagtccgtggtgtacttcgccatcatcacatgctgcctgctgcggagaaccgccttctgctgcaacggcgagaagtctcgggttaagttttccagatccgcagacgcacccgcttaccaacaagggcagaaccaactctacaatgaacttaatttggggcggagggaagagtacgacgttctggacaaaaggaggggacgagatcccgagatgggcggaaagcctcagcgaaggaagaatccgcaagaggggctttataacgaactccagaaagataaaatggcagaagcctatagtgagattgggatgaagggagaaaggaggaggggtaaaggtcacgatgggttgtaccaaggattgagcacagccactaaagatacctatgatgcgctccacatgcaggccctgccgccaaga

SEQ ID NO: 25062 - DNA, 795 bp, synthetic construct
  source 1..795: mol_type = other DNA
ctgcgggatagcaagagcagcgacaagagcgtgtgtctgttcaccgacttcgacagccagaccaacgtgtcccagagcaaggactccgacgtgtacatcaccgataagaccgtgctggacatgcggagcatggacttcaagagcaactccgccgtggcctggtccaacaagtccgatttcgcctgcgccaacgccttcaacaacagcattatccccgaggacacattcttcccaagccccgagagcagctgcgaagtgaaaaccgactccaccgaccacgtgaagcccaaagagacagagaacaccaagcagcccagcaagagctgccacaagcccaaggccatcgtgcacaccgagaaagtgaacatgatgagcctgaccgtgctgggcctgcggatgctgttcgccaaaaccgtggccgtgaacttcctgctgaccgccaagctgttcttcctccgggttaagttttccagatccgcagacgcacccgcttaccaacaagggcagaaccaactctacaatgaacttaatttggggcggagggaagagtacgacgttctggacaaaaggaggggacgagatcccgagatgggcggaaagcctcagcgaaggaagaatccgcaagaggggctttataacgaactccagaaagataaaatggcagaagcctatagtgagattgggatgaagggagaaaggaggaggggtaaaggtcacgatgggttgtaccaaggattgagcacagccactaaagatacctatgatgcgctccacatgcaggccctgccgccaaga

SEQ ID NO: 25063 - DNA, 774 bp, synthetic construct
  source 1..774: mol_type = other DNA
ctgcgggatagcaagagcagcgacaagagcgtgtgtctgttcaccgacttcgacagccagaccaacgtgtcccagagcaaggactccgacgtgtacatcaccgataagaccgtgctggacatgcggagcatggacttcaagagcaactccgccgtggcctggtccaacaagtccgatttcgcctgcgccaacgccttcaacaacagcattatccccgaggacacattcttcccaagccccgagagcagctgcgaccacgtgaagcccaaagagacagagaacaccaagcagcccagcaagagctgccacaagcccaaggccatcgtgcacaccgagaaagtgaacatgatgagcctgaccgtgctgggcctgcggatgctgttcgccaaaaccgtggccgtgaacttcctgctgaccgccaagctgttcttcctccgggttaagttttccagatccgcagacgcacccgcttaccaacaagggcagaaccaactctacaatgaacttaatttggggcggagggaagagtacgacgttctggacaaaaggaggggacgagatcccgagatgggcggaaagcctcagcgaaggaagaatccgcaagaggggctttataacgaactccagaaagataaaatggcagaagcctatagtgagattgggatgaagggagaaaggaggaggggtaaaggtcacgatgggttgtaccaaggattgagcacagccactaaagatacctatgatgcgctccacatgcaggccctgccgccaaga

SEQ ID NO: 25064 - DNA, 711 bp, synthetic construct
  source 1..711: mol_type = other DNA
ctgcgggatagcaagagcagcgacaagagcgtgtgtctgttcaccgacttcgacagccagaccaacgtgtcccagagcaaggactccgacgtgtacatcaccgataagaccgtgctggacatgcggagcatggacttcaagagcaactccgccgtggcctggtccaacaagtccgatttcgcctgcgccaacgccttcaacaacagcattatcggcagagccgattgcggctttaccagcgagagctaccagcagggcgtgctgagcgccaccatcctgtacgagatcctgctgggcaaggccaccctgtacgccgtgctggtgtctgccctggtgctgatggctatggtcaagcggaaggacagccggggacgggttaagttttccagatccgcagacgcacccgcttaccaacaagggcagaaccaactctacaatgaacttaatttggggcggagggaagagtacgacgttctggacaaaaggaggggacgagatcccgagatgggcggaaagcctcagcgaaggaagaatccgcaagaggggctttataacgaactccagaaagataaaatggcagaagcctatagtgagattgggatgaagggagaaaggaggaggggtaaaggtcacgatgggttgtaccaaggattgagcacagccactaaagatacctatgatgcgctccacatgcaggccctgccgccaaga

SEQ ID NO: 25065 - DNA, 705 bp, synthetic construct
  source 1..705: mol_type = other DNA
ctgcgggatagcaagagcagcgacaagagcgtgtgtctgttcaccgacttcgacagccagaccaacgtgtcccagagcaaggactccgacgtgtacatcaccgataagaccgtgctggacatgcggagcatggacttcaagagcaactccgccgtggcctggtccaacaagtccgatttcgcctgcgccaacgccttcaacaacagcattatcgccgattgcggctttaccagcgagagctaccagcagggcgtgctgagcgccaccatcctgtacgagatcctgctgggcaaggccaccctgtacgccgtgctggtgtctgccctggtgctgatggctatggtcaagcggaaggacagccggggacgggttaagttttccagatccgcagacgcacccgcttaccaacaagggcagaaccaactctacaatgaacttaatttggggcggagggaagagtacgacgttctggacaaaaggaggggacgagatcccgagatgggcggaaagcctcagcgaaggaagaatccgcaagaggggctttataacgaactccagaaagataaaatggcagaagcctatagtgagattgggatgaagggagaaaggaggaggggtaaaggtcacgatgggttgtaccaaggattgagcacagccactaaagatacctatgatgcgctccacatgcaggccctgccgccaaga

SEQ ID NO: 25066 - DNA, 735 bp, synthetic construct
  source 1..735: mol_type = other DNA
ctgcgggatagcaagagcagcgacaagagcgtgtgtctgttcaccgacttcgacagccagaccaacgtgtcccagagcaaggactccgacgtgtacatcaccgataagaccgtgctggacatgcggagcatggacttcaagagcaactccgccgtggcctggtccaacaagtccgatttcgcctgcgccaacgccttcaacaacagcattatccagatcgtgtctgccgaagcctggggcagagccgattgcggctttaccagcgagagctaccagcagggcgtgctgagcgccaccatcctgtacgagatcctgctgggcaaggccaccctgtacgccgtgctggtgtctgccctggtgctgatggctatggtcaagcggaaggacagccggggacgggttaagttttccagatccgcagacgcacccgcttaccaacaagggcagaaccaactctacaatgaacttaatttggggcggagggaagagtacgacgttctggacaaaaggaggggacgagatcccgagatgggcggaaagcctcagcgaaggaagaatccgcaagaggggctttataacgaactccagaaagataaaatggcagaagcctatagtgagattgggatgaagggagaaaggaggaggggtaaaggtcacgatgggttgtaccaaggattgagcacagccactaaagatacctatgatgcgctccacatgcaggccctgccgccaaga

SEQ ID NO: 25067 - DNA, 759 bp, synthetic construct
  source 1..759: mol_type = other DNA
ctgcgggatagcaagagcagcgacaagagcgtgtgtctgttcaccgacttcgacagccagaccaacgtgtcccagagcaaggactccgacgtgtacatcaccgataagaccgtgctggacatgcggagcatggacttcaagagcaactccgccgtggcctggtccaacaagtccgatttcgcctgcgccaacgccttcaacaacagcattatcttcccacccatcaagaccgatgtgattacaatggaccccaaggacaactgctccaaggacgccaacgataccctgctgctccagctgaccaacaccagcgcctactacatgtacttgttgctgctgctgaagtccgtggtgtacttcgccatcatcacatgctgcctgctgcggagaaccgccttctgctgcaacggcgagaagtctcgggttaagttttccagatccgcagacgcacccgcttaccaacaagggcagaaccaactctacaatgaacttaatttggggcggagggaagagtacgacgttctggacaaaaggaggggacgagatcccgagatgggcggaaagcctcagcgaaggaagaatccgcaagaggggctttataacgaactccagaaagataaaatggcagaagcctatagtgagattgggatgaagggagaaaggaggaggggtaaaggtcacgatgggttgtaccaaggattgagcacagccactaaagatacctatgatgcgctccacatgcaggccctgccgccaaga

SEQ ID NO: 25068 - DNA, 753 bp, synthetic construct
  source 1..753: mol_type = other DNA
ctgcgggatagcaagagcagcgacaagagcgtgtgtctgttcaccgacttcgacagccagaccaacgtgtcccagagcaaggactccgacgtgtacatcaccgataagaccgtgctggacatgcggagcatggacttcaagagcaactccgccgtggcctggtccaacaagtccgatttcgcctgcgccaacgccttcaacaacagcattatccccatcaagaccgatgtgattacaatggaccccaaggacaactgctccaaggacgccaacgataccctgctgctccagctgaccaacaccagcgcctactacatgtacttgttgctgctgctgaagtccgtggtgtacttcgccatcatcacatgctgcctgctgcggagaaccgccttctgctgcaacggcgagaagtctcgggttaagttttccagatccgcagacgcacccgcttaccaacaagggcagaaccaactctacaatgaacttaatttggggcggagggaagagtacgacgttctggacaaaaggaggggacgagatcccgagatgggcggaaagcctcagcgaaggaagaatccgcaagaggggctttataacgaactccagaaagataaaatggcagaagcctatagtgagattgggatgaagggagaaaggaggaggggtaaaggtcacgatgggttgtaccaaggattgagcacagccactaaagatacctatgatgcgctccacatgcaggccctgccgccaaga

SEQ ID NO: 25069 - DNA, 729 bp, synthetic construct
  source 1..729: mol_type = other DNA
ctgcgggatagcaagagcagcgacaagagcgtgtgtctgttcaccgacttcgacagccagaccaacgtgtcccagagcaaggactccgacgtgtacatcaccgataagaccgtgctggacatgcggagcatggacttcaagagcaactccgccgtggcctggtccaacaagtccgatttcgcctgcgccaacgccttcaacaacagcattatcatggaccccaaggacaactgctccaaggacgccaacgataccctgctgctccagctgaccaacaccagcgcctactacatgtacttgttgctgctgctgaagtccgtggtgtacttcgccatcatcacatgctgcctgctgcggagaaccgccttctgctgcaacggcgagaagtctcgggttaagttttccagatccgcagacgcacccgcttaccaacaagggcagaaccaactctacaatgaacttaatttggggcggagggaagagtacgacgttctggacaaaaggaggggacgagatcccgagatgggcggaaagcctcagcgaaggaagaatccgcaagaggggctttataacgaactccagaaagataaaatggcagaagcctatagtgagattgggatgaagggagaaaggaggaggggtaaaggtcacgatgggttgtaccaaggattgagcacagccactaaagatacctatgatgcgctccacatgcaggccctgccgccaaga

SEQ ID NO: 25070 - DNA, 753 bp, synthetic construct; identical to SEQ ID NO: 25068
  source 1..753: mol_type = other DNA

SEQ ID NO: 25071 - DNA, 711 bp, synthetic construct
  source 1..711: mol_type = other DNA
ctgcgggatagcaagagcagcgacaagagcgtgtgtctgttcaccgacttcgacagccagaccaacgtgtcccagagcaaggactccgacgtgtacatcaccgataagaccgtgctggacatgcggagcatggacttcaagagcaactccgccgtggcctggtccaacaagtccgatttcgcctgcgccaacgccttcaacaacagcattatctgctccaaggacgccaacgataccctgctgctccagctgaccaacaccagcgcctactacatgtacttgttgctgctgctgaagtccgtggtgtacttcgccatcatcacatgctgcctgctgcggagaaccgccttctgctgcaacggcgagaagtctcgggttaagttttccagatccgcagacgcacccgcttaccaacaagggcagaaccaactctacaatgaacttaatttggggcggagggaagagtacgacgttctggacaaaaggaggggacgagatcccgagatgggcggaaagcctcagcgaaggaagaatccgcaagaggggctttataacgaactccagaaagataaaatggcagaagcctatagtgagattgggatgaagggagaaaggaggaggggtaaaggtcacgatgggttgtaccaaggattgagcacagccactaaagatacctatgatgcgctccacatgcaggccctgccgccaaga

SEQ ID NO: 25072 - DNA, 756 bp, synthetic construct
  source 1..756: mol_type = other DNA
ctgcgggatagcaagagcagcgacaagagcgtgtgtctgttcaccgacttcgacagccagaccaacgtgtcccagagcaaggactccgacgtgtacatcaccgataagaccgtgctggacatgcggagcatggacttcaagagcaactccgccgtggcctggtccaacaagtccgatttcgcctgcgccaacgccttcaacaacagcattatcgaagtgaaaaccgactccaccgaccacgtgaagcccaaagagacagagaacaccaagcagcccagcaagagctgccacaagcccaaggccatcgtgcacaccgagaaagtgaacatgatgagcctgaccgtgctgggcctgcggatgctgttcgccaaaaccgtggccgtgaacttcctgctgaccgccaagctgttcttcctccgggttaagttttccagatccgcagacgcacccgcttaccaacaagggcagaaccaactctacaatgaacttaatttggggcggagggaagagtacgacgttctggacaaaaggaggggacgagatcccgagatgggcggaaagcctcagcgaaggaagaatccgcaagaggggctttataacgaactccagaaagataaaatggcagaagcctatagtgagattgggatgaagggagaaaggaggaggggtaaaggtcacgatgggttgtaccaaggattgagcacagccactaaagatacctatgatgcgctccacatgcaggccctgccgccaaga

SEQ ID NO: 25073 - DNA, 735 bp, synthetic construct
  source 1..735: mol_type = other DNA
ctgcgggatagcaagagcagcgacaagagcgtgtgtctgttcaccgacttcgacagccagaccaacgtgtcccagagcaaggactccgacgtgtacatcaccgataagaccgtgctggacatgcggagcatggacttcaagagcaactccgccgtggcctggtccaacaagtccgatttcgcctgcgccaacgccttcaacaacagcattatcgaccacgtgaagcccaaagagacagagaacaccaagcagcccagcaagagctgccacaagcccaaggccatcgtgcacaccgagaaagtgaacatgatgagcctgaccgtgctgggcctgcggatgctgttcgccaaaaccgtggccgtgaacttcctgctgaccgccaagctgttcttcctccgggttaagttttccagatccgcagacgcacccgcttaccaacaagggcagaaccaactctacaatgaacttaatttggggcggagggaagagtacgacgttctggacaaaaggaggggacgagatcccgagatgggcggaaagcctcagcgaaggaagaatccgcaagaggggctttataacgaactccagaaagataaaatggcagaagcctatagtgagattgggatgaagggagaaaggaggaggggtaaaggtcacgatgggttgtaccaaggattgagcacagccactaaagatacctatgatgcgctccacatgcaggccctgccgccaaga

SEQ ID NO: 25074 - DNA, 750 bp, synthetic construct; identical to SEQ ID NO: 25054
  source 1..750: mol_type = other DNA

SEQ ID NO: 25075 - DNA, 744 bp, synthetic construct; identical to SEQ ID NO: 25055
  source 1..744: mol_type = other DNA

SEQ ID NO: 25076 - DNA, 774 bp, synthetic construct; identical to SEQ ID NO: 25056
  source 1..774: mol_type = other DNA

SEQ ID NO: 25077 - DNA, 798 bp, synthetic construct; identical to SEQ ID NO: 25057
  source 1..798: mol_type = other DNA

SEQ ID NO: 25078 - DNA, 792 bp, synthetic construct; identical to SEQ ID NO: 25058
  source 1..792: mol_type = other DNA

SEQ ID NO: 25079 - DNA, 768 bp, synthetic construct; identical to SEQ ID NO: 25059
  source 1..768: mol_type = other DNA

SEQ ID NO: 25080 - DNA, 792 bp, synthetic construct; identical to SEQ ID NO: 25058
  source 1..792: mol_type = other DNA

SEQ ID NO: 25081 - DNA, 750 bp, synthetic construct; identical to SEQ ID NO: 25061
  source 1..750: mol_type = other DNA

SEQ ID NO: 25082 - DNA, 795 bp, synthetic construct; identical to SEQ ID NO: 25062
  source 1..795: mol_type = other DNA

SEQ ID NO: 25083 - DNA, 774 bp, synthetic construct; identical to SEQ ID NO: 25063
  source 1..774: mol_type = other DNA

SEQ ID NO: 25084 - DNA, 870 bp, synthetic construct
  source 1..870: mol_type = other DNA
gaggtggccgtgttcgagcctagcgaggccgagatcagccacacccagaaagccaccctcgtgtgcctggctaccggcttctaccccgaccatgtggaactgtcttggtgggtcaacggcaaagaggtgcacagcggcgtgtctaccgacccccagccactgaaagaacagcccgccctgaacgacagccggtactgcctgagcagcagactgagagtgtccgccaccttctggcagaacccccggaaccacttcagatgccaggtgcagttctacggcctgagcgagaacgacgagtggacccaggacagagccaagcccgtgacccagatcgtgtctgccgaagcctggatccccgaggacacattcttcccaagccccgagagcagctgcgacgtgaagctggtggaaaagagcttcgagacagacaccaacctgaacttccagaacctgagcgtgatcggcttcagaatcctgctgctgaaagtggccggctttaacctgctgatgaccctgcggctgtggtccagccgggttaagttttccagatccgcagacgcacccgcttaccaacaagggcagaaccaactctacaatgaacttaatttggggcggagggaagagtacgacgttctggacaaaaggaggggacgagatcccgagatgggcggaaagcctcagcgaaggaagaatccgcaagaggggctttataacgaactccagaaagataaaatggcagaagcctatagtgagattgggatgaagggagaaaggaggaggggtaaaggtcacgatgggttgtaccaaggattgagcacagccactaaagatacctatgatgcgctccacatgcaggccctgccgccaaga

SEQ ID NO: 25085 - DNA, 840 bp, synthetic construct
  source 1..840: mol_type = other DNA
gaggtggccgtgttcgagcctagcgaggccgagatcagccacacccagaaagccaccctcgtgtgcctggctaccggcttctaccccgaccatgtggaactgtcttggtgggtcaacggcaaagaggtgcacagcggcgtgtctaccgacccccagccactgaaagaacagcccgccctgaacgacagccggtactgcctgagcagcagactgagagtgtccgccaccttctggcagaacccccggaaccacttcagatgccaggtgcagttctacggcctgagcgagaacgacgagtggacccaggacagagccaagcccgtgacccagatcgtgtctgccgaagcctgggagagcagctgcgacgtgaagctggtggaaaagagcttcgagacagacaccaacctgaacttccagaacctgagcgtgatcggcttcagaatcctgctgctgaaagtggccggctttaacctgctgatgaccctgcggctgtggtccagccgggttaagttttccagatccgcagacgcacccgcttaccaacaagggcagaaccaactctacaatgaacttaatttggggcggagggaagagtacgacgttctggacaaaaggaggggacgagatcccgagatgggcggaaagcctcagcgaaggaagaatccgcaagaggggctttataacgaactccagaaagataaaatggcagaagcctatagtgagattgggatgaagggagaaaggaggaggggtaaaggtcacgatgggttgtaccaaggattgagcacagccactaaagatacctatgatgcgctccacatgcaggccctgccgccaaga

SEQ ID NO: 25086 - DNA, 867 bp, synthetic construct
  source 1..867: mol_type = other DNA
gaggtggccgtgttcgagcctagcgaggccgagatcagccacacccagaaagccaccctcgtgtgcctggctaccggcttctaccccgaccatgtggaactgtcttggtgggtcaacggcaaagaggtgcacagcggcgtgtctaccgacccccagccactgaaagaacagcccgccctgaacgacagccggtactgcctgagcagcagactgagagtgtccgccaccttctggcagaacccccggaaccacttcagatgccaggtgcagttctacggcctgagcgagaacgacgagtggacccaggacagagccaagcccgtgacccagatcgtgtctgccgaagcctggcccgaggacacattcttcccaagccccgagagcagctgcgacgtgaagctggtggaaaagagcttcgagacagacaccaacctgaacttccagaacctgagcgtgatcggcttcagaatcctgctgctgaaagtggccggctttaacctgctgatgaccctgcggctgtggtccagccgggttaagttttccagatccgcagacgcacccgcttaccaacaagggcagaaccaactctacaatgaacttaatttggggcggagggaagagtacgacgttctggacaaaaggaggggacgagatcccgagatgggcggaaagcctcagcgaaggaagaatccgcaagaggggctttataacgaactccagaaagataaaatggcagaagcctatagtgagattgggatgaagggagaaaggaggaggggtaaaggtcacgatgggttgtaccaaggattgagcacagccactaaagatacctatgatgcgctccacatgcaggccctgccgccaaga

SEQ ID NO: 25087 - DNA, 897 bp, synthetic construct
  source 1..897: mol_type = other DNA
gaggtggccgtgttcgagcctagcgaggccgagatcagccacacccagaaagccaccctcgtgtgcctggctaccggcttctaccccgaccatgtggaactgtcttggtgggtcaacggcaaagaggtgcacagcggcgtgtctaccgacccccagccactgaaagaacagcccgccctgaacgacagccggtactgcctgagcagcagactgagagtgtccgccaccttctggcagaacccccggaaccacttcagatgccaggtgcagttctacggcctgagcgagaacgacgagtggacccaggacagagccaagcccgtgacccagatcgtgtctgccgaagcctggttcccacccatcaagaccgatgtgattacaatggaccccaaggacaactgctccaaggacgccaacgataccctgctgctccagctgaccaacaccagcgcctactacatgtacttgttgctgctgctgaagtccgtggtgtacttcgccatcatcacatgctgcctgctgcggagaaccgccttctgctgcaacggcgagaagtctcgggttaagttttccagatccgcagacgcacccgcttaccaacaagggcagaaccaactctacaatgaacttaatttggggcggagggaagagtacgacgttctggacaaaaggaggggacgagatcccgagatgggcggaaagcctcagcgaaggaagaatccgcaagaggggctttataacgaactccagaaagataaaatggcagaagcctatagtgagattgggatgaagggagaaaggaggaggggtaaaggtcacgatgggttgtaccaaggattgagcacagccactaaagatacctatgatgcgctccacatgcaggccctgccgccaaga

SEQ ID NO: 25088 - DNA, 891 bp, synthetic construct
  source 1..891: mol_type = other DNA
gaggtggccgtgttcgagcctagcgaggccgagatcagccacacccagaaagccaccctcgtgtgcctggctaccggcttctaccccgaccatgtggaactgtcttggtgggtcaacggcaaagaggtgcacagcggcgtgtctaccgacccccagccactgaaagaacagcccgccctgaacgacagccggtactgcctgagcagcagactgagagtgtccgccaccttctggcagaacccccggaaccacttcagatgccaggtgcagttctacggcctgagcgagaacgacgagtggacccaggacagagccaagcccgtgacccagatcgtgtctgccgaagcctggcccatcaagaccgatgtgattacaatggaccccaaggacaactgctccaaggacgccaacgataccctgctgctccagctgaccaacaccagcgcctactacatgtacttgttgctgctgctgaagtccgtggtgtacttcgccatcatcacatgctgcctgctgcggagaaccgccttctgctgcaacggcgagaagtctcgggttaagttttccagatccgcagacgcacccgcttaccaacaagggcagaaccaactctacaatgaacttaatttggggcggagggaagagtacgacgttctggacaaaaggaggggacgagatcccgagatgggcggaaagcctcagcgaaggaagaatccgcaagaggggctttataacgaactccagaaagataaaatggcagaagcctatagtgagattgggatgaagggagaaaggaggaggggtaaaggtcacgatgggttgtaccaaggattgagcacagccactaaagatacctatgatgcgctccacatgcaggccctgccgccaaga

SEQ ID NO: 25089 - DNA, 867 bp, synthetic construct
  source 1..867: mol_type = other DNA
gaggtggccgtgttcgagcctagcgaggccgagatcagccacacccagaaagccaccctcgtgtgcctggctaccggcttctaccccgaccatgtggaactgtcttggtgggtcaacggcaaagaggtgcacagcggcgtgtctaccgacccccagccactgaaagaacagcccgccctgaacgacagccggtactgcctgagcagcagactgagagtgtccgccaccttctggcagaacccccggaaccacttcagatgccaggtgcagttctacggcctgagcgagaacgacgagtggacccaggacagagccaagcccgtgacccagatcgtgtctgccgaagcctggatggaccccaaggacaactgctccaaggacgccaacgataccctgctgctccagctgaccaacaccagcgcctactacatgtacttgttgctgctgctgaagtccgtggtgtacttcgccatcatcacatgctgcctgctgcggagaaccgccttctgctgcaacggcgagaagtctcgggttaagttttccagatccgcagacgcacccgcttaccaacaagggcagaaccaactctacaatgaacttaatttggggcggagggaagagtacgacgttctggacaaaaggaggggacgagatcccgagatgggcggaaagcctcagcgaaggaagaatccgcaagaggggctttataacgaactccagaaagataaaatggcagaagcctatagtgagattgggatgaagggagaaaggaggaggggtaaaggtcacgatgggttgtaccaaggattgagcacagccactaaagatacctatgatgcgctccacatgcaggccctgccgccaaga

SEQ ID NO: 25090 - DNA, 891 bp, synthetic construct; identical to SEQ ID NO: 25088
  source 1..891: mol_type = other DNA

SEQ ID NO: 25091 - DNA, 849 bp, synthetic construct
  source 1..849: mol_type = other DNA
gaggtggccgtgttcgagcctagcgaggccgagatcagccacacccagaaagccaccctcgtgtgcctggctaccggcttctaccccgaccatgtggaactgtcttggtgggtcaacggcaaagaggtgcacagcggcgtgtctaccgacccccagccactgaaagaacagcccgccctgaacgacagccggtactgcctgagcagcagactgagagtgtccgccaccttctggcagaacccccggaaccacttcagatgccaggtgcagttctacggcctgagcgagaacgacgagtggacccaggacagagccaagcccgtgacccagatcgtgtctgccgaagcctggtgctccaaggacgccaacgataccctgctgctccagctgaccaacaccagcgcctactacatgtacttgttgctgctgctgaagtccgtggtgtacttcgccatcatcacatgctgcctgctgcggagaaccgccttctgctgcaacggcgagaagtctcgggttaagttttccagatccgcagacgcacccgcttaccaacaagggcagaaccaactctacaatgaacttaatttggggcggagggaagagtacgacgttctggacaaaaggaggggacgagatcccgagatgggcggaaagcctcagcgaaggaagaatccgcaagaggggctttataacgaactccagaaagataaaatggcagaagcctatagtgagattgggatgaagggagaaaggaggaggggtaaaggtcacgatgggttgtaccaaggattgagcacagccactaaagatacctatgatgcgctccacatgcaggccctgccgccaaga

SEQ ID NO: 25092 - DNA, 894 bp, synthetic construct
  source 1..894: mol_type = other DNA
gaggtggccgtgttcgagcctagcgaggccgagatcagccacacccagaaagccaccctcgtgtgcctggctaccggcttctaccccgaccatgtggaactgtcttggtgggtcaacggcaaagaggtgcacagcggcgtgtctaccgacccccagccactgaaagaacagcccgccctgaacgacagccggtactgcctgagcagcagactgagagtgtccgccaccttctggcagaacccccggaaccacttcagatgccaggtgcagttctacggcctgagcgagaacgacgagtggacccaggacagagccaagcccgtgacccagatcgtgtctgccgaagcctgggaagtgaaaaccgactccaccgaccacgtgaagcccaaagagacagagaacaccaagcagcccagcaagagctgccacaagcccaaggccatcgtgcacaccgagaaagtgaacatgatgagcctgaccgtgctgggcctgcggatgctgttcgccaaaaccgtggccgtgaacttcctgctgaccgccaagctgttcttcctccgggttaagttttccagatccgcagacgcacccgcttaccaacaagggcagaaccaactctacaatgaacttaatttggggcggagggaagagtacgacgttctggacaaaaggaggggacgagatcccgagatgggcggaaagcctcagcgaaggaagaatccgcaagaggggctttataacgaactccagaaagataaaatggcagaagcctatagtgagattgggatgaagggagaaaggaggaggggtaaaggtcacgatgggttgtaccaaggattgagcacagccactaaagatacctatgatgcgctccacatgcaggccctgccgccaaga

SEQ ID NO: 25093 - DNA, 873 bp, synthetic construct
  source 1..873: mol_type = other DNA
gaggtggccgtgttcgagcctagcgaggccgagatcagccacacccagaaagccaccctcgtgtgcctggctaccggcttctaccccgaccatgtggaactgtcttggtgggtcaacggcaaagaggtgcacagcggcgtgtctaccgacccccagccactgaaagaacagcccgccctgaacgacagccggtactgcctgagcagcagactgagagtgtccgccaccttctggcagaacccccggaaccacttcagatgccaggtgcagttctacggcctgagcgagaacgacgagtggacccaggacagagccaagcccgtgacccagatcgtgtctgccgaagcctgggaccacgtgaagcccaaagagacagagaacaccaagcagcccagcaagagctgccacaagcccaaggccatcgtgcacaccgagaaagtgaacatgatgagcctgaccgtgctgggcctgcggatgctgttcgccaaaaccgtggccgtgaacttcctgctgaccgccaagctgttcttcctccgggttaagttttccagatccgcagacgcacccgcttaccaacaagggcagaaccaactctacaatgaacttaatttggggcggagggaagagtacgacgttctggacaaaaggaggggacgagatcccgagatgggcggaaagcctcagcgaaggaagaatccgcaagaggggctttataacgaactccagaaagataaaatggcagaagcctatagtgagattgggatgaagggagaaaggaggaggggtaaaggtcacgatgggttgtaccaaggattgagcacagccactaaagatacctatgatgcgctccacatgcaggccctgccgccaaga

SEQ ID NO: 25094 - DNA, 876 bp, synthetic construct
  source 1..876: mol_type = other DNA
gaggtggccgtgttcgagcctagcgaggccgagatcagccacacccagaaagccaccctcgtgtgcctggctaccggcttctaccccgaccatgtggaactgtcttggtgggtcaacggcaaagaggtgcacagcggcgtgtctaccgacccccagccactgaaagaacagcccgccctgaacgacagccggtactgcctgagcagcagactgagagtgtccgccaccttctggcagaacccccggaaccacttcagatgccaggtgcagttctacggcctgagcgagaacgacgagtggacccaggacagagccaagcccgtgacccagatcgtgtctgccgaagcctggggcagaatccccgaggacacattcttcccaagccccgagagcagctgcgacgtgaagctggtggaaaagagcttcgagacagacaccaacctgaacttccagaacctgagcgtgatcggcttcagaatcctgctgctgaaagtggccggctttaacctgctgatgaccctgcggctgtggtccagccgggttaagttttccagatccgcagacgcacccgcttaccaacaagggcagaaccaactctacaatgaacttaatttggggcggagggaagagtacgacgttctggacaaaaggaggggacgagatcccgagatgggcggaaagcctcagcgaaggaagaatccgcaagaggggctttataacgaactccagaaagataaaatggcagaagcctatagtgagattgggatgaagggagaaaggaggaggggtaaaggtcacgatgggttgtaccaaggattgagcacagccactaaagatacctatgatgcgctccacatgcaggccctgccgccaaga

SEQ ID NO: 25095 - DNA, 846 bp, synthetic construct
  source 1..846: mol_type = other DNA
gaggtggccgtgttcgagcctagcgaggccgagatcagccacacccagaaagccaccctcgtgtgcctggctaccggcttctaccccgaccatgtggaactgtcttggtgggtcaacggcaaagaggtgcacagcggcgtgtctaccgacccccagccactgaaagaacagcccgccctgaacgacagccggtactgcctgagcagcagactgagagtgtccgccaccttctggcagaacccccggaaccacttcagatgccaggtgcagttctacggcctgagcgagaacgacgagtggacccaggacagagccaagcccgtgacccagatcgtgtctgccgaagcctggggcagagagagcagctgcgacgtgaagctggtggaaaagagcttcgagacagacaccaacctgaacttccagaacctgagcgtgatcggcttcagaatcctgctgctgaaagtggccggctttaacctgctgatgaccctgcggctgtggtccagccgggttaagttttccagatccgcagacgcacccgcttaccaacaagggcagaaccaactctacaatgaacttaatttggggcggagggaagagtacgacgttctggacaaaaggaggggacgagatcccgagatgggcggaaagcctcagcgaaggaagaatccgcaagaggggctttataacgaactccagaaagataaaatggcagaagcctatagtgagattgggatgaagggagaaaggaggaggggtaaaggtcacgatgggttgtaccaaggattgagcacagccactaaagatacctatgatgcgctccacatgcaggccctgccgccaaga

SEQ ID NO: 25096 - DNA, 873 bp, synthetic construct
  source 1..873: mol_type = other DNA
gaggtggccgtgttcgagcctagcgaggccgagatcagccacacccagaaagccaccctcgtgtgcctggctaccggcttctaccccgaccatgtggaactgtcttggtgggtcaacggcaaagaggtgcacagcggcgtgtctaccgacccccagccactgaaagaacagcccgccctgaacgacagccggtactgcctgagcagcagactgagagtgtccgccaccttctggcagaacccccggaaccacttcagatgccaggtgcagttctacggcctgagcgagaacgacgagtggacccaggacagagccaagcccgtgacccagatcgtgtctgccgaagcctggggcagacccgaggacacattcttcccaagccccgagagcagctgcgacgtgaagctggtggaaaagagcttcgagacagacaccaacctgaacttccagaacctgagcgtgatcggcttcagaatcctgctgctgaaagtggccggctttaacctgctgatgaccctgcggctgtggtccagccgggttaagttttccagatccgcagacgcacccgcttaccaacaagggcagaaccaactctacaatgaacttaatttggggcggagggaagagtacgacgttctggacaaaaggaggggacgagatcccgagatgggcggaaagcctcagcgaaggaagaatccgcaagaggggctttataacgaactccagaaagataaaatggcagaagcctatagtgagattgggatgaagggagaaaggaggaggggtaaaggtcacgatgggttgtaccaaggattgagcacagccactaaagatacctatgatgcgctccacatgcaggccctgccgccaaga

SEQ ID NO: 25097 - DNA, 903 bp, synthetic construct
  source 1..903: mol_type = other DNA
gaggtggccgtgttcgagcctagcgaggccgagatcagccacacccagaaagccaccctcgtgtgcctggctaccggcttctaccccgaccatgtggaactgtcttggtgggtcaacggcaaagaggtgcacagcggcgtgtctaccgacccccagccactgaaagaacagcccgccctgaacgacagccggtactgcctgagcagcagactgagagtgtccgccaccttctggcagaacccccggaaccacttcagatgccaggtgcagttctacggcctgagcgagaacgacgagtggacccaggacagagccaagcccgtgacccagatcgtgtctgccgaagcctggggcagattcccacccatcaagaccgatgtgattacaatggaccccaaggacaactgctccaaggacgccaacgataccctgctgctccagctgaccaacaccagcgcctactacatgtacttgttgctgctgctgaagtccgtggtgtacttcgccatcatcacatgctgcctgctgcggagaaccgccttctgctgcaacggcgagaagtctcgggttaagttttccagatccgcagacgcacccgcttaccaacaagggcagaaccaactctacaatgaacttaatttggggcggagggaagagtacgacgttctggacaaaaggaggggacgagatcccgagatgggcggaaagcctcagcgaaggaagaatccgcaagaggggctttataacgaactccagaaagataaaatggcagaagcctatagtgagattgggatgaagggagaaaggaggaggggtaaaggtcacgatgggttgtaccaaggattgagcacagccactaaagatacctatgatgcgctccacatgcaggccctgccgccaaga

SEQ ID NO: 25098 - DNA, 897 bp, synthetic construct
  source 1..897: mol_type = other DNA
gaggtggccgtgttcgagcctagcgaggccgagatcagccacacccagaaagccaccctcgtgtgcctggctaccggcttctaccccgaccatgtggaactgtcttggtgggtcaacggcaaagaggtgcacagcggcgtgtctaccgacccccagccactgaaagaacagcccgccctgaacgacagccggtactgcctgagcagcagactgagagtgtccgccaccttctggcagaacccccggaaccacttcagatgccaggtgcagttctacggcctgagcgagaacgacgagtggacccaggacagagccaagcccgtgacccagatcgtgtctgccgaagcctggggcagacccatcaagaccgatgtgattacaatggaccccaaggacaactgctccaaggacgccaacgataccctgctgctccagctgaccaacaccagcgcctactacatgtacttgttgctgctgctgaagtccgtggtgtacttcgccatcatcacatgctgcctgctgcggagaaccgccttctgctgcaacggcgagaagtctcgggttaagttttccagatccgcagacgcacccgcttaccaacaagggcagaaccaactctacaatgaacttaatttggggcggagggaagagtacgacgttctggacaaaaggaggggacgagatcccgagatgggcggaaagcctcagcgaaggaagaatccgcaagaggggctttataacgaactccagaaagataaaatggcagaagcctatagtgagattgggatgaagggagaaaggaggaggggtaaaggtcacgatgggttgtaccaaggattgagcacagccactaaagatacctatgatgcgctccacatgcaggccctgccgccaaga

SEQ ID NO: 25099 - DNA, 873 bp, synthetic construct
  source 1..873: mol_type = other DNA
gaggtggccgtgttcgagcctagcgaggccgagatcagccacacccagaaagccaccctcgtgtgcctggctaccggcttctaccccgaccatgtggaactgtcttggtgggtcaacggcaaagaggtgcacagcggcgtgtctaccgacccccagccactgaaagaacagcccgccctgaacgacagccggtactgcctgagcagcagactgagagtgtccgccaccttctggcagaacccccggaaccacttcagatgccaggtgcagttctacggcctgagcgagaacgacgagtggacccaggacagagccaagcccgtgacccagatcgtgtctgccgaagcctggggcagaatggaccccaaggacaactgctccaaggacgccaacgataccctgctgctccagctgaccaacaccagcgcctactacatgtacttgttgctgctgctgaagtccgtggtgtacttcgccatcatcacatgctgcctgctgcggagaaccgccttctgctgcaacggcgagaagtctcgggttaagttttccagatccgcagacgcacccgcttaccaacaagggcagaaccaactctacaatgaacttaatttggggcggagggaagagtacgacgttctggacaaaaggaggggacgagatcccgagatgggcggaaagcctcagcgaaggaagaatccgcaagaggggctttataacgaactccagaaagataaaatggcagaagcctatagtgagattgggatgaagggagaaaggaggaggggtaaaggtcacgatgggttgtaccaaggattgagcacagccactaaagatacctatgatgcgctccacatgcaggccctgccgccaaga

SEQ ID NO: 25100 - DNA, 897 bp, synthetic construct; identical to SEQ ID NO: 25098
  source 1..897: mol_type = other DNA

SEQ ID NO: 25101 - DNA, 855 bp, synthetic construct
  source 1..855: mol_type = other DNA
gaggtggccgtgttcgagcctagcgaggccgagatcagccacacccagaaagccaccctcgtgtgcctggctaccggcttctaccccgaccatgtggaactgtcttggtgggtcaacggcaaagaggtgcacagcggcgtgtctaccgacccccagccactgaaagaacagcccgccctgaacgacagccggtactgcctgagcagcagactgagagtgtccgccaccttctggcagaacccccggaaccacttcagatgccaggtgcagttctacggcctgagcgagaacgacgagtggacccaggacagagccaagcccgtgacccagatcgtgtctgccgaagcctggggcagatgctccaaggacgccaacgataccctgctgctccagctgaccaacaccagcgcctactacatgtacttgttgctgctgctgaagtccgtggtgtacttcgccatcatcacatgctgcctgctgcggagaaccgccttctgctgcaacggcgagaagtctcgggttaagttttccagatccgcagacgcacccgcttaccaacaagggcagaaccaactctacaatgaacttaatttggggcggagggaagagtacgacgttctggacaaaaggaggggacgagatcccgagatgggcggaaagcctcagcgaaggaagaatccgcaagaggggctttataacgaactccagaaagataaaatggcagaagcctatagtgagattgggatgaagggagaaaggaggaggggtaaaggtcacgatgggttgtaccaaggattgagcacagccactaaagatacctatgatgcgctccacatgcaggccctgccgccaaga

SEQ ID NO: 25102 - DNA, 900 bp, synthetic construct
  source 1..900: mol_type = other DNA
gaggtggccgtgttcgagcctagcgaggccgagatcagccacacccagaaagccaccctcgtgtgcctggctaccggcttctaccccgaccatgtggaactgtcttggtgggtcaacggcaaagaggtgcacagcggcgtgtctaccgacccccagccactgaaagaacagcccgccctgaacgacagccggtactgcctgagcagcagactgagagtgtccgccaccttctggcagaacccccggaaccacttcagatgccaggtgcagttctacggcctgagcgagaacgacgagtggacccaggacagagccaagcccgtgacccagatcgtgtctgccgaagcctggggcagagaagtgaaaaccgactccaccgaccacgtgaagcccaaagagacagagaacaccaagcagcccagcaagagctgccacaagcccaaggccatcgtgcacaccgagaaagtgaacatgatgagcctgaccgtgctgggcctgcggatgctgttcgccaaaaccgtggccgtgaacttcctgctgaccgccaagctgttcttcctccgggttaagttttccagatccgcagacgcacccgcttaccaacaagggcagaaccaactctacaatgaacttaatttggggcggagggaagagtacgacgttctggacaaaaggaggggacgagatcccgagatgggcggaaagcctcagcgaaggaagaatccgcaagaggggctttataacgaactccagaaagataaaatggcagaagcctatagtgagattgggatgaagggagaaaggaggaggggtaaaggtcacgatgggttgtaccaaggattgagcacagccactaaagatacctatgatgcgctccacatgcaggccctgccgccaaga

SEQ ID NO: 25103 - DNA, 879 bp, synthetic construct
  source 1..879: mol_type = other DNA
gaggtggccgtgttcgagcctagcgaggccgagatcagccacacccagaaagccaccctcgtgtgcctggctaccggcttctaccccgaccatgtggaactgtcttggtgggtcaacggcaaagaggtgcacagcggcgtgtctaccgacccccagccactgaaagaacagcccgccctgaacgacagccggtactgcctgagcagcagactgagagtgtccgccaccttctggcagaacccccggaaccacttcagatgccaggtgcagttctacggcctgagcgagaacgacgagtggacccaggacagagccaagcccgtgacccagatcgtgtctgccgaagcctggggcagagaccacgtgaagcccaaagagacagagaacaccaagcagcccagcaagagctgccacaagcccaaggccatcgtgcacaccgagaaagtgaacatgatgagcctgaccgtgctgggcctgcggatgctgttcgccaaaaccgtggccgtgaacttcctgctgaccgccaagctgttcttcctccgggttaagttttccagatccgcagacgcacccgcttaccaacaagggcagaaccaactctacaatgaacttaatttggggcggagggaagagtacgacgttctggacaaaaggaggggacgagatcccgagatgggcggaaagcctcagcgaaggaagaatccgcaagaggggctttataacgaactccagaaagataaaatggcagaagcctatagtgagattgggatgaagggagaaaggaggaggggtaaaggtcacgatgggttgtaccaaggattgagcacagccactaaagatacctatgatgcgctccacatgcaggccctgccgccaaga

SEQ ID NO: 25104 - DNA, 885 bp, synthetic construct
  source 1..885: mol_type = other DNA
gaggtggccgtgttcgagcctagcgaggccgagatcagccacacccagaaagccaccctcgtgtgcctggctaccggcttctaccccgaccatgtggaactgtcttggtgggtcaacggcaaagaggtgcacagcggcgtgtctaccgacccccagccactgaaagaacagcccgccctgaacgacagccggtactgcctgagcagcagactgagagtgtccgccaccttctggcagaacccccggaaccacttcagatgccaggtgcagttctacggcctgagcgagaacgacgagtggacccaggacagagccaagcccgtgacccagatcgtgtctgccgaagcctggggcagagccgattgcatccccgaggacacattcttcccaagccccgagagcagctgcgacgtgaagctggtggaaaagagcttcgagacagacaccaacctgaacttccagaacctgagcgtgatcggcttcagaatcctgctgctgaaagtggccggctttaacctgctgatgaccctgcggctgtggtccagccgggttaagttttccagatccgcagacgcacccgcttaccaacaagggcagaaccaactctacaatgaacttaatttggggcggagggaagagtacgacgttctggacaaaaggaggggacgagatcccgagatgggcggaaagcctcagcgaaggaagaatccgcaagaggggctttataacgaactccagaaagataaaatggcagaagcctatagtgagattgggatgaagggagaaaggaggaggggtaaaggtcacgatgggttgtaccaaggattgagcacagccactaaagatacctatgatgcgctccacatgcaggccctgccgccaaga

SEQ ID NO: 25105 - DNA, 855 bp, synthetic construct
  source 1..855: mol_type = other DNA
gaggtggccgtgttcgagcctagcgaggccgagatcagccacacccagaaagccaccctcgtgtgcctggctaccggcttctaccccgaccatgtggaactgtcttggtgggtcaacggcaaagaggtgcacagcggcgtgtctaccgacccccagccactgaaagaacagcccgccctgaacgacagccggtactgcctgagcagcagactgagagtgtccgccaccttctggcagaacccccggaaccacttcagatgccaggtgcagttctacggcctgagcgagaacgacgagtggacccaggacagagccaagcccgtgacccagatcgtgtctgccgaagcctggggcagagccgattgcgagagcagctgcgacgtgaagctggtggaaaagagcttcgagacagacaccaacctgaacttccagaacctgagcgtgatcggcttcagaatcctgctgctgaaagtggccggctttaacctgctgatgaccctgcggctgtggtccagccgggttaagttttccagatccgcagacgcacccgcttaccaacaagggcagaaccaactctacaatgaacttaatttggggcggagggaagagtacgacgttctggacaaaaggaggggacgagatcccgagatgggcggaaagcctcagcgaaggaagaatccgcaagaggggctttataacgaactccagaaagataaaatggcagaagcctatagtgagattgggatgaagggagaaaggaggaggggtaaaggtcacgatgggttgtaccaaggattgagcacagccactaaagatacctatgatgcgctccacatgcaggccctgccgccaaga

SEQ ID NO: 25106 - DNA, 882 bp, synthetic construct
  source 1..882: mol_type = other DNA
gaggtggccgtgttcgagcctagcgaggccgagatcagccacacccagaaagccaccctcgtgtgcctggctaccggcttctaccccgaccatgtggaactgtcttggtgggtcaacggcaaagaggtgcacagcggcgtgtctaccgacccccagccactgaaagaacagcccgccctgaacgacagccggtactgcctgagcagcagactgagagtgtccgccaccttctggcagaacccccggaaccacttcagatgccaggtgcagttctacggcctgagcgagaacgacgagtggacccaggacagagccaagcccgtgacccagatcgtgtctgccgaagcctggggcagagccgattgccccgaggacacattcttcccaagccccgagagcagctgcgacgtgaagctggtggaaaagagcttcgagacagacaccaacctgaacttccagaacctgagcgtgatcggcttcagaatcctgctgctgaaagtggccggctttaacctgctgatgaccctgcggctgtggtccagccgggttaagttttccagatccgcagacgcacccgcttaccaacaagggcagaaccaactctacaatgaacttaatttggggcggagggaagagtacgacgttctggacaaaaggaggggacgagatcccgagatgggcggaaagcctcagcgaaggaagaatccgcaagaggggctttataacgaactccagaaagataaaatggcagaagcctatagtgagattgggatgaagggagaaaggaggaggggtaaaggtcacgatgggttgtaccaaggattgagcacagccactaaagatacctatgatgcgctccacatgcaggccctgccgccaaga

SEQ ID NO: 25107 - DNA, 912 bp, synthetic construct
  source 1..912: mol_type = other DNA
gaggtggccgtgttcgagcctagcgaggccgagatcagccacacccagaaagccaccctcgtgtgcctggctaccggcttctaccccgaccatgtggaactgtcttggtgggtcaacggcaaagaggtgcacagcggcgtgtctaccgacccccagccactgaaagaacagcccgccctgaacgacagccggtactgcctgagcagcagactgagagtgtccgccaccttctggcagaacccccggaaccacttcagatgccaggtgcagttctacggcctgagcgagaacgacgagtggacccaggacagagccaagcccgtgacccagatcgtgtctgccgaagcctggggcagagccgattgcttcccacccatcaagaccgatgtgattacaatggaccccaaggacaactgctccaaggacgccaacgataccctgctgctccagctgaccaacaccagcgcctactacatgtacttgttgctgctgctgaagtccgtggtgtacttcgccatcatcacatgctgcctgctgcggagaaccgccttctgctgcaacggcgagaagtctcgggttaagttttccagatccgcagacgcacccgcttaccaacaagggcagaaccaactctacaatgaacttaatttggggcggagggaagagtacgacgttctggacaaaaggaggggacgagatcccgagatgggcggaaagcctcagcgaaggaagaatccgcaagaggggctttataacgaactccagaaagataaaatggcagaagcctatagtgagattgggatgaagggagaaaggaggaggggtaaaggtcacgatgggttgtaccaaggattgagcacagccactaaagatacctatgatgcgctccacatgcaggccctgccgccaaga

SEQ ID NO: 25108 - DNA, 906 bp, synthetic construct
  source 1..906: mol_type = other DNA
gaggtggccgtgttcgagcctagcgaggccgagatcagccacacccagaaagccaccctcgtgtgcctggctaccggcttctaccccgaccatgtggaactgtcttggtgggtcaacggcaaagaggtgcacagcggcgtgtctaccgacccccagccactgaaagaacagcccgccctgaacgacagccggtactgcctgagcagcagactgagagtgtccgccaccttctggcagaacccccggaaccacttcagatgccaggtgcagttctacggcctgagcgagaacgacgagtggacccaggacagagccaagcccgtgacccagatcgtgtctgccgaagcctggggcagagccgattgccccatcaagaccgatgtgattacaatggaccccaaggacaactgctccaaggacgccaacgataccctgctgctccagctgaccaacaccagcgcctactacatgtacttgttgctgctgctgaagtccgtggtgtacttcgccatcatcacatgctgcctgctgcggagaaccgccttctgctgcaacggcgagaagtctcgggttaagttttccagatccgcagacgcacccgcttaccaacaagggcagaaccaactctacaatgaacttaatttggggcggagggaagagtacgacgttctggacaaaaggaggggacgagatcccgagatgggcggaaagcctcagcgaaggaagaatccgcaagaggggctttataacgaactccagaaagataaaatggcagaagcctatagtgagattgggatgaagggagaaaggaggaggggtaaaggtcacgatgggttgtaccaaggattgagcacagccactaaagatacctatgatgcgctccacatgcaggccctgccgccaaga

SEQ ID NO: 25109 - DNA, 882 bp, synthetic construct
  source 1..882: mol_type = other DNA
gaggtggccgtgttcgagcctagcgaggccgagatcagccacacccagaaagccaccctcgtgtgcctggctaccggcttctaccccgaccatgtggaactgtcttggtgggtcaacggcaaagaggtgcacagcggcgtgtctaccgacccccagccactgaaagaacagcccgccctgaacgacagccggtactgcctgagcagcagactgagagtgtccgccaccttctggcagaacccccggaaccacttcagatgccaggtgcagttctacggcctgagcgagaacgacgagtggacccaggacagagccaagcccgtgacccagatcgtgtctgccgaagcctggggcagagccgattgcatggaccccaaggacaactgctccaaggacgccaacgataccctgctgctccagctgaccaacaccagcgcctactacatgtacttgttgctgctgctgaagtccgtggtgtacttcgccatcatcacatgctgcctgctgcggagaaccgccttctgctgcaacggcgagaagtctcgggttaagttttccagatccgcagacgcacccgcttaccaacaagggcagaaccaactctacaatgaacttaatttggggcggagggaagagtacgacgttctggacaaaaggaggggacgagatcccgagatgggcggaaagcctcagcgaaggaagaatccgcaagaggggctttataacgaactccagaaagataaaatggcagaagcctatagtgagattgggatgaagggagaaaggaggaggggtaaaggtcacgatgggttgtaccaaggattgagcacagccactaaagatacctatgatgcgctccacatgcaggccctgccgccaaga

SEQ ID NO: 25110 - DNA, 906 bp, synthetic construct; identical to SEQ ID NO: 25108
  source 1..906: mol_type = other DNA

SEQ ID NO: 25111 - DNA, 864 bp, synthetic construct
  source 1..864: mol_type = other DNA
gaggtggccgtgttcgagcctagcgaggccgagatcagccacacccagaaagccaccctcgtgtgcctggctaccggcttctaccccgaccatgtggaactgtcttggtgggtcaacggcaaagaggtgcacagcggcgtgtctaccgacccccagccactgaaagaacagcccgccctgaacgacagccggtactgcctgagcagcagactgagagtgtccgccaccttctggcagaacccccggaaccacttcagatgccaggtgcagttctacggcctgagcgagaacgacgagtggacccaggacagagccaagcccgtgacccagatcgtgtctgccgaagcctggggcagagccgattgctgctccaaggacgccaacgataccctgctgctccagctgaccaacaccagcgcctactacatgtacttgttgctgctgctgaagtccgtggtgtacttcgccatcatcacatgctgcctgctgcggagaaccgccttctgctgcaacggcgagaagtctcgggttaagttttccagatccgcagacgcacccgcttaccaacaagggcagaaccaactctacaatgaacttaatttggggcggagggaagagtacgacgttctggacaaaaggaggggacgagatcccgagatgggcggaaagcctcagcgaaggaagaatccgcaagaggggctttataacgaactccagaaagataaaatggcagaagcctatagtgagattgggatgaagggagaaaggaggaggggtaaaggtcacgatgggttgtaccaaggattgagcacagccactaaagatacctatgatgcgctccacatgcaggccctgccgccaaga

SEQ ID NO: 25112 - DNA, 909 bp, synthetic construct
  source 1..909: mol_type = other DNA
gaggtggccgtgttcgagcctagcgaggccgagatcagccacacccagaaagccaccctcgtgtgcctggctaccggcttctaccccgaccatgtggaactgtcttggtgggtcaacggcaaagaggtgcacagcggcgtgtctaccgacccccagccactgaaagaacagcccgccctgaacgacagccggtactgcctgagcagcagactgagagtgtccgccaccttctggcagaacccccggaaccacttcagatgccaggtgcagttctacggcctgagcgagaacgacgagtggacccaggacagagccaagcccgtgacccagatcgtgtctgccgaagcctggggcagagccgattgcgaagtgaaaaccgactccaccgaccacgtgaagcccaaagagacagagaacaccaagcagcccagcaagagctgccacaagcccaaggccatcgtgcacaccgagaaagtgaacatgatgagcctgaccgtgctgggcctgcggatgctgttcgccaaaaccgtggccgtgaacttcctgctgaccgccaagctgttcttcctccgggttaagttttccagatccgcagacgcacccgcttaccaacaagggcagaaccaactctacaatgaacttaatttggggcggagggaagagtacgacgttctggacaaaaggaggggacgagatcccgagatgggcggaaagcctcagcgaaggaagaatccgcaagaggggctttataacgaactccagaaagataaaatggcagaagcctatagtgagattgggatgaagggagaaaggaggaggggtaaaggtcacgatgggttgtaccaaggattgagcacagccactaaagatacctatgatgcgctccacatgcaggccctgccgccaaga

SEQ ID NO: 25113 - DNA, 888 bp, synthetic construct
  source 1..888: mol_type = other DNA
gaggtggccgtgttcgagcctagcgaggccgagatcagccacacccagaaagccaccctcgtgtgcctggctaccggcttctaccccgaccatgtggaactgtcttggtgggtcaacggcaaagaggtgcacagcggcgtgtctaccgacccccagccactgaaagaacagcccgccctgaacgacagccggtactgcctgagcagcagactgagagtgtccgccaccttctggcagaacccccggaaccacttcagatgccaggtgcagttctacggcctgagcgagaacgacgagtggacccaggacagagccaagcccgtgacccagatcgtgtctgccgaagcctggggcagagccgattgcgaccacgtgaagcccaaagagacagagaacaccaagcagcccagcaagagctgccacaagcccaaggccatcgtgcacaccgagaaagtgaacatgatgagcctgaccgtgctgggcctgcggatgctgttcgccaaaaccgtggccgtgaacttcctgctgaccgccaagctgttcttcctccgggttaagttttccagatccgcagacgcacccgcttaccaacaagggcagaaccaactctacaatgaacttaatttggggcggagggaagagtacgacgttctggacaaaaggaggggacgagatcccgagatgggcggaaagcctcagcgaaggaagaatccgcaagaggggctttataacgaactccagaaagataaaatggcagaagcctatagtgagattgggatgaagggagaaaggaggaggggtaaaggtcacgatgggttgtaccaaggattgagcacagccactaaagatacctatgatgcgctccacatgcaggccctgccgccaaga

SEQ ID NO: 25114 - DNA, 846 bp, synthetic construct
  source 1..846: mol_type = other DNA
gaggtggccgtgttcgagcctagcgaggccgagatcagccacacccagaaagccaccctcgtgtgcctggctaccggcttctaccccgaccatgtggaactgtcttggtgggtcaacggcaaagaggtgcacagcggcgtgtctaccgacccccagccactgaaagaacagcccgccctgaacgacagccggtactgcctgagcagcagactgagagtgtccgccaccttctggcagaacccccggaaccacttcagatgccaggtgcagttctacggcctgagcgagaacgacgagtggacccaggacagagccaagcccgtgaccatccccgaggacacattcttcccaagccccgagagcagctgcgacgtgaagctggtggaaaagagcttcgagacagacaccaacctgaacttccagaacctgagcgtgatcggcttcagaatcctgctgctgaaagtggccggctttaacctgctgatgaccctgcggctgtggtccagccgggttaagttttccagatccgcagacgcacccgcttaccaacaagggcagaaccaactctacaatgaacttaatttggggcggagggaagagtacgacgttctggacaaaaggaggggacgagatcccgagatgggcggaaagcctcagcgaaggaagaatccgcaagaggggctttataacgaactccagaaagataaaatggcagaagcctatagtgagattgggatgaagggagaaaggaggaggggtaaaggtcacgatgggttgtaccaaggattgagcacagccactaaagatacctatgatgcgctccacatgcaggccctgccgccaaga

SEQ ID NO: 25115 - DNA, 816 bp, synthetic construct
  source 1..816: mol_type = other DNA
gaggtggccgtgttcgagcctagcgaggccgagatcagccacacccagaaagccaccctcgtgtgcctggctaccggcttctaccccgaccatgtggaactgtcttggtgggtcaacggcaaagaggtgcacagcggcgtgtctaccgacccccagccactgaaagaacagcccgccctgaacgacagccggtactgcctgagcagcagactgagagtgtccgccaccttctggcagaacccccggaaccacttcagatgccaggtgcagttctacggcctgagcgagaacgacgagtggacccaggacagagccaagcccgtgaccgagagcagctgcgacgtgaagctggtggaaaagagcttcgagacagacaccaacctgaacttccagaacctgagcgtgatcggcttcagaatcctgctgctgaaagtggccggctttaacctgctgatgaccctgcggctgtggtccagccgggttaagttttccagatccgcagacgcacccgcttaccaacaagggcagaaccaactctacaatgaacttaatttggggcggagggaagagtacgacgttctggacaaaaggaggggacgagatcccgagatgggcggaaagcctcagcgaaggaagaatccgcaagaggggctttataacgaactccagaaagataaaatggcagaagcctatagtgagattgggatgaagggagaaaggaggaggggtaaaggtcacgatgggttgtaccaaggattgagcacagccactaaagatacctatgatgcgctccacatgcaggccctgccgccaaga

SEQ ID NO: 25116 - DNA, 843 bp, synthetic construct
  source 1..843: mol_type = other DNA
gaggtggccgtgttcgagcctagcgaggccgagatcagccacacccagaaagccaccctcgtgtgcctggctaccggcttctaccccgaccatgtggaactgtcttggtgggtcaacggcaaagaggtgcacagcggcgtgtctaccgacccccagccactgaaagaacagcccgccctgaacgacagccggtactgcctgagcagcagactgagagtgtccgccaccttctggcagaacccccggaaccacttcagatgccaggtgcagttctacggcctgagcgagaacgacgagtggacccaggacagagccaagcccgtgacccccgaggacacattcttcccaagccccgagagcagctgcgacgtgaagctggtggaaaagagcttcgagacagacaccaacctgaacttccagaacctgagcgtgatcggcttcagaatcctgctgctgaaagtggccggctttaacctgctgatgaccctgcggctgtggtccagccgggttaagttttccagatccgcagacgcacccgcttaccaacaagggcagaaccaactctacaatgaacttaatttggggcggagggaagagtacgacgttctggacaaaaggaggggacgagatcccgagatgggcggaaagcctcagcgaaggaagaatccgcaagaggggctttataacgaactccagaaagataaaatggcagaagcctatagtgagattgggatgaagggagaaaggaggaggggtaaaggtcacgatgggttgtaccaaggattgagcacagccactaaagatacctatgatgcgctccacatgcaggccctgccgccaaga

SEQ ID NO: 25117 - DNA, 873 bp, synthetic construct
  source 1..873: mol_type = other DNA
gaggtggccgtgttcgagcctagcgaggccgagatcagccacacccagaaagccaccctcgtgtgcctggctaccggcttctaccccgaccatgtggaactgtcttggtgggtcaacggcaaagaggtgcacagcggcgtgtctaccgacccccagccactgaaagaacagcccgccctgaacgacagccggtactgcctgagcagcagactgagagtgtccgccaccttctggcagaacccccggaaccacttcagatgccaggtgcagttctacggcctgagcgagaacgacgagtggacccaggacagagccaagcccgtgaccttcccacccatcaagaccgatgtgattacaatggaccccaaggacaactgctccaaggacgccaacgataccctgctgctccagctgaccaacaccagcgcctactacatgtacttgttgctgctgctgaagtccgtggtgtacttcgccatcatcacatgctgcctgctgcggagaaccgccttctgctgcaacggcgagaagtctcgggttaagttttccagatccgcagacgcacccgcttaccaacaagggcagaaccaactctacaatgaacttaatttggggcggagggaagagtacgacgttctggacaaaaggaggggacgagatcccgagatgggcggaaagcctcagcgaaggaagaatccgcaagaggggctttataacgaactccagaaagataaaatggcagaagcctatagtgagattgggatgaagggagaaaggaggaggggtaaaggtcacgatgggttgtaccaaggattgagcacagccactaaagatacctatgatgcgctccacatgcaggccctgccgccaaga

SEQ ID NO: 25118 - DNA, 867 bp, synthetic construct
  source 1..867: mol_type = other DNA
gaggtggccgtgttcgagcctagcgaggccgagatcagccacacccagaaagccaccctcgtgtgcctggctaccggcttctaccccgaccatgtggaactgtcttggtgggtcaacggcaaagaggtgcacagcggcgtgtctaccgacccccagccactgaaagaacagcccgccctgaacgacagccggtactgcctgagcagcagactgagagtgtccgccaccttctggcagaacccccggaaccacttcagatgccaggtgcagttctacggcctgagcgagaacgacgagtggacccaggacagagccaagcccgtgacccccatcaagaccgatgtgattacaatggaccccaaggacaactgctccaaggacgccaacgataccctgctgctccagctgaccaacaccagcgcctactacatgtacttgttgctgctgctgaagtccgtggtgtacttcgccatcatcacatgctgcctgctgcggagaaccgccttctgctgcaacggcgagaagtctcgggttaagttttccagatccgcagacgcacccgcttaccaacaagggcagaaccaactctacaatgaacttaatttggggcggagggaagagtacgacgttctggacaaaaggaggggacgagatcccgagatgggcggaaagcctcagcgaaggaagaatccgcaagaggggctttataacgaactccagaaagataaaatggcagaagcctatagtgagattgggatgaagggagaaaggaggaggggtaaaggtcacgatgggttgtaccaaggattgagcacagccactaaagatacctatgatgcgctccacatgcaggccctgccgccaaga

SEQ ID NO: 25119 - DNA, 843 bp, synthetic construct
  source 1..843: mol_type = other DNA
gaggtggccgtgttcgagcctagcgaggccgagatcagccacacccagaaagccaccctcgtgtgcctggctaccggcttctaccccgaccatgtggaactgtcttggtgggtcaacggcaaagaggtgcacagcggcgtgtctaccgacccccagccactgaaagaacagcccgccctgaacgacagccggtactgcctgagcagcagactgagagtgtccgccaccttctggcagaacccccggaaccacttcagatgccaggtgcagttctacggcctgagcgagaacgacgagtggacccaggacagagccaagcccgtgaccatggaccccaaggacaactgctccaaggacgccaacgataccctgctgctccagctgaccaacaccagcgcctactacatgtacttgttgctgctgctgaagtccgtggtgtacttcgccatcatcacatgctgcctgctgcggagaaccgccttctgctgcaacggcgagaagtctcgggttaagttttccagatccgcagacgcacccgcttaccaacaagggcagaaccaactctacaatgaacttaatttggggcggagggaagagtacgacgttctggacaaaaggaggggacgagatcccgagatgggcggaaagcctcagcgaaggaagaatccgcaagaggggctttataacgaactccagaaagataaaatggcagaagcctatagtgagattgggatgaagggagaaaggaggaggggtaaaggtcacgatgggttgtaccaaggattgagcacagccactaaagatacctatgatgcgctccacatgcaggccctgccgccaaga

SEQ ID NO: 25120 - DNA, 867 bp, synthetic construct; identical to SEQ ID NO: 25118
  source 1..867: mol_type = other DNA

SEQ ID NO: 25121 - DNA, 825 bp, synthetic construct
  source 1..825: mol_type = other DNA
gaggtggccgtgttcgagcctagcgaggccgagatcagccacacccagaaagccaccctcgtgtgcctggctaccggcttctaccccgaccatgtggaactgtcttggtgggtcaacggcaaagaggtgcacagcggcgtgtctaccgacccccagccactgaaagaacagcccgccctgaacgacagccggtactgcctgagcagcagactgagagtgtccgccaccttctggcagaacccccggaaccacttcagatgccaggtgcagttctacggcctgagcgagaacgacgagtggacccaggacagagccaagcccgtgacctgctccaaggacgccaacgataccctgctgctccagctgaccaacaccagcgcctactacatgtacttgttgctgctgctgaagtccgtggtgtacttcgccatcatcacatgctgcctgctgcggagaaccgccttctgctgcaacggcgagaagtctcgggttaagttttccagatccgcagacgcacccgcttaccaacaagggcagaaccaactctacaatgaacttaatttggggcggagggaagagtacgacgttctggacaaaaggaggggacgagatcccgagatgggcggaaagcctcagcgaaggaagaatccgcaagaggggctttataacgaactccagaaagataaaatggcagaagcctatagtgagattgggatgaagggagaaaggaggaggggtaaaggtcacgatgggttgtaccaaggattgagcacagccactaaagatacctatgatgcgctccacatgcaggccctgccgccaaga

SEQ ID NO: 25122 - DNA, 870 bp, synthetic construct
  source 1..870: mol_type = other DNA
gaggtggccgtgttcgagcctagcgaggccgagatcagccacacccagaaagccaccctcgtgtgcctggctaccggcttctaccccgaccatgtggaactgtcttggtgggtcaacggcaaagaggtgcacagcggcgtgtctaccgacccccagccactgaaagaacagcccgccctgaacgacagccggtactgcctgagcagcagactgagagtgtccgccaccttctggcagaacccccggaaccacttcagatgccaggtgcagttctacggcctgagcgagaacgacgagtggacccaggacagagccaagcccgtgaccgaagtgaaaaccgactccaccgaccacgtgaagcccaaagagacagagaacaccaagcagcccagcaagagctgccacaagcccaaggccatcgtgcacaccgagaaagtgaacatgatgagcctgaccgtgctgggcctgcggatgctgttcgccaaaaccgtggccgtgaacttcctgctgaccgccaagctgttcttcctccgggttaagttttccagatccgcagacgcacccgcttaccaacaagggcagaaccaactctacaatgaacttaatttggggcggagggaagagtacgacgttctggacaaaaggaggggacgagatcccgagatgggcggaaagcctcagcgaaggaagaatccgcaagaggggctttataacgaactccagaaagataaaatggcagaagcctatagtgagattgggatgaagggagaaaggaggaggggtaaaggtcacgatgggttgtaccaaggattgagcacagccactaaagatacctatgatgcgctccacatgcaggccctgccgccaaga

SEQ ID NO: 25123 - DNA, 849 bp, synthetic construct
  source 1..849: mol_type = other DNA
gaggtggccgtgttcgagcctagcgaggccgagatcagccacacccagaaagccaccctcgtgtgcctggctaccggcttctaccccgaccatgtggaactgtcttggtgggtcaacggcaaagaggtgcacagcggcgtgtctaccgacccccagccactgaaagaacagcccgccctgaacgacagccggtactgcctgagcagcagactgagagtgtccgccaccttctggcagaacccccggaaccacttcagatgccaggtgcagttctacggcctgagcgagaacgacgagtggacccaggacagagccaagcccgtgaccgaccacgtgaagcccaaagagacagagaacaccaagcagcccagcaagagctgccacaagcccaaggccatcgtgcacaccgagaaagtgaacatgatgagcctgaccgtgctgggcctgcggatgctgttcgccaaaaccgtggccgtgaacttcctgctgaccgccaagctgttcttcctccgggttaagttttccagatccgcagacgcacccgcttaccaacaagggcagaaccaactctacaatgaacttaatttggggcggagggaagagtacgacgttctggacaaaaggaggggacgagatcccgagatgggcggaaagcctcagcgaaggaagaatccgcaagaggggctttataacgaactccagaaagataaaatggcagaagcctatagtgagattgggatgaagggagaaaggaggaggggtaaaggtcacgatgggttgtaccaaggattgagcacagccactaaagatacctatgatgcgctccacatgcaggccctgccgccaaga

SEQ ID NO: 25124 - DNA, 870 bp, synthetic construct; identical to SEQ ID NO: 25084
  source 1..870: mol_type = other DNA

SEQ ID NO: 25125 - DNA, 840 bp, synthetic construct; identical to SEQ ID NO: 25085
  source 1..840: mol_type = other DNA

SEQ ID NO: 25126 - DNA, 867 bp, synthetic construct; identical to SEQ ID NO: 25086
  source 1..867: mol_type = other DNA

SEQ ID NO: 25127 - DNA, 897 bp, synthetic construct; identical to SEQ ID NO: 25087
  source 1..897: mol_type = other DNA

SEQ ID NO: 25128 - DNA, 891 bp, synthetic construct; identical to SEQ ID NO: 25088
  source 1..891: mol_type = other DNA

SEQ ID NO: 25129 - DNA, 867 bp, synthetic construct; identical to SEQ ID NO: 25089
  source 1..867: mol_type = other DNA

SEQ ID NO: 25130 - DNA, 891 bp, synthetic construct; identical to SEQ ID NO: 25088
  source 1..891: mol_type = other DNA

SEQ ID NO: 25131 - DNA, 849 bp, synthetic construct; identical to SEQ ID NO: 25091
  source 1..849: mol_type = other DNA

SEQ ID NO: 25132 - DNA, 894 bp, synthetic construct; identical to SEQ ID NO: 25092
  source 1..894: mol_type = other DNA

SEQ ID NO: 25133 - DNA, 873 bp, synthetic construct; identical to SEQ ID NO: 25093
  source 1..873: mol_type = other DNA

SEQ ID NO: 25134 - DNA, 849 bp, synthetic construct; identical to SEQ ID NO: 24919
  source 1..849: mol_type = other DNA

SEQ ID NO: 25135 - DNA, 819 bp, synthetic construct; identical to SEQ ID NO: 24920
  source 1..819: mol_type = other DNA

SEQ ID NO: 25136 - DNA, 846 bp, synthetic construct; identical to SEQ ID NO: 24921
  source 1..846: mol_type = other DNA

SEQ ID NO: 25137 - DNA, 876 bp, synthetic construct; identical to SEQ ID NO: 24922
  source 1..876: mol_type = other DNA

SEQ ID NO: 25138 - DNA, 870 bp, synthetic construct; identical to SEQ ID NO: 24923
  source 1..870: mol_type = other DNA

SEQ ID NO: 25139 - DNA, 846 bp, synthetic construct; identical to SEQ ID NO: 24924
  source 1..846: mol_type = other DNA

SEQ ID NO: 25140 - DNA, 870 bp, synthetic construct; identical to SEQ ID NO: 24923
  source 1..870: mol_type = other DNA

SEQ ID NO: 25141 - DNA, 828 bp, synthetic construct; identical to SEQ ID NO: 24926
  source 1..828: mol_type = other DNA

SEQ ID NO: 25142 - DNA, 873 bp, synthetic construct; identical to SEQ ID NO: 24927
  source 1..873: mol_type = other DNA

SEQ ID NO: 25143 - DNA, 852 bp, synthetic construct; identical to SEQ ID NO: 24928
  source 1..852: mol_type = other DNA

SEQ ID NO: 25144 - DNA, 816 bp, synthetic construct
  source 1..816: mol_type = other DNA
gccgacgtgtcccccaagcctaccatcttcctgccctctatcgccgagacaaagctccagaaggccggcacctacctgtgcctgctggaaaagttcttcccagatgtgattaagatccactggcaggaaaagaagtccaacaccatcctgggcagccaggaaggcaacaccatgaagaccaacgacacctacatgaagttcagctggctgaccgtgcccgagaagtccctggacaaagaacacagatgcatcgtgcggcacgaaaacaacaagaacggcgtggaccaggaaatcatcatccccgaggacacattcttcccaagccccgagagcagctgcgacgtgaagctggtggaaaagagcttcgagacagacaccaacctgaacttccagaacctgagcgtgatcggcttcagaatcctgctgctgaaagtggccggctttaacctgctgatgaccctgcggctgtggtccagccgggttaagttttccagatccgcagacgcacccgcttaccaacaagggcagaaccaactctacaatgaacttaatttggggcggagggaagagtacgacgttctggacaaaaggaggggacgagatcccgagatgggcggaaagcctcagcgaaggaagaatccgcaagaggggctttataacgaactccagaaagataaaatggcagaagcctatagtgagattgggatgaagggagaaaggaggaggggtaaaggtcacgatgggttgtaccaaggattgagcacagccactaaagatacctatgatgcgctccacatgcaggccctgccgccaaga

SEQ ID NO: 25145 - DNA, 786 bp, synthetic construct
  source 1..786: mol_type = other DNA
gccgacgtgtcccccaagcctaccatcttcctgccctctatcgccgagacaaagctccagaaggccggcacctacctgtgcctgctggaaaagttcttcccagatgtgattaagatccactggcaggaaaagaagtccaacaccatcctgggcagccaggaaggcaacaccatgaagaccaacgacacctacatgaagttcagctggctgaccgtgcccgagaagtccctggacaaagaacacagatgcatcgtgcggcacgaaaacaacaagaacggcgtggaccaggaaatcatcgagagcagctgcgacgtgaagctggtggaaaagagcttcgagacagacaccaacctgaacttccagaacctgagcgtgatcggcttcagaatcctgctgctgaaagtggccggctttaacctgctgatgaccctgcggctgtggtccagccgggttaagttttccagatccgcagacgcacccgcttaccaacaagggcagaaccaactctacaatgaacttaatttggggcggagggaagagtacgacgttctggacaaaaggaggggacgagatcccgagatgggcggaaagcctcagcgaaggaagaatccgcaagaggggctttataacgaactccagaaagataaaatggcagaagcctatagtgagattgggatgaagggagaaaggaggaggggtaaaggtcacgatgggttgtaccaaggattgagcacagccactaaagatacctatgatgcgctccacatgcaggccctgccgccaaga

SEQ ID NO: 25146 - DNA, 813 bp, synthetic construct
  source 1..813: mol_type = other DNA
gccgacgtgtcccccaagcctaccatcttcctgccctctatcgccgagacaaagctccagaaggccggcacctacctgtgcctgctggaaaagttcttcccagatgtgattaagatccactggcaggaaaagaagtccaacaccatcctgggcagccaggaaggcaacaccatgaagaccaacgacacctacatgaagttcagctggctgaccgtgcccgagaagtccctggacaaagaacacagatgcatcgtgcggcacgaaaacaacaagaacggcgtggaccaggaaatcatccccgaggacacattcttcccaagccccgagagcagctgcgacgtgaagctggtggaaaagagcttcgagacagacaccaacctgaacttccagaacctgagcgtgatcggcttcagaatcctgctgctgaaagtggccggctttaacctgctgatgaccctgcggctgtggtccagccgggttaagttttccagatccgcagacgcacccgcttaccaacaagggcagaaccaactctacaatgaacttaatttggggcggagggaagagtacgacgttctggacaaaaggaggggacgagatcccgagatgggcggaaagcctcagcgaaggaagaatccgcaagaggggctttataacgaactccagaaagataaaatggcagaagcctatagtgagattgggatgaagggagaaaggaggaggggtaaaggtcacgatgggttgtaccaaggattgagcacagccactaaagatacctatgatgcgctccacatgcaggccctgccgccaaga

SEQ ID NO: 25147 - DNA, 795 bp, synthetic construct
  source 1..795: mol_type = other DNA
gccgacgtgtcccccaagcctaccatcttcctgccctctatcgccgagacaaagctccagaaggccggcacctacctgtgcctgctggaaaagttcttcccagatgtgattaagatccactggcaggaaaagaagtccaacaccatcctgggcagccaggaaggcaacaccatgaagaccaacgacacctacatgaagttcagctggctgaccgtgcccgagaagtccctggacaaagaacacagatgcatcgtgcggcacgaaaacaacaagaacggcgtggaccaggaaatcatcggcagagccgattgcggctttaccagcgagagctaccagcagggcgtgctgagcgccaccatcctgtacgagatcctgctgggcaaggccaccctgtacgccgtgctggtgtctgccctggtgctgatggctatggtcaagcggaaggacagccggggacgggttaagttttccagatccgcagacgcacccgcttaccaacaagggcagaaccaactctacaatgaacttaatttggggcggagggaagagtacgacgttctggacaaaaggaggggacgagatcccgagatgggcggaaagcctcagcgaaggaagaatccgcaagaggggctttataacgaactccagaaagataaaatggcagaagcctatagtgagattgggatgaagggagaaaggaggaggggtaaaggtcacgatgggttgtaccaaggattgagcacagccactaaagatacctatgatgcgctccacatgcaggccctgccgccaaga

SEQ ID NO: 25148 - DNA, 789 bp, synthetic construct
  source 1..789: mol_type = other DNA
gccgacgtgtcccccaagcctaccatcttcctgccctctatcgccgagacaaagctccagaaggccggcacctacctgtgcctgctggaaaagttcttcccagatgtgattaagatccactggcaggaaaagaagtccaacaccatcctgggcagccaggaaggcaacaccatgaagaccaacgacacctacatgaagttcagctggctgaccgtgcccgagaagtccctggacaaagaacacagatgcatcgtgcggcacgaaaacaacaagaacggcgtggaccaggaaatcatcgccgattgcggctttaccagcgagagctaccagcagggcgtgctgagcgccaccatcctgtacgagatcctgctgggcaaggccaccctgtacgccgtgctggtgtctgccctggtgctgatggctatggtcaagcggaaggacagccggggacgggttaagttttccagatccgcagacgcacccgcttaccaacaagggcagaaccaactctacaatgaacttaatttggggcggagggaagagtacgacgttctggacaaaaggaggggacgagatcccgagatgggcggaaagcctcagcgaaggaagaatccgcaagaggggctttataacgaactccagaaagataaaatggcagaagcctatagtgagattgggatgaagggagaaaggaggaggggtaaaggtcacgatgggttgtaccaaggattgagcacagccactaaagatacctatgatgcgctccacatgcaggccctgccgccaaga

SEQ ID NO: 25149 - DNA, 819 bp, synthetic construct
  source 1..819: mol_type = other DNA
gccgacgtgtcccccaagcctaccatcttcctgccctctatcgccgagacaaagctccagaaggccggcacctacctgtgcctgctggaaaagttcttcccagatgtgattaagatccactggcaggaaaagaagtccaacaccatcctgggcagccaggaaggcaacaccatgaagaccaacgacacctacatgaagttcagctggctgaccgtgcccgagaagtccctggacaaagaacacagatgcatcgtgcggcacgaaaacaacaagaacggcgtggaccaggaaatcatccagatcgtgtctgccgaagcctggggcagagccgattgcggctttaccagcgagagctaccagcagggcgtgctgagcgccaccatcctgtacgagatcctgctgggcaaggccaccctgtacgccgtgctggtgtctgccctggtgctgatggctatggtcaagcggaaggacagccggggacgggttaagttttccagatccgcagacgcacccgcttaccaacaagggcagaaccaactctacaatgaacttaatttggggcggagggaagagtacgacgttctggacaaaaggaggggacgagatcccgagatgggcggaaagcctcagcgaaggaagaatccgcaagaggggctttataacgaactccagaaagataaaatggcagaagcctatagtgagattgggatgaagggagaaaggaggaggggtaaaggtcacgatgggttgtaccaaggattgagcacagccactaaagatacctatgatgcgctccacatgcaggccctgccgccaaga

SEQ ID NO: 25150 - DNA, 840 bp, synthetic construct
  source 1..840: mol_type = other DNA
gccgacgtgtcccccaagcctaccatcttcctgccctctatcgccgagacaaagctccagaaggccggcacctacctgtgcctgctggaaaagttcttcccagatgtgattaagatccactggcaggaaaagaagtccaacaccatcctgggcagccaggaaggcaacaccatgaagaccaacgacacctacatgaagttcagctggctgaccgtgcccgagaagtccctggacaaagaacacagatgcatcgtgcggcacgaaaacaacaagaacggcgtggaccaggaaatcatcgaagtgaaaaccgactccaccgaccacgtgaagcccaaagagacagagaacaccaagcagcccagcaagagctgccacaagcccaaggccatcgtgcacaccgagaaagtgaacatgatgagcctgaccgtgctgggcctgcggatgctgttcgccaaaaccgtggccgtgaacttcctgctgaccgccaagctgttcttcctccgggttaagttttccagatccgcagacgcacccgcttaccaacaagggcagaaccaactctacaatgaacttaatttggggcggagggaagagtacgacgttctggacaaaaggaggggacgagatcccgagatgggcggaaagcctcagcgaaggaagaatccgcaagaggggctttataacgaactccagaaagataaaatggcagaagcctatagtgagattgggatgaagggagaaaggaggaggggtaaaggtcacgatgggttgtaccaaggattgagcacagccactaaagatacctatgatgcgctccacatgcaggccctgccgccaaga

SEQ ID NO: 25151 - DNA, 819 bp, synthetic construct
  source 1..819: mol_type = other DNA
gccgacgtgtcccccaagcctaccatcttcctgccctctatcgccgagacaaagctccagaaggccggcacctacctgtgcctgctggaaaagttcttcccagatgtgattaagatccactggcaggaaaagaagtccaacaccatcctgggcagccaggaaggcaacaccatgaagaccaacgacacctacatgaagttcagctggctgaccgtgcccgagaagtccctggacaaagaacacagatgcatcgtgcggcacgaaaacaacaagaacggcgtggaccaggaaatcatcgaccacgtgaagcccaaagagacagagaacaccaagcagcccagcaagagctgccacaagcccaaggccatcgtgcacaccgagaaagtgaacatgatgagcctgaccgtgctgggcctgcggatgctgttcgccaaaaccgtggccgtgaacttcctgctgaccgccaagctgttcttcctccgggttaagttttccagatccgcagacgcacccgcttaccaacaagggcagaaccaactctacaatgaacttaatttggggcggagggaagagtacgacgttctggacaaaaggaggggacgagatcccgagatgggcggaaagcctcagcgaaggaagaatccgcaagaggggctttataacgaactccagaaagataaaatggcagaagcctatagtgagattgggatgaagggagaaaggaggaggggtaaaggtcacgatgggttgtaccaaggattgagcacagccactaaagatacctatgatgcgctccacatgcaggccctgccgccaaga

SEQ ID NO: 25152 - DNA, 822 bp, synthetic construct
  source 1..822: mol_type = other DNA
gccgacgtgtcccccaagcctaccatcttcctgccctctatcgccgagacaaagctccagaaggccggcacctacctgtgcctgctggaaaagttcttcccagatgtgattaagatccactggcaggaaaagaagtccaacaccatcctgggcagccaggaaggcaacaccatgaagaccaacgacacctacatgaagttcagctggctgaccgtgcccgagaagtccctggacaaagaacacagatgcatcgtgcggcacgaaaacaacaagaacggcgtggaccaggaaatcatcttcccaatccccgaggacacattcttcccaagccccgagagcagctgcgacgtgaagctggtggaaaagagcttcgagacagacaccaacctgaacttccagaacctgagcgtgatcggcttcagaatcctgctgctgaaagtggccggctttaacctgctgatgaccctgcggctgtggtccagccgggttaagttttccagatccgcagacgcacccgcttaccaacaagggcagaaccaactctacaatgaacttaatttggggcggagggaagagtacgacgttctggacaaaaggaggggacgagatcccgagatgggcggaaagcctcagcgaaggaagaatccgcaagaggggctttataacgaactccagaaagataaaatggcagaagcctatagtgagattgggatgaagggagaaaggaggaggggtaaaggtcacgatgggttgtaccaaggattgagcacagccactaaagatacctatgatgcgctccacatgcaggccctgccgccaaga

SEQ ID NO: 25153 - DNA, 792 bp, synthetic construct
  source 1..792: mol_type = other DNA
gccgacgtgtcccccaagcctaccatcttcctgccctctatcgccgagacaaagctccagaaggccggcacctacctgtgcctgctggaaaagttcttcccagatgtgattaagatccactggcaggaaaagaagtccaacaccatcctgggcagccaggaaggcaacaccatgaagaccaacgacacctacatgaagttcagctggctgaccgtgcccgagaagtccctggacaaagaacacagatgcatcgtgcggcacgaaaacaacaagaacggcgtggaccaggaaatcatcttcccagagagcagctgcgacgtgaagctggtggaaaagagcttcgagacagacaccaacctgaacttccagaacctgagcgtgatcggcttcagaatcctgctgctgaaagtggccggctttaacctgctgatgaccctgcggctgtggtccagccgggttaagttttccagatccgcagacgcacccgcttaccaacaagggcagaaccaactctacaatgaacttaatttggggcggagggaagagtacgacgttctggacaaaaggaggggacgagatcccgagatgggcggaaagcctcagcgaaggaagaatccgcaagaggggctttataacgaactccagaaagataaaatggcagaagcctatagtgagattgggatgaagggagaaaggaggaggggtaaaggtcacgatgggttgtaccaaggattgagcacagccactaaagatacctatgatgcgctccacatgcaggccctgccgccaaga

SEQ ID NO: 25154 - DNA, 819 bp, synthetic construct
  source 1..819: mol_type = other DNA
gccgacgtgtcccccaagcctaccatcttcctgccctctatcgccgagacaaagctccagaaggccggcacctacctgtgcctgctggaaaagttcttcccagatgtgattaagatccactggcaggaaaagaagtccaacaccatcctgggcagccaggaaggcaacaccatgaagaccaacgacacctacatgaagttcagctggctgaccgtgcccgagaagtccctggacaaagaacacagatgcatcgtgcggcacgaaaacaacaagaacggcgtggaccaggaaatcatcttcccacccgaggacacattcttcccaagccccgagagcagctgcgacgtgaagctggtggaaaagagcttcgagacagacaccaacctgaacttccagaacctgagcgtgatcggcttcagaatcctgctgctgaaagtggccggctttaacctgctgatgaccctgcggctgtggtccagccgggttaagttttccagatccgcagacgcacccgcttaccaacaagggcagaaccaactctacaatgaacttaatttggggcggagggaagagtacgacgttctggacaaaaggaggggacgagatcccgagatgggcggaaagcctcagcgaaggaagaatccgcaagaggggctttataacgaactccagaaagataaaatggcagaagcctatagtgagattgggatgaagggagaaaggaggaggggtaaaggtcacgatgggttgtaccaaggattgagcacagccactaaagatacctatgatgcgctccacatgcaggccctgccgccaaga

SEQ ID NO: 25155 - DNA, 801 bp, synthetic construct
  source 1..801: mol_type = other DNA
gccgacgtgtcccccaagcctaccatcttcctgccctctatcgccgagacaaagctccagaaggccggcacctacctgtgcctgctggaaaagttcttcccagatgtgattaagatccactggcaggaaaagaagtccaacaccatcctgggcagccaggaaggcaacaccatgaagaccaacgacacctacatgaagttcagctggctgaccgtgcccgagaagtccctggacaaagaacacagatgcatcgtgcggcacgaaaacaacaagaacggcgtggaccaggaaatcatcttcccaggcagagccgattgcggctttaccagcgagagctaccagcagggcgtgctgagcgccaccatcctgtacgagatcctgctgggcaaggccaccctgtacgccgtgctggtgtctgccctggtgctgatggctatggtcaagcggaaggacagccggggacgggttaagttttccagatccgcagacgcacccgcttaccaacaagggcagaaccaactctacaatgaacttaatttggggcggagggaagagtacgacgttctggacaaaaggaggggacgagatcccgagatgggcggaaagcctcagcgaaggaagaatccgcaagaggggctttataacgaactccagaaagataaaatggcagaagcctatagtgagattgggatgaagggagaaaggaggaggggtaaaggtcacgatgggttgtaccaaggattgagcacagccactaaagatacctatgatgcgctccacatgcaggccctgccgccaaga

SEQ ID NO: 25156 - DNA, 795 bp, synthetic construct
  source 1..795: mol_type = other DNA
gccgacgtgtcccccaagcctaccatcttcctgccctctatcgccgagacaaagctccagaaggccggcacctacctgtgcctgctggaaaagttcttcccagatgtgattaagatccactggcaggaaaagaagtccaacaccatcctgggcagccaggaaggcaacaccatgaagaccaacgacacctacatgaagttcagctggctgaccgtgcccgagaagtccctggacaaagaacacagatgcatcgtgcggcacgaaaacaacaagaacggcgtggaccaggaaatcatcttcccagccgattgcggctttaccagcgagagctaccagcagggcgtgctgagcgccaccatcctgtacgagatcctgctgggcaaggccaccctgtacgccgtgctggtgtctgccctggtgctgatggctatggtcaagcggaaggacagccggggacgggttaagttttccagatccgcagacgcacccgcttaccaacaagggcagaaccaactctacaatgaacttaatttggggcggagggaagagtacgacgttctggacaaaaggaggggacgagatcccgagatgggcggaaagcctcagcgaaggaagaatccgcaagaggggctttataacgaactccagaaagataaaatggcagaagcctatagtgagattgggatgaagggagaaaggaggaggggtaaaggtcacgatgggttgtaccaaggattgagcacagccactaaagatacctatgatgcgctccacatgcaggccctgccgccaaga

SEQ ID NO: 25157 - DNA, 825 bp, synthetic construct
  source 1..825: mol_type = other DNA
gccgacgtgtcccccaagcctaccatcttcctgccctctatcgccgagacaaagctccagaaggccggcacctacctgtgcctgctggaaaagttcttcccagatgtgattaagatccactggcaggaaaagaagtccaacaccatcctgggcagccaggaaggcaacaccatgaagaccaacgacacctacatgaagttcagctggctgaccgtgcccgagaagtccctggacaaagaacacagatgcatcgtgcggcacgaaaacaacaagaacggcgtggaccaggaaatcatcttcccacagatcgtgtctgccgaagcctggggcagagccgattgcggctttaccagcgagagctaccagcagggcgtgctgagcgccaccatcctgtacgagatcctgctgggcaaggccaccctgtacgccgtgctggtgtctgccctggtgctgatggctatggtcaagcggaaggacagccggggacgggttaagttttccagatccgcagacgcacccgcttaccaacaagggcagaaccaactctacaatgaacttaatttggggcggagggaagagtacgacgttctggacaaaaggaggggacgagatcccgagatgggcggaaagcctcagcgaaggaagaatccgcaagaggggctttataacgaactccagaaagataaaatggcagaagcctatagtgagattgggatgaagggagaaaggaggaggggtaaaggtcacgatgggttgtaccaaggattgagcacagccactaaagatacctatgatgcgctccacatgcaggccctgccgccaaga

SEQ ID NO: 25158 - DNA, 846 bp, synthetic construct
  source 1..846: mol_type = other DNA
gccgacgtgtcccccaagcctaccatcttcctgccctctatcgccgagacaaagctccagaaggccggcacctacctgtgcctgctggaaaagttcttcccagatgtgattaagatccactggcaggaaaagaagtccaacaccatcctgggcagccaggaaggcaacaccatgaagaccaacgacacctacatgaagttcagctggctgaccgtgcccgagaagtccctggacaaagaacacagatgcatcgtgcggcacgaaaacaacaagaacggcgtggaccaggaaatcatcttcccagaagtgaaaaccgactccaccgaccacgtgaagcccaaagagacagagaacaccaagcagcccagcaagagctgccacaagcccaaggccatcgtgcacaccgagaaagtgaacatgatgagcctgaccgtgctgggcctgcggatgctgttcgccaaaaccgtggccgtgaacttcctgctgaccgccaagctgttcttcctccgggttaagttttccagatccgcagacgcacccgcttaccaacaagggcagaaccaactctacaatgaacttaatttggggcggagggaagagtacgacgttctggacaaaaggaggggacgagatcccgagatgggcggaaagcctcagcgaaggaagaatccgcaagaggggctttataacgaactccagaaagataaaatggcagaagcctatagtgagattgggatgaagggagaaaggaggaggggtaaaggtcacgatgggttgtaccaaggattgagcacagccactaaagatacctatgatgcgctccacatgcaggccctgccgccaaga

SEQ ID NO: 25159 - DNA, 825 bp, synthetic construct
  source 1..825: mol_type = other DNA
gccgacgtgtcccccaagcctaccatcttcctgccctctatcgccgagacaaagctccagaaggccggcacctacctgtgcctgctggaaaagttcttcccagatgtgattaagatccactggcaggaaaagaagtccaacaccatcctgggcagccaggaaggcaacaccatgaagaccaacgacacctacatgaagttcagctggctgaccgtgcccgagaagtccctggacaaagaacacagatgcatcgtgcggcacgaaaacaacaagaacggcgtggaccaggaaatcatcttcccagaccacgtgaagcccaaagagacagagaacaccaagcagcccagcaagagctgccacaagcccaaggccatcgtgcacaccgagaaagtgaacatgatgagcctgaccgtgctgggcctgcggatgctgttcgccaaaaccgtggccgtgaacttcctgctgaccgccaagctgttcttcctccgggttaagttttccagatccgcagacgcacccgcttaccaacaagggcagaaccaactctacaatgaacttaatttggggcggagggaagagtacgacgttctggacaaaaggaggggacgagatcccgagatgggcggaaagcctcagcgaaggaagaatccgcaagaggggctttataacgaactccagaaagataaaatggcagaagcctatagtgagattgggatgaagggagaaaggaggaggggtaaaggtcacgatgggttgtaccaaggattgagcacagccactaaagatacctatgatgcgctccacatgcaggccctgccgccaaga

SEQ ID NO: 25160 - DNA, 846 bp, synthetic construct
  source 1..846: mol_type = other DNA
gccgacgtgtcccccaagcctaccatcttcctgccctctatcgccgagacaaagctccagaaggccggcacctacctgtgcctgctggaaaagttcttcccagatgtgattaagatccactggcaggaaaagaagtccaacaccatcctgggcagccaggaaggcaacaccatgaagaccaacgacacctacatgaagttcagctggctgaccgtgcccgagaagtccctggacaaagaacacagatgcatcgtgcggcacgaaaacaacaagaacggcgtggaccaggaaatcatcttcccacccatcaagaccgatgtgattacaatccccgaggacacattcttcccaagccccgagagcagctgcgacgtgaagctggtggaaaagagcttcgagacagacaccaacctgaacttccagaacctgagcgtgatcggcttcagaatcctgctgctgaaagtggccggctttaacctgctgatgaccctgcggctgtggtccagccgggttaagttttccagatccgcagacgcacccgcttaccaacaagggcagaaccaactctacaatgaacttaatttggggcggagggaagagtacgacgttctggacaaaaggaggggacgagatcccgagatgggcggaaagcctcagcgaaggaagaatccgcaagaggggctttataacgaactccagaaagataaaatggcagaagcctatagtgagattgggatgaagggagaaaggaggaggggtaaaggtcacgatgggttgtaccaaggattgagcacagccactaaagatacctatgatgcgctccacatgcaggccctgccgccaaga

SEQ ID NO: 25161 - DNA, 816 bp, synthetic construct
  source 1..816: mol_type = other DNA
gccgacgtgtcccccaagcctaccatcttcctgccctctatcgccgagacaaagctccagaaggccggcacctacctgtgcctgctggaaaagttcttcccagatgtgattaagatccactggcaggaaaagaagtccaacaccatcctgggcagccaggaaggcaacaccatgaagaccaacgacacctacatgaagttcagctggctgaccgtgcccgagaagtccctggacaaagaacacagatgcatcgtgcggcacgaaaacaacaagaacggcgtggaccaggaaatcatcttcccacccatcaagaccgatgtgattacagagagcagctgcgacgtgaagctggtggaaaagagcttcgagacagacaccaacctgaacttccagaacctgagcgtgatcggcttcagaatcctgctgctgaaagtggccggctttaacctgctgatgaccctgcggctgtggtccagccgggttaagttttccagatccgcagacgcacccgcttaccaacaagggcagaaccaactctacaatgaacttaatttggggcggagggaagagtacgacgttctggacaaaaggaggggacgagatcccgagatgggcggaaagcctcagcgaaggaagaatccgcaagaggggctttataacgaactccagaaagataaaatggcagaagcctatagtgagattgggatgaagggagaaaggaggaggggtaaaggtcacgatgggttgtaccaaggattgagcacagccactaaagatacctatgatgcgctccacatgcaggccctgccgccaaga

SEQ ID NO: 25162 - DNA, 843 bp, synthetic construct
  source 1..843: mol_type = other DNA
gccgacgtgtcccccaagcctaccatcttcctgccctctatcgccgagacaaagctccagaaggccggcacctacctgtgcctgctggaaaagttcttcccagatgtgattaagatccactggcaggaaaagaagtccaacaccatcctgggcagccaggaaggcaacaccatgaagaccaacgacacctacatgaagttcagctggctgaccgtgcccgagaagtccctggacaaagaacacagatgcatcgtgcggcacgaaaacaacaagaacggcgtggaccaggaaatcatcttcccacccatcaagaccgatgtgattacacccgaggacacattcttcccaagccccgagagcagctgcgacgtgaagctggtggaaaagagcttcgagacagacaccaacctgaacttccagaacctgagcgtgatcggcttcagaatcctgctgctgaaagtggccggctttaacctgctgatgaccctgcggctgtggtccagccgggttaagttttccagatccgcagacgcacccgcttaccaacaagggcagaaccaactctacaatgaacttaatttggggcggagggaagagtacgacgttctggacaaaaggaggggacgagatcccgagatgggcggaaagcctcagcgaaggaagaatccgcaagaggggctttataacgaactccagaaagataaaatggcagaagcctatagtgagattgggatgaagggagaaaggaggaggggtaaaggtcacgatgggttgtaccaaggattgagcacagccactaaagatacctatgatgcgctccacatgcaggccctgccgccaaga

SEQ ID NO: 25163 - DNA, 825 bp, synthetic construct
  source 1..825: mol_type = other DNA
gccgacgtgtcccccaagcctaccatcttcctgccctctatcgccgagacaaagctccagaaggccggcacctacctgtgcctgctggaaaagttcttcccagatgtgattaagatccactggcaggaaaagaagtccaacaccatcctgggcagccaggaaggcaacaccatgaagaccaacgacacctacatgaagttcagctggctgaccgtgcccgagaagtccctggacaaagaacacagatgcatcgtgcggcacgaaaacaacaagaacggcgtggaccaggaaatcatcttcccacccatcaagaccgatgtgattacaggcagagccgattgcggctttaccagcgagagctaccagcagggcgtgctgagcgccaccatcctgtacgagatcctgctgggcaaggccaccctgtacgccgtgctggtgtctgccctggtgctgatggctatggtcaagcggaaggacagccggggacgggttaagttttccagatccgcagacgcacccgcttaccaacaagggcagaaccaactctacaatgaacttaatttggggcggagggaagagtacgacgttctggacaaaaggaggggacgagatcccgagatgggcggaaagcctcagcgaaggaagaatccgcaagaggggctttataacgaactccagaaagataaaatggcagaagcctatagtgagattgggatgaagggagaaaggaggaggggtaaaggtcacgatgggttgtaccaaggattgagcacagccactaaagatacctatgatgcgctccacatgcaggccctgccgccaaga

SEQ ID NO: 25164 - DNA, 819 bp, synthetic construct
  source 1..819: mol_type = other DNA
gccgacgtgtcccccaagcctaccatcttcctgccctctatcgccgagacaaagctccagaaggccggcacctacctgtgcctgctggaaaagttcttcccagatgtgattaagatccactggcaggaaaagaagtccaacaccatcctgggcagccaggaaggcaacaccatgaagaccaacgacacctacatgaagttcagctggctgaccgtgcccgagaagtccctggacaaagaacacagatgcatcgtgcggcacgaaaacaacaagaacggcgtggaccaggaaatcatcttcccacccatcaagaccgatgtgattacagccgattgcggctttaccagcgagagctaccagcagggcgtgctgagcgccaccatcctgtacgagatcctgctgggcaaggccaccctgtacgccgtgctggtgtctgccctggtgctgatggctatggtcaagcggaaggacagccggggacgggttaagttttccagatccgcagacgcacccgcttaccaacaagggcagaaccaactctacaatgaacttaatttggggcggagggaagagtacgacgttctggacaaaaggaggggacgagatcccgagatgggcggaaagcctcagcgaaggaagaatccgcaagaggggctttataacgaactccagaaagataaaatggcagaagcctatagtgagattgggatgaagggagaaaggaggaggggtaaaggtcacgatgggttgtaccaaggattgagcacagccactaaagatacctatgatgcgctccacatgcaggccctgccgccaaga

SEQ ID NO: 25165 - DNA, 849 bp, synthetic construct
  source 1..849: mol_type = other DNA
gccgacgtgtcccccaagcctaccatcttcctgccctctatcgccgagacaaagctccagaaggccggcacctacctgtgcctgctggaaaagttcttcccagatgtgattaagatccactggcaggaaaagaagtccaacaccatcctgggcagccaggaaggcaacaccatgaagaccaacgacacctacatgaagttcagctggctgaccgtgcccgagaagtccctggacaaagaacacagatgcatcgtgcggcacgaaaacaacaagaacggcgtggaccaggaaatcatcttcccacccatcaagaccgatgtgattacacagatcgtgtctgccgaagcctggggcagagccgattgcggctttaccagcgagagctaccagcagggcgtgctgagcgccaccatcctgtacgagatcctgctgggcaaggccaccctgtacgccgtgctggtgtctgccctggtgctgatggctatggtcaagcggaaggacagccggggacgggttaagttttccagatccgcagacgcacccgcttaccaacaagggcagaaccaactctacaatgaacttaatttggggcggagggaagagtacgacgttctggacaaaaggaggggacgagatcccgagatgggcggaaagcctcagcgaaggaagaatccgcaagaggggctttataacgaactccagaaagataaaatggcagaagcctatagtgagattgggatgaagggagaaaggaggaggggtaaaggtcacgatgggttgtaccaaggattgagcacagccactaaagatacctatgatgcgctccacatgcaggccctgccgccaaga

SEQ ID NO: 25166 - DNA, 870 bp, synthetic construct
  source 1..870: mol_type = other DNA
gccgacgtgtcccccaagcctaccatcttcctgccctctatcgccgagacaaagctccagaaggccggcacctacctgtgcctgctggaaaagttcttcccagatgtgattaagatccactggcaggaaaagaagtccaacaccatcctgggcagccaggaaggcaacaccatgaagaccaacgacacctacatgaagttcagctggctgaccgtgcccgagaagtccctggacaaagaacacagatgcatcgtgcggcacgaaaacaacaagaacggcgtggaccaggaaatcatcttcccacccatcaagaccgatgtgattacagaagtgaaaaccgactccaccgaccacgtgaagcccaaagagacagagaacaccaagcagcccagcaagagctgccacaagcccaaggccatcgtgcacaccgagaaagtgaacatgatgagcctgaccgtgctgggcctgcggatgctgttcgccaaaaccgtggccgtgaacttcctgctgaccgccaagctgttcttcctccgggttaagttttccagatccgcagacgcacccgcttaccaacaagggcagaaccaactctacaatgaacttaatttggggcggagggaagagtacgacgttctggacaaaaggaggggacgagatcccgagatgggcggaaagcctcagcgaaggaagaatccgcaagaggggctttataacgaactccagaaagataaaatggcagaagcctatagtgagattgggatgaagggagaaaggaggaggggtaaaggtcacgatgggttgtaccaaggattgagcacagccactaaagatacctatgatgcgctccacatgcaggccctgccgccaaga

SEQ ID NO: 25167 - DNA, 849 bp, synthetic construct
  source 1..849: mol_type = other DNA
gccgacgtgtcccccaagcctaccatcttcctgccctctatcgccgagacaaagctccagaaggccggcacctacctgtgcctgctggaaaagttcttcccagatgtgattaagatccactggcaggaaaagaagtccaacaccatcctgggcagccaggaaggcaacaccatgaagaccaacgacacctacatgaagttcagctggctgaccgtgcccgagaagtccctggacaaagaacacagatgcatcgtgcggcacgaaaacaacaagaacggcgtggaccaggaaatcatcttcccacccatcaagaccgatgtgattacagaccacgtgaagcccaaagagacagagaacaccaagcagcccagcaagagctgccacaagcccaaggccatcgtgcacaccgagaaagtgaacatgatgagcctgaccgtgctgggcctgcggatgctgttcgccaaaaccgtggccgtgaacttcctgctgaccgccaagctgttcttcctccgggttaagttttccagatccgcagacgcacccgcttaccaacaagggcagaaccaactctacaatgaacttaatttggggcggagggaagagtacgacgttctggacaaaaggaggggacgagatcccgagatgggcggaaagcctcagcgaaggaagaatccgcaagaggggctttataacgaactccagaaagataaaatggcagaagcctatagtgagattgggatgaagggagaaaggaggaggggtaaaggtcacgatgggttgtaccaaggattgagcacagccactaaagatacctatgatgcgctccacatgcaggccctgccgccaaga

SEQ ID NO: 25168 - DNA, 861 bp, synthetic construct
  source 1..861: mol_type = other DNA
gccgacgtgtcccccaagcctaccatcttcctgccctctatcgccgagacaaagctccagaaggccggcacctacctgtgcctgctggaaaagttcttcccagatgtgattaagatccactggcaggaaaagaagtccaacaccatcctgggcagccaggaaggcaacaccatgaagaccaacgacacctacatgaagttcagctggctgaccgtgcccgagaagtccctggacaaagaacacagatgcatcgtgcggcacgaaaacaacaagaacggcgtggaccaggaaatcatcttcccacccatcaagaccgatgtgattacaatggaccccaaggacatccccgaggacacattcttcccaagccccgagagcagctgcgacgtgaagctggtggaaaagagcttcgagacagacaccaacctgaacttccagaacctgagcgtgatcggcttcagaatcctgctgctgaaagtggccggctttaacctgctgatgaccctgcggctgtggtccagccgggttaagttttccagatccgcagacgcacccgcttaccaacaagggcagaaccaactctacaatgaacttaatttggggcggagggaagagtacgacgttctggacaaaaggaggggacgagatcccgagatgggcggaaagcctcagcgaaggaagaatccgcaagaggggctttataacgaactccagaaagataaaatggcagaagcctatagtgagattgggatgaagggagaaaggaggaggggtaaaggtcacgatgggttgtaccaaggattgagcacagccactaaagatacctatgatgcgctccacatgcaggccctgccgccaaga

SEQ ID NO: 25169 - DNA, 831 bp, synthetic construct
  source 1..831: mol_type = other DNA
gccgacgtgtcccccaagcctaccatcttcctgccctctatcgccgagacaaagctccagaaggccggcacctacctgtgcctgctggaaaagttcttcccagatgtgattaagatccactggcaggaaaagaagtccaacaccatcctgggcagccaggaaggcaacaccatgaagaccaacgacacctacatgaagttcagctggctgaccgtgcccgagaagtccctggacaaagaacacagatgcatcgtgcggcacgaaaacaacaagaacggcgtggaccaggaaatcatcttcccacccatcaagaccgatgtgattacaatggaccccaaggacgagagcagctgcgacgtgaagctggtggaaaagagcttcgagacagacaccaacctgaacttccagaacctgagcgtgatcggcttcagaatcctgctgctgaaagtggccggctttaacctgctgatgaccctgcggctgtggtccagccgggttaagttttccagatccgcagacgcacccgcttaccaacaagggcagaaccaactctacaatgaacttaatttggggcggagggaagagtacgacgttctggacaaaaggaggggacgagatcccgagatgggcggaaagcctcagcgaaggaagaatccgcaagaggggctttataacgaactccagaaagataaaatggcagaagcctatagtgagattgggatgaagggagaaaggaggaggggtaaaggtcacgatgggttgtaccaaggattgagcacagccactaaagatacctatgatgcgctccacatgcaggccctgccgccaaga

SEQ ID NO: 25170 - DNA, 858 bp, synthetic construct
  source 1..858: mol_type = other DNA
gccgacgtgtcccccaagcctaccatcttcctgccctctatcgccgagacaaagctccagaaggccggcacctacctgtgcctgctggaaaagttcttcccagatgtgattaagatccactggcaggaaaagaagtccaacaccatcctgggcagccaggaaggcaacaccatgaagaccaacgacacctacatgaagttcagctggctgaccgtgcccgagaagtccctggacaaagaacacagatgcatcgtgcggcacgaaaacaacaagaacggcgtggaccaggaaatcatcttcccacccatcaagaccgatgtgattacaatggaccccaaggaccccgaggacacattcttcccaagccccgagagcagctgcgacgtgaagctggtggaaaagagcttcgagacagacaccaacctgaacttccagaacctgagcgtgatcggcttcagaatcctgctgctgaaagtggccggctttaacctgctgatgaccctgcggctgtggtccagccgggttaagttttccagatccgcagacgcacccgcttaccaacaagggcagaaccaactctacaatgaacttaatttggggcggagggaagagtacgacgttctggacaaaaggaggggacgagatcccgagatgggcggaaagcctcagcgaaggaagaatccgcaagaggggctttataacgaactccagaaagataaaatggcagaagcctatagtgagattgggatgaagggagaaaggaggaggggtaaaggtcacgatgggttgtaccaaggattgagcacagccactaaagatacctatgatgcgctccacatgcaggccctgccgccaaga

SEQ ID NO: 25171 - DNA, 840 bp, synthetic construct
  source 1..840: mol_type = other DNA
gccgacgtgtcccccaagcctaccatcttcctgccctctatcgccgagacaaagctccagaaggccggcacctacctgtgcctgctggaaaagttcttcccagatgtgattaagatccactggcaggaaaagaagtccaacaccatcctgggcagccaggaaggcaacaccatgaagaccaacgacacctacatgaagttcagctggctgaccgtgcccgagaagtccctggacaaagaacacagatgcatcgtgcggcacgaaaacaacaagaacggcgtggaccaggaaatcatcttcccacccatcaagaccgatgtgattacaatggaccccaaggacggcagagccgattgcggctttaccagcgagagctaccagcagggcgtgctgagcgccaccatcctgtacgagatcctgctgggcaaggccaccctgtacgccgtgctggtgtctgccctggtgctgatggctatggtcaagcggaaggacagccggggacgggttaagttttccagatccgcagacgcacccgcttaccaacaagggcagaaccaactctacaatgaacttaatttggggcggagggaagagtacgacgttctggacaaaaggaggggacgagatcccgagatgggcggaaagcctcagcgaaggaagaatccgcaagaggggctttataacgaactccagaaagataaaatggcagaagcctatagtgagattgggatgaagggagaaaggaggaggggtaaaggtcacgatgggttgtaccaaggattgagcacagccactaaagatacctatgatgcgctccacatgcaggccctgccgccaaga

SEQ ID NO: 25172 - DNA, 834 bp, synthetic construct
  source 1..834: mol_type = other DNA
gccgacgtgtcccccaagcctaccatcttcctgccctctatcgccgagacaaagctccagaaggccggcacctacctgtgcctgctggaaaagttcttcccagatgtgattaagatccactggcaggaaaagaagtccaacaccatcctgggcagccaggaaggcaacaccatgaagaccaacgacacctacatgaagttcagctggctgaccgtgcccgagaagtccctggacaaagaacacagatgcatcgtgcggcacgaaaacaacaagaacggcgtggaccaggaaatcatcttcccacccatcaagaccgatgtgattacaatggaccccaaggacgccgattgcggctttaccagcgagagctaccagcagggcgtgctgagcgccaccatcctgtacgagatcctgctgggcaaggccaccctgtacgccgtgctggtgtctgccctggtgctgatggctatggtcaagcggaaggacagccggggacgggttaagttttccagatccgcagacgcacccgcttaccaacaagggcagaaccaactctacaatgaacttaatttggggcggagggaagagtacgacgttctggacaaaaggaggggacgagatcccgagatgggcggaaagcctcagcgaaggaagaatccgcaagaggggctttataacgaactccagaaagataaaatggcagaagcctatagtgagattgggatgaagggagaaaggaggaggggtaaaggtcacgatgggttgtaccaaggattgagcacagccactaaagatacctatgatgcgctccacatgcaggccctgccgccaaga

SEQ ID NO: 25173 - DNA, 864 bp, synthetic construct
  source 1..864: mol_type = other DNA
gccgacgtgtcccccaagcctaccatcttcctgccctctatcgccgagacaaagctccagaaggccggcacctacctgtgcctgctggaaaagttcttcccagatgtgattaagatccactggcaggaaaagaagtccaacaccatcctgggcagccaggaaggcaacaccatgaagaccaacgacacctacatgaagttcagctggctgaccgtgcccgagaagtccctggacaaagaacacagatgcatcgtgcggcacgaaaacaacaagaacggcgtggaccaggaaatcatcttcccacccatcaagaccgatgtgattacaatggaccccaaggaccagatcgtgtctgccgaagcctggggcagagccgattgcggctttaccagcgagagctaccagcagggcgtgctgagcgccaccatcctgtacgagatcctgctgggcaaggccaccctgtacgccgtgctggtgtctgccctggtgctgatggctatggtcaagcggaaggacagccggggacgggttaagttttccagatccgcagacgcacccgcttaccaacaagggcagaaccaactctacaatgaacttaatttggggcggagggaagagtacgacgttctggacaaaaggaggggacgagatcccgagatgggcggaaagcctcagcgaaggaagaatccgcaagaggggctttataacgaactccagaaagataaaatggcagaagcctatagtgagattgggatgaagggagaaaggaggaggggtaaaggtcacgatgggttgtaccaaggattgagcacagccactaaagatacctatgatgcgctccacatgcaggccctgccgccaaga

SEQ ID NO: 25174 - DNA, 885 bp, synthetic construct
  source 1..885: mol_type = other DNA
gccgacgtgtcccccaagcctaccatcttcctgccctctatcgccgagacaaagctccagaaggccggcacctacctgtgcctgctggaaaagttcttcccagatgtgattaagatccactggcaggaaaagaagtccaacaccatcctgggcagccaggaaggcaacaccatgaagaccaacgacacctacatgaagttcagctggctgaccgtgcccgagaagtccctggacaaagaacacagatgcatcgtgcggcacgaaaacaacaagaacggcgtggaccaggaaatcatcttcccacccatcaagaccgatgtgattacaatggaccccaaggacgaagtgaaaaccgactccaccgaccacgtgaagcccaaagagacagagaacaccaagcagcccagcaagagctgccacaagcccaaggccatcgtgcacaccgagaaagtgaacatgatgagcctgaccgtgctgggcctgcggatgctgttcgccaaaaccgtggccgtgaacttcctgctgaccgccaagctgttcttcctccgggttaagttttccagatccgcagacgcacccgcttaccaacaagggcagaaccaactctacaatgaacttaatttggggcggagggaagagtacgacgttctggacaaaaggaggggacgagatcccgagatgggcggaaagcctcagcgaaggaagaatccgcaagaggggctttataacgaactccagaaagataaaatggcagaagcctatagtgagattgggatgaagggagaaaggaggaggggtaaaggtcacgatgggttgtaccaaggattgagcacagccactaaagatacctatgatgcgctccacatgcaggccctgccgccaaga

SEQ ID NO: 25175 - DNA, 864 bp, synthetic construct
  source 1..864: mol_type = other DNA
gccgacgtgtcccccaagcctaccatcttcctgccctctatcgccgagacaaagctccagaaggccggcacctacctgtgcctgctggaaaagttcttcccagatgtgattaagatccactggcaggaaaagaagtccaacaccatcctgggcagccaggaaggcaacaccatgaagaccaacgacacctacatgaagttcagctggctgaccgtgcccgagaagtccctggacaaagaacacagatgcatcgtgcggcacgaaaacaacaagaacggcgtggaccaggaaatcatcttcccacccatcaagaccgatgtgattacaatggaccccaaggacgaccacgtgaagcccaaagagacagagaacaccaagcagcccagcaagagctgccacaagcccaaggccatcgtgcacaccgagaaagtgaacatgatgagcctgaccgtgctgggcctgcggatgctgttcgccaaaaccgtggccgtgaacttcctgctgaccgccaagctgttcttcctccgggttaagttttccagatccgcagacgcacccgcttaccaacaagggcagaaccaactctacaatgaacttaatttggggcggagggaagagtacgacgttctggacaaaaggaggggacgagatcccgagatgggcggaaagcctcagcgaaggaagaatccgcaagaggggctttataacgaactccagaaagataaaatggcagaagcctatagtgagattgggatgaagggagaaaggaggaggggtaaaggtcacgatgggttgtaccaaggattgagcacagccactaaagatacctatgatgcgctccacatgcaggccctgccgccaaga

SEQ ID NO: 25176 - DNA, 846 bp, synthetic construct; identical to SEQ ID NO: 25160
  source 1..846: mol_type = other DNA

SEQ ID NO: 25177 - DNA, 816 bp, synthetic construct; identical to SEQ ID NO: 25161
  source 1..816: mol_type = other DNA

SEQ ID NO: 25178 - DNA, 843 bp, synthetic construct; identical to SEQ ID NO: 25162
  source 1..843: mol_type = other DNA

SEQ ID NO: 25179 - DNA, 825 bp, synthetic construct; identical to SEQ ID NO: 25163
  source 1..825: mol_type = other DNA

SEQ ID NO: 25180 - DNA, 819 bp, synthetic construct; identical to SEQ ID NO: 25164
  source 1..819: mol_type = other DNA

SEQ ID NO: 25181 - DNA, 849 bp, synthetic construct; identical to SEQ ID NO: 25165
  source 1..849: mol_type = other DNA

SEQ ID NO: 25182 - DNA, 870 bp, synthetic construct; identical to SEQ ID NO: 25166
  source 1..870: mol_type = other DNA

SEQ ID NO: 25183 - DNA, 849 bp, synthetic construct; identical to SEQ ID NO: 25167
  source 1..849: mol_type = other DNA

SEQ ID NO: 25184 - DNA, 768 bp, synthetic construct
  source 1..768: mol_type = other DNA
cctcacaccaagcccagcgtgttcgtgatgaagaacggcaccaacgtggcctgcctcgtgaaagagttctaccccaaggacatcaggatcaacctggtgtccagcaagaagatcaccgagttcgaccccgccatcgtgatctcccccagcggcaagtacaacgccgtgaagctggggaagtacgaggacagcaacagcgtgacctgctccgtgcagcacgacaacaagaccgtgcacagcaccgactttatccccgaggacacattcttcccaagccccgagagcagctgcgacgtgaagctggtggaaaagagcttcgagacagacaccaacctgaacttccagaacctgagcgtgatcggcttcagaatcctgctgctgaaagtggccggctttaacctgctgatgaccctgcggctgtggtccagccgggttaagttttccagatccgcagacgcacccgcttaccaacaagggcagaaccaactctacaatgaacttaatttggggcggagggaagagtacgacgttctggacaaaaggaggggacgagatcccgagatgggcggaaagcctcagcgaaggaagaatccgcaagaggggctttataacgaactccagaaagataaaatggcagaagcctatagtgagattgggatgaagggagaaaggaggaggggtaaaggtcacgatgggttgtaccaaggattgagcacagccactaaagatacctatgatgcgctccacatgcaggccctgccgccaaga

SEQ ID NO: 25185 - DNA, 738 bp, synthetic construct
  source 1..738: mol_type = other DNA
cctcacaccaagcccagcgtgttcgtgatgaagaacggcaccaacgtggcctgcctcgtgaaagagttctaccccaaggacatcaggatcaacctggtgtccagcaagaagatcaccgagttcgaccccgccatcgtgatctcccccagcggcaagtacaacgccgtgaagctggggaagtacgaggacagcaacagcgtgacctgctccgtgcagcacgacaacaagaccgtgcacagcaccgactttgagagcagctgcgacgtgaagctggtggaaaagagcttcgagacagacaccaacctgaacttccagaacctgagcgtgatcggcttcagaatcctgctgctgaaagtggccggctttaacctgctgatgaccctgcggctgtggtccagccgggttaagttttccagatccgcagacgcacccgcttaccaacaagggcagaaccaactctacaatgaacttaatttggggcggagggaagagtacgacgttctggacaaaaggaggggacgagatcccgagatgggcggaaagcctcagcgaaggaagaatccgcaagaggggctttataacgaactccagaaagataaaatggcagaagcctatagtgagattgggatgaagggagaaaggaggaggggtaaaggtcacgatgggttgtaccaaggattgagcacagccactaaagatacctatgatgcgctccacatgcaggccctgccgccaaga

SEQ ID NO: 25186 - DNA, 765 bp, synthetic construct
  source 1..765: mol_type = other DNA
cctcacaccaagcccagcgtgttcgtgatgaagaacggcaccaacgtggcctgcctcgtgaaagagttctaccccaaggacatcaggatcaacctggtgtccagcaagaagatcaccgagttcgaccccgccatcgtgatctcccccagcggcaagtacaacgccgtgaagctggggaagtacgaggacagcaacagcgtgacctgctccgtgcagcacgacaacaagaccgtgcacagcaccgactttcccgaggacacattcttcccaagccccgagagcagctgcgacgtgaagctggtggaaaagagcttcgagacagacaccaacctgaacttccagaacctgagcgtgatcggcttcagaatcctgctgctgaaagtggccggctttaacctgctgatgaccctgcggctgtggtccagccgggttaagttttccagatccgcagacgcacccgcttaccaacaagggcagaaccaactctacaatgaacttaatttggggcggagggaagagtacgacgttctggacaaaaggaggggacgagatcccgagatgggcggaaagcctcagcgaaggaagaatccgcaagaggggctttataacgaactccagaaagataaaatggcagaagcctatagtgagattgggatgaagggagaaaggaggaggggtaaaggtcacgatgggttgtaccaaggattgagcacagccactaaagatacctatgatgcgctccacatgcaggccctgccgccaaga

SEQ ID NO: 25187 - DNA, 747 bp, synthetic construct
  source 1..747: mol_type = other DNA
cctcacaccaagcccagcgtgttcgtgatgaagaacggcaccaacgtggcctgcctcgtgaaagagttctaccccaaggacatcaggatcaacctggtgtccagcaagaagatcaccgagttcgaccccgccatcgtgatctcccccagcggcaagtacaacgccgtgaagctggggaagtacgaggacagcaacagcgtgacctgctccgtgcagcacgacaacaagaccgtgcacagcaccgactttggcagagccgattgcggctttaccagcgagagctaccagcagggcgtgctgagcgccaccatcctgtacgagatcctgctgggcaaggccaccctgtacgccgtgctggtgtctgccctggtgctgatggctatggtcaagcggaaggacagccggggacgggttaagttttccagatccgcagacgcacccgcttaccaacaagggcagaaccaactctacaatgaacttaatttggggcggagggaagagtacgacgttctggacaaaaggaggggacgagatcccgagatgggcggaaagcctcagcgaaggaagaatccgcaagaggggctttataacgaactccagaaagataaaatggcagaagcctatagtgagattgggatgaagggagaaaggaggaggggtaaaggtcacgatgggttgtaccaaggattgagcacagccactaaagatacctatgatgcgctccacatgcaggccctgccgccaaga

SEQ ID NO: 25188 - DNA, 741 bp, synthetic construct
  source 1..741: mol_type = other DNA
cctcacaccaagcccagcgtgttcgtgatgaagaacggcaccaacgtggcctgcctcgtgaaagagttctaccccaaggacatcaggatcaacctggtgtccagcaagaagatcaccgagttcgaccccgccatcgtgatctcccccagcggcaagtacaacgccgtgaagctggggaagtacgaggacagcaacagcgtgacctgctccgtgcagcacgacaacaagaccgtgcacagcaccgactttgccgattgcggctttaccagcgagagctaccagcagggcgtgctgagcgccaccatcctgtacgagatcctgctgggcaaggccaccctgtacgccgtgctggtgtctgccctggtgctgatggctatggtcaagcggaaggacagccggggacgggttaagttttccagatccgcagacgcacccgcttaccaacaagggcagaaccaactctacaatgaacttaatttggggcggagggaagagtacgacgttctggacaaaaggaggggacgagatcccgagatgggcggaaagcctcagcgaaggaagaatccgcaagaggggctttataacgaactccagaaagataaaatggcagaagcctatagtgagattgggatgaagggagaaaggaggaggggtaaaggtcacgatgggttgtaccaaggattgagcacagccactaaagatacctatgatgcgctccacatgcaggccctgccgccaaga

SEQ ID NO: 25189 - DNA, 771 bp, synthetic construct
  source 1..771: mol_type = other DNA
cctcacaccaagcccagcgtgttcgtgatgaagaacggcaccaacgtggcctgcctcgtgaaagagttctaccccaaggacatcaggatcaacctggtgtccagcaagaagatcaccgagttcgaccccgccatcgtgatctcccccagcggcaagtacaacgccgtgaagctggggaagtacgaggacagcaacagcgtgacctgctccgtgcagcacgacaacaagaccgtgcacagcaccgactttcagatcgtgtctgccgaagcctggggcagagccgattgcggctttaccagcgagagctaccagcagggcgtgctgagcgccaccatcctgtacgagatcctgctgggcaaggccaccctgtacgccgtgctggtgtctgccctggtgctgatggctatggtcaagcggaaggacagccggggacgggttaagttttccagatccgcagacgcacccgcttaccaacaagggcagaaccaactctacaatgaacttaatttggggcggagggaagagtacgacgttctggacaaaaggaggggacgagatcccgagatgggcggaaagcctcagcgaaggaagaatccgcaagaggggctttataacgaactccagaaagataaaatggcagaagcctatagtgagattgggatgaagggagaaaggaggaggggtaaaggtcacgatgggttgtaccaaggattgagcacagccactaaagatacctatgatgcgctccacatgcaggccctgccgccaaga

SEQ ID NO: 25190 - DNA, 795 bp, synthetic construct
  source 1..795: mol_type = other DNA
cctcacaccaagcccagcgtgttcgtgatgaagaacggcaccaacgtggcctgcctcgtgaaagagttctaccccaaggacatcaggatcaacctggtgtccagcaagaagatcaccgagttcgaccccgccatcgtgatctcccccagcggcaagtacaacgccgtgaagctggggaagtacgaggacagcaacagcgtgacctgctccgtgcagcacgacaacaagaccgtgcacagcaccgactttttcccacccatcaagaccgatgtgattacaatggaccccaaggacaactgctccaaggacgccaacgataccctgctgctccagctgaccaacaccagcgcctactacatgtacttgttgctgctgctgaagtccgtggtgtacttcgccatcatcacatgctgcctgctgcggagaaccgccttctgctgcaacggcgagaagtctcgggttaagttttccagatccgcagacgcacccgcttaccaacaagggcagaaccaactctacaatgaacttaatttggggcggagggaagagtacgacgttctggacaaaaggaggggacgagatcccgagatgggcggaaagcctcagcgaaggaagaatccgcaagaggggctttataacgaactccagaaagataaaatggcagaagcctatagtgagattgggatgaagggagaaaggaggaggggtaaaggtcacgatgggttgtaccaaggattgagcacagccactaaagatacctatgatgcgctccacatgcaggccctgccgccaaga

SEQ ID NO: 25191 - DNA, 789 bp, synthetic construct
  source 1..789: mol_type = other DNA
cctcacaccaagcccagcgtgttcgtgatgaagaacggcaccaacgtggcctgcctcgtgaaagagttctaccccaaggacatcaggatcaacctggtgtccagcaagaagatcaccgagttcgaccccgccatcgtgatctcccccagcggcaagtacaacgccgtgaagctggggaagtacgaggacagcaacagcgtgacctgctccgtgcagcacgacaacaagaccgtgcacagcaccgactttcccatcaagaccgatgtgattacaatggaccccaaggacaactgctccaaggacgccaacgataccctgctgctccagctgaccaacaccagcgcctactacatgtacttgttgctgctgctgaagtccgtggtgtacttcgccatcatcacatgctgcctgctgcggagaaccgccttctgctgcaacggcgagaagtctcgggttaagttttccagatccgcagacgcacccgcttaccaacaagggcagaaccaactctacaatgaacttaatttggggcggagggaagagtacgacgttctggacaaaaggaggggacgagatcccgagatgggcggaaagcctcagcgaaggaagaatccgcaagaggggctttataacgaactccagaaagataaaatggcagaagcctatagtgagattgggatgaagggagaaaggaggaggggtaaaggtcacgatgggttgtaccaaggattgagcacagccactaaagatacctatgatgcgctccacatgcaggccctgccgccaaga

SEQ ID NO: 25192 - DNA, 765 bp, synthetic construct
  source 1..765: mol_type = other DNA
cctcacaccaagcccagcgtgttcgtgatgaagaacggcaccaacgtggcctgcctcgtgaaagagttctaccccaaggacatcaggatcaacctggtgtccagcaagaagatcaccgagttcgaccccgccatcgtgatctcccccagcggcaagtacaacgccgtgaagctggggaagtacgaggacagcaacagcgtgacctgctccgtgcagcacgacaacaagaccgtgcacagcaccgactttatggaccccaaggacaactgctccaaggacgccaacgataccctgctgctccagctgaccaacaccagcgcctactacatgtacttgttgctgctgctgaagtccgtggtgtacttcgccatcatcacatgctgcctgctgcggagaaccgccttctgctgcaacggcgagaagtctcgggttaagttttccagatccgcagacgcacccgcttaccaacaagggcagaaccaactctacaatgaacttaatttggggcggagggaagagtacgacgttctggacaaaaggaggggacgagatcccgagatgggcggaaagcctcagcgaaggaagaatccgcaagaggggctttataacgaactccagaaagataaaatggcagaagcctatagtgagattgggatgaagggagaaaggaggaggggtaaaggtcacgatgggttgtaccaaggattgagcacagccactaaagatacctatgatgcgctccacatgcaggccctgccgccaaga

SEQ ID NO: 25193 - DNA, 792 bp, synthetic construct; identical to SEQ ID NO: 24513
  source 1..792: mol_type = other DNA

SEQ ID NO: 25194 - DNA, 771 bp, synthetic construct
  source 1..771: mol_type = other DNA
cctcacaccaagcccagcgtgttcgtgatgaagaacggcaccaacgtggcctgcctcgtgaaagagttctaccccaaggacatcaggatcaacctggtgtccagcaagaagatcaccgagttcgaccccgccatcgtgatctcccccagcggcaagtacaacgccgtgaagctggggaagtacgaggacagcaacagcgtgacctgctccgtgcagcacgacaacaagaccgtgcacagcaccgactttgaccacgtgaagcccaaagagacagagaacaccaagcagcccagcaagagctgccacaagcccaaggccatcgtgcacaccgagaaagtgaacatgatgagcctgaccgtgctgggcctgcggatgctgttcgccaaaaccgtggccgtgaacttcctgctgaccgccaagctgttcttcctccgggttaagttttccagatccgcagacgcacccgcttaccaacaagggcagaaccaactctacaatgaacttaatttggggcggagggaagagtacgacgttctggacaaaaggaggggacgagatcccgagatgggcggaaagcctcagcgaaggaagaatccgcaagaggggctttataacgaactccagaaagataaaatggcagaagcctatagtgagattgggatgaagggagaaaggaggaggggtaaaggtcacgatgggttgtaccaaggattgagcacagccactaaagatacctatgatgcgctccacatgcaggccctgccgccaaga

SEQ ID NO: 25195 - DNA, 789 bp, synthetic construct
  source 1..789: mol_type = other DNA
cctcacaccaagcccagcgtgttcgtgatgaagaacggcaccaacgtggcctgcctcgtgaaagagttctaccccaaggacatcaggatcaacctggtgtccagcaagaagatcaccgagttcgaccccgccatcgtgatctcccccagcggcaagtacaacgccgtgaagctggggaagtacgaggacagcaacagcgtgacctgctccgtgcagcacgacaacaagaccgtgcacagcaccgactttgaagtgaaaaccgactccaccatccccgaggacacattcttcccaagccccgagagcagctgcgacgtgaagctggtggaaaagagcttcgagacagacaccaacctgaacttccagaacctgagcgtgatcggcttcagaatcctgctgctgaaagtggccggctttaacctgctgatgaccctgcggctgtggtccagccgggttaagttttccagatccgcagacgcacccgcttaccaacaagggcagaaccaactctacaatgaacttaatttggggcggagggaagagtacgacgttctggacaaaaggaggggacgagatcccgagatgggcggaaagcctcagcgaaggaagaatccgcaagaggggctttataacgaactccagaaagataaaatggcagaagcctatagtgagattgggatgaagggagaaaggaggaggggtaaaggtcacgatgggttgtaccaaggattgagcacagccactaaagatacctatgatgcgctccacatgcaggccctgccgccaaga

SEQ ID NO: 25196 - DNA, 759 bp, synthetic construct
  source 1..759: mol_type = other DNA
cctcacaccaagcccagcgtgttcgtgatgaagaacggcaccaacgtggcctgcctcgtgaaagagttctaccccaaggacatcaggatcaacctggtgtccagcaagaagatcaccgagttcgaccccgccatcgtgatctcccccagcggcaagtacaacgccgtgaagctggggaagtacgaggacagcaacagcgtgacctgctccgtgcagcacgacaacaagaccgtgcacagcaccgactttgaagtgaaaaccgactccaccgagagcagctgcgacgtgaagctggtggaaaagagcttcgagacagacaccaacctgaacttccagaacctgagcgtgatcggcttcagaatcctgctgctgaaagtggccggctttaacctgctgatgaccctgcggctgtggtccagccgggttaagttttccagatccgcagacgcacccgcttaccaacaagggcagaaccaactctacaatgaacttaatttggggcggagggaagagtacgacgttctggacaaaaggaggggacgagatcccgagatgggcggaaagcctcagcgaaggaagaatccgcaagaggggctttataacgaactccagaaagataaaatggcagaagcctatagtgagattgggatgaagggagaaaggaggaggggtaaaggtcacgatgggttgtaccaaggattgagcacagccactaaagatacctatgatgcgctccacatgcaggccctgccgccaaga

SEQ ID NO: 25197 - DNA, 786 bp, synthetic construct
  source 1..786: mol_type = other DNA
cctcacaccaagcccagcgtgttcgtgatgaagaacggcaccaacgtggcctgcctcgtgaaagagttctaccccaaggacatcaggatcaacctggtgtccagcaagaagatcaccgagttcgaccccgccatcgtgatctcccccagcggcaagtacaacgccgtgaagctggggaagtacgaggacagcaacagcgtgacctgctccgtgcagcacgacaacaagaccgtgcacagcaccgactttgaagtgaaaaccgactccacccccgaggacacattcttcccaagccccgagagcagctgcgacgtgaagctggtggaaaagagcttcgagacagacaccaacctgaacttccagaacctgagcgtgatcggcttcagaatcctgctgctgaaagtggccggctttaacctgctgatgaccctgcggctgtggtccagccgggttaagttttccagatccgcagacgcacccgcttaccaacaagggcagaaccaactctacaatgaacttaatttggggcggagggaagagtacgacgttctggacaaaaggaggggacgagatcccgagatgggcggaaagcctcagcgaaggaagaatccgcaagaggggctttataacgaactccagaaagataaaatggcagaagcctatagtgagattgggatgaagggagaaaggaggaggggtaaaggtcacgatgggttgtaccaaggattgagcacagccactaaagatacctatgatgcgctccacatgcaggccctgccgccaaga

SEQ ID NO: 25198 - DNA, 768 bp, synthetic construct
  source 1..768: mol_type = other DNA
cctcacaccaagcccagcgtgttcgtgatgaagaacggcaccaacgtggcctgcctcgtgaaagagttctaccccaaggacatcaggatcaacctggtgtccagcaagaagatcaccgagttcgaccccgccatcgtgatctcccccagcggcaagtacaacgccgtgaagctggggaagtacgaggacagcaacagcgtgacctgctccgtgcagcacgacaacaagaccgtgcacagcaccgactttgaagtgaaaaccgactccaccggcagagccgattgcggctttaccagcgagagctaccagcagggcgtgctgagcgccaccatcctgtacgagatcctgctgggcaaggccaccctgtacgccgtgctggtgtctgccctggtgctgatggctatggtcaagcggaaggacagccggggacgggttaagttttccagatccgcagacgcacccgcttaccaacaagggcagaaccaactctacaatgaacttaatttggggcggagggaagagtacgacgttctggacaaaaggaggggacgagatcccgagatgggcggaaagcctcagcgaaggaagaatccgcaagaggggctttataacgaactccagaaagataaaatggcagaagcctatagtgagattgggatgaagggagaaaggaggaggggtaaaggtcacgatgggttgtaccaaggattgagcacagccactaaagatacctatgatgcgctccacatgcaggccctgccgccaaga

SEQ ID NO: 25199 - DNA, 762 bp, synthetic construct
  source 1..762: mol_type = other DNA
cctcacaccaagcccagcgtgttcgtgatgaagaacggcaccaacgtggcctgcctcgtgaaagagttctaccccaaggacatcaggatcaacctggtgtccagcaagaagatcaccgagttcgaccccgccatcgtgatctcccccagcggcaagtacaacgccgtgaagctggggaagtacgaggacagcaacagcgtgacctgctccgtgcagcacgacaacaagaccgtgcacagcaccgactttgaagtgaaaaccgactccaccgccgattgcggctttaccagcgagagctaccagcagggcgtgctgagcgccaccatcctgtacgagatcctgctgggcaaggccaccctgtacgccgtgctggtgtctgccctggtgctgatggctatggtcaagcggaaggacagccggggacgggttaagttttccagatccgcagacgcacccgcttaccaacaagggcagaaccaactctacaatgaacttaatttggggcggagggaagagtacgacgttctggacaaaaggaggggacgagatcccgagatgggcggaaagcctcagcgaaggaagaatccgcaagaggggctttataacgaactccagaaagataaaatggcagaagcctatagtgagattgggatgaagggagaaaggaggaggggtaaaggtcacgatgggttgtaccaaggattgagcacagccactaaagatacctatgatgcgctccacatgcaggccctgccgccaaga

SEQ ID NO: 25200 - DNA, 792 bp, synthetic construct
  source 1..792: mol_type = other DNA
cctcacaccaagcccagcgtgttcgtgatgaagaacggcaccaacgtggcctgcctcgtgaaagagttctaccccaaggacatcaggatcaacctggtgtccagcaagaagatcaccgagttcgaccccgccatcgtgatctcccccagcggcaagtacaacgccgtgaagctggggaagtacgaggacagcaacagcgtgacctgctccgtgcagcacgacaacaagaccgtgcacagcaccgactttgaagtgaaaaccgactccacccagatcgtgtctgccgaagcctggggcagagccgattgcggctttaccagcgagagctaccagcagggcgtgctgagcgccaccatcctgtacgagatcctgctgggcaaggccaccctgtacgccgtgctggtgtctgccctggtgctgatggctatggtcaagcggaaggacagccggggacgggttaagttttccagatccgcagacgcacccgcttaccaacaagggcagaaccaactctacaatgaacttaatttggggcggagggaagagtacgacgttctggacaaaaggaggggacgagatcccgagatgggcggaaagcctcagcgaaggaagaatccgcaagaggggctttataacgaactccagaaagataaaatggcagaagcctatagtgagattgggatgaagggagaaaggaggaggggtaaaggtcacgatgggttgtaccaaggattgagcacagccactaaagatacctatgatgcgctccacatgcaggccctgccgccaaga

SEQ ID NO: 25201 - DNA, 816 bp, synthetic construct
  source 1..816: mol_type = other DNA
cctcacaccaagcccagcgtgttcgtgatgaagaacggcaccaacgtggcctgcctcgtgaaagagttctaccccaaggacatcaggatcaacctggtgtccagcaagaagatcaccgagttcgaccccgccatcgtgatctcccccagcggcaagtacaacgccgtgaagctggggaagtacgaggacagcaacagcgtgacctgctccgtgcagcacgacaacaagaccgtgcacagcaccgactttgaagtgaaaaccgactccaccttcccacccatcaagaccgatgtgattacaatggaccccaaggacaactgctccaaggacgccaacgataccctgctgctccagctgaccaacaccagcgcctactacatgtacttgttgctgctgctgaagtccgtggtgtacttcgccatcatcacatgctgcctgctgcggagaaccgccttctgctgcaacggcgagaagtctcgggttaagttttccagatccgcagacgcacccgcttaccaacaagggcagaaccaactctacaatgaacttaatttggggcggagggaagagtacgacgttctggacaaaaggaggggacgagatcccgagatgggcggaaagcctcagcgaaggaagaatccgcaagaggggctttataacgaactccagaaagataaaatggcagaagcctatagtgagattgggatgaagggagaaaggaggaggggtaaaggtcacgatgggttgtaccaaggattgagcacagccactaaagatacctatgatgcgctccacatgcaggccctgccgccaaga

SEQ ID NO: 25202 - DNA, 810 bp, synthetic construct
  source 1..810: mol_type = other DNA
cctcacaccaagcccagcgtgttcgtgatgaagaacggcaccaacgtggcctgcctcgtgaaagagttctaccccaaggacatcaggatcaacctggtgtccagcaagaagatcaccgagttcgaccccgccatcgtgatctcccccagcggcaagtacaacgccgtgaagctggggaagtacgaggacagcaacagcgtgacctgctccgtgcagcacgacaacaagaccgtgcacagcaccgactttgaagtgaaaaccgactccacccccatcaagaccgatgtgattacaatggaccccaaggacaactgctccaaggacgccaacgataccctgctgctccagctgaccaacaccagcgcctactacatgtacttgttgctgctgctgaagtccgtggtgtacttcgccatcatcacatgctgcctgctgcggagaaccgccttctgctgcaacggcgagaagtctcgggttaagttttccagatccgcagacgcacccgcttaccaacaagggcagaaccaactctacaatgaacttaatttggggcggagggaagagtacgacgttctggacaaaaggaggggacgagatcccgagatgggcggaaagcctcagcgaaggaagaatccgcaagaggggctttataacgaactccagaaagataaaatggcagaagcctatagtgagattgggatgaagggagaaaggaggaggggtaaaggtcacgatgggttgtaccaaggattgagcacagccactaaagatacctatgatgcgctccacatgcaggccctgccgccaaga

SEQ ID NO: 25203 - DNA, 786 bp, synthetic construct
  source 1..786: mol_type = other DNA
cctcacaccaagcccagcgtgttcgtgatgaagaacggcaccaacgtggcctgcctcgtgaaagagttctaccccaaggacatcaggatcaacctggtgtccagcaagaagatcaccgagttcgaccccgccatcgtgatctcccccagcggcaagtacaacgccgtgaagctggggaagtacgaggacagcaacagcgtgacctgctccgtgcagcacgacaacaagaccgtgcacagcaccgactttgaagtgaaaaccgactccaccatggaccccaaggacaactgctccaaggacgccaacgataccctgctgctccagctgaccaacaccagcgcctactacatgtacttgttgctgctgctgaagtccgtggtgtacttcgccatcatcacatgctgcctgctgcggagaaccgccttctgctgcaacggcgagaagtctcgggttaagttttccagatccgcagacgcacccgcttaccaacaagggcagaaccaactctacaatgaacttaatttggggcggagggaagagtacgacgttctggacaaaaggaggggacgagatcccgagatgggcggaaagcctcagcgaaggaagaatccgcaagaggggctttataacgaactccagaaagataaaatggcagaagcctatagtgagattgggatgaagggagaaaggaggaggggtaaaggtcacgatgggttgtaccaaggattgagcacagccactaaagatacctatgatgcgctccacatgcaggccctgccgccaaga

SEQ ID NO: 25204 - DNA, 810 bp, synthetic construct; identical to SEQ ID NO: 25202
  source 1..810: mol_type = other DNA

SEQ ID NO: 25205 - DNA, 768 bp, synthetic construct
  source 1..768: mol_type = other DNA
cctcacaccaagcccagcgtgttcgtgatgaagaacggcaccaacgtggcctgcctcgtgaaagagttctaccccaaggacatcaggatcaacctggtgtccagcaagaagatcaccgagttcgaccccgccatcgtgatctcccccagcggcaagtacaacgccgtgaagctggggaagtacgaggacagcaacagcgtgacctgctccgtgcagcacgacaacaagaccgtgcacagcaccgactttgaagtgaaaaccgactccacctgctccaaggacgccaacgataccctgctgctccagctgaccaacaccagcgcctactacatgtacttgttgctgctgctgaagtccgtggtgtacttcgccatcatcacatgctgcctgctgcggagaaccgccttctgctgcaacggcgagaagtctcgggttaagttttccagatccgcagacgcacccgcttaccaacaagggcagaaccaactctacaatgaacttaatttggggcggagggaagagtacgacgttctggacaaaaggaggggacgagatcccgagatgggcggaaagcctcagcgaaggaagaatccgcaagaggggctttataacgaactccagaaagataaaatggcagaagcctatagtgagattgggatgaagggagaaaggaggaggggtaaaggtcacgatgggttgtaccaaggattgagcacagccactaaagatacctatgatgcgctccacatgcaggccctgccgccaaga

SEQ ID NO: 25206 - DNA, 768 bp, synthetic construct; identical to SEQ ID NO: 25184
  source 1..768: mol_type = other DNA

SEQ ID NO: 25207 - DNA, 738 bp, synthetic construct; identical to SEQ ID NO: 25185
  source 1..738: mol_type = other DNA

SEQ ID NO: 25208 - DNA, 765 bp, synthetic construct; identical to SEQ ID NO: 25186
  source 1..765: mol_type = other DNA

SEQ ID NO: 25209 - DNA, 747 bp, synthetic construct; identical to SEQ ID NO: 25187
  source 1..747: mol_type = other DNA

SEQ ID NO: 25210 - DNA, 741 bp, synthetic construct; identical to SEQ ID NO: 25188
  source 1..741: mol_type = other DNA

SEQ ID NO: 25211 - DNA, 771 bp, synthetic construct; identical to SEQ ID NO: 25189
  source 1..771: mol_type = other DNA

SEQ ID NO: 25212 - DNA, 795 bp, synthetic construct; identical to SEQ ID NO: 25190
  source 1..795: mol_type = other DNA

SEQ ID NO: 25213 - DNA, 789 bp, synthetic construct; identical to SEQ ID NO: 25191
  source 1..789: mol_type = other DNA

SEQ ID NO: 25214 - DNA, 765 bp, synthetic construct; identical to SEQ ID NO: 25192
  source 1..765: mol_type = other DNA

SEQ ID NO: 25215 - DNA, 789 bp, synthetic construct; identical to SEQ ID NO: 25191
  source 1..789: mol_type = other DNA

SEQ ID NO: 25216 - DNA, 747 bp, synthetic construct
  source 1..747: mol_type = other DNA
cctcacaccaagcccagcgtgttcgtgatgaagaacggcaccaacgtggcctgcctcgtgaaagagttctaccccaaggacatcaggatcaacctggtgtccagcaagaagatcaccgagttcgaccccgccatcgtgatctcccccagcggcaagtacaacgccgtgaagctggggaagtacgaggacagcaacagcgtgacctgctccgtgcagcacgacaacaagaccgtgcacagcaccgacttttgctccaaggacgccaacgataccctgctgctccagctgaccaacaccagcgcctactacatgtacttgttgctgctgctgaagtccgtggtgtacttcgccatcatcacatgctgcctgctgcggagaaccgccttctgctgcaacggcgagaagtctcgggttaagttttccagatccgcagacgcacccgcttaccaacaagggcagaaccaactctacaatgaacttaatttggggcggagggaagagtacgacgttctggacaaaaggaggggacgagatcccgagatgggcggaaagcctcagcgaaggaagaatccgcaagaggggctttataacgaactccagaaagataaaatggcagaagcctatagtgagattgggatgaagggagaaaggaggaggggtaaaggtcacgatgggttgtaccaaggattgagcacagccactaaagatacctatgatgcgctccacatgcaggccctgccgccaaga

SEQ ID NO: 25217 - DNA, 789 bp, synthetic construct; identical to SEQ ID NO: 25195
  source 1..789: mol_type = other DNA

SEQ ID NO: 25218 - DNA, 759 bp, synthetic construct; identical to SEQ ID NO: 25196
  source 1..759: mol_type = other DNA

SEQ ID NO: 25219 - DNA, 786 bp, synthetic construct; identical to SEQ ID NO: 25197
  source 1..786: mol_type = other DNA

SEQ ID NO: 25220 - DNA, 768 bp, synthetic construct; identical to SEQ ID NO: 25198
  source 1..768: mol_type = other DNA

SEQ ID NO: 25221 - DNA, 762 bp, synthetic construct; identical to SEQ ID NO: 25199
  source 1..762: mol_type = other DNA

SEQ ID NO: 25222 - DNA, 792 bp, synthetic construct; identical to SEQ ID NO: 25200
  source 1..792: mol_type = other DNA

SEQ ID NO: 25223 - DNA, 816 bp, synthetic construct; identical to SEQ ID NO: 25201
  source 1..816: mol_type = other DNA

SEQ ID NO: 25224 - DNA, 810 bp, synthetic construct; identical to SEQ ID NO: 25202
  source 1..810: mol_type = other DNA

SEQ ID NO: 25225 - DNA, 786 bp, synthetic construct; identical to SEQ ID NO: 25203
  source 1..786: mol_type = other DNA

SEQ ID NO: 25226 - DNA, 810 bp, synthetic construct; identical to SEQ ID NO: 25202
  source 1..810: mol_type = other DNA

SEQ ID NO: 25227 - DNA, 768 bp, synthetic construct; identical to SEQ ID NO: 25205
  source 1..768: mol_type = other DNA

SEQ ID NO: 25228 - DNA, 759 bp, synthetic construct
  source 1..759: mol_type = other DNA
atccagaaccctgatcctgccgtgtaccagctgcgggatagcaagagcagcgacaagagcgtgtgtctgttcaccgacttcgacagccagaccaacgtgtcccagagcaaggactccgacgtgtacatcaccgataagtgcgtgctggacatgcggagcatggacttcaagagcaactccgccgtggcctggtccaacaagtccgatttcgcctgcgccaacgccttcaacaacagcattatccccgaggacacattcttcccaagccccgagagcagctgcgacgtgaagctggtggaaaagagcttcgagacagacaccaacctgaacttccagaacctgagcgtgatcggcctgcggatgctgttcgccaaaaccgtggccgtgaacttcctgctgaccgccaagctgttcttcctccgggttaagttttccagatccgcagacgcacccgcttaccaacaagggcagaaccaactctacaatgaacttaatttggggcggagggaagagtacgacgttctggacaaaaggaggggacgagatcccgagatgggcggaaagcctcagcgaaggaagaatccgcaagaggggctttataacgaactccagaaagataaaatggcagaagcctatagtgagattgggatgaagggagaaaggaggaggggtaaaggtcacgatgggttgtaccaaggattgagcacagccactaaagatacctatgatgcgctccacatgcaggccctgccgccaaga

SEQ ID NO: 25229 - DNA, 759 bp, synthetic construct
  source 1..759: mol_type = other DNA
atccagaaccctgatcctgccgtgtaccagctgcgggatagcaagagcagcgacaagagcgtgtgtctgttcaccgacttcgacagccagaccaacgtgtcccagagcaaggactccgacgtgtacatcaccgataagtgcgtgctggacatgcggagcatggacttcaagagcaactccgccgtggcctggtccaacaagtccgatttcgcctgcgccaacgccttcaacaacagcattatccccgaggacacattcttcccaagccccgagagcagctgcgacgtgaagctggtggaaaagagcttcgagacagacaccaacctgaacttccagaacctgagcgtgctgggcctgcggatgctgttcgccaaaaccgtggccgtgaacttcctgctgaccgccaagctgttcttcctccgggttaagttttccagatccgcagacgcacccgcttaccaacaagggcagaaccaactctacaatgaacttaatttggggcggagggaagagtacgacgttctggacaaaaggaggggacgagatcccgagatgggcggaaagcctcagcgaaggaagaatccgcaagaggggctttataacgaactccagaaagataaaatggcagaagcctatagtgagattgggatgaagggagaaaggaggaggggtaaaggtcacgatgggttgtaccaaggattgagcacagccactaaagatacctatgatgcgctccacatgcaggccctgccgccaaga

SEQ ID NO: 25230 - DNA, 759 bp, synthetic construct; identical to SEQ ID NO: 25229
  source 1..759: mol_type = other DNA

SEQ ID NO: 25231 - DNA, 798 bp, synthetic construct
  source 1..798: mol_type = other DNA
agccagcctcacaccaagcccagcgtgttcgtgatgaagaacggcaccaacgtggcctgcctcgtgaaagagttctaccccaaggacatcaggatcaacctggtgtccagcaagaagatcaccgagttcgaccccgccatcgtgatctcccccagcggcaagtacaacgccgtgaagctggggaagtacgaggacagcaacagcgtgacctgctccgtgcagcacgacaacaagaccgtgcacagcaccgactttgaagtgaaaaccgactccaccgaccacgtgaagcccaaagagacagagaacaccaagcagcccagcaagagctgccacaagcccaaggccatcgtgcacaccgagaaagtgaacatgatgagcctgaccgtgctgggcttcagaatcctgctgctgaaagtggccggctttaacctgctgatgaccctgcggctgtggtccagccgggttaagttttccagatccgcagacgcacccgcttaccaacaagggcagaaccaactctacaatgaacttaatttggggcggagggaagagtacgacgttctggacaaaaggaggggacgagatcccgagatgggcggaaagcctcagcgaaggaagaatccgcaagaggggctttataacgaactccagaaagataaaatggcagaagcctatagtgagattgggatgaagggagaaaggaggaggggtaaaggtcacgatgggttgtaccaaggattgagcacagccactaaagatacctatgatgcgctccacatgcaggccctgccgccaaga

SEQ ID NO: 25232 - DNA, 798 bp, synthetic construct
  source 1..798: mol_type = other DNA
agccagcctcacaccaagcccagcgtgttcgtgatgaagaacggcaccaacgtggcctgcctcgtgaaagagttctaccccaaggacatcaggatcaacctggtgtccagcaagaagatcaccgagttcgaccccgccatcgtgatctcccccagcggcaagtacaacgccgtgaagctggggaagtacgaggacagcaacagcgtgacctgctccgtgcagcacgacaacaagaccgtgcacagcaccgactttgaagtgaaaaccgactccaccgaccacgtgaagcccaaagagacagagaacaccaagcagcccagcaagagctgccacaagcccaaggccatcgtgcacaccgagaaagtgaacatgatgagcctgaccgtgatcggcttcagaatcctgctgctgaaagtggccggctttaacctgctgatgaccctgcggctgtggtccagccgggttaagttttccagatccgcagacgcacccgcttaccaacaagggcagaaccaactctacaatgaacttaatttggggcggagggaagagtacgacgttctggacaaaaggaggggacgagatcccgagatgggcggaaagcctcagcgaaggaagaatccgcaagaggggctttataacgaactccagaaagataaaatggcagaagcctatagtgagattgggatgaagggagaaaggaggaggggtaaaggtcacgatgggttgtaccaaggattgagcacagccactaaagatacctatgatgcgctccacatgcaggccctgccgccaaga

SEQ ID NO: 25233 - DNA, 879 bp, synthetic construct
  source 1..879: mol_type = other DNA
gaggacctgaagaacgtgttcccacctgaggtggccgtgttcgagcctagcgaggccgagatcagccacacccagaaagccaccctcgtgtgcctggctaccggcttctaccccgaccatgtggaactgtcttggtgggtcaacggcaaagaggtgcacagcggcgtgtgtaccgacccccagccactgaaagaacagcccgccctgaacgacagccggtactgcctgagcagcagactgagagtgtccgccaccttctggcagaacccccggaaccacttcagatgccaggtgcagttctacggcctgagcgagaacgacgagtggacccaggacagagccaagcccgtgacccagatcgtgtctgccgaagcctggggcagagccgattgcggctttaccagcgagagctaccagcagggcgtgctgagcgccaccatcctgtacttgttgctgctgctgaagtccgtggtgtacttcgccatcatcacatgctgcctgctgcggagaaccgccttctgctgcaacggcgagaagtctcgggttaagttttccagatccgcagacgcacccgcttaccaacaagggcagaaccaactctacaatgaacttaatttggggcggagggaagagtacgacgttctggacaaaaggaggggacgagatcccgagatgggcggaaagcctcagcgaaggaagaatccgcaagaggggctttataacgaactccagaaagataaaatggcagaagcctatagtgagattgggatgaagggagaaaggaggaggggtaaaggtcacgatgggttgtaccaaggattgagcacagccactaaagatacctatgatgcgctccacatgcaggccctgccgccaaga

SEQ ID NO: 25234 - DNA, 879 bp, synthetic construct
  source 1..879: mol_type = other DNA
gaggacctgaagaacgtgttcccacctgaggtggccgtgttcgagcctagcgaggccgagatcagccacacccagaaagccaccctcgtgtgcctggctaccggcttctaccccgaccatgtggaactgtcttggtgggtcaacggcaaagaggtgcacagcggcgtgtgtaccgacccccagccactgaaagaacagcccgccctgaacgacagccggtactgcctgagcagcagactgagagtgtccgccaccttctggcagaacccccggaaccacttcagatgccaggtgcagttctacggcctgagcgagaacgacgagtggacccaggacagagccaagcccgtgacccagatcgtgtctgccgaagcctggggcagagccgattgcggctttaccagcgagagctaccagcagggcgtgctgagcgcctactacatgtacttgttgctgctgctgaagtccgtggtgtacttcgccatcatcacatgctgcctgctgcggagaaccgccttctgctgcaacggcgagaagtctcgggttaagttttccagatccgcagacgcacccgcttaccaacaagggcagaaccaactctacaatgaacttaatttggggcggagggaagagtacgacgttctggacaaaaggaggggacgagatcccgagatgggcggaaagcctcagcgaaggaagaatccgcaagaggggctttataacgaactccagaaagataaaatggcagaagcctatagtgagattgggatgaagggagaaaggaggaggggtaaaggtcacgatgggttgtaccaaggattgagcacagccactaaagatacctatgatgcgctccacatgcaggccctgccgccaaga

SEQ ID NO: 25235 - DNA, 855 bp, synthetic construct
  source 1..855: mol_type = other DNA
gacaagcagctggacgccgacgtgtcccccaagcctaccatcttcctgccctctatcgccgagacaaagctccagaaggccggcacctacctgtgcctgctggaaaagttcttcccagatgtgattaagatccactggcaggaaaagaagtccaacaccatcctgggcagccaggaaggcaacaccatgaagaccaacgacacctacatgaagttcagctggctgaccgtgcccgagaagtccctggacaaagaacacagatgcatcgtgcggcacgaaaacaacaagaacggcgtggaccaggaaatcatcttcccacccatcaagaccgatgtgattacaatggaccccaaggacaactgctccaaggacgccaacgataccctgctgctccagctgaccaacaccagcgcctactacatgtacgagatcctgctgggcaaggccaccctgtacgccgtgctggtgtctgccctggtgctgatggctatggtcaagcggaaggacagccggggacgggttaagttttccagatccgcagacgcacccgcttaccaacaagggcagaaccaactctacaatgaacttaatttggggcggagggaagagtacgacgttctggacaaaaggaggggacgagatcccgagatgggcggaaagcctcagcgaaggaagaatccgcaagaggggctttataacgaactccagaaagataaaatggcagaagcctatagtgagattgggatgaagggagaaaggaggaggggtaaaggtcacgatgggttgtaccaaggattgagcacagccactaaagatacctatgatgcgctccacatgcaggccctgccgccaaga

SEQ ID NO: 25236 - DNA, 855 bp, synthetic construct
  source 1..855: mol_type = other DNA
gacaagcagctggacgccgacgtgtcccccaagcctaccatcttcctgccctctatcgccgagacaaagctccagaaggccggcacctacctgtgcctgctggaaaagttcttcccagatgtgattaagatccactggcaggaaaagaagtccaacaccatcctgggcagccaggaaggcaacaccatgaagaccaacgacacctacatgaagttcagctggctgaccgtgcccgagaagtccctggacaaagaacacagatgcatcgtgcggcacgaaaacaacaagaacggcgtggaccaggaaatcatcttcccacccatcaagaccgatgtgattacaatggaccccaaggacaactgctccaaggacgccaacgataccctgctgctccagctgaccaacaccagcgccaccatcctgtacgagatcctgctgggcaaggccaccctgtacgccgtgctggtgtctgccctggtgctgatggctatggtcaagcggaaggacagccggggacgggttaagttttccagatccgcagacgcacccgcttaccaacaagggcagaaccaactctacaatgaacttaatttggggcggagggaagagtacgacgttctggacaaaaggaggggacgagatcccgagatgggcggaaagcctcagcgaaggaagaatccgcaagaggggctttataacgaactccagaaagataaaatggcagaagcctatagtgagattgggatgaagggagaaaggaggaggggtaaaggtcacgatgggttgtaccaaggattgagcacagccactaaagatacctatgatgcgctccacatgcaggccctgccgccaaga

SEQ ID NO: 25237 - DNA, 876 bp, synthetic construct
  source 1..876: mol_type = other DNA
gaggacctgaagaacgtgttcccacctgaggtggccgtgttcgagcctagcgaggccgagatcagccacacccagaaagccaccctcgtgtgcctggctaccggcttctaccccgaccatgtggaactgtcttggtgggtcaacggcaaagaggtgcacagcggcgtgtgtaccgacccccagccactgaaagaacagcccgccctgaacgacagccggtactgcctgagcagcagactgagagtgtccgccaccttctggcagaacccccggaaccacttcagatgccaggtgcagttctacggcctgagcgagaacgacgagtggacccaggacagagccaagcccgtgacccagatcgtgtctgccgaagcctggggcagagccgatagcggctttaccagcgagagctaccagcagggcgtgctgagcgccaccatcctgtacgagatcctgctgggcaaggccaccctgtacgccgtgctggtgtctgccctggtgctgatggctatggtcaagcggaaggacagccggggacgggttaagttttccagatccgcagacgcacccgcttaccaacaagggcagaaccaactctacaatgaacttaatttggggcggagggaagagtacgacgttctggacaaaaggaggggacgagatcccgagatgggcggaaagcctcagcgaaggaagaatccgcaagaggggctttataacgaactccagaaagataaaatggcagaagcctatagtgagattgggatgaagggagaaaggaggaggggtaaaggtcacgatgggttgtaccaaggattgagcacagccactaaagatacctatgatgcgctccacatgcaggccctgccgccaaga

SEQ ID NO: 25238 - DNA, 759 bp, synthetic construct
  source 1..759: mol_type = other DNA
atccagaaccctgatcctgccgtgtaccagctgcgggatagcaagagcagcgacaagagcgtgtgtctgttcaccgacttcgacagccagaccaacgtgtcccagagcaaggactccgacgtgtacatcaccgataagtgcgtgctggacatgcggagcatggacttcaagagcaactccgccgtggcctggtccaacaagtccgatttcgcctgcgccaacgccttcaacaacagcattatccccgaggacacattcttcccaagccccgagagcagcagcgacgtgaagctggtggaaaagagcttcgagacagacaccaacctgaacttccagaacctgagcgtgatcggcttcagaatcctgctgctgaaagtggccggctttaacctgctgatgaccctgcggctgtggtccagccgggttaagttttccagatccgcagacgcacccgcttaccaacaagggcagaaccaactctacaatgaacttaatttggggcggagggaagagtacgacgttctggacaaaaggaggggacgagatcccgagatgggcggaaagcctcagcgaaggaagaatccgcaagaggggctttataacgaactccagaaagataaaatggcagaagcctatagtgagattgggatgaagggagaaaggaggaggggtaaaggtcacgatgggttgtaccaaggattgagcacagccactaaagatacctatgatgcgctccacatgcaggccctgccgccaaga

SEQ ID NO: 25239 - DNA, 876 bp, synthetic construct
  source 1..876: mol_type = other DNA
gaggacctgaagaacgtgttcccacctgaggtggccgtgttcgagcctagcgaggccgagatcagccacacccagaaagccaccctcgtgtgcctggctaccggcttctaccccgaccatgtggaactgtcttggtgggtcaacggcaaagaggtgcacagcggcgtgtgtaccgacccccagccactgaaagaacagcccgccctgaacgacagccggtactgcctgagcagcagactgagagtgtccgccaccttctggcagaacccccggaaccacttcagatgccaggtgcagttctacggcctgagcgagaacgacgagtggacccaggacagagccaagcccgtgacccagatcgtgtctgccgaagcctggggcagagccgatggcggctttaccagcgagagctaccagcagggcgtgctgagcgccaccatcctgtacgagatcctgctgggcaaggccaccctgtacgccgtgctggtgtctgccctggtgctgatggctatggtcaagcggaaggacagccggggacgggttaagttttccagatccgcagacgcacccgcttaccaacaagggcagaaccaactctacaatgaacttaatttggggcggagggaagagtacgacgttctggacaaaaggaggggacgagatcccgagatgggcggaaagcctcagcgaaggaagaatccgcaagaggggctttataacgaactccagaaagataaaatggcagaagcctatagtgagattgggatgaagggagaaaggaggaggggtaaaggtcacgatgggttgtaccaaggattgagcacagccactaaagatacctatgatgcgctccacatgcaggccctgccgccaaga

SEQ ID NO: 25240 - DNA, 759 bp, synthetic construct
  source 1..759: mol_type = other DNA
atccagaaccctgatcctgccgtgtaccagctgcgggatagcaagagcagcgacaagagcgtgtgtctgttcaccgacttcgacagccagaccaacgtgtcccagagcaaggactccgacgtgtacatcaccgataagtgcgtgctggacatgcggagcatggacttcaagagcaactccgccgtggcctggtccaacaagtccgatttcgcctgcgccaacgccttcaacaacagcattatccccgaggacacattcttcccaagccccgagagcagccgggacgtgaagctggtggaaaagagcttcgagacagacaccaacctgaacttccagaacctgagcgtgatcggcttcagaatcctgctgctgaaagtggccggctttaacctgctgatgaccctgcggctgtggtccagccgggttaagttttccagatccgcagacgcacccgcttaccaacaagggcagaaccaactctacaatgaacttaatttggggcggagggaagagtacgacgttctggacaaaaggaggggacgagatcccgagatgggcggaaagcctcagcgaaggaagaatccgcaagaggggctttataacgaactccagaaagataaaatggcagaagcctatagtgagattgggatgaagggagaaaggaggaggggtaaaggtcacgatgggttgtaccaaggattgagcacagccactaaagatacctatgatgcgctccacatgcaggccctgccgccaaga

SEQ ID NO: 25241 - DNA, 885 bp, synthetic construct
  source 1..885: mol_type = other DNA
gatatccagaaccctgaccctgccgtgtaccagctgagagactctaaatccagtgacaagtctgtctgcctattcaccgattttgattctcaaacaaatgtgtcacaaagtaaggattctgatgtgtatatcacagacaaaactgtgctagacatgaggtctatggacttcaagagcaacagtgctgtggcctggagcaacaaatctgactttgcatgtgcaaacgccttcaacaacagcattattccagaagacaccttcttccccagcccagaaagttcctgtgatgtcaagctggtcgagaaaagctttgaaacagatacgaacctaaactttcaaaacctgtcagtgattgggttccgaatcctcctcctgaaagtggccgggtttaatctgctcatgacgctgcggctgtggtccagcaggagtaagaggagcaggctcctgcacagtgactacatgaacatgactccacgccgccccggacccacccgcaagcattaccagccctatgccccaccacgcgacttcgcagcctatcgctccagagtgaagttcagcagaagcgccgacgcccctgcctaccagcagggacagaaccaactgtacaacgagctgaacctgggcagacgggaagagtacgacgtgctggacaagcggagaggcagggaccctgagatgggcggaaagccccagcggagaaagaacccccaggaaggactgtataacgaactccagaaagacaagatggccgaagcctacagcgagatcggcatgaagggcgagcggagaagaggcaagggccacgatggcctgtaccagggcctgagcaccgccaccaaggacacctatgacgccctgcacatgcaggccctgcctccaaga

SEQ ID NO: 25242 - DNA, 882 bp, synthetic construct
  source 1..882: mol_type = other DNA
atccagaaccctgaccctgccgtgtaccagctgagagactctaaatccagtgacaagtctgtctgcctattcaccgattttgattctcaaacaaatgtgtcacaaagtaaggattctgatgtgtatatcacagacaaaactgtgctagacatgaggtctatggacttcaagagcaacagtgctgtggcctggagcaacaaatctgactttgcatgtgcaaacgccttcaacaacagcattattccagaagacaccttcttccccagcccagaaagttcctgtgatgtcaagctggtcgagaaaagctttgaaacagatacgaacctaaactttcaaaacctgtcagtgattgggttccgaatcctcctcctgaaagtggccgggtttaatctgctcatgacgctgcggctgtggtccagcaggagtaagaggagcaggctcctgcacagtgactacatgaacatgactccacgccgccccggacccacccgcaagcattaccagccctatgccccaccacgcgacttcgcagcctatcgctccagagtgaagttcagcagaagcgccgacgcccctgcctaccagcagggacagaaccaactgtacaacgagctgaacctgggcagacgggaagagtacgacgtgctggacaagcggagaggcagggaccctgagatgggcggaaagccccagcggagaaagaacccccaggaaggactgtataacgaactccagaaagacaagatggccgaagcctacagcgagatcggcatgaagggcgagcggagaagaggcaagggccacgatggcctgtaccagggcctgagcaccgccaccaaggacacctatgacgccctgcacatgcaggccctgcctccaaga

SEQ ID NO: 25243 - DNA, 882 bp, synthetic construct
  source 1..882: mol_type = other DNA
atccagaaccctgatcctgccgtgtaccagctgcgggatagcaagagcagcgacaagagcgtgtgtctgttcaccgacttcgacagccagaccaacgtgtcccagagcaaggactccgacgtgtacatcaccgataagtgcgtgctggacatgcggagcatggacttcaagagcaactccgccgtggcctggtccaacaagtccgatttcgcctgcgccaacgccttcaacaacagcattatccccgaggacacattcttcccaagcagcgacgtgccctgcgacgtgaagctggtggaaaagagcttcgagacagacaccaacctgaacttccagaacctgagcgtgatcggcttcagaatcctgctgctgaaagtggccggctttaacctgctgatgaccctgcggctgtggtccagcaggagtaagaggagcaggctcctgcacagtgactacatgaacatgactccacgccgccccggacccacccgcaagcattaccagccctatgccccaccacgcgacttcgcagcctatcgctccagagtgaagttcagcagaagcgccgacgcccctgcctaccagcagggacagaaccaactgtacaacgagctgaacctgggcagacgggaagagtacgacgtgctggacaagcggagaggcagggaccctgagatgggcggaaagccccagcggagaaagaacccccaggaaggactgtataacgaactccagaaagacaagatggccgaagcctacagcgagatcggcatgaagggcgagcggagaagaggcaagggccacgatggcctgtaccagggcctgagcaccgccaccaaggacacctatgacgccctgcacatgcaggccctgcctccaaga

SEQ ID NO: 25244 - DNA, 882 bp, synthetic construct
  source 1..882: mol_type = other DNA
atccagaaccctgatcctgccgtgtaccagctgcgggatagcaagagcagcgacaagagcgtgtgtctgttcaccgacttcgacagccagaccaacgtgtcccagagcaaggactccgacgtgtacatcaccgataagaccgtgctggacatgcggagcatggacttcaagagcaactccgccgtggcctggtccaacaagtccgatttcgcctgcgccaacgccttcaacaacagcattatccccgaggacacattcttcccaagccccgagagcagctgcgacgtgaagctggtggaaaagagcttcgagacagacaccaacctgaacttccagaacctgagcgtgatcggcttcagaatcctgctgctgaaagtggccggctttaacctgctgatgaccctgcggctgtggtccagcaggagtaagaggagcaggctcctgcacagtgactacatgaacatgactccacgccgccccggacccacccgcaagcattaccagccctatgccccaccacgcgacttcgcagcctatcgctccagagtgaagttcagcagaagcgccgacgcccctgcctaccagcagggacagaaccaactgtacaacgagctgaacctgggcagacgggaagagtacgacgtgctggacaagcggagaggcagggaccctgagatgggcggaaagccccagcggagaaagaacccccaggaaggactgtataacgaactccagaaagacaagatggccgaagcctacagcgagatcggcatgaagggcgagcggagaagaggcaagggccacgatggcctgtaccagggcctgagcaccgccaccaaggacacctatgacgccctgcacatgcaggccctgcctccaaga

SEQ ID NO: 25245 - DNA, 873 bp, synthetic construct
  source 1..873: mol_type = other DNA
cctgatcctgccgtgtaccagctgcgggatagcaagagcagcgacaagagcgtgtgcctgttcaccgacttcgacagccagaccaacgtgtctcagtctaaggatagtgatgtgtatatcaccgacaagaccgtgctggacatgcggagcatggacttcaagagcaacagcgccgtggcctggtccaacaagagcgacttcgcctgcgccaacgccttcaacaacagcatcatccccgaggacaccttcttccccagccccgagagcagctgcgacgtgaaactggtggagaagagcttcgagacagacaccaacctgaacttccagaacctgagcgtgatcggcttcagaatcctgctgctgaaggtggccggcttcaacctgctgatgaccctgcggctgtggagcagcaggagtaagaggagcaggctcctgcacagtgactacatgaacatgactccacgccgccccggacccacccgcaagcattaccagccctatgccccaccacgcgacttcgcagcctatcgctccagagtgaagttcagcagaagcgccgacgcccctgcctaccagcagggacagaaccaactgtacaacgagctgaacctgggcagacgggaagagtacgacgtgctggacaagcggagaggcagggaccctgagatgggcggaaagccccagcggagaaagaacccccaggaaggactgtataacgaactccagaaagacaagatggccgaagcctacagcgagatcggcatgaagggcgagcggagaagaggcaagggccacgatggcctgtaccagggcctgagcaccgccaccaaggacacctatgacgccctgcacatgcaggccctgcctccaaga

SEQ ID NO: 25246 - DNA, 882 bp, synthetic construct
  source 1..882: mol_type = other DNA
atccagaaccctgatcctgccgtgtaccagctgcgggatagcaagagcagcgacaagagcgtgtgtctgttcaccgacttcgacagccagaccaacgtgtcccagagcaaggactccgacgtgtacatcaccgataagtgcgtgctggacatgcggagcatggacttcaagagcaactccgccgtggcctggtccaacaagtccgatttcgcctgcgccaacgccttcaacaacagcattatccccgaggacacattcttcccaagccccgagagcagctgcgacgtgaagctggtggaaaagagcttcgagacagacaccaacctgaacttccagaacctgagcgtgatcggcttcagaatcctgctgctgaaagtggccggctttaacctgctgatgaccctgcggctgtggtccagcaggagtaagaggagcaggctcctgcacagtgactacatgaacatgactccacgccgccccggacccacccgcaagcattaccagccctatgccccaccacgcgacttcgcagcctatcgctccagagtgaagttcagcagaagcgccgacgcccctgcctaccagcagggacagaaccaactgtacaacgagctgaacctgggcagacgggaagagtacgacgtgctggacaagcggagaggcagggaccctgagatgggcggaaagccccagcggagaaagaacccccaggaaggactgtataacgaactccagaaagacaagatggccgaagcctacagcgagatcggcatgaagggcgagcggagaagaggcaagggccacgatggcctgtaccagggcctgagcaccgccaccaaggacacctatgacgccctgcacatgcaggccctgcctccaaga

SEQ ID NO: 25247 - DNA, 873 bp, synthetic construct
  source 1..873: mol_type = other DNA
cctgatcctgccgtgtaccagctgcgggatagcaagagcagcgacaagagcgtgtgtctgttcaccgacttcgacagccagaccaacgtgtcccagagcaaggactccgacgtgtacatcaccgataagtgcgtgctggacatgcggagcatggacttcaagagcaactccgccgtggcctggtccaacaagtccgatttcgcctgcgccaacgccttcaacaacagcattatccccgaggacacattcttcccaagccccgagagcagctgcgacgtgaagctggtggaaaagagcttcgagacagacaccaacctgaacttccagaacctgagcgtgatcggcttcagaatcctgctgctgaaagtggccggctttaacctgctgatgaccctgcggctgtggtccagcaggagtaagaggagcaggctcctgcacagtgactacatgaacatgactccacgccgccccggacccacccgcaagcattaccagccctatgccccaccacgcgacttcgcagcctatcgctccagagtgaagttcagcagaagcgccgacgcccctgcctaccagcagggacagaaccaactgtacaacgagctgaacctgggcagacgggaagagtacgacgtgctggacaagcggagaggcagggaccctgagatgggcggaaagccccagcggagaaagaacccccaggaaggactgtataacgaactccagaaagacaagatggccgaagcctacagcgagatcggcatgaagggcgagcggagaagaggcaagggccacgatggcctgtaccagggcctgagcaccgccaccaaggacacctatgacgccctgcacatgcaggccctgcctccaaga

SEQ ID NO: 25248 - DNA, 882 bp, synthetic construct
  source 1..882: mol_type = other DNA
atccagaaccctgatcctgccgtgtaccagctgcgggatagcaagagcagcgacaagagcgtgtgtctgttcaccgacttcgacagccagaccaacgtgtcccagagcaaggactccgacgtgtacatcaccgataagaccgtgctggacatgcggagcatggacttcaagagcaactccgccgtggcctggtccaacaagtccgatttcgcctgcgccaacgccttcaacaacagcattatccccgaggacacattcttcccaagcagcgacgtgccctgcgacgtgaagctggtggaaaagagcttcgagacagacaccaacctgaacttccagaacctgagcgtgatcggcttcagaatcctgctgctgaaagtggccggctttaacctgctgatgaccctgcggctgtggtccagcaggagtaagaggagcaggctcctgcacagtgactacatgaacatgactccacgccgccccggacccacccgcaagcattaccagccctatgccccaccacgcgacttcgcagcctatcgctccagagtgaagttcagcagaagcgccgacgcccctgcctaccagcagggacagaaccaactgtacaacgagctgaacctgggcagacgggaagagtacgacgtgctggacaagcggagaggcagggaccctgagatgggcggaaagccccagcggagaaagaacccccaggaaggactgtataacgaactccagaaagacaagatggccgaagcctacagcgagatcggcatgaagggcgagcggagaagaggcaagggccacgatggcctgtaccagggcctgagcaccgccaccaaggacacctatgacgccctgcacatgcaggccctgcctccaaga

SEQ ID NO: 25249 - DNA, 882 bp, synthetic construct
  source 1..882: mol_type = other DNA
atccagaaccctgatcctgccgtgtaccagctgcgggatagcaagagcagcgacaagagcgtgtgtctgttcaccgacttcgacagccagaccaacgtgtcccagagcaaggactccgacgtgtacatcaccgataagaccgtgctggacatgcggagcatggacttcaagagcaaccgcgccgtggcctggtccaacaagtccgatttcgcctgcgccaacgccttcaacaacagcattatccccgaggacacattcttcccaagccccgagagcagctgcgacgtgaagctggtggaaaagagcttcgagacagacaccaacctgaacttccagaacctgagcgtgatcggcttcagaatcctgctgctgaaagtggccggctttaacctgctgatgaccctgcggctgtggtccagcaggagtaagaggagcaggctcctgcacagtgactacatgaacatgactccacgccgccccggacccacccgcaagcattaccagccctatgccccaccacgcgacttcgcagcctatcgctccagagtgaagttcagcagaagcgccgacgcccctgcctaccagcagggacagaaccaactgtacaacgagctgaacctgggcagacgggaagagtacgacgtgctggacaagcggagaggcagggaccctgagatgggcggaaagccccagcggagaaagaacccccaggaaggactgtataacgaactccagaaagacaagatggccgaagcctacagcgagatcggcatgaagggcgagcggagaagaggcaagggccacgatggcctgtaccagggcctgagcaccgccaccaaggacacctatgacgccctgcacatgcaggccctgcctccaaga

SEQ ID NO: 25250 - DNA, 882 bp, synthetic construct
  source 1..882: mol_type = other DNA
atccagaaccctgatcctgccgtgtaccagctgcgggatagcaagagcagcgacaagagcgtgtgtctgttcaccgacttcgacagccagaccaacgtgtcccagagcaaggactccgacgtgtacatcaccgataagaccgtgctggacatgcggagcatggacttcaagagcaaccgcgccgtggcctggtccaacaagtccgatttcgcctgcgccaacgccttcaacaacagcattatccccgaggacacattcttcccaagcagcgacgtgccctgcgacgtgaagctggtggaaaagagcttcgagacagacaccaacctgaacttccagaacctgagcgtgatcggcttcagaatcctgctgctgaaagtggccggctttaacctgctgatgaccctgcggctgtggtccagcaggagtaagaggagcaggctcctgcacagtgactacatgaacatgactccacgccgccccggacccacccgcaagcattaccagccctatgccccaccacgcgacttcgcagcctatcgctccagagtgaagttcagcagaagcgccgacgcccctgcctaccagcagggacagaaccaactgtacaacgagctgaacctgggcagacgggaagagtacgacgtgctggacaagcggagaggcagggaccctgagatgggcggaaagccccagcggagaaagaacccccaggaaggactgtataacgaactccagaaagacaagatggccgaagcctacagcgagatcggcatgaagggcgagcggagaagaggcaagggccacgatggcctgtaccagggcctgagcaccgccaccaaggacacctatgacgccctgcacatgcaggccctgcctccaaga

SEQ ID NO: 25251 - DNA, 882 bp, synthetic construct
  source 1..882: mol_type = other DNA
atccagaaccctgatcctgccgtgtaccagctgcgggatagcaagagcagcgacaagagcgtgtgtctgttcaccgacttcgacagccagaccaacgtgtcccagagcaaggactccgacgtgtacatcaccgataagaccgtgctggacatgcggagcatggacttcaagagcaactccgccgtggcctggtccaacaagtccgatttcgcctgcgccaacgccttcaacaacagcattatccccgaggacacattcttcccaagcagcgacagcagctgcgacgtgaagctggtggaaaagagcttcgagacagacaccaacctgaacttccagaacctgagcgtgatcggcttcagaatcctgctgctgaaagtggccggctttaacctgctgatgaccctgcggctgtggtccagcaggagtaagaggagcaggctcctgcacagtgactacatgaacatgactccacgccgccccggacccacccgcaagcattaccagccctatgccccaccacgcgacttcgcagcctatcgctccagagtgaagttcagcagaagcgccgacgcccctgcctaccagcagggacagaaccaactgtacaacgagctgaacctgggcagacgggaagagtacgacgtgctggacaagcggagaggcagggaccctgagatgggcggaaagccccagcggagaaagaacccccaggaaggactgtataacgaactccagaaagacaagatggccgaagcctacagcgagatcggcatgaagggcgagcggagaagaggcaagggccacgatggcctgtaccagggcctgagcaccgccaccaaggacacctatgacgccctgcacatgcaggccctgcctccaaga

SEQ ID NO: 25252 - DNA, 1179 bp, synthetic construct
  source 1..1179: mol_type = other DNA
atccagaaccctgatcctgccgtgtaccagctgcgggatagcaagagcagcgacaagagcgtgtgtctgttcaccgacttcgacagccagaccaacgtgtcccagagcaaggactccgacgtgtacatcaccgataagaccgtgctggacatgcggagcatggacttcaagagcaactccgccgtggcctggtccaacaagtccgatttcgcctgcgccaacgccttcaacaacagcattatccccgaggacacattcttcccaagccccgagagcagctgcggtacccagagttttgggttgttggaccctaaattgtgctatctgttggacggaatcctgttcatttacggagtgatcctgaccgcattgttcctgcgggttaagttttccagatccgcagacgcacccgcttaccaacaagggcagaaccaactctacaatgaacttaatttggggcggagggaagagtacgacgttctggacaaaaggaggggacgagatcccgagatgggcggaaagcctcagcgaaggaagaatccgcaagaggggctttataacgaactccagaaagataaaatggcagaagcctatagtgagattgggatgaagggagaaaggaggaggggtaaaggtcacgatgggttgtaccaaggattgagcacagccactaaagatacctatgatgcgctccacatgcaggccctgccgccaagaaggagtaagaggagcaggctcctgcacagtgactacatgaacatgactccacgccgccccggacccacccgcaagcattaccagccctatgccccaccacgcgacttcgcagcctatcgctccagagtgaagttcagcagaagcgccgacgcccctgcctaccagcagggacagaaccaactgtacaacgagctgaacctgggcagacgggaagagtacgacgtgctggacaagcggagaggcagggaccctgagatgggcggaaagccccagcggagaaagaacccccaggaaggactgtataacgaactccagaaagacaagatggccgaagcctacagcgagatcggcatgaagggcgagcggagaagaggcaagggccacgatggcctgtaccagggcctgagcaccgccaccaaggacacctatgacgccctgcacatgcaggccctgcctccaaga

SEQ ID NO: 25253 - DNA, 870 bp, synthetic construct
  source 1..870: mol_type = other DNA
atccagaaccctgaacctgccgtgtaccagctgaaggaccccagaagccaggacagcaccctgtgcctgttcaccgacttcgacagccagatcaacgtgcccaagacaatggaaagcggcaccttcatcaccgacaagaccgtgctggacatgaaggctatggacagcaagagcaacggcgccattgcctggtccaaccagaccagcttcacatgccaggacatcttcaaagagacaaacgccacctacccctccagcgacgtgccctgtgacgccaccctgaccgagaagtccttcgagacagacatgaacctcaacttccagaacctgagcgtgatgggcctgcgaatcctgctgctgaaagtggccggcttcaacctgctgatgaccctgcggctgtggtccagcaggagtaagaggagcaggctcctgcacagtgactacatgaacatgactccacgccgccccggacccacccgcaagcattaccagccctatgccccaccacgcgacttcgcagcctatcgctccagagtgaagttcagcagaagcgccgacgcccctgcctaccagcagggacagaaccaactgtacaacgagctgaacctgggcagacgggaagagtacgacgtgctggacaagcggagaggcagggaccctgagatgggcggaaagccccagcggagaaagaacccccaggaaggactgtataacgaactccagaaagacaagatggccgaagcctacagcgagatcggcatgaagggcgagcggagaagaggcaagggccacgatggcctgtaccagggcctgagcaccgccaccaaggacacctatgacgccctgcacatgcaggccctgcctccaaga

SEQ ID NO: 25254 - DNA, 861 bp, synthetic construct
  source 1..861: mol_type = other DNA
gtgcaggaccctgaccctagcgtgtaccagatgagaagccccaagaccggcaggaccgtgtgcctgttcaccgacttcgacagccaggccgacttccagaagcctgagggggccaccgtgatctccctgaacagcaccgtgctggacatgaaagtgatggacagcaagagcaacggcgctctgacctggaacagcgagacaaacatcgagtgcaaagagaacttccagcagcccttctaccccagcagcaactactcctgcgacgccaagctgatcgagaagtccttcgagacagacatggacctgaacttctacaacctgctggtcatcggcctgagaatcctgctgctgaaagtgatcggcttcaacctgttcatgaccctgaggctgtggtcctgcaggagtaagaggagcaggctcctgcacagtgactacatgaacatgactccacgccgccccggacccacccgcaagcattaccagccctatgccccaccacgcgacttcgcagcctatcgctccagagtgaagttcagcagaagcgccgacgcccctgcctaccagcagggacagaaccaactgtacaacgagctgaacctgggcagacgggaagagtacgacgtgctggacaagcggagaggcagggaccctgagatgggcggaaagccccagcggagaaagaacccccaggaaggactgtataacgaactccagaaagacaagatggccgaagcctacagcgagatcggcatgaagggcgagcggagaagaggcaagggccacgatggcctgtaccagggcctgagcaccgccaccaaggacacctatgacgccctgcacatgcaggccctgcctccaaga

SEQ ID NO: 25255 - DNA, 993 bp, synthetic construct
  source 1..993: mol_type = other DNA
gaggacctgaacaaggtgttcccacccgaggtcgctgtgtttgagccatcagaagcagagatctcccacacccaaaaggccacactggtgtgcctggccacaggcttcttccccgaccacgtggagctgagctggtgggtgaatgggaaggaggtgcacagtggggtcagcacagacccgcagcccctcaaggagcagcccgccctcaatgactccagatactgcctgagcagccgcctgagggtctcggccaccttctggcagaacccccgcaaccacttccgctgtcaagtccagttctacgggctctcggagaatgacgagtggacccaggatagggccaaacccgtcacccagatcgtcagcgccgaggcctggggtagagcagactgtggctttacctcggtgtcctaccagcaaggggtcctgtctgccaccatcctctatgagatcctgctagggaaggccaccctgtatgctgtgctggtcagcgcccttgtgttgatggccatggtcaagagaaaggatttcaggagtaagaggagcaggctcctgcacagtgactacatgaacatgactccacgccgccccggacccacccgcaagcattaccagccctatgccccaccacgcgacttcgcagcctatcgctccagagtgaagttcagcagaagcgccgacgcccctgcctaccagcagggacagaaccaactgtacaacgagctgaacctgggcagacgggaagagtacgacgtgctggacaagcggagaggcagggaccctgagatgggcggaaagccccagcggagaaagaacccccaggaaggactgtataacgaactccagaaagacaagatggccgaagcctacagcgagatcggcatgaagggcgagcggagaagaggcaagggccacgatggcctgtaccagggcctgagcaccgccaccaaggacacctatgacgccctgcacatgcaggccctgcctccaaga

SEQ ID NO: 25256 - DNA, 999 bp, synthetic construct
  source 1..999: mol_type = other DNA
gaggacctgaaaaacgtgttcccacccgaggtcgctgtgtttgagccatcagaagcagagatctcccacacccaaaaggccacactggtatgcctggccacaggcttctaccccgaccacgtggagctgagctggtgggtgaatgggaaggaggtgcacagtggggtcagcacagacccgcagcccctcaaggagcagcccgccctcaatgactccagatactgcctgagcagccgcctgagggtctcggccaccttctggcagaacccccgcaaccacttccgctgtcaagtccagttctacgggctctcggagaatgacgagtggacccaggatagggccaaacccgtcacccagatcgtcagcgccgaggcctggggtagagcagactgtggcttcacctccgagtcttaccagcaaggggtcctgtctgccaccatcctctatgagatcttgctagggaaggccaccttgtatgccgtgctggtcagtgccctcgtgctgatggccatggtcaagagaaaggattccagaggcaggagtaagaggagcaggctcctgcacagtgactacatgaacatgactccacgccgccccggacccacccgcaagcattaccagccctatgccccaccacgcgacttcgcagcctatcgctccagagtgaagttcagcagaagcgccgacgcccctgcctaccagcagggacagaaccaactgtacaacgagctgaacctgggcagacgggaagagtacgacgtgctggacaagcggagaggcagggaccctgagatgggcggaaagccccagcggagaaagaacccccaggaaggactgtataacgaactccagaaagacaagatggccgaagcctacagcgagatcggcatgaagggcgagcggagaagaggcaagggccacgatggcctgtaccagggcctgagcaccgccaccaaggacacctatgacgccctgcacatgcaggccctgcctccaaga

SEQ ID NO: 25257 - DNA, 999 bp, synthetic construct; identical to SEQ ID NO: 25256
  source 1..999: mol_type = other DNA

SEQ ID NO: 25258 - DNA, 999 bp, synthetic construct
  source 1..999: mol_type = other DNA
gaggacctgaagaacgtgttcccacctgaggtggccgtgttcgagcctagcgaggccgagatcagccacacccagaaagccaccctcgtgtgcctggctaccggcttctaccccgaccatgtggaactgtcttggtgggtcaacggcaaagaggtgcacagcggcgtgtgtaccgacccccagccactgaaagaacagcccgccctgaacgacagccggtactgcctgagcagcagactgagagtgtccgccaccttctggcagaacccccggaaccacttcagatgccaggtgcagttctacggcctgagcgagaacgacgagtggacccaggacagagccaagcccgtgacccagatcgtgtctgccgaagcctggggcagagccgattgcggctttaccagcgagagctaccagcagggcgtgctgagcgccaccatcctgtacgagatcctgctgggcaaggccaccctgtacgccgtgctggtgtctgccctggtgctgatggctatggtcaagcggaaggacagccggggaaggagtaagaggagcaggctcctgcacagtgactacatgaacatgactccacgccgccccggacccacccgcaagcattaccagccctatgccccaccacgcgacttcgcagcctatcgctccagagtgaagttcagcagaagcgccgacgcccctgcctaccagcagggacagaaccaactgtacaacgagctgaacctgggcagacgggaagagtacgacgtgctggacaagcggagaggcagggaccctgagatgggcggaaagccccagcggagaaagaacccccaggaaggactgtataacgaactccagaaagacaagatggccgaagcctacagcgagatcggcatgaagggcgagcggagaagaggcaagggccacgatggcctgtaccagggcctgagcaccgccaccaaggacacctatgacgccctgcacatgcaggccctgcctccaaga

SEQ ID NO: 25259 - DNA, 999 bp, synthetic construct
  source 1..999: mol_type = other DNA
gaggacctgaagaacgtgttcccacctgaggtggccgtgttcgagcctagcaaggccgagatcgcccacacccagaaagccaccctcgtgtgcctggctaccggcttctaccccgaccatgtggaactgtcttggtgggtcaacggcaaagaggtgcacagcggcgtgtgtaccgacccccagccactgaaagaacagcccgccctgaacgacagccggtactgcctgagcagcagactgagagtgtccgccaccttctggcagaacccccggaaccacttcagatgccaggtgcagttctacggcctgagcgagaacgacgagtggacccaggacagagccaagcccgtgacccagatcgtgtctgccgaagcctggggcagagccgattgcggcatcaccagcgccagctaccaccagggcgtgctgagcgccaccatcctgtacgagatcctgctgggcaaggccaccctgtacgccgtgctggtgtctgccctggtgctgatggctatggtcaagcggaaggacagccggggaaggagtaagaggagcaggctcctgcacagtgactacatgaacatgactccacgccgccccggacccacccgcaagcattaccagccctatgccccaccacgcgacttcgcagcctatcgctccagagtgaagttcagcagaagcgccgacgcccctgcctaccagcagggacagaaccaactgtacaacgagctgaacctgggcagacgggaagagtacgacgtgctggacaagcggagaggcagggaccctgagatgggcggaaagccccagcggagaaagaacccccaggaaggactgtataacgaactccagaaagacaagatggccgaagcctacagcgagatcggcatgaagggcgagcggagaagaggcaagggccacgatggcctgtaccagggcctgagcaccgccaccaaggacacctatgacgccctgcacatgcaggccctgcctccaaga

SEQ ID NO: 25260 - DNA, 999 bp, synthetic construct
  source 1..999: mol_type = other DNA
gaggacctgaagaacgtgttcccacctgaggtggccgtgttcgagcctagcgaggccgagatcagccacacccagaaagccaccctcgtgtgcctggctaccggcttctaccccgaccatgtggaactgtcttggtgggtcaacggcaaagaggtgcacagcggcgtgtctaccgacccccagccactgaaagaacagcccgccctgaacgacagccggtactgcctgagcagcagactgagagtgtccgccaccttctggcagaacccccggaaccacttcagatgccaggtgcagttctacggcctgagcgagaacgacgagtggacccaggacagagccaagcccgtgacccagatcgtgtctgccgaagcctggggcagagccgattgcggctttaccagcgagagctaccagcagggcgtgctgagcgccaccatcctgtacgagatcctgctgggcaaggccaccctgtacgccgtgctggtgtctgccctggtgctgatggctatggtcaagcggaaggacagccggggaaggagtaagaggagcaggctcctgcacagtgactacatgaacatgactccacgccgccccggacccacccgcaagcattaccagccctatgccccaccacgcgacttcgcagcctatcgctccagagtgaagttcagcagaagcgccgacgcccctgcctaccagcagggacagaaccaactgtacaacgagctgaacctgggcagacgggaagagtacgacgtgctggacaagcggagaggcagggaccctgagatgggcggaaagccccagcggagaaagaacccccaggaaggactgtataacgaactccagaaagacaagatggccgaagcctacagcgagatcggcatgaagggcgagcggagaagaggcaagggccacgatggcctgtaccagggcctgagcaccgccaccaaggacacctatgacgccctgcacatgcaggccctgcctccaaga

SEQ ID NO: 25261 - DNA, 996 bp, synthetic construct
  source 1..996: mol_type = other DNA
gacctgaagaacgtgttcccacctgaggtggccgtgttcgagcctagcgaggccgagatcagccacacccagaaagccaccctcgtgtgcctggctaccggcttctaccccgaccatgtggaactgtcttggtgggtcaacggcaaagaggtgcacagcggcgtgtctaccgacccccagccactgaaagaacagcccgccctgaacgacagccggtactgcctgagcagcagactgagagtgtccgccaccttctggcagaacccccggaaccacttcagatgccaggtgcagttctacggcctgagcgagaacgacgagtggacccaggacagagccaagcccgtgacccagatcgtgtctgccgaagcctggggcagagccgattgcggctttaccagcgagagctaccagcagggcgtgctgagcgccaccatcctgtacgagatcctgctgggcaaggccaccctgtacgccgtgctggtgtctgccctggtgctgatggctatggtcaagcggaaggacagccggggaaggagtaagaggagcaggctcctgcacagtgactacatgaacatgactccacgccgccccggacccacccgcaagcattaccagccctatgccccaccacgcgacttcgcagcctatcgctccagagtgaagttcagcagaagcgccgacgcccctgcctaccagcagggacagaaccaactgtacaacgagctgaacctgggcagacgggaagagtacgacgtgctggacaagcggagaggcagggaccctgagatgggcggaaagccccagcggagaaagaacccccaggaaggactgtataacgaactccagaaagacaagatggccgaagcctacagcgagatcggcatgaagggcgagcggagaagaggcaagggccacgatggcctgtaccagggcctgagcaccgccaccaaggacacctatgacgccctgcacatgcaggccctgcctccaaga

SEQ ID NO: 25262 - DNA, 993 bp, synthetic construct
  source 1..993: mol_type = other DNA
gaggacctgaagaacgtgttcccacctgaggtggccgtgttcgagcccagcgaggccgagatttcacacactcagaaagccacactcgtatgtctggcgactggtttctttcccgaccacgtggagctgtcttggtgggtgaacggcaaagaggtgcacagcggggtctctaccgacccccagccactgaaagagcagcccgccctgaacgacagccggtactgcctctcttctcggctgagagtgtccgccaccttctggcagaacccccggaaccacttcagatgccaggtgcagttctacggcctgagcgagaacgacgagtggacccaggacagagccaagcctgtgacccagatcgtgagtgctgaagcgtggggacgcgccgattgcggctttaccagcgagagctaccagcagggcgtgctgtctgccaccatcctgtacgagatcctgctgggcaaggccaccctgtacgccgtgctggtgtccgccctggtgctgatggctatggtgaagcggaaggacttcaggagtaagaggagcaggctcctgcacagtgactacatgaacatgactccacgccgccccggacccacccgcaagcattaccagccctatgccccaccacgcgacttcgcagcctatcgctccagagtgaagttcagcagaagcgccgacgcccctgcctaccagcagggacagaaccaactgtacaacgagctgaacctgggcagacgggaagagtacgacgtgctggacaagcggagaggcagggaccctgagatgggcggaaagccccagcggagaaagaacccccaggaaggactgtataacgaactccagaaagacaagatggccgaagcctacagcgagatcggcatgaagggcgagcggagaagaggcaagggccacgatggcctgtaccagggcctgagcaccgccaccaaggacacctatgacgccctgcacatgcaggccctgcctccaaga

SEQ ID NO: 25263 - DNA, 993 bp, synthetic construct
  source 1..993: mol_type = other DNA
gaggacctgaacaaggtgttcccacctgaggtggccgtgttcgagcccagcgaggccgagatttcacacactcagaaagccacactcgtatgtctggcgactggtttctttcccgaccacgtggagctgtcttggtgggtgaacggcaaagaggtgcacagcggggtctctaccgacccccagccactgaaagagcagcccgccctgaacgacagccggtactgcctctcttctcggctgagagtgtccgccaccttctggcagaacccccggaaccacttcagatgccaggtgcagttctacggcctgagcgagaacgacgagtggacccaggacagagccaagcctgtgacccagatcgtgagtgctgaagcgtggggacgcgccgattgcggctttaccagcgtgagctaccagcagggcgtgctgtctgccaccatcctgtacgagatcctgctgggcaaggccaccctgtacgccgtgctggtgtccgccctggtgctgatggctatggtgaagcggaaggacttcaggagtaagaggagcaggctcctgcacagtgactacatgaacatgactccacgccgccccggacccacccgcaagcattaccagccctatgccccaccacgcgacttcgcagcctatcgctccagagtgaagttcagcagaagcgccgacgcccctgcctaccagcagggacagaaccaactgtacaacgagctgaacctgggcagacgggaagagtacgacgtgctggacaagcggagaggcagggaccctgagatgggcggaaagccccagcggagaaagaacccccaggaaggactgtataacgaactccagaaagacaagatggccgaagcctacagcgagatcggcatgaagggcgagcggagaagaggcaagggccacgatggcctgtaccagggcctgagcaccgccaccaaggacacctatgacgccctgcacatgcaggccctgcctccaaga

SEQ ID NO: 25264 - DNA, 999 bp, synthetic construct
  source 1..999: mol_type = other DNA
gaggacctgaagaacgtgttcccacctgaggtggccgtgttcgagcctagcaaggccgagatcgcccacacccagaaagccaccctcgtgtgcctggctaccggcttctaccccgaccatgtggaactgtcttggtgggtcaacggcaaagaggtgcacagcggcgtgtctaccgacccccagccactgaaagaacagcccgccctgaacgacagccggtactgcctgagcagcagactgagagtgtccgccaccttctggcagaacccccggaaccacttcagatgccaggtgcagttctacggcctgagcgagaacgacgagtggacccaggacagagccaagcccgtgacccagatcgtgtctgccgaagcctggggcagagccgattgcggcatcaccagcgccagctaccaccagggcgtgctgagcgccaccatcctgtacgagatcctgctgggcaaggccaccctgtacgccgtgctggtgtctgccctggtgctgatggctatggtcaagcggaaggacagccggggaaggagtaagaggagcaggctcctgcacagtgactacatgaacatgactccacgccgccccggacccacccgcaagcattaccagccctatgccccaccacgcgacttcgcagcctatcgctccagagtgaagttcagcagaagcgccgacgcccctgcctaccagcagggacagaaccaactgtacaacgagctgaacctgggcagacgggaagagtacgacgtgctggacaagcggagaggcagggaccctgagatgggcggaaagccccagcggagaaagaacccccaggaaggactgtataacgaactccagaaagacaagatggccgaagcctacagcgagatcggcatgaagggcgagcggagaagaggcaagggccacgatggcctgtaccagggcctgagcaccgccaccaaggacacctatgacgccctgcacatgcaggccctgcctccaaga

SEQ ID NO: 25265 - DNA, 999 bp, synthetic construct
  source 1..999: mol_type = other DNA
gaggacctgaagaacgtgttcccacctgaggtggccgtgttcgagcctagcaaggccgagatcgcccacacccagaaagccaccctcgtgtgcctggctaccggcttctaccccgaccatgtggaactgtcttggtgggtcaacggcaaagaggtgcacagcggcgtgtctaccgacccccagccactgaaagaacagcccgccctgaacgacagccggtactgcctgagcagcagactgagagtgtccgccaccttctggcagaacccccggaaccacttcagatgccaggtgcagttctacggcctgagcgagaacgacgagtggacccaggacagagccaagcccgtgacccagatcgtgtctgccgaagcctggggcagagccgattgcggctttaccagcgagagctaccagcagggcgtgctgagcgccaccatcctgtacgagatcctgctgggcaaggccaccctgtacgccgtgctggtgtctgccctggtgctgatggctatggtcaagcggaaggacagccggggaaggagtaagaggagcaggctcctgcacagtgactacatgaacatgactccacgccgccccggacccacccgcaagcattaccagccctatgccccaccacgcgacttcgcagcctatcgctccagagtgaagttcagcagaagcgccgacgcccctgcctaccagcagggacagaaccaactgtacaacgagctgaacctgggcagacgggaagagtacgacgtgctggacaagcggagaggcagggaccctgagatgggcggaaagccccagcggagaaagaacccccaggaaggactgtataacgaactccagaaagacaagatggccgaagcctacagcgagatcggcatgaagggcgagcggagaagaggcaagggccacgatggcctgtaccagggcctgagcaccgccaccaaggacacctatgacgccctgcacatgcaggccctgcctccaaga

SEQ ID NO: 25266 - DNA, 999 bp, synthetic construct
  source 1..999: mol_type = other DNA
gaggacctgaagaacgtgttcccacctgaggtggccgtgttcgagcctagcaaggccgagatcagccacacccagaaagccaccctcgtgtgcctggctaccggcttctaccccgaccatgtggaactgtcttggtgggtcaacggcaaagaggtgcacagcggcgtgtctaccgacccccagccactgaaagaacagcccgccctgaacgacagccggtactgcctgagcagcagactgagagtgtccgccaccttctggcagaacccccggaaccacttcagatgccaggtgcagttctacggcctgagcgagaacgacgagtggacccaggacagagccaagcccgtgacccagatcgtgtctgccgaagcctggggcagagccgattgcggcatcaccagcgagagctaccagcagggcgtgctgagcgccaccatcctgtacgagatcctgctgggcaaggccaccctgtacgccgtgctggtgtctgccctggtgctgatggctatggtcaagcggaaggacagccggggaaggagtaagaggagcaggctcctgcacagtgactacatgaacatgactccacgccgccccggacccacccgcaagcattaccagccctatgccccaccacgcgacttcgcagcctatcgctccagagtgaagttcagcagaagcgccgacgcccctgcctaccagcagggacagaaccaactgtacaacgagctgaacctgggcagacgggaagagtacgacgtgctggacaagcggagaggcagggaccctgagatgggcggaaagccccagcggagaaagaacccccaggaaggactgtataacgaactccagaaagacaagatggccgaagcctacagcgagatcggcatgaagggcgagcggagaagaggcaagggccacgatggcctgtaccagggcctgagcaccgccaccaaggacacctatgacgccctgcacatgcaggccctgcctccaaga

SEQ ID NO: 25267 - DNA, 999 bp, synthetic construct
  source 1..999: mol_type = other DNA
gaggacctgaagaacgtgttcccacctgaggtggccgtgttcgagcctagcaaggccgagatcagccacacccagaaagccaccctcgtgtgcctggctaccggcttctaccccgaccatgtggaactgtcttggtgggtcaacggcaaagaggtgcacagcggcgtgtctaccgacccccagccactgaaagaacagcccgccctgaacgacagccggtactgcctgagcagcagactgagagtgtccgccaccttctggcagaacccccggaaccacttcagatgccaggtgcagttctacggcctgagcgagaacgacgagtggacccaggacagagccaagcccgtgacccagatcgtgtctgccgaagcctggggcagagccgattgcggctttaccagcgccagctaccagcagggcgtgctgagcgccaccatcctgtacgagatcctgctgggcaaggccaccctgtacgccgtgctggtgtctgccctggtgctgatggctatggtcaagcggaaggacagccggggaaggagtaagaggagcaggctcctgcacagtgactacatgaacatgactccacgccgccccggacccacccgcaagcattaccagccctatgccccaccacgcgacttcgcagcctatcgctccagagtgaagttcagcagaagcgccgacgcccctgcctaccagcagggacagaaccaactgtacaacgagctgaacctgggcagacgggaagagtacgacgtgctggacaagcggagaggcagggaccctgagatgggcggaaagccccagcggagaaagaacccccaggaaggactgtataacgaactccagaaagacaagatggccgaagcctacagcgagatcggcatgaagggcgagcggagaagaggcaagggccacgatggcctgtaccagggcctgagcaccgccaccaaggacacctatgacgccctgcacatgcaggccctgcctccaaga

SEQ ID NO: 25268 - DNA, 999 bp, synthetic construct
  source 1..999: mol_type = other DNA
gaggacctgaagaacgtgttcccacctgaggtggccgtgttcgagcctagcaaggccgagatcagccacacccagaaagccaccctcgtgtgcctggctaccggcttctaccccgaccatgtggaactgtcttggtgggtcaacggcaaagaggtgcacagcggcgtgtctaccgacccccagccactgaaagaacagcccgccctgaacgacagccggtactgcctgagcagcagactgagagtgtccgccaccttctggcagaacccccggaaccacttcagatgccaggtgcagttctacggcctgagcgagaacgacgagtggacccaggacagagccaagcccgtgacccagatcgtgtctgccgaagcctggggcagagccgattgcggctttaccagcgagagctaccaccagggcgtgctgagcgccaccatcctgtacgagatcctgctgggcaaggccaccctgtacgccgtgctggtgtctgccctggtgctgatggctatggtcaagcggaaggacagccggggaaggagtaagaggagcaggctcctgcacagtgactacatgaacatgactccacgccgccccggacccacccgcaagcattaccagccctatgccccaccacgcgacttcgcagcctatcgctccagagtgaagttcagcagaagcgccgacgcccctgcctaccagcagggacagaaccaactgtacaacgagctgaacctgggcagacgggaagagtacgacgtgctggacaagcggagaggcagggaccctgagatgggcggaaagccccagcggagaaagaacccccaggaaggactgtataacgaactccagaaagacaagatggccgaagcctacagcgagatcggcatgaagggcgagcggagaagaggcaagggccacgatggcctgtaccagggcctgagcaccgccaccaaggacacctatgacgccctgcacatgcaggccctgcctccaaga

SEQ ID NO: 25269 - DNA, 999 bp, synthetic construct
  source 1..999: mol_type = other DNA
gaggacctgaagaacgtgttcccacctgaggtggccgtgttcgagcctagcagggccgagatcgcccacacccagaaagccaccctcgtgtgcctggctaccggcttctaccccgaccatgtggaactgtcttggtgggtcaacggcaaagaggtgcacagcggcgtgtctaccgacccccagccactgaaagaacagcccgccctgaacgacagccggtactgcctgagcagcagactgagagtgtccgccaccttctggcagaacccccggaaccacttcagatgccaggtgcagttctacggcctgagcgagaacgacgagtggacccaggacagagccaagcccgtgacccagatcgtgtctgccgaagcctggggcagagccgattgcggctttaccagcgagagctaccagcagggcgtgctgagcgccaccatcctgtacgagatcctgctgggcaaggccaccctgtacgccgtgctggtgtctgccctggtgctgatggctatggtcaagcggaaggacagccggggaaggagtaagaggagcaggctcctgcacagtgactacatgaacatgactccacgccgccccggacccacccgcaagcattaccagccctatgccccaccacgcgacttcgcagcctatcgctccagagtgaagttcagcagaagcgccgacgcccctgcctaccagcagggacagaaccaactgtacaacgagctgaacctgggcagacgggaagagtacgacgtgctggacaagcggagaggcagggaccctgagatgggcggaaagccccagcggagaaagaacccccaggaaggactgtataacgaactccagaaagacaagatggccgaagcctacagcgagatcggcatgaagggcgagcggagaagaggcaagggccacgatggcctgtaccagggcctgagcaccgccaccaaggacacctatgacgccctgcacatgcaggccctgcctccaaga

SEQ ID NO: 25270 - DNA, 999 bp, synthetic construct
  source 1..999: mol_type = other DNA
gaggacctgaagaacgtgttcccacctgaggtggccgtgttcgagcctagcagggccgagatcagccacacccagaaagccaccctcgtgtgcctggctaccggcttctaccccgaccatgtggaactgtcttggtgggtcaacggcaaagaggtgcacagcggcgtgtctaccgacccccagccactgaaagaacagcccgccctgaacgacagccggtactgcctgagcagcagactgagagtgtccgccaccttctggcagaacccccggaaccacttcagatgccaggtgcagttctacggcctgagcgagaacgacgagtggacccaggacagagccaagcccgtgacccagatcgtgtctgccgaagcctggggcagagccgattgcggctttaccagcgagagctaccagcagggcgtgctgagcgccaccatcctgtacgagatcctgctgggcaaggccaccctgtacgccgtgctggtgtctgccctggtgctgatggctatggtcaagcggaaggacagccggggaaggagtaagaggagcaggctcctgcacagtgactacatgaacatgactccacgccgccccggacccacccgcaagcattaccagccctatgccccaccacgcgacttcgcagcctatcgctccagagtgaagttcagcagaagcgccgacgcccctgcctaccagcagggacagaaccaactgtacaacgagctgaacctgggcagacgggaagagtacgacgtgctggacaagcggagaggcagggaccctgagatgggcggaaagccccagcggagaaagaacccccaggaaggactgtataacgaactccagaaagacaagatggccgaagcctacagcgagatcggcatgaagggcgagcggagaagaggcaagggccacgatggcctgtaccagggcctgagcaccgccaccaaggacacctatgacgccctgcacatgcaggccctgcctccaaga

SEQ ID NO: 25271 - DNA, 999 bp, synthetic construct
  source 1..999: mol_type = other DNA
gaggacctgaagaacgtgttcccacctgaggtggccgtgttcgagcctagcaaggccgagatcgcccacacccagaaagccaccctcgtgtgcctggctaccggcttctaccccgaccatgtggaactgtcttggtgggtcaacggcaaagaggtgcacagcggcgtgtctaccgacccccagccactgaaagaacagcccgccctgaacgacagccggtactgcctgagcagcggactgagagtgtccgccaccttctggcagaacccccggaaccacttcagatgccaggtgcagttctacggcctgagcgagaacgacgagtggacccaggacagagccaagcccgtgacccagatcgtgtctgccgaagcctggggcagagccgattgcggcatcaccagcgccagctaccaccagggcgtgctgagcgccaccatcctgtacgagatcctgctgggcaaggccaccctgtacgccgtgctggtgtctgccctggtgctgatggctatggtcaagcggaaggacagccggggaaggagtaagaggagcaggctcctgcacagtgactacatgaacatgactccacgccgccccggacccacccgcaagcattaccagccctatgccccaccacgcgacttcgcagcctatcgctccagagtgaagttcagcagaagcgccgacgcccctgcctaccagcagggacagaaccaactgtacaacgagctgaacctgggcagacgggaagagtacgacgtgctggacaagcggagaggcagggaccctgagatgggcggaaagccccagcggagaaagaacccccaggaaggactgtataacgaactccagaaagacaagatggccgaagcctacagcgagatcggcatgaagggcgagcggagaagaggcaagggccacgatggcctgtaccagggcctgagcaccgccaccaaggacacctatgacgccctgcacatgcaggccctgcctccaaga

SEQ ID NO: 25272 - DNA, 999 bp, synthetic construct
  source 1..999: mol_type = other DNA
gaggacctgaagaacgtgttcccacctgaggtggccgtgttcgagcctagcaaggccgagatcgcccacacccagaaagccaccctcgtgtgcctggctaccggcttctaccccgaccatgtggaactgtcttggtgggtcaacggcaaagaggtgcacagcggcgtgtctaccgacccccagccactgaaagaacagcccgccctgaacgacagccggtactgcctgagcagcggactgagagtgtccgccaccttctggcagaacccccggaaccacttcagatgccaggtgcagttctacggcctgagcgagaacgacgagtggacccaggacagagccaagcccgtgacccagatcgtgtctgccgaagcctggggcagagccgattgcggctttaccagcgagagctaccagcagggcgtgctgagcgccaccatcctgtacgagatcctgctgggcaaggccaccctgtacgccgtgctggtgtctgccctggtgctgatggctatggtcaagcggaaggacagccggggaaggagtaagaggagcaggctcctgcacagtgactacatgaacatgactccacgccgccccggacccacccgcaagcattaccagccctatgccccaccacgcgacttcgcagcctatcgctccagagtgaagttcagcagaagcgccgacgcccctgcctaccagcagggacagaaccaactgtacaacgagctgaacctgggcagacgggaagagtacgacgtgctggacaagcggagaggcagggaccctgagatgggcggaaagccccagcggagaaagaacccccaggaaggactgtataacgaactccagaaagacaagatggccgaagcctacagcgagatcggcatgaagggcgagcggagaagaggcaagggccacgatggcctgtaccagggcctgagcaccgccaccaaggacacctatgacgccctgcacatgcaggccctgcctccaaga

SEQ ID NO: 25273 - DNA, 999 bp, synthetic construct
  source 1..999: mol_type = other DNA
gaggacctgaagaacgtgttcccacctgaggtggccgtgttcgagcctagcgaggccgagatcagccacacccagaaagccaccctcgtgtgcctggctaccggcttctaccccgaccatgtggaactgtcttggtgggtcaacggcaaagaggtgcacagcggcgtgtctaccgacccccagccactgaaagaacagcccgccctgaacgacagccggtactgcctgagcagcggactgagagtgtccgccaccttctggcagaacccccggaaccacttcagatgccaggtgcagttctacggcctgagcgagaacgacgagtggacccaggacagagccaagcccgtgacccagatcgtgtctgccgaagcctggggcagagccgattgcggctttaccagcgagagctaccagcagggcgtgctgagcgccaccatcctgtacgagatcctgctgggcaaggccaccctgtacgccgtgctggtgtctgccctggtgctgatggctatggtcaagcggaaggacagccggggaaggagtaagaggagcaggctcctgcacagtgactacatgaacatgactccacgccgccccggacccacccgcaagcattaccagccctatgccccaccacgcgacttcgcagcctatcgctccagagtgaagttcagcagaagcgccgacgcccctgcctaccagcagggacagaaccaactgtacaacgagctgaacctgggcagacgggaagagtacgacgtgctggacaagcggagaggcagggaccctgagatgggcggaaagccccagcggagaaagaacccccaggaaggactgtataacgaactccagaaagacaagatggccgaagcctacagcgagatcggcatgaagggcgagcggagaagaggcaagggccacgatggcctgtaccagggcctgagcaccgccaccaaggacacctatgacgccctgcacatgcaggccctgcctccaaga

SEQ ID NO: 25274 - DNA, 975 bp, synthetic construct
  source 1..975: mol_type = other DNA
gaggatctgcggaacgtgaccccacccaaggtgtccctgttcgagcccagcaaggccgagatcgccaataaacagaaggccaccctcgtgtgcctggccagaggcttcttccccgaccacgtggaactgtcttggtgggtcaacggcaaagaggtgcacagcggcgtcagcaccgaccctcaggcctacaaagagagcaactacagctactgcctgagcagtcggctgcgggtgtccgccaccttctggcacaacccccggaaccacttcagatgccaggtgcagttccacggcctgagcgaagaggacaagtggcccgagggcagccccaagcctgtcacccagaacatcagcgccgaggcctggggcagagcctgtggcatcaccagcagctaccagcagggcgtgctgagcgccaccatcctgtacgagatcctgctgggcaaggccaccctgtacgccgtgctggtgtccaccctggtggtcatggctatggtcaagcggaagaacagcaggagtaagaggagcaggctcctgcacagtgactacatgaacatgactccacgccgccccggacccacccgcaagcattaccagccctatgccccaccacgcgacttcgcagcctatcgctccagagtgaagttcagcagaagcgccgacgcccctgcctaccagcagggacagaaccaactgtacaacgagctgaacctgggcagacgggaagagtacgacgtgctggacaagcggagaggcagggaccctgagatgggcggaaagccccagcggagaaagaacccccaggaaggactgtataacgaactccagaaagacaagatggccgaagcctacagcgagatcggcatgaagggcgagcggagaagaggcaagggccacgatggcctgtaccagggcctgagcaccgccaccaaggacacctatgacgccctgcacatgcaggccctgcctccaaga

SEQ ID NO: 25275 - DNA, 993 bp, synthetic construct
  source 1..993: mol_type = other DNA
gaggacctccagaaagtgaccccccctaccgtgaccgtgttcgagccttctgaggccgagatcagccggacccagaaagccacactcgtgtgcctggctcggggcttctaccccgatcacgtggaactgtcttggtgggtcaacggcaaagaagtgaccagcggcttcagcaccgacccccagcctgacaaagagcggcccagcgagaacgacagcagctactgcctgagcagcagactgagagtgtccgccagcttctggcacaacccccggaaccacttcagatgccaggtgcagttctacggcctgggcgacgacgacgagtggaagtacgacagagtgaagcccatcacccagaacatcagcgccgaagcctggggcagagccgattgcggctttacctccgtcagctaccaccagggcgtgctgagcgccaccatcctgtacgagatcctgctgggcaaggccaccctgtacgccgtgctggtgtctatcctggtgctgatggctaaagtgaagcggaagggcagcaggagtaagaggagcaggctcctgcacagtgactacatgaacatgactccacgccgccccggacccacccgcaagcattaccagccctatgccccaccacgcgacttcgcagcctatcgctccagagtgaagttcagcagaagcgccgacgcccctgcctaccagcagggacagaaccaactgtacaacgagctgaacctgggcagacgggaagagtacgacgtgctggacaagcggagaggcagggaccctgagatgggcggaaagccccagcggagaaagaacccccaggaaggactgtataacgaactccagaaagacaagatggccgaagcctacagcgagatcggcatgaagggcgagcggagaagaggcaagggccacgatggcctgtaccagggcctgagcaccgccaccaaggacacctatgacgccctgcacatgcaggccctgcctccaaga

SEQ ID NO: 25276 - DNA, 1290 bp, synthetic construct
  source 1..1290: mol_type = other DNA
gaggacctgaagaacgtgttcccacctgaggtggccgtgttcgagcctagcgaggccgagatcagccacacccagaaagccaccctcgtgtgcctggctaccggcttctaccccgaccatgtggaactgtcttggtgggtcaacggcaaagaggtgcacagcggcgtgtctaccgacccccagccactgaaagaacagcccgccctgaacgacagccggtactgcctgagcagcagactgagagtgtccgccaccttctggcagaacccccggaaccacttcagatgccaggtgcagttctacggcctgagcgagaacgacgagtggacccaggacagagccaagcccgtgacccagatcgtgtctgccgaagcctggggcagagccgattgcggatcccagagcttcggcctgctggaccccaagctgtgctacctgctggatggcatcctgttcatctacggcgtgatcctgaccgccctgttcctgagagtgaagttcagcagaagcgccgacgcccctgcctaccagcagggacagaaccaactgtacaacgagctgaacctgggcagacgggaagagtacgacgtgctggacaagcggagaggcagggaccctgagatgggcggaaagccccagcggagaaagaacccccaggaaggactgtataacgaactccagaaagacaagatggccgaagcctacagcgagatcggcatgaagggcgagcggagaagaggcaagggccacgatggcctgtaccagggcctgagcaccgccaccaaggacacctatgacgccctgcacatgcaggccctgcctccaagaaggagtaagaggagcaggctcctgcacagtgactacatgaacatgactccacgccgccccggacccacccgcaagcattaccagccctatgccccaccacgcgacttcgcagcctatcgctccagagtgaagttcagcagaagcgccgacgcccctgcctaccagcagggacagaaccaactgtacaacgagctgaacctgggcagacgggaagagtacgacgtgctggacaagcggagaggcagggaccctgagatgggcggaaagccccagcggagaaagaacccccaggaaggactgtataacgaactccagaaagacaagatggccgaagcctacagcgagatcggcatgaagggcgagcggagaagaggcaagggccacgatggcctgtaccagggcctgagcaccgccaccaaggacacctatgacgccctgcacatgcaggccctgcctccaaga

SEQ ID NO: 25277 - DNA, 1269 bp, synthetic construct
  misc_feature 540: note = n is a, c, g, or t
  source 1..1269: mol_type = other DNA
gggtgtccagccctacccacaggtgtgggcggcacaccctttccttctctggccccaccaatcatgctgctggtggatggaaagcagcagatggtggtggtctgcctggtccttgatgttgcaccccctggccttgacagccccatctggttctcagccggcaatggcagtgcactggatgccttcacctatggcccttccccagcaacggatggcacctggaccaacttggcccatctctccctgccttctgaggagctggcatcctgggagcctttggtctgccacactgggcctggggctgagggtcacagcaggagtacacagcccatgcatctgtcaggagaggcttctacagccaggacctgcccccaggagcctctcagggggacaccgggtggggcgctgtggctgggggtcctgcggctgctgctcttcaagctgctgctgtttgacctgctcctgacctgcagctgcctgtgcgaccccgcgggcccgctgccttcccccgcaaccaccacccgcctgcgagccctcggntcccatcgactgcacccggccacggagactgggggacgagaggccaccagctcacccagaccccagcctcgggaccgccgctggggtgacacccctccgggtcggaagcccgggagcccagtatggggggaagggtcttacctcagcagttaccccacttgcccagcacaggcctggtgctcaagatctcgcctcagggctccttcctccagtcttggagcattttttgcaggtgacctgcctcctcctctgcaggctggagctgccaggagtaagaggagcaggctcctgcacagtgactacatgaacatgactccacgccgccccggacccacccgcaagcattaccagccctatgccccaccacgcgacttcgcagcctatcgctccagagtgaagttcagcagaagcgccgacgcccctgcctaccagcagggacagaaccaactgtacaacgagctgaacctgggcagacgggaagagtacgacgtgctggacaagcggagaggcagggaccctgagatgggcggaaagccccagcggagaaagaacccccaggaaggactgtataacgaactccagaaagacaagatggccgaagcctacagcgagatcggcatgaagggcgagcggagaagaggcaagggccacgatggcctgtaccagggcctgagcaccgccaccaaggacacctatgacgccctgcacatgcaggccctgcctccaaga

SEQ ID NO: 25278 - DNA, 1236 bp, synthetic construct
  source 1..1236: mol_type = other DNA
accccattcccttctctggcccctcccatcatgctgctggtggacggcaagcagcagatggtggtcgtgtgcctggtgctggatgtggccccacctggactggacagccccatctggtttagcgccggcaatggctctgccctggacgcctttacctacggcccaagccctgccaccgatggcacctggacaaatctggcccacctgagcctgcccagcgaggaactggcttcttgggagcctctcgtgtgccacacaggacctggcgctgagggacacagcagatccacccagcctatgcacctgtctggcgaggccagcaccgccagaacctgtcctcaggaacctctgagaggcacccctggcggagcactgtggctgggagtgctgagactgctgctgttcaagctgctgctgtttgacctgctgctgacctgctcctgtctgtgcgatcctgccggccctctgccttctcctgccaccaccacaagactgagagccctgggcagccacagactgcaccctgccacagagacaggcggcagagaggccacaagcagccctagaccccagcccagagacagaagatggggcgataccccccctggcagaaagcctggatctccagtgtggggcgagggcagctacctgagcagctaccctacatgccctgcccaggcttggtgcagcagaagcgcactgagagcacccagctctagcctgggagccttctttgccggcgatctgcctccaccactccaggctggcgctgctaggagtaagaggagcaggctcctgcacagtgactacatgaacatgactccacgccgccccggacccacccgcaagcattaccagccctatgccccaccacgcgacttcgcagcctatcgctccagagtgaagttcagcagaagcgccgacgcccctgcctaccagcagggacagaaccaactgtacaacgagctgaacctgggcagacgggaagagtacgacgtgctggacaagcggagaggcagggaccctgagatgggcggaaagccccagcggagaaagaacccccaggaaggactgtataacgaactccagaaagacaagatggccgaagcctacagcgagatcggcatgaagggcgagcggagaagaggcaagggccacgatggcctgtaccagggcctgagcaccgccaccaaggacacctatgacgccctgcacatgcaggccctgcctccaaga

SEQ ID NO: 25279 - DNA, 1092 bp, synthetic construct
  source 1..1092: mol_type = other DNA
accccattcccttctctggcccctcccatcatgctgctggtggacggcaagcagcagatggtggtcgtgtgcctggtgctggatgtggccccacctggactggacagccccatctggtttagcgccggcaatggctctgccctggacgcctttacctacggcccaagccctgccaccgatggcacctggacaaatctggcccacctgagcctgcccagcgaggaactggcttcttgggagcctctcgtgtgccacacaggacctggcgctgagggacacagcagatccacccagcctatgcacctgtctggcgaggccagcaccgccagaacctgtcctcaggaacctctgagaggcacccctggcggagcactgtggctgggagtgctgagactgctgctgttcaagctgctgctgtttgacctgctgctgacctgctcctgtctgtgcgatcctgccggccctctgccttctcctgccaccaccacaagactgagagccctgggcagccacagactgcaccctgccacagagacaggcggcagagaggccacaagcagccctagaccccagcccagagacagaagatggggcgataccccccctggcagaaagcctggatctccagtcaggagtaagaggagcaggctcctgcacagtgactacatgaacatgactccacgccgccccggacccacccgcaagcattaccagccctatgccccaccacgcgacttcgcagcctatcgctccagagtgaagttcagcagaagcgccgacgcccctgcctaccagcagggacagaaccaactgtacaacgagctgaacctgggcagacgggaagagtacgacgtgctggacaagcggagaggcagggaccctgagatgggcggaaagccccagcggagaaagaacccccaggaaggactgtataacgaactccagaaagacaagatggccgaagcctacagcgagatcggcatgaagggcgagcggagaagaggcaagggccacgatggcctgtaccagggcctgagcaccgccaccaaggacacctatgacgccctgcacatgcaggccctgcctccaaga

SEQ ID NO: 25280 - DNA, 1029 bp, synthetic construct
  source 1..1029: mol_type = other DNA
gataaacaacttgatgcagatgtttcccccaagcccactatttttcttccttcaattgctgaaacaaaactccagaaggctggaacatacctttgtcttcttgagaaatttttcccagatattattaagatacattggcaagaaaagaagagcaacacgattctgggatcccaggaggggaacaccatgaagactaacgacacatacatgaaatttagctggttaacggtgccagaagagtcactggacaaagaacacagatgtatcgtcagacatgagaataataaaaacggaattgatcaagaaattatctttcctccaataaagacagatgtcaccacagtggatcccaaatacaattattcaaaggatgcaaatgatgtcatcacaatggatcccaaagacaattggtcaaaagatgcaaatgatacactactgctgcagctcacaaacacctctgcatattacatgtacctcctcctgctcctcaagagtgtggtctattttgccatcatcacctgctgtctgcttggaagaacggctttctgctgcaatggagagaaatcaaggagtaagaggagcaggctcctgcacagtgactacatgaacatgactccacgccgccccggacccacccgcaagcattaccagccctatgccccaccacgcgacttcgcagcctatcgctccagagtgaagttcagcagaagcgccgacgcccctgcctaccagcagggacagaaccaactgtacaacgagctgaacctgggcagacgggaagagtacgacgtgctggacaagcggagaggcagggaccctgagatgggcggaaagccccagcggagaaagaacccccaggaaggactgtataacgaactccagaaagacaagatggccgaagcctacagcgagatcggcatgaagggcgagcggagaagaggcaagggccacgatggcctgtaccagggcctgagcaccgccaccaaggacacctatgacgccctgcacatgcaggccctgcctccaaga

SEQ ID NO: 25281 - DNA, 981 bp, synthetic construct
  source 1..981: mol_type = other DNA
gacaagcagctggacgccgacgtgtcccccaagcctaccatcttcctgccctctatcgccgagacaaagctccagaaggccggcacctacctgtgcctgctggaaaagttcttcccagatgtgattaagatccactggcaggaaaagaagtccaacaccatcctgggcagccaggaaggcaacaccatgaagaccaacgacacctacatgaagttcagctggctgaccgtgcccgagaagtccctggacaaagaacacagatgcatcgtgcggcacgaaaacaacaagaacggcgtggaccaggaaatcatcttcccacccatcaagaccgatgtgattacaatggaccccaaggacaactgctccaaggacgccaacgataccctgctgctccagctgaccaacaccagcgcctactacatgtacttgttgctgctgctgaagtccgtggtgtacttcgccatcatcacatgctgcctgctgcggagaaccgccttctgctgcaacggcgagaagtctaggagtaagaggagcaggctcctgcacagtgactacatgaacatgactccacgccgccccggacccacccgcaagcattaccagccctatgccccaccacgcgacttcgcagcctatcgctccagagtgaagttcagcagaagcgccgacgcccctgcctaccagcagggacagaaccaactgtacaacgagctgaacctgggcagacgggaagagtacgacgtgctggacaagcggagaggcagggaccctgagatgggcggaaagccccagcggagaaagaacccccaggaaggactgtataacgaactccagaaagacaagatggccgaagcctacagcgagatcggcatgaagggcgagcggagaagaggcaagggccacgatggcctgtaccagggcctgagcaccgccaccaaggacacctatgacgccctgcacatgcaggccctgcctccaaga

SEQ ID NO: 25282 - DNA, 921 bp, synthetic construct
  source 1..921: mol_type = other DNA
agtcagcctcataccaaaccatccgtttttgtcatgaaaaatggaacaaatgtcgcttgtctggtgaaggaattctaccccaaggatataagaataaatctcgtgtcatccaagaagataacagagtttgatcctgctattgtcatctctcccagtgggaagtacaatgctgtcaagcttggtaaatatgaagattcaaattcagtgacatgttcagttcaacacgacaataaaactgtgcactccactgactttgaagtgaagacagattctacagatcacgtaaaaccaaaggaaactgaaaacacaaagcaaccttcaaagagctgccataaacccaaagccatagttcataccgagaaggtgaacatgatgtccctcacagtgcttgggctacgaatgctgtttgcaaagactgttgccgtcaattttctcttgactgccaagttatttttcttgaggagtaagaggagcaggctcctgcacagtgactacatgaacatgactccacgccgccccggacccacccgcaagcattaccagccctatgccccaccacgcgacttcgcagcctatcgctccagagtgaagttcagcagaagcgccgacgcccctgcctaccagcagggacagaaccaactgtacaacgagctgaacctgggcagacgggaagagtacgacgtgctggacaagcggagaggcagggaccctgagatgggcggaaagccccagcggagaaagaacccccaggaaggactgtataacgaactccagaaagacaagatggccgaagcctacagcgagatcggcatgaagggcgagcggagaagaggcaagggccacgatggcctgtaccagggcctgagcaccgccaccaaggacacctatgacgccctgcacatgcaggccctgcctccaaga

SEQ ID NO: 25283 - DNA, 921 bp, synthetic construct
  source 1..921: mol_type = other DNA
agccagcctcacaccaagcccagcgtgttcgtgatgaagaacggcaccaacgtggcctgcctcgtgaaagagttctaccccaaggacatcaggatcaacctggtgtccagcaagaagatcaccgagttcgaccccgccatcgtgatctcccccagcggcaagtacaacgccgtgaagctggggaagtacgaggacagcaacagcgtgacctgctccgtgcagcacgacaacaagaccgtgcacagcaccgactttgaagtgaaaaccgactccaccgaccacgtgaagcccaaagagacagagaacaccaagcagcccagcaagagctgccacaagcccaaggccatcgtgcacaccgagaaagtgaacatgatgagcctgaccgtgctgggcctgcggatgctgttcgccaaaaccgtggccgtgaacttcctgctgaccgccaagctgttcttcctcaggagtaagaggagcaggctcctgcacagtgactacatgaacatgactccacgccgccccggacccacccgcaagcattaccagccctatgccccaccacgcgacttcgcagcctatcgctccagagtgaagttcagcagaagcgccgacgcccctgcctaccagcagggacagaaccaactgtacaacgagctgaacctgggcagacgggaagagtacgacgtgctggacaagcggagaggcagggaccctgagatgggcggaaagccccagcggagaaagaacccccaggaaggactgtataacgaactccagaaagacaagatggccgaagcctacagcgagatcggcatgaagggcgagcggagaagaggcaagggccacgatggcctgtaccagggcctgagcaccgccaccaaggacacctatgacgccctgcacatgcaggccctgcctccaaga

SEQ ID NO: 25284 - DNA, 783 bp, synthetic construct
  source 1..783: mol_type = other DNA
atccagaaccctgatcctgccgtgtacatcaccgataagaccgtgctggacatgcggagcatggacttcaagagcaactccgccgtggcctggtccaacaagtccgatttcgcctgcgccaacgccttcaacaacagcattatccccgaggacacattcttcccaagccccgagagcagctgcgacgtgaagctggtggaaaagagcttcgagacagacaccaacctgaacttccagaacctgagcgtgatcggcttcagaatcctgctgctgaaagtggccggctttaacctgctgatgaccctgcggctgtggtccagcaggagtaagaggagcaggctcctgcacagtgactacatgaacatgactccacgccgccccggacccacccgcaagcattaccagccctatgccccaccacgcgacttcgcagcctatcgctccagagtgaagttcagcagaagcgccgacgcccctgcctaccagcagggacagaaccaactgtacaacgagctgaacctgggcagacgggaagagtacgacgtgctggacaagcggagaggcagggaccctgagatgggcggaaagccccagcggagaaagaacccccaggaaggactgtataacgaactccagaaagacaagatggccgaagcctacagcgagatcggcatgaagggcgagcggagaagaggcaagggccacgatggcctgtaccagggcctgagcaccgccaccaaggacacctatgacgccctgcacatgcaggccctgcctccaaga

SEQ ID NO: 25285 - DNA, 999 bp, synthetic construct
  source 1..999: mol_type = other DNA
gaggacctgaagaacgtgttcccacctgaggtggccgtgttcgagcctagcagggccgagatcagccacacccagaaagccaccctcgtgtgcctggctaccggcttctaccccgaccatgtggaactgtcttggtgggtcaacggcaaagaggtgcacagcggcgtgtgtaccgacccccagccactgaaagaacagcccgccctgaacgacagccggtactgcctgagcagcagactgagagtgtccgccaccttctggcagaacccccggaaccacttcagatgccaggtgcagttctacggcctgagcgagaacgacgagtggacccaggacagagccaagcccgtgacccagatcgtgtctgccgaagcctggggcagagccgattgcggctttaccagcgagagctaccagcagggcgtgctgagcgccaccatcctgtacgagatcctgctgggcaaggccaccctgtacgccgtgctggtgtctgccctggtgctgatggctatggtcaagcggaaggacagccggggaaggagtaagaggagcaggctcctgcacagtgactacatgaacatgactccacgccgccccggacccacccgcaagcattaccagccctatgccccaccacgcgacttcgcagcctatcgctccagagtgaagttcagcagaagcgccgacgcccctgcctaccagcagggacagaaccaactgtacaacgagctgaacctgggcagacgggaagagtacgacgtgctggacaagcggagaggcagggaccctgagatgggcggaaagccccagcggagaaagaacccccaggaaggactgtataacgaactccagaaagacaagatggccgaagcctacagcgagatcggcatgaagggcgagcggagaagaggcaagggccacgatggcctgtaccagggcctgagcaccgccaccaaggacacctatgacgccctgcacatgcaggccctgcctccaaga

SEQ ID NO: 25286 - DNA, 999 bp, synthetic construct
  source 1..999: mol_type = other DNA
gaggacctgaagaacgtgttcccacctgaggtggccgtgttcgagcctagcagggccgagatcgcccacacccagaaagccaccctcgtgtgcctggctaccggcttctaccccgaccatgtggaactgtcttggtgggtcaacggcaaagaggtgcacagcggcgtgtgtaccgacccccagccactgaaagaacagcccgccctgaacgacagccggtactgcctgagcagcagactgagagtgtccgccaccttctggcagaacccccggaaccacttcagatgccaggtgcagttctacggcctgagcgagaacgacgagtggacccaggacagagccaagcccgtgacccagatcgtgtctgccgaagcctggggcagagccgattgcggctttaccagcgagagctaccagcagggcgtgctgagcgccaccatcctgtacgagatcctgctgggcaaggccaccctgtacgccgtgctggtgtctgccctggtgctgatggctatggtcaagcggaaggacagccggggaaggagtaagaggagcaggctcctgcacagtgactacatgaacatgactccacgccgccccggacccacccgcaagcattaccagccctatgccccaccacgcgacttcgcagcctatcgctccagagtgaagttcagcagaagcgccgacgcccctgcctaccagcagggacagaaccaactgtacaacgagctgaacctgggcagacgggaagagtacgacgtgctggacaagcggagaggcagggaccctgagatgggcggaaagccccagcggagaaagaacccccaggaaggactgtataacgaactccagaaagacaagatggccgaagcctacagcgagatcggcatgaagggcgagcggagaagaggcaagggccacgatggcctgtaccagggcctgagcaccgccaccaaggacacctatgacgccctgcacatgcaggccctgcctccaaga

SEQ ID NO: 25287 - DNA, 642 bp, synthetic construct
  source 1..642: mol_type = other DNA
atccccgaggacacattcttcccaagccccgagagcagctgcgacgtgaagctggtggaaaagagcttcgagacagacaccaacctgaacttccagaacctgagcgtgatcggcttcagaatcctgctgctgaaagtggccggctttaacctgctgatgaccctgcggctgtggtccagcaggagtaagaggagcaggctcctgcacagtgactacatgaacatgactccacgccgccccggacccacccgcaagcattaccagccctatgccccaccacgcgacttcgcagcctatcgctccagagtgaagttcagcagaagcgccgacgcccctgcctaccagcagggacagaaccaactgtacaacgagctgaacctgggcagacgggaagagtacgacgtgctggacaagcggagaggcagggaccctgagatgggcggaaagccccagcggagaaagaacccccaggaaggactgtataacgaactccagaaagacaagatggccgaagcctacagcgagatcggcatgaagggcgagcggagaagaggcaagggccacgatggcctgtaccagggcctgagcaccgccaccaaggacacctatgacgccctgcacatgcaggccctgcctccaaga

SEQ ID NO: 25288 - DNA, 612 bp, synthetic construct
  source 1..612: mol_type = other DNA
gagagcagctgcgacgtgaagctggtggaaaagagcttcgagacagacaccaacctgaacttccagaacctgagcgtgatcggcttcagaatcctgctgctgaaagtggccggctttaacctgctgatgaccctgcggctgtggtccagcaggagtaagaggagcaggctcctgcacagtgactacatgaacatgactccacgccgccccggacccacccgcaagcattaccagccctatgccccaccacgcgacttcgcagcctatcgctccagagtgaagttcagcagaagcgccgacgcccctgcctaccagcagggacagaaccaactgtacaacgagctgaacctgggcagacgggaagagtacgacgtgctggacaagcggagaggcagggaccctgagatgggcggaaagccccagcggagaaagaacccccaggaaggactgtataacgaactccagaaagacaagatggccgaagcctacagcgagatcggcatgaagggcgagcggagaagaggcaagggccacgatggcctgtaccagggcctgagcaccgccaccaaggacacctatgacgccctgcacatgcaggccctgcctccaaga

SEQ ID NO: 25289 - DNA, 999 bp, synthetic construct; identical to SEQ ID NO: 25258
  source 1..999: mol_type = other DNA

SEQ ID NO: 25290 - DNA, 807 bp, synthetic construct
  source 1..807: mol_type = other DNA
gaacagcccgccctgaacgacagccggtactgcctgagcagcagactgagagtgtccgccaccttctggcagaacccccggaaccacttcagatgccaggtgcagttctacggcctgagcgagaacgacgagtggacccaggacagagccaagcccgtgacccagatcgtgtctgccgaagcctggggcagagccgattgcggctttaccagcgagagctaccagcagggcgtgctgagcgccaccatcctgtacgagatcctgctgggcaaggccaccctgtacgccgtgctggtgtctgccctggtgctgatggctatggtcaagcggaaggacagccggggaaggagtaagaggagcaggctcctgcacagtgactacatgaacatgactccacgccgccccggacccacccgcaagcattaccagccctatgccccaccacgcgacttcgcagcctatcgctccagagtgaagttcagcagaagcgccgacgcccctgcctaccagcagggacagaaccaactgtacaacgagctgaacctgggcagacgggaagagtacgacgtgctggacaagcggagaggcagggaccctgagatgggcggaaagccccagcggagaaagaacccccaggaaggactgtataacgaactccagaaagacaagatggccgaagcctacagcgagatcggcatgaagggcgagcggagaagaggcaagggccacgatggcctgtaccagggcctgagcaccgccaccaaggacacctatgacgccctgcacatgcaggccctgcctccaaga

SEQ ID NO: 25291 - DNA, 621 bp, synthetic construct
  source 1..621: mol_type = other DNA
ggcagagccgattgcggctttaccagcgagagctaccagcagggcgtgctgagcgccaccatcctgtacgagatcctgctgggcaaggccaccctgtacgccgtgctggtgtctgccctggtgctgatggctatggtcaagcggaaggacagccggggaaggagtaagaggagcaggctcctgcacagtgactacatgaacatgactccacgccgccccggacccacccgcaagcattaccagccctatgccccaccacgcgacttcgcagcctatcgctccagagtgaagttcagcagaagcgccgacgcccctgcctaccagcagggacagaaccaactgtacaacgagctgaacctgggcagacgggaagagtacgacgtgctggacaagcggagaggcagggaccctgagatgggcggaaagccccagcggagaaagaacccccaggaaggactgtataacgaactccagaaagacaagatggccgaagcctacagcgagatcggcatgaagggcgagcggagaagaggcaagggccacgatggcctgtaccagggcctgagcaccgccaccaaggacacctatgacgccctgcacatgcaggccctgcctccaaga

SEQ ID NO: 25292 - DNA, 615 bp, synthetic construct
  source 1..615: mol_type = other DNA
gccgattgcggctttaccagcgagagctaccagcagggcgtgctgagcgccaccatcctgtacgagatcctgctgggcaaggccaccctgtacgccgtgctggtgtctgccctggtgctgatggctatggtcaagcggaaggacagccggggaaggagtaagaggagcaggctcctgcacagtgactacatgaacatgactccacgccgccccggacccacccgcaagcattaccagccctatgccccaccacgcgacttcgcagcctatcgctccagagtgaagttcagcagaagcgccgacgcccctgcctaccagcagggacagaaccaactgtacaacgagctgaacctgggcagacgggaagagtacgacgtgctggacaagcggagaggcagggaccctgagatgggcggaaagccccagcggagaaagaacccccaggaaggactgtataacgaactccagaaagacaagatggccgaagcctacagcgagatcggcatgaagggcgagcggagaagaggcaagggccacgatggcctgtaccagggcctgagcaccgccaccaaggacacctatgacgccctgcacatgcaggccctgcctccaaga

SEQ ID NO: 25293 - DNA, 981 bp, synthetic construct; identical to SEQ ID NO: 25281
  source 1..981: mol_type = other DNA

SEQ ID NO: 25294 - DNA, 966 bp, synthetic construct
  source 1..966: mol_type = other DNA
gccgacgtgtcccccaagcctaccatcttcctgccctctatcgccgagacaaagctccagaaggccggcacctacctgtgcctgctggaaaagttcttcccagatgtgattaagatccactggcaggaaaagaagtccaacaccatcctgggcagccaggaaggcaacaccatgaagaccaacgacacctacatgaagttcagctggctgaccgtgcccgagaagtccctggacaaagaacacagatgcatcgtgcggcacgaaaacaacaagaacggcgtggaccaggaaatcatcttcccacccatcaagaccgatgtgattacaatggaccccaaggacaactgctccaaggacgccaacgataccctgctgctccagctgaccaacaccagcgcctactacatgtacttgttgctgctgctgaagtccgtggtgtacttcgccatcatcacatgctgcctgctgcggagaaccgccttctgctgcaacggcgagaagtctaggagtaagaggagcaggctcctgcacagtgactacatgaacatgactccacgccgccccggacccacccgcaagcattaccagccctatgccccaccacgcgacttcgcagcctatcgctccagagtgaagttcagcagaagcgccgacgcccctgcctaccagcagggacagaaccaactgtacaacgagctgaacctgggcagacgggaagagtacgacgtgctggacaagcggagaggcagggaccctgagatgggcggaaagccccagcggagaaagaacccccaggaaggactgtataacgaactccagaaagacaagatggccgaagcctacagcgagatcggcatgaagggcgagcggagaagaggcaagggccacgatggcctgtaccagggcctgagcaccgccaccaaggacacctatgacgccctgcacatgcaggccctgcctccaaga

SEQ ID NO: 25295 - DNA, 960 bp, synthetic construct
  source 1..960: mol_type = other DNA
gtgtcccccaagcctaccatcttcctgccctctatcgccgagacaaagctccagaaggccggcacctacctgtgcctgctggaaaagttcttcccagatgtgattaagatccactggcaggaaaagaagtccaacaccatcctgggcagccaggaaggcaacaccatgaagaccaacgacacctacatgaagttcagctggctgaccgtgcccgagaagtccctggacaaagaacacagatgcatcgtgcggcacgaaaacaacaagaacggcgtggaccaggaaatcatcttcccacccatcaagaccgatgtgattacaatggaccccaaggacaactgctccaaggacgccaacgataccctgctgctccagctgaccaacaccagcgcctactacatgtacttgttgctgctgctgaagtccgtggtgtacttcgccatcatcacatgctgcctgctgcggagaaccgccttctgctgcaacggcgagaagtctaggagtaagaggagcaggctcctgcacagtgactacatgaacatgactccacgccgccccggacccacccgcaagcattaccagccctatgccccaccacgcgacttcgcagcctatcgctccagagtgaagttcagcagaagcgccgacgcccctgcctaccagcagggacagaaccaactgtacaacgagctgaacctgggcagacgggaagagtacgacgtgctggacaagcggagaggcagggaccctgagatgggcggaaagccccagcggagaaagaacccccaggaaggactgtataacgaactccagaaagacaagatggccgaagcctacagcgagatcggcatgaagggcgagcggagaagaggcaagggccacgatggcctgtaccagggcctgagcaccgccaccaaggacacctatgacgccctgcacatgcaggccctgcctccaaga

SEQ ID NO: 25296 - DNA, 945 bp, synthetic construct
  source 1..945: mol_type = other DNA
accatcttcctgccctctatcgccgagacaaagctccagaaggccggcacctacctgtgcctgctggaaaagttcttcccagatgtgattaagatccactggcaggaaaagaagtccaacaccatcctgggcagccaggaaggcaacaccatgaagaccaacgacacctacatgaagttcagctggctgaccgtgcccgagaagtccctggacaaagaacacagatgcatcgtgcggcacgaaaacaacaagaacggcgtggaccaggaaatcatcttcccacccatcaagaccgatgtgattacaatggaccccaaggacaactgctccaaggacgccaacgataccctgctgctccagctgaccaacaccagcgcctactacatgtacttgttgctgctgctgaagtccgtggtgtacttcgccatcatcacatgctgcctgctgcggagaaccgccttctgctgcaacggcgagaagtctaggagtaagaggagcaggctcctgcacagtgactacatgaacatgactccacgccgccccggacccacccgcaagcattaccagccctatgccccaccacgcgacttcgcagcctatcgctccagagtgaagttcagcagaagcgccgacgcccctgcctaccagcagggacagaaccaactgtacaacgagctgaacctgggcagacgggaagagtacgacgtgctggacaagcggagaggcagggaccctgagatgggcggaaagccccagcggagaaagaacccccaggaaggactgtataacgaactccagaaagacaagatggccgaagcctacagcgagatcggcatgaagggcgagcggagaagaggcaagggccacgatggcctgtaccagggcctgagcaccgccaccaaggacacctatgacgccctgcacatgcaggccctgcctccaaga

SEQ ID NO: 25297 - DNA, 663 bp, synthetic construct
  source 1..663: mol_type = other DNA
cccatcaagaccgatgtgattacaatggaccccaaggacaactgctccaaggacgccaacgataccctgctgctccagctgaccaacaccagcgcctactacatgtacttgttgctgctgctgaagtccgtggtgtacttcgccatcatcacatgctgcctgctgcggagaaccgccttctgctgcaacggcgagaagtctaggagtaagaggagcaggctcctgcacagtgactacatgaacatgactccacgccgccccggacccacccgcaagcattaccagccctatgccccaccacgcgacttcgcagcctatcgctccagagtgaagttcagcagaagcgccgacgcccctgcctaccagcagggacagaaccaactgtacaacgagctgaacctgggcagacgggaagagtacgacgtgctggacaagcggagaggcagggaccctgagatgggcggaaagccccagcggagaaagaacccccaggaaggactgtataacgaactccagaaagacaagatggccgaagcctacagcgagatcggcatgaagggcgagcggagaagaggcaagggccacgatggcctgtaccagggcctgagcaccgccaccaaggacacctatgacgccctgcacatgcaggccctgcctccaaga

SEQ ID NO: 25298 - DNA, 639 bp, synthetic construct
  source 1..639: mol_type = other DNA
atggaccccaaggacaactgctccaaggacgccaacgataccctgctgctccagctgaccaacaccagcgcctactacatgtacttgttgctgctgctgaagtccgtggtgtacttcgccatcatcacatgctgcctgctgcggagaaccgccttctgctgcaacggcgagaagtctaggagtaagaggagcaggctcctgcacagtgactacatgaacatgactccacgccgccccggacccacccgcaagcattaccagccctatgccccaccacgcgacttcgcagcctatcgctccagagtgaagttcagcagaagcgccgacgcccctgcctaccagcagggacagaaccaactgtacaacgagctgaacctgggcagacgggaagagtacgacgtgctggacaagcggagaggcagggaccctgagatgggcggaaagccccagcggagaaagaacccccaggaaggactgtataacgaactccagaaagacaagatggccgaagcctacagcgagatcggcatgaagggcgagcggagaagaggcaagggccacgatggcctgtaccagggcctgagcaccgccaccaaggacacctatgacgccctgcacatgcaggccctgcctccaaga

SEQ ID NO: 25299 - DNA, 921 bp, synthetic construct; identical to SEQ ID NO: 25283
  source 1..921: mol_type = other DNA

SEQ ID NO: 25300 - DNA, 666 bp, synthetic construct
  source 1..666: mol_type = other DNA
gaagtgaaaaccgactccaccgaccacgtgaagcccaaagagacagagaacaccaagcagcccagcaagagctgccacaagcccaaggccatcgtgcacaccgagaaagtgaacatgatgagcctgaccgtgctgggcctgcggatgctgttcgccaaaaccgtggccgtgaacttcctgctgaccgccaagctgttcttcctcaggagtaagaggagcaggctcctgcacagtgactacatgaacatgactccacgccgccccggacccacccgcaagcattaccagccctatgccccaccacgcgacttcgcagcctatcgctccagagtgaagttcagcagaagcgccgacgcccctgcctaccagcagggacagaaccaactgtacaacgagctgaacctgggcagacgggaagagtacgacgtgctggacaagcggagaggcagggaccctgagatgggcggaaagccccagcggagaaagaacccccaggaaggactgtataacgaactccagaaagacaagatggccgaagcctacagcgagatcggcatgaagggcgagcggagaagaggcaagggccacgatggcctgtaccagggcctgagcaccgccaccaaggacacctatgacgccctgcacatgcaggccctgcctccaaga

SEQ ID NO: 25301 - DNA, 645 bp, synthetic construct
  source 1..645: mol_type = other DNA
gaccacgtgaagcccaaagagacagagaacaccaagcagcccagcaagagctgccacaagcccaaggccatcgtgcacaccgagaaagtgaacatgatgagcctgaccgtgctgggcctgcggatgctgttcgccaaaaccgtggccgtgaacttcctgctgaccgccaagctgttcttcctcaggagtaagaggagcaggctcctgcacagtgactacatgaacatgactccacgccgccccggacccacccgcaagcattaccagccctatgccccaccacgcgacttcgcagcctatcgctccagagtgaagttcagcagaagcgccgacgcccctgcctaccagcagggacagaaccaactgtacaacgagctgaacctgggcagacgggaagagtacgacgtgctggacaagcggagaggcagggaccctgagatgggcggaaagccccagcggagaaagaacccccaggaaggactgtataacgaactccagaaagacaagatggccgaagcctacagcgagatcggcatgaagggcgagcggagaagaggcaagggccacgatggcctgtaccagggcctgagcaccgccaccaaggacacctatgacgccctgcacatgcaggccctgcctccaaga

SEQ ID NO: 25302 - DNA, 993 bp, synthetic construct
  source 1..993: mol_type = other DNA
gaggacctgaagaacgtgttcccacctgaggtggccgtgttcgagcctagcgaggccgagatcagccacacccagaaagccaccctcgtgtgcctggctaccggcttctaccccgaccatgtggaactgtcttggtgggtcaacggcaaagaggtgcacagcggcgtgtgtaccgacccccagccactgaaagaacagcccgccctgaacgacagccggtactgcctgagcagcagactgagagtgtccgccaccttctggcagaacccccggaaccacttcagatgccaggtgcagttctacggcctgagcgagaacgacgagtggacccaggacagagccaagcccgtgacccagatcgtgtctgccgaagcctggggcagagccgattgcgacgtgaagctggtggaaaagagcttcgagacagacaccaacctgaacttccagaacctgagcgtgatcggcttcagaatcctgctgctgaaagtggccggctttaacctgctgatgaccctgcggctgtggtccagcaggagtaagaggagcaggctcctgcacagtgactacatgaacatgactccacgccgccccggacccacccgcaagcattaccagccctatgccccaccacgcgacttcgcagcctatcgctccagagtgaagttcagcagaagcgccgacgcccctgcctaccagcagggacagaaccaactgtacaacgagctgaacctgggcagacgggaagagtacgacgtgctggacaagcggagaggcagggaccctgagatgggcggaaagccccagcggagaaagaacccccaggaaggactgtataacgaactccagaaagacaagatggccgaagcctacagcgagatcggcatgaagggcgagcggagaagaggcaagggccacgatggcctgtaccagggcctgagcaccgccaccaaggacacctatgacgccctgcacatgcaggccctgcctccaaga

SEQ ID NO: 25303 - DNA, 888 bp, synthetic construct
  source 1..888: mol_type = other DNA
atccagaaccctgatcctgccgtgtaccagctgcgggatagcaagagcagcgacaagagcgtgtgtctgttcaccgacttcgacagccagaccaacgtgtcccagagcaaggactccgacgtgtacatcaccgataagtgcgtgctggacatgcggagcatggacttcaagagcaactccgccgtggcctggtccaacaagtccgatttcgcctgcgccaacgccttcaacaacagcattatccccgaggacacattcttcccaagccccgagagcagctgcggctttaccagcgagagctaccagcagggcgtgctgagcgccaccatcctgtacgagatcctgctgggcaaggccaccctgtacgccgtgctggtgtctgccctggtgctgatggctatggtcaagcggaaggacagccggggaaggagtaagaggagcaggctcctgcacagtgactacatgaacatgactccacgccgccccggacccacccgcaagcattaccagccctatgccccaccacgcgacttcgcagcctatcgctccagagtgaagttcagcagaagcgccgacgcccctgcctaccagcagggacagaaccaactgtacaacgagctgaacctgggcagacgggaagagtacgacgtgctggacaagcggagaggcagggaccctgagatgggcggaaagccccagcggagaaagaacccccaggaaggactgtataacgaactccagaaagacaagatggccgaagcctacagcgagatcggcatgaagggcgagcggagaagaggcaagggccacgatggcctgtaccagggcctgagcaccgccaccaaggacacctatgacgccctgcacatgcaggccctgcctccaaga

SEQ ID NO: 25304 - DNA, 984 bp, synthetic construct
  source 1..984: mol_type = other DNA
gaggacctgaagaacgtgttcccacctgaggtggccgtgttcgagcctagcgaggccgagatcagccacacccagaaagccaccctcgtgtgcctggctaccggcttctaccccgaccatgtggaactgtcttggtgggtcaacggcaaagaggtgcacagcggcgtgtgtaccgacccccagccactgaaagaacagcccgccctgaacgacagccggtactgcctgagcagcagactgagagtgtccgccaccttctggcagaacccccggaaccacttcagatgccaggtgcagttctacggcctgagcgagaacgacgagtggacccaggacagagccaagcccgtgacccagatcgtgtctgccgaagcctggggcagagccgattgcggctttaccagcgagagctaccagcagggcgtgctgagcgccaccaacctgagcgtgatcggcttcagaatcctgctgctgaaagtggccggctttaacctgctgatgaccctgcggctgtggtccagcaggagtaagaggagcaggctcctgcacagtgactacatgaacatgactccacgccgccccggacccacccgcaagcattaccagccctatgccccaccacgcgacttcgcagcctatcgctccagagtgaagttcagcagaagcgccgacgcccctgcctaccagcagggacagaaccaactgtacaacgagctgaacctgggcagacgggaagagtacgacgtgctggacaagcggagaggcagggaccctgagatgggcggaaagccccagcggagaaagaacccccaggaaggactgtataacgaactccagaaagacaagatggccgaagcctacagcgagatcggcatgaagggcgagcggagaagaggcaagggccacgatggcctgtaccagggcctgagcaccgccaccaaggacacctatgacgccctgcacatgcaggccctgcctccaaga

SEQ ID NO: 25305 - DNA, 897 bp, synthetic construct
  source 1..897: mol_type = other DNA
atccagaaccctgatcctgccgtgtaccagctgcgggatagcaagagcagcgacaagagcgtgtgtctgttcaccgacttcgacagccagaccaacgtgtcccagagcaaggactccgacgtgtacatcaccgataagtgcgtgctggacatgcggagcatggacttcaagagcaactccgccgtggcctggtccaacaagtccgatttcgcctgcgccaacgccttcaacaacagcattatccccgaggacacattcttcccaagccccgagagcagctgcgacgtgaagctggtggaaaagagcttcgagacagacaccaacctgaacttccagatcctgtacgagatcctgctgggcaaggccaccctgtacgccgtgctggtgtctgccctggtgctgatggctatggtcaagcggaaggacagccggggaaggagtaagaggagcaggctcctgcacagtgactacatgaacatgactccacgccgccccggacccacccgcaagcattaccagccctatgccccaccacgcgacttcgcagcctatcgctccagagtgaagttcagcagaagcgccgacgcccctgcctaccagcagggacagaaccaactgtacaacgagctgaacctgggcagacgggaagagtacgacgtgctggacaagcggagaggcagggaccctgagatgggcggaaagccccagcggagaaagaacccccaggaaggactgtataacgaactccagaaagacaagatggccgaagcctacagcgagatcggcatgaagggcgagcggagaagaggcaagggccacgatggcctgtaccagggcctgagcaccgccaccaaggacacctatgacgccctgcacatgcaggccctgcctccaaga

SEQ ID NO: 25306 - DNA, 942 bp, synthetic construct
  source 1..942: mol_type = other DNA
atccagaaccctgatcctgccgtgtaccagctgcgggatagcaagagcagcgacaagagcgtgtgtctgttcaccgacttcgacagccagaccaacgtgtcccagagcaaggactccgacgtgtacatcaccgataagtgcgtgctggacatgcggagcatggacttcaagagcaactccgccgtggcctggtccaacaagtccgatttcgcctgcgccaacgccttcaacaacagcattatccccgaggacacattcttcccaagccccgagagcagcgactccaccgaccacgtgaagcccaaagagacagagaacaccaagcagcccagcaagagctgccacaagcccaaggccatcgtgcacaccgagaaagtgaacatgatgagcctgaccgtgctgggcctgcggatgctgttcgccaaaaccgtggccgtgaacttcctgctgaccgccaagctgttcttcctcctcaccgccaggagtaagaggagcaggctcctgcacagtgactacatgaacatgactccacgccgccccggacccacccgcaagcattaccagccctatgccccaccacgcgacttcgcagcctatcgctccagagtgaagttcagcagaagcgccgacgcccctgcctaccagcagggacagaaccaactgtacaacgagctgaacctgggcagacgggaagagtacgacgtgctggacaagcggagaggcagggaccctgagatgggcggaaagccccagcggagaaagaacccccaggaaggactgtataacgaactccagaaagacaagatggccgaagcctacagcgagatcggcatgaagggcgagcggagaagaggcaagggccacgatggcctgtaccagggcctgagcaccgccaccaaggacacctatgacgccctgcacatgcaggccctgcctccaaga

SEQ ID NO: 25307 - DNA, 1251 bp, synthetic construct
  source 1..1251: mol_type = other DNA
gaggacctgaagaacgtgttcccacctgaggtggccgtgttcgagcctagcgaggccgagatcagccacacccagaaagccaccctcgtgtgcctggctaccggcttctaccccgaccatgtggaactgtcttggtgggtcaacggcaaagaggtgcacagcggcgtgtgtaccgacccccagccactgaaagaacagcccgccctgaacgacagccggtactgcctgagcagcagactgagagtgtccgccaccttctggcagaacccccggaaccacttcagatgccaggtgcagttctacggcctgagcgagaacgacgagtggacccaggacagagccaagcccgtgacccagatcgtgtctgccgaagcctggggcagagccgatgatgtgattaagatccactggcaggaaaagaagtccaacaccatcctgggcagccaggaaggcaacaccatgaagaccaacgacacctacatgaagttcagctggctgaccgtgcccgagaagtccctggacaaagaacacagatgcatcgtgcggcacgaaaacaacaagaacggcgtggaccaggaaatcatcttcccacccatcaagaccgatgtgattacaatggaccccaaggacaactgctccaaggacgccaacgataccctgctgctccagctgaccaacaccagcgcctactacatgtacttgttgctgctgctgaagtccgtggtgtacttcgccatcatcacatgctgcctgctgatggctatggtcaagcggaaggacagccggggaaggagtaagaggagcaggctcctgcacagtgactacatgaacatgactccacgccgccccggacccacccgcaagcattaccagccctatgccccaccacgcgacttcgcagcctatcgctccagagtgaagttcagcagaagcgccgacgcccctgcctaccagcagggacagaaccaactgtacaacgagctgaacctgggcagacgggaagagtacgacgtgctggacaagcggagaggcagggaccctgagatgggcggaaagccccagcggagaaagaacccccaggaaggactgtataacgaactccagaaagacaagatggccgaagcctacagcgagatcggcatgaagggcgagcggagaagaggcaagggccacgatggcctgtaccagggcctgagcaccgccaccaaggacacctatgacgccctgcacatgcaggccctgcctccaaga

SEQ ID NO: 25308 - DNA, 993 bp, synthetic construct
  source 1..993: mol_type = other DNA
gaggacctgaagaacgtgttcccacctgaggtggccgtgttcgagcctagcgaggccgagatcagccacacccagaaagccaccctcgtgtgcctggctaccggcttctaccccgaccatgtggaactgtcttggtgggtcaacggcaaagaggtgcacagcggcgtgtctaccgacccccagccactgaaagaacagcccgccctgaacgacagccggtactgcctgagcagcagactgagagtgtccgccaccttctggcagaacccccggaaccacttcagatgccaggtgcagttctacggcctgagcgagaacgacgagtggacccaggacagagccaagcccgtgacccagatcgtgtctgccgaagcctggggcagagccgattgcgacgtgaagctggtggaaaagagcttcgagacagacaccaacctgaacttccagaacctgagcgtgatcggcttcagaatcctgctgctgaaagtggccggctttaacctgctgatgaccctgcggctgtggtccagcaggagtaagaggagcaggctcctgcacagtgactacatgaacatgactccacgccgccccggacccacccgcaagcattaccagccctatgccccaccacgcgacttcgcagcctatcgctccagagtgaagttcagcagaagcgccgacgcccctgcctaccagcagggacagaaccaactgtacaacgagctgaacctgggcagacgggaagagtacgacgtgctggacaagcggagaggcagggaccctgagatgggcggaaagccccagcggagaaagaacccccaggaaggactgtataacgaactccagaaagacaagatggccgaagcctacagcgagatcggcatgaagggcgagcggagaagaggcaagggccacgatggcctgtaccagggcctgagcaccgccaccaaggacacctatgacgccctgcacatgcaggccctgcctccaaga

SEQ ID NO: 25309 - DNA, 888 bp, synthetic construct
  source 1..888: mol_type = other DNA
atccagaaccctgatcctgccgtgtaccagctgcgggatagcaagagcagcgacaagagcgtgtgtctgttcaccgacttcgacagccagaccaacgtgtcccagagcaaggactccgacgtgtacatcaccgataagaccgtgctggacatgcggagcatggacttcaagagcaactccgccgtggcctggtccaacaagtccgatttcgcctgcgccaacgccttcaacaacagcattatccccgaggacacattcttcccaagccccgagagcagctgcggctttaccagcgagagctaccagcagggcgtgctgagcgccaccatcctgtacgagatcctgctgggcaaggccaccctgtacgccgtgctggtgtctgccctggtgctgatggctatggtcaagcggaaggacagccggggaaggagtaagaggagcaggctcctgcacagtgactacatgaacatgactccacgccgccccggacccacccgcaagcattaccagccctatgccccaccacgcgacttcgcagcctatcgctccagagtgaagttcagcagaagcgccgacgcccctgcctaccagcagggacagaaccaactgtacaacgagctgaacctgggcagacgggaagagtacgacgtgctggacaagcggagaggcagggaccctgagatgggcggaaagccccagcggagaaagaacccccaggaaggactgtataacgaactccagaaagacaagatggccgaagcctacagcgagatcggcatgaagggcgagcggagaagaggcaagggccacgatggcctgtaccagggcctgagcaccgccaccaaggacacctatgacgccctgcacatgcaggccctgcctccaaga

SEQ ID NO: 25310 - DNA, 984 bp, synthetic construct
  source 1..984: mol_type = other DNA
gaggacctgaagaacgtgttcccacctgaggtggccgtgttcgagcctagcgaggccgagatcagccacacccagaaagccaccctcgtgtgcctggctaccggcttctaccccgaccatgtggaactgtcttggtgggtcaacggcaaagaggtgcacagcggcgtgtctaccgacccccagccactgaaagaacagcccgccctgaacgacagccggtactgcctgagcagcagactgagagtgtccgccaccttctggcagaacccccggaaccacttcagatgccaggtgcagttctacggcctgagcgagaacgacgagtggacccaggacagagccaagcccgtgacccagatcgtgtctgccgaagcctggggcagagccgattgcggctttaccagcgagagctaccagcagggcgtgctgagcgccaccaacctgagcgtgatcggcttcagaatcctgctgctgaaagtggccggctttaacctgctgatgaccctgcggctgtggtccagcaggagtaagaggagcaggctcctgcacagtgactacatgaacatgactccacgccgccccggacccacccgcaagcattaccagccctatgccccaccacgcgacttcgcagcctatcgctccagagtgaagttcagcagaagcgccgacgcccctgcctaccagcagggacagaaccaactgtacaacgagctgaacctgggcagacgggaagagtacgacgtgctggacaagcggagaggcagggaccctgagatgggcggaaagccccagcggagaaagaacccccaggaaggactgtataacgaactccagaaagacaagatggccgaagcctacagcgagatcggcatgaagggcgagcggagaagaggcaagggccacgatggcctgtaccagggcctgagcaccgccaccaaggacacctatgacgccctgcacatgcaggccctgcctccaaga

SEQ ID NO: 25311 - DNA, 897 bp, synthetic construct
  source 1..897: mol_type = other DNA
atccagaaccctgatcctgccgtgtaccagctgcgggatagcaagagcagcgacaagagcgtgtgtctgttcaccgacttcgacagccagaccaacgtgtcccagagcaaggactccgacgtgtacatcaccgataagaccgtgctggacatgcggagcatggacttcaagagcaactccgccgtggcctggtccaacaagtccgatttcgcctgcgccaacgccttcaacaacagcattatccccgaggacacattcttcccaagccccgagagcagctgcgacgtgaagctggtggaaaagagcttcgagacagacaccaacctgaacttccagatcctgtacgagatcctgctgggcaaggccaccctgtacgccgtgctggtgtctgccctggtgctgatggctatggtcaagcggaaggacagccggggaaggagtaagaggagcaggctcctgcacagtgactacatgaacatgactccacgccgccccggacccacccgcaagcattaccagccctatgccccaccacgcgacttcgcagcctatcgctccagagtgaagttcagcagaagcgccgacgcccctgcctaccagcagggacagaaccaactgtacaacgagctgaacctgggcagacgggaagagtacgacgtgctggacaagcggagaggcagggaccctgagatgggcggaaagccccagcggagaaagaacccccaggaaggactgtataacgaactccagaaagacaagatggccgaagcctacagcgagatcggcatgaagggcgagcggagaagaggcaagggccacgatggcctgtaccagggcctgagcaccgccaccaaggacacctatgacgccctgcacatgcaggccctgcctccaaga

SEQ ID NO: 25312 - DNA, 942 bp, synthetic construct
  source 1..942: mol_type = other DNA
atccagaaccctgatcctgccgtgtaccagctgcgggatagcaagagcagcgacaagagcgtgtgtctgttcaccgacttcgacagccagaccaacgtgtcccagagcaaggactccgacgtgtacatcaccgataagaccgtgctggacatgcggagcatggacttcaagagcaactccgccgtggcctggtccaacaagtccgatttcgcctgcgccaacgccttcaacaacagcattatccccgaggacacattcttcccaagccccgagagcagcgactccaccgaccacgtgaagcccaaagagacagagaacaccaagcagcccagcaagagctgccacaagcccaaggccatcgtgcacaccgagaaagtgaacatgatgagcctgaccgtgctgggcctgcggatgctgttcgccaaaaccgtggccgtgaacttcctgctgaccgccaagctgttcttcctcctcaccgccaggagtaagaggagcaggctcctgcacagtgactacatgaacatgactccacgccgccccggacccacccgcaagcattaccagccctatgccccaccacgcgacttcgcagcctatcgctccagagtgaagttcagcagaagcgccgacgcccctgcctaccagcagggacagaaccaactgtacaacgagctgaacctgggcagacgggaagagtacgacgtgctggacaagcggagaggcagggaccctgagatgggcggaaagccccagcggagaaagaacccccaggaaggactgtataacgaactccagaaagacaagatggccgaagcctacagcgagatcggcatgaagggcgagcggagaagaggcaagggccacgatggcctgtaccagggcctgagcaccgccaccaaggacacctatgacgccctgcacatgcaggccctgcctccaaga

SEQ ID NO: 25313 - DNA, 1251 bp, synthetic construct
  source 1..1251: mol_type = other DNA
gaggacctgaagaacgtgttcccacctgaggtggccgtgttcgagcctagcgaggccgagatcagccacacccagaaagccaccctcgtgtgcctggctaccggcttctaccccgaccatgtggaactgtcttggtgggtcaacggcaaagaggtgcacagcggcgtgtctaccgacccccagccactgaaagaacagcccgccctgaacgacagccggtactgcctgagcagcagactgagagtgtccgccaccttctggcagaacccccggaaccacttcagatgccaggtgcagttctacggcctgagcgagaacgacgagtggacccaggacagagccaagcccgtgacccagatcgtgtctgccgaagcctggggcagagccgatgatgtgattaagatccactggcaggaaaagaagtccaacaccatcctgggcagccaggaaggcaacaccatgaagaccaacgacacctacatgaagttcagctggctgaccgtgcccgagaagtccctggacaaagaacacagatgcatcgtgcggcacgaaaacaacaagaacggcgtggaccaggaaatcatcttcccacccatcaagaccgatgtgattacaatggaccccaaggacaactgctccaaggacgccaacgataccctgctgctccagctgaccaacaccagcgcctactacatgtacttgttgctgctgctgaagtccgtggtgtacttcgccatcatcacatgctgcctgctgatggctatggtcaagcggaaggacagccggggaaggagtaagaggagcaggctcctgcacagtgactacatgaacatgactccacgccgccccggacccacccgcaagcattaccagccctatgccccaccacgcgacttcgcagcctatcgctccagagtgaagttcagcagaagcgccgacgcccctgcctaccagcagggacagaaccaactgtacaacgagctgaacctgggcagacgggaagagtacgacgtgctggacaagcggagaggcagggaccctgagatgggcggaaagccccagcggagaaagaacccccaggaaggactgtataacgaactccagaaagacaagatggccgaagcctacagcgagatcggcatgaagggcgagcggagaagaggcaagggccacgatggcctgtaccagggcctgagcaccgccaccaaggacacctatgacgccctgcacatgcaggccctgcctccaaga

SEQ ID NO: 25314 - DNA, 933 bp, synthetic construct
  source 1..933: mol_type = other DNA
atccagaaccctgatcctgccgtgtaccagctgcgggatagcaagagcagcgacaagagcgtgtgtctgttcaccgacttcgacagccagaccaacgtgtcccagagcaaggactccgacgtgtacatcaccgataagtgcgtgctggacatgcggagcatggacttcaagagcaactccgccgtggcctggtccaacaagtccgatttcgcctgcgccaacgccttcaacaacagcattatccccgaggacacattcttcccaagccccgagagcagcgactccaccgaccacgtgaagcccaaagagacagagaacaccaagcagcccagcaagagctgccacaagcccaaggccatcgtgcacaccgagaaagtgaacatgatgagcctgaccgtgctgggcctgcggatgctgttcgccaaaaccgtggccgtgaacttcctgctgaccgccaagctgttcttcctcaggagtaagaggagcaggctcctgcacagtgactacatgaacatgactccacgccgccccggacccacccgcaagcattaccagccctatgccccaccacgcgacttcgcagcctatcgctccagagtgaagttcagcagaagcgccgacgcccctgcctaccagcagggacagaaccaactgtacaacgagctgaacctgggcagacgggaagagtacgacgtgctggacaagcggagaggcagggaccctgagatgggcggaaagccccagcggagaaagaacccccaggaaggactgtataacgaactccagaaagacaagatggccgaagcctacagcgagatcggcatgaagggcgagcggagaagaggcaagggccacgatggcctgtaccagggcctgagcaccgccaccaaggacacctatgacgccctgcacatgcaggccctgcctccaaga

SEQ ID NO: 25315 - DNA, 1254 bp, synthetic construct
  source 1..1254: mol_type = other DNA
gaggacctgaagaacgtgttcccacctgaggtggccgtgttcgagcctagcgaggccgagatcagccacacccagaaagccaccctcgtgtgcctggctaccggcttctaccccgaccatgtggaactgtcttggtgggtcaacggcaaagaggtgcacagcggcgtgtgtaccgacccccagccactgaaagaacagcccgccctgaacgacagccggtactgcctgagcagcagactgagagtgtccgccaccttctggcagaacccccggaaccacttcagatgccaggtgcagttctacggcctgagcgagaacgacgagtggacccaggacagagccaagcccgtgacccagatcgtgtctgccgaagcctggggcagagccgatgatgtgattaagatccactggcaggaaaagaagtccaacaccatcctgggcagccaggaaggcaacaccatgaagaccaacgacacctacatgaagttcagctggctgaccgtgcccgagaagtccctggacaaagaacacagatgcatcgtgcggcacgaaaacaacaagaacggcgtggaccaggaaatcatcttcccacccatcaagaccgatgtgattacaatggaccccaaggacaactgctccaaggacgccaacgataccctgctgctccagctgaccaacaccagcgcctactacatgtacttgttgctgctgctgaagtccgtggtgtacttcgccatcatcacatgctgcctgctgcggagaaccgccttctgctgcaacggcgagaagtctaggagtaagaggagcaggctcctgcacagtgactacatgaacatgactccacgccgccccggacccacccgcaagcattaccagccctatgccccaccacgcgacttcgcagcctatcgctccagagtgaagttcagcagaagcgccgacgcccctgcctaccagcagggacagaaccaactgtacaacgagctgaacctgggcagacgggaagagtacgacgtgctggacaagcggagaggcagggaccctgagatgggcggaaagccccagcggagaaagaacccccaggaaggactgtataacgaactccagaaagacaagatggccgaagcctacagcgagatcggcatgaagggcgagcggagaagaggcaagggccacgatggcctgtaccagggcctgagcaccgccaccaaggacacctatgacgccctgcacatgcaggccctgcctccaaga

SEQ ID NO: 25316 - DNA, 933 bp, synthetic construct
  source 1..933: mol_type = other DNA
atccagaaccctgatcctgccgtgtaccagctgcgggatagcaagagcagcgacaagagcgtgtgtctgttcaccgacttcgacagccagaccaacgtgtcccagagcaaggactccgacgtgtacatcaccgataagaccgtgctggacatgcggagcatggacttcaagagcaactccgccgtggcctggtccaacaagtccgatttcgcctgcgccaacgccttcaacaacagcattatccccgaggacacattcttcccaagccccgagagcagcgactccaccgaccacgtgaagcccaaagagacagagaacaccaagcagcccagcaagagctgccacaagcccaaggccatcgtgcacaccgagaaagtgaacatgatgagcctgaccgtgctgggcctgcggatgctgttcgccaaaaccgtggccgtgaacttcctgctgaccgccaagctgttcttcctcaggagtaagaggagcaggctcctgcacagtgactacatgaacatgactccacgccgccccggacccacccgcaagcattaccagccctatgccccaccacgcgacttcgcagcctatcgctccagagtgaagttcagcagaagcgccgacgcccctgcctaccagcagggacagaaccaactgtacaacgagctgaacctgggcagacgggaagagtacgacgtgctggacaagcggagaggcagggaccctgagatgggcggaaagccccagcggagaaagaacccccaggaaggactgtataacgaactccagaaagacaagatggccgaagcctacagcgagatcggcatgaagggcgagcggagaagaggcaagggccacgatggcctgtaccagggcctgagcaccgccaccaaggacacctatgacgccctgcacatgcaggccctgcctccaaga

SEQ ID NO: 25317 - DNA, 1254 bp, synthetic construct
  source 1..1254: mol_type = other DNA
gaggacctgaagaacgtgttcccacctgaggtggccgtgttcgagcctagcgaggccgagatcagccacacccagaaagccaccctcgtgtgcctggctaccggcttctaccccgaccatgtggaactgtcttggtgggtcaacggcaaagaggtgcacagcggcgtgtctaccgacccccagccactgaaagaacagcccgccctgaacgacagccggtactgcctgagcagcagactgagagtgtccgccaccttctggcagaacccccggaaccacttcagatgccaggtgcagttctacggcctgagcgagaacgacgagtggacccaggacagagccaagcccgtgacccagatcgtgtctgccgaagcctggggcagagccgatgatgtgattaagatccactggcaggaaaagaagtccaacaccatcctgggcagccaggaaggcaacaccatgaagaccaacgacacctacatgaagttcagctggctgaccgtgcccgagaagtccctggacaaagaacacagatgcatcgtgcggcacgaaaacaacaagaacggcgtggaccaggaaatcatcttcccacccatcaagaccgatgtgattacaatggaccccaaggacaactgctccaaggacgccaacgataccctgctgctccagctgaccaacaccagcgcctactacatgtacttgttgctgctgctgaagtccgtggtgtacttcgccatcatcacatgctgcctgctgcggagaaccgccttctgctgcaacggcgagaagtctaggagtaagaggagcaggctcctgcacagtgactacatgaacatgactccacgccgccccggacccacccgcaagcattaccagccctatgccccaccacgcgacttcgcagcctatcgctccagagtgaagttcagcagaagcgccgacgcccctgcctaccagcagggacagaaccaactgtacaacgagctgaacctgggcagacgggaagagtacgacgtgctggacaagcggagaggcagggaccctgagatgggcggaaagccccagcggagaaagaacccccaggaaggactgtataacgaactccagaaagacaagatggccgaagcctacagcgagatcggcatgaagggcgagcggagaagaggcaagggccacgatggcctgtaccagggcctgagcaccgccaccaaggacacctatgacgccctgcacatgcaggccctgcctccaaga

SEQ ID NO: 25318 - DNA, 888 bp, synthetic construct; identical to SEQ ID NO: 25303
  source 1..888: mol_type = other DNA

SEQ ID NO: 25319 - DNA, 885 bp, synthetic construct
  source 1..885: mol_type = other DNA
cagaaccctgatcctgccgtgtaccagctgcgggatagcaagagcagcgacaagagcgtgtgtctgttcaccgacttcgacagccagaccaacgtgtcccagagcaaggactccgacgtgtacatcaccgataagtgcgtgctggacatgcggagcatggacttcaagagcaactccgccgtggcctggtccaacaagtccgatttcgcctgcgccaacgccttcaacaacagcattatccccgaggacacattcttcccaagccccgagagcagctgcggctttaccagcgagagctaccagcagggcgtgctgagcgccaccatcctgtacgagatcctgctgggcaaggccaccctgtacgccgtgctggtgtctgccctggtgctgatggctatggtcaagcggaaggacagccggggaaggagtaagaggagcaggctcctgcacagtgactacatgaacatgactccacgccgccccggacccacccgcaagcattaccagccctatgccccaccacgcgacttcgcagcctatcgctccagagtgaagttcagcagaagcgccgacgcccctgcctaccagcagggacagaaccaactgtacaacgagctgaacctgggcagacgggaagagtacgacgtgctggacaagcggagaggcagggaccctgagatgggcggaaagccccagcggagaaagaacccccaggaaggactgtataacgaactccagaaagacaagatggccgaagcctacagcgagatcggcatgaagggcgagcggagaagaggcaagggccacgatggcctgtaccagggcctgagcaccgccaccaaggacacctatgacgccctgcacatgcaggccctgcctccaaga

SEQ ID NO: 25320 - DNA, 882 bp, synthetic construct
  source 1..882: mol_type = other DNA
aaccctgatcctgccgtgtaccagctgcgggatagcaagagcagcgacaagagcgtgtgtctgttcaccgacttcgacagccagaccaacgtgtcccagagcaaggactccgacgtgtacatcaccgataagtgcgtgctggacatgcggagcatggacttcaagagcaactccgccgtggcctggtccaacaagtccgatttcgcctgcgccaacgccttcaacaacagcattatccccgaggacacattcttcccaagccccgagagcagctgcggctttaccagcgagagctaccagcagggcgtgctgagcgccaccatcctgtacgagatcctgctgggcaaggccaccctgtacgccgtgctggtgtctgccctggtgctgatggctatggtcaagcggaaggacagccggggaaggagtaagaggagcaggctcctgcacagtgactacatgaacatgactccacgccgccccggacccacccgcaagcattaccagccctatgccccaccacgcgacttcgcagcctatcgctccagagtgaagttcagcagaagcgccgacgcccctgcctaccagcagggacagaaccaactgtacaacgagctgaacctgggcagacgggaagagtacgacgtgctggacaagcggagaggcagggaccctgagatgggcggaaagccccagcggagaaagaacccccaggaaggactgtataacgaactccagaaagacaagatggccgaagcctacagcgagatcggcatgaagggcgagcggagaagaggcaagggccacgatggcctgtaccagggcctgagcaccgccaccaaggacacctatgacgccctgcacatgcaggccctgcctccaaga

SEQ ID NO: 25321 - DNA, 879 bp, synthetic construct
  source 1..879: mol_type = other DNA
cctgatcctgccgtgtaccagctgcgggatagcaagagcagcgacaagagcgtgtgtctgttcaccgacttcgacagccagaccaacgtgtcccagagcaaggactccgacgtgtacatcaccgataagtgcgtgctggacatgcggagcatggacttcaagagcaactccgccgtggcctggtccaacaagtccgatttcgcctgcgccaacgccttcaacaacagcattatccccgaggacacattcttcccaagccccgagagcagctgcggctttaccagcgagagctaccagcagggcgtgctgagcgccaccatcctgtacgagatcctgctgggcaaggccaccctgtacgccgtgctggtgtctgccctggtgctgatggctatggtcaagcggaaggacagccggggaaggagtaagaggagcaggctcctgcacagtgactacatgaacatgactccacgccgccccggacccacccgcaagcattaccagccctatgccccaccacgcgacttcgcagcctatcgctccagagtgaagttcagcagaagcgccgacgcccctgcctaccagcagggacagaaccaactgtacaacgagctgaacctgggcagacgggaagagtacgacgtgctggacaagcggagaggcagggaccctgagatgggcggaaagccccagcggagaaagaacccccaggaaggactgtataacgaactccagaaagacaagatggccgaagcctacagcgagatcggcatgaagggcgagcggagaagaggcaagggccacgatggcctgtaccagggcctgagcaccgccaccaaggacacctatgacgccctgcacatgcaggccctgcctccaaga

SEQ ID NO: 25322 - DNA, 876 bp, synthetic construct
  source 1..876: mol_type = other DNA
gatcctgccgtgtaccagctgcgggatagcaagagcagcgacaagagcgtgtgtctgttcaccgacttcgacagccagaccaacgtgtcccagagcaaggactccgacgtgtacatcaccgataagtgcgtgctggacatgcggagcatggacttcaagagcaactccgccgtggcctggtccaacaagtccgatttcgcctgcgccaacgccttcaacaacagcattatccccgaggacacattcttcccaagccccgagagcagctgcggctttaccagcgagagctaccagcagggcgtgctgagcgccaccatcctgtacgagatcctgctgggcaaggccaccctgtacgccgtgctggtgtctgccctggtgctgatggctatggtcaagcggaaggacagccggggaaggagtaagaggagcaggctcctgcacagtgactacatgaacatgactccacgccgccccggacccacccgcaagcattaccagccctatgccccaccacgcgacttcgcagcctatcgctccagagtgaagttcagcagaagcgccgacgcccctgcctaccagcagggacagaaccaactgtacaacgagctgaacctgggcagacgggaagagtacgacgtgctggacaagcggagaggcagggaccctgagatgggcggaaagccccagcggagaaagaacccccaggaaggactgtataacgaactccagaaagacaagatggccgaagcctacagcgagatcggcatgaagggcgagcggagaagaggcaagggccacgatggcctgtaccagggcctgagcaccgccaccaaggacacctatgacgccctgcacatgcaggccctgcctccaaga

SEQ ID NO: 25323 - DNA, 873 bp, synthetic construct
  source 1..873: mol_type = other DNA
cctgccgtgtaccagctgcgggatagcaagagcagcgacaagagcgtgtgtctgttcaccgacttcgacagccagaccaacgtgtcccagagcaaggactccgacgtgtacatcaccgataagtgcgtgctggacatgcggagcatggacttcaagagcaactccgccgtggcctggtccaacaagtccgatttcgcctgcgccaacgccttcaacaacagcattatccccgaggacacattcttcccaagccccgagagcagctgcggctttaccagcgagagctaccagcagggcgtgctgagcgccaccatcctgtacgagatcctgctgggcaaggccaccctgtacgccgtgctggtgtctgccctggtgctgatggctatggtcaagcggaaggacagccggggaaggagtaagaggagcaggctcctgcacagtgactacatgaacatgactccacgccgccccggacccacccgcaagcattaccagccctatgccccaccacgcgacttcgcagcctatcgctccagagtgaagttcagcagaagcgccgacgcccctgcctaccagcagggacagaaccaactgtacaacgagctgaacctgggcagacgggaagagtacgacgtgctggacaagcggagaggcagggaccctgagatgggcggaaagccccagcggagaaagaacccccaggaaggactgtataacgaactccagaaagacaagatggccgaagcctacagcgagatcggcatgaagggcgagcggagaagaggcaagggccacgatggcctgtaccagggcctgagcaccgccaccaaggacacctatgacgccctgcacatgcaggccctgcctccaaga

SEQ ID NO: 25324 - DNA, 870 bp, synthetic construct
  source 1..870: mol_type = other DNA
gccgtgtaccagctgcgggatagcaagagcagcgacaagagcgtgtgtctgttcaccgacttcgacagccagaccaacgtgtcccagagcaaggactccgacgtgtacatcaccgataagtgcgtgctggacatgcggagcatggacttcaagagcaactccgccgtggcctggtccaacaagtccgatttcgcctgcgccaacgccttcaacaacagcattatccccgaggacacattcttcccaagccccgagagcagctgcggctttaccagcgagagctaccagcagggcgtgctgagcgccaccatcctgtacgagatcctgctgggcaaggccaccctgtacgccgtgctggtgtctgccctggtgctgatggctatggtcaagcggaaggacagccggggaaggagtaagaggagcaggctcctgcacagtgactacatgaacatgactccacgccgccccggacccacccgcaagcattaccagccctatgccccaccacgcgacttcgcagcctatcgctccagagtgaagttcagcagaagcgccgacgcccctgcctaccagcagggacagaaccaactgtacaacgagctgaacctgggcagacgggaagagtacgacgtgctggacaagcggagaggcagggaccctgagatgggcggaaagccccagcggagaaagaacccccaggaaggactgtataacgaactccagaaagacaagatggccgaagcctacagcgagatcggcatgaagggcgagcggagaagaggcaagggccacgatggcctgtaccagggcctgagcaccgccaccaaggacacctatgacgccctgcacatgcaggccctgcctccaaga

SEQ ID NO: 25325 - DNA, 867 bp, synthetic construct
  source 1..867: mol_type = other DNA
gtgtaccagctgcgggatagcaagagcagcgacaagagcgtgtgtctgttcaccgacttcgacagccagaccaacgtgtcccagagcaaggactccgacgtgtacatcaccgataagtgcgtgctggacatgcggagcatggacttcaagagcaactccgccgtggcctggtccaacaagtccgatttcgcctgcgccaacgccttcaacaacagcattatccccgaggacacattcttcccaagccccgagagcagctgcggctttaccagcgagagctaccagcagggcgtgctgagcgccaccatcctgtacgagatcctgctgggcaaggccaccctgtacgccgtgctggtgtctgccctggtgctgatggctatggtcaagcggaaggacagccggggaaggagtaagaggagcaggctcctgcacagtgactacatgaacatgactccacgccgccccggacccacccgcaagcattaccagccctatgccccaccacgcgacttcgcagcctatcgctccagagtgaagttcagcagaagcgccgacgcccctgcctaccagcagggacagaaccaactgtacaacgagctgaacctgggcagacgggaagagtacgacgtgctggacaagcggagaggcagggaccctgagatgggcggaaagccccagcggagaaagaacccccaggaaggactgtataacgaactccagaaagacaagatggccgaagcctacagcgagatcggcatgaagggcgagcggagaagaggcaagggccacgatggcctgtaccagggcctgagcaccgccaccaaggacacctatgacgccctgcacatgcaggccctgcctccaaga

SEQ ID NO: 25326 - DNA, 864 bp, synthetic construct
  source 1..864: mol_type = other DNA
taccagctgcgggatagcaagagcagcgacaagagcgtgtgtctgttcaccgacttcgacagccagaccaacgtgtcccagagcaaggactccgacgtgtacatcaccgataagtgcgtgctggacatgcggagcatggacttcaagagcaactccgccgtggcctggtccaacaagtccgatttcgcctgcgccaacgccttcaacaacagcattatccccgaggacacattcttcccaagccccgagagcagctgcggctttaccagcgagagctaccagcagggcgtgctgagcgccaccatcctgtacgagatcctgctgggcaaggccaccctgtacgccgtgctggtgtctgccctggtgctgatggctatggtcaagcggaaggacagccggggaaggagtaagaggagcaggctcctgcacagtgactacatgaacatgactccacgccgccccggacccacccgcaagcattaccagccctatgccccaccacgcgacttcgcagcctatcgctccagagtgaagttcagcagaagcgccgacgcccctgcctaccagcagggacagaaccaactgtacaacgagctgaacctgggcagacgggaagagtacgacgtgctggacaagcggagaggcagggaccctgagatgggcggaaagccccagcggagaaagaacccccaggaaggactgtataacgaactccagaaagacaagatggccgaagcctacagcgagatcggcatgaagggcgagcggagaagaggcaagggccacgatggcctgtaccagggcctgagcaccgccaccaaggacacctatgacgccctgcacatgcaggccctgcctccaaga

SEQ ID NO: 25327 - DNA, 861 bp, synthetic construct
  source 1..861: mol_type = other DNA
cagctgcgggatagcaagagcagcgacaagagcgtgtgtctgttcaccgacttcgacagccagaccaacgtgtcccagagcaaggactccgacgtgtacatcaccgataagtgcgtgctggacatgcggagcatggacttcaagagcaactccgccgtggcctggtccaacaagtccgatttcgcctgcgccaacgccttcaacaacagcattatccccgaggacacattcttcccaagccccgagagcagctgcggctttaccagcgagagctaccagcagggcgtgctgagcgccaccatcctgtacgagatcctgctgggcaaggccaccctgtacgccgtgctggtgtctgccctggtgctgatggctatggtcaagcggaaggacagccggggaaggagtaagaggagcaggctcctgcacagtgactacatgaacatgactccacgccgccccggacccacccgcaagcattaccagccctatgccccaccacgcgacttcgcagcctatcgctccagagtgaagttcagcagaagcgccgacgcccctgcctaccagcagggacagaaccaactgtacaacgagctgaacctgggcagacgggaagagtacgacgtgctggacaagcggagaggcagggaccctgagatgggcggaaagccccagcggagaaagaacccccaggaaggactgtataacgaactccagaaagacaagatggccgaagcctacagcgagatcggcatgaagggcgagcggagaagaggcaagggccacgatggcctgtaccagggcctgagcaccgccaccaaggacacctatgacgccctgcacatgcaggccctgcctccaaga

SEQ ID NO: 25328 - DNA, 858 bp, synthetic construct
  source 1..858: mol_type = other DNA
ctgcgggatagcaagagcagcgacaagagcgtgtgtctgttcaccgacttcgacagccagaccaacgtgtcccagagcaaggactccgacgtgtacatcaccgataagtgcgtgctggacatgcggagcatggacttcaagagcaactccgccgtggcctggtccaacaagtccgatttcgcctgcgccaacgccttcaacaacagcattatccccgaggacacattcttcccaagccccgagagcagctgcggctttaccagcgagagctaccagcagggcgtgctgagcgccaccatcctgtacgagatcctgctgggcaaggccaccctgtacgccgtgctggtgtctgccctggtgctgatggctatggtcaagcggaaggacagccggggaaggagtaagaggagcaggctcctgcacagtgactacatgaacatgactccacgccgccccggacccacccgcaagcattaccagccctatgccccaccacgcgacttcgcagcctatcgctccagagtgaagttcagcagaagcgccgacgcccctgcctaccagcagggacagaaccaactgtacaacgagctgaacctgggcagacgggaagagtacgacgtgctggacaagcggagaggcagggaccctgagatgggcggaaagccccagcggagaaagaacccccaggaaggactgtataacgaactccagaaagacaagatggccgaagcctacagcgagatcggcatgaagggcgagcggagaagaggcaagggccacgatggcctgtaccagggcctgagcaccgccaccaaggacacctatgacgccctgcacatgcaggccctgcctccaaga

SEQ ID NO: 25329 - DNA, 855 bp, synthetic construct
  source 1..855: mol_type = other DNA
cgggatagcaagagcagcgacaagagcgtgtgtctgttcaccgacttcgacagccagaccaacgtgtcccagagcaaggactccgacgtgtacatcaccgataagtgcgtgctggacatgcggagcatggacttcaagagcaactccgccgtggcctggtccaacaagtccgatttcgcctgcgccaacgccttcaacaacagcattatccccgaggacacattcttcccaagccccgagagcagctgcggctttaccagcgagagctaccagcagggcgtgctgagcgccaccatcctgtacgagatcctgctgggcaaggccaccctgtacgccgtgctggtgtctgccctggtgctgatggctatggtcaagcggaaggacagccggggaaggagtaagaggagcaggctcctgcacagtgactacatgaacatgactccacgccgccccggacccacccgcaagcattaccagccctatgccccaccacgcgacttcgcagcctatcgctccagagtgaagttcagcagaagcgccgacgcccctgcctaccagcagggacagaaccaactgtacaacgagctgaacctgggcagacgggaagagtacgacgtgctggacaagcggagaggcagggaccctgagatgggcggaaagccccagcggagaaagaacccccaggaaggactgtataacgaactccagaaagacaagatggccgaagcctacagcgagatcggcatgaagggcgagcggagaagaggcaagggccacgatggcctgtaccagggcctgagcaccgccaccaaggacacctatgacgccctgcacatgcaggccctgcctccaaga

SEQ ID NO: 25330 - DNA, 852 bp, synthetic construct
  source 1..852: mol_type = other DNA
gatagcaagagcagcgacaagagcgtgtgtctgttcaccgacttcgacagccagaccaacgtgtcccagagcaaggactccgacgtgtacatcaccgataagtgcgtgctggacatgcggagcatggacttcaagagcaactccgccgtggcctggtccaacaagtccgatttcgcctgcgccaacgccttcaacaacagcattatccccgaggacacattcttcccaagccccgagagcagctgcggctttaccagcgagagctaccagcagggcgtgctgagcgccaccatcctgtacgagatcctgctgggcaaggccaccctgtacgccgtgctggtgtctgccctggtgctgatggctatggtcaagcggaaggacagccggggaaggagtaagaggagcaggctcctgcacagtgactacatgaacatgactccacgccgccccggacccacccgcaagcattaccagccctatgccccaccacgcgacttcgcagcctatcgctccagagtgaagttcagcagaagcgccgacgcccctgcctaccagcagggacagaaccaactgtacaacgagctgaacctgggcagacgggaagagtacgacgtgctggacaagcggagaggcagggaccctgagatgggcggaaagccccagcggagaaagaacccccaggaaggactgtataacgaactccagaaagacaagatggccgaagcctacagcgagatcggcatgaagggcgagcggagaagaggcaagggccacgatggcctgtaccagggcctgagcaccgccaccaaggacacctatgacgccctgcacatgcaggccctgcctccaaga

SEQ ID NO: 25331 - DNA, 849 bp, synthetic construct
  source 1..849: mol_type = other DNA
agcaagagcagcgacaagagcgtgtgtctgttcaccgacttcgacagccagaccaacgtgtcccagagcaaggactccgacgtgtacatcaccgataagtgcgtgctggacatgcggagcatggacttcaagagcaactccgccgtggcctggtccaacaagtccgatttcgcctgcgccaacgccttcaacaacagcattatccccgaggacacattcttcccaagccccgagagcagctgcggctttaccagcgagagctaccagcagggcgtgctgagcgccaccatcctgtacgagatcctgctgggcaaggccaccctgtacgccgtgctggtgtctgccctggtgctgatggctatggtcaagcggaaggacagccggggaaggagtaagaggagcaggctcctgcacagtgactacatgaacatgactccacgccgccccggacccacccgcaagcattaccagccctatgccccaccacgcgacttcgcagcctatcgctccagagtgaagttcagcagaagcgccgacgcccctgcctaccagcagggacagaaccaactgtacaacgagctgaacctgggcagacgggaagagtacgacgtgctggacaagcggagaggcagggaccctgagatgggcggaaagccccagcggagaaagaacccccaggaaggactgtataacgaactccagaaagacaagatggccgaagcctacagcgagatcggcatgaagggcgagcggagaagaggcaagggccacgatggcctgtaccagggcctgagcaccgccaccaaggacacctatgacgccctgcacatgcaggccctgcctccaaga

SEQ ID NO: 25332 - DNA, 846 bp, synthetic construct
  source 1..846: mol_type = other DNA
aagagcagcgacaagagcgtgtgtctgttcaccgacttcgacagccagaccaacgtgtcccagagcaaggactccgacgtgtacatcaccgataagtgcgtgctggacatgcggagcatggacttcaagagcaactccgccgtggcctggtccaacaagtccgatttcgcctgcgccaacgccttcaacaacagcattatccccgaggacacattcttcccaagccccgagagcagctgcggctttaccagcgagagctaccagcagggcgtgctgagcgccaccatcctgtacgagatcctgctgggcaaggccaccctgtacgccgtgctggtgtctgccctggtgctgatggctatggtcaagcggaaggacagccggggaaggagtaagaggagcaggctcctgcacagtgactacatgaacatgactccacgccgccccggacccacccgcaagcattaccagccctatgccccaccacgcgacttcgcagcctatcgctccagagtgaagttcagcagaagcgccgacgcccctgcctaccagcagggacagaaccaactgtacaacgagctgaacctgggcagacgggaagagtacgacgtgctggacaagcggagaggcagggaccctgagatgggcggaaagccccagcggagaaagaacccccaggaaggactgtataacgaactccagaaagacaagatggccgaagcctacagcgagatcggcatgaagggcgagcggagaagaggcaagggccacgatggcctgtaccagggcctgagcaccgccaccaaggacacctatgacgccctgcacatgcaggccctgcctccaaga

SEQ ID NO: 25333 - DNA, 843 bp, synthetic construct
  source 1..843: mol_type = other DNA
agcagcgacaagagcgtgtgtctgttcaccgacttcgacagccagaccaacgtgtcccagagcaaggactccgacgtgtacatcaccgataagtgcgtgctggacatgcggagcatggacttcaagagcaactccgccgtggcctggtccaacaagtccgatttcgcctgcgccaacgccttcaacaacagcattatccccgaggacacattcttcccaagccccgagagcagctgcggctttaccagcgagagctaccagcagggcgtgctgagcgccaccatcctgtacgagatcctgctgggcaaggccaccctgtacgccgtgctggtgtctgccctggtgctgatggctatggtcaagcggaaggacagccggggaaggagtaagaggagcaggctcctgcacagtgactacatgaacatgactccacgccgccccggacccacccgcaagcattaccagccctatgccccaccacgcgacttcgcagcctatcgctccagagtgaagttcagcagaagcgccgacgcccctgcctaccagcagggacagaaccaactgtacaacgagctgaacctgggcagacgggaagagtacgacgtgctggacaagcggagaggcagggaccctgagatgggcggaaagccccagcggagaaagaacccccaggaaggactgtataacgaactccagaaagacaagatggccgaagcctacagcgagatcggcatgaagggcgagcggagaagaggcaagggccacgatggcctgtaccagggcctgagcaccgccaccaaggacacctatgacgccctgcacatgcaggccctgcctccaaga

SEQ ID NO: 25334 - DNA, 840 bp, synthetic construct
  source 1..840: mol_type = other DNA
agcgacaagagcgtgtgtctgttcaccgacttcgacagccagaccaacgtgtcccagagcaaggactccgacgtgtacatcaccgataagtgcgtgctggacatgcggagcatggacttcaagagcaactccgccgtggcctggtccaacaagtccgatttcgcctgcgccaacgccttcaacaacagcattatccccgaggacacattcttcccaagccccgagagcagctgcggctttaccagcgagagctaccagcagggcgtgctgagcgccaccatcctgtacgagatcctgctgggcaaggccaccctgtacgccgtgctggtgtctgccctggtgctgatggctatggtcaagcggaaggacagccggggaaggagtaagaggagcaggctcctgcacagtgactacatgaacatgactccacgccgccccggacccacccgcaagcattaccagccctatgccccaccacgcgacttcgcagcctatcgctccagagtgaagttcagcagaagcgccgacgcccctgcctaccagcagggacagaaccaactgtacaacgagctgaacctgggcagacgggaagagtacgacgtgctggacaagcggagaggcagggaccctgagatgggcggaaagccccagcggagaaagaacccccaggaaggactgtataacgaactccagaaagacaagatggccgaagcctacagcgagatcggcatgaagggcgagcggagaagaggcaagggccacgatggcctgtaccagggcctgagcaccgccaccaaggacacctatgacgccctgcacatgcaggccctgcctccaaga

SEQ ID NO: 25335 - DNA, 837 bp, synthetic construct
  source 1..837: mol_type = other DNA
gacaagagcgtgtgtctgttcaccgacttcgacagccagaccaacgtgtcccagagcaaggactccgacgtgtacatcaccgataagtgcgtgctggacatgcggagcatggacttcaagagcaactccgccgtggcctggtccaacaagtccgatttcgcctgcgccaacgccttcaacaacagcattatccccgaggacacattcttcccaagccccgagagcagctgcggctttaccagcgagagctaccagcagggcgtgctgagcgccaccatcctgtacgagatcctgctgggcaaggccaccctgtacgccgtgctggtgtctgccctggtgctgatggctatggtcaagcggaaggacagccggggaaggagtaagaggagcaggctcctgcacagtgactacatgaacatgactccacgccgccccggacccacccgcaagcattaccagccctatgccccaccacgcgacttcgcagcctatcgctccagagtgaagttcagcagaagcgccgacgcccctgcctaccagcagggacagaaccaactgtacaacgagctgaacctgggcagacgggaagagtacgacgtgctggacaagcggagaggcagggaccctgagatgggcggaaagccccagcggagaaagaacccccaggaaggactgtataacgaactccagaaagacaagatggccgaagcctacagcgagatcggcatgaagggcgagcggagaagaggcaagggccacgatggcctgtaccagggcctgagcaccgccaccaaggacacctatgacgccctgcacatgcaggccctgcctccaaga

SEQ ID NO: 25336 - DNA, 834 bp, synthetic construct
  source 1..834: mol_type = other DNA
aagagcgtgtgtctgttcaccgacttcgacagccagaccaacgtgtcccagagcaaggactccgacgtgtacatcaccgataagtgcgtgctggacatgcggagcatggacttcaagagcaactccgccgtggcctggtccaacaagtccgatttcgcctgcgccaacgccttcaacaacagcattatccccgaggacacattcttcccaagccccgagagcagctgcggctttaccagcgagagctaccagcagggcgtgctgagcgccaccatcctgtacgagatcctgctgggcaaggccaccctgtacgccgtgctggtgtctgccctggtgctgatggctatggtcaagcggaaggacagccggggaaggagtaagaggagcaggctcctgcacagtgactacatgaacatgactccacgccgccccggacccacccgcaagcattaccagccctatgccccaccacgcgacttcgcagcctatcgctccagagtgaagttcagcagaagcgccgacgcccctgcctaccagcagggacagaaccaactgtacaacgagctgaacctgggcagacgggaagagtacgacgtgctggacaagcggagaggcagggaccctgagatgggcggaaagccccagcggagaaagaacccccaggaaggactgtataacgaactccagaaagacaagatggccgaagcctacagcgagatcggcatgaagggcgagcggagaagaggcaagggccacgatggcctgtaccagggcctgagcaccgccaccaaggacacctatgacgccctgcacatgcaggccctgcctccaaga

SEQ ID NO: 25337 - DNA, 831 bp, synthetic construct
  source 1..831: mol_type = other DNA
agcgtgtgtctgttcaccgacttcgacagccagaccaacgtgtcccagagcaaggactccgacgtgtacatcaccgataagtgcgtgctggacatgcggagcatggacttcaagagcaactccgccgtggcctggtccaacaagtccgatttcgcctgcgccaacgccttcaacaacagcattatccccgaggacacattcttcccaagccccgagagcagctgcggctttaccagcgagagctaccagcagggcgtgctgagcgccaccatcctgtacgagatcctgctgggcaaggccaccctgtacgccgtgctggtgtctgccctggtgctgatggctatggtcaagcggaaggacagccggggaaggagtaagaggagcaggctcctgcacagtgactacatgaacatgactccacgccgccccggacccacccgcaagcattaccagccctatgccccaccacgcgacttcgcagcctatcgctccagagtgaagttcagcagaagcgccgacgcccctgcctaccagcagggacagaaccaactgtacaacgagctgaacctgggcagacgggaagagtacgacgtgctggacaagcggagaggcagggaccctgagatgggcggaaagccccagcggagaaagaacccccaggaaggactgtataacgaactccagaaagacaagatggccgaagcctacagcgagatcggcatgaagggcgagcggagaagaggcaagggccacgatggcctgtaccagggcctgagcaccgccaccaaggacacctatgacgccctgcacatgcaggccctgcctccaaga

SEQ ID NO: 25338 - DNA, 828 bp, synthetic construct
  source 1..828: mol_type = other DNA
gtgtgtctgttcaccgacttcgacagccagaccaacgtgtcccagagcaaggactccgacgtgtacatcaccgataagtgcgtgctggacatgcggagcatggacttcaagagcaactccgccgtggcctggtccaacaagtccgatttcgcctgcgccaacgccttcaacaacagcattatccccgaggacacattcttcccaagccccgagagcagctgcggctttaccagcgagagctaccagcagggcgtgctgagcgccaccatcctgtacgagatcctgctgggcaaggccaccctgtacgccgtgctggtgtctgccctggtgctgatggctatggtcaagcggaaggacagccggggaaggagtaagaggagcaggctcctgcacagtgactacatgaacatgactccacgccgccccggacccacccgcaagcattaccagccctatgccccaccacgcgacttcgcagcctatcgctccagagtgaagttcagcagaagcgccgacgcccctgcctaccagcagggacagaaccaactgtacaacgagctgaacctgggcagacgggaagagtacgacgtgctggacaagcggagaggcagggaccctgagatgggcggaaagccccagcggagaaagaacccccaggaaggactgtataacgaactccagaaagacaagatggccgaagcctacagcgagatcggcatgaagggcgagcggagaagaggcaagggccacgatggcctgtaccagggcctgagcaccgccaccaaggacacctatgacgccctgcacatgcaggccctgcctccaaga

SEQ ID NO: 25339 - DNA, 813 bp, synthetic construct
  source 1..813: mol_type = other DNA
gacttcgacagccagaccaacgtgtcccagagcaaggactccgacgtgtacatcaccgataagtgcgtgctggacatgcggagcatggacttcaagagcaactccgccgtggcctggtccaacaagtccgatttcgcctgcgccaacgccttcaacaacagcattatccccgaggacacattcttcccaagccccgagagcagctgcggctttaccagcgagagctaccagcagggcgtgctgagcgccaccatcctgtacgagatcctgctgggcaaggccaccctgtacgccgtgctggtgtctgccctggtgctgatggctatggtcaagcggaaggacagccggggaaggagtaagaggagcaggctcctgcacagtgactacatgaacatgactccacgccgccccggacccacccgcaagcattaccagccctatgccccaccacgcgacttcgcagcctatcgctccagagtgaagttcagcagaagcgccgacgcccctgcctaccagcagggacagaaccaactgtacaacgagctgaacctgggcagacgggaagagtacgacgtgctggacaagcggagaggcagggaccctgagatgggcggaaagccccagcggagaaagaacccccaggaaggactgtataacgaactccagaaagacaagatggccgaagcctacagcgagatcggcatgaagggcgagcggagaagaggcaagggccacgatggcctgtaccagggcctgagcaccgccaccaaggacacctatgacgccctgcacatgcaggccctgcctccaaga

SEQ ID NO: 25340 - DNA, 798 bp, synthetic construct
  source 1..798: mol_type = other DNA
accaacgtgtcccagagcaaggactccgacgtgtacatcaccgataagtgcgtgctggacatgcggagcatggacttcaagagcaactccgccgtggcctggtccaacaagtccgatttcgcctgcgccaacgccttcaacaacagcattatccccgaggacacattcttcccaagccccgagagcagctgcggctttaccagcgagagctaccagcagggcgtgctgagcgccaccatcctgtacgagatcctgctgggcaaggccaccctgtacgccgtgctggtgtctgccctggtgctgatggctatggtcaagcggaaggacagccggggaaggagtaagaggagcaggctcctgcacagtgactacatgaacatgactccacgccgccccggacccacccgcaagcattaccagccctatgccccaccacgcgacttcgcagcctatcgctccagagtgaagttcagcagaagcgccgacgcccctgcctaccagcagggacagaaccaactgtacaacgagctgaacctgggcagacgggaagagtacgacgtgctggacaagcggagaggcagggaccctgagatgggcggaaagccccagcggagaaagaacccccaggaaggactgtataacgaactccagaaagacaagatggccgaagcctacagcgagatcggcatgaagggcgagcggagaagaggcaagggccacgatggcctgtaccagggcctgagcaccgccaccaaggacacctatgacgccctgcacatgcaggccctgcctccaaga

SEQ ID NO: 25341 - DNA, 897 bp, synthetic construct; identical to SEQ ID NO: 25305
  source 1..897: mol_type = other DNA

SEQ ID NO: 25342 - DNA, 894 bp, synthetic construct
  source 1..894: mol_type = other DNA
cagaaccctgatcctgccgtgtaccagctgcgggatagcaagagcagcgacaagagcgtgtgtctgttcaccgacttcgacagccagaccaacgtgtcccagagcaaggactccgacgtgtacatcaccgataagtgcgtgctggacatgcggagcatggacttcaagagcaactccgccgtggcctggtccaacaagtccgatttcgcctgcgccaacgccttcaacaacagcattatccccgaggacacattcttcccaagccccgagagcagctgcgacgtgaagctggtggaaaagagcttcgagacagacaccaacctgaacttccagatcctgtacgagatcctgctgggcaaggccaccctgtacgccgtgctggtgtctgccctggtgctgatggctatggtcaagcggaaggacagccggggaaggagtaagaggagcaggctcctgcacagtgactacatgaacatgactccacgccgccccggacccacccgcaagcattaccagccctatgccccaccacgcgacttcgcagcctatcgctccagagtgaagttcagcagaagcgccgacgcccctgcctaccagcagggacagaaccaactgtacaacgagctgaacctgggcagacgggaagagtacgacgtgctggacaagcggagaggcagggaccctgagatgggcggaaagccccagcggagaaagaacccccaggaaggactgtataacgaactccagaaagacaagatggccgaagcctacagcgagatcggcatgaagggcgagcggagaagaggcaagggccacgatggcctgtaccagggcctgagcaccgccaccaaggacacctatgacgccctgcacatgcaggccctgcctccaaga

SEQ ID NO: 25343 - DNA, 891 bp, synthetic construct
  source 1..891: mol_type = other DNA
aaccctgatcctgccgtgtaccagctgcgggatagcaagagcagcgacaagagcgtgtgtctgttcaccgacttcgacagccagaccaacgtgtcccagagcaaggactccgacgtgtacatcaccgataagtgcgtgctggacatgcggagcatggacttcaagagcaactccgccgtggcctggtccaacaagtccgatttcgcctgcgccaacgccttcaacaacagcattatccccgaggacacattcttcccaagccccgagagcagctgcgacgtgaagctggtggaaaagagcttcgagacagacaccaacctgaacttccagatcctgtacgagatcctgctgggcaaggccaccctgtacgccgtgctggtgtctgccctggtgctgatggctatggtcaagcggaaggacagccggggaaggagtaagaggagcaggctcctgcacagtgactacatgaacatgactccacgccgccccggacccacccgcaagcattaccagccctatgccccaccacgcgacttcgcagcctatcgctccagagtgaagttcagcagaagcgccgacgcccctgcctaccagcagggacagaaccaactgtacaacgagctgaacctgggcagacgggaagagtacgacgtgctggacaagcggagaggcagggaccctgagatgggcggaaagccccagcggagaaagaacccccaggaaggactgtataacgaactccagaaagacaagatggccgaagcctacagcgagatcggcatgaagggcgagcggagaagaggcaagggccacgatggcctgtaccagggcctgagcaccgccaccaaggacacctatgacgccctgcacatgcaggccctgcctccaaga

SEQ ID NO: 25344 - DNA, 888 bp, synthetic construct
  source 1..888: mol_type = other DNA
cctgatcctgccgtgtaccagctgcgggatagcaagagcagcgacaagagcgtgtgtctgttcaccgacttcgacagccagaccaacgtgtcccagagcaaggactccgacgtgtacatcaccgataagtgcgtgctggacatgcggagcatggacttcaagagcaactccgccgtggcctggtccaacaagtccgatttcgcctgcgccaacgccttcaacaacagcattatccccgaggacacattcttcccaagccccgagagcagctgcgacgtgaagctggtggaaaagagcttcgagacagacaccaacctgaacttccagatcctgtacgagatcctgctgggcaaggccaccctgtacgccgtgctggtgtctgccctggtgctgatggctatggtcaagcggaaggacagccggggaaggagtaagaggagcaggctcctgcacagtgactacatgaacatgactccacgccgccccggacccacccgcaagcattaccagccctatgccccaccacgcgacttcgcagcctatcgctccagagtgaagttcagcagaagcgccgacgcccctgcctaccagcagggacagaaccaactgtacaacgagctgaacctgggcagacgggaagagtacgacgtgctggacaagcggagaggcagggaccctgagatgggcggaaagccccagcggagaaagaacccccaggaaggactgtataacgaactccagaaagacaagatggccgaagcctacagcgagatcggcatgaagggcgagcggagaagaggcaagggccacgatggcctgtaccagggcctgagcaccgccaccaaggacacctatgacgccctgcacatgcaggccctgcctccaaga

SEQ ID NO: 25345 - DNA, 885 bp, synthetic construct
  source 1..885: mol_type = other DNA
gatcctgccgtgtaccagctgcgggatagcaagagcagcgacaagagcgtgtgtctgttcaccgacttcgacagccagaccaacgtgtcccagagcaaggactccgacgtgtacatcaccgataagtgcgtgctggacatgcggagcatggacttcaagagcaactccgccgtggcctggtccaacaagtccgatttcgcctgcgccaacgccttcaacaacagcattatccccgaggacacattcttcccaagccccgagagcagctgcgacgtgaagctggtggaaaagagcttcgagacagacaccaacctgaacttccagatcctgtacgagatcctgctgggcaaggccaccctgtacgccgtgctggtgtctgccctggtgctgatggctatggtcaagcggaaggacagccggggaaggagtaagaggagcaggctcctgcacagtgactacatgaacatgactccacgccgccccggacccacccgcaagcattaccagccctatgccccaccacgcgacttcgcagcctatcgctccagagtgaagttcagcagaagcgccgacgcccctgcctaccagcagggacagaaccaactgtacaacgagctgaacctgggcagacgggaagagtacgacgtgctggacaagcggagaggcagggaccctgagatgggcggaaagccccagcggagaaagaacccccaggaaggactgtataacgaactccagaaagacaagatggccgaagcctacagcgagatcggcatgaagggcgagcggagaagaggcaagggccacgatggcctgtaccagggcctgagcaccgccaccaaggacacctatgacgccctgcacatgcaggccctgcctccaaga

SEQ ID NO: 25346 - DNA, 882 bp, synthetic construct
  source 1..882: mol_type = other DNA
cctgccgtgtaccagctgcgggatagcaagagcagcgacaagagcgtgtgtctgttcaccgacttcgacagccagaccaacgtgtcccagagcaaggactccgacgtgtacatcaccgataagtgcgtgctggacatgcggagcatggacttcaagagcaactccgccgtggcctggtccaacaagtccgatttcgcctgcgccaacgccttcaacaacagcattatccccgaggacacattcttcccaagccccgagagcagctgcgacgtgaagctggtggaaaagagcttcgagacagacaccaacctgaacttccagatcctgtacgagatcctgctgggcaaggccaccctgtacgccgtgctggtgtctgccctggtgctgatggctatggtcaagcggaaggacagccggggaaggagtaagaggagcaggctcctgcacagtgactacatgaacatgactccacgccgccccggacccacccgcaagcattaccagccctatgccccaccacgcgacttcgcagcctatcgctccagagtgaagttcagcagaagcgccgacgcccctgcctaccagcagggacagaaccaactgtacaacgagctgaacctgggcagacgggaagagtacgacgtgctggacaagcggagaggcagggaccctgagatgggcggaaagccccagcggagaaagaacccccaggaaggactgtataacgaactccagaaagacaagatggccgaagcctacagcgagatcggcatgaagggcgagcggagaagaggcaagggccacgatggcctgtaccagggcctgagcaccgccaccaaggacacctatgacgccctgcacatgcaggccctgcctccaaga

SEQ ID NO: 25347 - DNA, 879 bp, synthetic construct
  source 1..879: mol_type = other DNA
gccgtgtaccagctgcgggatagcaagagcagcgacaagagcgtgtgtctgttcaccgacttcgacagccagaccaacgtgtcccagagcaaggactccgacgtgtacatcaccgataagtgcgtgctggacatgcggagcatggacttcaagagcaactccgccgtggcctggtccaacaagtccgatttcgcctgcgccaacgccttcaacaacagcattatccccgaggacacattcttcccaagccccgagagcagctgcgacgtgaagctggtggaaaagagcttcgagacagacaccaacctgaacttccagatcctgtacgagatcctgctgggcaaggccaccctgtacgccgtgctggtgtctgccctggtgctgatggctatggtcaagcggaaggacagccggggaaggagtaagaggagcaggctcctgcacagtgactacatgaacatgactccacgccgccccggacccacccgcaagcattaccagccctatgccccaccacgcgacttcgcagcctatcgctccagagtgaagttcagcagaagcgccgacgcccctgcctaccagcagggacagaaccaactgtacaacgagctgaacctgggcagacgggaagagtacgacgtgctggacaagcggagaggcagggaccctgagatgggcggaaagccccagcggagaaagaacccccaggaaggactgtataacgaactccagaaagacaagatggccgaagcctacagcgagatcggcatgaagggcgagcggagaagaggcaagggccacgatggcctgtaccagggcctgagcaccgccaccaaggacacctatgacgccctgcacatgcaggccctgcctccaaga

SEQ ID NO: 25348 - DNA, 876 bp, synthetic construct
  source 1..876: mol_type = other DNA
gtgtaccagctgcgggatagcaagagcagcgacaagagcgtgtgtctgttcaccgacttcgacagccagaccaacgtgtcccagagcaaggactccgacgtgtacatcaccgataagtgcgtgctggacatgcggagcatggacttcaagagcaactccgccgtggcctggtccaacaagtccgatttcgcctgcgccaacgccttcaacaacagcattatccccgaggacacattcttcccaagccccgagagcagctgcgacgtgaagctggtggaaaagagcttcgagacagacaccaacctgaacttccagatcctgtacgagatcctgctgggcaaggccaccctgtacgccgtgctggtgtctgccctggtgctgatggctatggtcaagcggaaggacagccggggaaggagtaagaggagcaggctcctgcacagtgactacatgaacatgactccacgccgccccggacccacccgcaagcattaccagccctatgccccaccacgcgacttcgcagcctatcgctccagagtgaagttcagcagaagcgccgacgcccctgcctaccagcagggacagaaccaactgtacaacgagctgaacctgggcagacgggaagagtacgacgtgctggacaagcggagaggcagggaccctgagatgggcggaaagccccagcggagaaagaacccccaggaaggactgtataacgaactccagaaagacaagatggccgaagcctacagcgagatcggcatgaagggcgagcggagaagaggcaagggccacgatggcctgtaccagggcctgagcaccgccaccaaggacacctatgacgccctgcacatgcaggccctgcctccaaga

SEQ ID NO: 25349 - DNA, 873 bp, synthetic construct
  source 1..873: mol_type = other DNA
taccagctgcgggatagcaagagcagcgacaagagcgtgtgtctgttcaccgacttcgacagccagaccaacgtgtcccagagcaaggactccgacgtgtacatcaccgataagtgcgtgctggacatgcggagcatggacttcaagagcaactccgccgtggcctggtccaacaagtccgatttcgcctgcgccaacgccttcaacaacagcattatccccgaggacacattcttcccaagccccgagagcagctgcgacgtgaagctggtggaaaagagcttcgagacagacaccaacctgaacttccagatcctgtacgagatcctgctgggcaaggccaccctgtacgccgtgctggtgtctgccctggtgctgatggctatggtcaagcggaaggacagccggggaaggagtaagaggagcaggctcctgcacagtgactacatgaacatgactccacgccgccccggacccacccgcaagcattaccagccctatgccccaccacgcgacttcgcagcctatcgctccagagtgaagttcagcagaagcgccgacgcccctgcctaccagcagggacagaaccaactgtacaacgagctgaacctgggcagacgggaagagtacgacgtgctggacaagcggagaggcagggaccctgagatgggcggaaagccccagcggagaaagaacccccaggaaggactgtataacgaactccagaaagacaagatggccgaagcctacagcgagatcggcatgaagggcgagcggagaagaggcaagggccacgatggcctgtaccagggcctgagcaccgccaccaaggacacctatgacgccctgcacatgcaggccctgcctccaaga

SEQ ID NO: 25350 - DNA, 870 bp, synthetic construct
  source 1..870: mol_type = other DNA
cagctgcgggatagcaagagcagcgacaagagcgtgtgtctgttcaccgacttcgacagccagaccaacgtgtcccagagcaaggactccgacgtgtacatcaccgataagtgcgtgctggacatgcggagcatggacttcaagagcaactccgccgtggcctggtccaacaagtccgatttcgcctgcgccaacgccttcaacaacagcattatccccgaggacacattcttcccaagccccgagagcagctgcgacgtgaagctggtggaaaagagcttcgagacagacaccaacctgaacttccagatcctgtacgagatcctgctgggcaaggccaccctgtacgccgtgctggtgtctgccctggtgctgatggctatggtcaagcggaaggacagccggggaaggagtaagaggagcaggctcctgcacagtgactacatgaacatgactccacgccgccccggacccacccgcaagcattaccagccctatgccccaccacgcgacttcgcagcctatcgctccagagtgaagttcagcagaagcgccgacgcccctgcctaccagcagggacagaaccaactgtacaacgagctgaacctgggcagacgggaagagtacgacgtgctggacaagcggagaggcagggaccctgagatgggcggaaagccccagcggagaaagaacccccaggaaggactgtataacgaactccagaaagacaagatggccgaagcctacagcgagatcggcatgaagggcgagcggagaagaggcaagggccacgatggcctgtaccagggcctgagcaccgccaccaaggacacctatgacgccctgcacatgcaggccctgcctccaaga

SEQ ID NO: 25351 - DNA, 867 bp, synthetic construct
  source 1..867: mol_type = other DNA
ctgcgggatagcaagagcagcgacaagagcgtgtgtctgttcaccgacttcgacagccagaccaacgtgtcccagagcaaggactccgacgtgtacatcaccgataagtgcgtgctggacatgcggagcatggacttcaagagcaactccgccgtggcctggtccaacaagtccgatttcgcctgcgccaacgccttcaacaacagcattatccccgaggacacattcttcccaagccccgagagcagctgcgacgtgaagctggtggaaaagagcttcgagacagacaccaacctgaacttccagatcctgtacgagatcctgctgggcaaggccaccctgtacgccgtgctggtgtctgccctggtgctgatggctatggtcaagcggaaggacagccggggaaggagtaagaggagcaggctcctgcacagtgactacatgaacatgactccacgccgccccggacccacccgcaagcattaccagccctatgccccaccacgcgacttcgcagcctatcgctccagagtgaagttcagcagaagcgccgacgcccctgcctaccagcagggacagaaccaactgtacaacgagctgaacctgggcagacgggaagagtacgacgtgctggacaagcggagaggcagggaccctgagatgggcggaaagccccagcggagaaagaacccccaggaaggactgtataacgaactccagaaagacaagatggccgaagcctacagcgagatcggcatgaagggcgagcggagaagaggcaagggccacgatggcctgtaccagggcctgagcaccgccaccaaggacacctatgacgccctgcacatgcaggccctgcctccaaga

SEQ ID NO: 25352 - DNA, 864 bp, synthetic construct
  source 1..864: mol_type = other DNA
cgggatagcaagagcagcgacaagagcgtgtgtctgttcaccgacttcgacagccagaccaacgtgtcccagagcaaggactccgacgtgtacatcaccgataagtgcgtgctggacatgcggagcatggacttcaagagcaactccgccgtggcctggtccaacaagtccgatttcgcctgcgccaacgccttcaacaacagcattatccccgaggacacattcttcccaagccccgagagcagctgcgacgtgaagctggtggaaaagagcttcgagacagacaccaacctgaacttccagatcctgtacgagatcctgctgggcaaggccaccctgtacgccgtgctggtgtctgccctggtgctgatggctatggtcaagcggaaggacagccggggaaggagtaagaggagcaggctcctgcacagtgactacatgaacatgactccacgccgccccggacccacccgcaagcattaccagccctatgccccaccacgcgacttcgcagcctatcgctccagagtgaagttcagcagaagcgccgacgcccctgcctaccagcagggacagaaccaactgtacaacgagctgaacctgggcagacgggaagagtacgacgtgctggacaagcggagaggcagggaccctgagatgggcggaaagccccagcggagaaagaacccccaggaaggactgtataacgaactccagaaagacaagatggccgaagcctacagcgagatcggcatgaagggcgagcggagaagaggcaagggccacgatggcctgtaccagggcctgagcaccgccaccaaggacacctatgacgccctgcacatgcaggccctgcctccaaga

SEQ ID NO: 25353 - DNA, 861 bp, synthetic construct
  source 1..861: mol_type = other DNA
gatagcaagagcagcgacaagagcgtgtgtctgttcaccgacttcgacagccagaccaacgtgtcccagagcaaggactccgacgtgtacatcaccgataagtgcgtgctggacatgcggagcatggacttcaagagcaactccgccgtggcctggtccaacaagtccgatttcgcctgcgccaacgccttcaacaacagcattatccccgaggacacattcttcccaagccccgagagcagctgcgacgtgaagctggtggaaaagagcttcgagacagacaccaacctgaacttccagatcctgtacgagatcctgctgggcaaggccaccctgtacgccgtgctggtgtctgccctggtgctgatggctatggtcaagcggaaggacagccggggaaggagtaagaggagcaggctcctgcacagtgactacatgaacatgactccacgccgccccggacccacccgcaagcattaccagccctatgccccaccacgcgacttcgcagcctatcgctccagagtgaagttcagcagaagcgccgacgcccctgcctaccagcagggacagaaccaactgtacaacgagctgaacctgggcagacgggaagagtacgacgtgctggacaagcggagaggcagggaccctgagatgggcggaaagccccagcggagaaagaacccccaggaaggactgtataacgaactccagaaagacaagatggccgaagcctacagcgagatcggcatgaagggcgagcggagaagaggcaagggccacgatggcctgtaccagggcctgagcaccgccaccaaggacacctatgacgccctgcacatgcaggccctgcctccaaga

SEQ ID NO: 25354 - DNA, 858 bp, synthetic construct
  source 1..858: mol_type = other DNA
agcaagagcagcgacaagagcgtgtgtctgttcaccgacttcgacagccagaccaacgtgtcccagagcaaggactccgacgtgtacatcaccgataagtgcgtgctggacatgcggagcatggacttcaagagcaactccgccgtggcctggtccaacaagtccgatttcgcctgcgccaacgccttcaacaacagcattatccccgaggacacattcttcccaagccccgagagcagctgcgacgtgaagctggtggaaaagagcttcgagacagacaccaacctgaacttccagatcctgtacgagatcctgctgggcaaggccaccctgtacgccgtgctggtgtctgccctggtgctgatggctatggtcaagcggaaggacagccggggaaggagtaagaggagcaggctcctgcacagtgactacatgaacatgactccacgccgccccggacccacccgcaagcattaccagccctatgccccaccacgcgacttcgcagcctatcgctccagagtgaagttcagcagaagcgccgacgcccctgcctaccagcagggacagaaccaactgtacaacgagctgaacctgggcagacgggaagagtacgacgtgctggacaagcggagaggcagggaccctgagatgggcggaaagccccagcggagaaagaacccccaggaaggactgtataacgaactccagaaagacaagatggccgaagcctacagcgagatcggcatgaagggcgagcggagaagaggcaagggccacgatggcctgtaccagggcctgagcaccgccaccaaggacacctatgacgccctgcacatgcaggccctgcctccaaga

SEQ ID NO: 25355 - DNA, 855 bp, synthetic construct
  source 1..855: mol_type = other DNA
aagagcagcgacaagagcgtgtgtctgttcaccgacttcgacagccagaccaacgtgtcccagagcaaggactccgacgtgtacatcaccgataagtgcgtgctggacatgcggagcatggacttcaagagcaactccgccgtggcctggtccaacaagtccgatttcgcctgcgccaacgccttcaacaacagcattatccccgaggacacattcttcccaagccccgagagcagctgcgacgtgaagctggtggaaaagagcttcgagacagacaccaacctgaacttccagatcctgtacgagatcctgctgggcaaggccaccctgtacgccgtgctggtgtctgccctggtgctgatggctatggtcaagcggaaggacagccggggaaggagtaagaggagcaggctcctgcacagtgactacatgaacatgactccacgccgccccggacccacccgcaagcattaccagccctatgccccaccacgcgacttcgcagcctatcgctccagagtgaagttcagcagaagcgccgacgcccctgcctaccagcagggacagaaccaactgtacaacgagctgaacctgggcagacgggaagagtacgacgtgctggacaagcggagaggcagggaccctgagatgggcggaaagccccagcggagaaagaacccccaggaaggactgtataacgaactccagaaagacaagatggccgaagcctacagcgagatcggcatgaagggcgagcggagaagaggcaagggccacgatggcctgtaccagggcctgagcaccgccaccaaggacacctatgacgccctgcacatgcaggccctgcctccaaga

SEQ ID NO: 25356 - DNA, 852 bp, synthetic construct
  source 1..852: mol_type = other DNA
agcagcgacaagagcgtgtgtctgttcaccgacttcgacagccagaccaacgtgtcccagagcaaggactccgacgtgtacatcaccgataagtgcgtgctggacatgcggagcatggacttcaagagcaactccgccgtggcctggtccaacaagtccgatttcgcctgcgccaacgccttcaacaacagcattatccccgaggacacattcttcccaagccccgagagcagctgcgacgtgaagctggtggaaaagagcttcgagacagacaccaacctgaacttccagatcctgtacgagatcctgctgggcaaggccaccctgtacgccgtgctggtgtctgccctggtgctgatggctatggtcaagcggaaggacagccggggaaggagtaagaggagcaggctcctgcacagtgactacatgaacatgactccacgccgccccggacccacccgcaagcattaccagccctatgccccaccacgcgacttcgcagcctatcgctccagagtgaagttcagcagaagcgccgacgcccctgcctaccagcagggacagaaccaactgtacaacgagctgaacctgggcagacgggaagagtacgacgtgctggacaagcggagaggcagggaccctgagatgggcggaaagccccagcggagaaagaacccccaggaaggactgtataacgaactccagaaagacaagatggccgaagcctacagcgagatcggcatgaagggcgagcggagaagaggcaagggccacgatggcctgtaccagggcctgagcaccgccaccaaggacacctatgacgccctgcacatgcaggccctgcctccaaga

SEQ ID NO: 25357 - DNA, 849 bp, synthetic construct
  source 1..849: mol_type = other DNA
agcgacaagagcgtgtgtctgttcaccgacttcgacagccagaccaacgtgtcccagagcaaggactccgacgtgtacatcaccgataagtgcgtgctggacatgcggagcatggacttcaagagcaactccgccgtggcctggtccaacaagtccgatttcgcctgcgccaacgccttcaacaacagcattatccccgaggacacattcttcccaagccccgagagcagctgcgacgtgaagctggtggaaaagagcttcgagacagacaccaacctgaacttccagatcctgtacgagatcctgctgggcaaggccaccctgtacgccgtgctggtgtctgccctggtgctgatggctatggtcaagcggaaggacagccggggaaggagtaagaggagcaggctcctgcacagtgactacatgaacatgactccacgccgccccggacccacccgcaagcattaccagccctatgccccaccacgcgacttcgcagcctatcgctccagagtgaagttcagcagaagcgccgacgcccctgcctaccagcagggacagaaccaactgtacaacgagctgaacctgggcagacgggaagagtacgacgtgctggacaagcggagaggcagggaccctgagatgggcggaaagccccagcggagaaagaacccccaggaaggactgtataacgaactccagaaagacaagatggccgaagcctacagcgagatcggcatgaagggcgagcggagaagaggcaagggccacgatggcctgtaccagggcctgagcaccgccaccaaggacacctatgacgccctgcacatgcaggccctgcctccaaga

SEQ ID NO: 25358 - DNA, 846 bp, synthetic construct
  source 1..846: mol_type = other DNA
gacaagagcgtgtgtctgttcaccgacttcgacagccagaccaacgtgtcccagagcaaggactccgacgtgtacatcaccgataagtgcgtgctggacatgcggagcatggacttcaagagcaactccgccgtggcctggtccaacaagtccgatttcgcctgcgccaacgccttcaacaacagcattatccccgaggacacattcttcccaagccccgagagcagctgcgacgtgaagctggtggaaaagagcttcgagacagacaccaacctgaacttccagatcctgtacgagatcctgctgggcaaggccaccctgtacgccgtgctggtgtctgccctggtgctgatggctatggtcaagcggaaggacagccggggaaggagtaagaggagcaggctcctgcacagtgactacatgaacatgactccacgccgccccggacccacccgcaagcattaccagccctatgccccaccacgcgacttcgcagcctatcgctccagagtgaagttcagcagaagcgccgacgcccctgcctaccagcagggacagaaccaactgtacaacgagctgaacctgggcagacgggaagagtacgacgtgctggacaagcggagaggcagggaccctgagatgggcggaaagccccagcggagaaagaacccccaggaaggactgtataacgaactccagaaagacaagatggccgaagcctacagcgagatcggcatgaagggcgagcggagaagaggcaagggccacgatggcctgtaccagggcctgagcaccgccaccaaggacacctatgacgccctgcacatgcaggccctgcctccaaga

SEQ ID NO: 25359 - DNA, 843 bp, synthetic construct
  source 1..843: mol_type = other DNA
aagagcgtgtgtctgttcaccgacttcgacagccagaccaacgtgtcccagagcaaggactccgacgtgtacatcaccgataagtgcgtgctggacatgcggagcatggacttcaagagcaactccgccgtggcctggtccaacaagtccgatttcgcctgcgccaacgccttcaacaacagcattatccccgaggacacattcttcccaagccccgagagcagctgcgacgtgaagctggtggaaaagagcttcgagacagacaccaacctgaacttccagatcctgtacgagatcctgctgggcaaggccaccctgtacgccgtgctggtgtctgccctggtgctgatggctatggtcaagcggaaggacagccggggaaggagtaagaggagcaggctcctgcacagtgactacatgaacatgactccacgccgccccggacccacccgcaagcattaccagccctatgccccaccacgcgacttcgcagcctatcgctccagagtgaagttcagcagaagcgccgacgcccctgcctaccagcagggacagaaccaactgtacaacgagctgaacctgggcagacgggaagagtacgacgtgctggacaagcggagaggcagggaccctgagatgggcggaaagccccagcggagaaagaacccccaggaaggactgtataacgaactccagaaagacaagatggccgaagcctacagcgagatcggcatgaagggcgagcggagaagaggcaagggccacgatggcctgtaccagggcctgagcaccgccaccaaggacacctatgacgccctgcacatgcaggccctgcctccaaga

SEQ ID NO: 25360 - DNA, 840 bp, synthetic construct
  source 1..840: mol_type = other DNA
agcgtgtgtctgttcaccgacttcgacagccagaccaacgtgtcccagagcaaggactccgacgtgtacatcaccgataagtgcgtgctggacatgcggagcatggacttcaagagcaactccgccgtggcctggtccaacaagtccgatttcgcctgcgccaacgccttcaacaacagcattatccccgaggacacattcttcccaagccccgagagcagctgcgacgtgaagctggtggaaaagagcttcgagacagacaccaacctgaacttccagatcctgtacgagatcctgctgggcaaggccaccctgtacgccgtgctggtgtctgccctggtgctgatggctatggtcaagcggaaggacagccggggaaggagtaagaggagcaggctcctgcacagtgactacatgaacatgactccacgccgccccggacccacccgcaagcattaccagccctatgccccaccacgcgacttcgcagcctatcgctccagagtgaagttcagcagaagcgccgacgcccctgcctaccagcagggacagaaccaactgtacaacgagctgaacctgggcagacgggaagagtacgacgtgctggacaagcggagaggcagggaccctgagatgggcggaaagccccagcggagaaagaacccccaggaaggactgtataacgaactccagaaagacaagatggccgaagcctacagcgagatcggcatgaagggcgagcggagaagaggcaagggccacgatggcctgtaccagggcctgagcaccgccaccaaggacacctatgacgccctgcacatgcaggccctgcctccaaga

SEQ ID NO: 25361 - DNA, 837 bp, synthetic construct
  source 1..837: mol_type = other DNA
gtgtgtctgttcaccgacttcgacagccagaccaacgtgtcccagagcaaggactccgacgtgtacatcaccgataagtgcgtgctggacatgcggagcatggacttcaagagcaactccgccgtggcctggtccaacaagtccgatttcgcctgcgccaacgccttcaacaacagcattatccccgaggacacattcttcccaagccccgagagcagctgcgacgtgaagctggtggaaaagagcttcgagacagacaccaacctgaacttccagatcctgtacgagatcctgctgggcaaggccaccctgtacgccgtgctggtgtctgccctggtgctgatggctatggtcaagcggaaggacagccggggaaggagtaagaggagcaggctcctgcacagtgactacatgaacatgactccacgccgccccggacccacccgcaagcattaccagccctatgccccaccacgcgacttcgcagcctatcgctccagagtgaagttcagcagaagcgccgacgcccctgcctaccagcagggacagaaccaactgtacaacgagctgaacctgggcagacgggaagagtacgacgtgctggacaagcggagaggcagggaccctgagatgggcggaaagccccagcggagaaagaacccccaggaaggactgtataacgaactccagaaagacaagatggccgaagcctacagcgagatcggcatgaagggcgagcggagaagaggcaagggccacgatggcctgtaccagggcctgagcaccgccaccaaggacacctatgacgccctgcacatgcaggccctgcctccaaga

SEQ ID NO: 25362 - DNA, 822 bp, synthetic construct
  source 1..822: mol_type = other DNA
gacttcgacagccagaccaacgtgtcccagagcaaggactccgacgtgtacatcaccgataagtgcgtgctggacatgcggagcatggacttcaagagcaactccgccgtggcctggtccaacaagtccgatttcgcctgcgccaacgccttcaacaacagcattatccccgaggacacattcttcccaagccccgagagcagctgcgacgtgaagctggtggaaaagagcttcgagacagacaccaacctgaacttccagatcctgtacgagatcctgctgggcaaggccaccctgtacgccgtgctggtgtctgccctggtgctgatggctatggtcaagcggaaggacagccggggaaggagtaagaggagcaggctcctgcacagtgactacatgaacatgactccacgccgccccggacccacccgcaagcattaccagccctatgccccaccacgcgacttcgcagcctatcgctccagagtgaagttcagcagaagcgccgacgcccctgcctaccagcagggacagaaccaactgtacaacgagctgaacctgggcagacgggaagagtacgacgtgctggacaagcggagaggcagggaccctgagatgggcggaaagccccagcggagaaagaacccccaggaaggactgtataacgaactccagaaagacaagatggccgaagcctacagcgagatcggcatgaagggcgagcggagaagaggcaagggccacgatggcctgtaccagggcctgagcaccgccaccaaggacacctatgacgccctgcacatgcaggccctgcctccaaga

SEQ ID NO: 25363 - DNA, 807 bp, synthetic construct
  source 1..807: mol_type = other DNA
accaacgtgtcccagagcaaggactccgacgtgtacatcaccgataagtgcgtgctggacatgcggagcatggacttcaagagcaactccgccgtggcctggtccaacaagtccgatttcgcctgcgccaacgccttcaacaacagcattatccccgaggacacattcttcccaagccccgagagcagctgcgacgtgaagctggtggaaaagagcttcgagacagacaccaacctgaacttccagatcctgtacgagatcctgctgggcaaggccaccctgtacgccgtgctggtgtctgccctggtgctgatggctatggtcaagcggaaggacagccggggaaggagtaagaggagcaggctcctgcacagtgactacatgaacatgactccacgccgccccggacccacccgcaagcattaccagccctatgccccaccacgcgacttcgcagcctatcgctccagagtgaagttcagcagaagcgccgacgcccctgcctaccagcagggacagaaccaactgtacaacgagctgaacctgggcagacgggaagagtacgacgtgctggacaagcggagaggcagggaccctgagatgggcggaaagccccagcggagaaagaacccccaggaaggactgtataacgaactccagaaagacaagatggccgaagcctacagcgagatcggcatgaagggcgagcggagaagaggcaagggccacgatggcctgtaccagggcctgagcaccgccaccaaggacacctatgacgccctgcacatgcaggccctgcctccaaga

SEQ ID NO: 25364 - DNA, 942 bp, synthetic construct; identical to SEQ ID NO: 25306
  source 1..942: mol_type = other DNA

SEQ ID NO: 25365 - DNA, 939 bp, synthetic construct
  source 1..939: mol_type = other DNA
cagaaccctgatcctgccgtgtaccagctgcgggatagcaagagcagcgacaagagcgtgtgtctgttcaccgacttcgacagccagaccaacgtgtcccagagcaaggactccgacgtgtacatcaccgataagtgcgtgctggacatgcggagcatggacttcaagagcaactccgccgtggcctggtccaacaagtccgatttcgcctgcgccaacgccttcaacaacagcattatccccgaggacacattcttcccaagccccgagagcagcgactccaccgaccacgtgaagcccaaagagacagagaacaccaagcagcccagcaagagctgccacaagcccaaggccatcgtgcacaccgagaaagtgaacatgatgagcctgaccgtgctgggcctgcggatgctgttcgccaaaaccgtggccgtgaacttcctgctgaccgccaagctgttcttcctcctcaccgccaggagtaagaggagcaggctcctgcacagtgactacatgaacatgactccacgccgccccggacccacccgcaagcattaccagccctatgccccaccacgcgacttcgcagcctatcgctccagagtgaagttcagcagaagcgccgacgcccctgcctaccagcagggacagaaccaactgtacaacgagctgaacctgggcagacgggaagagtacgacgtgctggacaagcggagaggcagggaccctgagatgggcggaaagccccagcggagaaagaacccccaggaaggactgtataacgaactccagaaagacaagatggccgaagcctacagcgagatcggcatgaagggcgagcggagaagaggcaagggccacgatggcctgtaccagggcctgagcaccgccaccaaggacacctatgacgccctgcacatgcaggccctgcctccaaga

SEQ ID NO: 25366 - DNA, 936 bp, synthetic construct
  source 1..936: mol_type = other DNA
aaccctgatcctgccgtgtaccagctgcgggatagcaagagcagcgacaagagcgtgtgtctgttcaccgacttcgacagccagaccaacgtgtcccagagcaaggactccgacgtgtacatcaccgataagtgcgtgctggacatgcggagcatggacttcaagagcaactccgccgtggcctggtccaacaagtccgatttcgcctgcgccaacgccttcaacaacagcattatccccgaggacacattcttcccaagccccgagagcagcgactccaccgaccacgtgaagcccaaagagacagagaacaccaagcagcccagcaagagctgccacaagcccaaggccatcgtgcacaccgagaaagtgaacatgatgagcctgaccgtgctgggcctgcggatgctgttcgccaaaaccgtggccgtgaacttcctgctgaccgccaagctgttcttcctcctcaccgccaggagtaagaggagcaggctcctgcacagtgactacatgaacatgactccacgccgccccggacccacccgcaagcattaccagccctatgccccaccacgcgacttcgcagcctatcgctccagagtgaagttcagcagaagcgccgacgcccctgcctaccagcagggacagaaccaactgtacaacgagctgaacctgggcagacgggaagagtacgacgtgctggacaagcggagaggcagggaccctgagatgggcggaaagccccagcggagaaagaacccccaggaaggactgtataacgaactccagaaagacaagatggccgaagcctacagcgagatcggcatgaagggcgagcggagaagaggcaagggccacgatggcctgtaccagggcctgagcaccgccaccaaggacacctatgacgccctgcacatgcaggccctgcctccaaga

SEQ ID NO: 25367 - DNA, 933 bp, synthetic construct
  source 1..933: mol_type = other DNA
cctgatcctgccgtgtaccagctgcgggatagcaagagcagcgacaagagcgtgtgtctgttcaccgacttcgacagccagaccaacgtgtcccagagcaaggactccgacgtgtacatcaccgataagtgcgtgctggacatgcggagcatggacttcaagagcaactccgccgtggcctggtccaacaagtccgatttcgcctgcgccaacgccttcaacaacagcattatccccgaggacacattcttcccaagccccgagagcagcgactccaccgaccacgtgaagcccaaagagacagagaacaccaagcagcccagcaagagctgccacaagcccaaggccatcgtgcacaccgagaaagtgaacatgatgagcctgaccgtgctgggcctgcggatgctgttcgccaaaaccgtggccgtgaacttcctgctgaccgccaagctgttcttcctcctcaccgccaggagtaagaggagcaggctcctgcacagtgactacatgaacatgactccacgccgccccggacccacccgcaagcattaccagccctatgccccaccacgcgacttcgcagcctatcgctccagagtgaagttcagcagaagcgccgacgcccctgcctaccagcagggacagaaccaactgtacaacgagctgaacctgggcagacgggaagagtacgacgtgctggacaagcggagaggcagggaccctgagatgggcggaaagccccagcggagaaagaacccccaggaaggactgtataacgaactccagaaagacaagatggccgaagcctacagcgagatcggcatgaagggcgagcggagaagaggcaagggccacgatggcctgtaccagggcctgagcaccgccaccaaggacacctatgacgccctgcacatgcaggccctgcctccaaga

SEQ ID NO: 25368 - DNA, 930 bp, synthetic construct
  source 1..930: mol_type = other DNA
gatcctgccgtgtaccagctgcgggatagcaagagcagcgacaagagcgtgtgtctgttcaccgacttcgacagccagaccaacgtgtcccagagcaaggactccgacgtgtacatcaccgataagtgcgtgctggacatgcggagcatggacttcaagagcaactccgccgtggcctggtccaacaagtccgatttcgcctgcgccaacgccttcaacaacagcattatccccgaggacacattcttcccaagccccgagagcagcgactccaccgaccacgtgaagcccaaagagacagagaacaccaagcagcccagcaagagctgccacaagcccaaggccatcgtgcacaccgagaaagtgaacatgatgagcctgaccgtgctgggcctgcggatgctgttcgccaaaaccgtggccgtgaacttcctgctgaccgccaagctgttcttcctcctcaccgccaggagtaagaggagcaggctcctgcacagtgactacatgaacatgactccacgccgccccggacccacccgcaagcattaccagccctatgccccaccacgcgacttcgcagcctatcgctccagagtgaagttcagcagaagcgccgacgcccctgcctaccagcagggacagaaccaactgtacaacgagctgaacctgggcagacgggaagagtacgacgtgctggacaagcggagaggcagggaccctgagatgggcggaaagccccagcggagaaagaacccccaggaaggactgtataacgaactccagaaagacaagatggccgaagcctacagcgagatcggcatgaagggcgagcggagaagaggcaagggccacgatggcctgtaccagggcctgagcaccgccaccaaggacacctatgacgccctgcacatgcaggccctgcctccaaga

SEQ ID NO: 25369 - DNA, 927 bp, synthetic construct
  source 1..927: mol_type = other DNA
cctgccgtgtaccagctgcgggatagcaagagcagcgacaagagcgtgtgtctgttcaccgacttcgacagccagaccaacgtgtcccagagcaaggactccgacgtgtacatcaccgataagtgcgtgctggacatgcggagcatggacttcaagagcaactccgccgtggcctggtccaacaagtccgatttcgcctgcgccaacgccttcaacaacagcattatccccgaggacacattcttcccaagccccgagagcagcgactccaccgaccacgtgaagcccaaagagacagagaacaccaagcagcccagcaagagctgccacaagcccaaggccatcgtgcacaccgagaaagtgaacatgatgagcctgaccgtgctgggcctgcggatgctgttcgccaaaaccgtggccgtgaacttcctgctgaccgccaagctgttcttcctcctcaccgccaggagtaagaggagcaggctcctgcacagtgactacatgaacatgactccacgccgccccggacccacccgcaagcattaccagccctatgccccaccacgcgacttcgcagcctatcgctccagagtgaagttcagcagaagcgccgacgcccctgcctaccagcagggacagaaccaactgtacaacgagctgaacctgggcagacgggaagagtacgacgtgctggacaagcggagaggcagggaccctgagatgggcggaaagccccagcggagaaagaacccccaggaaggactgtataacgaactccagaaagacaagatggccgaagcctacagcgagatcggcatgaagggcgagcggagaagaggcaagggccacgatggcctgtaccagggcctgagcaccgccaccaaggacacctatgacgccctgcacatgcaggccctgcctccaaga

SEQ ID NO: 25370 - DNA, 924 bp, synthetic construct
  source 1..924: mol_type = other DNA
gccgtgtaccagctgcgggatagcaagagcagcgacaagagcgtgtgtctgttcaccgacttcgacagccagaccaacgtgtcccagagcaaggactccgacgtgtacatcaccgataagtgcgtgctggacatgcggagcatggacttcaagagcaactccgccgtggcctggtccaacaagtccgatttcgcctgcgccaacgccttcaacaacagcattatccccgaggacacattcttcccaagccccgagagcagcgactccaccgaccacgtgaagcccaaagagacagagaacaccaagcagcccagcaagagctgccacaagcccaaggccatcgtgcacaccgagaaagtgaacatgatgagcctgaccgtgctgggcctgcggatgctgttcgccaaaaccgtggccgtgaacttcctgctgaccgccaagctgttcttcctcctcaccgccaggagtaagaggagcaggctcctgcacagtgactacatgaacatgactccacgccgccccggacccacccgcaagcattaccagccctatgccccaccacgcgacttcgcagcctatcgctccagagtgaagttcagcagaagcgccgacgcccctgcctaccagcagggacagaaccaactgtacaacgagctgaacctgggcagacgggaagagtacgacgtgctggacaagcggagaggcagggaccctgagatgggcggaaagccccagcggagaaagaacccccaggaaggactgtataacgaactccagaaagacaagatggccgaagcctacagcgagatcggcatgaagggcgagcggagaagaggcaagggccacgatggcctgtaccagggcctgagcaccgccaccaaggacacctatgacgccctgcacatgcaggccctgcctccaaga

SEQ ID NO: 25371 - DNA, 921 bp, synthetic construct
  source 1..921: mol_type = other DNA
gtgtaccagctgcgggatagcaagagcagcgacaagagcgtgtgtctgttcaccgacttcgacagccagaccaacgtgtcccagagcaaggactccgacgtgtacatcaccgataagtgcgtgctggacatgcggagcatggacttcaagagcaactccgccgtggcctggtccaacaagtccgatttcgcctgcgccaacgccttcaacaacagcattatccccgaggacacattcttcccaagccccgagagcagcgactccaccgaccacgtgaagcccaaagagacagagaacaccaagcagcccagcaagagctgccacaagcccaaggccatcgtgcacaccgagaaagtgaacatgatgagcctgaccgtgctgggcctgcggatgctgttcgccaaaaccgtggccgtgaacttcctgctgaccgccaagctgttcttcctcctcaccgccaggagtaagaggagcaggctcctgcacagtgactacatgaacatgactccacgccgccccggacccacccgcaagcattaccagccctatgccccaccacgcgacttcgcagcctatcgctccagagtgaagttcagcagaagcgccgacgcccctgcctaccagcagggacagaaccaactgtacaacgagctgaacctgggcagacgggaagagtacgacgtgctggacaagcggagaggcagggaccctgagatgggcggaaagccccagcggagaaagaacccccaggaaggactgtataacgaactccagaaagacaagatggccgaagcctacagcgagatcggcatgaagggcgagcggagaagaggcaagggccacgatggcctgtaccagggcctgagcaccgccaccaaggacacctatgacgccctgcacatgcaggccctgcctccaaga

SEQ ID NO: 25372 - DNA, 918 bp, synthetic construct
  source 1..918: mol_type = other DNA
taccagctgcgggatagcaagagcagcgacaagagcgtgtgtctgttcaccgacttcgacagccagaccaacgtgtcccagagcaaggactccgacgtgtacatcaccgataagtgcgtgctggacatgcggagcatggacttcaagagcaactccgccgtggcctggtccaacaagtccgatttcgcctgcgccaacgccttcaacaacagcattatccccgaggacacattcttcccaagccccgagagcagcgactccaccgaccacgtgaagcccaaagagacagagaacaccaagcagcccagcaagagctgccacaagcccaaggccatcgtgcacaccgagaaagtgaacatgatgagcctgaccgtgctgggcctgcggatgctgttcgccaaaaccgtggccgtgaacttcctgctgaccgccaagctgttcttcctcctcaccgccaggagtaagaggagcaggctcctgcacagtgactacatgaacatgactccacgccgccccggacccacccgcaagcattaccagccctatgccccaccacgcgacttcgcagcctatcgctccagagtgaagttcagcagaagcgccgacgcccctgcctaccagcagggacagaaccaactgtacaacgagctgaacctgggcagacgggaagagtacgacgtgctggacaagcggagaggcagggaccctgagatgggcggaaagccccagcggagaaagaacccccaggaaggactgtataacgaactccagaaagacaagatggccgaagcctacagcgagatcggcatgaagggcgagcggagaagaggcaagggccacgatggcctgtaccagggcctgagcaccgccaccaaggacacctatgacgccctgcacatgcaggccctgcctccaaga

SEQ ID NO: 25373 - DNA, 915 bp, synthetic construct
  source 1..915: mol_type = other DNA
cagctgcgggatagcaagagcagcgacaagagcgtgtgtctgttcaccgacttcgacagccagaccaacgtgtcccagagcaaggactccgacgtgtacatcaccgataagtgcgtgctggacatgcggagcatggacttcaagagcaactccgccgtggcctggtccaacaagtccgatttcgcctgcgccaacgccttcaacaacagcattatccccgaggacacattcttcccaagccccgagagcagcgactccaccgaccacgtgaagcccaaagagacagagaacaccaagcagcccagcaagagctgccacaagcccaaggccatcgtgcacaccgagaaagtgaacatgatgagcctgaccgtgctgggcctgcggatgctgttcgccaaaaccgtggccgtgaacttcctgctgaccgccaagctgttcttcctcctcaccgccaggagtaagaggagcaggctcctgcacagtgactacatgaacatgactccacgccgccccggacccacccgcaagcattaccagccctatgccccaccacgcgacttcgcagcctatcgctccagagtgaagttcagcagaagcgccgacgcccctgcctaccagcagggacagaaccaactgtacaacgagctgaacctgggcagacgggaagagtacgacgtgctggacaagcggagaggcagggaccctgagatgggcggaaagccccagcggagaaagaacccccaggaaggactgtataacgaactccagaaagacaagatggccgaagcctacagcgagatcggcatgaagggcgagcggagaagaggcaagggccacgatggcctgtaccagggcctgagcaccgccaccaaggacacctatgacgccctgcacatgcaggccctgcctccaaga

SEQ ID NO: 25374 - DNA, 912 bp, synthetic construct
  source 1..912: mol_type = other DNA
ctgcgggatagcaagagcagcgacaagagcgtgtgtctgttcaccgacttcgacagccagaccaacgtgtcccagagcaaggactccgacgtgtacatcaccgataagtgcgtgctggacatgcggagcatggacttcaagagcaactccgccgtggcctggtccaacaagtccgatttcgcctgcgccaacgccttcaacaacagcattatccccgaggacacattcttcccaagccccgagagcagcgactccaccgaccacgtgaagcccaaagagacagagaacaccaagcagcccagcaagagctgccacaagcccaaggccatcgtgcacaccgagaaagtgaacatgatgagcctgaccgtgctgggcctgcggatgctgttcgccaaaaccgtggccgtgaacttcctgctgaccgccaagctgttcttcctcctcaccgccaggagtaagaggagcaggctcctgcacagtgactacatgaacatgactccacgccgccccggacccacccgcaagcattaccagccctatgccccaccacgcgacttcgcagcctatcgctccagagtgaagttcagcagaagcgccgacgcccctgcctaccagcagggacagaaccaactgtacaacgagctgaacctgggcagacgggaagagtacgacgtgctggacaagcggagaggcagggaccctgagatgggcggaaagccccagcggagaaagaacccccaggaaggactgtataacgaactccagaaagacaagatggccgaagcctacagcgagatcggcatgaagggcgagcggagaagaggcaagggccacgatggcctgtaccagggcctgagcaccgccaccaaggacacctatgacgccctgcacatgcaggccctgcctccaaga

SEQ ID NO: 25375 - DNA, 909 bp, synthetic construct
  source 1..909: mol_type = other DNA
cgggatagcaagagcagcgacaagagcgtgtgtctgttcaccgacttcgacagccagaccaacgtgtcccagagcaaggactccgacgtgtacatcaccgataagtgcgtgctggacatgcggagcatggacttcaagagcaactccgccgtggcctggtccaacaagtccgatttcgcctgcgccaacgccttcaacaacagcattatccccgaggacacattcttcccaagccccgagagcagcgactccaccgaccacgtgaagcccaaagagacagagaacaccaagcagcccagcaagagctgccacaagcccaaggccatcgtgcacaccgagaaagtgaacatgatgagcctgaccgtgctgggcctgcggatgctgttcgccaaaaccgtggccgtgaacttcctgctgaccgccaagctgttcttcctcctcaccgccaggagtaagaggagcaggctcctgcacagtgactacatgaacatgactccacgccgccccggacccacccgcaagcattaccagccctatgccccaccacgcgacttcgcagcctatcgctccagagtgaagttcagcagaagcgccgacgcccctgcctaccagcagggacagaaccaactgtacaacgagctgaacctgggcagacgggaagagtacgacgtgctggacaagcggagaggcagggaccctgagatgggcggaaagccccagcggagaaagaacccccaggaaggactgtataacgaactccagaaagacaagatggccgaagcctacagcgagatcggcatgaagggcgagcggagaagaggcaagggccacgatggcctgtaccagggcctgagcaccgccaccaaggacacctatgacgccctgcacatgcaggccctgcctccaaga

SEQ ID NO: 25376 - DNA, 906 bp, synthetic construct
  source 1..906: mol_type = other DNA
gatagcaagagcagcgacaagagcgtgtgtctgttcaccgacttcgacagccagaccaacgtgtcccagagcaaggactccgacgtgtacatcaccgataagtgcgtgctggacatgcggagcatggacttcaagagcaactccgccgtggcctggtccaacaagtccgatttcgcctgcgccaacgccttcaacaacagcattatccccgaggacacattcttcccaagccccgagagcagcgactccaccgaccacgtgaagcccaaagagacagagaacaccaagcagcccagcaagagctgccacaagcccaaggccatcgtgcacaccgagaaagtgaacatgatgagcctgaccgtgctgggcctgcggatgctgttcgccaaaaccgtggccgtgaacttcctgctgaccgccaagctgttcttcctcctcaccgccaggagtaagaggagcaggctcctgcacagtgactacatgaacatgactccacgccgccccggacccacccgcaagcattaccagccctatgccccaccacgcgacttcgcagcctatcgctccagagtgaagttcagcagaagcgccgacgcccctgcctaccagcagggacagaaccaactgtacaacgagctgaacctgggcagacgggaagagtacgacgtgctggacaagcggagaggcagggaccctgagatgggcggaaagccccagcggagaaagaacccccaggaaggactgtataacgaactccagaaagacaagatggccgaagcctacagcgagatcggcatgaagggcgagcggagaagaggcaagggccacgatggcctgtaccagggcctgagcaccgccaccaaggacacctatgacgccctgcacatgcaggccctgcctccaaga

SEQ ID NO: 25377 - DNA, 903 bp, synthetic construct
  source 1..903: mol_type = other DNA
agcaagagcagcgacaagagcgtgtgtctgttcaccgacttcgacagccagaccaacgtgtcccagagcaaggactccgacgtgtacatcaccgataagtgcgtgctggacatgcggagcatggacttcaagagcaactccgccgtggcctggtccaacaagtccgatttcgcctgcgccaacgccttcaacaacagcattatccccgaggacacattcttcccaagccccgagagcagcgactccaccgaccacgtgaagcccaaagagacagagaacaccaagcagcccagcaagagctgccacaagcccaaggccatcgtgcacaccgagaaagtgaacatgatgagcctgaccgtgctgggcctgcggatgctgttcgccaaaaccgtggccgtgaacttcctgctgaccgccaagctgttcttcctcctcaccgccaggagtaagaggagcaggctcctgcacagtgactacatgaacatgactccacgccgccccggacccacccgcaagcattaccagccctatgccccaccacgcgacttcgcagcctatcgctccagagtgaagttcagcagaagcgccgacgcccctgcctaccagcagggacagaaccaactgtacaacgagctgaacctgggcagacgggaagagtacgacgtgctggacaagcggagaggcagggaccctgagatgggcggaaagccccagcggagaaagaacccccaggaaggactgtataacgaactccagaaagacaagatggccgaagcctacagcgagatcggcatgaagggcgagcggagaagaggcaagggccacgatggcctgtaccagggcctgagcaccgccaccaaggacacctatgacgccctgcacatgcaggccctgcctccaaga

SEQ ID NO: 25378 - DNA, 900 bp, synthetic construct
  source 1..900: mol_type = other DNA
aagagcagcgacaagagcgtgtgtctgttcaccgacttcgacagccagaccaacgtgtcccagagcaaggactccgacgtgtacatcaccgataagtgcgtgctggacatgcggagcatggacttcaagagcaactccgccgtggcctggtccaacaagtccgatttcgcctgcgccaacgccttcaacaacagcattatccccgaggacacattcttcccaagccccgagagcagcgactccaccgaccacgtgaagcccaaagagacagagaacaccaagcagcccagcaagagctgccacaagcccaaggccatcgtgcacaccgagaaagtgaacatgatgagcctgaccgtgctgggcctgcggatgctgttcgccaaaaccgtggccgtgaacttcctgctgaccgccaagctgttcttcctcctcaccgccaggagtaagaggagcaggctcctgcacagtgactacatgaacatgactccacgccgccccggacccacccgcaagcattaccagccctatgccccaccacgcgacttcgcagcctatcgctccagagtgaagttcagcagaagcgccgacgcccctgcctaccagcagggacagaaccaactgtacaacgagctgaacctgggcagacgggaagagtacgacgtgctggacaagcggagaggcagggaccctgagatgggcggaaagccccagcggagaaagaacccccaggaaggactgtataacgaactccagaaagacaagatggccgaagcctacagcgagatcggcatgaagggcgagcggagaagaggcaagggccacgatggcctgtaccagggcctgagcaccgccaccaaggacacctatgacgccctgcacatgcaggccctgcctccaaga

SEQ ID NO: 25379 - DNA, 897 bp, synthetic construct
  source 1..897: mol_type = other DNA
agcagcgacaagagcgtgtgtctgttcaccgacttcgacagccagaccaacgtgtcccagagcaaggactccgacgtgtacatcaccgataagtgcgtgctggacatgcggagcatggacttcaagagcaactccgccgtggcctggtccaacaagtccgatttcgcctgcgccaacgccttcaacaacagcattatccccgaggacacattcttcccaagccccgagagcagcgactccaccgaccacgtgaagcccaaagagacagagaacaccaagcagcccagcaagagctgccacaagcccaaggccatcgtgcacaccgagaaagtgaacatgatgagcctgaccgtgctgggcctgcggatgctgttcgccaaaaccgtggccgtgaacttcctgctgaccgccaagctgttcttcctcctcaccgccaggagtaagaggagcaggctcctgcacagtgactacatgaacatgactccacgccgccccggacccacccgcaagcattaccagccctatgccccaccacgcgacttcgcagcctatcgctccagagtgaagttcagcagaagcgccgacgcccctgcctaccagcagggacagaaccaactgtacaacgagctgaacctgggcagacgggaagagtacgacgtgctggacaagcggagaggcagggaccctgagatgggcggaaagccccagcggagaaagaacccccaggaaggactgtataacgaactccagaaagacaagatggccgaagcctacagcgagatcggcatgaagggcgagcggagaagaggcaagggccacgatggcctgtaccagggcctgagcaccgccaccaaggacacctatgacgccctgcacatgcaggccctgcctccaaga

SEQ ID NO: 25380 - DNA, 894 bp, synthetic construct
  source 1..894: mol_type = other DNA
agcgacaagagcgtgtgtctgttcaccgacttcgacagccagaccaacgtgtcccagagcaaggactccgacgtgtacatcaccgataagtgcgtgctggacatgcggagcatggacttcaagagcaactccgccgtggcctggtccaacaagtccgatttcgcctgcgccaacgccttcaacaacagcattatccccgaggacacattcttcccaagccccgagagcagcgactccaccgaccacgtgaagcccaaagagacagagaacaccaagcagcccagcaagagctgccacaagcccaaggccatcgtgcacaccgagaaagtgaacatgatgagcctgaccgtgctgggcctgcggatgctgttcgccaaaaccgtggccgtgaacttcctgctgaccgccaagctgttcttcctcctcaccgccaggagtaagaggagcaggctcctgcacagtgactacatgaacatgactccacgccgccccggacccacccgcaagcattaccagccctatgccccaccacgcgacttcgcagcctatcgctccagagtgaagttcagcagaagcgccgacgcccctgcctaccagcagggacagaaccaactgtacaacgagctgaacctgggcagacgggaagagtacgacgtgctggacaagcggagaggcagggaccctgagatgggcggaaagccccagcggagaaagaacccccaggaaggactgtataacgaactccagaaagacaagatggccgaagcctacagcgagatcggcatgaagggcgagcggagaagaggcaagggccacgatggcctgtaccagggcctgagcaccgccaccaaggacacctatgacgccctgcacatgcaggccctgcctccaaga

SEQ ID NO: 25381 - DNA, 891 bp, synthetic construct
  source 1..891: mol_type = other DNA
gacaagagcgtgtgtctgttcaccgacttcgacagccagaccaacgtgtcccagagcaaggactccgacgtgtacatcaccgataagtgcgtgctggacatgcggagcatggacttcaagagcaactccgccgtggcctggtccaacaagtccgatttcgcctgcgccaacgccttcaacaacagcattatccccgaggacacattcttcccaagccccgagagcagcgactccaccgaccacgtgaagcccaaagagacagagaacaccaagcagcccagcaagagctgccacaagcccaaggccatcgtgcacaccgagaaagtgaacatgatgagcctgaccgtgctgggcctgcggatgctgttcgccaaaaccgtggccgtgaacttcctgctgaccgccaagctgttcttcctcctcaccgccaggagtaagaggagcaggctcctgcacagtgactacatgaacatgactccacgccgccccggacccacccgcaagcattaccagccctatgccccaccacgcgacttcgcagcctatcgctccagagtgaagttcagcagaagcgccgacgcccctgcctaccagcagggacagaaccaactgtacaacgagctgaacctgggcagacgggaagagtacgacgtgctggacaagcggagaggcagggaccctgagatgggcggaaagccccagcggagaaagaacccccaggaaggactgtataacgaactccagaaagacaagatggccgaagcctacagcgagatcggcatgaagggcgagcggagaagaggcaagggccacgatggcctgtaccagggcctgagcaccgccaccaaggacacctatgacgccctgcacatgcaggccctgcctccaaga

SEQ ID NO: 25382 - DNA, 888 bp, synthetic construct
  source 1..888: mol_type = other DNA
aagagcgtgtgtctgttcaccgacttcgacagccagaccaacgtgtcccagagcaaggactccgacgtgtacatcaccgataagtgcgtgctggacatgcggagcatggacttcaagagcaactccgccgtggcctggtccaacaagtccgatttcgcctgcgccaacgccttcaacaacagcattatccccgaggacacattcttcccaagccccgagagcagcgactccaccgaccacgtgaagcccaaagagacagagaacaccaagcagcccagcaagagctgccacaagcccaaggccatcgtgcacaccgagaaagtgaacatgatgagcctgaccgtgctgggcctgcggatgctgttcgccaaaaccgtggccgtgaacttcctgctgaccgccaagctgttcttcctcctcaccgccaggagtaagaggagcaggctcctgcacagtgactacatgaacatgactccacgccgccccggacccacccgcaagcattaccagccctatgccccaccacgcgacttcgcagcctatcgctccagagtgaagttcagcagaagcgccgacgcccctgcctaccagcagggacagaaccaactgtacaacgagctgaacctgggcagacgggaagagtacgacgtgctggacaagcggagaggcagggaccctgagatgggcggaaagccccagcggagaaagaacccccaggaaggactgtataacgaactccagaaagacaagatggccgaagcctacagcgagatcggcatgaagggcgagcggagaagaggcaagggccacgatggcctgtaccagggcctgagcaccgccaccaaggacacctatgacgccctgcacatgcaggccctgcctccaaga

SEQ ID NO: 25383 - DNA, 885 bp, synthetic construct
  source 1..885: mol_type = other DNA
agcgtgtgtctgttcaccgacttcgacagccagaccaacgtgtcccagagcaaggactccgacgtgtacatcaccgataagtgcgtgctggacatgcggagcatggacttcaagagcaactccgccgtggcctggtccaacaagtccgatttcgcctgcgccaacgccttcaacaacagcattatccccgaggacacattcttcccaagccccgagagcagcgactccaccgaccacgtgaagcccaaagagacagagaacaccaagcagcccagcaagagctgccacaagcccaaggccatcgtgcacaccgagaaagtgaacatgatgagcctgaccgtgctgggcctgcggatgctgttcgccaaaaccgtggccgtgaacttcctgctgaccgccaagctgttcttcctcctcaccgccaggagtaagaggagcaggctcctgcacagtgactacatgaacatgactccacgccgccccggacccacccgcaagcattaccagccctatgccccaccacgcgacttcgcagcctatcgctccagagtgaagttcagcagaagcgccgacgcccctgcctaccagcagggacagaaccaactgtacaacgagctgaacctgggcagacgggaagagtacgacgtgctggacaagcggagaggcagggaccctgagatgggcggaaagccccagcggagaaagaacccccaggaaggactgtataacgaactccagaaagacaagatggccgaagcctacagcgagatcggcatgaagggcgagcggagaagaggcaagggccacgatggcctgtaccagggcctgagcaccgccaccaaggacacctatgacgccctgcacatgcaggccctgcctccaaga

SEQ ID NO: 25384 - DNA, 882 bp, synthetic construct
  source 1..882: mol_type = other DNA
gtgtgtctgttcaccgacttcgacagccagaccaacgtgtcccagagcaaggactccgacgtgtacatcaccgataagtgcgtgctggacatgcggagcatggacttcaagagcaactccgccgtggcctggtccaacaagtccgatttcgcctgcgccaacgccttcaacaacagcattatccccgaggacacattcttcccaagccccgagagcagcgactccaccgaccacgtgaagcccaaagagacagagaacaccaagcagcccagcaagagctgccacaagcccaaggccatcgtgcacaccgagaaagtgaacatgatgagcctgaccgtgctgggcctgcggatgctgttcgccaaaaccgtggccgtgaacttcctgctgaccgccaagctgttcttcctcctcaccgccaggagtaagaggagcaggctcctgcacagtgactacatgaacatgactccacgccgccccggacccacccgcaagcattaccagccctatgccccaccacgcgacttcgcagcctatcgctccagagtgaagttcagcagaagcgccgacgcccctgcctaccagcagggacagaaccaactgtacaacgagctgaacctgggcagacgggaagagtacgacgtgctggacaagcggagaggcagggaccctgagatgggcggaaagccccagcggagaaagaacccccaggaaggactgtataacgaactccagaaagacaagatggccgaagcctacagcgagatcggcatgaagggcgagcggagaagaggcaagggccacgatggcctgtaccagggcctgagcaccgccaccaaggacacctatgacgccctgcacatgcaggccctgcctccaaga

SEQ ID NO: 25385 - DNA, 867 bp, synthetic construct
  source 1..867: mol_type = other DNA
gacttcgacagccagaccaacgtgtcccagagcaaggactccgacgtgtacatcaccgataagtgcgtgctggacatgcggagcatggacttcaagagcaactccgccgtggcctggtccaacaagtccgatttcgcctgcgccaacgccttcaacaacagcattatccccgaggacacattcttcccaagccccgagagcagcgactccaccgaccacgtgaagcccaaagagacagagaacaccaagcagcccagcaagagctgccacaagcccaaggccatcgtgcacaccgagaaagtgaacatgatgagcctgaccgtgctgggcctgcggatgctgttcgccaaaaccgtggccgtgaacttcctgctgaccgccaagctgttcttcctcctcaccgccaggagtaagaggagcaggctcctgcacagtgactacatgaacatgactccacgccgccccggacccacccgcaagcattaccagccctatgccccaccacgcgacttcgcagcctatcgctccagagtgaagttcagcagaagcgccgacgcccctgcctaccagcagggacagaaccaactgtacaacgagctgaacctgggcagacgggaagagtacgacgtgctggacaagcggagaggcagggaccctgagatgggcggaaagccccagcggagaaagaacccccaggaaggactgtataacgaactccagaaagacaagatggccgaagcctacagcgagatcggcatgaagggcgagcggagaagaggcaagggccacgatggcctgtaccagggcctgagcaccgccaccaaggacacctatgacgccctgcacatgcaggccctgcctccaaga

SEQ ID NO: 25386 - DNA, 852 bp, synthetic construct
  source 1..852: mol_type = other DNA
accaacgtgtcccagagcaaggactccgacgtgtacatcaccgataagtgcgtgctggacatgcggagcatggacttcaagagcaactccgccgtggcctggtccaacaagtccgatttcgcctgcgccaacgccttcaacaacagcattatccccgaggacacattcttcccaagccccgagagcagcgactccaccgaccacgtgaagcccaaagagacagagaacaccaagcagcccagcaagagctgccacaagcccaaggccatcgtgcacaccgagaaagtgaacatgatgagcctgaccgtgctgggcctgcggatgctgttcgccaaaaccgtggccgtgaacttcctgctgaccgccaagctgttcttcctcctcaccgccaggagtaagaggagcaggctcctgcacagtgactacatgaacatgactccacgccgccccggacccacccgcaagcattaccagccctatgccccaccacgcgacttcgcagcctatcgctccagagtgaagttcagcagaagcgccgacgcccctgcctaccagcagggacagaaccaactgtacaacgagctgaacctgggcagacgggaagagtacgacgtgctggacaagcggagaggcagggaccctgagatgggcggaaagccccagcggagaaagaacccccaggaaggactgtataacgaactccagaaagacaagatggccgaagcctacagcgagatcggcatgaagggcgagcggagaagaggcaagggccacgatggcctgtaccagggcctgagcaccgccaccaaggacacctatgacgccctgcacatgcaggccctgcctccaaga

SEQ ID NO: 25387 - DNA, 933 bp, synthetic construct; identical to SEQ ID NO: 25314
  source 1..933: mol_type = other DNA

SEQ ID NO: 25388 - DNA, 930 bp, synthetic construct
  source 1..930: mol_type = other DNA
cagaaccctgatcctgccgtgtaccagctgcgggatagcaagagcagcgacaagagcgtgtgtctgttcaccgacttcgacagccagaccaacgtgtcccagagcaaggactccgacgtgtacatcaccgataagtgcgtgctggacatgcggagcatggacttcaagagcaactccgccgtggcctggtccaacaagtccgatttcgcctgcgccaacgccttcaacaacagcattatccccgaggacacattcttcccaagccccgagagcagcgactccaccgaccacgtgaagcccaaagagacagagaacaccaagcagcccagcaagagctgccacaagcccaaggccatcgtgcacaccgagaaagtgaacatgatgagcctgaccgtgctgggcctgcggatgctgttcgccaaaaccgtggccgtgaacttcctgctgaccgccaagctgttcttcctcaggagtaagaggagcaggctcctgcacagtgactacatgaacatgactccacgccgccccggacccacccgcaagcattaccagccctatgccccaccacgcgacttcgcagcctatcgctccagagtgaagttcagcagaagcgccgacgcccctgcctaccagcagggacagaaccaactgtacaacgagctgaacctgggcagacgggaagagtacgacgtgctggacaagcggagaggcagggaccctgagatgggcggaaagccccagcggagaaagaacccccaggaaggactgtataacgaactccagaaagacaagatggccgaagcctacagcgagatcggcatgaagggcgagcggagaagaggcaagggccacgatggcctgtaccagggcctgagcaccgccaccaaggacacctatgacgccctgcacatgcaggccctgcctccaaga

SEQ ID NO: 25389 - DNA, 927 bp, synthetic construct
  source 1..927: mol_type = other DNA
aaccctgatcctgccgtgtaccagctgcgggatagcaagagcagcgacaagagcgtgtgtctgttcaccgacttcgacagccagaccaacgtgtcccagagcaaggactccgacgtgtacatcaccgataagtgcgtgctggacatgcggagcatggacttcaagagcaactccgccgtggcctggtccaacaagtccgatttcgcctgcgccaacgccttcaacaacagcattatccccgaggacacattcttcccaagccccgagagcagcgactccaccgaccacgtgaagcccaaagagacagagaacaccaagcagcccagcaagagctgccacaagcccaaggccatcgtgcacaccgagaaagtgaacatgatgagcctgaccgtgctgggcctgcggatgctgttcgccaaaaccgtggccgtgaacttcctgctgaccgccaagctgttcttcctcaggagtaagaggagcaggctcctgcacagtgactacatgaacatgactccacgccgccccggacccacccgcaagcattaccagccctatgccccaccacgcgacttcgcagcctatcgctccagagtgaagttcagcagaagcgccgacgcccctgcctaccagcagggacagaaccaactgtacaacgagctgaacctgggcagacgggaagagtacgacgtgctggacaagcggagaggcagggaccctgagatgggcggaaagccccagcggagaaagaacccccaggaaggactgtataacgaactccagaaagacaagatggccgaagcctacagcgagatcggcatgaagggcgagcggagaagaggcaagggccacgatggcctgtaccagggcctgagcaccgccaccaaggacacctatgacgccctgcacatgcaggccctgcctccaaga

SEQ ID NO: 25390 - DNA, 924 bp, synthetic construct
  source 1..924: mol_type = other DNA
cctgatcctgccgtgtaccagctgcgggatagcaagagcagcgacaagagcgtgtgtctgttcaccgacttcgacagccagaccaacgtgtcccagagcaaggactccgacgtgtacatcaccgataagtgcgtgctggacatgcggagcatggacttcaagagcaactccgccgtggcctggtccaacaagtccgatttcgcctgcgccaacgccttcaacaacagcattatccccgaggacacattcttcccaagccccgagagcagcgactccaccgaccacgtgaagcccaaagagacagagaacaccaagcagcccagcaagagctgccacaagcccaaggccatcgtgcacaccgagaaagtgaacatgatgagcctgaccgtgctgggcctgcggatgctgttcgccaaaaccgtggccgtgaacttcctgctgaccgccaagctgttcttcctcaggagtaagaggagcaggctcctgcacagtgactacatgaacatgactccacgccgccccggacccacccgcaagcattaccagccctatgccccaccacgcgacttcgcagcctatcgctccagagtgaagttcagcagaagcgccgacgcccctgcctaccagcagggacagaaccaactgtacaacgagctgaacctgggcagacgggaagagtacgacgtgctggacaagcggagaggcagggaccctgagatgggcggaaagccccagcggagaaagaacccccaggaaggactgtataacgaactccagaaagacaagatggccgaagcctacagcgagatcggcatgaagggcgagcggagaagaggcaagggccacgatggcctgtaccagggcctgagcaccgccaccaaggacacctatgacgccctgcacatgcaggccctgcctccaaga

SEQ ID NO: 25391 - DNA, 921 bp, synthetic construct
  source 1..921: mol_type = other DNA
gatcctgccgtgtaccagctgcgggatagcaagagcagcgacaagagcgtgtgtctgttcaccgacttcgacagccagaccaacgtgtcccagagcaaggactccgacgtgtacatcaccgataagtgcgtgctggacatgcggagcatggacttcaagagcaactccgccgtggcctggtccaacaagtccgatttcgcctgcgccaacgccttcaacaacagcattatccccgaggacacattcttcccaagccccgagagcagcgactccaccgaccacgtgaagcccaaagagacagagaacaccaagcagcccagcaagagctgccacaagcccaaggccatcgtgcacaccgagaaagtgaacatgatgagcctgaccgtgctgggcctgcggatgctgttcgccaaaaccgtggccgtgaacttcctgctgaccgccaagctgttcttcctcaggagtaagaggagcaggctcctgcacagtgactacatgaacatgactccacgccgccccggacccacccgcaagcattaccagccctatgccccaccacgcgacttcgcagcctatcgctccagagtgaagttcagcagaagcgccgacgcccctgcctaccagcagggacagaaccaactgtacaacgagctgaacctgggcagacgggaagagtacgacgtgctggacaagcggagaggcagggaccctgagatgggcggaaagccccagcggagaaagaacccccaggaaggactgtataacgaactccagaaagacaagatggccgaagcctacagcgagatcggcatgaagggcgagcggagaagaggcaagggccacgatggcctgtaccagggcctgagcaccgccaccaaggacacctatgacgccctgcacatgcaggccctgcctccaaga

SEQ ID NO: 25392 - DNA, 918 bp, synthetic construct
  source 1..918: mol_type = other DNA
cctgccgtgtaccagctgcgggatagcaagagcagcgacaagagcgtgtgtctgttcaccgacttcgacagccagaccaacgtgtcccagagcaaggactccgacgtgtacatcaccgataagtgcgtgctggacatgcggagcatggacttcaagagcaactccgccgtggcctggtccaacaagtccgatttcgcctgcgccaacgccttcaacaacagcattatccccgaggacacattcttcccaagccccgagagcagcgactccaccgaccacgtgaagcccaaagagacagagaacaccaagcagcccagcaagagctgccacaagcccaaggccatcgtgcacaccgagaaagtgaacatgatgagcctgaccgtgctgggcctgcggatgctgttcgccaaaaccgtggccgtgaacttcctgctgaccgccaagctgttcttcctcaggagtaagaggagcaggctcctgcacagtgactacatgaacatgactccacgccgccccggacccacccgcaagcattaccagccctatgccccaccacgcgacttcgcagcctatcgctccagagtgaagttcagcagaagcgccgacgcccctgcctaccagcagggacagaaccaactgtacaacgagctgaacctgggcagacgggaagagtacgacgtgctggacaagcggagaggcagggaccctgagatgggcggaaagccccagcggagaaagaacccccaggaaggactgtataacgaactccagaaagacaagatggccgaagcctacagcgagatcggcatgaagggcgagcggagaagaggcaagggccacgatggcctgtaccagggcctgagcaccgccaccaaggacacctatgacgccctgcacatgcaggccctgcctccaaga

SEQ ID NO: 25393 - DNA, 915 bp, synthetic construct
  source 1..915: mol_type = other DNA
gccgtgtaccagctgcgggatagcaagagcagcgacaagagcgtgtgtctgttcaccgacttcgacagccagaccaacgtgtcccagagcaaggactccgacgtgtacatcaccgataagtgcgtgctggacatgcggagcatggacttcaagagcaactccgccgtggcctggtccaacaagtccgatttcgcctgcgccaacgccttcaacaacagcattatccccgaggacacattcttcccaagccccgagagcagcgactccaccgaccacgtgaagcccaaagagacagagaacaccaagcagcccagcaagagctgccacaagcccaaggccatcgtgcacaccgagaaagtgaacatgatgagcctgaccgtgctgggcctgcggatgctgttcgccaaaaccgtggccgtgaacttcctgctgaccgccaagctgttcttcctcaggagtaagaggagcaggctcctgcacagtgactacatgaacatgactccacgccgccccggacccacccgcaagcattaccagccctatgccccaccacgcgacttcgcagcctatcgctccagagtgaagttcagcagaagcgccgacgcccctgcctaccagcagggacagaaccaactgtacaacgagctgaacctgggcagacgggaagagtacgacgtgctggacaagcggagaggcagggaccctgagatgggcggaaagccccagcggagaaagaacccccaggaaggactgtataacgaactccagaaagacaagatggccgaagcctacagcgagatcggcatgaagggcgagcggagaagaggcaagggccacgatggcctgtaccagggcctgagcaccgccaccaaggacacctatgacgccctgcacatgcaggccctgcctccaaga

SEQ ID NO: 25394 - DNA, 912 bp, synthetic construct
  source 1..912: mol_type = other DNA
gtgtaccagctgcgggatagcaagagcagcgacaagagcgtgtgtctgttcaccgacttcgacagccagaccaacgtgtcccagagcaaggactccgacgtgtacatcaccgataagtgcgtgctggacatgcggagcatggacttcaagagcaactccgccgtggcctggtccaacaagtccgatttcgcctgcgccaacgccttcaacaacagcattatccccgaggacacattcttcccaagccccgagagcagcgactccaccgaccacgtgaagcccaaagagacagagaacaccaagcagcccagcaagagctgccacaagcccaaggccatcgtgcacaccgagaaagtgaacatgatgagcctgaccgtgctgggcctgcggatgctgttcgccaaaaccgtggccgtgaacttcctgctgaccgccaagctgttcttcctcaggagtaagaggagcaggctcctgcacagtgactacatgaacatgactccacgccgccccggacccacccgcaagcattaccagccctatgccccaccacgcgacttcgcagcctatcgctccagagtgaagttcagcagaagcgccgacgcccctgcctaccagcagggacagaaccaactgtacaacgagctgaacctgggcagacgggaagagtacgacgtgctggacaagcggagaggcagggaccctgagatgggcggaaagccccagcggagaaagaacccccaggaaggactgtataacgaactccagaaagacaagatggccgaagcctacagcgagatcggcatgaagggcgagcggagaagaggcaagggccacgatggcctgtaccagggcctgagcaccgccaccaaggacacctatgacgccctgcacatgcaggccctgcctccaaga

SEQ ID NO: 25395 - DNA, 909 bp, synthetic construct
  source 1..909: mol_type = other DNA
taccagctgcgggatagcaagagcagcgacaagagcgtgtgtctgttcaccgacttcgacagccagaccaacgtgtcccagagcaaggactccgacgtgtacatcaccgataagtgcgtgctggacatgcggagcatggacttcaagagcaactccgccgtggcctggtccaacaagtccgatttcgcctgcgccaacgccttcaacaacagcattatccccgaggacacattcttcccaagccccgagagcagcgactccaccgaccacgtgaagcccaaagagacagagaacaccaagcagcccagcaagagctgccacaagcccaaggccatcgtgcacaccgagaaagtgaacatgatgagcctgaccgtgctgggcctgcggatgctgttcgccaaaaccgtggccgtgaacttcctgctgaccgccaagctgttcttcctcaggagtaagaggagcaggctcctgcacagtgactacatgaacatgactccacgccgccccggacccacccgcaagcattaccagccctatgccccaccacgcgacttcgcagcctatcgctccagagtgaagttcagcagaagcgccgacgcccctgcctaccagcagggacagaaccaactgtacaacgagctgaacctgggcagacgggaagagtacgacgtgctggacaagcggagaggcagggaccctgagatgggcggaaagccccagcggagaaagaacccccaggaaggactgtataacgaactccagaaagacaagatggccgaagcctacagcgagatcggcatgaagggcgagcggagaagaggcaagggccacgatggcctgtaccagggcctgagcaccgccaccaaggacacctatgacgccctgcacatgcaggccctgcctccaaga

SEQ ID NO: 25396 - DNA, 906 bp, synthetic construct
  source 1..906: mol_type = other DNA
cagctgcgggatagcaagagcagcgacaagagcgtgtgtctgttcaccgacttcgacagccagaccaacgtgtcccagagcaaggactccgacgtgtacatcaccgataagtgcgtgctggacatgcggagcatggacttcaagagcaactccgccgtggcctggtccaacaagtccgatttcgcctgcgccaacgccttcaacaacagcattatccccgaggacacattcttcccaagccccgagagcagcgactccaccgaccacgtgaagcccaaagagacagagaacaccaagcagcccagcaagagctgccacaagcccaaggccatcgtgcacaccgagaaagtgaacatgatgagcctgaccgtgctgggcctgcggatgctgttcgccaaaaccgtggccgtgaacttcctgctgaccgccaagctgttcttcctcaggagtaagaggagcaggctcctgcacagtgactacatgaacatgactccacgccgccccggacccacccgcaagcattaccagccctatgccccaccacgcgacttcgcagcctatcgctccagagtgaagttcagcagaagcgccgacgcccctgcctaccagcagggacagaaccaactgtacaacgagctgaacctgggcagacgggaagagtacgacgtgctggacaagcggagaggcagggaccctgagatgggcggaaagccccagcggagaaagaacccccaggaaggactgtataacgaactccagaaagacaagatggccgaagcctacagcgagatcggcatgaagggcgagcggagaagaggcaagggccacgatggcctgtaccagggcctgagcaccgccaccaaggacacctatgacgccctgcacatgcaggccctgcctccaaga

SEQ ID NO: 25397 - DNA, 903 bp, synthetic construct
  source 1..903: mol_type = other DNA
ctgcgggatagcaagagcagcgacaagagcgtgtgtctgttcaccgacttcgacagccagaccaacgtgtcccagagcaaggactccgacgtgtacatcaccgataagtgcgtgctggacatgcggagcatggacttcaagagcaactccgccgtggcctggtccaacaagtccgatttcgcctgcgccaacgccttcaacaacagcattatccccgaggacacattcttcccaagccccgagagcagcgactccaccgaccacgtgaagcccaaagagacagagaacaccaagcagcccagcaagagctgccacaagcccaaggccatcgtgcacaccgagaaagtgaacatgatgagcctgaccgtgctgggcctgcggatgctgttcgccaaaaccgtggccgtgaacttcctgctgaccgccaagctgttcttcctcaggagtaagaggagcaggctcctgcacagtgactacatgaacatgactccacgccgccccggacccacccgcaagcattaccagccctatgccccaccacgcgacttcgcagcctatcgctccagagtgaagttcagcagaagcgccgacgcccctgcctaccagcagggacagaaccaactgtacaacgagctgaacctgggcagacgggaagagtacgacgtgctggacaagcggagaggcagggaccctgagatgggcggaaagccccagcggagaaagaacccccaggaaggactgtataacgaactccagaaagacaagatggccgaagcctacagcgagatcggcatgaagggcgagcggagaagaggcaagggccacgatggcctgtaccagggcctgagcaccgccaccaaggacacctatgacgccctgcacatgcaggccctgcctccaaga

SEQ ID NO: 25398 - DNA, 900 bp, synthetic construct
  source 1..900: mol_type = other DNA
cgggatagcaagagcagcgacaagagcgtgtgtctgttcaccgacttcgacagccagaccaacgtgtcccagagcaaggactccgacgtgtacatcaccgataagtgcgtgctggacatgcggagcatggacttcaagagcaactccgccgtggcctggtccaacaagtccgatttcgcctgcgccaacgccttcaacaacagcattatccccgaggacacattcttcccaagccccgagagcagcgactccaccgaccacgtgaagcccaaagagacagagaacaccaagcagcccagcaagagctgccacaagcccaaggccatcgtgcacaccgagaaagtgaacatgatgagcctgaccgtgctgggcctgcggatgctgttcgccaaaaccgtggccgtgaacttcctgctgaccgccaagctgttcttcctcaggagtaagaggagcaggctcctgcacagtgactacatgaacatgactccacgccgccccggacccacccgcaagcattaccagccctatgccccaccacgcgacttcgcagcctatcgctccagagtgaagttcagcagaagcgccgacgcccctgcctaccagcagggacagaaccaactgtacaacgagctgaacctgggcagacgggaagagtacgacgtgctggacaagcggagaggcagggaccctgagatgggcggaaagccccagcggagaaagaacccccaggaaggactgtataacgaactccagaaagacaagatggccgaagcctacagcgagatcggcatgaagggcgagcggagaagaggcaagggccacgatggcctgtaccagggcctgagcaccgccaccaaggacacctatgacgccctgcacatgcaggccctgcctccaaga

SEQ ID NO: 25399 - DNA, 897 bp, synthetic construct
  source 1..897: mol_type = other DNA
gatagcaagagcagcgacaagagcgtgtgtctgttcaccgacttcgacagccagaccaacgtgtcccagagcaaggactccgacgtgtacatcaccgataagtgcgtgctggacatgcggagcatggacttcaagagcaactccgccgtggcctggtccaacaagtccgatttcgcctgcgccaacgccttcaacaacagcattatccccgaggacacattcttcccaagccccgagagcagcgactccaccgaccacgtgaagcccaaagagacagagaacaccaagcagcccagcaagagctgccacaagcccaaggccatcgtgcacaccgagaaagtgaacatgatgagcctgaccgtgctgggcctgcggatgctgttcgccaaaaccgtggccgtgaacttcctgctgaccgccaagctgttcttcctcaggagtaagaggagcaggctcctgcacagtgactacatgaacatgactccacgccgccccggacccacccgcaagcattaccagccctatgccccaccacgcgacttcgcagcctatcgctccagagtgaagttcagcagaagcgccgacgcccctgcctaccagcagggacagaaccaactgtacaacgagctgaacctgggcagacgggaagagtacgacgtgctggacaagcggagaggcagggaccctgagatgggcggaaagccccagcggagaaagaacccccaggaaggactgtataacgaactccagaaagacaagatggccgaagcctacagcgagatcggcatgaagggcgagcggagaagaggcaagggccacgatggcctgtaccagggcctgagcaccgccaccaaggacacctatgacgccctgcacatgcaggccctgcctccaaga

SEQ ID NO: 25400 - DNA, 894 bp, synthetic construct
  source 1..894: mol_type = other DNA
agcaagagcagcgacaagagcgtgtgtctgttcaccgacttcgacagccagaccaacgtgtcccagagcaaggactccgacgtgtacatcaccgataagtgcgtgctggacatgcggagcatggacttcaagagcaactccgccgtggcctggtccaacaagtccgatttcgcctgcgccaacgccttcaacaacagcattatccccgaggacacattcttcccaagccccgagagcagcgactccaccgaccacgtgaagcccaaagagacagagaacaccaagcagcccagcaagagctgccacaagcccaaggccatcgtgcacaccgagaaagtgaacatgatgagcctgaccgtgctgggcctgcggatgctgttcgccaaaaccgtggccgtgaacttcctgctgaccgccaagctgttcttcctcaggagtaagaggagcaggctcctgcacagtgactacatgaacatgactccacgccgccccggacccacccgcaagcattaccagccctatgccccaccacgcgacttcgcagcctatcgctccagagtgaagttcagcagaagcgccgacgcccctgcctaccagcagggacagaaccaactgtacaacgagctgaacctgggcagacgggaagagtacgacgtgctggacaagcggagaggcagggaccctgagatgggcggaaagccccagcggagaaagaacccccaggaaggactgtataacgaactccagaaagacaagatggccgaagcctacagcgagatcggcatgaagggcgagcggagaagaggcaagggccacgatggcctgtaccagggcctgagcaccgccaccaaggacacctatgacgccctgcacatgcaggccctgcctccaaga

SEQ ID NO: 25401 - DNA, 891 bp, synthetic construct
  source 1..891: mol_type = other DNA
aagagcagcgacaagagcgtgtgtctgttcaccgacttcgacagccagaccaacgtgtcccagagcaaggactccgacgtgtacatcaccgataagtgcgtgctggacatgcggagcatggacttcaagagcaactccgccgtggcctggtccaacaagtccgatttcgcctgcgccaacgccttcaacaacagcattatccccgaggacacattcttcccaagccccgagagcagcgactccaccgaccacgtgaagcccaaagagacagagaacaccaagcagcccagcaagagctgccacaagcccaaggccatcgtgcacaccgagaaagtgaacatgatgagcctgaccgtgctgggcctgcggatgctgttcgccaaaaccgtggccgtgaacttcctgctgaccgccaagctgttcttcctcaggagtaagaggagcaggctcctgcacagtgactacatgaacatgactccacgccgccccggacccacccgcaagcattaccagccctatgccccaccacgcgacttcgcagcctatcgctccagagtgaagttcagcagaagcgccgacgcccctgcctaccagcagggacagaaccaactgtacaacgagctgaacctgggcagacgggaagagtacgacgtgctggacaagcggagaggcagggaccctgagatgggcggaaagccccagcggagaaagaacccccaggaaggactgtataacgaactccagaaagacaagatggccgaagcctacagcgagatcggcatgaagggcgagcggagaagaggcaagggccacgatggcctgtaccagggcctgagcaccgccaccaaggacacctatgacgccctgcacatgcaggccctgcctccaaga

SEQ ID NO: 25402 - DNA, 888 bp, synthetic construct
  source 1..888: mol_type = other DNA
agcagcgacaagagcgtgtgtctgttcaccgacttcgacagccagaccaacgtgtcccagagcaaggactccgacgtgtacatcaccgataagtgcgtgctggacatgcggagcatggacttcaagagcaactccgccgtggcctggtccaacaagtccgatttcgcctgcgccaacgccttcaacaacagcattatccccgaggacacattcttcccaagccccgagagcagcgactccaccgaccacgtgaagcccaaagagacagagaacaccaagcagcccagcaagagctgccacaagcccaaggccatcgtgcacaccgagaaagtgaacatgatgagcctgaccgtgctgggcctgcggatgctgttcgccaaaaccgtggccgtgaacttcctgctgaccgccaagctgttcttcctcaggagtaagaggagcaggctcctgcacagtgactacatgaacatgactccacgccgccccggacccacccgcaagcattaccagccctatgccccaccacgcgacttcgcagcctatcgctccagagtgaagttcagcagaagcgccgacgcccctgcctaccagcagggacagaaccaactgtacaacgagctgaacctgggcagacgggaagagtacgacgtgctggacaagcggagaggcagggaccctgagatgggcggaaagccccagcggagaaagaacccccaggaaggactgtataacgaactccagaaagacaagatggccgaagcctacagcgagatcggcatgaagggcgagcggagaagaggcaagggccacgatggcctgtaccagggcctgagcaccgccaccaaggacacctatgacgccctgcacatgcaggccctgcctccaaga

SEQ ID NO: 25403 - DNA, 885 bp, synthetic construct
  source 1..885: mol_type = other DNA
agcgacaagagcgtgtgtctgttcaccgacttcgacagccagaccaacgtgtcccagagcaaggactccgacgtgtacatcaccgataagtgcgtgctggacatgcggagcatggacttcaagagcaactccgccgtggcctggtccaacaagtccgatttcgcctgcgccaacgccttcaacaacagcattatccccgaggacacattcttcccaagccccgagagcagcgactccaccgaccacgtgaagcccaaagagacagagaacaccaagcagcccagcaagagctgccacaagcccaaggccatcgtgcacaccgagaaagtgaacatgatgagcctgaccgtgctgggcctgcggatgctgttcgccaaaaccgtggccgtgaacttcctgctgaccgccaagctgttcttcctcaggagtaagaggagcaggctcctgcacagtgactacatgaacatgactccacgccgccccggacccacccgcaagcattaccagccctatgccccaccacgcgacttcgcagcctatcgctccagagtgaagttcagcagaagcgccgacgcccctgcctaccagcagggacagaaccaactgtacaacgagctgaacctgggcagacgggaagagtacgacgtgctggacaagcggagaggcagggaccctgagatgggcggaaagccccagcggagaaagaacccccaggaaggactgtataacgaactccagaaagacaagatggccgaagcctacagcgagatcggcatgaagggcgagcggagaagaggcaagggccacgatggcctgtaccagggcctgagcaccgccaccaaggacacctatgacgccctgcacatgcaggccctgcctccaaga

SEQ ID NO: 25404 - DNA, 882 bp, synthetic construct
  source 1..882: mol_type = other DNA
gacaagagcgtgtgtctgttcaccgacttcgacagccagaccaacgtgtcccagagcaaggactccgacgtgtacatcaccgataagtgcgtgctggacatgcggagcatggacttcaagagcaactccgccgtggcctggtccaacaagtccgatttcgcctgcgccaacgccttcaacaacagcattatccccgaggacacattcttcccaagccccgagagcagcgactccaccgaccacgtgaagcccaaagagacagagaacaccaagcagcccagcaagagctgccacaagcccaaggccatcgtgcacaccgagaaagtgaacatgatgagcctgaccgtgctgggcctgcggatgctgttcgccaaaaccgtggccgtgaacttcctgctgaccgccaagctgttcttcctcaggagtaagaggagcaggctcctgcacagtgactacatgaacatgactccacgccgccccggacccacccgcaagcattaccagccctatgccccaccacgcgacttcgcagcctatcgctccagagtgaagttcagcagaagcgccgacgcccctgcctaccagcagggacagaaccaactgtacaacgagctgaacctgggcagacgggaagagtacgacgtgctggacaagcggagaggcagggaccctgagatgggcggaaagccccagcggagaaagaacccccaggaaggactgtataacgaactccagaaagacaagatggccgaagcctacagcgagatcggcatgaagggcgagcggagaagaggcaagggccacgatggcctgtaccagggcctgagcaccgccaccaaggacacctatgacgccctgcacatgcaggccctgcctccaaga

SEQ ID NO: 25405 - DNA, 879 bp, synthetic construct
  source 1..879: mol_type = other DNA
aagagcgtgtgtctgttcaccgacttcgacagccagaccaacgtgtcccagagcaaggactccgacgtgtacatcaccgataagtgcgtgctggacatgcggagcatggacttcaagagcaactccgccgtggcctggtccaacaagtccgatttcgcctgcgccaacgccttcaacaacagcattatccccgaggacacattcttcccaagccccgagagcagcgactccaccgaccacgtgaagcccaaagagacagagaacaccaagcagcccagcaagagctgccacaagcccaaggccatcgtgcacaccgagaaagtgaacatgatgagcctgaccgtgctgggcctgcggatgctgttcgccaaaaccgtggccgtgaacttcctgctgaccgccaagctgttcttcctcaggagtaagaggagcaggctcctgcacagtgactacatgaacatgactccacgccgccccggacccacccgcaagcattaccagccctatgccccaccacgcgacttcgcagcctatcgctccagagtgaagttcagcagaagcgccgacgcccctgcctaccagcagggacagaaccaactgtacaacgagctgaacctgggcagacgggaagagtacgacgtgctggacaagcggagaggcagggaccctgagatgggcggaaagccccagcggagaaagaacccccaggaaggactgtataacgaactccagaaagacaagatggccgaagcctacagcgagatcggcatgaagggcgagcggagaagaggcaagggccacgatggcctgtaccagggcctgagcaccgccaccaaggacacctatgacgccctgcacatgcaggccctgcctccaaga

SEQ ID NO: 25406 - DNA, 876 bp, synthetic construct
  source 1..876: mol_type = other DNA
agcgtgtgtctgttcaccgacttcgacagccagaccaacgtgtcccagagcaaggactccgacgtgtacatcaccgataagtgcgtgctggacatgcggagcatggacttcaagagcaactccgccgtggcctggtccaacaagtccgatttcgcctgcgccaacgccttcaacaacagcattatccccgaggacacattcttcccaagccccgagagcagcgactccaccgaccacgtgaagcccaaagagacagagaacaccaagcagcccagcaagagctgccacaagcccaaggccatcgtgcacaccgagaaagtgaacatgatgagcctgaccgtgctgggcctgcggatgctgttcgccaaaaccgtggccgtgaacttcctgctgaccgccaagctgttcttcctcaggagtaagaggagcaggctcctgcacagtgactacatgaacatgactccacgccgccccggacccacccgcaagcattaccagccctatgccccaccacgcgacttcgcagcctatcgctccagagtgaagttcagcagaagcgccgacgcccctgcctaccagcagggacagaaccaactgtacaacgagctgaacctgggcagacgggaagagtacgacgtgctggacaagcggagaggcagggaccctgagatgggcggaaagccccagcggagaaagaacccccaggaaggactgtataacgaactccagaaagacaagatggccgaagcctacagcgagatcggcatgaagggcgagcggagaagaggcaagggccacgatggcctgtaccagggcctgagcaccgccaccaaggacacctatgacgccctgcacatgcaggccctgcctccaaga

SEQ ID NO: 25407 - DNA, 873 bp, synthetic construct
  source 1..873: mol_type = other DNA
gtgtgtctgttcaccgacttcgacagccagaccaacgtgtcccagagcaaggactccgacgtgtacatcaccgataagtgcgtgctggacatgcggagcatggacttcaagagcaactccgccgtggcctggtccaacaagtccgatttcgcctgcgccaacgccttcaacaacagcattatccccgaggacacattcttcccaagccccgagagcagcgactccaccgaccacgtgaagcccaaagagacagagaacaccaagcagcccagcaagagctgccacaagcccaaggccatcgtgcacaccgagaaagtgaacatgatgagcctgaccgtgctgggcctgcggatgctgttcgccaaaaccgtggccgtgaacttcctgctgaccgccaagctgttcttcctcaggagtaagaggagcaggctcctgcacagtgactacatgaacatgactccacgccgccccggacccacccgcaagcattaccagccctatgccccaccacgcgacttcgcagcctatcgctccagagtgaagttcagcagaagcgccgacgcccctgcctaccagcagggacagaaccaactgtacaacgagctgaacctgggcagacgggaagagtacgacgtgctggacaagcggagaggcagggaccctgagatgggcggaaagccccagcggagaaagaacccccaggaaggactgtataacgaactccagaaagacaagatggccgaagcctacagcgagatcggcatgaagggcgagcggagaagaggcaagggccacgatggcctgtaccagggcctgagcaccgccaccaaggacacctatgacgccctgcacatgcaggccctgcctccaaga

SEQ ID NO: 25408 - DNA, 858 bp, synthetic construct
  source 1..858: mol_type = other DNA
gacttcgacagccagaccaacgtgtcccagagcaaggactccgacgtgtacatcaccgataagtgcgtgctggacatgcggagcatggacttcaagagcaactccgccgtggcctggtccaacaagtccgatttcgcctgcgccaacgccttcaacaacagcattatccccgaggacacattcttcccaagccccgagagcagcgactccaccgaccacgtgaagcccaaagagacagagaacaccaagcagcccagcaagagctgccacaagcccaaggccatcgtgcacaccgagaaagtgaacatgatgagcctgaccgtgctgggcctgcggatgctgttcgccaaaaccgtggccgtgaacttcctgctgaccgccaagctgttcttcctcaggagtaagaggagcaggctcctgcacagtgactacatgaacatgactccacgccgccccggacccacccgcaagcattaccagccctatgccccaccacgcgacttcgcagcctatcgctccagagtgaagttcagcagaagcgccgacgcccctgcctaccagcagggacagaaccaactgtacaacgagctgaacctgggcagacgggaagagtacgacgtgctggacaagcggagaggcagggaccctgagatgggcggaaagccccagcggagaaagaacccccaggaaggactgtataacgaactccagaaagacaagatggccgaagcctacagcgagatcggcatgaagggcgagcggagaagaggcaagggccacgatggcctgtaccagggcctgagcaccgccaccaaggacacctatgacgccctgcacatgcaggccctgcctccaaga

SEQ ID NO: 25409 - DNA, 843 bp, synthetic construct
  source 1..843: mol_type = other DNA
accaacgtgtcccagagcaaggactccgacgtgtacatcaccgataagtgcgtgctggacatgcggagcatggacttcaagagcaactccgccgtggcctggtccaacaagtccgatttcgcctgcgccaacgccttcaacaacagcattatccccgaggacacattcttcccaagccccgagagcagcgactccaccgaccacgtgaagcccaaagagacagagaacaccaagcagcccagcaagagctgccacaagcccaaggccatcgtgcacaccgagaaagtgaacatgatgagcctgaccgtgctgggcctgcggatgctgttcgccaaaaccgtggccgtgaacttcctgctgaccgccaagctgttcttcctcaggagtaagaggagcaggctcctgcacagtgactacatgaacatgactccacgccgccccggacccacccgcaagcattaccagccctatgccccaccacgcgacttcgcagcctatcgctccagagtgaagttcagcagaagcgccgacgcccctgcctaccagcagggacagaaccaactgtacaacgagctgaacctgggcagacgggaagagtacgacgtgctggacaagcggagaggcagggaccctgagatgggcggaaagccccagcggagaaagaacccccaggaaggactgtataacgaactccagaaagacaagatggccgaagcctacagcgagatcggcatgaagggcgagcggagaagaggcaagggccacgatggcctgtaccagggcctgagcaccgccaccaaggacacctatgacgccctgcacatgcaggccctgcctccaaga

SEQ ID NO: 25410 - DNA, 981 bp, synthetic construct
  source 1..981: mol_type = other DNA
ggacagcctaaggccaatcctaccgtgacactgttccctccaagcagcgaagaactccaggccaacaaggccacacttgtgtgcctgatctccgacttctaccctggggctgtgacagtggcttggaaggccgatggatctcctgtgaaagccggcgtggaaaccaccaagccatccaagcagagcaacaacaaatacgccgccagctcctacctgagcctgacacctgagcagtggaagtcccacagatcctacagctgccaagtgacccacgaaggcagcaccgtggaaaagacagtggcccctacagagtgcagccccatcaagaccgatgtgattacaatggaccccaaggacaactgctccaaggacgccaacgataccctgctgctccagctgaccaacaccagcgcctactacatgtacttgttgctgctgctgaagtccgtggtgtacttcgccatcatcacatgctgcctgctgcggagaaccgccttctgctgcaacggcgagaagtctaggagtaagaggagcaggctcctgcacagtgactacatgaacatgactccacgccgccccggacccacccgcaagcattaccagccctatgccccaccacgcgacttcgcagcctatcgctccagagtgaagttcagcagaagcgccgacgcccctgcctaccagcagggacagaaccaactgtacaacgagctgaacctgggcagacgggaagagtacgacgtgctggacaagcggagaggcagggaccctgagatgggcggaaagccccagcggagaaagaacccccaggaaggactgtataacgaactccagaaagacaagatggccgaagcctacagcgagatcggcatgaagggcgagcggagaagaggcaagggccacgatggcctgtaccagggcctgagcaccgccaccaaggacacctatgacgccctgcacatgcaggccctgcctccaaga

SEQ ID NO: 25411 - DNA, 978 bp, synthetic construct
  source 1..978: mol_type = other DNA
cagcctaaggccaatcctaccgtgacactgttccctccaagcagcgaagaactccaggccaacaaggccacacttgtgtgcctgatctccgacttctaccctggggctgtgacagtggcttggaaggccgatggatctcctgtgaaagccggcgtggaaaccaccaagccatccaagcagagcaacaacaaatacgccgccagctcctacctgagcctgacacctgagcagtggaagtcccacagatcctacagctgccaagtgacccacgaaggcagcaccgtggaaaagacagtggcccctacagagtgcagccccatcaagaccgatgtgattacaatggaccccaaggacaactgctccaaggacgccaacgataccctgctgctccagctgaccaacaccagcgcctactacatgtacttgttgctgctgctgaagtccgtggtgtacttcgccatcatcacatgctgcctgctgcggagaaccgccttctgctgcaacggcgagaagtctaggagtaagaggagcaggctcctgcacagtgactacatgaacatgactccacgccgccccggacccacccgcaagcattaccagccctatgccccaccacgcgacttcgcagcctatcgctccagagtgaagttcagcagaagcgccgacgcccctgcctaccagcagggacagaaccaactgtacaacgagctgaacctgggcagacgggaagagtacgacgtgctggacaagcggagaggcagggaccctgagatgggcggaaagccccagcggagaaagaacccccaggaaggactgtataacgaactccagaaagacaagatggccgaagcctacagcgagatcggcatgaagggcgagcggagaagaggcaagggccacgatggcctgtaccagggcctgagcaccgccaccaaggacacctatgacgccctgcacatgcaggccctgcctccaaga

SEQ ID NO: 25412 - DNA, 975 bp, synthetic construct
  source 1..975: mol_type = other DNA
cctaaggccaatcctaccgtgacactgttccctccaagcagcgaagaactccaggccaacaaggccacacttgtgtgcctgatctccgacttctaccctggggctgtgacagtggcttggaaggccgatggatctcctgtgaaagccggcgtggaaaccaccaagccatccaagcagagcaacaacaaatacgccgccagctcctacctgagcctgacacctgagcagtggaagtcccacagatcctacagctgccaagtgacccacgaaggcagcaccgtggaaaagacagtggcccctacagagtgcagccccatcaagaccgatgtgattacaatggaccccaaggacaactgctccaaggacgccaacgataccctgctgctccagctgaccaacaccagcgcctactacatgtacttgttgctgctgctgaagtccgtggtgtacttcgccatcatcacatgctgcctgctgcggagaaccgccttctgctgcaacggcgagaagtctaggagtaagaggagcaggctcctgcacagtgactacatgaacatgactccacgccgccccggacccacccgcaagcattaccagccctatgccccaccacgcgacttcgcagcctatcgctccagagtgaagttcagcagaagcgccgacgcccctgcctaccagcagggacagaaccaactgtacaacgagctgaacctgggcagacgggaagagtacgacgtgctggacaagcggagaggcagggaccctgagatgggcggaaagccccagcggagaaagaacccccaggaaggactgtataacgaactccagaaagacaagatggccgaagcctacagcgagatcggcatgaagggcgagcggagaagaggcaagggccacgatggcctgtaccagggcctgagcaccgccaccaaggacacctatgacgccctgcacatgcaggccctgcctccaaga

SEQ ID NO: 25413 - DNA, 972 bp, synthetic construct
  source 1..972: mol_type = other DNA
aaggccaatcctaccgtgacactgttccctccaagcagcgaagaactccaggccaacaaggccacacttgtgtgcctgatctccgacttctaccctggggctgtgacagtggcttggaaggccgatggatctcctgtgaaagccggcgtggaaaccaccaagccatccaagcagagcaacaacaaatacgccgccagctcctacctgagcctgacacctgagcagtggaagtcccacagatcctacagctgccaagtgacccacgaaggcagcaccgtggaaaagacagtggcccctacagagtgcagccccatcaagaccgatgtgattacaatggaccccaaggacaactgctccaaggacgccaacgataccctgctgctccagctgaccaacaccagcgcctactacatgtacttgttgctgctgctgaagtccgtggtgtacttcgccatcatcacatgctgcctgctgcggagaaccgccttctgctgcaacggcgagaagtctaggagtaagaggagcaggctcctgcacagtgactacatgaacatgactccacgccgccccggacccacccgcaagcattaccagccctatgccccaccacgcgacttcgcagcctatcgctccagagtgaagttcagcagaagcgccgacgcccctgcctaccagcagggacagaaccaactgtacaacgagctgaacctgggcagacgggaagagtacgacgtgctggacaagcggagaggcagggaccctgagatgggcggaaagccccagcggagaaagaacccccaggaaggactgtataacgaactccagaaagacaagatggccgaagcctacagcgagatcggcatgaagggcgagcggagaagaggcaagggccacgatggcctgtaccagggcctgagcaccgccaccaaggacacctatgacgccctgcacatgcaggccctgcctccaaga

SEQ ID NO: 25414 - DNA, 969 bp, synthetic construct
  source 1..969: mol_type = other DNA
gccaatcctaccgtgacactgttccctccaagcagcgaagaactccaggccaacaaggccacacttgtgtgcctgatctccgacttctaccctggggctgtgacagtggcttggaaggccgatggatctcctgtgaaagccggcgtggaaaccaccaagccatccaagcagagcaacaacaaatacgccgccagctcctacctgagcctgacacctgagcagtggaagtcccacagatcctacagctgccaagtgacccacgaaggcagcaccgtggaaaagacagtggcccctacagagtgcagccccatcaagaccgatgtgattacaatggaccccaaggacaactgctccaaggacgccaacgataccctgctgctccagctgaccaacaccagcgcctactacatgtacttgttgctgctgctgaagtccgtggtgtacttcgccatcatcacatgctgcctgctgcggagaaccgccttctgctgcaacggcgagaagtctaggagtaagaggagcaggctcctgcacagtgactacatgaacatgactccacgccgccccggacccacccgcaagcattaccagccctatgccccaccacgcgacttcgcagcctatcgctccagagtgaagttcagcagaagcgccgacgcccctgcctaccagcagggacagaaccaactgtacaacgagctgaacctgggcagacgggaagagtacgacgtgctggacaagcggagaggcagggaccctgagatgggcggaaagccccagcggagaaagaacccccaggaaggactgtataacgaactccagaaagacaagatggccgaagcctacagcgagatcggcatgaagggcgagcggagaagaggcaagggccacgatggcctgtaccagggcctgagcaccgccaccaaggacacctatgacgccctgcacatgcaggccctgcctccaaga

SEQ ID NO: 25415 - DNA, 966 bp, synthetic construct
  source 1..966: mol_type = other DNA
aatcctaccgtgacactgttccctccaagcagcgaagaactccaggccaacaaggccacacttgtgtgcctgatctccgacttctaccctggggctgtgacagtggcttggaaggccgatggatctcctgtgaaagccggcgtggaaaccaccaagccatccaagcagagcaacaacaaatacgccgccagctcctacctgagcctgacacctgagcagtggaagtcccacagatcctacagctgccaagtgacccacgaaggcagcaccgtggaaaagacagtggcccctacagagtgcagccccatcaagaccgatgtgattacaatggaccccaaggacaactgctccaaggacgccaacgataccctgctgctccagctgaccaacaccagcgcctactacatgtacttgttgctgctgctgaagtccgtggtgtacttcgccatcatcacatgctgcctgctgcggagaaccgccttctgctgcaacggcgagaagtctaggagtaagaggagcaggctcctgcacagtgactacatgaacatgactccacgccgccccggacccacccgcaagcattaccagccctatgccccaccacgcgacttcgcagcctatcgctccagagtgaagttcagcagaagcgccgacgcccctgcctaccagcagggacagaaccaactgtacaacgagctgaacctgggcagacgggaagagtacgacgtgctggacaagcggagaggcagggaccctgagatgggcggaaagccccagcggagaaagaacccccaggaaggactgtataacgaactccagaaagacaagatggccgaagcctacagcgagatcggcatgaagggcgagcggagaagaggcaagggccacgatggcctgtaccagggcctgagcaccgccaccaaggacacctatgacgccctgcacatgcaggccctgcctccaaga

SEQ ID NO: 25416 - DNA, 963 bp, synthetic construct
  source 1..963: mol_type = other DNA
cctaccgtgacactgttccctccaagcagcgaagaactccaggccaacaaggccacacttgtgtgcctgatctccgacttctaccctggggctgtgacagtggcttggaaggccgatggatctcctgtgaaagccggcgtggaaaccaccaagccatccaagcagagcaacaacaaatacgccgccagctcctacctgagcctgacacctgagcagtggaagtcccacagatcctacagctgccaagtgacccacgaaggcagcaccgtggaaaagacagtggcccctacagagtgcagccccatcaagaccgatgtgattacaatggaccccaaggacaactgctccaaggacgccaacgataccctgctgctccagctgaccaacaccagcgcctactacatgtacttgttgctgctgctgaagtccgtggtgtacttcgccatcatcacatgctgcctgctgcggagaaccgccttctgctgcaacggcgagaagtctaggagtaagaggagcaggctcctgcacagtgactacatgaacatgactccacgccgccccggacccacccgcaagcattaccagccctatgccccaccacgcgacttcgcagcctatcgctccagagtgaagttcagcagaagcgccgacgcccctgcctaccagcagggacagaaccaactgtacaacgagctgaacctgggcagacgggaagagtacgacgtgctggacaagcggagaggcagggaccctgagatgggcggaaagccccagcggagaaagaacccccaggaaggactgtataacgaactccagaaagacaagatggccgaagcctacagcgagatcggcatgaagggcgagcggagaagaggcaagggccacgatggcctgtaccagggcctgagcaccgccaccaaggacacctatgacgccctgcacatgcaggccctgcctccaaga

SEQ ID NO: 25417 - DNA, 960 bp, synthetic construct
  source 1..960: mol_type = other DNA
accgtgacactgttccctccaagcagcgaagaactccaggccaacaaggccacacttgtgtgcctgatctccgacttctaccctggggctgtgacagtggcttggaaggccgatggatctcctgtgaaagccggcgtggaaaccaccaagccatccaagcagagcaacaacaaatacgccgccagctcctacctgagcctgacacctgagcagtggaagtcccacagatcctacagctgccaagtgacccacgaaggcagcaccgtggaaaagacagtggcccctacagagtgcagccccatcaagaccgatgtgattacaatggaccccaaggacaactgctccaaggacgccaacgataccctgctgctccagctgaccaacaccagcgcctactacatgtacttgttgctgctgctgaagtccgtggtgtacttcgccatcatcacatgctgcctgctgcggagaaccgccttctgctgcaacggcgagaagtctaggagtaagaggagcaggctcctgcacagtgactacatgaacatgactccacgccgccccggacccacccgcaagcattaccagccctatgccccaccacgcgacttcgcagcctatcgctccagagtgaagttcagcagaagcgccgacgcccctgcctaccagcagggacagaaccaactgtacaacgagctgaacctgggcagacgggaagagtacgacgtgctggacaagcggagaggcagggaccctgagatgggcggaaagccccagcggagaaagaacccccaggaaggactgtataacgaactccagaaagacaagatggccgaagcctacagcgagatcggcatgaagggcgagcggagaagaggcaagggccacgatggcctgtaccagggcctgagcaccgccaccaaggacacctatgacgccctgcacatgcaggccctgcctccaaga

SEQ ID NO: 25418 - DNA, 957 bp, synthetic construct
  source 1..957: mol_type = other DNA
gtgacactgttccctccaagcagcgaagaactccaggccaacaaggccacacttgtgtgcctgatctccgacttctaccctggggctgtgacagtggcttggaaggccgatggatctcctgtgaaagccggcgtggaaaccaccaagccatccaagcagagcaacaacaaatacgccgccagctcctacctgagcctgacacctgagcagtggaagtcccacagatcctacagctgccaagtgacccacgaaggcagcaccgtggaaaagacagtggcccctacagagtgcagccccatcaagaccgatgtgattacaatggaccccaaggacaactgctccaaggacgccaacgataccctgctgctccagctgaccaacaccagcgcctactacatgtacttgttgctgctgctgaagtccgtggtgtacttcgccatcatcacatgctgcctgctgcggagaaccgccttctgctgcaacggcgagaagtctaggagtaagaggagcaggctcctgcacagtgactacatgaacatgactccacgccgccccggacccacccgcaagcattaccagccctatgccccaccacgcgacttcgcagcctatcgctccagagtgaagttcagcagaagcgccgacgcccctgcctaccagcagggacagaaccaactgtacaacgagctgaacctgggcagacgggaagagtacgacgtgctggacaagcggagaggcagggaccctgagatgggcggaaagccccagcggagaaagaacccccaggaaggactgtataacgaactccagaaagacaagatggccgaagcctacagcgagatcggcatgaagggcgagcggagaagaggcaagggccacgatggcctgtaccagggcctgagcaccgccaccaaggacacctatgacgccctgcacatgcaggccctgcctccaaga

SEQ ID NO: 25419 - DNA, 954 bp, synthetic construct
  source 1..954: mol_type = other DNA
acactgttccctccaagcagcgaagaactccaggccaacaaggccacacttgtgtgcctgatctccgacttctaccctggggctgtgacagtggcttggaaggccgatggatctcctgtgaaagccggcgtggaaaccaccaagccatccaagcagagcaacaacaaatacgccgccagctcctacctgagcctgacacctgagcagtggaagtcccacagatcctacagctgccaagtgacccacgaaggcagcaccgtggaaaagacagtggcccctacagagtgcagccccatcaagaccgatgtgattacaatggaccccaaggacaactgctccaaggacgccaacgataccctgctgctccagctgaccaacaccagcgcctactacatgtacttgttgctgctgctgaagtccgtggtgtacttcgccatcatcacatgctgcctgctgcggagaaccgccttctgctgcaacggcgagaagtctaggagtaagaggagcaggctcctgcacagtgactacatgaacatgactccacgccgccccggacccacccgcaagcattaccagccctatgccccaccacgcgacttcgcagcctatcgctccagagtgaagttcagcagaagcgccgacgcccctgcctaccagcagggacagaaccaactgtacaacgagctgaacctgggcagacgggaagagtacgacgtgctggacaagcggagaggcagggaccctgagatgggcggaaagccccagcggagaaagaacccccaggaaggactgtataacgaactccagaaagacaagatggccgaagcctacagcgagatcggcatgaagggcgagcggagaagaggcaagggccacgatggcctgtaccagggcctgagcaccgccaccaaggacacctatgacgccctgcacatgcaggccctgcctccaaga

SEQ ID NO: 25420 - DNA, 951 bp, synthetic construct
  source 1..951: mol_type = other DNA
ctgttccctccaagcagcgaagaactccaggccaacaaggccacacttgtgtgcctgatctccgacttctaccctggggctgtgacagtggcttggaaggccgatggatctcctgtgaaagccggcgtggaaaccaccaagccatccaagcagagcaacaacaaatacgccgccagctcctacctgagcctgacacctgagcagtggaagtcccacagatcctacagctgccaagtgacccacgaaggcagcaccgtggaaaagacagtggcccctacagagtgcagccccatcaagaccgatgtgattacaatggaccccaaggacaactgctccaaggacgccaacgataccctgctgctccagctgaccaacaccagcgcctactacatgtacttgttgctgctgctgaagtccgtggtgtacttcgccatcatcacatgctgcctgctgcggagaaccgccttctgctgcaacggcgagaagtctaggagtaagaggagcaggctcctgcacagtgactacatgaacatgactccacgccgccccggacccacccgcaagcattaccagccctatgccccaccacgcgacttcgcagcctatcgctccagagtgaagttcagcagaagcgccgacgcccctgcctaccagcagggacagaaccaactgtacaacgagctgaacctgggcagacgggaagagtacgacgtgctggacaagcggagaggcagggaccctgagatgggcggaaagccccagcggagaaagaacccccaggaaggactgtataacgaactccagaaagacaagatggccgaagcctacagcgagatcggcatgaagggcgagcggagaagaggcaagggccacgatggcctgtaccagggcctgagcaccgccaccaaggacacctatgacgccctgcacatgcaggccctgcctccaaga

SEQ ID NO: 25421 - DNA, 984 bp, synthetic construct
  source 1..984: mol_type = other DNA
ggacagcctaaggccaatcctaccgtgacactgttccctccaagcagcgaagaactccaggccaacaaggccacacttgtgtgcctgatctccgacttctaccctggggctgtgacagtggcttggaaggccgatggatctcctgtgaaagccggcgtggaaaccaccaagccatccaagcagagcaacaacaaatacgccgccagctcctacctgagcctgacacctgagcagtggaagtcccacagatcctacagctgccaagtgacccacgaaggcagcaccgtggaaaagacagtggcccctacagagtgcagcgaagtgaaaaccgactccaccgaccacgtgaagcccaaagagacagagaacaccaagcagcccagcaagagctgccacaagcccaaggccatcgtgcacaccgagaaagtgaacatgatgagcctgaccgtgctgggcctgcggatgctgttcgccaaaaccgtggccgtgaacttcctgctgaccgccaagctgttcttcctcaggagtaagaggagcaggctcctgcacagtgactacatgaacatgactccacgccgccccggacccacccgcaagcattaccagccctatgccccaccacgcgacttcgcagcctatcgctccagagtgaagttcagcagaagcgccgacgcccctgcctaccagcagggacagaaccaactgtacaacgagctgaacctgggcagacgggaagagtacgacgtgctggacaagcggagaggcagggaccctgagatgggcggaaagccccagcggagaaagaacccccaggaaggactgtataacgaactccagaaagacaagatggccgaagcctacagcgagatcggcatgaagggcgagcggagaagaggcaagggccacgatggcctgtaccagggcctgagcaccgccaccaaggacacctatgacgccctgcacatgcaggccctgcctccaaga

SEQ ID NO: 25422 - DNA, 981 bp, synthetic construct
  source 1..981: mol_type = other DNA
cagcctaaggccaatcctaccgtgacactgttccctccaagcagcgaagaactccaggccaacaaggccacacttgtgtgcctgatctccgacttctaccctggggctgtgacagtggcttggaaggccgatggatctcctgtgaaagccggcgtggaaaccaccaagccatccaagcagagcaacaacaaatacgccgccagctcctacctgagcctgacacctgagcagtggaagtcccacagatcctacagctgccaagtgacccacgaaggcagcaccgtggaaaagacagtggcccctacagagtgcagcgaagtgaaaaccgactccaccgaccacgtgaagcccaaagagacagagaacaccaagcagcccagcaagagctgccacaagcccaaggccatcgtgcacaccgagaaagtgaacatgatgagcctgaccgtgctgggcctgcggatgctgttcgccaaaaccgtggccgtgaacttcctgctgaccgccaagctgttcttcctcaggagtaagaggagcaggctcctgcacagtgactacatgaacatgactccacgccgccccggacccacccgcaagcattaccagccctatgccccaccacgcgacttcgcagcctatcgctccagagtgaagttcagcagaagcgccgacgcccctgcctaccagcagggacagaaccaactgtacaacgagctgaacctgggcagacgggaagagtacgacgtgctggacaagcggagaggcagggaccctgagatgggcggaaagccccagcggagaaagaacccccaggaaggactgtataacgaactccagaaagacaagatggccgaagcctacagcgagatcggcatgaagggcgagcggagaagaggcaagggccacgatggcctgtaccagggcctgagcaccgccaccaaggacacctatgacgccctgcacatgcaggccctgcctccaaga

SEQ ID NO: 25423 - DNA, 978 bp, synthetic construct
  source 1..978: mol_type = other DNA
cctaaggccaatcctaccgtgacactgttccctccaagcagcgaagaactccaggccaacaaggccacacttgtgtgcctgatctccgacttctaccctggggctgtgacagtggcttggaaggccgatggatctcctgtgaaagccggcgtggaaaccaccaagccatccaagcagagcaacaacaaatacgccgccagctcctacctgagcctgacacctgagcagtggaagtcccacagatcctacagctgccaagtgacccacgaaggcagcaccgtggaaaagacagtggcccctacagagtgcagcgaagtgaaaaccgactccaccgaccacgtgaagcccaaagagacagagaacaccaagcagcccagcaagagctgccacaagcccaaggccatcgtgcacaccgagaaagtgaacatgatgagcctgaccgtgctgggcctgcggatgctgttcgccaaaaccgtggccgtgaacttcctgctgaccgccaagctgttcttcctcaggagtaagaggagcaggctcctgcacagtgactacatgaacatgactccacgccgccccggacccacccgcaagcattaccagccctatgccccaccacgcgacttcgcagcctatcgctccagagtgaagttcagcagaagcgccgacgcccctgcctaccagcagggacagaaccaactgtacaacgagctgaacctgggcagacgggaagagtacgacgtgctggacaagcggagaggcagggaccctgagatgggcggaaagccccagcggagaaagaacccccaggaaggactgtataacgaactccagaaagacaagatggccgaagcctacagcgagatcggcatgaagggcgagcggagaagaggcaagggccacgatggcctgtaccagggcctgagcaccgccaccaaggacacctatgacgccctgcacatgcaggccctgcctccaaga

SEQ ID NO: 25424 - DNA, 975 bp, synthetic construct
  source 1..975: mol_type = other DNA
aaggccaatcctaccgtgacactgttccctccaagcagcgaagaactccaggccaacaaggccacacttgtgtgcctgatctccgacttctaccctggggctgtgacagtggcttggaaggccgatggatctcctgtgaaagccggcgtggaaaccaccaagccatccaagcagagcaacaacaaatacgccgccagctcctacctgagcctgacacctgagcagtggaagtcccacagatcctacagctgccaagtgacccacgaaggcagcaccgtggaaaagacagtggcccctacagagtgcagcgaagtgaaaaccgactccaccgaccacgtgaagcccaaagagacagagaacaccaagcagcccagcaagagctgccacaagcccaaggccatcgtgcacaccgagaaagtgaacatgatgagcctgaccgtgctgggcctgcggatgctgttcgccaaaaccgtggccgtgaacttcctgctgaccgccaagctgttcttcctcaggagtaagaggagcaggctcctgcacagtgactacatgaacatgactccacgccgccccggacccacccgcaagcattaccagccctatgccccaccacgcgacttcgcagcctatcgctccagagtgaagttcagcagaagcgccgacgcccctgcctaccagcagggacagaaccaactgtacaacgagctgaacctgggcagacgggaagagtacgacgtgctggacaagcggagaggcagggaccctgagatgggcggaaagccccagcggagaaagaacccccaggaaggactgtataacgaactccagaaagacaagatggccgaagcctacagcgagatcggcatgaagggcgagcggagaagaggcaagggccacgatggcctgtaccagggcctgagcaccgccaccaaggacacctatgacgccctgcacatgcaggccctgcctccaaga

SEQ ID NO: 25425 - DNA, 972 bp, synthetic construct
  source 1..972: mol_type = other DNA
gccaatcctaccgtgacactgttccctccaagcagcgaagaactccaggccaacaaggccacacttgtgtgcctgatctccgacttctaccctggggctgtgacagtggcttggaaggccgatggatctcctgtgaaagccggcgtggaaaccaccaagccatccaagcagagcaacaacaaatacgccgccagctcctacctgagcctgacacctgagcagtggaagtcccacagatcctacagctgccaagtgacccacgaaggcagcaccgtggaaaagacagtggcccctacagagtgcagcgaagtgaaaaccgactccaccgaccacgtgaagcccaaagagacagagaacaccaagcagcccagcaagagctgccacaagcccaaggccatcgtgcacaccgagaaagtgaacatgatgagcctgaccgtgctgggcctgcggatgctgttcgccaaaaccgtggccgtgaacttcctgctgaccgccaagctgttcttcctcaggagtaagaggagcaggctcctgcacagtgactacatgaacatgactccacgccgccccggacccacccgcaagcattaccagccctatgccccaccacgcgacttcgcagcctatcgctccagagtgaagttcagcagaagcgccgacgcccctgcctaccagcagggacagaaccaactgtacaacgagctgaacctgggcagacgggaagagtacgacgtgctggacaagcggagaggcagggaccctgagatgggcggaaagccccagcggagaaagaacccccaggaaggactgtataacgaactccagaaagacaagatggccgaagcctacagcgagatcggcatgaagggcgagcggagaagaggcaagggccacgatggcctgtaccagggcctgagcaccgccaccaaggacacctatgacgccctgcacatgcaggccctgcctccaaga

SEQ ID NO: 25426 - DNA, 969 bp, synthetic construct
  source 1..969: mol_type = other DNA
aatcctaccgtgacactgttccctccaagcagcgaagaactccaggccaacaaggccacacttgtgtgcctgatctccgacttctaccctggggctgtgacagtggcttggaaggccgatggatctcctgtgaaagccggcgtggaaaccaccaagccatccaagcagagcaacaacaaatacgccgccagctcctacctgagcctgacacctgagcagtggaagtcccacagatcctacagctgccaagtgacccacgaaggcagcaccgtggaaaagacagtggcccctacagagtgcagcgaagtgaaaaccgactccaccgaccacgtgaagcccaaagagacagagaacaccaagcagcccagcaagagctgccacaagcccaaggccatcgtgcacaccgagaaagtgaacatgatgagcctgaccgtgctgggcctgcggatgctgttcgccaaaaccgtggccgtgaacttcctgctgaccgccaagctgttcttcctcaggagtaagaggagcaggctcctgcacagtgactacatgaacatgactccacgccgccccggacccacccgcaagcattaccagccctatgccccaccacgcgacttcgcagcctatcgctccagagtgaagttcagcagaagcgccgacgcccctgcctaccagcagggacagaaccaactgtacaacgagctgaacctgggcagacgggaagagtacgacgtgctggacaagcggagaggcagggaccctgagatgggcggaaagccccagcggagaaagaacccccaggaaggactgtataacgaactccagaaagacaagatggccgaagcctacagcgagatcggcatgaagggcgagcggagaagaggcaagggccacgatggcctgtaccagggcctgagcaccgccaccaaggacacctatgacgccctgcacatgcaggccctgcctccaaga

SEQ ID NO: 25427 - DNA, 966 bp, synthetic construct
  source 1..966: mol_type = other DNA
cctaccgtgacactgttccctccaagcagcgaagaactccaggccaacaaggccacacttgtgtgcctgatctccgacttctaccctggggctgtgacagtggcttggaaggccgatggatctcctgtgaaagccggcgtggaaaccaccaagccatccaagcagagcaacaacaaatacgccgccagctcctacctgagcctgacacctgagcagtggaagtcccacagatcctacagctgccaagtgacccacgaaggcagcaccgtggaaaagacagtggcccctacagagtgcagcgaagtgaaaaccgactccaccgaccacgtgaagcccaaagagacagagaacaccaagcagcccagcaagagctgccacaagcccaaggccatcgtgcacaccgagaaagtgaacatgatgagcctgaccgtgctgggcctgcggatgctgttcgccaaaaccgtggccgtgaacttcctgctgaccgccaagctgttcttcctcaggagtaagaggagcaggctcctgcacagtgactacatgaacatgactccacgccgccccggacccacccgcaagcattaccagccctatgccccaccacgcgacttcgcagcctatcgctccagagtgaagttcagcagaagcgccgacgcccctgcctaccagcagggacagaaccaactgtacaacgagctgaacctgggcagacgggaagagtacgacgtgctggacaagcggagaggcagggaccctgagatgggcggaaagccccagcggagaaagaacccccaggaaggactgtataacgaactccagaaagacaagatggccgaagcctacagcgagatcggcatgaagggcgagcggagaagaggcaagggccacgatggcctgtaccagggcctgagcaccgccaccaaggacacctatgacgccctgcacatgcaggccctgcctccaaga

SEQ ID NO: 25428 - DNA, 963 bp, synthetic construct
  source 1..963: mol_type = other DNA
accgtgacactgttccctccaagcagcgaagaactccaggccaacaaggccacacttgtgtgcctgatctccgacttctaccctggggctgtgacagtggcttggaaggccgatggatctcctgtgaaagccggcgtggaaaccaccaagccatccaagcagagcaacaacaaatacgccgccagctcctacctgagcctgacacctgagcagtggaagtcccacagatcctacagctgccaagtgacccacgaaggcagcaccgtggaaaagacagtggcccctacagagtgcagcgaagtgaaaaccgactccaccgaccacgtgaagcccaaagagacagagaacaccaagcagcccagcaagagctgccacaagcccaaggccatcgtgcacaccgagaaagtgaacatgatgagcctgaccgtgctgggcctgcggatgctgttcgccaaaaccgtggccgtgaacttcctgctgaccgccaagctgttcttcctcaggagtaagaggagcaggctcctgcacagtgactacatgaacatgactccacgccgccccggacccacccgcaagcattaccagccctatgccccaccacgcgacttcgcagcctatcgctccagagtgaagttcagcagaagcgccgacgcccctgcctaccagcagggacagaaccaactgtacaacgagctgaacctgggcagacgggaagagtacgacgtgctggacaagcggagaggcagggaccctgagatgggcggaaagccccagcggagaaagaacccccaggaaggactgtataacgaactccagaaagacaagatggccgaagcctacagcgagatcggcatgaagggcgagcggagaagaggcaagggccacgatggcctgtaccagggcctgagcaccgccaccaaggacacctatgacgccctgcacatgcaggccctgcctccaaga

SEQ ID NO: 25429 - DNA, 960 bp, synthetic construct
  source 1..960: mol_type = other DNA
gtgacactgttccctccaagcagcgaagaactccaggccaacaaggccacacttgtgtgcctgatctccgacttctaccctggggctgtgacagtggcttggaaggccgatggatctcctgtgaaagccggcgtggaaaccaccaagccatccaagcagagcaacaacaaatacgccgccagctcctacctgagcctgacacctgagcagtggaagtcccacagatcctacagctgccaagtgacccacgaaggcagcaccgtggaaaagacagtggcccctacagagtgcagcgaagtgaaaaccgactccaccgaccacgtgaagcccaaagagacagagaacaccaagcagcccagcaagagctgccacaagcccaaggccatcgtgcacaccgagaaagtgaacatgatgagcctgaccgtgctgggcctgcggatgctgttcgccaaaaccgtggccgtgaacttcctgctgaccgccaagctgttcttcctcaggagtaagaggagcaggctcctgcacagtgactacatgaacatgactccacgccgccccggacccacccgcaagcattaccagccctatgccccaccacgcgacttcgcagcctatcgctccagagtgaagttcagcagaagcgccgacgcccctgcctaccagcagggacagaaccaactgtacaacgagctgaacctgggcagacgggaagagtacgacgtgctggacaagcggagaggcagggaccctgagatgggcggaaagccccagcggagaaagaacccccaggaaggactgtataacgaactccagaaagacaagatggccgaagcctacagcgagatcggcatgaagggcgagcggagaagaggcaagggccacgatggcctgtaccagggcctgagcaccgccaccaaggacacctatgacgccctgcacatgcaggccctgcctccaaga

SEQ ID NO: 25430 - DNA, 957 bp, synthetic construct
  source 1..957: mol_type = other DNA
acactgttccctccaagcagcgaagaactccaggccaacaaggccacacttgtgtgcctgatctccgacttctaccctggggctgtgacagtggcttggaaggccgatggatctcctgtgaaagccggcgtggaaaccaccaagccatccaagcagagcaacaacaaatacgccgccagctcctacctgagcctgacacctgagcagtggaagtcccacagatcctacagctgccaagtgacccacgaaggcagcaccgtggaaaagacagtggcccctacagagtgcagcgaagtgaaaaccgactccaccgaccacgtgaagcccaaagagacagagaacaccaagcagcccagcaagagctgccacaagcccaaggccatcgtgcacaccgagaaagtgaacatgatgagcctgaccgtgctgggcctgcggatgctgttcgccaaaaccgtggccgtgaacttcctgctgaccgccaagctgttcttcctcaggagtaagaggagcaggctcctgcacagtgactacatgaacatgactccacgccgccccggacccacccgcaagcattaccagccctatgccccaccacgcgacttcgcagcctatcgctccagagtgaagttcagcagaagcgccgacgcccctgcctaccagcagggacagaaccaactgtacaacgagctgaacctgggcagacgggaagagtacgacgtgctggacaagcggagaggcagggaccctgagatgggcggaaagccccagcggagaaagaacccccaggaaggactgtataacgaactccagaaagacaagatggccgaagcctacagcgagatcggcatgaagggcgagcggagaagaggcaagggccacgatggcctgtaccagggcctgagcaccgccaccaaggacacctatgacgccctgcacatgcaggccctgcctccaaga

SEQ ID NO: 25431 - DNA, 954 bp, synthetic construct
  source 1..954: mol_type = other DNA
ctgttccctccaagcagcgaagaactccaggccaacaaggccacacttgtgtgcctgatctccgacttctaccctggggctgtgacagtggcttggaaggccgatggatctcctgtgaaagccggcgtggaaaccaccaagccatccaagcagagcaacaacaaatacgccgccagctcctacctgagcctgacacctgagcagtggaagtcccacagatcctacagctgccaagtgacccacgaaggcagcaccgtggaaaagacagtggcccctacagagtgcagcgaagtgaaaaccgactccaccgaccacgtgaagcccaaagagacagagaacaccaagcagcccagcaagagctgccacaagcccaaggccatcgtgcacaccgagaaagtgaacatgatgagcctgaccgtgctgggcctgcggatgctgttcgccaaaaccgtggccgtgaacttcctgctgaccgccaagctgttcttcctcaggagtaagaggagcaggctcctgcacagtgactacatgaacatgactccacgccgccccggacccacccgcaagcattaccagccctatgccccaccacgcgacttcgcagcctatcgctccagagtgaagttcagcagaagcgccgacgcccctgcctaccagcagggacagaaccaactgtacaacgagctgaacctgggcagacgggaagagtacgacgtgctggacaagcggagaggcagggaccctgagatgggcggaaagccccagcggagaaagaacccccaggaaggactgtataacgaactccagaaagacaagatggccgaagcctacagcgagatcggcatgaagggcgagcggagaagaggcaagggccacgatggcctgtaccagggcctgagcaccgccaccaaggacacctatgacgccctgcacatgcaggccctgcctccaaga

SEQ ID NO: 25432 - DNA, 939 bp, synthetic construct
  source 1..939: mol_type = other DNA
ggacagcctaaggccaatcctaccgtgacactgttccctccaagcagcgaagaactccaggccaacaaggccacacttgtgtgcctgatctccgacttctaccctggggctgtgacagtggcttggaaggccgatggatctcctgtgaaagccggcgtggaaaccaccaagccatccaagcagagcaacaacaaatacgccgccagctcctacctgagcctgacacctgagcagtggaagtcccacagatcctacagctgccaagtgacccacgaaggcagcaccgtggaaaagacagtggcccctacagagtgcagcggcagagccgattgcggctttaccagcgagagctaccagcagggcgtgctgagcgccaccatcctgtacgagatcctgctgggcaaggccaccctgtacgccgtgctggtgtctgccctggtgctgatggctatggtcaagcggaaggacagccggggaaggagtaagaggagcaggctcctgcacagtgactacatgaacatgactccacgccgccccggacccacccgcaagcattaccagccctatgccccaccacgcgacttcgcagcctatcgctccagagtgaagttcagcagaagcgccgacgcccctgcctaccagcagggacagaaccaactgtacaacgagctgaacctgggcagacgggaagagtacgacgtgctggacaagcggagaggcagggaccctgagatgggcggaaagccccagcggagaaagaacccccaggaaggactgtataacgaactccagaaagacaagatggccgaagcctacagcgagatcggcatgaagggcgagcggagaagaggcaagggccacgatggcctgtaccagggcctgagcaccgccaccaaggacacctatgacgccctgcacatgcaggccctgcctccaaga

SEQ ID NO: 25433 - DNA, 936 bp, synthetic construct
  source 1..936: mol_type = other DNA
cagcctaaggccaatcctaccgtgacactgttccctccaagcagcgaagaactccaggccaacaaggccacacttgtgtgcctgatctccgacttctaccctggggctgtgacagtggcttggaaggccgatggatctcctgtgaaagccggcgtggaaaccaccaagccatccaagcagagcaacaacaaatacgccgccagctcctacctgagcctgacacctgagcagtggaagtcccacagatcctacagctgccaagtgacccacgaaggcagcaccgtggaaaagacagtggcccctacagagtgcagcggcagagccgattgcggctttaccagcgagagctaccagcagggcgtgctgagcgccaccatcctgtacgagatcctgctgggcaaggccaccctgtacgccgtgctggtgtctgccctggtgctgatggctatggtcaagcggaaggacagccggggaaggagtaagaggagcaggctcctgcacagtgactacatgaacatgactccacgccgccccggacccacccgcaagcattaccagccctatgccccaccacgcgacttcgcagcctatcgctccagagtgaagttcagcagaagcgccgacgcccctgcctaccagcagggacagaaccaactgtacaacgagctgaacctgggcagacgggaagagtacgacgtgctggacaagcggagaggcagggaccctgagatgggcggaaagccccagcggagaaagaacccccaggaaggactgtataacgaactccagaaagacaagatggccgaagcctacagcgagatcggcatgaagggcgagcggagaagaggcaagggccacgatggcctgtaccagggcctgagcaccgccaccaaggacacctatgacgccctgcacatgcaggccctgcctccaaga

SEQ ID NO: 25434 - DNA, 933 bp, synthetic construct
  source 1..933: mol_type = other DNA
cctaaggccaatcctaccgtgacactgttccctccaagcagcgaagaactccaggccaacaaggccacacttgtgtgcctgatctccgacttctaccctggggctgtgacagtggcttggaaggccgatggatctcctgtgaaagccggcgtggaaaccaccaagccatccaagcagagcaacaacaaatacgccgccagctcctacctgagcctgacacctgagcagtggaagtcccacagatcctacagctgccaagtgacccacgaaggcagcaccgtggaaaagacagtggcccctacagagtgcagcggcagagccgattgcggctttaccagcgagagctaccagcagggcgtgctgagcgccaccatcctgtacgagatcctgctgggcaaggccaccctgtacgccgtgctggtgtctgccctggtgctgatggctatggtcaagcggaaggacagccggggaaggagtaagaggagcaggctcctgcacagtgactacatgaacatgactccacgccgccccggacccacccgcaagcattaccagccctatgccccaccacgcgacttcgcagcctatcgctccagagtgaagttcagcagaagcgccgacgcccctgcctaccagcagggacagaaccaactgtacaacgagctgaacctgggcagacgggaagagtacgacgtgctggacaagcggagaggcagggaccctgagatgggcggaaagccccagcggagaaagaacccccaggaaggactgtataacgaactccagaaagacaagatggccgaagcctacagcgagatcggcatgaagggcgagcggagaagaggcaagggccacgatggcctgtaccagggcctgagcaccgccaccaaggacacctatgacgccctgcacatgcaggccctgcctccaaga

SEQ ID NO: 25435 - DNA, 930 bp, synthetic construct
  source 1..930: mol_type = other DNA
aaggccaatcctaccgtgacactgttccctccaagcagcgaagaactccaggccaacaaggccacacttgtgtgcctgatctccgacttctaccctggggctgtgacagtggcttggaaggccgatggatctcctgtgaaagccggcgtggaaaccaccaagccatccaagcagagcaacaacaaatacgccgccagctcctacctgagcctgacacctgagcagtggaagtcccacagatcctacagctgccaagtgacccacgaaggcagcaccgtggaaaagacagtggcccctacagagtgcagcggcagagccgattgcggctttaccagcgagagctaccagcagggcgtgctgagcgccaccatcctgtacgagatcctgctgggcaaggccaccctgtacgccgtgctggtgtctgccctggtgctgatggctatggtcaagcggaaggacagccggggaaggagtaagaggagcaggctcctgcacagtgactacatgaacatgactccacgccgccccggacccacccgcaagcattaccagccctatgccccaccacgcgacttcgcagcctatcgctccagagtgaagttcagcagaagcgccgacgcccctgcctaccagcagggacagaaccaactgtacaacgagctgaacctgggcagacgggaagagtacgacgtgctggacaagcggagaggcagggaccctgagatgggcggaaagccccagcggagaaagaacccccaggaaggactgtataacgaactccagaaagacaagatggccgaagcctacagcgagatcggcatgaagggcgagcggagaagaggcaagggccacgatggcctgtaccagggcctgagcaccgccaccaaggacacctatgacgccctgcacatgcaggccctgcctccaaga

SEQ ID NO: 25436 - DNA, 927 bp, synthetic construct
  source 1..927: mol_type = other DNA
gccaatcctaccgtgacactgttccctccaagcagcgaagaactccaggccaacaaggccacacttgtgtgcctgatctccgacttctaccctggggctgtgacagtggcttggaaggccgatggatctcctgtgaaagccggcgtggaaaccaccaagccatccaagcagagcaacaacaaatacgccgccagctcctacctgagcctgacacctgagcagtggaagtcccacagatcctacagctgccaagtgacccacgaaggcagcaccgtggaaaagacagtggcccctacagagtgcagcggcagagccgattgcggctttaccagcgagagctaccagcagggcgtgctgagcgccaccatcctgtacgagatcctgctgggcaaggccaccctgtacgccgtgctggtgtctgccctggtgctgatggctatggtcaagcggaaggacagccggggaaggagtaagaggagcaggctcctgcacagtgactacatgaacatgactccacgccgccccggacccacccgcaagcattaccagccctatgccccaccacgcgacttcgcagcctatcgctccagagtgaagttcagcagaagcgccgacgcccctgcctaccagcagggacagaaccaactgtacaacgagctgaacctgggcagacgggaagagtacgacgtgctggacaagcggagaggcagggaccctgagatgggcggaaagccccagcggagaaagaacccccaggaaggactgtataacgaactccagaaagacaagatggccgaagcctacagcgagatcggcatgaagggcgagcggagaagaggcaagggccacgatggcctgtaccagggcctgagcaccgccaccaaggacacctatgacgccctgcacatgcaggccctgcctccaaga

SEQ ID NO: 25437 - DNA, 924 bp, synthetic construct
  source 1..924: mol_type = other DNA
aatcctaccgtgacactgttccctccaagcagcgaagaactccaggccaacaaggccacacttgtgtgcctgatctccgacttctaccctggggctgtgacagtggcttggaaggccgatggatctcctgtgaaagccggcgtggaaaccaccaagccatccaagcagagcaacaacaaatacgccgccagctcctacctgagcctgacacctgagcagtggaagtcccacagatcctacagctgccaagtgacccacgaaggcagcaccgtggaaaagacagtggcccctacagagtgcagcggcagagccgattgcggctttaccagcgagagctaccagcagggcgtgctgagcgccaccatcctgtacgagatcctgctgggcaaggccaccctgtacgccgtgctggtgtctgccctggtgctgatggctatggtcaagcggaaggacagccggggaaggagtaagaggagcaggctcctgcacagtgactacatgaacatgactccacgccgccccggacccacccgcaagcattaccagccctatgccccaccacgcgacttcgcagcctatcgctccagagtgaagttcagcagaagcgccgacgcccctgcctaccagcagggacagaaccaactgtacaacgagctgaacctgggcagacgggaagagtacgacgtgctggacaagcggagaggcagggaccctgagatgggcggaaagccccagcggagaaagaacccccaggaaggactgtataacgaactccagaaagacaagatggccgaagcctacagcgagatcggcatgaagggcgagcggagaagaggcaagggccacgatggcctgtaccagggcctgagcaccgccaccaaggacacctatgacgccctgcacatgcaggccctgcctccaaga

SEQ ID NO: 25438 - DNA, 921 bp, synthetic construct
  source 1..921: mol_type = other DNA
cctaccgtgacactgttccctccaagcagcgaagaactccaggccaacaaggccacacttgtgtgcctgatctccgacttctaccctggggctgtgacagtggcttggaaggccgatggatctcctgtgaaagccggcgtggaaaccaccaagccatccaagcagagcaacaacaaatacgccgccagctcctacctgagcctgacacctgagcagtggaagtcccacagatcctacagctgccaagtgacccacgaaggcagcaccgtggaaaagacagtggcccctacagagtgcagcggcagagccgattgcggctttaccagcgagagctaccagcagggcgtgctgagcgccaccatcctgtacgagatcctgctgggcaaggccaccctgtacgccgtgctggtgtctgccctggtgctgatggctatggtcaagcggaaggacagccggggaaggagtaagaggagcaggctcctgcacagtgactacatgaacatgactccacgccgccccggacccacccgcaagcattaccagccctatgccccaccacgcgacttcgcagcctatcgctccagagtgaagttcagcagaagcgccgacgcccctgcctaccagcagggacagaaccaactgtacaacgagctgaacctgggcagacgggaagagtacgacgtgctggacaagcggagaggcagggaccctgagatgggcggaaagccccagcggagaaagaacccccaggaaggactgtataacgaactccagaaagacaagatggccgaagcctacagcgagatcggcatgaagggcgagcggagaagaggcaagggccacgatggcctgtaccagggcctgagcaccgccaccaaggacacctatgacgccctgcacatgcaggccctgcctccaaga

SEQ ID NO: 25439 - DNA, 918 bp, synthetic construct
  source 1..918: mol_type = other DNA
accgtgacactgttccctccaagcagcgaagaactccaggccaacaaggccacacttgtgtgcctgatctccgacttctaccctggggctgtgacagtggcttggaaggccgatggatctcctgtgaaagccggcgtggaaaccaccaagccatccaagcagagcaacaacaaatacgccgccagctcctacctgagcctgacacctgagcagtggaagtcccacagatcctacagctgccaagtgacccacgaaggcagcaccgtggaaaagacagtggcccctacagagtgcagcggcagagccgattgcggctttaccagcgagagctaccagcagggcgtgctgagcgccaccatcctgtacgagatcctgctgggcaaggccaccctgtacgccgtgctggtgtctgccctggtgctgatggctatggtcaagcggaaggacagccggggaaggagtaagaggagcaggctcctgcacagtgactacatgaacatgactccacgccgccccggacccacccgcaagcattaccagccctatgccccaccacgcgacttcgcagcctatcgctccagagtgaagttcagcagaagcgccgacgcccctgcctaccagcagggacagaaccaactgtacaacgagctgaacctgggcagacgggaagagtacgacgtgctggacaagcggagaggcagggaccctgagatgggcggaaagccccagcggagaaagaacccccaggaaggactgtataacgaactccagaaagacaagatggccgaagcctacagcgagatcggcatgaagggcgagcggagaagaggcaagggccacgatggcctgtaccagggcctgagcaccgccaccaaggacacctatgacgccctgcacatgcaggccctgcctccaaga

SEQ ID NO: 25440 - DNA, 915 bp, synthetic construct
  source 1..915: mol_type = other DNA
gtgacactgttccctccaagcagcgaagaactccaggccaacaaggccacacttgtgtgcctgatctccgacttctaccctggggctgtgacagtggcttggaaggccgatggatctcctgtgaaagccggcgtggaaaccaccaagccatccaagcagagcaacaacaaatacgccgccagctcctacctgagcctgacacctgagcagtggaagtcccacagatcctacagctgccaagtgacccacgaaggcagcaccgtggaaaagacagtggcccctacagagtgcagcggcagagccgattgcggctttaccagcgagagctaccagcagggcgtgctgagcgccaccatcctgtacgagatcctgctgggcaaggccaccctgtacgccgtgctggtgtctgccctggtgctgatggctatggtcaagcggaaggacagccggggaaggagtaagaggagcaggctcctgcacagtgactacatgaacatgactccacgccgccccggacccacccgcaagcattaccagccctatgccccaccacgcgacttcgcagcctatcgctccagagtgaagttcagcagaagcgccgacgcccctgcctaccagcagggacagaaccaactgtacaacgagctgaacctgggcagacgggaagagtacgacgtgctggacaagcggagaggcagggaccctgagatgggcggaaagccccagcggagaaagaacccccaggaaggactgtataacgaactccagaaagacaagatggccgaagcctacagcgagatcggcatgaagggcgagcggagaagaggcaagggccacgatggcctgtaccagggcctgagcaccgccaccaaggacacctatgacgccctgcacatgcaggccctgcctccaaga

SEQ ID NO: 25441 - DNA, 912 bp, synthetic construct
  source 1..912: mol_type = other DNA
acactgttccctccaagcagcgaagaactccaggccaacaaggccacacttgtgtgcctgatctccgacttctaccctggggctgtgacagtggcttggaaggccgatggatctcctgtgaaagccggcgtggaaaccaccaagccatccaagcagagcaacaacaaatacgccgccagctcctacctgagcctgacacctgagcagtggaagtcccacagatcctacagctgccaagtgacccacgaaggcagcaccgtggaaaagacagtggcccctacagagtgcagcggcagagccgattgcggctttaccagcgagagctaccagcagggcgtgctgagcgccaccatcctgtacgagatcctgctgggcaaggccaccctgtacgccgtgctggtgtctgccctggtgctgatggctatggtcaagcggaaggacagccggggaaggagtaagaggagcaggctcctgcacagtgactacatgaacatgactccacgccgccccggacccacccgcaagcattaccagccctatgccccaccacgcgacttcgcagcctatcgctccagagtgaagttcagcagaagcgccgacgcccctgcctaccagcagggacagaaccaactgtacaacgagctgaacctgggcagacgggaagagtacgacgtgctggacaagcggagaggcagggaccctgagatgggcggaaagccccagcggagaaagaacccccaggaaggactgtataacgaactccagaaagacaagatggccgaagcctacagcgagatcggcatgaagggcgagcggagaagaggcaagggccacgatggcctgtaccagggcctgagcaccgccaccaaggacacctatgacgccctgcacatgcaggccctgcctccaaga

SEQ ID NO: 25442 - DNA, 909 bp, synthetic construct
  source 1..909: mol_type = other DNA
ctgttccctccaagcagcgaagaactccaggccaacaaggccacacttgtgtgcctgatctccgacttctaccctggggctgtgacagtggcttggaaggccgatggatctcctgtgaaagccggcgtggaaaccaccaagccatccaagcagagcaacaacaaatacgccgccagctcctacctgagcctgacacctgagcagtggaagtcccacagatcctacagctgccaagtgacccacgaaggcagcaccgtggaaaagacagtggcccctacagagtgcagcggcagagccgattgcggctttaccagcgagagctaccagcagggcgtgctgagcgccaccatcctgtacgagatcctgctgggcaaggccaccctgtacgccgtgctggtgtctgccctggtgctgatggctatggtcaagcggaaggacagccggggaaggagtaagaggagcaggctcctgcacagtgactacatgaacatgactccacgccgccccggacccacccgcaagcattaccagccctatgccccaccacgcgacttcgcagcctatcgctccagagtgaagttcagcagaagcgccgacgcccctgcctaccagcagggacagaaccaactgtacaacgagctgaacctgggcagacgggaagagtacgacgtgctggacaagcggagaggcagggaccctgagatgggcggaaagccccagcggagaaagaacccccaggaaggactgtataacgaactccagaaagacaagatggccgaagcctacagcgagatcggcatgaagggcgagcggagaagaggcaagggccacgatggcctgtaccagggcctgagcaccgccaccaaggacacctatgacgccctgcacatgcaggccctgcctccaaga

SEQ ID NO: 25443 - DNA, 960 bp, synthetic construct
  source 1..960: mol_type = other DNA
ggacagcctaaggccaatcctaccgtgacactgttccctccaagcagcgaagaactccaggccaacaaggccacacttgtgtgcctgatctccgacttctaccctggggctgtgacagtggcttggaaggccgatggatctcctgtgaaagccggcgtggaaaccaccaagccatccaagcagagcaacaacaaatacgccgccagctcctacctgagcctgacacctgagcagtggaagtcccacagatcctacagctgccaagtgacccacgaaggcagcaccgtggaaaagacagtggcccctacagagtgcagcatccccgaggacacattcttcccaagccccgagagcagctgcgacgtgaagctggtggaaaagagcttcgagacagacaccaacctgaacttccagaacctgagcgtgatcggcttcagaatcctgctgctgaaagtggccggctttaacctgctgatgaccctgcggctgtggtccagcaggagtaagaggagcaggctcctgcacagtgactacatgaacatgactccacgccgccccggacccacccgcaagcattaccagccctatgccccaccacgcgacttcgcagcctatcgctccagagtgaagttcagcagaagcgccgacgcccctgcctaccagcagggacagaaccaactgtacaacgagctgaacctgggcagacgggaagagtacgacgtgctggacaagcggagaggcagggaccctgagatgggcggaaagccccagcggagaaagaacccccaggaaggactgtataacgaactccagaaagacaagatggccgaagcctacagcgagatcggcatgaagggcgagcggagaagaggcaagggccacgatggcctgtaccagggcctgagcaccgccaccaaggacacctatgacgccctgcacatgcaggccctgcctccaaga

SEQ ID NO: 25444 - DNA, 957 bp, synthetic construct
  source 1..957: mol_type = other DNA
cagcctaaggccaatcctaccgtgacactgttccctccaagcagcgaagaactccaggccaacaaggccacacttgtgtgcctgatctccgacttctaccctggggctgtgacagtggcttggaaggccgatggatctcctgtgaaagccggcgtggaaaccaccaagccatccaagcagagcaacaacaaatacgccgccagctcctacctgagcctgacacctgagcagtggaagtcccacagatcctacagctgccaagtgacccacgaaggcagcaccgtggaaaagacagtggcccctacagagtgcagcatccccgaggacacattcttcccaagccccgagagcagctgcgacgtgaagctggtggaaaagagcttcgagacagacaccaacctgaacttccagaacctgagcgtgatcggcttcagaatcctgctgctgaaagtggccggctttaacctgctgatgaccctgcggctgtggtccagcaggagtaagaggagcaggctcctgcacagtgactacatgaacatgactccacgccgccccggacccacccgcaagcattaccagccctatgccccaccacgcgacttcgcagcctatcgctccagagtgaagttcagcagaagcgccgacgcccctgcctaccagcagggacagaaccaactgtacaacgagctgaacctgggcagacgggaagagtacgacgtgctggacaagcggagaggcagggaccctgagatgggcggaaagccccagcggagaaagaacccccaggaaggactgtataacgaactccagaaagacaagatggccgaagcctacagcgagatcggcatgaagggcgagcggagaagaggcaagggccacgatggcctgtaccagggcctgagcaccgccaccaaggacacctatgacgccctgcacatgcaggccctgcctccaaga

SEQ ID NO: 25445 - DNA, 954 bp, synthetic construct
  source 1..954: mol_type = other DNA
cctaaggccaatcctaccgtgacactgttccctccaagcagcgaagaactccaggccaacaaggccacacttgtgtgcctgatctccgacttctaccctggggctgtgacagtggcttggaaggccgatggatctcctgtgaaagccggcgtggaaaccaccaagccatccaagcagagcaacaacaaatacgccgccagctcctacctgagcctgacacctgagcagtggaagtcccacagatcctacagctgccaagtgacccacgaaggcagcaccgtggaaaagacagtggcccctacagagtgcagcatccccgaggacacattcttcccaagccccgagagcagctgcgacgtgaagctggtggaaaagagcttcgagacagacaccaacctgaacttccagaacctgagcgtgatcggcttcagaatcctgctgctgaaagtggccggctttaacctgctgatgaccctgcggctgtggtccagcaggagtaagaggagcaggctcctgcacagtgactacatgaacatgactccacgccgccccggacccacccgcaagcattaccagccctatgccccaccacgcgacttcgcagcctatcgctccagagtgaagttcagcagaagcgccgacgcccctgcctaccagcagggacagaaccaactgtacaacgagctgaacctgggcagacgggaagagtacgacgtgctggacaagcggagaggcagggaccctgagatgggcggaaagccccagcggagaaagaacccccaggaaggactgtataacgaactccagaaagacaagatggccgaagcctacagcgagatcggcatgaagggcgagcggagaagaggcaagggccacgatggcctgtaccagggcctgagcaccgccaccaaggacacctatgacgccctgcacatgcaggccctgcctccaaga

SEQ ID NO: 25446 - DNA, 951 bp, synthetic construct
  source 1..951: mol_type = other DNA
aaggccaatcctaccgtgacactgttccctccaagcagcgaagaactccaggccaacaaggccacacttgtgtgcctgatctccgacttctaccctggggctgtgacagtggcttggaaggccgatggatctcctgtgaaagccggcgtggaaaccaccaagccatccaagcagagcaacaacaaatacgccgccagctcctacctgagcctgacacctgagcagtggaagtcccacagatcctacagctgccaagtgacccacgaaggcagcaccgtggaaaagacagtggcccctacagagtgcagcatccccgaggacacattcttcccaagccccgagagcagctgcgacgtgaagctggtggaaaagagcttcgagacagacaccaacctgaacttccagaacctgagcgtgatcggcttcagaatcctgctgctgaaagtggccggctttaacctgctgatgaccctgcggctgtggtccagcaggagtaagaggagcaggctcctgcacagtgactacatgaacatgactccacgccgccccggacccacccgcaagcattaccagccctatgccccaccacgcgacttcgcagcctatcgctccagagtgaagttcagcagaagcgccgacgcccctgcctaccagcagggacagaaccaactgtacaacgagctgaacctgggcagacgggaagagtacgacgtgctggacaagcggagaggcagggaccctgagatgggcggaaagccccagcggagaaagaacccccaggaaggactgtataacgaactccagaaagacaagatggccgaagcctacagcgagatcggcatgaagggcgagcggagaagaggcaagggccacgatggcctgtaccagggcctgagcaccgccaccaaggacacctatgacgccctgcacatgcaggccctgcctccaaga

SEQ ID NO: 25447 - DNA, 948 bp, synthetic construct
  source 1..948: mol_type = other DNA
gccaatcctaccgtgacactgttccctccaagcagcgaagaactccaggccaacaaggccacacttgtgtgcctgatctccgacttctaccctggggctgtgacagtggcttggaaggccgatggatctcctgtgaaagccggcgtggaaaccaccaagccatccaagcagagcaacaacaaatacgccgccagctcctacctgagcctgacacctgagcagtggaagtcccacagatcctacagctgccaagtgacccacgaaggcagcaccgtggaaaagacagtggcccctacagagtgcagcatccccgaggacacattcttcccaagccccgagagcagctgcgacgtgaagctggtggaaaagagcttcgagacagacaccaacctgaacttccagaacctgagcgtgatcggcttcagaatcctgctgctgaaagtggccggctttaacctgctgatgaccctgcggctgtggtccagcaggagtaagaggagcaggctcctgcacagtgactacatgaacatgactccacgccgccccggacccacccgcaagcattaccagccctatgccccaccacgcgacttcgcagcctatcgctccagagtgaagttcagcagaagcgccgacgcccctgcctaccagcagggacagaaccaactgtacaacgagctgaacctgggcagacgggaagagtacgacgtgctggacaagcggagaggcagggaccctgagatgggcggaaagccccagcggagaaagaacccccaggaaggactgtataacgaactccagaaagacaagatggccgaagcctacagcgagatcggcatgaagggcgagcggagaagaggcaagggccacgatggcctgtaccagggcctgagcaccgccaccaaggacacctatgacgccctgcacatgcaggccctgcctccaaga

SEQ ID NO: 25448 - DNA, 945 bp, synthetic construct
  source 1..945: mol_type = other DNA
aatcctaccgtgacactgttccctccaagcagcgaagaactccaggccaacaaggccacacttgtgtgcctgatctccgacttctaccctggggctgtgacagtggcttggaaggccgatggatctcctgtgaaagccggcgtggaaaccaccaagccatccaagcagagcaacaacaaatacgccgccagctcctacctgagcctgacacctgagcagtggaagtcccacagatcctacagctgccaagtgacccacgaaggcagcaccgtggaaaagacagtggcccctacagagtgcagcatccccgaggacacattcttcccaagccccgagagcagctgcgacgtgaagctggtggaaaagagcttcgagacagacaccaacctgaacttccagaacctgagcgtgatcggcttcagaatcctgctgctgaaagtggccggctttaacctgctgatgaccctgcggctgtggtccagcaggagtaagaggagcaggctcctgcacagtgactacatgaacatgactccacgccgccccggacccacccgcaagcattaccagccctatgccccaccacgcgacttcgcagcctatcgctccagagtgaagttcagcagaagcgccgacgcccctgcctaccagcagggacagaaccaactgtacaacgagctgaacctgggcagacgggaagagtacgacgtgctggacaagcggagaggcagggaccctgagatgggcggaaagccccagcggagaaagaacccccaggaaggactgtataacgaactccagaaagacaagatggccgaagcctacagcgagatcggcatgaagggcgagcggagaagaggcaagggccacgatggcctgtaccagggcctgagcaccgccaccaaggacacctatgacgccctgcacatgcaggccctgcctccaaga

SEQ ID NO: 25449 - DNA, 942 bp, synthetic construct
  source 1..942: mol_type = other DNA
cctaccgtgacactgttccctccaagcagcgaagaactccaggccaacaaggccacacttgtgtgcctgatctccgacttctaccctggggctgtgacagtggcttggaaggccgatggatctcctgtgaaagccggcgtggaaaccaccaagccatccaagcagagcaacaacaaatacgccgccagctcctacctgagcctgacacctgagcagtggaagtcccacagatcctacagctgccaagtgacccacgaaggcagcaccgtggaaaagacagtggcccctacagagtgcagcatccccgaggacacattcttcccaagccccgagagcagctgcgacgtgaagctggtggaaaagagcttcgagacagacaccaacctgaacttccagaacctgagcgtgatcggcttcagaatcctgctgctgaaagtggccggctttaacctgctgatgaccctgcggctgtggtccagcaggagtaagaggagcaggctcctgcacagtgactacatgaacatgactccacgccgccccggacccacccgcaagcattaccagccctatgccccaccacgcgacttcgcagcctatcgctccagagtgaagttcagcagaagcgccgacgcccctgcctaccagcagggacagaaccaactgtacaacgagctgaacctgggcagacgggaagagtacgacgtgctggacaagcggagaggcagggaccctgagatgggcggaaagccccagcggagaaagaacccccaggaaggactgtataacgaactccagaaagacaagatggccgaagcctacagcgagatcggcatgaagggcgagcggagaagaggcaagggccacgatggcctgtaccagggcctgagcaccgccaccaaggacacctatgacgccctgcacatgcaggccctgcctccaaga

SEQ ID NO: 25450 - DNA, 939 bp, synthetic construct
  source 1..939: mol_type = other DNA
accgtgacactgttccctccaagcagcgaagaactccaggccaacaaggccacacttgtgtgcctgatctccgacttctaccctggggctgtgacagtggcttggaaggccgatggatctcctgtgaaagccggcgtggaaaccaccaagccatccaagcagagcaacaacaaatacgccgccagctcctacctgagcctgacacctgagcagtggaagtcccacagatcctacagctgccaagtgacccacgaaggcagcaccgtggaaaagacagtggcccctacagagtgcagcatccccgaggacacattcttcccaagccccgagagcagctgcgacgtgaagctggtggaaaagagcttcgagacagacaccaacctgaacttccagaacctgagcgtgatcggcttcagaatcctgctgctgaaagtggccggctttaacctgctgatgaccctgcggctgtggtccagcaggagtaagaggagcaggctcctgcacagtgactacatgaacatgactccacgccgccccggacccacccgcaagcattaccagccctatgccccaccacgcgacttcgcagcctatcgctccagagtgaagttcagcagaagcgccgacgcccctgcctaccagcagggacagaaccaactgtacaacgagctgaacctgggcagacgggaagagtacgacgtgctggacaagcggagaggcagggaccctgagatgggcggaaagccccagcggagaaagaacccccaggaaggactgtataacgaactccagaaagacaagatggccgaagcctacagcgagatcggcatgaagggcgagcggagaagaggcaagggccacgatggcctgtaccagggcctgagcaccgccaccaaggacacctatgacgccctgcacatgcaggccctgcctccaaga

SEQ ID NO: 25451 - DNA, 936 bp, synthetic construct
  source 1..936: mol_type = other DNA
gtgacactgttccctccaagcagcgaagaactccaggccaacaaggccacacttgtgtgcctgatctccgacttctaccctggggctgtgacagtggcttggaaggccgatggatctcctgtgaaagccggcgtggaaaccaccaagccatccaagcagagcaacaacaaatacgccgccagctcctacctgagcctgacacctgagcagtggaagtcccacagatcctacagctgccaagtgacccacgaaggcagcaccgtggaaaagacagtggcccctacagagtgcagcatccccgaggacacattcttcccaagccccgagagcagctgcgacgtgaagctggtggaaaagagcttcgagacagacaccaacctgaacttccagaacctgagcgtgatcggcttcagaatcctgctgctgaaagtggccggctttaacctgctgatgaccctgcggctgtggtccagcaggagtaagaggagcaggctcctgcacagtgactacatgaacatgactccacgccgccccggacccacccgcaagcattaccagccctatgccccaccacgcgacttcgcagcctatcgctccagagtgaagttcagcagaagcgccgacgcccctgcctaccagcagggacagaaccaactgtacaacgagctgaacctgggcagacgggaagagtacgacgtgctggacaagcggagaggcagggaccctgagatgggcggaaagccccagcggagaaagaacccccaggaaggactgtataacgaactccagaaagacaagatggccgaagcctacagcgagatcggcatgaagggcgagcggagaagaggcaagggccacgatggcctgtaccagggcctgagcaccgccaccaaggacacctatgacgccctgcacatgcaggccctgcctccaaga

SEQ ID NO: 25452 - DNA, 933 bp, synthetic construct
  source 1..933: mol_type = other DNA
acactgttccctccaagcagcgaagaactccaggccaacaaggccacacttgtgtgcctgatctccgacttctaccctggggctgtgacagtggcttggaaggccgatggatctcctgtgaaagccggcgtggaaaccaccaagccatccaagcagagcaacaacaaatacgccgccagctcctacctgagcctgacacctgagcagtggaagtcccacagatcctacagctgccaagtgacccacgaaggcagcaccgtggaaaagacagtggcccctacagagtgcagcatccccgaggacacattcttcccaagccccgagagcagctgcgacgtgaagctggtggaaaagagcttcgagacagacaccaacctgaacttccagaacctgagcgtgatcggcttcagaatcctgctgctgaaagtggccggctttaacctgctgatgaccctgcggctgtggtccagcaggagtaagaggagcaggctcctgcacagtgactacatgaacatgactccacgccgccccggacccacccgcaagcattaccagccctatgccccaccacgcgacttcgcagcctatcgctccagagtgaagttcagcagaagcgccgacgcccctgcctaccagcagggacagaaccaactgtacaacgagctgaacctgggcagacgggaagagtacgacgtgctggacaagcggagaggcagggaccctgagatgggcggaaagccccagcggagaaagaacccccaggaaggactgtataacgaactccagaaagacaagatggccgaagcctacagcgagatcggcatgaagggcgagcggagaagaggcaagggccacgatggcctgtaccagggcctgagcaccgccaccaaggacacctatgacgccctgcacatgcaggccctgcctccaaga

SEQ ID NO: 25453 - DNA, 930 bp, synthetic construct
  source 1..930: mol_type = other DNA
ctgttccctccaagcagcgaagaactccaggccaacaaggccacacttgtgtgcctgatctccgacttctaccctggggctgtgacagtggcttggaaggccgatggatctcctgtgaaagccggcgtggaaaccaccaagccatccaagcagagcaacaacaaatacgccgccagctcctacctgagcctgacacctgagcagtggaagtcccacagatcctacagctgccaagtgacccacgaaggcagcaccgtggaaaagacagtggcccctacagagtgcagcatccccgaggacacattcttcccaagccccgagagcagctgcgacgtgaagctggtggaaaagagcttcgagacagacaccaacctgaacttccagaacctgagcgtgatcggcttcagaatcctgctgctgaaagtggccggctttaacctgctgatgaccctgcggctgtggtccagcaggagtaagaggagcaggctcctgcacagtgactacatgaacatgactccacgccgccccggacccacccgcaagcattaccagccctatgccccaccacgcgacttcgcagcctatcgctccagagtgaagttcagcagaagcgccgacgcccctgcctaccagcagggacagaaccaactgtacaacgagctgaacctgggcagacgggaagagtacgacgtgctggacaagcggagaggcagggaccctgagatgggcggaaagccccagcggagaaagaacccccaggaaggactgtataacgaactccagaaagacaagatggccgaagcctacagcgagatcggcatgaagggcgagcggagaagaggcaagggccacgatggcctgtaccagggcctgagcaccgccaccaaggacacctatgacgccctgcacatgcaggccctgcctccaaga

SEQ ID NO: 25454 - DNA, 990 bp, synthetic construct
  source 1..990: mol_type = other DNA
gacctgaagaacgtgttcccacctgaggtggccgtgttcgagcctagcgaggccgagatcagccacacccagaaagccaccctcgtgtgcctggctaccggcttctaccccgaccatgtggaactgtcttggtgggtcaacggcaaagaggtgcacagcggcgtgtgtaccgacccccagccactgaaagaacagcccgccctgaacgacagccggtactgcctgagcagcagactgagagtgtccgccaccttctggcagaacccccggaaccacttcagatgccaggtgcagttctacggcctgagcgagaacgacgagtggacccaggacagagccaagcccgtgacccagatcgtgtctgccgaagcctggggcagagccgattgcgacgtgaagctggtggaaaagagcttcgagacagacaccaacctgaacttccagaacctgagcgtgatcggcttcagaatcctgctgctgaaagtggccggctttaacctgctgatgaccctgcggctgtggtccagcaggagtaagaggagcaggctcctgcacagtgactacatgaacatgactccacgccgccccggacccacccgcaagcattaccagccctatgccccaccacgcgacttcgcagcctatcgctccagagtgaagttcagcagaagcgccgacgcccctgcctaccagcagggacagaaccaactgtacaacgagctgaacctgggcagacgggaagagtacgacgtgctggacaagcggagaggcagggaccctgagatgggcggaaagccccagcggagaaagaacccccaggaaggactgtataacgaactccagaaagacaagatggccgaagcctacagcgagatcggcatgaagggcgagcggagaagaggcaagggccacgatggcctgtaccagggcctgagcaccgccaccaaggacacctatgacgccctgcacatgcaggccctgcctccaaga

SEQ ID NO: 25455 - DNA, 987 bp, synthetic construct
  source 1..987: mol_type = other DNA
ctgaagaacgtgttcccacctgaggtggccgtgttcgagcctagcgaggccgagatcagccacacccagaaagccaccctcgtgtgcctggctaccggcttctaccccgaccatgtggaactgtcttggtgggtcaacggcaaagaggtgcacagcggcgtgtgtaccgacccccagccactgaaagaacagcccgccctgaacgacagccggtactgcctgagcagcagactgagagtgtccgccaccttctggcagaacccccggaaccacttcagatgccaggtgcagttctacggcctgagcgagaacgacgagtggacccaggacagagccaagcccgtgacccagatcgtgtctgccgaagcctggggcagagccgattgcgacgtgaagctggtggaaaagagcttcgagacagacaccaacctgaacttccagaacctgagcgtgatcggcttcagaatcctgctgctgaaagtggccggctttaacctgctgatgaccctgcggctgtggtccagcaggagtaagaggagcaggctcctgcacagtgactacatgaacatgactccacgccgccccggacccacccgcaagcattaccagccctatgccccaccacgcgacttcgcagcctatcgctccagagtgaagttcagcagaagcgccgacgcccctgcctaccagcagggacagaaccaactgtacaacgagctgaacctgggcagacgggaagagtacgacgtgctggacaagcggagaggcagggaccctgagatgggcggaaagccccagcggagaaagaacccccaggaaggactgtataacgaactccagaaagacaagatggccgaagcctacagcgagatcggcatgaagggcgagcggagaagaggcaagggccacgatggcctgtaccagggcctgagcaccgccaccaaggacacctatgacgccctgcacatgcaggccctgcctccaaga

SEQ ID NO: 25456 - DNA, 984 bp, synthetic construct
  source 1..984: mol_type = other DNA
aagaacgtgttcccacctgaggtggccgtgttcgagcctagcgaggccgagatcagccacacccagaaagccaccctcgtgtgcctggctaccggcttctaccccgaccatgtggaactgtcttggtgggtcaacggcaaagaggtgcacagcggcgtgtgtaccgacccccagccactgaaagaacagcccgccctgaacgacagccggtactgcctgagcagcagactgagagtgtccgccaccttctggcagaacccccggaaccacttcagatgccaggtgcagttctacggcctgagcgagaacgacgagtggacccaggacagagccaagcccgtgacccagatcgtgtctgccgaagcctggggcagagccgattgcgacgtgaagctggtggaaaagagcttcgagacagacaccaacctgaacttccagaacctgagcgtgatcggcttcagaatcctgctgctgaaagtggccggctttaacctgctgatgaccctgcggctgtggtccagcaggagtaagaggagcaggctcctgcacagtgactacatgaacatgactccacgccgccccggacccacccgcaagcattaccagccctatgccccaccacgcgacttcgcagcctatcgctccagagtgaagttcagcagaagcgccgacgcccctgcctaccagcagggacagaaccaactgtacaacgagctgaacctgggcagacgggaagagtacgacgtgctggacaagcggagaggcagggaccctgagatgggcggaaagccccagcggagaaagaacccccaggaaggactgtataacgaactccagaaagacaagatggccgaagcctacagcgagatcggcatgaagggcgagcggagaagaggcaagggccacgatggcctgtaccagggcctgagcaccgccaccaaggacacctatgacgccctgcacatgcaggccctgcctccaaga

SEQ ID NO: 25457 - DNA, 981 bp, synthetic construct
  source 1..981: mol_type = other DNA
aacgtgttcccacctgaggtggccgtgttcgagcctagcgaggccgagatcagccacacccagaaagccaccctcgtgtgcctggctaccggcttctaccccgaccatgtggaactgtcttggtgggtcaacggcaaagaggtgcacagcggcgtgtgtaccgacccccagccactgaaagaacagcccgccctgaacgacagccggtactgcctgagcagcagactgagagtgtccgccaccttctggcagaacccccggaaccacttcagatgccaggtgcagttctacggcctgagcgagaacgacgagtggacccaggacagagccaagcccgtgacccagatcgtgtctgccgaagcctggggcagagccgattgcgacgtgaagctggtggaaaagagcttcgagacagacaccaacctgaacttccagaacctgagcgtgatcggcttcagaatcctgctgctgaaagtggccggctttaacctgctgatgaccctgcggctgtggtccagcaggagtaagaggagcaggctcctgcacagtgactacatgaacatgactccacgccgccccggacccacccgcaagcattaccagccctatgccccaccacgcgacttcgcagcctatcgctccagagtgaagttcagcagaagcgccgacgcccctgcctaccagcagggacagaaccaactgtacaacgagctgaacctgggcagacgggaagagtacgacgtgctggacaagcggagaggcagggaccctgagatgggcggaaagccccagcggagaaagaacccccaggaaggactgtataacgaactccagaaagacaagatggccgaagcctacagcgagatcggcatgaagggcgagcggagaagaggcaagggccacgatggcctgtaccagggcctgagcaccgccaccaaggacacctatgacgccctgcacatgcaggccctgcctccaaga

SEQ ID NO: 25458 - DNA, 978 bp, synthetic construct
  source 1..978: mol_type = other DNA
gtgttcccacctgaggtggccgtgttcgagcctagcgaggccgagatcagccacacccagaaagccaccctcgtgtgcctggctaccggcttctaccccgaccatgtggaactgtcttggtgggtcaacggcaaagaggtgcacagcggcgtgtgtaccgacccccagccactgaaagaacagcccgccctgaacgacagccggtactgcctgagcagcagactgagagtgtccgccaccttctggcagaacccccggaaccacttcagatgccaggtgcagttctacggcctgagcgagaacgacgagtggacccaggacagagccaagcccgtgacccagatcgtgtctgccgaagcctggggcagagccgattgcgacgtgaagctggtggaaaagagcttcgagacagacaccaacctgaacttccagaacctgagcgtgatcggcttcagaatcctgctgctgaaagtggccggctttaacctgctgatgaccctgcggctgtggtccagcaggagtaagaggagcaggctcctgcacagtgactacatgaacatgactccacgccgccccggacccacccgcaagcattaccagccctatgccccaccacgcgacttcgcagcctatcgctccagagtgaagttcagcagaagcgccgacgcccctgcctaccagcagggacagaaccaactgtacaacgagctgaacctgggcagacgggaagagtacgacgtgctggacaagcggagaggcagggaccctgagatgggcggaaagccccagcggagaaagaacccccaggaaggactgtataacgaactccagaaagacaagatggccgaagcctacagcgagatcggcatgaagggcgagcggagaagaggcaagggccacgatggcctgtaccagggcctgagcaccgccaccaaggacacctatgacgccctgcacatgcaggccctgcctccaaga

SEQ ID NO: 25459 - DNA, 975 bp, synthetic construct
  source 1..975: mol_type = other DNA
ttcccacctgaggtggccgtgttcgagcctagcgaggccgagatcagccacacccagaaagccaccctcgtgtgcctggctaccggcttctaccccgaccatgtggaactgtcttggtgggtcaacggcaaagaggtgcacagcggcgtgtgtaccgacccccagccactgaaagaacagcccgccctgaacgacagccggtactgcctgagcagcagactgagagtgtccgccaccttctggcagaacccccggaaccacttcagatgccaggtgcagttctacggcctgagcgagaacgacgagtggacccaggacagagccaagcccgtgacccagatcgtgtctgccgaagcctggggcagagccgattgcgacgtgaagctggtggaaaagagcttcgagacagacaccaacctgaacttccagaacctgagcgtgatcggcttcagaatcctgctgctgaaagtggccggctttaacctgctgatgaccctgcggctgtggtccagcaggagtaagaggagcaggctcctgcacagtgactacatgaacatgactccacgccgccccggacccacccgcaagcattaccagccctatgccccaccacgcgacttcgcagcctatcgctccagagtgaagttcagcagaagcgccgacgcccctgcctaccagcagggacagaaccaactgtacaacgagctgaacctgggcagacgggaagagtacgacgtgctggacaagcggagaggcagggaccctgagatgggcggaaagccccagcggagaaagaacccccaggaaggactgtataacgaactccagaaagacaagatggccgaagcctacagcgagatcggcatgaagggcgagcggagaagaggcaagggccacgatggcctgtaccagggcctgagcaccgccaccaaggacacctatgacgccctgcacatgcaggccctgcctccaaga

SEQ ID NO: 25460 - DNA, 972 bp, synthetic construct
  source 1..972: mol_type = other DNA
ccacctgaggtggccgtgttcgagcctagcgaggccgagatcagccacacccagaaagccaccctcgtgtgcctggctaccggcttctaccccgaccatgtggaactgtcttggtgggtcaacggcaaagaggtgcacagcggcgtgtgtaccgacccccagccactgaaagaacagcccgccctgaacgacagccggtactgcctgagcagcagactgagagtgtccgccaccttctggcagaacccccggaaccacttcagatgccaggtgcagttctacggcctgagcgagaacgacgagtggacccaggacagagccaagcccgtgacccagatcgtgtctgccgaagcctggggcagagccgattgcgacgtgaagctggtggaaaagagcttcgagacagacaccaacctgaacttccagaacctgagcgtgatcggcttcagaatcctgctgctgaaagtggccggctttaacctgctgatgaccctgcggctgtggtccagcaggagtaagaggagcaggctcctgcacagtgactacatgaacatgactccacgccgccccggacccacccgcaagcattaccagccctatgccccaccacgcgacttcgcagcctatcgctccagagtgaagttcagcagaagcgccgacgcccctgcctaccagcagggacagaaccaactgtacaacgagctgaacctgggcagacgggaagagtacgacgtgctggacaagcggagaggcagggaccctgagatgggcggaaagccccagcggagaaagaacccccaggaaggactgtataacgaactccagaaagacaagatggccgaagcctacagcgagatcggcatgaagggcgagcggagaagaggcaagggccacgatggcctgtaccagggcctgagcaccgccaccaaggacacctatgacgccctgcacatgcaggccctgcctccaaga

SEQ ID NO: 25461 - DNA, 969 bp, synthetic construct
  source 1..969: mol_type = other DNA
cctgaggtggccgtgttcgagcctagcgaggccgagatcagccacacccagaaagccaccctcgtgtgcctggctaccggcttctaccccgaccatgtggaactgtcttggtgggtcaacggcaaagaggtgcacagcggcgtgtgtaccgacccccagccactgaaagaacagcccgccctgaacgacagccggtactgcctgagcagcagactgagagtgtccgccaccttctggcagaacccccggaaccacttcagatgccaggtgcagttctacggcctgagcgagaacgacgagtggacccaggacagagccaagcccgtgacccagatcgtgtctgccgaagcctggggcagagccgattgcgacgtgaagctggtggaaaagagcttcgagacagacaccaacctgaacttccagaacctgagcgtgatcggcttcagaatcctgctgctgaaagtggccggctttaacctgctgatgaccctgcggctgtggtccagcaggagtaagaggagcaggctcctgcacagtgactacatgaacatgactccacgccgccccggacccacccgcaagcattaccagccctatgccccaccacgcgacttcgcagcctatcgctccagagtgaagttcagcagaagcgccgacgcccctgcctaccagcagggacagaaccaactgtacaacgagctgaacctgggcagacgggaagagtacgacgtgctggacaagcggagaggcagggaccctgagatgggcggaaagccccagcggagaaagaacccccaggaaggactgtataacgaactccagaaagacaagatggccgaagcctacagcgagatcggcatgaagggcgagcggagaagaggcaagggccacgatggcctgtaccagggcctgagcaccgccaccaaggacacctatgacgccctgcacatgcaggccctgcctccaaga

SEQ ID NO: 25462 - DNA, 966 bp, synthetic construct
  source 1..966: mol_type = other DNA
gaggtggccgtgttcgagcctagcgaggccgagatcagccacacccagaaagccaccctcgtgtgcctggctaccggcttctaccccgaccatgtggaactgtcttggtgggtcaacggcaaagaggtgcacagcggcgtgtgtaccgacccccagccactgaaagaacagcccgccctgaacgacagccggtactgcctgagcagcagactgagagtgtccgccaccttctggcagaacccccggaaccacttcagatgccaggtgcagttctacggcctgagcgagaacgacgagtggacccaggacagagccaagcccgtgacccagatcgtgtctgccgaagcctggggcagagccgattgcgacgtgaagctggtggaaaagagcttcgagacagacaccaacctgaacttccagaacctgagcgtgatcggcttcagaatcctgctgctgaaagtggccggctttaacctgctgatgaccctgcggctgtggtccagcaggagtaagaggagcaggctcctgcacagtgactacatgaacatgactccacgccgccccggacccacccgcaagcattaccagccctatgccccaccacgcgacttcgcagcctatcgctccagagtgaagttcagcagaagcgccgacgcccctgcctaccagcagggacagaaccaactgtacaacgagctgaacctgggcagacgggaagagtacgacgtgctggacaagcggagaggcagggaccctgagatgggcggaaagccccagcggagaaagaacccccaggaaggactgtataacgaactccagaaagacaagatggccgaagcctacagcgagatcggcatgaagggcgagcggagaagaggcaagggccacgatggcctgtaccagggcctgagcaccgccaccaaggacacctatgacgccctgcacatgcaggccctgcctccaaga

SEQ ID NO: 25463 - DNA, 963 bp, synthetic construct
  source 1..963: mol_type = other DNA
gtggccgtgttcgagcctagcgaggccgagatcagccacacccagaaagccaccctcgtgtgcctggctaccggcttctaccccgaccatgtggaactgtcttggtgggtcaacggcaaagaggtgcacagcggcgtgtgtaccgacccccagccactgaaagaacagcccgccctgaacgacagccggtactgcctgagcagcagactgagagtgtccgccaccttctggcagaacccccggaaccacttcagatgccaggtgcagttctacggcctgagcgagaacgacgagtggacccaggacagagccaagcccgtgacccagatcgtgtctgccgaagcctggggcagagccgattgcgacgtgaagctggtggaaaagagcttcgagacagacaccaacctgaacttccagaacctgagcgtgatcggcttcagaatcctgctgctgaaagtggccggctttaacctgctgatgaccctgcggctgtggtccagcaggagtaagaggagcaggctcctgcacagtgactacatgaacatgactccacgccgccccggacccacccgcaagcattaccagccctatgccccaccacgcgacttcgcagcctatcgctccagagtgaagttcagcagaagcgccgacgcccctgcctaccagcagggacagaaccaactgtacaacgagctgaacctgggcagacgggaagagtacgacgtgctggacaagcggagaggcagggaccctgagatgggcggaaagccccagcggagaaagaacccccaggaaggactgtataacgaactccagaaagacaagatggccgaagcctacagcgagatcggcatgaagggcgagcggagaagaggcaagggccacgatggcctgtaccagggcctgagcaccgccaccaaggacacctatgacgccctgcacatgcaggccctgcctccaaga

SEQ ID NO: 25464 - DNA, 960 bp, synthetic construct
  source 1..960: mol_type = other DNA
gccgtgttcgagcctagcgaggccgagatcagccacacccagaaagccaccctcgtgtgcctggctaccggcttctaccccgaccatgtggaactgtcttggtgggtcaacggcaaagaggtgcacagcggcgtgtgtaccgacccccagccactgaaagaacagcccgccctgaacgacagccggtactgcctgagcagcagactgagagtgtccgccaccttctggcagaacccccggaaccacttcagatgccaggtgcagttctacggcctgagcgagaacgacgagtggacccaggacagagccaagcccgtgacccagatcgtgtctgccgaagcctggggcagagccgattgcgacgtgaagctggtggaaaagagcttcgagacagacaccaacctgaacttccagaacctgagcgtgatcggcttcagaatcctgctgctgaaagtggccggctttaacctgctgatgaccctgcggctgtggtccagcaggagtaagaggagcaggctcctgcacagtgactacatgaacatgactccacgccgccccggacccacccgcaagcattaccagccctatgccccaccacgcgacttcgcagcctatcgctccagagtgaagttcagcagaagcgccgacgcccctgcctaccagcagggacagaaccaactgtacaacgagctgaacctgggcagacgggaagagtacgacgtgctggacaagcggagaggcagggaccctgagatgggcggaaagccccagcggagaaagaacccccaggaaggactgtataacgaactccagaaagacaagatggccgaagcctacagcgagatcggcatgaagggcgagcggagaagaggcaagggccacgatggcctgtaccagggcctgagcaccgccaccaaggacacctatgacgccctgcacatgcaggccctgcctccaaga

SEQ ID NO: 25465 - DNA, 957 bp, synthetic construct
  source 1..957: mol_type = other DNA
gtgttcgagcctagcgaggccgagatcagccacacccagaaagccaccctcgtgtgcctggctaccggcttctaccccgaccatgtggaactgtcttggtgggtcaacggcaaagaggtgcacagcggcgtgtgtaccgacccccagccactgaaagaacagcccgccctgaacgacagccggtactgcctgagcagcagactgagagtgtccgccaccttctggcagaacccccggaaccacttcagatgccaggtgcagttctacggcctgagcgagaacgacgagtggacccaggacagagccaagcccgtgacccagatcgtgtctgccgaagcctggggcagagccgattgcgacgtgaagctggtggaaaagagcttcgagacagacaccaacctgaacttccagaacctgagcgtgatcggcttcagaatcctgctgctgaaagtggccggctttaacctgctgatgaccctgcggctgtggtccagcaggagtaagaggagcaggctcctgcacagtgactacatgaacatgactccacgccgccccggacccacccgcaagcattaccagccctatgccccaccacgcgacttcgcagcctatcgctccagagtgaagttcagcagaagcgccgacgcccctgcctaccagcagggacagaaccaactgtacaacgagctgaacctgggcagacgggaagagtacgacgtgctggacaagcggagaggcagggaccctgagatgggcggaaagccccagcggagaaagaacccccaggaaggactgtataacgaactccagaaagacaagatggccgaagcctacagcgagatcggcatgaagggcgagcggagaagaggcaagggccacgatggcctgtaccagggcctgagcaccgccaccaaggacacctatgacgccctgcacatgcaggccctgcctccaaga

SEQ ID NO: 25466 - DNA, 954 bp, synthetic construct
  source 1..954: mol_type = other DNA
ttcgagcctagcgaggccgagatcagccacacccagaaagccaccctcgtgtgcctggctaccggcttctaccccgaccatgtggaactgtcttggtgggtcaacggcaaagaggtgcacagcggcgtgtgtaccgacccccagccactgaaagaacagcccgccctgaacgacagccggtactgcctgagcagcagactgagagtgtccgccaccttctggcagaacccccggaaccacttcagatgccaggtgcagttctacggcctgagcgagaacgacgagtggacccaggacagagccaagcccgtgacccagatcgtgtctgccgaagcctggggcagagccgattgcgacgtgaagctggtggaaaagagcttcgagacagacaccaacctgaacttccagaacctgagcgtgatcggcttcagaatcctgctgctgaaagtggccggctttaacctgctgatgaccctgcggctgtggtccagcaggagtaagaggagcaggctcctgcacagtgactacatgaacatgactccacgccgccccggacccacccgcaagcattaccagccctatgccccaccacgcgacttcgcagcctatcgctccagagtgaagttcagcagaagcgccgacgcccctgcctaccagcagggacagaaccaactgtacaacgagctgaacctgggcagacgggaagagtacgacgtgctggacaagcggagaggcagggaccctgagatgggcggaaagccccagcggagaaagaacccccaggaaggactgtataacgaactccagaaagacaagatggccgaagcctacagcgagatcggcatgaagggcgagcggagaagaggcaagggccacgatggcctgtaccagggcctgagcaccgccaccaaggacacctatgacgccctgcacatgcaggccctgcctccaaga

SEQ ID NO: 25467 - DNA, 951 bp, synthetic construct
  source 1..951: mol_type = other DNA
gagcctagcgaggccgagatcagccacacccagaaagccaccctcgtgtgcctggctaccggcttctaccccgaccatgtggaactgtcttggtgggtcaacggcaaagaggtgcacagcggcgtgtgtaccgacccccagccactgaaagaacagcccgccctgaacgacagccggtactgcctgagcagcagactgagagtgtccgccaccttctggcagaacccccggaaccacttcagatgccaggtgcagttctacggcctgagcgagaacgacgagtggacccaggacagagccaagcccgtgacccagatcgtgtctgccgaagcctggggcagagccgattgcgacgtgaagctggtggaaaagagcttcgagacagacaccaacctgaacttccagaacctgagcgtgatcggcttcagaatcctgctgctgaaagtggccggctttaacctgctgatgaccctgcggctgtggtccagcaggagtaagaggagcaggctcctgcacagtgactacatgaacatgactccacgccgccccggacccacccgcaagcattaccagccctatgccccaccacgcgacttcgcagcctatcgctccagagtgaagttcagcagaagcgccgacgcccctgcctaccagcagggacagaaccaactgtacaacgagctgaacctgggcagacgggaagagtacgacgtgctggacaagcggagaggcagggaccctgagatgggcggaaagccccagcggagaaagaacccccaggaaggactgtataacgaactccagaaagacaagatggccgaagcctacagcgagatcggcatgaagggcgagcggagaagaggcaagggccacgatggcctgtaccagggcctgagcaccgccaccaaggacacctatgacgccctgcacatgcaggccctgcctccaaga

SEQ ID NO: 25468 - DNA, 948 bp, synthetic construct
  source 1..948: mol_type = other DNA
cctagcgaggccgagatcagccacacccagaaagccaccctcgtgtgcctggctaccggcttctaccccgaccatgtggaactgtcttggtgggtcaacggcaaagaggtgcacagcggcgtgtgtaccgacccccagccactgaaagaacagcccgccctgaacgacagccggtactgcctgagcagcagactgagagtgtccgccaccttctggcagaacccccggaaccacttcagatgccaggtgcagttctacggcctgagcgagaacgacgagtggacccaggacagagccaagcccgtgacccagatcgtgtctgccgaagcctggggcagagccgattgcgacgtgaagctggtggaaaagagcttcgagacagacaccaacctgaacttccagaacctgagcgtgatcggcttcagaatcctgctgctgaaagtggccggctttaacctgctgatgaccctgcggctgtggtccagcaggagtaagaggagcaggctcctgcacagtgactacatgaacatgactccacgccgccccggacccacccgcaagcattaccagccctatgccccaccacgcgacttcgcagcctatcgctccagagtgaagttcagcagaagcgccgacgcccctgcctaccagcagggacagaaccaactgtacaacgagctgaacctgggcagacgggaagagtacgacgtgctggacaagcggagaggcagggaccctgagatgggcggaaagccccagcggagaaagaacccccaggaaggactgtataacgaactccagaaagacaagatggccgaagcctacagcgagatcggcatgaagggcgagcggagaagaggcaagggccacgatggcctgtaccagggcctgagcaccgccaccaaggacacctatgacgccctgcacatgcaggccctgcctccaaga

SEQ ID NO: 25469 - DNA, 945 bp, synthetic construct
  source 1..945: mol_type = other DNA
agcgaggccgagatcagccacacccagaaagccaccctcgtgtgcctggctaccggcttctaccccgaccatgtggaactgtcttggtgggtcaacggcaaagaggtgcacagcggcgtgtgtaccgacccccagccactgaaagaacagcccgccctgaacgacagccggtactgcctgagcagcagactgagagtgtccgccaccttctggcagaacccccggaaccacttcagatgccaggtgcagttctacggcctgagcgagaacgacgagtggacccaggacagagccaagcccgtgacccagatcgtgtctgccgaagcctggggcagagccgattgcgacgtgaagctggtggaaaagagcttcgagacagacaccaacctgaacttccagaacctgagcgtgatcggcttcagaatcctgctgctgaaagtggccggctttaacctgctgatgaccctgcggctgtggtccagcaggagtaagaggagcaggctcctgcacagtgactacatgaacatgactccacgccgccccggacccacccgcaagcattaccagccctatgccccaccacgcgacttcgcagcctatcgctccagagtgaagttcagcagaagcgccgacgcccctgcctaccagcagggacagaaccaactgtacaacgagctgaacctgggcagacgggaagagtacgacgtgctggacaagcggagaggcagggaccctgagatgggcggaaagccccagcggagaaagaacccccaggaaggactgtataacgaactccagaaagacaagatggccgaagcctacagcgagatcggcatgaagggcgagcggagaagaggcaagggccacgatggcctgtaccagggcctgagcaccgccaccaaggacacctatgacgccctgcacatgcaggccctgcctccaaga

SEQ ID NO: 25470 - DNA, 942 bp, synthetic construct
  source 1..942: mol_type = other DNA
gaggccgagatcagccacacccagaaagccaccctcgtgtgcctggctaccggcttctaccccgaccatgtggaactgtcttggtgggtcaacggcaaagaggtgcacagcggcgtgtgtaccgacccccagccactgaaagaacagcccgccctgaacgacagccggtactgcctgagcagcagactgagagtgtccgccaccttctggcagaacccccggaaccacttcagatgccaggtgcagttctacggcctgagcgagaacgacgagtggacccaggacagagccaagcccgtgacccagatcgtgtctgccgaagcctggggcagagccgattgcgacgtgaagctggtggaaaagagcttcgagacagacaccaacctgaacttccagaacctgagcgtgatcggcttcagaatcctgctgctgaaagtggccggctttaacctgctgatgaccctgcggctgtggtccagcaggagtaagaggagcaggctcctgcacagtgactacatgaacatgactccacgccgccccggacccacccgcaagcattaccagccctatgccccaccacgcgacttcgcagcctatcgctccagagtgaagttcagcagaagcgccgacgcccctgcctaccagcagggacagaaccaactgtacaacgagctgaacctgggcagacgggaagagtacgacgtgctggacaagcggagaggcagggaccctgagatgggcggaaagccccagcggagaaagaacccccaggaaggactgtataacgaactccagaaagacaagatggccgaagcctacagcgagatcggcatgaagggcgagcggagaagaggcaagggccacgatggcctgtaccagggcctgagcaccgccaccaaggacacctatgacgccctgcacatgcaggccctgcctccaaga

SEQ ID NO: 25471 - DNA, 939 bp, synthetic construct
  source 1..939: mol_type = other DNA
gccgagatcagccacacccagaaagccaccctcgtgtgcctggctaccggcttctaccccgaccatgtggaactgtcttggtgggtcaacggcaaagaggtgcacagcggcgtgtgtaccgacccccagccactgaaagaacagcccgccctgaacgacagccggtactgcctgagcagcagactgagagtgtccgccaccttctggcagaacccccggaaccacttcagatgccaggtgcagttctacggcctgagcgagaacgacgagtggacccaggacagagccaagcccgtgacccagatcgtgtctgccgaagcctggggcagagccgattgcgacgtgaagctggtggaaaagagcttcgagacagacaccaacctgaacttccagaacctgagcgtgatcggcttcagaatcctgctgctgaaagtggccggctttaacctgctgatgaccctgcggctgtggtccagcaggagtaagaggagcaggctcctgcacagtgactacatgaacatgactccacgccgccccggacccacccgcaagcattaccagccctatgccccaccacgcgacttcgcagcctatcgctccagagtgaagttcagcagaagcgccgacgcccctgcctaccagcagggacagaaccaactgtacaacgagctgaacctgggcagacgggaagagtacgacgtgctggacaagcggagaggcagggaccctgagatgggcggaaagccccagcggagaaagaacccccaggaaggactgtataacgaactccagaaagacaagatggccgaagcctacagcgagatcggcatgaagggcgagcggagaagaggcaagggccacgatggcctgtaccagggcctgagcaccgccaccaaggacacctatgacgccctgcacatgcaggccctgcctccaaga

SEQ ID NO: 25472 - DNA, 936 bp, synthetic construct
  source 1..936: mol_type = other DNA
gagatcagccacacccagaaagccaccctcgtgtgcctggctaccggcttctaccccgaccatgtggaactgtcttggtgggtcaacggcaaagaggtgcacagcggcgtgtgtaccgacccccagccactgaaagaacagcccgccctgaacgacagccggtactgcctgagcagcagactgagagtgtccgccaccttctggcagaacccccggaaccacttcagatgccaggtgcagttctacggcctgagcgagaacgacgagtggacccaggacagagccaagcccgtgacccagatcgtgtctgccgaagcctggggcagagccgattgcgacgtgaagctggtggaaaagagcttcgagacagacaccaacctgaacttccagaacctgagcgtgatcggcttcagaatcctgctgctgaaagtggccggctttaacctgctgatgaccctgcggctgtggtccagcaggagtaagaggagcaggctcctgcacagtgactacatgaacatgactccacgccgccccggacccacccgcaagcattaccagccctatgccccaccacgcgacttcgcagcctatcgctccagagtgaagttcagcagaagcgccgacgcccctgcctaccagcagggacagaaccaactgtacaacgagctgaacctgggcagacgggaagagtacgacgtgctggacaagcggagaggcagggaccctgagatgggcggaaagccccagcggagaaagaacccccaggaaggactgtataacgaactccagaaagacaagatggccgaagcctacagcgagatcggcatgaagggcgagcggagaagaggcaagggccacgatggcctgtaccagggcctgagcaccgccaccaaggacacctatgacgccctgcacatgcaggccctgcctccaaga

SEQ ID NO: 25473 - DNA, 933 bp, synthetic construct
  source 1..933: mol_type = other DNA
atcagccacacccagaaagccaccctcgtgtgcctggctaccggcttctaccccgaccatgtggaactgtcttggtgggtcaacggcaaagaggtgcacagcggcgtgtgtaccgacccccagccactgaaagaacagcccgccctgaacgacagccggtactgcctgagcagcagactgagagtgtccgccaccttctggcagaacccccggaaccacttcagatgccaggtgcagttctacggcctgagcgagaacgacgagtggacccaggacagagccaagcccgtgacccagatcgtgtctgccgaagcctggggcagagccgattgcgacgtgaagctggtggaaaagagcttcgagacagacaccaacctgaacttccagaacctgagcgtgatcggcttcagaatcctgctgctgaaagtggccggctttaacctgctgatgaccctgcggctgtggtccagcaggagtaagaggagcaggctcctgcacagtgactacatgaacatgactccacgccgccccggacccacccgcaagcattaccagccctatgccccaccacgcgacttcgcagcctatcgctccagagtgaagttcagcagaagcgccgacgcccctgcctaccagcagggacagaaccaactgtacaacgagctgaacctgggcagacgggaagagtacgacgtgctggacaagcggagaggcagggaccctgagatgggcggaaagccccagcggagaaagaacccccaggaaggactgtataacgaactccagaaagacaagatggccgaagcctacagcgagatcggcatgaagggcgagcggagaagaggcaagggccacgatggcctgtaccagggcctgagcaccgccaccaaggacacctatgacgccctgcacatgcaggccctgcctccaaga

SEQ ID NO: 25474 - DNA, 930 bp, synthetic construct
  source 1..930: mol_type = other DNA
agccacacccagaaagccaccctcgtgtgcctggctaccggcttctaccccgaccatgtggaactgtcttggtgggtcaacggcaaagaggtgcacagcggcgtgtgtaccgacccccagccactgaaagaacagcccgccctgaacgacagccggtactgcctgagcagcagactgagagtgtccgccaccttctggcagaacccccggaaccacttcagatgccaggtgcagttctacggcctgagcgagaacgacgagtggacccaggacagagccaagcccgtgacccagatcgtgtctgccgaagcctggggcagagccgattgcgacgtgaagctggtggaaaagagcttcgagacagacaccaacctgaacttccagaacctgagcgtgatcggcttcagaatcctgctgctgaaagtggccggctttaacctgctgatgaccctgcggctgtggtccagcaggagtaagaggagcaggctcctgcacagtgactacatgaacatgactccacgccgccccggacccacccgcaagcattaccagccctatgccccaccacgcgacttcgcagcctatcgctccagagtgaagttcagcagaagcgccgacgcccctgcctaccagcagggacagaaccaactgtacaacgagctgaacctgggcagacgggaagagtacgacgtgctggacaagcggagaggcagggaccctgagatgggcggaaagccccagcggagaaagaacccccaggaaggactgtataacgaactccagaaagacaagatggccgaagcctacagcgagatcggcatgaagggcgagcggagaagaggcaagggccacgatggcctgtaccagggcctgagcaccgccaccaaggacacctatgacgccctgcacatgcaggccctgcctccaaga

SEQ ID NO: 25475 - DNA, 915 bp, synthetic construct
  source 1..915: mol_type = other DNA
gccaccctcgtgtgcctggctaccggcttctaccccgaccatgtggaactgtcttggtgggtcaacggcaaagaggtgcacagcggcgtgtgtaccgacccccagccactgaaagaacagcccgccctgaacgacagccggtactgcctgagcagcagactgagagtgtccgccaccttctggcagaacccccggaaccacttcagatgccaggtgcagttctacggcctgagcgagaacgacgagtggacccaggacagagccaagcccgtgacccagatcgtgtctgccgaagcctggggcagagccgattgcgacgtgaagctggtggaaaagagcttcgagacagacaccaacctgaacttccagaacctgagcgtgatcggcttcagaatcctgctgctgaaagtggccggctttaacctgctgatgaccctgcggctgtggtccagcaggagtaagaggagcaggctcctgcacagtgactacatgaacatgactccacgccgccccggacccacccgcaagcattaccagccctatgccccaccacgcgacttcgcagcctatcgctccagagtgaagttcagcagaagcgccgacgcccctgcctaccagcagggacagaaccaactgtacaacgagctgaacctgggcagacgggaagagtacgacgtgctggacaagcggagaggcagggaccctgagatgggcggaaagccccagcggagaaagaacccccaggaaggactgtataacgaactccagaaagacaagatggccgaagcctacagcgagatcggcatgaagggcgagcggagaagaggcaagggccacgatggcctgtaccagggcctgagcaccgccaccaaggacacctatgacgccctgcacatgcaggccctgcctccaaga

SEQ ID NO: 25476 - DNA, 900 bp, synthetic construct
  source 1..900: mol_type = other DNA
ctggctaccggcttctaccccgaccatgtggaactgtcttggtgggtcaacggcaaagaggtgcacagcggcgtgtgtaccgacccccagccactgaaagaacagcccgccctgaacgacagccggtactgcctgagcagcagactgagagtgtccgccaccttctggcagaacccccggaaccacttcagatgccaggtgcagttctacggcctgagcgagaacgacgagtggacccaggacagagccaagcccgtgacccagatcgtgtctgccgaagcctggggcagagccgattgcgacgtgaagctggtggaaaagagcttcgagacagacaccaacctgaacttccagaacctgagcgtgatcggcttcagaatcctgctgctgaaagtggccggctttaacctgctgatgaccctgcggctgtggtccagcaggagtaagaggagcaggctcctgcacagtgactacatgaacatgactccacgccgccccggacccacccgcaagcattaccagccctatgccccaccacgcgacttcgcagcctatcgctccagagtgaagttcagcagaagcgccgacgcccctgcctaccagcagggacagaaccaactgtacaacgagctgaacctgggcagacgggaagagtacgacgtgctggacaagcggagaggcagggaccctgagatgggcggaaagccccagcggagaaagaacccccaggaaggactgtataacgaactccagaaagacaagatggccgaagcctacagcgagatcggcatgaagggcgagcggagaagaggcaagggccacgatggcctgtaccagggcctgagcaccgccaccaaggacacctatgacgccctgcacatgcaggccctgcctccaaga

SEQ ID NO: 25477 - DNA, 981 bp, synthetic construct
  source 1..981: mol_type = other DNA
gacctgaagaacgtgttcccacctgaggtggccgtgttcgagcctagcgaggccgagatcagccacacccagaaagccaccctcgtgtgcctggctaccggcttctaccccgaccatgtggaactgtcttggtgggtcaacggcaaagaggtgcacagcggcgtgtgtaccgacccccagccactgaaagaacagcccgccctgaacgacagccggtactgcctgagcagcagactgagagtgtccgccaccttctggcagaacccccggaaccacttcagatgccaggtgcagttctacggcctgagcgagaacgacgagtggacccaggacagagccaagcccgtgacccagatcgtgtctgccgaagcctggggcagagccgattgcggctttaccagcgagagctaccagcagggcgtgctgagcgccaccaacctgagcgtgatcggcttcagaatcctgctgctgaaagtggccggctttaacctgctgatgaccctgcggctgtggtccagcaggagtaagaggagcaggctcctgcacagtgactacatgaacatgactccacgccgccccggacccacccgcaagcattaccagccctatgccccaccacgcgacttcgcagcctatcgctccagagtgaagttcagcagaagcgccgacgcccctgcctaccagcagggacagaaccaactgtacaacgagctgaacctgggcagacgggaagagtacgacgtgctggacaagcggagaggcagggaccctgagatgggcggaaagccccagcggagaaagaacccccaggaaggactgtataacgaactccagaaagacaagatggccgaagcctacagcgagatcggcatgaagggcgagcggagaagaggcaagggccacgatggcctgtaccagggcctgagcaccgccaccaaggacacctatgacgccctgcacatgcaggccctgcctccaaga

SEQ ID NO: 25478 - DNA, 978 bp, synthetic construct
  source 1..978: mol_type = other DNA
ctgaagaacgtgttcccacctgaggtggccgtgttcgagcctagcgaggccgagatcagccacacccagaaagccaccctcgtgtgcctggctaccggcttctaccccgaccatgtggaactgtcttggtgggtcaacggcaaagaggtgcacagcggcgtgtgtaccgacccccagccactgaaagaacagcccgccctgaacgacagccggtactgcctgagcagcagactgagagtgtccgccaccttctggcagaacccccggaaccacttcagatgccaggtgcagttctacggcctgagcgagaacgacgagtggacccaggacagagccaagcccgtgacccagatcgtgtctgccgaagcctggggcagagccgattgcggctttaccagcgagagctaccagcagggcgtgctgagcgccaccaacctgagcgtgatcggcttcagaatcctgctgctgaaagtggccggctttaacctgctgatgaccctgcggctgtggtccagcaggagtaagaggagcaggctcctgcacagtgactacatgaacatgactccacgccgccccggacccacccgcaagcattaccagccctatgccccaccacgcgacttcgcagcctatcgctccagagtgaagttcagcagaagcgccgacgcccctgcctaccagcagggacagaaccaactgtacaacgagctgaacctgggcagacgggaagagtacgacgtgctggacaagcggagaggcagggaccctgagatgggcggaaagccccagcggagaaagaacccccaggaaggactgtataacgaactccagaaagacaagatggccgaagcctacagcgagatcggcatgaagggcgagcggagaagaggcaagggccacgatggcctgtaccagggcctgagcaccgccaccaaggacacctatgacgccctgcacatgcaggccctgcctccaaga

SEQ ID NO: 25479 - DNA, 975 bp, synthetic construct
  source 1..975: mol_type = other DNA
aagaacgtgttcccacctgaggtggccgtgttcgagcctagcgaggccgagatcagccacacccagaaagccaccctcgtgtgcctggctaccggcttctaccccgaccatgtggaactgtcttggtgggtcaacggcaaagaggtgcacagcggcgtgtgtaccgacccccagccactgaaagaacagcccgccctgaacgacagccggtactgcctgagcagcagactgagagtgtccgccaccttctggcagaacccccggaaccacttcagatgccaggtgcagttctacggcctgagcgagaacgacgagtggacccaggacagagccaagcccgtgacccagatcgtgtctgccgaagcctggggcagagccgattgcggctttaccagcgagagctaccagcagggcgtgctgagcgccaccaacctgagcgtgatcggcttcagaatcctgctgctgaaagtggccggctttaacctgctgatgaccctgcggctgtggtccagcaggagtaagaggagcaggctcctgcacagtgactacatgaacatgactccacgccgccccggacccacccgcaagcattaccagccctatgccccaccacgcgacttcgcagcctatcgctccagagtgaagttcagcagaagcgccgacgcccctgcctaccagcagggacagaaccaactgtacaacgagctgaacctgggcagacgggaagagtacgacgtgctggacaagcggagaggcagggaccctgagatgggcggaaagccccagcggagaaagaacccccaggaaggactgtataacgaactccagaaagacaagatggccgaagcctacagcgagatcggcatgaagggcgagcggagaagaggcaagggccacgatggcctgtaccagggcctgagcaccgccaccaaggacacctatgacgccctgcacatgcaggccctgcctccaaga

SEQ ID NO: 25480 - DNA, 972 bp, synthetic construct
  source 1..972: mol_type = other DNA
aacgtgttcccacctgaggtggccgtgttcgagcctagcgaggccgagatcagccacacccagaaagccaccctcgtgtgcctggctaccggcttctaccccgaccatgtggaactgtcttggtgggtcaacggcaaagaggtgcacagcggcgtgtgtaccgacccccagccactgaaagaacagcccgccctgaacgacagccggtactgcctgagcagcagactgagagtgtccgccaccttctggcagaacccccggaaccacttcagatgccaggtgcagttctacggcctgagcgagaacgacgagtggacccaggacagagccaagcccgtgacccagatcgtgtctgccgaagcctggggcagagccgattgcggctttaccagcgagagctaccagcagggcgtgctgagcgccaccaacctgagcgtgatcggcttcagaatcctgctgctgaaagtggccggctttaacctgctgatgaccctgcggctgtggtccagcaggagtaagaggagcaggctcctgcacagtgactacatgaacatgactccacgccgccccggacccacccgcaagcattaccagccctatgccccaccacgcgacttcgcagcctatcgctccagagtgaagttcagcagaagcgccgacgcccctgcctaccagcagggacagaaccaactgtacaacgagctgaacctgggcagacgggaagagtacgacgtgctggacaagcggagaggcagggaccctgagatgggcggaaagccccagcggagaaagaacccccaggaaggactgtataacgaactccagaaagacaagatggccgaagcctacagcgagatcggcatgaagggcgagcggagaagaggcaagggccacgatggcctgtaccagggcctgagcaccgccaccaaggacacctatgacgccctgcacatgcaggccctgcctccaaga

SEQ ID NO: 25481 - DNA, 969 bp, synthetic construct
  source 1..969: mol_type = other DNA
gtgttcccacctgaggtggccgtgttcgagcctagcgaggccgagatcagccacacccagaaagccaccctcgtgtgcctggctaccggcttctaccccgaccatgtggaactgtcttggtgggtcaacggcaaagaggtgcacagcggcgtgtgtaccgacccccagccactgaaagaacagcccgccctgaacgacagccggtactgcctgagcagcagactgagagtgtccgccaccttctggcagaacccccggaaccacttcagatgccaggtgcagttctacggcctgagcgagaacgacgagtggacccaggacagagccaagcccgtgacccagatcgtgtctgccgaagcctggggcagagccgattgcggctttaccagcgagagctaccagcagggcgtgctgagcgccaccaacctgagcgtgatcggcttcagaatcctgctgctgaaagtggccggctttaacctgctgatgaccctgcggctgtggtccagcaggagtaagaggagcaggctcctgcacagtgactacatgaacatgactccacgccgccccggacccacccgcaagcattaccagccctatgccccaccacgcgacttcgcagcctatcgctccagagtgaagttcagcagaagcgccgacgcccctgcctaccagcagggacagaaccaactgtacaacgagctgaacctgggcagacgggaagagtacgacgtgctggacaagcggagaggcagggaccctgagatgggcggaaagccccagcggagaaagaacccccaggaaggactgtataacgaactccagaaagacaagatggccgaagcctacagcgagatcggcatgaagggcgagcggagaagaggcaagggccacgatggcctgtaccagggcctgagcaccgccaccaaggacacctatgacgccctgcacatgcaggccctgcctccaaga

SEQ ID NO: 25482 - DNA, 966 bp, synthetic construct
  source 1..966: mol_type = other DNA
ttcccacctgaggtggccgtgttcgagcctagcgaggccgagatcagccacacccagaaagccaccctcgtgtgcctggctaccggcttctaccccgaccatgtggaactgtcttggtgggtcaacggcaaagaggtgcacagcggcgtgtgtaccgacccccagccactgaaagaacagcccgccctgaacgacagccggtactgcctgagcagcagactgagagtgtccgccaccttctggcagaacccccggaaccacttcagatgccaggtgcagttctacggcctgagcgagaacgacgagtggacccaggacagagccaagcccgtgacccagatcgtgtctgccgaagcctggggcagagccgattgcggctttaccagcgagagctaccagcagggcgtgctgagcgccaccaacctgagcgtgatcggcttcagaatcctgctgctgaaagtggccggctttaacctgctgatgaccctgcggctgtggtccagcaggagtaagaggagcaggctcctgcacagtgactacatgaacatgactccacgccgccccggacccacccgcaagcattaccagccctatgccccaccacgcgacttcgcagcctatcgctccagagtgaagttcagcagaagcgccgacgcccctgcctaccagcagggacagaaccaactgtacaacgagctgaacctgggcagacgggaagagtacgacgtgctggacaagcggagaggcagggaccctgagatgggcggaaagccccagcggagaaagaacccccaggaaggactgtataacgaactccagaaagacaagatggccgaagcctacagcgagatcggcatgaagggcgagcggagaagaggcaagggccacgatggcctgtaccagggcctgagcaccgccaccaaggacacctatgacgccctgcacatgcaggccctgcctccaaga

SEQ ID NO: 25483 - DNA, 963 bp, synthetic construct
  source 1..963: mol_type = other DNA
ccacctgaggtggccgtgttcgagcctagcgaggccgagatcagccacacccagaaagccaccctcgtgtgcctggctaccggcttctaccccgaccatgtggaactgtcttggtgggtcaacggcaaagaggtgcacagcggcgtgtgtaccgacccccagccactgaaagaacagcccgccctgaacgacagccggtactgcctgagcagcagactgagagtgtccgccaccttctggcagaacccccggaaccacttcagatgccaggtgcagttctacggcctgagcgagaacgacgagtggacccaggacagagccaagcccgtgacccagatcgtgtctgccgaagcctggggcagagccgattgcggctttaccagcgagagctaccagcagggcgtgctgagcgccaccaacctgagcgtgatcggcttcagaatcctgctgctgaaagtggccggctttaacctgctgatgaccctgcggctgtggtccagcaggagtaagaggagcaggctcctgcacagtgactacatgaacatgactccacgccgccccggacccacccgcaagcattaccagccctatgccccaccacgcgacttcgcagcctatcgctccagagtgaagttcagcagaagcgccgacgcccctgcctaccagcagggacagaaccaactgtacaacgagctgaacctgggcagacgggaagagtacgacgtgctggacaagcggagaggcagggaccctgagatgggcggaaagccccagcggagaaagaacccccaggaaggactgtataacgaactccagaaagacaagatggccgaagcctacagcgagatcggcatgaagggcgagcggagaagaggcaagggccacgatggcctgtaccagggcctgagcaccgccaccaaggacacctatgacgccctgcacatgcaggccctgcctccaaga

SEQ ID NO: 25484 - DNA, 960 bp, synthetic construct
  source 1..960: mol_type = other DNA
cctgaggtggccgtgttcgagcctagcgaggccgagatcagccacacccagaaagccaccctcgtgtgcctggctaccggcttctaccccgaccatgtggaactgtcttggtgggtcaacggcaaagaggtgcacagcggcgtgtgtaccgacccccagccactgaaagaacagcccgccctgaacgacagccggtactgcctgagcagcagactgagagtgtccgccaccttctggcagaacccccggaaccacttcagatgccaggtgcagttctacggcctgagcgagaacgacgagtggacccaggacagagccaagcccgtgacccagatcgtgtctgccgaagcctggggcagagccgattgcggctttaccagcgagagctaccagcagggcgtgctgagcgccaccaacctgagcgtgatcggcttcagaatcctgctgctgaaagtggccggctttaacctgctgatgaccctgcggctgtggtccagcaggagtaagaggagcaggctcctgcacagtgactacatgaacatgactccacgccgccccggacccacccgcaagcattaccagccctatgccccaccacgcgacttcgcagcctatcgctccagagtgaagttcagcagaagcgccgacgcccctgcctaccagcagggacagaaccaactgtacaacgagctgaacctgggcagacgggaagagtacgacgtgctggacaagcggagaggcagggaccctgagatgggcggaaagccccagcggagaaagaacccccaggaaggactgtataacgaactccagaaagacaagatggccgaagcctacagcgagatcggcatgaagggcgagcggagaagaggcaagggccacgatggcctgtaccagggcctgagcaccgccaccaaggacacctatgacgccctgcacatgcaggccctgcctccaaga

SEQ ID NO: 25485 - DNA, 957 bp, synthetic construct
  source 1..957: mol_type = other DNA
gaggtggccgtgttcgagcctagcgaggccgagatcagccacacccagaaagccaccctcgtgtgcctggctaccggcttctaccccgaccatgtggaactgtcttggtgggtcaacggcaaagaggtgcacagcggcgtgtgtaccgacccccagccactgaaagaacagcccgccctgaacgacagccggtactgcctgagcagcagactgagagtgtccgccaccttctggcagaacccccggaaccacttcagatgccaggtgcagttctacggcctgagcgagaacgacgagtggacccaggacagagccaagcccgtgacccagatcgtgtctgccgaagcctggggcagagccgattgcggctttaccagcgagagctaccagcagggcgtgctgagcgccaccaacctgagcgtgatcggcttcagaatcctgctgctgaaagtggccggctttaacctgctgatgaccctgcggctgtggtccagcaggagtaagaggagcaggctcctgcacagtgactacatgaacatgactccacgccgccccggacccacccgcaagcattaccagccctatgccccaccacgcgacttcgcagcctatcgctccagagtgaagttcagcagaagcgccgacgcccctgcctaccagcagggacagaaccaactgtacaacgagctgaacctgggcagacgggaagagtacgacgtgctggacaagcggagaggcagggaccctgagatgggcggaaagccccagcggagaaagaacccccaggaaggactgtataacgaactccagaaagacaagatggccgaagcctacagcgagatcggcatgaagggcgagcggagaagaggcaagggccacgatggcctgtaccagggcctgagcaccgccaccaaggacacctatgacgccctgcacatgcaggccctgcctccaaga

SEQ ID NO: 25486 - DNA, 954 bp, synthetic construct
  source 1..954: mol_type = other DNA
gtggccgtgttcgagcctagcgaggccgagatcagccacacccagaaagccaccctcgtgtgcctggctaccggcttctaccccgaccatgtggaactgtcttggtgggtcaacggcaaagaggtgcacagcggcgtgtgtaccgacccccagccactgaaagaacagcccgccctgaacgacagccggtactgcctgagcagcagactgagagtgtccgccaccttctggcagaacccccggaaccacttcagatgccaggtgcagttctacggcctgagcgagaacgacgagtggacccaggacagagccaagcccgtgacccagatcgtgtctgccgaagcctggggcagagccgattgcggctttaccagcgagagctaccagcagggcgtgctgagcgccaccaacctgagcgtgatcggcttcagaatcctgctgctgaaagtggccggctttaacctgctgatgaccctgcggctgtggtccagcaggagtaagaggagcaggctcctgcacagtgactacatgaacatgactccacgccgccccggacccacccgcaagcattaccagccctatgccccaccacgcgacttcgcagcctatcgctccagagtgaagttcagcagaagcgccgacgcccctgcctaccagcagggacagaaccaactgtacaacgagctgaacctgggcagacgggaagagtacgacgtgctggacaagcggagaggcagggaccctgagatgggcggaaagccccagcggagaaagaacccccaggaaggactgtataacgaactccagaaagacaagatggccgaagcctacagcgagatcggcatgaagggcgagcggagaagaggcaagggccacgatggcctgtaccagggcctgagcaccgccaccaaggacacctatgacgccctgcacatgcaggccctgcctccaaga

SEQ ID NO: 25487 - DNA, 951 bp, synthetic construct
  source 1..951: mol_type = other DNA
gccgtgttcgagcctagcgaggccgagatcagccacacccagaaagccaccctcgtgtgcctggctaccggcttctaccccgaccatgtggaactgtcttggtgggtcaacggcaaagaggtgcacagcggcgtgtgtaccgacccccagccactgaaagaacagcccgccctgaacgacagccggtactgcctgagcagcagactgagagtgtccgccaccttctggcagaacccccggaaccacttcagatgccaggtgcagttctacggcctgagcgagaacgacgagtggacccaggacagagccaagcccgtgacccagatcgtgtctgccgaagcctggggcagagccgattgcggctttaccagcgagagctaccagcagggcgtgctgagcgccaccaacctgagcgtgatcggcttcagaatcctgctgctgaaagtggccggctttaacctgctgatgaccctgcggctgtggtccagcaggagtaagaggagcaggctcctgcacagtgactacatgaacatgactccacgccgccccggacccacccgcaagcattaccagccctatgccccaccacgcgacttcgcagcctatcgctccagagtgaagttcagcagaagcgccgacgcccctgcctaccagcagggacagaaccaactgtacaacgagctgaacctgggcagacgggaagagtacgacgtgctggacaagcggagaggcagggaccctgagatgggcggaaagccccagcggagaaagaacccccaggaaggactgtataacgaactccagaaagacaagatggccgaagcctacagcgagatcggcatgaagggcgagcggagaagaggcaagggccacgatggcctgtaccagggcctgagcaccgccaccaaggacacctatgacgccctgcacatgcaggccctgcctccaaga

SEQ ID NO: 25488 - DNA, 948 bp, synthetic construct
  source 1..948: mol_type = other DNA
gtgttcgagcctagcgaggccgagatcagccacacccagaaagccaccctcgtgtgcctggctaccggcttctaccccgaccatgtggaactgtcttggtgggtcaacggcaaagaggtgcacagcggcgtgtgtaccgacccccagccactgaaagaacagcccgccctgaacgacagccggtactgcctgagcagcagactgagagtgtccgccaccttctggcagaacccccggaaccacttcagatgccaggtgcagttctacggcctgagcgagaacgacgagtggacccaggacagagccaagcccgtgacccagatcgtgtctgccgaagcctggggcagagccgattgcggctttaccagcgagagctaccagcagggcgtgctgagcgccaccaacctgagcgtgatcggcttcagaatcctgctgctgaaagtggccggctttaacctgctgatgaccctgcggctgtggtccagcaggagtaagaggagcaggctcctgcacagtgactacatgaacatgactccacgccgccccggacccacccgcaagcattaccagccctatgccccaccacgcgacttcgcagcctatcgctccagagtgaagttcagcagaagcgccgacgcccctgcctaccagcagggacagaaccaactgtacaacgagctgaacctgggcagacgggaagagtacgacgtgctggacaagcggagaggcagggaccctgagatgggcggaaagccccagcggagaaagaacccccaggaaggactgtataacgaactccagaaagacaagatggccgaagcctacagcgagatcggcatgaagggcgagcggagaagaggcaagggccacgatggcctgtaccagggcctgagcaccgccaccaaggacacctatgacgccctgcacatgcaggccctgcctccaaga

SEQ ID NO: 25489 - DNA, 945 bp, synthetic construct
  source 1..945: mol_type = other DNA
ttcgagcctagcgaggccgagatcagccacacccagaaagccaccctcgtgtgcctggctaccggcttctaccccgaccatgtggaactgtcttggtgggtcaacggcaaagaggtgcacagcggcgtgtgtaccgacccccagccactgaaagaacagcccgccctgaacgacagccggtactgcctgagcagcagactgagagtgtccgccaccttctggcagaacccccggaaccacttcagatgccaggtgcagttctacggcctgagcgagaacgacgagtggacccaggacagagccaagcccgtgacccagatcgtgtctgccgaagcctggggcagagccgattgcggctttaccagcgagagctaccagcagggcgtgctgagcgccaccaacctgagcgtgatcggcttcagaatcctgctgctgaaagtggccggctttaacctgctgatgaccctgcggctgtggtccagcaggagtaagaggagcaggctcctgcacagtgactacatgaacatgactccacgccgccccggacccacccgcaagcattaccagccctatgccccaccacgcgacttcgcagcctatcgctccagagtgaagttcagcagaagcgccgacgcccctgcctaccagcagggacagaaccaactgtacaacgagctgaacctgggcagacgggaagagtacgacgtgctggacaagcggagaggcagggaccctgagatgggcggaaagccccagcggagaaagaacccccaggaaggactgtataacgaactccagaaagacaagatggccgaagcctacagcgagatcggcatgaagggcgagcggagaagaggcaagggccacgatggcctgtaccagggcctgagcaccgccaccaaggacacctatgacgccctgcacatgcaggccctgcctccaaga

SEQ ID NO: 25490 - DNA, 942 bp, synthetic construct
  source 1..942: mol_type = other DNA
gagcctagcgaggccgagatcagccacacccagaaagccaccctcgtgtgcctggctaccggcttctaccccgaccatgtggaactgtcttggtgggtcaacggcaaagaggtgcacagcggcgtgtgtaccgacccccagccactgaaagaacagcccgccctgaacgacagccggtactgcctgagcagcagactgagagtgtccgccaccttctggcagaacccccggaaccacttcagatgccaggtgcagttctacggcctgagcgagaacgacgagtggacccaggacagagccaagcccgtgacccagatcgtgtctgccgaagcctggggcagagccgattgcggctttaccagcgagagctaccagcagggcgtgctgagcgccaccaacctgagcgtgatcggcttcagaatcctgctgctgaaagtggccggctttaacctgctgatgaccctgcggctgtggtccagcaggagtaagaggagcaggctcctgcacagtgactacatgaacatgactccacgccgccccggacccacccgcaagcattaccagccctatgccccaccacgcgacttcgcagcctatcgctccagagtgaagttcagcagaagcgccgacgcccctgcctaccagcagggacagaaccaactgtacaacgagctgaacctgggcagacgggaagagtacgacgtgctggacaagcggagaggcagggaccctgagatgggcggaaagccccagcggagaaagaacccccaggaaggactgtataacgaactccagaaagacaagatggccgaagcctacagcgagatcggcatgaagggcgagcggagaagaggcaagggccacgatggcctgtaccagggcctgagcaccgccaccaaggacacctatgacgccctgcacatgcaggccctgcctccaaga

SEQ ID NO: 25491 - DNA, 939 bp, synthetic construct
  source 1..939: mol_type = other DNA
cctagcgaggccgagatcagccacacccagaaagccaccctcgtgtgcctggctaccggcttctaccccgaccatgtggaactgtcttggtgggtcaacggcaaagaggtgcacagcggcgtgtgtaccgacccccagccactgaaagaacagcccgccctgaacgacagccggtactgcctgagcagcagactgagagtgtccgccaccttctggcagaacccccggaaccacttcagatgccaggtgcagttctacggcctgagcgagaacgacgagtggacccaggacagagccaagcccgtgacccagatcgtgtctgccgaagcctggggcagagccgattgcggctttaccagcgagagctaccagcagggcgtgctgagcgccaccaacctgagcgtgatcggcttcagaatcctgctgctgaaagtggccggctttaacctgctgatgaccctgcggctgtggtccagcaggagtaagaggagcaggctcctgcacagtgactacatgaacatgactccacgccgccccggacccacccgcaagcattaccagccctatgccccaccacgcgacttcgcagcctatcgctccagagtgaagttcagcagaagcgccgacgcccctgcctaccagcagggacagaaccaactgtacaacgagctgaacctgggcagacgggaagagtacgacgtgctggacaagcggagaggcagggaccctgagatgggcggaaagccccagcggagaaagaacccccaggaaggactgtataacgaactccagaaagacaagatggccgaagcctacagcgagatcggcatgaagggcgagcggagaagaggcaagggccacgatggcctgtaccagggcctgagcaccgccaccaaggacacctatgacgccctgcacatgcaggccctgcctccaaga

SEQ ID NO: 25492 - DNA, 936 bp, synthetic construct
  source 1..936: mol_type = other DNA
agcgaggccgagatcagccacacccagaaagccaccctcgtgtgcctggctaccggcttctaccccgaccatgtggaactgtcttggtgggtcaacggcaaagaggtgcacagcggcgtgtgtaccgacccccagccactgaaagaacagcccgccctgaacgacagccggtactgcctgagcagcagactgagagtgtccgccaccttctggcagaacccccggaaccacttcagatgccaggtgcagttctacggcctgagcgagaacgacgagtggacccaggacagagccaagcccgtgacccagatcgtgtctgccgaagcctggggcagagccgattgcggctttaccagcgagagctaccagcagggcgtgctgagcgccaccaacctgagcgtgatcggcttcagaatcctgctgctgaaagtggccggctttaacctgctgatgaccctgcggctgtggtccagcaggagtaagaggagcaggctcctgcacagtgactacatgaacatgactccacgccgccccggacccacccgcaagcattaccagccctatgccccaccacgcgacttcgcagcctatcgctccagagtgaagttcagcagaagcgccgacgcccctgcctaccagcagggacagaaccaactgtacaacgagctgaacctgggcagacgggaagagtacgacgtgctggacaagcggagaggcagggaccctgagatgggcggaaagccccagcggagaaagaacccccaggaaggactgtataacgaactccagaaagacaagatggccgaagcctacagcgagatcggcatgaagggcgagcggagaagaggcaagggccacgatggcctgtaccagggcctgagcaccgccaccaaggacacctatgacgccctgcacatgcaggccctgcctccaaga

SEQ ID NO: 25493 - DNA, 933 bp, synthetic construct
  source 1..933: mol_type = other DNA
gaggccgagatcagccacacccagaaagccaccctcgtgtgcctggctaccggcttctaccccgaccatgtggaactgtcttggtgggtcaacggcaaagaggtgcacagcggcgtgtgtaccgacccccagccactgaaagaacagcccgccctgaacgacagccggtactgcctgagcagcagactgagagtgtccgccaccttctggcagaacccccggaaccacttcagatgccaggtgcagttctacggcctgagcgagaacgacgagtggacccaggacagagccaagcccgtgacccagatcgtgtctgccgaagcctggggcagagccgattgcggctttaccagcgagagctaccagcagggcgtgctgagcgccaccaacctgagcgtgatcggcttcagaatcctgctgctgaaagtggccggctttaacctgctgatgaccctgcggctgtggtccagcaggagtaagaggagcaggctcctgcacagtgactacatgaacatgactccacgccgccccggacccacccgcaagcattaccagccctatgccccaccacgcgacttcgcagcctatcgctccagagtgaagttcagcagaagcgccgacgcccctgcctaccagcagggacagaaccaactgtacaacgagctgaacctgggcagacgggaagagtacgacgtgctggacaagcggagaggcagggaccctgagatgggcggaaagccccagcggagaaagaacccccaggaaggactgtataacgaactccagaaagacaagatggccgaagcctacagcgagatcggcatgaagggcgagcggagaagaggcaagggccacgatggcctgtaccagggcctgagcaccgccaccaaggacacctatgacgccctgcacatgcaggccctgcctccaaga

SEQ ID NO: 25494 - DNA, 930 bp, synthetic construct
  source 1..930: mol_type = other DNA
gccgagatcagccacacccagaaagccaccctcgtgtgcctggctaccggcttctaccccgaccatgtggaactgtcttggtgggtcaacggcaaagaggtgcacagcggcgtgtgtaccgacccccagccactgaaagaacagcccgccctgaacgacagccggtactgcctgagcagcagactgagagtgtccgccaccttctggcagaacccccggaaccacttcagatgccaggtgcagttctacggcctgagcgagaacgacgagtggacccaggacagagccaagcccgtgacccagatcgtgtctgccgaagcctggggcagagccgattgcggctttaccagcgagagctaccagcagggcgtgctgagcgccaccaacctgagcgtgatcggcttcagaatcctgctgctgaaagtggccggctttaacctgctgatgaccctgcggctgtggtccagcaggagtaagaggagcaggctcctgcacagtgactacatgaacatgactccacgccgccccggacccacccgcaagcattaccagccctatgccccaccacgcgacttcgcagcctatcgctccagagtgaagttcagcagaagcgccgacgcccctgcctaccagcagggacagaaccaactgtacaacgagctgaacctgggcagacgggaagagtacgacgtgctggacaagcggagaggcagggaccctgagatgggcggaaagccccagcggagaaagaacccccaggaaggactgtataacgaactccagaaagacaagatggccgaagcctacagcgagatcggcatgaagggcgagcggagaagaggcaagggccacgatggcctgtaccagggcctgagcaccgccaccaaggacacctatgacgccctgcacatgcaggccctgcctccaaga

SEQ ID NO: 25495 - DNA, 927 bp, synthetic construct
  source 1..927: mol_type = other DNA
gagatcagccacacccagaaagccaccctcgtgtgcctggctaccggcttctaccccgaccatgtggaactgtcttggtgggtcaacggcaaagaggtgcacagcggcgtgtgtaccgacccccagccactgaaagaacagcccgccctgaacgacagccggtactgcctgagcagcagactgagagtgtccgccaccttctggcagaacccccggaaccacttcagatgccaggtgcagttctacggcctgagcgagaacgacgagtggacccaggacagagccaagcccgtgacccagatcgtgtctgccgaagcctggggcagagccgattgcggctttaccagcgagagctaccagcagggcgtgctgagcgccaccaacctgagcgtgatcggcttcagaatcctgctgctgaaagtggccggctttaacctgctgatgaccctgcggctgtggtccagcaggagtaagaggagcaggctcctgcacagtgactacatgaacatgactccacgccgccccggacccacccgcaagcattaccagccctatgccccaccacgcgacttcgcagcctatcgctccagagtgaagttcagcagaagcgccgacgcccctgcctaccagcagggacagaaccaactgtacaacgagctgaacctgggcagacgggaagagtacgacgtgctggacaagcggagaggcagggaccctgagatgggcggaaagccccagcggagaaagaacccccaggaaggactgtataacgaactccagaaagacaagatggccgaagcctacagcgagatcggcatgaagggcgagcggagaagaggcaagggccacgatggcctgtaccagggcctgagcaccgccaccaaggacacctatgacgccctgcacatgcaggccctgcctccaaga

SEQ ID NO: 25496 - DNA, 924 bp, synthetic construct
  source 1..924: mol_type = other DNA
atcagccacacccagaaagccaccctcgtgtgcctggctaccggcttctaccccgaccatgtggaactgtcttggtgggtcaacggcaaagaggtgcacagcggcgtgtgtaccgacccccagccactgaaagaacagcccgccctgaacgacagccggtactgcctgagcagcagactgagagtgtccgccaccttctggcagaacccccggaaccacttcagatgccaggtgcagttctacggcctgagcgagaacgacgagtggacccaggacagagccaagcccgtgacccagatcgtgtctgccgaagcctggggcagagccgattgcggctttaccagcgagagctaccagcagggcgtgctgagcgccaccaacctgagcgtgatcggcttcagaatcctgctgctgaaagtggccggctttaacctgctgatgaccctgcggctgtggtccagcaggagtaagaggagcaggctcctgcacagtgactacatgaacatgactccacgccgccccggacccacccgcaagcattaccagccctatgccccaccacgcgacttcgcagcctatcgctccagagtgaagttcagcagaagcgccgacgcccctgcctaccagcagggacagaaccaactgtacaacgagctgaacctgggcagacgggaagagtacgacgtgctggacaagcggagaggcagggaccctgagatgggcggaaagccccagcggagaaagaacccccaggaaggactgtataacgaactccagaaagacaagatggccgaagcctacagcgagatcggcatgaagggcgagcggagaagaggcaagggccacgatggcctgtaccagggcctgagcaccgccaccaaggacacctatgacgccctgcacatgcaggccctgcctccaaga

SEQ ID NO: 25497 - DNA, 921 bp, synthetic construct
  source 1..921: mol_type = other DNA
agccacacccagaaagccaccctcgtgtgcctggctaccggcttctaccccgaccatgtggaactgtcttggtgggtcaacggcaaagaggtgcacagcggcgtgtgtaccgacccccagccactgaaagaacagcccgccctgaacgacagccggtactgcctgagcagcagactgagagtgtccgccaccttctggcagaacccccggaaccacttcagatgccaggtgcagttctacggcctgagcgagaacgacgagtggacccaggacagagccaagcccgtgacccagatcgtgtctgccgaagcctggggcagagccgattgcggctttaccagcgagagctaccagcagggcgtgctgagcgccaccaacctgagcgtgatcggcttcagaatcctgctgctgaaagtggccggctttaacctgctgatgaccctgcggctgtggtccagcaggagtaagaggagcaggctcctgcacagtgactacatgaacatgactccacgccgccccggacccacccgcaagcattaccagccctatgccccaccacgcgacttcgcagcctatcgctccagagtgaagttcagcagaagcgccgacgcccctgcctaccagcagggacagaaccaactgtacaacgagctgaacctgggcagacgggaagagtacgacgtgctggacaagcggagaggcagggaccctgagatgggcggaaagccccagcggagaaagaacccccaggaaggactgtataacgaactccagaaagacaagatggccgaagcctacagcgagatcggcatgaagggcgagcggagaagaggcaagggccacgatggcctgtaccagggcctgagcaccgccaccaaggacacctatgacgccctgcacatgcaggccctgcctccaaga

SEQ ID NO: 25498 - DNA, 906 bp, synthetic construct
  source 1..906: mol_type = other DNA
gccaccctcgtgtgcctggctaccggcttctaccccgaccatgtggaactgtcttggtgggtcaacggcaaagaggtgcacagcggcgtgtgtaccgacccccagccactgaaagaacagcccgccctgaacgacagccggtactgcctgagcagcagactgagagtgtccgccaccttctggcagaacccccggaaccacttcagatgccaggtgcagttctacggcctgagcgagaacgacgagtggacccaggacagagccaagcccgtgacccagatcgtgtctgccgaagcctggggcagagccgattgcggctttaccagcgagagctaccagcagggcgtgctgagcgccaccaacctgagcgtgatcggcttcagaatcctgctgctgaaagtggccggctttaacctgctgatgaccctgcggctgtggtccagcaggagtaagaggagcaggctcctgcacagtgactacatgaacatgactccacgccgccccggacccacccgcaagcattaccagccctatgccccaccacgcgacttcgcagcctatcgctccagagtgaagttcagcagaagcgccgacgcccctgcctaccagcagggacagaaccaactgtacaacgagctgaacctgggcagacgggaagagtacgacgtgctggacaagcggagaggcagggaccctgagatgggcggaaagccccagcggagaaagaacccccaggaaggactgtataacgaactccagaaagacaagatggccgaagcctacagcgagatcggcatgaagggcgagcggagaagaggcaagggccacgatggcctgtaccagggcctgagcaccgccaccaaggacacctatgacgccctgcacatgcaggccctgcctccaaga

SEQ ID NO: 25499 - DNA, 891 bp, synthetic construct
  source 1..891: mol_type = other DNA
ctggctaccggcttctaccccgaccatgtggaactgtcttggtgggtcaacggcaaagaggtgcacagcggcgtgtgtaccgacccccagccactgaaagaacagcccgccctgaacgacagccggtactgcctgagcagcagactgagagtgtccgccaccttctggcagaacccccggaaccacttcagatgccaggtgcagttctacggcctgagcgagaacgacgagtggacccaggacagagccaagcccgtgacccagatcgtgtctgccgaagcctggggcagagccgattgcggctttaccagcgagagctaccagcagggcgtgctgagcgccaccaacctgagcgtgatcggcttcagaatcctgctgctgaaagtggccggctttaacctgctgatgaccctgcggctgtggtccagcaggagtaagaggagcaggctcctgcacagtgactacatgaacatgactccacgccgccccggacccacccgcaagcattaccagccctatgccccaccacgcgacttcgcagcctatcgctccagagtgaagttcagcagaagcgccgacgcccctgcctaccagcagggacagaaccaactgtacaacgagctgaacctgggcagacgggaagagtacgacgtgctggacaagcggagaggcagggaccctgagatgggcggaaagccccagcggagaaagaacccccaggaaggactgtataacgaactccagaaagacaagatggccgaagcctacagcgagatcggcatgaagggcgagcggagaagaggcaagggccacgatggcctgtaccagggcctgagcaccgccaccaaggacacctatgacgccctgcacatgcaggccctgcctccaaga

SEQ ID NO: 25500 - DNA, 1248 bp, synthetic construct
  source 1..1248: mol_type = other DNA
gacctgaagaacgtgttcccacctgaggtggccgtgttcgagcctagcgaggccgagatcagccacacccagaaagccaccctcgtgtgcctggctaccggcttctaccccgaccatgtggaactgtcttggtgggtcaacggcaaagaggtgcacagcggcgtgtgtaccgacccccagccactgaaagaacagcccgccctgaacgacagccggtactgcctgagcagcagactgagagtgtccgccaccttctggcagaacccccggaaccacttcagatgccaggtgcagttctacggcctgagcgagaacgacgagtggacccaggacagagccaagcccgtgacccagatcgtgtctgccgaagcctggggcagagccgatgatgtgattaagatccactggcaggaaaagaagtccaacaccatcctgggcagccaggaaggcaacaccatgaagaccaacgacacctacatgaagttcagctggctgaccgtgcccgagaagtccctggacaaagaacacagatgcatcgtgcggcacgaaaacaacaagaacggcgtggaccaggaaatcatcttcccacccatcaagaccgatgtgattacaatggaccccaaggacaactgctccaaggacgccaacgataccctgctgctccagctgaccaacaccagcgcctactacatgtacttgttgctgctgctgaagtccgtggtgtacttcgccatcatcacatgctgcctgctgatggctatggtcaagcggaaggacagccggggaaggagtaagaggagcaggctcctgcacagtgactacatgaacatgactccacgccgccccggacccacccgcaagcattaccagccctatgccccaccacgcgacttcgcagcctatcgctccagagtgaagttcagcagaagcgccgacgcccctgcctaccagcagggacagaaccaactgtacaacgagctgaacctgggcagacgggaagagtacgacgtgctggacaagcggagaggcagggaccctgagatgggcggaaagccccagcggagaaagaacccccaggaaggactgtataacgaactccagaaagacaagatggccgaagcctacagcgagatcggcatgaagggcgagcggagaagaggcaagggccacgatggcctgtaccagggcctgagcaccgccaccaaggacacctatgacgccctgcacatgcaggccctgcctccaaga

SEQ ID NO: 25501 - DNA, 1245 bp, synthetic construct
  source 1..1245: mol_type = other DNA
ctgaagaacgtgttcccacctgaggtggccgtgttcgagcctagcgaggccgagatcagccacacccagaaagccaccctcgtgtgcctggctaccggcttctaccccgaccatgtggaactgtcttggtgggtcaacggcaaagaggtgcacagcggcgtgtgtaccgacccccagccactgaaagaacagcccgccctgaacgacagccggtactgcctgagcagcagactgagagtgtccgccaccttctggcagaacccccggaaccacttcagatgccaggtgcagttctacggcctgagcgagaacgacgagtggacccaggacagagccaagcccgtgacccagatcgtgtctgccgaagcctggggcagagccgatgatgtgattaagatccactggcaggaaaagaagtccaacaccatcctgggcagccaggaaggcaacaccatgaagaccaacgacacctacatgaagttcagctggctgaccgtgcccgagaagtccctggacaaagaacacagatgcatcgtgcggcacgaaaacaacaagaacggcgtggaccaggaaatcatcttcccacccatcaagaccgatgtgattacaatggaccccaaggacaactgctccaaggacgccaacgataccctgctgctccagctgaccaacaccagcgcctactacatgtacttgttgctgctgctgaagtccgtggtgtacttcgccatcatcacatgctgcctgctgatggctatggtcaagcggaaggacagccggggaaggagtaagaggagcaggctcctgcacagtgactacatgaacatgactccacgccgccccggacccacccgcaagcattaccagccctatgccccaccacgcgacttcgcagcctatcgctccagagtgaagttcagcagaagcgccgacgcccctgcctaccagcagggacagaaccaactgtacaacgagctgaacctgggcagacgggaagagtacgacgtgctggacaagcggagaggcagggaccctgagatgggcggaaagccccagcggagaaagaacccccaggaaggactgtataacgaactccagaaagacaagatggccgaagcctacagcgagatcggcatgaagggcgagcggagaagaggcaagggccacgatggcctgtaccagggcctgagcaccgccaccaaggacacctatgacgccctgcacatgcaggccctgcctccaaga

SEQ ID NO: 25502 - DNA, 1242 bp, synthetic construct
  source 1..1242: mol_type = other DNA
aagaacgtgttcccacctgaggtggccgtgttcgagcctagcgaggccgagatcagccacacccagaaagccaccctcgtgtgcctggctaccggcttctaccccgaccatgtggaactgtcttggtgggtcaacggcaaagaggtgcacagcggcgtgtgtaccgacccccagccactgaaagaacagcccgccctgaacgacagccggtactgcctgagcagcagactgagagtgtccgccaccttctggcagaacccccggaaccacttcagatgccaggtgcagttctacggcctgagcgagaacgacgagtggacccaggacagagccaagcccgtgacccagatcgtgtctgccgaagcctggggcagagccgatgatgtgattaagatccactggcaggaaaagaagtccaacaccatcctgggcagccaggaaggcaacaccatgaagaccaacgacacctacatgaagttcagctggctgaccgtgcccgagaagtccctggacaaagaacacagatgcatcgtgcggcacgaaaacaacaagaacggcgtggaccaggaaatcatcttcccacccatcaagaccgatgtgattacaatggaccccaaggacaactgctccaaggacgccaacgataccctgctgctccagctgaccaacaccagcgcctactacatgtacttgttgctgctgctgaagtccgtggtgtacttcgccatcatcacatgctgcctgctgatggctatggtcaagcggaaggacagccggggaaggagtaagaggagcaggctcctgcacagtgactacatgaacatgactccacgccgccccggacccacccgcaagcattaccagccctatgccccaccacgcgacttcgcagcctatcgctccagagtgaagttcagcagaagcgccgacgcccctgcctaccagcagggacagaaccaactgtacaacgagctgaacctgggcagacgggaagagtacgacgtgctggacaagcggagaggcagggaccctgagatgggcggaaagccccagcggagaaagaacccccaggaaggactgtataacgaactccagaaagacaagatggccgaagcctacagcgagatcggcatgaagggcgagcggagaagaggcaagggccacgatggcctgtaccagggcctgagcaccgccaccaaggacacctatgacgccctgcacatgcaggccctgcctccaaga

SEQ ID NO: 25503 - DNA, 1239 bp, synthetic construct
  source 1..1239: mol_type = other DNA
aacgtgttcccacctgaggtggccgtgttcgagcctagcgaggccgagatcagccacacccagaaagccaccctcgtgtgcctggctaccggcttctaccccgaccatgtggaactgtcttggtgggtcaacggcaaagaggtgcacagcggcgtgtgtaccgacccccagccactgaaagaacagcccgccctgaacgacagccggtactgcctgagcagcagactgagagtgtccgccaccttctggcagaacccccggaaccacttcagatgccaggtgcagttctacggcctgagcgagaacgacgagtggacccaggacagagccaagcccgtgacccagatcgtgtctgccgaagcctggggcagagccgatgatgtgattaagatccactggcaggaaaagaagtccaacaccatcctgggcagccaggaaggcaacaccatgaagaccaacgacacctacatgaagttcagctggctgaccgtgcccgagaagtccctggacaaagaacacagatgcatcgtgcggcacgaaaacaacaagaacggcgtggaccaggaaatcatcttcccacccatcaagaccgatgtgattacaatggaccccaaggacaactgctccaaggacgccaacgataccctgctgctccagctgaccaacaccagcgcctactacatgtacttgttgctgctgctgaagtccgtggtgtacttcgccatcatcacatgctgcctgctgatggctatggtcaagcggaaggacagccggggaaggagtaagaggagcaggctcctgcacagtgactacatgaacatgactccacgccgccccggacccacccgcaagcattaccagccctatgccccaccacgcgacttcgcagcctatcgctccagagtgaagttcagcagaagcgccgacgcccctgcctaccagcagggacagaaccaactgtacaacgagctgaacctgggcagacgggaagagtacgacgtgctggacaagcggagaggcagggaccctgagatgggcggaaagccccagcggagaaagaacccccaggaaggactgtataacgaactccagaaagacaagatggccgaagcctacagcgagatcggcatgaagggcgagcggagaagaggcaagggccacgatggcctgtaccagggcctgagcaccgccaccaaggacacctatgacgccctgcacatgcaggccctgcctccaaga

SEQ ID NO: 25504 - DNA, 1236 bp, synthetic construct
  source 1..1236: mol_type = other DNA
gtgttcccacctgaggtggccgtgttcgagcctagcgaggccgagatcagccacacccagaaagccaccctcgtgtgcctggctaccggcttctaccccgaccatgtggaactgtcttggtgggtcaacggcaaagaggtgcacagcggcgtgtgtaccgacccccagccactgaaagaacagcccgccctgaacgacagccggtactgcctgagcagcagactgagagtgtccgccaccttctggcagaacccccggaaccacttcagatgccaggtgcagttctacggcctgagcgagaacgacgagtggacccaggacagagccaagcccgtgacccagatcgtgtctgccgaagcctggggcagagccgatgatgtgattaagatccactggcaggaaaagaagtccaacaccatcctgggcagccaggaaggcaacaccatgaagaccaacgacacctacatgaagttcagctggctgaccgtgcccgagaagtccctggacaaagaacacagatgcatcgtgcggcacgaaaacaacaagaacggcgtggaccaggaaatcatcttcccacccatcaagaccgatgtgattacaatggaccccaaggacaactgctccaaggacgccaacgataccctgctgctccagctgaccaacaccagcgcctactacatgtacttgttgctgctgctgaagtccgtggtgtacttcgccatcatcacatgctgcctgctgatggctatggtcaagcggaaggacagccggggaaggagtaagaggagcaggctcctgcacagtgactacatgaacatgactccacgccgccccggacccacccgcaagcattaccagccctatgccccaccacgcgacttcgcagcctatcgctccagagtgaagttcagcagaagcgccgacgcccctgcctaccagcagggacagaaccaactgtacaacgagctgaacctgggcagacgggaagagtacgacgtgctggacaagcggagaggcagggaccctgagatgggcggaaagccccagcggagaaagaacccccaggaaggactgtataacgaactccagaaagacaagatggccgaagcctacagcgagatcggcatgaagggcgagcggagaagaggcaagggccacgatggcctgtaccagggcctgagcaccgccaccaaggacacctatgacgccctgcacatgcaggccctgcctccaaga

SEQ ID NO: 25505 - DNA, 1233 bp, synthetic construct
  source 1..1233: mol_type = other DNA
ttcccacctgaggtggccgtgttcgagcctagcgaggccgagatcagccacacccagaaagccaccctcgtgtgcctggctaccggcttctaccccgaccatgtggaactgtcttggtgggtcaacggcaaagaggtgcacagcggcgtgtgtaccgacccccagccactgaaagaacagcccgccctgaacgacagccggtactgcctgagcagcagactgagagtgtccgccaccttctggcagaacccccggaaccacttcagatgccaggtgcagttctacggcctgagcgagaacgacgagtggacccaggacagagccaagcccgtgacccagatcgtgtctgccgaagcctggggcagagccgatgatgtgattaagatccactggcaggaaaagaagtccaacaccatcctgggcagccaggaaggcaacaccatgaagaccaacgacacctacatgaagttcagctggctgaccgtgcccgagaagtccctggacaaagaacacagatgcatcgtgcggcacgaaaacaacaagaacggcgtggaccaggaaatcatcttcccacccatcaagaccgatgtgattacaatggaccccaaggacaactgctccaaggacgccaacgataccctgctgctccagctgaccaacaccagcgcctactacatgtacttgttgctgctgctgaagtccgtggtgtacttcgccatcatcacatgctgcctgctgatggctatggtcaagcggaaggacagccggggaaggagtaagaggagcaggctcctgcacagtgactacatgaacatgactccacgccgccccggacccacccgcaagcattaccagccctatgccccaccacgcgacttcgcagcctatcgctccagagtgaagttcagcagaagcgccgacgcccctgcctaccagcagggacagaaccaactgtacaacgagctgaacctgggcagacgggaagagtacgacgtgctggacaagcggagaggcagggaccctgagatgggcggaaagccccagcggagaaagaacccccaggaaggactgtataacgaactccagaaagacaagatggccgaagcctacagcgagatcggcatgaagggcgagcggagaagaggcaagggccacgatggcctgtaccagggcctgagcaccgccaccaaggacacctatgacgccctgcacatgcaggccctgcctccaaga

SEQ ID NO: 25506 - DNA, 1230 bp, synthetic construct
  source 1..1230: mol_type = other DNA
ccacctgaggtggccgtgttcgagcctagcgaggccgagatcagccacacccagaaagccaccctcgtgtgcctggctaccggcttctaccccgaccatgtggaactgtcttggtgggtcaacggcaaagaggtgcacagcggcgtgtgtaccgacccccagccactgaaagaacagcccgccctgaacgacagccggtactgcctgagcagcagactgagagtgtccgccaccttctggcagaacccccggaaccacttcagatgccaggtgcagttctacggcctgagcgagaacgacgagtggacccaggacagagccaagcccgtgacccagatcgtgtctgccgaagcctggggcagagccgatgatgtgattaagatccactggcaggaaaagaagtccaacaccatcctgggcagccaggaaggcaacaccatgaagaccaacgacacctacatgaagttcagctggctgaccgtgcccgagaagtccctggacaaagaacacagatgcatcgtgcggcacgaaaacaacaagaacggcgtggaccaggaaatcatcttcccacccatcaagaccgatgtgattacaatggaccccaaggacaactgctccaaggacgccaacgataccctgctgctccagctgaccaacaccagcgcctactacatgtacttgttgctgctgctgaagtccgtggtgtacttcgccatcatcacatgctgcctgctgatggctatggtcaagcggaaggacagccggggaaggagtaagaggagcaggctcctgcacagtgactacatgaacatgactccacgccgccccggacccacccgcaagcattaccagccctatgccccaccacgcgacttcgcagcctatcgctccagagtgaagttcagcagaagcgccgacgcccctgcctaccagcagggacagaaccaactgtacaacgagctgaacctgggcagacgggaagagtacgacgtgctggacaagcggagaggcagggaccctgagatgggcggaaagccccagcggagaaagaacccccaggaaggactgtataacgaactccagaaagacaagatggccgaagcctacagcgagatcggcatgaagggcgagcggagaagaggcaagggccacgatggcctgtaccagggcctgagcaccgccaccaaggacacctatgacgccctgcacatgcaggccctgcctccaaga

SEQ ID NO: 25507 - DNA, 1227 bp, synthetic construct
  source 1..1227: mol_type = other DNA
cctgaggtggccgtgttcgagcctagcgaggccgagatcagccacacccagaaagccaccctcgtgtgcctggctaccggcttctaccccgaccatgtggaactgtcttggtgggtcaacggcaaagaggtgcacagcggcgtgtgtaccgacccccagccactgaaagaacagcccgccctgaacgacagccggtactgcctgagcagcagactgagagtgtccgccaccttctggcagaacccccggaaccacttcagatgccaggtgcagttctacggcctgagcgagaacgacgagtggacccaggacagagccaagcccgtgacccagatcgtgtctgccgaagcctggggcagagccgatgatgtgattaagatccactggcaggaaaagaagtccaacaccatcctgggcagccaggaaggcaacaccatgaagaccaacgacacctacatgaagttcagctggctgaccgtgcccgagaagtccctggacaaagaacacagatgcatcgtgcggcacgaaaacaacaagaacggcgtggaccaggaaatcatcttcccacccatcaagaccgatgtgattacaatggaccccaaggacaactgctccaaggacgccaacgataccctgctgctccagctgaccaacaccagcgcctactacatgtacttgttgctgctgctgaagtccgtggtgtacttcgccatcatcacatgctgcctgctgatggctatggtcaagcggaaggacagccggggaaggagtaagaggagcaggctcctgcacagtgactacatgaacatgactccacgccgccccggacccacccgcaagcattaccagccctatgccccaccacgcgacttcgcagcctatcgctccagagtgaagttcagcagaagcgccgacgcccctgcctaccagcagggacagaaccaactgtacaacgagctgaacctgggcagacgggaagagtacgacgtgctggacaagcggagaggcagggaccctgagatgggcggaaagccccagcggagaaagaacccccaggaaggactgtataacgaactccagaaagacaagatggccgaagcctacagcgagatcggcatgaagggcgagcggagaagaggcaagggccacgatggcctgtaccagggcctgagcaccgccaccaaggacacctatgacgccctgcacatgcaggccctgcctccaaga

SEQ ID NO: 25508 - DNA, 1224 bp, synthetic construct
  source 1..1224: mol_type = other DNA
gaggtggccgtgttcgagcctagcgaggccgagatcagccacacccagaaagccaccctcgtgtgcctggctaccggcttctaccccgaccatgtggaactgtcttggtgggtcaacggcaaagaggtgcacagcggcgtgtgtaccgacccccagccactgaaagaacagcccgccctgaacgacagccggtactgcctgagcagcagactgagagtgtccgccaccttctggcagaacccccggaaccacttcagatgccaggtgcagttctacggcctgagcgagaacgacgagtggacccaggacagagccaagcccgtgacccagatcgtgtctgccgaagcctggggcagagccgatgatgtgattaagatccactggcaggaaaagaagtccaacaccatcctgggcagccaggaaggcaacaccatgaagaccaacgacacctacatgaagttcagctggctgaccgtgcccgagaagtccctggacaaagaacacagatgcatcgtgcggcacgaaaacaacaagaacggcgtggaccaggaaatcatcttcccacccatcaagaccgatgtgattacaatggaccccaaggacaactgctccaaggacgccaacgataccctgctgctccagctgaccaacaccagcgcctactacatgtacttgttgctgctgctgaagtccgtggtgtacttcgccatcatcacatgctgcctgctgatggctatggtcaagcggaaggacagccggggaaggagtaagaggagcaggctcctgcacagtgactacatgaacatgactccacgccgccccggacccacccgcaagcattaccagccctatgccccaccacgcgacttcgcagcctatcgctccagagtgaagttcagcagaagcgccgacgcccctgcctaccagcagggacagaaccaactgtacaacgagctgaacctgggcagacgggaagagtacgacgtgctggacaagcggagaggcagggaccctgagatgggcggaaagccccagcggagaaagaacccccaggaaggactgtataacgaactccagaaagacaagatggccgaagcctacagcgagatcggcatgaagggcgagcggagaagaggcaagggccacgatggcctgtaccagggcctgagcaccgccaccaaggacacctatgacgccctgcacatgcaggccctgcctccaaga

SEQ ID NO: 25509 - DNA, 1221 bp, synthetic construct
  source 1..1221: mol_type = other DNA
gtggccgtgttcgagcctagcgaggccgagatcagccacacccagaaagccaccctcgtgtgcctggctaccggcttctaccccgaccatgtggaactgtcttggtgggtcaacggcaaagaggtgcacagcggcgtgtgtaccgacccccagccactgaaagaacagcccgccctgaacgacagccggtactgcctgagcagcagactgagagtgtccgccaccttctggcagaacccccggaaccacttcagatgccaggtgcagttctacggcctgagcgagaacgacgagtggacccaggacagagccaagcccgtgacccagatcgtgtctgccgaagcctggggcagagccgatgatgtgattaagatccactggcaggaaaagaagtccaacaccatcctgggcagccaggaaggcaacaccatgaagaccaacgacacctacatgaagttcagctggctgaccgtgcccgagaagtccctggacaaagaacacagatgcatcgtgcggcacgaaaacaacaagaacggcgtggaccaggaaatcatcttcccacccatcaagaccgatgtgattacaatggaccccaaggacaactgctccaaggacgccaacgataccctgctgctccagctgaccaacaccagcgcctactacatgtacttgttgctgctgctgaagtccgtggtgtacttcgccatcatcacatgctgcctgctgatggctatggtcaagcggaaggacagccggggaaggagtaagaggagcaggctcctgcacagtgactacatgaacatgactccacgccgccccggacccacccgcaagcattaccagccctatgccccaccacgcgacttcgcagcctatcgctccagagtgaagttcagcagaagcgccgacgcccctgcctaccagcagggacagaaccaactgtacaacgagctgaacctgggcagacgggaagagtacgacgtgctggacaagcggagaggcagggaccctgagatgggcggaaagccccagcggagaaagaacccccaggaaggactgtataacgaactccagaaagacaagatggccgaagcctacagcgagatcggcatgaagggcgagcggagaagaggcaagggccacgatggcctgtaccagggcctgagcaccgccaccaaggacacctatgacgccctgcacatgcaggccctgcctccaaga

SEQ ID NO: 25510 - DNA, 1218 bp, synthetic construct
  source 1..1218: mol_type = other DNA
gccgtgttcgagcctagcgaggccgagatcagccacacccagaaagccaccctcgtgtgcctggctaccggcttctaccccgaccatgtggaactgtcttggtgggtcaacggcaaagaggtgcacagcggcgtgtgtaccgacccccagccactgaaagaacagcccgccctgaacgacagccggtactgcctgagcagcagactgagagtgtccgccaccttctggcagaacccccggaaccacttcagatgccaggtgcagttctacggcctgagcgagaacgacgagtggacccaggacagagccaagcccgtgacccagatcgtgtctgccgaagcctggggcagagccgatgatgtgattaagatccactggcaggaaaagaagtccaacaccatcctgggcagccaggaaggcaacaccatgaagaccaacgacacctacatgaagttcagctggctgaccgtgcccgagaagtccctggacaaagaacacagatgcatcgtgcggcacgaaaacaacaagaacggcgtggaccaggaaatcatcttcccacccatcaagaccgatgtgattacaatggaccccaaggacaactgctccaaggacgccaacgataccctgctgctccagctgaccaacaccagcgcctactacatgtacttgttgctgctgctgaagtccgtggtgtacttcgccatcatcacatgctgcctgctgatggctatggtcaagcggaaggacagccggggaaggagtaagaggagcaggctcctgcacagtgactacatgaacatgactccacgccgccccggacccacccgcaagcattaccagccctatgccccaccacgcgacttcgcagcctatcgctccagagtgaagttcagcagaagcgccgacgcccctgcctaccagcagggacagaaccaactgtacaacgagctgaacctgggcagacgggaagagtacgacgtgctggacaagcggagaggcagggaccctgagatgggcggaaagccccagcggagaaagaacccccaggaaggactgtataacgaactccagaaagacaagatggccgaagcctacagcgagatcggcatgaagggcgagcggagaagaggcaagggccacgatggcctgtaccagggcctgagcaccgccaccaaggacacctatgacgccctgcacatgcaggccctgcctccaaga

SEQ ID NO: 25511 - DNA, 1254 bp, synthetic construct; identical to SEQ ID NO: 25315
  source 1..1254: mol_type = other DNA

SEQ ID NO: 25512 - DNA, 1251 bp, synthetic construct
  source 1..1251: mol_type = other DNA
gacctgaagaacgtgttcccacctgaggtggccgtgttcgagcctagcgaggccgagatcagccacacccagaaagccaccctcgtgtgcctggctaccggcttctaccccgaccatgtggaactgtcttggtgggtcaacggcaaagaggtgcacagcggcgtgtgtaccgacccccagccactgaaagaacagcccgccctgaacgacagccggtactgcctgagcagcagactgagagtgtccgccaccttctggcagaacccccggaaccacttcagatgccaggtgcagttctacggcctgagcgagaacgacgagtggacccaggacagagccaagcccgtgacccagatcgtgtctgccgaagcctggggcagagccgatgatgtgattaagatccactggcaggaaaagaagtccaacaccatcctgggcagccaggaaggcaacaccatgaagaccaacgacacctacatgaagttcagctggctgaccgtgcccgagaagtccctggacaaagaacacagatgcatcgtgcggcacgaaaacaacaagaacggcgtggaccaggaaatcatcttcccacccatcaagaccgatgtgattacaatggaccccaaggacaactgctccaaggacgccaacgataccctgctgctccagctgaccaacaccagcgcctactacatgtacttgttgctgctgctgaagtccgtggtgtacttcgccatcatcacatgctgcctgctgcggagaaccgccttctgctgcaacggcgagaagtctaggagtaagaggagcaggctcctgcacagtgactacatgaacatgactccacgccgccccggacccacccgcaagcattaccagccctatgccccaccacgcgacttcgcagcctatcgctccagagtgaagttcagcagaagcgccgacgcccctgcctaccagcagggacagaaccaactgtacaacgagctgaacctgggcagacgggaagagtacgacgtgctggacaagcggagaggcagggaccctgagatgggcggaaagccccagcggagaaagaacccccaggaaggactgtataacgaactccagaaagacaagatggccgaagcctacagcgagatcggcatgaagggcgagcggagaagaggcaagggccacgatggcctgtaccagggcctgagcaccgccaccaaggacacctatgacgccctgcacatgcaggccctgcctccaaga

SEQ ID NO: 25513 - DNA, 1248 bp, synthetic construct
  source 1..1248: mol_type = other DNA
ctgaagaacgtgttcccacctgaggtggccgtgttcgagcctagcgaggccgagatcagccacacccagaaagccaccctcgtgtgcctggctaccggcttctaccccgaccatgtggaactgtcttggtgggtcaacggcaaagaggtgcacagcggcgtgtgtaccgacccccagccactgaaagaacagcccgccctgaacgacagccggtactgcctgagcagcagactgagagtgtccgccaccttctggcagaacccccggaaccacttcagatgccaggtgcagttctacggcctgagcgagaacgacgagtggacccaggacagagccaagcccgtgacccagatcgtgtctgccgaagcctggggcagagccgatgatgtgattaagatccactggcaggaaaagaagtccaacaccatcctgggcagccaggaaggcaacaccatgaagaccaacgacacctacatgaagttcagctggctgaccgtgcccgagaagtccctggacaaagaacacagatgcatcgtgcggcacgaaaacaacaagaacggcgtggaccaggaaatcatcttcccacccatcaagaccgatgtgattacaatggaccccaaggacaactgctccaaggacgccaacgataccctgctgctccagctgaccaacaccagcgcctactacatgtacttgttgctgctgctgaagtccgtggtgtacttcgccatcatcacatgctgcctgctgcggagaaccgccttctgctgcaacggcgagaagtctaggagtaagaggagcaggctcctgcacagtgactacatgaacatgactccacgccgccccggacccacccgcaagcattaccagccctatgccccaccacgcgacttcgcagcctatcgctccagagtgaagttcagcagaagcgccgacgcccctgcctaccagcagggacagaaccaactgtacaacgagctgaacctgggcagacgggaagagtacgacgtgctggacaagcggagaggcagggaccctgagatgggcggaaagccccagcggagaaagaacccccaggaaggactgtataacgaactccagaaagacaagatggccgaagcctacagcgagatcggcatgaagggcgagcggagaagaggcaagggccacgatggcctgtaccagggcctgagcaccgccaccaaggacacctatgacgccctgcacatgcaggccctgcctccaaga

SEQ ID NO: 25514 - DNA, 1245 bp, synthetic construct
  source 1..1245: mol_type = other DNA
aagaacgtgttcccacctgaggtggccgtgttcgagcctagcgaggccgagatcagccacacccagaaagccaccctcgtgtgcctggctaccggcttctaccccgaccatgtggaactgtcttggtgggtcaacggcaaagaggtgcacagcggcgtgtgtaccgacccccagccactgaaagaacagcccgccctgaacgacagccggtactgcctgagcagcagactgagagtgtccgccaccttctggcagaacccccggaaccacttcagatgccaggtgcagttctacggcctgagcgagaacgacgagtggacccaggacagagccaagcccgtgacccagatcgtgtctgccgaagcctggggcagagccgatgatgtgattaagatccactggcaggaaaagaagtccaacaccatcctgggcagccaggaaggcaacaccatgaagaccaacgacacctacatgaagttcagctggctgaccgtgcccgagaagtccctggacaaagaacacagatgcatcgtgcggcacgaaaacaacaagaacggcgtggaccaggaaatcatcttcccacccatcaagaccgatgtgattacaatggaccccaaggacaactgctccaaggacgccaacgataccctgctgctccagctgaccaacaccagcgcctactacatgtacttgttgctgctgctgaagtccgtggtgtacttcgccatcatcacatgctgcctgctgcggagaaccgccttctgctgcaacggcgagaagtctaggagtaagaggagcaggctcctgcacagtgactacatgaacatgactccacgccgccccggacccacccgcaagcattaccagccctatgccccaccacgcgacttcgcagcctatcgctccagagtgaagttcagcagaagcgccgacgcccctgcctaccagcagggacagaaccaactgtacaacgagctgaacctgggcagacgggaagagtacgacgtgctggacaagcggagaggcagggaccctgagatgggcggaaagccccagcggagaaagaacccccaggaaggactgtataacgaactccagaaagacaagatggccgaagcctacagcgagatcggcatgaagggcgagcggagaagaggcaagggccacgatggcctgtaccagggcctgagcaccgccaccaaggacacctatgacgccctgcacatgcaggccctgcctccaaga

SEQ ID NO: 25515 - DNA, 1242 bp, synthetic construct
  source 1..1242: mol_type = other DNA
aacgtgttcccacctgaggtggccgtgttcgagcctagcgaggccgagatcagccacacccagaaagccaccctcgtgtgcctggctaccggcttctaccccgaccatgtggaactgtcttggtgggtcaacggcaaagaggtgcacagcggcgtgtgtaccgacccccagccactgaaagaacagcccgccctgaacgacagccggtactgcctgagcagcagactgagagtgtccgccaccttctggcagaacccccggaaccacttcagatgccaggtgcagttctacggcctgagcgagaacgacgagtggacccaggacagagccaagcccgtgacccagatcgtgtctgccgaagcctggggcagagccgatgatgtgattaagatccactggcaggaaaagaagtccaacaccatcctgggcagccaggaaggcaacaccatgaagaccaacgacacctacatgaagttcagctggctgaccgtgcccgagaagtccctggacaaagaacacagatgcatcgtgcggcacgaaaacaacaagaacggcgtggaccaggaaatcatcttcccacccatcaagaccgatgtgattacaatggaccccaaggacaactgctccaaggacgccaacgataccctgctgctccagctgaccaacaccagcgcctactacatgtacttgttgctgctgctgaagtccgtggtgtacttcgccatcatcacatgctgcctgctgcggagaaccgccttctgctgcaacggcgagaagtctaggagtaagaggagcaggctcctgcacagtgactacatgaacatgactccacgccgccccggacccacccgcaagcattaccagccctatgccccaccacgcgacttcgcagcctatcgctccagagtgaagttcagcagaagcgccgacgcccctgcctaccagcagggacagaaccaactgtacaacgagctgaacctgggcagacgggaagagtacgacgtgctggacaagcggagaggcagggaccctgagatgggcggaaagccccagcggagaaagaacccccaggaaggactgtataacgaactccagaaagacaagatggccgaagcctacagcgagatcggcatgaagggcgagcggagaagaggcaagggccacgatggcctgtaccagggcctgagcaccgccaccaaggacacctatgacgccctgcacatgcaggccctgcctccaaga

SEQ ID NO: 25516 - DNA, 1239 bp, synthetic construct
  source 1..1239: mol_type = other DNA
gtgttcccacctgaggtggccgtgttcgagcctagcgaggccgagatcagccacacccagaaagccaccctcgtgtgcctggctaccggcttctaccccgaccatgtggaactgtcttggtgggtcaacggcaaagaggtgcacagcggcgtgtgtaccgacccccagccactgaaagaacagcccgccctgaacgacagccggtactgcctgagcagcagactgagagtgtccgccaccttctggcagaacccccggaaccacttcagatgccaggtgcagttctacggcctgagcgagaacgacgagtggacccaggacagagccaagcccgtgacccagatcgtgtctgccgaagcctggggcagagccgatgatgtgattaagatccactggcaggaaaagaagtccaacaccatcctgggcagccaggaaggcaacaccatgaagaccaacgacacctacatgaagttcagctggctgaccgtgcccgagaagtccctggacaaagaacacagatgcatcgtgcggcacgaaaacaacaagaacggcgtggaccaggaaatcatcttcccacccatcaagaccgatgtgattacaatggaccccaaggacaactgctccaaggacgccaacgataccctgctgctccagctgaccaacaccagcgcctactacatgtacttgttgctgctgctgaagtccgtggtgtacttcgccatcatcacatgctgcctgctgcggagaaccgccttctgctgcaacggcgagaagtctaggagtaagaggagcaggctcctgcacagtgactacatgaacatgactccacgccgccccggacccacccgcaagcattaccagccctatgccccaccacgcgacttcgcagcctatcgctccagagtgaagttcagcagaagcgccgacgcccctgcctaccagcagggacagaaccaactgtacaacgagctgaacctgggcagacgggaagagtacgacgtgctggacaagcggagaggcagggaccctgagatgggcggaaagccccagcggagaaagaacccccaggaaggactgtataacgaactccagaaagacaagatggccgaagcctacagcgagatcggcatgaagggcgagcggagaagaggcaagggccacgatggcctgtaccagggcctgagcaccgccaccaaggacacctatgacgccctgcacatgcaggccctgcctccaaga

SEQ ID NO: 25517 - DNA, 1236 bp, synthetic construct
  source 1..1236: mol_type = other DNA
ttcccacctgaggtggccgtgttcgagcctagcgaggccgagatcagccacacccagaaagccaccctcgtgtgcctggctaccggcttctaccccgaccatgtggaactgtcttggtgggtcaacggcaaagaggtgcacagcggcgtgtgtaccgacccccagccactgaaagaacagcccgccctgaacgacagccggtactgcctgagcagcagactgagagtgtccgccaccttctggcagaacccccggaaccacttcagatgccaggtgcagttctacggcctgagcgagaacgacgagtggacccaggacagagccaagcccgtgacccagatcgtgtctgccgaagcctggggcagagccgatgatgtgattaagatccactggcaggaaaagaagtccaacaccatcctgggcagccaggaaggcaacaccatgaagaccaacgacacctacatgaagttcagctggctgaccgtgcccgagaagtccctggacaaagaacacagatgcatcgtgcggcacgaaaacaacaagaacggcgtggaccaggaaatcatcttcccacccatcaagaccgatgtgattacaatggaccccaaggacaactgctccaaggacgccaacgataccctgctgctccagctgaccaacaccagcgcctactacatgtacttgttgctgctgctgaagtccgtggtgtacttcgccatcatcacatgctgcctgctgcggagaaccgccttctgctgcaacggcgagaagtctaggagtaagaggagcaggctcctgcacagtgactacatgaacatgactccacgccgccccggacccacccgcaagcattaccagccctatgccccaccacgcgacttcgcagcctatcgctccagagtgaagttcagcagaagcgccgacgcccctgcctaccagcagggacagaaccaactgtacaacgagctgaacctgggcagacgggaagagtacgacgtgctggacaagcggagaggcagggaccctgagatgggcggaaagccccagcggagaaagaacccccaggaaggactgtataacgaactccagaaagacaagatggccgaagcctacagcgagatcggcatgaagggcgagcggagaagaggcaagggccacgatggcctgtaccagggcctgagcaccgccaccaaggacacctatgacgccctgcacatgcaggccctgcctccaaga

SEQ ID NO: 25518 - DNA, 1233 bp, synthetic construct
  source 1..1233: mol_type = other DNA
ccacctgaggtggccgtgttcgagcctagcgaggccgagatcagccacacccagaaagccaccctcgtgtgcctggctaccggcttctaccccgaccatgtggaactgtcttggtgggtcaacggcaaagaggtgcacagcggcgtgtgtaccgacccccagccactgaaagaacagcccgccctgaacgacagccggtactgcctgagcagcagactgagagtgtccgccaccttctggcagaacccccggaaccacttcagatgccaggtgcagttctacggcctgagcgagaacgacgagtggacccaggacagagccaagcccgtgacccagatcgtgtctgccgaagcctggggcagagccgatgatgtgattaagatccactggcaggaaaagaagtccaacaccatcctgggcagccaggaaggcaacaccatgaagaccaacgacacctacatgaagttcagctggctgaccgtgcccgagaagtccctggacaaagaacacagatgcatcgtgcggcacgaaaacaacaagaacggcgtggaccaggaaatcatcttcccacccatcaagaccgatgtgattacaatggaccccaaggacaactgctccaaggacgccaacgataccctgctgctccagctgaccaacaccagcgcctactacatgtacttgttgctgctgctgaagtccgtggtgtacttcgccatcatcacatgctgcctgctgcggagaaccgccttctgctgcaacggcgagaagtctaggagtaagaggagcaggctcctgcacagtgactacatgaacatgactccacgccgccccggacccacccgcaagcattaccagccctatgccccaccacgcgacttcgcagcctatcgctccagagtgaagttcagcagaagcgccgacgcccctgcctaccagcagggacagaaccaactgtacaacgagctgaacctgggcagacgggaagagtacgacgtgctggacaagcggagaggcagggaccctgagatgggcggaaagccccagcggagaaagaacccccaggaaggactgtataacgaactccagaaagacaagatggccgaagcctacagcgagatcggcatgaagggcgagcggagaagaggcaagggccacgatggcctgtaccagggcctgagcaccgccaccaaggacacctatgacgccctgcacatgcaggccctgcctccaaga

SEQ ID NO: 25519 - DNA, 1230 bp, synthetic construct
  source 1..1230: mol_type = other DNA
cctgaggtggccgtgttcgagcctagcgaggccgagatcagccacacccagaaagccaccctcgtgtgcctggctaccggcttctaccccgaccatgtggaactgtcttggtgggtcaacggcaaagaggtgcacagcggcgtgtgtaccgacccccagccactgaaagaacagcccgccctgaacgacagccggtactgcctgagcagcagactgagagtgtccgccaccttctggcagaacccccggaaccacttcagatgccaggtgcagttctacggcctgagcgagaacgacgagtggacccaggacagagccaagcccgtgacccagatcgtgtctgccgaagcctggggcagagccgatgatgtgattaagatccactggcaggaaaagaagtccaacaccatcctgggcagccaggaaggcaacaccatgaagaccaacgacacctacatgaagttcagctggctgaccgtgcccgagaagtccctggacaaagaacacagatgcatcgtgcggcacgaaaacaacaagaacggcgtggaccaggaaatcatcttcccacccatcaagaccgatgtgattacaatggaccccaaggacaactgctccaaggacgccaacgataccctgctgctccagctgaccaacaccagcgcctactacatgtacttgttgctgctgctgaagtccgtggtgtacttcgccatcatcacatgctgcctgctgcggagaaccgccttctgctgcaacggcgagaagtctaggagtaagaggagcaggctcctgcacagtgactacatgaacatgactccacgccgccccggacccacccgcaagcattaccagccctatgccccaccacgcgacttcgcagcctatcgctccagagtgaagttcagcagaagcgccgacgcccctgcctaccagcagggacagaaccaactgtacaacgagctgaacctgggcagacgggaagagtacgacgtgctggacaagcggagaggcagggaccctgagatgggcggaaagccccagcggagaaagaacccccaggaaggactgtataacgaactccagaaagacaagatggccgaagcctacagcgagatcggcatgaagggcgagcggagaagaggcaagggccacgatggcctgtaccagggcctgagcaccgccaccaaggacacctatgacgccctgcacatgcaggccctgcctccaaga

SEQ ID NO: 25520 - DNA, 1227 bp, synthetic construct
  source 1..1227: mol_type = other DNA
gaggtggccgtgttcgagcctagcgaggccgagatcagccacacccagaaagccaccctcgtgtgcctggctaccggcttctaccccgaccatgtggaactgtcttggtgggtcaacggcaaagaggtgcacagcggcgtgtgtaccgacccccagccactgaaagaacagcccgccctgaacgacagccggtactgcctgagcagcagactgagagtgtccgccaccttctggcagaacccccggaaccacttcagatgccaggtgcagttctacggcctgagcgagaacgacgagtggacccaggacagagccaagcccgtgacccagatcgtgtctgccgaagcctggggcagagccgatgatgtgattaagatccactggcaggaaaagaagtccaacaccatcctgggcagccaggaaggcaacaccatgaagaccaacgacacctacatgaagttcagctggctgaccgtgcccgagaagtccctggacaaagaacacagatgcatcgtgcggcacgaaaacaacaagaacggcgtggaccaggaaatcatcttcccacccatcaagaccgatgtgattacaatggaccccaaggacaactgctccaaggacgccaacgataccctgctgctccagctgaccaacaccagcgcctactacatgtacttgttgctgctgctgaagtccgtggtgtacttcgccatcatcacatgctgcctgctgcggagaaccgccttctgctgcaacggcgagaagtctaggagtaagaggagcaggctcctgcacagtgactacatgaacatgactccacgccgccccggacccacccgcaagcattaccagccctatgccccaccacgcgacttcgcagcctatcgctccagagtgaagttcagcagaagcgccgacgcccctgcctaccagcagggacagaaccaactgtacaacgagctgaacctgggcagacgggaagagtacgacgtgctggacaagcggagaggcagggaccctgagatgggcggaaagccccagcggagaaagaacccccaggaaggactgtataacgaactccagaaagacaagatggccgaagcctacagcgagatcggcatgaagggcgagcggagaagaggcaagggccacgatggcctgtaccagggcctgagcaccgccaccaaggacacctatgacgccctgcacatgcaggccctgcctccaaga

SEQ ID NO: 25521 - DNA, 1224 bp, synthetic construct
  source 1..1224: mol_type = other DNA
gtggccgtgttcgagcctagcgaggccgagatcagccacacccagaaagccaccctcgtgtgcctggctaccggcttctaccccgaccatgtggaactgtcttggtgggtcaacggcaaagaggtgcacagcggcgtgtgtaccgacccccagccactgaaagaacagcccgccctgaacgacagccggtactgcctgagcagcagactgagagtgtccgccaccttctggcagaacccccggaaccacttcagatgccaggtgcagttctacggcctgagcgagaacgacgagtggacccaggacagagccaagcccgtgacccagatcgtgtctgccgaagcctggggcagagccgatgatgtgattaagatccactggcaggaaaagaagtccaacaccatcctgggcagccaggaaggcaacaccatgaagaccaacgacacctacatgaagttcagctggctgaccgtgcccgagaagtccctggacaaagaacacagatgcatcgtgcggcacgaaaacaacaagaacggcgtggaccaggaaatcatcttcccacccatcaagaccgatgtgattacaatggaccccaaggacaactgctccaaggacgccaacgataccctgctgctccagctgaccaacaccagcgcctactacatgtacttgttgctgctgctgaagtccgtggtgtacttcgccatcatcacatgctgcctgctgcggagaaccgccttctgctgcaacggcgagaagtctaggagtaagaggagcaggctcctgcacagtgactacatgaacatgactccacgccgccccggacccacccgcaagcattaccagccctatgccccaccacgcgacttcgcagcctatcgctccagagtgaagttcagcagaagcgccgacgcccctgcctaccagcagggacagaaccaactgtacaacgagctgaacctgggcagacgggaagagtacgacgtgctggacaagcggagaggcagggaccctgagatgggcggaaagccccagcggagaaagaacccccaggaaggactgtataacgaactccagaaagacaagatggccgaagcctacagcgagatcggcatgaagggcgagcggagaagaggcaagggccacgatggcctgtaccagggcctgagcaccgccaccaaggacacctatgacgccctgcacatgcaggccctgcctccaaga

SEQ ID NO: 25522 - DNA, 882 bp, synthetic construct; identical to SEQ ID NO: 25246
  source 1..882: mol_type = other DNA

SEQ ID NO: 25523 - DNA, 879 bp, synthetic construct
  source 1..879: mol_type = other DNA
cagaaccctgatcctgccgtgtaccagctgcgggatagcaagagcagcgacaagagcgtgtgtctgttcaccgacttcgacagccagaccaacgtgtcccagagcaaggactccgacgtgtacatcaccgataagtgcgtgctggacatgcggagcatggacttcaagagcaactccgccgtggcctggtccaacaagtccgatttcgcctgcgccaacgccttcaacaacagcattatccccgaggacacattcttcccaagccccgagagcagctgcgacgtgaagctggtggaaaagagcttcgagacagacaccaacctgaacttccagaacctgagcgtgatcggcttcagaatcctgctgctgaaagtggccggctttaacctgctgatgaccctgcggctgtggtccagcaggagtaagaggagcaggctcctgcacagtgactacatgaacatgactccacgccgccccggacccacccgcaagcattaccagccctatgccccaccacgcgacttcgcagcctatcgctccagagtgaagttcagcagaagcgccgacgcccctgcctaccagcagggacagaaccaactgtacaacgagctgaacctgggcagacgggaagagtacgacgtgctggacaagcggagaggcagggaccctgagatgggcggaaagccccagcggagaaagaacccccaggaaggactgtataacgaactccagaaagacaagatggccgaagcctacagcgagatcggcatgaagggcgagcggagaagaggcaagggccacgatggcctgtaccagggcctgagcaccgccaccaaggacacctatgacgccctgcacatgcaggccctgcctccaaga

SEQ ID NO: 25524 - DNA, 876 bp, synthetic construct
  source 1..876: mol_type = other DNA
aaccctgatcctgccgtgtaccagctgcgggatagcaagagcagcgacaagagcgtgtgtctgttcaccgacttcgacagccagaccaacgtgtcccagagcaaggactccgacgtgtacatcaccgataagtgcgtgctggacatgcggagcatggacttcaagagcaactccgccgtggcctggtccaacaagtccgatttcgcctgcgccaacgccttcaacaacagcattatccccgaggacacattcttcccaagccccgagagcagctgcgacgtgaagctggtggaaaagagcttcgagacagacaccaacctgaacttccagaacctgagcgtgatcggcttcagaatcctgctgctgaaagtggccggctttaacctgctgatgaccctgcggctgtggtccagcaggagtaagaggagcaggctcctgcacagtgactacatgaacatgactccacgccgccccggacccacccgcaagcattaccagccctatgccccaccacgcgacttcgcagcctatcgctccagagtgaagttcagcagaagcgccgacgcccctgcctaccagcagggacagaaccaactgtacaacgagctgaacctgggcagacgggaagagtacgacgtgctggacaagcggagaggcagggaccctgagatgggcggaaagccccagcggagaaagaacccccaggaaggactgtataacgaactccagaaagacaagatggccgaagcctacagcgagatcggcatgaagggcgagcggagaagaggcaagggccacgatggcctgtaccagggcctgagcaccgccaccaaggacacctatgacgccctgcacatgcaggccctgcctccaaga

SEQ ID NO: 25525 - DNA, 873 bp, synthetic construct; identical to SEQ ID NO: 25247
  source 1..873: mol_type = other DNA

SEQ ID NO: 25526 - DNA, 870 bp, synthetic construct
  source 1..870: mol_type = other DNA
gatcctgccgtgtaccagctgcgggatagcaagagcagcgacaagagcgtgtgtctgttcaccgacttcgacagccagaccaacgtgtcccagagcaaggactccgacgtgtacatcaccgataagtgcgtgctggacatgcggagcatggacttcaagagcaactccgccgtggcctggtccaacaagtccgatttcgcctgcgccaacgccttcaacaacagcattatccccgaggacacattcttcccaagccccgagagcagctgcgacgtgaagctggtggaaaagagcttcgagacagacaccaacctgaacttccagaacctgagcgtgatcggcttcagaatcctgctgctgaaagtggccggctttaacctgctgatgaccctgcggctgtggtccagcaggagtaagaggagcaggctcctgcacagtgactacatgaacatgactccacgccgccccggacccacccgcaagcattaccagccctatgccccaccacgcgacttcgcagcctatcgctccagagtgaagttcagcagaagcgccgacgcccctgcctaccagcagggacagaaccaactgtacaacgagctgaacctgggcagacgggaagagtacgacgtgctggacaagcggagaggcagggaccctgagatgggcggaaagccccagcggagaaagaacccccaggaaggactgtataacgaactccagaaagacaagatggccgaagcctacagcgagatcggcatgaagggcgagcggagaagaggcaagggccacgatggcctgtaccagggcctgagcaccgccaccaaggacacctatgacgccctgcacatgcaggccctgcctccaaga

SEQ ID NO: 25527 - DNA, 867 bp, synthetic construct
  source 1..867: mol_type = other DNA
cctgccgtgtaccagctgcgggatagcaagagcagcgacaagagcgtgtgtctgttcaccgacttcgacagccagaccaacgtgtcccagagcaaggactccgacgtgtacatcaccgataagtgcgtgctggacatgcggagcatggacttcaagagcaactccgccgtggcctggtccaacaagtccgatttcgcctgcgccaacgccttcaacaacagcattatccccgaggacacattcttcccaagccccgagagcagctgcgacgtgaagctggtggaaaagagcttcgagacagacaccaacctgaacttccagaacctgagcgtgatcggcttcagaatcctgctgctgaaagtggccggctttaacctgctgatgaccctgcggctgtggtccagcaggagtaagaggagcaggctcctgcacagtgactacatgaacatgactccacgccgccccggacccacccgcaagcattaccagccctatgccccaccacgcgacttcgcagcctatcgctccagagtgaagttcagcagaagcgccgacgcccctgcctaccagcagggacagaaccaactgtacaacgagctgaacctgggcagacgggaagagtacgacgtgctggacaagcggagaggcagggaccctgagatgggcggaaagccccagcggagaaagaacccccaggaaggactgtataacgaactccagaaagacaagatggccgaagcctacagcgagatcggcatgaagggcgagcggagaagaggcaagggccacgatggcctgtaccagggcctgagcaccgccaccaaggacacctatgacgccctgcacatgcaggccctgcctccaaga

SEQ ID NO: 25528 - DNA, 864 bp, synthetic construct
  source 1..864: mol_type = other DNA
gccgtgtaccagctgcgggatagcaagagcagcgacaagagcgtgtgtctgttcaccgacttcgacagccagaccaacgtgtcccagagcaaggactccgacgtgtacatcaccgataagtgcgtgctggacatgcggagcatggacttcaagagcaactccgccgtggcctggtccaacaagtccgatttcgcctgcgccaacgccttcaacaacagcattatccccgaggacacattcttcccaagccccgagagcagctgcgacgtgaagctggtggaaaagagcttcgagacagacaccaacctgaacttccagaacctgagcgtgatcggcttcagaatcctgctgctgaaagtggccggctttaacctgctgatgaccctgcggctgtggtccagcaggagtaagaggagcaggctcctgcacagtgactacatgaacatgactccacgccgccccggacccacccgcaagcattaccagccctatgccccaccacgcgacttcgcagcctatcgctccagagtgaagttcagcagaagcgccgacgcccctgcctaccagcagggacagaaccaactgtacaacgagctgaacctgggcagacgggaagagtacgacgtgctggacaagcggagaggcagggaccctgagatgggcggaaagccccagcggagaaagaacccccaggaaggactgtataacgaactccagaaagacaagatggccgaagcctacagcgagatcggcatgaagggcgagcggagaagaggcaagggccacgatggcctgtaccagggcctgagcaccgccaccaaggacacctatgacgccctgcacatgcaggccctgcctccaaga

SEQ ID NO: 25529 - DNA, 861 bp, synthetic construct
  source 1..861: mol_type = other DNA
gtgtaccagctgcgggatagcaagagcagcgacaagagcgtgtgtctgttcaccgacttcgacagccagaccaacgtgtcccagagcaaggactccgacgtgtacatcaccgataagtgcgtgctggacatgcggagcatggacttcaagagcaactccgccgtggcctggtccaacaagtccgatttcgcctgcgccaacgccttcaacaacagcattatccccgaggacacattcttcccaagccccgagagcagctgcgacgtgaagctggtggaaaagagcttcgagacagacaccaacctgaacttccagaacctgagcgtgatcggcttcagaatcctgctgctgaaagtggccggctttaacctgctgatgaccctgcggctgtggtccagcaggagtaagaggagcaggctcctgcacagtgactacatgaacatgactccacgccgccccggacccacccgcaagcattaccagccctatgccccaccacgcgacttcgcagcctatcgctccagagtgaagttcagcagaagcgccgacgcccctgcctaccagcagggacagaaccaactgtacaacgagctgaacctgggcagacgggaagagtacgacgtgctggacaagcggagaggcagggaccctgagatgggcggaaagccccagcggagaaagaacccccaggaaggactgtataacgaactccagaaagacaagatggccgaagcctacagcgagatcggcatgaagggcgagcggagaagaggcaagggccacgatggcctgtaccagggcctgagcaccgccaccaaggacacctatgacgccctgcacatgcaggccctgcctccaaga

SEQ ID NO: 25530 - DNA, 858 bp, synthetic construct
  source 1..858: mol_type = other DNA
taccagctgcgggatagcaagagcagcgacaagagcgtgtgtctgttcaccgacttcgacagccagaccaacgtgtcccagagcaaggactccgacgtgtacatcaccgataagtgcgtgctggacatgcggagcatggacttcaagagcaactccgccgtggcctggtccaacaagtccgatttcgcctgcgccaacgccttcaacaacagcattatccccgaggacacattcttcccaagccccgagagcagctgcgacgtgaagctggtggaaaagagcttcgagacagacaccaacctgaacttccagaacctgagcgtgatcggcttcagaatcctgctgctgaaagtggccggctttaacctgctgatgaccctgcggctgtggtccagcaggagtaagaggagcaggctcctgcacagtgactacatgaacatgactccacgccgccccggacccacccgcaagcattaccagccctatgccccaccacgcgacttcgcagcctatcgctccagagtgaagttcagcagaagcgccgacgcccctgcctaccagcagggacagaaccaactgtacaacgagctgaacctgggcagacgggaagagtacgacgtgctggacaagcggagaggcagggaccctgagatgggcggaaagccccagcggagaaagaacccccaggaaggactgtataacgaactccagaaagacaagatggccgaagcctacagcgagatcggcatgaagggcgagcggagaagaggcaagggccacgatggcctgtaccagggcctgagcaccgccaccaaggacacctatgacgccctgcacatgcaggccctgcctccaaga

SEQ ID NO: 25531 - DNA, 855 bp, synthetic construct
  source 1..855: mol_type = other DNA
cagctgcgggatagcaagagcagcgacaagagcgtgtgtctgttcaccgacttcgacagccagaccaacgtgtcccagagcaaggactccgacgtgtacatcaccgataagtgcgtgctggacatgcggagcatggacttcaagagcaactccgccgtggcctggtccaacaagtccgatttcgcctgcgccaacgccttcaacaacagcattatccccgaggacacattcttcccaagccccgagagcagctgcgacgtgaagctggtggaaaagagcttcgagacagacaccaacctgaacttccagaacctgagcgtgatcggcttcagaatcctgctgctgaaagtggccggctttaacctgctgatgaccctgcggctgtggtccagcaggagtaagaggagcaggctcctgcacagtgactacatgaacatgactccacgccgccccggacccacccgcaagcattaccagccctatgccccaccacgcgacttcgcagcctatcgctccagagtgaagttcagcagaagcgccgacgcccctgcctaccagcagggacagaaccaactgtacaacgagctgaacctgggcagacgggaagagtacgacgtgctggacaagcggagaggcagggaccctgagatgggcggaaagccccagcggagaaagaacccccaggaaggactgtataacgaactccagaaagacaagatggccgaagcctacagcgagatcggcatgaagggcgagcggagaagaggcaagggccacgatggcctgtaccagggcctgagcaccgccaccaaggacacctatgacgccctgcacatgcaggccctgcctccaaga

SEQ ID NO: 25532 - DNA, 852 bp, synthetic construct
  source 1..852: mol_type = other DNA
ctgcgggatagcaagagcagcgacaagagcgtgtgtctgttcaccgacttcgacagccagaccaacgtgtcccagagcaaggactccgacgtgtacatcaccgataagtgcgtgctggacatgcggagcatggacttcaagagcaactccgccgtggcctggtccaacaagtccgatttcgcctgcgccaacgccttcaacaacagcattatccccgaggacacattcttcccaagccccgagagcagctgcgacgtgaagctggtggaaaagagcttcgagacagacaccaacctgaacttccagaacctgagcgtgatcggcttcagaatcctgctgctgaaagtggccggctttaacctgctgatgaccctgcggctgtggtccagcaggagtaagaggagcaggctcctgcacagtgactacatgaacatgactccacgccgccccggacccacccgcaagcattaccagccctatgccccaccacgcgacttcgcagcctatcgctccagagtgaagttcagcagaagcgccgacgcccctgcctaccagcagggacagaaccaactgtacaacgagctgaacctgggcagacgggaagagtacgacgtgctggacaagcggagaggcagggaccctgagatgggcggaaagccccagcggagaaagaacccccaggaaggactgtataacgaactccagaaagacaagatggccgaagcctacagcgagatcggcatgaagggcgagcggagaagaggcaagggccacgatggcctgtaccagggcctgagcaccgccaccaaggacacctatgacgccctgcacatgcaggccctgcctccaaga

SEQ ID NO: 25533 - DNA, 849 bp, synthetic construct
  source 1..849: mol_type = other DNA
cgggatagcaagagcagcgacaagagcgtgtgtctgttcaccgacttcgacagccagaccaacgtgtcccagagcaaggactccgacgtgtacatcaccgataagtgcgtgctggacatgcggagcatggacttcaagagcaactccgccgtggcctggtccaacaagtccgatttcgcctgcgccaacgccttcaacaacagcattatccccgaggacacattcttcccaagccccgagagcagctgcgacgtgaagctggtggaaaagagcttcgagacagacaccaacctgaacttccagaacctgagcgtgatcggcttcagaatcctgctgctgaaagtggccggctttaacctgctgatgaccctgcggctgtggtccagcaggagtaagaggagcaggctcctgcacagtgactacatgaacatgactccacgccgccccggacccacccgcaagcattaccagccctatgccccaccacgcgacttcgcagcctatcgctccagagtgaagttcagcagaagcgccgacgcccctgcctaccagcagggacagaaccaactgtacaacgagctgaacctgggcagacgggaagagtacgacgtgctggacaagcggagaggcagggaccctgagatgggcggaaagccccagcggagaaagaacccccaggaaggactgtataacgaactccagaaagacaagatggccgaagcctacagcgagatcggcatgaagggcgagcggagaagaggcaagggccacgatggcctgtaccagggcctgagcaccgccaccaaggacacctatgacgccctgcacatgcaggccctgcctccaaga

SEQ ID NO: 25534 - DNA, 846 bp, synthetic construct
  source 1..846: mol_type = other DNA
gatagcaagagcagcgacaagagcgtgtgtctgttcaccgacttcgacagccagaccaacgtgtcccagagcaaggactccgacgtgtacatcaccgataagtgcgtgctggacatgcggagcatggacttcaagagcaactccgccgtggcctggtccaacaagtccgatttcgcctgcgccaacgccttcaacaacagcattatccccgaggacacattcttcccaagccccgagagcagctgcgacgtgaagctggtggaaaagagcttcgagacagacaccaacctgaacttccagaacctgagcgtgatcggcttcagaatcctgctgctgaaagtggccggctttaacctgctgatgaccctgcggctgtggtccagcaggagtaagaggagcaggctcctgcacagtgactacatgaacatgactccacgccgccccggacccacccgcaagcattaccagccctatgccccaccacgcgacttcgcagcctatcgctccagagtgaagttcagcagaagcgccgacgcccctgcctaccagcagggacagaaccaactgtacaacgagctgaacctgggcagacgggaagagtacgacgtgctggacaagcggagaggcagggaccctgagatgggcggaaagccccagcggagaaagaacccccaggaaggactgtataacgaactccagaaagacaagatggccgaagcctacagcgagatcggcatgaagggcgagcggagaagaggcaagggccacgatggcctgtaccagggcctgagcaccgccaccaaggacacctatgacgccctgcacatgcaggccctgcctccaaga

SEQ ID NO: 25535 - DNA, 843 bp, synthetic construct
  source 1..843: mol_type = other DNA
agcaagagcagcgacaagagcgtgtgtctgttcaccgacttcgacagccagaccaacgtgtcccagagcaaggactccgacgtgtacatcaccgataagtgcgtgctggacatgcggagcatggacttcaagagcaactccgccgtggcctggtccaacaagtccgatttcgcctgcgccaacgccttcaacaacagcattatccccgaggacacattcttcccaagccccgagagcagctgcgacgtgaagctggtggaaaagagcttcgagacagacaccaacctgaacttccagaacctgagcgtgatcggcttcagaatcctgctgctgaaagtggccggctttaacctgctgatgaccctgcggctgtggtccagcaggagtaagaggagcaggctcctgcacagtgactacatgaacatgactccacgccgccccggacccacccgcaagcattaccagccctatgccccaccacgcgacttcgcagcctatcgctccagagtgaagttcagcagaagcgccgacgcccctgcctaccagcagggacagaaccaactgtacaacgagctgaacctgggcagacgggaagagtacgacgtgctggacaagcggagaggcagggaccctgagatgggcggaaagccccagcggagaaagaacccccaggaaggactgtataacgaactccagaaagacaagatggccgaagcctacagcgagatcggcatgaagggcgagcggagaagaggcaagggccacgatggcctgtaccagggcctgagcaccgccaccaaggacacctatgacgccctgcacatgcaggccctgcctccaaga

SEQ ID NO: 25536 - DNA, 840 bp, synthetic construct
  source 1..840: mol_type = other DNA
aagagcagcgacaagagcgtgtgtctgttcaccgacttcgacagccagaccaacgtgtcccagagcaaggactccgacgtgtacatcaccgataagtgcgtgctggacatgcggagcatggacttcaagagcaactccgccgtggcctggtccaacaagtccgatttcgcctgcgccaacgccttcaacaacagcattatccccgaggacacattcttcccaagccccgagagcagctgcgacgtgaagctggtggaaaagagcttcgagacagacaccaacctgaacttccagaacctgagcgtgatcggcttcagaatcctgctgctgaaagtggccggctttaacctgctgatgaccctgcggctgtggtccagcaggagtaagaggagcaggctcctgcacagtgactacatgaacatgactccacgccgccccggacccacccgcaagcattaccagccctatgccccaccacgcgacttcgcagcctatcgctccagagtgaagttcagcagaagcgccgacgcccctgcctaccagcagggacagaaccaactgtacaacgagctgaacctgggcagacgggaagagtacgacgtgctggacaagcggagaggcagggaccctgagatgggcggaaagccccagcggagaaagaacccccaggaaggactgtataacgaactccagaaagacaagatggccgaagcctacagcgagatcggcatgaagggcgagcggagaagaggcaagggccacgatggcctgtaccagggcctgagcaccgccaccaaggacacctatgacgccctgcacatgcaggccctgcctccaaga

SEQ ID NO: 25537 - DNA, 837 bp, synthetic construct
  source 1..837: mol_type = other DNA
agcagcgacaagagcgtgtgtctgttcaccgacttcgacagccagaccaacgtgtcccagagcaaggactccgacgtgtacatcaccgataagtgcgtgctggacatgcggagcatggacttcaagagcaactccgccgtggcctggtccaacaagtccgatttcgcctgcgccaacgccttcaacaacagcattatccccgaggacacattcttcccaagccccgagagcagctgcgacgtgaagctggtggaaaagagcttcgagacagacaccaacctgaacttccagaacctgagcgtgatcggcttcagaatcctgctgctgaaagtggccggctttaacctgctgatgaccctgcggctgtggtccagcaggagtaagaggagcaggctcctgcacagtgactacatgaacatgactccacgccgccccggacccacccgcaagcattaccagccctatgccccaccacgcgacttcgcagcctatcgctccagagtgaagttcagcagaagcgccgacgcccctgcctaccagcagggacagaaccaactgtacaacgagctgaacctgggcagacgggaagagtacgacgtgctggacaagcggagaggcagggaccctgagatgggcggaaagccccagcggagaaagaacccccaggaaggactgtataacgaactccagaaagacaagatggccgaagcctacagcgagatcggcatgaagggcgagcggagaagaggcaagggccacgatggcctgtaccagggcctgagcaccgccaccaaggacacctatgacgccctgcacatgcaggccctgcctccaaga

SEQ ID NO: 25538 - DNA, 834 bp, synthetic construct
  source 1..834: mol_type = other DNA
agcgacaagagcgtgtgtctgttcaccgacttcgacagccagaccaacgtgtcccagagcaaggactccgacgtgtacatcaccgataagtgcgtgctggacatgcggagcatggacttcaagagcaactccgccgtggcctggtccaacaagtccgatttcgcctgcgccaacgccttcaacaacagcattatccccgaggacacattcttcccaagccccgagagcagctgcgacgtgaagctggtggaaaagagcttcgagacagacaccaacctgaacttccagaacctgagcgtgatcggcttcagaatcctgctgctgaaagtggccggctttaacctgctgatgaccctgcggctgtggtccagcaggagtaagaggagcaggctcctgcacagtgactacatgaacatgactccacgccgccccggacccacccgcaagcattaccagccctatgccccaccacgcgacttcgcagcctatcgctccagagtgaagttcagcagaagcgccgacgcccctgcctaccagcagggacagaaccaactgtacaacgagctgaacctgggcagacgggaagagtacgacgtgctggacaagcggagaggcagggaccctgagatgggcggaaagccccagcggagaaagaacccccaggaaggactgtataacgaactccagaaagacaagatggccgaagcctacagcgagatcggcatgaagggcgagcggagaagaggcaagggccacgatggcctgtaccagggcctgagcaccgccaccaaggacacctatgacgccctgcacatgcaggccctgcctccaaga

SEQ ID NO: 25539 - DNA, 831 bp, synthetic construct
  source 1..831: mol_type = other DNA
gacaagagcgtgtgtctgttcaccgacttcgacagccagaccaacgtgtcccagagcaaggactccgacgtgtacatcaccgataagtgcgtgctggacatgcggagcatggacttcaagagcaactccgccgtggcctggtccaacaagtccgatttcgcctgcgccaacgccttcaacaacagcattatccccgaggacacattcttcccaagccccgagagcagctgcgacgtgaagctggtggaaaagagcttcgagacagacaccaacctgaacttccagaacctgagcgtgatcggcttcagaatcctgctgctgaaagtggccggctttaacctgctgatgaccctgcggctgtggtccagcaggagtaagaggagcaggctcctgcacagtgactacatgaacatgactccacgccgccccggacccacccgcaagcattaccagccctatgccccaccacgcgacttcgcagcctatcgctccagagtgaagttcagcagaagcgccgacgcccctgcctaccagcagggacagaaccaactgtacaacgagctgaacctgggcagacgggaagagtacgacgtgctggacaagcggagaggcagggaccctgagatgggcggaaagccccagcggagaaagaacccccaggaaggactgtataacgaactccagaaagacaagatggccgaagcctacagcgagatcggcatgaagggcgagcggagaagaggcaagggccacgatggcctgtaccagggcctgagcaccgccaccaaggacacctatgacgccctgcacatgcaggccctgcctccaaga

SEQ ID NO: 25540 - DNA, 828 bp, synthetic construct
  source 1..828: mol_type = other DNA
aagagcgtgtgtctgttcaccgacttcgacagccagaccaacgtgtcccagagcaaggactccgacgtgtacatcaccgataagtgcgtgctggacatgcggagcatggacttcaagagcaactccgccgtggcctggtccaacaagtccgatttcgcctgcgccaacgccttcaacaacagcattatccccgaggacacattcttcccaagccccgagagcagctgcgacgtgaagctggtggaaaagagcttcgagacagacaccaacctgaacttccagaacctgagcgtgatcggcttcagaatcctgctgctgaaagtggccggctttaacctgctgatgaccctgcggctgtggtccagcaggagtaagaggagcaggctcctgcacagtgactacatgaacatgactccacgccgccccggacccacccgcaagcattaccagccctatgccccaccacgcgacttcgcagcctatcgctccagagtgaagttcagcagaagcgccgacgcccctgcctaccagcagggacagaaccaactgtacaacgagctgaacctgggcagacgggaagagtacgacgtgctggacaagcggagaggcagggaccctgagatgggcggaaagccccagcggagaaagaacccccaggaaggactgtataacgaactccagaaagacaagatggccgaagcctacagcgagatcggcatgaagggcgagcggagaagaggcaagggccacgatggcctgtaccagggcctgagcaccgccaccaaggacacctatgacgccctgcacatgcaggccctgcctccaaga

SEQ ID NO: 25541 - DNA, 825 bp, synthetic construct
  source 1..825: mol_type = other DNA
agcgtgtgtctgttcaccgacttcgacagccagaccaacgtgtcccagagcaaggactccgacgtgtacatcaccgataagtgcgtgctggacatgcggagcatggacttcaagagcaactccgccgtggcctggtccaacaagtccgatttcgcctgcgccaacgccttcaacaacagcattatccccgaggacacattcttcccaagccccgagagcagctgcgacgtgaagctggtggaaaagagcttcgagacagacaccaacctgaacttccagaacctgagcgtgatcggcttcagaatcctgctgctgaaagtggccggctttaacctgctgatgaccctgcggctgtggtccagcaggagtaagaggagcaggctcctgcacagtgactacatgaacatgactccacgccgccccggacccacccgcaagcattaccagccctatgccccaccacgcgacttcgcagcctatcgctccagagtgaagttcagcagaagcgccgacgcccctgcctaccagcagggacagaaccaactgtacaacgagctgaacctgggcagacgggaagagtacgacgtgctggacaagcggagaggcagggaccctgagatgggcggaaagccccagcggagaaagaacccccaggaaggactgtataacgaactccagaaagacaagatggccgaagcctacagcgagatcggcatgaagggcgagcggagaagaggcaagggccacgatggcctgtaccagggcctgagcaccgccaccaaggacacctatgacgccctgcacatgcaggccctgcctccaaga

SEQ ID NO: 25542 - DNA, 822 bp, synthetic construct
  source 1..822: mol_type = other DNA
gtgtgtctgttcaccgacttcgacagccagaccaacgtgtcccagagcaaggactccgacgtgtacatcaccgataagtgcgtgctggacatgcggagcatggacttcaagagcaactccgccgtggcctggtccaacaagtccgatttcgcctgcgccaacgccttcaacaacagcattatccccgaggacacattcttcccaagccccgagagcagctgcgacgtgaagctggtggaaaagagcttcgagacagacaccaacctgaacttccagaacctgagcgtgatcggcttcagaatcctgctgctgaaagtggccggctttaacctgctgatgaccctgcggctgtggtccagcaggagtaagaggagcaggctcctgcacagtgactacatgaacatgactccacgccgccccggacccacccgcaagcattaccagccctatgccccaccacgcgacttcgcagcctatcgctccagagtgaagttcagcagaagcgccgacgcccctgcctaccagcagggacagaaccaactgtacaacgagctgaacctgggcagacgggaagagtacgacgtgctggacaagcggagaggcagggaccctgagatgggcggaaagccccagcggagaaagaacccccaggaaggactgtataacgaactccagaaagacaagatggccgaagcctacagcgagatcggcatgaagggcgagcggagaagaggcaagggccacgatggcctgtaccagggcctgagcaccgccaccaaggacacctatgacgccctgcacatgcaggccctgcctccaaga

SEQ ID NO: 25543 - DNA, 819 bp, synthetic construct
  source 1..819: mol_type = other DNA
tgtctgttcaccgacttcgacagccagaccaacgtgtcccagagcaaggactccgacgtgtacatcaccgataagtgcgtgctggacatgcggagcatggacttcaagagcaactccgccgtggcctggtccaacaagtccgatttcgcctgcgccaacgccttcaacaacagcattatccccgaggacacattcttcccaagccccgagagcagctgcgacgtgaagctggtggaaaagagcttcgagacagacaccaacctgaacttccagaacctgagcgtgatcggcttcagaatcctgctgctgaaagtggccggctttaacctgctgatgaccctgcggctgtggtccagcaggagtaagaggagcaggctcctgcacagtgactacatgaacatgactccacgccgccccggacccacccgcaagcattaccagccctatgccccaccacgcgacttcgcagcctatcgctccagagtgaagttcagcagaagcgccgacgcccctgcctaccagcagggacagaaccaactgtacaacgagctgaacctgggcagacgggaagagtacgacgtgctggacaagcggagaggcagggaccctgagatgggcggaaagccccagcggagaaagaacccccaggaaggactgtataacgaactccagaaagacaagatggccgaagcctacagcgagatcggcatgaagggcgagcggagaagaggcaagggccacgatggcctgtaccagggcctgagcaccgccaccaaggacacctatgacgccctgcacatgcaggccctgcctccaaga

SEQ ID NO: 25544 - DNA, 816 bp, synthetic construct
  source 1..816: mol_type = other DNA
ctgttcaccgacttcgacagccagaccaacgtgtcccagagcaaggactccgacgtgtacatcaccgataagtgcgtgctggacatgcggagcatggacttcaagagcaactccgccgtggcctggtccaacaagtccgatttcgcctgcgccaacgccttcaacaacagcattatccccgaggacacattcttcccaagccccgagagcagctgcgacgtgaagctggtggaaaagagcttcgagacagacaccaacctgaacttccagaacctgagcgtgatcggcttcagaatcctgctgctgaaagtggccggctttaacctgctgatgaccctgcggctgtggtccagcaggagtaagaggagcaggctcctgcacagtgactacatgaacatgactccacgccgccccggacccacccgcaagcattaccagccctatgccccaccacgcgacttcgcagcctatcgctccagagtgaagttcagcagaagcgccgacgcccctgcctaccagcagggacagaaccaactgtacaacgagctgaacctgggcagacgggaagagtacgacgtgctggacaagcggagaggcagggaccctgagatgggcggaaagccccagcggagaaagaacccccaggaaggactgtataacgaactccagaaagacaagatggccgaagcctacagcgagatcggcatgaagggcgagcggagaagaggcaagggccacgatggcctgtaccagggcctgagcaccgccaccaaggacacctatgacgccctgcacatgcaggccctgcctccaaga

SEQ ID NO: 25545 - DNA, 813 bp, synthetic construct
  source 1..813: mol_type = other DNA
ttcaccgacttcgacagccagaccaacgtgtcccagagcaaggactccgacgtgtacatcaccgataagtgcgtgctggacatgcggagcatggacttcaagagcaactccgccgtggcctggtccaacaagtccgatttcgcctgcgccaacgccttcaacaacagcattatccccgaggacacattcttcccaagccccgagagcagctgcgacgtgaagctggtggaaaagagcttcgagacagacaccaacctgaacttccagaacctgagcgtgatcggcttcagaatcctgctgctgaaagtggccggctttaacctgctgatgaccctgcggctgtggtccagcaggagtaagaggagcaggctcctgcacagtgactacatgaacatgactccacgccgccccggacccacccgcaagcattaccagccctatgccccaccacgcgacttcgcagcctatcgctccagagtgaagttcagcagaagcgccgacgcccctgcctaccagcagggacagaaccaactgtacaacgagctgaacctgggcagacgggaagagtacgacgtgctggacaagcggagaggcagggaccctgagatgggcggaaagccccagcggagaaagaacccccaggaaggactgtataacgaactccagaaagacaagatggccgaagcctacagcgagatcggcatgaagggcgagcggagaagaggcaagggccacgatggcctgtaccagggcctgagcaccgccaccaaggacacctatgacgccctgcacatgcaggccctgcctccaaga

SEQ ID NO: 25546 - DNA, 810 bp, synthetic construct
  source 1..810: mol_type = other DNA
accgacttcgacagccagaccaacgtgtcccagagcaaggactccgacgtgtacatcaccgataagtgcgtgctggacatgcggagcatggacttcaagagcaactccgccgtggcctggtccaacaagtccgatttcgcctgcgccaacgccttcaacaacagcattatccccgaggacacattcttcccaagccccgagagcagctgcgacgtgaagctggtggaaaagagcttcgagacagacaccaacctgaacttccagaacctgagcgtgatcggcttcagaatcctgctgctgaaagtggccggctttaacctgctgatgaccctgcggctgtggtccagcaggagtaagaggagcaggctcctgcacagtgactacatgaacatgactccacgccgccccggacccacccgcaagcattaccagccctatgccccaccacgcgacttcgcagcctatcgctccagagtgaagttcagcagaagcgccgacgcccctgcctaccagcagggacagaaccaactgtacaacgagctgaacctgggcagacgggaagagtacgacgtgctggacaagcggagaggcagggaccctgagatgggcggaaagccccagcggagaaagaacccccaggaaggactgtataacgaactccagaaagacaagatggccgaagcctacagcgagatcggcatgaagggcgagcggagaagaggcaagggccacgatggcctgtaccagggcctgagcaccgccaccaaggacacctatgacgccctgcacatgcaggccctgcctccaaga

SEQ ID NO: 25547 - DNA, 807 bp, synthetic construct
  source 1..807: mol_type = other DNA
gacttcgacagccagaccaacgtgtcccagagcaaggactccgacgtgtacatcaccgataagtgcgtgctggacatgcggagcatggacttcaagagcaactccgccgtggcctggtccaacaagtccgatttcgcctgcgccaacgccttcaacaacagcattatccccgaggacacattcttcccaagccccgagagcagctgcgacgtgaagctggtggaaaagagcttcgagacagacaccaacctgaacttccagaacctgagcgtgatcggcttcagaatcctgctgctgaaagtggccggctttaacctgctgatgaccctgcggctgtggtccagcaggagtaagaggagcaggctcctgcacagtgactacatgaacatgactccacgccgccccggacccacccgcaagcattaccagccctatgccccaccacgcgacttcgcagcctatcgctccagagtgaagttcagcagaagcgccgacgcccctgcctaccagcagggacagaaccaactgtacaacgagctgaacctgggcagacgggaagagtacgacgtgctggacaagcggagaggcagggaccctgagatgggcggaaagccccagcggagaaagaacccccaggaaggactgtataacgaactccagaaagacaagatggccgaagcctacagcgagatcggcatgaagggcgagcggagaagaggcaagggccacgatggcctgtaccagggcctgagcaccgccaccaaggacacctatgacgccctgcacatgcaggccctgcctccaaga

SEQ ID NO: 25548 - DNA, 804 bp, synthetic construct
  source 1..804: mol_type = other DNA
ttcgacagccagaccaacgtgtcccagagcaaggactccgacgtgtacatcaccgataagtgcgtgctggacatgcggagcatggacttcaagagcaactccgccgtggcctggtccaacaagtccgatttcgcctgcgccaacgccttcaacaacagcattatccccgaggacacattcttcccaagccccgagagcagctgcgacgtgaagctggtggaaaagagcttcgagacagacaccaacctgaacttccagaacctgagcgtgatcggcttcagaatcctgctgctgaaagtggccggctttaacctgctgatgaccctgcggctgtggtccagcaggagtaagaggagcaggctcctgcacagtgactacatgaacatgactccacgccgccccggacccacccgcaagcattaccagccctatgccccaccacgcgacttcgcagcctatcgctccagagtgaagttcagcagaagcgccgacgcccctgcctaccagcagggacagaaccaactgtacaacgagctgaacctgggcagacgggaagagtacgacgtgctggacaagcggagaggcagggaccctgagatgggcggaaagccccagcggagaaagaacccccaggaaggactgtataacgaactccagaaagacaagatggccgaagcctacagcgagatcggcatgaagggcgagcggagaagaggcaagggccacgatggcctgtaccagggcctgagcaccgccaccaaggacacctatgacgccctgcacatgcaggccctgcctccaaga

SEQ ID NO: 25549 - DNA, 801 bp, synthetic construct
  source 1..801: mol_type = other DNA
gacagccagaccaacgtgtcccagagcaaggactccgacgtgtacatcaccgataagtgcgtgctggacatgcggagcatggacttcaagagcaactccgccgtggcctggtccaacaagtccgatttcgcctgcgccaacgccttcaacaacagcattatccccgaggacacattcttcccaagccccgagagcagctgcgacgtgaagctggtggaaaagagcttcgagacagacaccaacctgaacttccagaacctgagcgtgatcggcttcagaatcctgctgctgaaagtggccggctttaacctgctgatgaccctgcggctgtggtccagcaggagtaagaggagcaggctcctgcacagtgactacatgaacatgactccacgccgccccggacccacccgcaagcattaccagccctatgccccaccacgcgacttcgcagcctatcgctccagagtgaagttcagcagaagcgccgacgcccctgcctaccagcagggacagaaccaactgtacaacgagctgaacctgggcagacgggaagagtacgacgtgctggacaagcggagaggcagggaccctgagatgggcggaaagccccagcggagaaagaacccccaggaaggactgtataacgaactccagaaagacaagatggccgaagcctacagcgagatcggcatgaagggcgagcggagaagaggcaagggccacgatggcctgtaccagggcctgagcaccgccaccaaggacacctatgacgccctgcacatgcaggccctgcctccaaga

SEQ ID NO: 25550 - DNA, 798 bp, synthetic construct
  source 1..798: mol_type = other DNA
agccagaccaacgtgtcccagagcaaggactccgacgtgtacatcaccgataagtgcgtgctggacatgcggagcatggacttcaagagcaactccgccgtggcctggtccaacaagtccgatttcgcctgcgccaacgccttcaacaacagcattatccccgaggacacattcttcccaagccccgagagcagctgcgacgtgaagctggtggaaaagagcttcgagacagacaccaacctgaacttccagaacctgagcgtgatcggcttcagaatcctgctgctgaaagtggccggctttaacctgctgatgaccctgcggctgtggtccagcaggagtaagaggagcaggctcctgcacagtgactacatgaacatgactccacgccgccccggacccacccgcaagcattaccagccctatgccccaccacgcgacttcgcagcctatcgctccagagtgaagttcagcagaagcgccgacgcccctgcctaccagcagggacagaaccaactgtacaacgagctgaacctgggcagacgggaagagtacgacgtgctggacaagcggagaggcagggaccctgagatgggcggaaagccccagcggagaaagaacccccaggaaggactgtataacgaactccagaaagacaagatggccgaagcctacagcgagatcggcatgaagggcgagcggagaagaggcaagggccacgatggcctgtaccagggcctgagcaccgccaccaaggacacctatgacgccctgcacatgcaggccctgcctccaaga

SEQ ID NO: 25551 - DNA, 795 bp, synthetic construct
  source 1..795: mol_type = other DNA
cagaccaacgtgtcccagagcaaggactccgacgtgtacatcaccgataagtgcgtgctggacatgcggagcatggacttcaagagcaactccgccgtggcctggtccaacaagtccgatttcgcctgcgccaacgccttcaacaacagcattatccccgaggacacattcttcccaagccccgagagcagctgcgacgtgaagctggtggaaaagagcttcgagacagacaccaacctgaacttccagaacctgagcgtgatcggcttcagaatcctgctgctgaaagtggccggctttaacctgctgatgaccctgcggctgtggtccagcaggagtaagaggagcaggctcctgcacagtgactacatgaacatgactccacgccgccccggacccacccgcaagcattaccagccctatgccccaccacgcgacttcgcagcctatcgctccagagtgaagttcagcagaagcgccgacgcccctgcctaccagcagggacagaaccaactgtacaacgagctgaacctgggcagacgggaagagtacgacgtgctggacaagcggagaggcagggaccctgagatgggcggaaagccccagcggagaaagaacccccaggaaggactgtataacgaactccagaaagacaagatggccgaagcctacagcgagatcggcatgaagggcgagcggagaagaggcaagggccacgatggcctgtaccagggcctgagcaccgccaccaaggacacctatgacgccctgcacatgcaggccctgcctccaaga

SEQ ID NO: 25552 - DNA, 792 bp, synthetic construct
  source 1..792: mol_type = other DNA
accaacgtgtcccagagcaaggactccgacgtgtacatcaccgataagtgcgtgctggacatgcggagcatggacttcaagagcaactccgccgtggcctggtccaacaagtccgatttcgcctgcgccaacgccttcaacaacagcattatccccgaggacacattcttcccaagccccgagagcagctgcgacgtgaagctggtggaaaagagcttcgagacagacaccaacctgaacttccagaacctgagcgtgatcggcttcagaatcctgctgctgaaagtggccggctttaacctgctgatgaccctgcggctgtggtccagcaggagtaagaggagcaggctcctgcacagtgactacatgaacatgactccacgccgccccggacccacccgcaagcattaccagccctatgccccaccacgcgacttcgcagcctatcgctccagagtgaagttcagcagaagcgccgacgcccctgcctaccagcagggacagaaccaactgtacaacgagctgaacctgggcagacgggaagagtacgacgtgctggacaagcggagaggcagggaccctgagatgggcggaaagccccagcggagaaagaacccccaggaaggactgtataacgaactccagaaagacaagatggccgaagcctacagcgagatcggcatgaagggcgagcggagaagaggcaagggccacgatggcctgtaccagggcctgagcaccgccaccaaggacacctatgacgccctgcacatgcaggccctgcctccaaga

SEQ ID NO: 25553 - DNA, 789 bp, synthetic construct
  source 1..789: mol_type = other DNA
aacgtgtcccagagcaaggactccgacgtgtacatcaccgataagtgcgtgctggacatgcggagcatggacttcaagagcaactccgccgtggcctggtccaacaagtccgatttcgcctgcgccaacgccttcaacaacagcattatccccgaggacacattcttcccaagccccgagagcagctgcgacgtgaagctggtggaaaagagcttcgagacagacaccaacctgaacttccagaacctgagcgtgatcggcttcagaatcctgctgctgaaagtggccggctttaacctgctgatgaccctgcggctgtggtccagcaggagtaagaggagcaggctcctgcacagtgactacatgaacatgactccacgccgccccggacccacccgcaagcattaccagccctatgccccaccacgcgacttcgcagcctatcgctccagagtgaagttcagcagaagcgccgacgcccctgcctaccagcagggacagaaccaactgtacaacgagctgaacctgggcagacgggaagagtacgacgtgctggacaagcggagaggcagggaccctgagatgggcggaaagccccagcggagaaagaacccccaggaaggactgtataacgaactccagaaagacaagatggccgaagcctacagcgagatcggcatgaagggcgagcggagaagaggcaagggccacgatggcctgtaccagggcctgagcaccgccaccaaggacacctatgacgccctgcacatgcaggccctgcctccaaga

SEQ ID NO: 25554 - DNA, 786 bp, synthetic construct
  source 1..786: mol_type = other DNA
gtgtcccagagcaaggactccgacgtgtacatcaccgataagtgcgtgctggacatgcggagcatggacttcaagagcaactccgccgtggcctggtccaacaagtccgatttcgcctgcgccaacgccttcaacaacagcattatccccgaggacacattcttcccaagccccgagagcagctgcgacgtgaagctggtggaaaagagcttcgagacagacaccaacctgaacttccagaacctgagcgtgatcggcttcagaatcctgctgctgaaagtggccggctttaacctgctgatgaccctgcggctgtggtccagcaggagtaagaggagcaggctcctgcacagtgactacatgaacatgactccacgccgccccggacccacccgcaagcattaccagccctatgccccaccacgcgacttcgcagcctatcgctccagagtgaagttcagcagaagcgccgacgcccctgcctaccagcagggacagaaccaactgtacaacgagctgaacctgggcagacgggaagagtacgacgtgctggacaagcggagaggcagggaccctgagatgggcggaaagccccagcggagaaagaacccccaggaaggactgtataacgaactccagaaagacaagatggccgaagcctacagcgagatcggcatgaagggcgagcggagaagaggcaagggccacgatggcctgtaccagggcctgagcaccgccaccaaggacacctatgacgccctgcacatgcaggccctgcctccaaga

SEQ ID NO: 25555 - DNA, 783 bp, synthetic construct
  source 1..783: mol_type = other DNA
tcccagagcaaggactccgacgtgtacatcaccgataagtgcgtgctggacatgcggagcatggacttcaagagcaactccgccgtggcctggtccaacaagtccgatttcgcctgcgccaacgccttcaacaacagcattatccccgaggacacattcttcccaagccccgagagcagctgcgacgtgaagctggtggaaaagagcttcgagacagacaccaacctgaacttccagaacctgagcgtgatcggcttcagaatcctgctgctgaaagtggccggctttaacctgctgatgaccctgcggctgtggtccagcaggagtaagaggagcaggctcctgcacagtgactacatgaacatgactccacgccgccccggacccacccgcaagcattaccagccctatgccccaccacgcgacttcgcagcctatcgctccagagtgaagttcagcagaagcgccgacgcccctgcctaccagcagggacagaaccaactgtacaacgagctgaacctgggcagacgggaagagtacgacgtgctggacaagcggagaggcagggaccctgagatgggcggaaagccccagcggagaaagaacccccaggaaggactgtataacgaactccagaaagacaagatggccgaagcctacagcgagatcggcatgaagggcgagcggagaagaggcaagggccacgatggcctgtaccagggcctgagcaccgccaccaaggacacctatgacgccctgcacatgcaggccctgcctccaaga

SEQ ID NO: 25556 - DNA, 780 bp, synthetic construct
  source 1..780: mol_type = other DNA
cagagcaaggactccgacgtgtacatcaccgataagtgcgtgctggacatgcggagcatggacttcaagagcaactccgccgtggcctggtccaacaagtccgatttcgcctgcgccaacgccttcaacaacagcattatccccgaggacacattcttcccaagccccgagagcagctgcgacgtgaagctggtggaaaagagcttcgagacagacaccaacctgaacttccagaacctgagcgtgatcggcttcagaatcctgctgctgaaagtggccggctttaacctgctgatgaccctgcggctgtggtccagcaggagtaagaggagcaggctcctgcacagtgactacatgaacatgactccacgccgccccggacccacccgcaagcattaccagccctatgccccaccacgcgacttcgcagcctatcgctccagagtgaagttcagcagaagcgccgacgcccctgcctaccagcagggacagaaccaactgtacaacgagctgaacctgggcagacgggaagagtacgacgtgctggacaagcggagaggcagggaccctgagatgggcggaaagccccagcggagaaagaacccccaggaaggactgtataacgaactccagaaagacaagatggccgaagcctacagcgagatcggcatgaagggcgagcggagaagaggcaagggccacgatggcctgtaccagggcctgagcaccgccaccaaggacacctatgacgccctgcacatgcaggccctgcctccaaga

SEQ ID NO: 25557 - DNA, 777 bp, synthetic construct
  source 1..777: mol_type = other DNA
agcaaggactccgacgtgtacatcaccgataagtgcgtgctggacatgcggagcatggacttcaagagcaactccgccgtggcctggtccaacaagtccgatttcgcctgcgccaacgccttcaacaacagcattatccccgaggacacattcttcccaagccccgagagcagctgcgacgtgaagctggtggaaaagagcttcgagacagacaccaacctgaacttccagaacctgagcgtgatcggcttcagaatcctgctgctgaaagtggccggctttaacctgctgatgaccctgcggctgtggtccagcaggagtaagaggagcaggctcctgcacagtgactacatgaacatgactccacgccgccccggacccacccgcaagcattaccagccctatgccccaccacgcgacttcgcagcctatcgctccagagtgaagttcagcagaagcgccgacgcccctgcctaccagcagggacagaaccaactgtacaacgagctgaacctgggcagacgggaagagtacgacgtgctggacaagcggagaggcagggaccctgagatgggcggaaagccccagcggagaaagaacccccaggaaggactgtataacgaactccagaaagacaagatggccgaagcctacagcgagatcggcatgaagggcgagcggagaagaggcaagggccacgatggcctgtaccagggcctgagcaccgccaccaaggacacctatgacgccctgcacatgcaggccctgcctccaaga

SEQ ID NO: 25558 - DNA, 774 bp, synthetic construct
  source 1..774: mol_type = other DNA
aaggactccgacgtgtacatcaccgataagtgcgtgctggacatgcggagcatggacttcaagagcaactccgccgtggcctggtccaacaagtccgatttcgcctgcgccaacgccttcaacaacagcattatccccgaggacacattcttcccaagccccgagagcagctgcgacgtgaagctggtggaaaagagcttcgagacagacaccaacctgaacttccagaacctgagcgtgatcggcttcagaatcctgctgctgaaagtggccggctttaacctgctgatgaccctgcggctgtggtccagcaggagtaagaggagcaggctcctgcacagtgactacatgaacatgactccacgccgccccggacccacccgcaagcattaccagccctatgccccaccacgcgacttcgcagcctatcgctccagagtgaagttcagcagaagcgccgacgcccctgcctaccagcagggacagaaccaactgtacaacgagctgaacctgggcagacgggaagagtacgacgtgctggacaagcggagaggcagggaccctgagatgggcggaaagccccagcggagaaagaacccccaggaaggactgtataacgaactccagaaagacaagatggccgaagcctacagcgagatcggcatgaagggcgagcggagaagaggcaagggccacgatggcctgtaccagggcctgagcaccgccaccaaggacacctatgacgccctgcacatgcaggccctgcctccaaga

SEQ ID NO: 25559 - DNA, 771 bp, synthetic construct
  source 1..771: mol_type = other DNA
gactccgacgtgtacatcaccgataagtgcgtgctggacatgcggagcatggacttcaagagcaactccgccgtggcctggtccaacaagtccgatttcgcctgcgccaacgccttcaacaacagcattatccccgaggacacattcttcccaagccccgagagcagctgcgacgtgaagctggtggaaaagagcttcgagacagacaccaacctgaacttccagaacctgagcgtgatcggcttcagaatcctgctgctgaaagtggccggctttaacctgctgatgaccctgcggctgtggtccagcaggagtaagaggagcaggctcctgcacagtgactacatgaacatgactccacgccgccccggacccacccgcaagcattaccagccctatgccccaccacgcgacttcgcagcctatcgctccagagtgaagttcagcagaagcgccgacgcccctgcctaccagcagggacagaaccaactgtacaacgagctgaacctgggcagacgggaagagtacgacgtgctggacaagcggagaggcagggaccctgagatgggcggaaagccccagcggagaaagaacccccaggaaggactgtataacgaactccagaaagacaagatggccgaagcctacagcgagatcggcatgaagggcgagcggagaagaggcaagggccacgatggcctgtaccagggcctgagcaccgccaccaaggacacctatgacgccctgcacatgcaggccctgcctccaaga

SEQ ID NO: 25560 - DNA, 768 bp, synthetic construct
  source 1..768: mol_type = other DNA
tccgacgtgtacatcaccgataagtgcgtgctggacatgcggagcatggacttcaagagcaactccgccgtggcctggtccaacaagtccgatttcgcctgcgccaacgccttcaacaacagcattatccccgaggacacattcttcccaagccccgagagcagctgcgacgtgaagctggtggaaaagagcttcgagacagacaccaacctgaacttccagaacctgagcgtgatcggcttcagaatcctgctgctgaaagtggccggctttaacctgctgatgaccctgcggctgtggtccagcaggagtaagaggagcaggctcctgcacagtgactacatgaacatgactccacgccgccccggacccacccgcaagcattaccagccctatgccccaccacgcgacttcgcagcctatcgctccagagtgaagttcagcagaagcgccgacgcccctgcctaccagcagggacagaaccaactgtacaacgagctgaacctgggcagacgggaagagtacgacgtgctggacaagcggagaggcagggaccctgagatgggcggaaagccccagcggagaaagaacccccaggaaggactgtataacgaactccagaaagacaagatggccgaagcctacagcgagatcggcatgaagggcgagcggagaagaggcaagggccacgatggcctgtaccagggcctgagcaccgccaccaaggacacctatgacgccctgcacatgcaggccctgcctccaaga

SEQ ID NO: 25561 - DNA, 765 bp, synthetic construct
  source 1..765: mol_type = other DNA
gacgtgtacatcaccgataagtgcgtgctggacatgcggagcatggacttcaagagcaactccgccgtggcctggtccaacaagtccgatttcgcctgcgccaacgccttcaacaacagcattatccccgaggacacattcttcccaagccccgagagcagctgcgacgtgaagctggtggaaaagagcttcgagacagacaccaacctgaacttccagaacctgagcgtgatcggcttcagaatcctgctgctgaaagtggccggctttaacctgctgatgaccctgcggctgtggtccagcaggagtaagaggagcaggctcctgcacagtgactacatgaacatgactccacgccgccccggacccacccgcaagcattaccagccctatgccccaccacgcgacttcgcagcctatcgctccagagtgaagttcagcagaagcgccgacgcccctgcctaccagcagggacagaaccaactgtacaacgagctgaacctgggcagacgggaagagtacgacgtgctggacaagcggagaggcagggaccctgagatgggcggaaagccccagcggagaaagaacccccaggaaggactgtataacgaactccagaaagacaagatggccgaagcctacagcgagatcggcatgaagggcgagcggagaagaggcaagggccacgatggcctgtaccagggcctgagcaccgccaccaaggacacctatgacgccctgcacatgcaggccctgcctccaaga

SEQ ID NO: 25562 - DNA, 762 bp, synthetic construct
  source 1..762: mol_type = other DNA
gtgtacatcaccgataagtgcgtgctggacatgcggagcatggacttcaagagcaactccgccgtggcctggtccaacaagtccgatttcgcctgcgccaacgccttcaacaacagcattatccccgaggacacattcttcccaagccccgagagcagctgcgacgtgaagctggtggaaaagagcttcgagacagacaccaacctgaacttccagaacctgagcgtgatcggcttcagaatcctgctgctgaaagtggccggctttaacctgctgatgaccctgcggctgtggtccagcaggagtaagaggagcaggctcctgcacagtgactacatgaacatgactccacgccgccccggacccacccgcaagcattaccagccctatgccccaccacgcgacttcgcagcctatcgctccagagtgaagttcagcagaagcgccgacgcccctgcctaccagcagggacagaaccaactgtacaacgagctgaacctgggcagacgggaagagtacgacgtgctggacaagcggagaggcagggaccctgagatgggcggaaagccccagcggagaaagaacccccaggaaggactgtataacgaactccagaaagacaagatggccgaagcctacagcgagatcggcatgaagggcgagcggagaagaggcaagggccacgatggcctgtaccagggcctgagcaccgccaccaaggacacctatgacgccctgcacatgcaggccctgcctccaaga

SEQ ID NO: 25563 - DNA, 759 bp, synthetic construct
  source 1..759: mol_type = other DNA
tacatcaccgataagtgcgtgctggacatgcggagcatggacttcaagagcaactccgccgtggcctggtccaacaagtccgatttcgcctgcgccaacgccttcaacaacagcattatccccgaggacacattcttcccaagccccgagagcagctgcgacgtgaagctggtggaaaagagcttcgagacagacaccaacctgaacttccagaacctgagcgtgatcggcttcagaatcctgctgctgaaagtggccggctttaacctgctgatgaccctgcggctgtggtccagcaggagtaagaggagcaggctcctgcacagtgactacatgaacatgactccacgccgccccggacccacccgcaagcattaccagccctatgccccaccacgcgacttcgcagcctatcgctccagagtgaagttcagcagaagcgccgacgcccctgcctaccagcagggacagaaccaactgtacaacgagctgaacctgggcagacgggaagagtacgacgtgctggacaagcggagaggcagggaccctgagatgggcggaaagccccagcggagaaagaacccccaggaaggactgtataacgaactccagaaagacaagatggccgaagcctacagcgagatcggcatgaagggcgagcggagaagaggcaagggccacgatggcctgtaccagggcctgagcaccgccaccaaggacacctatgacgccctgcacatgcaggccctgcctccaaga

SEQ ID NO: 25564 - DNA, 756 bp, synthetic construct
  source 1..756: mol_type = other DNA
atcaccgataagtgcgtgctggacatgcggagcatggacttcaagagcaactccgccgtggcctggtccaacaagtccgatttcgcctgcgccaacgccttcaacaacagcattatccccgaggacacattcttcccaagccccgagagcagctgcgacgtgaagctggtggaaaagagcttcgagacagacaccaacctgaacttccagaacctgagcgtgatcggcttcagaatcctgctgctgaaagtggccggctttaacctgctgatgaccctgcggctgtggtccagcaggagtaagaggagcaggctcctgcacagtgactacatgaacatgactccacgccgccccggacccacccgcaagcattaccagccctatgccccaccacgcgacttcgcagcctatcgctccagagtgaagttcagcagaagcgccgacgcccctgcctaccagcagggacagaaccaactgtacaacgagctgaacctgggcagacgggaagagtacgacgtgctggacaagcggagaggcagggaccctgagatgggcggaaagccccagcggagaaagaacccccaggaaggactgtataacgaactccagaaagacaagatggccgaagcctacagcgagatcggcatgaagggcgagcggagaagaggcaagggccacgatggcctgtaccagggcctgagcaccgccaccaaggacacctatgacgccctgcacatgcaggccctgcctccaaga

SEQ ID NO: 25565 - DNA, 753 bp, synthetic construct
  source 1..753: mol_type = other DNA
accgataagtgcgtgctggacatgcggagcatggacttcaagagcaactccgccgtggcctggtccaacaagtccgatttcgcctgcgccaacgccttcaacaacagcattatccccgaggacacattcttcccaagccccgagagcagctgcgacgtgaagctggtggaaaagagcttcgagacagacaccaacctgaacttccagaacctgagcgtgatcggcttcagaatcctgctgctgaaagtggccggctttaacctgctgatgaccctgcggctgtggtccagcaggagtaagaggagcaggctcctgcacagtgactacatgaacatgactccacgccgccccggacccacccgcaagcattaccagccctatgccccaccacgcgacttcgcagcctatcgctccagagtgaagttcagcagaagcgccgacgcccctgcctaccagcagggacagaaccaactgtacaacgagctgaacctgggcagacgggaagagtacgacgtgctggacaagcggagaggcagggaccctgagatgggcggaaagccccagcggagaaagaacccccaggaaggactgtataacgaactccagaaagacaagatggccgaagcctacagcgagatcggcatgaagggcgagcggagaagaggcaagggccacgatggcctgtaccagggcctgagcaccgccaccaaggacacctatgacgccctgcacatgcaggccctgcctccaaga

SEQ ID NO: 25566 - DNA, 750 bp, synthetic construct
  source 1..750: mol_type = other DNA
gataagtgcgtgctggacatgcggagcatggacttcaagagcaactccgccgtggcctggtccaacaagtccgatttcgcctgcgccaacgccttcaacaacagcattatccccgaggacacattcttcccaagccccgagagcagctgcgacgtgaagctggtggaaaagagcttcgagacagacaccaacctgaacttccagaacctgagcgtgatcggcttcagaatcctgctgctgaaagtggccggctttaacctgctgatgaccctgcggctgtggtccagcaggagtaagaggagcaggctcctgcacagtgactacatgaacatgactccacgccgccccggacccacccgcaagcattaccagccctatgccccaccacgcgacttcgcagcctatcgctccagagtgaagttcagcagaagcgccgacgcccctgcctaccagcagggacagaaccaactgtacaacgagctgaacctgggcagacgggaagagtacgacgtgctggacaagcggagaggcagggaccctgagatgggcggaaagccccagcggagaaagaacccccaggaaggactgtataacgaactccagaaagacaagatggccgaagcctacagcgagatcggcatgaagggcgagcggagaagaggcaagggccacgatggcctgtaccagggcctgagcaccgccaccaaggacacctatgacgccctgcacatgcaggccctgcctccaaga

SEQ ID NO: 25567 - DNA, 744 bp, synthetic construct
  source 1..744: mol_type = other DNA
tgcgtgctggacatgcggagcatggacttcaagagcaactccgccgtggcctggtccaacaagtccgatttcgcctgcgccaacgccttcaacaacagcattatccccgaggacacattcttcccaagccccgagagcagctgcgacgtgaagctggtggaaaagagcttcgagacagacaccaacctgaacttccagaacctgagcgtgatcggcttcagaatcctgctgctgaaagtggccggctttaacctgctgatgaccctgcggctgtggtccagcaggagtaagaggagcaggctcctgcacagtgactacatgaacatgactccacgccgccccggacccacccgcaagcattaccagccctatgccccaccacgcgacttcgcagcctatcgctccagagtgaagttcagcagaagcgccgacgcccctgcctaccagcagggacagaaccaactgtacaacgagctgaacctgggcagacgggaagagtacgacgtgctggacaagcggagaggcagggaccctgagatgggcggaaagccccagcggagaaagaacccccaggaaggactgtataacgaactccagaaagacaagatggccgaagcctacagcgagatcggcatgaagggcgagcggagaagaggcaagggccacgatggcctgtaccagggcctgagcaccgccaccaaggacacctatgacgccctgcacatgcaggccctgcctccaaga

SEQ ID NO: 25568 - DNA, 741 bp, synthetic construct
  source 1..741: mol_type = other DNA
gtgctggacatgcggagcatggacttcaagagcaactccgccgtggcctggtccaacaagtccgatttcgcctgcgccaacgccttcaacaacagcattatccccgaggacacattcttcccaagccccgagagcagctgcgacgtgaagctggtggaaaagagcttcgagacagacaccaacctgaacttccagaacctgagcgtgatcggcttcagaatcctgctgctgaaagtggccggctttaacctgctgatgaccctgcggctgtggtccagcaggagtaagaggagcaggctcctgcacagtgactacatgaacatgactccacgccgccccggacccacccgcaagcattaccagccctatgccccaccacgcgacttcgcagcctatcgctccagagtgaagttcagcagaagcgccgacgcccctgcctaccagcagggacagaaccaactgtacaacgagctgaacctgggcagacgggaagagtacgacgtgctggacaagcggagaggcagggaccctgagatgggcggaaagccccagcggagaaagaacccccaggaaggactgtataacgaactccagaaagacaagatggccgaagcctacagcgagatcggcatgaagggcgagcggagaagaggcaagggccacgatggcctgtaccagggcctgagcaccgccaccaaggacacctatgacgccctgcacatgcaggccctgcctccaaga

SEQ ID NO: 25569 - DNA, 738 bp, synthetic construct
  source 1..738: mol_type = other DNA
ctggacatgcggagcatggacttcaagagcaactccgccgtggcctggtccaacaagtccgatttcgcctgcgccaacgccttcaacaacagcattatccccgaggacacattcttcccaagccccgagagcagctgcgacgtgaagctggtggaaaagagcttcgagacagacaccaacctgaacttccagaacctgagcgtgatcggcttcagaatcctgctgctgaaagtggccggctttaacctgctgatgaccctgcggctgtggtccagcaggagtaagaggagcaggctcctgcacagtgactacatgaacatgactccacgccgccccggacccacccgcaagcattaccagccctatgccccaccacgcgacttcgcagcctatcgctccagagtgaagttcagcagaagcgccgacgcccctgcctaccagcagggacagaaccaactgtacaacgagctgaacctgggcagacgggaagagtacgacgtgctggacaagcggagaggcagggaccctgagatgggcggaaagccccagcggagaaagaacccccaggaaggactgtataacgaactccagaaagacaagatggccgaagcctacagcgagatcggcatgaagggcgagcggagaagaggcaagggccacgatggcctgtaccagggcctgagcaccgccaccaaggacacctatgacgccctgcacatgcaggccctgcctccaaga

SEQ ID NO: 25570 - DNA, 735 bp, synthetic construct
  source 1..735: mol_type = other DNA
gacatgcggagcatggacttcaagagcaactccgccgtggcctggtccaacaagtccgatttcgcctgcgccaacgccttcaacaacagcattatccccgaggacacattcttcccaagccccgagagcagctgcgacgtgaagctggtggaaaagagcttcgagacagacaccaacctgaacttccagaacctgagcgtgatcggcttcagaatcctgctgctgaaagtggccggctttaacctgctgatgaccctgcggctgtggtccagcaggagtaagaggagcaggctcctgcacagtgactacatgaacatgactccacgccgccccggacccacccgcaagcattaccagccctatgccccaccacgcgacttcgcagcctatcgctccagagtgaagttcagcagaagcgccgacgcccctgcctaccagcagggacagaaccaactgtacaacgagctgaacctgggcagacgggaagagtacgacgtgctggacaagcggagaggcagggaccctgagatgggcggaaagccccagcggagaaagaacccccaggaaggactgtataacgaactccagaaagacaagatggccgaagcctacagcgagatcggcatgaagggcgagcggagaagaggcaagggccacgatggcctgtaccagggcctgagcaccgccaccaaggacacctatgacgccctgcacatgcaggccctgcctccaaga

SEQ ID NO: 25571 - DNA, 732 bp, synthetic construct
  source 1..732: mol_type = other DNA
atgcggagcatggacttcaagagcaactccgccgtggcctggtccaacaagtccgatttcgcctgcgccaacgccttcaacaacagcattatccccgaggacacattcttcccaagccccgagagcagctgcgacgtgaagctggtggaaaagagcttcgagacagacaccaacctgaacttccagaacctgagcgtgatcggcttcagaatcctgctgctgaaagtggccggctttaacctgctgatgaccctgcggctgtggtccagcaggagtaagaggagcaggctcctgcacagtgactacatgaacatgactccacgccgccccggacccacccgcaagcattaccagccctatgccccaccacgcgacttcgcagcctatcgctccagagtgaagttcagcagaagcgccgacgcccctgcctaccagcagggacagaaccaactgtacaacgagctgaacctgggcagacgggaagagtacgacgtgctggacaagcggagaggcagggaccctgagatgggcggaaagccccagcggagaaagaacccccaggaaggactgtataacgaactccagaaagacaagatggccgaagcctacagcgagatcggcatgaagggcgagcggagaagaggcaagggccacgatggcctgtaccagggcctgagcaccgccaccaaggacacctatgacgccctgcacatgcaggccctgcctccaaga

SEQ ID NO: 25572 - DNA, 729 bp, synthetic construct
  source 1..729: mol_type = other DNA
cggagcatggacttcaagagcaactccgccgtggcctggtccaacaagtccgatttcgcctgcgccaacgccttcaacaacagcattatccccgaggacacattcttcccaagccccgagagcagctgcgacgtgaagctggtggaaaagagcttcgagacagacaccaacctgaacttccagaacctgagcgtgatcggcttcagaatcctgctgctgaaagtggccggctttaacctgctgatgaccctgcggctgtggtccagcaggagtaagaggagcaggctcctgcacagtgactacatgaacatgactccacgccgccccggacccacccgcaagcattaccagccctatgccccaccacgcgacttcgcagcctatcgctccagagtgaagttcagcagaagcgccgacgcccctgcctaccagcagggacagaaccaactgtacaacgagctgaacctgggcagacgggaagagtacgacgtgctggacaagcggagaggcagggaccctgagatgggcggaaagccccagcggagaaagaacccccaggaaggactgtataacgaactccagaaagacaagatggccgaagcctacagcgagatcggcatgaagggcgagcggagaagaggcaagggccacgatggcctgtaccagggcctgagcaccgccaccaaggacacctatgacgccctgcacatgcaggccctgcctccaaga

SEQ ID NO: 25573 - DNA, 726 bp, synthetic construct
  source 1..726: mol_type = other DNA
agcatggacttcaagagcaactccgccgtggcctggtccaacaagtccgatttcgcctgcgccaacgccttcaacaacagcattatccccgaggacacattcttcccaagccccgagagcagctgcgacgtgaagctggtggaaaagagcttcgagacagacaccaacctgaacttccagaacctgagcgtgatcggcttcagaatcctgctgctgaaagtggccggctttaacctgctgatgaccctgcggctgtggtccagcaggagtaagaggagcaggctcctgcacagtgactacatgaacatgactccacgccgccccggacccacccgcaagcattaccagccctatgccccaccacgcgacttcgcagcctatcgctccagagtgaagttcagcagaagcgccgacgcccctgcctaccagcagggacagaaccaactgtacaacgagctgaacctgggcagacgggaagagtacgacgtgctggacaagcggagaggcagggaccctgagatgggcggaaagccccagcggagaaagaacccccaggaaggactgtataacgaactccagaaagacaagatggccgaagcctacagcgagatcggcatgaagggcgagcggagaagaggcaagggccacgatggcctgtaccagggcctgagcaccgccaccaaggacacctatgacgccctgcacatgcaggccctgcctccaaga

SEQ ID NO: 25574 - DNA, 723 bp, synthetic construct
  source 1..723: mol_type = other DNA
atggacttcaagagcaactccgccgtggcctggtccaacaagtccgatttcgcctgcgccaacgccttcaacaacagcattatccccgaggacacattcttcccaagccccgagagcagctgcgacgtgaagctggtggaaaagagcttcgagacagacaccaacctgaacttccagaacctgagcgtgatcggcttcagaatcctgctgctgaaagtggccggctttaacctgctgatgaccctgcggctgtggtccagcaggagtaagaggagcaggctcctgcacagtgactacatgaacatgactccacgccgccccggacccacccgcaagcattaccagccctatgccccaccacgcgacttcgcagcctatcgctccagagtgaagttcagcagaagcgccgacgcccctgcctaccagcagggacagaaccaactgtacaacgagctgaacctgggcagacgggaagagtacgacgtgctggacaagcggagaggcagggaccctgagatgggcggaaagccccagcggagaaagaacccccaggaaggactgtataacgaactccagaaagacaagatggccgaagcctacagcgagatcggcatgaagggcgagcggagaagaggcaagggccacgatggcctgtaccagggcctgagcaccgccaccaaggacacctatgacgccctgcacatgcaggccctgcctccaaga

SEQ ID NO: 25575 - DNA, 720 bp, synthetic construct
  source 1..720: mol_type = other DNA
gacttcaagagcaactccgccgtggcctggtccaacaagtccgatttcgcctgcgccaacgccttcaacaacagcattatccccgaggacacattcttcccaagccccgagagcagctgcgacgtgaagctggtggaaaagagcttcgagacagacaccaacctgaacttccagaacctgagcgtgatcggcttcagaatcctgctgctgaaagtggccggctttaacctgctgatgaccctgcggctgtggtccagcaggagtaagaggagcaggctcctgcacagtgactacatgaacatgactccacgccgccccggacccacccgcaagcattaccagccctatgccccaccacgcgacttcgcagcctatcgctccagagtgaagttcagcagaagcgccgacgcccctgcctaccagcagggacagaaccaactgtacaacgagctgaacctgggcagacgggaagagtacgacgtgctggacaagcggagaggcagggaccctgagatgggcggaaagccccagcggagaaagaacccccaggaaggactgtataacgaactccagaaagacaagatggccgaagcctacagcgagatcggcatgaagggcgagcggagaagaggcaagggccacgatggcctgtaccagggcctgagcaccgccaccaaggacacctatgacgccctgcacatgcaggccctgcctccaaga

SEQ ID NO: 25576 - DNA, 717 bp, synthetic construct
  source 1..717: mol_type = other DNA
ttcaagagcaactccgccgtggcctggtccaacaagtccgatttcgcctgcgccaacgccttcaacaacagcattatccccgaggacacattcttcccaagccccgagagcagctgcgacgtgaagctggtggaaaagagcttcgagacagacaccaacctgaacttccagaacctgagcgtgatcggcttcagaatcctgctgctgaaagtggccggctttaacctgctgatgaccctgcggctgtggtccagcaggagtaagaggagcaggctcctgcacagtgactacatgaacatgactccacgccgccccggacccacccgcaagcattaccagccctatgccccaccacgcgacttcgcagcctatcgctccagagtgaagttcagcagaagcgccgacgcccctgcctaccagcagggacagaaccaactgtacaacgagctgaacctgggcagacgggaagagtacgacgtgctggacaagcggagaggcagggaccctgagatgggcggaaagccccagcggagaaagaacccccaggaaggactgtataacgaactccagaaagacaagatggccgaagcctacagcgagatcggcatgaagggcgagcggagaagaggcaagggccacgatggcctgtaccagggcctgagcaccgccaccaaggacacctatgacgccctgcacatgcaggccctgcctccaaga

SEQ ID NO: 25577 - DNA, 714 bp, synthetic construct
  source 1..714: mol_type = other DNA
aagagcaactccgccgtggcctggtccaacaagtccgatttcgcctgcgccaacgccttcaacaacagcattatccccgaggacacattcttcccaagccccgagagcagctgcgacgtgaagctggtggaaaagagcttcgagacagacaccaacctgaacttccagaacctgagcgtgatcggcttcagaatcctgctgctgaaagtggccggctttaacctgctgatgaccctgcggctgtggtccagcaggagtaagaggagcaggctcctgcacagtgactacatgaacatgactccacgccgccccggacccacccgcaagcattaccagccctatgccccaccacgcgacttcgcagcctatcgctccagagtgaagttcagcagaagcgccgacgcccctgcctaccagcagggacagaaccaactgtacaacgagctgaacctgggcagacgggaagagtacgacgtgctggacaagcggagaggcagggaccctgagatgggcggaaagccccagcggagaaagaacccccaggaaggactgtataacgaactccagaaagacaagatggccgaagcctacagcgagatcggcatgaagggcgagcggagaagaggcaagggccacgatggcctgtaccagggcctgagcaccgccaccaaggacacctatgacgccctgcacatgcaggccctgcctccaaga

SEQ ID NO: 25578 - DNA, 711 bp, synthetic construct
  source 1..711: mol_type = other DNA
agcaactccgccgtggcctggtccaacaagtccgatttcgcctgcgccaacgccttcaacaacagcattatccccgaggacacattcttcccaagccccgagagcagctgcgacgtgaagctggtggaaaagagcttcgagacagacaccaacctgaacttccagaacctgagcgtgatcggcttcagaatcctgctgctgaaagtggccggctttaacctgctgatgaccctgcggctgtggtccagcaggagtaagaggagcaggctcctgcacagtgactacatgaacatgactccacgccgccccggacccacccgcaagcattaccagccctatgccccaccacgcgacttcgcagcctatcgctccagagtgaagttcagcagaagcgccgacgcccctgcctaccagcagggacagaaccaactgtacaacgagctgaacctgggcagacgggaagagtacgacgtgctggacaagcggagaggcagggaccctgagatgggcggaaagccccagcggagaaagaacccccaggaaggactgtataacgaactccagaaagacaagatggccgaagcctacagcgagatcggcatgaagggcgagcggagaagaggcaagggccacgatggcctgtaccagggcctgagcaccgccaccaaggacacctatgacgccctgcacatgcaggccctgcctccaaga

SEQ ID NO: 25579 - DNA, 708 bp, synthetic construct
  source 1..708: mol_type = other DNA
aactccgccgtggcctggtccaacaagtccgatttcgcctgcgccaacgccttcaacaacagcattatccccgaggacacattcttcccaagccccgagagcagctgcgacgtgaagctggtggaaaagagcttcgagacagacaccaacctgaacttccagaacctgagcgtgatcggcttcagaatcctgctgctgaaagtggccggctttaacctgctgatgaccctgcggctgtggtccagcaggagtaagaggagcaggctcctgcacagtgactacatgaacatgactccacgccgccccggacccacccgcaagcattaccagccctatgccccaccacgcgacttcgcagcctatcgctccagagtgaagttcagcagaagcgccgacgcccctgcctaccagcagggacagaaccaactgtacaacgagctgaacctgggcagacgggaagagtacgacgtgctggacaagcggagaggcagggaccctgagatgggcggaaagccccagcggagaaagaacccccaggaaggactgtataacgaactccagaaagacaagatggccgaagcctacagcgagatcggcatgaagggcgagcggagaagaggcaagggccacgatggcctgtaccagggcctgagcaccgccaccaaggacacctatgacgccctgcacatgcaggccctgcctccaaga

SEQ ID NO: 25580 - DNA, 705 bp, synthetic construct
  source 1..705: mol_type = other DNA
tccgccgtggcctggtccaacaagtccgatttcgcctgcgccaacgccttcaacaacagcattatccccgaggacacattcttcccaagccccgagagcagctgcgacgtgaagctggtggaaaagagcttcgagacagacaccaacctgaacttccagaacctgagcgtgatcggcttcagaatcctgctgctgaaagtggccggctttaacctgctgatgaccctgcggctgtggtccagcaggagtaagaggagcaggctcctgcacagtgactacatgaacatgactccacgccgccccggacccacccgcaagcattaccagccctatgccccaccacgcgacttcgcagcctatcgctccagagtgaagttcagcagaagcgccgacgcccctgcctaccagcagggacagaaccaactgtacaacgagctgaacctgggcagacgggaagagtacgacgtgctggacaagcggagaggcagggaccctgagatgggcggaaagccccagcggagaaagaacccccaggaaggactgtataacgaactccagaaagacaagatggccgaagcctacagcgagatcggcatgaagggcgagcggagaagaggcaagggccacgatggcctgtaccagggcctgagcaccgccaccaaggacacctatgacgccctgcacatgcaggccctgcctccaaga

SEQ ID NO: 25581 - DNA, 702 bp, synthetic construct
  source 1..702: mol_type = other DNA
gccgtggcctggtccaacaagtccgatttcgcctgcgccaacgccttcaacaacagcattatccccgaggacacattcttcccaagccccgagagcagctgcgacgtgaagctggtggaaaagagcttcgagacagacaccaacctgaacttccagaacctgagcgtgatcggcttcagaatcctgctgctgaaagtggccggctttaacctgctgatgaccctgcggctgtggtccagcaggagtaagaggagcaggctcctgcacagtgactacatgaacatgactccacgccgccccggacccacccgcaagcattaccagccctatgccccaccacgcgacttcgcagcctatcgctccagagtgaagttcagcagaagcgccgacgcccctgcctaccagcagggacagaaccaactgtacaacgagctgaacctgggcagacgggaagagtacgacgtgctggacaagcggagaggcagggaccctgagatgggcggaaagccccagcggagaaagaacccccaggaaggactgtataacgaactccagaaagacaagatggccgaagcctacagcgagatcggcatgaagggcgagcggagaagaggcaagggccacgatggcctgtaccagggcctgagcaccgccaccaaggacacctatgacgccctgcacatgcaggccctgcctccaaga

SEQ ID NO: 25582 - DNA, 699 bp, synthetic construct
  source 1..699: mol_type = other DNA
gtggcctggtccaacaagtccgatttcgcctgcgccaacgccttcaacaacagcattatccccgaggacacattcttcccaagccccgagagcagctgcgacgtgaagctggtggaaaagagcttcgagacagacaccaacctgaacttccagaacctgagcgtgatcggcttcagaatcctgctgctgaaagtggccggctttaacctgctgatgaccctgcggctgtggtccagcaggagtaagaggagcaggctcctgcacagtgactacatgaacatgactccacgccgccccggacccacccgcaagcattaccagccctatgccccaccacgcgacttcgcagcctatcgctccagagtgaagttcagcagaagcgccgacgcccctgcctaccagcagggacagaaccaactgtacaacgagctgaacctgggcagacgggaagagtacgacgtgctggacaagcggagaggcagggaccctgagatgggcggaaagccccagcggagaaagaacccccaggaaggactgtataacgaactccagaaagacaagatggccgaagcctacagcgagatcggcatgaagggcgagcggagaagaggcaagggccacgatggcctgtaccagggcctgagcaccgccaccaaggacacctatgacgccctgcacatgcaggccctgcctccaaga

SEQ ID NO: 25583 - DNA, 696 bp, synthetic construct
  source 1..696: mol_type = other DNA
gcctggtccaacaagtccgatttcgcctgcgccaacgccttcaacaacagcattatccccgaggacacattcttcccaagccccgagagcagctgcgacgtgaagctggtggaaaagagcttcgagacagacaccaacctgaacttccagaacctgagcgtgatcggcttcagaatcctgctgctgaaagtggccggctttaacctgctgatgaccctgcggctgtggtccagcaggagtaagaggagcaggctcctgcacagtgactacatgaacatgactccacgccgccccggacccacccgcaagcattaccagccctatgccccaccacgcgacttcgcagcctatcgctccagagtgaagttcagcagaagcgccgacgcccctgcctaccagcagggacagaaccaactgtacaacgagctgaacctgggcagacgggaagagtacgacgtgctggacaagcggagaggcagggaccctgagatgggcggaaagccccagcggagaaagaacccccaggaaggactgtataacgaactccagaaagacaagatggccgaagcctacagcgagatcggcatgaagggcgagcggagaagaggcaagggccacgatggcctgtaccagggcctgagcaccgccaccaaggacacctatgacgccctgcacatgcaggccctgcctccaaga

SEQ ID NO: 25584 - DNA, 693 bp, synthetic construct
  source 1..693: mol_type = other DNA
tggtccaacaagtccgatttcgcctgcgccaacgccttcaacaacagcattatccccgaggacacattcttcccaagccccgagagcagctgcgacgtgaagctggtggaaaagagcttcgagacagacaccaacctgaacttccagaacctgagcgtgatcggcttcagaatcctgctgctgaaagtggccggctttaacctgctgatgaccctgcggctgtggtccagcaggagtaagaggagcaggctcctgcacagtgactacatgaacatgactccacgccgccccggacccacccgcaagcattaccagccctatgccccaccacgcgacttcgcagcctatcgctccagagtgaagttcagcagaagcgccgacgcccctgcctaccagcagggacagaaccaactgtacaacgagctgaacctgggcagacgggaagagtacgacgtgctggacaagcggagaggcagggaccctgagatgggcggaaagccccagcggagaaagaacccccaggaaggactgtataacgaactccagaaagacaagatggccgaagcctacagcgagatcggcatgaagggcgagcggagaagaggcaagggccacgatggcctgtaccagggcctgagcaccgccaccaaggacacctatgacgccctgcacatgcaggccctgcctccaaga

SEQ ID NO: 25585 - DNA, 690 bp, synthetic construct
  source 1..690: mol_type = other DNA
tccaacaagtccgatttcgcctgcgccaacgccttcaacaacagcattatccccgaggacacattcttcccaagccccgagagcagctgcgacgtgaagctggtggaaaagagcttcgagacagacaccaacctgaacttccagaacctgagcgtgatcggcttcagaatcctgctgctgaaagtggccggctttaacctgctgatgaccctgcggctgtggtccagcaggagtaagaggagcaggctcctgcacagtgactacatgaacatgactccacgccgccccggacccacccgcaagcattaccagccctatgccccaccacgcgacttcgcagcctatcgctccagagtgaagttcagcagaagcgccgacgcccctgcctaccagcagggacagaaccaactgtacaacgagctgaacctgggcagacgggaagagtacgacgtgctggacaagcggagaggcagggaccctgagatgggcggaaagccccagcggagaaagaacccccaggaaggactgtataacgaactccagaaagacaagatggccgaagcctacagcgagatcggcatgaagggcgagcggagaagaggcaagggccacgatggcctgtaccagggcctgagcaccgccaccaaggacacctatgacgccctgcacatgcaggccctgcctccaaga

SEQ ID NO: 25586 - DNA, 687 bp, synthetic construct
  source 1..687: mol_type = other DNA
aacaagtccgatttcgcctgcgccaacgccttcaacaacagcattatccccgaggacacattcttcccaagccccgagagcagctgcgacgtgaagctggtggaaaagagcttcgagacagacaccaacctgaacttccagaacctgagcgtgatcggcttcagaatcctgctgctgaaagtggccggctttaacctgctgatgaccctgcggctgtggtccagcaggagtaagaggagcaggctcctgcacagtgactacatgaacatgactccacgccgccccggacccacccgcaagcattaccagccctatgccccaccacgcgacttcgcagcctatcgctccagagtgaagttcagcagaagcgccgacgcccctgcctaccagcagggacagaaccaactgtacaacgagctgaacctgggcagacgggaagagtacgacgtgctggacaagcggagaggcagggaccctgagatgggcggaaagccccagcggagaaagaacccccaggaaggactgtataacgaactccagaaagacaagatggccgaagcctacagcgagatcggcatgaagggcgagcggagaagaggcaagggccacgatggcctgtaccagggcctgagcaccgccaccaaggacacctatgacgccctgcacatgcaggccctgcctccaaga

SEQ ID NO: 25587 - DNA, 684 bp, synthetic construct
  source 1..684: mol_type = other DNA
aagtccgatttcgcctgcgccaacgccttcaacaacagcattatccccgaggacacattcttcccaagccccgagagcagctgcgacgtgaagctggtggaaaagagcttcgagacagacaccaacctgaacttccagaacctgagcgtgatcggcttcagaatcctgctgctgaaagtggccggctttaacctgctgatgaccctgcggctgtggtccagcaggagtaagaggagcaggctcctgcacagtgactacatgaacatgactccacgccgccccggacccacccgcaagcattaccagccctatgccccaccacgcgacttcgcagcctatcgctccagagtgaagttcagcagaagcgccgacgcccctgcctaccagcagggacagaaccaactgtacaacgagctgaacctgggcagacgggaagagtacgacgtgctggacaagcggagaggcagggaccctgagatgggcggaaagccccagcggagaaagaacccccaggaaggactgtataacgaactccagaaagacaagatggccgaagcctacagcgagatcggcatgaagggcgagcggagaagaggcaagggccacgatggcctgtaccagggcctgagcaccgccaccaaggacacctatgacgccctgcacatgcaggccctgcctccaaga

SEQ ID NO: 25588 - DNA, 681 bp, synthetic construct
  source 1..681: mol_type = other DNA
tccgatttcgcctgcgccaacgccttcaacaacagcattatccccgaggacacattcttcccaagccccgagagcagctgcgacgtgaagctggtggaaaagagcttcgagacagacaccaacctgaacttccagaacctgagcgtgatcggcttcagaatcctgctgctgaaagtggccggctttaacctgctgatgaccctgcggctgtggtccagcaggagtaagaggagcaggctcctgcacagtgactacatgaacatgactccacgccgccccggacccacccgcaagcattaccagccctatgccccaccacgcgacttcgcagcctatcgctccagagtgaagttcagcagaagcgccgacgcccctgcctaccagcagggacagaaccaactgtacaacgagctgaacctgggcagacgggaagagtacgacgtgctggacaagcggagaggcagggaccctgagatgggcggaaagccccagcggagaaagaacccccaggaaggactgtataacgaactccagaaagacaagatggccgaagcctacagcgagatcggcatgaagggcgagcggagaagaggcaagggccacgatggcctgtaccagggcctgagcaccgccaccaaggacacctatgacgccctgcacatgcaggccctgcctccaaga

SEQ ID NO: 25589 - DNA, 678 bp, synthetic construct
  source 1..678: mol_type = other DNA
gatttcgcctgcgccaacgccttcaacaacagcattatccccgaggacacattcttcccaagccccgagagcagctgcgacgtgaagctggtggaaaagagcttcgagacagacaccaacctgaacttccagaacctgagcgtgatcggcttcagaatcctgctgctgaaagtggccggctttaacctgctgatgaccctgcggctgtggtccagcaggagtaagaggagcaggctcctgcacagtgactacatgaacatgactccacgccgccccggacccacccgcaagcattaccagccctatgccccaccacgcgacttcgcagcctatcgctccagagtgaagttcagcagaagcgccgacgcccctgcctaccagcagggacagaaccaactgtacaacgagctgaacctgggcagacgggaagagtacgacgtgctggacaagcggagaggcagggaccctgagatgggcggaaagccccagcggagaaagaacccccaggaaggactgtataacgaactccagaaagacaagatggccgaagcctacagcgagatcggcatgaagggcgagcggagaagaggcaagggccacgatggcctgtaccagggcctgagcaccgccaccaaggacacctatgacgccctgcacatgcaggccctgcctccaaga

SEQ ID NO: 25590 - DNA, 675 bp, synthetic construct
  source 1..675: mol_type = other DNA
ttcgcctgcgccaacgccttcaacaacagcattatccccgaggacacattcttcccaagccccgagagcagctgcgacgtgaagctggtggaaaagagcttcgagacagacaccaacctgaacttccagaacctgagcgtgatcggcttcagaatcctgctgctgaaagtggccggctttaacctgctgatgaccctgcggctgtggtccagcaggagtaagaggagcaggctcctgcacagtgactacatgaacatgactccacgccgccccggacccacccgcaagcattaccagccctatgccccaccacgcgacttcgcagcctatcgctccagagtgaagttcagcagaagcgccgacgcccctgcctaccagcagggacagaaccaactgtacaacgagctgaacctgggcagacgggaagagtacgacgtgctggacaagcggagaggcagggaccctgagatgggcggaaagccccagcggagaaagaacccccaggaaggactgtataacgaactccagaaagacaagatggccgaagcctacagcgagatcggcatgaagggcgagcggagaagaggcaagggccacgatggcctgtaccagggcctgagcaccgccaccaaggacacctatgacgccctgcacatgcaggccctgcctccaaga

SEQ ID NO: 25591 - DNA, 672 bp, synthetic construct
  source 1..672: mol_type = other DNA
gcctgcgccaacgccttcaacaacagcattatccccgaggacacattcttcccaagccccgagagcagctgcgacgtgaagctggtggaaaagagcttcgagacagacaccaacctgaacttccagaacctgagcgtgatcggcttcagaatcctgctgctgaaagtggccggctttaacctgctgatgaccctgcggctgtggtccagcaggagtaagaggagcaggctcctgcacagtgactacatgaacatgactccacgccgccccggacccacccgcaagcattaccagccctatgccccaccacgcgacttcgcagcctatcgctccagagtgaagttcagcagaagcgccgacgcccctgcctaccagcagggacagaaccaactgtacaacgagctgaacctgggcagacgggaagagtacgacgtgctggacaagcggagaggcagggaccctgagatgggcggaaagccccagcggagaaagaacccccaggaaggactgtataacgaactccagaaagacaagatggccgaagcctacagcgagatcggcatgaagggcgagcggagaagaggcaagggccacgatggcctgtaccagggcctgagcaccgccaccaaggacacctatgacgccctgcacatgcaggccctgcctccaaga

SEQ ID NO: 25592 - DNA, 669 bp, synthetic construct
  source 1..669: mol_type = other DNA
tgcgccaacgccttcaacaacagcattatccccgaggacacattcttcccaagccccgagagcagctgcgacgtgaagctggtggaaaagagcttcgagacagacaccaacctgaacttccagaacctgagcgtgatcggcttcagaatcctgctgctgaaagtggccggctttaacctgctgatgaccctgcggctgtggtccagcaggagtaagaggagcaggctcctgcacagtgactacatgaacatgactccacgccgccccggacccacccgcaagcattaccagccctatgccccaccacgcgacttcgcagcctatcgctccagagtgaagttcagcagaagcgccgacgcccctgcctaccagcagggacagaaccaactgtacaacgagctgaacctgggcagacgggaagagtacgacgtgctggacaagcggagaggcagggaccctgagatgggcggaaagccccagcggagaaagaacccccaggaaggactgtataacgaactccagaaagacaagatggccgaagcctacagcgagatcggcatgaagggcgagcggagaagaggcaagggccacgatggcctgtaccagggcctgagcaccgccaccaaggacacctatgacgccctgcacatgcaggccctgcctccaaga

SEQ ID NO: 25593 - DNA, 666 bp, synthetic construct
  source 1..666: mol_type = other DNA
gccaacgccttcaacaacagcattatccccgaggacacattcttcccaagccccgagagcagctgcgacgtgaagctggtggaaaagagcttcgagacagacaccaacctgaacttccagaacctgagcgtgatcggcttcagaatcctgctgctgaaagtggccggctttaacctgctgatgaccctgcggctgtggtccagcaggagtaagaggagcaggctcctgcacagtgactacatgaacatgactccacgccgccccggacccacccgcaagcattaccagccctatgccccaccacgcgacttcgcagcctatcgctccagagtgaagttcagcagaagcgccgacgcccctgcctaccagcagggacagaaccaactgtacaacgagctgaacctgggcagacgggaagagtacgacgtgctggacaagcggagaggcagggaccctgagatgggcggaaagccccagcggagaaagaacccccaggaaggactgtataacgaactccagaaagacaagatggccgaagcctacagcgagatcggcatgaagggcgagcggagaagaggcaagggccacgatggcctgtaccagggcctgagcaccgccaccaaggacacctatgacgccctgcacatgcaggccctgcctccaaga

SEQ ID NO: 25594 - DNA, 663 bp, synthetic construct
  source 1..663: mol_type = other DNA
aacgccttcaacaacagcattatccccgaggacacattcttcccaagccccgagagcagctgcgacgtgaagctggtggaaaagagcttcgagacagacaccaacctgaacttccagaacctgagcgtgatcggcttcagaatcctgctgctgaaagtggccggctttaacctgctgatgaccctgcggctgtggtccagcaggagtaagaggagcaggctcctgcacagtgactacatgaacatgactccacgccgccccggacccacccgcaagcattaccagccctatgccccaccacgcgacttcgcagcctatcgctccagagtgaagttcagcagaagcgccgacgcccctgcctaccagcagggacagaaccaactgtacaacgagctgaacctgggcagacgggaagagtacgacgtgctggacaagcggagaggcagggaccctgagatgggcggaaagccccagcggagaaagaacccccaggaaggactgtataacgaactccagaaagacaagatggccgaagcctacagcgagatcggcatgaagggcgagcggagaagaggcaagggccacgatggcctgtaccagggcctgagcaccgccaccaaggacacctatgacgccctgcacatgcaggccctgcctccaaga

SEQ ID NO: 25595 - DNA, 660 bp, synthetic construct
  source 1..660: mol_type = other DNA
gccttcaacaacagcattatccccgaggacacattcttcccaagccccgagagcagctgcgacgtgaagctggtggaaaagagcttcgagacagacaccaacctgaacttccagaacctgagcgtgatcggcttcagaatcctgctgctgaaagtggccggctttaacctgctgatgaccctgcggctgtggtccagcaggagtaagaggagcaggctcctgcacagtgactacatgaacatgactccacgccgccccggacccacccgcaagcattaccagccctatgccccaccacgcgacttcgcagcctatcgctccagagtgaagttcagcagaagcgccgacgcccctgcctaccagcagggacagaaccaactgtacaacgagctgaacctgggcagacgggaagagtacgacgtgctggacaagcggagaggcagggaccctgagatgggcggaaagccccagcggagaaagaacccccaggaaggactgtataacgaactccagaaagacaagatggccgaagcctacagcgagatcggcatgaagggcgagcggagaagaggcaagggccacgatggcctgtaccagggcctgagcaccgccaccaaggacacctatgacgccctgcacatgcaggccctgcctccaaga

SEQ ID NO: 25596 - DNA, 657 bp, synthetic construct
  source 1..657: mol_type = other DNA
ttcaacaacagcattatccccgaggacacattcttcccaagccccgagagcagctgcgacgtgaagctggtggaaaagagcttcgagacagacaccaacctgaacttccagaacctgagcgtgatcggcttcagaatcctgctgctgaaagtggccggctttaacctgctgatgaccctgcggctgtggtccagcaggagtaagaggagcaggctcctgcacagtgactacatgaacatgactccacgccgccccggacccacccgcaagcattaccagccctatgccccaccacgcgacttcgcagcctatcgctccagagtgaagttcagcagaagcgccgacgcccctgcctaccagcagggacagaaccaactgtacaacgagctgaacctgggcagacgggaagagtacgacgtgctggacaagcggagaggcagggaccctgagatgggcggaaagccccagcggagaaagaacccccaggaaggactgtataacgaactccagaaagacaagatggccgaagcctacagcgagatcggcatgaagggcgagcggagaagaggcaagggccacgatggcctgtaccagggcctgagcaccgccaccaaggacacctatgacgccctgcacatgcaggccctgcctccaaga

SEQ ID NO: 25597 - DNA, 654 bp, synthetic construct
  source 1..654: mol_type = other DNA
aacaacagcattatccccgaggacacattcttcccaagccccgagagcagctgcgacgtgaagctggtggaaaagagcttcgagacagacaccaacctgaacttccagaacctgagcgtgatcggcttcagaatcctgctgctgaaagtggccggctttaacctgctgatgaccctgcggctgtggtccagcaggagtaagaggagcaggctcctgcacagtgactacatgaacatgactccacgccgccccggacccacccgcaagcattaccagccctatgccccaccacgcgacttcgcagcctatcgctccagagtgaagttcagcagaagcgccgacgcccctgcctaccagcagggacagaaccaactgtacaacgagctgaacctgggcagacgggaagagtacgacgtgctggacaagcggagaggcagggaccctgagatgggcggaaagccccagcggagaaagaacccccaggaaggactgtataacgaactccagaaagacaagatggccgaagcctacagcgagatcggcatgaagggcgagcggagaagaggcaagggccacgatggcctgtaccagggcctgagcaccgccaccaaggacacctatgacgccctgcacatgcaggccctgcctccaaga

SEQ ID NO: 25598 - DNA, 651 bp, synthetic construct
  source 1..651: mol_type = other DNA
aacagcattatccccgaggacacattcttcccaagccccgagagcagctgcgacgtgaagctggtggaaaagagcttcgagacagacaccaacctgaacttccagaacctgagcgtgatcggcttcagaatcctgctgctgaaagtggccggctttaacctgctgatgaccctgcggctgtggtccagcaggagtaagaggagcaggctcctgcacagtgactacatgaacatgactccacgccgccccggacccacccgcaagcattaccagccctatgccccaccacgcgacttcgcagcctatcgctccagagtgaagttcagcagaagcgccgacgcccctgcctaccagcagggacagaaccaactgtacaacgagctgaacctgggcagacgggaagagtacgacgtgctggacaagcggagaggcagggaccctgagatgggcggaaagccccagcggagaaagaacccccaggaaggactgtataacgaactccagaaagacaagatggccgaagcctacagcgagatcggcatgaagggcgagcggagaagaggcaagggccacgatggcctgtaccagggcctgagcaccgccaccaaggacacctatgacgccctgcacatgcaggccctgcctccaaga

SEQ ID NO: 25599 - DNA, 648 bp, synthetic construct
  source 1..648: mol_type = other DNA
agcattatccccgaggacacattcttcccaagccccgagagcagctgcgacgtgaagctggtggaaaagagcttcgagacagacaccaacctgaacttccagaacctgagcgtgatcggcttcagaatcctgctgctgaaagtggccggctttaacctgctgatgaccctgcggctgtggtccagcaggagtaagaggagcaggctcctgcacagtgactacatgaacatgactccacgccgccccggacccacccgcaagcattaccagccctatgccccaccacgcgacttcgcagcctatcgctccagagtgaagttcagcagaagcgccgacgcccctgcctaccagcagggacagaaccaactgtacaacgagctgaacctgggcagacgggaagagtacgacgtgctggacaagcggagaggcagggaccctgagatgggcggaaagccccagcggagaaagaacccccaggaaggactgtataacgaactccagaaagacaagatggccgaagcctacagcgagatcggcatgaagggcgagcggagaagaggcaagggccacgatggcctgtaccagggcctgagcaccgccaccaaggacacctatgacgccctgcacatgcaggccctgcctccaaga

SEQ ID NO: 25600 - DNA, 645 bp, synthetic construct
  source 1..645: mol_type = other DNA
attatccccgaggacacattcttcccaagccccgagagcagctgcgacgtgaagctggtggaaaagagcttcgagacagacaccaacctgaacttccagaacctgagcgtgatcggcttcagaatcctgctgctgaaagtggccggctttaacctgctgatgaccctgcggctgtggtccagcaggagtaagaggagcaggctcctgcacagtgactacatgaacatgactccacgccgccccggacccacccgcaagcattaccagccctatgccccaccacgcgacttcgcagcctatcgctccagagtgaagttcagcagaagcgccgacgcccctgcctaccagcagggacagaaccaactgtacaacgagctgaacctgggcagacgggaagagtacgacgtgctggacaagcggagaggcagggaccctgagatgggcggaaagccccagcggagaaagaacccccaggaaggactgtataacgaactccagaaagacaagatggccgaagcctacagcgagatcggcatgaagggcgagcggagaagaggcaagggccacgatggcctgtaccagggcctgagcaccgccaccaaggacacctatgacgccctgcacatgcaggccctgcctccaaga

SEQ ID NO: 25601 - DNA, 642 bp, synthetic construct; identical to SEQ ID NO: 25287
  source 1..642: mol_type = other DNA

SEQ ID NO: 25602 - DNA, 639 bp, synthetic construct
  source 1..639: mol_type = other DNA
cccgaggacacattcttcccaagccccgagagcagctgcgacgtgaagctggtggaaaagagcttcgagacagacaccaacctgaacttccagaacctgagcgtgatcggcttcagaatcctgctgctgaaagtggccggctttaacctgctgatgaccctgcggctgtggtccagcaggagtaagaggagcaggctcctgcacagtgactacatgaacatgactccacgccgccccggacccacccgcaagcattaccagccctatgccccaccacgcgacttcgcagcctatcgctccagagtgaagttcagcagaagcgccgacgcccctgcctaccagcagggacagaaccaactgtacaacgagctgaacctgggcagacgggaagagtacgacgtgctggacaagcggagaggcagggaccctgagatgggcggaaagccccagcggagaaagaacccccaggaaggactgtataacgaactccagaaagacaagatggccgaagcctacagcgagatcggcatgaagggcgagcggagaagaggcaagggccacgatggcctgtaccagggcctgagcaccgccaccaaggacacctatgacgccctgcacatgcaggccctgcctccaaga

SEQ ID NO: 25603 - DNA, 636 bp, synthetic construct
  source 1..636: mol_type = other DNA
gaggacacattcttcccaagccccgagagcagctgcgacgtgaagctggtggaaaagagcttcgagacagacaccaacctgaacttccagaacctgagcgtgatcggcttcagaatcctgctgctgaaagtggccggctttaacctgctgatgaccctgcggctgtggtccagcaggagtaagaggagcaggctcctgcacagtgactacatgaacatgactccacgccgccccggacccacccgcaagcattaccagccctatgccccaccacgcgacttcgcagcctatcgctccagagtgaagttcagcagaagcgccgacgcccctgcctaccagcagggacagaaccaactgtacaacgagctgaacctgggcagacgggaagagtacgacgtgctggacaagcggagaggcagggaccctgagatgggcggaaagccccagcggagaaagaacccccaggaaggactgtataacgaactccagaaagacaagatggccgaagcctacagcgagatcggcatgaagggcgagcggagaagaggcaagggccacgatggcctgtaccagggcctgagcaccgccaccaaggacacctatgacgccctgcacatgcaggccctgcctccaaga

SEQ ID NO: 25604 - DNA, 633 bp, synthetic construct
  source 1..633: mol_type = other DNA
gacacattcttcccaagccccgagagcagctgcgacgtgaagctggtggaaaagagcttcgagacagacaccaacctgaacttccagaacctgagcgtgatcggcttcagaatcctgctgctgaaagtggccggctttaacctgctgatgaccctgcggctgtggtccagcaggagtaagaggagcaggctcctgcacagtgactacatgaacatgactccacgccgccccggacccacccgcaagcattaccagccctatgccccaccacgcgacttcgcagcctatcgctccagagtgaagttcagcagaagcgccgacgcccctgcctaccagcagggacagaaccaactgtacaacgagctgaacctgggcagacgggaagagtacgacgtgctggacaagcggagaggcagggaccctgagatgggcggaaagccccagcggagaaagaacccccaggaaggactgtataacgaactccagaaagacaagatggccgaagcctacagcgagatcggcatgaagggcgagcggagaagaggcaagggccacgatggcctgtaccagggcctgagcaccgccaccaaggacacctatgacgccctgcacatgcaggccctgcctccaaga

SEQ ID NO: 25605 - DNA, 630 bp, synthetic construct
  source 1..630: mol_type = other DNA
acattcttcccaagccccgagagcagctgcgacgtgaagctggtggaaaagagcttcgagacagacaccaacctgaacttccagaacctgagcgtgatcggcttcagaatcctgctgctgaaagtggccggctttaacctgctgatgaccctgcggctgtggtccagcaggagtaagaggagcaggctcctgcacagtgactacatgaacatgactccacgccgccccggacccacccgcaagcattaccagccctatgccccaccacgcgacttcgcagcctatcgctccagagtgaagttcagcagaagcgccgacgcccctgcctaccagcagggacagaaccaactgtacaacgagctgaacctgggcagacgggaagagtacgacgtgctggacaagcggagaggcagggaccctgagatgggcggaaagccccagcggagaaagaacccccaggaaggactgtataacgaactccagaaagacaagatggccgaagcctacagcgagatcggcatgaagggcgagcggagaagaggcaagggccacgatggcctgtaccagggcctgagcaccgccaccaaggacacctatgacgccctgcacatgcaggccctgcctccaaga

SEQ ID NO: 25606 - DNA, 627 bp, synthetic construct
  source 1..627: mol_type = other DNA
ttcttcccaagccccgagagcagctgcgacgtgaagctggtggaaaagagcttcgagacagacaccaacctgaacttccagaacctgagcgtgatcggcttcagaatcctgctgctgaaagtggccggctttaacctgctgatgaccctgcggctgtggtccagcaggagtaagaggagcaggctcctgcacagtgactacatgaacatgactccacgccgccccggacccacccgcaagcattaccagccctatgccccaccacgcgacttcgcagcctatcgctccagagtgaagttcagcagaagcgccgacgcccctgcctaccagcagggacagaaccaactgtacaacgagctgaacctgggcagacgggaagagtacgacgtgctggacaagcggagaggcagggaccctgagatgggcggaaagccccagcggagaaagaacccccaggaaggactgtataacgaactccagaaagacaagatggccgaagcctacagcgagatcggcatgaagggcgagcggagaagaggcaagggccacgatggcctgtaccagggcctgagcaccgccaccaaggacacctatgacgccctgcacatgcaggccctgcctccaaga

SEQ ID NO: 25607 - DNA, 624 bp, synthetic construct
  source 1..624: mol_type = other DNA
ttcccaagccccgagagcagctgcgacgtgaagctggtggaaaagagcttcgagacagacaccaacctgaacttccagaacctgagcgtgatcggcttcagaatcctgctgctgaaagtggccggctttaacctgctgatgaccctgcggctgtggtccagcaggagtaagaggagcaggctcctgcacagtgactacatgaacatgactccacgccgccccggacccacccgcaagcattaccagccctatgccccaccacgcgacttcgcagcctatcgctccagagtgaagttcagcagaagcgccgacgcccctgcctaccagcagggacagaaccaactgtacaacgagctgaacctgggcagacgggaagagtacgacgtgctggacaagcggagaggcagggaccctgagatgggcggaaagccccagcggagaaagaacccccaggaaggactgtataacgaactccagaaagacaagatggccgaagcctacagcgagatcggcatgaagggcgagcggagaagaggcaagggccacgatggcctgtaccagggcctgagcaccgccaccaaggacacctatgacgccctgcacatgcaggccctgcctccaaga

SEQ ID NO: 25608 - DNA, 621 bp, synthetic construct
  source 1..621: mol_type = other DNA
ccaagccccgagagcagctgcgacgtgaagctggtggaaaagagcttcgagacagacaccaacctgaacttccagaacctgagcgtgatcggcttcagaatcctgctgctgaaagtggccggctttaacctgctgatgaccctgcggctgtggtccagcaggagtaagaggagcaggctcctgcacagtgactacatgaacatgactccacgccgccccggacccacccgcaagcattaccagccctatgccccaccacgcgacttcgcagcctatcgctccagagtgaagttcagcagaagcgccgacgcccctgcctaccagcagggacagaaccaactgtacaacgagctgaacctgggcagacgggaagagtacgacgtgctggacaagcggagaggcagggaccctgagatgggcggaaagccccagcggagaaagaacccccaggaaggactgtataacgaactccagaaagacaagatggccgaagcctacagcgagatcggcatgaagggcgagcggagaagaggcaagggccacgatggcctgtaccagggcctgagcaccgccaccaaggacacctatgacgccctgcacatgcaggccctgcctccaaga

SEQ ID NO: 25609 - DNA, 618 bp, synthetic construct
  source 1..618: mol_type = other DNA
agccccgagagcagctgcgacgtgaagctggtggaaaagagcttcgagacagacaccaacctgaacttccagaacctgagcgtgatcggcttcagaatcctgctgctgaaagtggccggctttaacctgctgatgaccctgcggctgtggtccagcaggagtaagaggagcaggctcctgcacagtgactacatgaacatgactccacgccgccccggacccacccgcaagcattaccagccctatgccccaccacgcgacttcgcagcctatcgctccagagtgaagttcagcagaagcgccgacgcccctgcctaccagcagggacagaaccaactgtacaacgagctgaacctgggcagacgggaagagtacgacgtgctggacaagcggagaggcagggaccctgagatgggcggaaagccccagcggagaaagaacccccaggaaggactgtataacgaactccagaaagacaagatggccgaagcctacagcgagatcggcatgaagggcgagcggagaagaggcaagggccacgatggcctgtaccagggcctgagcaccgccaccaaggacacctatgacgccctgcacatgcaggccctgcctccaaga

SEQ ID NO: 25610 - DNA, 615 bp, synthetic construct
  source 1..615: mol_type = other DNA
cccgagagcagctgcgacgtgaagctggtggaaaagagcttcgagacagacaccaacctgaacttccagaacctgagcgtgatcggcttcagaatcctgctgctgaaagtggccggctttaacctgctgatgaccctgcggctgtggtccagcaggagtaagaggagcaggctcctgcacagtgactacatgaacatgactccacgccgccccggacccacccgcaagcattaccagccctatgccccaccacgcgacttcgcagcctatcgctccagagtgaagttcagcagaagcgccgacgcccctgcctaccagcagggacagaaccaactgtacaacgagctgaacctgggcagacgggaagagtacgacgtgctggacaagcggagaggcagggaccctgagatgggcggaaagccccagcggagaaagaacccccaggaaggactgtataacgaactccagaaagacaagatggccgaagcctacagcgagatcggcatgaagggcgagcggagaagaggcaagggccacgatggcctgtaccagggcctgagcaccgccaccaaggacacctatgacgccctgcacatgcaggccctgcctccaaga

SEQ ID NO: 25611 - DNA, 612 bp, synthetic construct; identical to SEQ ID NO: 25288
  source 1..612: mol_type = other DNA

SEQ ID NO: 25612 - DNA, 609 bp, synthetic construct
  source 1..609: mol_type = other DNA
agcagctgcgacgtgaagctggtggaaaagagcttcgagacagacaccaacctgaacttccagaacctgagcgtgatcggcttcagaatcctgctgctgaaagtggccggctttaacctgctgatgaccctgcggctgtggtccagcaggagtaagaggagcaggctcctgcacagtgactacatgaacatgactccacgccgccccggacccacccgcaagcattaccagccctatgccccaccacgcgacttcgcagcctatcgctccagagtgaagttcagcagaagcgccgacgcccctgcctaccagcagggacagaaccaactgtacaacgagctgaacctgggcagacgggaagagtacgacgtgctggacaagcggagaggcagggaccctgagatgggcggaaagccccagcggagaaagaacccccaggaaggactgtataacgaactccagaaagacaagatggccgaagcctacagcgagatcggcatgaagggcgagcggagaagaggcaagggccacgatggcctgtaccagggcctgagcaccgccaccaaggacacctatgacgccctgcacatgcaggccctgcctccaaga

SEQ ID NO: 25613 - DNA, 606 bp, synthetic construct
  source 1..606: mol_type = other DNA
agctgcgacgtgaagctggtggaaaagagcttcgagacagacaccaacctgaacttccagaacctgagcgtgatcggcttcagaatcctgctgctgaaagtggccggctttaacctgctgatgaccctgcggctgtggtccagcaggagtaagaggagcaggctcctgcacagtgactacatgaacatgactccacgccgccccggacccacccgcaagcattaccagccctatgccccaccacgcgacttcgcagcctatcgctccagagtgaagttcagcagaagcgccgacgcccctgcctaccagcagggacagaaccaactgtacaacgagctgaacctgggcagacgggaagagtacgacgtgctggacaagcggagaggcagggaccctgagatgggcggaaagccccagcggagaaagaacccccaggaaggactgtataacgaactccagaaagacaagatggccgaagcctacagcgagatcggcatgaagggcgagcggagaagaggcaagggccacgatggcctgtaccagggcctgagcaccgccaccaaggacacctatgacgccctgcacatgcaggccctgcctccaaga

SEQ ID NO: 25614 - DNA, 603 bp, synthetic construct
  source 1..603: mol_type = other DNA
tgcgacgtgaagctggtggaaaagagcttcgagacagacaccaacctgaacttccagaacctgagcgtgatcggcttcagaatcctgctgctgaaagtggccggctttaacctgctgatgaccctgcggctgtggtccagcaggagtaagaggagcaggctcctgcacagtgactacatgaacatgactccacgccgccccggacccacccgcaagcattaccagccctatgccccaccacgcgacttcgcagcctatcgctccagagtgaagttcagcagaagcgccgacgcccctgcctaccagcagggacagaaccaactgtacaacgagctgaacctgggcagacgggaagagtacgacgtgctggacaagcggagaggcagggaccctgagatgggcggaaagccccagcggagaaagaacccccaggaaggactgtataacgaactccagaaagacaagatggccgaagcctacagcgagatcggcatgaagggcgagcggagaagaggcaagggccacgatggcctgtaccagggcctgagcaccgccaccaaggacacctatgacgccctgcacatgcaggccctgcctccaaga

SEQ ID NO: 25615 - DNA, 600 bp, synthetic construct
  source 1..600: mol_type = other DNA
gacgtgaagctggtggaaaagagcttcgagacagacaccaacctgaacttccagaacctgagcgtgatcggcttcagaatcctgctgctgaaagtggccggctttaacctgctgatgaccctgcggctgtggtccagcaggagtaagaggagcaggctcctgcacagtgactacatgaacatgactccacgccgccccggacccacccgcaagcattaccagccctatgccccaccacgcgacttcgcagcctatcgctccagagtgaagttcagcagaagcgccgacgcccctgcctaccagcagggacagaaccaactgtacaacgagctgaacctgggcagacgggaagagtacgacgtgctggacaagcggagaggcagggaccctgagatgggcggaaagccccagcggagaaagaacccccaggaaggactgtataacgaactccagaaagacaagatggccgaagcctacagcgagatcggcatgaagggcgagcggagaagaggcaagggccacgatggcctgtaccagggcctgagcaccgccaccaaggacacctatgacgccctgcacatgcaggccctgcctccaaga

SEQ ID NO: 25616 - DNA, 597 bp, synthetic construct
  source 1..597: mol_type = other DNA
gtgaagctggtggaaaagagcttcgagacagacaccaacctgaacttccagaacctgagcgtgatcggcttcagaatcctgctgctgaaagtggccggctttaacctgctgatgaccctgcggctgtggtccagcaggagtaagaggagcaggctcctgcacagtgactacatgaacatgactccacgccgccccggacccacccgcaagcattaccagccctatgccccaccacgcgacttcgcagcctatcgctccagagtgaagttcagcagaagcgccgacgcccctgcctaccagcagggacagaaccaactgtacaacgagctgaacctgggcagacgggaagagtacgacgtgctggacaagcggagaggcagggaccctgagatgggcggaaagccccagcggagaaagaacccccaggaaggactgtataacgaactccagaaagacaagatggccgaagcctacagcgagatcggcatgaagggcgagcggagaagaggcaagggccacgatggcctgtaccagggcctgagcaccgccaccaaggacacctatgacgccctgcacatgcaggccctgcctccaaga

SEQ ID NO: 25617 - DNA, 594 bp, synthetic construct
  source 1..594: mol_type = other DNA
aagctggtggaaaagagcttcgagacagacaccaacctgaacttccagaacctgagcgtgatcggcttcagaatcctgctgctgaaagtggccggctttaacctgctgatgaccctgcggctgtggtccagcaggagtaagaggagcaggctcctgcacagtgactacatgaacatgactccacgccgccccggacccacccgcaagcattaccagccctatgccccaccacgcgacttcgcagcctatcgctccagagtgaagttcagcagaagcgccgacgcccctgcctaccagcagggacagaaccaactgtacaacgagctgaacctgggcagacgggaagagtacgacgtgctggacaagcggagaggcagggaccctgagatgggcggaaagccccagcggagaaagaacccccaggaaggactgtataacgaactccagaaagacaagatggccgaagcctacagcgagatcggcatgaagggcgagcggagaagaggcaagggccacgatggcctgtaccagggcctgagcaccgccaccaaggacacctatgacgccctgcacatgcaggccctgcctccaaga

SEQ ID NO: 25618 - DNA, 591 bp, synthetic construct
  source 1..591: mol_type = other DNA
ctggtggaaaagagcttcgagacagacaccaacctgaacttccagaacctgagcgtgatcggcttcagaatcctgctgctgaaagtggccggctttaacctgctgatgaccctgcggctgtggtccagcaggagtaagaggagcaggctcctgcacagtgactacatgaacatgactccacgccgccccggacccacccgcaagcattaccagccctatgccccaccacgcgacttcgcagcctatcgctccagagtgaagttcagcagaagcgccgacgcccctgcctaccagcagggacagaaccaactgtacaacgagctgaacctgggcagacgggaagagtacgacgtgctggacaagcggagaggcagggaccctgagatgggcggaaagccccagcggagaaagaacccccaggaaggactgtataacgaactccagaaagacaagatggccgaagcctacagcgagatcggcatgaagggcgagcggagaagaggcaagggccacgatggcctgtaccagggcctgagcaccgccaccaaggacacctatgacgccctgcacatgcaggccctgcctccaaga

SEQ ID NO: 25619 - DNA, 588 bp, synthetic construct
  source 1..588: mol_type = other DNA
gtggaaaagagcttcgagacagacaccaacctgaacttccagaacctgagcgtgatcggcttcagaatcctgctgctgaaagtggccggctttaacctgctgatgaccctgcggctgtggtccagcaggagtaagaggagcaggctcctgcacagtgactacatgaacatgactccacgccgccccggacccacccgcaagcattaccagccctatgccccaccacgcgacttcgcagcctatcgctccagagtgaagttcagcagaagcgccgacgcccctgcctaccagcagggacagaaccaactgtacaacgagctgaacctgggcagacgggaagagtacgacgtgctggacaagcggagaggcagggaccctgagatgggcggaaagccccagcggagaaagaacccccaggaaggactgtataacgaactccagaaagacaagatggccgaagcctacagcgagatcggcatgaagggcgagcggagaagaggcaagggccacgatggcctgtaccagggcctgagcaccgccaccaaggacacctatgacgccctgcacatgcaggccctgcctccaaga

SEQ ID NO: 25620 - DNA, 585 bp, synthetic construct
  source 1..585: mol_type = other DNA
gaaaagagcttcgagacagacaccaacctgaacttccagaacctgagcgtgatcggcttcagaatcctgctgctgaaagtggccggctttaacctgctgatgaccctgcggctgtggtccagcaggagtaagaggagcaggctcctgcacagtgactacatgaacatgactccacgccgccccggacccacccgcaagcattaccagccctatgccccaccacgcgacttcgcagcctatcgctccagagtgaagttcagcagaagcgccgacgcccctgcctaccagcagggacagaaccaactgtacaacgagctgaacctgggcagacgggaagagtacgacgtgctggacaagcggagaggcagggaccctgagatgggcggaaagccccagcggagaaagaacccccaggaaggactgtataacgaactccagaaagacaagatggccgaagcctacagcgagatcggcatgaagggcgagcggagaagaggcaagggccacgatggcctgtaccagggcctgagcaccgccaccaaggacacctatgacgccctgcacatgcaggccctgcctccaaga

SEQ ID NO: 25621 - DNA, 582 bp, synthetic construct
  source 1..582: mol_type = other DNA
aagagcttcgagacagacaccaacctgaacttccagaacctgagcgtgatcggcttcagaatcctgctgctgaaagtggccggctttaacctgctgatgaccctgcggctgtggtccagcaggagtaagaggagcaggctcctgcacagtgactacatgaacatgactccacgccgccccggacccacccgcaagcattaccagccctatgccccaccacgcgacttcgcagcctatcgctccagagtgaagttcagcagaagcgccgacgcccctgcctaccagcagggacagaaccaactgtacaacgagctgaacctgggcagacgggaagagtacgacgtgctggacaagcggagaggcagggaccctgagatgggcggaaagccccagcggagaaagaacccccaggaaggactgtataacgaactccagaaagacaagatggccgaagcctacagcgagatcggcatgaagggcgagcggagaagaggcaagggccacgatggcctgtaccagggcctgagcaccgccaccaaggacacctatgacgccctgcacatgcaggccctgcctccaaga

SEQ ID NO: 25622 - DNA, 579 bp, synthetic construct
  source 1..579: mol_type = other DNA
agcttcgagacagacaccaacctgaacttccagaacctgagcgtgatcggcttcagaatcctgctgctgaaagtggccggctttaacctgctgatgaccctgcggctgtggtccagcaggagtaagaggagcaggctcctgcacagtgactacatgaacatgactccacgccgccccggacccacccgcaagcattaccagccctatgccccaccacgcgacttcgcagcctatcgctccagagtgaagttcagcagaagcgccgacgcccctgcctaccagcagggacagaaccaactgtacaacgagctgaacctgggcagacgggaagagtacgacgtgctggacaagcggagaggcagggaccctgagatgggcggaaagccccagcggagaaagaacccccaggaaggactgtataacgaactccagaaagacaagatggccgaagcctacagcgagatcggcatgaagggcgagcggagaagaggcaagggccacgatggcctgtaccagggcctgagcaccgccaccaaggacacctatgacgccctgcacatgcaggccctgcctccaaga

SEQ ID NO: 25623 - DNA, 999 bp, synthetic construct; identical to SEQ ID NO: 25258
  source 1..999: mol_type = other DNA

SEQ ID NO: 25624 - DNA, 996 bp, synthetic construct
  source 1..996: mol_type = other DNA
gacctgaagaacgtgttcccacctgaggtggccgtgttcgagcctagcgaggccgagatcagccacacccagaaagccaccctcgtgtgcctggctaccggcttctaccccgaccatgtggaactgtcttggtgggtcaacggcaaagaggtgcacagcggcgtgtgtaccgacccccagccactgaaagaacagcccgccctgaacgacagccggtactgcctgagcagcagactgagagtgtccgccaccttctggcagaacccccggaaccacttcagatgccaggtgcagttctacggcctgagcgagaacgacgagtggacccaggacagagccaagcccgtgacccagatcgtgtctgccgaagcctggggcagagccgattgcggctttaccagcgagagctaccagcagggcgtgctgagcgccaccatcctgtacgagatcctgctgggcaaggccaccctgtacgccgtgctggtgtctgccctggtgctgatggctatggtcaagcggaaggacagccggggaaggagtaagaggagcaggctcctgcacagtgactacatgaacatgactccacgccgccccggacccacccgcaagcattaccagccctatgccccaccacgcgacttcgcagcctatcgctccagagtgaagttcagcagaagcgccgacgcccctgcctaccagcagggacagaaccaactgtacaacgagctgaacctgggcagacgggaagagtacgacgtgctggacaagcggagaggcagggaccctgagatgggcggaaagccccagcggagaaagaacccccaggaaggactgtataacgaactccagaaagacaagatggccgaagcctacagcgagatcggcatgaagggcgagcggagaagaggcaagggccacgatggcctgtaccagggcctgagcaccgccaccaaggacacctatgacgccctgcacatgcaggccctgcctccaaga

SEQ ID NO: 25625 - DNA, 993 bp, synthetic construct
  source 1..993: mol_type = other DNA
ctgaagaacgtgttcccacctgaggtggccgtgttcgagcctagcgaggccgagatcagccacacccagaaagccaccctcgtgtgcctggctaccggcttctaccccgaccatgtggaactgtcttggtgggtcaacggcaaagaggtgcacagcggcgtgtgtaccgacccccagccactgaaagaacagcccgccctgaacgacagccggtactgcctgagcagcagactgagagtgtccgccaccttctggcagaacccccggaaccacttcagatgccaggtgcagttctacggcctgagcgagaacgacgagtggacccaggacagagccaagcccgtgacccagatcgtgtctgccgaagcctggggcagagccgattgcggctttaccagcgagagctaccagcagggcgtgctgagcgccaccatcctgtacgagatcctgctgggcaaggccaccctgtacgccgtgctggtgtctgccctggtgctgatggctatggtcaagcggaaggacagccggggaaggagtaagaggagcaggctcctgcacagtgactacatgaacatgactccacgccgccccggacccacccgcaagcattaccagccctatgccccaccacgcgacttcgcagcctatcgctccagagtgaagttcagcagaagcgccgacgcccctgcctaccagcagggacagaaccaactgtacaacgagctgaacctgggcagacgggaagagtacgacgtgctggacaagcggagaggcagggaccctgagatgggcggaaagccccagcggagaaagaacccccaggaaggactgtataacgaactccagaaagacaagatggccgaagcctacagcgagatcggcatgaagggcgagcggagaagaggcaagggccacgatggcctgtaccagggcctgagcaccgccaccaaggacacctatgacgccctgcacatgcaggccctgcctccaaga

SEQ ID NO: 25626 - DNA, 990 bp, synthetic construct
  source 1..990: mol_type = other DNA
aagaacgtgttcccacctgaggtggccgtgttcgagcctagcgaggccgagatcagccacacccagaaagccaccctcgtgtgcctggctaccggcttctaccccgaccatgtggaactgtcttggtgggtcaacggcaaagaggtgcacagcggcgtgtgtaccgacccccagccactgaaagaacagcccgccctgaacgacagccggtactgcctgagcagcagactgagagtgtccgccaccttctggcagaacccccggaaccacttcagatgccaggtgcagttctacggcctgagcgagaacgacgagtggacccaggacagagccaagcccgtgacccagatcgtgtctgccgaagcctggggcagagccgattgcggctttaccagcgagagctaccagcagggcgtgctgagcgccaccatcctgtacgagatcctgctgggcaaggccaccctgtacgccgtgctggtgtctgccctggtgctgatggctatggtcaagcggaaggacagccggggaaggagtaagaggagcaggctcctgcacagtgactacatgaacatgactccacgccgccccggacccacccgcaagcattaccagccctatgccccaccacgcgacttcgcagcctatcgctccagagtgaagttcagcagaagcgccgacgcccctgcctaccagcagggacagaaccaactgtacaacgagctgaacctgggcagacgggaagagtacgacgtgctggacaagcggagaggcagggaccctgagatgggcggaaagccccagcggagaaagaacccccaggaaggactgtataacgaactccagaaagacaagatggccgaagcctacagcgagatcggcatgaagggcgagcggagaagaggcaagggccacgatggcctgtaccagggcctgagcaccgccaccaaggacacctatgacgccctgcacatgcaggccctgcctccaaga

SEQ ID NO: 25627 - DNA, 987 bp, synthetic construct
  source 1..987: mol_type = other DNA
aacgtgttcccacctgaggtggccgtgttcgagcctagcgaggccgagatcagccacacccagaaagccaccctcgtgtgcctggctaccggcttctaccccgaccatgtggaactgtcttggtgggtcaacggcaaagaggtgcacagcggcgtgtgtaccgacccccagccactgaaagaacagcccgccctgaacgacagccggtactgcctgagcagcagactgagagtgtccgccaccttctggcagaacccccggaaccacttcagatgccaggtgcagttctacggcctgagcgagaacgacgagtggacccaggacagagccaagcccgtgacccagatcgtgtctgccgaagcctggggcagagccgattgcggctttaccagcgagagctaccagcagggcgtgctgagcgccaccatcctgtacgagatcctgctgggcaaggccaccctgtacgccgtgctggtgtctgccctggtgctgatggctatggtcaagcggaaggacagccggggaaggagtaagaggagcaggctcctgcacagtgactacatgaacatgactccacgccgccccggacccacccgcaagcattaccagccctatgccccaccacgcgacttcgcagcctatcgctccagagtgaagttcagcagaagcgccgacgcccctgcctaccagcagggacagaaccaactgtacaacgagctgaacctgggcagacgggaagagtacgacgtgctggacaagcggagaggcagggaccctgagatgggcggaaagccccagcggagaaagaacccccaggaaggactgtataacgaactccagaaagacaagatggccgaagcctacagcgagatcggcatgaagggcgagcggagaagaggcaagggccacgatggcctgtaccagggcctgagcaccgccaccaaggacacctatgacgccctgcacatgcaggccctgcctccaaga

SEQ ID NO: 25628 - DNA, 984 bp, synthetic construct
  source 1..984: mol_type = other DNA
gtgttcccacctgaggtggccgtgttcgagcctagcgaggccgagatcagccacacccagaaagccaccctcgtgtgcctggctaccggcttctaccccgaccatgtggaactgtcttggtgggtcaacggcaaagaggtgcacagcggcgtgtgtaccgacccccagccactgaaagaacagcccgccctgaacgacagccggtactgcctgagcagcagactgagagtgtccgccaccttctggcagaacccccggaaccacttcagatgccaggtgcagttctacggcctgagcgagaacgacgagtggacccaggacagagccaagcccgtgacccagatcgtgtctgccgaagcctggggcagagccgattgcggctttaccagcgagagctaccagcagggcgtgctgagcgccaccatcctgtacgagatcctgctgggcaaggccaccctgtacgccgtgctggtgtctgccctggtgctgatggctatggtcaagcggaaggacagccggggaaggagtaagaggagcaggctcctgcacagtgactacatgaacatgactccacgccgccccggacccacccgcaagcattaccagccctatgccccaccacgcgacttcgcagcctatcgctccagagtgaagttcagcagaagcgccgacgcccctgcctaccagcagggacagaaccaactgtacaacgagctgaacctgggcagacgggaagagtacgacgtgctggacaagcggagaggcagggaccctgagatgggcggaaagccccagcggagaaagaacccccaggaaggactgtataacgaactccagaaagacaagatggccgaagcctacagcgagatcggcatgaagggcgagcggagaagaggcaagggccacgatggcctgtaccagggcctgagcaccgccaccaaggacacctatgacgccctgcacatgcaggccctgcctccaaga

SEQ ID NO: 25629 - DNA, 981 bp, synthetic construct
  source 1..981: mol_type = other DNA
ttcccacctgaggtggccgtgttcgagcctagcgaggccgagatcagccacacccagaaagccaccctcgtgtgcctggctaccggcttctaccccgaccatgtggaactgtcttggtgggtcaacggcaaagaggtgcacagcggcgtgtgtaccgacccccagccactgaaagaacagcccgccctgaacgacagccggtactgcctgagcagcagactgagagtgtccgccaccttctggcagaacccccggaaccacttcagatgccaggtgcagttctacggcctgagcgagaacgacgagtggacccaggacagagccaagcccgtgacccagatcgtgtctgccgaagcctggggcagagccgattgcggctttaccagcgagagctaccagcagggcgtgctgagcgccaccatcctgtacgagatcctgctgggcaaggccaccctgtacgccgtgctggtgtctgccctggtgctgatggctatggtcaagcggaaggacagccggggaaggagtaagaggagcaggctcctgcacagtgactacatgaacatgactccacgccgccccggacccacccgcaagcattaccagccctatgccccaccacgcgacttcgcagcctatcgctccagagtgaagttcagcagaagcgccgacgcccctgcctaccagcagggacagaaccaactgtacaacgagctgaacctgggcagacgggaagagtacgacgtgctggacaagcggagaggcagggaccctgagatgggcggaaagccccagcggagaaagaacccccaggaaggactgtataacgaactccagaaagacaagatggccgaagcctacagcgagatcggcatgaagggcgagcggagaagaggcaagggccacgatggcctgtaccagggcctgagcaccgccaccaaggacacctatgacgccctgcacatgcaggccctgcctccaaga

SEQ ID NO: 25630 - DNA, 978 bp, synthetic construct
  source 1..978: mol_type = other DNA
ccacctgaggtggccgtgttcgagcctagcgaggccgagatcagccacacccagaaagccaccctcgtgtgcctggctaccggcttctaccccgaccatgtggaactgtcttggtgggtcaacggcaaagaggtgcacagcggcgtgtgtaccgacccccagccactgaaagaacagcccgccctgaacgacagccggtactgcctgagcagcagactgagagtgtccgccaccttctggcagaacccccggaaccacttcagatgccaggtgcagttctacggcctgagcgagaacgacgagtggacccaggacagagccaagcccgtgacccagatcgtgtctgccgaagcctggggcagagccgattgcggctttaccagcgagagctaccagcagggcgtgctgagcgccaccatcctgtacgagatcctgctgggcaaggccaccctgtacgccgtgctggtgtctgccctggtgctgatggctatggtcaagcggaaggacagccggggaaggagtaagaggagcaggctcctgcacagtgactacatgaacatgactccacgccgccccggacccacccgcaagcattaccagccctatgccccaccacgcgacttcgcagcctatcgctccagagtgaagttcagcagaagcgccgacgcccctgcctaccagcagggacagaaccaactgtacaacgagctgaacctgggcagacgggaagagtacgacgtgctggacaagcggagaggcagggaccctgagatgggcggaaagccccagcggagaaagaacccccaggaaggactgtataacgaactccagaaagacaagatggccgaagcctacagcgagatcggcatgaagggcgagcggagaagaggcaagggccacgatggcctgtaccagggcctgagcaccgccaccaaggacacctatgacgccctgcacatgcaggccctgcctccaaga

SEQ ID NO: 25631 - DNA, 975 bp, synthetic construct
  source 1..975: mol_type = other DNA
cctgaggtggccgtgttcgagcctagcgaggccgagatcagccacacccagaaagccaccctcgtgtgcctggctaccggcttctaccccgaccatgtggaactgtcttggtgggtcaacggcaaagaggtgcacagcggcgtgtgtaccgacccccagccactgaaagaacagcccgccctgaacgacagccggtactgcctgagcagcagactgagagtgtccgccaccttctggcagaacccccggaaccacttcagatgccaggtgcagttctacggcctgagcgagaacgacgagtggacccaggacagagccaagcccgtgacccagatcgtgtctgccgaagcctggggcagagccgattgcggctttaccagcgagagctaccagcagggcgtgctgagcgccaccatcctgtacgagatcctgctgggcaaggccaccctgtacgccgtgctggtgtctgccctggtgctgatggctatggtcaagcggaaggacagccggggaaggagtaagaggagcaggctcctgcacagtgactacatgaacatgactccacgccgccccggacccacccgcaagcattaccagccctatgccccaccacgcgacttcgcagcctatcgctccagagtgaagttcagcagaagcgccgacgcccctgcctaccagcagggacagaaccaactgtacaacgagctgaacctgggcagacgggaagagtacgacgtgctggacaagcggagaggcagggaccctgagatgggcggaaagccccagcggagaaagaacccccaggaaggactgtataacgaactccagaaagacaagatggccgaagcctacagcgagatcggcatgaagggcgagcggagaagaggcaagggccacgatggcctgtaccagggcctgagcaccgccaccaaggacacctatgacgccctgcacatgcaggccctgcctccaaga

SEQ ID NO: 25632 - DNA, 972 bp, synthetic construct
  source 1..972: mol_type = other DNA
gaggtggccgtgttcgagcctagcgaggccgagatcagccacacccagaaagccaccctcgtgtgcctggctaccggcttctaccccgaccatgtggaactgtcttggtgggtcaacggcaaagaggtgcacagcggcgtgtgtaccgacccccagccactgaaagaacagcccgccctgaacgacagccggtactgcctgagcagcagactgagagtgtccgccaccttctggcagaacccccggaaccacttcagatgccaggtgcagttctacggcctgagcgagaacgacgagtggacccaggacagagccaagcccgtgacccagatcgtgtctgccgaagcctggggcagagccgattgcggctttaccagcgagagctaccagcagggcgtgctgagcgccaccatcctgtacgagatcctgctgggcaaggccaccctgtacgccgtgctggtgtctgccctggtgctgatggctatggtcaagcggaaggacagccggggaaggagtaagaggagcaggctcctgcacagtgactacatgaacatgactccacgccgccccggacccacccgcaagcattaccagccctatgccccaccacgcgacttcgcagcctatcgctccagagtgaagttcagcagaagcgccgacgcccctgcctaccagcagggacagaaccaactgtacaacgagctgaacctgggcagacgggaagagtacgacgtgctggacaagcggagaggcagggaccctgagatgggcggaaagccccagcggagaaagaacccccaggaaggactgtataacgaactccagaaagacaagatggccgaagcctacagcgagatcggcatgaagggcgagcggagaagaggcaagggccacgatggcctgtaccagggcctgagcaccgccaccaaggacacctatgacgccctgcacatgcaggccctgcctccaaga

SEQ ID NO: 25633 - DNA, 969 bp, synthetic construct
  source 1..969: mol_type = other DNA
gtggccgtgttcgagcctagcgaggccgagatcagccacacccagaaagccaccctcgtgtgcctggctaccggcttctaccccgaccatgtggaactgtcttggtgggtcaacggcaaagaggtgcacagcggcgtgtgtaccgacccccagccactgaaagaacagcccgccctgaacgacagccggtactgcctgagcagcagactgagagtgtccgccaccttctggcagaacccccggaaccacttcagatgccaggtgcagttctacggcctgagcgagaacgacgagtggacccaggacagagccaagcccgtgacccagatcgtgtctgccgaagcctggggcagagccgattgcggctttaccagcgagagctaccagcagggcgtgctgagcgccaccatcctgtacgagatcctgctgggcaaggccaccctgtacgccgtgctggtgtctgccctggtgctgatggctatggtcaagcggaaggacagccggggaaggagtaagaggagcaggctcctgcacagtgactacatgaacatgactccacgccgccccggacccacccgcaagcattaccagccctatgccccaccacgcgacttcgcagcctatcgctccagagtgaagttcagcagaagcgccgacgcccctgcctaccagcagggacagaaccaactgtacaacgagctgaacctgggcagacgggaagagtacgacgtgctggacaagcggagaggcagggaccctgagatgggcggaaagccccagcggagaaagaacccccaggaaggactgtataacgaactccagaaagacaagatggccgaagcctacagcgagatcggcatgaagggcgagcggagaagaggcaagggccacgatggcctgtaccagggcctgagcaccgccaccaaggacacctatgacgccctgcacatgcaggccctgcctccaaga

SEQ ID NO: 25634 - DNA, 966 bp, synthetic construct
  source 1..966: mol_type = other DNA
gccgtgttcgagcctagcgaggccgagatcagccacacccagaaagccaccctcgtgtgcctggctaccggcttctaccccgaccatgtggaactgtcttggtgggtcaacggcaaagaggtgcacagcggcgtgtgtaccgacccccagccactgaaagaacagcccgccctgaacgacagccggtactgcctgagcagcagactgagagtgtccgccaccttctggcagaacccccggaaccacttcagatgccaggtgcagttctacggcctgagcgagaacgacgagtggacccaggacagagccaagcccgtgacccagatcgtgtctgccgaagcctggggcagagccgattgcggctttaccagcgagagctaccagcagggcgtgctgagcgccaccatcctgtacgagatcctgctgggcaaggccaccctgtacgccgtgctggtgtctgccctggtgctgatggctatggtcaagcggaaggacagccggggaaggagtaagaggagcaggctcctgcacagtgactacatgaacatgactccacgccgccccggacccacccgcaagcattaccagccctatgccccaccacgcgacttcgcagcctatcgctccagagtgaagttcagcagaagcgccgacgcccctgcctaccagcagggacagaaccaactgtacaacgagctgaacctgggcagacgggaagagtacgacgtgctggacaagcggagaggcagggaccctgagatgggcggaaagccccagcggagaaagaacccccaggaaggactgtataacgaactccagaaagacaagatggccgaagcctacagcgagatcggcatgaagggcgagcggagaagaggcaagggccacgatggcctgtaccagggcctgagcaccgccaccaaggacacctatgacgccctgcacatgcaggccctgcctccaaga

SEQ ID NO: 25635 - DNA, 963 bp, synthetic construct
  source 1..963: mol_type = other DNA
gtgttcgagcctagcgaggccgagatcagccacacccagaaagccaccctcgtgtgcctggctaccggcttctaccccgaccatgtggaactgtcttggtgggtcaacggcaaagaggtgcacagcggcgtgtgtaccgacccccagccactgaaagaacagcccgccctgaacgacagccggtactgcctgagcagcagactgagagtgtccgccaccttctggcagaacccccggaaccacttcagatgccaggtgcagttctacggcctgagcgagaacgacgagtggacccaggacagagccaagcccgtgacccagatcgtgtctgccgaagcctggggcagagccgattgcggctttaccagcgagagctaccagcagggcgtgctgagcgccaccatcctgtacgagatcctgctgggcaaggccaccctgtacgccgtgctggtgtctgccctggtgctgatggctatggtcaagcggaaggacagccggggaaggagtaagaggagcaggctcctgcacagtgactacatgaacatgactccacgccgccccggacccacccgcaagcattaccagccctatgccccaccacgcgacttcgcagcctatcgctccagagtgaagttcagcagaagcgccgacgcccctgcctaccagcagggacagaaccaactgtacaacgagctgaacctgggcagacgggaagagtacgacgtgctggacaagcggagaggcagggaccctgagatgggcggaaagccccagcggagaaagaacccccaggaaggactgtataacgaactccagaaagacaagatggccgaagcctacagcgagatcggcatgaagggcgagcggagaagaggcaagggccacgatggcctgtaccagggcctgagcaccgccaccaaggacacctatgacgccctgcacatgcaggccctgcctccaaga

SEQ ID NO: 25636 - DNA, 960 bp, synthetic construct
  source 1..960: mol_type = other DNA
ttcgagcctagcgaggccgagatcagccacacccagaaagccaccctcgtgtgcctggctaccggcttctaccccgaccatgtggaactgtcttggtgggtcaacggcaaagaggtgcacagcggcgtgtgtaccgacccccagccactgaaagaacagcccgccctgaacgacagccggtactgcctgagcagcagactgagagtgtccgccaccttctggcagaacccccggaaccacttcagatgccaggtgcagttctacggcctgagcgagaacgacgagtggacccaggacagagccaagcccgtgacccagatcgtgtctgccgaagcctggggcagagccgattgcggctttaccagcgagagctaccagcagggcgtgctgagcgccaccatcctgtacgagatcctgctgggcaaggccaccctgtacgccgtgctggtgtctgccctggtgctgatggctatggtcaagcggaaggacagccggggaaggagtaagaggagcaggctcctgcacagtgactacatgaacatgactccacgccgccccggacccacccgcaagcattaccagccctatgccccaccacgcgacttcgcagcctatcgctccagagtgaagttcagcagaagcgccgacgcccctgcctaccagcagggacagaaccaactgtacaacgagctgaacctgggcagacgggaagagtacgacgtgctggacaagcggagaggcagggaccctgagatgggcggaaagccccagcggagaaagaacccccaggaaggactgtataacgaactccagaaagacaagatggccgaagcctacagcgagatcggcatgaagggcgagcggagaagaggcaagggccacgatggcctgtaccagggcctgagcaccgccaccaaggacacctatgacgccctgcacatgcaggccctgcctccaaga

SEQ ID NO: 25637 - DNA, 957 bp, synthetic construct
  source 1..957: mol_type = other DNA
gagcctagcgaggccgagatcagccacacccagaaagccaccctcgtgtgcctggctaccggcttctaccccgaccatgtggaactgtcttggtgggtcaacggcaaagaggtgcacagcggcgtgtgtaccgacccccagccactgaaagaacagcccgccctgaacgacagccggtactgcctgagcagcagactgagagtgtccgccaccttctggcagaacccccggaaccacttcagatgccaggtgcagttctacggcctgagcgagaacgacgagtggacccaggacagagccaagcccgtgacccagatcgtgtctgccgaagcctggggcagagccgattgcggctttaccagcgagagctaccagcagggcgtgctgagcgccaccatcctgtacgagatcctgctgggcaaggccaccctgtacgccgtgctggtgtctgccctggtgctgatggctatggtcaagcggaaggacagccggggaaggagtaagaggagcaggctcctgcacagtgactacatgaacatgactccacgccgccccggacccacccgcaagcattaccagccctatgccccaccacgcgacttcgcagcctatcgctccagagtgaagttcagcagaagcgccgacgcccctgcctaccagcagggacagaaccaactgtacaacgagctgaacctgggcagacgggaagagtacgacgtgctggacaagcggagaggcagggaccctgagatgggcggaaagccccagcggagaaagaacccccaggaaggactgtataacgaactccagaaagacaagatggccgaagcctacagcgagatcggcatgaagggcgagcggagaagaggcaagggccacgatggcctgtaccagggcctgagcaccgccaccaaggacacctatgacgccctgcacatgcaggccctgcctccaaga

SEQ ID NO: 25638 - DNA, 954 bp, synthetic construct
  source 1..954: mol_type = other DNA
cctagcgaggccgagatcagccacacccagaaagccaccctcgtgtgcctggctaccggcttctaccccgaccatgtggaactgtcttggtgggtcaacggcaaagaggtgcacagcggcgtgtgtaccgacccccagccactgaaagaacagcccgccctgaacgacagccggtactgcctgagcagcagactgagagtgtccgccaccttctggcagaacccccggaaccacttcagatgccaggtgcagttctacggcctgagcgagaacgacgagtggacccaggacagagccaagcccgtgacccagatcgtgtctgccgaagcctggggcagagccgattgcggctttaccagcgagagctaccagcagggcgtgctgagcgccaccatcctgtacgagatcctgctgggcaaggccaccctgtacgccgtgctggtgtctgccctggtgctgatggctatggtcaagcggaaggacagccggggaaggagtaagaggagcaggctcctgcacagtgactacatgaacatgactccacgccgccccggacccacccgcaagcattaccagccctatgccccaccacgcgacttcgcagcctatcgctccagagtgaagttcagcagaagcgccgacgcccctgcctaccagcagggacagaaccaactgtacaacgagctgaacctgggcagacgggaagagtacgacgtgctggacaagcggagaggcagggaccctgagatgggcggaaagccccagcggagaaagaacccccaggaaggactgtataacgaactccagaaagacaagatggccgaagcctacagcgagatcggcatgaagggcgagcggagaagaggcaagggccacgatggcctgtaccagggcctgagcaccgccaccaaggacacctatgacgccctgcacatgcaggccctgcctccaaga

SEQ ID NO: 25639 - DNA, 951 bp, synthetic construct
  source 1..951: mol_type = other DNA
agcgaggccgagatcagccacacccagaaagccaccctcgtgtgcctggctaccggcttctaccccgaccatgtggaactgtcttggtgggtcaacggcaaagaggtgcacagcggcgtgtgtaccgacccccagccactgaaagaacagcccgccctgaacgacagccggtactgcctgagcagcagactgagagtgtccgccaccttctggcagaacccccggaaccacttcagatgccaggtgcagttctacggcctgagcgagaacgacgagtggacccaggacagagccaagcccgtgacccagatcgtgtctgccgaagcctggggcagagccgattgcggctttaccagcgagagctaccagcagggcgtgctgagcgccaccatcctgtacgagatcctgctgggcaaggccaccctgtacgccgtgctggtgtctgccctggtgctgatggctatggtcaagcggaaggacagccggggaaggagtaagaggagcaggctcctgcacagtgactacatgaacatgactccacgccgccccggacccacccgcaagcattaccagccctatgccccaccacgcgacttcgcagcctatcgctccagagtgaagttcagcagaagcgccgacgcccctgcctaccagcagggacagaaccaactgtacaacgagctgaacctgggcagacgggaagagtacgacgtgctggacaagcggagaggcagggaccctgagatgggcggaaagccccagcggagaaagaacccccaggaaggactgtataacgaactccagaaagacaagatggccgaagcctacagcgagatcggcatgaagggcgagcggagaagaggcaagggccacgatggcctgtaccagggcctgagcaccgccaccaaggacacctatgacgccctgcacatgcaggccctgcctccaaga

SEQ ID NO: 25640 - DNA, 948 bp, synthetic construct
  source 1..948: mol_type = other DNA
gaggccgagatcagccacacccagaaagccaccctcgtgtgcctggctaccggcttctaccccgaccatgtggaactgtcttggtgggtcaacggcaaagaggtgcacagcggcgtgtgtaccgacccccagccactgaaagaacagcccgccctgaacgacagccggtactgcctgagcagcagactgagagtgtccgccaccttctggcagaacccccggaaccacttcagatgccaggtgcagttctacggcctgagcgagaacgacgagtggacccaggacagagccaagcccgtgacccagatcgtgtctgccgaagcctggggcagagccgattgcggctttaccagcgagagctaccagcagggcgtgctgagcgccaccatcctgtacgagatcctgctgggcaaggccaccctgtacgccgtgctggtgtctgccctggtgctgatggctatggtcaagcggaaggacagccggggaaggagtaagaggagcaggctcctgcacagtgactacatgaacatgactccacgccgccccggacccacccgcaagcattaccagccctatgccccaccacgcgacttcgcagcctatcgctccagagtgaagttcagcagaagcgccgacgcccctgcctaccagcagggacagaaccaactgtacaacgagctgaacctgggcagacgggaagagtacgacgtgctggacaagcggagaggcagggaccctgagatgggcggaaagccccagcggagaaagaacccccaggaaggactgtataacgaactccagaaagacaagatggccgaagcctacagcgagatcggcatgaagggcgagcggagaagaggcaagggccacgatggcctgtaccagggcctgagcaccgccaccaaggacacctatgacgccctgcacatgcaggccctgcctccaaga

SEQ ID NO: 25641 - DNA, 945 bp, synthetic construct
  source 1..945: mol_type = other DNA
gccgagatcagccacacccagaaagccaccctcgtgtgcctggctaccggcttctaccccgaccatgtggaactgtcttggtgggtcaacggcaaagaggtgcacagcggcgtgtgtaccgacccccagccactgaaagaacagcccgccctgaacgacagccggtactgcctgagcagcagactgagagtgtccgccaccttctggcagaacccccggaaccacttcagatgccaggtgcagttctacggcctgagcgagaacgacgagtggacccaggacagagccaagcccgtgacccagatcgtgtctgccgaagcctggggcagagccgattgcggctttaccagcgagagctaccagcagggcgtgctgagcgccaccatcctgtacgagatcctgctgggcaaggccaccctgtacgccgtgctggtgtctgccctggtgctgatggctatggtcaagcggaaggacagccggggaaggagtaagaggagcaggctcctgcacagtgactacatgaacatgactccacgccgccccggacccacccgcaagcattaccagccctatgccccaccacgcgacttcgcagcctatcgctccagagtgaagttcagcagaagcgccgacgcccctgcctaccagcagggacagaaccaactgtacaacgagctgaacctgggcagacgggaagagtacgacgtgctggacaagcggagaggcagggaccctgagatgggcggaaagccccagcggagaaagaacccccaggaaggactgtataacgaactccagaaagacaagatggccgaagcctacagcgagatcggcatgaagggcgagcggagaagaggcaagggccacgatggcctgtaccagggcctgagcaccgccaccaaggacacctatgacgccctgcacatgcaggccctgcctccaaga

SEQ ID NO: 25642 - DNA, 942 bp, synthetic construct
  source 1..942: mol_type = other DNA
gagatcagccacacccagaaagccaccctcgtgtgcctggctaccggcttctaccccgaccatgtggaactgtcttggtgggtcaacggcaaagaggtgcacagcggcgtgtgtaccgacccccagccactgaaagaacagcccgccctgaacgacagccggtactgcctgagcagcagactgagagtgtccgccaccttctggcagaacccccggaaccacttcagatgccaggtgcagttctacggcctgagcgagaacgacgagtggacccaggacagagccaagcccgtgacccagatcgtgtctgccgaagcctggggcagagccgattgcggctttaccagcgagagctaccagcagggcgtgctgagcgccaccatcctgtacgagatcctgctgggcaaggccaccctgtacgccgtgctggtgtctgccctggtgctgatggctatggtcaagcggaaggacagccggggaaggagtaagaggagcaggctcctgcacagtgactacatgaacatgactccacgccgccccggacccacccgcaagcattaccagccctatgccccaccacgcgacttcgcagcctatcgctccagagtgaagttcagcagaagcgccgacgcccctgcctaccagcagggacagaaccaactgtacaacgagctgaacctgggcagacgggaagagtacgacgtgctggacaagcggagaggcagggaccctgagatgggcggaaagccccagcggagaaagaacccccaggaaggactgtataacgaactccagaaagacaagatggccgaagcctacagcgagatcggcatgaagggcgagcggagaagaggcaagggccacgatggcctgtaccagggcctgagcaccgccaccaaggacacctatgacgccctgcacatgcaggccctgcctccaaga

SEQ ID NO: 25643 - DNA, 939 bp, synthetic construct
  source 1..939: mol_type = other DNA
atcagccacacccagaaagccaccctcgtgtgcctggctaccggcttctaccccgaccatgtggaactgtcttggtgggtcaacggcaaagaggtgcacagcggcgtgtgtaccgacccccagccactgaaagaacagcccgccctgaacgacagccggtactgcctgagcagcagactgagagtgtccgccaccttctggcagaacccccggaaccacttcagatgccaggtgcagttctacggcctgagcgagaacgacgagtggacccaggacagagccaagcccgtgacccagatcgtgtctgccgaagcctggggcagagccgattgcggctttaccagcgagagctaccagcagggcgtgctgagcgccaccatcctgtacgagatcctgctgggcaaggccaccctgtacgccgtgctggtgtctgccctggtgctgatggctatggtcaagcggaaggacagccggggaaggagtaagaggagcaggctcctgcacagtgactacatgaacatgactccacgccgccccggacccacccgcaagcattaccagccctatgccccaccacgcgacttcgcagcctatcgctccagagtgaagttcagcagaagcgccgacgcccctgcctaccagcagggacagaaccaactgtacaacgagctgaacctgggcagacgggaagagtacgacgtgctggacaagcggagaggcagggaccctgagatgggcggaaagccccagcggagaaagaacccccaggaaggactgtataacgaactccagaaagacaagatggccgaagcctacagcgagatcggcatgaagggcgagcggagaagaggcaagggccacgatggcctgtaccagggcctgagcaccgccaccaaggacacctatgacgccctgcacatgcaggccctgcctccaaga

SEQ ID NO: 25644 - DNA, 936 bp, synthetic construct
  source 1..936: mol_type = other DNA
agccacacccagaaagccaccctcgtgtgcctggctaccggcttctaccccgaccatgtggaactgtcttggtgggtcaacggcaaagaggtgcacagcggcgtgtgtaccgacccccagccactgaaagaacagcccgccctgaacgacagccggtactgcctgagcagcagactgagagtgtccgccaccttctggcagaacccccggaaccacttcagatgccaggtgcagttctacggcctgagcgagaacgacgagtggacccaggacagagccaagcccgtgacccagatcgtgtctgccgaagcctggggcagagccgattgcggctttaccagcgagagctaccagcagggcgtgctgagcgccaccatcctgtacgagatcctgctgggcaaggccaccctgtacgccgtgctggtgtctgccctggtgctgatggctatggtcaagcggaaggacagccggggaaggagtaagaggagcaggctcctgcacagtgactacatgaacatgactccacgccgccccggacccacccgcaagcattaccagccctatgccccaccacgcgacttcgcagcctatcgctccagagtgaagttcagcagaagcgccgacgcccctgcctaccagcagggacagaaccaactgtacaacgagctgaacctgggcagacgggaagagtacgacgtgctggacaagcggagaggcagggaccctgagatgggcggaaagccccagcggagaaagaacccccaggaaggactgtataacgaactccagaaagacaagatggccgaagcctacagcgagatcggcatgaagggcgagcggagaagaggcaagggccacgatggcctgtaccagggcctgagcaccgccaccaaggacacctatgacgccctgcacatgcaggccctgcctccaaga

SEQ ID NO: 25645 - DNA, 933 bp, synthetic construct
  source 1..933: mol_type = other DNA
cacacccagaaagccaccctcgtgtgcctggctaccggcttctaccccgaccatgtggaactgtcttggtgggtcaacggcaaagaggtgcacagcggcgtgtgtaccgacccccagccactgaaagaacagcccgccctgaacgacagccggtactgcctgagcagcagactgagagtgtccgccaccttctggcagaacccccggaaccacttcagatgccaggtgcagttctacggcctgagcgagaacgacgagtggacccaggacagagccaagcccgtgacccagatcgtgtctgccgaagcctggggcagagccgattgcggctttaccagcgagagctaccagcagggcgtgctgagcgccaccatcctgtacgagatcctgctgggcaaggccaccctgtacgccgtgctggtgtctgccctggtgctgatggctatggtcaagcggaaggacagccggggaaggagtaagaggagcaggctcctgcacagtgactacatgaacatgactccacgccgccccggacccacccgcaagcattaccagccctatgccccaccacgcgacttcgcagcctatcgctccagagtgaagttcagcagaagcgccgacgcccctgcctaccagcagggacagaaccaactgtacaacgagctgaacctgggcagacgggaagagtacgacgtgctggacaagcggagaggcagggaccctgagatgggcggaaagccccagcggagaaagaacccccaggaaggactgtataacgaactccagaaagacaagatggccgaagcctacagcgagatcggcatgaagggcgagcggagaagaggcaagggccacgatggcctgtaccagggcctgagcaccgccaccaaggacacctatgacgccctgcacatgcaggccctgcctccaaga

SEQ ID NO: 25646 - DNA, 930 bp, synthetic construct
  source 1..930: mol_type = other DNA
acccagaaagccaccctcgtgtgcctggctaccggcttctaccccgaccatgtggaactgtcttggtgggtcaacggcaaagaggtgcacagcggcgtgtgtaccgacccccagccactgaaagaacagcccgccctgaacgacagccggtactgcctgagcagcagactgagagtgtccgccaccttctggcagaacccccggaaccacttcagatgccaggtgcagttctacggcctgagcgagaacgacgagtggacccaggacagagccaagcccgtgacccagatcgtgtctgccgaagcctggggcagagccgattgcggctttaccagcgagagctaccagcagggcgtgctgagcgccaccatcctgtacgagatcctgctgggcaaggccaccctgtacgccgtgctggtgtctgccctggtgctgatggctatggtcaagcggaaggacagccggggaaggagtaagaggagcaggctcctgcacagtgactacatgaacatgactccacgccgccccggacccacccgcaagcattaccagccctatgccccaccacgcgacttcgcagcctatcgctccagagtgaagttcagcagaagcgccgacgcccctgcctaccagcagggacagaaccaactgtacaacgagctgaacctgggcagacgggaagagtacgacgtgctggacaagcggagaggcagggaccctgagatgggcggaaagccccagcggagaaagaacccccaggaaggactgtataacgaactccagaaagacaagatggccgaagcctacagcgagatcggcatgaagggcgagcggagaagaggcaagggccacgatggcctgtaccagggcctgagcaccgccaccaaggacacctatgacgccctgcacatgcaggccctgcctccaaga

SEQ ID NO: 25647 - DNA, 927 bp, synthetic construct
  source 1..927: mol_type = other DNA
cagaaagccaccctcgtgtgcctggctaccggcttctaccccgaccatgtggaactgtcttggtgggtcaacggcaaagaggtgcacagcggcgtgtgtaccgacccccagccactgaaagaacagcccgccctgaacgacagccggtactgcctgagcagcagactgagagtgtccgccaccttctggcagaacccccggaaccacttcagatgccaggtgcagttctacggcctgagcgagaacgacgagtggacccaggacagagccaagcccgtgacccagatcgtgtctgccgaagcctggggcagagccgattgcggctttaccagcgagagctaccagcagggcgtgctgagcgccaccatcctgtacgagatcctgctgggcaaggccaccctgtacgccgtgctggtgtctgccctggtgctgatggctatggtcaagcggaaggacagccggggaaggagtaagaggagcaggctcctgcacagtgactacatgaacatgactccacgccgccccggacccacccgcaagcattaccagccctatgccccaccacgcgacttcgcagcctatcgctccagagtgaagttcagcagaagcgccgacgcccctgcctaccagcagggacagaaccaactgtacaacgagctgaacctgggcagacgggaagagtacgacgtgctggacaagcggagaggcagggaccctgagatgggcggaaagccccagcggagaaagaacccccaggaaggactgtataacgaactccagaaagacaagatggccgaagcctacagcgagatcggcatgaagggcgagcggagaagaggcaagggccacgatggcctgtaccagggcctgagcaccgccaccaaggacacctatgacgccctgcacatgcaggccctgcctccaaga

SEQ ID NO: 25648 - DNA, 924 bp, synthetic construct
  source 1..924: mol_type = other DNA
aaagccaccctcgtgtgcctggctaccggcttctaccccgaccatgtggaactgtcttggtgggtcaacggcaaagaggtgcacagcggcgtgtgtaccgacccccagccactgaaagaacagcccgccctgaacgacagccggtactgcctgagcagcagactgagagtgtccgccaccttctggcagaacccccggaaccacttcagatgccaggtgcagttctacggcctgagcgagaacgacgagtggacccaggacagagccaagcccgtgacccagatcgtgtctgccgaagcctggggcagagccgattgcggctttaccagcgagagctaccagcagggcgtgctgagcgccaccatcctgtacgagatcctgctgggcaaggccaccctgtacgccgtgctggtgtctgccctggtgctgatggctatggtcaagcggaaggacagccggggaaggagtaagaggagcaggctcctgcacagtgactacatgaacatgactccacgccgccccggacccacccgcaagcattaccagccctatgccccaccacgcgacttcgcagcctatcgctccagagtgaagttcagcagaagcgccgacgcccctgcctaccagcagggacagaaccaactgtacaacgagctgaacctgggcagacgggaagagtacgacgtgctggacaagcggagaggcagggaccctgagatgggcggaaagccccagcggagaaagaacccccaggaaggactgtataacgaactccagaaagacaagatggccgaagcctacagcgagatcggcatgaagggcgagcggagaagaggcaagggccacgatggcctgtaccagggcctgagcaccgccaccaaggacacctatgacgccctgcacatgcaggccctgcctccaaga

SEQ ID NO: 25649 - DNA, 921 bp, synthetic construct
  source 1..921: mol_type = other DNA
gccaccctcgtgtgcctggctaccggcttctaccccgaccatgtggaactgtcttggtgggtcaacggcaaagaggtgcacagcggcgtgtgtaccgacccccagccactgaaagaacagcccgccctgaacgacagccggtactgcctgagcagcagactgagagtgtccgccaccttctggcagaacccccggaaccacttcagatgccaggtgcagttctacggcctgagcgagaacgacgagtggacccaggacagagccaagcccgtgacccagatcgtgtctgccgaagcctggggcagagccgattgcggctttaccagcgagagctaccagcagggcgtgctgagcgccaccatcctgtacgagatcctgctgggcaaggccaccctgtacgccgtgctggtgtctgccctggtgctgatggctatggtcaagcggaaggacagccggggaaggagtaagaggagcaggctcctgcacagtgactacatgaacatgactccacgccgccccggacccacccgcaagcattaccagccctatgccccaccacgcgacttcgcagcctatcgctccagagtgaagttcagcagaagcgccgacgcccctgcctaccagcagggacagaaccaactgtacaacgagctgaacctgggcagacgggaagagtacgacgtgctggacaagcggagaggcagggaccctgagatgggcggaaagccccagcggagaaagaacccccaggaaggactgtataacgaactccagaaagacaagatggccgaagcctacagcgagatcggcatgaagggcgagcggagaagaggcaagggccacgatggcctgtaccagggcctgagcaccgccaccaaggacacctatgacgccctgcacatgcaggccctgcctccaaga

SEQ ID NO: 25650 - DNA, 918 bp, synthetic construct
  source 1..918: mol_type = other DNA
accctcgtgtgcctggctaccggcttctaccccgaccatgtggaactgtcttggtgggtcaacggcaaagaggtgcacagcggcgtgtgtaccgacccccagccactgaaagaacagcccgccctgaacgacagccggtactgcctgagcagcagactgagagtgtccgccaccttctggcagaacccccggaaccacttcagatgccaggtgcagttctacggcctgagcgagaacgacgagtggacccaggacagagccaagcccgtgacccagatcgtgtctgccgaagcctggggcagagccgattgcggctttaccagcgagagctaccagcagggcgtgctgagcgccaccatcctgtacgagatcctgctgggcaaggccaccctgtacgccgtgctggtgtctgccctggtgctgatggctatggtcaagcggaaggacagccggggaaggagtaagaggagcaggctcctgcacagtgactacatgaacatgactccacgccgccccggacccacccgcaagcattaccagccctatgccccaccacgcgacttcgcagcctatcgctccagagtgaagttcagcagaagcgccgacgcccctgcctaccagcagggacagaaccaactgtacaacgagctgaacctgggcagacgggaagagtacgacgtgctggacaagcggagaggcagggaccctgagatgggcggaaagccccagcggagaaagaacccccaggaaggactgtataacgaactccagaaagacaagatggccgaagcctacagcgagatcggcatgaagggcgagcggagaagaggcaagggccacgatggcctgtaccagggcctgagcaccgccaccaaggacacctatgacgccctgcacatgcaggccctgcctccaaga

SEQ ID NO: 25651 - DNA, 915 bp, synthetic construct
  source 1..915: mol_type = other DNA
ctcgtgtgcctggctaccggcttctaccccgaccatgtggaactgtcttggtgggtcaacggcaaagaggtgcacagcggcgtgtgtaccgacccccagccactgaaagaacagcccgccctgaacgacagccggtactgcctgagcagcagactgagagtgtccgccaccttctggcagaacccccggaaccacttcagatgccaggtgcagttctacggcctgagcgagaacgacgagtggacccaggacagagccaagcccgtgacccagatcgtgtctgccgaagcctggggcagagccgattgcggctttaccagcgagagctaccagcagggcgtgctgagcgccaccatcctgtacgagatcctgctgggcaaggccaccctgtacgccgtgctggtgtctgccctggtgctgatggctatggtcaagcggaaggacagccggggaaggagtaagaggagcaggctcctgcacagtgactacatgaacatgactccacgccgccccggacccacccgcaagcattaccagccctatgccccaccacgcgacttcgcagcctatcgctccagagtgaagttcagcagaagcgccgacgcccctgcctaccagcagggacagaaccaactgtacaacgagctgaacctgggcagacgggaagagtacgacgtgctggacaagcggagaggcagggaccctgagatgggcggaaagccccagcggagaaagaacccccaggaaggactgtataacgaactccagaaagacaagatggccgaagcctacagcgagatcggcatgaagggcgagcggagaagaggcaagggccacgatggcctgtaccagggcctgagcaccgccaccaaggacacctatgacgccctgcacatgcaggccctgcctccaaga

SEQ ID NO: 25652 - DNA, 912 bp, synthetic construct
  source 1..912: mol_type = other DNA
gtgtgcctggctaccggcttctaccccgaccatgtggaactgtcttggtgggtcaacggcaaagaggtgcacagcggcgtgtgtaccgacccccagccactgaaagaacagcccgccctgaacgacagccggtactgcctgagcagcagactgagagtgtccgccaccttctggcagaacccccggaaccacttcagatgccaggtgcagttctacggcctgagcgagaacgacgagtggacccaggacagagccaagcccgtgacccagatcgtgtctgccgaagcctggggcagagccgattgcggctttaccagcgagagctaccagcagggcgtgctgagcgccaccatcctgtacgagatcctgctgggcaaggccaccctgtacgccgtgctggtgtctgccctggtgctgatggctatggtcaagcggaaggacagccggggaaggagtaagaggagcaggctcctgcacagtgactacatgaacatgactccacgccgccccggacccacccgcaagcattaccagccctatgccccaccacgcgacttcgcagcctatcgctccagagtgaagttcagcagaagcgccgacgcccctgcctaccagcagggacagaaccaactgtacaacgagctgaacctgggcagacgggaagagtacgacgtgctggacaagcggagaggcagggaccctgagatgggcggaaagccccagcggagaaagaacccccaggaaggactgtataacgaactccagaaagacaagatggccgaagcctacagcgagatcggcatgaagggcgagcggagaagaggcaagggccacgatggcctgtaccagggcctgagcaccgccaccaaggacacctatgacgccctgcacatgcaggccctgcctccaaga

SEQ ID NO: 25653 - DNA, 909 bp, synthetic construct
  source 1..909: mol_type = other DNA
tgcctggctaccggcttctaccccgaccatgtggaactgtcttggtgggtcaacggcaaagaggtgcacagcggcgtgtgtaccgacccccagccactgaaagaacagcccgccctgaacgacagccggtactgcctgagcagcagactgagagtgtccgccaccttctggcagaacccccggaaccacttcagatgccaggtgcagttctacggcctgagcgagaacgacgagtggacccaggacagagccaagcccgtgacccagatcgtgtctgccgaagcctggggcagagccgattgcggctttaccagcgagagctaccagcagggcgtgctgagcgccaccatcctgtacgagatcctgctgggcaaggccaccctgtacgccgtgctggtgtctgccctggtgctgatggctatggtcaagcggaaggacagccggggaaggagtaagaggagcaggctcctgcacagtgactacatgaacatgactccacgccgccccggacccacccgcaagcattaccagccctatgccccaccacgcgacttcgcagcctatcgctccagagtgaagttcagcagaagcgccgacgcccctgcctaccagcagggacagaaccaactgtacaacgagctgaacctgggcagacgggaagagtacgacgtgctggacaagcggagaggcagggaccctgagatgggcggaaagccccagcggagaaagaacccccaggaaggactgtataacgaactccagaaagacaagatggccgaagcctacagcgagatcggcatgaagggcgagcggagaagaggcaagggccacgatggcctgtaccagggcctgagcaccgccaccaaggacacctatgacgccctgcacatgcaggccctgcctccaaga

SEQ ID NO: 25654 - DNA, 906 bp, synthetic construct
  source 1..906: mol_type = other DNA
ctggctaccggcttctaccccgaccatgtggaactgtcttggtgggtcaacggcaaagaggtgcacagcggcgtgtgtaccgacccccagccactgaaagaacagcccgccctgaacgacagccggtactgcctgagcagcagactgagagtgtccgccaccttctggcagaacccccggaaccacttcagatgccaggtgcagttctacggcctgagcgagaacgacgagtggacccaggacagagccaagcccgtgacccagatcgtgtctgccgaagcctggggcagagccgattgcggctttaccagcgagagctaccagcagggcgtgctgagcgccaccatcctgtacgagatcctgctgggcaaggccaccctgtacgccgtgctggtgtctgccctggtgctgatggctatggtcaagcggaaggacagccggggaaggagtaagaggagcaggctcctgcacagtgactacatgaacatgactccacgccgccccggacccacccgcaagcattaccagccctatgccccaccacgcgacttcgcagcctatcgctccagagtgaagttcagcagaagcgccgacgcccctgcctaccagcagggacagaaccaactgtacaacgagctgaacctgggcagacgggaagagtacgacgtgctggacaagcggagaggcagggaccctgagatgggcggaaagccccagcggagaaagaacccccaggaaggactgtataacgaactccagaaagacaagatggccgaagcctacagcgagatcggcatgaagggcgagcggagaagaggcaagggccacgatggcctgtaccagggcctgagcaccgccaccaaggacacctatgacgccctgcacatgcaggccctgcctccaaga

SEQ ID NO: 25655 - DNA, 903 bp, synthetic construct
  source 1..903: mol_type = other DNA
gctaccggcttctaccccgaccatgtggaactgtcttggtgggtcaacggcaaagaggtgcacagcggcgtgtgtaccgacccccagccactgaaagaacagcccgccctgaacgacagccggtactgcctgagcagcagactgagagtgtccgccaccttctggcagaacccccggaaccacttcagatgccaggtgcagttctacggcctgagcgagaacgacgagtggacccaggacagagccaagcccgtgacccagatcgtgtctgccgaagcctggggcagagccgattgcggctttaccagcgagagctaccagcagggcgtgctgagcgccaccatcctgtacgagatcctgctgggcaaggccaccctgtacgccgtgctggtgtctgccctggtgctgatggctatggtcaagcggaaggacagccggggaaggagtaagaggagcaggctcctgcacagtgactacatgaacatgactccacgccgccccggacccacccgcaagcattaccagccctatgccccaccacgcgacttcgcagcctatcgctccagagtgaagttcagcagaagcgccgacgcccctgcctaccagcagggacagaaccaactgtacaacgagctgaacctgggcagacgggaagagtacgacgtgctggacaagcggagaggcagggaccctgagatgggcggaaagccccagcggagaaagaacccccaggaaggactgtataacgaactccagaaagacaagatggccgaagcctacagcgagatcggcatgaagggcgagcggagaagaggcaagggccacgatggcctgtaccagggcctgagcaccgccaccaaggacacctatgacgccctgcacatgcaggccctgcctccaaga

SEQ ID NO: 25656 - DNA, 900 bp, synthetic construct
  source 1..900: mol_type = other DNA
accggcttctaccccgaccatgtggaactgtcttggtgggtcaacggcaaagaggtgcacagcggcgtgtgtaccgacccccagccactgaaagaacagcccgccctgaacgacagccggtactgcctgagcagcagactgagagtgtccgccaccttctggcagaacccccggaaccacttcagatgccaggtgcagttctacggcctgagcgagaacgacgagtggacccaggacagagccaagcccgtgacccagatcgtgtctgccgaagcctggggcagagccgattgcggctttaccagcgagagctaccagcagggcgtgctgagcgccaccatcctgtacgagatcctgctgggcaaggccaccctgtacgccgtgctggtgtctgccctggtgctgatggctatggtcaagcggaaggacagccggggaaggagtaagaggagcaggctcctgcacagtgactacatgaacatgactccacgccgccccggacccacccgcaagcattaccagccctatgccccaccacgcgacttcgcagcctatcgctccagagtgaagttcagcagaagcgccgacgcccctgcctaccagcagggacagaaccaactgtacaacgagctgaacctgggcagacgggaagagtacgacgtgctggacaagcggagaggcagggaccctgagatgggcggaaagccccagcggagaaagaacccccaggaaggactgtataacgaactccagaaagacaagatggccgaagcctacagcgagatcggcatgaagggcgagcggagaagaggcaagggccacgatggcctgtaccagggcctgagcaccgccaccaaggacacctatgacgccctgcacatgcaggccctgcctccaaga

SEQ ID NO: 25657 - DNA, 897 bp, synthetic construct
  source 1..897: mol_type = other DNA
ggcttctaccccgaccatgtggaactgtcttggtgggtcaacggcaaagaggtgcacagcggcgtgtgtaccgacccccagccactgaaagaacagcccgccctgaacgacagccggtactgcctgagcagcagactgagagtgtccgccaccttctggcagaacccccggaaccacttcagatgccaggtgcagttctacggcctgagcgagaacgacgagtggacccaggacagagccaagcccgtgacccagatcgtgtctgccgaagcctggggcagagccgattgcggctttaccagcgagagctaccagcagggcgtgctgagcgccaccatcctgtacgagatcctgctgggcaaggccaccctgtacgccgtgctggtgtctgccctggtgctgatggctatggtcaagcggaaggacagccggggaaggagtaagaggagcaggctcctgcacagtgactacatgaacatgactccacgccgccccggacccacccgcaagcattaccagccctatgccccaccacgcgacttcgcagcctatcgctccagagtgaagttcagcagaagcgccgacgcccctgcctaccagcagggacagaaccaactgtacaacgagctgaacctgggcagacgggaagagtacgacgtgctggacaagcggagaggcagggaccctgagatgggcggaaagccccagcggagaaagaacccccaggaaggactgtataacgaactccagaaagacaagatggccgaagcctacagcgagatcggcatgaagggcgagcggagaagaggcaagggccacgatggcctgtaccagggcctgagcaccgccaccaaggacacctatgacgccctgcacatgcaggccctgcctccaaga

SEQ ID NO: 25658 - DNA, 894 bp, synthetic construct
  source 1..894: mol_type = other DNA
ttctaccccgaccatgtggaactgtcttggtgggtcaacggcaaagaggtgcacagcggcgtgtgtaccgacccccagccactgaaagaacagcccgccctgaacgacagccggtactgcctgagcagcagactgagagtgtccgccaccttctggcagaacccccggaaccacttcagatgccaggtgcagttctacggcctgagcgagaacgacgagtggacccaggacagagccaagcccgtgacccagatcgtgtctgccgaagcctggggcagagccgattgcggctttaccagcgagagctaccagcagggcgtgctgagcgccaccatcctgtacgagatcctgctgggcaaggccaccctgtacgccgtgctggtgtctgccctggtgctgatggctatggtcaagcggaaggacagccggggaaggagtaagaggagcaggctcctgcacagtgactacatgaacatgactccacgccgccccggacccacccgcaagcattaccagccctatgccccaccacgcgacttcgcagcctatcgctccagagtgaagttcagcagaagcgccgacgcccctgcctaccagcagggacagaaccaactgtacaacgagctgaacctgggcagacgggaagagtacgacgtgctggacaagcggagaggcagggaccctgagatgggcggaaagccccagcggagaaagaacccccaggaaggactgtataacgaactccagaaagacaagatggccgaagcctacagcgagatcggcatgaagggcgagcggagaagaggcaagggccacgatggcctgtaccagggcctgagcaccgccaccaaggacacctatgacgccctgcacatgcaggccctgcctccaaga

SEQ ID NO: 25659 - DNA, 891 bp, synthetic construct
  source 1..891: mol_type = other DNA
taccccgaccatgtggaactgtcttggtgggtcaacggcaaagaggtgcacagcggcgtgtgtaccgacccccagccactgaaagaacagcccgccctgaacgacagccggtactgcctgagcagcagactgagagtgtccgccaccttctggcagaacccccggaaccacttcagatgccaggtgcagttctacggcctgagcgagaacgacgagtggacccaggacagagccaagcccgtgacccagatcgtgtctgccgaagcctggggcagagccgattgcggctttaccagcgagagctaccagcagggcgtgctgagcgccaccatcctgtacgagatcctgctgggcaaggccaccctgtacgccgtgctggtgtctgccctggtgctgatggctatggtcaagcggaaggacagccggggaaggagtaagaggagcaggctcctgcacagtgactacatgaacatgactccacgccgccccggacccacccgcaagcattaccagccctatgccccaccacgcgacttcgcagcctatcgctccagagtgaagttcagcagaagcgccgacgcccctgcctaccagcagggacagaaccaactgtacaacgagctgaacctgggcagacgggaagagtacgacgtgctggacaagcggagaggcagggaccctgagatgggcggaaagccccagcggagaaagaacccccaggaaggactgtataacgaactccagaaagacaagatggccgaagcctacagcgagatcggcatgaagggcgagcggagaagaggcaagggccacgatggcctgtaccagggcctgagcaccgccaccaaggacacctatgacgccctgcacatgcaggccctgcctccaaga

SEQ ID NO: 25660 - DNA, 888 bp, synthetic construct
  source 1..888: mol_type = other DNA
cccgaccatgtggaactgtcttggtgggtcaacggcaaagaggtgcacagcggcgtgtgtaccgacccccagccactgaaagaacagcccgccctgaacgacagccggtactgcctgagcagcagactgagagtgtccgccaccttctggcagaacccccggaaccacttcagatgccaggtgcagttctacggcctgagcgagaacgacgagtggacccaggacagagccaagcccgtgacccagatcgtgtctgccgaagcctggggcagagccgattgcggctttaccagcgagagctaccagcagggcgtgctgagcgccaccatcctgtacgagatcctgctgggcaaggccaccctgtacgccgtgctggtgtctgccctggtgctgatggctatggtcaagcggaaggacagccggggaaggagtaagaggagcaggctcctgcacagtgactacatgaacatgactccacgccgccccggacccacccgcaagcattaccagccctatgccccaccacgcgacttcgcagcctatcgctccagagtgaagttcagcagaagcgccgacgcccctgcctaccagcagggacagaaccaactgtacaacgagctgaacctgggcagacgggaagagtacgacgtgctggacaagcggagaggcagggaccctgagatgggcggaaagccccagcggagaaagaacccccaggaaggactgtataacgaactccagaaagacaagatggccgaagcctacagcgagatcggcatgaagggcgagcggagaagaggcaagggccacgatggcctgtaccagggcctgagcaccgccaccaaggacacctatgacgccctgcacatgcaggccctgcctccaaga

SEQ ID NO: 25661 - DNA, 885 bp, synthetic construct
  source 1..885: mol_type = other DNA
gaccatgtggaactgtcttggtgggtcaacggcaaagaggtgcacagcggcgtgtgtaccgacccccagccactgaaagaacagcccgccctgaacgacagccggtactgcctgagcagcagactgagagtgtccgccaccttctggcagaacccccggaaccacttcagatgccaggtgcagttctacggcctgagcgagaacgacgagtggacccaggacagagccaagcccgtgacccagatcgtgtctgccgaagcctggggcagagccgattgcggctttaccagcgagagctaccagcagggcgtgctgagcgccaccatcctgtacgagatcctgctgggcaaggccaccctgtacgccgtgctggtgtctgccctggtgctgatggctatggtcaagcggaaggacagccggggaaggagtaagaggagcaggctcctgcacagtgactacatgaacatgactccacgccgccccggacccacccgcaagcattaccagccctatgccccaccacgcgacttcgcagcctatcgctccagagtgaagttcagcagaagcgccgacgcccctgcctaccagcagggacagaaccaactgtacaacgagctgaacctgggcagacgggaagagtacgacgtgctggacaagcggagaggcagggaccctgagatgggcggaaagccccagcggagaaagaacccccaggaaggactgtataacgaactccagaaagacaagatggccgaagcctacagcgagatcggcatgaagggcgagcggagaagaggcaagggccacgatggcctgtaccagggcctgagcaccgccaccaaggacacctatgacgccctgcacatgcaggccctgcctccaaga

SEQ ID NO: 25662 - DNA, 882 bp, synthetic construct
  source 1..882: mol_type = other DNA
catgtggaactgtcttggtgggtcaacggcaaagaggtgcacagcggcgtgtgtaccgacccccagccactgaaagaacagcccgccctgaacgacagccggtactgcctgagcagcagactgagagtgtccgccaccttctggcagaacccccggaaccacttcagatgccaggtgcagttctacggcctgagcgagaacgacgagtggacccaggacagagccaagcccgtgacccagatcgtgtctgccgaagcctggggcagagccgattgcggctttaccagcgagagctaccagcagggcgtgctgagcgccaccatcctgtacgagatcctgctgggcaaggccaccctgtacgccgtgctggtgtctgccctggtgctgatggctatggtcaagcggaaggacagccggggaaggagtaagaggagcaggctcctgcacagtgactacatgaacatgactccacgccgccccggacccacccgcaagcattaccagccctatgccccaccacgcgacttcgcagcctatcgctccagagtgaagttcagcagaagcgccgacgcccctgcctaccagcagggacagaaccaactgtacaacgagctgaacctgggcagacgggaagagtacgacgtgctggacaagcggagaggcagggaccctgagatgggcggaaagccccagcggagaaagaacccccaggaaggactgtataacgaactccagaaagacaagatggccgaagcctacagcgagatcggcatgaagggcgagcggagaagaggcaagggccacgatggcctgtaccagggcctgagcaccgccaccaaggacacctatgacgccctgcacatgcaggccctgcctccaaga

SEQ ID NO: 25663 - DNA, 879 bp, synthetic construct
  source 1..879: mol_type = other DNA
gtggaactgtcttggtgggtcaacggcaaagaggtgcacagcggcgtgtgtaccgacccccagccactgaaagaacagcccgccctgaacgacagccggtactgcctgagcagcagactgagagtgtccgccaccttctggcagaacccccggaaccacttcagatgccaggtgcagttctacggcctgagcgagaacgacgagtggacccaggacagagccaagcccgtgacccagatcgtgtctgccgaagcctggggcagagccgattgcggctttaccagcgagagctaccagcagggcgtgctgagcgccaccatcctgtacgagatcctgctgggcaaggccaccctgtacgccgtgctggtgtctgccctggtgctgatggctatggtcaagcggaaggacagccggggaaggagtaagaggagcaggctcctgcacagtgactacatgaacatgactccacgccgccccggacccacccgcaagcattaccagccctatgccccaccacgcgacttcgcagcctatcgctccagagtgaagttcagcagaagcgccgacgcccctgcctaccagcagggacagaaccaactgtacaacgagctgaacctgggcagacgggaagagtacgacgtgctggacaagcggagaggcagggaccctgagatgggcggaaagccccagcggagaaagaacccccaggaaggactgtataacgaactccagaaagacaagatggccgaagcctacagcgagatcggcatgaagggcgagcggagaagaggcaagggccacgatggcctgtaccagggcctgagcaccgccaccaaggacacctatgacgccctgcacatgcaggccctgcctccaaga

SEQ ID NO: 25664 - DNA, 876 bp, synthetic construct
  source 1..876: mol_type = other DNA
gaactgtcttggtgggtcaacggcaaagaggtgcacagcggcgtgtgtaccgacccccagccactgaaagaacagcccgccctgaacgacagccggtactgcctgagcagcagactgagagtgtccgccaccttctggcagaacccccggaaccacttcagatgccaggtgcagttctacggcctgagcgagaacgacgagtggacccaggacagagccaagcccgtgacccagatcgtgtctgccgaagcctggggcagagccgattgcggctttaccagcgagagctaccagcagggcgtgctgagcgccaccatcctgtacgagatcctgctgggcaaggccaccctgtacgccgtgctggtgtctgccctggtgctgatggctatggtcaagcggaaggacagccggggaaggagtaagaggagcaggctcctgcacagtgactacatgaacatgactccacgccgccccggacccacccgcaagcattaccagccctatgccccaccacgcgacttcgcagcctatcgctccagagtgaagttcagcagaagcgccgacgcccctgcctaccagcagggacagaaccaactgtacaacgagctgaacctgggcagacgggaagagtacgacgtgctggacaagcggagaggcagggaccctgagatgggcggaaagccccagcggagaaagaacccccaggaaggactgtataacgaactccagaaagacaagatggccgaagcctacagcgagatcggcatgaagggcgagcggagaagaggcaagggccacgatggcctgtaccagggcctgagcaccgccaccaaggacacctatgacgccctgcacatgcaggccctgcctccaaga

SEQ ID NO: 25665 - DNA, 873 bp, synthetic construct
  source 1..873: mol_type = other DNA
ctgtcttggtgggtcaacggcaaagaggtgcacagcggcgtgtgtaccgacccccagccactgaaagaacagcccgccctgaacgacagccggtactgcctgagcagcagactgagagtgtccgccaccttctggcagaacccccggaaccacttcagatgccaggtgcagttctacggcctgagcgagaacgacgagtggacccaggacagagccaagcccgtgacccagatcgtgtctgccgaagcctggggcagagccgattgcggctttaccagcgagagctaccagcagggcgtgctgagcgccaccatcctgtacgagatcctgctgggcaaggccaccctgtacgccgtgctggtgtctgccctggtgctgatggctatggtcaagcggaaggacagccggggaaggagtaagaggagcaggctcctgcacagtgactacatgaacatgactccacgccgccccggacccacccgcaagcattaccagccctatgccccaccacgcgacttcgcagcctatcgctccagagtgaagttcagcagaagcgccgacgcccctgcctaccagcagggacagaaccaactgtacaacgagctgaacctgggcagacgggaagagtacgacgtgctggacaagcggagaggcagggaccctgagatgggcggaaagccccagcggagaaagaacccccaggaaggactgtataacgaactccagaaagacaagatggccgaagcctacagcgagatcggcatgaagggcgagcggagaagaggcaagggccacgatggcctgtaccagggcctgagcaccgccaccaaggacacctatgacgccctgcacatgcaggccctgcctccaaga

SEQ ID NO: 25666 - DNA, 870 bp, synthetic construct
  source 1..870: mol_type = other DNA
tcttggtgggtcaacggcaaagaggtgcacagcggcgtgtgtaccgacccccagccactgaaagaacagcccgccctgaacgacagccggtactgcctgagcagcagactgagagtgtccgccaccttctggcagaacccccggaaccacttcagatgccaggtgcagttctacggcctgagcgagaacgacgagtggacccaggacagagccaagcccgtgacccagatcgtgtctgccgaagcctggggcagagccgattgcggctttaccagcgagagctaccagcagggcgtgctgagcgccaccatcctgtacgagatcctgctgggcaaggccaccctgtacgccgtgctggtgtctgccctggtgctgatggctatggtcaagcggaaggacagccggggaaggagtaagaggagcaggctcctgcacagtgactacatgaacatgactccacgccgccccggacccacccgcaagcattaccagccctatgccccaccacgcgacttcgcagcctatcgctccagagtgaagttcagcagaagcgccgacgcccctgcctaccagcagggacagaaccaactgtacaacgagctgaacctgggcagacgggaagagtacgacgtgctggacaagcggagaggcagggaccctgagatgggcggaaagccccagcggagaaagaacccccaggaaggactgtataacgaactccagaaagacaagatggccgaagcctacagcgagatcggcatgaagggcgagcggagaagaggcaagggccacgatggcctgtaccagggcctgagcaccgccaccaaggacacctatgacgccctgcacatgcaggccctgcctccaaga

SEQ ID NO: 25667 - DNA, 867 bp, synthetic construct
  source 1..867: mol_type = other DNA
tggtgggtcaacggcaaagaggtgcacagcggcgtgtgtaccgacccccagccactgaaagaacagcccgccctgaacgacagccggtactgcctgagcagcagactgagagtgtccgccaccttctggcagaacccccggaaccacttcagatgccaggtgcagttctacggcctgagcgagaacgacgagtggacccaggacagagccaagcccgtgacccagatcgtgtctgccgaagcctggggcagagccgattgcggctttaccagcgagagctaccagcagggcgtgctgagcgccaccatcctgtacgagatcctgctgggcaaggccaccctgtacgccgtgctggtgtctgccctggtgctgatggctatggtcaagcggaaggacagccggggaaggagtaagaggagcaggctcctgcacagtgactacatgaacatgactccacgccgccccggacccacccgcaagcattaccagccctatgccccaccacgcgacttcgcagcctatcgctccagagtgaagttcagcagaagcgccgacgcccctgcctaccagcagggacagaaccaactgtacaacgagctgaacctgggcagacgggaagagtacgacgtgctggacaagcggagaggcagggaccctgagatgggcggaaagccccagcggagaaagaacccccaggaaggactgtataacgaactccagaaagacaagatggccgaagcctacagcgagatcggcatgaagggcgagcggagaagaggcaagggccacgatggcctgtaccagggcctgagcaccgccaccaaggacacctatgacgccctgcacatgcaggccctgcctccaaga

SEQ ID NO: 25668 - DNA, 864 bp, synthetic construct
  source 1..864: mol_type = other DNA
tgggtcaacggcaaagaggtgcacagcggcgtgtgtaccgacccccagccactgaaagaacagcccgccctgaacgacagccggtactgcctgagcagcagactgagagtgtccgccaccttctggcagaacccccggaaccacttcagatgccaggtgcagttctacggcctgagcgagaacgacgagtggacccaggacagagccaagcccgtgacccagatcgtgtctgccgaagcctggggcagagccgattgcggctttaccagcgagagctaccagcagggcgtgctgagcgccaccatcctgtacgagatcctgctgggcaaggccaccctgtacgccgtgctggtgtctgccctggtgctgatggctatggtcaagcggaaggacagccggggaaggagtaagaggagcaggctcctgcacagtgactacatgaacatgactccacgccgccccggacccacccgcaagcattaccagccctatgccccaccacgcgacttcgcagcctatcgctccagagtgaagttcagcagaagcgccgacgcccctgcctaccagcagggacagaaccaactgtacaacgagctgaacctgggcagacgggaagagtacgacgtgctggacaagcggagaggcagggaccctgagatgggcggaaagccccagcggagaaagaacccccaggaaggactgtataacgaactccagaaagacaagatggccgaagcctacagcgagatcggcatgaagggcgagcggagaagaggcaagggccacgatggcctgtaccagggcctgagcaccgccaccaaggacacctatgacgccctgcacatgcaggccctgcctccaaga

SEQ ID NO: 25669 - DNA, 861 bp, synthetic construct
  source 1..861: mol_type = other DNA
gtcaacggcaaagaggtgcacagcggcgtgtgtaccgacccccagccactgaaagaacagcccgccctgaacgacagccggtactgcctgagcagcagactgagagtgtccgccaccttctggcagaacccccggaaccacttcagatgccaggtgcagttctacggcctgagcgagaacgacgagtggacccaggacagagccaagcccgtgacccagatcgtgtctgccgaagcctggggcagagccgattgcggctttaccagcgagagctaccagcagggcgtgctgagcgccaccatcctgtacgagatcctgctgggcaaggccaccctgtacgccgtgctggtgtctgccctggtgctgatggctatggtcaagcggaaggacagccggggaaggagtaagaggagcaggctcctgcacagtgactacatgaacatgactccacgccgccccggacccacccgcaagcattaccagccctatgccccaccacgcgacttcgcagcctatcgctccagagtgaagttcagcagaagcgccgacgcccctgcctaccagcagggacagaaccaactgtacaacgagctgaacctgggcagacgggaagagtacgacgtgctggacaagcggagaggcagggaccctgagatgggcggaaagccccagcggagaaagaacccccaggaaggactgtataacgaactccagaaagacaagatggccgaagcctacagcgagatcggcatgaagggcgagcggagaagaggcaagggccacgatggcctgtaccagggcctgagcaccgccaccaaggacacctatgacgccctgcacatgcaggccctgcctccaaga

SEQ ID NO: 25670 - DNA, 858 bp, synthetic construct
  source 1..858: mol_type = other DNA
aacggcaaagaggtgcacagcggcgtgtgtaccgacccccagccactgaaagaacagcccgccctgaacgacagccggtactgcctgagcagcagactgagagtgtccgccaccttctggcagaacccccggaaccacttcagatgccaggtgcagttctacggcctgagcgagaacgacgagtggacccaggacagagccaagcccgtgacccagatcgtgtctgccgaagcctggggcagagccgattgcggctttaccagcgagagctaccagcagggcgtgctgagcgccaccatcctgtacgagatcctgctgggcaaggccaccctgtacgccgtgctggtgtctgccctggtgctgatggctatggtcaagcggaaggacagccggggaaggagtaagaggagcaggctcctgcacagtgactacatgaacatgactccacgccgccccggacccacccgcaagcattaccagccctatgccccaccacgcgacttcgcagcctatcgctccagagtgaagttcagcagaagcgccgacgcccctgcctaccagcagggacagaaccaactgtacaacgagctgaacctgggcagacgggaagagtacgacgtgctggacaagcggagaggcagggaccctgagatgggcggaaagccccagcggagaaagaacccccaggaaggactgtataacgaactccagaaagacaagatggccgaagcctacagcgagatcggcatgaagggcgagcggagaagaggcaagggccacgatggcctgtaccagggcctgagcaccgccaccaaggacacctatgacgccctgcacatgcaggccctgcctccaaga

SEQ ID NO: 25671 - DNA, 855 bp, synthetic construct
  source 1..855: mol_type = other DNA
ggcaaagaggtgcacagcggcgtgtgtaccgacccccagccactgaaagaacagcccgccctgaacgacagccggtactgcctgagcagcagactgagagtgtccgccaccttctggcagaacccccggaaccacttcagatgccaggtgcagttctacggcctgagcgagaacgacgagtggacccaggacagagccaagcccgtgacccagatcgtgtctgccgaagcctggggcagagccgattgcggctttaccagcgagagctaccagcagggcgtgctgagcgccaccatcctgtacgagatcctgctgggcaaggccaccctgtacgccgtgctggtgtctgccctggtgctgatggctatggtcaagcggaaggacagccggggaaggagtaagaggagcaggctcctgcacagtgactacatgaacatgactccacgccgccccggacccacccgcaagcattaccagccctatgccccaccacgcgacttcgcagcctatcgctccagagtgaagttcagcagaagcgccgacgcccctgcctaccagcagggacagaaccaactgtacaacgagctgaacctgggcagacgggaagagtacgacgtgctggacaagcggagaggcagggaccctgagatgggcggaaagccccagcggagaaagaacccccaggaaggactgtataacgaactccagaaagacaagatggccgaagcctacagcgagatcggcatgaagggcgagcggagaagaggcaagggccacgatggcctgtaccagggcctgagcaccgccaccaaggacacctatgacgccctgcacatgcaggccctgcctccaaga

SEQ ID NO: 25672 - DNA, 852 bp, synthetic construct
  source 1..852: mol_type = other DNA
aaagaggtgcacagcggcgtgtgtaccgacccccagccactgaaagaacagcccgccctgaacgacagccggtactgcctgagcagcagactgagagtgtccgccaccttctggcagaacccccggaaccacttcagatgccaggtgcagttctacggcctgagcgagaacgacgagtggacccaggacagagccaagcccgtgacccagatcgtgtctgccgaagcctggggcagagccgattgcggctttaccagcgagagctaccagcagggcgtgctgagcgccaccatcctgtacgagatcctgctgggcaaggccaccctgtacgccgtgctggtgtctgccctggtgctgatggctatggtcaagcggaaggacagccggggaaggagtaagaggagcaggctcctgcacagtgactacatgaacatgactccacgccgccccggacccacccgcaagcattaccagccctatgccccaccacgcgacttcgcagcctatcgctccagagtgaagttcagcagaagcgccgacgcccctgcctaccagcagggacagaaccaactgtacaacgagctgaacctgggcagacgggaagagtacgacgtgctggacaagcggagaggcagggaccctgagatgggcggaaagccccagcggagaaagaacccccaggaaggactgtataacgaactccagaaagacaagatggccgaagcctacagcgagatcggcatgaagggcgagcggagaagaggcaagggccacgatggcctgtaccagggcctgagcaccgccaccaaggacacctatgacgccctgcacatgcaggccctgcctccaaga

SEQ ID NO: 25673 - DNA, 849 bp, synthetic construct
  source 1..849: mol_type = other DNA
gaggtgcacagcggcgtgtgtaccgacccccagccactgaaagaacagcccgccctgaacgacagccggtactgcctgagcagcagactgagagtgtccgccaccttctggcagaacccccggaaccacttcagatgccaggtgcagttctacggcctgagcgagaacgacgagtggacccaggacagagccaagcccgtgacccagatcgtgtctgccgaagcctggggcagagccgattgcggctttaccagcgagagctaccagcagggcgtgctgagcgccaccatcctgtacgagatcctgctgggcaaggccaccctgtacgccgtgctggtgtctgccctggtgctgatggctatggtcaagcggaaggacagccggggaaggagtaagaggagcaggctcctgcacagtgactacatgaacatgactccacgccgccccggacccacccgcaagcattaccagccctatgccccaccacgcgacttcgcagcctatcgctccagagtgaagttcagcagaagcgccgacgcccctgcctaccagcagggacagaaccaactgtacaacgagctgaacctgggcagacgggaagagtacgacgtgctggacaagcggagaggcagggaccctgagatgggcggaaagccccagcggagaaagaacccccaggaaggactgtataacgaactccagaaagacaagatggccgaagcctacagcgagatcggcatgaagggcgagcggagaagaggcaagggccacgatggcctgtaccagggcctgagcaccgccaccaaggacacctatgacgccctgcacatgcaggccctgcctccaaga

SEQ ID NO: 25674 - DNA, 846 bp, synthetic construct
  source 1..846: mol_type = other DNA
gtgcacagcggcgtgtgtaccgacccccagccactgaaagaacagcccgccctgaacgacagccggtactgcctgagcagcagactgagagtgtccgccaccttctggcagaacccccggaaccacttcagatgccaggtgcagttctacggcctgagcgagaacgacgagtggacccaggacagagccaagcccgtgacccagatcgtgtctgccgaagcctggggcagagccgattgcggctttaccagcgagagctaccagcagggcgtgctgagcgccaccatcctgtacgagatcctgctgggcaaggccaccctgtacgccgtgctggtgtctgccctggtgctgatggctatggtcaagcggaaggacagccggggaaggagtaagaggagcaggctcctgcacagtgactacatgaacatgactccacgccgccccggacccacccgcaagcattaccagccctatgccccaccacgcgacttcgcagcctatcgctccagagtgaagttcagcagaagcgccgacgcccctgcctaccagcagggacagaaccaactgtacaacgagctgaacctgggcagacgggaagagtacgacgtgctggacaagcggagaggcagggaccctgagatgggcggaaagccccagcggagaaagaacccccaggaaggactgtataacgaactccagaaagacaagatggccgaagcctacagcgagatcggcatgaagggcgagcggagaagaggcaagggccacgatggcctgtaccagggcctgagcaccgccaccaaggacacctatgacgccctgcacatgcaggccctgcctccaaga

SEQ ID NO: 25675 - DNA, 843 bp, synthetic construct
  source 1..843: mol_type = other DNA
cacagcggcgtgtgtaccgacccccagccactgaaagaacagcccgccctgaacgacagccggtactgcctgagcagcagactgagagtgtccgccaccttctggcagaacccccggaaccacttcagatgccaggtgcagttctacggcctgagcgagaacgacgagtggacccaggacagagccaagcccgtgacccagatcgtgtctgccgaagcctggggcagagccgattgcggctttaccagcgagagctaccagcagggcgtgctgagcgccaccatcctgtacgagatcctgctgggcaaggccaccctgtacgccgtgctggtgtctgccctggtgctgatggctatggtcaagcggaaggacagccggggaaggagtaagaggagcaggctcctgcacagtgactacatgaacatgactccacgccgccccggacccacccgcaagcattaccagccctatgccccaccacgcgacttcgcagcctatcgctccagagtgaagttcagcagaagcgccgacgcccctgcctaccagcagggacagaaccaactgtacaacgagctgaacctgggcagacgggaagagtacgacgtgctggacaagcggagaggcagggaccctgagatgggcggaaagccccagcggagaaagaacccccaggaaggactgtataacgaactccagaaagacaagatggccgaagcctacagcgagatcggcatgaagggcgagcggagaagaggcaagggccacgatggcctgtaccagggcctgagcaccgccaccaaggacacctatgacgccctgcacatgcaggccctgcctccaaga

SEQ ID NO: 25676 - DNA, 840 bp, synthetic construct
  source 1..840: mol_type = other DNA
agcggcgtgtgtaccgacccccagccactgaaagaacagcccgccctgaacgacagccggtactgcctgagcagcagactgagagtgtccgccaccttctggcagaacccccggaaccacttcagatgccaggtgcagttctacggcctgagcgagaacgacgagtggacccaggacagagccaagcccgtgacccagatcgtgtctgccgaagcctggggcagagccgattgcggctttaccagcgagagctaccagcagggcgtgctgagcgccaccatcctgtacgagatcctgctgggcaaggccaccctgtacgccgtgctggtgtctgccctggtgctgatggctatggtcaagcggaaggacagccggggaaggagtaagaggagcaggctcctgcacagtgactacatgaacatgactccacgccgccccggacccacccgcaagcattaccagccctatgccccaccacgcgacttcgcagcctatcgctccagagtgaagttcagcagaagcgccgacgcccctgcctaccagcagggacagaaccaactgtacaacgagctgaacctgggcagacgggaagagtacgacgtgctggacaagcggagaggcagggaccctgagatgggcggaaagccccagcggagaaagaacccccaggaaggactgtataacgaactccagaaagacaagatggccgaagcctacagcgagatcggcatgaagggcgagcggagaagaggcaagggccacgatggcctgtaccagggcctgagcaccgccaccaaggacacctatgacgccctgcacatgcaggccctgcctccaaga

SEQ ID NO: 25677 - DNA, 837 bp, synthetic construct
  source 1..837: mol_type = other DNA
ggcgtgtgtaccgacccccagccactgaaagaacagcccgccctgaacgacagccggtactgcctgagcagcagactgagagtgtccgccaccttctggcagaacccccggaaccacttcagatgccaggtgcagttctacggcctgagcgagaacgacgagtggacccaggacagagccaagcccgtgacccagatcgtgtctgccgaagcctggggcagagccgattgcggctttaccagcgagagctaccagcagggcgtgctgagcgccaccatcctgtacgagatcctgctgggcaaggccaccctgtacgccgtgctggtgtctgccctggtgctgatggctatggtcaagcggaaggacagccggggaaggagtaagaggagcaggctcctgcacagtgactacatgaacatgactccacgccgccccggacccacccgcaagcattaccagccctatgccccaccacgcgacttcgcagcctatcgctccagagtgaagttcagcagaagcgccgacgcccctgcctaccagcagggacagaaccaactgtacaacgagctgaacctgggcagacgggaagagtacgacgtgctggacaagcggagaggcagggaccctgagatgggcggaaagccccagcggagaaagaacccccaggaaggactgtataacgaactccagaaagacaagatggccgaagcctacagcgagatcggcatgaagggcgagcggagaagaggcaagggccacgatggcctgtaccagggcctgagcaccgccaccaaggacacctatgacgccctgcacatgcaggccctgcctccaaga

SEQ ID NO: 25678 - DNA, 834 bp, synthetic construct
  source 1..834: mol_type = other DNA
gtgtgtaccgacccccagccactgaaagaacagcccgccctgaacgacagccggtactgcctgagcagcagactgagagtgtccgccaccttctggcagaacccccggaaccacttcagatgccaggtgcagttctacggcctgagcgagaacgacgagtggacccaggacagagccaagcccgtgacccagatcgtgtctgccgaagcctggggcagagccgattgcggctttaccagcgagagctaccagcagggcgtgctgagcgccaccatcctgtacgagatcctgctgggcaaggccaccctgtacgccgtgctggtgtctgccctggtgctgatggctatggtcaagcggaaggacagccggggaaggagtaagaggagcaggctcctgcacagtgactacatgaacatgactccacgccgccccggacccacccgcaagcattaccagccctatgccccaccacgcgacttcgcagcctatcgctccagagtgaagttcagcagaagcgccgacgcccctgcctaccagcagggacagaaccaactgtacaacgagctgaacctgggcagacgggaagagtacgacgtgctggacaagcggagaggcagggaccctgagatgggcggaaagccccagcggagaaagaacccccaggaaggactgtataacgaactccagaaagacaagatggccgaagcctacagcgagatcggcatgaagggcgagcggagaagaggcaagggccacgatggcctgtaccagggcctgagcaccgccaccaaggacacctatgacgccctgcacatgcaggccctgcctccaaga

SEQ ID NO: 25679 - DNA, 831 bp, synthetic construct
  source 1..831: mol_type = other DNA
tgtaccgacccccagccactgaaagaacagcccgccctgaacgacagccggtactgcctgagcagcagactgagagtgtccgccaccttctggcagaacccccggaaccacttcagatgccaggtgcagttctacggcctgagcgagaacgacgagtggacccaggacagagccaagcccgtgacccagatcgtgtctgccgaagcctggggcagagccgattgcggctttaccagcgagagctaccagcagggcgtgctgagcgccaccatcctgtacgagatcctgctgggcaaggccaccctgtacgccgtgctggtgtctgccctggtgctgatggctatggtcaagcggaaggacagccggggaaggagtaagaggagcaggctcctgcacagtgactacatgaacatgactccacgccgccccggacccacccgcaagcattaccagccctatgccccaccacgcgacttcgcagcctatcgctccagagtgaagttcagcagaagcgccgacgcccctgcctaccagcagggacagaaccaactgtacaacgagctgaacctgggcagacgggaagagtacgacgtgctggacaagcggagaggcagggaccctgagatgggcggaaagccccagcggagaaagaacccccaggaaggactgtataacgaactccagaaagacaagatggccgaagcctacagcgagatcggcatgaagggcgagcggagaagaggcaagggccacgatggcctgtaccagggcctgagcaccgccaccaaggacacctatgacgccctgcacatgcaggccctgcctccaaga

SEQ ID NO: 25680 - DNA, 828 bp, synthetic construct
  source 1..828: mol_type = other DNA
accgacccccagccactgaaagaacagcccgccctgaacgacagccggtactgcctgagcagcagactgagagtgtccgccaccttctggcagaacccccggaaccacttcagatgccaggtgcagttctacggcctgagcgagaacgacgagtggacccaggacagagccaagcccgtgacccagatcgtgtctgccgaagcctggggcagagccgattgcggctttaccagcgagagctaccagcagggcgtgctgagcgccaccatcctgtacgagatcctgctgggcaaggccaccctgtacgccgtgctggtgtctgccctggtgctgatggctatggtcaagcggaaggacagccggggaaggagtaagaggagcaggctcctgcacagtgactacatgaacatgactccacgccgccccggacccacccgcaagcattaccagccctatgccccaccacgcgacttcgcagcctatcgctccagagtgaagttcagcagaagcgccgacgcccctgcctaccagcagggacagaaccaactgtacaacgagctgaacctgggcagacgggaagagtacgacgtgctggacaagcggagaggcagggaccctgagatgggcggaaagccccagcggagaaagaacccccaggaaggactgtataacgaactccagaaagacaagatggccgaagcctacagcgagatcggcatgaagggcgagcggagaagaggcaagggccacgatggcctgtaccagggcctgagcaccgccaccaaggacacctatgacgccctgcacatgcaggccctgcctccaaga

SEQ ID NO: 25681 - DNA, 825 bp, synthetic construct
  source 1..825: mol_type = other DNA
gacccccagccactgaaagaacagcccgccctgaacgacagccggtactgcctgagcagcagactgagagtgtccgccaccttctggcagaacccccggaaccacttcagatgccaggtgcagttctacggcctgagcgagaacgacgagtggacccaggacagagccaagcccgtgacccagatcgtgtctgccgaagcctggggcagagccgattgcggctttaccagcgagagctaccagcagggcgtgctgagcgccaccatcctgtacgagatcctgctgggcaaggccaccctgtacgccgtgctggtgtctgccctggtgctgatggctatggtcaagcggaaggacagccggggaaggagtaagaggagcaggctcctgcacagtgactacatgaacatgactccacgccgccccggacccacccgcaagcattaccagccctatgccccaccacgcgacttcgcagcctatcgctccagagtgaagttcagcagaagcgccgacgcccctgcctaccagcagggacagaaccaactgtacaacgagctgaacctgggcagacgggaagagtacgacgtgctggacaagcggagaggcagggaccctgagatgggcggaaagccccagcggagaaagaacccccaggaaggactgtataacgaactccagaaagacaagatggccgaagcctacagcgagatcggcatgaagggcgagcggagaagaggcaagggccacgatggcctgtaccagggcctgagcaccgccaccaaggacacctatgacgccctgcacatgcaggccctgcctccaaga

SEQ ID NO: 25682 - DNA, 822 bp, synthetic construct
  source 1..822: mol_type = other DNA
ccccagccactgaaagaacagcccgccctgaacgacagccggtactgcctgagcagcagactgagagtgtccgccaccttctggcagaacccccggaaccacttcagatgccaggtgcagttctacggcctgagcgagaacgacgagtggacccaggacagagccaagcccgtgacccagatcgtgtctgccgaagcctggggcagagccgattgcggctttaccagcgagagctaccagcagggcgtgctgagcgccaccatcctgtacgagatcctgctgggcaaggccaccctgtacgccgtgctggtgtctgccctggtgctgatggctatggtcaagcggaaggacagccggggaaggagtaagaggagcaggctcctgcacagtgactacatgaacatgactccacgccgccccggacccacccgcaagcattaccagccctatgccccaccacgcgacttcgcagcctatcgctccagagtgaagttcagcagaagcgccgacgcccctgcctaccagcagggacagaaccaactgtacaacgagctgaacctgggcagacgggaagagtacgacgtgctggacaagcggagaggcagggaccctgagatgggcggaaagccccagcggagaaagaacccccaggaaggactgtataacgaactccagaaagacaagatggccgaagcctacagcgagatcggcatgaagggcgagcggagaagaggcaagggccacgatggcctgtaccagggcctgagcaccgccaccaaggacacctatgacgccctgcacatgcaggccctgcctccaaga

SEQ ID NO: 25683 - DNA, 819 bp, synthetic construct
  source 1..819: mol_type = other DNA
cagccactgaaagaacagcccgccctgaacgacagccggtactgcctgagcagcagactgagagtgtccgccaccttctggcagaacccccggaaccacttcagatgccaggtgcagttctacggcctgagcgagaacgacgagtggacccaggacagagccaagcccgtgacccagatcgtgtctgccgaagcctggggcagagccgattgcggctttaccagcgagagctaccagcagggcgtgctgagcgccaccatcctgtacgagatcctgctgggcaaggccaccctgtacgccgtgctggtgtctgccctggtgctgatggctatggtcaagcggaaggacagccggggaaggagtaagaggagcaggctcctgcacagtgactacatgaacatgactccacgccgccccggacccacccgcaagcattaccagccctatgccccaccacgcgacttcgcagcctatcgctccagagtgaagttcagcagaagcgccgacgcccctgcctaccagcagggacagaaccaactgtacaacgagctgaacctgggcagacgggaagagtacgacgtgctggacaagcggagaggcagggaccctgagatgggcggaaagccccagcggagaaagaacccccaggaaggactgtataacgaactccagaaagacaagatggccgaagcctacagcgagatcggcatgaagggcgagcggagaagaggcaagggccacgatggcctgtaccagggcctgagcaccgccaccaaggacacctatgacgccctgcacatgcaggccctgcctccaaga

SEQ ID NO: 25684 - DNA, 816 bp, synthetic construct
  source 1..816: mol_type = other DNA
ccactgaaagaacagcccgccctgaacgacagccggtactgcctgagcagcagactgagagtgtccgccaccttctggcagaacccccggaaccacttcagatgccaggtgcagttctacggcctgagcgagaacgacgagtggacccaggacagagccaagcccgtgacccagatcgtgtctgccgaagcctggggcagagccgattgcggctttaccagcgagagctaccagcagggcgtgctgagcgccaccatcctgtacgagatcctgctgggcaaggccaccctgtacgccgtgctggtgtctgccctggtgctgatggctatggtcaagcggaaggacagccggggaaggagtaagaggagcaggctcctgcacagtgactacatgaacatgactccacgccgccccggacccacccgcaagcattaccagccctatgccccaccacgcgacttcgcagcctatcgctccagagtgaagttcagcagaagcgccgacgcccctgcctaccagcagggacagaaccaactgtacaacgagctgaacctgggcagacgggaagagtacgacgtgctggacaagcggagaggcagggaccctgagatgggcggaaagccccagcggagaaagaacccccaggaaggactgtataacgaactccagaaagacaagatggccgaagcctacagcgagatcggcatgaagggcgagcggagaagaggcaagggccacgatggcctgtaccagggcctgagcaccgccaccaaggacacctatgacgccctgcacatgcaggccctgcctccaaga

SEQ ID NO: 25685 - DNA, 813 bp, synthetic construct
  source 1..813: mol_type = other DNA
ctgaaagaacagcccgccctgaacgacagccggtactgcctgagcagcagactgagagtgtccgccaccttctggcagaacccccggaaccacttcagatgccaggtgcagttctacggcctgagcgagaacgacgagtggacccaggacagagccaagcccgtgacccagatcgtgtctgccgaagcctggggcagagccgattgcggctttaccagcgagagctaccagcagggcgtgctgagcgccaccatcctgtacgagatcctgctgggcaaggccaccctgtacgccgtgctggtgtctgccctggtgctgatggctatggtcaagcggaaggacagccggggaaggagtaagaggagcaggctcctgcacagtgactacatgaacatgactccacgccgccccggacccacccgcaagcattaccagccctatgccccaccacgcgacttcgcagcctatcgctccagagtgaagttcagcagaagcgccgacgcccctgcctaccagcagggacagaaccaactgtacaacgagctgaacctgggcagacgggaagagtacgacgtgctggacaagcggagaggcagggaccctgagatgggcggaaagccccagcggagaaagaacccccaggaaggactgtataacgaactccagaaagacaagatggccgaagcctacagcgagatcggcatgaagggcgagcggagaagaggcaagggccacgatggcctgtaccagggcctgagcaccgccaccaaggacacctatgacgccctgcacatgcaggccctgcctccaaga

SEQ ID NO: 25686 - DNA, 810 bp, synthetic construct
  source 1..810: mol_type = other DNA
aaagaacagcccgccctgaacgacagccggtactgcctgagcagcagactgagagtgtccgccaccttctggcagaacccccggaaccacttcagatgccaggtgcagttctacggcctgagcgagaacgacgagtggacccaggacagagccaagcccgtgacccagatcgtgtctgccgaagcctggggcagagccgattgcggctttaccagcgagagctaccagcagggcgtgctgagcgccaccatcctgtacgagatcctgctgggcaaggccaccctgtacgccgtgctggtgtctgccctggtgctgatggctatggtcaagcggaaggacagccggggaaggagtaagaggagcaggctcctgcacagtgactacatgaacatgactccacgccgccccggacccacccgcaagcattaccagccctatgccccaccacgcgacttcgcagcctatcgctccagagtgaagttcagcagaagcgccgacgcccctgcctaccagcagggacagaaccaactgtacaacgagctgaacctgggcagacgggaagagtacgacgtgctggacaagcggagaggcagggaccctgagatgggcggaaagccccagcggagaaagaacccccaggaaggactgtataacgaactccagaaagacaagatggccgaagcctacagcgagatcggcatgaagggcgagcggagaagaggcaagggccacgatggcctgtaccagggcctgagcaccgccaccaaggacacctatgacgccctgcacatgcaggccctgcctccaaga

SEQ ID NO: 25687 - DNA, 807 bp, synthetic construct; identical to SEQ ID NO: 25290
  source 1..807: mol_type = other DNA

SEQ ID NO: 25688 - DNA, 804 bp, synthetic construct
  source 1..804: mol_type = other DNA
cagcccgccctgaacgacagccggtactgcctgagcagcagactgagagtgtccgccaccttctggcagaacccccggaaccacttcagatgccaggtgcagttctacggcctgagcgagaacgacgagtggacccaggacagagccaagcccgtgacccagatcgtgtctgccgaagcctggggcagagccgattgcggctttaccagcgagagctaccagcagggcgtgctgagcgccaccatcctgtacgagatcctgctgggcaaggccaccctgtacgccgtgctggtgtctgccctggtgctgatggctatggtcaagcggaaggacagccggggaaggagtaagaggagcaggctcctgcacagtgactacatgaacatgactccacgccgccccggacccacccgcaagcattaccagccctatgccccaccacgcgacttcgcagcctatcgctccagagtgaagttcagcagaagcgccgacgcccctgcctaccagcagggacagaaccaactgtacaacgagctgaacctgggcagacgggaagagtacgacgtgctggacaagcggagaggcagggaccctgagatgggcggaaagccccagcggagaaagaacccccaggaaggactgtataacgaactccagaaagacaagatggccgaagcctacagcgagatcggcatgaagggcgagcggagaagaggcaagggccacgatggcctgtaccagggcctgagcaccgccaccaaggacacctatgacgccctgcacatgcaggccctgcctccaaga

SEQ ID NO: 25689 - DNA, 801 bp, synthetic construct
  source 1..801: mol_type = other DNA
cccgccctgaacgacagccggtactgcctgagcagcagactgagagtgtccgccaccttctggcagaacccccggaaccacttcagatgccaggtgcagttctacggcctgagcgagaacgacgagtggacccaggacagagccaagcccgtgacccagatcgtgtctgccgaagcctggggcagagccgattgcggctttaccagcgagagctaccagcagggcgtgctgagcgccaccatcctgtacgagatcctgctgggcaaggccaccctgtacgccgtgctggtgtctgccctggtgctgatggctatggtcaagcggaaggacagccggggaaggagtaagaggagcaggctcctgcacagtgactacatgaacatgactccacgccgccccggacccacccgcaagcattaccagccctatgccccaccacgcgacttcgcagcctatcgctccagagtgaagttcagcagaagcgccgacgcccctgcctaccagcagggacagaaccaactgtacaacgagctgaacctgggcagacgggaagagtacgacgtgctggacaagcggagaggcagggaccctgagatgggcggaaagccccagcggagaaagaacccccaggaaggactgtataacgaactccagaaagacaagatggccgaagcctacagcgagatcggcatgaagggcgagcggagaagaggcaagggccacgatggcctgtaccagggcctgagcaccgccaccaaggacacctatgacgccctgcacatgcaggccctgcctccaaga

SEQ ID NO: 25690 - DNA, 798 bp, synthetic construct
  source 1..798: mol_type = other DNA
gccctgaacgacagccggtactgcctgagcagcagactgagagtgtccgccaccttctggcagaacccccggaaccacttcagatgccaggtgcagttctacggcctgagcgagaacgacgagtggacccaggacagagccaagcccgtgacccagatcgtgtctgccgaagcctggggcagagccgattgcggctttaccagcgagagctaccagcagggcgtgctgagcgccaccatcctgtacgagatcctgctgggcaaggccaccctgtacgccgtgctggtgtctgccctggtgctgatggctatggtcaagcggaaggacagccggggaaggagtaagaggagcaggctcctgcacagtgactacatgaacatgactccacgccgccccggacccacccgcaagcattaccagccctatgccccaccacgcgacttcgcagcctatcgctccagagtgaagttcagcagaagcgccgacgcccctgcctaccagcagggacagaaccaactgtacaacgagctgaacctgggcagacgggaagagtacgacgtgctggacaagcggagaggcagggaccctgagatgggcggaaagccccagcggagaaagaacccccaggaaggactgtataacgaactccagaaagacaagatggccgaagcctacagcgagatcggcatgaagggcgagcggagaagaggcaagggccacgatggcctgtaccagggcctgagcaccgccaccaaggacacctatgacgccctgcacatgcaggccctgcctccaaga

SEQ ID NO: 25691 - DNA, 795 bp, synthetic construct
  source 1..795: mol_type = other DNA
ctgaacgacagccggtactgcctgagcagcagactgagagtgtccgccaccttctggcagaacccccggaaccacttcagatgccaggtgcagttctacggcctgagcgagaacgacgagtggacccaggacagagccaagcccgtgacccagatcgtgtctgccgaagcctggggcagagccgattgcggctttaccagcgagagctaccagcagggcgtgctgagcgccaccatcctgtacgagatcctgctgggcaaggccaccctgtacgccgtgctggtgtctgccctggtgctgatggctatggtcaagcggaaggacagccggggaaggagtaagaggagcaggctcctgcacagtgactacatgaacatgactccacgccgccccggacccacccgcaagcattaccagccctatgccccaccacgcgacttcgcagcctatcgctccagagtgaagttcagcagaagcgccgacgcccctgcctaccagcagggacagaaccaactgtacaacgagctgaacctgggcagacgggaagagtacgacgtgctggacaagcggagaggcagggaccctgagatgggcggaaagccccagcggagaaagaacccccaggaaggactgtataacgaactccagaaagacaagatggccgaagcctacagcgagatcggcatgaagggcgagcggagaagaggcaagggccacgatggcctgtaccagggcctgagcaccgccaccaaggacacctatgacgccctgcacatgcaggccctgcctccaaga

SEQ ID NO: 25692 - DNA, 792 bp, synthetic construct
  source 1..792: mol_type = other DNA
aacgacagccggtactgcctgagcagcagactgagagtgtccgccaccttctggcagaacccccggaaccacttcagatgccaggtgcagttctacggcctgagcgagaacgacgagtggacccaggacagagccaagcccgtgacccagatcgtgtctgccgaagcctggggcagagccgattgcggctttaccagcgagagctaccagcagggcgtgctgagcgccaccatcctgtacgagatcctgctgggcaaggccaccctgtacgccgtgctggtgtctgccctggtgctgatggctatggtcaagcggaaggacagccggggaaggagtaagaggagcaggctcctgcacagtgactacatgaacatgactccacgccgccccggacccacccgcaagcattaccagccctatgccccaccacgcgacttcgcagcctatcgctccagagtgaagttcagcagaagcgccgacgcccctgcctaccagcagggacagaaccaactgtacaacgagctgaacctgggcagacgggaagagtacgacgtgctggacaagcggagaggcagggaccctgagatgggcggaaagccccagcggagaaagaacccccaggaaggactgtataacgaactccagaaagacaagatggccgaagcctacagcgagatcggcatgaagggcgagcggagaagaggcaagggccacgatggcctgtaccagggcctgagcaccgccaccaaggacacctatgacgccctgcacatgcaggccctgcctccaaga

SEQ ID NO: 25693 - DNA, 789 bp, synthetic construct
  source 1..789: mol_type = other DNA
gacagccggtactgcctgagcagcagactgagagtgtccgccaccttctggcagaacccccggaaccacttcagatgccaggtgcagttctacggcctgagcgagaacgacgagtggacccaggacagagccaagcccgtgacccagatcgtgtctgccgaagcctggggcagagccgattgcggctttaccagcgagagctaccagcagggcgtgctgagcgccaccatcctgtacgagatcctgctgggcaaggccaccctgtacgccgtgctggtgtctgccctggtgctgatggctatggtcaagcggaaggacagccggggaaggagtaagaggagcaggctcctgcacagtgactacatgaacatgactccacgccgccccggacccacccgcaagcattaccagccctatgccccaccacgcgacttcgcagcctatcgctccagagtgaagttcagcagaagcgccgacgcccctgcctaccagcagggacagaaccaactgtacaacgagctgaacctgggcagacgggaagagtacgacgtgctggacaagcggagaggcagggaccctgagatgggcggaaagccccagcggagaaagaacccccaggaaggactgtataacgaactccagaaagacaagatggccgaagcctacagcgagatcggcatgaagggcgagcggagaagaggcaagggccacgatggcctgtaccagggcctgagcaccgccaccaaggacacctatgacgccctgcacatgcaggccctgcctccaaga

SEQ ID NO: 25694 - DNA, 786 bp, synthetic construct
  source 1..786: mol_type = other DNA
agccggtactgcctgagcagcagactgagagtgtccgccaccttctggcagaacccccggaaccacttcagatgccaggtgcagttctacggcctgagcgagaacgacgagtggacccaggacagagccaagcccgtgacccagatcgtgtctgccgaagcctggggcagagccgattgcggctttaccagcgagagctaccagcagggcgtgctgagcgccaccatcctgtacgagatcctgctgggcaaggccaccctgtacgccgtgctggtgtctgccctggtgctgatggctatggtcaagcggaaggacagccggggaaggagtaagaggagcaggctcctgcacagtgactacatgaacatgactccacgccgccccggacccacccgcaagcattaccagccctatgccccaccacgcgacttcgcagcctatcgctccagagtgaagttcagcagaagcgccgacgcccctgcctaccagcagggacagaaccaactgtacaacgagctgaacctgggcagacgggaagagtacgacgtgctggacaagcggagaggcagggaccctgagatgggcggaaagccccagcggagaaagaacccccaggaaggactgtataacgaactccagaaagacaagatggccgaagcctacagcgagatcggcatgaagggcgagcggagaagaggcaagggccacgatggcctgtaccagggcctgagcaccgccaccaaggacacctatgacgccctgcacatgcaggccctgcctccaaga

SEQ ID NO: 25695 - DNA, 783 bp, synthetic construct
  source 1..783: mol_type = other DNA
cggtactgcctgagcagcagactgagagtgtccgccaccttctggcagaacccccggaaccacttcagatgccaggtgcagttctacggcctgagcgagaacgacgagtggacccaggacagagccaagcccgtgacccagatcgtgtctgccgaagcctggggcagagccgattgcggctttaccagcgagagctaccagcagggcgtgctgagcgccaccatcctgtacgagatcctgctgggcaaggccaccctgtacgccgtgctggtgtctgccctggtgctgatggctatggtcaagcggaaggacagccggggaaggagtaagaggagcaggctcctgcacagtgactacatgaacatgactccacgccgccccggacccacccgcaagcattaccagccctatgccccaccacgcgacttcgcagcctatcgctccagagtgaagttcagcagaagcgccgacgcccctgcctaccagcagggacagaaccaactgtacaacgagctgaacctgggcagacgggaagagtacgacgtgctggacaagcggagaggcagggaccctgagatgggcggaaagccccagcggagaaagaacccccaggaaggactgtataacgaactccagaaagacaagatggccgaagcctacagcgagatcggcatgaagggcgagcggagaagaggcaagggccacgatggcctgtaccagggcctgagcaccgccaccaaggacacctatgacgccctgcacatgcaggccctgcctccaaga

SEQ ID NO: 25696 - DNA, 780 bp, synthetic construct
  source 1..780: mol_type = other DNA
tactgcctgagcagcagactgagagtgtccgccaccttctggcagaacccccggaaccacttcagatgccaggtgcagttctacggcctgagcgagaacgacgagtggacccaggacagagccaagcccgtgacccagatcgtgtctgccgaagcctggggcagagccgattgcggctttaccagcgagagctaccagcagggcgtgctgagcgccaccatcctgtacgagatcctgctgggcaaggccaccctgtacgccgtgctggtgtctgccctggtgctgatggctatggtcaagcggaaggacagccggggaaggagtaagaggagcaggctcctgcacagtgactacatgaacatgactccacgccgccccggacccacccgcaagcattaccagccctatgccccaccacgcgacttcgcagcctatcgctccagagtgaagttcagcagaagcgccgacgcccctgcctaccagcagggacagaaccaactgtacaacgagctgaacctgggcagacgggaagagtacgacgtgctggacaagcggagaggcagggaccctgagatgggcggaaagccccagcggagaaagaacccccaggaaggactgtataacgaactccagaaagacaagatggccgaagcctacagcgagatcggcatgaagggcgagcggagaagaggcaagggccacgatggcctgtaccagggcctgagcaccgccaccaaggacacctatgacgccctgcacatgcaggccctgcctccaaga

SEQ ID NO: 25697 - DNA, 777 bp, synthetic construct
  source 1..777: mol_type = other DNA
tgcctgagcagcagactgagagtgtccgccaccttctggcagaacccccggaaccacttcagatgccaggtgcagttctacggcctgagcgagaacgacgagtggacccaggacagagccaagcccgtgacccagatcgtgtctgccgaagcctggggcagagccgattgcggctttaccagcgagagctaccagcagggcgtgctgagcgccaccatcctgtacgagatcctgctgggcaaggccaccctgtacgccgtgctggtgtctgccctggtgctgatggctatggtcaagcggaaggacagccggggaaggagtaagaggagcaggctcctgcacagtgactacatgaacatgactccacgccgccccggacccacccgcaagcattaccagccctatgccccaccacgcgacttcgcagcctatcgctccagagtgaagttcagcagaagcgccgacgcccctgcctaccagcagggacagaaccaactgtacaacgagctgaacctgggcagacgggaagagtacgacgtgctggacaagcggagaggcagggaccctgagatgggcggaaagccccagcggagaaagaacccccaggaaggactgtataacgaactccagaaagacaagatggccgaagcctacagcgagatcggcatgaagggcgagcggagaagaggcaagggccacgatggcctgtaccagggcctgagcaccgccaccaaggacacctatgacgccctgcacatgcaggccctgcctccaaga

SEQ ID NO: 25698 - DNA, 774 bp, synthetic construct
  source 1..774: mol_type = other DNA
ctgagcagcagactgagagtgtccgccaccttctggcagaacccccggaaccacttcagatgccaggtgcagttctacggcctgagcgagaacgacgagtggacccaggacagagccaagcccgtgacccagatcgtgtctgccgaagcctggggcagagccgattgcggctttaccagcgagagctaccagcagggcgtgctgagcgccaccatcctgtacgagatcctgctgggcaaggccaccctgtacgccgtgctggtgtctgccctggtgctgatggctatggtcaagcggaaggacagccggggaaggagtaagaggagcaggctcctgcacagtgactacatgaacatgactccacgccgccccggacccacccgcaagcattaccagccctatgccccaccacgcgacttcgcagcctatcgctccagagtgaagttcagcagaagcgccgacgcccctgcctaccagcagggacagaaccaactgtacaacgagctgaacctgggcagacgggaagagtacgacgtgctggacaagcggagaggcagggaccctgagatgggcggaaagccccagcggagaaagaacccccaggaaggactgtataacgaactccagaaagacaagatggccgaagcctacagcgagatcggcatgaagggcgagcggagaagaggcaagggccacgatggcctgtaccagggcctgagcaccgccaccaaggacacctatgacgccctgcacatgcaggccctgcctccaaga

SEQ ID NO: 25699 - DNA, 771 bp, synthetic construct
  source 1..771: mol_type = other DNA
agcagcagactgagagtgtccgccaccttctggcagaacccccggaaccacttcagatgccaggtgcagttctacggcctgagcgagaacgacgagtggacccaggacagagccaagcccgtgacccagatcgtgtctgccgaagcctggggcagagccgattgcggctttaccagcgagagctaccagcagggcgtgctgagcgccaccatcctgtacgagatcctgctgggcaaggccaccctgtacgccgtgctggtgtctgccctggtgctgatggctatggtcaagcggaaggacagccggggaaggagtaagaggagcaggctcctgcacagtgactacatgaacatgactccacgccgccccggacccacccgcaagcattaccagccctatgccccaccacgcgacttcgcagcctatcgctccagagtgaagttcagcagaagcgccgacgcccctgcctaccagcagggacagaaccaactgtacaacgagctgaacctgggcagacgggaagagtacgacgtgctggacaagcggagaggcagggaccctgagatgggcggaaagccccagcggagaaagaacccccaggaaggactgtataacgaactccagaaagacaagatggccgaagcctacagcgagatcggcatgaagggcgagcggagaagaggcaagggccacgatggcctgtaccagggcctgagcaccgccaccaaggacacctatgacgccctgcacatgcaggccctgcctccaaga

SEQ ID NO: 25700 - DNA, 768 bp, synthetic construct
  source 1..768: mol_type = other DNA
agcagactgagagtgtccgccaccttctggcagaacccccggaaccacttcagatgccaggtgcagttctacggcctgagcgagaacgacgagtggacccaggacagagccaagcccgtgacccagatcgtgtctgccgaagcctggggcagagccgattgcggctttaccagcgagagctaccagcagggcgtgctgagcgccaccatcctgtacgagatcctgctgggcaaggccaccctgtacgccgtgctggtgtctgccctggtgctgatggctatggtcaagcggaaggacagccggggaaggagtaagaggagcaggctcctgcacagtgactacatgaacatgactccacgccgccccggacccacccgcaagcattaccagccctatgccccaccacgcgacttcgcagcctatcgctccagagtgaagttcagcagaagcgccgacgcccctgcctaccagcagggacagaaccaactgtacaacgagctgaacctgggcagacgggaagagtacgacgtgctggacaagcggagaggcagggaccctgagatgggcggaaagccccagcggagaaagaacccccaggaaggactgtataacgaactccagaaagacaagatggccgaagcctacagcgagatcggcatgaagggcgagcggagaagaggcaagggccacgatggcctgtaccagggcctgagcaccgccaccaaggacacctatgacgccctgcacatgcaggccctgcctccaaga

SEQ ID NO: 25701 - DNA, 765 bp, synthetic construct
  source 1..765: mol_type = other DNA
agactgagagtgtccgccaccttctggcagaacccccggaaccacttcagatgccaggtgcagttctacggcctgagcgagaacgacgagtggacccaggacagagccaagcccgtgacccagatcgtgtctgccgaagcctggggcagagccgattgcggctttaccagcgagagctaccagcagggcgtgctgagcgccaccatcctgtacgagatcctgctgggcaaggccaccctgtacgccgtgctggtgtctgccctggtgctgatggctatggtcaagcggaaggacagccggggaaggagtaagaggagcaggctcctgcacagtgactacatgaacatgactccacgccgccccggacccacccgcaagcattaccagccctatgccccaccacgcgacttcgcagcctatcgctccagagtgaagttcagcagaagcgccgacgcccctgcctaccagcagggacagaaccaactgtacaacgagctgaacctgggcagacgggaagagtacgacgtgctggacaagcggagaggcagggaccctgagatgggcggaaagccccagcggagaaagaacccccaggaaggactgtataacgaactccagaaagacaagatggccgaagcctacagcgagatcggcatgaagggcgagcggagaagaggcaagggccacgatggcctgtaccagggcctgagcaccgccaccaaggacacctatgacgccctgcacatgcaggccctgcctccaaga

SEQ ID NO: 25702 - DNA, 762 bp, synthetic construct
  source 1..762: mol_type = other DNA
ctgagagtgtccgccaccttctggcagaacccccggaaccacttcagatgccaggtgcagttctacggcctgagcgagaacgacgagtggacccaggacagagccaagcccgtgacccagatcgtgtctgccgaagcctggggcagagccgattgcggctttaccagcgagagctaccagcagggcgtgctgagcgccaccatcctgtacgagatcctgctgggcaaggccaccctgtacgccgtgctggtgtctgccctggtgctgatggctatggtcaagcggaaggacagccggggaaggagtaagaggagcaggctcctgcacagtgactacatgaacatgactccacgccgccccggacccacccgcaagcattaccagccctatgccccaccacgcgacttcgcagcctatcgctccagagtgaagttcagcagaagcgccgacgcccctgcctaccagcagggacagaaccaactgtacaacgagctgaacctgggcagacgggaagagtacgacgtgctggacaagcggagaggcagggaccctgagatgggcggaaagccccagcggagaaagaacccccaggaaggactgtataacgaactccagaaagacaagatggccgaagcctacagcgagatcggcatgaagggcgagcggagaagaggcaagggccacgatggcctgtaccagggcctgagcaccgccaccaaggacacctatgacgccctgcacatgcaggccctgcctccaaga

SEQ ID NO: 25703 - DNA, 759 bp, synthetic construct
  source 1..759: mol_type = other DNA
agagtgtccgccaccttctggcagaacccccggaaccacttcagatgccaggtgcagttctacggcctgagcgagaacgacgagtggacccaggacagagccaagcccgtgacccagatcgtgtctgccgaagcctggggcagagccgattgcggctttaccagcgagagctaccagcagggcgtgctgagcgccaccatcctgtacgagatcctgctgggcaaggccaccctgtacgccgtgctggtgtctgccctggtgctgatggctatggtcaagcggaaggacagccggggaaggagtaagaggagcaggctcctgcacagtgactacatgaacatgactccacgccgccccggacccacccgcaagcattaccagccctatgccccaccacgcgacttcgcagcctatcgctccagagtgaagttcagcagaagcgccgacgcccctgcctaccagcagggacagaaccaactgtacaacgagctgaacctgggcagacgggaagagtacgacgtgctggacaagcggagaggcagggaccctgagatgggcggaaagccccagcggagaaagaacccccaggaaggactgtataacgaactccagaaagacaagatggccgaagcctacagcgagatcggcatgaagggcgagcggagaagaggcaagggccacgatggcctgtaccagggcctgagcaccgccaccaaggacacctatgacgccctgcacatgcaggccctgcctccaaga

SEQ ID NO: 25704 - DNA, 756 bp, synthetic construct
  source 1..756: mol_type = other DNA
gtgtccgccaccttctggcagaacccccggaaccacttcagatgccaggtgcagttctacggcctgagcgagaacgacgagtggacccaggacagagccaagcccgtgacccagatcgtgtctgccgaagcctggggcagagccgattgcggctttaccagcgagagctaccagcagggcgtgctgagcgccaccatcctgtacgagatcctgctgggcaaggccaccctgtacgccgtgctggtgtctgccctggtgctgatggctatggtcaagcggaaggacagccggggaaggagtaagaggagcaggctcctgcacagtgactacatgaacatgactccacgccgccccggacccacccgcaagcattaccagccctatgccccaccacgcgacttcgcagcctatcgctccagagtgaagttcagcagaagcgccgacgcccctgcctaccagcagggacagaaccaactgtacaacgagctgaacctgggcagacgggaagagtacgacgtgctggacaagcggagaggcagggaccctgagatgggcggaaagccccagcggagaaagaacccccaggaaggactgtataacgaactccagaaagacaagatggccgaagcctacagcgagatcggcatgaagggcgagcggagaagaggcaagggccacgatggcctgtaccagggcctgagcaccgccaccaaggacacctatgacgccctgcacatgcaggccctgcctccaaga

SEQ ID NO: 25705 - DNA, 753 bp, synthetic construct
  source 1..753: mol_type = other DNA
tccgccaccttctggcagaacccccggaaccacttcagatgccaggtgcagttctacggcctgagcgagaacgacgagtggacccaggacagagccaagcccgtgacccagatcgtgtctgccgaagcctggggcagagccgattgcggctttaccagcgagagctaccagcagggcgtgctgagcgccaccatcctgtacgagatcctgctgggcaaggccaccctgtacgccgtgctggtgtctgccctggtgctgatggctatggtcaagcggaaggacagccggggaaggagtaagaggagcaggctcctgcacagtgactacatgaacatgactccacgccgccccggacccacccgcaagcattaccagccctatgccccaccacgcgacttcgcagcctatcgctccagagtgaagttcagcagaagcgccgacgcccctgcctaccagcagggacagaaccaactgtacaacgagctgaacctgggcagacgggaagagtacgacgtgctggacaagcggagaggcagggaccctgagatgggcggaaagccccagcggagaaagaacccccaggaaggactgtataacgaactccagaaagacaagatggccgaagcctacagcgagatcggcatgaagggcgagcggagaagaggcaagggccacgatggcctgtaccagggcctgagcaccgccaccaaggacacctatgacgccctgcacatgcaggccctgcctccaaga

SEQ ID NO: 25706 - DNA, 750 bp, synthetic construct
  source 1..750: mol_type = other DNA
gccaccttctggcagaacccccggaaccacttcagatgccaggtgcagttctacggcctgagcgagaacgacgagtggacccaggacagagccaagcccgtgacccagatcgtgtctgccgaagcctggggcagagccgattgcggctttaccagcgagagctaccagcagggcgtgctgagcgccaccatcctgtacgagatcctgctgggcaaggccaccctgtacgccgtgctggtgtctgccctggtgctgatggctatggtcaagcggaaggacagccggggaaggagtaagaggagcaggctcctgcacagtgactacatgaacatgactccacgccgccccggacccacccgcaagcattaccagccctatgccccaccacgcgacttcgcagcctatcgctccagagtgaagttcagcagaagcgccgacgcccctgcctaccagcagggacagaaccaactgtacaacgagctgaacctgggcagacgggaagagtacgacgtgctggacaagcggagaggcagggaccctgagatgggcggaaagccccagcggagaaagaacccccaggaaggactgtataacgaactccagaaagacaagatggccgaagcctacagcgagatcggcatgaagggcgagcggagaagaggcaagggccacgatggcctgtaccagggcctgagcaccgccaccaaggacacctatgacgccctgcacatgcaggccctgcctccaaga

SEQ ID NO: 25707 - DNA, 747 bp, synthetic construct
  source 1..747: mol_type = other DNA
accttctggcagaacccccggaaccacttcagatgccaggtgcagttctacggcctgagcgagaacgacgagtggacccaggacagagccaagcccgtgacccagatcgtgtctgccgaagcctggggcagagccgattgcggctttaccagcgagagctaccagcagggcgtgctgagcgccaccatcctgtacgagatcctgctgggcaaggccaccctgtacgccgtgctggtgtctgccctggtgctgatggctatggtcaagcggaaggacagccggggaaggagtaagaggagcaggctcctgcacagtgactacatgaacatgactccacgccgccccggacccacccgcaagcattaccagccctatgccccaccacgcgacttcgcagcctatcgctccagagtgaagttcagcagaagcgccgacgcccctgcctaccagcagggacagaaccaactgtacaacgagctgaacctgggcagacgggaagagtacgacgtgctggacaagcggagaggcagggaccctgagatgggcggaaagccccagcggagaaagaacccccaggaaggactgtataacgaactccagaaagacaagatggccgaagcctacagcgagatcggcatgaagggcgagcggagaagaggcaagggccacgatggcctgtaccagggcctgagcaccgccaccaaggacacctatgacgccctgcacatgcaggccctgcctccaaga

SEQ ID NO: 25708 - DNA, 744 bp, synthetic construct
  source 1..744: mol_type = other DNA
ttctggcagaacccccggaaccacttcagatgccaggtgcagttctacggcctgagcgagaacgacgagtggacccaggacagagccaagcccgtgacccagatcgtgtctgccgaagcctggggcagagccgattgcggctttaccagcgagagctaccagcagggcgtgctgagcgccaccatcctgtacgagatcctgctgggcaaggccaccctgtacgccgtgctggtgtctgccctggtgctgatggctatggtcaagcggaaggacagccggggaaggagtaagaggagcaggctcctgcacagtgactacatgaacatgactccacgccgccccggacccacccgcaagcattaccagccctatgccccaccacgcgacttcgcagcctatcgctccagagtgaagttcagcagaagcgccgacgcccctgcctaccagcagggacagaaccaactgtacaacgagctgaacctgggcagacgggaagagtacgacgtgctggacaagcggagaggcagggaccctgagatgggcggaaagccccagcggagaaagaacccccaggaaggactgtataacgaactccagaaagacaagatggccgaagcctacagcgagatcggcatgaagggcgagcggagaagaggcaagggccacgatggcctgtaccagggcctgagcaccgccaccaaggacacctatgacgccctgcacatgcaggccctgcctccaaga

SEQ ID NO: 25709 - DNA, 741 bp, synthetic construct
  source 1..741: mol_type = other DNA
tggcagaacccccggaaccacttcagatgccaggtgcagttctacggcctgagcgagaacgacgagtggacccaggacagagccaagcccgtgacccagatcgtgtctgccgaagcctggggcagagccgattgcggctttaccagcgagagctaccagcagggcgtgctgagcgccaccatcctgtacgagatcctgctgggcaaggccaccctgtacgccgtgctggtgtctgccctggtgctgatggctatggtcaagcggaaggacagccggggaaggagtaagaggagcaggctcctgcacagtgactacatgaacatgactccacgccgccccggacccacccgcaagcattaccagccctatgccccaccacgcgacttcgcagcctatcgctccagagtgaagttcagcagaagcgccgacgcccctgcctaccagcagggacagaaccaactgtacaacgagctgaacctgggcagacgggaagagtacgacgtgctggacaagcggagaggcagggaccctgagatgggcggaaagccccagcggagaaagaacccccaggaaggactgtataacgaactccagaaagacaagatggccgaagcctacagcgagatcggcatgaagggcgagcggagaagaggcaagggccacgatggcctgtaccagggcctgagcaccgccaccaaggacacctatgacgccctgcacatgcaggccctgcctccaaga

SEQ ID NO: 25710 - DNA, 738 bp, synthetic construct
  source 1..738: mol_type = other DNA
cagaacccccggaaccacttcagatgccaggtgcagttctacggcctgagcgagaacgacgagtggacccaggacagagccaagcccgtgacccagatcgtgtctgccgaagcctggggcagagccgattgcggctttaccagcgagagctaccagcagggcgtgctgagcgccaccatcctgtacgagatcctgctgggcaaggccaccctgtacgccgtgctggtgtctgccctggtgctgatggctatggtcaagcggaaggacagccggggaaggagtaagaggagcaggctcctgcacagtgactacatgaacatgactccacgccgccccggacccacccgcaagcattaccagccctatgccccaccacgcgacttcgcagcctatcgctccagagtgaagttcagcagaagcgccgacgcccctgcctaccagcagggacagaaccaactgtacaacgagctgaacctgggcagacgggaagagtacgacgtgctggacaagcggagaggcagggaccctgagatgggcggaaagccccagcggagaaagaacccccaggaaggactgtataacgaactccagaaagacaagatggccgaagcctacagcgagatcggcatgaagggcgagcggagaagaggcaagggccacgatggcctgtaccagggcctgagcaccgccaccaaggacacctatgacgccctgcacatgcaggccctgcctccaaga

SEQ ID NO: 25711 - DNA, 735 bp, synthetic construct
  source 1..735: mol_type = other DNA
aacccccggaaccacttcagatgccaggtgcagttctacggcctgagcgagaacgacgagtggacccaggacagagccaagcccgtgacccagatcgtgtctgccgaagcctggggcagagccgattgcggctttaccagcgagagctaccagcagggcgtgctgagcgccaccatcctgtacgagatcctgctgggcaaggccaccctgtacgccgtgctggtgtctgccctggtgctgatggctatggtcaagcggaaggacagccggggaaggagtaagaggagcaggctcctgcacagtgactacatgaacatgactccacgccgccccggacccacccgcaagcattaccagccctatgccccaccacgcgacttcgcagcctatcgctccagagtgaagttcagcagaagcgccgacgcccctgcctaccagcagggacagaaccaactgtacaacgagctgaacctgggcagacgggaagagtacgacgtgctggacaagcggagaggcagggaccctgagatgggcggaaagccccagcggagaaagaacccccaggaaggactgtataacgaactccagaaagacaagatggccgaagcctacagcgagatcggcatgaagggcgagcggagaagaggcaagggccacgatggcctgtaccagggcctgagcaccgccaccaaggacacctatgacgccctgcacatgcaggccctgcctccaaga

SEQ ID NO: 25712 - DNA, 732 bp, synthetic construct
  source 1..732: mol_type = other DNA
ccccggaaccacttcagatgccaggtgcagttctacggcctgagcgagaacgacgagtggacccaggacagagccaagcccgtgacccagatcgtgtctgccgaagcctggggcagagccgattgcggctttaccagcgagagctaccagcagggcgtgctgagcgccaccatcctgtacgagatcctgctgggcaaggccaccctgtacgccgtgctggtgtctgccctggtgctgatggctatggtcaagcggaaggacagccggggaaggagtaagaggagcaggctcctgcacagtgactacatgaacatgactccacgccgccccggacccacccgcaagcattaccagccctatgccccaccacgcgacttcgcagcctatcgctccagagtgaagttcagcagaagcgccgacgcccctgcctaccagcagggacagaaccaactgtacaacgagctgaacctgggcagacgggaagagtacgacgtgctggacaagcggagaggcagggaccctgagatgggcggaaagccccagcggagaaagaacccccaggaaggactgtataacgaactccagaaagacaagatggccgaagcctacagcgagatcggcatgaagggcgagcggagaagaggcaagggccacgatggcctgtaccagggcctgagcaccgccaccaaggacacctatgacgccctgcacatgcaggccctgcctccaaga

SEQ ID NO: 25713 - DNA, 729 bp, synthetic construct
  source 1..729: mol_type = other DNA
cggaaccacttcagatgccaggtgcagttctacggcctgagcgagaacgacgagtggacccaggacagagccaagcccgtgacccagatcgtgtctgccgaagcctggggcagagccgattgcggctttaccagcgagagctaccagcagggcgtgctgagcgccaccatcctgtacgagatcctgctgggcaaggccaccctgtacgccgtgctggtgtctgccctggtgctgatggctatggtcaagcggaaggacagccggggaaggagtaagaggagcaggctcctgcacagtgactacatgaacatgactccacgccgccccggacccacccgcaagcattaccagccctatgccccaccacgcgacttcgcagcctatcgctccagagtgaagttcagcagaagcgccgacgcccctgcctaccagcagggacagaaccaactgtacaacgagctgaacctgggcagacgggaagagtacgacgtgctggacaagcggagaggcagggaccctgagatgggcggaaagccccagcggagaaagaacccccaggaaggactgtataacgaactccagaaagacaagatggccgaagcctacagcgagatcggcatgaagggcgagcggagaagaggcaagggccacgatggcctgtaccagggcctgagcaccgccaccaaggacacctatgacgccctgcacatgcaggccctgcctccaaga

SEQ ID NO: 25714 - DNA, 726 bp, synthetic construct
  source 1..726: mol_type = other DNA
aaccacttcagatgccaggtgcagttctacggcctgagcgagaacgacgagtggacccaggacagagccaagcccgtgacccagatcgtgtctgccgaagcctggggcagagccgattgcggctttaccagcgagagctaccagcagggcgtgctgagcgccaccatcctgtacgagatcctgctgggcaaggccaccctgtacgccgtgctggtgtctgccctggtgctgatggctatggtcaagcggaaggacagccggggaaggagtaagaggagcaggctcctgcacagtgactacatgaacatgactccacgccgccccggacccacccgcaagcattaccagccctatgccccaccacgcgacttcgcagcctatcgctccagagtgaagttcagcagaagcgccgacgcccctgcctaccagcagggacagaaccaactgtacaacgagctgaacctgggcagacgggaagagtacgacgtgctggacaagcggagaggcagggaccctgagatgggcggaaagccccagcggagaaagaacccccaggaaggactgtataacgaactccagaaagacaagatggccgaagcctacagcgagatcggcatgaagggcgagcggagaagaggcaagggccacgatggcctgtaccagggcctgagcaccgccaccaaggacacctatgacgccctgcacatgcaggccctgcctccaaga

SEQ ID NO: 25715 - DNA, 723 bp, synthetic construct
  source 1..723: mol_type = other DNA
cacttcagatgccaggtgcagttctacggcctgagcgagaacgacgagtggacccaggacagagccaagcccgtgacccagatcgtgtctgccgaagcctggggcagagccgattgcggctttaccagcgagagctaccagcagggcgtgctgagcgccaccatcctgtacgagatcctgctgggcaaggccaccctgtacgccgtgctggtgtctgccctggtgctgatggctatggtcaagcggaaggacagccggggaaggagtaagaggagcaggctcctgcacagtgactacatgaacatgactccacgccgccccggacccacccgcaagcattaccagccctatgccccaccacgcgacttcgcagcctatcgctccagagtgaagttcagcagaagcgccgacgcccctgcctaccagcagggacagaaccaactgtacaacgagctgaacctgggcagacgggaagagtacgacgtgctggacaagcggagaggcagggaccctgagatgggcggaaagccccagcggagaaagaacccccaggaaggactgtataacgaactccagaaagacaagatggccgaagcctacagcgagatcggcatgaagggcgagcggagaagaggcaagggccacgatggcctgtaccagggcctgagcaccgccaccaaggacacctatgacgccctgcacatgcaggccctgcctccaaga

SEQ ID NO: 25716 - DNA, 720 bp, synthetic construct
  source 1..720: mol_type = other DNA
ttcagatgccaggtgcagttctacggcctgagcgagaacgacgagtggacccaggacagagccaagcccgtgacccagatcgtgtctgccgaagcctggggcagagccgattgcggctttaccagcgagagctaccagcagggcgtgctgagcgccaccatcctgtacgagatcctgctgggcaaggccaccctgtacgccgtgctggtgtctgccctggtgctgatggctatggtcaagcggaaggacagccggggaaggagtaagaggagcaggctcctgcacagtgactacatgaacatgactccacgccgccccggacccacccgcaagcattaccagccctatgccccaccacgcgacttcgcagcctatcgctccagagtgaagttcagcagaagcgccgacgcccctgcctaccagcagggacagaaccaactgtacaacgagctgaacctgggcagacgggaagagtacgacgtgctggacaagcggagaggcagggaccctgagatgggcggaaagccccagcggagaaagaacccccaggaaggactgtataacgaactccagaaagacaagatggccgaagcctacagcgagatcggcatgaagggcgagcggagaagaggcaagggccacgatggcctgtaccagggcctgagcaccgccaccaaggacacctatgacgccctgcacatgcaggccctgcctccaaga

SEQ ID NO: 25717 - DNA, 717 bp, synthetic construct
  source 1..717: mol_type = other DNA
agatgccaggtgcagttctacggcctgagcgagaacgacgagtggacccaggacagagccaagcccgtgacccagatcgtgtctgccgaagcctggggcagagccgattgcggctttaccagcgagagctaccagcagggcgtgctgagcgccaccatcctgtacgagatcctgctgggcaaggccaccctgtacgccgtgctggtgtctgccctggtgctgatggctatggtcaagcggaaggacagccggggaaggagtaagaggagcaggctcctgcacagtgactacatgaacatgactccacgccgccccggacccacccgcaagcattaccagccctatgccccaccacgcgacttcgcagcctatcgctccagagtgaagttcagcagaagcgccgacgcccctgcctaccagcagggacagaaccaactgtacaacgagctgaacctgggcagacgggaagagtacgacgtgctggacaagcggagaggcagggaccctgagatgggcggaaagccccagcggagaaagaacccccaggaaggactgtataacgaactccagaaagacaagatggccgaagcctacagcgagatcggcatgaagggcgagcggagaagaggcaagggccacgatggcctgtaccagggcctgagcaccgccaccaaggacacctatgacgccctgcacatgcaggccctgcctccaaga

SEQ ID NO: 25718 - DNA, 714 bp, synthetic construct
  source 1..714: mol_type = other DNA
tgccaggtgcagttctacggcctgagcgagaacgacgagtggacccaggacagagccaagcccgtgacccagatcgtgtctgccgaagcctggggcagagccgattgcggctttaccagcgagagctaccagcagggcgtgctgagcgccaccatcctgtacgagatcctgctgggcaaggccaccctgtacgccgtgctggtgtctgccctggtgctgatggctatggtcaagcggaaggacagccggggaaggagtaagaggagcaggctcctgcacagtgactacatgaacatgactccacgccgccccggacccacccgcaagcattaccagccctatgccccaccacgcgacttcgcagcctatcgctccagagtgaagttcagcagaagcgccgacgcccctgcctaccagcagggacagaaccaactgtacaacgagctgaacctgggcagacgggaagagtacgacgtgctggacaagcggagaggcagggaccctgagatgggcggaaagccccagcggagaaagaacccccaggaaggactgtataacgaactccagaaagacaagatggccgaagcctacagcgagatcggcatgaagggcgagcggagaagaggcaagggccacgatggcctgtaccagggcctgagcaccgccaccaaggacacctatgacgccctgcacatgcaggccctgcctccaaga

SEQ ID NO: 25719 - DNA, 711 bp, synthetic construct
  source 1..711: mol_type = other DNA
caggtgcagttctacggcctgagcgagaacgacgagtggacccaggacagagccaagcccgtgacccagatcgtgtctgccgaagcctggggcagagccgattgcggctttaccagcgagagctaccagcagggcgtgctgagcgccaccatcctgtacgagatcctgctgggcaaggccaccctgtacgccgtgctggtgtctgccctggtgctgatggctatggtcaagcggaaggacagccggggaaggagtaagaggagcaggctcctgcacagtgactacatgaacatgactccacgccgccccggacccacccgcaagcattaccagccctatgccccaccacgcgacttcgcagcctatcgctccagagtgaagttcagcagaagcgccgacgcccctgcctaccagcagggacagaaccaactgtacaacgagctgaacctgggcagacgggaagagtacgacgtgctggacaagcggagaggcagggaccctgagatgggcggaaagccccagcggagaaagaacccccaggaaggactgtataacgaactccagaaagacaagatggccgaagcctacagcgagatcggcatgaagggcgagcggagaagaggcaagggccacgatggcctgtaccagggcctgagcaccgccaccaaggacacctatgacgccctgcacatgcaggccctgcctccaaga

SEQ ID NO: 25720 - DNA, 708 bp, synthetic construct
  source 1..708: mol_type = other DNA
gtgcagttctacggcctgagcgagaacgacgagtggacccaggacagagccaagcccgtgacccagatcgtgtctgccgaagcctggggcagagccgattgcggctttaccagcgagagctaccagcagggcgtgctgagcgccaccatcctgtacgagatcctgctgggcaaggccaccctgtacgccgtgctggtgtctgccctggtgctgatggctatggtcaagcggaaggacagccggggaaggagtaagaggagcaggctcctgcacagtgactacatgaacatgactccacgccgccccggacccacccgcaagcattaccagccctatgccccaccacgcgacttcgcagcctatcgctccagagtgaagttcagcagaagcgccgacgcccctgcctaccagcagggacagaaccaactgtacaacgagctgaacctgggcagacgggaagagtacgacgtgctggacaagcggagaggcagggaccctgagatgggcggaaagccccagcggagaaagaacccccaggaaggactgtataacgaactccagaaagacaagatggccgaagcctacagcgagatcggcatgaagggcgagcggagaagaggcaagggccacgatggcctgtaccagggcctgagcaccgccaccaaggacacctatgacgccctgcacatgcaggccctgcctccaaga

SEQ ID NO: 25721 - DNA, 705 bp, synthetic construct
  source 1..705: mol_type = other DNA
cagttctacggcctgagcgagaacgacgagtggacccaggacagagccaagcccgtgacccagatcgtgtctgccgaagcctggggcagagccgattgcggctttaccagcgagagctaccagcagggcgtgctgagcgccaccatcctgtacgagatcctgctgggcaaggccaccctgtacgccgtgctggtgtctgccctggtgctgatggctatggtcaagcggaaggacagccggggaaggagtaagaggagcaggctcctgcacagtgactacatgaacatgactccacgccgccccggacccacccgcaagcattaccagccctatgccccaccacgcgacttcgcagcctatcgctccagagtgaagttcagcagaagcgccgacgcccctgcctaccagcagggacagaaccaactgtacaacgagctgaacctgggcagacgggaagagtacgacgtgctggacaagcggagaggcagggaccctgagatgggcggaaagccccagcggagaaagaacccccaggaaggactgtataacgaactccagaaagacaagatggccgaagcctacagcgagatcggcatgaagggcgagcggagaagaggcaagggccacgatggcctgtaccagggcctgagcaccgccaccaaggacacctatgacgccctgcacatgcaggccctgcctccaaga

SEQ ID NO: 25722 - DNA, 702 bp, synthetic construct
  source 1..702: mol_type = other DNA
ttctacggcctgagcgagaacgacgagtggacccaggacagagccaagcccgtgacccagatcgtgtctgccgaagcctggggcagagccgattgcggctttaccagcgagagctaccagcagggcgtgctgagcgccaccatcctgtacgagatcctgctgggcaaggccaccctgtacgccgtgctggtgtctgccctggtgctgatggctatggtcaagcggaaggacagccggggaaggagtaagaggagcaggctcctgcacagtgactacatgaacatgactccacgccgccccggacccacccgcaagcattaccagccctatgccccaccacgcgacttcgcagcctatcgctccagagtgaagttcagcagaagcgccgacgcccctgcctaccagcagggacagaaccaactgtacaacgagctgaacctgggcagacgggaagagtacgacgtgctggacaagcggagaggcagggaccctgagatgggcggaaagccccagcggagaaagaacccccaggaaggactgtataacgaactccagaaagacaagatggccgaagcctacagcgagatcggcatgaagggcgagcggagaagaggcaagggccacgatggcctgtaccagggcctgagcaccgccaccaaggacacctatgacgccctgcacatgcaggccctgcctccaaga

SEQ ID NO: 25723 - DNA, 699 bp, synthetic construct
  source 1..699: mol_type = other DNA
tacggcctgagcgagaacgacgagtggacccaggacagagccaagcccgtgacccagatcgtgtctgccgaagcctggggcagagccgattgcggctttaccagcgagagctaccagcagggcgtgctgagcgccaccatcctgtacgagatcctgctgggcaaggccaccctgtacgccgtgctggtgtctgccctggtgctgatggctatggtcaagcggaaggacagccggggaaggagtaagaggagcaggctcctgcacagtgactacatgaacatgactccacgccgccccggacccacccgcaagcattaccagccctatgccccaccacgcgacttcgcagcctatcgctccagagtgaagttcagcagaagcgccgacgcccctgcctaccagcagggacagaaccaactgtacaacgagctgaacctgggcagacgggaagagtacgacgtgctggacaagcggagaggcagggaccctgagatgggcggaaagccccagcggagaaagaacccccaggaaggactgtataacgaactccagaaagacaagatggccgaagcctacagcgagatcggcatgaagggcgagcggagaagaggcaagggccacgatggcctgtaccagggcctgagcaccgccaccaaggacacctatgacgccctgcacatgcaggccctgcctccaaga

SEQ ID NO: 25724 - DNA, 696 bp, synthetic construct
  source 1..696: mol_type = other DNA
ggcctgagcgagaacgacgagtggacccaggacagagccaagcccgtgacccagatcgtgtctgccgaagcctggggcagagccgattgcggctttaccagcgagagctaccagcagggcgtgctgagcgccaccatcctgtacgagatcctgctgggcaaggccaccctgtacgccgtgctggtgtctgccctggtgctgatggctatggtcaagcggaaggacagccggggaaggagtaagaggagcaggctcctgcacagtgactacatgaacatgactccacgccgccccggacccacccgcaagcattaccagccctatgccccaccacgcgacttcgcagcctatcgctccagagtgaagttcagcagaagcgccgacgcccctgcctaccagcagggacagaaccaactgtacaacgagctgaacctgggcagacgggaagagtacgacgtgctggacaagcggagaggcagggaccctgagatgggcggaaagccccagcggagaaagaacccccaggaaggactgtataacgaactccagaaagacaagatggccgaagcctacagcgagatcggcatgaagggcgagcggagaagaggcaagggccacgatggcctgtaccagggcctgagcaccgccaccaaggacacctatgacgccctgcacatgcaggccctgcctccaaga

SEQ ID NO: 25725 - DNA, 693 bp, synthetic construct
  source 1..693: mol_type = other DNA
ctgagcgagaacgacgagtggacccaggacagagccaagcccgtgacccagatcgtgtctgccgaagcctggggcagagccgattgcggctttaccagcgagagctaccagcagggcgtgctgagcgccaccatcctgtacgagatcctgctgggcaaggccaccctgtacgccgtgctggtgtctgccctggtgctgatggctatggtcaagcggaaggacagccggggaaggagtaagaggagcaggctcctgcacagtgactacatgaacatgactccacgccgccccggacccacccgcaagcattaccagccctatgccccaccacgcgacttcgcagcctatcgctccagagtgaagttcagcagaagcgccgacgcccctgcctaccagcagggacagaaccaactgtacaacgagctgaacctgggcagacgggaagagtacgacgtgctggacaagcggagaggcagggaccctgagatgggcggaaagccccagcggagaaagaacccccaggaaggactgtataacgaactccagaaagacaagatggccgaagcctacagcgagatcggcatgaagggcgagcggagaagaggcaagggccacgatggcctgtaccagggcctgagcaccgccaccaaggacacctatgacgccctgcacatgcaggccctgcctccaaga

SEQ ID NO: 25726 - DNA, 690 bp, synthetic construct
  source 1..690: mol_type = other DNA
agcgagaacgacgagtggacccaggacagagccaagcccgtgacccagatcgtgtctgccgaagcctggggcagagccgattgcggctttaccagcgagagctaccagcagggcgtgctgagcgccaccatcctgtacgagatcctgctgggcaaggccaccctgtacgccgtgctggtgtctgccctggtgctgatggctatggtcaagcggaaggacagccggggaaggagtaagaggagcaggctcctgcacagtgactacatgaacatgactccacgccgccccggacccacccgcaagcattaccagccctatgccccaccacgcgacttcgcagcctatcgctccagagtgaagttcagcagaagcgccgacgcccctgcctaccagcagggacagaaccaactgtacaacgagctgaacctgggcagacgggaagagtacgacgtgctggacaagcggagaggcagggaccctgagatgggcggaaagccccagcggagaaagaacccccaggaaggactgtataacgaactccagaaagacaagatggccgaagcctacagcgagatcggcatgaagggcgagcggagaagaggcaagggccacgatggcctgtaccagggcctgagcaccgccaccaaggacacctatgacgccctgcacatgcaggccctgcctccaaga

SEQ ID NO: 25727 - DNA, 687 bp, synthetic construct
  source 1..687: mol_type = other DNA
gagaacgacgagtggacccaggacagagccaagcccgtgacccagatcgtgtctgccgaagcctggggcagagccgattgcggctttaccagcgagagctaccagcagggcgtgctgagcgccaccatcctgtacgagatcctgctgggcaaggccaccctgtacgccgtgctggtgtctgccctggtgctgatggctatggtcaagcggaaggacagccggggaaggagtaagaggagcaggctcctgcacagtgactacatgaacatgactccacgccgccccggacccacccgcaagcattaccagccctatgccccaccacgcgacttcgcagcctatcgctccagagtgaagttcagcagaagcgccgacgcccctgcctaccagcagggacagaaccaactgtacaacgagctgaacctgggcagacgggaagagtacgacgtgctggacaagcggagaggcagggaccctgagatgggcggaaagccccagcggagaaagaacccccaggaaggactgtataacgaactccagaaagacaagatggccgaagcctacagcgagatcggcatgaagggcgagcggagaagaggcaagggccacgatggcctgtaccagggcctgagcaccgccaccaaggacacctatgacgccctgcacatgcaggccctgcctccaaga

SEQ ID NO: 25728 - DNA, 684 bp, synthetic construct
  source 1..684: mol_type = other DNA
aacgacgagtggacccaggacagagccaagcccgtgacccagatcgtgtctgccgaagcctggggcagagccgattgcggctttaccagcgagagctaccagcagggcgtgctgagcgccaccatcctgtacgagatcctgctgggcaaggccaccctgtacgccgtgctggtgtctgccctggtgctgatggctatggtcaagcggaaggacagccggggaaggagtaagaggagcaggctcctgcacagtgactacatgaacatgactccacgccgccccggacccacccgcaagcattaccagccctatgccccaccacgcgacttcgcagcctatcgctccagagtgaagttcagcagaagcgccgacgcccctgcctaccagcagggacagaaccaactgtacaacgagctgaacctgggcagacgggaagagtacgacgtgctggacaagcggagaggcagggaccctgagatgggcggaaagccccagcggagaaagaacccccaggaaggactgtataacgaactccagaaagacaagatggccgaagcctacagcgagatcggcatgaagggcgagcggagaagaggcaagggccacgatggcctgtaccagggcctgagcaccgccaccaaggacacctatgacgccctgcacatgcaggccctgcctccaaga

SEQ ID NO: 25729 - DNA, 681 bp, synthetic construct
  source 1..681: mol_type = other DNA
gacgagtggacccaggacagagccaagcccgtgacccagatcgtgtctgccgaagcctggggcagagccgattgcggctttaccagcgagagctaccagcagggcgtgctgagcgccaccatcctgtacgagatcctgctgggcaaggccaccctgtacgccgtgctggtgtctgccctggtgctgatggctatggtcaagcggaaggacagccggggaaggagtaagaggagcaggctcctgcacagtgactacatgaacatgactccacgccgccccggacccacccgcaagcattaccagccctatgccccaccacgcgacttcgcagcctatcgctccagagtgaagttcagcagaagcgccgacgcccctgcctaccagcagggacagaaccaactgtacaacgagctgaacctgggcagacgggaagagtacgacgtgctggacaagcggagaggcagggaccctgagatgggcggaaagccccagcggagaaagaacccccaggaaggactgtataacgaactccagaaagacaagatggccgaagcctacagcgagatcggcatgaagggcgagcggagaagaggcaagggccacgatggcctgtaccagggcctgagcaccgccaccaaggacacctatgacgccctgcacatgcaggccctgcctccaaga

SEQ ID NO: 25730 - DNA, 678 bp, synthetic construct
  source 1..678: mol_type = other DNA
gagtggacccaggacagagccaagcccgtgacccagatcgtgtctgccgaagcctggggcagagccgattgcggctttaccagcgagagctaccagcagggcgtgctgagcgccaccatcctgtacgagatcctgctgggcaaggccaccctgtacgccgtgctggtgtctgccctggtgctgatggctatggtcaagcggaaggacagccggggaaggagtaagaggagcaggctcctgcacagtgactacatgaacatgactccacgccgccccggacccacccgcaagcattaccagccctatgccccaccacgcgacttcgcagcctatcgctccagagtgaagttcagcagaagcgccgacgcccctgcctaccagcagggacagaaccaactgtacaacgagctgaacctgggcagacgggaagagtacgacgtgctggacaagcggagaggcagggaccctgagatgggcggaaagccccagcggagaaagaacccccaggaaggactgtataacgaactccagaaagacaagatggccgaagcctacagcgagatcggcatgaagggcgagcggagaagaggcaagggccacgatggcctgtaccagggcctgagcaccgccaccaaggacacctatgacgccctgcacatgcaggccctgcctccaaga

SEQ ID NO: 25731 - DNA, 675 bp, synthetic construct
  source 1..675: mol_type = other DNA
tggacccaggacagagccaagcccgtgacccagatcgtgtctgccgaagcctggggcagagccgattgcggctttaccagcgagagctaccagcagggcgtgctgagcgccaccatcctgtacgagatcctgctgggcaaggccaccctgtacgccgtgctggtgtctgccctggtgctgatggctatggtcaagcggaaggacagccggggaaggagtaagaggagcaggctcctgcacagtgactacatgaacatgactccacgccgccccggacccacccgcaagcattaccagccctatgccccaccacgcgacttcgcagcctatcgctccagagtgaagttcagcagaagcgccgacgcccctgcctaccagcagggacagaaccaactgtacaacgagctgaacctgggcagacgggaagagtacgacgtgctggacaagcggagaggcagggaccctgagatgggcggaaagccccagcggagaaagaacccccaggaaggactgtataacgaactccagaaagacaagatggccgaagcctacagcgagatcggcatgaagggcgagcggagaagaggcaagggccacgatggcctgtaccagggcctgagcaccgccaccaaggacacctatgacgccctgcacatgcaggccctgcctccaaga

SEQ ID NO: 25732 - DNA, 672 bp, synthetic construct
  source 1..672: mol_type = other DNA
acccaggacagagccaagcccgtgacccagatcgtgtctgccgaagcctggggcagagccgattgcggctttaccagcgagagctaccagcagggcgtgctgagcgccaccatcctgtacgagatcctgctgggcaaggccaccctgtacgccgtgctggtgtctgccctggtgctgatggctatggtcaagcggaaggacagccggggaaggagtaagaggagcaggctcctgcacagtgactacatgaacatgactccacgccgccccggacccacccgcaagcattaccagccctatgccccaccacgcgacttcgcagcctatcgctccagagtgaagttcagcagaagcgccgacgcccctgcctaccagcagggacagaaccaactgtacaacgagctgaacctgggcagacgggaagagtacgacgtgctggacaagcggagaggcagggaccctgagatgggcggaaagccccagcggagaaagaacccccaggaaggactgtataacgaactccagaaagacaagatggccgaagcctacagcgagatcggcatgaagggcgagcggagaagaggcaagggccacgatggcctgtaccagggcctgagcaccgccaccaaggacacctatgacgccctgcacatgcaggccctgcctccaaga

SEQ ID NO: 25733 - DNA, 669 bp, synthetic construct
  source 1..669: mol_type = other DNA
caggacagagccaagcccgtgacccagatcgtgtctgccgaagcctggggcagagccgattgcggctttaccagcgagagctaccagcagggcgtgctgagcgccaccatcctgtacgagatcctgctgggcaaggccaccctgtacgccgtgctggtgtctgccctggtgctgatggctatggtcaagcggaaggacagccggggaaggagtaagaggagcaggctcctgcacagtgactacatgaacatgactccacgccgccccggacccacccgcaagcattaccagccctatgccccaccacgcgacttcgcagcctatcgctccagagtgaagttcagcagaagcgccgacgcccctgcctaccagcagggacagaaccaactgtacaacgagctgaacctgggcagacgggaagagtacgacgtgctggacaagcggagaggcagggaccctgagatgggcggaaagccccagcggagaaagaacccccaggaaggactgtataacgaactccagaaagacaagatggccgaagcctacagcgagatcggcatgaagggcgagcggagaagaggcaagggccacgatggcctgtaccagggcctgagcaccgccaccaaggacacctatgacgccctgcacatgcaggccctgcctccaaga

SEQ ID NO: 25734 - DNA, 666 bp, synthetic construct
  source 1..666: mol_type = other DNA
gacagagccaagcccgtgacccagatcgtgtctgccgaagcctggggcagagccgattgcggctttaccagcgagagctaccagcagggcgtgctgagcgccaccatcctgtacgagatcctgctgggcaaggccaccctgtacgccgtgctggtgtctgccctggtgctgatggctatggtcaagcggaaggacagccggggaaggagtaagaggagcaggctcctgcacagtgactacatgaacatgactccacgccgccccggacccacccgcaagcattaccagccctatgccccaccacgcgacttcgcagcctatcgctccagagtgaagttcagcagaagcgccgacgcccctgcctaccagcagggacagaaccaactgtacaacgagctgaacctgggcagacgggaagagtacgacgtgctggacaagcggagaggcagggaccctgagatgggcggaaagccccagcggagaaagaacccccaggaaggactgtataacgaactccagaaagacaagatggccgaagcctacagcgagatcggcatgaagggcgagcggagaagaggcaagggccacgatggcctgtaccagggcctgagcaccgccaccaaggacacctatgacgccctgcacatgcaggccctgcctccaaga

SEQ ID NO: 25735 - DNA, 663 bp, synthetic construct
  source 1..663: mol_type = other DNA
agagccaagcccgtgacccagatcgtgtctgccgaagcctggggcagagccgattgcggctttaccagcgagagctaccagcagggcgtgctgagcgccaccatcctgtacgagatcctgctgggcaaggccaccctgtacgccgtgctggtgtctgccctggtgctgatggctatggtcaagcggaaggacagccggggaaggagtaagaggagcaggctcctgcacagtgactacatgaacatgactccacgccgccccggacccacccgcaagcattaccagccctatgccccaccacgcgacttcgcagcctatcgctccagagtgaagttcagcagaagcgccgacgcccctgcctaccagcagggacagaaccaactgtacaacgagctgaacctgggcagacgggaagagtacgacgtgctggacaagcggagaggcagggaccctgagatgggcggaaagccccagcggagaaagaacccccaggaaggactgtataacgaactccagaaagacaagatggccgaagcctacagcgagatcggcatgaagggcgagcggagaagaggcaagggccacgatggcctgtaccagggcctgagcaccgccaccaaggacacctatgacgccctgcacatgcaggccctgcctccaaga

SEQ ID NO: 25736 - DNA, 660 bp, synthetic construct
  source 1..660: mol_type = other DNA
gccaagcccgtgacccagatcgtgtctgccgaagcctggggcagagccgattgcggctttaccagcgagagctaccagcagggcgtgctgagcgccaccatcctgtacgagatcctgctgggcaaggccaccctgtacgccgtgctggtgtctgccctggtgctgatggctatggtcaagcggaaggacagccggggaaggagtaagaggagcaggctcctgcacagtgactacatgaacatgactccacgccgccccggacccacccgcaagcattaccagccctatgccccaccacgcgacttcgcagcctatcgctccagagtgaagttcagcagaagcgccgacgcccctgcctaccagcagggacagaaccaactgtacaacgagctgaacctgggcagacgggaagagtacgacgtgctggacaagcggagaggcagggaccctgagatgggcggaaagccccagcggagaaagaacccccaggaaggactgtataacgaactccagaaagacaagatggccgaagcctacagcgagatcggcatgaagggcgagcggagaagaggcaagggccacgatggcctgtaccagggcctgagcaccgccaccaaggacacctatgacgccctgcacatgcaggccctgcctccaaga

SEQ ID NO: 25737 - DNA, 657 bp, synthetic construct
  source 1..657: mol_type = other DNA
aagcccgtgacccagatcgtgtctgccgaagcctggggcagagccgattgcggctttaccagcgagagctaccagcagggcgtgctgagcgccaccatcctgtacgagatcctgctgggcaaggccaccctgtacgccgtgctggtgtctgccctggtgctgatggctatggtcaagcggaaggacagccggggaaggagtaagaggagcaggctcctgcacagtgactacatgaacatgactccacgccgccccggacccacccgcaagcattaccagccctatgccccaccacgcgacttcgcagcctatcgctccagagtgaagttcagcagaagcgccgacgcccctgcctaccagcagggacagaaccaactgtacaacgagctgaacctgggcagacgggaagagtacgacgtgctggacaagcggagaggcagggaccctgagatgggcggaaagccccagcggagaaagaacccccaggaaggactgtataacgaactccagaaagacaagatggccgaagcctacagcgagatcggcatgaagggcgagcggagaagaggcaagggccacgatggcctgtaccagggcctgagcaccgccaccaaggacacctatgacgccctgcacatgcaggccctgcctccaaga

SEQ ID NO: 25738 - DNA, 654 bp, synthetic construct
  source 1..654: mol_type = other DNA
cccgtgacccagatcgtgtctgccgaagcctggggcagagccgattgcggctttaccagcgagagctaccagcagggcgtgctgagcgccaccatcctgtacgagatcctgctgggcaaggccaccctgtacgccgtgctggtgtctgccctggtgctgatggctatggtcaagcggaaggacagccggggaaggagtaagaggagcaggctcctgcacagtgactacatgaacatgactccacgccgccccggacccacccgcaagcattaccagccctatgccccaccacgcgacttcgcagcctatcgctccagagtgaagttcagcagaagcgccgacgcccctgcctaccagcagggacagaaccaactgtacaacgagctgaacctgggcagacgggaagagtacgacgtgctggacaagcggagaggcagggaccctgagatgggcggaaagccccagcggagaaagaacccccaggaaggactgtataacgaactccagaaagacaagatggccgaagcctacagcgagatcggcatgaagggcgagcggagaagaggcaagggccacgatggcctgtaccagggcctgagcaccgccaccaaggacacctatgacgccctgcacatgcaggccctgcctccaaga

SEQ ID NO: 25739 - DNA, 651 bp, synthetic construct
  source 1..651: mol_type = other DNA
gtgacccagatcgtgtctgccgaagcctggggcagagccgattgcggctttaccagcgagagctaccagcagggcgtgctgagcgccaccatcctgtacgagatcctgctgggcaaggccaccctgtacgccgtgctggtgtctgccctggtgctgatggctatggtcaagcggaaggacagccggggaaggagtaagaggagcaggctcctgcacagtgactacatgaacatgactccacgccgccccggacccacccgcaagcattaccagccctatgccccaccacgcgacttcgcagcctatcgctccagagtgaagttcagcagaagcgccgacgcccctgcctaccagcagggacagaaccaactgtacaacgagctgaacctgggcagacgggaagagtacgacgtgctggacaagcggagaggcagggaccctgagatgggcggaaagccccagcggagaaagaacccccaggaaggactgtataacgaactccagaaagacaagatggccgaagcctacagcgagatcggcatgaagggcgagcggagaagaggcaagggccacgatggcctgtaccagggcctgagcaccgccaccaaggacacctatgacgccctgcacatgcaggccctgcctccaaga

SEQ ID NO: 25740 - DNA, 648 bp, synthetic construct
  source 1..648: mol_type = other DNA
acccagatcgtgtctgccgaagcctggggcagagccgattgcggctttaccagcgagagctaccagcagggcgtgctgagcgccaccatcctgtacgagatcctgctgggcaaggccaccctgtacgccgtgctggtgtctgccctggtgctgatggctatggtcaagcggaaggacagccggggaaggagtaagaggagcaggctcctgcacagtgactacatgaacatgactccacgccgccccggacccacccgcaagcattaccagccctatgccccaccacgcgacttcgcagcctatcgctccagagtgaagttcagcagaagcgccgacgcccctgcctaccagcagggacagaaccaactgtacaacgagctgaacctgggcagacgggaagagtacgacgtgctggacaagcggagaggcagggaccctgagatgggcggaaagccccagcggagaaagaacccccaggaaggactgtataacgaactccagaaagacaagatggccgaagcctacagcgagatcggcatgaagggcgagcggagaagaggcaagggccacgatggcctgtaccagggcctgagcaccgccaccaaggacacctatgacgccctgcacatgcaggccctgcctccaaga

SEQ ID NO: 25741 - DNA, 645 bp, synthetic construct
  source 1..645: mol_type = other DNA
cagatcgtgtctgccgaagcctggggcagagccgattgcggctttaccagcgagagctaccagcagggcgtgctgagcgccaccatcctgtacgagatcctgctgggcaaggccaccctgtacgccgtgctggtgtctgccctggtgctgatggctatggtcaagcggaaggacagccggggaaggagtaagaggagcaggctcctgcacagtgactacatgaacatgactccacgccgccccggacccacccgcaagcattaccagccctatgccccaccacgcgacttcgcagcctatcgctccagagtgaagttcagcagaagcgccgacgcccctgcctaccagcagggacagaaccaactgtacaacgagctgaacctgggcagacgggaagagtacgacgtgctggacaagcggagaggcagggaccctgagatgggcggaaagccccagcggagaaagaacccccaggaaggactgtataacgaactccagaaagacaagatggccgaagcctacagcgagatcggcatgaagggcgagcggagaagaggcaagggccacgatggcctgtaccagggcctgagcaccgccaccaaggacacctatgacgccctgcacatgcaggccctgcctccaaga

SEQ ID NO: 25742 - DNA, 642 bp, synthetic construct
  source 1..642: mol_type = other DNA
atcgtgtctgccgaagcctggggcagagccgattgcggctttaccagcgagagctaccagcagggcgtgctgagcgccaccatcctgtacgagatcctgctgggcaaggccaccctgtacgccgtgctggtgtctgccctggtgctgatggctatggtcaagcggaaggacagccggggaaggagtaagaggagcaggctcctgcacagtgactacatgaacatgactccacgccgccccggacccacccgcaagcattaccagccctatgccccaccacgcgacttcgcagcctatcgctccagagtgaagttcagcagaagcgccgacgcccctgcctaccagcagggacagaaccaactgtacaacgagctgaacctgggcagacgggaagagtacgacgtgctggacaagcggagaggcagggaccctgagatgggcggaaagccccagcggagaaagaacccccaggaaggactgtataacgaactccagaaagacaagatggccgaagcctacagcgagatcggcatgaagggcgagcggagaagaggcaagggccacgatggcctgtaccagggcctgagcaccgccaccaaggacacctatgacgccctgcacatgcaggccctgcctccaaga

SEQ ID NO: 25743 - DNA, 639 bp, synthetic construct
  source 1..639: mol_type = other DNA
gtgtctgccgaagcctggggcagagccgattgcggctttaccagcgagagctaccagcagggcgtgctgagcgccaccatcctgtacgagatcctgctgggcaaggccaccctgtacgccgtgctggtgtctgccctggtgctgatggctatggtcaagcggaaggacagccggggaaggagtaagaggagcaggctcctgcacagtgactacatgaacatgactccacgccgccccggacccacccgcaagcattaccagccctatgccccaccacgcgacttcgcagcctatcgctccagagtgaagttcagcagaagcgccgacgcccctgcctaccagcagggacagaaccaactgtacaacgagctgaacctgggcagacgggaagagtacgacgtgctggacaagcggagaggcagggaccctgagatgggcggaaagccccagcggagaaagaacccccaggaaggactgtataacgaactccagaaagacaagatggccgaagcctacagcgagatcggcatgaagggcgagcggagaagaggcaagggccacgatggcctgtaccagggcctgagcaccgccaccaaggacacctatgacgccctgcacatgcaggccctgcctccaaga

SEQ ID NO: 25744 - DNA, 636 bp, synthetic construct
  source 1..636: mol_type = other DNA
tctgccgaagcctggggcagagccgattgcggctttaccagcgagagctaccagcagggcgtgctgagcgccaccatcctgtacgagatcctgctgggcaaggccaccctgtacgccgtgctggtgtctgccctggtgctgatggctatggtcaagcggaaggacagccggggaaggagtaagaggagcaggctcctgcacagtgactacatgaacatgactccacgccgccccggacccacccgcaagcattaccagccctatgccccaccacgcgacttcgcagcctatcgctccagagtgaagttcagcagaagcgccgacgcccctgcctaccagcagggacagaaccaactgtacaacgagctgaacctgggcagacgggaagagtacgacgtgctggacaagcggagaggcagggaccctgagatgggcggaaagccccagcggagaaagaacccccaggaaggactgtataacgaactccagaaagacaagatggccgaagcctacagcgagatcggcatgaagggcgagcggagaagaggcaagggccacgatggcctgtaccagggcctgagcaccgccaccaaggacacctatgacgccctgcacatgcaggccctgcctccaaga

SEQ ID NO: 25745 - DNA, 633 bp, synthetic construct
  source 1..633: mol_type = other DNA
gccgaagcctggggcagagccgattgcggctttaccagcgagagctaccagcagggcgtgctgagcgccaccatcctgtacgagatcctgctgggcaaggccaccctgtacgccgtgctggtgtctgccctggtgctgatggctatggtcaagcggaaggacagccggggaaggagtaagaggagcaggctcctgcacagtgactacatgaacatgactccacgccgccccggacccacccgcaagcattaccagccctatgccccaccacgcgacttcgcagcctatcgctccagagtgaagttcagcagaagcgccgacgcccctgcctaccagcagggacagaaccaactgtacaacgagctgaacctgggcagacgggaagagtacgacgtgctggacaagcggagaggcagggaccctgagatgggcggaaagccccagcggagaaagaacccccaggaaggactgtataacgaactccagaaagacaagatggccgaagcctacagcgagatcggcatgaagggcgagcggagaagaggcaagggccacgatggcctgtaccagggcctgagcaccgccaccaaggacacctatgacgccctgcacatgcaggccctgcctccaaga

SEQ ID NO: 25746 - DNA, 630 bp, synthetic construct
  source 1..630: mol_type = other DNA
gaagcctggggcagagccgattgcggctttaccagcgagagctaccagcagggcgtgctgagcgccaccatcctgtacgagatcctgctgggcaaggccaccctgtacgccgtgctggtgtctgccctggtgctgatggctatggtcaagcggaaggacagccggggaaggagtaagaggagcaggctcctgcacagtgactacatgaacatgactccacgccgccccggacccacccgcaagcattaccagccctatgccccaccacgcgacttcgcagcctatcgctccagagtgaagttcagcagaagcgccgacgcccctgcctaccagcagggacagaaccaactgtacaacgagctgaacctgggcagacgggaagagtacgacgtgctggacaagcggagaggcagggaccctgagatgggcggaaagccccagcggagaaagaacccccaggaaggactgtataacgaactccagaaagacaagatggccgaagcctacagcgagatcggcatgaagggcgagcggagaagaggcaagggccacgatggcctgtaccagggcctgagcaccgccaccaaggacacctatgacgccctgcacatgcaggccctgcctccaaga

SEQ ID NO: 25747 - DNA, 627 bp, synthetic construct
  source 1..627: mol_type = other DNA
gcctggggcagagccgattgcggctttaccagcgagagctaccagcagggcgtgctgagcgccaccatcctgtacgagatcctgctgggcaaggccaccctgtacgccgtgctggtgtctgccctggtgctgatggctatggtcaagcggaaggacagccggggaaggagtaagaggagcaggctcctgcacagtgactacatgaacatgactccacgccgccccggacccacccgcaagcattaccagccctatgccccaccacgcgacttcgcagcctatcgctccagagtgaagttcagcagaagcgccgacgcccctgcctaccagcagggacagaaccaactgtacaacgagctgaacctgggcagacgggaagagtacgacgtgctggacaagcggagaggcagggaccctgagatgggcggaaagccccagcggagaaagaacccccaggaaggactgtataacgaactccagaaagacaagatggccgaagcctacagcgagatcggcatgaagggcgagcggagaagaggcaagggccacgatggcctgtaccagggcctgagcaccgccaccaaggacacctatgacgccctgcacatgcaggccctgcctccaaga

SEQ ID NO: 25748 - DNA, 624 bp, synthetic construct
  source 1..624: mol_type = other DNA
tggggcagagccgattgcggctttaccagcgagagctaccagcagggcgtgctgagcgccaccatcctgtacgagatcctgctgggcaaggccaccctgtacgccgtgctggtgtctgccctggtgctgatggctatggtcaagcggaaggacagccggggaaggagtaagaggagcaggctcctgcacagtgactacatgaacatgactccacgccgccccggacccacccgcaagcattaccagccctatgccccaccacgcgacttcgcagcctatcgctccagagtgaagttcagcagaagcgccgacgcccctgcctaccagcagggacagaaccaactgtacaacgagctgaacctgggcagacgggaagagtacgacgtgctggacaagcggagaggcagggaccctgagatgggcggaaagccccagcggagaaagaacccccaggaaggactgtataacgaactccagaaagacaagatggccgaagcctacagcgagatcggcatgaagggcgagcggagaagaggcaagggccacgatggcctgtaccagggcctgagcaccgccaccaaggacacctatgacgccctgcacatgcaggccctgcctccaaga

SEQ ID NO: 25749 - DNA, 621 bp, synthetic construct; identical to SEQ ID NO: 25291
  source 1..621: mol_type = other DNA

SEQ ID NO: 25750 - DNA, 981 bp, synthetic construct; identical to SEQ ID NO: 25281
  source 1..981: mol_type = other DNA

SEQ ID NO: 25751 - DNA, 978 bp, synthetic construct
  source 1..978: mol_type = other DNA
aagcagctggacgccgacgtgtcccccaagcctaccatcttcctgccctctatcgccgagacaaagctccagaaggccggcacctacctgtgcctgctggaaaagttcttcccagatgtgattaagatccactggcaggaaaagaagtccaacaccatcctgggcagccaggaaggcaacaccatgaagaccaacgacacctacatgaagttcagctggctgaccgtgcccgagaagtccctggacaaagaacacagatgcatcgtgcggcacgaaaacaacaagaacggcgtggaccaggaaatcatcttcccacccatcaagaccgatgtgattacaatggaccccaaggacaactgctccaaggacgccaacgataccctgctgctccagctgaccaacaccagcgcctactacatgtacttgttgctgctgctgaagtccgtggtgtacttcgccatcatcacatgctgcctgctgcggagaaccgccttctgctgcaacggcgagaagtctaggagtaagaggagcaggctcctgcacagtgactacatgaacatgactccacgccgccccggacccacccgcaagcattaccagccctatgccccaccacgcgacttcgcagcctatcgctccagagtgaagttcagcagaagcgccgacgcccctgcctaccagcagggacagaaccaactgtacaacgagctgaacctgggcagacgggaagagtacgacgtgctggacaagcggagaggcagggaccctgagatgggcggaaagccccagcggagaaagaacccccaggaaggactgtataacgaactccagaaagacaagatggccgaagcctacagcgagatcggcatgaagggcgagcggagaagaggcaagggccacgatggcctgtaccagggcctgagcaccgccaccaaggacacctatgacgccctgcacatgcaggccctgcctccaaga

SEQ ID NO: 25752 - DNA, 975 bp, synthetic construct
  source 1..975: mol_type = other DNA
cagctggacgccgacgtgtcccccaagcctaccatcttcctgccctctatcgccgagacaaagctccagaaggccggcacctacctgtgcctgctggaaaagttcttcccagatgtgattaagatccactggcaggaaaagaagtccaacaccatcctgggcagccaggaaggcaacaccatgaagaccaacgacacctacatgaagttcagctggctgaccgtgcccgagaagtccctggacaaagaacacagatgcatcgtgcggcacgaaaacaacaagaacggcgtggaccaggaaatcatcttcccacccatcaagaccgatgtgattacaatggaccccaaggacaactgctccaaggacgccaacgataccctgctgctccagctgaccaacaccagcgcctactacatgtacttgttgctgctgctgaagtccgtggtgtacttcgccatcatcacatgctgcctgctgcggagaaccgccttctgctgcaacggcgagaagtctaggagtaagaggagcaggctcctgcacagtgactacatgaacatgactccacgccgccccggacccacccgcaagcattaccagccctatgccccaccacgcgacttcgcagcctatcgctccagagtgaagttcagcagaagcgccgacgcccctgcctaccagcagggacagaaccaactgtacaacgagctgaacctgggcagacgggaagagtacgacgtgctggacaagcggagaggcagggaccctgagatgggcggaaagccccagcggagaaagaacccccaggaaggactgtataacgaactccagaaagacaagatggccgaagcctacagcgagatcggcatgaagggcgagcggagaagaggcaagggccacgatggcctgtaccagggcctgagcaccgccaccaaggacacctatgacgccctgcacatgcaggccctgcctccaaga

SEQ ID NO: 25753 - DNA, 972 bp, synthetic construct
  source 1..972: mol_type = other DNA
ctggacgccgacgtgtcccccaagcctaccatcttcctgccctctatcgccgagacaaagctccagaaggccggcacctacctgtgcctgctggaaaagttcttcccagatgtgattaagatccactggcaggaaaagaagtccaacaccatcctgggcagccaggaaggcaacaccatgaagaccaacgacacctacatgaagttcagctggctgaccgtgcccgagaagtccctggacaaagaacacagatgcatcgtgcggcacgaaaacaacaagaacggcgtggaccaggaaatcatcttcccacccatcaagaccgatgtgattacaatggaccccaaggacaactgctccaaggacgccaacgataccctgctgctccagctgaccaacaccagcgcctactacatgtacttgttgctgctgctgaagtccgtggtgtacttcgccatcatcacatgctgcctgctgcggagaaccgccttctgctgcaacggcgagaagtctaggagtaagaggagcaggctcctgcacagtgactacatgaacatgactccacgccgccccggacccacccgcaagcattaccagccctatgccccaccacgcgacttcgcagcctatcgctccagagtgaagttcagcagaagcgccgacgcccctgcctaccagcagggacagaaccaactgtacaacgagctgaacctgggcagacgggaagagtacgacgtgctggacaagcggagaggcagggaccctgagatgggcggaaagccccagcggagaaagaacccccaggaaggactgtataacgaactccagaaagacaagatggccgaagcctacagcgagatcggcatgaagggcgagcggagaagaggcaagggccacgatggcctgtaccagggcctgagcaccgccaccaaggacacctatgacgccctgcacatgcaggccctgcctccaaga

SEQ ID NO: 25754 - DNA, 969 bp, synthetic construct
  source 1..969: mol_type = other DNA
gacgccgacgtgtcccccaagcctaccatcttcctgccctctatcgccgagacaaagctccagaaggccggcacctacctgtgcctgctggaaaagttcttcccagatgtgattaagatccactggcaggaaaagaagtccaacaccatcctgggcagccaggaaggcaacaccatgaagaccaacgacacctacatgaagttcagctggctgaccgtgcccgagaagtccctggacaaagaacacagatgcatcgtgcggcacgaaaacaacaagaacggcgtggaccaggaaatcatcttcccacccatcaagaccgatgtgattacaatggaccccaaggacaactgctccaaggacgccaacgataccctgctgctccagctgaccaacaccagcgcctactacatgtacttgttgctgctgctgaagtccgtggtgtacttcgccatcatcacatgctgcctgctgcggagaaccgccttctgctgcaacggcgagaagtctaggagtaagaggagcaggctcctgcacagtgactacatgaacatgactccacgccgccccggacccacccgcaagcattaccagccctatgccccaccacgcgacttcgcagcctatcgctccagagtgaagttcagcagaagcgccgacgcccctgcctaccagcagggacagaaccaactgtacaacgagctgaacctgggcagacgggaagagtacgacgtgctggacaagcggagaggcagggaccctgagatgggcggaaagccccagcggagaaagaacccccaggaaggactgtataacgaactccagaaagacaagatggccgaagcctacagcgagatcggcatgaagggcgagcggagaagaggcaagggccacgatggcctgtaccagggcctgagcaccgccaccaaggacacctatgacgccctgcacatgcaggccctgcctccaaga

SEQ ID NO: 25755 - DNA, 966 bp, synthetic construct; identical to SEQ ID NO: 25294
  source 1..966: mol_type = other DNA

SEQ ID NO: 25756 - DNA, 963 bp, synthetic construct
  source 1..963: mol_type = other DNA
gacgtgtcccccaagcctaccatcttcctgccctctatcgccgagacaaagctccagaaggccggcacctacctgtgcctgctggaaaagttcttcccagatgtgattaagatccactggcaggaaaagaagtccaacaccatcctgggcagccaggaaggcaacaccatgaagaccaacgacacctacatgaagttcagctggctgaccgtgcccgagaagtccctggacaaagaacacagatgcatcgtgcggcacgaaaacaacaagaacggcgtggaccaggaaatcatcttcccacccatcaagaccgatgtgattacaatggaccccaaggacaactgctccaaggacgccaacgataccctgctgctccagctgaccaacaccagcgcctactacatgtacttgttgctgctgctgaagtccgtggtgtacttcgccatcatcacatgctgcctgctgcggagaaccgccttctgctgcaacggcgagaagtctaggagtaagaggagcaggctcctgcacagtgactacatgaacatgactccacgccgccccggacccacccgcaagcattaccagccctatgccccaccacgcgacttcgcagcctatcgctccagagtgaagttcagcagaagcgccgacgcccctgcctaccagcagggacagaaccaactgtacaacgagctgaacctgggcagacgggaagagtacgacgtgctggacaagcggagaggcagggaccctgagatgggcggaaagccccagcggagaaagaacccccaggaaggactgtataacgaactccagaaagacaagatggccgaagcctacagcgagatcggcatgaagggcgagcggagaagaggcaagggccacgatggcctgtaccagggcctgagcaccgccaccaaggacacctatgacgccctgcacatgcaggccctgcctccaaga

SEQ ID NO: 25757 - DNA, 960 bp, synthetic construct; identical to SEQ ID NO: 25295
  source 1..960: mol_type = other DNA

SEQ ID NO: 25758 - DNA, 957 bp, synthetic construct
  source 1..957: mol_type = other DNA
tcccccaagcctaccatcttcctgccctctatcgccgagacaaagctccagaaggccggcacctacctgtgcctgctggaaaagttcttcccagatgtgattaagatccactggcaggaaaagaagtccaacaccatcctgggcagccaggaaggcaacaccatgaagaccaacgacacctacatgaagttcagctggctgaccgtgcccgagaagtccctggacaaagaacacagatgcatcgtgcggcacgaaaacaacaagaacggcgtggaccaggaaatcatcttcccacccatcaagaccgatgtgattacaatggaccccaaggacaactgctccaaggacgccaacgataccctgctgctccagctgaccaacaccagcgcctactacatgtacttgttgctgctgctgaagtccgtggtgtacttcgccatcatcacatgctgcctgctgcggagaaccgccttctgctgcaacggcgagaagtctaggagtaagaggagcaggctcctgcacagtgactacatgaacatgactccacgccgccccggacccacccgcaagcattaccagccctatgccccaccacgcgacttcgcagcctatcgctccagagtgaagttcagcagaagcgccgacgcccctgcctaccagcagggacagaaccaactgtacaacgagctgaacctgggcagacgggaagagtacgacgtgctggacaagcggagaggcagggaccctgagatgggcggaaagccccagcggagaaagaacccccaggaaggactgtataacgaactccagaaagacaagatggccgaagcctacagcgagatcggcatgaagggcgagcggagaagaggcaagggccacgatggcctgtaccagggcctgagcaccgccaccaaggacacctatgacgccctgcacatgcaggccctgcctccaaga

SEQ ID NO: 25759 - DNA, 954 bp, synthetic construct
  source 1..954: mol_type = other DNA
cccaagcctaccatcttcctgccctctatcgccgagacaaagctccagaaggccggcacctacctgtgcctgctggaaaagttcttcccagatgtgattaagatccactggcaggaaaagaagtccaacaccatcctgggcagccaggaaggcaacaccatgaagaccaacgacacctacatgaagttcagctggctgaccgtgcccgagaagtccctggacaaagaacacagatgcatcgtgcggcacgaaaacaacaagaacggcgtggaccaggaaatcatcttcccacccatcaagaccgatgtgattacaatggaccccaaggacaactgctccaaggacgccaacgataccctgctgctccagctgaccaacaccagcgcctactacatgtacttgttgctgctgctgaagtccgtggtgtacttcgccatcatcacatgctgcctgctgcggagaaccgccttctgctgcaacggcgagaagtctaggagtaagaggagcaggctcctgcacagtgactacatgaacatgactccacgccgccccggacccacccgcaagcattaccagccctatgccccaccacgcgacttcgcagcctatcgctccagagtgaagttcagcagaagcgccgacgcccctgcctaccagcagggacagaaccaactgtacaacgagctgaacctgggcagacgggaagagtacgacgtgctggacaagcggagaggcagggaccctgagatgggcggaaagccccagcggagaaagaacccccaggaaggactgtataacgaactccagaaagacaagatggccgaagcctacagcgagatcggcatgaagggcgagcggagaagaggcaagggccacgatggcctgtaccagggcctgagcaccgccaccaaggacacctatgacgccctgcacatgcaggccctgcctccaaga

SEQ ID NO: 25760 - DNA, 951 bp, synthetic construct
  source 1..951: mol_type = other DNA
aagcctaccatcttcctgccctctatcgccgagacaaagctccagaaggccggcacctacctgtgcctgctggaaaagttcttcccagatgtgattaagatccactggcaggaaaagaagtccaacaccatcctgggcagccaggaaggcaacaccatgaagaccaacgacacctacatgaagttcagctggctgaccgtgcccgagaagtccctggacaaagaacacagatgcatcgtgcggcacgaaaacaacaagaacggcgtggaccaggaaatcatcttcccacccatcaagaccgatgtgattacaatggaccccaaggacaactgctccaaggacgccaacgataccctgctgctccagctgaccaacaccagcgcctactacatgtacttgttgctgctgctgaagtccgtggtgtacttcgccatcatcacatgctgcctgctgcggagaaccgccttctgctgcaacggcgagaagtctaggagtaagaggagcaggctcctgcacagtgactacatgaacatgactccacgccgccccggacccacccgcaagcattaccagccctatgccccaccacgcgacttcgcagcctatcgctccagagtgaagttcagcagaagcgccgacgcccctgcctaccagcagggacagaaccaactgtacaacgagctgaacctgggcagacgggaagagtacgacgtgctggacaagcggagaggcagggaccctgagatgggcggaaagccccagcggagaaagaacccccaggaaggactgtataacgaactccagaaagacaagatggccgaagcctacagcgagatcggcatgaagggcgagcggagaagaggcaagggccacgatggcctgtaccagggcctgagcaccgccaccaaggacacctatgacgccctgcacatgcaggccctgcctccaaga

SEQ ID NO: 25761 - DNA, 948 bp, synthetic construct
  source 1..948: mol_type = other DNA
cctaccatcttcctgccctctatcgccgagacaaagctccagaaggccggcacctacctgtgcctgctggaaaagttcttcccagatgtgattaagatccactggcaggaaaagaagtccaacaccatcctgggcagccaggaaggcaacaccatgaagaccaacgacacctacatgaagttcagctggctgaccgtgcccgagaagtccctggacaaagaacacagatgcatcgtgcggcacgaaaacaacaagaacggcgtggaccaggaaatcatcttcccacccatcaagaccgatgtgattacaatggaccccaaggacaactgctccaaggacgccaacgataccctgctgctccagctgaccaacaccagcgcctactacatgtacttgttgctgctgctgaagtccgtggtgtacttcgccatcatcacatgctgcctgctgcggagaaccgccttctgctgcaacggcgagaagtctaggagtaagaggagcaggctcctgcacagtgactacatgaacatgactccacgccgccccggacccacccgcaagcattaccagccctatgccccaccacgcgacttcgcagcctatcgctccagagtgaagttcagcagaagcgccgacgcccctgcctaccagcagggacagaaccaactgtacaacgagctgaacctgggcagacgggaagagtacgacgtgctggacaagcggagaggcagggaccctgagatgggcggaaagccccagcggagaaagaacccccaggaaggactgtataacgaactccagaaagacaagatggccgaagcctacagcgagatcggcatgaagggcgagcggagaagaggcaagggccacgatggcctgtaccagggcctgagcaccgccaccaaggacacctatgacgccctgcacatgcaggccctgcctccaaga

SEQ ID NO: 25762 - DNA, 945 bp, synthetic construct; identical to SEQ ID NO: 25296
  source 1..945: mol_type = other DNA

SEQ ID NO: 25763 - DNA, 942 bp, synthetic construct
  source 1..942: mol_type = other DNA
atcttcctgccctctatcgccgagacaaagctccagaaggccggcacctacctgtgcctgctggaaaagttcttcccagatgtgattaagatccactggcaggaaaagaagtccaacaccatcctgggcagccaggaaggcaacaccatgaagaccaacgacacctacatgaagttcagctggctgaccgtgcccgagaagtccctggacaaagaacacagatgcatcgtgcggcacgaaaacaacaagaacggcgtggaccaggaaatcatcttcccacccatcaagaccgatgtgattacaatggaccccaaggacaactgctccaaggacgccaacgataccctgctgctccagctgaccaacaccagcgcctactacatgtacttgttgctgctgctgaagtccgtggtgtacttcgccatcatcacatgctgcctgctgcggagaaccgccttctgctgcaacggcgagaagtctaggagtaagaggagcaggctcctgcacagtgactacatgaacatgactccacgccgccccggacccacccgcaagcattaccagccctatgccccaccacgcgacttcgcagcctatcgctccagagtgaagttcagcagaagcgccgacgcccctgcctaccagcagggacagaaccaactgtacaacgagctgaacctgggcagacgggaagagtacgacgtgctggacaagcggagaggcagggaccctgagatgggcggaaagccccagcggagaaagaacccccaggaaggactgtataacgaactccagaaagacaagatggccgaagcctacagcgagatcggcatgaagggcgagcggagaagaggcaagggccacgatggcctgtaccagggcctgagcaccgccaccaaggacacctatgacgccctgcacatgcaggccctgcctccaaga

SEQ ID NO: 25764 - DNA, 939 bp, synthetic construct
  source 1..939: mol_type = other DNA
ttcctgccctctatcgccgagacaaagctccagaaggccggcacctacctgtgcctgctggaaaagttcttcccagatgtgattaagatccactggcaggaaaagaagtccaacaccatcctgggcagccaggaaggcaacaccatgaagaccaacgacacctacatgaagttcagctggctgaccgtgcccgagaagtccctggacaaagaacacagatgcatcgtgcggcacgaaaacaacaagaacggcgtggaccaggaaatcatcttcccacccatcaagaccgatgtgattacaatggaccccaaggacaactgctccaaggacgccaacgataccctgctgctccagctgaccaacaccagcgcctactacatgtacttgttgctgctgctgaagtccgtggtgtacttcgccatcatcacatgctgcctgctgcggagaaccgccttctgctgcaacggcgagaagtctaggagtaagaggagcaggctcctgcacagtgactacatgaacatgactccacgccgccccggacccacccgcaagcattaccagccctatgccccaccacgcgacttcgcagcctatcgctccagagtgaagttcagcagaagcgccgacgcccctgcctaccagcagggacagaaccaactgtacaacgagctgaacctgggcagacgggaagagtacgacgtgctggacaagcggagaggcagggaccctgagatgggcggaaagccccagcggagaaagaacccccaggaaggactgtataacgaactccagaaagacaagatggccgaagcctacagcgagatcggcatgaagggcgagcggagaagaggcaagggccacgatggcctgtaccagggcctgagcaccgccaccaaggacacctatgacgccctgcacatgcaggccctgcctccaaga

SEQ ID NO: 25765 - DNA, 936 bp, synthetic construct
  source 1..936: mol_type = other DNA
ctgccctctatcgccgagacaaagctccagaaggccggcacctacctgtgcctgctggaaaagttcttcccagatgtgattaagatccactggcaggaaaagaagtccaacaccatcctgggcagccaggaaggcaacaccatgaagaccaacgacacctacatgaagttcagctggctgaccgtgcccgagaagtccctggacaaagaacacagatgcatcgtgcggcacgaaaacaacaagaacggcgtggaccaggaaatcatcttcccacccatcaagaccgatgtgattacaatggaccccaaggacaactgctccaaggacgccaacgataccctgctgctccagctgaccaacaccagcgcctactacatgtacttgttgctgctgctgaagtccgtggtgtacttcgccatcatcacatgctgcctgctgcggagaaccgccttctgctgcaacggcgagaagtctaggagtaagaggagcaggctcctgcacagtgactacatgaacatgactccacgccgccccggacccacccgcaagcattaccagccctatgccccaccacgcgacttcgcagcctatcgctccagagtgaagttcagcagaagcgccgacgcccctgcctaccagcagggacagaaccaactgtacaacgagctgaacctgggcagacgggaagagtacgacgtgctggacaagcggagaggcagggaccctgagatgggcggaaagccccagcggagaaagaacccccaggaaggactgtataacgaactccagaaagacaagatggccgaagcctacagcgagatcggcatgaagggcgagcggagaagaggcaagggccacgatggcctgtaccagggcctgagcaccgccaccaaggacacctatgacgccctgcacatgcaggccctgcctccaaga

SEQ ID NO: 25766 - DNA, 933 bp, synthetic construct
  source 1..933: mol_type = other DNA
ccctctatcgccgagacaaagctccagaaggccggcacctacctgtgcctgctggaaaagttcttcccagatgtgattaagatccactggcaggaaaagaagtccaacaccatcctgggcagccaggaaggcaacaccatgaagaccaacgacacctacatgaagttcagctggctgaccgtgcccgagaagtccctggacaaagaacacagatgcatcgtgcggcacgaaaacaacaagaacggcgtggaccaggaaatcatcttcccacccatcaagaccgatgtgattacaatggaccccaaggacaactgctccaaggacgccaacgataccctgctgctccagctgaccaacaccagcgcctactacatgtacttgttgctgctgctgaagtccgtggtgtacttcgccatcatcacatgctgcctgctgcggagaaccgccttctgctgcaacggcgagaagtctaggagtaagaggagcaggctcctgcacagtgactacatgaacatgactccacgccgccccggacccacccgcaagcattaccagccctatgccccaccacgcgacttcgcagcctatcgctccagagtgaagttcagcagaagcgccgacgcccctgcctaccagcagggacagaaccaactgtacaacgagctgaacctgggcagacgggaagagtacgacgtgctggacaagcggagaggcagggaccctgagatgggcggaaagccccagcggagaaagaacccccaggaaggactgtataacgaactccagaaagacaagatggccgaagcctacagcgagatcggcatgaagggcgagcggagaagaggcaagggccacgatggcctgtaccagggcctgagcaccgccaccaaggacacctatgacgccctgcacatgcaggccctgcctccaaga

SEQ ID NO: 25767 - DNA, 930 bp, synthetic construct
  source 1..930: mol_type = other DNA
tctatcgccgagacaaagctccagaaggccggcacctacctgtgcctgctggaaaagttcttcccagatgtgattaagatccactggcaggaaaagaagtccaacaccatcctgggcagccaggaaggcaacaccatgaagaccaacgacacctacatgaagttcagctggctgaccgtgcccgagaagtccctggacaaagaacacagatgcatcgtgcggcacgaaaacaacaagaacggcgtggaccaggaaatcatcttcccacccatcaagaccgatgtgattacaatggaccccaaggacaactgctccaaggacgccaacgataccctgctgctccagctgaccaacaccagcgcctactacatgtacttgttgctgctgctgaagtccgtggtgtacttcgccatcatcacatgctgcctgctgcggagaaccgccttctgctgcaacggcgagaagtctaggagtaagaggagcaggctcctgcacagtgactacatgaacatgactccacgccgccccggacccacccgcaagcattaccagccctatgccccaccacgcgacttcgcagcctatcgctccagagtgaagttcagcagaagcgccgacgcccctgcctaccagcagggacagaaccaactgtacaacgagctgaacctgggcagacgggaagagtacgacgtgctggacaagcggagaggcagggaccctgagatgggcggaaagccccagcggagaaagaacccccaggaaggactgtataacgaactccagaaagacaagatggccgaagcctacagcgagatcggcatgaagggcgagcggagaagaggcaagggccacgatggcctgtaccagggcctgagcaccgccaccaaggacacctatgacgccctgcacatgcaggccctgcctccaaga

SEQ ID NO: 25768 - DNA, 927 bp, synthetic construct
  source 1..927: mol_type = other DNA
atcgccgagacaaagctccagaaggccggcacctacctgtgcctgctggaaaagttcttcccagatgtgattaagatccactggcaggaaaagaagtccaacaccatcctgggcagccaggaaggcaacaccatgaagaccaacgacacctacatgaagttcagctggctgaccgtgcccgagaagtccctggacaaagaacacagatgcatcgtgcggcacgaaaacaacaagaacggcgtggaccaggaaatcatcttcccacccatcaagaccgatgtgattacaatggaccccaaggacaactgctccaaggacgccaacgataccctgctgctccagctgaccaacaccagcgcctactacatgtacttgttgctgctgctgaagtccgtggtgtacttcgccatcatcacatgctgcctgctgcggagaaccgccttctgctgcaacggcgagaagtctaggagtaagaggagcaggctcctgcacagtgactacatgaacatgactccacgccgccccggacccacccgcaagcattaccagccctatgccccaccacgcgacttcgcagcctatcgctccagagtgaagttcagcagaagcgccgacgcccctgcctaccagcagggacagaaccaactgtacaacgagctgaacctgggcagacgggaagagtacgacgtgctggacaagcggagaggcagggaccctgagatgggcggaaagccccagcggagaaagaacccccaggaaggactgtataacgaactccagaaagacaagatggccgaagcctacagcgagatcggcatgaagggcgagcggagaagaggcaagggccacgatggcctgtaccagggcctgagcaccgccaccaaggacacctatgacgccctgcacatgcaggccctgcctccaaga

SEQ ID NO: 25769 - DNA, 924 bp, synthetic construct
  source 1..924: mol_type = other DNA
gccgagacaaagctccagaaggccggcacctacctgtgcctgctggaaaagttcttcccagatgtgattaagatccactggcaggaaaagaagtccaacaccatcctgggcagccaggaaggcaacaccatgaagaccaacgacacctacatgaagttcagctggctgaccgtgcccgagaagtccctggacaaagaacacagatgcatcgtgcggcacgaaaacaacaagaacggcgtggaccaggaaatcatcttcccacccatcaagaccgatgtgattacaatggaccccaaggacaactgctccaaggacgccaacgataccctgctgctccagctgaccaacaccagcgcctactacatgtacttgttgctgctgctgaagtccgtggtgtacttcgccatcatcacatgctgcctgctgcggagaaccgccttctgctgcaacggcgagaagtctaggagtaagaggagcaggctcctgcacagtgactacatgaacatgactccacgccgccccggacccacccgcaagcattaccagccctatgccccaccacgcgacttcgcagcctatcgctccagagtgaagttcagcagaagcgccgacgcccctgcctaccagcagggacagaaccaactgtacaacgagctgaacctgggcagacgggaagagtacgacgtgctggacaagcggagaggcagggaccctgagatgggcggaaagccccagcggagaaagaacccccaggaaggactgtataacgaactccagaaagacaagatggccgaagcctacagcgagatcggcatgaagggcgagcggagaagaggcaagggccacgatggcctgtaccagggcctgagcaccgccaccaaggacacctatgacgccctgcacatgcaggccctgcctccaaga

SEQ ID NO: 25770 - DNA, 921 bp, synthetic construct
  source 1..921: mol_type = other DNA
gagacaaagctccagaaggccggcacctacctgtgcctgctggaaaagttcttcccagatgtgattaagatccactggcaggaaaagaagtccaacaccatcctgggcagccaggaaggcaacaccatgaagaccaacgacacctacatgaagttcagctggctgaccgtgcccgagaagtccctggacaaagaacacagatgcatcgtgcggcacgaaaacaacaagaacggcgtggaccaggaaatcatcttcccacccatcaagaccgatgtgattacaatggaccccaaggacaactgctccaaggacgccaacgataccctgctgctccagctgaccaacaccagcgcctactacatgtacttgttgctgctgctgaagtccgtggtgtacttcgccatcatcacatgctgcctgctgcggagaaccgccttctgctgcaacggcgagaagtctaggagtaagaggagcaggctcctgcacagtgactacatgaacatgactccacgccgccccggacccacccgcaagcattaccagccctatgccccaccacgcgacttcgcagcctatcgctccagagtgaagttcagcagaagcgccgacgcccctgcctaccagcagggacagaaccaactgtacaacgagctgaacctgggcagacgggaagagtacgacgtgctggacaagcggagaggcagggaccctgagatgggcggaaagccccagcggagaaagaacccccaggaaggactgtataacgaactccagaaagacaagatggccgaagcctacagcgagatcggcatgaagggcgagcggagaagaggcaagggccacgatggcctgtaccagggcctgagcaccgccaccaaggacacctatgacgccctgcacatgcaggccctgcctccaaga

SEQ ID NO: 25771 - DNA, 918 bp, synthetic construct
  source 1..918: mol_type = other DNA
acaaagctccagaaggccggcacctacctgtgcctgctggaaaagttcttcccagatgtgattaagatccactggcaggaaaagaagtccaacaccatcctgggcagccaggaaggcaacaccatgaagaccaacgacacctacatgaagttcagctggctgaccgtgcccgagaagtccctggacaaagaacacagatgcatcgtgcggcacgaaaacaacaagaacggcgtggaccaggaaatcatcttcccacccatcaagaccgatgtgattacaatggaccccaaggacaactgctccaaggacgccaacgataccctgctgctccagctgaccaacaccagcgcctactacatgtacttgttgctgctgctgaagtccgtggtgtacttcgccatcatcacatgctgcctgctgcggagaaccgccttctgctgcaacggcgagaagtctaggagtaagaggagcaggctcctgcacagtgactacatgaacatgactccacgccgccccggacccacccgcaagcattaccagccctatgccccaccacgcgacttcgcagcctatcgctccagagtgaagttcagcagaagcgccgacgcccctgcctaccagcagggacagaaccaactgtacaacgagctgaacctgggcagacgggaagagtacgacgtgctggacaagcggagaggcagggaccctgagatgggcggaaagccccagcggagaaagaacccccaggaaggactgtataacgaactccagaaagacaagatggccgaagcctacagcgagatcggcatgaagggcgagcggagaagaggcaagggccacgatggcctgtaccagggcctgagcaccgccaccaaggacacctatgacgccctgcacatgcaggccctgcctccaaga

SEQ ID NO: 25772 - DNA, 915 bp, synthetic construct
  source 1..915: mol_type = other DNA
aagctccagaaggccggcacctacctgtgcctgctggaaaagttcttcccagatgtgattaagatccactggcaggaaaagaagtccaacaccatcctgggcagccaggaaggcaacaccatgaagaccaacgacacctacatgaagttcagctggctgaccgtgcccgagaagtccctggacaaagaacacagatgcatcgtgcggcacgaaaacaacaagaacggcgtggaccaggaaatcatcttcccacccatcaagaccgatgtgattacaatggaccccaaggacaactgctccaaggacgccaacgataccctgctgctccagctgaccaacaccagcgcctactacatgtacttgttgctgctgctgaagtccgtggtgtacttcgccatcatcacatgctgcctgctgcggagaaccgccttctgctgcaacggcgagaagtctaggagtaagaggagcaggctcctgcacagtgactacatgaacatgactccacgccgccccggacccacccgcaagcattaccagccctatgccccaccacgcgacttcgcagcctatcgctccagagtgaagttcagcagaagcgccgacgcccctgcctaccagcagggacagaaccaactgtacaacgagctgaacctgggcagacgggaagagtacgacgtgctggacaagcggagaggcagggaccctgagatgggcggaaagccccagcggagaaagaacccccaggaaggactgtataacgaactccagaaagacaagatggccgaagcctacagcgagatcggcatgaagggcgagcggagaagaggcaagggccacgatggcctgtaccagggcctgagcaccgccaccaaggacacctatgacgccctgcacatgcaggccctgcctccaaga

SEQ ID NO: 25773 - DNA, 912 bp, synthetic construct
  source 1..912: mol_type = other DNA
ctccagaaggccggcacctacctgtgcctgctggaaaagttcttcccagatgtgattaagatccactggcaggaaaagaagtccaacaccatcctgggcagccaggaaggcaacaccatgaagaccaacgacacctacatgaagttcagctggctgaccgtgcccgagaagtccctggacaaagaacacagatgcatcgtgcggcacgaaaacaacaagaacggcgtggaccaggaaatcatcttcccacccatcaagaccgatgtgattacaatggaccccaaggacaactgctccaaggacgccaacgataccctgctgctccagctgaccaacaccagcgcctactacatgtacttgttgctgctgctgaagtccgtggtgtacttcgccatcatcacatgctgcctgctgcggagaaccgccttctgctgcaacggcgagaagtctaggagtaagaggagcaggctcctgcacagtgactacatgaacatgactccacgccgccccggacccacccgcaagcattaccagccctatgccccaccacgcgacttcgcagcctatcgctccagagtgaagttcagcagaagcgccgacgcccctgcctaccagcagggacagaaccaactgtacaacgagctgaacctgggcagacgggaagagtacgacgtgctggacaagcggagaggcagggaccctgagatgggcggaaagccccagcggagaaagaacccccaggaaggactgtataacgaactccagaaagacaagatggccgaagcctacagcgagatcggcatgaagggcgagcggagaagaggcaagggccacgatggcctgtaccagggcctgagcaccgccaccaaggacacctatgacgccctgcacatgcaggccctgcctccaaga

SEQ ID NO: 25774 - DNA, 909 bp, synthetic construct
  source 1..909: mol_type = other DNA
cagaaggccggcacctacctgtgcctgctggaaaagttcttcccagatgtgattaagatccactggcaggaaaagaagtccaacaccatcctgggcagccaggaaggcaacaccatgaagaccaacgacacctacatgaagttcagctggctgaccgtgcccgagaagtccctggacaaagaacacagatgcatcgtgcggcacgaaaacaacaagaacggcgtggaccaggaaatcatcttcccacccatcaagaccgatgtgattacaatggaccccaaggacaactgctccaaggacgccaacgataccctgctgctccagctgaccaacaccagcgcctactacatgtacttgttgctgctgctgaagtccgtggtgtacttcgccatcatcacatgctgcctgctgcggagaaccgccttctgctgcaacggcgagaagtctaggagtaagaggagcaggctcctgcacagtgactacatgaacatgactccacgccgccccggacccacccgcaagcattaccagccctatgccccaccacgcgacttcgcagcctatcgctccagagtgaagttcagcagaagcgccgacgcccctgcctaccagcagggacagaaccaactgtacaacgagctgaacctgggcagacgggaagagtacgacgtgctggacaagcggagaggcagggaccctgagatgggcggaaagccccagcggagaaagaacccccaggaaggactgtataacgaactccagaaagacaagatggccgaagcctacagcgagatcggcatgaagggcgagcggagaagaggcaagggccacgatggcctgtaccagggcctgagcaccgccaccaaggacacctatgacgccctgcacatgcaggccctgcctccaaga

SEQ ID NO: 25775 - DNA, 906 bp, synthetic construct
  source 1..906: mol_type = other DNA
aaggccggcacctacctgtgcctgctggaaaagttcttcccagatgtgattaagatccactggcaggaaaagaagtccaacaccatcctgggcagccaggaaggcaacaccatgaagaccaacgacacctacatgaagttcagctggctgaccgtgcccgagaagtccctggacaaagaacacagatgcatcgtgcggcacgaaaacaacaagaacggcgtggaccaggaaatcatcttcccacccatcaagaccgatgtgattacaatggaccccaaggacaactgctccaaggacgccaacgataccctgctgctccagctgaccaacaccagcgcctactacatgtacttgttgctgctgctgaagtccgtggtgtacttcgccatcatcacatgctgcctgctgcggagaaccgccttctgctgcaacggcgagaagtctaggagtaagaggagcaggctcctgcacagtgactacatgaacatgactccacgccgccccggacccacccgcaagcattaccagccctatgccccaccacgcgacttcgcagcctatcgctccagagtgaagttcagcagaagcgccgacgcccctgcctaccagcagggacagaaccaactgtacaacgagctgaacctgggcagacgggaagagtacgacgtgctggacaagcggagaggcagggaccctgagatgggcggaaagccccagcggagaaagaacccccaggaaggactgtataacgaactccagaaagacaagatggccgaagcctacagcgagatcggcatgaagggcgagcggagaagaggcaagggccacgatggcctgtaccagggcctgagcaccgccaccaaggacacctatgacgccctgcacatgcaggccctgcctccaaga

SEQ ID NO: 25776 - DNA, 903 bp, synthetic construct
  source 1..903: mol_type = other DNA
gccggcacctacctgtgcctgctggaaaagttcttcccagatgtgattaagatccactggcaggaaaagaagtccaacaccatcctgggcagccaggaaggcaacaccatgaagaccaacgacacctacatgaagttcagctggctgaccgtgcccgagaagtccctggacaaagaacacagatgcatcgtgcggcacgaaaacaacaagaacggcgtggaccaggaaatcatcttcccacccatcaagaccgatgtgattacaatggaccccaaggacaactgctccaaggacgccaacgataccctgctgctccagctgaccaacaccagcgcctactacatgtacttgttgctgctgctgaagtccgtggtgtacttcgccatcatcacatgctgcctgctgcggagaaccgccttctgctgcaacggcgagaagtctaggagtaagaggagcaggctcctgcacagtgactacatgaacatgactccacgccgccccggacccacccgcaagcattaccagccctatgccccaccacgcgacttcgcagcctatcgctccagagtgaagttcagcagaagcgccgacgcccctgcctaccagcagggacagaaccaactgtacaacgagctgaacctgggcagacgggaagagtacgacgtgctggacaagcggagaggcagggaccctgagatgggcggaaagccccagcggagaaagaacccccaggaaggactgtataacgaactccagaaagacaagatggccgaagcctacagcgagatcggcatgaagggcgagcggagaagaggcaagggccacgatggcctgtaccagggcctgagcaccgccaccaaggacacctatgacgccctgcacatgcaggccctgcctccaaga

SEQ ID NO: 25777 - DNA, 900 bp, synthetic construct
  source 1..900: mol_type = other DNA
ggcacctacctgtgcctgctggaaaagttcttcccagatgtgattaagatccactggcaggaaaagaagtccaacaccatcctgggcagccaggaaggcaacaccatgaagaccaacgacacctacatgaagttcagctggctgaccgtgcccgagaagtccctggacaaagaacacagatgcatcgtgcggcacgaaaacaacaagaacggcgtggaccaggaaatcatcttcccacccatcaagaccgatgtgattacaatggaccccaaggacaactgctccaaggacgccaacgataccctgctgctccagctgaccaacaccagcgcctactacatgtacttgttgctgctgctgaagtccgtggtgtacttcgccatcatcacatgctgcctgctgcggagaaccgccttctgctgcaacggcgagaagtctaggagtaagaggagcaggctcctgcacagtgactacatgaacatgactccacgccgccccggacccacccgcaagcattaccagccctatgccccaccacgcgacttcgcagcctatcgctccagagtgaagttcagcagaagcgccgacgcccctgcctaccagcagggacagaaccaactgtacaacgagctgaacctgggcagacgggaagagtacgacgtgctggacaagcggagaggcagggaccctgagatgggcggaaagccccagcggagaaagaacccccaggaaggactgtataacgaactccagaaagacaagatggccgaagcctacagcgagatcggcatgaagggcgagcggagaagaggcaagggccacgatggcctgtaccagggcctgagcaccgccaccaaggacacctatgacgccctgcacatgcaggccctgcctccaaga

SEQ ID NO: 25778 - DNA, 897 bp, synthetic construct
  source 1..897: mol_type = other DNA
acctacctgtgcctgctggaaaagttcttcccagatgtgattaagatccactggcaggaaaagaagtccaacaccatcctgggcagccaggaaggcaacaccatgaagaccaacgacacctacatgaagttcagctggctgaccgtgcccgagaagtccctggacaaagaacacagatgcatcgtgcggcacgaaaacaacaagaacggcgtggaccaggaaatcatcttcccacccatcaagaccgatgtgattacaatggaccccaaggacaactgctccaaggacgccaacgataccctgctgctccagctgaccaacaccagcgcctactacatgtacttgttgctgctgctgaagtccgtggtgtacttcgccatcatcacatgctgcctgctgcggagaaccgccttctgctgcaacggcgagaagtctaggagtaagaggagcaggctcctgcacagtgactacatgaacatgactccacgccgccccggacccacccgcaagcattaccagccctatgccccaccacgcgacttcgcagcctatcgctccagagtgaagttcagcagaagcgccgacgcccctgcctaccagcagggacagaaccaactgtacaacgagctgaacctgggcagacgggaagagtacgacgtgctggacaagcggagaggcagggaccctgagatgggcggaaagccccagcggagaaagaacccccaggaaggactgtataacgaactccagaaagacaagatggccgaagcctacagcgagatcggcatgaagggcgagcggagaagaggcaagggccacgatggcctgtaccagggcctgagcaccgccaccaaggacacctatgacgccctgcacatgcaggccctgcctccaaga

SEQ ID NO: 25779 - DNA, 894 bp, synthetic construct
  source 1..894: mol_type = other DNA
tacctgtgcctgctggaaaagttcttcccagatgtgattaagatccactggcaggaaaagaagtccaacaccatcctgggcagccaggaaggcaacaccatgaagaccaacgacacctacatgaagttcagctggctgaccgtgcccgagaagtccctggacaaagaacacagatgcatcgtgcggcacgaaaacaacaagaacggcgtggaccaggaaatcatcttcccacccatcaagaccgatgtgattacaatggaccccaaggacaactgctccaaggacgccaacgataccctgctgctccagctgaccaacaccagcgcctactacatgtacttgttgctgctgctgaagtccgtggtgtacttcgccatcatcacatgctgcctgctgcggagaaccgccttctgctgcaacggcgagaagtctaggagtaagaggagcaggctcctgcacagtgactacatgaacatgactccacgccgccccggacccacccgcaagcattaccagccctatgccccaccacgcgacttcgcagcctatcgctccagagtgaagttcagcagaagcgccgacgcccctgcctaccagcagggacagaaccaactgtacaacgagctgaacctgggcagacgggaagagtacgacgtgctggacaagcggagaggcagggaccctgagatgggcggaaagccccagcggagaaagaacccccaggaaggactgtataacgaactccagaaagacaagatggccgaagcctacagcgagatcggcatgaagggcgagcggagaagaggcaagggccacgatggcctgtaccagggcctgagcaccgccaccaaggacacctatgacgccctgcacatgcaggccctgcctccaaga

SEQ ID NO: 25780 - DNA, 891 bp, synthetic construct
  source 1..891: mol_type = other DNA
ctgtgcctgctggaaaagttcttcccagatgtgattaagatccactggcaggaaaagaagtccaacaccatcctgggcagccaggaaggcaacaccatgaagaccaacgacacctacatgaagttcagctggctgaccgtgcccgagaagtccctggacaaagaacacagatgcatcgtgcggcacgaaaacaacaagaacggcgtggaccaggaaatcatcttcccacccatcaagaccgatgtgattacaatggaccccaaggacaactgctccaaggacgccaacgataccctgctgctccagctgaccaacaccagcgcctactacatgtacttgttgctgctgctgaagtccgtggtgtacttcgccatcatcacatgctgcctgctgcggagaaccgccttctgctgcaacggcgagaagtctaggagtaagaggagcaggctcctgcacagtgactacatgaacatgactccacgccgccccggacccacccgcaagcattaccagccctatgccccaccacgcgacttcgcagcctatcgctccagagtgaagttcagcagaagcgccgacgcccctgcctaccagcagggacagaaccaactgtacaacgagctgaacctgggcagacgggaagagtacgacgtgctggacaagcggagaggcagggaccctgagatgggcggaaagccccagcggagaaagaacccccaggaaggactgtataacgaactccagaaagacaagatggccgaagcctacagcgagatcggcatgaagggcgagcggagaagaggcaagggccacgatggcctgtaccagggcctgagcaccgccaccaaggacacctatgacgccctgcacatgcaggccctgcctccaaga

SEQ ID NO: 25781 - DNA, 888 bp, synthetic construct
  source 1..888: mol_type = other DNA
tgcctgctggaaaagttcttcccagatgtgattaagatccactggcaggaaaagaagtccaacaccatcctgggcagccaggaaggcaacaccatgaagaccaacgacacctacatgaagttcagctggctgaccgtgcccgagaagtccctggacaaagaacacagatgcatcgtgcggcacgaaaacaacaagaacggcgtggaccaggaaatcatcttcccacccatcaagaccgatgtgattacaatggaccccaaggacaactgctccaaggacgccaacgataccctgctgctccagctgaccaacaccagcgcctactacatgtacttgttgctgctgctgaagtccgtggtgtacttcgccatcatcacatgctgcctgctgcggagaaccgccttctgctgcaacggcgagaagtctaggagtaagaggagcaggctcctgcacagtgactacatgaacatgactccacgccgccccggacccacccgcaagcattaccagccctatgccccaccacgcgacttcgcagcctatcgctccagagtgaagttcagcagaagcgccgacgcccctgcctaccagcagggacagaaccaactgtacaacgagctgaacctgggcagacgggaagagtacgacgtgctggacaagcggagaggcagggaccctgagatgggcggaaagccccagcggagaaagaacccccaggaaggactgtataacgaactccagaaagacaagatggccgaagcctacagcgagatcggcatgaagggcgagcggagaagaggcaagggccacgatggcctgtaccagggcctgagcaccgccaccaaggacacctatgacgccctgcacatgcaggccctgcctccaaga

SEQ ID NO: 25782 - DNA, 885 bp, synthetic construct
  source 1..885: mol_type = other DNA
ctgctggaaaagttcttcccagatgtgattaagatccactggcaggaaaagaagtccaacaccatcctgggcagccaggaaggcaacaccatgaagaccaacgacacctacatgaagttcagctggctgaccgtgcccgagaagtccctggacaaagaacacagatgcatcgtgcggcacgaaaacaacaagaacggcgtggaccaggaaatcatcttcccacccatcaagaccgatgtgattacaatggaccccaaggacaactgctccaaggacgccaacgataccctgctgctccagctgaccaacaccagcgcctactacatgtacttgttgctgctgctgaagtccgtggtgtacttcgccatcatcacatgctgcctgctgcggagaaccgccttctgctgcaacggcgagaagtctaggagtaagaggagcaggctcctgcacagtgactacatgaacatgactccacgccgccccggacccacccgcaagcattaccagccctatgccccaccacgcgacttcgcagcctatcgctccagagtgaagttcagcagaagcgccgacgcccctgcctaccagcagggacagaaccaactgtacaacgagctgaacctgggcagacgggaagagtacgacgtgctggacaagcggagaggcagggaccctgagatgggcggaaagccccagcggagaaagaacccccaggaaggactgtataacgaactccagaaagacaagatggccgaagcctacagcgagatcggcatgaagggcgagcggagaagaggcaagggccacgatggcctgtaccagggcctgagcaccgccaccaaggacacctatgacgccctgcacatgcaggccctgcctccaaga

SEQ ID NO: 25783 - DNA, 882 bp, synthetic construct
  source 1..882: mol_type = other DNA
ctggaaaagttcttcccagatgtgattaagatccactggcaggaaaagaagtccaacaccatcctgggcagccaggaaggcaacaccatgaagaccaacgacacctacatgaagttcagctggctgaccgtgcccgagaagtccctggacaaagaacacagatgcatcgtgcggcacgaaaacaacaagaacggcgtggaccaggaaatcatcttcccacccatcaagaccgatgtgattacaatggaccccaaggacaactgctccaaggacgccaacgataccctgctgctccagctgaccaacaccagcgcctactacatgtacttgttgctgctgctgaagtccgtggtgtacttcgccatcatcacatgctgcctgctgcggagaaccgccttctgctgcaacggcgagaagtctaggagtaagaggagcaggctcctgcacagtgactacatgaacatgactccacgccgccccggacccacccgcaagcattaccagccctatgccccaccacgcgacttcgcagcctatcgctccagagtgaagttcagcagaagcgccgacgcccctgcctaccagcagggacagaaccaactgtacaacgagctgaacctgggcagacgggaagagtacgacgtgctggacaagcggagaggcagggaccctgagatgggcggaaagccccagcggagaaagaacccccaggaaggactgtataacgaactccagaaagacaagatggccgaagcctacagcgagatcggcatgaagggcgagcggagaagaggcaagggccacgatggcctgtaccagggcctgagcaccgccaccaaggacacctatgacgccctgcacatgcaggccctgcctccaaga

SEQ ID NO: 25784 - DNA, 879 bp, synthetic construct
  source 1..879: mol_type = other DNA
gaaaagttcttcccagatgtgattaagatccactggcaggaaaagaagtccaacaccatcctgggcagccaggaaggcaacaccatgaagaccaacgacacctacatgaagttcagctggctgaccgtgcccgagaagtccctggacaaagaacacagatgcatcgtgcggcacgaaaacaacaagaacggcgtggaccaggaaatcatcttcccacccatcaagaccgatgtgattacaatggaccccaaggacaactgctccaaggacgccaacgataccctgctgctccagctgaccaacaccagcgcctactacatgtacttgttgctgctgctgaagtccgtggtgtacttcgccatcatcacatgctgcctgctgcggagaaccgccttctgctgcaacggcgagaagtctaggagtaagaggagcaggctcctgcacagtgactacatgaacatgactccacgccgccccggacccacccgcaagcattaccagccctatgccccaccacgcgacttcgcagcctatcgctccagagtgaagttcagcagaagcgccgacgcccctgcctaccagcagggacagaaccaactgtacaacgagctgaacctgggcagacgggaagagtacgacgtgctggacaagcggagaggcagggaccctgagatgggcggaaagccccagcggagaaagaacccccaggaaggactgtataacgaactccagaaagacaagatggccgaagcctacagcgagatcggcatgaagggcgagcggagaagaggcaagggccacgatggcctgtaccagggcctgagcaccgccaccaaggacacctatgacgccctgcacatgcaggccctgcctccaaga

SEQ ID NO: 25785 - DNA, 876 bp, synthetic construct
  source 1..876: mol_type = other DNA
aagttcttcccagatgtgattaagatccactggcaggaaaagaagtccaacaccatcctgggcagccaggaaggcaacaccatgaagaccaacgacacctacatgaagttcagctggctgaccgtgcccgagaagtccctggacaaagaacacagatgcatcgtgcggcacgaaaacaacaagaacggcgtggaccaggaaatcatcttcccacccatcaagaccgatgtgattacaatggaccccaaggacaactgctccaaggacgccaacgataccctgctgctccagctgaccaacaccagcgcctactacatgtacttgttgctgctgctgaagtccgtggtgtacttcgccatcatcacatgctgcctgctgcggagaaccgccttctgctgcaacggcgagaagtctaggagtaagaggagcaggctcctgcacagtgactacatgaacatgactccacgccgccccggacccacccgcaagcattaccagccctatgccccaccacgcgacttcgcagcctatcgctccagagtgaagttcagcagaagcgccgacgcccctgcctaccagcagggacagaaccaactgtacaacgagctgaacctgggcagacgggaagagtacgacgtgctggacaagcggagaggcagggaccctgagatgggcggaaagccccagcggagaaagaacccccaggaaggactgtataacgaactccagaaagacaagatggccgaagcctacagcgagatcggcatgaagggcgagcggagaagaggcaagggccacgatggcctgtaccagggcctgagcaccgccaccaaggacacctatgacgccctgcacatgcaggccctgcctccaaga

SEQ ID NO: 25786 - DNA, 873 bp, synthetic construct
  source 1..873: mol_type = other DNA
ttcttcccagatgtgattaagatccactggcaggaaaagaagtccaacaccatcctgggcagccaggaaggcaacaccatgaagaccaacgacacctacatgaagttcagctggctgaccgtgcccgagaagtccctggacaaagaacacagatgcatcgtgcggcacgaaaacaacaagaacggcgtggaccaggaaatcatcttcccacccatcaagaccgatgtgattacaatggaccccaaggacaactgctccaaggacgccaacgataccctgctgctccagctgaccaacaccagcgcctactacatgtacttgttgctgctgctgaagtccgtggtgtacttcgccatcatcacatgctgcctgctgcggagaaccgccttctgctgcaacggcgagaagtctaggagtaagaggagcaggctcctgcacagtgactacatgaacatgactccacgccgccccggacccacccgcaagcattaccagccctatgccccaccacgcgacttcgcagcctatcgctccagagtgaagttcagcagaagcgccgacgcccctgcctaccagcagggacagaaccaactgtacaacgagctgaacctgggcagacgggaagagtacgacgtgctggacaagcggagaggcagggaccctgagatgggcggaaagccccagcggagaaagaacccccaggaaggactgtataacgaactccagaaagacaagatggccgaagcctacagcgagatcggcatgaagggcgagcggagaagaggcaagggccacgatggcctgtaccagggcctgagcaccgccaccaaggacacctatgacgccctgcacatgcaggccctgcctccaaga

SEQ ID NO: 25787 - DNA, 870 bp, synthetic construct
  source 1..870: mol_type = other DNA
ttcccagatgtgattaagatccactggcaggaaaagaagtccaacaccatcctgggcagccaggaaggcaacaccatgaagaccaacgacacctacatgaagttcagctggctgaccgtgcccgagaagtccctggacaaagaacacagatgcatcgtgcggcacgaaaacaacaagaacggcgtggaccaggaaatcatcttcccacccatcaagaccgatgtgattacaatggaccccaaggacaactgctccaaggacgccaacgataccctgctgctccagctgaccaacaccagcgcctactacatgtacttgttgctgctgctgaagtccgtggtgtacttcgccatcatcacatgctgcctgctgcggagaaccgccttctgctgcaacggcgagaagtctaggagtaagaggagcaggctcctgcacagtgactacatgaacatgactccacgccgccccggacccacccgcaagcattaccagccctatgccccaccacgcgacttcgcagcctatcgctccagagtgaagttcagcagaagcgccgacgcccctgcctaccagcagggacagaaccaactgtacaacgagctgaacctgggcagacgggaagagtacgacgtgctggacaagcggagaggcagggaccctgagatgggcggaaagccccagcggagaaagaacccccaggaaggactgtataacgaactccagaaagacaagatggccgaagcctacagcgagatcggcatgaagggcgagcggagaagaggcaagggccacgatggcctgtaccagggcctgagcaccgccaccaaggacacctatgacgccctgcacatgcaggccctgcctccaaga

SEQ ID NO: 25788 - DNA, 867 bp, synthetic construct
  source 1..867: mol_type = other DNA
ccagatgtgattaagatccactggcaggaaaagaagtccaacaccatcctgggcagccaggaaggcaacaccatgaagaccaacgacacctacatgaagttcagctggctgaccgtgcccgagaagtccctggacaaagaacacagatgcatcgtgcggcacgaaaacaacaagaacggcgtggaccaggaaatcatcttcccacccatcaagaccgatgtgattacaatggaccccaaggacaactgctccaaggacgccaacgataccctgctgctccagctgaccaacaccagcgcctactacatgtacttgttgctgctgctgaagtccgtggtgtacttcgccatcatcacatgctgcctgctgcggagaaccgccttctgctgcaacggcgagaagtctaggagtaagaggagcaggctcctgcacagtgactacatgaacatgactccacgccgccccggacccacccgcaagcattaccagccctatgccccaccacgcgacttcgcagcctatcgctccagagtgaagttcagcagaagcgccgacgcccctgcctaccagcagggacagaaccaactgtacaacgagctgaacctgggcagacgggaagagtacgacgtgctggacaagcggagaggcagggaccctgagatgggcggaaagccccagcggagaaagaacccccaggaaggactgtataacgaactccagaaagacaagatggccgaagcctacagcgagatcggcatgaagggcgagcggagaagaggcaagggccacgatggcctgtaccagggcctgagcaccgccaccaaggacacctatgacgccctgcacatgcaggccctgcctccaaga

SEQ ID NO: 25789 - DNA, 864 bp, synthetic construct
  source 1..864: mol_type = other DNA
gatgtgattaagatccactggcaggaaaagaagtccaacaccatcctgggcagccaggaaggcaacaccatgaagaccaacgacacctacatgaagttcagctggctgaccgtgcccgagaagtccctggacaaagaacacagatgcatcgtgcggcacgaaaacaacaagaacggcgtggaccaggaaatcatcttcccacccatcaagaccgatgtgattacaatggaccccaaggacaactgctccaaggacgccaacgataccctgctgctccagctgaccaacaccagcgcctactacatgtacttgttgctgctgctgaagtccgtggtgtacttcgccatcatcacatgctgcctgctgcggagaaccgccttctgctgcaacggcgagaagtctaggagtaagaggagcaggctcctgcacagtgactacatgaacatgactccacgccgccccggacccacccgcaagcattaccagccctatgccccaccacgcgacttcgcagcctatcgctccagagtgaagttcagcagaagcgccgacgcccctgcctaccagcagggacagaaccaactgtacaacgagctgaacctgggcagacgggaagagtacgacgtgctggacaagcggagaggcagggaccctgagatgggcggaaagccccagcggagaaagaacccccaggaaggactgtataacgaactccagaaagacaagatggccgaagcctacagcgagatcggcatgaagggcgagcggagaagaggcaagggccacgatggcctgtaccagggcctgagcaccgccaccaaggacacctatgacgccctgcacatgcaggccctgcctccaaga

SEQ ID NO: 25790 - DNA, 861 bp, synthetic construct
  source 1..861: mol_type = other DNA
gtgattaagatccactggcaggaaaagaagtccaacaccatcctgggcagccaggaaggcaacaccatgaagaccaacgacacctacatgaagttcagctggctgaccgtgcccgagaagtccctggacaaagaacacagatgcatcgtgcggcacgaaaacaacaagaacggcgtggaccaggaaatcatcttcccacccatcaagaccgatgtgattacaatggaccccaaggacaactgctccaaggacgccaacgataccctgctgctccagctgaccaacaccagcgcctactacatgtacttgttgctgctgctgaagtccgtggtgtacttcgccatcatcacatgctgcctgctgcggagaaccgccttctgctgcaacggcgagaagtctaggagtaagaggagcaggctcctgcacagtgactacatgaacatgactccacgccgccccggacccacccgcaagcattaccagccctatgccccaccacgcgacttcgcagcctatcgctccagagtgaagttcagcagaagcgccgacgcccctgcctaccagcagggacagaaccaactgtacaacgagctgaacctgggcagacgggaagagtacgacgtgctggacaagcggagaggcagggaccctgagatgggcggaaagccccagcggagaaagaacccccaggaaggactgtataacgaactccagaaagacaagatggccgaagcctacagcgagatcggcatgaagggcgagcggagaagaggcaagggccacgatggcctgtaccagggcctgagcaccgccaccaaggacacctatgacgccctgcacatgcaggccctgcctccaaga

SEQ ID NO: 25791 - DNA, 858 bp, synthetic construct
  source 1..858: mol_type = other DNA
attaagatccactggcaggaaaagaagtccaacaccatcctgggcagccaggaaggcaacaccatgaagaccaacgacacctacatgaagttcagctggctgaccgtgcccgagaagtccctggacaaagaacacagatgcatcgtgcggcacgaaaacaacaagaacggcgtggaccaggaaatcatcttcccacccatcaagaccgatgtgattacaatggaccccaaggacaactgctccaaggacgccaacgataccctgctgctccagctgaccaacaccagcgcctactacatgtacttgttgctgctgctgaagtccgtggtgtacttcgccatcatcacatgctgcctgctgcggagaaccgccttctgctgcaacggcgagaagtctaggagtaagaggagcaggctcctgcacagtgactacatgaacatgactccacgccgccccggacccacccgcaagcattaccagccctatgccccaccacgcgacttcgcagcctatcgctccagagtgaagttcagcagaagcgccgacgcccctgcctaccagcagggacagaaccaactgtacaacgagctgaacctgggcagacgggaagagtacgacgtgctggacaagcggagaggcagggaccctgagatgggcggaaagccccagcggagaaagaacccccaggaaggactgtataacgaactccagaaagacaagatggccgaagcctacagcgagatcggcatgaagggcgagcggagaagaggcaagggccacgatggcctgtaccagggcctgagcaccgccaccaaggacacctatgacgccctgcacatgcaggccctgcctccaaga

SEQ ID NO: 25792 - DNA, 855 bp, synthetic construct
  source 1..855: mol_type = other DNA
aagatccactggcaggaaaagaagtccaacaccatcctgggcagccaggaaggcaacaccatgaagaccaacgacacctacatgaagttcagctggctgaccgtgcccgagaagtccctggacaaagaacacagatgcatcgtgcggcacgaaaacaacaagaacggcgtggaccaggaaatcatcttcccacccatcaagaccgatgtgattacaatggaccccaaggacaactgctccaaggacgccaacgataccctgctgctccagctgaccaacaccagcgcctactacatgtacttgttgctgctgctgaagtccgtggtgtacttcgccatcatcacatgctgcctgctgcggagaaccgccttctgctgcaacggcgagaagtctaggagtaagaggagcaggctcctgcacagtgactacatgaacatgactccacgccgccccggacccacccgcaagcattaccagccctatgccccaccacgcgacttcgcagcctatcgctccagagtgaagttcagcagaagcgccgacgcccctgcctaccagcagggacagaaccaactgtacaacgagctgaacctgggcagacgggaagagtacgacgtgctggacaagcggagaggcagggaccctgagatgggcggaaagccccagcggagaaagaacccccaggaaggactgtataacgaactccagaaagacaagatggccgaagcctacagcgagatcggcatgaagggcgagcggagaagaggcaagggccacgatggcctgtaccagggcctgagcaccgccaccaaggacacctatgacgccctgcacatgcaggccctgcctccaaga

SEQ ID NO: 25793 - DNA, 852 bp, synthetic construct
  source 1..852: mol_type = other DNA
atccactggcaggaaaagaagtccaacaccatcctgggcagccaggaaggcaacaccatgaagaccaacgacacctacatgaagttcagctggctgaccgtgcccgagaagtccctggacaaagaacacagatgcatcgtgcggcacgaaaacaacaagaacggcgtggaccaggaaatcatcttcccacccatcaagaccgatgtgattacaatggaccccaaggacaactgctccaaggacgccaacgataccctgctgctccagctgaccaacaccagcgcctactacatgtacttgttgctgctgctgaagtccgtggtgtacttcgccatcatcacatgctgcctgctgcggagaaccgccttctgctgcaacggcgagaagtctaggagtaagaggagcaggctcctgcacagtgactacatgaacatgactccacgccgccccggacccacccgcaagcattaccagccctatgccccaccacgcgacttcgcagcctatcgctccagagtgaagttcagcagaagcgccgacgcccctgcctaccagcagggacagaaccaactgtacaacgagctgaacctgggcagacgggaagagtacgacgtgctggacaagcggagaggcagggaccctgagatgggcggaaagccccagcggagaaagaacccccaggaaggactgtataacgaactccagaaagacaagatggccgaagcctacagcgagatcggcatgaagggcgagcggagaagaggcaagggccacgatggcctgtaccagggcctgagcaccgccaccaaggacacctatgacgccctgcacatgcaggccctgcctccaaga

SEQ ID NO: 25794 - DNA, 849 bp, synthetic construct
  source 1..849: mol_type = other DNA
cactggcaggaaaagaagtccaacaccatcctgggcagccaggaaggcaacaccatgaagaccaacgacacctacatgaagttcagctggctgaccgtgcccgagaagtccctggacaaagaacacagatgcatcgtgcggcacgaaaacaacaagaacggcgtggaccaggaaatcatcttcccacccatcaagaccgatgtgattacaatggaccccaaggacaactgctccaaggacgccaacgataccctgctgctccagctgaccaacaccagcgcctactacatgtacttgttgctgctgctgaagtccgtggtgtacttcgccatcatcacatgctgcctgctgcggagaaccgccttctgctgcaacggcgagaagtctaggagtaagaggagcaggctcctgcacagtgactacatgaacatgactccacgccgccccggacccacccgcaagcattaccagccctatgccccaccacgcgacttcgcagcctatcgctccagagtgaagttcagcagaagcgccgacgcccctgcctaccagcagggacagaaccaactgtacaacgagctgaacctgggcagacgggaagagtacgacgtgctggacaagcggagaggcagggaccctgagatgggcggaaagccccagcggagaaagaacccccaggaaggactgtataacgaactccagaaagacaagatggccgaagcctacagcgagatcggcatgaagggcgagcggagaagaggcaagggccacgatggcctgtaccagggcctgagcaccgccaccaaggacacctatgacgccctgcacatgcaggccctgcctccaaga

SEQ ID NO: 25795 - DNA, 846 bp, synthetic construct
  source 1..846: mol_type = other DNA
tggcaggaaaagaagtccaacaccatcctgggcagccaggaaggcaacaccatgaagaccaacgacacctacatgaagttcagctggctgaccgtgcccgagaagtccctggacaaagaacacagatgcatcgtgcggcacgaaaacaacaagaacggcgtggaccaggaaatcatcttcccacccatcaagaccgatgtgattacaatggaccccaaggacaactgctccaaggacgccaacgataccctgctgctccagctgaccaacaccagcgcctactacatgtacttgttgctgctgctgaagtccgtggtgtacttcgccatcatcacatgctgcctgctgcggagaaccgccttctgctgcaacggcgagaagtctaggagtaagaggagcaggctcctgcacagtgactacatgaacatgactccacgccgccccggacccacccgcaagcattaccagccctatgccccaccacgcgacttcgcagcctatcgctccagagtgaagttcagcagaagcgccgacgcccctgcctaccagcagggacagaaccaactgtacaacgagctgaacctgggcagacgggaagagtacgacgtgctggacaagcggagaggcagggaccctgagatgggcggaaagccccagcggagaaagaacccccaggaaggactgtataacgaactccagaaagacaagatggccgaagcctacagcgagatcggcatgaagggcgagcggagaagaggcaagggccacgatggcctgtaccagggcctgagcaccgccaccaaggacacctatgacgccctgcacatgcaggccctgcctccaaga

SEQ ID NO: 25796 - DNA, 843 bp, synthetic construct
  source 1..843: mol_type = other DNA
caggaaaagaagtccaacaccatcctgggcagccaggaaggcaacaccatgaagaccaacgacacctacatgaagttcagctggctgaccgtgcccgagaagtccctggacaaagaacacagatgcatcgtgcggcacgaaaacaacaagaacggcgtggaccaggaaatcatcttcccacccatcaagaccgatgtgattacaatggaccccaaggacaactgctccaaggacgccaacgataccctgctgctccagctgaccaacaccagcgcctactacatgtacttgttgctgctgctgaagtccgtggtgtacttcgccatcatcacatgctgcctgctgcggagaaccgccttctgctgcaacggcgagaagtctaggagtaagaggagcaggctcctgcacagtgactacatgaacatgactccacgccgccccggacccacccgcaagcattaccagccctatgccccaccacgcgacttcgcagcctatcgctccagagtgaagttcagcagaagcgccgacgcccctgcctaccagcagggacagaaccaactgtacaacgagctgaacctgggcagacgggaagagtacgacgtgctggacaagcggagaggcagggaccctgagatgggcggaaagccccagcggagaaagaacccccaggaaggactgtataacgaactccagaaagacaagatggccgaagcctacagcgagatcggcatgaagggcgagcggagaagaggcaagggccacgatggcctgtaccagggcctgagcaccgccaccaaggacacctatgacgccctgcacatgcaggccctgcctccaaga

SEQ ID NO: 25797 - DNA, 840 bp, synthetic construct
  source 1..840: mol_type = other DNA
gaaaagaagtccaacaccatcctgggcagccaggaaggcaacaccatgaagaccaacgacacctacatgaagttcagctggctgaccgtgcccgagaagtccctggacaaagaacacagatgcatcgtgcggcacgaaaacaacaagaacggcgtggaccaggaaatcatcttcccacccatcaagaccgatgtgattacaatggaccccaaggacaactgctccaaggacgccaacgataccctgctgctccagctgaccaacaccagcgcctactacatgtacttgttgctgctgctgaagtccgtggtgtacttcgccatcatcacatgctgcctgctgcggagaaccgccttctgctgcaacggcgagaagtctaggagtaagaggagcaggctcctgcacagtgactacatgaacatgactccacgccgccccggacccacccgcaagcattaccagccctatgccccaccacgcgacttcgcagcctatcgctccagagtgaagttcagcagaagcgccgacgcccctgcctaccagcagggacagaaccaactgtacaacgagctgaacctgggcagacgggaagagtacgacgtgctggacaagcggagaggcagggaccctgagatgggcggaaagccccagcggagaaagaacccccaggaaggactgtataacgaactccagaaagacaagatggccgaagcctacagcgagatcggcatgaagggcgagcggagaagaggcaagggccacgatggcctgtaccagggcctgagcaccgccaccaaggacacctatgacgccctgcacatgcaggccctgcctccaaga

SEQ ID NO: 25798 - DNA, 837 bp, synthetic construct
  source 1..837: mol_type = other DNA
aagaagtccaacaccatcctgggcagccaggaaggcaacaccatgaagaccaacgacacctacatgaagttcagctggctgaccgtgcccgagaagtccctggacaaagaacacagatgcatcgtgcggcacgaaaacaacaagaacggcgtggaccaggaaatcatcttcccacccatcaagaccgatgtgattacaatggaccccaaggacaactgctccaaggacgccaacgataccctgctgctccagctgaccaacaccagcgcctactacatgtacttgttgctgctgctgaagtccgtggtgtacttcgccatcatcacatgctgcctgctgcggagaaccgccttctgctgcaacggcgagaagtctaggagtaagaggagcaggctcctgcacagtgactacatgaacatgactccacgccgccccggacccacccgcaagcattaccagccctatgccccaccacgcgacttcgcagcctatcgctccagagtgaagttcagcagaagcgccgacgcccctgcctaccagcagggacagaaccaactgtacaacgagctgaacctgggcagacgggaagagtacgacgtgctggacaagcggagaggcagggaccctgagatgggcggaaagccccagcggagaaagaacccccaggaaggactgtataacgaactccagaaagacaagatggccgaagcctacagcgagatcggcatgaagggcgagcggagaagaggcaagggccacgatggcctgtaccagggcctgagcaccgccaccaaggacacctatgacgccctgcacatgcaggccctgcctccaaga

SEQ ID NO: 25799 - DNA, 834 bp, synthetic construct
  source 1..834: mol_type = other DNA
aagtccaacaccatcctgggcagccaggaaggcaacaccatgaagaccaacgacacctacatgaagttcagctggctgaccgtgcccgagaagtccctggacaaagaacacagatgcatcgtgcggcacgaaaacaacaagaacggcgtggaccaggaaatcatcttcccacccatcaagaccgatgtgattacaatggaccccaaggacaactgctccaaggacgccaacgataccctgctgctccagctgaccaacaccagcgcctactacatgtacttgttgctgctgctgaagtccgtggtgtacttcgccatcatcacatgctgcctgctgcggagaaccgccttctgctgcaacggcgagaagtctaggagtaagaggagcaggctcctgcacagtgactacatgaacatgactccacgccgccccggacccacccgcaagcattaccagccctatgccccaccacgcgacttcgcagcctatcgctccagagtgaagttcagcagaagcgccgacgcccctgcctaccagcagggacagaaccaactgtacaacgagctgaacctgggcagacgggaagagtacgacgtgctggacaagcggagaggcagggaccctgagatgggcggaaagccccagcggagaaagaacccccaggaaggactgtataacgaactccagaaagacaagatggccgaagcctacagcgagatcggcatgaagggcgagcggagaagaggcaagggccacgatggcctgtaccagggcctgagcaccgccaccaaggacacctatgacgccctgcacatgcaggccctgcctccaaga

SEQ ID NO: 25800 - DNA, 831 bp, synthetic construct
  source 1..831: mol_type = other DNA
tccaacaccatcctgggcagccaggaaggcaacaccatgaagaccaacgacacctacatgaagttcagctggctgaccgtgcccgagaagtccctggacaaagaacacagatgcatcgtgcggcacgaaaacaacaagaacggcgtggaccaggaaatcatcttcccacccatcaagaccgatgtgattacaatggaccccaaggacaactgctccaaggacgccaacgataccctgctgctccagctgaccaacaccagcgcctactacatgtacttgttgctgctgctgaagtccgtggtgtacttcgccatcatcacatgctgcctgctgcggagaaccgccttctgctgcaacggcgagaagtctaggagtaagaggagcaggctcctgcacagtgactacatgaacatgactccacgccgccccggacccacccgcaagcattaccagccctatgccccaccacgcgacttcgcagcctatcgctccagagtgaagttcagcagaagcgccgacgcccctgcctaccagcagggacagaaccaactgtacaacgagctgaacctgggcagacgggaagagtacgacgtgctggacaagcggagaggcagggaccctgagatgggcggaaagccccagcggagaaagaacccccaggaaggactgtataacgaactccagaaagacaagatggccgaagcctacagcgagatcggcatgaagggcgagcggagaagaggcaagggccacgatggcctgtaccagggcctgagcaccgccaccaaggacacctatgacgccctgcacatgcaggccctgcctccaaga

SEQ ID NO: 25801 - DNA, 828 bp, synthetic construct
  source 1..828: mol_type = other DNA
aacaccatcctgggcagccaggaaggcaacaccatgaagaccaacgacacctacatgaagttcagctggctgaccgtgcccgagaagtccctggacaaagaacacagatgcatcgtgcggcacgaaaacaacaagaacggcgtggaccaggaaatcatcttcccacccatcaagaccgatgtgattacaatggaccccaaggacaactgctccaaggacgccaacgataccctgctgctccagctgaccaacaccagcgcctactacatgtacttgttgctgctgctgaagtccgtggtgtacttcgccatcatcacatgctgcctgctgcggagaaccgccttctgctgcaacggcgagaagtctaggagtaagaggagcaggctcctgcacagtgactacatgaacatgactccacgccgccccggacccacccgcaagcattaccagccctatgccccaccacgcgacttcgcagcctatcgctccagagtgaagttcagcagaagcgccgacgcccctgcctaccagcagggacagaaccaactgtacaacgagctgaacctgggcagacgggaagagtacgacgtgctggacaagcggagaggcagggaccctgagatgggcggaaagccccagcggagaaagaacccccaggaaggactgtataacgaactccagaaagacaagatggccgaagcctacagcgagatcggcatgaagggcgagcggagaagaggcaagggccacgatggcctgtaccagggcctgagcaccgccaccaaggacacctatgacgccctgcacatgcaggccctgcctccaaga

SEQ ID NO: 25802 - DNA, 825 bp, synthetic construct
  source 1..825: mol_type = other DNA
accatcctgggcagccaggaaggcaacaccatgaagaccaacgacacctacatgaagttcagctggctgaccgtgcccgagaagtccctggacaaagaacacagatgcatcgtgcggcacgaaaacaacaagaacggcgtggaccaggaaatcatcttcccacccatcaagaccgatgtgattacaatggaccccaaggacaactgctccaaggacgccaacgataccctgctgctccagctgaccaacaccagcgcctactacatgtacttgttgctgctgctgaagtccgtggtgtacttcgccatcatcacatgctgcctgctgcggagaaccgccttctgctgcaacggcgagaagtctaggagtaagaggagcaggctcctgcacagtgactacatgaacatgactccacgccgccccggacccacccgcaagcattaccagccctatgccccaccacgcgacttcgcagcctatcgctccagagtgaagttcagcagaagcgccgacgcccctgcctaccagcagggacagaaccaactgtacaacgagctgaacctgggcagacgggaagagtacgacgtgctggacaagcggagaggcagggaccctgagatgggcggaaagccccagcggagaaagaacccccaggaaggactgtataacgaactccagaaagacaagatggccgaagcctacagcgagatcggcatgaagggcgagcggagaagaggcaagggccacgatggcctgtaccagggcctgagcaccgccaccaaggacacctatgacgccctgcacatgcaggccctgcctccaaga

SEQ ID NO: 25803 - DNA, 822 bp, synthetic construct
  source 1..822: mol_type = other DNA
atcctgggcagccaggaaggcaacaccatgaagaccaacgacacctacatgaagttcagctggctgaccgtgcccgagaagtccctggacaaagaacacagatgcatcgtgcggcacgaaaacaacaagaacggcgtggaccaggaaatcatcttcccacccatcaagaccgatgtgattacaatggaccccaaggacaactgctccaaggacgccaacgataccctgctgctccagctgaccaacaccagcgcctactacatgtacttgttgctgctgctgaagtccgtggtgtacttcgccatcatcacatgctgcctgctgcggagaaccgccttctgctgcaacggcgagaagtctaggagtaagaggagcaggctcctgcacagtgactacatgaacatgactccacgccgccccggacccacccgcaagcattaccagccctatgccccaccacgcgacttcgcagcctatcgctccagagtgaagttcagcagaagcgccgacgcccctgcctaccagcagggacagaaccaactgtacaacgagctgaacctgggcagacgggaagagtacgacgtgctggacaagcggagaggcagggaccctgagatgggcggaaagccccagcggagaaagaacccccaggaaggactgtataacgaactccagaaagacaagatggccgaagcctacagcgagatcggcatgaagggcgagcggagaagaggcaagggccacgatggcctgtaccagggcctgagcaccgccaccaaggacacctatgacgccctgcacatgcaggccctgcctccaaga

SEQ ID NO: 25804 - DNA, 819 bp, synthetic construct
  source 1..819: mol_type = other DNA
ctgggcagccaggaaggcaacaccatgaagaccaacgacacctacatgaagttcagctggctgaccgtgcccgagaagtccctggacaaagaacacagatgcatcgtgcggcacgaaaacaacaagaacggcgtggaccaggaaatcatcttcccacccatcaagaccgatgtgattacaatggaccccaaggacaactgctccaaggacgccaacgataccctgctgctccagctgaccaacaccagcgcctactacatgtacttgttgctgctgctgaagtccgtggtgtacttcgccatcatcacatgctgcctgctgcggagaaccgccttctgctgcaacggcgagaagtctaggagtaagaggagcaggctcctgcacagtgactacatgaacatgactccacgccgccccggacccacccgcaagcattaccagccctatgccccaccacgcgacttcgcagcctatcgctccagagtgaagttcagcagaagcgccgacgcccctgcctaccagcagggacagaaccaactgtacaacgagctgaacctgggcagacgggaagagtacgacgtgctggacaagcggagaggcagggaccctgagatgggcggaaagccccagcggagaaagaacccccaggaaggactgtataacgaactccagaaagacaagatggccgaagcctacagcgagatcggcatgaagggcgagcggagaagaggcaagggccacgatggcctgtaccagggcctgagcaccgccaccaaggacacctatgacgccctgcacatgcaggccctgcctccaaga

SEQ ID NO: 25805 - DNA, 816 bp, synthetic construct
  source 1..816: mol_type = other DNA
ggcagccaggaaggcaacaccatgaagaccaacgacacctacatgaagttcagctggctgaccgtgcccgagaagtccctggacaaagaacacagatgcatcgtgcggcacgaaaacaacaagaacggcgtggaccaggaaatcatcttcccacccatcaagaccgatgtgattacaatggaccccaaggacaactgctccaaggacgccaacgataccctgctgctccagctgaccaacaccagcgcctactacatgtacttgttgctgctgctgaagtccgtggtgtacttcgccatcatcacatgctgcctgctgcggagaaccgccttctgctgcaacggcgagaagtctaggagtaagaggagcaggctcctgcacagtgactacatgaacatgactccacgccgccccggacccacccgcaagcattaccagccctatgccccaccacgcgacttcgcagcctatcgctccagagtgaagttcagcagaagcgccgacgcccctgcctaccagcagggacagaaccaactgtacaacgagctgaacctgggcagacgggaagagtacgacgtgctggacaagcggagaggcagggaccctgagatgggcggaaagccccagcggagaaagaacccccaggaaggactgtataacgaactccagaaagacaagatggccgaagcctacagcgagatcggcatgaagggcgagcggagaagaggcaagggccacgatggcctgtaccagggcctgagcaccgccaccaaggacacctatgacgccctgcacatgcaggccctgcctccaaga

SEQ ID NO: 25806 - DNA, 813 bp, synthetic construct
  source 1..813: mol_type = other DNA
agccaggaaggcaacaccatgaagaccaacgacacctacatgaagttcagctggctgaccgtgcccgagaagtccctggacaaagaacacagatgcatcgtgcggcacgaaaacaacaagaacggcgtggaccaggaaatcatcttcccacccatcaagaccgatgtgattacaatggaccccaaggacaactgctccaaggacgccaacgataccctgctgctccagctgaccaacaccagcgcctactacatgtacttgttgctgctgctgaagtccgtggtgtacttcgccatcatcacatgctgcctgctgcggagaaccgccttctgctgcaacggcgagaagtctaggagtaagaggagcaggctcctgcacagtgactacatgaacatgactccacgccgccccggacccacccgcaagcattaccagccctatgccccaccacgcgacttcgcagcctatcgctccagagtgaagttcagcagaagcgccgacgcccctgcctaccagcagggacagaaccaactgtacaacgagctgaacctgggcagacgggaagagtacgacgtgctggacaagcggagaggcagggaccctgagatgggcggaaagccccagcggagaaagaacccccaggaaggactgtataacgaactccagaaagacaagatggccgaagcctacagcgagatcggcatgaagggcgagcggagaagaggcaagggccacgatggcctgtaccagggcctgagcaccgccaccaaggacacctatgacgccctgcacatgcaggccctgcctccaaga

SEQ ID NO: 25807 - DNA, 810 bp, synthetic construct
  source 1..810: mol_type = other DNA
caggaaggcaacaccatgaagaccaacgacacctacatgaagttcagctggctgaccgtgcccgagaagtccctggacaaagaacacagatgcatcgtgcggcacgaaaacaacaagaacggcgtggaccaggaaatcatcttcccacccatcaagaccgatgtgattacaatggaccccaaggacaactgctccaaggacgccaacgataccctgctgctccagctgaccaacaccagcgcctactacatgtacttgttgctgctgctgaagtccgtggtgtacttcgccatcatcacatgctgcctgctgcggagaaccgccttctgctgcaacggcgagaagtctaggagtaagaggagcaggctcctgcacagtgactacatgaacatgactccacgccgccccggacccacccgcaagcattaccagccctatgccccaccacgcgacttcgcagcctatcgctccagagtgaagttcagcagaagcgccgacgcccctgcctaccagcagggacagaaccaactgtacaacgagctgaacctgggcagacgggaagagtacgacgtgctggacaagcggagaggcagggaccctgagatgggcggaaagccccagcggagaaagaacccccaggaaggactgtataacgaactccagaaagacaagatggccgaagcctacagcgagatcggcatgaagggcgagcggagaagaggcaagggccacgatggcctgtaccagggcctgagcaccgccaccaaggacacctatgacgccctgcacatgcaggccctgcctccaaga

SEQ ID NO: 25808 - DNA, 807 bp, synthetic construct
  source 1..807: mol_type = other DNA
gaaggcaacaccatgaagaccaacgacacctacatgaagttcagctggctgaccgtgcccgagaagtccctggacaaagaacacagatgcatcgtgcggcacgaaaacaacaagaacggcgtggaccaggaaatcatcttcccacccatcaagaccgatgtgattacaatggaccccaaggacaactgctccaaggacgccaacgataccctgctgctccagctgaccaacaccagcgcctactacatgtacttgttgctgctgctgaagtccgtggtgtacttcgccatcatcacatgctgcctgctgcggagaaccgccttctgctgcaacggcgagaagtctaggagtaagaggagcaggctcctgcacagtgactacatgaacatgactccacgccgccccggacccacccgcaagcattaccagccctatgccccaccacgcgacttcgcagcctatcgctccagagtgaagttcagcagaagcgccgacgcccctgcctaccagcagggacagaaccaactgtacaacgagctgaacctgggcagacgggaagagtacgacgtgctggacaagcggagaggcagggaccctgagatgggcggaaagccccagcggagaaagaacccccaggaaggactgtataacgaactccagaaagacaagatggccgaagcctacagcgagatcggcatgaagggcgagcggagaagaggcaagggccacgatggcctgtaccagggcctgagcaccgccaccaaggacacctatgacgccctgcacatgcaggccctgcctccaaga

SEQ ID NO: 25809 - DNA, 804 bp, synthetic construct
  source 1..804: mol_type = other DNA
ggcaacaccatgaagaccaacgacacctacatgaagttcagctggctgaccgtgcccgagaagtccctggacaaagaacacagatgcatcgtgcggcacgaaaacaacaagaacggcgtggaccaggaaatcatcttcccacccatcaagaccgatgtgattacaatggaccccaaggacaactgctccaaggacgccaacgataccctgctgctccagctgaccaacaccagcgcctactacatgtacttgttgctgctgctgaagtccgtggtgtacttcgccatcatcacatgctgcctgctgcggagaaccgccttctgctgcaacggcgagaagtctaggagtaagaggagcaggctcctgcacagtgactacatgaacatgactccacgccgccccggacccacccgcaagcattaccagccctatgccccaccacgcgacttcgcagcctatcgctccagagtgaagttcagcagaagcgccgacgcccctgcctaccagcagggacagaaccaactgtacaacgagctgaacctgggcagacgggaagagtacgacgtgctggacaagcggagaggcagggaccctgagatgggcggaaagccccagcggagaaagaacccccaggaaggactgtataacgaactccagaaagacaagatggccgaagcctacagcgagatcggcatgaagggcgagcggagaagaggcaagggccacgatggcctgtaccagggcctgagcaccgccaccaaggacacctatgacgccctgcacatgcaggccctgcctccaaga

SEQ ID NO: 25810 - DNA, 801 bp, synthetic construct
  source 1..801: mol_type = other DNA
aacaccatgaagaccaacgacacctacatgaagttcagctggctgaccgtgcccgagaagtccctggacaaagaacacagatgcatcgtgcggcacgaaaacaacaagaacggcgtggaccaggaaatcatcttcccacccatcaagaccgatgtgattacaatggaccccaaggacaactgctccaaggacgccaacgataccctgctgctccagctgaccaacaccagcgcctactacatgtacttgttgctgctgctgaagtccgtggtgtacttcgccatcatcacatgctgcctgctgcggagaaccgccttctgctgcaacggcgagaagtctaggagtaagaggagcaggctcctgcacagtgactacatgaacatgactccacgccgccccggacccacccgcaagcattaccagccctatgccccaccacgcgacttcgcagcctatcgctccagagtgaagttcagcagaagcgccgacgcccctgcctaccagcagggacagaaccaactgtacaacgagctgaacctgggcagacgggaagagtacgacgtgctggacaagcggagaggcagggaccctgagatgggcggaaagccccagcggagaaagaacccccaggaaggactgtataacgaactccagaaagacaagatggccgaagcctacagcgagatcggcatgaagggcgagcggagaagaggcaagggccacgatggcctgtaccagggcctgagcaccgccaccaaggacacctatgacgccctgcacatgcaggccctgcctccaaga

SEQ ID NO: 25811 - DNA, 798 bp, synthetic construct
  source 1..798: mol_type = other DNA
accatgaagaccaacgacacctacatgaagttcagctggctgaccgtgcccgagaagtccctggacaaagaacacagatgcatcgtgcggcacgaaaacaacaagaacggcgtggaccaggaaatcatcttcccacccatcaagaccgatgtgattacaatggaccccaaggacaactgctccaaggacgccaacgataccctgctgctccagctgaccaacaccagcgcctactacatgtacttgttgctgctgctgaagtccgtggtgtacttcgccatcatcacatgctgcctgctgcggagaaccgccttctgctgcaacggcgagaagtctaggagtaagaggagcaggctcctgcacagtgactacatgaacatgactccacgccgccccggacccacccgcaagcattaccagccctatgccccaccacgcgacttcgcagcctatcgctccagagtgaagttcagcagaagcgccgacgcccctgcctaccagcagggacagaaccaactgtacaacgagctgaacctgggcagacgggaagagtacgacgtgctggacaagcggagaggcagggaccctgagatgggcggaaagccccagcggagaaagaacccccaggaaggactgtataacgaactccagaaagacaagatggccgaagcctacagcgagatcggcatgaagggcgagcggagaagaggcaagggccacgatggcctgtaccagggcctgagcaccgccaccaaggacacctatgacgccctgcacatgcaggccctgcctccaaga

SEQ ID NO: 25812 - DNA, 795 bp, synthetic construct
  source 1..795: mol_type = other DNA
atgaagaccaacgacacctacatgaagttcagctggctgaccgtgcccgagaagtccctggacaaagaacacagatgcatcgtgcggcacgaaaacaacaagaacggcgtggaccaggaaatcatcttcccacccatcaagaccgatgtgattacaatggaccccaaggacaactgctccaaggacgccaacgataccctgctgctccagctgaccaacaccagcgcctactacatgtacttgttgctgctgctgaagtccgtggtgtacttcgccatcatcacatgctgcctgctgcggagaaccgccttctgctgcaacggcgagaagtctaggagtaagaggagcaggctcctgcacagtgactacatgaacatgactccacgccgccccggacccacccgcaagcattaccagccctatgccccaccacgcgacttcgcagcctatcgctccagagtgaagttcagcagaagcgccgacgcccctgcctaccagcagggacagaaccaactgtacaacgagctgaacctgggcagacgggaagagtacgacgtgctggacaagcggagaggcagggaccctgagatgggcggaaagccccagcggagaaagaacccccaggaaggactgtataacgaactccagaaagacaagatggccgaagcctacagcgagatcggcatgaagggcgagcggagaagaggcaagggccacgatggcctgtaccagggcctgagcaccgccaccaaggacacctatgacgccctgcacatgcaggccctgcctccaaga

SEQ ID NO: 25813 - DNA, 792 bp, synthetic construct
  source 1..792: mol_type = other DNA
aagaccaacgacacctacatgaagttcagctggctgaccgtgcccgagaagtccctggacaaagaacacagatgcatcgtgcggcacgaaaacaacaagaacggcgtggaccaggaaatcatcttcccacccatcaagaccgatgtgattacaatggaccccaaggacaactgctccaaggacgccaacgataccctgctgctccagctgaccaacaccagcgcctactacatgtacttgttgctgctgctgaagtccgtggtgtacttcgccatcatcacatgctgcctgctgcggagaaccgccttctgctgcaacggcgagaagtctaggagtaagaggagcaggctcctgcacagtgactacatgaacatgactccacgccgccccggacccacccgcaagcattaccagccctatgccccaccacgcgacttcgcagcctatcgctccagagtgaagttcagcagaagcgccgacgcccctgcctaccagcagggacagaaccaactgtacaacgagctgaacctgggcagacgggaagagtacgacgtgctggacaagcggagaggcagggaccctgagatgggcggaaagccccagcggagaaagaacccccaggaaggactgtataacgaactccagaaagacaagatggccgaagcctacagcgagatcggcatgaagggcgagcggagaagaggcaagggccacgatggcctgtaccagggcctgagcaccgccaccaaggacacctatgacgccctgcacatgcaggccctgcctccaaga

SEQ ID NO: 25814 - DNA, 789 bp, synthetic construct
  source 1..789: mol_type = other DNA
accaacgacacctacatgaagttcagctggctgaccgtgcccgagaagtccctggacaaagaacacagatgcatcgtgcggcacgaaaacaacaagaacggcgtggaccaggaaatcatcttcccacccatcaagaccgatgtgattacaatggaccccaaggacaactgctccaaggacgccaacgataccctgctgctccagctgaccaacaccagcgcctactacatgtacttgttgctgctgctgaagtccgtggtgtacttcgccatcatcacatgctgcctgctgcggagaaccgccttctgctgcaacggcgagaagtctaggagtaagaggagcaggctcctgcacagtgactacatgaacatgactccacgccgccccggacccacccgcaagcattaccagccctatgccccaccacgcgacttcgcagcctatcgctccagagtgaagttcagcagaagcgccgacgcccctgcctaccagcagggacagaaccaactgtacaacgagctgaacctgggcagacgggaagagtacgacgtgctggacaagcggagaggcagggaccctgagatgggcggaaagccccagcggagaaagaacccccaggaaggactgtataacgaactccagaaagacaagatggccgaagcctacagcgagatcggcatgaagggcgagcggagaagaggcaagggccacgatggcctgtaccagggcctgagcaccgccaccaaggacacctatgacgccctgcacatgcaggccctgcctccaaga

SEQ ID NO: 25815 - DNA, 786 bp, synthetic construct
  source 1..786: mol_type = other DNA
aacgacacctacatgaagttcagctggctgaccgtgcccgagaagtccctggacaaagaacacagatgcatcgtgcggcacgaaaacaacaagaacggcgtggaccaggaaatcatcttcccacccatcaagaccgatgtgattacaatggaccccaaggacaactgctccaaggacgccaacgataccctgctgctccagctgaccaacaccagcgcctactacatgtacttgttgctgctgctgaagtccgtggtgtacttcgccatcatcacatgctgcctgctgcggagaaccgccttctgctgcaacggcgagaagtctaggagtaagaggagcaggctcctgcacagtgactacatgaacatgactccacgccgccccggacccacccgcaagcattaccagccctatgccccaccacgcgacttcgcagcctatcgctccagagtgaagttcagcagaagcgccgacgcccctgcctaccagcagggacagaaccaactgtacaacgagctgaacctgggcagacgggaagagtacgacgtgctggacaagcggagaggcagggaccctgagatgggcggaaagccccagcggagaaagaacccccaggaaggactgtataacgaactccagaaagacaagatggccgaagcctacagcgagatcggcatgaagggcgagcggagaagaggcaagggccacgatggcctgtaccagggcctgagcaccgccaccaaggacacctatgacgccctgcacatgcaggccctgcctccaaga

SEQ ID NO: 25816 - DNA, 783 bp, synthetic construct
  source 1..783: mol_type = other DNA
gacacctacatgaagttcagctggctgaccgtgcccgagaagtccctggacaaagaacacagatgcatcgtgcggcacgaaaacaacaagaacggcgtggaccaggaaatcatcttcccacccatcaagaccgatgtgattacaatggaccccaaggacaactgctccaaggacgccaacgataccctgctgctccagctgaccaacaccagcgcctactacatgtacttgttgctgctgctgaagtccgtggtgtacttcgccatcatcacatgctgcctgctgcggagaaccgccttctgctgcaacggcgagaagtctaggagtaagaggagcaggctcctgcacagtgactacatgaacatgactccacgccgccccggacccacccgcaagcattaccagccctatgccccaccacgcgacttcgcagcctatcgctccagagtgaagttcagcagaagcgccgacgcccctgcctaccagcagggacagaaccaactgtacaacgagctgaacctgggcagacgggaagagtacgacgtgctggacaagcggagaggcagggaccctgagatgggcggaaagccccagcggagaaagaacccccaggaaggactgtataacgaactccagaaagacaagatggccgaagcctacagcgagatcggcatgaagggcgagcggagaagaggcaagggccacgatggcctgtaccagggcctgagcaccgccaccaaggacacctatgacgccctgcacatgcaggccctgcctccaaga

SEQ ID NO: 25817 - DNA, 780 bp, synthetic construct
  source 1..780: mol_type = other DNA
acctacatgaagttcagctggctgaccgtgcccgagaagtccctggacaaagaacacagatgcatcgtgcggcacgaaaacaacaagaacggcgtggaccaggaaatcatcttcccacccatcaagaccgatgtgattacaatggaccccaaggacaactgctccaaggacgccaacgataccctgctgctccagctgaccaacaccagcgcctactacatgtacttgttgctgctgctgaagtccgtggtgtacttcgccatcatcacatgctgcctgctgcggagaaccgccttctgctgcaacggcgagaagtctaggagtaagaggagcaggctcctgcacagtgactacatgaacatgactccacgccgccccggacccacccgcaagcattaccagccctatgccccaccacgcgacttcgcagcctatcgctccagagtgaagttcagcagaagcgccgacgcccctgcctaccagcagggacagaaccaactgtacaacgagctgaacctgggcagacgggaagagtacgacgtgctggacaagcggagaggcagggaccctgagatgggcggaaagccccagcggagaaagaacccccaggaaggactgtataacgaactccagaaagacaagatggccgaagcctacagcgagatcggcatgaagggcgagcggagaagaggcaagggccacgatggcctgtaccagggcctgagcaccgccaccaaggacacctatgacgccctgcacatgcaggccctgcctccaaga

SEQ ID NO: 25818 - DNA, 777 bp, synthetic construct
  source 1..777: mol_type = other DNA
tacatgaagttcagctggctgaccgtgcccgagaagtccctggacaaagaacacagatgcatcgtgcggcacgaaaacaacaagaacggcgtggaccaggaaatcatcttcccacccatcaagaccgatgtgattacaatggaccccaaggacaactgctccaaggacgccaacgataccctgctgctccagctgaccaacaccagcgcctactacatgtacttgttgctgctgctgaagtccgtggtgtacttcgccatcatcacatgctgcctgctgcggagaaccgccttctgctgcaacggcgagaagtctaggagtaagaggagcaggctcctgcacagtgactacatgaacatgactccacgccgccccggacccacccgcaagcattaccagccctatgccccaccacgcgacttcgcagcctatcgctccagagtgaagttcagcagaagcgccgacgcccctgcctaccagcagggacagaaccaactgtacaacgagctgaacctgggcagacgggaagagtacgacgtgctggacaagcggagaggcagggaccctgagatgggcggaaagccccagcggagaaagaacccccaggaaggactgtataacgaactccagaaagacaagatggccgaagcctacagcgagatcggcatgaagggcgagcggagaagaggcaagggccacgatggcctgtaccagggcctgagcaccgccaccaaggacacctatgacgccctgcacatgcaggccctgcctccaaga

SEQ ID NO: 25819 - DNA, 774 bp, synthetic construct
  source 1..774: mol_type = other DNA
atgaagttcagctggctgaccgtgcccgagaagtccctggacaaagaacacagatgcatcgtgcggcacgaaaacaacaagaacggcgtggaccaggaaatcatcttcccacccatcaagaccgatgtgattacaatggaccccaaggacaactgctccaaggacgccaacgataccctgctgctccagctgaccaacaccagcgcctactacatgtacttgttgctgctgctgaagtccgtggtgtacttcgccatcatcacatgctgcctgctgcggagaaccgccttctgctgcaacggcgagaagtctaggagtaagaggagcaggctcctgcacagtgactacatgaacatgactccacgccgccccggacccacccgcaagcattaccagccctatgccccaccacgcgacttcgcagcctatcgctccagagtgaagttcagcagaagcgccgacgcccctgcctaccagcagggacagaaccaactgtacaacgagctgaacctgggcagacgggaagagtacgacgtgctggacaagcggagaggcagggaccctgagatgggcggaaagccccagcggagaaagaacccccaggaaggactgtataacgaactccagaaagacaagatggccgaagcctacagcgagatcggcatgaagggcgagcggagaagaggcaagggccacgatggcctgtaccagggcctgagcaccgccaccaaggacacctatgacgccctgcacatgcaggccctgcctccaaga

SEQ ID NO: 25820 - DNA, 771 bp, synthetic construct
  source 1..771: mol_type = other DNA
aagttcagctggctgaccgtgcccgagaagtccctggacaaagaacacagatgcatcgtgcggcacgaaaacaacaagaacggcgtggaccaggaaatcatcttcccacccatcaagaccgatgtgattacaatggaccccaaggacaactgctccaaggacgccaacgataccctgctgctccagctgaccaacaccagcgcctactacatgtacttgttgctgctgctgaagtccgtggtgtacttcgccatcatcacatgctgcctgctgcggagaaccgccttctgctgcaacggcgagaagtctaggagtaagaggagcaggctcctgcacagtgactacatgaacatgactccacgccgccccggacccacccgcaagcattaccagccctatgccccaccacgcgacttcgcagcctatcgctccagagtgaagttcagcagaagcgccgacgcccctgcctaccagcagggacagaaccaactgtacaacgagctgaacctgggcagacgggaagagtacgacgtgctggacaagcggagaggcagggaccctgagatgggcggaaagccccagcggagaaagaacccccaggaaggactgtataacgaactccagaaagacaagatggccgaagcctacagcgagatcggcatgaagggcgagcggagaagaggcaagggccacgatggcctgtaccagggcctgagcaccgccaccaaggacacctatgacgccctgcacatgcaggccctgcctccaaga

SEQ ID NO: 25821 - DNA, 768 bp, synthetic construct
  source 1..768: mol_type = other DNA
ttcagctggctgaccgtgcccgagaagtccctggacaaagaacacagatgcatcgtgcggcacgaaaacaacaagaacggcgtggaccaggaaatcatcttcccacccatcaagaccgatgtgattacaatggaccccaaggacaactgctccaaggacgccaacgataccctgctgctccagctgaccaacaccagcgcctactacatgtacttgttgctgctgctgaagtccgtggtgtacttcgccatcatcacatgctgcctgctgcggagaaccgccttctgctgcaacggcgagaagtctaggagtaagaggagcaggctcctgcacagtgactacatgaacatgactccacgccgccccggacccacccgcaagcattaccagccctatgccccaccacgcgacttcgcagcctatcgctccagagtgaagttcagcagaagcgccgacgcccctgcctaccagcagggacagaaccaactgtacaacgagctgaacctgggcagacgggaagagtacgacgtgctggacaagcggagaggcagggaccctgagatgggcggaaagccccagcggagaaagaacccccaggaaggactgtataacgaactccagaaagacaagatggccgaagcctacagcgagatcggcatgaagggcgagcggagaagaggcaagggccacgatggcctgtaccagggcctgagcaccgccaccaaggacacctatgacgccctgcacatgcaggccctgcctccaaga

SEQ ID NO: 25822 - DNA, 765 bp, synthetic construct
  source 1..765: mol_type = other DNA
agctggctgaccgtgcccgagaagtccctggacaaagaacacagatgcatcgtgcggcacgaaaacaacaagaacggcgtggaccaggaaatcatcttcccacccatcaagaccgatgtgattacaatggaccccaaggacaactgctccaaggacgccaacgataccctgctgctccagctgaccaacaccagcgcctactacatgtacttgttgctgctgctgaagtccgtggtgtacttcgccatcatcacatgctgcctgctgcggagaaccgccttctgctgcaacggcgagaagtctaggagtaagaggagcaggctcctgcacagtgactacatgaacatgactccacgccgccccggacccacccgcaagcattaccagccctatgccccaccacgcgacttcgcagcctatcgctccagagtgaagttcagcagaagcgccgacgcccctgcctaccagcagggacagaaccaactgtacaacgagctgaacctgggcagacgggaagagtacgacgtgctggacaagcggagaggcagggaccctgagatgggcggaaagccccagcggagaaagaacccccaggaaggactgtataacgaactccagaaagacaagatggccgaagcctacagcgagatcggcatgaagggcgagcggagaagaggcaagggccacgatggcctgtaccagggcctgagcaccgccaccaaggacacctatgacgccctgcacatgcaggccctgcctccaaga

SEQ ID NO: 25823 - DNA, 762 bp, synthetic construct
  source 1..762: mol_type = other DNA
tggctgaccgtgcccgagaagtccctggacaaagaacacagatgcatcgtgcggcacgaaaacaacaagaacggcgtggaccaggaaatcatcttcccacccatcaagaccgatgtgattacaatggaccccaaggacaactgctccaaggacgccaacgataccctgctgctccagctgaccaacaccagcgcctactacatgtacttgttgctgctgctgaagtccgtggtgtacttcgccatcatcacatgctgcctgctgcggagaaccgccttctgctgcaacggcgagaagtctaggagtaagaggagcaggctcctgcacagtgactacatgaacatgactccacgccgccccggacccacccgcaagcattaccagccctatgccccaccacgcgacttcgcagcctatcgctccagagtgaagttcagcagaagcgccgacgcccctgcctaccagcagggacagaaccaactgtacaacgagctgaacctgggcagacgggaagagtacgacgtgctggacaagcggagaggcagggaccctgagatgggcggaaagccccagcggagaaagaacccccaggaaggactgtataacgaactccagaaagacaagatggccgaagcctacagcgagatcggcatgaagggcgagcggagaagaggcaagggccacgatggcctgtaccagggcctgagcaccgccaccaaggacacctatgacgccctgcacatgcaggccctgcctccaaga

SEQ ID NO: 25824 - DNA, 759 bp, synthetic construct
  source 1..759: mol_type = other DNA
ctgaccgtgcccgagaagtccctggacaaagaacacagatgcatcgtgcggcacgaaaacaacaagaacggcgtggaccaggaaatcatcttcccacccatcaagaccgatgtgattacaatggaccccaaggacaactgctccaaggacgccaacgataccctgctgctccagctgaccaacaccagcgcctactacatgtacttgttgctgctgctgaagtccgtggtgtacttcgccatcatcacatgctgcctgctgcggagaaccgccttctgctgcaacggcgagaagtctaggagtaagaggagcaggctcctgcacagtgactacatgaacatgactccacgccgccccggacccacccgcaagcattaccagccctatgccccaccacgcgacttcgcagcctatcgctccagagtgaagttcagcagaagcgccgacgcccctgcctaccagcagggacagaaccaactgtacaacgagctgaacctgggcagacgggaagagtacgacgtgctggacaagcggagaggcagggaccctgagatgggcggaaagccccagcggagaaagaacccccaggaaggactgtataacgaactccagaaagacaagatggccgaagcctacagcgagatcggcatgaagggcgagcggagaagaggcaagggccacgatggcctgtaccagggcctgagcaccgccaccaaggacacctatgacgccctgcacatgcaggccctgcctccaaga

SEQ ID NO: 25825 - DNA, 756 bp, synthetic construct
  source 1..756: mol_type = other DNA
accgtgcccgagaagtccctggacaaagaacacagatgcatcgtgcggcacgaaaacaacaagaacggcgtggaccaggaaatcatcttcccacccatcaagaccgatgtgattacaatggaccccaaggacaactgctccaaggacgccaacgataccctgctgctccagctgaccaacaccagcgcctactacatgtacttgttgctgctgctgaagtccgtggtgtacttcgccatcatcacatgctgcctgctgcggagaaccgccttctgctgcaacggcgagaagtctaggagtaagaggagcaggctcctgcacagtgactacatgaacatgactccacgccgccccggacccacccgcaagcattaccagccctatgccccaccacgcgacttcgcagcctatcgctccagagtgaagttcagcagaagcgccgacgcccctgcctaccagcagggacagaaccaactgtacaacgagctgaacctgggcagacgggaagagtacgacgtgctggacaagcggagaggcagggaccctgagatgggcggaaagccccagcggagaaagaacccccaggaaggactgtataacgaactccagaaagacaagatggccgaagcctacagcgagatcggcatgaagggcgagcggagaagaggcaagggccacgatggcctgtaccagggcctgagcaccgccaccaaggacacctatgacgccctgcacatgcaggccctgcctccaaga

SEQ ID NO: 25826 - DNA, 753 bp, synthetic construct
  source 1..753: mol_type = other DNA
gtgcccgagaagtccctggacaaagaacacagatgcatcgtgcggcacgaaaacaacaagaacggcgtggaccaggaaatcatcttcccacccatcaagaccgatgtgattacaatggaccccaaggacaactgctccaaggacgccaacgataccctgctgctccagctgaccaacaccagcgcctactacatgtacttgttgctgctgctgaagtccgtggtgtacttcgccatcatcacatgctgcctgctgcggagaaccgccttctgctgcaacggcgagaagtctaggagtaagaggagcaggctcctgcacagtgactacatgaacatgactccacgccgccccggacccacccgcaagcattaccagccctatgccccaccacgcgacttcgcagcctatcgctccagagtgaagttcagcagaagcgccgacgcccctgcctaccagcagggacagaaccaactgtacaacgagctgaacctgggcagacgggaagagtacgacgtgctggacaagcggagaggcagggaccctgagatgggcggaaagccccagcggagaaagaacccccaggaaggactgtataacgaactccagaaagacaagatggccgaagcctacagcgagatcggcatgaagggcgagcggagaagaggcaagggccacgatggcctgtaccagggcctgagcaccgccaccaaggacacctatgacgccctgcacatgcaggccctgcctccaaga

SEQ ID NO: 25827 - DNA, 750 bp, synthetic construct
  source 1..750: mol_type = other DNA
cccgagaagtccctggacaaagaacacagatgcatcgtgcggcacgaaaacaacaagaacggcgtggaccaggaaatcatcttcccacccatcaagaccgatgtgattacaatggaccccaaggacaactgctccaaggacgccaacgataccctgctgctccagctgaccaacaccagcgcctactacatgtacttgttgctgctgctgaagtccgtggtgtacttcgccatcatcacatgctgcctgctgcggagaaccgccttctgctgcaacggcgagaagtctaggagtaagaggagcaggctcctgcacagtgactacatgaacatgactccacgccgccccggacccacccgcaagcattaccagccctatgccccaccacgcgacttcgcagcctatcgctccagagtgaagttcagcagaagcgccgacgcccctgcctaccagcagggacagaaccaactgtacaacgagctgaacctgggcagacgggaagagtacgacgtgctggacaagcggagaggcagggaccctgagatgggcggaaagccccagcggagaaagaacccccaggaaggactgtataacgaactccagaaagacaagatggccgaagcctacagcgagatcggcatgaagggcgagcggagaagaggcaagggccacgatggcctgtaccagggcctgagcaccgccaccaaggacacctatgacgccctgcacatgcaggccctgcctccaaga

SEQ ID NO: 25828 - DNA, 747 bp, synthetic construct
  source 1..747: mol_type = other DNA
gagaagtccctggacaaagaacacagatgcatcgtgcggcacgaaaacaacaagaacggcgtggaccaggaaatcatcttcccacccatcaagaccgatgtgattacaatggaccccaaggacaactgctccaaggacgccaacgataccctgctgctccagctgaccaacaccagcgcctactacatgtacttgttgctgctgctgaagtccgtggtgtacttcgccatcatcacatgctgcctgctgcggagaaccgccttctgctgcaacggcgagaagtctaggagtaagaggagcaggctcctgcacagtgactacatgaacatgactccacgccgccccggacccacccgcaagcattaccagccctatgccccaccacgcgacttcgcagcctatcgctccagagtgaagttcagcagaagcgccgacgcccctgcctaccagcagggacagaaccaactgtacaacgagctgaacctgggcagacgggaagagtacgacgtgctggacaagcggagaggcagggaccctgagatgggcggaaagccccagcggagaaagaacccccaggaaggactgtataacgaactccagaaagacaagatggccgaagcctacagcgagatcggcatgaagggcgagcggagaagaggcaagggccacgatggcctgtaccagggcctgagcaccgccaccaaggacacctatgacgccctgcacatgcaggccctgcctccaaga

SEQ ID NO: 25829 - DNA, 744 bp, synthetic construct
  source 1..744: mol_type = other DNA
aagtccctggacaaagaacacagatgcatcgtgcggcacgaaaacaacaagaacggcgtggaccaggaaatcatcttcccacccatcaagaccgatgtgattacaatggaccccaaggacaactgctccaaggacgccaacgataccctgctgctccagctgaccaacaccagcgcctactacatgtacttgttgctgctgctgaagtccgtggtgtacttcgccatcatcacatgctgcctgctgcggagaaccgccttctgctgcaacggcgagaagtctaggagtaagaggagcaggctcctgcacagtgactacatgaacatgactccacgccgccccggacccacccgcaagcattaccagccctatgccccaccacgcgacttcgcagcctatcgctccagagtgaagttcagcagaagcgccgacgcccctgcctaccagcagggacagaaccaactgtacaacgagctgaacctgggcagacgggaagagtacgacgtgctggacaagcggagaggcagggaccctgagatgggcggaaagccccagcggagaaagaacccccaggaaggactgtataacgaactccagaaagacaagatggccgaagcctacagcgagatcggcatgaagggcgagcggagaagaggcaagggccacgatggcctgtaccagggcctgagcaccgccaccaaggacacctatgacgccctgcacatgcaggccctgcctccaaga

SEQ ID NO: 25830 - DNA, 741 bp, synthetic construct
  source 1..741: mol_type = other DNA
tccctggacaaagaacacagatgcatcgtgcggcacgaaaacaacaagaacggcgtggaccaggaaatcatcttcccacccatcaagaccgatgtgattacaatggaccccaaggacaactgctccaaggacgccaacgataccctgctgctccagctgaccaacaccagcgcctactacatgtacttgttgctgctgctgaagtccgtggtgtacttcgccatcatcacatgctgcctgctgcggagaaccgccttctgctgcaacggcgagaagtctaggagtaagaggagcaggctcctgcacagtgactacatgaacatgactccacgccgccccggacccacccgcaagcattaccagccctatgccccaccacgcgacttcgcagcctatcgctccagagtgaagttcagcagaagcgccgacgcccctgcctaccagcagggacagaaccaactgtacaacgagctgaacctgggcagacgggaagagtacgacgtgctggacaagcggagaggcagggaccctgagatgggcggaaagccccagcggagaaagaacccccaggaaggactgtataacgaactccagaaagacaagatggccgaagcctacagcgagatcggcatgaagggcgagcggagaagaggcaagggccacgatggcctgtaccagggcctgagcaccgccaccaaggacacctatgacgccctgcacatgcaggccctgcctccaaga

SEQ ID NO: 25831 - DNA, 738 bp, synthetic construct
  source 1..738: mol_type = other DNA
ctggacaaagaacacagatgcatcgtgcggcacgaaaacaacaagaacggcgtggaccaggaaatcatcttcccacccatcaagaccgatgtgattacaatggaccccaaggacaactgctccaaggacgccaacgataccctgctgctccagctgaccaacaccagcgcctactacatgtacttgttgctgctgctgaagtccgtggtgtacttcgccatcatcacatgctgcctgctgcggagaaccgccttctgctgcaacggcgagaagtctaggagtaagaggagcaggctcctgcacagtgactacatgaacatgactccacgccgccccggacccacccgcaagcattaccagccctatgccccaccacgcgacttcgcagcctatcgctccagagtgaagttcagcagaagcgccgacgcccctgcctaccagcagggacagaaccaactgtacaacgagctgaacctgggcagacgggaagagtacgacgtgctggacaagcggagaggcagggaccctgagatgggcggaaagccccagcggagaaagaacccccaggaaggactgtataacgaactccagaaagacaagatggccgaagcctacagcgagatcggcatgaagggcgagcggagaagaggcaagggccacgatggcctgtaccagggcctgagcaccgccaccaaggacacctatgacgccctgcacatgcaggccctgcctccaaga

SEQ ID NO: 25832 - DNA, 735 bp, synthetic construct
  source 1..735: mol_type = other DNA
gacaaagaacacagatgcatcgtgcggcacgaaaacaacaagaacggcgtggaccaggaaatcatcttcccacccatcaagaccgatgtgattacaatggaccccaaggacaactgctccaaggacgccaacgataccctgctgctccagctgaccaacaccagcgcctactacatgtacttgttgctgctgctgaagtccgtggtgtacttcgccatcatcacatgctgcctgctgcggagaaccgccttctgctgcaacggcgagaagtctaggagtaagaggagcaggctcctgcacagtgactacatgaacatgactccacgccgccccggacccacccgcaagcattaccagccctatgccccaccacgcgacttcgcagcctatcgctccagagtgaagttcagcagaagcgccgacgcccctgcctaccagcagggacagaaccaactgtacaacgagctgaacctgggcagacgggaagagtacgacgtgctggacaagcggagaggcagggaccctgagatgggcggaaagccccagcggagaaagaacccccaggaaggactgtataacgaactccagaaagacaagatggccgaagcctacagcgagatcggcatgaagggcgagcggagaagaggcaagggccacgatggcctgtaccagggcctgagcaccgccaccaaggacacctatgacgccctgcacatgcaggccctgcctccaaga

SEQ ID NO: 25833 - DNA, 732 bp, synthetic construct
  source 1..732: mol_type = other DNA
aaagaacacagatgcatcgtgcggcacgaaaacaacaagaacggcgtggaccaggaaatcatcttcccacccatcaagaccgatgtgattacaatggaccccaaggacaactgctccaaggacgccaacgataccctgctgctccagctgaccaacaccagcgcctactacatgtacttgttgctgctgctgaagtccgtggtgtacttcgccatcatcacatgctgcctgctgcggagaaccgccttctgctgcaacggcgagaagtctaggagtaagaggagcaggctcctgcacagtgactacatgaacatgactccacgccgccccggacccacccgcaagcattaccagccctatgccccaccacgcgacttcgcagcctatcgctccagagtgaagttcagcagaagcgccgacgcccctgcctaccagcagggacagaaccaactgtacaacgagctgaacctgggcagacgggaagagtacgacgtgctggacaagcggagaggcagggaccctgagatgggcggaaagccccagcggagaaagaacccccaggaaggactgtataacgaactccagaaagacaagatggccgaagcctacagcgagatcggcatgaagggcgagcggagaagaggcaagggccacgatggcctgtaccagggcctgagcaccgccaccaaggacacctatgacgccctgcacatgcaggccctgcctccaaga

SEQ ID NO: 25834 - DNA, 729 bp, synthetic construct
  source 1..729: mol_type = other DNA
gaacacagatgcatcgtgcggcacgaaaacaacaagaacggcgtggaccaggaaatcatcttcccacccatcaagaccgatgtgattacaatggaccccaaggacaactgctccaaggacgccaacgataccctgctgctccagctgaccaacaccagcgcctactacatgtacttgttgctgctgctgaagtccgtggtgtacttcgccatcatcacatgctgcctgctgcggagaaccgccttctgctgcaacggcgagaagtctaggagtaagaggagcaggctcctgcacagtgactacatgaacatgactccacgccgccccggacccacccgcaagcattaccagccctatgccccaccacgcgacttcgcagcctatcgctccagagtgaagttcagcagaagcgccgacgcccctgcctaccagcagggacagaaccaactgtacaacgagctgaacctgggcagacgggaagagtacgacgtgctggacaagcggagaggcagggaccctgagatgggcggaaagccccagcggagaaagaacccccaggaaggactgtataacgaactccagaaagacaagatggccgaagcctacagcgagatcggcatgaagggcgagcggagaagaggcaagggccacgatggcctgtaccagggcctgagcaccgccaccaaggacacctatgacgccctgcacatgcaggccctgcctccaaga

SEQ ID NO: 25835 - DNA, 726 bp, synthetic construct
  source 1..726: mol_type = other DNA
cacagatgcatcgtgcggcacgaaaacaacaagaacggcgtggaccaggaaatcatcttcccacccatcaagaccgatgtgattacaatggaccccaaggacaactgctccaaggacgccaacgataccctgctgctccagctgaccaacaccagcgcctactacatgtacttgttgctgctgctgaagtccgtggtgtacttcgccatcatcacatgctgcctgctgcggagaaccgccttctgctgcaacggcgagaagtctaggagtaagaggagcaggctcctgcacagtgactacatgaacatgactccacgccgccccggacccacccgcaagcattaccagccctatgccccaccacgcgacttcgcagcctatcgctccagagtgaagttcagcagaagcgccgacgcccctgcctaccagcagggacagaaccaactgtacaacgagctgaacctgggcagacgggaagagtacgacgtgctggacaagcggagaggcagggaccctgagatgggcggaaagccccagcggagaaagaacccccaggaaggactgtataacgaactccagaaagacaagatggccgaagcctacagcgagatcggcatgaagggcgagcggagaagaggcaagggccacgatggcctgtaccagggcctgagcaccgccaccaaggacacctatgacgccctgcacatgcaggccctgcctccaaga

SEQ ID NO: 25836 - DNA, 723 bp, synthetic construct
  source 1..723: mol_type = other DNA
agatgcatcgtgcggcacgaaaacaacaagaacggcgtggaccaggaaatcatcttcccacccatcaagaccgatgtgattacaatggaccccaaggacaactgctccaaggacgccaacgataccctgctgctccagctgaccaacaccagcgcctactacatgtacttgttgctgctgctgaagtccgtggtgtacttcgccatcatcacatgctgcctgctgcggagaaccgccttctgctgcaacggcgagaagtctaggagtaagaggagcaggctcctgcacagtgactacatgaacatgactccacgccgccccggacccacccgcaagcattaccagccctatgccccaccacgcgacttcgcagcctatcgctccagagtgaagttcagcagaagcgccgacgcccctgcctaccagcagggacagaaccaactgtacaacgagctgaacctgggcagacgggaagagtacgacgtgctggacaagcggagaggcagggaccctgagatgggcggaaagccccagcggagaaagaacccccaggaaggactgtataacgaactccagaaagacaagatggccgaagcctacagcgagatcggcatgaagggcgagcggagaagaggcaagggccacgatggcctgtaccagggcctgagcaccgccaccaaggacacctatgacgccctgcacatgcaggccctgcctccaaga

SEQ ID NO: 25837 - DNA, 720 bp, synthetic construct
  source 1..720: mol_type = other DNA
tgcatcgtgcggcacgaaaacaacaagaacggcgtggaccaggaaatcatcttcccacccatcaagaccgatgtgattacaatggaccccaaggacaactgctccaaggacgccaacgataccctgctgctccagctgaccaacaccagcgcctactacatgtacttgttgctgctgctgaagtccgtggtgtacttcgccatcatcacatgctgcctgctgcggagaaccgccttctgctgcaacggcgagaagtctaggagtaagaggagcaggctcctgcacagtgactacatgaacatgactccacgccgccccggacccacccgcaagcattaccagccctatgccccaccacgcgacttcgcagcctatcgctccagagtgaagttcagcagaagcgccgacgcccctgcctaccagcagggacagaaccaactgtacaacgagctgaacctgggcagacgggaagagtacgacgtgctggacaagcggagaggcagggaccctgagatgggcggaaagccccagcggagaaagaacccccaggaaggactgtataacgaactccagaaagacaagatggccgaagcctacagcgagatcggcatgaagggcgagcggagaagaggcaagggccacgatggcctgtaccagggcctgagcaccgccaccaaggacacctatgacgccctgcacatgcaggccctgcctccaaga

SEQ ID NO: 25838 - DNA, 717 bp, synthetic construct
  source 1..717: mol_type = other DNA
atcgtgcggcacgaaaacaacaagaacggcgtggaccaggaaatcatcttcccacccatcaagaccgatgtgattacaatggaccccaaggacaactgctccaaggacgccaacgataccctgctgctccagctgaccaacaccagcgcctactacatgtacttgttgctgctgctgaagtccgtggtgtacttcgccatcatcacatgctgcctgctgcggagaaccgccttctgctgcaacggcgagaagtctaggagtaagaggagcaggctcctgcacagtgactacatgaacatgactccacgccgccccggacccacccgcaagcattaccagccctatgccccaccacgcgacttcgcagcctatcgctccagagtgaagttcagcagaagcgccgacgcccctgcctaccagcagggacagaaccaactgtacaacgagctgaacctgggcagacgggaagagtacgacgtgctggacaagcggagaggcagggaccctgagatgggcggaaagccccagcggagaaagaacccccaggaaggactgtataacgaactccagaaagacaagatggccgaagcctacagcgagatcggcatgaagggcgagcggagaagaggcaagggccacgatggcctgtaccagggcctgagcaccgccaccaaggacacctatgacgccctgcacatgcaggccctgcctccaaga

SEQ ID NO: 25839 - DNA, 714 bp, synthetic construct
  source 1..714: mol_type = other DNA
gtgcggcacgaaaacaacaagaacggcgtggaccaggaaatcatcttcccacccatcaagaccgatgtgattacaatggaccccaaggacaactgctccaaggacgccaacgataccctgctgctccagctgaccaacaccagcgcctactacatgtacttgttgctgctgctgaagtccgtggtgtacttcgccatcatcacatgctgcctgctgcggagaaccgccttctgctgcaacggcgagaagtctaggagtaagaggagcaggctcctgcacagtgactacatgaacatgactccacgccgccccggacccacccgcaagcattaccagccctatgccccaccacgcgacttcgcagcctatcgctccagagtgaagttcagcagaagcgccgacgcccctgcctaccagcagggacagaaccaactgtacaacgagctgaacctgggcagacgggaagagtacgacgtgctggacaagcggagaggcagggaccctgagatgggcggaaagccccagcggagaaagaacccccaggaaggactgtataacgaactccagaaagacaagatggccgaagcctacagcgagatcggcatgaagggcgagcggagaagaggcaagggccacgatggcctgtaccagggcctgagcaccgccaccaaggacacctatgacgccctgcacatgcaggccctgcctccaaga

SEQ ID NO: 25840 - DNA, 711 bp, synthetic construct
  source 1..711: mol_type = other DNA
cggcacgaaaacaacaagaacggcgtggaccaggaaatcatcttcccacccatcaagaccgatgtgattacaatggaccccaaggacaactgctccaaggacgccaacgataccctgctgctccagctgaccaacaccagcgcctactacatgtacttgttgctgctgctgaagtccgtggtgtacttcgccatcatcacatgctgcctgctgcggagaaccgccttctgctgcaacggcgagaagtctaggagtaagaggagcaggctcctgcacagtgactacatgaacatgactccacgccgccccggacccacccgcaagcattaccagccctatgccccaccacgcgacttcgcagcctatcgctccagagtgaagttcagcagaagcgccgacgcccctgcctaccagcagggacagaaccaactgtacaacgagctgaacctgggcagacgggaagagtacgacgtgctggacaagcggagaggcagggaccctgagatgggcggaaagccccagcggagaaagaacccccaggaaggactgtataacgaactccagaaagacaagatggccgaagcctacagcgagatcggcatgaagggcgagcggagaagaggcaagggccacgatggcctgtaccagggcctgagcaccgccaccaaggacacctatgacgccctgcacatgcaggccctgcctccaaga

SEQ ID NO: 25841 - DNA, 708 bp, synthetic construct
  source 1..708: mol_type = other DNA
cacgaaaacaacaagaacggcgtggaccaggaaatcatcttcccacccatcaagaccgatgtgattacaatggaccccaaggacaactgctccaaggacgccaacgataccctgctgctccagctgaccaacaccagcgcctactacatgtacttgttgctgctgctgaagtccgtggtgtacttcgccatcatcacatgctgcctgctgcggagaaccgccttctgctgcaacggcgagaagtctaggagtaagaggagcaggctcctgcacagtgactacatgaacatgactccacgccgccccggacccacccgcaagcattaccagccctatgccccaccacgcgacttcgcagcctatcgctccagagtgaagttcagcagaagcgccgacgcccctgcctaccagcagggacagaaccaactgtacaacgagctgaacctgggcagacgggaagagtacgacgtgctggacaagcggagaggcagggaccctgagatgggcggaaagccccagcggagaaagaacccccaggaaggactgtataacgaactccagaaagacaagatggccgaagcctacagcgagatcggcatgaagggcgagcggagaagaggcaagggccacgatggcctgtaccagggcctgagcaccgccaccaaggacacctatgacgccctgcacatgcaggccctgcctccaaga

SEQ ID NO: 25842 - DNA, 705 bp, synthetic construct
  source 1..705: mol_type = other DNA
gaaaacaacaagaacggcgtggaccaggaaatcatcttcccacccatcaagaccgatgtgattacaatggaccccaaggacaactgctccaaggacgccaacgataccctgctgctccagctgaccaacaccagcgcctactacatgtacttgttgctgctgctgaagtccgtggtgtacttcgccatcatcacatgctgcctgctgcggagaaccgccttctgctgcaacggcgagaagtctaggagtaagaggagcaggctcctgcacagtgactacatgaacatgactccacgccgccccggacccacccgcaagcattaccagccctatgccccaccacgcgacttcgcagcctatcgctccagagtgaagttcagcagaagcgccgacgcccctgcctaccagcagggacagaaccaactgtacaacgagctgaacctgggcagacgggaagagtacgacgtgctggacaagcggagaggcagggaccctgagatgggcggaaagccccagcggagaaagaacccccaggaaggactgtataacgaactccagaaagacaagatggccgaagcctacagcgagatcggcatgaagggcgagcggagaagaggcaagggccacgatggcctgtaccagggcctgagcaccgccaccaaggacacctatgacgccctgcacatgcaggccctgcctccaaga

SEQ ID NO: 25843 - DNA, 702 bp, synthetic construct
  source 1..702: mol_type = other DNA
aacaacaagaacggcgtggaccaggaaatcatcttcccacccatcaagaccgatgtgattacaatggaccccaaggacaactgctccaaggacgccaacgataccctgctgctccagctgaccaacaccagcgcctactacatgtacttgttgctgctgctgaagtccgtggtgtacttcgccatcatcacatgctgcctgctgcggagaaccgccttctgctgcaacggcgagaagtctaggagtaagaggagcaggctcctgcacagtgactacatgaacatgactccacgccgccccggacccacccgcaagcattaccagccctatgccccaccacgcgacttcgcagcctatcgctccagagtgaagttcagcagaagcgccgacgcccctgcctaccagcagggacagaaccaactgtacaacgagctgaacctgggcagacgggaagagtacgacgtgctggacaagcggagaggcagggaccctgagatgggcggaaagccccagcggagaaagaacccccaggaaggactgtataacgaactccagaaagacaagatggccgaagcctacagcgagatcggcatgaagggcgagcggagaagaggcaagggccacgatggcctgtaccagggcctgagcaccgccaccaaggacacctatgacgccctgcacatgcaggccctgcctccaaga

SEQ ID NO: 25844 - DNA, 699 bp, synthetic construct
  source 1..699: mol_type = other DNA
aacaagaacggcgtggaccaggaaatcatcttcccacccatcaagaccgatgtgattacaatggaccccaaggacaactgctccaaggacgccaacgataccctgctgctccagctgaccaacaccagcgcctactacatgtacttgttgctgctgctgaagtccgtggtgtacttcgccatcatcacatgctgcctgctgcggagaaccgccttctgctgcaacggcgagaagtctaggagtaagaggagcaggctcctgcacagtgactacatgaacatgactccacgccgccccggacccacccgcaagcattaccagccctatgccccaccacgcgacttcgcagcctatcgctccagagtgaagttcagcagaagcgccgacgcccctgcctaccagcagggacagaaccaactgtacaacgagctgaacctgggcagacgggaagagtacgacgtgctggacaagcggagaggcagggaccctgagatgggcggaaagccccagcggagaaagaacccccaggaaggactgtataacgaactccagaaagacaagatggccgaagcctacagcgagatcggcatgaagggcgagcggagaagaggcaagggccacgatggcctgtaccagggcctgagcaccgccaccaaggacacctatgacgccctgcacatgcaggccctgcctccaaga

SEQ ID NO: 25845 - DNA, 696 bp, synthetic construct
  source 1..696: mol_type = other DNA
aagaacggcgtggaccaggaaatcatcttcccacccatcaagaccgatgtgattacaatggaccccaaggacaactgctccaaggacgccaacgataccctgctgctccagctgaccaacaccagcgcctactacatgtacttgttgctgctgctgaagtccgtggtgtacttcgccatcatcacatgctgcctgctgcggagaaccgccttctgctgcaacggcgagaagtctaggagtaagaggagcaggctcctgcacagtgactacatgaacatgactccacgccgccccggacccacccgcaagcattaccagccctatgccccaccacgcgacttcgcagcctatcgctccagagtgaagttcagcagaagcgccgacgcccctgcctaccagcagggacagaaccaactgtacaacgagctgaacctgggcagacgggaagagtacgacgtgctggacaagcggagaggcagggaccctgagatgggcggaaagccccagcggagaaagaacccccaggaaggactgtataacgaactccagaaagacaagatggccgaagcctacagcgagatcggcatgaagggcgagcggagaagaggcaagggccacgatggcctgtaccagggcctgagcaccgccaccaaggacacctatgacgccctgcacatgcaggccctgcctccaaga

SEQ ID NO: 25846 - DNA, 693 bp, synthetic construct
  source 1..693: mol_type = other DNA
aacggcgtggaccaggaaatcatcttcccacccatcaagaccgatgtgattacaatggaccccaaggacaactgctccaaggacgccaacgataccctgctgctccagctgaccaacaccagcgcctactacatgtacttgttgctgctgctgaagtccgtggtgtacttcgccatcatcacatgctgcctgctgcggagaaccgccttctgctgcaacggcgagaagtctaggagtaagaggagcaggctcctgcacagtgactacatgaacatgactccacgccgccccggacccacccgcaagcattaccagccctatgccccaccacgcgacttcgcagcctatcgctccagagtgaagttcagcagaagcgccgacgcccctgcctaccagcagggacagaaccaactgtacaacgagctgaacctgggcagacgggaagagtacgacgtgctggacaagcggagaggcagggaccctgagatgggcggaaagccccagcggagaaagaacccccaggaaggactgtataacgaactccagaaagacaagatggccgaagcctacagcgagatcggcatgaagggcgagcggagaagaggcaagggccacgatggcctgtaccagggcctgagcaccgccaccaaggacacctatgacgccctgcacatgcaggccctgcctccaaga

SEQ ID NO: 25847 - DNA, 690 bp, synthetic construct
  source 1..690: mol_type = other DNA
ggcgtggaccaggaaatcatcttcccacccatcaagaccgatgtgattacaatggaccccaaggacaactgctccaaggacgccaacgataccctgctgctccagctgaccaacaccagcgcctactacatgtacttgttgctgctgctgaagtccgtggtgtacttcgccatcatcacatgctgcctgctgcggagaaccgccttctgctgcaacggcgagaagtctaggagtaagaggagcaggctcctgcacagtgactacatgaacatgactccacgccgccccggacccacccgcaagcattaccagccctatgccccaccacgcgacttcgcagcctatcgctccagagtgaagttcagcagaagcgccgacgcccctgcctaccagcagggacagaaccaactgtacaacgagctgaacctgggcagacgggaagagtacgacgtgctggacaagcggagaggcagggaccctgagatgggcggaaagccccagcggagaaagaacccccaggaaggactgtataacgaactccagaaagacaagatggccgaagcctacagcgagatcggcatgaagggcgagcggagaagaggcaagggccacgatggcctgtaccagggcctgagcaccgccaccaaggacacctatgacgccctgcacatgcaggccctgcctccaaga

SEQ ID NO: 25848 - DNA, 687 bp, synthetic construct
  source 1..687: mol_type = other DNA
gtggaccaggaaatcatcttcccacccatcaagaccgatgtgattacaatggaccccaaggacaactgctccaaggacgccaacgataccctgctgctccagctgaccaacaccagcgcctactacatgtacttgttgctgctgctgaagtccgtggtgtacttcgccatcatcacatgctgcctgctgcggagaaccgccttctgctgcaacggcgagaagtctaggagtaagaggagcaggctcctgcacagtgactacatgaacatgactccacgccgccccggacccacccgcaagcattaccagccctatgccccaccacgcgacttcgcagcctatcgctccagagtgaagttcagcagaagcgccgacgcccctgcctaccagcagggacagaaccaactgtacaacgagctgaacctgggcagacgggaagagtacgacgtgctggacaagcggagaggcagggaccctgagatgggcggaaagccccagcggagaaagaacccccaggaaggactgtataacgaactccagaaagacaagatggccgaagcctacagcgagatcggcatgaagggcgagcggagaagaggcaagggccacgatggcctgtaccagggcctgagcaccgccaccaaggacacctatgacgccctgcacatgcaggccctgcctccaaga

SEQ ID NO: 25849 - DNA, 684 bp, synthetic construct
  source 1..684: mol_type = other DNA
gaccaggaaatcatcttcccacccatcaagaccgatgtgattacaatggaccccaaggacaactgctccaaggacgccaacgataccctgctgctccagctgaccaacaccagcgcctactacatgtacttgttgctgctgctgaagtccgtggtgtacttcgccatcatcacatgctgcctgctgcggagaaccgccttctgctgcaacggcgagaagtctaggagtaagaggagcaggctcctgcacagtgactacatgaacatgactccacgccgccccggacccacccgcaagcattaccagccctatgccccaccacgcgacttcgcagcctatcgctccagagtgaagttcagcagaagcgccgacgcccctgcctaccagcagggacagaaccaactgtacaacgagctgaacctgggcagacgggaagagtacgacgtgctggacaagcggagaggcagggaccctgagatgggcggaaagccccagcggagaaagaacccccaggaaggactgtataacgaactccagaaagacaagatggccgaagcctacagcgagatcggcatgaagggcgagcggagaagaggcaagggccacgatggcctgtaccagggcctgagcaccgccaccaaggacacctatgacgccctgcacatgcaggccctgcctccaaga

SEQ ID NO: 25850 - DNA, 681 bp, synthetic construct
  source 1..681: mol_type = other DNA
caggaaatcatcttcccacccatcaagaccgatgtgattacaatggaccccaaggacaactgctccaaggacgccaacgataccctgctgctccagctgaccaacaccagcgcctactacatgtacttgttgctgctgctgaagtccgtggtgtacttcgccatcatcacatgctgcctgctgcggagaaccgccttctgctgcaacggcgagaagtctaggagtaagaggagcaggctcctgcacagtgactacatgaacatgactccacgccgccccggacccacccgcaagcattaccagccctatgccccaccacgcgacttcgcagcctatcgctccagagtgaagttcagcagaagcgccgacgcccctgcctaccagcagggacagaaccaactgtacaacgagctgaacctgggcagacgggaagagtacgacgtgctggacaagcggagaggcagggaccctgagatgggcggaaagccccagcggagaaagaacccccaggaaggactgtataacgaactccagaaagacaagatggccgaagcctacagcgagatcggcatgaagggcgagcggagaagaggcaagggccacgatggcctgtaccagggcctgagcaccgccaccaaggacacctatgacgccctgcacatgcaggccctgcctccaaga

SEQ ID NO: 25851 - DNA, 921 bp, synthetic construct; identical to SEQ ID NO: 25283
  source 1..921: mol_type = other DNA

SEQ ID NO: 25852 - DNA, 918 bp, synthetic construct
  source 1..918: mol_type = other DNA
cagcctcacaccaagcccagcgtgttcgtgatgaagaacggcaccaacgtggcctgcctcgtgaaagagttctaccccaaggacatcaggatcaacctggtgtccagcaagaagatcaccgagttcgaccccgccatcgtgatctcccccagcggcaagtacaacgccgtgaagctggggaagtacgaggacagcaacagcgtgacctgctccgtgcagcacgacaacaagaccgtgcacagcaccgactttgaagtgaaaaccgactccaccgaccacgtgaagcccaaagagacagagaacaccaagcagcccagcaagagctgccacaagcccaaggccatcgtgcacaccgagaaagtgaacatgatgagcctgaccgtgctgggcctgcggatgctgttcgccaaaaccgtggccgtgaacttcctgctgaccgccaagctgttcttcctcaggagtaagaggagcaggctcctgcacagtgactacatgaacatgactccacgccgccccggacccacccgcaagcattaccagccctatgccccaccacgcgacttcgcagcctatcgctccagagtgaagttcagcagaagcgccgacgcccctgcctaccagcagggacagaaccaactgtacaacgagctgaacctgggcagacgggaagagtacgacgtgctggacaagcggagaggcagggaccctgagatgggcggaaagccccagcggagaaagaacccccaggaaggactgtataacgaactccagaaagacaagatggccgaagcctacagcgagatcggcatgaagggcgagcggagaagaggcaagggccacgatggcctgtaccagggcctgagcaccgccaccaaggacacctatgacgccctgcacatgcaggccctgcctccaaga

SEQ ID NO: 25853 - DNA, 915 bp, synthetic construct
  source 1..915: mol_type = other DNA
cctcacaccaagcccagcgtgttcgtgatgaagaacggcaccaacgtggcctgcctcgtgaaagagttctaccccaaggacatcaggatcaacctggtgtccagcaagaagatcaccgagttcgaccccgccatcgtgatctcccccagcggcaagtacaacgccgtgaagctggggaagtacgaggacagcaacagcgtgacctgctccgtgcagcacgacaacaagaccgtgcacagcaccgactttgaagtgaaaaccgactccaccgaccacgtgaagcccaaagagacagagaacaccaagcagcccagcaagagctgccacaagcccaaggccatcgtgcacaccgagaaagtgaacatgatgagcctgaccgtgctgggcctgcggatgctgttcgccaaaaccgtggccgtgaacttcctgctgaccgccaagctgttcttcctcaggagtaagaggagcaggctcctgcacagtgactacatgaacatgactccacgccgccccggacccacccgcaagcattaccagccctatgccccaccacgcgacttcgcagcctatcgctccagagtgaagttcagcagaagcgccgacgcccctgcctaccagcagggacagaaccaactgtacaacgagctgaacctgggcagacgggaagagtacgacgtgctggacaagcggagaggcagggaccctgagatgggcggaaagccccagcggagaaagaacccccaggaaggactgtataacgaactccagaaagacaagatggccgaagcctacagcgagatcggcatgaagggcgagcggagaagaggcaagggccacgatggcctgtaccagggcctgagcaccgccaccaaggacacctatgacgccctgcacatgcaggccctgcctccaaga

SEQ ID NO: 25854 - DNA, 912 bp, synthetic construct
  source 1..912: mol_type = other DNA
cacaccaagcccagcgtgttcgtgatgaagaacggcaccaacgtggcctgcctcgtgaaagagttctaccccaaggacatcaggatcaacctggtgtccagcaagaagatcaccgagttcgaccccgccatcgtgatctcccccagcggcaagtacaacgccgtgaagctggggaagtacgaggacagcaacagcgtgacctgctccgtgcagcacgacaacaagaccgtgcacagcaccgactttgaagtgaaaaccgactccaccgaccacgtgaagcccaaagagacagagaacaccaagcagcccagcaagagctgccacaagcccaaggccatcgtgcacaccgagaaagtgaacatgatgagcctgaccgtgctgggcctgcggatgctgttcgccaaaaccgtggccgtgaacttcctgctgaccgccaagctgttcttcctcaggagtaagaggagcaggctcctgcacagtgactacatgaacatgactccacgccgccccggacccacccgcaagcattaccagccctatgccccaccacgcgacttcgcagcctatcgctccagagtgaagttcagcagaagcgccgacgcccctgcctaccagcagggacagaaccaactgtacaacgagctgaacctgggcagacgggaagagtacgacgtgctggacaagcggagaggcagggaccctgagatgggcggaaagccccagcggagaaagaacccccaggaaggactgtataacgaactccagaaagacaagatggccgaagcctacagcgagatcggcatgaagggcgagcggagaagaggcaagggccacgatggcctgtaccagggcctgagcaccgccaccaaggacacctatgacgccctgcacatgcaggccctgcctccaaga

SEQ ID NO: 25855 - DNA, 909 bp, synthetic construct
  source 1..909: mol_type = other DNA
accaagcccagcgtgttcgtgatgaagaacggcaccaacgtggcctgcctcgtgaaagagttctaccccaaggacatcaggatcaacctggtgtccagcaagaagatcaccgagttcgaccccgccatcgtgatctcccccagcggcaagtacaacgccgtgaagctggggaagtacgaggacagcaacagcgtgacctgctccgtgcagcacgacaacaagaccgtgcacagcaccgactttgaagtgaaaaccgactccaccgaccacgtgaagcccaaagagacagagaacaccaagcagcccagcaagagctgccacaagcccaaggccatcgtgcacaccgagaaagtgaacatgatgagcctgaccgtgctgggcctgcggatgctgttcgccaaaaccgtggccgtgaacttcctgctgaccgccaagctgttcttcctcaggagtaagaggagcaggctcctgcacagtgactacatgaacatgactccacgccgccccggacccacccgcaagcattaccagccctatgccccaccacgcgacttcgcagcctatcgctccagagtgaagttcagcagaagcgccgacgcccctgcctaccagcagggacagaaccaactgtacaacgagctgaacctgggcagacgggaagagtacgacgtgctggacaagcggagaggcagggaccctgagatgggcggaaagccccagcggagaaagaacccccaggaaggactgtataacgaactccagaaagacaagatggccgaagcctacagcgagatcggcatgaagggcgagcggagaagaggcaagggccacgatggcctgtaccagggcctgagcaccgccaccaaggacacctatgacgccctgcacatgcaggccctgcctccaaga

SEQ ID NO: 25856 - DNA, 906 bp, synthetic construct
  source 1..906: mol_type = other DNA
aagcccagcgtgttcgtgatgaagaacggcaccaacgtggcctgcctcgtgaaagagttctaccccaaggacatcaggatcaacctggtgtccagcaagaagatcaccgagttcgaccccgccatcgtgatctcccccagcggcaagtacaacgccgtgaagctggggaagtacgaggacagcaacagcgtgacctgctccgtgcagcacgacaacaagaccgtgcacagcaccgactttgaagtgaaaaccgactccaccgaccacgtgaagcccaaagagacagagaacaccaagcagcccagcaagagctgccacaagcccaaggccatcgtgcacaccgagaaagtgaacatgatgagcctgaccgtgctgggcctgcggatgctgttcgccaaaaccgtggccgtgaacttcctgctgaccgccaagctgttcttcctcaggagtaagaggagcaggctcctgcacagtgactacatgaacatgactccacgccgccccggacccacccgcaagcattaccagccctatgccccaccacgcgacttcgcagcctatcgctccagagtgaagttcagcagaagcgccgacgcccctgcctaccagcagggacagaaccaactgtacaacgagctgaacctgggcagacgggaagagtacgacgtgctggacaagcggagaggcagggaccctgagatgggcggaaagccccagcggagaaagaacccccaggaaggactgtataacgaactccagaaagacaagatggccgaagcctacagcgagatcggcatgaagggcgagcggagaagaggcaagggccacgatggcctgtaccagggcctgagcaccgccaccaaggacacctatgacgccctgcacatgcaggccctgcctccaaga

SEQ ID NO: 25857 - DNA, 900 bp, synthetic construct
  source 1..900: mol_type = other DNA
agcgtgttcgtgatgaagaacggcaccaacgtggcctgcctcgtgaaagagttctaccccaaggacatcaggatcaacctggtgtccagcaagaagatcaccgagttcgaccccgccatcgtgatctcccccagcggcaagtacaacgccgtgaagctggggaagtacgaggacagcaacagcgtgacctgctccgtgcagcacgacaacaagaccgtgcacagcaccgactttgaagtgaaaaccgactccaccgaccacgtgaagcccaaagagacagagaacaccaagcagcccagcaagagctgccacaagcccaaggccatcgtgcacaccgagaaagtgaacatgatgagcctgaccgtgctgggcctgcggatgctgttcgccaaaaccgtggccgtgaacttcctgctgaccgccaagctgttcttcctcaggagtaagaggagcaggctcctgcacagtgactacatgaacatgactccacgccgccccggacccacccgcaagcattaccagccctatgccccaccacgcgacttcgcagcctatcgctccagagtgaagttcagcagaagcgccgacgcccctgcctaccagcagggacagaaccaactgtacaacgagctgaacctgggcagacgggaagagtacgacgtgctggacaagcggagaggcagggaccctgagatgggcggaaagccccagcggagaaagaacccccaggaaggactgtataacgaactccagaaagacaagatggccgaagcctacagcgagatcggcatgaagggcgagcggagaagaggcaagggccacgatggcctgtaccagggcctgagcaccgccaccaaggacacctatgacgccctgcacatgcaggccctgcctccaaga

SEQ ID NO: 25858 - DNA, 897 bp, synthetic construct
  source 1..897: mol_type = other DNA
gtgttcgtgatgaagaacggcaccaacgtggcctgcctcgtgaaagagttctaccccaaggacatcaggatcaacctggtgtccagcaagaagatcaccgagttcgaccccgccatcgtgatctcccccagcggcaagtacaacgccgtgaagctggggaagtacgaggacagcaacagcgtgacctgctccgtgcagcacgacaacaagaccgtgcacagcaccgactttgaagtgaaaaccgactccaccgaccacgtgaagcccaaagagacagagaacaccaagcagcccagcaagagctgccacaagcccaaggccatcgtgcacaccgagaaagtgaacatgatgagcctgaccgtgctgggcctgcggatgctgttcgccaaaaccgtggccgtgaacttcctgctgaccgccaagctgttcttcctcaggagtaagaggagcaggctcctgcacagtgactacatgaacatgactccacgccgccccggacccacccgcaagcattaccagccctatgccccaccacgcgacttcgcagcctatcgctccagagtgaagttcagcagaagcgccgacgcccctgcctaccagcagggacagaaccaactgtacaacgagctgaacctgggcagacgggaagagtacgacgtgctggacaagcggagaggcagggaccctgagatgggcggaaagccccagcggagaaagaacccccaggaaggactgtataacgaactccagaaagacaagatggccgaagcctacagcgagatcggcatgaagggcgagcggagaagaggcaagggccacgatggcctgtaccagggcctgagcaccgccaccaaggacacctatgacgccctgcacatgcaggccctgcctccaaga

SEQ ID NO: 25859 - DNA, 894 bp, synthetic construct
  source 1..894: mol_type = other DNA
ttcgtgatgaagaacggcaccaacgtggcctgcctcgtgaaagagttctaccccaaggacatcaggatcaacctggtgtccagcaagaagatcaccgagttcgaccccgccatcgtgatctcccccagcggcaagtacaacgccgtgaagctggggaagtacgaggacagcaacagcgtgacctgctccgtgcagcacgacaacaagaccgtgcacagcaccgactttgaagtgaaaaccgactccaccgaccacgtgaagcccaaagagacagagaacaccaagcagcccagcaagagctgccacaagcccaaggccatcgtgcacaccgagaaagtgaacatgatgagcctgaccgtgctgggcctgcggatgctgttcgccaaaaccgtggccgtgaacttcctgctgaccgccaagctgttcttcctcaggagtaagaggagcaggctcctgcacagtgactacatgaacatgactccacgccgccccggacccacccgcaagcattaccagccctatgccccaccacgcgacttcgcagcctatcgctccagagtgaagttcagcagaagcgccgacgcccctgcctaccagcagggacagaaccaactgtacaacgagctgaacctgggcagacgggaagagtacgacgtgctggacaagcggagaggcagggaccctgagatgggcggaaagccccagcggagaaagaacccccaggaaggactgtataacgaactccagaaagacaagatggccgaagcctacagcgagatcggcatgaagggcgagcggagaagaggcaagggccacgatggcctgtaccagggcctgagcaccgccaccaaggacacctatgacgccctgcacatgcaggccctgcctccaaga

SEQ ID NO: 25860 - DNA, 891 bp, synthetic construct
  source 1..891: mol_type = other DNA
gtgatgaagaacggcaccaacgtggcctgcctcgtgaaagagttctaccccaaggacatcaggatcaacctggtgtccagcaagaagatcaccgagttcgaccccgccatcgtgatctcccccagcggcaagtacaacgccgtgaagctggggaagtacgaggacagcaacagcgtgacctgctccgtgcagcacgacaacaagaccgtgcacagcaccgactttgaagtgaaaaccgactccaccgaccacgtgaagcccaaagagacagagaacaccaagcagcccagcaagagctgccacaagcccaaggccatcgtgcacaccgagaaagtgaacatgatgagcctgaccgtgctgggcctgcggatgctgttcgccaaaaccgtggccgtgaacttcctgctgaccgccaagctgttcttcctcaggagtaagaggagcaggctcctgcacagtgactacatgaacatgactccacgccgccccggacccacccgcaagcattaccagccctatgccccaccacgcgacttcgcagcctatcgctccagagtgaagttcagcagaagcgccgacgcccctgcctaccagcagggacagaaccaactgtacaacgagctgaacctgggcagacgggaagagtacgacgtgctggacaagcggagaggcagggaccctgagatgggcggaaagccccagcggagaaagaacccccaggaaggactgtataacgaactccagaaagacaagatggccgaagcctacagcgagatcggcatgaagggcgagcggagaagaggcaagggccacgatggcctgtaccagggcctgagcaccgccaccaaggacacctatgacgccctgcacatgcaggccctgcctccaaga

SEQ ID NO: 25861 - DNA, 888 bp, synthetic construct
  source 1..888: mol_type = other DNA
atgaagaacggcaccaacgtggcctgcctcgtgaaagagttctaccccaaggacatcaggatcaacctggtgtccagcaagaagatcaccgagttcgaccccgccatcgtgatctcccccagcggcaagtacaacgccgtgaagctggggaagtacgaggacagcaacagcgtgacctgctccgtgcagcacgacaacaagaccgtgcacagcaccgactttgaagtgaaaaccgactccaccgaccacgtgaagcccaaagagacagagaacaccaagcagcccagcaagagctgccacaagcccaaggccatcgtgcacaccgagaaagtgaacatgatgagcctgaccgtgctgggcctgcggatgctgttcgccaaaaccgtggccgtgaacttcctgctgaccgccaagctgttcttcctcaggagtaagaggagcaggctcctgcacagtgactacatgaacatgactccacgccgccccggacccacccgcaagcattaccagccctatgccccaccacgcgacttcgcagcctatcgctccagagtgaagttcagcagaagcgccgacgcccctgcctaccagcagggacagaaccaactgtacaacgagctgaacctgggcagacgggaagagtacgacgtgctggacaagcggagaggcagggaccctgagatgggcggaaagccccagcggagaaagaacccccaggaaggactgtataacgaactccagaaagacaagatggccgaagcctacagcgagatcggcatgaagggcgagcggagaagaggcaagggccacgatggcctgtaccagggcctgagcaccgccaccaaggacacctatgacgccctgcacatgcaggccctgcctccaaga

SEQ ID NO: 25862 - DNA, 885 bp, synthetic construct
  source 1..885: mol_type = other DNA
aagaacggcaccaacgtggcctgcctcgtgaaagagttctaccccaaggacatcaggatcaacctggtgtccagcaagaagatcaccgagttcgaccccgccatcgtgatctcccccagcggcaagtacaacgccgtgaagctggggaagtacgaggacagcaacagcgtgacctgctccgtgcagcacgacaacaagaccgtgcacagcaccgactttgaagtgaaaaccgactccaccgaccacgtgaagcccaaagagacagagaacaccaagcagcccagcaagagctgccacaagcccaaggccatcgtgcacaccgagaaagtgaacatgatgagcctgaccgtgctgggcctgcggatgctgttcgccaaaaccgtggccgtgaacttcctgctgaccgccaagctgttcttcctcaggagtaagaggagcaggctcctgcacagtgactacatgaacatgactccacgccgccccggacccacccgcaagcattaccagccctatgccccaccacgcgacttcgcagcctatcgctccagagtgaagttcagcagaagcgccgacgcccctgcctaccagcagggacagaaccaactgtacaacgagctgaacctgggcagacgggaagagtacgacgtgctggacaagcggagaggcagggaccctgagatgggcggaaagccccagcggagaaagaacccccaggaaggactgtataacgaactccagaaagacaagatggccgaagcctacagcgagatcggcatgaagggcgagcggagaagaggcaagggccacgatggcctgtaccagggcctgagcaccgccaccaaggacacctatgacgccctgcacatgcaggccctgcctccaaga

SEQ ID NO: 25863 - DNA, 882 bp, synthetic construct
  source 1..882: mol_type = other DNA
aacggcaccaacgtggcctgcctcgtgaaagagttctaccccaaggacatcaggatcaacctggtgtccagcaagaagatcaccgagttcgaccccgccatcgtgatctcccccagcggcaagtacaacgccgtgaagctggggaagtacgaggacagcaacagcgtgacctgctccgtgcagcacgacaacaagaccgtgcacagcaccgactttgaagtgaaaaccgactccaccgaccacgtgaagcccaaagagacagagaacaccaagcagcccagcaagagctgccacaagcccaaggccatcgtgcacaccgagaaagtgaacatgatgagcctgaccgtgctgggcctgcggatgctgttcgccaaaaccgtggccgtgaacttcctgctgaccgccaagctgttcttcctcaggagtaagaggagcaggctcctgcacagtgactacatgaacatgactccacgccgccccggacccacccgcaagcattaccagccctatgccccaccacgcgacttcgcagcctatcgctccagagtgaagttcagcagaagcgccgacgcccctgcctaccagcagggacagaaccaactgtacaacgagctgaacctgggcagacgggaagagtacgacgtgctggacaagcggagaggcagggaccctgagatgggcggaaagccccagcggagaaagaacccccaggaaggactgtataacgaactccagaaagacaagatggccgaagcctacagcgagatcggcatgaagggcgagcggagaagaggcaagggccacgatggcctgtaccagggcctgagcaccgccaccaaggacacctatgacgccctgcacatgcaggccctgcctccaaga

SEQ ID NO: 25864 - DNA, 879 bp, synthetic construct
  source 1..879: mol_type = other DNA
ggcaccaacgtggcctgcctcgtgaaagagttctaccccaaggacatcaggatcaacctggtgtccagcaagaagatcaccgagttcgaccccgccatcgtgatctcccccagcggcaagtacaacgccgtgaagctggggaagtacgaggacagcaacagcgtgacctgctccgtgcagcacgacaacaagaccgtgcacagcaccgactttgaagtgaaaaccgactccaccgaccacgtgaagcccaaagagacagagaacaccaagcagcccagcaagagctgccacaagcccaaggccatcgtgcacaccgagaaagtgaacatgatgagcctgaccgtgctgggcctgcggatgctgttcgccaaaaccgtggccgtgaacttcctgctgaccgccaagctgttcttcctcaggagtaagaggagcaggctcctgcacagtgactacatgaacatgactccacgccgccccggacccacccgcaagcattaccagccctatgccccaccacgcgacttcgcagcctatcgctccagagtgaagttcagcagaagcgccgacgcccctgcctaccagcagggacagaaccaactgtacaacgagctgaacctgggcagacgggaagagtacgacgtgctggacaagcggagaggcagggaccctgagatgggcggaaagccccagcggagaaagaacccccaggaaggactgtataacgaactccagaaagacaagatggccgaagcctacagcgagatcggcatgaagggcgagcggagaagaggcaagggccacgatggcctgtaccagggcctgagcaccgccaccaaggacacctatgacgccctgcacatgcaggccctgcctccaaga

SEQ ID NO: 25865 - DNA, 876 bp, synthetic construct
  source 1..876: mol_type = other DNA
accaacgtggcctgcctcgtgaaagagttctaccccaaggacatcaggatcaacctggtgtccagcaagaagatcaccgagttcgaccccgccatcgtgatctcccccagcggcaagtacaacgccgtgaagctggggaagtacgaggacagcaacagcgtgacctgctccgtgcagcacgacaacaagaccgtgcacagcaccgactttgaagtgaaaaccgactccaccgaccacgtgaagcccaaagagacagagaacaccaagcagcccagcaagagctgccacaagcccaaggccatcgtgcacaccgagaaagtgaacatgatgagcctgaccgtgctgggcctgcggatgctgttcgccaaaaccgtggccgtgaacttcctgctgaccgccaagctgttcttcctcaggagtaagaggagcaggctcctgcacagtgactacatgaacatgactccacgccgccccggacccacccgcaagcattaccagccctatgccccaccacgcgacttcgcagcctatcgctccagagtgaagttcagcagaagcgccgacgcccctgcctaccagcagggacagaaccaactgtacaacgagctgaacctgggcagacgggaagagtacgacgtgctggacaagcggagaggcagggaccctgagatgggcggaaagccccagcggagaaagaacccccaggaaggactgtataacgaactccagaaagacaagatggccgaagcctacagcgagatcggcatgaagggcgagcggagaagaggcaagggccacgatggcctgtaccagggcctgagcaccgccaccaaggacacctatgacgccctgcacatgcaggccctgcctccaaga

SEQ ID NO: 25866 - DNA, 873 bp, synthetic construct
  source 1..873: mol_type = other DNA
aacgtggcctgcctcgtgaaagagttctaccccaaggacatcaggatcaacctggtgtccagcaagaagatcaccgagttcgaccccgccatcgtgatctcccccagcggcaagtacaacgccgtgaagctggggaagtacgaggacagcaacagcgtgacctgctccgtgcagcacgacaacaagaccgtgcacagcaccgactttgaagtgaaaaccgactccaccgaccacgtgaagcccaaagagacagagaacaccaagcagcccagcaagagctgccacaagcccaaggccatcgtgcacaccgagaaagtgaacatgatgagcctgaccgtgctgggcctgcggatgctgttcgccaaaaccgtggccgtgaacttcctgctgaccgccaagctgttcttcctcaggagtaagaggagcaggctcctgcacagtgactacatgaacatgactccacgccgccccggacccacccgcaagcattaccagccctatgccccaccacgcgacttcgcagcctatcgctccagagtgaagttcagcagaagcgccgacgcccctgcctaccagcagggacagaaccaactgtacaacgagctgaacctgggcagacgggaagagtacgacgtgctggacaagcggagaggcagggaccctgagatgggcggaaagccccagcggagaaagaacccccaggaaggactgtataacgaactccagaaagacaagatggccgaagcctacagcgagatcggcatgaagggcgagcggagaagaggcaagggccacgatggcctgtaccagggcctgagcaccgccaccaaggacacctatgacgccctgcacatgcaggccctgcctccaaga

SEQ ID NO: 25867 - DNA, 870 bp, synthetic construct
  source 1..870: mol_type = other DNA
gtggcctgcctcgtgaaagagttctaccccaaggacatcaggatcaacctggtgtccagcaagaagatcaccgagttcgaccccgccatcgtgatctcccccagcggcaagtacaacgccgtgaagctggggaagtacgaggacagcaacagcgtgacctgctccgtgcagcacgacaacaagaccgtgcacagcaccgactttgaagtgaaaaccgactccaccgaccacgtgaagcccaaagagacagagaacaccaagcagcccagcaagagctgccacaagcccaaggccatcgtgcacaccgagaaagtgaacatgatgagcctgaccgtgctgggcctgcggatgctgttcgccaaaaccgtggccgtgaacttcctgctgaccgccaagctgttcttcctcaggagtaagaggagcaggctcctgcacagtgactacatgaacatgactccacgccgccccggacccacccgcaagcattaccagccctatgccccaccacgcgacttcgcagcctatcgctccagagtgaagttcagcagaagcgccgacgcccctgcctaccagcagggacagaaccaactgtacaacgagctgaacctgggcagacgggaagagtacgacgtgctggacaagcggagaggcagggaccctgagatgggcggaaagccccagcggagaaagaacccccaggaaggactgtataacgaactccagaaagacaagatggccgaagcctacagcgagatcggcatgaagggcgagcggagaagaggcaagggccacgatggcctgtaccagggcctgagcaccgccaccaaggacacctatgacgccctgcacatgcaggccctgcctccaaga

SEQ ID NO: 25868 - DNA, 867 bp, synthetic construct
  source 1..867: mol_type = other DNA
gcctgcctcgtgaaagagttctaccccaaggacatcaggatcaacctggtgtccagcaagaagatcaccgagttcgaccccgccatcgtgatctcccccagcggcaagtacaacgccgtgaagctggggaagtacgaggacagcaacagcgtgacctgctccgtgcagcacgacaacaagaccgtgcacagcaccgactttgaagtgaaaaccgactccaccgaccacgtgaagcccaaagagacagagaacaccaagcagcccagcaagagctgccacaagcccaaggccatcgtgcacaccgagaaagtgaacatgatgagcctgaccgtgctgggcctgcggatgctgttcgccaaaaccgtggccgtgaacttcctgctgaccgccaagctgttcttcctcaggagtaagaggagcaggctcctgcacagtgactacatgaacatgactccacgccgccccggacccacccgcaagcattaccagccctatgccccaccacgcgacttcgcagcctatcgctccagagtgaagttcagcagaagcgccgacgcccctgcctaccagcagggacagaaccaactgtacaacgagctgaacctgggcagacgggaagagtacgacgtgctggacaagcggagaggcagggaccctgagatgggcggaaagccccagcggagaaagaacccccaggaaggactgtataacgaactccagaaagacaagatggccgaagcctacagcgagatcggcatgaagggcgagcggagaagaggcaagggccacgatggcctgtaccagggcctgagcaccgccaccaaggacacctatgacgccctgcacatgcaggccctgcctccaaga

SEQ ID NO: 25869 - DNA, 864 bp, synthetic construct
  source 1..864: mol_type = other DNA
tgcctcgtgaaagagttctaccccaaggacatcaggatcaacctggtgtccagcaagaagatcaccgagttcgaccccgccatcgtgatctcccccagcggcaagtacaacgccgtgaagctggggaagtacgaggacagcaacagcgtgacctgctccgtgcagcacgacaacaagaccgtgcacagcaccgactttgaagtgaaaaccgactccaccgaccacgtgaagcccaaagagacagagaacaccaagcagcccagcaagagctgccacaagcccaaggccatcgtgcacaccgagaaagtgaacatgatgagcctgaccgtgctgggcctgcggatgctgttcgccaaaaccgtggccgtgaacttcctgctgaccgccaagctgttcttcctcaggagtaagaggagcaggctcctgcacagtgactacatgaacatgactccacgccgccccggacccacccgcaagcattaccagccctatgccccaccacgcgacttcgcagcctatcgctccagagtgaagttcagcagaagcgccgacgcccctgcctaccagcagggacagaaccaactgtacaacgagctgaacctgggcagacgggaagagtacgacgtgctggacaagcggagaggcagggaccctgagatgggcggaaagccccagcggagaaagaacccccaggaaggactgtataacgaactccagaaagacaagatggccgaagcctacagcgagatcggcatgaagggcgagcggagaagaggcaagggccacgatggcctgtaccagggcctgagcaccgccaccaaggacacctatgacgccctgcacatgcaggccctgcctccaaga

SEQ ID NO: 25870 - DNA, 861 bp, synthetic construct
  source 1..861: mol_type = other DNA
ctcgtgaaagagttctaccccaaggacatcaggatcaacctggtgtccagcaagaagatcaccgagttcgaccccgccatcgtgatctcccccagcggcaagtacaacgccgtgaagctggggaagtacgaggacagcaacagcgtgacctgctccgtgcagcacgacaacaagaccgtgcacagcaccgactttgaagtgaaaaccgactccaccgaccacgtgaagcccaaagagacagagaacaccaagcagcccagcaagagctgccacaagcccaaggccatcgtgcacaccgagaaagtgaacatgatgagcctgaccgtgctgggcctgcggatgctgttcgccaaaaccgtggccgtgaacttcctgctgaccgccaagctgttcttcctcaggagtaagaggagcaggctcctgcacagtgactacatgaacatgactccacgccgccccggacccacccgcaagcattaccagccctatgccccaccacgcgacttcgcagcctatcgctccagagtgaagttcagcagaagcgccgacgcccctgcctaccagcagggacagaaccaactgtacaacgagctgaacctgggcagacgggaagagtacgacgtgctggacaagcggagaggcagggaccctgagatgggcggaaagccccagcggagaaagaacccccaggaaggactgtataacgaactccagaaagacaagatggccgaagcctacagcgagatcggcatgaagggcgagcggagaagaggcaagggccacgatggcctgtaccagggcctgagcaccgccaccaaggacacctatgacgccctgcacatgcaggccctgcctccaaga

SEQ ID NO: 25871 - DNA, 858 bp, synthetic construct
  source 1..858: mol_type = other DNA
gtgaaagagttctaccccaaggacatcaggatcaacctggtgtccagcaagaagatcaccgagttcgaccccgccatcgtgatctcccccagcggcaagtacaacgccgtgaagctggggaagtacgaggacagcaacagcgtgacctgctccgtgcagcacgacaacaagaccgtgcacagcaccgactttgaagtgaaaaccgactccaccgaccacgtgaagcccaaagagacagagaacaccaagcagcccagcaagagctgccacaagcccaaggccatcgtgcacaccgagaaagtgaacatgatgagcctgaccgtgctgggcctgcggatgctgttcgccaaaaccgtggccgtgaacttcctgctgaccgccaagctgttcttcctcaggagtaagaggagcaggctcctgcacagtgactacatgaacatgactccacgccgccccggacccacccgcaagcattaccagccctatgccccaccacgcgacttcgcagcctatcgctccagagtgaagttcagcagaagcgccgacgcccctgcctaccagcagggacagaaccaactgtacaacgagctgaacctgggcagacgggaagagtacgacgtgctggacaagcggagaggcagggaccctgagatgggcggaaagccccagcggagaaagaacccccaggaaggactgtataacgaactccagaaagacaagatggccgaagcctacagcgagatcggcatgaagggcgagcggagaagaggcaagggccacgatggcctgtaccagggcctgagcaccgccaccaaggacacctatgacgccctgcacatgcaggccctgcctccaaga

SEQ ID NO: 25872 - DNA, 855 bp, synthetic construct
  source 1..855: mol_type = other DNA
aaagagttctaccccaaggacatcaggatcaacctggtgtccagcaagaagatcaccgagttcgaccccgccatcgtgatctcccccagcggcaagtacaacgccgtgaagctggggaagtacgaggacagcaacagcgtgacctgctccgtgcagcacgacaacaagaccgtgcacagcaccgactttgaagtgaaaaccgactccaccgaccacgtgaagcccaaagagacagagaacaccaagcagcccagcaagagctgccacaagcccaaggccatcgtgcacaccgagaaagtgaacatgatgagcctgaccgtgctgggcctgcggatgctgttcgccaaaaccgtggccgtgaacttcctgctgaccgccaagctgttcttcctcaggagtaagaggagcaggctcctgcacagtgactacatgaacatgactccacgccgccccggacccacccgcaagcattaccagccctatgccccaccacgcgacttcgcagcctatcgctccagagtgaagttcagcagaagcgccgacgcccctgcctaccagcagggacagaaccaactgtacaacgagctgaacctgggcagacgggaagagtacgacgtgctggacaagcggagaggcagggaccctgagatgggcggaaagccccagcggagaaagaacccccaggaaggactgtataacgaactccagaaagacaagatggccgaagcctacagcgagatcggcatgaagggcgagcggagaagaggcaagggccacgatggcctgtaccagggcctgagcaccgccaccaaggacacctatgacgccctgcacatgcaggccctgcctccaaga

SEQ ID NO: 25873 - DNA, 852 bp, synthetic construct
  source 1..852: mol_type = other DNA
gagttctaccccaaggacatcaggatcaacctggtgtccagcaagaagatcaccgagttcgaccccgccatcgtgatctcccccagcggcaagtacaacgccgtgaagctggggaagtacgaggacagcaacagcgtgacctgctccgtgcagcacgacaacaagaccgtgcacagcaccgactttgaagtgaaaaccgactccaccgaccacgtgaagcccaaagagacagagaacaccaagcagcccagcaagagctgccacaagcccaaggccatcgtgcacaccgagaaagtgaacatgatgagcctgaccgtgctgggcctgcggatgctgttcgccaaaaccgtggccgtgaacttcctgctgaccgccaagctgttcttcctcaggagtaagaggagcaggctcctgcacagtgactacatgaacatgactccacgccgccccggacccacccgcaagcattaccagccctatgccccaccacgcgacttcgcagcctatcgctccagagtgaagttcagcagaagcgccgacgcccctgcctaccagcagggacagaaccaactgtacaacgagctgaacctgggcagacgggaagagtacgacgtgctggacaagcggagaggcagggaccctgagatgggcggaaagccccagcggagaaagaacccccaggaaggactgtataacgaactccagaaagacaagatggccgaagcctacagcgagatcggcatgaagggcgagcggagaagaggcaagggccacgatggcctgtaccagggcctgagcaccgccaccaaggacacctatgacgccctgcacatgcaggccctgcctccaaga

SEQ ID NO: 25874 - DNA, 849 bp, synthetic construct
  source 1..849: mol_type = other DNA
ttctaccccaaggacatcaggatcaacctggtgtccagcaagaagatcaccgagttcgaccccgccatcgtgatctcccccagcggcaagtacaacgccgtgaagctggggaagtacgaggacagcaacagcgtgacctgctccgtgcagcacgacaacaagaccgtgcacagcaccgactttgaagtgaaaaccgactccaccgaccacgtgaagcccaaagagacagagaacaccaagcagcccagcaagagctgccacaagcccaaggccatcgtgcacaccgagaaagtgaacatgatgagcctgaccgtgctgggcctgcggatgctgttcgccaaaaccgtggccgtgaacttcctgctgaccgccaagctgttcttcctcaggagtaagaggagcaggctcctgcacagtgactacatgaacatgactccacgccgccccggacccacccgcaagcattaccagccctatgccccaccacgcgacttcgcagcctatcgctccagagtgaagttcagcagaagcgccgacgcccctgcctaccagcagggacagaaccaactgtacaacgagctgaacctgggcagacgggaagagtacgacgtgctggacaagcggagaggcagggaccctgagatgggcggaaagccccagcggagaaagaacccccaggaaggactgtataacgaactccagaaagacaagatggccgaagcctacagcgagatcggcatgaagggcgagcggagaagaggcaagggccacgatggcctgtaccagggcctgagcaccgccaccaaggacacctatgacgccctgcacatgcaggccctgcctccaaga

SEQ ID NO: 25875 - DNA, 846 bp, synthetic construct
  source 1..846: mol_type = other DNA
taccccaaggacatcaggatcaacctggtgtccagcaagaagatcaccgagttcgaccccgccatcgtgatctcccccagcggcaagtacaacgccgtgaagctggggaagtacgaggacagcaacagcgtgacctgctccgtgcagcacgacaacaagaccgtgcacagcaccgactttgaagtgaaaaccgactccaccgaccacgtgaagcccaaagagacagagaacaccaagcagcccagcaagagctgccacaagcccaaggccatcgtgcacaccgagaaagtgaacatgatgagcctgaccgtgctgggcctgcggatgctgttcgccaaaaccgtggccgtgaacttcctgctgaccgccaagctgttcttcctcaggagtaagaggagcaggctcctgcacagtgactacatgaacatgactccacgccgccccggacccacccgcaagcattaccagccctatgccccaccacgcgacttcgcagcctatcgctccagagtgaagttcagcagaagcgccgacgcccctgcctaccagcagggacagaaccaactgtacaacgagctgaacctgggcagacgggaagagtacgacgtgctggacaagcggagaggcagggaccctgagatgggcggaaagccccagcggagaaagaacccccaggaaggactgtataacgaactccagaaagacaagatggccgaagcctacagcgagatcggcatgaagggcgagcggagaagaggcaagggccacgatggcctgtaccagggcctgagcaccgccaccaaggacacctatgacgccctgcacatgcaggccctgcctccaaga

SEQ ID NO: 25876 - DNA, 843 bp, synthetic construct
  source 1..843: mol_type = other DNA
cccaaggacatcaggatcaacctggtgtccagcaagaagatcaccgagttcgaccccgccatcgtgatctcccccagcggcaagtacaacgccgtgaagctggggaagtacgaggacagcaacagcgtgacctgctccgtgcagcacgacaacaagaccgtgcacagcaccgactttgaagtgaaaaccgactccaccgaccacgtgaagcccaaagagacagagaacaccaagcagcccagcaagagctgccacaagcccaaggccatcgtgcacaccgagaaagtgaacatgatgagcctgaccgtgctgggcctgcggatgctgttcgccaaaaccgtggccgtgaacttcctgctgaccgccaagctgttcttcctcaggagtaagaggagcaggctcctgcacagtgactacatgaacatgactccacgccgccccggacccacccgcaagcattaccagccctatgccccaccacgcgacttcgcagcctatcgctccagagtgaagttcagcagaagcgccgacgcccctgcctaccagcagggacagaaccaactgtacaacgagctgaacctgggcagacgggaagagtacgacgtgctggacaagcggagaggcagggaccctgagatgggcggaaagccccagcggagaaagaacccccaggaaggactgtataacgaactccagaaagacaagatggccgaagcctacagcgagatcggcatgaagggcgagcggagaagaggcaagggccacgatggcctgtaccagggcctgagcaccgccaccaaggacacctatgacgccctgcacatgcaggccctgcctccaaga

SEQ ID NO: 25877 - DNA, 840 bp, synthetic construct
  source 1..840: mol_type = other DNA
aaggacatcaggatcaacctggtgtccagcaagaagatcaccgagttcgaccccgccatcgtgatctcccccagcggcaagtacaacgccgtgaagctggggaagtacgaggacagcaacagcgtgacctgctccgtgcagcacgacaacaagaccgtgcacagcaccgactttgaagtgaaaaccgactccaccgaccacgtgaagcccaaagagacagagaacaccaagcagcccagcaagagctgccacaagcccaaggccatcgtgcacaccgagaaagtgaacatgatgagcctgaccgtgctgggcctgcggatgctgttcgccaaaaccgtggccgtgaacttcctgctgaccgccaagctgttcttcctcaggagtaagaggagcaggctcctgcacagtgactacatgaacatgactccacgccgccccggacccacccgcaagcattaccagccctatgccccaccacgcgacttcgcagcctatcgctccagagtgaagttcagcagaagcgccgacgcccctgcctaccagcagggacagaaccaactgtacaacgagctgaacctgggcagacgggaagagtacgacgtgctggacaagcggagaggcagggaccctgagatgggcggaaagccccagcggagaaagaacccccaggaaggactgtataacgaactccagaaagacaagatggccgaagcctacagcgagatcggcatgaagggcgagcggagaagaggcaagggccacgatggcctgtaccagggcctgagcaccgccaccaaggacacctatgacgccctgcacatgcaggccctgcctccaaga

SEQ ID NO: 25878 - DNA, 837 bp, synthetic construct
  source 1..837: mol_type = other DNA
gacatcaggatcaacctggtgtccagcaagaagatcaccgagttcgaccccgccatcgtgatctcccccagcggcaagtacaacgccgtgaagctggggaagtacgaggacagcaacagcgtgacctgctccgtgcagcacgacaacaagaccgtgcacagcaccgactttgaagtgaaaaccgactccaccgaccacgtgaagcccaaagagacagagaacaccaagcagcccagcaagagctgccacaagcccaaggccatcgtgcacaccgagaaagtgaacatgatgagcctgaccgtgctgggcctgcggatgctgttcgccaaaaccgtggccgtgaacttcctgctgaccgccaagctgttcttcctcaggagtaagaggagcaggctcctgcacagtgactacatgaacatgactccacgccgccccggacccacccgcaagcattaccagccctatgccccaccacgcgacttcgcagcctatcgctccagagtgaagttcagcagaagcgccgacgcccctgcctaccagcagggacagaaccaactgtacaacgagctgaacctgggcagacgggaagagtacgacgtgctggacaagcggagaggcagggaccctgagatgggcggaaagccccagcggagaaagaacccccaggaaggactgtataacgaactccagaaagacaagatggccgaagcctacagcgagatcggcatgaagggcgagcggagaagaggcaagggccacgatggcctgtaccagggcctgagcaccgccaccaaggacacctatgacgccctgcacatgcaggccctgcctccaaga

SEQ ID NO: 25879 - DNA, 834 bp, synthetic construct
  source 1..834: mol_type = other DNA
atcaggatcaacctggtgtccagcaagaagatcaccgagttcgaccccgccatcgtgatctcccccagcggcaagtacaacgccgtgaagctggggaagtacgaggacagcaacagcgtgacctgctccgtgcagcacgacaacaagaccgtgcacagcaccgactttgaagtgaaaaccgactccaccgaccacgtgaagcccaaagagacagagaacaccaagcagcccagcaagagctgccacaagcccaaggccatcgtgcacaccgagaaagtgaacatgatgagcctgaccgtgctgggcctgcggatgctgttcgccaaaaccgtggccgtgaacttcctgctgaccgccaagctgttcttcctcaggagtaagaggagcaggctcctgcacagtgactacatgaacatgactccacgccgccccggacccacccgcaagcattaccagccctatgccccaccacgcgacttcgcagcctatcgctccagagtgaagttcagcagaagcgccgacgcccctgcctaccagcagggacagaaccaactgtacaacgagctgaacctgggcagacgggaagagtacgacgtgctggacaagcggagaggcagggaccctgagatgggcggaaagccccagcggagaaagaacccccaggaaggactgtataacgaactccagaaagacaagatggccgaagcctacagcgagatcggcatgaagggcgagcggagaagaggcaagggccacgatggcctgtaccagggcctgagcaccgccaccaaggacacctatgacgccctgcacatgcaggccctgcctccaaga

SEQ ID NO: 25880 - DNA, 831 bp, synthetic construct
  source 1..831: mol_type = other DNA
aggatcaacctggtgtccagcaagaagatcaccgagttcgaccccgccatcgtgatctcccccagcggcaagtacaacgccgtgaagctggggaagtacgaggacagcaacagcgtgacctgctccgtgcagcacgacaacaagaccgtgcacagcaccgactttgaagtgaaaaccgactccaccgaccacgtgaagcccaaagagacagagaacaccaagcagcccagcaagagctgccacaagcccaaggccatcgtgcacaccgagaaagtgaacatgatgagcctgaccgtgctgggcctgcggatgctgttcgccaaaaccgtggccgtgaacttcctgctgaccgccaagctgttcttcctcaggagtaagaggagcaggctcctgcacagtgactacatgaacatgactccacgccgccccggacccacccgcaagcattaccagccctatgccccaccacgcgacttcgcagcctatcgctccagagtgaagttcagcagaagcgccgacgcccctgcctaccagcagggacagaaccaactgtacaacgagctgaacctgggcagacgggaagagtacgacgtgctggacaagcggagaggcagggaccctgagatgggcggaaagccccagcggagaaagaacccccaggaaggactgtataacgaactccagaaagacaagatggccgaagcctacagcgagatcggcatgaagggcgagcggagaagaggcaagggccacgatggcctgtaccagggcctgagcaccgccaccaaggacacctatgacgccctgcacatgcaggccctgcctccaaga

SEQ ID NO: 25881 - DNA, 828 bp, synthetic construct
  source 1..828: mol_type = other DNA
atcaacctggtgtccagcaagaagatcaccgagttcgaccccgccatcgtgatctcccccagcggcaagtacaacgccgtgaagctggggaagtacgaggacagcaacagcgtgacctgctccgtgcagcacgacaacaagaccgtgcacagcaccgactttgaagtgaaaaccgactccaccgaccacgtgaagcccaaagagacagagaacaccaagcagcccagcaagagctgccacaagcccaaggccatcgtgcacaccgagaaagtgaacatgatgagcctgaccgtgctgggcctgcggatgctgttcgccaaaaccgtggccgtgaacttcctgctgaccgccaagctgttcttcctcaggagtaagaggagcaggctcctgcacagtgactacatgaacatgactccacgccgccccggacccacccgcaagcattaccagccctatgccccaccacgcgacttcgcagcctatcgctccagagtgaagttcagcagaagcgccgacgcccctgcctaccagcagggacagaaccaactgtacaacgagctgaacctgggcagacgggaagagtacgacgtgctggacaagcggagaggcagggaccctgagatgggcggaaagccccagcggagaaagaacccccaggaaggactgtataacgaactccagaaagacaagatggccgaagcctacagcgagatcggcatgaagggcgagcggagaagaggcaagggccacgatggcctgtaccagggcctgagcaccgccaccaaggacacctatgacgccctgcacatgcaggccctgcctccaaga

SEQ ID NO: 25882 - DNA, 825 bp, synthetic construct
  source 1..825: mol_type = other DNA
aacctggtgtccagcaagaagatcaccgagttcgaccccgccatcgtgatctcccccagcggcaagtacaacgccgtgaagctggggaagtacgaggacagcaacagcgtgacctgctccgtgcagcacgacaacaagaccgtgcacagcaccgactttgaagtgaaaaccgactccaccgaccacgtgaagcccaaagagacagagaacaccaagcagcccagcaagagctgccacaagcccaaggccatcgtgcacaccgagaaagtgaacatgatgagcctgaccgtgctgggcctgcggatgctgttcgccaaaaccgtggccgtgaacttcctgctgaccgccaagctgttcttcctcaggagtaagaggagcaggctcctgcacagtgactacatgaacatgactccacgccgccccggacccacccgcaagcattaccagccctatgccccaccacgcgacttcgcagcctatcgctccagagtgaagttcagcagaagcgccgacgcccctgcctaccagcagggacagaaccaactgtacaacgagctgaacctgggcagacgggaagagtacgacgtgctggacaagcggagaggcagggaccctgagatgggcggaaagccccagcggagaaagaacccccaggaaggactgtataacgaactccagaaagacaagatggccgaagcctacagcgagatcggcatgaagggcgagcggagaagaggcaagggccacgatggcctgtaccagggcctgagcaccgccaccaaggacacctatgacgccctgcacatgcaggccctgcctccaaga

SEQ ID NO: 25883 - DNA, 822 bp, synthetic construct
  source 1..822: mol_type = other DNA
ctggtgtccagcaagaagatcaccgagttcgaccccgccatcgtgatctcccccagcggcaagtacaacgccgtgaagctggggaagtacgaggacagcaacagcgtgacctgctccgtgcagcacgacaacaagaccgtgcacagcaccgactttgaagtgaaaaccgactccaccgaccacgtgaagcccaaagagacagagaacaccaagcagcccagcaagagctgccacaagcccaaggccatcgtgcacaccgagaaagtgaacatgatgagcctgaccgtgctgggcctgcggatgctgttcgccaaaaccgtggccgtgaacttcctgctgaccgccaagctgttcttcctcaggagtaagaggagcaggctcctgcacagtgactacatgaacatgactccacgccgccccggacccacccgcaagcattaccagccctatgccccaccacgcgacttcgcagcctatcgctccagagtgaagttcagcagaagcgccgacgcccctgcctaccagcagggacagaaccaactgtacaacgagctgaacctgggcagacgggaagagtacgacgtgctggacaagcggagaggcagggaccctgagatgggcggaaagccccagcggagaaagaacccccaggaaggactgtataacgaactccagaaagacaagatggccgaagcctacagcgagatcggcatgaagggcgagcggagaagaggcaagggccacgatggcctgtaccagggcctgagcaccgccaccaaggacacctatgacgccctgcacatgcaggccctgcctccaaga

SEQ ID NO: 25884 - DNA, 819 bp, synthetic construct
  source 1..819: mol_type = other DNA
gtgtccagcaagaagatcaccgagttcgaccccgccatcgtgatctcccccagcggcaagtacaacgccgtgaagctggggaagtacgaggacagcaacagcgtgacctgctccgtgcagcacgacaacaagaccgtgcacagcaccgactttgaagtgaaaaccgactccaccgaccacgtgaagcccaaagagacagagaacaccaagcagcccagcaagagctgccacaagcccaaggccatcgtgcacaccgagaaagtgaacatgatgagcctgaccgtgctgggcctgcggatgctgttcgccaaaaccgtggccgtgaacttcctgctgaccgccaagctgttcttcctcaggagtaagaggagcaggctcctgcacagtgactacatgaacatgactccacgccgccccggacccacccgcaagcattaccagccctatgccccaccacgcgacttcgcagcctatcgctccagagtgaagttcagcagaagcgccgacgcccctgcctaccagcagggacagaaccaactgtacaacgagctgaacctgggcagacgggaagagtacgacgtgctggacaagcggagaggcagggaccctgagatgggcggaaagccccagcggagaaagaacccccaggaaggactgtataacgaactccagaaagacaagatggccgaagcctacagcgagatcggcatgaagggcgagcggagaagaggcaagggccacgatggcctgtaccagggcctgagcaccgccaccaaggacacctatgacgccctgcacatgcaggccctgcctccaaga

SEQ ID NO: 25885 - DNA, 816 bp, synthetic construct
  source 1..816: mol_type = other DNA
tccagcaagaagatcaccgagttcgaccccgccatcgtgatctcccccagcggcaagtacaacgccgtgaagctggggaagtacgaggacagcaacagcgtgacctgctccgtgcagcacgacaacaagaccgtgcacagcaccgactttgaagtgaaaaccgactccaccgaccacgtgaagcccaaagagacagagaacaccaagcagcccagcaagagctgccacaagcccaaggccatcgtgcacaccgagaaagtgaacatgatgagcctgaccgtgctgggcctgcggatgctgttcgccaaaaccgtggccgtgaacttcctgctgaccgccaagctgttcttcctcaggagtaagaggagcaggctcctgcacagtgactacatgaacatgactccacgccgccccggacccacccgcaagcattaccagccctatgccccaccacgcgacttcgcagcctatcgctccagagtgaagttcagcagaagcgccgacgcccctgcctaccagcagggacagaaccaactgtacaacgagctgaacctgggcagacgggaagagtacgacgtgctggacaagcggagaggcagggaccctgagatgggcggaaagccccagcggagaaagaacccccaggaaggactgtataacgaactccagaaagacaagatggccgaagcctacagcgagatcggcatgaagggcgagcggagaagaggcaagggccacgatggcctgtaccagggcctgagcaccgccaccaaggacacctatgacgccctgcacatgcaggccctgcctccaaga

SEQ ID NO: 25886 - DNA, 813 bp, synthetic construct
  source 1..813: mol_type = other DNA
agcaagaagatcaccgagttcgaccccgccatcgtgatctcccccagcggcaagtacaacgccgtgaagctggggaagtacgaggacagcaacagcgtgacctgctccgtgcagcacgacaacaagaccgtgcacagcaccgactttgaagtgaaaaccgactccaccgaccacgtgaagcccaaagagacagagaacaccaagcagcccagcaagagctgccacaagcccaaggccatcgtgcacaccgagaaagtgaacatgatgagcctgaccgtgctgggcctgcggatgctgttcgccaaaaccgtggccgtgaacttcctgctgaccgccaagctgttcttcctcaggagtaagaggagcaggctcctgcacagtgactacatgaacatgactccacgccgccccggacccacccgcaagcattaccagccctatgccccaccacgcgacttcgcagcctatcgctccagagtgaagttcagcagaagcgccgacgcccctgcctaccagcagggacagaaccaactgtacaacgagctgaacctgggcagacgggaagagtacgacgtgctggacaagcggagaggcagggaccctgagatgggcggaaagccccagcggagaaagaacccccaggaaggactgtataacgaactccagaaagacaagatggccgaagcctacagcgagatcggcatgaagggcgagcggagaagaggcaagggccacgatggcctgtaccagggcctgagcaccgccaccaaggacacctatgacgccctgcacatgcaggccctgcctccaaga

SEQ ID NO: 25887 - DNA, 810 bp, synthetic construct
  source 1..810: mol_type = other DNA
aagaagatcaccgagttcgaccccgccatcgtgatctcccccagcggcaagtacaacgccgtgaagctggggaagtacgaggacagcaacagcgtgacctgctccgtgcagcacgacaacaagaccgtgcacagcaccgactttgaagtgaaaaccgactccaccgaccacgtgaagcccaaagagacagagaacaccaagcagcccagcaagagctgccacaagcccaaggccatcgtgcacaccgagaaagtgaacatgatgagcctgaccgtgctgggcctgcggatgctgttcgccaaaaccgtggccgtgaacttcctgctgaccgccaagctgttcttcctcaggagtaagaggagcaggctcctgcacagtgactacatgaacatgactccacgccgccccggacccacccgcaagcattaccagccctatgccccaccacgcgacttcgcagcctatcgctccagagtgaagttcagcagaagcgccgacgcccctgcctaccagcagggacagaaccaactgtacaacgagctgaacctgggcagacgggaagagtacgacgtgctggacaagcggagaggcagggaccctgagatgggcggaaagccccagcggagaaagaacccccaggaaggactgtataacgaactccagaaagacaagatggccgaagcctacagcgagatcggcatgaagggcgagcggagaagaggcaagggccacgatggcctgtaccagggcctgagcaccgccaccaaggacacctatgacgccctgcacatgcaggccctgcctccaaga

SEQ ID NO: 25888 - DNA, 807 bp, synthetic construct
  source 1..807: mol_type = other DNA
aagatcaccgagttcgaccccgccatcgtgatctcccccagcggcaagtacaacgccgtgaagctggggaagtacgaggacagcaacagcgtgacctgctccgtgcagcacgacaacaagaccgtgcacagcaccgactttgaagtgaaaaccgactccaccgaccacgtgaagcccaaagagacagagaacaccaagcagcccagcaagagctgccacaagcccaaggccatcgtgcacaccgagaaagtgaacatgatgagcctgaccgtgctgggcctgcggatgctgttcgccaaaaccgtggccgtgaacttcctgctgaccgccaagctgttcttcctcaggagtaagaggagcaggctcctgcacagtgactacatgaacatgactccacgccgccccggacccacccgcaagcattaccagccctatgccccaccacgcgacttcgcagcctatcgctccagagtgaagttcagcagaagcgccgacgcccctgcctaccagcagggacagaaccaactgtacaacgagctgaacctgggcagacgggaagagtacgacgtgctggacaagcggagaggcagggaccctgagatgggcggaaagccccagcggagaaagaacccccaggaaggactgtataacgaactccagaaagacaagatggccgaagcctacagcgagatcggcatgaagggcgagcggagaagaggcaagggccacgatggcctgtaccagggcctgagcaccgccaccaaggacacctatgacgccctgcacatgcaggccctgcctccaaga

SEQ ID NO: 25889 - DNA, 804 bp, synthetic construct
  source 1..804: mol_type = other DNA
atcaccgagttcgaccccgccatcgtgatctcccccagcggcaagtacaacgccgtgaagctggggaagtacgaggacagcaacagcgtgacctgctccgtgcagcacgacaacaagaccgtgcacagcaccgactttgaagtgaaaaccgactccaccgaccacgtgaagcccaaagagacagagaacaccaagcagcccagcaagagctgccacaagcccaaggccatcgtgcacaccgagaaagtgaacatgatgagcctgaccgtgctgggcctgcggatgctgttcgccaaaaccgtggccgtgaacttcctgctgaccgccaagctgttcttcctcaggagtaagaggagcaggctcctgcacagtgactacatgaacatgactccacgccgccccggacccacccgcaagcattaccagccctatgccccaccacgcgacttcgcagcctatcgctccagagtgaagttcagcagaagcgccgacgcccctgcctaccagcagggacagaaccaactgtacaacgagctgaacctgggcagacgggaagagtacgacgtgctggacaagcggagaggcagggaccctgagatgggcggaaagccccagcggagaaagaacccccaggaaggactgtataacgaactccagaaagacaagatggccgaagcctacagcgagatcggcatgaagggcgagcggagaagaggcaagggccacgatggcctgtaccagggcctgagcaccgccaccaaggacacctatgacgccctgcacatgcaggccctgcctccaaga

SEQ ID NO: 25890 - DNA, 801 bp, synthetic construct
  source 1..801: mol_type = other DNA
accgagttcgaccccgccatcgtgatctcccccagcggcaagtacaacgccgtgaagctggggaagtacgaggacagcaacagcgtgacctgctccgtgcagcacgacaacaagaccgtgcacagcaccgactttgaagtgaaaaccgactccaccgaccacgtgaagcccaaagagacagagaacaccaagcagcccagcaagagctgccacaagcccaaggccatcgtgcacaccgagaaagtgaacatgatgagcctgaccgtgctgggcctgcggatgctgttcgccaaaaccgtggccgtgaacttcctgctgaccgccaagctgttcttcctcaggagtaagaggagcaggctcctgcacagtgactacatgaacatgactccacgccgccccggacccacccgcaagcattaccagccctatgccccaccacgcgacttcgcagcctatcgctccagagtgaagttcagcagaagcgccgacgcccctgcctaccagcagggacagaaccaactgtacaacgagctgaacctgggcagacgggaagagtacgacgtgctggacaagcggagaggcagggaccctgagatgggcggaaagccccagcggagaaagaacccccaggaaggactgtataacgaactccagaaagacaagatggccgaagcctacagcgagatcggcatgaagggcgagcggagaagaggcaagggccacgatggcctgtaccagggcctgagcaccgccaccaaggacacctatgacgccctgcacatgcaggccctgcctccaaga

SEQ ID NO: 25891 - DNA, 798 bp, synthetic construct
  source 1..798: mol_type = other DNA
gagttcgaccccgccatcgtgatctcccccagcggcaagtacaacgccgtgaagctggggaagtacgaggacagcaacagcgtgacctgctccgtgcagcacgacaacaagaccgtgcacagcaccgactttgaagtgaaaaccgactccaccgaccacgtgaagcccaaagagacagagaacaccaagcagcccagcaagagctgccacaagcccaaggccatcgtgcacaccgagaaagtgaacatgatgagcctgaccgtgctgggcctgcggatgctgttcgccaaaaccgtggccgtgaacttcctgctgaccgccaagctgttcttcctcaggagtaagaggagcaggctcctgcacagtgactacatgaacatgactccacgccgccccggacccacccgcaagcattaccagccctatgccccaccacgcgacttcgcagcctatcgctccagagtgaagttcagcagaagcgccgacgcccctgcctaccagcagggacagaaccaactgtacaacgagctgaacctgggcagacgggaagagtacgacgtgctggacaagcggagaggcagggaccctgagatgggcggaaagccccagcggagaaagaacccccaggaaggactgtataacgaactccagaaagacaagatggccgaagcctacagcgagatcggcatgaagggcgagcggagaagaggcaagggccacgatggcctgtaccagggcctgagcaccgccaccaaggacacctatgacgccctgcacatgcaggccctgcctccaaga

SEQ ID NO: 25892 - DNA, 795 bp, synthetic construct
  source 1..795: mol_type = other DNA
ttcgaccccgccatcgtgatctcccccagcggcaagtacaacgccgtgaagctggggaagtacgaggacagcaacagcgtgacctgctccgtgcagcacgacaacaagaccgtgcacagcaccgactttgaagtgaaaaccgactccaccgaccacgtgaagcccaaagagacagagaacaccaagcagcccagcaagagctgccacaagcccaaggccatcgtgcacaccgagaaagtgaacatgatgagcctgaccgtgctgggcctgcggatgctgttcgccaaaaccgtggccgtgaacttcctgctgaccgccaagctgttcttcctcaggagtaagaggagcaggctcctgcacagtgactacatgaacatgactccacgccgccccggacccacccgcaagcattaccagccctatgccccaccacgcgacttcgcagcctatcgctccagagtgaagttcagcagaagcgccgacgcccctgcctaccagcagggacagaaccaactgtacaacgagctgaacctgggcagacgggaagagtacgacgtgctggacaagcggagaggcagggaccctgagatgggcggaaagccccagcggagaaagaacccccaggaaggactgtataacgaactccagaaagacaagatggccgaagcctacagcgagatcggcatgaagggcgagcggagaagaggcaagggccacgatggcctgtaccagggcctgagcaccgccaccaaggacacctatgacgccctgcacatgcaggccctgcctccaaga

SEQ ID NO: 25893 - DNA, 792 bp, synthetic construct
  source 1..792: mol_type = other DNA
gaccccgccatcgtgatctcccccagcggcaagtacaacgccgtgaagctggggaagtacgaggacagcaacagcgtgacctgctccgtgcagcacgacaacaagaccgtgcacagcaccgactttgaagtgaaaaccgactccaccgaccacgtgaagcccaaagagacagagaacaccaagcagcccagcaagagctgccacaagcccaaggccatcgtgcacaccgagaaagtgaacatgatgagcctgaccgtgctgggcctgcggatgctgttcgccaaaaccgtggccgtgaacttcctgctgaccgccaagctgttcttcctcaggagtaagaggagcaggctcctgcacagtgactacatgaacatgactccacgccgccccggacccacccgcaagcattaccagccctatgccccaccacgcgacttcgcagcctatcgctccagagtgaagttcagcagaagcgccgacgcccctgcctaccagcagggacagaaccaactgtacaacgagctgaacctgggcagacgggaagagtacgacgtgctggacaagcggagaggcagggaccctgagatgggcggaaagccccagcggagaaagaacccccaggaaggactgtataacgaactccagaaagacaagatggccgaagcctacagcgagatcggcatgaagggcgagcggagaagaggcaagggccacgatggcctgtaccagggcctgagcaccgccaccaaggacacctatgacgccctgcacatgcaggccctgcctccaaga

SEQ ID NO: 25894 - DNA, 789 bp, synthetic construct
  source 1..789: mol_type = other DNA
cccgccatcgtgatctcccccagcggcaagtacaacgccgtgaagctggggaagtacgaggacagcaacagcgtgacctgctccgtgcagcacgacaacaagaccgtgcacagcaccgactttgaagtgaaaaccgactccaccgaccacgtgaagcccaaagagacagagaacaccaagcagcccagcaagagctgccacaagcccaaggccatcgtgcacaccgagaaagtgaacatgatgagcctgaccgtgctgggcctgcggatgctgttcgccaaaaccgtggccgtgaacttcctgctgaccgccaagctgttcttcctcaggagtaagaggagcaggctcctgcacagtgactacatgaacatgactccacgccgccccggacccacccgcaagcattaccagccctatgccccaccacgcgacttcgcagcctatcgctccagagtgaagttcagcagaagcgccgacgcccctgcctaccagcagggacagaaccaactgtacaacgagctgaacctgggcagacgggaagagtacgacgtgctggacaagcggagaggcagggaccctgagatgggcggaaagccccagcggagaaagaacccccaggaaggactgtataacgaactccagaaagacaagatggccgaagcctacagcgagatcggcatgaagggcgagcggagaagaggcaagggccacgatggcctgtaccagggcctgagcaccgccaccaaggacacctatgacgccctgcacatgcaggccctgcctccaaga

SEQ ID NO: 25895 - DNA, 786 bp, synthetic construct
  source 1..786: mol_type = other DNA
gccatcgtgatctcccccagcggcaagtacaacgccgtgaagctggggaagtacgaggacagcaacagcgtgacctgctccgtgcagcacgacaacaagaccgtgcacagcaccgactttgaagtgaaaaccgactccaccgaccacgtgaagcccaaagagacagagaacaccaagcagcccagcaagagctgccacaagcccaaggccatcgtgcacaccgagaaagtgaacatgatgagcctgaccgtgctgggcctgcggatgctgttcgccaaaaccgtggccgtgaacttcctgctgaccgccaagctgttcttcctcaggagtaagaggagcaggctcctgcacagtgactacatgaacatgactccacgccgccccggacccacccgcaagcattaccagccctatgccccaccacgcgacttcgcagcctatcgctccagagtgaagttcagcagaagcgccgacgcccctgcctaccagcagggacagaaccaactgtacaacgagctgaacctgggcagacgggaagagtacgacgtgctggacaagcggagaggcagggaccctgagatgggcggaaagccccagcggagaaagaacccccaggaaggactgtataacgaactccagaaagacaagatggccgaagcctacagcgagatcggcatgaagggcgagcggagaagaggcaagggccacgatggcctgtaccagggcctgagcaccgccaccaaggacacctatgacgccctgcacatgcaggccctgcctccaaga

SEQ ID NO: 25896 - DNA, 783 bp, synthetic construct
  source 1..783: mol_type = other DNA
atcgtgatctcccccagcggcaagtacaacgccgtgaagctggggaagtacgaggacagcaacagcgtgacctgctccgtgcagcacgacaacaagaccgtgcacagcaccgactttgaagtgaaaaccgactccaccgaccacgtgaagcccaaagagacagagaacaccaagcagcccagcaagagctgccacaagcccaaggccatcgtgcacaccgagaaagtgaacatgatgagcctgaccgtgctgggcctgcggatgctgttcgccaaaaccgtggccgtgaacttcctgctgaccgccaagctgttcttcctcaggagtaagaggagcaggctcctgcacagtgactacatgaacatgactccacgccgccccggacccacccgcaagcattaccagccctatgccccaccacgcgacttcgcagcctatcgctccagagtgaagttcagcagaagcgccgacgcccctgcctaccagcagggacagaaccaactgtacaacgagctgaacctgggcagacgggaagagtacgacgtgctggacaagcggagaggcagggaccctgagatgggcggaaagccccagcggagaaagaacccccaggaaggactgtataacgaactccagaaagacaagatggccgaagcctacagcgagatcggcatgaagggcgagcggagaagaggcaagggccacgatggcctgtaccagggcctgagcaccgccaccaaggacacctatgacgccctgcacatgcaggccctgcctccaaga

SEQ ID NO: 25897 - DNA, 780 bp, synthetic construct
  source 1..780: mol_type = other DNA
gtgatctcccccagcggcaagtacaacgccgtgaagctggggaagtacgaggacagcaacagcgtgacctgctccgtgcagcacgacaacaagaccgtgcacagcaccgactttgaagtgaaaaccgactccaccgaccacgtgaagcccaaagagacagagaacaccaagcagcccagcaagagctgccacaagcccaaggccatcgtgcacaccgagaaagtgaacatgatgagcctgaccgtgctgggcctgcggatgctgttcgccaaaaccgtggccgtgaacttcctgctgaccgccaagctgttcttcctcaggagtaagaggagcaggctcctgcacagtgactacatgaacatgactccacgccgccccggacccacccgcaagcattaccagccctatgccccaccacgcgacttcgcagcctatcgctccagagtgaagttcagcagaagcgccgacgcccctgcctaccagcagggacagaaccaactgtacaacgagctgaacctgggcagacgggaagagtacgacgtgctggacaagcggagaggcagggaccctgagatgggcggaaagccccagcggagaaagaacccccaggaaggactgtataacgaactccagaaagacaagatggccgaagcctacagcgagatcggcatgaagggcgagcggagaagaggcaagggccacgatggcctgtaccagggcctgagcaccgccaccaaggacacctatgacgccctgcacatgcaggccctgcctccaaga

SEQ ID NO: 25898 - DNA, 777 bp, synthetic construct
  source 1..777: mol_type = other DNA
atctcccccagcggcaagtacaacgccgtgaagctggggaagtacgaggacagcaacagcgtgacctgctccgtgcagcacgacaacaagaccgtgcacagcaccgactttgaagtgaaaaccgactccaccgaccacgtgaagcccaaagagacagagaacaccaagcagcccagcaagagctgccacaagcccaaggccatcgtgcacaccgagaaagtgaacatgatgagcctgaccgtgctgggcctgcggatgctgttcgccaaaaccgtggccgtgaacttcctgctgaccgccaagctgttcttcctcaggagtaagaggagcaggctcctgcacagtgactacatgaacatgactccacgccgccccggacccacccgcaagcattaccagccctatgccccaccacgcgacttcgcagcctatcgctccagagtgaagttcagcagaagcgccgacgcccctgcctaccagcagggacagaaccaactgtacaacgagctgaacctgggcagacgggaagagtacgacgtgctggacaagcggagaggcagggaccctgagatgggcggaaagccccagcggagaaagaacccccaggaaggactgtataacgaactccagaaagacaagatggccgaagcctacagcgagatcggcatgaagggcgagcggagaagaggcaagggccacgatggcctgtaccagggcctgagcaccgccaccaaggacacctatgacgccctgcacatgcaggccctgcctccaaga

SEQ ID NO: 25899 - DNA, 774 bp, synthetic construct
  source 1..774: mol_type = other DNA
tcccccagcggcaagtacaacgccgtgaagctggggaagtacgaggacagcaacagcgtgacctgctccgtgcagcacgacaacaagaccgtgcacagcaccgactttgaagtgaaaaccgactccaccgaccacgtgaagcccaaagagacagagaacaccaagcagcccagcaagagctgccacaagcccaaggccatcgtgcacaccgagaaagtgaacatgatgagcctgaccgtgctgggcctgcggatgctgttcgccaaaaccgtggccgtgaacttcctgctgaccgccaagctgttcttcctcaggagtaagaggagcaggctcctgcacagtgactacatgaacatgactccacgccgccccggacccacccgcaagcattaccagccctatgccccaccacgcgacttcgcagcctatcgctccagagtgaagttcagcagaagcgccgacgcccctgcctaccagcagggacagaaccaactgtacaacgagctgaacctgggcagacgggaagagtacgacgtgctggacaagcggagaggcagggaccctgagatgggcggaaagccccagcggagaaagaacccccaggaaggactgtataacgaactccagaaagacaagatggccgaagcctacagcgagatcggcatgaagggcgagcggagaagaggcaagggccacgatggcctgtaccagggcctgagcaccgccaccaaggacacctatgacgccctgcacatgcaggccctgcctccaaga

SEQ ID NO: 25900 - DNA, 771 bp, synthetic construct
  source 1..771: mol_type = other DNA
cccagcggcaagtacaacgccgtgaagctggggaagtacgaggacagcaacagcgtgacctgctccgtgcagcacgacaacaagaccgtgcacagcaccgactttgaagtgaaaaccgactccaccgaccacgtgaagcccaaagagacagagaacaccaagcagcccagcaagagctgccacaagcccaaggccatcgtgcacaccgagaaagtgaacatgatgagcctgaccgtgctgggcctgcggatgctgttcgccaaaaccgtggccgtgaacttcctgctgaccgccaagctgttcttcctcaggagtaagaggagcaggctcctgcacagtgactacatgaacatgactccacgccgccccggacccacccgcaagcattaccagccctatgccccaccacgcgacttcgcagcctatcgctccagagtgaagttcagcagaagcgccgacgcccctgcctaccagcagggacagaaccaactgtacaacgagctgaacctgggcagacgggaagagtacgacgtgctggacaagcggagaggcagggaccctgagatgggcggaaagccccagcggagaaagaacccccaggaaggactgtataacgaactccagaaagacaagatggccgaagcctacagcgagatcggcatgaagggcgagcggagaagaggcaagggccacgatggcctgtaccagggcctgagcaccgccaccaaggacacctatgacgccctgcacatgcaggccctgcctccaaga

SEQ ID NO: 25901 - DNA, 768 bp, synthetic construct
  source 1..768: mol_type = other DNA
agcggcaagtacaacgccgtgaagctggggaagtacgaggacagcaacagcgtgacctgctccgtgcagcacgacaacaagaccgtgcacagcaccgactttgaagtgaaaaccgactccaccgaccacgtgaagcccaaagagacagagaacaccaagcagcccagcaagagctgccacaagcccaaggccatcgtgcacaccgagaaagtgaacatgatgagcctgaccgtgctgggcctgcggatgctgttcgccaaaaccgtggccgtgaacttcctgctgaccgccaagctgttcttcctcaggagtaagaggagcaggctcctgcacagtgactacatgaacatgactccacgccgccccggacccacccgcaagcattaccagccctatgccccaccacgcgacttcgcagcctatcgctccagagtgaagttcagcagaagcgccgacgcccctgcctaccagcagggacagaaccaactgtacaacgagctgaacctgggcagacgggaagagtacgacgtgctggacaagcggagaggcagggaccctgagatgggcggaaagccccagcggagaaagaacccccaggaaggactgtataacgaactccagaaagacaagatggccgaagcctacagcgagatcggcatgaagggcgagcggagaagaggcaagggccacgatggcctgtaccagggcctgagcaccgccaccaaggacacctatgacgccctgcacatgcaggccctgcctccaaga

SEQ ID NO: 25902 - DNA, 765 bp, synthetic construct
  source 1..765: mol_type = other DNA
ggcaagtacaacgccgtgaagctggggaagtacgaggacagcaacagcgtgacctgctccgtgcagcacgacaacaagaccgtgcacagcaccgactttgaagtgaaaaccgactccaccgaccacgtgaagcccaaagagacagagaacaccaagcagcccagcaagagctgccacaagcccaaggccatcgtgcacaccgagaaagtgaacatgatgagcctgaccgtgctgggcctgcggatgctgttcgccaaaaccgtggccgtgaacttcctgctgaccgccaagctgttcttcctcaggagtaagaggagcaggctcctgcacagtgactacatgaacatgactccacgccgccccggacccacccgcaagcattaccagccctatgccccaccacgcgacttcgcagcctatcgctccagagtgaagttcagcagaagcgccgacgcccctgcctaccagcagggacagaaccaactgtacaacgagctgaacctgggcagacgggaagagtacgacgtgctggacaagcggagaggcagggaccctgagatgggcggaaagccccagcggagaaagaacccccaggaaggactgtataacgaactccagaaagacaagatggccgaagcctacagcgagatcggcatgaagggcgagcggagaagaggcaagggccacgatggcctgtaccagggcctgagcaccgccaccaaggacacctatgacgccctgcacatgcaggccctgcctccaaga

SEQ ID NO: 25903 - DNA, 762 bp, synthetic construct
  source 1..762: mol_type = other DNA
aagtacaacgccgtgaagctggggaagtacgaggacagcaacagcgtgacctgctccgtgcagcacgacaacaagaccgtgcacagcaccgactttgaagtgaaaaccgactccaccgaccacgtgaagcccaaagagacagagaacaccaagcagcccagcaagagctgccacaagcccaaggccatcgtgcacaccgagaaagtgaacatgatgagcctgaccgtgctgggcctgcggatgctgttcgccaaaaccgtggccgtgaacttcctgctgaccgccaagctgttcttcctcaggagtaagaggagcaggctcctgcacagtgactacatgaacatgactccacgccgccccggacccacccgcaagcattaccagccctatgccccaccacgcgacttcgcagcctatcgctccagagtgaagttcagcagaagcgccgacgcccctgcctaccagcagggacagaaccaactgtacaacgagctgaacctgggcagacgggaagagtacgacgtgctggacaagcggagaggcagggaccctgagatgggcggaaagccccagcggagaaagaacccccaggaaggactgtataacgaactccagaaagacaagatggccgaagcctacagcgagatcggcatgaagggcgagcggagaagaggcaagggccacgatggcctgtaccagggcctgagcaccgccaccaaggacacctatgacgccctgcacatgcaggccctgcctccaaga

SEQ ID NO: 25904 - DNA, 759 bp, synthetic construct
  source 1..759: mol_type = other DNA
tacaacgccgtgaagctggggaagtacgaggacagcaacagcgtgacctgctccgtgcagcacgacaacaagaccgtgcacagcaccgactttgaagtgaaaaccgactccaccgaccacgtgaagcccaaagagacagagaacaccaagcagcccagcaagagctgccacaagcccaaggccatcgtgcacaccgagaaagtgaacatgatgagcctgaccgtgctgggcctgcggatgctgttcgccaaaaccgtggccgtgaacttcctgctgaccgccaagctgttcttcctcaggagtaagaggagcaggctcctgcacagtgactacatgaacatgactccacgccgccccggacccacccgcaagcattaccagccctatgccccaccacgcgacttcgcagcctatcgctccagagtgaagttcagcagaagcgccgacgcccctgcctaccagcagggacagaaccaactgtacaacgagctgaacctgggcagacgggaagagtacgacgtgctggacaagcggagaggcagggaccctgagatgggcggaaagccccagcggagaaagaacccccaggaaggactgtataacgaactccagaaagacaagatggccgaagcctacagcgagatcggcatgaagggcgagcggagaagaggcaagggccacgatggcctgtaccagggcctgagcaccgccaccaaggacacctatgacgccctgcacatgcaggccctgcctccaaga

SEQ ID NO: 25905 - DNA, 756 bp, synthetic construct
  source 1..756: mol_type = other DNA
aacgccgtgaagctggggaagtacgaggacagcaacagcgtgacctgctccgtgcagcacgacaacaagaccgtgcacagcaccgactttgaagtgaaaaccgactccaccgaccacgtgaagcccaaagagacagagaacaccaagcagcccagcaagagctgccacaagcccaaggccatcgtgcacaccgagaaagtgaacatgatgagcctgaccgtgctgggcctgcggatgctgttcgccaaaaccgtggccgtgaacttcctgctgaccgccaagctgttcttcctcaggagtaagaggagcaggctcctgcacagtgactacatgaacatgactccacgccgccccggacccacccgcaagcattaccagccctatgccccaccacgcgacttcgcagcctatcgctccagagtgaagttcagcagaagcgccgacgcccctgcctaccagcagggacagaaccaactgtacaacgagctgaacctgggcagacgggaagagtacgacgtgctggacaagcggagaggcagggaccctgagatgggcggaaagccccagcggagaaagaacccccaggaaggactgtataacgaactccagaaagacaagatggccgaagcctacagcgagatcggcatgaagggcgagcggagaagaggcaagggccacgatggcctgtaccagggcctgagcaccgccaccaaggacacctatgacgccctgcacatgcaggccctgcctccaaga

SEQ ID NO: 25906 - DNA, 753 bp, synthetic construct
  source 1..753: mol_type = other DNA
gccgtgaagctggggaagtacgaggacagcaacagcgtgacctgctccgtgcagcacgacaacaagaccgtgcacagcaccgactttgaagtgaaaaccgactccaccgaccacgtgaagcccaaagagacagagaacaccaagcagcccagcaagagctgccacaagcccaaggccatcgtgcacaccgagaaagtgaacatgatgagcctgaccgtgctgggcctgcggatgctgttcgccaaaaccgtggccgtgaacttcctgctgaccgccaagctgttcttcctcaggagtaagaggagcaggctcctgcacagtgactacatgaacatgactccacgccgccccggacccacccgcaagcattaccagccctatgccccaccacgcgacttcgcagcctatcgctccagagtgaagttcagcagaagcgccgacgcccctgcctaccagcagggacagaaccaactgtacaacgagctgaacctgggcagacgggaagagtacgacgtgctggacaagcggagaggcagggaccctgagatgggcggaaagccccagcggagaaagaacccccaggaaggactgtataacgaactccagaaagacaagatggccgaagcctacagcgagatcggcatgaagggcgagcggagaagaggcaagggccacgatggcctgtaccagggcctgagcaccgccaccaaggacacctatgacgccctgcacatgcaggccctgcctccaaga

SEQ ID NO: 25907 - DNA, 750 bp, synthetic construct
  source 1..750: mol_type = other DNA
gtgaagctggggaagtacgaggacagcaacagcgtgacctgctccgtgcagcacgacaacaagaccgtgcacagcaccgactttgaagtgaaaaccgactccaccgaccacgtgaagcccaaagagacagagaacaccaagcagcccagcaagagctgccacaagcccaaggccatcgtgcacaccgagaaagtgaacatgatgagcctgaccgtgctgggcctgcggatgctgttcgccaaaaccgtggccgtgaacttcctgctgaccgccaagctgttcttcctcaggagtaagaggagcaggctcctgcacagtgactacatgaacatgactccacgccgccccggacccacccgcaagcattaccagccctatgccccaccacgcgacttcgcagcctatcgctccagagtgaagttcagcagaagcgccgacgcccctgcctaccagcagggacagaaccaactgtacaacgagctgaacctgggcagacgggaagagtacgacgtgctggacaagcggagaggcagggaccctgagatgggcggaaagccccagcggagaaagaacccccaggaaggactgtataacgaactccagaaagacaagatggccgaagcctacagcgagatcggcatgaagggcgagcggagaagaggcaagggccacgatggcctgtaccagggcctgagcaccgccaccaaggacacctatgacgccctgcacatgcaggccctgcctccaaga

SEQ ID NO: 25908 - DNA, 747 bp, synthetic construct
  source 1..747: mol_type = other DNA
aagctggggaagtacgaggacagcaacagcgtgacctgctccgtgcagcacgacaacaagaccgtgcacagcaccgactttgaagtgaaaaccgactccaccgaccacgtgaagcccaaagagacagagaacaccaagcagcccagcaagagctgccacaagcccaaggccatcgtgcacaccgagaaagtgaacatgatgagcctgaccgtgctgggcctgcggatgctgttcgccaaaaccgtggccgtgaacttcctgctgaccgccaagctgttcttcctcaggagtaagaggagcaggctcctgcacagtgactacatgaacatgactccacgccgccccggacccacccgcaagcattaccagccctatgccccaccacgcgacttcgcagcctatcgctccagagtgaagttcagcagaagcgccgacgcccctgcctaccagcagggacagaaccaactgtacaacgagctgaacctgggcagacgggaagagtacgacgtgctggacaagcggagaggcagggaccctgagatgggcggaaagccccagcggagaaagaacccccaggaaggactgtataacgaactccagaaagacaagatggccgaagcctacagcgagatcggcatgaagggcgagcggagaagaggcaagggccacgatggcctgtaccagggcctgagcaccgccaccaaggacacctatgacgccctgcacatgcaggccctgcctccaaga

SEQ ID NO: 25909 - DNA, 744 bp, synthetic construct
  source 1..744: mol_type = other DNA
ctggggaagtacgaggacagcaacagcgtgacctgctccgtgcagcacgacaacaagaccgtgcacagcaccgactttgaagtgaaaaccgactccaccgaccacgtgaagcccaaagagacagagaacaccaagcagcccagcaagagctgccacaagcccaaggccatcgtgcacaccgagaaagtgaacatgatgagcctgaccgtgctgggcctgcggatgctgttcgccaaaaccgtggccgtgaacttcctgctgaccgccaagctgttcttcctcaggagtaagaggagcaggctcctgcacagtgactacatgaacatgactccacgccgccccggacccacccgcaagcattaccagccctatgccccaccacgcgacttcgcagcctatcgctccagagtgaagttcagcagaagcgccgacgcccctgcctaccagcagggacagaaccaactgtacaacgagctgaacctgggcagacgggaagagtacgacgtgctggacaagcggagaggcagggaccctgagatgggcggaaagccccagcggagaaagaacccccaggaaggactgtataacgaactccagaaagacaagatggccgaagcctacagcgagatcggcatgaagggcgagcggagaagaggcaagggccacgatggcctgtaccagggcctgagcaccgccaccaaggacacctatgacgccctgcacatgcaggccctgcctccaaga

SEQ ID NO: 25910 - DNA, 741 bp, synthetic construct
  source 1..741: mol_type = other DNA
gggaagtacgaggacagcaacagcgtgacctgctccgtgcagcacgacaacaagaccgtgcacagcaccgactttgaagtgaaaaccgactccaccgaccacgtgaagcccaaagagacagagaacaccaagcagcccagcaagagctgccacaagcccaaggccatcgtgcacaccgagaaagtgaacatgatgagcctgaccgtgctgggcctgcggatgctgttcgccaaaaccgtggccgtgaacttcctgctgaccgccaagctgttcttcctcaggagtaagaggagcaggctcctgcacagtgactacatgaacatgactccacgccgccccggacccacccgcaagcattaccagccctatgccccaccacgcgacttcgcagcctatcgctccagagtgaagttcagcagaagcgccgacgcccctgcctaccagcagggacagaaccaactgtacaacgagctgaacctgggcagacgggaagagtacgacgtgctggacaagcggagaggcagggaccctgagatgggcggaaagccccagcggagaaagaacccccaggaaggactgtataacgaactccagaaagacaagatggccgaagcctacagcgagatcggcatgaagggcgagcggagaagaggcaagggccacgatggcctgtaccagggcctgagcaccgccaccaaggacacctatgacgccctgcacatgcaggccctgcctccaaga

SEQ ID NO: 25911 - DNA, 738 bp, synthetic construct
  source 1..738: mol_type = other DNA
aagtacgaggacagcaacagcgtgacctgctccgtgcagcacgacaacaagaccgtgcacagcaccgactttgaagtgaaaaccgactccaccgaccacgtgaagcccaaagagacagagaacaccaagcagcccagcaagagctgccacaagcccaaggccatcgtgcacaccgagaaagtgaacatgatgagcctgaccgtgctgggcctgcggatgctgttcgccaaaaccgtggccgtgaacttcctgctgaccgccaagctgttcttcctcaggagtaagaggagcaggctcctgcacagtgactacatgaacatgactccacgccgccccggacccacccgcaagcattaccagccctatgccccaccacgcgacttcgcagcctatcgctccagagtgaagttcagcagaagcgccgacgcccctgcctaccagcagggacagaaccaactgtacaacgagctgaacctgggcagacgggaagagtacgacgtgctggacaagcggagaggcagggaccctgagatgggcggaaagccccagcggagaaagaacccccaggaaggactgtataacgaactccagaaagacaagatggccgaagcctacagcgagatcggcatgaagggcgagcggagaagaggcaagggccacgatggcctgtaccagggcctgagcaccgccaccaaggacacctatgacgccctgcacatgcaggccctgcctccaaga

SEQ ID NO: 25912 - DNA, 735 bp, synthetic construct
  source 1..735: mol_type = other DNA
tacgaggacagcaacagcgtgacctgctccgtgcagcacgacaacaagaccgtgcacagcaccgactttgaagtgaaaaccgactccaccgaccacgtgaagcccaaagagacagagaacaccaagcagcccagcaagagctgccacaagcccaaggccatcgtgcacaccgagaaagtgaacatgatgagcctgaccgtgctgggcctgcggatgctgttcgccaaaaccgtggccgtgaacttcctgctgaccgccaagctgttcttcctcaggagtaagaggagcaggctcctgcacagtgactacatgaacatgactccacgccgccccggacccacccgcaagcattaccagccctatgccccaccacgcgacttcgcagcctatcgctccagagtgaagttcagcagaagcgccgacgcccctgcctaccagcagggacagaaccaactgtacaacgagctgaacctgggcagacgggaagagtacgacgtgctggacaagcggagaggcagggaccctgagatgggcggaaagccccagcggagaaagaacccccaggaaggactgtataacgaactccagaaagacaagatggccgaagcctacagcgagatcggcatgaagggcgagcggagaagaggcaagggccacgatggcctgtaccagggcctgagcaccgccaccaaggacacctatgacgccctgcacatgcaggccctgcctccaaga

SEQ ID NO: 25913 - DNA, 732 bp, synthetic construct
  source 1..732: mol_type = other DNA
gaggacagcaacagcgtgacctgctccgtgcagcacgacaacaagaccgtgcacagcaccgactttgaagtgaaaaccgactccaccgaccacgtgaagcccaaagagacagagaacaccaagcagcccagcaagagctgccacaagcccaaggccatcgtgcacaccgagaaagtgaacatgatgagcctgaccgtgctgggcctgcggatgctgttcgccaaaaccgtggccgtgaacttcctgctgaccgccaagctgttcttcctcaggagtaagaggagcaggctcctgcacagtgactacatgaacatgactccacgccgccccggacccacccgcaagcattaccagccctatgccccaccacgcgacttcgcagcctatcgctccagagtgaagttcagcagaagcgccgacgcccctgcctaccagcagggacagaaccaactgtacaacgagctgaacctgggcagacgggaagagtacgacgtgctggacaagcggagaggcagggaccctgagatgggcggaaagccccagcggagaaagaacccccaggaaggactgtataacgaactccagaaagacaagatggccgaagcctacagcgagatcggcatgaagggcgagcggagaagaggcaagggccacgatggcctgtaccagggcctgagcaccgccaccaaggacacctatgacgccctgcacatgcaggccctgcctccaaga
